United States Patent Application Publication US 2026/0226133 A1 - sequence listing, part 10

SEQ ID NO: 18152 - DNA, 3441 bp, synthetic construct
  source 1..3441: mol_type = other DNA
atggccttaccagtgaccgccttgctcctgccgctggccttgctgctccacgccgccaggccgctcgaggaggcctctacaaagggaccctccgtgtttcctctggctcccagcagcaagtctacaagcggaggaacagccgctctgggctgcctggtcaaggattactttcccgagcctgtgaccgtgtcctggaatagcggagcactgacaagcggcgtgcacacctttccagccgtgctgcaaagcagcggcctgtactctctgagcagcgtggtcacagtgcctagctctagcctgggcacccagacctacatctgcaatgtgaaccacaagcctagcaacaccaaggtggacaagagagtggaacccaagagctgtggcagagccgattgcggctttaccagcgagagctaccagcagggcgtgctgagcgccaccatcctgtacgagatcctgctgggcaaggccaccctgtacgccgtgctggtgtctgccctggtgctgatggctatggtcaagcggaaggacagccggggaagggccaagcgatctggatctggagcaacaaacttctcactactcaaacaagcaggtgacgtggaggagaatcccgggcctactagcatggccttaccagtgaccgccttgctcctgccgctggccttgctgctccacgccgccaggccggaggttcagctgcttgagtctggcggaggactggttcaacctggcggaagcctgagactgtcttgtgccgccagcggcttcacctttagcagctacgccatgagctgggtccgacaggctcctggcaaaggactggaatgggtgtccagcatcagcggcagcggcgactacatctactacgccgatagcgtgaagggcagattcaccatcagccgggacatcagcaagaacaccctgtacctccagatgaacagcctgagagccgaggacaccgccgtgtactactgtgccaaagaaggcaccggcgctaacagcagcctggccgattatagaggccagggcacactggtcaccgtgtctagtggcggaggaagcggcggaggatctcaggtccagctcgtcgagtccggcggcggcctcgtccaggccggcgactccgtcaccctctcctgcaccgcctccggccgcaccttctcctcctacgccctcgcctggttccgccagcgccccggcaaggagcgcgagttcgtcgccggcctccgctggggcggccccaccaactacgccgactccgtcaaggaccgcttcaccatctccggcgactccgccaagcacaccatgtacctccagatgaactccctcaagcccgaggacaccgccgtctactactgcggctacaaccccggcggctgggccgtcccctcccagtacgagtacgactcctggggccagggcacccaggtcaccgtctcctccggtaccggcggaggcggatctggcggcggaggtagcggtggcggaggatctgaattcgacatccagatgacacagagccctagcagcctgtctgccagcgtgggagacagagtgaccatcacatgcaaggccagcgaccacatcaacaactggctggcctggtatcagcagaagcctggacaggcccctaagctgctgatctacggcgctaccacactggaaacaggcgtgcccagcagattttctggcagcggctctggcaccgactacaccctgacaatatccagcctccagcctgaggacttcgccacctactactgtcagcagagctggaacaccccttggacattcggccagggcaccaagctggaaatcaagagaggcggaggcggaagtggaggcggaggatctggcggcggaggctctcaagttcagcttcaacagcctggcgctgagctggtcaaacctggcgcttctgtgaagatgagctgcaaagccagcggctacgccttcagcagctactggatcaactggatgaagcagaaacccggccagggactcgaatggatcggccaaatctatcccggcgacggcgacaccaactacaacggcaagttcaagggcagagccacactgaccgccgatacctctagcagcacagcctacatgcagctgagcagcctgaccagcgaagatagcgccgtgtacttctgtgcccggtccatcacaacagtcgtgggctgcgctatggactattggggccagggaacaagcgtgaccgtgtctagtacgcgtggacagcctaaggccaatcctaccgtgacactgttccctccaagcagcgaagaactccaggccaacaaggccacacttgtgtgcctgatctccgacttctaccctggggctgtgacagtggcttggaaggccgatggatctcctgtgaaagccggcgtggaaaccaccaagccatccaagcagagcaacaacaaatacgccgccagctcctacctgagcctgacacctgagcagtggaagtcccacagatcctacagctgccaagtgacccacgaaggcagcaccgtggaaaagacagtggcccctacagagtgcagcatccccgaggacacattcttcccaagccccgagagcagctgcgacgtgaagctggtggaaaagagcttcgagacagacaccaacctgaacttccagaacctgagcgtgatcggcttcagaatcctgctgctgaaagtggccggctttaacctgctgatgaccctgcggctgtggtccagccgcgccaagagaagcggatctggcgtgaagcagaccctgaatttcgacctgctgaagctggctggcgacgtggaatccaacccaggcccttctagaggccatatgaccgagtacaagcccacggtgcgcctcgccacccgcgacgacgtccccagggccgtacgcaccctcgccgccgcgttcgccgactaccccgccacgcgccacaccgtcgatccggaccgccacatcgagcgggtcaccgagctgcaagaactcttcctcacgcgcgtcgggctcgacatcggcaaggtgtgggtcgcggacgacggcgccgcggtggcggtctggaccacgccggagagcgtcgaagcgggggcggtgttcgccgagatcggcccgcgcatggccgagttgagcggttcccggctggccgcgcagcaacagatggaaggcctcctggcgccgcaccggcccaaggagcccgcgtggttcctggccaccgtcggcgtctcgcccgaccaccagggcaagggtctgggcagcgccgtcgtgctccccggagtggaggcggccgagcgcgccggggtgcccgccttcctggagacctccgcgccccgcaacctccccttctacgagcggctcggcttcaccgtcaccgccgacgtcgaggtgcccgaaggaccgcgcacctggtgcatgacccgcaagcccggtgcctga

SEQ ID NO: 18153 - DNA, 3435 bp, synthetic construct
  source 1..3435: mol_type = other DNA
atggccttaccagtgaccgccttgctcctgccgctggccttgctgctccacgccgccaggccgctcgaggaggcctctacaaagggaccctccgtgtttcctctggctcccagcagcaagtctacaagcggaggaacagccgctctgggctgcctggtcaaggattactttcccgagcctgtgaccgtgtcctggaatagcggagcactgacaagcggcgtgcacacctttccagccgtgctgcaaagcagcggcctgtactctctgagcagcgtggtcacagtgcctagctctagcctgggcacccagacctacatctgcaatgtgaaccacaagcctagcaacaccaaggtggacaagagagtggaacccaagagctgtggcagagccgattgcggctttaccagcgagagctaccagcagggcgtgctgagcgccaccatcctgtacgagatcctgctgggcaaggccaccctgtacgccgtgctggtgtctgccctggtgctgatggctatggtcaagcggaaggacagccggggaagggccaagcgatctggatctggagcaacaaacttctcactactcaaacaagcaggtgacgtggaggagaatcccgggcctactagcatggccttaccagtgaccgccttgctcctgccgctggccttgctgctccacgccgccaggccgggcgtgacacagagccccacacacctgattaagaccagaggccagcaggccacactgagatgcagccctatcagcggccacaccagcgtgtactggtatcagcaggctctcggactgggcctccagttcctgctttggtacgacgagggcgaagagagaaaccggggcaacttccctcctcggttttccggcagacagttccccaactacagcagcgagctgaacgtgaacgccctggaactggaagatagcgccctgtacctgtgtgcctcttctcttggtggacctcgcggactggctggactgagaggggatgagcagtttttcggccctggcaccagactgaccgtgctggaaggcggaggaagcggcggaggatctcaggtccagctcgtcgagtccggcggcggcctcgtccaggccggcgactccgtcaccctctcctgcaccgcctccggccgcaccttctcctcctacgccctcgcctggttccgccagcgccccggcaaggagcgcgagttcgtcgccggcctccgctggggcggccccaccaactacgccgactccgtcaaggaccgcttcaccatctccggcgactccgccaagcacaccatgtacctccagatgaactccctcaagcccgaggacaccgccgtctactactgcggctacaaccccggcggctgggccgtcccctcccagtacgagtacgactcctggggccagggcacccaggtcaccgtctcctccggtaccggcggaggcggatctggcggcggaggtagcggtggcggaggatctgaattcgacatccagatgacacagagccctagcagcctgtctgccagcgtgggagacagagtgaccatcacatgcaaggccagcgaccacatcaacaactggctggcctggtatcagcagaagcctggacaggcccctaagctgctgatctacggcgctaccacactggaaacaggcgtgcccagcagattttctggcagcggctctggcaccgactacaccctgacaatatccagcctccagcctgaggacttcgccacctactactgtcagcagagctggaacaccccttggacattcggccagggcaccaagctggaaatcaagagaggcggaggcggaagtggaggcggaggatctggcggcggaggctctcaagttcagcttcaacagcctggcgctgagctggtcaaacctggcgcttctgtgaagatgagctgcaaagccagcggctacgccttcagcagctactggatcaactggatgaagcagaaacccggccagggactcgaatggatcggccaaatctatcccggcgacggcgacaccaactacaacggcaagttcaagggcagagccacactgaccgccgatacctctagcagcacagcctacatgcagctgagcagcctgaccagcgaagatagcgccgtgtacttctgtgcccggtccatcacaacagtcgtgggctgcgctatggactattggggccagggaacaagcgtgaccgtgtctagtacgcgtggacagcctaaggccaatcctaccgtgacactgttccctccaagcagcgaagaactccaggccaacaaggccacacttgtgtgcctgatctccgacttctaccctggggctgtgacagtggcttggaaggccgatggatctcctgtgaaagccggcgtggaaaccaccaagccatccaagcagagcaacaacaaatacgccgccagctcctacctgagcctgacacctgagcagtggaagtcccacagatcctacagctgccaagtgacccacgaaggcagcaccgtggaaaagacagtggcccctacagagtgcagcatccccgaggacacattcttcccaagccccgagagcagctgcgacgtgaagctggtggaaaagagcttcgagacagacaccaacctgaacttccagaacctgagcgtgatcggcttcagaatcctgctgctgaaagtggccggctttaacctgctgatgaccctgcggctgtggtccagccgcgccaagagaagcggatctggcgtgaagcagaccctgaatttcgacctgctgaagctggctggcgacgtggaatccaacccaggcccttctagaggccatatgaccgagtacaagcccacggtgcgcctcgccacccgcgacgacgtccccagggccgtacgcaccctcgccgccgcgttcgccgactaccccgccacgcgccacaccgtcgatccggaccgccacatcgagcgggtcaccgagctgcaagaactcttcctcacgcgcgtcgggctcgacatcggcaaggtgtgggtcgcggacgacggcgccgcggtggcggtctggaccacgccggagagcgtcgaagcgggggcggtgttcgccgagatcggcccgcgcatggccgagttgagcggttcccggctggccgcgcagcaacagatggaaggcctcctggcgccgcaccggcccaaggagcccgcgtggttcctggccaccgtcggcgtctcgcccgaccaccagggcaagggtctgggcagcgccgtcgtgctccccggagtggaggcggccgagcgcgccggggtgcccgccttcctggagacctccgcgccccgcaacctccccttctacgagcggctcggcttcaccgtcaccgccgacgtcgaggtgcccgaaggaccgcgcacctggtgcatgacccgcaagcccggtgcctga

SEQ ID NO: 18154 - DNA, 3417 bp, synthetic construct
  source 1..3417: mol_type = other DNA
atggccttaccagtgaccgccttgctcctgccgctggccttgctgctccacgccgccaggccgctcgaggaggcctctacaaagggaccctccgtgtttcctctggctcccagcagcaagtctacaagcggaggaacagccgctctgggctgcctggtcaaggattactttcccgagcctgtgaccgtgtcctggaatagcggagcactgacaagcggcgtgcacacctttccagccgtgctgcaaagcagcggcctgtactctctgagcagcgtggtcacagtgcctagctctagcctgggcacccagacctacatctgcaatgtgaaccacaagcctagcaacaccaaggtggacaagagagtggaacccaagagctgtggcagagccgattgcggctttaccagcgagagctaccagcagggcgtgctgagcgccaccatcctgtacgagatcctgctgggcaaggccaccctgtacgccgtgctggtgtctgccctggtgctgatggctatggtcaagcggaaggacagccggggaagggccaagcgatctggatctggagcaacaaacttctcactactcaaacaagcaggtgacgtggaggagaatcccgggcctactagcatggccttaccagtgaccgccttgctcctgccgctggccttgctgctccacgccgccaggccgggcgtgacacagagccccacacacctgattaagaccagaggccagcaggccacactgagatgcagccctatcagcggccacaccagcgtgtactggtatcagcaggctctcggactgggcctccagttcctgctttggtacgacgagggcgaagagagaaaccggggcaacttccctcctcggttttccggcagacagttccccaactacagcagcgagctgaacgtgaacgccctggaactggaagatagcgccctgtacctgtgtgcctcttctcttggtggacctcgcggactggctggactgagaggggatgagcagtttttcggccctggcaccagactgaccgtgctggaaggcggaggaagcggcggaggatctggcgtgacacagagccccacacacctgattaagaccagaggccagcaggccacactgagatgcagccctatcagcggccacaccagcgtgtactggtatcagcaggctctcggactgggcctccagttcctgctttggtacgacgagggcgaagagagaaaccggggcaacttccctcctcggttttccggcagacagttccccaactacagcagcgagctgaacgtgaacgccctggaactggaagatagcgccctgtacctgtgtgccagctctctcggcggagatgaactgggagccgatggcaacgagcagttctttggccctggcaccagactgaccgtgctggaaggtaccggcggaggcggatctggcggcggaggtagcggtggcggaggatctgaattcgacatccagatgacacagagccctagcagcctgtctgccagcgtgggagacagagtgaccatcacatgcaaggccagcgaccacatcaacaactggctggcctggtatcagcagaagcctggacaggcccctaagctgctgatctacggcgctaccacactggaaacaggcgtgcccagcagattttctggcagcggctctggcaccgactacaccctgacaatatccagcctccagcctgaggacttcgccacctactactgtcagcagagctggaacaccccttggacattcggccagggcaccaagctggaaatcaagagaggcggaggcggaagtggaggcggaggatctggcggcggaggctctcaagttcagcttcaacagcctggcgctgagctggtcaaacctggcgcttctgtgaagatgagctgcaaagccagcggctacgccttcagcagctactggatcaactggatgaagcagaaacccggccagggactcgaatggatcggccaaatctatcccggcgacggcgacaccaactacaacggcaagttcaagggcagagccacactgaccgccgatacctctagcagcacagcctacatgcagctgagcagcctgaccagcgaagatagcgccgtgtacttctgtgcccggtccatcacaacagtcgtgggctgcgctatggactattggggccagggaacaagcgtgaccgtgtctagtacgcgtggacagcctaaggccaatcctaccgtgacactgttccctccaagcagcgaagaactccaggccaacaaggccacacttgtgtgcctgatctccgacttctaccctggggctgtgacagtggcttggaaggccgatggatctcctgtgaaagccggcgtggaaaccaccaagccatccaagcagagcaacaacaaatacgccgccagctcctacctgagcctgacacctgagcagtggaagtcccacagatcctacagctgccaagtgacccacgaaggcagcaccgtggaaaagacagtggcccctacagagtgcagcatccccgaggacacattcttcccaagccccgagagcagctgcgacgtgaagctggtggaaaagagcttcgagacagacaccaacctgaacttccagaacctgagcgtgatcggcttcagaatcctgctgctgaaagtggccggctttaacctgctgatgaccctgcggctgtggtccagccgcgccaagagaagcggatctggcgtgaagcagaccctgaatttcgacctgctgaagctggctggcgacgtggaatccaacccaggcccttctagaggccatatgaccgagtacaagcccacggtgcgcctcgccacccgcgacgacgtccccagggccgtacgcaccctcgccgccgcgttcgccgactaccccgccacgcgccacaccgtcgatccggaccgccacatcgagcgggtcaccgagctgcaagaactcttcctcacgcgcgtcgggctcgacatcggcaaggtgtgggtcgcggacgacggcgccgcggtggcggtctggaccacgccggagagcgtcgaagcgggggcggtgttcgccgagatcggcccgcgcatggccgagttgagcggttcccggctggccgcgcagcaacagatggaaggcctcctggcgccgcaccggcccaaggagcccgcgtggttcctggccaccgtcggcgtctcgcccgaccaccagggcaagggtctgggcagcgccgtcgtgctccccggagtggaggcggccgagcgcgccggggtgcccgccttcctggagacctccgcgccccgcaacctccccttctacgagcggctcggcttcaccgtcaccgccgacgtcgaggtgcccgaaggaccgcgcacctggtgcatgacccgcaagcccggtgcctga

SEQ ID NO: 18155 - DNA, 2277 bp, synthetic construct
  source 1..2277: mol_type = other DNA
atggccttaccagtgaccgccttgctcctgccgctggccttgctgctccacgccgccaggccgctcgaggaggcctctacaaagggaccctccgtgtttcctctggctcccagcagcaagtctacaagcggaggaacagccgctctgggctgcctggtcaaggattactttcccgagcctgtgaccgtgtcctggaatagcggagcactgacaagcggcgtgcacacctttccagccgtgctgcaaagcagcggcctgtactctctgagcagcgtggtcacagtgcctagctctagcctgggcacccagacctacatctgcaatgtgaaccacaagcctagcaacaccaaggtggacaagagagtggaacccaagagctgtggcagagccgattgcggctttaccagcgagagctaccagcagggcgtgctgagcgccaccatcctgtacgagatcctgctgggcaaggccaccctgtacgccgtgctggtgtctgccctggtgctgatggctatggtcaagcggaaggacagccggggaagggccaagcgatctggatctggagcaacaaacttctcactactcaaacaagcaggtgacgtggaggagaatcccgggcctactagcatggccctgcccgtgacagccctgctgctgcctctggctctgctgctgcacgccgccagacccgatgaattcggctctgacctgggcatcaagctgctgttcgccgctgccaagggccaggacgacgaagtgcggattctgctggctgctggggccgacgtgaacgccaaggatttcgagggctacacccccctgcacgtggccgcctatgatggacacctggaaatcgtggaagtgctgctgaaggctggcgctgatgtgaatgccaaagacagccagggccggacccctctgcatgaagccgcctacagcggccatctggaaattgtggaagtgctgctgaaagccggggcagacgtgaacgctcaggacgacgctggcgagacaccagccgatctggctgcagcttggggccacgaagatatcgccgaggtgctgcagaagacgcgtggacagcctaaggccaatcctaccgtgacactgttccctccaagcagcgaagaactccaggccaacaaggccacacttgtgtgcctgatctccgacttctaccctggggctgtgacagtggcttggaaggccgatggatctcctgtgaaagccggcgtggaaaccaccaagccatccaagcagagcaacaacaaatacgccgccagctcctacctgagcctgacacctgagcagtggaagtcccacagatcctacagctgccaagtgacccacgaaggcagcaccgtggaaaagacagtggcccctacagagtgcagcatccccgaggacacattcttcccaagccccgagagcagctgcgacgtgaagctggtggaaaagagcttcgagacagacaccaacctgaacttccagaacctgagcgtgatcggcttcagaatcctgctgctgaaagtggccggctttaacctgctgatgaccctgcggctgtggtccagccgcgccaagagaagcggatctggcgtgaagcagaccctgaatttcgacctgctgaagctggctggcgacgtggaatccaacccaggcccttctagaggccatatgaccgagtacaagcccacggtgcgcctcgccacccgcgacgacgtccccagggccgtacgcaccctcgccgccgcgttcgccgactaccccgccacgcgccacaccgtcgatccggaccgccacatcgagcgggtcaccgagctgcaagaactcttcctcacgcgcgtcgggctcgacatcggcaaggtgtgggtcgcggacgacggcgccgcggtggcggtctggaccacgccggagagcgtcgaagcgggggcggtgttcgccgagatcggcccgcgcatggccgagttgagcggttcccggctggccgcgcagcaacagatggaaggcctcctggcgccgcaccggcccaaggagcccgcgtggttcctggccaccgtcggcgtctcgcccgaccaccagggcaagggtctgggcagcgccgtcgtgctccccggagtggaggcggccgagcgcgccggggtgcccgccttcctggagacctccgcgccccgcaacctccccttctacgagcggctcggcttcaccgtcaccgccgacgtcgaggtgcccgaaggaccgcgcacctggtgcatgacccgcaagcccggtgcctga

SEQ ID NO: 18156 - DNA, 2064 bp, synthetic construct
  source 1..2064: mol_type = other DNA
atggccttaccagtgaccgccttgctcctgccgctggccttgctgctccacgccgccaggccgctcgaggaggcctctacaaagggaccctccgtgtttcctctggctcccagcagcaagtctacaagcggaggaacagccgctctgggctgcctggtcaaggattactttcccgagcctgtgaccgtgtcctggaatagcggagcactgacaagcggcgtgcacacctttccagccgtgctgcaaagcagcggcctgtactctctgagcagcgtggtcacagtgcctagctctagcctgggcacccagacctacatctgcaatgtgaaccacaagcctagcaacaccaaggtggacaagagagtggaacccaagagctgtggcagagccgattgcggctttaccagcgagagctaccagcagggcgtgctgagcgccaccatcctgtacgagatcctgctgggcaaggccaccctgtacgccgtgctggtgtctgccctggtgctgatggctatggtcaagcggaaggacagccggggaagggccaagcgatctggatctggagcaacaaacttctcactactcaaacaagcaggtgacgtggaggagaatcccgggcctactagcatggactggatttggcgcatccttttccttgtcggcgctgctaccggcgcccattccttcgaaggcagcggattcgaatacgccaaagagatgcggaacgcctactgggagatcgccctgctgcccaatctgaccaaccagcagaagagagcccccatcagaaagctgtacgacgacccctcccagagcagcgagctgctgtctgaggctaaaaaactgaacgatagccagacgcgtggacagcctaaggccaatcctaccgtgacactgttccctccaagcagcgaagaactccaggccaacaaggccacacttgtgtgcctgatctccgacttctaccctggggctgtgacagtggcttggaaggccgatggatctcctgtgaaagccggcgtggaaaccaccaagccatccaagcagagcaacaacaaatacgccgccagctcctacctgagcctgacacctgagcagtggaagtcccacagatcctacagctgccaagtgacccacgaaggcagcaccgtggaaaagacagtggcccctacagagtgcagcatccccgaggacacattcttcccaagccccgagagcagctgcgacgtgaagctggtggaaaagagcttcgagacagacaccaacctgaacttccagaacctgagcgtgatcggcttcagaatcctgctgctgaaagtggccggctttaacctgctgatgaccctgcggctgtggtccagccgcgccaagagaagcggatctggcgtgaagcagaccctgaatttcgacctgctgaagctggctggcgacgtggaatccaacccaggcccttctagaggccatatgaccgagtacaagcccacggtgcgcctcgccacccgcgacgacgtccccagggccgtacgcaccctcgccgccgcgttcgccgactaccccgccacgcgccacaccgtcgatccggaccgccacatcgagcgggtcaccgagctgcaagaactcttcctcacgcgcgtcgggctcgacatcggcaaggtgtgggtcgcggacgacggcgccgcggtggcggtctggaccacgccggagagcgtcgaagcgggggcggtgttcgccgagatcggcccgcgcatggccgagttgagcggttcccggctggccgcgcagcaacagatggaaggcctcctggcgccgcaccggcccaaggagcccgcgtggttcctggccaccgtcggcgtctcgcccgaccaccagggcaagggtctgggcagcgccgtcgtgctccccggagtggaggcggccgagcgcgccggggtgcccgccttcctggagacctccgcgccccgcaacctccccttctacgagcggctcggcttcaccgtcaccgccgacgtcgaggtgcccgaaggaccgcgcacctggtgcatgacccgcaagcccggtgcctga

SEQ ID NO: 18157 - DNA, 2730 bp, synthetic construct
  source 1..2730: mol_type = other DNA
atggccttaccagtgaccgccttgctcctgccgctggccttgctgctccacgccgccaggccgctcgaggaggcctctacaaagggaccctccgtgtttcctctggctcccagcagcaagtctacaagcggaggaacagccgctctgggctgcctggtcaaggattactttcccgagcctgtgaccgtgtcctggaatagcggagcactgacaagcggcgtgcacacctttccagccgtgctgcaaagcagcggcctgtactctctgagcagcgtggtcacagtgcctagctctagcctgggcacccagacctacatctgcaatgtgaaccacaagcctagcaacaccaaggtggacaagagagtggaacccaagagctgtggcagagccgattgcggctttaccagcgagagctaccagcagggcgtgctgagcgccaccatcctgtacgagatcctgctgggcaaggccaccctgtacgccgtgctggtgtctgccctggtgctgatggctatggtcaagcggaaggacagccggggaagggccaagcgatctggatctggagcaacaaacttctcactactcaaacaagcaggtgacgtggaggagaatcccgggcctactagcatggccctgcccgtgacagccctgctgctgcctctggctctgctgctgcacgccgccagacccgatgaattcgaggtgcaactggtggaaagcggcggaggcctggtgcaggctggcggatctctgagactgagctgtgccgccagcggcatcaccttcagcatcaacacaatgggctggtacagacaggcccctggcaagcagagggaactggtggccctgatctccagcatcggcgacacctactacgccgacagcgtgaagggccggttcaccatcagccgggacaacgccaagaacaccgtgtacctccagatgaacagcctgaagcccgaggacaccgccgtgtactactgcaagcggttcagaacagccgcccagggcaccgattattggggccagggaacacaagtgaccgtgtcctctctcgagggaggaggcggctccgggggaggcggaagtggaggcggaggatctgggtctggaggaagcggatctggaggctcagggtcagggggctcaggcagtggaggctctttcgaagtgcaactggtggaatctgggggcggactggtgcagccaggcggaagtctgaggctgtcttgtgccgcctccggcagcatcttcggcttcaacgacatggcctggtatcggcaggctcccggaaaacagcgcgagctggtggctctgattagcagagtgggcgtgaccagcagcgccgactctgtgaagggcagattcacaatctccagagtgaacgccaaggatacagtgtacctccagatgaactctctgaaacctgaggatacagcagtgtactattgctacatggaccagcggctggacggcagcacactggcctactggggacagggaactcaagtgacagtgtctagcacgcgtggacagcctaaggccaatcctaccgtgacactgttccctccaagcagcgaagaactccaggccaacaaggccacacttgtgtgcctgatctccgacttctaccctggggctgtgacagtggcttggaaggccgatggatctcctgtgaaagccggcgtggaaaccaccaagccatccaagcagagcaacaacaaatacgccgccagctcctacctgagcctgacacctgagcagtggaagtcccacagatcctacagctgccaagtgacccacgaaggcagcaccgtggaaaagacagtggcccctacagagtgcagcatccccgaggacacattcttcccaagccccgagagcagctgcgacgtgaagctggtggaaaagagcttcgagacagacaccaacctgaacttccagaacctgagcgtgatcggcttcagaatcctgctgctgaaagtggccggctttaacctgctgatgaccctgcggctgtggtccagccgcgccaagagaagcggatctggcgtgaagcagaccctgaatttcgacctgctgaagctggctggcgacgtggaatccaacccaggcccttctagaggccatatgaccgagtacaagcccacggtgcgcctcgccacccgcgacgacgtccccagggccgtacgcaccctcgccgccgcgttcgccgactaccccgccacgcgccacaccgtcgatccggaccgccacatcgagcgggtcaccgagctgcaagaactcttcctcacgcgcgtcgggctcgacatcggcaaggtgtgggtcgcggacgacggcgccgcggtggcggtctggaccacgccggagagcgtcgaagcgggggcggtgttcgccgagatcggcccgcgcatggccgagttgagcggttcccggctggccgcgcagcaacagatggaaggcctcctggcgccgcaccggcccaaggagcccgcgtggttcctggccaccgtcggcgtctcgcccgaccaccagggcaagggtctgggcagcgccgtcgtgctccccggagtggaggcggccgagcgcgccggggtgcccgccttcctggagacctccgcgccccgcaacctccccttctacgagcggctcggcttcaccgtcaccgccgacgtcgaggtgcccgaaggaccgcgcacctggtgcatgacccgcaagcccggtgcctga

SEQ ID NO: 18158 - DNA, 2472 bp, synthetic construct
  source 1..2472: mol_type = other DNA
atggccttaccagtgaccgccttgctcctgccgctggccttgctgctccacgccgccaggccgctcgaggaggcctctacaaagggaccctccgtgtttcctctggctcccagcagcaagtctacaagcggaggaacagccgctctgggctgcctggtcaaggattactttcccgagcctgtgaccgtgtcctggaatagcggagcactgacaagcggcgtgcacacctttccagccgtgctgcaaagcagcggcctgtactctctgagcagcgtggtcacagtgcctagctctagcctgggcacccagacctacatctgcaatgtgaaccacaagcctagcaacaccaaggtggacaagagagtggaacccaagagctgtggcagagccgattgcggctttaccagcgagagctaccagcagggcgtgctgagcgccaccatcctgtacgagatcctgctgggcaaggccaccctgtacgccgtgctggtgtctgccctggtgctgatggctatggtcaagcggaaggacagccggggaagggccaagcgatctggatctggagcaacaaacttctcactactcaaacaagcaggtgacgtggaggagaatcccgggcctactagcatggcccttccagtcactgccttgctgttgcctctggcgctcctgctccacgccgctagaccgggcatgagaaccgaggacctgcctaaggccgtggtgttcctggaaccccagtggtacagagtgctggaaaaggacagcgtgaccctgaagtgccagggcgcctacagccccgaggacaatagcacccagtggttccacaacgagagcctgatctccagccaggccagcagctacttcatcgacgccgccaccgtggacgacagcggcgagtatagatgccagaccaacctgagcaccctgagcgaccccgtgcagctggaagtgcacatcggatggctgctgctgcaggcccccagatgggtgttcaaagaagaggaccccatccacctgagatgccactcttggaagaacaccgccctgcacaaagtgacctacctgcagaacggcaagggcagaaagtacttccaccacaacagcgacttctacatccccaaggccaccctgaaggactccggctcctacttctgcagaggcctcgtgggcagcaagaacgtgtccagcgagacagtgaacatcaccatcacccagggcctggccgtgtctaccatcagcagctttttcccacccggctaccagacgcgtggacagcctaaggccaatcctaccgtgacactgttccctccaagcagcgaagaactccaggccaacaaggccacacttgtgtgcctgatctccgacttctaccctggggctgtgacagtggcttggaaggccgatggatctcctgtgaaagccggcgtggaaaccaccaagccatccaagcagagcaacaacaaatacgccgccagctcctacctgagcctgacacctgagcagtggaagtcccacagatcctacagctgccaagtgacccacgaaggcagcaccgtggaaaagacagtggcccctacagagtgcagcatccccgaggacacattcttcccaagccccgagagcagctgcgacgtgaagctggtggaaaagagcttcgagacagacaccaacctgaacttccagaacctgagcgtgatcggcttcagaatcctgctgctgaaagtggccggctttaacctgctgatgaccctgcggctgtggtccagccgcgccaagagaagcggatctggcgtgaagcagaccctgaatttcgacctgctgaagctggctggcgacgtggaatccaacccaggcccttctagaggccatatgaccgagtacaagcccacggtgcgcctcgccacccgcgacgacgtccccagggccgtacgcaccctcgccgccgcgttcgccgactaccccgccacgcgccacaccgtcgatccggaccgccacatcgagcgggtcaccgagctgcaagaactcttcctcacgcgcgtcgggctcgacatcggcaaggtgtgggtcgcggacgacggcgccgcggtggcggtctggaccacgccggagagcgtcgaagcgggggcggtgttcgccgagatcggcccgcgcatggccgagttgagcggttcccggctggccgcgcagcaacagatggaaggcctcctggcgccgcaccggcccaaggagcccgcgtggttcctggccaccgtcggcgtctcgcccgaccaccagggcaagggtctgggcagcgccgtcgtgctccccggagtggaggcggccgagcgcgccggggtgcccgccttcctggagacctccgcgccccgcaacctccccttctacgagcggctcggcttcaccgtcaccgccgacgtcgaggtgcccgaaggaccgcgcacctggtgcatgacccgcaagcccggtgcctga

SEQ ID NO: 18159 - DNA, 1353 bp, synthetic construct
  source 1..1353: mol_type = other DNA
atggccttaccagtgaccgccttgctcctgccgctggccttgctgctccacgccgccaggccgctcgaggaggcctctacaaagggaccctccgtgtttcctctggctcccagcagcaagtctacaagcggaggaacagccgctctgggctgcctggtcaaggattactttcccgagcctgtgaccgtgtcctggaatagcggagcactgacaagcggcgtgcacacctttccagccgtgctgcaaagcagcggcctgtactctctgagcagcgtggtcacagtgcctagctctagcctgggcacccagacctacatctgcaatgtgaaccacaagcctagcaacaccaaggtggacaagagagtggaacccaagagctgtggcagagccgattgcggctttaccagcgagagctaccagcagggcgtgctgagcgccaccatcctgtacgagatcctgctgggcaaggccaccctgtacgccgtgctggtgtctgccctggtgctgatggctatggtcaagcggaaggacagccggggaagggccaagcgatctggatctggagcaacaaacttctcactactcaaacaagcaggtgacgtggaggagaatcccgggcctactagcgccaccatggccttaccagtgaccgccttgctcctgccgctggccttgctgctccacgccgccaggccgatggaccccgacctggaaatcagagccgccttcctgcggcagagaaacacagccctgagaacagaggtggccgagctggaacaagaggtgcagcggctggaaaacgaggtgtcccagtacgagacaagatacggccctctcggaggcggaaaaacgcgtggacagcctaaggccaatcctaccgtgacactgttccctccaagcagcgaagaactccaggccaacaaggccacacttgtgtgcctgatctccgacttctaccctggggctgtgacagtggcttggaaggccgatggatctcctgtgaaagccggcgtggaaaccaccaagccatccaagcagagcaacaacaaatacgccgccagctcctacctgagcctgacacctgagcagtggaagtcccacagatcctacagctgccaagtgacccacgaaggcagcaccgtggaaaagacagtggcccctacagagtgcagcatccccgaggacacattcttcccaagccccgagagcagctgcgacgtgaagctggtggaaaagagcttcgagacagacaccaacctgaacttccagaacctgagcgtgatcggcttcagaatcctgctgctgaaagtggccggctttaacctgctgatgaccctgcggctgtggtccagc

SEQ ID NO: 18160 - DNA, 1353 bp, synthetic construct
  source 1..1353: mol_type = other DNA
atggccttaccagtgaccgccttgctcctgccgctggccttgctgctccacgccgccaggccgctcgaggaggcctctacaaagggaccctccgtgtttcctctggctcccagcagcaagtctacaagcggaggaacagccgctctgggctgcctggtcaaggattactttcccgagcctgtgaccgtgtcctggaatagcggagcactgacaagcggcgtgcacacctttccagccgtgctgcaaagcagcggcctgtactctctgagcagcgtggtcacagtgcctagctctagcctgggcacccagacctacatctgcaatgtgaaccacaagcctagcaacaccaaggtggacaagagagtggaacccaagagctgtggcagagccgattgcggctttaccagcgagagctaccagcagggcgtgctgagcgccaccatcctgtacgagatcctgctgggcaaggccaccctgtacgccgtgctggtgtctgccctggtgctgatggctatggtcaagcggaaggacagccggggaagggccaagcgatctggatctggagcaacaaacttctcactactcaaacaagcaggtgacgtggaggagaatcccgggcctactagcgccaccatggccttaccagtgaccgccttgctcctgccgctggccttgctgctccacgccgccaggccgatggaccctgatctcgaaattgaggccgcctttctggaacgcgagaacactgccctggaaaccagggtcgcagagctgagacagagagtgcagagactgcggaacagagtgtctcagtaccgcaccagatatggcccactcggcggaggtaaaacgcgtggacagcctaaggccaatcctaccgtgacactgttccctccaagcagcgaagaactccaggccaacaaggccacacttgtgtgcctgatctccgacttctaccctggggctgtgacagtggcttggaaggccgatggatctcctgtgaaagccggcgtggaaaccaccaagccatccaagcagagcaacaacaaatacgccgccagctcctacctgagcctgacacctgagcagtggaagtcccacagatcctacagctgccaagtgacccacgaaggcagcaccgtggaaaagacagtggcccctacagagtgcagcatccccgaggacacattcttcccaagccccgagagcagctgcgacgtgaagctggtggaaaagagcttcgagacagacaccaacctgaacttccagaacctgagcgtgatcggcttcagaatcctgctgctgaaagtggccggctttaacctgctgatgaccctgcggctgtggtccagc

SEQ ID NO: 18161 - DNA, 1284 bp, synthetic construct
  source 1..1284: mol_type = other DNA
atggccttaccagtgaccgccttgctcctgccgctggccttgctgctccacgccgccaggccgctcgaggaggcctctacaaagggaccctccgtgtttcctctggctcccagcagcaagtctacaagcggaggaacagccgctctgggctgcctggtcaaggattactttcccgagcctgtgaccgtgtcctggaatagcggagcactgacaagcggcgtgcacacctttccagccgtgctgcaaagcagcggcctgtactctctgagcagcgtggtcacagtgcctagctctagcctgggcacccagacctacatctgcaatgtgaaccacaagcctagcaacaccaaggtggacaagagagtggaacccaagagctgtggcagagccgattgcggctttaccagcgagagctaccagcagggcgtgctgagcgccaccatcctgtacgagatcctgctgggcaaggccaccctgtacgccgtgctggtgtctgccctggtgctgatggctatggtcaagcggaaggacagccggggaagggccaagcgatctggatctggagcaacaaacttctcactactcaaacaagcaggtgacgtggaggagaatcccgggcctactagcgccaccatggccttaccagtgaccgccttgctcctgccgctggccttgctgctccacgccgccaggccggaagttgctgccctcgagaaggaggtagcagctttggaaaaagaagtcgcagcccttgagaaagaagttgcggctctggagaagacgcgtggacagcctaaggccaatcctaccgtgacactgttccctccaagcagcgaagaactccaggccaacaaggccacacttgtgtgcctgatctccgacttctaccctggggctgtgacagtggcttggaaggccgatggatctcctgtgaaagccggcgtggaaaccaccaagccatccaagcagagcaacaacaaatacgccgccagctcctacctgagcctgacacctgagcagtggaagtcccacagatcctacagctgccaagtgacccacgaaggcagcaccgtggaaaagacagtggcccctacagagtgcagcatccccgaggacacattcttcccaagccccgagagcagctgcgacgtgaagctggtggaaaagagcttcgagacagacaccaacctgaacttccagaacctgagcgtgatcggcttcagaatcctgctgctgaaagtggccggctttaacctgctgatgaccctgcggctgtggtccagc

SEQ ID NO: 18162 - DNA, 2058 bp, synthetic construct
  source 1..2058: mol_type = other DNA
atggccttaccagtgaccgccttgctcctgccgctggccttgctgctccacgccgccaggccgctcgaggaggcctctacaaagggaccctccgtgtttcctctggctcccagcagcaagtctacaagcggaggaacagccgctctgggctgcctggtcaaggattactttcccgagcctgtgaccgtgtcctggaatagcggagcactgacaagcggcgtgcacacctttccagccgtgctgcaaagcagcggcctgtactctctgagcagcgtggtcacagtgcctagctctagcctgggcacccagacctacatctgcaatgtgaaccacaagcctagcaacaccaaggtggacaagagagtggaacccaagagctgtggcagagccgattgcggctttaccagcgagagctaccagcagggcgtgctgagcgccaccatcctgtacgagatcctgctgggcaaggccaccctgtacgccgtgctggtgtctgccctggtgctgatggctatggtcaagcggaaggacagccggggaagggccaagcgatctggatctggagcaacaaacttctcactactcaaacaagcaggtgacgtggaggagaatcccgggcctactagcgccaccatggccttaccagtgaccgccttgctcctgccgctggccttgctgctccacgccgccaggccgctgttcaatcaagaggtgcagatccctctgaccgagagctactgtggcccctgtcctaagaactggatctgctacaagaacaactgctaccagttcttcgacgagagcaagaattggtacgagagccaggccagctgcatgagccagaatgccagcctgctgaaggtgtacagcaaagaggaccaggacctgctgaaactggtcaagagcgcccactggatgggccttgtgcacatccccaccaatggctcttggcagtgggaggacggcagcattctgagccctaacctgctgaccatcatcgagatgcagaagggcgactgcgccctgtacgccagcagctttaagggctacatcgagaattgcagcaccccgaacacctacatctgtatgcagagaaccgtttctggcggaggcggctctggaggaggcggaagtggcggcggaggcgacctctttaatcaagaagtccagattccactcaccgaatcctactgcggaccttgtccaaaaaattggatttgttataagaacaactgttatcaattctttgatgagtctaaaaattggtatgagtcccaggcttcctgcatgtctcagaacgcttctctgctgaaagtctactctaaagaagatcaggatctcctgaagctcgtcaagtctgcccattggatggggctcgtccacattcctaccaacggaagctggcaatgggaagatggctccatcctgtctccaaatctgctcacgattattgaaatgcagaaaggggattgtgctctctacgccagctccttcaagggatatattgagaactgtagcacgcccaatacttatatctgtatgcaacggaccgtgacgcgtggacagcctaaggccaatcctaccgtgacactgttccctccaagcagcgaagaactccaggccaacaaggccacacttgtgtgcctgatctccgacttctaccctggggctgtgacagtggcttggaaggccgatggatctcctgtgaaagccggcgtggaaaccaccaagccatccaagcagagcaacaacaaatacgccgccagctcctacctgagcctgacacctgagcagtggaagtcccacagatcctacagctgccaagtgacccacgaaggcagcaccgtggaaaagacagtggcccctacagagtgcagcatccccgaggacacattcttcccaagccccgagagcagctgcgacgtgaagctggtggaaaagagcttcgagacagacaccaacctgaacttccagaacctgagcgtgatcggcttcagaatcctgctgctgaaagtggccggctttaacctgctgatgaccctgcggctgtggtccagc

SEQ ID NO: 18163 - DNA, 2058 bp, synthetic construct
  source 1..2058: mol_type = other DNA
atggccttaccagtgaccgccttgctcctgccgctggccttgctgctccacgccgccaggccgctcgaggaggcctctacaaagggaccctccgtgtttcctctggctcccagcagcaagtctacaagcggaggaacagccgctctgggctgcctggtcaaggattactttcccgagcctgtgaccgtgtcctggaatagcggagcactgacaagcggcgtgcacacctttccagccgtgctgcaaagcagcggcctgtactctctgagcagcgtggtcacagtgcctagctctagcctgggcacccagacctacatctgcaatgtgaaccacaagcctagcaacaccaaggtggacaagagagtggaacccaagagctgtggcagagccgattgcggctttaccagcgagagctaccagcagggcgtgctgagcgccaccatcctgtacgagatcctgctgggcaaggccaccctgtacgccgtgctggtgtctgccctggtgctgatggctatggtcaagcggaaggacagccggggaagggccaagcgatctggatctggagcaacaaacttctcactactcaaacaagcaggtgacgtggaggagaatcccgggcctactagcgccaccatggccttaccagtgaccgccttgctcctgccgctggccttgctgctccacgccgccaggccgctgttcaatcaagaggtgcagatccctctgaccgagagctactgtggcccctgtcctaagaactggatctgctacaagaacaactgctaccagttcttcgacgagagcaagaattggtacgagagccaggccagctgcatgagccagaatgccagcctgctgaaggtgtacagcaaagaggaccaggacctgctgaaactggtcaagagcgcccactggatgggccttgtgcacatccccaccaatggctcttggcagtgggaggacggcagcattctgagccctaacctgctgaccatcatcgagatgcagaagggcgactgcgccctgtacgccagcagctttaagggcttcatcgagaattgcagcaccccgaacacctacatctgtatgcagagaaccgttggcggaggcggaagtggaggcggaggatctggcggcggaggctctgacctctttaatcaagaagtccagattccactcaccgaatcctactgcggaccttgtccaaaaaattggatttgttataagaacaactgttatcaattctttgatgagtctaaaaattggtatgagtcccaggcttcctgcatgtctcagaacgcttctctgctgaaagtctactctaaagaagatcaggatctcctgaagctcgtcaagtctgcccattggatggggctcgtccacattcctaccaacggaagctggcaatgggaagatggctccatcctgtctccaaatctgctcacgattattgaaatgcagaaaggggattgtgctctctacgccagctccttcaagggatttattgagaactgtagcacgcccaatacttatatctgtatgcaacggaccgtgacgcgtggacagcctaaggccaatcctaccgtgacactgttccctccaagcagcgaagaactccaggccaacaaggccacacttgtgtgcctgatctccgacttctaccctggggctgtgacagtggcttggaaggccgatggatctcctgtgaaagccggcgtggaaaccaccaagccatccaagcagagcaacaacaaatacgccgccagctcctacctgagcctgacacctgagcagtggaagtcccacagatcctacagctgccaagtgacccacgaaggcagcaccgtggaaaagacagtggcccctacagagtgcagcatccccgaggacacattcttcccaagccccgagagcagctgcgacgtgaagctggtggaaaagagcttcgagacagacaccaacctgaacttccagaacctgagcgtgatcggcttcagaatcctgctgctgaaagtggccggctttaacctgctgatgaccctgcggctgtggtccagc

SEQ ID NO: 18164 - DNA, 2136 bp, synthetic construct
  source 1..2136: mol_type = other DNA
atggccttaccagtgaccgccttgctcctgccgctggccttgctgctccacgccgccaggccgctcgaggaggcctctacaaagggaccctccgtgtttcctctggctcccagcagcaagtctacaagcggaggaacagccgctctgggctgcctggtcaaggattactttcccgagcctgtgaccgtgtcctggaatagcggagcactgacaagcggcgtgcacacctttccagccgtgctgcaaagcagcggcctgtactctctgagcagcgtggtcacagtgcctagctctagcctgggcacccagacctacatctgcaatgtgaaccacaagcctagcaacaccaaggtggacaagagagtggaacccaagagctgtggcagagccgattgcggctttaccagcgagagctaccagcagggcgtgctgagcgccaccatcctgtacgagatcctgctgggcaaggccaccctgtacgccgtgctggtgtctgccctggtgctgatggctatggtcaagcggaaggacagccggggaagggccaagcgatctggatctggagcaacaaacttctcactactcaaacaagcaggtgacgtggaggagaatcccgggcctactagcatggccttaccagtgaccgccttgctcctgccgctggccttgctgctccacgccgccaggccgatggaccccgacctggaaatcagagccgccttcctgcggcagagaaacacagccctgagaacagaggtggccgagctggaacaagaggtgcagcggctggaaaacgaggtgtcccagtacgagacaagatacggccctctcggaggcggaaaaggtaccggcggaggcggatctggcggcggaggtagcggtggcggaggatctgaattcgacatccagatgacacagagccctagcagcctgtctgccagcgtgggagacagagtgaccatcacatgcaaggccagcgaccacatcaacaactggctggcctggtatcagcagaagcctggacaggcccctaagctgctgatctacggcgctaccacactggaaacaggcgtgcccagcagattttctggcagcggctctggcaccgactacaccctgacaatatccagcctccagcctgaggacttcgccacctactactgtcagcagagctggaacaccccttggacattcggccagggcaccaagctggaaatcaagagaggcggaggcggaagtggaggcggaggatctggcggcggaggctctcaagttcagcttcaacagcctggcgctgagctggtcaaacctggcgcttctgtgaagatgagctgcaaagccagcggctacgccttcagcagctactggatcaactggatgaagcagaaacccggccagggactcgaatggatcggccaaatctatcccggcgacggcgacaccaactacaacggcaagttcaagggcagagccacactgaccgccgatacctctagcagcacagcctacatgcagctgagcagcctgaccagcgaagatagcgccgtgtacttctgtgcccggtccatcacaacagtcgtgggctgcgctatggactattggggccagggaacaagcgtgaccgtgtctagtacgcgtggacagcctaaggccaatcctaccgtgacactgttccctccaagcagcgaagaactccaggccaacaaggccacacttgtgtgcctgatctccgacttctaccctggggctgtgacagtggcttggaaggccgatggatctcctgtgaaagccggcgtggaaaccaccaagccatccaagcagagcaacaacaaatacgccgccagctcctacctgagcctgacacctgagcagtggaagtcccacagatcctacagctgccaagtgacccacgaaggcagcaccgtggaaaagacagtggcccctacagagtgcagcatccccgaggacacattcttcccaagccccgagagcagctgcgacgtgaagctggtggaaaagagcttcgagacagacaccaacctgaacttccagaacctgagcgtgatcggcttcagaatcctgctgctgaaagtggccggctttaacctgctgatgaccctgcggctgtggtccagc

SEQ ID NO: 18165 - DNA, 2841 bp, synthetic construct
  source 1..2841: mol_type = other DNA
atggccttaccagtgaccgccttgctcctgccgctggccttgctgctccacgccgccaggccgctcgaggaggcctctacaaagggaccctccgtgtttcctctggctcccagcagcaagtctacaagcggaggaacagccgctctgggctgcctggtcaaggattactttcccgagcctgtgaccgtgtcctggaatagcggagcactgacaagcggcgtgcacacctttccagccgtgctgcaaagcagcggcctgtactctctgagcagcgtggtcacagtgcctagctctagcctgggcacccagacctacatctgcaatgtgaaccacaagcctagcaacaccaaggtggacaagagagtggaacccaagagctgtggcagagccgattgcggctttaccagcgagagctaccagcagggcgtgctgagcgccaccatcctgtacgagatcctgctgggcaaggccaccctgtacgccgtgctggtgtctgccctggtgctgatggctatggtcaagcggaaggacagccggggaagggccaagcgatctggatctggagcaacaaacttctcactactcaaacaagcaggtgacgtggaggagaatcccgggcctactagcatggccttaccagtgaccgccttgctcctgccgctggccttgctgctccacgccgccaggccgctgttcaatcaagaggtgcagatccctctgaccgagagctactgtggcccctgtcctaagaactggatctgctacaagaacaactgctaccagttcttcgacgagagcaagaattggtacgagagccaggccagctgcatgagccagaatgccagcctgctgaaggtgtacagcaaagaggaccaggacctgctgaaactggtcaagagcgcccactggatgggccttgtgcacatccccaccaatggctcttggcagtgggaggacggcagcattctgagccctaacctgctgaccatcatcgagatgcagaagggcgactgcgccctgtacgccagcagctttaagggcttcatcgagaattgcagcaccccgaacacctacatctgtatgcagagaaccgttggcggaggcggaagtggaggcggaggatctggcggcggaggctctgacctctttaatcaagaagtccagattccactcaccgaatcctactgcggaccttgtccaaaaaattggatttgttataagaacaactgttatcaattctttgatgagtctaaaaattggtatgagtcccaggcttcctgcatgtctcagaacgcttctctgctgaaagtctactctaaagaagatcaggatctcctgaagctcgtcaagtctgcccattggatggggctcgtccacattcctaccaacggaagctggcaatgggaagatggctccatcctgtctccaaatctgctcacgattattgaaatgcagaaaggggattgtgctctctacgccagctccttcaagggatttattgagaactgtagcacgcccaatacttatatctgtatgcaacggaccgtgggtaccggcggaggcggatctggcggcggaggtagcggtggcggaggatctgaattcgacatccagatgacacagagccctagcagcctgtctgccagcgtgggagacagagtgaccatcacatgcaaggccagcgaccacatcaacaactggctggcctggtatcagcagaagcctggacaggcccctaagctgctgatctacggcgctaccacactggaaacaggcgtgcccagcagattttctggcagcggctctggcaccgactacaccctgacaatatccagcctccagcctgaggacttcgccacctactactgtcagcagagctggaacaccccttggacattcggccagggcaccaagctggaaatcaagagaggcggaggcggaagtggaggcggaggatctggcggcggaggctctcaagttcagcttcaacagcctggcgctgagctggtcaaacctggcgcttctgtgaagatgagctgcaaagccagcggctacgccttcagcagctactggatcaactggatgaagcagaaacccggccagggactcgaatggatcggccaaatctatcccggcgacggcgacaccaactacaacggcaagttcaagggcagagccacactgaccgccgatacctctagcagcacagcctacatgcagctgagcagcctgaccagcgaagatagcgccgtgtacttctgtgcccggtccatcacaacagtcgtgggctgcgctatggactattggggccagggaacaagcgtgaccgtgtctagtacgcgtggacagcctaaggccaatcctaccgtgacactgttccctccaagcagcgaagaactccaggccaacaaggccacacttgtgtgcctgatctccgacttctaccctggggctgtgacagtggcttggaaggccgatggatctcctgtgaaagccggcgtggaaaccaccaagccatccaagcagagcaacaacaaatacgccgccagctcctacctgagcctgacacctgagcagtggaagtcccacagatcctacagctgccaagtgacccacgaaggcagcaccgtggaaaagacagtggcccctacagagtgcagcatccccgaggacacattcttcccaagccccgagagcagctgcgacgtgaagctggtggaaaagagcttcgagacagacaccaacctgaacttccagaacctgagcgtgatcggcttcagaatcctgctgctgaaagtggccggctttaacctgctgatgaccctgcggctgtggtccagc

SEQ ID NO: 18166 - DNA, 1956 bp, synthetic construct
  source 1..1956: mol_type = other DNA
atggccttaccagtgaccgccttgctcctgccgctggccttgctgctccacgccgccaggccgctcgaggaggcctctacaaagggaccctccgtgtttcctctggctcccagcagcaagtctacaagcggaggaacagccgctctgggctgcctggtcaaggattactttcccgagcctgtgaccgtgtcctggaatagcggagcactgacaagcggcgtgcacacctttccagccgtgctgcaaagcagcggcctgtactctctgagcagcgtggtcacagtgcctagctctagcctgggcacccagacctacatctgcaatgtgaaccacaagcctagcaacaccaaggtggacaagagagtggaacccaagagctgtggcagagccgattgcggctttaccagcgagagctaccagcagggcgtgctgagcgccaccatcctgtacgagatcctgctgggcaaggccaccctgtacgccgtgctggtgtctgccctggtgctgatggctatggtcaagcggaaggacagccggggaagggccaagcgatctggatctggagcaacaaacttctcactactcaaacaagcaggtgacgtggaggagaatcccgggcctactagcatggccttaccagtgaccgccttgctcctgccgctggccttgctgctccacgccgccaggccgcagtctgtgctgacacagcctcctagtgtgtctggcgctcctggacagagagtgaccatctcttgtaccggcagcagcagcaatatcggagccggctatgacgtgcactggtatcagcagctccctggcacagcccctaaactgctgatcttcggcaacagcaacagacccagcggcgtgcccgatagattcagcggctttaagagcggcacaagcgccagcctggctatcactggactgcaagccgaggacgaggccgactacttctgccagagctacgatagcagcctgagcggcagcggagtgtttggcacaggcaccaaagtgacagtgcttggcggcggaggcggaagtggaggcggaggatctggcggcggaggctctcaaatgcaactggttcaaagcggcggtggcctggtgcaacctggaagaagtctgagactgagctgtgccgccagcggcttcaccttcgatgattacgccatgcactgggtccgacaggcccctggaaaaggactggaatgggtgtccggcatctcctggaatagcggctctatcggctacgccgacagcgtgaagggcagattcaccatcagccgggacaacgccaagaacagcctgtacctccagatgaactccctgagagccgaggatacagccctgtactactgcgccaaggacatccacagcggcagctactacggcctgctgtactacgctatggacgtgtggggccagggcacaaccgtgacagtttcttctacgcgtggacagcctaaggccaatcctaccgtgacactgttccctccaagcagcgaagaactccaggccaacaaggccacacttgtgtgcctgatctccgacttctaccctggggctgtgacagtggcttggaaggccgatggatctcctgtgaaagccggcgtggaaaccaccaagccatccaagcagagcaacaacaaatacgccgccagctcctacctgagcctgacacctgagcagtggaagtcccacagatcctacagctgccaagtgacccacgaaggcagcaccgtggaaaagacagtggcccctacagagtgcagcatccccgaggacacattcttcccaagccccgagagcagctgcgacgtgaagctggtggaaaagagcttcgagacagacaccaacctgaacttccagaacctgagcgtgatcggcttcagaatcctgctgctgaaagtggccggctttaacctgctgatgaccctgcggctgtggtccagc

SEQ ID NO: 18167 - DNA, 1467 bp, synthetic construct
  source 1..1467: mol_type = other DNA
atggccttaccagtgaccgccttgctcctgccgctggccttgctgctccacgccgccaggccgctcgaggaggcctctacaaagggaccctccgtgtttcctctggctcccagcagcaagtctacaagcggaggaacagccgctctgggctgcctggtcaaggattactttcccgagcctgtgaccgtgtcctggaatagcggagcactgacaagcggcgtgcacacctttccagccgtgctgcaaagcagcggcctgtactctctgagcagcgtggtcacagtgcctagctctagcctgggcacccagacctacatctgcaatgtgaaccacaagcctagcaacaccaaggtggacaagagagtggaacccaagagctgtggcagagccgattgcggctttaccagcgagagctaccagcagggcgtgctgagcgccaccatcctgtacgagatcctgctgggcaaggccaccctgtacgccgtgctggtgtctgccctggtgctgatggctatggtcaagcggaaggacagccggggaagggccaagcgatctggatctggagcaacaaacttctcactactcaaacaagcaggtgacgtggaggagaatcccgggcctactagcatggccttaccagtgaccgccttgctcctgccgctggccttgctgctccacgccgccaggccgatgtgtatgccctgcttcaccaccgaccatcagatggcccggaagtgcgacgattgctgtggcggaaaaggcagaggcaagtgctacggccctcagtgcttgtgtagactcgagggcggaggcggaagtggaggcggaggatctggcggcggaggctctttcgaagtgtgtatgccttgttttaccacggatcaacaaatggctcgcaagtgttctgactgctgcggaggcaaaggccggggaaagtgttatggcccacagtgtctgtgccggacgcgtggacagcctaaggccaatcctaccgtgacactgttccctccaagcagcgaagaactccaggccaacaaggccacacttgtgtgcctgatctccgacttctaccctggggctgtgacagtggcttggaaggccgatggatctcctgtgaaagccggcgtggaaaccaccaagccatccaagcagagcaacaacaaatacgccgccagctcctacctgagcctgacacctgagcagtggaagtcccacagatcctacagctgccaagtgacccacgaaggcagcaccgtggaaaagacagtggcccctacagagtgcagcatccccgaggacacattcttcccaagccccgagagcagctgcgacgtgaagctggtggaaaagagcttcgagacagacaccaacctgaacttccagaacctgagcgtgatcggcttcagaatcctgctgctgaaagtggccggctttaacctgctgatgaccctgcggctgtggtccagc

SEQ ID NO: 18168 - DNA, 2256 bp, synthetic construct
  source 1..2256: mol_type = other DNA
atggccttaccagtgaccgccttgctcctgccgctggccttgctgctccacgccgccaggccgctcgaggaggcctctacaaagggaccctccgtgtttcctctggctcccagcagcaagtctacaagcggaggaacagccgctctgggctgcctggtcaaggattactttcccgagcctgtgaccgtgtcctggaatagcggagcactgacaagcggcgtgcacacctttccagccgtgctgcaaagcagcggcctgtactctctgagcagcgtggtcacagtgcctagctctagcctgggcacccagacctacatctgcaatgtgaaccacaagcctagcaacaccaaggtggacaagagagtggaacccaagagctgtggcagagccgattgcggctttaccagcgagagctaccagcagggcgtgctgagcgccaccatcctgtacgagatcctgctgggcaaggccaccctgtacgccgtgctggtgtctgccctggtgctgatggctatggtcaagcggaaggacagccggggaagggccaagcgatctggatctggagcaacaaacttctcactactcaaacaagcaggtgacgtggaggagaatcccgggcctactagcatggccttaccagtgaccgccttgctcctgccgctggccttgctgctccacgccgccaggccgatgtgtatgccctgcttcaccaccgaccatcagatggcccggaagtgcgacgattgctgtggcggaaaaggcagaggcaagtgctacggccctcagtgcttgtgtagactcgagggcggaggcggaagtggaggcggaggatctggcggcggaggctctttcgaagtgtgtatgccttgttttaccacggatcaacaaatggctcgcaagtgttctgactgctgcggaggcaaaggccggggaaagtgttatggcccacagtgtctgtgccggggtaccggcggaggcggatctggcggcggaggtagcggtggcggaggatctgaattcgacatccagatgacacagagccctagcagcctgtctgccagcgtgggagacagagtgaccatcacatgcaaggccagcgaccacatcaacaactggctggcctggtatcagcagaagcctggacaggcccctaagctgctgatctacggcgctaccacactggaaacaggcgtgcccagcagattttctggcagcggctctggcaccgactacaccctgacaatatccagcctccagcctgaggacttcgccacctactactgtcagcagagctggaacaccccttggacattcggccagggcaccaagctggaaatcaagagaggcggaggcggaagtggaggcggaggatctggcggcggaggctctcaagttcagcttcaacagcctggcgctgagctggtcaaacctggcgcttctgtgaagatgagctgcaaagccagcggctacgccttcagcagctactggatcaactggatgaagcagaaacccggccagggactcgaatggatcggccaaatctatcccggcgacggcgacaccaactacaacggcaagttcaagggcagagccacactgaccgccgatacctctagcagcacagcctacatgcagctgagcagcctgaccagcgaagatagcgccgtgtacttctgtgcccggtccatcacaacagtcgtgggctgcgctatggactattggggccagggaacaagcgtgaccgtgtctagtacgcgtggacagcctaaggccaatcctaccgtgacactgttccctccaagcagcgaagaactccaggccaacaaggccacacttgtgtgcctgatctccgacttctaccctggggctgtgacagtggcttggaaggccgatggatctcctgtgaaagccggcgtggaaaccaccaagccatccaagcagagcaacaacaaatacgccgccagctcctacctgagcctgacacctgagcagtggaagtcccacagatcctacagctgccaagtgacccacgaaggcagcaccgtggaaaagacagtggcccctacagagtgcagcatccccgaggacacattcttcccaagccccgagagcagctgcgacgtgaagctggtggaaaagagcttcgagacagacaccaacctgaacttccagaacctgagcgtgatcggcttcagaatcctgctgctgaaagtggccggctttaacctgctgatgaccctgcggctgtggtccagc

SEQ ID NO: 18169 - DNA, 2481 bp, synthetic construct
  source 1..2481: mol_type = other DNA
atggccttaccagtgaccgccttgctcctgccgctggccttgctgctccacgccgccaggccgctcgaggaggcctctacaaagggaccctccgtgtttcctctggctcccagcagcaagtctacaagcggaggaacagccgctctgggctgcctggtcaaggattactttcccgagcctgtgaccgtgtcctggaatagcggagcactgacaagcggcgtgcacacctttccagccgtgctgcaaagcagcggcctgtactctctgagcagcgtggtcacagtgcctagctctagcctgggcacccagacctacatctgcaatgtgaaccacaagcctagcaacaccaaggtggacaagagagtggaacccaagagctgtggcagagccgattgcggctttaccagcgagagctaccagcagggcgtgctgagcgccaccatcctgtacgagatcctgctgggcaaggccaccctgtacgccgtgctggtgtctgccctggtgctgatggctatggtcaagcggaaggacagccggggaagggccaagcgatctggatctggagcaacaaacttctcactactcaaacaagcaggtgacgtggaggagaatcccgggcctactagcatggccttaccagtgaccgccttgctcctgccgctggccttgctgctccacgccgccaggccgagccccgtagctcctgcctgtgaccccagactcctaaataaactgctgcgtgactcccacctccttcacagccgactgagtcagtgtcccgacgtggaccctttgtctatccctgttctgctgcctgctgtggactttagcctgggagaatggaaaacccagacggaacagagcaaggcacaggacattctaggggcagtgtcccttctactggagggagtgatggcagcacgaggacagttggaaccctcctgcctctcatccctcctgggacagctttctgggcaggttcgcctcctcttgggggccctgcagggcctcctaggaacccagcttcctctacagggcaggaccacagctcacaaggaccccaatgccctcttcttgagcttgcaacaactgcttcggggaaaggtgcgcttcctgcttctggtagaaggtcccaccctctgtgtcagacggaccctgccaaccacagctgtcccaagcagtacttctggtaccggcggaggcggatctggcggcggaggtagcggtggcggaggatctgaattcgacatccagatgacacagagccctagcagcctgtctgccagcgtgggagacagagtgaccatcacatgcaaggccagcgaccacatcaacaactggctggcctggtatcagcagaagcctggacaggcccctaagctgctgatctacggcgctaccacactggaaacaggcgtgcccagcagattttctggcagcggctctggcaccgactacaccctgacaatatccagcctccagcctgaggacttcgccacctactactgtcagcagagctggaacaccccttggacattcggccagggcaccaagctggaaatcaagagaggcggaggcggaagtggaggcggaggatctggcggcggaggctctcaagttcagcttcaacagcctggcgctgagctggtcaaacctggcgcttctgtgaagatgagctgcaaagccagcggctacgccttcagcagctactggatcaactggatgaagcagaaacccggccagggactcgaatggatcggccaaatctatcccggcgacggcgacaccaactacaacggcaagttcaagggcagagccacactgaccgccgatacctctagcagcacagcctacatgcagctgagcagcctgaccagcgaagatagcgccgtgtacttctgtgcccggtccatcacaacagtcgtgggctgcgctatggactattggggccagggaacaagcgtgaccgtgtctagtacgcgtggacagcctaaggccaatcctaccgtgacactgttccctccaagcagcgaagaactccaggccaacaaggccacacttgtgtgcctgatctccgacttctaccctggggctgtgacagtggcttggaaggccgatggatctcctgtgaaagccggcgtggaaaccaccaagccatccaagcagagcaacaacaaatacgccgccagctcctacctgagcctgacacctgagcagtggaagtcccacagatcctacagctgccaagtgacccacgaaggcagcaccgtggaaaagacagtggcccctacagagtgcagcatccccgaggacacattcttcccaagccccgagagcagctgcgacgtgaagctggtggaaaagagcttcgagacagacaccaacctgaacttccagaacctgagcgtgatcggcttcagaatcctgctgctgaaagtggccggctttaacctgctgatgaccctgcggctgtggtccagc

SEQ ID NO: 18170 - DNA, 2202 bp, synthetic construct
  source 1..2202: mol_type = other DNA
atggccttaccagtgaccgccttgctcctgccgctggccttgctgctccacgccgccaggccgctcgaggaggcctctacaaagggaccctccgtgtttcctctggctcccagcagcaagtctacaagcggaggaacagccgctctgggctgcctggtcaaggattactttcccgagcctgtgaccgtgtcctggaatagcggagcactgacaagcggcgtgcacacctttccagccgtgctgcaaagcagcggcctgtactctctgagcagcgtggtcacagtgcctagctctagcctgggcacccagacctacatctgcaatgtgaaccacaagcctagcaacaccaaggtggacaagagagtggaacccaagagctgtggcagagccgattgcggctttaccagcgagagctaccagcagggcgtgctgagcgccaccatcctgtacgagatcctgctgggcaaggccaccctgtacgccgtgctggtgtctgccctggtgctgatggctatggtcaagcggaaggacagccggggaagggccaagcgatctggatctggagcaacaaacttctcactactcaaacaagcaggtgacgtggaggagaatcccgggcctactagcatggccttaccagtgaccgccttgctcctgccgctggccttgctgctccacgccgccaggccgatgggcagctgggaagagttcgagctgagactgaacgccatcgaggaacggctgtatgccctcggaggatctgaagccgagctggcctacttcgagtacgtgatcgccgacttcgagggcaacctgcagcggtacaaaggcaagggcaaccctgaagtggaagccctgtacttcgaggccgacgccatcttcgaggaactggtggcctacagacacaacggtaccggcggaggcggatctggcggcggaggtagcggtggcggaggatctgaattcgacatccagatgacacagagccctagcagcctgtctgccagcgtgggagacagagtgaccatcacatgcaaggccagcgaccacatcaacaactggctggcctggtatcagcagaagcctggacaggcccctaagctgctgatctacggcgctaccacactggaaacaggcgtgcccagcagattttctggcagcggctctggcaccgactacaccctgacaatatccagcctccagcctgaggacttcgccacctactactgtcagcagagctggaacaccccttggacattcggccagggcaccaagctggaaatcaagagaggcggaggcggaagtggaggcggaggatctggcggcggaggctctcaagttcagcttcaacagcctggcgctgagctggtcaaacctggcgcttctgtgaagatgagctgcaaagccagcggctacgccttcagcagctactggatcaactggatgaagcagaaacccggccagggactcgaatggatcggccaaatctatcccggcgacggcgacaccaactacaacggcaagttcaagggcagagccacactgaccgccgatacctctagcagcacagcctacatgcagctgagcagcctgaccagcgaagatagcgccgtgtacttctgtgcccggtccatcacaacagtcgtgggctgcgctatggactattggggccagggaacaagcgtgaccgtgtctagtacgcgtggacagcctaaggccaatcctaccgtgacactgttccctccaagcagcgaagaactccaggccaacaaggccacacttgtgtgcctgatctccgacttctaccctggggctgtgacagtggcttggaaggccgatggatctcctgtgaaagccggcgtggaaaccaccaagccatccaagcagagcaacaacaaatacgccgccagctcctacctgagcctgacacctgagcagtggaagtcccacagatcctacagctgccaagtgacccacgaaggcagcaccgtggaaaagacagtggcccctacagagtgcagcatccccgaggacacattcttcccaagccccgagagcagctgcgacgtgaagctggtggaaaagagcttcgagacagacaccaacctgaacttccagaacctgagcgtgatcggcttcagaatcctgctgctgaaagtggccggctttaacctgctgatgaccctgcggctgtggtccagc

SEQ ID NO: 18171 - DNA, 2622 bp, synthetic construct
  source 1..2622: mol_type = other DNA
atggccttaccagtgaccgccttgctcctgccgctggccttgctgctccacgccgccaggccgctcgagggacagcctaaggccaatcctaccgtgacactgttccctccaagcagcgaagaactccaggccaacaaggccacacttgtgtgcctgatctccgacttctaccctggggctgtgacagtggcttggaaggccgatggatctcctgtgaaagccggcgtggaaaccaccaagccatccaagcagagcaacaacaaatacgccgccagctcctacctgagcctgacacctgagcagtggaagtcccacagatcctacagctgccaagtgacccacgaaggcagcaccgtggaaaagacagtggcccctacagagtgcagcatccccgaggacacattcttcccaagccccgagagcagctgcgacgtgaagctggtggaaaagagcttcgagacagacaccaacctgaacttccagaacctgagcgtgatcggcttcagaatcctgctgctgaaagtggccggctttaacctgctgatgaccctgcggctgtggtccagcagggccaagcgatctggatctggagcaacaaacttctcactactcaaacaagcaggtgacgtggaggagaatcccgggcctactagcatggccttaccagtgaccgccttgctcctgccgctggccttgctgctccacgccgccaggccggacatccagatgacacagactacatcctccctgtctgcctctctgggagacagagtcaccatcagttgcagggcaagtcaggacattagtaaatatttaaattggtatcagcagaaaccagatggaactgttaaactcctgatctaccatacatcaagattacactcaggagtcccatcaaggttcagtggcagtgggtctggaacagattattctctcaccattagcaacctggagcaagaagatattgccacttacttttgccaacagggtaatacgcttccgtacacgttcggaggggggaccaagctggagatcacaggtggcggtggctcgggcggtggtgggtcgggtggcggcggatctgaggtgaaactgcaggagtcaggacctggcctggtggcgccctcacagagcctgtccgtcacatgcactgtctcaggggtctcattacccgactatggtgtaagctggattcgccagcctccacgaaagggtctggagtggctgggagtaatatggggtagtgaaaccacatactataattcagctctcaaatccagactgaccatcatcaaggacaactccaagagccaagttttcttaaaaatgaacagtctgcaaactgatgacacagccatttactactgtgccaaacattattactacggtggtagctatgctatggactactggggtcaaggaacctcagtcaccgtctcctcaacgcgtgaggcctctacaaagggaccctccgtgtttcctctggctcccagcagcaagtctacaagcggaggaacagccgctctgggctgcctggtcaaggattactttcccgagcctgtgaccgtgtcctggaatagcggagcactgacaagcggcgtgcacacctttccagccgtgctgcaaagcagcggcctgtactctctgagcagcgtggtcacagtgcctagctctagcctgggcacccagacctacatctgcaatgtgaaccacaagcctagcaacaccaaggtggacaagagagtggaacccaagagctgtggcagagccgattgcggctttaccagcgagagctaccagcagggcgtgctgagcgccaccatcctgtacgagatcctgctgggcaaggccaccctgtacgccgtgctggtgtctgccctggtgctgatggctatggtcaagcggaaggacagccggggacgcgccaagagaagcggatctggcgtgaagcagaccctgaatttcgacctgctgaagctggctggcgacgtggaatccaacccaggcccttctagaggccatatgaccgagtacaagcccacggtgcgcctcgccacccgcgacgacgtccccagggccgtacgcaccctcgccgccgcgttcgccgactaccccgccacgcgccacaccgtcgatccggaccgccacatcgagcgggtcaccgagctgcaagaactcttcctcacgcgcgtcgggctcgacatcggcaaggtgtgggtcgcggacgacggcgccgcggtggcggtctggaccacgccggagagcgtcgaagcgggggcggtgttcgccgagatcggcccgcgcatggccgagttgagcggttcccggctggccgcgcagcaacagatggaaggcctcctggcgccgcaccggcccaaggagcccgcgtggttcctggccaccgtcggcgtctcgcccgaccaccagggcaagggtctgggcagcgccgtcgtgctccccggagtggaggcggccgagcgcgccggggtgcccgccttcctggagacctccgcgccccgcaacctccccttctacgagcggctcggcttcaccgtcaccgccgacgtcgaggtgcccgaaggaccgcgcacctggtgcatgacccgcaagcccggtgcctga

SEQ ID NO: 18172 - DNA, 2625 bp, synthetic construct
  source 1..2625: mol_type = other DNA
atggccttaccagtgaccgccttgctcctgccgctggccttgctgctccacgccgccaggccgctcgagggacagcctaaggccaatcctaccgtgacactgttccctccaagcagcgaagaactccaggccaacaaggccacacttgtgtgcctgatctccgacttctaccctggggctgtgacagtggcttggaaggccgatggatctcctgtgaaagccggcgtggaaaccaccaagccatccaagcagagcaacaacaaatacgccgccagctcctacctgagcctgacacctgagcagtggaagtcccacagatcctacagctgccaagtgacccacgaaggcagcaccgtggaaaagacagtggcccctacagagtgcagcatccccgaggacacattcttcccaagccccgagagcagctgcgacgtgaagctggtggaaaagagcttcgagacagacaccaacctgaacttccagaacctgagcgtgatcggcttcagaatcctgctgctgaaagtggccggctttaacctgctgatgaccctgcggctgtggtccagcagggccaagcgatctggatctggagcaacaaacttctcactactcaaacaagcaggtgacgtggaggagaatcccgggcctactagcaccatggccttaccagtgaccgccttgctcctgccgctggccttgctgctccacgccgccaggccggagatcgtgatgacccagagccctgccaccctgtctctgagccctggcgaaagagccaccctgagctgtagagccagccaggacatcagcaagtacctgaactggtatcagcagaagcccggccaggcccccagactgctgatctaccacaccagcagactgcacagcggcatccccgccagattttctggctctggcagcggcaccgactacaccctgacaatcagcagcctccagcccgaggacttcgccgtgtacttctgtcagcaaggcaacaccctgccctacaccttcggccagggcaccaagctggaaatcaagggcggaggcggaagtggaggcggaggatctggcggcggaggctctcaggtgcaactccaggaatctggccctggcctcgtgaagcccagcgagacactgagcctgacctgtaccgtgtccggcgtgtccctgcctgactatggcgtgtcctggatcagacagccccctggcaagggcctggaatggatcggagtgatttggggcagcgaaaccacctactacaacagctccctgaagtccagagtgaccatctccaaggacaactccaagaaccaggtgtccctgaagctgagcagcgtgacagccgccgacaccgccgtgtattactgcgccaagcactactactacggcggcagctacgctatggactactggggccagggaaccctcgtgaccgtgtctagtacgcgtgaggcctctacaaagggaccctccgtgtttcctctggctcccagcagcaagtctacaagcggaggaacagccgctctgggctgcctggtcaaggattactttcccgagcctgtgaccgtgtcctggaatagcggagcactgacaagcggcgtgcacacctttccagccgtgctgcaaagcagcggcctgtactctctgagcagcgtggtcacagtgcctagctctagcctgggcacccagacctacatctgcaatgtgaaccacaagcctagcaacaccaaggtggacaagagagtggaacccaagagctgtggcagagccgattgcggctttaccagcgagagctaccagcagggcgtgctgagcgccaccatcctgtacgagatcctgctgggcaaggccaccctgtacgccgtgctggtgtctgccctggtgctgatggctatggtcaagcggaaggacagccggggacgcgccaagagaagcggatctggcgtgaagcagaccctgaatttcgacctgctgaagctggctggcgacgtggaatccaacccaggcccttctagaggccatatgaccgagtacaagcccacggtgcgcctcgccacccgcgacgacgtccccagggccgtacgcaccctcgccgccgcgttcgccgactaccccgccacgcgccacaccgtcgatccggaccgccacatcgagcgggtcaccgagctgcaagaactcttcctcacgcgcgtcgggctcgacatcggcaaggtgtgggtcgcggacgacggcgccgcggtggcggtctggaccacgccggagagcgtcgaagcgggggcggtgttcgccgagatcggcccgcgcatggccgagttgagcggttcccggctggccgcgcagcaacagatggaaggcctcctggcgccgcaccggcccaaggagcccgcgtggttcctggccaccgtcggcgtctcgcccgaccaccagggcaagggtctgggcagcgccgtcgtgctccccggagtggaggcggccgagcgcgccggggtgcccgccttcctggagacctccgcgccccgcaacctccccttctacgagcggctcggcttcaccgtcaccgccgacgtcgaggtgcccgaaggaccgcgcacctggtgcatgacccgcaagcccggtgcctga

SEQ ID NO: 18173 - DNA, 2628 bp, synthetic construct
  source 1..2628: mol_type = other DNA
atggccttaccagtgaccgccttgctcctgccgctggccttgctgctccacgccgccaggccgctcgagggacagcctaaggccaatcctaccgtgacactgttccctccaagcagcgaagaactccaggccaacaaggccacacttgtgtgcctgatctccgacttctaccctggggctgtgacagtggcttggaaggccgatggatctcctgtgaaagccggcgtggaaaccaccaagccatccaagcagagcaacaacaaatacgccgccagctcctacctgagcctgacacctgagcagtggaagtcccacagatcctacagctgccaagtgacccacgaaggcagcaccgtggaaaagacagtggcccctacagagtgcagcatccccgaggacacattcttcccaagccccgagagcagctgcgacgtgaagctggtggaaaagagcttcgagacagacaccaacctgaacttccagaacctgagcgtgatcggcttcagaatcctgctgctgaaagtggccggctttaacctgctgatgaccctgcggctgtggtccagcagggccaagcgatctggatctggagcaacaaacttctcactactcaaacaagcaggtgacgtggaggagaatcccgggcctactagcaccatggccttaccagtgaccgccttgctcctgccgctggccttgctgctccacgccgccaggccggacgagatcgtgctgacacagagccccgccaccctgtcactgtctccaggcgaaagagccaccctgagctgtagcgccagcagcagcgtgtcctacatgcactggtatcagcagaagcccggccaggcccccagactgctgatctacgataccagcaagctggcctccggcatccccgccagattttctggcagcggctccggcaccgacttcaccctgacaatcagcagcctggaacccgaggacgtggccgtgtactactgttttcaaggcagcgtgtaccccttcaccttcggccagggcaccaagctggaaatcaagagaggtggcggtggctcgggcggtggtgggtcgggtggcggcggatctcaggtgcagctccaggaatctggccctggcctcgtgaagcctagccagaccctgagcctgacctgtaccgtgtctggcggcagcatcagcacaagcggcatgggcgtgggctggatcagacagcaccctggcaagggcctggaatggatcggccacatttggtgggacgacgacaagcggtacaaccccgccctgaagtccagagtgaccatcagcgtggacaccagcaagaaccagttcagcctgaagctgagcagcgtgacagccgccgataccgccgtgtattattgcgcccggatggaactgtggtcctactacttcgactactggggccagggaaccctcgtgaccgtgtctagtacgcgtgaggcctctacaaagggaccctccgtgtttcctctggctcccagcagcaagtctacaagcggaggaacagccgctctgggctgcctggtcaaggattactttcccgagcctgtgaccgtgtcctggaatagcggagcactgacaagcggcgtgcacacctttccagccgtgctgcaaagcagcggcctgtactctctgagcagcgtggtcacagtgcctagctctagcctgggcacccagacctacatctgcaatgtgaaccacaagcctagcaacaccaaggtggacaagagagtggaacccaagagctgtggcagagccgattgcggctttaccagcgagagctaccagcagggcgtgctgagcgccaccatcctgtacgagatcctgctgggcaaggccaccctgtacgccgtgctggtgtctgccctggtgctgatggctatggtcaagcggaaggacagccggggacgcgccaagagaagcggatctggcgtgaagcagaccctgaatttcgacctgctgaagctggctggcgacgtggaatccaacccaggcccttctagaggccatatgaccgagtacaagcccacggtgcgcctcgccacccgcgacgacgtccccagggccgtacgcaccctcgccgccgcgttcgccgactaccccgccacgcgccacaccgtcgatccggaccgccacatcgagcgggtcaccgagctgcaagaactcttcctcacgcgcgtcgggctcgacatcggcaaggtgtgggtcgcggacgacggcgccgcggtggcggtctggaccacgccggagagcgtcgaagcgggggcggtgttcgccgagatcggcccgcgcatggccgagttgagcggttcccggctggccgcgcagcaacagatggaaggcctcctggcgccgcaccggcccaaggagcccgcgtggttcctggccaccgtcggcgtctcgcccgaccaccagggcaagggtctgggcagcgccgtcgtgctccccggagtggaggcggccgagcgcgccggggtgcccgccttcctggagacctccgcgccccgcaacctccccttctacgagcggctcggcttcaccgtcaccgccgacgtcgaggtgcccgaaggaccgcgcacctggtgcatgacccgcaagcccggtgcctga

SEQ ID NO: 18174 - DNA, 2616 bp, synthetic construct
  source 1..2616: mol_type = other DNA
atggccttaccagtgaccgccttgctcctgccgctggccttgctgctccacgccgccaggccgctcgagggacagcctaaggccaatcctaccgtgacactgttccctccaagcagcgaagaactccaggccaacaaggccacacttgtgtgcctgatctccgacttctaccctggggctgtgacagtggcttggaaggccgatggatctcctgtgaaagccggcgtggaaaccaccaagccatccaagcagagcaacaacaaatacgccgccagctcctacctgagcctgacacctgagcagtggaagtcccacagatcctacagctgccaagtgacccacgaaggcagcaccgtggaaaagacagtggcccctacagagtgcagcatccccgaggacacattcttcccaagccccgagagcagctgcgacgtgaagctggtggaaaagagcttcgagacagacaccaacctgaacttccagaacctgagcgtgatcggcttcagaatcctgctgctgaaagtggccggctttaacctgctgatgaccctgcggctgtggtccagcagggccaagcgatctggatctggagcaacaaacttctcactactcaaacaagcaggtgacgtggaggagaatcccgggcctactagcatggccttaccagtgaccgccttgctcctgccgctggccttgctgctccacgccgccaggccggacatccagatgacacagagccctagcagcctgtctgccagcgtgggagacagagtgaccatcacctgtagagccagccaggacatcagcaactacctgaactggtatcagcagaagcccggcaaggcccctaagctgctgatctactacaccagcagactgcacagcggcgtgcccagcagattttctggctctggcagcggcaccgacttcaccctgacaatatctagcctccagcctgaggacttcgccacctactattgccagcagggcaacaccctgccttacacatttggacagggcaccaaggtggaaatcaagagaggcggaggcggaagtggaggcggaggatctggcggcggaggctctgaagtgcagctggttgaatcaggtggcggcctggttcaacctggcggatctctgagactgagctgtgccgccagcggcttcaccttcagcgactactttatgagctgggtccgacaggcccctggcaaaggacttgaatgggtcgccaccatcagcaatggcggcacctacacttactaccccgacagcgtgaagggcagattcaccatctccagagacaacagcaagaacaccctgtacctccagatgaactccctgagagccgaggacaccgccgtgtactactgcgccagattcgacggctacatcttcgactattggggccagggcaccctggtcacagtctcttctacgcgtgaggcctctacaaagggaccctccgtgtttcctctggctcccagcagcaagtctacaagcggaggaacagccgctctgggctgcctggtcaaggattactttcccgagcctgtgaccgtgtcctggaatagcggagcactgacaagcggcgtgcacacctttccagccgtgctgcaaagcagcggcctgtactctctgagcagcgtggtcacagtgcctagctctagcctgggcacccagacctacatctgcaatgtgaaccacaagcctagcaacaccaaggtggacaagagagtggaacccaagagctgtggcagagccgattgcggctttaccagcgagagctaccagcagggcgtgctgagcgccaccatcctgtacgagatcctgctgggcaaggccaccctgtacgccgtgctggtgtctgccctggtgctgatggctatggtcaagcggaaggacagccggggacgcgccaagagaagcggatctggcgtgaagcagaccctgaatttcgacctgctgaagctggctggcgacgtggaatccaacccaggcccttctagaggccatatgaccgagtacaagcccacggtgcgcctcgccacccgcgacgacgtccccagggccgtacgcaccctcgccgccgcgttcgccgactaccccgccacgcgccacaccgtcgatccggaccgccacatcgagcgggtcaccgagctgcaagaactcttcctcacgcgcgtcgggctcgacatcggcaaggtgtgggtcgcggacgacggcgccgcggtggcggtctggaccacgccggagagcgtcgaagcgggggcggtgttcgccgagatcggcccgcgcatggccgagttgagcggttcccggctggccgcgcagcaacagatggaaggcctcctggcgccgcaccggcccaaggagcccgcgtggttcctggccaccgtcggcgtctcgcccgaccaccagggcaagggtctgggcagcgccgtcgtgctccccggagtggaggcggccgagcgcgccggggtgcccgccttcctggagacctccgcgccccgcaacctccccttctacgagcggctcggcttcaccgtcaccgccgacgtcgaggtgcccgaaggaccgcgcacctggtgcatgacccgcaagcccggtgcctga

SEQ ID NO: 18175 - DNA, 2628 bp, synthetic construct
  source 1..2628: mol_type = other DNA
atggccttaccagtgaccgccttgctcctgccgctggccttgctgctccacgccgccaggccgctcgagggacagcctaaggccaatcctaccgtgacactgttccctccaagcagcgaagaactccaggccaacaaggccacacttgtgtgcctgatctccgacttctaccctggggctgtgacagtggcttggaaggccgatggatctcctgtgaaagccggcgtggaaaccaccaagccatccaagcagagcaacaacaaatacgccgccagctcctacctgagcctgacacctgagcagtggaagtcccacagatcctacagctgccaagtgacccacgaaggcagcaccgtggaaaagacagtggcccctacagagtgcagcatccccgaggacacattcttcccaagccccgagagcagctgcgacgtgaagctggtggaaaagagcttcgagacagacaccaacctgaacttccagaacctgagcgtgatcggcttcagaatcctgctgctgaaagtggccggctttaacctgctgatgaccctgcggctgtggtccagcagggccaagcgatctggatctggagcaacaaacttctcactactcaaacaagcaggtgacgtggaggagaatcccgggcctactagcatggccttaccagtgaccgccttgctcctgccgctggccttgctgctccacgccgccaggccggacatccagatgacacagagccctagcagcctgtctgccagcgtgggagacagagtgaccatcacatgcaaggccagcgaccacatcaacaactggctggcctggtatcagcagaagcctggacaggcccctaagctgctgatctacggcgctaccacactggaaacaggcgtgcccagcagattttctggcagcggctctggcaccgactacaccctgacaatatccagcctccagcctgaggacttcgccacctactactgtcagcagagctggaacaccccttggacattcggccagggcaccaagctggaaatcaagagaggcggaggcggaagtggaggcggaggatctggcggcggaggctctcaagttcagcttcaacagcctggcgctgagctggtcaaacctggcgcttctgtgaagatgagctgcaaagccagcggctacgccttcagcagctactggatcaactggatgaagcagaaacccggccagggactcgaatggatcggccaaatctatcccggcgacggcgacaccaactacaacggcaagttcaagggcagagccacactgaccgccgatacctctagcagcacagcctacatgcagctgagcagcctgaccagcgaagatagcgccgtgtacttctgtgcccggtccatcacaacagtcgtgggctgcgctatggactattggggccagggaacaagcgtgaccgtgtctagtacgcgtgaggcctctacaaagggaccctccgtgtttcctctggctcccagcagcaagtctacaagcggaggaacagccgctctgggctgcctggtcaaggattactttcccgagcctgtgaccgtgtcctggaatagcggagcactgacaagcggcgtgcacacctttccagccgtgctgcaaagcagcggcctgtactctctgagcagcgtggtcacagtgcctagctctagcctgggcacccagacctacatctgcaatgtgaaccacaagcctagcaacaccaaggtggacaagagagtggaacccaagagctgtggcagagccgattgcggctttaccagcgagagctaccagcagggcgtgctgagcgccaccatcctgtacgagatcctgctgggcaaggccaccctgtacgccgtgctggtgtctgccctggtgctgatggctatggtcaagcggaaggacagccggggacgcgccaagagaagcggatctggcgtgaagcagaccctgaatttcgacctgctgaagctggctggcgacgtggaatccaacccaggcccttctagaggccatatgaccgagtacaagcccacggtgcgcctcgccacccgcgacgacgtccccagggccgtacgcaccctcgccgccgcgttcgccgactaccccgccacgcgccacaccgtcgatccggaccgccacatcgagcgggtcaccgagctgcaagaactcttcctcacgcgcgtcgggctcgacatcggcaaggtgtgggtcgcggacgacggcgccgcggtggcggtctggaccacgccggagagcgtcgaagcgggggcggtgttcgccgagatcggcccgcgcatggccgagttgagcggttcccggctggccgcgcagcaacagatggaaggcctcctggcgccgcaccggcccaaggagcccgcgtggttcctggccaccgtcggcgtctcgcccgaccaccagggcaagggtctgggcagcgccgtcgtgctccccggagtggaggcggccgagcgcgccggggtgcccgccttcctggagacctccgcgccccgcaacctccccttctacgagcggctcggcttcaccgtcaccgccgacgtcgaggtgcccgaaggaccgcgcacctggtgcatgacccgcaagcccggtgcctga

SEQ ID NO: 18176 - DNA, 2634 bp, synthetic construct
  source 1..2634: mol_type = other DNA
atggccttaccagtgaccgccttgctcctgccgctggccttgctgctccacgccgccaggccgctcgagggacagcctaaggccaatcctaccgtgacactgttccctccaagcagcgaagaactccaggccaacaaggccacacttgtgtgcctgatctccgacttctaccctggggctgtgacagtggcttggaaggccgatggatctcctgtgaaagccggcgtggaaaccaccaagccatccaagcagagcaacaacaaatacgccgccagctcctacctgagcctgacacctgagcagtggaagtcccacagatcctacagctgccaagtgacccacgaaggcagcaccgtggaaaagacagtggcccctacagagtgcagcatccccgaggacacattcttcccaagccccgagagcagctgcgacgtgaagctggtggaaaagagcttcgagacagacaccaacctgaacttccagaacctgagcgtgatcggcttcagaatcctgctgctgaaagtggccggctttaacctgctgatgaccctgcggctgtggtccagcagggccaagcgatctggatctggagcaacaaacttctcactactcaaacaagcaggtgacgtggaggagaatcccgggcctactagcatggccttaccagtgaccgccttgctcctgccgctggccttgctgctccacgccgccaggccgcagatcgtgctgtctcagtctcctgccatcctgagcgcttccccaggcgagaaagtgaccatgacctgtagagccagcagcagcgtgtcctacatgcactggtatcagcagaagcccggcagcagccctaagccttggatctacgccaccagcaatctggcctctggcgtgccagccagattttctggctctggcagcggcaccagctacagcttcacaatcagcagagtggaagccgaggacgccgccacctactattgtcagcagtggaccttcaatcctcctaccttcggcggaggcacccggctggaaatcaaaagaacagtggctgctggcggaggcggaagtggaggcggaggatctggcggcggaggctctcaggcttatctgcaacagagcggagccgaactcgtcagacctggcgcttctgtgaagatgagctgcaaggccagcggctacaccttcaccagctataatatgcactgggtcaagcagacccctcggcagggactcgaatggatcggcggaatctatcccggcaacggcgacacctcctacaaccagaagttcaagggcaaagccacactgaccgtgggcaagagcagcagcaccgcctatatgcagctcagcagcctgaccagcgaggacagcgccgtgtacttctgcgccagatacgactacaactacgctatggactactggggccagggcaccagcgtgacagttagctctgccagcacgcgtgaggcctctacaaagggaccctccgtgtttcctctggctcccagcagcaagtctacaagcggaggaacagccgctctgggctgcctggtcaaggattactttcccgagcctgtgaccgtgtcctggaatagcggagcactgacaagcggcgtgcacacctttccagccgtgctgcaaagcagcggcctgtactctctgagcagcgtggtcacagtgcctagctctagcctgggcacccagacctacatctgcaatgtgaaccacaagcctagcaacaccaaggtggacaagagagtggaacccaagagctgtggcagagccgattgcggctttaccagcgagagctaccagcagggcgtgctgagcgccaccatcctgtacgagatcctgctgggcaaggccaccctgtacgccgtgctggtgtctgccctggtgctgatggctatggtcaagcggaaggacagccggggacgcgccaagagaagcggatctggcgtgaagcagaccctgaatttcgacctgctgaagctggctggcgacgtggaatccaacccaggcccttctagaggccatatgaccgagtacaagcccacggtgcgcctcgccacccgcgacgacgtccccagggccgtacgcaccctcgccgccgcgttcgccgactaccccgccacgcgccacaccgtcgatccggaccgccacatcgagcgggtcaccgagctgcaagaactcttcctcacgcgcgtcgggctcgacatcggcaaggtgtgggtcgcggacgacggcgccgcggtggcggtctggaccacgccggagagcgtcgaagcgggggcggtgttcgccgagatcggcccgcgcatggccgagttgagcggttcccggctggccgcgcagcaacagatggaaggcctcctggcgccgcaccggcccaaggagcccgcgtggttcctggccaccgtcggcgtctcgcccgaccaccagggcaagggtctgggcagcgccgtcgtgctccccggagtggaggcggccgagcgcgccggggtgcccgccttcctggagacctccgcgccccgcaacctccccttctacgagcggctcggcttcaccgtcaccgccgacgtcgaggtgcccgaaggaccgcgcacctggtgcatgacccgcaagcccggtgcctga

SEQ ID NO: 18177 - DNA, 2628 bp, synthetic construct
  source 1..2628: mol_type = other DNA
atggccttaccagtgaccgccttgctcctgccgctggccttgctgctccacgccgccaggccgctcgagggacagcctaaggccaatcctaccgtgacactgttccctccaagcagcgaagaactccaggccaacaaggccacacttgtgtgcctgatctccgacttctaccctggggctgtgacagtggcttggaaggccgatggatctcctgtgaaagccggcgtggaaaccaccaagccatccaagcagagcaacaacaaatacgccgccagctcctacctgagcctgacacctgagcagtggaagtcccacagatcctacagctgccaagtgacccacgaaggcagcaccgtggaaaagacagtggcccctacagagtgcagcatccccgaggacacattcttcccaagccccgagagcagctgcgacgtgaagctggtggaaaagagcttcgagacagacaccaacctgaacttccagaacctgagcgtgatcggcttcagaatcctgctgctgaaagtggccggctttaacctgctgatgaccctgcggctgtggtccagcagggccaagcgatctggatctggagcaacaaacttctcactactcaaacaagcaggtgacgtggaggagaatcccgggcctactagcatggccttaccagtgaccgccttgctcctgccgctggccttgctgctccacgccgccaggccggagatcgtgctgacacagagccctgccaccctgtctctgagccctggcgaaagagccaccctgagctgtagagccagccagagcgtgtccagctacctggcctggtatcagcagaagcccggccaggctccccggctgctgatctacgatgccagcaatagagccaccggcatccccgccagattttccggctctggcagcggcaccgacttcaccctgaccatcagctccctggaacccgaggacttcgccgtgtactactgccagcagcggagcaactggcccatcacattcggccagggcacccggctggaaatcaaaggcggaggcggaagtggaggcggaggatctggcggcggaggctctgaggtgcagcttgttgagtctggcggaggactggtgcagcccgatagaagcctgagactgtcttgtgccgccagcggcttcaccttccacgattatgccatgcactgggtccgacaggcccctggcaaaggacttgaatgggtgtccaccatctcttggaacagcggcacaatcggctacgccgactctgtgaagggcagattcaccatcagccgggacaacgccaagaacagcctgtacctccagatgaactccctgagagccgaggacacagccctgtactactgcgccaaggacatccagtacggcaactactactacggcatggacgtgtggggccagggcacaacagtgacagtctcttctacgcgtgaggcctctacaaagggaccctccgtgtttcctctggctcccagcagcaagtctacaagcggaggaacagccgctctgggctgcctggtcaaggattactttcccgagcctgtgaccgtgtcctggaatagcggagcactgacaagcggcgtgcacacctttccagccgtgctgcaaagcagcggcctgtactctctgagcagcgtggtcacagtgcctagctctagcctgggcacccagacctacatctgcaatgtgaaccacaagcctagcaacaccaaggtggacaagagagtggaacccaagagctgtggcagagccgattgcggctttaccagcgagagctaccagcagggcgtgctgagcgccaccatcctgtacgagatcctgctgggcaaggccaccctgtacgccgtgctggtgtctgccctggtgctgatggctatggtcaagcggaaggacagccggggacgcgccaagagaagcggatctggcgtgaagcagaccctgaatttcgacctgctgaagctggctggcgacgtggaatccaacccaggcccttctagaggccatatgaccgagtacaagcccacggtgcgcctcgccacccgcgacgacgtccccagggccgtacgcaccctcgccgccgcgttcgccgactaccccgccacgcgccacaccgtcgatccggaccgccacatcgagcgggtcaccgagctgcaagaactcttcctcacgcgcgtcgggctcgacatcggcaaggtgtgggtcgcggacgacggcgccgcggtggcggtctggaccacgccggagagcgtcgaagcgggggcggtgttcgccgagatcggcccgcgcatggccgagttgagcggttcccggctggccgcgcagcaacagatggaaggcctcctggcgccgcaccggcccaaggagcccgcgtggttcctggccaccgtcggcgtctcgcccgaccaccagggcaagggtctgggcagcgccgtcgtgctccccggagtggaggcggccgagcgcgccggggtgcccgccttcctggagacctccgcgccccgcaacctccccttctacgagcggctcggcttcaccgtcaccgccgacgtcgaggtgcccgaaggaccgcgcacctggtgcatgacccgcaagcccggtgcctga

SEQ ID NO: 18178 - DNA, 2622 bp, synthetic construct
  source 1..2622: mol_type = other DNA
atggccttaccagtgaccgccttgctcctgccgctggccttgctgctccacgccgccaggccgctcgagggacagcctaaggccaatcctaccgtgacactgttccctccaagcagcgaagaactccaggccaacaaggccacacttgtgtgcctgatctccgacttctaccctggggctgtgacagtggcttggaaggccgatggatctcctgtgaaagccggcgtggaaaccaccaagccatccaagcagagcaacaacaaatacgccgccagctcctacctgagcctgacacctgagcagtggaagtcccacagatcctacagctgccaagtgacccacgaaggcagcaccgtggaaaagacagtggcccctacagagtgcagcatccccgaggacacattcttcccaagccccgagagcagctgcgacgtgaagctggtggaaaagagcttcgagacagacaccaacctgaacttccagaacctgagcgtgatcggcttcagaatcctgctgctgaaagtggccggctttaacctgctgatgaccctgcggctgtggtccagcagggccaagcgatctggatctggagcaacaaacttctcactactcaaacaagcaggtgacgtggaggagaatcccgggcctactagcatggccttaccagtgaccgccttgctcctgccgctggccttgctgctccacgccgccaggccggacatccagatgacccagagccccagcagcctgtctgccagcgtgggcgacagagtgaccatcacctgtagagccagccaggacgtgaacaccgccgtggcctggtatcagcagaagcctggcaaggcccccaagctgctgatctacagcgccagcttcctggaaagcggcgtgcccagcagattcagcggaagcagaagcggcaccgacttcaccctgaccatcagctccctccagcccgaggacttcgccacctactactgccagcagcactacaccacccctcccaccttcggccagaccaaggtggaaatcaagagaggcggaggcggaagtggaggcggaggatctggcggcggaggctctgaagtgcaactggtggaatctggcggcggactggtgcagcctggcggatctctgagactgagctgtgccgccagcggcttcaacatcaaggacacctacatccactgggtgcgccaggcccctggaaagggactggaatgggtggcccggatctaccccaccaacggctacaccagatacgccgacagcgtgaagggccggttcaccatcagcgccgacaccagcaagaataccgcctacctccagatgaacagcctgcgggccgaggataccgccgtgtactactgctcaagatggggaggcgacggcttctacgctatggacgtgtggggccagggcacccttgtgaccgtgtcatctacgcgtgaggcctctacaaagggaccctccgtgtttcctctggctcccagcagcaagtctacaagcggaggaacagccgctctgggctgcctggtcaaggattactttcccgagcctgtgaccgtgtcctggaatagcggagcactgacaagcggcgtgcacacctttccagccgtgctgcaaagcagcggcctgtactctctgagcagcgtggtcacagtgcctagctctagcctgggcacccagacctacatctgcaatgtgaaccacaagcctagcaacaccaaggtggacaagagagtggaacccaagagctgtggcagagccgattgcggctttaccagcgagagctaccagcagggcgtgctgagcgccaccatcctgtacgagatcctgctgggcaaggccaccctgtacgccgtgctggtgtctgccctggtgctgatggctatggtcaagcggaaggacagccggggacgcgccaagagaagcggatctggcgtgaagcagaccctgaatttcgacctgctgaagctggctggcgacgtggaatccaacccaggcccttctagaggccatatgaccgagtacaagcccacggtgcgcctcgccacccgcgacgacgtccccagggccgtacgcaccctcgccgccgcgttcgccgactaccccgccacgcgccacaccgtcgatccggaccgccacatcgagcgggtcaccgagctgcaagaactcttcctcacgcgcgtcgggctcgacatcggcaaggtgtgggtcgcggacgacggcgccgcggtggcggtctggaccacgccggagagcgtcgaagcgggggcggtgttcgccgagatcggcccgcgcatggccgagttgagcggttcccggctggccgcgcagcaacagatggaaggcctcctggcgccgcaccggcccaaggagcccgcgtggttcctggccaccgtcggcgtctcgcccgaccaccagggcaagggtctgggcagcgccgtcgtgctccccggagtggaggcggccgagcgcgccggggtgcccgccttcctggagacctccgcgccccgcaacctccccttctacgagcggctcggcttcaccgtcaccgccgacgtcgaggtgcccgaaggaccgcgcacctggtgcatgacccgcaagcccggtgcctga

SEQ ID NO: 18179 - DNA, 2259 bp, synthetic construct
  source 1..2259: mol_type = other DNA
atggccttaccagtgaccgccttgctcctgccgctggccttgctgctccacgccgccaggccgctcgagggacagcctaaggccaatcctaccgtgacactgttccctccaagcagcgaagaactccaggccaacaaggccacacttgtgtgcctgatctccgacttctaccctggggctgtgacagtggcttggaaggccgatggatctcctgtgaaagccggcgtggaaaccaccaagccatccaagcagagcaacaacaaatacgccgccagctcctacctgagcctgacacctgagcagtggaagtcccacagatcctacagctgccaagtgacccacgaaggcagcaccgtggaaaagacagtggcccctacagagtgcagcatccccgaggacacattcttcccaagccccgagagcagctgcgacgtgaagctggtggaaaagagcttcgagacagacaccaacctgaacttccagaacctgagcgtgatcggcttcagaatcctgctgctgaaagtggccggctttaacctgctgatgaccctgcggctgtggtccagcagggccaagcgatctggatctggagcaacaaacttctcactactcaaacaagcaggtgacgtggaggagaatcccgggcctactagcatggccctgcccgtgacagccctgctgctgcctctggctctgctgctgcacgccgccagacccgatgaattcgaggtgcaactggtggaaagcggcggaggcctggtgcaggctggcggatctctgagactgagctgtgccgccagcggcatcaccttcagcatcaacacaatgggctggtacagacaggcccctggcaagcagagggaactggtggccctgatctccagcatcggcgacacctactacgccgacagcgtgaagggccggttcaccatcagccgggacaacgccaagaacaccgtgtacctccagatgaacagcctgaagcccgaggacaccgccgtgtactactgcaagcggttcagaacagccgcccagggcaccgattattggggccagggaacacaagtgaccgtgtcctctacgcgtgaggcctctacaaagggaccctccgtgtttcctctggctcccagcagcaagtctacaagcggaggaacagccgctctgggctgcctggtcaaggattactttcccgagcctgtgaccgtgtcctggaatagcggagcactgacaagcggcgtgcacacctttccagccgtgctgcaaagcagcggcctgtactctctgagcagcgtggtcacagtgcctagctctagcctgggcacccagacctacatctgcaatgtgaaccacaagcctagcaacaccaaggtggacaagagagtggaacccaagagctgtggcagagccgattgcggctttaccagcgagagctaccagcagggcgtgctgagcgccaccatcctgtacgagatcctgctgggcaaggccaccctgtacgccgtgctggtgtctgccctggtgctgatggctatggtcaagcggaaggacagccggggacgcgccaagagaagcggatctggcgtgaagcagaccctgaatttcgacctgctgaagctggctggcgacgtggaatccaacccaggcccttctagaggccatatgaccgagtacaagcccacggtgcgcctcgccacccgcgacgacgtccccagggccgtacgcaccctcgccgccgcgttcgccgactaccccgccacgcgccacaccgtcgatccggaccgccacatcgagcgggtcaccgagctgcaagaactcttcctcacgcgcgtcgggctcgacatcggcaaggtgtgggtcgcggacgacggcgccgcggtggcggtctggaccacgccggagagcgtcgaagcgggggcggtgttcgccgagatcggcccgcgcatggccgagttgagcggttcccggctggccgcgcagcaacagatggaaggcctcctggcgccgcaccggcccaaggagcccgcgtggttcctggccaccgtcggcgtctcgcccgaccaccagggcaagggtctgggcagcgccgtcgtgctccccggagtggaggcggccgagcgcgccggggtgcccgccttcctggagacctccgcgccccgcaacctccccttctacgagcggctcggcttcaccgtcaccgccgacgtcgaggtgcccgaaggaccgcgcacctggtgcatgacccgcaagcccggtgcctga

SEQ ID NO: 18180 - DNA, 2259 bp, synthetic construct; identical to SEQ ID NO: 18179
  source 1..2259: mol_type = other DNA

SEQ ID NO: 18181 - DNA, 3054 bp, synthetic construct
  source 1..3054: mol_type = other DNA
atggccttaccagtgaccgccttgctcctgccgctggccttgctgctccacgccgccaggccgctcgagggacagcctaaggccaatcctaccgtgacactgttccctccaagcagcgaagaactccaggccaacaaggccacacttgtgtgcctgatctccgacttctaccctggggctgtgacagtggcttggaaggccgatggatctcctgtgaaagccggcgtggaaaccaccaagccatccaagcagagcaacaacaaatacgccgccagctcctacctgagcctgacacctgagcagtggaagtcccacagatcctacagctgccaagtgacccacgaaggcagcaccgtggaaaagacagtggcccctacagagtgcagcatccccgaggacacattcttcccaagccccgagagcagctgcgacgtgaagctggtggaaaagagcttcgagacagacaccaacctgaacttccagaacctgagcgtgatcggcttcagaatcctgctgctgaaagtggccggctttaacctgctgatgaccctgcggctgtggtccagcagggccaagcgatctggatctggagcaacaaacttctcactactcaaacaagcaggtgacgtggaggagaatcccgggcctactagcatggccttaccagtgaccgccttgctcctgccgctggccttgctgctccacgccgccaggccgcaggtccagctcgtcgagtccggcggcggcctcgtccaggccggcgactccgtcaccctctcctgcaccgcctccggccgcaccttctcctcctacgccctcgcctggttccgccagcgccccggcaaggagcgcgagttcgtcgccggcctccgctggggcggccccaccaactacgccgactccgtcaaggaccgcttcaccatctccggcgactccgccaagcacaccatgtacctccagatgaactccctcaagcccgaggacaccgccgtctactactgcggctacaaccccggcggctgggccgtcccctcccagtacgagtacgactcctggggccagggcacccaggtcaccgtctcctccggtaccggcggaggcggatctggcggcggaggtagcggtggcggaggatctgaattcgacatccagatgacacagagccctagcagcctgtctgccagcgtgggagacagagtgaccatcacatgcaaggccagcgaccacatcaacaactggctggcctggtatcagcagaagcctggacaggcccctaagctgctgatctacggcgctaccacactggaaacaggcgtgcccagcagattttctggcagcggctctggcaccgactacaccctgacaatatccagcctccagcctgaggacttcgccacctactactgtcagcagagctggaacaccccttggacattcggccagggcaccaagctggaaatcaagagaggcggaggcggaagtggaggcggaggatctggcggcggaggctctcaagttcagcttcaacagcctggcgctgagctggtcaaacctggcgcttctgtgaagatgagctgcaaagccagcggctacgccttcagcagctactggatcaactggatgaagcagaaacccggccagggactcgaatggatcggccaaatctatcccggcgacggcgacaccaactacaacggcaagttcaagggcagagccacactgaccgccgatacctctagcagcacagcctacatgcagctgagcagcctgaccagcgaagatagcgccgtgtacttctgtgcccggtccatcacaacagtcgtgggctgcgctatggactattggggccagggaacaagcgtgaccgtgtctagtacgcgtgaggcctctacaaagggaccctccgtgtttcctctggctcccagcagcaagtctacaagcggaggaacagccgctctgggctgcctggtcaaggattactttcccgagcctgtgaccgtgtcctggaatagcggagcactgacaagcggcgtgcacacctttccagccgtgctgcaaagcagcggcctgtactctctgagcagcgtggtcacagtgcctagctctagcctgggcacccagacctacatctgcaatgtgaaccacaagcctagcaacaccaaggtggacaagagagtggaacccaagagctgtggcagagccgattgcggctttaccagcgagagctaccagcagggcgtgctgagcgccaccatcctgtacgagatcctgctgggcaaggccaccctgtacgccgtgctggtgtctgccctggtgctgatggctatggtcaagcggaaggacagccggggacgcgccaagagaagcggatctggcgtgaagcagaccctgaatttcgacctgctgaagctggctggcgacgtggaatccaacccaggcccttctagaggccatatgaccgagtacaagcccacggtgcgcctcgccacccgcgacgacgtccccagggccgtacgcaccctcgccgccgcgttcgccgactaccccgccacgcgccacaccgtcgatccggaccgccacatcgagcgggtcaccgagctgcaagaactcttcctcacgcgcgtcgggctcgacatcggcaaggtgtgggtcgcggacgacggcgccgcggtggcggtctggaccacgccggagagcgtcgaagcgggggcggtgttcgccgagatcggcccgcgcatggccgagttgagcggttcccggctggccgcgcagcaacagatggaaggcctcctggcgccgcaccggcccaaggagcccgcgtggttcctggccaccgtcggcgtctcgcccgaccaccagggcaagggtctgggcagcgccgtcgtgctccccggagtggaggcggccgagcgcgccggggtgcccgccttcctggagacctccgcgccccgcaacctccccttctacgagcggctcggcttcaccgtcaccgccgacgtcgaggtgcccgaaggaccgcgcacctggtgcatgacccgcaagcccggtgcctga

SEQ ID NO: 18182 - DNA, 3441 bp, synthetic construct
  source 1..3441: mol_type = other DNA
atggccttaccagtgaccgccttgctcctgccgctggccttgctgctccacgccgccaggccgctcgagggacagcctaaggccaatcctaccgtgacactgttccctccaagcagcgaagaactccaggccaacaaggccacacttgtgtgcctgatctccgacttctaccctggggctgtgacagtggcttggaaggccgatggatctcctgtgaaagccggcgtggaaaccaccaagccatccaagcagagcaacaacaaatacgccgccagctcctacctgagcctgacacctgagcagtggaagtcccacagatcctacagctgccaagtgacccacgaaggcagcaccgtggaaaagacagtggcccctacagagtgcagcatccccgaggacacattcttcccaagccccgagagcagctgcgacgtgaagctggtggaaaagagcttcgagacagacaccaacctgaacttccagaacctgagcgtgatcggcttcagaatcctgctgctgaaagtggccggctttaacctgctgatgaccctgcggctgtggtccagcagggccaagcgatctggatctggagcaacaaacttctcactactcaaacaagcaggtgacgtggaggagaatcccgggcctactagcatggccttaccagtgaccgccttgctcctgccgctggccttgctgctccacgccgccaggccggaggttcagctgcttgagtctggcggaggactggttcaacctggcggaagcctgagactgtcttgtgccgccagcggcttcacctttagcagctacgccatgagctgggtccgacaggctcctggcaaaggactggaatgggtgtccagcatcagcggcagcggcgactacatctactacgccgatagcgtgaagggcagattcaccatcagccgggacatcagcaagaacaccctgtacctccagatgaacagcctgagagccgaggacaccgccgtgtactactgtgccaaagaaggcaccggcgctaacagcagcctggccgattatagaggccagggcacactggtcaccgtgtctagtggcggaggaagcggcggaggatctcaggtccagctcgtcgagtccggcggcggcctcgtccaggccggcgactccgtcaccctctcctgcaccgcctccggccgcaccttctcctcctacgccctcgcctggttccgccagcgccccggcaaggagcgcgagttcgtcgccggcctccgctggggcggccccaccaactacgccgactccgtcaaggaccgcttcaccatctccggcgactccgccaagcacaccatgtacctccagatgaactccctcaagcccgaggacaccgccgtctactactgcggctacaaccccggcggctgggccgtcccctcccagtacgagtacgactcctggggccagggcacccaggtcaccgtctcctccggtaccggcggaggcggatctggcggcggaggtagcggtggcggaggatctgaattcgacatccagatgacacagagccctagcagcctgtctgccagcgtgggagacagagtgaccatcacatgcaaggccagcgaccacatcaacaactggctggcctggtatcagcagaagcctggacaggcccctaagctgctgatctacggcgctaccacactggaaacaggcgtgcccagcagattttctggcagcggctctggcaccgactacaccctgacaatatccagcctccagcctgaggacttcgccacctactactgtcagcagagctggaacaccccttggacattcggccagggcaccaagctggaaatcaagagaggcggaggcggaagtggaggcggaggatctggcggcggaggctctcaagttcagcttcaacagcctggcgctgagctggtcaaacctggcgcttctgtgaagatgagctgcaaagccagcggctacgccttcagcagctactggatcaactggatgaagcagaaacccggccagggactcgaatggatcggccaaatctatcccggcgacggcgacaccaactacaacggcaagttcaagggcagagccacactgaccgccgatacctctagcagcacagcctacatgcagctgagcagcctgaccagcgaagatagcgccgtgtacttctgtgcccggtccatcacaacagtcgtgggctgcgctatggactattggggccagggaacaagcgtgaccgtgtctagtacgcgtgaggcctctacaaagggaccctccgtgtttcctctggctcccagcagcaagtctacaagcggaggaacagccgctctgggctgcctggtcaaggattactttcccgagcctgtgaccgtgtcctggaatagcggagcactgacaagcggcgtgcacacctttccagccgtgctgcaaagcagcggcctgtactctctgagcagcgtggtcacagtgcctagctctagcctgggcacccagacctacatctgcaatgtgaaccacaagcctagcaacaccaaggtggacaagagagtggaacccaagagctgtggcagagccgattgcggctttaccagcgagagctaccagcagggcgtgctgagcgccaccatcctgtacgagatcctgctgggcaaggccaccctgtacgccgtgctggtgtctgccctggtgctgatggctatggtcaagcggaaggacagccggggacgcgccaagagaagcggatctggcgtgaagcagaccctgaatttcgacctgctgaagctggctggcgacgtggaatccaacccaggcccttctagaggccatatgaccgagtacaagcccacggtgcgcctcgccacccgcgacgacgtccccagggccgtacgcaccctcgccgccgcgttcgccgactaccccgccacgcgccacaccgtcgatccggaccgccacatcgagcgggtcaccgagctgcaagaactcttcctcacgcgcgtcgggctcgacatcggcaaggtgtgggtcgcggacgacggcgccgcggtggcggtctggaccacgccggagagcgtcgaagcgggggcggtgttcgccgagatcggcccgcgcatggccgagttgagcggttcccggctggccgcgcagcaacagatggaaggcctcctggcgccgcaccggcccaaggagcccgcgtggttcctggccaccgtcggcgtctcgcccgaccaccagggcaagggtctgggcagcgccgtcgtgctccccggagtggaggcggccgagcgcgccggggtgcccgccttcctggagacctccgcgccccgcaacctccccttctacgagcggctcggcttcaccgtcaccgccgacgtcgaggtgcccgaaggaccgcgcacctggtgcatgacccgcaagcccggtgcctga

SEQ ID NO: 18183 - DNA, 3435 bp, synthetic construct
  source 1..3435: mol_type = other DNA
atggccttaccagtgaccgccttgctcctgccgctggccttgctgctccacgccgccaggccgctcgagggacagcctaaggccaatcctaccgtgacactgttccctccaagcagcgaagaactccaggccaacaaggccacacttgtgtgcctgatctccgacttctaccctggggctgtgacagtggcttggaaggccgatggatctcctgtgaaagccggcgtggaaaccaccaagccatccaagcagagcaacaacaaatacgccgccagctcctacctgagcctgacacctgagcagtggaagtcccacagatcctacagctgccaagtgacccacgaaggcagcaccgtggaaaagacagtggcccctacagagtgcagcatccccgaggacacattcttcccaagccccgagagcagctgcgacgtgaagctggtggaaaagagcttcgagacagacaccaacctgaacttccagaacctgagcgtgatcggcttcagaatcctgctgctgaaagtggccggctttaacctgctgatgaccctgcggctgtggtccagcagggccaagcgatctggatctggagcaacaaacttctcactactcaaacaagcaggtgacgtggaggagaatcccgggcctactagcatggccttaccagtgaccgccttgctcctgccgctggccttgctgctccacgccgccaggccgggcgtgacacagagccccacacacctgattaagaccagaggccagcaggccacactgagatgcagccctatcagcggccacaccagcgtgtactggtatcagcaggctctcggactgggcctccagttcctgctttggtacgacgagggcgaagagagaaaccggggcaacttccctcctcggttttccggcagacagttccccaactacagcagcgagctgaacgtgaacgccctggaactggaagatagcgccctgtacctgtgtgcctcttctcttggtggacctcgcggactggctggactgagaggggatgagcagtttttcggccctggcaccagactgaccgtgctggaaggcggaggaagcggcggaggatctcaggtccagctcgtcgagtccggcggcggcctcgtccaggccggcgactccgtcaccctctcctgcaccgcctccggccgcaccttctcctcctacgccctcgcctggttccgccagcgccccggcaaggagcgcgagttcgtcgccggcctccgctggggcggccccaccaactacgccgactccgtcaaggaccgcttcaccatctccggcgactccgccaagcacaccatgtacctccagatgaactccctcaagcccgaggacaccgccgtctactactgcggctacaaccccggcggctgggccgtcccctcccagtacgagtacgactcctggggccagggcacccaggtcaccgtctcctccggtaccggcggaggcggatctggcggcggaggtagcggtggcggaggatctgaattcgacatccagatgacacagagccctagcagcctgtctgccagcgtgggagacagagtgaccatcacatgcaaggccagcgaccacatcaacaactggctggcctggtatcagcagaagcctggacaggcccctaagctgctgatctacggcgctaccacactggaaacaggcgtgcccagcagattttctggcagcggctctggcaccgactacaccctgacaatatccagcctccagcctgaggacttcgccacctactactgtcagcagagctggaacaccccttggacattcggccagggcaccaagctggaaatcaagagaggcggaggcggaagtggaggcggaggatctggcggcggaggctctcaagttcagcttcaacagcctggcgctgagctggtcaaacctggcgcttctgtgaagatgagctgcaaagccagcggctacgccttcagcagctactggatcaactggatgaagcagaaacccggccagggactcgaatggatcggccaaatctatcccggcgacggcgacaccaactacaacggcaagttcaagggcagagccacactgaccgccgatacctctagcagcacagcctacatgcagctgagcagcctgaccagcgaagatagcgccgtgtacttctgtgcccggtccatcacaacagtcgtgggctgcgctatggactattggggccagggaacaagcgtgaccgtgtctagtacgcgtgaggcctctacaaagggaccctccgtgtttcctctggctcccagcagcaagtctacaagcggaggaacagccgctctgggctgcctggtcaaggattactttcccgagcctgtgaccgtgtcctggaatagcggagcactgacaagcggcgtgcacacctttccagccgtgctgcaaagcagcggcctgtactctctgagcagcgtggtcacagtgcctagctctagcctgggcacccagacctacatctgcaatgtgaaccacaagcctagcaacaccaaggtggacaagagagtggaacccaagagctgtggcagagccgattgcggctttaccagcgagagctaccagcagggcgtgctgagcgccaccatcctgtacgagatcctgctgggcaaggccaccctgtacgccgtgctggtgtctgccctggtgctgatggctatggtcaagcggaaggacagccggggacgcgccaagagaagcggatctggcgtgaagcagaccctgaatttcgacctgctgaagctggctggcgacgtggaatccaacccaggcccttctagaggccatatgaccgagtacaagcccacggtgcgcctcgccacccgcgacgacgtccccagggccgtacgcaccctcgccgccgcgttcgccgactaccccgccacgcgccacaccgtcgatccggaccgccacatcgagcgggtcaccgagctgcaagaactcttcctcacgcgcgtcgggctcgacatcggcaaggtgtgggtcgcggacgacggcgccgcggtggcggtctggaccacgccggagagcgtcgaagcgggggcggtgttcgccgagatcggcccgcgcatggccgagttgagcggttcccggctggccgcgcagcaacagatggaaggcctcctggcgccgcaccggcccaaggagcccgcgtggttcctggccaccgtcggcgtctcgcccgaccaccagggcaagggtctgggcagcgccgtcgtgctccccggagtggaggcggccgagcgcgccggggtgcccgccttcctggagacctccgcgccccgcaacctccccttctacgagcggctcggcttcaccgtcaccgccgacgtcgaggtgcccgaaggaccgcgcacctggtgcatgacccgcaagcccggtgcctga

SEQ ID NO: 18184 - DNA, 2715 bp, synthetic construct
  source 1..2715: mol_type = other DNA
atggccttaccagtgaccgccttgctcctgccgctggccttgctgctccacgccgccaggccgctcgagggacagcctaaggccaatcctaccgtgacactgttccctccaagcagcgaagaactccaggccaacaaggccacacttgtgtgcctgatctccgacttctaccctggggctgtgacagtggcttggaaggccgatggatctcctgtgaaagccggcgtggaaaccaccaagccatccaagcagagcaacaacaaatacgccgccagctcctacctgagcctgacacctgagcagtggaagtcccacagatcctacagctgccaagtgacccacgaaggcagcaccgtggaaaagacagtggcccctacagagtgcagcatccccgaggacacattcttcccaagccccgagagcagctgcgacgtgaagctggtggaaaagagcttcgagacagacaccaacctgaacttccagaacctgagcgtgatcggcttcagaatcctgctgctgaaagtggccggctttaacctgctgatgaccctgcggctgtggtccagcagggccaagcgatctggatctggagcaacaaacttctcactactcaaacaagcaggtgacgtggaggagaatcccgggcctactagcatggccttaccagtgaccgccttgctcctgccgctggccttgctgctccacgccgccaggccgggcgtgacacagagccccacacacctgattaagaccagaggccagcaggccacactgagatgcagccctatcagcggccacaccagcgtgtactggtatcagcaggctctcggactgggcctccagttcctgctttggtacgacgagggcgaagagagaaaccggggcaacttccctcctcggttttccggcagacagttccccaactacagcagcgagctgaacgtgaacgccctggaactggaagatagcgccctgtacctgtgtgcctcttctcttggtggacctcgcggactggctggactgagaggggatgagcagtttttcggccctggcaccagactgaccgtgctggaaggcggaggaagcggcggaggatctggcgtgacacagagccccacacacctgattaagaccagaggccagcaggccacactgagatgcagccctatcagcggccacaccagcgtgtactggtatcagcaggctctcggactgggcctccagttcctgctttggtacgacgagggcgaagagagaaaccggggcaacttccctcctcggttttccggcagacagttccccaactacagcagcgagctgaacgtgaacgccctggaactggaagatagcgccctgtacctgtgtgccagctctctcggcggagatgaactgggagccgatggcaacgagcagttctttggccctggcaccagactgaccgtgctggaaggtaccggcggaggcggatctggcggcggaggtagcggtggcggaggatctgaattcgacatccagatgacacagagccctagcagcctgtctgccagcgtgggagacagagtgaccatcacatgcaaggccagcgaccacatcaacaactggctggcctggtatcagcagaagcctggacaggcccctaagctgctgatctacggcgctaccacactggaaacaggcgtgcccagcagattttctggcagcggctctggcaccgactacaccctgacaatatccagcctccagcctgaggacttcgccacctactactgtcagcagagctggaacaccccttggacattcggccagggcaccaagctggaaatcaagagaggcggaggcggaagtggaggcggaggatctggcggcggaggctctcaagttcagcttcaacagcctggcgctgagctggtcaaacctggcgcttctgtgaagatgagctgcaaagccagcggctacgccttcagcagctactggatcaactggatgaagcagaaacccggccagggactcgaatggatcggccaaatctatcccggcgacggcgacaccaactacaacggcaagttcaagggcagagccacactgaccgccgatacctctagcagcacagcctacatgcagctgagcagcctgaccagcgaagatagcgccgtgtacttctgtgcccggtccatcacaacagtcgtgggctgcgctatggactattggggccagggaacaagcgtgaccgtgtctagtacgcgtgaggcctctacaaagggaccctccgtgtttcctctggctcccagcagcaagtctacaagcggaggaacagccgctctgggctgcctggtcaaggattactttcccgagcctgtgaccgtgtcctggaatagcggagcactgacaagcggcgtgcacacctttccagccgtgctgcaaagcagcggcctgtactctctgagcagcgtggtcacagtgcctagctctagcctgggcacccagacctacatctgcaatgtgaaccacaagcctagcaacaccaaggtggacaagagagtggaacccaagagctgtggcagagccgattgcggctttaccagcgagagctaccagcagggcgtgctgagcgccaccatcctgtacgagatcctgctgggcaaggccaccctgtacgccgtgctggtgtctgccctggtgctgatggctatggtcaagcggaaggacagccgggga

SEQ ID NO: 18185 - DNA, 2277 bp, synthetic construct
  source 1..2277: mol_type = other DNA
atggccttaccagtgaccgccttgctcctgccgctggccttgctgctccacgccgccaggccgctcgagggacagcctaaggccaatcctaccgtgacactgttccctccaagcagcgaagaactccaggccaacaaggccacacttgtgtgcctgatctccgacttctaccctggggctgtgacagtggcttggaaggccgatggatctcctgtgaaagccggcgtggaaaccaccaagccatccaagcagagcaacaacaaatacgccgccagctcctacctgagcctgacacctgagcagtggaagtcccacagatcctacagctgccaagtgacccacgaaggcagcaccgtggaaaagacagtggcccctacagagtgcagcatccccgaggacacattcttcccaagccccgagagcagctgcgacgtgaagctggtggaaaagagcttcgagacagacaccaacctgaacttccagaacctgagcgtgatcggcttcagaatcctgctgctgaaagtggccggctttaacctgctgatgaccctgcggctgtggtccagcagggccaagcgatctggatctggagcaacaaacttctcactactcaaacaagcaggtgacgtggaggagaatcccgggcctactagcatggccctgcccgtgacagccctgctgctgcctctggctctgctgctgcacgccgccagacccgatgaattcggctctgacctgggcatcaagctgctgttcgccgctgccaagggccaggacgacgaagtgcggattctgctggctgctggggccgacgtgaacgccaaggatttcgagggctacacccccctgcacgtggccgcctatgatggacacctggaaatcgtggaagtgctgctgaaggctggcgctgatgtgaatgccaaagacagccagggccggacccctctgcatgaagccgcctacagcggccatctggaaattgtggaagtgctgctgaaagccggggcagacgtgaacgctcaggacgacgctggcgagacaccagccgatctggctgcagcttggggccacgaagatatcgccgaggtgctgcagaagacgcgtgaggcctctacaaagggaccctccgtgtttcctctggctcccagcagcaagtctacaagcggaggaacagccgctctgggctgcctggtcaaggattactttcccgagcctgtgaccgtgtcctggaatagcggagcactgacaagcggcgtgcacacctttccagccgtgctgcaaagcagcggcctgtactctctgagcagcgtggtcacagtgcctagctctagcctgggcacccagacctacatctgcaatgtgaaccacaagcctagcaacaccaaggtggacaagagagtggaacccaagagctgtggcagagccgattgcggctttaccagcgagagctaccagcagggcgtgctgagcgccaccatcctgtacgagatcctgctgggcaaggccaccctgtacgccgtgctggtgtctgccctggtgctgatggctatggtcaagcggaaggacagccggggacgcgccaagagaagcggatctggcgtgaagcagaccctgaatttcgacctgctgaagctggctggcgacgtggaatccaacccaggcccttctagaggccatatgaccgagtacaagcccacggtgcgcctcgccacccgcgacgacgtccccagggccgtacgcaccctcgccgccgcgttcgccgactaccccgccacgcgccacaccgtcgatccggaccgccacatcgagcgggtcaccgagctgcaagaactcttcctcacgcgcgtcgggctcgacatcggcaaggtgtgggtcgcggacgacggcgccgcggtggcggtctggaccacgccggagagcgtcgaagcgggggcggtgttcgccgagatcggcccgcgcatggccgagttgagcggttcccggctggccgcgcagcaacagatggaaggcctcctggcgccgcaccggcccaaggagcccgcgtggttcctggccaccgtcggcgtctcgcccgaccaccagggcaagggtctgggcagcgccgtcgtgctccccggagtggaggcggccgagcgcgccggggtgcccgccttcctggagacctccgcgccccgcaacctccccttctacgagcggctcggcttcaccgtcaccgccgacgtcgaggtgcccgaaggaccgcgcacctggtgcatgacccgcaagcccggtgcctga

SEQ ID NO: 18186 - DNA, 2064 bp, synthetic construct
  source 1..2064: mol_type = other DNA
atggccttaccagtgaccgccttgctcctgccgctggccttgctgctccacgccgccaggccgctcgagggacagcctaaggccaatcctaccgtgacactgttccctccaagcagcgaagaactccaggccaacaaggccacacttgtgtgcctgatctccgacttctaccctggggctgtgacagtggcttggaaggccgatggatctcctgtgaaagccggcgtggaaaccaccaagccatccaagcagagcaacaacaaatacgccgccagctcctacctgagcctgacacctgagcagtggaagtcccacagatcctacagctgccaagtgacccacgaaggcagcaccgtggaaaagacagtggcccctacagagtgcagcatccccgaggacacattcttcccaagccccgagagcagctgcgacgtgaagctggtggaaaagagcttcgagacagacaccaacctgaacttccagaacctgagcgtgatcggcttcagaatcctgctgctgaaagtggccggctttaacctgctgatgaccctgcggctgtggtccagcagggccaagcgatctggatctggagcaacaaacttctcactactcaaacaagcaggtgacgtggaggagaatcccgggcctactagcatggactggatttggcgcatccttttccttgtcggcgctgctaccggcgcccattccttcgaaggcagcggattcgaatacgccaaagagatgcggaacgcctactgggagatcgccctgctgcccaatctgaccaaccagcagaagagagcccccatcagaaagctgtacgacgacccctcccagagcagcgagctgctgtctgaggctaaaaaactgaacgatagccagacgcgtgaggcctctacaaagggaccctccgtgtttcctctggctcccagcagcaagtctacaagcggaggaacagccgctctgggctgcctggtcaaggattactttcccgagcctgtgaccgtgtcctggaatagcggagcactgacaagcggcgtgcacacctttccagccgtgctgcaaagcagcggcctgtactctctgagcagcgtggtcacagtgcctagctctagcctgggcacccagacctacatctgcaatgtgaaccacaagcctagcaacaccaaggtggacaagagagtggaacccaagagctgtggcagagccgattgcggctttaccagcgagagctaccagcagggcgtgctgagcgccaccatcctgtacgagatcctgctgggcaaggccaccctgtacgccgtgctggtgtctgccctggtgctgatggctatggtcaagcggaaggacagccggggacgcgccaagagaagcggatctggcgtgaagcagaccctgaatttcgacctgctgaagctggctggcgacgtggaatccaacccaggcccttctagaggccatatgaccgagtacaagcccacggtgcgcctcgccacccgcgacgacgtccccagggccgtacgcaccctcgccgccgcgttcgccgactaccccgccacgcgccacaccgtcgatccggaccgccacatcgagcgggtcaccgagctgcaagaactcttcctcacgcgcgtcgggctcgacatcggcaaggtgtgggtcgcggacgacggcgccgcggtggcggtctggaccacgccggagagcgtcgaagcgggggcggtgttcgccgagatcggcccgcgcatggccgagttgagcggttcccggctggccgcgcagcaacagatggaaggcctcctggcgccgcaccggcccaaggagcccgcgtggttcctggccaccgtcggcgtctcgcccgaccaccagggcaagggtctgggcagcgccgtcgtgctccccggagtggaggcggccgagcgcgccggggtgcccgccttcctggagacctccgcgccccgcaacctccccttctacgagcggctcggcttcaccgtcaccgccgacgtcgaggtgcccgaaggaccgcgcacctggtgcatgacccgcaagcccggtgcctga

SEQ ID NO: 18187 - DNA, 2730 bp, synthetic construct
  source 1..2730: mol_type = other DNA
atggccttaccagtgaccgccttgctcctgccgctggccttgctgctccacgccgccaggccgctcgagggacagcctaaggccaatcctaccgtgacactgttccctccaagcagcgaagaactccaggccaacaaggccacacttgtgtgcctgatctccgacttctaccctggggctgtgacagtggcttggaaggccgatggatctcctgtgaaagccggcgtggaaaccaccaagccatccaagcagagcaacaacaaatacgccgccagctcctacctgagcctgacacctgagcagtggaagtcccacagatcctacagctgccaagtgacccacgaaggcagcaccgtggaaaagacagtggcccctacagagtgcagcatccccgaggacacattcttcccaagccccgagagcagctgcgacgtgaagctggtggaaaagagcttcgagacagacaccaacctgaacttccagaacctgagcgtgatcggcttcagaatcctgctgctgaaagtggccggctttaacctgctgatgaccctgcggctgtggtccagcagggccaagcgatctggatctggagcaacaaacttctcactactcaaacaagcaggtgacgtggaggagaatcccgggcctactagcatggccctgcccgtgacagccctgctgctgcctctggctctgctgctgcacgccgccagacccgatgaattcgaggtgcaactggtggaaagcggcggaggcctggtgcaggctggcggatctctgagactgagctgtgccgccagcggcatcaccttcagcatcaacacaatgggctggtacagacaggcccctggcaagcagagggaactggtggccctgatctccagcatcggcgacacctactacgccgacagcgtgaagggccggttcaccatcagccgggacaacgccaagaacaccgtgtacctccagatgaacagcctgaagcccgaggacaccgccgtgtactactgcaagcggttcagaacagccgcccagggcaccgattattggggccagggaacacaagtgaccgtgtcctctctcgagggaggaggcggctccgggggaggcggaagtggaggcggaggatctgggtctggaggaagcggatctggaggctcagggtcagggggctcaggcagtggaggctctttcgaagtgcaactggtggaatctgggggcggactggtgcagccaggcggaagtctgaggctgtcttgtgccgcctccggcagcatcttcggcttcaacgacatggcctggtatcggcaggctcccggaaaacagcgcgagctggtggctctgattagcagagtgggcgtgaccagcagcgccgactctgtgaagggcagattcacaatctccagagtgaacgccaaggatacagtgtacctccagatgaactctctgaaacctgaggatacagcagtgtactattgctacatggaccagcggctggacggcagcacactggcctactggggacagggaactcaagtgacagtgtctagcacgcgtgaggcctctacaaagggaccctccgtgtttcctctggctcccagcagcaagtctacaagcggaggaacagccgctctgggctgcctggtcaaggattactttcccgagcctgtgaccgtgtcctggaatagcggagcactgacaagcggcgtgcacacctttccagccgtgctgcaaagcagcggcctgtactctctgagcagcgtggtcacagtgcctagctctagcctgggcacccagacctacatctgcaatgtgaaccacaagcctagcaacaccaaggtggacaagagagtggaacccaagagctgtggcagagccgattgcggctttaccagcgagagctaccagcagggcgtgctgagcgccaccatcctgtacgagatcctgctgggcaaggccaccctgtacgccgtgctggtgtctgccctggtgctgatggctatggtcaagcggaaggacagccggggacgcgccaagagaagcggatctggcgtgaagcagaccctgaatttcgacctgctgaagctggctggcgacgtggaatccaacccaggcccttctagaggccatatgaccgagtacaagcccacggtgcgcctcgccacccgcgacgacgtccccagggccgtacgcaccctcgccgccgcgttcgccgactaccccgccacgcgccacaccgtcgatccggaccgccacatcgagcgggtcaccgagctgcaagaactcttcctcacgcgcgtcgggctcgacatcggcaaggtgtgggtcgcggacgacggcgccgcggtggcggtctggaccacgccggagagcgtcgaagcgggggcggtgttcgccgagatcggcccgcgcatggccgagttgagcggttcccggctggccgcgcagcaacagatggaaggcctcctggcgccgcaccggcccaaggagcccgcgtggttcctggccaccgtcggcgtctcgcccgaccaccagggcaagggtctgggcagcgccgtcgtgctccccggagtggaggcggccgagcgcgccggggtgcccgccttcctggagacctccgcgccccgcaacctccccttctacgagcggctcggcttcaccgtcaccgccgacgtcgaggtgcccgaaggaccgcgcacctggtgcatgacccgcaagcccggtgcctga

SEQ ID NO: 18188 - DNA, 2472 bp, synthetic construct
  source 1..2472: mol_type = other DNA
atggccttaccagtgaccgccttgctcctgccgctggccttgctgctccacgccgccaggccgctcgagggacagcctaaggccaatcctaccgtgacactgttccctccaagcagcgaagaactccaggccaacaaggccacacttgtgtgcctgatctccgacttctaccctggggctgtgacagtggcttggaaggccgatggatctcctgtgaaagccggcgtggaaaccaccaagccatccaagcagagcaacaacaaatacgccgccagctcctacctgagcctgacacctgagcagtggaagtcccacagatcctacagctgccaagtgacccacgaaggcagcaccgtggaaaagacagtggcccctacagagtgcagcatccccgaggacacattcttcccaagccccgagagcagctgcgacgtgaagctggtggaaaagagcttcgagacagacaccaacctgaacttccagaacctgagcgtgatcggcttcagaatcctgctgctgaaagtggccggctttaacctgctgatgaccctgcggctgtggtccagcagggccaagcgatctggatctggagcaacaaacttctcactactcaaacaagcaggtgacgtggaggagaatcccgggcctactagcatggcccttccagtcactgccttgctgttgcctctggcgctcctgctccacgccgctagaccgggcatgagaaccgaggacctgcctaaggccgtggtgttcctggaaccccagtggtacagagtgctggaaaaggacagcgtgaccctgaagtgccagggcgcctacagccccgaggacaatagcacccagtggttccacaacgagagcctgatctccagccaggccagcagctacttcatcgacgccgccaccgtggacgacagcggcgagtatagatgccagaccaacctgagcaccctgagcgaccccgtgcagctggaagtgcacatcggatggctgctgctgcaggcccccagatgggtgttcaaagaagaggaccccatccacctgagatgccactcttggaagaacaccgccctgcacaaagtgacctacctgcagaacggcaagggcagaaagtacttccaccacaacagcgacttctacatccccaaggccaccctgaaggactccggctcctacttctgcagaggcctcgtgggcagcaagaacgtgtccagcgagacagtgaacatcaccatcacccagggcctggccgtgtctaccatcagcagctttttcccacccggctaccagacgcgtgaggcctctacaaagggaccctccgtgtttcctctggctcccagcagcaagtctacaagcggaggaacagccgctctgggctgcctggtcaaggattactttcccgagcctgtgaccgtgtcctggaatagcggagcactgacaagcggcgtgcacacctttccagccgtgctgcaaagcagcggcctgtactctctgagcagcgtggtcacagtgcctagctctagcctgggcacccagacctacatctgcaatgtgaaccacaagcctagcaacaccaaggtggacaagagagtggaacccaagagctgtggcagagccgattgcggctttaccagcgagagctaccagcagggcgtgctgagcgccaccatcctgtacgagatcctgctgggcaaggccaccctgtacgccgtgctggtgtctgccctggtgctgatggctatggtcaagcggaaggacagccggggacgcgccaagagaagcggatctggcgtgaagcagaccctgaatttcgacctgctgaagctggctggcgacgtggaatccaacccaggcccttctagaggccatatgaccgagtacaagcccacggtgcgcctcgccacccgcgacgacgtccccagggccgtacgcaccctcgccgccgcgttcgccgactaccccgccacgcgccacaccgtcgatccggaccgccacatcgagcgggtcaccgagctgcaagaactcttcctcacgcgcgtcgggctcgacatcggcaaggtgtgggtcgcggacgacggcgccgcggtggcggtctggaccacgccggagagcgtcgaagcgggggcggtgttcgccgagatcggcccgcgcatggccgagttgagcggttcccggctggccgcgcagcaacagatggaaggcctcctggcgccgcaccggcccaaggagcccgcgtggttcctggccaccgtcggcgtctcgcccgaccaccagggcaagggtctgggcagcgccgtcgtgctccccggagtggaggcggccgagcgcgccggggtgcccgccttcctggagacctccgcgccccgcaacctccccttctacgagcggctcggcttcaccgtcaccgccgacgtcgaggtgcccgaaggaccgcgcacctggtgcatgacccgcaagcccggtgcctga

SEQ ID NO: 18189 - DNA, 1353 bp, synthetic construct
  source 1..1353: mol_type = other DNA
atggccttaccagtgaccgccttgctcctgccgctggccttgctgctccacgccgccaggccgctcgagggacagcctaaggccaatcctaccgtgacactgttccctccaagcagcgaagaactccaggccaacaaggccacacttgtgtgcctgatctccgacttctaccctggggctgtgacagtggcttggaaggccgatggatctcctgtgaaagccggcgtggaaaccaccaagccatccaagcagagcaacaacaaatacgccgccagctcctacctgagcctgacacctgagcagtggaagtcccacagatcctacagctgccaagtgacccacgaaggcagcaccgtggaaaagacagtggcccctacagagtgcagcatccccgaggacacattcttcccaagccccgagagcagctgcgacgtgaagctggtggaaaagagcttcgagacagacaccaacctgaacttccagaacctgagcgtgatcggcttcagaatcctgctgctgaaagtggccggctttaacctgctgatgaccctgcggctgtggtccagcagggccaagcgatctggatctggagcaacaaacttctcactactcaaacaagcaggtgacgtggaggagaatcccgggcctactagcgccaccatggccttaccagtgaccgccttgctcctgccgctggccttgctgctccacgccgccaggccgatggaccccgacctggaaatcagagccgccttcctgcggcagagaaacacagccctgagaacagaggtggccgagctggaacaagaggtgcagcggctggaaaacgaggtgtcccagtacgagacaagatacggccctctcggaggcggaaaaacgcgtgaggcctctacaaagggaccctccgtgtttcctctggctcccagcagcaagtctacaagcggaggaacagccgctctgggctgcctggtcaaggattactttcccgagcctgtgaccgtgtcctggaatagcggagcactgacaagcggcgtgcacacctttccagccgtgctgcaaagcagcggcctgtactctctgagcagcgtggtcacagtgcctagctctagcctgggcacccagacctacatctgcaatgtgaaccacaagcctagcaacaccaaggtggacaagagagtggaacccaagagctgtggcagagccgattgcggctttaccagcgagagctaccagcagggcgtgctgagcgccaccatcctgtacgagatcctgctgggcaaggccaccctgtacgccgtgctggtgtctgccctggtgctgatggctatggtcaagcggaaggacagccgggga

SEQ ID NO: 18190 - DNA, 1353 bp, synthetic construct
  source 1..1353: mol_type = other DNA
atggccttaccagtgaccgccttgctcctgccgctggccttgctgctccacgccgccaggccgctcgagggacagcctaaggccaatcctaccgtgacactgttccctccaagcagcgaagaactccaggccaacaaggccacacttgtgtgcctgatctccgacttctaccctggggctgtgacagtggcttggaaggccgatggatctcctgtgaaagccggcgtggaaaccaccaagccatccaagcagagcaacaacaaatacgccgccagctcctacctgagcctgacacctgagcagtggaagtcccacagatcctacagctgccaagtgacccacgaaggcagcaccgtggaaaagacagtggcccctacagagtgcagcatccccgaggacacattcttcccaagccccgagagcagctgcgacgtgaagctggtggaaaagagcttcgagacagacaccaacctgaacttccagaacctgagcgtgatcggcttcagaatcctgctgctgaaagtggccggctttaacctgctgatgaccctgcggctgtggtccagcagggccaagcgatctggatctggagcaacaaacttctcactactcaaacaagcaggtgacgtggaggagaatcccgggcctactagcgccaccatggccttaccagtgaccgccttgctcctgccgctggccttgctgctccacgccgccaggccgatggaccctgatctcgaaattgaggccgcctttctggaacgcgagaacactgccctggaaaccagggtcgcagagctgagacagagagtgcagagactgcggaacagagtgtctcagtaccgcaccagatatggcccactcggcggaggtaaaacgcgtgaggcctctacaaagggaccctccgtgtttcctctggctcccagcagcaagtctacaagcggaggaacagccgctctgggctgcctggtcaaggattactttcccgagcctgtgaccgtgtcctggaatagcggagcactgacaagcggcgtgcacacctttccagccgtgctgcaaagcagcggcctgtactctctgagcagcgtggtcacagtgcctagctctagcctgggcacccagacctacatctgcaatgtgaaccacaagcctagcaacaccaaggtggacaagagagtggaacccaagagctgtggcagagccgattgcggctttaccagcgagagctaccagcagggcgtgctgagcgccaccatcctgtacgagatcctgctgggcaaggccaccctgtacgccgtgctggtgtctgccctggtgctgatggctatggtcaagcggaaggacagccgggga

SEQ ID NO: 18191 - DNA, 2058 bp, synthetic construct
  source 1..2058: mol_type = other DNA
atggccttaccagtgaccgccttgctcctgccgctggccttgctgctccacgccgccaggccgctcgagggacagcctaaggccaatcctaccgtgacactgttccctccaagcagcgaagaactccaggccaacaaggccacacttgtgtgcctgatctccgacttctaccctggggctgtgacagtggcttggaaggccgatggatctcctgtgaaagccggcgtggaaaccaccaagccatccaagcagagcaacaacaaatacgccgccagctcctacctgagcctgacacctgagcagtggaagtcccacagatcctacagctgccaagtgacccacgaaggcagcaccgtggaaaagacagtggcccctacagagtgcagcatccccgaggacacattcttcccaagccccgagagcagctgcgacgtgaagctggtggaaaagagcttcgagacagacaccaacctgaacttccagaacctgagcgtgatcggcttcagaatcctgctgctgaaagtggccggctttaacctgctgatgaccctgcggctgtggtccagcagggccaagcgatctggatctggagcaacaaacttctcactactcaaacaagcaggtgacgtggaggagaatcccgggcctactagcgccaccatggccttaccagtgaccgccttgctcctgccgctggccttgctgctccacgccgccaggccgctgttcaatcaagaggtgcagatccctctgaccgagagctactgtggcccctgtcctaagaactggatctgctacaagaacaactgctaccagttcttcgacgagagcaagaattggtacgagagccaggccagctgcatgagccagaatgccagcctgctgaaggtgtacagcaaagaggaccaggacctgctgaaactggtcaagagcgcccactggatgggccttgtgcacatccccaccaatggctcttggcagtgggaggacggcagcattctgagccctaacctgctgaccatcatcgagatgcagaagggcgactgcgccctgtacgccagcagctttaagggctacatcgagaattgcagcaccccgaacacctacatctgtatgcagagaaccgtttctggcggaggcggctctggaggaggcggaagtggcggcggaggcgacctctttaatcaagaagtccagattccactcaccgaatcctactgcggaccttgtccaaaaaattggatttgttataagaacaactgttatcaattctttgatgagtctaaaaattggtatgagtcccaggcttcctgcatgtctcagaacgcttctctgctgaaagtctactctaaagaagatcaggatctcctgaagctcgtcaagtctgcccattggatggggctcgtccacattcctaccaacggaagctggcaatgggaagatggctccatcctgtctccaaatctgctcacgattattgaaatgcagaaaggggattgtgctctctacgccagctccttcaagggatatattgagaactgtagcacgcccaatacttatatctgtatgcaacggaccgtgacgcgtgaggcctctacaaagggaccctccgtgtttcctctggctcccagcagcaagtctacaagcggaggaacagccgctctgggctgcctggtcaaggattactttcccgagcctgtgaccgtgtcctggaatagcggagcactgacaagcggcgtgcacacctttccagccgtgctgcaaagcagcggcctgtactctctgagcagcgtggtcacagtgcctagctctagcctgggcacccagacctacatctgcaatgtgaaccacaagcctagcaacaccaaggtggacaagagagtggaacccaagagctgtggcagagccgattgcggctttaccagcgagagctaccagcagggcgtgctgagcgccaccatcctgtacgagatcctgctgggcaaggccaccctgtacgccgtgctggtgtctgccctggtgctgatggctatggtcaagcggaaggacagccgggga

SEQ ID NO: 18192 - DNA, 2058 bp, synthetic construct
  source 1..2058: mol_type = other DNA
atggccttaccagtgaccgccttgctcctgccgctggccttgctgctccacgccgccaggccgctcgagggacagcctaaggccaatcctaccgtgacactgttccctccaagcagcgaagaactccaggccaacaaggccacacttgtgtgcctgatctccgacttctaccctggggctgtgacagtggcttggaaggccgatggatctcctgtgaaagccggcgtggaaaccaccaagccatccaagcagagcaacaacaaatacgccgccagctcctacctgagcctgacacctgagcagtggaagtcccacagatcctacagctgccaagtgacccacgaaggcagcaccgtggaaaagacagtggcccctacagagtgcagcatccccgaggacacattcttcccaagccccgagagcagctgcgacgtgaagctggtggaaaagagcttcgagacagacaccaacctgaacttccagaacctgagcgtgatcggcttcagaatcctgctgctgaaagtggccggctttaacctgctgatgaccctgcggctgtggtccagcagggccaagcgatctggatctggagcaacaaacttctcactactcaaacaagcaggtgacgtggaggagaatcccgggcctactagcgccaccatggccttaccagtgaccgccttgctcctgccgctggccttgctgctccacgccgccaggccgctgttcaatcaagaggtgcagatccctctgaccgagagctactgtggcccctgtcctaagaactggatctgctacaagaacaactgctaccagttcttcgacgagagcaagaattggtacgagagccaggccagctgcatgagccagaatgccagcctgctgaaggtgtacagcaaagaggaccaggacctgctgaaactggtcaagagcgcccactggatgggccttgtgcacatccccaccaatggctcttggcagtgggaggacggcagcattctgagccctaacctgctgaccatcatcgagatgcagaagggcgactgcgccctgtacgccagcagctttaagggcttcatcgagaattgcagcaccccgaacacctacatctgtatgcagagaaccgttggcggaggcggaagtggaggcggaggatctggcggcggaggctctgacctctttaatcaagaagtccagattccactcaccgaatcctactgcggaccttgtccaaaaaattggatttgttataagaacaactgttatcaattctttgatgagtctaaaaattggtatgagtcccaggcttcctgcatgtctcagaacgcttctctgctgaaagtctactctaaagaagatcaggatctcctgaagctcgtcaagtctgcccattggatggggctcgtccacattcctaccaacggaagctggcaatgggaagatggctccatcctgtctccaaatctgctcacgattattgaaatgcagaaaggggattgtgctctctacgccagctccttcaagggatttattgagaactgtagcacgcccaatacttatatctgtatgcaacggaccgtgacgcgtgaggcctctacaaagggaccctccgtgtttcctctggctcccagcagcaagtctacaagcggaggaacagccgctctgggctgcctggtcaaggattactttcccgagcctgtgaccgtgtcctggaatagcggagcactgacaagcggcgtgcacacctttccagccgtgctgcaaagcagcggcctgtactctctgagcagcgtggtcacagtgcctagctctagcctgggcacccagacctacatctgcaatgtgaaccacaagcctagcaacaccaaggtggacaagagagtggaacccaagagctgtggcagagccgattgcggctttaccagcgagagctaccagcagggcgtgctgagcgccaccatcctgtacgagatcctgctgggcaaggccaccctgtacgccgtgctggtgtctgccctggtgctgatggctatggtcaagcggaaggacagccgggga

SEQ ID NO: 18193 - DNA, 2136 bp, synthetic construct
  source 1..2136: mol_type = other DNA
atggccttaccagtgaccgccttgctcctgccgctggccttgctgctccacgccgccaggccgctcgagggacagcctaaggccaatcctaccgtgacactgttccctccaagcagcgaagaactccaggccaacaaggccacacttgtgtgcctgatctccgacttctaccctggggctgtgacagtggcttggaaggccgatggatctcctgtgaaagccggcgtggaaaccaccaagccatccaagcagagcaacaacaaatacgccgccagctcctacctgagcctgacacctgagcagtggaagtcccacagatcctacagctgccaagtgacccacgaaggcagcaccgtggaaaagacagtggcccctacagagtgcagcatccccgaggacacattcttcccaagccccgagagcagctgcgacgtgaagctggtggaaaagagcttcgagacagacaccaacctgaacttccagaacctgagcgtgatcggcttcagaatcctgctgctgaaagtggccggctttaacctgctgatgaccctgcggctgtggtccagcagggccaagcgatctggatctggagcaacaaacttctcactactcaaacaagcaggtgacgtggaggagaatcccgggcctactagcatggccttaccagtgaccgccttgctcctgccgctggccttgctgctccacgccgccaggccgatggaccccgacctggaaatcagagccgccttcctgcggcagagaaacacagccctgagaacagaggtggccgagctggaacaagaggtgcagcggctggaaaacgaggtgtcccagtacgagacaagatacggccctctcggaggcggaaaaggtaccggcggaggcggatctggcggcggaggtagcggtggcggaggatctgaattcgacatccagatgacacagagccctagcagcctgtctgccagcgtgggagacagagtgaccatcacatgcaaggccagcgaccacatcaacaactggctggcctggtatcagcagaagcctggacaggcccctaagctgctgatctacggcgctaccacactggaaacaggcgtgcccagcagattttctggcagcggctctggcaccgactacaccctgacaatatccagcctccagcctgaggacttcgccacctactactgtcagcagagctggaacaccccttggacattcggccagggcaccaagctggaaatcaagagaggcggaggcggaagtggaggcggaggatctggcggcggaggctctcaagttcagcttcaacagcctggcgctgagctggtcaaacctggcgcttctgtgaagatgagctgcaaagccagcggctacgccttcagcagctactggatcaactggatgaagcagaaacccggccagggactcgaatggatcggccaaatctatcccggcgacggcgacaccaactacaacggcaagttcaagggcagagccacactgaccgccgatacctctagcagcacagcctacatgcagctgagcagcctgaccagcgaagatagcgccgtgtacttctgtgcccggtccatcacaacagtcgtgggctgcgctatggactattggggccagggaacaagcgtgaccgtgtctagtacgcgtgaggcctctacaaagggaccctccgtgtttcctctggctcccagcagcaagtctacaagcggaggaacagccgctctgggctgcctggtcaaggattactttcccgagcctgtgaccgtgtcctggaatagcggagcactgacaagcggcgtgcacacctttccagccgtgctgcaaagcagcggcctgtactctctgagcagcgtggtcacagtgcctagctctagcctgggcacccagacctacatctgcaatgtgaaccacaagcctagcaacaccaaggtggacaagagagtggaacccaagagctgtggcagagccgattgcggctttaccagcgagagctaccagcagggcgtgctgagcgccaccatcctgtacgagatcctgctgggcaaggccaccctgtacgccgtgctggtgtctgccctggtgctgatggctatggtcaagcggaaggacagccgggga

SEQ ID NO: 18194 - DNA, 2841 bp, synthetic construct
  source 1..2841: mol_type = other DNA
atggccttaccagtgaccgccttgctcctgccgctggccttgctgctccacgccgccaggccgctcgagggacagcctaaggccaatcctaccgtgacactgttccctccaagcagcgaagaactccaggccaacaaggccacacttgtgtgcctgatctccgacttctaccctggggctgtgacagtggcttggaaggccgatggatctcctgtgaaagccggcgtggaaaccaccaagccatccaagcagagcaacaacaaatacgccgccagctcctacctgagcctgacacctgagcagtggaagtcccacagatcctacagctgccaagtgacccacgaaggcagcaccgtggaaaagacagtggcccctacagagtgcagcatccccgaggacacattcttcccaagccccgagagcagctgcgacgtgaagctggtggaaaagagcttcgagacagacaccaacctgaacttccagaacctgagcgtgatcggcttcagaatcctgctgctgaaagtggccggctttaacctgctgatgaccctgcggctgtggtccagcagggccaagcgatctggatctggagcaacaaacttctcactactcaaacaagcaggtgacgtggaggagaatcccgggcctactagcatggccttaccagtgaccgccttgctcctgccgctggccttgctgctccacgccgccaggccgctgttcaatcaagaggtgcagatccctctgaccgagagctactgtggcccctgtcctaagaactggatctgctacaagaacaactgctaccagttcttcgacgagagcaagaattggtacgagagccaggccagctgcatgagccagaatgccagcctgctgaaggtgtacagcaaagaggaccaggacctgctgaaactggtcaagagcgcccactggatgggccttgtgcacatccccaccaatggctcttggcagtgggaggacggcagcattctgagccctaacctgctgaccatcatcgagatgcagaagggcgactgcgccctgtacgccagcagctttaagggcttcatcgagaattgcagcaccccgaacacctacatctgtatgcagagaaccgttggcggaggcggaagtggaggcggaggatctggcggcggaggctctgacctctttaatcaagaagtccagattccactcaccgaatcctactgcggaccttgtccaaaaaattggatttgttataagaacaactgttatcaattctttgatgagtctaaaaattggtatgagtcccaggcttcctgcatgtctcagaacgcttctctgctgaaagtctactctaaagaagatcaggatctcctgaagctcgtcaagtctgcccattggatggggctcgtccacattcctaccaacggaagctggcaatgggaagatggctccatcctgtctccaaatctgctcacgattattgaaatgcagaaaggggattgtgctctctacgccagctccttcaagggatttattgagaactgtagcacgcccaatacttatatctgtatgcaacggaccgtgggtaccggcggaggcggatctggcggcggaggtagcggtggcggaggatctgaattcgacatccagatgacacagagccctagcagcctgtctgccagcgtgggagacagagtgaccatcacatgcaaggccagcgaccacatcaacaactggctggcctggtatcagcagaagcctggacaggcccctaagctgctgatctacggcgctaccacactggaaacaggcgtgcccagcagattttctggcagcggctctggcaccgactacaccctgacaatatccagcctccagcctgaggacttcgccacctactactgtcagcagagctggaacaccccttggacattcggccagggcaccaagctggaaatcaagagaggcggaggcggaagtggaggcggaggatctggcggcggaggctctcaagttcagcttcaacagcctggcgctgagctggtcaaacctggcgcttctgtgaagatgagctgcaaagccagcggctacgccttcagcagctactggatcaactggatgaagcagaaacccggccagggactcgaatggatcggccaaatctatcccggcgacggcgacaccaactacaacggcaagttcaagggcagagccacactgaccgccgatacctctagcagcacagcctacatgcagctgagcagcctgaccagcgaagatagcgccgtgtacttctgtgcccggtccatcacaacagtcgtgggctgcgctatggactattggggccagggaacaagcgtgaccgtgtctagtacgcgtgaggcctctacaaagggaccctccgtgtttcctctggctcccagcagcaagtctacaagcggaggaacagccgctctgggctgcctggtcaaggattactttcccgagcctgtgaccgtgtcctggaatagcggagcactgacaagcggcgtgcacacctttccagccgtgctgcaaagcagcggcctgtactctctgagcagcgtggtcacagtgcctagctctagcctgggcacccagacctacatctgcaatgtgaaccacaagcctagcaacaccaaggtggacaagagagtggaacccaagagctgtggcagagccgattgcggctttaccagcgagagctaccagcagggcgtgctgagcgccaccatcctgtacgagatcctgctgggcaaggccaccctgtacgccgtgctggtgtctgccctggtgctgatggctatggtcaagcggaaggacagccgggga

SEQ ID NO: 18195 - DNA, 1956 bp, synthetic construct
  source 1..1956: mol_type = other DNA
atggccttaccagtgaccgccttgctcctgccgctggccttgctgctccacgccgccaggccgctcgagggacagcctaaggccaatcctaccgtgacactgttccctccaagcagcgaagaactccaggccaacaaggccacacttgtgtgcctgatctccgacttctaccctggggctgtgacagtggcttggaaggccgatggatctcctgtgaaagccggcgtggaaaccaccaagccatccaagcagagcaacaacaaatacgccgccagctcctacctgagcctgacacctgagcagtggaagtcccacagatcctacagctgccaagtgacccacgaaggcagcaccgtggaaaagacagtggcccctacagagtgcagcatccccgaggacacattcttcccaagccccgagagcagctgcgacgtgaagctggtggaaaagagcttcgagacagacaccaacctgaacttccagaacctgagcgtgatcggcttcagaatcctgctgctgaaagtggccggctttaacctgctgatgaccctgcggctgtggtccagcagggccaagcgatctggatctggagcaacaaacttctcactactcaaacaagcaggtgacgtggaggagaatcccgggcctactagcatggccttaccagtgaccgccttgctcctgccgctggccttgctgctccacgccgccaggccgcagtctgtgctgacacagcctcctagtgtgtctggcgctcctggacagagagtgaccatctcttgtaccggcagcagcagcaatatcggagccggctatgacgtgcactggtatcagcagctccctggcacagcccctaaactgctgatcttcggcaacagcaacagacccagcggcgtgcccgatagattcagcggctttaagagcggcacaagcgccagcctggctatcactggactgcaagccgaggacgaggccgactacttctgccagagctacgatagcagcctgagcggcagcggagtgtttggcacaggcaccaaagtgacagtgcttggcggcggaggcggaagtggaggcggaggatctggcggcggaggctctcaaatgcaactggttcaaagcggcggtggcctggtgcaacctggaagaagtctgagactgagctgtgccgccagcggcttcaccttcgatgattacgccatgcactgggtccgacaggcccctggaaaaggactggaatgggtgtccggcatctcctggaatagcggctctatcggctacgccgacagcgtgaagggcagattcaccatcagccgggacaacgccaagaacagcctgtacctccagatgaactccctgagagccgaggatacagccctgtactactgcgccaaggacatccacagcggcagctactacggcctgctgtactacgctatggacgtgtggggccagggcacaaccgtgacagtttcttctacgcgtgaggcctctacaaagggaccctccgtgtttcctctggctcccagcagcaagtctacaagcggaggaacagccgctctgggctgcctggtcaaggattactttcccgagcctgtgaccgtgtcctggaatagcggagcactgacaagcggcgtgcacacctttccagccgtgctgcaaagcagcggcctgtactctctgagcagcgtggtcacagtgcctagctctagcctgggcacccagacctacatctgcaatgtgaaccacaagcctagcaacaccaaggtggacaagagagtggaacccaagagctgtggcagagccgattgcggctttaccagcgagagctaccagcagggcgtgctgagcgccaccatcctgtacgagatcctgctgggcaaggccaccctgtacgccgtgctggtgtctgccctggtgctgatggctatggtcaagcggaaggacagccgggga

SEQ ID NO: 18196 - DNA, 1467 bp, synthetic construct
  source 1..1467: mol_type = other DNA
atggccttaccagtgaccgccttgctcctgccgctggccttgctgctccacgccgccaggccgctcgagggacagcctaaggccaatcctaccgtgacactgttccctccaagcagcgaagaactccaggccaacaaggccacacttgtgtgcctgatctccgacttctaccctggggctgtgacagtggcttggaaggccgatggatctcctgtgaaagccggcgtggaaaccaccaagccatccaagcagagcaacaacaaatacgccgccagctcctacctgagcctgacacctgagcagtggaagtcccacagatcctacagctgccaagtgacccacgaaggcagcaccgtggaaaagacagtggcccctacagagtgcagcatccccgaggacacattcttcccaagccccgagagcagctgcgacgtgaagctggtggaaaagagcttcgagacagacaccaacctgaacttccagaacctgagcgtgatcggcttcagaatcctgctgctgaaagtggccggctttaacctgctgatgaccctgcggctgtggtccagcagggccaagcgatctggatctggagcaacaaacttctcactactcaaacaagcaggtgacgtggaggagaatcccgggcctactagcatggccttaccagtgaccgccttgctcctgccgctggccttgctgctccacgccgccaggccgatgtgtatgccctgcttcaccaccgaccatcagatggcccggaagtgcgacgattgctgtggcggaaaaggcagaggcaagtgctacggccctcagtgcttgtgtagactcgagggcggaggcggaagtggaggcggaggatctggcggcggaggctctttcgaagtgtgtatgccttgttttaccacggatcaacaaatggctcgcaagtgttctgactgctgcggaggcaaaggccggggaaagtgttatggcccacagtgtctgtgccggacgcgtgaggcctctacaaagggaccctccgtgtttcctctggctcccagcagcaagtctacaagcggaggaacagccgctctgggctgcctggtcaaggattactttcccgagcctgtgaccgtgtcctggaatagcggagcactgacaagcggcgtgcacacctttccagccgtgctgcaaagcagcggcctgtactctctgagcagcgtggtcacagtgcctagctctagcctgggcacccagacctacatctgcaatgtgaaccacaagcctagcaacaccaaggtggacaagagagtggaacccaagagctgtggcagagccgattgcggctttaccagcgagagctaccagcagggcgtgctgagcgccaccatcctgtacgagatcctgctgggcaaggccaccctgtacgccgtgctggtgtctgccctggtgctgatggctatggtcaagcggaaggacagccgggga

SEQ ID NO: 18197 - DNA, 2097 bp, synthetic construct
  source 1..2097: mol_type = other DNA
atggccttaccagtgaccgccttgctcctgccgctggccttgctgctccacgccgccaggccgctcgagggacagcctaaggccaatcctaccgtgacactgttccctccaagcagcgaagaactccaggccaacaaggccacacttgtgtgcctgatctccgacttctaccctggggctgtgacagtggcttggaaggccgatggatctcctgtgaaagccggcgtggaaaccaccaagccatccaagcagagcaacaacaaatacgccgccagctcctacctgagcctgacacctgagcagtggaagtcccacagatcctacagctgccaagtgacccacgaaggcagcaccgtggaaaagacagtggcccctacagagtgcagcatccccgaggacacattcttcccaagccccgagagcagctgcgacgtgaagctggtggaaaagagcttcgagacagacaccaacctgaacttccagaacctgagcgtgatcggcttcagaatcctgctgctgaaagtggccggctttaacctgctgatgaccctgcggctgtggtccagcagggccaagcgatctggatctggagcaacaaacttctcactactcaaacaagcaggtgacgtggaggagaatcccgggcctactagcatggccttaccagtgaccgccttgctcctgccgctggccttgctgctccacgccgccaggccgttcgaagtgtgtatgccttgttttaccacggatcaacaaatggctcgcaagtgttctgactgctgcggaggcaaaggccggggaaagtgttatggcccacagtgtctgtgccggggtaccggcggaggcggatctggcggcggaggtagcggtggcggaggatctgaattcgacatccagatgacacagagccctagcagcctgtctgccagcgtgggagacagagtgaccatcacatgcaaggccagcgaccacatcaacaactggctggcctggtatcagcagaagcctggacaggcccctaagctgctgatctacggcgctaccacactggaaacaggcgtgcccagcagattttctggcagcggctctggcaccgactacaccctgacaatatccagcctccagcctgaggacttcgccacctactactgtcagcagagctggaacaccccttggacattcggccagggcaccaagctggaaatcaagagaggcggaggcggaagtggaggcggaggatctggcggcggaggctctcaagttcagcttcaacagcctggcgctgagctggtcaaacctggcgcttctgtgaagatgagctgcaaagccagcggctacgccttcagcagctactggatcaactggatgaagcagaaacccggccagggactcgaatggatcggccaaatctatcccggcgacggcgacaccaactacaacggcaagttcaagggcagagccacactgaccgccgatacctctagcagcacagcctacatgcagctgagcagcctgaccagcgaagatagcgccgtgtacttctgtgcccggtccatcacaacagtcgtgggctgcgctatggactattggggccagggaacaagcgtgaccgtgtctagtacgcgtgaggcctctacaaagggaccctccgtgtttcctctggctcccagcagcaagtctacaagcggaggaacagccgctctgggctgcctggtcaaggattactttcccgagcctgtgaccgtgtcctggaatagcggagcactgacaagcggcgtgcacacctttccagccgtgctgcaaagcagcggcctgtactctctgagcagcgtggtcacagtgcctagctctagcctgggcacccagacctacatctgcaatgtgaaccacaagcctagcaacaccaaggtggacaagagagtggaacccaagagctgtggcagagccgattgcggctttaccagcgagagctaccagcagggcgtgctgagcgccaccatcctgtacgagatcctgctgggcaaggccaccctgtacgccgtgctggtgtctgccctggtgctgatggctatggtcaagcggaaggacagccgggga

SEQ ID NO: 18198 - DNA, 2487 bp, synthetic construct
  source 1..2487: mol_type = other DNA
atggccttaccagtgaccgccttgctcctgccgctggccttgctgctccacgccgccaggccgctcgagggacagcctaaggccaatcctaccgtgacactgttccctccaagcagcgaagaactccaggccaacaaggccacacttgtgtgcctgatctccgacttctaccctggggctgtgacagtggcttggaaggccgatggatctcctgtgaaagccggcgtggaaaccaccaagccatccaagcagagcaacaacaaatacgccgccagctcctacctgagcctgacacctgagcagtggaagtcccacagatcctacagctgccaagtgacccacgaaggcagcaccgtggaaaagacagtggcccctacagagtgcagcatccccgaggacacattcttcccaagccccgagagcagctgcgacgtgaagctggtggaaaagagcttcgagacagacaccaacctgaacttccagaacctgagcgtgatcggcttcagaatcctgctgctgaaagtggccggctttaacctgctgatgaccctgcggctgtggtccagcagggccaagcgatctggatctggagcaacaaacttctcactactcaaacaagcaggtgacgtggaggagaatcccgggcctactagcatggccttaccagtgaccgccttgctcctgccgctggccttgctgctccacgccgccaggccgttcgaaagccccgtagctcctgcctgtgaccccagactcctaaataaactgctgcgtgactcccacctccttcacagccgactgagtcagtgtcccgacgtggaccctttgtctatccctgttctgctgcctgctgtggactttagcctgggagaatggaaaacccagacggaacagagcaaggcacaggacattctaggggcagtgtcccttctactggagggagtgatggcagcacgaggacagttggaaccctcctgcctctcatccctcctgggacagctttctgggcaggttcgcctcctcttgggggccctgcagggcctcctaggaacccagcttcctctacagggcaggaccacagctcacaaggaccccaatgccctcttcttgagcttgcaacaactgcttcggggaaaggtgcgcttcctgcttctggtagaaggtcccaccctctgtgtcagacggaccctgccaaccacagctgtcccaagcagtacttctggtaccggcggaggcggatctggcggcggaggtagcggtggcggaggatctgaattcgacatccagatgacacagagccctagcagcctgtctgccagcgtgggagacagagtgaccatcacatgcaaggccagcgaccacatcaacaactggctggcctggtatcagcagaagcctggacaggcccctaagctgctgatctacggcgctaccacactggaaacaggcgtgcccagcagattttctggcagcggctctggcaccgactacaccctgacaatatccagcctccagcctgaggacttcgccacctactactgtcagcagagctggaacaccccttggacattcggccagggcaccaagctggaaatcaagagaggcggaggcggaagtggaggcggaggatctggcggcggaggctctcaagttcagcttcaacagcctggcgctgagctggtcaaacctggcgcttctgtgaagatgagctgcaaagccagcggctacgccttcagcagctactggatcaactggatgaagcagaaacccggccagggactcgaatggatcggccaaatctatcccggcgacggcgacaccaactacaacggcaagttcaagggcagagccacactgaccgccgatacctctagcagcacagcctacatgcagctgagcagcctgaccagcgaagatagcgccgtgtacttctgtgcccggtccatcacaacagtcgtgggctgcgctatggactattggggccagggaacaagcgtgaccgtgtctagtacgcgtgaggcctctacaaagggaccctccgtgtttcctctggctcccagcagcaagtctacaagcggaggaacagccgctctgggctgcctggtcaaggattactttcccgagcctgtgaccgtgtcctggaatagcggagcactgacaagcggcgtgcacacctttccagccgtgctgcaaagcagcggcctgtactctctgagcagcgtggtcacagtgcctagctctagcctgggcacccagacctacatctgcaatgtgaaccacaagcctagcaacaccaaggtggacaagagagtggaacccaagagctgtggcagagccgattgcggctttaccagcgagagctaccagcagggcgtgctgagcgccaccatcctgtacgagatcctgctgggcaaggccaccctgtacgccgtgctggtgtctgccctggtgctgatggctatggtcaagcggaaggacagccgggga

SEQ ID NO: 18199 - DNA, 2208 bp, synthetic construct
  source 1..2208: mol_type = other DNA
atggccttaccagtgaccgccttgctcctgccgctggccttgctgctccacgccgccaggccgctcgagggacagcctaaggccaatcctaccgtgacactgttccctccaagcagcgaagaactccaggccaacaaggccacacttgtgtgcctgatctccgacttctaccctggggctgtgacagtggcttggaaggccgatggatctcctgtgaaagccggcgtggaaaccaccaagccatccaagcagagcaacaacaaatacgccgccagctcctacctgagcctgacacctgagcagtggaagtcccacagatcctacagctgccaagtgacccacgaaggcagcaccgtggaaaagacagtggcccctacagagtgcagcatccccgaggacacattcttcccaagccccgagagcagctgcgacgtgaagctggtggaaaagagcttcgagacagacaccaacctgaacttccagaacctgagcgtgatcggcttcagaatcctgctgctgaaagtggccggctttaacctgctgatgaccctgcggctgtggtccagcagggccaagcgatctggatctggagcaacaaacttctcactactcaaacaagcaggtgacgtggaggagaatcccgggcctactagcatggccttaccagtgaccgccttgctcctgccgctggccttgctgctccacgccgccaggccgttcgaaatgggcagctgggaagagttcgagctgagactgaacgccatcgaggaacggctgtatgccctcggaggatctgaagccgagctggcctacttcgagtacgtgatcgccgacttcgagggcaacctgcagcggtacaaaggcaagggcaaccctgaagtggaagccctgtacttcgaggccgacgccatcttcgaggaactggtggcctacagacacaacggtaccggcggaggcggatctggcggcggaggtagcggtggcggaggatctgaattcgacatccagatgacacagagccctagcagcctgtctgccagcgtgggagacagagtgaccatcacatgcaaggccagcgaccacatcaacaactggctggcctggtatcagcagaagcctggacaggcccctaagctgctgatctacggcgctaccacactggaaacaggcgtgcccagcagattttctggcagcggctctggcaccgactacaccctgacaatatccagcctccagcctgaggacttcgccacctactactgtcagcagagctggaacaccccttggacattcggccagggcaccaagctggaaatcaagagaggcggaggcggaagtggaggcggaggatctggcggcggaggctctcaagttcagcttcaacagcctggcgctgagctggtcaaacctggcgcttctgtgaagatgagctgcaaagccagcggctacgccttcagcagctactggatcaactggatgaagcagaaacccggccagggactcgaatggatcggccaaatctatcccggcgacggcgacaccaactacaacggcaagttcaagggcagagccacactgaccgccgatacctctagcagcacagcctacatgcagctgagcagcctgaccagcgaagatagcgccgtgtacttctgtgcccggtccatcacaacagtcgtgggctgcgctatggactattggggccagggaacaagcgtgaccgtgtctagtacgcgtgaggcctctacaaagggaccctccgtgtttcctctggctcccagcagcaagtctacaagcggaggaacagccgctctgggctgcctggtcaaggattactttcccgagcctgtgaccgtgtcctggaatagcggagcactgacaagcggcgtgcacacctttccagccgtgctgcaaagcagcggcctgtactctctgagcagcgtggtcacagtgcctagctctagcctgggcacccagacctacatctgcaatgtgaaccacaagcctagcaacaccaaggtggacaagagagtggaacccaagagctgtggcagagccgattgcggctttaccagcgagagctaccagcagggcgtgctgagcgccaccatcctgtacgagatcctgctgggcaaggccaccctgtacgccgtgctggtgtctgccctggtgctgatggctatggtcaagcggaaggacagccgggga

SEQ ID NO: 18200 - DNA, 2622 bp, synthetic construct
  source 1..2622: mol_type = other DNA
atggccttaccagtgaccgccttgctcctgccgctggccttgctgctccacgccgccaggccgctcgaggaggcctctacaaagggaccctccgtgtttcctctggctcccagcagcaagtctacaagcggaggaacagccgctctgggctgcctggtcaaggattactttcccgagcctgtgaccgtgtcctggaatagcggagcactgacaagcggcgtgcacacctttccagccgtgctgcaaagcagcggcctgtactctctgagcagcgtggtcacagtgcctagctctagcctgggcacccagacctacatctgcaatgtgaaccacaagcctagcaacaccaaggtggacaagagagtggaacccaagagctgtatccccgaggacacattcttcccaagccccgagagcagctgcgacgtgaagctggtggaaaagagcttcgagacagacaccaacctgaacttccagaacctgagcgtgatcggcttcagaatcctgctgctgaaagtggccggctttaacctgctgatgaccctgcggctgtggtccagcagggccaagcgatctggatctggagcaacaaacttctcactactcaaacaagcaggtgacgtggaggagaatcccgggcctactagcatggccttaccagtgaccgccttgctcctgccgctggccttgctgctccacgccgccaggccggacatccagatgacacagactacatcctccctgtctgcctctctgggagacagagtcaccatcagttgcagggcaagtcaggacattagtaaatatttaaattggtatcagcagaaaccagatggaactgttaaactcctgatctaccatacatcaagattacactcaggagtcccatcaaggttcagtggcagtgggtctggaacagattattctctcaccattagcaacctggagcaagaagatattgccacttacttttgccaacagggtaatacgcttccgtacacgttcggaggggggaccaagctggagatcacaggtggcggtggctcgggcggtggtgggtcgggtggcggcggatctgaggtgaaactgcaggagtcaggacctggcctggtggcgccctcacagagcctgtccgtcacatgcactgtctcaggggtctcattacccgactatggtgtaagctggattcgccagcctccacgaaagggtctggagtggctgggagtaatatggggtagtgaaaccacatactataattcagctctcaaatccagactgaccatcatcaaggacaactccaagagccaagttttcttaaaaatgaacagtctgcaaactgatgacacagccatttactactgtgccaaacattattactacggtggtagctatgctatggactactggggtcaaggaacctcagtcaccgtctcctcaacgcgtggacagcctaaggccaatcctaccgtgacactgttccctccaagcagcgaagaactccaggccaacaaggccacacttgtgtgcctgatctccgacttctaccctggggctgtgacagtggcttggaaggccgatggatctcctgtgaaagccggcgtggaaaccaccaagccatccaagcagagcaacaacaaatacgccgccagctcctacctgagcctgacacctgagcagtggaagtcccacagatcctacagctgccaagtgacccacgaaggcagcaccgtggaaaagacagtggcccctacagagtgcagcggcagagccgattgcggctttaccagcgagagctaccagcagggcgtgctgagcgccaccatcctgtacgagatcctgctgggcaaggccaccctgtacgccgtgctggtgtctgccctggtgctgatggctatggtcaagcggaaggacagccggggacgcgccaagagaagcggatctggcgtgaagcagaccctgaatttcgacctgctgaagctggctggcgacgtggaatccaacccaggcccttctagaggccatatgaccgagtacaagcccacggtgcgcctcgccacccgcgacgacgtccccagggccgtacgcaccctcgccgccgcgttcgccgactaccccgccacgcgccacaccgtcgatccggaccgccacatcgagcgggtcaccgagctgcaagaactcttcctcacgcgcgtcgggctcgacatcggcaaggtgtgggtcgcggacgacggcgccgcggtggcggtctggaccacgccggagagcgtcgaagcgggggcggtgttcgccgagatcggcccgcgcatggccgagttgagcggttcccggctggccgcgcagcaacagatggaaggcctcctggcgccgcaccggcccaaggagcccgcgtggttcctggccaccgtcggcgtctcgcccgaccaccagggcaagggtctgggcagcgccgtcgtgctccccggagtggaggcggccgagcgcgccggggtgcccgccttcctggagacctccgcgccccgcaacctccccttctacgagcggctcggcttcaccgtcaccgccgacgtcgaggtgcccgaaggaccgcgcacctggtgcatgacccgcaagcccggtgcctga

SEQ ID NO: 18201 - DNA, 2625 bp, synthetic construct
  source 1..2625: mol_type = other DNA
atggccttaccagtgaccgccttgctcctgccgctggccttgctgctccacgccgccaggccgctcgaggaggcctctacaaagggaccctccgtgtttcctctggctcccagcagcaagtctacaagcggaggaacagccgctctgggctgcctggtcaaggattactttcccgagcctgtgaccgtgtcctggaatagcggagcactgacaagcggcgtgcacacctttccagccgtgctgcaaagcagcggcctgtactctctgagcagcgtggtcacagtgcctagctctagcctgggcacccagacctacatctgcaatgtgaaccacaagcctagcaacaccaaggtggacaagagagtggaacccaagagctgtatccccgaggacacattcttcccaagccccgagagcagctgcgacgtgaagctggtggaaaagagcttcgagacagacaccaacctgaacttccagaacctgagcgtgatcggcttcagaatcctgctgctgaaagtggccggctttaacctgctgatgaccctgcggctgtggtccagcagggccaagcgatctggatctggagcaacaaacttctcactactcaaacaagcaggtgacgtggaggagaatcccgggcctactagcaccatggccttaccagtgaccgccttgctcctgccgctggccttgctgctccacgccgccaggccggagatcgtgatgacccagagccctgccaccctgtctctgagccctggcgaaagagccaccctgagctgtagagccagccaggacatcagcaagtacctgaactggtatcagcagaagcccggccaggcccccagactgctgatctaccacaccagcagactgcacagcggcatccccgccagattttctggctctggcagcggcaccgactacaccctgacaatcagcagcctccagcccgaggacttcgccgtgtacttctgtcagcaaggcaacaccctgccctacaccttcggccagggcaccaagctggaaatcaagggcggaggcggaagtggaggcggaggatctggcggcggaggctctcaggtgcaactccaggaatctggccctggcctcgtgaagcccagcgagacactgagcctgacctgtaccgtgtccggcgtgtccctgcctgactatggcgtgtcctggatcagacagccccctggcaagggcctggaatggatcggagtgatttggggcagcgaaaccacctactacaacagctccctgaagtccagagtgaccatctccaaggacaactccaagaaccaggtgtccctgaagctgagcagcgtgacagccgccgacaccgccgtgtattactgcgccaagcactactactacggcggcagctacgctatggactactggggccagggaaccctcgtgaccgtgtctagtacgcgtggacagcctaaggccaatcctaccgtgacactgttccctccaagcagcgaagaactccaggccaacaaggccacacttgtgtgcctgatctccgacttctaccctggggctgtgacagtggcttggaaggccgatggatctcctgtgaaagccggcgtggaaaccaccaagccatccaagcagagcaacaacaaatacgccgccagctcctacctgagcctgacacctgagcagtggaagtcccacagatcctacagctgccaagtgacccacgaaggcagcaccgtggaaaagacagtggcccctacagagtgcagcggcagagccgattgcggctttaccagcgagagctaccagcagggcgtgctgagcgccaccatcctgtacgagatcctgctgggcaaggccaccctgtacgccgtgctggtgtctgccctggtgctgatggctatggtcaagcggaaggacagccggggacgcgccaagagaagcggatctggcgtgaagcagaccctgaatttcgacctgctgaagctggctggcgacgtggaatccaacccaggcccttctagaggccatatgaccgagtacaagcccacggtgcgcctcgccacccgcgacgacgtccccagggccgtacgcaccctcgccgccgcgttcgccgactaccccgccacgcgccacaccgtcgatccggaccgccacatcgagcgggtcaccgagctgcaagaactcttcctcacgcgcgtcgggctcgacatcggcaaggtgtgggtcgcggacgacggcgccgcggtggcggtctggaccacgccggagagcgtcgaagcgggggcggtgttcgccgagatcggcccgcgcatggccgagttgagcggttcccggctggccgcgcagcaacagatggaaggcctcctggcgccgcaccggcccaaggagcccgcgtggttcctggccaccgtcggcgtctcgcccgaccaccagggcaagggtctgggcagcgccgtcgtgctccccggagtggaggcggccgagcgcgccggggtgcccgccttcctggagacctccgcgccccgcaacctccccttctacgagcggctcggcttcaccgtcaccgccgacgtcgaggtgcccgaaggaccgcgcacctggtgcatgacccgcaagcccggtgcctga

SEQ ID NO: 18202 - DNA, 2628 bp, synthetic construct
  source 1..2628: mol_type = other DNA
atggccttaccagtgaccgccttgctcctgccgctggccttgctgctccacgccgccaggccgctcgaggaggcctctacaaagggaccctccgtgtttcctctggctcccagcagcaagtctacaagcggaggaacagccgctctgggctgcctggtcaaggattactttcccgagcctgtgaccgtgtcctggaatagcggagcactgacaagcggcgtgcacacctttccagccgtgctgcaaagcagcggcctgtactctctgagcagcgtggtcacagtgcctagctctagcctgggcacccagacctacatctgcaatgtgaaccacaagcctagcaacaccaaggtggacaagagagtggaacccaagagctgtatccccgaggacacattcttcccaagccccgagagcagctgcgacgtgaagctggtggaaaagagcttcgagacagacaccaacctgaacttccagaacctgagcgtgatcggcttcagaatcctgctgctgaaagtggccggctttaacctgctgatgaccctgcggctgtggtccagcagggccaagcgatctggatctggagcaacaaacttctcactactcaaacaagcaggtgacgtggaggagaatcccgggcctactagcaccatggccttaccagtgaccgccttgctcctgccgctggccttgctgctccacgccgccaggccggacgagatcgtgctgacacagagccccgccaccctgtcactgtctccaggcgaaagagccaccctgagctgtagcgccagcagcagcgtgtcctacatgcactggtatcagcagaagcccggccaggcccccagactgctgatctacgataccagcaagctggcctccggcatccccgccagattttctggcagcggctccggcaccgacttcaccctgacaatcagcagcctggaacccgaggacgtggccgtgtactactgttttcaaggcagcgtgtaccccttcaccttcggccagggcaccaagctggaaatcaagagaggtggcggtggctcgggcggtggtgggtcgggtggcggcggatctcaggtgcagctccaggaatctggccctggcctcgtgaagcctagccagaccctgagcctgacctgtaccgtgtctggcggcagcatcagcacaagcggcatgggcgtgggctggatcagacagcaccctggcaagggcctggaatggatcggccacatttggtgggacgacgacaagcggtacaaccccgccctgaagtccagagtgaccatcagcgtggacaccagcaagaaccagttcagcctgaagctgagcagcgtgacagccgccgataccgccgtgtattattgcgcccggatggaactgtggtcctactacttcgactactggggccagggaaccctcgtgaccgtgtctagtacgcgtggacagcctaaggccaatcctaccgtgacactgttccctccaagcagcgaagaactccaggccaacaaggccacacttgtgtgcctgatctccgacttctaccctggggctgtgacagtggcttggaaggccgatggatctcctgtgaaagccggcgtggaaaccaccaagccatccaagcagagcaacaacaaatacgccgccagctcctacctgagcctgacacctgagcagtggaagtcccacagatcctacagctgccaagtgacccacgaaggcagcaccgtggaaaagacagtggcccctacagagtgcagcggcagagccgattgcggctttaccagcgagagctaccagcagggcgtgctgagcgccaccatcctgtacgagatcctgctgggcaaggccaccctgtacgccgtgctggtgtctgccctggtgctgatggctatggtcaagcggaaggacagccggggacgcgccaagagaagcggatctggcgtgaagcagaccctgaatttcgacctgctgaagctggctggcgacgtggaatccaacccaggcccttctagaggccatatgaccgagtacaagcccacggtgcgcctcgccacccgcgacgacgtccccagggccgtacgcaccctcgccgccgcgttcgccgactaccccgccacgcgccacaccgtcgatccggaccgccacatcgagcgggtcaccgagctgcaagaactcttcctcacgcgcgtcgggctcgacatcggcaaggtgtgggtcgcggacgacggcgccgcggtggcggtctggaccacgccggagagcgtcgaagcgggggcggtgttcgccgagatcggcccgcgcatggccgagttgagcggttcccggctggccgcgcagcaacagatggaaggcctcctggcgccgcaccggcccaaggagcccgcgtggttcctggccaccgtcggcgtctcgcccgaccaccagggcaagggtctgggcagcgccgtcgtgctccccggagtggaggcggccgagcgcgccggggtgcccgccttcctggagacctccgcgccccgcaacctccccttctacgagcggctcggcttcaccgtcaccgccgacgtcgaggtgcccgaaggaccgcgcacctggtgcatgacccgcaagcccggtgcctga

SEQ ID NO: 18203 - DNA, 2616 bp, synthetic construct
  source 1..2616: mol_type = other DNA
atggccttaccagtgaccgccttgctcctgccgctggccttgctgctccacgccgccaggccgctcgaggaggcctctacaaagggaccctccgtgtttcctctggctcccagcagcaagtctacaagcggaggaacagccgctctgggctgcctggtcaaggattactttcccgagcctgtgaccgtgtcctggaatagcggagcactgacaagcggcgtgcacacctttccagccgtgctgcaaagcagcggcctgtactctctgagcagcgtggtcacagtgcctagctctagcctgggcacccagacctacatctgcaatgtgaaccacaagcctagcaacaccaaggtggacaagagagtggaacccaagagctgtatccccgaggacacattcttcccaagccccgagagcagctgcgacgtgaagctggtggaaaagagcttcgagacagacaccaacctgaacttccagaacctgagcgtgatcggcttcagaatcctgctgctgaaagtggccggctttaacctgctgatgaccctgcggctgtggtccagcagggccaagcgatctggatctggagcaacaaacttctcactactcaaacaagcaggtgacgtggaggagaatcccgggcctactagcatggccttaccagtgaccgccttgctcctgccgctggccttgctgctccacgccgccaggccggacatccagatgacacagagccctagcagcctgtctgccagcgtgggagacagagtgaccatcacctgtagagccagccaggacatcagcaactacctgaactggtatcagcagaagcccggcaaggcccctaagctgctgatctactacaccagcagactgcacagcggcgtgcccagcagattttctggctctggcagcggcaccgacttcaccctgacaatatctagcctccagcctgaggacttcgccacctactattgccagcagggcaacaccctgccttacacatttggacagggcaccaaggtggaaatcaagagaggcggaggcggaagtggaggcggaggatctggcggcggaggctctgaagtgcagctggttgaatcaggtggcggcctggttcaacctggcggatctctgagactgagctgtgccgccagcggcttcaccttcagcgactactttatgagctgggtccgacaggcccctggcaaaggacttgaatgggtcgccaccatcagcaatggcggcacctacacttactaccccgacagcgtgaagggcagattcaccatctccagagacaacagcaagaacaccctgtacctccagatgaactccctgagagccgaggacaccgccgtgtactactgcgccagattcgacggctacatcttcgactattggggccagggcaccctggtcacagtctcttctacgcgtggacagcctaaggccaatcctaccgtgacactgttccctccaagcagcgaagaactccaggccaacaaggccacacttgtgtgcctgatctccgacttctaccctggggctgtgacagtggcttggaaggccgatggatctcctgtgaaagccggcgtggaaaccaccaagccatccaagcagagcaacaacaaatacgccgccagctcctacctgagcctgacacctgagcagtggaagtcccacagatcctacagctgccaagtgacccacgaaggcagcaccgtggaaaagacagtggcccctacagagtgcagcggcagagccgattgcggctttaccagcgagagctaccagcagggcgtgctgagcgccaccatcctgtacgagatcctgctgggcaaggccaccctgtacgccgtgctggtgtctgccctggtgctgatggctatggtcaagcggaaggacagccggggacgcgccaagagaagcggatctggcgtgaagcagaccctgaatttcgacctgctgaagctggctggcgacgtggaatccaacccaggcccttctagaggccatatgaccgagtacaagcccacggtgcgcctcgccacccgcgacgacgtccccagggccgtacgcaccctcgccgccgcgttcgccgactaccccgccacgcgccacaccgtcgatccggaccgccacatcgagcgggtcaccgagctgcaagaactcttcctcacgcgcgtcgggctcgacatcggcaaggtgtgggtcgcggacgacggcgccgcggtggcggtctggaccacgccggagagcgtcgaagcgggggcggtgttcgccgagatcggcccgcgcatggccgagttgagcggttcccggctggccgcgcagcaacagatggaaggcctcctggcgccgcaccggcccaaggagcccgcgtggttcctggccaccgtcggcgtctcgcccgaccaccagggcaagggtctgggcagcgccgtcgtgctccccggagtggaggcggccgagcgcgccggggtgcccgccttcctggagacctccgcgccccgcaacctccccttctacgagcggctcggcttcaccgtcaccgccgacgtcgaggtgcccgaaggaccgcgcacctggtgcatgacccgcaagcccggtgcctga

SEQ ID NO: 18204 - DNA, 2628 bp, synthetic construct
  source 1..2628: mol_type = other DNA
atggccttaccagtgaccgccttgctcctgccgctggccttgctgctccacgccgccaggccgctcgaggaggcctctacaaagggaccctccgtgtttcctctggctcccagcagcaagtctacaagcggaggaacagccgctctgggctgcctggtcaaggattactttcccgagcctgtgaccgtgtcctggaatagcggagcactgacaagcggcgtgcacacctttccagccgtgctgcaaagcagcggcctgtactctctgagcagcgtggtcacagtgcctagctctagcctgggcacccagacctacatctgcaatgtgaaccacaagcctagcaacaccaaggtggacaagagagtggaacccaagagctgtatccccgaggacacattcttcccaagccccgagagcagctgcgacgtgaagctggtggaaaagagcttcgagacagacaccaacctgaacttccagaacctgagcgtgatcggcttcagaatcctgctgctgaaagtggccggctttaacctgctgatgaccctgcggctgtggtccagcagggccaagcgatctggatctggagcaacaaacttctcactactcaaacaagcaggtgacgtggaggagaatcccgggcctactagcatggccttaccagtgaccgccttgctcctgccgctggccttgctgctccacgccgccaggccggacatccagatgacacagagccctagcagcctgtctgccagcgtgggagacagagtgaccatcacatgcaaggccagcgaccacatcaacaactggctggcctggtatcagcagaagcctggacaggcccctaagctgctgatctacggcgctaccacactggaaacaggcgtgcccagcagattttctggcagcggctctggcaccgactacaccctgacaatatccagcctccagcctgaggacttcgccacctactactgtcagcagagctggaacaccccttggacattcggccagggcaccaagctggaaatcaagagaggcggaggcggaagtggaggcggaggatctggcggcggaggctctcaagttcagcttcaacagcctggcgctgagctggtcaaacctggcgcttctgtgaagatgagctgcaaagccagcggctacgccttcagcagctactggatcaactggatgaagcagaaacccggccagggactcgaatggatcggccaaatctatcccggcgacggcgacaccaactacaacggcaagttcaagggcagagccacactgaccgccgatacctctagcagcacagcctacatgcagctgagcagcctgaccagcgaagatagcgccgtgtacttctgtgcccggtccatcacaacagtcgtgggctgcgctatggactattggggccagggaacaagcgtgaccgtgtctagtacgcgtggacagcctaaggccaatcctaccgtgacactgttccctccaagcagcgaagaactccaggccaacaaggccacacttgtgtgcctgatctccgacttctaccctggggctgtgacagtggcttggaaggccgatggatctcctgtgaaagccggcgtggaaaccaccaagccatccaagcagagcaacaacaaatacgccgccagctcctacctgagcctgacacctgagcagtggaagtcccacagatcctacagctgccaagtgacccacgaaggcagcaccgtggaaaagacagtggcccctacagagtgcagcggcagagccgattgcggctttaccagcgagagctaccagcagggcgtgctgagcgccaccatcctgtacgagatcctgctgggcaaggccaccctgtacgccgtgctggtgtctgccctggtgctgatggctatggtcaagcggaaggacagccggggacgcgccaagagaagcggatctggcgtgaagcagaccctgaatttcgacctgctgaagctggctggcgacgtggaatccaacccaggcccttctagaggccatatgaccgagtacaagcccacggtgcgcctcgccacccgcgacgacgtccccagggccgtacgcaccctcgccgccgcgttcgccgactaccccgccacgcgccacaccgtcgatccggaccgccacatcgagcgggtcaccgagctgcaagaactcttcctcacgcgcgtcgggctcgacatcggcaaggtgtgggtcgcggacgacggcgccgcggtggcggtctggaccacgccggagagcgtcgaagcgggggcggtgttcgccgagatcggcccgcgcatggccgagttgagcggttcccggctggccgcgcagcaacagatggaaggcctcctggcgccgcaccggcccaaggagcccgcgtggttcctggccaccgtcggcgtctcgcccgaccaccagggcaagggtctgggcagcgccgtcgtgctccccggagtggaggcggccgagcgcgccggggtgcccgccttcctggagacctccgcgccccgcaacctccccttctacgagcggctcggcttcaccgtcaccgccgacgtcgaggtgcccgaaggaccgcgcacctggtgcatgacccgcaagcccggtgcctga

SEQ ID NO: 18205 - DNA, 2634 bp, synthetic construct
  source 1..2634: mol_type = other DNA
atggccttaccagtgaccgccttgctcctgccgctggccttgctgctccacgccgccaggccgctcgaggaggcctctacaaagggaccctccgtgtttcctctggctcccagcagcaagtctacaagcggaggaacagccgctctgggctgcctggtcaaggattactttcccgagcctgtgaccgtgtcctggaatagcggagcactgacaagcggcgtgcacacctttccagccgtgctgcaaagcagcggcctgtactctctgagcagcgtggtcacagtgcctagctctagcctgggcacccagacctacatctgcaatgtgaaccacaagcctagcaacaccaaggtggacaagagagtggaacccaagagctgtatccccgaggacacattcttcccaagccccgagagcagctgcgacgtgaagctggtggaaaagagcttcgagacagacaccaacctgaacttccagaacctgagcgtgatcggcttcagaatcctgctgctgaaagtggccggctttaacctgctgatgaccctgcggctgtggtccagcagggccaagcgatctggatctggagcaacaaacttctcactactcaaacaagcaggtgacgtggaggagaatcccgggcctactagcatggccttaccagtgaccgccttgctcctgccgctggccttgctgctccacgccgccaggccgcagatcgtgctgtctcagtctcctgccatcctgagcgcttccccaggcgagaaagtgaccatgacctgtagagccagcagcagcgtgtcctacatgcactggtatcagcagaagcccggcagcagccctaagccttggatctacgccaccagcaatctggcctctggcgtgccagccagattttctggctctggcagcggcaccagctacagcttcacaatcagcagagtggaagccgaggacgccgccacctactattgtcagcagtggaccttcaatcctcctaccttcggcggaggcacccggctggaaatcaaaagaacagtggctgctggcggaggcggaagtggaggcggaggatctggcggcggaggctctcaggcttatctgcaacagagcggagccgaactcgtcagacctggcgcttctgtgaagatgagctgcaaggccagcggctacaccttcaccagctataatatgcactgggtcaagcagacccctcggcagggactcgaatggatcggcggaatctatcccggcaacggcgacacctcctacaaccagaagttcaagggcaaagccacactgaccgtgggcaagagcagcagcaccgcctatatgcagctcagcagcctgaccagcgaggacagcgccgtgtacttctgcgccagatacgactacaactacgctatggactactggggccagggcaccagcgtgacagttagctctgccagcacgcgtggacagcctaaggccaatcctaccgtgacactgttccctccaagcagcgaagaactccaggccaacaaggccacacttgtgtgcctgatctccgacttctaccctggggctgtgacagtggcttggaaggccgatggatctcctgtgaaagccggcgtggaaaccaccaagccatccaagcagagcaacaacaaatacgccgccagctcctacctgagcctgacacctgagcagtggaagtcccacagatcctacagctgccaagtgacccacgaaggcagcaccgtggaaaagacagtggcccctacagagtgcagcggcagagccgattgcggctttaccagcgagagctaccagcagggcgtgctgagcgccaccatcctgtacgagatcctgctgggcaaggccaccctgtacgccgtgctggtgtctgccctggtgctgatggctatggtcaagcggaaggacagccggggacgcgccaagagaagcggatctggcgtgaagcagaccctgaatttcgacctgctgaagctggctggcgacgtggaatccaacccaggcccttctagaggccatatgaccgagtacaagcccacggtgcgcctcgccacccgcgacgacgtccccagggccgtacgcaccctcgccgccgcgttcgccgactaccccgccacgcgccacaccgtcgatccggaccgccacatcgagcgggtcaccgagctgcaagaactcttcctcacgcgcgtcgggctcgacatcggcaaggtgtgggtcgcggacgacggcgccgcggtggcggtctggaccacgccggagagcgtcgaagcgggggcggtgttcgccgagatcggcccgcgcatggccgagttgagcggttcccggctggccgcgcagcaacagatggaaggcctcctggcgccgcaccggcccaaggagcccgcgtggttcctggccaccgtcggcgtctcgcccgaccaccagggcaagggtctgggcagcgccgtcgtgctccccggagtggaggcggccgagcgcgccggggtgcccgccttcctggagacctccgcgccccgcaacctccccttctacgagcggctcggcttcaccgtcaccgccgacgtcgaggtgcccgaaggaccgcgcacctggtgcatgacccgcaagcccggtgcctga

SEQ ID NO: 18206 - DNA, 2628 bp, synthetic construct
  source 1..2628: mol_type = other DNA
atggccttaccagtgaccgccttgctcctgccgctggccttgctgctccacgccgccaggccgctcgaggaggcctctacaaagggaccctccgtgtttcctctggctcccagcagcaagtctacaagcggaggaacagccgctctgggctgcctggtcaaggattactttcccgagcctgtgaccgtgtcctggaatagcggagcactgacaagcggcgtgcacacctttccagccgtgctgcaaagcagcggcctgtactctctgagcagcgtggtcacagtgcctagctctagcctgggcacccagacctacatctgcaatgtgaaccacaagcctagcaacaccaaggtggacaagagagtggaacccaagagctgtatccccgaggacacattcttcccaagccccgagagcagctgcgacgtgaagctggtggaaaagagcttcgagacagacaccaacctgaacttccagaacctgagcgtgatcggcttcagaatcctgctgctgaaagtggccggctttaacctgctgatgaccctgcggctgtggtccagcagggccaagcgatctggatctggagcaacaaacttctcactactcaaacaagcaggtgacgtggaggagaatcccgggcctactagcatggccttaccagtgaccgccttgctcctgccgctggccttgctgctccacgccgccaggccggagatcgtgctgacacagagccctgccaccctgtctctgagccctggcgaaagagccaccctgagctgtagagccagccagagcgtgtccagctacctggcctggtatcagcagaagcccggccaggctccccggctgctgatctacgatgccagcaatagagccaccggcatccccgccagattttccggctctggcagcggcaccgacttcaccctgaccatcagctccctggaacccgaggacttcgccgtgtactactgccagcagcggagcaactggcccatcacattcggccagggcacccggctggaaatcaaaggcggaggcggaagtggaggcggaggatctggcggcggaggctctgaggtgcagcttgttgagtctggcggaggactggtgcagcccgatagaagcctgagactgtcttgtgccgccagcggcttcaccttccacgattatgccatgcactgggtccgacaggcccctggcaaaggacttgaatgggtgtccaccatctcttggaacagcggcacaatcggctacgccgactctgtgaagggcagattcaccatcagccgggacaacgccaagaacagcctgtacctccagatgaactccctgagagccgaggacacagccctgtactactgcgccaaggacatccagtacggcaactactactacggcatggacgtgtggggccagggcacaacagtgacagtctcttctacgcgtggacagcctaaggccaatcctaccgtgacactgttccctccaagcagcgaagaactccaggccaacaaggccacacttgtgtgcctgatctccgacttctaccctggggctgtgacagtggcttggaaggccgatggatctcctgtgaaagccggcgtggaaaccaccaagccatccaagcagagcaacaacaaatacgccgccagctcctacctgagcctgacacctgagcagtggaagtcccacagatcctacagctgccaagtgacccacgaaggcagcaccgtggaaaagacagtggcccctacagagtgcagcggcagagccgattgcggctttaccagcgagagctaccagcagggcgtgctgagcgccaccatcctgtacgagatcctgctgggcaaggccaccctgtacgccgtgctggtgtctgccctggtgctgatggctatggtcaagcggaaggacagccggggacgcgccaagagaagcggatctggcgtgaagcagaccctgaatttcgacctgctgaagctggctggcgacgtggaatccaacccaggcccttctagaggccatatgaccgagtacaagcccacggtgcgcctcgccacccgcgacgacgtccccagggccgtacgcaccctcgccgccgcgttcgccgactaccccgccacgcgccacaccgtcgatccggaccgccacatcgagcgggtcaccgagctgcaagaactcttcctcacgcgcgtcgggctcgacatcggcaaggtgtgggtcgcggacgacggcgccgcggtggcggtctggaccacgccggagagcgtcgaagcgggggcggtgttcgccgagatcggcccgcgcatggccgagttgagcggttcccggctggccgcgcagcaacagatggaaggcctcctggcgccgcaccggcccaaggagcccgcgtggttcctggccaccgtcggcgtctcgcccgaccaccagggcaagggtctgggcagcgccgtcgtgctccccggagtggaggcggccgagcgcgccggggtgcccgccttcctggagacctccgcgccccgcaacctccccttctacgagcggctcggcttcaccgtcaccgccgacgtcgaggtgcccgaaggaccgcgcacctggtgcatgacccgcaagcccggtgcctga

SEQ ID NO: 18207 - DNA, 2622 bp, synthetic construct
  source 1..2622: mol_type = other DNA
atggccttaccagtgaccgccttgctcctgccgctggccttgctgctccacgccgccaggccgctcgaggaggcctctacaaagggaccctccgtgtttcctctggctcccagcagcaagtctacaagcggaggaacagccgctctgggctgcctggtcaaggattactttcccgagcctgtgaccgtgtcctggaatagcggagcactgacaagcggcgtgcacacctttccagccgtgctgcaaagcagcggcctgtactctctgagcagcgtggtcacagtgcctagctctagcctgggcacccagacctacatctgcaatgtgaaccacaagcctagcaacaccaaggtggacaagagagtggaacccaagagctgtatccccgaggacacattcttcccaagccccgagagcagctgcgacgtgaagctggtggaaaagagcttcgagacagacaccaacctgaacttccagaacctgagcgtgatcggcttcagaatcctgctgctgaaagtggccggctttaacctgctgatgaccctgcggctgtggtccagcagggccaagcgatctggatctggagcaacaaacttctcactactcaaacaagcaggtgacgtggaggagaatcccgggcctactagcatggccttaccagtgaccgccttgctcctgccgctggccttgctgctccacgccgccaggccggacatccagatgacccagagccccagcagcctgtctgccagcgtgggcgacagagtgaccatcacctgtagagccagccaggacgtgaacaccgccgtggcctggtatcagcagaagcctggcaaggcccccaagctgctgatctacagcgccagcttcctggaaagcggcgtgcccagcagattcagcggaagcagaagcggcaccgacttcaccctgaccatcagctccctccagcccgaggacttcgccacctactactgccagcagcactacaccacccctcccaccttcggccagaccaaggtggaaatcaagagaggcggaggcggaagtggaggcggaggatctggcggcggaggctctgaagtgcaactggtggaatctggcggcggactggtgcagcctggcggatctctgagactgagctgtgccgccagcggcttcaacatcaaggacacctacatccactgggtgcgccaggcccctggaaagggactggaatgggtggcccggatctaccccaccaacggctacaccagatacgccgacagcgtgaagggccggttcaccatcagcgccgacaccagcaagaataccgcctacctccagatgaacagcctgcgggccgaggataccgccgtgtactactgctcaagatggggaggcgacggcttctacgctatggacgtgtggggccagggcacccttgtgaccgtgtcatctacgcgtggacagcctaaggccaatcctaccgtgacactgttccctccaagcagcgaagaactccaggccaacaaggccacacttgtgtgcctgatctccgacttctaccctggggctgtgacagtggcttggaaggccgatggatctcctgtgaaagccggcgtggaaaccaccaagccatccaagcagagcaacaacaaatacgccgccagctcctacctgagcctgacacctgagcagtggaagtcccacagatcctacagctgccaagtgacccacgaaggcagcaccgtggaaaagacagtggcccctacagagtgcagcggcagagccgattgcggctttaccagcgagagctaccagcagggcgtgctgagcgccaccatcctgtacgagatcctgctgggcaaggccaccctgtacgccgtgctggtgtctgccctggtgctgatggctatggtcaagcggaaggacagccggggacgcgccaagagaagcggatctggcgtgaagcagaccctgaatttcgacctgctgaagctggctggcgacgtggaatccaacccaggcccttctagaggccatatgaccgagtacaagcccacggtgcgcctcgccacccgcgacgacgtccccagggccgtacgcaccctcgccgccgcgttcgccgactaccccgccacgcgccacaccgtcgatccggaccgccacatcgagcgggtcaccgagctgcaagaactcttcctcacgcgcgtcgggctcgacatcggcaaggtgtgggtcgcggacgacggcgccgcggtggcggtctggaccacgccggagagcgtcgaagcgggggcggtgttcgccgagatcggcccgcgcatggccgagttgagcggttcccggctggccgcgcagcaacagatggaaggcctcctggcgccgcaccggcccaaggagcccgcgtggttcctggccaccgtcggcgtctcgcccgaccaccagggcaagggtctgggcagcgccgtcgtgctccccggagtggaggcggccgagcgcgccggggtgcccgccttcctggagacctccgcgccccgcaacctccccttctacgagcggctcggcttcaccgtcaccgccgacgtcgaggtgcccgaaggaccgcgcacctggtgcatgacccgcaagcccggtgcctga

SEQ ID NO: 18208 - DNA, 2259 bp, synthetic construct
  source 1..2259: mol_type = other DNA
atggccttaccagtgaccgccttgctcctgccgctggccttgctgctccacgccgccaggccgctcgaggaggcctctacaaagggaccctccgtgtttcctctggctcccagcagcaagtctacaagcggaggaacagccgctctgggctgcctggtcaaggattactttcccgagcctgtgaccgtgtcctggaatagcggagcactgacaagcggcgtgcacacctttccagccgtgctgcaaagcagcggcctgtactctctgagcagcgtggtcacagtgcctagctctagcctgggcacccagacctacatctgcaatgtgaaccacaagcctagcaacaccaaggtggacaagagagtggaacccaagagctgtatccccgaggacacattcttcccaagccccgagagcagctgcgacgtgaagctggtggaaaagagcttcgagacagacaccaacctgaacttccagaacctgagcgtgatcggcttcagaatcctgctgctgaaagtggccggctttaacctgctgatgaccctgcggctgtggtccagcagggccaagcgatctggatctggagcaacaaacttctcactactcaaacaagcaggtgacgtggaggagaatcccgggcctactagcatggccctgcccgtgacagccctgctgctgcctctggctctgctgctgcacgccgccagacccgatgaattcgaggtgcaactggtggaaagcggcggaggcctggtgcaggctggcggatctctgagactgagctgtgccgccagcggcatcaccttcagcatcaacacaatgggctggtacagacaggcccctggcaagcagagggaactggtggccctgatctccagcatcggcgacacctactacgccgacagcgtgaagggccggttcaccatcagccgggacaacgccaagaacaccgtgtacctccagatgaacagcctgaagcccgaggacaccgccgtgtactactgcaagcggttcagaacagccgcccagggcaccgattattggggccagggaacacaagtgaccgtgtcctctacgcgtggacagcctaaggccaatcctaccgtgacactgttccctccaagcagcgaagaactccaggccaacaaggccacacttgtgtgcctgatctccgacttctaccctggggctgtgacagtggcttggaaggccgatggatctcctgtgaaagccggcgtggaaaccaccaagccatccaagcagagcaacaacaaatacgccgccagctcctacctgagcctgacacctgagcagtggaagtcccacagatcctacagctgccaagtgacccacgaaggcagcaccgtggaaaagacagtggcccctacagagtgcagcggcagagccgattgcggctttaccagcgagagctaccagcagggcgtgctgagcgccaccatcctgtacgagatcctgctgggcaaggccaccctgtacgccgtgctggtgtctgccctggtgctgatggctatggtcaagcggaaggacagccggggacgcgccaagagaagcggatctggcgtgaagcagaccctgaatttcgacctgctgaagctggctggcgacgtggaatccaacccaggcccttctagaggccatatgaccgagtacaagcccacggtgcgcctcgccacccgcgacgacgtccccagggccgtacgcaccctcgccgccgcgttcgccgactaccccgccacgcgccacaccgtcgatccggaccgccacatcgagcgggtcaccgagctgcaagaactcttcctcacgcgcgtcgggctcgacatcggcaaggtgtgggtcgcggacgacggcgccgcggtggcggtctggaccacgccggagagcgtcgaagcgggggcggtgttcgccgagatcggcccgcgcatggccgagttgagcggttcccggctggccgcgcagcaacagatggaaggcctcctggcgccgcaccggcccaaggagcccgcgtggttcctggccaccgtcggcgtctcgcccgaccaccagggcaagggtctgggcagcgccgtcgtgctccccggagtggaggcggccgagcgcgccggggtgcccgccttcctggagacctccgcgccccgcaacctccccttctacgagcggctcggcttcaccgtcaccgccgacgtcgaggtgcccgaaggaccgcgcacctggtgcatgacccgcaagcccggtgcctga

SEQ ID NO: 18209 - DNA, 2259 bp, synthetic construct; identical to SEQ ID NO: 18208
  source 1..2259: mol_type = other DNA

SEQ ID NO: 18210 - DNA, 3054 bp, synthetic construct
  source 1..3054: mol_type = other DNA
atggccttaccagtgaccgccttgctcctgccgctggccttgctgctccacgccgccaggccgctcgaggaggcctctacaaagggaccctccgtgtttcctctggctcccagcagcaagtctacaagcggaggaacagccgctctgggctgcctggtcaaggattactttcccgagcctgtgaccgtgtcctggaatagcggagcactgacaagcggcgtgcacacctttccagccgtgctgcaaagcagcggcctgtactctctgagcagcgtggtcacagtgcctagctctagcctgggcacccagacctacatctgcaatgtgaaccacaagcctagcaacaccaaggtggacaagagagtggaacccaagagctgtatccccgaggacacattcttcccaagccccgagagcagctgcgacgtgaagctggtggaaaagagcttcgagacagacaccaacctgaacttccagaacctgagcgtgatcggcttcagaatcctgctgctgaaagtggccggctttaacctgctgatgaccctgcggctgtggtccagcagggccaagcgatctggatctggagcaacaaacttctcactactcaaacaagcaggtgacgtggaggagaatcccgggcctactagcatggccttaccagtgaccgccttgctcctgccgctggccttgctgctccacgccgccaggccgcaggtccagctcgtcgagtccggcggcggcctcgtccaggccggcgactccgtcaccctctcctgcaccgcctccggccgcaccttctcctcctacgccctcgcctggttccgccagcgccccggcaaggagcgcgagttcgtcgccggcctccgctggggcggccccaccaactacgccgactccgtcaaggaccgcttcaccatctccggcgactccgccaagcacaccatgtacctccagatgaactccctcaagcccgaggacaccgccgtctactactgcggctacaaccccggcggctgggccgtcccctcccagtacgagtacgactcctggggccagggcacccaggtcaccgtctcctccggtaccggcggaggcggatctggcggcggaggtagcggtggcggaggatctgaattcgacatccagatgacacagagccctagcagcctgtctgccagcgtgggagacagagtgaccatcacatgcaaggccagcgaccacatcaacaactggctggcctggtatcagcagaagcctggacaggcccctaagctgctgatctacggcgctaccacactggaaacaggcgtgcccagcagattttctggcagcggctctggcaccgactacaccctgacaatatccagcctccagcctgaggacttcgccacctactactgtcagcagagctggaacaccccttggacattcggccagggcaccaagctggaaatcaagagaggcggaggcggaagtggaggcggaggatctggcggcggaggctctcaagttcagcttcaacagcctggcgctgagctggtcaaacctggcgcttctgtgaagatgagctgcaaagccagcggctacgccttcagcagctactggatcaactggatgaagcagaaacccggccagggactcgaatggatcggccaaatctatcccggcgacggcgacaccaactacaacggcaagttcaagggcagagccacactgaccgccgatacctctagcagcacagcctacatgcagctgagcagcctgaccagcgaagatagcgccgtgtacttctgtgcccggtccatcacaacagtcgtgggctgcgctatggactattggggccagggaacaagcgtgaccgtgtctagtacgcgtggacagcctaaggccaatcctaccgtgacactgttccctccaagcagcgaagaactccaggccaacaaggccacacttgtgtgcctgatctccgacttctaccctggggctgtgacagtggcttggaaggccgatggatctcctgtgaaagccggcgtggaaaccaccaagccatccaagcagagcaacaacaaatacgccgccagctcctacctgagcctgacacctgagcagtggaagtcccacagatcctacagctgccaagtgacccacgaaggcagcaccgtggaaaagacagtggcccctacagagtgcagcggcagagccgattgcggctttaccagcgagagctaccagcagggcgtgctgagcgccaccatcctgtacgagatcctgctgggcaaggccaccctgtacgccgtgctggtgtctgccctggtgctgatggctatggtcaagcggaaggacagccggggacgcgccaagagaagcggatctggcgtgaagcagaccctgaatttcgacctgctgaagctggctggcgacgtggaatccaacccaggcccttctagaggccatatgaccgagtacaagcccacggtgcgcctcgccacccgcgacgacgtccccagggccgtacgcaccctcgccgccgcgttcgccgactaccccgccacgcgccacaccgtcgatccggaccgccacatcgagcgggtcaccgagctgcaagaactcttcctcacgcgcgtcgggctcgacatcggcaaggtgtgggtcgcggacgacggcgccgcggtggcggtctggaccacgccggagagcgtcgaagcgggggcggtgttcgccgagatcggcccgcgcatggccgagttgagcggttcccggctggccgcgcagcaacagatggaaggcctcctggcgccgcaccggcccaaggagcccgcgtggttcctggccaccgtcggcgtctcgcccgaccaccagggcaagggtctgggcagcgccgtcgtgctccccggagtggaggcggccgagcgcgccggggtgcccgccttcctggagacctccgcgccccgcaacctccccttctacgagcggctcggcttcaccgtcaccgccgacgtcgaggtgcccgaaggaccgcgcacctggtgcatgacccgcaagcccggtgcctga

SEQ ID NO: 18211 - DNA, 3441 bp, synthetic construct
  source 1..3441: mol_type = other DNA
atggccttaccagtgaccgccttgctcctgccgctggccttgctgctccacgccgccaggccgctcgaggaggcctctacaaagggaccctccgtgtttcctctggctcccagcagcaagtctacaagcggaggaacagccgctctgggctgcctggtcaaggattactttcccgagcctgtgaccgtgtcctggaatagcggagcactgacaagcggcgtgcacacctttccagccgtgctgcaaagcagcggcctgtactctctgagcagcgtggtcacagtgcctagctctagcctgggcacccagacctacatctgcaatgtgaaccacaagcctagcaacaccaaggtggacaagagagtggaacccaagagctgtatccccgaggacacattcttcccaagccccgagagcagctgcgacgtgaagctggtggaaaagagcttcgagacagacaccaacctgaacttccagaacctgagcgtgatcggcttcagaatcctgctgctgaaagtggccggctttaacctgctgatgaccctgcggctgtggtccagcagggccaagcgatctggatctggagcaacaaacttctcactactcaaacaagcaggtgacgtggaggagaatcccgggcctactagcatggccttaccagtgaccgccttgctcctgccgctggccttgctgctccacgccgccaggccggaggttcagctgcttgagtctggcggaggactggttcaacctggcggaagcctgagactgtcttgtgccgccagcggcttcacctttagcagctacgccatgagctgggtccgacaggctcctggcaaaggactggaatgggtgtccagcatcagcggcagcggcgactacatctactacgccgatagcgtgaagggcagattcaccatcagccgggacatcagcaagaacaccctgtacctccagatgaacagcctgagagccgaggacaccgccgtgtactactgtgccaaagaaggcaccggcgctaacagcagcctggccgattatagaggccagggcacactggtcaccgtgtctagtggcggaggaagcggcggaggatctcaggtccagctcgtcgagtccggcggcggcctcgtccaggccggcgactccgtcaccctctcctgcaccgcctccggccgcaccttctcctcctacgccctcgcctggttccgccagcgccccggcaaggagcgcgagttcgtcgccggcctccgctggggcggccccaccaactacgccgactccgtcaaggaccgcttcaccatctccggcgactccgccaagcacaccatgtacctccagatgaactccctcaagcccgaggacaccgccgtctactactgcggctacaaccccggcggctgggccgtcccctcccagtacgagtacgactcctggggccagggcacccaggtcaccgtctcctccggtaccggcggaggcggatctggcggcggaggtagcggtggcggaggatctgaattcgacatccagatgacacagagccctagcagcctgtctgccagcgtgggagacagagtgaccatcacatgcaaggccagcgaccacatcaacaactggctggcctggtatcagcagaagcctggacaggcccctaagctgctgatctacggcgctaccacactggaaacaggcgtgcccagcagattttctggcagcggctctggcaccgactacaccctgacaatatccagcctccagcctgaggacttcgccacctactactgtcagcagagctggaacaccccttggacattcggccagggcaccaagctggaaatcaagagaggcggaggcggaagtggaggcggaggatctggcggcggaggctctcaagttcagcttcaacagcctggcgctgagctggtcaaacctggcgcttctgtgaagatgagctgcaaagccagcggctacgccttcagcagctactggatcaactggatgaagcagaaacccggccagggactcgaatggatcggccaaatctatcccggcgacggcgacaccaactacaacggcaagttcaagggcagagccacactgaccgccgatacctctagcagcacagcctacatgcagctgagcagcctgaccagcgaagatagcgccgtgtacttctgtgcccggtccatcacaacagtcgtgggctgcgctatggactattggggccagggaacaagcgtgaccgtgtctagtacgcgtggacagcctaaggccaatcctaccgtgacactgttccctccaagcagcgaagaactccaggccaacaaggccacacttgtgtgcctgatctccgacttctaccctggggctgtgacagtggcttggaaggccgatggatctcctgtgaaagccggcgtggaaaccaccaagccatccaagcagagcaacaacaaatacgccgccagctcctacctgagcctgacacctgagcagtggaagtcccacagatcctacagctgccaagtgacccacgaaggcagcaccgtggaaaagacagtggcccctacagagtgcagcggcagagccgattgcggctttaccagcgagagctaccagcagggcgtgctgagcgccaccatcctgtacgagatcctgctgggcaaggccaccctgtacgccgtgctggtgtctgccctggtgctgatggctatggtcaagcggaaggacagccggggacgcgccaagagaagcggatctggcgtgaagcagaccctgaatttcgacctgctgaagctggctggcgacgtggaatccaacccaggcccttctagaggccatatgaccgagtacaagcccacggtgcgcctcgccacccgcgacgacgtccccagggccgtacgcaccctcgccgccgcgttcgccgactaccccgccacgcgccacaccgtcgatccggaccgccacatcgagcgggtcaccgagctgcaagaactcttcctcacgcgcgtcgggctcgacatcggcaaggtgtgggtcgcggacgacggcgccgcggtggcggtctggaccacgccggagagcgtcgaagcgggggcggtgttcgccgagatcggcccgcgcatggccgagttgagcggttcccggctggccgcgcagcaacagatggaaggcctcctggcgccgcaccggcccaaggagcccgcgtggttcctggccaccgtcggcgtctcgcccgaccaccagggcaagggtctgggcagcgccgtcgtgctccccggagtggaggcggccgagcgcgccggggtgcccgccttcctggagacctccgcgccccgcaacctccccttctacgagcggctcggcttcaccgtcaccgccgacgtcgaggtgcccgaaggaccgcgcacctggtgcatgacccgcaagcccggtgcctga

SEQ ID NO: 18212 - DNA, 3435 bp, synthetic construct
  source 1..3435: mol_type = other DNA
atggccttaccagtgaccgccttgctcctgccgctggccttgctgctccacgccgccaggccgctcgaggaggcctctacaaagggaccctccgtgtttcctctggctcccagcagcaagtctacaagcggaggaacagccgctctgggctgcctggtcaaggattactttcccgagcctgtgaccgtgtcctggaatagcggagcactgacaagcggcgtgcacacctttccagccgtgctgcaaagcagcggcctgtactctctgagcagcgtggtcacagtgcctagctctagcctgggcacccagacctacatctgcaatgtgaaccacaagcctagcaacaccaaggtggacaagagagtggaacccaagagctgtatccccgaggacacattcttcccaagccccgagagcagctgcgacgtgaagctggtggaaaagagcttcgagacagacaccaacctgaacttccagaacctgagcgtgatcggcttcagaatcctgctgctgaaagtggccggctttaacctgctgatgaccctgcggctgtggtccagcagggccaagcgatctggatctggagcaacaaacttctcactactcaaacaagcaggtgacgtggaggagaatcccgggcctactagcatggccttaccagtgaccgccttgctcctgccgctggccttgctgctccacgccgccaggccgggcgtgacacagagccccacacacctgattaagaccagaggccagcaggccacactgagatgcagccctatcagcggccacaccagcgtgtactggtatcagcaggctctcggactgggcctccagttcctgctttggtacgacgagggcgaagagagaaaccggggcaacttccctcctcggttttccggcagacagttccccaactacagcagcgagctgaacgtgaacgccctggaactggaagatagcgccctgtacctgtgtgcctcttctcttggtggacctcgcggactggctggactgagaggggatgagcagtttttcggccctggcaccagactgaccgtgctggaaggcggaggaagcggcggaggatctcaggtccagctcgtcgagtccggcggcggcctcgtccaggccggcgactccgtcaccctctcctgcaccgcctccggccgcaccttctcctcctacgccctcgcctggttccgccagcgccccggcaaggagcgcgagttcgtcgccggcctccgctggggcggccccaccaactacgccgactccgtcaaggaccgcttcaccatctccggcgactccgccaagcacaccatgtacctccagatgaactccctcaagcccgaggacaccgccgtctactactgcggctacaaccccggcggctgggccgtcccctcccagtacgagtacgactcctggggccagggcacccaggtcaccgtctcctccggtaccggcggaggcggatctggcggcggaggtagcggtggcggaggatctgaattcgacatccagatgacacagagccctagcagcctgtctgccagcgtgggagacagagtgaccatcacatgcaaggccagcgaccacatcaacaactggctggcctggtatcagcagaagcctggacaggcccctaagctgctgatctacggcgctaccacactggaaacaggcgtgcccagcagattttctggcagcggctctggcaccgactacaccctgacaatatccagcctccagcctgaggacttcgccacctactactgtcagcagagctggaacaccccttggacattcggccagggcaccaagctggaaatcaagagaggcggaggcggaagtggaggcggaggatctggcggcggaggctctcaagttcagcttcaacagcctggcgctgagctggtcaaacctggcgcttctgtgaagatgagctgcaaagccagcggctacgccttcagcagctactggatcaactggatgaagcagaaacccggccagggactcgaatggatcggccaaatctatcccggcgacggcgacaccaactacaacggcaagttcaagggcagagccacactgaccgccgatacctctagcagcacagcctacatgcagctgagcagcctgaccagcgaagatagcgccgtgtacttctgtgcccggtccatcacaacagtcgtgggctgcgctatggactattggggccagggaacaagcgtgaccgtgtctagtacgcgtggacagcctaaggccaatcctaccgtgacactgttccctccaagcagcgaagaactccaggccaacaaggccacacttgtgtgcctgatctccgacttctaccctggggctgtgacagtggcttggaaggccgatggatctcctgtgaaagccggcgtggaaaccaccaagccatccaagcagagcaacaacaaatacgccgccagctcctacctgagcctgacacctgagcagtggaagtcccacagatcctacagctgccaagtgacccacgaaggcagcaccgtggaaaagacagtggcccctacagagtgcagcggcagagccgattgcggctttaccagcgagagctaccagcagggcgtgctgagcgccaccatcctgtacgagatcctgctgggcaaggccaccctgtacgccgtgctggtgtctgccctggtgctgatggctatggtcaagcggaaggacagccggggacgcgccaagagaagcggatctggcgtgaagcagaccctgaatttcgacctgctgaagctggctggcgacgtggaatccaacccaggcccttctagaggccatatgaccgagtacaagcccacggtgcgcctcgccacccgcgacgacgtccccagggccgtacgcaccctcgccgccgcgttcgccgactaccccgccacgcgccacaccgtcgatccggaccgccacatcgagcgggtcaccgagctgcaagaactcttcctcacgcgcgtcgggctcgacatcggcaaggtgtgggtcgcggacgacggcgccgcggtggcggtctggaccacgccggagagcgtcgaagcgggggcggtgttcgccgagatcggcccgcgcatggccgagttgagcggttcccggctggccgcgcagcaacagatggaaggcctcctggcgccgcaccggcccaaggagcccgcgtggttcctggccaccgtcggcgtctcgcccgaccaccagggcaagggtctgggcagcgccgtcgtgctccccggagtggaggcggccgagcgcgccggggtgcccgccttcctggagacctccgcgccccgcaacctccccttctacgagcggctcggcttcaccgtcaccgccgacgtcgaggtgcccgaaggaccgcgcacctggtgcatgacccgcaagcccggtgcctga

SEQ ID NO: 18213 - DNA, 3417 bp, synthetic construct
  source 1..3417: mol_type = other DNA
atggccttaccagtgaccgccttgctcctgccgctggccttgctgctccacgccgccaggccgctcgaggaggcctctacaaagggaccctccgtgtttcctctggctcccagcagcaagtctacaagcggaggaacagccgctctgggctgcctggtcaaggattactttcccgagcctgtgaccgtgtcctggaatagcggagcactgacaagcggcgtgcacacctttccagccgtgctgcaaagcagcggcctgtactctctgagcagcgtggtcacagtgcctagctctagcctgggcacccagacctacatctgcaatgtgaaccacaagcctagcaacaccaaggtggacaagagagtggaacccaagagctgtatccccgaggacacattcttcccaagccccgagagcagctgcgacgtgaagctggtggaaaagagcttcgagacagacaccaacctgaacttccagaacctgagcgtgatcggcttcagaatcctgctgctgaaagtggccggctttaacctgctgatgaccctgcggctgtggtccagcagggccaagcgatctggatctggagcaacaaacttctcactactcaaacaagcaggtgacgtggaggagaatcccgggcctactagcatggccttaccagtgaccgccttgctcctgccgctggccttgctgctccacgccgccaggccgggcgtgacacagagccccacacacctgattaagaccagaggccagcaggccacactgagatgcagccctatcagcggccacaccagcgtgtactggtatcagcaggctctcggactgggcctccagttcctgctttggtacgacgagggcgaagagagaaaccggggcaacttccctcctcggttttccggcagacagttccccaactacagcagcgagctgaacgtgaacgccctggaactggaagatagcgccctgtacctgtgtgcctcttctcttggtggacctcgcggactggctggactgagaggggatgagcagtttttcggccctggcaccagactgaccgtgctggaaggcggaggaagcggcggaggatctggcgtgacacagagccccacacacctgattaagaccagaggccagcaggccacactgagatgcagccctatcagcggccacaccagcgtgtactggtatcagcaggctctcggactgggcctccagttcctgctttggtacgacgagggcgaagagagaaaccggggcaacttccctcctcggttttccggcagacagttccccaactacagcagcgagctgaacgtgaacgccctggaactggaagatagcgccctgtacctgtgtgccagctctctcggcggagatgaactgggagccgatggcaacgagcagttctttggccctggcaccagactgaccgtgctggaaggtaccggcggaggcggatctggcggcggaggtagcggtggcggaggatctgaattcgacatccagatgacacagagccctagcagcctgtctgccagcgtgggagacagagtgaccatcacatgcaaggccagcgaccacatcaacaactggctggcctggtatcagcagaagcctggacaggcccctaagctgctgatctacggcgctaccacactggaaacaggcgtgcccagcagattttctggcagcggctctggcaccgactacaccctgacaatatccagcctccagcctgaggacttcgccacctactactgtcagcagagctggaacaccccttggacattcggccagggcaccaagctggaaatcaagagaggcggaggcggaagtggaggcggaggatctggcggcggaggctctcaagttcagcttcaacagcctggcgctgagctggtcaaacctggcgcttctgtgaagatgagctgcaaagccagcggctacgccttcagcagctactggatcaactggatgaagcagaaacccggccagggactcgaatggatcggccaaatctatcccggcgacggcgacaccaactacaacggcaagttcaagggcagagccacactgaccgccgatacctctagcagcacagcctacatgcagctgagcagcctgaccagcgaagatagcgccgtgtacttctgtgcccggtccatcacaacagtcgtgggctgcgctatggactattggggccagggaacaagcgtgaccgtgtctagtacgcgtggacagcctaaggccaatcctaccgtgacactgttccctccaagcagcgaagaactccaggccaacaaggccacacttgtgtgcctgatctccgacttctaccctggggctgtgacagtggcttggaaggccgatggatctcctgtgaaagccggcgtggaaaccaccaagccatccaagcagagcaacaacaaatacgccgccagctcctacctgagcctgacacctgagcagtggaagtcccacagatcctacagctgccaagtgacccacgaaggcagcaccgtggaaaagacagtggcccctacagagtgcagcggcagagccgattgcggctttaccagcgagagctaccagcagggcgtgctgagcgccaccatcctgtacgagatcctgctgggcaaggccaccctgtacgccgtgctggtgtctgccctggtgctgatggctatggtcaagcggaaggacagccggggacgcgccaagagaagcggatctggcgtgaagcagaccctgaatttcgacctgctgaagctggctggcgacgtggaatccaacccaggcccttctagaggccatatgaccgagtacaagcccacggtgcgcctcgccacccgcgacgacgtccccagggccgtacgcaccctcgccgccgcgttcgccgactaccccgccacgcgccacaccgtcgatccggaccgccacatcgagcgggtcaccgagctgcaagaactcttcctcacgcgcgtcgggctcgacatcggcaaggtgtgggtcgcggacgacggcgccgcggtggcggtctggaccacgccggagagcgtcgaagcgggggcggtgttcgccgagatcggcccgcgcatggccgagttgagcggttcccggctggccgcgcagcaacagatggaaggcctcctggcgccgcaccggcccaaggagcccgcgtggttcctggccaccgtcggcgtctcgcccgaccaccagggcaagggtctgggcagcgccgtcgtgctccccggagtggaggcggccgagcgcgccggggtgcccgccttcctggagacctccgcgccccgcaacctccccttctacgagcggctcggcttcaccgtcaccgccgacgtcgaggtgcccgaaggaccgcgcacctggtgcatgacccgcaagcccggtgcctga

SEQ ID NO: 18214 - DNA, 2277 bp, synthetic construct
  source 1..2277: mol_type = other DNA
atggccttaccagtgaccgccttgctcctgccgctggccttgctgctccacgccgccaggccgctcgaggaggcctctacaaagggaccctccgtgtttcctctggctcccagcagcaagtctacaagcggaggaacagccgctctgggctgcctggtcaaggattactttcccgagcctgtgaccgtgtcctggaatagcggagcactgacaagcggcgtgcacacctttccagccgtgctgcaaagcagcggcctgtactctctgagcagcgtggtcacagtgcctagctctagcctgggcacccagacctacatctgcaatgtgaaccacaagcctagcaacaccaaggtggacaagagagtggaacccaagagctgtatccccgaggacacattcttcccaagccccgagagcagctgcgacgtgaagctggtggaaaagagcttcgagacagacaccaacctgaacttccagaacctgagcgtgatcggcttcagaatcctgctgctgaaagtggccggctttaacctgctgatgaccctgcggctgtggtccagcagggccaagcgatctggatctggagcaacaaacttctcactactcaaacaagcaggtgacgtggaggagaatcccgggcctactagcatggccctgcccgtgacagccctgctgctgcctctggctctgctgctgcacgccgccagacccgatgaattcggctctgacctgggcatcaagctgctgttcgccgctgccaagggccaggacgacgaagtgcggattctgctggctgctggggccgacgtgaacgccaaggatttcgagggctacacccccctgcacgtggccgcctatgatggacacctggaaatcgtggaagtgctgctgaaggctggcgctgatgtgaatgccaaagacagccagggccggacccctctgcatgaagccgcctacagcggccatctggaaattgtggaagtgctgctgaaagccggggcagacgtgaacgctcaggacgacgctggcgagacaccagccgatctggctgcagcttggggccacgaagatatcgccgaggtgctgcagaagacgcgtggacagcctaaggccaatcctaccgtgacactgttccctccaagcagcgaagaactccaggccaacaaggccacacttgtgtgcctgatctccgacttctaccctggggctgtgacagtggcttggaaggccgatggatctcctgtgaaagccggcgtggaaaccaccaagccatccaagcagagcaacaacaaatacgccgccagctcctacctgagcctgacacctgagcagtggaagtcccacagatcctacagctgccaagtgacccacgaaggcagcaccgtggaaaagacagtggcccctacagagtgcagcggcagagccgattgcggctttaccagcgagagctaccagcagggcgtgctgagcgccaccatcctgtacgagatcctgctgggcaaggccaccctgtacgccgtgctggtgtctgccctggtgctgatggctatggtcaagcggaaggacagccggggacgcgccaagagaagcggatctggcgtgaagcagaccctgaatttcgacctgctgaagctggctggcgacgtggaatccaacccaggcccttctagaggccatatgaccgagtacaagcccacggtgcgcctcgccacccgcgacgacgtccccagggccgtacgcaccctcgccgccgcgttcgccgactaccccgccacgcgccacaccgtcgatccggaccgccacatcgagcgggtcaccgagctgcaagaactcttcctcacgcgcgtcgggctcgacatcggcaaggtgtgggtcgcggacgacggcgccgcggtggcggtctggaccacgccggagagcgtcgaagcgggggcggtgttcgccgagatcggcccgcgcatggccgagttgagcggttcccggctggccgcgcagcaacagatggaaggcctcctggcgccgcaccggcccaaggagcccgcgtggttcctggccaccgtcggcgtctcgcccgaccaccagggcaagggtctgggcagcgccgtcgtgctccccggagtggaggcggccgagcgcgccggggtgcccgccttcctggagacctccgcgccccgcaacctccccttctacgagcggctcggcttcaccgtcaccgccgacgtcgaggtgcccgaaggaccgcgcacctggtgcatgacccgcaagcccggtgcctga

SEQ ID NO: 18215 - DNA, 2064 bp, synthetic construct
  source 1..2064: mol_type = other DNA
atggccttaccagtgaccgccttgctcctgccgctggccttgctgctccacgccgccaggccgctcgaggaggcctctacaaagggaccctccgtgtttcctctggctcccagcagcaagtctacaagcggaggaacagccgctctgggctgcctggtcaaggattactttcccgagcctgtgaccgtgtcctggaatagcggagcactgacaagcggcgtgcacacctttccagccgtgctgcaaagcagcggcctgtactctctgagcagcgtggtcacagtgcctagctctagcctgggcacccagacctacatctgcaatgtgaaccacaagcctagcaacaccaaggtggacaagagagtggaacccaagagctgtatccccgaggacacattcttcccaagccccgagagcagctgcgacgtgaagctggtggaaaagagcttcgagacagacaccaacctgaacttccagaacctgagcgtgatcggcttcagaatcctgctgctgaaagtggccggctttaacctgctgatgaccctgcggctgtggtccagcagggccaagcgatctggatctggagcaacaaacttctcactactcaaacaagcaggtgacgtggaggagaatcccgggcctactagcatggactggatttggcgcatccttttccttgtcggcgctgctaccggcgcccattccttcgaaggcagcggattcgaatacgccaaagagatgcggaacgcctactgggagatcgccctgctgcccaatctgaccaaccagcagaagagagcccccatcagaaagctgtacgacgacccctcccagagcagcgagctgctgtctgaggctaaaaaactgaacgatagccagacgcgtggacagcctaaggccaatcctaccgtgacactgttccctccaagcagcgaagaactccaggccaacaaggccacacttgtgtgcctgatctccgacttctaccctggggctgtgacagtggcttggaaggccgatggatctcctgtgaaagccggcgtggaaaccaccaagccatccaagcagagcaacaacaaatacgccgccagctcctacctgagcctgacacctgagcagtggaagtcccacagatcctacagctgccaagtgacccacgaaggcagcaccgtggaaaagacagtggcccctacagagtgcagcggcagagccgattgcggctttaccagcgagagctaccagcagggcgtgctgagcgccaccatcctgtacgagatcctgctgggcaaggccaccctgtacgccgtgctggtgtctgccctggtgctgatggctatggtcaagcggaaggacagccggggacgcgccaagagaagcggatctggcgtgaagcagaccctgaatttcgacctgctgaagctggctggcgacgtggaatccaacccaggcccttctagaggccatatgaccgagtacaagcccacggtgcgcctcgccacccgcgacgacgtccccagggccgtacgcaccctcgccgccgcgttcgccgactaccccgccacgcgccacaccgtcgatccggaccgccacatcgagcgggtcaccgagctgcaagaactcttcctcacgcgcgtcgggctcgacatcggcaaggtgtgggtcgcggacgacggcgccgcggtggcggtctggaccacgccggagagcgtcgaagcgggggcggtgttcgccgagatcggcccgcgcatggccgagttgagcggttcccggctggccgcgcagcaacagatggaaggcctcctggcgccgcaccggcccaaggagcccgcgtggttcctggccaccgtcggcgtctcgcccgaccaccagggcaagggtctgggcagcgccgtcgtgctccccggagtggaggcggccgagcgcgccggggtgcccgccttcctggagacctccgcgccccgcaacctccccttctacgagcggctcggcttcaccgtcaccgccgacgtcgaggtgcccgaaggaccgcgcacctggtgcatgacccgcaagcccggtgcctga

SEQ ID NO: 18216 - DNA, 2730 bp, synthetic construct
  source 1..2730: mol_type = other DNA
atggccttaccagtgaccgccttgctcctgccgctggccttgctgctccacgccgccaggccgctcgaggaggcctctacaaagggaccctccgtgtttcctctggctcccagcagcaagtctacaagcggaggaacagccgctctgggctgcctggtcaaggattactttcccgagcctgtgaccgtgtcctggaatagcggagcactgacaagcggcgtgcacacctttccagccgtgctgcaaagcagcggcctgtactctctgagcagcgtggtcacagtgcctagctctagcctgggcacccagacctacatctgcaatgtgaaccacaagcctagcaacaccaaggtggacaagagagtggaacccaagagctgtatccccgaggacacattcttcccaagccccgagagcagctgcgacgtgaagctggtggaaaagagcttcgagacagacaccaacctgaacttccagaacctgagcgtgatcggcttcagaatcctgctgctgaaagtggccggctttaacctgctgatgaccctgcggctgtggtccagcagggccaagcgatctggatctggagcaacaaacttctcactactcaaacaagcaggtgacgtggaggagaatcccgggcctactagcatggccctgcccgtgacagccctgctgctgcctctggctctgctgctgcacgccgccagacccgatgaattcgaggtgcaactggtggaaagcggcggaggcctggtgcaggctggcggatctctgagactgagctgtgccgccagcggcatcaccttcagcatcaacacaatgggctggtacagacaggcccctggcaagcagagggaactggtggccctgatctccagcatcggcgacacctactacgccgacagcgtgaagggccggttcaccatcagccgggacaacgccaagaacaccgtgtacctccagatgaacagcctgaagcccgaggacaccgccgtgtactactgcaagcggttcagaacagccgcccagggcaccgattattggggccagggaacacaagtgaccgtgtcctctctcgagggaggaggcggctccgggggaggcggaagtggaggcggaggatctgggtctggaggaagcggatctggaggctcagggtcagggggctcaggcagtggaggctctttcgaagtgcaactggtggaatctgggggcggactggtgcagccaggcggaagtctgaggctgtcttgtgccgcctccggcagcatcttcggcttcaacgacatggcctggtatcggcaggctcccggaaaacagcgcgagctggtggctctgattagcagagtgggcgtgaccagcagcgccgactctgtgaagggcagattcacaatctccagagtgaacgccaaggatacagtgtacctccagatgaactctctgaaacctgaggatacagcagtgtactattgctacatggaccagcggctggacggcagcacactggcctactggggacagggaactcaagtgacagtgtctagcacgcgtggacagcctaaggccaatcctaccgtgacactgttccctccaagcagcgaagaactccaggccaacaaggccacacttgtgtgcctgatctccgacttctaccctggggctgtgacagtggcttggaaggccgatggatctcctgtgaaagccggcgtggaaaccaccaagccatccaagcagagcaacaacaaatacgccgccagctcctacctgagcctgacacctgagcagtggaagtcccacagatcctacagctgccaagtgacccacgaaggcagcaccgtggaaaagacagtggcccctacagagtgcagcggcagagccgattgcggctttaccagcgagagctaccagcagggcgtgctgagcgccaccatcctgtacgagatcctgctgggcaaggccaccctgtacgccgtgctggtgtctgccctggtgctgatggctatggtcaagcggaaggacagccggggacgcgccaagagaagcggatctggcgtgaagcagaccctgaatttcgacctgctgaagctggctggcgacgtggaatccaacccaggcccttctagaggccatatgaccgagtacaagcccacggtgcgcctcgccacccgcgacgacgtccccagggccgtacgcaccctcgccgccgcgttcgccgactaccccgccacgcgccacaccgtcgatccggaccgccacatcgagcgggtcaccgagctgcaagaactcttcctcacgcgcgtcgggctcgacatcggcaaggtgtgggtcgcggacgacggcgccgcggtggcggtctggaccacgccggagagcgtcgaagcgggggcggtgttcgccgagatcggcccgcgcatggccgagttgagcggttcccggctggccgcgcagcaacagatggaaggcctcctggcgccgcaccggcccaaggagcccgcgtggttcctggccaccgtcggcgtctcgcccgaccaccagggcaagggtctgggcagcgccgtcgtgctccccggagtggaggcggccgagcgcgccggggtgcccgccttcctggagacctccgcgccccgcaacctccccttctacgagcggctcggcttcaccgtcaccgccgacgtcgaggtgcccgaaggaccgcgcacctggtgcatgacccgcaagcccggtgcctga

SEQ ID NO: 18217 - DNA, 2472 bp, synthetic construct
  source 1..2472: mol_type = other DNA
atggccttaccagtgaccgccttgctcctgccgctggccttgctgctccacgccgccaggccgctcgaggaggcctctacaaagggaccctccgtgtttcctctggctcccagcagcaagtctacaagcggaggaacagccgctctgggctgcctggtcaaggattactttcccgagcctgtgaccgtgtcctggaatagcggagcactgacaagcggcgtgcacacctttccagccgtgctgcaaagcagcggcctgtactctctgagcagcgtggtcacagtgcctagctctagcctgggcacccagacctacatctgcaatgtgaaccacaagcctagcaacaccaaggtggacaagagagtggaacccaagagctgtatccccgaggacacattcttcccaagccccgagagcagctgcgacgtgaagctggtggaaaagagcttcgagacagacaccaacctgaacttccagaacctgagcgtgatcggcttcagaatcctgctgctgaaagtggccggctttaacctgctgatgaccctgcggctgtggtccagcagggccaagcgatctggatctggagcaacaaacttctcactactcaaacaagcaggtgacgtggaggagaatcccgggcctactagcatggcccttccagtcactgccttgctgttgcctctggcgctcctgctccacgccgctagaccgggcatgagaaccgaggacctgcctaaggccgtggtgttcctggaaccccagtggtacagagtgctggaaaaggacagcgtgaccctgaagtgccagggcgcctacagccccgaggacaatagcacccagtggttccacaacgagagcctgatctccagccaggccagcagctacttcatcgacgccgccaccgtggacgacagcggcgagtatagatgccagaccaacctgagcaccctgagcgaccccgtgcagctggaagtgcacatcggatggctgctgctgcaggcccccagatgggtgttcaaagaagaggaccccatccacctgagatgccactcttggaagaacaccgccctgcacaaagtgacctacctgcagaacggcaagggcagaaagtacttccaccacaacagcgacttctacatccccaaggccaccctgaaggactccggctcctacttctgcagaggcctcgtgggcagcaagaacgtgtccagcgagacagtgaacatcaccatcacccagggcctggccgtgtctaccatcagcagctttttcccacccggctaccagacgcgtggacagcctaaggccaatcctaccgtgacactgttccctccaagcagcgaagaactccaggccaacaaggccacacttgtgtgcctgatctccgacttctaccctggggctgtgacagtggcttggaaggccgatggatctcctgtgaaagccggcgtggaaaccaccaagccatccaagcagagcaacaacaaatacgccgccagctcctacctgagcctgacacctgagcagtggaagtcccacagatcctacagctgccaagtgacccacgaaggcagcaccgtggaaaagacagtggcccctacagagtgcagcggcagagccgattgcggctttaccagcgagagctaccagcagggcgtgctgagcgccaccatcctgtacgagatcctgctgggcaaggccaccctgtacgccgtgctggtgtctgccctggtgctgatggctatggtcaagcggaaggacagccggggacgcgccaagagaagcggatctggcgtgaagcagaccctgaatttcgacctgctgaagctggctggcgacgtggaatccaacccaggcccttctagaggccatatgaccgagtacaagcccacggtgcgcctcgccacccgcgacgacgtccccagggccgtacgcaccctcgccgccgcgttcgccgactaccccgccacgcgccacaccgtcgatccggaccgccacatcgagcgggtcaccgagctgcaagaactcttcctcacgcgcgtcgggctcgacatcggcaaggtgtgggtcgcggacgacggcgccgcggtggcggtctggaccacgccggagagcgtcgaagcgggggcggtgttcgccgagatcggcccgcgcatggccgagttgagcggttcccggctggccgcgcagcaacagatggaaggcctcctggcgccgcaccggcccaaggagcccgcgtggttcctggccaccgtcggcgtctcgcccgaccaccagggcaagggtctgggcagcgccgtcgtgctccccggagtggaggcggccgagcgcgccggggtgcccgccttcctggagacctccgcgccccgcaacctccccttctacgagcggctcggcttcaccgtcaccgccgacgtcgaggtgcccgaaggaccgcgcacctggtgcatgacccgcaagcccggtgcctga

SEQ ID NO: 18218 - DNA, 1353 bp, synthetic construct
  source 1..1353: mol_type = other DNA
atggccttaccagtgaccgccttgctcctgccgctggccttgctgctccacgccgccaggccgctcgaggaggcctctacaaagggaccctccgtgtttcctctggctcccagcagcaagtctacaagcggaggaacagccgctctgggctgcctggtcaaggattactttcccgagcctgtgaccgtgtcctggaatagcggagcactgacaagcggcgtgcacacctttccagccgtgctgcaaagcagcggcctgtactctctgagcagcgtggtcacagtgcctagctctagcctgggcacccagacctacatctgcaatgtgaaccacaagcctagcaacaccaaggtggacaagagagtggaacccaagagctgtatccccgaggacacattcttcccaagccccgagagcagctgcgacgtgaagctggtggaaaagagcttcgagacagacaccaacctgaacttccagaacctgagcgtgatcggcttcagaatcctgctgctgaaagtggccggctttaacctgctgatgaccctgcggctgtggtccagcagggccaagcgatctggatctggagcaacaaacttctcactactcaaacaagcaggtgacgtggaggagaatcccgggcctactagcgccaccatggccttaccagtgaccgccttgctcctgccgctggccttgctgctccacgccgccaggccgatggaccccgacctggaaatcagagccgccttcctgcggcagagaaacacagccctgagaacagaggtggccgagctggaacaagaggtgcagcggctggaaaacgaggtgtcccagtacgagacaagatacggccctctcggaggcggaaaaacgcgtggacagcctaaggccaatcctaccgtgacactgttccctccaagcagcgaagaactccaggccaacaaggccacacttgtgtgcctgatctccgacttctaccctggggctgtgacagtggcttggaaggccgatggatctcctgtgaaagccggcgtggaaaccaccaagccatccaagcagagcaacaacaaatacgccgccagctcctacctgagcctgacacctgagcagtggaagtcccacagatcctacagctgccaagtgacccacgaaggcagcaccgtggaaaagacagtggcccctacagagtgcagcggcagagccgattgcggctttaccagcgagagctaccagcagggcgtgctgagcgccaccatcctgtacgagatcctgctgggcaaggccaccctgtacgccgtgctggtgtctgccctggtgctgatggctatggtcaagcggaaggacagccgggga

SEQ ID NO: 18219 - DNA, 1353 bp, synthetic construct
  source 1..1353: mol_type = other DNA
atggccttaccagtgaccgccttgctcctgccgctggccttgctgctccacgccgccaggccgctcgaggaggcctctacaaagggaccctccgtgtttcctctggctcccagcagcaagtctacaagcggaggaacagccgctctgggctgcctggtcaaggattactttcccgagcctgtgaccgtgtcctggaatagcggagcactgacaagcggcgtgcacacctttccagccgtgctgcaaagcagcggcctgtactctctgagcagcgtggtcacagtgcctagctctagcctgggcacccagacctacatctgcaatgtgaaccacaagcctagcaacaccaaggtggacaagagagtggaacccaagagctgtatccccgaggacacattcttcccaagccccgagagcagctgcgacgtgaagctggtggaaaagagcttcgagacagacaccaacctgaacttccagaacctgagcgtgatcggcttcagaatcctgctgctgaaagtggccggctttaacctgctgatgaccctgcggctgtggtccagcagggccaagcgatctggatctggagcaacaaacttctcactactcaaacaagcaggtgacgtggaggagaatcccgggcctactagcgccaccatggccttaccagtgaccgccttgctcctgccgctggccttgctgctccacgccgccaggccgatggaccctgatctcgaaattgaggccgcctttctggaacgcgagaacactgccctggaaaccagggtcgcagagctgagacagagagtgcagagactgcggaacagagtgtctcagtaccgcaccagatatggcccactcggcggaggtaaaacgcgtggacagcctaaggccaatcctaccgtgacactgttccctccaagcagcgaagaactccaggccaacaaggccacacttgtgtgcctgatctccgacttctaccctggggctgtgacagtggcttggaaggccgatggatctcctgtgaaagccggcgtggaaaccaccaagccatccaagcagagcaacaacaaatacgccgccagctcctacctgagcctgacacctgagcagtggaagtcccacagatcctacagctgccaagtgacccacgaaggcagcaccgtggaaaagacagtggcccctacagagtgcagcggcagagccgattgcggctttaccagcgagagctaccagcagggcgtgctgagcgccaccatcctgtacgagatcctgctgggcaaggccaccctgtacgccgtgctggtgtctgccctggtgctgatggctatggtcaagcggaaggacagccgggga

SEQ ID NO: 18220 - DNA, 1284 bp, synthetic construct
  source 1..1284: mol_type = other DNA
atggccttaccagtgaccgccttgctcctgccgctggccttgctgctccacgccgccaggccgctcgaggaggcctctacaaagggaccctccgtgtttcctctggctcccagcagcaagtctacaagcggaggaacagccgctctgggctgcctggtcaaggattactttcccgagcctgtgaccgtgtcctggaatagcggagcactgacaagcggcgtgcacacctttccagccgtgctgcaaagcagcggcctgtactctctgagcagcgtggtcacagtgcctagctctagcctgggcacccagacctacatctgcaatgtgaaccacaagcctagcaacaccaaggtggacaagagagtggaacccaagagctgtatccccgaggacacattcttcccaagccccgagagcagctgcgacgtgaagctggtggaaaagagcttcgagacagacaccaacctgaacttccagaacctgagcgtgatcggcttcagaatcctgctgctgaaagtggccggctttaacctgctgatgaccctgcggctgtggtccagcagggccaagcgatctggatctggagcaacaaacttctcactactcaaacaagcaggtgacgtggaggagaatcccgggcctactagcgccaccatggccttaccagtgaccgccttgctcctgccgctggccttgctgctccacgccgccaggccggaagttgctgccctcgagaaggaggtagcagctttggaaaaagaagtcgcagcccttgagaaagaagttgcggctctggagaagacgcgtggacagcctaaggccaatcctaccgtgacactgttccctccaagcagcgaagaactccaggccaacaaggccacacttgtgtgcctgatctccgacttctaccctggggctgtgacagtggcttggaaggccgatggatctcctgtgaaagccggcgtggaaaccaccaagccatccaagcagagcaacaacaaatacgccgccagctcctacctgagcctgacacctgagcagtggaagtcccacagatcctacagctgccaagtgacccacgaaggcagcaccgtggaaaagacagtggcccctacagagtgcagcggcagagccgattgcggctttaccagcgagagctaccagcagggcgtgctgagcgccaccatcctgtacgagatcctgctgggcaaggccaccctgtacgccgtgctggtgtctgccctggtgctgatggctatggtcaagcggaaggacagccgggga

SEQ ID NO: 18221 - DNA, 2058 bp, synthetic construct
  source 1..2058: mol_type = other DNA
atggccttaccagtgaccgccttgctcctgccgctggccttgctgctccacgccgccaggccgctcgaggaggcctctacaaagggaccctccgtgtttcctctggctcccagcagcaagtctacaagcggaggaacagccgctctgggctgcctggtcaaggattactttcccgagcctgtgaccgtgtcctggaatagcggagcactgacaagcggcgtgcacacctttccagccgtgctgcaaagcagcggcctgtactctctgagcagcgtggtcacagtgcctagctctagcctgggcacccagacctacatctgcaatgtgaaccacaagcctagcaacaccaaggtggacaagagagtggaacccaagagctgtatccccgaggacacattcttcccaagccccgagagcagctgcgacgtgaagctggtggaaaagagcttcgagacagacaccaacctgaacttccagaacctgagcgtgatcggcttcagaatcctgctgctgaaagtggccggctttaacctgctgatgaccctgcggctgtggtccagcagggccaagcgatctggatctggagcaacaaacttctcactactcaaacaagcaggtgacgtggaggagaatcccgggcctactagcgccaccatggccttaccagtgaccgccttgctcctgccgctggccttgctgctccacgccgccaggccgctgttcaatcaagaggtgcagatccctctgaccgagagctactgtggcccctgtcctaagaactggatctgctacaagaacaactgctaccagttcttcgacgagagcaagaattggtacgagagccaggccagctgcatgagccagaatgccagcctgctgaaggtgtacagcaaagaggaccaggacctgctgaaactggtcaagagcgcccactggatgggccttgtgcacatccccaccaatggctcttggcagtgggaggacggcagcattctgagccctaacctgctgaccatcatcgagatgcagaagggcgactgcgccctgtacgccagcagctttaagggctacatcgagaattgcagcaccccgaacacctacatctgtatgcagagaaccgtttctggcggaggcggctctggaggaggcggaagtggcggcggaggcgacctctttaatcaagaagtccagattccactcaccgaatcctactgcggaccttgtccaaaaaattggatttgttataagaacaactgttatcaattctttgatgagtctaaaaattggtatgagtcccaggcttcctgcatgtctcagaacgcttctctgctgaaagtctactctaaagaagatcaggatctcctgaagctcgtcaagtctgcccattggatggggctcgtccacattcctaccaacggaagctggcaatgggaagatggctccatcctgtctccaaatctgctcacgattattgaaatgcagaaaggggattgtgctctctacgccagctccttcaagggatatattgagaactgtagcacgcccaatacttatatctgtatgcaacggaccgtgacgcgtggacagcctaaggccaatcctaccgtgacactgttccctccaagcagcgaagaactccaggccaacaaggccacacttgtgtgcctgatctccgacttctaccctggggctgtgacagtggcttggaaggccgatggatctcctgtgaaagccggcgtggaaaccaccaagccatccaagcagagcaacaacaaatacgccgccagctcctacctgagcctgacacctgagcagtggaagtcccacagatcctacagctgccaagtgacccacgaaggcagcaccgtggaaaagacagtggcccctacagagtgcagcggcagagccgattgcggctttaccagcgagagctaccagcagggcgtgctgagcgccaccatcctgtacgagatcctgctgggcaaggccaccctgtacgccgtgctggtgtctgccctggtgctgatggctatggtcaagcggaaggacagccgggga

SEQ ID NO: 18222 - DNA, 2058 bp, synthetic construct
  source 1..2058: mol_type = other DNA
atggccttaccagtgaccgccttgctcctgccgctggccttgctgctccacgccgccaggccgctcgaggaggcctctacaaagggaccctccgtgtttcctctggctcccagcagcaagtctacaagcggaggaacagccgctctgggctgcctggtcaaggattactttcccgagcctgtgaccgtgtcctggaatagcggagcactgacaagcggcgtgcacacctttccagccgtgctgcaaagcagcggcctgtactctctgagcagcgtggtcacagtgcctagctctagcctgggcacccagacctacatctgcaatgtgaaccacaagcctagcaacaccaaggtggacaagagagtggaacccaagagctgtatccccgaggacacattcttcccaagccccgagagcagctgcgacgtgaagctggtggaaaagagcttcgagacagacaccaacctgaacttccagaacctgagcgtgatcggcttcagaatcctgctgctgaaagtggccggctttaacctgctgatgaccctgcggctgtggtccagcagggccaagcgatctggatctggagcaacaaacttctcactactcaaacaagcaggtgacgtggaggagaatcccgggcctactagcgccaccatggccttaccagtgaccgccttgctcctgccgctggccttgctgctccacgccgccaggccgctgttcaatcaagaggtgcagatccctctgaccgagagctactgtggcccctgtcctaagaactggatctgctacaagaacaactgctaccagttcttcgacgagagcaagaattggtacgagagccaggccagctgcatgagccagaatgccagcctgctgaaggtgtacagcaaagaggaccaggacctgctgaaactggtcaagagcgcccactggatgggccttgtgcacatccccaccaatggctcttggcagtgggaggacggcagcattctgagccctaacctgctgaccatcatcgagatgcagaagggcgactgcgccctgtacgccagcagctttaagggcttcatcgagaattgcagcaccccgaacacctacatctgtatgcagagaaccgttggcggaggcggaagtggaggcggaggatctggcggcggaggctctgacctctttaatcaagaagtccagattccactcaccgaatcctactgcggaccttgtccaaaaaattggatttgttataagaacaactgttatcaattctttgatgagtctaaaaattggtatgagtcccaggcttcctgcatgtctcagaacgcttctctgctgaaagtctactctaaagaagatcaggatctcctgaagctcgtcaagtctgcccattggatggggctcgtccacattcctaccaacggaagctggcaatgggaagatggctccatcctgtctccaaatctgctcacgattattgaaatgcagaaaggggattgtgctctctacgccagctccttcaagggatttattgagaactgtagcacgcccaatacttatatctgtatgcaacggaccgtgacgcgtggacagcctaaggccaatcctaccgtgacactgttccctccaagcagcgaagaactccaggccaacaaggccacacttgtgtgcctgatctccgacttctaccctggggctgtgacagtggcttggaaggccgatggatctcctgtgaaagccggcgtggaaaccaccaagccatccaagcagagcaacaacaaatacgccgccagctcctacctgagcctgacacctgagcagtggaagtcccacagatcctacagctgccaagtgacccacgaaggcagcaccgtggaaaagacagtggcccctacagagtgcagcggcagagccgattgcggctttaccagcgagagctaccagcagggcgtgctgagcgccaccatcctgtacgagatcctgctgggcaaggccaccctgtacgccgtgctggtgtctgccctggtgctgatggctatggtcaagcggaaggacagccgggga

SEQ ID NO: 18223 - DNA, 2136 bp, synthetic construct
  source 1..2136: mol_type = other DNA
atggccttaccagtgaccgccttgctcctgccgctggccttgctgctccacgccgccaggccgctcgaggaggcctctacaaagggaccctccgtgtttcctctggctcccagcagcaagtctacaagcggaggaacagccgctctgggctgcctggtcaaggattactttcccgagcctgtgaccgtgtcctggaatagcggagcactgacaagcggcgtgcacacctttccagccgtgctgcaaagcagcggcctgtactctctgagcagcgtggtcacagtgcctagctctagcctgggcacccagacctacatctgcaatgtgaaccacaagcctagcaacaccaaggtggacaagagagtggaacccaagagctgtatccccgaggacacattcttcccaagccccgagagcagctgcgacgtgaagctggtggaaaagagcttcgagacagacaccaacctgaacttccagaacctgagcgtgatcggcttcagaatcctgctgctgaaagtggccggctttaacctgctgatgaccctgcggctgtggtccagcagggccaagcgatctggatctggagcaacaaacttctcactactcaaacaagcaggtgacgtggaggagaatcccgggcctactagcatggccttaccagtgaccgccttgctcctgccgctggccttgctgctccacgccgccaggccgatggaccccgacctggaaatcagagccgccttcctgcggcagagaaacacagccctgagaacagaggtggccgagctggaacaagaggtgcagcggctggaaaacgaggtgtcccagtacgagacaagatacggccctctcggaggcggaaaaggtaccggcggaggcggatctggcggcggaggtagcggtggcggaggatctgaattcgacatccagatgacacagagccctagcagcctgtctgccagcgtgggagacagagtgaccatcacatgcaaggccagcgaccacatcaacaactggctggcctggtatcagcagaagcctggacaggcccctaagctgctgatctacggcgctaccacactggaaacaggcgtgcccagcagattttctggcagcggctctggcaccgactacaccctgacaatatccagcctccagcctgaggacttcgccacctactactgtcagcagagctggaacaccccttggacattcggccagggcaccaagctggaaatcaagagaggcggaggcggaagtggaggcggaggatctggcggcggaggctctcaagttcagcttcaacagcctggcgctgagctggtcaaacctggcgcttctgtgaagatgagctgcaaagccagcggctacgccttcagcagctactggatcaactggatgaagcagaaacccggccagggactcgaatggatcggccaaatctatcccggcgacggcgacaccaactacaacggcaagttcaagggcagagccacactgaccgccgatacctctagcagcacagcctacatgcagctgagcagcctgaccagcgaagatagcgccgtgtacttctgtgcccggtccatcacaacagtcgtgggctgcgctatggactattggggccagggaacaagcgtgaccgtgtctagtacgcgtggacagcctaaggccaatcctaccgtgacactgttccctccaagcagcgaagaactccaggccaacaaggccacacttgtgtgcctgatctccgacttctaccctggggctgtgacagtggcttggaaggccgatggatctcctgtgaaagccggcgtggaaaccaccaagccatccaagcagagcaacaacaaatacgccgccagctcctacctgagcctgacacctgagcagtggaagtcccacagatcctacagctgccaagtgacccacgaaggcagcaccgtggaaaagacagtggcccctacagagtgcagcggcagagccgattgcggctttaccagcgagagctaccagcagggcgtgctgagcgccaccatcctgtacgagatcctgctgggcaaggccaccctgtacgccgtgctggtgtctgccctggtgctgatggctatggtcaagcggaaggacagccgggga

SEQ ID NO: 18224 - DNA, 2841 bp, synthetic construct
  source 1..2841: mol_type = other DNA
atggccttaccagtgaccgccttgctcctgccgctggccttgctgctccacgccgccaggccgctcgaggaggcctctacaaagggaccctccgtgtttcctctggctcccagcagcaagtctacaagcggaggaacagccgctctgggctgcctggtcaaggattactttcccgagcctgtgaccgtgtcctggaatagcggagcactgacaagcggcgtgcacacctttccagccgtgctgcaaagcagcggcctgtactctctgagcagcgtggtcacagtgcctagctctagcctgggcacccagacctacatctgcaatgtgaaccacaagcctagcaacaccaaggtggacaagagagtggaacccaagagctgtatccccgaggacacattcttcccaagccccgagagcagctgcgacgtgaagctggtggaaaagagcttcgagacagacaccaacctgaacttccagaacctgagcgtgatcggcttcagaatcctgctgctgaaagtggccggctttaacctgctgatgaccctgcggctgtggtccagcagggccaagcgatctggatctggagcaacaaacttctcactactcaaacaagcaggtgacgtggaggagaatcccgggcctactagcatggccttaccagtgaccgccttgctcctgccgctggccttgctgctccacgccgccaggccgctgttcaatcaagaggtgcagatccctctgaccgagagctactgtggcccctgtcctaagaactggatctgctacaagaacaactgctaccagttcttcgacgagagcaagaattggtacgagagccaggccagctgcatgagccagaatgccagcctgctgaaggtgtacagcaaagaggaccaggacctgctgaaactggtcaagagcgcccactggatgggccttgtgcacatccccaccaatggctcttggcagtgggaggacggcagcattctgagccctaacctgctgaccatcatcgagatgcagaagggcgactgcgccctgtacgccagcagctttaagggcttcatcgagaattgcagcaccccgaacacctacatctgtatgcagagaaccgttggcggaggcggaagtggaggcggaggatctggcggcggaggctctgacctctttaatcaagaagtccagattccactcaccgaatcctactgcggaccttgtccaaaaaattggatttgttataagaacaactgttatcaattctttgatgagtctaaaaattggtatgagtcccaggcttcctgcatgtctcagaacgcttctctgctgaaagtctactctaaagaagatcaggatctcctgaagctcgtcaagtctgcccattggatggggctcgtccacattcctaccaacggaagctggcaatgggaagatggctccatcctgtctccaaatctgctcacgattattgaaatgcagaaaggggattgtgctctctacgccagctccttcaagggatttattgagaactgtagcacgcccaatacttatatctgtatgcaacggaccgtgggtaccggcggaggcggatctggcggcggaggtagcggtggcggaggatctgaattcgacatccagatgacacagagccctagcagcctgtctgccagcgtgggagacagagtgaccatcacatgcaaggccagcgaccacatcaacaactggctggcctggtatcagcagaagcctggacaggcccctaagctgctgatctacggcgctaccacactggaaacaggcgtgcccagcagattttctggcagcggctctggcaccgactacaccctgacaatatccagcctccagcctgaggacttcgccacctactactgtcagcagagctggaacaccccttggacattcggccagggcaccaagctggaaatcaagagaggcggaggcggaagtggaggcggaggatctggcggcggaggctctcaagttcagcttcaacagcctggcgctgagctggtcaaacctggcgcttctgtgaagatgagctgcaaagccagcggctacgccttcagcagctactggatcaactggatgaagcagaaacccggccagggactcgaatggatcggccaaatctatcccggcgacggcgacaccaactacaacggcaagttcaagggcagagccacactgaccgccgatacctctagcagcacagcctacatgcagctgagcagcctgaccagcgaagatagcgccgtgtacttctgtgcccggtccatcacaacagtcgtgggctgcgctatggactattggggccagggaacaagcgtgaccgtgtctagtacgcgtggacagcctaaggccaatcctaccgtgacactgttccctccaagcagcgaagaactccaggccaacaaggccacacttgtgtgcctgatctccgacttctaccctggggctgtgacagtggcttggaaggccgatggatctcctgtgaaagccggcgtggaaaccaccaagccatccaagcagagcaacaacaaatacgccgccagctcctacctgagcctgacacctgagcagtggaagtcccacagatcctacagctgccaagtgacccacgaaggcagcaccgtggaaaagacagtggcccctacagagtgcagcggcagagccgattgcggctttaccagcgagagctaccagcagggcgtgctgagcgccaccatcctgtacgagatcctgctgggcaaggccaccctgtacgccgtgctggtgtctgccctggtgctgatggctatggtcaagcggaaggacagccgggga

SEQ ID NO: 18225 - DNA, 1956 bp, synthetic construct
  source 1..1956: mol_type = other DNA
atggccttaccagtgaccgccttgctcctgccgctggccttgctgctccacgccgccaggccgctcgaggaggcctctacaaagggaccctccgtgtttcctctggctcccagcagcaagtctacaagcggaggaacagccgctctgggctgcctggtcaaggattactttcccgagcctgtgaccgtgtcctggaatagcggagcactgacaagcggcgtgcacacctttccagccgtgctgcaaagcagcggcctgtactctctgagcagcgtggtcacagtgcctagctctagcctgggcacccagacctacatctgcaatgtgaaccacaagcctagcaacaccaaggtggacaagagagtggaacccaagagctgtatccccgaggacacattcttcccaagccccgagagcagctgcgacgtgaagctggtggaaaagagcttcgagacagacaccaacctgaacttccagaacctgagcgtgatcggcttcagaatcctgctgctgaaagtggccggctttaacctgctgatgaccctgcggctgtggtccagcagggccaagcgatctggatctggagcaacaaacttctcactactcaaacaagcaggtgacgtggaggagaatcccgggcctactagcatggccttaccagtgaccgccttgctcctgccgctggccttgctgctccacgccgccaggccgcagtctgtgctgacacagcctcctagtgtgtctggcgctcctggacagagagtgaccatctcttgtaccggcagcagcagcaatatcggagccggctatgacgtgcactggtatcagcagctccctggcacagcccctaaactgctgatcttcggcaacagcaacagacccagcggcgtgcccgatagattcagcggctttaagagcggcacaagcgccagcctggctatcactggactgcaagccgaggacgaggccgactacttctgccagagctacgatagcagcctgagcggcagcggagtgtttggcacaggcaccaaagtgacagtgcttggcggcggaggcggaagtggaggcggaggatctggcggcggaggctctcaaatgcaactggttcaaagcggcggtggcctggtgcaacctggaagaagtctgagactgagctgtgccgccagcggcttcaccttcgatgattacgccatgcactgggtccgacaggcccctggaaaaggactggaatgggtgtccggcatctcctggaatagcggctctatcggctacgccgacagcgtgaagggcagattcaccatcagccgggacaacgccaagaacagcctgtacctccagatgaactccctgagagccgaggatacagccctgtactactgcgccaaggacatccacagcggcagctactacggcctgctgtactacgctatggacgtgtggggccagggcacaaccgtgacagtttcttctacgcgtggacagcctaaggccaatcctaccgtgacactgttccctccaagcagcgaagaactccaggccaacaaggccacacttgtgtgcctgatctccgacttctaccctggggctgtgacagtggcttggaaggccgatggatctcctgtgaaagccggcgtggaaaccaccaagccatccaagcagagcaacaacaaatacgccgccagctcctacctgagcctgacacctgagcagtggaagtcccacagatcctacagctgccaagtgacccacgaaggcagcaccgtggaaaagacagtggcccctacagagtgcagcggcagagccgattgcggctttaccagcgagagctaccagcagggcgtgctgagcgccaccatcctgtacgagatcctgctgggcaaggccaccctgtacgccgtgctggtgtctgccctggtgctgatggctatggtcaagcggaaggacagccgggga

SEQ ID NO: 18226 - DNA, 1467 bp, synthetic construct
  source 1..1467: mol_type = other DNA
atggccttaccagtgaccgccttgctcctgccgctggccttgctgctccacgccgccaggccgctcgaggaggcctctacaaagggaccctccgtgtttcctctggctcccagcagcaagtctacaagcggaggaacagccgctctgggctgcctggtcaaggattactttcccgagcctgtgaccgtgtcctggaatagcggagcactgacaagcggcgtgcacacctttccagccgtgctgcaaagcagcggcctgtactctctgagcagcgtggtcacagtgcctagctctagcctgggcacccagacctacatctgcaatgtgaaccacaagcctagcaacaccaaggtggacaagagagtggaacccaagagctgtatccccgaggacacattcttcccaagccccgagagcagctgcgacgtgaagctggtggaaaagagcttcgagacagacaccaacctgaacttccagaacctgagcgtgatcggcttcagaatcctgctgctgaaagtggccggctttaacctgctgatgaccctgcggctgtggtccagcagggccaagcgatctggatctggagcaacaaacttctcactactcaaacaagcaggtgacgtggaggagaatcccgggcctactagcatggccttaccagtgaccgccttgctcctgccgctggccttgctgctccacgccgccaggccgatgtgtatgccctgcttcaccaccgaccatcagatggcccggaagtgcgacgattgctgtggcggaaaaggcagaggcaagtgctacggccctcagtgcttgtgtagactcgagggcggaggcggaagtggaggcggaggatctggcggcggaggctctttcgaagtgtgtatgccttgttttaccacggatcaacaaatggctcgcaagtgttctgactgctgcggaggcaaaggccggggaaagtgttatggcccacagtgtctgtgccggacgcgtggacagcctaaggccaatcctaccgtgacactgttccctccaagcagcgaagaactccaggccaacaaggccacacttgtgtgcctgatctccgacttctaccctggggctgtgacagtggcttggaaggccgatggatctcctgtgaaagccggcgtggaaaccaccaagccatccaagcagagcaacaacaaatacgccgccagctcctacctgagcctgacacctgagcagtggaagtcccacagatcctacagctgccaagtgacccacgaaggcagcaccgtggaaaagacagtggcccctacagagtgcagcggcagagccgattgcggctttaccagcgagagctaccagcagggcgtgctgagcgccaccatcctgtacgagatcctgctgggcaaggccaccctgtacgccgtgctggtgtctgccctggtgctgatggctatggtcaagcggaaggacagccgggga

SEQ ID NO: 18227 - DNA, 2256 bp, synthetic construct
  source 1..2256: mol_type = other DNA
atggccttaccagtgaccgccttgctcctgccgctggccttgctgctccacgccgccaggccgctcgaggaggcctctacaaagggaccctccgtgtttcctctggctcccagcagcaagtctacaagcggaggaacagccgctctgggctgcctggtcaaggattactttcccgagcctgtgaccgtgtcctggaatagcggagcactgacaagcggcgtgcacacctttccagccgtgctgcaaagcagcggcctgtactctctgagcagcgtggtcacagtgcctagctctagcctgggcacccagacctacatctgcaatgtgaaccacaagcctagcaacaccaaggtggacaagagagtggaacccaagagctgtatccccgaggacacattcttcccaagccccgagagcagctgcgacgtgaagctggtggaaaagagcttcgagacagacaccaacctgaacttccagaacctgagcgtgatcggcttcagaatcctgctgctgaaagtggccggctttaacctgctgatgaccctgcggctgtggtccagcagggccaagcgatctggatctggagcaacaaacttctcactactcaaacaagcaggtgacgtggaggagaatcccgggcctactagcatggccttaccagtgaccgccttgctcctgccgctggccttgctgctccacgccgccaggccgatgtgtatgccctgcttcaccaccgaccatcagatggcccggaagtgcgacgattgctgtggcggaaaaggcagaggcaagtgctacggccctcagtgcttgtgtagactcgagggcggaggcggaagtggaggcggaggatctggcggcggaggctctttcgaagtgtgtatgccttgttttaccacggatcaacaaatggctcgcaagtgttctgactgctgcggaggcaaaggccggggaaagtgttatggcccacagtgtctgtgccggggtaccggcggaggcggatctggcggcggaggtagcggtggcggaggatctgaattcgacatccagatgacacagagccctagcagcctgtctgccagcgtgggagacagagtgaccatcacatgcaaggccagcgaccacatcaacaactggctggcctggtatcagcagaagcctggacaggcccctaagctgctgatctacggcgctaccacactggaaacaggcgtgcccagcagattttctggcagcggctctggcaccgactacaccctgacaatatccagcctccagcctgaggacttcgccacctactactgtcagcagagctggaacaccccttggacattcggccagggcaccaagctggaaatcaagagaggcggaggcggaagtggaggcggaggatctggcggcggaggctctcaagttcagcttcaacagcctggcgctgagctggtcaaacctggcgcttctgtgaagatgagctgcaaagccagcggctacgccttcagcagctactggatcaactggatgaagcagaaacccggccagggactcgaatggatcggccaaatctatcccggcgacggcgacaccaactacaacggcaagttcaagggcagagccacactgaccgccgatacctctagcagcacagcctacatgcagctgagcagcctgaccagcgaagatagcgccgtgtacttctgtgcccggtccatcacaacagtcgtgggctgcgctatggactattggggccagggaacaagcgtgaccgtgtctagtacgcgtggacagcctaaggccaatcctaccgtgacactgttccctccaagcagcgaagaactccaggccaacaaggccacacttgtgtgcctgatctccgacttctaccctggggctgtgacagtggcttggaaggccgatggatctcctgtgaaagccggcgtggaaaccaccaagccatccaagcagagcaacaacaaatacgccgccagctcctacctgagcctgacacctgagcagtggaagtcccacagatcctacagctgccaagtgacccacgaaggcagcaccgtggaaaagacagtggcccctacagagtgcagcggcagagccgattgcggctttaccagcgagagctaccagcagggcgtgctgagcgccaccatcctgtacgagatcctgctgggcaaggccaccctgtacgccgtgctggtgtctgccctggtgctgatggctatggtcaagcggaaggacagccgggga

SEQ ID NO: 18228 - DNA, 2481 bp, synthetic construct
  source 1..2481: mol_type = other DNA
atggccttaccagtgaccgccttgctcctgccgctggccttgctgctccacgccgccaggccgctcgaggaggcctctacaaagggaccctccgtgtttcctctggctcccagcagcaagtctacaagcggaggaacagccgctctgggctgcctggtcaaggattactttcccgagcctgtgaccgtgtcctggaatagcggagcactgacaagcggcgtgcacacctttccagccgtgctgcaaagcagcggcctgtactctctgagcagcgtggtcacagtgcctagctctagcctgggcacccagacctacatctgcaatgtgaaccacaagcctagcaacaccaaggtggacaagagagtggaacccaagagctgtatccccgaggacacattcttcccaagccccgagagcagctgcgacgtgaagctggtggaaaagagcttcgagacagacaccaacctgaacttccagaacctgagcgtgatcggcttcagaatcctgctgctgaaagtggccggctttaacctgctgatgaccctgcggctgtggtccagcagggccaagcgatctggatctggagcaacaaacttctcactactcaaacaagcaggtgacgtggaggagaatcccgggcctactagcatggccttaccagtgaccgccttgctcctgccgctggccttgctgctccacgccgccaggccgagccccgtagctcctgcctgtgaccccagactcctaaataaactgctgcgtgactcccacctccttcacagccgactgagtcagtgtcccgacgtggaccctttgtctatccctgttctgctgcctgctgtggactttagcctgggagaatggaaaacccagacggaacagagcaaggcacaggacattctaggggcagtgtcccttctactggagggagtgatggcagcacgaggacagttggaaccctcctgcctctcatccctcctgggacagctttctgggcaggttcgcctcctcttgggggccctgcagggcctcctaggaacccagcttcctctacagggcaggaccacagctcacaaggaccccaatgccctcttcttgagcttgcaacaactgcttcggggaaaggtgcgcttcctgcttctggtagaaggtcccaccctctgtgtcagacggaccctgccaaccacagctgtcccaagcagtacttctggtaccggcggaggcggatctggcggcggaggtagcggtggcggaggatctgaattcgacatccagatgacacagagccctagcagcctgtctgccagcgtgggagacagagtgaccatcacatgcaaggccagcgaccacatcaacaactggctggcctggtatcagcagaagcctggacaggcccctaagctgctgatctacggcgctaccacactggaaacaggcgtgcccagcagattttctggcagcggctctggcaccgactacaccctgacaatatccagcctccagcctgaggacttcgccacctactactgtcagcagagctggaacaccccttggacattcggccagggcaccaagctggaaatcaagagaggcggaggcggaagtggaggcggaggatctggcggcggaggctctcaagttcagcttcaacagcctggcgctgagctggtcaaacctggcgcttctgtgaagatgagctgcaaagccagcggctacgccttcagcagctactggatcaactggatgaagcagaaacccggccagggactcgaatggatcggccaaatctatcccggcgacggcgacaccaactacaacggcaagttcaagggcagagccacactgaccgccgatacctctagcagcacagcctacatgcagctgagcagcctgaccagcgaagatagcgccgtgtacttctgtgcccggtccatcacaacagtcgtgggctgcgctatggactattggggccagggaacaagcgtgaccgtgtctagtacgcgtggacagcctaaggccaatcctaccgtgacactgttccctccaagcagcgaagaactccaggccaacaaggccacacttgtgtgcctgatctccgacttctaccctggggctgtgacagtggcttggaaggccgatggatctcctgtgaaagccggcgtggaaaccaccaagccatccaagcagagcaacaacaaatacgccgccagctcctacctgagcctgacacctgagcagtggaagtcccacagatcctacagctgccaagtgacccacgaaggcagcaccgtggaaaagacagtggcccctacagagtgcagcggcagagccgattgcggctttaccagcgagagctaccagcagggcgtgctgagcgccaccatcctgtacgagatcctgctgggcaaggccaccctgtacgccgtgctggtgtctgccctggtgctgatggctatggtcaagcggaaggacagccgggga

SEQ ID NO: 18229 - DNA, 2202 bp, synthetic construct
  source 1..2202: mol_type = other DNA
atggccttaccagtgaccgccttgctcctgccgctggccttgctgctccacgccgccaggccgctcgaggaggcctctacaaagggaccctccgtgtttcctctggctcccagcagcaagtctacaagcggaggaacagccgctctgggctgcctggtcaaggattactttcccgagcctgtgaccgtgtcctggaatagcggagcactgacaagcggcgtgcacacctttccagccgtgctgcaaagcagcggcctgtactctctgagcagcgtggtcacagtgcctagctctagcctgggcacccagacctacatctgcaatgtgaaccacaagcctagcaacaccaaggtggacaagagagtggaacccaagagctgtatccccgaggacacattcttcccaagccccgagagcagctgcgacgtgaagctggtggaaaagagcttcgagacagacaccaacctgaacttccagaacctgagcgtgatcggcttcagaatcctgctgctgaaagtggccggctttaacctgctgatgaccctgcggctgtggtccagcagggccaagcgatctggatctggagcaacaaacttctcactactcaaacaagcaggtgacgtggaggagaatcccgggcctactagcatggccttaccagtgaccgccttgctcctgccgctggccttgctgctccacgccgccaggccgatgggcagctgggaagagttcgagctgagactgaacgccatcgaggaacggctgtatgccctcggaggatctgaagccgagctggcctacttcgagtacgtgatcgccgacttcgagggcaacctgcagcggtacaaaggcaagggcaaccctgaagtggaagccctgtacttcgaggccgacgccatcttcgaggaactggtggcctacagacacaacggtaccggcggaggcggatctggcggcggaggtagcggtggcggaggatctgaattcgacatccagatgacacagagccctagcagcctgtctgccagcgtgggagacagagtgaccatcacatgcaaggccagcgaccacatcaacaactggctggcctggtatcagcagaagcctggacaggcccctaagctgctgatctacggcgctaccacactggaaacaggcgtgcccagcagattttctggcagcggctctggcaccgactacaccctgacaatatccagcctccagcctgaggacttcgccacctactactgtcagcagagctggaacaccccttggacattcggccagggcaccaagctggaaatcaagagaggcggaggcggaagtggaggcggaggatctggcggcggaggctctcaagttcagcttcaacagcctggcgctgagctggtcaaacctggcgcttctgtgaagatgagctgcaaagccagcggctacgccttcagcagctactggatcaactggatgaagcagaaacccggccagggactcgaatggatcggccaaatctatcccggcgacggcgacaccaactacaacggcaagttcaagggcagagccacactgaccgccgatacctctagcagcacagcctacatgcagctgagcagcctgaccagcgaagatagcgccgtgtacttctgtgcccggtccatcacaacagtcgtgggctgcgctatggactattggggccagggaacaagcgtgaccgtgtctagtacgcgtggacagcctaaggccaatcctaccgtgacactgttccctccaagcagcgaagaactccaggccaacaaggccacacttgtgtgcctgatctccgacttctaccctggggctgtgacagtggcttggaaggccgatggatctcctgtgaaagccggcgtggaaaccaccaagccatccaagcagagcaacaacaaatacgccgccagctcctacctgagcctgacacctgagcagtggaagtcccacagatcctacagctgccaagtgacccacgaaggcagcaccgtggaaaagacagtggcccctacagagtgcagcggcagagccgattgcggctttaccagcgagagctaccagcagggcgtgctgagcgccaccatcctgtacgagatcctgctgggcaaggccaccctgtacgccgtgctggtgtctgccctggtgctgatggctatggtcaagcggaaggacagccgggga

SEQ ID NO: 18230 - DNA, 2622 bp, synthetic construct
  source 1..2622: mol_type = other DNA
atggccttaccagtgaccgccttgctcctgccgctggccttgctgctccacgccgccaggccgctcgagggacagcctaaggccaatcctaccgtgacactgttccctccaagcagcgaagaactccaggccaacaaggccacacttgtgtgcctgatctccgacttctaccctggggctgtgacagtggcttggaaggccgatggatctcctgtgaaagccggcgtggaaaccaccaagccatccaagcagagcaacaacaaatacgccgccagctcctacctgagcctgacacctgagcagtggaagtcccacagatcctacagctgccaagtgacccacgaaggcagcaccgtggaaaagacagtggcccctacagagtgcagcggcagagccgattgcggctttaccagcgagagctaccagcagggcgtgctgagcgccaccatcctgtacgagatcctgctgggcaaggccaccctgtacgccgtgctggtgtctgccctggtgctgatggctatggtcaagcggaaggacagccggggaagggccaagcgatctggatctggagcaacaaacttctcactactcaaacaagcaggtgacgtggaggagaatcccgggcctactagcatggccttaccagtgaccgccttgctcctgccgctggccttgctgctccacgccgccaggccggacatccagatgacacagactacatcctccctgtctgcctctctgggagacagagtcaccatcagttgcagggcaagtcaggacattagtaaatatttaaattggtatcagcagaaaccagatggaactgttaaactcctgatctaccatacatcaagattacactcaggagtcccatcaaggttcagtggcagtgggtctggaacagattattctctcaccattagcaacctggagcaagaagatattgccacttacttttgccaacagggtaatacgcttccgtacacgttcggaggggggaccaagctggagatcacaggtggcggtggctcgggcggtggtgggtcgggtggcggcggatctgaggtgaaactgcaggagtcaggacctggcctggtggcgccctcacagagcctgtccgtcacatgcactgtctcaggggtctcattacccgactatggtgtaagctggattcgccagcctccacgaaagggtctggagtggctgggagtaatatggggtagtgaaaccacatactataattcagctctcaaatccagactgaccatcatcaaggacaactccaagagccaagttttcttaaaaatgaacagtctgcaaactgatgacacagccatttactactgtgccaaacattattactacggtggtagctatgctatggactactggggtcaaggaacctcagtcaccgtctcctcaacgcgtgaggcctctacaaagggaccctccgtgtttcctctggctcccagcagcaagtctacaagcggaggaacagccgctctgggctgcctggtcaaggattactttcccgagcctgtgaccgtgtcctggaatagcggagcactgacaagcggcgtgcacacctttccagccgtgctgcaaagcagcggcctgtactctctgagcagcgtggtcacagtgcctagctctagcctgggcacccagacctacatctgcaatgtgaaccacaagcctagcaacaccaaggtggacaagagagtggaacccaagagctgtatccccgaggacacattcttcccaagccccgagagcagctgcgacgtgaagctggtggaaaagagcttcgagacagacaccaacctgaacttccagaacctgagcgtgatcggcttcagaatcctgctgctgaaagtggccggctttaacctgctgatgaccctgcggctgtggtccagccgcgccaagagaagcggatctggcgtgaagcagaccctgaatttcgacctgctgaagctggctggcgacgtggaatccaacccaggcccttctagaggccatatgaccgagtacaagcccacggtgcgcctcgccacccgcgacgacgtccccagggccgtacgcaccctcgccgccgcgttcgccgactaccccgccacgcgccacaccgtcgatccggaccgccacatcgagcgggtcaccgagctgcaagaactcttcctcacgcgcgtcgggctcgacatcggcaaggtgtgggtcgcggacgacggcgccgcggtggcggtctggaccacgccggagagcgtcgaagcgggggcggtgttcgccgagatcggcccgcgcatggccgagttgagcggttcccggctggccgcgcagcaacagatggaaggcctcctggcgccgcaccggcccaaggagcccgcgtggttcctggccaccgtcggcgtctcgcccgaccaccagggcaagggtctgggcagcgccgtcgtgctccccggagtggaggcggccgagcgcgccggggtgcccgccttcctggagacctccgcgccccgcaacctccccttctacgagcggctcggcttcaccgtcaccgccgacgtcgaggtgcccgaaggaccgcgcacctggtgcatgacccgcaagcccggtgcctga

SEQ ID NO: 18231 - DNA, 2625 bp, synthetic construct
  source 1..2625: mol_type = other DNA
atggccttaccagtgaccgccttgctcctgccgctggccttgctgctccacgccgccaggccgctcgagggacagcctaaggccaatcctaccgtgacactgttccctccaagcagcgaagaactccaggccaacaaggccacacttgtgtgcctgatctccgacttctaccctggggctgtgacagtggcttggaaggccgatggatctcctgtgaaagccggcgtggaaaccaccaagccatccaagcagagcaacaacaaatacgccgccagctcctacctgagcctgacacctgagcagtggaagtcccacagatcctacagctgccaagtgacccacgaaggcagcaccgtggaaaagacagtggcccctacagagtgcagcggcagagccgattgcggctttaccagcgagagctaccagcagggcgtgctgagcgccaccatcctgtacgagatcctgctgggcaaggccaccctgtacgccgtgctggtgtctgccctggtgctgatggctatggtcaagcggaaggacagccggggaagggccaagcgatctggatctggagcaacaaacttctcactactcaaacaagcaggtgacgtggaggagaatcccgggcctactagcaccatggccttaccagtgaccgccttgctcctgccgctggccttgctgctccacgccgccaggccggagatcgtgatgacccagagccctgccaccctgtctctgagccctggcgaaagagccaccctgagctgtagagccagccaggacatcagcaagtacctgaactggtatcagcagaagcccggccaggcccccagactgctgatctaccacaccagcagactgcacagcggcatccccgccagattttctggctctggcagcggcaccgactacaccctgacaatcagcagcctccagcccgaggacttcgccgtgtacttctgtcagcaaggcaacaccctgccctacaccttcggccagggcaccaagctggaaatcaagggcggaggcggaagtggaggcggaggatctggcggcggaggctctcaggtgcaactccaggaatctggccctggcctcgtgaagcccagcgagacactgagcctgacctgtaccgtgtccggcgtgtccctgcctgactatggcgtgtcctggatcagacagccccctggcaagggcctggaatggatcggagtgatttggggcagcgaaaccacctactacaacagctccctgaagtccagagtgaccatctccaaggacaactccaagaaccaggtgtccctgaagctgagcagcgtgacagccgccgacaccgccgtgtattactgcgccaagcactactactacggcggcagctacgctatggactactggggccagggaaccctcgtgaccgtgtctagtacgcgtgaggcctctacaaagggaccctccgtgtttcctctggctcccagcagcaagtctacaagcggaggaacagccgctctgggctgcctggtcaaggattactttcccgagcctgtgaccgtgtcctggaatagcggagcactgacaagcggcgtgcacacctttccagccgtgctgcaaagcagcggcctgtactctctgagcagcgtggtcacagtgcctagctctagcctgggcacccagacctacatctgcaatgtgaaccacaagcctagcaacaccaaggtggacaagagagtggaacccaagagctgtatccccgaggacacattcttcccaagccccgagagcagctgcgacgtgaagctggtggaaaagagcttcgagacagacaccaacctgaacttccagaacctgagcgtgatcggcttcagaatcctgctgctgaaagtggccggctttaacctgctgatgaccctgcggctgtggtccagccgcgccaagagaagcggatctggcgtgaagcagaccctgaatttcgacctgctgaagctggctggcgacgtggaatccaacccaggcccttctagaggccatatgaccgagtacaagcccacggtgcgcctcgccacccgcgacgacgtccccagggccgtacgcaccctcgccgccgcgttcgccgactaccccgccacgcgccacaccgtcgatccggaccgccacatcgagcgggtcaccgagctgcaagaactcttcctcacgcgcgtcgggctcgacatcggcaaggtgtgggtcgcggacgacggcgccgcggtggcggtctggaccacgccggagagcgtcgaagcgggggcggtgttcgccgagatcggcccgcgcatggccgagttgagcggttcccggctggccgcgcagcaacagatggaaggcctcctggcgccgcaccggcccaaggagcccgcgtggttcctggccaccgtcggcgtctcgcccgaccaccagggcaagggtctgggcagcgccgtcgtgctccccggagtggaggcggccgagcgcgccggggtgcccgccttcctggagacctccgcgccccgcaacctccccttctacgagcggctcggcttcaccgtcaccgccgacgtcgaggtgcccgaaggaccgcgcacctggtgcatgacccgcaagcccggtgcctga

SEQ ID NO: 18232 - DNA, 2628 bp, synthetic construct
  source 1..2628: mol_type = other DNA
atggccttaccagtgaccgccttgctcctgccgctggccttgctgctccacgccgccaggccgctcgagggacagcctaaggccaatcctaccgtgacactgttccctccaagcagcgaagaactccaggccaacaaggccacacttgtgtgcctgatctccgacttctaccctggggctgtgacagtggcttggaaggccgatggatctcctgtgaaagccggcgtggaaaccaccaagccatccaagcagagcaacaacaaatacgccgccagctcctacctgagcctgacacctgagcagtggaagtcccacagatcctacagctgccaagtgacccacgaaggcagcaccgtggaaaagacagtggcccctacagagtgcagcggcagagccgattgcggctttaccagcgagagctaccagcagggcgtgctgagcgccaccatcctgtacgagatcctgctgggcaaggccaccctgtacgccgtgctggtgtctgccctggtgctgatggctatggtcaagcggaaggacagccggggaagggccaagcgatctggatctggagcaacaaacttctcactactcaaacaagcaggtgacgtggaggagaatcccgggcctactagcaccatggccttaccagtgaccgccttgctcctgccgctggccttgctgctccacgccgccaggccggacgagatcgtgctgacacagagccccgccaccctgtcactgtctccaggcgaaagagccaccctgagctgtagcgccagcagcagcgtgtcctacatgcactggtatcagcagaagcccggccaggcccccagactgctgatctacgataccagcaagctggcctccggcatccccgccagattttctggcagcggctccggcaccgacttcaccctgacaatcagcagcctggaacccgaggacgtggccgtgtactactgttttcaaggcagcgtgtaccccttcaccttcggccagggcaccaagctggaaatcaagagaggtggcggtggctcgggcggtggtgggtcgggtggcggcggatctcaggtgcagctccaggaatctggccctggcctcgtgaagcctagccagaccctgagcctgacctgtaccgtgtctggcggcagcatcagcacaagcggcatgggcgtgggctggatcagacagcaccctggcaagggcctggaatggatcggccacatttggtgggacgacgacaagcggtacaaccccgccctgaagtccagagtgaccatcagcgtggacaccagcaagaaccagttcagcctgaagctgagcagcgtgacagccgccgataccgccgtgtattattgcgcccggatggaactgtggtcctactacttcgactactggggccagggaaccctcgtgaccgtgtctagtacgcgtgaggcctctacaaagggaccctccgtgtttcctctggctcccagcagcaagtctacaagcggaggaacagccgctctgggctgcctggtcaaggattactttcccgagcctgtgaccgtgtcctggaatagcggagcactgacaagcggcgtgcacacctttccagccgtgctgcaaagcagcggcctgtactctctgagcagcgtggtcacagtgcctagctctagcctgggcacccagacctacatctgcaatgtgaaccacaagcctagcaacaccaaggtggacaagagagtggaacccaagagctgtatccccgaggacacattcttcccaagccccgagagcagctgcgacgtgaagctggtggaaaagagcttcgagacagacaccaacctgaacttccagaacctgagcgtgatcggcttcagaatcctgctgctgaaagtggccggctttaacctgctgatgaccctgcggctgtggtccagccgcgccaagagaagcggatctggcgtgaagcagaccctgaatttcgacctgctgaagctggctggcgacgtggaatccaacccaggcccttctagaggccatatgaccgagtacaagcccacggtgcgcctcgccacccgcgacgacgtccccagggccgtacgcaccctcgccgccgcgttcgccgactaccccgccacgcgccacaccgtcgatccggaccgccacatcgagcgggtcaccgagctgcaagaactcttcctcacgcgcgtcgggctcgacatcggcaaggtgtgggtcgcggacgacggcgccgcggtggcggtctggaccacgccggagagcgtcgaagcgggggcggtgttcgccgagatcggcccgcgcatggccgagttgagcggttcccggctggccgcgcagcaacagatggaaggcctcctggcgccgcaccggcccaaggagcccgcgtggttcctggccaccgtcggcgtctcgcccgaccaccagggcaagggtctgggcagcgccgtcgtgctccccggagtggaggcggccgagcgcgccggggtgcccgccttcctggagacctccgcgccccgcaacctccccttctacgagcggctcggcttcaccgtcaccgccgacgtcgaggtgcccgaaggaccgcgcacctggtgcatgacccgcaagcccggtgcctga

SEQ ID NO: 18233 - DNA, 2616 bp, synthetic construct
  source 1..2616: mol_type = other DNA
atggccttaccagtgaccgccttgctcctgccgctggccttgctgctccacgccgccaggccgctcgagggacagcctaaggccaatcctaccgtgacactgttccctccaagcagcgaagaactccaggccaacaaggccacacttgtgtgcctgatctccgacttctaccctggggctgtgacagtggcttggaaggccgatggatctcctgtgaaagccggcgtggaaaccaccaagccatccaagcagagcaacaacaaatacgccgccagctcctacctgagcctgacacctgagcagtggaagtcccacagatcctacagctgccaagtgacccacgaaggcagcaccgtggaaaagacagtggcccctacagagtgcagcggcagagccgattgcggctttaccagcgagagctaccagcagggcgtgctgagcgccaccatcctgtacgagatcctgctgggcaaggccaccctgtacgccgtgctggtgtctgccctggtgctgatggctatggtcaagcggaaggacagccggggaagggccaagcgatctggatctggagcaacaaacttctcactactcaaacaagcaggtgacgtggaggagaatcccgggcctactagcatggccttaccagtgaccgccttgctcctgccgctggccttgctgctccacgccgccaggccggacatccagatgacacagagccctagcagcctgtctgccagcgtgggagacagagtgaccatcacctgtagagccagccaggacatcagcaactacctgaactggtatcagcagaagcccggcaaggcccctaagctgctgatctactacaccagcagactgcacagcggcgtgcccagcagattttctggctctggcagcggcaccgacttcaccctgacaatatctagcctccagcctgaggacttcgccacctactattgccagcagggcaacaccctgccttacacatttggacagggcaccaaggtggaaatcaagagaggcggaggcggaagtggaggcggaggatctggcggcggaggctctgaagtgcagctggttgaatcaggtggcggcctggttcaacctggcggatctctgagactgagctgtgccgccagcggcttcaccttcagcgactactttatgagctgggtccgacaggcccctggcaaaggacttgaatgggtcgccaccatcagcaatggcggcacctacacttactaccccgacagcgtgaagggcagattcaccatctccagagacaacagcaagaacaccctgtacctccagatgaactccctgagagccgaggacaccgccgtgtactactgcgccagattcgacggctacatcttcgactattggggccagggcaccctggtcacagtctcttctacgcgtgaggcctctacaaagggaccctccgtgtttcctctggctcccagcagcaagtctacaagcggaggaacagccgctctgggctgcctggtcaaggattactttcccgagcctgtgaccgtgtcctggaatagcggagcactgacaagcggcgtgcacacctttccagccgtgctgcaaagcagcggcctgtactctctgagcagcgtggtcacagtgcctagctctagcctgggcacccagacctacatctgcaatgtgaaccacaagcctagcaacaccaaggtggacaagagagtggaacccaagagctgtatccccgaggacacattcttcccaagccccgagagcagctgcgacgtgaagctggtggaaaagagcttcgagacagacaccaacctgaacttccagaacctgagcgtgatcggcttcagaatcctgctgctgaaagtggccggctttaacctgctgatgaccctgcggctgtggtccagccgcgccaagagaagcggatctggcgtgaagcagaccctgaatttcgacctgctgaagctggctggcgacgtggaatccaacccaggcccttctagaggccatatgaccgagtacaagcccacggtgcgcctcgccacccgcgacgacgtccccagggccgtacgcaccctcgccgccgcgttcgccgactaccccgccacgcgccacaccgtcgatccggaccgccacatcgagcgggtcaccgagctgcaagaactcttcctcacgcgcgtcgggctcgacatcggcaaggtgtgggtcgcggacgacggcgccgcggtggcggtctggaccacgccggagagcgtcgaagcgggggcggtgttcgccgagatcggcccgcgcatggccgagttgagcggttcccggctggccgcgcagcaacagatggaaggcctcctggcgccgcaccggcccaaggagcccgcgtggttcctggccaccgtcggcgtctcgcccgaccaccagggcaagggtctgggcagcgccgtcgtgctccccggagtggaggcggccgagcgcgccggggtgcccgccttcctggagacctccgcgccccgcaacctccccttctacgagcggctcggcttcaccgtcaccgccgacgtcgaggtgcccgaaggaccgcgcacctggtgcatgacccgcaagcccggtgcctga

SEQ ID NO: 18234 - DNA, 2628 bp, synthetic construct
  source 1..2628: mol_type = other DNA
atggccttaccagtgaccgccttgctcctgccgctggccttgctgctccacgccgccaggccgctcgagggacagcctaaggccaatcctaccgtgacactgttccctccaagcagcgaagaactccaggccaacaaggccacacttgtgtgcctgatctccgacttctaccctggggctgtgacagtggcttggaaggccgatggatctcctgtgaaagccggcgtggaaaccaccaagccatccaagcagagcaacaacaaatacgccgccagctcctacctgagcctgacacctgagcagtggaagtcccacagatcctacagctgccaagtgacccacgaaggcagcaccgtggaaaagacagtggcccctacagagtgcagcggcagagccgattgcggctttaccagcgagagctaccagcagggcgtgctgagcgccaccatcctgtacgagatcctgctgggcaaggccaccctgtacgccgtgctggtgtctgccctggtgctgatggctatggtcaagcggaaggacagccggggaagggccaagcgatctggatctggagcaacaaacttctcactactcaaacaagcaggtgacgtggaggagaatcccgggcctactagcatggccttaccagtgaccgccttgctcctgccgctggccttgctgctccacgccgccaggccggacatccagatgacacagagccctagcagcctgtctgccagcgtgggagacagagtgaccatcacatgcaaggccagcgaccacatcaacaactggctggcctggtatcagcagaagcctggacaggcccctaagctgctgatctacggcgctaccacactggaaacaggcgtgcccagcagattttctggcagcggctctggcaccgactacaccctgacaatatccagcctccagcctgaggacttcgccacctactactgtcagcagagctggaacaccccttggacattcggccagggcaccaagctggaaatcaagagaggcggaggcggaagtggaggcggaggatctggcggcggaggctctcaagttcagcttcaacagcctggcgctgagctggtcaaacctggcgcttctgtgaagatgagctgcaaagccagcggctacgccttcagcagctactggatcaactggatgaagcagaaacccggccagggactcgaatggatcggccaaatctatcccggcgacggcgacaccaactacaacggcaagttcaagggcagagccacactgaccgccgatacctctagcagcacagcctacatgcagctgagcagcctgaccagcgaagatagcgccgtgtacttctgtgcccggtccatcacaacagtcgtgggctgcgctatggactattggggccagggaacaagcgtgaccgtgtctagtacgcgtgaggcctctacaaagggaccctccgtgtttcctctggctcccagcagcaagtctacaagcggaggaacagccgctctgggctgcctggtcaaggattactttcccgagcctgtgaccgtgtcctggaatagcggagcactgacaagcggcgtgcacacctttccagccgtgctgcaaagcagcggcctgtactctctgagcagcgtggtcacagtgcctagctctagcctgggcacccagacctacatctgcaatgtgaaccacaagcctagcaacaccaaggtggacaagagagtggaacccaagagctgtatccccgaggacacattcttcccaagccccgagagcagctgcgacgtgaagctggtggaaaagagcttcgagacagacaccaacctgaacttccagaacctgagcgtgatcggcttcagaatcctgctgctgaaagtggccggctttaacctgctgatgaccctgcggctgtggtccagccgcgccaagagaagcggatctggcgtgaagcagaccctgaatttcgacctgctgaagctggctggcgacgtggaatccaacccaggcccttctagaggccatatgaccgagtacaagcccacggtgcgcctcgccacccgcgacgacgtccccagggccgtacgcaccctcgccgccgcgttcgccgactaccccgccacgcgccacaccgtcgatccggaccgccacatcgagcgggtcaccgagctgcaagaactcttcctcacgcgcgtcgggctcgacatcggcaaggtgtgggtcgcggacgacggcgccgcggtggcggtctggaccacgccggagagcgtcgaagcgggggcggtgttcgccgagatcggcccgcgcatggccgagttgagcggttcccggctggccgcgcagcaacagatggaaggcctcctggcgccgcaccggcccaaggagcccgcgtggttcctggccaccgtcggcgtctcgcccgaccaccagggcaagggtctgggcagcgccgtcgtgctccccggagtggaggcggccgagcgcgccggggtgcccgccttcctggagacctccgcgccccgcaacctccccttctacgagcggctcggcttcaccgtcaccgccgacgtcgaggtgcccgaaggaccgcgcacctggtgcatgacccgcaagcccggtgcctga

SEQ ID NO: 18235 - DNA, 2634 bp, synthetic construct
  source 1..2634: mol_type = other DNA
atggccttaccagtgaccgccttgctcctgccgctggccttgctgctccacgccgccaggccgctcgagggacagcctaaggccaatcctaccgtgacactgttccctccaagcagcgaagaactccaggccaacaaggccacacttgtgtgcctgatctccgacttctaccctggggctgtgacagtggcttggaaggccgatggatctcctgtgaaagccggcgtggaaaccaccaagccatccaagcagagcaacaacaaatacgccgccagctcctacctgagcctgacacctgagcagtggaagtcccacagatcctacagctgccaagtgacccacgaaggcagcaccgtggaaaagacagtggcccctacagagtgcagcggcagagccgattgcggctttaccagcgagagctaccagcagggcgtgctgagcgccaccatcctgtacgagatcctgctgggcaaggccaccctgtacgccgtgctggtgtctgccctggtgctgatggctatggtcaagcggaaggacagccggggaagggccaagcgatctggatctggagcaacaaacttctcactactcaaacaagcaggtgacgtggaggagaatcccgggcctactagcatggccttaccagtgaccgccttgctcctgccgctggccttgctgctccacgccgccaggccgcagatcgtgctgtctcagtctcctgccatcctgagcgcttccccaggcgagaaagtgaccatgacctgtagagccagcagcagcgtgtcctacatgcactggtatcagcagaagcccggcagcagccctaagccttggatctacgccaccagcaatctggcctctggcgtgccagccagattttctggctctggcagcggcaccagctacagcttcacaatcagcagagtggaagccgaggacgccgccacctactattgtcagcagtggaccttcaatcctcctaccttcggcggaggcacccggctggaaatcaaaagaacagtggctgctggcggaggcggaagtggaggcggaggatctggcggcggaggctctcaggcttatctgcaacagagcggagccgaactcgtcagacctggcgcttctgtgaagatgagctgcaaggccagcggctacaccttcaccagctataatatgcactgggtcaagcagacccctcggcagggactcgaatggatcggcggaatctatcccggcaacggcgacacctcctacaaccagaagttcaagggcaaagccacactgaccgtgggcaagagcagcagcaccgcctatatgcagctcagcagcctgaccagcgaggacagcgccgtgtacttctgcgccagatacgactacaactacgctatggactactggggccagggcaccagcgtgacagttagctctgccagcacgcgtgaggcctctacaaagggaccctccgtgtttcctctggctcccagcagcaagtctacaagcggaggaacagccgctctgggctgcctggtcaaggattactttcccgagcctgtgaccgtgtcctggaatagcggagcactgacaagcggcgtgcacacctttccagccgtgctgcaaagcagcggcctgtactctctgagcagcgtggtcacagtgcctagctctagcctgggcacccagacctacatctgcaatgtgaaccacaagcctagcaacaccaaggtggacaagagagtggaacccaagagctgtatccccgaggacacattcttcccaagccccgagagcagctgcgacgtgaagctggtggaaaagagcttcgagacagacaccaacctgaacttccagaacctgagcgtgatcggcttcagaatcctgctgctgaaagtggccggctttaacctgctgatgaccctgcggctgtggtccagccgcgccaagagaagcggatctggcgtgaagcagaccctgaatttcgacctgctgaagctggctggcgacgtggaatccaacccaggcccttctagaggccatatgaccgagtacaagcccacggtgcgcctcgccacccgcgacgacgtccccagggccgtacgcaccctcgccgccgcgttcgccgactaccccgccacgcgccacaccgtcgatccggaccgccacatcgagcgggtcaccgagctgcaagaactcttcctcacgcgcgtcgggctcgacatcggcaaggtgtgggtcgcggacgacggcgccgcggtggcggtctggaccacgccggagagcgtcgaagcgggggcggtgttcgccgagatcggcccgcgcatggccgagttgagcggttcccggctggccgcgcagcaacagatggaaggcctcctggcgccgcaccggcccaaggagcccgcgtggttcctggccaccgtcggcgtctcgcccgaccaccagggcaagggtctgggcagcgccgtcgtgctccccggagtggaggcggccgagcgcgccggggtgcccgccttcctggagacctccgcgccccgcaacctccccttctacgagcggctcggcttcaccgtcaccgccgacgtcgaggtgcccgaaggaccgcgcacctggtgcatgacccgcaagcccggtgcctga

SEQ ID NO: 18236 - DNA, 2628 bp, synthetic construct
  source 1..2628: mol_type = other DNA
atggccttaccagtgaccgccttgctcctgccgctggccttgctgctccacgccgccaggccgctcgagggacagcctaaggccaatcctaccgtgacactgttccctccaagcagcgaagaactccaggccaacaaggccacacttgtgtgcctgatctccgacttctaccctggggctgtgacagtggcttggaaggccgatggatctcctgtgaaagccggcgtggaaaccaccaagccatccaagcagagcaacaacaaatacgccgccagctcctacctgagcctgacacctgagcagtggaagtcccacagatcctacagctgccaagtgacccacgaaggcagcaccgtggaaaagacagtggcccctacagagtgcagcggcagagccgattgcggctttaccagcgagagctaccagcagggcgtgctgagcgccaccatcctgtacgagatcctgctgggcaaggccaccctgtacgccgtgctggtgtctgccctggtgctgatggctatggtcaagcggaaggacagccggggaagggccaagcgatctggatctggagcaacaaacttctcactactcaaacaagcaggtgacgtggaggagaatcccgggcctactagcatggccttaccagtgaccgccttgctcctgccgctggccttgctgctccacgccgccaggccggagatcgtgctgacacagagccctgccaccctgtctctgagccctggcgaaagagccaccctgagctgtagagccagccagagcgtgtccagctacctggcctggtatcagcagaagcccggccaggctccccggctgctgatctacgatgccagcaatagagccaccggcatccccgccagattttccggctctggcagcggcaccgacttcaccctgaccatcagctccctggaacccgaggacttcgccgtgtactactgccagcagcggagcaactggcccatcacattcggccagggcacccggctggaaatcaaaggcggaggcggaagtggaggcggaggatctggcggcggaggctctgaggtgcagcttgttgagtctggcggaggactggtgcagcccgatagaagcctgagactgtcttgtgccgccagcggcttcaccttccacgattatgccatgcactgggtccgacaggcccctggcaaaggacttgaatgggtgtccaccatctcttggaacagcggcacaatcggctacgccgactctgtgaagggcagattcaccatcagccgggacaacgccaagaacagcctgtacctccagatgaactccctgagagccgaggacacagccctgtactactgcgccaaggacatccagtacggcaactactactacggcatggacgtgtggggccagggcacaacagtgacagtctcttctacgcgtgaggcctctacaaagggaccctccgtgtttcctctggctcccagcagcaagtctacaagcggaggaacagccgctctgggctgcctggtcaaggattactttcccgagcctgtgaccgtgtcctggaatagcggagcactgacaagcggcgtgcacacctttccagccgtgctgcaaagcagcggcctgtactctctgagcagcgtggtcacagtgcctagctctagcctgggcacccagacctacatctgcaatgtgaaccacaagcctagcaacaccaaggtggacaagagagtggaacccaagagctgtatccccgaggacacattcttcccaagccccgagagcagctgcgacgtgaagctggtggaaaagagcttcgagacagacaccaacctgaacttccagaacctgagcgtgatcggcttcagaatcctgctgctgaaagtggccggctttaacctgctgatgaccctgcggctgtggtccagccgcgccaagagaagcggatctggcgtgaagcagaccctgaatttcgacctgctgaagctggctggcgacgtggaatccaacccaggcccttctagaggccatatgaccgagtacaagcccacggtgcgcctcgccacccgcgacgacgtccccagggccgtacgcaccctcgccgccgcgttcgccgactaccccgccacgcgccacaccgtcgatccggaccgccacatcgagcgggtcaccgagctgcaagaactcttcctcacgcgcgtcgggctcgacatcggcaaggtgtgggtcgcggacgacggcgccgcggtggcggtctggaccacgccggagagcgtcgaagcgggggcggtgttcgccgagatcggcccgcgcatggccgagttgagcggttcccggctggccgcgcagcaacagatggaaggcctcctggcgccgcaccggcccaaggagcccgcgtggttcctggccaccgtcggcgtctcgcccgaccaccagggcaagggtctgggcagcgccgtcgtgctccccggagtggaggcggccgagcgcgccggggtgcccgccttcctggagacctccgcgccccgcaacctccccttctacgagcggctcggcttcaccgtcaccgccgacgtcgaggtgcccgaaggaccgcgcacctggtgcatgacccgcaagcccggtgcctga

SEQ ID NO: 18237 - DNA, 2622 bp, synthetic construct
  source 1..2622: mol_type = other DNA
atggccttaccagtgaccgccttgctcctgccgctggccttgctgctccacgccgccaggccgctcgagggacagcctaaggccaatcctaccgtgacactgttccctccaagcagcgaagaactccaggccaacaaggccacacttgtgtgcctgatctccgacttctaccctggggctgtgacagtggcttggaaggccgatggatctcctgtgaaagccggcgtggaaaccaccaagccatccaagcagagcaacaacaaatacgccgccagctcctacctgagcctgacacctgagcagtggaagtcccacagatcctacagctgccaagtgacccacgaaggcagcaccgtggaaaagacagtggcccctacagagtgcagcggcagagccgattgcggctttaccagcgagagctaccagcagggcgtgctgagcgccaccatcctgtacgagatcctgctgggcaaggccaccctgtacgccgtgctggtgtctgccctggtgctgatggctatggtcaagcggaaggacagccggggaagggccaagcgatctggatctggagcaacaaacttctcactactcaaacaagcaggtgacgtggaggagaatcccgggcctactagcatggccttaccagtgaccgccttgctcctgccgctggccttgctgctccacgccgccaggccggacatccagatgacccagagccccagcagcctgtctgccagcgtgggcgacagagtgaccatcacctgtagagccagccaggacgtgaacaccgccgtggcctggtatcagcagaagcctggcaaggcccccaagctgctgatctacagcgccagcttcctggaaagcggcgtgcccagcagattcagcggaagcagaagcggcaccgacttcaccctgaccatcagctccctccagcccgaggacttcgccacctactactgccagcagcactacaccacccctcccaccttcggccagaccaaggtggaaatcaagagaggcggaggcggaagtggaggcggaggatctggcggcggaggctctgaagtgcaactggtggaatctggcggcggactggtgcagcctggcggatctctgagactgagctgtgccgccagcggcttcaacatcaaggacacctacatccactgggtgcgccaggcccctggaaagggactggaatgggtggcccggatctaccccaccaacggctacaccagatacgccgacagcgtgaagggccggttcaccatcagcgccgacaccagcaagaataccgcctacctccagatgaacagcctgcgggccgaggataccgccgtgtactactgctcaagatggggaggcgacggcttctacgctatggacgtgtggggccagggcacccttgtgaccgtgtcatctacgcgtgaggcctctacaaagggaccctccgtgtttcctctggctcccagcagcaagtctacaagcggaggaacagccgctctgggctgcctggtcaaggattactttcccgagcctgtgaccgtgtcctggaatagcggagcactgacaagcggcgtgcacacctttccagccgtgctgcaaagcagcggcctgtactctctgagcagcgtggtcacagtgcctagctctagcctgggcacccagacctacatctgcaatgtgaaccacaagcctagcaacaccaaggtggacaagagagtggaacccaagagctgtatccccgaggacacattcttcccaagccccgagagcagctgcgacgtgaagctggtggaaaagagcttcgagacagacaccaacctgaacttccagaacctgagcgtgatcggcttcagaatcctgctgctgaaagtggccggctttaacctgctgatgaccctgcggctgtggtccagccgcgccaagagaagcggatctggcgtgaagcagaccctgaatttcgacctgctgaagctggctggcgacgtggaatccaacccaggcccttctagaggccatatgaccgagtacaagcccacggtgcgcctcgccacccgcgacgacgtccccagggccgtacgcaccctcgccgccgcgttcgccgactaccccgccacgcgccacaccgtcgatccggaccgccacatcgagcgggtcaccgagctgcaagaactcttcctcacgcgcgtcgggctcgacatcggcaaggtgtgggtcgcggacgacggcgccgcggtggcggtctggaccacgccggagagcgtcgaagcgggggcggtgttcgccgagatcggcccgcgcatggccgagttgagcggttcccggctggccgcgcagcaacagatggaaggcctcctggcgccgcaccggcccaaggagcccgcgtggttcctggccaccgtcggcgtctcgcccgaccaccagggcaagggtctgggcagcgccgtcgtgctccccggagtggaggcggccgagcgcgccggggtgcccgccttcctggagacctccgcgccccgcaacctccccttctacgagcggctcggcttcaccgtcaccgccgacgtcgaggtgcccgaaggaccgcgcacctggtgcatgacccgcaagcccggtgcctga

SEQ ID NO: 18238 - DNA, 2259 bp, synthetic construct
  source 1..2259: mol_type = other DNA
atggccttaccagtgaccgccttgctcctgccgctggccttgctgctccacgccgccaggccgctcgagggacagcctaaggccaatcctaccgtgacactgttccctccaagcagcgaagaactccaggccaacaaggccacacttgtgtgcctgatctccgacttctaccctggggctgtgacagtggcttggaaggccgatggatctcctgtgaaagccggcgtggaaaccaccaagccatccaagcagagcaacaacaaatacgccgccagctcctacctgagcctgacacctgagcagtggaagtcccacagatcctacagctgccaagtgacccacgaaggcagcaccgtggaaaagacagtggcccctacagagtgcagcggcagagccgattgcggctttaccagcgagagctaccagcagggcgtgctgagcgccaccatcctgtacgagatcctgctgggcaaggccaccctgtacgccgtgctggtgtctgccctggtgctgatggctatggtcaagcggaaggacagccggggaagggccaagcgatctggatctggagcaacaaacttctcactactcaaacaagcaggtgacgtggaggagaatcccgggcctactagcatggccctgcccgtgacagccctgctgctgcctctggctctgctgctgcacgccgccagacccgatgaattcgaggtgcaactggtggaaagcggcggaggcctggtgcaggctggcggatctctgagactgagctgtgccgccagcggcatcaccttcagcatcaacacaatgggctggtacagacaggcccctggcaagcagagggaactggtggccctgatctccagcatcggcgacacctactacgccgacagcgtgaagggccggttcaccatcagccgggacaacgccaagaacaccgtgtacctccagatgaacagcctgaagcccgaggacaccgccgtgtactactgcaagcggttcagaacagccgcccagggcaccgattattggggccagggaacacaagtgaccgtgtcctctacgcgtgaggcctctacaaagggaccctccgtgtttcctctggctcccagcagcaagtctacaagcggaggaacagccgctctgggctgcctggtcaaggattactttcccgagcctgtgaccgtgtcctggaatagcggagcactgacaagcggcgtgcacacctttccagccgtgctgcaaagcagcggcctgtactctctgagcagcgtggtcacagtgcctagctctagcctgggcacccagacctacatctgcaatgtgaaccacaagcctagcaacaccaaggtggacaagagagtggaacccaagagctgtatccccgaggacacattcttcccaagccccgagagcagctgcgacgtgaagctggtggaaaagagcttcgagacagacaccaacctgaacttccagaacctgagcgtgatcggcttcagaatcctgctgctgaaagtggccggctttaacctgctgatgaccctgcggctgtggtccagccgcgccaagagaagcggatctggcgtgaagcagaccctgaatttcgacctgctgaagctggctggcgacgtggaatccaacccaggcccttctagaggccatatgaccgagtacaagcccacggtgcgcctcgccacccgcgacgacgtccccagggccgtacgcaccctcgccgccgcgttcgccgactaccccgccacgcgccacaccgtcgatccggaccgccacatcgagcgggtcaccgagctgcaagaactcttcctcacgcgcgtcgggctcgacatcggcaaggtgtgggtcgcggacgacggcgccgcggtggcggtctggaccacgccggagagcgtcgaagcgggggcggtgttcgccgagatcggcccgcgcatggccgagttgagcggttcccggctggccgcgcagcaacagatggaaggcctcctggcgccgcaccggcccaaggagcccgcgtggttcctggccaccgtcggcgtctcgcccgaccaccagggcaagggtctgggcagcgccgtcgtgctccccggagtggaggcggccgagcgcgccggggtgcccgccttcctggagacctccgcgccccgcaacctccccttctacgagcggctcggcttcaccgtcaccgccgacgtcgaggtgcccgaaggaccgcgcacctggtgcatgacccgcaagcccggtgcctga

SEQ ID NO: 18239 - DNA, 2259 bp, synthetic construct; identical to SEQ ID NO: 18238
  source 1..2259: mol_type = other DNA

SEQ ID NO: 18240 - DNA, 3054 bp, synthetic construct
  source 1..3054: mol_type = other DNA
atggccttaccagtgaccgccttgctcctgccgctggccttgctgctccacgccgccaggccgctcgagggacagcctaaggccaatcctaccgtgacactgttccctccaagcagcgaagaactccaggccaacaaggccacacttgtgtgcctgatctccgacttctaccctggggctgtgacagtggcttggaaggccgatggatctcctgtgaaagccggcgtggaaaccaccaagccatccaagcagagcaacaacaaatacgccgccagctcctacctgagcctgacacctgagcagtggaagtcccacagatcctacagctgccaagtgacccacgaaggcagcaccgtggaaaagacagtggcccctacagagtgcagcggcagagccgattgcggctttaccagcgagagctaccagcagggcgtgctgagcgccaccatcctgtacgagatcctgctgggcaaggccaccctgtacgccgtgctggtgtctgccctggtgctgatggctatggtcaagcggaaggacagccggggaagggccaagcgatctggatctggagcaacaaacttctcactactcaaacaagcaggtgacgtggaggagaatcccgggcctactagcatggccttaccagtgaccgccttgctcctgccgctggccttgctgctccacgccgccaggccgcaggtccagctcgtcgagtccggcggcggcctcgtccaggccggcgactccgtcaccctctcctgcaccgcctccggccgcaccttctcctcctacgccctcgcctggttccgccagcgccccggcaaggagcgcgagttcgtcgccggcctccgctggggcggccccaccaactacgccgactccgtcaaggaccgcttcaccatctccggcgactccgccaagcacaccatgtacctccagatgaactccctcaagcccgaggacaccgccgtctactactgcggctacaaccccggcggctgggccgtcccctcccagtacgagtacgactcctggggccagggcacccaggtcaccgtctcctccggtaccggcggaggcggatctggcggcggaggtagcggtggcggaggatctgaattcgacatccagatgacacagagccctagcagcctgtctgccagcgtgggagacagagtgaccatcacatgcaaggccagcgaccacatcaacaactggctggcctggtatcagcagaagcctggacaggcccctaagctgctgatctacggcgctaccacactggaaacaggcgtgcccagcagattttctggcagcggctctggcaccgactacaccctgacaatatccagcctccagcctgaggacttcgccacctactactgtcagcagagctggaacaccccttggacattcggccagggcaccaagctggaaatcaagagaggcggaggcggaagtggaggcggaggatctggcggcggaggctctcaagttcagcttcaacagcctggcgctgagctggtcaaacctggcgcttctgtgaagatgagctgcaaagccagcggctacgccttcagcagctactggatcaactggatgaagcagaaacccggccagggactcgaatggatcggccaaatctatcccggcgacggcgacaccaactacaacggcaagttcaagggcagagccacactgaccgccgatacctctagcagcacagcctacatgcagctgagcagcctgaccagcgaagatagcgccgtgtacttctgtgcccggtccatcacaacagtcgtgggctgcgctatggactattggggccagggaacaagcgtgaccgtgtctagtacgcgtgaggcctctacaaagggaccctccgtgtttcctctggctcccagcagcaagtctacaagcggaggaacagccgctctgggctgcctggtcaaggattactttcccgagcctgtgaccgtgtcctggaatagcggagcactgacaagcggcgtgcacacctttccagccgtgctgcaaagcagcggcctgtactctctgagcagcgtggtcacagtgcctagctctagcctgggcacccagacctacatctgcaatgtgaaccacaagcctagcaacaccaaggtggacaagagagtggaacccaagagctgtatccccgaggacacattcttcccaagccccgagagcagctgcgacgtgaagctggtggaaaagagcttcgagacagacaccaacctgaacttccagaacctgagcgtgatcggcttcagaatcctgctgctgaaagtggccggctttaacctgctgatgaccctgcggctgtggtccagccgcgccaagagaagcggatctggcgtgaagcagaccctgaatttcgacctgctgaagctggctggcgacgtggaatccaacccaggcccttctagaggccatatgaccgagtacaagcccacggtgcgcctcgccacccgcgacgacgtccccagggccgtacgcaccctcgccgccgcgttcgccgactaccccgccacgcgccacaccgtcgatccggaccgccacatcgagcgggtcaccgagctgcaagaactcttcctcacgcgcgtcgggctcgacatcggcaaggtgtgggtcgcggacgacggcgccgcggtggcggtctggaccacgccggagagcgtcgaagcgggggcggtgttcgccgagatcggcccgcgcatggccgagttgagcggttcccggctggccgcgcagcaacagatggaaggcctcctggcgccgcaccggcccaaggagcccgcgtggttcctggccaccgtcggcgtctcgcccgaccaccagggcaagggtctgggcagcgccgtcgtgctccccggagtggaggcggccgagcgcgccggggtgcccgccttcctggagacctccgcgccccgcaacctccccttctacgagcggctcggcttcaccgtcaccgccgacgtcgaggtgcccgaaggaccgcgcacctggtgcatgacccgcaagcccggtgcctga

SEQ ID NO: 18241 - DNA, 3441 bp, synthetic construct
  source 1..3441: mol_type = other DNA
atggccttaccagtgaccgccttgctcctgccgctggccttgctgctccacgccgccaggccgctcgagggacagcctaaggccaatcctaccgtgacactgttccctccaagcagcgaagaactccaggccaacaaggccacacttgtgtgcctgatctccgacttctaccctggggctgtgacagtggcttggaaggccgatggatctcctgtgaaagccggcgtggaaaccaccaagccatccaagcagagcaacaacaaatacgccgccagctcctacctgagcctgacacctgagcagtggaagtcccacagatcctacagctgccaagtgacccacgaaggcagcaccgtggaaaagacagtggcccctacagagtgcagcggcagagccgattgcggctttaccagcgagagctaccagcagggcgtgctgagcgccaccatcctgtacgagatcctgctgggcaaggccaccctgtacgccgtgctggtgtctgccctggtgctgatggctatggtcaagcggaaggacagccggggaagggccaagcgatctggatctggagcaacaaacttctcactactcaaacaagcaggtgacgtggaggagaatcccgggcctactagcatggccttaccagtgaccgccttgctcctgccgctggccttgctgctccacgccgccaggccggaggttcagctgcttgagtctggcggaggactggttcaacctggcggaagcctgagactgtcttgtgccgccagcggcttcacctttagcagctacgccatgagctgggtccgacaggctcctggcaaaggactggaatgggtgtccagcatcagcggcagcggcgactacatctactacgccgatagcgtgaagggcagattcaccatcagccgggacatcagcaagaacaccctgtacctccagatgaacagcctgagagccgaggacaccgccgtgtactactgtgccaaagaaggcaccggcgctaacagcagcctggccgattatagaggccagggcacactggtcaccgtgtctagtggcggaggaagcggcggaggatctcaggtccagctcgtcgagtccggcggcggcctcgtccaggccggcgactccgtcaccctctcctgcaccgcctccggccgcaccttctcctcctacgccctcgcctggttccgccagcgccccggcaaggagcgcgagttcgtcgccggcctccgctggggcggccccaccaactacgccgactccgtcaaggaccgcttcaccatctccggcgactccgccaagcacaccatgtacctccagatgaactccctcaagcccgaggacaccgccgtctactactgcggctacaaccccggcggctgggccgtcccctcccagtacgagtacgactcctggggccagggcacccaggtcaccgtctcctccggtaccggcggaggcggatctggcggcggaggtagcggtggcggaggatctgaattcgacatccagatgacacagagccctagcagcctgtctgccagcgtgggagacagagtgaccatcacatgcaaggccagcgaccacatcaacaactggctggcctggtatcagcagaagcctggacaggcccctaagctgctgatctacggcgctaccacactggaaacaggcgtgcccagcagattttctggcagcggctctggcaccgactacaccctgacaatatccagcctccagcctgaggacttcgccacctactactgtcagcagagctggaacaccccttggacattcggccagggcaccaagctggaaatcaagagaggcggaggcggaagtggaggcggaggatctggcggcggaggctctcaagttcagcttcaacagcctggcgctgagctggtcaaacctggcgcttctgtgaagatgagctgcaaagccagcggctacgccttcagcagctactggatcaactggatgaagcagaaacccggccagggactcgaatggatcggccaaatctatcccggcgacggcgacaccaactacaacggcaagttcaagggcagagccacactgaccgccgatacctctagcagcacagcctacatgcagctgagcagcctgaccagcgaagatagcgccgtgtacttctgtgcccggtccatcacaacagtcgtgggctgcgctatggactattggggccagggaacaagcgtgaccgtgtctagtacgcgtgaggcctctacaaagggaccctccgtgtttcctctggctcccagcagcaagtctacaagcggaggaacagccgctctgggctgcctggtcaaggattactttcccgagcctgtgaccgtgtcctggaatagcggagcactgacaagcggcgtgcacacctttccagccgtgctgcaaagcagcggcctgtactctctgagcagcgtggtcacagtgcctagctctagcctgggcacccagacctacatctgcaatgtgaaccacaagcctagcaacaccaaggtggacaagagagtggaacccaagagctgtatccccgaggacacattcttcccaagccccgagagcagctgcgacgtgaagctggtggaaaagagcttcgagacagacaccaacctgaacttccagaacctgagcgtgatcggcttcagaatcctgctgctgaaagtggccggctttaacctgctgatgaccctgcggctgtggtccagccgcgccaagagaagcggatctggcgtgaagcagaccctgaatttcgacctgctgaagctggctggcgacgtggaatccaacccaggcccttctagaggccatatgaccgagtacaagcccacggtgcgcctcgccacccgcgacgacgtccccagggccgtacgcaccctcgccgccgcgttcgccgactaccccgccacgcgccacaccgtcgatccggaccgccacatcgagcgggtcaccgagctgcaagaactcttcctcacgcgcgtcgggctcgacatcggcaaggtgtgggtcgcggacgacggcgccgcggtggcggtctggaccacgccggagagcgtcgaagcgggggcggtgttcgccgagatcggcccgcgcatggccgagttgagcggttcccggctggccgcgcagcaacagatggaaggcctcctggcgccgcaccggcccaaggagcccgcgtggttcctggccaccgtcggcgtctcgcccgaccaccagggcaagggtctgggcagcgccgtcgtgctccccggagtggaggcggccgagcgcgccggggtgcccgccttcctggagacctccgcgccccgcaacctccccttctacgagcggctcggcttcaccgtcaccgccgacgtcgaggtgcccgaaggaccgcgcacctggtgcatgacccgcaagcccggtgcctga

SEQ ID NO: 18242 - DNA, 3435 bp, synthetic construct
  source 1..3435: mol_type = other DNA
atggccttaccagtgaccgccttgctcctgccgctggccttgctgctccacgccgccaggccgctcgagggacagcctaaggccaatcctaccgtgacactgttccctccaagcagcgaagaactccaggccaacaaggccacacttgtgtgcctgatctccgacttctaccctggggctgtgacagtggcttggaaggccgatggatctcctgtgaaagccggcgtggaaaccaccaagccatccaagcagagcaacaacaaatacgccgccagctcctacctgagcctgacacctgagcagtggaagtcccacagatcctacagctgccaagtgacccacgaaggcagcaccgtggaaaagacagtggcccctacagagtgcagcggcagagccgattgcggctttaccagcgagagctaccagcagggcgtgctgagcgccaccatcctgtacgagatcctgctgggcaaggccaccctgtacgccgtgctggtgtctgccctggtgctgatggctatggtcaagcggaaggacagccggggaagggccaagcgatctggatctggagcaacaaacttctcactactcaaacaagcaggtgacgtggaggagaatcccgggcctactagcatggccttaccagtgaccgccttgctcctgccgctggccttgctgctccacgccgccaggccgggcgtgacacagagccccacacacctgattaagaccagaggccagcaggccacactgagatgcagccctatcagcggccacaccagcgtgtactggtatcagcaggctctcggactgggcctccagttcctgctttggtacgacgagggcgaagagagaaaccggggcaacttccctcctcggttttccggcagacagttccccaactacagcagcgagctgaacgtgaacgccctggaactggaagatagcgccctgtacctgtgtgcctcttctcttggtggacctcgcggactggctggactgagaggggatgagcagtttttcggccctggcaccagactgaccgtgctggaaggcggaggaagcggcggaggatctcaggtccagctcgtcgagtccggcggcggcctcgtccaggccggcgactccgtcaccctctcctgcaccgcctccggccgcaccttctcctcctacgccctcgcctggttccgccagcgccccggcaaggagcgcgagttcgtcgccggcctccgctggggcggccccaccaactacgccgactccgtcaaggaccgcttcaccatctccggcgactccgccaagcacaccatgtacctccagatgaactccctcaagcccgaggacaccgccgtctactactgcggctacaaccccggcggctgggccgtcccctcccagtacgagtacgactcctggggccagggcacccaggtcaccgtctcctccggtaccggcggaggcggatctggcggcggaggtagcggtggcggaggatctgaattcgacatccagatgacacagagccctagcagcctgtctgccagcgtgggagacagagtgaccatcacatgcaaggccagcgaccacatcaacaactggctggcctggtatcagcagaagcctggacaggcccctaagctgctgatctacggcgctaccacactggaaacaggcgtgcccagcagattttctggcagcggctctggcaccgactacaccctgacaatatccagcctccagcctgaggacttcgccacctactactgtcagcagagctggaacaccccttggacattcggccagggcaccaagctggaaatcaagagaggcggaggcggaagtggaggcggaggatctggcggcggaggctctcaagttcagcttcaacagcctggcgctgagctggtcaaacctggcgcttctgtgaagatgagctgcaaagccagcggctacgccttcagcagctactggatcaactggatgaagcagaaacccggccagggactcgaatggatcggccaaatctatcccggcgacggcgacaccaactacaacggcaagttcaagggcagagccacactgaccgccgatacctctagcagcacagcctacatgcagctgagcagcctgaccagcgaagatagcgccgtgtacttctgtgcccggtccatcacaacagtcgtgggctgcgctatggactattggggccagggaacaagcgtgaccgtgtctagtacgcgtgaggcctctacaaagggaccctccgtgtttcctctggctcccagcagcaagtctacaagcggaggaacagccgctctgggctgcctggtcaaggattactttcccgagcctgtgaccgtgtcctggaatagcggagcactgacaagcggcgtgcacacctttccagccgtgctgcaaagcagcggcctgtactctctgagcagcgtggtcacagtgcctagctctagcctgggcacccagacctacatctgcaatgtgaaccacaagcctagcaacaccaaggtggacaagagagtggaacccaagagctgtatccccgaggacacattcttcccaagccccgagagcagctgcgacgtgaagctggtggaaaagagcttcgagacagacaccaacctgaacttccagaacctgagcgtgatcggcttcagaatcctgctgctgaaagtggccggctttaacctgctgatgaccctgcggctgtggtccagccgcgccaagagaagcggatctggcgtgaagcagaccctgaatttcgacctgctgaagctggctggcgacgtggaatccaacccaggcccttctagaggccatatgaccgagtacaagcccacggtgcgcctcgccacccgcgacgacgtccccagggccgtacgcaccctcgccgccgcgttcgccgactaccccgccacgcgccacaccgtcgatccggaccgccacatcgagcgggtcaccgagctgcaagaactcttcctcacgcgcgtcgggctcgacatcggcaaggtgtgggtcgcggacgacggcgccgcggtggcggtctggaccacgccggagagcgtcgaagcgggggcggtgttcgccgagatcggcccgcgcatggccgagttgagcggttcccggctggccgcgcagcaacagatggaaggcctcctggcgccgcaccggcccaaggagcccgcgtggttcctggccaccgtcggcgtctcgcccgaccaccagggcaagggtctgggcagcgccgtcgtgctccccggagtggaggcggccgagcgcgccggggtgcccgccttcctggagacctccgcgccccgcaacctccccttctacgagcggctcggcttcaccgtcaccgccgacgtcgaggtgcccgaaggaccgcgcacctggtgcatgacccgcaagcccggtgcctga

SEQ ID NO: 18243 - DNA, 2715 bp, synthetic construct
  source 1..2715: mol_type = other DNA
atggccttaccagtgaccgccttgctcctgccgctggccttgctgctccacgccgccaggccgctcgagggacagcctaaggccaatcctaccgtgacactgttccctccaagcagcgaagaactccaggccaacaaggccacacttgtgtgcctgatctccgacttctaccctggggctgtgacagtggcttggaaggccgatggatctcctgtgaaagccggcgtggaaaccaccaagccatccaagcagagcaacaacaaatacgccgccagctcctacctgagcctgacacctgagcagtggaagtcccacagatcctacagctgccaagtgacccacgaaggcagcaccgtggaaaagacagtggcccctacagagtgcagcggcagagccgattgcggctttaccagcgagagctaccagcagggcgtgctgagcgccaccatcctgtacgagatcctgctgggcaaggccaccctgtacgccgtgctggtgtctgccctggtgctgatggctatggtcaagcggaaggacagccggggaagggccaagcgatctggatctggagcaacaaacttctcactactcaaacaagcaggtgacgtggaggagaatcccgggcctactagcatggccttaccagtgaccgccttgctcctgccgctggccttgctgctccacgccgccaggccgggcgtgacacagagccccacacacctgattaagaccagaggccagcaggccacactgagatgcagccctatcagcggccacaccagcgtgtactggtatcagcaggctctcggactgggcctccagttcctgctttggtacgacgagggcgaagagagaaaccggggcaacttccctcctcggttttccggcagacagttccccaactacagcagcgagctgaacgtgaacgccctggaactggaagatagcgccctgtacctgtgtgcctcttctcttggtggacctcgcggactggctggactgagaggggatgagcagtttttcggccctggcaccagactgaccgtgctggaaggcggaggaagcggcggaggatctggcgtgacacagagccccacacacctgattaagaccagaggccagcaggccacactgagatgcagccctatcagcggccacaccagcgtgtactggtatcagcaggctctcggactgggcctccagttcctgctttggtacgacgagggcgaagagagaaaccggggcaacttccctcctcggttttccggcagacagttccccaactacagcagcgagctgaacgtgaacgccctggaactggaagatagcgccctgtacctgtgtgccagctctctcggcggagatgaactgggagccgatggcaacgagcagttctttggccctggcaccagactgaccgtgctggaaggtaccggcggaggcggatctggcggcggaggtagcggtggcggaggatctgaattcgacatccagatgacacagagccctagcagcctgtctgccagcgtgggagacagagtgaccatcacatgcaaggccagcgaccacatcaacaactggctggcctggtatcagcagaagcctggacaggcccctaagctgctgatctacggcgctaccacactggaaacaggcgtgcccagcagattttctggcagcggctctggcaccgactacaccctgacaatatccagcctccagcctgaggacttcgccacctactactgtcagcagagctggaacaccccttggacattcggccagggcaccaagctggaaatcaagagaggcggaggcggaagtggaggcggaggatctggcggcggaggctctcaagttcagcttcaacagcctggcgctgagctggtcaaacctggcgcttctgtgaagatgagctgcaaagccagcggctacgccttcagcagctactggatcaactggatgaagcagaaacccggccagggactcgaatggatcggccaaatctatcccggcgacggcgacaccaactacaacggcaagttcaagggcagagccacactgaccgccgatacctctagcagcacagcctacatgcagctgagcagcctgaccagcgaagatagcgccgtgtacttctgtgcccggtccatcacaacagtcgtgggctgcgctatggactattggggccagggaacaagcgtgaccgtgtctagtacgcgtgaggcctctacaaagggaccctccgtgtttcctctggctcccagcagcaagtctacaagcggaggaacagccgctctgggctgcctggtcaaggattactttcccgagcctgtgaccgtgtcctggaatagcggagcactgacaagcggcgtgcacacctttccagccgtgctgcaaagcagcggcctgtactctctgagcagcgtggtcacagtgcctagctctagcctgggcacccagacctacatctgcaatgtgaaccacaagcctagcaacaccaaggtggacaagagagtggaacccaagagctgtatccccgaggacacattcttcccaagccccgagagcagctgcgacgtgaagctggtggaaaagagcttcgagacagacaccaacctgaacttccagaacctgagcgtgatcggcttcagaatcctgctgctgaaagtggccggctttaacctgctgatgaccctgcggctgtggtccagc

SEQ ID NO: 18244 - DNA, 2277 bp, synthetic construct
  source 1..2277: mol_type = other DNA
atggccttaccagtgaccgccttgctcctgccgctggccttgctgctccacgccgccaggccgctcgagggacagcctaaggccaatcctaccgtgacactgttccctccaagcagcgaagaactccaggccaacaaggccacacttgtgtgcctgatctccgacttctaccctggggctgtgacagtggcttggaaggccgatggatctcctgtgaaagccggcgtggaaaccaccaagccatccaagcagagcaacaacaaatacgccgccagctcctacctgagcctgacacctgagcagtggaagtcccacagatcctacagctgccaagtgacccacgaaggcagcaccgtggaaaagacagtggcccctacagagtgcagcggcagagccgattgcggctttaccagcgagagctaccagcagggcgtgctgagcgccaccatcctgtacgagatcctgctgggcaaggccaccctgtacgccgtgctggtgtctgccctggtgctgatggctatggtcaagcggaaggacagccggggaagggccaagcgatctggatctggagcaacaaacttctcactactcaaacaagcaggtgacgtggaggagaatcccgggcctactagcatggccctgcccgtgacagccctgctgctgcctctggctctgctgctgcacgccgccagacccgatgaattcggctctgacctgggcatcaagctgctgttcgccgctgccaagggccaggacgacgaagtgcggattctgctggctgctggggccgacgtgaacgccaaggatttcgagggctacacccccctgcacgtggccgcctatgatggacacctggaaatcgtggaagtgctgctgaaggctggcgctgatgtgaatgccaaagacagccagggccggacccctctgcatgaagccgcctacagcggccatctggaaattgtggaagtgctgctgaaagccggggcagacgtgaacgctcaggacgacgctggcgagacaccagccgatctggctgcagcttggggccacgaagatatcgccgaggtgctgcagaagacgcgtgaggcctctacaaagggaccctccgtgtttcctctggctcccagcagcaagtctacaagcggaggaacagccgctctgggctgcctggtcaaggattactttcccgagcctgtgaccgtgtcctggaatagcggagcactgacaagcggcgtgcacacctttccagccgtgctgcaaagcagcggcctgtactctctgagcagcgtggtcacagtgcctagctctagcctgggcacccagacctacatctgcaatgtgaaccacaagcctagcaacaccaaggtggacaagagagtggaacccaagagctgtatccccgaggacacattcttcccaagccccgagagcagctgcgacgtgaagctggtggaaaagagcttcgagacagacaccaacctgaacttccagaacctgagcgtgatcggcttcagaatcctgctgctgaaagtggccggctttaacctgctgatgaccctgcggctgtggtccagccgcgccaagagaagcggatctggcgtgaagcagaccctgaatttcgacctgctgaagctggctggcgacgtggaatccaacccaggcccttctagaggccatatgaccgagtacaagcccacggtgcgcctcgccacccgcgacgacgtccccagggccgtacgcaccctcgccgccgcgttcgccgactaccccgccacgcgccacaccgtcgatccggaccgccacatcgagcgggtcaccgagctgcaagaactcttcctcacgcgcgtcgggctcgacatcggcaaggtgtgggtcgcggacgacggcgccgcggtggcggtctggaccacgccggagagcgtcgaagcgggggcggtgttcgccgagatcggcccgcgcatggccgagttgagcggttcccggctggccgcgcagcaacagatggaaggcctcctggcgccgcaccggcccaaggagcccgcgtggttcctggccaccgtcggcgtctcgcccgaccaccagggcaagggtctgggcagcgccgtcgtgctccccggagtggaggcggccgagcgcgccggggtgcccgccttcctggagacctccgcgccccgcaacctccccttctacgagcggctcggcttcaccgtcaccgccgacgtcgaggtgcccgaaggaccgcgcacctggtgcatgacccgcaagcccggtgcctga

SEQ ID NO: 18245 - DNA, 2064 bp, synthetic construct
  source 1..2064: mol_type = other DNA
atggccttaccagtgaccgccttgctcctgccgctggccttgctgctccacgccgccaggccgctcgagggacagcctaaggccaatcctaccgtgacactgttccctccaagcagcgaagaactccaggccaacaaggccacacttgtgtgcctgatctccgacttctaccctggggctgtgacagtggcttggaaggccgatggatctcctgtgaaagccggcgtggaaaccaccaagccatccaagcagagcaacaacaaatacgccgccagctcctacctgagcctgacacctgagcagtggaagtcccacagatcctacagctgccaagtgacccacgaaggcagcaccgtggaaaagacagtggcccctacagagtgcagcggcagagccgattgcggctttaccagcgagagctaccagcagggcgtgctgagcgccaccatcctgtacgagatcctgctgggcaaggccaccctgtacgccgtgctggtgtctgccctggtgctgatggctatggtcaagcggaaggacagccggggaagggccaagcgatctggatctggagcaacaaacttctcactactcaaacaagcaggtgacgtggaggagaatcccgggcctactagcatggactggatttggcgcatccttttccttgtcggcgctgctaccggcgcccattccttcgaaggcagcggattcgaatacgccaaagagatgcggaacgcctactgggagatcgccctgctgcccaatctgaccaaccagcagaagagagcccccatcagaaagctgtacgacgacccctcccagagcagcgagctgctgtctgaggctaaaaaactgaacgatagccagacgcgtgaggcctctacaaagggaccctccgtgtttcctctggctcccagcagcaagtctacaagcggaggaacagccgctctgggctgcctggtcaaggattactttcccgagcctgtgaccgtgtcctggaatagcggagcactgacaagcggcgtgcacacctttccagccgtgctgcaaagcagcggcctgtactctctgagcagcgtggtcacagtgcctagctctagcctgggcacccagacctacatctgcaatgtgaaccacaagcctagcaacaccaaggtggacaagagagtggaacccaagagctgtatccccgaggacacattcttcccaagccccgagagcagctgcgacgtgaagctggtggaaaagagcttcgagacagacaccaacctgaacttccagaacctgagcgtgatcggcttcagaatcctgctgctgaaagtggccggctttaacctgctgatgaccctgcggctgtggtccagccgcgccaagagaagcggatctggcgtgaagcagaccctgaatttcgacctgctgaagctggctggcgacgtggaatccaacccaggcccttctagaggccatatgaccgagtacaagcccacggtgcgcctcgccacccgcgacgacgtccccagggccgtacgcaccctcgccgccgcgttcgccgactaccccgccacgcgccacaccgtcgatccggaccgccacatcgagcgggtcaccgagctgcaagaactcttcctcacgcgcgtcgggctcgacatcggcaaggtgtgggtcgcggacgacggcgccgcggtggcggtctggaccacgccggagagcgtcgaagcgggggcggtgttcgccgagatcggcccgcgcatggccgagttgagcggttcccggctggccgcgcagcaacagatggaaggcctcctggcgccgcaccggcccaaggagcccgcgtggttcctggccaccgtcggcgtctcgcccgaccaccagggcaagggtctgggcagcgccgtcgtgctccccggagtggaggcggccgagcgcgccggggtgcccgccttcctggagacctccgcgccccgcaacctccccttctacgagcggctcggcttcaccgtcaccgccgacgtcgaggtgcccgaaggaccgcgcacctggtgcatgacccgcaagcccggtgcctga

SEQ ID NO: 18246 - DNA, 2730 bp, synthetic construct
  source 1..2730: mol_type = other DNA
atggccttaccagtgaccgccttgctcctgccgctggccttgctgctccacgccgccaggccgctcgagggacagcctaaggccaatcctaccgtgacactgttccctccaagcagcgaagaactccaggccaacaaggccacacttgtgtgcctgatctccgacttctaccctggggctgtgacagtggcttggaaggccgatggatctcctgtgaaagccggcgtggaaaccaccaagccatccaagcagagcaacaacaaatacgccgccagctcctacctgagcctgacacctgagcagtggaagtcccacagatcctacagctgccaagtgacccacgaaggcagcaccgtggaaaagacagtggcccctacagagtgcagcggcagagccgattgcggctttaccagcgagagctaccagcagggcgtgctgagcgccaccatcctgtacgagatcctgctgggcaaggccaccctgtacgccgtgctggtgtctgccctggtgctgatggctatggtcaagcggaaggacagccggggaagggccaagcgatctggatctggagcaacaaacttctcactactcaaacaagcaggtgacgtggaggagaatcccgggcctactagcatggccctgcccgtgacagccctgctgctgcctctggctctgctgctgcacgccgccagacccgatgaattcgaggtgcaactggtggaaagcggcggaggcctggtgcaggctggcggatctctgagactgagctgtgccgccagcggcatcaccttcagcatcaacacaatgggctggtacagacaggcccctggcaagcagagggaactggtggccctgatctccagcatcggcgacacctactacgccgacagcgtgaagggccggttcaccatcagccgggacaacgccaagaacaccgtgtacctccagatgaacagcctgaagcccgaggacaccgccgtgtactactgcaagcggttcagaacagccgcccagggcaccgattattggggccagggaacacaagtgaccgtgtcctctctcgagggaggaggcggctccgggggaggcggaagtggaggcggaggatctgggtctggaggaagcggatctggaggctcagggtcagggggctcaggcagtggaggctctttcgaagtgcaactggtggaatctgggggcggactggtgcagccaggcggaagtctgaggctgtcttgtgccgcctccggcagcatcttcggcttcaacgacatggcctggtatcggcaggctcccggaaaacagcgcgagctggtggctctgattagcagagtgggcgtgaccagcagcgccgactctgtgaagggcagattcacaatctccagagtgaacgccaaggatacagtgtacctccagatgaactctctgaaacctgaggatacagcagtgtactattgctacatggaccagcggctggacggcagcacactggcctactggggacagggaactcaagtgacagtgtctagcacgcgtgaggcctctacaaagggaccctccgtgtttcctctggctcccagcagcaagtctacaagcggaggaacagccgctctgggctgcctggtcaaggattactttcccgagcctgtgaccgtgtcctggaatagcggagcactgacaagcggcgtgcacacctttccagccgtgctgcaaagcagcggcctgtactctctgagcagcgtggtcacagtgcctagctctagcctgggcacccagacctacatctgcaatgtgaaccacaagcctagcaacaccaaggtggacaagagagtggaacccaagagctgtatccccgaggacacattcttcccaagccccgagagcagctgcgacgtgaagctggtggaaaagagcttcgagacagacaccaacctgaacttccagaacctgagcgtgatcggcttcagaatcctgctgctgaaagtggccggctttaacctgctgatgaccctgcggctgtggtccagccgcgccaagagaagcggatctggcgtgaagcagaccctgaatttcgacctgctgaagctggctggcgacgtggaatccaacccaggcccttctagaggccatatgaccgagtacaagcccacggtgcgcctcgccacccgcgacgacgtccccagggccgtacgcaccctcgccgccgcgttcgccgactaccccgccacgcgccacaccgtcgatccggaccgccacatcgagcgggtcaccgagctgcaagaactcttcctcacgcgcgtcgggctcgacatcggcaaggtgtgggtcgcggacgacggcgccgcggtggcggtctggaccacgccggagagcgtcgaagcgggggcggtgttcgccgagatcggcccgcgcatggccgagttgagcggttcccggctggccgcgcagcaacagatggaaggcctcctggcgccgcaccggcccaaggagcccgcgtggttcctggccaccgtcggcgtctcgcccgaccaccagggcaagggtctgggcagcgccgtcgtgctccccggagtggaggcggccgagcgcgccggggtgcccgccttcctggagacctccgcgccccgcaacctccccttctacgagcggctcggcttcaccgtcaccgccgacgtcgaggtgcccgaaggaccgcgcacctggtgcatgacccgcaagcccggtgcctga

SEQ ID NO: 18247 - DNA, 2472 bp, synthetic construct
  source 1..2472: mol_type = other DNA
atggccttaccagtgaccgccttgctcctgccgctggccttgctgctccacgccgccaggccgctcgagggacagcctaaggccaatcctaccgtgacactgttccctccaagcagcgaagaactccaggccaacaaggccacacttgtgtgcctgatctccgacttctaccctggggctgtgacagtggcttggaaggccgatggatctcctgtgaaagccggcgtggaaaccaccaagccatccaagcagagcaacaacaaatacgccgccagctcctacctgagcctgacacctgagcagtggaagtcccacagatcctacagctgccaagtgacccacgaaggcagcaccgtggaaaagacagtggcccctacagagtgcagcggcagagccgattgcggctttaccagcgagagctaccagcagggcgtgctgagcgccaccatcctgtacgagatcctgctgggcaaggccaccctgtacgccgtgctggtgtctgccctggtgctgatggctatggtcaagcggaaggacagccggggaagggccaagcgatctggatctggagcaacaaacttctcactactcaaacaagcaggtgacgtggaggagaatcccgggcctactagcatggcccttccagtcactgccttgctgttgcctctggcgctcctgctccacgccgctagaccgggcatgagaaccgaggacctgcctaaggccgtggtgttcctggaaccccagtggtacagagtgctggaaaaggacagcgtgaccctgaagtgccagggcgcctacagccccgaggacaatagcacccagtggttccacaacgagagcctgatctccagccaggccagcagctacttcatcgacgccgccaccgtggacgacagcggcgagtatagatgccagaccaacctgagcaccctgagcgaccccgtgcagctggaagtgcacatcggatggctgctgctgcaggcccccagatgggtgttcaaagaagaggaccccatccacctgagatgccactcttggaagaacaccgccctgcacaaagtgacctacctgcagaacggcaagggcagaaagtacttccaccacaacagcgacttctacatccccaaggccaccctgaaggactccggctcctacttctgcagaggcctcgtgggcagcaagaacgtgtccagcgagacagtgaacatcaccatcacccagggcctggccgtgtctaccatcagcagctttttcccacccggctaccagacgcgtgaggcctctacaaagggaccctccgtgtttcctctggctcccagcagcaagtctacaagcggaggaacagccgctctgggctgcctggtcaaggattactttcccgagcctgtgaccgtgtcctggaatagcggagcactgacaagcggcgtgcacacctttccagccgtgctgcaaagcagcggcctgtactctctgagcagcgtggtcacagtgcctagctctagcctgggcacccagacctacatctgcaatgtgaaccacaagcctagcaacaccaaggtggacaagagagtggaacccaagagctgtatccccgaggacacattcttcccaagccccgagagcagctgcgacgtgaagctggtggaaaagagcttcgagacagacaccaacctgaacttccagaacctgagcgtgatcggcttcagaatcctgctgctgaaagtggccggctttaacctgctgatgaccctgcggctgtggtccagccgcgccaagagaagcggatctggcgtgaagcagaccctgaatttcgacctgctgaagctggctggcgacgtggaatccaacccaggcccttctagaggccatatgaccgagtacaagcccacggtgcgcctcgccacccgcgacgacgtccccagggccgtacgcaccctcgccgccgcgttcgccgactaccccgccacgcgccacaccgtcgatccggaccgccacatcgagcgggtcaccgagctgcaagaactcttcctcacgcgcgtcgggctcgacatcggcaaggtgtgggtcgcggacgacggcgccgcggtggcggtctggaccacgccggagagcgtcgaagcgggggcggtgttcgccgagatcggcccgcgcatggccgagttgagcggttcccggctggccgcgcagcaacagatggaaggcctcctggcgccgcaccggcccaaggagcccgcgtggttcctggccaccgtcggcgtctcgcccgaccaccagggcaagggtctgggcagcgccgtcgtgctccccggagtggaggcggccgagcgcgccggggtgcccgccttcctggagacctccgcgccccgcaacctccccttctacgagcggctcggcttcaccgtcaccgccgacgtcgaggtgcccgaaggaccgcgcacctggtgcatgacccgcaagcccggtgcctga

SEQ ID NO: 18248 - DNA, 1353 bp, synthetic construct
  source 1..1353: mol_type = other DNA
atggccttaccagtgaccgccttgctcctgccgctggccttgctgctccacgccgccaggccgctcgagggacagcctaaggccaatcctaccgtgacactgttccctccaagcagcgaagaactccaggccaacaaggccacacttgtgtgcctgatctccgacttctaccctggggctgtgacagtggcttggaaggccgatggatctcctgtgaaagccggcgtggaaaccaccaagccatccaagcagagcaacaacaaatacgccgccagctcctacctgagcctgacacctgagcagtggaagtcccacagatcctacagctgccaagtgacccacgaaggcagcaccgtggaaaagacagtggcccctacagagtgcagcggcagagccgattgcggctttaccagcgagagctaccagcagggcgtgctgagcgccaccatcctgtacgagatcctgctgggcaaggccaccctgtacgccgtgctggtgtctgccctggtgctgatggctatggtcaagcggaaggacagccggggaagggccaagcgatctggatctggagcaacaaacttctcactactcaaacaagcaggtgacgtggaggagaatcccgggcctactagcgccaccatggccttaccagtgaccgccttgctcctgccgctggccttgctgctccacgccgccaggccgatggaccccgacctggaaatcagagccgccttcctgcggcagagaaacacagccctgagaacagaggtggccgagctggaacaagaggtgcagcggctggaaaacgaggtgtcccagtacgagacaagatacggccctctcggaggcggaaaaacgcgtgaggcctctacaaagggaccctccgtgtttcctctggctcccagcagcaagtctacaagcggaggaacagccgctctgggctgcctggtcaaggattactttcccgagcctgtgaccgtgtcctggaatagcggagcactgacaagcggcgtgcacacctttccagccgtgctgcaaagcagcggcctgtactctctgagcagcgtggtcacagtgcctagctctagcctgggcacccagacctacatctgcaatgtgaaccacaagcctagcaacaccaaggtggacaagagagtggaacccaagagctgtatccccgaggacacattcttcccaagccccgagagcagctgcgacgtgaagctggtggaaaagagcttcgagacagacaccaacctgaacttccagaacctgagcgtgatcggcttcagaatcctgctgctgaaagtggccggctttaacctgctgatgaccctgcggctgtggtccagc

SEQ ID NO: 18249 - DNA, 1353 bp, synthetic construct
  source 1..1353: mol_type = other DNA
atggccttaccagtgaccgccttgctcctgccgctggccttgctgctccacgccgccaggccgctcgagggacagcctaaggccaatcctaccgtgacactgttccctccaagcagcgaagaactccaggccaacaaggccacacttgtgtgcctgatctccgacttctaccctggggctgtgacagtggcttggaaggccgatggatctcctgtgaaagccggcgtggaaaccaccaagccatccaagcagagcaacaacaaatacgccgccagctcctacctgagcctgacacctgagcagtggaagtcccacagatcctacagctgccaagtgacccacgaaggcagcaccgtggaaaagacagtggcccctacagagtgcagcggcagagccgattgcggctttaccagcgagagctaccagcagggcgtgctgagcgccaccatcctgtacgagatcctgctgggcaaggccaccctgtacgccgtgctggtgtctgccctggtgctgatggctatggtcaagcggaaggacagccggggaagggccaagcgatctggatctggagcaacaaacttctcactactcaaacaagcaggtgacgtggaggagaatcccgggcctactagcgccaccatggccttaccagtgaccgccttgctcctgccgctggccttgctgctccacgccgccaggccgatggaccctgatctcgaaattgaggccgcctttctggaacgcgagaacactgccctggaaaccagggtcgcagagctgagacagagagtgcagagactgcggaacagagtgtctcagtaccgcaccagatatggcccactcggcggaggtaaaacgcgtgaggcctctacaaagggaccctccgtgtttcctctggctcccagcagcaagtctacaagcggaggaacagccgctctgggctgcctggtcaaggattactttcccgagcctgtgaccgtgtcctggaatagcggagcactgacaagcggcgtgcacacctttccagccgtgctgcaaagcagcggcctgtactctctgagcagcgtggtcacagtgcctagctctagcctgggcacccagacctacatctgcaatgtgaaccacaagcctagcaacaccaaggtggacaagagagtggaacccaagagctgtatccccgaggacacattcttcccaagccccgagagcagctgcgacgtgaagctggtggaaaagagcttcgagacagacaccaacctgaacttccagaacctgagcgtgatcggcttcagaatcctgctgctgaaagtggccggctttaacctgctgatgaccctgcggctgtggtccagc

SEQ ID NO: 18250 - DNA, 2058 bp, synthetic construct
  source 1..2058: mol_type = other DNA
atggccttaccagtgaccgccttgctcctgccgctggccttgctgctccacgccgccaggccgctcgagggacagcctaaggccaatcctaccgtgacactgttccctccaagcagcgaagaactccaggccaacaaggccacacttgtgtgcctgatctccgacttctaccctggggctgtgacagtggcttggaaggccgatggatctcctgtgaaagccggcgtggaaaccaccaagccatccaagcagagcaacaacaaatacgccgccagctcctacctgagcctgacacctgagcagtggaagtcccacagatcctacagctgccaagtgacccacgaaggcagcaccgtggaaaagacagtggcccctacagagtgcagcggcagagccgattgcggctttaccagcgagagctaccagcagggcgtgctgagcgccaccatcctgtacgagatcctgctgggcaaggccaccctgtacgccgtgctggtgtctgccctggtgctgatggctatggtcaagcggaaggacagccggggaagggccaagcgatctggatctggagcaacaaacttctcactactcaaacaagcaggtgacgtggaggagaatcccgggcctactagcgccaccatggccttaccagtgaccgccttgctcctgccgctggccttgctgctccacgccgccaggccgctgttcaatcaagaggtgcagatccctctgaccgagagctactgtggcccctgtcctaagaactggatctgctacaagaacaactgctaccagttcttcgacgagagcaagaattggtacgagagccaggccagctgcatgagccagaatgccagcctgctgaaggtgtacagcaaagaggaccaggacctgctgaaactggtcaagagcgcccactggatgggccttgtgcacatccccaccaatggctcttggcagtgggaggacggcagcattctgagccctaacctgctgaccatcatcgagatgcagaagggcgactgcgccctgtacgccagcagctttaagggctacatcgagaattgcagcaccccgaacacctacatctgtatgcagagaaccgtttctggcggaggcggctctggaggaggcggaagtggcggcggaggcgacctctttaatcaagaagtccagattccactcaccgaatcctactgcggaccttgtccaaaaaattggatttgttataagaacaactgttatcaattctttgatgagtctaaaaattggtatgagtcccaggcttcctgcatgtctcagaacgcttctctgctgaaagtctactctaaagaagatcaggatctcctgaagctcgtcaagtctgcccattggatggggctcgtccacattcctaccaacggaagctggcaatgggaagatggctccatcctgtctccaaatctgctcacgattattgaaatgcagaaaggggattgtgctctctacgccagctccttcaagggatatattgagaactgtagcacgcccaatacttatatctgtatgcaacggaccgtgacgcgtgaggcctctacaaagggaccctccgtgtttcctctggctcccagcagcaagtctacaagcggaggaacagccgctctgggctgcctggtcaaggattactttcccgagcctgtgaccgtgtcctggaatagcggagcactgacaagcggcgtgcacacctttccagccgtgctgcaaagcagcggcctgtactctctgagcagcgtggtcacagtgcctagctctagcctgggcacccagacctacatctgcaatgtgaaccacaagcctagcaacaccaaggtggacaagagagtggaacccaagagctgtatccccgaggacacattcttcccaagccccgagagcagctgcgacgtgaagctggtggaaaagagcttcgagacagacaccaacctgaacttccagaacctgagcgtgatcggcttcagaatcctgctgctgaaagtggccggctttaacctgctgatgaccctgcggctgtggtccagc

SEQ ID NO: 18251 - DNA, 2058 bp, synthetic construct
  source 1..2058: mol_type = other DNA
atggccttaccagtgaccgccttgctcctgccgctggccttgctgctccacgccgccaggccgctcgagggacagcctaaggccaatcctaccgtgacactgttccctccaagcagcgaagaactccaggccaacaaggccacacttgtgtgcctgatctccgacttctaccctggggctgtgacagtggcttggaaggccgatggatctcctgtgaaagccggcgtggaaaccaccaagccatccaagcagagcaacaacaaatacgccgccagctcctacctgagcctgacacctgagcagtggaagtcccacagatcctacagctgccaagtgacccacgaaggcagcaccgtggaaaagacagtggcccctacagagtgcagcggcagagccgattgcggctttaccagcgagagctaccagcagggcgtgctgagcgccaccatcctgtacgagatcctgctgggcaaggccaccctgtacgccgtgctggtgtctgccctggtgctgatggctatggtcaagcggaaggacagccggggaagggccaagcgatctggatctggagcaacaaacttctcactactcaaacaagcaggtgacgtggaggagaatcccgggcctactagcgccaccatggccttaccagtgaccgccttgctcctgccgctggccttgctgctccacgccgccaggccgctgttcaatcaagaggtgcagatccctctgaccgagagctactgtggcccctgtcctaagaactggatctgctacaagaacaactgctaccagttcttcgacgagagcaagaattggtacgagagccaggccagctgcatgagccagaatgccagcctgctgaaggtgtacagcaaagaggaccaggacctgctgaaactggtcaagagcgcccactggatgggccttgtgcacatccccaccaatggctcttggcagtgggaggacggcagcattctgagccctaacctgctgaccatcatcgagatgcagaagggcgactgcgccctgtacgccagcagctttaagggcttcatcgagaattgcagcaccccgaacacctacatctgtatgcagagaaccgttggcggaggcggaagtggaggcggaggatctggcggcggaggctctgacctctttaatcaagaagtccagattccactcaccgaatcctactgcggaccttgtccaaaaaattggatttgttataagaacaactgttatcaattctttgatgagtctaaaaattggtatgagtcccaggcttcctgcatgtctcagaacgcttctctgctgaaagtctactctaaagaagatcaggatctcctgaagctcgtcaagtctgcccattggatggggctcgtccacattcctaccaacggaagctggcaatgggaagatggctccatcctgtctccaaatctgctcacgattattgaaatgcagaaaggggattgtgctctctacgccagctccttcaagggatttattgagaactgtagcacgcccaatacttatatctgtatgcaacggaccgtgacgcgtgaggcctctacaaagggaccctccgtgtttcctctggctcccagcagcaagtctacaagcggaggaacagccgctctgggctgcctggtcaaggattactttcccgagcctgtgaccgtgtcctggaatagcggagcactgacaagcggcgtgcacacctttccagccgtgctgcaaagcagcggcctgtactctctgagcagcgtggtcacagtgcctagctctagcctgggcacccagacctacatctgcaatgtgaaccacaagcctagcaacaccaaggtggacaagagagtggaacccaagagctgtatccccgaggacacattcttcccaagccccgagagcagctgcgacgtgaagctggtggaaaagagcttcgagacagacaccaacctgaacttccagaacctgagcgtgatcggcttcagaatcctgctgctgaaagtggccggctttaacctgctgatgaccctgcggctgtggtccagc

SEQ ID NO: 18252 - DNA, 2136 bp, synthetic construct
  source 1..2136: mol_type = other DNA
atggccttaccagtgaccgccttgctcctgccgctggccttgctgctccacgccgccaggccgctcgagggacagcctaaggccaatcctaccgtgacactgttccctccaagcagcgaagaactccaggccaacaaggccacacttgtgtgcctgatctccgacttctaccctggggctgtgacagtggcttggaaggccgatggatctcctgtgaaagccggcgtggaaaccaccaagccatccaagcagagcaacaacaaatacgccgccagctcctacctgagcctgacacctgagcagtggaagtcccacagatcctacagctgccaagtgacccacgaaggcagcaccgtggaaaagacagtggcccctacagagtgcagcggcagagccgattgcggctttaccagcgagagctaccagcagggcgtgctgagcgccaccatcctgtacgagatcctgctgggcaaggccaccctgtacgccgtgctggtgtctgccctggtgctgatggctatggtcaagcggaaggacagccggggaagggccaagcgatctggatctggagcaacaaacttctcactactcaaacaagcaggtgacgtggaggagaatcccgggcctactagcatggccttaccagtgaccgccttgctcctgccgctggccttgctgctccacgccgccaggccgatggaccccgacctggaaatcagagccgccttcctgcggcagagaaacacagccctgagaacagaggtggccgagctggaacaagaggtgcagcggctggaaaacgaggtgtcccagtacgagacaagatacggccctctcggaggcggaaaaggtaccggcggaggcggatctggcggcggaggtagcggtggcggaggatctgaattcgacatccagatgacacagagccctagcagcctgtctgccagcgtgggagacagagtgaccatcacatgcaaggccagcgaccacatcaacaactggctggcctggtatcagcagaagcctggacaggcccctaagctgctgatctacggcgctaccacactggaaacaggcgtgcccagcagattttctggcagcggctctggcaccgactacaccctgacaatatccagcctccagcctgaggacttcgccacctactactgtcagcagagctggaacaccccttggacattcggccagggcaccaagctggaaatcaagagaggcggaggcggaagtggaggcggaggatctggcggcggaggctctcaagttcagcttcaacagcctggcgctgagctggtcaaacctggcgcttctgtgaagatgagctgcaaagccagcggctacgccttcagcagctactggatcaactggatgaagcagaaacccggccagggactcgaatggatcggccaaatctatcccggcgacggcgacaccaactacaacggcaagttcaagggcagagccacactgaccgccgatacctctagcagcacagcctacatgcagctgagcagcctgaccagcgaagatagcgccgtgtacttctgtgcccggtccatcacaacagtcgtgggctgcgctatggactattggggccagggaacaagcgtgaccgtgtctagtacgcgtgaggcctctacaaagggaccctccgtgtttcctctggctcccagcagcaagtctacaagcggaggaacagccgctctgggctgcctggtcaaggattactttcccgagcctgtgaccgtgtcctggaatagcggagcactgacaagcggcgtgcacacctttccagccgtgctgcaaagcagcggcctgtactctctgagcagcgtggtcacagtgcctagctctagcctgggcacccagacctacatctgcaatgtgaaccacaagcctagcaacaccaaggtggacaagagagtggaacccaagagctgtatccccgaggacacattcttcccaagccccgagagcagctgcgacgtgaagctggtggaaaagagcttcgagacagacaccaacctgaacttccagaacctgagcgtgatcggcttcagaatcctgctgctgaaagtggccggctttaacctgctgatgaccctgcggctgtggtccagc

SEQ ID NO: 18253 - DNA, 2841 bp, synthetic construct
  source 1..2841: mol_type = other DNA
atggccttaccagtgaccgccttgctcctgccgctggccttgctgctccacgccgccaggccgctcgagggacagcctaaggccaatcctaccgtgacactgttccctccaagcagcgaagaactccaggccaacaaggccacacttgtgtgcctgatctccgacttctaccctggggctgtgacagtggcttggaaggccgatggatctcctgtgaaagccggcgtggaaaccaccaagccatccaagcagagcaacaacaaatacgccgccagctcctacctgagcctgacacctgagcagtggaagtcccacagatcctacagctgccaagtgacccacgaaggcagcaccgtggaaaagacagtggcccctacagagtgcagcggcagagccgattgcggctttaccagcgagagctaccagcagggcgtgctgagcgccaccatcctgtacgagatcctgctgggcaaggccaccctgtacgccgtgctggtgtctgccctggtgctgatggctatggtcaagcggaaggacagccggggaagggccaagcgatctggatctggagcaacaaacttctcactactcaaacaagcaggtgacgtggaggagaatcccgggcctactagcatggccttaccagtgaccgccttgctcctgccgctggccttgctgctccacgccgccaggccgctgttcaatcaagaggtgcagatccctctgaccgagagctactgtggcccctgtcctaagaactggatctgctacaagaacaactgctaccagttcttcgacgagagcaagaattggtacgagagccaggccagctgcatgagccagaatgccagcctgctgaaggtgtacagcaaagaggaccaggacctgctgaaactggtcaagagcgcccactggatgggccttgtgcacatccccaccaatggctcttggcagtgggaggacggcagcattctgagccctaacctgctgaccatcatcgagatgcagaagggcgactgcgccctgtacgccagcagctttaagggcttcatcgagaattgcagcaccccgaacacctacatctgtatgcagagaaccgttggcggaggcggaagtggaggcggaggatctggcggcggaggctctgacctctttaatcaagaagtccagattccactcaccgaatcctactgcggaccttgtccaaaaaattggatttgttataagaacaactgttatcaattctttgatgagtctaaaaattggtatgagtcccaggcttcctgcatgtctcagaacgcttctctgctgaaagtctactctaaagaagatcaggatctcctgaagctcgtcaagtctgcccattggatggggctcgtccacattcctaccaacggaagctggcaatgggaagatggctccatcctgtctccaaatctgctcacgattattgaaatgcagaaaggggattgtgctctctacgccagctccttcaagggatttattgagaactgtagcacgcccaatacttatatctgtatgcaacggaccgtgggtaccggcggaggcggatctggcggcggaggtagcggtggcggaggatctgaattcgacatccagatgacacagagccctagcagcctgtctgccagcgtgggagacagagtgaccatcacatgcaaggccagcgaccacatcaacaactggctggcctggtatcagcagaagcctggacaggcccctaagctgctgatctacggcgctaccacactggaaacaggcgtgcccagcagattttctggcagcggctctggcaccgactacaccctgacaatatccagcctccagcctgaggacttcgccacctactactgtcagcagagctggaacaccccttggacattcggccagggcaccaagctggaaatcaagagaggcggaggcggaagtggaggcggaggatctggcggcggaggctctcaagttcagcttcaacagcctggcgctgagctggtcaaacctggcgcttctgtgaagatgagctgcaaagccagcggctacgccttcagcagctactggatcaactggatgaagcagaaacccggccagggactcgaatggatcggccaaatctatcccggcgacggcgacaccaactacaacggcaagttcaagggcagagccacactgaccgccgatacctctagcagcacagcctacatgcagctgagcagcctgaccagcgaagatagcgccgtgtacttctgtgcccggtccatcacaacagtcgtgggctgcgctatggactattggggccagggaacaagcgtgaccgtgtctagtacgcgtgaggcctctacaaagggaccctccgtgtttcctctggctcccagcagcaagtctacaagcggaggaacagccgctctgggctgcctggtcaaggattactttcccgagcctgtgaccgtgtcctggaatagcggagcactgacaagcggcgtgcacacctttccagccgtgctgcaaagcagcggcctgtactctctgagcagcgtggtcacagtgcctagctctagcctgggcacccagacctacatctgcaatgtgaaccacaagcctagcaacaccaaggtggacaagagagtggaacccaagagctgtatccccgaggacacattcttcccaagccccgagagcagctgcgacgtgaagctggtggaaaagagcttcgagacagacaccaacctgaacttccagaacctgagcgtgatcggcttcagaatcctgctgctgaaagtggccggctttaacctgctgatgaccctgcggctgtggtccagc

SEQ ID NO: 18254 - DNA, 1956 bp, synthetic construct
  source 1..1956: mol_type = other DNA
atggccttaccagtgaccgccttgctcctgccgctggccttgctgctccacgccgccaggccgctcgagggacagcctaaggccaatcctaccgtgacactgttccctccaagcagcgaagaactccaggccaacaaggccacacttgtgtgcctgatctccgacttctaccctggggctgtgacagtggcttggaaggccgatggatctcctgtgaaagccggcgtggaaaccaccaagccatccaagcagagcaacaacaaatacgccgccagctcctacctgagcctgacacctgagcagtggaagtcccacagatcctacagctgccaagtgacccacgaaggcagcaccgtggaaaagacagtggcccctacagagtgcagcggcagagccgattgcggctttaccagcgagagctaccagcagggcgtgctgagcgccaccatcctgtacgagatcctgctgggcaaggccaccctgtacgccgtgctggtgtctgccctggtgctgatggctatggtcaagcggaaggacagccggggaagggccaagcgatctggatctggagcaacaaacttctcactactcaaacaagcaggtgacgtggaggagaatcccgggcctactagcatggccttaccagtgaccgccttgctcctgccgctggccttgctgctccacgccgccaggccgcagtctgtgctgacacagcctcctagtgtgtctggcgctcctggacagagagtgaccatctcttgtaccggcagcagcagcaatatcggagccggctatgacgtgcactggtatcagcagctccctggcacagcccctaaactgctgatcttcggcaacagcaacagacccagcggcgtgcccgatagattcagcggctttaagagcggcacaagcgccagcctggctatcactggactgcaagccgaggacgaggccgactacttctgccagagctacgatagcagcctgagcggcagcggagtgtttggcacaggcaccaaagtgacagtgcttggcggcggaggcggaagtggaggcggaggatctggcggcggaggctctcaaatgcaactggttcaaagcggcggtggcctggtgcaacctggaagaagtctgagactgagctgtgccgccagcggcttcaccttcgatgattacgccatgcactgggtccgacaggcccctggaaaaggactggaatgggtgtccggcatctcctggaatagcggctctatcggctacgccgacagcgtgaagggcagattcaccatcagccgggacaacgccaagaacagcctgtacctccagatgaactccctgagagccgaggatacagccctgtactactgcgccaaggacatccacagcggcagctactacggcctgctgtactacgctatggacgtgtggggccagggcacaaccgtgacagtttcttctacgcgtgaggcctctacaaagggaccctccgtgtttcctctggctcccagcagcaagtctacaagcggaggaacagccgctctgggctgcctggtcaaggattactttcccgagcctgtgaccgtgtcctggaatagcggagcactgacaagcggcgtgcacacctttccagccgtgctgcaaagcagcggcctgtactctctgagcagcgtggtcacagtgcctagctctagcctgggcacccagacctacatctgcaatgtgaaccacaagcctagcaacaccaaggtggacaagagagtggaacccaagagctgtatccccgaggacacattcttcccaagccccgagagcagctgcgacgtgaagctggtggaaaagagcttcgagacagacaccaacctgaacttccagaacctgagcgtgatcggcttcagaatcctgctgctgaaagtggccggctttaacctgctgatgaccctgcggctgtggtccagc

SEQ ID NO: 18255 - DNA, 1467 bp, synthetic construct
  source 1..1467: mol_type = other DNA
atggccttaccagtgaccgccttgctcctgccgctggccttgctgctccacgccgccaggccgctcgagggacagcctaaggccaatcctaccgtgacactgttccctccaagcagcgaagaactccaggccaacaaggccacacttgtgtgcctgatctccgacttctaccctggggctgtgacagtggcttggaaggccgatggatctcctgtgaaagccggcgtggaaaccaccaagccatccaagcagagcaacaacaaatacgccgccagctcctacctgagcctgacacctgagcagtggaagtcccacagatcctacagctgccaagtgacccacgaaggcagcaccgtggaaaagacagtggcccctacagagtgcagcggcagagccgattgcggctttaccagcgagagctaccagcagggcgtgctgagcgccaccatcctgtacgagatcctgctgggcaaggccaccctgtacgccgtgctggtgtctgccctggtgctgatggctatggtcaagcggaaggacagccggggaagggccaagcgatctggatctggagcaacaaacttctcactactcaaacaagcaggtgacgtggaggagaatcccgggcctactagcatggccttaccagtgaccgccttgctcctgccgctggccttgctgctccacgccgccaggccgatgtgtatgccctgcttcaccaccgaccatcagatggcccggaagtgcgacgattgctgtggcggaaaaggcagaggcaagtgctacggccctcagtgcttgtgtagactcgagggcggaggcggaagtggaggcggaggatctggcggcggaggctctttcgaagtgtgtatgccttgttttaccacggatcaacaaatggctcgcaagtgttctgactgctgcggaggcaaaggccggggaaagtgttatggcccacagtgtctgtgccggacgcgtgaggcctctacaaagggaccctccgtgtttcctctggctcccagcagcaagtctacaagcggaggaacagccgctctgggctgcctggtcaaggattactttcccgagcctgtgaccgtgtcctggaatagcggagcactgacaagcggcgtgcacacctttccagccgtgctgcaaagcagcggcctgtactctctgagcagcgtggtcacagtgcctagctctagcctgggcacccagacctacatctgcaatgtgaaccacaagcctagcaacaccaaggtggacaagagagtggaacccaagagctgtatccccgaggacacattcttcccaagccccgagagcagctgcgacgtgaagctggtggaaaagagcttcgagacagacaccaacctgaacttccagaacctgagcgtgatcggcttcagaatcctgctgctgaaagtggccggctttaacctgctgatgaccctgcggctgtggtccagc

SEQ ID NO: 18256 - DNA, 2097 bp, synthetic construct
  source 1..2097: mol_type = other DNA
atggccttaccagtgaccgccttgctcctgccgctggccttgctgctccacgccgccaggccgctcgagggacagcctaaggccaatcctaccgtgacactgttccctccaagcagcgaagaactccaggccaacaaggccacacttgtgtgcctgatctccgacttctaccctggggctgtgacagtggcttggaaggccgatggatctcctgtgaaagccggcgtggaaaccaccaagccatccaagcagagcaacaacaaatacgccgccagctcctacctgagcctgacacctgagcagtggaagtcccacagatcctacagctgccaagtgacccacgaaggcagcaccgtggaaaagacagtggcccctacagagtgcagcggcagagccgattgcggctttaccagcgagagctaccagcagggcgtgctgagcgccaccatcctgtacgagatcctgctgggcaaggccaccctgtacgccgtgctggtgtctgccctggtgctgatggctatggtcaagcggaaggacagccggggaagggccaagcgatctggatctggagcaacaaacttctcactactcaaacaagcaggtgacgtggaggagaatcccgggcctactagcatggccttaccagtgaccgccttgctcctgccgctggccttgctgctccacgccgccaggccgttcgaagtgtgtatgccttgttttaccacggatcaacaaatggctcgcaagtgttctgactgctgcggaggcaaaggccggggaaagtgttatggcccacagtgtctgtgccggggtaccggcggaggcggatctggcggcggaggtagcggtggcggaggatctgaattcgacatccagatgacacagagccctagcagcctgtctgccagcgtgggagacagagtgaccatcacatgcaaggccagcgaccacatcaacaactggctggcctggtatcagcagaagcctggacaggcccctaagctgctgatctacggcgctaccacactggaaacaggcgtgcccagcagattttctggcagcggctctggcaccgactacaccctgacaatatccagcctccagcctgaggacttcgccacctactactgtcagcagagctggaacaccccttggacattcggccagggcaccaagctggaaatcaagagaggcggaggcggaagtggaggcggaggatctggcggcggaggctctcaagttcagcttcaacagcctggcgctgagctggtcaaacctggcgcttctgtgaagatgagctgcaaagccagcggctacgccttcagcagctactggatcaactggatgaagcagaaacccggccagggactcgaatggatcggccaaatctatcccggcgacggcgacaccaactacaacggcaagttcaagggcagagccacactgaccgccgatacctctagcagcacagcctacatgcagctgagcagcctgaccagcgaagatagcgccgtgtacttctgtgcccggtccatcacaacagtcgtgggctgcgctatggactattggggccagggaacaagcgtgaccgtgtctagtacgcgtgaggcctctacaaagggaccctccgtgtttcctctggctcccagcagcaagtctacaagcggaggaacagccgctctgggctgcctggtcaaggattactttcccgagcctgtgaccgtgtcctggaatagcggagcactgacaagcggcgtgcacacctttccagccgtgctgcaaagcagcggcctgtactctctgagcagcgtggtcacagtgcctagctctagcctgggcacccagacctacatctgcaatgtgaaccacaagcctagcaacaccaaggtggacaagagagtggaacccaagagctgtatccccgaggacacattcttcccaagccccgagagcagctgcgacgtgaagctggtggaaaagagcttcgagacagacaccaacctgaacttccagaacctgagcgtgatcggcttcagaatcctgctgctgaaagtggccggctttaacctgctgatgaccctgcggctgtggtccagc

SEQ ID NO: 18257 - DNA, 2487 bp, synthetic construct
  source 1..2487: mol_type = other DNA
atggccttaccagtgaccgccttgctcctgccgctggccttgctgctccacgccgccaggccgctcgagggacagcctaaggccaatcctaccgtgacactgttccctccaagcagcgaagaactccaggccaacaaggccacacttgtgtgcctgatctccgacttctaccctggggctgtgacagtggcttggaaggccgatggatctcctgtgaaagccggcgtggaaaccaccaagccatccaagcagagcaacaacaaatacgccgccagctcctacctgagcctgacacctgagcagtggaagtcccacagatcctacagctgccaagtgacccacgaaggcagcaccgtggaaaagacagtggcccctacagagtgcagcggcagagccgattgcggctttaccagcgagagctaccagcagggcgtgctgagcgccaccatcctgtacgagatcctgctgggcaaggccaccctgtacgccgtgctggtgtctgccctggtgctgatggctatggtcaagcggaaggacagccggggaagggccaagcgatctggatctggagcaacaaacttctcactactcaaacaagcaggtgacgtggaggagaatcccgggcctactagcatggccttaccagtgaccgccttgctcctgccgctggccttgctgctccacgccgccaggccgttcgaaagccccgtagctcctgcctgtgaccccagactcctaaataaactgctgcgtgactcccacctccttcacagccgactgagtcagtgtcccgacgtggaccctttgtctatccctgttctgctgcctgctgtggactttagcctgggagaatggaaaacccagacggaacagagcaaggcacaggacattctaggggcagtgtcccttctactggagggagtgatggcagcacgaggacagttggaaccctcctgcctctcatccctcctgggacagctttctgggcaggttcgcctcctcttgggggccctgcagggcctcctaggaacccagcttcctctacagggcaggaccacagctcacaaggaccccaatgccctcttcttgagcttgcaacaactgcttcggggaaaggtgcgcttcctgcttctggtagaaggtcccaccctctgtgtcagacggaccctgccaaccacagctgtcccaagcagtacttctggtaccggcggaggcggatctggcggcggaggtagcggtggcggaggatctgaattcgacatccagatgacacagagccctagcagcctgtctgccagcgtgggagacagagtgaccatcacatgcaaggccagcgaccacatcaacaactggctggcctggtatcagcagaagcctggacaggcccctaagctgctgatctacggcgctaccacactggaaacaggcgtgcccagcagattttctggcagcggctctggcaccgactacaccctgacaatatccagcctccagcctgaggacttcgccacctactactgtcagcagagctggaacaccccttggacattcggccagggcaccaagctggaaatcaagagaggcggaggcggaagtggaggcggaggatctggcggcggaggctctcaagttcagcttcaacagcctggcgctgagctggtcaaacctggcgcttctgtgaagatgagctgcaaagccagcggctacgccttcagcagctactggatcaactggatgaagcagaaacccggccagggactcgaatggatcggccaaatctatcccggcgacggcgacaccaactacaacggcaagttcaagggcagagccacactgaccgccgatacctctagcagcacagcctacatgcagctgagcagcctgaccagcgaagatagcgccgtgtacttctgtgcccggtccatcacaacagtcgtgggctgcgctatggactattggggccagggaacaagcgtgaccgtgtctagtacgcgtgaggcctctacaaagggaccctccgtgtttcctctggctcccagcagcaagtctacaagcggaggaacagccgctctgggctgcctggtcaaggattactttcccgagcctgtgaccgtgtcctggaatagcggagcactgacaagcggcgtgcacacctttccagccgtgctgcaaagcagcggcctgtactctctgagcagcgtggtcacagtgcctagctctagcctgggcacccagacctacatctgcaatgtgaaccacaagcctagcaacaccaaggtggacaagagagtggaacccaagagctgtatccccgaggacacattcttcccaagccccgagagcagctgcgacgtgaagctggtggaaaagagcttcgagacagacaccaacctgaacttccagaacctgagcgtgatcggcttcagaatcctgctgctgaaagtggccggctttaacctgctgatgaccctgcggctgtggtccagc

SEQ ID NO: 18258 - DNA, 2208 bp, synthetic construct
  source 1..2208: mol_type = other DNA
atggccttaccagtgaccgccttgctcctgccgctggccttgctgctccacgccgccaggccgctcgagggacagcctaaggccaatcctaccgtgacactgttccctccaagcagcgaagaactccaggccaacaaggccacacttgtgtgcctgatctccgacttctaccctggggctgtgacagtggcttggaaggccgatggatctcctgtgaaagccggcgtggaaaccaccaagccatccaagcagagcaacaacaaatacgccgccagctcctacctgagcctgacacctgagcagtggaagtcccacagatcctacagctgccaagtgacccacgaaggcagcaccgtggaaaagacagtggcccctacagagtgcagcggcagagccgattgcggctttaccagcgagagctaccagcagggcgtgctgagcgccaccatcctgtacgagatcctgctgggcaaggccaccctgtacgccgtgctggtgtctgccctggtgctgatggctatggtcaagcggaaggacagccggggaagggccaagcgatctggatctggagcaacaaacttctcactactcaaacaagcaggtgacgtggaggagaatcccgggcctactagcatggccttaccagtgaccgccttgctcctgccgctggccttgctgctccacgccgccaggccgttcgaaatgggcagctgggaagagttcgagctgagactgaacgccatcgaggaacggctgtatgccctcggaggatctgaagccgagctggcctacttcgagtacgtgatcgccgacttcgagggcaacctgcagcggtacaaaggcaagggcaaccctgaagtggaagccctgtacttcgaggccgacgccatcttcgaggaactggtggcctacagacacaacggtaccggcggaggcggatctggcggcggaggtagcggtggcggaggatctgaattcgacatccagatgacacagagccctagcagcctgtctgccagcgtgggagacagagtgaccatcacatgcaaggccagcgaccacatcaacaactggctggcctggtatcagcagaagcctggacaggcccctaagctgctgatctacggcgctaccacactggaaacaggcgtgcccagcagattttctggcagcggctctggcaccgactacaccctgacaatatccagcctccagcctgaggacttcgccacctactactgtcagcagagctggaacaccccttggacattcggccagggcaccaagctggaaatcaagagaggcggaggcggaagtggaggcggaggatctggcggcggaggctctcaagttcagcttcaacagcctggcgctgagctggtcaaacctggcgcttctgtgaagatgagctgcaaagccagcggctacgccttcagcagctactggatcaactggatgaagcagaaacccggccagggactcgaatggatcggccaaatctatcccggcgacggcgacaccaactacaacggcaagttcaagggcagagccacactgaccgccgatacctctagcagcacagcctacatgcagctgagcagcctgaccagcgaagatagcgccgtgtacttctgtgcccggtccatcacaacagtcgtgggctgcgctatggactattggggccagggaacaagcgtgaccgtgtctagtacgcgtgaggcctctacaaagggaccctccgtgtttcctctggctcccagcagcaagtctacaagcggaggaacagccgctctgggctgcctggtcaaggattactttcccgagcctgtgaccgtgtcctggaatagcggagcactgacaagcggcgtgcacacctttccagccgtgctgcaaagcagcggcctgtactctctgagcagcgtggtcacagtgcctagctctagcctgggcacccagacctacatctgcaatgtgaaccacaagcctagcaacaccaaggtggacaagagagtggaacccaagagctgtatccccgaggacacattcttcccaagccccgagagcagctgcgacgtgaagctggtggaaaagagcttcgagacagacaccaacctgaacttccagaacctgagcgtgatcggcttcagaatcctgctgctgaaagtggccggctttaacctgctgatgaccctgcggctgtggtccagc

SEQ ID NO: 18259 - protein, 142 aa, synthetic construct; identical to SEQ ID NO: 8910

SEQ ID NO: 18260 - protein, 141 aa, synthetic construct
QNPDPAVYQLRDSKSSDKSVCLFTDFDSQTNVSQSKDSDVYITDKCVLDMRSMDFKSNSAVAWSNKSDFACANAFNNSIIPEDTFFPSPESSCGFTSESYQQGVLSATILYEILLGKATLYAVLVSALVLMAMVKRKDSRG

SEQ ID NO: 18261 - protein, 140 aa, synthetic construct
NPDPAVYQLRDSKSSDKSVCLFTDFDSQTNVSQSKDSDVYITDKCVLDMRSMDFKSNSAVAWSNKSDFACANAFNNSIIPEDTFFPSPESSCGFTSESYQQGVLSATILYEILLGKATLYAVLVSALVLMAMVKRKDSRG

SEQ ID NO: 18262 - protein, 139 aa, synthetic construct
PDPAVYQLRDSKSSDKSVCLFTDFDSQTNVSQSKDSDVYITDKCVLDMRSMDFKSNSAVAWSNKSDFACANAFNNSIIPEDTFFPSPESSCGFTSESYQQGVLSATILYEILLGKATLYAVLVSALVLMAMVKRKDSRG

SEQ ID NO: 18263 - protein, 138 aa, synthetic construct
DPAVYQLRDSKSSDKSVCLFTDFDSQTNVSQSKDSDVYITDKCVLDMRSMDFKSNSAVAWSNKSDFACANAFNNSIIPEDTFFPSPESSCGFTSESYQQGVLSATILYEILLGKATLYAVLVSALVLMAMVKRKDSRG

SEQ ID NO: 18264 - protein, 137 aa, synthetic construct
PAVYQLRDSKSSDKSVCLFTDFDSQTNVSQSKDSDVYITDKCVLDMRSMDFKSNSAVAWSNKSDFACANAFNNSIIPEDTFFPSPESSCGFTSESYQQGVLSATILYEILLGKATLYAVLVSALVLMAMVKRKDSRG

SEQ ID NO: 18265 - protein, 136 aa, synthetic construct
AVYQLRDSKSSDKSVCLFTDFDSQTNVSQSKDSDVYITDKCVLDMRSMDFKSNSAVAWSNKSDFACANAFNNSIIPEDTFFPSPESSCGFTSESYQQGVLSATILYEILLGKATLYAVLVSALVLMAMVKRKDSRG

SEQ ID NO: 18266 - protein, 135 aa, synthetic construct
VYQLRDSKSSDKSVCLFTDFDSQTNVSQSKDSDVYITDKCVLDMRSMDFKSNSAVAWSNKSDFACANAFNNSIIPEDTFFPSPESSCGFTSESYQQGVLSATILYEILLGKATLYAVLVSALVLMAMVKRKDSRG

SEQ ID NO: 18267 - protein, 134 aa, synthetic construct
YQLRDSKSSDKSVCLFTDFDSQTNVSQSKDSDVYITDKCVLDMRSMDFKSNSAVAWSNKSDFACANAFNNSIIPEDTFFPSPESSCGFTSESYQQGVLSATILYEILLGKATLYAVLVSALVLMAMVKRKDSRG

SEQ ID NO: 18268 - protein, 133 aa, synthetic construct
QLRDSKSSDKSVCLFTDFDSQTNVSQSKDSDVYITDKCVLDMRSMDFKSNSAVAWSNKSDFACANAFNNSIIPEDTFFPSPESSCGFTSESYQQGVLSATILYEILLGKATLYAVLVSALVLMAMVKRKDSRG

SEQ ID NO: 18269 - protein, 132 aa, synthetic construct
LRDSKSSDKSVCLFTDFDSQTNVSQSKDSDVYITDKCVLDMRSMDFKSNSAVAWSNKSDFACANAFNNSIIPEDTFFPSPESSCGFTSESYQQGVLSATILYEILLGKATLYAVLVSALVLMAMVKRKDSRG

SEQ ID NO: 18270 - protein, 131 aa, synthetic construct
RDSKSSDKSVCLFTDFDSQTNVSQSKDSDVYITDKCVLDMRSMDFKSNSAVAWSNKSDFACANAFNNSIIPEDTFFPSPESSCGFTSESYQQGVLSATILYEILLGKATLYAVLVSALVLMAMVKRKDSRG

SEQ ID NO: 18271 - protein, 130 aa, synthetic construct
DSKSSDKSVCLFTDFDSQTNVSQSKDSDVYITDKCVLDMRSMDFKSNSAVAWSNKSDFACANAFNNSIIPEDTFFPSPESSCGFTSESYQQGVLSATILYEILLGKATLYAVLVSALVLMAMVKRKDSRG

SEQ ID NO: 18272 - protein, 129 aa, synthetic construct
SKSSDKSVCLFTDFDSQTNVSQSKDSDVYITDKCVLDMRSMDFKSNSAVAWSNKSDFACANAFNNSIIPEDTFFPSPESSCGFTSESYQQGVLSATILYEILLGKATLYAVLVSALVLMAMVKRKDSRG

SEQ ID NO: 18273 - protein, 128 aa, synthetic construct
KSSDKSVCLFTDFDSQTNVSQSKDSDVYITDKCVLDMRSMDFKSNSAVAWSNKSDFACANAFNNSIIPEDTFFPSPESSCGFTSESYQQGVLSATILYEILLGKATLYAVLVSALVLMAMVKRKDSRG

SEQ ID NO: 18274 - protein, 127 aa, synthetic construct
SSDKSVCLFTDFDSQTNVSQSKDSDVYITDKCVLDMRSMDFKSNSAVAWSNKSDFACANAFNNSIIPEDTFFPSPESSCGFTSESYQQGVLSATILYEILLGKATLYAVLVSALVLMAMVKRKDSRG

SEQ ID NO: 18275 - protein, 126 aa, synthetic construct
SDKSVCLFTDFDSQTNVSQSKDSDVYITDKCVLDMRSMDFKSNSAVAWSNKSDFACANAFNNSIIPEDTFFPSPESSCGFTSESYQQGVLSATILYEILLGKATLYAVLVSALVLMAMVKRKDSRG

SEQ ID NO: 18276 - protein, 125 aa, synthetic construct
DKSVCLFTDFDSQTNVSQSKDSDVYITDKCVLDMRSMDFKSNSAVAWSNKSDFACANAFNNSIIPEDTFFPSPESSCGFTSESYQQGVLSATILYEILLGKATLYAVLVSALVLMAMVKRKDSRG

SEQ ID NO: 18277 - protein, 124 aa, synthetic construct
KSVCLFTDFDSQTNVSQSKDSDVYITDKCVLDMRSMDFKSNSAVAWSNKSDFACANAFNNSIIPEDTFFPSPESSCGFTSESYQQGVLSATILYEILLGKATLYAVLVSALVLMAMVKRKDSRG

SEQ ID NO: 18278 - protein, 123 aa, synthetic construct
SVCLFTDFDSQTNVSQSKDSDVYITDKCVLDMRSMDFKSNSAVAWSNKSDFACANAFNNSIIPEDTFFPSPESSCGFTSESYQQGVLSATILYEILLGKATLYAVLVSALVLMAMVKRKDSRG

SEQ ID NO: 18279 - protein, 122 aa, synthetic construct
VCLFTDFDSQTNVSQSKDSDVYITDKCVLDMRSMDFKSNSAVAWSNKSDFACANAFNNSIIPEDTFFPSPESSCGFTSESYQQGVLSATILYEILLGKATLYAVLVSALVLMAMVKRKDSRG

SEQ ID NO: 18280 - protein, 117 aa, synthetic construct
DFDSQTNVSQSKDSDVYITDKCVLDMRSMDFKSNSAVAWSNKSDFACANAFNNSIIPEDTFFPSPESSCGFTSESYQQGVLSATILYEILLGKATLYAVLVSALVLMAMVKRKDSRG

SEQ ID NO: 18281 - protein, 112 aa, synthetic construct
TNVSQSKDSDVYITDKCVLDMRSMDFKSNSAVAWSNKSDFACANAFNNSIIPEDTFFPSPESSCGFTSESYQQGVLSATILYEILLGKATLYAVLVSALVLMAMVKRKDSRG

SEQ ID NO: 18282 - protein, 145 aa, synthetic construct; identical to SEQ ID NO: 8912

SEQ ID NO: 18283 - protein, 144 aa, synthetic construct
QNPDPAVYQLRDSKSSDKSVCLFTDFDSQTNVSQSKDSDVYITDKCVLDMRSMDFKSNSAVAWSNKSDFACANAFNNSIIPEDTFFPSPESSCDVKLVEKSFETDTNLNFQILYEILLGKATLYAVLVSALVLMAMVKRKDSRG

SEQ ID NO: 18284 - protein, 143 aa, synthetic construct
NPDPAVYQLRDSKSSDKSVCLFTDFDSQTNVSQSKDSDVYITDKCVLDMRSMDFKSNSAVAWSNKSDFACANAFNNSIIPEDTFFPSPESSCDVKLVEKSFETDTNLNFQILYEILLGKATLYAVLVSALVLMAMVKRKDSRG

SEQ ID NO: 18285 - protein, 142 aa, synthetic construct
PDPAVYQLRDSKSSDKSVCLFTDFDSQTNVSQSKDSDVYITDKCVLDMRSMDFKSNSAVAWSNKSDFACANAFNNSIIPEDTFFPSPESSCDVKLVEKSFETDTNLNFQILYEILLGKATLYAVLVSALVLMAMVKRKDSRG

SEQ ID NO: 18286 - protein, 141 aa, synthetic construct
DPAVYQLRDSKSSDKSVCLFTDFDSQTNVSQSKDSDVYITDKCVLDMRSMDFKSNSAVAWSNKSDFACANAFNNSIIPEDTFFPSPESSCDVKLVEKSFETDTNLNFQILYEILLGKATLYAVLVSALVLMAMVKRKDSRG

SEQ ID NO: 18287 - protein, 140 aa, synthetic construct
PAVYQLRDSKSSDKSVCLFTDFDSQTNVSQSKDSDVYITDKCVLDMRSMDFKSNSAVAWSNKSDFACANAFNNSIIPEDTFFPSPESSCDVKLVEKSFETDTNLNFQILYEILLGKATLYAVLVSALVLMAMVKRKDSRG

SEQ ID NO: 18288 - protein, 139 aa, synthetic construct
AVYQLRDSKSSDKSVCLFTDFDSQTNVSQSKDSDVYITDKCVLDMRSMDFKSNSAVAWSNKSDFACANAFNNSIIPEDTFFPSPESSCDVKLVEKSFETDTNLNFQILYEILLGKATLYAVLVSALVLMAMVKRKDSRG

SEQ ID NO: 18289 - protein, 138 aa, synthetic construct
VYQLRDSKSSDKSVCLFTDFDSQTNVSQSKDSDVYITDKCVLDMRSMDFKSNSAVAWSNKSDFACANAFNNSIIPEDTFFPSPESSCDVKLVEKSFETDTNLNFQILYEILLGKATLYAVLVSALVLMAMVKRKDSRG

SEQ ID NO: 18290 - protein, 137 aa, synthetic construct
YQLRDSKSSDKSVCLFTDFDSQTNVSQSKDSDVYITDKCVLDMRSMDFKSNSAVAWSNKSDFACANAFNNSIIPEDTFFPSPESSCDVKLVEKSFETDTNLNFQILYEILLGKATLYAVLVSALVLMAMVKRKDSRG

SEQ ID NO: 18291 - protein, 136 aa, synthetic construct
QLRDSKSSDKSVCLFTDFDSQTNVSQSKDSDVYITDKCVLDMRSMDFKSNSAVAWSNKSDFACANAFNNSIIPEDTFFPSPESSCDVKLVEKSFETDTNLNFQILYEILLGKATLYAVLVSALVLMAMVKRKDSRG

SEQ ID NO: 18292 - protein, 135 aa, synthetic construct
LRDSKSSDKSVCLFTDFDSQTNVSQSKDSDVYITDKCVLDMRSMDFKSNSAVAWSNKSDFACANAFNNSIIPEDTFFPSPESSCDVKLVEKSFETDTNLNFQILYEILLGKATLYAVLVSALVLMAMVKRKDSRG

SEQ ID NO: 18293 - protein, 134 aa, synthetic construct
RDSKSSDKSVCLFTDFDSQTNVSQSKDSDVYITDKCVLDMRSMDFKSNSAVAWSNKSDFACANAFNNSIIPEDTFFPSPESSCDVKLVEKSFETDTNLNFQILYEILLGKATLYAVLVSALVLMAMVKRKDSRG

SEQ ID NO: 18294 - protein, 133 aa, synthetic construct
DSKSSDKSVCLFTDFDSQTNVSQSKDSDVYITDKCVLDMRSMDFKSNSAVAWSNKSDFACANAFNNSIIPEDTFFPSPESSCDVKLVEKSFETDTNLNFQILYEILLGKATLYAVLVSALVLMAMVKRKDSRG

SEQ ID NO: 18295 - protein, 132 aa, synthetic construct
SKSSDKSVCLFTDFDSQTNVSQSKDSDVYITDKCVLDMRSMDFKSNSAVAWSNKSDFACANAFNNSIIPEDTFFPSPESSCDVKLVEKSFETDTNLNFQILYEILLGKATLYAVLVSALVLMAMVKRKDSRG

SEQ ID NO: 18296 - protein, 131 aa, synthetic construct
KSSDKSVCLFTDFDSQTNVSQSKDSDVYITDKCVLDMRSMDFKSNSAVAWSNKSDFACANAFNNSIIPEDTFFPSPESSCDVKLVEKSFETDTNLNFQILYEILLGKATLYAVLVSALVLMAMVKRKDSRG

SEQ ID NO: 18297 - protein, 130 aa, synthetic construct
SSDKSVCLFTDFDSQTNVSQSKDSDVYITDKCVLDMRSMDFKSNSAVAWSNKSDFACANAFNNSIIPEDTFFPSPESSCDVKLVEKSFETDTNLNFQILYEILLGKATLYAVLVSALVLMAMVKRKDSRG

SEQ ID NO: 18298 - protein, 129 aa, synthetic construct
SDKSVCLFTDFDSQTNVSQSKDSDVYITDKCVLDMRSMDFKSNSAVAWSNKSDFACANAFNNSIIPEDTFFPSPESSCDVKLVEKSFETDTNLNFQILYEILLGKATLYAVLVSALVLMAMVKRKDSRG

SEQ ID NO: 18299 - protein, 128 aa, synthetic construct
DKSVCLFTDFDSQTNVSQSKDSDVYITDKCVLDMRSMDFKSNSAVAWSNKSDFACANAFNNSIIPEDTFFPSPESSCDVKLVEKSFETDTNLNFQILYEILLGKATLYAVLVSALVLMAMVKRKDSRG

SEQ ID NO: 18300 - protein, 127 aa, synthetic construct
KSVCLFTDFDSQTNVSQSKDSDVYITDKCVLDMRSMDFKSNSAVAWSNKSDFACANAFNNSIIPEDTFFPSPESSCDVKLVEKSFETDTNLNFQILYEILLGKATLYAVLVSALVLMAMVKRKDSRG

SEQ ID NO: 18301 - protein, 126 aa, synthetic construct
SVCLFTDFDSQTNVSQSKDSDVYITDKCVLDMRSMDFKSNSAVAWSNKSDFACANAFNNSIIPEDTFFPSPESSCDVKLVEKSFETDTNLNFQILYEILLGKATLYAVLVSALVLMAMVKRKDSRG

SEQ ID NO: 18302 - protein, 125 aa, synthetic construct
VCLFTDFDSQTNVSQSKDSDVYITDKCVLDMRSMDFKSNSAVAWSNKSDFACANAFNNSIIPEDTFFPSPESSCDVKLVEKSFETDTNLNFQILYEILLGKATLYAVLVSALVLMAMVKRKDSRG

SEQ ID NO: 18303 - protein, 120 aa, synthetic construct
DFDSQTNVSQSKDSDVYITDKCVLDMRSMDFKSNSAVAWSNKSDFACANAFNNSIIPEDTFFPSPESSCDVKLVEKSFETDTNLNFQILYEILLGKATLYAVLVSALVLMAMVKRKDSRG

SEQ ID NO: 18304 - protein, 115 aa, synthetic construct
TNVSQSKDSDVYITDKCVLDMRSMDFKSNSAVAWSNKSDFACANAFNNSIIPEDTFFPSPESSCDVKLVEKSFETDTNLNFQILYEILLGKATLYAVLVSALVLMAMVKRKDSRG

SEQ ID NO: 18305 - protein, 160 aa, synthetic construct; identical to SEQ ID NO: 8913

SEQ ID NO: 18306 - protein, 159 aa, synthetic construct
QNPDPAVYQLRDSKSSDKSVCLFTDFDSQTNVSQSKDSDVYITDKCVLDMRSMDFKSNSAVAWSNKSDFACANAFNNSIIPEDTFFPSPESSDSTDHVKPKETENTKQPSKSCHKPKAIVHTEKVNMMSLTVLGLRMLFAKTVAVNFLLTAKLFFLLTA

SEQ ID NO: 18307 - protein, 158 aa, synthetic construct
NPDPAVYQLRDSKSSDKSVCLFTDFDSQTNVSQSKDSDVYITDKCVLDMRSMDFKSNSAVAWSNKSDFACANAFNNSIIPEDTFFPSPESSDSTDHVKPKETENTKQPSKSCHKPKAIVHTEKVNMMSLTVLGLRMLFAKTVAVNFLLTAKLFFLLTA

SEQ ID NO: 18308 - protein, 157 aa, synthetic construct
PDPAVYQLRDSKSSDKSVCLFTDFDSQTNVSQSKDSDVYITDKCVLDMRSMDFKSNSAVAWSNKSDFACANAFNNSIIPEDTFFPSPESSDSTDHVKPKETENTKQPSKSCHKPKAIVHTEKVNMMSLTVLGLRMLFAKTVAVNFLLTAKLFFLLTA

SEQ ID NO: 18309 - protein, 156 aa, synthetic construct
DPAVYQLRDSKSSDKSVCLFTDFDSQTNVSQSKDSDVYITDKCVLDMRSMDFKSNSAVAWSNKSDFACANAFNNSIIPEDTFFPSPESSDSTDHVKPKETENTKQPSKSCHKPKAIVHTEKVNMMSLTVLGLRMLFAKTVAVNFLLTAKLFFLLTA

SEQ ID NO: 18310 - protein, 155 aa, synthetic construct
PAVYQLRDSKSSDKSVCLFTDFDSQTNVSQSKDSDVYITDKCVLDMRSMDFKSNSAVAWSNKSDFACANAFNNSIIPEDTFFPSPESSDSTDHVKPKETENTKQPSKSCHKPKAIVHTEKVNMMSLTVLGLRMLFAKTVAVNFLLTAKLFFLLTA

SEQ ID NO: 18311 - protein, 154 aa, synthetic construct
AVYQLRDSKSSDKSVCLFTDFDSQTNVSQSKDSDVYITDKCVLDMRSMDFKSNSAVAWSNKSDFACANAFNNSIIPEDTFFPSPESSDSTDHVKPKETENTKQPSKSCHKPKAIVHTEKVNMMSLTVLGLRMLFAKTVAVNFLLTAKLFFLLTA

SEQ ID NO: 18312 - protein, 153 aa, synthetic construct
VYQLRDSKSSDKSVCLFTDFDSQTNVSQSKDSDVYITDKCVLDMRSMDFKSNSAVAWSNKSDFACANAFNNSIIPEDTFFPSPESSDSTDHVKPKETENTKQPSKSCHKPKAIVHTEKVNMMSLTVLGLRMLFAKTVAVNFLLTAKLFFLLTA

SEQ ID NO: 18313 - protein, 152 aa, synthetic construct
YQLRDSKSSDKSVCLFTDFDSQTNVSQSKDSDVYITDKCVLDMRSMDFKSNSAVAWSNKSDFACANAFNNSIIPEDTFFPSPESSDSTDHVKPKETENTKQPSKSCHKPKAIVHTEKVNMMSLTVLGLRMLFAKTVAVNFLLTAKLFFLLTA

SEQ ID NO: 18314 - protein, 151 aa, synthetic construct
QLRDSKSSDKSVCLFTDFDSQTNVSQSKDSDVYITDKCVLDMRSMDFKSNSAVAWSNKSDFACANAFNNSIIPEDTFFPSPESSDSTDHVKPKETENTKQPSKSCHKPKAIVHTEKVNMMSLTVLGLRMLFAKTVAVNFLLTAKLFFLLTA

SEQ ID NO: 18315 - protein, 150 aa, synthetic construct
LRDSKSSDKSVCLFTDFDSQTNVSQSKDSDVYITDKCVLDMRSMDFKSNSAVAWSNKSDFACANAFNNSIIPEDTFFPSPESSDSTDHVKPKETENTKQPSKSCHKPKAIVHTEKVNMMSLTVLGLRMLFAKTVAVNFLLTAKLFFLLTA

SEQ ID NO: 18316 - protein, 149 aa, synthetic construct
RDSKSSDKSVCLFTDFDSQTNVSQSKDSDVYITDKCVLDMRSMDFKSNSAVAWSNKSDFACANAFNNSIIPEDTFFPSPESSDSTDHVKPKETENTKQPSKSCHKPKAIVHTEKVNMMSLTVLGLRMLFAKTVAVNFLLTAKLFFLLTA

SEQ ID NO: 18317 - protein, 148 aa, synthetic construct
DSKSSDKSVCLFTDFDSQTNVSQSKDSDVYITDKCVLDMRSMDFKSNSAVAWSNKSDFACANAFNNSIIPEDTFFPSPESSDSTDHVKPKETENTKQPSKSCHKPKAIVHTEKVNMMSLTVLGLRMLFAKTVAVNFLLTAKLFFLLTA

SEQ ID NO: 18318 - protein, 147 aa, synthetic construct
SKSSDKSVCLFTDFDSQTNVSQSKDSDVYITDKCVLDMRSMDFKSNSAVAWSNKSDFACANAFNNSIIPEDTFFPSPESSDSTDHVKPKETENTKQPSKSCHKPKAIVHTEKVNMMSLTVLGLRMLFAKTVAVNFLLTAKLFFLLTA

SEQ ID NO: 18319 - protein, 146 aa, synthetic construct
KSSDKSVCLFTDFDSQTNVSQSKDSDVYITDKCVLDMRSMDFKSNSAVAWSNKSDFACANAFNNSIIPEDTFFPSPESSDSTDHVKPKETENTKQPSKSCHKPKAIVHTEKVNMMSLTVLGLRMLFAKTVAVNFLLTAKLFFLLTA

SEQ ID NO: 18320 - protein, 145 aa, synthetic construct
SSDKSVCLFTDFDSQTNVSQSKDSDVYITDKCVLDMRSMDFKSNSAVAWSNKSDFACANAFNNSIIPEDTFFPSPESSDSTDHVKPKETENTKQPSKSCHKPKAIVHTEKVNMMSLTVLGLRMLFAKTVAVNFLLTAKLFFLLTA

SEQ ID NO: 18321 - protein, 144 aa, synthetic construct
SDKSVCLFTDFDSQTNVSQSKDSDVYITDKCVLDMRSMDFKSNSAVAWSNKSDFACANAFNNSIIPEDTFFPSPESSDSTDHVKPKETENTKQPSKSCHKPKAIVHTEKVNMMSLTVLGLRMLFAKTVAVNFLLTAKLFFLLTA

SEQ ID NO: 18322 - protein, 143 aa, synthetic construct
DKSVCLFTDFDSQTNVSQSKDSDVYITDKCVLDMRSMDFKSNSAVAWSNKSDFACANAFNNSIIPEDTFFPSPESSDSTDHVKPKETENTKQPSKSCHKPKAIVHTEKVNMMSLTVLGLRMLFAKTVAVNFLLTAKLFFLLTA

SEQ ID NO: 18323 - protein, 142 aa, synthetic construct
KSVCLFTDFDSQTNVSQSKDSDVYITDKCVLDMRSMDFKSNSAVAWSNKSDFACANAFNNSIIPEDTFFPSPESSDSTDHVKPKETENTKQPSKSCHKPKAIVHTEKVNMMSLTVLGLRMLFAKTVAVNFLLTAKLFFLLTA

SEQ ID NO: 18324 - protein, 141 aa, synthetic construct
SVCLFTDFDSQTNVSQSKDSDVYITDKCVLDMRSMDFKSNSAVAWSNKSDFACANAFNNSIIPEDTFFPSPESSDSTDHVKPKETENTKQPSKSCHKPKAIVHTEKVNMMSLTVLGLRMLFAKTVAVNFLLTAKLFFLLTA

SEQ ID NO: 18325 - protein, 140 aa, synthetic construct
VCLFTDFDSQTNVSQSKDSDVYITDKCVLDMRSMDFKSNSAVAWSNKSDFACANAFNNSIIPEDTFFPSPESSDSTDHVKPKETENTKQPSKSCHKPKAIVHTEKVNMMSLTVLGLRMLFAKTVAVNFLLTAKLFFLLTA

SEQ ID NO: 18326 - protein, 135 aa, synthetic construct
DFDSQTNVSQSKDSDVYITDKCVLDMRSMDFKSNSAVAWSNKSDFACANAFNNSIIPEDTFFPSPESSDSTDHVKPKETENTKQPSKSCHKPKAIVHTEKVNMMSLTVLGLRMLFAKTVAVNFLLTAKLFFLLTA

SEQ ID NO: 18327 - protein, 130 aa, synthetic construct
TNVSQSKDSDVYITDKCVLDMRSMDFKSNSAVAWSNKSDFACANAFNNSIIPEDTFFPSPESSDSTDHVKPKETENTKQPSKSCHKPKAIVHTEKVNMMSLTVLGLRMLFAKTVAVNFLLTAKLFFLLTA

SEQ ID NO: 18328 - protein, 157 aa, synthetic construct; identical to SEQ ID NO: 8921

SEQ ID NO: 18329 - protein, 156 aa, synthetic construct
QNPDPAVYQLRDSKSSDKSVCLFTDFDSQTNVSQSKDSDVYITDKCVLDMRSMDFKSNSAVAWSNKSDFACANAFNNSIIPEDTFFPSPESSDSTDHVKPKETENTKQPSKSCHKPKAIVHTEKVNMMSLTVLGLRMLFAKTVAVNFLLTAKLFFL

SEQ ID NO: 18330 - protein, 155 aa, synthetic construct
NPDPAVYQLRDSKSSDKSVCLFTDFDSQTNVSQSKDSDVYITDKCVLDMRSMDFKSNSAVAWSNKSDFACANAFNNSIIPEDTFFPSPESSDSTDHVKPKETENTKQPSKSCHKPKAIVHTEKVNMMSLTVLGLRMLFAKTVAVNFLLTAKLFFL

SEQ ID NO: 18331 - protein, 154 aa, synthetic construct
PDPAVYQLRDSKSSDKSVCLFTDFDSQTNVSQSKDSDVYITDKCVLDMRSMDFKSNSAVAWSNKSDFACANAFNNSIIPEDTFFPSPESSDSTDHVKPKETENTKQPSKSCHKPKAIVHTEKVNMMSLTVLGLRMLFAKTVAVNFLLTAKLFFL

SEQ ID NO: 18332 - protein, 153 aa, synthetic construct
DPAVYQLRDSKSSDKSVCLFTDFDSQTNVSQSKDSDVYITDKCVLDMRSMDFKSNSAVAWSNKSDFACANAFNNSIIPEDTFFPSPESSDSTDHVKPKETENTKQPSKSCHKPKAIVHTEKVNMMSLTVLGLRMLFAKTVAVNFLLTAKLFFL

SEQ ID NO: 18333 - protein, 152 aa, synthetic construct
PAVYQLRDSKSSDKSVCLFTDFDSQTNVSQSKDSDVYITDKCVLDMRSMDFKSNSAVAWSNKSDFACANAFNNSIIPEDTFFPSPESSDSTDHVKPKETENTKQPSKSCHKPKAIVHTEKVNMMSLTVLGLRMLFAKTVAVNFLLTAKLFFL

SEQ ID NO: 18334 - protein, 151 aa, synthetic construct
AVYQLRDSKSSDKSVCLFTDFDSQTNVSQSKDSDVYITDKCVLDMRSMDFKSNSAVAWSNKSDFACANAFNNSIIPEDTFFPSPESSDSTDHVKPKETENTKQPSKSCHKPKAIVHTEKVNMMSLTVLGLRMLFAKTVAVNFLLTAKLFFL

SEQ ID NO: 18335 - protein, 150 aa, synthetic construct
VYQLRDSKSSDKSVCLFTDFDSQTNVSQSKDSDVYITDKCVLDMRSMDFKSNSAVAWSNKSDFACANAFNNSIIPEDTFFPSPESSDSTDHVKPKETENTKQPSKSCHKPKAIVHTEKVNMMSLTVLGLRMLFAKTVAVNFLLTAKLFFL

SEQ ID NO: 18336 - protein, 149 aa, synthetic construct
YQLRDSKSSDKSVCLFTDFDSQTNVSQSKDSDVYITDKCVLDMRSMDFKSNSAVAWSNKSDFACANAFNNSIIPEDTFFPSPESSDSTDHVKPKETENTKQPSKSCHKPKAIVHTEKVNMMSLTVLGLRMLFAKTVAVNFLLTAKLFFL

SEQ ID NO: 18337 - protein, 148 aa, synthetic construct
QLRDSKSSDKSVCLFTDFDSQTNVSQSKDSDVYITDKCVLDMRSMDFKSNSAVAWSNKSDFACANAFNNSIIPEDTFFPSPESSDSTDHVKPKETENTKQPSKSCHKPKAIVHTEKVNMMSLTVLGLRMLFAKTVAVNFLLTAKLFFL

SEQ ID NO: 18338 - protein, 147 aa, synthetic construct
LRDSKSSDKSVCLFTDFDSQTNVSQSKDSDVYITDKCVLDMRSMDFKSNSAVAWSNKSDFACANAFNNSIIPEDTFFPSPESSDSTDHVKPKETENTKQPSKSCHKPKAIVHTEKVNMMSLTVLGLRMLFAKTVAVNFLLTAKLFFL

SEQ ID NO: 18339 - protein, 146 aa, synthetic construct
RDSKSSDKSVCLFTDFDSQTNVSQSKDSDVYITDKCVLDMRSMDFKSNSAVAWSNKSDFACANAFNNSIIPEDTFFPSPESSDSTDHVKPKETENTKQPSKSCHKPKAIVHTEKVNMMSLTVLGLRMLFAKTVAVNFLLTAKLFFL

SEQ ID NO: 18340 - protein, 145 aa, synthetic construct
DSKSSDKSVCLFTDFDSQTNVSQSKDSDVYITDKCVLDMRSMDFKSNSAVAWSNKSDFACANAFNNSIIPEDTFFPSPESSDSTDHVKPKETENTKQPSKSCHKPKAIVHTEKVNMMSLTVLGLRMLFAKTVAVNFLLTAKLFFL

SEQ ID NO: 18341 - protein, 144 aa, synthetic construct
SKSSDKSVCLFTDFDSQTNVSQSKDSDVYITDKCVLDMRSMDFKSNSAVAWSNKSDFACANAFNNSIIPEDTFFPSPESSDSTDHVKPKETENTKQPSKSCHKPKAIVHTEKVNMMSLTVLGLRMLFAKTVAVNFLLTAKLFFL

SEQ ID NO: 18342 - protein, 143 aa, synthetic construct
KSSDKSVCLFTDFDSQTNVSQSKDSDVYITDKCVLDMRSMDFKSNSAVAWSNKSDFACANAFNNSIIPEDTFFPSPESSDSTDHVKPKETENTKQPSKSCHKPKAIVHTEKVNMMSLTVLGLRMLFAKTVAVNFLLTAKLFFL

SEQ ID NO: 18343 - protein, 142 aa, synthetic construct
SSDKSVCLFTDFDSQTNVSQSKDSDVYITDKCVLDMRSMDFKSNSAVAWSNKSDFACANAFNNSIIPEDTFFPSPESSDSTDHVKPKETENTKQPSKSCHKPKAIVHTEKVNMMSLTVLGLRMLFAKTVAVNFLLTAKLFFL

SEQ ID NO: 18344 - protein, 141 aa, synthetic construct
SDKSVCLFTDFDSQTNVSQSKDSDVYITDKCVLDMRSMDFKSNSAVAWSNKSDFACANAFNNSIIPEDTFFPSPESSDSTDHVKPKETENTKQPSKSCHKPKAIVHTEKVNMMSLTVLGLRMLFAKTVAVNFLLTAKLFFL

SEQ ID NO: 18345 - protein, 140 aa, synthetic construct
DKSVCLFTDFDSQTNVSQSKDSDVYITDKCVLDMRSMDFKSNSAVAWSNKSDFACANAFNNSIIPEDTFFPSPESSDSTDHVKPKETENTKQPSKSCHKPKAIVHTEKVNMMSLTVLGLRMLFAKTVAVNFLLTAKLFFL

SEQ ID NO: 18346 - protein, 139 aa, synthetic construct
KSVCLFTDFDSQTNVSQSKDSDVYITDKCVLDMRSMDFKSNSAVAWSNKSDFACANAFNNSIIPEDTFFPSPESSDSTDHVKPKETENTKQPSKSCHKPKAIVHTEKVNMMSLTVLGLRMLFAKTVAVNFLLTAKLFFL

SEQ ID NO: 18347 - protein, 138 aa, synthetic construct
SVCLFTDFDSQTNVSQSKDSDVYITDKCVLDMRSMDFKSNSAVAWSNKSDFACANAFNNSIIPEDTFFPSPESSDSTDHVKPKETENTKQPSKSCHKPKAIVHTEKVNMMSLTVLGLRMLFAKTVAVNFLLTAKLFFL

SEQ ID NO: 18348 - protein, 137 aa, synthetic construct
VCLFTDFDSQTNVSQSKDSDVYITDKCVLDMRSMDFKSNSAVAWSNKSDFACANAFNNSIIPEDTFFPSPESSDSTDHVKPKETENTKQPSKSCHKPKAIVHTEKVNMMSLTVLGLRMLFAKTVAVNFLLTAKLFFL

SEQ ID NO: 18349 - protein, 132 aa, synthetic construct
DFDSQTNVSQSKDSDVYITDKCVLDMRSMDFKSNSAVAWSNKSDFACANAFNNSIIPEDTFFPSPESSDSTDHVKPKETENTKQPSKSCHKPKAIVHTEKVNMMSLTVLGLRMLFAKTVAVNFLLTAKLFFL

SEQ ID NO: 18350 - protein, 127 aa, synthetic construct
TNVSQSKDSDVYITDKCVLDMRSMDFKSNSAVAWSNKSDFACANAFNNSIIPEDTFFPSPESSDSTDHVKPKETENTKQPSKSCHKPKAIVHTEKVNMMSLTVLGLRMLFAKTVAVNFLLTAKLFFL

SEQ ID NO: 18351 - protein, 173 aa, synthetic construct
GQPKANPTVTLFPPSSEELQANKATLVCLISDFYPGAVTVAWKADGSPVKAGVETTKPSKQSNNKYAASSYLSLTPEQWKSHRSYSCQVTHEGSTVEKTVAPTECSPIKTDVITMDPKDNCSKDANDTLLLQLTNTSAYYMYLLLLLKSVVYFAIITCCLLRRTAFCCNGEKS

SEQ ID NO: 18352 - protein, 172 aa, synthetic construct
QPKANPTVTLFPPSSEELQANKATLVCLISDFYPGAVTVAWKADGSPVKAGVETTKPSKQSNNKYAASSYLSLTPEQWKSHRSYSCQVTHEGSTVEKTVAPTECSPIKTDVITMDPKDNCSKDANDTLLLQLTNTSAYYMYLLLLLKSVVYFAIITCCLLRRTAFCCNGEKS

SEQ ID NO: 18353 - protein, 171 aa, synthetic construct
PKANPTVTLFPPSSEELQANKATLVCLISDFYPGAVTVAWKADGSPVKAGVETTKPSKQSNNKYAASSYLSLTPEQWKSHRSYSCQVTHEGSTVEKTVAPTECSPIKTDVITMDPKDNCSKDANDTLLLQLTNTSAYYMYLLLLLKSVVYFAIITCCLLRRTAFCCNGEKS

SEQ ID NO: 18354 - protein, 170 aa, synthetic construct
KANPTVTLFPPSSEELQANKATLVCLISDFYPGAVTVAWKADGSPVKAGVETTKPSKQSNNKYAASSYLSLTPEQWKSHRSYSCQVTHEGSTVEKTVAPTECSPIKTDVITMDPKDNCSKDANDTLLLQLTNTSAYYMYLLLLLKSVVYFAIITCCLLRRTAFCCNGEKS

SEQ ID NO: 18355 - protein, 169 aa, synthetic construct
ANPTVTLFPPSSEELQANKATLVCLISDFYPGAVTVAWKADGSPVKAGVETTKPSKQSNNKYAASSYLSLTPEQWKSHRSYSCQVTHEGSTVEKTVAPTECSPIKTDVITMDPKDNCSKDANDTLLLQLTNTSAYYMYLLLLLKSVVYFAIITCCLLRRTAFCCNGEKS

SEQ ID NO: 18356 - protein, 168 aa, synthetic construct
NPTVTLFPPSSEELQANKATLVCLISDFYPGAVTVAWKADGSPVKAGVETTKPSKQSNNKYAASSYLSLTPEQWKSHRSYSCQVTHEGSTVEKTVAPTECSPIKTDVITMDPKDNCSKDANDTLLLQLTNTSAYYMYLLLLLKSVVYFAIITCCLLRRTAFCCNGEKS

SEQ ID NO: 18357 - protein, 167 aa, synthetic construct
PTVTLFPPSSEELQANKATLVCLISDFYPGAVTVAWKADGSPVKAGVETTKPSKQSNNKYAASSYLSLTPEQWKSHRSYSCQVTHEGSTVEKTVAPTECSPIKTDVITMDPKDNCSKDANDTLLLQLTNTSAYYMYLLLLLKSVVYFAIITCCLLRRTAFCCNGEKS

SEQ ID NO: 18358 - protein, 166 aa, synthetic construct
TVTLFPPSSEELQANKATLVCLISDFYPGAVTVAWKADGSPVKAGVETTKPSKQSNNKYAASSYLSLTPEQWKSHRSYSCQVTHEGSTVEKTVAPTECSPIKTDVITMDPKDNCSKDANDTLLLQLTNTSAYYMYLLLLLKSVVYFAIITCCLLRRTAFCCNGEKS

SEQ ID NO: 18359 - protein, 165 aa, synthetic construct
VTLFPPSSEELQANKATLVCLISDFYPGAVTVAWKADGSPVKAGVETTKPSKQSNNKYAASSYLSLTPEQWKSHRSYSCQVTHEGSTVEKTVAPTECSPIKTDVITMDPKDNCSKDANDTLLLQLTNTSAYYMYLLLLLKSVVYFAIITCCLLRRTAFCCNGEKS

SEQ ID NO: 18360 - protein, 164 aa, synthetic construct
TLFPPSSEELQANKATLVCLISDFYPGAVTVAWKADGSPVKAGVETTKPSKQSNNKYAASSYLSLTPEQWKSHRSYSCQVTHEGSTVEKTVAPTECSPIKTDVITMDPKDNCSKDANDTLLLQLTNTSAYYMYLLLLLKSVVYFAIITCCLLRRTAFCCNGEKS

SEQ ID NO: 18361 - protein, 163 aa, synthetic construct
LFPPSSEELQANKATLVCLISDFYPGAVTVAWKADGSPVKAGVETTKPSKQSNNKYAASSYLSLTPEQWKSHRSYSCQVTHEGSTVEKTVAPTECSPIKTDVITMDPKDNCSKDANDTLLLQLTNTSAYYMYLLLLLKSVVYFAIITCCLLRRTAFCCNGEKS

SEQ ID NO: 18362 - protein, 174 aa, synthetic construct
GQPKANPTVTLFPPSSEELQANKATLVCLISDFYPGAVTVAWKADGSPVKAGVETTKPSKQSNNKYAASSYLSLTPEQWKSHRSYSCQVTHEGSTVEKTVAPTECSEVKTDSTDHVKPKETENTKQPSKSCHKPKAIVHTEKVNMMSLTVLGLRMLFAKTVAVNFLLTAKLFFL

SEQ ID NO: 18363 - protein, 173 aa, synthetic construct
QPKANPTVTLFPPSSEELQANKATLVCLISDFYPGAVTVAWKADGSPVKAGVETTKPSKQSNNKYAASSYLSLTPEQWKSHRSYSCQVTHEGSTVEKTVAPTECSEVKTDSTDHVKPKETENTKQPSKSCHKPKAIVHTEKVNMMSLTVLGLRMLFAKTVAVNFLLTAKLFFL

SEQ ID NO: 18364 - protein, 172 aa, synthetic construct
PKANPTVTLFPPSSEELQANKATLVCLISDFYPGAVTVAWKADGSPVKAGVETTKPSKQSNNKYAASSYLSLTPEQWKSHRSYSCQVTHEGSTVEKTVAPTECSEVKTDSTDHVKPKETENTKQPSKSCHKPKAIVHTEKVNMMSLTVLGLRMLFAKTVAVNFLLTAKLFFL

SEQ ID NO: 18365 - protein, 171 aa, synthetic construct
KANPTVTLFPPSSEELQANKATLVCLISDFYPGAVTVAWKADGSPVKAGVETTKPSKQSNNKYAASSYLSLTPEQWKSHRSYSCQVTHEGSTVEKTVAPTECSEVKTDSTDHVKPKETENTKQPSKSCHKPKAIVHTEKVNMMSLTVLGLRMLFAKTVAVNFLLTAKLFFL

SEQ ID NO: 18366 - protein, 170 aa, synthetic construct
ANPTVTLFPPSSEELQANKATLVCLISDFYPGAVTVAWKADGSPVKAGVETTKPSKQSNNKYAASSYLSLTPEQWKSHRSYSCQVTHEGSTVEKTVAPTECSEVKTDSTDHVKPKETENTKQPSKSCHKPKAIVHTEKVNMMSLTVLGLRMLFAKTVAVNFLLTAKLFFL

SEQ ID NO: 18367 - protein, 169 aa, synthetic construct
NPTVTLFPPSSEELQANKATLVCLISDFYPGAVTVAWKADGSPVKAGVETTKPSKQSNNKYAASSYLSLTPEQWKSHRSYSCQVTHEGSTVEKTVAPTECSEVKTDSTDHVKPKETENTKQPSKSCHKPKAIVHTEKVNMMSLTVLGLRMLFAKTVAVNFLLTAKLFFL

SEQ ID NO: 18368 - protein, 168 aa, synthetic construct
PTVTLFPPSSEELQANKATLVCLISDFYPGAVTVAWKADGSPVKAGVETTKPSKQSNNKYAASSYLSLTPEQWKSHRSYSCQVTHEGSTVEKTVAPTECSEVKTDSTDHVKPKETENTKQPSKSCHKPKAIVHTEKVNMMSLTVLGLRMLFAKTVAVNFLLTAKLFFL

SEQ ID NO: 18369 - protein, 167 aa, synthetic construct
TVTLFPPSSEELQANKATLVCLISDFYPGAVTVAWKADGSPVKAGVETTKPSKQSNNKYAASSYLSLTPEQWKSHRSYSCQVTHEGSTVEKTVAPTECSEVKTDSTDHVKPKETENTKQPSKSCHKPKAIVHTEKVNMMSLTVLGLRMLFAKTVAVNFLLTAKLFFL

SEQ ID NO: 18370 - protein, 166 aa, synthetic construct
VTLFPPSSEELQANKATLVCLISDFYPGAVTVAWKADGSPVKAGVETTKPSKQSNNKYAASSYLSLTPEQWKSHRSYSCQVTHEGSTVEKTVAPTECSEVKTDSTDHVKPKETENTKQPSKSCHKPKAIVHTEKVNMMSLTVLGLRMLFAKTVAVNFLLTAKLFFL

SEQ ID NO: 18371 - protein, 165 aa, synthetic construct
TLFPPSSEELQANKATLVCLISDFYPGAVTVAWKADGSPVKAGVETTKPSKQSNNKYAASSYLSLTPEQWKSHRSYSCQVTHEGSTVEKTVAPTECSEVKTDSTDHVKPKETENTKQPSKSCHKPKAIVHTEKVNMMSLTVLGLRMLFAKTVAVNFLLTAKLFFL

SEQ ID NO: 18372 - protein, 164 aa, synthetic construct
LFPPSSEELQANKATLVCLISDFYPGAVTVAWKADGSPVKAGVETTKPSKQSNNKYAASSYLSLTPEQWKSHRSYSCQVTHEGSTVEKTVAPTECSEVKTDSTDHVKPKETENTKQPSKSCHKPKAIVHTEKVNMMSLTVLGLRMLFAKTVAVNFLLTAKLFFL

SEQ ID NO: 18373 - protein, 159 aa, synthetic construct
GQPKANPTVTLFPPSSEELQANKATLVCLISDFYPGAVTVAWKADGSPVKAGVETTKPSKQSNNKYAASSYLSLTPEQWKSHRSYSCQVTHEGSTVEKTVAPTECSGRADCGFTSESYQQGVLSATILYEILLGKATLYAVLVSALVLMAMVKRKDSRG

SEQ ID NO: 18374 - protein, 158 aa, synthetic construct
QPKANPTVTLFPPSSEELQANKATLVCLISDFYPGAVTVAWKADGSPVKAGVETTKPSKQSNNKYAASSYLSLTPEQWKSHRSYSCQVTHEGSTVEKTVAPTECSGRADCGFTSESYQQGVLSATILYEILLGKATLYAVLVSALVLMAMVKRKDSRG

SEQ ID NO: 18375 - protein, 157 aa, synthetic construct
PKANPTVTLFPPSSEELQANKATLVCLISDFYPGAVTVAWKADGSPVKAGVETTKPSKQSNNKYAASSYLSLTPEQWKSHRSYSCQVTHEGSTVEKTVAPTECSGRADCGFTSESYQQGVLSATILYEILLGKATLYAVLVSALVLMAMVKRKDSRG

SEQ ID NO: 18376 - protein, 156 aa, synthetic construct
KANPTVTLFPPSSEELQANKATLVCLISDFYPGAVTVAWKADGSPVKAGVETTKPSKQSNNKYAASSYLSLTPEQWKSHRSYSCQVTHEGSTVEKTVAPTECSGRADCGFTSESYQQGVLSATILYEILLGKATLYAVLVSALVLMAMVKRKDSRG

SEQ ID NO: 18377 - protein, 155 aa, synthetic construct
ANPTVTLFPPSSEELQANKATLVCLISDFYPGAVTVAWKADGSPVKAGVETTKPSKQSNNKYAASSYLSLTPEQWKSHRSYSCQVTHEGSTVEKTVAPTECSGRADCGFTSESYQQGVLSATILYEILLGKATLYAVLVSALVLMAMVKRKDSRG

SEQ ID NO: 18378 - protein, 154 aa, synthetic construct
NPTVTLFPPSSEELQANKATLVCLISDFYPGAVTVAWKADGSPVKAGVETTKPSKQSNNKYAASSYLSLTPEQWKSHRSYSCQVTHEGSTVEKTVAPTECSGRADCGFTSESYQQGVLSATILYEILLGKATLYAVLVSALVLMAMVKRKDSRG

SEQ ID NO: 18379 - protein, 153 aa, synthetic construct
PTVTLFPPSSEELQANKATLVCLISDFYPGAVTVAWKADGSPVKAGVETTKPSKQSNNKYAASSYLSLTPEQWKSHRSYSCQVTHEGSTVEKTVAPTECSGRADCGFTSESYQQGVLSATILYEILLGKATLYAVLVSALVLMAMVKRKDSRG

SEQ ID NO: 18380 - protein, 152 aa, synthetic construct
TVTLFPPSSEELQANKATLVCLISDFYPGAVTVAWKADGSPVKAGVETTKPSKQSNNKYAASSYLSLTPEQWKSHRSYSCQVTHEGSTVEKTVAPTECSGRADCGFTSESYQQGVLSATILYEILLGKATLYAVLVSALVLMAMVKRKDSRG

SEQ ID NO: 18381 - protein, 151 aa, synthetic construct
VTLFPPSSEELQANKATLVCLISDFYPGAVTVAWKADGSPVKAGVETTKPSKQSNNKYAASSYLSLTPEQWKSHRSYSCQVTHEGSTVEKTVAPTECSGRADCGFTSESYQQGVLSATILYEILLGKATLYAVLVSALVLMAMVKRKDSRG

SEQ ID NO: 18382 - protein, 150 aa, synthetic construct
TLFPPSSEELQANKATLVCLISDFYPGAVTVAWKADGSPVKAGVETTKPSKQSNNKYAASSYLSLTPEQWKSHRSYSCQVTHEGSTVEKTVAPTECSGRADCGFTSESYQQGVLSATILYEILLGKATLYAVLVSALVLMAMVKRKDSRG

SEQ ID NO: 18383 - protein, 149 aa, synthetic construct
LFPPSSEELQANKATLVCLISDFYPGAVTVAWKADGSPVKAGVETTKPSKQSNNKYAASSYLSLTPEQWKSHRSYSCQVTHEGSTVEKTVAPTECSGRADCGFTSESYQQGVLSATILYEILLGKATLYAVLVSALVLMAMVKRKDSRG

SEQ ID NO: 18384 - protein, 166 aa, synthetic construct
GQPKANPTVTLFPPSSEELQANKATLVCLISDFYPGAVTVAWKADGSPVKAGVETTKPSKQSNNKYAASSYLSLTPEQWKSHRSYSCQVTHEGSTVEKTVAPTECSIPEDTFFPSPESSCDVKLVEKSFETDTNLNFQNLSVIGFRILLLKVAGFNLLMTLRLWSS

SEQ ID NO: 18385 - protein, 165 aa, synthetic construct
QPKANPTVTLFPPSSEELQANKATLVCLISDFYPGAVTVAWKADGSPVKAGVETTKPSKQSNNKYAASSYLSLTPEQWKSHRSYSCQVTHEGSTVEKTVAPTECSIPEDTFFPSPESSCDVKLVEKSFETDTNLNFQNLSVIGFRILLLKVAGFNLLMTLRLWSS

SEQ ID NO: 18386 - protein, 164 aa, synthetic construct
PKANPTVTLFPPSSEELQANKATLVCLISDFYPGAVTVAWKADGSPVKAGVETTKPSKQSNNKYAASSYLSLTPEQWKSHRSYSCQVTHEGSTVEKTVAPTECSIPEDTFFPSPESSCDVKLVEKSFETDTNLNFQNLSVIGFRILLLKVAGFNLLMTLRLWSS

SEQ ID NO: 18387 - protein, 163 aa, synthetic construct
KANPTVTLFPPSSEELQANKATLVCLISDFYPGAVTVAWKADGSPVKAGVETTKPSKQSNNKYAASSYLSLTPEQWKSHRSYSCQVTHEGSTVEKTVAPTECSIPEDTFFPSPESSCDVKLVEKSFETDTNLNFQNLSVIGFRILLLKVAGFNLLMTLRLWSS

SEQ ID NO: 18388 - protein, 162 aa, synthetic construct
ANPTVTLFPPSSEELQANKATLVCLISDFYPGAVTVAWKADGSPVKAGVETTKPSKQSNNKYAASSYLSLTPEQWKSHRSYSCQVTHEGSTVEKTVAPTECSIPEDTFFPSPESSCDVKLVEKSFETDTNLNFQNLSVIGFRILLLKVAGFNLLMTLRLWSS

SEQ ID NO: 18389 - protein, 161 aa, synthetic construct
NPTVTLFPPSSEELQANKATLVCLISDFYPGAVTVAWKADGSPVKAGVETTKPSKQSNNKYAASSYLSLTPEQWKSHRSYSCQVTHEGSTVEKTVAPTECSIPEDTFFPSPESSCDVKLVEKSFETDTNLNFQNLSVIGFRILLLKVAGFNLLMTLRLWSS

SEQ ID NO: 18390 - protein, 160 aa, synthetic construct
PTVTLFPPSSEELQANKATLVCLISDFYPGAVTVAWKADGSPVKAGVETTKPSKQSNNKYAASSYLSLTPEQWKSHRSYSCQVTHEGSTVEKTVAPTECSIPEDTFFPSPESSCDVKLVEKSFETDTNLNFQNLSVIGFRILLLKVAGFNLLMTLRLWSS

SEQ ID NO: 18391 - protein, 159 aa, synthetic construct
TVTLFPPSSEELQANKATLVCLISDFYPGAVTVAWKADGSPVKAGVETTKPSKQSNNKYAASSYLSLTPEQWKSHRSYSCQVTHEGSTVEKTVAPTECSIPEDTFFPSPESSCDVKLVEKSFETDTNLNFQNLSVIGFRILLLKVAGFNLLMTLRLWSS

SEQ ID NO: 18392 - protein, 158 aa, synthetic construct
VTLFPPSSEELQANKATLVCLISDFYPGAVTVAWKADGSPVKAGVETTKPSKQSNNKYAASSYLSLTPEQWKSHRSYSCQVTHEGSTVEKTVAPTECSIPEDTFFPSPESSCDVKLVEKSFETDTNLNFQNLSVIGFRILLLKVAGFNLLMTLRLWSS

SEQ ID NO: 18393 - protein, 157 aa, synthetic construct
TLFPPSSEELQANKATLVCLISDFYPGAVTVAWKADGSPVKAGVETTKPSKQSNNKYAASSYLSLTPEQWKSHRSYSCQVTHEGSTVEKTVAPTECSIPEDTFFPSPESSCDVKLVEKSFETDTNLNFQNLSVIGFRILLLKVAGFNLLMTLRLWSS

SEQ ID NO: 18394 - protein, 156 aa, synthetic construct
LFPPSSEELQANKATLVCLISDFYPGAVTVAWKADGSPVKAGVETTKPSKQSNNKYAASSYLSLTPEQWKSHRSYSCQVTHEGSTVEKTVAPTECSIPEDTFFPSPESSCDVKLVEKSFETDTNLNFQNLSVIGFRILLLKVAGFNLLMTLRLWSS

SEQ ID NO: 18395 - protein, 176 aa, synthetic construct
DLKNVFPPEVAVFEPSEAEISHTQKATLVCLATGFYPDHVELSWWVNGKEVHSGVCTDPQPLKEQPALNDSRYCLSSRLRVSATFWQNPRNHFRCQVQFYGLSENDEWTQDRAKPVTQIVSAEAWGRADCDVKLVEKSFETDTNLNFQNLSVIGFRILLLKVAGFNLLMTLRLWSS

SEQ ID NO: 18396 - protein, 175 aa, synthetic construct
LKNVFPPEVAVFEPSEAEISHTQKATLVCLATGFYPDHVELSWWVNGKEVHSGVCTDPQPLKEQPALNDSRYCLSSRLRVSATFWQNPRNHFRCQVQFYGLSENDEWTQDRAKPVTQIVSAEAWGRADCDVKLVEKSFETDTNLNFQNLSVIGFRILLLKVAGFNLLMTLRLWSS

SEQ ID NO: 18397 - protein, 174 aa, synthetic construct
KNVFPPEVAVFEPSEAEISHTQKATLVCLATGFYPDHVELSWWVNGKEVHSGVCTDPQPLKEQPALNDSRYCLSSRLRVSATFWQNPRNHFRCQVQFYGLSENDEWTQDRAKPVTQIVSAEAWGRADCDVKLVEKSFETDTNLNFQNLSVIGFRILLLKVAGFNLLMTLRLWSS

SEQ ID NO: 18398 - protein, 173 aa, synthetic construct
NVFPPEVAVFEPSEAEISHTQKATLVCLATGFYPDHVELSWWVNGKEVHSGVCTDPQPLKEQPALNDSRYCLSSRLRVSATFWQNPRNHFRCQVQFYGLSENDEWTQDRAKPVTQIVSAEAWGRADCDVKLVEKSFETDTNLNFQNLSVIGFRILLLKVAGFNLLMTLRLWSS

SEQ ID NO: 18399 - protein, 172 aa, synthetic construct
VFPPEVAVFEPSEAEISHTQKATLVCLATGFYPDHVELSWWVNGKEVHSGVCTDPQPLKEQPALNDSRYCLSSRLRVSATFWQNPRNHFRCQVQFYGLSENDEWTQDRAKPVTQIVSAEAWGRADCDVKLVEKSFETDTNLNFQNLSVIGFRILLLKVAGFNLLMTLRLWSS

SEQ ID NO: 18400 - protein, 171 aa, synthetic construct
FPPEVAVFEPSEAEISHTQKATLVCLATGFYPDHVELSWWVNGKEVHSGVCTDPQPLKEQPALNDSRYCLSSRLRVSATFWQNPRNHFRCQVQFYGLSENDEWTQDRAKPVTQIVSAEAWGRADCDVKLVEKSFETDTNLNFQNLSVIGFRILLLKVAGFNLLMTLRLWSS

SEQ ID NO: 18401 - protein, 170 aa, synthetic construct
PPEVAVFEPSEAEISHTQKATLVCLATGFYPDHVELSWWVNGKEVHSGVCTDPQPLKEQPALNDSRYCLSSRLRVSATFWQNPRNHFRCQVQFYGLSENDEWTQDRAKPVTQIVSAEAWGRADCDVKLVEKSFETDTNLNFQNLSVIGFRILLLKVAGFNLLMTLRLWSS

SEQ ID NO: 18402 - protein, 169 aa, synthetic construct
PEVAVFEPSEAEISHTQKATLVCLATGFYPDHVELSWWVNGKEVHSGVCTDPQPLKEQPALNDSRYCLSSRLRVSATFWQNPRNHFRCQVQFYGLSENDEWTQDRAKPVTQIVSAEAWGRADCDVKLVEKSFETDTNLNFQNLSVIGFRILLLKVAGFNLLMTLRLWSS

SEQ ID NO: 18403 - protein, 168 aa, synthetic construct
EVAVFEPSEAEISHTQKATLVCLATGFYPDHVELSWWVNGKEVHSGVCTDPQPLKEQPALNDSRYCLSSRLRVSATFWQNPRNHFRCQVQFYGLSENDEWTQDRAKPVTQIVSAEAWGRADCDVKLVEKSFETDTNLNFQNLSVIGFRILLLKVAGFNLLMTLRLWSS

SEQ ID NO: 18404 - protein, 167 aa, synthetic construct
VAVFEPSEAEISHTQKATLVCLATGFYPDHVELSWWVNGKEVHSGVCTDPQPLKEQPALNDSRYCLSSRLRVSATFWQNPRNHFRCQVQFYGLSENDEWTQDRAKPVTQIVSAEAWGRADCDVKLVEKSFETDTNLNFQNLSVIGFRILLLKVAGFNLLMTLRLWSS

SEQ ID NO: 18405 - protein, 166 aa, synthetic construct
AVFEPSEAEISHTQKATLVCLATGFYPDHVELSWWVNGKEVHSGVCTDPQPLKEQPALNDSRYCLSSRLRVSATFWQNPRNHFRCQVQFYGLSENDEWTQDRAKPVTQIVSAEAWGRADCDVKLVEKSFETDTNLNFQNLSVIGFRILLLKVAGFNLLMTLRLWSS

SEQ ID NO: 18406 - protein, 165 aa, synthetic construct
VFEPSEAEISHTQKATLVCLATGFYPDHVELSWWVNGKEVHSGVCTDPQPLKEQPALNDSRYCLSSRLRVSATFWQNPRNHFRCQVQFYGLSENDEWTQDRAKPVTQIVSAEAWGRADCDVKLVEKSFETDTNLNFQNLSVIGFRILLLKVAGFNLLMTLRLWSS

SEQ ID NO: 18407 - protein, 164 aa, synthetic construct
FEPSEAEISHTQKATLVCLATGFYPDHVELSWWVNGKEVHSGVCTDPQPLKEQPALNDSRYCLSSRLRVSATFWQNPRNHFRCQVQFYGLSENDEWTQDRAKPVTQIVSAEAWGRADCDVKLVEKSFETDTNLNFQNLSVIGFRILLLKVAGFNLLMTLRLWSS

SEQ ID NO: 18408 - protein, 163 aa, synthetic construct
EPSEAEISHTQKATLVCLATGFYPDHVELSWWVNGKEVHSGVCTDPQPLKEQPALNDSRYCLSSRLRVSATFWQNPRNHFRCQVQFYGLSENDEWTQDRAKPVTQIVSAEAWGRADCDVKLVEKSFETDTNLNFQNLSVIGFRILLLKVAGFNLLMTLRLWSS

SEQ ID NO: 18409 - protein, 162 aa, synthetic construct
PSEAEISHTQKATLVCLATGFYPDHVELSWWVNGKEVHSGVCTDPQPLKEQPALNDSRYCLSSRLRVSATFWQNPRNHFRCQVQFYGLSENDEWTQDRAKPVTQIVSAEAWGRADCDVKLVEKSFETDTNLNFQNLSVIGFRILLLKVAGFNLLMTLRLWSS

SEQ ID NO: 18410 - protein, 161 aa, synthetic construct
SEAEISHTQKATLVCLATGFYPDHVELSWWVNGKEVHSGVCTDPQPLKEQPALNDSRYCLSSRLRVSATFWQNPRNHFRCQVQFYGLSENDEWTQDRAKPVTQIVSAEAWGRADCDVKLVEKSFETDTNLNFQNLSVIGFRILLLKVAGFNLLMTLRLWSS

SEQ ID NO: 18411 - protein, 160 aa, synthetic construct
EAEISHTQKATLVCLATGFYPDHVELSWWVNGKEVHSGVCTDPQPLKEQPALNDSRYCLSSRLRVSATFWQNPRNHFRCQVQFYGLSENDEWTQDRAKPVTQIVSAEAWGRADCDVKLVEKSFETDTNLNFQNLSVIGFRILLLKVAGFNLLMTLRLWSS

SEQ ID NO: 18412 - protein, 159 aa, synthetic construct
AEISHTQKATLVCLATGFYPDHVELSWWVNGKEVHSGVCTDPQPLKEQPALNDSRYCLSSRLRVSATFWQNPRNHFRCQVQFYGLSENDEWTQDRAKPVTQIVSAEAWGRADCDVKLVEKSFETDTNLNFQNLSVIGFRILLLKVAGFNLLMTLRLWSS

SEQ ID NO: 18413 - protein, 158 aa, synthetic construct
EISHTQKATLVCLATGFYPDHVELSWWVNGKEVHSGVCTDPQPLKEQPALNDSRYCLSSRLRVSATFWQNPRNHFRCQVQFYGLSENDEWTQDRAKPVTQIVSAEAWGRADCDVKLVEKSFETDTNLNFQNLSVIGFRILLLKVAGFNLLMTLRLWSS

SEQ ID NO: 18414 - protein, 157 aa, synthetic construct
ISHTQKATLVCLATGFYPDHVELSWWVNGKEVHSGVCTDPQPLKEQPALNDSRYCLSSRLRVSATFWQNPRNHFRCQVQFYGLSENDEWTQDRAKPVTQIVSAEAWGRADCDVKLVEKSFETDTNLNFQNLSVIGFRILLLKVAGFNLLMTLRLWSS

SEQ ID NO: 18415 - protein, 156 aa, synthetic construct
SHTQKATLVCLATGFYPDHVELSWWVNGKEVHSGVCTDPQPLKEQPALNDSRYCLSSRLRVSATFWQNPRNHFRCQVQFYGLSENDEWTQDRAKPVTQIVSAEAWGRADCDVKLVEKSFETDTNLNFQNLSVIGFRILLLKVAGFNLLMTLRLWSS

SEQ ID NO: 18416 - protein, 151 aa, synthetic construct
ATLVCLATGFYPDHVELSWWVNGKEVHSGVCTDPQPLKEQPALNDSRYCLSSRLRVSATFWQNPRNHFRCQVQFYGLSENDEWTQDRAKPVTQIVSAEAWGRADCDVKLVEKSFETDTNLNFQNLSVIGFRILLLKVAGFNLLMTLRLWSS

SEQ ID NO: 18417 - protein, 146 aa, synthetic construct
LATGFYPDHVELSWWVNGKEVHSGVCTDPQPLKEQPALNDSRYCLSSRLRVSATFWQNPRNHFRCQVQFYGLSENDEWTQDRAKPVTQIVSAEAWGRADCDVKLVEKSFETDTNLNFQNLSVIGFRILLLKVAGFNLLMTLRLWSS

SEQ ID NO: 18418 - protein, 173 aa, synthetic construct
DLKNVFPPEVAVFEPSEAEISHTQKATLVCLATGFYPDHVELSWWVNGKEVHSGVCTDPQPLKEQPALNDSRYCLSSRLRVSATFWQNPRNHFRCQVQFYGLSENDEWTQDRAKPVTQIVSAEAWGRADCGFTSESYQQGVLSATNLSVIGFRILLLKVAGFNLLMTLRLWSS

SEQ ID NO: 18419 - protein, 172 aa, synthetic construct
LKNVFPPEVAVFEPSEAEISHTQKATLVCLATGFYPDHVELSWWVNGKEVHSGVCTDPQPLKEQPALNDSRYCLSSRLRVSATFWQNPRNHFRCQVQFYGLSENDEWTQDRAKPVTQIVSAEAWGRADCGFTSESYQQGVLSATNLSVIGFRILLLKVAGFNLLMTLRLWSS

SEQ ID NO: 18420 - protein, 171 aa, synthetic construct
KNVFPPEVAVFEPSEAEISHTQKATLVCLATGFYPDHVELSWWVNGKEVHSGVCTDPQPLKEQPALNDSRYCLSSRLRVSATFWQNPRNHFRCQVQFYGLSENDEWTQDRAKPVTQIVSAEAWGRADCGFTSESYQQGVLSATNLSVIGFRILLLKVAGFNLLMTLRLWSS

SEQ ID NO: 18421 - protein, 170 aa, synthetic construct
NVFPPEVAVFEPSEAEISHTQKATLVCLATGFYPDHVELSWWVNGKEVHSGVCTDPQPLKEQPALNDSRYCLSSRLRVSATFWQNPRNHFRCQVQFYGLSENDEWTQDRAKPVTQIVSAEAWGRADCGFTSESYQQGVLSATNLSVIGFRILLLKVAGFNLLMTLRLWSS

SEQ ID NO: 18422 - protein, 169 aa, synthetic construct
VFPPEVAVFEPSEAEISHTQKATLVCLATGFYPDHVELSWWVNGKEVHSGVCTDPQPLKEQPALNDSRYCLSSRLRVSATFWQNPRNHFRCQVQFYGLSENDEWTQDRAKPVTQIVSAEAWGRADCGFTSESYQQGVLSATNLSVIGFRILLLKVAGFNLLMTLRLWSS

SEQ ID NO: 18423 - protein, 168 aa, synthetic construct
FPPEVAVFEPSEAEISHTQKATLVCLATGFYPDHVELSWWVNGKEVHSGVCTDPQPLKEQPALNDSRYCLSSRLRVSATFWQNPRNHFRCQVQFYGLSENDEWTQDRAKPVTQIVSAEAWGRADCGFTSESYQQGVLSATNLSVIGFRILLLKVAGFNLLMTLRLWSS

SEQ ID NO: 18424 - protein, 167 aa, synthetic construct
PPEVAVFEPSEAEISHTQKATLVCLATGFYPDHVELSWWVNGKEVHSGVCTDPQPLKEQPALNDSRYCLSSRLRVSATFWQNPRNHFRCQVQFYGLSENDEWTQDRAKPVTQIVSAEAWGRADCGFTSESYQQGVLSATNLSVIGFRILLLKVAGFNLLMTLRLWSS

SEQ ID NO: 18425 - protein, 166 aa, synthetic construct
PEVAVFEPSEAEISHTQKATLVCLATGFYPDHVELSWWVNGKEVHSGVCTDPQPLKEQPALNDSRYCLSSRLRVSATFWQNPRNHFRCQVQFYGLSENDEWTQDRAKPVTQIVSAEAWGRADCGFTSESYQQGVLSATNLSVIGFRILLLKVAGFNLLMTLRLWSS

SEQ ID NO: 18426 - protein, 165 aa, synthetic construct
EVAVFEPSEAEISHTQKATLVCLATGFYPDHVELSWWVNGKEVHSGVCTDPQPLKEQPALNDSRYCLSSRLRVSATFWQNPRNHFRCQVQFYGLSENDEWTQDRAKPVTQIVSAEAWGRADCGFTSESYQQGVLSATNLSVIGFRILLLKVAGFNLLMTLRLWSS

SEQ ID NO: 18427 - protein, 164 aa, synthetic construct
VAVFEPSEAEISHTQKATLVCLATGFYPDHVELSWWVNGKEVHSGVCTDPQPLKEQPALNDSRYCLSSRLRVSATFWQNPRNHFRCQVQFYGLSENDEWTQDRAKPVTQIVSAEAWGRADCGFTSESYQQGVLSATNLSVIGFRILLLKVAGFNLLMTLRLWSS

SEQ ID NO: 18428 - protein, 163 aa, synthetic construct
AVFEPSEAEISHTQKATLVCLATGFYPDHVELSWWVNGKEVHSGVCTDPQPLKEQPALNDSRYCLSSRLRVSATFWQNPRNHFRCQVQFYGLSENDEWTQDRAKPVTQIVSAEAWGRADCGFTSESYQQGVLSATNLSVIGFRILLLKVAGFNLLMTLRLWSS

SEQ ID NO: 18429 - protein, 162 aa, synthetic construct
VFEPSEAEISHTQKATLVCLATGFYPDHVELSWWVNGKEVHSGVCTDPQPLKEQPALNDSRYCLSSRLRVSATFWQNPRNHFRCQVQFYGLSENDEWTQDRAKPVTQIVSAEAWGRADCGFTSESYQQGVLSATNLSVIGFRILLLKVAGFNLLMTLRLWSS

SEQ ID NO: 18430 - protein, 161 aa, synthetic construct
FEPSEAEISHTQKATLVCLATGFYPDHVELSWWVNGKEVHSGVCTDPQPLKEQPALNDSRYCLSSRLRVSATFWQNPRNHFRCQVQFYGLSENDEWTQDRAKPVTQIVSAEAWGRADCGFTSESYQQGVLSATNLSVIGFRILLLKVAGFNLLMTLRLWSS

SEQ ID NO: 18431 - protein, 160 aa, synthetic construct
EPSEAEISHTQKATLVCLATGFYPDHVELSWWVNGKEVHSGVCTDPQPLKEQPALNDSRYCLSSRLRVSATFWQNPRNHFRCQVQFYGLSENDEWTQDRAKPVTQIVSAEAWGRADCGFTSESYQQGVLSATNLSVIGFRILLLKVAGFNLLMTLRLWSS

SEQ ID NO: 18432 - protein, 159 aa, synthetic construct
PSEAEISHTQKATLVCLATGFYPDHVELSWWVNGKEVHSGVCTDPQPLKEQPALNDSRYCLSSRLRVSATFWQNPRNHFRCQVQFYGLSENDEWTQDRAKPVTQIVSAEAWGRADCGFTSESYQQGVLSATNLSVIGFRILLLKVAGFNLLMTLRLWSS

SEQ ID NO: 18433 - protein, 158 aa, synthetic construct
SEAEISHTQKATLVCLATGFYPDHVELSWWVNGKEVHSGVCTDPQPLKEQPALNDSRYCLSSRLRVSATFWQNPRNHFRCQVQFYGLSENDEWTQDRAKPVTQIVSAEAWGRADCGFTSESYQQGVLSATNLSVIGFRILLLKVAGFNLLMTLRLWSS

SEQ ID NO: 18434 - protein, 157 aa, synthetic construct
EAEISHTQKATLVCLATGFYPDHVELSWWVNGKEVHSGVCTDPQPLKEQPALNDSRYCLSSRLRVSATFWQNPRNHFRCQVQFYGLSENDEWTQDRAKPVTQIVSAEAWGRADCGFTSESYQQGVLSATNLSVIGFRILLLKVAGFNLLMTLRLWSS

SEQ ID NO: 18435 - protein, 156 aa, synthetic construct
AEISHTQKATLVCLATGFYPDHVELSWWVNGKEVHSGVCTDPQPLKEQPALNDSRYCLSSRLRVSATFWQNPRNHFRCQVQFYGLSENDEWTQDRAKPVTQIVSAEAWGRADCGFTSESYQQGVLSATNLSVIGFRILLLKVAGFNLLMTLRLWSS

SEQ ID NO: 18436 - protein, 155 aa, synthetic construct
EISHTQKATLVCLATGFYPDHVELSWWVNGKEVHSGVCTDPQPLKEQPALNDSRYCLSSRLRVSATFWQNPRNHFRCQVQFYGLSENDEWTQDRAKPVTQIVSAEAWGRADCGFTSESYQQGVLSATNLSVIGFRILLLKVAGFNLLMTLRLWSS

SEQ ID NO: 18437 - protein, 154 aa, synthetic construct
ISHTQKATLVCLATGFYPDHVELSWWVNGKEVHSGVCTDPQPLKEQPALNDSRYCLSSRLRVSATFWQNPRNHFRCQVQFYGLSENDEWTQDRAKPVTQIVSAEAWGRADCGFTSESYQQGVLSATNLSVIGFRILLLKVAGFNLLMTLRLWSS

SEQ ID NO: 18438 - protein, 153 aa, synthetic construct
SHTQKATLVCLATGFYPDHVELSWWVNGKEVHSGVCTDPQPLKEQPALNDSRYCLSSRLRVSATFWQNPRNHFRCQVQFYGLSENDEWTQDRAKPVTQIVSAEAWGRADCGFTSESYQQGVLSATNLSVIGFRILLLKVAGFNLLMTLRLWSS

SEQ ID NO: 18439 - protein, 148 aa, synthetic construct
ATLVCLATGFYPDHVELSWWVNGKEVHSGVCTDPQPLKEQPALNDSRYCLSSRLRVSATFWQNPRNHFRCQVQFYGLSENDEWTQDRAKPVTQIVSAEAWGRADCGFTSESYQQGVLSATNLSVIGFRILLLKVAGFNLLMTLRLWSS

SEQ ID NO: 18440 - protein, 143 aa, synthetic construct
LATGFYPDHVELSWWVNGKEVHSGVCTDPQPLKEQPALNDSRYCLSSRLRVSATFWQNPRNHFRCQVQFYGLSENDEWTQDRAKPVTQIVSAEAWGRADCGFTSESYQQGVLSATNLSVIGFRILLLKVAGFNLLMTLRLWSS

SEQ ID NO: 18441 - protein, 262 aa, synthetic construct
DLKNVFPPEVAVFEPSEAEISHTQKATLVCLATGFYPDHVELSWWVNGKEVHSGVCTDPQPLKEQPALNDSRYCLSSRLRVSATFWQNPRNHFRCQVQFYGLSENDEWTQDRAKPVTQIVSAEAWGRADDVIKIHWQEKKSNTILGSQEGNTMKTNDTYMKFSWLTVPEKSLDKEHRCIVRHENNKNGVDQEIIFPPIKTDVITMDPKDNCSKDANDTLLLQLTNTSAYYMYLLLLLKSVVYFAIITCCLLMAMVKRKDSRG

SEQ ID NO: 18442 - protein, 261 aa, synthetic construct
LKNVFPPEVAVFEPSEAEISHTQKATLVCLATGFYPDHVELSWWVNGKEVHSGVCTDPQPLKEQPALNDSRYCLSSRLRVSATFWQNPRNHFRCQVQFYGLSENDEWTQDRAKPVTQIVSAEAWGRADDVIKIHWQEKKSNTILGSQEGNTMKTNDTYMKFSWLTVPEKSLDKEHRCIVRHENNKNGVDQEIIFPPIKTDVITMDPKDNCSKDANDTLLLQLTNTSAYYMYLLLLLKSVVYFAIITCCLLMAMVKRKDSRG

SEQ ID NO: 18443 - protein, 260 aa, synthetic construct
KNVFPPEVAVFEPSEAEISHTQKATLVCLATGFYPDHVELSWWVNGKEVHSGVCTDPQPLKEQPALNDSRYCLSSRLRVSATFWQNPRNHFRCQVQFYGLSENDEWTQDRAKPVTQIVSAEAWGRADDVIKIHWQEKKSNTILGSQEGNTMKTNDTYMKFSWLTVPEKSLDKEHRCIVRHENNKNGVDQEIIFPPIKTDVITMDPKDNCSKDANDTLLLQLTNTSAYYMYLLLLLKSVVYFAIITCCLLMAMVKRKDSRG

SEQ ID NO: 18444 - protein, 259 aa, synthetic construct
NVFPPEVAVFEPSEAEISHTQKATLVCLATGFYPDHVELSWWVNGKEVHSGVCTDPQPLKEQPALNDSRYCLSSRLRVSATFWQNPRNHFRCQVQFYGLSENDEWTQDRAKPVTQIVSAEAWGRADDVIKIHWQEKKSNTILGSQEGNTMKTNDTYMKFSWLTVPEKSLDKEHRCIVRHENNKNGVDQEIIFPPIKTDVITMDPKDNCSKDANDTLLLQLTNTSAYYMYLLLLLKSVVYFAIITCCLLMAMVKRKDSRG

SEQ ID NO: 18445 - protein, 258 aa, synthetic construct
VFPPEVAVFEPSEAEISHTQKATLVCLATGFYPDHVELSWWVNGKEVHSGVCTDPQPLKEQPALNDSRYCLSSRLRVSATFWQNPRNHFRCQVQFYGLSENDEWTQDRAKPVTQIVSAEAWGRADDVIKIHWQEKKSNTILGSQEGNTMKTNDTYMKFSWLTVPEKSLDKEHRCIVRHENNKNGVDQEIIFPPIKTDVITMDPKDNCSKDANDTLLLQLTNTSAYYMYLLLLLKSVVYFAIITCCLLMAMVKRKDSRG

SEQ ID NO: 18446 - protein, 257 aa, synthetic construct
FPPEVAVFEPSEAEISHTQKATLVCLATGFYPDHVELSWWVNGKEVHSGVCTDPQPLKEQPALNDSRYCLSSRLRVSATFWQNPRNHFRCQVQFYGLSENDEWTQDRAKPVTQIVSAEAWGRADDVIKIHWQEKKSNTILGSQEGNTMKTNDTYMKFSWLTVPEKSLDKEHRCIVRHENNKNGVDQEIIFPPIKTDVITMDPKDNCSKDANDTLLLQLTNTSAYYMYLLLLLKSVVYFAIITCCLLMAMVKRKDSRG

SEQ ID NO: 18447 - protein, 256 aa, synthetic construct
PPEVAVFEPSEAEISHTQKATLVCLATGFYPDHVELSWWVNGKEVHSGVCTDPQPLKEQPALNDSRYCLSSRLRVSATFWQNPRNHFRCQVQFYGLSENDEWTQDRAKPVTQIVSAEAWGRADDVIKIHWQEKKSNTILGSQEGNTMKTNDTYMKFSWLTVPEKSLDKEHRCIVRHENNKNGVDQEIIFPPIKTDVITMDPKDNCSKDANDTLLLQLTNTSAYYMYLLLLLKSVVYFAIITCCLLMAMVKRKDSRG

SEQ ID NO: 18448 - protein, 255 aa, synthetic construct
PEVAVFEPSEAEISHTQKATLVCLATGFYPDHVELSWWVNGKEVHSGVCTDPQPLKEQPALNDSRYCLSSRLRVSATFWQNPRNHFRCQVQFYGLSENDEWTQDRAKPVTQIVSAEAWGRADDVIKIHWQEKKSNTILGSQEGNTMKTNDTYMKFSWLTVPEKSLDKEHRCIVRHENNKNGVDQEIIFPPIKTDVITMDPKDNCSKDANDTLLLQLTNTSAYYMYLLLLLKSVVYFAIITCCLLMAMVKRKDSRG

SEQ ID NO: 18449 - protein, 254 aa, synthetic construct
EVAVFEPSEAEISHTQKATLVCLATGFYPDHVELSWWVNGKEVHSGVCTDPQPLKEQPALNDSRYCLSSRLRVSATFWQNPRNHFRCQVQFYGLSENDEWTQDRAKPVTQIVSAEAWGRADDVIKIHWQEKKSNTILGSQEGNTMKTNDTYMKFSWLTVPEKSLDKEHRCIVRHENNKNGVDQEIIFPPIKTDVITMDPKDNCSKDANDTLLLQLTNTSAYYMYLLLLLKSVVYFAIITCCLLMAMVKRKDSRG

SEQ ID NO: 18450 - protein, 253 aa, synthetic construct
VAVFEPSEAEISHTQKATLVCLATGFYPDHVELSWWVNGKEVHSGVCTDPQPLKEQPALNDSRYCLSSRLRVSATFWQNPRNHFRCQVQFYGLSENDEWTQDRAKPVTQIVSAEAWGRADDVIKIHWQEKKSNTILGSQEGNTMKTNDTYMKFSWLTVPEKSLDKEHRCIVRHENNKNGVDQEIIFPPIKTDVITMDPKDNCSKDANDTLLLQLTNTSAYYMYLLLLLKSVVYFAIITCCLLMAMVKRKDSRG

SEQ ID NO: 18451 - protein, 252 aa, synthetic construct
AVFEPSEAEISHTQKATLVCLATGFYPDHVELSWWVNGKEVHSGVCTDPQPLKEQPALNDSRYCLSSRLRVSATFWQNPRNHFRCQVQFYGLSENDEWTQDRAKPVTQIVSAEAWGRADDVIKIHWQEKKSNTILGSQEGNTMKTNDTYMKFSWLTVPEKSLDKEHRCIVRHENNKNGVDQEIIFPPIKTDVITMDPKDNCSKDANDTLLLQLTNTSAYYMYLLLLLKSVVYFAIITCCLLMAMVKRKDSRG

SEQ ID NO: 18452 - protein, 264 aa, synthetic construct; identical to SEQ ID NO: 8922

SEQ ID NO: 18453 - protein, 263 aa, synthetic construct
DLKNVFPPEVAVFEPSEAEISHTQKATLVCLATGFYPDHVELSWWVNGKEVHSGVCTDPQPLKEQPALNDSRYCLSSRLRVSATFWQNPRNHFRCQVQFYGLSENDEWTQDRAKPVTQIVSAEAWGRADDVIKIHWQEKKSNTILGSQEGNTMKTNDTYMKFSWLTVPEKSLDKEHRCIVRHENNKNGVDQEIIFPPIKTDVITMDPKDNCSKDANDTLLLQLTNTSAYYMYLLLLLKSVVYFAIITCCLLRRTAFCCNGEKS

SEQ ID NO: 18454 - protein, 262 aa, synthetic construct
LKNVFPPEVAVFEPSEAEISHTQKATLVCLATGFYPDHVELSWWVNGKEVHSGVCTDPQPLKEQPALNDSRYCLSSRLRVSATFWQNPRNHFRCQVQFYGLSENDEWTQDRAKPVTQIVSAEAWGRADDVIKIHWQEKKSNTILGSQEGNTMKTNDTYMKFSWLTVPEKSLDKEHRCIVRHENNKNGVDQEIIFPPIKTDVITMDPKDNCSKDANDTLLLQLTNTSAYYMYLLLLLKSVVYFAIITCCLLRRTAFCCNGEKS

SEQ ID NO: 18455 - protein, 261 aa, synthetic construct
KNVFPPEVAVFEPSEAEISHTQKATLVCLATGFYPDHVELSWWVNGKEVHSGVCTDPQPLKEQPALNDSRYCLSSRLRVSATFWQNPRNHFRCQVQFYGLSENDEWTQDRAKPVTQIVSAEAWGRADDVIKIHWQEKKSNTILGSQEGNTMKTNDTYMKFSWLTVPEKSLDKEHRCIVRHENNKNGVDQEIIFPPIKTDVITMDPKDNCSKDANDTLLLQLTNTSAYYMYLLLLLKSVVYFAIITCCLLRRTAFCCNGEKS

SEQ ID NO: 18456 - protein, 260 aa, synthetic construct
NVFPPEVAVFEPSEAEISHTQKATLVCLATGFYPDHVELSWWVNGKEVHSGVCTDPQPLKEQPALNDSRYCLSSRLRVSATFWQNPRNHFRCQVQFYGLSENDEWTQDRAKPVTQIVSAEAWGRADDVIKIHWQEKKSNTILGSQEGNTMKTNDTYMKFSWLTVPEKSLDKEHRCIVRHENNKNGVDQEIIFPPIKTDVITMDPKDNCSKDANDTLLLQLTNTSAYYMYLLLLLKSVVYFAIITCCLLRRTAFCCNGEKS

SEQ ID NO: 18457 - protein, 259 aa, synthetic construct
VFPPEVAVFEPSEAEISHTQKATLVCLATGFYPDHVELSWWVNGKEVHSGVCTDPQPLKEQPALNDSRYCLSSRLRVSATFWQNPRNHFRCQVQFYGLSENDEWTQDRAKPVTQIVSAEAWGRADDVIKIHWQEKKSNTILGSQEGNTMKTNDTYMKFSWLTVPEKSLDKEHRCIVRHENNKNGVDQEIIFPPIKTDVITMDPKDNCSKDANDTLLLQLTNTSAYYMYLLLLLKSVVYFAIITCCLLRRTAFCCNGEKS

SEQ ID NO: 18458 - protein, 258 aa, synthetic construct
FPPEVAVFEPSEAEISHTQKATLVCLATGFYPDHVELSWWVNGKEVHSGVCTDPQPLKEQPALNDSRYCLSSRLRVSATFWQNPRNHFRCQVQFYGLSENDEWTQDRAKPVTQIVSAEAWGRADDVIKIHWQEKKSNTILGSQEGNTMKTNDTYMKFSWLTVPEKSLDKEHRCIVRHENNKNGVDQEIIFPPIKTDVITMDPKDNCSKDANDTLLLQLTNTSAYYMYLLLLLKSVVYFAIITCCLLRRTAFCCNGEKS

SEQ ID NO: 18459 - protein, 257 aa, synthetic construct
PPEVAVFEPSEAEISHTQKATLVCLATGFYPDHVELSWWVNGKEVHSGVCTDPQPLKEQPALNDSRYCLSSRLRVSATFWQNPRNHFRCQVQFYGLSENDEWTQDRAKPVTQIVSAEAWGRADDVIKIHWQEKKSNTILGSQEGNTMKTNDTYMKFSWLTVPEKSLDKEHRCIVRHENNKNGVDQEIIFPPIKTDVITMDPKDNCSKDANDTLLLQLTNTSAYYMYLLLLLKSVVYFAIITCCLLRRTAFCCNGEKS

SEQ ID NO: 18460 - protein, 256 aa, synthetic construct
PEVAVFEPSEAEISHTQKATLVCLATGFYPDHVELSWWVNGKEVHSGVCTDPQPLKEQPALNDSRYCLSSRLRVSATFWQNPRNHFRCQVQFYGLSENDEWTQDRAKPVTQIVSAEAWGRADDVIKIHWQEKKSNTILGSQEGNTMKTNDTYMKFSWLTVPEKSLDKEHRCIVRHENNKNGVDQEIIFPPIKTDVITMDPKDNCSKDANDTLLLQLTNTSAYYMYLLLLLKSVVYFAIITCCLLRRTAFCCNGEKS

SEQ ID NO: 18461 - protein, 255 aa, synthetic construct
EVAVFEPSEAEISHTQKATLVCLATGFYPDHVELSWWVNGKEVHSGVCTDPQPLKEQPALNDSRYCLSSRLRVSATFWQNPRNHFRCQVQFYGLSENDEWTQDRAKPVTQIVSAEAWGRADDVIKIHWQEKKSNTILGSQEGNTMKTNDTYMKFSWLTVPEKSLDKEHRCIVRHENNKNGVDQEIIFPPIKTDVITMDPKDNCSKDANDTLLLQLTNTSAYYMYLLLLLKSVVYFAIITCCLLRRTAFCCNGEKS

SEQ ID NO: 18462 - protein, 254 aa, synthetic construct
VAVFEPSEAEISHTQKATLVCLATGFYPDHVELSWWVNGKEVHSGVCTDPQPLKEQPALNDSRYCLSSRLRVSATFWQNPRNHFRCQVQFYGLSENDEWTQDRAKPVTQIVSAEAWGRADDVIKIHWQEKKSNTILGSQEGNTMKTNDTYMKFSWLTVPEKSLDKEHRCIVRHENNKNGVDQEIIFPPIKTDVITMDPKDNCSKDANDTLLLQLTNTSAYYMYLLLLLKSVVYFAIITCCLLRRTAFCCNGEKS

SEQ ID NO: 18463 - protein, 174 aa, synthetic construct; identical to SEQ ID NO: 8911

SEQ ID NO: 18464 - protein, 173 aa, synthetic construct; identical to SEQ ID NO: 18418

SEQ ID NO: 18465 - protein, 172 aa, synthetic construct; identical to SEQ ID NO: 18419

SEQ ID NO: 18466 - protein, 171 aa, synthetic construct; identical to SEQ ID NO: 18420

SEQ ID NO: 18467 - protein, 170 aa, synthetic construct; identical to SEQ ID NO: 18421

SEQ ID NO: 18468 - protein, 169 aa, synthetic construct; identical to SEQ ID NO: 18422

SEQ ID NO: 18469 - protein, 168 aa, synthetic construct; identical to SEQ ID NO: 18423

SEQ ID NO: 18470 - protein, 167 aa, synthetic construct; identical to SEQ ID NO: 18424

SEQ ID NO: 18471 - protein, 166 aa, synthetic construct; identical to SEQ ID NO: 18425

SEQ ID NO: 18472 - protein, 165 aa, synthetic construct; identical to SEQ ID NO: 18426

SEQ ID NO: 18473 - protein, 164 aa, synthetic construct; identical to SEQ ID NO: 18427

SEQ ID NO: 18474 - protein, 170 aa, synthetic construct
ASTKGPSVFPLAPSSKSTSGGTAALGCLVKDYFPEPVTVSWNSGALTSGVHTFPAVLQSSGLYSLSSVVTVPSSSLGTQTYICNVNHKPSNTKVDKRVEPKSCPIKTDVITMDPKDNCSKDANDTLLLQLTNTSAYYMYLLLLLKSVVYFAIITCCLLRRTAFCCNGEKS

SEQ ID NO: 18475 - protein, 169 aa, synthetic construct
STKGPSVFPLAPSSKSTSGGTAALGCLVKDYFPEPVTVSWNSGALTSGVHTFPAVLQSSGLYSLSSVVTVPSSSLGTQTYICNVNHKPSNTKVDKRVEPKSCPIKTDVITMDPKDNCSKDANDTLLLQLTNTSAYYMYLLLLLKSVVYFAIITCCLLRRTAFCCNGEKS

SEQ ID NO: 18476 - protein, 168 aa, synthetic construct
TKGPSVFPLAPSSKSTSGGTAALGCLVKDYFPEPVTVSWNSGALTSGVHTFPAVLQSSGLYSLSSVVTVPSSSLGTQTYICNVNHKPSNTKVDKRVEPKSCPIKTDVITMDPKDNCSKDANDTLLLQLTNTSAYYMYLLLLLKSVVYFAIITCCLLRRTAFCCNGEKS

SEQ ID NO: 18477 - protein, 167 aa, synthetic construct
KGPSVFPLAPSSKSTSGGTAALGCLVKDYFPEPVTVSWNSGALTSGVHTFPAVLQSSGLYSLSSVVTVPSSSLGTQTYICNVNHKPSNTKVDKRVEPKSCPIKTDVITMDPKDNCSKDANDTLLLQLTNTSAYYMYLLLLLKSVVYFAIITCCLLRRTAFCCNGEKS

SEQ ID NO: 18478 - protein, 166 aa, synthetic construct
GPSVFPLAPSSKSTSGGTAALGCLVKDYFPEPVTVSWNSGALTSGVHTFPAVLQSSGLYSLSSVVTVPSSSLGTQTYICNVNHKPSNTKVDKRVEPKSCPIKTDVITMDPKDNCSKDANDTLLLQLTNTSAYYMYLLLLLKSVVYFAIITCCLLRRTAFCCNGEKS

SEQ ID NO: 18479 - protein, 165 aa, synthetic construct
PSVFPLAPSSKSTSGGTAALGCLVKDYFPEPVTVSWNSGALTSGVHTFPAVLQSSGLYSLSSVVTVPSSSLGTQTYICNVNHKPSNTKVDKRVEPKSCPIKTDVITMDPKDNCSKDANDTLLLQLTNTSAYYMYLLLLLKSVVYFAIITCCLLRRTAFCCNGEKS

SEQ ID NO: 18480 - protein, 164 aa, synthetic construct
SVFPLAPSSKSTSGGTAALGCLVKDYFPEPVTVSWNSGALTSGVHTFPAVLQSSGLYSLSSVVTVPSSSLGTQTYICNVNHKPSNTKVDKRVEPKSCPIKTDVITMDPKDNCSKDANDTLLLQLTNTSAYYMYLLLLLKSVVYFAIITCCLLRRTAFCCNGEKS

SEQ ID NO: 18481 - protein, 163 aa, synthetic construct
VFPLAPSSKSTSGGTAALGCLVKDYFPEPVTVSWNSGALTSGVHTFPAVLQSSGLYSLSSVVTVPSSSLGTQTYICNVNHKPSNTKVDKRVEPKSCPIKTDVITMDPKDNCSKDANDTLLLQLTNTSAYYMYLLLLLKSVVYFAIITCCLLRRTAFCCNGEKS

SEQ ID NO: 18482 - protein, 162 aa, synthetic construct
FPLAPSSKSTSGGTAALGCLVKDYFPEPVTVSWNSGALTSGVHTFPAVLQSSGLYSLSSVVTVPSSSLGTQTYICNVNHKPSNTKVDKRVEPKSCPIKTDVITMDPKDNCSKDANDTLLLQLTNTSAYYMYLLLLLKSVVYFAIITCCLLRRTAFCCNGEKS

SEQ ID NO: 18483 - protein, 161 aa, synthetic construct
PLAPSSKSTSGGTAALGCLVKDYFPEPVTVSWNSGALTSGVHTFPAVLQSSGLYSLSSVVTVPSSSLGTQTYICNVNHKPSNTKVDKRVEPKSCPIKTDVITMDPKDNCSKDANDTLLLQLTNTSAYYMYLLLLLKSVVYFAIITCCLLRRTAFCCNGEKS

SEQ ID NO: 18484 - protein, 160 aa, synthetic construct
LAPSSKSTSGGTAALGCLVKDYFPEPVTVSWNSGALTSGVHTFPAVLQSSGLYSLSSVVTVPSSSLGTQTYICNVNHKPSNTKVDKRVEPKSCPIKTDVITMDPKDNCSKDANDTLLLQLTNTSAYYMYLLLLLKSVVYFAIITCCLLRRTAFCCNGEKS

SEQ ID NO: 18485 - protein, 140 aa, synthetic construct; identical to SEQ ID NO: 8838

SEQ ID NO: 18486 - protein, 139 aa, synthetic construct
QNPDPAVYQLRDSKSSDKSVCLFTDFDSQTNVSQSKDSDVYITDKCVLDMRSMDFKSNSAVAWSNKSDFACANAFNNSIIPEDTFFPSPESSCDVKLVEKSFETDTNLNFQNLSVIGFRILLLKVAGFNLLMTLRLWSS

SEQ ID NO: 18487 - protein, 138 aa, synthetic construct
NPDPAVYQLRDSKSSDKSVCLFTDFDSQTNVSQSKDSDVYITDKCVLDMRSMDFKSNSAVAWSNKSDFACANAFNNSIIPEDTFFPSPESSCDVKLVEKSFETDTNLNFQNLSVIGFRILLLKVAGFNLLMTLRLWSS

SEQ ID NO: 18488 - protein, 137 aa, synthetic construct; identical to SEQ ID NO: 8839

SEQ ID NO: 18489 - protein, 136 aa, synthetic construct
DPAVYQLRDSKSSDKSVCLFTDFDSQTNVSQSKDSDVYITDKCVLDMRSMDFKSNSAVAWSNKSDFACANAFNNSIIPEDTFFPSPESSCDVKLVEKSFETDTNLNFQNLSVIGFRILLLKVAGFNLLMTLRLWSS

SEQ ID NO: 18490 - protein, 135 aa, synthetic construct
PAVYQLRDSKSSDKSVCLFTDFDSQTNVSQSKDSDVYITDKCVLDMRSMDFKSNSAVAWSNKSDFACANAFNNSIIPEDTFFPSPESSCDVKLVEKSFETDTNLNFQNLSVIGFRILLLKVAGFNLLMTLRLWSS

SEQ ID NO: 18491 - protein, 134 aa, synthetic construct
AVYQLRDSKSSDKSVCLFTDFDSQTNVSQSKDSDVYITDKCVLDMRSMDFKSNSAVAWSNKSDFACANAFNNSIIPEDTFFPSPESSCDVKLVEKSFETDTNLNFQNLSVIGFRILLLKVAGFNLLMTLRLWSS

SEQ ID NO: 18492 - protein, 133 aa, synthetic construct
VYQLRDSKSSDKSVCLFTDFDSQTNVSQSKDSDVYITDKCVLDMRSMDFKSNSAVAWSNKSDFACANAFNNSIIPEDTFFPSPESSCDVKLVEKSFETDTNLNFQNLSVIGFRILLLKVAGFNLLMTLRLWSS

SEQ ID NO: 18493 - protein, 132 aa, synthetic construct
YQLRDSKSSDKSVCLFTDFDSQTNVSQSKDSDVYITDKCVLDMRSMDFKSNSAVAWSNKSDFACANAFNNSIIPEDTFFPSPESSCDVKLVEKSFETDTNLNFQNLSVIGFRILLLKVAGFNLLMTLRLWSS

SEQ ID NO: 18494 - protein, 131 aa, synthetic construct
QLRDSKSSDKSVCLFTDFDSQTNVSQSKDSDVYITDKCVLDMRSMDFKSNSAVAWSNKSDFACANAFNNSIIPEDTFFPSPESSCDVKLVEKSFETDTNLNFQNLSVIGFRILLLKVAGFNLLMTLRLWSS

SEQ ID NO: 18495 - protein, 130 aa, synthetic construct
LRDSKSSDKSVCLFTDFDSQTNVSQSKDSDVYITDKCVLDMRSMDFKSNSAVAWSNKSDFACANAFNNSIIPEDTFFPSPESSCDVKLVEKSFETDTNLNFQNLSVIGFRILLLKVAGFNLLMTLRLWSS

SEQ ID NO: 18496 - protein, 129 aa, synthetic construct
RDSKSSDKSVCLFTDFDSQTNVSQSKDSDVYITDKCVLDMRSMDFKSNSAVAWSNKSDFACANAFNNSIIPEDTFFPSPESSCDVKLVEKSFETDTNLNFQNLSVIGFRILLLKVAGFNLLMTLRLWSS

SEQ ID NO: 18497 - protein, 128 aa, synthetic construct
DSKSSDKSVCLFTDFDSQTNVSQSKDSDVYITDKCVLDMRSMDFKSNSAVAWSNKSDFACANAFNNSIIPEDTFFPSPESSCDVKLVEKSFETDTNLNFQNLSVIGFRILLLKVAGFNLLMTLRLWSS

SEQ ID NO: 18498 - protein, 127 aa, synthetic construct
SKSSDKSVCLFTDFDSQTNVSQSKDSDVYITDKCVLDMRSMDFKSNSAVAWSNKSDFACANAFNNSIIPEDTFFPSPESSCDVKLVEKSFETDTNLNFQNLSVIGFRILLLKVAGFNLLMTLRLWSS

SEQ ID NO: 18499 - protein, 126 aa, synthetic construct
KSSDKSVCLFTDFDSQTNVSQSKDSDVYITDKCVLDMRSMDFKSNSAVAWSNKSDFACANAFNNSIIPEDTFFPSPESSCDVKLVEKSFETDTNLNFQNLSVIGFRILLLKVAGFNLLMTLRLWSS

SEQ ID NO: 18500 - protein, 125 aa, synthetic construct
SSDKSVCLFTDFDSQTNVSQSKDSDVYITDKCVLDMRSMDFKSNSAVAWSNKSDFACANAFNNSIIPEDTFFPSPESSCDVKLVEKSFETDTNLNFQNLSVIGFRILLLKVAGFNLLMTLRLWSS

SEQ ID NO: 18501 - protein, 124 aa, synthetic construct
SDKSVCLFTDFDSQTNVSQSKDSDVYITDKCVLDMRSMDFKSNSAVAWSNKSDFACANAFNNSIIPEDTFFPSPESSCDVKLVEKSFETDTNLNFQNLSVIGFRILLLKVAGFNLLMTLRLWSS

SEQ ID NO: 18502 - protein, 123 aa, synthetic construct
DKSVCLFTDFDSQTNVSQSKDSDVYITDKCVLDMRSMDFKSNSAVAWSNKSDFACANAFNNSIIPEDTFFPSPESSCDVKLVEKSFETDTNLNFQNLSVIGFRILLLKVAGFNLLMTLRLWSS

SEQ ID NO: 18503 - protein, 122 aa, synthetic construct
KSVCLFTDFDSQTNVSQSKDSDVYITDKCVLDMRSMDFKSNSAVAWSNKSDFACANAFNNSIIPEDTFFPSPESSCDVKLVEKSFETDTNLNFQNLSVIGFRILLLKVAGFNLLMTLRLWSS

SEQ ID NO: 18504 - protein, 121 aa, synthetic construct
SVCLFTDFDSQTNVSQSKDSDVYITDKCVLDMRSMDFKSNSAVAWSNKSDFACANAFNNSIIPEDTFFPSPESSCDVKLVEKSFETDTNLNFQNLSVIGFRILLLKVAGFNLLMTLRLWSS

SEQ ID NO: 18505 - protein, 120 aa, synthetic construct
VCLFTDFDSQTNVSQSKDSDVYITDKCVLDMRSMDFKSNSAVAWSNKSDFACANAFNNSIIPEDTFFPSPESSCDVKLVEKSFETDTNLNFQNLSVIGFRILLLKVAGFNLLMTLRLWSS

SEQ ID NO: 18506 - protein, 119 aa, synthetic construct
CLFTDFDSQTNVSQSKDSDVYITDKCVLDMRSMDFKSNSAVAWSNKSDFACANAFNNSIIPEDTFFPSPESSCDVKLVEKSFETDTNLNFQNLSVIGFRILLLKVAGFNLLMTLRLWSS

SEQ ID NO: 18507 - protein, 118 aa, synthetic construct
LFTDFDSQTNVSQSKDSDVYITDKCVLDMRSMDFKSNSAVAWSNKSDFACANAFNNSIIPEDTFFPSPESSCDVKLVEKSFETDTNLNFQNLSVIGFRILLLKVAGFNLLMTLRLWSS

SEQ ID NO: 18508 - protein, 117 aa, synthetic construct
FTDFDSQTNVSQSKDSDVYITDKCVLDMRSMDFKSNSAVAWSNKSDFACANAFNNSIIPEDTFFPSPESSCDVKLVEKSFETDTNLNFQNLSVIGFRILLLKVAGFNLLMTLRLWSS

SEQ ID NO: 18509 - protein, 116 aa, synthetic construct
TDFDSQTNVSQSKDSDVYITDKCVLDMRSMDFKSNSAVAWSNKSDFACANAFNNSIIPEDTFFPSPESSCDVKLVEKSFETDTNLNFQNLSVIGFRILLLKVAGFNLLMTLRLWSS

SEQ ID NO: 18510 - protein, 115 aa, synthetic construct
DFDSQTNVSQSKDSDVYITDKCVLDMRSMDFKSNSAVAWSNKSDFACANAFNNSIIPEDTFFPSPESSCDVKLVEKSFETDTNLNFQNLSVIGFRILLLKVAGFNLLMTLRLWSS

SEQ ID NO: 18511 - protein, 114 aa, synthetic construct
FDSQTNVSQSKDSDVYITDKCVLDMRSMDFKSNSAVAWSNKSDFACANAFNNSIIPEDTFFPSPESSCDVKLVEKSFETDTNLNFQNLSVIGFRILLLKVAGFNLLMTLRLWSS

SEQ ID NO: 18512 - protein, 113 aa, synthetic construct
DSQTNVSQSKDSDVYITDKCVLDMRSMDFKSNSAVAWSNKSDFACANAFNNSIIPEDTFFPSPESSCDVKLVEKSFETDTNLNFQNLSVIGFRILLLKVAGFNLLMTLRLWSS

SEQ ID NO: 18513 - protein, 112 aa, synthetic construct
SQTNVSQSKDSDVYITDKCVLDMRSMDFKSNSAVAWSNKSDFACANAFNNSIIPEDTFFPSPESSCDVKLVEKSFETDTNLNFQNLSVIGFRILLLKVAGFNLLMTLRLWSS

SEQ ID NO: 18514 - protein, 111 aa, synthetic construct
QTNVSQSKDSDVYITDKCVLDMRSMDFKSNSAVAWSNKSDFACANAFNNSIIPEDTFFPSPESSCDVKLVEKSFETDTNLNFQNLSVIGFRILLLKVAGFNLLMTLRLWSS

SEQ ID NO: 18515 - protein, 110 aa, synthetic construct
TNVSQSKDSDVYITDKCVLDMRSMDFKSNSAVAWSNKSDFACANAFNNSIIPEDTFFPSPESSCDVKLVEKSFETDTNLNFQNLSVIGFRILLLKVAGFNLLMTLRLWSS

SEQ ID NO: 18516 - protein, 109 aa, synthetic construct
NVSQSKDSDVYITDKCVLDMRSMDFKSNSAVAWSNKSDFACANAFNNSIIPEDTFFPSPESSCDVKLVEKSFETDTNLNFQNLSVIGFRILLLKVAGFNLLMTLRLWSS

SEQ ID NO: 18517 - protein, 108 aa, synthetic construct
VSQSKDSDVYITDKCVLDMRSMDFKSNSAVAWSNKSDFACANAFNNSIIPEDTFFPSPESSCDVKLVEKSFETDTNLNFQNLSVIGFRILLLKVAGFNLLMTLRLWSS

SEQ ID NO: 18518 - protein, 107 aa, synthetic construct
SQSKDSDVYITDKCVLDMRSMDFKSNSAVAWSNKSDFACANAFNNSIIPEDTFFPSPESSCDVKLVEKSFETDTNLNFQNLSVIGFRILLLKVAGFNLLMTLRLWSS

SEQ ID NO: 18519 - protein, 106 aa, synthetic construct
QSKDSDVYITDKCVLDMRSMDFKSNSAVAWSNKSDFACANAFNNSIIPEDTFFPSPESSCDVKLVEKSFETDTNLNFQNLSVIGFRILLLKVAGFNLLMTLRLWSS

SEQ ID NO: 18520 - protein, 105 aa, synthetic construct
SKDSDVYITDKCVLDMRSMDFKSNSAVAWSNKSDFACANAFNNSIIPEDTFFPSPESSCDVKLVEKSFETDTNLNFQNLSVIGFRILLLKVAGFNLLMTLRLWSS

SEQ ID NO: 18521 - protein, 104 aa, synthetic construct
KDSDVYITDKCVLDMRSMDFKSNSAVAWSNKSDFACANAFNNSIIPEDTFFPSPESSCDVKLVEKSFETDTNLNFQNLSVIGFRILLLKVAGFNLLMTLRLWSS

SEQ ID NO: 18522 - protein, 103 aa, synthetic construct
DSDVYITDKCVLDMRSMDFKSNSAVAWSNKSDFACANAFNNSIIPEDTFFPSPESSCDVKLVEKSFETDTNLNFQNLSVIGFRILLLKVAGFNLLMTLRLWSS

SEQ ID NO: 18523 - protein, 102 aa, synthetic construct
SDVYITDKCVLDMRSMDFKSNSAVAWSNKSDFACANAFNNSIIPEDTFFPSPESSCDVKLVEKSFETDTNLNFQNLSVIGFRILLLKVAGFNLLMTLRLWSS

SEQ ID NO: 18524 - protein, 101 aa, synthetic construct
DVYITDKCVLDMRSMDFKSNSAVAWSNKSDFACANAFNNSIIPEDTFFPSPESSCDVKLVEKSFETDTNLNFQNLSVIGFRILLLKVAGFNLLMTLRLWSS

SEQ ID NO: 18525 - protein, 100 aa, synthetic construct
VYITDKCVLDMRSMDFKSNSAVAWSNKSDFACANAFNNSIIPEDTFFPSPESSCDVKLVEKSFETDTNLNFQNLSVIGFRILLLKVAGFNLLMTLRLWSS

SEQ ID NO: 18526 - protein, 99 aa, synthetic construct
YITDKCVLDMRSMDFKSNSAVAWSNKSDFACANAFNNSIIPEDTFFPSPESSCDVKLVEKSFETDTNLNFQNLSVIGFRILLLKVAGFNLLMTLRLWSS

SEQ ID NO: 18527 - protein, 98 aa, synthetic construct
ITDKCVLDMRSMDFKSNSAVAWSNKSDFACANAFNNSIIPEDTFFPSPESSCDVKLVEKSFETDTNLNFQNLSVIGFRILLLKVAGFNLLMTLRLWSS

SEQ ID NO: 18528 - protein, 97 aa, synthetic construct
TDKCVLDMRSMDFKSNSAVAWSNKSDFACANAFNNSIIPEDTFFPSPESSCDVKLVEKSFETDTNLNFQNLSVIGFRILLLKVAGFNLLMTLRLWSS

SEQ ID NO: 18529 - protein, 96 aa, synthetic construct
DKCVLDMRSMDFKSNSAVAWSNKSDFACANAFNNSIIPEDTFFPSPESSCDVKLVEKSFETDTNLNFQNLSVIGFRILLLKVAGFNLLMTLRLWSS

SEQ ID NO: 18530 - protein, 94 aa, synthetic construct
CVLDMRSMDFKSNSAVAWSNKSDFACANAFNNSIIPEDTFFPSPESSCDVKLVEKSFETDTNLNFQNLSVIGFRILLLKVAGFNLLMTLRLWSS

SEQ ID NO: 18531 - protein, 93 aa, synthetic construct
VLDMRSMDFKSNSAVAWSNKSDFACANAFNNSIIPEDTFFPSPESSCDVKLVEKSFETDTNLNFQNLSVIGFRILLLKVAGFNLLMTLRLWSS

SEQ ID NO: 18532 - protein, 92 aa, synthetic construct
LDMRSMDFKSNSAVAWSNKSDFACANAFNNSIIPEDTFFPSPESSCDVKLVEKSFETDTNLNFQNLSVIGFRILLLKVAGFNLLMTLRLWSS

SEQ ID NO: 18533 - protein, 91 aa, synthetic construct
DMRSMDFKSNSAVAWSNKSDFACANAFNNSIIPEDTFFPSPESSCDVKLVEKSFETDTNLNFQNLSVIGFRILLLKVAGFNLLMTLRLWSS

SEQ ID NO: 18534 - protein, 90 aa, synthetic construct
MRSMDFKSNSAVAWSNKSDFACANAFNNSIIPEDTFFPSPESSCDVKLVEKSFETDTNLNFQNLSVIGFRILLLKVAGFNLLMTLRLWSS

SEQ ID NO: 18535 - protein, 89 aa, synthetic construct
RSMDFKSNSAVAWSNKSDFACANAFNNSIIPEDTFFPSPESSCDVKLVEKSFETDTNLNFQNLSVIGFRILLLKVAGFNLLMTLRLWSS

SEQ ID NO: 18536 - protein, 88 aa, synthetic construct
SMDFKSNSAVAWSNKSDFACANAFNNSIIPEDTFFPSPESSCDVKLVEKSFETDTNLNFQNLSVIGFRILLLKVAGFNLLMTLRLWSS

SEQ ID NO: 18537 - protein, 87 aa, synthetic construct
MDFKSNSAVAWSNKSDFACANAFNNSIIPEDTFFPSPESSCDVKLVEKSFETDTNLNFQNLSVIGFRILLLKVAGFNLLMTLRLWSS

SEQ ID NO: 18538 - protein, 86 aa, synthetic construct
DFKSNSAVAWSNKSDFACANAFNNSIIPEDTFFPSPESSCDVKLVEKSFETDTNLNFQNLSVIGFRILLLKVAGFNLLMTLRLWSS

SEQ ID NO: 18539 - protein, 85 aa, synthetic construct
FKSNSAVAWSNKSDFACANAFNNSIIPEDTFFPSPESSCDVKLVEKSFETDTNLNFQNLSVIGFRILLLKVAGFNLLMTLRLWSS

SEQ ID NO: 18540 - protein, 84 aa, synthetic construct
KSNSAVAWSNKSDFACANAFNNSIIPEDTFFPSPESSCDVKLVEKSFETDTNLNFQNLSVIGFRILLLKVAGFNLLMTLRLWSS

SEQ ID NO: 18541 - protein, 83 aa, synthetic construct
SNSAVAWSNKSDFACANAFNNSIIPEDTFFPSPESSCDVKLVEKSFETDTNLNFQNLSVIGFRILLLKVAGFNLLMTLRLWSS

SEQ ID NO: 18542 - protein, 82 aa, synthetic construct
NSAVAWSNKSDFACANAFNNSIIPEDTFFPSPESSCDVKLVEKSFETDTNLNFQNLSVIGFRILLLKVAGFNLLMTLRLWSS

SEQ ID NO: 18543 - protein, 81 aa, synthetic construct
SAVAWSNKSDFACANAFNNSIIPEDTFFPSPESSCDVKLVEKSFETDTNLNFQNLSVIGFRILLLKVAGFNLLMTLRLWSS

SEQ ID NO: 18544 - protein, 80 aa, synthetic construct
AVAWSNKSDFACANAFNNSIIPEDTFFPSPESSCDVKLVEKSFETDTNLNFQNLSVIGFRILLLKVAGFNLLMTLRLWSS

SEQ ID NO: 18545 - protein, 79 aa, synthetic construct
VAWSNKSDFACANAFNNSIIPEDTFFPSPESSCDVKLVEKSFETDTNLNFQNLSVIGFRILLLKVAGFNLLMTLRLWSS

SEQ ID NO: 18546 - protein, 78 aa, synthetic construct
AWSNKSDFACANAFNNSIIPEDTFFPSPESSCDVKLVEKSFETDTNLNFQNLSVIGFRILLLKVAGFNLLMTLRLWSS

SEQ ID NO: 18547 - protein, 77 aa, synthetic construct
WSNKSDFACANAFNNSIIPEDTFFPSPESSCDVKLVEKSFETDTNLNFQNLSVIGFRILLLKVAGFNLLMTLRLWSS

SEQ ID NO: 18548 - protein, 76 aa, synthetic construct
SNKSDFACANAFNNSIIPEDTFFPSPESSCDVKLVEKSFETDTNLNFQNLSVIGFRILLLKVAGFNLLMTLRLWSS

SEQ ID NO: 18549 - protein, 75 aa, synthetic construct
NKSDFACANAFNNSIIPEDTFFPSPESSCDVKLVEKSFETDTNLNFQNLSVIGFRILLLKVAGFNLLMTLRLWSS

SEQ ID NO: 18550 - protein, 74 aa, synthetic construct
KSDFACANAFNNSIIPEDTFFPSPESSCDVKLVEKSFETDTNLNFQNLSVIGFRILLLKVAGFNLLMTLRLWSS

SEQ ID NO: 18551 - protein, 73 aa, synthetic construct
SDFACANAFNNSIIPEDTFFPSPESSCDVKLVEKSFETDTNLNFQNLSVIGFRILLLKVAGFNLLMTLRLWSS

SEQ ID NO: 18552 - protein, 72 aa, synthetic construct
DFACANAFNNSIIPEDTFFPSPESSCDVKLVEKSFETDTNLNFQNLSVIGFRILLLKVAGFNLLMTLRLWSS

SEQ ID NO: 18553 - protein, 71 aa, synthetic construct
FACANAFNNSIIPEDTFFPSPESSCDVKLVEKSFETDTNLNFQNLSVIGFRILLLKVAGFNLLMTLRLWSS

SEQ ID NO: 18554 - protein, 70 aa, synthetic construct
ACANAFNNSIIPEDTFFPSPESSCDVKLVEKSFETDTNLNFQNLSVIGFRILLLKVAGFNLLMTLRLWSS

SEQ ID NO: 18555 - protein, 69 aa, synthetic construct
CANAFNNSIIPEDTFFPSPESSCDVKLVEKSFETDTNLNFQNLSVIGFRILLLKVAGFNLLMTLRLWSS

SEQ ID NO: 18556 - protein, 68 aa, synthetic construct
ANAFNNSIIPEDTFFPSPESSCDVKLVEKSFETDTNLNFQNLSVIGFRILLLKVAGFNLLMTLRLWSS

SEQ ID NO: 18557 - protein, 67 aa, synthetic construct
NAFNNSIIPEDTFFPSPESSCDVKLVEKSFETDTNLNFQNLSVIGFRILLLKVAGFNLLMTLRLWSS

SEQ ID NO: 18558 - protein, 66 aa, synthetic construct
AFNNSIIPEDTFFPSPESSCDVKLVEKSFETDTNLNFQNLSVIGFRILLLKVAGFNLLMTLRLWSS

SEQ ID NO: 18559 - protein, 65 aa, synthetic construct
FNNSIIPEDTFFPSPESSCDVKLVEKSFETDTNLNFQNLSVIGFRILLLKVAGFNLLMTLRLWSS

SEQ ID NO: 18560 - protein, 64 aa, synthetic construct
NNSIIPEDTFFPSPESSCDVKLVEKSFETDTNLNFQNLSVIGFRILLLKVAGFNLLMTLRLWSS

SEQ ID NO: 18561 - protein, 63 aa, synthetic construct
NSIIPEDTFFPSPESSCDVKLVEKSFETDTNLNFQNLSVIGFRILLLKVAGFNLLMTLRLWSS

SEQ ID NO: 18562 - protein, 62 aa, synthetic construct
SIIPEDTFFPSPESSCDVKLVEKSFETDTNLNFQNLSVIGFRILLLKVAGFNLLMTLRLWSS

SEQ ID NO: 18563 - protein, 61 aa, synthetic construct
IIPEDTFFPSPESSCDVKLVEKSFETDTNLNFQNLSVIGFRILLLKVAGFNLLMTLRLWSS

SEQ ID NO: 18564 - protein, 60 aa, synthetic construct; identical to SEQ ID NO: 8894

SEQ ID NO: 18565 - protein, 59 aa, synthetic construct
PEDTFFPSPESSCDVKLVEKSFETDTNLNFQNLSVIGFRILLLKVAGFNLLMTLRLWSS

SEQ ID NO: 18566 - protein, 58 aa, synthetic construct
EDTFFPSPESSCDVKLVEKSFETDTNLNFQNLSVIGFRILLLKVAGFNLLMTLRLWSS

SEQ ID NO: 18567 - protein, 57 aa, synthetic construct
DTFFPSPESSCDVKLVEKSFETDTNLNFQNLSVIGFRILLLKVAGFNLLMTLRLWSS

SEQ ID NO: 18568 - protein, 56 aa, synthetic construct
TFFPSPESSCDVKLVEKSFETDTNLNFQNLSVIGFRILLLKVAGFNLLMTLRLWSS

SEQ ID NO: 18569 - protein, 55 aa, synthetic construct
FFPSPESSCDVKLVEKSFETDTNLNFQNLSVIGFRILLLKVAGFNLLMTLRLWSS

SEQ ID NO: 18570 - protein, 54 aa, synthetic construct
FPSPESSCDVKLVEKSFETDTNLNFQNLSVIGFRILLLKVAGFNLLMTLRLWSS

SEQ ID NO: 18571 - protein, 53 aa, synthetic construct
PSPESSCDVKLVEKSFETDTNLNFQNLSVIGFRILLLKVAGFNLLMTLRLWSS

SEQ ID NO: 18572 - protein, 52 aa, synthetic construct
SPESSCDVKLVEKSFETDTNLNFQNLSVIGFRILLLKVAGFNLLMTLRLWSS

SEQ ID NO: 18573 - protein, 51 aa, synthetic construct
PESSCDVKLVEKSFETDTNLNFQNLSVIGFRILLLKVAGFNLLMTLRLWSS

SEQ ID NO: 18574 - protein, 50 aa, synthetic construct; identical to SEQ ID NO: 8895

SEQ ID NO: 18575 - protein, 49 aa, synthetic construct
SSCDVKLVEKSFETDTNLNFQNLSVIGFRILLLKVAGFNLLMTLRLWSS

SEQ ID NO: 18576 - protein, 48 aa, synthetic construct
SCDVKLVEKSFETDTNLNFQNLSVIGFRILLLKVAGFNLLMTLRLWSS

SEQ ID NO: 18577 - protein, 47 aa, synthetic construct
CDVKLVEKSFETDTNLNFQNLSVIGFRILLLKVAGFNLLMTLRLWSS

SEQ ID NO: 18578 - protein, 46 aa, synthetic construct
DVKLVEKSFETDTNLNFQNLSVIGFRILLLKVAGFNLLMTLRLWSS

SEQ ID NO: 18579 - protein, 45 aa, synthetic construct
VKLVEKSFETDTNLNFQNLSVIGFRILLLKVAGFNLLMTLRLWSS

SEQ ID NO: 18580 - protein, 44 aa, synthetic construct
KLVEKSFETDTNLNFQNLSVIGFRILLLKVAGFNLLMTLRLWSS

SEQ ID NO: 18581 - protein, 43 aa, synthetic construct
LVEKSFETDTNLNFQNLSVIGFRILLLKVAGFNLLMTLRLWSS

SEQ ID NO: 18582 - protein, 42 aa, synthetic construct
VEKSFETDTNLNFQNLSVIGFRILLLKVAGFNLLMTLRLWSS

SEQ ID NO: 18583 - protein, 41 aa, synthetic construct
EKSFETDTNLNFQNLSVIGFRILLLKVAGFNLLMTLRLWSS

SEQ ID NO: 18584 - protein, 40 aa, synthetic construct
KSFETDTNLNFQNLSVIGFRILLLKVAGFNLLMTLRLWSS

SEQ ID NO: 18585 - protein, 39 aa, synthetic construct
SFETDTNLNFQNLSVIGFRILLLKVAGFNLLMTLRLWSS

SEQ ID NO: 18586 - protein, 179 aa, synthetic construct; identical to SEQ ID NO: 8850

SEQ ID NO: 18587 - protein, 178 aa, synthetic construct
DLKNVFPPEVAVFEPSEAEISHTQKATLVCLATGFYPDHVELSWWVNGKEVHSGVCTDPQPLKEQPALNDSRYCLSSRLRVSATFWQNPRNHFRCQVQFYGLSENDEWTQDRAKPVTQIVSAEAWGRADCGFTSESYQQGVLSATILYEILLGKATLYAVLVSALVLMAMVKRKDSRG

SEQ ID NO: 18588 - protein, 177 aa, synthetic construct
LKNVFPPEVAVFEPSEAEISHTQKATLVCLATGFYPDHVELSWWVNGKEVHSGVCTDPQPLKEQPALNDSRYCLSSRLRVSATFWQNPRNHFRCQVQFYGLSENDEWTQDRAKPVTQIVSAEAWGRADCGFTSESYQQGVLSATILYEILLGKATLYAVLVSALVLMAMVKRKDSRG

SEQ ID NO: 18589 - protein, 176 aa, synthetic construct
KNVFPPEVAVFEPSEAEISHTQKATLVCLATGFYPDHVELSWWVNGKEVHSGVCTDPQPLKEQPALNDSRYCLSSRLRVSATFWQNPRNHFRCQVQFYGLSENDEWTQDRAKPVTQIVSAEAWGRADCGFTSESYQQGVLSATILYEILLGKATLYAVLVSALVLMAMVKRKDSRG

SEQ ID NO: 18590 - protein, 175 aa, synthetic construct
NVFPPEVAVFEPSEAEISHTQKATLVCLATGFYPDHVELSWWVNGKEVHSGVCTDPQPLKEQPALNDSRYCLSSRLRVSATFWQNPRNHFRCQVQFYGLSENDEWTQDRAKPVTQIVSAEAWGRADCGFTSESYQQGVLSATILYEILLGKATLYAVLVSALVLMAMVKRKDSRG

SEQ ID NO: 18591 - protein, 174 aa, synthetic construct
VFPPEVAVFEPSEAEISHTQKATLVCLATGFYPDHVELSWWVNGKEVHSGVCTDPQPLKEQPALNDSRYCLSSRLRVSATFWQNPRNHFRCQVQFYGLSENDEWTQDRAKPVTQIVSAEAWGRADCGFTSESYQQGVLSATILYEILLGKATLYAVLVSALVLMAMVKRKDSRG

SEQ ID NO: 18592 - protein, 173 aa, synthetic construct
FPPEVAVFEPSEAEISHTQKATLVCLATGFYPDHVELSWWVNGKEVHSGVCTDPQPLKEQPALNDSRYCLSSRLRVSATFWQNPRNHFRCQVQFYGLSENDEWTQDRAKPVTQIVSAEAWGRADCGFTSESYQQGVLSATILYEILLGKATLYAVLVSALVLMAMVKRKDSRG

SEQ ID NO: 18593 - protein, 172 aa, synthetic construct
PPEVAVFEPSEAEISHTQKATLVCLATGFYPDHVELSWWVNGKEVHSGVCTDPQPLKEQPALNDSRYCLSSRLRVSATFWQNPRNHFRCQVQFYGLSENDEWTQDRAKPVTQIVSAEAWGRADCGFTSESYQQGVLSATILYEILLGKATLYAVLVSALVLMAMVKRKDSRG

SEQ ID NO: 18594 - protein, 171 aa, synthetic construct
PEVAVFEPSEAEISHTQKATLVCLATGFYPDHVELSWWVNGKEVHSGVCTDPQPLKEQPALNDSRYCLSSRLRVSATFWQNPRNHFRCQVQFYGLSENDEWTQDRAKPVTQIVSAEAWGRADCGFTSESYQQGVLSATILYEILLGKATLYAVLVSALVLMAMVKRKDSRG

SEQ ID NO: 18595 - protein, 170 aa, synthetic construct
EVAVFEPSEAEISHTQKATLVCLATGFYPDHVELSWWVNGKEVHSGVCTDPQPLKEQPALNDSRYCLSSRLRVSATFWQNPRNHFRCQVQFYGLSENDEWTQDRAKPVTQIVSAEAWGRADCGFTSESYQQGVLSATILYEILLGKATLYAVLVSALVLMAMVKRKDSRG

SEQ ID NO: 18596 - protein, 169 aa, synthetic construct
VAVFEPSEAEISHTQKATLVCLATGFYPDHVELSWWVNGKEVHSGVCTDPQPLKEQPALNDSRYCLSSRLRVSATFWQNPRNHFRCQVQFYGLSENDEWTQDRAKPVTQIVSAEAWGRADCGFTSESYQQGVLSATILYEILLGKATLYAVLVSALVLMAMVKRKDSRG

SEQ ID NO: 18597 - protein, 168 aa, synthetic construct
AVFEPSEAEISHTQKATLVCLATGFYPDHVELSWWVNGKEVHSGVCTDPQPLKEQPALNDSRYCLSSRLRVSATFWQNPRNHFRCQVQFYGLSENDEWTQDRAKPVTQIVSAEAWGRADCGFTSESYQQGVLSATILYEILLGKATLYAVLVSALVLMAMVKRKDSRG

SEQ ID NO: 18598 - protein, 167 aa, synthetic construct
VFEPSEAEISHTQKATLVCLATGFYPDHVELSWWVNGKEVHSGVCTDPQPLKEQPALNDSRYCLSSRLRVSATFWQNPRNHFRCQVQFYGLSENDEWTQDRAKPVTQIVSAEAWGRADCGFTSESYQQGVLSATILYEILLGKATLYAVLVSALVLMAMVKRKDSRG

SEQ ID NO: 18599 - protein, 166 aa, synthetic construct
FEPSEAEISHTQKATLVCLATGFYPDHVELSWWVNGKEVHSGVCTDPQPLKEQPALNDSRYCLSSRLRVSATFWQNPRNHFRCQVQFYGLSENDEWTQDRAKPVTQIVSAEAWGRADCGFTSESYQQGVLSATILYEILLGKATLYAVLVSALVLMAMVKRKDSRG

SEQ ID NO: 18600 - protein, 165 aa, synthetic construct
EPSEAEISHTQKATLVCLATGFYPDHVELSWWVNGKEVHSGVCTDPQPLKEQPALNDSRYCLSSRLRVSATFWQNPRNHFRCQVQFYGLSENDEWTQDRAKPVTQIVSAEAWGRADCGFTSESYQQGVLSATILYEILLGKATLYAVLVSALVLMAMVKRKDSRG

SEQ ID NO: 18601 - protein, 164 aa, synthetic construct
PSEAEISHTQKATLVCLATGFYPDHVELSWWVNGKEVHSGVCTDPQPLKEQPALNDSRYCLSSRLRVSATFWQNPRNHFRCQVQFYGLSENDEWTQDRAKPVTQIVSAEAWGRADCGFTSESYQQGVLSATILYEILLGKATLYAVLVSALVLMAMVKRKDSRG

SEQ ID NO: 18602 - protein, 163 aa, synthetic construct
SEAEISHTQKATLVCLATGFYPDHVELSWWVNGKEVHSGVCTDPQPLKEQPALNDSRYCLSSRLRVSATFWQNPRNHFRCQVQFYGLSENDEWTQDRAKPVTQIVSAEAWGRADCGFTSESYQQGVLSATILYEILLGKATLYAVLVSALVLMAMVKRKDSRG

SEQ ID NO: 18603 - protein, 162 aa, synthetic construct
EAEISHTQKATLVCLATGFYPDHVELSWWVNGKEVHSGVCTDPQPLKEQPALNDSRYCLSSRLRVSATFWQNPRNHFRCQVQFYGLSENDEWTQDRAKPVTQIVSAEAWGRADCGFTSESYQQGVLSATILYEILLGKATLYAVLVSALVLMAMVKRKDSRG

SEQ ID NO: 18604 - protein, 161 aa, synthetic construct
AEISHTQKATLVCLATGFYPDHVELSWWVNGKEVHSGVCTDPQPLKEQPALNDSRYCLSSRLRVSATFWQNPRNHFRCQVQFYGLSENDEWTQDRAKPVTQIVSAEAWGRADCGFTSESYQQGVLSATILYEILLGKATLYAVLVSALVLMAMVKRKDSRG

SEQ ID NO: 18605 - protein, 160 aa, synthetic construct
EISHTQKATLVCLATGFYPDHVELSWWVNGKEVHSGVCTDPQPLKEQPALNDSRYCLSSRLRVSATFWQNPRNHFRCQVQFYGLSENDEWTQDRAKPVTQIVSAEAWGRADCGFTSESYQQGVLSATILYEILLGKATLYAVLVSALVLMAMVKRKDSRG

SEQ ID NO: 18606 - protein, 159 aa, synthetic construct
ISHTQKATLVCLATGFYPDHVELSWWVNGKEVHSGVCTDPQPLKEQPALNDSRYCLSSRLRVSATFWQNPRNHFRCQVQFYGLSENDEWTQDRAKPVTQIVSAEAWGRADCGFTSESYQQGVLSATILYEILLGKATLYAVLVSALVLMAMVKRKDSRG

SEQ ID NO: 18607 - protein, 158 aa, synthetic construct
SHTQKATLVCLATGFYPDHVELSWWVNGKEVHSGVCTDPQPLKEQPALNDSRYCLSSRLRVSATFWQNPRNHFRCQVQFYGLSENDEWTQDRAKPVTQIVSAEAWGRADCGFTSESYQQGVLSATILYEILLGKATLYAVLVSALVLMAMVKRKDSRG

SEQ ID NO: 18608 - protein, 157 aa, synthetic construct
HTQKATLVCLATGFYPDHVELSWWVNGKEVHSGVCTDPQPLKEQPALNDSRYCLSSRLRVSATFWQNPRNHFRCQVQFYGLSENDEWTQDRAKPVTQIVSAEAWGRADCGFTSESYQQGVLSATILYEILLGKATLYAVLVSALVLMAMVKRKDSRG

SEQ ID NO: 18609 - protein, 156 aa, synthetic construct
TQKATLVCLATGFYPDHVELSWWVNGKEVHSGVCTDPQPLKEQPALNDSRYCLSSRLRVSATFWQNPRNHFRCQVQFYGLSENDEWTQDRAKPVTQIVSAEAWGRADCGFTSESYQQGVLSATILYEILLGKATLYAVLVSALVLMAMVKRKDSRG

SEQ ID NO: 18610 - protein, 155 aa, synthetic construct
QKATLVCLATGFYPDHVELSWWVNGKEVHSGVCTDPQPLKEQPALNDSRYCLSSRLRVSATFWQNPRNHFRCQVQFYGLSENDEWTQDRAKPVTQIVSAEAWGRADCGFTSESYQQGVLSATILYEILLGKATLYAVLVSALVLMAMVKRKDSRG

SEQ ID NO: 18611 - protein, 154 aa, synthetic construct
KATLVCLATGFYPDHVELSWWVNGKEVHSGVCTDPQPLKEQPALNDSRYCLSSRLRVSATFWQNPRNHFRCQVQFYGLSENDEWTQDRAKPVTQIVSAEAWGRADCGFTSESYQQGVLSATILYEILLGKATLYAVLVSALVLMAMVKRKDSRG

SEQ ID NO: 18612 - protein, 153 aa, synthetic construct
ATLVCLATGFYPDHVELSWWVNGKEVHSGVCTDPQPLKEQPALNDSRYCLSSRLRVSATFWQNPRNHFRCQVQFYGLSENDEWTQDRAKPVTQIVSAEAWGRADCGFTSESYQQGVLSATILYEILLGKATLYAVLVSALVLMAMVKRKDSRG

SEQ ID NO: 18613 - protein, 152 aa, synthetic construct
TLVCLATGFYPDHVELSWWVNGKEVHSGVCTDPQPLKEQPALNDSRYCLSSRLRVSATFWQNPRNHFRCQVQFYGLSENDEWTQDRAKPVTQIVSAEAWGRADCGFTSESYQQGVLSATILYEILLGKATLYAVLVSALVLMAMVKRKDSRG

SEQ ID NO: 18614 - protein, 151 aa, synthetic construct
LVCLATGFYPDHVELSWWVNGKEVHSGVCTDPQPLKEQPALNDSRYCLSSRLRVSATFWQNPRNHFRCQVQFYGLSENDEWTQDRAKPVTQIVSAEAWGRADCGFTSESYQQGVLSATILYEILLGKATLYAVLVSALVLMAMVKRKDSRG

SEQ ID NO: 18615 - protein, 150 aa, synthetic construct
VCLATGFYPDHVELSWWVNGKEVHSGVCTDPQPLKEQPALNDSRYCLSSRLRVSATFWQNPRNHFRCQVQFYGLSENDEWTQDRAKPVTQIVSAEAWGRADCGFTSESYQQGVLSATILYEILLGKATLYAVLVSALVLMAMVKRKDSRG

SEQ ID NO: 18616 - protein, 149 aa, synthetic construct
CLATGFYPDHVELSWWVNGKEVHSGVCTDPQPLKEQPALNDSRYCLSSRLRVSATFWQNPRNHFRCQVQFYGLSENDEWTQDRAKPVTQIVSAEAWGRADCGFTSESYQQGVLSATILYEILLGKATLYAVLVSALVLMAMVKRKDSRG

SEQ ID NO: 18617 - protein, 148 aa, synthetic construct
LATGFYPDHVELSWWVNGKEVHSGVCTDPQPLKEQPALNDSRYCLSSRLRVSATFWQNPRNHFRCQVQFYGLSENDEWTQDRAKPVTQIVSAEAWGRADCGFTSESYQQGVLSATILYEILLGKATLYAVLVSALVLMAMVKRKDSRG

SEQ ID NO: 18618 - protein, 147 aa, synthetic construct
ATGFYPDHVELSWWVNGKEVHSGVCTDPQPLKEQPALNDSRYCLSSRLRVSATFWQNPRNHFRCQVQFYGLSENDEWTQDRAKPVTQIVSAEAWGRADCGFTSESYQQGVLSATILYEILLGKATLYAVLVSALVLMAMVKRKDSRG

SEQ ID NO: 18619 - protein, 146 aa, synthetic construct
TGFYPDHVELSWWVNGKEVHSGVCTDPQPLKEQPALNDSRYCLSSRLRVSATFWQNPRNHFRCQVQFYGLSENDEWTQDRAKPVTQIVSAEAWGRADCGFTSESYQQGVLSATILYEILLGKATLYAVLVSALVLMAMVKRKDSRG

SEQ ID NO: 18620 - protein, 145 aa, synthetic construct
GFYPDHVELSWWVNGKEVHSGVCTDPQPLKEQPALNDSRYCLSSRLRVSATFWQNPRNHFRCQVQFYGLSENDEWTQDRAKPVTQIVSAEAWGRADCGFTSESYQQGVLSATILYEILLGKATLYAVLVSALVLMAMVKRKDSRG

SEQ ID NO: 18621 - protein, 144 aa, synthetic construct
FYPDHVELSWWVNGKEVHSGVCTDPQPLKEQPALNDSRYCLSSRLRVSATFWQNPRNHFRCQVQFYGLSENDEWTQDRAKPVTQIVSAEAWGRADCGFTSESYQQGVLSATILYEILLGKATLYAVLVSALVLMAMVKRKDSRG

SEQ ID NO: 18622 - protein, 143 aa, synthetic construct
YPDHVELSWWVNGKEVHSGVCTDPQPLKEQPALNDSRYCLSSRLRVSATFWQNPRNHFRCQVQFYGLSENDEWTQDRAKPVTQIVSAEAWGRADCGFTSESYQQGVLSATILYEILLGKATLYAVLVSALVLMAMVKRKDSRG

SEQ ID NO: 18623 - protein, 142 aa, synthetic construct
PDHVELSWWVNGKEVHSGVCTDPQPLKEQPALNDSRYCLSSRLRVSATFWQNPRNHFRCQVQFYGLSENDEWTQDRAKPVTQIVSAEAWGRADCGFTSESYQQGVLSATILYEILLGKATLYAVLVSALVLMAMVKRKDSRG

SEQ ID NO: 18624 - protein, 141 aa, synthetic construct
DHVELSWWVNGKEVHSGVCTDPQPLKEQPALNDSRYCLSSRLRVSATFWQNPRNHFRCQVQFYGLSENDEWTQDRAKPVTQIVSAEAWGRADCGFTSESYQQGVLSATILYEILLGKATLYAVLVSALVLMAMVKRKDSRG

SEQ ID NO: 18625 - protein, 140 aa, synthetic construct
HVELSWWVNGKEVHSGVCTDPQPLKEQPALNDSRYCLSSRLRVSATFWQNPRNHFRCQVQFYGLSENDEWTQDRAKPVTQIVSAEAWGRADCGFTSESYQQGVLSATILYEILLGKATLYAVLVSALVLMAMVKRKDSRG

SEQ ID NO: 18626 - protein, 139 aa, synthetic construct
VELSWWVNGKEVHSGVCTDPQPLKEQPALNDSRYCLSSRLRVSATFWQNPRNHFRCQVQFYGLSENDEWTQDRAKPVTQIVSAEAWGRADCGFTSESYQQGVLSATILYEILLGKATLYAVLVSALVLMAMVKRKDSRG

SEQ ID NO: 18627 - protein, 138 aa, synthetic construct
ELSWWVNGKEVHSGVCTDPQPLKEQPALNDSRYCLSSRLRVSATFWQNPRNHFRCQVQFYGLSENDEWTQDRAKPVTQIVSAEAWGRADCGFTSESYQQGVLSATILYEILLGKATLYAVLVSALVLMAMVKRKDSRG

SEQ ID NO: 18628 - protein, 137 aa, synthetic construct
LSWWVNGKEVHSGVCTDPQPLKEQPALNDSRYCLSSRLRVSATFWQNPRNHFRCQVQFYGLSENDEWTQDRAKPVTQIVSAEAWGRADCGFTSESYQQGVLSATILYEILLGKATLYAVLVSALVLMAMVKRKDSRG

SEQ ID NO: 18629 - protein, 136 aa, synthetic construct
SWWVNGKEVHSGVCTDPQPLKEQPALNDSRYCLSSRLRVSATFWQNPRNHFRCQVQFYGLSENDEWTQDRAKPVTQIVSAEAWGRADCGFTSESYQQGVLSATILYEILLGKATLYAVLVSALVLMAMVKRKDSRG

SEQ ID NO: 18630 - protein, 135 aa, synthetic construct
WWVNGKEVHSGVCTDPQPLKEQPALNDSRYCLSSRLRVSATFWQNPRNHFRCQVQFYGLSENDEWTQDRAKPVTQIVSAEAWGRADCGFTSESYQQGVLSATILYEILLGKATLYAVLVSALVLMAMVKRKDSRG

SEQ ID NO: 18631 - protein, 134 aa, synthetic construct
WVNGKEVHSGVCTDPQPLKEQPALNDSRYCLSSRLRVSATFWQNPRNHFRCQVQFYGLSENDEWTQDRAKPVTQIVSAEAWGRADCGFTSESYQQGVLSATILYEILLGKATLYAVLVSALVLMAMVKRKDSRG

SEQ ID NO: 18632 - protein, 133 aa, synthetic construct
VNGKEVHSGVCTDPQPLKEQPALNDSRYCLSSRLRVSATFWQNPRNHFRCQVQFYGLSENDEWTQDRAKPVTQIVSAEAWGRADCGFTSESYQQGVLSATILYEILLGKATLYAVLVSALVLMAMVKRKDSRG

SEQ ID NO: 18633 - protein, 132 aa, synthetic construct
NGKEVHSGVCTDPQPLKEQPALNDSRYCLSSRLRVSATFWQNPRNHFRCQVQFYGLSENDEWTQDRAKPVTQIVSAEAWGRADCGFTSESYQQGVLSATILYEILLGKATLYAVLVSALVLMAMVKRKDSRG

SEQ ID NO: 18634 - protein, 131 aa, synthetic construct
GKEVHSGVCTDPQPLKEQPALNDSRYCLSSRLRVSATFWQNPRNHFRCQVQFYGLSENDEWTQDRAKPVTQIVSAEAWGRADCGFTSESYQQGVLSATILYEILLGKATLYAVLVSALVLMAMVKRKDSRG

SEQ ID NO: 18635 - protein, 130 aa, synthetic construct
KEVHSGVCTDPQPLKEQPALNDSRYCLSSRLRVSATFWQNPRNHFRCQVQFYGLSENDEWTQDRAKPVTQIVSAEAWGRADCGFTSESYQQGVLSATILYEILLGKATLYAVLVSALVLMAMVKRKDSRG

SEQ ID NO: 18636 - protein, 129 aa, synthetic construct
EVHSGVCTDPQPLKEQPALNDSRYCLSSRLRVSATFWQNPRNHFRCQVQFYGLSENDEWTQDRAKPVTQIVSAEAWGRADCGFTSESYQQGVLSATILYEILLGKATLYAVLVSALVLMAMVKRKDSRG

SEQ ID NO: 18637 - protein, 128 aa, synthetic construct
VHSGVCTDPQPLKEQPALNDSRYCLSSRLRVSATFWQNPRNHFRCQVQFYGLSENDEWTQDRAKPVTQIVSAEAWGRADCGFTSESYQQGVLSATILYEILLGKATLYAVLVSALVLMAMVKRKDSRG

SEQ ID NO: 18638 - protein, 127 aa, synthetic construct
HSGVCTDPQPLKEQPALNDSRYCLSSRLRVSATFWQNPRNHFRCQVQFYGLSENDEWTQDRAKPVTQIVSAEAWGRADCGFTSESYQQGVLSATILYEILLGKATLYAVLVSALVLMAMVKRKDSRG

SEQ ID NO: 18639 - protein, 126 aa, synthetic construct
SGVCTDPQPLKEQPALNDSRYCLSSRLRVSATFWQNPRNHFRCQVQFYGLSENDEWTQDRAKPVTQIVSAEAWGRADCGFTSESYQQGVLSATILYEILLGKATLYAVLVSALVLMAMVKRKDSRG

SEQ ID NO: 18640 - protein, 125 aa, synthetic construct
GVCTDPQPLKEQPALNDSRYCLSSRLRVSATFWQNPRNHFRCQVQFYGLSENDEWTQDRAKPVTQIVSAEAWGRADCGFTSESYQQGVLSATILYEILLGKATLYAVLVSALVLMAMVKRKDSRG

SEQ ID NO: 18641 - protein, 124 aa, synthetic construct
VCTDPQPLKEQPALNDSRYCLSSRLRVSATFWQNPRNHFRCQVQFYGLSENDEWTQDRAKPVTQIVSAEAWGRADCGFTSESYQQGVLSATILYEILLGKATLYAVLVSALVLMAMVKRKDSRG

SEQ ID NO: 18642 - protein, 123 aa, synthetic construct
CTDPQPLKEQPALNDSRYCLSSRLRVSATFWQNPRNHFRCQVQFYGLSENDEWTQDRAKPVTQIVSAEAWGRADCGFTSESYQQGVLSATILYEILLGKATLYAVLVSALVLMAMVKRKDSRG

SEQ ID NO: 18643 - protein, 122 aa, synthetic construct
TDPQPLKEQPALNDSRYCLSSRLRVSATFWQNPRNHFRCQVQFYGLSENDEWTQDRAKPVTQIVSAEAWGRADCGFTSESYQQGVLSATILYEILLGKATLYAVLVSALVLMAMVKRKDSRG

SEQ ID NO: 18644 - protein, 121 aa, synthetic construct
DPQPLKEQPALNDSRYCLSSRLRVSATFWQNPRNHFRCQVQFYGLSENDEWTQDRAKPVTQIVSAEAWGRADCGFTSESYQQGVLSATILYEILLGKATLYAVLVSALVLMAMVKRKDSRG

SEQ ID NO: 18645 - protein, 120 aa, synthetic construct
PQPLKEQPALNDSRYCLSSRLRVSATFWQNPRNHFRCQVQFYGLSENDEWTQDRAKPVTQIVSAEAWGRADCGFTSESYQQGVLSATILYEILLGKATLYAVLVSALVLMAMVKRKDSRG

SEQ ID NO: 18646 - protein, 119 aa, synthetic construct
QPLKEQPALNDSRYCLSSRLRVSATFWQNPRNHFRCQVQFYGLSENDEWTQDRAKPVTQIVSAEAWGRADCGFTSESYQQGVLSATILYEILLGKATLYAVLVSALVLMAMVKRKDSRG

SEQ ID NO: 18647 - protein, 118 aa, synthetic construct
PLKEQPALNDSRYCLSSRLRVSATFWQNPRNHFRCQVQFYGLSENDEWTQDRAKPVTQIVSAEAWGRADCGFTSESYQQGVLSATILYEILLGKATLYAVLVSALVLMAMVKRKDSRG

SEQ ID NO: 18648 - protein, 117 aa, synthetic construct
LKEQPALNDSRYCLSSRLRVSATFWQNPRNHFRCQVQFYGLSENDEWTQDRAKPVTQIVSAEAWGRADCGFTSESYQQGVLSATILYEILLGKATLYAVLVSALVLMAMVKRKDSRG

SEQ ID NO: 18649 - protein, 116 aa, synthetic construct
KEQPALNDSRYCLSSRLRVSATFWQNPRNHFRCQVQFYGLSENDEWTQDRAKPVTQIVSAEAWGRADCGFTSESYQQGVLSATILYEILLGKATLYAVLVSALVLMAMVKRKDSRG

SEQ ID NO: 18650 - protein, 115 aa, synthetic construct; identical to SEQ ID NO: 8897

SEQ ID NO: 18651 - protein, 114 aa, synthetic construct
QPALNDSRYCLSSRLRVSATFWQNPRNHFRCQVQFYGLSENDEWTQDRAKPVTQIVSAEAWGRADCGFTSESYQQGVLSATILYEILLGKATLYAVLVSALVLMAMVKRKDSRG

SEQ ID NO: 18652 - protein, 113 aa, synthetic construct
PALNDSRYCLSSRLRVSATFWQNPRNHFRCQVQFYGLSENDEWTQDRAKPVTQIVSAEAWGRADCGFTSESYQQGVLSATILYEILLGKATLYAVLVSALVLMAMVKRKDSRG

SEQ ID NO: 18653 - protein, 112 aa, synthetic construct
ALNDSRYCLSSRLRVSATFWQNPRNHFRCQVQFYGLSENDEWTQDRAKPVTQIVSAEAWGRADCGFTSESYQQGVLSATILYEILLGKATLYAVLVSALVLMAMVKRKDSRG

SEQ ID NO: 18654 - protein, 111 aa, synthetic construct
LNDSRYCLSSRLRVSATFWQNPRNHFRCQVQFYGLSENDEWTQDRAKPVTQIVSAEAWGRADCGFTSESYQQGVLSATILYEILLGKATLYAVLVSALVLMAMVKRKDSRG

SEQ ID NO: 18655 - protein, 110 aa, synthetic construct
NDSRYCLSSRLRVSATFWQNPRNHFRCQVQFYGLSENDEWTQDRAKPVTQIVSAEAWGRADCGFTSESYQQGVLSATILYEILLGKATLYAVLVSALVLMAMVKRKDSRG

SEQ ID NO: 18656 - protein, 109 aa, synthetic construct
DSRYCLSSRLRVSATFWQNPRNHFRCQVQFYGLSENDEWTQDRAKPVTQIVSAEAWGRADCGFTSESYQQGVLSATILYEILLGKATLYAVLVSALVLMAMVKRKDSRG

SEQ ID NO: 18657 - protein, 108 aa, synthetic construct
SRYCLSSRLRVSATFWQNPRNHFRCQVQFYGLSENDEWTQDRAKPVTQIVSAEAWGRADCGFTSESYQQGVLSATILYEILLGKATLYAVLVSALVLMAMVKRKDSRG

SEQ ID NO: 18658 - protein, 107 aa, synthetic construct
RYCLSSRLRVSATFWQNPRNHFRCQVQFYGLSENDEWTQDRAKPVTQIVSAEAWGRADCGFTSESYQQGVLSATILYEILLGKATLYAVLVSALVLMAMVKRKDSRG

SEQ ID NO: 18659 - protein, 106 aa, synthetic construct
YCLSSRLRVSATFWQNPRNHFRCQVQFYGLSENDEWTQDRAKPVTQIVSAEAWGRADCGFTSESYQQGVLSATILYEILLGKATLYAVLVSALVLMAMVKRKDSRG

SEQ ID NO: 18660 - protein, 105 aa, synthetic construct
CLSSRLRVSATFWQNPRNHFRCQVQFYGLSENDEWTQDRAKPVTQIVSAEAWGRADCGFTSESYQQGVLSATILYEILLGKATLYAVLVSALVLMAMVKRKDSRG

SEQ ID NO: 18661 - protein, 104 aa, synthetic construct
LSSRLRVSATFWQNPRNHFRCQVQFYGLSENDEWTQDRAKPVTQIVSAEAWGRADCGFTSESYQQGVLSATILYEILLGKATLYAVLVSALVLMAMVKRKDSRG

SEQ ID NO: 18662 - protein, 103 aa, synthetic construct
SSRLRVSATFWQNPRNHFRCQVQFYGLSENDEWTQDRAKPVTQIVSAEAWGRADCGFTSESYQQGVLSATILYEILLGKATLYAVLVSALVLMAMVKRKDSRG

SEQ ID NO: 18663 - protein, 102 aa, synthetic construct
SRLRVSATFWQNPRNHFRCQVQFYGLSENDEWTQDRAKPVTQIVSAEAWGRADCGFTSESYQQGVLSATILYEILLGKATLYAVLVSALVLMAMVKRKDSRG

SEQ ID NO: 18664 - protein, 101 aa, synthetic construct
RLRVSATFWQNPRNHFRCQVQFYGLSENDEWTQDRAKPVTQIVSAEAWGRADCGFTSESYQQGVLSATILYEILLGKATLYAVLVSALVLMAMVKRKDSRG

SEQ ID NO: 18665 - protein, 100 aa, synthetic construct
LRVSATFWQNPRNHFRCQVQFYGLSENDEWTQDRAKPVTQIVSAEAWGRADCGFTSESYQQGVLSATILYEILLGKATLYAVLVSALVLMAMVKRKDSRG

SEQ ID NO: 18666 - protein, 99 aa, synthetic construct
RVSATFWQNPRNHFRCQVQFYGLSENDEWTQDRAKPVTQIVSAEAWGRADCGFTSESYQQGVLSATILYEILLGKATLYAVLVSALVLMAMVKRKDSRG

SEQ ID NO: 18667 - protein, 98 aa, synthetic construct
VSATFWQNPRNHFRCQVQFYGLSENDEWTQDRAKPVTQIVSAEAWGRADCGFTSESYQQGVLSATILYEILLGKATLYAVLVSALVLMAMVKRKDSRG

SEQ ID NO: 18668 - protein, 97 aa, synthetic construct
SATFWQNPRNHFRCQVQFYGLSENDEWTQDRAKPVTQIVSAEAWGRADCGFTSESYQQGVLSATILYEILLGKATLYAVLVSALVLMAMVKRKDSRG

SEQ ID NO: 18669 - protein, 96 aa, synthetic construct
ATFWQNPRNHFRCQVQFYGLSENDEWTQDRAKPVTQIVSAEAWGRADCGFTSESYQQGVLSATILYEILLGKATLYAVLVSALVLMAMVKRKDSRG

SEQ ID NO: 18670 - protein, 95 aa, synthetic construct
TFWQNPRNHFRCQVQFYGLSENDEWTQDRAKPVTQIVSAEAWGRADCGFTSESYQQGVLSATILYEILLGKATLYAVLVSALVLMAMVKRKDSRG

SEQ ID NO: 18671 - protein, 94 aa, synthetic construct
FWQNPRNHFRCQVQFYGLSENDEWTQDRAKPVTQIVSAEAWGRADCGFTSESYQQGVLSATILYEILLGKATLYAVLVSALVLMAMVKRKDSRG

SEQ ID NO: 18672 - protein, 93 aa, synthetic construct
WQNPRNHFRCQVQFYGLSENDEWTQDRAKPVTQIVSAEAWGRADCGFTSESYQQGVLSATILYEILLGKATLYAVLVSALVLMAMVKRKDSRG

SEQ ID NO: 18673 - protein, 92 aa, synthetic construct
QNPRNHFRCQVQFYGLSENDEWTQDRAKPVTQIVSAEAWGRADCGFTSESYQQGVLSATILYEILLGKATLYAVLVSALVLMAMVKRKDSRG

SEQ ID NO: 18674 - protein, 91 aa, synthetic construct
NPRNHFRCQVQFYGLSENDEWTQDRAKPVTQIVSAEAWGRADCGFTSESYQQGVLSATILYEILLGKATLYAVLVSALVLMAMVKRKDSRG

SEQ ID NO: 18675 - protein, 90 aa, synthetic construct
PRNHFRCQVQFYGLSENDEWTQDRAKPVTQIVSAEAWGRADCGFTSESYQQGVLSATILYEILLGKATLYAVLVSALVLMAMVKRKDSRG

SEQ ID NO: 18676 - protein, 89 aa, synthetic construct
RNHFRCQVQFYGLSENDEWTQDRAKPVTQIVSAEAWGRADCGFTSESYQQGVLSATILYEILLGKATLYAVLVSALVLMAMVKRKDSRG

SEQ ID NO: 18677 - protein, 88 aa, synthetic construct
NHFRCQVQFYGLSENDEWTQDRAKPVTQIVSAEAWGRADCGFTSESYQQGVLSATILYEILLGKATLYAVLVSALVLMAMVKRKDSRG

SEQ ID NO: 18678 - protein, 87 aa, synthetic construct
HFRCQVQFYGLSENDEWTQDRAKPVTQIVSAEAWGRADCGFTSESYQQGVLSATILYEILLGKATLYAVLVSALVLMAMVKRKDSRG

SEQ ID NO: 18679 - protein, 86 aa, synthetic construct
FRCQVQFYGLSENDEWTQDRAKPVTQIVSAEAWGRADCGFTSESYQQGVLSATILYEILLGKATLYAVLVSALVLMAMVKRKDSRG

SEQ ID NO: 18680 - protein, 85 aa, synthetic construct
RCQVQFYGLSENDEWTQDRAKPVTQIVSAEAWGRADCGFTSESYQQGVLSATILYEILLGKATLYAVLVSALVLMAMVKRKDSRG

SEQ ID NO: 18681 - protein, 84 aa, synthetic construct
CQVQFYGLSENDEWTQDRAKPVTQIVSAEAWGRADCGFTSESYQQGVLSATILYEILLGKATLYAVLVSALVLMAMVKRKDSRG

SEQ ID NO: 18682 - protein, 83 aa, synthetic construct
QVQFYGLSENDEWTQDRAKPVTQIVSAEAWGRADCGFTSESYQQGVLSATILYEILLGKATLYAVLVSALVLMAMVKRKDSRG

SEQ ID NO: 18683 - protein, 82 aa, synthetic construct
VQFYGLSENDEWTQDRAKPVTQIVSAEAWGRADCGFTSESYQQGVLSATILYEILLGKATLYAVLVSALVLMAMVKRKDSRG

SEQ ID NO: 18684 - protein, 81 aa, synthetic construct
QFYGLSENDEWTQDRAKPVTQIVSAEAWGRADCGFTSESYQQGVLSATILYEILLGKATLYAVLVSALVLMAMVKRKDSRG

SEQ ID NO: 18685 - protein, 80 aa, synthetic construct
FYGLSENDEWTQDRAKPVTQIVSAEAWGRADCGFTSESYQQGVLSATILYEILLGKATLYAVLVSALVLMAMVKRKDSRG

SEQ ID NO: 18686 - protein, 79 aa, synthetic construct
YGLSENDEWTQDRAKPVTQIVSAEAWGRADCGFTSESYQQGVLSATILYEILLGKATLYAVLVSALVLMAMVKRKDSRG

SEQ ID NO: 18687 - protein, 78 aa, synthetic construct
GLSENDEWTQDRAKPVTQIVSAEAWGRADCGFTSESYQQGVLSATILYEILLGKATLYAVLVSALVLMAMVKRKDSRG

SEQ ID NO: 18688 - protein, 77 aa, synthetic construct
LSENDEWTQDRAKPVTQIVSAEAWGRADCGFTSESYQQGVLSATILYEILLGKATLYAVLVSALVLMAMVKRKDSRG

SEQ ID NO: 18689 - protein, 76 aa, synthetic construct
SENDEWTQDRAKPVTQIVSAEAWGRADCGFTSESYQQGVLSATILYEILLGKATLYAVLVSALVLMAMVKRKDSRG

SEQ ID NO: 18690 - protein, 75 aa, synthetic construct
ENDEWTQDRAKPVTQIVSAEAWGRADCGFTSESYQQGVLSATILYEILLGKATLYAVLVSALVLMAMVKRKDSRG

SEQ ID NO: 18691 - protein, 74 aa, synthetic construct
NDEWTQDRAKPVTQIVSAEAWGRADCGFTSESYQQGVLSATILYEILLGKATLYAVLVSALVLMAMVKRKDSRG

SEQ ID NO: 18692 - protein, 73 aa, synthetic construct
DEWTQDRAKPVTQIVSAEAWGRADCGFTSESYQQGVLSATILYEILLGKATLYAVLVSALVLMAMVKRKDSRG

SEQ ID NO: 18693 - protein, 72 aa, synthetic construct
EWTQDRAKPVTQIVSAEAWGRADCGFTSESYQQGVLSATILYEILLGKATLYAVLVSALVLMAMVKRKDSRG

SEQ ID NO: 18694 - protein, 71 aa, synthetic construct
WTQDRAKPVTQIVSAEAWGRADCGFTSESYQQGVLSATILYEILLGKATLYAVLVSALVLMAMVKRKDSRG

SEQ ID NO: 18695 - protein, 70 aa, synthetic construct
TQDRAKPVTQIVSAEAWGRADCGFTSESYQQGVLSATILYEILLGKATLYAVLVSALVLMAMVKRKDSRG

SEQ ID NO: 18696 - protein, 69 aa, synthetic construct
QDRAKPVTQIVSAEAWGRADCGFTSESYQQGVLSATILYEILLGKATLYAVLVSALVLMAMVKRKDSRG

SEQ ID NO: 18697 - protein, 68 aa, synthetic construct
DRAKPVTQIVSAEAWGRADCGFTSESYQQGVLSATILYEILLGKATLYAVLVSALVLMAMVKRKDSRG

SEQ ID NO: 18698 - protein, 67 aa, synthetic construct
RAKPVTQIVSAEAWGRADCGFTSESYQQGVLSATILYEILLGKATLYAVLVSALVLMAMVKRKDSRG

SEQ ID NO: 18699 - protein, 66 aa, synthetic construct
AKPVTQIVSAEAWGRADCGFTSESYQQGVLSATILYEILLGKATLYAVLVSALVLMAMVKRKDSRG

SEQ ID NO: 18700 - protein, 65 aa, synthetic construct
KPVTQIVSAEAWGRADCGFTSESYQQGVLSATILYEILLGKATLYAVLVSALVLMAMVKRKDSRG

SEQ ID NO: 18701 - protein, 64 aa, synthetic construct
PVTQIVSAEAWGRADCGFTSESYQQGVLSATILYEILLGKATLYAVLVSALVLMAMVKRKDSRG

SEQ ID NO: 18702 - protein, 63 aa, synthetic construct
VTQIVSAEAWGRADCGFTSESYQQGVLSATILYEILLGKATLYAVLVSALVLMAMVKRKDSRG

SEQ ID NO: 18703 - protein, 62 aa, synthetic construct
TQIVSAEAWGRADCGFTSESYQQGVLSATILYEILLGKATLYAVLVSALVLMAMVKRKDSRG

SEQ ID NO: 18704 - protein, 61 aa, synthetic construct
QIVSAEAWGRADCGFTSESYQQGVLSATILYEILLGKATLYAVLVSALVLMAMVKRKDSRG

SEQ ID NO: 18705 - protein, 60 aa, synthetic construct
IVSAEAWGRADCGFTSESYQQGVLSATILYEILLGKATLYAVLVSALVLMAMVKRKDSRG

SEQ ID NO: 18706 - protein, 59 aa, synthetic construct
VSAEAWGRADCGFTSESYQQGVLSATILYEILLGKATLYAVLVSALVLMAMVKRKDSRG

SEQ ID NO: 18707 - protein, 58 aa, synthetic construct
SAEAWGRADCGFTSESYQQGVLSATILYEILLGKATLYAVLVSALVLMAMVKRKDSRG

SEQ ID NO: 18708 - protein, 57 aa, synthetic construct
AEAWGRADCGFTSESYQQGVLSATILYEILLGKATLYAVLVSALVLMAMVKRKDSRG

SEQ ID NO: 18709 - protein, 56 aa, synthetic construct
EAWGRADCGFTSESYQQGVLSATILYEILLGKATLYAVLVSALVLMAMVKRKDSRG

SEQ ID NO: 18710 - protein, 55 aa, synthetic construct
AWGRADCGFTSESYQQGVLSATILYEILLGKATLYAVLVSALVLMAMVKRKDSRG

SEQ ID NO: 18711 - protein, 54 aa, synthetic construct
WGRADCGFTSESYQQGVLSATILYEILLGKATLYAVLVSALVLMAMVKRKDSRG

SEQ ID NO: 18712 - protein, 53 aa, synthetic construct; identical to SEQ ID NO: 8898

SEQ ID NO: 18713 - protein, 173 aa, synthetic construct; identical to SEQ ID NO: 8873

SEQ ID NO: 18714 - protein, 172 aa, synthetic construct
KQLDADVSPKPTIFLPSIAETKLQKAGTYLCLLEKFFPDVIKIHWQEKKSNTILGSQEGNTMKTNDTYMKFSWLTVPEKSLDKEHRCIVRHENNKNGVDQEIIFPPIKTDVITMDPKDNCSKDANDTLLLQLTNTSAYYMYLLLLLKSVVYFAIITCCLLRRTAFCCNGEKS

SEQ ID NO: 18715 - protein, 171 aa, synthetic construct
QLDADVSPKPTIFLPSIAETKLQKAGTYLCLLEKFFPDVIKIHWQEKKSNTILGSQEGNTMKTNDTYMKFSWLTVPEKSLDKEHRCIVRHENNKNGVDQEIIFPPIKTDVITMDPKDNCSKDANDTLLLQLTNTSAYYMYLLLLLKSVVYFAIITCCLLRRTAFCCNGEKS

SEQ ID NO: 18716 - protein, 170 aa, synthetic construct
LDADVSPKPTIFLPSIAETKLQKAGTYLCLLEKFFPDVIKIHWQEKKSNTILGSQEGNTMKTNDTYMKFSWLTVPEKSLDKEHRCIVRHENNKNGVDQEIIFPPIKTDVITMDPKDNCSKDANDTLLLQLTNTSAYYMYLLLLLKSVVYFAIITCCLLRRTAFCCNGEKS

SEQ ID NO: 18717 - protein, 169 aa, synthetic construct
DADVSPKPTIFLPSIAETKLQKAGTYLCLLEKFFPDVIKIHWQEKKSNTILGSQEGNTMKTNDTYMKFSWLTVPEKSLDKEHRCIVRHENNKNGVDQEIIFPPIKTDVITMDPKDNCSKDANDTLLLQLTNTSAYYMYLLLLLKSVVYFAIITCCLLRRTAFCCNGEKS

SEQ ID NO: 18718 - protein, 168 aa, synthetic construct; identical to SEQ ID NO: 8901

SEQ ID NO: 18719 - protein, 167 aa, synthetic construct
DVSPKPTIFLPSIAETKLQKAGTYLCLLEKFFPDVIKIHWQEKKSNTILGSQEGNTMKTNDTYMKFSWLTVPEKSLDKEHRCIVRHENNKNGVDQEIIFPPIKTDVITMDPKDNCSKDANDTLLLQLTNTSAYYMYLLLLLKSVVYFAIITCCLLRRTAFCCNGEKS

SEQ ID NO: 18720 - protein, 166 aa, synthetic construct; identical to SEQ ID NO: 8902

SEQ ID NO: 18721 - protein, 165 aa, synthetic construct
SPKPTIFLPSIAETKLQKAGTYLCLLEKFFPDVIKIHWQEKKSNTILGSQEGNTMKTNDTYMKFSWLTVPEKSLDKEHRCIVRHENNKNGVDQEIIFPPIKTDVITMDPKDNCSKDANDTLLLQLTNTSAYYMYLLLLLKSVVYFAIITCCLLRRTAFCCNGEKS

SEQ ID NO: 18722 - protein, 164 aa, synthetic construct
PKPTIFLPSIAETKLQKAGTYLCLLEKFFPDVIKIHWQEKKSNTILGSQEGNTMKTNDTYMKFSWLTVPEKSLDKEHRCIVRHENNKNGVDQEIIFPPIKTDVITMDPKDNCSKDANDTLLLQLTNTSAYYMYLLLLLKSVVYFAIITCCLLRRTAFCCNGEKS

SEQ ID NO: 18723 - protein, 163 aa, synthetic construct
KPTIFLPSIAETKLQKAGTYLCLLEKFFPDVIKIHWQEKKSNTILGSQEGNTMKTNDTYMKFSWLTVPEKSLDKEHRCIVRHENNKNGVDQEIIFPPIKTDVITMDPKDNCSKDANDTLLLQLTNTSAYYMYLLLLLKSVVYFAIITCCLLRRTAFCCNGEKS

SEQ ID NO: 18724 - protein, 162 aa, synthetic construct
PTIFLPSIAETKLQKAGTYLCLLEKFFPDVIKIHWQEKKSNTILGSQEGNTMKTNDTYMKFSWLTVPEKSLDKEHRCIVRHENNKNGVDQEIIFPPIKTDVITMDPKDNCSKDANDTLLLQLTNTSAYYMYLLLLLKSVVYFAIITCCLLRRTAFCCNGEKS

SEQ ID NO: 18725 - protein, 161 aa, synthetic construct; identical to SEQ ID NO: 8903

SEQ ID NO: 18726 - protein, 160 aa, synthetic construct
IFLPSIAETKLQKAGTYLCLLEKFFPDVIKIHWQEKKSNTILGSQEGNTMKTNDTYMKFSWLTVPEKSLDKEHRCIVRHENNKNGVDQEIIFPPIKTDVITMDPKDNCSKDANDTLLLQLTNTSAYYMYLLLLLKSVVYFAIITCCLLRRTAFCCNGEKS

SEQ ID NO: 18727 - protein, 159 aa, synthetic construct
FLPSIAETKLQKAGTYLCLLEKFFPDVIKIHWQEKKSNTILGSQEGNTMKTNDTYMKFSWLTVPEKSLDKEHRCIVRHENNKNGVDQEIIFPPIKTDVITMDPKDNCSKDANDTLLLQLTNTSAYYMYLLLLLKSVVYFAIITCCLLRRTAFCCNGEKS

SEQ ID NO: 18728 - protein, 158 aa, synthetic construct
LPSIAETKLQKAGTYLCLLEKFFPDVIKIHWQEKKSNTILGSQEGNTMKTNDTYMKFSWLTVPEKSLDKEHRCIVRHENNKNGVDQEIIFPPIKTDVITMDPKDNCSKDANDTLLLQLTNTSAYYMYLLLLLKSVVYFAIITCCLLRRTAFCCNGEKS

SEQ ID NO: 18729 - protein, 157 aa, synthetic construct
PSIAETKLQKAGTYLCLLEKFFPDVIKIHWQEKKSNTILGSQEGNTMKTNDTYMKFSWLTVPEKSLDKEHRCIVRHENNKNGVDQEIIFPPIKTDVITMDPKDNCSKDANDTLLLQLTNTSAYYMYLLLLLKSVVYFAIITCCLLRRTAFCCNGEKS

SEQ ID NO: 18730 - protein, 156 aa, synthetic construct
SIAETKLQKAGTYLCLLEKFFPDVIKIHWQEKKSNTILGSQEGNTMKTNDTYMKFSWLTVPEKSLDKEHRCIVRHENNKNGVDQEIIFPPIKTDVITMDPKDNCSKDANDTLLLQLTNTSAYYMYLLLLLKSVVYFAIITCCLLRRTAFCCNGEKS

SEQ ID NO: 18731 - protein, 155 aa, synthetic construct
IAETKLQKAGTYLCLLEKFFPDVIKIHWQEKKSNTILGSQEGNTMKTNDTYMKFSWLTVPEKSLDKEHRCIVRHENNKNGVDQEIIFPPIKTDVITMDPKDNCSKDANDTLLLQLTNTSAYYMYLLLLLKSVVYFAIITCCLLRRTAFCCNGEKS

SEQ ID NO: 18732 - protein, 154 aa, synthetic construct
AETKLQKAGTYLCLLEKFFPDVIKIHWQEKKSNTILGSQEGNTMKTNDTYMKFSWLTVPEKSLDKEHRCIVRHENNKNGVDQEIIFPPIKTDVITMDPKDNCSKDANDTLLLQLTNTSAYYMYLLLLLKSVVYFAIITCCLLRRTAFCCNGEKS

SEQ ID NO: 18733 - protein, 153 aa, synthetic construct
ETKLQKAGTYLCLLEKFFPDVIKIHWQEKKSNTILGSQEGNTMKTNDTYMKFSWLTVPEKSLDKEHRCIVRHENNKNGVDQEIIFPPIKTDVITMDPKDNCSKDANDTLLLQLTNTSAYYMYLLLLLKSVVYFAIITCCLLRRTAFCCNGEKS

SEQ ID NO: 18734 - protein, 152 aa, synthetic construct
TKLQKAGTYLCLLEKFFPDVIKIHWQEKKSNTILGSQEGNTMKTNDTYMKFSWLTVPEKSLDKEHRCIVRHENNKNGVDQEIIFPPIKTDVITMDPKDNCSKDANDTLLLQLTNTSAYYMYLLLLLKSVVYFAIITCCLLRRTAFCCNGEKS

SEQ ID NO: 18735 - protein, 151 aa, synthetic construct
KLQKAGTYLCLLEKFFPDVIKIHWQEKKSNTILGSQEGNTMKTNDTYMKFSWLTVPEKSLDKEHRCIVRHENNKNGVDQEIIFPPIKTDVITMDPKDNCSKDANDTLLLQLTNTSAYYMYLLLLLKSVVYFAIITCCLLRRTAFCCNGEKS

SEQ ID NO: 18736 - protein, 150 aa, synthetic construct
LQKAGTYLCLLEKFFPDVIKIHWQEKKSNTILGSQEGNTMKTNDTYMKFSWLTVPEKSLDKEHRCIVRHENNKNGVDQEIIFPPIKTDVITMDPKDNCSKDANDTLLLQLTNTSAYYMYLLLLLKSVVYFAIITCCLLRRTAFCCNGEKS

SEQ ID NO: 18737 - protein, 149 aa, synthetic construct
QKAGTYLCLLEKFFPDVIKIHWQEKKSNTILGSQEGNTMKTNDTYMKFSWLTVPEKSLDKEHRCIVRHENNKNGVDQEIIFPPIKTDVITMDPKDNCSKDANDTLLLQLTNTSAYYMYLLLLLKSVVYFAIITCCLLRRTAFCCNGEKS

SEQ ID NO: 18738 - protein, 148 aa, synthetic construct
KAGTYLCLLEKFFPDVIKIHWQEKKSNTILGSQEGNTMKTNDTYMKFSWLTVPEKSLDKEHRCIVRHENNKNGVDQEIIFPPIKTDVITMDPKDNCSKDANDTLLLQLTNTSAYYMYLLLLLKSVVYFAIITCCLLRRTAFCCNGEKS

SEQ ID NO: 18739 - protein, 147 aa, synthetic construct
AGTYLCLLEKFFPDVIKIHWQEKKSNTILGSQEGNTMKTNDTYMKFSWLTVPEKSLDKEHRCIVRHENNKNGVDQEIIFPPIKTDVITMDPKDNCSKDANDTLLLQLTNTSAYYMYLLLLLKSVVYFAIITCCLLRRTAFCCNGEKS

SEQ ID NO: 18740 - protein, 146 aa, synthetic construct
GTYLCLLEKFFPDVIKIHWQEKKSNTILGSQEGNTMKTNDTYMKFSWLTVPEKSLDKEHRCIVRHENNKNGVDQEIIFPPIKTDVITMDPKDNCSKDANDTLLLQLTNTSAYYMYLLLLLKSVVYFAIITCCLLRRTAFCCNGEKS

SEQ ID NO: 18741 - protein, 145 aa, synthetic construct
TYLCLLEKFFPDVIKIHWQEKKSNTILGSQEGNTMKTNDTYMKFSWLTVPEKSLDKEHRCIVRHENNKNGVDQEIIFPPIKTDVITMDPKDNCSKDANDTLLLQLTNTSAYYMYLLLLLKSVVYFAIITCCLLRRTAFCCNGEKS

SEQ ID NO: 18742 - protein, 144 aa, synthetic construct
YLCLLEKFFPDVIKIHWQEKKSNTILGSQEGNTMKTNDTYMKFSWLTVPEKSLDKEHRCIVRHENNKNGVDQEIIFPPIKTDVITMDPKDNCSKDANDTLLLQLTNTSAYYMYLLLLLKSVVYFAIITCCLLRRTAFCCNGEKS

SEQ ID NO: 18743 - protein, 143 aa, synthetic construct
LCLLEKFFPDVIKIHWQEKKSNTILGSQEGNTMKTNDTYMKFSWLTVPEKSLDKEHRCIVRHENNKNGVDQEIIFPPIKTDVITMDPKDNCSKDANDTLLLQLTNTSAYYMYLLLLLKSVVYFAIITCCLLRRTAFCCNGEKS

SEQ ID NO: 18744 - protein, 142 aa, synthetic construct
CLLEKFFPDVIKIHWQEKKSNTILGSQEGNTMKTNDTYMKFSWLTVPEKSLDKEHRCIVRHENNKNGVDQEIIFPPIKTDVITMDPKDNCSKDANDTLLLQLTNTSAYYMYLLLLLKSVVYFAIITCCLLRRTAFCCNGEKS

SEQ ID NO: 18745 - protein, 141 aa, synthetic construct
LLEKFFPDVIKIHWQEKKSNTILGSQEGNTMKTNDTYMKFSWLTVPEKSLDKEHRCIVRHENNKNGVDQEIIFPPIKTDVITMDPKDNCSKDANDTLLLQLTNTSAYYMYLLLLLKSVVYFAIITCCLLRRTAFCCNGEKS

SEQ ID NO: 18746 - protein, 140 aa, synthetic construct
LEKFFPDVIKIHWQEKKSNTILGSQEGNTMKTNDTYMKFSWLTVPEKSLDKEHRCIVRHENNKNGVDQEIIFPPIKTDVITMDPKDNCSKDANDTLLLQLTNTSAYYMYLLLLLKSVVYFAIITCCLLRRTAFCCNGEKS

SEQ ID NO: 18747 - protein, 139 aa, synthetic construct
EKFFPDVIKIHWQEKKSNTILGSQEGNTMKTNDTYMKFSWLTVPEKSLDKEHRCIVRHENNKNGVDQEIIFPPIKTDVITMDPKDNCSKDANDTLLLQLTNTSAYYMYLLLLLKSVVYFAIITCCLLRRTAFCCNGEKS

SEQ ID NO: 18748 - protein, 138 aa, synthetic construct
KFFPDVIKIHWQEKKSNTILGSQEGNTMKTNDTYMKFSWLTVPEKSLDKEHRCIVRHENNKNGVDQEIIFPPIKTDVITMDPKDNCSKDANDTLLLQLTNTSAYYMYLLLLLKSVVYFAIITCCLLRRTAFCCNGEKS

SEQ ID NO: 18749 - protein, 137 aa, synthetic construct
FFPDVIKIHWQEKKSNTILGSQEGNTMKTNDTYMKFSWLTVPEKSLDKEHRCIVRHENNKNGVDQEIIFPPIKTDVITMDPKDNCSKDANDTLLLQLTNTSAYYMYLLLLLKSVVYFAIITCCLLRRTAFCCNGEKS

SEQ ID NO: 18750 - protein, 136 aa, synthetic construct
FPDVIKIHWQEKKSNTILGSQEGNTMKTNDTYMKFSWLTVPEKSLDKEHRCIVRHENNKNGVDQEIIFPPIKTDVITMDPKDNCSKDANDTLLLQLTNTSAYYMYLLLLLKSVVYFAIITCCLLRRTAFCCNGEKS

SEQ ID NO: 18751 - protein, 135 aa, synthetic construct
PDVIKIHWQEKKSNTILGSQEGNTMKTNDTYMKFSWLTVPEKSLDKEHRCIVRHENNKNGVDQEIIFPPIKTDVITMDPKDNCSKDANDTLLLQLTNTSAYYMYLLLLLKSVVYFAIITCCLLRRTAFCCNGEKS

SEQ ID NO: 18752 - protein, 134 aa, synthetic construct
DVIKIHWQEKKSNTILGSQEGNTMKTNDTYMKFSWLTVPEKSLDKEHRCIVRHENNKNGVDQEIIFPPIKTDVITMDPKDNCSKDANDTLLLQLTNTSAYYMYLLLLLKSVVYFAIITCCLLRRTAFCCNGEKS

SEQ ID NO: 18753 - protein, 133 aa, synthetic construct
VIKIHWQEKKSNTILGSQEGNTMKTNDTYMKFSWLTVPEKSLDKEHRCIVRHENNKNGVDQEIIFPPIKTDVITMDPKDNCSKDANDTLLLQLTNTSAYYMYLLLLLKSVVYFAIITCCLLRRTAFCCNGEKS

SEQ ID NO: 18754 - protein, 132 aa, synthetic construct
IKIHWQEKKSNTILGSQEGNTMKTNDTYMKFSWLTVPEKSLDKEHRCIVRHENNKNGVDQEIIFPPIKTDVITMDPKDNCSKDANDTLLLQLTNTSAYYMYLLLLLKSVVYFAIITCCLLRRTAFCCNGEKS

SEQ ID NO: 18755 - protein, 131 aa, synthetic construct
KIHWQEKKSNTILGSQEGNTMKTNDTYMKFSWLTVPEKSLDKEHRCIVRHENNKNGVDQEIIFPPIKTDVITMDPKDNCSKDANDTLLLQLTNTSAYYMYLLLLLKSVVYFAIITCCLLRRTAFCCNGEKS

SEQ ID NO: 18756 - protein, 130 aa, synthetic construct
IHWQEKKSNTILGSQEGNTMKTNDTYMKFSWLTVPEKSLDKEHRCIVRHENNKNGVDQEIIFPPIKTDVITMDPKDNCSKDANDTLLLQLTNTSAYYMYLLLLLKSVVYFAIITCCLLRRTAFCCNGEKS

SEQ ID NO: 18757 - protein, 129 aa, synthetic construct
HWQEKKSNTILGSQEGNTMKTNDTYMKFSWLTVPEKSLDKEHRCIVRHENNKNGVDQEIIFPPIKTDVITMDPKDNCSKDANDTLLLQLTNTSAYYMYLLLLLKSVVYFAIITCCLLRRTAFCCNGEKS

SEQ ID NO: 18758 - protein, 128 aa, synthetic construct
WQEKKSNTILGSQEGNTMKTNDTYMKFSWLTVPEKSLDKEHRCIVRHENNKNGVDQEIIFPPIKTDVITMDPKDNCSKDANDTLLLQLTNTSAYYMYLLLLLKSVVYFAIITCCLLRRTAFCCNGEKS

SEQ ID NO: 18759 - protein, 127 aa, synthetic construct
QEKKSNTILGSQEGNTMKTNDTYMKFSWLTVPEKSLDKEHRCIVRHENNKNGVDQEIIFPPIKTDVITMDPKDNCSKDANDTLLLQLTNTSAYYMYLLLLLKSVVYFAIITCCLLRRTAFCCNGEKS

SEQ ID NO: 18760 - protein, 126 aa, synthetic construct
EKKSNTILGSQEGNTMKTNDTYMKFSWLTVPEKSLDKEHRCIVRHENNKNGVDQEIIFPPIKTDVITMDPKDNCSKDANDTLLLQLTNTSAYYMYLLLLLKSVVYFAIITCCLLRRTAFCCNGEKS

SEQ ID NO: 18761 - protein, 125 aa, synthetic construct
KKSNTILGSQEGNTMKTNDTYMKFSWLTVPEKSLDKEHRCIVRHENNKNGVDQEIIFPPIKTDVITMDPKDNCSKDANDTLLLQLTNTSAYYMYLLLLLKSVVYFAIITCCLLRRTAFCCNGEKS

SEQ ID NO: 18762 - protein, 124 aa, synthetic construct
KSNTILGSQEGNTMKTNDTYMKFSWLTVPEKSLDKEHRCIVRHENNKNGVDQEIIFPPIKTDVITMDPKDNCSKDANDTLLLQLTNTSAYYMYLLLLLKSVVYFAIITCCLLRRTAFCCNGEKS

SEQ ID NO: 18763 - protein, 123 aa, synthetic construct
SNTILGSQEGNTMKTNDTYMKFSWLTVPEKSLDKEHRCIVRHENNKNGVDQEIIFPPIKTDVITMDPKDNCSKDANDTLLLQLTNTSAYYMYLLLLLKSVVYFAIITCCLLRRTAFCCNGEKS

SEQ ID NO: 18764 - protein, 122 aa, synthetic construct
NTILGSQEGNTMKTNDTYMKFSWLTVPEKSLDKEHRCIVRHENNKNGVDQEIIFPPIKTDVITMDPKDNCSKDANDTLLLQLTNTSAYYMYLLLLLKSVVYFAIITCCLLRRTAFCCNGEKS

SEQ ID NO: 18765 - protein, 121 aa, synthetic construct
TILGSQEGNTMKTNDTYMKFSWLTVPEKSLDKEHRCIVRHENNKNGVDQEIIFPPIKTDVITMDPKDNCSKDANDTLLLQLTNTSAYYMYLLLLLKSVVYFAIITCCLLRRTAFCCNGEKS

SEQ ID NO: 18766 - protein, 120 aa, synthetic construct
ILGSQEGNTMKTNDTYMKFSWLTVPEKSLDKEHRCIVRHENNKNGVDQEIIFPPIKTDVITMDPKDNCSKDANDTLLLQLTNTSAYYMYLLLLLKSVVYFAIITCCLLRRTAFCCNGEKS

SEQ ID NO: 18767 - protein, 119 aa, synthetic construct
LGSQEGNTMKTNDTYMKFSWLTVPEKSLDKEHRCIVRHENNKNGVDQEIIFPPIKTDVITMDPKDNCSKDANDTLLLQLTNTSAYYMYLLLLLKSVVYFAIITCCLLRRTAFCCNGEKS

SEQ ID NO: 18768 - protein, 118 aa, synthetic construct
GSQEGNTMKTNDTYMKFSWLTVPEKSLDKEHRCIVRHENNKNGVDQEIIFPPIKTDVITMDPKDNCSKDANDTLLLQLTNTSAYYMYLLLLLKSVVYFAIITCCLLRRTAFCCNGEKS

SEQ ID NO: 18769 - protein, 117 aa, synthetic construct
SQEGNTMKTNDTYMKFSWLTVPEKSLDKEHRCIVRHENNKNGVDQEIIFPPIKTDVITMDPKDNCSKDANDTLLLQLTNTSAYYMYLLLLLKSVVYFAIITCCLLRRTAFCCNGEKS

SEQ ID NO: 18770 - protein, 116 aa, synthetic construct
QEGNTMKTNDTYMKFSWLTVPEKSLDKEHRCIVRHENNKNGVDQEIIFPPIKTDVITMDPKDNCSKDANDTLLLQLTNTSAYYMYLLLLLKSVVYFAIITCCLLRRTAFCCNGEKS

SEQ ID NO: 18771 - protein, 115 aa, synthetic construct
EGNTMKTNDTYMKFSWLTVPEKSLDKEHRCIVRHENNKNGVDQEIIFPPIKTDVITMDPKDNCSKDANDTLLLQLTNTSAYYMYLLLLLKSVVYFAIITCCLLRRTAFCCNGEKS

SEQ ID NO: 18772 - protein, 114 aa, synthetic construct
GNTMKTNDTYMKFSWLTVPEKSLDKEHRCIVRHENNKNGVDQEIIFPPIKTDVITMDPKDNCSKDANDTLLLQLTNTSAYYMYLLLLLKSVVYFAIITCCLLRRTAFCCNGEKS

SEQ ID NO: 18773 - protein, 113 aa, synthetic construct
NTMKTNDTYMKFSWLTVPEKSLDKEHRCIVRHENNKNGVDQEIIFPPIKTDVITMDPKDNCSKDANDTLLLQLTNTSAYYMYLLLLLKSVVYFAIITCCLLRRTAFCCNGEKS

SEQ ID NO: 18774 - protein, 112 aa, synthetic construct
TMKTNDTYMKFSWLTVPEKSLDKEHRCIVRHENNKNGVDQEIIFPPIKTDVITMDPKDNCSKDANDTLLLQLTNTSAYYMYLLLLLKSVVYFAIITCCLLRRTAFCCNGEKS

SEQ ID NO: 18775 - protein, 111 aa, synthetic construct
MKTNDTYMKFSWLTVPEKSLDKEHRCIVRHENNKNGVDQEIIFPPIKTDVITMDPKDNCSKDANDTLLLQLTNTSAYYMYLLLLLKSVVYFAIITCCLLRRTAFCCNGEKS

SEQ ID NO: 18776 - protein, 110 aa, synthetic construct
KTNDTYMKFSWLTVPEKSLDKEHRCIVRHENNKNGVDQEIIFPPIKTDVITMDPKDNCSKDANDTLLLQLTNTSAYYMYLLLLLKSVVYFAIITCCLLRRTAFCCNGEKS

SEQ ID NO: 18777 - protein, 109 aa, synthetic construct
TNDTYMKFSWLTVPEKSLDKEHRCIVRHENNKNGVDQEIIFPPIKTDVITMDPKDNCSKDANDTLLLQLTNTSAYYMYLLLLLKSVVYFAIITCCLLRRTAFCCNGEKS

SEQ ID NO: 18778 - protein, 108 aa, synthetic construct
NDTYMKFSWLTVPEKSLDKEHRCIVRHENNKNGVDQEIIFPPIKTDVITMDPKDNCSKDANDTLLLQLTNTSAYYMYLLLLLKSVVYFAIITCCLLRRTAFCCNGEKS

SEQ ID NO: 18779 - protein, 107 aa, synthetic construct
DTYMKFSWLTVPEKSLDKEHRCIVRHENNKNGVDQEIIFPPIKTDVITMDPKDNCSKDANDTLLLQLTNTSAYYMYLLLLLKSVVYFAIITCCLLRRTAFCCNGEKS

SEQ ID NO: 18780 - protein, 106 aa, synthetic construct
TYMKFSWLTVPEKSLDKEHRCIVRHENNKNGVDQEIIFPPIKTDVITMDPKDNCSKDANDTLLLQLTNTSAYYMYLLLLLKSVVYFAIITCCLLRRTAFCCNGEKS

SEQ ID NO: 18781 - protein, 105 aa, synthetic construct
YMKFSWLTVPEKSLDKEHRCIVRHENNKNGVDQEIIFPPIKTDVITMDPKDNCSKDANDTLLLQLTNTSAYYMYLLLLLKSVVYFAIITCCLLRRTAFCCNGEKS

SEQ ID NO: 18782 - protein, 104 aa, synthetic construct
MKFSWLTVPEKSLDKEHRCIVRHENNKNGVDQEIIFPPIKTDVITMDPKDNCSKDANDTLLLQLTNTSAYYMYLLLLLKSVVYFAIITCCLLRRTAFCCNGEKS

SEQ ID NO: 18783 - protein, 103 aa, synthetic construct
KFSWLTVPEKSLDKEHRCIVRHENNKNGVDQEIIFPPIKTDVITMDPKDNCSKDANDTLLLQLTNTSAYYMYLLLLLKSVVYFAIITCCLLRRTAFCCNGEKS

SEQ ID NO: 18784 - protein, 102 aa, synthetic construct
FSWLTVPEKSLDKEHRCIVRHENNKNGVDQEIIFPPIKTDVITMDPKDNCSKDANDTLLLQLTNTSAYYMYLLLLLKSVVYFAIITCCLLRRTAFCCNGEKS

SEQ ID NO: 18785 - protein, 101 aa, synthetic construct
SWLTVPEKSLDKEHRCIVRHENNKNGVDQEIIFPPIKTDVITMDPKDNCSKDANDTLLLQLTNTSAYYMYLLLLLKSVVYFAIITCCLLRRTAFCCNGEKS

SEQ ID NO: 18786 - protein, 100 aa, synthetic construct
WLTVPEKSLDKEHRCIVRHENNKNGVDQEIIFPPIKTDVITMDPKDNCSKDANDTLLLQLTNTSAYYMYLLLLLKSVVYFAIITCCLLRRTAFCCNGEKS

SEQ ID NO: 18787 - protein, 99 aa, synthetic construct
LTVPEKSLDKEHRCIVRHENNKNGVDQEIIFPPIKTDVITMDPKDNCSKDANDTLLLQLTNTSAYYMYLLLLLKSVVYFAIITCCLLRRTAFCCNGEKS

SEQ ID NO: 18788 - protein, 98 aa, synthetic construct
TVPEKSLDKEHRCIVRHENNKNGVDQEIIFPPIKTDVITMDPKDNCSKDANDTLLLQLTNTSAYYMYLLLLLKSVVYFAIITCCLLRRTAFCCNGEKS

SEQ ID NO: 18789 - protein, 97 aa, synthetic construct
VPEKSLDKEHRCIVRHENNKNGVDQEIIFPPIKTDVITMDPKDNCSKDANDTLLLQLTNTSAYYMYLLLLLKSVVYFAIITCCLLRRTAFCCNGEKS

SEQ ID NO: 18790 - protein, 96 aa, synthetic construct
PEKSLDKEHRCIVRHENNKNGVDQEIIFPPIKTDVITMDPKDNCSKDANDTLLLQLTNTSAYYMYLLLLLKSVVYFAIITCCLLRRTAFCCNGEKS

SEQ ID NO: 18791 - protein, 95 aa, synthetic construct
EKSLDKEHRCIVRHENNKNGVDQEIIFPPIKTDVITMDPKDNCSKDANDTLLLQLTNTSAYYMYLLLLLKSVVYFAIITCCLLRRTAFCCNGEKS

SEQ ID NO: 18792 - protein, 94 aa, synthetic construct
KSLDKEHRCIVRHENNKNGVDQEIIFPPIKTDVITMDPKDNCSKDANDTLLLQLTNTSAYYMYLLLLLKSVVYFAIITCCLLRRTAFCCNGEKS

SEQ ID NO: 18793 - protein, 93 aa, synthetic construct
SLDKEHRCIVRHENNKNGVDQEIIFPPIKTDVITMDPKDNCSKDANDTLLLQLTNTSAYYMYLLLLLKSVVYFAIITCCLLRRTAFCCNGEKS

SEQ ID NO: 18794 - protein, 92 aa, synthetic construct
LDKEHRCIVRHENNKNGVDQEIIFPPIKTDVITMDPKDNCSKDANDTLLLQLTNTSAYYMYLLLLLKSVVYFAIITCCLLRRTAFCCNGEKS

SEQ ID NO: 18795 - protein, 91 aa, synthetic construct
DKEHRCIVRHENNKNGVDQEIIFPPIKTDVITMDPKDNCSKDANDTLLLQLTNTSAYYMYLLLLLKSVVYFAIITCCLLRRTAFCCNGEKS

SEQ ID NO: 18796 - protein, 90 aa, synthetic construct
KEHRCIVRHENNKNGVDQEIIFPPIKTDVITMDPKDNCSKDANDTLLLQLTNTSAYYMYLLLLLKSVVYFAIITCCLLRRTAFCCNGEKS

SEQ ID NO: 18797 - protein, 89 aa, synthetic construct
EHRCIVRHENNKNGVDQEIIFPPIKTDVITMDPKDNCSKDANDTLLLQLTNTSAYYMYLLLLLKSVVYFAIITCCLLRRTAFCCNGEKS

SEQ ID NO: 18798 - protein, 88 aa, synthetic construct
HRCIVRHENNKNGVDQEIIFPPIKTDVITMDPKDNCSKDANDTLLLQLTNTSAYYMYLLLLLKSVVYFAIITCCLLRRTAFCCNGEKS

SEQ ID NO: 18799 - protein, 87 aa, synthetic construct
RCIVRHENNKNGVDQEIIFPPIKTDVITMDPKDNCSKDANDTLLLQLTNTSAYYMYLLLLLKSVVYFAIITCCLLRRTAFCCNGEKS

SEQ ID NO: 18800 - protein, 86 aa, synthetic construct
CIVRHENNKNGVDQEIIFPPIKTDVITMDPKDNCSKDANDTLLLQLTNTSAYYMYLLLLLKSVVYFAIITCCLLRRTAFCCNGEKS

SEQ ID NO: 18801 - protein, 85 aa, synthetic construct
IVRHENNKNGVDQEIIFPPIKTDVITMDPKDNCSKDANDTLLLQLTNTSAYYMYLLLLLKSVVYFAIITCCLLRRTAFCCNGEKS

SEQ ID NO: 18802 - protein, 84 aa, synthetic construct
VRHENNKNGVDQEIIFPPIKTDVITMDPKDNCSKDANDTLLLQLTNTSAYYMYLLLLLKSVVYFAIITCCLLRRTAFCCNGEKS

SEQ ID NO: 18803 - protein, 83 aa, synthetic construct
RHENNKNGVDQEIIFPPIKTDVITMDPKDNCSKDANDTLLLQLTNTSAYYMYLLLLLKSVVYFAIITCCLLRRTAFCCNGEKS

SEQ ID NO: 18804 - protein, 82 aa, synthetic construct
HENNKNGVDQEIIFPPIKTDVITMDPKDNCSKDANDTLLLQLTNTSAYYMYLLLLLKSVVYFAIITCCLLRRTAFCCNGEKS

SEQ ID NO: 18805 - protein, 81 aa, synthetic construct
ENNKNGVDQEIIFPPIKTDVITMDPKDNCSKDANDTLLLQLTNTSAYYMYLLLLLKSVVYFAIITCCLLRRTAFCCNGEKS

SEQ ID NO: 18806 - protein, 80 aa, synthetic construct
NNKNGVDQEIIFPPIKTDVITMDPKDNCSKDANDTLLLQLTNTSAYYMYLLLLLKSVVYFAIITCCLLRRTAFCCNGEKS

SEQ ID NO: 18807 - protein, 79 aa, synthetic construct
NKNGVDQEIIFPPIKTDVITMDPKDNCSKDANDTLLLQLTNTSAYYMYLLLLLKSVVYFAIITCCLLRRTAFCCNGEKS

SEQ ID NO: 18808 - protein, 78 aa, synthetic construct
KNGVDQEIIFPPIKTDVITMDPKDNCSKDANDTLLLQLTNTSAYYMYLLLLLKSVVYFAIITCCLLRRTAFCCNGEKS

SEQ ID NO: 18809 - protein, 77 aa, synthetic construct
NGVDQEIIFPPIKTDVITMDPKDNCSKDANDTLLLQLTNTSAYYMYLLLLLKSVVYFAIITCCLLRRTAFCCNGEKS

SEQ ID NO: 18810 - protein, 76 aa, synthetic construct
GVDQEIIFPPIKTDVITMDPKDNCSKDANDTLLLQLTNTSAYYMYLLLLLKSVVYFAIITCCLLRRTAFCCNGEKS

SEQ ID NO: 18811 - protein, 75 aa, synthetic construct
VDQEIIFPPIKTDVITMDPKDNCSKDANDTLLLQLTNTSAYYMYLLLLLKSVVYFAIITCCLLRRTAFCCNGEKS

SEQ ID NO: 18812 - protein, 74 aa, synthetic construct
DQEIIFPPIKTDVITMDPKDNCSKDANDTLLLQLTNTSAYYMYLLLLLKSVVYFAIITCCLLRRTAFCCNGEKS

SEQ ID NO: 18813 - protein, 73 aa, synthetic construct
QEIIFPPIKTDVITMDPKDNCSKDANDTLLLQLTNTSAYYMYLLLLLKSVVYFAIITCCLLRRTAFCCNGEKS

SEQ ID NO: 18814 - protein, 153 aa, synthetic construct; identical to SEQ ID NO: 8874

SEQ ID NO: 18815 - protein, 152 aa, synthetic construct
QPHTKPSVFVMKNGTNVACLVKEFYPKDIRINLVSSKKITEFDPAIVISPSGKYNAVKLGKYEDSNSVTCSVQHDNKTVHSTDFEVKTDSTDHVKPKETENTKQPSKSCHKPKAIVHTEKVNMMSLTVLGLRMLFAKTVAVNFLLTAKLFFL

SEQ ID NO: 18816 - protein, 151 aa, synthetic construct
PHTKPSVFVMKNGTNVACLVKEFYPKDIRINLVSSKKITEFDPAIVISPSGKYNAVKLGKYEDSNSVTCSVQHDNKTVHSTDFEVKTDSTDHVKPKETENTKQPSKSCHKPKAIVHTEKVNMMSLTVLGLRMLFAKTVAVNFLLTAKLFFL

SEQ ID NO: 18817 - protein, 150 aa, synthetic construct
HTKPSVFVMKNGTNVACLVKEFYPKDIRINLVSSKKITEFDPAIVISPSGKYNAVKLGKYEDSNSVTCSVQHDNKTVHSTDFEVKTDSTDHVKPKETENTKQPSKSCHKPKAIVHTEKVNMMSLTVLGLRMLFAKTVAVNFLLTAKLFFL

SEQ ID NO: 18818 - protein, 149 aa, synthetic construct
TKPSVFVMKNGTNVACLVKEFYPKDIRINLVSSKKITEFDPAIVISPSGKYNAVKLGKYEDSNSVTCSVQHDNKTVHSTDFEVKTDSTDHVKPKETENTKQPSKSCHKPKAIVHTEKVNMMSLTVLGLRMLFAKTVAVNFLLTAKLFFL

SEQ ID NO: 18819 - protein, 148 aa, synthetic construct
KPSVFVMKNGTNVACLVKEFYPKDIRINLVSSKKITEFDPAIVISPSGKYNAVKLGKYEDSNSVTCSVQHDNKTVHSTDFEVKTDSTDHVKPKETENTKQPSKSCHKPKAIVHTEKVNMMSLTVLGLRMLFAKTVAVNFLLTAKLFFL

SEQ ID NO: 18820 - protein, 146 aa, synthetic construct
SVFVMKNGTNVACLVKEFYPKDIRINLVSSKKITEFDPAIVISPSGKYNAVKLGKYEDSNSVTCSVQHDNKTVHSTDFEVKTDSTDHVKPKETENTKQPSKSCHKPKAIVHTEKVNMMSLTVLGLRMLFAKTVAVNFLLTAKLFFL

SEQ ID NO: 18821 - protein, 145 aa, synthetic construct
VFVMKNGTNVACLVKEFYPKDIRINLVSSKKITEFDPAIVISPSGKYNAVKLGKYEDSNSVTCSVQHDNKTVHSTDFEVKTDSTDHVKPKETENTKQPSKSCHKPKAIVHTEKVNMMSLTVLGLRMLFAKTVAVNFLLTAKLFFL

SEQ ID NO: 18822 - protein, 144 aa, synthetic construct
FVMKNGTNVACLVKEFYPKDIRINLVSSKKITEFDPAIVISPSGKYNAVKLGKYEDSNSVTCSVQHDNKTVHSTDFEVKTDSTDHVKPKETENTKQPSKSCHKPKAIVHTEKVNMMSLTVLGLRMLFAKTVAVNFLLTAKLFFL

SEQ ID NO: 18823 - protein, 143 aa, synthetic construct
VMKNGTNVACLVKEFYPKDIRINLVSSKKITEFDPAIVISPSGKYNAVKLGKYEDSNSVTCSVQHDNKTVHSTDFEVKTDSTDHVKPKETENTKQPSKSCHKPKAIVHTEKVNMMSLTVLGLRMLFAKTVAVNFLLTAKLFFL

SEQ ID NO: 18824 - protein, 142 aa, synthetic construct
MKNGTNVACLVKEFYPKDIRINLVSSKKITEFDPAIVISPSGKYNAVKLGKYEDSNSVTCSVQHDNKTVHSTDFEVKTDSTDHVKPKETENTKQPSKSCHKPKAIVHTEKVNMMSLTVLGLRMLFAKTVAVNFLLTAKLFFL

SEQ ID NO: 18825 - protein, 141 aa, synthetic construct
KNGTNVACLVKEFYPKDIRINLVSSKKITEFDPAIVISPSGKYNAVKLGKYEDSNSVTCSVQHDNKTVHSTDFEVKTDSTDHVKPKETENTKQPSKSCHKPKAIVHTEKVNMMSLTVLGLRMLFAKTVAVNFLLTAKLFFL

SEQ ID NO: 18826 - protein, 140 aa, synthetic construct
NGTNVACLVKEFYPKDIRINLVSSKKITEFDPAIVISPSGKYNAVKLGKYEDSNSVTCSVQHDNKTVHSTDFEVKTDSTDHVKPKETENTKQPSKSCHKPKAIVHTEKVNMMSLTVLGLRMLFAKTVAVNFLLTAKLFFL

SEQ ID NO: 18827 - protein, 139 aa, synthetic construct
GTNVACLVKEFYPKDIRINLVSSKKITEFDPAIVISPSGKYNAVKLGKYEDSNSVTCSVQHDNKTVHSTDFEVKTDSTDHVKPKETENTKQPSKSCHKPKAIVHTEKVNMMSLTVLGLRMLFAKTVAVNFLLTAKLFFL

SEQ ID NO: 18828 - protein, 138 aa, synthetic construct
TNVACLVKEFYPKDIRINLVSSKKITEFDPAIVISPSGKYNAVKLGKYEDSNSVTCSVQHDNKTVHSTDFEVKTDSTDHVKPKETENTKQPSKSCHKPKAIVHTEKVNMMSLTVLGLRMLFAKTVAVNFLLTAKLFFL

SEQ ID NO: 18829 - protein, 137 aa, synthetic construct
NVACLVKEFYPKDIRINLVSSKKITEFDPAIVISPSGKYNAVKLGKYEDSNSVTCSVQHDNKTVHSTDFEVKTDSTDHVKPKETENTKQPSKSCHKPKAIVHTEKVNMMSLTVLGLRMLFAKTVAVNFLLTAKLFFL

SEQ ID NO: 18830 - protein, 136 aa, synthetic construct
VACLVKEFYPKDIRINLVSSKKITEFDPAIVISPSGKYNAVKLGKYEDSNSVTCSVQHDNKTVHSTDFEVKTDSTDHVKPKETENTKQPSKSCHKPKAIVHTEKVNMMSLTVLGLRMLFAKTVAVNFLLTAKLFFL

SEQ ID NO: 18831 - protein, 135 aa, synthetic construct
ACLVKEFYPKDIRINLVSSKKITEFDPAIVISPSGKYNAVKLGKYEDSNSVTCSVQHDNKTVHSTDFEVKTDSTDHVKPKETENTKQPSKSCHKPKAIVHTEKVNMMSLTVLGLRMLFAKTVAVNFLLTAKLFFL

SEQ ID NO: 18832 - protein, 134 aa, synthetic construct
CLVKEFYPKDIRINLVSSKKITEFDPAIVISPSGKYNAVKLGKYEDSNSVTCSVQHDNKTVHSTDFEVKTDSTDHVKPKETENTKQPSKSCHKPKAIVHTEKVNMMSLTVLGLRMLFAKTVAVNFLLTAKLFFL

SEQ ID NO: 18833 - protein, 133 aa, synthetic construct
LVKEFYPKDIRINLVSSKKITEFDPAIVISPSGKYNAVKLGKYEDSNSVTCSVQHDNKTVHSTDFEVKTDSTDHVKPKETENTKQPSKSCHKPKAIVHTEKVNMMSLTVLGLRMLFAKTVAVNFLLTAKLFFL

SEQ ID NO: 18834 - protein, 132 aa, synthetic construct
VKEFYPKDIRINLVSSKKITEFDPAIVISPSGKYNAVKLGKYEDSNSVTCSVQHDNKTVHSTDFEVKTDSTDHVKPKETENTKQPSKSCHKPKAIVHTEKVNMMSLTVLGLRMLFAKTVAVNFLLTAKLFFL

SEQ ID NO: 18835 - protein, 131 aa, synthetic construct
KEFYPKDIRINLVSSKKITEFDPAIVISPSGKYNAVKLGKYEDSNSVTCSVQHDNKTVHSTDFEVKTDSTDHVKPKETENTKQPSKSCHKPKAIVHTEKVNMMSLTVLGLRMLFAKTVAVNFLLTAKLFFL

SEQ ID NO: 18836 - protein, 130 aa, synthetic construct
EFYPKDIRINLVSSKKITEFDPAIVISPSGKYNAVKLGKYEDSNSVTCSVQHDNKTVHSTDFEVKTDSTDHVKPKETENTKQPSKSCHKPKAIVHTEKVNMMSLTVLGLRMLFAKTVAVNFLLTAKLFFL

SEQ ID NO: 18837 - protein, 129 aa, synthetic construct
FYPKDIRINLVSSKKITEFDPAIVISPSGKYNAVKLGKYEDSNSVTCSVQHDNKTVHSTDFEVKTDSTDHVKPKETENTKQPSKSCHKPKAIVHTEKVNMMSLTVLGLRMLFAKTVAVNFLLTAKLFFL

SEQ ID NO: 18838 - protein, 128 aa, synthetic construct
YPKDIRINLVSSKKITEFDPAIVISPSGKYNAVKLGKYEDSNSVTCSVQHDNKTVHSTDFEVKTDSTDHVKPKETENTKQPSKSCHKPKAIVHTEKVNMMSLTVLGLRMLFAKTVAVNFLLTAKLFFL

SEQ ID NO: 18839 - protein, 127 aa, synthetic construct
PKDIRINLVSSKKITEFDPAIVISPSGKYNAVKLGKYEDSNSVTCSVQHDNKTVHSTDFEVKTDSTDHVKPKETENTKQPSKSCHKPKAIVHTEKVNMMSLTVLGLRMLFAKTVAVNFLLTAKLFFL

SEQ ID NO: 18840 - protein, 126 aa, synthetic construct
KDIRINLVSSKKITEFDPAIVISPSGKYNAVKLGKYEDSNSVTCSVQHDNKTVHSTDFEVKTDSTDHVKPKETENTKQPSKSCHKPKAIVHTEKVNMMSLTVLGLRMLFAKTVAVNFLLTAKLFFL

SEQ ID NO: 18841 - protein, 125 aa, synthetic construct
DIRINLVSSKKITEFDPAIVISPSGKYNAVKLGKYEDSNSVTCSVQHDNKTVHSTDFEVKTDSTDHVKPKETENTKQPSKSCHKPKAIVHTEKVNMMSLTVLGLRMLFAKTVAVNFLLTAKLFFL

SEQ ID NO: 18842 - protein, 124 aa, synthetic construct
IRINLVSSKKITEFDPAIVISPSGKYNAVKLGKYEDSNSVTCSVQHDNKTVHSTDFEVKTDSTDHVKPKETENTKQPSKSCHKPKAIVHTEKVNMMSLTVLGLRMLFAKTVAVNFLLTAKLFFL

SEQ ID NO: 18843 - protein, 123 aa, synthetic construct
RINLVSSKKITEFDPAIVISPSGKYNAVKLGKYEDSNSVTCSVQHDNKTVHSTDFEVKTDSTDHVKPKETENTKQPSKSCHKPKAIVHTEKVNMMSLTVLGLRMLFAKTVAVNFLLTAKLFFL

SEQ ID NO: 18844 - protein, 122 aa, synthetic construct
INLVSSKKITEFDPAIVISPSGKYNAVKLGKYEDSNSVTCSVQHDNKTVHSTDFEVKTDSTDHVKPKETENTKQPSKSCHKPKAIVHTEKVNMMSLTVLGLRMLFAKTVAVNFLLTAKLFFL

SEQ ID NO: 18845 - protein, 121 aa, synthetic construct
NLVSSKKITEFDPAIVISPSGKYNAVKLGKYEDSNSVTCSVQHDNKTVHSTDFEVKTDSTDHVKPKETENTKQPSKSCHKPKAIVHTEKVNMMSLTVLGLRMLFAKTVAVNFLLTAKLFFL

SEQ ID NO: 18846 - protein, 120 aa, synthetic construct
LVSSKKITEFDPAIVISPSGKYNAVKLGKYEDSNSVTCSVQHDNKTVHSTDFEVKTDSTDHVKPKETENTKQPSKSCHKPKAIVHTEKVNMMSLTVLGLRMLFAKTVAVNFLLTAKLFFL

SEQ ID NO: 18847 - protein, 119 aa, synthetic construct
VSSKKITEFDPAIVISPSGKYNAVKLGKYEDSNSVTCSVQHDNKTVHSTDFEVKTDSTDHVKPKETENTKQPSKSCHKPKAIVHTEKVNMMSLTVLGLRMLFAKTVAVNFLLTAKLFFL

SEQ ID NO: 18848 - protein, 118 aa, synthetic construct
SSKKITEFDPAIVISPSGKYNAVKLGKYEDSNSVTCSVQHDNKTVHSTDFEVKTDSTDHVKPKETENTKQPSKSCHKPKAIVHTEKVNMMSLTVLGLRMLFAKTVAVNFLLTAKLFFL

SEQ ID NO: 18849 - protein, 117 aa, synthetic construct
SKKITEFDPAIVISPSGKYNAVKLGKYEDSNSVTCSVQHDNKTVHSTDFEVKTDSTDHVKPKETENTKQPSKSCHKPKAIVHTEKVNMMSLTVLGLRMLFAKTVAVNFLLTAKLFFL

SEQ ID NO: 18850 - protein, 116 aa, synthetic construct
KKITEFDPAIVISPSGKYNAVKLGKYEDSNSVTCSVQHDNKTVHSTDFEVKTDSTDHVKPKETENTKQPSKSCHKPKAIVHTEKVNMMSLTVLGLRMLFAKTVAVNFLLTAKLFFL

SEQ ID NO: 18851 - protein, 115 aa, synthetic construct
KITEFDPAIVISPSGKYNAVKLGKYEDSNSVTCSVQHDNKTVHSTDFEVKTDSTDHVKPKETENTKQPSKSCHKPKAIVHTEKVNMMSLTVLGLRMLFAKTVAVNFLLTAKLFFL

SEQ ID NO: 18852 - protein, 114 aa, synthetic construct
ITEFDPAIVISPSGKYNAVKLGKYEDSNSVTCSVQHDNKTVHSTDFEVKTDSTDHVKPKETENTKQPSKSCHKPKAIVHTEKVNMMSLTVLGLRMLFAKTVAVNFLLTAKLFFL

SEQ ID NO: 18853 - protein, 113 aa, synthetic construct
TEFDPAIVISPSGKYNAVKLGKYEDSNSVTCSVQHDNKTVHSTDFEVKTDSTDHVKPKETENTKQPSKSCHKPKAIVHTEKVNMMSLTVLGLRMLFAKTVAVNFLLTAKLFFL

SEQ ID NO: 18854 - protein, 112 aa, synthetic construct
EFDPAIVISPSGKYNAVKLGKYEDSNSVTCSVQHDNKTVHSTDFEVKTDSTDHVKPKETENTKQPSKSCHKPKAIVHTEKVNMMSLTVLGLRMLFAKTVAVNFLLTAKLFFL

SEQ ID NO: 18855 - protein, 111 aa, synthetic construct
FDPAIVISPSGKYNAVKLGKYEDSNSVTCSVQHDNKTVHSTDFEVKTDSTDHVKPKETENTKQPSKSCHKPKAIVHTEKVNMMSLTVLGLRMLFAKTVAVNFLLTAKLFFL

SEQ ID NO: 18856 - protein, 110 aa, synthetic construct
DPAIVISPSGKYNAVKLGKYEDSNSVTCSVQHDNKTVHSTDFEVKTDSTDHVKPKETENTKQPSKSCHKPKAIVHTEKVNMMSLTVLGLRMLFAKTVAVNFLLTAKLFFL

SEQ ID NO: 18857 - protein, 109 aa, synthetic construct
PAIVISPSGKYNAVKLGKYEDSNSVTCSVQHDNKTVHSTDFEVKTDSTDHVKPKETENTKQPSKSCHKPKAIVHTEKVNMMSLTVLGLRMLFAKTVAVNFLLTAKLFFL

SEQ ID NO: 18858 - protein, 108 aa, synthetic construct
AIVISPSGKYNAVKLGKYEDSNSVTCSVQHDNKTVHSTDFEVKTDSTDHVKPKETENTKQPSKSCHKPKAIVHTEKVNMMSLTVLGLRMLFAKTVAVNFLLTAKLFFL

SEQ ID NO: 18859 - protein, 107 aa, synthetic construct
IVISPSGKYNAVKLGKYEDSNSVTCSVQHDNKTVHSTDFEVKTDSTDHVKPKETENTKQPSKSCHKPKAIVHTEKVNMMSLTVLGLRMLFAKTVAVNFLLTAKLFFL

SEQ ID NO: 18860 - protein, 106 aa, synthetic construct
VISPSGKYNAVKLGKYEDSNSVTCSVQHDNKTVHSTDFEVKTDSTDHVKPKETENTKQPSKSCHKPKAIVHTEKVNMMSLTVLGLRMLFAKTVAVNFLLTAKLFFL

SEQ ID NO: 18861 - protein, 105 aa, synthetic construct
ISPSGKYNAVKLGKYEDSNSVTCSVQHDNKTVHSTDFEVKTDSTDHVKPKETENTKQPSKSCHKPKAIVHTEKVNMMSLTVLGLRMLFAKTVAVNFLLTAKLFFL

SEQ ID NO: 18862 - protein, 104 aa, synthetic construct
SPSGKYNAVKLGKYEDSNSVTCSVQHDNKTVHSTDFEVKTDSTDHVKPKETENTKQPSKSCHKPKAIVHTEKVNMMSLTVLGLRMLFAKTVAVNFLLTAKLFFL

SEQ ID NO: 18863 - protein, 103 aa, synthetic construct
PSGKYNAVKLGKYEDSNSVTCSVQHDNKTVHSTDFEVKTDSTDHVKPKETENTKQPSKSCHKPKAIVHTEKVNMMSLTVLGLRMLFAKTVAVNFLLTAKLFFL

SEQ ID NO: 18864 - protein, 102 aa, synthetic construct
SGKYNAVKLGKYEDSNSVTCSVQHDNKTVHSTDFEVKTDSTDHVKPKETENTKQPSKSCHKPKAIVHTEKVNMMSLTVLGLRMLFAKTVAVNFLLTAKLFFL

SEQ ID NO: 18865 - protein, 101 aa, synthetic construct
GKYNAVKLGKYEDSNSVTCSVQHDNKTVHSTDFEVKTDSTDHVKPKETENTKQPSKSCHKPKAIVHTEKVNMMSLTVLGLRMLFAKTVAVNFLLTAKLFFL

SEQ ID NO: 18866 - protein, 100 aa, synthetic construct
KYNAVKLGKYEDSNSVTCSVQHDNKTVHSTDFEVKTDSTDHVKPKETENTKQPSKSCHKPKAIVHTEKVNMMSLTVLGLRMLFAKTVAVNFLLTAKLFFL

SEQ ID NO: 18867 - protein, 99 aa, synthetic construct
YNAVKLGKYEDSNSVTCSVQHDNKTVHSTDFEVKTDSTDHVKPKETENTKQPSKSCHKPKAIVHTEKVNMMSLTVLGLRMLFAKTVAVNFLLTAKLFFL

SEQ ID NO: 18868 - protein, 98 aa, synthetic construct
NAVKLGKYEDSNSVTCSVQHDNKTVHSTDFEVKTDSTDHVKPKETENTKQPSKSCHKPKAIVHTEKVNMMSLTVLGLRMLFAKTVAVNFLLTAKLFFL

SEQ ID NO: 18869 - protein, 97 aa, synthetic construct
AVKLGKYEDSNSVTCSVQHDNKTVHSTDFEVKTDSTDHVKPKETENTKQPSKSCHKPKAIVHTEKVNMMSLTVLGLRMLFAKTVAVNFLLTAKLFFL

SEQ ID NO: 18870 - protein, 96 aa, synthetic construct
VKLGKYEDSNSVTCSVQHDNKTVHSTDFEVKTDSTDHVKPKETENTKQPSKSCHKPKAIVHTEKVNMMSLTVLGLRMLFAKTVAVNFLLTAKLFFL

SEQ ID NO: 18871 - protein, 95 aa, synthetic construct
KLGKYEDSNSVTCSVQHDNKTVHSTDFEVKTDSTDHVKPKETENTKQPSKSCHKPKAIVHTEKVNMMSLTVLGLRMLFAKTVAVNFLLTAKLFFL

SEQ ID NO: 18872 - protein, 94 aa, synthetic construct
LGKYEDSNSVTCSVQHDNKTVHSTDFEVKTDSTDHVKPKETENTKQPSKSCHKPKAIVHTEKVNMMSLTVLGLRMLFAKTVAVNFLLTAKLFFL

SEQ ID NO: 18873 - protein, 93 aa, synthetic construct
GKYEDSNSVTCSVQHDNKTVHSTDFEVKTDSTDHVKPKETENTKQPSKSCHKPKAIVHTEKVNMMSLTVLGLRMLFAKTVAVNFLLTAKLFFL

SEQ ID NO: 18874 - protein, 92 aa, synthetic construct
KYEDSNSVTCSVQHDNKTVHSTDFEVKTDSTDHVKPKETENTKQPSKSCHKPKAIVHTEKVNMMSLTVLGLRMLFAKTVAVNFLLTAKLFFL

SEQ ID NO: 18875 - protein, 91 aa, synthetic construct
YEDSNSVTCSVQHDNKTVHSTDFEVKTDSTDHVKPKETENTKQPSKSCHKPKAIVHTEKVNMMSLTVLGLRMLFAKTVAVNFLLTAKLFFL

SEQ ID NO: 18876 - protein, 90 aa, synthetic construct
EDSNSVTCSVQHDNKTVHSTDFEVKTDSTDHVKPKETENTKQPSKSCHKPKAIVHTEKVNMMSLTVLGLRMLFAKTVAVNFLLTAKLFFL

SEQ ID NO: 18877 - protein, 89 aa, synthetic construct
DSNSVTCSVQHDNKTVHSTDFEVKTDSTDHVKPKETENTKQPSKSCHKPKAIVHTEKVNMMSLTVLGLRMLFAKTVAVNFLLTAKLFFL

SEQ ID NO: 18878 - protein, 88 aa, synthetic construct
SNSVTCSVQHDNKTVHSTDFEVKTDSTDHVKPKETENTKQPSKSCHKPKAIVHTEKVNMMSLTVLGLRMLFAKTVAVNFLLTAKLFFL

SEQ ID NO: 18879 - protein, 87 aa, synthetic construct
NSVTCSVQHDNKTVHSTDFEVKTDSTDHVKPKETENTKQPSKSCHKPKAIVHTEKVNMMSLTVLGLRMLFAKTVAVNFLLTAKLFFL

SEQ ID NO: 18880 - protein, 86 aa, synthetic construct
SVTCSVQHDNKTVHSTDFEVKTDSTDHVKPKETENTKQPSKSCHKPKAIVHTEKVNMMSLTVLGLRMLFAKTVAVNFLLTAKLFFL

SEQ ID NO: 18881 - protein, 85 aa, synthetic construct
VTCSVQHDNKTVHSTDFEVKTDSTDHVKPKETENTKQPSKSCHKPKAIVHTEKVNMMSLTVLGLRMLFAKTVAVNFLLTAKLFFL

SEQ ID NO: 18882 - protein, 84 aa, synthetic construct
TCSVQHDNKTVHSTDFEVKTDSTDHVKPKETENTKQPSKSCHKPKAIVHTEKVNMMSLTVLGLRMLFAKTVAVNFLLTAKLFFL

SEQ ID NO: 18883 - protein, 83 aa, synthetic construct
CSVQHDNKTVHSTDFEVKTDSTDHVKPKETENTKQPSKSCHKPKAIVHTEKVNMMSLTVLGLRMLFAKTVAVNFLLTAKLFFL

SEQ ID NO: 18884 - protein, 82 aa, synthetic construct
SVQHDNKTVHSTDFEVKTDSTDHVKPKETENTKQPSKSCHKPKAIVHTEKVNMMSLTVLGLRMLFAKTVAVNFLLTAKLFFL

SEQ ID NO: 18885 - protein, 81 aa, synthetic construct
VQHDNKTVHSTDFEVKTDSTDHVKPKETENTKQPSKSCHKPKAIVHTEKVNMMSLTVLGLRMLFAKTVAVNFLLTAKLFFL

SEQ ID NO: 18886 - protein, 80 aa, synthetic construct
QHDNKTVHSTDFEVKTDSTDHVKPKETENTKQPSKSCHKPKAIVHTEKVNMMSLTVLGLRMLFAKTVAVNFLLTAKLFFL

SEQ ID NO: 18887 - protein, 79 aa, synthetic construct
HDNKTVHSTDFEVKTDSTDHVKPKETENTKQPSKSCHKPKAIVHTEKVNMMSLTVLGLRMLFAKTVAVNFLLTAKLFFL

SEQ ID NO: 18888 - protein, 78 aa, synthetic construct
DNKTVHSTDFEVKTDSTDHVKPKETENTKQPSKSCHKPKAIVHTEKVNMMSLTVLGLRMLFAKTVAVNFLLTAKLFFL

SEQ ID NO: 18889 - protein, 77 aa, synthetic construct
NKTVHSTDFEVKTDSTDHVKPKETENTKQPSKSCHKPKAIVHTEKVNMMSLTVLGLRMLFAKTVAVNFLLTAKLFFL

SEQ ID NO: 18890 - protein, 76 aa, synthetic construct
KTVHSTDFEVKTDSTDHVKPKETENTKQPSKSCHKPKAIVHTEKVNMMSLTVLGLRMLFAKTVAVNFLLTAKLFFL

SEQ ID NO: 18891 - protein, 75 aa, synthetic construct
TVHSTDFEVKTDSTDHVKPKETENTKQPSKSCHKPKAIVHTEKVNMMSLTVLGLRMLFAKTVAVNFLLTAKLFFL

SEQ ID NO: 18892 - protein, 74 aa, synthetic construct
VHSTDFEVKTDSTDHVKPKETENTKQPSKSCHKPKAIVHTEKVNMMSLTVLGLRMLFAKTVAVNFLLTAKLFFL

SEQ ID NO: 18893 - protein, 73 aa, synthetic construct
HSTDFEVKTDSTDHVKPKETENTKQPSKSCHKPKAIVHTEKVNMMSLTVLGLRMLFAKTVAVNFLLTAKLFFL

SEQ ID NO: 18894 - protein, 72 aa, synthetic construct
STDFEVKTDSTDHVKPKETENTKQPSKSCHKPKAIVHTEKVNMMSLTVLGLRMLFAKTVAVNFLLTAKLFFL

SEQ ID NO: 18895 - protein, 71 aa, synthetic construct
TDFEVKTDSTDHVKPKETENTKQPSKSCHKPKAIVHTEKVNMMSLTVLGLRMLFAKTVAVNFLLTAKLFFL

SEQ ID NO: 18896 - protein, 70 aa, synthetic construct
DFEVKTDSTDHVKPKETENTKQPSKSCHKPKAIVHTEKVNMMSLTVLGLRMLFAKTVAVNFLLTAKLFFL

SEQ ID NO: 18897 - protein, 69 aa, synthetic construct
FEVKTDSTDHVKPKETENTKQPSKSCHKPKAIVHTEKVNMMSLTVLGLRMLFAKTVAVNFLLTAKLFFL

SEQ ID NO: 18898 - protein, 68 aa, synthetic construct; identical to SEQ ID NO: 8907

SEQ ID NO: 18899 - protein, 67 aa, synthetic construct
VKTDSTDHVKPKETENTKQPSKSCHKPKAIVHTEKVNMMSLTVLGLRMLFAKTVAVNFLLTAKLFFL

SEQ ID NO: 18900 - protein, 66 aa, synthetic construct
KTDSTDHVKPKETENTKQPSKSCHKPKAIVHTEKVNMMSLTVLGLRMLFAKTVAVNFLLTAKLFFL

SEQ ID NO: 18901 - protein, 65 aa, synthetic construct
TDSTDHVKPKETENTKQPSKSCHKPKAIVHTEKVNMMSLTVLGLRMLFAKTVAVNFLLTAKLFFL

SEQ ID NO: 18902 - protein, 64 aa, synthetic construct
DSTDHVKPKETENTKQPSKSCHKPKAIVHTEKVNMMSLTVLGLRMLFAKTVAVNFLLTAKLFFL

SEQ ID NO: 18903 - protein, 63 aa, synthetic construct
STDHVKPKETENTKQPSKSCHKPKAIVHTEKVNMMSLTVLGLRMLFAKTVAVNFLLTAKLFFL

SEQ ID NO: 18904 - protein, 62 aa, synthetic construct
TDHVKPKETENTKQPSKSCHKPKAIVHTEKVNMMSLTVLGLRMLFAKTVAVNFLLTAKLFFL

SEQ ID NO: 18905 - protein, 61 aa, synthetic construct; identical to SEQ ID NO: 8908

SEQ ID NO: 18906 - protein, 60 aa, synthetic construct
HVKPKETENTKQPSKSCHKPKAIVHTEKVNMMSLTVLGLRMLFAKTVAVNFLLTAKLFFL

SEQ ID NO: 18907 - protein, 59 aa, synthetic construct
VKPKETENTKQPSKSCHKPKAIVHTEKVNMMSLTVLGLRMLFAKTVAVNFLLTAKLFFL

SEQ ID NO: 18908 - protein, 58 aa, synthetic construct
KPKETENTKQPSKSCHKPKAIVHTEKVNMMSLTVLGLRMLFAKTVAVNFLLTAKLFFL

SEQ ID NO: 18909 - protein, 57 aa, synthetic construct
PKETENTKQPSKSCHKPKAIVHTEKVNMMSLTVLGLRMLFAKTVAVNFLLTAKLFFL

SEQ ID NO: 18910 - protein, 56 aa, synthetic construct
KETENTKQPSKSCHKPKAIVHTEKVNMMSLTVLGLRMLFAKTVAVNFLLTAKLFFL

SEQ ID NO: 18911 - protein, 55 aa, synthetic construct
ETENTKQPSKSCHKPKAIVHTEKVNMMSLTVLGLRMLFAKTVAVNFLLTAKLFFL

SEQ ID NO: 18912 - protein, 54 aa, synthetic construct
TENTKQPSKSCHKPKAIVHTEKVNMMSLTVLGLRMLFAKTVAVNFLLTAKLFFL

SEQ ID NO: 18913 - protein, 53 aa, synthetic construct
ENTKQPSKSCHKPKAIVHTEKVNMMSLTVLGLRMLFAKTVAVNFLLTAKLFFL

SEQ ID NO: 18914 - protein, 52 aa, synthetic construct
NTKQPSKSCHKPKAIVHTEKVNMMSLTVLGLRMLFAKTVAVNFLLTAKLFFL

SEQ ID NO: 18915 - protein, 869 aa, synthetic construct
MALPVTALLLPLALLLHAARPLEEDLKNVFPPEVAVFEPSKAEIAHTQKATLVCLATGFYPDHVELSWWVNGKEVHSGVCTDPQPLKEQPALNDSRYCLSSRLRVSATFWQNPRNHFRCQVQFYGLSENDEWTQDRAKPVTQIVSAEAWGRADCGITSASYHQGVLSATILYEILLGKATLYAVLVSALVLMAMVKRKDSRGRAKRSGSGATNFSLLKQAGDVEENPGPTSMALPVTALLLPLALLLHAARPDIQMTQTTSSLSASLGDRVTISCRASQDISKYLNWYQQKPDGTVKLLIYHTSRLHSGVPSRFSGSGSGTDYSLTISNLEQEDIATYFCQQGNTLPYTFGGGTKLEITGGGGSGGGGSGGGGSEVKLQESGPGLVAPSQSLSVTCTVSGVSLPDYGVSWIRQPPRKGLEWLGVIWGSETTYYNSALKSRLTIIKDNSKSQVFLKMNSLQTDDTAIYYCAKHYYYGGSYAMDYWGQGTSVTVSSTRIQNPDPAVYQLRDSKSSDKSVCLFTDFDSQTNVSQSKDSDVYITDKCVLDMRSMDFKSNSAVAWSNKSDFACANAFNNSIIPEDTFFPSSDVPCDVKLVEKSFETDTNLNFQNLSVIGFRILLLKVAGFNLLMTLRLWSSRAKRSGSGVKQTLNFDLLKLAGDVESNPGPSRGHMTEYKPTVRLATRDDVPRAVRTLAAAFADYPATRHTVDPDRHIERVTELQELFLTRVGLDIGKVWVADDGAAVAVWTTPESVEAGAVFAEIGPRMAELSGSRLAAQQQMEGLLAPHRPKEPAWFLATVGVSPDHQGKGLGSAVVLPGVEAAERAGVPAFLETSAPRNLPFYERLGFTVTADVEVPEGPRTWCMTRKPGA

SEQ ID NO: 18916 - protein, 870 aa, synthetic construct
MALPVTALLLPLALLLHAARPLEEDLKNVFPPEVAVFEPSKAEIAHTQKATLVCLATGFYPDHVELSWWVNGKEVHSGVCTDPQPLKEQPALNDSRYCLSSRLRVSATFWQNPRNHFRCQVQFYGLSENDEWTQDRAKPVTQIVSAEAWGRADCGITSASYHQGVLSATILYEILLGKATLYAVLVSALVLMAMVKRKDSRGRAKRSGSGATNFSLLKQAGDVEENPGPTSTMALPVTALLLPLALLLHAARPEIVMTQSPATLSLSPGERATLSCRASQDISKYLNWYQQKPGQAPRLLIYHTSRLHSGIPARFSGSGSGTDYTLTISSLQPEDFAVYFCQQGNTLPYTFGQGTKLEIKGGGGSGGGGSGGGGSQVQLQESGPGLVKPSETLSLTCTVSGVSLPDYGVSWIRQPPGKGLEWIGVIWGSETTYYNSSLKSRVTISKDNSKNQVSLKLSSVTAADTAVYYCAKHYYYGGSYAMDYWGQGTLVTVSSTRIQNPDPAVYQLRDSKSSDKSVCLFTDFDSQTNVSQSKDSDVYITDKCVLDMRSMDFKSNSAVAWSNKSDFACANAFNNSIIPEDTFFPSSDVPCDVKLVEKSFETDTNLNFQNLSVIGFRILLLKVAGFNLLMTLRLWSSRAKRSGSGVKQTLNFDLLKLAGDVESNPGPSRGHMTEYKPTVRLATRDDVPRAVRTLAAAFADYPATRHTVDPDRHIERVTELQELFLTRVGLDIGKVWVADDGAAVAVWTTPESVEAGAVFAEIGPRMAELSGSRLAAQQQMEGLLAPHRPKEPAWFLATVGVSPDHQGKGLGSAVVLPGVEAAERAGVPAFLETSAPRNLPFYERLGFTVTADVEVPEGPRTWCMTRKPGA

SEQ ID NO: 18917 - protein, 871 aa, synthetic construct
MALPVTALLLPLALLLHAARPLEEDLKNVFPPEVAVFEPSKAEIAHTQKATLVCLATGFYPDHVELSWWVNGKEVHSGVCTDPQPLKEQPALNDSRYCLSSRLRVSATFWQNPRNHFRCQVQFYGLSENDEWTQDRAKPVTQIVSAEAWGRADCGITSASYHQGVLSATILYEILLGKATLYAVLVSALVLMAMVKRKDSRGRAKRSGSGATNFSLLKQAGDVEENPGPTSTMALPVTALLLPLALLLHAARPDEIVLTQSPATLSLSPGERATLSCSASSSVSYMHWYQQKPGQAPRLLIYDTSKLASGIPARFSGSGSGTDFTLTISSLEPEDVAVYYCFQGSVYPFTFGQGTKLEIKRGGGGSGGGGSGGGGSQVQLQESGPGLVKPSQTLSLTCTVSGGSISTSGMGVGWIRQHPGKGLEWIGHIWWDDDKRYNPALKSRVTISVDTSKNQFSLKLSSVTAADTAVYYCARMELWSYYFDYWGQGTLVTVSSTRIQNPDPAVYQLRDSKSSDKSVCLFTDFDSQTNVSQSKDSDVYITDKCVLDMRSMDFKSNSAVAWSNKSDFACANAFNNSIIPEDTFFPSSDVPCDVKLVEKSFETDTNLNFQNLSVIGFRILLLKVAGFNLLMTLRLWSSRAKRSGSGVKQTLNFDLLKLAGDVESNPGPSRGHMTEYKPTVRLATRDDVPRAVRTLAAAFADYPATRHTVDPDRHIERVTELQELFLTRVGLDIGKVWVADDGAAVAVWTTPESVEAGAVFAEIGPRMAELSGSRLAAQQQMEGLLAPHRPKEPAWFLATVGVSPDHQGKGLGSAVVLPGVEAAERAGVPAFLETSAPRNLPFYERLGFTVTADVEVPEGPRTWCMTRKPGA

SEQ ID NO: 18918 - protein, 867 aa, synthetic construct
MALPVTALLLPLALLLHAARPLEEDLKNVFPPEVAVFEPSKAEIAHTQKATLVCLATGFYPDHVELSWWVNGKEVHSGVCTDPQPLKEQPALNDSRYCLSSRLRVSATFWQNPRNHFRCQVQFYGLSENDEWTQDRAKPVTQIVSAEAWGRADCGITSASYHQGVLSATILYEILLGKATLYAVLVSALVLMAMVKRKDSRGRAKRSGSGATNFSLLKQAGDVEENPGPTSMALPVTALLLPLALLLHAARPDIQMTQSPSSLSASVGDRVTITCRASQDISNYLNWYQQKPGKAPKLLIYYTSRLHSGVPSRFSGSGSGTDFTLTISSLQPEDFATYYCQQGNTLPYTFGQGTKVEIKRGGGGSGGGGSGGGGSEVQLVESGGGLVQPGGSLRLSCAASGFTFSDYFMSWVRQAPGKGLEWVATISNGGTYTYYPDSVKGRFTISRDNSKNTLYLQMNSLRAEDTAVYYCARFDGYIFDYWGQGTLVTVSSTRIQNPDPAVYQLRDSKSSDKSVCLFTDFDSQTNVSQSKDSDVYITDKCVLDMRSMDFKSNSAVAWSNKSDFACANAFNNSIIPEDTFFPSSDVPCDVKLVEKSFETDTNLNFQNLSVIGFRILLLKVAGFNLLMTLRLWSSRAKRSGSGVKQTLNFDLLKLAGDVESNPGPSRGHMTEYKPTVRLATRDDVPRAVRTLAAAFADYPATRHTVDPDRHIERVTELQELFLTRVGLDIGKVWVADDGAAVAVWTTPESVEAGAVFAEIGPRMAELSGSRLAAQQQMEGLLAPHRPKEPAWFLATVGVSPDHQGKGLGSAVVLPGVEAAERAGVPAFLETSAPRNLPFYERLGFTVTADVEVPEGPRTWCMTRKPGA

SEQ ID NO: 18919 - protein, 871 aa, synthetic construct
MALPVTALLLPLALLLHAARPLEEDLKNVFPPEVAVFEPSKAEIAHTQKATLVCLATGFYPDHVELSWWVNGKEVHSGVCTDPQPLKEQPALNDSRYCLSSRLRVSATFWQNPRNHFRCQVQFYGLSENDEWTQDRAKPVTQIVSAEAWGRADCGITSASYHQGVLSATILYEILLGKATLYAVLVSALVLMAMVKRKDSRGRAKRSGSGATNFSLLKQAGDVEENPGPTSMALPVTALLLPLALLLHAARPDIQMTQSPSSLSASVGDRVTITCKASDHINNWLAWYQQKPGQAPKLLIYGATTLETGVPSRFSGSGSGTDYTLTISSLQPEDFATYYCQQSWNTPWTFGQGTKLEIKRGGGGSGGGGSGGGGSQVQLQQPGAELVKPGASVKMSCKASGYAFSSYWINWMKQKPGQGLEWIGQIYPGDGDTNYNGKFKGRATLTADTSSSTAYMQLSSLTSEDSAVYFCARSITTVVGCAMDYWGQGTSVTVSSTRIQNPDPAVYQLRDSKSSDKSVCLFTDFDSQTNVSQSKDSDVYITDKCVLDMRSMDFKSNSAVAWSNKSDFACANAFNNSIIPEDTFFPSSDVPCDVKLVEKSFETDTNLNFQNLSVIGFRILLLKVAGFNLLMTLRLWSSRAKRSGSGVKQTLNFDLLKLAGDVESNPGPSRGHMTEYKPTVRLATRDDVPRAVRTLAAAFADYPATRHTVDPDRHIERVTELQELFLTRVGLDIGKVWVADDGAAVAVWTTPESVEAGAVFAEIGPRMAELSGSRLAAQQQMEGLLAPHRPKEPAWFLATVGVSPDHQGKGLGSAVVLPGVEAAERAGVPAFLETSAPRNLPFYERLGFTVTADVEVPEGPRTWCMTRKPGA

SEQ ID NO: 18920 - protein, 873 aa, synthetic construct
MALPVTALLLPLALLLHAARPLEEDLKNVFPPEVAVFEPSKAEIAHTQKATLVCLATGFYPDHVELSWWVNGKEVHSGVCTDPQPLKEQPALNDSRYCLSSRLRVSATFWQNPRNHFRCQVQFYGLSENDEWTQDRAKPVTQIVSAEAWGRADCGITSASYHQGVLSATILYEILLGKATLYAVLVSALVLMAMVKRKDSRGRAKRSGSGATNFSLLKQAGDVEENPGPTSMALPVTALLLPLALLLHAARPQIVLSQSPAILSASPGEKVTMTCRASSSVSYMHWYQQKPGSSPKPWIYATSNLASGVPARFSGSGSGTSYSFTISRVEAEDAATYYCQQWTFNPPTFGGGTRLEIKRTVAAGGGGSGGGGSGGGGSQAYLQQSGAELVRPGASVKMSCKASGYTFTSYNMHWVKQTPRQGLEWIGGIYPGNGDTSYNQKFKGKATLTVGKSSSTAYMQLSSLTSEDSAVYFCARYDYNYAMDYWGQGTSVTVSSASTRIQNPDPAVYQLRDSKSSDKSVCLFTDFDSQTNVSQSKDSDVYITDKCVLDMRSMDFKSNSAVAWSNKSDFACANAFNNSIIPEDTFFPSSDVPCDVKLVEKSFETDTNLNFQNLSVIGFRILLLKVAGFNLLMTLRLWSSRAKRSGSGVKQTLNFDLLKLAGDVESNPGPSRGHMTEYKPTVRLATRDDVPRAVRTLAAAFADYPATRHTVDPDRHIERVTELQELFLTRVGLDIGKVWVADDGAAVAVWTTPESVEAGAVFAEIGPRMAELSGSRLAAQQQMEGLLAPHRPKEPAWFLATVGVSPDHQGKGLGSAVVLPGVEAAERAGVPAFLETSAPRNLPFYERLGFTVTADVEVPEGPRTWCMTRKPGA

SEQ ID NO: 18921 - protein, 871 aa, synthetic construct
MALPVTALLLPLALLLHAARPLEEDLKNVFPPEVAVFEPSKAEIAHTQKATLVCLATGFYPDHVELSWWVNGKEVHSGVCTDPQPLKEQPALNDSRYCLSSRLRVSATFWQNPRNHFRCQVQFYGLSENDEWTQDRAKPVTQIVSAEAWGRADCGITSASYHQGVLSATILYEILLGKATLYAVLVSALVLMAMVKRKDSRGRAKRSGSGATNFSLLKQAGDVEENPGPTSMALPVTALLLPLALLLHAARPEIVLTQSPATLSLSPGERATLSCRASQSVSSYLAWYQQKPGQAPRLLIYDASNRATGIPARFSGSGSGTDFTLTISSLEPEDFAVYYCQQRSNWPITFGQGTRLEIKGGGGSGGGGSGGGGSEVQLVESGGGLVQPDRSLRLSCAASGFTFHDYAMHWVRQAPGKGLEWVSTISWNSGTIGYADSVKGRFTISRDNAKNSLYLQMNSLRAEDTALYYCAKDIQYGNYYYGMDVWGQGTTVTVSSTRIQNPDPAVYQLRDSKSSDKSVCLFTDFDSQTNVSQSKDSDVYITDKCVLDMRSMDFKSNSAVAWSNKSDFACANAFNNSIIPEDTFFPSSDVPCDVKLVEKSFETDTNLNFQNLSVIGFRILLLKVAGFNLLMTLRLWSSRAKRSGSGVKQTLNFDLLKLAGDVESNPGPSRGHMTEYKPTVRLATRDDVPRAVRTLAAAFADYPATRHTVDPDRHIERVTELQELFLTRVGLDIGKVWVADDGAAVAVWTTPESVEAGAVFAEIGPRMAELSGSRLAAQQQMEGLLAPHRPKEPAWFLATVGVSPDHQGKGLGSAVVLPGVEAAERAGVPAFLETSAPRNLPFYERLGFTVTADVEVPEGPRTWCMTRKPGA

SEQ ID NO: 18922 - protein, 869 aa, synthetic construct
MALPVTALLLPLALLLHAARPLEEDLKNVFPPEVAVFEPSKAEIAHTQKATLVCLATGFYPDHVELSWWVNGKEVHSGVCTDPQPLKEQPALNDSRYCLSSRLRVSATFWQNPRNHFRCQVQFYGLSENDEWTQDRAKPVTQIVSAEAWGRADCGITSASYHQGVLSATILYEILLGKATLYAVLVSALVLMAMVKRKDSRGRAKRSGSGATNFSLLKQAGDVEENPGPTSMALPVTALLLPLALLLHAARPDIQMTQSPSSLSASVGDRVTITCRASQDVNTAVAWYQQKPGKAPKLLIYSASFLESGVPSRFSGSRSGTDFTLTISSLQPEDFATYYCQQHYTTPPTFGQTKVEIKRGGGGSGGGGSGGGGSEVQLVESGGGLVQPGGSLRLSCAASGFNIKDTYIHWVRQAPGKGLEWVARIYPTNGYTRYADSVKGRFTISADTSKNTAYLQMNSLRAEDTAVYYCSRWGGDGFYAMDVWGQGTLVTVSSTRIQNPDPAVYQLRDSKSSDKSVCLFTDFDSQTNVSQSKDSDVYITDKCVLDMRSMDFKSNSAVAWSNKSDFACANAFNNSIIPEDTFFPSSDVPCDVKLVEKSFETDTNLNFQNLSVIGFRILLLKVAGFNLLMTLRLWSSRAKRSGSGVKQTLNFDLLKLAGDVESNPGPSRGHMTEYKPTVRLATRDDVPRAVRTLAAAFADYPATRHTVDPDRHIERVTELQELFLTRVGLDIGKVWVADDGAAVAVWTTPESVEAGAVFAEIGPRMAELSGSRLAAQQQMEGLLAPHRPKEPAWFLATVGVSPDHQGKGLGSAVVLPGVEAAERAGVPAFLETSAPRNLPFYERLGFTVTADVEVPEGPRTWCMTRKPGA

SEQ ID NO: 18923 - protein, 748 aa, synthetic construct
MALPVTALLLPLALLLHAARPLEEDLKNVFPPEVAVFEPSKAEIAHTQKATLVCLATGFYPDHVELSWWVNGKEVHSGVCTDPQPLKEQPALNDSRYCLSSRLRVSATFWQNPRNHFRCQVQFYGLSENDEWTQDRAKPVTQIVSAEAWGRADCGITSASYHQGVLSATILYEILLGKATLYAVLVSALVLMAMVKRKDSRGRAKRSGSGATNFSLLKQAGDVEENPGPTSMALPVTALLLPLALLLHAARPDEFEVQLVESGGGLVQAGGSLRLSCAASGITFSINTMGWYRQAPGKQRELVALISSIGDTYYADSVKGRFTISRDNAKNTVYLQMNSLKPEDTAVYYCKRFRTAAQGTDYWGQGTQVTVSSTRIQNPDPAVYQLRDSKSSDKSVCLFTDFDSQTNVSQSKDSDVYITDKCVLDMRSMDFKSNSAVAWSNKSDFACANAFNNSIIPEDTFFPSSDVPCDVKLVEKSFETDTNLNFQNLSVIGFRILLLKVAGFNLLMTLRLWSSRAKRSGSGVKQTLNFDLLKLAGDVESNPGPSRGHMTEYKPTVRLATRDDVPRAVRTLAAAFADYPATRHTVDPDRHIERVTELQELFLTRVGLDIGKVWVADDGAAVAVWTTPESVEAGAVFAEIGPRMAELSGSRLAAQQQMEGLLAPHRPKEPAWFLATVGVSPDHQGKGLGSAVVLPGVEAAERAGVPAFLETSAPRNLPFYERLGFTVTADVEVPEGPRTWCMTRKPGA

SEQ ID NO: 18924 - protein, 748 aa, synthetic construct; identical to SEQ ID NO: 18923

SEQ ID NO: 18925 - protein, 1013 aa, synthetic construct
MALPVTALLLPLALLLHAARPLEEDLKNVFPPEVAVFEPSKAEIAHTQKATLVCLATGFYPDHVELSWWVNGKEVHSGVCTDPQPLKEQPALNDSRYCLSSRLRVSATFWQNPRNHFRCQVQFYGLSENDEWTQDRAKPVTQIVSAEAWGRADCGITSASYHQGVLSATILYEILLGKATLYAVLVSALVLMAMVKRKDSRGRAKRSGSGATNFSLLKQAGDVEENPGPTSMALPVTALLLPLALLLHAARPQVQLVESGGGLVQAGDSVTLSCTASGRTFSSYALAWFRQRPGKEREFVAGLRWGGPTNYADSVKDRFTISGDSAKHTMYLQMNSLKPEDTAVYYCGYNPGGWAVPSQYEYDSWGQGTQVTVSSGTGGGGSGGGGSGGGGSEFDIQMTQSPSSLSASVGDRVTITCKASDHINNWLAWYQQKPGQAPKLLIYGATTLETGVPSRFSGSGSGTDYTLTISSLQPEDFATYYCQQSWNTPWTFGQGTKLEIKRGGGGSGGGGSGGGGSQVQLQQPGAELVKPGASVKMSCKASGYAFSSYWINWMKQKPGQGLEWIGQIYPGDGDTNYNGKFKGRATLTADTSSSTAYMQLSSLTSEDSAVYFCARSITTVVGCAMDYWGQGTSVTVSSTRIQNPDPAVYQLRDSKSSDKSVCLFTDFDSQTNVSQSKDSDVYITDKCVLDMRSMDFKSNSAVAWSNKSDFACANAFNNSIIPEDTFFPSSDVPCDVKLVEKSFETDTNLNFQNLSVIGFRILLLKVAGFNLLMTLRLWSSRAKRSGSGVKQTLNFDLLKLAGDVESNPGPSRGHMTEYKPTVRLATRDDVPRAVRTLAAAFADYPATRHTVDPDRHIERVTELQELFLTRVGLDIGKVWVADDGAAVAVWTTPESVEAGAVFAEIGPRMAELSGSRLAAQQQMEGLLAPHRPKEPAWFLATVGVSPDHQGKGLGSAVVLPGVEAAERAGVPAFLETSAPRNLPFYERLGFTVTADVEVPEGPRTWCMTRKPGA

SEQ ID NO: 18926 - protein, 1142 aa, synthetic construct
MALPVTALLLPLALLLHAARPLEEDLKNVFPPEVAVFEPSKAEIAHTQKATLVCLATGFYPDHVELSWWVNGKEVHSGVCTDPQPLKEQPALNDSRYCLSSRLRVSATFWQNPRNHFRCQVQFYGLSENDEWTQDRAKPVTQIVSAEAWGRADCGITSASYHQGVLSATILYEILLGKATLYAVLVSALVLMAMVKRKDSRGRAKRSGSGATNFSLLKQAGDVEENPGPTSMALPVTALLLPLALLLHAARPEVQLLESGGGLVQPGGSLRLSCAASGFTFSSYAMSWVRQAPGKGLEWVSSISGSGDYIYYADSVKGRFTISRDISKNTLYLQMNSLRAEDTAVYYCAKEGTGANSSLADYRGQGTLVTVSSGGGSGGGSQVQLVESGGGLVQAGDSVTLSCTASGRTFSSYALAWFRQRPGKEREFVAGLRWGGPTNYADSVKDRFTISGDSAKHTMYLQMNSLKPEDTAVYYCGYNPGGWAVPSQYEYDSWGQGTQVTVSSGTGGGGSGGGGSGGGGSEFDIQMTQSPSSLSASVGDRVTITCKASDHINNWLAWYQQKPGQAPKLLIYGATTLETGVPSRFSGSGSGTDYTLTISSLQPEDFATYYCQQSWNTPWTFGQGTKLEIKRGGGGSGGGGSGGGGSQVQLQQPGAELVKPGASVKMSCKASGYAFSSYWINWMKQKPGQGLEWIGQIYPGDGDTNYNGKFKGRATLTADTSSSTAYMQLSSLTSEDSAVYFCARSITTVVGCAMDYWGQGTSVTVSSTRIQNPDPAVYQLRDSKSSDKSVCLFTDFDSQTNVSQSKDSDVYITDKCVLDMRSMDFKSNSAVAWSNKSDFACANAFNNSIIPEDTFFPSSDVPCDVKLVEKSFETDTNLNFQNLSVIGFRILLLKVAGFNLLMTLRLWSSRAKRSGSGVKQTLNFDLLKLAGDVESNPGPSRGHMTEYKPTVRLATRDDVPRAVRTLAAAFADYPATRHTVDPDRHIERVTELQELFLTRVGLDIGKVWVADDGAAVAVWTTPESVEAGAVFAEIGPRMAELSGSRLAAQQQMEGLLAPHRPKEPAWFLATVGVSPDHQGKGLGSAVVLPGVEAAERAGVPAFLETSAPRNLPFYERLGFTVTADVEVPEGPRTWCMTRKPGA

SEQ ID NO: 18927 - protein, 1140 aa, synthetic construct
MALPVTALLLPLALLLHAARPLEEDLKNVFPPEVAVFEPSKAEIAHTQKATLVCLATGFYPDHVELSWWVNGKEVHSGVCTDPQPLKEQPALNDSRYCLSSRLRVSATFWQNPRNHFRCQVQFYGLSENDEWTQDRAKPVTQIVSAEAWGRADCGITSASYHQGVLSATILYEILLGKATLYAVLVSALVLMAMVKRKDSRGRAKRSGSGATNFSLLKQAGDVEENPGPTSMALPVTALLLPLALLLHAARPGVTQSPTHLIKTRGQQATLRCSPISGHTSVYWYQQALGLGLQFLLWYDEGEERNRGNFPPRFSGRQFPNYSSELNVNALELEDSALYLCASSLGGPRGLAGLRGDEQFFGPGTRLTVLEGGGSGGGSQVQLVESGGGLVQAGDSVTLSCTASGRTFSSYALAWFRQRPGKEREFVAGLRWGGPTNYADSVKDRFTISGDSAKHTMYLQMNSLKPEDTAVYYCGYNPGGWAVPSQYEYDSWGQGTQVTVSSGTGGGGSGGGGSGGGGSEFDIQMTQSPSSLSASVGDRVTITCKASDHINNWLAWYQQKPGQAPKLLIYGATTLETGVPSRFSGSGSGTDYTLTISSLQPEDFATYYCQQSWNTPWTFGQGTKLEIKRGGGGSGGGGSGGGGSQVQLQQPGAELVKPGASVKMSCKASGYAFSSYWINWMKQKPGQGLEWIGQIYPGDGDTNYNGKFKGRATLTADTSSSTAYMQLSSLTSEDSAVYFCARSITTVVGCAMDYWGQGTSVTVSSTRIQNPDPAVYQLRDSKSSDKSVCLFTDFDSQTNVSQSKDSDVYITDKCVLDMRSMDFKSNSAVAWSNKSDFACANAFNNSIIPEDTFFPSSDVPCDVKLVEKSFETDTNLNFQNLSVIGFRILLLKVAGFNLLMTLRLWSSRAKRSGSGVKQTLNFDLLKLAGDVESNPGPSRGHMTEYKPTVRLATRDDVPRAVRTLAAAFADYPATRHTVDPDRHIERVTELQELFLTRVGLDIGKVWVADDGAAVAVWTTPESVEAGAVFAEIGPRMAELSGSRLAAQQQMEGLLAPHRPKEPAWFLATVGVSPDHQGKGLGSAVVLPGVEAAERAGVPAFLETSAPRNLPFYERLGFTVTADVEVPEGPRTWCMTRKPGA

SEQ ID NO: 18928 - protein, 1134 aa, synthetic construct
MALPVTALLLPLALLLHAARPLEEDLKNVFPPEVAVFEPSKAEIAHTQKATLVCLATGFYPDHVELSWWVNGKEVHSGVCTDPQPLKEQPALNDSRYCLSSRLRVSATFWQNPRNHFRCQVQFYGLSENDEWTQDRAKPVTQIVSAEAWGRADCGITSASYHQGVLSATILYEILLGKATLYAVLVSALVLMAMVKRKDSRGRAKRSGSGATNFSLLKQAGDVEENPGPTSMALPVTALLLPLALLLHAARPGVTQSPTHLIKTRGQQATLRCSPISGHTSVYWYQQALGLGLQFLLWYDEGEERNRGNFPPRFSGRQFPNYSSELNVNALELEDSALYLCASSLGGPRGLAGLRGDEQFFGPGTRLTVLEGGGSGGGSGVTQSPTHLIKTRGQQATLRCSPISGHTSVYWYQQALGLGLQFLLWYDEGEERNRGNFPPRFSGRQFPNYSSELNVNALELEDSALYLCASSLGGDELGADGNEQFFGPGTRLTVLEGTGGGGSGGGGSGGGGSEFDIQMTQSPSSLSASVGDRVTITCKASDHINNWLAWYQQKPGQAPKLLIYGATTLETGVPSRFSGSGSGTDYTLTISSLQPEDFATYYCQQSWNTPWTFGQGTKLEIKRGGGGSGGGGSGGGGSQVQLQQPGAELVKPGASVKMSCKASGYAFSSYWINWMKQKPGQGLEWIGQIYPGDGDTNYNGKFKGRATLTADTSSSTAYMQLSSLTSEDSAVYFCARSITTVVGCAMDYWGQGTSVTVSSTRIQNPDPAVYQLRDSKSSDKSVCLFTDFDSQTNVSQSKDSDVYITDKCVLDMRSMDFKSNSAVAWSNKSDFACANAFNNSIIPEDTFFPSSDVPCDVKLVEKSFETDTNLNFQNLSVIGFRILLLKVAGFNLLMTLRLWSSRAKRSGSGVKQTLNFDLLKLAGDVESNPGPSRGHMTEYKPTVRLATRDDVPRAVRTLAAAFADYPATRHTVDPDRHIERVTELQELFLTRVGLDIGKVWVADDGAAVAVWTTPESVEAGAVFAEIGPRMAELSGSRLAAQQQMEGLLAPHRPKEPAWFLATVGVSPDHQGKGLGSAVVLPGVEAAERAGVPAFLETSAPRNLPFYERLGFTVTADVEVPEGPRTWCMTRKPGA

SEQ ID NO: 18929 - protein, 754 aa, synthetic construct
MALPVTALLLPLALLLHAARPLEEDLKNVFPPEVAVFEPSKAEIAHTQKATLVCLATGFYPDHVELSWWVNGKEVHSGVCTDPQPLKEQPALNDSRYCLSSRLRVSATFWQNPRNHFRCQVQFYGLSENDEWTQDRAKPVTQIVSAEAWGRADCGITSASYHQGVLSATILYEILLGKATLYAVLVSALVLMAMVKRKDSRGRAKRSGSGATNFSLLKQAGDVEENPGPTSMALPVTALLLPLALLLHAARPDEFGSDLGIKLLFAAAKGQDDEVRILLAAGADVNAKDFEGYTPLHVAAYDGHLEIVEVLLKAGADVNAKDSQGRTPLHEAAYSGHLEIVEVLLKAGADVNAQDDAGETPADLAAAWGHEDIAEVLQKTRIQNPDPAVYQLRDSKSSDKSVCLFTDFDSQTNVSQSKDSDVYITDKCVLDMRSMDFKSNSAVAWSNKSDFACANAFNNSIIPEDTFFPSSDVPCDVKLVEKSFETDTNLNFQNLSVIGFRILLLKVAGFNLLMTLRLWSSRAKRSGSGVKQTLNFDLLKLAGDVESNPGPSRGHMTEYKPTVRLATRDDVPRAVRTLAAAFADYPATRHTVDPDRHIERVTELQELFLTRVGLDIGKVWVADDGAAVAVWTTPESVEAGAVFAEIGPRMAELSGSRLAAQQQMEGLLAPHRPKEPAWFLATVGVSPDHQGKGLGSAVVLPGVEAAERAGVPAFLETSAPRNLPFYERLGFTVTADVEVPEGPRTWCMTRKPGA

SEQ ID NO: 18930 - protein, 683 aa, synthetic construct
MALPVTALLLPLALLLHAARPLEEDLKNVFPPEVAVFEPSKAEIAHTQKATLVCLATGFYPDHVELSWWVNGKEVHSGVCTDPQPLKEQPALNDSRYCLSSRLRVSATFWQNPRNHFRCQVQFYGLSENDEWTQDRAKPVTQIVSAEAWGRADCGITSASYHQGVLSATILYEILLGKATLYAVLVSALVLMAMVKRKDSRGRAKRSGSGATNFSLLKQAGDVEENPGPTSMDWIWRILFLVGAATGAHSFEGSGFEYAKEMRNAYWEIALLPNLTNQQKRAPIRKLYDDPSQSSELLSEAKKLNDSQTRIQNPDPAVYQLRDSKSSDKSVCLFTDFDSQTNVSQSKDSDVYITDKCVLDMRSMDFKSNSAVAWSNKSDFACANAFNNSIIPEDTFFPSSDVPCDVKLVEKSFETDTNLNFQNLSVIGFRILLLKVAGFNLLMTLRLWSSRAKRSGSGVKQTLNFDLLKLAGDVESNPGPSRGHMTEYKPTVRLATRDDVPRAVRTLAAAFADYPATRHTVDPDRHIERVTELQELFLTRVGLDIGKVWVADDGAAVAVWTTPESVEAGAVFAEIGPRMAELSGSRLAAQQQMEGLLAPHRPKEPAWFLATVGVSPDHQGKGLGSAVVLPGVEAAERAGVPAFLETSAPRNLPFYERLGFTVTADVEVPEGPRTWCMTRKPGA

SEQ ID NO: 18931 - protein, 905 aa, synthetic construct
MALPVTALLLPLALLLHAARPLEEDLKNVFPPEVAVFEPSKAEIAHTQKATLVCLATGFYPDHVELSWWVNGKEVHSGVCTDPQPLKEQPALNDSRYCLSSRLRVSATFWQNPRNHFRCQVQFYGLSENDEWTQDRAKPVTQIVSAEAWGRADCGITSASYHQGVLSATILYEILLGKATLYAVLVSALVLMAMVKRKDSRGRAKRSGSGATNFSLLKQAGDVEENPGPTSMALPVTALLLPLALLLHAARPDEFEVQLVESGGGLVQAGGSLRLSCAASGITFSINTMGWYRQAPGKQRELVALISSIGDTYYADSVKGRFTISRDNAKNTVYLQMNSLKPEDTAVYYCKRFRTAAQGTDYWGQGTQVTVSSLEGGGGSGGGGSGGGGSGSGGSGSGGSGSGGSGSGGSFEVQLVESGGGLVQPGGSLRLSCAASGSIFGFNDMAWYRQAPGKQRELVALISRVGVTSSADSVKGRFTISRVNAKDTVYLQMNSLKPEDTAVYYCYMDQRLDGSTLAYWGQGTQVTVSSTRIQNPDPAVYQLRDSKSSDKSVCLFTDFDSQTNVSQSKDSDVYITDKCVLDMRSMDFKSNSAVAWSNKSDFACANAFNNSIIPEDTFFPSSDVPCDVKLVEKSFETDTNLNFQNLSVIGFRILLLKVAGFNLLMTLRLWSSRAKRSGSGVKQTLNFDLLKLAGDVESNPGPSRGHMTEYKPTVRLATRDDVPRAVRTLAAAFADYPATRHTVDPDRHIERVTELQELFLTRVGLDIGKVWVADDGAAVAVWTTPESVEAGAVFAEIGPRMAELSGSRLAAQQQMEGLLAPHRPKEPAWFLATVGVSPDHQGKGLGSAVVLPGVEAAERAGVPAFLETSAPRNLPFYERLGFTVTADVEVPEGPRTWCMTRKPGA

SEQ ID NO: 18932 - protein, 819 aa, synthetic construct
MALPVTALLLPLALLLHAARPLEEDLKNVFPPEVAVFEPSKAEIAHTQKATLVCLATGFYPDHVELSWWVNGKEVHSGVCTDPQPLKEQPALNDSRYCLSSRLRVSATFWQNPRNHFRCQVQFYGLSENDEWTQDRAKPVTQIVSAEAWGRADCGITSASYHQGVLSATILYEILLGKATLYAVLVSALVLMAMVKRKDSRGRAKRSGSGATNFSLLKQAGDVEENPGPTSMALPVTALLLPLALLLHAARPGMRTEDLPKAVVFLEPQWYRVLEKDSVTLKCQGAYSPEDNSTQWFHNESLISSQASSYFIDAATVDDSGEYRCQTNLSTLSDPVQLEVHIGWLLLQAPRWVFKEEDPIHLRCHSWKNTALHKVTYLQNGKGRKYFHHNSDFYIPKATLKDSGSYFCRGLVGSKNVSSETVNITITQGLAVSTISSFFPPGYQTRIQNPDPAVYQLRDSKSSDKSVCLFTDFDSQTNVSQSKDSDVYITDKCVLDMRSMDFKSNSAVAWSNKSDFACANAFNNSIIPEDTFFPSSDVPCDVKLVEKSFETDTNLNFQNLSVIGFRILLLKVAGFNLLMTLRLWSSRAKRSGSGVKQTLNFDLLKLAGDVESNPGPSRGHMTEYKPTVRLATRDDVPRAVRTLAAAFADYPATRHTVDPDRHIERVTELQELFLTRVGLDIGKVWVADDGAAVAVWTTPESVEAGAVFAEIGPRMAELSGSRLAAQQQMEGLLAPHRPKEPAWFLATVGVSPDHQGKGLGSAVVLPGVEAAERAGVPAFLETSAPRNLPFYERLGFTVTADVEVPEGPRTWCMTRKPGA

SEQ ID NO: 18933 - protein, 447 aa, synthetic construct
MALPVTALLLPLALLLHAARPLEEDLKNVFPPEVAVFEPSKAEIAHTQKATLVCLATGFYPDHVELSWWVNGKEVHSGVCTDPQPLKEQPALNDSRYCLSSRLRVSATFWQNPRNHFRCQVQFYGLSENDEWTQDRAKPVTQIVSAEAWGRADCGITSASYHQGVLSATILYEILLGKATLYAVLVSALVLMAMVKRKDSRGRAKRSGSGATNFSLLKQAGDVEENPGPTSATMALPVTALLLPLALLLHAARPMDPDLEIRAAFLRQRNTALRTEVAELEQEVQRLENEVSQYETRYGPLGGGKTRIQNPDPAVYQLRDSKSSDKSVCLFTDFDSQTNVSQSKDSDVYITDKCVLDMRSMDFKSNSAVAWSNKSDFACANAFNNSIIPEDTFFPSSDVPCDVKLVEKSFETDTNLNFQNLSVIGFRILLLKVAGFNLLMTLRLWSS

SEQ ID NO: 18934 - protein, 447 aa, synthetic construct
MALPVTALLLPLALLLHAARPLEEDLKNVFPPEVAVFEPSKAEIAHTQKATLVCLATGFYPDHVELSWWVNGKEVHSGVCTDPQPLKEQPALNDSRYCLSSRLRVSATFWQNPRNHFRCQVQFYGLSENDEWTQDRAKPVTQIVSAEAWGRADCGITSASYHQGVLSATILYEILLGKATLYAVLVSALVLMAMVKRKDSRGRAKRSGSGATNFSLLKQAGDVEENPGPTSATMALPVTALLLPLALLLHAARPMDPDLEIEAAFLERENTALETRVAELRQRVQRLRNRVSQYRTRYGPLGGGKTRIQNPDPAVYQLRDSKSSDKSVCLFTDFDSQTNVSQSKDSDVYITDKCVLDMRSMDFKSNSAVAWSNKSDFACANAFNNSIIPEDTFFPSSDVPCDVKLVEKSFETDTNLNFQNLSVIGFRILLLKVAGFNLLMTLRLWSS

SEQ ID NO: 18935 - protein, 424 aa, synthetic construct
MALPVTALLLPLALLLHAARPLEEDLKNVFPPEVAVFEPSKAEIAHTQKATLVCLATGFYPDHVELSWWVNGKEVHSGVCTDPQPLKEQPALNDSRYCLSSRLRVSATFWQNPRNHFRCQVQFYGLSENDEWTQDRAKPVTQIVSAEAWGRADCGITSASYHQGVLSATILYEILLGKATLYAVLVSALVLMAMVKRKDSRGRAKRSGSGATNFSLLKQAGDVEENPGPTSATMALPVTALLLPLALLLHAARPEVAALEKEVAALEKEVAALEKEVAALEKTRIQNPDPAVYQLRDSKSSDKSVCLFTDFDSQTNVSQSKDSDVYITDKCVLDMRSMDFKSNSAVAWSNKSDFACANAFNNSIIPEDTFFPSSDVPCDVKLVEKSFETDTNLNFQNLSVIGFRILLLKVAGFNLLMTLRLWSS

SEQ ID NO: 18936 - protein, 682 aa, synthetic construct
MALPVTALLLPLALLLHAARPLEEDLKNVFPPEVAVFEPSKAEIAHTQKATLVCLATGFYPDHVELSWWVNGKEVHSGVCTDPQPLKEQPALNDSRYCLSSRLRVSATFWQNPRNHFRCQVQFYGLSENDEWTQDRAKPVTQIVSAEAWGRADCGITSASYHQGVLSATILYEILLGKATLYAVLVSALVLMAMVKRKDSRGRAKRSGSGATNFSLLKQAGDVEENPGPTSATMALPVTALLLPLALLLHAARPLFNQEVQIPLTESYCGPCPKNWICYKNNCYQFFDESKNWYESQASCMSQNASLLKVYSKEDQDLLKLVKSAHWMGLVHIPTNGSWQWEDGSILSPNLLTIIEMQKGDCALYASSFKGYIENCSTPNTYICMQRTVSGGGGSGGGGSGGGGDLFNQEVQIPLTESYCGPCPKNWICYKNNCYQFFDESKNWYESQASCMSQNASLLKVYSKEDQDLLKLVKSAHWMGLVHIPTNGSWQWEDGSILSPNLLTIIEMQKGDCALYASSFKGYIENCSTPNTYICMQRTVTRIQNPDPAVYQLRDSKSSDKSVCLFTDFDSQTNVSQSKDSDVYITDKCVLDMRSMDFKSNSAVAWSNKSDFACANAFNNSIIPEDTFFPSSDVPCDVKLVEKSFETDTNLNFQNLSVIGFRILLLKVAGFNLLMTLRLWSS

SEQ ID NO: 18937 - protein, 682 aa, synthetic construct
MALPVTALLLPLALLLHAARPLEEDLKNVFPPEVAVFEPSKAEIAHTQKATLVCLATGFYPDHVELSWWVNGKEVHSGVCTDPQPLKEQPALNDSRYCLSSRLRVSATFWQNPRNHFRCQVQFYGLSENDEWTQDRAKPVTQIVSAEAWGRADCGITSASYHQGVLSATILYEILLGKATLYAVLVSALVLMAMVKRKDSRGRAKRSGSGATNFSLLKQAGDVEENPGPTSATMALPVTALLLPLALLLHAARPLFNQEVQIPLTESYCGPCPKNWICYKNNCYQFFDESKNWYESQASCMSQNASLLKVYSKEDQDLLKLVKSAHWMGLVHIPTNGSWQWEDGSILSPNLLTIIEMQKGDCALYASSFKGFIENCSTPNTYICMQRTVGGGGSGGGGSGGGGSDLFNQEVQIPLTESYCGPCPKNWICYKNNCYQFFDESKNWYESQASCMSQNASLLKVYSKEDQDLLKLVKSAHWMGLVHIPTNGSWQWEDGSILSPNLLTIIEMQKGDCALYASSFKGFIENCSTPNTYICMQRTVTRIQNPDPAVYQLRDSKSSDKSVCLFTDFDSQTNVSQSKDSDVYITDKCVLDMRSMDFKSNSAVAWSNKSDFACANAFNNSIIPEDTFFPSSDVPCDVKLVEKSFETDTNLNFQNLSVIGFRILLLKVAGFNLLMTLRLWSS

SEQ ID NO: 18938 - protein, 708 aa, synthetic construct
MALPVTALLLPLALLLHAARPLEEDLKNVFPPEVAVFEPSKAEIAHTQKATLVCLATGFYPDHVELSWWVNGKEVHSGVCTDPQPLKEQPALNDSRYCLSSRLRVSATFWQNPRNHFRCQVQFYGLSENDEWTQDRAKPVTQIVSAEAWGRADCGITSASYHQGVLSATILYEILLGKATLYAVLVSALVLMAMVKRKDSRGRAKRSGSGATNFSLLKQAGDVEENPGPTSMALPVTALLLPLALLLHAARPMDPDLEIRAAFLRQRNTALRTEVAELEQEVQRLENEVSQYETRYGPLGGGKGTGGGGSGGGGSGGGGSEFDIQMTQSPSSLSASVGDRVTITCKASDHINNWLAWYQQKPGQAPKLLIYGATTLETGVPSRFSGSGSGTDYTLTISSLQPEDFATYYCQQSWNTPWTFGQGTKLEIKRGGGGSGGGGSGGGGSQVQLQQPGAELVKPGASVKMSCKASGYAFSSYWINWMKQKPGQGLEWIGQIYPGDGDTNYNGKFKGRATLTADTSSSTAYMQLSSLTSEDSAVYFCARSITTVVGCAMDYWGQGTSVTVSSTRIQNPDPAVYQLRDSKSSDKSVCLFTDFDSQTNVSQSKDSDVYITDKCVLDMRSMDFKSNSAVAWSNKSDFACANAFNNSIIPEDTFFPSSDVPCDVKLVEKSFETDTNLNFQNLSVIGFRILLLKVAGFNLLMTLRLWSS

SEQ ID NO: 18939 - protein, 943 aa, synthetic construct
MALPVTALLLPLALLLHAARPLEEDLKNVFPPEVAVFEPSKAEIAHTQKATLVCLATGFYPDHVELSWWVNGKEVHSGVCTDPQPLKEQPALNDSRYCLSSRLRVSATFWQNPRNHFRCQVQFYGLSENDEWTQDRAKPVTQIVSAEAWGRADCGITSASYHQGVLSATILYEILLGKATLYAVLVSALVLMAMVKRKDSRGRAKRSGSGATNFSLLKQAGDVEENPGPTSMALPVTALLLPLALLLHAARPLFNQEVQIPLTESYCGPCPKNWICYKNNCYQFFDESKNWYESQASCMSQNASLLKVYSKEDQDLLKLVKSAHWMGLVHIPTNGSWQWEDGSILSPNLLTIIEMQKGDCALYASSFKGFIENCSTPNTYICMQRTVGGGGSGGGGSGGGGSDLFNQEVQIPLTESYCGPCPKNWICYKNNCYQFFDESKNWYESQASCMSQNASLLKVYSKEDQDLLKLVKSAHWMGLVHIPTNGSWQWEDGSILSPNLLTIIEMQKGDCALYASSFKGFIENCSTPNTYICMQRTVGTGGGGSGGGGSGGGGSEFDIQMTQSPSSLSASVGDRVTITCKASDHINNWLAWYQQKPGQAPKLLIYGATTLETGVPSRFSGSGSGTDYTLTISSLQPEDFATYYCQQSWNTPWTFGQGTKLEIKRGGGGSGGGGSGGGGSQVQLQQPGAELVKPGASVKMSCKASGYAFSSYWINWMKQKPGQGLEWIGQIYPGDGDTNYNGKFKGRATLTADTSSSTAYMQLSSLTSEDSAVYFCARSITTVVGCAMDYWGQGTSVTVSSTRIQNPDPAVYQLRDSKSSDKSVCLFTDFDSQTNVSQSKDSDVYITDKCVLDMRSMDFKSNSAVAWSNKSDFACANAFNNSIIPEDTFFPSSDVPCDVKLVEKSFETDTNLNFQNLSVIGFRILLLKVAGFNLLMTLRLWSS

SEQ ID NO: 18940 - protein, 648 aa, synthetic construct
MALPVTALLLPLALLLHAARPLEEDLKNVFPPEVAVFEPSKAEIAHTQKATLVCLATGFYPDHVELSWWVNGKEVHSGVCTDPQPLKEQPALNDSRYCLSSRLRVSATFWQNPRNHFRCQVQFYGLSENDEWTQDRAKPVTQIVSAEAWGRADCGITSASYHQGVLSATILYEILLGKATLYAVLVSALVLMAMVKRKDSRGRAKRSGSGATNFSLLKQAGDVEENPGPTSMALPVTALLLPLALLLHAARPQSVLTQPPSVSGAPGQRVTISCTGSSSNIGAGYDVHWYQQLPGTAPKLLIFGNSNRPSGVPDRFSGFKSGTSASLAITGLQAEDEADYFCQSYDSSLSGSGVFGTGTKVTVLGGGGGSGGGGSGGGGSQMQLVQSGGGLVQPGRSLRLSCAASGFTFDDYAMHWVRQAPGKGLEWVSGISWNSGSIGYADSVKGRFTISRDNAKNSLYLQMNSLRAEDTALYYCAKDIHSGSYYGLLYYAMDVWGQGTTVTVSSTRIQNPDPAVYQLRDSKSSDKSVCLFTDFDSQTNVSQSKDSDVYITDKCVLDMRSMDFKSNSAVAWSNKSDFACANAFNNSIIPEDTFFPSSDVPCDVKLVEKSFETDTNLNFQNLSVIGFRILLLKVAGFNLLMTLRLWSS

SEQ ID NO: 18941 - protein, 485 aa, synthetic construct
MALPVTALLLPLALLLHAARPLEEDLKNVFPPEVAVFEPSKAEIAHTQKATLVCLATGFYPDHVELSWWVNGKEVHSGVCTDPQPLKEQPALNDSRYCLSSRLRVSATFWQNPRNHFRCQVQFYGLSENDEWTQDRAKPVTQIVSAEAWGRADCGITSASYHQGVLSATILYEILLGKATLYAVLVSALVLMAMVKRKDSRGRAKRSGSGATNFSLLKQAGDVEENPGPTSMALPVTALLLPLALLLHAARPMCMPCFTTDHQMARKCDDCCGGKGRGKCYGPQCLCRLEGGGGSGGGGSGGGGSFEVCMPCFTTDQQMARKCSDCCGGKGRGKCYGPQCLCRTRIQNPDPAVYQLRDSKSSDKSVCLFTDFDSQTNVSQSKDSDVYITDKCVLDMRSMDFKSNSAVAWSNKSDFACANAFNNSIIPEDTFFPSSDVPCDVKLVEKSFETDTNLNFQNLSVIGFRILLLKVAGFNLLMTLRLWSS

SEQ ID NO: 18942 - protein, 748 aa, synthetic construct
MALPVTALLLPLALLLHAARPLEEDLKNVFPPEVAVFEPSKAEIAHTQKATLVCLATGFYPDHVELSWWVNGKEVHSGVCTDPQPLKEQPALNDSRYCLSSRLRVSATFWQNPRNHFRCQVQFYGLSENDEWTQDRAKPVTQIVSAEAWGRADCGITSASYHQGVLSATILYEILLGKATLYAVLVSALVLMAMVKRKDSRGRAKRSGSGATNFSLLKQAGDVEENPGPTSMALPVTALLLPLALLLHAARPMCMPCFTTDHQMARKCDDCCGGKGRGKCYGPQCLCRLEGGGGSGGGGSGGGGSFEVCMPCFTTDQQMARKCSDCCGGKGRGKCYGPQCLCRGTGGGGSGGGGSGGGGSEFDIQMTQSPSSLSASVGDRVTITCKASDHINNWLAWYQQKPGQAPKLLIYGATTLETGVPSRFSGSGSGTDYTLTISSLQPEDFATYYCQQSWNTPWTFGQGTKLEIKRGGGGSGGGGSGGGGSQVQLQQPGAELVKPGASVKMSCKASGYAFSSYWINWMKQKPGQGLEWIGQIYPGDGDTNYNGKFKGRATLTADTSSSTAYMQLSSLTSEDSAVYFCARSITTVVGCAMDYWGQGTSVTVSSTRIQNPDPAVYQLRDSKSSDKSVCLFTDFDSQTNVSQSKDSDVYITDKCVLDMRSMDFKSNSAVAWSNKSDFACANAFNNSIIPEDTFFPSSDVPCDVKLVEKSFETDTNLNFQNLSVIGFRILLLKVAGFNLLMTLRLWSS

SEQ ID NO: 18943 - protein, 823 aa, synthetic construct
MALPVTALLLPLALLLHAARPLEEDLKNVFPPEVAVFEPSKAEIAHTQKATLVCLATGFYPDHVELSWWVNGKEVHSGVCTDPQPLKEQPALNDSRYCLSSRLRVSATFWQNPRNHFRCQVQFYGLSENDEWTQDRAKPVTQIVSAEAWGRADCGITSASYHQGVLSATILYEILLGKATLYAVLVSALVLMAMVKRKDSRGRAKRSGSGATNFSLLKQAGDVEENPGPTSMALPVTALLLPLALLLHAARPSPVAPACDPRLLNKLLRDSHLLHSRLSQCPDVDPLSIPVLLPAVDFSLGEWKTQTEQSKAQDILGAVSLLLEGVMAARGQLEPSCLSSLLGQLSGQVRLLLGALQGLLGTQLPLQGRTTAHKDPNALFLSLQQLLRGKVRFLLLVEGPTLCVRRTLPTTAVPSSTSGTGGGGSGGGGSGGGGSEFDIQMTQSPSSLSASVGDRVTITCKASDHINNWLAWYQQKPGQAPKLLIYGATTLETGVPSRFSGSGSGTDYTLTISSLQPEDFATYYCQQSWNTPWTFGQGTKLEIKRGGGGSGGGGSGGGGSQVQLQQPGAELVKPGASVKMSCKASGYAFSSYWINWMKQKPGQGLEWIGQIYPGDGDTNYNGKFKGRATLTADTSSSTAYMQLSSLTSEDSAVYFCARSITTVVGCAMDYWGQGTSVTVSSTRIQNPDPAVYQLRDSKSSDKSVCLFTDFDSQTNVSQSKDSDVYITDKCVLDMRSMDFKSNSAVAWSNKSDFACANAFNNSIIPEDTFFPSSDVPCDVKLVEKSFETDTNLNFQNLSVIGFRILLLKVAGFNLLMTLRLWSS

SEQ ID NO: 18944 - protein, 730 aa, synthetic construct
MALPVTALLLPLALLLHAARPLEEDLKNVFPPEVAVFEPSKAEIAHTQKATLVCLATGFYPDHVELSWWVNGKEVHSGVCTDPQPLKEQPALNDSRYCLSSRLRVSATFWQNPRNHFRCQVQFYGLSENDEWTQDRAKPVTQIVSAEAWGRADCGITSASYHQGVLSATILYEILLGKATLYAVLVSALVLMAMVKRKDSRGRAKRSGSGATNFSLLKQAGDVEENPGPTSMALPVTALLLPLALLLHAARPMGSWEEFELRLNAIEERLYALGGSEAELAYFEYVIADFEGNLQRYKGKGNPEVEALYFEADAIFEELVAYRHNGTGGGGSGGGGSGGGGSEFDIQMTQSPSSLSASVGDRVTITCKASDHINNWLAWYQQKPGQAPKLLIYGATTLETGVPSRFSGSGSGTDYTLTISSLQPEDFATYYCQQSWNTPWTFGQGTKLEIKRGGGGSGGGGSGGGGSQVQLQQPGAELVKPGASVKMSCKASGYAFSSYWINWMKQKPGQGLEWIGQIYPGDGDTNYNGKFKGRATLTADTSSSTAYMQLSSLTSEDSAVYFCARSITTVVGCAMDYWGQGTSVTVSSTRIQNPDPAVYQLRDSKSSDKSVCLFTDFDSQTNVSQSKDSDVYITDKCVLDMRSMDFKSNSAVAWSNKSDFACANAFNNSIIPEDTFFPSSDVPCDVKLVEKSFETDTNLNFQNLSVIGFRILLLKVAGFNLLMTLRLWSS

SEQ ID NO: 18945 - protein, 869 aa, synthetic construct
MALPVTALLLPLALLLHAARPLEIQNPDPAVYQLRDSKSSDKSVCLFTDFDSQTNVSQSKDSDVYITDKCVLDMRSMDFKSNSAVAWSNKSDFACANAFNNSIIPEDTFFPSSDVPCDVKLVEKSFETDTNLNFQNLSVIGFRILLLKVAGFNLLMTLRLWSSRAKRSGSGATNFSLLKQAGDVEENPGPTSMALPVTALLLPLALLLHAARPDIQMTQTTSSLSASLGDRVTISCRASQDISKYLNWYQQKPDGTVKLLIYHTSRLHSGVPSRFSGSGSGTDYSLTISNLEQEDIATYFCQQGNTLPYTFGGGTKLEITGGGGSGGGGSGGGGSEVKLQESGPGLVAPSQSLSVTCTVSGVSLPDYGVSWIRQPPRKGLEWLGVIWGSETTYYNSALKSRLTIIKDNSKSQVFLKMNSLQTDDTAIYYCAKHYYYGGSYAMDYWGQGTSVTVSSTREDLKNVFPPEVAVFEPSKAEIAHTQKATLVCLATGFYPDHVELSWWVNGKEVHSGVCTDPQPLKEQPALNDSRYCLSSRLRVSATFWQNPRNHFRCQVQFYGLSENDEWTQDRAKPVTQIVSAEAWGRADCGITSASYHQGVLSATILYEILLGKATLYAVLVSALVLMAMVKRKDSRGRAKRSGSGVKQTLNFDLLKLAGDVESNPGPSRGHMTEYKPTVRLATRDDVPRAVRTLAAAFADYPATRHTVDPDRHIERVTELQELFLTRVGLDIGKVWVADDGAAVAVWTTPESVEAGAVFAEIGPRMAELSGSRLAAQQQMEGLLAPHRPKEPAWFLATVGVSPDHQGKGLGSAVVLPGVEAAERAGVPAFLETSAPRNLPFYERLGFTVTADVEVPEGPRTWCMTRKPGA

SEQ ID NO: 18946 - protein, 870 aa, synthetic construct
MALPVTALLLPLALLLHAARPLEIQNPDPAVYQLRDSKSSDKSVCLFTDFDSQTNVSQSKDSDVYITDKCVLDMRSMDFKSNSAVAWSNKSDFACANAFNNSIIPEDTFFPSSDVPCDVKLVEKSFETDTNLNFQNLSVIGFRILLLKVAGFNLLMTLRLWSSRAKRSGSGATNFSLLKQAGDVEENPGPTSTMALPVTALLLPLALLLHAARPEIVMTQSPATLSLSPGERATLSCRASQDISKYLNWYQQKPGQAPRLLIYHTSRLHSGIPARFSGSGSGTDYTLTISSLQPEDFAVYFCQQGNTLPYTFGQGTKLEIKGGGGSGGGGSGGGGSQVQLQESGPGLVKPSETLSLTCTVSGVSLPDYGVSWIRQPPGKGLEWIGVIWGSETTYYNSSLKSRVTISKDNSKNQVSLKLSSVTAADTAVYYCAKHYYYGGSYAMDYWGQGTLVTVSSTREDLKNVFPPEVAVFEPSKAEIAHTQKATLVCLATGFYPDHVELSWWVNGKEVHSGVCTDPQPLKEQPALNDSRYCLSSRLRVSATFWQNPRNHFRCQVQFYGLSENDEWTQDRAKPVTQIVSAEAWGRADCGITSASYHQGVLSATILYEILLGKATLYAVLVSALVLMAMVKRKDSRGRAKRSGSGVKQTLNFDLLKLAGDVESNPGPSRGHMTEYKPTVRLATRDDVPRAVRTLAAAFADYPATRHTVDPDRHIERVTELQELFLTRVGLDIGKVWVADDGAAVAVWTTPESVEAGAVFAEIGPRMAELSGSRLAAQQQMEGLLAPHRPKEPAWFLATVGVSPDHQGKGLGSAVVLPGVEAAERAGVPAFLETSAPRNLPFYERLGFTVTADVEVPEGPRTWCMTRKPGA

SEQ ID NO: 18947 - protein, 871 aa, synthetic construct
MALPVTALLLPLALLLHAARPLEIQNPDPAVYQLRDSKSSDKSVCLFTDFDSQTNVSQSKDSDVYITDKCVLDMRSMDFKSNSAVAWSNKSDFACANAFNNSIIPEDTFFPSSDVPCDVKLVEKSFETDTNLNFQNLSVIGFRILLLKVAGFNLLMTLRLWSSRAKRSGSGATNFSLLKQAGDVEENPGPTSTMALPVTALLLPLALLLHAARPDEIVLTQSPATLSLSPGERATLSCSASSSVSYMHWYQQKPGQAPRLLIYDTSKLASGIPARFSGSGSGTDFTLTISSLEPEDVAVYYCFQGSVYPFTFGQGTKLEIKRGGGGSGGGGSGGGGSQVQLQESGPGLVKPSQTLSLTCTVSGGSISTSGMGVGWIRQHPGKGLEWIGHIWWDDDKRYNPALKSRVTISVDTSKNQFSLKLSSVTAADTAVYYCARMELWSYYFDYWGQGTLVTVSSTREDLKNVFPPEVAVFEPSKAEIAHTQKATLVCLATGFYPDHVELSWWVNGKEVHSGVCTDPQPLKEQPALNDSRYCLSSRLRVSATFWQNPRNHFRCQVQFYGLSENDEWTQDRAKPVTQIVSAEAWGRADCGITSASYHQGVLSATILYEILLGKATLYAVLVSALVLMAMVKRKDSRGRAKRSGSGVKQTLNFDLLKLAGDVESNPGPSRGHMTEYKPTVRLATRDDVPRAVRTLAAAFADYPATRHTVDPDRHIERVTELQELFLTRVGLDIGKVWVADDGAAVAVWTTPESVEAGAVFAEIGPRMAELSGSRLAAQQQMEGLLAPHRPKEPAWFLATVGVSPDHQGKGLGSAVVLPGVEAAERAGVPAFLETSAPRNLPFYERLGFTVTADVEVPEGPRTWCMTRKPGA

SEQ ID NO: 18948 - protein, 867 aa, synthetic construct
MALPVTALLLPLALLLHAARPLEIQNPDPAVYQLRDSKSSDKSVCLFTDFDSQTNVSQSKDSDVYITDKCVLDMRSMDFKSNSAVAWSNKSDFACANAFNNSIIPEDTFFPSSDVPCDVKLVEKSFETDTNLNFQNLSVIGFRILLLKVAGFNLLMTLRLWSSRAKRSGSGATNFSLLKQAGDVEENPGPTSMALPVTALLLPLALLLHAARPDIQMTQSPSSLSASVGDRVTITCRASQDISNYLNWYQQKPGKAPKLLIYYTSRLHSGVPSRFSGSGSGTDFTLTISSLQPEDFATYYCQQGNTLPYTFGQGTKVEIKRGGGGSGGGGSGGGGSEVQLVESGGGLVQPGGSLRLSCAASGFTFSDYFMSWVRQAPGKGLEWVATISNGGTYTYYPDSVKGRFTISRDNSKNTLYLQMNSLRAEDTAVYYCARFDGYIFDYWGQGTLVTVSSTREDLKNVFPPEVAVFEPSKAEIAHTQKATLVCLATGFYPDHVELSWWVNGKEVHSGVCTDPQPLKEQPALNDSRYCLSSRLRVSATFWQNPRNHFRCQVQFYGLSENDEWTQDRAKPVTQIVSAEAWGRADCGITSASYHQGVLSATILYEILLGKATLYAVLVSALVLMAMVKRKDSRGRAKRSGSGVKQTLNFDLLKLAGDVESNPGPSRGHMTEYKPTVRLATRDDVPRAVRTLAAAFADYPATRHTVDPDRHIERVTELQELFLTRVGLDIGKVWVADDGAAVAVWTTPESVEAGAVFAEIGPRMAELSGSRLAAQQQMEGLLAPHRPKEPAWFLATVGVSPDHQGKGLGSAVVLPGVEAAERAGVPAFLETSAPRNLPFYERLGFTVTADVEVPEGPRTWCMTRKPGA

SEQ ID NO: 18949 - protein, 871 aa, synthetic construct
MALPVTALLLPLALLLHAARPLEIQNPDPAVYQLRDSKSSDKSVCLFTDFDSQTNVSQSKDSDVYITDKCVLDMRSMDFKSNSAVAWSNKSDFACANAFNNSIIPEDTFFPSSDVPCDVKLVEKSFETDTNLNFQNLSVIGFRILLLKVAGFNLLMTLRLWSSRAKRSGSGATNFSLLKQAGDVEENPGPTSMALPVTALLLPLALLLHAARPDIQMTQSPSSLSASVGDRVTITCKASDHINNWLAWYQQKPGQAPKLLIYGATTLETGVPSRFSGSGSGTDYTLTISSLQPEDFATYYCQQSWNTPWTFGQGTKLEIKRGGGGSGGGGSGGGGSQVQLQQPGAELVKPGASVKMSCKASGYAFSSYWINWMKQKPGQGLEWIGQIYPGDGDTNYNGKFKGRATLTADTSSSTAYMQLSSLTSEDSAVYFCARSITTVVGCAMDYWGQGTSVTVSSTREDLKNVFPPEVAVFEPSKAEIAHTQKATLVCLATGFYPDHVELSWWVNGKEVHSGVCTDPQPLKEQPALNDSRYCLSSRLRVSATFWQNPRNHFRCQVQFYGLSENDEWTQDRAKPVTQIVSAEAWGRADCGITSASYHQGVLSATILYEILLGKATLYAVLVSALVLMAMVKRKDSRGRAKRSGSGVKQTLNFDLLKLAGDVESNPGPSRGHMTEYKPTVRLATRDDVPRAVRTLAAAFADYPATRHTVDPDRHIERVTELQELFLTRVGLDIGKVWVADDGAAVAVWTTPESVEAGAVFAEIGPRMAELSGSRLAAQQQMEGLLAPHRPKEPAWFLATVGVSPDHQGKGLGSAVVLPGVEAAERAGVPAFLETSAPRNLPFYERLGFTVTADVEVPEGPRTWCMTRKPGA

SEQ ID NO: 18950 - protein, 873 aa, synthetic construct
MALPVTALLLPLALLLHAARPLEIQNPDPAVYQLRDSKSSDKSVCLFTDFDSQTNVSQSKDSDVYITDKCVLDMRSMDFKSNSAVAWSNKSDFACANAFNNSIIPEDTFFPSSDVPCDVKLVEKSFETDTNLNFQNLSVIGFRILLLKVAGFNLLMTLRLWSSRAKRSGSGATNFSLLKQAGDVEENPGPTSMALPVTALLLPLALLLHAARPQIVLSQSPAILSASPGEKVTMTCRASSSVSYMHWYQQKPGSSPKPWIYATSNLASGVPARFSGSGSGTSYSFTISRVEAEDAATYYCQQWTFNPPTFGGGTRLEIKRTVAAGGGGSGGGGSGGGGSQAYLQQSGAELVRPGASVKMSCKASGYTFTSYNMHWVKQTPRQGLEWIGGIYPGNGDTSYNQKFKGKATLTVGKSSSTAYMQLSSLTSEDSAVYFCARYDYNYAMDYWGQGTSVTVSSASTREDLKNVFPPEVAVFEPSKAEIAHTQKATLVCLATGFYPDHVELSWWVNGKEVHSGVCTDPQPLKEQPALNDSRYCLSSRLRVSATFWQNPRNHFRCQVQFYGLSENDEWTQDRAKPVTQIVSAEAWGRADCGITSASYHQGVLSATILYEILLGKATLYAVLVSALVLMAMVKRKDSRGRAKRSGSGVKQTLNFDLLKLAGDVESNPGPSRGHMTEYKPTVRLATRDDVPRAVRTLAAAFADYPATRHTVDPDRHIERVTELQELFLTRVGLDIGKVWVADDGAAVAVWTTPESVEAGAVFAEIGPRMAELSGSRLAAQQQMEGLLAPHRPKEPAWFLATVGVSPDHQGKGLGSAVVLPGVEAAERAGVPAFLETSAPRNLPFYERLGFTVTADVEVPEGPRTWCMTRKPGA

SEQ ID NO: 18951 - protein, 871 aa, synthetic construct
MALPVTALLLPLALLLHAARPLEIQNPDPAVYQLRDSKSSDKSVCLFTDFDSQTNVSQSKDSDVYITDKCVLDMRSMDFKSNSAVAWSNKSDFACANAFNNSIIPEDTFFPSSDVPCDVKLVEKSFETDTNLNFQNLSVIGFRILLLKVAGFNLLMTLRLWSSRAKRSGSGATNFSLLKQAGDVEENPGPTSMALPVTALLLPLALLLHAARPEIVLTQSPATLSLSPGERATLSCRASQSVSSYLAWYQQKPGQAPRLLIYDASNRATGIPARFSGSGSGTDFTLTISSLEPEDFAVYYCQQRSNWPITFGQGTRLEIKGGGGSGGGGSGGGGSEVQLVESGGGLVQPDRSLRLSCAASGFTFHDYAMHWVRQAPGKGLEWVSTISWNSGTIGYADSVKGRFTISRDNAKNSLYLQMNSLRAEDTALYYCAKDIQYGNYYYGMDVWGQGTTVTVSSTREDLKNVFPPEVAVFEPSKAEIAHTQKATLVCLATGFYPDHVELSWWVNGKEVHSGVCTDPQPLKEQPALNDSRYCLSSRLRVSATFWQNPRNHFRCQVQFYGLSENDEWTQDRAKPVTQIVSAEAWGRADCGITSASYHQGVLSATILYEILLGKATLYAVLVSALVLMAMVKRKDSRGRAKRSGSGVKQTLNFDLLKLAGDVESNPGPSRGHMTEYKPTVRLATRDDVPRAVRTLAAAFADYPATRHTVDPDRHIERVTELQELFLTRVGLDIGKVWVADDGAAVAVWTTPESVEAGAVFAEIGPRMAELSGSRLAAQQQMEGLLAPHRPKEPAWFLATVGVSPDHQGKGLGSAVVLPGVEAAERAGVPAFLETSAPRNLPFYERLGFTVTADVEVPEGPRTWCMTRKPGA

SEQ ID NO: 18952 - protein, 869 aa, synthetic construct
MALPVTALLLPLALLLHAARPLEIQNPDPAVYQLRDSKSSDKSVCLFTDFDSQTNVSQSKDSDVYITDKCVLDMRSMDFKSNSAVAWSNKSDFACANAFNNSIIPEDTFFPSSDVPCDVKLVEKSFETDTNLNFQNLSVIGFRILLLKVAGFNLLMTLRLWSSRAKRSGSGATNFSLLKQAGDVEENPGPTSMALPVTALLLPLALLLHAARPDIQMTQSPSSLSASVGDRVTITCRASQDVNTAVAWYQQKPGKAPKLLIYSASFLESGVPSRFSGSRSGTDFTLTISSLQPEDFATYYCQQHYTTPPTFGQTKVEIKRGGGGSGGGGSGGGGSEVQLVESGGGLVQPGGSLRLSCAASGFNIKDTYIHWVRQAPGKGLEWVARIYPTNGYTRYADSVKGRFTISADTSKNTAYLQMNSLRAEDTAVYYCSRWGGDGFYAMDVWGQGTLVTVSSTREDLKNVFPPEVAVFEPSKAEIAHTQKATLVCLATGFYPDHVELSWWVNGKEVHSGVCTDPQPLKEQPALNDSRYCLSSRLRVSATFWQNPRNHFRCQVQFYGLSENDEWTQDRAKPVTQIVSAEAWGRADCGITSASYHQGVLSATILYEILLGKATLYAVLVSALVLMAMVKRKDSRGRAKRSGSGVKQTLNFDLLKLAGDVESNPGPSRGHMTEYKPTVRLATRDDVPRAVRTLAAAFADYPATRHTVDPDRHIERVTELQELFLTRVGLDIGKVWVADDGAAVAVWTTPESVEAGAVFAEIGPRMAELSGSRLAAQQQMEGLLAPHRPKEPAWFLATVGVSPDHQGKGLGSAVVLPGVEAAERAGVPAFLETSAPRNLPFYERLGFTVTADVEVPEGPRTWCMTRKPGA

SEQ ID NO: 18953 - protein, 748 aa, synthetic construct
MALPVTALLLPLALLLHAARPLEIQNPDPAVYQLRDSKSSDKSVCLFTDFDSQTNVSQSKDSDVYITDKCVLDMRSMDFKSNSAVAWSNKSDFACANAFNNSIIPEDTFFPSSDVPCDVKLVEKSFETDTNLNFQNLSVIGFRILLLKVAGFNLLMTLRLWSSRAKRSGSGATNFSLLKQAGDVEENPGPTSMALPVTALLLPLALLLHAARPDEFEVQLVESGGGLVQAGGSLRLSCAASGITFSINTMGWYRQAPGKQRELVALISSIGDTYYADSVKGRFTISRDNAKNTVYLQMNSLKPEDTAVYYCKRFRTAAQGTDYWGQGTQVTVSSTREDLKNVFPPEVAVFEPSKAEIAHTQKATLVCLATGFYPDHVELSWWVNGKEVHSGVCTDPQPLKEQPALNDSRYCLSSRLRVSATFWQNPRNHFRCQVQFYGLSENDEWTQDRAKPVTQIVSAEAWGRADCGITSASYHQGVLSATILYEILLGKATLYAVLVSALVLMAMVKRKDSRGRAKRSGSGVKQTLNFDLLKLAGDVESNPGPSRGHMTEYKPTVRLATRDDVPRAVRTLAAAFADYPATRHTVDPDRHIERVTELQELFLTRVGLDIGKVWVADDGAAVAVWTTPESVEAGAVFAEIGPRMAELSGSRLAAQQQMEGLLAPHRPKEPAWFLATVGVSPDHQGKGLGSAVVLPGVEAAERAGVPAFLETSAPRNLPFYERLGFTVTADVEVPEGPRTWCMTRKPGA

SEQ ID NO: 18954 - protein, 748 aa, synthetic construct; identical to SEQ ID NO: 18953

SEQ ID NO: 18955 - protein, 1013 aa, synthetic construct
MALPVTALLLPLALLLHAARPLEIQNPDPAVYQLRDSKSSDKSVCLFTDFDSQTNVSQSKDSDVYITDKCVLDMRSMDFKSNSAVAWSNKSDFACANAFNNSIIPEDTFFPSSDVPCDVKLVEKSFETDTNLNFQNLSVIGFRILLLKVAGFNLLMTLRLWSSRAKRSGSGATNFSLLKQAGDVEENPGPTSMALPVTALLLPLALLLHAARPQVQLVESGGGLVQAGDSVTLSCTASGRTFSSYALAWFRQRPGKEREFVAGLRWGGPTNYADSVKDRFTISGDSAKHTMYLQMNSLKPEDTAVYYCGYNPGGWAVPSQYEYDSWGQGTQVTVSSGTGGGGSGGGGSGGGGSEFDIQMTQSPSSLSASVGDRVTITCKASDHINNWLAWYQQKPGQAPKLLIYGATTLETGVPSRFSGSGSGTDYTLTISSLQPEDFATYYCQQSWNTPWTFGQGTKLEIKRGGGGSGGGGSGGGGSQVQLQQPGAELVKPGASVKMSCKASGYAFSSYWINWMKQKPGQGLEWIGQIYPGDGDTNYNGKFKGRATLTADTSSSTAYMQLSSLTSEDSAVYFCARSITTVVGCAMDYWGQGTSVTVSSTREDLKNVFPPEVAVFEPSKAEIAHTQKATLVCLATGFYPDHVELSWWVNGKEVHSGVCTDPQPLKEQPALNDSRYCLSSRLRVSATFWQNPRNHFRCQVQFYGLSENDEWTQDRAKPVTQIVSAEAWGRADCGITSASYHQGVLSATILYEILLGKATLYAVLVSALVLMAMVKRKDSRGRAKRSGSGVKQTLNFDLLKLAGDVESNPGPSRGHMTEYKPTVRLATRDDVPRAVRTLAAAFADYPATRHTVDPDRHIERVTELQELFLTRVGLDIGKVWVADDGAAVAVWTTPESVEAGAVFAEIGPRMAELSGSRLAAQQQMEGLLAPHRPKEPAWFLATVGVSPDHQGKGLGSAVVLPGVEAAERAGVPAFLETSAPRNLPFYERLGFTVTADVEVPEGPRTWCMTRKPGA

SEQ ID NO: 18956 - protein, 1142 aa, synthetic construct
MALPVTALLLPLALLLHAARPLEIQNPDPAVYQLRDSKSSDKSVCLFTDFDSQTNVSQSKDSDVYITDKCVLDMRSMDFKSNSAVAWSNKSDFACANAFNNSIIPEDTFFPSSDVPCDVKLVEKSFETDTNLNFQNLSVIGFRILLLKVAGFNLLMTLRLWSSRAKRSGSGATNFSLLKQAGDVEENPGPTSMALPVTALLLPLALLLHAARPEVQLLESGGGLVQPGGSLRLSCAASGFTFSSYAMSWVRQAPGKGLEWVSSISGSGDYIYYADSVKGRFTISRDISKNTLYLQMNSLRAEDTAVYYCAKEGTGANSSLADYRGQGTLVTVSSGGGSGGGSQVQLVESGGGLVQAGDSVTLSCTASGRTFSSYALAWFRQRPGKEREFVAGLRWGGPTNYADSVKDRFTISGDSAKHTMYLQMNSLKPEDTAVYYCGYNPGGWAVPSQYEYDSWGQGTQVTVSSGTGGGGSGGGGSGGGGSEFDIQMTQSPSSLSASVGDRVTITCKASDHINNWLAWYQQKPGQAPKLLIYGATTLETGVPSRFSGSGSGTDYTLTISSLQPEDFATYYCQQSWNTPWTFGQGTKLEIKRGGGGSGGGGSGGGGSQVQLQQPGAELVKPGASVKMSCKASGYAFSSYWINWMKQKPGQGLEWIGQIYPGDGDTNYNGKFKGRATLTADTSSSTAYMQLSSLTSEDSAVYFCARSITTVVGCAMDYWGQGTSVTVSSTREDLKNVFPPEVAVFEPSKAEIAHTQKATLVCLATGFYPDHVELSWWVNGKEVHSGVCTDPQPLKEQPALNDSRYCLSSRLRVSATFWQNPRNHFRCQVQFYGLSENDEWTQDRAKPVTQIVSAEAWGRADCGITSASYHQGVLSATILYEILLGKATLYAVLVSALVLMAMVKRKDSRGRAKRSGSGVKQTLNFDLLKLAGDVESNPGPSRGHMTEYKPTVRLATRDDVPRAVRTLAAAFADYPATRHTVDPDRHIERVTELQELFLTRVGLDIGKVWVADDGAAVAVWTTPESVEAGAVFAEIGPRMAELSGSRLAAQQQMEGLLAPHRPKEPAWFLATVGVSPDHQGKGLGSAVVLPGVEAAERAGVPAFLETSAPRNLPFYERLGFTVTADVEVPEGPRTWCMTRKPGA

SEQ ID NO: 18957 - protein, 1140 aa, synthetic construct
MALPVTALLLPLALLLHAARPLEIQNPDPAVYQLRDSKSSDKSVCLFTDFDSQTNVSQSKDSDVYITDKCVLDMRSMDFKSNSAVAWSNKSDFACANAFNNSIIPEDTFFPSSDVPCDVKLVEKSFETDTNLNFQNLSVIGFRILLLKVAGFNLLMTLRLWSSRAKRSGSGATNFSLLKQAGDVEENPGPTSMALPVTALLLPLALLLHAARPGVTQSPTHLIKTRGQQATLRCSPISGHTSVYWYQQALGLGLQFLLWYDEGEERNRGNFPPRFSGRQFPNYSSELNVNALELEDSALYLCASSLGGPRGLAGLRGDEQFFGPGTRLTVLEGGGSGGGSQVQLVESGGGLVQAGDSVTLSCTASGRTFSSYALAWFRQRPGKEREFVAGLRWGGPTNYADSVKDRFTISGDSAKHTMYLQMNSLKPEDTAVYYCGYNPGGWAVPSQYEYDSWGQGTQVTVSSGTGGGGSGGGGSGGGGSEFDIQMTQSPSSLSASVGDRVTITCKASDHINNWLAWYQQKPGQAPKLLIYGATTLETGVPSRFSGSGSGTDYTLTISSLQPEDFATYYCQQSWNTPWTFGQGTKLEIKRGGGGSGGGGSGGGGSQVQLQQPGAELVKPGASVKMSCKASGYAFSSYWINWMKQKPGQGLEWIGQIYPGDGDTNYNGKFKGRATLTADTSSSTAYMQLSSLTSEDSAVYFCARSITTVVGCAMDYWGQGTSVTVSSTREDLKNVFPPEVAVFEPSKAEIAHTQKATLVCLATGFYPDHVELSWWVNGKEVHSGVCTDPQPLKEQPALNDSRYCLSSRLRVSATFWQNPRNHFRCQVQFYGLSENDEWTQDRAKPVTQIVSAEAWGRADCGITSASYHQGVLSATILYEILLGKATLYAVLVSALVLMAMVKRKDSRGRAKRSGSGVKQTLNFDLLKLAGDVESNPGPSRGHMTEYKPTVRLATRDDVPRAVRTLAAAFADYPATRHTVDPDRHIERVTELQELFLTRVGLDIGKVWVADDGAAVAVWTTPESVEAGAVFAEIGPRMAELSGSRLAAQQQMEGLLAPHRPKEPAWFLATVGVSPDHQGKGLGSAVVLPGVEAAERAGVPAFLETSAPRNLPFYERLGFTVTADVEVPEGPRTWCMTRKPGA

SEQ ID NO: 18958 - protein, 901 aa, synthetic construct
MALPVTALLLPLALLLHAARPLEIQNPDPAVYQLRDSKSSDKSVCLFTDFDSQTNVSQSKDSDVYITDKCVLDMRSMDFKSNSAVAWSNKSDFACANAFNNSIIPEDTFFPSSDVPCDVKLVEKSFETDTNLNFQNLSVIGFRILLLKVAGFNLLMTLRLWSSRAKRSGSGATNFSLLKQAGDVEENPGPTSMALPVTALLLPLALLLHAARPGVTQSPTHLIKTRGQQATLRCSPISGHTSVYWYQQALGLGLQFLLWYDEGEERNRGNFPPRFSGRQFPNYSSELNVNALELEDSALYLCASSLGGPRGLAGLRGDEQFFGPGTRLTVLEGGGSGGGSGVTQSPTHLIKTRGQQATLRCSPISGHTSVYWYQQALGLGLQFLLWYDEGEERNRGNFPPRFSGRQFPNYSSELNVNALELEDSALYLCASSLGGDELGADGNEQFFGPGTRLTVLEGTGGGGSGGGGSGGGGSEFDIQMTQSPSSLSASVGDRVTITCKASDHINNWLAWYQQKPGQAPKLLIYGATTLETGVPSRFSGSGSGTDYTLTISSLQPEDFATYYCQQSWNTPWTFGQGTKLEIKRGGGGSGGGGSGGGGSQVQLQQPGAELVKPGASVKMSCKASGYAFSSYWINWMKQKPGQGLEWIGQIYPGDGDTNYNGKFKGRATLTADTSSSTAYMQLSSLTSEDSAVYFCARSITTVVGCAMDYWGQGTSVTVSSTREDLKNVFPPEVAVFEPSKAEIAHTQKATLVCLATGFYPDHVELSWWVNGKEVHSGVCTDPQPLKEQPALNDSRYCLSSRLRVSATFWQNPRNHFRCQVQFYGLSENDEWTQDRAKPVTQIVSAEAWGRADCGITSASYHQGVLSATILYEILLGKATLYAVLVSALVLMAMVKRKDSRG

SEQ ID NO: 18959 - protein, 754 aa, synthetic construct
MALPVTALLLPLALLLHAARPLEIQNPDPAVYQLRDSKSSDKSVCLFTDFDSQTNVSQSKDSDVYITDKCVLDMRSMDFKSNSAVAWSNKSDFACANAFNNSIIPEDTFFPSSDVPCDVKLVEKSFETDTNLNFQNLSVIGFRILLLKVAGFNLLMTLRLWSSRAKRSGSGATNFSLLKQAGDVEENPGPTSMALPVTALLLPLALLLHAARPDEFGSDLGIKLLFAAAKGQDDEVRILLAAGADVNAKDFEGYTPLHVAAYDGHLEIVEVLLKAGADVNAKDSQGRTPLHEAAYSGHLEIVEVLLKAGADVNAQDDAGETPADLAAAWGHEDIAEVLQKTREDLKNVFPPEVAVFEPSKAEIAHTQKATLVCLATGFYPDHVELSWWVNGKEVHSGVCTDPQPLKEQPALNDSRYCLSSRLRVSATFWQNPRNHFRCQVQFYGLSENDEWTQDRAKPVTQIVSAEAWGRADCGITSASYHQGVLSATILYEILLGKATLYAVLVSALVLMAMVKRKDSRGRAKRSGSGVKQTLNFDLLKLAGDVESNPGPSRGHMTEYKPTVRLATRDDVPRAVRTLAAAFADYPATRHTVDPDRHIERVTELQELFLTRVGLDIGKVWVADDGAAVAVWTTPESVEAGAVFAEIGPRMAELSGSRLAAQQQMEGLLAPHRPKEPAWFLATVGVSPDHQGKGLGSAVVLPGVEAAERAGVPAFLETSAPRNLPFYERLGFTVTADVEVPEGPRTWCMTRKPGA

SEQ ID NO: 18960 - protein, 683 aa, synthetic construct
MALPVTALLLPLALLLHAARPLEIQNPDPAVYQLRDSKSSDKSVCLFTDFDSQTNVSQSKDSDVYITDKCVLDMRSMDFKSNSAVAWSNKSDFACANAFNNSIIPEDTFFPSSDVPCDVKLVEKSFETDTNLNFQNLSVIGFRILLLKVAGFNLLMTLRLWSSRAKRSGSGATNFSLLKQAGDVEENPGPTSMDWIWRILFLVGAATGAHSFEGSGFEYAKEMRNAYWEIALLPNLTNQQKRAPIRKLYDDPSQSSELLSEAKKLNDSQTREDLKNVFPPEVAVFEPSKAEIAHTQKATLVCLATGFYPDHVELSWWVNGKEVHSGVCTDPQPLKEQPALNDSRYCLSSRLRVSATFWQNPRNHFRCQVQFYGLSENDEWTQDRAKPVTQIVSAEAWGRADCGITSASYHQGVLSATILYEILLGKATLYAVLVSALVLMAMVKRKDSRGRAKRSGSGVKQTLNFDLLKLAGDVESNPGPSRGHMTEYKPTVRLATRDDVPRAVRTLAAAFADYPATRHTVDPDRHIERVTELQELFLTRVGLDIGKVWVADDGAAVAVWTTPESVEAGAVFAEIGPRMAELSGSRLAAQQQMEGLLAPHRPKEPAWFLATVGVSPDHQGKGLGSAVVLPGVEAAERAGVPAFLETSAPRNLPFYERLGFTVTADVEVPEGPRTWCMTRKPGA

SEQ ID NO: 18961 - protein, 905 aa, synthetic construct
MALPVTALLLPLALLLHAARPLEIQNPDPAVYQLRDSKSSDKSVCLFTDFDSQTNVSQSKDSDVYITDKCVLDMRSMDFKSNSAVAWSNKSDFACANAFNNSIIPEDTFFPSSDVPCDVKLVEKSFETDTNLNFQNLSVIGFRILLLKVAGFNLLMTLRLWSSRAKRSGSGATNFSLLKQAGDVEENPGPTSMALPVTALLLPLALLLHAARPDEFEVQLVESGGGLVQAGGSLRLSCAASGITFSINTMGWYRQAPGKQRELVALISSIGDTYYADSVKGRFTISRDNAKNTVYLQMNSLKPEDTAVYYCKRFRTAAQGTDYWGQGTQVTVSSLEGGGGSGGGGSGGGGSGSGGSGSGGSGSGGSGSGGSFEVQLVESGGGLVQPGGSLRLSCAASGSIFGFNDMAWYRQAPGKQRELVALISRVGVTSSADSVKGRFTISRVNAKDTVYLQMNSLKPEDTAVYYCYMDQRLDGSTLAYWGQGTQVTVSSTREDLKNVFPPEVAVFEPSKAEIAHTQKATLVCLATGFYPDHVELSWWVNGKEVHSGVCTDPQPLKEQPALNDSRYCLSSRLRVSATFWQNPRNHFRCQVQFYGLSENDEWTQDRAKPVTQIVSAEAWGRADCGITSASYHQGVLSATILYEILLGKATLYAVLVSALVLMAMVKRKDSRGRAKRSGSGVKQTLNFDLLKLAGDVESNPGPSRGHMTEYKPTVRLATRDDVPRAVRTLAAAFADYPATRHTVDPDRHIERVTELQELFLTRVGLDIGKVWVADDGAAVAVWTTPESVEAGAVFAEIGPRMAELSGSRLAAQQQMEGLLAPHRPKEPAWFLATVGVSPDHQGKGLGSAVVLPGVEAAERAGVPAFLETSAPRNLPFYERLGFTVTADVEVPEGPRTWCMTRKPGA

SEQ ID NO: 18962 - protein, 819 aa, synthetic construct
MALPVTALLLPLALLLHAARPLEIQNPDPAVYQLRDSKSSDKSVCLFTDFDSQTNVSQSKDSDVYITDKCVLDMRSMDFKSNSAVAWSNKSDFACANAFNNSIIPEDTFFPSSDVPCDVKLVEKSFETDTNLNFQNLSVIGFRILLLKVAGFNLLMTLRLWSSRAKRSGSGATNFSLLKQAGDVEENPGPTSMALPVTALLLPLALLLHAARPGMRTEDLPKAVVFLEPQWYRVLEKDSVTLKCQGAYSPEDNSTQWFHNESLISSQASSYFIDAATVDDSGEYRCQTNLSTLSDPVQLEVHIGWLLLQAPRWVFKEEDPIHLRCHSWKNTALHKVTYLQNGKGRKYFHHNSDFYIPKATLKDSGSYFCRGLVGSKNVSSETVNITITQGLAVSTISSFFPPGYQTREDLKNVFPPEVAVFEPSKAEIAHTQKATLVCLATGFYPDHVELSWWVNGKEVHSGVCTDPQPLKEQPALNDSRYCLSSRLRVSATFWQNPRNHFRCQVQFYGLSENDEWTQDRAKPVTQIVSAEAWGRADCGITSASYHQGVLSATILYEILLGKATLYAVLVSALVLMAMVKRKDSRGRAKRSGSGVKQTLNFDLLKLAGDVESNPGPSRGHMTEYKPTVRLATRDDVPRAVRTLAAAFADYPATRHTVDPDRHIERVTELQELFLTRVGLDIGKVWVADDGAAVAVWTTPESVEAGAVFAEIGPRMAELSGSRLAAQQQMEGLLAPHRPKEPAWFLATVGVSPDHQGKGLGSAVVLPGVEAAERAGVPAFLETSAPRNLPFYERLGFTVTADVEVPEGPRTWCMTRKPGA

SEQ ID NO: 18963 - protein, 447 aa, synthetic construct
MALPVTALLLPLALLLHAARPLEIQNPDPAVYQLRDSKSSDKSVCLFTDFDSQTNVSQSKDSDVYITDKCVLDMRSMDFKSNSAVAWSNKSDFACANAFNNSIIPEDTFFPSSDVPCDVKLVEKSFETDTNLNFQNLSVIGFRILLLKVAGFNLLMTLRLWSSRAKRSGSGATNFSLLKQAGDVEENPGPTSATMALPVTALLLPLALLLHAARPMDPDLEIRAAFLRQRNTALRTEVAELEQEVQRLENEVSQYETRYGPLGGGKTREDLKNVFPPEVAVFEPSKAEIAHTQKATLVCLATGFYPDHVELSWWVNGKEVHSGVCTDPQPLKEQPALNDSRYCLSSRLRVSATFWQNPRNHFRCQVQFYGLSENDEWTQDRAKPVTQIVSAEAWGRADCGITSASYHQGVLSATILYEILLGKATLYAVLVSALVLMAMVKRKDSRG

SEQ ID NO: 18964 - protein, 447 aa, synthetic construct
MALPVTALLLPLALLLHAARPLEIQNPDPAVYQLRDSKSSDKSVCLFTDFDSQTNVSQSKDSDVYITDKCVLDMRSMDFKSNSAVAWSNKSDFACANAFNNSIIPEDTFFPSSDVPCDVKLVEKSFETDTNLNFQNLSVIGFRILLLKVAGFNLLMTLRLWSSRAKRSGSGATNFSLLKQAGDVEENPGPTSATMALPVTALLLPLALLLHAARPMDPDLEIEAAFLERENTALETRVAELRQRVQRLRNRVSQYRTRYGPLGGGKTREDLKNVFPPEVAVFEPSKAEIAHTQKATLVCLATGFYPDHVELSWWVNGKEVHSGVCTDPQPLKEQPALNDSRYCLSSRLRVSATFWQNPRNHFRCQVQFYGLSENDEWTQDRAKPVTQIVSAEAWGRADCGITSASYHQGVLSATILYEILLGKATLYAVLVSALVLMAMVKRKDSRG

SEQ ID NO: 18965 - protein, 682 aa, synthetic construct
MALPVTALLLPLALLLHAARPLEIQNPDPAVYQLRDSKSSDKSVCLFTDFDSQTNVSQSKDSDVYITDKCVLDMRSMDFKSNSAVAWSNKSDFACANAFNNSIIPEDTFFPSSDVPCDVKLVEKSFETDTNLNFQNLSVIGFRILLLKVAGFNLLMTLRLWSSRAKRSGSGATNFSLLKQAGDVEENPGPTSATMALPVTALLLPLALLLHAARPLFNQEVQIPLTESYCGPCPKNWICYKNNCYQFFDESKNWYESQASCMSQNASLLKVYSKEDQDLLKLVKSAHWMGLVHIPTNGSWQWEDGSILSPNLLTIIEMQKGDCALYASSFKGYIENCSTPNTYICMQRTVSGGGGSGGGGSGGGGDLFNQEVQIPLTESYCGPCPKNWICYKNNCYQFFDESKNWYESQASCMSQNASLLKVYSKEDQDLLKLVKSAHWMGLVHIPTNGSWQWEDGSILSPNLLTIIEMQKGDCALYASSFKGYIENCSTPNTYICMQRTVTREDLKNVFPPEVAVFEPSKAEIAHTQKATLVCLATGFYPDHVELSWWVNGKEVHSGVCTDPQPLKEQPALNDSRYCLSSRLRVSATFWQNPRNHFRCQVQFYGLSENDEWTQDRAKPVTQIVSAEAWGRADCGITSASYHQGVLSATILYEILLGKATLYAVLVSALVLMAMVKRKDSRG

SEQ ID NO: 18966 - protein, 682 aa, synthetic construct
MALPVTALLLPLALLLHAARPLEIQNPDPAVYQLRDSKSSDKSVCLFTDFDSQTNVSQSKDSDVYITDKCVLDMRSMDFKSNSAVAWSNKSDFACANAFNNSIIPEDTFFPSSDVPCDVKLVEKSFETDTNLNFQNLSVIGFRILLLKVAGFNLLMTLRLWSSRAKRSGSGATNFSLLKQAGDVEENPGPTSATMALPVTALLLPLALLLHAARPLFNQEVQIPLTESYCGPCPKNWICYKNNCYQFFDESKNWYESQASCMSQNASLLKVYSKEDQDLLKLVKSAHWMGLVHIPTNGSWQWEDGSILSPNLLTIIEMQKGDCALYASSFKGFIENCSTPNTYICMQRTVGGGGSGGGGSGGGGSDLFNQEVQIPLTESYCGPCPKNWICYKNNCYQFFDESKNWYESQASCMSQNASLLKVYSKEDQDLLKLVKSAHWMGLVHIPTNGSWQWEDGSILSPNLLTIIEMQKGDCALYASSFKGFIENCSTPNTYICMQRTVTREDLKNVFPPEVAVFEPSKAEIAHTQKATLVCLATGFYPDHVELSWWVNGKEVHSGVCTDPQPLKEQPALNDSRYCLSSRLRVSATFWQNPRNHFRCQVQFYGLSENDEWTQDRAKPVTQIVSAEAWGRADCGITSASYHQGVLSATILYEILLGKATLYAVLVSALVLMAMVKRKDSRG

SEQ ID NO: 18967 - protein, 708 aa, synthetic construct
MALPVTALLLPLALLLHAARPLEIQNPDPAVYQLRDSKSSDKSVCLFTDFDSQTNVSQSKDSDVYITDKCVLDMRSMDFKSNSAVAWSNKSDFACANAFNNSIIPEDTFFPSSDVPCDVKLVEKSFETDTNLNFQNLSVIGFRILLLKVAGFNLLMTLRLWSSRAKRSGSGATNFSLLKQAGDVEENPGPTSMALPVTALLLPLALLLHAARPMDPDLEIRAAFLRQRNTALRTEVAELEQEVQRLENEVSQYETRYGPLGGGKGTGGGGSGGGGSGGGGSEFDIQMTQSPSSLSASVGDRVTITCKASDHINNWLAWYQQKPGQAPKLLIYGATTLETGVPSRFSGSGSGTDYTLTISSLQPEDFATYYCQQSWNTPWTFGQGTKLEIKRGGGGSGGGGSGGGGSQVQLQQPGAELVKPGASVKMSCKASGYAFSSYWINWMKQKPGQGLEWIGQIYPGDGDTNYNGKFKGRATLTADTSSSTAYMQLSSLTSEDSAVYFCARSITTVVGCAMDYWGQGTSVTVSSTREDLKNVFPPEVAVFEPSKAEIAHTQKATLVCLATGFYPDHVELSWWVNGKEVHSGVCTDPQPLKEQPALNDSRYCLSSRLRVSATFWQNPRNHFRCQVQFYGLSENDEWTQDRAKPVTQIVSAEAWGRADCGITSASYHQGVLSATILYEILLGKATLYAVLVSALVLMAMVKRKDSRG

SEQ ID NO: 18968 - protein, 943 aa, synthetic construct
MALPVTALLLPLALLLHAARPLEIQNPDPAVYQLRDSKSSDKSVCLFTDFDSQTNVSQSKDSDVYITDKCVLDMRSMDFKSNSAVAWSNKSDFACANAFNNSIIPEDTFFPSSDVPCDVKLVEKSFETDTNLNFQNLSVIGFRILLLKVAGFNLLMTLRLWSSRAKRSGSGATNFSLLKQAGDVEENPGPTSMALPVTALLLPLALLLHAARPLFNQEVQIPLTESYCGPCPKNWICYKNNCYQFFDESKNWYESQASCMSQNASLLKVYSKEDQDLLKLVKSAHWMGLVHIPTNGSWQWEDGSILSPNLLTIIEMQKGDCALYASSFKGFIENCSTPNTYICMQRTVGGGGSGGGGSGGGGSDLFNQEVQIPLTESYCGPCPKNWICYKNNCYQFFDESKNWYESQASCMSQNASLLKVYSKEDQDLLKLVKSAHWMGLVHIPTNGSWQWEDGSILSPNLLTIIEMQKGDCALYASSFKGFIENCSTPNTYICMQRTVGTGGGGSGGGGSGGGGSEFDIQMTQSPSSLSASVGDRVTITCKASDHINNWLAWYQQKPGQAPKLLIYGATTLETGVPSRFSGSGSGTDYTLTISSLQPEDFATYYCQQSWNTPWTFGQGTKLEIKRGGGGSGGGGSGGGGSQVQLQQPGAELVKPGASVKMSCKASGYAFSSYWINWMKQKPGQGLEWIGQIYPGDGDTNYNGKFKGRATLTADTSSSTAYMQLSSLTSEDSAVYFCARSITTVVGCAMDYWGQGTSVTVSSTREDLKNVFPPEVAVFEPSKAEIAHTQKATLVCLATGFYPDHVELSWWVNGKEVHSGVCTDPQPLKEQPALNDSRYCLSSRLRVSATFWQNPRNHFRCQVQFYGLSENDEWTQDRAKPVTQIVSAEAWGRADCGITSASYHQGVLSATILYEILLGKATLYAVLVSALVLMAMVKRKDSRG

SEQ ID NO: 18969 - protein, 648 aa, synthetic construct
MALPVTALLLPLALLLHAARPLEIQNPDPAVYQLRDSKSSDKSVCLFTDFDSQTNVSQSKDSDVYITDKCVLDMRSMDFKSNSAVAWSNKSDFACANAFNNSIIPEDTFFPSSDVPCDVKLVEKSFETDTNLNFQNLSVIGFRILLLKVAGFNLLMTLRLWSSRAKRSGSGATNFSLLKQAGDVEENPGPTSMALPVTALLLPLALLLHAARPQSVLTQPPSVSGAPGQRVTISCTGSSSNIGAGYDVHWYQQLPGTAPKLLIFGNSNRPSGVPDRFSGFKSGTSASLAITGLQAEDEADYFCQSYDSSLSGSGVFGTGTKVTVLGGGGGSGGGGSGGGGSQMQLVQSGGGLVQPGRSLRLSCAASGFTFDDYAMHWVRQAPGKGLEWVSGISWNSGSIGYADSVKGRFTISRDNAKNSLYLQMNSLRAEDTALYYCAKDIHSGSYYGLLYYAMDVWGQGTTVTVSSTREDLKNVFPPEVAVFEPSKAEIAHTQKATLVCLATGFYPDHVELSWWVNGKEVHSGVCTDPQPLKEQPALNDSRYCLSSRLRVSATFWQNPRNHFRCQVQFYGLSENDEWTQDRAKPVTQIVSAEAWGRADCGITSASYHQGVLSATILYEILLGKATLYAVLVSALVLMAMVKRKDSRG

SEQ ID NO: 18970 - protein, 485 aa, synthetic construct
MALPVTALLLPLALLLHAARPLEIQNPDPAVYQLRDSKSSDKSVCLFTDFDSQTNVSQSKDSDVYITDKCVLDMRSMDFKSNSAVAWSNKSDFACANAFNNSIIPEDTFFPSSDVPCDVKLVEKSFETDTNLNFQNLSVIGFRILLLKVAGFNLLMTLRLWSSRAKRSGSGATNFSLLKQAGDVEENPGPTSMALPVTALLLPLALLLHAARPMCMPCFTTDHQMARKCDDCCGGKGRGKCYGPQCLCRLEGGGGSGGGGSGGGGSFEVCMPCFTTDQQMARKCSDCCGGKGRGKCYGPQCLCRTREDLKNVFPPEVAVFEPSKAEIAHTQKATLVCLATGFYPDHVELSWWVNGKEVHSGVCTDPQPLKEQPALNDSRYCLSSRLRVSATFWQNPRNHFRCQVQFYGLSENDEWTQDRAKPVTQIVSAEAWGRADCGITSASYHQGVLSATILYEILLGKATLYAVLVSALVLMAMVKRKDSRG

SEQ ID NO: 18971 - protein, 695 aa, synthetic construct
MALPVTALLLPLALLLHAARPLEIQNPDPAVYQLRDSKSSDKSVCLFTDFDSQTNVSQSKDSDVYITDKCVLDMRSMDFKSNSAVAWSNKSDFACANAFNNSIIPEDTFFPSSDVPCDVKLVEKSFETDTNLNFQNLSVIGFRILLLKVAGFNLLMTLRLWSSRAKRSGSGATNFSLLKQAGDVEENPGPTSMALPVTALLLPLALLLHAARPFEVCMPCFTTDQQMARKCSDCCGGKGRGKCYGPQCLCRGTGGGGSGGGGSGGGGSEFDIQMTQSPSSLSASVGDRVTITCKASDHINNWLAWYQQKPGQAPKLLIYGATTLETGVPSRFSGSGSGTDYTLTISSLQPEDFATYYCQQSWNTPWTFGQGTKLEIKRGGGGSGGGGSGGGGSQVQLQQPGAELVKPGASVKMSCKASGYAFSSYWINWMKQKPGQGLEWIGQIYPGDGDTNYNGKFKGRATLTADTSSSTAYMQLSSLTSEDSAVYFCARSITTVVGCAMDYWGQGTSVTVSSTREDLKNVFPPEVAVFEPSKAEIAHTQKATLVCLATGFYPDHVELSWWVNGKEVHSGVCTDPQPLKEQPALNDSRYCLSSRLRVSATFWQNPRNHFRCQVQFYGLSENDEWTQDRAKPVTQIVSAEAWGRADCGITSASYHQGVLSATILYEILLGKATLYAVLVSALVLMAMVKRKDSRG

SEQ ID NO: 18972 - protein, 825 aa, synthetic construct
MALPVTALLLPLALLLHAARPLEIQNPDPAVYQLRDSKSSDKSVCLFTDFDSQTNVSQSKDSDVYITDKCVLDMRSMDFKSNSAVAWSNKSDFACANAFNNSIIPEDTFFPSSDVPCDVKLVEKSFETDTNLNFQNLSVIGFRILLLKVAGFNLLMTLRLWSSRAKRSGSGATNFSLLKQAGDVEENPGPTSMALPVTALLLPLALLLHAARPFESPVAPACDPRLLNKLLRDSHLLHSRLSQCPDVDPLSIPVLLPAVDFSLGEWKTQTEQSKAQDILGAVSLLLEGVMAARGQLEPSCLSSLLGQLSGQVRLLLGALQGLLGTQLPLQGRTTAHKDPNALFLSLQQLLRGKVRFLLLVEGPTLCVRRTLPTTAVPSSTSGTGGGGSGGGGSGGGGSEFDIQMTQSPSSLSASVGDRVTITCKASDHINNWLAWYQQKPGQAPKLLIYGATTLETGVPSRFSGSGSGTDYTLTISSLQPEDFATYYCQQSWNTPWTFGQGTKLEIKRGGGGSGGGGSGGGGSQVQLQQPGAELVKPGASVKMSCKASGYAFSSYWINWMKQKPGQGLEWIGQIYPGDGDTNYNGKFKGRATLTADTSSSTAYMQLSSLTSEDSAVYFCARSITTVVGCAMDYWGQGTSVTVSSTREDLKNVFPPEVAVFEPSKAEIAHTQKATLVCLATGFYPDHVELSWWVNGKEVHSGVCTDPQPLKEQPALNDSRYCLSSRLRVSATFWQNPRNHFRCQVQFYGLSENDEWTQDRAKPVTQIVSAEAWGRADCGITSASYHQGVLSATILYEILLGKATLYAVLVSALVLMAMVKRKDSRG

SEQ ID NO: 18973 - protein, 732 aa, synthetic construct
MALPVTALLLPLALLLHAARPLEIQNPDPAVYQLRDSKSSDKSVCLFTDFDSQTNVSQSKDSDVYITDKCVLDMRSMDFKSNSAVAWSNKSDFACANAFNNSIIPEDTFFPSSDVPCDVKLVEKSFETDTNLNFQNLSVIGFRILLLKVAGFNLLMTLRLWSSRAKRSGSGATNFSLLKQAGDVEENPGPTSMALPVTALLLPLALLLHAARPFEMGSWEEFELRLNAIEERLYALGGSEAELAYFEYVIADFEGNLQRYKGKGNPEVEALYFEADAIFEELVAYRHNGTGGGGSGGGGSGGGGSEFDIQMTQSPSSLSASVGDRVTITCKASDHINNWLAWYQQKPGQAPKLLIYGATTLETGVPSRFSGSGSGTDYTLTISSLQPEDFATYYCQQSWNTPWTFGQGTKLEIKRGGGGSGGGGSGGGGSQVQLQQPGAELVKPGASVKMSCKASGYAFSSYWINWMKQKPGQGLEWIGQIYPGDGDTNYNGKFKGRATLTADTSSSTAYMQLSSLTSEDSAVYFCARSITTVVGCAMDYWGQGTSVTVSSTREDLKNVFPPEVAVFEPSKAEIAHTQKATLVCLATGFYPDHVELSWWVNGKEVHSGVCTDPQPLKEQPALNDSRYCLSSRLRVSATFWQNPRNHFRCQVQFYGLSENDEWTQDRAKPVTQIVSAEAWGRADCGITSASYHQGVLSATILYEILLGKATLYAVLVSALVLMAMVKRKDSRG

SEQ ID NO: 18974 - protein, 762 aa, synthetic construct
MALPVTALLLPLALLLHAARPLEELGEPQLCYILDAILFLYGIVLTLLYCRLKIQVRKAAITSYEKSDGVYTGLSTRNQETYETLKHEKPPQRAKRSGSGATNFSLLKQAGDVEENPGPTSMALPVTALLLPLALLLHAARPDIQMTQTTSSLSASLGDRVTISCRASQDISKYLNWYQQKPDGTVKLLIYHTSRLHSGVPSRFSGSGSGTDYSLTISNLEQEDIATYFCQQGNTLPYTFGGGTKLEITGGGGSGGGGSGGGGSEVKLQESGPGLVAPSQSLSVTCTVSGVSLPDYGVSWIRQPPRKGLEWLGVIWGSETTYYNSALKSRLTIIKDNSKSQVFLKMNSLQTDDTAIYYCAKHYYYGGSYAMDYWGQGTSVTVSSTRQSFGLLDPKLCYLLDGILFIYGVILTALFLRVKFSRSADAPAYQQGQNQLYNELNLGRREEYDVLDKRRGRDPEMGGKPQRRKNPQEGLYNELQKDKMAEAYSEIGMKGERRRGKGHDGLYQGLSTATKDTYDALHMQALPPRRAKRSGSGVKQTLNFDLLKLAGDVESNPGPSRGHMTEYKPTVRLATRDDVPRAVRTLAAAFADYPATRHTVDPDRHIERVTELQELFLTRVGLDIGKVWVADDGAAVAVWTTPESVEAGAVFAEIGPRMAELSGSRLAAQQQMEGLLAPHRPKEPAWFLATVGVSPDHQGKGLGSAVVLPGVEAAERAGVPAFLETSAPRNLPFYERLGFTVTADVEVPEGPRTWCMTRKPGA

SEQ ID NO: 18975 - protein, 763 aa, synthetic construct
MALPVTALLLPLALLLHAARPLEELGEPQLCYILDAILFLYGIVLTLLYCRLKIQVRKAAITSYEKSDGVYTGLSTRNQETYETLKHEKPPQRAKRSGSGATNFSLLKQAGDVEENPGPTSTMALPVTALLLPLALLLHAARPEIVMTQSPATLSLSPGERATLSCRASQDISKYLNWYQQKPGQAPRLLIYHTSRLHSGIPARFSGSGSGTDYTLTISSLQPEDFAVYFCQQGNTLPYTFGQGTKLEIKGGGGSGGGGSGGGGSQVQLQESGPGLVKPSETLSLTCTVSGVSLPDYGVSWIRQPPGKGLEWIGVIWGSETTYYNSSLKSRVTISKDNSKNQVSLKLSSVTAADTAVYYCAKHYYYGGSYAMDYWGQGTLVTVSSTRQSFGLLDPKLCYLLDGILFIYGVILTALFLRVKFSRSADAPAYQQGQNQLYNELNLGRREEYDVLDKRRGRDPEMGGKPQRRKNPQEGLYNELQKDKMAEAYSEIGMKGERRRGKGHDGLYQGLSTATKDTYDALHMQALPPRRAKRSGSGVKQTLNFDLLKLAGDVESNPGPSRGHMTEYKPTVRLATRDDVPRAVRTLAAAFADYPATRHTVDPDRHIERVTELQELFLTRVGLDIGKVWVADDGAAVAVWTTPESVEAGAVFAEIGPRMAELSGSRLAAQQQMEGLLAPHRPKEPAWFLATVGVSPDHQGKGLGSAVVLPGVEAAERAGVPAFLETSAPRNLPFYERLGFTVTADVEVPEGPRTWCMTRKPGA

SEQ ID NO: 18976 - protein, 764 aa, synthetic construct
MALPVTALLLPLALLLHAARPLEELGEPQLCYILDAILFLYGIVLTLLYCRLKIQVRKAAITSYEKSDGVYTGLSTRNQETYETLKHEKPPQRAKRSGSGATNFSLLKQAGDVEENPGPTSTMALPVTALLLPLALLLHAARPDEIVLTQSPATLSLSPGERATLSCSASSSVSYMHWYQQKPGQAPRLLIYDTSKLASGIPARFSGSGSGTDFTLTISSLEPEDVAVYYCFQGSVYPFTFGQGTKLEIKRGGGGSGGGGSGGGGSQVQLQESGPGLVKPSQTLSLTCTVSGGSISTSGMGVGWIRQHPGKGLEWIGHIWWDDDKRYNPALKSRVTISVDTSKNQFSLKLSSVTAADTAVYYCARMELWSYYFDYWGQGTLVTVSSTRQSFGLLDPKLCYLLDGILFIYGVILTALFLRVKFSRSADAPAYQQGQNQLYNELNLGRREEYDVLDKRRGRDPEMGGKPQRRKNPQEGLYNELQKDKMAEAYSEIGMKGERRRGKGHDGLYQGLSTATKDTYDALHMQALPPRRAKRSGSGVKQTLNFDLLKLAGDVESNPGPSRGHMTEYKPTVRLATRDDVPRAVRTLAAAFADYPATRHTVDPDRHIERVTELQELFLTRVGLDIGKVWVADDGAAVAVWTTPESVEAGAVFAEIGPRMAELSGSRLAAQQQMEGLLAPHRPKEPAWFLATVGVSPDHQGKGLGSAVVLPGVEAAERAGVPAFLETSAPRNLPFYERLGFTVTADVEVPEGPRTWCMTRKPGA

SEQ ID NO: 18977 - protein, 760 aa, synthetic construct
MALPVTALLLPLALLLHAARPLEELGEPQLCYILDAILFLYGIVLTLLYCRLKIQVRKAAITSYEKSDGVYTGLSTRNQETYETLKHEKPPQRAKRSGSGATNFSLLKQAGDVEENPGPTSMALPVTALLLPLALLLHAARPDIQMTQSPSSLSASVGDRVTITCRASQDISNYLNWYQQKPGKAPKLLIYYTSRLHSGVPSRFSGSGSGTDFTLTISSLQPEDFATYYCQQGNTLPYTFGQGTKVEIKRGGGGSGGGGSGGGGSEVQLVESGGGLVQPGGSLRLSCAASGFTFSDYFMSWVRQAPGKGLEWVATISNGGTYTYYPDSVKGRFTISRDNSKNTLYLQMNSLRAEDTAVYYCARFDGYIFDYWGQGTLVTVSSTRQSFGLLDPKLCYLLDGILFIYGVILTALFLRVKFSRSADAPAYQQGQNQLYNELNLGRREEYDVLDKRRGRDPEMGGKPQRRKNPQEGLYNELQKDKMAEAYSEIGMKGERRRGKGHDGLYQGLSTATKDTYDALHMQALPPRRAKRSGSGVKQTLNFDLLKLAGDVESNPGPSRGHMTEYKPTVRLATRDDVPRAVRTLAAAFADYPATRHTVDPDRHIERVTELQELFLTRVGLDIGKVWVADDGAAVAVWTTPESVEAGAVFAEIGPRMAELSGSRLAAQQQMEGLLAPHRPKEPAWFLATVGVSPDHQGKGLGSAVVLPGVEAAERAGVPAFLETSAPRNLPFYERLGFTVTADVEVPEGPRTWCMTRKPGA

SEQ ID NO: 18978 - protein, 764 aa, synthetic construct
MALPVTALLLPLALLLHAARPLEELGEPQLCYILDAILFLYGIVLTLLYCRLKIQVRKAAITSYEKSDGVYTGLSTRNQETYETLKHEKPPQRAKRSGSGATNFSLLKQAGDVEENPGPTSMALPVTALLLPLALLLHAARPDIQMTQSPSSLSASVGDRVTITCKASDHINNWLAWYQQKPGQAPKLLIYGATTLETGVPSRFSGSGSGTDYTLTISSLQPEDFATYYCQQSWNTPWTFGQGTKLEIKRGGGGSGGGGSGGGGSQVQLQQPGAELVKPGASVKMSCKASGYAFSSYWINWMKQKPGQGLEWIGQIYPGDGDTNYNGKFKGRATLTADTSSSTAYMQLSSLTSEDSAVYFCARSITTVVGCAMDYWGQGTSVTVSSTRQSFGLLDPKLCYLLDGILFIYGVILTALFLRVKFSRSADAPAYQQGQNQLYNELNLGRREEYDVLDKRRGRDPEMGGKPQRRKNPQEGLYNELQKDKMAEAYSEIGMKGERRRGKGHDGLYQGLSTATKDTYDALHMQALPPRRAKRSGSGVKQTLNFDLLKLAGDVESNPGPSRGHMTEYKPTVRLATRDDVPRAVRTLAAAFADYPATRHTVDPDRHIERVTELQELFLTRVGLDIGKVWVADDGAAVAVWTTPESVEAGAVFAEIGPRMAELSGSRLAAQQQMEGLLAPHRPKEPAWFLATVGVSPDHQGKGLGSAVVLPGVEAAERAGVPAFLETSAPRNLPFYERLGFTVTADVEVPEGPRTWCMTRKPGA

SEQ ID NO: 18979 - protein, 766 aa, synthetic construct
MALPVTALLLPLALLLHAARPLEELGEPQLCYILDAILFLYGIVLTLLYCRLKIQVRKAAITSYEKSDGVYTGLSTRNQETYETLKHEKPPQRAKRSGSGATNFSLLKQAGDVEENPGPTSMALPVTALLLPLALLLHAARPQIVLSQSPAILSASPGEKVTMTCRASSSVSYMHWYQQKPGSSPKPWIYATSNLASGVPARFSGSGSGTSYSFTISRVEAEDAATYYCQQWTFNPPTFGGGTRLEIKRTVAAGGGGSGGGGSGGGGSQAYLQQSGAELVRPGASVKMSCKASGYTFTSYNMHWVKQTPRQGLEWIGGIYPGNGDTSYNQKFKGKATLTVGKSSSTAYMQLSSLTSEDSAVYFCARYDYNYAMDYWGQGTSVTVSSASTRQSFGLLDPKLCYLLDGILFIYGVILTALFLRVKFSRSADAPAYQQGQNQLYNELNLGRREEYDVLDKRRGRDPEMGGKPQRRKNPQEGLYNELQKDKMAEAYSEIGMKGERRRGKGHDGLYQGLSTATKDTYDALHMQALPPRRAKRSGSGVKQTLNFDLLKLAGDVESNPGPSRGHMTEYKPTVRLATRDDVPRAVRTLAAAFADYPATRHTVDPDRHIERVTELQELFLTRVGLDIGKVWVADDGAAVAVWTTPESVEAGAVFAEIGPRMAELSGSRLAAQQQMEGLLAPHRPKEPAWFLATVGVSPDHQGKGLGSAVVLPGVEAAERAGVPAFLETSAPRNLPFYERLGFTVTADVEVPEGPRTWCMTRKPGA

SEQ ID NO: 18980 - protein, 764 aa, synthetic construct
MALPVTALLLPLALLLHAARPLEELGEPQLCYILDAILFLYGIVLTLLYCRLKIQVRKAAITSYEKSDGVYTGLSTRNQETYETLKHEKPPQRAKRSGSGATNFSLLKQAGDVEENPGPTSMALPVTALLLPLALLLHAARPEIVLTQSPATLSLSPGERATLSCRASQSVSSYLAWYQQKPGQAPRLLIYDASNRATGIPARFSGSGSGTDFTLTISSLEPEDFAVYYCQQRSNWPITFGQGTRLEIKGGGGSGGGGSGGGGSEVQLVESGGGLVQPDRSLRLSCAASGFTFHDYAMHWVRQAPGKGLEWVSTISWNSGTIGYADSVKGRFTISRDNAKNSLYLQMNSLRAEDTALYYCAKDIQYGNYYYGMDVWGQGTTVTVSSTRQSFGLLDPKLCYLLDGILFIYGVILTALFLRVKFSRSADAPAYQQGQNQLYNELNLGRREEYDVLDKRRGRDPEMGGKPQRRKNPQEGLYNELQKDKMAEAYSEIGMKGERRRGKGHDGLYQGLSTATKDTYDALHMQALPPRRAKRSGSGVKQTLNFDLLKLAGDVESNPGPSRGHMTEYKPTVRLATRDDVPRAVRTLAAAFADYPATRHTVDPDRHIERVTELQELFLTRVGLDIGKVWVADDGAAVAVWTTPESVEAGAVFAEIGPRMAELSGSRLAAQQQMEGLLAPHRPKEPAWFLATVGVSPDHQGKGLGSAVVLPGVEAAERAGVPAFLETSAPRNLPFYERLGFTVTADVEVPEGPRTWCMTRKPGA

SEQ ID NO: 18981 - protein, 762 aa, synthetic construct
MALPVTALLLPLALLLHAARPLEELGEPQLCYILDAILFLYGIVLTLLYCRLKIQVRKAAITSYEKSDGVYTGLSTRNQETYETLKHEKPPQRAKRSGSGATNFSLLKQAGDVEENPGPTSMALPVTALLLPLALLLHAARPDIQMTQSPSSLSASVGDRVTITCRASQDVNTAVAWYQQKPGKAPKLLIYSASFLESGVPSRFSGSRSGTDFTLTISSLQPEDFATYYCQQHYTTPPTFGQTKVEIKRGGGGSGGGGSGGGGSEVQLVESGGGLVQPGGSLRLSCAASGFNIKDTYIHWVRQAPGKGLEWVARIYPTNGYTRYADSVKGRFTISADTSKNTAYLQMNSLRAEDTAVYYCSRWGGDGFYAMDVWGQGTLVTVSSTRQSFGLLDPKLCYLLDGILFIYGVILTALFLRVKFSRSADAPAYQQGQNQLYNELNLGRREEYDVLDKRRGRDPEMGGKPQRRKNPQEGLYNELQKDKMAEAYSEIGMKGERRRGKGHDGLYQGLSTATKDTYDALHMQALPPRRAKRSGSGVKQTLNFDLLKLAGDVESNPGPSRGHMTEYKPTVRLATRDDVPRAVRTLAAAFADYPATRHTVDPDRHIERVTELQELFLTRVGLDIGKVWVADDGAAVAVWTTPESVEAGAVFAEIGPRMAELSGSRLAAQQQMEGLLAPHRPKEPAWFLATVGVSPDHQGKGLGSAVVLPGVEAAERAGVPAFLETSAPRNLPFYERLGFTVTADVEVPEGPRTWCMTRKPGA

SEQ ID NO: 18982 - protein, 641 aa, synthetic construct
MALPVTALLLPLALLLHAARPLEELGEPQLCYILDAILFLYGIVLTLLYCRLKIQVRKAAITSYEKSDGVYTGLSTRNQETYETLKHEKPPQRAKRSGSGATNFSLLKQAGDVEENPGPTSMALPVTALLLPLALLLHAARPDEFEVQLVESGGGLVQAGGSLRLSCAASGITFSINTMGWYRQAPGKQRELVALISSIGDTYYADSVKGRFTISRDNAKNTVYLQMNSLKPEDTAVYYCKRFRTAAQGTDYWGQGTQVTVSSTRQSFGLLDPKLCYLLDGILFIYGVILTALFLRVKFSRSADAPAYQQGQNQLYNELNLGRREEYDVLDKRRGRDPEMGGKPQRRKNPQEGLYNELQKDKMAEAYSEIGMKGERRRGKGHDGLYQGLSTATKDTYDALHMQALPPRRAKRSGSGVKQTLNFDLLKLAGDVESNPGPSRGHMTEYKPTVRLATRDDVPRAVRTLAAAFADYPATRHTVDPDRHIERVTELQELFLTRVGLDIGKVWVADDGAAVAVWTTPESVEAGAVFAEIGPRMAELSGSRLAAQQQMEGLLAPHRPKEPAWFLATVGVSPDHQGKGLGSAVVLPGVEAAERAGVPAFLETSAPRNLPFYERLGFTVTADVEVPEGPRTWCMTRKPGA

SEQ ID NO: 18983 - protein, 641 aa, synthetic construct; identical to SEQ ID NO: 18982

SEQ ID NO: 18984 - protein, 906 aa, synthetic construct
MALPVTALLLPLALLLHAARPLEELGEPQLCYILDAILFLYGIVLTLLYCRLKIQVRKAAITSYEKSDGVYTGLSTRNQETYETLKHEKPPQRAKRSGSGATNFSLLKQAGDVEENPGPTSMALPVTALLLPLALLLHAARPQVQLVESGGGLVQAGDSVTLSCTASGRTFSSYALAWFRQRPGKEREFVAGLRWGGPTNYADSVKDRFTISGDSAKHTMYLQMNSLKPEDTAVYYCGYNPGGWAVPSQYEYDSWGQGTQVTVSSGTGGGGSGGGGSGGGGSEFDIQMTQSPSSLSASVGDRVTITCKASDHINNWLAWYQQKPGQAPKLLIYGATTLETGVPSRFSGSGSGTDYTLTISSLQPEDFATYYCQQSWNTPWTFGQGTKLEIKRGGGGSGGGGSGGGGSQVQLQQPGAELVKPGASVKMSCKASGYAFSSYWINWMKQKPGQGLEWIGQIYPGDGDTNYNGKFKGRATLTADTSSSTAYMQLSSLTSEDSAVYFCARSITTVVGCAMDYWGQGTSVTVSSTRQSFGLLDPKLCYLLDGILFIYGVILTALFLRVKFSRSADAPAYQQGQNQLYNELNLGRREEYDVLDKRRGRDPEMGGKPQRRKNPQEGLYNELQKDKMAEAYSEIGMKGERRRGKGHDGLYQGLSTATKDTYDALHMQALPPRRAKRSGSGVKQTLNFDLLKLAGDVESNPGPSRGHMTEYKPTVRLATRDDVPRAVRTLAAAFADYPATRHTVDPDRHIERVTELQELFLTRVGLDIGKVWVADDGAAVAVWTTPESVEAGAVFAEIGPRMAELSGSRLAAQQQMEGLLAPHRPKEPAWFLATVGVSPDHQGKGLGSAVVLPGVEAAERAGVPAFLETSAPRNLPFYERLGFTVTADVEVPEGPRTWCMTRKPGA

SEQ ID NO: 18985 - protein, 1035 aa, synthetic construct
MALPVTALLLPLALLLHAARPLEELGEPQLCYILDAILFLYGIVLTLLYCRLKIQVRKAAITSYEKSDGVYTGLSTRNQETYETLKHEKPPQRAKRSGSGATNFSLLKQAGDVEENPGPTSMALPVTALLLPLALLLHAARPEVQLLESGGGLVQPGGSLRLSCAASGFTFSSYAMSWVRQAPGKGLEWVSSISGSGDYIYYADSVKGRFTISRDISKNTLYLQMNSLRAEDTAVYYCAKEGTGANSSLADYRGQGTLVTVSSGGGSGGGSQVQLVESGGGLVQAGDSVTLSCTASGRTFSSYALAWFRQRPGKEREFVAGLRWGGPTNYADSVKDRFTISGDSAKHTMYLQMNSLKPEDTAVYYCGYNPGGWAVPSQYEYDSWGQGTQVTVSSGTGGGGSGGGGSGGGGSEFDIQMTQSPSSLSASVGDRVTITCKASDHINNWLAWYQQKPGQAPKLLIYGATTLETGVPSRFSGSGSGTDYTLTISSLQPEDFATYYCQQSWNTPWTFGQGTKLEIKRGGGGSGGGGSGGGGSQVQLQQPGAELVKPGASVKMSCKASGYAFSSYWINWMKQKPGQGLEWIGQIYPGDGDTNYNGKFKGRATLTADTSSSTAYMQLSSLTSEDSAVYFCARSITTVVGCAMDYWGQGTSVTVSSTRQSFGLLDPKLCYLLDGILFIYGVILTALFLRVKFSRSADAPAYQQGQNQLYNELNLGRREEYDVLDKRRGRDPEMGGKPQRRKNPQEGLYNELQKDKMAEAYSEIGMKGERRRGKGHDGLYQGLSTATKDTYDALHMQALPPRRAKRSGSGVKQTLNFDLLKLAGDVESNPGPSRGHMTEYKPTVRLATRDDVPRAVRTLAAAFADYPATRHTVDPDRHIERVTELQELFLTRVGLDIGKVWVADDGAAVAVWTTPESVEAGAVFAEIGPRMAELSGSRLAAQQQMEGLLAPHRPKEPAWFLATVGVSPDHQGKGLGSAVVLPGVEAAERAGVPAFLETSAPRNLPFYERLGFTVTADVEVPEGPRTWCMTRKPGA

SEQ ID NO: 18986 - protein, 1033 aa, synthetic construct
MALPVTALLLPLALLLHAARPLEELGEPQLCYILDAILFLYGIVLTLLYCRLKIQVRKAAITSYEKSDGVYTGLSTRNQETYETLKHEKPPQRAKRSGSGATNFSLLKQAGDVEENPGPTSMALPVTALLLPLALLLHAARPGVTQSPTHLIKTRGQQATLRCSPISGHTSVYWYQQALGLGLQFLLWYDEGEERNRGNFPPRFSGRQFPNYSSELNVNALELEDSALYLCASSLGGPRGLAGLRGDEQFFGPGTRLTVLEGGGSGGGSQVQLVESGGGLVQAGDSVTLSCTASGRTFSSYALAWFRQRPGKEREFVAGLRWGGPTNYADSVKDRFTISGDSAKHTMYLQMNSLKPEDTAVYYCGYNPGGWAVPSQYEYDSWGQGTQVTVSSGTGGGGSGGGGSGGGGSEFDIQMTQSPSSLSASVGDRVTITCKASDHINNWLAWYQQKPGQAPKLLIYGATTLETGVPSRFSGSGSGTDYTLTISSLQPEDFATYYCQQSWNTPWTFGQGTKLEIKRGGGGSGGGGSGGGGSQVQLQQPGAELVKPGASVKMSCKASGYAFSSYWINWMKQKPGQGLEWIGQIYPGDGDTNYNGKFKGRATLTADTSSSTAYMQLSSLTSEDSAVYFCARSITTVVGCAMDYWGQGTSVTVSSTRQSFGLLDPKLCYLLDGILFIYGVILTALFLRVKFSRSADAPAYQQGQNQLYNELNLGRREEYDVLDKRRGRDPEMGGKPQRRKNPQEGLYNELQKDKMAEAYSEIGMKGERRRGKGHDGLYQGLSTATKDTYDALHMQALPPRRAKRSGSGVKQTLNFDLLKLAGDVESNPGPSRGHMTEYKPTVRLATRDDVPRAVRTLAAAFADYPATRHTVDPDRHIERVTELQELFLTRVGLDIGKVWVADDGAAVAVWTTPESVEAGAVFAEIGPRMAELSGSRLAAQQQMEGLLAPHRPKEPAWFLATVGVSPDHQGKGLGSAVVLPGVEAAERAGVPAFLETSAPRNLPFYERLGFTVTADVEVPEGPRTWCMTRKPGA

SEQ ID NO: 18987 - protein, 1027 aa, synthetic construct
MALPVTALLLPLALLLHAARPLEELGEPQLCYILDAILFLYGIVLTLLYCRLKIQVRKAAITSYEKSDGVYTGLSTRNQETYETLKHEKPPQRAKRSGSGATNFSLLKQAGDVEENPGPTSMALPVTALLLPLALLLHAARPGVTQSPTHLIKTRGQQATLRCSPISGHTSVYWYQQALGLGLQFLLWYDEGEERNRGNFPPRFSGRQFPNYSSELNVNALELEDSALYLCASSLGGPRGLAGLRGDEQFFGPGTRLTVLEGGGSGGGSGVTQSPTHLIKTRGQQATLRCSPISGHTSVYWYQQALGLGLQFLLWYDEGEERNRGNFPPRFSGRQFPNYSSELNVNALELEDSALYLCASSLGGDELGADGNEQFFGPGTRLTVLEGTGGGGSGGGGSGGGGSEFDIQMTQSPSSLSASVGDRVTITCKASDHINNWLAWYQQKPGQAPKLLIYGATTLETGVPSRFSGSGSGTDYTLTISSLQPEDFATYYCQQSWNTPWTFGQGTKLEIKRGGGGSGGGGSGGGGSQVQLQQPGAELVKPGASVKMSCKASGYAFSSYWINWMKQKPGQGLEWIGQIYPGDGDTNYNGKFKGRATLTADTSSSTAYMQLSSLTSEDSAVYFCARSITTVVGCAMDYWGQGTSVTVSSTRQSFGLLDPKLCYLLDGILFIYGVILTALFLRVKFSRSADAPAYQQGQNQLYNELNLGRREEYDVLDKRRGRDPEMGGKPQRRKNPQEGLYNELQKDKMAEAYSEIGMKGERRRGKGHDGLYQGLSTATKDTYDALHMQALPPRRAKRSGSGVKQTLNFDLLKLAGDVESNPGPSRGHMTEYKPTVRLATRDDVPRAVRTLAAAFADYPATRHTVDPDRHIERVTELQELFLTRVGLDIGKVWVADDGAAVAVWTTPESVEAGAVFAEIGPRMAELSGSRLAAQQQMEGLLAPHRPKEPAWFLATVGVSPDHQGKGLGSAVVLPGVEAAERAGVPAFLETSAPRNLPFYERLGFTVTADVEVPEGPRTWCMTRKPGA

SEQ ID NO: 18988 - protein, 647 aa, synthetic construct
MALPVTALLLPLALLLHAARPLEELGEPQLCYILDAILFLYGIVLTLLYCRLKIQVRKAAITSYEKSDGVYTGLSTRNQETYETLKHEKPPQRAKRSGSGATNFSLLKQAGDVEENPGPTSMALPVTALLLPLALLLHAARPDEFGSDLGIKLLFAAAKGQDDEVRILLAAGADVNAKDFEGYTPLHVAAYDGHLEIVEVLLKAGADVNAKDSQGRTPLHEAAYSGHLEIVEVLLKAGADVNAQDDAGETPADLAAAWGHEDIAEVLQKTRQSFGLLDPKLCYLLDGILFIYGVILTALFLRVKFSRSADAPAYQQGQNQLYNELNLGRREEYDVLDKRRGRDPEMGGKPQRRKNPQEGLYNELQKDKMAEAYSEIGMKGERRRGKGHDGLYQGLSTATKDTYDALHMQALPPRRAKRSGSGVKQTLNFDLLKLAGDVESNPGPSRGHMTEYKPTVRLATRDDVPRAVRTLAAAFADYPATRHTVDPDRHIERVTELQELFLTRVGLDIGKVWVADDGAAVAVWTTPESVEAGAVFAEIGPRMAELSGSRLAAQQQMEGLLAPHRPKEPAWFLATVGVSPDHQGKGLGSAVVLPGVEAAERAGVPAFLETSAPRNLPFYERLGFTVTADVEVPEGPRTWCMTRKPGA

SEQ ID NO: 18989 - protein, 576 aa, synthetic construct
MALPVTALLLPLALLLHAARPLEELGEPQLCYILDAILFLYGIVLTLLYCRLKIQVRKAAITSYEKSDGVYTGLSTRNQETYETLKHEKPPQRAKRSGSGATNFSLLKQAGDVEENPGPTSMDWIWRILFLVGAATGAHSFEGSGFEYAKEMRNAYWEIALLPNLTNQQKRAPIRKLYDDPSQSSELLSEAKKLNDSQTRQSFGLLDPKLCYLLDGILFIYGVILTALFLRVKFSRSADAPAYQQGQNQLYNELNLGRREEYDVLDKRRGRDPEMGGKPQRRKNPQEGLYNELQKDKMAEAYSEIGMKGERRRGKGHDGLYQGLSTATKDTYDALHMQALPPRRAKRSGSGVKQTLNFDLLKLAGDVESNPGPSRGHMTEYKPTVRLATRDDVPRAVRTLAAAFADYPATRHTVDPDRHIERVTELQELFLTRVGLDIGKVWVADDGAAVAVWTTPESVEAGAVFAEIGPRMAELSGSRLAAQQQMEGLLAPHRPKEPAWFLATVGVSPDHQGKGLGSAVVLPGVEAAERAGVPAFLETSAPRNLPFYERLGFTVTADVEVPEGPRTWCMTRKPGA

SEQ ID NO: 18990 - protein, 798 aa, synthetic construct
MALPVTALLLPLALLLHAARPLEELGEPQLCYILDAILFLYGIVLTLLYCRLKIQVRKAAITSYEKSDGVYTGLSTRNQETYETLKHEKPPQRAKRSGSGATNFSLLKQAGDVEENPGPTSMALPVTALLLPLALLLHAARPDEFEVQLVESGGGLVQAGGSLRLSCAASGITFSINTMGWYRQAPGKQRELVALISSIGDTYYADSVKGRFTISRDNAKNTVYLQMNSLKPEDTAVYYCKRFRTAAQGTDYWGQGTQVTVSSLEGGGGSGGGGSGGGGSGSGGSGSGGSGSGGSGSGGSFEVQLVESGGGLVQPGGSLRLSCAASGSIFGFNDMAWYRQAPGKQRELVALISRVGVTSSADSVKGRFTISRVNAKDTVYLQMNSLKPEDTAVYYCYMDQRLDGSTLAYWGQGTQVTVSSTRQSFGLLDPKLCYLLDGILFIYGVILTALFLRVKFSRSADAPAYQQGQNQLYNELNLGRREEYDVLDKRRGRDPEMGGKPQRRKNPQEGLYNELQKDKMAEAYSEIGMKGERRRGKGHDGLYQGLSTATKDTYDALHMQALPPRRAKRSGSGVKQTLNFDLLKLAGDVESNPGPSRGHMTEYKPTVRLATRDDVPRAVRTLAAAFADYPATRHTVDPDRHIERVTELQELFLTRVGLDIGKVWVADDGAAVAVWTTPESVEAGAVFAEIGPRMAELSGSRLAAQQQMEGLLAPHRPKEPAWFLATVGVSPDHQGKGLGSAVVLPGVEAAERAGVPAFLETSAPRNLPFYERLGFTVTADVEVPEGPRTWCMTRKPGA

SEQ ID NO: 18991 - protein, 712 aa, synthetic construct
MALPVTALLLPLALLLHAARPLEELGEPQLCYILDAILFLYGIVLTLLYCRLKIQVRKAAITSYEKSDGVYTGLSTRNQETYETLKHEKPPQRAKRSGSGATNFSLLKQAGDVEENPGPTSMALPVTALLLPLALLLHAARPGMRTEDLPKAVVFLEPQWYRVLEKDSVTLKCQGAYSPEDNSTQWFHNESLISSQASSYFIDAATVDDSGEYRCQTNLSTLSDPVQLEVHIGWLLLQAPRWVFKEEDPIHLRCHSWKNTALHKVTYLQNGKGRKYFHHNSDFYIPKATLKDSGSYFCRGLVGSKNVSSETVNITITQGLAVSTISSFFPPGYQTRQSFGLLDPKLCYLLDGILFIYGVILTALFLRVKFSRSADAPAYQQGQNQLYNELNLGRREEYDVLDKRRGRDPEMGGKPQRRKNPQEGLYNELQKDKMAEAYSEIGMKGERRRGKGHDGLYQGLSTATKDTYDALHMQALPPRRAKRSGSGVKQTLNFDLLKLAGDVESNPGPSRGHMTEYKPTVRLATRDDVPRAVRTLAAAFADYPATRHTVDPDRHIERVTELQELFLTRVGLDIGKVWVADDGAAVAVWTTPESVEAGAVFAEIGPRMAELSGSRLAAQQQMEGLLAPHRPKEPAWFLATVGVSPDHQGKGLGSAVVLPGVEAAERAGVPAFLETSAPRNLPFYERLGFTVTADVEVPEGPRTWCMTRKPGA

SEQ ID NO: 18992 - protein, 340 aa, synthetic construct
MALPVTALLLPLALLLHAARPLEELGEPQLCYILDAILFLYGIVLTLLYCRLKIQVRKAAITSYEKSDGVYTGLSTRNQETYETLKHEKPPQRAKRSGSGATNFSLLKQAGDVEENPGPTSATMALPVTALLLPLALLLHAARPMDPDLEIRAAFLRQRNTALRTEVAELEQEVQRLENEVSQYETRYGPLGGGKTRQSFGLLDPKLCYLLDGILFIYGVILTALFLRVKFSRSADAPAYQQGQNQLYNELNLGRREEYDVLDKRRGRDPEMGGKPQRRKNPQEGLYNELQKDKMAEAYSEIGMKGERRRGKGHDGLYQGLSTATKDTYDALHMQALPPR

SEQ ID NO: 18993 - protein, 340 aa, synthetic construct
MALPVTALLLPLALLLHAARPLEELGEPQLCYILDAILFLYGIVLTLLYCRLKIQVRKAAITSYEKSDGVYTGLSTRNQETYETLKHEKPPQRAKRSGSGATNFSLLKQAGDVEENPGPTSATMALPVTALLLPLALLLHAARPMDPDLEIEAAFLERENTALETRVAELRQRVQRLRNRVSQYRTRYGPLGGGKTRQSFGLLDPKLCYLLDGILFIYGVILTALFLRVKFSRSADAPAYQQGQNQLYNELNLGRREEYDVLDKRRGRDPEMGGKPQRRKNPQEGLYNELQKDKMAEAYSEIGMKGERRRGKGHDGLYQGLSTATKDTYDALHMQALPPR

SEQ ID NO: 18994 - protein, 317 aa, synthetic construct
MALPVTALLLPLALLLHAARPLEELGEPQLCYILDAILFLYGIVLTLLYCRLKIQVRKAAITSYEKSDGVYTGLSTRNQETYETLKHEKPPQRAKRSGSGATNFSLLKQAGDVEENPGPTSATMALPVTALLLPLALLLHAARPEVAALEKEVAALEKEVAALEKEVAALEKTRQSFGLLDPKLCYLLDGILFIYGVILTALFLRVKFSRSADAPAYQQGQNQLYNELNLGRREEYDVLDKRRGRDPEMGGKPQRRKNPQEGLYNELQKDKMAEAYSEIGMKGERRRGKGHDGLYQGLSTATKDTYDALHMQALPPR

SEQ ID NO: 18995 - protein, 575 aa, synthetic construct
MALPVTALLLPLALLLHAARPLEELGEPQLCYILDAILFLYGIVLTLLYCRLKIQVRKAAITSYEKSDGVYTGLSTRNQETYETLKHEKPPQRAKRSGSGATNFSLLKQAGDVEENPGPTSATMALPVTALLLPLALLLHAARPLFNQEVQIPLTESYCGPCPKNWICYKNNCYQFFDESKNWYESQASCMSQNASLLKVYSKEDQDLLKLVKSAHWMGLVHIPTNGSWQWEDGSILSPNLLTIIEMQKGDCALYASSFKGYIENCSTPNTYICMQRTVSGGGGSGGGGSGGGGDLFNQEVQIPLTESYCGPCPKNWICYKNNCYQFFDESKNWYESQASCMSQNASLLKVYSKEDQDLLKLVKSAHWMGLVHIPTNGSWQWEDGSILSPNLLTIIEMQKGDCALYASSFKGYIENCSTPNTYICMQRTVTRQSFGLLDPKLCYLLDGILFIYGVILTALFLRVKFSRSADAPAYQQGQNQLYNELNLGRREEYDVLDKRRGRDPEMGGKPQRRKNPQEGLYNELQKDKMAEAYSEIGMKGERRRGKGHDGLYQGLSTATKDTYDALHMQALPPR

SEQ ID NO: 18996 - protein, 575 aa, synthetic construct
MALPVTALLLPLALLLHAARPLEELGEPQLCYILDAILFLYGIVLTLLYCRLKIQVRKAAITSYEKSDGVYTGLSTRNQETYETLKHEKPPQRAKRSGSGATNFSLLKQAGDVEENPGPTSATMALPVTALLLPLALLLHAARPLFNQEVQIPLTESYCGPCPKNWICYKNNCYQFFDESKNWYESQASCMSQNASLLKVYSKEDQDLLKLVKSAHWMGLVHIPTNGSWQWEDGSILSPNLLTIIEMQKGDCALYASSFKGFIENCSTPNTYICMQRTVGGGGSGGGGSGGGGSDLFNQEVQIPLTESYCGPCPKNWICYKNNCYQFFDESKNWYESQASCMSQNASLLKVYSKEDQDLLKLVKSAHWMGLVHIPTNGSWQWEDGSILSPNLLTIIEMQKGDCALYASSFKGFIENCSTPNTYICMQRTVTRQSFGLLDPKLCYLLDGILFIYGVILTALFLRVKFSRSADAPAYQQGQNQLYNELNLGRREEYDVLDKRRGRDPEMGGKPQRRKNPQEGLYNELQKDKMAEAYSEIGMKGERRRGKGHDGLYQGLSTATKDTYDALHMQALPPR

SEQ ID NO: 18997 - protein, 601 aa, synthetic construct
MALPVTALLLPLALLLHAARPLEELGEPQLCYILDAILFLYGIVLTLLYCRLKIQVRKAAITSYEKSDGVYTGLSTRNQETYETLKHEKPPQRAKRSGSGATNFSLLKQAGDVEENPGPTSMALPVTALLLPLALLLHAARPMDPDLEIRAAFLRQRNTALRTEVAELEQEVQRLENEVSQYETRYGPLGGGKGTGGGGSGGGGSGGGGSEFDIQMTQSPSSLSASVGDRVTITCKASDHINNWLAWYQQKPGQAPKLLIYGATTLETGVPSRFSGSGSGTDYTLTISSLQPEDFATYYCQQSWNTPWTFGQGTKLEIKRGGGGSGGGGSGGGGSQVQLQQPGAELVKPGASVKMSCKASGYAFSSYWINWMKQKPGQGLEWIGQIYPGDGDTNYNGKFKGRATLTADTSSSTAYMQLSSLTSEDSAVYFCARSITTVVGCAMDYWGQGTSVTVSSTRQSFGLLDPKLCYLLDGILFIYGVILTALFLRVKFSRSADAPAYQQGQNQLYNELNLGRREEYDVLDKRRGRDPEMGGKPQRRKNPQEGLYNELQKDKMAEAYSEIGMKGERRRGKGHDGLYQGLSTATKDTYDALHMQALPPR

SEQ ID NO: 18998 - protein, 836 aa, synthetic construct
MALPVTALLLPLALLLHAARPLEELGEPQLCYILDAILFLYGIVLTLLYCRLKIQVRKAAITSYEKSDGVYTGLSTRNQETYETLKHEKPPQRAKRSGSGATNFSLLKQAGDVEENPGPTSMALPVTALLLPLALLLHAARPLFNQEVQIPLTESYCGPCPKNWICYKNNCYQFFDESKNWYESQASCMSQNASLLKVYSKEDQDLLKLVKSAHWMGLVHIPTNGSWQWEDGSILSPNLLTIIEMQKGDCALYASSFKGFIENCSTPNTYICMQRTVGGGGSGGGGSGGGGSDLFNQEVQIPLTESYCGPCPKNWICYKNNCYQFFDESKNWYESQASCMSQNASLLKVYSKEDQDLLKLVKSAHWMGLVHIPTNGSWQWEDGSILSPNLLTIIEMQKGDCALYASSFKGFIENCSTPNTYICMQRTVGTGGGGSGGGGSGGGGSEFDIQMTQSPSSLSASVGDRVTITCKASDHINNWLAWYQQKPGQAPKLLIYGATTLETGVPSRFSGSGSGTDYTLTISSLQPEDFATYYCQQSWNTPWTFGQGTKLEIKRGGGGSGGGGSGGGGSQVQLQQPGAELVKPGASVKMSCKASGYAFSSYWINWMKQKPGQGLEWIGQIYPGDGDTNYNGKFKGRATLTADTSSSTAYMQLSSLTSEDSAVYFCARSITTVVGCAMDYWGQGTSVTVSSTRQSFGLLDPKLCYLLDGILFIYGVILTALFLRVKFSRSADAPAYQQGQNQLYNELNLGRREEYDVLDKRRGRDPEMGGKPQRRKNPQEGLYNELQKDKMAEAYSEIGMKGERRRGKGHDGLYQGLSTATKDTYDALHMQALPPR

SEQ ID NO: 18999 - protein, 541 aa, synthetic construct
MALPVTALLLPLALLLHAARPLEELGEPQLCYILDAILFLYGIVLTLLYCRLKIQVRKAAITSYEKSDGVYTGLSTRNQETYETLKHEKPPQRAKRSGSGATNFSLLKQAGDVEENPGPTSMALPVTALLLPLALLLHAARPQSVLTQPPSVSGAPGQRVTISCTGSSSNIGAGYDVHWYQQLPGTAPKLLIFGNSNRPSGVPDRFSGFKSGTSASLAITGLQAEDEADYFCQSYDSSLSGSGVFGTGTKVTVLGGGGGSGGGGSGGGGSQMQLVQSGGGLVQPGRSLRLSCAASGFTFDDYAMHWVRQAPGKGLEWVSGISWNSGSIGYADSVKGRFTISRDNAKNSLYLQMNSLRAEDTALYYCAKDIHSGSYYGLLYYAMDVWGQGTTVTVSSTRQSFGLLDPKLCYLLDGILFIYGVILTALFLRVKFSRSADAPAYQQGQNQLYNELNLGRREEYDVLDKRRGRDPEMGGKPQRRKNPQEGLYNELQKDKMAEAYSEIGMKGERRRGKGHDGLYQGLSTATKDTYDALHMQALPPR

SEQ ID NO: 19000 - protein, 378 aa, synthetic construct
MALPVTALLLPLALLLHAARPLEELGEPQLCYILDAILFLYGIVLTLLYCRLKIQVRKAAITSYEKSDGVYTGLSTRNQETYETLKHEKPPQRAKRSGSGATNFSLLKQAGDVEENPGPTSMALPVTALLLPLALLLHAARPMCMPCFTTDHQMARKCDDCCGGKGRGKCYGPQCLCRLEGGGGSGGGGSGGGGSFEVCMPCFTTDQQMARKCSDCCGGKGRGKCYGPQCLCRTRQSFGLLDPKLCYLLDGILFIYGVILTALFLRVKFSRSADAPAYQQGQNQLYNELNLGRREEYDVLDKRRGRDPEMGGKPQRRKNPQEGLYNELQKDKMAEAYSEIGMKGERRRGKGHDGLYQGLSTATKDTYDALHMQALPPR

SEQ ID NO: 19001 - protein, 641 aa, synthetic construct
MALPVTALLLPLALLLHAARPLEELGEPQLCYILDAILFLYGIVLTLLYCRLKIQVRKAAITSYEKSDGVYTGLSTRNQETYETLKHEKPPQRAKRSGSGATNFSLLKQAGDVEENPGPTSMALPVTALLLPLALLLHAARPMCMPCFTTDHQMARKCDDCCGGKGRGKCYGPQCLCRLEGGGGSGGGGSGGGGSFEVCMPCFTTDQQMARKCSDCCGGKGRGKCYGPQCLCRGTGGGGSGGGGSGGGGSEFDIQMTQSPSSLSASVGDRVTITCKASDHINNWLAWYQQKPGQAPKLLIYGATTLETGVPSRFSGSGSGTDYTLTISSLQPEDFATYYCQQSWNTPWTFGQGTKLEIKRGGGGSGGGGSGGGGSQVQLQQPGAELVKPGASVKMSCKASGYAFSSYWINWMKQKPGQGLEWIGQIYPGDGDTNYNGKFKGRATLTADTSSSTAYMQLSSLTSEDSAVYFCARSITTVVGCAMDYWGQGTSVTVSSTRQSFGLLDPKLCYLLDGILFIYGVILTALFLRVKFSRSADAPAYQQGQNQLYNELNLGRREEYDVLDKRRGRDPEMGGKPQRRKNPQEGLYNELQKDKMAEAYSEIGMKGERRRGKGHDGLYQGLSTATKDTYDALHMQALPPR

SEQ ID NO: 19002 - protein, 716 aa, synthetic construct
MALPVTALLLPLALLLHAARPLEELGEPQLCYILDAILFLYGIVLTLLYCRLKIQVRKAAITSYEKSDGVYTGLSTRNQETYETLKHEKPPQRAKRSGSGATNFSLLKQAGDVEENPGPTSMALPVTALLLPLALLLHAARPSPVAPACDPRLLNKLLRDSHLLHSRLSQCPDVDPLSIPVLLPAVDFSLGEWKTQTEQSKAQDILGAVSLLLEGVMAARGQLEPSCLSSLLGQLSGQVRLLLGALQGLLGTQLPLQGRTTAHKDPNALFLSLQQLLRGKVRFLLLVEGPTLCVRRTLPTTAVPSSTSGTGGGGSGGGGSGGGGSEFDIQMTQSPSSLSASVGDRVTITCKASDHINNWLAWYQQKPGQAPKLLIYGATTLETGVPSRFSGSGSGTDYTLTISSLQPEDFATYYCQQSWNTPWTFGQGTKLEIKRGGGGSGGGGSGGGGSQVQLQQPGAELVKPGASVKMSCKASGYAFSSYWINWMKQKPGQGLEWIGQIYPGDGDTNYNGKFKGRATLTADTSSSTAYMQLSSLTSEDSAVYFCARSITTVVGCAMDYWGQGTSVTVSSTRQSFGLLDPKLCYLLDGILFIYGVILTALFLRVKFSRSADAPAYQQGQNQLYNELNLGRREEYDVLDKRRGRDPEMGGKPQRRKNPQEGLYNELQKDKMAEAYSEIGMKGERRRGKGHDGLYQGLSTATKDTYDALHMQALPPR

SEQ ID NO: 19003 - protein, 623 aa, synthetic construct
MALPVTALLLPLALLLHAARPLEELGEPQLCYILDAILFLYGIVLTLLYCRLKIQVRKAAITSYEKSDGVYTGLSTRNQETYETLKHEKPPQRAKRSGSGATNFSLLKQAGDVEENPGPTSMALPVTALLLPLALLLHAARPMGSWEEFELRLNAIEERLYALGGSEAELAYFEYVIADFEGNLQRYKGKGNPEVEALYFEADAIFEELVAYRHNGTGGGGSGGGGSGGGGSEFDIQMTQSPSSLSASVGDRVTITCKASDHINNWLAWYQQKPGQAPKLLIYGATTLETGVPSRFSGSGSGTDYTLTISSLQPEDFATYYCQQSWNTPWTFGQGTKLEIKRGGGGSGGGGSGGGGSQVQLQQPGAELVKPGASVKMSCKASGYAFSSYWINWMKQKPGQGLEWIGQIYPGDGDTNYNGKFKGRATLTADTSSSTAYMQLSSLTSEDSAVYFCARSITTVVGCAMDYWGQGTSVTVSSTRQSFGLLDPKLCYLLDGILFIYGVILTALFLRVKFSRSADAPAYQQGQNQLYNELNLGRREEYDVLDKRRGRDPEMGGKPQRRKNPQEGLYNELQKDKMAEAYSEIGMKGERRRGKGHDGLYQGLSTATKDTYDALHMQALPPR

SEQ ID NO: 19004 - protein, 762 aa, synthetic construct
MALPVTALLLPLALLLHAARPLEQSFGLLDPKLCYLLDGILFIYGVILTALFLRVKFSRSADAPAYQQGQNQLYNELNLGRREEYDVLDKRRGRDPEMGGKPQRRKNPQEGLYNELQKDKMAEAYSEIGMKGERRRGKGHDGLYQGLSTATKDTYDALHMQALPPRRAKRSGSGATNFSLLKQAGDVEENPGPTSMALPVTALLLPLALLLHAARPDIQMTQTTSSLSASLGDRVTISCRASQDISKYLNWYQQKPDGTVKLLIYHTSRLHSGVPSRFSGSGSGTDYSLTISNLEQEDIATYFCQQGNTLPYTFGGGTKLEITGGGGSGGGGSGGGGSEVKLQESGPGLVAPSQSLSVTCTVSGVSLPDYGVSWIRQPPRKGLEWLGVIWGSETTYYNSALKSRLTIIKDNSKSQVFLKMNSLQTDDTAIYYCAKHYYYGGSYAMDYWGQGTSVTVSSTRELGEPQLCYILDAILFLYGIVLTLLYCRLKIQVRKAAITSYEKSDGVYTGLSTRNQETYETLKHEKPPQRAKRSGSGVKQTLNFDLLKLAGDVESNPGPSRGHMTEYKPTVRLATRDDVPRAVRTLAAAFADYPATRHTVDPDRHIERVTELQELFLTRVGLDIGKVWVADDGAAVAVWTTPESVEAGAVFAEIGPRMAELSGSRLAAQQQMEGLLAPHRPKEPAWFLATVGVSPDHQGKGLGSAVVLPGVEAAERAGVPAFLETSAPRNLPFYERLGFTVTADVEVPEGPRTWCMTRKPGA

SEQ ID NO: 19005 - protein, 763 aa, synthetic construct
MALPVTALLLPLALLLHAARPLEQSFGLLDPKLCYLLDGILFIYGVILTALFLRVKFSRSADAPAYQQGQNQLYNELNLGRREEYDVLDKRRGRDPEMGGKPQRRKNPQEGLYNELQKDKMAEAYSEIGMKGERRRGKGHDGLYQGLSTATKDTYDALHMQALPPRRAKRSGSGATNFSLLKQAGDVEENPGPTSTMALPVTALLLPLALLLHAARPEIVMTQSPATLSLSPGERATLSCRASQDISKYLNWYQQKPGQAPRLLIYHTSRLHSGIPARFSGSGSGTDYTLTISSLQPEDFAVYFCQQGNTLPYTFGQGTKLEIKGGGGSGGGGSGGGGSQVQLQESGPGLVKPSETLSLTCTVSGVSLPDYGVSWIRQPPGKGLEWIGVIWGSETTYYNSSLKSRVTISKDNSKNQVSLKLSSVTAADTAVYYCAKHYYYGGSYAMDYWGQGTLVTVSSTRELGEPQLCYILDAILFLYGIVLTLLYCRLKIQVRKAAITSYEKSDGVYTGLSTRNQETYETLKHEKPPQRAKRSGSGVKQTLNFDLLKLAGDVESNPGPSRGHMTEYKPTVRLATRDDVPRAVRTLAAAFADYPATRHTVDPDRHIERVTELQELFLTRVGLDIGKVWVADDGAAVAVWTTPESVEAGAVFAEIGPRMAELSGSRLAAQQQMEGLLAPHRPKEPAWFLATVGVSPDHQGKGLGSAVVLPGVEAAERAGVPAFLETSAPRNLPFYERLGFTVTADVEVPEGPRTWCMTRKPGA

SEQ ID NO: 19006 - protein, 764 aa, synthetic construct
MALPVTALLLPLALLLHAARPLEQSFGLLDPKLCYLLDGILFIYGVILTALFLRVKFSRSADAPAYQQGQNQLYNELNLGRREEYDVLDKRRGRDPEMGGKPQRRKNPQEGLYNELQKDKMAEAYSEIGMKGERRRGKGHDGLYQGLSTATKDTYDALHMQALPPRRAKRSGSGATNFSLLKQAGDVEENPGPTSTMALPVTALLLPLALLLHAARPDEIVLTQSPATLSLSPGERATLSCSASSSVSYMHWYQQKPGQAPRLLIYDTSKLASGIPARFSGSGSGTDFTLTISSLEPEDVAVYYCFQGSVYPFTFGQGTKLEIKRGGGGSGGGGSGGGGSQVQLQESGPGLVKPSQTLSLTCTVSGGSISTSGMGVGWIRQHPGKGLEWIGHIWWDDDKRYNPALKSRVTISVDTSKNQFSLKLSSVTAADTAVYYCARMELWSYYFDYWGQGTLVTVSSTRELGEPQLCYILDAILFLYGIVLTLLYCRLKIQVRKAAITSYEKSDGVYTGLSTRNQETYETLKHEKPPQRAKRSGSGVKQTLNFDLLKLAGDVESNPGPSRGHMTEYKPTVRLATRDDVPRAVRTLAAAFADYPATRHTVDPDRHIERVTELQELFLTRVGLDIGKVWVADDGAAVAVWTTPESVEAGAVFAEIGPRMAELSGSRLAAQQQMEGLLAPHRPKEPAWFLATVGVSPDHQGKGLGSAVVLPGVEAAERAGVPAFLETSAPRNLPFYERLGFTVTADVEVPEGPRTWCMTRKPGA

SEQ ID NO: 19007 - protein, 760 aa, synthetic construct
MALPVTALLLPLALLLHAARPLEQSFGLLDPKLCYLLDGILFIYGVILTALFLRVKFSRSADAPAYQQGQNQLYNELNLGRREEYDVLDKRRGRDPEMGGKPQRRKNPQEGLYNELQKDKMAEAYSEIGMKGERRRGKGHDGLYQGLSTATKDTYDALHMQALPPRRAKRSGSGATNFSLLKQAGDVEENPGPTSMALPVTALLLPLALLLHAARPDIQMTQSPSSLSASVGDRVTITCRASQDISNYLNWYQQKPGKAPKLLIYYTSRLHSGVPSRFSGSGSGTDFTLTISSLQPEDFATYYCQQGNTLPYTFGQGTKVEIKRGGGGSGGGGSGGGGSEVQLVESGGGLVQPGGSLRLSCAASGFTFSDYFMSWVRQAPGKGLEWVATISNGGTYTYYPDSVKGRFTISRDNSKNTLYLQMNSLRAEDTAVYYCARFDGYIFDYWGQGTLVTVSSTRELGEPQLCYILDAILFLYGIVLTLLYCRLKIQVRKAAITSYEKSDGVYTGLSTRNQETYETLKHEKPPQRAKRSGSGVKQTLNFDLLKLAGDVESNPGPSRGHMTEYKPTVRLATRDDVPRAVRTLAAAFADYPATRHTVDPDRHIERVTELQELFLTRVGLDIGKVWVADDGAAVAVWTTPESVEAGAVFAEIGPRMAELSGSRLAAQQQMEGLLAPHRPKEPAWFLATVGVSPDHQGKGLGSAVVLPGVEAAERAGVPAFLETSAPRNLPFYERLGFTVTADVEVPEGPRTWCMTRKPGA

SEQ ID NO: 19008 - protein, 764 aa, synthetic construct
MALPVTALLLPLALLLHAARPLEQSFGLLDPKLCYLLDGILFIYGVILTALFLRVKFSRSADAPAYQQGQNQLYNELNLGRREEYDVLDKRRGRDPEMGGKPQRRKNPQEGLYNELQKDKMAEAYSEIGMKGERRRGKGHDGLYQGLSTATKDTYDALHMQALPPRRAKRSGSGATNFSLLKQAGDVEENPGPTSMALPVTALLLPLALLLHAARPDIQMTQSPSSLSASVGDRVTITCKASDHINNWLAWYQQKPGQAPKLLIYGATTLETGVPSRFSGSGSGTDYTLTISSLQPEDFATYYCQQSWNTPWTFGQGTKLEIKRGGGGSGGGGSGGGGSQVQLQQPGAELVKPGASVKMSCKASGYAFSSYWINWMKQKPGQGLEWIGQIYPGDGDTNYNGKFKGRATLTADTSSSTAYMQLSSLTSEDSAVYFCARSITTVVGCAMDYWGQGTSVTVSSTRELGEPQLCYILDAILFLYGIVLTLLYCRLKIQVRKAAITSYEKSDGVYTGLSTRNQETYETLKHEKPPQRAKRSGSGVKQTLNFDLLKLAGDVESNPGPSRGHMTEYKPTVRLATRDDVPRAVRTLAAAFADYPATRHTVDPDRHIERVTELQELFLTRVGLDIGKVWVADDGAAVAVWTTPESVEAGAVFAEIGPRMAELSGSRLAAQQQMEGLLAPHRPKEPAWFLATVGVSPDHQGKGLGSAVVLPGVEAAERAGVPAFLETSAPRNLPFYERLGFTVTADVEVPEGPRTWCMTRKPGA

SEQ ID NO: 19009 - protein, 766 aa, synthetic construct
MALPVTALLLPLALLLHAARPLEQSFGLLDPKLCYLLDGILFIYGVILTALFLRVKFSRSADAPAYQQGQNQLYNELNLGRREEYDVLDKRRGRDPEMGGKPQRRKNPQEGLYNELQKDKMAEAYSEIGMKGERRRGKGHDGLYQGLSTATKDTYDALHMQALPPRRAKRSGSGATNFSLLKQAGDVEENPGPTSMALPVTALLLPLALLLHAARPQIVLSQSPAILSASPGEKVTMTCRASSSVSYMHWYQQKPGSSPKPWIYATSNLASGVPARFSGSGSGTSYSFTISRVEAEDAATYYCQQWTFNPPTFGGGTRLEIKRTVAAGGGGSGGGGSGGGGSQAYLQQSGAELVRPGASVKMSCKASGYTFTSYNMHWVKQTPRQGLEWIGGIYPGNGDTSYNQKFKGKATLTVGKSSSTAYMQLSSLTSEDSAVYFCARYDYNYAMDYWGQGTSVTVSSASTRELGEPQLCYILDAILFLYGIVLTLLYCRLKIQVRKAAITSYEKSDGVYTGLSTRNQETYETLKHEKPPQRAKRSGSGVKQTLNFDLLKLAGDVESNPGPSRGHMTEYKPTVRLATRDDVPRAVRTLAAAFADYPATRHTVDPDRHIERVTELQELFLTRVGLDIGKVWVADDGAAVAVWTTPESVEAGAVFAEIGPRMAELSGSRLAAQQQMEGLLAPHRPKEPAWFLATVGVSPDHQGKGLGSAVVLPGVEAAERAGVPAFLETSAPRNLPFYERLGFTVTADVEVPEGPRTWCMTRKPGA

SEQ ID NO: 19010 - protein, 764 aa, synthetic construct
MALPVTALLLPLALLLHAARPLEQSFGLLDPKLCYLLDGILFIYGVILTALFLRVKFSRSADAPAYQQGQNQLYNELNLGRREEYDVLDKRRGRDPEMGGKPQRRKNPQEGLYNELQKDKMAEAYSEIGMKGERRRGKGHDGLYQGLSTATKDTYDALHMQALPPRRAKRSGSGATNFSLLKQAGDVEENPGPTSMALPVTALLLPLALLLHAARPEIVLTQSPATLSLSPGERATLSCRASQSVSSYLAWYQQKPGQAPRLLIYDASNRATGIPARFSGSGSGTDFTLTISSLEPEDFAVYYCQQRSNWPITFGQGTRLEIKGGGGSGGGGSGGGGSEVQLVESGGGLVQPDRSLRLSCAASGFTFHDYAMHWVRQAPGKGLEWVSTISWNSGTIGYADSVKGRFTISRDNAKNSLYLQMNSLRAEDTALYYCAKDIQYGNYYYGMDVWGQGTTVTVSSTRELGEPQLCYILDAILFLYGIVLTLLYCRLKIQVRKAAITSYEKSDGVYTGLSTRNQETYETLKHEKPPQRAKRSGSGVKQTLNFDLLKLAGDVESNPGPSRGHMTEYKPTVRLATRDDVPRAVRTLAAAFADYPATRHTVDPDRHIERVTELQELFLTRVGLDIGKVWVADDGAAVAVWTTPESVEAGAVFAEIGPRMAELSGSRLAAQQQMEGLLAPHRPKEPAWFLATVGVSPDHQGKGLGSAVVLPGVEAAERAGVPAFLETSAPRNLPFYERLGFTVTADVEVPEGPRTWCMTRKPGA

SEQ ID NO: 19011 - protein, 762 aa, synthetic construct
MALPVTALLLPLALLLHAARPLEQSFGLLDPKLCYLLDGILFIYGVILTALFLRVKFSRSADAPAYQQGQNQLYNELNLGRREEYDVLDKRRGRDPEMGGKPQRRKNPQEGLYNELQKDKMAEAYSEIGMKGERRRGKGHDGLYQGLSTATKDTYDALHMQALPPRRAKRSGSGATNFSLLKQAGDVEENPGPTSMALPVTALLLPLALLLHAARPDIQMTQSPSSLSASVGDRVTITCRASQDVNTAVAWYQQKPGKAPKLLIYSASFLESGVPSRFSGSRSGTDFTLTISSLQPEDFATYYCQQHYTTPPTFGQTKVEIKRGGGGSGGGGSGGGGSEVQLVESGGGLVQPGGSLRLSCAASGFNIKDTYIHWVRQAPGKGLEWVARIYPTNGYTRYADSVKGRFTISADTSKNTAYLQMNSLRAEDTAVYYCSRWGGDGFYAMDVWGQGTLVTVSSTRELGEPQLCYILDAILFLYGIVLTLLYCRLKIQVRKAAITSYEKSDGVYTGLSTRNQETYETLKHEKPPQRAKRSGSGVKQTLNFDLLKLAGDVESNPGPSRGHMTEYKPTVRLATRDDVPRAVRTLAAAFADYPATRHTVDPDRHIERVTELQELFLTRVGLDIGKVWVADDGAAVAVWTTPESVEAGAVFAEIGPRMAELSGSRLAAQQQMEGLLAPHRPKEPAWFLATVGVSPDHQGKGLGSAVVLPGVEAAERAGVPAFLETSAPRNLPFYERLGFTVTADVEVPEGPRTWCMTRKPGA

SEQ ID NO: 19012 - protein, 641 aa, synthetic construct
MALPVTALLLPLALLLHAARPLEQSFGLLDPKLCYLLDGILFIYGVILTALFLRVKFSRSADAPAYQQGQNQLYNELNLGRREEYDVLDKRRGRDPEMGGKPQRRKNPQEGLYNELQKDKMAEAYSEIGMKGERRRGKGHDGLYQGLSTATKDTYDALHMQALPPRRAKRSGSGATNFSLLKQAGDVEENPGPTSMALPVTALLLPLALLLHAARPDEFEVQLVESGGGLVQAGGSLRLSCAASGITFSINTMGWYRQAPGKQRELVALISSIGDTYYADSVKGRFTISRDNAKNTVYLQMNSLKPEDTAVYYCKRFRTAAQGTDYWGQGTQVTVSSTRELGEPQLCYILDAILFLYGIVLTLLYCRLKIQVRKAAITSYEKSDGVYTGLSTRNQETYETLKHEKPPQRAKRSGSGVKQTLNFDLLKLAGDVESNPGPSRGHMTEYKPTVRLATRDDVPRAVRTLAAAFADYPATRHTVDPDRHIERVTELQELFLTRVGLDIGKVWVADDGAAVAVWTTPESVEAGAVFAEIGPRMAELSGSRLAAQQQMEGLLAPHRPKEPAWFLATVGVSPDHQGKGLGSAVVLPGVEAAERAGVPAFLETSAPRNLPFYERLGFTVTADVEVPEGPRTWCMTRKPGA

SEQ ID NO: 19013 - protein, 641 aa, synthetic construct; identical to SEQ ID NO: 19012

SEQ ID NO: 19014 - protein, 906 aa, synthetic construct
MALPVTALLLPLALLLHAARPLEQSFGLLDPKLCYLLDGILFIYGVILTALFLRVKFSRSADAPAYQQGQNQLYNELNLGRREEYDVLDKRRGRDPEMGGKPQRRKNPQEGLYNELQKDKMAEAYSEIGMKGERRRGKGHDGLYQGLSTATKDTYDALHMQALPPRRAKRSGSGATNFSLLKQAGDVEENPGPTSMALPVTALLLPLALLLHAARPQVQLVESGGGLVQAGDSVTLSCTASGRTFSSYALAWFRQRPGKEREFVAGLRWGGPTNYADSVKDRFTISGDSAKHTMYLQMNSLKPEDTAVYYCGYNPGGWAVPSQYEYDSWGQGTQVTVSSGTGGGGSGGGGSGGGGSEFDIQMTQSPSSLSASVGDRVTITCKASDHINNWLAWYQQKPGQAPKLLIYGATTLETGVPSRFSGSGSGTDYTLTISSLQPEDFATYYCQQSWNTPWTFGQGTKLEIKRGGGGSGGGGSGGGGSQVQLQQPGAELVKPGASVKMSCKASGYAFSSYWINWMKQKPGQGLEWIGQIYPGDGDTNYNGKFKGRATLTADTSSSTAYMQLSSLTSEDSAVYFCARSITTVVGCAMDYWGQGTSVTVSSTRELGEPQLCYILDAILFLYGIVLTLLYCRLKIQVRKAAITSYEKSDGVYTGLSTRNQETYETLKHEKPPQRAKRSGSGVKQTLNFDLLKLAGDVESNPGPSRGHMTEYKPTVRLATRDDVPRAVRTLAAAFADYPATRHTVDPDRHIERVTELQELFLTRVGLDIGKVWVADDGAAVAVWTTPESVEAGAVFAEIGPRMAELSGSRLAAQQQMEGLLAPHRPKEPAWFLATVGVSPDHQGKGLGSAVVLPGVEAAERAGVPAFLETSAPRNLPFYERLGFTVTADVEVPEGPRTWCMTRKPGA

SEQ ID NO: 19015 - protein, 1035 aa, synthetic construct
MALPVTALLLPLALLLHAARPLEQSFGLLDPKLCYLLDGILFIYGVILTALFLRVKFSRSADAPAYQQGQNQLYNELNLGRREEYDVLDKRRGRDPEMGGKPQRRKNPQEGLYNELQKDKMAEAYSEIGMKGERRRGKGHDGLYQGLSTATKDTYDALHMQALPPRRAKRSGSGATNFSLLKQAGDVEENPGPTSMALPVTALLLPLALLLHAARPEVQLLESGGGLVQPGGSLRLSCAASGFTFSSYAMSWVRQAPGKGLEWVSSISGSGDYIYYADSVKGRFTISRDISKNTLYLQMNSLRAEDTAVYYCAKEGTGANSSLADYRGQGTLVTVSSGGGSGGGSQVQLVESGGGLVQAGDSVTLSCTASGRTFSSYALAWFRQRPGKEREFVAGLRWGGPTNYADSVKDRFTISGDSAKHTMYLQMNSLKPEDTAVYYCGYNPGGWAVPSQYEYDSWGQGTQVTVSSGTGGGGSGGGGSGGGGSEFDIQMTQSPSSLSASVGDRVTITCKASDHINNWLAWYQQKPGQAPKLLIYGATTLETGVPSRFSGSGSGTDYTLTISSLQPEDFATYYCQQSWNTPWTFGQGTKLEIKRGGGGSGGGGSGGGGSQVQLQQPGAELVKPGASVKMSCKASGYAFSSYWINWMKQKPGQGLEWIGQIYPGDGDTNYNGKFKGRATLTADTSSSTAYMQLSSLTSEDSAVYFCARSITTVVGCAMDYWGQGTSVTVSSTRELGEPQLCYILDAILFLYGIVLTLLYCRLKIQVRKAAITSYEKSDGVYTGLSTRNQETYETLKHEKPPQRAKRSGSGVKQTLNFDLLKLAGDVESNPGPSRGHMTEYKPTVRLATRDDVPRAVRTLAAAFADYPATRHTVDPDRHIERVTELQELFLTRVGLDIGKVWVADDGAAVAVWTTPESVEAGAVFAEIGPRMAELSGSRLAAQQQMEGLLAPHRPKEPAWFLATVGVSPDHQGKGLGSAVVLPGVEAAERAGVPAFLETSAPRNLPFYERLGFTVTADVEVPEGPRTWCMTRKPGA

SEQ ID NO: 19016 - protein, 1033 aa, synthetic construct
MALPVTALLLPLALLLHAARPLEQSFGLLDPKLCYLLDGILFIYGVILTALFLRVKFSRSADAPAYQQGQNQLYNELNLGRREEYDVLDKRRGRDPEMGGKPQRRKNPQEGLYNELQKDKMAEAYSEIGMKGERRRGKGHDGLYQGLSTATKDTYDALHMQALPPRRAKRSGSGATNFSLLKQAGDVEENPGPTSMALPVTALLLPLALLLHAARPGVTQSPTHLIKTRGQQATLRCSPISGHTSVYWYQQALGLGLQFLLWYDEGEERNRGNFPPRFSGRQFPNYSSELNVNALELEDSALYLCASSLGGPRGLAGLRGDEQFFGPGTRLTVLEGGGSGGGSQVQLVESGGGLVQAGDSVTLSCTASGRTFSSYALAWFRQRPGKEREFVAGLRWGGPTNYADSVKDRFTISGDSAKHTMYLQMNSLKPEDTAVYYCGYNPGGWAVPSQYEYDSWGQGTQVTVSSGTGGGGSGGGGSGGGGSEFDIQMTQSPSSLSASVGDRVTITCKASDHINNWLAWYQQKPGQAPKLLIYGATTLETGVPSRFSGSGSGTDYTLTISSLQPEDFATYYCQQSWNTPWTFGQGTKLEIKRGGGGSGGGGSGGGGSQVQLQQPGAELVKPGASVKMSCKASGYAFSSYWINWMKQKPGQGLEWIGQIYPGDGDTNYNGKFKGRATLTADTSSSTAYMQLSSLTSEDSAVYFCARSITTVVGCAMDYWGQGTSVTVSSTRELGEPQLCYILDAILFLYGIVLTLLYCRLKIQVRKAAITSYEKSDGVYTGLSTRNQETYETLKHEKPPQRAKRSGSGVKQTLNFDLLKLAGDVESNPGPSRGHMTEYKPTVRLATRDDVPRAVRTLAAAFADYPATRHTVDPDRHIERVTELQELFLTRVGLDIGKVWVADDGAAVAVWTTPESVEAGAVFAEIGPRMAELSGSRLAAQQQMEGLLAPHRPKEPAWFLATVGVSPDHQGKGLGSAVVLPGVEAAERAGVPAFLETSAPRNLPFYERLGFTVTADVEVPEGPRTWCMTRKPGA

SEQ ID NO: 19017 - protein, 794 aa, synthetic construct
MALPVTALLLPLALLLHAARPLEQSFGLLDPKLCYLLDGILFIYGVILTALFLRVKFSRSADAPAYQQGQNQLYNELNLGRREEYDVLDKRRGRDPEMGGKPQRRKNPQEGLYNELQKDKMAEAYSEIGMKGERRRGKGHDGLYQGLSTATKDTYDALHMQALPPRRAKRSGSGATNFSLLKQAGDVEENPGPTSMALPVTALLLPLALLLHAARPGVTQSPTHLIKTRGQQATLRCSPISGHTSVYWYQQALGLGLQFLLWYDEGEERNRGNFPPRFSGRQFPNYSSELNVNALELEDSALYLCASSLGGPRGLAGLRGDEQFFGPGTRLTVLEGGGSGGGSGVTQSPTHLIKTRGQQATLRCSPISGHTSVYWYQQALGLGLQFLLWYDEGEERNRGNFPPRFSGRQFPNYSSELNVNALELEDSALYLCASSLGGDELGADGNEQFFGPGTRLTVLEGTGGGGSGGGGSGGGGSEFDIQMTQSPSSLSASVGDRVTITCKASDHINNWLAWYQQKPGQAPKLLIYGATTLETGVPSRFSGSGSGTDYTLTISSLQPEDFATYYCQQSWNTPWTFGQGTKLEIKRGGGGSGGGGSGGGGSQVQLQQPGAELVKPGASVKMSCKASGYAFSSYWINWMKQKPGQGLEWIGQIYPGDGDTNYNGKFKGRATLTADTSSSTAYMQLSSLTSEDSAVYFCARSITTVVGCAMDYWGQGTSVTVSSTRELGEPQLCYILDAILFLYGIVLTLLYCRLKIQVRKAAITSYEKSDGVYTGLSTRNQETYETLKHEKPPQ

SEQ ID NO: 19018 - protein, 647 aa, synthetic construct
MALPVTALLLPLALLLHAARPLEQSFGLLDPKLCYLLDGILFIYGVILTALFLRVKFSRSADAPAYQQGQNQLYNELNLGRREEYDVLDKRRGRDPEMGGKPQRRKNPQEGLYNELQKDKMAEAYSEIGMKGERRRGKGHDGLYQGLSTATKDTYDALHMQALPPRRAKRSGSGATNFSLLKQAGDVEENPGPTSMALPVTALLLPLALLLHAARPDEFGSDLGIKLLFAAAKGQDDEVRILLAAGADVNAKDFEGYTPLHVAAYDGHLEIVEVLLKAGADVNAKDSQGRTPLHEAAYSGHLEIVEVLLKAGADVNAQDDAGETPADLAAAWGHEDIAEVLQKTRELGEPQLCYILDAILFLYGIVLTLLYCRLKIQVRKAAITSYEKSDGVYTGLSTRNQETYETLKHEKPPQRAKRSGSGVKQTLNFDLLKLAGDVESNPGPSRGHMTEYKPTVRLATRDDVPRAVRTLAAAFADYPATRHTVDPDRHIERVTELQELFLTRVGLDIGKVWVADDGAAVAVWTTPESVEAGAVFAEIGPRMAELSGSRLAAQQQMEGLLAPHRPKEPAWFLATVGVSPDHQGKGLGSAVVLPGVEAAERAGVPAFLETSAPRNLPFYERLGFTVTADVEVPEGPRTWCMTRKPGA

SEQ ID NO: 19019 - protein, 576 aa, synthetic construct
MALPVTALLLPLALLLHAARPLEQSFGLLDPKLCYLLDGILFIYGVILTALFLRVKFSRSADAPAYQQGQNQLYNELNLGRREEYDVLDKRRGRDPEMGGKPQRRKNPQEGLYNELQKDKMAEAYSEIGMKGERRRGKGHDGLYQGLSTATKDTYDALHMQALPPRRAKRSGSGATNFSLLKQAGDVEENPGPTSMDWIWRILFLVGAATGAHSFEGSGFEYAKEMRNAYWEIALLPNLTNQQKRAPIRKLYDDPSQSSELLSEAKKLNDSQTRELGEPQLCYILDAILFLYGIVLTLLYCRLKIQVRKAAITSYEKSDGVYTGLSTRNQETYETLKHEKPPQRAKRSGSGVKQTLNFDLLKLAGDVESNPGPSRGHMTEYKPTVRLATRDDVPRAVRTLAAAFADYPATRHTVDPDRHIERVTELQELFLTRVGLDIGKVWVADDGAAVAVWTTPESVEAGAVFAEIGPRMAELSGSRLAAQQQMEGLLAPHRPKEPAWFLATVGVSPDHQGKGLGSAVVLPGVEAAERAGVPAFLETSAPRNLPFYERLGFTVTADVEVPEGPRTWCMTRKPGA

SEQ ID NO: 19020 - protein, 798 aa, synthetic construct
MALPVTALLLPLALLLHAARPLEQSFGLLDPKLCYLLDGILFIYGVILTALFLRVKFSRSADAPAYQQGQNQLYNELNLGRREEYDVLDKRRGRDPEMGGKPQRRKNPQEGLYNELQKDKMAEAYSEIGMKGERRRGKGHDGLYQGLSTATKDTYDALHMQALPPRRAKRSGSGATNFSLLKQAGDVEENPGPTSMALPVTALLLPLALLLHAARPDEFEVQLVESGGGLVQAGGSLRLSCAASGITFSINTMGWYRQAPGKQRELVALISSIGDTYYADSVKGRFTISRDNAKNTVYLQMNSLKPEDTAVYYCKRFRTAAQGTDYWGQGTQVTVSSLEGGGGSGGGGSGGGGSGSGGSGSGGSGSGGSGSGGSFEVQLVESGGGLVQPGGSLRLSCAASGSIFGFNDMAWYRQAPGKQRELVALISRVGVTSSADSVKGRFTISRVNAKDTVYLQMNSLKPEDTAVYYCYMDQRLDGSTLAYWGQGTQVTVSSTRELGEPQLCYILDAILFLYGIVLTLLYCRLKIQVRKAAITSYEKSDGVYTGLSTRNQETYETLKHEKPPQRAKRSGSGVKQTLNFDLLKLAGDVESNPGPSRGHMTEYKPTVRLATRDDVPRAVRTLAAAFADYPATRHTVDPDRHIERVTELQELFLTRVGLDIGKVWVADDGAAVAVWTTPESVEAGAVFAEIGPRMAELSGSRLAAQQQMEGLLAPHRPKEPAWFLATVGVSPDHQGKGLGSAVVLPGVEAAERAGVPAFLETSAPRNLPFYERLGFTVTADVEVPEGPRTWCMTRKPGA

SEQ ID NO: 19021 - protein, 712 aa, synthetic construct
MALPVTALLLPLALLLHAARPLEQSFGLLDPKLCYLLDGILFIYGVILTALFLRVKFSRSADAPAYQQGQNQLYNELNLGRREEYDVLDKRRGRDPEMGGKPQRRKNPQEGLYNELQKDKMAEAYSEIGMKGERRRGKGHDGLYQGLSTATKDTYDALHMQALPPRRAKRSGSGATNFSLLKQAGDVEENPGPTSMALPVTALLLPLALLLHAARPGMRTEDLPKAVVFLEPQWYRVLEKDSVTLKCQGAYSPEDNSTQWFHNESLISSQASSYFIDAATVDDSGEYRCQTNLSTLSDPVQLEVHIGWLLLQAPRWVFKEEDPIHLRCHSWKNTALHKVTYLQNGKGRKYFHHNSDFYIPKATLKDSGSYFCRGLVGSKNVSSETVNITITQGLAVSTISSFFPPGYQTRELGEPQLCYILDAILFLYGIVLTLLYCRLKIQVRKAAITSYEKSDGVYTGLSTRNQETYETLKHEKPPQRAKRSGSGVKQTLNFDLLKLAGDVESNPGPSRGHMTEYKPTVRLATRDDVPRAVRTLAAAFADYPATRHTVDPDRHIERVTELQELFLTRVGLDIGKVWVADDGAAVAVWTTPESVEAGAVFAEIGPRMAELSGSRLAAQQQMEGLLAPHRPKEPAWFLATVGVSPDHQGKGLGSAVVLPGVEAAERAGVPAFLETSAPRNLPFYERLGFTVTADVEVPEGPRTWCMTRKPGA

SEQ ID NO: 19022 - protein, 340 aa, synthetic construct
MALPVTALLLPLALLLHAARPLEQSFGLLDPKLCYLLDGILFIYGVILTALFLRVKFSRSADAPAYQQGQNQLYNELNLGRREEYDVLDKRRGRDPEMGGKPQRRKNPQEGLYNELQKDKMAEAYSEIGMKGERRRGKGHDGLYQGLSTATKDTYDALHMQALPPRRAKRSGSGATNFSLLKQAGDVEENPGPTSATMALPVTALLLPLALLLHAARPMDPDLEIRAAFLRQRNTALRTEVAELEQEVQRLENEVSQYETRYGPLGGGKTRELGEPQLCYILDAILFLYGIVLTLLYCRLKIQVRKAAITSYEKSDGVYTGLSTRNQETYETLKHEKPPQ

SEQ ID NO: 19023 - protein, 340 aa, synthetic construct
MALPVTALLLPLALLLHAARPLEQSFGLLDPKLCYLLDGILFIYGVILTALFLRVKFSRSADAPAYQQGQNQLYNELNLGRREEYDVLDKRRGRDPEMGGKPQRRKNPQEGLYNELQKDKMAEAYSEIGMKGERRRGKGHDGLYQGLSTATKDTYDALHMQALPPRRAKRSGSGATNFSLLKQAGDVEENPGPTSATMALPVTALLLPLALLLHAARPMDPDLEIEAAFLERENTALETRVAELRQRVQRLRNRVSQYRTRYGPLGGGKTRELGEPQLCYILDAILFLYGIVLTLLYCRLKIQVRKAAITSYEKSDGVYTGLSTRNQETYETLKHEKPPQ

SEQ ID NO: 19024 - protein, 575 aa, synthetic construct
MALPVTALLLPLALLLHAARPLEQSFGLLDPKLCYLLDGILFIYGVILTALFLRVKFSRSADAPAYQQGQNQLYNELNLGRREEYDVLDKRRGRDPEMGGKPQRRKNPQEGLYNELQKDKMAEAYSEIGMKGERRRGKGHDGLYQGLSTATKDTYDALHMQALPPRRAKRSGSGATNFSLLKQAGDVEENPGPTSATMALPVTALLLPLALLLHAARPLFNQEVQIPLTESYCGPCPKNWICYKNNCYQFFDESKNWYESQASCMSQNASLLKVYSKEDQDLLKLVKSAHWMGLVHIPTNGSWQWEDGSILSPNLLTIIEMQKGDCALYASSFKGYIENCSTPNTYICMQRTVSGGGGSGGGGSGGGGDLFNQEVQIPLTESYCGPCPKNWICYKNNCYQFFDESKNWYESQASCMSQNASLLKVYSKEDQDLLKLVKSAHWMGLVHIPTNGSWQWEDGSILSPNLLTIIEMQKGDCALYASSFKGYIENCSTPNTYICMQRTVTRELGEPQLCYILDAILFLYGIVLTLLYCRLKIQVRKAAITSYEKSDGVYTGLSTRNQETYETLKHEKPPQ

SEQ ID NO: 19025 - protein, 575 aa, synthetic construct
MALPVTALLLPLALLLHAARPLEQSFGLLDPKLCYLLDGILFIYGVILTALFLRVKFSRSADAPAYQQGQNQLYNELNLGRREEYDVLDKRRGRDPEMGGKPQRRKNPQEGLYNELQKDKMAEAYSEIGMKGERRRGKGHDGLYQGLSTATKDTYDALHMQALPPRRAKRSGSGATNFSLLKQAGDVEENPGPTSATMALPVTALLLPLALLLHAARPLFNQEVQIPLTESYCGPCPKNWICYKNNCYQFFDESKNWYESQASCMSQNASLLKVYSKEDQDLLKLVKSAHWMGLVHIPTNGSWQWEDGSILSPNLLTIIEMQKGDCALYASSFKGFIENCSTPNTYICMQRTVGGGGSGGGGSGGGGSDLFNQEVQIPLTESYCGPCPKNWICYKNNCYQFFDESKNWYESQASCMSQNASLLKVYSKEDQDLLKLVKSAHWMGLVHIPTNGSWQWEDGSILSPNLLTIIEMQKGDCALYASSFKGFIENCSTPNTYICMQRTVTRELGEPQLCYILDAILFLYGIVLTLLYCRLKIQVRKAAITSYEKSDGVYTGLSTRNQETYETLKHEKPPQ

SEQ ID NO: 19026 - protein, 601 aa, synthetic construct
MALPVTALLLPLALLLHAARPLEQSFGLLDPKLCYLLDGILFIYGVILTALFLRVKFSRSADAPAYQQGQNQLYNELNLGRREEYDVLDKRRGRDPEMGGKPQRRKNPQEGLYNELQKDKMAEAYSEIGMKGERRRGKGHDGLYQGLSTATKDTYDALHMQALPPRRAKRSGSGATNFSLLKQAGDVEENPGPTSMALPVTALLLPLALLLHAARPMDPDLEIRAAFLRQRNTALRTEVAELEQEVQRLENEVSQYETRYGPLGGGKGTGGGGSGGGGSGGGGSEFDIQMTQSPSSLSASVGDRVTITCKASDHINNWLAWYQQKPGQAPKLLIYGATTLETGVPSRFSGSGSGTDYTLTISSLQPEDFATYYCQQSWNTPWTFGQGTKLEIKRGGGGSGGGGSGGGGSQVQLQQPGAELVKPGASVKMSCKASGYAFSSYWINWMKQKPGQGLEWIGQIYPGDGDTNYNGKFKGRATLTADTSSSTAYMQLSSLTSEDSAVYFCARSITTVVGCAMDYWGQGTSVTVSSTRELGEPQLCYILDAILFLYGIVLTLLYCRLKIQVRKAAITSYEKSDGVYTGLSTRNQETYETLKHEKPPQ

SEQ ID NO: 19027 - protein, 836 aa, synthetic construct
MALPVTALLLPLALLLHAARPLEQSFGLLDPKLCYLLDGILFIYGVILTALFLRVKFSRSADAPAYQQGQNQLYNELNLGRREEYDVLDKRRGRDPEMGGKPQRRKNPQEGLYNELQKDKMAEAYSEIGMKGERRRGKGHDGLYQGLSTATKDTYDALHMQALPPRRAKRSGSGATNFSLLKQAGDVEENPGPTSMALPVTALLLPLALLLHAARPLFNQEVQIPLTESYCGPCPKNWICYKNNCYQFFDESKNWYESQASCMSQNASLLKVYSKEDQDLLKLVKSAHWMGLVHIPTNGSWQWEDGSILSPNLLTIIEMQKGDCALYASSFKGFIENCSTPNTYICMQRTVGGGGSGGGGSGGGGSDLFNQEVQIPLTESYCGPCPKNWICYKNNCYQFFDESKNWYESQASCMSQNASLLKVYSKEDQDLLKLVKSAHWMGLVHIPTNGSWQWEDGSILSPNLLTIIEMQKGDCALYASSFKGFIENCSTPNTYICMQRTVGTGGGGSGGGGSGGGGSEFDIQMTQSPSSLSASVGDRVTITCKASDHINNWLAWYQQKPGQAPKLLIYGATTLETGVPSRFSGSGSGTDYTLTISSLQPEDFATYYCQQSWNTPWTFGQGTKLEIKRGGGGSGGGGSGGGGSQVQLQQPGAELVKPGASVKMSCKASGYAFSSYWINWMKQKPGQGLEWIGQIYPGDGDTNYNGKFKGRATLTADTSSSTAYMQLSSLTSEDSAVYFCARSITTVVGCAMDYWGQGTSVTVSSTRELGEPQLCYILDAILFLYGIVLTLLYCRLKIQVRKAAITSYEKSDGVYTGLSTRNQETYETLKHEKPPQ

SEQ ID NO: 19028 - protein, 541 aa, synthetic construct
MALPVTALLLPLALLLHAARPLEQSFGLLDPKLCYLLDGILFIYGVILTALFLRVKFSRSADAPAYQQGQNQLYNELNLGRREEYDVLDKRRGRDPEMGGKPQRRKNPQEGLYNELQKDKMAEAYSEIGMKGERRRGKGHDGLYQGLSTATKDTYDALHMQALPPRRAKRSGSGATNFSLLKQAGDVEENPGPTSMALPVTALLLPLALLLHAARPQSVLTQPPSVSGAPGQRVTISCTGSSSNIGAGYDVHWYQQLPGTAPKLLIFGNSNRPSGVPDRFSGFKSGTSASLAITGLQAEDEADYFCQSYDSSLSGSGVFGTGTKVTVLGGGGGSGGGGSGGGGSQMQLVQSGGGLVQPGRSLRLSCAASGFTFDDYAMHWVRQAPGKGLEWVSGISWNSGSIGYADSVKGRFTISRDNAKNSLYLQMNSLRAEDTALYYCAKDIHSGSYYGLLYYAMDVWGQGTTVTVSSTRELGEPQLCYILDAILFLYGIVLTLLYCRLKIQVRKAAITSYEKSDGVYTGLSTRNQETYETLKHEKPPQ

SEQ ID NO: 19029 - protein, 378 aa, synthetic construct
MALPVTALLLPLALLLHAARPLEQSFGLLDPKLCYLLDGILFIYGVILTALFLRVKFSRSADAPAYQQGQNQLYNELNLGRREEYDVLDKRRGRDPEMGGKPQRRKNPQEGLYNELQKDKMAEAYSEIGMKGERRRGKGHDGLYQGLSTATKDTYDALHMQALPPRRAKRSGSGATNFSLLKQAGDVEENPGPTSMALPVTALLLPLALLLHAARPMCMPCFTTDHQMARKCDDCCGGKGRGKCYGPQCLCRLEGGGGSGGGGSGGGGSFEVCMPCFTTDQQMARKCSDCCGGKGRGKCYGPQCLCRTRELGEPQLCYILDAILFLYGIVLTLLYCRLKIQVRKAAITSYEKSDGVYTGLSTRNQETYETLKHEKPPQ

SEQ ID NO: 19030 - protein, 588 aa, synthetic construct
MALPVTALLLPLALLLHAARPLEQSFGLLDPKLCYLLDGILFIYGVILTALFLRVKFSRSADAPAYQQGQNQLYNELNLGRREEYDVLDKRRGRDPEMGGKPQRRKNPQEGLYNELQKDKMAEAYSEIGMKGERRRGKGHDGLYQGLSTATKDTYDALHMQALPPRRAKRSGSGATNFSLLKQAGDVEENPGPTSMALPVTALLLPLALLLHAARPFEVCMPCFTTDQQMARKCSDCCGGKGRGKCYGPQCLCRGTGGGGSGGGGSGGGGSEFDIQMTQSPSSLSASVGDRVTITCKASDHINNWLAWYQQKPGQAPKLLIYGATTLETGVPSRFSGSGSGTDYTLTISSLQPEDFATYYCQQSWNTPWTFGQGTKLEIKRGGGGSGGGGSGGGGSQVQLQQPGAELVKPGASVKMSCKASGYAFSSYWINWMKQKPGQGLEWIGQIYPGDGDTNYNGKFKGRATLTADTSSSTAYMQLSSLTSEDSAVYFCARSITTVVGCAMDYWGQGTSVTVSSTRELGEPQLCYILDAILFLYGIVLTLLYCRLKIQVRKAAITSYEKSDGVYTGLSTRNQETYETLKHEKPPQ

SEQ ID NO: 19031 - protein, 718 aa, synthetic construct
MALPVTALLLPLALLLHAARPLEQSFGLLDPKLCYLLDGILFIYGVILTALFLRVKFSRSADAPAYQQGQNQLYNELNLGRREEYDVLDKRRGRDPEMGGKPQRRKNPQEGLYNELQKDKMAEAYSEIGMKGERRRGKGHDGLYQGLSTATKDTYDALHMQALPPRRAKRSGSGATNFSLLKQAGDVEENPGPTSMALPVTALLLPLALLLHAARPFESPVAPACDPRLLNKLLRDSHLLHSRLSQCPDVDPLSIPVLLPAVDFSLGEWKTQTEQSKAQDILGAVSLLLEGVMAARGQLEPSCLSSLLGQLSGQVRLLLGALQGLLGTQLPLQGRTTAHKDPNALFLSLQQLLRGKVRFLLLVEGPTLCVRRTLPTTAVPSSTSGTGGGGSGGGGSGGGGSEFDIQMTQSPSSLSASVGDRVTITCKASDHINNWLAWYQQKPGQAPKLLIYGATTLETGVPSRFSGSGSGTDYTLTISSLQPEDFATYYCQQSWNTPWTFGQGTKLEIKRGGGGSGGGGSGGGGSQVQLQQPGAELVKPGASVKMSCKASGYAFSSYWINWMKQKPGQGLEWIGQIYPGDGDTNYNGKFKGRATLTADTSSSTAYMQLSSLTSEDSAVYFCARSITTVVGCAMDYWGQGTSVTVSSTRELGEPQLCYILDAILFLYGIVLTLLYCRLKIQVRKAAITSYEKSDGVYTGLSTRNQETYETLKHEKPPQ

SEQ ID NO: 19032 - protein, 625 aa, synthetic construct
MALPVTALLLPLALLLHAARPLEQSFGLLDPKLCYLLDGILFIYGVILTALFLRVKFSRSADAPAYQQGQNQLYNELNLGRREEYDVLDKRRGRDPEMGGKPQRRKNPQEGLYNELQKDKMAEAYSEIGMKGERRRGKGHDGLYQGLSTATKDTYDALHMQALPPRRAKRSGSGATNFSLLKQAGDVEENPGPTSMALPVTALLLPLALLLHAARPFEMGSWEEFELRLNAIEERLYALGGSEAELAYFEYVIADFEGNLQRYKGKGNPEVEALYFEADAIFEELVAYRHNGTGGGGSGGGGSGGGGSEFDIQMTQSPSSLSASVGDRVTITCKASDHINNWLAWYQQKPGQAPKLLIYGATTLETGVPSRFSGSGSGTDYTLTISSLQPEDFATYYCQQSWNTPWTFGQGTKLEIKRGGGGSGGGGSGGGGSQVQLQQPGAELVKPGASVKMSCKASGYAFSSYWINWMKQKPGQGLEWIGQIYPGDGDTNYNGKFKGRATLTADTSSSTAYMQLSSLTSEDSAVYFCARSITTVVGCAMDYWGQGTSVTVSSTRELGEPQLCYILDAILFLYGIVLTLLYCRLKIQVRKAAITSYEKSDGVYTGLSTRNQETYETLKHEKPPQ

SEQ ID NO: 19033 - protein, 973 aa, synthetic construct; identical to SEQ ID NO: 16667

SEQ ID NO: 19034 - protein, 974 aa, synthetic construct; identical to SEQ ID NO: 16668

SEQ ID NO: 19035 - protein, 975 aa, synthetic construct; identical to SEQ ID NO: 16669

SEQ ID NO: 19036 - protein, 971 aa, synthetic construct; identical to SEQ ID NO: 16670

SEQ ID NO: 19037 - protein, 975 aa, synthetic construct; identical to SEQ ID NO: 16671

SEQ ID NO: 19038 - protein, 977 aa, synthetic construct; identical to SEQ ID NO: 16672

SEQ ID NO: 19039 - protein, 975 aa, synthetic construct; identical to SEQ ID NO: 16673

SEQ ID NO: 19040 - protein, 973 aa, synthetic construct; identical to SEQ ID NO: 16674

SEQ ID NO: 19041 - protein, 852 aa, synthetic construct; identical to SEQ ID NO: 16675

SEQ ID NO: 19042 - protein, 852 aa, synthetic construct; identical to SEQ ID NO: 16675

SEQ ID NO: 19043 - protein, 1117 aa, synthetic construct; identical to SEQ ID NO: 16677

SEQ ID NO: 19044 - protein, 1246 aa, synthetic construct; identical to SEQ ID NO: 16678

SEQ ID NO: 19045 - protein, 1244 aa, synthetic construct
MALPVTALLLPLALLLHAARPLEEDLKNVFPPEVAVFEPSEAEISHTQKATLVCLATGFYPDHVELSWWVNGKEVHSGVSTDPQPLKEQPALNDSRYCLSSRLRVSATFWQNPRNHFRCQVQFYGLSENDEWTQDRAKPVTQIVSAEAWGRADDVIKIHWQEKKSNTILGSQEGNTMKTNDTYMKFSWLTVPEKSLDKEHRCIVRHENNKNGVDQEIIFPPIKTDVITMDPKDNCSKDANDTLLLQLTNTSAYYMYLLLLLKSVVYFAIITCCLLMAMVKRKDSRGRAKRSGSGATNFSLLKQAGDVEENPGPTSMALPVTALLLPLALLLHAARPGVTQSPTHLIKTRGQQATLRCSPISGHTSVYWYQQALGLGLQFLLWYDEGEERNRGNFPPRFSGRQFPNYSSELNVNALELEDSALYLCASSLGGPRGLAGLRGDEQFFGPGTRLTVLEGGGSGGGSQVQLVESGGGLVQAGDSVTLSCTASGRTFSSYALAWFRQRPGKEREFVAGLRWGGPTNYADSVKDRFTISGDSAKHTMYLQMNSLKPEDTAVYYCGYNPGGWAVPSQYEYDSWGQGTQVTVSSGTGGGGSGGGGSGGGGSEFDIQMTQSPSSLSASVGDRVTITCKASDHINNWLAWYQQKPGQAPKLLIYGATTLETGVPSRFSGSGSGTDYTLTISSLQPEDFATYYCQQSWNTPWTFGQGTKLEIKRGGGGSGGGGSGGGGSQVQLQQPGAELVKPGASVKMSCKASGYAFSSYWINWMKQKPGQGLEWIGQIYPGDGDTNYNGKFKGRATLTADTSSSTAYMQLSSLTSEDSAVYFCARSITTVVGCAMDYWGQGTSVTVSSTRIQNPDPAVYQLRDSKSSDKSVCLFTDFDSQTNVSQSKDSDVYITDKTVLDMRSMDFKSNSAVAWSNKSDFACANAFNNSIIPEDTFFPSPESSDSTDHVKPKETENTKQPSKSCHKPKAIVHTEKVNMMSLTVLGLRMLFAKTVAVNFLLTAKLFFLLTARAKRSGSGVKQTLNFDLLKLAGDVESNPGPSRGHMTEYKPTVRLATRDDVPRAVRTLAAAFADYPATRHTVDPDRHIERVTELQELFLTRVGLDIGKVWVADDGAAVAVWTTPESVEAGAVFAEIGPRMAELSGSRLAAQQQMEGLLAPHRPKEPAWFLATVGVSPDHQGKGLGSAVVLPGVEAAERAGVPAFLETSAPRNLPFYERLGFTVTADVEVPEGPRTWCMTRKPGA

SEQ ID NO: 19046 - protein, 1238 aa, synthetic construct
MALPVTALLLPLALLLHAARPLEEDLKNVFPPEVAVFEPSEAEISHTQKATLVCLATGFYPDHVELSWWVNGKEVHSGVSTDPQPLKEQPALNDSRYCLSSRLRVSATFWQNPRNHFRCQVQFYGLSENDEWTQDRAKPVTQIVSAEAWGRADDVIKIHWQEKKSNTILGSQEGNTMKTNDTYMKFSWLTVPEKSLDKEHRCIVRHENNKNGVDQEIIFPPIKTDVITMDPKDNCSKDANDTLLLQLTNTSAYYMYLLLLLKSVVYFAIITCCLLMAMVKRKDSRGRAKRSGSGATNFSLLKQAGDVEENPGPTSMALPVTALLLPLALLLHAARPGVTQSPTHLIKTRGQQATLRCSPISGHTSVYWYQQALGLGLQFLLWYDEGEERNRGNFPPRFSGRQFPNYSSELNVNALELEDSALYLCASSLGGPRGLAGLRGDEQFFGPGTRLTVLEGGGSGGGSGVTQSPTHLIKTRGQQATLRCSPISGHTSVYWYQQALGLGLQFLLWYDEGEERNRGNFPPRFSGRQFPNYSSELNVNALELEDSALYLCASSLGGDELGADGNEQFFGPGTRLTVLEGTGGGGSGGGGSGGGGSEFDIQMTQSPSSLSASVGDRVTITCKASDHINNWLAWYQQKPGQAPKLLIYGATTLETGVPSRFSGSGSGTDYTLTISSLQPEDFATYYCQQSWNTPWTFGQGTKLEIKRGGGGSGGGGSGGGGSQVQLQQPGAELVKPGASVKMSCKASGYAFSSYWINWMKQKPGQGLEWIGQIYPGDGDTNYNGKFKGRATLTADTSSSTAYMQLSSLTSEDSAVYFCARSITTVVGCAMDYWGQGTSVTVSSTRIQNPDPAVYQLRDSKSSDKSVCLFTDFDSQTNVSQSKDSDVYITDKTVLDMRSMDFKSNSAVAWSNKSDFACANAFNNSIIPEDTFFPSPESSDSTDHVKPKETENTKQPSKSCHKPKAIVHTEKVNMMSLTVLGLRMLFAKTVAVNFLLTAKLFFLLTARAKRSGSGVKQTLNFDLLKLAGDVESNPGPSRGHMTEYKPTVRLATRDDVPRAVRTLAAAFADYPATRHTVDPDRHIERVTELQELFLTRVGLDIGKVWVADDGAAVAVWTTPESVEAGAVFAEIGPRMAELSGSRLAAQQQMEGLLAPHRPKEPAWFLATVGVSPDHQGKGLGSAVVLPGVEAAERAGVPAFLETSAPRNLPFYERLGFTVTADVEVPEGPRTWCMTRKPGA

SEQ ID NO: 19047 - protein, 858 aa, synthetic construct; identical to SEQ ID NO: 16680

SEQ ID NO: 19048 - protein, 787 aa, synthetic construct; identical to SEQ ID NO: 16681

SEQ ID NO: 19049 - protein, 1009 aa, synthetic construct; identical to SEQ ID NO: 16682

SEQ ID NO: 19050 - protein, 923 aa, synthetic construct; identical to SEQ ID NO: 16683

SEQ ID NO: 19051 - protein, 551 aa, synthetic construct
MALPVTALLLPLALLLHAARPLEEDLKNVFPPEVAVFEPSEAEISHTQKATLVCLATGFYPDHVELSWWVNGKEVHSGVSTDPQPLKEQPALNDSRYCLSSRLRVSATFWQNPRNHFRCQVQFYGLSENDEWTQDRAKPVTQIVSAEAWGRADDVIKIHWQEKKSNTILGSQEGNTMKTNDTYMKFSWLTVPEKSLDKEHRCIVRHENNKNGVDQEIIFPPIKTDVITMDPKDNCSKDANDTLLLQLTNTSAYYMYLLLLLKSVVYFAIITCCLLMAMVKRKDSRGRAKRSGSGATNFSLLKQAGDVEENPGPTSATMALPVTALLLPLALLLHAARPMDPDLEIRAAFLRQRNTALRTEVAELEQEVQRLENEVSQYETRYGPLGGGKTRIQNPDPAVYQLRDSKSSDKSVCLFTDFDSQTNVSQSKDSDVYITDKTVLDMRSMDFKSNSAVAWSNKSDFACANAFNNSIIPEDTFFPSPESSDSTDHVKPKETENTKQPSKSCHKPKAIVHTEKVNMMSLTVLGLRMLFAKTVAVNFLLTAKLFFLLTA

SEQ ID NO: 19052 - protein, 551 aa, synthetic construct
MALPVTALLLPLALLLHAARPLEEDLKNVFPPEVAVFEPSEAEISHTQKATLVCLATGFYPDHVELSWWVNGKEVHSGVSTDPQPLKEQPALNDSRYCLSSRLRVSATFWQNPRNHFRCQVQFYGLSENDEWTQDRAKPVTQIVSAEAWGRADDVIKIHWQEKKSNTILGSQEGNTMKTNDTYMKFSWLTVPEKSLDKEHRCIVRHENNKNGVDQEIIFPPIKTDVITMDPKDNCSKDANDTLLLQLTNTSAYYMYLLLLLKSVVYFAIITCCLLMAMVKRKDSRGRAKRSGSGATNFSLLKQAGDVEENPGPTSATMALPVTALLLPLALLLHAARPMDPDLEIEAAFLERENTALETRVAELRQRVQRLRNRVSQYRTRYGPLGGGKTRIQNPDPAVYQLRDSKSSDKSVCLFTDFDSQTNVSQSKDSDVYITDKTVLDMRSMDFKSNSAVAWSNKSDFACANAFNNSIIPEDTFFPSPESSDSTDHVKPKETENTKQPSKSCHKPKAIVHTEKVNMMSLTVLGLRMLFAKTVAVNFLLTAKLFFLLTA

SEQ ID NO: 19053 - protein, 528 aa, synthetic construct
MALPVTALLLPLALLLHAARPLEEDLKNVFPPEVAVFEPSEAEISHTQKATLVCLATGFYPDHVELSWWVNGKEVHSGVSTDPQPLKEQPALNDSRYCLSSRLRVSATFWQNPRNHFRCQVQFYGLSENDEWTQDRAKPVTQIVSAEAWGRADDVIKIHWQEKKSNTILGSQEGNTMKTNDTYMKFSWLTVPEKSLDKEHRCIVRHENNKNGVDQEIIFPPIKTDVITMDPKDNCSKDANDTLLLQLTNTSAYYMYLLLLLKSVVYFAIITCCLLMAMVKRKDSRGRAKRSGSGATNFSLLKQAGDVEENPGPTSATMALPVTALLLPLALLLHAARPEVAALEKEVAALEKEVAALEKEVAALEKTRIQNPDPAVYQLRDSKSSDKSVCLFTDFDSQTNVSQSKDSDVYITDKTVLDMRSMDFKSNSAVAWSNKSDFACANAFNNSIIPEDTFFPSPESSDSTDHVKPKETENTKQPSKSCHKPKAIVHTEKVNMMSLTVLGLRMLFAKTVAVNFLLTAKLFFLLTA

SEQ ID NO: 19054 - protein, 786 aa, synthetic construct
MALPVTALLLPLALLLHAARPLEEDLKNVFPPEVAVFEPSEAEISHTQKATLVCLATGFYPDHVELSWWVNGKEVHSGVSTDPQPLKEQPALNDSRYCLSSRLRVSATFWQNPRNHFRCQVQFYGLSENDEWTQDRAKPVTQIVSAEAWGRADDVIKIHWQEKKSNTILGSQEGNTMKTNDTYMKFSWLTVPEKSLDKEHRCIVRHENNKNGVDQEIIFPPIKTDVITMDPKDNCSKDANDTLLLQLTNTSAYYMYLLLLLKSVVYFAIITCCLLMAMVKRKDSRGRAKRSGSGATNFSLLKQAGDVEENPGPTSATMALPVTALLLPLALLLHAARPLFNQEVQIPLTESYCGPCPKNWICYKNNCYQFFDESKNWYESQASCMSQNASLLKVYSKEDQDLLKLVKSAHWMGLVHIPTNGSWQWEDGSILSPNLLTIIEMQKGDCALYASSFKGYIENCSTPNTYICMQRTVSGGGGSGGGGSGGGGDLFNQEVQIPLTESYCGPCPKNWICYKNNCYQFFDESKNWYESQASCMSQNASLLKVYSKEDQDLLKLVKSAHWMGLVHIPTNGSWQWEDGSILSPNLLTIIEMQKGDCALYASSFKGYIENCSTPNTYICMQRTVTRIQNPDPAVYQLRDSKSSDKSVCLFTDFDSQTNVSQSKDSDVYITDKTVLDMRSMDFKSNSAVAWSNKSDFACANAFNNSIIPEDTFFPSPESSDSTDHVKPKETENTKQPSKSCHKPKAIVHTEKVNMMSLTVLGLRMLFAKTVAVNFLLTAKLFFLLTA

SEQ ID NO: 19055 - protein, 786 aa, synthetic construct
MALPVTALLLPLALLLHAARPLEEDLKNVFPPEVAVFEPSEAEISHTQKATLVCLATGFYPDHVELSWWVNGKEVHSGVSTDPQPLKEQPALNDSRYCLSSRLRVSATFWQNPRNHFRCQVQFYGLSENDEWTQDRAKPVTQIVSAEAWGRADDVIKIHWQEKKSNTILGSQEGNTMKTNDTYMKFSWLTVPEKSLDKEHRCIVRHENNKNGVDQEIIFPPIKTDVITMDPKDNCSKDANDTLLLQLTNTSAYYMYLLLLLKSVVYFAIITCCLLMAMVKRKDSRGRAKRSGSGATNFSLLKQAGDVEENPGPTSATMALPVTALLLPLALLLHAARPLFNQEVQIPLTESYCGPCPKNWICYKNNCYQFFDESKNWYESQASCMSQNASLLKVYSKEDQDLLKLVKSAHWMGLVHIPTNGSWQWEDGSILSPNLLTIIEMQKGDCALYASSFKGFIENCSTPNTYICMQRTVGGGGSGGGGSGGGGSDLFNQEVQIPLTESYCGPCPKNWICYKNNCYQFFDESKNWYESQASCMSQNASLLKVYSKEDQDLLKLVKSAHWMGLVHIPTNGSWQWEDGSILSPNLLTIIEMQKGDCALYASSFKGFIENCSTPNTYICMQRTVTRIQNPDPAVYQLRDSKSSDKSVCLFTDFDSQTNVSQSKDSDVYITDKTVLDMRSMDFKSNSAVAWSNKSDFACANAFNNSIIPEDTFFPSPESSDSTDHVKPKETENTKQPSKSCHKPKAIVHTEKVNMMSLTVLGLRMLFAKTVAVNFLLTAKLFFLLTA

SEQ ID NO: 19056 - protein, 812 aa, synthetic construct
MALPVTALLLPLALLLHAARPLEEDLKNVFPPEVAVFEPSEAEISHTQKATLVCLATGFYPDHVELSWWVNGKEVHSGVSTDPQPLKEQPALNDSRYCLSSRLRVSATFWQNPRNHFRCQVQFYGLSENDEWTQDRAKPVTQIVSAEAWGRADDVIKIHWQEKKSNTILGSQEGNTMKTNDTYMKFSWLTVPEKSLDKEHRCIVRHENNKNGVDQEIIFPPIKTDVITMDPKDNCSKDANDTLLLQLTNTSAYYMYLLLLLKSVVYFAIITCCLLMAMVKRKDSRGRAKRSGSGATNFSLLKQAGDVEENPGPTSMALPVTALLLPLALLLHAARPMDPDLEIRAAFLRQRNTALRTEVAELEQEVQRLENEVSQYETRYGPLGGGKGTGGGGSGGGGSGGGGSEFDIQMTQSPSSLSASVGDRVTITCKASDHINNWLAWYQQKPGQAPKLLIYGATTLETGVPSRFSGSGSGTDYTLTISSLQPEDFATYYCQQSWNTPWTFGQGTKLEIKRGGGGSGGGGSGGGGSQVQLQQPGAELVKPGASVKMSCKASGYAFSSYWINWMKQKPGQGLEWIGQIYPGDGDTNYNGKFKGRATLTADTSSSTAYMQLSSLTSEDSAVYFCARSITTVVGCAMDYWGQGTSVTVSSTRIQNPDPAVYQLRDSKSSDKSVCLFTDFDSQTNVSQSKDSDVYITDKTVLDMRSMDFKSNSAVAWSNKSDFACANAFNNSIIPEDTFFPSPESSDSTDHVKPKETENTKQPSKSCHKPKAIVHTEKVNMMSLTVLGLRMLFAKTVAVNFLLTAKLFFLLTA

SEQ ID NO: 19057 - protein, 1047 aa, synthetic construct
MALPVTALLLPLALLLHAARPLEEDLKNVFPPEVAVFEPSEAEISHTQKATLVCLATGFYPDHVELSWWVNGKEVHSGVSTDPQPLKEQPALNDSRYCLSSRLRVSATFWQNPRNHFRCQVQFYGLSENDEWTQDRAKPVTQIVSAEAWGRADDVIKIHWQEKKSNTILGSQEGNTMKTNDTYMKFSWLTVPEKSLDKEHRCIVRHENNKNGVDQEIIFPPIKTDVITMDPKDNCSKDANDTLLLQLTNTSAYYMYLLLLLKSVVYFAIITCCLLMAMVKRKDSRGRAKRSGSGATNFSLLKQAGDVEENPGPTSMALPVTALLLPLALLLHAARPLFNQEVQIPLTESYCGPCPKNWICYKNNCYQFFDESKNWYESQASCMSQNASLLKVYSKEDQDLLKLVKSAHWMGLVHIPTNGSWQWEDGSILSPNLLTIIEMQKGDCALYASSFKGFIENCSTPNTYICMQRTVGGGGSGGGGSGGGGSDLFNQEVQIPLTESYCGPCPKNWICYKNNCYQFFDESKNWYESQASCMSQNASLLKVYSKEDQDLLKLVKSAHWMGLVHIPTNGSWQWEDGSILSPNLLTIIEMQKGDCALYASSFKGFIENCSTPNTYICMQRTVGTGGGGSGGGGSGGGGSEFDIQMTQSPSSLSASVGDRVTITCKASDHINNWLAWYQQKPGQAPKLLIYGATTLETGVPSRFSGSGSGTDYTLTISSLQPEDFATYYCQQSWNTPWTFGQGTKLEIKRGGGGSGGGGSGGGGSQVQLQQPGAELVKPGASVKMSCKASGYAFSSYWINWMKQKPGQGLEWIGQIYPGDGDTNYNGKFKGRATLTADTSSSTAYMQLSSLTSEDSAVYFCARSITTVVGCAMDYWGQGTSVTVSSTRIQNPDPAVYQLRDSKSSDKSVCLFTDFDSQTNVSQSKDSDVYITDKTVLDMRSMDFKSNSAVAWSNKSDFACANAFNNSIIPEDTFFPSPESSDSTDHVKPKETENTKQPSKSCHKPKAIVHTEKVNMMSLTVLGLRMLFAKTVAVNFLLTAKLFFLLTA

SEQ ID NO: 19058 - protein, 752 aa, synthetic construct
MALPVTALLLPLALLLHAARPLEEDLKNVFPPEVAVFEPSEAEISHTQKATLVCLATGFYPDHVELSWWVNGKEVHSGVSTDPQPLKEQPALNDSRYCLSSRLRVSATFWQNPRNHFRCQVQFYGLSENDEWTQDRAKPVTQIVSAEAWGRADDVIKIHWQEKKSNTILGSQEGNTMKTNDTYMKFSWLTVPEKSLDKEHRCIVRHENNKNGVDQEIIFPPIKTDVITMDPKDNCSKDANDTLLLQLTNTSAYYMYLLLLLKSVVYFAIITCCLLMAMVKRKDSRGRAKRSGSGATNFSLLKQAGDVEENPGPTSMALPVTALLLPLALLLHAARPQSVLTQPPSVSGAPGQRVTISCTGSSSNIGAGYDVHWYQQLPGTAPKLLIFGNSNRPSGVPDRFSGFKSGTSASLAITGLQAEDEADYFCQSYDSSLSGSGVFGTGTKVTVLGGGGGSGGGGSGGGGSQMQLVQSGGGLVQPGRSLRLSCAASGFTFDDYAMHWVRQAPGKGLEWVSGISWNSGSIGYADSVKGRFTISRDNAKNSLYLQMNSLRAEDTALYYCAKDIHSGSYYGLLYYAMDVWGQGTTVTVSSTRIQNPDPAVYQLRDSKSSDKSVCLFTDFDSQTNVSQSKDSDVYITDKTVLDMRSMDFKSNSAVAWSNKSDFACANAFNNSIIPEDTFFPSPESSDSTDHVKPKETENTKQPSKSCHKPKAIVHTEKVNMMSLTVLGLRMLFAKTVAVNFLLTAKLFFLLTA

SEQ ID NO: 19059 - protein, 589 aa, synthetic construct
MALPVTALLLPLALLLHAARPLEEDLKNVFPPEVAVFEPSEAEISHTQKATLVCLATGFYPDHVELSWWVNGKEVHSGVSTDPQPLKEQPALNDSRYCLSSRLRVSATFWQNPRNHFRCQVQFYGLSENDEWTQDRAKPVTQIVSAEAWGRADDVIKIHWQEKKSNTILGSQEGNTMKTNDTYMKFSWLTVPEKSLDKEHRCIVRHENNKNGVDQEIIFPPIKTDVITMDPKDNCSKDANDTLLLQLTNTSAYYMYLLLLLKSVVYFAIITCCLLMAMVKRKDSRGRAKRSGSGATNFSLLKQAGDVEENPGPTSMALPVTALLLPLALLLHAARPMCMPCFTTDHQMARKCDDCCGGKGRGKCYGPQCLCRLEGGGGSGGGGSGGGGSFEVCMPCFTTDQQMARKCSDCCGGKGRGKCYGPQCLCRTRIQNPDPAVYQLRDSKSSDKSVCLFTDFDSQTNVSQSKDSDVYITDKTVLDMRSMDFKSNSAVAWSNKSDFACANAFNNSIIPEDTFFPSPESSDSTDHVKPKETENTKQPSKSCHKPKAIVHTEKVNMMSLTVLGLRMLFAKTVAVNFLLTAKLFFLLTA

SEQ ID NO: 19060 - protein, 852 aa, synthetic construct
MALPVTALLLPLALLLHAARPLEEDLKNVFPPEVAVFEPSEAEISHTQKATLVCLATGFYPDHVELSWWVNGKEVHSGVSTDPQPLKEQPALNDSRYCLSSRLRVSATFWQNPRNHFRCQVQFYGLSENDEWTQDRAKPVTQIVSAEAWGRADDVIKIHWQEKKSNTILGSQEGNTMKTNDTYMKFSWLTVPEKSLDKEHRCIVRHENNKNGVDQEIIFPPIKTDVITMDPKDNCSKDANDTLLLQLTNTSAYYMYLLLLLKSVVYFAIITCCLLMAMVKRKDSRGRAKRSGSGATNFSLLKQAGDVEENPGPTSMALPVTALLLPLALLLHAARPMCMPCFTTDHQMARKCDDCCGGKGRGKCYGPQCLCRLEGGGGSGGGGSGGGGSFEVCMPCFTTDQQMARKCSDCCGGKGRGKCYGPQCLCRGTGGGGSGGGGSGGGGSEFDIQMTQSPSSLSASVGDRVTITCKASDHINNWLAWYQQKPGQAPKLLIYGATTLETGVPSRFSGSGSGTDYTLTISSLQPEDFATYYCQQSWNTPWTFGQGTKLEIKRGGGGSGGGGSGGGGSQVQLQQPGAELVKPGASVKMSCKASGYAFSSYWINWMKQKPGQGLEWIGQIYPGDGDTNYNGKFKGRATLTADTSSSTAYMQLSSLTSEDSAVYFCARSITTVVGCAMDYWGQGTSVTVSSTRIQNPDPAVYQLRDSKSSDKSVCLFTDFDSQTNVSQSKDSDVYITDKTVLDMRSMDFKSNSAVAWSNKSDFACANAFNNSIIPEDTFFPSPESSDSTDHVKPKETENTKQPSKSCHKPKAIVHTEKVNMMSLTVLGLRMLFAKTVAVNFLLTAKLFFLLTA

SEQ ID NO: 19061 - protein, 927 aa, synthetic construct
MALPVTALLLPLALLLHAARPLEEDLKNVFPPEVAVFEPSEAEISHTQKATLVCLATGFYPDHVELSWWVNGKEVHSGVSTDPQPLKEQPALNDSRYCLSSRLRVSATFWQNPRNHFRCQVQFYGLSENDEWTQDRAKPVTQIVSAEAWGRADDVIKIHWQEKKSNTILGSQEGNTMKTNDTYMKFSWLTVPEKSLDKEHRCIVRHENNKNGVDQEIIFPPIKTDVITMDPKDNCSKDANDTLLLQLTNTSAYYMYLLLLLKSVVYFAIITCCLLMAMVKRKDSRGRAKRSGSGATNFSLLKQAGDVEENPGPTSMALPVTALLLPLALLLHAARPSPVAPACDPRLLNKLLRDSHLLHSRLSQCPDVDPLSIPVLLPAVDFSLGEWKTQTEQSKAQDILGAVSLLLEGVMAARGQLEPSCLSSLLGQLSGQVRLLLGALQGLLGTQLPLQGRTTAHKDPNALFLSLQQLLRGKVRFLLLVEGPTLCVRRTLPTTAVPSSTSGTGGGGSGGGGSGGGGSEFDIQMTQSPSSLSASVGDRVTITCKASDHINNWLAWYQQKPGQAPKLLIYGATTLETGVPSRFSGSGSGTDYTLTISSLQPEDFATYYCQQSWNTPWTFGQGTKLEIKRGGGGSGGGGSGGGGSQVQLQQPGAELVKPGASVKMSCKASGYAFSSYWINWMKQKPGQGLEWIGQIYPGDGDTNYNGKFKGRATLTADTSSSTAYMQLSSLTSEDSAVYFCARSITTVVGCAMDYWGQGTSVTVSSTRIQNPDPAVYQLRDSKSSDKSVCLFTDFDSQTNVSQSKDSDVYITDKTVLDMRSMDFKSNSAVAWSNKSDFACANAFNNSIIPEDTFFPSPESSDSTDHVKPKETENTKQPSKSCHKPKAIVHTEKVNMMSLTVLGLRMLFAKTVAVNFLLTAKLFFLLTA

SEQ ID NO: 19062 - protein, 834 aa, synthetic construct
MALPVTALLLPLALLLHAARPLEEDLKNVFPPEVAVFEPSEAEISHTQKATLVCLATGFYPDHVELSWWVNGKEVHSGVSTDPQPLKEQPALNDSRYCLSSRLRVSATFWQNPRNHFRCQVQFYGLSENDEWTQDRAKPVTQIVSAEAWGRADDVIKIHWQEKKSNTILGSQEGNTMKTNDTYMKFSWLTVPEKSLDKEHRCIVRHENNKNGVDQEIIFPPIKTDVITMDPKDNCSKDANDTLLLQLTNTSAYYMYLLLLLKSVVYFAIITCCLLMAMVKRKDSRGRAKRSGSGATNFSLLKQAGDVEENPGPTSMALPVTALLLPLALLLHAARPMGSWEEFELRLNAIEERLYALGGSEAELAYFEYVIADFEGNLQRYKGKGNPEVEALYFEADAIFEELVAYRHNGTGGGGSGGGGSGGGGSEFDIQMTQSPSSLSASVGDRVTITCKASDHINNWLAWYQQKPGQAPKLLIYGATTLETGVPSRFSGSGSGTDYTLTISSLQPEDFATYYCQQSWNTPWTFGQGTKLEIKRGGGGSGGGGSGGGGSQVQLQQPGAELVKPGASVKMSCKASGYAFSSYWINWMKQKPGQGLEWIGQIYPGDGDTNYNGKFKGRATLTADTSSSTAYMQLSSLTSEDSAVYFCARSITTVVGCAMDYWGQGTSVTVSSTRIQNPDPAVYQLRDSKSSDKSVCLFTDFDSQTNVSQSKDSDVYITDKTVLDMRSMDFKSNSAVAWSNKSDFACANAFNNSIIPEDTFFPSPESSDSTDHVKPKETENTKQPSKSCHKPKAIVHTEKVNMMSLTVLGLRMLFAKTVAVNFLLTAKLFFLLTA

SEQ ID NO: 19063 - protein, 973 aa, synthetic construct; identical to SEQ ID NO: 16685

SEQ ID NO: 19064 - protein, 974 aa, synthetic construct; identical to SEQ ID NO: 16686

SEQ ID NO: 19065 - protein, 975 aa, synthetic construct; identical to SEQ ID NO: 16687

SEQ ID NO: 19066 - protein, 971 aa, synthetic construct; identical to SEQ ID NO: 16688

SEQ ID NO: 19067 - protein, 975 aa, synthetic construct; identical to SEQ ID NO: 16689

SEQ ID NO: 19068 - protein, 977 aa, synthetic construct; identical to SEQ ID NO: 16690

SEQ ID NO: 19069 - protein, 975 aa, synthetic construct; identical to SEQ ID NO: 16691

SEQ ID NO: 19070 - protein, 973 aa, synthetic construct; identical to SEQ ID NO: 16692

SEQ ID NO: 19071 - protein, 852 aa, synthetic construct; identical to SEQ ID NO: 16693

SEQ ID NO: 19072 - protein, 852 aa, synthetic construct; identical to SEQ ID NO: 16693

SEQ ID NO: 19073 - protein, 1117 aa, synthetic construct; identical to SEQ ID NO: 16695

SEQ ID NO: 19074 - protein, 1246 aa, synthetic construct; identical to SEQ ID NO: 16696

SEQ ID NO: 19075 - protein, 1244 aa, synthetic construct
MALPVTALLLPLALLLHAARPLEIQNPDPAVYQLRDSKSSDKSVCLFTDFDSQTNVSQSKDSDVYITDKTVLDMRSMDFKSNSAVAWSNKSDFACANAFNNSIIPEDTFFPSPESSDSTDHVKPKETENTKQPSKSCHKPKAIVHTEKVNMMSLTVLGLRMLFAKTVAVNFLLTAKLFFLLTARAKRSGSGATNFSLLKQAGDVEENPGPTSMALPVTALLLPLALLLHAARPGVTQSPTHLIKTRGQQATLRCSPISGHTSVYWYQQALGLGLQFLLWYDEGEERNRGNFPPRFSGRQFPNYSSELNVNALELEDSALYLCASSLGGPRGLAGLRGDEQFFGPGTRLTVLEGGGSGGGSQVQLVESGGGLVQAGDSVTLSCTASGRTFSSYALAWFRQRPGKEREFVAGLRWGGPTNYADSVKDRFTISGDSAKHTMYLQMNSLKPEDTAVYYCGYNPGGWAVPSQYEYDSWGQGTQVTVSSGTGGGGSGGGGSGGGGSEFDIQMTQSPSSLSASVGDRVTITCKASDHINNWLAWYQQKPGQAPKLLIYGATTLETGVPSRFSGSGSGTDYTLTISSLQPEDFATYYCQQSWNTPWTFGQGTKLEIKRGGGGSGGGGSGGGGSQVQLQQPGAELVKPGASVKMSCKASGYAFSSYWINWMKQKPGQGLEWIGQIYPGDGDTNYNGKFKGRATLTADTSSSTAYMQLSSLTSEDSAVYFCARSITTVVGCAMDYWGQGTSVTVSSTREDLKNVFPPEVAVFEPSEAEISHTQKATLVCLATGFYPDHVELSWWVNGKEVHSGVSTDPQPLKEQPALNDSRYCLSSRLRVSATFWQNPRNHFRCQVQFYGLSENDEWTQDRAKPVTQIVSAEAWGRADDVIKIHWQEKKSNTILGSQEGNTMKTNDTYMKFSWLTVPEKSLDKEHRCIVRHENNKNGVDQEIIFPPIKTDVITMDPKDNCSKDANDTLLLQLTNTSAYYMYLLLLLKSVVYFAIITCCLLMAMVKRKDSRGRAKRSGSGVKQTLNFDLLKLAGDVESNPGPSRGHMTEYKPTVRLATRDDVPRAVRTLAAAFADYPATRHTVDPDRHIERVTELQELFLTRVGLDIGKVWVADDGAAVAVWTTPESVEAGAVFAEIGPRMAELSGSRLAAQQQMEGLLAPHRPKEPAWFLATVGVSPDHQGKGLGSAVVLPGVEAAERAGVPAFLETSAPRNLPFYERLGFTVTADVEVPEGPRTWCMTRKPGA

SEQ ID NO: 19076 - protein, 1005 aa, synthetic construct
MALPVTALLLPLALLLHAARPLEIQNPDPAVYQLRDSKSSDKSVCLFTDFDSQTNVSQSKDSDVYITDKTVLDMRSMDFKSNSAVAWSNKSDFACANAFNNSIIPEDTFFPSPESSDSTDHVKPKETENTKQPSKSCHKPKAIVHTEKVNMMSLTVLGLRMLFAKTVAVNFLLTAKLFFLLTARAKRSGSGATNFSLLKQAGDVEENPGPTSMALPVTALLLPLALLLHAARPGVTQSPTHLIKTRGQQATLRCSPISGHTSVYWYQQALGLGLQFLLWYDEGEERNRGNFPPRFSGRQFPNYSSELNVNALELEDSALYLCASSLGGPRGLAGLRGDEQFFGPGTRLTVLEGGGSGGGSGVTQSPTHLIKTRGQQATLRCSPISGHTSVYWYQQALGLGLQFLLWYDEGEERNRGNFPPRFSGRQFPNYSSELNVNALELEDSALYLCASSLGGDELGADGNEQFFGPGTRLTVLEGTGGGGSGGGGSGGGGSEFDIQMTQSPSSLSASVGDRVTITCKASDHINNWLAWYQQKPGQAPKLLIYGATTLETGVPSRFSGSGSGTDYTLTISSLQPEDFATYYCQQSWNTPWTFGQGTKLEIKRGGGGSGGGGSGGGGSQVQLQQPGAELVKPGASVKMSCKASGYAFSSYWINWMKQKPGQGLEWIGQIYPGDGDTNYNGKFKGRATLTADTSSSTAYMQLSSLTSEDSAVYFCARSITTVVGCAMDYWGQGTSVTVSSTREDLKNVFPPEVAVFEPSEAEISHTQKATLVCLATGFYPDHVELSWWVNGKEVHSGVSTDPQPLKEQPALNDSRYCLSSRLRVSATFWQNPRNHFRCQVQFYGLSENDEWTQDRAKPVTQIVSAEAWGRADDVIKIHWQEKKSNTILGSQEGNTMKTNDTYMKFSWLTVPEKSLDKEHRCIVRHENNKNGVDQEIIFPPIKTDVITMDPKDNCSKDANDTLLLQLTNTSAYYMYLLLLLKSVVYFAIITCCLLMAMVKRKDSRG

SEQ ID NO: 19077 - protein, 858 aa, synthetic construct; identical to SEQ ID NO: 16698

SEQ ID NO: 19078 - protein, 787 aa, synthetic construct; identical to SEQ ID NO: 16699

SEQ ID NO: 19079 - protein, 1009 aa, synthetic construct; identical to SEQ ID NO: 16700

SEQ ID NO: 19080 - protein, 923 aa, synthetic construct; identical to SEQ ID NO: 16701

SEQ ID NO: 19081 - protein, 551 aa, synthetic construct
MALPVTALLLPLALLLHAARPLEIQNPDPAVYQLRDSKSSDKSVCLFTDFDSQTNVSQSKDSDVYITDKTVLDMRSMDFKSNSAVAWSNKSDFACANAFNNSIIPEDTFFPSPESSDSTDHVKPKETENTKQPSKSCHKPKAIVHTEKVNMMSLTVLGLRMLFAKTVAVNFLLTAKLFFLLTARAKRSGSGATNFSLLKQAGDVEENPGPTSATMALPVTALLLPLALLLHAARPMDPDLEIRAAFLRQRNTALRTEVAELEQEVQRLENEVSQYETRYGPLGGGKTREDLKNVFPPEVAVFEPSEAEISHTQKATLVCLATGFYPDHVELSWWVNGKEVHSGVSTDPQPLKEQPALNDSRYCLSSRLRVSATFWQNPRNHFRCQVQFYGLSENDEWTQDRAKPVTQIVSAEAWGRADDVIKIHWQEKKSNTILGSQEGNTMKTNDTYMKFSWLTVPEKSLDKEHRCIVRHENNKNGVDQEIIFPPIKTDVITMDPKDNCSKDANDTLLLQLTNTSAYYMYLLLLLKSVVYFAIITCCLLMAMVKRKDSRG

SEQ ID NO: 19082 - protein, 551 aa, synthetic construct
MALPVTALLLPLALLLHAARPLEIQNPDPAVYQLRDSKSSDKSVCLFTDFDSQTNVSQSKDSDVYITDKTVLDMRSMDFKSNSAVAWSNKSDFACANAFNNSIIPEDTFFPSPESSDSTDHVKPKETENTKQPSKSCHKPKAIVHTEKVNMMSLTVLGLRMLFAKTVAVNFLLTAKLFFLLTARAKRSGSGATNFSLLKQAGDVEENPGPTSATMALPVTALLLPLALLLHAARPMDPDLEIEAAFLERENTALETRVAELRQRVQRLRNRVSQYRTRYGPLGGGKTREDLKNVFPPEVAVFEPSEAEISHTQKATLVCLATGFYPDHVELSWWVNGKEVHSGVSTDPQPLKEQPALNDSRYCLSSRLRVSATFWQNPRNHFRCQVQFYGLSENDEWTQDRAKPVTQIVSAEAWGRADDVIKIHWQEKKSNTILGSQEGNTMKTNDTYMKFSWLTVPEKSLDKEHRCIVRHENNKNGVDQEIIFPPIKTDVITMDPKDNCSKDANDTLLLQLTNTSAYYMYLLLLLKSVVYFAIITCCLLMAMVKRKDSRG

SEQ ID NO: 19083 - protein, 786 aa, synthetic construct
MALPVTALLLPLALLLHAARPLEIQNPDPAVYQLRDSKSSDKSVCLFTDFDSQTNVSQSKDSDVYITDKTVLDMRSMDFKSNSAVAWSNKSDFACANAFNNSIIPEDTFFPSPESSDSTDHVKPKETENTKQPSKSCHKPKAIVHTEKVNMMSLTVLGLRMLFAKTVAVNFLLTAKLFFLLTARAKRSGSGATNFSLLKQAGDVEENPGPTSATMALPVTALLLPLALLLHAARPLFNQEVQIPLTESYCGPCPKNWICYKNNCYQFFDESKNWYESQASCMSQNASLLKVYSKEDQDLLKLVKSAHWMGLVHIPTNGSWQWEDGSILSPNLLTIIEMQKGDCALYASSFKGYIENCSTPNTYICMQRTVSGGGGSGGGGSGGGGDLFNQEVQIPLTESYCGPCPKNWICYKNNCYQFFDESKNWYESQASCMSQNASLLKVYSKEDQDLLKLVKSAHWMGLVHIPTNGSWQWEDGSILSPNLLTIIEMQKGDCALYASSFKGYIENCSTPNTYICMQRTVTREDLKNVFPPEVAVFEPSEAEISHTQKATLVCLATGFYPDHVELSWWVNGKEVHSGVSTDPQPLKEQPALNDSRYCLSSRLRVSATFWQNPRNHFRCQVQFYGLSENDEWTQDRAKPVTQIVSAEAWGRADDVIKIHWQEKKSNTILGSQEGNTMKTNDTYMKFSWLTVPEKSLDKEHRCIVRHENNKNGVDQEIIFPPIKTDVITMDPKDNCSKDANDTLLLQLTNTSAYYMYLLLLLKSVVYFAIITCCLLMAMVKRKDSRG

SEQ ID NO: 19084 - protein, 786 aa, synthetic construct
MALPVTALLLPLALLLHAARPLEIQNPDPAVYQLRDSKSSDKSVCLFTDFDSQTNVSQSKDSDVYITDKTVLDMRSMDFKSNSAVAWSNKSDFACANAFNNSIIPEDTFFPSPESSDSTDHVKPKETENTKQPSKSCHKPKAIVHTEKVNMMSLTVLGLRMLFAKTVAVNFLLTAKLFFLLTARAKRSGSGATNFSLLKQAGDVEENPGPTSATMALPVTALLLPLALLLHAARPLFNQEVQIPLTESYCGPCPKNWICYKNNCYQFFDESKNWYESQASCMSQNASLLKVYSKEDQDLLKLVKSAHWMGLVHIPTNGSWQWEDGSILSPNLLTIIEMQKGDCALYASSFKGFIENCSTPNTYICMQRTVGGGGSGGGGSGGGGSDLFNQEVQIPLTESYCGPCPKNWICYKNNCYQFFDESKNWYESQASCMSQNASLLKVYSKEDQDLLKLVKSAHWMGLVHIPTNGSWQWEDGSILSPNLLTIIEMQKGDCALYASSFKGFIENCSTPNTYICMQRTVTREDLKNVFPPEVAVFEPSEAEISHTQKATLVCLATGFYPDHVELSWWVNGKEVHSGVSTDPQPLKEQPALNDSRYCLSSRLRVSATFWQNPRNHFRCQVQFYGLSENDEWTQDRAKPVTQIVSAEAWGRADDVIKIHWQEKKSNTILGSQEGNTMKTNDTYMKFSWLTVPEKSLDKEHRCIVRHENNKNGVDQEIIFPPIKTDVITMDPKDNCSKDANDTLLLQLTNTSAYYMYLLLLLKSVVYFAIITCCLLMAMVKRKDSRG

SEQ ID NO: 19085 - protein, 812 aa, synthetic construct
MALPVTALLLPLALLLHAARPLEIQNPDPAVYQLRDSKSSDKSVCLFTDFDSQTNVSQSKDSDVYITDKTVLDMRSMDFKSNSAVAWSNKSDFACANAFNNSIIPEDTFFPSPESSDSTDHVKPKETENTKQPSKSCHKPKAIVHTEKVNMMSLTVLGLRMLFAKTVAVNFLLTAKLFFLLTARAKRSGSGATNFSLLKQAGDVEENPGPTSMALPVTALLLPLALLLHAARPMDPDLEIRAAFLRQRNTALRTEVAELEQEVQRLENEVSQYETRYGPLGGGKGTGGGGSGGGGSGGGGSEFDIQMTQSPSSLSASVGDRVTITCKASDHINNWLAWYQQKPGQAPKLLIYGATTLETGVPSRFSGSGSGTDYTLTISSLQPEDFATYYCQQSWNTPWTFGQGTKLEIKRGGGGSGGGGSGGGGSQVQLQQPGAELVKPGASVKMSCKASGYAFSSYWINWMKQKPGQGLEWIGQIYPGDGDTNYNGKFKGRATLTADTSSSTAYMQLSSLTSEDSAVYFCARSITTVVGCAMDYWGQGTSVTVSSTREDLKNVFPPEVAVFEPSEAEISHTQKATLVCLATGFYPDHVELSWWVNGKEVHSGVSTDPQPLKEQPALNDSRYCLSSRLRVSATFWQNPRNHFRCQVQFYGLSENDEWTQDRAKPVTQIVSAEAWGRADDVIKIHWQEKKSNTILGSQEGNTMKTNDTYMKFSWLTVPEKSLDKEHRCIVRHENNKNGVDQEIIFPPIKTDVITMDPKDNCSKDANDTLLLQLTNTSAYYMYLLLLLKSVVYFAIITCCLLMAMVKRKDSRG

SEQ ID NO: 19086 - protein, 1047 aa, synthetic construct
MALPVTALLLPLALLLHAARPLEIQNPDPAVYQLRDSKSSDKSVCLFTDFDSQTNVSQSKDSDVYITDKTVLDMRSMDFKSNSAVAWSNKSDFACANAFNNSIIPEDTFFPSPESSDSTDHVKPKETENTKQPSKSCHKPKAIVHTEKVNMMSLTVLGLRMLFAKTVAVNFLLTAKLFFLLTARAKRSGSGATNFSLLKQAGDVEENPGPTSMALPVTALLLPLALLLHAARPLFNQEVQIPLTESYCGPCPKNWICYKNNCYQFFDESKNWYESQASCMSQNASLLKVYSKEDQDLLKLVKSAHWMGLVHIPTNGSWQWEDGSILSPNLLTIIEMQKGDCALYASSFKGFIENCSTPNTYICMQRTVGGGGSGGGGSGGGGSDLFNQEVQIPLTESYCGPCPKNWICYKNNCYQFFDESKNWYESQASCMSQNASLLKVYSKEDQDLLKLVKSAHWMGLVHIPTNGSWQWEDGSILSPNLLTIIEMQKGDCALYASSFKGFIENCSTPNTYICMQRTVGTGGGGSGGGGSGGGGSEFDIQMTQSPSSLSASVGDRVTITCKASDHINNWLAWYQQKPGQAPKLLIYGATTLETGVPSRFSGSGSGTDYTLTISSLQPEDFATYYCQQSWNTPWTFGQGTKLEIKRGGGGSGGGGSGGGGSQVQLQQPGAELVKPGASVKMSCKASGYAFSSYWINWMKQKPGQGLEWIGQIYPGDGDTNYNGKFKGRATLTADTSSSTAYMQLSSLTSEDSAVYFCARSITTVVGCAMDYWGQGTSVTVSSTREDLKNVFPPEVAVFEPSEAEISHTQKATLVCLATGFYPDHVELSWWVNGKEVHSGVSTDPQPLKEQPALNDSRYCLSSRLRVSATFWQNPRNHFRCQVQFYGLSENDEWTQDRAKPVTQIVSAEAWGRADDVIKIHWQEKKSNTILGSQEGNTMKTNDTYMKFSWLTVPEKSLDKEHRCIVRHENNKNGVDQEIIFPPIKTDVITMDPKDNCSKDANDTLLLQLTNTSAYYMYLLLLLKSVVYFAIITCCLLMAMVKRKDSRG

SEQ ID NO: 19087 - protein, 752 aa, synthetic construct
MALPVTALLLPLALLLHAARPLEIQNPDPAVYQLRDSKSSDKSVCLFTDFDSQTNVSQSKDSDVYITDKTVLDMRSMDFKSNSAVAWSNKSDFACANAFNNSIIPEDTFFPSPESSDSTDHVKPKETENTKQPSKSCHKPKAIVHTEKVNMMSLTVLGLRMLFAKTVAVNFLLTAKLFFLLTARAKRSGSGATNFSLLKQAGDVEENPGPTSMALPVTALLLPLALLLHAARPQSVLTQPPSVSGAPGQRVTISCTGSSSNIGAGYDVHWYQQLPGTAPKLLIFGNSNRPSGVPDRFSGFKSGTSASLAITGLQAEDEADYFCQSYDSSLSGSGVFGTGTKVTVLGGGGGSGGGGSGGGGSQMQLVQSGGGLVQPGRSLRLSCAASGFTFDDYAMHWVRQAPGKGLEWVSGISWNSGSIGYADSVKGRFTISRDNAKNSLYLQMNSLRAEDTALYYCAKDIHSGSYYGLLYYAMDVWGQGTTVTVSSTREDLKNVFPPEVAVFEPSEAEISHTQKATLVCLATGFYPDHVELSWWVNGKEVHSGVSTDPQPLKEQPALNDSRYCLSSRLRVSATFWQNPRNHFRCQVQFYGLSENDEWTQDRAKPVTQIVSAEAWGRADDVIKIHWQEKKSNTILGSQEGNTMKTNDTYMKFSWLTVPEKSLDKEHRCIVRHENNKNGVDQEIIFPPIKTDVITMDPKDNCSKDANDTLLLQLTNTSAYYMYLLLLLKSVVYFAIITCCLLMAMVKRKDSRG

SEQ ID NO: 19088 - protein, 589 aa, synthetic construct
MALPVTALLLPLALLLHAARPLEIQNPDPAVYQLRDSKSSDKSVCLFTDFDSQTNVSQSKDSDVYITDKTVLDMRSMDFKSNSAVAWSNKSDFACANAFNNSIIPEDTFFPSPESSDSTDHVKPKETENTKQPSKSCHKPKAIVHTEKVNMMSLTVLGLRMLFAKTVAVNFLLTAKLFFLLTARAKRSGSGATNFSLLKQAGDVEENPGPTSMALPVTALLLPLALLLHAARPMCMPCFTTDHQMARKCDDCCGGKGRGKCYGPQCLCRLEGGGGSGGGGSGGGGSFEVCMPCFTTDQQMARKCSDCCGGKGRGKCYGPQCLCRTREDLKNVFPPEVAVFEPSEAEISHTQKATLVCLATGFYPDHVELSWWVNGKEVHSGVSTDPQPLKEQPALNDSRYCLSSRLRVSATFWQNPRNHFRCQVQFYGLSENDEWTQDRAKPVTQIVSAEAWGRADDVIKIHWQEKKSNTILGSQEGNTMKTNDTYMKFSWLTVPEKSLDKEHRCIVRHENNKNGVDQEIIFPPIKTDVITMDPKDNCSKDANDTLLLQLTNTSAYYMYLLLLLKSVVYFAIITCCLLMAMVKRKDSRG

SEQ ID NO: 19089 - protein, 799 aa, synthetic construct
MALPVTALLLPLALLLHAARPLEIQNPDPAVYQLRDSKSSDKSVCLFTDFDSQTNVSQSKDSDVYITDKTVLDMRSMDFKSNSAVAWSNKSDFACANAFNNSIIPEDTFFPSPESSDSTDHVKPKETENTKQPSKSCHKPKAIVHTEKVNMMSLTVLGLRMLFAKTVAVNFLLTAKLFFLLTARAKRSGSGATNFSLLKQAGDVEENPGPTSMALPVTALLLPLALLLHAARPFEVCMPCFTTDQQMARKCSDCCGGKGRGKCYGPQCLCRGTGGGGSGGGGSGGGGSEFDIQMTQSPSSLSASVGDRVTITCKASDHINNWLAWYQQKPGQAPKLLIYGATTLETGVPSRFSGSGSGTDYTLTISSLQPEDFATYYCQQSWNTPWTFGQGTKLEIKRGGGGSGGGGSGGGGSQVQLQQPGAELVKPGASVKMSCKASGYAFSSYWINWMKQKPGQGLEWIGQIYPGDGDTNYNGKFKGRATLTADTSSSTAYMQLSSLTSEDSAVYFCARSITTVVGCAMDYWGQGTSVTVSSTREDLKNVFPPEVAVFEPSEAEISHTQKATLVCLATGFYPDHVELSWWVNGKEVHSGVSTDPQPLKEQPALNDSRYCLSSRLRVSATFWQNPRNHFRCQVQFYGLSENDEWTQDRAKPVTQIVSAEAWGRADDVIKIHWQEKKSNTILGSQEGNTMKTNDTYMKFSWLTVPEKSLDKEHRCIVRHENNKNGVDQEIIFPPIKTDVITMDPKDNCSKDANDTLLLQLTNTSAYYMYLLLLLKSVVYFAIITCCLLMAMVKRKDSRG

SEQ ID NO: 19090 - protein, 929 aa, synthetic construct
MALPVTALLLPLALLLHAARPLEIQNPDPAVYQLRDSKSSDKSVCLFTDFDSQTNVSQSKDSDVYITDKTVLDMRSMDFKSNSAVAWSNKSDFACANAFNNSIIPEDTFFPSPESSDSTDHVKPKETENTKQPSKSCHKPKAIVHTEKVNMMSLTVLGLRMLFAKTVAVNFLLTAKLFFLLTARAKRSGSGATNFSLLKQAGDVEENPGPTSMALPVTALLLPLALLLHAARPFESPVAPACDPRLLNKLLRDSHLLHSRLSQCPDVDPLSIPVLLPAVDFSLGEWKTQTEQSKAQDILGAVSLLLEGVMAARGQLEPSCLSSLLGQLSGQVRLLLGALQGLLGTQLPLQGRTTAHKDPNALFLSLQQLLRGKVRFLLLVEGPTLCVRRTLPTTAVPSSTSGTGGGGSGGGGSGGGGSEFDIQMTQSPSSLSASVGDRVTITCKASDHINNWLAWYQQKPGQAPKLLIYGATTLETGVPSRFSGSGSGTDYTLTISSLQPEDFATYYCQQSWNTPWTFGQGTKLEIKRGGGGSGGGGSGGGGSQVQLQQPGAELVKPGASVKMSCKASGYAFSSYWINWMKQKPGQGLEWIGQIYPGDGDTNYNGKFKGRATLTADTSSSTAYMQLSSLTSEDSAVYFCARSITTVVGCAMDYWGQGTSVTVSSTREDLKNVFPPEVAVFEPSEAEISHTQKATLVCLATGFYPDHVELSWWVNGKEVHSGVSTDPQPLKEQPALNDSRYCLSSRLRVSATFWQNPRNHFRCQVQFYGLSENDEWTQDRAKPVTQIVSAEAWGRADDVIKIHWQEKKSNTILGSQEGNTMKTNDTYMKFSWLTVPEKSLDKEHRCIVRHENNKNGVDQEIIFPPIKTDVITMDPKDNCSKDANDTLLLQLTNTSAYYMYLLLLLKSVVYFAIITCCLLMAMVKRKDSRG

SEQ ID NO: 19091 - protein, 836 aa, synthetic construct
MALPVTALLLPLALLLHAARPLEIQNPDPAVYQLRDSKSSDKSVCLFTDFDSQTNVSQSKDSDVYITDKTVLDMRSMDFKSNSAVAWSNKSDFACANAFNNSIIPEDTFFPSPESSDSTDHVKPKETENTKQPSKSCHKPKAIVHTEKVNMMSLTVLGLRMLFAKTVAVNFLLTAKLFFLLTARAKRSGSGATNFSLLKQAGDVEENPGPTSMALPVTALLLPLALLLHAARPFEMGSWEEFELRLNAIEERLYALGGSEAELAYFEYVIADFEGNLQRYKGKGNPEVEALYFEADAIFEELVAYRHNGTGGGGSGGGGSGGGGSEFDIQMTQSPSSLSASVGDRVTITCKASDHINNWLAWYQQKPGQAPKLLIYGATTLETGVPSRFSGSGSGTDYTLTISSLQPEDFATYYCQQSWNTPWTFGQGTKLEIKRGGGGSGGGGSGGGGSQVQLQQPGAELVKPGASVKMSCKASGYAFSSYWINWMKQKPGQGLEWIGQIYPGDGDTNYNGKFKGRATLTADTSSSTAYMQLSSLTSEDSAVYFCARSITTVVGCAMDYWGQGTSVTVSSTREDLKNVFPPEVAVFEPSEAEISHTQKATLVCLATGFYPDHVELSWWVNGKEVHSGVSTDPQPLKEQPALNDSRYCLSSRLRVSATFWQNPRNHFRCQVQFYGLSENDEWTQDRAKPVTQIVSAEAWGRADDVIKIHWQEKKSNTILGSQEGNTMKTNDTYMKFSWLTVPEKSLDKEHRCIVRHENNKNGVDQEIIFPPIKTDVITMDPKDNCSKDANDTLLLQLTNTSAYYMYLLLLLKSVVYFAIITCCLLMAMVKRKDSRG

SEQ ID NO: 19092 - protein, 972 aa, synthetic construct
MALPVTALLLPLALLLHAARPLEEEDLKNVFPPEVAVFEPSEAEISHTQKATLVCLATGFYPDHVELSWWVNGKEVHSGVCTDPQPLKEQPALNDSRYCLSSRLRVSATFWQNPRNHFRCQVQFYGLSENDEWTQDRAKPVTQIVSAEAWGRADDVIKIHWQEKKSNTILGSQEGNTMKTNDTYMKFSWLTVPEKSLDKEHRCIVRHENNKNGVDQEIIFPPIKTDVITMDPKDNCSKDANDTLLLQLTNTSAYYMYLLLLLKSVVYFAIITCCLLRRTAFCCNGEKSRAKRSGSGATNFSLLKQAGDVEENPGPTSMALPVTALLLPLALLLHAARPDIQMTQTTSSLSASLGDRVTISCRASQDISKYLNWYQQKPDGTVKLLIYHTSRLHSGVPSRFSGSGSGTDYSLTISNLEQEDIATYFCQQGNTLPYTFGGGTKLEITGGGGSGGGGSGGGGSEVKLQESGPGLVAPSQSLSVTCTVSGVSLPDYGVSWIRQPPRKGLEWLGVIWGSETTYYNSALKSRLTIIKDNSKSQVFLKMNSLQTDDTAIYYCAKHYYYGGSYAMDYWGQGTSVTVSSTRIQNPDPAVYQLRDSKSSDKSVCLFTDFDSQTNVSQSKDSDVYITDKCVLDMRSMDFKSNSAVAWSNKSDFACANAFNNSIIPEDTFFPSPESSDSTDHVKPKETENTKQPSKSCHKPKAIVHTEKVNMMSLTVLGLRMLFAKTVAVNFLLTAKLFFLRAKRSGSGVKQTLNFDLLKLAGDVESNPGPSRGHMTEYKPTVRLATRDDVPRAVRTLAAAFADYPATRHTVDPDRHIERVTELQELFLTRVGLDIGKVWVADDGAAVAVWTTPESVEAGAVFAEIGPRMAELSGSRLAAQQQMEGLLAPHRPKEPAWFLATVGVSPDHQGKGLGSAVVLPGVEAAERAGVPAFLETSAPRNLPFYERLGFTVTADVEVPEGPRTWCMTRKPGA

SEQ ID NO: 19093 - protein, 973 aa, synthetic construct
MALPVTALLLPLALLLHAARPLEEEDLKNVFPPEVAVFEPSEAEISHTQKATLVCLATGFYPDHVELSWWVNGKEVHSGVCTDPQPLKEQPALNDSRYCLSSRLRVSATFWQNPRNHFRCQVQFYGLSENDEWTQDRAKPVTQIVSAEAWGRADDVIKIHWQEKKSNTILGSQEGNTMKTNDTYMKFSWLTVPEKSLDKEHRCIVRHENNKNGVDQEIIFPPIKTDVITMDPKDNCSKDANDTLLLQLTNTSAYYMYLLLLLKSVVYFAIITCCLLRRTAFCCNGEKSRAKRSGSGATNFSLLKQAGDVEENPGPTSTMALPVTALLLPLALLLHAARPEIVMTQSPATLSLSPGERATLSCRASQDISKYLNWYQQKPGQAPRLLIYHTSRLHSGIPARFSGSGSGTDYTLTISSLQPEDFAVYFCQQGNTLPYTFGQGTKLEIKGGGGSGGGGSGGGGSQVQLQESGPGLVKPSETLSLTCTVSGVSLPDYGVSWIRQPPGKGLEWIGVIWGSETTYYNSSLKSRVTISKDNSKNQVSLKLSSVTAADTAVYYCAKHYYYGGSYAMDYWGQGTLVTVSSTRIQNPDPAVYQLRDSKSSDKSVCLFTDFDSQTNVSQSKDSDVYITDKCVLDMRSMDFKSNSAVAWSNKSDFACANAFNNSIIPEDTFFPSPESSDSTDHVKPKETENTKQPSKSCHKPKAIVHTEKVNMMSLTVLGLRMLFAKTVAVNFLLTAKLFFLRAKRSGSGVKQTLNFDLLKLAGDVESNPGPSRGHMTEYKPTVRLATRDDVPRAVRTLAAAFADYPATRHTVDPDRHIERVTELQELFLTRVGLDIGKVWVADDGAAVAVWTTPESVEAGAVFAEIGPRMAELSGSRLAAQQQMEGLLAPHRPKEPAWFLATVGVSPDHQGKGLGSAVVLPGVEAAERAGVPAFLETSAPRNLPFYERLGFTVTADVEVPEGPRTWCMTRKPGA

SEQ ID NO: 19094 - protein, 974 aa, synthetic construct
MALPVTALLLPLALLLHAARPLEEEDLKNVFPPEVAVFEPSEAEISHTQKATLVCLATGFYPDHVELSWWVNGKEVHSGVCTDPQPLKEQPALNDSRYCLSSRLRVSATFWQNPRNHFRCQVQFYGLSENDEWTQDRAKPVTQIVSAEAWGRADDVIKIHWQEKKSNTILGSQEGNTMKTNDTYMKFSWLTVPEKSLDKEHRCIVRHENNKNGVDQEIIFPPIKTDVITMDPKDNCSKDANDTLLLQLTNTSAYYMYLLLLLKSVVYFAIITCCLLRRTAFCCNGEKSRAKRSGSGATNFSLLKQAGDVEENPGPTSTMALPVTALLLPLALLLHAARPDEIVLTQSPATLSLSPGERATLSCSASSSVSYMHWYQQKPGQAPRLLIYDTSKLASGIPARFSGSGSGTDFTLTISSLEPEDVAVYYCFQGSVYPFTFGQGTKLEIKRGGGGSGGGGSGGGGSQVQLQESGPGLVKPSQTLSLTCTVSGGSISTSGMGVGWIRQHPGKGLEWIGHIWWDDDKRYNPALKSRVTISVDTSKNQFSLKLSSVTAADTAVYYCARMELWSYYFDYWGQGTLVTVSSTRIQNPDPAVYQLRDSKSSDKSVCLFTDFDSQTNVSQSKDSDVYITDKCVLDMRSMDFKSNSAVAWSNKSDFACANAFNNSIIPEDTFFPSPESSDSTDHVKPKETENTKQPSKSCHKPKAIVHTEKVNMMSLTVLGLRMLFAKTVAVNFLLTAKLFFLRAKRSGSGVKQTLNFDLLKLAGDVESNPGPSRGHMTEYKPTVRLATRDDVPRAVRTLAAAFADYPATRHTVDPDRHIERVTELQELFLTRVGLDIGKVWVADDGAAVAVWTTPESVEAGAVFAEIGPRMAELSGSRLAAQQQMEGLLAPHRPKEPAWFLATVGVSPDHQGKGLGSAVVLPGVEAAERAGVPAFLETSAPRNLPFYERLGFTVTADVEVPEGPRTWCMTRKPGA

SEQ ID NO: 19095 - protein, 970 aa, synthetic construct
MALPVTALLLPLALLLHAARPLEEEDLKNVFPPEVAVFEPSEAEISHTQKATLVCLATGFYPDHVELSWWVNGKEVHSGVCTDPQPLKEQPALNDSRYCLSSRLRVSATFWQNPRNHFRCQVQFYGLSENDEWTQDRAKPVTQIVSAEAWGRADDVIKIHWQEKKSNTILGSQEGNTMKTNDTYMKFSWLTVPEKSLDKEHRCIVRHENNKNGVDQEIIFPPIKTDVITMDPKDNCSKDANDTLLLQLTNTSAYYMYLLLLLKSVVYFAIITCCLLRRTAFCCNGEKSRAKRSGSGATNFSLLKQAGDVEENPGPTSMALPVTALLLPLALLLHAARPDIQMTQSPSSLSASVGDRVTITCRASQDISNYLNWYQQKPGKAPKLLIYYTSRLHSGVPSRFSGSGSGTDFTLTISSLQPEDFATYYCQQGNTLPYTFGQGTKVEIKRGGGGSGGGGSGGGGSEVQLVESGGGLVQPGGSLRLSCAASGFTFSDYFMSWVRQAPGKGLEWVATISNGGTYTYYPDSVKGRFTISRDNSKNTLYLQMNSLRAEDTAVYYCARFDGYIFDYWGQGTLVTVSSTRIQNPDPAVYQLRDSKSSDKSVCLFTDFDSQTNVSQSKDSDVYITDKCVLDMRSMDFKSNSAVAWSNKSDFACANAFNNSIIPEDTFFPSPESSDSTDHVKPKETENTKQPSKSCHKPKAIVHTEKVNMMSLTVLGLRMLFAKTVAVNFLLTAKLFFLRAKRSGSGVKQTLNFDLLKLAGDVESNPGPSRGHMTEYKPTVRLATRDDVPRAVRTLAAAFADYPATRHTVDPDRHIERVTELQELFLTRVGLDIGKVWVADDGAAVAVWTTPESVEAGAVFAEIGPRMAELSGSRLAAQQQMEGLLAPHRPKEPAWFLATVGVSPDHQGKGLGSAVVLPGVEAAERAGVPAFLETSAPRNLPFYERLGFTVTADVEVPEGPRTWCMTRKPGA

SEQ ID NO: 19096 - protein, 974 aa, synthetic construct
MALPVTALLLPLALLLHAARPLEEEDLKNVFPPEVAVFEPSEAEISHTQKATLVCLATGFYPDHVELSWWVNGKEVHSGVCTDPQPLKEQPALNDSRYCLSSRLRVSATFWQNPRNHFRCQVQFYGLSENDEWTQDRAKPVTQIVSAEAWGRADDVIKIHWQEKKSNTILGSQEGNTMKTNDTYMKFSWLTVPEKSLDKEHRCIVRHENNKNGVDQEIIFPPIKTDVITMDPKDNCSKDANDTLLLQLTNTSAYYMYLLLLLKSVVYFAIITCCLLRRTAFCCNGEKSRAKRSGSGATNFSLLKQAGDVEENPGPTSMALPVTALLLPLALLLHAARPDIQMTQSPSSLSASVGDRVTITCKASDHINNWLAWYQQKPGQAPKLLIYGATTLETGVPSRFSGSGSGTDYTLTISSLQPEDFATYYCQQSWNTPWTFGQGTKLEIKRGGGGSGGGGSGGGGSQVQLQQPGAELVKPGASVKMSCKASGYAFSSYWINWMKQKPGQGLEWIGQIYPGDGDTNYNGKFKGRATLTADTSSSTAYMQLSSLTSEDSAVYFCARSITTVVGCAMDYWGQGTSVTVSSTRIQNPDPAVYQLRDSKSSDKSVCLFTDFDSQTNVSQSKDSDVYITDKCVLDMRSMDFKSNSAVAWSNKSDFACANAFNNSIIPEDTFFPSPESSDSTDHVKPKETENTKQPSKSCHKPKAIVHTEKVNMMSLTVLGLRMLFAKTVAVNFLLTAKLFFLRAKRSGSGVKQTLNFDLLKLAGDVESNPGPSRGHMTEYKPTVRLATRDDVPRAVRTLAAAFADYPATRHTVDPDRHIERVTELQELFLTRVGLDIGKVWVADDGAAVAVWTTPESVEAGAVFAEIGPRMAELSGSRLAAQQQMEGLLAPHRPKEPAWFLATVGVSPDHQGKGLGSAVVLPGVEAAERAGVPAFLETSAPRNLPFYERLGFTVTADVEVPEGPRTWCMTRKPGA

SEQ ID NO: 19097 - protein, 976 aa, synthetic construct
MALPVTALLLPLALLLHAARPLEEEDLKNVFPPEVAVFEPSEAEISHTQKATLVCLATGFYPDHVELSWWVNGKEVHSGVCTDPQPLKEQPALNDSRYCLSSRLRVSATFWQNPRNHFRCQVQFYGLSENDEWTQDRAKPVTQIVSAEAWGRADDVIKIHWQEKKSNTILGSQEGNTMKTNDTYMKFSWLTVPEKSLDKEHRCIVRHENNKNGVDQEIIFPPIKTDVITMDPKDNCSKDANDTLLLQLTNTSAYYMYLLLLLKSVVYFAIITCCLLRRTAFCCNGEKSRAKRSGSGATNFSLLKQAGDVEENPGPTSMALPVTALLLPLALLLHAARPQIVLSQSPAILSASPGEKVTMTCRASSSVSYMHWYQQKPGSSPKPWIYATSNLASGVPARFSGSGSGTSYSFTISRVEAEDAATYYCQQWTFNPPTFGGGTRLEIKRTVAAGGGGSGGGGSGGGGSQAYLQQSGAELVRPGASVKMSCKASGYTFTSYNMHWVKQTPRQGLEWIGGIYPGNGDTSYNQKFKGKATLTVGKSSSTAYMQLSSLTSEDSAVYFCARYDYNYAMDYWGQGTSVTVSSASTRIQNPDPAVYQLRDSKSSDKSVCLFTDFDSQTNVSQSKDSDVYITDKCVLDMRSMDFKSNSAVAWSNKSDFACANAFNNSIIPEDTFFPSPESSDSTDHVKPKETENTKQPSKSCHKPKAIVHTEKVNMMSLTVLGLRMLFAKTVAVNFLLTAKLFFLRAKRSGSGVKQTLNFDLLKLAGDVESNPGPSRGHMTEYKPTVRLATRDDVPRAVRTLAAAFADYPATRHTVDPDRHIERVTELQELFLTRVGLDIGKVWVADDGAAVAVWTTPESVEAGAVFAEIGPRMAELSGSRLAAQQQMEGLLAPHRPKEPAWFLATVGVSPDHQGKGLGSAVVLPGVEAAERAGVPAFLETSAPRNLPFYERLGFTVTADVEVPEGPRTWCMTRKPGA

SEQ ID NO: 19098 - protein, 974 aa, synthetic construct
MALPVTALLLPLALLLHAARPLEEEDLKNVFPPEVAVFEPSEAEISHTQKATLVCLATGFYPDHVELSWWVNGKEVHSGVCTDPQPLKEQPALNDSRYCLSSRLRVSATFWQNPRNHFRCQVQFYGLSENDEWTQDRAKPVTQIVSAEAWGRADDVIKIHWQEKKSNTILGSQEGNTMKTNDTYMKFSWLTVPEKSLDKEHRCIVRHENNKNGVDQEIIFPPIKTDVITMDPKDNCSKDANDTLLLQLTNTSAYYMYLLLLLKSVVYFAIITCCLLRRTAFCCNGEKSRAKRSGSGATNFSLLKQAGDVEENPGPTSMALPVTALLLPLALLLHAARPEIVLTQSPATLSLSPGERATLSCRASQSVSSYLAWYQQKPGQAPRLLIYDASNRATGIPARFSGSGSGTDFTLTISSLEPEDFAVYYCQQRSNWPITFGQGTRLEIKGGGGSGGGGSGGGGSEVQLVESGGGLVQPDRSLRLSCAASGFTFHDYAMHWVRQAPGKGLEWVSTISWNSGTIGYADSVKGRFTISRDNAKNSLYLQMNSLRAEDTALYYCAKDIQYGNYYYGMDVWGQGTTVTVSSTRIQNPDPAVYQLRDSKSSDKSVCLFTDFDSQTNVSQSKDSDVYITDKCVLDMRSMDFKSNSAVAWSNKSDFACANAFNNSIIPEDTFFPSPESSDSTDHVKPKETENTKQPSKSCHKPKAIVHTEKVNMMSLTVLGLRMLFAKTVAVNFLLTAKLFFLRAKRSGSGVKQTLNFDLLKLAGDVESNPGPSRGHMTEYKPTVRLATRDDVPRAVRTLAAAFADYPATRHTVDPDRHIERVTELQELFLTRVGLDIGKVWVADDGAAVAVWTTPESVEAGAVFAEIGPRMAELSGSRLAAQQQMEGLLAPHRPKEPAWFLATVGVSPDHQGKGLGSAVVLPGVEAAERAGVPAFLETSAPRNLPFYERLGFTVTADVEVPEGPRTWCMTRKPGA

SEQ ID NO: 19099 - protein, 972 aa, synthetic construct
MALPVTALLLPLALLLHAARPLEEEDLKNVFPPEVAVFEPSEAEISHTQKATLVCLATGFYPDHVELSWWVNGKEVHSGVCTDPQPLKEQPALNDSRYCLSSRLRVSATFWQNPRNHFRCQVQFYGLSENDEWTQDRAKPVTQIVSAEAWGRADDVIKIHWQEKKSNTILGSQEGNTMKTNDTYMKFSWLTVPEKSLDKEHRCIVRHENNKNGVDQEIIFPPIKTDVITMDPKDNCSKDANDTLLLQLTNTSAYYMYLLLLLKSVVYFAIITCCLLRRTAFCCNGEKSRAKRSGSGATNFSLLKQAGDVEENPGPTSMALPVTALLLPLALLLHAARPDIQMTQSPSSLSASVGDRVTITCRASQDVNTAVAWYQQKPGKAPKLLIYSASFLESGVPSRFSGSRSGTDFTLTISSLQPEDFATYYCQQHYTTPPTFGQTKVEIKRGGGGSGGGGSGGGGSEVQLVESGGGLVQPGGSLRLSCAASGFNIKDTYIHWVRQAPGKGLEWVARIYPTNGYTRYADSVKGRFTISADTSKNTAYLQMNSLRAEDTAVYYCSRWGGDGFYAMDVWGQGTLVTVSSTRIQNPDPAVYQLRDSKSSDKSVCLFTDFDSQTNVSQSKDSDVYITDKCVLDMRSMDFKSNSAVAWSNKSDFACANAFNNSIIPEDTFFPSPESSDSTDHVKPKETENTKQPSKSCHKPKAIVHTEKVNMMSLTVLGLRMLFAKTVAVNFLLTAKLFFLRAKRSGSGVKQTLNFDLLKLAGDVESNPGPSRGHMTEYKPTVRLATRDDVPRAVRTLAAAFADYPATRHTVDPDRHIERVTELQELFLTRVGLDIGKVWVADDGAAVAVWTTPESVEAGAVFAEIGPRMAELSGSRLAAQQQMEGLLAPHRPKEPAWFLATVGVSPDHQGKGLGSAVVLPGVEAAERAGVPAFLETSAPRNLPFYERLGFTVTADVEVPEGPRTWCMTRKPGA

SEQ ID NO: 19100 - protein, 851 aa, synthetic construct
MALPVTALLLPLALLLHAARPLEEEDLKNVFPPEVAVFEPSEAEISHTQKATLVCLATGFYPDHVELSWWVNGKEVHSGVCTDPQPLKEQPALNDSRYCLSSRLRVSATFWQNPRNHFRCQVQFYGLSENDEWTQDRAKPVTQIVSAEAWGRADDVIKIHWQEKKSNTILGSQEGNTMKTNDTYMKFSWLTVPEKSLDKEHRCIVRHENNKNGVDQEIIFPPIKTDVITMDPKDNCSKDANDTLLLQLTNTSAYYMYLLLLLKSVVYFAIITCCLLRRTAFCCNGEKSRAKRSGSGATNFSLLKQAGDVEENPGPTSMALPVTALLLPLALLLHAARPDEFEVQLVESGGGLVQAGGSLRLSCAASGITFSINTMGWYRQAPGKQRELVALISSIGDTYYADSVKGRFTISRDNAKNTVYLQMNSLKPEDTAVYYCKRFRTAAQGTDYWGQGTQVTVSSTRIQNPDPAVYQLRDSKSSDKSVCLFTDFDSQTNVSQSKDSDVYITDKCVLDMRSMDFKSNSAVAWSNKSDFACANAFNNSIIPEDTFFPSPESSDSTDHVKPKETENTKQPSKSCHKPKAIVHTEKVNMMSLTVLGLRMLFAKTVAVNFLLTAKLFFLRAKRSGSGVKQTLNFDLLKLAGDVESNPGPSRGHMTEYKPTVRLATRDDVPRAVRTLAAAFADYPATRHTVDPDRHIERVTELQELFLTRVGLDIGKVWVADDGAAVAVWTTPESVEAGAVFAEIGPRMAELSGSRLAAQQQMEGLLAPHRPKEPAWFLATVGVSPDHQGKGLGSAVVLPGVEAAERAGVPAFLETSAPRNLPFYERLGFTVTADVEVPEGPRTWCMTRKPGA

SEQ ID NO: 19101 - protein, 851 aa, synthetic construct; identical to SEQ ID NO: 19100

SEQ ID NO: 19102 - protein, 1116 aa, synthetic construct
MALPVTALLLPLALLLHAARPLEEEDLKNVFPPEVAVFEPSEAEISHTQKATLVCLATGFYPDHVELSWWVNGKEVHSGVCTDPQPLKEQPALNDSRYCLSSRLRVSATFWQNPRNHFRCQVQFYGLSENDEWTQDRAKPVTQIVSAEAWGRADDVIKIHWQEKKSNTILGSQEGNTMKTNDTYMKFSWLTVPEKSLDKEHRCIVRHENNKNGVDQEIIFPPIKTDVITMDPKDNCSKDANDTLLLQLTNTSAYYMYLLLLLKSVVYFAIITCCLLRRTAFCCNGEKSRAKRSGSGATNFSLLKQAGDVEENPGPTSMALPVTALLLPLALLLHAARPQVQLVESGGGLVQAGDSVTLSCTASGRTFSSYALAWFRQRPGKEREFVAGLRWGGPTNYADSVKDRFTISGDSAKHTMYLQMNSLKPEDTAVYYCGYNPGGWAVPSQYEYDSWGQGTQVTVSSGTGGGGSGGGGSGGGGSEFDIQMTQSPSSLSASVGDRVTITCKASDHINNWLAWYQQKPGQAPKLLIYGATTLETGVPSRFSGSGSGTDYTLTISSLQPEDFATYYCQQSWNTPWTFGQGTKLEIKRGGGGSGGGGSGGGGSQVQLQQPGAELVKPGASVKMSCKASGYAFSSYWINWMKQKPGQGLEWIGQIYPGDGDTNYNGKFKGRATLTADTSSSTAYMQLSSLTSEDSAVYFCARSITTVVGCAMDYWGQGTSVTVSSTRIQNPDPAVYQLRDSKSSDKSVCLFTDFDSQTNVSQSKDSDVYITDKCVLDMRSMDFKSNSAVAWSNKSDFACANAFNNSIIPEDTFFPSPESSDSTDHVKPKETENTKQPSKSCHKPKAIVHTEKVNMMSLTVLGLRMLFAKTVAVNFLLTAKLFFLRAKRSGSGVKQTLNFDLLKLAGDVESNPGPSRGHMTEYKPTVRLATRDDVPRAVRTLAAAFADYPATRHTVDPDRHIERVTELQELFLTRVGLDIGKVWVADDGAAVAVWTTPESVEAGAVFAEIGPRMAELSGSRLAAQQQMEGLLAPHRPKEPAWFLATVGVSPDHQGKGLGSAVVLPGVEAAERAGVPAFLETSAPRNLPFYERLGFTVTADVEVPEGPRTWCMTRKPGA

SEQ ID NO: 19103 - protein, 1245 aa, synthetic construct
MALPVTALLLPLALLLHAARPLEEEDLKNVFPPEVAVFEPSEAEISHTQKATLVCLATGFYPDHVELSWWVNGKEVHSGVCTDPQPLKEQPALNDSRYCLSSRLRVSATFWQNPRNHFRCQVQFYGLSENDEWTQDRAKPVTQIVSAEAWGRADDVIKIHWQEKKSNTILGSQEGNTMKTNDTYMKFSWLTVPEKSLDKEHRCIVRHENNKNGVDQEIIFPPIKTDVITMDPKDNCSKDANDTLLLQLTNTSAYYMYLLLLLKSVVYFAIITCCLLRRTAFCCNGEKSRAKRSGSGATNFSLLKQAGDVEENPGPTSMALPVTALLLPLALLLHAARPEVQLLESGGGLVQPGGSLRLSCAASGFTFSSYAMSWVRQAPGKGLEWVSSISGSGDYIYYADSVKGRFTISRDISKNTLYLQMNSLRAEDTAVYYCAKEGTGANSSLADYRGQGTLVTVSSGGGSGGGSQVQLVESGGGLVQAGDSVTLSCTASGRTFSSYALAWFRQRPGKEREFVAGLRWGGPTNYADSVKDRFTISGDSAKHTMYLQMNSLKPEDTAVYYCGYNPGGWAVPSQYEYDSWGQGTQVTVSSGTGGGGSGGGGSGGGGSEFDIQMTQSPSSLSASVGDRVTITCKASDHINNWLAWYQQKPGQAPKLLIYGATTLETGVPSRFSGSGSGTDYTLTISSLQPEDFATYYCQQSWNTPWTFGQGTKLEIKRGGGGSGGGGSGGGGSQVQLQQPGAELVKPGASVKMSCKASGYAFSSYWINWMKQKPGQGLEWIGQIYPGDGDTNYNGKFKGRATLTADTSSSTAYMQLSSLTSEDSAVYFCARSITTVVGCAMDYWGQGTSVTVSSTRIQNPDPAVYQLRDSKSSDKSVCLFTDFDSQTNVSQSKDSDVYITDKCVLDMRSMDFKSNSAVAWSNKSDFACANAFNNSIIPEDTFFPSPESSDSTDHVKPKETENTKQPSKSCHKPKAIVHTEKVNMMSLTVLGLRMLFAKTVAVNFLLTAKLFFLRAKRSGSGVKQTLNFDLLKLAGDVESNPGPSRGHMTEYKPTVRLATRDDVPRAVRTLAAAFADYPATRHTVDPDRHIERVTELQELFLTRVGLDIGKVWVADDGAAVAVWTTPESVEAGAVFAEIGPRMAELSGSRLAAQQQMEGLLAPHRPKEPAWFLATVGVSPDHQGKGLGSAVVLPGVEAAERAGVPAFLETSAPRNLPFYERLGFTVTADVEVPEGPRTWCMTRKPGA

SEQ ID NO: 19104 - protein, 1243 aa, synthetic construct
MALPVTALLLPLALLLHAARPLEEEDLKNVFPPEVAVFEPSEAEISHTQKATLVCLATGFYPDHVELSWWVNGKEVHSGVCTDPQPLKEQPALNDSRYCLSSRLRVSATFWQNPRNHFRCQVQFYGLSENDEWTQDRAKPVTQIVSAEAWGRADDVIKIHWQEKKSNTILGSQEGNTMKTNDTYMKFSWLTVPEKSLDKEHRCIVRHENNKNGVDQEIIFPPIKTDVITMDPKDNCSKDANDTLLLQLTNTSAYYMYLLLLLKSVVYFAIITCCLLRRTAFCCNGEKSRAKRSGSGATNFSLLKQAGDVEENPGPTSMALPVTALLLPLALLLHAARPGVTQSPTHLIKTRGQQATLRCSPISGHTSVYWYQQALGLGLQFLLWYDEGEERNRGNFPPRFSGRQFPNYSSELNVNALELEDSALYLCASSLGGPRGLAGLRGDEQFFGPGTRLTVLEGGGSGGGSQVQLVESGGGLVQAGDSVTLSCTASGRTFSSYALAWFRQRPGKEREFVAGLRWGGPTNYADSVKDRFTISGDSAKHTMYLQMNSLKPEDTAVYYCGYNPGGWAVPSQYEYDSWGQGTQVTVSSGTGGGGSGGGGSGGGGSEFDIQMTQSPSSLSASVGDRVTITCKASDHINNWLAWYQQKPGQAPKLLIYGATTLETGVPSRFSGSGSGTDYTLTISSLQPEDFATYYCQQSWNTPWTFGQGTKLEIKRGGGGSGGGGSGGGGSQVQLQQPGAELVKPGASVKMSCKASGYAFSSYWINWMKQKPGQGLEWIGQIYPGDGDTNYNGKFKGRATLTADTSSSTAYMQLSSLTSEDSAVYFCARSITTVVGCAMDYWGQGTSVTVSSTRIQNPDPAVYQLRDSKSSDKSVCLFTDFDSQTNVSQSKDSDVYITDKCVLDMRSMDFKSNSAVAWSNKSDFACANAFNNSIIPEDTFFPSPESSDSTDHVKPKETENTKQPSKSCHKPKAIVHTEKVNMMSLTVLGLRMLFAKTVAVNFLLTAKLFFLRAKRSGSGVKQTLNFDLLKLAGDVESNPGPSRGHMTEYKPTVRLATRDDVPRAVRTLAAAFADYPATRHTVDPDRHIERVTELQELFLTRVGLDIGKVWVADDGAAVAVWTTPESVEAGAVFAEIGPRMAELSGSRLAAQQQMEGLLAPHRPKEPAWFLATVGVSPDHQGKGLGSAVVLPGVEAAERAGVPAFLETSAPRNLPFYERLGFTVTADVEVPEGPRTWCMTRKPGA

SEQ ID NO: 19105 - protein, 1237 aa, synthetic construct
MALPVTALLLPLALLLHAARPLEEEDLKNVFPPEVAVFEPSEAEISHTQKATLVCLATGFYPDHVELSWWVNGKEVHSGVCTDPQPLKEQPALNDSRYCLSSRLRVSATFWQNPRNHFRCQVQFYGLSENDEWTQDRAKPVTQIVSAEAWGRADDVIKIHWQEKKSNTILGSQEGNTMKTNDTYMKFSWLTVPEKSLDKEHRCIVRHENNKNGVDQEIIFPPIKTDVITMDPKDNCSKDANDTLLLQLTNTSAYYMYLLLLLKSVVYFAIITCCLLRRTAFCCNGEKSRAKRSGSGATNFSLLKQAGDVEENPGPTSMALPVTALLLPLALLLHAARPGVTQSPTHLIKTRGQQATLRCSPISGHTSVYWYQQALGLGLQFLLWYDEGEERNRGNFPPRFSGRQFPNYSSELNVNALELEDSALYLCASSLGGPRGLAGLRGDEQFFGPGTRLTVLEGGGSGGGSGVTQSPTHLIKTRGQQATLRCSPISGHTSVYWYQQALGLGLQFLLWYDEGEERNRGNFPPRFSGRQFPNYSSELNVNALELEDSALYLCASSLGGDELGADGNEQFFGPGTRLTVLEGTGGGGSGGGGSGGGGSEFDIQMTQSPSSLSASVGDRVTITCKASDHINNWLAWYQQKPGQAPKLLIYGATTLETGVPSRFSGSGSGTDYTLTISSLQPEDFATYYCQQSWNTPWTFGQGTKLEIKRGGGGSGGGGSGGGGSQVQLQQPGAELVKPGASVKMSCKASGYAFSSYWINWMKQKPGQGLEWIGQIYPGDGDTNYNGKFKGRATLTADTSSSTAYMQLSSLTSEDSAVYFCARSITTVVGCAMDYWGQGTSVTVSSTRIQNPDPAVYQLRDSKSSDKSVCLFTDFDSQTNVSQSKDSDVYITDKCVLDMRSMDFKSNSAVAWSNKSDFACANAFNNSIIPEDTFFPSPESSDSTDHVKPKETENTKQPSKSCHKPKAIVHTEKVNMMSLTVLGLRMLFAKTVAVNFLLTAKLFFLRAKRSGSGVKQTLNFDLLKLAGDVESNPGPSRGHMTEYKPTVRLATRDDVPRAVRTLAAAFADYPATRHTVDPDRHIERVTELQELFLTRVGLDIGKVWVADDGAAVAVWTTPESVEAGAVFAEIGPRMAELSGSRLAAQQQMEGLLAPHRPKEPAWFLATVGVSPDHQGKGLGSAVVLPGVEAAERAGVPAFLETSAPRNLPFYERLGFTVTADVEVPEGPRTWCMTRKPGA

SEQ ID NO: 19106 - protein, 857 aa, synthetic construct
MALPVTALLLPLALLLHAARPLEEEDLKNVFPPEVAVFEPSEAEISHTQKATLVCLATGFYPDHVELSWWVNGKEVHSGVCTDPQPLKEQPALNDSRYCLSSRLRVSATFWQNPRNHFRCQVQFYGLSENDEWTQDRAKPVTQIVSAEAWGRADDVIKIHWQEKKSNTILGSQEGNTMKTNDTYMKFSWLTVPEKSLDKEHRCIVRHENNKNGVDQEIIFPPIKTDVITMDPKDNCSKDANDTLLLQLTNTSAYYMYLLLLLKSVVYFAIITCCLLRRTAFCCNGEKSRAKRSGSGATNFSLLKQAGDVEENPGPTSMALPVTALLLPLALLLHAARPDEFGSDLGIKLLFAAAKGQDDEVRILLAAGADVNAKDFEGYTPLHVAAYDGHLEIVEVLLKAGADVNAKDSQGRTPLHEAAYSGHLEIVEVLLKAGADVNAQDDAGETPADLAAAWGHEDIAEVLQKTRIQNPDPAVYQLRDSKSSDKSVCLFTDFDSQTNVSQSKDSDVYITDKCVLDMRSMDFKSNSAVAWSNKSDFACANAFNNSIIPEDTFFPSPESSDSTDHVKPKETENTKQPSKSCHKPKAIVHTEKVNMMSLTVLGLRMLFAKTVAVNFLLTAKLFFLRAKRSGSGVKQTLNFDLLKLAGDVESNPGPSRGHMTEYKPTVRLATRDDVPRAVRTLAAAFADYPATRHTVDPDRHIERVTELQELFLTRVGLDIGKVWVADDGAAVAVWTTPESVEAGAVFAEIGPRMAELSGSRLAAQQQMEGLLAPHRPKEPAWFLATVGVSPDHQGKGLGSAVVLPGVEAAERAGVPAFLETSAPRNLPFYERLGFTVTADVEVPEGPRTWCMTRKPGA

SEQ ID NO: 19107 - protein, 786 aa, synthetic construct
MALPVTALLLPLALLLHAARPLEEEDLKNVFPPEVAVFEPSEAEISHTQKATLVCLATGFYPDHVELSWWVNGKEVHSGVCTDPQPLKEQPALNDSRYCLSSRLRVSATFWQNPRNHFRCQVQFYGLSENDEWTQDRAKPVTQIVSAEAWGRADDVIKIHWQEKKSNTILGSQEGNTMKTNDTYMKFSWLTVPEKSLDKEHRCIVRHENNKNGVDQEIIFPPIKTDVITMDPKDNCSKDANDTLLLQLTNTSAYYMYLLLLLKSVVYFAIITCCLLRRTAFCCNGEKSRAKRSGSGATNFSLLKQAGDVEENPGPTSMDWIWRILFLVGAATGAHSFEGSGFEYAKEMRNAYWEIALLPNLTNQQKRAPIRKLYDDPSQSSELLSEAKKLNDSQTRIQNPDPAVYQLRDSKSSDKSVCLFTDFDSQTNVSQSKDSDVYITDKCVLDMRSMDFKSNSAVAWSNKSDFACANAFNNSIIPEDTFFPSPESSDSTDHVKPKETENTKQPSKSCHKPKAIVHTEKVNMMSLTVLGLRMLFAKTVAVNFLLTAKLFFLRAKRSGSGVKQTLNFDLLKLAGDVESNPGPSRGHMTEYKPTVRLATRDDVPRAVRTLAAAFADYPATRHTVDPDRHIERVTELQELFLTRVGLDIGKVWVADDGAAVAVWTTPESVEAGAVFAEIGPRMAELSGSRLAAQQQMEGLLAPHRPKEPAWFLATVGVSPDHQGKGLGSAVVLPGVEAAERAGVPAFLETSAPRNLPFYERLGFTVTADVEVPEGPRTWCMTRKPGA

SEQ ID NO: 19108 - protein, 1008 aa, synthetic construct
MALPVTALLLPLALLLHAARPLEEEDLKNVFPPEVAVFEPSEAEISHTQKATLVCLATGFYPDHVELSWWVNGKEVHSGVCTDPQPLKEQPALNDSRYCLSSRLRVSATFWQNPRNHFRCQVQFYGLSENDEWTQDRAKPVTQIVSAEAWGRADDVIKIHWQEKKSNTILGSQEGNTMKTNDTYMKFSWLTVPEKSLDKEHRCIVRHENNKNGVDQEIIFPPIKTDVITMDPKDNCSKDANDTLLLQLTNTSAYYMYLLLLLKSVVYFAIITCCLLRRTAFCCNGEKSRAKRSGSGATNFSLLKQAGDVEENPGPTSMALPVTALLLPLALLLHAARPDEFEVQLVESGGGLVQAGGSLRLSCAASGITFSINTMGWYRQAPGKQRELVALISSIGDTYYADSVKGRFTISRDNAKNTVYLQMNSLKPEDTAVYYCKRFRTAAQGTDYWGQGTQVTVSSLEGGGGSGGGGSGGGGSGSGGSGSGGSGSGGSGSGGSFEVQLVESGGGLVQPGGSLRLSCAASGSIFGFNDMAWYRQAPGKQRELVALISRVGVTSSADSVKGRFTISRVNAKDTVYLQMNSLKPEDTAVYYCYMDQRLDGSTLAYWGQGTQVTVSSTRIQNPDPAVYQLRDSKSSDKSVCLFTDFDSQTNVSQSKDSDVYITDKCVLDMRSMDFKSNSAVAWSNKSDFACANAFNNSIIPEDTFFPSPESSDSTDHVKPKETENTKQPSKSCHKPKAIVHTEKVNMMSLTVLGLRMLFAKTVAVNFLLTAKLFFLRAKRSGSGVKQTLNFDLLKLAGDVESNPGPSRGHMTEYKPTVRLATRDDVPRAVRTLAAAFADYPATRHTVDPDRHIERVTELQELFLTRVGLDIGKVWVADDGAAVAVWTTPESVEAGAVFAEIGPRMAELSGSRLAAQQQMEGLLAPHRPKEPAWFLATVGVSPDHQGKGLGSAVVLPGVEAAERAGVPAFLETSAPRNLPFYERLGFTVTADVEVPEGPRTWCMTRKPGA

SEQ ID NO: 19109 - protein, 922 aa, synthetic construct
MALPVTALLLPLALLLHAARPLEEEDLKNVFPPEVAVFEPSEAEISHTQKATLVCLATGFYPDHVELSWWVNGKEVHSGVCTDPQPLKEQPALNDSRYCLSSRLRVSATFWQNPRNHFRCQVQFYGLSENDEWTQDRAKPVTQIVSAEAWGRADDVIKIHWQEKKSNTILGSQEGNTMKTNDTYMKFSWLTVPEKSLDKEHRCIVRHENNKNGVDQEIIFPPIKTDVITMDPKDNCSKDANDTLLLQLTNTSAYYMYLLLLLKSVVYFAIITCCLLRRTAFCCNGEKSRAKRSGSGATNFSLLKQAGDVEENPGPTSMALPVTALLLPLALLLHAARPGMRTEDLPKAVVFLEPQWYRVLEKDSVTLKCQGAYSPEDNSTQWFHNESLISSQASSYFIDAATVDDSGEYRCQTNLSTLSDPVQLEVHIGWLLLQAPRWVFKEEDPIHLRCHSWKNTALHKVTYLQNGKGRKYFHHNSDFYIPKATLKDSGSYFCRGLVGSKNVSSETVNITITQGLAVSTISSFFPPGYQTRIQNPDPAVYQLRDSKSSDKSVCLFTDFDSQTNVSQSKDSDVYITDKCVLDMRSMDFKSNSAVAWSNKSDFACANAFNNSIIPEDTFFPSPESSDSTDHVKPKETENTKQPSKSCHKPKAIVHTEKVNMMSLTVLGLRMLFAKTVAVNFLLTAKLFFLRAKRSGSGVKQTLNFDLLKLAGDVESNPGPSRGHMTEYKPTVRLATRDDVPRAVRTLAAAFADYPATRHTVDPDRHIERVTELQELFLTRVGLDIGKVWVADDGAAVAVWTTPESVEAGAVFAEIGPRMAELSGSRLAAQQQMEGLLAPHRPKEPAWFLATVGVSPDHQGKGLGSAVVLPGVEAAERAGVPAFLETSAPRNLPFYERLGFTVTADVEVPEGPRTWCMTRKPGA

SEQ ID NO: 19110 - protein, 550 aa, synthetic construct
MALPVTALLLPLALLLHAARPLEEEDLKNVFPPEVAVFEPSEAEISHTQKATLVCLATGFYPDHVELSWWVNGKEVHSGVCTDPQPLKEQPALNDSRYCLSSRLRVSATFWQNPRNHFRCQVQFYGLSENDEWTQDRAKPVTQIVSAEAWGRADDVIKIHWQEKKSNTILGSQEGNTMKTNDTYMKFSWLTVPEKSLDKEHRCIVRHENNKNGVDQEIIFPPIKTDVITMDPKDNCSKDANDTLLLQLTNTSAYYMYLLLLLKSVVYFAIITCCLLRRTAFCCNGEKSRAKRSGSGATNFSLLKQAGDVEENPGPTSATMALPVTALLLPLALLLHAARPMDPDLEIRAAFLRQRNTALRTEVAELEQEVQRLENEVSQYETRYGPLGGGKTRIQNPDPAVYQLRDSKSSDKSVCLFTDFDSQTNVSQSKDSDVYITDKCVLDMRSMDFKSNSAVAWSNKSDFACANAFNNSIIPEDTFFPSPESSDSTDHVKPKETENTKQPSKSCHKPKAIVHTEKVNMMSLTVLGLRMLFAKTVAVNFLLTAKLFFL

SEQ ID NO: 19111 - protein, 550 aa, synthetic construct
MALPVTALLLPLALLLHAARPLEEEDLKNVFPPEVAVFEPSEAEISHTQKATLVCLATGFYPDHVELSWWVNGKEVHSGVCTDPQPLKEQPALNDSRYCLSSRLRVSATFWQNPRNHFRCQVQFYGLSENDEWTQDRAKPVTQIVSAEAWGRADDVIKIHWQEKKSNTILGSQEGNTMKTNDTYMKFSWLTVPEKSLDKEHRCIVRHENNKNGVDQEIIFPPIKTDVITMDPKDNCSKDANDTLLLQLTNTSAYYMYLLLLLKSVVYFAIITCCLLRRTAFCCNGEKSRAKRSGSGATNFSLLKQAGDVEENPGPTSATMALPVTALLLPLALLLHAARPMDPDLEIEAAFLERENTALETRVAELRQRVQRLRNRVSQYRTRYGPLGGGKTRIQNPDPAVYQLRDSKSSDKSVCLFTDFDSQTNVSQSKDSDVYITDKCVLDMRSMDFKSNSAVAWSNKSDFACANAFNNSIIPEDTFFPSPESSDSTDHVKPKETENTKQPSKSCHKPKAIVHTEKVNMMSLTVLGLRMLFAKTVAVNFLLTAKLFFL

SEQ ID NO: 19112 - protein, 527 aa, synthetic construct
MALPVTALLLPLALLLHAARPLEEEDLKNVFPPEVAVFEPSEAEISHTQKATLVCLATGFYPDHVELSWWVNGKEVHSGVCTDPQPLKEQPALNDSRYCLSSRLRVSATFWQNPRNHFRCQVQFYGLSENDEWTQDRAKPVTQIVSAEAWGRADDVIKIHWQEKKSNTILGSQEGNTMKTNDTYMKFSWLTVPEKSLDKEHRCIVRHENNKNGVDQEIIFPPIKTDVITMDPKDNCSKDANDTLLLQLTNTSAYYMYLLLLLKSVVYFAIITCCLLRRTAFCCNGEKSRAKRSGSGATNFSLLKQAGDVEENPGPTSATMALPVTALLLPLALLLHAARPEVAALEKEVAALEKEVAALEKEVAALEKTRIQNPDPAVYQLRDSKSSDKSVCLFTDFDSQTNVSQSKDSDVYITDKCVLDMRSMDFKSNSAVAWSNKSDFACANAFNNSIIPEDTFFPSPESSDSTDHVKPKETENTKQPSKSCHKPKAIVHTEKVNMMSLTVLGLRMLFAKTVAVNFLLTAKLFFL

SEQ ID NO: 19113 - protein, 785 aa, synthetic construct
MALPVTALLLPLALLLHAARPLEEEDLKNVFPPEVAVFEPSEAEISHTQKATLVCLATGFYPDHVELSWWVNGKEVHSGVCTDPQPLKEQPALNDSRYCLSSRLRVSATFWQNPRNHFRCQVQFYGLSENDEWTQDRAKPVTQIVSAEAWGRADDVIKIHWQEKKSNTILGSQEGNTMKTNDTYMKFSWLTVPEKSLDKEHRCIVRHENNKNGVDQEIIFPPIKTDVITMDPKDNCSKDANDTLLLQLTNTSAYYMYLLLLLKSVVYFAIITCCLLRRTAFCCNGEKSRAKRSGSGATNFSLLKQAGDVEENPGPTSATMALPVTALLLPLALLLHAARPLFNQEVQIPLTESYCGPCPKNWICYKNNCYQFFDESKNWYESQASCMSQNASLLKVYSKEDQDLLKLVKSAHWMGLVHIPTNGSWQWEDGSILSPNLLTIIEMQKGDCALYASSFKGYIENCSTPNTYICMQRTVSGGGGSGGGGSGGGGDLFNQEVQIPLTESYCGPCPKNWICYKNNCYQFFDESKNWYESQASCMSQNASLLKVYSKEDQDLLKLVKSAHWMGLVHIPTNGSWQWEDGSILSPNLLTIIEMQKGDCALYASSFKGYIENCSTPNTYICMQRTVTRIQNPDPAVYQLRDSKSSDKSVCLFTDFDSQTNVSQSKDSDVYITDKCVLDMRSMDFKSNSAVAWSNKSDFACANAFNNSIIPEDTFFPSPESSDSTDHVKPKETENTKQPSKSCHKPKAIVHTEKVNMMSLTVLGLRMLFAKTVAVNFLLTAKLFFL

SEQ ID NO: 19114 - protein, 785 aa, synthetic construct
MALPVTALLLPLALLLHAARPLEEEDLKNVFPPEVAVFEPSEAEISHTQKATLVCLATGFYPDHVELSWWVNGKEVHSGVCTDPQPLKEQPALNDSRYCLSSRLRVSATFWQNPRNHFRCQVQFYGLSENDEWTQDRAKPVTQIVSAEAWGRADDVIKIHWQEKKSNTILGSQEGNTMKTNDTYMKFSWLTVPEKSLDKEHRCIVRHENNKNGVDQEIIFPPIKTDVITMDPKDNCSKDANDTLLLQLTNTSAYYMYLLLLLKSVVYFAIITCCLLRRTAFCCNGEKSRAKRSGSGATNFSLLKQAGDVEENPGPTSATMALPVTALLLPLALLLHAARPLFNQEVQIPLTESYCGPCPKNWICYKNNCYQFFDESKNWYESQASCMSQNASLLKVYSKEDQDLLKLVKSAHWMGLVHIPTNGSWQWEDGSILSPNLLTIIEMQKGDCALYASSFKGFIENCSTPNTYICMQRTVGGGGSGGGGSGGGGSDLFNQEVQIPLTESYCGPCPKNWICYKNNCYQFFDESKNWYESQASCMSQNASLLKVYSKEDQDLLKLVKSAHWMGLVHIPTNGSWQWEDGSILSPNLLTIIEMQKGDCALYASSFKGFIENCSTPNTYICMQRTVTRIQNPDPAVYQLRDSKSSDKSVCLFTDFDSQTNVSQSKDSDVYITDKCVLDMRSMDFKSNSAVAWSNKSDFACANAFNNSIIPEDTFFPSPESSDSTDHVKPKETENTKQPSKSCHKPKAIVHTEKVNMMSLTVLGLRMLFAKTVAVNFLLTAKLFFL

SEQ ID NO: 19115 - protein, 811 aa, synthetic construct
MALPVTALLLPLALLLHAARPLEEEDLKNVFPPEVAVFEPSEAEISHTQKATLVCLATGFYPDHVELSWWVNGKEVHSGVCTDPQPLKEQPALNDSRYCLSSRLRVSATFWQNPRNHFRCQVQFYGLSENDEWTQDRAKPVTQIVSAEAWGRADDVIKIHWQEKKSNTILGSQEGNTMKTNDTYMKFSWLTVPEKSLDKEHRCIVRHENNKNGVDQEIIFPPIKTDVITMDPKDNCSKDANDTLLLQLTNTSAYYMYLLLLLKSVVYFAIITCCLLRRTAFCCNGEKSRAKRSGSGATNFSLLKQAGDVEENPGPTSMALPVTALLLPLALLLHAARPMDPDLEIRAAFLRQRNTALRTEVAELEQEVQRLENEVSQYETRYGPLGGGKGTGGGGSGGGGSGGGGSEFDIQMTQSPSSLSASVGDRVTITCKASDHINNWLAWYQQKPGQAPKLLIYGATTLETGVPSRFSGSGSGTDYTLTISSLQPEDFATYYCQQSWNTPWTFGQGTKLEIKRGGGGSGGGGSGGGGSQVQLQQPGAELVKPGASVKMSCKASGYAFSSYWINWMKQKPGQGLEWIGQIYPGDGDTNYNGKFKGRATLTADTSSSTAYMQLSSLTSEDSAVYFCARSITTVVGCAMDYWGQGTSVTVSSTRIQNPDPAVYQLRDSKSSDKSVCLFTDFDSQTNVSQSKDSDVYITDKCVLDMRSMDFKSNSAVAWSNKSDFACANAFNNSIIPEDTFFPSPESSDSTDHVKPKETENTKQPSKSCHKPKAIVHTEKVNMMSLTVLGLRMLFAKTVAVNFLLTAKLFFL

SEQ ID NO: 19116 - protein, 1046 aa, synthetic construct
MALPVTALLLPLALLLHAARPLEEEDLKNVFPPEVAVFEPSEAEISHTQKATLVCLATGFYPDHVELSWWVNGKEVHSGVCTDPQPLKEQPALNDSRYCLSSRLRVSATFWQNPRNHFRCQVQFYGLSENDEWTQDRAKPVTQIVSAEAWGRADDVIKIHWQEKKSNTILGSQEGNTMKTNDTYMKFSWLTVPEKSLDKEHRCIVRHENNKNGVDQEIIFPPIKTDVITMDPKDNCSKDANDTLLLQLTNTSAYYMYLLLLLKSVVYFAIITCCLLRRTAFCCNGEKSRAKRSGSGATNFSLLKQAGDVEENPGPTSMALPVTALLLPLALLLHAARPLFNQEVQIPLTESYCGPCPKNWICYKNNCYQFFDESKNWYESQASCMSQNASLLKVYSKEDQDLLKLVKSAHWMGLVHIPTNGSWQWEDGSILSPNLLTIIEMQKGDCALYASSFKGFIENCSTPNTYICMQRTVGGGGSGGGGSGGGGSDLFNQEVQIPLTESYCGPCPKNWICYKNNCYQFFDESKNWYESQASCMSQNASLLKVYSKEDQDLLKLVKSAHWMGLVHIPTNGSWQWEDGSILSPNLLTIIEMQKGDCALYASSFKGFIENCSTPNTYICMQRTVGTGGGGSGGGGSGGGGSEFDIQMTQSPSSLSASVGDRVTITCKASDHINNWLAWYQQKPGQAPKLLIYGATTLETGVPSRFSGSGSGTDYTLTISSLQPEDFATYYCQQSWNTPWTFGQGTKLEIKRGGGGSGGGGSGGGGSQVQLQQPGAELVKPGASVKMSCKASGYAFSSYWINWMKQKPGQGLEWIGQIYPGDGDTNYNGKFKGRATLTADTSSSTAYMQLSSLTSEDSAVYFCARSITTVVGCAMDYWGQGTSVTVSSTRIQNPDPAVYQLRDSKSSDKSVCLFTDFDSQTNVSQSKDSDVYITDKCVLDMRSMDFKSNSAVAWSNKSDFACANAFNNSIIPEDTFFPSPESSDSTDHVKPKETENTKQPSKSCHKPKAIVHTEKVNMMSLTVLGLRMLFAKTVAVNFLLTAKLFFL

SEQ ID NO: 19117 - protein, 751 aa, synthetic construct
MALPVTALLLPLALLLHAARPLEEEDLKNVFPPEVAVFEPSEAEISHTQKATLVCLATGFYPDHVELSWWVNGKEVHSGVCTDPQPLKEQPALNDSRYCLSSRLRVSATFWQNPRNHFRCQVQFYGLSENDEWTQDRAKPVTQIVSAEAWGRADDVIKIHWQEKKSNTILGSQEGNTMKTNDTYMKFSWLTVPEKSLDKEHRCIVRHENNKNGVDQEIIFPPIKTDVITMDPKDNCSKDANDTLLLQLTNTSAYYMYLLLLLKSVVYFAIITCCLLRRTAFCCNGEKSRAKRSGSGATNFSLLKQAGDVEENPGPTSMALPVTALLLPLALLLHAARPQSVLTQPPSVSGAPGQRVTISCTGSSSNIGAGYDVHWYQQLPGTAPKLLIFGNSNRPSGVPDRFSGFKSGTSASLAITGLQAEDEADYFCQSYDSSLSGSGVFGTGTKVTVLGGGGGSGGGGSGGGGSQMQLVQSGGGLVQPGRSLRLSCAASGFTFDDYAMHWVRQAPGKGLEWVSGISWNSGSIGYADSVKGRFTISRDNAKNSLYLQMNSLRAEDTALYYCAKDIHSGSYYGLLYYAMDVWGQGTTVTVSSTRIQNPDPAVYQLRDSKSSDKSVCLFTDFDSQTNVSQSKDSDVYITDKCVLDMRSMDFKSNSAVAWSNKSDFACANAFNNSIIPEDTFFPSPESSDSTDHVKPKETENTKQPSKSCHKPKAIVHTEKVNMMSLTVLGLRMLFAKTVAVNFLLTAKLFFL

SEQ ID NO: 19118 - protein, 588 aa, synthetic construct
MALPVTALLLPLALLLHAARPLEEEDLKNVFPPEVAVFEPSEAEISHTQKATLVCLATGFYPDHVELSWWVNGKEVHSGVCTDPQPLKEQPALNDSRYCLSSRLRVSATFWQNPRNHFRCQVQFYGLSENDEWTQDRAKPVTQIVSAEAWGRADDVIKIHWQEKKSNTILGSQEGNTMKTNDTYMKFSWLTVPEKSLDKEHRCIVRHENNKNGVDQEIIFPPIKTDVITMDPKDNCSKDANDTLLLQLTNTSAYYMYLLLLLKSVVYFAIITCCLLRRTAFCCNGEKSRAKRSGSGATNFSLLKQAGDVEENPGPTSMALPVTALLLPLALLLHAARPMCMPCFTTDHQMARKCDDCCGGKGRGKCYGPQCLCRLEGGGGSGGGGSGGGGSFEVCMPCFTTDQQMARKCSDCCGGKGRGKCYGPQCLCRTRIQNPDPAVYQLRDSKSSDKSVCLFTDFDSQTNVSQSKDSDVYITDKCVLDMRSMDFKSNSAVAWSNKSDFACANAFNNSIIPEDTFFPSPESSDSTDHVKPKETENTKQPSKSCHKPKAIVHTEKVNMMSLTVLGLRMLFAKTVAVNFLLTAKLFFL

SEQ ID NO: 19119 - protein, 851 aa, synthetic construct
MALPVTALLLPLALLLHAARPLEEEDLKNVFPPEVAVFEPSEAEISHTQKATLVCLATGFYPDHVELSWWVNGKEVHSGVCTDPQPLKEQPALNDSRYCLSSRLRVSATFWQNPRNHFRCQVQFYGLSENDEWTQDRAKPVTQIVSAEAWGRADDVIKIHWQEKKSNTILGSQEGNTMKTNDTYMKFSWLTVPEKSLDKEHRCIVRHENNKNGVDQEIIFPPIKTDVITMDPKDNCSKDANDTLLLQLTNTSAYYMYLLLLLKSVVYFAIITCCLLRRTAFCCNGEKSRAKRSGSGATNFSLLKQAGDVEENPGPTSMALPVTALLLPLALLLHAARPMCMPCFTTDHQMARKCDDCCGGKGRGKCYGPQCLCRLEGGGGSGGGGSGGGGSFEVCMPCFTTDQQMARKCSDCCGGKGRGKCYGPQCLCRGTGGGGSGGGGSGGGGSEFDIQMTQSPSSLSASVGDRVTITCKASDHINNWLAWYQQKPGQAPKLLIYGATTLETGVPSRFSGSGSGTDYTLTISSLQPEDFATYYCQQSWNTPWTFGQGTKLEIKRGGGGSGGGGSGGGGSQVQLQQPGAELVKPGASVKMSCKASGYAFSSYWINWMKQKPGQGLEWIGQIYPGDGDTNYNGKFKGRATLTADTSSSTAYMQLSSLTSEDSAVYFCARSITTVVGCAMDYWGQGTSVTVSSTRIQNPDPAVYQLRDSKSSDKSVCLFTDFDSQTNVSQSKDSDVYITDKCVLDMRSMDFKSNSAVAWSNKSDFACANAFNNSIIPEDTFFPSPESSDSTDHVKPKETENTKQPSKSCHKPKAIVHTEKVNMMSLTVLGLRMLFAKTVAVNFLLTAKLFFL

SEQ ID NO: 19120 - protein, 926 aa, synthetic construct
MALPVTALLLPLALLLHAARPLEEEDLKNVFPPEVAVFEPSEAEISHTQKATLVCLATGFYPDHVELSWWVNGKEVHSGVCTDPQPLKEQPALNDSRYCLSSRLRVSATFWQNPRNHFRCQVQFYGLSENDEWTQDRAKPVTQIVSAEAWGRADDVIKIHWQEKKSNTILGSQEGNTMKTNDTYMKFSWLTVPEKSLDKEHRCIVRHENNKNGVDQEIIFPPIKTDVITMDPKDNCSKDANDTLLLQLTNTSAYYMYLLLLLKSVVYFAIITCCLLRRTAFCCNGEKSRAKRSGSGATNFSLLKQAGDVEENPGPTSMALPVTALLLPLALLLHAARPSPVAPACDPRLLNKLLRDSHLLHSRLSQCPDVDPLSIPVLLPAVDFSLGEWKTQTEQSKAQDILGAVSLLLEGVMAARGQLEPSCLSSLLGQLSGQVRLLLGALQGLLGTQLPLQGRTTAHKDPNALFLSLQQLLRGKVRFLLLVEGPTLCVRRTLPTTAVPSSTSGTGGGGSGGGGSGGGGSEFDIQMTQSPSSLSASVGDRVTITCKASDHINNWLAWYQQKPGQAPKLLIYGATTLETGVPSRFSGSGSGTDYTLTISSLQPEDFATYYCQQSWNTPWTFGQGTKLEIKRGGGGSGGGGSGGGGSQVQLQQPGAELVKPGASVKMSCKASGYAFSSYWINWMKQKPGQGLEWIGQIYPGDGDTNYNGKFKGRATLTADTSSSTAYMQLSSLTSEDSAVYFCARSITTVVGCAMDYWGQGTSVTVSSTRIQNPDPAVYQLRDSKSSDKSVCLFTDFDSQTNVSQSKDSDVYITDKCVLDMRSMDFKSNSAVAWSNKSDFACANAFNNSIIPEDTFFPSPESSDSTDHVKPKETENTKQPSKSCHKPKAIVHTEKVNMMSLTVLGLRMLFAKTVAVNFLLTAKLFFL

SEQ ID NO: 19121 - protein, 833 aa, synthetic construct
MALPVTALLLPLALLLHAARPLEEEDLKNVFPPEVAVFEPSEAEISHTQKATLVCLATGFYPDHVELSWWVNGKEVHSGVCTDPQPLKEQPALNDSRYCLSSRLRVSATFWQNPRNHFRCQVQFYGLSENDEWTQDRAKPVTQIVSAEAWGRADDVIKIHWQEKKSNTILGSQEGNTMKTNDTYMKFSWLTVPEKSLDKEHRCIVRHENNKNGVDQEIIFPPIKTDVITMDPKDNCSKDANDTLLLQLTNTSAYYMYLLLLLKSVVYFAIITCCLLRRTAFCCNGEKSRAKRSGSGATNFSLLKQAGDVEENPGPTSMALPVTALLLPLALLLHAARPMGSWEEFELRLNAIEERLYALGGSEAELAYFEYVIADFEGNLQRYKGKGNPEVEALYFEADAIFEELVAYRHNGTGGGGSGGGGSGGGGSEFDIQMTQSPSSLSASVGDRVTITCKASDHINNWLAWYQQKPGQAPKLLIYGATTLETGVPSRFSGSGSGTDYTLTISSLQPEDFATYYCQQSWNTPWTFGQGTKLEIKRGGGGSGGGGSGGGGSQVQLQQPGAELVKPGASVKMSCKASGYAFSSYWINWMKQKPGQGLEWIGQIYPGDGDTNYNGKFKGRATLTADTSSSTAYMQLSSLTSEDSAVYFCARSITTVVGCAMDYWGQGTSVTVSSTRIQNPDPAVYQLRDSKSSDKSVCLFTDFDSQTNVSQSKDSDVYITDKCVLDMRSMDFKSNSAVAWSNKSDFACANAFNNSIIPEDTFFPSPESSDSTDHVKPKETENTKQPSKSCHKPKAIVHTEKVNMMSLTVLGLRMLFAKTVAVNFLLTAKLFFL

SEQ ID NO: 19122 - protein, 972 aa, synthetic construct
MALPVTALLLPLALLLHAARPLEIQNPDPAVYQLRDSKSSDKSVCLFTDFDSQTNVSQSKDSDVYITDKCVLDMRSMDFKSNSAVAWSNKSDFACANAFNNSIIPEDTFFPSPESSDSTDHVKPKETENTKQPSKSCHKPKAIVHTEKVNMMSLTVLGLRMLFAKTVAVNFLLTAKLFFLRAKRSGSGATNFSLLKQAGDVEENPGPTSMALPVTALLLPLALLLHAARPDIQMTQTTSSLSASLGDRVTISCRASQDISKYLNWYQQKPDGTVKLLIYHTSRLHSGVPSRFSGSGSGTDYSLTISNLEQEDIATYFCQQGNTLPYTFGGGTKLEITGGGGSGGGGSGGGGSEVKLQESGPGLVAPSQSLSVTCTVSGVSLPDYGVSWIRQPPRKGLEWLGVIWGSETTYYNSALKSRLTIIKDNSKSQVFLKMNSLQTDDTAIYYCAKHYYYGGSYAMDYWGQGTSVTVSSTREEDLKNVFPPEVAVFEPSEAEISHTQKATLVCLATGFYPDHVELSWWVNGKEVHSGVCTDPQPLKEQPALNDSRYCLSSRLRVSATFWQNPRNHFRCQVQFYGLSENDEWTQDRAKPVTQIVSAEAWGRADDVIKIHWQEKKSNTILGSQEGNTMKTNDTYMKFSWLTVPEKSLDKEHRCIVRHENNKNGVDQEIIFPPIKTDVITMDPKDNCSKDANDTLLLQLTNTSAYYMYLLLLLKSVVYFAIITCCLLRRTAFCCNGEKSRAKRSGSGVKQTLNFDLLKLAGDVESNPGPSRGHMTEYKPTVRLATRDDVPRAVRTLAAAFADYPATRHTVDPDRHIERVTELQELFLTRVGLDIGKVWVADDGAAVAVWTTPESVEAGAVFAEIGPRMAELSGSRLAAQQQMEGLLAPHRPKEPAWFLATVGVSPDHQGKGLGSAVVLPGVEAAERAGVPAFLETSAPRNLPFYERLGFTVTADVEVPEGPRTWCMTRKPGA

SEQ ID NO: 19123 - protein, 973 aa, synthetic construct
MALPVTALLLPLALLLHAARPLEIQNPDPAVYQLRDSKSSDKSVCLFTDFDSQTNVSQSKDSDVYITDKCVLDMRSMDFKSNSAVAWSNKSDFACANAFNNSIIPEDTFFPSPESSDSTDHVKPKETENTKQPSKSCHKPKAIVHTEKVNMMSLTVLGLRMLFAKTVAVNFLLTAKLFFLRAKRSGSGATNFSLLKQAGDVEENPGPTSTMALPVTALLLPLALLLHAARPEIVMTQSPATLSLSPGERATLSCRASQDISKYLNWYQQKPGQAPRLLIYHTSRLHSGIPARFSGSGSGTDYTLTISSLQPEDFAVYFCQQGNTLPYTFGQGTKLEIKGGGGSGGGGSGGGGSQVQLQESGPGLVKPSETLSLTCTVSGVSLPDYGVSWIRQPPGKGLEWIGVIWGSETTYYNSSLKSRVTISKDNSKNQVSLKLSSVTAADTAVYYCAKHYYYGGSYAMDYWGQGTLVTVSSTREEDLKNVFPPEVAVFEPSEAEISHTQKATLVCLATGFYPDHVELSWWVNGKEVHSGVCTDPQPLKEQPALNDSRYCLSSRLRVSATFWQNPRNHFRCQVQFYGLSENDEWTQDRAKPVTQIVSAEAWGRADDVIKIHWQEKKSNTILGSQEGNTMKTNDTYMKFSWLTVPEKSLDKEHRCIVRHENNKNGVDQEIIFPPIKTDVITMDPKDNCSKDANDTLLLQLTNTSAYYMYLLLLLKSVVYFAIITCCLLRRTAFCCNGEKSRAKRSGSGVKQTLNFDLLKLAGDVESNPGPSRGHMTEYKPTVRLATRDDVPRAVRTLAAAFADYPATRHTVDPDRHIERVTELQELFLTRVGLDIGKVWVADDGAAVAVWTTPESVEAGAVFAEIGPRMAELSGSRLAAQQQMEGLLAPHRPKEPAWFLATVGVSPDHQGKGLGSAVVLPGVEAAERAGVPAFLETSAPRNLPFYERLGFTVTADVEVPEGPRTWCMTRKPGA

SEQ ID NO: 19124 - protein, 974 aa, synthetic construct
MALPVTALLLPLALLLHAARPLEIQNPDPAVYQLRDSKSSDKSVCLFTDFDSQTNVSQSKDSDVYITDKCVLDMRSMDFKSNSAVAWSNKSDFACANAFNNSIIPEDTFFPSPESSDSTDHVKPKETENTKQPSKSCHKPKAIVHTEKVNMMSLTVLGLRMLFAKTVAVNFLLTAKLFFLRAKRSGSGATNFSLLKQAGDVEENPGPTSTMALPVTALLLPLALLLHAARPDEIVLTQSPATLSLSPGERATLSCSASSSVSYMHWYQQKPGQAPRLLIYDTSKLASGIPARFSGSGSGTDFTLTISSLEPEDVAVYYCFQGSVYPFTFGQGTKLEIKRGGGGSGGGGSGGGGSQVQLQESGPGLVKPSQTLSLTCTVSGGSISTSGMGVGWIRQHPGKGLEWIGHIWWDDDKRYNPALKSRVTISVDTSKNQFSLKLSSVTAADTAVYYCARMELWSYYFDYWGQGTLVTVSSTREEDLKNVFPPEVAVFEPSEAEISHTQKATLVCLATGFYPDHVELSWWVNGKEVHSGVCTDPQPLKEQPALNDSRYCLSSRLRVSATFWQNPRNHFRCQVQFYGLSENDEWTQDRAKPVTQIVSAEAWGRADDVIKIHWQEKKSNTILGSQEGNTMKTNDTYMKFSWLTVPEKSLDKEHRCIVRHENNKNGVDQEIIFPPIKTDVITMDPKDNCSKDANDTLLLQLTNTSAYYMYLLLLLKSVVYFAIITCCLLRRTAFCCNGEKSRAKRSGSGVKQTLNFDLLKLAGDVESNPGPSRGHMTEYKPTVRLATRDDVPRAVRTLAAAFADYPATRHTVDPDRHIERVTELQELFLTRVGLDIGKVWVADDGAAVAVWTTPESVEAGAVFAEIGPRMAELSGSRLAAQQQMEGLLAPHRPKEPAWFLATVGVSPDHQGKGLGSAVVLPGVEAAERAGVPAFLETSAPRNLPFYERLGFTVTADVEVPEGPRTWCMTRKPGA

SEQ ID NO: 19125 - protein, 970 aa, synthetic construct
MALPVTALLLPLALLLHAARPLEIQNPDPAVYQLRDSKSSDKSVCLFTDFDSQTNVSQSKDSDVYITDKCVLDMRSMDFKSNSAVAWSNKSDFACANAFNNSIIPEDTFFPSPESSDSTDHVKPKETENTKQPSKSCHKPKAIVHTEKVNMMSLTVLGLRMLFAKTVAVNFLLTAKLFFLRAKRSGSGATNFSLLKQAGDVEENPGPTSMALPVTALLLPLALLLHAARPDIQMTQSPSSLSASVGDRVTITCRASQDISNYLNWYQQKPGKAPKLLIYYTSRLHSGVPSRFSGSGSGTDFTLTISSLQPEDFATYYCQQGNTLPYTFGQGTKVEIKRGGGGSGGGGSGGGGSEVQLVESGGGLVQPGGSLRLSCAASGFTFSDYFMSWVRQAPGKGLEWVATISNGGTYTYYPDSVKGRFTISRDNSKNTLYLQMNSLRAEDTAVYYCARFDGYIFDYWGQGTLVTVSSTREEDLKNVFPPEVAVFEPSEAEISHTQKATLVCLATGFYPDHVELSWWVNGKEVHSGVCTDPQPLKEQPALNDSRYCLSSRLRVSATFWQNPRNHFRCQVQFYGLSENDEWTQDRAKPVTQIVSAEAWGRADDVIKIHWQEKKSNTILGSQEGNTMKTNDTYMKFSWLTVPEKSLDKEHRCIVRHENNKNGVDQEIIFPPIKTDVITMDPKDNCSKDANDTLLLQLTNTSAYYMYLLLLLKSVVYFAIITCCLLRRTAFCCNGEKSRAKRSGSGVKQTLNFDLLKLAGDVESNPGPSRGHMTEYKPTVRLATRDDVPRAVRTLAAAFADYPATRHTVDPDRHIERVTELQELFLTRVGLDIGKVWVADDGAAVAVWTTPESVEAGAVFAEIGPRMAELSGSRLAAQQQMEGLLAPHRPKEPAWFLATVGVSPDHQGKGLGSAVVLPGVEAAERAGVPAFLETSAPRNLPFYERLGFTVTADVEVPEGPRTWCMTRKPGA

SEQ ID NO: 19126 - protein, 974 aa, synthetic construct
MALPVTALLLPLALLLHAARPLEIQNPDPAVYQLRDSKSSDKSVCLFTDFDSQTNVSQSKDSDVYITDKCVLDMRSMDFKSNSAVAWSNKSDFACANAFNNSIIPEDTFFPSPESSDSTDHVKPKETENTKQPSKSCHKPKAIVHTEKVNMMSLTVLGLRMLFAKTVAVNFLLTAKLFFLRAKRSGSGATNFSLLKQAGDVEENPGPTSMALPVTALLLPLALLLHAARPDIQMTQSPSSLSASVGDRVTITCKASDHINNWLAWYQQKPGQAPKLLIYGATTLETGVPSRFSGSGSGTDYTLTISSLQPEDFATYYCQQSWNTPWTFGQGTKLEIKRGGGGSGGGGSGGGGSQVQLQQPGAELVKPGASVKMSCKASGYAFSSYWINWMKQKPGQGLEWIGQIYPGDGDTNYNGKFKGRATLTADTSSSTAYMQLSSLTSEDSAVYFCARSITTVVGCAMDYWGQGTSVTVSSTREEDLKNVFPPEVAVFEPSEAEISHTQKATLVCLATGFYPDHVELSWWVNGKEVHSGVCTDPQPLKEQPALNDSRYCLSSRLRVSATFWQNPRNHFRCQVQFYGLSENDEWTQDRAKPVTQIVSAEAWGRADDVIKIHWQEKKSNTILGSQEGNTMKTNDTYMKFSWLTVPEKSLDKEHRCIVRHENNKNGVDQEIIFPPIKTDVITMDPKDNCSKDANDTLLLQLTNTSAYYMYLLLLLKSVVYFAIITCCLLRRTAFCCNGEKSRAKRSGSGVKQTLNFDLLKLAGDVESNPGPSRGHMTEYKPTVRLATRDDVPRAVRTLAAAFADYPATRHTVDPDRHIERVTELQELFLTRVGLDIGKVWVADDGAAVAVWTTPESVEAGAVFAEIGPRMAELSGSRLAAQQQMEGLLAPHRPKEPAWFLATVGVSPDHQGKGLGSAVVLPGVEAAERAGVPAFLETSAPRNLPFYERLGFTVTADVEVPEGPRTWCMTRKPGA

SEQ ID NO: 19127 - protein, 976 aa, synthetic construct
MALPVTALLLPLALLLHAARPLEIQNPDPAVYQLRDSKSSDKSVCLFTDFDSQTNVSQSKDSDVYITDKCVLDMRSMDFKSNSAVAWSNKSDFACANAFNNSIIPEDTFFPSPESSDSTDHVKPKETENTKQPSKSCHKPKAIVHTEKVNMMSLTVLGLRMLFAKTVAVNFLLTAKLFFLRAKRSGSGATNFSLLKQAGDVEENPGPTSMALPVTALLLPLALLLHAARPQIVLSQSPAILSASPGEKVTMTCRASSSVSYMHWYQQKPGSSPKPWIYATSNLASGVPARFSGSGSGTSYSFTISRVEAEDAATYYCQQWTFNPPTFGGGTRLEIKRTVAAGGGGSGGGGSGGGGSQAYLQQSGAELVRPGASVKMSCKASGYTFTSYNMHWVKQTPRQGLEWIGGIYPGNGDTSYNQKFKGKATLTVGKSSSTAYMQLSSLTSEDSAVYFCARYDYNYAMDYWGQGTSVTVSSASTREEDLKNVFPPEVAVFEPSEAEISHTQKATLVCLATGFYPDHVELSWWVNGKEVHSGVCTDPQPLKEQPALNDSRYCLSSRLRVSATFWQNPRNHFRCQVQFYGLSENDEWTQDRAKPVTQIVSAEAWGRADDVIKIHWQEKKSNTILGSQEGNTMKTNDTYMKFSWLTVPEKSLDKEHRCIVRHENNKNGVDQEIIFPPIKTDVITMDPKDNCSKDANDTLLLQLTNTSAYYMYLLLLLKSVVYFAIITCCLLRRTAFCCNGEKSRAKRSGSGVKQTLNFDLLKLAGDVESNPGPSRGHMTEYKPTVRLATRDDVPRAVRTLAAAFADYPATRHTVDPDRHIERVTELQELFLTRVGLDIGKVWVADDGAAVAVWTTPESVEAGAVFAEIGPRMAELSGSRLAAQQQMEGLLAPHRPKEPAWFLATVGVSPDHQGKGLGSAVVLPGVEAAERAGVPAFLETSAPRNLPFYERLGFTVTADVEVPEGPRTWCMTRKPGA

SEQ ID NO: 19128 - protein, 974 aa, synthetic construct
MALPVTALLLPLALLLHAARPLEIQNPDPAVYQLRDSKSSDKSVCLFTDFDSQTNVSQSKDSDVYITDKCVLDMRSMDFKSNSAVAWSNKSDFACANAFNNSIIPEDTFFPSPESSDSTDHVKPKETENTKQPSKSCHKPKAIVHTEKVNMMSLTVLGLRMLFAKTVAVNFLLTAKLFFLRAKRSGSGATNFSLLKQAGDVEENPGPTSMALPVTALLLPLALLLHAARPEIVLTQSPATLSLSPGERATLSCRASQSVSSYLAWYQQKPGQAPRLLIYDASNRATGIPARFSGSGSGTDFTLTISSLEPEDFAVYYCQQRSNWPITFGQGTRLEIKGGGGSGGGGSGGGGSEVQLVESGGGLVQPDRSLRLSCAASGFTFHDYAMHWVRQAPGKGLEWVSTISWNSGTIGYADSVKGRFTISRDNAKNSLYLQMNSLRAEDTALYYCAKDIQYGNYYYGMDVWGQGTTVTVSSTREEDLKNVFPPEVAVFEPSEAEISHTQKATLVCLATGFYPDHVELSWWVNGKEVHSGVCTDPQPLKEQPALNDSRYCLSSRLRVSATFWQNPRNHFRCQVQFYGLSENDEWTQDRAKPVTQIVSAEAWGRADDVIKIHWQEKKSNTILGSQEGNTMKTNDTYMKFSWLTVPEKSLDKEHRCIVRHENNKNGVDQEIIFPPIKTDVITMDPKDNCSKDANDTLLLQLTNTSAYYMYLLLLLKSVVYFAIITCCLLRRTAFCCNGEKSRAKRSGSGVKQTLNFDLLKLAGDVESNPGPSRGHMTEYKPTVRLATRDDVPRAVRTLAAAFADYPATRHTVDPDRHIERVTELQELFLTRVGLDIGKVWVADDGAAVAVWTTPESVEAGAVFAEIGPRMAELSGSRLAAQQQMEGLLAPHRPKEPAWFLATVGVSPDHQGKGLGSAVVLPGVEAAERAGVPAFLETSAPRNLPFYERLGFTVTADVEVPEGPRTWCMTRKPGA

SEQ ID NO: 19129 - protein, 972 aa, synthetic construct
MALPVTALLLPLALLLHAARPLEIQNPDPAVYQLRDSKSSDKSVCLFTDFDSQTNVSQSKDSDVYITDKCVLDMRSMDFKSNSAVAWSNKSDFACANAFNNSIIPEDTFFPSPESSDSTDHVKPKETENTKQPSKSCHKPKAIVHTEKVNMMSLTVLGLRMLFAKTVAVNFLLTAKLFFLRAKRSGSGATNFSLLKQAGDVEENPGPTSMALPVTALLLPLALLLHAARPDIQMTQSPSSLSASVGDRVTITCRASQDVNTAVAWYQQKPGKAPKLLIYSASFLESGVPSRFSGSRSGTDFTLTISSLQPEDFATYYCQQHYTTPPTFGQTKVEIKRGGGGSGGGGSGGGGSEVQLVESGGGLVQPGGSLRLSCAASGFNIKDTYIHWVRQAPGKGLEWVARIYPTNGYTRYADSVKGRFTISADTSKNTAYLQMNSLRAEDTAVYYCSRWGGDGFYAMDVWGQGTLVTVSSTREEDLKNVFPPEVAVFEPSEAEISHTQKATLVCLATGFYPDHVELSWWVNGKEVHSGVCTDPQPLKEQPALNDSRYCLSSRLRVSATFWQNPRNHFRCQVQFYGLSENDEWTQDRAKPVTQIVSAEAWGRADDVIKIHWQEKKSNTILGSQEGNTMKTNDTYMKFSWLTVPEKSLDKEHRCIVRHENNKNGVDQEIIFPPIKTDVITMDPKDNCSKDANDTLLLQLTNTSAYYMYLLLLLKSVVYFAIITCCLLRRTAFCCNGEKSRAKRSGSGVKQTLNFDLLKLAGDVESNPGPSRGHMTEYKPTVRLATRDDVPRAVRTLAAAFADYPATRHTVDPDRHIERVTELQELFLTRVGLDIGKVWVADDGAAVAVWTTPESVEAGAVFAEIGPRMAELSGSRLAAQQQMEGLLAPHRPKEPAWFLATVGVSPDHQGKGLGSAVVLPGVEAAERAGVPAFLETSAPRNLPFYERLGFTVTADVEVPEGPRTWCMTRKPGA

SEQ ID NO: 19130 - protein, 851 aa, synthetic construct
MALPVTALLLPLALLLHAARPLEIQNPDPAVYQLRDSKSSDKSVCLFTDFDSQTNVSQSKDSDVYITDKCVLDMRSMDFKSNSAVAWSNKSDFACANAFNNSIIPEDTFFPSPESSDSTDHVKPKETENTKQPSKSCHKPKAIVHTEKVNMMSLTVLGLRMLFAKTVAVNFLLTAKLFFLRAKRSGSGATNFSLLKQAGDVEENPGPTSMALPVTALLLPLALLLHAARPDEFEVQLVESGGGLVQAGGSLRLSCAASGITFSINTMGWYRQAPGKQRELVALISSIGDTYYADSVKGRFTISRDNAKNTVYLQMNSLKPEDTAVYYCKRFRTAAQGTDYWGQGTQVTVSSTREEDLKNVFPPEVAVFEPSEAEISHTQKATLVCLATGFYPDHVELSWWVNGKEVHSGVCTDPQPLKEQPALNDSRYCLSSRLRVSATFWQNPRNHFRCQVQFYGLSENDEWTQDRAKPVTQIVSAEAWGRADDVIKIHWQEKKSNTILGSQEGNTMKTNDTYMKFSWLTVPEKSLDKEHRCIVRHENNKNGVDQEIIFPPIKTDVITMDPKDNCSKDANDTLLLQLTNTSAYYMYLLLLLKSVVYFAIITCCLLRRTAFCCNGEKSRAKRSGSGVKQTLNFDLLKLAGDVESNPGPSRGHMTEYKPTVRLATRDDVPRAVRTLAAAFADYPATRHTVDPDRHIERVTELQELFLTRVGLDIGKVWVADDGAAVAVWTTPESVEAGAVFAEIGPRMAELSGSRLAAQQQMEGLLAPHRPKEPAWFLATVGVSPDHQGKGLGSAVVLPGVEAAERAGVPAFLETSAPRNLPFYERLGFTVTADVEVPEGPRTWCMTRKPGA

SEQ ID NO: 19131 - protein, 851 aa, synthetic construct; identical to SEQ ID NO: 19130

SEQ ID NO: 19132 - protein, 1116 aa, synthetic construct
MALPVTALLLPLALLLHAARPLEIQNPDPAVYQLRDSKSSDKSVCLFTDFDSQTNVSQSKDSDVYITDKCVLDMRSMDFKSNSAVAWSNKSDFACANAFNNSIIPEDTFFPSPESSDSTDHVKPKETENTKQPSKSCHKPKAIVHTEKVNMMSLTVLGLRMLFAKTVAVNFLLTAKLFFLRAKRSGSGATNFSLLKQAGDVEENPGPTSMALPVTALLLPLALLLHAARPQVQLVESGGGLVQAGDSVTLSCTASGRTFSSYALAWFRQRPGKEREFVAGLRWGGPTNYADSVKDRFTISGDSAKHTMYLQMNSLKPEDTAVYYCGYNPGGWAVPSQYEYDSWGQGTQVTVSSGTGGGGSGGGGSGGGGSEFDIQMTQSPSSLSASVGDRVTITCKASDHINNWLAWYQQKPGQAPKLLIYGATTLETGVPSRFSGSGSGTDYTLTISSLQPEDFATYYCQQSWNTPWTFGQGTKLEIKRGGGGSGGGGSGGGGSQVQLQQPGAELVKPGASVKMSCKASGYAFSSYWINWMKQKPGQGLEWIGQIYPGDGDTNYNGKFKGRATLTADTSSSTAYMQLSSLTSEDSAVYFCARSITTVVGCAMDYWGQGTSVTVSSTREEDLKNVFPPEVAVFEPSEAEISHTQKATLVCLATGFYPDHVELSWWVNGKEVHSGVCTDPQPLKEQPALNDSRYCLSSRLRVSATFWQNPRNHFRCQVQFYGLSENDEWTQDRAKPVTQIVSAEAWGRADDVIKIHWQEKKSNTILGSQEGNTMKTNDTYMKFSWLTVPEKSLDKEHRCIVRHENNKNGVDQEIIFPPIKTDVITMDPKDNCSKDANDTLLLQLTNTSAYYMYLLLLLKSVVYFAIITCCLLRRTAFCCNGEKSRAKRSGSGVKQTLNFDLLKLAGDVESNPGPSRGHMTEYKPTVRLATRDDVPRAVRTLAAAFADYPATRHTVDPDRHIERVTELQELFLTRVGLDIGKVWVADDGAAVAVWTTPESVEAGAVFAEIGPRMAELSGSRLAAQQQMEGLLAPHRPKEPAWFLATVGVSPDHQGKGLGSAVVLPGVEAAERAGVPAFLETSAPRNLPFYERLGFTVTADVEVPEGPRTWCMTRKPGA

SEQ ID NO: 19133 - protein, 1245 aa, synthetic construct
MALPVTALLLPLALLLHAARPLEIQNPDPAVYQLRDSKSSDKSVCLFTDFDSQTNVSQSKDSDVYITDKCVLDMRSMDFKSNSAVAWSNKSDFACANAFNNSIIPEDTFFPSPESSDSTDHVKPKETENTKQPSKSCHKPKAIVHTEKVNMMSLTVLGLRMLFAKTVAVNFLLTAKLFFLRAKRSGSGATNFSLLKQAGDVEENPGPTSMALPVTALLLPLALLLHAARPEVQLLESGGGLVQPGGSLRLSCAASGFTFSSYAMSWVRQAPGKGLEWVSSISGSGDYIYYADSVKGRFTISRDISKNTLYLQMNSLRAEDTAVYYCAKEGTGANSSLADYRGQGTLVTVSSGGGSGGGSQVQLVESGGGLVQAGDSVTLSCTASGRTFSSYALAWFRQRPGKEREFVAGLRWGGPTNYADSVKDRFTISGDSAKHTMYLQMNSLKPEDTAVYYCGYNPGGWAVPSQYEYDSWGQGTQVTVSSGTGGGGSGGGGSGGGGSEFDIQMTQSPSSLSASVGDRVTITCKASDHINNWLAWYQQKPGQAPKLLIYGATTLETGVPSRFSGSGSGTDYTLTISSLQPEDFATYYCQQSWNTPWTFGQGTKLEIKRGGGGSGGGGSGGGGSQVQLQQPGAELVKPGASVKMSCKASGYAFSSYWINWMKQKPGQGLEWIGQIYPGDGDTNYNGKFKGRATLTADTSSSTAYMQLSSLTSEDSAVYFCARSITTVVGCAMDYWGQGTSVTVSSTREEDLKNVFPPEVAVFEPSEAEISHTQKATLVCLATGFYPDHVELSWWVNGKEVHSGVCTDPQPLKEQPALNDSRYCLSSRLRVSATFWQNPRNHFRCQVQFYGLSENDEWTQDRAKPVTQIVSAEAWGRADDVIKIHWQEKKSNTILGSQEGNTMKTNDTYMKFSWLTVPEKSLDKEHRCIVRHENNKNGVDQEIIFPPIKTDVITMDPKDNCSKDANDTLLLQLTNTSAYYMYLLLLLKSVVYFAIITCCLLRRTAFCCNGEKSRAKRSGSGVKQTLNFDLLKLAGDVESNPGPSRGHMTEYKPTVRLATRDDVPRAVRTLAAAFADYPATRHTVDPDRHIERVTELQELFLTRVGLDIGKVWVADDGAAVAVWTTPESVEAGAVFAEIGPRMAELSGSRLAAQQQMEGLLAPHRPKEPAWFLATVGVSPDHQGKGLGSAVVLPGVEAAERAGVPAFLETSAPRNLPFYERLGFTVTADVEVPEGPRTWCMTRKPGA

SEQ ID NO: 19134 - protein, 1243 aa, synthetic construct
MALPVTALLLPLALLLHAARPLEIQNPDPAVYQLRDSKSSDKSVCLFTDFDSQTNVSQSKDSDVYITDKCVLDMRSMDFKSNSAVAWSNKSDFACANAFNNSIIPEDTFFPSPESSDSTDHVKPKETENTKQPSKSCHKPKAIVHTEKVNMMSLTVLGLRMLFAKTVAVNFLLTAKLFFLRAKRSGSGATNFSLLKQAGDVEENPGPTSMALPVTALLLPLALLLHAARPGVTQSPTHLIKTRGQQATLRCSPISGHTSVYWYQQALGLGLQFLLWYDEGEERNRGNFPPRFSGRQFPNYSSELNVNALELEDSALYLCASSLGGPRGLAGLRGDEQFFGPGTRLTVLEGGGSGGGSQVQLVESGGGLVQAGDSVTLSCTASGRTFSSYALAWFRQRPGKEREFVAGLRWGGPTNYADSVKDRFTISGDSAKHTMYLQMNSLKPEDTAVYYCGYNPGGWAVPSQYEYDSWGQGTQVTVSSGTGGGGSGGGGSGGGGSEFDIQMTQSPSSLSASVGDRVTITCKASDHINNWLAWYQQKPGQAPKLLIYGATTLETGVPSRFSGSGSGTDYTLTISSLQPEDFATYYCQQSWNTPWTFGQGTKLEIKRGGGGSGGGGSGGGGSQVQLQQPGAELVKPGASVKMSCKASGYAFSSYWINWMKQKPGQGLEWIGQIYPGDGDTNYNGKFKGRATLTADTSSSTAYMQLSSLTSEDSAVYFCARSITTVVGCAMDYWGQGTSVTVSSTREEDLKNVFPPEVAVFEPSEAEISHTQKATLVCLATGFYPDHVELSWWVNGKEVHSGVCTDPQPLKEQPALNDSRYCLSSRLRVSATFWQNPRNHFRCQVQFYGLSENDEWTQDRAKPVTQIVSAEAWGRADDVIKIHWQEKKSNTILGSQEGNTMKTNDTYMKFSWLTVPEKSLDKEHRCIVRHENNKNGVDQEIIFPPIKTDVITMDPKDNCSKDANDTLLLQLTNTSAYYMYLLLLLKSVVYFAIITCCLLRRTAFCCNGEKSRAKRSGSGVKQTLNFDLLKLAGDVESNPGPSRGHMTEYKPTVRLATRDDVPRAVRTLAAAFADYPATRHTVDPDRHIERVTELQELFLTRVGLDIGKVWVADDGAAVAVWTTPESVEAGAVFAEIGPRMAELSGSRLAAQQQMEGLLAPHRPKEPAWFLATVGVSPDHQGKGLGSAVVLPGVEAAERAGVPAFLETSAPRNLPFYERLGFTVTADVEVPEGPRTWCMTRKPGA

SEQ ID NO: 19135 - protein, 1004 aa, synthetic construct
MALPVTALLLPLALLLHAARPLEIQNPDPAVYQLRDSKSSDKSVCLFTDFDSQTNVSQSKDSDVYITDKCVLDMRSMDFKSNSAVAWSNKSDFACANAFNNSIIPEDTFFPSPESSDSTDHVKPKETENTKQPSKSCHKPKAIVHTEKVNMMSLTVLGLRMLFAKTVAVNFLLTAKLFFLRAKRSGSGATNFSLLKQAGDVEENPGPTSMALPVTALLLPLALLLHAARPGVTQSPTHLIKTRGQQATLRCSPISGHTSVYWYQQALGLGLQFLLWYDEGEERNRGNFPPRFSGRQFPNYSSELNVNALELEDSALYLCASSLGGPRGLAGLRGDEQFFGPGTRLTVLEGGGSGGGSGVTQSPTHLIKTRGQQATLRCSPISGHTSVYWYQQALGLGLQFLLWYDEGEERNRGNFPPRFSGRQFPNYSSELNVNALELEDSALYLCASSLGGDELGADGNEQFFGPGTRLTVLEGTGGGGSGGGGSGGGGSEFDIQMTQSPSSLSASVGDRVTITCKASDHINNWLAWYQQKPGQAPKLLIYGATTLETGVPSRFSGSGSGTDYTLTISSLQPEDFATYYCQQSWNTPWTFGQGTKLEIKRGGGGSGGGGSGGGGSQVQLQQPGAELVKPGASVKMSCKASGYAFSSYWINWMKQKPGQGLEWIGQIYPGDGDTNYNGKFKGRATLTADTSSSTAYMQLSSLTSEDSAVYFCARSITTVVGCAMDYWGQGTSVTVSSTREEDLKNVFPPEVAVFEPSEAEISHTQKATLVCLATGFYPDHVELSWWVNGKEVHSGVCTDPQPLKEQPALNDSRYCLSSRLRVSATFWQNPRNHFRCQVQFYGLSENDEWTQDRAKPVTQIVSAEAWGRADDVIKIHWQEKKSNTILGSQEGNTMKTNDTYMKFSWLTVPEKSLDKEHRCIVRHENNKNGVDQEIIFPPIKTDVITMDPKDNCSKDANDTLLLQLTNTSAYYMYLLLLLKSVVYFAIITCCLLRRTAFCCNGEKS

SEQ ID NO: 19136 - protein, 857 aa, synthetic construct
MALPVTALLLPLALLLHAARPLEIQNPDPAVYQLRDSKSSDKSVCLFTDFDSQTNVSQSKDSDVYITDKCVLDMRSMDFKSNSAVAWSNKSDFACANAFNNSIIPEDTFFPSPESSDSTDHVKPKETENTKQPSKSCHKPKAIVHTEKVNMMSLTVLGLRMLFAKTVAVNFLLTAKLFFLRAKRSGSGATNFSLLKQAGDVEENPGPTSMALPVTALLLPLALLLHAARPDEFGSDLGIKLLFAAAKGQDDEVRILLAAGADVNAKDFEGYTPLHVAAYDGHLEIVEVLLKAGADVNAKDSQGRTPLHEAAYSGHLEIVEVLLKAGADVNAQDDAGETPADLAAAWGHEDIAEVLQKTREEDLKNVFPPEVAVFEPSEAEISHTQKATLVCLATGFYPDHVELSWWVNGKEVHSGVCTDPQPLKEQPALNDSRYCLSSRLRVSATFWQNPRNHFRCQVQFYGLSENDEWTQDRAKPVTQIVSAEAWGRADDVIKIHWQEKKSNTILGSQEGNTMKTNDTYMKFSWLTVPEKSLDKEHRCIVRHENNKNGVDQEIIFPPIKTDVITMDPKDNCSKDANDTLLLQLTNTSAYYMYLLLLLKSVVYFAIITCCLLRRTAFCCNGEKSRAKRSGSGVKQTLNFDLLKLAGDVESNPGPSRGHMTEYKPTVRLATRDDVPRAVRTLAAAFADYPATRHTVDPDRHIERVTELQELFLTRVGLDIGKVWVADDGAAVAVWTTPESVEAGAVFAEIGPRMAELSGSRLAAQQQMEGLLAPHRPKEPAWFLATVGVSPDHQGKGLGSAVVLPGVEAAERAGVPAFLETSAPRNLPFYERLGFTVTADVEVPEGPRTWCMTRKPGA

SEQ ID NO: 19137 - protein, 786 aa, synthetic construct
MALPVTALLLPLALLLHAARPLEIQNPDPAVYQLRDSKSSDKSVCLFTDFDSQTNVSQSKDSDVYITDKCVLDMRSMDFKSNSAVAWSNKSDFACANAFNNSIIPEDTFFPSPESSDSTDHVKPKETENTKQPSKSCHKPKAIVHTEKVNMMSLTVLGLRMLFAKTVAVNFLLTAKLFFLRAKRSGSGATNFSLLKQAGDVEENPGPTSMDWIWRILFLVGAATGAHSFEGSGFEYAKEMRNAYWEIALLPNLTNQQKRAPIRKLYDDPSQSSELLSEAKKLNDSQTREEDLKNVFPPEVAVFEPSEAEISHTQKATLVCLATGFYPDHVELSWWVNGKEVHSGVCTDPQPLKEQPALNDSRYCLSSRLRVSATFWQNPRNHFRCQVQFYGLSENDEWTQDRAKPVTQIVSAEAWGRADDVIKIHWQEKKSNTILGSQEGNTMKTNDTYMKFSWLTVPEKSLDKEHRCIVRHENNKNGVDQEIIFPPIKTDVITMDPKDNCSKDANDTLLLQLTNTSAYYMYLLLLLKSVVYFAIITCCLLRRTAFCCNGEKSRAKRSGSGVKQTLNFDLLKLAGDVESNPGPSRGHMTEYKPTVRLATRDDVPRAVRTLAAAFADYPATRHTVDPDRHIERVTELQELFLTRVGLDIGKVWVADDGAAVAVWTTPESVEAGAVFAEIGPRMAELSGSRLAAQQQMEGLLAPHRPKEPAWFLATVGVSPDHQGKGLGSAVVLPGVEAAERAGVPAFLETSAPRNLPFYERLGFTVTADVEVPEGPRTWCMTRKPGA

SEQ ID NO: 19138 - protein, 1008 aa, synthetic construct
MALPVTALLLPLALLLHAARPLEIQNPDPAVYQLRDSKSSDKSVCLFTDFDSQTNVSQSKDSDVYITDKCVLDMRSMDFKSNSAVAWSNKSDFACANAFNNSIIPEDTFFPSPESSDSTDHVKPKETENTKQPSKSCHKPKAIVHTEKVNMMSLTVLGLRMLFAKTVAVNFLLTAKLFFLRAKRSGSGATNFSLLKQAGDVEENPGPTSMALPVTALLLPLALLLHAARPDEFEVQLVESGGGLVQAGGSLRLSCAASGITFSINTMGWYRQAPGKQRELVALISSIGDTYYADSVKGRFTISRDNAKNTVYLQMNSLKPEDTAVYYCKRFRTAAQGTDYWGQGTQVTVSSLEGGGGSGGGGSGGGGSGSGGSGSGGSGSGGSGSGGSFEVQLVESGGGLVQPGGSLRLSCAASGSIFGFNDMAWYRQAPGKQRELVALISRVGVTSSADSVKGRFTISRVNAKDTVYLQMNSLKPEDTAVYYCYMDQRLDGSTLAYWGQGTQVTVSSTREEDLKNVFPPEVAVFEPSEAEISHTQKATLVCLATGFYPDHVELSWWVNGKEVHSGVCTDPQPLKEQPALNDSRYCLSSRLRVSATFWQNPRNHFRCQVQFYGLSENDEWTQDRAKPVTQIVSAEAWGRADDVIKIHWQEKKSNTILGSQEGNTMKTNDTYMKFSWLTVPEKSLDKEHRCIVRHENNKNGVDQEIIFPPIKTDVITMDPKDNCSKDANDTLLLQLTNTSAYYMYLLLLLKSVVYFAIITCCLLRRTAFCCNGEKSRAKRSGSGVKQTLNFDLLKLAGDVESNPGPSRGHMTEYKPTVRLATRDDVPRAVRTLAAAFADYPATRHTVDPDRHIERVTELQELFLTRVGLDIGKVWVADDGAAVAVWTTPESVEAGAVFAEIGPRMAELSGSRLAAQQQMEGLLAPHRPKEPAWFLATVGVSPDHQGKGLGSAVVLPGVEAAERAGVPAFLETSAPRNLPFYERLGFTVTADVEVPEGPRTWCMTRKPGA

SEQ ID NO: 19139 - protein, 922 aa, synthetic construct
MALPVTALLLPLALLLHAARPLEIQNPDPAVYQLRDSKSSDKSVCLFTDFDSQTNVSQSKDSDVYITDKCVLDMRSMDFKSNSAVAWSNKSDFACANAFNNSIIPEDTFFPSPESSDSTDHVKPKETENTKQPSKSCHKPKAIVHTEKVNMMSLTVLGLRMLFAKTVAVNFLLTAKLFFLRAKRSGSGATNFSLLKQAGDVEENPGPTSMALPVTALLLPLALLLHAARPGMRTEDLPKAVVFLEPQWYRVLEKDSVTLKCQGAYSPEDNSTQWFHNESLISSQASSYFIDAATVDDSGEYRCQTNLSTLSDPVQLEVHIGWLLLQAPRWVFKEEDPIHLRCHSWKNTALHKVTYLQNGKGRKYFHHNSDFYIPKATLKDSGSYFCRGLVGSKNVSSETVNITITQGLAVSTISSFFPPGYQTREEDLKNVFPPEVAVFEPSEAEISHTQKATLVCLATGFYPDHVELSWWVNGKEVHSGVCTDPQPLKEQPALNDSRYCLSSRLRVSATFWQNPRNHFRCQVQFYGLSENDEWTQDRAKPVTQIVSAEAWGRADDVIKIHWQEKKSNTILGSQEGNTMKTNDTYMKFSWLTVPEKSLDKEHRCIVRHENNKNGVDQEIIFPPIKTDVITMDPKDNCSKDANDTLLLQLTNTSAYYMYLLLLLKSVVYFAIITCCLLRRTAFCCNGEKSRAKRSGSGVKQTLNFDLLKLAGDVESNPGPSRGHMTEYKPTVRLATRDDVPRAVRTLAAAFADYPATRHTVDPDRHIERVTELQELFLTRVGLDIGKVWVADDGAAVAVWTTPESVEAGAVFAEIGPRMAELSGSRLAAQQQMEGLLAPHRPKEPAWFLATVGVSPDHQGKGLGSAVVLPGVEAAERAGVPAFLETSAPRNLPFYERLGFTVTADVEVPEGPRTWCMTRKPGA

SEQ ID NO: 19140 - protein, 550 aa, synthetic construct
MALPVTALLLPLALLLHAARPLEIQNPDPAVYQLRDSKSSDKSVCLFTDFDSQTNVSQSKDSDVYITDKCVLDMRSMDFKSNSAVAWSNKSDFACANAFNNSIIPEDTFFPSPESSDSTDHVKPKETENTKQPSKSCHKPKAIVHTEKVNMMSLTVLGLRMLFAKTVAVNFLLTAKLFFLRAKRSGSGATNFSLLKQAGDVEENPGPTSATMALPVTALLLPLALLLHAARPMDPDLEIRAAFLRQRNTALRTEVAELEQEVQRLENEVSQYETRYGPLGGGKTREEDLKNVFPPEVAVFEPSEAEISHTQKATLVCLATGFYPDHVELSWWVNGKEVHSGVCTDPQPLKEQPALNDSRYCLSSRLRVSATFWQNPRNHFRCQVQFYGLSENDEWTQDRAKPVTQIVSAEAWGRADDVIKIHWQEKKSNTILGSQEGNTMKTNDTYMKFSWLTVPEKSLDKEHRCIVRHENNKNGVDQEIIFPPIKTDVITMDPKDNCSKDANDTLLLQLTNTSAYYMYLLLLLKSVVYFAIITCCLLRRTAFCCNGEKS

SEQ ID NO: 19141 - protein, 550 aa, synthetic construct
MALPVTALLLPLALLLHAARPLEIQNPDPAVYQLRDSKSSDKSVCLFTDFDSQTNVSQSKDSDVYITDKCVLDMRSMDFKSNSAVAWSNKSDFACANAFNNSIIPEDTFFPSPESSDSTDHVKPKETENTKQPSKSCHKPKAIVHTEKVNMMSLTVLGLRMLFAKTVAVNFLLTAKLFFLRAKRSGSGATNFSLLKQAGDVEENPGPTSATMALPVTALLLPLALLLHAARPMDPDLEIEAAFLERENTALETRVAELRQRVQRLRNRVSQYRTRYGPLGGGKTREEDLKNVFPPEVAVFEPSEAEISHTQKATLVCLATGFYPDHVELSWWVNGKEVHSGVCTDPQPLKEQPALNDSRYCLSSRLRVSATFWQNPRNHFRCQVQFYGLSENDEWTQDRAKPVTQIVSAEAWGRADDVIKIHWQEKKSNTILGSQEGNTMKTNDTYMKFSWLTVPEKSLDKEHRCIVRHENNKNGVDQEIIFPPIKTDVITMDPKDNCSKDANDTLLLQLTNTSAYYMYLLLLLKSVVYFAIITCCLLRRTAFCCNGEKS

SEQ ID NO: 19142 - protein, 785 aa, synthetic construct
MALPVTALLLPLALLLHAARPLEIQNPDPAVYQLRDSKSSDKSVCLFTDFDSQTNVSQSKDSDVYITDKCVLDMRSMDFKSNSAVAWSNKSDFACANAFNNSIIPEDTFFPSPESSDSTDHVKPKETENTKQPSKSCHKPKAIVHTEKVNMMSLTVLGLRMLFAKTVAVNFLLTAKLFFLRAKRSGSGATNFSLLKQAGDVEENPGPTSATMALPVTALLLPLALLLHAARPLFNQEVQIPLTESYCGPCPKNWICYKNNCYQFFDESKNWYESQASCMSQNASLLKVYSKEDQDLLKLVKSAHWMGLVHIPTNGSWQWEDGSILSPNLLTIIEMQKGDCALYASSFKGYIENCSTPNTYICMQRTVSGGGGSGGGGSGGGGDLFNQEVQIPLTESYCGPCPKNWICYKNNCYQFFDESKNWYESQASCMSQNASLLKVYSKEDQDLLKLVKSAHWMGLVHIPTNGSWQWEDGSILSPNLLTIIEMQKGDCALYASSFKGYIENCSTPNTYICMQRTVTREEDLKNVFPPEVAVFEPSEAEISHTQKATLVCLATGFYPDHVELSWWVNGKEVHSGVCTDPQPLKEQPALNDSRYCLSSRLRVSATFWQNPRNHFRCQVQFYGLSENDEWTQDRAKPVTQIVSAEAWGRADDVIKIHWQEKKSNTILGSQEGNTMKTNDTYMKFSWLTVPEKSLDKEHRCIVRHENNKNGVDQEIIFPPIKTDVITMDPKDNCSKDANDTLLLQLTNTSAYYMYLLLLLKSVVYFAIITCCLLRRTAFCCNGEKS

SEQ ID NO: 19143 - protein, 785 aa, synthetic construct
MALPVTALLLPLALLLHAARPLEIQNPDPAVYQLRDSKSSDKSVCLFTDFDSQTNVSQSKDSDVYITDKCVLDMRSMDFKSNSAVAWSNKSDFACANAFNNSIIPEDTFFPSPESSDSTDHVKPKETENTKQPSKSCHKPKAIVHTEKVNMMSLTVLGLRMLFAKTVAVNFLLTAKLFFLRAKRSGSGATNFSLLKQAGDVEENPGPTSATMALPVTALLLPLALLLHAARPLFNQEVQIPLTESYCGPCPKNWICYKNNCYQFFDESKNWYESQASCMSQNASLLKVYSKEDQDLLKLVKSAHWMGLVHIPTNGSWQWEDGSILSPNLLTIIEMQKGDCALYASSFKGFIENCSTPNTYICMQRTVGGGGSGGGGSGGGGSDLFNQEVQIPLTESYCGPCPKNWICYKNNCYQFFDESKNWYESQASCMSQNASLLKVYSKEDQDLLKLVKSAHWMGLVHIPTNGSWQWEDGSILSPNLLTIIEMQKGDCALYASSFKGFIENCSTPNTYICMQRTVTREEDLKNVFPPEVAVFEPSEAEISHTQKATLVCLATGFYPDHVELSWWVNGKEVHSGVCTDPQPLKEQPALNDSRYCLSSRLRVSATFWQNPRNHFRCQVQFYGLSENDEWTQDRAKPVTQIVSAEAWGRADDVIKIHWQEKKSNTILGSQEGNTMKTNDTYMKFSWLTVPEKSLDKEHRCIVRHENNKNGVDQEIIFPPIKTDVITMDPKDNCSKDANDTLLLQLTNTSAYYMYLLLLLKSVVYFAIITCCLLRRTAFCCNGEKS

SEQ ID NO: 19144 - protein, 811 aa, synthetic construct
MALPVTALLLPLALLLHAARPLEIQNPDPAVYQLRDSKSSDKSVCLFTDFDSQTNVSQSKDSDVYITDKCVLDMRSMDFKSNSAVAWSNKSDFACANAFNNSIIPEDTFFPSPESSDSTDHVKPKETENTKQPSKSCHKPKAIVHTEKVNMMSLTVLGLRMLFAKTVAVNFLLTAKLFFLRAKRSGSGATNFSLLKQAGDVEENPGPTSMALPVTALLLPLALLLHAARPMDPDLEIRAAFLRQRNTALRTEVAELEQEVQRLENEVSQYETRYGPLGGGKGTGGGGSGGGGSGGGGSEFDIQMTQSPSSLSASVGDRVTITCKASDHINNWLAWYQQKPGQAPKLLIYGATTLETGVPSRFSGSGSGTDYTLTISSLQPEDFATYYCQQSWNTPWTFGQGTKLEIKRGGGGSGGGGSGGGGSQVQLQQPGAELVKPGASVKMSCKASGYAFSSYWINWMKQKPGQGLEWIGQIYPGDGDTNYNGKFKGRATLTADTSSSTAYMQLSSLTSEDSAVYFCARSITTVVGCAMDYWGQGTSVTVSSTREEDLKNVFPPEVAVFEPSEAEISHTQKATLVCLATGFYPDHVELSWWVNGKEVHSGVCTDPQPLKEQPALNDSRYCLSSRLRVSATFWQNPRNHFRCQVQFYGLSENDEWTQDRAKPVTQIVSAEAWGRADDVIKIHWQEKKSNTILGSQEGNTMKTNDTYMKFSWLTVPEKSLDKEHRCIVRHENNKNGVDQEIIFPPIKTDVITMDPKDNCSKDANDTLLLQLTNTSAYYMYLLLLLKSVVYFAIITCCLLRRTAFCCNGEKS

SEQ ID NO: 19145 - protein, 1046 aa, synthetic construct
MALPVTALLLPLALLLHAARPLEIQNPDPAVYQLRDSKSSDKSVCLFTDFDSQTNVSQSKDSDVYITDKCVLDMRSMDFKSNSAVAWSNKSDFACANAFNNSIIPEDTFFPSPESSDSTDHVKPKETENTKQPSKSCHKPKAIVHTEKVNMMSLTVLGLRMLFAKTVAVNFLLTAKLFFLRAKRSGSGATNFSLLKQAGDVEENPGPTSMALPVTALLLPLALLLHAARPLFNQEVQIPLTESYCGPCPKNWICYKNNCYQFFDESKNWYESQASCMSQNASLLKVYSKEDQDLLKLVKSAHWMGLVHIPTNGSWQWEDGSILSPNLLTIIEMQKGDCALYASSFKGFIENCSTPNTYICMQRTVGGGGSGGGGSGGGGSDLFNQEVQIPLTESYCGPCPKNWICYKNNCYQFFDESKNWYESQASCMSQNASLLKVYSKEDQDLLKLVKSAHWMGLVHIPTNGSWQWEDGSILSPNLLTIIEMQKGDCALYASSFKGFIENCSTPNTYICMQRTVGTGGGGSGGGGSGGGGSEFDIQMTQSPSSLSASVGDRVTITCKASDHINNWLAWYQQKPGQAPKLLIYGATTLETGVPSRFSGSGSGTDYTLTISSLQPEDFATYYCQQSWNTPWTFGQGTKLEIKRGGGGSGGGGSGGGGSQVQLQQPGAELVKPGASVKMSCKASGYAFSSYWINWMKQKPGQGLEWIGQIYPGDGDTNYNGKFKGRATLTADTSSSTAYMQLSSLTSEDSAVYFCARSITTVVGCAMDYWGQGTSVTVSSTREEDLKNVFPPEVAVFEPSEAEISHTQKATLVCLATGFYPDHVELSWWVNGKEVHSGVCTDPQPLKEQPALNDSRYCLSSRLRVSATFWQNPRNHFRCQVQFYGLSENDEWTQDRAKPVTQIVSAEAWGRADDVIKIHWQEKKSNTILGSQEGNTMKTNDTYMKFSWLTVPEKSLDKEHRCIVRHENNKNGVDQEIIFPPIKTDVITMDPKDNCSKDANDTLLLQLTNTSAYYMYLLLLLKSVVYFAIITCCLLRRTAFCCNGEKS

SEQ ID NO: 19146 - protein, 751 aa, synthetic construct
MALPVTALLLPLALLLHAARPLEIQNPDPAVYQLRDSKSSDKSVCLFTDFDSQTNVSQSKDSDVYITDKCVLDMRSMDFKSNSAVAWSNKSDFACANAFNNSIIPEDTFFPSPESSDSTDHVKPKETENTKQPSKSCHKPKAIVHTEKVNMMSLTVLGLRMLFAKTVAVNFLLTAKLFFLRAKRSGSGATNFSLLKQAGDVEENPGPTSMALPVTALLLPLALLLHAARPQSVLTQPPSVSGAPGQRVTISCTGSSSNIGAGYDVHWYQQLPGTAPKLLIFGNSNRPSGVPDRFSGFKSGTSASLAITGLQAEDEADYFCQSYDSSLSGSGVFGTGTKVTVLGGGGGSGGGGSGGGGSQMQLVQSGGGLVQPGRSLRLSCAASGFTFDDYAMHWVRQAPGKGLEWVSGISWNSGSIGYADSVKGRFTISRDNAKNSLYLQMNSLRAEDTALYYCAKDIHSGSYYGLLYYAMDVWGQGTTVTVSSTREEDLKNVFPPEVAVFEPSEAEISHTQKATLVCLATGFYPDHVELSWWVNGKEVHSGVCTDPQPLKEQPALNDSRYCLSSRLRVSATFWQNPRNHFRCQVQFYGLSENDEWTQDRAKPVTQIVSAEAWGRADDVIKIHWQEKKSNTILGSQEGNTMKTNDTYMKFSWLTVPEKSLDKEHRCIVRHENNKNGVDQEIIFPPIKTDVITMDPKDNCSKDANDTLLLQLTNTSAYYMYLLLLLKSVVYFAIITCCLLRRTAFCCNGEKS

SEQ ID NO: 19147 - protein, 588 aa, synthetic construct
MALPVTALLLPLALLLHAARPLEIQNPDPAVYQLRDSKSSDKSVCLFTDFDSQTNVSQSKDSDVYITDKCVLDMRSMDFKSNSAVAWSNKSDFACANAFNNSIIPEDTFFPSPESSDSTDHVKPKETENTKQPSKSCHKPKAIVHTEKVNMMSLTVLGLRMLFAKTVAVNFLLTAKLFFLRAKRSGSGATNFSLLKQAGDVEENPGPTSMALPVTALLLPLALLLHAARPMCMPCFTTDHQMARKCDDCCGGKGRGKCYGPQCLCRLEGGGGSGGGGSGGGGSFEVCMPCFTTDQQMARKCSDCCGGKGRGKCYGPQCLCRTREEDLKNVFPPEVAVFEPSEAEISHTQKATLVCLATGFYPDHVELSWWVNGKEVHSGVCTDPQPLKEQPALNDSRYCLSSRLRVSATFWQNPRNHFRCQVQFYGLSENDEWTQDRAKPVTQIVSAEAWGRADDVIKIHWQEKKSNTILGSQEGNTMKTNDTYMKFSWLTVPEKSLDKEHRCIVRHENNKNGVDQEIIFPPIKTDVITMDPKDNCSKDANDTLLLQLTNTSAYYMYLLLLLKSVVYFAIITCCLLRRTAFCCNGEKS

SEQ ID NO: 19148 - protein, 798 aa, synthetic construct
MALPVTALLLPLALLLHAARPLEIQNPDPAVYQLRDSKSSDKSVCLFTDFDSQTNVSQSKDSDVYITDKCVLDMRSMDFKSNSAVAWSNKSDFACANAFNNSIIPEDTFFPSPESSDSTDHVKPKETENTKQPSKSCHKPKAIVHTEKVNMMSLTVLGLRMLFAKTVAVNFLLTAKLFFLRAKRSGSGATNFSLLKQAGDVEENPGPTSMALPVTALLLPLALLLHAARPFEVCMPCFTTDQQMARKCSDCCGGKGRGKCYGPQCLCRGTGGGGSGGGGSGGGGSEFDIQMTQSPSSLSASVGDRVTITCKASDHINNWLAWYQQKPGQAPKLLIYGATTLETGVPSRFSGSGSGTDYTLTISSLQPEDFATYYCQQSWNTPWTFGQGTKLEIKRGGGGSGGGGSGGGGSQVQLQQPGAELVKPGASVKMSCKASGYAFSSYWINWMKQKPGQGLEWIGQIYPGDGDTNYNGKFKGRATLTADTSSSTAYMQLSSLTSEDSAVYFCARSITTVVGCAMDYWGQGTSVTVSSTREEDLKNVFPPEVAVFEPSEAEISHTQKATLVCLATGFYPDHVELSWWVNGKEVHSGVCTDPQPLKEQPALNDSRYCLSSRLRVSATFWQNPRNHFRCQVQFYGLSENDEWTQDRAKPVTQIVSAEAWGRADDVIKIHWQEKKSNTILGSQEGNTMKTNDTYMKFSWLTVPEKSLDKEHRCIVRHENNKNGVDQEIIFPPIKTDVITMDPKDNCSKDANDTLLLQLTNTSAYYMYLLLLLKSVVYFAIITCCLLRRTAFCCNGEKS

SEQ ID NO: 19149 - protein, 928 aa, synthetic construct
MALPVTALLLPLALLLHAARPLEIQNPDPAVYQLRDSKSSDKSVCLFTDFDSQTNVSQSKDSDVYITDKCVLDMRSMDFKSNSAVAWSNKSDFACANAFNNSIIPEDTFFPSPESSDSTDHVKPKETENTKQPSKSCHKPKAIVHTEKVNMMSLTVLGLRMLFAKTVAVNFLLTAKLFFLRAKRSGSGATNFSLLKQAGDVEENPGPTSMALPVTALLLPLALLLHAARPFESPVAPACDPRLLNKLLRDSHLLHSRLSQCPDVDPLSIPVLLPAVDFSLGEWKTQTEQSKAQDILGAVSLLLEGVMAARGQLEPSCLSSLLGQLSGQVRLLLGALQGLLGTQLPLQGRTTAHKDPNALFLSLQQLLRGKVRFLLLVEGPTLCVRRTLPTTAVPSSTSGTGGGGSGGGGSGGGGSEFDIQMTQSPSSLSASVGDRVTITCKASDHINNWLAWYQQKPGQAPKLLIYGATTLETGVPSRFSGSGSGTDYTLTISSLQPEDFATYYCQQSWNTPWTFGQGTKLEIKRGGGGSGGGGSGGGGSQVQLQQPGAELVKPGASVKMSCKASGYAFSSYWINWMKQKPGQGLEWIGQIYPGDGDTNYNGKFKGRATLTADTSSSTAYMQLSSLTSEDSAVYFCARSITTVVGCAMDYWGQGTSVTVSSTREEDLKNVFPPEVAVFEPSEAEISHTQKATLVCLATGFYPDHVELSWWVNGKEVHSGVCTDPQPLKEQPALNDSRYCLSSRLRVSATFWQNPRNHFRCQVQFYGLSENDEWTQDRAKPVTQIVSAEAWGRADDVIKIHWQEKKSNTILGSQEGNTMKTNDTYMKFSWLTVPEKSLDKEHRCIVRHENNKNGVDQEIIFPPIKTDVITMDPKDNCSKDANDTLLLQLTNTSAYYMYLLLLLKSVVYFAIITCCLLRRTAFCCNGEKS

SEQ ID NO: 19150 - protein, 835 aa, synthetic construct
MALPVTALLLPLALLLHAARPLEIQNPDPAVYQLRDSKSSDKSVCLFTDFDSQTNVSQSKDSDVYITDKCVLDMRSMDFKSNSAVAWSNKSDFACANAFNNSIIPEDTFFPSPESSDSTDHVKPKETENTKQPSKSCHKPKAIVHTEKVNMMSLTVLGLRMLFAKTVAVNFLLTAKLFFLRAKRSGSGATNFSLLKQAGDVEENPGPTSMALPVTALLLPLALLLHAARPFEMGSWEEFELRLNAIEERLYALGGSEAELAYFEYVIADFEGNLQRYKGKGNPEVEALYFEADAIFEELVAYRHNGTGGGGSGGGGSGGGGSEFDIQMTQSPSSLSASVGDRVTITCKASDHINNWLAWYQQKPGQAPKLLIYGATTLETGVPSRFSGSGSGTDYTLTISSLQPEDFATYYCQQSWNTPWTFGQGTKLEIKRGGGGSGGGGSGGGGSQVQLQQPGAELVKPGASVKMSCKASGYAFSSYWINWMKQKPGQGLEWIGQIYPGDGDTNYNGKFKGRATLTADTSSSTAYMQLSSLTSEDSAVYFCARSITTVVGCAMDYWGQGTSVTVSSTREEDLKNVFPPEVAVFEPSEAEISHTQKATLVCLATGFYPDHVELSWWVNGKEVHSGVCTDPQPLKEQPALNDSRYCLSSRLRVSATFWQNPRNHFRCQVQFYGLSENDEWTQDRAKPVTQIVSAEAWGRADDVIKIHWQEKKSNTILGSQEGNTMKTNDTYMKFSWLTVPEKSLDKEHRCIVRHENNKNGVDQEIIFPPIKTDVITMDPKDNCSKDANDTLLLQLTNTSAYYMYLLLLLKSVVYFAIITCCLLRRTAFCCNGEKS

SEQ ID NO: 19151 - protein, 869 aa, synthetic construct
MALPVTALLLPLALLLHAARPLEEDLKNVFPPEVAVFEPSEAEISHTQKATLVCLATGFYPDHVELSWWVNGKEVHSGVSTDPQPLKEQPALNDSRYCLSSRLRVSATFWQNPRNHFRCQVQFYGLSENDEWTQDRAKPVTQIVSAEAWGRADCGFTSESYQQGVLSATNLSVIGFRILLLKVAGFNLLMTLRLWSSRAKRSGSGATNFSLLKQAGDVEENPGPTSMALPVTALLLPLALLLHAARPDIQMTQTTSSLSASLGDRVTISCRASQDISKYLNWYQQKPDGTVKLLIYHTSRLHSGVPSRFSGSGSGTDYSLTISNLEQEDIATYFCQQGNTLPYTFGGGTKLEITGGGGSGGGGSGGGGSEVKLQESGPGLVAPSQSLSVTCTVSGVSLPDYGVSWIRQPPRKGLEWLGVIWGSETTYYNSALKSRLTIIKDNSKSQVFLKMNSLQTDDTAIYYCAKHYYYGGSYAMDYWGQGTSVTVSSTRIQNPDPAVYQLRDSKSSDKSVCLFTDFDSQTNVSQSKDSDVYITDKTVLDMRSMDFKSNSAVAWSNKSDFACANAFNNSIIPEDTFFPSPESSCDVKLVEKSFETDTNLNFQILYEILLGKATLYAVLVSALVLMAMVKRKDSRGRAKRSGSGVKQTLNFDLLKLAGDVESNPGPSRGHMTEYKPTVRLATRDDVPRAVRTLAAAFADYPATRHTVDPDRHIERVTELQELFLTRVGLDIGKVWVADDGAAVAVWTTPESVEAGAVFAEIGPRMAELSGSRLAAQQQMEGLLAPHRPKEPAWFLATVGVSPDHQGKGLGSAVVLPGVEAAERAGVPAFLETSAPRNLPFYERLGFTVTADVEVPEGPRTWCMTRKPGA

SEQ ID NO: 19152 - protein, 870 aa, synthetic construct
MALPVTALLLPLALLLHAARPLEEDLKNVFPPEVAVFEPSEAEISHTQKATLVCLATGFYPDHVELSWWVNGKEVHSGVSTDPQPLKEQPALNDSRYCLSSRLRVSATFWQNPRNHFRCQVQFYGLSENDEWTQDRAKPVTQIVSAEAWGRADCGFTSESYQQGVLSATNLSVIGFRILLLKVAGFNLLMTLRLWSSRAKRSGSGATNFSLLKQAGDVEENPGPTSTMALPVTALLLPLALLLHAARPEIVMTQSPATLSLSPGERATLSCRASQDISKYLNWYQQKPGQAPRLLIYHTSRLHSGIPARFSGSGSGTDYTLTISSLQPEDFAVYFCQQGNTLPYTFGQGTKLEIKGGGGSGGGGSGGGGSQVQLQESGPGLVKPSETLSLTCTVSGVSLPDYGVSWIRQPPGKGLEWIGVIWGSETTYYNSSLKSRVTISKDNSKNQVSLKLSSVTAADTAVYYCAKHYYYGGSYAMDYWGQGTLVTVSSTRIQNPDPAVYQLRDSKSSDKSVCLFTDFDSQTNVSQSKDSDVYITDKTVLDMRSMDFKSNSAVAWSNKSDFACANAFNNSIIPEDTFFPSPESSCDVKLVEKSFETDTNLNFQILYEILLGKATLYAVLVSALVLMAMVKRKDSRGRAKRSGSGVKQTLNFDLLKLAGDVESNPGPSRGHMTEYKPTVRLATRDDVPRAVRTLAAAFADYPATRHTVDPDRHIERVTELQELFLTRVGLDIGKVWVADDGAAVAVWTTPESVEAGAVFAEIGPRMAELSGSRLAAQQQMEGLLAPHRPKEPAWFLATVGVSPDHQGKGLGSAVVLPGVEAAERAGVPAFLETSAPRNLPFYERLGFTVTADVEVPEGPRTWCMTRKPGA

SEQ ID NO: 19153 - protein, 871 aa, synthetic construct
MALPVTALLLPLALLLHAARPLEEDLKNVFPPEVAVFEPSEAEISHTQKATLVCLATGFYPDHVELSWWVNGKEVHSGVSTDPQPLKEQPALNDSRYCLSSRLRVSATFWQNPRNHFRCQVQFYGLSENDEWTQDRAKPVTQIVSAEAWGRADCGFTSESYQQGVLSATNLSVIGFRILLLKVAGFNLLMTLRLWSSRAKRSGSGATNFSLLKQAGDVEENPGPTSTMALPVTALLLPLALLLHAARPDEIVLTQSPATLSLSPGERATLSCSASSSVSYMHWYQQKPGQAPRLLIYDTSKLASGIPARFSGSGSGTDFTLTISSLEPEDVAVYYCFQGSVYPFTFGQGTKLEIKRGGGGSGGGGSGGGGSQVQLQESGPGLVKPSQTLSLTCTVSGGSISTSGMGVGWIRQHPGKGLEWIGHIWWDDDKRYNPALKSRVTISVDTSKNQFSLKLSSVTAADTAVYYCARMELWSYYFDYWGQGTLVTVSSTRIQNPDPAVYQLRDSKSSDKSVCLFTDFDSQTNVSQSKDSDVYITDKTVLDMRSMDFKSNSAVAWSNKSDFACANAFNNSIIPEDTFFPSPESSCDVKLVEKSFETDTNLNFQILYEILLGKATLYAVLVSALVLMAMVKRKDSRGRAKRSGSGVKQTLNFDLLKLAGDVESNPGPSRGHMTEYKPTVRLATRDDVPRAVRTLAAAFADYPATRHTVDPDRHIERVTELQELFLTRVGLDIGKVWVADDGAAVAVWTTPESVEAGAVFAEIGPRMAELSGSRLAAQQQMEGLLAPHRPKEPAWFLATVGVSPDHQGKGLGSAVVLPGVEAAERAGVPAFLETSAPRNLPFYERLGFTVTADVEVPEGPRTWCMTRKPGA

SEQ ID NO: 19154 - protein, 867 aa, synthetic construct
MALPVTALLLPLALLLHAARPLEEDLKNVFPPEVAVFEPSEAEISHTQKATLVCLATGFYPDHVELSWWVNGKEVHSGVSTDPQPLKEQPALNDSRYCLSSRLRVSATFWQNPRNHFRCQVQFYGLSENDEWTQDRAKPVTQIVSAEAWGRADCGFTSESYQQGVLSATNLSVIGFRILLLKVAGFNLLMTLRLWSSRAKRSGSGATNFSLLKQAGDVEENPGPTSMALPVTALLLPLALLLHAARPDIQMTQSPSSLSASVGDRVTITCRASQDISNYLNWYQQKPGKAPKLLIYYTSRLHSGVPSRFSGSGSGTDFTLTISSLQPEDFATYYCQQGNTLPYTFGQGTKVEIKRGGGGSGGGGSGGGGSEVQLVESGGGLVQPGGSLRLSCAASGFTFSDYFMSWVRQAPGKGLEWVATISNGGTYTYYPDSVKGRFTISRDNSKNTLYLQMNSLRAEDTAVYYCARFDGYIFDYWGQGTLVTVSSTRIQNPDPAVYQLRDSKSSDKSVCLFTDFDSQTNVSQSKDSDVYITDKTVLDMRSMDFKSNSAVAWSNKSDFACANAFNNSIIPEDTFFPSPESSCDVKLVEKSFETDTNLNFQILYEILLGKATLYAVLVSALVLMAMVKRKDSRGRAKRSGSGVKQTLNFDLLKLAGDVESNPGPSRGHMTEYKPTVRLATRDDVPRAVRTLAAAFADYPATRHTVDPDRHIERVTELQELFLTRVGLDIGKVWVADDGAAVAVWTTPESVEAGAVFAEIGPRMAELSGSRLAAQQQMEGLLAPHRPKEPAWFLATVGVSPDHQGKGLGSAVVLPGVEAAERAGVPAFLETSAPRNLPFYERLGFTVTADVEVPEGPRTWCMTRKPGA

SEQ ID NO: 19155 - protein, 871 aa, synthetic construct
MALPVTALLLPLALLLHAARPLEEDLKNVFPPEVAVFEPSEAEISHTQKATLVCLATGFYPDHVELSWWVNGKEVHSGVSTDPQPLKEQPALNDSRYCLSSRLRVSATFWQNPRNHFRCQVQFYGLSENDEWTQDRAKPVTQIVSAEAWGRADCGFTSESYQQGVLSATNLSVIGFRILLLKVAGFNLLMTLRLWSSRAKRSGSGATNFSLLKQAGDVEENPGPTSMALPVTALLLPLALLLHAARPDIQMTQSPSSLSASVGDRVTITCKASDHINNWLAWYQQKPGQAPKLLIYGATTLETGVPSRFSGSGSGTDYTLTISSLQPEDFATYYCQQSWNTPWTFGQGTKLEIKRGGGGSGGGGSGGGGSQVQLQQPGAELVKPGASVKMSCKASGYAFSSYWINWMKQKPGQGLEWIGQIYPGDGDTNYNGKFKGRATLTADTSSSTAYMQLSSLTSEDSAVYFCARSITTVVGCAMDYWGQGTSVTVSSTRIQNPDPAVYQLRDSKSSDKSVCLFTDFDSQTNVSQSKDSDVYITDKTVLDMRSMDFKSNSAVAWSNKSDFACANAFNNSIIPEDTFFPSPESSCDVKLVEKSFETDTNLNFQILYEILLGKATLYAVLVSALVLMAMVKRKDSRGRAKRSGSGVKQTLNFDLLKLAGDVESNPGPSRGHMTEYKPTVRLATRDDVPRAVRTLAAAFADYPATRHTVDPDRHIERVTELQELFLTRVGLDIGKVWVADDGAAVAVWTTPESVEAGAVFAEIGPRMAELSGSRLAAQQQMEGLLAPHRPKEPAWFLATVGVSPDHQGKGLGSAVVLPGVEAAERAGVPAFLETSAPRNLPFYERLGFTVTADVEVPEGPRTWCMTRKPGA

SEQ ID NO: 19156 - protein, 873 aa, synthetic construct
MALPVTALLLPLALLLHAARPLEEDLKNVFPPEVAVFEPSEAEISHTQKATLVCLATGFYPDHVELSWWVNGKEVHSGVSTDPQPLKEQPALNDSRYCLSSRLRVSATFWQNPRNHFRCQVQFYGLSENDEWTQDRAKPVTQIVSAEAWGRADCGFTSESYQQGVLSATNLSVIGFRILLLKVAGFNLLMTLRLWSSRAKRSGSGATNFSLLKQAGDVEENPGPTSMALPVTALLLPLALLLHAARPQIVLSQSPAILSASPGEKVTMTCRASSSVSYMHWYQQKPGSSPKPWIYATSNLASGVPARFSGSGSGTSYSFTISRVEAEDAATYYCQQWTFNPPTFGGGTRLEIKRTVAAGGGGSGGGGSGGGGSQAYLQQSGAELVRPGASVKMSCKASGYTFTSYNMHWVKQTPRQGLEWIGGIYPGNGDTSYNQKFKGKATLTVGKSSSTAYMQLSSLTSEDSAVYFCARYDYNYAMDYWGQGTSVTVSSASTRIQNPDPAVYQLRDSKSSDKSVCLFTDFDSQTNVSQSKDSDVYITDKTVLDMRSMDFKSNSAVAWSNKSDFACANAFNNSIIPEDTFFPSPESSCDVKLVEKSFETDTNLNFQILYEILLGKATLYAVLVSALVLMAMVKRKDSRGRAKRSGSGVKQTLNFDLLKLAGDVESNPGPSRGHMTEYKPTVRLATRDDVPRAVRTLAAAFADYPATRHTVDPDRHIERVTELQELFLTRVGLDIGKVWVADDGAAVAVWTTPESVEAGAVFAEIGPRMAELSGSRLAAQQQMEGLLAPHRPKEPAWFLATVGVSPDHQGKGLGSAVVLPGVEAAERAGVPAFLETSAPRNLPFYERLGFTVTADVEVPEGPRTWCMTRKPGA

SEQ ID NO: 19157 - protein, 871 aa, synthetic construct
MALPVTALLLPLALLLHAARPLEEDLKNVFPPEVAVFEPSEAEISHTQKATLVCLATGFYPDHVELSWWVNGKEVHSGVSTDPQPLKEQPALNDSRYCLSSRLRVSATFWQNPRNHFRCQVQFYGLSENDEWTQDRAKPVTQIVSAEAWGRADCGFTSESYQQGVLSATNLSVIGFRILLLKVAGFNLLMTLRLWSSRAKRSGSGATNFSLLKQAGDVEENPGPTSMALPVTALLLPLALLLHAARPEIVLTQSPATLSLSPGERATLSCRASQSVSSYLAWYQQKPGQAPRLLIYDASNRATGIPARFSGSGSGTDFTLTISSLEPEDFAVYYCQQRSNWPITFGQGTRLEIKGGGGSGGGGSGGGGSEVQLVESGGGLVQPDRSLRLSCAASGFTFHDYAMHWVRQAPGKGLEWVSTISWNSGTIGYADSVKGRFTISRDNAKNSLYLQMNSLRAEDTALYYCAKDIQYGNYYYGMDVWGQGTTVTVSSTRIQNPDPAVYQLRDSKSSDKSVCLFTDFDSQTNVSQSKDSDVYITDKTVLDMRSMDFKSNSAVAWSNKSDFACANAFNNSIIPEDTFFPSPESSCDVKLVEKSFETDTNLNFQILYEILLGKATLYAVLVSALVLMAMVKRKDSRGRAKRSGSGVKQTLNFDLLKLAGDVESNPGPSRGHMTEYKPTVRLATRDDVPRAVRTLAAAFADYPATRHTVDPDRHIERVTELQELFLTRVGLDIGKVWVADDGAAVAVWTTPESVEAGAVFAEIGPRMAELSGSRLAAQQQMEGLLAPHRPKEPAWFLATVGVSPDHQGKGLGSAVVLPGVEAAERAGVPAFLETSAPRNLPFYERLGFTVTADVEVPEGPRTWCMTRKPGA

SEQ ID NO: 19158 - protein, 869 aa, synthetic construct
MALPVTALLLPLALLLHAARPLEEDLKNVFPPEVAVFEPSEAEISHTQKATLVCLATGFYPDHVELSWWVNGKEVHSGVSTDPQPLKEQPALNDSRYCLSSRLRVSATFWQNPRNHFRCQVQFYGLSENDEWTQDRAKPVTQIVSAEAWGRADCGFTSESYQQGVLSATNLSVIGFRILLLKVAGFNLLMTLRLWSSRAKRSGSGATNFSLLKQAGDVEENPGPTSMALPVTALLLPLALLLHAARPDIQMTQSPSSLSASVGDRVTITCRASQDVNTAVAWYQQKPGKAPKLLIYSASFLESGVPSRFSGSRSGTDFTLTISSLQPEDFATYYCQQHYTTPPTFGQTKVEIKRGGGGSGGGGSGGGGSEVQLVESGGGLVQPGGSLRLSCAASGFNIKDTYIHWVRQAPGKGLEWVARIYPTNGYTRYADSVKGRFTISADTSKNTAYLQMNSLRAEDTAVYYCSRWGGDGFYAMDVWGQGTLVTVSSTRIQNPDPAVYQLRDSKSSDKSVCLFTDFDSQTNVSQSKDSDVYITDKTVLDMRSMDFKSNSAVAWSNKSDFACANAFNNSIIPEDTFFPSPESSCDVKLVEKSFETDTNLNFQILYEILLGKATLYAVLVSALVLMAMVKRKDSRGRAKRSGSGVKQTLNFDLLKLAGDVESNPGPSRGHMTEYKPTVRLATRDDVPRAVRTLAAAFADYPATRHTVDPDRHIERVTELQELFLTRVGLDIGKVWVADDGAAVAVWTTPESVEAGAVFAEIGPRMAELSGSRLAAQQQMEGLLAPHRPKEPAWFLATVGVSPDHQGKGLGSAVVLPGVEAAERAGVPAFLETSAPRNLPFYERLGFTVTADVEVPEGPRTWCMTRKPGA

SEQ ID NO: 19159 - protein, 748 aa, synthetic construct
MALPVTALLLPLALLLHAARPLEEDLKNVFPPEVAVFEPSEAEISHTQKATLVCLATGFYPDHVELSWWVNGKEVHSGVSTDPQPLKEQPALNDSRYCLSSRLRVSATFWQNPRNHFRCQVQFYGLSENDEWTQDRAKPVTQIVSAEAWGRADCGFTSESYQQGVLSATNLSVIGFRILLLKVAGFNLLMTLRLWSSRAKRSGSGATNFSLLKQAGDVEENPGPTSMALPVTALLLPLALLLHAARPDEFEVQLVESGGGLVQAGGSLRLSCAASGITFSINTMGWYRQAPGKQRELVALISSIGDTYYADSVKGRFTISRDNAKNTVYLQMNSLKPEDTAVYYCKRFRTAAQGTDYWGQGTQVTVSSTRIQNPDPAVYQLRDSKSSDKSVCLFTDFDSQTNVSQSKDSDVYITDKTVLDMRSMDFKSNSAVAWSNKSDFACANAFNNSIIPEDTFFPSPESSCDVKLVEKSFETDTNLNFQILYEILLGKATLYAVLVSALVLMAMVKRKDSRGRAKRSGSGVKQTLNFDLLKLAGDVESNPGPSRGHMTEYKPTVRLATRDDVPRAVRTLAAAFADYPATRHTVDPDRHIERVTELQELFLTRVGLDIGKVWVADDGAAVAVWTTPESVEAGAVFAEIGPRMAELSGSRLAAQQQMEGLLAPHRPKEPAWFLATVGVSPDHQGKGLGSAVVLPGVEAAERAGVPAFLETSAPRNLPFYERLGFTVTADVEVPEGPRTWCMTRKPGA

SEQ ID NO: 19160 - protein, 748 aa, synthetic construct; identical to SEQ ID NO: 19159

SEQ ID NO: 19161 - protein, 1013 aa, synthetic construct
MALPVTALLLPLALLLHAARPLEEDLKNVFPPEVAVFEPSEAEISHTQKATLVCLATGFYPDHVELSWWVNGKEVHSGVSTDPQPLKEQPALNDSRYCLSSRLRVSATFWQNPRNHFRCQVQFYGLSENDEWTQDRAKPVTQIVSAEAWGRADCGFTSESYQQGVLSATNLSVIGFRILLLKVAGFNLLMTLRLWSSRAKRSGSGATNFSLLKQAGDVEENPGPTSMALPVTALLLPLALLLHAARPQVQLVESGGGLVQAGDSVTLSCTASGRTFSSYALAWFRQRPGKEREFVAGLRWGGPTNYADSVKDRFTISGDSAKHTMYLQMNSLKPEDTAVYYCGYNPGGWAVPSQYEYDSWGQGTQVTVSSGTGGGGSGGGGSGGGGSEFDIQMTQSPSSLSASVGDRVTITCKASDHINNWLAWYQQKPGQAPKLLIYGATTLETGVPSRFSGSGSGTDYTLTISSLQPEDFATYYCQQSWNTPWTFGQGTKLEIKRGGGGSGGGGSGGGGSQVQLQQPGAELVKPGASVKMSCKASGYAFSSYWINWMKQKPGQGLEWIGQIYPGDGDTNYNGKFKGRATLTADTSSSTAYMQLSSLTSEDSAVYFCARSITTVVGCAMDYWGQGTSVTVSSTRIQNPDPAVYQLRDSKSSDKSVCLFTDFDSQTNVSQSKDSDVYITDKTVLDMRSMDFKSNSAVAWSNKSDFACANAFNNSIIPEDTFFPSPESSCDVKLVEKSFETDTNLNFQILYEILLGKATLYAVLVSALVLMAMVKRKDSRGRAKRSGSGVKQTLNFDLLKLAGDVESNPGPSRGHMTEYKPTVRLATRDDVPRAVRTLAAAFADYPATRHTVDPDRHIERVTELQELFLTRVGLDIGKVWVADDGAAVAVWTTPESVEAGAVFAEIGPRMAELSGSRLAAQQQMEGLLAPHRPKEPAWFLATVGVSPDHQGKGLGSAVVLPGVEAAERAGVPAFLETSAPRNLPFYERLGFTVTADVEVPEGPRTWCMTRKPGA

SEQ ID NO: 19162 - protein, 1142 aa, synthetic construct
MALPVTALLLPLALLLHAARPLEEDLKNVFPPEVAVFEPSEAEISHTQKATLVCLATGFYPDHVELSWWVNGKEVHSGVSTDPQPLKEQPALNDSRYCLSSRLRVSATFWQNPRNHFRCQVQFYGLSENDEWTQDRAKPVTQIVSAEAWGRADCGFTSESYQQGVLSATNLSVIGFRILLLKVAGFNLLMTLRLWSSRAKRSGSGATNFSLLKQAGDVEENPGPTSMALPVTALLLPLALLLHAARPEVQLLESGGGLVQPGGSLRLSCAASGFTFSSYAMSWVRQAPGKGLEWVSSISGSGDYIYYADSVKGRFTISRDISKNTLYLQMNSLRAEDTAVYYCAKEGTGANSSLADYRGQGTLVTVSSGGGSGGGSQVQLVESGGGLVQAGDSVTLSCTASGRTFSSYALAWFRQRPGKEREFVAGLRWGGPTNYADSVKDRFTISGDSAKHTMYLQMNSLKPEDTAVYYCGYNPGGWAVPSQYEYDSWGQGTQVTVSSGTGGGGSGGGGSGGGGSEFDIQMTQSPSSLSASVGDRVTITCKASDHINNWLAWYQQKPGQAPKLLIYGATTLETGVPSRFSGSGSGTDYTLTISSLQPEDFATYYCQQSWNTPWTFGQGTKLEIKRGGGGSGGGGSGGGGSQVQLQQPGAELVKPGASVKMSCKASGYAFSSYWINWMKQKPGQGLEWIGQIYPGDGDTNYNGKFKGRATLTADTSSSTAYMQLSSLTSEDSAVYFCARSITTVVGCAMDYWGQGTSVTVSSTRIQNPDPAVYQLRDSKSSDKSVCLFTDFDSQTNVSQSKDSDVYITDKTVLDMRSMDFKSNSAVAWSNKSDFACANAFNNSIIPEDTFFPSPESSCDVKLVEKSFETDTNLNFQILYEILLGKATLYAVLVSALVLMAMVKRKDSRGRAKRSGSGVKQTLNFDLLKLAGDVESNPGPSRGHMTEYKPTVRLATRDDVPRAVRTLAAAFADYPATRHTVDPDRHIERVTELQELFLTRVGLDIGKVWVADDGAAVAVWTTPESVEAGAVFAEIGPRMAELSGSRLAAQQQMEGLLAPHRPKEPAWFLATVGVSPDHQGKGLGSAVVLPGVEAAERAGVPAFLETSAPRNLPFYERLGFTVTADVEVPEGPRTWCMTRKPGA

SEQ ID NO: 19163 - protein, 1140 aa, synthetic construct
MALPVTALLLPLALLLHAARPLEEDLKNVFPPEVAVFEPSEAEISHTQKATLVCLATGFYPDHVELSWWVNGKEVHSGVSTDPQPLKEQPALNDSRYCLSSRLRVSATFWQNPRNHFRCQVQFYGLSENDEWTQDRAKPVTQIVSAEAWGRADCGFTSESYQQGVLSATNLSVIGFRILLLKVAGFNLLMTLRLWSSRAKRSGSGATNFSLLKQAGDVEENPGPTSMALPVTALLLPLALLLHAARPGVTQSPTHLIKTRGQQATLRCSPISGHTSVYWYQQALGLGLQFLLWYDEGEERNRGNFPPRFSGRQFPNYSSELNVNALELEDSALYLCASSLGGPRGLAGLRGDEQFFGPGTRLTVLEGGGSGGGSQVQLVESGGGLVQAGDSVTLSCTASGRTFSSYALAWFRQRPGKEREFVAGLRWGGPTNYADSVKDRFTISGDSAKHTMYLQMNSLKPEDTAVYYCGYNPGGWAVPSQYEYDSWGQGTQVTVSSGTGGGGSGGGGSGGGGSEFDIQMTQSPSSLSASVGDRVTITCKASDHINNWLAWYQQKPGQAPKLLIYGATTLETGVPSRFSGSGSGTDYTLTISSLQPEDFATYYCQQSWNTPWTFGQGTKLEIKRGGGGSGGGGSGGGGSQVQLQQPGAELVKPGASVKMSCKASGYAFSSYWINWMKQKPGQGLEWIGQIYPGDGDTNYNGKFKGRATLTADTSSSTAYMQLSSLTSEDSAVYFCARSITTVVGCAMDYWGQGTSVTVSSTRIQNPDPAVYQLRDSKSSDKSVCLFTDFDSQTNVSQSKDSDVYITDKTVLDMRSMDFKSNSAVAWSNKSDFACANAFNNSIIPEDTFFPSPESSCDVKLVEKSFETDTNLNFQILYEILLGKATLYAVLVSALVLMAMVKRKDSRGRAKRSGSGVKQTLNFDLLKLAGDVESNPGPSRGHMTEYKPTVRLATRDDVPRAVRTLAAAFADYPATRHTVDPDRHIERVTELQELFLTRVGLDIGKVWVADDGAAVAVWTTPESVEAGAVFAEIGPRMAELSGSRLAAQQQMEGLLAPHRPKEPAWFLATVGVSPDHQGKGLGSAVVLPGVEAAERAGVPAFLETSAPRNLPFYERLGFTVTADVEVPEGPRTWCMTRKPGA

SEQ ID NO: 19164 - protein, 1134 aa, synthetic construct
MALPVTALLLPLALLLHAARPLEEDLKNVFPPEVAVFEPSEAEISHTQKATLVCLATGFYPDHVELSWWVNGKEVHSGVSTDPQPLKEQPALNDSRYCLSSRLRVSATFWQNPRNHFRCQVQFYGLSENDEWTQDRAKPVTQIVSAEAWGRADCGFTSESYQQGVLSATNLSVIGFRILLLKVAGFNLLMTLRLWSSRAKRSGSGATNFSLLKQAGDVEENPGPTSMALPVTALLLPLALLLHAARPGVTQSPTHLIKTRGQQATLRCSPISGHTSVYWYQQALGLGLQFLLWYDEGEERNRGNFPPRFSGRQFPNYSSELNVNALELEDSALYLCASSLGGPRGLAGLRGDEQFFGPGTRLTVLEGGGSGGGSGVTQSPTHLIKTRGQQATLRCSPISGHTSVYWYQQALGLGLQFLLWYDEGEERNRGNFPPRFSGRQFPNYSSELNVNALELEDSALYLCASSLGGDELGADGNEQFFGPGTRLTVLEGTGGGGSGGGGSGGGGSEFDIQMTQSPSSLSASVGDRVTITCKASDHINNWLAWYQQKPGQAPKLLIYGATTLETGVPSRFSGSGSGTDYTLTISSLQPEDFATYYCQQSWNTPWTFGQGTKLEIKRGGGGSGGGGSGGGGSQVQLQQPGAELVKPGASVKMSCKASGYAFSSYWINWMKQKPGQGLEWIGQIYPGDGDTNYNGKFKGRATLTADTSSSTAYMQLSSLTSEDSAVYFCARSITTVVGCAMDYWGQGTSVTVSSTRIQNPDPAVYQLRDSKSSDKSVCLFTDFDSQTNVSQSKDSDVYITDKTVLDMRSMDFKSNSAVAWSNKSDFACANAFNNSIIPEDTFFPSPESSCDVKLVEKSFETDTNLNFQILYEILLGKATLYAVLVSALVLMAMVKRKDSRGRAKRSGSGVKQTLNFDLLKLAGDVESNPGPSRGHMTEYKPTVRLATRDDVPRAVRTLAAAFADYPATRHTVDPDRHIERVTELQELFLTRVGLDIGKVWVADDGAAVAVWTTPESVEAGAVFAEIGPRMAELSGSRLAAQQQMEGLLAPHRPKEPAWFLATVGVSPDHQGKGLGSAVVLPGVEAAERAGVPAFLETSAPRNLPFYERLGFTVTADVEVPEGPRTWCMTRKPGA

SEQ ID NO: 19165 - protein, 754 aa, synthetic construct
MALPVTALLLPLALLLHAARPLEEDLKNVFPPEVAVFEPSEAEISHTQKATLVCLATGFYPDHVELSWWVNGKEVHSGVSTDPQPLKEQPALNDSRYCLSSRLRVSATFWQNPRNHFRCQVQFYGLSENDEWTQDRAKPVTQIVSAEAWGRADCGFTSESYQQGVLSATNLSVIGFRILLLKVAGFNLLMTLRLWSSRAKRSGSGATNFSLLKQAGDVEENPGPTSMALPVTALLLPLALLLHAARPDEFGSDLGIKLLFAAAKGQDDEVRILLAAGADVNAKDFEGYTPLHVAAYDGHLEIVEVLLKAGADVNAKDSQGRTPLHEAAYSGHLEIVEVLLKAGADVNAQDDAGETPADLAAAWGHEDIAEVLQKTRIQNPDPAVYQLRDSKSSDKSVCLFTDFDSQTNVSQSKDSDVYITDKTVLDMRSMDFKSNSAVAWSNKSDFACANAFNNSIIPEDTFFPSPESSCDVKLVEKSFETDTNLNFQILYEILLGKATLYAVLVSALVLMAMVKRKDSRGRAKRSGSGVKQTLNFDLLKLAGDVESNPGPSRGHMTEYKPTVRLATRDDVPRAVRTLAAAFADYPATRHTVDPDRHIERVTELQELFLTRVGLDIGKVWVADDGAAVAVWTTPESVEAGAVFAEIGPRMAELSGSRLAAQQQMEGLLAPHRPKEPAWFLATVGVSPDHQGKGLGSAVVLPGVEAAERAGVPAFLETSAPRNLPFYERLGFTVTADVEVPEGPRTWCMTRKPGA

SEQ ID NO: 19166 - protein, 683 aa, synthetic construct
MALPVTALLLPLALLLHAARPLEEDLKNVFPPEVAVFEPSEAEISHTQKATLVCLATGFYPDHVELSWWVNGKEVHSGVSTDPQPLKEQPALNDSRYCLSSRLRVSATFWQNPRNHFRCQVQFYGLSENDEWTQDRAKPVTQIVSAEAWGRADCGFTSESYQQGVLSATNLSVIGFRILLLKVAGFNLLMTLRLWSSRAKRSGSGATNFSLLKQAGDVEENPGPTSMDWIWRILFLVGAATGAHSFEGSGFEYAKEMRNAYWEIALLPNLTNQQKRAPIRKLYDDPSQSSELLSEAKKLNDSQTRIQNPDPAVYQLRDSKSSDKSVCLFTDFDSQTNVSQSKDSDVYITDKTVLDMRSMDFKSNSAVAWSNKSDFACANAFNNSIIPEDTFFPSPESSCDVKLVEKSFETDTNLNFQILYEILLGKATLYAVLVSALVLMAMVKRKDSRGRAKRSGSGVKQTLNFDLLKLAGDVESNPGPSRGHMTEYKPTVRLATRDDVPRAVRTLAAAFADYPATRHTVDPDRHIERVTELQELFLTRVGLDIGKVWVADDGAAVAVWTTPESVEAGAVFAEIGPRMAELSGSRLAAQQQMEGLLAPHRPKEPAWFLATVGVSPDHQGKGLGSAVVLPGVEAAERAGVPAFLETSAPRNLPFYERLGFTVTADVEVPEGPRTWCMTRKPGA

SEQ ID NO: 19167 - protein, 905 aa, synthetic construct
MALPVTALLLPLALLLHAARPLEEDLKNVFPPEVAVFEPSEAEISHTQKATLVCLATGFYPDHVELSWWVNGKEVHSGVSTDPQPLKEQPALNDSRYCLSSRLRVSATFWQNPRNHFRCQVQFYGLSENDEWTQDRAKPVTQIVSAEAWGRADCGFTSESYQQGVLSATNLSVIGFRILLLKVAGFNLLMTLRLWSSRAKRSGSGATNFSLLKQAGDVEENPGPTSMALPVTALLLPLALLLHAARPDEFEVQLVESGGGLVQAGGSLRLSCAASGITFSINTMGWYRQAPGKQRELVALISSIGDTYYADSVKGRFTISRDNAKNTVYLQMNSLKPEDTAVYYCKRFRTAAQGTDYWGQGTQVTVSSLEGGGGSGGGGSGGGGSGSGGSGSGGSGSGGSGSGGSFEVQLVESGGGLVQPGGSLRLSCAASGSIFGFNDMAWYRQAPGKQRELVALISRVGVTSSADSVKGRFTISRVNAKDTVYLQMNSLKPEDTAVYYCYMDQRLDGSTLAYWGQGTQVTVSSTRIQNPDPAVYQLRDSKSSDKSVCLFTDFDSQTNVSQSKDSDVYITDKTVLDMRSMDFKSNSAVAWSNKSDFACANAFNNSIIPEDTFFPSPESSCDVKLVEKSFETDTNLNFQILYEILLGKATLYAVLVSALVLMAMVKRKDSRGRAKRSGSGVKQTLNFDLLKLAGDVESNPGPSRGHMTEYKPTVRLATRDDVPRAVRTLAAAFADYPATRHTVDPDRHIERVTELQELFLTRVGLDIGKVWVADDGAAVAVWTTPESVEAGAVFAEIGPRMAELSGSRLAAQQQMEGLLAPHRPKEPAWFLATVGVSPDHQGKGLGSAVVLPGVEAAERAGVPAFLETSAPRNLPFYERLGFTVTADVEVPEGPRTWCMTRKPGA

SEQ ID NO: 19168 - protein, 819 aa, synthetic construct
MALPVTALLLPLALLLHAARPLEEDLKNVFPPEVAVFEPSEAEISHTQKATLVCLATGFYPDHVELSWWVNGKEVHSGVSTDPQPLKEQPALNDSRYCLSSRLRVSATFWQNPRNHFRCQVQFYGLSENDEWTQDRAKPVTQIVSAEAWGRADCGFTSESYQQGVLSATNLSVIGFRILLLKVAGFNLLMTLRLWSSRAKRSGSGATNFSLLKQAGDVEENPGPTSMALPVTALLLPLALLLHAARPGMRTEDLPKAVVFLEPQWYRVLEKDSVTLKCQGAYSPEDNSTQWFHNESLISSQASSYFIDAATVDDSGEYRCQTNLSTLSDPVQLEVHIGWLLLQAPRWVFKEEDPIHLRCHSWKNTALHKVTYLQNGKGRKYFHHNSDFYIPKATLKDSGSYFCRGLVGSKNVSSETVNITITQGLAVSTISSFFPPGYQTRIQNPDPAVYQLRDSKSSDKSVCLFTDFDSQTNVSQSKDSDVYITDKTVLDMRSMDFKSNSAVAWSNKSDFACANAFNNSIIPEDTFFPSPESSCDVKLVEKSFETDTNLNFQILYEILLGKATLYAVLVSALVLMAMVKRKDSRGRAKRSGSGVKQTLNFDLLKLAGDVESNPGPSRGHMTEYKPTVRLATRDDVPRAVRTLAAAFADYPATRHTVDPDRHIERVTELQELFLTRVGLDIGKVWVADDGAAVAVWTTPESVEAGAVFAEIGPRMAELSGSRLAAQQQMEGLLAPHRPKEPAWFLATVGVSPDHQGKGLGSAVVLPGVEAAERAGVPAFLETSAPRNLPFYERLGFTVTADVEVPEGPRTWCMTRKPGA

SEQ ID NO: 19169 - protein, 447 aa, synthetic construct
MALPVTALLLPLALLLHAARPLEEDLKNVFPPEVAVFEPSEAEISHTQKATLVCLATGFYPDHVELSWWVNGKEVHSGVSTDPQPLKEQPALNDSRYCLSSRLRVSATFWQNPRNHFRCQVQFYGLSENDEWTQDRAKPVTQIVSAEAWGRADCGFTSESYQQGVLSATNLSVIGFRILLLKVAGFNLLMTLRLWSSRAKRSGSGATNFSLLKQAGDVEENPGPTSATMALPVTALLLPLALLLHAARPMDPDLEIRAAFLRQRNTALRTEVAELEQEVQRLENEVSQYETRYGPLGGGKTRIQNPDPAVYQLRDSKSSDKSVCLFTDFDSQTNVSQSKDSDVYITDKTVLDMRSMDFKSNSAVAWSNKSDFACANAFNNSIIPEDTFFPSPESSCDVKLVEKSFETDTNLNFQILYEILLGKATLYAVLVSALVLMAMVKRKDSRG

SEQ ID NO: 19170 - protein, 447 aa, synthetic construct
MALPVTALLLPLALLLHAARPLEEDLKNVFPPEVAVFEPSEAEISHTQKATLVCLATGFYPDHVELSWWVNGKEVHSGVSTDPQPLKEQPALNDSRYCLSSRLRVSATFWQNPRNHFRCQVQFYGLSENDEWTQDRAKPVTQIVSAEAWGRADCGFTSESYQQGVLSATNLSVIGFRILLLKVAGFNLLMTLRLWSSRAKRSGSGATNFSLLKQAGDVEENPGPTSATMALPVTALLLPLALLLHAARPMDPDLEIEAAFLERENTALETRVAELRQRVQRLRNRVSQYRTRYGPLGGGKTRIQNPDPAVYQLRDSKSSDKSVCLFTDFDSQTNVSQSKDSDVYITDKTVLDMRSMDFKSNSAVAWSNKSDFACANAFNNSIIPEDTFFPSPESSCDVKLVEKSFETDTNLNFQILYEILLGKATLYAVLVSALVLMAMVKRKDSRG

SEQ ID NO: 19171 - protein, 424 aa, synthetic construct
MALPVTALLLPLALLLHAARPLEEDLKNVFPPEVAVFEPSEAEISHTQKATLVCLATGFYPDHVELSWWVNGKEVHSGVSTDPQPLKEQPALNDSRYCLSSRLRVSATFWQNPRNHFRCQVQFYGLSENDEWTQDRAKPVTQIVSAEAWGRADCGFTSESYQQGVLSATNLSVIGFRILLLKVAGFNLLMTLRLWSSRAKRSGSGATNFSLLKQAGDVEENPGPTSATMALPVTALLLPLALLLHAARPEVAALEKEVAALEKEVAALEKEVAALEKTRIQNPDPAVYQLRDSKSSDKSVCLFTDFDSQTNVSQSKDSDVYITDKTVLDMRSMDFKSNSAVAWSNKSDFACANAFNNSIIPEDTFFPSPESSCDVKLVEKSFETDTNLNFQILYEILLGKATLYAVLVSALVLMAMVKRKDSRG

SEQ ID NO: 19172 - protein, 682 aa, synthetic construct
MALPVTALLLPLALLLHAARPLEEDLKNVFPPEVAVFEPSEAEISHTQKATLVCLATGFYPDHVELSWWVNGKEVHSGVSTDPQPLKEQPALNDSRYCLSSRLRVSATFWQNPRNHFRCQVQFYGLSENDEWTQDRAKPVTQIVSAEAWGRADCGFTSESYQQGVLSATNLSVIGFRILLLKVAGFNLLMTLRLWSSRAKRSGSGATNFSLLKQAGDVEENPGPTSATMALPVTALLLPLALLLHAARPLFNQEVQIPLTESYCGPCPKNWICYKNNCYQFFDESKNWYESQASCMSQNASLLKVYSKEDQDLLKLVKSAHWMGLVHIPTNGSWQWEDGSILSPNLLTIIEMQKGDCALYASSFKGYIENCSTPNTYICMQRTVSGGGGSGGGGSGGGGDLFNQEVQIPLTESYCGPCPKNWICYKNNCYQFFDESKNWYESQASCMSQNASLLKVYSKEDQDLLKLVKSAHWMGLVHIPTNGSWQWEDGSILSPNLLTIIEMQKGDCALYASSFKGYIENCSTPNTYICMQRTVTRIQNPDPAVYQLRDSKSSDKSVCLFTDFDSQTNVSQSKDSDVYITDKTVLDMRSMDFKSNSAVAWSNKSDFACANAFNNSIIPEDTFFPSPESSCDVKLVEKSFETDTNLNFQILYEILLGKATLYAVLVSALVLMAMVKRKDSRG

SEQ ID NO: 19173 - protein, 682 aa, synthetic construct
MALPVTALLLPLALLLHAARPLEEDLKNVFPPEVAVFEPSEAEISHTQKATLVCLATGFYPDHVELSWWVNGKEVHSGVSTDPQPLKEQPALNDSRYCLSSRLRVSATFWQNPRNHFRCQVQFYGLSENDEWTQDRAKPVTQIVSAEAWGRADCGFTSESYQQGVLSATNLSVIGFRILLLKVAGFNLLMTLRLWSSRAKRSGSGATNFSLLKQAGDVEENPGPTSATMALPVTALLLPLALLLHAARPLFNQEVQIPLTESYCGPCPKNWICYKNNCYQFFDESKNWYESQASCMSQNASLLKVYSKEDQDLLKLVKSAHWMGLVHIPTNGSWQWEDGSILSPNLLTIIEMQKGDCALYASSFKGFIENCSTPNTYICMQRTVGGGGSGGGGSGGGGSDLFNQEVQIPLTESYCGPCPKNWICYKNNCYQFFDESKNWYESQASCMSQNASLLKVYSKEDQDLLKLVKSAHWMGLVHIPTNGSWQWEDGSILSPNLLTIIEMQKGDCALYASSFKGFIENCSTPNTYICMQRTVTRIQNPDPAVYQLRDSKSSDKSVCLFTDFDSQTNVSQSKDSDVYITDKTVLDMRSMDFKSNSAVAWSNKSDFACANAFNNSIIPEDTFFPSPESSCDVKLVEKSFETDTNLNFQILYEILLGKATLYAVLVSALVLMAMVKRKDSRG

SEQ ID NO: 19174 - protein, 708 aa, synthetic construct
MALPVTALLLPLALLLHAARPLEEDLKNVFPPEVAVFEPSEAEISHTQKATLVCLATGFYPDHVELSWWVNGKEVHSGVSTDPQPLKEQPALNDSRYCLSSRLRVSATFWQNPRNHFRCQVQFYGLSENDEWTQDRAKPVTQIVSAEAWGRADCGFTSESYQQGVLSATNLSVIGFRILLLKVAGFNLLMTLRLWSSRAKRSGSGATNFSLLKQAGDVEENPGPTSMALPVTALLLPLALLLHAARPMDPDLEIRAAFLRQRNTALRTEVAELEQEVQRLENEVSQYETRYGPLGGGKGTGGGGSGGGGSGGGGSEFDIQMTQSPSSLSASVGDRVTITCKASDHINNWLAWYQQKPGQAPKLLIYGATTLETGVPSRFSGSGSGTDYTLTISSLQPEDFATYYCQQSWNTPWTFGQGTKLEIKRGGGGSGGGGSGGGGSQVQLQQPGAELVKPGASVKMSCKASGYAFSSYWINWMKQKPGQGLEWIGQIYPGDGDTNYNGKFKGRATLTADTSSSTAYMQLSSLTSEDSAVYFCARSITTVVGCAMDYWGQGTSVTVSSTRIQNPDPAVYQLRDSKSSDKSVCLFTDFDSQTNVSQSKDSDVYITDKTVLDMRSMDFKSNSAVAWSNKSDFACANAFNNSIIPEDTFFPSPESSCDVKLVEKSFETDTNLNFQILYEILLGKATLYAVLVSALVLMAMVKRKDSRG

SEQ ID NO: 19175 - protein, 943 aa, synthetic construct
MALPVTALLLPLALLLHAARPLEEDLKNVFPPEVAVFEPSEAEISHTQKATLVCLATGFYPDHVELSWWVNGKEVHSGVSTDPQPLKEQPALNDSRYCLSSRLRVSATFWQNPRNHFRCQVQFYGLSENDEWTQDRAKPVTQIVSAEAWGRADCGFTSESYQQGVLSATNLSVIGFRILLLKVAGFNLLMTLRLWSSRAKRSGSGATNFSLLKQAGDVEENPGPTSMALPVTALLLPLALLLHAARPLFNQEVQIPLTESYCGPCPKNWICYKNNCYQFFDESKNWYESQASCMSQNASLLKVYSKEDQDLLKLVKSAHWMGLVHIPTNGSWQWEDGSILSPNLLTIIEMQKGDCALYASSFKGFIENCSTPNTYICMQRTVGGGGSGGGGSGGGGSDLFNQEVQIPLTESYCGPCPKNWICYKNNCYQFFDESKNWYESQASCMSQNASLLKVYSKEDQDLLKLVKSAHWMGLVHIPTNGSWQWEDGSILSPNLLTIIEMQKGDCALYASSFKGFIENCSTPNTYICMQRTVGTGGGGSGGGGSGGGGSEFDIQMTQSPSSLSASVGDRVTITCKASDHINNWLAWYQQKPGQAPKLLIYGATTLETGVPSRFSGSGSGTDYTLTISSLQPEDFATYYCQQSWNTPWTFGQGTKLEIKRGGGGSGGGGSGGGGSQVQLQQPGAELVKPGASVKMSCKASGYAFSSYWINWMKQKPGQGLEWIGQIYPGDGDTNYNGKFKGRATLTADTSSSTAYMQLSSLTSEDSAVYFCARSITTVVGCAMDYWGQGTSVTVSSTRIQNPDPAVYQLRDSKSSDKSVCLFTDFDSQTNVSQSKDSDVYITDKTVLDMRSMDFKSNSAVAWSNKSDFACANAFNNSIIPEDTFFPSPESSCDVKLVEKSFETDTNLNFQILYEILLGKATLYAVLVSALVLMAMVKRKDSRG

SEQ ID NO: 19176 - protein, 648 aa, synthetic construct
MALPVTALLLPLALLLHAARPLEEDLKNVFPPEVAVFEPSEAEISHTQKATLVCLATGFYPDHVELSWWVNGKEVHSGVSTDPQPLKEQPALNDSRYCLSSRLRVSATFWQNPRNHFRCQVQFYGLSENDEWTQDRAKPVTQIVSAEAWGRADCGFTSESYQQGVLSATNLSVIGFRILLLKVAGFNLLMTLRLWSSRAKRSGSGATNFSLLKQAGDVEENPGPTSMALPVTALLLPLALLLHAARPQSVLTQPPSVSGAPGQRVTISCTGSSSNIGAGYDVHWYQQLPGTAPKLLIFGNSNRPSGVPDRFSGFKSGTSASLAITGLQAEDEADYFCQSYDSSLSGSGVFGTGTKVTVLGGGGGSGGGGSGGGGSQMQLVQSGGGLVQPGRSLRLSCAASGFTFDDYAMHWVRQAPGKGLEWVSGISWNSGSIGYADSVKGRFTISRDNAKNSLYLQMNSLRAEDTALYYCAKDIHSGSYYGLLYYAMDVWGQGTTVTVSSTRIQNPDPAVYQLRDSKSSDKSVCLFTDFDSQTNVSQSKDSDVYITDKTVLDMRSMDFKSNSAVAWSNKSDFACANAFNNSIIPEDTFFPSPESSCDVKLVEKSFETDTNLNFQILYEILLGKATLYAVLVSALVLMAMVKRKDSRG

SEQ ID NO: 19177 - protein, 485 aa, synthetic construct
MALPVTALLLPLALLLHAARPLEEDLKNVFPPEVAVFEPSEAEISHTQKATLVCLATGFYPDHVELSWWVNGKEVHSGVSTDPQPLKEQPALNDSRYCLSSRLRVSATFWQNPRNHFRCQVQFYGLSENDEWTQDRAKPVTQIVSAEAWGRADCGFTSESYQQGVLSATNLSVIGFRILLLKVAGFNLLMTLRLWSSRAKRSGSGATNFSLLKQAGDVEENPGPTSMALPVTALLLPLALLLHAARPMCMPCFTTDHQMARKCDDCCGGKGRGKCYGPQCLCRLEGGGGSGGGGSGGGGSFEVCMPCFTTDQQMARKCSDCCGGKGRGKCYGPQCLCRTRIQNPDPAVYQLRDSKSSDKSVCLFTDFDSQTNVSQSKDSDVYITDKTVLDMRSMDFKSNSAVAWSNKSDFACANAFNNSIIPEDTFFPSPESSCDVKLVEKSFETDTNLNFQILYEILLGKATLYAVLVSALVLMAMVKRKDSRG

SEQ ID NO: 19178 - protein, 748 aa, synthetic construct
MALPVTALLLPLALLLHAARPLEEDLKNVFPPEVAVFEPSEAEISHTQKATLVCLATGFYPDHVELSWWVNGKEVHSGVSTDPQPLKEQPALNDSRYCLSSRLRVSATFWQNPRNHFRCQVQFYGLSENDEWTQDRAKPVTQIVSAEAWGRADCGFTSESYQQGVLSATNLSVIGFRILLLKVAGFNLLMTLRLWSSRAKRSGSGATNFSLLKQAGDVEENPGPTSMALPVTALLLPLALLLHAARPMCMPCFTTDHQMARKCDDCCGGKGRGKCYGPQCLCRLEGGGGSGGGGSGGGGSFEVCMPCFTTDQQMARKCSDCCGGKGRGKCYGPQCLCRGTGGGGSGGGGSGGGGSEFDIQMTQSPSSLSASVGDRVTITCKASDHINNWLAWYQQKPGQAPKLLIYGATTLETGVPSRFSGSGSGTDYTLTISSLQPEDFATYYCQQSWNTPWTFGQGTKLEIKRGGGGSGGGGSGGGGSQVQLQQPGAELVKPGASVKMSCKASGYAFSSYWINWMKQKPGQGLEWIGQIYPGDGDTNYNGKFKGRATLTADTSSSTAYMQLSSLTSEDSAVYFCARSITTVVGCAMDYWGQGTSVTVSSTRIQNPDPAVYQLRDSKSSDKSVCLFTDFDSQTNVSQSKDSDVYITDKTVLDMRSMDFKSNSAVAWSNKSDFACANAFNNSIIPEDTFFPSPESSCDVKLVEKSFETDTNLNFQILYEILLGKATLYAVLVSALVLMAMVKRKDSRG

SEQ ID NO: 19179 - protein, 823 aa, synthetic construct
MALPVTALLLPLALLLHAARPLEEDLKNVFPPEVAVFEPSEAEISHTQKATLVCLATGFYPDHVELSWWVNGKEVHSGVSTDPQPLKEQPALNDSRYCLSSRLRVSATFWQNPRNHFRCQVQFYGLSENDEWTQDRAKPVTQIVSAEAWGRADCGFTSESYQQGVLSATNLSVIGFRILLLKVAGFNLLMTLRLWSSRAKRSGSGATNFSLLKQAGDVEENPGPTSMALPVTALLLPLALLLHAARPSPVAPACDPRLLNKLLRDSHLLHSRLSQCPDVDPLSIPVLLPAVDFSLGEWKTQTEQSKAQDILGAVSLLLEGVMAARGQLEPSCLSSLLGQLSGQVRLLLGALQGLLGTQLPLQGRTTAHKDPNALFLSLQQLLRGKVRFLLLVEGPTLCVRRTLPTTAVPSSTSGTGGGGSGGGGSGGGGSEFDIQMTQSPSSLSASVGDRVTITCKASDHINNWLAWYQQKPGQAPKLLIYGATTLETGVPSRFSGSGSGTDYTLTISSLQPEDFATYYCQQSWNTPWTFGQGTKLEIKRGGGGSGGGGSGGGGSQVQLQQPGAELVKPGASVKMSCKASGYAFSSYWINWMKQKPGQGLEWIGQIYPGDGDTNYNGKFKGRATLTADTSSSTAYMQLSSLTSEDSAVYFCARSITTVVGCAMDYWGQGTSVTVSSTRIQNPDPAVYQLRDSKSSDKSVCLFTDFDSQTNVSQSKDSDVYITDKTVLDMRSMDFKSNSAVAWSNKSDFACANAFNNSIIPEDTFFPSPESSCDVKLVEKSFETDTNLNFQILYEILLGKATLYAVLVSALVLMAMVKRKDSRG

SEQ ID NO: 19180 - protein, 730 aa, synthetic construct
MALPVTALLLPLALLLHAARPLEEDLKNVFPPEVAVFEPSEAEISHTQKATLVCLATGFYPDHVELSWWVNGKEVHSGVSTDPQPLKEQPALNDSRYCLSSRLRVSATFWQNPRNHFRCQVQFYGLSENDEWTQDRAKPVTQIVSAEAWGRADCGFTSESYQQGVLSATNLSVIGFRILLLKVAGFNLLMTLRLWSSRAKRSGSGATNFSLLKQAGDVEENPGPTSMALPVTALLLPLALLLHAARPMGSWEEFELRLNAIEERLYALGGSEAELAYFEYVIADFEGNLQRYKGKGNPEVEALYFEADAIFEELVAYRHNGTGGGGSGGGGSGGGGSEFDIQMTQSPSSLSASVGDRVTITCKASDHINNWLAWYQQKPGQAPKLLIYGATTLETGVPSRFSGSGSGTDYTLTISSLQPEDFATYYCQQSWNTPWTFGQGTKLEIKRGGGGSGGGGSGGGGSQVQLQQPGAELVKPGASVKMSCKASGYAFSSYWINWMKQKPGQGLEWIGQIYPGDGDTNYNGKFKGRATLTADTSSSTAYMQLSSLTSEDSAVYFCARSITTVVGCAMDYWGQGTSVTVSSTRIQNPDPAVYQLRDSKSSDKSVCLFTDFDSQTNVSQSKDSDVYITDKTVLDMRSMDFKSNSAVAWSNKSDFACANAFNNSIIPEDTFFPSPESSCDVKLVEKSFETDTNLNFQILYEILLGKATLYAVLVSALVLMAMVKRKDSRG

SEQ ID NO: 19181 - protein, 869 aa, synthetic construct
MALPVTALLLPLALLLHAARPLEIQNPDPAVYQLRDSKSSDKSVCLFTDFDSQTNVSQSKDSDVYITDKTVLDMRSMDFKSNSAVAWSNKSDFACANAFNNSIIPEDTFFPSPESSCDVKLVEKSFETDTNLNFQILYEILLGKATLYAVLVSALVLMAMVKRKDSRGRAKRSGSGATNFSLLKQAGDVEENPGPTSMALPVTALLLPLALLLHAARPDIQMTQTTSSLSASLGDRVTISCRASQDISKYLNWYQQKPDGTVKLLIYHTSRLHSGVPSRFSGSGSGTDYSLTISNLEQEDIATYFCQQGNTLPYTFGGGTKLEITGGGGSGGGGSGGGGSEVKLQESGPGLVAPSQSLSVTCTVSGVSLPDYGVSWIRQPPRKGLEWLGVIWGSETTYYNSALKSRLTIIKDNSKSQVFLKMNSLQTDDTAIYYCAKHYYYGGSYAMDYWGQGTSVTVSSTREDLKNVFPPEVAVFEPSEAEISHTQKATLVCLATGFYPDHVELSWWVNGKEVHSGVSTDPQPLKEQPALNDSRYCLSSRLRVSATFWQNPRNHFRCQVQFYGLSENDEWTQDRAKPVTQIVSAEAWGRADCGFTSESYQQGVLSATNLSVIGFRILLLKVAGFNLLMTLRLWSSRAKRSGSGVKQTLNFDLLKLAGDVESNPGPSRGHMTEYKPTVRLATRDDVPRAVRTLAAAFADYPATRHTVDPDRHIERVTELQELFLTRVGLDIGKVWVADDGAAVAVWTTPESVEAGAVFAEIGPRMAELSGSRLAAQQQMEGLLAPHRPKEPAWFLATVGVSPDHQGKGLGSAVVLPGVEAAERAGVPAFLETSAPRNLPFYERLGFTVTADVEVPEGPRTWCMTRKPGA

SEQ ID NO: 19182 - protein, 870 aa, synthetic construct
MALPVTALLLPLALLLHAARPLEIQNPDPAVYQLRDSKSSDKSVCLFTDFDSQTNVSQSKDSDVYITDKTVLDMRSMDFKSNSAVAWSNKSDFACANAFNNSIIPEDTFFPSPESSCDVKLVEKSFETDTNLNFQILYEILLGKATLYAVLVSALVLMAMVKRKDSRGRAKRSGSGATNFSLLKQAGDVEENPGPTSTMALPVTALLLPLALLLHAARPEIVMTQSPATLSLSPGERATLSCRASQDISKYLNWYQQKPGQAPRLLIYHTSRLHSGIPARFSGSGSGTDYTLTISSLQPEDFAVYFCQQGNTLPYTFGQGTKLEIKGGGGSGGGGSGGGGSQVQLQESGPGLVKPSETLSLTCTVSGVSLPDYGVSWIRQPPGKGLEWIGVIWGSETTYYNSSLKSRVTISKDNSKNQVSLKLSSVTAADTAVYYCAKHYYYGGSYAMDYWGQGTLVTVSSTREDLKNVFPPEVAVFEPSEAEISHTQKATLVCLATGFYPDHVELSWWVNGKEVHSGVSTDPQPLKEQPALNDSRYCLSSRLRVSATFWQNPRNHFRCQVQFYGLSENDEWTQDRAKPVTQIVSAEAWGRADCGFTSESYQQGVLSATNLSVIGFRILLLKVAGFNLLMTLRLWSSRAKRSGSGVKQTLNFDLLKLAGDVESNPGPSRGHMTEYKPTVRLATRDDVPRAVRTLAAAFADYPATRHTVDPDRHIERVTELQELFLTRVGLDIGKVWVADDGAAVAVWTTPESVEAGAVFAEIGPRMAELSGSRLAAQQQMEGLLAPHRPKEPAWFLATVGVSPDHQGKGLGSAVVLPGVEAAERAGVPAFLETSAPRNLPFYERLGFTVTADVEVPEGPRTWCMTRKPGA

SEQ ID NO: 19183 - protein, 871 aa, synthetic construct
MALPVTALLLPLALLLHAARPLEIQNPDPAVYQLRDSKSSDKSVCLFTDFDSQTNVSQSKDSDVYITDKTVLDMRSMDFKSNSAVAWSNKSDFACANAFNNSIIPEDTFFPSPESSCDVKLVEKSFETDTNLNFQILYEILLGKATLYAVLVSALVLMAMVKRKDSRGRAKRSGSGATNFSLLKQAGDVEENPGPTSTMALPVTALLLPLALLLHAARPDEIVLTQSPATLSLSPGERATLSCSASSSVSYMHWYQQKPGQAPRLLIYDTSKLASGIPARFSGSGSGTDFTLTISSLEPEDVAVYYCFQGSVYPFTFGQGTKLEIKRGGGGSGGGGSGGGGSQVQLQESGPGLVKPSQTLSLTCTVSGGSISTSGMGVGWIRQHPGKGLEWIGHIWWDDDKRYNPALKSRVTISVDTSKNQFSLKLSSVTAADTAVYYCARMELWSYYFDYWGQGTLVTVSSTREDLKNVFPPEVAVFEPSEAEISHTQKATLVCLATGFYPDHVELSWWVNGKEVHSGVSTDPQPLKEQPALNDSRYCLSSRLRVSATFWQNPRNHFRCQVQFYGLSENDEWTQDRAKPVTQIVSAEAWGRADCGFTSESYQQGVLSATNLSVIGFRILLLKVAGFNLLMTLRLWSSRAKRSGSGVKQTLNFDLLKLAGDVESNPGPSRGHMTEYKPTVRLATRDDVPRAVRTLAAAFADYPATRHTVDPDRHIERVTELQELFLTRVGLDIGKVWVADDGAAVAVWTTPESVEAGAVFAEIGPRMAELSGSRLAAQQQMEGLLAPHRPKEPAWFLATVGVSPDHQGKGLGSAVVLPGVEAAERAGVPAFLETSAPRNLPFYERLGFTVTADVEVPEGPRTWCMTRKPGA

SEQ ID NO: 19184 - protein, 867 aa, synthetic construct
MALPVTALLLPLALLLHAARPLEIQNPDPAVYQLRDSKSSDKSVCLFTDFDSQTNVSQSKDSDVYITDKTVLDMRSMDFKSNSAVAWSNKSDFACANAFNNSIIPEDTFFPSPESSCDVKLVEKSFETDTNLNFQILYEILLGKATLYAVLVSALVLMAMVKRKDSRGRAKRSGSGATNFSLLKQAGDVEENPGPTSMALPVTALLLPLALLLHAARPDIQMTQSPSSLSASVGDRVTITCRASQDISNYLNWYQQKPGKAPKLLIYYTSRLHSGVPSRFSGSGSGTDFTLTISSLQPEDFATYYCQQGNTLPYTFGQGTKVEIKRGGGGSGGGGSGGGGSEVQLVESGGGLVQPGGSLRLSCAASGFTFSDYFMSWVRQAPGKGLEWVATISNGGTYTYYPDSVKGRFTISRDNSKNTLYLQMNSLRAEDTAVYYCARFDGYIFDYWGQGTLVTVSSTREDLKNVFPPEVAVFEPSEAEISHTQKATLVCLATGFYPDHVELSWWVNGKEVHSGVSTDPQPLKEQPALNDSRYCLSSRLRVSATFWQNPRNHFRCQVQFYGLSENDEWTQDRAKPVTQIVSAEAWGRADCGFTSESYQQGVLSATNLSVIGFRILLLKVAGFNLLMTLRLWSSRAKRSGSGVKQTLNFDLLKLAGDVESNPGPSRGHMTEYKPTVRLATRDDVPRAVRTLAAAFADYPATRHTVDPDRHIERVTELQELFLTRVGLDIGKVWVADDGAAVAVWTTPESVEAGAVFAEIGPRMAELSGSRLAAQQQMEGLLAPHRPKEPAWFLATVGVSPDHQGKGLGSAVVLPGVEAAERAGVPAFLETSAPRNLPFYERLGFTVTADVEVPEGPRTWCMTRKPGA

SEQ ID NO: 19185 - protein, 871 aa, synthetic construct
MALPVTALLLPLALLLHAARPLEIQNPDPAVYQLRDSKSSDKSVCLFTDFDSQTNVSQSKDSDVYITDKTVLDMRSMDFKSNSAVAWSNKSDFACANAFNNSIIPEDTFFPSPESSCDVKLVEKSFETDTNLNFQILYEILLGKATLYAVLVSALVLMAMVKRKDSRGRAKRSGSGATNFSLLKQAGDVEENPGPTSMALPVTALLLPLALLLHAARPDIQMTQSPSSLSASVGDRVTITCKASDHINNWLAWYQQKPGQAPKLLIYGATTLETGVPSRFSGSGSGTDYTLTISSLQPEDFATYYCQQSWNTPWTFGQGTKLEIKRGGGGSGGGGSGGGGSQVQLQQPGAELVKPGASVKMSCKASGYAFSSYWINWMKQKPGQGLEWIGQIYPGDGDTNYNGKFKGRATLTADTSSSTAYMQLSSLTSEDSAVYFCARSITTVVGCAMDYWGQGTSVTVSSTREDLKNVFPPEVAVFEPSEAEISHTQKATLVCLATGFYPDHVELSWWVNGKEVHSGVSTDPQPLKEQPALNDSRYCLSSRLRVSATFWQNPRNHFRCQVQFYGLSENDEWTQDRAKPVTQIVSAEAWGRADCGFTSESYQQGVLSATNLSVIGFRILLLKVAGFNLLMTLRLWSSRAKRSGSGVKQTLNFDLLKLAGDVESNPGPSRGHMTEYKPTVRLATRDDVPRAVRTLAAAFADYPATRHTVDPDRHIERVTELQELFLTRVGLDIGKVWVADDGAAVAVWTTPESVEAGAVFAEIGPRMAELSGSRLAAQQQMEGLLAPHRPKEPAWFLATVGVSPDHQGKGLGSAVVLPGVEAAERAGVPAFLETSAPRNLPFYERLGFTVTADVEVPEGPRTWCMTRKPGA

SEQ ID NO: 19186 - protein, 873 aa, synthetic construct
MALPVTALLLPLALLLHAARPLEIQNPDPAVYQLRDSKSSDKSVCLFTDFDSQTNVSQSKDSDVYITDKTVLDMRSMDFKSNSAVAWSNKSDFACANAFNNSIIPEDTFFPSPESSCDVKLVEKSFETDTNLNFQILYEILLGKATLYAVLVSALVLMAMVKRKDSRGRAKRSGSGATNFSLLKQAGDVEENPGPTSMALPVTALLLPLALLLHAARPQIVLSQSPAILSASPGEKVTMTCRASSSVSYMHWYQQKPGSSPKPWIYATSNLASGVPARFSGSGSGTSYSFTISRVEAEDAATYYCQQWTFNPPTFGGGTRLEIKRTVAAGGGGSGGGGSGGGGSQAYLQQSGAELVRPGASVKMSCKASGYTFTSYNMHWVKQTPRQGLEWIGGIYPGNGDTSYNQKFKGKATLTVGKSSSTAYMQLSSLTSEDSAVYFCARYDYNYAMDYWGQGTSVTVSSASTREDLKNVFPPEVAVFEPSEAEISHTQKATLVCLATGFYPDHVELSWWVNGKEVHSGVSTDPQPLKEQPALNDSRYCLSSRLRVSATFWQNPRNHFRCQVQFYGLSENDEWTQDRAKPVTQIVSAEAWGRADCGFTSESYQQGVLSATNLSVIGFRILLLKVAGFNLLMTLRLWSSRAKRSGSGVKQTLNFDLLKLAGDVESNPGPSRGHMTEYKPTVRLATRDDVPRAVRTLAAAFADYPATRHTVDPDRHIERVTELQELFLTRVGLDIGKVWVADDGAAVAVWTTPESVEAGAVFAEIGPRMAELSGSRLAAQQQMEGLLAPHRPKEPAWFLATVGVSPDHQGKGLGSAVVLPGVEAAERAGVPAFLETSAPRNLPFYERLGFTVTADVEVPEGPRTWCMTRKPGA

SEQ ID NO: 19187 - protein, 871 aa, synthetic construct
MALPVTALLLPLALLLHAARPLEIQNPDPAVYQLRDSKSSDKSVCLFTDFDSQTNVSQSKDSDVYITDKTVLDMRSMDFKSNSAVAWSNKSDFACANAFNNSIIPEDTFFPSPESSCDVKLVEKSFETDTNLNFQILYEILLGKATLYAVLVSALVLMAMVKRKDSRGRAKRSGSGATNFSLLKQAGDVEENPGPTSMALPVTALLLPLALLLHAARPEIVLTQSPATLSLSPGERATLSCRASQSVSSYLAWYQQKPGQAPRLLIYDASNRATGIPARFSGSGSGTDFTLTISSLEPEDFAVYYCQQRSNWPITFGQGTRLEIKGGGGSGGGGSGGGGSEVQLVESGGGLVQPDRSLRLSCAASGFTFHDYAMHWVRQAPGKGLEWVSTISWNSGTIGYADSVKGRFTISRDNAKNSLYLQMNSLRAEDTALYYCAKDIQYGNYYYGMDVWGQGTTVTVSSTREDLKNVFPPEVAVFEPSEAEISHTQKATLVCLATGFYPDHVELSWWVNGKEVHSGVSTDPQPLKEQPALNDSRYCLSSRLRVSATFWQNPRNHFRCQVQFYGLSENDEWTQDRAKPVTQIVSAEAWGRADCGFTSESYQQGVLSATNLSVIGFRILLLKVAGFNLLMTLRLWSSRAKRSGSGVKQTLNFDLLKLAGDVESNPGPSRGHMTEYKPTVRLATRDDVPRAVRTLAAAFADYPATRHTVDPDRHIERVTELQELFLTRVGLDIGKVWVADDGAAVAVWTTPESVEAGAVFAEIGPRMAELSGSRLAAQQQMEGLLAPHRPKEPAWFLATVGVSPDHQGKGLGSAVVLPGVEAAERAGVPAFLETSAPRNLPFYERLGFTVTADVEVPEGPRTWCMTRKPGA

SEQ ID NO: 19188 - protein, 869 aa, synthetic construct
MALPVTALLLPLALLLHAARPLEIQNPDPAVYQLRDSKSSDKSVCLFTDFDSQTNVSQSKDSDVYITDKTVLDMRSMDFKSNSAVAWSNKSDFACANAFNNSIIPEDTFFPSPESSCDVKLVEKSFETDTNLNFQILYEILLGKATLYAVLVSALVLMAMVKRKDSRGRAKRSGSGATNFSLLKQAGDVEENPGPTSMALPVTALLLPLALLLHAARPDIQMTQSPSSLSASVGDRVTITCRASQDVNTAVAWYQQKPGKAPKLLIYSASFLESGVPSRFSGSRSGTDFTLTISSLQPEDFATYYCQQHYTTPPTFGQTKVEIKRGGGGSGGGGSGGGGSEVQLVESGGGLVQPGGSLRLSCAASGFNIKDTYIHWVRQAPGKGLEWVARIYPTNGYTRYADSVKGRFTISADTSKNTAYLQMNSLRAEDTAVYYCSRWGGDGFYAMDVWGQGTLVTVSSTREDLKNVFPPEVAVFEPSEAEISHTQKATLVCLATGFYPDHVELSWWVNGKEVHSGVSTDPQPLKEQPALNDSRYCLSSRLRVSATFWQNPRNHFRCQVQFYGLSENDEWTQDRAKPVTQIVSAEAWGRADCGFTSESYQQGVLSATNLSVIGFRILLLKVAGFNLLMTLRLWSSRAKRSGSGVKQTLNFDLLKLAGDVESNPGPSRGHMTEYKPTVRLATRDDVPRAVRTLAAAFADYPATRHTVDPDRHIERVTELQELFLTRVGLDIGKVWVADDGAAVAVWTTPESVEAGAVFAEIGPRMAELSGSRLAAQQQMEGLLAPHRPKEPAWFLATVGVSPDHQGKGLGSAVVLPGVEAAERAGVPAFLETSAPRNLPFYERLGFTVTADVEVPEGPRTWCMTRKPGA

SEQ ID NO: 19189 - protein, 748 aa, synthetic construct
MALPVTALLLPLALLLHAARPLEIQNPDPAVYQLRDSKSSDKSVCLFTDFDSQTNVSQSKDSDVYITDKTVLDMRSMDFKSNSAVAWSNKSDFACANAFNNSIIPEDTFFPSPESSCDVKLVEKSFETDTNLNFQILYEILLGKATLYAVLVSALVLMAMVKRKDSRGRAKRSGSGATNFSLLKQAGDVEENPGPTSMALPVTALLLPLALLLHAARPDEFEVQLVESGGGLVQAGGSLRLSCAASGITFSINTMGWYRQAPGKQRELVALISSIGDTYYADSVKGRFTISRDNAKNTVYLQMNSLKPEDTAVYYCKRFRTAAQGTDYWGQGTQVTVSSTREDLKNVFPPEVAVFEPSEAEISHTQKATLVCLATGFYPDHVELSWWVNGKEVHSGVSTDPQPLKEQPALNDSRYCLSSRLRVSATFWQNPRNHFRCQVQFYGLSENDEWTQDRAKPVTQIVSAEAWGRADCGFTSESYQQGVLSATNLSVIGFRILLLKVAGFNLLMTLRLWSSRAKRSGSGVKQTLNFDLLKLAGDVESNPGPSRGHMTEYKPTVRLATRDDVPRAVRTLAAAFADYPATRHTVDPDRHIERVTELQELFLTRVGLDIGKVWVADDGAAVAVWTTPESVEAGAVFAEIGPRMAELSGSRLAAQQQMEGLLAPHRPKEPAWFLATVGVSPDHQGKGLGSAVVLPGVEAAERAGVPAFLETSAPRNLPFYERLGFTVTADVEVPEGPRTWCMTRKPGA

SEQ ID NO: 19190 - protein, 748 aa, synthetic construct; identical to SEQ ID NO: 19189

SEQ ID NO: 19191 - protein, 1013 aa, synthetic construct
MALPVTALLLPLALLLHAARPLEIQNPDPAVYQLRDSKSSDKSVCLFTDFDSQTNVSQSKDSDVYITDKTVLDMRSMDFKSNSAVAWSNKSDFACANAFNNSIIPEDTFFPSPESSCDVKLVEKSFETDTNLNFQILYEILLGKATLYAVLVSALVLMAMVKRKDSRGRAKRSGSGATNFSLLKQAGDVEENPGPTSMALPVTALLLPLALLLHAARPQVQLVESGGGLVQAGDSVTLSCTASGRTFSSYALAWFRQRPGKEREFVAGLRWGGPTNYADSVKDRFTISGDSAKHTMYLQMNSLKPEDTAVYYCGYNPGGWAVPSQYEYDSWGQGTQVTVSSGTGGGGSGGGGSGGGGSEFDIQMTQSPSSLSASVGDRVTITCKASDHINNWLAWYQQKPGQAPKLLIYGATTLETGVPSRFSGSGSGTDYTLTISSLQPEDFATYYCQQSWNTPWTFGQGTKLEIKRGGGGSGGGGSGGGGSQVQLQQPGAELVKPGASVKMSCKASGYAFSSYWINWMKQKPGQGLEWIGQIYPGDGDTNYNGKFKGRATLTADTSSSTAYMQLSSLTSEDSAVYFCARSITTVVGCAMDYWGQGTSVTVSSTREDLKNVFPPEVAVFEPSEAEISHTQKATLVCLATGFYPDHVELSWWVNGKEVHSGVSTDPQPLKEQPALNDSRYCLSSRLRVSATFWQNPRNHFRCQVQFYGLSENDEWTQDRAKPVTQIVSAEAWGRADCGFTSESYQQGVLSATNLSVIGFRILLLKVAGFNLLMTLRLWSSRAKRSGSGVKQTLNFDLLKLAGDVESNPGPSRGHMTEYKPTVRLATRDDVPRAVRTLAAAFADYPATRHTVDPDRHIERVTELQELFLTRVGLDIGKVWVADDGAAVAVWTTPESVEAGAVFAEIGPRMAELSGSRLAAQQQMEGLLAPHRPKEPAWFLATVGVSPDHQGKGLGSAVVLPGVEAAERAGVPAFLETSAPRNLPFYERLGFTVTADVEVPEGPRTWCMTRKPGA

SEQ ID NO: 19192 - protein, 1142 aa, synthetic construct
MALPVTALLLPLALLLHAARPLEIQNPDPAVYQLRDSKSSDKSVCLFTDFDSQTNVSQSKDSDVYITDKTVLDMRSMDFKSNSAVAWSNKSDFACANAFNNSIIPEDTFFPSPESSCDVKLVEKSFETDTNLNFQILYEILLGKATLYAVLVSALVLMAMVKRKDSRGRAKRSGSGATNFSLLKQAGDVEENPGPTSMALPVTALLLPLALLLHAARPEVQLLESGGGLVQPGGSLRLSCAASGFTFSSYAMSWVRQAPGKGLEWVSSISGSGDYIYYADSVKGRFTISRDISKNTLYLQMNSLRAEDTAVYYCAKEGTGANSSLADYRGQGTLVTVSSGGGSGGGSQVQLVESGGGLVQAGDSVTLSCTASGRTFSSYALAWFRQRPGKEREFVAGLRWGGPTNYADSVKDRFTISGDSAKHTMYLQMNSLKPEDTAVYYCGYNPGGWAVPSQYEYDSWGQGTQVTVSSGTGGGGSGGGGSGGGGSEFDIQMTQSPSSLSASVGDRVTITCKASDHINNWLAWYQQKPGQAPKLLIYGATTLETGVPSRFSGSGSGTDYTLTISSLQPEDFATYYCQQSWNTPWTFGQGTKLEIKRGGGGSGGGGSGGGGSQVQLQQPGAELVKPGASVKMSCKASGYAFSSYWINWMKQKPGQGLEWIGQIYPGDGDTNYNGKFKGRATLTADTSSSTAYMQLSSLTSEDSAVYFCARSITTVVGCAMDYWGQGTSVTVSSTREDLKNVFPPEVAVFEPSEAEISHTQKATLVCLATGFYPDHVELSWWVNGKEVHSGVSTDPQPLKEQPALNDSRYCLSSRLRVSATFWQNPRNHFRCQVQFYGLSENDEWTQDRAKPVTQIVSAEAWGRADCGFTSESYQQGVLSATNLSVIGFRILLLKVAGFNLLMTLRLWSSRAKRSGSGVKQTLNFDLLKLAGDVESNPGPSRGHMTEYKPTVRLATRDDVPRAVRTLAAAFADYPATRHTVDPDRHIERVTELQELFLTRVGLDIGKVWVADDGAAVAVWTTPESVEAGAVFAEIGPRMAELSGSRLAAQQQMEGLLAPHRPKEPAWFLATVGVSPDHQGKGLGSAVVLPGVEAAERAGVPAFLETSAPRNLPFYERLGFTVTADVEVPEGPRTWCMTRKPGA

SEQ ID NO: 19193 - protein, 1140 aa, synthetic construct
MALPVTALLLPLALLLHAARPLEIQNPDPAVYQLRDSKSSDKSVCLFTDFDSQTNVSQSKDSDVYITDKTVLDMRSMDFKSNSAVAWSNKSDFACANAFNNSIIPEDTFFPSPESSCDVKLVEKSFETDTNLNFQILYEILLGKATLYAVLVSALVLMAMVKRKDSRGRAKRSGSGATNFSLLKQAGDVEENPGPTSMALPVTALLLPLALLLHAARPGVTQSPTHLIKTRGQQATLRCSPISGHTSVYWYQQALGLGLQFLLWYDEGEERNRGNFPPRFSGRQFPNYSSELNVNALELEDSALYLCASSLGGPRGLAGLRGDEQFFGPGTRLTVLEGGGSGGGSQVQLVESGGGLVQAGDSVTLSCTASGRTFSSYALAWFRQRPGKEREFVAGLRWGGPTNYADSVKDRFTISGDSAKHTMYLQMNSLKPEDTAVYYCGYNPGGWAVPSQYEYDSWGQGTQVTVSSGTGGGGSGGGGSGGGGSEFDIQMTQSPSSLSASVGDRVTITCKASDHINNWLAWYQQKPGQAPKLLIYGATTLETGVPSRFSGSGSGTDYTLTISSLQPEDFATYYCQQSWNTPWTFGQGTKLEIKRGGGGSGGGGSGGGGSQVQLQQPGAELVKPGASVKMSCKASGYAFSSYWINWMKQKPGQGLEWIGQIYPGDGDTNYNGKFKGRATLTADTSSSTAYMQLSSLTSEDSAVYFCARSITTVVGCAMDYWGQGTSVTVSSTREDLKNVFPPEVAVFEPSEAEISHTQKATLVCLATGFYPDHVELSWWVNGKEVHSGVSTDPQPLKEQPALNDSRYCLSSRLRVSATFWQNPRNHFRCQVQFYGLSENDEWTQDRAKPVTQIVSAEAWGRADCGFTSESYQQGVLSATNLSVIGFRILLLKVAGFNLLMTLRLWSSRAKRSGSGVKQTLNFDLLKLAGDVESNPGPSRGHMTEYKPTVRLATRDDVPRAVRTLAAAFADYPATRHTVDPDRHIERVTELQELFLTRVGLDIGKVWVADDGAAVAVWTTPESVEAGAVFAEIGPRMAELSGSRLAAQQQMEGLLAPHRPKEPAWFLATVGVSPDHQGKGLGSAVVLPGVEAAERAGVPAFLETSAPRNLPFYERLGFTVTADVEVPEGPRTWCMTRKPGA

SEQ ID NO: 19194 - protein, 901 aa, synthetic construct
MALPVTALLLPLALLLHAARPLEIQNPDPAVYQLRDSKSSDKSVCLFTDFDSQTNVSQSKDSDVYITDKTVLDMRSMDFKSNSAVAWSNKSDFACANAFNNSIIPEDTFFPSPESSCDVKLVEKSFETDTNLNFQILYEILLGKATLYAVLVSALVLMAMVKRKDSRGRAKRSGSGATNFSLLKQAGDVEENPGPTSMALPVTALLLPLALLLHAARPGVTQSPTHLIKTRGQQATLRCSPISGHTSVYWYQQALGLGLQFLLWYDEGEERNRGNFPPRFSGRQFPNYSSELNVNALELEDSALYLCASSLGGPRGLAGLRGDEQFFGPGTRLTVLEGGGSGGGSGVTQSPTHLIKTRGQQATLRCSPISGHTSVYWYQQALGLGLQFLLWYDEGEERNRGNFPPRFSGRQFPNYSSELNVNALELEDSALYLCASSLGGDELGADGNEQFFGPGTRLTVLEGTGGGGSGGGGSGGGGSEFDIQMTQSPSSLSASVGDRVTITCKASDHINNWLAWYQQKPGQAPKLLIYGATTLETGVPSRFSGSGSGTDYTLTISSLQPEDFATYYCQQSWNTPWTFGQGTKLEIKRGGGGSGGGGSGGGGSQVQLQQPGAELVKPGASVKMSCKASGYAFSSYWINWMKQKPGQGLEWIGQIYPGDGDTNYNGKFKGRATLTADTSSSTAYMQLSSLTSEDSAVYFCARSITTVVGCAMDYWGQGTSVTVSSTREDLKNVFPPEVAVFEPSEAEISHTQKATLVCLATGFYPDHVELSWWVNGKEVHSGVSTDPQPLKEQPALNDSRYCLSSRLRVSATFWQNPRNHFRCQVQFYGLSENDEWTQDRAKPVTQIVSAEAWGRADCGFTSESYQQGVLSATNLSVIGFRILLLKVAGFNLLMTLRLWSS

SEQ ID NO: 19195 - protein, 754 aa, synthetic construct
MALPVTALLLPLALLLHAARPLEIQNPDPAVYQLRDSKSSDKSVCLFTDFDSQTNVSQSKDSDVYITDKTVLDMRSMDFKSNSAVAWSNKSDFACANAFNNSIIPEDTFFPSPESSCDVKLVEKSFETDTNLNFQILYEILLGKATLYAVLVSALVLMAMVKRKDSRGRAKRSGSGATNFSLLKQAGDVEENPGPTSMALPVTALLLPLALLLHAARPDEFGSDLGIKLLFAAAKGQDDEVRILLAAGADVNAKDFEGYTPLHVAAYDGHLEIVEVLLKAGADVNAKDSQGRTPLHEAAYSGHLEIVEVLLKAGADVNAQDDAGETPADLAAAWGHEDIAEVLQKTREDLKNVFPPEVAVFEPSEAEISHTQKATLVCLATGFYPDHVELSWWVNGKEVHSGVSTDPQPLKEQPALNDSRYCLSSRLRVSATFWQNPRNHFRCQVQFYGLSENDEWTQDRAKPVTQIVSAEAWGRADCGFTSESYQQGVLSATNLSVIGFRILLLKVAGFNLLMTLRLWSSRAKRSGSGVKQTLNFDLLKLAGDVESNPGPSRGHMTEYKPTVRLATRDDVPRAVRTLAAAFADYPATRHTVDPDRHIERVTELQELFLTRVGLDIGKVWVADDGAAVAVWTTPESVEAGAVFAEIGPRMAELSGSRLAAQQQMEGLLAPHRPKEPAWFLATVGVSPDHQGKGLGSAVVLPGVEAAERAGVPAFLETSAPRNLPFYERLGFTVTADVEVPEGPRTWCMTRKPGA

SEQ ID NO: 19196 - protein, 683 aa, synthetic construct
MALPVTALLLPLALLLHAARPLEIQNPDPAVYQLRDSKSSDKSVCLFTDFDSQTNVSQSKDSDVYITDKTVLDMRSMDFKSNSAVAWSNKSDFACANAFNNSIIPEDTFFPSPESSCDVKLVEKSFETDTNLNFQILYEILLGKATLYAVLVSALVLMAMVKRKDSRGRAKRSGSGATNFSLLKQAGDVEENPGPTSMDWIWRILFLVGAATGAHSFEGSGFEYAKEMRNAYWEIALLPNLTNQQKRAPIRKLYDDPSQSSELLSEAKKLNDSQTREDLKNVFPPEVAVFEPSEAEISHTQKATLVCLATGFYPDHVELSWWVNGKEVHSGVSTDPQPLKEQPALNDSRYCLSSRLRVSATFWQNPRNHFRCQVQFYGLSENDEWTQDRAKPVTQIVSAEAWGRADCGFTSESYQQGVLSATNLSVIGFRILLLKVAGFNLLMTLRLWSSRAKRSGSGVKQTLNFDLLKLAGDVESNPGPSRGHMTEYKPTVRLATRDDVPRAVRTLAAAFADYPATRHTVDPDRHIERVTELQELFLTRVGLDIGKVWVADDGAAVAVWTTPESVEAGAVFAEIGPRMAELSGSRLAAQQQMEGLLAPHRPKEPAWFLATVGVSPDHQGKGLGSAVVLPGVEAAERAGVPAFLETSAPRNLPFYERLGFTVTADVEVPEGPRTWCMTRKPGA

SEQ ID NO: 19197 - protein, 905 aa, synthetic construct
MALPVTALLLPLALLLHAARPLEIQNPDPAVYQLRDSKSSDKSVCLFTDFDSQTNVSQSKDSDVYITDKTVLDMRSMDFKSNSAVAWSNKSDFACANAFNNSIIPEDTFFPSPESSCDVKLVEKSFETDTNLNFQILYEILLGKATLYAVLVSALVLMAMVKRKDSRGRAKRSGSGATNFSLLKQAGDVEENPGPTSMALPVTALLLPLALLLHAARPDEFEVQLVESGGGLVQAGGSLRLSCAASGITFSINTMGWYRQAPGKQRELVALISSIGDTYYADSVKGRFTISRDNAKNTVYLQMNSLKPEDTAVYYCKRFRTAAQGTDYWGQGTQVTVSSLEGGGGSGGGGSGGGGSGSGGSGSGGSGSGGSGSGGSFEVQLVESGGGLVQPGGSLRLSCAASGSIFGFNDMAWYRQAPGKQRELVALISRVGVTSSADSVKGRFTISRVNAKDTVYLQMNSLKPEDTAVYYCYMDQRLDGSTLAYWGQGTQVTVSSTREDLKNVFPPEVAVFEPSEAEISHTQKATLVCLATGFYPDHVELSWWVNGKEVHSGVSTDPQPLKEQPALNDSRYCLSSRLRVSATFWQNPRNHFRCQVQFYGLSENDEWTQDRAKPVTQIVSAEAWGRADCGFTSESYQQGVLSATNLSVIGFRILLLKVAGFNLLMTLRLWSSRAKRSGSGVKQTLNFDLLKLAGDVESNPGPSRGHMTEYKPTVRLATRDDVPRAVRTLAAAFADYPATRHTVDPDRHIERVTELQELFLTRVGLDIGKVWVADDGAAVAVWTTPESVEAGAVFAEIGPRMAELSGSRLAAQQQMEGLLAPHRPKEPAWFLATVGVSPDHQGKGLGSAVVLPGVEAAERAGVPAFLETSAPRNLPFYERLGFTVTADVEVPEGPRTWCMTRKPGA

SEQ ID NO: 19198 - protein, 819 aa, synthetic construct
MALPVTALLLPLALLLHAARPLEIQNPDPAVYQLRDSKSSDKSVCLFTDFDSQTNVSQSKDSDVYITDKTVLDMRSMDFKSNSAVAWSNKSDFACANAFNNSIIPEDTFFPSPESSCDVKLVEKSFETDTNLNFQILYEILLGKATLYAVLVSALVLMAMVKRKDSRGRAKRSGSGATNFSLLKQAGDVEENPGPTSMALPVTALLLPLALLLHAARPGMRTEDLPKAVVFLEPQWYRVLEKDSVTLKCQGAYSPEDNSTQWFHNESLISSQASSYFIDAATVDDSGEYRCQTNLSTLSDPVQLEVHIGWLLLQAPRWVFKEEDPIHLRCHSWKNTALHKVTYLQNGKGRKYFHHNSDFYIPKATLKDSGSYFCRGLVGSKNVSSETVNITITQGLAVSTISSFFPPGYQTREDLKNVFPPEVAVFEPSEAEISHTQKATLVCLATGFYPDHVELSWWVNGKEVHSGVSTDPQPLKEQPALNDSRYCLSSRLRVSATFWQNPRNHFRCQVQFYGLSENDEWTQDRAKPVTQIVSAEAWGRADCGFTSESYQQGVLSATNLSVIGFRILLLKVAGFNLLMTLRLWSSRAKRSGSGVKQTLNFDLLKLAGDVESNPGPSRGHMTEYKPTVRLATRDDVPRAVRTLAAAFADYPATRHTVDPDRHIERVTELQELFLTRVGLDIGKVWVADDGAAVAVWTTPESVEAGAVFAEIGPRMAELSGSRLAAQQQMEGLLAPHRPKEPAWFLATVGVSPDHQGKGLGSAVVLPGVEAAERAGVPAFLETSAPRNLPFYERLGFTVTADVEVPEGPRTWCMTRKPGA

SEQ ID NO: 19199 - protein, 447 aa, synthetic construct
MALPVTALLLPLALLLHAARPLEIQNPDPAVYQLRDSKSSDKSVCLFTDFDSQTNVSQSKDSDVYITDKTVLDMRSMDFKSNSAVAWSNKSDFACANAFNNSIIPEDTFFPSPESSCDVKLVEKSFETDTNLNFQILYEILLGKATLYAVLVSALVLMAMVKRKDSRGRAKRSGSGATNFSLLKQAGDVEENPGPTSATMALPVTALLLPLALLLHAARPMDPDLEIRAAFLRQRNTALRTEVAELEQEVQRLENEVSQYETRYGPLGGGKTREDLKNVFPPEVAVFEPSEAEISHTQKATLVCLATGFYPDHVELSWWVNGKEVHSGVSTDPQPLKEQPALNDSRYCLSSRLRVSATFWQNPRNHFRCQVQFYGLSENDEWTQDRAKPVTQIVSAEAWGRADCGFTSESYQQGVLSATNLSVIGFRILLLKVAGFNLLMTLRLWSS

SEQ ID NO: 19200 - protein, 447 aa, synthetic construct
MALPVTALLLPLALLLHAARPLEIQNPDPAVYQLRDSKSSDKSVCLFTDFDSQTNVSQSKDSDVYITDKTVLDMRSMDFKSNSAVAWSNKSDFACANAFNNSIIPEDTFFPSPESSCDVKLVEKSFETDTNLNFQILYEILLGKATLYAVLVSALVLMAMVKRKDSRGRAKRSGSGATNFSLLKQAGDVEENPGPTSATMALPVTALLLPLALLLHAARPMDPDLEIEAAFLERENTALETRVAELRQRVQRLRNRVSQYRTRYGPLGGGKTREDLKNVFPPEVAVFEPSEAEISHTQKATLVCLATGFYPDHVELSWWVNGKEVHSGVSTDPQPLKEQPALNDSRYCLSSRLRVSATFWQNPRNHFRCQVQFYGLSENDEWTQDRAKPVTQIVSAEAWGRADCGFTSESYQQGVLSATNLSVIGFRILLLKVAGFNLLMTLRLWSS

SEQ ID NO: 19201 - protein, 682 aa, synthetic construct
MALPVTALLLPLALLLHAARPLEIQNPDPAVYQLRDSKSSDKSVCLFTDFDSQTNVSQSKDSDVYITDKTVLDMRSMDFKSNSAVAWSNKSDFACANAFNNSIIPEDTFFPSPESSCDVKLVEKSFETDTNLNFQILYEILLGKATLYAVLVSALVLMAMVKRKDSRGRAKRSGSGATNFSLLKQAGDVEENPGPTSATMALPVTALLLPLALLLHAARPLFNQEVQIPLTESYCGPCPKNWICYKNNCYQFFDESKNWYESQASCMSQNASLLKVYSKEDQDLLKLVKSAHWMGLVHIPTNGSWQWEDGSILSPNLLTIIEMQKGDCALYASSFKGYIENCSTPNTYICMQRTVSGGGGSGGGGSGGGGDLFNQEVQIPLTESYCGPCPKNWICYKNNCYQFFDESKNWYESQASCMSQNASLLKVYSKEDQDLLKLVKSAHWMGLVHIPTNGSWQWEDGSILSPNLLTIIEMQKGDCALYASSFKGYIENCSTPNTYICMQRTVTREDLKNVFPPEVAVFEPSEAEISHTQKATLVCLATGFYPDHVELSWWVNGKEVHSGVSTDPQPLKEQPALNDSRYCLSSRLRVSATFWQNPRNHFRCQVQFYGLSENDEWTQDRAKPVTQIVSAEAWGRADCGFTSESYQQGVLSATNLSVIGFRILLLKVAGFNLLMTLRLWSS

SEQ ID NO: 19202 - protein, 682 aa, synthetic construct
MALPVTALLLPLALLLHAARPLEIQNPDPAVYQLRDSKSSDKSVCLFTDFDSQTNVSQSKDSDVYITDKTVLDMRSMDFKSNSAVAWSNKSDFACANAFNNSIIPEDTFFPSPESSCDVKLVEKSFETDTNLNFQILYEILLGKATLYAVLVSALVLMAMVKRKDSRGRAKRSGSGATNFSLLKQAGDVEENPGPTSATMALPVTALLLPLALLLHAARPLFNQEVQIPLTESYCGPCPKNWICYKNNCYQFFDESKNWYESQASCMSQNASLLKVYSKEDQDLLKLVKSAHWMGLVHIPTNGSWQWEDGSILSPNLLTIIEMQKGDCALYASSFKGFIENCSTPNTYICMQRTVGGGGSGGGGSGGGGSDLFNQEVQIPLTESYCGPCPKNWICYKNNCYQFFDESKNWYESQASCMSQNASLLKVYSKEDQDLLKLVKSAHWMGLVHIPTNGSWQWEDGSILSPNLLTIIEMQKGDCALYASSFKGFIENCSTPNTYICMQRTVTREDLKNVFPPEVAVFEPSEAEISHTQKATLVCLATGFYPDHVELSWWVNGKEVHSGVSTDPQPLKEQPALNDSRYCLSSRLRVSATFWQNPRNHFRCQVQFYGLSENDEWTQDRAKPVTQIVSAEAWGRADCGFTSESYQQGVLSATNLSVIGFRILLLKVAGFNLLMTLRLWSS

SEQ ID NO: 19203 - protein, 708 aa, synthetic construct
MALPVTALLLPLALLLHAARPLEIQNPDPAVYQLRDSKSSDKSVCLFTDFDSQTNVSQSKDSDVYITDKTVLDMRSMDFKSNSAVAWSNKSDFACANAFNNSIIPEDTFFPSPESSCDVKLVEKSFETDTNLNFQILYEILLGKATLYAVLVSALVLMAMVKRKDSRGRAKRSGSGATNFSLLKQAGDVEENPGPTSMALPVTALLLPLALLLHAARPMDPDLEIRAAFLRQRNTALRTEVAELEQEVQRLENEVSQYETRYGPLGGGKGTGGGGSGGGGSGGGGSEFDIQMTQSPSSLSASVGDRVTITCKASDHINNWLAWYQQKPGQAPKLLIYGATTLETGVPSRFSGSGSGTDYTLTISSLQPEDFATYYCQQSWNTPWTFGQGTKLEIKRGGGGSGGGGSGGGGSQVQLQQPGAELVKPGASVKMSCKASGYAFSSYWINWMKQKPGQGLEWIGQIYPGDGDTNYNGKFKGRATLTADTSSSTAYMQLSSLTSEDSAVYFCARSITTVVGCAMDYWGQGTSVTVSSTREDLKNVFPPEVAVFEPSEAEISHTQKATLVCLATGFYPDHVELSWWVNGKEVHSGVSTDPQPLKEQPALNDSRYCLSSRLRVSATFWQNPRNHFRCQVQFYGLSENDEWTQDRAKPVTQIVSAEAWGRADCGFTSESYQQGVLSATNLSVIGFRILLLKVAGFNLLMTLRLWSS

SEQ ID NO: 19204 - protein, 943 aa, synthetic construct
MALPVTALLLPLALLLHAARPLEIQNPDPAVYQLRDSKSSDKSVCLFTDFDSQTNVSQSKDSDVYITDKTVLDMRSMDFKSNSAVAWSNKSDFACANAFNNSIIPEDTFFPSPESSCDVKLVEKSFETDTNLNFQILYEILLGKATLYAVLVSALVLMAMVKRKDSRGRAKRSGSGATNFSLLKQAGDVEENPGPTSMALPVTALLLPLALLLHAARPLFNQEVQIPLTESYCGPCPKNWICYKNNCYQFFDESKNWYESQASCMSQNASLLKVYSKEDQDLLKLVKSAHWMGLVHIPTNGSWQWEDGSILSPNLLTIIEMQKGDCALYASSFKGFIENCSTPNTYICMQRTVGGGGSGGGGSGGGGSDLFNQEVQIPLTESYCGPCPKNWICYKNNCYQFFDESKNWYESQASCMSQNASLLKVYSKEDQDLLKLVKSAHWMGLVHIPTNGSWQWEDGSILSPNLLTIIEMQKGDCALYASSFKGFIENCSTPNTYICMQRTVGTGGGGSGGGGSGGGGSEFDIQMTQSPSSLSASVGDRVTITCKASDHINNWLAWYQQKPGQAPKLLIYGATTLETGVPSRFSGSGSGTDYTLTISSLQPEDFATYYCQQSWNTPWTFGQGTKLEIKRGGGGSGGGGSGGGGSQVQLQQPGAELVKPGASVKMSCKASGYAFSSYWINWMKQKPGQGLEWIGQIYPGDGDTNYNGKFKGRATLTADTSSSTAYMQLSSLTSEDSAVYFCARSITTVVGCAMDYWGQGTSVTVSSTREDLKNVFPPEVAVFEPSEAEISHTQKATLVCLATGFYPDHVELSWWVNGKEVHSGVSTDPQPLKEQPALNDSRYCLSSRLRVSATFWQNPRNHFRCQVQFYGLSENDEWTQDRAKPVTQIVSAEAWGRADCGFTSESYQQGVLSATNLSVIGFRILLLKVAGFNLLMTLRLWSS

SEQ ID NO: 19205 - protein, 648 aa, synthetic construct
MALPVTALLLPLALLLHAARPLEIQNPDPAVYQLRDSKSSDKSVCLFTDFDSQTNVSQSKDSDVYITDKTVLDMRSMDFKSNSAVAWSNKSDFACANAFNNSIIPEDTFFPSPESSCDVKLVEKSFETDTNLNFQILYEILLGKATLYAVLVSALVLMAMVKRKDSRGRAKRSGSGATNFSLLKQAGDVEENPGPTSMALPVTALLLPLALLLHAARPQSVLTQPPSVSGAPGQRVTISCTGSSSNIGAGYDVHWYQQLPGTAPKLLIFGNSNRPSGVPDRFSGFKSGTSASLAITGLQAEDEADYFCQSYDSSLSGSGVFGTGTKVTVLGGGGGSGGGGSGGGGSQMQLVQSGGGLVQPGRSLRLSCAASGFTFDDYAMHWVRQAPGKGLEWVSGISWNSGSIGYADSVKGRFTISRDNAKNSLYLQMNSLRAEDTALYYCAKDIHSGSYYGLLYYAMDVWGQGTTVTVSSTREDLKNVFPPEVAVFEPSEAEISHTQKATLVCLATGFYPDHVELSWWVNGKEVHSGVSTDPQPLKEQPALNDSRYCLSSRLRVSATFWQNPRNHFRCQVQFYGLSENDEWTQDRAKPVTQIVSAEAWGRADCGFTSESYQQGVLSATNLSVIGFRILLLKVAGFNLLMTLRLWSS

SEQ ID NO: 19206 - protein, 485 aa, synthetic construct
MALPVTALLLPLALLLHAARPLEIQNPDPAVYQLRDSKSSDKSVCLFTDFDSQTNVSQSKDSDVYITDKTVLDMRSMDFKSNSAVAWSNKSDFACANAFNNSIIPEDTFFPSPESSCDVKLVEKSFETDTNLNFQILYEILLGKATLYAVLVSALVLMAMVKRKDSRGRAKRSGSGATNFSLLKQAGDVEENPGPTSMALPVTALLLPLALLLHAARPMCMPCFTTDHQMARKCDDCCGGKGRGKCYGPQCLCRLEGGGGSGGGGSGGGGSFEVCMPCFTTDQQMARKCSDCCGGKGRGKCYGPQCLCRTREDLKNVFPPEVAVFEPSEAEISHTQKATLVCLATGFYPDHVELSWWVNGKEVHSGVSTDPQPLKEQPALNDSRYCLSSRLRVSATFWQNPRNHFRCQVQFYGLSENDEWTQDRAKPVTQIVSAEAWGRADCGFTSESYQQGVLSATNLSVIGFRILLLKVAGFNLLMTLRLWSS

SEQ ID NO: 19207 - protein, 695 aa, synthetic construct
MALPVTALLLPLALLLHAARPLEIQNPDPAVYQLRDSKSSDKSVCLFTDFDSQTNVSQSKDSDVYITDKTVLDMRSMDFKSNSAVAWSNKSDFACANAFNNSIIPEDTFFPSPESSCDVKLVEKSFETDTNLNFQILYEILLGKATLYAVLVSALVLMAMVKRKDSRGRAKRSGSGATNFSLLKQAGDVEENPGPTSMALPVTALLLPLALLLHAARPFEVCMPCFTTDQQMARKCSDCCGGKGRGKCYGPQCLCRGTGGGGSGGGGSGGGGSEFDIQMTQSPSSLSASVGDRVTITCKASDHINNWLAWYQQKPGQAPKLLIYGATTLETGVPSRFSGSGSGTDYTLTISSLQPEDFATYYCQQSWNTPWTFGQGTKLEIKRGGGGSGGGGSGGGGSQVQLQQPGAELVKPGASVKMSCKASGYAFSSYWINWMKQKPGQGLEWIGQIYPGDGDTNYNGKFKGRATLTADTSSSTAYMQLSSLTSEDSAVYFCARSITTVVGCAMDYWGQGTSVTVSSTREDLKNVFPPEVAVFEPSEAEISHTQKATLVCLATGFYPDHVELSWWVNGKEVHSGVSTDPQPLKEQPALNDSRYCLSSRLRVSATFWQNPRNHFRCQVQFYGLSENDEWTQDRAKPVTQIVSAEAWGRADCGFTSESYQQGVLSATNLSVIGFRILLLKVAGFNLLMTLRLWSS

SEQ ID NO: 19208 - protein, 825 aa, synthetic construct
MALPVTALLLPLALLLHAARPLEIQNPDPAVYQLRDSKSSDKSVCLFTDFDSQTNVSQSKDSDVYITDKTVLDMRSMDFKSNSAVAWSNKSDFACANAFNNSIIPEDTFFPSPESSCDVKLVEKSFETDTNLNFQILYEILLGKATLYAVLVSALVLMAMVKRKDSRGRAKRSGSGATNFSLLKQAGDVEENPGPTSMALPVTALLLPLALLLHAARPFESPVAPACDPRLLNKLLRDSHLLHSRLSQCPDVDPLSIPVLLPAVDFSLGEWKTQTEQSKAQDILGAVSLLLEGVMAARGQLEPSCLSSLLGQLSGQVRLLLGALQGLLGTQLPLQGRTTAHKDPNALFLSLQQLLRGKVRFLLLVEGPTLCVRRTLPTTAVPSSTSGTGGGGSGGGGSGGGGSEFDIQMTQSPSSLSASVGDRVTITCKASDHINNWLAWYQQKPGQAPKLLIYGATTLETGVPSRFSGSGSGTDYTLTISSLQPEDFATYYCQQSWNTPWTFGQGTKLEIKRGGGGSGGGGSGGGGSQVQLQQPGAELVKPGASVKMSCKASGYAFSSYWINWMKQKPGQGLEWIGQIYPGDGDTNYNGKFKGRATLTADTSSSTAYMQLSSLTSEDSAVYFCARSITTVVGCAMDYWGQGTSVTVSSTREDLKNVFPPEVAVFEPSEAEISHTQKATLVCLATGFYPDHVELSWWVNGKEVHSGVSTDPQPLKEQPALNDSRYCLSSRLRVSATFWQNPRNHFRCQVQFYGLSENDEWTQDRAKPVTQIVSAEAWGRADCGFTSESYQQGVLSATNLSVIGFRILLLKVAGFNLLMTLRLWSS

SEQ ID NO: 19209 - protein, 732 aa, synthetic construct
MALPVTALLLPLALLLHAARPLEIQNPDPAVYQLRDSKSSDKSVCLFTDFDSQTNVSQSKDSDVYITDKTVLDMRSMDFKSNSAVAWSNKSDFACANAFNNSIIPEDTFFPSPESSCDVKLVEKSFETDTNLNFQILYEILLGKATLYAVLVSALVLMAMVKRKDSRGRAKRSGSGATNFSLLKQAGDVEENPGPTSMALPVTALLLPLALLLHAARPFEMGSWEEFELRLNAIEERLYALGGSEAELAYFEYVIADFEGNLQRYKGKGNPEVEALYFEADAIFEELVAYRHNGTGGGGSGGGGSGGGGSEFDIQMTQSPSSLSASVGDRVTITCKASDHINNWLAWYQQKPGQAPKLLIYGATTLETGVPSRFSGSGSGTDYTLTISSLQPEDFATYYCQQSWNTPWTFGQGTKLEIKRGGGGSGGGGSGGGGSQVQLQQPGAELVKPGASVKMSCKASGYAFSSYWINWMKQKPGQGLEWIGQIYPGDGDTNYNGKFKGRATLTADTSSSTAYMQLSSLTSEDSAVYFCARSITTVVGCAMDYWGQGTSVTVSSTREDLKNVFPPEVAVFEPSEAEISHTQKATLVCLATGFYPDHVELSWWVNGKEVHSGVSTDPQPLKEQPALNDSRYCLSSRLRVSATFWQNPRNHFRCQVQFYGLSENDEWTQDRAKPVTQIVSAEAWGRADCGFTSESYQQGVLSATNLSVIGFRILLLKVAGFNLLMTLRLWSS

SEQ ID NO: 19210 - protein, 869 aa, synthetic construct
MALPVTALLLPLALLLHAARPLEEDLKNVFPPEVAVFEPSEAEISHTQKATLVCLATGFYPDHVELSWWVNGKEVHSGVCTDPQPLKEQPALNDSRYCLSSRLRVSATFWQNPRNHFRCQVQFYGLSENDEWTQDRAKPVTQIVSAEAWGRADCDVKLVEKSFETDTNLNFQNLSVIGFRILLLKVAGFNLLMTLRLWSSRAKRSGSGATNFSLLKQAGDVEENPGPTSMALPVTALLLPLALLLHAARPDIQMTQTTSSLSASLGDRVTISCRASQDISKYLNWYQQKPDGTVKLLIYHTSRLHSGVPSRFSGSGSGTDYSLTISNLEQEDIATYFCQQGNTLPYTFGGGTKLEITGGGGSGGGGSGGGGSEVKLQESGPGLVAPSQSLSVTCTVSGVSLPDYGVSWIRQPPRKGLEWLGVIWGSETTYYNSALKSRLTIIKDNSKSQVFLKMNSLQTDDTAIYYCAKHYYYGGSYAMDYWGQGTSVTVSSTRIQNPDPAVYQLRDSKSSDKSVCLFTDFDSQTNVSQSKDSDVYITDKCVLDMRSMDFKSNSAVAWSNKSDFACANAFNNSIIPEDTFFPSPESSCGFTSESYQQGVLSATILYEILLGKATLYAVLVSALVLMAMVKRKDSRGRAKRSGSGVKQTLNFDLLKLAGDVESNPGPSRGHMTEYKPTVRLATRDDVPRAVRTLAAAFADYPATRHTVDPDRHIERVTELQELFLTRVGLDIGKVWVADDGAAVAVWTTPESVEAGAVFAEIGPRMAELSGSRLAAQQQMEGLLAPHRPKEPAWFLATVGVSPDHQGKGLGSAVVLPGVEAAERAGVPAFLETSAPRNLPFYERLGFTVTADVEVPEGPRTWCMTRKPGA

SEQ ID NO: 19211 - protein, 870 aa, synthetic construct
MALPVTALLLPLALLLHAARPLEEDLKNVFPPEVAVFEPSEAEISHTQKATLVCLATGFYPDHVELSWWVNGKEVHSGVCTDPQPLKEQPALNDSRYCLSSRLRVSATFWQNPRNHFRCQVQFYGLSENDEWTQDRAKPVTQIVSAEAWGRADCDVKLVEKSFETDTNLNFQNLSVIGFRILLLKVAGFNLLMTLRLWSSRAKRSGSGATNFSLLKQAGDVEENPGPTSTMALPVTALLLPLALLLHAARPEIVMTQSPATLSLSPGERATLSCRASQDISKYLNWYQQKPGQAPRLLIYHTSRLHSGIPARFSGSGSGTDYTLTISSLQPEDFAVYFCQQGNTLPYTFGQGTKLEIKGGGGSGGGGSGGGGSQVQLQESGPGLVKPSETLSLTCTVSGVSLPDYGVSWIRQPPGKGLEWIGVIWGSETTYYNSSLKSRVTISKDNSKNQVSLKLSSVTAADTAVYYCAKHYYYGGSYAMDYWGQGTLVTVSSTRIQNPDPAVYQLRDSKSSDKSVCLFTDFDSQTNVSQSKDSDVYITDKCVLDMRSMDFKSNSAVAWSNKSDFACANAFNNSIIPEDTFFPSPESSCGFTSESYQQGVLSATILYEILLGKATLYAVLVSALVLMAMVKRKDSRGRAKRSGSGVKQTLNFDLLKLAGDVESNPGPSRGHMTEYKPTVRLATRDDVPRAVRTLAAAFADYPATRHTVDPDRHIERVTELQELFLTRVGLDIGKVWVADDGAAVAVWTTPESVEAGAVFAEIGPRMAELSGSRLAAQQQMEGLLAPHRPKEPAWFLATVGVSPDHQGKGLGSAVVLPGVEAAERAGVPAFLETSAPRNLPFYERLGFTVTADVEVPEGPRTWCMTRKPGA

SEQ ID NO: 19212 - protein, 871 aa, synthetic construct
MALPVTALLLPLALLLHAARPLEEDLKNVFPPEVAVFEPSEAEISHTQKATLVCLATGFYPDHVELSWWVNGKEVHSGVCTDPQPLKEQPALNDSRYCLSSRLRVSATFWQNPRNHFRCQVQFYGLSENDEWTQDRAKPVTQIVSAEAWGRADCDVKLVEKSFETDTNLNFQNLSVIGFRILLLKVAGFNLLMTLRLWSSRAKRSGSGATNFSLLKQAGDVEENPGPTSTMALPVTALLLPLALLLHAARPDEIVLTQSPATLSLSPGERATLSCSASSSVSYMHWYQQKPGQAPRLLIYDTSKLASGIPARFSGSGSGTDFTLTISSLEPEDVAVYYCFQGSVYPFTFGQGTKLEIKRGGGGSGGGGSGGGGSQVQLQESGPGLVKPSQTLSLTCTVSGGSISTSGMGVGWIRQHPGKGLEWIGHIWWDDDKRYNPALKSRVTISVDTSKNQFSLKLSSVTAADTAVYYCARMELWSYYFDYWGQGTLVTVSSTRIQNPDPAVYQLRDSKSSDKSVCLFTDFDSQTNVSQSKDSDVYITDKCVLDMRSMDFKSNSAVAWSNKSDFACANAFNNSIIPEDTFFPSPESSCGFTSESYQQGVLSATILYEILLGKATLYAVLVSALVLMAMVKRKDSRGRAKRSGSGVKQTLNFDLLKLAGDVESNPGPSRGHMTEYKPTVRLATRDDVPRAVRTLAAAFADYPATRHTVDPDRHIERVTELQELFLTRVGLDIGKVWVADDGAAVAVWTTPESVEAGAVFAEIGPRMAELSGSRLAAQQQMEGLLAPHRPKEPAWFLATVGVSPDHQGKGLGSAVVLPGVEAAERAGVPAFLETSAPRNLPFYERLGFTVTADVEVPEGPRTWCMTRKPGA

SEQ ID NO: 19213 - protein, 867 aa, synthetic construct
MALPVTALLLPLALLLHAARPLEEDLKNVFPPEVAVFEPSEAEISHTQKATLVCLATGFYPDHVELSWWVNGKEVHSGVCTDPQPLKEQPALNDSRYCLSSRLRVSATFWQNPRNHFRCQVQFYGLSENDEWTQDRAKPVTQIVSAEAWGRADCDVKLVEKSFETDTNLNFQNLSVIGFRILLLKVAGFNLLMTLRLWSSRAKRSGSGATNFSLLKQAGDVEENPGPTSMALPVTALLLPLALLLHAARPDIQMTQSPSSLSASVGDRVTITCRASQDISNYLNWYQQKPGKAPKLLIYYTSRLHSGVPSRFSGSGSGTDFTLTISSLQPEDFATYYCQQGNTLPYTFGQGTKVEIKRGGGGSGGGGSGGGGSEVQLVESGGGLVQPGGSLRLSCAASGFTFSDYFMSWVRQAPGKGLEWVATISNGGTYTYYPDSVKGRFTISRDNSKNTLYLQMNSLRAEDTAVYYCARFDGYIFDYWGQGTLVTVSSTRIQNPDPAVYQLRDSKSSDKSVCLFTDFDSQTNVSQSKDSDVYITDKCVLDMRSMDFKSNSAVAWSNKSDFACANAFNNSIIPEDTFFPSPESSCGFTSESYQQGVLSATILYEILLGKATLYAVLVSALVLMAMVKRKDSRGRAKRSGSGVKQTLNFDLLKLAGDVESNPGPSRGHMTEYKPTVRLATRDDVPRAVRTLAAAFADYPATRHTVDPDRHIERVTELQELFLTRVGLDIGKVWVADDGAAVAVWTTPESVEAGAVFAEIGPRMAELSGSRLAAQQQMEGLLAPHRPKEPAWFLATVGVSPDHQGKGLGSAVVLPGVEAAERAGVPAFLETSAPRNLPFYERLGFTVTADVEVPEGPRTWCMTRKPGA

SEQ ID NO: 19214 - protein, 871 aa, synthetic construct
MALPVTALLLPLALLLHAARPLEEDLKNVFPPEVAVFEPSEAEISHTQKATLVCLATGFYPDHVELSWWVNGKEVHSGVCTDPQPLKEQPALNDSRYCLSSRLRVSATFWQNPRNHFRCQVQFYGLSENDEWTQDRAKPVTQIVSAEAWGRADCDVKLVEKSFETDTNLNFQNLSVIGFRILLLKVAGFNLLMTLRLWSSRAKRSGSGATNFSLLKQAGDVEENPGPTSMALPVTALLLPLALLLHAARPDIQMTQSPSSLSASVGDRVTITCKASDHINNWLAWYQQKPGQAPKLLIYGATTLETGVPSRFSGSGSGTDYTLTISSLQPEDFATYYCQQSWNTPWTFGQGTKLEIKRGGGGSGGGGSGGGGSQVQLQQPGAELVKPGASVKMSCKASGYAFSSYWINWMKQKPGQGLEWIGQIYPGDGDTNYNGKFKGRATLTADTSSSTAYMQLSSLTSEDSAVYFCARSITTVVGCAMDYWGQGTSVTVSSTRIQNPDPAVYQLRDSKSSDKSVCLFTDFDSQTNVSQSKDSDVYITDKCVLDMRSMDFKSNSAVAWSNKSDFACANAFNNSIIPEDTFFPSPESSCGFTSESYQQGVLSATILYEILLGKATLYAVLVSALVLMAMVKRKDSRGRAKRSGSGVKQTLNFDLLKLAGDVESNPGPSRGHMTEYKPTVRLATRDDVPRAVRTLAAAFADYPATRHTVDPDRHIERVTELQELFLTRVGLDIGKVWVADDGAAVAVWTTPESVEAGAVFAEIGPRMAELSGSRLAAQQQMEGLLAPHRPKEPAWFLATVGVSPDHQGKGLGSAVVLPGVEAAERAGVPAFLETSAPRNLPFYERLGFTVTADVEVPEGPRTWCMTRKPGA

SEQ ID NO: 19215 - protein, 873 aa, synthetic construct
MALPVTALLLPLALLLHAARPLEEDLKNVFPPEVAVFEPSEAEISHTQKATLVCLATGFYPDHVELSWWVNGKEVHSGVCTDPQPLKEQPALNDSRYCLSSRLRVSATFWQNPRNHFRCQVQFYGLSENDEWTQDRAKPVTQIVSAEAWGRADCDVKLVEKSFETDTNLNFQNLSVIGFRILLLKVAGFNLLMTLRLWSSRAKRSGSGATNFSLLKQAGDVEENPGPTSMALPVTALLLPLALLLHAARPQIVLSQSPAILSASPGEKVTMTCRASSSVSYMHWYQQKPGSSPKPWIYATSNLASGVPARFSGSGSGTSYSFTISRVEAEDAATYYCQQWTFNPPTFGGGTRLEIKRTVAAGGGGSGGGGSGGGGSQAYLQQSGAELVRPGASVKMSCKASGYTFTSYNMHWVKQTPRQGLEWIGGIYPGNGDTSYNQKFKGKATLTVGKSSSTAYMQLSSLTSEDSAVYFCARYDYNYAMDYWGQGTSVTVSSASTRIQNPDPAVYQLRDSKSSDKSVCLFTDFDSQTNVSQSKDSDVYITDKCVLDMRSMDFKSNSAVAWSNKSDFACANAFNNSIIPEDTFFPSPESSCGFTSESYQQGVLSATILYEILLGKATLYAVLVSALVLMAMVKRKDSRGRAKRSGSGVKQTLNFDLLKLAGDVESNPGPSRGHMTEYKPTVRLATRDDVPRAVRTLAAAFADYPATRHTVDPDRHIERVTELQELFLTRVGLDIGKVWVADDGAAVAVWTTPESVEAGAVFAEIGPRMAELSGSRLAAQQQMEGLLAPHRPKEPAWFLATVGVSPDHQGKGLGSAVVLPGVEAAERAGVPAFLETSAPRNLPFYERLGFTVTADVEVPEGPRTWCMTRKPGA

SEQ ID NO: 19216 - protein, 871 aa, synthetic construct
MALPVTALLLPLALLLHAARPLEEDLKNVFPPEVAVFEPSEAEISHTQKATLVCLATGFYPDHVELSWWVNGKEVHSGVCTDPQPLKEQPALNDSRYCLSSRLRVSATFWQNPRNHFRCQVQFYGLSENDEWTQDRAKPVTQIVSAEAWGRADCDVKLVEKSFETDTNLNFQNLSVIGFRILLLKVAGFNLLMTLRLWSSRAKRSGSGATNFSLLKQAGDVEENPGPTSMALPVTALLLPLALLLHAARPEIVLTQSPATLSLSPGERATLSCRASQSVSSYLAWYQQKPGQAPRLLIYDASNRATGIPARFSGSGSGTDFTLTISSLEPEDFAVYYCQQRSNWPITFGQGTRLEIKGGGGSGGGGSGGGGSEVQLVESGGGLVQPDRSLRLSCAASGFTFHDYAMHWVRQAPGKGLEWVSTISWNSGTIGYADSVKGRFTISRDNAKNSLYLQMNSLRAEDTALYYCAKDIQYGNYYYGMDVWGQGTTVTVSSTRIQNPDPAVYQLRDSKSSDKSVCLFTDFDSQTNVSQSKDSDVYITDKCVLDMRSMDFKSNSAVAWSNKSDFACANAFNNSIIPEDTFFPSPESSCGFTSESYQQGVLSATILYEILLGKATLYAVLVSALVLMAMVKRKDSRGRAKRSGSGVKQTLNFDLLKLAGDVESNPGPSRGHMTEYKPTVRLATRDDVPRAVRTLAAAFADYPATRHTVDPDRHIERVTELQELFLTRVGLDIGKVWVADDGAAVAVWTTPESVEAGAVFAEIGPRMAELSGSRLAAQQQMEGLLAPHRPKEPAWFLATVGVSPDHQGKGLGSAVVLPGVEAAERAGVPAFLETSAPRNLPFYERLGFTVTADVEVPEGPRTWCMTRKPGA

SEQ ID NO: 19217 - protein, 869 aa, synthetic construct
MALPVTALLLPLALLLHAARPLEEDLKNVFPPEVAVFEPSEAEISHTQKATLVCLATGFYPDHVELSWWVNGKEVHSGVCTDPQPLKEQPALNDSRYCLSSRLRVSATFWQNPRNHFRCQVQFYGLSENDEWTQDRAKPVTQIVSAEAWGRADCDVKLVEKSFETDTNLNFQNLSVIGFRILLLKVAGFNLLMTLRLWSSRAKRSGSGATNFSLLKQAGDVEENPGPTSMALPVTALLLPLALLLHAARPDIQMTQSPSSLSASVGDRVTITCRASQDVNTAVAWYQQKPGKAPKLLIYSASFLESGVPSRFSGSRSGTDFTLTISSLQPEDFATYYCQQHYTTPPTFGQTKVEIKRGGGGSGGGGSGGGGSEVQLVESGGGLVQPGGSLRLSCAASGFNIKDTYIHWVRQAPGKGLEWVARIYPTNGYTRYADSVKGRFTISADTSKNTAYLQMNSLRAEDTAVYYCSRWGGDGFYAMDVWGQGTLVTVSSTRIQNPDPAVYQLRDSKSSDKSVCLFTDFDSQTNVSQSKDSDVYITDKCVLDMRSMDFKSNSAVAWSNKSDFACANAFNNSIIPEDTFFPSPESSCGFTSESYQQGVLSATILYEILLGKATLYAVLVSALVLMAMVKRKDSRGRAKRSGSGVKQTLNFDLLKLAGDVESNPGPSRGHMTEYKPTVRLATRDDVPRAVRTLAAAFADYPATRHTVDPDRHIERVTELQELFLTRVGLDIGKVWVADDGAAVAVWTTPESVEAGAVFAEIGPRMAELSGSRLAAQQQMEGLLAPHRPKEPAWFLATVGVSPDHQGKGLGSAVVLPGVEAAERAGVPAFLETSAPRNLPFYERLGFTVTADVEVPEGPRTWCMTRKPGA

SEQ ID NO: 19218 - protein, 748 aa, synthetic construct
MALPVTALLLPLALLLHAARPLEEDLKNVFPPEVAVFEPSEAEISHTQKATLVCLATGFYPDHVELSWWVNGKEVHSGVCTDPQPLKEQPALNDSRYCLSSRLRVSATFWQNPRNHFRCQVQFYGLSENDEWTQDRAKPVTQIVSAEAWGRADCDVKLVEKSFETDTNLNFQNLSVIGFRILLLKVAGFNLLMTLRLWSSRAKRSGSGATNFSLLKQAGDVEENPGPTSMALPVTALLLPLALLLHAARPDEFEVQLVESGGGLVQAGGSLRLSCAASGITFSINTMGWYRQAPGKQRELVALISSIGDTYYADSVKGRFTISRDNAKNTVYLQMNSLKPEDTAVYYCKRFRTAAQGTDYWGQGTQVTVSSTRIQNPDPAVYQLRDSKSSDKSVCLFTDFDSQTNVSQSKDSDVYITDKCVLDMRSMDFKSNSAVAWSNKSDFACANAFNNSIIPEDTFFPSPESSCGFTSESYQQGVLSATILYEILLGKATLYAVLVSALVLMAMVKRKDSRGRAKRSGSGVKQTLNFDLLKLAGDVESNPGPSRGHMTEYKPTVRLATRDDVPRAVRTLAAAFADYPATRHTVDPDRHIERVTELQELFLTRVGLDIGKVWVADDGAAVAVWTTPESVEAGAVFAEIGPRMAELSGSRLAAQQQMEGLLAPHRPKEPAWFLATVGVSPDHQGKGLGSAVVLPGVEAAERAGVPAFLETSAPRNLPFYERLGFTVTADVEVPEGPRTWCMTRKPGA

SEQ ID NO: 19219 - protein, 748 aa, synthetic construct; identical to SEQ ID NO: 19218

SEQ ID NO: 19220 - protein, 1013 aa, synthetic construct
MALPVTALLLPLALLLHAARPLEEDLKNVFPPEVAVFEPSEAEISHTQKATLVCLATGFYPDHVELSWWVNGKEVHSGVCTDPQPLKEQPALNDSRYCLSSRLRVSATFWQNPRNHFRCQVQFYGLSENDEWTQDRAKPVTQIVSAEAWGRADCDVKLVEKSFETDTNLNFQNLSVIGFRILLLKVAGFNLLMTLRLWSSRAKRSGSGATNFSLLKQAGDVEENPGPTSMALPVTALLLPLALLLHAARPQVQLVESGGGLVQAGDSVTLSCTASGRTFSSYALAWFRQRPGKEREFVAGLRWGGPTNYADSVKDRFTISGDSAKHTMYLQMNSLKPEDTAVYYCGYNPGGWAVPSQYEYDSWGQGTQVTVSSGTGGGGSGGGGSGGGGSEFDIQMTQSPSSLSASVGDRVTITCKASDHINNWLAWYQQKPGQAPKLLIYGATTLETGVPSRFSGSGSGTDYTLTISSLQPEDFATYYCQQSWNTPWTFGQGTKLEIKRGGGGSGGGGSGGGGSQVQLQQPGAELVKPGASVKMSCKASGYAFSSYWINWMKQKPGQGLEWIGQIYPGDGDTNYNGKFKGRATLTADTSSSTAYMQLSSLTSEDSAVYFCARSITTVVGCAMDYWGQGTSVTVSSTRIQNPDPAVYQLRDSKSSDKSVCLFTDFDSQTNVSQSKDSDVYITDKCVLDMRSMDFKSNSAVAWSNKSDFACANAFNNSIIPEDTFFPSPESSCGFTSESYQQGVLSATILYEILLGKATLYAVLVSALVLMAMVKRKDSRGRAKRSGSGVKQTLNFDLLKLAGDVESNPGPSRGHMTEYKPTVRLATRDDVPRAVRTLAAAFADYPATRHTVDPDRHIERVTELQELFLTRVGLDIGKVWVADDGAAVAVWTTPESVEAGAVFAEIGPRMAELSGSRLAAQQQMEGLLAPHRPKEPAWFLATVGVSPDHQGKGLGSAVVLPGVEAAERAGVPAFLETSAPRNLPFYERLGFTVTADVEVPEGPRTWCMTRKPGA

SEQ ID NO: 19221 - protein, 1142 aa, synthetic construct
MALPVTALLLPLALLLHAARPLEEDLKNVFPPEVAVFEPSEAEISHTQKATLVCLATGFYPDHVELSWWVNGKEVHSGVCTDPQPLKEQPALNDSRYCLSSRLRVSATFWQNPRNHFRCQVQFYGLSENDEWTQDRAKPVTQIVSAEAWGRADCDVKLVEKSFETDTNLNFQNLSVIGFRILLLKVAGFNLLMTLRLWSSRAKRSGSGATNFSLLKQAGDVEENPGPTSMALPVTALLLPLALLLHAARPEVQLLESGGGLVQPGGSLRLSCAASGFTFSSYAMSWVRQAPGKGLEWVSSISGSGDYIYYADSVKGRFTISRDISKNTLYLQMNSLRAEDTAVYYCAKEGTGANSSLADYRGQGTLVTVSSGGGSGGGSQVQLVESGGGLVQAGDSVTLSCTASGRTFSSYALAWFRQRPGKEREFVAGLRWGGPTNYADSVKDRFTISGDSAKHTMYLQMNSLKPEDTAVYYCGYNPGGWAVPSQYEYDSWGQGTQVTVSSGTGGGGSGGGGSGGGGSEFDIQMTQSPSSLSASVGDRVTITCKASDHINNWLAWYQQKPGQAPKLLIYGATTLETGVPSRFSGSGSGTDYTLTISSLQPEDFATYYCQQSWNTPWTFGQGTKLEIKRGGGGSGGGGSGGGGSQVQLQQPGAELVKPGASVKMSCKASGYAFSSYWINWMKQKPGQGLEWIGQIYPGDGDTNYNGKFKGRATLTADTSSSTAYMQLSSLTSEDSAVYFCARSITTVVGCAMDYWGQGTSVTVSSTRIQNPDPAVYQLRDSKSSDKSVCLFTDFDSQTNVSQSKDSDVYITDKCVLDMRSMDFKSNSAVAWSNKSDFACANAFNNSIIPEDTFFPSPESSCGFTSESYQQGVLSATILYEILLGKATLYAVLVSALVLMAMVKRKDSRGRAKRSGSGVKQTLNFDLLKLAGDVESNPGPSRGHMTEYKPTVRLATRDDVPRAVRTLAAAFADYPATRHTVDPDRHIERVTELQELFLTRVGLDIGKVWVADDGAAVAVWTTPESVEAGAVFAEIGPRMAELSGSRLAAQQQMEGLLAPHRPKEPAWFLATVGVSPDHQGKGLGSAVVLPGVEAAERAGVPAFLETSAPRNLPFYERLGFTVTADVEVPEGPRTWCMTRKPGA

SEQ ID NO: 19222 - protein, 1140 aa, synthetic construct
MALPVTALLLPLALLLHAARPLEEDLKNVFPPEVAVFEPSEAEISHTQKATLVCLATGFYPDHVELSWWVNGKEVHSGVCTDPQPLKEQPALNDSRYCLSSRLRVSATFWQNPRNHFRCQVQFYGLSENDEWTQDRAKPVTQIVSAEAWGRADCDVKLVEKSFETDTNLNFQNLSVIGFRILLLKVAGFNLLMTLRLWSSRAKRSGSGATNFSLLKQAGDVEENPGPTSMALPVTALLLPLALLLHAARPGVTQSPTHLIKTRGQQATLRCSPISGHTSVYWYQQALGLGLQFLLWYDEGEERNRGNFPPRFSGRQFPNYSSELNVNALELEDSALYLCASSLGGPRGLAGLRGDEQFFGPGTRLTVLEGGGSGGGSQVQLVESGGGLVQAGDSVTLSCTASGRTFSSYALAWFRQRPGKEREFVAGLRWGGPTNYADSVKDRFTISGDSAKHTMYLQMNSLKPEDTAVYYCGYNPGGWAVPSQYEYDSWGQGTQVTVSSGTGGGGSGGGGSGGGGSEFDIQMTQSPSSLSASVGDRVTITCKASDHINNWLAWYQQKPGQAPKLLIYGATTLETGVPSRFSGSGSGTDYTLTISSLQPEDFATYYCQQSWNTPWTFGQGTKLEIKRGGGGSGGGGSGGGGSQVQLQQPGAELVKPGASVKMSCKASGYAFSSYWINWMKQKPGQGLEWIGQIYPGDGDTNYNGKFKGRATLTADTSSSTAYMQLSSLTSEDSAVYFCARSITTVVGCAMDYWGQGTSVTVSSTRIQNPDPAVYQLRDSKSSDKSVCLFTDFDSQTNVSQSKDSDVYITDKCVLDMRSMDFKSNSAVAWSNKSDFACANAFNNSIIPEDTFFPSPESSCGFTSESYQQGVLSATILYEILLGKATLYAVLVSALVLMAMVKRKDSRGRAKRSGSGVKQTLNFDLLKLAGDVESNPGPSRGHMTEYKPTVRLATRDDVPRAVRTLAAAFADYPATRHTVDPDRHIERVTELQELFLTRVGLDIGKVWVADDGAAVAVWTTPESVEAGAVFAEIGPRMAELSGSRLAAQQQMEGLLAPHRPKEPAWFLATVGVSPDHQGKGLGSAVVLPGVEAAERAGVPAFLETSAPRNLPFYERLGFTVTADVEVPEGPRTWCMTRKPGA

SEQ ID NO: 19223 - protein, 1134 aa, synthetic construct
MALPVTALLLPLALLLHAARPLEEDLKNVFPPEVAVFEPSEAEISHTQKATLVCLATGFYPDHVELSWWVNGKEVHSGVCTDPQPLKEQPALNDSRYCLSSRLRVSATFWQNPRNHFRCQVQFYGLSENDEWTQDRAKPVTQIVSAEAWGRADCDVKLVEKSFETDTNLNFQNLSVIGFRILLLKVAGFNLLMTLRLWSSRAKRSGSGATNFSLLKQAGDVEENPGPTSMALPVTALLLPLALLLHAARPGVTQSPTHLIKTRGQQATLRCSPISGHTSVYWYQQALGLGLQFLLWYDEGEERNRGNFPPRFSGRQFPNYSSELNVNALELEDSALYLCASSLGGPRGLAGLRGDEQFFGPGTRLTVLEGGGSGGGSGVTQSPTHLIKTRGQQATLRCSPISGHTSVYWYQQALGLGLQFLLWYDEGEERNRGNFPPRFSGRQFPNYSSELNVNALELEDSALYLCASSLGGDELGADGNEQFFGPGTRLTVLEGTGGGGSGGGGSGGGGSEFDIQMTQSPSSLSASVGDRVTITCKASDHINNWLAWYQQKPGQAPKLLIYGATTLETGVPSRFSGSGSGTDYTLTISSLQPEDFATYYCQQSWNTPWTFGQGTKLEIKRGGGGSGGGGSGGGGSQVQLQQPGAELVKPGASVKMSCKASGYAFSSYWINWMKQKPGQGLEWIGQIYPGDGDTNYNGKFKGRATLTADTSSSTAYMQLSSLTSEDSAVYFCARSITTVVGCAMDYWGQGTSVTVSSTRIQNPDPAVYQLRDSKSSDKSVCLFTDFDSQTNVSQSKDSDVYITDKCVLDMRSMDFKSNSAVAWSNKSDFACANAFNNSIIPEDTFFPSPESSCGFTSESYQQGVLSATILYEILLGKATLYAVLVSALVLMAMVKRKDSRGRAKRSGSGVKQTLNFDLLKLAGDVESNPGPSRGHMTEYKPTVRLATRDDVPRAVRTLAAAFADYPATRHTVDPDRHIERVTELQELFLTRVGLDIGKVWVADDGAAVAVWTTPESVEAGAVFAEIGPRMAELSGSRLAAQQQMEGLLAPHRPKEPAWFLATVGVSPDHQGKGLGSAVVLPGVEAAERAGVPAFLETSAPRNLPFYERLGFTVTADVEVPEGPRTWCMTRKPGA

SEQ ID NO: 19224 - protein, 754 aa, synthetic construct
MALPVTALLLPLALLLHAARPLEEDLKNVFPPEVAVFEPSEAEISHTQKATLVCLATGFYPDHVELSWWVNGKEVHSGVCTDPQPLKEQPALNDSRYCLSSRLRVSATFWQNPRNHFRCQVQFYGLSENDEWTQDRAKPVTQIVSAEAWGRADCDVKLVEKSFETDTNLNFQNLSVIGFRILLLKVAGFNLLMTLRLWSSRAKRSGSGATNFSLLKQAGDVEENPGPTSMALPVTALLLPLALLLHAARPDEFGSDLGIKLLFAAAKGQDDEVRILLAAGADVNAKDFEGYTPLHVAAYDGHLEIVEVLLKAGADVNAKDSQGRTPLHEAAYSGHLEIVEVLLKAGADVNAQDDAGETPADLAAAWGHEDIAEVLQKTRIQNPDPAVYQLRDSKSSDKSVCLFTDFDSQTNVSQSKDSDVYITDKCVLDMRSMDFKSNSAVAWSNKSDFACANAFNNSIIPEDTFFPSPESSCGFTSESYQQGVLSATILYEILLGKATLYAVLVSALVLMAMVKRKDSRGRAKRSGSGVKQTLNFDLLKLAGDVESNPGPSRGHMTEYKPTVRLATRDDVPRAVRTLAAAFADYPATRHTVDPDRHIERVTELQELFLTRVGLDIGKVWVADDGAAVAVWTTPESVEAGAVFAEIGPRMAELSGSRLAAQQQMEGLLAPHRPKEPAWFLATVGVSPDHQGKGLGSAVVLPGVEAAERAGVPAFLETSAPRNLPFYERLGFTVTADVEVPEGPRTWCMTRKPGA

SEQ ID NO: 19225 - protein, 683 aa, synthetic construct
MALPVTALLLPLALLLHAARPLEEDLKNVFPPEVAVFEPSEAEISHTQKATLVCLATGFYPDHVELSWWVNGKEVHSGVCTDPQPLKEQPALNDSRYCLSSRLRVSATFWQNPRNHFRCQVQFYGLSENDEWTQDRAKPVTQIVSAEAWGRADCDVKLVEKSFETDTNLNFQNLSVIGFRILLLKVAGFNLLMTLRLWSSRAKRSGSGATNFSLLKQAGDVEENPGPTSMDWIWRILFLVGAATGAHSFEGSGFEYAKEMRNAYWEIALLPNLTNQQKRAPIRKLYDDPSQSSELLSEAKKLNDSQTRIQNPDPAVYQLRDSKSSDKSVCLFTDFDSQTNVSQSKDSDVYITDKCVLDMRSMDFKSNSAVAWSNKSDFACANAFNNSIIPEDTFFPSPESSCGFTSESYQQGVLSATILYEILLGKATLYAVLVSALVLMAMVKRKDSRGRAKRSGSGVKQTLNFDLLKLAGDVESNPGPSRGHMTEYKPTVRLATRDDVPRAVRTLAAAFADYPATRHTVDPDRHIERVTELQELFLTRVGLDIGKVWVADDGAAVAVWTTPESVEAGAVFAEIGPRMAELSGSRLAAQQQMEGLLAPHRPKEPAWFLATVGVSPDHQGKGLGSAVVLPGVEAAERAGVPAFLETSAPRNLPFYERLGFTVTADVEVPEGPRTWCMTRKPGA

SEQ ID NO: 19226 - protein, 905 aa, synthetic construct
MALPVTALLLPLALLLHAARPLEEDLKNVFPPEVAVFEPSEAEISHTQKATLVCLATGFYPDHVELSWWVNGKEVHSGVCTDPQPLKEQPALNDSRYCLSSRLRVSATFWQNPRNHFRCQVQFYGLSENDEWTQDRAKPVTQIVSAEAWGRADCDVKLVEKSFETDTNLNFQNLSVIGFRILLLKVAGFNLLMTLRLWSSRAKRSGSGATNFSLLKQAGDVEENPGPTSMALPVTALLLPLALLLHAARPDEFEVQLVESGGGLVQAGGSLRLSCAASGITFSINTMGWYRQAPGKQRELVALISSIGDTYYADSVKGRFTISRDNAKNTVYLQMNSLKPEDTAVYYCKRFRTAAQGTDYWGQGTQVTVSSLEGGGGSGGGGSGGGGSGSGGSGSGGSGSGGSGSGGSFEVQLVESGGGLVQPGGSLRLSCAASGSIFGFNDMAWYRQAPGKQRELVALISRVGVTSSADSVKGRFTISRVNAKDTVYLQMNSLKPEDTAVYYCYMDQRLDGSTLAYWGQGTQVTVSSTRIQNPDPAVYQLRDSKSSDKSVCLFTDFDSQTNVSQSKDSDVYITDKCVLDMRSMDFKSNSAVAWSNKSDFACANAFNNSIIPEDTFFPSPESSCGFTSESYQQGVLSATILYEILLGKATLYAVLVSALVLMAMVKRKDSRGRAKRSGSGVKQTLNFDLLKLAGDVESNPGPSRGHMTEYKPTVRLATRDDVPRAVRTLAAAFADYPATRHTVDPDRHIERVTELQELFLTRVGLDIGKVWVADDGAAVAVWTTPESVEAGAVFAEIGPRMAELSGSRLAAQQQMEGLLAPHRPKEPAWFLATVGVSPDHQGKGLGSAVVLPGVEAAERAGVPAFLETSAPRNLPFYERLGFTVTADVEVPEGPRTWCMTRKPGA

SEQ ID NO: 19227 - protein, 819 aa, synthetic construct
MALPVTALLLPLALLLHAARPLEEDLKNVFPPEVAVFEPSEAEISHTQKATLVCLATGFYPDHVELSWWVNGKEVHSGVCTDPQPLKEQPALNDSRYCLSSRLRVSATFWQNPRNHFRCQVQFYGLSENDEWTQDRAKPVTQIVSAEAWGRADCDVKLVEKSFETDTNLNFQNLSVIGFRILLLKVAGFNLLMTLRLWSSRAKRSGSGATNFSLLKQAGDVEENPGPTSMALPVTALLLPLALLLHAARPGMRTEDLPKAVVFLEPQWYRVLEKDSVTLKCQGAYSPEDNSTQWFHNESLISSQASSYFIDAATVDDSGEYRCQTNLSTLSDPVQLEVHIGWLLLQAPRWVFKEEDPIHLRCHSWKNTALHKVTYLQNGKGRKYFHHNSDFYIPKATLKDSGSYFCRGLVGSKNVSSETVNITITQGLAVSTISSFFPPGYQTRIQNPDPAVYQLRDSKSSDKSVCLFTDFDSQTNVSQSKDSDVYITDKCVLDMRSMDFKSNSAVAWSNKSDFACANAFNNSIIPEDTFFPSPESSCGFTSESYQQGVLSATILYEILLGKATLYAVLVSALVLMAMVKRKDSRGRAKRSGSGVKQTLNFDLLKLAGDVESNPGPSRGHMTEYKPTVRLATRDDVPRAVRTLAAAFADYPATRHTVDPDRHIERVTELQELFLTRVGLDIGKVWVADDGAAVAVWTTPESVEAGAVFAEIGPRMAELSGSRLAAQQQMEGLLAPHRPKEPAWFLATVGVSPDHQGKGLGSAVVLPGVEAAERAGVPAFLETSAPRNLPFYERLGFTVTADVEVPEGPRTWCMTRKPGA

SEQ ID NO: 19228 - protein, 447 aa, synthetic construct
MALPVTALLLPLALLLHAARPLEEDLKNVFPPEVAVFEPSEAEISHTQKATLVCLATGFYPDHVELSWWVNGKEVHSGVCTDPQPLKEQPALNDSRYCLSSRLRVSATFWQNPRNHFRCQVQFYGLSENDEWTQDRAKPVTQIVSAEAWGRADCDVKLVEKSFETDTNLNFQNLSVIGFRILLLKVAGFNLLMTLRLWSSRAKRSGSGATNFSLLKQAGDVEENPGPTSATMALPVTALLLPLALLLHAARPMDPDLEIRAAFLRQRNTALRTEVAELEQEVQRLENEVSQYETRYGPLGGGKTRIQNPDPAVYQLRDSKSSDKSVCLFTDFDSQTNVSQSKDSDVYITDKCVLDMRSMDFKSNSAVAWSNKSDFACANAFNNSIIPEDTFFPSPESSCGFTSESYQQGVLSATILYEILLGKATLYAVLVSALVLMAMVKRKDSRG

SEQ ID NO: 19229 - protein, 447 aa, synthetic construct
MALPVTALLLPLALLLHAARPLEEDLKNVFPPEVAVFEPSEAEISHTQKATLVCLATGFYPDHVELSWWVNGKEVHSGVCTDPQPLKEQPALNDSRYCLSSRLRVSATFWQNPRNHFRCQVQFYGLSENDEWTQDRAKPVTQIVSAEAWGRADCDVKLVEKSFETDTNLNFQNLSVIGFRILLLKVAGFNLLMTLRLWSSRAKRSGSGATNFSLLKQAGDVEENPGPTSATMALPVTALLLPLALLLHAARPMDPDLEIEAAFLERENTALETRVAELRQRVQRLRNRVSQYRTRYGPLGGGKTRIQNPDPAVYQLRDSKSSDKSVCLFTDFDSQTNVSQSKDSDVYITDKCVLDMRSMDFKSNSAVAWSNKSDFACANAFNNSIIPEDTFFPSPESSCGFTSESYQQGVLSATILYEILLGKATLYAVLVSALVLMAMVKRKDSRG

SEQ ID NO: 19230 - protein, 424 aa, synthetic construct
MALPVTALLLPLALLLHAARPLEEDLKNVFPPEVAVFEPSEAEISHTQKATLVCLATGFYPDHVELSWWVNGKEVHSGVCTDPQPLKEQPALNDSRYCLSSRLRVSATFWQNPRNHFRCQVQFYGLSENDEWTQDRAKPVTQIVSAEAWGRADCDVKLVEKSFETDTNLNFQNLSVIGFRILLLKVAGFNLLMTLRLWSSRAKRSGSGATNFSLLKQAGDVEENPGPTSATMALPVTALLLPLALLLHAARPEVAALEKEVAALEKEVAALEKEVAALEKTRIQNPDPAVYQLRDSKSSDKSVCLFTDFDSQTNVSQSKDSDVYITDKCVLDMRSMDFKSNSAVAWSNKSDFACANAFNNSIIPEDTFFPSPESSCGFTSESYQQGVLSATILYEILLGKATLYAVLVSALVLMAMVKRKDSRG

SEQ ID NO: 19231 - protein, 682 aa, synthetic construct
MALPVTALLLPLALLLHAARPLEEDLKNVFPPEVAVFEPSEAEISHTQKATLVCLATGFYPDHVELSWWVNGKEVHSGVCTDPQPLKEQPALNDSRYCLSSRLRVSATFWQNPRNHFRCQVQFYGLSENDEWTQDRAKPVTQIVSAEAWGRADCDVKLVEKSFETDTNLNFQNLSVIGFRILLLKVAGFNLLMTLRLWSSRAKRSGSGATNFSLLKQAGDVEENPGPTSATMALPVTALLLPLALLLHAARPLFNQEVQIPLTESYCGPCPKNWICYKNNCYQFFDESKNWYESQASCMSQNASLLKVYSKEDQDLLKLVKSAHWMGLVHIPTNGSWQWEDGSILSPNLLTIIEMQKGDCALYASSFKGYIENCSTPNTYICMQRTVSGGGGSGGGGSGGGGDLFNQEVQIPLTESYCGPCPKNWICYKNNCYQFFDESKNWYESQASCMSQNASLLKVYSKEDQDLLKLVKSAHWMGLVHIPTNGSWQWEDGSILSPNLLTIIEMQKGDCALYASSFKGYIENCSTPNTYICMQRTVTRIQNPDPAVYQLRDSKSSDKSVCLFTDFDSQTNVSQSKDSDVYITDKCVLDMRSMDFKSNSAVAWSNKSDFACANAFNNSIIPEDTFFPSPESSCGFTSESYQQGVLSATILYEILLGKATLYAVLVSALVLMAMVKRKDSRG

SEQ ID NO: 19232 - protein, 682 aa, synthetic construct
MALPVTALLLPLALLLHAARPLEEDLKNVFPPEVAVFEPSEAEISHTQKATLVCLATGFYPDHVELSWWVNGKEVHSGVCTDPQPLKEQPALNDSRYCLSSRLRVSATFWQNPRNHFRCQVQFYGLSENDEWTQDRAKPVTQIVSAEAWGRADCDVKLVEKSFETDTNLNFQNLSVIGFRILLLKVAGFNLLMTLRLWSSRAKRSGSGATNFSLLKQAGDVEENPGPTSATMALPVTALLLPLALLLHAARPLFNQEVQIPLTESYCGPCPKNWICYKNNCYQFFDESKNWYESQASCMSQNASLLKVYSKEDQDLLKLVKSAHWMGLVHIPTNGSWQWEDGSILSPNLLTIIEMQKGDCALYASSFKGFIENCSTPNTYICMQRTVGGGGSGGGGSGGGGSDLFNQEVQIPLTESYCGPCPKNWICYKNNCYQFFDESKNWYESQASCMSQNASLLKVYSKEDQDLLKLVKSAHWMGLVHIPTNGSWQWEDGSILSPNLLTIIEMQKGDCALYASSFKGFIENCSTPNTYICMQRTVTRIQNPDPAVYQLRDSKSSDKSVCLFTDFDSQTNVSQSKDSDVYITDKCVLDMRSMDFKSNSAVAWSNKSDFACANAFNNSIIPEDTFFPSPESSCGFTSESYQQGVLSATILYEILLGKATLYAVLVSALVLMAMVKRKDSRG

SEQ ID NO: 19233 - protein, 708 aa, synthetic construct
MALPVTALLLPLALLLHAARPLEEDLKNVFPPEVAVFEPSEAEISHTQKATLVCLATGFYPDHVELSWWVNGKEVHSGVCTDPQPLKEQPALNDSRYCLSSRLRVSATFWQNPRNHFRCQVQFYGLSENDEWTQDRAKPVTQIVSAEAWGRADCDVKLVEKSFETDTNLNFQNLSVIGFRILLLKVAGFNLLMTLRLWSSRAKRSGSGATNFSLLKQAGDVEENPGPTSMALPVTALLLPLALLLHAARPMDPDLEIRAAFLRQRNTALRTEVAELEQEVQRLENEVSQYETRYGPLGGGKGTGGGGSGGGGSGGGGSEFDIQMTQSPSSLSASVGDRVTITCKASDHINNWLAWYQQKPGQAPKLLIYGATTLETGVPSRFSGSGSGTDYTLTISSLQPEDFATYYCQQSWNTPWTFGQGTKLEIKRGGGGSGGGGSGGGGSQVQLQQPGAELVKPGASVKMSCKASGYAFSSYWINWMKQKPGQGLEWIGQIYPGDGDTNYNGKFKGRATLTADTSSSTAYMQLSSLTSEDSAVYFCARSITTVVGCAMDYWGQGTSVTVSSTRIQNPDPAVYQLRDSKSSDKSVCLFTDFDSQTNVSQSKDSDVYITDKCVLDMRSMDFKSNSAVAWSNKSDFACANAFNNSIIPEDTFFPSPESSCGFTSESYQQGVLSATILYEILLGKATLYAVLVSALVLMAMVKRKDSRG

SEQ ID NO: 19234 - protein, 943 aa, synthetic construct
MALPVTALLLPLALLLHAARPLEEDLKNVFPPEVAVFEPSEAEISHTQKATLVCLATGFYPDHVELSWWVNGKEVHSGVCTDPQPLKEQPALNDSRYCLSSRLRVSATFWQNPRNHFRCQVQFYGLSENDEWTQDRAKPVTQIVSAEAWGRADCDVKLVEKSFETDTNLNFQNLSVIGFRILLLKVAGFNLLMTLRLWSSRAKRSGSGATNFSLLKQAGDVEENPGPTSMALPVTALLLPLALLLHAARPLFNQEVQIPLTESYCGPCPKNWICYKNNCYQFFDESKNWYESQASCMSQNASLLKVYSKEDQDLLKLVKSAHWMGLVHIPTNGSWQWEDGSILSPNLLTIIEMQKGDCALYASSFKGFIENCSTPNTYICMQRTVGGGGSGGGGSGGGGSDLFNQEVQIPLTESYCGPCPKNWICYKNNCYQFFDESKNWYESQASCMSQNASLLKVYSKEDQDLLKLVKSAHWMGLVHIPTNGSWQWEDGSILSPNLLTIIEMQKGDCALYASSFKGFIENCSTPNTYICMQRTVGTGGGGSGGGGSGGGGSEFDIQMTQSPSSLSASVGDRVTITCKASDHINNWLAWYQQKPGQAPKLLIYGATTLETGVPSRFSGSGSGTDYTLTISSLQPEDFATYYCQQSWNTPWTFGQGTKLEIKRGGGGSGGGGSGGGGSQVQLQQPGAELVKPGASVKMSCKASGYAFSSYWINWMKQKPGQGLEWIGQIYPGDGDTNYNGKFKGRATLTADTSSSTAYMQLSSLTSEDSAVYFCARSITTVVGCAMDYWGQGTSVTVSSTRIQNPDPAVYQLRDSKSSDKSVCLFTDFDSQTNVSQSKDSDVYITDKCVLDMRSMDFKSNSAVAWSNKSDFACANAFNNSIIPEDTFFPSPESSCGFTSESYQQGVLSATILYEILLGKATLYAVLVSALVLMAMVKRKDSRG

SEQ ID NO: 19235 - protein, 648 aa, synthetic construct
MALPVTALLLPLALLLHAARPLEEDLKNVFPPEVAVFEPSEAEISHTQKATLVCLATGFYPDHVELSWWVNGKEVHSGVCTDPQPLKEQPALNDSRYCLSSRLRVSATFWQNPRNHFRCQVQFYGLSENDEWTQDRAKPVTQIVSAEAWGRADCDVKLVEKSFETDTNLNFQNLSVIGFRILLLKVAGFNLLMTLRLWSSRAKRSGSGATNFSLLKQAGDVEENPGPTSMALPVTALLLPLALLLHAARPQSVLTQPPSVSGAPGQRVTISCTGSSSNIGAGYDVHWYQQLPGTAPKLLIFGNSNRPSGVPDRFSGFKSGTSASLAITGLQAEDEADYFCQSYDSSLSGSGVFGTGTKVTVLGGGGGSGGGGSGGGGSQMQLVQSGGGLVQPGRSLRLSCAASGFTFDDYAMHWVRQAPGKGLEWVSGISWNSGSIGYADSVKGRFTISRDNAKNSLYLQMNSLRAEDTALYYCAKDIHSGSYYGLLYYAMDVWGQGTTVTVSSTRIQNPDPAVYQLRDSKSSDKSVCLFTDFDSQTNVSQSKDSDVYITDKCVLDMRSMDFKSNSAVAWSNKSDFACANAFNNSIIPEDTFFPSPESSCGFTSESYQQGVLSATILYEILLGKATLYAVLVSALVLMAMVKRKDSRG

SEQ ID NO: 19236 - protein, 485 aa, synthetic construct
MALPVTALLLPLALLLHAARPLEEDLKNVFPPEVAVFEPSEAEISHTQKATLVCLATGFYPDHVELSWWVNGKEVHSGVCTDPQPLKEQPALNDSRYCLSSRLRVSATFWQNPRNHFRCQVQFYGLSENDEWTQDRAKPVTQIVSAEAWGRADCDVKLVEKSFETDTNLNFQNLSVIGFRILLLKVAGFNLLMTLRLWSSRAKRSGSGATNFSLLKQAGDVEENPGPTSMALPVTALLLPLALLLHAARPMCMPCFTTDHQMARKCDDCCGGKGRGKCYGPQCLCRLEGGGGSGGGGSGGGGSFEVCMPCFTTDQQMARKCSDCCGGKGRGKCYGPQCLCRTRIQNPDPAVYQLRDSKSSDKSVCLFTDFDSQTNVSQSKDSDVYITDKCVLDMRSMDFKSNSAVAWSNKSDFACANAFNNSIIPEDTFFPSPESSCGFTSESYQQGVLSATILYEILLGKATLYAVLVSALVLMAMVKRKDSRG

SEQ ID NO: 19237 - protein, 748 aa, synthetic construct
MALPVTALLLPLALLLHAARPLEEDLKNVFPPEVAVFEPSEAEISHTQKATLVCLATGFYPDHVELSWWVNGKEVHSGVCTDPQPLKEQPALNDSRYCLSSRLRVSATFWQNPRNHFRCQVQFYGLSENDEWTQDRAKPVTQIVSAEAWGRADCDVKLVEKSFETDTNLNFQNLSVIGFRILLLKVAGFNLLMTLRLWSSRAKRSGSGATNFSLLKQAGDVEENPGPTSMALPVTALLLPLALLLHAARPMCMPCFTTDHQMARKCDDCCGGKGRGKCYGPQCLCRLEGGGGSGGGGSGGGGSFEVCMPCFTTDQQMARKCSDCCGGKGRGKCYGPQCLCRGTGGGGSGGGGSGGGGSEFDIQMTQSPSSLSASVGDRVTITCKASDHINNWLAWYQQKPGQAPKLLIYGATTLETGVPSRFSGSGSGTDYTLTISSLQPEDFATYYCQQSWNTPWTFGQGTKLEIKRGGGGSGGGGSGGGGSQVQLQQPGAELVKPGASVKMSCKASGYAFSSYWINWMKQKPGQGLEWIGQIYPGDGDTNYNGKFKGRATLTADTSSSTAYMQLSSLTSEDSAVYFCARSITTVVGCAMDYWGQGTSVTVSSTRIQNPDPAVYQLRDSKSSDKSVCLFTDFDSQTNVSQSKDSDVYITDKCVLDMRSMDFKSNSAVAWSNKSDFACANAFNNSIIPEDTFFPSPESSCGFTSESYQQGVLSATILYEILLGKATLYAVLVSALVLMAMVKRKDSRG

SEQ ID NO: 19238 - protein, 823 aa, synthetic construct
MALPVTALLLPLALLLHAARPLEEDLKNVFPPEVAVFEPSEAEISHTQKATLVCLATGFYPDHVELSWWVNGKEVHSGVCTDPQPLKEQPALNDSRYCLSSRLRVSATFWQNPRNHFRCQVQFYGLSENDEWTQDRAKPVTQIVSAEAWGRADCDVKLVEKSFETDTNLNFQNLSVIGFRILLLKVAGFNLLMTLRLWSSRAKRSGSGATNFSLLKQAGDVEENPGPTSMALPVTALLLPLALLLHAARPSPVAPACDPRLLNKLLRDSHLLHSRLSQCPDVDPLSIPVLLPAVDFSLGEWKTQTEQSKAQDILGAVSLLLEGVMAARGQLEPSCLSSLLGQLSGQVRLLLGALQGLLGTQLPLQGRTTAHKDPNALFLSLQQLLRGKVRFLLLVEGPTLCVRRTLPTTAVPSSTSGTGGGGSGGGGSGGGGSEFDIQMTQSPSSLSASVGDRVTITCKASDHINNWLAWYQQKPGQAPKLLIYGATTLETGVPSRFSGSGSGTDYTLTISSLQPEDFATYYCQQSWNTPWTFGQGTKLEIKRGGGGSGGGGSGGGGSQVQLQQPGAELVKPGASVKMSCKASGYAFSSYWINWMKQKPGQGLEWIGQIYPGDGDTNYNGKFKGRATLTADTSSSTAYMQLSSLTSEDSAVYFCARSITTVVGCAMDYWGQGTSVTVSSTRIQNPDPAVYQLRDSKSSDKSVCLFTDFDSQTNVSQSKDSDVYITDKCVLDMRSMDFKSNSAVAWSNKSDFACANAFNNSIIPEDTFFPSPESSCGFTSESYQQGVLSATILYEILLGKATLYAVLVSALVLMAMVKRKDSRG

SEQ ID NO: 19239 - protein, 730 aa, synthetic construct
MALPVTALLLPLALLLHAARPLEEDLKNVFPPEVAVFEPSEAEISHTQKATLVCLATGFYPDHVELSWWVNGKEVHSGVCTDPQPLKEQPALNDSRYCLSSRLRVSATFWQNPRNHFRCQVQFYGLSENDEWTQDRAKPVTQIVSAEAWGRADCDVKLVEKSFETDTNLNFQNLSVIGFRILLLKVAGFNLLMTLRLWSSRAKRSGSGATNFSLLKQAGDVEENPGPTSMALPVTALLLPLALLLHAARPMGSWEEFELRLNAIEERLYALGGSEAELAYFEYVIADFEGNLQRYKGKGNPEVEALYFEADAIFEELVAYRHNGTGGGGSGGGGSGGGGSEFDIQMTQSPSSLSASVGDRVTITCKASDHINNWLAWYQQKPGQAPKLLIYGATTLETGVPSRFSGSGSGTDYTLTISSLQPEDFATYYCQQSWNTPWTFGQGTKLEIKRGGGGSGGGGSGGGGSQVQLQQPGAELVKPGASVKMSCKASGYAFSSYWINWMKQKPGQGLEWIGQIYPGDGDTNYNGKFKGRATLTADTSSSTAYMQLSSLTSEDSAVYFCARSITTVVGCAMDYWGQGTSVTVSSTRIQNPDPAVYQLRDSKSSDKSVCLFTDFDSQTNVSQSKDSDVYITDKCVLDMRSMDFKSNSAVAWSNKSDFACANAFNNSIIPEDTFFPSPESSCGFTSESYQQGVLSATILYEILLGKATLYAVLVSALVLMAMVKRKDSRG

SEQ ID NO: 19240 - protein, 869 aa, synthetic construct
MALPVTALLLPLALLLHAARPLEIQNPDPAVYQLRDSKSSDKSVCLFTDFDSQTNVSQSKDSDVYITDKCVLDMRSMDFKSNSAVAWSNKSDFACANAFNNSIIPEDTFFPSPESSCGFTSESYQQGVLSATILYEILLGKATLYAVLVSALVLMAMVKRKDSRGRAKRSGSGATNFSLLKQAGDVEENPGPTSMALPVTALLLPLALLLHAARPDIQMTQTTSSLSASLGDRVTISCRASQDISKYLNWYQQKPDGTVKLLIYHTSRLHSGVPSRFSGSGSGTDYSLTISNLEQEDIATYFCQQGNTLPYTFGGGTKLEITGGGGSGGGGSGGGGSEVKLQESGPGLVAPSQSLSVTCTVSGVSLPDYGVSWIRQPPRKGLEWLGVIWGSETTYYNSALKSRLTIIKDNSKSQVFLKMNSLQTDDTAIYYCAKHYYYGGSYAMDYWGQGTSVTVSSTREDLKNVFPPEVAVFEPSEAEISHTQKATLVCLATGFYPDHVELSWWVNGKEVHSGVCTDPQPLKEQPALNDSRYCLSSRLRVSATFWQNPRNHFRCQVQFYGLSENDEWTQDRAKPVTQIVSAEAWGRADCDVKLVEKSFETDTNLNFQNLSVIGFRILLLKVAGFNLLMTLRLWSSRAKRSGSGVKQTLNFDLLKLAGDVESNPGPSRGHMTEYKPTVRLATRDDVPRAVRTLAAAFADYPATRHTVDPDRHIERVTELQELFLTRVGLDIGKVWVADDGAAVAVWTTPESVEAGAVFAEIGPRMAELSGSRLAAQQQMEGLLAPHRPKEPAWFLATVGVSPDHQGKGLGSAVVLPGVEAAERAGVPAFLETSAPRNLPFYERLGFTVTADVEVPEGPRTWCMTRKPGA

SEQ ID NO: 19241 - protein, 870 aa, synthetic construct
MALPVTALLLPLALLLHAARPLEIQNPDPAVYQLRDSKSSDKSVCLFTDFDSQTNVSQSKDSDVYITDKCVLDMRSMDFKSNSAVAWSNKSDFACANAFNNSIIPEDTFFPSPESSCGFTSESYQQGVLSATILYEILLGKATLYAVLVSALVLMAMVKRKDSRGRAKRSGSGATNFSLLKQAGDVEENPGPTSTMALPVTALLLPLALLLHAARPEIVMTQSPATLSLSPGERATLSCRASQDISKYLNWYQQKPGQAPRLLIYHTSRLHSGIPARFSGSGSGTDYTLTISSLQPEDFAVYFCQQGNTLPYTFGQGTKLEIKGGGGSGGGGSGGGGSQVQLQESGPGLVKPSETLSLTCTVSGVSLPDYGVSWIRQPPGKGLEWIGVIWGSETTYYNSSLKSRVTISKDNSKNQVSLKLSSVTAADTAVYYCAKHYYYGGSYAMDYWGQGTLVTVSSTREDLKNVFPPEVAVFEPSEAEISHTQKATLVCLATGFYPDHVELSWWVNGKEVHSGVCTDPQPLKEQPALNDSRYCLSSRLRVSATFWQNPRNHFRCQVQFYGLSENDEWTQDRAKPVTQIVSAEAWGRADCDVKLVEKSFETDTNLNFQNLSVIGFRILLLKVAGFNLLMTLRLWSSRAKRSGSGVKQTLNFDLLKLAGDVESNPGPSRGHMTEYKPTVRLATRDDVPRAVRTLAAAFADYPATRHTVDPDRHIERVTELQELFLTRVGLDIGKVWVADDGAAVAVWTTPESVEAGAVFAEIGPRMAELSGSRLAAQQQMEGLLAPHRPKEPAWFLATVGVSPDHQGKGLGSAVVLPGVEAAERAGVPAFLETSAPRNLPFYERLGFTVTADVEVPEGPRTWCMTRKPGA

SEQ ID NO: 19242 - protein, 871 aa, synthetic construct
MALPVTALLLPLALLLHAARPLEIQNPDPAVYQLRDSKSSDKSVCLFTDFDSQTNVSQSKDSDVYITDKCVLDMRSMDFKSNSAVAWSNKSDFACANAFNNSIIPEDTFFPSPESSCGFTSESYQQGVLSATILYEILLGKATLYAVLVSALVLMAMVKRKDSRGRAKRSGSGATNFSLLKQAGDVEENPGPTSTMALPVTALLLPLALLLHAARPDEIVLTQSPATLSLSPGERATLSCSASSSVSYMHWYQQKPGQAPRLLIYDTSKLASGIPARFSGSGSGTDFTLTISSLEPEDVAVYYCFQGSVYPFTFGQGTKLEIKRGGGGSGGGGSGGGGSQVQLQESGPGLVKPSQTLSLTCTVSGGSISTSGMGVGWIRQHPGKGLEWIGHIWWDDDKRYNPALKSRVTISVDTSKNQFSLKLSSVTAADTAVYYCARMELWSYYFDYWGQGTLVTVSSTREDLKNVFPPEVAVFEPSEAEISHTQKATLVCLATGFYPDHVELSWWVNGKEVHSGVCTDPQPLKEQPALNDSRYCLSSRLRVSATFWQNPRNHFRCQVQFYGLSENDEWTQDRAKPVTQIVSAEAWGRADCDVKLVEKSFETDTNLNFQNLSVIGFRILLLKVAGFNLLMTLRLWSSRAKRSGSGVKQTLNFDLLKLAGDVESNPGPSRGHMTEYKPTVRLATRDDVPRAVRTLAAAFADYPATRHTVDPDRHIERVTELQELFLTRVGLDIGKVWVADDGAAVAVWTTPESVEAGAVFAEIGPRMAELSGSRLAAQQQMEGLLAPHRPKEPAWFLATVGVSPDHQGKGLGSAVVLPGVEAAERAGVPAFLETSAPRNLPFYERLGFTVTADVEVPEGPRTWCMTRKPGA

SEQ ID NO: 19243 - protein, 867 aa, synthetic construct
MALPVTALLLPLALLLHAARPLEIQNPDPAVYQLRDSKSSDKSVCLFTDFDSQTNVSQSKDSDVYITDKCVLDMRSMDFKSNSAVAWSNKSDFACANAFNNSIIPEDTFFPSPESSCGFTSESYQQGVLSATILYEILLGKATLYAVLVSALVLMAMVKRKDSRGRAKRSGSGATNFSLLKQAGDVEENPGPTSMALPVTALLLPLALLLHAARPDIQMTQSPSSLSASVGDRVTITCRASQDISNYLNWYQQKPGKAPKLLIYYTSRLHSGVPSRFSGSGSGTDFTLTISSLQPEDFATYYCQQGNTLPYTFGQGTKVEIKRGGGGSGGGGSGGGGSEVQLVESGGGLVQPGGSLRLSCAASGFTFSDYFMSWVRQAPGKGLEWVATISNGGTYTYYPDSVKGRFTISRDNSKNTLYLQMNSLRAEDTAVYYCARFDGYIFDYWGQGTLVTVSSTREDLKNVFPPEVAVFEPSEAEISHTQKATLVCLATGFYPDHVELSWWVNGKEVHSGVCTDPQPLKEQPALNDSRYCLSSRLRVSATFWQNPRNHFRCQVQFYGLSENDEWTQDRAKPVTQIVSAEAWGRADCDVKLVEKSFETDTNLNFQNLSVIGFRILLLKVAGFNLLMTLRLWSSRAKRSGSGVKQTLNFDLLKLAGDVESNPGPSRGHMTEYKPTVRLATRDDVPRAVRTLAAAFADYPATRHTVDPDRHIERVTELQELFLTRVGLDIGKVWVADDGAAVAVWTTPESVEAGAVFAEIGPRMAELSGSRLAAQQQMEGLLAPHRPKEPAWFLATVGVSPDHQGKGLGSAVVLPGVEAAERAGVPAFLETSAPRNLPFYERLGFTVTADVEVPEGPRTWCMTRKPGA

SEQ ID NO: 19244 - protein, 871 aa, synthetic construct
MALPVTALLLPLALLLHAARPLEIQNPDPAVYQLRDSKSSDKSVCLFTDFDSQTNVSQSKDSDVYITDKCVLDMRSMDFKSNSAVAWSNKSDFACANAFNNSIIPEDTFFPSPESSCGFTSESYQQGVLSATILYEILLGKATLYAVLVSALVLMAMVKRKDSRGRAKRSGSGATNFSLLKQAGDVEENPGPTSMALPVTALLLPLALLLHAARPDIQMTQSPSSLSASVGDRVTITCKASDHINNWLAWYQQKPGQAPKLLIYGATTLETGVPSRFSGSGSGTDYTLTISSLQPEDFATYYCQQSWNTPWTFGQGTKLEIKRGGGGSGGGGSGGGGSQVQLQQPGAELVKPGASVKMSCKASGYAFSSYWINWMKQKPGQGLEWIGQIYPGDGDTNYNGKFKGRATLTADTSSSTAYMQLSSLTSEDSAVYFCARSITTVVGCAMDYWGQGTSVTVSSTREDLKNVFPPEVAVFEPSEAEISHTQKATLVCLATGFYPDHVELSWWVNGKEVHSGVCTDPQPLKEQPALNDSRYCLSSRLRVSATFWQNPRNHFRCQVQFYGLSENDEWTQDRAKPVTQIVSAEAWGRADCDVKLVEKSFETDTNLNFQNLSVIGFRILLLKVAGFNLLMTLRLWSSRAKRSGSGVKQTLNFDLLKLAGDVESNPGPSRGHMTEYKPTVRLATRDDVPRAVRTLAAAFADYPATRHTVDPDRHIERVTELQELFLTRVGLDIGKVWVADDGAAVAVWTTPESVEAGAVFAEIGPRMAELSGSRLAAQQQMEGLLAPHRPKEPAWFLATVGVSPDHQGKGLGSAVVLPGVEAAERAGVPAFLETSAPRNLPFYERLGFTVTADVEVPEGPRTWCMTRKPGA

SEQ ID NO: 19245 - protein, 873 aa, synthetic construct
MALPVTALLLPLALLLHAARPLEIQNPDPAVYQLRDSKSSDKSVCLFTDFDSQTNVSQSKDSDVYITDKCVLDMRSMDFKSNSAVAWSNKSDFACANAFNNSIIPEDTFFPSPESSCGFTSESYQQGVLSATILYEILLGKATLYAVLVSALVLMAMVKRKDSRGRAKRSGSGATNFSLLKQAGDVEENPGPTSMALPVTALLLPLALLLHAARPQIVLSQSPAILSASPGEKVTMTCRASSSVSYMHWYQQKPGSSPKPWIYATSNLASGVPARFSGSGSGTSYSFTISRVEAEDAATYYCQQWTFNPPTFGGGTRLEIKRTVAAGGGGSGGGGSGGGGSQAYLQQSGAELVRPGASVKMSCKASGYTFTSYNMHWVKQTPRQGLEWIGGIYPGNGDTSYNQKFKGKATLTVGKSSSTAYMQLSSLTSEDSAVYFCARYDYNYAMDYWGQGTSVTVSSASTREDLKNVFPPEVAVFEPSEAEISHTQKATLVCLATGFYPDHVELSWWVNGKEVHSGVCTDPQPLKEQPALNDSRYCLSSRLRVSATFWQNPRNHFRCQVQFYGLSENDEWTQDRAKPVTQIVSAEAWGRADCDVKLVEKSFETDTNLNFQNLSVIGFRILLLKVAGFNLLMTLRLWSSRAKRSGSGVKQTLNFDLLKLAGDVESNPGPSRGHMTEYKPTVRLATRDDVPRAVRTLAAAFADYPATRHTVDPDRHIERVTELQELFLTRVGLDIGKVWVADDGAAVAVWTTPESVEAGAVFAEIGPRMAELSGSRLAAQQQMEGLLAPHRPKEPAWFLATVGVSPDHQGKGLGSAVVLPGVEAAERAGVPAFLETSAPRNLPFYERLGFTVTADVEVPEGPRTWCMTRKPGA

SEQ ID NO: 19246 - protein, 871 aa, synthetic construct
MALPVTALLLPLALLLHAARPLEIQNPDPAVYQLRDSKSSDKSVCLFTDFDSQTNVSQSKDSDVYITDKCVLDMRSMDFKSNSAVAWSNKSDFACANAFNNSIIPEDTFFPSPESSCGFTSESYQQGVLSATILYEILLGKATLYAVLVSALVLMAMVKRKDSRGRAKRSGSGATNFSLLKQAGDVEENPGPTSMALPVTALLLPLALLLHAARPEIVLTQSPATLSLSPGERATLSCRASQSVSSYLAWYQQKPGQAPRLLIYDASNRATGIPARFSGSGSGTDFTLTISSLEPEDFAVYYCQQRSNWPITFGQGTRLEIKGGGGSGGGGSGGGGSEVQLVESGGGLVQPDRSLRLSCAASGFTFHDYAMHWVRQAPGKGLEWVSTISWNSGTIGYADSVKGRFTISRDNAKNSLYLQMNSLRAEDTALYYCAKDIQYGNYYYGMDVWGQGTTVTVSSTREDLKNVFPPEVAVFEPSEAEISHTQKATLVCLATGFYPDHVELSWWVNGKEVHSGVCTDPQPLKEQPALNDSRYCLSSRLRVSATFWQNPRNHFRCQVQFYGLSENDEWTQDRAKPVTQIVSAEAWGRADCDVKLVEKSFETDTNLNFQNLSVIGFRILLLKVAGFNLLMTLRLWSSRAKRSGSGVKQTLNFDLLKLAGDVESNPGPSRGHMTEYKPTVRLATRDDVPRAVRTLAAAFADYPATRHTVDPDRHIERVTELQELFLTRVGLDIGKVWVADDGAAVAVWTTPESVEAGAVFAEIGPRMAELSGSRLAAQQQMEGLLAPHRPKEPAWFLATVGVSPDHQGKGLGSAVVLPGVEAAERAGVPAFLETSAPRNLPFYERLGFTVTADVEVPEGPRTWCMTRKPGA

SEQ ID NO: 19247 - protein, 869 aa, synthetic construct
MALPVTALLLPLALLLHAARPLEIQNPDPAVYQLRDSKSSDKSVCLFTDFDSQTNVSQSKDSDVYITDKCVLDMRSMDFKSNSAVAWSNKSDFACANAFNNSIIPEDTFFPSPESSCGFTSESYQQGVLSATILYEILLGKATLYAVLVSALVLMAMVKRKDSRGRAKRSGSGATNFSLLKQAGDVEENPGPTSMALPVTALLLPLALLLHAARPDIQMTQSPSSLSASVGDRVTITCRASQDVNTAVAWYQQKPGKAPKLLIYSASFLESGVPSRFSGSRSGTDFTLTISSLQPEDFATYYCQQHYTTPPTFGQTKVEIKRGGGGSGGGGSGGGGSEVQLVESGGGLVQPGGSLRLSCAASGFNIKDTYIHWVRQAPGKGLEWVARIYPTNGYTRYADSVKGRFTISADTSKNTAYLQMNSLRAEDTAVYYCSRWGGDGFYAMDVWGQGTLVTVSSTREDLKNVFPPEVAVFEPSEAEISHTQKATLVCLATGFYPDHVELSWWVNGKEVHSGVCTDPQPLKEQPALNDSRYCLSSRLRVSATFWQNPRNHFRCQVQFYGLSENDEWTQDRAKPVTQIVSAEAWGRADCDVKLVEKSFETDTNLNFQNLSVIGFRILLLKVAGFNLLMTLRLWSSRAKRSGSGVKQTLNFDLLKLAGDVESNPGPSRGHMTEYKPTVRLATRDDVPRAVRTLAAAFADYPATRHTVDPDRHIERVTELQELFLTRVGLDIGKVWVADDGAAVAVWTTPESVEAGAVFAEIGPRMAELSGSRLAAQQQMEGLLAPHRPKEPAWFLATVGVSPDHQGKGLGSAVVLPGVEAAERAGVPAFLETSAPRNLPFYERLGFTVTADVEVPEGPRTWCMTRKPGA

SEQ ID NO: 19248 - protein, 748 aa, synthetic construct
MALPVTALLLPLALLLHAARPLEIQNPDPAVYQLRDSKSSDKSVCLFTDFDSQTNVSQSKDSDVYITDKCVLDMRSMDFKSNSAVAWSNKSDFACANAFNNSIIPEDTFFPSPESSCGFTSESYQQGVLSATILYEILLGKATLYAVLVSALVLMAMVKRKDSRGRAKRSGSGATNFSLLKQAGDVEENPGPTSMALPVTALLLPLALLLHAARPDEFEVQLVESGGGLVQAGGSLRLSCAASGITFSINTMGWYRQAPGKQRELVALISSIGDTYYADSVKGRFTISRDNAKNTVYLQMNSLKPEDTAVYYCKRFRTAAQGTDYWGQGTQVTVSSTREDLKNVFPPEVAVFEPSEAEISHTQKATLVCLATGFYPDHVELSWWVNGKEVHSGVCTDPQPLKEQPALNDSRYCLSSRLRVSATFWQNPRNHFRCQVQFYGLSENDEWTQDRAKPVTQIVSAEAWGRADCDVKLVEKSFETDTNLNFQNLSVIGFRILLLKVAGFNLLMTLRLWSSRAKRSGSGVKQTLNFDLLKLAGDVESNPGPSRGHMTEYKPTVRLATRDDVPRAVRTLAAAFADYPATRHTVDPDRHIERVTELQELFLTRVGLDIGKVWVADDGAAVAVWTTPESVEAGAVFAEIGPRMAELSGSRLAAQQQMEGLLAPHRPKEPAWFLATVGVSPDHQGKGLGSAVVLPGVEAAERAGVPAFLETSAPRNLPFYERLGFTVTADVEVPEGPRTWCMTRKPGA

SEQ ID NO: 19249 - protein, 748 aa, synthetic construct; identical to SEQ ID NO: 19248

SEQ ID NO: 19250 - protein, 1013 aa, synthetic construct
MALPVTALLLPLALLLHAARPLEIQNPDPAVYQLRDSKSSDKSVCLFTDFDSQTNVSQSKDSDVYITDKCVLDMRSMDFKSNSAVAWSNKSDFACANAFNNSIIPEDTFFPSPESSCGFTSESYQQGVLSATILYEILLGKATLYAVLVSALVLMAMVKRKDSRGRAKRSGSGATNFSLLKQAGDVEENPGPTSMALPVTALLLPLALLLHAARPQVQLVESGGGLVQAGDSVTLSCTASGRTFSSYALAWFRQRPGKEREFVAGLRWGGPTNYADSVKDRFTISGDSAKHTMYLQMNSLKPEDTAVYYCGYNPGGWAVPSQYEYDSWGQGTQVTVSSGTGGGGSGGGGSGGGGSEFDIQMTQSPSSLSASVGDRVTITCKASDHINNWLAWYQQKPGQAPKLLIYGATTLETGVPSRFSGSGSGTDYTLTISSLQPEDFATYYCQQSWNTPWTFGQGTKLEIKRGGGGSGGGGSGGGGSQVQLQQPGAELVKPGASVKMSCKASGYAFSSYWINWMKQKPGQGLEWIGQIYPGDGDTNYNGKFKGRATLTADTSSSTAYMQLSSLTSEDSAVYFCARSITTVVGCAMDYWGQGTSVTVSSTREDLKNVFPPEVAVFEPSEAEISHTQKATLVCLATGFYPDHVELSWWVNGKEVHSGVCTDPQPLKEQPALNDSRYCLSSRLRVSATFWQNPRNHFRCQVQFYGLSENDEWTQDRAKPVTQIVSAEAWGRADCDVKLVEKSFETDTNLNFQNLSVIGFRILLLKVAGFNLLMTLRLWSSRAKRSGSGVKQTLNFDLLKLAGDVESNPGPSRGHMTEYKPTVRLATRDDVPRAVRTLAAAFADYPATRHTVDPDRHIERVTELQELFLTRVGLDIGKVWVADDGAAVAVWTTPESVEAGAVFAEIGPRMAELSGSRLAAQQQMEGLLAPHRPKEPAWFLATVGVSPDHQGKGLGSAVVLPGVEAAERAGVPAFLETSAPRNLPFYERLGFTVTADVEVPEGPRTWCMTRKPGA

SEQ ID NO: 19251 - protein, 1142 aa, synthetic construct
MALPVTALLLPLALLLHAARPLEIQNPDPAVYQLRDSKSSDKSVCLFTDFDSQTNVSQSKDSDVYITDKCVLDMRSMDFKSNSAVAWSNKSDFACANAFNNSIIPEDTFFPSPESSCGFTSESYQQGVLSATILYEILLGKATLYAVLVSALVLMAMVKRKDSRGRAKRSGSGATNFSLLKQAGDVEENPGPTSMALPVTALLLPLALLLHAARPEVQLLESGGGLVQPGGSLRLSCAASGFTFSSYAMSWVRQAPGKGLEWVSSISGSGDYIYYADSVKGRFTISRDISKNTLYLQMNSLRAEDTAVYYCAKEGTGANSSLADYRGQGTLVTVSSGGGSGGGSQVQLVESGGGLVQAGDSVTLSCTASGRTFSSYALAWFRQRPGKEREFVAGLRWGGPTNYADSVKDRFTISGDSAKHTMYLQMNSLKPEDTAVYYCGYNPGGWAVPSQYEYDSWGQGTQVTVSSGTGGGGSGGGGSGGGGSEFDIQMTQSPSSLSASVGDRVTITCKASDHINNWLAWYQQKPGQAPKLLIYGATTLETGVPSRFSGSGSGTDYTLTISSLQPEDFATYYCQQSWNTPWTFGQGTKLEIKRGGGGSGGGGSGGGGSQVQLQQPGAELVKPGASVKMSCKASGYAFSSYWINWMKQKPGQGLEWIGQIYPGDGDTNYNGKFKGRATLTADTSSSTAYMQLSSLTSEDSAVYFCARSITTVVGCAMDYWGQGTSVTVSSTREDLKNVFPPEVAVFEPSEAEISHTQKATLVCLATGFYPDHVELSWWVNGKEVHSGVCTDPQPLKEQPALNDSRYCLSSRLRVSATFWQNPRNHFRCQVQFYGLSENDEWTQDRAKPVTQIVSAEAWGRADCDVKLVEKSFETDTNLNFQNLSVIGFRILLLKVAGFNLLMTLRLWSSRAKRSGSGVKQTLNFDLLKLAGDVESNPGPSRGHMTEYKPTVRLATRDDVPRAVRTLAAAFADYPATRHTVDPDRHIERVTELQELFLTRVGLDIGKVWVADDGAAVAVWTTPESVEAGAVFAEIGPRMAELSGSRLAAQQQMEGLLAPHRPKEPAWFLATVGVSPDHQGKGLGSAVVLPGVEAAERAGVPAFLETSAPRNLPFYERLGFTVTADVEVPEGPRTWCMTRKPGA

SEQ ID NO: 19252 - protein, 1140 aa, synthetic construct
MALPVTALLLPLALLLHAARPLEIQNPDPAVYQLRDSKSSDKSVCLFTDFDSQTNVSQSKDSDVYITDKCVLDMRSMDFKSNSAVAWSNKSDFACANAFNNSIIPEDTFFPSPESSCGFTSESYQQGVLSATILYEILLGKATLYAVLVSALVLMAMVKRKDSRGRAKRSGSGATNFSLLKQAGDVEENPGPTSMALPVTALLLPLALLLHAARPGVTQSPTHLIKTRGQQATLRCSPISGHTSVYWYQQALGLGLQFLLWYDEGEERNRGNFPPRFSGRQFPNYSSELNVNALELEDSALYLCASSLGGPRGLAGLRGDEQFFGPGTRLTVLEGGGSGGGSQVQLVESGGGLVQAGDSVTLSCTASGRTFSSYALAWFRQRPGKEREFVAGLRWGGPTNYADSVKDRFTISGDSAKHTMYLQMNSLKPEDTAVYYCGYNPGGWAVPSQYEYDSWGQGTQVTVSSGTGGGGSGGGGSGGGGSEFDIQMTQSPSSLSASVGDRVTITCKASDHINNWLAWYQQKPGQAPKLLIYGATTLETGVPSRFSGSGSGTDYTLTISSLQPEDFATYYCQQSWNTPWTFGQGTKLEIKRGGGGSGGGGSGGGGSQVQLQQPGAELVKPGASVKMSCKASGYAFSSYWINWMKQKPGQGLEWIGQIYPGDGDTNYNGKFKGRATLTADTSSSTAYMQLSSLTSEDSAVYFCARSITTVVGCAMDYWGQGTSVTVSSTREDLKNVFPPEVAVFEPSEAEISHTQKATLVCLATGFYPDHVELSWWVNGKEVHSGVCTDPQPLKEQPALNDSRYCLSSRLRVSATFWQNPRNHFRCQVQFYGLSENDEWTQDRAKPVTQIVSAEAWGRADCDVKLVEKSFETDTNLNFQNLSVIGFRILLLKVAGFNLLMTLRLWSSRAKRSGSGVKQTLNFDLLKLAGDVESNPGPSRGHMTEYKPTVRLATRDDVPRAVRTLAAAFADYPATRHTVDPDRHIERVTELQELFLTRVGLDIGKVWVADDGAAVAVWTTPESVEAGAVFAEIGPRMAELSGSRLAAQQQMEGLLAPHRPKEPAWFLATVGVSPDHQGKGLGSAVVLPGVEAAERAGVPAFLETSAPRNLPFYERLGFTVTADVEVPEGPRTWCMTRKPGA

SEQ ID NO: 19253 - protein, 901 aa, synthetic construct
MALPVTALLLPLALLLHAARPLEIQNPDPAVYQLRDSKSSDKSVCLFTDFDSQTNVSQSKDSDVYITDKCVLDMRSMDFKSNSAVAWSNKSDFACANAFNNSIIPEDTFFPSPESSCGFTSESYQQGVLSATILYEILLGKATLYAVLVSALVLMAMVKRKDSRGRAKRSGSGATNFSLLKQAGDVEENPGPTSMALPVTALLLPLALLLHAARPGVTQSPTHLIKTRGQQATLRCSPISGHTSVYWYQQALGLGLQFLLWYDEGEERNRGNFPPRFSGRQFPNYSSELNVNALELEDSALYLCASSLGGPRGLAGLRGDEQFFGPGTRLTVLEGGGSGGGSGVTQSPTHLIKTRGQQATLRCSPISGHTSVYWYQQALGLGLQFLLWYDEGEERNRGNFPPRFSGRQFPNYSSELNVNALELEDSALYLCASSLGGDELGADGNEQFFGPGTRLTVLEGTGGGGSGGGGSGGGGSEFDIQMTQSPSSLSASVGDRVTITCKASDHINNWLAWYQQKPGQAPKLLIYGATTLETGVPSRFSGSGSGTDYTLTISSLQPEDFATYYCQQSWNTPWTFGQGTKLEIKRGGGGSGGGGSGGGGSQVQLQQPGAELVKPGASVKMSCKASGYAFSSYWINWMKQKPGQGLEWIGQIYPGDGDTNYNGKFKGRATLTADTSSSTAYMQLSSLTSEDSAVYFCARSITTVVGCAMDYWGQGTSVTVSSTREDLKNVFPPEVAVFEPSEAEISHTQKATLVCLATGFYPDHVELSWWVNGKEVHSGVCTDPQPLKEQPALNDSRYCLSSRLRVSATFWQNPRNHFRCQVQFYGLSENDEWTQDRAKPVTQIVSAEAWGRADCDVKLVEKSFETDTNLNFQNLSVIGFRILLLKVAGFNLLMTLRLWSS

SEQ ID NO: 19254 - protein, 754 aa, synthetic construct
MALPVTALLLPLALLLHAARPLEIQNPDPAVYQLRDSKSSDKSVCLFTDFDSQTNVSQSKDSDVYITDKCVLDMRSMDFKSNSAVAWSNKSDFACANAFNNSIIPEDTFFPSPESSCGFTSESYQQGVLSATILYEILLGKATLYAVLVSALVLMAMVKRKDSRGRAKRSGSGATNFSLLKQAGDVEENPGPTSMALPVTALLLPLALLLHAARPDEFGSDLGIKLLFAAAKGQDDEVRILLAAGADVNAKDFEGYTPLHVAAYDGHLEIVEVLLKAGADVNAKDSQGRTPLHEAAYSGHLEIVEVLLKAGADVNAQDDAGETPADLAAAWGHEDIAEVLQKTREDLKNVFPPEVAVFEPSEAEISHTQKATLVCLATGFYPDHVELSWWVNGKEVHSGVCTDPQPLKEQPALNDSRYCLSSRLRVSATFWQNPRNHFRCQVQFYGLSENDEWTQDRAKPVTQIVSAEAWGRADCDVKLVEKSFETDTNLNFQNLSVIGFRILLLKVAGFNLLMTLRLWSSRAKRSGSGVKQTLNFDLLKLAGDVESNPGPSRGHMTEYKPTVRLATRDDVPRAVRTLAAAFADYPATRHTVDPDRHIERVTELQELFLTRVGLDIGKVWVADDGAAVAVWTTPESVEAGAVFAEIGPRMAELSGSRLAAQQQMEGLLAPHRPKEPAWFLATVGVSPDHQGKGLGSAVVLPGVEAAERAGVPAFLETSAPRNLPFYERLGFTVTADVEVPEGPRTWCMTRKPGA

SEQ ID NO: 19255 - protein, 683 aa, synthetic construct
MALPVTALLLPLALLLHAARPLEIQNPDPAVYQLRDSKSSDKSVCLFTDFDSQTNVSQSKDSDVYITDKCVLDMRSMDFKSNSAVAWSNKSDFACANAFNNSIIPEDTFFPSPESSCGFTSESYQQGVLSATILYEILLGKATLYAVLVSALVLMAMVKRKDSRGRAKRSGSGATNFSLLKQAGDVEENPGPTSMDWIWRILFLVGAATGAHSFEGSGFEYAKEMRNAYWEIALLPNLTNQQKRAPIRKLYDDPSQSSELLSEAKKLNDSQTREDLKNVFPPEVAVFEPSEAEISHTQKATLVCLATGFYPDHVELSWWVNGKEVHSGVCTDPQPLKEQPALNDSRYCLSSRLRVSATFWQNPRNHFRCQVQFYGLSENDEWTQDRAKPVTQIVSAEAWGRADCDVKLVEKSFETDTNLNFQNLSVIGFRILLLKVAGFNLLMTLRLWSSRAKRSGSGVKQTLNFDLLKLAGDVESNPGPSRGHMTEYKPTVRLATRDDVPRAVRTLAAAFADYPATRHTVDPDRHIERVTELQELFLTRVGLDIGKVWVADDGAAVAVWTTPESVEAGAVFAEIGPRMAELSGSRLAAQQQMEGLLAPHRPKEPAWFLATVGVSPDHQGKGLGSAVVLPGVEAAERAGVPAFLETSAPRNLPFYERLGFTVTADVEVPEGPRTWCMTRKPGA

SEQ ID NO: 19256 - protein, 905 aa, synthetic construct
MALPVTALLLPLALLLHAARPLEIQNPDPAVYQLRDSKSSDKSVCLFTDFDSQTNVSQSKDSDVYITDKCVLDMRSMDFKSNSAVAWSNKSDFACANAFNNSIIPEDTFFPSPESSCGFTSESYQQGVLSATILYEILLGKATLYAVLVSALVLMAMVKRKDSRGRAKRSGSGATNFSLLKQAGDVEENPGPTSMALPVTALLLPLALLLHAARPDEFEVQLVESGGGLVQAGGSLRLSCAASGITFSINTMGWYRQAPGKQRELVALISSIGDTYYADSVKGRFTISRDNAKNTVYLQMNSLKPEDTAVYYCKRFRTAAQGTDYWGQGTQVTVSSLEGGGGSGGGGSGGGGSGSGGSGSGGSGSGGSGSGGSFEVQLVESGGGLVQPGGSLRLSCAASGSIFGFNDMAWYRQAPGKQRELVALISRVGVTSSADSVKGRFTISRVNAKDTVYLQMNSLKPEDTAVYYCYMDQRLDGSTLAYWGQGTQVTVSSTREDLKNVFPPEVAVFEPSEAEISHTQKATLVCLATGFYPDHVELSWWVNGKEVHSGVCTDPQPLKEQPALNDSRYCLSSRLRVSATFWQNPRNHFRCQVQFYGLSENDEWTQDRAKPVTQIVSAEAWGRADCDVKLVEKSFETDTNLNFQNLSVIGFRILLLKVAGFNLLMTLRLWSSRAKRSGSGVKQTLNFDLLKLAGDVESNPGPSRGHMTEYKPTVRLATRDDVPRAVRTLAAAFADYPATRHTVDPDRHIERVTELQELFLTRVGLDIGKVWVADDGAAVAVWTTPESVEAGAVFAEIGPRMAELSGSRLAAQQQMEGLLAPHRPKEPAWFLATVGVSPDHQGKGLGSAVVLPGVEAAERAGVPAFLETSAPRNLPFYERLGFTVTADVEVPEGPRTWCMTRKPGA

SEQ ID NO: 19257 - protein, 819 aa, synthetic construct
MALPVTALLLPLALLLHAARPLEIQNPDPAVYQLRDSKSSDKSVCLFTDFDSQTNVSQSKDSDVYITDKCVLDMRSMDFKSNSAVAWSNKSDFACANAFNNSIIPEDTFFPSPESSCGFTSESYQQGVLSATILYEILLGKATLYAVLVSALVLMAMVKRKDSRGRAKRSGSGATNFSLLKQAGDVEENPGPTSMALPVTALLLPLALLLHAARPGMRTEDLPKAVVFLEPQWYRVLEKDSVTLKCQGAYSPEDNSTQWFHNESLISSQASSYFIDAATVDDSGEYRCQTNLSTLSDPVQLEVHIGWLLLQAPRWVFKEEDPIHLRCHSWKNTALHKVTYLQNGKGRKYFHHNSDFYIPKATLKDSGSYFCRGLVGSKNVSSETVNITITQGLAVSTISSFFPPGYQTREDLKNVFPPEVAVFEPSEAEISHTQKATLVCLATGFYPDHVELSWWVNGKEVHSGVCTDPQPLKEQPALNDSRYCLSSRLRVSATFWQNPRNHFRCQVQFYGLSENDEWTQDRAKPVTQIVSAEAWGRADCDVKLVEKSFETDTNLNFQNLSVIGFRILLLKVAGFNLLMTLRLWSSRAKRSGSGVKQTLNFDLLKLAGDVESNPGPSRGHMTEYKPTVRLATRDDVPRAVRTLAAAFADYPATRHTVDPDRHIERVTELQELFLTRVGLDIGKVWVADDGAAVAVWTTPESVEAGAVFAEIGPRMAELSGSRLAAQQQMEGLLAPHRPKEPAWFLATVGVSPDHQGKGLGSAVVLPGVEAAERAGVPAFLETSAPRNLPFYERLGFTVTADVEVPEGPRTWCMTRKPGA

SEQ ID NO: 19258 - protein, 447 aa, synthetic construct
MALPVTALLLPLALLLHAARPLEIQNPDPAVYQLRDSKSSDKSVCLFTDFDSQTNVSQSKDSDVYITDKCVLDMRSMDFKSNSAVAWSNKSDFACANAFNNSIIPEDTFFPSPESSCGFTSESYQQGVLSATILYEILLGKATLYAVLVSALVLMAMVKRKDSRGRAKRSGSGATNFSLLKQAGDVEENPGPTSATMALPVTALLLPLALLLHAARPMDPDLEIRAAFLRQRNTALRTEVAELEQEVQRLENEVSQYETRYGPLGGGKTREDLKNVFPPEVAVFEPSEAEISHTQKATLVCLATGFYPDHVELSWWVNGKEVHSGVCTDPQPLKEQPALNDSRYCLSSRLRVSATFWQNPRNHFRCQVQFYGLSENDEWTQDRAKPVTQIVSAEAWGRADCDVKLVEKSFETDTNLNFQNLSVIGFRILLLKVAGFNLLMTLRLWSS

SEQ ID NO: 19259 - protein, 447 aa, synthetic construct
MALPVTALLLPLALLLHAARPLEIQNPDPAVYQLRDSKSSDKSVCLFTDFDSQTNVSQSKDSDVYITDKCVLDMRSMDFKSNSAVAWSNKSDFACANAFNNSIIPEDTFFPSPESSCGFTSESYQQGVLSATILYEILLGKATLYAVLVSALVLMAMVKRKDSRGRAKRSGSGATNFSLLKQAGDVEENPGPTSATMALPVTALLLPLALLLHAARPMDPDLEIEAAFLERENTALETRVAELRQRVQRLRNRVSQYRTRYGPLGGGKTREDLKNVFPPEVAVFEPSEAEISHTQKATLVCLATGFYPDHVELSWWVNGKEVHSGVCTDPQPLKEQPALNDSRYCLSSRLRVSATFWQNPRNHFRCQVQFYGLSENDEWTQDRAKPVTQIVSAEAWGRADCDVKLVEKSFETDTNLNFQNLSVIGFRILLLKVAGFNLLMTLRLWSS

SEQ ID NO: 19260 - protein, 682 aa, synthetic construct
MALPVTALLLPLALLLHAARPLEIQNPDPAVYQLRDSKSSDKSVCLFTDFDSQTNVSQSKDSDVYITDKCVLDMRSMDFKSNSAVAWSNKSDFACANAFNNSIIPEDTFFPSPESSCGFTSESYQQGVLSATILYEILLGKATLYAVLVSALVLMAMVKRKDSRGRAKRSGSGATNFSLLKQAGDVEENPGPTSATMALPVTALLLPLALLLHAARPLFNQEVQIPLTESYCGPCPKNWICYKNNCYQFFDESKNWYESQASCMSQNASLLKVYSKEDQDLLKLVKSAHWMGLVHIPTNGSWQWEDGSILSPNLLTIIEMQKGDCALYASSFKGYIENCSTPNTYICMQRTVSGGGGSGGGGSGGGGDLFNQEVQIPLTESYCGPCPKNWICYKNNCYQFFDESKNWYESQASCMSQNASLLKVYSKEDQDLLKLVKSAHWMGLVHIPTNGSWQWEDGSILSPNLLTIIEMQKGDCALYASSFKGYIENCSTPNTYICMQRTVTREDLKNVFPPEVAVFEPSEAEISHTQKATLVCLATGFYPDHVELSWWVNGKEVHSGVCTDPQPLKEQPALNDSRYCLSSRLRVSATFWQNPRNHFRCQVQFYGLSENDEWTQDRAKPVTQIVSAEAWGRADCDVKLVEKSFETDTNLNFQNLSVIGFRILLLKVAGFNLLMTLRLWSS

SEQ ID NO: 19261 - protein, 682 aa, synthetic construct
MALPVTALLLPLALLLHAARPLEIQNPDPAVYQLRDSKSSDKSVCLFTDFDSQTNVSQSKDSDVYITDKCVLDMRSMDFKSNSAVAWSNKSDFACANAFNNSIIPEDTFFPSPESSCGFTSESYQQGVLSATILYEILLGKATLYAVLVSALVLMAMVKRKDSRGRAKRSGSGATNFSLLKQAGDVEENPGPTSATMALPVTALLLPLALLLHAARPLFNQEVQIPLTESYCGPCPKNWICYKNNCYQFFDESKNWYESQASCMSQNASLLKVYSKEDQDLLKLVKSAHWMGLVHIPTNGSWQWEDGSILSPNLLTIIEMQKGDCALYASSFKGFIENCSTPNTYICMQRTVGGGGSGGGGSGGGGSDLFNQEVQIPLTESYCGPCPKNWICYKNNCYQFFDESKNWYESQASCMSQNASLLKVYSKEDQDLLKLVKSAHWMGLVHIPTNGSWQWEDGSILSPNLLTIIEMQKGDCALYASSFKGFIENCSTPNTYICMQRTVTREDLKNVFPPEVAVFEPSEAEISHTQKATLVCLATGFYPDHVELSWWVNGKEVHSGVCTDPQPLKEQPALNDSRYCLSSRLRVSATFWQNPRNHFRCQVQFYGLSENDEWTQDRAKPVTQIVSAEAWGRADCDVKLVEKSFETDTNLNFQNLSVIGFRILLLKVAGFNLLMTLRLWSS

SEQ ID NO: 19262 - protein, 708 aa, synthetic construct
MALPVTALLLPLALLLHAARPLEIQNPDPAVYQLRDSKSSDKSVCLFTDFDSQTNVSQSKDSDVYITDKCVLDMRSMDFKSNSAVAWSNKSDFACANAFNNSIIPEDTFFPSPESSCGFTSESYQQGVLSATILYEILLGKATLYAVLVSALVLMAMVKRKDSRGRAKRSGSGATNFSLLKQAGDVEENPGPTSMALPVTALLLPLALLLHAARPMDPDLEIRAAFLRQRNTALRTEVAELEQEVQRLENEVSQYETRYGPLGGGKGTGGGGSGGGGSGGGGSEFDIQMTQSPSSLSASVGDRVTITCKASDHINNWLAWYQQKPGQAPKLLIYGATTLETGVPSRFSGSGSGTDYTLTISSLQPEDFATYYCQQSWNTPWTFGQGTKLEIKRGGGGSGGGGSGGGGSQVQLQQPGAELVKPGASVKMSCKASGYAFSSYWINWMKQKPGQGLEWIGQIYPGDGDTNYNGKFKGRATLTADTSSSTAYMQLSSLTSEDSAVYFCARSITTVVGCAMDYWGQGTSVTVSSTREDLKNVFPPEVAVFEPSEAEISHTQKATLVCLATGFYPDHVELSWWVNGKEVHSGVCTDPQPLKEQPALNDSRYCLSSRLRVSATFWQNPRNHFRCQVQFYGLSENDEWTQDRAKPVTQIVSAEAWGRADCDVKLVEKSFETDTNLNFQNLSVIGFRILLLKVAGFNLLMTLRLWSS

SEQ ID NO: 19263 - protein, 943 aa, synthetic construct
MALPVTALLLPLALLLHAARPLEIQNPDPAVYQLRDSKSSDKSVCLFTDFDSQTNVSQSKDSDVYITDKCVLDMRSMDFKSNSAVAWSNKSDFACANAFNNSIIPEDTFFPSPESSCGFTSESYQQGVLSATILYEILLGKATLYAVLVSALVLMAMVKRKDSRGRAKRSGSGATNFSLLKQAGDVEENPGPTSMALPVTALLLPLALLLHAARPLFNQEVQIPLTESYCGPCPKNWICYKNNCYQFFDESKNWYESQASCMSQNASLLKVYSKEDQDLLKLVKSAHWMGLVHIPTNGSWQWEDGSILSPNLLTIIEMQKGDCALYASSFKGFIENCSTPNTYICMQRTVGGGGSGGGGSGGGGSDLFNQEVQIPLTESYCGPCPKNWICYKNNCYQFFDESKNWYESQASCMSQNASLLKVYSKEDQDLLKLVKSAHWMGLVHIPTNGSWQWEDGSILSPNLLTIIEMQKGDCALYASSFKGFIENCSTPNTYICMQRTVGTGGGGSGGGGSGGGGSEFDIQMTQSPSSLSASVGDRVTITCKASDHINNWLAWYQQKPGQAPKLLIYGATTLETGVPSRFSGSGSGTDYTLTISSLQPEDFATYYCQQSWNTPWTFGQGTKLEIKRGGGGSGGGGSGGGGSQVQLQQPGAELVKPGASVKMSCKASGYAFSSYWINWMKQKPGQGLEWIGQIYPGDGDTNYNGKFKGRATLTADTSSSTAYMQLSSLTSEDSAVYFCARSITTVVGCAMDYWGQGTSVTVSSTREDLKNVFPPEVAVFEPSEAEISHTQKATLVCLATGFYPDHVELSWWVNGKEVHSGVCTDPQPLKEQPALNDSRYCLSSRLRVSATFWQNPRNHFRCQVQFYGLSENDEWTQDRAKPVTQIVSAEAWGRADCDVKLVEKSFETDTNLNFQNLSVIGFRILLLKVAGFNLLMTLRLWSS

SEQ ID NO: 19264 - protein, 648 aa, synthetic construct
MALPVTALLLPLALLLHAARPLEIQNPDPAVYQLRDSKSSDKSVCLFTDFDSQTNVSQSKDSDVYITDKCVLDMRSMDFKSNSAVAWSNKSDFACANAFNNSIIPEDTFFPSPESSCGFTSESYQQGVLSATILYEILLGKATLYAVLVSALVLMAMVKRKDSRGRAKRSGSGATNFSLLKQAGDVEENPGPTSMALPVTALLLPLALLLHAARPQSVLTQPPSVSGAPGQRVTISCTGSSSNIGAGYDVHWYQQLPGTAPKLLIFGNSNRPSGVPDRFSGFKSGTSASLAITGLQAEDEADYFCQSYDSSLSGSGVFGTGTKVTVLGGGGGSGGGGSGGGGSQMQLVQSGGGLVQPGRSLRLSCAASGFTFDDYAMHWVRQAPGKGLEWVSGISWNSGSIGYADSVKGRFTISRDNAKNSLYLQMNSLRAEDTALYYCAKDIHSGSYYGLLYYAMDVWGQGTTVTVSSTREDLKNVFPPEVAVFEPSEAEISHTQKATLVCLATGFYPDHVELSWWVNGKEVHSGVCTDPQPLKEQPALNDSRYCLSSRLRVSATFWQNPRNHFRCQVQFYGLSENDEWTQDRAKPVTQIVSAEAWGRADCDVKLVEKSFETDTNLNFQNLSVIGFRILLLKVAGFNLLMTLRLWSS

SEQ ID NO: 19265 - protein, 485 aa, synthetic construct
MALPVTALLLPLALLLHAARPLEIQNPDPAVYQLRDSKSSDKSVCLFTDFDSQTNVSQSKDSDVYITDKCVLDMRSMDFKSNSAVAWSNKSDFACANAFNNSIIPEDTFFPSPESSCGFTSESYQQGVLSATILYEILLGKATLYAVLVSALVLMAMVKRKDSRGRAKRSGSGATNFSLLKQAGDVEENPGPTSMALPVTALLLPLALLLHAARPMCMPCFTTDHQMARKCDDCCGGKGRGKCYGPQCLCRLEGGGGSGGGGSGGGGSFEVCMPCFTTDQQMARKCSDCCGGKGRGKCYGPQCLCRTREDLKNVFPPEVAVFEPSEAEISHTQKATLVCLATGFYPDHVELSWWVNGKEVHSGVCTDPQPLKEQPALNDSRYCLSSRLRVSATFWQNPRNHFRCQVQFYGLSENDEWTQDRAKPVTQIVSAEAWGRADCDVKLVEKSFETDTNLNFQNLSVIGFRILLLKVAGFNLLMTLRLWSS

SEQ ID NO: 19266 - protein, 695 aa, synthetic construct
MALPVTALLLPLALLLHAARPLEIQNPDPAVYQLRDSKSSDKSVCLFTDFDSQTNVSQSKDSDVYITDKCVLDMRSMDFKSNSAVAWSNKSDFACANAFNNSIIPEDTFFPSPESSCGFTSESYQQGVLSATILYEILLGKATLYAVLVSALVLMAMVKRKDSRGRAKRSGSGATNFSLLKQAGDVEENPGPTSMALPVTALLLPLALLLHAARPFEVCMPCFTTDQQMARKCSDCCGGKGRGKCYGPQCLCRGTGGGGSGGGGSGGGGSEFDIQMTQSPSSLSASVGDRVTITCKASDHINNWLAWYQQKPGQAPKLLIYGATTLETGVPSRFSGSGSGTDYTLTISSLQPEDFATYYCQQSWNTPWTFGQGTKLEIKRGGGGSGGGGSGGGGSQVQLQQPGAELVKPGASVKMSCKASGYAFSSYWINWMKQKPGQGLEWIGQIYPGDGDTNYNGKFKGRATLTADTSSSTAYMQLSSLTSEDSAVYFCARSITTVVGCAMDYWGQGTSVTVSSTREDLKNVFPPEVAVFEPSEAEISHTQKATLVCLATGFYPDHVELSWWVNGKEVHSGVCTDPQPLKEQPALNDSRYCLSSRLRVSATFWQNPRNHFRCQVQFYGLSENDEWTQDRAKPVTQIVSAEAWGRADCDVKLVEKSFETDTNLNFQNLSVIGFRILLLKVAGFNLLMTLRLWSS

SEQ ID NO: 19267 - protein, 825 aa, synthetic construct
MALPVTALLLPLALLLHAARPLEIQNPDPAVYQLRDSKSSDKSVCLFTDFDSQTNVSQSKDSDVYITDKCVLDMRSMDFKSNSAVAWSNKSDFACANAFNNSIIPEDTFFPSPESSCGFTSESYQQGVLSATILYEILLGKATLYAVLVSALVLMAMVKRKDSRGRAKRSGSGATNFSLLKQAGDVEENPGPTSMALPVTALLLPLALLLHAARPFESPVAPACDPRLLNKLLRDSHLLHSRLSQCPDVDPLSIPVLLPAVDFSLGEWKTQTEQSKAQDILGAVSLLLEGVMAARGQLEPSCLSSLLGQLSGQVRLLLGALQGLLGTQLPLQGRTTAHKDPNALFLSLQQLLRGKVRFLLLVEGPTLCVRRTLPTTAVPSSTSGTGGGGSGGGGSGGGGSEFDIQMTQSPSSLSASVGDRVTITCKASDHINNWLAWYQQKPGQAPKLLIYGATTLETGVPSRFSGSGSGTDYTLTISSLQPEDFATYYCQQSWNTPWTFGQGTKLEIKRGGGGSGGGGSGGGGSQVQLQQPGAELVKPGASVKMSCKASGYAFSSYWINWMKQKPGQGLEWIGQIYPGDGDTNYNGKFKGRATLTADTSSSTAYMQLSSLTSEDSAVYFCARSITTVVGCAMDYWGQGTSVTVSSTREDLKNVFPPEVAVFEPSEAEISHTQKATLVCLATGFYPDHVELSWWVNGKEVHSGVCTDPQPLKEQPALNDSRYCLSSRLRVSATFWQNPRNHFRCQVQFYGLSENDEWTQDRAKPVTQIVSAEAWGRADCDVKLVEKSFETDTNLNFQNLSVIGFRILLLKVAGFNLLMTLRLWSS

SEQ ID NO: 19268 - protein, 732 aa, synthetic construct
MALPVTALLLPLALLLHAARPLEIQNPDPAVYQLRDSKSSDKSVCLFTDFDSQTNVSQSKDSDVYITDKCVLDMRSMDFKSNSAVAWSNKSDFACANAFNNSIIPEDTFFPSPESSCGFTSESYQQGVLSATILYEILLGKATLYAVLVSALVLMAMVKRKDSRGRAKRSGSGATNFSLLKQAGDVEENPGPTSMALPVTALLLPLALLLHAARPFEMGSWEEFELRLNAIEERLYALGGSEAELAYFEYVIADFEGNLQRYKGKGNPEVEALYFEADAIFEELVAYRHNGTGGGGSGGGGSGGGGSEFDIQMTQSPSSLSASVGDRVTITCKASDHINNWLAWYQQKPGQAPKLLIYGATTLETGVPSRFSGSGSGTDYTLTISSLQPEDFATYYCQQSWNTPWTFGQGTKLEIKRGGGGSGGGGSGGGGSQVQLQQPGAELVKPGASVKMSCKASGYAFSSYWINWMKQKPGQGLEWIGQIYPGDGDTNYNGKFKGRATLTADTSSSTAYMQLSSLTSEDSAVYFCARSITTVVGCAMDYWGQGTSVTVSSTREDLKNVFPPEVAVFEPSEAEISHTQKATLVCLATGFYPDHVELSWWVNGKEVHSGVCTDPQPLKEQPALNDSRYCLSSRLRVSATFWQNPRNHFRCQVQFYGLSENDEWTQDRAKPVTQIVSAEAWGRADCDVKLVEKSFETDTNLNFQNLSVIGFRILLLKVAGFNLLMTLRLWSS

SEQ ID NO: 19269 - protein, 869 aa, synthetic construct
MALPVTALLLPLALLLHAARPLEEDLKNVFPPEVAVFEPSEAEISHTQKATLVCLATGFYPDHVELSWWVNGKEVHSGVSTDPQPLKEQPALNDSRYCLSSRLRVSATFWQNPRNHFRCQVQFYGLSENDEWTQDRAKPVTQIVSAEAWGRADCDVKLVEKSFETDTNLNFQNLSVIGFRILLLKVAGFNLLMTLRLWSSRAKRSGSGATNFSLLKQAGDVEENPGPTSMALPVTALLLPLALLLHAARPDIQMTQTTSSLSASLGDRVTISCRASQDISKYLNWYQQKPDGTVKLLIYHTSRLHSGVPSRFSGSGSGTDYSLTISNLEQEDIATYFCQQGNTLPYTFGGGTKLEITGGGGSGGGGSGGGGSEVKLQESGPGLVAPSQSLSVTCTVSGVSLPDYGVSWIRQPPRKGLEWLGVIWGSETTYYNSALKSRLTIIKDNSKSQVFLKMNSLQTDDTAIYYCAKHYYYGGSYAMDYWGQGTSVTVSSTRIQNPDPAVYQLRDSKSSDKSVCLFTDFDSQTNVSQSKDSDVYITDKTVLDMRSMDFKSNSAVAWSNKSDFACANAFNNSIIPEDTFFPSPESSCGFTSESYQQGVLSATILYEILLGKATLYAVLVSALVLMAMVKRKDSRGRAKRSGSGVKQTLNFDLLKLAGDVESNPGPSRGHMTEYKPTVRLATRDDVPRAVRTLAAAFADYPATRHTVDPDRHIERVTELQELFLTRVGLDIGKVWVADDGAAVAVWTTPESVEAGAVFAEIGPRMAELSGSRLAAQQQMEGLLAPHRPKEPAWFLATVGVSPDHQGKGLGSAVVLPGVEAAERAGVPAFLETSAPRNLPFYERLGFTVTADVEVPEGPRTWCMTRKPGA

SEQ ID NO: 19270 - protein, 870 aa, synthetic construct
MALPVTALLLPLALLLHAARPLEEDLKNVFPPEVAVFEPSEAEISHTQKATLVCLATGFYPDHVELSWWVNGKEVHSGVSTDPQPLKEQPALNDSRYCLSSRLRVSATFWQNPRNHFRCQVQFYGLSENDEWTQDRAKPVTQIVSAEAWGRADCDVKLVEKSFETDTNLNFQNLSVIGFRILLLKVAGFNLLMTLRLWSSRAKRSGSGATNFSLLKQAGDVEENPGPTSTMALPVTALLLPLALLLHAARPEIVMTQSPATLSLSPGERATLSCRASQDISKYLNWYQQKPGQAPRLLIYHTSRLHSGIPARFSGSGSGTDYTLTISSLQPEDFAVYFCQQGNTLPYTFGQGTKLEIKGGGGSGGGGSGGGGSQVQLQESGPGLVKPSETLSLTCTVSGVSLPDYGVSWIRQPPGKGLEWIGVIWGSETTYYNSSLKSRVTISKDNSKNQVSLKLSSVTAADTAVYYCAKHYYYGGSYAMDYWGQGTLVTVSSTRIQNPDPAVYQLRDSKSSDKSVCLFTDFDSQTNVSQSKDSDVYITDKTVLDMRSMDFKSNSAVAWSNKSDFACANAFNNSIIPEDTFFPSPESSCGFTSESYQQGVLSATILYEILLGKATLYAVLVSALVLMAMVKRKDSRGRAKRSGSGVKQTLNFDLLKLAGDVESNPGPSRGHMTEYKPTVRLATRDDVPRAVRTLAAAFADYPATRHTVDPDRHIERVTELQELFLTRVGLDIGKVWVADDGAAVAVWTTPESVEAGAVFAEIGPRMAELSGSRLAAQQQMEGLLAPHRPKEPAWFLATVGVSPDHQGKGLGSAVVLPGVEAAERAGVPAFLETSAPRNLPFYERLGFTVTADVEVPEGPRTWCMTRKPGA

SEQ ID NO: 19271 - protein, 871 aa, synthetic construct
MALPVTALLLPLALLLHAARPLEEDLKNVFPPEVAVFEPSEAEISHTQKATLVCLATGFYPDHVELSWWVNGKEVHSGVSTDPQPLKEQPALNDSRYCLSSRLRVSATFWQNPRNHFRCQVQFYGLSENDEWTQDRAKPVTQIVSAEAWGRADCDVKLVEKSFETDTNLNFQNLSVIGFRILLLKVAGFNLLMTLRLWSSRAKRSGSGATNFSLLKQAGDVEENPGPTSTMALPVTALLLPLALLLHAARPDEIVLTQSPATLSLSPGERATLSCSASSSVSYMHWYQQKPGQAPRLLIYDTSKLASGIPARFSGSGSGTDFTLTISSLEPEDVAVYYCFQGSVYPFTFGQGTKLEIKRGGGGSGGGGSGGGGSQVQLQESGPGLVKPSQTLSLTCTVSGGSISTSGMGVGWIRQHPGKGLEWIGHIWWDDDKRYNPALKSRVTISVDTSKNQFSLKLSSVTAADTAVYYCARMELWSYYFDYWGQGTLVTVSSTRIQNPDPAVYQLRDSKSSDKSVCLFTDFDSQTNVSQSKDSDVYITDKTVLDMRSMDFKSNSAVAWSNKSDFACANAFNNSIIPEDTFFPSPESSCGFTSESYQQGVLSATILYEILLGKATLYAVLVSALVLMAMVKRKDSRGRAKRSGSGVKQTLNFDLLKLAGDVESNPGPSRGHMTEYKPTVRLATRDDVPRAVRTLAAAFADYPATRHTVDPDRHIERVTELQELFLTRVGLDIGKVWVADDGAAVAVWTTPESVEAGAVFAEIGPRMAELSGSRLAAQQQMEGLLAPHRPKEPAWFLATVGVSPDHQGKGLGSAVVLPGVEAAERAGVPAFLETSAPRNLPFYERLGFTVTADVEVPEGPRTWCMTRKPGA

SEQ ID NO: 19272 - protein, 867 aa, synthetic construct
MALPVTALLLPLALLLHAARPLEEDLKNVFPPEVAVFEPSEAEISHTQKATLVCLATGFYPDHVELSWWVNGKEVHSGVSTDPQPLKEQPALNDSRYCLSSRLRVSATFWQNPRNHFRCQVQFYGLSENDEWTQDRAKPVTQIVSAEAWGRADCDVKLVEKSFETDTNLNFQNLSVIGFRILLLKVAGFNLLMTLRLWSSRAKRSGSGATNFSLLKQAGDVEENPGPTSMALPVTALLLPLALLLHAARPDIQMTQSPSSLSASVGDRVTITCRASQDISNYLNWYQQKPGKAPKLLIYYTSRLHSGVPSRFSGSGSGTDFTLTISSLQPEDFATYYCQQGNTLPYTFGQGTKVEIKRGGGGSGGGGSGGGGSEVQLVESGGGLVQPGGSLRLSCAASGFTFSDYFMSWVRQAPGKGLEWVATISNGGTYTYYPDSVKGRFTISRDNSKNTLYLQMNSLRAEDTAVYYCARFDGYIFDYWGQGTLVTVSSTRIQNPDPAVYQLRDSKSSDKSVCLFTDFDSQTNVSQSKDSDVYITDKTVLDMRSMDFKSNSAVAWSNKSDFACANAFNNSIIPEDTFFPSPESSCGFTSESYQQGVLSATILYEILLGKATLYAVLVSALVLMAMVKRKDSRGRAKRSGSGVKQTLNFDLLKLAGDVESNPGPSRGHMTEYKPTVRLATRDDVPRAVRTLAAAFADYPATRHTVDPDRHIERVTELQELFLTRVGLDIGKVWVADDGAAVAVWTTPESVEAGAVFAEIGPRMAELSGSRLAAQQQMEGLLAPHRPKEPAWFLATVGVSPDHQGKGLGSAVVLPGVEAAERAGVPAFLETSAPRNLPFYERLGFTVTADVEVPEGPRTWCMTRKPGA

SEQ ID NO: 19273 - protein, 871 aa, synthetic construct
MALPVTALLLPLALLLHAARPLEEDLKNVFPPEVAVFEPSEAEISHTQKATLVCLATGFYPDHVELSWWVNGKEVHSGVSTDPQPLKEQPALNDSRYCLSSRLRVSATFWQNPRNHFRCQVQFYGLSENDEWTQDRAKPVTQIVSAEAWGRADCDVKLVEKSFETDTNLNFQNLSVIGFRILLLKVAGFNLLMTLRLWSSRAKRSGSGATNFSLLKQAGDVEENPGPTSMALPVTALLLPLALLLHAARPDIQMTQSPSSLSASVGDRVTITCKASDHINNWLAWYQQKPGQAPKLLIYGATTLETGVPSRFSGSGSGTDYTLTISSLQPEDFATYYCQQSWNTPWTFGQGTKLEIKRGGGGSGGGGSGGGGSQVQLQQPGAELVKPGASVKMSCKASGYAFSSYWINWMKQKPGQGLEWIGQIYPGDGDTNYNGKFKGRATLTADTSSSTAYMQLSSLTSEDSAVYFCARSITTVVGCAMDYWGQGTSVTVSSTRIQNPDPAVYQLRDSKSSDKSVCLFTDFDSQTNVSQSKDSDVYITDKTVLDMRSMDFKSNSAVAWSNKSDFACANAFNNSIIPEDTFFPSPESSCGFTSESYQQGVLSATILYEILLGKATLYAVLVSALVLMAMVKRKDSRGRAKRSGSGVKQTLNFDLLKLAGDVESNPGPSRGHMTEYKPTVRLATRDDVPRAVRTLAAAFADYPATRHTVDPDRHIERVTELQELFLTRVGLDIGKVWVADDGAAVAVWTTPESVEAGAVFAEIGPRMAELSGSRLAAQQQMEGLLAPHRPKEPAWFLATVGVSPDHQGKGLGSAVVLPGVEAAERAGVPAFLETSAPRNLPFYERLGFTVTADVEVPEGPRTWCMTRKPGA

SEQ ID NO: 19274 - protein, 873 aa, synthetic construct
MALPVTALLLPLALLLHAARPLEEDLKNVFPPEVAVFEPSEAEISHTQKATLVCLATGFYPDHVELSWWVNGKEVHSGVSTDPQPLKEQPALNDSRYCLSSRLRVSATFWQNPRNHFRCQVQFYGLSENDEWTQDRAKPVTQIVSAEAWGRADCDVKLVEKSFETDTNLNFQNLSVIGFRILLLKVAGFNLLMTLRLWSSRAKRSGSGATNFSLLKQAGDVEENPGPTSMALPVTALLLPLALLLHAARPQIVLSQSPAILSASPGEKVTMTCRASSSVSYMHWYQQKPGSSPKPWIYATSNLASGVPARFSGSGSGTSYSFTISRVEAEDAATYYCQQWTFNPPTFGGGTRLEIKRTVAAGGGGSGGGGSGGGGSQAYLQQSGAELVRPGASVKMSCKASGYTFTSYNMHWVKQTPRQGLEWIGGIYPGNGDTSYNQKFKGKATLTVGKSSSTAYMQLSSLTSEDSAVYFCARYDYNYAMDYWGQGTSVTVSSASTRIQNPDPAVYQLRDSKSSDKSVCLFTDFDSQTNVSQSKDSDVYITDKTVLDMRSMDFKSNSAVAWSNKSDFACANAFNNSIIPEDTFFPSPESSCGFTSESYQQGVLSATILYEILLGKATLYAVLVSALVLMAMVKRKDSRGRAKRSGSGVKQTLNFDLLKLAGDVESNPGPSRGHMTEYKPTVRLATRDDVPRAVRTLAAAFADYPATRHTVDPDRHIERVTELQELFLTRVGLDIGKVWVADDGAAVAVWTTPESVEAGAVFAEIGPRMAELSGSRLAAQQQMEGLLAPHRPKEPAWFLATVGVSPDHQGKGLGSAVVLPGVEAAERAGVPAFLETSAPRNLPFYERLGFTVTADVEVPEGPRTWCMTRKPGA

SEQ ID NO: 19275 - protein, 871 aa, synthetic construct
MALPVTALLLPLALLLHAARPLEEDLKNVFPPEVAVFEPSEAEISHTQKATLVCLATGFYPDHVELSWWVNGKEVHSGVSTDPQPLKEQPALNDSRYCLSSRLRVSATFWQNPRNHFRCQVQFYGLSENDEWTQDRAKPVTQIVSAEAWGRADCDVKLVEKSFETDTNLNFQNLSVIGFRILLLKVAGFNLLMTLRLWSSRAKRSGSGATNFSLLKQAGDVEENPGPTSMALPVTALLLPLALLLHAARPEIVLTQSPATLSLSPGERATLSCRASQSVSSYLAWYQQKPGQAPRLLIYDASNRATGIPARFSGSGSGTDFTLTISSLEPEDFAVYYCQQRSNWPITFGQGTRLEIKGGGGSGGGGSGGGGSEVQLVESGGGLVQPDRSLRLSCAASGFTFHDYAMHWVRQAPGKGLEWVSTISWNSGTIGYADSVKGRFTISRDNAKNSLYLQMNSLRAEDTALYYCAKDIQYGNYYYGMDVWGQGTTVTVSSTRIQNPDPAVYQLRDSKSSDKSVCLFTDFDSQTNVSQSKDSDVYITDKTVLDMRSMDFKSNSAVAWSNKSDFACANAFNNSIIPEDTFFPSPESSCGFTSESYQQGVLSATILYEILLGKATLYAVLVSALVLMAMVKRKDSRGRAKRSGSGVKQTLNFDLLKLAGDVESNPGPSRGHMTEYKPTVRLATRDDVPRAVRTLAAAFADYPATRHTVDPDRHIERVTELQELFLTRVGLDIGKVWVADDGAAVAVWTTPESVEAGAVFAEIGPRMAELSGSRLAAQQQMEGLLAPHRPKEPAWFLATVGVSPDHQGKGLGSAVVLPGVEAAERAGVPAFLETSAPRNLPFYERLGFTVTADVEVPEGPRTWCMTRKPGA

SEQ ID NO: 19276 - protein, 869 aa, synthetic construct
MALPVTALLLPLALLLHAARPLEEDLKNVFPPEVAVFEPSEAEISHTQKATLVCLATGFYPDHVELSWWVNGKEVHSGVSTDPQPLKEQPALNDSRYCLSSRLRVSATFWQNPRNHFRCQVQFYGLSENDEWTQDRAKPVTQIVSAEAWGRADCDVKLVEKSFETDTNLNFQNLSVIGFRILLLKVAGFNLLMTLRLWSSRAKRSGSGATNFSLLKQAGDVEENPGPTSMALPVTALLLPLALLLHAARPDIQMTQSPSSLSASVGDRVTITCRASQDVNTAVAWYQQKPGKAPKLLIYSASFLESGVPSRFSGSRSGTDFTLTISSLQPEDFATYYCQQHYTTPPTFGQTKVEIKRGGGGSGGGGSGGGGSEVQLVESGGGLVQPGGSLRLSCAASGFNIKDTYIHWVRQAPGKGLEWVARIYPTNGYTRYADSVKGRFTISADTSKNTAYLQMNSLRAEDTAVYYCSRWGGDGFYAMDVWGQGTLVTVSSTRIQNPDPAVYQLRDSKSSDKSVCLFTDFDSQTNVSQSKDSDVYITDKTVLDMRSMDFKSNSAVAWSNKSDFACANAFNNSIIPEDTFFPSPESSCGFTSESYQQGVLSATILYEILLGKATLYAVLVSALVLMAMVKRKDSRGRAKRSGSGVKQTLNFDLLKLAGDVESNPGPSRGHMTEYKPTVRLATRDDVPRAVRTLAAAFADYPATRHTVDPDRHIERVTELQELFLTRVGLDIGKVWVADDGAAVAVWTTPESVEAGAVFAEIGPRMAELSGSRLAAQQQMEGLLAPHRPKEPAWFLATVGVSPDHQGKGLGSAVVLPGVEAAERAGVPAFLETSAPRNLPFYERLGFTVTADVEVPEGPRTWCMTRKPGA

SEQ ID NO: 19277 - protein, 748 aa, synthetic construct
MALPVTALLLPLALLLHAARPLEEDLKNVFPPEVAVFEPSEAEISHTQKATLVCLATGFYPDHVELSWWVNGKEVHSGVSTDPQPLKEQPALNDSRYCLSSRLRVSATFWQNPRNHFRCQVQFYGLSENDEWTQDRAKPVTQIVSAEAWGRADCDVKLVEKSFETDTNLNFQNLSVIGFRILLLKVAGFNLLMTLRLWSSRAKRSGSGATNFSLLKQAGDVEENPGPTSMALPVTALLLPLALLLHAARPDEFEVQLVESGGGLVQAGGSLRLSCAASGITFSINTMGWYRQAPGKQRELVALISSIGDTYYADSVKGRFTISRDNAKNTVYLQMNSLKPEDTAVYYCKRFRTAAQGTDYWGQGTQVTVSSTRIQNPDPAVYQLRDSKSSDKSVCLFTDFDSQTNVSQSKDSDVYITDKTVLDMRSMDFKSNSAVAWSNKSDFACANAFNNSIIPEDTFFPSPESSCGFTSESYQQGVLSATILYEILLGKATLYAVLVSALVLMAMVKRKDSRGRAKRSGSGVKQTLNFDLLKLAGDVESNPGPSRGHMTEYKPTVRLATRDDVPRAVRTLAAAFADYPATRHTVDPDRHIERVTELQELFLTRVGLDIGKVWVADDGAAVAVWTTPESVEAGAVFAEIGPRMAELSGSRLAAQQQMEGLLAPHRPKEPAWFLATVGVSPDHQGKGLGSAVVLPGVEAAERAGVPAFLETSAPRNLPFYERLGFTVTADVEVPEGPRTWCMTRKPGA

SEQ ID NO: 19278 - protein, 748 aa, synthetic construct; identical to SEQ ID NO: 19277

SEQ ID NO: 19279 - protein, 1013 aa, synthetic construct
MALPVTALLLPLALLLHAARPLEEDLKNVFPPEVAVFEPSEAEISHTQKATLVCLATGFYPDHVELSWWVNGKEVHSGVSTDPQPLKEQPALNDSRYCLSSRLRVSATFWQNPRNHFRCQVQFYGLSENDEWTQDRAKPVTQIVSAEAWGRADCDVKLVEKSFETDTNLNFQNLSVIGFRILLLKVAGFNLLMTLRLWSSRAKRSGSGATNFSLLKQAGDVEENPGPTSMALPVTALLLPLALLLHAARPQVQLVESGGGLVQAGDSVTLSCTASGRTFSSYALAWFRQRPGKEREFVAGLRWGGPTNYADSVKDRFTISGDSAKHTMYLQMNSLKPEDTAVYYCGYNPGGWAVPSQYEYDSWGQGTQVTVSSGTGGGGSGGGGSGGGGSEFDIQMTQSPSSLSASVGDRVTITCKASDHINNWLAWYQQKPGQAPKLLIYGATTLETGVPSRFSGSGSGTDYTLTISSLQPEDFATYYCQQSWNTPWTFGQGTKLEIKRGGGGSGGGGSGGGGSQVQLQQPGAELVKPGASVKMSCKASGYAFSSYWINWMKQKPGQGLEWIGQIYPGDGDTNYNGKFKGRATLTADTSSSTAYMQLSSLTSEDSAVYFCARSITTVVGCAMDYWGQGTSVTVSSTRIQNPDPAVYQLRDSKSSDKSVCLFTDFDSQTNVSQSKDSDVYITDKTVLDMRSMDFKSNSAVAWSNKSDFACANAFNNSIIPEDTFFPSPESSCGFTSESYQQGVLSATILYEILLGKATLYAVLVSALVLMAMVKRKDSRGRAKRSGSGVKQTLNFDLLKLAGDVESNPGPSRGHMTEYKPTVRLATRDDVPRAVRTLAAAFADYPATRHTVDPDRHIERVTELQELFLTRVGLDIGKVWVADDGAAVAVWTTPESVEAGAVFAEIGPRMAELSGSRLAAQQQMEGLLAPHRPKEPAWFLATVGVSPDHQGKGLGSAVVLPGVEAAERAGVPAFLETSAPRNLPFYERLGFTVTADVEVPEGPRTWCMTRKPGA

SEQ ID NO: 19280 - protein, 1142 aa, synthetic construct
MALPVTALLLPLALLLHAARPLEEDLKNVFPPEVAVFEPSEAEISHTQKATLVCLATGFYPDHVELSWWVNGKEVHSGVSTDPQPLKEQPALNDSRYCLSSRLRVSATFWQNPRNHFRCQVQFYGLSENDEWTQDRAKPVTQIVSAEAWGRADCDVKLVEKSFETDTNLNFQNLSVIGFRILLLKVAGFNLLMTLRLWSSRAKRSGSGATNFSLLKQAGDVEENPGPTSMALPVTALLLPLALLLHAARPEVQLLESGGGLVQPGGSLRLSCAASGFTFSSYAMSWVRQAPGKGLEWVSSISGSGDYIYYADSVKGRFTISRDISKNTLYLQMNSLRAEDTAVYYCAKEGTGANSSLADYRGQGTLVTVSSGGGSGGGSQVQLVESGGGLVQAGDSVTLSCTASGRTFSSYALAWFRQRPGKEREFVAGLRWGGPTNYADSVKDRFTISGDSAKHTMYLQMNSLKPEDTAVYYCGYNPGGWAVPSQYEYDSWGQGTQVTVSSGTGGGGSGGGGSGGGGSEFDIQMTQSPSSLSASVGDRVTITCKASDHINNWLAWYQQKPGQAPKLLIYGATTLETGVPSRFSGSGSGTDYTLTISSLQPEDFATYYCQQSWNTPWTFGQGTKLEIKRGGGGSGGGGSGGGGSQVQLQQPGAELVKPGASVKMSCKASGYAFSSYWINWMKQKPGQGLEWIGQIYPGDGDTNYNGKFKGRATLTADTSSSTAYMQLSSLTSEDSAVYFCARSITTVVGCAMDYWGQGTSVTVSSTRIQNPDPAVYQLRDSKSSDKSVCLFTDFDSQTNVSQSKDSDVYITDKTVLDMRSMDFKSNSAVAWSNKSDFACANAFNNSIIPEDTFFPSPESSCGFTSESYQQGVLSATILYEILLGKATLYAVLVSALVLMAMVKRKDSRGRAKRSGSGVKQTLNFDLLKLAGDVESNPGPSRGHMTEYKPTVRLATRDDVPRAVRTLAAAFADYPATRHTVDPDRHIERVTELQELFLTRVGLDIGKVWVADDGAAVAVWTTPESVEAGAVFAEIGPRMAELSGSRLAAQQQMEGLLAPHRPKEPAWFLATVGVSPDHQGKGLGSAVVLPGVEAAERAGVPAFLETSAPRNLPFYERLGFTVTADVEVPEGPRTWCMTRKPGA

SEQ ID NO: 19281 - protein, 1140 aa, synthetic construct
MALPVTALLLPLALLLHAARPLEEDLKNVFPPEVAVFEPSEAEISHTQKATLVCLATGFYPDHVELSWWVNGKEVHSGVSTDPQPLKEQPALNDSRYCLSSRLRVSATFWQNPRNHFRCQVQFYGLSENDEWTQDRAKPVTQIVSAEAWGRADCDVKLVEKSFETDTNLNFQNLSVIGFRILLLKVAGFNLLMTLRLWSSRAKRSGSGATNFSLLKQAGDVEENPGPTSMALPVTALLLPLALLLHAARPGVTQSPTHLIKTRGQQATLRCSPISGHTSVYWYQQALGLGLQFLLWYDEGEERNRGNFPPRFSGRQFPNYSSELNVNALELEDSALYLCASSLGGPRGLAGLRGDEQFFGPGTRLTVLEGGGSGGGSQVQLVESGGGLVQAGDSVTLSCTASGRTFSSYALAWFRQRPGKEREFVAGLRWGGPTNYADSVKDRFTISGDSAKHTMYLQMNSLKPEDTAVYYCGYNPGGWAVPSQYEYDSWGQGTQVTVSSGTGGGGSGGGGSGGGGSEFDIQMTQSPSSLSASVGDRVTITCKASDHINNWLAWYQQKPGQAPKLLIYGATTLETGVPSRFSGSGSGTDYTLTISSLQPEDFATYYCQQSWNTPWTFGQGTKLEIKRGGGGSGGGGSGGGGSQVQLQQPGAELVKPGASVKMSCKASGYAFSSYWINWMKQKPGQGLEWIGQIYPGDGDTNYNGKFKGRATLTADTSSSTAYMQLSSLTSEDSAVYFCARSITTVVGCAMDYWGQGTSVTVSSTRIQNPDPAVYQLRDSKSSDKSVCLFTDFDSQTNVSQSKDSDVYITDKTVLDMRSMDFKSNSAVAWSNKSDFACANAFNNSIIPEDTFFPSPESSCGFTSESYQQGVLSATILYEILLGKATLYAVLVSALVLMAMVKRKDSRGRAKRSGSGVKQTLNFDLLKLAGDVESNPGPSRGHMTEYKPTVRLATRDDVPRAVRTLAAAFADYPATRHTVDPDRHIERVTELQELFLTRVGLDIGKVWVADDGAAVAVWTTPESVEAGAVFAEIGPRMAELSGSRLAAQQQMEGLLAPHRPKEPAWFLATVGVSPDHQGKGLGSAVVLPGVEAAERAGVPAFLETSAPRNLPFYERLGFTVTADVEVPEGPRTWCMTRKPGA

SEQ ID NO: 19282 - protein, 1134 aa, synthetic construct
MALPVTALLLPLALLLHAARPLEEDLKNVFPPEVAVFEPSEAEISHTQKATLVCLATGFYPDHVELSWWVNGKEVHSGVSTDPQPLKEQPALNDSRYCLSSRLRVSATFWQNPRNHFRCQVQFYGLSENDEWTQDRAKPVTQIVSAEAWGRADCDVKLVEKSFETDTNLNFQNLSVIGFRILLLKVAGFNLLMTLRLWSSRAKRSGSGATNFSLLKQAGDVEENPGPTSMALPVTALLLPLALLLHAARPGVTQSPTHLIKTRGQQATLRCSPISGHTSVYWYQQALGLGLQFLLWYDEGEERNRGNFPPRFSGRQFPNYSSELNVNALELEDSALYLCASSLGGPRGLAGLRGDEQFFGPGTRLTVLEGGGSGGGSGVTQSPTHLIKTRGQQATLRCSPISGHTSVYWYQQALGLGLQFLLWYDEGEERNRGNFPPRFSGRQFPNYSSELNVNALELEDSALYLCASSLGGDELGADGNEQFFGPGTRLTVLEGTGGGGSGGGGSGGGGSEFDIQMTQSPSSLSASVGDRVTITCKASDHINNWLAWYQQKPGQAPKLLIYGATTLETGVPSRFSGSGSGTDYTLTISSLQPEDFATYYCQQSWNTPWTFGQGTKLEIKRGGGGSGGGGSGGGGSQVQLQQPGAELVKPGASVKMSCKASGYAFSSYWINWMKQKPGQGLEWIGQIYPGDGDTNYNGKFKGRATLTADTSSSTAYMQLSSLTSEDSAVYFCARSITTVVGCAMDYWGQGTSVTVSSTRIQNPDPAVYQLRDSKSSDKSVCLFTDFDSQTNVSQSKDSDVYITDKTVLDMRSMDFKSNSAVAWSNKSDFACANAFNNSIIPEDTFFPSPESSCGFTSESYQQGVLSATILYEILLGKATLYAVLVSALVLMAMVKRKDSRGRAKRSGSGVKQTLNFDLLKLAGDVESNPGPSRGHMTEYKPTVRLATRDDVPRAVRTLAAAFADYPATRHTVDPDRHIERVTELQELFLTRVGLDIGKVWVADDGAAVAVWTTPESVEAGAVFAEIGPRMAELSGSRLAAQQQMEGLLAPHRPKEPAWFLATVGVSPDHQGKGLGSAVVLPGVEAAERAGVPAFLETSAPRNLPFYERLGFTVTADVEVPEGPRTWCMTRKPGA

SEQ ID NO: 19283 - protein, 754 aa, synthetic construct
MALPVTALLLPLALLLHAARPLEEDLKNVFPPEVAVFEPSEAEISHTQKATLVCLATGFYPDHVELSWWVNGKEVHSGVSTDPQPLKEQPALNDSRYCLSSRLRVSATFWQNPRNHFRCQVQFYGLSENDEWTQDRAKPVTQIVSAEAWGRADCDVKLVEKSFETDTNLNFQNLSVIGFRILLLKVAGFNLLMTLRLWSSRAKRSGSGATNFSLLKQAGDVEENPGPTSMALPVTALLLPLALLLHAARPDEFGSDLGIKLLFAAAKGQDDEVRILLAAGADVNAKDFEGYTPLHVAAYDGHLEIVEVLLKAGADVNAKDSQGRTPLHEAAYSGHLEIVEVLLKAGADVNAQDDAGETPADLAAAWGHEDIAEVLQKTRIQNPDPAVYQLRDSKSSDKSVCLFTDFDSQTNVSQSKDSDVYITDKTVLDMRSMDFKSNSAVAWSNKSDFACANAFNNSIIPEDTFFPSPESSCGFTSESYQQGVLSATILYEILLGKATLYAVLVSALVLMAMVKRKDSRGRAKRSGSGVKQTLNFDLLKLAGDVESNPGPSRGHMTEYKPTVRLATRDDVPRAVRTLAAAFADYPATRHTVDPDRHIERVTELQELFLTRVGLDIGKVWVADDGAAVAVWTTPESVEAGAVFAEIGPRMAELSGSRLAAQQQMEGLLAPHRPKEPAWFLATVGVSPDHQGKGLGSAVVLPGVEAAERAGVPAFLETSAPRNLPFYERLGFTVTADVEVPEGPRTWCMTRKPGA

SEQ ID NO: 19284 - protein, 683 aa, synthetic construct
MALPVTALLLPLALLLHAARPLEEDLKNVFPPEVAVFEPSEAEISHTQKATLVCLATGFYPDHVELSWWVNGKEVHSGVSTDPQPLKEQPALNDSRYCLSSRLRVSATFWQNPRNHFRCQVQFYGLSENDEWTQDRAKPVTQIVSAEAWGRADCDVKLVEKSFETDTNLNFQNLSVIGFRILLLKVAGFNLLMTLRLWSSRAKRSGSGATNFSLLKQAGDVEENPGPTSMDWIWRILFLVGAATGAHSFEGSGFEYAKEMRNAYWEIALLPNLTNQQKRAPIRKLYDDPSQSSELLSEAKKLNDSQTRIQNPDPAVYQLRDSKSSDKSVCLFTDFDSQTNVSQSKDSDVYITDKTVLDMRSMDFKSNSAVAWSNKSDFACANAFNNSIIPEDTFFPSPESSCGFTSESYQQGVLSATILYEILLGKATLYAVLVSALVLMAMVKRKDSRGRAKRSGSGVKQTLNFDLLKLAGDVESNPGPSRGHMTEYKPTVRLATRDDVPRAVRTLAAAFADYPATRHTVDPDRHIERVTELQELFLTRVGLDIGKVWVADDGAAVAVWTTPESVEAGAVFAEIGPRMAELSGSRLAAQQQMEGLLAPHRPKEPAWFLATVGVSPDHQGKGLGSAVVLPGVEAAERAGVPAFLETSAPRNLPFYERLGFTVTADVEVPEGPRTWCMTRKPGA

SEQ ID NO: 19285 - protein, 905 aa, synthetic construct
MALPVTALLLPLALLLHAARPLEEDLKNVFPPEVAVFEPSEAEISHTQKATLVCLATGFYPDHVELSWWVNGKEVHSGVSTDPQPLKEQPALNDSRYCLSSRLRVSATFWQNPRNHFRCQVQFYGLSENDEWTQDRAKPVTQIVSAEAWGRADCDVKLVEKSFETDTNLNFQNLSVIGFRILLLKVAGFNLLMTLRLWSSRAKRSGSGATNFSLLKQAGDVEENPGPTSMALPVTALLLPLALLLHAARPDEFEVQLVESGGGLVQAGGSLRLSCAASGITFSINTMGWYRQAPGKQRELVALISSIGDTYYADSVKGRFTISRDNAKNTVYLQMNSLKPEDTAVYYCKRFRTAAQGTDYWGQGTQVTVSSLEGGGGSGGGGSGGGGSGSGGSGSGGSGSGGSGSGGSFEVQLVESGGGLVQPGGSLRLSCAASGSIFGFNDMAWYRQAPGKQRELVALISRVGVTSSADSVKGRFTISRVNAKDTVYLQMNSLKPEDTAVYYCYMDQRLDGSTLAYWGQGTQVTVSSTRIQNPDPAVYQLRDSKSSDKSVCLFTDFDSQTNVSQSKDSDVYITDKTVLDMRSMDFKSNSAVAWSNKSDFACANAFNNSIIPEDTFFPSPESSCGFTSESYQQGVLSATILYEILLGKATLYAVLVSALVLMAMVKRKDSRGRAKRSGSGVKQTLNFDLLKLAGDVESNPGPSRGHMTEYKPTVRLATRDDVPRAVRTLAAAFADYPATRHTVDPDRHIERVTELQELFLTRVGLDIGKVWVADDGAAVAVWTTPESVEAGAVFAEIGPRMAELSGSRLAAQQQMEGLLAPHRPKEPAWFLATVGVSPDHQGKGLGSAVVLPGVEAAERAGVPAFLETSAPRNLPFYERLGFTVTADVEVPEGPRTWCMTRKPGA

SEQ ID NO: 19286 - protein, 819 aa, synthetic construct
MALPVTALLLPLALLLHAARPLEEDLKNVFPPEVAVFEPSEAEISHTQKATLVCLATGFYPDHVELSWWVNGKEVHSGVSTDPQPLKEQPALNDSRYCLSSRLRVSATFWQNPRNHFRCQVQFYGLSENDEWTQDRAKPVTQIVSAEAWGRADCDVKLVEKSFETDTNLNFQNLSVIGFRILLLKVAGFNLLMTLRLWSSRAKRSGSGATNFSLLKQAGDVEENPGPTSMALPVTALLLPLALLLHAARPGMRTEDLPKAVVFLEPQWYRVLEKDSVTLKCQGAYSPEDNSTQWFHNESLISSQASSYFIDAATVDDSGEYRCQTNLSTLSDPVQLEVHIGWLLLQAPRWVFKEEDPIHLRCHSWKNTALHKVTYLQNGKGRKYFHHNSDFYIPKATLKDSGSYFCRGLVGSKNVSSETVNITITQGLAVSTISSFFPPGYQTRIQNPDPAVYQLRDSKSSDKSVCLFTDFDSQTNVSQSKDSDVYITDKTVLDMRSMDFKSNSAVAWSNKSDFACANAFNNSIIPEDTFFPSPESSCGFTSESYQQGVLSATILYEILLGKATLYAVLVSALVLMAMVKRKDSRGRAKRSGSGVKQTLNFDLLKLAGDVESNPGPSRGHMTEYKPTVRLATRDDVPRAVRTLAAAFADYPATRHTVDPDRHIERVTELQELFLTRVGLDIGKVWVADDGAAVAVWTTPESVEAGAVFAEIGPRMAELSGSRLAAQQQMEGLLAPHRPKEPAWFLATVGVSPDHQGKGLGSAVVLPGVEAAERAGVPAFLETSAPRNLPFYERLGFTVTADVEVPEGPRTWCMTRKPGA

SEQ ID NO: 19287 - protein, 447 aa, synthetic construct
MALPVTALLLPLALLLHAARPLEEDLKNVFPPEVAVFEPSEAEISHTQKATLVCLATGFYPDHVELSWWVNGKEVHSGVSTDPQPLKEQPALNDSRYCLSSRLRVSATFWQNPRNHFRCQVQFYGLSENDEWTQDRAKPVTQIVSAEAWGRADCDVKLVEKSFETDTNLNFQNLSVIGFRILLLKVAGFNLLMTLRLWSSRAKRSGSGATNFSLLKQAGDVEENPGPTSATMALPVTALLLPLALLLHAARPMDPDLEIRAAFLRQRNTALRTEVAELEQEVQRLENEVSQYETRYGPLGGGKTRIQNPDPAVYQLRDSKSSDKSVCLFTDFDSQTNVSQSKDSDVYITDKTVLDMRSMDFKSNSAVAWSNKSDFACANAFNNSIIPEDTFFPSPESSCGFTSESYQQGVLSATILYEILLGKATLYAVLVSALVLMAMVKRKDSRG

SEQ ID NO: 19288 - protein, 447 aa, synthetic construct
MALPVTALLLPLALLLHAARPLEEDLKNVFPPEVAVFEPSEAEISHTQKATLVCLATGFYPDHVELSWWVNGKEVHSGVSTDPQPLKEQPALNDSRYCLSSRLRVSATFWQNPRNHFRCQVQFYGLSENDEWTQDRAKPVTQIVSAEAWGRADCDVKLVEKSFETDTNLNFQNLSVIGFRILLLKVAGFNLLMTLRLWSSRAKRSGSGATNFSLLKQAGDVEENPGPTSATMALPVTALLLPLALLLHAARPMDPDLEIEAAFLERENTALETRVAELRQRVQRLRNRVSQYRTRYGPLGGGKTRIQNPDPAVYQLRDSKSSDKSVCLFTDFDSQTNVSQSKDSDVYITDKTVLDMRSMDFKSNSAVAWSNKSDFACANAFNNSIIPEDTFFPSPESSCGFTSESYQQGVLSATILYEILLGKATLYAVLVSALVLMAMVKRKDSRG

SEQ ID NO: 19289 - protein, 424 aa, synthetic construct
MALPVTALLLPLALLLHAARPLEEDLKNVFPPEVAVFEPSEAEISHTQKATLVCLATGFYPDHVELSWWVNGKEVHSGVSTDPQPLKEQPALNDSRYCLSSRLRVSATFWQNPRNHFRCQVQFYGLSENDEWTQDRAKPVTQIVSAEAWGRADCDVKLVEKSFETDTNLNFQNLSVIGFRILLLKVAGFNLLMTLRLWSSRAKRSGSGATNFSLLKQAGDVEENPGPTSATMALPVTALLLPLALLLHAARPEVAALEKEVAALEKEVAALEKEVAALEKTRIQNPDPAVYQLRDSKSSDKSVCLFTDFDSQTNVSQSKDSDVYITDKTVLDMRSMDFKSNSAVAWSNKSDFACANAFNNSIIPEDTFFPSPESSCGFTSESYQQGVLSATILYEILLGKATLYAVLVSALVLMAMVKRKDSRG

SEQ ID NO: 19290 - protein, 682 aa, synthetic construct
MALPVTALLLPLALLLHAARPLEEDLKNVFPPEVAVFEPSEAEISHTQKATLVCLATGFYPDHVELSWWVNGKEVHSGVSTDPQPLKEQPALNDSRYCLSSRLRVSATFWQNPRNHFRCQVQFYGLSENDEWTQDRAKPVTQIVSAEAWGRADCDVKLVEKSFETDTNLNFQNLSVIGFRILLLKVAGFNLLMTLRLWSSRAKRSGSGATNFSLLKQAGDVEENPGPTSATMALPVTALLLPLALLLHAARPLFNQEVQIPLTESYCGPCPKNWICYKNNCYQFFDESKNWYESQASCMSQNASLLKVYSKEDQDLLKLVKSAHWMGLVHIPTNGSWQWEDGSILSPNLLTIIEMQKGDCALYASSFKGYIENCSTPNTYICMQRTVSGGGGSGGGGSGGGGDLFNQEVQIPLTESYCGPCPKNWICYKNNCYQFFDESKNWYESQASCMSQNASLLKVYSKEDQDLLKLVKSAHWMGLVHIPTNGSWQWEDGSILSPNLLTIIEMQKGDCALYASSFKGYIENCSTPNTYICMQRTVTRIQNPDPAVYQLRDSKSSDKSVCLFTDFDSQTNVSQSKDSDVYITDKTVLDMRSMDFKSNSAVAWSNKSDFACANAFNNSIIPEDTFFPSPESSCGFTSESYQQGVLSATILYEILLGKATLYAVLVSALVLMAMVKRKDSRG

SEQ ID NO: 19291 - protein, 682 aa, synthetic construct
MALPVTALLLPLALLLHAARPLEEDLKNVFPPEVAVFEPSEAEISHTQKATLVCLATGFYPDHVELSWWVNGKEVHSGVSTDPQPLKEQPALNDSRYCLSSRLRVSATFWQNPRNHFRCQVQFYGLSENDEWTQDRAKPVTQIVSAEAWGRADCDVKLVEKSFETDTNLNFQNLSVIGFRILLLKVAGFNLLMTLRLWSSRAKRSGSGATNFSLLKQAGDVEENPGPTSATMALPVTALLLPLALLLHAARPLFNQEVQIPLTESYCGPCPKNWICYKNNCYQFFDESKNWYESQASCMSQNASLLKVYSKEDQDLLKLVKSAHWMGLVHIPTNGSWQWEDGSILSPNLLTIIEMQKGDCALYASSFKGFIENCSTPNTYICMQRTVGGGGSGGGGSGGGGSDLFNQEVQIPLTESYCGPCPKNWICYKNNCYQFFDESKNWYESQASCMSQNASLLKVYSKEDQDLLKLVKSAHWMGLVHIPTNGSWQWEDGSILSPNLLTIIEMQKGDCALYASSFKGFIENCSTPNTYICMQRTVTRIQNPDPAVYQLRDSKSSDKSVCLFTDFDSQTNVSQSKDSDVYITDKTVLDMRSMDFKSNSAVAWSNKSDFACANAFNNSIIPEDTFFPSPESSCGFTSESYQQGVLSATILYEILLGKATLYAVLVSALVLMAMVKRKDSRG

SEQ ID NO: 19292 - protein, 708 aa, synthetic construct
MALPVTALLLPLALLLHAARPLEEDLKNVFPPEVAVFEPSEAEISHTQKATLVCLATGFYPDHVELSWWVNGKEVHSGVSTDPQPLKEQPALNDSRYCLSSRLRVSATFWQNPRNHFRCQVQFYGLSENDEWTQDRAKPVTQIVSAEAWGRADCDVKLVEKSFETDTNLNFQNLSVIGFRILLLKVAGFNLLMTLRLWSSRAKRSGSGATNFSLLKQAGDVEENPGPTSMALPVTALLLPLALLLHAARPMDPDLEIRAAFLRQRNTALRTEVAELEQEVQRLENEVSQYETRYGPLGGGKGTGGGGSGGGGSGGGGSEFDIQMTQSPSSLSASVGDRVTITCKASDHINNWLAWYQQKPGQAPKLLIYGATTLETGVPSRFSGSGSGTDYTLTISSLQPEDFATYYCQQSWNTPWTFGQGTKLEIKRGGGGSGGGGSGGGGSQVQLQQPGAELVKPGASVKMSCKASGYAFSSYWINWMKQKPGQGLEWIGQIYPGDGDTNYNGKFKGRATLTADTSSSTAYMQLSSLTSEDSAVYFCARSITTVVGCAMDYWGQGTSVTVSSTRIQNPDPAVYQLRDSKSSDKSVCLFTDFDSQTNVSQSKDSDVYITDKTVLDMRSMDFKSNSAVAWSNKSDFACANAFNNSIIPEDTFFPSPESSCGFTSESYQQGVLSATILYEILLGKATLYAVLVSALVLMAMVKRKDSRG

SEQ ID NO: 19293 - protein, 943 aa, synthetic construct
MALPVTALLLPLALLLHAARPLEEDLKNVFPPEVAVFEPSEAEISHTQKATLVCLATGFYPDHVELSWWVNGKEVHSGVSTDPQPLKEQPALNDSRYCLSSRLRVSATFWQNPRNHFRCQVQFYGLSENDEWTQDRAKPVTQIVSAEAWGRADCDVKLVEKSFETDTNLNFQNLSVIGFRILLLKVAGFNLLMTLRLWSSRAKRSGSGATNFSLLKQAGDVEENPGPTSMALPVTALLLPLALLLHAARPLFNQEVQIPLTESYCGPCPKNWICYKNNCYQFFDESKNWYESQASCMSQNASLLKVYSKEDQDLLKLVKSAHWMGLVHIPTNGSWQWEDGSILSPNLLTIIEMQKGDCALYASSFKGFIENCSTPNTYICMQRTVGGGGSGGGGSGGGGSDLFNQEVQIPLTESYCGPCPKNWICYKNNCYQFFDESKNWYESQASCMSQNASLLKVYSKEDQDLLKLVKSAHWMGLVHIPTNGSWQWEDGSILSPNLLTIIEMQKGDCALYASSFKGFIENCSTPNTYICMQRTVGTGGGGSGGGGSGGGGSEFDIQMTQSPSSLSASVGDRVTITCKASDHINNWLAWYQQKPGQAPKLLIYGATTLETGVPSRFSGSGSGTDYTLTISSLQPEDFATYYCQQSWNTPWTFGQGTKLEIKRGGGGSGGGGSGGGGSQVQLQQPGAELVKPGASVKMSCKASGYAFSSYWINWMKQKPGQGLEWIGQIYPGDGDTNYNGKFKGRATLTADTSSSTAYMQLSSLTSEDSAVYFCARSITTVVGCAMDYWGQGTSVTVSSTRIQNPDPAVYQLRDSKSSDKSVCLFTDFDSQTNVSQSKDSDVYITDKTVLDMRSMDFKSNSAVAWSNKSDFACANAFNNSIIPEDTFFPSPESSCGFTSESYQQGVLSATILYEILLGKATLYAVLVSALVLMAMVKRKDSRG

SEQ ID NO: 19294 - protein, 648 aa, synthetic construct
MALPVTALLLPLALLLHAARPLEEDLKNVFPPEVAVFEPSEAEISHTQKATLVCLATGFYPDHVELSWWVNGKEVHSGVSTDPQPLKEQPALNDSRYCLSSRLRVSATFWQNPRNHFRCQVQFYGLSENDEWTQDRAKPVTQIVSAEAWGRADCDVKLVEKSFETDTNLNFQNLSVIGFRILLLKVAGFNLLMTLRLWSSRAKRSGSGATNFSLLKQAGDVEENPGPTSMALPVTALLLPLALLLHAARPQSVLTQPPSVSGAPGQRVTISCTGSSSNIGAGYDVHWYQQLPGTAPKLLIFGNSNRPSGVPDRFSGFKSGTSASLAITGLQAEDEADYFCQSYDSSLSGSGVFGTGTKVTVLGGGGGSGGGGSGGGGSQMQLVQSGGGLVQPGRSLRLSCAASGFTFDDYAMHWVRQAPGKGLEWVSGISWNSGSIGYADSVKGRFTISRDNAKNSLYLQMNSLRAEDTALYYCAKDIHSGSYYGLLYYAMDVWGQGTTVTVSSTRIQNPDPAVYQLRDSKSSDKSVCLFTDFDSQTNVSQSKDSDVYITDKTVLDMRSMDFKSNSAVAWSNKSDFACANAFNNSIIPEDTFFPSPESSCGFTSESYQQGVLSATILYEILLGKATLYAVLVSALVLMAMVKRKDSRG

SEQ ID NO: 19295 - protein, 485 aa, synthetic construct
MALPVTALLLPLALLLHAARPLEEDLKNVFPPEVAVFEPSEAEISHTQKATLVCLATGFYPDHVELSWWVNGKEVHSGVSTDPQPLKEQPALNDSRYCLSSRLRVSATFWQNPRNHFRCQVQFYGLSENDEWTQDRAKPVTQIVSAEAWGRADCDVKLVEKSFETDTNLNFQNLSVIGFRILLLKVAGFNLLMTLRLWSSRAKRSGSGATNFSLLKQAGDVEENPGPTSMALPVTALLLPLALLLHAARPMCMPCFTTDHQMARKCDDCCGGKGRGKCYGPQCLCRLEGGGGSGGGGSGGGGSFEVCMPCFTTDQQMARKCSDCCGGKGRGKCYGPQCLCRTRIQNPDPAVYQLRDSKSSDKSVCLFTDFDSQTNVSQSKDSDVYITDKTVLDMRSMDFKSNSAVAWSNKSDFACANAFNNSIIPEDTFFPSPESSCGFTSESYQQGVLSATILYEILLGKATLYAVLVSALVLMAMVKRKDSRG

SEQ ID NO: 19296 - protein, 748 aa, synthetic construct
MALPVTALLLPLALLLHAARPLEEDLKNVFPPEVAVFEPSEAEISHTQKATLVCLATGFYPDHVELSWWVNGKEVHSGVSTDPQPLKEQPALNDSRYCLSSRLRVSATFWQNPRNHFRCQVQFYGLSENDEWTQDRAKPVTQIVSAEAWGRADCDVKLVEKSFETDTNLNFQNLSVIGFRILLLKVAGFNLLMTLRLWSSRAKRSGSGATNFSLLKQAGDVEENPGPTSMALPVTALLLPLALLLHAARPMCMPCFTTDHQMARKCDDCCGGKGRGKCYGPQCLCRLEGGGGSGGGGSGGGGSFEVCMPCFTTDQQMARKCSDCCGGKGRGKCYGPQCLCRGTGGGGSGGGGSGGGGSEFDIQMTQSPSSLSASVGDRVTITCKASDHINNWLAWYQQKPGQAPKLLIYGATTLETGVPSRFSGSGSGTDYTLTISSLQPEDFATYYCQQSWNTPWTFGQGTKLEIKRGGGGSGGGGSGGGGSQVQLQQPGAELVKPGASVKMSCKASGYAFSSYWINWMKQKPGQGLEWIGQIYPGDGDTNYNGKFKGRATLTADTSSSTAYMQLSSLTSEDSAVYFCARSITTVVGCAMDYWGQGTSVTVSSTRIQNPDPAVYQLRDSKSSDKSVCLFTDFDSQTNVSQSKDSDVYITDKTVLDMRSMDFKSNSAVAWSNKSDFACANAFNNSIIPEDTFFPSPESSCGFTSESYQQGVLSATILYEILLGKATLYAVLVSALVLMAMVKRKDSRG

SEQ ID NO: 19297 - protein, 823 aa, synthetic construct
MALPVTALLLPLALLLHAARPLEEDLKNVFPPEVAVFEPSEAEISHTQKATLVCLATGFYPDHVELSWWVNGKEVHSGVSTDPQPLKEQPALNDSRYCLSSRLRVSATFWQNPRNHFRCQVQFYGLSENDEWTQDRAKPVTQIVSAEAWGRADCDVKLVEKSFETDTNLNFQNLSVIGFRILLLKVAGFNLLMTLRLWSSRAKRSGSGATNFSLLKQAGDVEENPGPTSMALPVTALLLPLALLLHAARPSPVAPACDPRLLNKLLRDSHLLHSRLSQCPDVDPLSIPVLLPAVDFSLGEWKTQTEQSKAQDILGAVSLLLEGVMAARGQLEPSCLSSLLGQLSGQVRLLLGALQGLLGTQLPLQGRTTAHKDPNALFLSLQQLLRGKVRFLLLVEGPTLCVRRTLPTTAVPSSTSGTGGGGSGGGGSGGGGSEFDIQMTQSPSSLSASVGDRVTITCKASDHINNWLAWYQQKPGQAPKLLIYGATTLETGVPSRFSGSGSGTDYTLTISSLQPEDFATYYCQQSWNTPWTFGQGTKLEIKRGGGGSGGGGSGGGGSQVQLQQPGAELVKPGASVKMSCKASGYAFSSYWINWMKQKPGQGLEWIGQIYPGDGDTNYNGKFKGRATLTADTSSSTAYMQLSSLTSEDSAVYFCARSITTVVGCAMDYWGQGTSVTVSSTRIQNPDPAVYQLRDSKSSDKSVCLFTDFDSQTNVSQSKDSDVYITDKTVLDMRSMDFKSNSAVAWSNKSDFACANAFNNSIIPEDTFFPSPESSCGFTSESYQQGVLSATILYEILLGKATLYAVLVSALVLMAMVKRKDSRG

SEQ ID NO: 19298 - protein, 730 aa, synthetic construct
MALPVTALLLPLALLLHAARPLEEDLKNVFPPEVAVFEPSEAEISHTQKATLVCLATGFYPDHVELSWWVNGKEVHSGVSTDPQPLKEQPALNDSRYCLSSRLRVSATFWQNPRNHFRCQVQFYGLSENDEWTQDRAKPVTQIVSAEAWGRADCDVKLVEKSFETDTNLNFQNLSVIGFRILLLKVAGFNLLMTLRLWSSRAKRSGSGATNFSLLKQAGDVEENPGPTSMALPVTALLLPLALLLHAARPMGSWEEFELRLNAIEERLYALGGSEAELAYFEYVIADFEGNLQRYKGKGNPEVEALYFEADAIFEELVAYRHNGTGGGGSGGGGSGGGGSEFDIQMTQSPSSLSASVGDRVTITCKASDHINNWLAWYQQKPGQAPKLLIYGATTLETGVPSRFSGSGSGTDYTLTISSLQPEDFATYYCQQSWNTPWTFGQGTKLEIKRGGGGSGGGGSGGGGSQVQLQQPGAELVKPGASVKMSCKASGYAFSSYWINWMKQKPGQGLEWIGQIYPGDGDTNYNGKFKGRATLTADTSSSTAYMQLSSLTSEDSAVYFCARSITTVVGCAMDYWGQGTSVTVSSTRIQNPDPAVYQLRDSKSSDKSVCLFTDFDSQTNVSQSKDSDVYITDKTVLDMRSMDFKSNSAVAWSNKSDFACANAFNNSIIPEDTFFPSPESSCGFTSESYQQGVLSATILYEILLGKATLYAVLVSALVLMAMVKRKDSRG

SEQ ID NO: 19299 - protein, 869 aa, synthetic construct
MALPVTALLLPLALLLHAARPLEIQNPDPAVYQLRDSKSSDKSVCLFTDFDSQTNVSQSKDSDVYITDKTVLDMRSMDFKSNSAVAWSNKSDFACANAFNNSIIPEDTFFPSPESSCGFTSESYQQGVLSATILYEILLGKATLYAVLVSALVLMAMVKRKDSRGRAKRSGSGATNFSLLKQAGDVEENPGPTSMALPVTALLLPLALLLHAARPDIQMTQTTSSLSASLGDRVTISCRASQDISKYLNWYQQKPDGTVKLLIYHTSRLHSGVPSRFSGSGSGTDYSLTISNLEQEDIATYFCQQGNTLPYTFGGGTKLEITGGGGSGGGGSGGGGSEVKLQESGPGLVAPSQSLSVTCTVSGVSLPDYGVSWIRQPPRKGLEWLGVIWGSETTYYNSALKSRLTIIKDNSKSQVFLKMNSLQTDDTAIYYCAKHYYYGGSYAMDYWGQGTSVTVSSTREDLKNVFPPEVAVFEPSEAEISHTQKATLVCLATGFYPDHVELSWWVNGKEVHSGVSTDPQPLKEQPALNDSRYCLSSRLRVSATFWQNPRNHFRCQVQFYGLSENDEWTQDRAKPVTQIVSAEAWGRADCDVKLVEKSFETDTNLNFQNLSVIGFRILLLKVAGFNLLMTLRLWSSRAKRSGSGVKQTLNFDLLKLAGDVESNPGPSRGHMTEYKPTVRLATRDDVPRAVRTLAAAFADYPATRHTVDPDRHIERVTELQELFLTRVGLDIGKVWVADDGAAVAVWTTPESVEAGAVFAEIGPRMAELSGSRLAAQQQMEGLLAPHRPKEPAWFLATVGVSPDHQGKGLGSAVVLPGVEAAERAGVPAFLETSAPRNLPFYERLGFTVTADVEVPEGPRTWCMTRKPGA

SEQ ID NO: 19300 - protein, 870 aa, synthetic construct
MALPVTALLLPLALLLHAARPLEIQNPDPAVYQLRDSKSSDKSVCLFTDFDSQTNVSQSKDSDVYITDKTVLDMRSMDFKSNSAVAWSNKSDFACANAFNNSIIPEDTFFPSPESSCGFTSESYQQGVLSATILYEILLGKATLYAVLVSALVLMAMVKRKDSRGRAKRSGSGATNFSLLKQAGDVEENPGPTSTMALPVTALLLPLALLLHAARPEIVMTQSPATLSLSPGERATLSCRASQDISKYLNWYQQKPGQAPRLLIYHTSRLHSGIPARFSGSGSGTDYTLTISSLQPEDFAVYFCQQGNTLPYTFGQGTKLEIKGGGGSGGGGSGGGGSQVQLQESGPGLVKPSETLSLTCTVSGVSLPDYGVSWIRQPPGKGLEWIGVIWGSETTYYNSSLKSRVTISKDNSKNQVSLKLSSVTAADTAVYYCAKHYYYGGSYAMDYWGQGTLVTVSSTREDLKNVFPPEVAVFEPSEAEISHTQKATLVCLATGFYPDHVELSWWVNGKEVHSGVSTDPQPLKEQPALNDSRYCLSSRLRVSATFWQNPRNHFRCQVQFYGLSENDEWTQDRAKPVTQIVSAEAWGRADCDVKLVEKSFETDTNLNFQNLSVIGFRILLLKVAGFNLLMTLRLWSSRAKRSGSGVKQTLNFDLLKLAGDVESNPGPSRGHMTEYKPTVRLATRDDVPRAVRTLAAAFADYPATRHTVDPDRHIERVTELQELFLTRVGLDIGKVWVADDGAAVAVWTTPESVEAGAVFAEIGPRMAELSGSRLAAQQQMEGLLAPHRPKEPAWFLATVGVSPDHQGKGLGSAVVLPGVEAAERAGVPAFLETSAPRNLPFYERLGFTVTADVEVPEGPRTWCMTRKPGA

SEQ ID NO: 19301 - protein, 871 aa, synthetic construct
MALPVTALLLPLALLLHAARPLEIQNPDPAVYQLRDSKSSDKSVCLFTDFDSQTNVSQSKDSDVYITDKTVLDMRSMDFKSNSAVAWSNKSDFACANAFNNSIIPEDTFFPSPESSCGFTSESYQQGVLSATILYEILLGKATLYAVLVSALVLMAMVKRKDSRGRAKRSGSGATNFSLLKQAGDVEENPGPTSTMALPVTALLLPLALLLHAARPDEIVLTQSPATLSLSPGERATLSCSASSSVSYMHWYQQKPGQAPRLLIYDTSKLASGIPARFSGSGSGTDFTLTISSLEPEDVAVYYCFQGSVYPFTFGQGTKLEIKRGGGGSGGGGSGGGGSQVQLQESGPGLVKPSQTLSLTCTVSGGSISTSGMGVGWIRQHPGKGLEWIGHIWWDDDKRYNPALKSRVTISVDTSKNQFSLKLSSVTAADTAVYYCARMELWSYYFDYWGQGTLVTVSSTREDLKNVFPPEVAVFEPSEAEISHTQKATLVCLATGFYPDHVELSWWVNGKEVHSGVSTDPQPLKEQPALNDSRYCLSSRLRVSATFWQNPRNHFRCQVQFYGLSENDEWTQDRAKPVTQIVSAEAWGRADCDVKLVEKSFETDTNLNFQNLSVIGFRILLLKVAGFNLLMTLRLWSSRAKRSGSGVKQTLNFDLLKLAGDVESNPGPSRGHMTEYKPTVRLATRDDVPRAVRTLAAAFADYPATRHTVDPDRHIERVTELQELFLTRVGLDIGKVWVADDGAAVAVWTTPESVEAGAVFAEIGPRMAELSGSRLAAQQQMEGLLAPHRPKEPAWFLATVGVSPDHQGKGLGSAVVLPGVEAAERAGVPAFLETSAPRNLPFYERLGFTVTADVEVPEGPRTWCMTRKPGA

SEQ ID NO: 19302 - protein, 867 aa, synthetic construct
MALPVTALLLPLALLLHAARPLEIQNPDPAVYQLRDSKSSDKSVCLFTDFDSQTNVSQSKDSDVYITDKTVLDMRSMDFKSNSAVAWSNKSDFACANAFNNSIIPEDTFFPSPESSCGFTSESYQQGVLSATILYEILLGKATLYAVLVSALVLMAMVKRKDSRGRAKRSGSGATNFSLLKQAGDVEENPGPTSMALPVTALLLPLALLLHAARPDIQMTQSPSSLSASVGDRVTITCRASQDISNYLNWYQQKPGKAPKLLIYYTSRLHSGVPSRFSGSGSGTDFTLTISSLQPEDFATYYCQQGNTLPYTFGQGTKVEIKRGGGGSGGGGSGGGGSEVQLVESGGGLVQPGGSLRLSCAASGFTFSDYFMSWVRQAPGKGLEWVATISNGGTYTYYPDSVKGRFTISRDNSKNTLYLQMNSLRAEDTAVYYCARFDGYIFDYWGQGTLVTVSSTREDLKNVFPPEVAVFEPSEAEISHTQKATLVCLATGFYPDHVELSWWVNGKEVHSGVSTDPQPLKEQPALNDSRYCLSSRLRVSATFWQNPRNHFRCQVQFYGLSENDEWTQDRAKPVTQIVSAEAWGRADCDVKLVEKSFETDTNLNFQNLSVIGFRILLLKVAGFNLLMTLRLWSSRAKRSGSGVKQTLNFDLLKLAGDVESNPGPSRGHMTEYKPTVRLATRDDVPRAVRTLAAAFADYPATRHTVDPDRHIERVTELQELFLTRVGLDIGKVWVADDGAAVAVWTTPESVEAGAVFAEIGPRMAELSGSRLAAQQQMEGLLAPHRPKEPAWFLATVGVSPDHQGKGLGSAVVLPGVEAAERAGVPAFLETSAPRNLPFYERLGFTVTADVEVPEGPRTWCMTRKPGA

SEQ ID NO: 19303 - protein, 871 aa, synthetic construct
MALPVTALLLPLALLLHAARPLEIQNPDPAVYQLRDSKSSDKSVCLFTDFDSQTNVSQSKDSDVYITDKTVLDMRSMDFKSNSAVAWSNKSDFACANAFNNSIIPEDTFFPSPESSCGFTSESYQQGVLSATILYEILLGKATLYAVLVSALVLMAMVKRKDSRGRAKRSGSGATNFSLLKQAGDVEENPGPTSMALPVTALLLPLALLLHAARPDIQMTQSPSSLSASVGDRVTITCKASDHINNWLAWYQQKPGQAPKLLIYGATTLETGVPSRFSGSGSGTDYTLTISSLQPEDFATYYCQQSWNTPWTFGQGTKLEIKRGGGGSGGGGSGGGGSQVQLQQPGAELVKPGASVKMSCKASGYAFSSYWINWMKQKPGQGLEWIGQIYPGDGDTNYNGKFKGRATLTADTSSSTAYMQLSSLTSEDSAVYFCARSITTVVGCAMDYWGQGTSVTVSSTREDLKNVFPPEVAVFEPSEAEISHTQKATLVCLATGFYPDHVELSWWVNGKEVHSGVSTDPQPLKEQPALNDSRYCLSSRLRVSATFWQNPRNHFRCQVQFYGLSENDEWTQDRAKPVTQIVSAEAWGRADCDVKLVEKSFETDTNLNFQNLSVIGFRILLLKVAGFNLLMTLRLWSSRAKRSGSGVKQTLNFDLLKLAGDVESNPGPSRGHMTEYKPTVRLATRDDVPRAVRTLAAAFADYPATRHTVDPDRHIERVTELQELFLTRVGLDIGKVWVADDGAAVAVWTTPESVEAGAVFAEIGPRMAELSGSRLAAQQQMEGLLAPHRPKEPAWFLATVGVSPDHQGKGLGSAVVLPGVEAAERAGVPAFLETSAPRNLPFYERLGFTVTADVEVPEGPRTWCMTRKPGA

SEQ ID NO: 19304 - protein, 873 aa, synthetic construct
MALPVTALLLPLALLLHAARPLEIQNPDPAVYQLRDSKSSDKSVCLFTDFDSQTNVSQSKDSDVYITDKTVLDMRSMDFKSNSAVAWSNKSDFACANAFNNSIIPEDTFFPSPESSCGFTSESYQQGVLSATILYEILLGKATLYAVLVSALVLMAMVKRKDSRGRAKRSGSGATNFSLLKQAGDVEENPGPTSMALPVTALLLPLALLLHAARPQIVLSQSPAILSASPGEKVTMTCRASSSVSYMHWYQQKPGSSPKPWIYATSNLASGVPARFSGSGSGTSYSFTISRVEAEDAATYYCQQWTFNPPTFGGGTRLEIKRTVAAGGGGSGGGGSGGGGSQAYLQQSGAELVRPGASVKMSCKASGYTFTSYNMHWVKQTPRQGLEWIGGIYPGNGDTSYNQKFKGKATLTVGKSSSTAYMQLSSLTSEDSAVYFCARYDYNYAMDYWGQGTSVTVSSASTREDLKNVFPPEVAVFEPSEAEISHTQKATLVCLATGFYPDHVELSWWVNGKEVHSGVSTDPQPLKEQPALNDSRYCLSSRLRVSATFWQNPRNHFRCQVQFYGLSENDEWTQDRAKPVTQIVSAEAWGRADCDVKLVEKSFETDTNLNFQNLSVIGFRILLLKVAGFNLLMTLRLWSSRAKRSGSGVKQTLNFDLLKLAGDVESNPGPSRGHMTEYKPTVRLATRDDVPRAVRTLAAAFADYPATRHTVDPDRHIERVTELQELFLTRVGLDIGKVWVADDGAAVAVWTTPESVEAGAVFAEIGPRMAELSGSRLAAQQQMEGLLAPHRPKEPAWFLATVGVSPDHQGKGLGSAVVLPGVEAAERAGVPAFLETSAPRNLPFYERLGFTVTADVEVPEGPRTWCMTRKPGA

SEQ ID NO: 19305 - protein, 871 aa, synthetic construct
MALPVTALLLPLALLLHAARPLEIQNPDPAVYQLRDSKSSDKSVCLFTDFDSQTNVSQSKDSDVYITDKTVLDMRSMDFKSNSAVAWSNKSDFACANAFNNSIIPEDTFFPSPESSCGFTSESYQQGVLSATILYEILLGKATLYAVLVSALVLMAMVKRKDSRGRAKRSGSGATNFSLLKQAGDVEENPGPTSMALPVTALLLPLALLLHAARPEIVLTQSPATLSLSPGERATLSCRASQSVSSYLAWYQQKPGQAPRLLIYDASNRATGIPARFSGSGSGTDFTLTISSLEPEDFAVYYCQQRSNWPITFGQGTRLEIKGGGGSGGGGSGGGGSEVQLVESGGGLVQPDRSLRLSCAASGFTFHDYAMHWVRQAPGKGLEWVSTISWNSGTIGYADSVKGRFTISRDNAKNSLYLQMNSLRAEDTALYYCAKDIQYGNYYYGMDVWGQGTTVTVSSTREDLKNVFPPEVAVFEPSEAEISHTQKATLVCLATGFYPDHVELSWWVNGKEVHSGVSTDPQPLKEQPALNDSRYCLSSRLRVSATFWQNPRNHFRCQVQFYGLSENDEWTQDRAKPVTQIVSAEAWGRADCDVKLVEKSFETDTNLNFQNLSVIGFRILLLKVAGFNLLMTLRLWSSRAKRSGSGVKQTLNFDLLKLAGDVESNPGPSRGHMTEYKPTVRLATRDDVPRAVRTLAAAFADYPATRHTVDPDRHIERVTELQELFLTRVGLDIGKVWVADDGAAVAVWTTPESVEAGAVFAEIGPRMAELSGSRLAAQQQMEGLLAPHRPKEPAWFLATVGVSPDHQGKGLGSAVVLPGVEAAERAGVPAFLETSAPRNLPFYERLGFTVTADVEVPEGPRTWCMTRKPGA

SEQ ID NO: 19306 - protein, 869 aa, synthetic construct
MALPVTALLLPLALLLHAARPLEIQNPDPAVYQLRDSKSSDKSVCLFTDFDSQTNVSQSKDSDVYITDKTVLDMRSMDFKSNSAVAWSNKSDFACANAFNNSIIPEDTFFPSPESSCGFTSESYQQGVLSATILYEILLGKATLYAVLVSALVLMAMVKRKDSRGRAKRSGSGATNFSLLKQAGDVEENPGPTSMALPVTALLLPLALLLHAARPDIQMTQSPSSLSASVGDRVTITCRASQDVNTAVAWYQQKPGKAPKLLIYSASFLESGVPSRFSGSRSGTDFTLTISSLQPEDFATYYCQQHYTTPPTFGQTKVEIKRGGGGSGGGGSGGGGSEVQLVESGGGLVQPGGSLRLSCAASGFNIKDTYIHWVRQAPGKGLEWVARIYPTNGYTRYADSVKGRFTISADTSKNTAYLQMNSLRAEDTAVYYCSRWGGDGFYAMDVWGQGTLVTVSSTREDLKNVFPPEVAVFEPSEAEISHTQKATLVCLATGFYPDHVELSWWVNGKEVHSGVSTDPQPLKEQPALNDSRYCLSSRLRVSATFWQNPRNHFRCQVQFYGLSENDEWTQDRAKPVTQIVSAEAWGRADCDVKLVEKSFETDTNLNFQNLSVIGFRILLLKVAGFNLLMTLRLWSSRAKRSGSGVKQTLNFDLLKLAGDVESNPGPSRGHMTEYKPTVRLATRDDVPRAVRTLAAAFADYPATRHTVDPDRHIERVTELQELFLTRVGLDIGKVWVADDGAAVAVWTTPESVEAGAVFAEIGPRMAELSGSRLAAQQQMEGLLAPHRPKEPAWFLATVGVSPDHQGKGLGSAVVLPGVEAAERAGVPAFLETSAPRNLPFYERLGFTVTADVEVPEGPRTWCMTRKPGA

SEQ ID NO: 19307 - protein, 748 aa, synthetic construct
MALPVTALLLPLALLLHAARPLEIQNPDPAVYQLRDSKSSDKSVCLFTDFDSQTNVSQSKDSDVYITDKTVLDMRSMDFKSNSAVAWSNKSDFACANAFNNSIIPEDTFFPSPESSCGFTSESYQQGVLSATILYEILLGKATLYAVLVSALVLMAMVKRKDSRGRAKRSGSGATNFSLLKQAGDVEENPGPTSMALPVTALLLPLALLLHAARPDEFEVQLVESGGGLVQAGGSLRLSCAASGITFSINTMGWYRQAPGKQRELVALISSIGDTYYADSVKGRFTISRDNAKNTVYLQMNSLKPEDTAVYYCKRFRTAAQGTDYWGQGTQVTVSSTREDLKNVFPPEVAVFEPSEAEISHTQKATLVCLATGFYPDHVELSWWVNGKEVHSGVSTDPQPLKEQPALNDSRYCLSSRLRVSATFWQNPRNHFRCQVQFYGLSENDEWTQDRAKPVTQIVSAEAWGRADCDVKLVEKSFETDTNLNFQNLSVIGFRILLLKVAGFNLLMTLRLWSSRAKRSGSGVKQTLNFDLLKLAGDVESNPGPSRGHMTEYKPTVRLATRDDVPRAVRTLAAAFADYPATRHTVDPDRHIERVTELQELFLTRVGLDIGKVWVADDGAAVAVWTTPESVEAGAVFAEIGPRMAELSGSRLAAQQQMEGLLAPHRPKEPAWFLATVGVSPDHQGKGLGSAVVLPGVEAAERAGVPAFLETSAPRNLPFYERLGFTVTADVEVPEGPRTWCMTRKPGA

SEQ ID NO: 19308 - protein, 748 aa, synthetic construct; identical to SEQ ID NO: 19307

SEQ ID NO: 19309 - protein, 1013 aa, synthetic construct
MALPVTALLLPLALLLHAARPLEIQNPDPAVYQLRDSKSSDKSVCLFTDFDSQTNVSQSKDSDVYITDKTVLDMRSMDFKSNSAVAWSNKSDFACANAFNNSIIPEDTFFPSPESSCGFTSESYQQGVLSATILYEILLGKATLYAVLVSALVLMAMVKRKDSRGRAKRSGSGATNFSLLKQAGDVEENPGPTSMALPVTALLLPLALLLHAARPQVQLVESGGGLVQAGDSVTLSCTASGRTFSSYALAWFRQRPGKEREFVAGLRWGGPTNYADSVKDRFTISGDSAKHTMYLQMNSLKPEDTAVYYCGYNPGGWAVPSQYEYDSWGQGTQVTVSSGTGGGGSGGGGSGGGGSEFDIQMTQSPSSLSASVGDRVTITCKASDHINNWLAWYQQKPGQAPKLLIYGATTLETGVPSRFSGSGSGTDYTLTISSLQPEDFATYYCQQSWNTPWTFGQGTKLEIKRGGGGSGGGGSGGGGSQVQLQQPGAELVKPGASVKMSCKASGYAFSSYWINWMKQKPGQGLEWIGQIYPGDGDTNYNGKFKGRATLTADTSSSTAYMQLSSLTSEDSAVYFCARSITTVVGCAMDYWGQGTSVTVSSTREDLKNVFPPEVAVFEPSEAEISHTQKATLVCLATGFYPDHVELSWWVNGKEVHSGVSTDPQPLKEQPALNDSRYCLSSRLRVSATFWQNPRNHFRCQVQFYGLSENDEWTQDRAKPVTQIVSAEAWGRADCDVKLVEKSFETDTNLNFQNLSVIGFRILLLKVAGFNLLMTLRLWSSRAKRSGSGVKQTLNFDLLKLAGDVESNPGPSRGHMTEYKPTVRLATRDDVPRAVRTLAAAFADYPATRHTVDPDRHIERVTELQELFLTRVGLDIGKVWVADDGAAVAVWTTPESVEAGAVFAEIGPRMAELSGSRLAAQQQMEGLLAPHRPKEPAWFLATVGVSPDHQGKGLGSAVVLPGVEAAERAGVPAFLETSAPRNLPFYERLGFTVTADVEVPEGPRTWCMTRKPGA

SEQ ID NO: 19310 - protein, 1142 aa, synthetic construct
MALPVTALLLPLALLLHAARPLEIQNPDPAVYQLRDSKSSDKSVCLFTDFDSQTNVSQSKDSDVYITDKTVLDMRSMDFKSNSAVAWSNKSDFACANAFNNSIIPEDTFFPSPESSCGFTSESYQQGVLSATILYEILLGKATLYAVLVSALVLMAMVKRKDSRGRAKRSGSGATNFSLLKQAGDVEENPGPTSMALPVTALLLPLALLLHAARPEVQLLESGGGLVQPGGSLRLSCAASGFTFSSYAMSWVRQAPGKGLEWVSSISGSGDYIYYADSVKGRFTISRDISKNTLYLQMNSLRAEDTAVYYCAKEGTGANSSLADYRGQGTLVTVSSGGGSGGGSQVQLVESGGGLVQAGDSVTLSCTASGRTFSSYALAWFRQRPGKEREFVAGLRWGGPTNYADSVKDRFTISGDSAKHTMYLQMNSLKPEDTAVYYCGYNPGGWAVPSQYEYDSWGQGTQVTVSSGTGGGGSGGGGSGGGGSEFDIQMTQSPSSLSASVGDRVTITCKASDHINNWLAWYQQKPGQAPKLLIYGATTLETGVPSRFSGSGSGTDYTLTISSLQPEDFATYYCQQSWNTPWTFGQGTKLEIKRGGGGSGGGGSGGGGSQVQLQQPGAELVKPGASVKMSCKASGYAFSSYWINWMKQKPGQGLEWIGQIYPGDGDTNYNGKFKGRATLTADTSSSTAYMQLSSLTSEDSAVYFCARSITTVVGCAMDYWGQGTSVTVSSTREDLKNVFPPEVAVFEPSEAEISHTQKATLVCLATGFYPDHVELSWWVNGKEVHSGVSTDPQPLKEQPALNDSRYCLSSRLRVSATFWQNPRNHFRCQVQFYGLSENDEWTQDRAKPVTQIVSAEAWGRADCDVKLVEKSFETDTNLNFQNLSVIGFRILLLKVAGFNLLMTLRLWSSRAKRSGSGVKQTLNFDLLKLAGDVESNPGPSRGHMTEYKPTVRLATRDDVPRAVRTLAAAFADYPATRHTVDPDRHIERVTELQELFLTRVGLDIGKVWVADDGAAVAVWTTPESVEAGAVFAEIGPRMAELSGSRLAAQQQMEGLLAPHRPKEPAWFLATVGVSPDHQGKGLGSAVVLPGVEAAERAGVPAFLETSAPRNLPFYERLGFTVTADVEVPEGPRTWCMTRKPGA

SEQ ID NO: 19311 - protein, 1140 aa, synthetic construct
MALPVTALLLPLALLLHAARPLEIQNPDPAVYQLRDSKSSDKSVCLFTDFDSQTNVSQSKDSDVYITDKTVLDMRSMDFKSNSAVAWSNKSDFACANAFNNSIIPEDTFFPSPESSCGFTSESYQQGVLSATILYEILLGKATLYAVLVSALVLMAMVKRKDSRGRAKRSGSGATNFSLLKQAGDVEENPGPTSMALPVTALLLPLALLLHAARPGVTQSPTHLIKTRGQQATLRCSPISGHTSVYWYQQALGLGLQFLLWYDEGEERNRGNFPPRFSGRQFPNYSSELNVNALELEDSALYLCASSLGGPRGLAGLRGDEQFFGPGTRLTVLEGGGSGGGSQVQLVESGGGLVQAGDSVTLSCTASGRTFSSYALAWFRQRPGKEREFVAGLRWGGPTNYADSVKDRFTISGDSAKHTMYLQMNSLKPEDTAVYYCGYNPGGWAVPSQYEYDSWGQGTQVTVSSGTGGGGSGGGGSGGGGSEFDIQMTQSPSSLSASVGDRVTITCKASDHINNWLAWYQQKPGQAPKLLIYGATTLETGVPSRFSGSGSGTDYTLTISSLQPEDFATYYCQQSWNTPWTFGQGTKLEIKRGGGGSGGGGSGGGGSQVQLQQPGAELVKPGASVKMSCKASGYAFSSYWINWMKQKPGQGLEWIGQIYPGDGDTNYNGKFKGRATLTADTSSSTAYMQLSSLTSEDSAVYFCARSITTVVGCAMDYWGQGTSVTVSSTREDLKNVFPPEVAVFEPSEAEISHTQKATLVCLATGFYPDHVELSWWVNGKEVHSGVSTDPQPLKEQPALNDSRYCLSSRLRVSATFWQNPRNHFRCQVQFYGLSENDEWTQDRAKPVTQIVSAEAWGRADCDVKLVEKSFETDTNLNFQNLSVIGFRILLLKVAGFNLLMTLRLWSSRAKRSGSGVKQTLNFDLLKLAGDVESNPGPSRGHMTEYKPTVRLATRDDVPRAVRTLAAAFADYPATRHTVDPDRHIERVTELQELFLTRVGLDIGKVWVADDGAAVAVWTTPESVEAGAVFAEIGPRMAELSGSRLAAQQQMEGLLAPHRPKEPAWFLATVGVSPDHQGKGLGSAVVLPGVEAAERAGVPAFLETSAPRNLPFYERLGFTVTADVEVPEGPRTWCMTRKPGA

SEQ ID NO: 19312 - protein, 901 aa, synthetic construct
MALPVTALLLPLALLLHAARPLEIQNPDPAVYQLRDSKSSDKSVCLFTDFDSQTNVSQSKDSDVYITDKTVLDMRSMDFKSNSAVAWSNKSDFACANAFNNSIIPEDTFFPSPESSCGFTSESYQQGVLSATILYEILLGKATLYAVLVSALVLMAMVKRKDSRGRAKRSGSGATNFSLLKQAGDVEENPGPTSMALPVTALLLPLALLLHAARPGVTQSPTHLIKTRGQQATLRCSPISGHTSVYWYQQALGLGLQFLLWYDEGEERNRGNFPPRFSGRQFPNYSSELNVNALELEDSALYLCASSLGGPRGLAGLRGDEQFFGPGTRLTVLEGGGSGGGSGVTQSPTHLIKTRGQQATLRCSPISGHTSVYWYQQALGLGLQFLLWYDEGEERNRGNFPPRFSGRQFPNYSSELNVNALELEDSALYLCASSLGGDELGADGNEQFFGPGTRLTVLEGTGGGGSGGGGSGGGGSEFDIQMTQSPSSLSASVGDRVTITCKASDHINNWLAWYQQKPGQAPKLLIYGATTLETGVPSRFSGSGSGTDYTLTISSLQPEDFATYYCQQSWNTPWTFGQGTKLEIKRGGGGSGGGGSGGGGSQVQLQQPGAELVKPGASVKMSCKASGYAFSSYWINWMKQKPGQGLEWIGQIYPGDGDTNYNGKFKGRATLTADTSSSTAYMQLSSLTSEDSAVYFCARSITTVVGCAMDYWGQGTSVTVSSTREDLKNVFPPEVAVFEPSEAEISHTQKATLVCLATGFYPDHVELSWWVNGKEVHSGVSTDPQPLKEQPALNDSRYCLSSRLRVSATFWQNPRNHFRCQVQFYGLSENDEWTQDRAKPVTQIVSAEAWGRADCDVKLVEKSFETDTNLNFQNLSVIGFRILLLKVAGFNLLMTLRLWSS

SEQ ID NO: 19313 - protein, 754 aa, synthetic construct
MALPVTALLLPLALLLHAARPLEIQNPDPAVYQLRDSKSSDKSVCLFTDFDSQTNVSQSKDSDVYITDKTVLDMRSMDFKSNSAVAWSNKSDFACANAFNNSIIPEDTFFPSPESSCGFTSESYQQGVLSATILYEILLGKATLYAVLVSALVLMAMVKRKDSRGRAKRSGSGATNFSLLKQAGDVEENPGPTSMALPVTALLLPLALLLHAARPDEFGSDLGIKLLFAAAKGQDDEVRILLAAGADVNAKDFEGYTPLHVAAYDGHLEIVEVLLKAGADVNAKDSQGRTPLHEAAYSGHLEIVEVLLKAGADVNAQDDAGETPADLAAAWGHEDIAEVLQKTREDLKNVFPPEVAVFEPSEAEISHTQKATLVCLATGFYPDHVELSWWVNGKEVHSGVSTDPQPLKEQPALNDSRYCLSSRLRVSATFWQNPRNHFRCQVQFYGLSENDEWTQDRAKPVTQIVSAEAWGRADCDVKLVEKSFETDTNLNFQNLSVIGFRILLLKVAGFNLLMTLRLWSSRAKRSGSGVKQTLNFDLLKLAGDVESNPGPSRGHMTEYKPTVRLATRDDVPRAVRTLAAAFADYPATRHTVDPDRHIERVTELQELFLTRVGLDIGKVWVADDGAAVAVWTTPESVEAGAVFAEIGPRMAELSGSRLAAQQQMEGLLAPHRPKEPAWFLATVGVSPDHQGKGLGSAVVLPGVEAAERAGVPAFLETSAPRNLPFYERLGFTVTADVEVPEGPRTWCMTRKPGA

SEQ ID NO: 19314 - protein, 683 aa, synthetic construct
MALPVTALLLPLALLLHAARPLEIQNPDPAVYQLRDSKSSDKSVCLFTDFDSQTNVSQSKDSDVYITDKTVLDMRSMDFKSNSAVAWSNKSDFACANAFNNSIIPEDTFFPSPESSCGFTSESYQQGVLSATILYEILLGKATLYAVLVSALVLMAMVKRKDSRGRAKRSGSGATNFSLLKQAGDVEENPGPTSMDWIWRILFLVGAATGAHSFEGSGFEYAKEMRNAYWEIALLPNLTNQQKRAPIRKLYDDPSQSSELLSEAKKLNDSQTREDLKNVFPPEVAVFEPSEAEISHTQKATLVCLATGFYPDHVELSWWVNGKEVHSGVSTDPQPLKEQPALNDSRYCLSSRLRVSATFWQNPRNHFRCQVQFYGLSENDEWTQDRAKPVTQIVSAEAWGRADCDVKLVEKSFETDTNLNFQNLSVIGFRILLLKVAGFNLLMTLRLWSSRAKRSGSGVKQTLNFDLLKLAGDVESNPGPSRGHMTEYKPTVRLATRDDVPRAVRTLAAAFADYPATRHTVDPDRHIERVTELQELFLTRVGLDIGKVWVADDGAAVAVWTTPESVEAGAVFAEIGPRMAELSGSRLAAQQQMEGLLAPHRPKEPAWFLATVGVSPDHQGKGLGSAVVLPGVEAAERAGVPAFLETSAPRNLPFYERLGFTVTADVEVPEGPRTWCMTRKPGA

SEQ ID NO: 19315 - protein, 905 aa, synthetic construct
MALPVTALLLPLALLLHAARPLEIQNPDPAVYQLRDSKSSDKSVCLFTDFDSQTNVSQSKDSDVYITDKTVLDMRSMDFKSNSAVAWSNKSDFACANAFNNSIIPEDTFFPSPESSCGFTSESYQQGVLSATILYEILLGKATLYAVLVSALVLMAMVKRKDSRGRAKRSGSGATNFSLLKQAGDVEENPGPTSMALPVTALLLPLALLLHAARPDEFEVQLVESGGGLVQAGGSLRLSCAASGITFSINTMGWYRQAPGKQRELVALISSIGDTYYADSVKGRFTISRDNAKNTVYLQMNSLKPEDTAVYYCKRFRTAAQGTDYWGQGTQVTVSSLEGGGGSGGGGSGGGGSGSGGSGSGGSGSGGSGSGGSFEVQLVESGGGLVQPGGSLRLSCAASGSIFGFNDMAWYRQAPGKQRELVALISRVGVTSSADSVKGRFTISRVNAKDTVYLQMNSLKPEDTAVYYCYMDQRLDGSTLAYWGQGTQVTVSSTREDLKNVFPPEVAVFEPSEAEISHTQKATLVCLATGFYPDHVELSWWVNGKEVHSGVSTDPQPLKEQPALNDSRYCLSSRLRVSATFWQNPRNHFRCQVQFYGLSENDEWTQDRAKPVTQIVSAEAWGRADCDVKLVEKSFETDTNLNFQNLSVIGFRILLLKVAGFNLLMTLRLWSSRAKRSGSGVKQTLNFDLLKLAGDVESNPGPSRGHMTEYKPTVRLATRDDVPRAVRTLAAAFADYPATRHTVDPDRHIERVTELQELFLTRVGLDIGKVWVADDGAAVAVWTTPESVEAGAVFAEIGPRMAELSGSRLAAQQQMEGLLAPHRPKEPAWFLATVGVSPDHQGKGLGSAVVLPGVEAAERAGVPAFLETSAPRNLPFYERLGFTVTADVEVPEGPRTWCMTRKPGA

SEQ ID NO: 19316 - protein, 819 aa, synthetic construct
MALPVTALLLPLALLLHAARPLEIQNPDPAVYQLRDSKSSDKSVCLFTDFDSQTNVSQSKDSDVYITDKTVLDMRSMDFKSNSAVAWSNKSDFACANAFNNSIIPEDTFFPSPESSCGFTSESYQQGVLSATILYEILLGKATLYAVLVSALVLMAMVKRKDSRGRAKRSGSGATNFSLLKQAGDVEENPGPTSMALPVTALLLPLALLLHAARPGMRTEDLPKAVVFLEPQWYRVLEKDSVTLKCQGAYSPEDNSTQWFHNESLISSQASSYFIDAATVDDSGEYRCQTNLSTLSDPVQLEVHIGWLLLQAPRWVFKEEDPIHLRCHSWKNTALHKVTYLQNGKGRKYFHHNSDFYIPKATLKDSGSYFCRGLVGSKNVSSETVNITITQGLAVSTISSFFPPGYQTREDLKNVFPPEVAVFEPSEAEISHTQKATLVCLATGFYPDHVELSWWVNGKEVHSGVSTDPQPLKEQPALNDSRYCLSSRLRVSATFWQNPRNHFRCQVQFYGLSENDEWTQDRAKPVTQIVSAEAWGRADCDVKLVEKSFETDTNLNFQNLSVIGFRILLLKVAGFNLLMTLRLWSSRAKRSGSGVKQTLNFDLLKLAGDVESNPGPSRGHMTEYKPTVRLATRDDVPRAVRTLAAAFADYPATRHTVDPDRHIERVTELQELFLTRVGLDIGKVWVADDGAAVAVWTTPESVEAGAVFAEIGPRMAELSGSRLAAQQQMEGLLAPHRPKEPAWFLATVGVSPDHQGKGLGSAVVLPGVEAAERAGVPAFLETSAPRNLPFYERLGFTVTADVEVPEGPRTWCMTRKPGA

SEQ ID NO: 19317 - protein, 447 aa, synthetic construct
MALPVTALLLPLALLLHAARPLEIQNPDPAVYQLRDSKSSDKSVCLFTDFDSQTNVSQSKDSDVYITDKTVLDMRSMDFKSNSAVAWSNKSDFACANAFNNSIIPEDTFFPSPESSCGFTSESYQQGVLSATILYEILLGKATLYAVLVSALVLMAMVKRKDSRGRAKRSGSGATNFSLLKQAGDVEENPGPTSATMALPVTALLLPLALLLHAARPMDPDLEIRAAFLRQRNTALRTEVAELEQEVQRLENEVSQYETRYGPLGGGKTREDLKNVFPPEVAVFEPSEAEISHTQKATLVCLATGFYPDHVELSWWVNGKEVHSGVSTDPQPLKEQPALNDSRYCLSSRLRVSATFWQNPRNHFRCQVQFYGLSENDEWTQDRAKPVTQIVSAEAWGRADCDVKLVEKSFETDTNLNFQNLSVIGFRILLLKVAGFNLLMTLRLWSS

SEQ ID NO: 19318 - protein, 447 aa, synthetic construct
MALPVTALLLPLALLLHAARPLEIQNPDPAVYQLRDSKSSDKSVCLFTDFDSQTNVSQSKDSDVYITDKTVLDMRSMDFKSNSAVAWSNKSDFACANAFNNSIIPEDTFFPSPESSCGFTSESYQQGVLSATILYEILLGKATLYAVLVSALVLMAMVKRKDSRGRAKRSGSGATNFSLLKQAGDVEENPGPTSATMALPVTALLLPLALLLHAARPMDPDLEIEAAFLERENTALETRVAELRQRVQRLRNRVSQYRTRYGPLGGGKTREDLKNVFPPEVAVFEPSEAEISHTQKATLVCLATGFYPDHVELSWWVNGKEVHSGVSTDPQPLKEQPALNDSRYCLSSRLRVSATFWQNPRNHFRCQVQFYGLSENDEWTQDRAKPVTQIVSAEAWGRADCDVKLVEKSFETDTNLNFQNLSVIGFRILLLKVAGFNLLMTLRLWSS

SEQ ID NO: 19319 - protein, 682 aa, synthetic construct
MALPVTALLLPLALLLHAARPLEIQNPDPAVYQLRDSKSSDKSVCLFTDFDSQTNVSQSKDSDVYITDKTVLDMRSMDFKSNSAVAWSNKSDFACANAFNNSIIPEDTFFPSPESSCGFTSESYQQGVLSATILYEILLGKATLYAVLVSALVLMAMVKRKDSRGRAKRSGSGATNFSLLKQAGDVEENPGPTSATMALPVTALLLPLALLLHAARPLFNQEVQIPLTESYCGPCPKNWICYKNNCYQFFDESKNWYESQASCMSQNASLLKVYSKEDQDLLKLVKSAHWMGLVHIPTNGSWQWEDGSILSPNLLTIIEMQKGDCALYASSFKGYIENCSTPNTYICMQRTVSGGGGSGGGGSGGGGDLFNQEVQIPLTESYCGPCPKNWICYKNNCYQFFDESKNWYESQASCMSQNASLLKVYSKEDQDLLKLVKSAHWMGLVHIPTNGSWQWEDGSILSPNLLTIIEMQKGDCALYASSFKGYIENCSTPNTYICMQRTVTREDLKNVFPPEVAVFEPSEAEISHTQKATLVCLATGFYPDHVELSWWVNGKEVHSGVSTDPQPLKEQPALNDSRYCLSSRLRVSATFWQNPRNHFRCQVQFYGLSENDEWTQDRAKPVTQIVSAEAWGRADCDVKLVEKSFETDTNLNFQNLSVIGFRILLLKVAGFNLLMTLRLWSS

SEQ ID NO: 19320 - protein, 682 aa, synthetic construct
MALPVTALLLPLALLLHAARPLEIQNPDPAVYQLRDSKSSDKSVCLFTDFDSQTNVSQSKDSDVYITDKTVLDMRSMDFKSNSAVAWSNKSDFACANAFNNSIIPEDTFFPSPESSCGFTSESYQQGVLSATILYEILLGKATLYAVLVSALVLMAMVKRKDSRGRAKRSGSGATNFSLLKQAGDVEENPGPTSATMALPVTALLLPLALLLHAARPLFNQEVQIPLTESYCGPCPKNWICYKNNCYQFFDESKNWYESQASCMSQNASLLKVYSKEDQDLLKLVKSAHWMGLVHIPTNGSWQWEDGSILSPNLLTIIEMQKGDCALYASSFKGFIENCSTPNTYICMQRTVGGGGSGGGGSGGGGSDLFNQEVQIPLTESYCGPCPKNWICYKNNCYQFFDESKNWYESQASCMSQNASLLKVYSKEDQDLLKLVKSAHWMGLVHIPTNGSWQWEDGSILSPNLLTIIEMQKGDCALYASSFKGFIENCSTPNTYICMQRTVTREDLKNVFPPEVAVFEPSEAEISHTQKATLVCLATGFYPDHVELSWWVNGKEVHSGVSTDPQPLKEQPALNDSRYCLSSRLRVSATFWQNPRNHFRCQVQFYGLSENDEWTQDRAKPVTQIVSAEAWGRADCDVKLVEKSFETDTNLNFQNLSVIGFRILLLKVAGFNLLMTLRLWSS

SEQ ID NO: 19321 - protein, 708 aa, synthetic construct
MALPVTALLLPLALLLHAARPLEIQNPDPAVYQLRDSKSSDKSVCLFTDFDSQTNVSQSKDSDVYITDKTVLDMRSMDFKSNSAVAWSNKSDFACANAFNNSIIPEDTFFPSPESSCGFTSESYQQGVLSATILYEILLGKATLYAVLVSALVLMAMVKRKDSRGRAKRSGSGATNFSLLKQAGDVEENPGPTSMALPVTALLLPLALLLHAARPMDPDLEIRAAFLRQRNTALRTEVAELEQEVQRLENEVSQYETRYGPLGGGKGTGGGGSGGGGSGGGGSEFDIQMTQSPSSLSASVGDRVTITCKASDHINNWLAWYQQKPGQAPKLLIYGATTLETGVPSRFSGSGSGTDYTLTISSLQPEDFATYYCQQSWNTPWTFGQGTKLEIKRGGGGSGGGGSGGGGSQVQLQQPGAELVKPGASVKMSCKASGYAFSSYWINWMKQKPGQGLEWIGQIYPGDGDTNYNGKFKGRATLTADTSSSTAYMQLSSLTSEDSAVYFCARSITTVVGCAMDYWGQGTSVTVSSTREDLKNVFPPEVAVFEPSEAEISHTQKATLVCLATGFYPDHVELSWWVNGKEVHSGVSTDPQPLKEQPALNDSRYCLSSRLRVSATFWQNPRNHFRCQVQFYGLSENDEWTQDRAKPVTQIVSAEAWGRADCDVKLVEKSFETDTNLNFQNLSVIGFRILLLKVAGFNLLMTLRLWSS

SEQ ID NO: 19322 - protein, 943 aa, synthetic construct
MALPVTALLLPLALLLHAARPLEIQNPDPAVYQLRDSKSSDKSVCLFTDFDSQTNVSQSKDSDVYITDKTVLDMRSMDFKSNSAVAWSNKSDFACANAFNNSIIPEDTFFPSPESSCGFTSESYQQGVLSATILYEILLGKATLYAVLVSALVLMAMVKRKDSRGRAKRSGSGATNFSLLKQAGDVEENPGPTSMALPVTALLLPLALLLHAARPLFNQEVQIPLTESYCGPCPKNWICYKNNCYQFFDESKNWYESQASCMSQNASLLKVYSKEDQDLLKLVKSAHWMGLVHIPTNGSWQWEDGSILSPNLLTIIEMQKGDCALYASSFKGFIENCSTPNTYICMQRTVGGGGSGGGGSGGGGSDLFNQEVQIPLTESYCGPCPKNWICYKNNCYQFFDESKNWYESQASCMSQNASLLKVYSKEDQDLLKLVKSAHWMGLVHIPTNGSWQWEDGSILSPNLLTIIEMQKGDCALYASSFKGFIENCSTPNTYICMQRTVGTGGGGSGGGGSGGGGSEFDIQMTQSPSSLSASVGDRVTITCKASDHINNWLAWYQQKPGQAPKLLIYGATTLETGVPSRFSGSGSGTDYTLTISSLQPEDFATYYCQQSWNTPWTFGQGTKLEIKRGGGGSGGGGSGGGGSQVQLQQPGAELVKPGASVKMSCKASGYAFSSYWINWMKQKPGQGLEWIGQIYPGDGDTNYNGKFKGRATLTADTSSSTAYMQLSSLTSEDSAVYFCARSITTVVGCAMDYWGQGTSVTVSSTREDLKNVFPPEVAVFEPSEAEISHTQKATLVCLATGFYPDHVELSWWVNGKEVHSGVSTDPQPLKEQPALNDSRYCLSSRLRVSATFWQNPRNHFRCQVQFYGLSENDEWTQDRAKPVTQIVSAEAWGRADCDVKLVEKSFETDTNLNFQNLSVIGFRILLLKVAGFNLLMTLRLWSS

SEQ ID NO: 19323 - protein, 648 aa, synthetic construct
MALPVTALLLPLALLLHAARPLEIQNPDPAVYQLRDSKSSDKSVCLFTDFDSQTNVSQSKDSDVYITDKTVLDMRSMDFKSNSAVAWSNKSDFACANAFNNSIIPEDTFFPSPESSCGFTSESYQQGVLSATILYEILLGKATLYAVLVSALVLMAMVKRKDSRGRAKRSGSGATNFSLLKQAGDVEENPGPTSMALPVTALLLPLALLLHAARPQSVLTQPPSVSGAPGQRVTISCTGSSSNIGAGYDVHWYQQLPGTAPKLLIFGNSNRPSGVPDRFSGFKSGTSASLAITGLQAEDEADYFCQSYDSSLSGSGVFGTGTKVTVLGGGGGSGGGGSGGGGSQMQLVQSGGGLVQPGRSLRLSCAASGFTFDDYAMHWVRQAPGKGLEWVSGISWNSGSIGYADSVKGRFTISRDNAKNSLYLQMNSLRAEDTALYYCAKDIHSGSYYGLLYYAMDVWGQGTTVTVSSTREDLKNVFPPEVAVFEPSEAEISHTQKATLVCLATGFYPDHVELSWWVNGKEVHSGVSTDPQPLKEQPALNDSRYCLSSRLRVSATFWQNPRNHFRCQVQFYGLSENDEWTQDRAKPVTQIVSAEAWGRADCDVKLVEKSFETDTNLNFQNLSVIGFRILLLKVAGFNLLMTLRLWSS

SEQ ID NO: 19324 - protein, 485 aa, synthetic construct
MALPVTALLLPLALLLHAARPLEIQNPDPAVYQLRDSKSSDKSVCLFTDFDSQTNVSQSKDSDVYITDKTVLDMRSMDFKSNSAVAWSNKSDFACANAFNNSIIPEDTFFPSPESSCGFTSESYQQGVLSATILYEILLGKATLYAVLVSALVLMAMVKRKDSRGRAKRSGSGATNFSLLKQAGDVEENPGPTSMALPVTALLLPLALLLHAARPMCMPCFTTDHQMARKCDDCCGGKGRGKCYGPQCLCRLEGGGGSGGGGSGGGGSFEVCMPCFTTDQQMARKCSDCCGGKGRGKCYGPQCLCRTREDLKNVFPPEVAVFEPSEAEISHTQKATLVCLATGFYPDHVELSWWVNGKEVHSGVSTDPQPLKEQPALNDSRYCLSSRLRVSATFWQNPRNHFRCQVQFYGLSENDEWTQDRAKPVTQIVSAEAWGRADCDVKLVEKSFETDTNLNFQNLSVIGFRILLLKVAGFNLLMTLRLWSS

SEQ ID NO: 19325 - protein, 695 aa, synthetic construct
MALPVTALLLPLALLLHAARPLEIQNPDPAVYQLRDSKSSDKSVCLFTDFDSQTNVSQSKDSDVYITDKTVLDMRSMDFKSNSAVAWSNKSDFACANAFNNSIIPEDTFFPSPESSCGFTSESYQQGVLSATILYEILLGKATLYAVLVSALVLMAMVKRKDSRGRAKRSGSGATNFSLLKQAGDVEENPGPTSMALPVTALLLPLALLLHAARPFEVCMPCFTTDQQMARKCSDCCGGKGRGKCYGPQCLCRGTGGGGSGGGGSGGGGSEFDIQMTQSPSSLSASVGDRVTITCKASDHINNWLAWYQQKPGQAPKLLIYGATTLETGVPSRFSGSGSGTDYTLTISSLQPEDFATYYCQQSWNTPWTFGQGTKLEIKRGGGGSGGGGSGGGGSQVQLQQPGAELVKPGASVKMSCKASGYAFSSYWINWMKQKPGQGLEWIGQIYPGDGDTNYNGKFKGRATLTADTSSSTAYMQLSSLTSEDSAVYFCARSITTVVGCAMDYWGQGTSVTVSSTREDLKNVFPPEVAVFEPSEAEISHTQKATLVCLATGFYPDHVELSWWVNGKEVHSGVSTDPQPLKEQPALNDSRYCLSSRLRVSATFWQNPRNHFRCQVQFYGLSENDEWTQDRAKPVTQIVSAEAWGRADCDVKLVEKSFETDTNLNFQNLSVIGFRILLLKVAGFNLLMTLRLWSS

SEQ ID NO: 19326 - protein, 825 aa, synthetic construct
MALPVTALLLPLALLLHAARPLEIQNPDPAVYQLRDSKSSDKSVCLFTDFDSQTNVSQSKDSDVYITDKTVLDMRSMDFKSNSAVAWSNKSDFACANAFNNSIIPEDTFFPSPESSCGFTSESYQQGVLSATILYEILLGKATLYAVLVSALVLMAMVKRKDSRGRAKRSGSGATNFSLLKQAGDVEENPGPTSMALPVTALLLPLALLLHAARPFESPVAPACDPRLLNKLLRDSHLLHSRLSQCPDVDPLSIPVLLPAVDFSLGEWKTQTEQSKAQDILGAVSLLLEGVMAARGQLEPSCLSSLLGQLSGQVRLLLGALQGLLGTQLPLQGRTTAHKDPNALFLSLQQLLRGKVRFLLLVEGPTLCVRRTLPTTAVPSSTSGTGGGGSGGGGSGGGGSEFDIQMTQSPSSLSASVGDRVTITCKASDHINNWLAWYQQKPGQAPKLLIYGATTLETGVPSRFSGSGSGTDYTLTISSLQPEDFATYYCQQSWNTPWTFGQGTKLEIKRGGGGSGGGGSGGGGSQVQLQQPGAELVKPGASVKMSCKASGYAFSSYWINWMKQKPGQGLEWIGQIYPGDGDTNYNGKFKGRATLTADTSSSTAYMQLSSLTSEDSAVYFCARSITTVVGCAMDYWGQGTSVTVSSTREDLKNVFPPEVAVFEPSEAEISHTQKATLVCLATGFYPDHVELSWWVNGKEVHSGVSTDPQPLKEQPALNDSRYCLSSRLRVSATFWQNPRNHFRCQVQFYGLSENDEWTQDRAKPVTQIVSAEAWGRADCDVKLVEKSFETDTNLNFQNLSVIGFRILLLKVAGFNLLMTLRLWSS

SEQ ID NO: 19327 - protein, 732 aa, synthetic construct
MALPVTALLLPLALLLHAARPLEIQNPDPAVYQLRDSKSSDKSVCLFTDFDSQTNVSQSKDSDVYITDKTVLDMRSMDFKSNSAVAWSNKSDFACANAFNNSIIPEDTFFPSPESSCGFTSESYQQGVLSATILYEILLGKATLYAVLVSALVLMAMVKRKDSRGRAKRSGSGATNFSLLKQAGDVEENPGPTSMALPVTALLLPLALLLHAARPFEMGSWEEFELRLNAIEERLYALGGSEAELAYFEYVIADFEGNLQRYKGKGNPEVEALYFEADAIFEELVAYRHNGTGGGGSGGGGSGGGGSEFDIQMTQSPSSLSASVGDRVTITCKASDHINNWLAWYQQKPGQAPKLLIYGATTLETGVPSRFSGSGSGTDYTLTISSLQPEDFATYYCQQSWNTPWTFGQGTKLEIKRGGGGSGGGGSGGGGSQVQLQQPGAELVKPGASVKMSCKASGYAFSSYWINWMKQKPGQGLEWIGQIYPGDGDTNYNGKFKGRATLTADTSSSTAYMQLSSLTSEDSAVYFCARSITTVVGCAMDYWGQGTSVTVSSTREDLKNVFPPEVAVFEPSEAEISHTQKATLVCLATGFYPDHVELSWWVNGKEVHSGVSTDPQPLKEQPALNDSRYCLSSRLRVSATFWQNPRNHFRCQVQFYGLSENDEWTQDRAKPVTQIVSAEAWGRADCDVKLVEKSFETDTNLNFQNLSVIGFRILLLKVAGFNLLMTLRLWSS

SEQ ID NO: 19328 - protein, 973 aa, synthetic construct
MALPVTALLLPLALLLHAARPLEEDLKNVFPPEVAVFEPSEAEISHTQKATLVCLATGFYPDHVELSWWVNGKEVHSGVCTDPQPLKEQPALNDSRYCLSSRLRVSATFWQNPRNHFRCQVQFYGLSENDEWTQDRAKPVTQIVSAEAWGRADDVIKIHWQEKKSNTILGSQEGNTMKTNDTYMKFSWLTVPEKSLDKEHRCIVRHENNKNGVDQEIIFPPIKTDVITMDPKDNCSKDANDTLLLQLTNTSAYYMYLLLLLKSVVYFAIITCCLLMAMVKRKDSRGRAKRSGSGATNFSLLKQAGDVEENPGPTSMALPVTALLLPLALLLHAARPDIQMTQTTSSLSASLGDRVTISCRASQDISKYLNWYQQKPDGTVKLLIYHTSRLHSGVPSRFSGSGSGTDYSLTISNLEQEDIATYFCQQGNTLPYTFGGGTKLEITGGGGSGGGGSGGGGSEVKLQESGPGLVAPSQSLSVTCTVSGVSLPDYGVSWIRQPPRKGLEWLGVIWGSETTYYNSALKSRLTIIKDNSKSQVFLKMNSLQTDDTAIYYCAKHYYYGGSYAMDYWGQGTSVTVSSTRIQNPDPAVYQLRDSKSSDKSVCLFTDFDSQTNVSQSKDSDVYITDKCVLDMRSMDFKSNSAVAWSNKSDFACANAFNNSIIPEDTFFPSPESSDSTDHVKPKETENTKQPSKSCHKPKAIVHTEKVNMMSLTVLGLRMLFAKTVAVNFLLTAKLFFLLTARAKRSGSGVKQTLNFDLLKLAGDVESNPGPSRGHMTEYKPTVRLATRDDVPRAVRTLAAAFADYPATRHTVDPDRHIERVTELQELFLTRVGLDIGKVWVADDGAAVAVWTTPESVEAGAVFAEIGPRMAELSGSRLAAQQQMEGLLAPHRPKEPAWFLATVGVSPDHQGKGLGSAVVLPGVEAAERAGVPAFLETSAPRNLPFYERLGFTVTADVEVPEGPRTWCMTRKPGA

SEQ ID NO: 19329 - protein, 974 aa, synthetic construct
MALPVTALLLPLALLLHAARPLEEDLKNVFPPEVAVFEPSEAEISHTQKATLVCLATGFYPDHVELSWWVNGKEVHSGVCTDPQPLKEQPALNDSRYCLSSRLRVSATFWQNPRNHFRCQVQFYGLSENDEWTQDRAKPVTQIVSAEAWGRADDVIKIHWQEKKSNTILGSQEGNTMKTNDTYMKFSWLTVPEKSLDKEHRCIVRHENNKNGVDQEIIFPPIKTDVITMDPKDNCSKDANDTLLLQLTNTSAYYMYLLLLLKSVVYFAIITCCLLMAMVKRKDSRGRAKRSGSGATNFSLLKQAGDVEENPGPTSTMALPVTALLLPLALLLHAARPEIVMTQSPATLSLSPGERATLSCRASQDISKYLNWYQQKPGQAPRLLIYHTSRLHSGIPARFSGSGSGTDYTLTISSLQPEDFAVYFCQQGNTLPYTFGQGTKLEIKGGGGSGGGGSGGGGSQVQLQESGPGLVKPSETLSLTCTVSGVSLPDYGVSWIRQPPGKGLEWIGVIWGSETTYYNSSLKSRVTISKDNSKNQVSLKLSSVTAADTAVYYCAKHYYYGGSYAMDYWGQGTLVTVSSTRIQNPDPAVYQLRDSKSSDKSVCLFTDFDSQTNVSQSKDSDVYITDKCVLDMRSMDFKSNSAVAWSNKSDFACANAFNNSIIPEDTFFPSPESSDSTDHVKPKETENTKQPSKSCHKPKAIVHTEKVNMMSLTVLGLRMLFAKTVAVNFLLTAKLFFLLTARAKRSGSGVKQTLNFDLLKLAGDVESNPGPSRGHMTEYKPTVRLATRDDVPRAVRTLAAAFADYPATRHTVDPDRHIERVTELQELFLTRVGLDIGKVWVADDGAAVAVWTTPESVEAGAVFAEIGPRMAELSGSRLAAQQQMEGLLAPHRPKEPAWFLATVGVSPDHQGKGLGSAVVLPGVEAAERAGVPAFLETSAPRNLPFYERLGFTVTADVEVPEGPRTWCMTRKPGA

SEQ ID NO: 19330 - protein, 975 aa, synthetic construct
MALPVTALLLPLALLLHAARPLEEDLKNVFPPEVAVFEPSEAEISHTQKATLVCLATGFYPDHVELSWWVNGKEVHSGVCTDPQPLKEQPALNDSRYCLSSRLRVSATFWQNPRNHFRCQVQFYGLSENDEWTQDRAKPVTQIVSAEAWGRADDVIKIHWQEKKSNTILGSQEGNTMKTNDTYMKFSWLTVPEKSLDKEHRCIVRHENNKNGVDQEIIFPPIKTDVITMDPKDNCSKDANDTLLLQLTNTSAYYMYLLLLLKSVVYFAIITCCLLMAMVKRKDSRGRAKRSGSGATNFSLLKQAGDVEENPGPTSTMALPVTALLLPLALLLHAARPDEIVLTQSPATLSLSPGERATLSCSASSSVSYMHWYQQKPGQAPRLLIYDTSKLASGIPARFSGSGSGTDFTLTISSLEPEDVAVYYCFQGSVYPFTFGQGTKLEIKRGGGGSGGGGSGGGGSQVQLQESGPGLVKPSQTLSLTCTVSGGSISTSGMGVGWIRQHPGKGLEWIGHIWWDDDKRYNPALKSRVTISVDTSKNQFSLKLSSVTAADTAVYYCARMELWSYYFDYWGQGTLVTVSSTRIQNPDPAVYQLRDSKSSDKSVCLFTDFDSQTNVSQSKDSDVYITDKCVLDMRSMDFKSNSAVAWSNKSDFACANAFNNSIIPEDTFFPSPESSDSTDHVKPKETENTKQPSKSCHKPKAIVHTEKVNMMSLTVLGLRMLFAKTVAVNFLLTAKLFFLLTARAKRSGSGVKQTLNFDLLKLAGDVESNPGPSRGHMTEYKPTVRLATRDDVPRAVRTLAAAFADYPATRHTVDPDRHIERVTELQELFLTRVGLDIGKVWVADDGAAVAVWTTPESVEAGAVFAEIGPRMAELSGSRLAAQQQMEGLLAPHRPKEPAWFLATVGVSPDHQGKGLGSAVVLPGVEAAERAGVPAFLETSAPRNLPFYERLGFTVTADVEVPEGPRTWCMTRKPGA

SEQ ID NO: 19331 - protein, 971 aa, synthetic construct
MALPVTALLLPLALLLHAARPLEEDLKNVFPPEVAVFEPSEAEISHTQKATLVCLATGFYPDHVELSWWVNGKEVHSGVCTDPQPLKEQPALNDSRYCLSSRLRVSATFWQNPRNHFRCQVQFYGLSENDEWTQDRAKPVTQIVSAEAWGRADDVIKIHWQEKKSNTILGSQEGNTMKTNDTYMKFSWLTVPEKSLDKEHRCIVRHENNKNGVDQEIIFPPIKTDVITMDPKDNCSKDANDTLLLQLTNTSAYYMYLLLLLKSVVYFAIITCCLLMAMVKRKDSRGRAKRSGSGATNFSLLKQAGDVEENPGPTSMALPVTALLLPLALLLHAARPDIQMTQSPSSLSASVGDRVTITCRASQDISNYLNWYQQKPGKAPKLLIYYTSRLHSGVPSRFSGSGSGTDFTLTISSLQPEDFATYYCQQGNTLPYTFGQGTKVEIKRGGGGSGGGGSGGGGSEVQLVESGGGLVQPGGSLRLSCAASGFTFSDYFMSWVRQAPGKGLEWVATISNGGTYTYYPDSVKGRFTISRDNSKNTLYLQMNSLRAEDTAVYYCARFDGYIFDYWGQGTLVTVSSTRIQNPDPAVYQLRDSKSSDKSVCLFTDFDSQTNVSQSKDSDVYITDKCVLDMRSMDFKSNSAVAWSNKSDFACANAFNNSIIPEDTFFPSPESSDSTDHVKPKETENTKQPSKSCHKPKAIVHTEKVNMMSLTVLGLRMLFAKTVAVNFLLTAKLFFLLTARAKRSGSGVKQTLNFDLLKLAGDVESNPGPSRGHMTEYKPTVRLATRDDVPRAVRTLAAAFADYPATRHTVDPDRHIERVTELQELFLTRVGLDIGKVWVADDGAAVAVWTTPESVEAGAVFAEIGPRMAELSGSRLAAQQQMEGLLAPHRPKEPAWFLATVGVSPDHQGKGLGSAVVLPGVEAAERAGVPAFLETSAPRNLPFYERLGFTVTADVEVPEGPRTWCMTRKPGA

SEQ ID NO: 19332 - protein, 975 aa, synthetic construct
MALPVTALLLPLALLLHAARPLEEDLKNVFPPEVAVFEPSEAEISHTQKATLVCLATGFYPDHVELSWWVNGKEVHSGVCTDPQPLKEQPALNDSRYCLSSRLRVSATFWQNPRNHFRCQVQFYGLSENDEWTQDRAKPVTQIVSAEAWGRADDVIKIHWQEKKSNTILGSQEGNTMKTNDTYMKFSWLTVPEKSLDKEHRCIVRHENNKNGVDQEIIFPPIKTDVITMDPKDNCSKDANDTLLLQLTNTSAYYMYLLLLLKSVVYFAIITCCLLMAMVKRKDSRGRAKRSGSGATNFSLLKQAGDVEENPGPTSMALPVTALLLPLALLLHAARPDIQMTQSPSSLSASVGDRVTITCKASDHINNWLAWYQQKPGQAPKLLIYGATTLETGVPSRFSGSGSGTDYTLTISSLQPEDFATYYCQQSWNTPWTFGQGTKLEIKRGGGGSGGGGSGGGGSQVQLQQPGAELVKPGASVKMSCKASGYAFSSYWINWMKQKPGQGLEWIGQIYPGDGDTNYNGKFKGRATLTADTSSSTAYMQLSSLTSEDSAVYFCARSITTVVGCAMDYWGQGTSVTVSSTRIQNPDPAVYQLRDSKSSDKSVCLFTDFDSQTNVSQSKDSDVYITDKCVLDMRSMDFKSNSAVAWSNKSDFACANAFNNSIIPEDTFFPSPESSDSTDHVKPKETENTKQPSKSCHKPKAIVHTEKVNMMSLTVLGLRMLFAKTVAVNFLLTAKLFFLLTARAKRSGSGVKQTLNFDLLKLAGDVESNPGPSRGHMTEYKPTVRLATRDDVPRAVRTLAAAFADYPATRHTVDPDRHIERVTELQELFLTRVGLDIGKVWVADDGAAVAVWTTPESVEAGAVFAEIGPRMAELSGSRLAAQQQMEGLLAPHRPKEPAWFLATVGVSPDHQGKGLGSAVVLPGVEAAERAGVPAFLETSAPRNLPFYERLGFTVTADVEVPEGPRTWCMTRKPGA

SEQ ID NO: 19333 - protein, 977 aa, synthetic construct
MALPVTALLLPLALLLHAARPLEEDLKNVFPPEVAVFEPSEAEISHTQKATLVCLATGFYPDHVELSWWVNGKEVHSGVCTDPQPLKEQPALNDSRYCLSSRLRVSATFWQNPRNHFRCQVQFYGLSENDEWTQDRAKPVTQIVSAEAWGRADDVIKIHWQEKKSNTILGSQEGNTMKTNDTYMKFSWLTVPEKSLDKEHRCIVRHENNKNGVDQEIIFPPIKTDVITMDPKDNCSKDANDTLLLQLTNTSAYYMYLLLLLKSVVYFAIITCCLLMAMVKRKDSRGRAKRSGSGATNFSLLKQAGDVEENPGPTSMALPVTALLLPLALLLHAARPQIVLSQSPAILSASPGEKVTMTCRASSSVSYMHWYQQKPGSSPKPWIYATSNLASGVPARFSGSGSGTSYSFTISRVEAEDAATYYCQQWTFNPPTFGGGTRLEIKRTVAAGGGGSGGGGSGGGGSQAYLQQSGAELVRPGASVKMSCKASGYTFTSYNMHWVKQTPRQGLEWIGGIYPGNGDTSYNQKFKGKATLTVGKSSSTAYMQLSSLTSEDSAVYFCARYDYNYAMDYWGQGTSVTVSSASTRIQNPDPAVYQLRDSKSSDKSVCLFTDFDSQTNVSQSKDSDVYITDKCVLDMRSMDFKSNSAVAWSNKSDFACANAFNNSIIPEDTFFPSPESSDSTDHVKPKETENTKQPSKSCHKPKAIVHTEKVNMMSLTVLGLRMLFAKTVAVNFLLTAKLFFLLTARAKRSGSGVKQTLNFDLLKLAGDVESNPGPSRGHMTEYKPTVRLATRDDVPRAVRTLAAAFADYPATRHTVDPDRHIERVTELQELFLTRVGLDIGKVWVADDGAAVAVWTTPESVEAGAVFAEIGPRMAELSGSRLAAQQQMEGLLAPHRPKEPAWFLATVGVSPDHQGKGLGSAVVLPGVEAAERAGVPAFLETSAPRNLPFYERLGFTVTADVEVPEGPRTWCMTRKPGA

SEQ ID NO: 19334 - protein, 975 aa, synthetic construct
MALPVTALLLPLALLLHAARPLEEDLKNVFPPEVAVFEPSEAEISHTQKATLVCLATGFYPDHVELSWWVNGKEVHSGVCTDPQPLKEQPALNDSRYCLSSRLRVSATFWQNPRNHFRCQVQFYGLSENDEWTQDRAKPVTQIVSAEAWGRADDVIKIHWQEKKSNTILGSQEGNTMKTNDTYMKFSWLTVPEKSLDKEHRCIVRHENNKNGVDQEIIFPPIKTDVITMDPKDNCSKDANDTLLLQLTNTSAYYMYLLLLLKSVVYFAIITCCLLMAMVKRKDSRGRAKRSGSGATNFSLLKQAGDVEENPGPTSMALPVTALLLPLALLLHAARPEIVLTQSPATLSLSPGERATLSCRASQSVSSYLAWYQQKPGQAPRLLIYDASNRATGIPARFSGSGSGTDFTLTISSLEPEDFAVYYCQQRSNWPITFGQGTRLEIKGGGGSGGGGSGGGGSEVQLVESGGGLVQPDRSLRLSCAASGFTFHDYAMHWVRQAPGKGLEWVSTISWNSGTIGYADSVKGRFTISRDNAKNSLYLQMNSLRAEDTALYYCAKDIQYGNYYYGMDVWGQGTTVTVSSTRIQNPDPAVYQLRDSKSSDKSVCLFTDFDSQTNVSQSKDSDVYITDKCVLDMRSMDFKSNSAVAWSNKSDFACANAFNNSIIPEDTFFPSPESSDSTDHVKPKETENTKQPSKSCHKPKAIVHTEKVNMMSLTVLGLRMLFAKTVAVNFLLTAKLFFLLTARAKRSGSGVKQTLNFDLLKLAGDVESNPGPSRGHMTEYKPTVRLATRDDVPRAVRTLAAAFADYPATRHTVDPDRHIERVTELQELFLTRVGLDIGKVWVADDGAAVAVWTTPESVEAGAVFAEIGPRMAELSGSRLAAQQQMEGLLAPHRPKEPAWFLATVGVSPDHQGKGLGSAVVLPGVEAAERAGVPAFLETSAPRNLPFYERLGFTVTADVEVPEGPRTWCMTRKPGA

SEQ ID NO: 19335 - protein, 973 aa, synthetic construct
MALPVTALLLPLALLLHAARPLEEDLKNVFPPEVAVFEPSEAEISHTQKATLVCLATGFYPDHVELSWWVNGKEVHSGVCTDPQPLKEQPALNDSRYCLSSRLRVSATFWQNPRNHFRCQVQFYGLSENDEWTQDRAKPVTQIVSAEAWGRADDVIKIHWQEKKSNTILGSQEGNTMKTNDTYMKFSWLTVPEKSLDKEHRCIVRHENNKNGVDQEIIFPPIKTDVITMDPKDNCSKDANDTLLLQLTNTSAYYMYLLLLLKSVVYFAIITCCLLMAMVKRKDSRGRAKRSGSGATNFSLLKQAGDVEENPGPTSMALPVTALLLPLALLLHAARPDIQMTQSPSSLSASVGDRVTITCRASQDVNTAVAWYQQKPGKAPKLLIYSASFLESGVPSRFSGSRSGTDFTLTISSLQPEDFATYYCQQHYTTPPTFGQTKVEIKRGGGGSGGGGSGGGGSEVQLVESGGGLVQPGGSLRLSCAASGFNIKDTYIHWVRQAPGKGLEWVARIYPTNGYTRYADSVKGRFTISADTSKNTAYLQMNSLRAEDTAVYYCSRWGGDGFYAMDVWGQGTLVTVSSTRIQNPDPAVYQLRDSKSSDKSVCLFTDFDSQTNVSQSKDSDVYITDKCVLDMRSMDFKSNSAVAWSNKSDFACANAFNNSIIPEDTFFPSPESSDSTDHVKPKETENTKQPSKSCHKPKAIVHTEKVNMMSLTVLGLRMLFAKTVAVNFLLTAKLFFLLTARAKRSGSGVKQTLNFDLLKLAGDVESNPGPSRGHMTEYKPTVRLATRDDVPRAVRTLAAAFADYPATRHTVDPDRHIERVTELQELFLTRVGLDIGKVWVADDGAAVAVWTTPESVEAGAVFAEIGPRMAELSGSRLAAQQQMEGLLAPHRPKEPAWFLATVGVSPDHQGKGLGSAVVLPGVEAAERAGVPAFLETSAPRNLPFYERLGFTVTADVEVPEGPRTWCMTRKPGA

SEQ ID NO: 19336 - protein, 852 aa, synthetic construct
MALPVTALLLPLALLLHAARPLEEDLKNVFPPEVAVFEPSEAEISHTQKATLVCLATGFYPDHVELSWWVNGKEVHSGVCTDPQPLKEQPALNDSRYCLSSRLRVSATFWQNPRNHFRCQVQFYGLSENDEWTQDRAKPVTQIVSAEAWGRADDVIKIHWQEKKSNTILGSQEGNTMKTNDTYMKFSWLTVPEKSLDKEHRCIVRHENNKNGVDQEIIFPPIKTDVITMDPKDNCSKDANDTLLLQLTNTSAYYMYLLLLLKSVVYFAIITCCLLMAMVKRKDSRGRAKRSGSGATNFSLLKQAGDVEENPGPTSMALPVTALLLPLALLLHAARPDEFEVQLVESGGGLVQAGGSLRLSCAASGITFSINTMGWYRQAPGKQRELVALISSIGDTYYADSVKGRFTISRDNAKNTVYLQMNSLKPEDTAVYYCKRFRTAAQGTDYWGQGTQVTVSSTRIQNPDPAVYQLRDSKSSDKSVCLFTDFDSQTNVSQSKDSDVYITDKCVLDMRSMDFKSNSAVAWSNKSDFACANAFNNSIIPEDTFFPSPESSDSTDHVKPKETENTKQPSKSCHKPKAIVHTEKVNMMSLTVLGLRMLFAKTVAVNFLLTAKLFFLLTARAKRSGSGVKQTLNFDLLKLAGDVESNPGPSRGHMTEYKPTVRLATRDDVPRAVRTLAAAFADYPATRHTVDPDRHIERVTELQELFLTRVGLDIGKVWVADDGAAVAVWTTPESVEAGAVFAEIGPRMAELSGSRLAAQQQMEGLLAPHRPKEPAWFLATVGVSPDHQGKGLGSAVVLPGVEAAERAGVPAFLETSAPRNLPFYERLGFTVTADVEVPEGPRTWCMTRKPGA

SEQ ID NO: 19337 - protein, 852 aa, synthetic construct; identical to SEQ ID NO: 19336

SEQ ID NO: 19338 - protein, 1117 aa, synthetic construct
MALPVTALLLPLALLLHAARPLEEDLKNVFPPEVAVFEPSEAEISHTQKATLVCLATGFYPDHVELSWWVNGKEVHSGVCTDPQPLKEQPALNDSRYCLSSRLRVSATFWQNPRNHFRCQVQFYGLSENDEWTQDRAKPVTQIVSAEAWGRADDVIKIHWQEKKSNTILGSQEGNTMKTNDTYMKFSWLTVPEKSLDKEHRCIVRHENNKNGVDQEIIFPPIKTDVITMDPKDNCSKDANDTLLLQLTNTSAYYMYLLLLLKSVVYFAIITCCLLMAMVKRKDSRGRAKRSGSGATNFSLLKQAGDVEENPGPTSMALPVTALLLPLALLLHAARPQVQLVESGGGLVQAGDSVTLSCTASGRTFSSYALAWFRQRPGKEREFVAGLRWGGPTNYADSVKDRFTISGDSAKHTMYLQMNSLKPEDTAVYYCGYNPGGWAVPSQYEYDSWGQGTQVTVSSGTGGGGSGGGGSGGGGSEFDIQMTQSPSSLSASVGDRVTITCKASDHINNWLAWYQQKPGQAPKLLIYGATTLETGVPSRFSGSGSGTDYTLTISSLQPEDFATYYCQQSWNTPWTFGQGTKLEIKRGGGGSGGGGSGGGGSQVQLQQPGAELVKPGASVKMSCKASGYAFSSYWINWMKQKPGQGLEWIGQIYPGDGDTNYNGKFKGRATLTADTSSSTAYMQLSSLTSEDSAVYFCARSITTVVGCAMDYWGQGTSVTVSSTRIQNPDPAVYQLRDSKSSDKSVCLFTDFDSQTNVSQSKDSDVYITDKCVLDMRSMDFKSNSAVAWSNKSDFACANAFNNSIIPEDTFFPSPESSDSTDHVKPKETENTKQPSKSCHKPKAIVHTEKVNMMSLTVLGLRMLFAKTVAVNFLLTAKLFFLLTARAKRSGSGVKQTLNFDLLKLAGDVESNPGPSRGHMTEYKPTVRLATRDDVPRAVRTLAAAFADYPATRHTVDPDRHIERVTELQELFLTRVGLDIGKVWVADDGAAVAVWTTPESVEAGAVFAEIGPRMAELSGSRLAAQQQMEGLLAPHRPKEPAWFLATVGVSPDHQGKGLGSAVVLPGVEAAERAGVPAFLETSAPRNLPFYERLGFTVTADVEVPEGPRTWCMTRKPGA

SEQ ID NO: 19339 - protein, 1246 aa, synthetic construct
MALPVTALLLPLALLLHAARPLEEDLKNVFPPEVAVFEPSEAEISHTQKATLVCLATGFYPDHVELSWWVNGKEVHSGVCTDPQPLKEQPALNDSRYCLSSRLRVSATFWQNPRNHFRCQVQFYGLSENDEWTQDRAKPVTQIVSAEAWGRADDVIKIHWQEKKSNTILGSQEGNTMKTNDTYMKFSWLTVPEKSLDKEHRCIVRHENNKNGVDQEIIFPPIKTDVITMDPKDNCSKDANDTLLLQLTNTSAYYMYLLLLLKSVVYFAIITCCLLMAMVKRKDSRGRAKRSGSGATNFSLLKQAGDVEENPGPTSMALPVTALLLPLALLLHAARPEVQLLESGGGLVQPGGSLRLSCAASGFTFSSYAMSWVRQAPGKGLEWVSSISGSGDYIYYADSVKGRFTISRDISKNTLYLQMNSLRAEDTAVYYCAKEGTGANSSLADYRGQGTLVTVSSGGGSGGGSQVQLVESGGGLVQAGDSVTLSCTASGRTFSSYALAWFRQRPGKEREFVAGLRWGGPTNYADSVKDRFTISGDSAKHTMYLQMNSLKPEDTAVYYCGYNPGGWAVPSQYEYDSWGQGTQVTVSSGTGGGGSGGGGSGGGGSEFDIQMTQSPSSLSASVGDRVTITCKASDHINNWLAWYQQKPGQAPKLLIYGATTLETGVPSRFSGSGSGTDYTLTISSLQPEDFATYYCQQSWNTPWTFGQGTKLEIKRGGGGSGGGGSGGGGSQVQLQQPGAELVKPGASVKMSCKASGYAFSSYWINWMKQKPGQGLEWIGQIYPGDGDTNYNGKFKGRATLTADTSSSTAYMQLSSLTSEDSAVYFCARSITTVVGCAMDYWGQGTSVTVSSTRIQNPDPAVYQLRDSKSSDKSVCLFTDFDSQTNVSQSKDSDVYITDKCVLDMRSMDFKSNSAVAWSNKSDFACANAFNNSIIPEDTFFPSPESSDSTDHVKPKETENTKQPSKSCHKPKAIVHTEKVNMMSLTVLGLRMLFAKTVAVNFLLTAKLFFLLTARAKRSGSGVKQTLNFDLLKLAGDVESNPGPSRGHMTEYKPTVRLATRDDVPRAVRTLAAAFADYPATRHTVDPDRHIERVTELQELFLTRVGLDIGKVWVADDGAAVAVWTTPESVEAGAVFAEIGPRMAELSGSRLAAQQQMEGLLAPHRPKEPAWFLATVGVSPDHQGKGLGSAVVLPGVEAAERAGVPAFLETSAPRNLPFYERLGFTVTADVEVPEGPRTWCMTRKPGA

SEQ ID NO: 19340 - protein, 1244 aa, synthetic construct
MALPVTALLLPLALLLHAARPLEEDLKNVFPPEVAVFEPSEAEISHTQKATLVCLATGFYPDHVELSWWVNGKEVHSGVCTDPQPLKEQPALNDSRYCLSSRLRVSATFWQNPRNHFRCQVQFYGLSENDEWTQDRAKPVTQIVSAEAWGRADDVIKIHWQEKKSNTILGSQEGNTMKTNDTYMKFSWLTVPEKSLDKEHRCIVRHENNKNGVDQEIIFPPIKTDVITMDPKDNCSKDANDTLLLQLTNTSAYYMYLLLLLKSVVYFAIITCCLLMAMVKRKDSRGRAKRSGSGATNFSLLKQAGDVEENPGPTSMALPVTALLLPLALLLHAARPGVTQSPTHLIKTRGQQATLRCSPISGHTSVYWYQQALGLGLQFLLWYDEGEERNRGNFPPRFSGRQFPNYSSELNVNALELEDSALYLCASSLGGPRGLAGLRGDEQFFGPGTRLTVLEGGGSGGGSQVQLVESGGGLVQAGDSVTLSCTASGRTFSSYALAWFRQRPGKEREFVAGLRWGGPTNYADSVKDRFTISGDSAKHTMYLQMNSLKPEDTAVYYCGYNPGGWAVPSQYEYDSWGQGTQVTVSSGTGGGGSGGGGSGGGGSEFDIQMTQSPSSLSASVGDRVTITCKASDHINNWLAWYQQKPGQAPKLLIYGATTLETGVPSRFSGSGSGTDYTLTISSLQPEDFATYYCQQSWNTPWTFGQGTKLEIKRGGGGSGGGGSGGGGSQVQLQQPGAELVKPGASVKMSCKASGYAFSSYWINWMKQKPGQGLEWIGQIYPGDGDTNYNGKFKGRATLTADTSSSTAYMQLSSLTSEDSAVYFCARSITTVVGCAMDYWGQGTSVTVSSTRIQNPDPAVYQLRDSKSSDKSVCLFTDFDSQTNVSQSKDSDVYITDKCVLDMRSMDFKSNSAVAWSNKSDFACANAFNNSIIPEDTFFPSPESSDSTDHVKPKETENTKQPSKSCHKPKAIVHTEKVNMMSLTVLGLRMLFAKTVAVNFLLTAKLFFLLTARAKRSGSGVKQTLNFDLLKLAGDVESNPGPSRGHMTEYKPTVRLATRDDVPRAVRTLAAAFADYPATRHTVDPDRHIERVTELQELFLTRVGLDIGKVWVADDGAAVAVWTTPESVEAGAVFAEIGPRMAELSGSRLAAQQQMEGLLAPHRPKEPAWFLATVGVSPDHQGKGLGSAVVLPGVEAAERAGVPAFLETSAPRNLPFYERLGFTVTADVEVPEGPRTWCMTRKPGA

SEQ ID NO: 19341 - protein, 1238 aa, synthetic construct
MALPVTALLLPLALLLHAARPLEEDLKNVFPPEVAVFEPSEAEISHTQKATLVCLATGFYPDHVELSWWVNGKEVHSGVCTDPQPLKEQPALNDSRYCLSSRLRVSATFWQNPRNHFRCQVQFYGLSENDEWTQDRAKPVTQIVSAEAWGRADDVIKIHWQEKKSNTILGSQEGNTMKTNDTYMKFSWLTVPEKSLDKEHRCIVRHENNKNGVDQEIIFPPIKTDVITMDPKDNCSKDANDTLLLQLTNTSAYYMYLLLLLKSVVYFAIITCCLLMAMVKRKDSRGRAKRSGSGATNFSLLKQAGDVEENPGPTSMALPVTALLLPLALLLHAARPGVTQSPTHLIKTRGQQATLRCSPISGHTSVYWYQQALGLGLQFLLWYDEGEERNRGNFPPRFSGRQFPNYSSELNVNALELEDSALYLCASSLGGPRGLAGLRGDEQFFGPGTRLTVLEGGGSGGGSGVTQSPTHLIKTRGQQATLRCSPISGHTSVYWYQQALGLGLQFLLWYDEGEERNRGNFPPRFSGRQFPNYSSELNVNALELEDSALYLCASSLGGDELGADGNEQFFGPGTRLTVLEGTGGGGSGGGGSGGGGSEFDIQMTQSPSSLSASVGDRVTITCKASDHINNWLAWYQQKPGQAPKLLIYGATTLETGVPSRFSGSGSGTDYTLTISSLQPEDFATYYCQQSWNTPWTFGQGTKLEIKRGGGGSGGGGSGGGGSQVQLQQPGAELVKPGASVKMSCKASGYAFSSYWINWMKQKPGQGLEWIGQIYPGDGDTNYNGKFKGRATLTADTSSSTAYMQLSSLTSEDSAVYFCARSITTVVGCAMDYWGQGTSVTVSSTRIQNPDPAVYQLRDSKSSDKSVCLFTDFDSQTNVSQSKDSDVYITDKCVLDMRSMDFKSNSAVAWSNKSDFACANAFNNSIIPEDTFFPSPESSDSTDHVKPKETENTKQPSKSCHKPKAIVHTEKVNMMSLTVLGLRMLFAKTVAVNFLLTAKLFFLLTARAKRSGSGVKQTLNFDLLKLAGDVESNPGPSRGHMTEYKPTVRLATRDDVPRAVRTLAAAFADYPATRHTVDPDRHIERVTELQELFLTRVGLDIGKVWVADDGAAVAVWTTPESVEAGAVFAEIGPRMAELSGSRLAAQQQMEGLLAPHRPKEPAWFLATVGVSPDHQGKGLGSAVVLPGVEAAERAGVPAFLETSAPRNLPFYERLGFTVTADVEVPEGPRTWCMTRKPGA

SEQ ID NO: 19342 - protein, 858 aa, synthetic construct
MALPVTALLLPLALLLHAARPLEEDLKNVFPPEVAVFEPSEAEISHTQKATLVCLATGFYPDHVELSWWVNGKEVHSGVCTDPQPLKEQPALNDSRYCLSSRLRVSATFWQNPRNHFRCQVQFYGLSENDEWTQDRAKPVTQIVSAEAWGRADDVIKIHWQEKKSNTILGSQEGNTMKTNDTYMKFSWLTVPEKSLDKEHRCIVRHENNKNGVDQEIIFPPIKTDVITMDPKDNCSKDANDTLLLQLTNTSAYYMYLLLLLKSVVYFAIITCCLLMAMVKRKDSRGRAKRSGSGATNFSLLKQAGDVEENPGPTSMALPVTALLLPLALLLHAARPDEFGSDLGIKLLFAAAKGQDDEVRILLAAGADVNAKDFEGYTPLHVAAYDGHLEIVEVLLKAGADVNAKDSQGRTPLHEAAYSGHLEIVEVLLKAGADVNAQDDAGETPADLAAAWGHEDIAEVLQKTRIQNPDPAVYQLRDSKSSDKSVCLFTDFDSQTNVSQSKDSDVYITDKCVLDMRSMDFKSNSAVAWSNKSDFACANAFNNSIIPEDTFFPSPESSDSTDHVKPKETENTKQPSKSCHKPKAIVHTEKVNMMSLTVLGLRMLFAKTVAVNFLLTAKLFFLLTARAKRSGSGVKQTLNFDLLKLAGDVESNPGPSRGHMTEYKPTVRLATRDDVPRAVRTLAAAFADYPATRHTVDPDRHIERVTELQELFLTRVGLDIGKVWVADDGAAVAVWTTPESVEAGAVFAEIGPRMAELSGSRLAAQQQMEGLLAPHRPKEPAWFLATVGVSPDHQGKGLGSAVVLPGVEAAERAGVPAFLETSAPRNLPFYERLGFTVTADVEVPEGPRTWCMTRKPGA

SEQ ID NO: 19343 - protein, 787 aa, synthetic construct
MALPVTALLLPLALLLHAARPLEEDLKNVFPPEVAVFEPSEAEISHTQKATLVCLATGFYPDHVELSWWVNGKEVHSGVCTDPQPLKEQPALNDSRYCLSSRLRVSATFWQNPRNHFRCQVQFYGLSENDEWTQDRAKPVTQIVSAEAWGRADDVIKIHWQEKKSNTILGSQEGNTMKTNDTYMKFSWLTVPEKSLDKEHRCIVRHENNKNGVDQEIIFPPIKTDVITMDPKDNCSKDANDTLLLQLTNTSAYYMYLLLLLKSVVYFAIITCCLLMAMVKRKDSRGRAKRSGSGATNFSLLKQAGDVEENPGPTSMDWIWRILFLVGAATGAHSFEGSGFEYAKEMRNAYWEIALLPNLTNQQKRAPIRKLYDDPSQSSELLSEAKKLNDSQTRIQNPDPAVYQLRDSKSSDKSVCLFTDFDSQTNVSQSKDSDVYITDKCVLDMRSMDFKSNSAVAWSNKSDFACANAFNNSIIPEDTFFPSPESSDSTDHVKPKETENTKQPSKSCHKPKAIVHTEKVNMMSLTVLGLRMLFAKTVAVNFLLTAKLFFLLTARAKRSGSGVKQTLNFDLLKLAGDVESNPGPSRGHMTEYKPTVRLATRDDVPRAVRTLAAAFADYPATRHTVDPDRHIERVTELQELFLTRVGLDIGKVWVADDGAAVAVWTTPESVEAGAVFAEIGPRMAELSGSRLAAQQQMEGLLAPHRPKEPAWFLATVGVSPDHQGKGLGSAVVLPGVEAAERAGVPAFLETSAPRNLPFYERLGFTVTADVEVPEGPRTWCMTRKPGA

SEQ ID NO: 19344 - protein, 1009 aa, synthetic construct
MALPVTALLLPLALLLHAARPLEEDLKNVFPPEVAVFEPSEAEISHTQKATLVCLATGFYPDHVELSWWVNGKEVHSGVCTDPQPLKEQPALNDSRYCLSSRLRVSATFWQNPRNHFRCQVQFYGLSENDEWTQDRAKPVTQIVSAEAWGRADDVIKIHWQEKKSNTILGSQEGNTMKTNDTYMKFSWLTVPEKSLDKEHRCIVRHENNKNGVDQEIIFPPIKTDVITMDPKDNCSKDANDTLLLQLTNTSAYYMYLLLLLKSVVYFAIITCCLLMAMVKRKDSRGRAKRSGSGATNFSLLKQAGDVEENPGPTSMALPVTALLLPLALLLHAARPDEFEVQLVESGGGLVQAGGSLRLSCAASGITFSINTMGWYRQAPGKQRELVALISSIGDTYYADSVKGRFTISRDNAKNTVYLQMNSLKPEDTAVYYCKRFRTAAQGTDYWGQGTQVTVSSLEGGGGSGGGGSGGGGSGSGGSGSGGSGSGGSGSGGSFEVQLVESGGGLVQPGGSLRLSCAASGSIFGFNDMAWYRQAPGKQRELVALISRVGVTSSADSVKGRFTISRVNAKDTVYLQMNSLKPEDTAVYYCYMDQRLDGSTLAYWGQGTQVTVSSTRIQNPDPAVYQLRDSKSSDKSVCLFTDFDSQTNVSQSKDSDVYITDKCVLDMRSMDFKSNSAVAWSNKSDFACANAFNNSIIPEDTFFPSPESSDSTDHVKPKETENTKQPSKSCHKPKAIVHTEKVNMMSLTVLGLRMLFAKTVAVNFLLTAKLFFLLTARAKRSGSGVKQTLNFDLLKLAGDVESNPGPSRGHMTEYKPTVRLATRDDVPRAVRTLAAAFADYPATRHTVDPDRHIERVTELQELFLTRVGLDIGKVWVADDGAAVAVWTTPESVEAGAVFAEIGPRMAELSGSRLAAQQQMEGLLAPHRPKEPAWFLATVGVSPDHQGKGLGSAVVLPGVEAAERAGVPAFLETSAPRNLPFYERLGFTVTADVEVPEGPRTWCMTRKPGA

SEQ ID NO: 19345 - protein, 923 aa, synthetic construct
MALPVTALLLPLALLLHAARPLEEDLKNVFPPEVAVFEPSEAEISHTQKATLVCLATGFYPDHVELSWWVNGKEVHSGVCTDPQPLKEQPALNDSRYCLSSRLRVSATFWQNPRNHFRCQVQFYGLSENDEWTQDRAKPVTQIVSAEAWGRADDVIKIHWQEKKSNTILGSQEGNTMKTNDTYMKFSWLTVPEKSLDKEHRCIVRHENNKNGVDQEIIFPPIKTDVITMDPKDNCSKDANDTLLLQLTNTSAYYMYLLLLLKSVVYFAIITCCLLMAMVKRKDSRGRAKRSGSGATNFSLLKQAGDVEENPGPTSMALPVTALLLPLALLLHAARPGMRTEDLPKAVVFLEPQWYRVLEKDSVTLKCQGAYSPEDNSTQWFHNESLISSQASSYFIDAATVDDSGEYRCQTNLSTLSDPVQLEVHIGWLLLQAPRWVFKEEDPIHLRCHSWKNTALHKVTYLQNGKGRKYFHHNSDFYIPKATLKDSGSYFCRGLVGSKNVSSETVNITITQGLAVSTISSFFPPGYQTRIQNPDPAVYQLRDSKSSDKSVCLFTDFDSQTNVSQSKDSDVYITDKCVLDMRSMDFKSNSAVAWSNKSDFACANAFNNSIIPEDTFFPSPESSDSTDHVKPKETENTKQPSKSCHKPKAIVHTEKVNMMSLTVLGLRMLFAKTVAVNFLLTAKLFFLLTARAKRSGSGVKQTLNFDLLKLAGDVESNPGPSRGHMTEYKPTVRLATRDDVPRAVRTLAAAFADYPATRHTVDPDRHIERVTELQELFLTRVGLDIGKVWVADDGAAVAVWTTPESVEAGAVFAEIGPRMAELSGSRLAAQQQMEGLLAPHRPKEPAWFLATVGVSPDHQGKGLGSAVVLPGVEAAERAGVPAFLETSAPRNLPFYERLGFTVTADVEVPEGPRTWCMTRKPGA

SEQ ID NO: 19346 - protein, 551 aa, synthetic construct
MALPVTALLLPLALLLHAARPLEEDLKNVFPPEVAVFEPSEAEISHTQKATLVCLATGFYPDHVELSWWVNGKEVHSGVCTDPQPLKEQPALNDSRYCLSSRLRVSATFWQNPRNHFRCQVQFYGLSENDEWTQDRAKPVTQIVSAEAWGRADDVIKIHWQEKKSNTILGSQEGNTMKTNDTYMKFSWLTVPEKSLDKEHRCIVRHENNKNGVDQEIIFPPIKTDVITMDPKDNCSKDANDTLLLQLTNTSAYYMYLLLLLKSVVYFAIITCCLLMAMVKRKDSRGRAKRSGSGATNFSLLKQAGDVEENPGPTSATMALPVTALLLPLALLLHAARPMDPDLEIRAAFLRQRNTALRTEVAELEQEVQRLENEVSQYETRYGPLGGGKTRIQNPDPAVYQLRDSKSSDKSVCLFTDFDSQTNVSQSKDSDVYITDKCVLDMRSMDFKSNSAVAWSNKSDFACANAFNNSIIPEDTFFPSPESSDSTDHVKPKETENTKQPSKSCHKPKAIVHTEKVNMMSLTVLGLRMLFAKTVAVNFLLTAKLFFLLTA

SEQ ID NO: 19347 - protein, 551 aa, synthetic construct
MALPVTALLLPLALLLHAARPLEEDLKNVFPPEVAVFEPSEAEISHTQKATLVCLATGFYPDHVELSWWVNGKEVHSGVCTDPQPLKEQPALNDSRYCLSSRLRVSATFWQNPRNHFRCQVQFYGLSENDEWTQDRAKPVTQIVSAEAWGRADDVIKIHWQEKKSNTILGSQEGNTMKTNDTYMKFSWLTVPEKSLDKEHRCIVRHENNKNGVDQEIIFPPIKTDVITMDPKDNCSKDANDTLLLQLTNTSAYYMYLLLLLKSVVYFAIITCCLLMAMVKRKDSRGRAKRSGSGATNFSLLKQAGDVEENPGPTSATMALPVTALLLPLALLLHAARPMDPDLEIEAAFLERENTALETRVAELRQRVQRLRNRVSQYRTRYGPLGGGKTRIQNPDPAVYQLRDSKSSDKSVCLFTDFDSQTNVSQSKDSDVYITDKCVLDMRSMDFKSNSAVAWSNKSDFACANAFNNSIIPEDTFFPSPESSDSTDHVKPKETENTKQPSKSCHKPKAIVHTEKVNMMSLTVLGLRMLFAKTVAVNFLLTAKLFFLLTA

SEQ ID NO: 19348 - protein, 528 aa, synthetic construct
MALPVTALLLPLALLLHAARPLEEDLKNVFPPEVAVFEPSEAEISHTQKATLVCLATGFYPDHVELSWWVNGKEVHSGVCTDPQPLKEQPALNDSRYCLSSRLRVSATFWQNPRNHFRCQVQFYGLSENDEWTQDRAKPVTQIVSAEAWGRADDVIKIHWQEKKSNTILGSQEGNTMKTNDTYMKFSWLTVPEKSLDKEHRCIVRHENNKNGVDQEIIFPPIKTDVITMDPKDNCSKDANDTLLLQLTNTSAYYMYLLLLLKSVVYFAIITCCLLMAMVKRKDSRGRAKRSGSGATNFSLLKQAGDVEENPGPTSATMALPVTALLLPLALLLHAARPEVAALEKEVAALEKEVAALEKEVAALEKTRIQNPDPAVYQLRDSKSSDKSVCLFTDFDSQTNVSQSKDSDVYITDKCVLDMRSMDFKSNSAVAWSNKSDFACANAFNNSIIPEDTFFPSPESSDSTDHVKPKETENTKQPSKSCHKPKAIVHTEKVNMMSLTVLGLRMLFAKTVAVNFLLTAKLFFLLTA

SEQ ID NO: 19349 - protein, 786 aa, synthetic construct
MALPVTALLLPLALLLHAARPLEEDLKNVFPPEVAVFEPSEAEISHTQKATLVCLATGFYPDHVELSWWVNGKEVHSGVCTDPQPLKEQPALNDSRYCLSSRLRVSATFWQNPRNHFRCQVQFYGLSENDEWTQDRAKPVTQIVSAEAWGRADDVIKIHWQEKKSNTILGSQEGNTMKTNDTYMKFSWLTVPEKSLDKEHRCIVRHENNKNGVDQEIIFPPIKTDVITMDPKDNCSKDANDTLLLQLTNTSAYYMYLLLLLKSVVYFAIITCCLLMAMVKRKDSRGRAKRSGSGATNFSLLKQAGDVEENPGPTSATMALPVTALLLPLALLLHAARPLFNQEVQIPLTESYCGPCPKNWICYKNNCYQFFDESKNWYESQASCMSQNASLLKVYSKEDQDLLKLVKSAHWMGLVHIPTNGSWQWEDGSILSPNLLTIIEMQKGDCALYASSFKGYIENCSTPNTYICMQRTVSGGGGSGGGGSGGGGDLFNQEVQIPLTESYCGPCPKNWICYKNNCYQFFDESKNWYESQASCMSQNASLLKVYSKEDQDLLKLVKSAHWMGLVHIPTNGSWQWEDGSILSPNLLTIIEMQKGDCALYASSFKGYIENCSTPNTYICMQRTVTRIQNPDPAVYQLRDSKSSDKSVCLFTDFDSQTNVSQSKDSDVYITDKCVLDMRSMDFKSNSAVAWSNKSDFACANAFNNSIIPEDTFFPSPESSDSTDHVKPKETENTKQPSKSCHKPKAIVHTEKVNMMSLTVLGLRMLFAKTVAVNFLLTAKLFFLLTA

SEQ ID NO: 19350 - protein, 786 aa, synthetic construct
MALPVTALLLPLALLLHAARPLEEDLKNVFPPEVAVFEPSEAEISHTQKATLVCLATGFYPDHVELSWWVNGKEVHSGVCTDPQPLKEQPALNDSRYCLSSRLRVSATFWQNPRNHFRCQVQFYGLSENDEWTQDRAKPVTQIVSAEAWGRADDVIKIHWQEKKSNTILGSQEGNTMKTNDTYMKFSWLTVPEKSLDKEHRCIVRHENNKNGVDQEIIFPPIKTDVITMDPKDNCSKDANDTLLLQLTNTSAYYMYLLLLLKSVVYFAIITCCLLMAMVKRKDSRGRAKRSGSGATNFSLLKQAGDVEENPGPTSATMALPVTALLLPLALLLHAARPLFNQEVQIPLTESYCGPCPKNWICYKNNCYQFFDESKNWYESQASCMSQNASLLKVYSKEDQDLLKLVKSAHWMGLVHIPTNGSWQWEDGSILSPNLLTIIEMQKGDCALYASSFKGFIENCSTPNTYICMQRTVGGGGSGGGGSGGGGSDLFNQEVQIPLTESYCGPCPKNWICYKNNCYQFFDESKNWYESQASCMSQNASLLKVYSKEDQDLLKLVKSAHWMGLVHIPTNGSWQWEDGSILSPNLLTIIEMQKGDCALYASSFKGFIENCSTPNTYICMQRTVTRIQNPDPAVYQLRDSKSSDKSVCLFTDFDSQTNVSQSKDSDVYITDKCVLDMRSMDFKSNSAVAWSNKSDFACANAFNNSIIPEDTFFPSPESSDSTDHVKPKETENTKQPSKSCHKPKAIVHTEKVNMMSLTVLGLRMLFAKTVAVNFLLTAKLFFLLTA

SEQ ID NO: 19351 - protein, 812 aa, synthetic construct
MALPVTALLLPLALLLHAARPLEEDLKNVFPPEVAVFEPSEAEISHTQKATLVCLATGFYPDHVELSWWVNGKEVHSGVCTDPQPLKEQPALNDSRYCLSSRLRVSATFWQNPRNHFRCQVQFYGLSENDEWTQDRAKPVTQIVSAEAWGRADDVIKIHWQEKKSNTILGSQEGNTMKTNDTYMKFSWLTVPEKSLDKEHRCIVRHENNKNGVDQEIIFPPIKTDVITMDPKDNCSKDANDTLLLQLTNTSAYYMYLLLLLKSVVYFAIITCCLLMAMVKRKDSRGRAKRSGSGATNFSLLKQAGDVEENPGPTSMALPVTALLLPLALLLHAARPMDPDLEIRAAFLRQRNTALRTEVAELEQEVQRLENEVSQYETRYGPLGGGKGTGGGGSGGGGSGGGGSEFDIQMTQSPSSLSASVGDRVTITCKASDHINNWLAWYQQKPGQAPKLLIYGATTLETGVPSRFSGSGSGTDYTLTISSLQPEDFATYYCQQSWNTPWTFGQGTKLEIKRGGGGSGGGGSGGGGSQVQLQQPGAELVKPGASVKMSCKASGYAFSSYWINWMKQKPGQGLEWIGQIYPGDGDTNYNGKFKGRATLTADTSSSTAYMQLSSLTSEDSAVYFCARSITTVVGCAMDYWGQGTSVTVSSTRIQNPDPAVYQLRDSKSSDKSVCLFTDFDSQTNVSQSKDSDVYITDKCVLDMRSMDFKSNSAVAWSNKSDFACANAFNNSIIPEDTFFPSPESSDSTDHVKPKETENTKQPSKSCHKPKAIVHTEKVNMMSLTVLGLRMLFAKTVAVNFLLTAKLFFLLTA

SEQ ID NO: 19352 - protein, 1047 aa, synthetic construct
MALPVTALLLPLALLLHAARPLEEDLKNVFPPEVAVFEPSEAEISHTQKATLVCLATGFYPDHVELSWWVNGKEVHSGVCTDPQPLKEQPALNDSRYCLSSRLRVSATFWQNPRNHFRCQVQFYGLSENDEWTQDRAKPVTQIVSAEAWGRADDVIKIHWQEKKSNTILGSQEGNTMKTNDTYMKFSWLTVPEKSLDKEHRCIVRHENNKNGVDQEIIFPPIKTDVITMDPKDNCSKDANDTLLLQLTNTSAYYMYLLLLLKSVVYFAIITCCLLMAMVKRKDSRGRAKRSGSGATNFSLLKQAGDVEENPGPTSMALPVTALLLPLALLLHAARPLFNQEVQIPLTESYCGPCPKNWICYKNNCYQFFDESKNWYESQASCMSQNASLLKVYSKEDQDLLKLVKSAHWMGLVHIPTNGSWQWEDGSILSPNLLTIIEMQKGDCALYASSFKGFIENCSTPNTYICMQRTVGGGGSGGGGSGGGGSDLFNQEVQIPLTESYCGPCPKNWICYKNNCYQFFDESKNWYESQASCMSQNASLLKVYSKEDQDLLKLVKSAHWMGLVHIPTNGSWQWEDGSILSPNLLTIIEMQKGDCALYASSFKGFIENCSTPNTYICMQRTVGTGGGGSGGGGSGGGGSEFDIQMTQSPSSLSASVGDRVTITCKASDHINNWLAWYQQKPGQAPKLLIYGATTLETGVPSRFSGSGSGTDYTLTISSLQPEDFATYYCQQSWNTPWTFGQGTKLEIKRGGGGSGGGGSGGGGSQVQLQQPGAELVKPGASVKMSCKASGYAFSSYWINWMKQKPGQGLEWIGQIYPGDGDTNYNGKFKGRATLTADTSSSTAYMQLSSLTSEDSAVYFCARSITTVVGCAMDYWGQGTSVTVSSTRIQNPDPAVYQLRDSKSSDKSVCLFTDFDSQTNVSQSKDSDVYITDKCVLDMRSMDFKSNSAVAWSNKSDFACANAFNNSIIPEDTFFPSPESSDSTDHVKPKETENTKQPSKSCHKPKAIVHTEKVNMMSLTVLGLRMLFAKTVAVNFLLTAKLFFLLTA

SEQ ID NO: 19353 - protein, 752 aa, synthetic construct
MALPVTALLLPLALLLHAARPLEEDLKNVFPPEVAVFEPSEAEISHTQKATLVCLATGFYPDHVELSWWVNGKEVHSGVCTDPQPLKEQPALNDSRYCLSSRLRVSATFWQNPRNHFRCQVQFYGLSENDEWTQDRAKPVTQIVSAEAWGRADDVIKIHWQEKKSNTILGSQEGNTMKTNDTYMKFSWLTVPEKSLDKEHRCIVRHENNKNGVDQEIIFPPIKTDVITMDPKDNCSKDANDTLLLQLTNTSAYYMYLLLLLKSVVYFAIITCCLLMAMVKRKDSRGRAKRSGSGATNFSLLKQAGDVEENPGPTSMALPVTALLLPLALLLHAARPQSVLTQPPSVSGAPGQRVTISCTGSSSNIGAGYDVHWYQQLPGTAPKLLIFGNSNRPSGVPDRFSGFKSGTSASLAITGLQAEDEADYFCQSYDSSLSGSGVFGTGTKVTVLGGGGGSGGGGSGGGGSQMQLVQSGGGLVQPGRSLRLSCAASGFTFDDYAMHWVRQAPGKGLEWVSGISWNSGSIGYADSVKGRFTISRDNAKNSLYLQMNSLRAEDTALYYCAKDIHSGSYYGLLYYAMDVWGQGTTVTVSSTRIQNPDPAVYQLRDSKSSDKSVCLFTDFDSQTNVSQSKDSDVYITDKCVLDMRSMDFKSNSAVAWSNKSDFACANAFNNSIIPEDTFFPSPESSDSTDHVKPKETENTKQPSKSCHKPKAIVHTEKVNMMSLTVLGLRMLFAKTVAVNFLLTAKLFFLLTA

SEQ ID NO: 19354 - protein, 589 aa, synthetic construct
MALPVTALLLPLALLLHAARPLEEDLKNVFPPEVAVFEPSEAEISHTQKATLVCLATGFYPDHVELSWWVNGKEVHSGVCTDPQPLKEQPALNDSRYCLSSRLRVSATFWQNPRNHFRCQVQFYGLSENDEWTQDRAKPVTQIVSAEAWGRADDVIKIHWQEKKSNTILGSQEGNTMKTNDTYMKFSWLTVPEKSLDKEHRCIVRHENNKNGVDQEIIFPPIKTDVITMDPKDNCSKDANDTLLLQLTNTSAYYMYLLLLLKSVVYFAIITCCLLMAMVKRKDSRGRAKRSGSGATNFSLLKQAGDVEENPGPTSMALPVTALLLPLALLLHAARPMCMPCFTTDHQMARKCDDCCGGKGRGKCYGPQCLCRLEGGGGSGGGGSGGGGSFEVCMPCFTTDQQMARKCSDCCGGKGRGKCYGPQCLCRTRIQNPDPAVYQLRDSKSSDKSVCLFTDFDSQTNVSQSKDSDVYITDKCVLDMRSMDFKSNSAVAWSNKSDFACANAFNNSIIPEDTFFPSPESSDSTDHVKPKETENTKQPSKSCHKPKAIVHTEKVNMMSLTVLGLRMLFAKTVAVNFLLTAKLFFLLTA

SEQ ID NO: 19355 - protein, 852 aa, synthetic construct
MALPVTALLLPLALLLHAARPLEEDLKNVFPPEVAVFEPSEAEISHTQKATLVCLATGFYPDHVELSWWVNGKEVHSGVCTDPQPLKEQPALNDSRYCLSSRLRVSATFWQNPRNHFRCQVQFYGLSENDEWTQDRAKPVTQIVSAEAWGRADDVIKIHWQEKKSNTILGSQEGNTMKTNDTYMKFSWLTVPEKSLDKEHRCIVRHENNKNGVDQEIIFPPIKTDVITMDPKDNCSKDANDTLLLQLTNTSAYYMYLLLLLKSVVYFAIITCCLLMAMVKRKDSRGRAKRSGSGATNFSLLKQAGDVEENPGPTSMALPVTALLLPLALLLHAARPMCMPCFTTDHQMARKCDDCCGGKGRGKCYGPQCLCRLEGGGGSGGGGSGGGGSFEVCMPCFTTDQQMARKCSDCCGGKGRGKCYGPQCLCRGTGGGGSGGGGSGGGGSEFDIQMTQSPSSLSASVGDRVTITCKASDHINNWLAWYQQKPGQAPKLLIYGATTLETGVPSRFSGSGSGTDYTLTISSLQPEDFATYYCQQSWNTPWTFGQGTKLEIKRGGGGSGGGGSGGGGSQVQLQQPGAELVKPGASVKMSCKASGYAFSSYWINWMKQKPGQGLEWIGQIYPGDGDTNYNGKFKGRATLTADTSSSTAYMQLSSLTSEDSAVYFCARSITTVVGCAMDYWGQGTSVTVSSTRIQNPDPAVYQLRDSKSSDKSVCLFTDFDSQTNVSQSKDSDVYITDKCVLDMRSMDFKSNSAVAWSNKSDFACANAFNNSIIPEDTFFPSPESSDSTDHVKPKETENTKQPSKSCHKPKAIVHTEKVNMMSLTVLGLRMLFAKTVAVNFLLTAKLFFLLTA

SEQ ID NO: 19356 - protein, 927 aa, synthetic construct
MALPVTALLLPLALLLHAARPLEEDLKNVFPPEVAVFEPSEAEISHTQKATLVCLATGFYPDHVELSWWVNGKEVHSGVCTDPQPLKEQPALNDSRYCLSSRLRVSATFWQNPRNHFRCQVQFYGLSENDEWTQDRAKPVTQIVSAEAWGRADDVIKIHWQEKKSNTILGSQEGNTMKTNDTYMKFSWLTVPEKSLDKEHRCIVRHENNKNGVDQEIIFPPIKTDVITMDPKDNCSKDANDTLLLQLTNTSAYYMYLLLLLKSVVYFAIITCCLLMAMVKRKDSRGRAKRSGSGATNFSLLKQAGDVEENPGPTSMALPVTALLLPLALLLHAARPSPVAPACDPRLLNKLLRDSHLLHSRLSQCPDVDPLSIPVLLPAVDFSLGEWKTQTEQSKAQDILGAVSLLLEGVMAARGQLEPSCLSSLLGQLSGQVRLLLGALQGLLGTQLPLQGRTTAHKDPNALFLSLQQLLRGKVRFLLLVEGPTLCVRRTLPTTAVPSSTSGTGGGGSGGGGSGGGGSEFDIQMTQSPSSLSASVGDRVTITCKASDHINNWLAWYQQKPGQAPKLLIYGATTLETGVPSRFSGSGSGTDYTLTISSLQPEDFATYYCQQSWNTPWTFGQGTKLEIKRGGGGSGGGGSGGGGSQVQLQQPGAELVKPGASVKMSCKASGYAFSSYWINWMKQKPGQGLEWIGQIYPGDGDTNYNGKFKGRATLTADTSSSTAYMQLSSLTSEDSAVYFCARSITTVVGCAMDYWGQGTSVTVSSTRIQNPDPAVYQLRDSKSSDKSVCLFTDFDSQTNVSQSKDSDVYITDKCVLDMRSMDFKSNSAVAWSNKSDFACANAFNNSIIPEDTFFPSPESSDSTDHVKPKETENTKQPSKSCHKPKAIVHTEKVNMMSLTVLGLRMLFAKTVAVNFLLTAKLFFLLTA

SEQ ID NO: 19357 - protein, 834 aa, synthetic construct
MALPVTALLLPLALLLHAARPLEEDLKNVFPPEVAVFEPSEAEISHTQKATLVCLATGFYPDHVELSWWVNGKEVHSGVCTDPQPLKEQPALNDSRYCLSSRLRVSATFWQNPRNHFRCQVQFYGLSENDEWTQDRAKPVTQIVSAEAWGRADDVIKIHWQEKKSNTILGSQEGNTMKTNDTYMKFSWLTVPEKSLDKEHRCIVRHENNKNGVDQEIIFPPIKTDVITMDPKDNCSKDANDTLLLQLTNTSAYYMYLLLLLKSVVYFAIITCCLLMAMVKRKDSRGRAKRSGSGATNFSLLKQAGDVEENPGPTSMALPVTALLLPLALLLHAARPMGSWEEFELRLNAIEERLYALGGSEAELAYFEYVIADFEGNLQRYKGKGNPEVEALYFEADAIFEELVAYRHNGTGGGGSGGGGSGGGGSEFDIQMTQSPSSLSASVGDRVTITCKASDHINNWLAWYQQKPGQAPKLLIYGATTLETGVPSRFSGSGSGTDYTLTISSLQPEDFATYYCQQSWNTPWTFGQGTKLEIKRGGGGSGGGGSGGGGSQVQLQQPGAELVKPGASVKMSCKASGYAFSSYWINWMKQKPGQGLEWIGQIYPGDGDTNYNGKFKGRATLTADTSSSTAYMQLSSLTSEDSAVYFCARSITTVVGCAMDYWGQGTSVTVSSTRIQNPDPAVYQLRDSKSSDKSVCLFTDFDSQTNVSQSKDSDVYITDKCVLDMRSMDFKSNSAVAWSNKSDFACANAFNNSIIPEDTFFPSPESSDSTDHVKPKETENTKQPSKSCHKPKAIVHTEKVNMMSLTVLGLRMLFAKTVAVNFLLTAKLFFLLTA

SEQ ID NO: 19358 - protein, 973 aa, synthetic construct
MALPVTALLLPLALLLHAARPLEIQNPDPAVYQLRDSKSSDKSVCLFTDFDSQTNVSQSKDSDVYITDKCVLDMRSMDFKSNSAVAWSNKSDFACANAFNNSIIPEDTFFPSPESSDSTDHVKPKETENTKQPSKSCHKPKAIVHTEKVNMMSLTVLGLRMLFAKTVAVNFLLTAKLFFLLTARAKRSGSGATNFSLLKQAGDVEENPGPTSMALPVTALLLPLALLLHAARPDIQMTQTTSSLSASLGDRVTISCRASQDISKYLNWYQQKPDGTVKLLIYHTSRLHSGVPSRFSGSGSGTDYSLTISNLEQEDIATYFCQQGNTLPYTFGGGTKLEITGGGGSGGGGSGGGGSEVKLQESGPGLVAPSQSLSVTCTVSGVSLPDYGVSWIRQPPRKGLEWLGVIWGSETTYYNSALKSRLTIIKDNSKSQVFLKMNSLQTDDTAIYYCAKHYYYGGSYAMDYWGQGTSVTVSSTREDLKNVFPPEVAVFEPSEAEISHTQKATLVCLATGFYPDHVELSWWVNGKEVHSGVCTDPQPLKEQPALNDSRYCLSSRLRVSATFWQNPRNHFRCQVQFYGLSENDEWTQDRAKPVTQIVSAEAWGRADDVIKIHWQEKKSNTILGSQEGNTMKTNDTYMKFSWLTVPEKSLDKEHRCIVRHENNKNGVDQEIIFPPIKTDVITMDPKDNCSKDANDTLLLQLTNTSAYYMYLLLLLKSVVYFAIITCCLLMAMVKRKDSRGRAKRSGSGVKQTLNFDLLKLAGDVESNPGPSRGHMTEYKPTVRLATRDDVPRAVRTLAAAFADYPATRHTVDPDRHIERVTELQELFLTRVGLDIGKVWVADDGAAVAVWTTPESVEAGAVFAEIGPRMAELSGSRLAAQQQMEGLLAPHRPKEPAWFLATVGVSPDHQGKGLGSAVVLPGVEAAERAGVPAFLETSAPRNLPFYERLGFTVTADVEVPEGPRTWCMTRKPGA

SEQ ID NO: 19359 - protein, 974 aa, synthetic construct
MALPVTALLLPLALLLHAARPLEIQNPDPAVYQLRDSKSSDKSVCLFTDFDSQTNVSQSKDSDVYITDKCVLDMRSMDFKSNSAVAWSNKSDFACANAFNNSIIPEDTFFPSPESSDSTDHVKPKETENTKQPSKSCHKPKAIVHTEKVNMMSLTVLGLRMLFAKTVAVNFLLTAKLFFLLTARAKRSGSGATNFSLLKQAGDVEENPGPTSTMALPVTALLLPLALLLHAARPEIVMTQSPATLSLSPGERATLSCRASQDISKYLNWYQQKPGQAPRLLIYHTSRLHSGIPARFSGSGSGTDYTLTISSLQPEDFAVYFCQQGNTLPYTFGQGTKLEIKGGGGSGGGGSGGGGSQVQLQESGPGLVKPSETLSLTCTVSGVSLPDYGVSWIRQPPGKGLEWIGVIWGSETTYYNSSLKSRVTISKDNSKNQVSLKLSSVTAADTAVYYCAKHYYYGGSYAMDYWGQGTLVTVSSTREDLKNVFPPEVAVFEPSEAEISHTQKATLVCLATGFYPDHVELSWWVNGKEVHSGVCTDPQPLKEQPALNDSRYCLSSRLRVSATFWQNPRNHFRCQVQFYGLSENDEWTQDRAKPVTQIVSAEAWGRADDVIKIHWQEKKSNTILGSQEGNTMKTNDTYMKFSWLTVPEKSLDKEHRCIVRHENNKNGVDQEIIFPPIKTDVITMDPKDNCSKDANDTLLLQLTNTSAYYMYLLLLLKSVVYFAIITCCLLMAMVKRKDSRGRAKRSGSGVKQTLNFDLLKLAGDVESNPGPSRGHMTEYKPTVRLATRDDVPRAVRTLAAAFADYPATRHTVDPDRHIERVTELQELFLTRVGLDIGKVWVADDGAAVAVWTTPESVEAGAVFAEIGPRMAELSGSRLAAQQQMEGLLAPHRPKEPAWFLATVGVSPDHQGKGLGSAVVLPGVEAAERAGVPAFLETSAPRNLPFYERLGFTVTADVEVPEGPRTWCMTRKPGA

SEQ ID NO: 19360 - protein, 975 aa, synthetic construct
MALPVTALLLPLALLLHAARPLEIQNPDPAVYQLRDSKSSDKSVCLFTDFDSQTNVSQSKDSDVYITDKCVLDMRSMDFKSNSAVAWSNKSDFACANAFNNSIIPEDTFFPSPESSDSTDHVKPKETENTKQPSKSCHKPKAIVHTEKVNMMSLTVLGLRMLFAKTVAVNFLLTAKLFFLLTARAKRSGSGATNFSLLKQAGDVEENPGPTSTMALPVTALLLPLALLLHAARPDEIVLTQSPATLSLSPGERATLSCSASSSVSYMHWYQQKPGQAPRLLIYDTSKLASGIPARFSGSGSGTDFTLTISSLEPEDVAVYYCFQGSVYPFTFGQGTKLEIKRGGGGSGGGGSGGGGSQVQLQESGPGLVKPSQTLSLTCTVSGGSISTSGMGVGWIRQHPGKGLEWIGHIWWDDDKRYNPALKSRVTISVDTSKNQFSLKLSSVTAADTAVYYCARMELWSYYFDYWGQGTLVTVSSTREDLKNVFPPEVAVFEPSEAEISHTQKATLVCLATGFYPDHVELSWWVNGKEVHSGVCTDPQPLKEQPALNDSRYCLSSRLRVSATFWQNPRNHFRCQVQFYGLSENDEWTQDRAKPVTQIVSAEAWGRADDVIKIHWQEKKSNTILGSQEGNTMKTNDTYMKFSWLTVPEKSLDKEHRCIVRHENNKNGVDQEIIFPPIKTDVITMDPKDNCSKDANDTLLLQLTNTSAYYMYLLLLLKSVVYFAIITCCLLMAMVKRKDSRGRAKRSGSGVKQTLNFDLLKLAGDVESNPGPSRGHMTEYKPTVRLATRDDVPRAVRTLAAAFADYPATRHTVDPDRHIERVTELQELFLTRVGLDIGKVWVADDGAAVAVWTTPESVEAGAVFAEIGPRMAELSGSRLAAQQQMEGLLAPHRPKEPAWFLATVGVSPDHQGKGLGSAVVLPGVEAAERAGVPAFLETSAPRNLPFYERLGFTVTADVEVPEGPRTWCMTRKPGA

SEQ ID NO: 19361 - protein, 971 aa, synthetic construct
MALPVTALLLPLALLLHAARPLEIQNPDPAVYQLRDSKSSDKSVCLFTDFDSQTNVSQSKDSDVYITDKCVLDMRSMDFKSNSAVAWSNKSDFACANAFNNSIIPEDTFFPSPESSDSTDHVKPKETENTKQPSKSCHKPKAIVHTEKVNMMSLTVLGLRMLFAKTVAVNFLLTAKLFFLLTARAKRSGSGATNFSLLKQAGDVEENPGPTSMALPVTALLLPLALLLHAARPDIQMTQSPSSLSASVGDRVTITCRASQDISNYLNWYQQKPGKAPKLLIYYTSRLHSGVPSRFSGSGSGTDFTLTISSLQPEDFATYYCQQGNTLPYTFGQGTKVEIKRGGGGSGGGGSGGGGSEVQLVESGGGLVQPGGSLRLSCAASGFTFSDYFMSWVRQAPGKGLEWVATISNGGTYTYYPDSVKGRFTISRDNSKNTLYLQMNSLRAEDTAVYYCARFDGYIFDYWGQGTLVTVSSTREDLKNVFPPEVAVFEPSEAEISHTQKATLVCLATGFYPDHVELSWWVNGKEVHSGVCTDPQPLKEQPALNDSRYCLSSRLRVSATFWQNPRNHFRCQVQFYGLSENDEWTQDRAKPVTQIVSAEAWGRADDVIKIHWQEKKSNTILGSQEGNTMKTNDTYMKFSWLTVPEKSLDKEHRCIVRHENNKNGVDQEIIFPPIKTDVITMDPKDNCSKDANDTLLLQLTNTSAYYMYLLLLLKSVVYFAIITCCLLMAMVKRKDSRGRAKRSGSGVKQTLNFDLLKLAGDVESNPGPSRGHMTEYKPTVRLATRDDVPRAVRTLAAAFADYPATRHTVDPDRHIERVTELQELFLTRVGLDIGKVWVADDGAAVAVWTTPESVEAGAVFAEIGPRMAELSGSRLAAQQQMEGLLAPHRPKEPAWFLATVGVSPDHQGKGLGSAVVLPGVEAAERAGVPAFLETSAPRNLPFYERLGFTVTADVEVPEGPRTWCMTRKPGA

SEQ ID NO: 19362 - protein, 975 aa, synthetic construct
MALPVTALLLPLALLLHAARPLEIQNPDPAVYQLRDSKSSDKSVCLFTDFDSQTNVSQSKDSDVYITDKCVLDMRSMDFKSNSAVAWSNKSDFACANAFNNSIIPEDTFFPSPESSDSTDHVKPKETENTKQPSKSCHKPKAIVHTEKVNMMSLTVLGLRMLFAKTVAVNFLLTAKLFFLLTARAKRSGSGATNFSLLKQAGDVEENPGPTSMALPVTALLLPLALLLHAARPDIQMTQSPSSLSASVGDRVTITCKASDHINNWLAWYQQKPGQAPKLLIYGATTLETGVPSRFSGSGSGTDYTLTISSLQPEDFATYYCQQSWNTPWTFGQGTKLEIKRGGGGSGGGGSGGGGSQVQLQQPGAELVKPGASVKMSCKASGYAFSSYWINWMKQKPGQGLEWIGQIYPGDGDTNYNGKFKGRATLTADTSSSTAYMQLSSLTSEDSAVYFCARSITTVVGCAMDYWGQGTSVTVSSTREDLKNVFPPEVAVFEPSEAEISHTQKATLVCLATGFYPDHVELSWWVNGKEVHSGVCTDPQPLKEQPALNDSRYCLSSRLRVSATFWQNPRNHFRCQVQFYGLSENDEWTQDRAKPVTQIVSAEAWGRADDVIKIHWQEKKSNTILGSQEGNTMKTNDTYMKFSWLTVPEKSLDKEHRCIVRHENNKNGVDQEIIFPPIKTDVITMDPKDNCSKDANDTLLLQLTNTSAYYMYLLLLLKSVVYFAIITCCLLMAMVKRKDSRGRAKRSGSGVKQTLNFDLLKLAGDVESNPGPSRGHMTEYKPTVRLATRDDVPRAVRTLAAAFADYPATRHTVDPDRHIERVTELQELFLTRVGLDIGKVWVADDGAAVAVWTTPESVEAGAVFAEIGPRMAELSGSRLAAQQQMEGLLAPHRPKEPAWFLATVGVSPDHQGKGLGSAVVLPGVEAAERAGVPAFLETSAPRNLPFYERLGFTVTADVEVPEGPRTWCMTRKPGA

SEQ ID NO: 19363 - protein, 977 aa, synthetic construct
MALPVTALLLPLALLLHAARPLEIQNPDPAVYQLRDSKSSDKSVCLFTDFDSQTNVSQSKDSDVYITDKCVLDMRSMDFKSNSAVAWSNKSDFACANAFNNSIIPEDTFFPSPESSDSTDHVKPKETENTKQPSKSCHKPKAIVHTEKVNMMSLTVLGLRMLFAKTVAVNFLLTAKLFFLLTARAKRSGSGATNFSLLKQAGDVEENPGPTSMALPVTALLLPLALLLHAARPQIVLSQSPAILSASPGEKVTMTCRASSSVSYMHWYQQKPGSSPKPWIYATSNLASGVPARFSGSGSGTSYSFTISRVEAEDAATYYCQQWTFNPPTFGGGTRLEIKRTVAAGGGGSGGGGSGGGGSQAYLQQSGAELVRPGASVKMSCKASGYTFTSYNMHWVKQTPRQGLEWIGGIYPGNGDTSYNQKFKGKATLTVGKSSSTAYMQLSSLTSEDSAVYFCARYDYNYAMDYWGQGTSVTVSSASTREDLKNVFPPEVAVFEPSEAEISHTQKATLVCLATGFYPDHVELSWWVNGKEVHSGVCTDPQPLKEQPALNDSRYCLSSRLRVSATFWQNPRNHFRCQVQFYGLSENDEWTQDRAKPVTQIVSAEAWGRADDVIKIHWQEKKSNTILGSQEGNTMKTNDTYMKFSWLTVPEKSLDKEHRCIVRHENNKNGVDQEIIFPPIKTDVITMDPKDNCSKDANDTLLLQLTNTSAYYMYLLLLLKSVVYFAIITCCLLMAMVKRKDSRGRAKRSGSGVKQTLNFDLLKLAGDVESNPGPSRGHMTEYKPTVRLATRDDVPRAVRTLAAAFADYPATRHTVDPDRHIERVTELQELFLTRVGLDIGKVWVADDGAAVAVWTTPESVEAGAVFAEIGPRMAELSGSRLAAQQQMEGLLAPHRPKEPAWFLATVGVSPDHQGKGLGSAVVLPGVEAAERAGVPAFLETSAPRNLPFYERLGFTVTADVEVPEGPRTWCMTRKPGA

SEQ ID NO: 19364 - protein, 975 aa, synthetic construct
MALPVTALLLPLALLLHAARPLEIQNPDPAVYQLRDSKSSDKSVCLFTDFDSQTNVSQSKDSDVYITDKCVLDMRSMDFKSNSAVAWSNKSDFACANAFNNSIIPEDTFFPSPESSDSTDHVKPKETENTKQPSKSCHKPKAIVHTEKVNMMSLTVLGLRMLFAKTVAVNFLLTAKLFFLLTARAKRSGSGATNFSLLKQAGDVEENPGPTSMALPVTALLLPLALLLHAARPEIVLTQSPATLSLSPGERATLSCRASQSVSSYLAWYQQKPGQAPRLLIYDASNRATGIPARFSGSGSGTDFTLTISSLEPEDFAVYYCQQRSNWPITFGQGTRLEIKGGGGSGGGGSGGGGSEVQLVESGGGLVQPDRSLRLSCAASGFTFHDYAMHWVRQAPGKGLEWVSTISWNSGTIGYADSVKGRFTISRDNAKNSLYLQMNSLRAEDTALYYCAKDIQYGNYYYGMDVWGQGTTVTVSSTREDLKNVFPPEVAVFEPSEAEISHTQKATLVCLATGFYPDHVELSWWVNGKEVHSGVCTDPQPLKEQPALNDSRYCLSSRLRVSATFWQNPRNHFRCQVQFYGLSENDEWTQDRAKPVTQIVSAEAWGRADDVIKIHWQEKKSNTILGSQEGNTMKTNDTYMKFSWLTVPEKSLDKEHRCIVRHENNKNGVDQEIIFPPIKTDVITMDPKDNCSKDANDTLLLQLTNTSAYYMYLLLLLKSVVYFAIITCCLLMAMVKRKDSRGRAKRSGSGVKQTLNFDLLKLAGDVESNPGPSRGHMTEYKPTVRLATRDDVPRAVRTLAAAFADYPATRHTVDPDRHIERVTELQELFLTRVGLDIGKVWVADDGAAVAVWTTPESVEAGAVFAEIGPRMAELSGSRLAAQQQMEGLLAPHRPKEPAWFLATVGVSPDHQGKGLGSAVVLPGVEAAERAGVPAFLETSAPRNLPFYERLGFTVTADVEVPEGPRTWCMTRKPGA

SEQ ID NO: 19365 - protein, 973 aa, synthetic construct
MALPVTALLLPLALLLHAARPLEIQNPDPAVYQLRDSKSSDKSVCLFTDFDSQTNVSQSKDSDVYITDKCVLDMRSMDFKSNSAVAWSNKSDFACANAFNNSIIPEDTFFPSPESSDSTDHVKPKETENTKQPSKSCHKPKAIVHTEKVNMMSLTVLGLRMLFAKTVAVNFLLTAKLFFLLTARAKRSGSGATNFSLLKQAGDVEENPGPTSMALPVTALLLPLALLLHAARPDIQMTQSPSSLSASVGDRVTITCRASQDVNTAVAWYQQKPGKAPKLLIYSASFLESGVPSRFSGSRSGTDFTLTISSLQPEDFATYYCQQHYTTPPTFGQTKVEIKRGGGGSGGGGSGGGGSEVQLVESGGGLVQPGGSLRLSCAASGFNIKDTYIHWVRQAPGKGLEWVARIYPTNGYTRYADSVKGRFTISADTSKNTAYLQMNSLRAEDTAVYYCSRWGGDGFYAMDVWGQGTLVTVSSTREDLKNVFPPEVAVFEPSEAEISHTQKATLVCLATGFYPDHVELSWWVNGKEVHSGVCTDPQPLKEQPALNDSRYCLSSRLRVSATFWQNPRNHFRCQVQFYGLSENDEWTQDRAKPVTQIVSAEAWGRADDVIKIHWQEKKSNTILGSQEGNTMKTNDTYMKFSWLTVPEKSLDKEHRCIVRHENNKNGVDQEIIFPPIKTDVITMDPKDNCSKDANDTLLLQLTNTSAYYMYLLLLLKSVVYFAIITCCLLMAMVKRKDSRGRAKRSGSGVKQTLNFDLLKLAGDVESNPGPSRGHMTEYKPTVRLATRDDVPRAVRTLAAAFADYPATRHTVDPDRHIERVTELQELFLTRVGLDIGKVWVADDGAAVAVWTTPESVEAGAVFAEIGPRMAELSGSRLAAQQQMEGLLAPHRPKEPAWFLATVGVSPDHQGKGLGSAVVLPGVEAAERAGVPAFLETSAPRNLPFYERLGFTVTADVEVPEGPRTWCMTRKPGA

SEQ ID NO: 19366 - protein, 852 aa, synthetic construct
MALPVTALLLPLALLLHAARPLEIQNPDPAVYQLRDSKSSDKSVCLFTDFDSQTNVSQSKDSDVYITDKCVLDMRSMDFKSNSAVAWSNKSDFACANAFNNSIIPEDTFFPSPESSDSTDHVKPKETENTKQPSKSCHKPKAIVHTEKVNMMSLTVLGLRMLFAKTVAVNFLLTAKLFFLLTARAKRSGSGATNFSLLKQAGDVEENPGPTSMALPVTALLLPLALLLHAARPDEFEVQLVESGGGLVQAGGSLRLSCAASGITFSINTMGWYRQAPGKQRELVALISSIGDTYYADSVKGRFTISRDNAKNTVYLQMNSLKPEDTAVYYCKRFRTAAQGTDYWGQGTQVTVSSTREDLKNVFPPEVAVFEPSEAEISHTQKATLVCLATGFYPDHVELSWWVNGKEVHSGVCTDPQPLKEQPALNDSRYCLSSRLRVSATFWQNPRNHFRCQVQFYGLSENDEWTQDRAKPVTQIVSAEAWGRADDVIKIHWQEKKSNTILGSQEGNTMKTNDTYMKFSWLTVPEKSLDKEHRCIVRHENNKNGVDQEIIFPPIKTDVITMDPKDNCSKDANDTLLLQLTNTSAYYMYLLLLLKSVVYFAIITCCLLMAMVKRKDSRGRAKRSGSGVKQTLNFDLLKLAGDVESNPGPSRGHMTEYKPTVRLATRDDVPRAVRTLAAAFADYPATRHTVDPDRHIERVTELQELFLTRVGLDIGKVWVADDGAAVAVWTTPESVEAGAVFAEIGPRMAELSGSRLAAQQQMEGLLAPHRPKEPAWFLATVGVSPDHQGKGLGSAVVLPGVEAAERAGVPAFLETSAPRNLPFYERLGFTVTADVEVPEGPRTWCMTRKPGA

SEQ ID NO: 19367 - protein, 852 aa, synthetic construct; identical to SEQ ID NO: 19366

SEQ ID NO: 19368 - protein, 1117 aa, synthetic construct
MALPVTALLLPLALLLHAARPLEIQNPDPAVYQLRDSKSSDKSVCLFTDFDSQTNVSQSKDSDVYITDKCVLDMRSMDFKSNSAVAWSNKSDFACANAFNNSIIPEDTFFPSPESSDSTDHVKPKETENTKQPSKSCHKPKAIVHTEKVNMMSLTVLGLRMLFAKTVAVNFLLTAKLFFLLTARAKRSGSGATNFSLLKQAGDVEENPGPTSMALPVTALLLPLALLLHAARPQVQLVESGGGLVQAGDSVTLSCTASGRTFSSYALAWFRQRPGKEREFVAGLRWGGPTNYADSVKDRFTISGDSAKHTMYLQMNSLKPEDTAVYYCGYNPGGWAVPSQYEYDSWGQGTQVTVSSGTGGGGSGGGGSGGGGSEFDIQMTQSPSSLSASVGDRVTITCKASDHINNWLAWYQQKPGQAPKLLIYGATTLETGVPSRFSGSGSGTDYTLTISSLQPEDFATYYCQQSWNTPWTFGQGTKLEIKRGGGGSGGGGSGGGGSQVQLQQPGAELVKPGASVKMSCKASGYAFSSYWINWMKQKPGQGLEWIGQIYPGDGDTNYNGKFKGRATLTADTSSSTAYMQLSSLTSEDSAVYFCARSITTVVGCAMDYWGQGTSVTVSSTREDLKNVFPPEVAVFEPSEAEISHTQKATLVCLATGFYPDHVELSWWVNGKEVHSGVCTDPQPLKEQPALNDSRYCLSSRLRVSATFWQNPRNHFRCQVQFYGLSENDEWTQDRAKPVTQIVSAEAWGRADDVIKIHWQEKKSNTILGSQEGNTMKTNDTYMKFSWLTVPEKSLDKEHRCIVRHENNKNGVDQEIIFPPIKTDVITMDPKDNCSKDANDTLLLQLTNTSAYYMYLLLLLKSVVYFAIITCCLLMAMVKRKDSRGRAKRSGSGVKQTLNFDLLKLAGDVESNPGPSRGHMTEYKPTVRLATRDDVPRAVRTLAAAFADYPATRHTVDPDRHIERVTELQELFLTRVGLDIGKVWVADDGAAVAVWTTPESVEAGAVFAEIGPRMAELSGSRLAAQQQMEGLLAPHRPKEPAWFLATVGVSPDHQGKGLGSAVVLPGVEAAERAGVPAFLETSAPRNLPFYERLGFTVTADVEVPEGPRTWCMTRKPGA

SEQ ID NO: 19369 - protein, 1246 aa, synthetic construct
MALPVTALLLPLALLLHAARPLEIQNPDPAVYQLRDSKSSDKSVCLFTDFDSQTNVSQSKDSDVYITDKCVLDMRSMDFKSNSAVAWSNKSDFACANAFNNSIIPEDTFFPSPESSDSTDHVKPKETENTKQPSKSCHKPKAIVHTEKVNMMSLTVLGLRMLFAKTVAVNFLLTAKLFFLLTARAKRSGSGATNFSLLKQAGDVEENPGPTSMALPVTALLLPLALLLHAARPEVQLLESGGGLVQPGGSLRLSCAASGFTFSSYAMSWVRQAPGKGLEWVSSISGSGDYIYYADSVKGRFTISRDISKNTLYLQMNSLRAEDTAVYYCAKEGTGANSSLADYRGQGTLVTVSSGGGSGGGSQVQLVESGGGLVQAGDSVTLSCTASGRTFSSYALAWFRQRPGKEREFVAGLRWGGPTNYADSVKDRFTISGDSAKHTMYLQMNSLKPEDTAVYYCGYNPGGWAVPSQYEYDSWGQGTQVTVSSGTGGGGSGGGGSGGGGSEFDIQMTQSPSSLSASVGDRVTITCKASDHINNWLAWYQQKPGQAPKLLIYGATTLETGVPSRFSGSGSGTDYTLTISSLQPEDFATYYCQQSWNTPWTFGQGTKLEIKRGGGGSGGGGSGGGGSQVQLQQPGAELVKPGASVKMSCKASGYAFSSYWINWMKQKPGQGLEWIGQIYPGDGDTNYNGKFKGRATLTADTSSSTAYMQLSSLTSEDSAVYFCARSITTVVGCAMDYWGQGTSVTVSSTREDLKNVFPPEVAVFEPSEAEISHTQKATLVCLATGFYPDHVELSWWVNGKEVHSGVCTDPQPLKEQPALNDSRYCLSSRLRVSATFWQNPRNHFRCQVQFYGLSENDEWTQDRAKPVTQIVSAEAWGRADDVIKIHWQEKKSNTILGSQEGNTMKTNDTYMKFSWLTVPEKSLDKEHRCIVRHENNKNGVDQEIIFPPIKTDVITMDPKDNCSKDANDTLLLQLTNTSAYYMYLLLLLKSVVYFAIITCCLLMAMVKRKDSRGRAKRSGSGVKQTLNFDLLKLAGDVESNPGPSRGHMTEYKPTVRLATRDDVPRAVRTLAAAFADYPATRHTVDPDRHIERVTELQELFLTRVGLDIGKVWVADDGAAVAVWTTPESVEAGAVFAEIGPRMAELSGSRLAAQQQMEGLLAPHRPKEPAWFLATVGVSPDHQGKGLGSAVVLPGVEAAERAGVPAFLETSAPRNLPFYERLGFTVTADVEVPEGPRTWCMTRKPGA

SEQ ID NO: 19370 - protein, 1244 aa, synthetic construct
MALPVTALLLPLALLLHAARPLEIQNPDPAVYQLRDSKSSDKSVCLFTDFDSQTNVSQSKDSDVYITDKCVLDMRSMDFKSNSAVAWSNKSDFACANAFNNSIIPEDTFFPSPESSDSTDHVKPKETENTKQPSKSCHKPKAIVHTEKVNMMSLTVLGLRMLFAKTVAVNFLLTAKLFFLLTARAKRSGSGATNFSLLKQAGDVEENPGPTSMALPVTALLLPLALLLHAARPGVTQSPTHLIKTRGQQATLRCSPISGHTSVYWYQQALGLGLQFLLWYDEGEERNRGNFPPRFSGRQFPNYSSELNVNALELEDSALYLCASSLGGPRGLAGLRGDEQFFGPGTRLTVLEGGGSGGGSQVQLVESGGGLVQAGDSVTLSCTASGRTFSSYALAWFRQRPGKEREFVAGLRWGGPTNYADSVKDRFTISGDSAKHTMYLQMNSLKPEDTAVYYCGYNPGGWAVPSQYEYDSWGQGTQVTVSSGTGGGGSGGGGSGGGGSEFDIQMTQSPSSLSASVGDRVTITCKASDHINNWLAWYQQKPGQAPKLLIYGATTLETGVPSRFSGSGSGTDYTLTISSLQPEDFATYYCQQSWNTPWTFGQGTKLEIKRGGGGSGGGGSGGGGSQVQLQQPGAELVKPGASVKMSCKASGYAFSSYWINWMKQKPGQGLEWIGQIYPGDGDTNYNGKFKGRATLTADTSSSTAYMQLSSLTSEDSAVYFCARSITTVVGCAMDYWGQGTSVTVSSTREDLKNVFPPEVAVFEPSEAEISHTQKATLVCLATGFYPDHVELSWWVNGKEVHSGVCTDPQPLKEQPALNDSRYCLSSRLRVSATFWQNPRNHFRCQVQFYGLSENDEWTQDRAKPVTQIVSAEAWGRADDVIKIHWQEKKSNTILGSQEGNTMKTNDTYMKFSWLTVPEKSLDKEHRCIVRHENNKNGVDQEIIFPPIKTDVITMDPKDNCSKDANDTLLLQLTNTSAYYMYLLLLLKSVVYFAIITCCLLMAMVKRKDSRGRAKRSGSGVKQTLNFDLLKLAGDVESNPGPSRGHMTEYKPTVRLATRDDVPRAVRTLAAAFADYPATRHTVDPDRHIERVTELQELFLTRVGLDIGKVWVADDGAAVAVWTTPESVEAGAVFAEIGPRMAELSGSRLAAQQQMEGLLAPHRPKEPAWFLATVGVSPDHQGKGLGSAVVLPGVEAAERAGVPAFLETSAPRNLPFYERLGFTVTADVEVPEGPRTWCMTRKPGA

SEQ ID NO: 19371 - protein, 1005 aa, synthetic construct
MALPVTALLLPLALLLHAARPLEIQNPDPAVYQLRDSKSSDKSVCLFTDFDSQTNVSQSKDSDVYITDKCVLDMRSMDFKSNSAVAWSNKSDFACANAFNNSIIPEDTFFPSPESSDSTDHVKPKETENTKQPSKSCHKPKAIVHTEKVNMMSLTVLGLRMLFAKTVAVNFLLTAKLFFLLTARAKRSGSGATNFSLLKQAGDVEENPGPTSMALPVTALLLPLALLLHAARPGVTQSPTHLIKTRGQQATLRCSPISGHTSVYWYQQALGLGLQFLLWYDEGEERNRGNFPPRFSGRQFPNYSSELNVNALELEDSALYLCASSLGGPRGLAGLRGDEQFFGPGTRLTVLEGGGSGGGSGVTQSPTHLIKTRGQQATLRCSPISGHTSVYWYQQALGLGLQFLLWYDEGEERNRGNFPPRFSGRQFPNYSSELNVNALELEDSALYLCASSLGGDELGADGNEQFFGPGTRLTVLEGTGGGGSGGGGSGGGGSEFDIQMTQSPSSLSASVGDRVTITCKASDHINNWLAWYQQKPGQAPKLLIYGATTLETGVPSRFSGSGSGTDYTLTISSLQPEDFATYYCQQSWNTPWTFGQGTKLEIKRGGGGSGGGGSGGGGSQVQLQQPGAELVKPGASVKMSCKASGYAFSSYWINWMKQKPGQGLEWIGQIYPGDGDTNYNGKFKGRATLTADTSSSTAYMQLSSLTSEDSAVYFCARSITTVVGCAMDYWGQGTSVTVSSTREDLKNVFPPEVAVFEPSEAEISHTQKATLVCLATGFYPDHVELSWWVNGKEVHSGVCTDPQPLKEQPALNDSRYCLSSRLRVSATFWQNPRNHFRCQVQFYGLSENDEWTQDRAKPVTQIVSAEAWGRADDVIKIHWQEKKSNTILGSQEGNTMKTNDTYMKFSWLTVPEKSLDKEHRCIVRHENNKNGVDQEIIFPPIKTDVITMDPKDNCSKDANDTLLLQLTNTSAYYMYLLLLLKSVVYFAIITCCLLMAMVKRKDSRG

SEQ ID NO: 19372 - protein, 858 aa, synthetic construct
MALPVTALLLPLALLLHAARPLEIQNPDPAVYQLRDSKSSDKSVCLFTDFDSQTNVSQSKDSDVYITDKCVLDMRSMDFKSNSAVAWSNKSDFACANAFNNSIIPEDTFFPSPESSDSTDHVKPKETENTKQPSKSCHKPKAIVHTEKVNMMSLTVLGLRMLFAKTVAVNFLLTAKLFFLLTARAKRSGSGATNFSLLKQAGDVEENPGPTSMALPVTALLLPLALLLHAARPDEFGSDLGIKLLFAAAKGQDDEVRILLAAGADVNAKDFEGYTPLHVAAYDGHLEIVEVLLKAGADVNAKDSQGRTPLHEAAYSGHLEIVEVLLKAGADVNAQDDAGETPADLAAAWGHEDIAEVLQKTREDLKNVFPPEVAVFEPSEAEISHTQKATLVCLATGFYPDHVELSWWVNGKEVHSGVCTDPQPLKEQPALNDSRYCLSSRLRVSATFWQNPRNHFRCQVQFYGLSENDEWTQDRAKPVTQIVSAEAWGRADDVIKIHWQEKKSNTILGSQEGNTMKTNDTYMKFSWLTVPEKSLDKEHRCIVRHENNKNGVDQEIIFPPIKTDVITMDPKDNCSKDANDTLLLQLTNTSAYYMYLLLLLKSVVYFAIITCCLLMAMVKRKDSRGRAKRSGSGVKQTLNFDLLKLAGDVESNPGPSRGHMTEYKPTVRLATRDDVPRAVRTLAAAFADYPATRHTVDPDRHIERVTELQELFLTRVGLDIGKVWVADDGAAVAVWTTPESVEAGAVFAEIGPRMAELSGSRLAAQQQMEGLLAPHRPKEPAWFLATVGVSPDHQGKGLGSAVVLPGVEAAERAGVPAFLETSAPRNLPFYERLGFTVTADVEVPEGPRTWCMTRKPGA

SEQ ID NO: 19373 - protein, 787 aa, synthetic construct
MALPVTALLLPLALLLHAARPLEIQNPDPAVYQLRDSKSSDKSVCLFTDFDSQTNVSQSKDSDVYITDKCVLDMRSMDFKSNSAVAWSNKSDFACANAFNNSIIPEDTFFPSPESSDSTDHVKPKETENTKQPSKSCHKPKAIVHTEKVNMMSLTVLGLRMLFAKTVAVNFLLTAKLFFLLTARAKRSGSGATNFSLLKQAGDVEENPGPTSMDWIWRILFLVGAATGAHSFEGSGFEYAKEMRNAYWEIALLPNLTNQQKRAPIRKLYDDPSQSSELLSEAKKLNDSQTREDLKNVFPPEVAVFEPSEAEISHTQKATLVCLATGFYPDHVELSWWVNGKEVHSGVCTDPQPLKEQPALNDSRYCLSSRLRVSATFWQNPRNHFRCQVQFYGLSENDEWTQDRAKPVTQIVSAEAWGRADDVIKIHWQEKKSNTILGSQEGNTMKTNDTYMKFSWLTVPEKSLDKEHRCIVRHENNKNGVDQEIIFPPIKTDVITMDPKDNCSKDANDTLLLQLTNTSAYYMYLLLLLKSVVYFAIITCCLLMAMVKRKDSRGRAKRSGSGVKQTLNFDLLKLAGDVESNPGPSRGHMTEYKPTVRLATRDDVPRAVRTLAAAFADYPATRHTVDPDRHIERVTELQELFLTRVGLDIGKVWVADDGAAVAVWTTPESVEAGAVFAEIGPRMAELSGSRLAAQQQMEGLLAPHRPKEPAWFLATVGVSPDHQGKGLGSAVVLPGVEAAERAGVPAFLETSAPRNLPFYERLGFTVTADVEVPEGPRTWCMTRKPGA

SEQ ID NO: 19374 - protein, 1009 aa, synthetic construct
MALPVTALLLPLALLLHAARPLEIQNPDPAVYQLRDSKSSDKSVCLFTDFDSQTNVSQSKDSDVYITDKCVLDMRSMDFKSNSAVAWSNKSDFACANAFNNSIIPEDTFFPSPESSDSTDHVKPKETENTKQPSKSCHKPKAIVHTEKVNMMSLTVLGLRMLFAKTVAVNFLLTAKLFFLLTARAKRSGSGATNFSLLKQAGDVEENPGPTSMALPVTALLLPLALLLHAARPDEFEVQLVESGGGLVQAGGSLRLSCAASGITFSINTMGWYRQAPGKQRELVALISSIGDTYYADSVKGRFTISRDNAKNTVYLQMNSLKPEDTAVYYCKRFRTAAQGTDYWGQGTQVTVSSLEGGGGSGGGGSGGGGSGSGGSGSGGSGSGGSGSGGSFEVQLVESGGGLVQPGGSLRLSCAASGSIFGFNDMAWYRQAPGKQRELVALISRVGVTSSADSVKGRFTISRVNAKDTVYLQMNSLKPEDTAVYYCYMDQRLDGSTLAYWGQGTQVTVSSTREDLKNVFPPEVAVFEPSEAEISHTQKATLVCLATGFYPDHVELSWWVNGKEVHSGVCTDPQPLKEQPALNDSRYCLSSRLRVSATFWQNPRNHFRCQVQFYGLSENDEWTQDRAKPVTQIVSAEAWGRADDVIKIHWQEKKSNTILGSQEGNTMKTNDTYMKFSWLTVPEKSLDKEHRCIVRHENNKNGVDQEIIFPPIKTDVITMDPKDNCSKDANDTLLLQLTNTSAYYMYLLLLLKSVVYFAIITCCLLMAMVKRKDSRGRAKRSGSGVKQTLNFDLLKLAGDVESNPGPSRGHMTEYKPTVRLATRDDVPRAVRTLAAAFADYPATRHTVDPDRHIERVTELQELFLTRVGLDIGKVWVADDGAAVAVWTTPESVEAGAVFAEIGPRMAELSGSRLAAQQQMEGLLAPHRPKEPAWFLATVGVSPDHQGKGLGSAVVLPGVEAAERAGVPAFLETSAPRNLPFYERLGFTVTADVEVPEGPRTWCMTRKPGA

SEQ ID NO: 19375 - protein, 923 aa, synthetic construct
MALPVTALLLPLALLLHAARPLEIQNPDPAVYQLRDSKSSDKSVCLFTDFDSQTNVSQSKDSDVYITDKCVLDMRSMDFKSNSAVAWSNKSDFACANAFNNSIIPEDTFFPSPESSDSTDHVKPKETENTKQPSKSCHKPKAIVHTEKVNMMSLTVLGLRMLFAKTVAVNFLLTAKLFFLLTARAKRSGSGATNFSLLKQAGDVEENPGPTSMALPVTALLLPLALLLHAARPGMRTEDLPKAVVFLEPQWYRVLEKDSVTLKCQGAYSPEDNSTQWFHNESLISSQASSYFIDAATVDDSGEYRCQTNLSTLSDPVQLEVHIGWLLLQAPRWVFKEEDPIHLRCHSWKNTALHKVTYLQNGKGRKYFHHNSDFYIPKATLKDSGSYFCRGLVGSKNVSSETVNITITQGLAVSTISSFFPPGYQTREDLKNVFPPEVAVFEPSEAEISHTQKATLVCLATGFYPDHVELSWWVNGKEVHSGVCTDPQPLKEQPALNDSRYCLSSRLRVSATFWQNPRNHFRCQVQFYGLSENDEWTQDRAKPVTQIVSAEAWGRADDVIKIHWQEKKSNTILGSQEGNTMKTNDTYMKFSWLTVPEKSLDKEHRCIVRHENNKNGVDQEIIFPPIKTDVITMDPKDNCSKDANDTLLLQLTNTSAYYMYLLLLLKSVVYFAIITCCLLMAMVKRKDSRGRAKRSGSGVKQTLNFDLLKLAGDVESNPGPSRGHMTEYKPTVRLATRDDVPRAVRTLAAAFADYPATRHTVDPDRHIERVTELQELFLTRVGLDIGKVWVADDGAAVAVWTTPESVEAGAVFAEIGPRMAELSGSRLAAQQQMEGLLAPHRPKEPAWFLATVGVSPDHQGKGLGSAVVLPGVEAAERAGVPAFLETSAPRNLPFYERLGFTVTADVEVPEGPRTWCMTRKPGA

SEQ ID NO: 19376 - protein, 551 aa, synthetic construct
MALPVTALLLPLALLLHAARPLEIQNPDPAVYQLRDSKSSDKSVCLFTDFDSQTNVSQSKDSDVYITDKCVLDMRSMDFKSNSAVAWSNKSDFACANAFNNSIIPEDTFFPSPESSDSTDHVKPKETENTKQPSKSCHKPKAIVHTEKVNMMSLTVLGLRMLFAKTVAVNFLLTAKLFFLLTARAKRSGSGATNFSLLKQAGDVEENPGPTSATMALPVTALLLPLALLLHAARPMDPDLEIRAAFLRQRNTALRTEVAELEQEVQRLENEVSQYETRYGPLGGGKTREDLKNVFPPEVAVFEPSEAEISHTQKATLVCLATGFYPDHVELSWWVNGKEVHSGVCTDPQPLKEQPALNDSRYCLSSRLRVSATFWQNPRNHFRCQVQFYGLSENDEWTQDRAKPVTQIVSAEAWGRADDVIKIHWQEKKSNTILGSQEGNTMKTNDTYMKFSWLTVPEKSLDKEHRCIVRHENNKNGVDQEIIFPPIKTDVITMDPKDNCSKDANDTLLLQLTNTSAYYMYLLLLLKSVVYFAIITCCLLMAMVKRKDSRG

SEQ ID NO: 19377 - protein, 551 aa, synthetic construct
MALPVTALLLPLALLLHAARPLEIQNPDPAVYQLRDSKSSDKSVCLFTDFDSQTNVSQSKDSDVYITDKCVLDMRSMDFKSNSAVAWSNKSDFACANAFNNSIIPEDTFFPSPESSDSTDHVKPKETENTKQPSKSCHKPKAIVHTEKVNMMSLTVLGLRMLFAKTVAVNFLLTAKLFFLLTARAKRSGSGATNFSLLKQAGDVEENPGPTSATMALPVTALLLPLALLLHAARPMDPDLEIEAAFLERENTALETRVAELRQRVQRLRNRVSQYRTRYGPLGGGKTREDLKNVFPPEVAVFEPSEAEISHTQKATLVCLATGFYPDHVELSWWVNGKEVHSGVCTDPQPLKEQPALNDSRYCLSSRLRVSATFWQNPRNHFRCQVQFYGLSENDEWTQDRAKPVTQIVSAEAWGRADDVIKIHWQEKKSNTILGSQEGNTMKTNDTYMKFSWLTVPEKSLDKEHRCIVRHENNKNGVDQEIIFPPIKTDVITMDPKDNCSKDANDTLLLQLTNTSAYYMYLLLLLKSVVYFAIITCCLLMAMVKRKDSRG

SEQ ID NO: 19378 - protein, 786 aa, synthetic construct
MALPVTALLLPLALLLHAARPLEIQNPDPAVYQLRDSKSSDKSVCLFTDFDSQTNVSQSKDSDVYITDKCVLDMRSMDFKSNSAVAWSNKSDFACANAFNNSIIPEDTFFPSPESSDSTDHVKPKETENTKQPSKSCHKPKAIVHTEKVNMMSLTVLGLRMLFAKTVAVNFLLTAKLFFLLTARAKRSGSGATNFSLLKQAGDVEENPGPTSATMALPVTALLLPLALLLHAARPLFNQEVQIPLTESYCGPCPKNWICYKNNCYQFFDESKNWYESQASCMSQNASLLKVYSKEDQDLLKLVKSAHWMGLVHIPTNGSWQWEDGSILSPNLLTIIEMQKGDCALYASSFKGYIENCSTPNTYICMQRTVSGGGGSGGGGSGGGGDLFNQEVQIPLTESYCGPCPKNWICYKNNCYQFFDESKNWYESQASCMSQNASLLKVYSKEDQDLLKLVKSAHWMGLVHIPTNGSWQWEDGSILSPNLLTIIEMQKGDCALYASSFKGYIENCSTPNTYICMQRTVTREDLKNVFPPEVAVFEPSEAEISHTQKATLVCLATGFYPDHVELSWWVNGKEVHSGVCTDPQPLKEQPALNDSRYCLSSRLRVSATFWQNPRNHFRCQVQFYGLSENDEWTQDRAKPVTQIVSAEAWGRADDVIKIHWQEKKSNTILGSQEGNTMKTNDTYMKFSWLTVPEKSLDKEHRCIVRHENNKNGVDQEIIFPPIKTDVITMDPKDNCSKDANDTLLLQLTNTSAYYMYLLLLLKSVVYFAIITCCLLMAMVKRKDSRG

SEQ ID NO: 19379 - protein, 786 aa, synthetic construct
MALPVTALLLPLALLLHAARPLEIQNPDPAVYQLRDSKSSDKSVCLFTDFDSQTNVSQSKDSDVYITDKCVLDMRSMDFKSNSAVAWSNKSDFACANAFNNSIIPEDTFFPSPESSDSTDHVKPKETENTKQPSKSCHKPKAIVHTEKVNMMSLTVLGLRMLFAKTVAVNFLLTAKLFFLLTARAKRSGSGATNFSLLKQAGDVEENPGPTSATMALPVTALLLPLALLLHAARPLFNQEVQIPLTESYCGPCPKNWICYKNNCYQFFDESKNWYESQASCMSQNASLLKVYSKEDQDLLKLVKSAHWMGLVHIPTNGSWQWEDGSILSPNLLTIIEMQKGDCALYASSFKGFIENCSTPNTYICMQRTVGGGGSGGGGSGGGGSDLFNQEVQIPLTESYCGPCPKNWICYKNNCYQFFDESKNWYESQASCMSQNASLLKVYSKEDQDLLKLVKSAHWMGLVHIPTNGSWQWEDGSILSPNLLTIIEMQKGDCALYASSFKGFIENCSTPNTYICMQRTVTREDLKNVFPPEVAVFEPSEAEISHTQKATLVCLATGFYPDHVELSWWVNGKEVHSGVCTDPQPLKEQPALNDSRYCLSSRLRVSATFWQNPRNHFRCQVQFYGLSENDEWTQDRAKPVTQIVSAEAWGRADDVIKIHWQEKKSNTILGSQEGNTMKTNDTYMKFSWLTVPEKSLDKEHRCIVRHENNKNGVDQEIIFPPIKTDVITMDPKDNCSKDANDTLLLQLTNTSAYYMYLLLLLKSVVYFAIITCCLLMAMVKRKDSRG

SEQ ID NO: 19380 - protein, 812 aa, synthetic construct
MALPVTALLLPLALLLHAARPLEIQNPDPAVYQLRDSKSSDKSVCLFTDFDSQTNVSQSKDSDVYITDKCVLDMRSMDFKSNSAVAWSNKSDFACANAFNNSIIPEDTFFPSPESSDSTDHVKPKETENTKQPSKSCHKPKAIVHTEKVNMMSLTVLGLRMLFAKTVAVNFLLTAKLFFLLTARAKRSGSGATNFSLLKQAGDVEENPGPTSMALPVTALLLPLALLLHAARPMDPDLEIRAAFLRQRNTALRTEVAELEQEVQRLENEVSQYETRYGPLGGGKGTGGGGSGGGGSGGGGSEFDIQMTQSPSSLSASVGDRVTITCKASDHINNWLAWYQQKPGQAPKLLIYGATTLETGVPSRFSGSGSGTDYTLTISSLQPEDFATYYCQQSWNTPWTFGQGTKLEIKRGGGGSGGGGSGGGGSQVQLQQPGAELVKPGASVKMSCKASGYAFSSYWINWMKQKPGQGLEWIGQIYPGDGDTNYNGKFKGRATLTADTSSSTAYMQLSSLTSEDSAVYFCARSITTVVGCAMDYWGQGTSVTVSSTREDLKNVFPPEVAVFEPSEAEISHTQKATLVCLATGFYPDHVELSWWVNGKEVHSGVCTDPQPLKEQPALNDSRYCLSSRLRVSATFWQNPRNHFRCQVQFYGLSENDEWTQDRAKPVTQIVSAEAWGRADDVIKIHWQEKKSNTILGSQEGNTMKTNDTYMKFSWLTVPEKSLDKEHRCIVRHENNKNGVDQEIIFPPIKTDVITMDPKDNCSKDANDTLLLQLTNTSAYYMYLLLLLKSVVYFAIITCCLLMAMVKRKDSRG

SEQ ID NO: 19381 - protein, 1047 aa, synthetic construct
MALPVTALLLPLALLLHAARPLEIQNPDPAVYQLRDSKSSDKSVCLFTDFDSQTNVSQSKDSDVYITDKCVLDMRSMDFKSNSAVAWSNKSDFACANAFNNSIIPEDTFFPSPESSDSTDHVKPKETENTKQPSKSCHKPKAIVHTEKVNMMSLTVLGLRMLFAKTVAVNFLLTAKLFFLLTARAKRSGSGATNFSLLKQAGDVEENPGPTSMALPVTALLLPLALLLHAARPLFNQEVQIPLTESYCGPCPKNWICYKNNCYQFFDESKNWYESQASCMSQNASLLKVYSKEDQDLLKLVKSAHWMGLVHIPTNGSWQWEDGSILSPNLLTIIEMQKGDCALYASSFKGFIENCSTPNTYICMQRTVGGGGSGGGGSGGGGSDLFNQEVQIPLTESYCGPCPKNWICYKNNCYQFFDESKNWYESQASCMSQNASLLKVYSKEDQDLLKLVKSAHWMGLVHIPTNGSWQWEDGSILSPNLLTIIEMQKGDCALYASSFKGFIENCSTPNTYICMQRTVGTGGGGSGGGGSGGGGSEFDIQMTQSPSSLSASVGDRVTITCKASDHINNWLAWYQQKPGQAPKLLIYGATTLETGVPSRFSGSGSGTDYTLTISSLQPEDFATYYCQQSWNTPWTFGQGTKLEIKRGGGGSGGGGSGGGGSQVQLQQPGAELVKPGASVKMSCKASGYAFSSYWINWMKQKPGQGLEWIGQIYPGDGDTNYNGKFKGRATLTADTSSSTAYMQLSSLTSEDSAVYFCARSITTVVGCAMDYWGQGTSVTVSSTREDLKNVFPPEVAVFEPSEAEISHTQKATLVCLATGFYPDHVELSWWVNGKEVHSGVCTDPQPLKEQPALNDSRYCLSSRLRVSATFWQNPRNHFRCQVQFYGLSENDEWTQDRAKPVTQIVSAEAWGRADDVIKIHWQEKKSNTILGSQEGNTMKTNDTYMKFSWLTVPEKSLDKEHRCIVRHENNKNGVDQEIIFPPIKTDVITMDPKDNCSKDANDTLLLQLTNTSAYYMYLLLLLKSVVYFAIITCCLLMAMVKRKDSRG

SEQ ID NO: 19382 - protein, 752 aa, synthetic construct
MALPVTALLLPLALLLHAARPLEIQNPDPAVYQLRDSKSSDKSVCLFTDFDSQTNVSQSKDSDVYITDKCVLDMRSMDFKSNSAVAWSNKSDFACANAFNNSIIPEDTFFPSPESSDSTDHVKPKETENTKQPSKSCHKPKAIVHTEKVNMMSLTVLGLRMLFAKTVAVNFLLTAKLFFLLTARAKRSGSGATNFSLLKQAGDVEENPGPTSMALPVTALLLPLALLLHAARPQSVLTQPPSVSGAPGQRVTISCTGSSSNIGAGYDVHWYQQLPGTAPKLLIFGNSNRPSGVPDRFSGFKSGTSASLAITGLQAEDEADYFCQSYDSSLSGSGVFGTGTKVTVLGGGGGSGGGGSGGGGSQMQLVQSGGGLVQPGRSLRLSCAASGFTFDDYAMHWVRQAPGKGLEWVSGISWNSGSIGYADSVKGRFTISRDNAKNSLYLQMNSLRAEDTALYYCAKDIHSGSYYGLLYYAMDVWGQGTTVTVSSTREDLKNVFPPEVAVFEPSEAEISHTQKATLVCLATGFYPDHVELSWWVNGKEVHSGVCTDPQPLKEQPALNDSRYCLSSRLRVSATFWQNPRNHFRCQVQFYGLSENDEWTQDRAKPVTQIVSAEAWGRADDVIKIHWQEKKSNTILGSQEGNTMKTNDTYMKFSWLTVPEKSLDKEHRCIVRHENNKNGVDQEIIFPPIKTDVITMDPKDNCSKDANDTLLLQLTNTSAYYMYLLLLLKSVVYFAIITCCLLMAMVKRKDSRG

SEQ ID NO: 19383 - protein, 589 aa, synthetic construct
MALPVTALLLPLALLLHAARPLEIQNPDPAVYQLRDSKSSDKSVCLFTDFDSQTNVSQSKDSDVYITDKCVLDMRSMDFKSNSAVAWSNKSDFACANAFNNSIIPEDTFFPSPESSDSTDHVKPKETENTKQPSKSCHKPKAIVHTEKVNMMSLTVLGLRMLFAKTVAVNFLLTAKLFFLLTARAKRSGSGATNFSLLKQAGDVEENPGPTSMALPVTALLLPLALLLHAARPMCMPCFTTDHQMARKCDDCCGGKGRGKCYGPQCLCRLEGGGGSGGGGSGGGGSFEVCMPCFTTDQQMARKCSDCCGGKGRGKCYGPQCLCRTREDLKNVFPPEVAVFEPSEAEISHTQKATLVCLATGFYPDHVELSWWVNGKEVHSGVCTDPQPLKEQPALNDSRYCLSSRLRVSATFWQNPRNHFRCQVQFYGLSENDEWTQDRAKPVTQIVSAEAWGRADDVIKIHWQEKKSNTILGSQEGNTMKTNDTYMKFSWLTVPEKSLDKEHRCIVRHENNKNGVDQEIIFPPIKTDVITMDPKDNCSKDANDTLLLQLTNTSAYYMYLLLLLKSVVYFAIITCCLLMAMVKRKDSRG

SEQ ID NO: 19384 - protein, 799 aa, synthetic construct
MALPVTALLLPLALLLHAARPLEIQNPDPAVYQLRDSKSSDKSVCLFTDFDSQTNVSQSKDSDVYITDKCVLDMRSMDFKSNSAVAWSNKSDFACANAFNNSIIPEDTFFPSPESSDSTDHVKPKETENTKQPSKSCHKPKAIVHTEKVNMMSLTVLGLRMLFAKTVAVNFLLTAKLFFLLTARAKRSGSGATNFSLLKQAGDVEENPGPTSMALPVTALLLPLALLLHAARPFEVCMPCFTTDQQMARKCSDCCGGKGRGKCYGPQCLCRGTGGGGSGGGGSGGGGSEFDIQMTQSPSSLSASVGDRVTITCKASDHINNWLAWYQQKPGQAPKLLIYGATTLETGVPSRFSGSGSGTDYTLTISSLQPEDFATYYCQQSWNTPWTFGQGTKLEIKRGGGGSGGGGSGGGGSQVQLQQPGAELVKPGASVKMSCKASGYAFSSYWINWMKQKPGQGLEWIGQIYPGDGDTNYNGKFKGRATLTADTSSSTAYMQLSSLTSEDSAVYFCARSITTVVGCAMDYWGQGTSVTVSSTREDLKNVFPPEVAVFEPSEAEISHTQKATLVCLATGFYPDHVELSWWVNGKEVHSGVCTDPQPLKEQPALNDSRYCLSSRLRVSATFWQNPRNHFRCQVQFYGLSENDEWTQDRAKPVTQIVSAEAWGRADDVIKIHWQEKKSNTILGSQEGNTMKTNDTYMKFSWLTVPEKSLDKEHRCIVRHENNKNGVDQEIIFPPIKTDVITMDPKDNCSKDANDTLLLQLTNTSAYYMYLLLLLKSVVYFAIITCCLLMAMVKRKDSRG

SEQ ID NO: 19385 - protein, 929 aa, synthetic construct
MALPVTALLLPLALLLHAARPLEIQNPDPAVYQLRDSKSSDKSVCLFTDFDSQTNVSQSKDSDVYITDKCVLDMRSMDFKSNSAVAWSNKSDFACANAFNNSIIPEDTFFPSPESSDSTDHVKPKETENTKQPSKSCHKPKAIVHTEKVNMMSLTVLGLRMLFAKTVAVNFLLTAKLFFLLTARAKRSGSGATNFSLLKQAGDVEENPGPTSMALPVTALLLPLALLLHAARPFESPVAPACDPRLLNKLLRDSHLLHSRLSQCPDVDPLSIPVLLPAVDFSLGEWKTQTEQSKAQDILGAVSLLLEGVMAARGQLEPSCLSSLLGQLSGQVRLLLGALQGLLGTQLPLQGRTTAHKDPNALFLSLQQLLRGKVRFLLLVEGPTLCVRRTLPTTAVPSSTSGTGGGGSGGGGSGGGGSEFDIQMTQSPSSLSASVGDRVTITCKASDHINNWLAWYQQKPGQAPKLLIYGATTLETGVPSRFSGSGSGTDYTLTISSLQPEDFATYYCQQSWNTPWTFGQGTKLEIKRGGGGSGGGGSGGGGSQVQLQQPGAELVKPGASVKMSCKASGYAFSSYWINWMKQKPGQGLEWIGQIYPGDGDTNYNGKFKGRATLTADTSSSTAYMQLSSLTSEDSAVYFCARSITTVVGCAMDYWGQGTSVTVSSTREDLKNVFPPEVAVFEPSEAEISHTQKATLVCLATGFYPDHVELSWWVNGKEVHSGVCTDPQPLKEQPALNDSRYCLSSRLRVSATFWQNPRNHFRCQVQFYGLSENDEWTQDRAKPVTQIVSAEAWGRADDVIKIHWQEKKSNTILGSQEGNTMKTNDTYMKFSWLTVPEKSLDKEHRCIVRHENNKNGVDQEIIFPPIKTDVITMDPKDNCSKDANDTLLLQLTNTSAYYMYLLLLLKSVVYFAIITCCLLMAMVKRKDSRG

SEQ ID NO: 19386 - protein, 836 aa, synthetic construct
MALPVTALLLPLALLLHAARPLEIQNPDPAVYQLRDSKSSDKSVCLFTDFDSQTNVSQSKDSDVYITDKCVLDMRSMDFKSNSAVAWSNKSDFACANAFNNSIIPEDTFFPSPESSDSTDHVKPKETENTKQPSKSCHKPKAIVHTEKVNMMSLTVLGLRMLFAKTVAVNFLLTAKLFFLLTARAKRSGSGATNFSLLKQAGDVEENPGPTSMALPVTALLLPLALLLHAARPFEMGSWEEFELRLNAIEERLYALGGSEAELAYFEYVIADFEGNLQRYKGKGNPEVEALYFEADAIFEELVAYRHNGTGGGGSGGGGSGGGGSEFDIQMTQSPSSLSASVGDRVTITCKASDHINNWLAWYQQKPGQAPKLLIYGATTLETGVPSRFSGSGSGTDYTLTISSLQPEDFATYYCQQSWNTPWTFGQGTKLEIKRGGGGSGGGGSGGGGSQVQLQQPGAELVKPGASVKMSCKASGYAFSSYWINWMKQKPGQGLEWIGQIYPGDGDTNYNGKFKGRATLTADTSSSTAYMQLSSLTSEDSAVYFCARSITTVVGCAMDYWGQGTSVTVSSTREDLKNVFPPEVAVFEPSEAEISHTQKATLVCLATGFYPDHVELSWWVNGKEVHSGVCTDPQPLKEQPALNDSRYCLSSRLRVSATFWQNPRNHFRCQVQFYGLSENDEWTQDRAKPVTQIVSAEAWGRADDVIKIHWQEKKSNTILGSQEGNTMKTNDTYMKFSWLTVPEKSLDKEHRCIVRHENNKNGVDQEIIFPPIKTDVITMDPKDNCSKDANDTLLLQLTNTSAYYMYLLLLLKSVVYFAIITCCLLMAMVKRKDSRG

SEQ ID NO: 19387 - protein, 972 aa, synthetic construct
MALPVTALLLPLALLLHAARPLEEEDLKNVFPPEVAVFEPSEAEISHTQKATLVCLATGFYPDHVELSWWVNGKEVHSGVSTDPQPLKEQPALNDSRYCLSSRLRVSATFWQNPRNHFRCQVQFYGLSENDEWTQDRAKPVTQIVSAEAWGRADDVIKIHWQEKKSNTILGSQEGNTMKTNDTYMKFSWLTVPEKSLDKEHRCIVRHENNKNGVDQEIIFPPIKTDVITMDPKDNCSKDANDTLLLQLTNTSAYYMYLLLLLKSVVYFAIITCCLLRRTAFCCNGEKSRAKRSGSGATNFSLLKQAGDVEENPGPTSMALPVTALLLPLALLLHAARPDIQMTQTTSSLSASLGDRVTISCRASQDISKYLNWYQQKPDGTVKLLIYHTSRLHSGVPSRFSGSGSGTDYSLTISNLEQEDIATYFCQQGNTLPYTFGGGTKLEITGGGGSGGGGSGGGGSEVKLQESGPGLVAPSQSLSVTCTVSGVSLPDYGVSWIRQPPRKGLEWLGVIWGSETTYYNSALKSRLTIIKDNSKSQVFLKMNSLQTDDTAIYYCAKHYYYGGSYAMDYWGQGTSVTVSSTRIQNPDPAVYQLRDSKSSDKSVCLFTDFDSQTNVSQSKDSDVYITDKTVLDMRSMDFKSNSAVAWSNKSDFACANAFNNSIIPEDTFFPSPESSDSTDHVKPKETENTKQPSKSCHKPKAIVHTEKVNMMSLTVLGLRMLFAKTVAVNFLLTAKLFFLRAKRSGSGVKQTLNFDLLKLAGDVESNPGPSRGHMTEYKPTVRLATRDDVPRAVRTLAAAFADYPATRHTVDPDRHIERVTELQELFLTRVGLDIGKVWVADDGAAVAVWTTPESVEAGAVFAEIGPRMAELSGSRLAAQQQMEGLLAPHRPKEPAWFLATVGVSPDHQGKGLGSAVVLPGVEAAERAGVPAFLETSAPRNLPFYERLGFTVTADVEVPEGPRTWCMTRKPGA

SEQ ID NO: 19388 - protein, 973 aa, synthetic construct
MALPVTALLLPLALLLHAARPLEEEDLKNVFPPEVAVFEPSEAEISHTQKATLVCLATGFYPDHVELSWWVNGKEVHSGVSTDPQPLKEQPALNDSRYCLSSRLRVSATFWQNPRNHFRCQVQFYGLSENDEWTQDRAKPVTQIVSAEAWGRADDVIKIHWQEKKSNTILGSQEGNTMKTNDTYMKFSWLTVPEKSLDKEHRCIVRHENNKNGVDQEIIFPPIKTDVITMDPKDNCSKDANDTLLLQLTNTSAYYMYLLLLLKSVVYFAIITCCLLRRTAFCCNGEKSRAKRSGSGATNFSLLKQAGDVEENPGPTSTMALPVTALLLPLALLLHAARPEIVMTQSPATLSLSPGERATLSCRASQDISKYLNWYQQKPGQAPRLLIYHTSRLHSGIPARFSGSGSGTDYTLTISSLQPEDFAVYFCQQGNTLPYTFGQGTKLEIKGGGGSGGGGSGGGGSQVQLQESGPGLVKPSETLSLTCTVSGVSLPDYGVSWIRQPPGKGLEWIGVIWGSETTYYNSSLKSRVTISKDNSKNQVSLKLSSVTAADTAVYYCAKHYYYGGSYAMDYWGQGTLVTVSSTRIQNPDPAVYQLRDSKSSDKSVCLFTDFDSQTNVSQSKDSDVYITDKTVLDMRSMDFKSNSAVAWSNKSDFACANAFNNSIIPEDTFFPSPESSDSTDHVKPKETENTKQPSKSCHKPKAIVHTEKVNMMSLTVLGLRMLFAKTVAVNFLLTAKLFFLRAKRSGSGVKQTLNFDLLKLAGDVESNPGPSRGHMTEYKPTVRLATRDDVPRAVRTLAAAFADYPATRHTVDPDRHIERVTELQELFLTRVGLDIGKVWVADDGAAVAVWTTPESVEAGAVFAEIGPRMAELSGSRLAAQQQMEGLLAPHRPKEPAWFLATVGVSPDHQGKGLGSAVVLPGVEAAERAGVPAFLETSAPRNLPFYERLGFTVTADVEVPEGPRTWCMTRKPGA

SEQ ID NO: 19389 - protein, 974 aa, synthetic construct
MALPVTALLLPLALLLHAARPLEEEDLKNVFPPEVAVFEPSEAEISHTQKATLVCLATGFYPDHVELSWWVNGKEVHSGVSTDPQPLKEQPALNDSRYCLSSRLRVSATFWQNPRNHFRCQVQFYGLSENDEWTQDRAKPVTQIVSAEAWGRADDVIKIHWQEKKSNTILGSQEGNTMKTNDTYMKFSWLTVPEKSLDKEHRCIVRHENNKNGVDQEIIFPPIKTDVITMDPKDNCSKDANDTLLLQLTNTSAYYMYLLLLLKSVVYFAIITCCLLRRTAFCCNGEKSRAKRSGSGATNFSLLKQAGDVEENPGPTSTMALPVTALLLPLALLLHAARPDEIVLTQSPATLSLSPGERATLSCSASSSVSYMHWYQQKPGQAPRLLIYDTSKLASGIPARFSGSGSGTDFTLTISSLEPEDVAVYYCFQGSVYPFTFGQGTKLEIKRGGGGSGGGGSGGGGSQVQLQESGPGLVKPSQTLSLTCTVSGGSISTSGMGVGWIRQHPGKGLEWIGHIWWDDDKRYNPALKSRVTISVDTSKNQFSLKLSSVTAADTAVYYCARMELWSYYFDYWGQGTLVTVSSTRIQNPDPAVYQLRDSKSSDKSVCLFTDFDSQTNVSQSKDSDVYITDKTVLDMRSMDFKSNSAVAWSNKSDFACANAFNNSIIPEDTFFPSPESSDSTDHVKPKETENTKQPSKSCHKPKAIVHTEKVNMMSLTVLGLRMLFAKTVAVNFLLTAKLFFLRAKRSGSGVKQTLNFDLLKLAGDVESNPGPSRGHMTEYKPTVRLATRDDVPRAVRTLAAAFADYPATRHTVDPDRHIERVTELQELFLTRVGLDIGKVWVADDGAAVAVWTTPESVEAGAVFAEIGPRMAELSGSRLAAQQQMEGLLAPHRPKEPAWFLATVGVSPDHQGKGLGSAVVLPGVEAAERAGVPAFLETSAPRNLPFYERLGFTVTADVEVPEGPRTWCMTRKPGA

SEQ ID NO: 19390 - protein, 970 aa, synthetic construct
MALPVTALLLPLALLLHAARPLEEEDLKNVFPPEVAVFEPSEAEISHTQKATLVCLATGFYPDHVELSWWVNGKEVHSGVSTDPQPLKEQPALNDSRYCLSSRLRVSATFWQNPRNHFRCQVQFYGLSENDEWTQDRAKPVTQIVSAEAWGRADDVIKIHWQEKKSNTILGSQEGNTMKTNDTYMKFSWLTVPEKSLDKEHRCIVRHENNKNGVDQEIIFPPIKTDVITMDPKDNCSKDANDTLLLQLTNTSAYYMYLLLLLKSVVYFAIITCCLLRRTAFCCNGEKSRAKRSGSGATNFSLLKQAGDVEENPGPTSMALPVTALLLPLALLLHAARPDIQMTQSPSSLSASVGDRVTITCRASQDISNYLNWYQQKPGKAPKLLIYYTSRLHSGVPSRFSGSGSGTDFTLTISSLQPEDFATYYCQQGNTLPYTFGQGTKVEIKRGGGGSGGGGSGGGGSEVQLVESGGGLVQPGGSLRLSCAASGFTFSDYFMSWVRQAPGKGLEWVATISNGGTYTYYPDSVKGRFTISRDNSKNTLYLQMNSLRAEDTAVYYCARFDGYIFDYWGQGTLVTVSSTRIQNPDPAVYQLRDSKSSDKSVCLFTDFDSQTNVSQSKDSDVYITDKTVLDMRSMDFKSNSAVAWSNKSDFACANAFNNSIIPEDTFFPSPESSDSTDHVKPKETENTKQPSKSCHKPKAIVHTEKVNMMSLTVLGLRMLFAKTVAVNFLLTAKLFFLRAKRSGSGVKQTLNFDLLKLAGDVESNPGPSRGHMTEYKPTVRLATRDDVPRAVRTLAAAFADYPATRHTVDPDRHIERVTELQELFLTRVGLDIGKVWVADDGAAVAVWTTPESVEAGAVFAEIGPRMAELSGSRLAAQQQMEGLLAPHRPKEPAWFLATVGVSPDHQGKGLGSAVVLPGVEAAERAGVPAFLETSAPRNLPFYERLGFTVTADVEVPEGPRTWCMTRKPGA

SEQ ID NO: 19391 - protein, 974 aa, synthetic construct
MALPVTALLLPLALLLHAARPLEEEDLKNVFPPEVAVFEPSEAEISHTQKATLVCLATGFYPDHVELSWWVNGKEVHSGVSTDPQPLKEQPALNDSRYCLSSRLRVSATFWQNPRNHFRCQVQFYGLSENDEWTQDRAKPVTQIVSAEAWGRADDVIKIHWQEKKSNTILGSQEGNTMKTNDTYMKFSWLTVPEKSLDKEHRCIVRHENNKNGVDQEIIFPPIKTDVITMDPKDNCSKDANDTLLLQLTNTSAYYMYLLLLLKSVVYFAIITCCLLRRTAFCCNGEKSRAKRSGSGATNFSLLKQAGDVEENPGPTSMALPVTALLLPLALLLHAARPDIQMTQSPSSLSASVGDRVTITCKASDHINNWLAWYQQKPGQAPKLLIYGATTLETGVPSRFSGSGSGTDYTLTISSLQPEDFATYYCQQSWNTPWTFGQGTKLEIKRGGGGSGGGGSGGGGSQVQLQQPGAELVKPGASVKMSCKASGYAFSSYWINWMKQKPGQGLEWIGQIYPGDGDTNYNGKFKGRATLTADTSSSTAYMQLSSLTSEDSAVYFCARSITTVVGCAMDYWGQGTSVTVSSTRIQNPDPAVYQLRDSKSSDKSVCLFTDFDSQTNVSQSKDSDVYITDKTVLDMRSMDFKSNSAVAWSNKSDFACANAFNNSIIPEDTFFPSPESSDSTDHVKPKETENTKQPSKSCHKPKAIVHTEKVNMMSLTVLGLRMLFAKTVAVNFLLTAKLFFLRAKRSGSGVKQTLNFDLLKLAGDVESNPGPSRGHMTEYKPTVRLATRDDVPRAVRTLAAAFADYPATRHTVDPDRHIERVTELQELFLTRVGLDIGKVWVADDGAAVAVWTTPESVEAGAVFAEIGPRMAELSGSRLAAQQQMEGLLAPHRPKEPAWFLATVGVSPDHQGKGLGSAVVLPGVEAAERAGVPAFLETSAPRNLPFYERLGFTVTADVEVPEGPRTWCMTRKPGA

SEQ ID NO: 19392 - protein, 976 aa, synthetic construct
MALPVTALLLPLALLLHAARPLEEEDLKNVFPPEVAVFEPSEAEISHTQKATLVCLATGFYPDHVELSWWVNGKEVHSGVSTDPQPLKEQPALNDSRYCLSSRLRVSATFWQNPRNHFRCQVQFYGLSENDEWTQDRAKPVTQIVSAEAWGRADDVIKIHWQEKKSNTILGSQEGNTMKTNDTYMKFSWLTVPEKSLDKEHRCIVRHENNKNGVDQEIIFPPIKTDVITMDPKDNCSKDANDTLLLQLTNTSAYYMYLLLLLKSVVYFAIITCCLLRRTAFCCNGEKSRAKRSGSGATNFSLLKQAGDVEENPGPTSMALPVTALLLPLALLLHAARPQIVLSQSPAILSASPGEKVTMTCRASSSVSYMHWYQQKPGSSPKPWIYATSNLASGVPARFSGSGSGTSYSFTISRVEAEDAATYYCQQWTFNPPTFGGGTRLEIKRTVAAGGGGSGGGGSGGGGSQAYLQQSGAELVRPGASVKMSCKASGYTFTSYNMHWVKQTPRQGLEWIGGIYPGNGDTSYNQKFKGKATLTVGKSSSTAYMQLSSLTSEDSAVYFCARYDYNYAMDYWGQGTSVTVSSASTRIQNPDPAVYQLRDSKSSDKSVCLFTDFDSQTNVSQSKDSDVYITDKTVLDMRSMDFKSNSAVAWSNKSDFACANAFNNSIIPEDTFFPSPESSDSTDHVKPKETENTKQPSKSCHKPKAIVHTEKVNMMSLTVLGLRMLFAKTVAVNFLLTAKLFFLRAKRSGSGVKQTLNFDLLKLAGDVESNPGPSRGHMTEYKPTVRLATRDDVPRAVRTLAAAFADYPATRHTVDPDRHIERVTELQELFLTRVGLDIGKVWVADDGAAVAVWTTPESVEAGAVFAEIGPRMAELSGSRLAAQQQMEGLLAPHRPKEPAWFLATVGVSPDHQGKGLGSAVVLPGVEAAERAGVPAFLETSAPRNLPFYERLGFTVTADVEVPEGPRTWCMTRKPGA

SEQ ID NO: 19393 - protein, 974 aa, synthetic construct
MALPVTALLLPLALLLHAARPLEEEDLKNVFPPEVAVFEPSEAEISHTQKATLVCLATGFYPDHVELSWWVNGKEVHSGVSTDPQPLKEQPALNDSRYCLSSRLRVSATFWQNPRNHFRCQVQFYGLSENDEWTQDRAKPVTQIVSAEAWGRADDVIKIHWQEKKSNTILGSQEGNTMKTNDTYMKFSWLTVPEKSLDKEHRCIVRHENNKNGVDQEIIFPPIKTDVITMDPKDNCSKDANDTLLLQLTNTSAYYMYLLLLLKSVVYFAIITCCLLRRTAFCCNGEKSRAKRSGSGATNFSLLKQAGDVEENPGPTSMALPVTALLLPLALLLHAARPEIVLTQSPATLSLSPGERATLSCRASQSVSSYLAWYQQKPGQAPRLLIYDASNRATGIPARFSGSGSGTDFTLTISSLEPEDFAVYYCQQRSNWPITFGQGTRLEIKGGGGSGGGGSGGGGSEVQLVESGGGLVQPDRSLRLSCAASGFTFHDYAMHWVRQAPGKGLEWVSTISWNSGTIGYADSVKGRFTISRDNAKNSLYLQMNSLRAEDTALYYCAKDIQYGNYYYGMDVWGQGTTVTVSSTRIQNPDPAVYQLRDSKSSDKSVCLFTDFDSQTNVSQSKDSDVYITDKTVLDMRSMDFKSNSAVAWSNKSDFACANAFNNSIIPEDTFFPSPESSDSTDHVKPKETENTKQPSKSCHKPKAIVHTEKVNMMSLTVLGLRMLFAKTVAVNFLLTAKLFFLRAKRSGSGVKQTLNFDLLKLAGDVESNPGPSRGHMTEYKPTVRLATRDDVPRAVRTLAAAFADYPATRHTVDPDRHIERVTELQELFLTRVGLDIGKVWVADDGAAVAVWTTPESVEAGAVFAEIGPRMAELSGSRLAAQQQMEGLLAPHRPKEPAWFLATVGVSPDHQGKGLGSAVVLPGVEAAERAGVPAFLETSAPRNLPFYERLGFTVTADVEVPEGPRTWCMTRKPGA

SEQ ID NO: 19394 - protein, 972 aa, synthetic construct
MALPVTALLLPLALLLHAARPLEEEDLKNVFPPEVAVFEPSEAEISHTQKATLVCLATGFYPDHVELSWWVNGKEVHSGVSTDPQPLKEQPALNDSRYCLSSRLRVSATFWQNPRNHFRCQVQFYGLSENDEWTQDRAKPVTQIVSAEAWGRADDVIKIHWQEKKSNTILGSQEGNTMKTNDTYMKFSWLTVPEKSLDKEHRCIVRHENNKNGVDQEIIFPPIKTDVITMDPKDNCSKDANDTLLLQLTNTSAYYMYLLLLLKSVVYFAIITCCLLRRTAFCCNGEKSRAKRSGSGATNFSLLKQAGDVEENPGPTSMALPVTALLLPLALLLHAARPDIQMTQSPSSLSASVGDRVTITCRASQDVNTAVAWYQQKPGKAPKLLIYSASFLESGVPSRFSGSRSGTDFTLTISSLQPEDFATYYCQQHYTTPPTFGQTKVEIKRGGGGSGGGGSGGGGSEVQLVESGGGLVQPGGSLRLSCAASGFNIKDTYIHWVRQAPGKGLEWVARIYPTNGYTRYADSVKGRFTISADTSKNTAYLQMNSLRAEDTAVYYCSRWGGDGFYAMDVWGQGTLVTVSSTRIQNPDPAVYQLRDSKSSDKSVCLFTDFDSQTNVSQSKDSDVYITDKTVLDMRSMDFKSNSAVAWSNKSDFACANAFNNSIIPEDTFFPSPESSDSTDHVKPKETENTKQPSKSCHKPKAIVHTEKVNMMSLTVLGLRMLFAKTVAVNFLLTAKLFFLRAKRSGSGVKQTLNFDLLKLAGDVESNPGPSRGHMTEYKPTVRLATRDDVPRAVRTLAAAFADYPATRHTVDPDRHIERVTELQELFLTRVGLDIGKVWVADDGAAVAVWTTPESVEAGAVFAEIGPRMAELSGSRLAAQQQMEGLLAPHRPKEPAWFLATVGVSPDHQGKGLGSAVVLPGVEAAERAGVPAFLETSAPRNLPFYERLGFTVTADVEVPEGPRTWCMTRKPGA

SEQ ID NO: 19395 - protein, 851 aa, synthetic construct
MALPVTALLLPLALLLHAARPLEEEDLKNVFPPEVAVFEPSEAEISHTQKATLVCLATGFYPDHVELSWWVNGKEVHSGVSTDPQPLKEQPALNDSRYCLSSRLRVSATFWQNPRNHFRCQVQFYGLSENDEWTQDRAKPVTQIVSAEAWGRADDVIKIHWQEKKSNTILGSQEGNTMKTNDTYMKFSWLTVPEKSLDKEHRCIVRHENNKNGVDQEIIFPPIKTDVITMDPKDNCSKDANDTLLLQLTNTSAYYMYLLLLLKSVVYFAIITCCLLRRTAFCCNGEKSRAKRSGSGATNFSLLKQAGDVEENPGPTSMALPVTALLLPLALLLHAARPDEFEVQLVESGGGLVQAGGSLRLSCAASGITFSINTMGWYRQAPGKQRELVALISSIGDTYYADSVKGRFTISRDNAKNTVYLQMNSLKPEDTAVYYCKRFRTAAQGTDYWGQGTQVTVSSTRIQNPDPAVYQLRDSKSSDKSVCLFTDFDSQTNVSQSKDSDVYITDKTVLDMRSMDFKSNSAVAWSNKSDFACANAFNNSIIPEDTFFPSPESSDSTDHVKPKETENTKQPSKSCHKPKAIVHTEKVNMMSLTVLGLRMLFAKTVAVNFLLTAKLFFLRAKRSGSGVKQTLNFDLLKLAGDVESNPGPSRGHMTEYKPTVRLATRDDVPRAVRTLAAAFADYPATRHTVDPDRHIERVTELQELFLTRVGLDIGKVWVADDGAAVAVWTTPESVEAGAVFAEIGPRMAELSGSRLAAQQQMEGLLAPHRPKEPAWFLATVGVSPDHQGKGLGSAVVLPGVEAAERAGVPAFLETSAPRNLPFYERLGFTVTADVEVPEGPRTWCMTRKPGA

SEQ ID NO: 19396 - protein, 851 aa, synthetic construct; identical to SEQ ID NO: 19395

SEQ ID NO: 19397 - protein, 1116 aa, synthetic construct
MALPVTALLLPLALLLHAARPLEEEDLKNVFPPEVAVFEPSEAEISHTQKATLVCLATGFYPDHVELSWWVNGKEVHSGVSTDPQPLKEQPALNDSRYCLSSRLRVSATFWQNPRNHFRCQVQFYGLSENDEWTQDRAKPVTQIVSAEAWGRADDVIKIHWQEKKSNTILGSQEGNTMKTNDTYMKFSWLTVPEKSLDKEHRCIVRHENNKNGVDQEIIFPPIKTDVITMDPKDNCSKDANDTLLLQLTNTSAYYMYLLLLLKSVVYFAIITCCLLRRTAFCCNGEKSRAKRSGSGATNFSLLKQAGDVEENPGPTSMALPVTALLLPLALLLHAARPQVQLVESGGGLVQAGDSVTLSCTASGRTFSSYALAWFRQRPGKEREFVAGLRWGGPTNYADSVKDRFTISGDSAKHTMYLQMNSLKPEDTAVYYCGYNPGGWAVPSQYEYDSWGQGTQVTVSSGTGGGGSGGGGSGGGGSEFDIQMTQSPSSLSASVGDRVTITCKASDHINNWLAWYQQKPGQAPKLLIYGATTLETGVPSRFSGSGSGTDYTLTISSLQPEDFATYYCQQSWNTPWTFGQGTKLEIKRGGGGSGGGGSGGGGSQVQLQQPGAELVKPGASVKMSCKASGYAFSSYWINWMKQKPGQGLEWIGQIYPGDGDTNYNGKFKGRATLTADTSSSTAYMQLSSLTSEDSAVYFCARSITTVVGCAMDYWGQGTSVTVSSTRIQNPDPAVYQLRDSKSSDKSVCLFTDFDSQTNVSQSKDSDVYITDKTVLDMRSMDFKSNSAVAWSNKSDFACANAFNNSIIPEDTFFPSPESSDSTDHVKPKETENTKQPSKSCHKPKAIVHTEKVNMMSLTVLGLRMLFAKTVAVNFLLTAKLFFLRAKRSGSGVKQTLNFDLLKLAGDVESNPGPSRGHMTEYKPTVRLATRDDVPRAVRTLAAAFADYPATRHTVDPDRHIERVTELQELFLTRVGLDIGKVWVADDGAAVAVWTTPESVEAGAVFAEIGPRMAELSGSRLAAQQQMEGLLAPHRPKEPAWFLATVGVSPDHQGKGLGSAVVLPGVEAAERAGVPAFLETSAPRNLPFYERLGFTVTADVEVPEGPRTWCMTRKPGA

SEQ ID NO: 19398 - protein, 1245 aa, synthetic construct
MALPVTALLLPLALLLHAARPLEEEDLKNVFPPEVAVFEPSEAEISHTQKATLVCLATGFYPDHVELSWWVNGKEVHSGVSTDPQPLKEQPALNDSRYCLSSRLRVSATFWQNPRNHFRCQVQFYGLSENDEWTQDRAKPVTQIVSAEAWGRADDVIKIHWQEKKSNTILGSQEGNTMKTNDTYMKFSWLTVPEKSLDKEHRCIVRHENNKNGVDQEIIFPPIKTDVITMDPKDNCSKDANDTLLLQLTNTSAYYMYLLLLLKSVVYFAIITCCLLRRTAFCCNGEKSRAKRSGSGATNFSLLKQAGDVEENPGPTSMALPVTALLLPLALLLHAARPEVQLLESGGGLVQPGGSLRLSCAASGFTFSSYAMSWVRQAPGKGLEWVSSISGSGDYIYYADSVKGRFTISRDISKNTLYLQMNSLRAEDTAVYYCAKEGTGANSSLADYRGQGTLVTVSSGGGSGGGSQVQLVESGGGLVQAGDSVTLSCTASGRTFSSYALAWFRQRPGKEREFVAGLRWGGPTNYADSVKDRFTISGDSAKHTMYLQMNSLKPEDTAVYYCGYNPGGWAVPSQYEYDSWGQGTQVTVSSGTGGGGSGGGGSGGGGSEFDIQMTQSPSSLSASVGDRVTITCKASDHINNWLAWYQQKPGQAPKLLIYGATTLETGVPSRFSGSGSGTDYTLTISSLQPEDFATYYCQQSWNTPWTFGQGTKLEIKRGGGGSGGGGSGGGGSQVQLQQPGAELVKPGASVKMSCKASGYAFSSYWINWMKQKPGQGLEWIGQIYPGDGDTNYNGKFKGRATLTADTSSSTAYMQLSSLTSEDSAVYFCARSITTVVGCAMDYWGQGTSVTVSSTRIQNPDPAVYQLRDSKSSDKSVCLFTDFDSQTNVSQSKDSDVYITDKTVLDMRSMDFKSNSAVAWSNKSDFACANAFNNSIIPEDTFFPSPESSDSTDHVKPKETENTKQPSKSCHKPKAIVHTEKVNMMSLTVLGLRMLFAKTVAVNFLLTAKLFFLRAKRSGSGVKQTLNFDLLKLAGDVESNPGPSRGHMTEYKPTVRLATRDDVPRAVRTLAAAFADYPATRHTVDPDRHIERVTELQELFLTRVGLDIGKVWVADDGAAVAVWTTPESVEAGAVFAEIGPRMAELSGSRLAAQQQMEGLLAPHRPKEPAWFLATVGVSPDHQGKGLGSAVVLPGVEAAERAGVPAFLETSAPRNLPFYERLGFTVTADVEVPEGPRTWCMTRKPGA

SEQ ID NO: 19399 - protein, 1243 aa, synthetic construct
MALPVTALLLPLALLLHAARPLEEEDLKNVFPPEVAVFEPSEAEISHTQKATLVCLATGFYPDHVELSWWVNGKEVHSGVSTDPQPLKEQPALNDSRYCLSSRLRVSATFWQNPRNHFRCQVQFYGLSENDEWTQDRAKPVTQIVSAEAWGRADDVIKIHWQEKKSNTILGSQEGNTMKTNDTYMKFSWLTVPEKSLDKEHRCIVRHENNKNGVDQEIIFPPIKTDVITMDPKDNCSKDANDTLLLQLTNTSAYYMYLLLLLKSVVYFAIITCCLLRRTAFCCNGEKSRAKRSGSGATNFSLLKQAGDVEENPGPTSMALPVTALLLPLALLLHAARPGVTQSPTHLIKTRGQQATLRCSPISGHTSVYWYQQALGLGLQFLLWYDEGEERNRGNFPPRFSGRQFPNYSSELNVNALELEDSALYLCASSLGGPRGLAGLRGDEQFFGPGTRLTVLEGGGSGGGSQVQLVESGGGLVQAGDSVTLSCTASGRTFSSYALAWFRQRPGKEREFVAGLRWGGPTNYADSVKDRFTISGDSAKHTMYLQMNSLKPEDTAVYYCGYNPGGWAVPSQYEYDSWGQGTQVTVSSGTGGGGSGGGGSGGGGSEFDIQMTQSPSSLSASVGDRVTITCKASDHINNWLAWYQQKPGQAPKLLIYGATTLETGVPSRFSGSGSGTDYTLTISSLQPEDFATYYCQQSWNTPWTFGQGTKLEIKRGGGGSGGGGSGGGGSQVQLQQPGAELVKPGASVKMSCKASGYAFSSYWINWMKQKPGQGLEWIGQIYPGDGDTNYNGKFKGRATLTADTSSSTAYMQLSSLTSEDSAVYFCARSITTVVGCAMDYWGQGTSVTVSSTRIQNPDPAVYQLRDSKSSDKSVCLFTDFDSQTNVSQSKDSDVYITDKTVLDMRSMDFKSNSAVAWSNKSDFACANAFNNSIIPEDTFFPSPESSDSTDHVKPKETENTKQPSKSCHKPKAIVHTEKVNMMSLTVLGLRMLFAKTVAVNFLLTAKLFFLRAKRSGSGVKQTLNFDLLKLAGDVESNPGPSRGHMTEYKPTVRLATRDDVPRAVRTLAAAFADYPATRHTVDPDRHIERVTELQELFLTRVGLDIGKVWVADDGAAVAVWTTPESVEAGAVFAEIGPRMAELSGSRLAAQQQMEGLLAPHRPKEPAWFLATVGVSPDHQGKGLGSAVVLPGVEAAERAGVPAFLETSAPRNLPFYERLGFTVTADVEVPEGPRTWCMTRKPGA

SEQ ID NO: 19400 - protein, 1237 aa, synthetic construct
MALPVTALLLPLALLLHAARPLEEEDLKNVFPPEVAVFEPSEAEISHTQKATLVCLATGFYPDHVELSWWVNGKEVHSGVSTDPQPLKEQPALNDSRYCLSSRLRVSATFWQNPRNHFRCQVQFYGLSENDEWTQDRAKPVTQIVSAEAWGRADDVIKIHWQEKKSNTILGSQEGNTMKTNDTYMKFSWLTVPEKSLDKEHRCIVRHENNKNGVDQEIIFPPIKTDVITMDPKDNCSKDANDTLLLQLTNTSAYYMYLLLLLKSVVYFAIITCCLLRRTAFCCNGEKSRAKRSGSGATNFSLLKQAGDVEENPGPTSMALPVTALLLPLALLLHAARPGVTQSPTHLIKTRGQQATLRCSPISGHTSVYWYQQALGLGLQFLLWYDEGEERNRGNFPPRFSGRQFPNYSSELNVNALELEDSALYLCASSLGGPRGLAGLRGDEQFFGPGTRLTVLEGGGSGGGSGVTQSPTHLIKTRGQQATLRCSPISGHTSVYWYQQALGLGLQFLLWYDEGEERNRGNFPPRFSGRQFPNYSSELNVNALELEDSALYLCASSLGGDELGADGNEQFFGPGTRLTVLEGTGGGGSGGGGSGGGGSEFDIQMTQSPSSLSASVGDRVTITCKASDHINNWLAWYQQKPGQAPKLLIYGATTLETGVPSRFSGSGSGTDYTLTISSLQPEDFATYYCQQSWNTPWTFGQGTKLEIKRGGGGSGGGGSGGGGSQVQLQQPGAELVKPGASVKMSCKASGYAFSSYWINWMKQKPGQGLEWIGQIYPGDGDTNYNGKFKGRATLTADTSSSTAYMQLSSLTSEDSAVYFCARSITTVVGCAMDYWGQGTSVTVSSTRIQNPDPAVYQLRDSKSSDKSVCLFTDFDSQTNVSQSKDSDVYITDKTVLDMRSMDFKSNSAVAWSNKSDFACANAFNNSIIPEDTFFPSPESSDSTDHVKPKETENTKQPSKSCHKPKAIVHTEKVNMMSLTVLGLRMLFAKTVAVNFLLTAKLFFLRAKRSGSGVKQTLNFDLLKLAGDVESNPGPSRGHMTEYKPTVRLATRDDVPRAVRTLAAAFADYPATRHTVDPDRHIERVTELQELFLTRVGLDIGKVWVADDGAAVAVWTTPESVEAGAVFAEIGPRMAELSGSRLAAQQQMEGLLAPHRPKEPAWFLATVGVSPDHQGKGLGSAVVLPGVEAAERAGVPAFLETSAPRNLPFYERLGFTVTADVEVPEGPRTWCMTRKPGA

SEQ ID NO: 19401 - protein, 857 aa, synthetic construct
MALPVTALLLPLALLLHAARPLEEEDLKNVFPPEVAVFEPSEAEISHTQKATLVCLATGFYPDHVELSWWVNGKEVHSGVSTDPQPLKEQPALNDSRYCLSSRLRVSATFWQNPRNHFRCQVQFYGLSENDEWTQDRAKPVTQIVSAEAWGRADDVIKIHWQEKKSNTILGSQEGNTMKTNDTYMKFSWLTVPEKSLDKEHRCIVRHENNKNGVDQEIIFPPIKTDVITMDPKDNCSKDANDTLLLQLTNTSAYYMYLLLLLKSVVYFAIITCCLLRRTAFCCNGEKSRAKRSGSGATNFSLLKQAGDVEENPGPTSMALPVTALLLPLALLLHAARPDEFGSDLGIKLLFAAAKGQDDEVRILLAAGADVNAKDFEGYTPLHVAAYDGHLEIVEVLLKAGADVNAKDSQGRTPLHEAAYSGHLEIVEVLLKAGADVNAQDDAGETPADLAAAWGHEDIAEVLQKTRIQNPDPAVYQLRDSKSSDKSVCLFTDFDSQTNVSQSKDSDVYITDKTVLDMRSMDFKSNSAVAWSNKSDFACANAFNNSIIPEDTFFPSPESSDSTDHVKPKETENTKQPSKSCHKPKAIVHTEKVNMMSLTVLGLRMLFAKTVAVNFLLTAKLFFLRAKRSGSGVKQTLNFDLLKLAGDVESNPGPSRGHMTEYKPTVRLATRDDVPRAVRTLAAAFADYPATRHTVDPDRHIERVTELQELFLTRVGLDIGKVWVADDGAAVAVWTTPESVEAGAVFAEIGPRMAELSGSRLAAQQQMEGLLAPHRPKEPAWFLATVGVSPDHQGKGLGSAVVLPGVEAAERAGVPAFLETSAPRNLPFYERLGFTVTADVEVPEGPRTWCMTRKPGA

SEQ ID NO: 19402 - protein, 786 aa, synthetic construct
MALPVTALLLPLALLLHAARPLEEEDLKNVFPPEVAVFEPSEAEISHTQKATLVCLATGFYPDHVELSWWVNGKEVHSGVSTDPQPLKEQPALNDSRYCLSSRLRVSATFWQNPRNHFRCQVQFYGLSENDEWTQDRAKPVTQIVSAEAWGRADDVIKIHWQEKKSNTILGSQEGNTMKTNDTYMKFSWLTVPEKSLDKEHRCIVRHENNKNGVDQEIIFPPIKTDVITMDPKDNCSKDANDTLLLQLTNTSAYYMYLLLLLKSVVYFAIITCCLLRRTAFCCNGEKSRAKRSGSGATNFSLLKQAGDVEENPGPTSMDWIWRILFLVGAATGAHSFEGSGFEYAKEMRNAYWEIALLPNLTNQQKRAPIRKLYDDPSQSSELLSEAKKLNDSQTRIQNPDPAVYQLRDSKSSDKSVCLFTDFDSQTNVSQSKDSDVYITDKTVLDMRSMDFKSNSAVAWSNKSDFACANAFNNSIIPEDTFFPSPESSDSTDHVKPKETENTKQPSKSCHKPKAIVHTEKVNMMSLTVLGLRMLFAKTVAVNFLLTAKLFFLRAKRSGSGVKQTLNFDLLKLAGDVESNPGPSRGHMTEYKPTVRLATRDDVPRAVRTLAAAFADYPATRHTVDPDRHIERVTELQELFLTRVGLDIGKVWVADDGAAVAVWTTPESVEAGAVFAEIGPRMAELSGSRLAAQQQMEGLLAPHRPKEPAWFLATVGVSPDHQGKGLGSAVVLPGVEAAERAGVPAFLETSAPRNLPFYERLGFTVTADVEVPEGPRTWCMTRKPGA

SEQ ID NO: 19403 - protein, 1008 aa, synthetic construct
MALPVTALLLPLALLLHAARPLEEEDLKNVFPPEVAVFEPSEAEISHTQKATLVCLATGFYPDHVELSWWVNGKEVHSGVSTDPQPLKEQPALNDSRYCLSSRLRVSATFWQNPRNHFRCQVQFYGLSENDEWTQDRAKPVTQIVSAEAWGRADDVIKIHWQEKKSNTILGSQEGNTMKTNDTYMKFSWLTVPEKSLDKEHRCIVRHENNKNGVDQEIIFPPIKTDVITMDPKDNCSKDANDTLLLQLTNTSAYYMYLLLLLKSVVYFAIITCCLLRRTAFCCNGEKSRAKRSGSGATNFSLLKQAGDVEENPGPTSMALPVTALLLPLALLLHAARPDEFEVQLVESGGGLVQAGGSLRLSCAASGITFSINTMGWYRQAPGKQRELVALISSIGDTYYADSVKGRFTISRDNAKNTVYLQMNSLKPEDTAVYYCKRFRTAAQGTDYWGQGTQVTVSSLEGGGGSGGGGSGGGGSGSGGSGSGGSGSGGSGSGGSFEVQLVESGGGLVQPGGSLRLSCAASGSIFGFNDMAWYRQAPGKQRELVALISRVGVTSSADSVKGRFTISRVNAKDTVYLQMNSLKPEDTAVYYCYMDQRLDGSTLAYWGQGTQVTVSSTRIQNPDPAVYQLRDSKSSDKSVCLFTDFDSQTNVSQSKDSDVYITDKTVLDMRSMDFKSNSAVAWSNKSDFACANAFNNSIIPEDTFFPSPESSDSTDHVKPKETENTKQPSKSCHKPKAIVHTEKVNMMSLTVLGLRMLFAKTVAVNFLLTAKLFFLRAKRSGSGVKQTLNFDLLKLAGDVESNPGPSRGHMTEYKPTVRLATRDDVPRAVRTLAAAFADYPATRHTVDPDRHIERVTELQELFLTRVGLDIGKVWVADDGAAVAVWTTPESVEAGAVFAEIGPRMAELSGSRLAAQQQMEGLLAPHRPKEPAWFLATVGVSPDHQGKGLGSAVVLPGVEAAERAGVPAFLETSAPRNLPFYERLGFTVTADVEVPEGPRTWCMTRKPGA

SEQ ID NO: 19404 - protein, 922 aa, synthetic construct
MALPVTALLLPLALLLHAARPLEEEDLKNVFPPEVAVFEPSEAEISHTQKATLVCLATGFYPDHVELSWWVNGKEVHSGVSTDPQPLKEQPALNDSRYCLSSRLRVSATFWQNPRNHFRCQVQFYGLSENDEWTQDRAKPVTQIVSAEAWGRADDVIKIHWQEKKSNTILGSQEGNTMKTNDTYMKFSWLTVPEKSLDKEHRCIVRHENNKNGVDQEIIFPPIKTDVITMDPKDNCSKDANDTLLLQLTNTSAYYMYLLLLLKSVVYFAIITCCLLRRTAFCCNGEKSRAKRSGSGATNFSLLKQAGDVEENPGPTSMALPVTALLLPLALLLHAARPGMRTEDLPKAVVFLEPQWYRVLEKDSVTLKCQGAYSPEDNSTQWFHNESLISSQASSYFIDAATVDDSGEYRCQTNLSTLSDPVQLEVHIGWLLLQAPRWVFKEEDPIHLRCHSWKNTALHKVTYLQNGKGRKYFHHNSDFYIPKATLKDSGSYFCRGLVGSKNVSSETVNITITQGLAVSTISSFFPPGYQTRIQNPDPAVYQLRDSKSSDKSVCLFTDFDSQTNVSQSKDSDVYITDKTVLDMRSMDFKSNSAVAWSNKSDFACANAFNNSIIPEDTFFPSPESSDSTDHVKPKETENTKQPSKSCHKPKAIVHTEKVNMMSLTVLGLRMLFAKTVAVNFLLTAKLFFLRAKRSGSGVKQTLNFDLLKLAGDVESNPGPSRGHMTEYKPTVRLATRDDVPRAVRTLAAAFADYPATRHTVDPDRHIERVTELQELFLTRVGLDIGKVWVADDGAAVAVWTTPESVEAGAVFAEIGPRMAELSGSRLAAQQQMEGLLAPHRPKEPAWFLATVGVSPDHQGKGLGSAVVLPGVEAAERAGVPAFLETSAPRNLPFYERLGFTVTADVEVPEGPRTWCMTRKPGA

SEQ ID NO: 19405 - protein, 550 aa, synthetic construct
MALPVTALLLPLALLLHAARPLEEEDLKNVFPPEVAVFEPSEAEISHTQKATLVCLATGFYPDHVELSWWVNGKEVHSGVSTDPQPLKEQPALNDSRYCLSSRLRVSATFWQNPRNHFRCQVQFYGLSENDEWTQDRAKPVTQIVSAEAWGRADDVIKIHWQEKKSNTILGSQEGNTMKTNDTYMKFSWLTVPEKSLDKEHRCIVRHENNKNGVDQEIIFPPIKTDVITMDPKDNCSKDANDTLLLQLTNTSAYYMYLLLLLKSVVYFAIITCCLLRRTAFCCNGEKSRAKRSGSGATNFSLLKQAGDVEENPGPTSATMALPVTALLLPLALLLHAARPMDPDLEIRAAFLRQRNTALRTEVAELEQEVQRLENEVSQYETRYGPLGGGKTRIQNPDPAVYQLRDSKSSDKSVCLFTDFDSQTNVSQSKDSDVYITDKTVLDMRSMDFKSNSAVAWSNKSDFACANAFNNSIIPEDTFFPSPESSDSTDHVKPKETENTKQPSKSCHKPKAIVHTEKVNMMSLTVLGLRMLFAKTVAVNFLLTAKLFFL

SEQ ID NO: 19406 - protein, 550 aa, synthetic construct
MALPVTALLLPLALLLHAARPLEEEDLKNVFPPEVAVFEPSEAEISHTQKATLVCLATGFYPDHVELSWWVNGKEVHSGVSTDPQPLKEQPALNDSRYCLSSRLRVSATFWQNPRNHFRCQVQFYGLSENDEWTQDRAKPVTQIVSAEAWGRADDVIKIHWQEKKSNTILGSQEGNTMKTNDTYMKFSWLTVPEKSLDKEHRCIVRHENNKNGVDQEIIFPPIKTDVITMDPKDNCSKDANDTLLLQLTNTSAYYMYLLLLLKSVVYFAIITCCLLRRTAFCCNGEKSRAKRSGSGATNFSLLKQAGDVEENPGPTSATMALPVTALLLPLALLLHAARPMDPDLEIEAAFLERENTALETRVAELRQRVQRLRNRVSQYRTRYGPLGGGKTRIQNPDPAVYQLRDSKSSDKSVCLFTDFDSQTNVSQSKDSDVYITDKTVLDMRSMDFKSNSAVAWSNKSDFACANAFNNSIIPEDTFFPSPESSDSTDHVKPKETENTKQPSKSCHKPKAIVHTEKVNMMSLTVLGLRMLFAKTVAVNFLLTAKLFFL

SEQ ID NO: 19407 - protein, 527 aa, synthetic construct
MALPVTALLLPLALLLHAARPLEEEDLKNVFPPEVAVFEPSEAEISHTQKATLVCLATGFYPDHVELSWWVNGKEVHSGVSTDPQPLKEQPALNDSRYCLSSRLRVSATFWQNPRNHFRCQVQFYGLSENDEWTQDRAKPVTQIVSAEAWGRADDVIKIHWQEKKSNTILGSQEGNTMKTNDTYMKFSWLTVPEKSLDKEHRCIVRHENNKNGVDQEIIFPPIKTDVITMDPKDNCSKDANDTLLLQLTNTSAYYMYLLLLLKSVVYFAIITCCLLRRTAFCCNGEKSRAKRSGSGATNFSLLKQAGDVEENPGPTSATMALPVTALLLPLALLLHAARPEVAALEKEVAALEKEVAALEKEVAALEKTRIQNPDPAVYQLRDSKSSDKSVCLFTDFDSQTNVSQSKDSDVYITDKTVLDMRSMDFKSNSAVAWSNKSDFACANAFNNSIIPEDTFFPSPESSDSTDHVKPKETENTKQPSKSCHKPKAIVHTEKVNMMSLTVLGLRMLFAKTVAVNFLLTAKLFFL

SEQ ID NO: 19408 - protein, 785 aa, synthetic construct
MALPVTALLLPLALLLHAARPLEEEDLKNVFPPEVAVFEPSEAEISHTQKATLVCLATGFYPDHVELSWWVNGKEVHSGVSTDPQPLKEQPALNDSRYCLSSRLRVSATFWQNPRNHFRCQVQFYGLSENDEWTQDRAKPVTQIVSAEAWGRADDVIKIHWQEKKSNTILGSQEGNTMKTNDTYMKFSWLTVPEKSLDKEHRCIVRHENNKNGVDQEIIFPPIKTDVITMDPKDNCSKDANDTLLLQLTNTSAYYMYLLLLLKSVVYFAIITCCLLRRTAFCCNGEKSRAKRSGSGATNFSLLKQAGDVEENPGPTSATMALPVTALLLPLALLLHAARPLFNQEVQIPLTESYCGPCPKNWICYKNNCYQFFDESKNWYESQASCMSQNASLLKVYSKEDQDLLKLVKSAHWMGLVHIPTNGSWQWEDGSILSPNLLTIIEMQKGDCALYASSFKGYIENCSTPNTYICMQRTVSGGGGSGGGGSGGGGDLFNQEVQIPLTESYCGPCPKNWICYKNNCYQFFDESKNWYESQASCMSQNASLLKVYSKEDQDLLKLVKSAHWMGLVHIPTNGSWQWEDGSILSPNLLTIIEMQKGDCALYASSFKGYIENCSTPNTYICMQRTVTRIQNPDPAVYQLRDSKSSDKSVCLFTDFDSQTNVSQSKDSDVYITDKTVLDMRSMDFKSNSAVAWSNKSDFACANAFNNSIIPEDTFFPSPESSDSTDHVKPKETENTKQPSKSCHKPKAIVHTEKVNMMSLTVLGLRMLFAKTVAVNFLLTAKLFFL

SEQ ID NO: 19409 - protein, 785 aa, synthetic construct
MALPVTALLLPLALLLHAARPLEEEDLKNVFPPEVAVFEPSEAEISHTQKATLVCLATGFYPDHVELSWWVNGKEVHSGVSTDPQPLKEQPALNDSRYCLSSRLRVSATFWQNPRNHFRCQVQFYGLSENDEWTQDRAKPVTQIVSAEAWGRADDVIKIHWQEKKSNTILGSQEGNTMKTNDTYMKFSWLTVPEKSLDKEHRCIVRHENNKNGVDQEIIFPPIKTDVITMDPKDNCSKDANDTLLLQLTNTSAYYMYLLLLLKSVVYFAIITCCLLRRTAFCCNGEKSRAKRSGSGATNFSLLKQAGDVEENPGPTSATMALPVTALLLPLALLLHAARPLFNQEVQIPLTESYCGPCPKNWICYKNNCYQFFDESKNWYESQASCMSQNASLLKVYSKEDQDLLKLVKSAHWMGLVHIPTNGSWQWEDGSILSPNLLTIIEMQKGDCALYASSFKGFIENCSTPNTYICMQRTVGGGGSGGGGSGGGGSDLFNQEVQIPLTESYCGPCPKNWICYKNNCYQFFDESKNWYESQASCMSQNASLLKVYSKEDQDLLKLVKSAHWMGLVHIPTNGSWQWEDGSILSPNLLTIIEMQKGDCALYASSFKGFIENCSTPNTYICMQRTVTRIQNPDPAVYQLRDSKSSDKSVCLFTDFDSQTNVSQSKDSDVYITDKTVLDMRSMDFKSNSAVAWSNKSDFACANAFNNSIIPEDTFFPSPESSDSTDHVKPKETENTKQPSKSCHKPKAIVHTEKVNMMSLTVLGLRMLFAKTVAVNFLLTAKLFFL

SEQ ID NO: 19410 - protein, 811 aa, synthetic construct
MALPVTALLLPLALLLHAARPLEEEDLKNVFPPEVAVFEPSEAEISHTQKATLVCLATGFYPDHVELSWWVNGKEVHSGVSTDPQPLKEQPALNDSRYCLSSRLRVSATFWQNPRNHFRCQVQFYGLSENDEWTQDRAKPVTQIVSAEAWGRADDVIKIHWQEKKSNTILGSQEGNTMKTNDTYMKFSWLTVPEKSLDKEHRCIVRHENNKNGVDQEIIFPPIKTDVITMDPKDNCSKDANDTLLLQLTNTSAYYMYLLLLLKSVVYFAIITCCLLRRTAFCCNGEKSRAKRSGSGATNFSLLKQAGDVEENPGPTSMALPVTALLLPLALLLHAARPMDPDLEIRAAFLRQRNTALRTEVAELEQEVQRLENEVSQYETRYGPLGGGKGTGGGGSGGGGSGGGGSEFDIQMTQSPSSLSASVGDRVTITCKASDHINNWLAWYQQKPGQAPKLLIYGATTLETGVPSRFSGSGSGTDYTLTISSLQPEDFATYYCQQSWNTPWTFGQGTKLEIKRGGGGSGGGGSGGGGSQVQLQQPGAELVKPGASVKMSCKASGYAFSSYWINWMKQKPGQGLEWIGQIYPGDGDTNYNGKFKGRATLTADTSSSTAYMQLSSLTSEDSAVYFCARSITTVVGCAMDYWGQGTSVTVSSTRIQNPDPAVYQLRDSKSSDKSVCLFTDFDSQTNVSQSKDSDVYITDKTVLDMRSMDFKSNSAVAWSNKSDFACANAFNNSIIPEDTFFPSPESSDSTDHVKPKETENTKQPSKSCHKPKAIVHTEKVNMMSLTVLGLRMLFAKTVAVNFLLTAKLFFL

SEQ ID NO: 19411 - protein, 1046 aa, synthetic construct
MALPVTALLLPLALLLHAARPLEEEDLKNVFPPEVAVFEPSEAEISHTQKATLVCLATGFYPDHVELSWWVNGKEVHSGVSTDPQPLKEQPALNDSRYCLSSRLRVSATFWQNPRNHFRCQVQFYGLSENDEWTQDRAKPVTQIVSAEAWGRADDVIKIHWQEKKSNTILGSQEGNTMKTNDTYMKFSWLTVPEKSLDKEHRCIVRHENNKNGVDQEIIFPPIKTDVITMDPKDNCSKDANDTLLLQLTNTSAYYMYLLLLLKSVVYFAIITCCLLRRTAFCCNGEKSRAKRSGSGATNFSLLKQAGDVEENPGPTSMALPVTALLLPLALLLHAARPLFNQEVQIPLTESYCGPCPKNWICYKNNCYQFFDESKNWYESQASCMSQNASLLKVYSKEDQDLLKLVKSAHWMGLVHIPTNGSWQWEDGSILSPNLLTIIEMQKGDCALYASSFKGFIENCSTPNTYICMQRTVGGGGSGGGGSGGGGSDLFNQEVQIPLTESYCGPCPKNWICYKNNCYQFFDESKNWYESQASCMSQNASLLKVYSKEDQDLLKLVKSAHWMGLVHIPTNGSWQWEDGSILSPNLLTIIEMQKGDCALYASSFKGFIENCSTPNTYICMQRTVGTGGGGSGGGGSGGGGSEFDIQMTQSPSSLSASVGDRVTITCKASDHINNWLAWYQQKPGQAPKLLIYGATTLETGVPSRFSGSGSGTDYTLTISSLQPEDFATYYCQQSWNTPWTFGQGTKLEIKRGGGGSGGGGSGGGGSQVQLQQPGAELVKPGASVKMSCKASGYAFSSYWINWMKQKPGQGLEWIGQIYPGDGDTNYNGKFKGRATLTADTSSSTAYMQLSSLTSEDSAVYFCARSITTVVGCAMDYWGQGTSVTVSSTRIQNPDPAVYQLRDSKSSDKSVCLFTDFDSQTNVSQSKDSDVYITDKTVLDMRSMDFKSNSAVAWSNKSDFACANAFNNSIIPEDTFFPSPESSDSTDHVKPKETENTKQPSKSCHKPKAIVHTEKVNMMSLTVLGLRMLFAKTVAVNFLLTAKLFFL

SEQ ID NO: 19412 - protein, 751 aa, synthetic construct
MALPVTALLLPLALLLHAARPLEEEDLKNVFPPEVAVFEPSEAEISHTQKATLVCLATGFYPDHVELSWWVNGKEVHSGVSTDPQPLKEQPALNDSRYCLSSRLRVSATFWQNPRNHFRCQVQFYGLSENDEWTQDRAKPVTQIVSAEAWGRADDVIKIHWQEKKSNTILGSQEGNTMKTNDTYMKFSWLTVPEKSLDKEHRCIVRHENNKNGVDQEIIFPPIKTDVITMDPKDNCSKDANDTLLLQLTNTSAYYMYLLLLLKSVVYFAIITCCLLRRTAFCCNGEKSRAKRSGSGATNFSLLKQAGDVEENPGPTSMALPVTALLLPLALLLHAARPQSVLTQPPSVSGAPGQRVTISCTGSSSNIGAGYDVHWYQQLPGTAPKLLIFGNSNRPSGVPDRFSGFKSGTSASLAITGLQAEDEADYFCQSYDSSLSGSGVFGTGTKVTVLGGGGGSGGGGSGGGGSQMQLVQSGGGLVQPGRSLRLSCAASGFTFDDYAMHWVRQAPGKGLEWVSGISWNSGSIGYADSVKGRFTISRDNAKNSLYLQMNSLRAEDTALYYCAKDIHSGSYYGLLYYAMDVWGQGTTVTVSSTRIQNPDPAVYQLRDSKSSDKSVCLFTDFDSQTNVSQSKDSDVYITDKTVLDMRSMDFKSNSAVAWSNKSDFACANAFNNSIIPEDTFFPSPESSDSTDHVKPKETENTKQPSKSCHKPKAIVHTEKVNMMSLTVLGLRMLFAKTVAVNFLLTAKLFFL

SEQ ID NO: 19413 - protein, 588 aa, synthetic construct
MALPVTALLLPLALLLHAARPLEEEDLKNVFPPEVAVFEPSEAEISHTQKATLVCLATGFYPDHVELSWWVNGKEVHSGVSTDPQPLKEQPALNDSRYCLSSRLRVSATFWQNPRNHFRCQVQFYGLSENDEWTQDRAKPVTQIVSAEAWGRADDVIKIHWQEKKSNTILGSQEGNTMKTNDTYMKFSWLTVPEKSLDKEHRCIVRHENNKNGVDQEIIFPPIKTDVITMDPKDNCSKDANDTLLLQLTNTSAYYMYLLLLLKSVVYFAIITCCLLRRTAFCCNGEKSRAKRSGSGATNFSLLKQAGDVEENPGPTSMALPVTALLLPLALLLHAARPMCMPCFTTDHQMARKCDDCCGGKGRGKCYGPQCLCRLEGGGGSGGGGSGGGGSFEVCMPCFTTDQQMARKCSDCCGGKGRGKCYGPQCLCRTRIQNPDPAVYQLRDSKSSDKSVCLFTDFDSQTNVSQSKDSDVYITDKTVLDMRSMDFKSNSAVAWSNKSDFACANAFNNSIIPEDTFFPSPESSDSTDHVKPKETENTKQPSKSCHKPKAIVHTEKVNMMSLTVLGLRMLFAKTVAVNFLLTAKLFFL

SEQ ID NO: 19414 - protein, 851 aa, synthetic construct
MALPVTALLLPLALLLHAARPLEEEDLKNVFPPEVAVFEPSEAEISHTQKATLVCLATGFYPDHVELSWWVNGKEVHSGVSTDPQPLKEQPALNDSRYCLSSRLRVSATFWQNPRNHFRCQVQFYGLSENDEWTQDRAKPVTQIVSAEAWGRADDVIKIHWQEKKSNTILGSQEGNTMKTNDTYMKFSWLTVPEKSLDKEHRCIVRHENNKNGVDQEIIFPPIKTDVITMDPKDNCSKDANDTLLLQLTNTSAYYMYLLLLLKSVVYFAIITCCLLRRTAFCCNGEKSRAKRSGSGATNFSLLKQAGDVEENPGPTSMALPVTALLLPLALLLHAARPMCMPCFTTDHQMARKCDDCCGGKGRGKCYGPQCLCRLEGGGGSGGGGSGGGGSFEVCMPCFTTDQQMARKCSDCCGGKGRGKCYGPQCLCRGTGGGGSGGGGSGGGGSEFDIQMTQSPSSLSASVGDRVTITCKASDHINNWLAWYQQKPGQAPKLLIYGATTLETGVPSRFSGSGSGTDYTLTISSLQPEDFATYYCQQSWNTPWTFGQGTKLEIKRGGGGSGGGGSGGGGSQVQLQQPGAELVKPGASVKMSCKASGYAFSSYWINWMKQKPGQGLEWIGQIYPGDGDTNYNGKFKGRATLTADTSSSTAYMQLSSLTSEDSAVYFCARSITTVVGCAMDYWGQGTSVTVSSTRIQNPDPAVYQLRDSKSSDKSVCLFTDFDSQTNVSQSKDSDVYITDKTVLDMRSMDFKSNSAVAWSNKSDFACANAFNNSIIPEDTFFPSPESSDSTDHVKPKETENTKQPSKSCHKPKAIVHTEKVNMMSLTVLGLRMLFAKTVAVNFLLTAKLFFL

SEQ ID NO: 19415 - protein, 926 aa, synthetic construct
MALPVTALLLPLALLLHAARPLEEEDLKNVFPPEVAVFEPSEAEISHTQKATLVCLATGFYPDHVELSWWVNGKEVHSGVSTDPQPLKEQPALNDSRYCLSSRLRVSATFWQNPRNHFRCQVQFYGLSENDEWTQDRAKPVTQIVSAEAWGRADDVIKIHWQEKKSNTILGSQEGNTMKTNDTYMKFSWLTVPEKSLDKEHRCIVRHENNKNGVDQEIIFPPIKTDVITMDPKDNCSKDANDTLLLQLTNTSAYYMYLLLLLKSVVYFAIITCCLLRRTAFCCNGEKSRAKRSGSGATNFSLLKQAGDVEENPGPTSMALPVTALLLPLALLLHAARPSPVAPACDPRLLNKLLRDSHLLHSRLSQCPDVDPLSIPVLLPAVDFSLGEWKTQTEQSKAQDILGAVSLLLEGVMAARGQLEPSCLSSLLGQLSGQVRLLLGALQGLLGTQLPLQGRTTAHKDPNALFLSLQQLLRGKVRFLLLVEGPTLCVRRTLPTTAVPSSTSGTGGGGSGGGGSGGGGSEFDIQMTQSPSSLSASVGDRVTITCKASDHINNWLAWYQQKPGQAPKLLIYGATTLETGVPSRFSGSGSGTDYTLTISSLQPEDFATYYCQQSWNTPWTFGQGTKLEIKRGGGGSGGGGSGGGGSQVQLQQPGAELVKPGASVKMSCKASGYAFSSYWINWMKQKPGQGLEWIGQIYPGDGDTNYNGKFKGRATLTADTSSSTAYMQLSSLTSEDSAVYFCARSITTVVGCAMDYWGQGTSVTVSSTRIQNPDPAVYQLRDSKSSDKSVCLFTDFDSQTNVSQSKDSDVYITDKTVLDMRSMDFKSNSAVAWSNKSDFACANAFNNSIIPEDTFFPSPESSDSTDHVKPKETENTKQPSKSCHKPKAIVHTEKVNMMSLTVLGLRMLFAKTVAVNFLLTAKLFFL

SEQ ID NO: 19416 - protein, 833 aa, synthetic construct
MALPVTALLLPLALLLHAARPLEEEDLKNVFPPEVAVFEPSEAEISHTQKATLVCLATGFYPDHVELSWWVNGKEVHSGVSTDPQPLKEQPALNDSRYCLSSRLRVSATFWQNPRNHFRCQVQFYGLSENDEWTQDRAKPVTQIVSAEAWGRADDVIKIHWQEKKSNTILGSQEGNTMKTNDTYMKFSWLTVPEKSLDKEHRCIVRHENNKNGVDQEIIFPPIKTDVITMDPKDNCSKDANDTLLLQLTNTSAYYMYLLLLLKSVVYFAIITCCLLRRTAFCCNGEKSRAKRSGSGATNFSLLKQAGDVEENPGPTSMALPVTALLLPLALLLHAARPMGSWEEFELRLNAIEERLYALGGSEAELAYFEYVIADFEGNLQRYKGKGNPEVEALYFEADAIFEELVAYRHNGTGGGGSGGGGSGGGGSEFDIQMTQSPSSLSASVGDRVTITCKASDHINNWLAWYQQKPGQAPKLLIYGATTLETGVPSRFSGSGSGTDYTLTISSLQPEDFATYYCQQSWNTPWTFGQGTKLEIKRGGGGSGGGGSGGGGSQVQLQQPGAELVKPGASVKMSCKASGYAFSSYWINWMKQKPGQGLEWIGQIYPGDGDTNYNGKFKGRATLTADTSSSTAYMQLSSLTSEDSAVYFCARSITTVVGCAMDYWGQGTSVTVSSTRIQNPDPAVYQLRDSKSSDKSVCLFTDFDSQTNVSQSKDSDVYITDKTVLDMRSMDFKSNSAVAWSNKSDFACANAFNNSIIPEDTFFPSPESSDSTDHVKPKETENTKQPSKSCHKPKAIVHTEKVNMMSLTVLGLRMLFAKTVAVNFLLTAKLFFL

SEQ ID NO: 19417 - protein, 972 aa, synthetic construct
MALPVTALLLPLALLLHAARPLEIQNPDPAVYQLRDSKSSDKSVCLFTDFDSQTNVSQSKDSDVYITDKTVLDMRSMDFKSNSAVAWSNKSDFACANAFNNSIIPEDTFFPSPESSDSTDHVKPKETENTKQPSKSCHKPKAIVHTEKVNMMSLTVLGLRMLFAKTVAVNFLLTAKLFFLRAKRSGSGATNFSLLKQAGDVEENPGPTSMALPVTALLLPLALLLHAARPDIQMTQTTSSLSASLGDRVTISCRASQDISKYLNWYQQKPDGTVKLLIYHTSRLHSGVPSRFSGSGSGTDYSLTISNLEQEDIATYFCQQGNTLPYTFGGGTKLEITGGGGSGGGGSGGGGSEVKLQESGPGLVAPSQSLSVTCTVSGVSLPDYGVSWIRQPPRKGLEWLGVIWGSETTYYNSALKSRLTIIKDNSKSQVFLKMNSLQTDDTAIYYCAKHYYYGGSYAMDYWGQGTSVTVSSTREEDLKNVFPPEVAVFEPSEAEISHTQKATLVCLATGFYPDHVELSWWVNGKEVHSGVSTDPQPLKEQPALNDSRYCLSSRLRVSATFWQNPRNHFRCQVQFYGLSENDEWTQDRAKPVTQIVSAEAWGRADDVIKIHWQEKKSNTILGSQEGNTMKTNDTYMKFSWLTVPEKSLDKEHRCIVRHENNKNGVDQEIIFPPIKTDVITMDPKDNCSKDANDTLLLQLTNTSAYYMYLLLLLKSVVYFAIITCCLLRRTAFCCNGEKSRAKRSGSGVKQTLNFDLLKLAGDVESNPGPSRGHMTEYKPTVRLATRDDVPRAVRTLAAAFADYPATRHTVDPDRHIERVTELQELFLTRVGLDIGKVWVADDGAAVAVWTTPESVEAGAVFAEIGPRMAELSGSRLAAQQQMEGLLAPHRPKEPAWFLATVGVSPDHQGKGLGSAVVLPGVEAAERAGVPAFLETSAPRNLPFYERLGFTVTADVEVPEGPRTWCMTRKPGA

SEQ ID NO: 19418 - protein, 973 aa, synthetic construct
MALPVTALLLPLALLLHAARPLEIQNPDPAVYQLRDSKSSDKSVCLFTDFDSQTNVSQSKDSDVYITDKTVLDMRSMDFKSNSAVAWSNKSDFACANAFNNSIIPEDTFFPSPESSDSTDHVKPKETENTKQPSKSCHKPKAIVHTEKVNMMSLTVLGLRMLFAKTVAVNFLLTAKLFFLRAKRSGSGATNFSLLKQAGDVEENPGPTSTMALPVTALLLPLALLLHAARPEIVMTQSPATLSLSPGERATLSCRASQDISKYLNWYQQKPGQAPRLLIYHTSRLHSGIPARFSGSGSGTDYTLTISSLQPEDFAVYFCQQGNTLPYTFGQGTKLEIKGGGGSGGGGSGGGGSQVQLQESGPGLVKPSETLSLTCTVSGVSLPDYGVSWIRQPPGKGLEWIGVIWGSETTYYNSSLKSRVTISKDNSKNQVSLKLSSVTAADTAVYYCAKHYYYGGSYAMDYWGQGTLVTVSSTREEDLKNVFPPEVAVFEPSEAEISHTQKATLVCLATGFYPDHVELSWWVNGKEVHSGVSTDPQPLKEQPALNDSRYCLSSRLRVSATFWQNPRNHFRCQVQFYGLSENDEWTQDRAKPVTQIVSAEAWGRADDVIKIHWQEKKSNTILGSQEGNTMKTNDTYMKFSWLTVPEKSLDKEHRCIVRHENNKNGVDQEIIFPPIKTDVITMDPKDNCSKDANDTLLLQLTNTSAYYMYLLLLLKSVVYFAIITCCLLRRTAFCCNGEKSRAKRSGSGVKQTLNFDLLKLAGDVESNPGPSRGHMTEYKPTVRLATRDDVPRAVRTLAAAFADYPATRHTVDPDRHIERVTELQELFLTRVGLDIGKVWVADDGAAVAVWTTPESVEAGAVFAEIGPRMAELSGSRLAAQQQMEGLLAPHRPKEPAWFLATVGVSPDHQGKGLGSAVVLPGVEAAERAGVPAFLETSAPRNLPFYERLGFTVTADVEVPEGPRTWCMTRKPGA

SEQ ID NO: 19419 - protein, 974 aa, synthetic construct
MALPVTALLLPLALLLHAARPLEIQNPDPAVYQLRDSKSSDKSVCLFTDFDSQTNVSQSKDSDVYITDKTVLDMRSMDFKSNSAVAWSNKSDFACANAFNNSIIPEDTFFPSPESSDSTDHVKPKETENTKQPSKSCHKPKAIVHTEKVNMMSLTVLGLRMLFAKTVAVNFLLTAKLFFLRAKRSGSGATNFSLLKQAGDVEENPGPTSTMALPVTALLLPLALLLHAARPDEIVLTQSPATLSLSPGERATLSCSASSSVSYMHWYQQKPGQAPRLLIYDTSKLASGIPARFSGSGSGTDFTLTISSLEPEDVAVYYCFQGSVYPFTFGQGTKLEIKRGGGGSGGGGSGGGGSQVQLQESGPGLVKPSQTLSLTCTVSGGSISTSGMGVGWIRQHPGKGLEWIGHIWWDDDKRYNPALKSRVTISVDTSKNQFSLKLSSVTAADTAVYYCARMELWSYYFDYWGQGTLVTVSSTREEDLKNVFPPEVAVFEPSEAEISHTQKATLVCLATGFYPDHVELSWWVNGKEVHSGVSTDPQPLKEQPALNDSRYCLSSRLRVSATFWQNPRNHFRCQVQFYGLSENDEWTQDRAKPVTQIVSAEAWGRADDVIKIHWQEKKSNTILGSQEGNTMKTNDTYMKFSWLTVPEKSLDKEHRCIVRHENNKNGVDQEIIFPPIKTDVITMDPKDNCSKDANDTLLLQLTNTSAYYMYLLLLLKSVVYFAIITCCLLRRTAFCCNGEKSRAKRSGSGVKQTLNFDLLKLAGDVESNPGPSRGHMTEYKPTVRLATRDDVPRAVRTLAAAFADYPATRHTVDPDRHIERVTELQELFLTRVGLDIGKVWVADDGAAVAVWTTPESVEAGAVFAEIGPRMAELSGSRLAAQQQMEGLLAPHRPKEPAWFLATVGVSPDHQGKGLGSAVVLPGVEAAERAGVPAFLETSAPRNLPFYERLGFTVTADVEVPEGPRTWCMTRKPGA

SEQ ID NO: 19420 - protein, 970 aa, synthetic construct
MALPVTALLLPLALLLHAARPLEIQNPDPAVYQLRDSKSSDKSVCLFTDFDSQTNVSQSKDSDVYITDKTVLDMRSMDFKSNSAVAWSNKSDFACANAFNNSIIPEDTFFPSPESSDSTDHVKPKETENTKQPSKSCHKPKAIVHTEKVNMMSLTVLGLRMLFAKTVAVNFLLTAKLFFLRAKRSGSGATNFSLLKQAGDVEENPGPTSMALPVTALLLPLALLLHAARPDIQMTQSPSSLSASVGDRVTITCRASQDISNYLNWYQQKPGKAPKLLIYYTSRLHSGVPSRFSGSGSGTDFTLTISSLQPEDFATYYCQQGNTLPYTFGQGTKVEIKRGGGGSGGGGSGGGGSEVQLVESGGGLVQPGGSLRLSCAASGFTFSDYFMSWVRQAPGKGLEWVATISNGGTYTYYPDSVKGRFTISRDNSKNTLYLQMNSLRAEDTAVYYCARFDGYIFDYWGQGTLVTVSSTREEDLKNVFPPEVAVFEPSEAEISHTQKATLVCLATGFYPDHVELSWWVNGKEVHSGVSTDPQPLKEQPALNDSRYCLSSRLRVSATFWQNPRNHFRCQVQFYGLSENDEWTQDRAKPVTQIVSAEAWGRADDVIKIHWQEKKSNTILGSQEGNTMKTNDTYMKFSWLTVPEKSLDKEHRCIVRHENNKNGVDQEIIFPPIKTDVITMDPKDNCSKDANDTLLLQLTNTSAYYMYLLLLLKSVVYFAIITCCLLRRTAFCCNGEKSRAKRSGSGVKQTLNFDLLKLAGDVESNPGPSRGHMTEYKPTVRLATRDDVPRAVRTLAAAFADYPATRHTVDPDRHIERVTELQELFLTRVGLDIGKVWVADDGAAVAVWTTPESVEAGAVFAEIGPRMAELSGSRLAAQQQMEGLLAPHRPKEPAWFLATVGVSPDHQGKGLGSAVVLPGVEAAERAGVPAFLETSAPRNLPFYERLGFTVTADVEVPEGPRTWCMTRKPGA

SEQ ID NO: 19421 - protein, 974 aa, synthetic construct
MALPVTALLLPLALLLHAARPLEIQNPDPAVYQLRDSKSSDKSVCLFTDFDSQTNVSQSKDSDVYITDKTVLDMRSMDFKSNSAVAWSNKSDFACANAFNNSIIPEDTFFPSPESSDSTDHVKPKETENTKQPSKSCHKPKAIVHTEKVNMMSLTVLGLRMLFAKTVAVNFLLTAKLFFLRAKRSGSGATNFSLLKQAGDVEENPGPTSMALPVTALLLPLALLLHAARPDIQMTQSPSSLSASVGDRVTITCKASDHINNWLAWYQQKPGQAPKLLIYGATTLETGVPSRFSGSGSGTDYTLTISSLQPEDFATYYCQQSWNTPWTFGQGTKLEIKRGGGGSGGGGSGGGGSQVQLQQPGAELVKPGASVKMSCKASGYAFSSYWINWMKQKPGQGLEWIGQIYPGDGDTNYNGKFKGRATLTADTSSSTAYMQLSSLTSEDSAVYFCARSITTVVGCAMDYWGQGTSVTVSSTREEDLKNVFPPEVAVFEPSEAEISHTQKATLVCLATGFYPDHVELSWWVNGKEVHSGVSTDPQPLKEQPALNDSRYCLSSRLRVSATFWQNPRNHFRCQVQFYGLSENDEWTQDRAKPVTQIVSAEAWGRADDVIKIHWQEKKSNTILGSQEGNTMKTNDTYMKFSWLTVPEKSLDKEHRCIVRHENNKNGVDQEIIFPPIKTDVITMDPKDNCSKDANDTLLLQLTNTSAYYMYLLLLLKSVVYFAIITCCLLRRTAFCCNGEKSRAKRSGSGVKQTLNFDLLKLAGDVESNPGPSRGHMTEYKPTVRLATRDDVPRAVRTLAAAFADYPATRHTVDPDRHIERVTELQELFLTRVGLDIGKVWVADDGAAVAVWTTPESVEAGAVFAEIGPRMAELSGSRLAAQQQMEGLLAPHRPKEPAWFLATVGVSPDHQGKGLGSAVVLPGVEAAERAGVPAFLETSAPRNLPFYERLGFTVTADVEVPEGPRTWCMTRKPGA

SEQ ID NO: 19422 - protein, 976 aa, synthetic construct
MALPVTALLLPLALLLHAARPLEIQNPDPAVYQLRDSKSSDKSVCLFTDFDSQTNVSQSKDSDVYITDKTVLDMRSMDFKSNSAVAWSNKSDFACANAFNNSIIPEDTFFPSPESSDSTDHVKPKETENTKQPSKSCHKPKAIVHTEKVNMMSLTVLGLRMLFAKTVAVNFLLTAKLFFLRAKRSGSGATNFSLLKQAGDVEENPGPTSMALPVTALLLPLALLLHAARPQIVLSQSPAILSASPGEKVTMTCRASSSVSYMHWYQQKPGSSPKPWIYATSNLASGVPARFSGSGSGTSYSFTISRVEAEDAATYYCQQWTFNPPTFGGGTRLEIKRTVAAGGGGSGGGGSGGGGSQAYLQQSGAELVRPGASVKMSCKASGYTFTSYNMHWVKQTPRQGLEWIGGIYPGNGDTSYNQKFKGKATLTVGKSSSTAYMQLSSLTSEDSAVYFCARYDYNYAMDYWGQGTSVTVSSASTREEDLKNVFPPEVAVFEPSEAEISHTQKATLVCLATGFYPDHVELSWWVNGKEVHSGVSTDPQPLKEQPALNDSRYCLSSRLRVSATFWQNPRNHFRCQVQFYGLSENDEWTQDRAKPVTQIVSAEAWGRADDVIKIHWQEKKSNTILGSQEGNTMKTNDTYMKFSWLTVPEKSLDKEHRCIVRHENNKNGVDQEIIFPPIKTDVITMDPKDNCSKDANDTLLLQLTNTSAYYMYLLLLLKSVVYFAIITCCLLRRTAFCCNGEKSRAKRSGSGVKQTLNFDLLKLAGDVESNPGPSRGHMTEYKPTVRLATRDDVPRAVRTLAAAFADYPATRHTVDPDRHIERVTELQELFLTRVGLDIGKVWVADDGAAVAVWTTPESVEAGAVFAEIGPRMAELSGSRLAAQQQMEGLLAPHRPKEPAWFLATVGVSPDHQGKGLGSAVVLPGVEAAERAGVPAFLETSAPRNLPFYERLGFTVTADVEVPEGPRTWCMTRKPGA

SEQ ID NO: 19423 - protein, 974 aa, synthetic construct
MALPVTALLLPLALLLHAARPLEIQNPDPAVYQLRDSKSSDKSVCLFTDFDSQTNVSQSKDSDVYITDKTVLDMRSMDFKSNSAVAWSNKSDFACANAFNNSIIPEDTFFPSPESSDSTDHVKPKETENTKQPSKSCHKPKAIVHTEKVNMMSLTVLGLRMLFAKTVAVNFLLTAKLFFLRAKRSGSGATNFSLLKQAGDVEENPGPTSMALPVTALLLPLALLLHAARPEIVLTQSPATLSLSPGERATLSCRASQSVSSYLAWYQQKPGQAPRLLIYDASNRATGIPARFSGSGSGTDFTLTISSLEPEDFAVYYCQQRSNWPITFGQGTRLEIKGGGGSGGGGSGGGGSEVQLVESGGGLVQPDRSLRLSCAASGFTFHDYAMHWVRQAPGKGLEWVSTISWNSGTIGYADSVKGRFTISRDNAKNSLYLQMNSLRAEDTALYYCAKDIQYGNYYYGMDVWGQGTTVTVSSTREEDLKNVFPPEVAVFEPSEAEISHTQKATLVCLATGFYPDHVELSWWVNGKEVHSGVSTDPQPLKEQPALNDSRYCLSSRLRVSATFWQNPRNHFRCQVQFYGLSENDEWTQDRAKPVTQIVSAEAWGRADDVIKIHWQEKKSNTILGSQEGNTMKTNDTYMKFSWLTVPEKSLDKEHRCIVRHENNKNGVDQEIIFPPIKTDVITMDPKDNCSKDANDTLLLQLTNTSAYYMYLLLLLKSVVYFAIITCCLLRRTAFCCNGEKSRAKRSGSGVKQTLNFDLLKLAGDVESNPGPSRGHMTEYKPTVRLATRDDVPRAVRTLAAAFADYPATRHTVDPDRHIERVTELQELFLTRVGLDIGKVWVADDGAAVAVWTTPESVEAGAVFAEIGPRMAELSGSRLAAQQQMEGLLAPHRPKEPAWFLATVGVSPDHQGKGLGSAVVLPGVEAAERAGVPAFLETSAPRNLPFYERLGFTVTADVEVPEGPRTWCMTRKPGA

SEQ ID NO: 19424 - protein, 972 aa, synthetic construct
MALPVTALLLPLALLLHAARPLEIQNPDPAVYQLRDSKSSDKSVCLFTDFDSQTNVSQSKDSDVYITDKTVLDMRSMDFKSNSAVAWSNKSDFACANAFNNSIIPEDTFFPSPESSDSTDHVKPKETENTKQPSKSCHKPKAIVHTEKVNMMSLTVLGLRMLFAKTVAVNFLLTAKLFFLRAKRSGSGATNFSLLKQAGDVEENPGPTSMALPVTALLLPLALLLHAARPDIQMTQSPSSLSASVGDRVTITCRASQDVNTAVAWYQQKPGKAPKLLIYSASFLESGVPSRFSGSRSGTDFTLTISSLQPEDFATYYCQQHYTTPPTFGQTKVEIKRGGGGSGGGGSGGGGSEVQLVESGGGLVQPGGSLRLSCAASGFNIKDTYIHWVRQAPGKGLEWVARIYPTNGYTRYADSVKGRFTISADTSKNTAYLQMNSLRAEDTAVYYCSRWGGDGFYAMDVWGQGTLVTVSSTREEDLKNVFPPEVAVFEPSEAEISHTQKATLVCLATGFYPDHVELSWWVNGKEVHSGVSTDPQPLKEQPALNDSRYCLSSRLRVSATFWQNPRNHFRCQVQFYGLSENDEWTQDRAKPVTQIVSAEAWGRADDVIKIHWQEKKSNTILGSQEGNTMKTNDTYMKFSWLTVPEKSLDKEHRCIVRHENNKNGVDQEIIFPPIKTDVITMDPKDNCSKDANDTLLLQLTNTSAYYMYLLLLLKSVVYFAIITCCLLRRTAFCCNGEKSRAKRSGSGVKQTLNFDLLKLAGDVESNPGPSRGHMTEYKPTVRLATRDDVPRAVRTLAAAFADYPATRHTVDPDRHIERVTELQELFLTRVGLDIGKVWVADDGAAVAVWTTPESVEAGAVFAEIGPRMAELSGSRLAAQQQMEGLLAPHRPKEPAWFLATVGVSPDHQGKGLGSAVVLPGVEAAERAGVPAFLETSAPRNLPFYERLGFTVTADVEVPEGPRTWCMTRKPGA

SEQ ID NO: 19425 - protein, 851 aa, synthetic construct
MALPVTALLLPLALLLHAARPLEIQNPDPAVYQLRDSKSSDKSVCLFTDFDSQTNVSQSKDSDVYITDKTVLDMRSMDFKSNSAVAWSNKSDFACANAFNNSIIPEDTFFPSPESSDSTDHVKPKETENTKQPSKSCHKPKAIVHTEKVNMMSLTVLGLRMLFAKTVAVNFLLTAKLFFLRAKRSGSGATNFSLLKQAGDVEENPGPTSMALPVTALLLPLALLLHAARPDEFEVQLVESGGGLVQAGGSLRLSCAASGITFSINTMGWYRQAPGKQRELVALISSIGDTYYADSVKGRFTISRDNAKNTVYLQMNSLKPEDTAVYYCKRFRTAAQGTDYWGQGTQVTVSSTREEDLKNVFPPEVAVFEPSEAEISHTQKATLVCLATGFYPDHVELSWWVNGKEVHSGVSTDPQPLKEQPALNDSRYCLSSRLRVSATFWQNPRNHFRCQVQFYGLSENDEWTQDRAKPVTQIVSAEAWGRADDVIKIHWQEKKSNTILGSQEGNTMKTNDTYMKFSWLTVPEKSLDKEHRCIVRHENNKNGVDQEIIFPPIKTDVITMDPKDNCSKDANDTLLLQLTNTSAYYMYLLLLLKSVVYFAIITCCLLRRTAFCCNGEKSRAKRSGSGVKQTLNFDLLKLAGDVESNPGPSRGHMTEYKPTVRLATRDDVPRAVRTLAAAFADYPATRHTVDPDRHIERVTELQELFLTRVGLDIGKVWVADDGAAVAVWTTPESVEAGAVFAEIGPRMAELSGSRLAAQQQMEGLLAPHRPKEPAWFLATVGVSPDHQGKGLGSAVVLPGVEAAERAGVPAFLETSAPRNLPFYERLGFTVTADVEVPEGPRTWCMTRKPGA

SEQ ID NO: 19426 - protein, 851 aa, synthetic construct; identical to SEQ ID NO: 19425

SEQ ID NO: 19427 - protein, 1116 aa, synthetic construct
MALPVTALLLPLALLLHAARPLEIQNPDPAVYQLRDSKSSDKSVCLFTDFDSQTNVSQSKDSDVYITDKTVLDMRSMDFKSNSAVAWSNKSDFACANAFNNSIIPEDTFFPSPESSDSTDHVKPKETENTKQPSKSCHKPKAIVHTEKVNMMSLTVLGLRMLFAKTVAVNFLLTAKLFFLRAKRSGSGATNFSLLKQAGDVEENPGPTSMALPVTALLLPLALLLHAARPQVQLVESGGGLVQAGDSVTLSCTASGRTFSSYALAWFRQRPGKEREFVAGLRWGGPTNYADSVKDRFTISGDSAKHTMYLQMNSLKPEDTAVYYCGYNPGGWAVPSQYEYDSWGQGTQVTVSSGTGGGGSGGGGSGGGGSEFDIQMTQSPSSLSASVGDRVTITCKASDHINNWLAWYQQKPGQAPKLLIYGATTLETGVPSRFSGSGSGTDYTLTISSLQPEDFATYYCQQSWNTPWTFGQGTKLEIKRGGGGSGGGGSGGGGSQVQLQQPGAELVKPGASVKMSCKASGYAFSSYWINWMKQKPGQGLEWIGQIYPGDGDTNYNGKFKGRATLTADTSSSTAYMQLSSLTSEDSAVYFCARSITTVVGCAMDYWGQGTSVTVSSTREEDLKNVFPPEVAVFEPSEAEISHTQKATLVCLATGFYPDHVELSWWVNGKEVHSGVSTDPQPLKEQPALNDSRYCLSSRLRVSATFWQNPRNHFRCQVQFYGLSENDEWTQDRAKPVTQIVSAEAWGRADDVIKIHWQEKKSNTILGSQEGNTMKTNDTYMKFSWLTVPEKSLDKEHRCIVRHENNKNGVDQEIIFPPIKTDVITMDPKDNCSKDANDTLLLQLTNTSAYYMYLLLLLKSVVYFAIITCCLLRRTAFCCNGEKSRAKRSGSGVKQTLNFDLLKLAGDVESNPGPSRGHMTEYKPTVRLATRDDVPRAVRTLAAAFADYPATRHTVDPDRHIERVTELQELFLTRVGLDIGKVWVADDGAAVAVWTTPESVEAGAVFAEIGPRMAELSGSRLAAQQQMEGLLAPHRPKEPAWFLATVGVSPDHQGKGLGSAVVLPGVEAAERAGVPAFLETSAPRNLPFYERLGFTVTADVEVPEGPRTWCMTRKPGA

SEQ ID NO: 19428 - protein, 1245 aa, synthetic construct
MALPVTALLLPLALLLHAARPLEIQNPDPAVYQLRDSKSSDKSVCLFTDFDSQTNVSQSKDSDVYITDKTVLDMRSMDFKSNSAVAWSNKSDFACANAFNNSIIPEDTFFPSPESSDSTDHVKPKETENTKQPSKSCHKPKAIVHTEKVNMMSLTVLGLRMLFAKTVAVNFLLTAKLFFLRAKRSGSGATNFSLLKQAGDVEENPGPTSMALPVTALLLPLALLLHAARPEVQLLESGGGLVQPGGSLRLSCAASGFTFSSYAMSWVRQAPGKGLEWVSSISGSGDYIYYADSVKGRFTISRDISKNTLYLQMNSLRAEDTAVYYCAKEGTGANSSLADYRGQGTLVTVSSGGGSGGGSQVQLVESGGGLVQAGDSVTLSCTASGRTFSSYALAWFRQRPGKEREFVAGLRWGGPTNYADSVKDRFTISGDSAKHTMYLQMNSLKPEDTAVYYCGYNPGGWAVPSQYEYDSWGQGTQVTVSSGTGGGGSGGGGSGGGGSEFDIQMTQSPSSLSASVGDRVTITCKASDHINNWLAWYQQKPGQAPKLLIYGATTLETGVPSRFSGSGSGTDYTLTISSLQPEDFATYYCQQSWNTPWTFGQGTKLEIKRGGGGSGGGGSGGGGSQVQLQQPGAELVKPGASVKMSCKASGYAFSSYWINWMKQKPGQGLEWIGQIYPGDGDTNYNGKFKGRATLTADTSSSTAYMQLSSLTSEDSAVYFCARSITTVVGCAMDYWGQGTSVTVSSTREEDLKNVFPPEVAVFEPSEAEISHTQKATLVCLATGFYPDHVELSWWVNGKEVHSGVSTDPQPLKEQPALNDSRYCLSSRLRVSATFWQNPRNHFRCQVQFYGLSENDEWTQDRAKPVTQIVSAEAWGRADDVIKIHWQEKKSNTILGSQEGNTMKTNDTYMKFSWLTVPEKSLDKEHRCIVRHENNKNGVDQEIIFPPIKTDVITMDPKDNCSKDANDTLLLQLTNTSAYYMYLLLLLKSVVYFAIITCCLLRRTAFCCNGEKSRAKRSGSGVKQTLNFDLLKLAGDVESNPGPSRGHMTEYKPTVRLATRDDVPRAVRTLAAAFADYPATRHTVDPDRHIERVTELQELFLTRVGLDIGKVWVADDGAAVAVWTTPESVEAGAVFAEIGPRMAELSGSRLAAQQQMEGLLAPHRPKEPAWFLATVGVSPDHQGKGLGSAVVLPGVEAAERAGVPAFLETSAPRNLPFYERLGFTVTADVEVPEGPRTWCMTRKPGA

SEQ ID NO: 19429 - protein, 1243 aa, synthetic construct
MALPVTALLLPLALLLHAARPLEIQNPDPAVYQLRDSKSSDKSVCLFTDFDSQTNVSQSKDSDVYITDKTVLDMRSMDFKSNSAVAWSNKSDFACANAFNNSIIPEDTFFPSPESSDSTDHVKPKETENTKQPSKSCHKPKAIVHTEKVNMMSLTVLGLRMLFAKTVAVNFLLTAKLFFLRAKRSGSGATNFSLLKQAGDVEENPGPTSMALPVTALLLPLALLLHAARPGVTQSPTHLIKTRGQQATLRCSPISGHTSVYWYQQALGLGLQFLLWYDEGEERNRGNFPPRFSGRQFPNYSSELNVNALELEDSALYLCASSLGGPRGLAGLRGDEQFFGPGTRLTVLEGGGSGGGSQVQLVESGGGLVQAGDSVTLSCTASGRTFSSYALAWFRQRPGKEREFVAGLRWGGPTNYADSVKDRFTISGDSAKHTMYLQMNSLKPEDTAVYYCGYNPGGWAVPSQYEYDSWGQGTQVTVSSGTGGGGSGGGGSGGGGSEFDIQMTQSPSSLSASVGDRVTITCKASDHINNWLAWYQQKPGQAPKLLIYGATTLETGVPSRFSGSGSGTDYTLTISSLQPEDFATYYCQQSWNTPWTFGQGTKLEIKRGGGGSGGGGSGGGGSQVQLQQPGAELVKPGASVKMSCKASGYAFSSYWINWMKQKPGQGLEWIGQIYPGDGDTNYNGKFKGRATLTADTSSSTAYMQLSSLTSEDSAVYFCARSITTVVGCAMDYWGQGTSVTVSSTREEDLKNVFPPEVAVFEPSEAEISHTQKATLVCLATGFYPDHVELSWWVNGKEVHSGVSTDPQPLKEQPALNDSRYCLSSRLRVSATFWQNPRNHFRCQVQFYGLSENDEWTQDRAKPVTQIVSAEAWGRADDVIKIHWQEKKSNTILGSQEGNTMKTNDTYMKFSWLTVPEKSLDKEHRCIVRHENNKNGVDQEIIFPPIKTDVITMDPKDNCSKDANDTLLLQLTNTSAYYMYLLLLLKSVVYFAIITCCLLRRTAFCCNGEKSRAKRSGSGVKQTLNFDLLKLAGDVESNPGPSRGHMTEYKPTVRLATRDDVPRAVRTLAAAFADYPATRHTVDPDRHIERVTELQELFLTRVGLDIGKVWVADDGAAVAVWTTPESVEAGAVFAEIGPRMAELSGSRLAAQQQMEGLLAPHRPKEPAWFLATVGVSPDHQGKGLGSAVVLPGVEAAERAGVPAFLETSAPRNLPFYERLGFTVTADVEVPEGPRTWCMTRKPGA

SEQ ID NO: 19430 - protein, 1004 aa, synthetic construct
MALPVTALLLPLALLLHAARPLEIQNPDPAVYQLRDSKSSDKSVCLFTDFDSQTNVSQSKDSDVYITDKTVLDMRSMDFKSNSAVAWSNKSDFACANAFNNSIIPEDTFFPSPESSDSTDHVKPKETENTKQPSKSCHKPKAIVHTEKVNMMSLTVLGLRMLFAKTVAVNFLLTAKLFFLRAKRSGSGATNFSLLKQAGDVEENPGPTSMALPVTALLLPLALLLHAARPGVTQSPTHLIKTRGQQATLRCSPISGHTSVYWYQQALGLGLQFLLWYDEGEERNRGNFPPRFSGRQFPNYSSELNVNALELEDSALYLCASSLGGPRGLAGLRGDEQFFGPGTRLTVLEGGGSGGGSGVTQSPTHLIKTRGQQATLRCSPISGHTSVYWYQQALGLGLQFLLWYDEGEERNRGNFPPRFSGRQFPNYSSELNVNALELEDSALYLCASSLGGDELGADGNEQFFGPGTRLTVLEGTGGGGSGGGGSGGGGSEFDIQMTQSPSSLSASVGDRVTITCKASDHINNWLAWYQQKPGQAPKLLIYGATTLETGVPSRFSGSGSGTDYTLTISSLQPEDFATYYCQQSWNTPWTFGQGTKLEIKRGGGGSGGGGSGGGGSQVQLQQPGAELVKPGASVKMSCKASGYAFSSYWINWMKQKPGQGLEWIGQIYPGDGDTNYNGKFKGRATLTADTSSSTAYMQLSSLTSEDSAVYFCARSITTVVGCAMDYWGQGTSVTVSSTREEDLKNVFPPEVAVFEPSEAEISHTQKATLVCLATGFYPDHVELSWWVNGKEVHSGVSTDPQPLKEQPALNDSRYCLSSRLRVSATFWQNPRNHFRCQVQFYGLSENDEWTQDRAKPVTQIVSAEAWGRADDVIKIHWQEKKSNTILGSQEGNTMKTNDTYMKFSWLTVPEKSLDKEHRCIVRHENNKNGVDQEIIFPPIKTDVITMDPKDNCSKDANDTLLLQLTNTSAYYMYLLLLLKSVVYFAIITCCLLRRTAFCCNGEKS

SEQ ID NO: 19431 - protein, 857 aa, synthetic construct
MALPVTALLLPLALLLHAARPLEIQNPDPAVYQLRDSKSSDKSVCLFTDFDSQTNVSQSKDSDVYITDKTVLDMRSMDFKSNSAVAWSNKSDFACANAFNNSIIPEDTFFPSPESSDSTDHVKPKETENTKQPSKSCHKPKAIVHTEKVNMMSLTVLGLRMLFAKTVAVNFLLTAKLFFLRAKRSGSGATNFSLLKQAGDVEENPGPTSMALPVTALLLPLALLLHAARPDEFGSDLGIKLLFAAAKGQDDEVRILLAAGADVNAKDFEGYTPLHVAAYDGHLEIVEVLLKAGADVNAKDSQGRTPLHEAAYSGHLEIVEVLLKAGADVNAQDDAGETPADLAAAWGHEDIAEVLQKTREEDLKNVFPPEVAVFEPSEAEISHTQKATLVCLATGFYPDHVELSWWVNGKEVHSGVSTDPQPLKEQPALNDSRYCLSSRLRVSATFWQNPRNHFRCQVQFYGLSENDEWTQDRAKPVTQIVSAEAWGRADDVIKIHWQEKKSNTILGSQEGNTMKTNDTYMKFSWLTVPEKSLDKEHRCIVRHENNKNGVDQEIIFPPIKTDVITMDPKDNCSKDANDTLLLQLTNTSAYYMYLLLLLKSVVYFAIITCCLLRRTAFCCNGEKSRAKRSGSGVKQTLNFDLLKLAGDVESNPGPSRGHMTEYKPTVRLATRDDVPRAVRTLAAAFADYPATRHTVDPDRHIERVTELQELFLTRVGLDIGKVWVADDGAAVAVWTTPESVEAGAVFAEIGPRMAELSGSRLAAQQQMEGLLAPHRPKEPAWFLATVGVSPDHQGKGLGSAVVLPGVEAAERAGVPAFLETSAPRNLPFYERLGFTVTADVEVPEGPRTWCMTRKPGA

SEQ ID NO: 19432 - protein, 786 aa, synthetic construct
MALPVTALLLPLALLLHAARPLEIQNPDPAVYQLRDSKSSDKSVCLFTDFDSQTNVSQSKDSDVYITDKTVLDMRSMDFKSNSAVAWSNKSDFACANAFNNSIIPEDTFFPSPESSDSTDHVKPKETENTKQPSKSCHKPKAIVHTEKVNMMSLTVLGLRMLFAKTVAVNFLLTAKLFFLRAKRSGSGATNFSLLKQAGDVEENPGPTSMDWIWRILFLVGAATGAHSFEGSGFEYAKEMRNAYWEIALLPNLTNQQKRAPIRKLYDDPSQSSELLSEAKKLNDSQTREEDLKNVFPPEVAVFEPSEAEISHTQKATLVCLATGFYPDHVELSWWVNGKEVHSGVSTDPQPLKEQPALNDSRYCLSSRLRVSATFWQNPRNHFRCQVQFYGLSENDEWTQDRAKPVTQIVSAEAWGRADDVIKIHWQEKKSNTILGSQEGNTMKTNDTYMKFSWLTVPEKSLDKEHRCIVRHENNKNGVDQEIIFPPIKTDVITMDPKDNCSKDANDTLLLQLTNTSAYYMYLLLLLKSVVYFAIITCCLLRRTAFCCNGEKSRAKRSGSGVKQTLNFDLLKLAGDVESNPGPSRGHMTEYKPTVRLATRDDVPRAVRTLAAAFADYPATRHTVDPDRHIERVTELQELFLTRVGLDIGKVWVADDGAAVAVWTTPESVEAGAVFAEIGPRMAELSGSRLAAQQQMEGLLAPHRPKEPAWFLATVGVSPDHQGKGLGSAVVLPGVEAAERAGVPAFLETSAPRNLPFYERLGFTVTADVEVPEGPRTWCMTRKPGA

SEQ ID NO: 19433 - protein, 1008 aa, synthetic construct
MALPVTALLLPLALLLHAARPLEIQNPDPAVYQLRDSKSSDKSVCLFTDFDSQTNVSQSKDSDVYITDKTVLDMRSMDFKSNSAVAWSNKSDFACANAFNNSIIPEDTFFPSPESSDSTDHVKPKETENTKQPSKSCHKPKAIVHTEKVNMMSLTVLGLRMLFAKTVAVNFLLTAKLFFLRAKRSGSGATNFSLLKQAGDVEENPGPTSMALPVTALLLPLALLLHAARPDEFEVQLVESGGGLVQAGGSLRLSCAASGITFSINTMGWYRQAPGKQRELVALISSIGDTYYADSVKGRFTISRDNAKNTVYLQMNSLKPEDTAVYYCKRFRTAAQGTDYWGQGTQVTVSSLEGGGGSGGGGSGGGGSGSGGSGSGGSGSGGSGSGGSFEVQLVESGGGLVQPGGSLRLSCAASGSIFGFNDMAWYRQAPGKQRELVALISRVGVTSSADSVKGRFTISRVNAKDTVYLQMNSLKPEDTAVYYCYMDQRLDGSTLAYWGQGTQVTVSSTREEDLKNVFPPEVAVFEPSEAEISHTQKATLVCLATGFYPDHVELSWWVNGKEVHSGVSTDPQPLKEQPALNDSRYCLSSRLRVSATFWQNPRNHFRCQVQFYGLSENDEWTQDRAKPVTQIVSAEAWGRADDVIKIHWQEKKSNTILGSQEGNTMKTNDTYMKFSWLTVPEKSLDKEHRCIVRHENNKNGVDQEIIFPPIKTDVITMDPKDNCSKDANDTLLLQLTNTSAYYMYLLLLLKSVVYFAIITCCLLRRTAFCCNGEKSRAKRSGSGVKQTLNFDLLKLAGDVESNPGPSRGHMTEYKPTVRLATRDDVPRAVRTLAAAFADYPATRHTVDPDRHIERVTELQELFLTRVGLDIGKVWVADDGAAVAVWTTPESVEAGAVFAEIGPRMAELSGSRLAAQQQMEGLLAPHRPKEPAWFLATVGVSPDHQGKGLGSAVVLPGVEAAERAGVPAFLETSAPRNLPFYERLGFTVTADVEVPEGPRTWCMTRKPGA

SEQ ID NO: 19434 - protein, 922 aa, synthetic construct
MALPVTALLLPLALLLHAARPLEIQNPDPAVYQLRDSKSSDKSVCLFTDFDSQTNVSQSKDSDVYITDKTVLDMRSMDFKSNSAVAWSNKSDFACANAFNNSIIPEDTFFPSPESSDSTDHVKPKETENTKQPSKSCHKPKAIVHTEKVNMMSLTVLGLRMLFAKTVAVNFLLTAKLFFLRAKRSGSGATNFSLLKQAGDVEENPGPTSMALPVTALLLPLALLLHAARPGMRTEDLPKAVVFLEPQWYRVLEKDSVTLKCQGAYSPEDNSTQWFHNESLISSQASSYFIDAATVDDSGEYRCQTNLSTLSDPVQLEVHIGWLLLQAPRWVFKEEDPIHLRCHSWKNTALHKVTYLQNGKGRKYFHHNSDFYIPKATLKDSGSYFCRGLVGSKNVSSETVNITITQGLAVSTISSFFPPGYQTREEDLKNVFPPEVAVFEPSEAEISHTQKATLVCLATGFYPDHVELSWWVNGKEVHSGVSTDPQPLKEQPALNDSRYCLSSRLRVSATFWQNPRNHFRCQVQFYGLSENDEWTQDRAKPVTQIVSAEAWGRADDVIKIHWQEKKSNTILGSQEGNTMKTNDTYMKFSWLTVPEKSLDKEHRCIVRHENNKNGVDQEIIFPPIKTDVITMDPKDNCSKDANDTLLLQLTNTSAYYMYLLLLLKSVVYFAIITCCLLRRTAFCCNGEKSRAKRSGSGVKQTLNFDLLKLAGDVESNPGPSRGHMTEYKPTVRLATRDDVPRAVRTLAAAFADYPATRHTVDPDRHIERVTELQELFLTRVGLDIGKVWVADDGAAVAVWTTPESVEAGAVFAEIGPRMAELSGSRLAAQQQMEGLLAPHRPKEPAWFLATVGVSPDHQGKGLGSAVVLPGVEAAERAGVPAFLETSAPRNLPFYERLGFTVTADVEVPEGPRTWCMTRKPGA

SEQ ID NO: 19435 - protein, 550 aa, synthetic construct
MALPVTALLLPLALLLHAARPLEIQNPDPAVYQLRDSKSSDKSVCLFTDFDSQTNVSQSKDSDVYITDKTVLDMRSMDFKSNSAVAWSNKSDFACANAFNNSIIPEDTFFPSPESSDSTDHVKPKETENTKQPSKSCHKPKAIVHTEKVNMMSLTVLGLRMLFAKTVAVNFLLTAKLFFLRAKRSGSGATNFSLLKQAGDVEENPGPTSATMALPVTALLLPLALLLHAARPMDPDLEIRAAFLRQRNTALRTEVAELEQEVQRLENEVSQYETRYGPLGGGKTREEDLKNVFPPEVAVFEPSEAEISHTQKATLVCLATGFYPDHVELSWWVNGKEVHSGVSTDPQPLKEQPALNDSRYCLSSRLRVSATFWQNPRNHFRCQVQFYGLSENDEWTQDRAKPVTQIVSAEAWGRADDVIKIHWQEKKSNTILGSQEGNTMKTNDTYMKFSWLTVPEKSLDKEHRCIVRHENNKNGVDQEIIFPPIKTDVITMDPKDNCSKDANDTLLLQLTNTSAYYMYLLLLLKSVVYFAIITCCLLRRTAFCCNGEKS

SEQ ID NO: 19436 - protein, 550 aa, synthetic construct
MALPVTALLLPLALLLHAARPLEIQNPDPAVYQLRDSKSSDKSVCLFTDFDSQTNVSQSKDSDVYITDKTVLDMRSMDFKSNSAVAWSNKSDFACANAFNNSIIPEDTFFPSPESSDSTDHVKPKETENTKQPSKSCHKPKAIVHTEKVNMMSLTVLGLRMLFAKTVAVNFLLTAKLFFLRAKRSGSGATNFSLLKQAGDVEENPGPTSATMALPVTALLLPLALLLHAARPMDPDLEIEAAFLERENTALETRVAELRQRVQRLRNRVSQYRTRYGPLGGGKTREEDLKNVFPPEVAVFEPSEAEISHTQKATLVCLATGFYPDHVELSWWVNGKEVHSGVSTDPQPLKEQPALNDSRYCLSSRLRVSATFWQNPRNHFRCQVQFYGLSENDEWTQDRAKPVTQIVSAEAWGRADDVIKIHWQEKKSNTILGSQEGNTMKTNDTYMKFSWLTVPEKSLDKEHRCIVRHENNKNGVDQEIIFPPIKTDVITMDPKDNCSKDANDTLLLQLTNTSAYYMYLLLLLKSVVYFAIITCCLLRRTAFCCNGEKS

SEQ ID NO: 19437 - protein, 785 aa, synthetic construct
MALPVTALLLPLALLLHAARPLEIQNPDPAVYQLRDSKSSDKSVCLFTDFDSQTNVSQSKDSDVYITDKTVLDMRSMDFKSNSAVAWSNKSDFACANAFNNSIIPEDTFFPSPESSDSTDHVKPKETENTKQPSKSCHKPKAIVHTEKVNMMSLTVLGLRMLFAKTVAVNFLLTAKLFFLRAKRSGSGATNFSLLKQAGDVEENPGPTSATMALPVTALLLPLALLLHAARPLFNQEVQIPLTESYCGPCPKNWICYKNNCYQFFDESKNWYESQASCMSQNASLLKVYSKEDQDLLKLVKSAHWMGLVHIPTNGSWQWEDGSILSPNLLTIIEMQKGDCALYASSFKGYIENCSTPNTYICMQRTVSGGGGSGGGGSGGGGDLFNQEVQIPLTESYCGPCPKNWICYKNNCYQFFDESKNWYESQASCMSQNASLLKVYSKEDQDLLKLVKSAHWMGLVHIPTNGSWQWEDGSILSPNLLTIIEMQKGDCALYASSFKGYIENCSTPNTYICMQRTVTREEDLKNVFPPEVAVFEPSEAEISHTQKATLVCLATGFYPDHVELSWWVNGKEVHSGVSTDPQPLKEQPALNDSRYCLSSRLRVSATFWQNPRNHFRCQVQFYGLSENDEWTQDRAKPVTQIVSAEAWGRADDVIKIHWQEKKSNTILGSQEGNTMKTNDTYMKFSWLTVPEKSLDKEHRCIVRHENNKNGVDQEIIFPPIKTDVITMDPKDNCSKDANDTLLLQLTNTSAYYMYLLLLLKSVVYFAIITCCLLRRTAFCCNGEKS

SEQ ID NO: 19438 - protein, 785 aa, synthetic construct
MALPVTALLLPLALLLHAARPLEIQNPDPAVYQLRDSKSSDKSVCLFTDFDSQTNVSQSKDSDVYITDKTVLDMRSMDFKSNSAVAWSNKSDFACANAFNNSIIPEDTFFPSPESSDSTDHVKPKETENTKQPSKSCHKPKAIVHTEKVNMMSLTVLGLRMLFAKTVAVNFLLTAKLFFLRAKRSGSGATNFSLLKQAGDVEENPGPTSATMALPVTALLLPLALLLHAARPLFNQEVQIPLTESYCGPCPKNWICYKNNCYQFFDESKNWYESQASCMSQNASLLKVYSKEDQDLLKLVKSAHWMGLVHIPTNGSWQWEDGSILSPNLLTIIEMQKGDCALYASSFKGFIENCSTPNTYICMQRTVGGGGSGGGGSGGGGSDLFNQEVQIPLTESYCGPCPKNWICYKNNCYQFFDESKNWYESQASCMSQNASLLKVYSKEDQDLLKLVKSAHWMGLVHIPTNGSWQWEDGSILSPNLLTIIEMQKGDCALYASSFKGFIENCSTPNTYICMQRTVTREEDLKNVFPPEVAVFEPSEAEISHTQKATLVCLATGFYPDHVELSWWVNGKEVHSGVSTDPQPLKEQPALNDSRYCLSSRLRVSATFWQNPRNHFRCQVQFYGLSENDEWTQDRAKPVTQIVSAEAWGRADDVIKIHWQEKKSNTILGSQEGNTMKTNDTYMKFSWLTVPEKSLDKEHRCIVRHENNKNGVDQEIIFPPIKTDVITMDPKDNCSKDANDTLLLQLTNTSAYYMYLLLLLKSVVYFAIITCCLLRRTAFCCNGEKS

SEQ ID NO: 19439 - protein, 811 aa, synthetic construct
MALPVTALLLPLALLLHAARPLEIQNPDPAVYQLRDSKSSDKSVCLFTDFDSQTNVSQSKDSDVYITDKTVLDMRSMDFKSNSAVAWSNKSDFACANAFNNSIIPEDTFFPSPESSDSTDHVKPKETENTKQPSKSCHKPKAIVHTEKVNMMSLTVLGLRMLFAKTVAVNFLLTAKLFFLRAKRSGSGATNFSLLKQAGDVEENPGPTSMALPVTALLLPLALLLHAARPMDPDLEIRAAFLRQRNTALRTEVAELEQEVQRLENEVSQYETRYGPLGGGKGTGGGGSGGGGSGGGGSEFDIQMTQSPSSLSASVGDRVTITCKASDHINNWLAWYQQKPGQAPKLLIYGATTLETGVPSRFSGSGSGTDYTLTISSLQPEDFATYYCQQSWNTPWTFGQGTKLEIKRGGGGSGGGGSGGGGSQVQLQQPGAELVKPGASVKMSCKASGYAFSSYWINWMKQKPGQGLEWIGQIYPGDGDTNYNGKFKGRATLTADTSSSTAYMQLSSLTSEDSAVYFCARSITTVVGCAMDYWGQGTSVTVSSTREEDLKNVFPPEVAVFEPSEAEISHTQKATLVCLATGFYPDHVELSWWVNGKEVHSGVSTDPQPLKEQPALNDSRYCLSSRLRVSATFWQNPRNHFRCQVQFYGLSENDEWTQDRAKPVTQIVSAEAWGRADDVIKIHWQEKKSNTILGSQEGNTMKTNDTYMKFSWLTVPEKSLDKEHRCIVRHENNKNGVDQEIIFPPIKTDVITMDPKDNCSKDANDTLLLQLTNTSAYYMYLLLLLKSVVYFAIITCCLLRRTAFCCNGEKS

SEQ ID NO: 19440 - protein, 1046 aa, synthetic construct
MALPVTALLLPLALLLHAARPLEIQNPDPAVYQLRDSKSSDKSVCLFTDFDSQTNVSQSKDSDVYITDKTVLDMRSMDFKSNSAVAWSNKSDFACANAFNNSIIPEDTFFPSPESSDSTDHVKPKETENTKQPSKSCHKPKAIVHTEKVNMMSLTVLGLRMLFAKTVAVNFLLTAKLFFLRAKRSGSGATNFSLLKQAGDVEENPGPTSMALPVTALLLPLALLLHAARPLFNQEVQIPLTESYCGPCPKNWICYKNNCYQFFDESKNWYESQASCMSQNASLLKVYSKEDQDLLKLVKSAHWMGLVHIPTNGSWQWEDGSILSPNLLTIIEMQKGDCALYASSFKGFIENCSTPNTYICMQRTVGGGGSGGGGSGGGGSDLFNQEVQIPLTESYCGPCPKNWICYKNNCYQFFDESKNWYESQASCMSQNASLLKVYSKEDQDLLKLVKSAHWMGLVHIPTNGSWQWEDGSILSPNLLTIIEMQKGDCALYASSFKGFIENCSTPNTYICMQRTVGTGGGGSGGGGSGGGGSEFDIQMTQSPSSLSASVGDRVTITCKASDHINNWLAWYQQKPGQAPKLLIYGATTLETGVPSRFSGSGSGTDYTLTISSLQPEDFATYYCQQSWNTPWTFGQGTKLEIKRGGGGSGGGGSGGGGSQVQLQQPGAELVKPGASVKMSCKASGYAFSSYWINWMKQKPGQGLEWIGQIYPGDGDTNYNGKFKGRATLTADTSSSTAYMQLSSLTSEDSAVYFCARSITTVVGCAMDYWGQGTSVTVSSTREEDLKNVFPPEVAVFEPSEAEISHTQKATLVCLATGFYPDHVELSWWVNGKEVHSGVSTDPQPLKEQPALNDSRYCLSSRLRVSATFWQNPRNHFRCQVQFYGLSENDEWTQDRAKPVTQIVSAEAWGRADDVIKIHWQEKKSNTILGSQEGNTMKTNDTYMKFSWLTVPEKSLDKEHRCIVRHENNKNGVDQEIIFPPIKTDVITMDPKDNCSKDANDTLLLQLTNTSAYYMYLLLLLKSVVYFAIITCCLLRRTAFCCNGEKS

SEQ ID NO: 19441 - protein, 751 aa, synthetic construct
MALPVTALLLPLALLLHAARPLEIQNPDPAVYQLRDSKSSDKSVCLFTDFDSQTNVSQSKDSDVYITDKTVLDMRSMDFKSNSAVAWSNKSDFACANAFNNSIIPEDTFFPSPESSDSTDHVKPKETENTKQPSKSCHKPKAIVHTEKVNMMSLTVLGLRMLFAKTVAVNFLLTAKLFFLRAKRSGSGATNFSLLKQAGDVEENPGPTSMALPVTALLLPLALLLHAARPQSVLTQPPSVSGAPGQRVTISCTGSSSNIGAGYDVHWYQQLPGTAPKLLIFGNSNRPSGVPDRFSGFKSGTSASLAITGLQAEDEADYFCQSYDSSLSGSGVFGTGTKVTVLGGGGGSGGGGSGGGGSQMQLVQSGGGLVQPGRSLRLSCAASGFTFDDYAMHWVRQAPGKGLEWVSGISWNSGSIGYADSVKGRFTISRDNAKNSLYLQMNSLRAEDTALYYCAKDIHSGSYYGLLYYAMDVWGQGTTVTVSSTREEDLKNVFPPEVAVFEPSEAEISHTQKATLVCLATGFYPDHVELSWWVNGKEVHSGVSTDPQPLKEQPALNDSRYCLSSRLRVSATFWQNPRNHFRCQVQFYGLSENDEWTQDRAKPVTQIVSAEAWGRADDVIKIHWQEKKSNTILGSQEGNTMKTNDTYMKFSWLTVPEKSLDKEHRCIVRHENNKNGVDQEIIFPPIKTDVITMDPKDNCSKDANDTLLLQLTNTSAYYMYLLLLLKSVVYFAIITCCLLRRTAFCCNGEKS

SEQ ID NO: 19442 - protein, 588 aa, synthetic construct
MALPVTALLLPLALLLHAARPLEIQNPDPAVYQLRDSKSSDKSVCLFTDFDSQTNVSQSKDSDVYITDKTVLDMRSMDFKSNSAVAWSNKSDFACANAFNNSIIPEDTFFPSPESSDSTDHVKPKETENTKQPSKSCHKPKAIVHTEKVNMMSLTVLGLRMLFAKTVAVNFLLTAKLFFLRAKRSGSGATNFSLLKQAGDVEENPGPTSMALPVTALLLPLALLLHAARPMCMPCFTTDHQMARKCDDCCGGKGRGKCYGPQCLCRLEGGGGSGGGGSGGGGSFEVCMPCFTTDQQMARKCSDCCGGKGRGKCYGPQCLCRTREEDLKNVFPPEVAVFEPSEAEISHTQKATLVCLATGFYPDHVELSWWVNGKEVHSGVSTDPQPLKEQPALNDSRYCLSSRLRVSATFWQNPRNHFRCQVQFYGLSENDEWTQDRAKPVTQIVSAEAWGRADDVIKIHWQEKKSNTILGSQEGNTMKTNDTYMKFSWLTVPEKSLDKEHRCIVRHENNKNGVDQEIIFPPIKTDVITMDPKDNCSKDANDTLLLQLTNTSAYYMYLLLLLKSVVYFAIITCCLLRRTAFCCNGEKS

SEQ ID NO: 19443 - protein, 798 aa, synthetic construct
MALPVTALLLPLALLLHAARPLEIQNPDPAVYQLRDSKSSDKSVCLFTDFDSQTNVSQSKDSDVYITDKTVLDMRSMDFKSNSAVAWSNKSDFACANAFNNSIIPEDTFFPSPESSDSTDHVKPKETENTKQPSKSCHKPKAIVHTEKVNMMSLTVLGLRMLFAKTVAVNFLLTAKLFFLRAKRSGSGATNFSLLKQAGDVEENPGPTSMALPVTALLLPLALLLHAARPFEVCMPCFTTDQQMARKCSDCCGGKGRGKCYGPQCLCRGTGGGGSGGGGSGGGGSEFDIQMTQSPSSLSASVGDRVTITCKASDHINNWLAWYQQKPGQAPKLLIYGATTLETGVPSRFSGSGSGTDYTLTISSLQPEDFATYYCQQSWNTPWTFGQGTKLEIKRGGGGSGGGGSGGGGSQVQLQQPGAELVKPGASVKMSCKASGYAFSSYWINWMKQKPGQGLEWIGQIYPGDGDTNYNGKFKGRATLTADTSSSTAYMQLSSLTSEDSAVYFCARSITTVVGCAMDYWGQGTSVTVSSTREEDLKNVFPPEVAVFEPSEAEISHTQKATLVCLATGFYPDHVELSWWVNGKEVHSGVSTDPQPLKEQPALNDSRYCLSSRLRVSATFWQNPRNHFRCQVQFYGLSENDEWTQDRAKPVTQIVSAEAWGRADDVIKIHWQEKKSNTILGSQEGNTMKTNDTYMKFSWLTVPEKSLDKEHRCIVRHENNKNGVDQEIIFPPIKTDVITMDPKDNCSKDANDTLLLQLTNTSAYYMYLLLLLKSVVYFAIITCCLLRRTAFCCNGEKS

SEQ ID NO: 19444 - protein, 928 aa, synthetic construct
MALPVTALLLPLALLLHAARPLEIQNPDPAVYQLRDSKSSDKSVCLFTDFDSQTNVSQSKDSDVYITDKTVLDMRSMDFKSNSAVAWSNKSDFACANAFNNSIIPEDTFFPSPESSDSTDHVKPKETENTKQPSKSCHKPKAIVHTEKVNMMSLTVLGLRMLFAKTVAVNFLLTAKLFFLRAKRSGSGATNFSLLKQAGDVEENPGPTSMALPVTALLLPLALLLHAARPFESPVAPACDPRLLNKLLRDSHLLHSRLSQCPDVDPLSIPVLLPAVDFSLGEWKTQTEQSKAQDILGAVSLLLEGVMAARGQLEPSCLSSLLGQLSGQVRLLLGALQGLLGTQLPLQGRTTAHKDPNALFLSLQQLLRGKVRFLLLVEGPTLCVRRTLPTTAVPSSTSGTGGGGSGGGGSGGGGSEFDIQMTQSPSSLSASVGDRVTITCKASDHINNWLAWYQQKPGQAPKLLIYGATTLETGVPSRFSGSGSGTDYTLTISSLQPEDFATYYCQQSWNTPWTFGQGTKLEIKRGGGGSGGGGSGGGGSQVQLQQPGAELVKPGASVKMSCKASGYAFSSYWINWMKQKPGQGLEWIGQIYPGDGDTNYNGKFKGRATLTADTSSSTAYMQLSSLTSEDSAVYFCARSITTVVGCAMDYWGQGTSVTVSSTREEDLKNVFPPEVAVFEPSEAEISHTQKATLVCLATGFYPDHVELSWWVNGKEVHSGVSTDPQPLKEQPALNDSRYCLSSRLRVSATFWQNPRNHFRCQVQFYGLSENDEWTQDRAKPVTQIVSAEAWGRADDVIKIHWQEKKSNTILGSQEGNTMKTNDTYMKFSWLTVPEKSLDKEHRCIVRHENNKNGVDQEIIFPPIKTDVITMDPKDNCSKDANDTLLLQLTNTSAYYMYLLLLLKSVVYFAIITCCLLRRTAFCCNGEKS

SEQ ID NO: 19445 - protein, 835 aa, synthetic construct
MALPVTALLLPLALLLHAARPLEIQNPDPAVYQLRDSKSSDKSVCLFTDFDSQTNVSQSKDSDVYITDKTVLDMRSMDFKSNSAVAWSNKSDFACANAFNNSIIPEDTFFPSPESSDSTDHVKPKETENTKQPSKSCHKPKAIVHTEKVNMMSLTVLGLRMLFAKTVAVNFLLTAKLFFLRAKRSGSGATNFSLLKQAGDVEENPGPTSMALPVTALLLPLALLLHAARPFEMGSWEEFELRLNAIEERLYALGGSEAELAYFEYVIADFEGNLQRYKGKGNPEVEALYFEADAIFEELVAYRHNGTGGGGSGGGGSGGGGSEFDIQMTQSPSSLSASVGDRVTITCKASDHINNWLAWYQQKPGQAPKLLIYGATTLETGVPSRFSGSGSGTDYTLTISSLQPEDFATYYCQQSWNTPWTFGQGTKLEIKRGGGGSGGGGSGGGGSQVQLQQPGAELVKPGASVKMSCKASGYAFSSYWINWMKQKPGQGLEWIGQIYPGDGDTNYNGKFKGRATLTADTSSSTAYMQLSSLTSEDSAVYFCARSITTVVGCAMDYWGQGTSVTVSSTREEDLKNVFPPEVAVFEPSEAEISHTQKATLVCLATGFYPDHVELSWWVNGKEVHSGVSTDPQPLKEQPALNDSRYCLSSRLRVSATFWQNPRNHFRCQVQFYGLSENDEWTQDRAKPVTQIVSAEAWGRADDVIKIHWQEKKSNTILGSQEGNTMKTNDTYMKFSWLTVPEKSLDKEHRCIVRHENNKNGVDQEIIFPPIKTDVITMDPKDNCSKDANDTLLLQLTNTSAYYMYLLLLLKSVVYFAIITCCLLRRTAFCCNGEKS

SEQ ID NO: 19446 - protein, 869 aa, synthetic construct
MALPVTALLLPLALLLHAARPLEEDLKNVFPPEVAVFEPSEAEISHTQKATLVCLATGFYPDHVELSWWVNGKEVHSGVCTDPQPLKEQPALNDSRYCLSSRLRVSATFWQNPRNHFRCQVQFYGLSENDEWTQDRAKPVTQIVSAEAWGRADCGFTSESYQQGVLSATNLSVIGFRILLLKVAGFNLLMTLRLWSSRAKRSGSGATNFSLLKQAGDVEENPGPTSMALPVTALLLPLALLLHAARPDIQMTQTTSSLSASLGDRVTISCRASQDISKYLNWYQQKPDGTVKLLIYHTSRLHSGVPSRFSGSGSGTDYSLTISNLEQEDIATYFCQQGNTLPYTFGGGTKLEITGGGGSGGGGSGGGGSEVKLQESGPGLVAPSQSLSVTCTVSGVSLPDYGVSWIRQPPRKGLEWLGVIWGSETTYYNSALKSRLTIIKDNSKSQVFLKMNSLQTDDTAIYYCAKHYYYGGSYAMDYWGQGTSVTVSSTRIQNPDPAVYQLRDSKSSDKSVCLFTDFDSQTNVSQSKDSDVYITDKCVLDMRSMDFKSNSAVAWSNKSDFACANAFNNSIIPEDTFFPSPESSCDVKLVEKSFETDTNLNFQILYEILLGKATLYAVLVSALVLMAMVKRKDSRGRAKRSGSGVKQTLNFDLLKLAGDVESNPGPSRGHMTEYKPTVRLATRDDVPRAVRTLAAAFADYPATRHTVDPDRHIERVTELQELFLTRVGLDIGKVWVADDGAAVAVWTTPESVEAGAVFAEIGPRMAELSGSRLAAQQQMEGLLAPHRPKEPAWFLATVGVSPDHQGKGLGSAVVLPGVEAAERAGVPAFLETSAPRNLPFYERLGFTVTADVEVPEGPRTWCMTRKPGA

SEQ ID NO: 19447 - protein, 870 aa, synthetic construct
MALPVTALLLPLALLLHAARPLEEDLKNVFPPEVAVFEPSEAEISHTQKATLVCLATGFYPDHVELSWWVNGKEVHSGVCTDPQPLKEQPALNDSRYCLSSRLRVSATFWQNPRNHFRCQVQFYGLSENDEWTQDRAKPVTQIVSAEAWGRADCGFTSESYQQGVLSATNLSVIGFRILLLKVAGFNLLMTLRLWSSRAKRSGSGATNFSLLKQAGDVEENPGPTSTMALPVTALLLPLALLLHAARPEIVMTQSPATLSLSPGERATLSCRASQDISKYLNWYQQKPGQAPRLLIYHTSRLHSGIPARFSGSGSGTDYTLTISSLQPEDFAVYFCQQGNTLPYTFGQGTKLEIKGGGGSGGGGSGGGGSQVQLQESGPGLVKPSETLSLTCTVSGVSLPDYGVSWIRQPPGKGLEWIGVIWGSETTYYNSSLKSRVTISKDNSKNQVSLKLSSVTAADTAVYYCAKHYYYGGSYAMDYWGQGTLVTVSSTRIQNPDPAVYQLRDSKSSDKSVCLFTDFDSQTNVSQSKDSDVYITDKCVLDMRSMDFKSNSAVAWSNKSDFACANAFNNSIIPEDTFFPSPESSCDVKLVEKSFETDTNLNFQILYEILLGKATLYAVLVSALVLMAMVKRKDSRGRAKRSGSGVKQTLNFDLLKLAGDVESNPGPSRGHMTEYKPTVRLATRDDVPRAVRTLAAAFADYPATRHTVDPDRHIERVTELQELFLTRVGLDIGKVWVADDGAAVAVWTTPESVEAGAVFAEIGPRMAELSGSRLAAQQQMEGLLAPHRPKEPAWFLATVGVSPDHQGKGLGSAVVLPGVEAAERAGVPAFLETSAPRNLPFYERLGFTVTADVEVPEGPRTWCMTRKPGA

SEQ ID NO: 19448 - protein, 871 aa, synthetic construct
MALPVTALLLPLALLLHAARPLEEDLKNVFPPEVAVFEPSEAEISHTQKATLVCLATGFYPDHVELSWWVNGKEVHSGVCTDPQPLKEQPALNDSRYCLSSRLRVSATFWQNPRNHFRCQVQFYGLSENDEWTQDRAKPVTQIVSAEAWGRADCGFTSESYQQGVLSATNLSVIGFRILLLKVAGFNLLMTLRLWSSRAKRSGSGATNFSLLKQAGDVEENPGPTSTMALPVTALLLPLALLLHAARPDEIVLTQSPATLSLSPGERATLSCSASSSVSYMHWYQQKPGQAPRLLIYDTSKLASGIPARFSGSGSGTDFTLTISSLEPEDVAVYYCFQGSVYPFTFGQGTKLEIKRGGGGSGGGGSGGGGSQVQLQESGPGLVKPSQTLSLTCTVSGGSISTSGMGVGWIRQHPGKGLEWIGHIWWDDDKRYNPALKSRVTISVDTSKNQFSLKLSSVTAADTAVYYCARMELWSYYFDYWGQGTLVTVSSTRIQNPDPAVYQLRDSKSSDKSVCLFTDFDSQTNVSQSKDSDVYITDKCVLDMRSMDFKSNSAVAWSNKSDFACANAFNNSIIPEDTFFPSPESSCDVKLVEKSFETDTNLNFQILYEILLGKATLYAVLVSALVLMAMVKRKDSRGRAKRSGSGVKQTLNFDLLKLAGDVESNPGPSRGHMTEYKPTVRLATRDDVPRAVRTLAAAFADYPATRHTVDPDRHIERVTELQELFLTRVGLDIGKVWVADDGAAVAVWTTPESVEAGAVFAEIGPRMAELSGSRLAAQQQMEGLLAPHRPKEPAWFLATVGVSPDHQGKGLGSAVVLPGVEAAERAGVPAFLETSAPRNLPFYERLGFTVTADVEVPEGPRTWCMTRKPGA

SEQ ID NO: 19449 - protein, 867 aa, synthetic construct
MALPVTALLLPLALLLHAARPLEEDLKNVFPPEVAVFEPSEAEISHTQKATLVCLATGFYPDHVELSWWVNGKEVHSGVCTDPQPLKEQPALNDSRYCLSSRLRVSATFWQNPRNHFRCQVQFYGLSENDEWTQDRAKPVTQIVSAEAWGRADCGFTSESYQQGVLSATNLSVIGFRILLLKVAGFNLLMTLRLWSSRAKRSGSGATNFSLLKQAGDVEENPGPTSMALPVTALLLPLALLLHAARPDIQMTQSPSSLSASVGDRVTITCRASQDISNYLNWYQQKPGKAPKLLIYYTSRLHSGVPSRFSGSGSGTDFTLTISSLQPEDFATYYCQQGNTLPYTFGQGTKVEIKRGGGGSGGGGSGGGGSEVQLVESGGGLVQPGGSLRLSCAASGFTFSDYFMSWVRQAPGKGLEWVATISNGGTYTYYPDSVKGRFTISRDNSKNTLYLQMNSLRAEDTAVYYCARFDGYIFDYWGQGTLVTVSSTRIQNPDPAVYQLRDSKSSDKSVCLFTDFDSQTNVSQSKDSDVYITDKCVLDMRSMDFKSNSAVAWSNKSDFACANAFNNSIIPEDTFFPSPESSCDVKLVEKSFETDTNLNFQILYEILLGKATLYAVLVSALVLMAMVKRKDSRGRAKRSGSGVKQTLNFDLLKLAGDVESNPGPSRGHMTEYKPTVRLATRDDVPRAVRTLAAAFADYPATRHTVDPDRHIERVTELQELFLTRVGLDIGKVWVADDGAAVAVWTTPESVEAGAVFAEIGPRMAELSGSRLAAQQQMEGLLAPHRPKEPAWFLATVGVSPDHQGKGLGSAVVLPGVEAAERAGVPAFLETSAPRNLPFYERLGFTVTADVEVPEGPRTWCMTRKPGA

SEQ ID NO: 19450 - protein, 871 aa, synthetic construct
MALPVTALLLPLALLLHAARPLEEDLKNVFPPEVAVFEPSEAEISHTQKATLVCLATGFYPDHVELSWWVNGKEVHSGVCTDPQPLKEQPALNDSRYCLSSRLRVSATFWQNPRNHFRCQVQFYGLSENDEWTQDRAKPVTQIVSAEAWGRADCGFTSESYQQGVLSATNLSVIGFRILLLKVAGFNLLMTLRLWSSRAKRSGSGATNFSLLKQAGDVEENPGPTSMALPVTALLLPLALLLHAARPDIQMTQSPSSLSASVGDRVTITCKASDHINNWLAWYQQKPGQAPKLLIYGATTLETGVPSRFSGSGSGTDYTLTISSLQPEDFATYYCQQSWNTPWTFGQGTKLEIKRGGGGSGGGGSGGGGSQVQLQQPGAELVKPGASVKMSCKASGYAFSSYWINWMKQKPGQGLEWIGQIYPGDGDTNYNGKFKGRATLTADTSSSTAYMQLSSLTSEDSAVYFCARSITTVVGCAMDYWGQGTSVTVSSTRIQNPDPAVYQLRDSKSSDKSVCLFTDFDSQTNVSQSKDSDVYITDKCVLDMRSMDFKSNSAVAWSNKSDFACANAFNNSIIPEDTFFPSPESSCDVKLVEKSFETDTNLNFQILYEILLGKATLYAVLVSALVLMAMVKRKDSRGRAKRSGSGVKQTLNFDLLKLAGDVESNPGPSRGHMTEYKPTVRLATRDDVPRAVRTLAAAFADYPATRHTVDPDRHIERVTELQELFLTRVGLDIGKVWVADDGAAVAVWTTPESVEAGAVFAEIGPRMAELSGSRLAAQQQMEGLLAPHRPKEPAWFLATVGVSPDHQGKGLGSAVVLPGVEAAERAGVPAFLETSAPRNLPFYERLGFTVTADVEVPEGPRTWCMTRKPGA

SEQ ID NO: 19451 - protein, 873 aa, synthetic construct
MALPVTALLLPLALLLHAARPLEEDLKNVFPPEVAVFEPSEAEISHTQKATLVCLATGFYPDHVELSWWVNGKEVHSGVCTDPQPLKEQPALNDSRYCLSSRLRVSATFWQNPRNHFRCQVQFYGLSENDEWTQDRAKPVTQIVSAEAWGRADCGFTSESYQQGVLSATNLSVIGFRILLLKVAGFNLLMTLRLWSSRAKRSGSGATNFSLLKQAGDVEENPGPTSMALPVTALLLPLALLLHAARPQIVLSQSPAILSASPGEKVTMTCRASSSVSYMHWYQQKPGSSPKPWIYATSNLASGVPARFSGSGSGTSYSFTISRVEAEDAATYYCQQWTFNPPTFGGGTRLEIKRTVAAGGGGSGGGGSGGGGSQAYLQQSGAELVRPGASVKMSCKASGYTFTSYNMHWVKQTPRQGLEWIGGIYPGNGDTSYNQKFKGKATLTVGKSSSTAYMQLSSLTSEDSAVYFCARYDYNYAMDYWGQGTSVTVSSASTRIQNPDPAVYQLRDSKSSDKSVCLFTDFDSQTNVSQSKDSDVYITDKCVLDMRSMDFKSNSAVAWSNKSDFACANAFNNSIIPEDTFFPSPESSCDVKLVEKSFETDTNLNFQILYEILLGKATLYAVLVSALVLMAMVKRKDSRGRAKRSGSGVKQTLNFDLLKLAGDVESNPGPSRGHMTEYKPTVRLATRDDVPRAVRTLAAAFADYPATRHTVDPDRHIERVTELQELFLTRVGLDIGKVWVADDGAAVAVWTTPESVEAGAVFAEIGPRMAELSGSRLAAQQQMEGLLAPHRPKEPAWFLATVGVSPDHQGKGLGSAVVLPGVEAAERAGVPAFLETSAPRNLPFYERLGFTVTADVEVPEGPRTWCMTRKPGA

SEQ ID NO: 19452 - protein, 871 aa, synthetic construct
MALPVTALLLPLALLLHAARPLEEDLKNVFPPEVAVFEPSEAEISHTQKATLVCLATGFYPDHVELSWWVNGKEVHSGVCTDPQPLKEQPALNDSRYCLSSRLRVSATFWQNPRNHFRCQVQFYGLSENDEWTQDRAKPVTQIVSAEAWGRADCGFTSESYQQGVLSATNLSVIGFRILLLKVAGFNLLMTLRLWSSRAKRSGSGATNFSLLKQAGDVEENPGPTSMALPVTALLLPLALLLHAARPEIVLTQSPATLSLSPGERATLSCRASQSVSSYLAWYQQKPGQAPRLLIYDASNRATGIPARFSGSGSGTDFTLTISSLEPEDFAVYYCQQRSNWPITFGQGTRLEIKGGGGSGGGGSGGGGSEVQLVESGGGLVQPDRSLRLSCAASGFTFHDYAMHWVRQAPGKGLEWVSTISWNSGTIGYADSVKGRFTISRDNAKNSLYLQMNSLRAEDTALYYCAKDIQYGNYYYGMDVWGQGTTVTVSSTRIQNPDPAVYQLRDSKSSDKSVCLFTDFDSQTNVSQSKDSDVYITDKCVLDMRSMDFKSNSAVAWSNKSDFACANAFNNSIIPEDTFFPSPESSCDVKLVEKSFETDTNLNFQILYEILLGKATLYAVLVSALVLMAMVKRKDSRGRAKRSGSGVKQTLNFDLLKLAGDVESNPGPSRGHMTEYKPTVRLATRDDVPRAVRTLAAAFADYPATRHTVDPDRHIERVTELQELFLTRVGLDIGKVWVADDGAAVAVWTTPESVEAGAVFAEIGPRMAELSGSRLAAQQQMEGLLAPHRPKEPAWFLATVGVSPDHQGKGLGSAVVLPGVEAAERAGVPAFLETSAPRNLPFYERLGFTVTADVEVPEGPRTWCMTRKPGA

SEQ ID NO: 19453 - protein, 869 aa, synthetic construct
MALPVTALLLPLALLLHAARPLEEDLKNVFPPEVAVFEPSEAEISHTQKATLVCLATGFYPDHVELSWWVNGKEVHSGVCTDPQPLKEQPALNDSRYCLSSRLRVSATFWQNPRNHFRCQVQFYGLSENDEWTQDRAKPVTQIVSAEAWGRADCGFTSESYQQGVLSATNLSVIGFRILLLKVAGFNLLMTLRLWSSRAKRSGSGATNFSLLKQAGDVEENPGPTSMALPVTALLLPLALLLHAARPDIQMTQSPSSLSASVGDRVTITCRASQDVNTAVAWYQQKPGKAPKLLIYSASFLESGVPSRFSGSRSGTDFTLTISSLQPEDFATYYCQQHYTTPPTFGQTKVEIKRGGGGSGGGGSGGGGSEVQLVESGGGLVQPGGSLRLSCAASGFNIKDTYIHWVRQAPGKGLEWVARIYPTNGYTRYADSVKGRFTISADTSKNTAYLQMNSLRAEDTAVYYCSRWGGDGFYAMDVWGQGTLVTVSSTRIQNPDPAVYQLRDSKSSDKSVCLFTDFDSQTNVSQSKDSDVYITDKCVLDMRSMDFKSNSAVAWSNKSDFACANAFNNSIIPEDTFFPSPESSCDVKLVEKSFETDTNLNFQILYEILLGKATLYAVLVSALVLMAMVKRKDSRGRAKRSGSGVKQTLNFDLLKLAGDVESNPGPSRGHMTEYKPTVRLATRDDVPRAVRTLAAAFADYPATRHTVDPDRHIERVTELQELFLTRVGLDIGKVWVADDGAAVAVWTTPESVEAGAVFAEIGPRMAELSGSRLAAQQQMEGLLAPHRPKEPAWFLATVGVSPDHQGKGLGSAVVLPGVEAAERAGVPAFLETSAPRNLPFYERLGFTVTADVEVPEGPRTWCMTRKPGA

SEQ ID NO: 19454 - protein, 748 aa, synthetic construct
MALPVTALLLPLALLLHAARPLEEDLKNVFPPEVAVFEPSEAEISHTQKATLVCLATGFYPDHVELSWWVNGKEVHSGVCTDPQPLKEQPALNDSRYCLSSRLRVSATFWQNPRNHFRCQVQFYGLSENDEWTQDRAKPVTQIVSAEAWGRADCGFTSESYQQGVLSATNLSVIGFRILLLKVAGFNLLMTLRLWSSRAKRSGSGATNFSLLKQAGDVEENPGPTSMALPVTALLLPLALLLHAARPDEFEVQLVESGGGLVQAGGSLRLSCAASGITFSINTMGWYRQAPGKQRELVALISSIGDTYYADSVKGRFTISRDNAKNTVYLQMNSLKPEDTAVYYCKRFRTAAQGTDYWGQGTQVTVSSTRIQNPDPAVYQLRDSKSSDKSVCLFTDFDSQTNVSQSKDSDVYITDKCVLDMRSMDFKSNSAVAWSNKSDFACANAFNNSIIPEDTFFPSPESSCDVKLVEKSFETDTNLNFQILYEILLGKATLYAVLVSALVLMAMVKRKDSRGRAKRSGSGVKQTLNFDLLKLAGDVESNPGPSRGHMTEYKPTVRLATRDDVPRAVRTLAAAFADYPATRHTVDPDRHIERVTELQELFLTRVGLDIGKVWVADDGAAVAVWTTPESVEAGAVFAEIGPRMAELSGSRLAAQQQMEGLLAPHRPKEPAWFLATVGVSPDHQGKGLGSAVVLPGVEAAERAGVPAFLETSAPRNLPFYERLGFTVTADVEVPEGPRTWCMTRKPGA

SEQ ID NO: 19455 - protein, 748 aa, synthetic construct; identical to SEQ ID NO: 19454

SEQ ID NO: 19456 - protein, 1013 aa, synthetic construct
MALPVTALLLPLALLLHAARPLEEDLKNVFPPEVAVFEPSEAEISHTQKATLVCLATGFYPDHVELSWWVNGKEVHSGVCTDPQPLKEQPALNDSRYCLSSRLRVSATFWQNPRNHFRCQVQFYGLSENDEWTQDRAKPVTQIVSAEAWGRADCGFTSESYQQGVLSATNLSVIGFRILLLKVAGFNLLMTLRLWSSRAKRSGSGATNFSLLKQAGDVEENPGPTSMALPVTALLLPLALLLHAARPQVQLVESGGGLVQAGDSVTLSCTASGRTFSSYALAWFRQRPGKEREFVAGLRWGGPTNYADSVKDRFTISGDSAKHTMYLQMNSLKPEDTAVYYCGYNPGGWAVPSQYEYDSWGQGTQVTVSSGTGGGGSGGGGSGGGGSEFDIQMTQSPSSLSASVGDRVTITCKASDHINNWLAWYQQKPGQAPKLLIYGATTLETGVPSRFSGSGSGTDYTLTISSLQPEDFATYYCQQSWNTPWTFGQGTKLEIKRGGGGSGGGGSGGGGSQVQLQQPGAELVKPGASVKMSCKASGYAFSSYWINWMKQKPGQGLEWIGQIYPGDGDTNYNGKFKGRATLTADTSSSTAYMQLSSLTSEDSAVYFCARSITTVVGCAMDYWGQGTSVTVSSTRIQNPDPAVYQLRDSKSSDKSVCLFTDFDSQTNVSQSKDSDVYITDKCVLDMRSMDFKSNSAVAWSNKSDFACANAFNNSIIPEDTFFPSPESSCDVKLVEKSFETDTNLNFQILYEILLGKATLYAVLVSALVLMAMVKRKDSRGRAKRSGSGVKQTLNFDLLKLAGDVESNPGPSRGHMTEYKPTVRLATRDDVPRAVRTLAAAFADYPATRHTVDPDRHIERVTELQELFLTRVGLDIGKVWVADDGAAVAVWTTPESVEAGAVFAEIGPRMAELSGSRLAAQQQMEGLLAPHRPKEPAWFLATVGVSPDHQGKGLGSAVVLPGVEAAERAGVPAFLETSAPRNLPFYERLGFTVTADVEVPEGPRTWCMTRKPGA

SEQ ID NO: 19457 - protein, 1142 aa, synthetic construct
MALPVTALLLPLALLLHAARPLEEDLKNVFPPEVAVFEPSEAEISHTQKATLVCLATGFYPDHVELSWWVNGKEVHSGVCTDPQPLKEQPALNDSRYCLSSRLRVSATFWQNPRNHFRCQVQFYGLSENDEWTQDRAKPVTQIVSAEAWGRADCGFTSESYQQGVLSATNLSVIGFRILLLKVAGFNLLMTLRLWSSRAKRSGSGATNFSLLKQAGDVEENPGPTSMALPVTALLLPLALLLHAARPEVQLLESGGGLVQPGGSLRLSCAASGFTFSSYAMSWVRQAPGKGLEWVSSISGSGDYIYYADSVKGRFTISRDISKNTLYLQMNSLRAEDTAVYYCAKEGTGANSSLADYRGQGTLVTVSSGGGSGGGSQVQLVESGGGLVQAGDSVTLSCTASGRTFSSYALAWFRQRPGKEREFVAGLRWGGPTNYADSVKDRFTISGDSAKHTMYLQMNSLKPEDTAVYYCGYNPGGWAVPSQYEYDSWGQGTQVTVSSGTGGGGSGGGGSGGGGSEFDIQMTQSPSSLSASVGDRVTITCKASDHINNWLAWYQQKPGQAPKLLIYGATTLETGVPSRFSGSGSGTDYTLTISSLQPEDFATYYCQQSWNTPWTFGQGTKLEIKRGGGGSGGGGSGGGGSQVQLQQPGAELVKPGASVKMSCKASGYAFSSYWINWMKQKPGQGLEWIGQIYPGDGDTNYNGKFKGRATLTADTSSSTAYMQLSSLTSEDSAVYFCARSITTVVGCAMDYWGQGTSVTVSSTRIQNPDPAVYQLRDSKSSDKSVCLFTDFDSQTNVSQSKDSDVYITDKCVLDMRSMDFKSNSAVAWSNKSDFACANAFNNSIIPEDTFFPSPESSCDVKLVEKSFETDTNLNFQILYEILLGKATLYAVLVSALVLMAMVKRKDSRGRAKRSGSGVKQTLNFDLLKLAGDVESNPGPSRGHMTEYKPTVRLATRDDVPRAVRTLAAAFADYPATRHTVDPDRHIERVTELQELFLTRVGLDIGKVWVADDGAAVAVWTTPESVEAGAVFAEIGPRMAELSGSRLAAQQQMEGLLAPHRPKEPAWFLATVGVSPDHQGKGLGSAVVLPGVEAAERAGVPAFLETSAPRNLPFYERLGFTVTADVEVPEGPRTWCMTRKPGA

SEQ ID NO: 19458 - protein, 1140 aa, synthetic construct
MALPVTALLLPLALLLHAARPLEEDLKNVFPPEVAVFEPSEAEISHTQKATLVCLATGFYPDHVELSWWVNGKEVHSGVCTDPQPLKEQPALNDSRYCLSSRLRVSATFWQNPRNHFRCQVQFYGLSENDEWTQDRAKPVTQIVSAEAWGRADCGFTSESYQQGVLSATNLSVIGFRILLLKVAGFNLLMTLRLWSSRAKRSGSGATNFSLLKQAGDVEENPGPTSMALPVTALLLPLALLLHAARPGVTQSPTHLIKTRGQQATLRCSPISGHTSVYWYQQALGLGLQFLLWYDEGEERNRGNFPPRFSGRQFPNYSSELNVNALELEDSALYLCASSLGGPRGLAGLRGDEQFFGPGTRLTVLEGGGSGGGSQVQLVESGGGLVQAGDSVTLSCTASGRTFSSYALAWFRQRPGKEREFVAGLRWGGPTNYADSVKDRFTISGDSAKHTMYLQMNSLKPEDTAVYYCGYNPGGWAVPSQYEYDSWGQGTQVTVSSGTGGGGSGGGGSGGGGSEFDIQMTQSPSSLSASVGDRVTITCKASDHINNWLAWYQQKPGQAPKLLIYGATTLETGVPSRFSGSGSGTDYTLTISSLQPEDFATYYCQQSWNTPWTFGQGTKLEIKRGGGGSGGGGSGGGGSQVQLQQPGAELVKPGASVKMSCKASGYAFSSYWINWMKQKPGQGLEWIGQIYPGDGDTNYNGKFKGRATLTADTSSSTAYMQLSSLTSEDSAVYFCARSITTVVGCAMDYWGQGTSVTVSSTRIQNPDPAVYQLRDSKSSDKSVCLFTDFDSQTNVSQSKDSDVYITDKCVLDMRSMDFKSNSAVAWSNKSDFACANAFNNSIIPEDTFFPSPESSCDVKLVEKSFETDTNLNFQILYEILLGKATLYAVLVSALVLMAMVKRKDSRGRAKRSGSGVKQTLNFDLLKLAGDVESNPGPSRGHMTEYKPTVRLATRDDVPRAVRTLAAAFADYPATRHTVDPDRHIERVTELQELFLTRVGLDIGKVWVADDGAAVAVWTTPESVEAGAVFAEIGPRMAELSGSRLAAQQQMEGLLAPHRPKEPAWFLATVGVSPDHQGKGLGSAVVLPGVEAAERAGVPAFLETSAPRNLPFYERLGFTVTADVEVPEGPRTWCMTRKPGA

SEQ ID NO: 19459 - protein, 1134 aa, synthetic construct
MALPVTALLLPLALLLHAARPLEEDLKNVFPPEVAVFEPSEAEISHTQKATLVCLATGFYPDHVELSWWVNGKEVHSGVCTDPQPLKEQPALNDSRYCLSSRLRVSATFWQNPRNHFRCQVQFYGLSENDEWTQDRAKPVTQIVSAEAWGRADCGFTSESYQQGVLSATNLSVIGFRILLLKVAGFNLLMTLRLWSSRAKRSGSGATNFSLLKQAGDVEENPGPTSMALPVTALLLPLALLLHAARPGVTQSPTHLIKTRGQQATLRCSPISGHTSVYWYQQALGLGLQFLLWYDEGEERNRGNFPPRFSGRQFPNYSSELNVNALELEDSALYLCASSLGGPRGLAGLRGDEQFFGPGTRLTVLEGGGSGGGSGVTQSPTHLIKTRGQQATLRCSPISGHTSVYWYQQALGLGLQFLLWYDEGEERNRGNFPPRFSGRQFPNYSSELNVNALELEDSALYLCASSLGGDELGADGNEQFFGPGTRLTVLEGTGGGGSGGGGSGGGGSEFDIQMTQSPSSLSASVGDRVTITCKASDHINNWLAWYQQKPGQAPKLLIYGATTLETGVPSRFSGSGSGTDYTLTISSLQPEDFATYYCQQSWNTPWTFGQGTKLEIKRGGGGSGGGGSGGGGSQVQLQQPGAELVKPGASVKMSCKASGYAFSSYWINWMKQKPGQGLEWIGQIYPGDGDTNYNGKFKGRATLTADTSSSTAYMQLSSLTSEDSAVYFCARSITTVVGCAMDYWGQGTSVTVSSTRIQNPDPAVYQLRDSKSSDKSVCLFTDFDSQTNVSQSKDSDVYITDKCVLDMRSMDFKSNSAVAWSNKSDFACANAFNNSIIPEDTFFPSPESSCDVKLVEKSFETDTNLNFQILYEILLGKATLYAVLVSALVLMAMVKRKDSRGRAKRSGSGVKQTLNFDLLKLAGDVESNPGPSRGHMTEYKPTVRLATRDDVPRAVRTLAAAFADYPATRHTVDPDRHIERVTELQELFLTRVGLDIGKVWVADDGAAVAVWTTPESVEAGAVFAEIGPRMAELSGSRLAAQQQMEGLLAPHRPKEPAWFLATVGVSPDHQGKGLGSAVVLPGVEAAERAGVPAFLETSAPRNLPFYERLGFTVTADVEVPEGPRTWCMTRKPGA

SEQ ID NO: 19460 - protein, 754 aa, synthetic construct
MALPVTALLLPLALLLHAARPLEEDLKNVFPPEVAVFEPSEAEISHTQKATLVCLATGFYPDHVELSWWVNGKEVHSGVCTDPQPLKEQPALNDSRYCLSSRLRVSATFWQNPRNHFRCQVQFYGLSENDEWTQDRAKPVTQIVSAEAWGRADCGFTSESYQQGVLSATNLSVIGFRILLLKVAGFNLLMTLRLWSSRAKRSGSGATNFSLLKQAGDVEENPGPTSMALPVTALLLPLALLLHAARPDEFGSDLGIKLLFAAAKGQDDEVRILLAAGADVNAKDFEGYTPLHVAAYDGHLEIVEVLLKAGADVNAKDSQGRTPLHEAAYSGHLEIVEVLLKAGADVNAQDDAGETPADLAAAWGHEDIAEVLQKTRIQNPDPAVYQLRDSKSSDKSVCLFTDFDSQTNVSQSKDSDVYITDKCVLDMRSMDFKSNSAVAWSNKSDFACANAFNNSIIPEDTFFPSPESSCDVKLVEKSFETDTNLNFQILYEILLGKATLYAVLVSALVLMAMVKRKDSRGRAKRSGSGVKQTLNFDLLKLAGDVESNPGPSRGHMTEYKPTVRLATRDDVPRAVRTLAAAFADYPATRHTVDPDRHIERVTELQELFLTRVGLDIGKVWVADDGAAVAVWTTPESVEAGAVFAEIGPRMAELSGSRLAAQQQMEGLLAPHRPKEPAWFLATVGVSPDHQGKGLGSAVVLPGVEAAERAGVPAFLETSAPRNLPFYERLGFTVTADVEVPEGPRTWCMTRKPGA

SEQ ID NO: 19461 - protein, 683 aa, synthetic construct
MALPVTALLLPLALLLHAARPLEEDLKNVFPPEVAVFEPSEAEISHTQKATLVCLATGFYPDHVELSWWVNGKEVHSGVCTDPQPLKEQPALNDSRYCLSSRLRVSATFWQNPRNHFRCQVQFYGLSENDEWTQDRAKPVTQIVSAEAWGRADCGFTSESYQQGVLSATNLSVIGFRILLLKVAGFNLLMTLRLWSSRAKRSGSGATNFSLLKQAGDVEENPGPTSMDWIWRILFLVGAATGAHSFEGSGFEYAKEMRNAYWEIALLPNLTNQQKRAPIRKLYDDPSQSSELLSEAKKLNDSQTRIQNPDPAVYQLRDSKSSDKSVCLFTDFDSQTNVSQSKDSDVYITDKCVLDMRSMDFKSNSAVAWSNKSDFACANAFNNSIIPEDTFFPSPESSCDVKLVEKSFETDTNLNFQILYEILLGKATLYAVLVSALVLMAMVKRKDSRGRAKRSGSGVKQTLNFDLLKLAGDVESNPGPSRGHMTEYKPTVRLATRDDVPRAVRTLAAAFADYPATRHTVDPDRHIERVTELQELFLTRVGLDIGKVWVADDGAAVAVWTTPESVEAGAVFAEIGPRMAELSGSRLAAQQQMEGLLAPHRPKEPAWFLATVGVSPDHQGKGLGSAVVLPGVEAAERAGVPAFLETSAPRNLPFYERLGFTVTADVEVPEGPRTWCMTRKPGA

SEQ ID NO: 19462 - protein, 905 aa, synthetic construct
MALPVTALLLPLALLLHAARPLEEDLKNVFPPEVAVFEPSEAEISHTQKATLVCLATGFYPDHVELSWWVNGKEVHSGVCTDPQPLKEQPALNDSRYCLSSRLRVSATFWQNPRNHFRCQVQFYGLSENDEWTQDRAKPVTQIVSAEAWGRADCGFTSESYQQGVLSATNLSVIGFRILLLKVAGFNLLMTLRLWSSRAKRSGSGATNFSLLKQAGDVEENPGPTSMALPVTALLLPLALLLHAARPDEFEVQLVESGGGLVQAGGSLRLSCAASGITFSINTMGWYRQAPGKQRELVALISSIGDTYYADSVKGRFTISRDNAKNTVYLQMNSLKPEDTAVYYCKRFRTAAQGTDYWGQGTQVTVSSLEGGGGSGGGGSGGGGSGSGGSGSGGSGSGGSGSGGSFEVQLVESGGGLVQPGGSLRLSCAASGSIFGFNDMAWYRQAPGKQRELVALISRVGVTSSADSVKGRFTISRVNAKDTVYLQMNSLKPEDTAVYYCYMDQRLDGSTLAYWGQGTQVTVSSTRIQNPDPAVYQLRDSKSSDKSVCLFTDFDSQTNVSQSKDSDVYITDKCVLDMRSMDFKSNSAVAWSNKSDFACANAFNNSIIPEDTFFPSPESSCDVKLVEKSFETDTNLNFQILYEILLGKATLYAVLVSALVLMAMVKRKDSRGRAKRSGSGVKQTLNFDLLKLAGDVESNPGPSRGHMTEYKPTVRLATRDDVPRAVRTLAAAFADYPATRHTVDPDRHIERVTELQELFLTRVGLDIGKVWVADDGAAVAVWTTPESVEAGAVFAEIGPRMAELSGSRLAAQQQMEGLLAPHRPKEPAWFLATVGVSPDHQGKGLGSAVVLPGVEAAERAGVPAFLETSAPRNLPFYERLGFTVTADVEVPEGPRTWCMTRKPGA

SEQ ID NO: 19463 - protein, 819 aa, synthetic construct
MALPVTALLLPLALLLHAARPLEEDLKNVFPPEVAVFEPSEAEISHTQKATLVCLATGFYPDHVELSWWVNGKEVHSGVCTDPQPLKEQPALNDSRYCLSSRLRVSATFWQNPRNHFRCQVQFYGLSENDEWTQDRAKPVTQIVSAEAWGRADCGFTSESYQQGVLSATNLSVIGFRILLLKVAGFNLLMTLRLWSSRAKRSGSGATNFSLLKQAGDVEENPGPTSMALPVTALLLPLALLLHAARPGMRTEDLPKAVVFLEPQWYRVLEKDSVTLKCQGAYSPEDNSTQWFHNESLISSQASSYFIDAATVDDSGEYRCQTNLSTLSDPVQLEVHIGWLLLQAPRWVFKEEDPIHLRCHSWKNTALHKVTYLQNGKGRKYFHHNSDFYIPKATLKDSGSYFCRGLVGSKNVSSETVNITITQGLAVSTISSFFPPGYQTRIQNPDPAVYQLRDSKSSDKSVCLFTDFDSQTNVSQSKDSDVYITDKCVLDMRSMDFKSNSAVAWSNKSDFACANAFNNSIIPEDTFFPSPESSCDVKLVEKSFETDTNLNFQILYEILLGKATLYAVLVSALVLMAMVKRKDSRGRAKRSGSGVKQTLNFDLLKLAGDVESNPGPSRGHMTEYKPTVRLATRDDVPRAVRTLAAAFADYPATRHTVDPDRHIERVTELQELFLTRVGLDIGKVWVADDGAAVAVWTTPESVEAGAVFAEIGPRMAELSGSRLAAQQQMEGLLAPHRPKEPAWFLATVGVSPDHQGKGLGSAVVLPGVEAAERAGVPAFLETSAPRNLPFYERLGFTVTADVEVPEGPRTWCMTRKPGA

SEQ ID NO: 19464 - protein, 447 aa, synthetic construct
MALPVTALLLPLALLLHAARPLEEDLKNVFPPEVAVFEPSEAEISHTQKATLVCLATGFYPDHVELSWWVNGKEVHSGVCTDPQPLKEQPALNDSRYCLSSRLRVSATFWQNPRNHFRCQVQFYGLSENDEWTQDRAKPVTQIVSAEAWGRADCGFTSESYQQGVLSATNLSVIGFRILLLKVAGFNLLMTLRLWSSRAKRSGSGATNFSLLKQAGDVEENPGPTSATMALPVTALLLPLALLLHAARPMDPDLEIRAAFLRQRNTALRTEVAELEQEVQRLENEVSQYETRYGPLGGGKTRIQNPDPAVYQLRDSKSSDKSVCLFTDFDSQTNVSQSKDSDVYITDKCVLDMRSMDFKSNSAVAWSNKSDFACANAFNNSIIPEDTFFPSPESSCDVKLVEKSFETDTNLNFQILYEILLGKATLYAVLVSALVLMAMVKRKDSRG

SEQ ID NO: 19465 - protein, 447 aa, synthetic construct
MALPVTALLLPLALLLHAARPLEEDLKNVFPPEVAVFEPSEAEISHTQKATLVCLATGFYPDHVELSWWVNGKEVHSGVCTDPQPLKEQPALNDSRYCLSSRLRVSATFWQNPRNHFRCQVQFYGLSENDEWTQDRAKPVTQIVSAEAWGRADCGFTSESYQQGVLSATNLSVIGFRILLLKVAGFNLLMTLRLWSSRAKRSGSGATNFSLLKQAGDVEENPGPTSATMALPVTALLLPLALLLHAARPMDPDLEIEAAFLERENTALETRVAELRQRVQRLRNRVSQYRTRYGPLGGGKTRIQNPDPAVYQLRDSKSSDKSVCLFTDFDSQTNVSQSKDSDVYITDKCVLDMRSMDFKSNSAVAWSNKSDFACANAFNNSIIPEDTFFPSPESSCDVKLVEKSFETDTNLNFQILYEILLGKATLYAVLVSALVLMAMVKRKDSRG

SEQ ID NO: 19466 - protein, 424 aa, synthetic construct
MALPVTALLLPLALLLHAARPLEEDLKNVFPPEVAVFEPSEAEISHTQKATLVCLATGFYPDHVELSWWVNGKEVHSGVCTDPQPLKEQPALNDSRYCLSSRLRVSATFWQNPRNHFRCQVQFYGLSENDEWTQDRAKPVTQIVSAEAWGRADCGFTSESYQQGVLSATNLSVIGFRILLLKVAGFNLLMTLRLWSSRAKRSGSGATNFSLLKQAGDVEENPGPTSATMALPVTALLLPLALLLHAARPEVAALEKEVAALEKEVAALEKEVAALEKTRIQNPDPAVYQLRDSKSSDKSVCLFTDFDSQTNVSQSKDSDVYITDKCVLDMRSMDFKSNSAVAWSNKSDFACANAFNNSIIPEDTFFPSPESSCDVKLVEKSFETDTNLNFQILYEILLGKATLYAVLVSALVLMAMVKRKDSRG

SEQ ID NO: 19467 - protein, 682 aa, synthetic construct
MALPVTALLLPLALLLHAARPLEEDLKNVFPPEVAVFEPSEAEISHTQKATLVCLATGFYPDHVELSWWVNGKEVHSGVCTDPQPLKEQPALNDSRYCLSSRLRVSATFWQNPRNHFRCQVQFYGLSENDEWTQDRAKPVTQIVSAEAWGRADCGFTSESYQQGVLSATNLSVIGFRILLLKVAGFNLLMTLRLWSSRAKRSGSGATNFSLLKQAGDVEENPGPTSATMALPVTALLLPLALLLHAARPLFNQEVQIPLTESYCGPCPKNWICYKNNCYQFFDESKNWYESQASCMSQNASLLKVYSKEDQDLLKLVKSAHWMGLVHIPTNGSWQWEDGSILSPNLLTIIEMQKGDCALYASSFKGYIENCSTPNTYICMQRTVSGGGGSGGGGSGGGGDLFNQEVQIPLTESYCGPCPKNWICYKNNCYQFFDESKNWYESQASCMSQNASLLKVYSKEDQDLLKLVKSAHWMGLVHIPTNGSWQWEDGSILSPNLLTIIEMQKGDCALYASSFKGYIENCSTPNTYICMQRTVTRIQNPDPAVYQLRDSKSSDKSVCLFTDFDSQTNVSQSKDSDVYITDKCVLDMRSMDFKSNSAVAWSNKSDFACANAFNNSIIPEDTFFPSPESSCDVKLVEKSFETDTNLNFQILYEILLGKATLYAVLVSALVLMAMVKRKDSRG

SEQ ID NO: 19468 - protein, 682 aa, synthetic construct
MALPVTALLLPLALLLHAARPLEEDLKNVFPPEVAVFEPSEAEISHTQKATLVCLATGFYPDHVELSWWVNGKEVHSGVCTDPQPLKEQPALNDSRYCLSSRLRVSATFWQNPRNHFRCQVQFYGLSENDEWTQDRAKPVTQIVSAEAWGRADCGFTSESYQQGVLSATNLSVIGFRILLLKVAGFNLLMTLRLWSSRAKRSGSGATNFSLLKQAGDVEENPGPTSATMALPVTALLLPLALLLHAARPLFNQEVQIPLTESYCGPCPKNWICYKNNCYQFFDESKNWYESQASCMSQNASLLKVYSKEDQDLLKLVKSAHWMGLVHIPTNGSWQWEDGSILSPNLLTIIEMQKGDCALYASSFKGFIENCSTPNTYICMQRTVGGGGSGGGGSGGGGSDLFNQEVQIPLTESYCGPCPKNWICYKNNCYQFFDESKNWYESQASCMSQNASLLKVYSKEDQDLLKLVKSAHWMGLVHIPTNGSWQWEDGSILSPNLLTIIEMQKGDCALYASSFKGFIENCSTPNTYICMQRTVTRIQNPDPAVYQLRDSKSSDKSVCLFTDFDSQTNVSQSKDSDVYITDKCVLDMRSMDFKSNSAVAWSNKSDFACANAFNNSIIPEDTFFPSPESSCDVKLVEKSFETDTNLNFQILYEILLGKATLYAVLVSALVLMAMVKRKDSRG

SEQ ID NO: 19469 - protein, 708 aa, synthetic construct
MALPVTALLLPLALLLHAARPLEEDLKNVFPPEVAVFEPSEAEISHTQKATLVCLATGFYPDHVELSWWVNGKEVHSGVCTDPQPLKEQPALNDSRYCLSSRLRVSATFWQNPRNHFRCQVQFYGLSENDEWTQDRAKPVTQIVSAEAWGRADCGFTSESYQQGVLSATNLSVIGFRILLLKVAGFNLLMTLRLWSSRAKRSGSGATNFSLLKQAGDVEENPGPTSMALPVTALLLPLALLLHAARPMDPDLEIRAAFLRQRNTALRTEVAELEQEVQRLENEVSQYETRYGPLGGGKGTGGGGSGGGGSGGGGSEFDIQMTQSPSSLSASVGDRVTITCKASDHINNWLAWYQQKPGQAPKLLIYGATTLETGVPSRFSGSGSGTDYTLTISSLQPEDFATYYCQQSWNTPWTFGQGTKLEIKRGGGGSGGGGSGGGGSQVQLQQPGAELVKPGASVKMSCKASGYAFSSYWINWMKQKPGQGLEWIGQIYPGDGDTNYNGKFKGRATLTADTSSSTAYMQLSSLTSEDSAVYFCARSITTVVGCAMDYWGQGTSVTVSSTRIQNPDPAVYQLRDSKSSDKSVCLFTDFDSQTNVSQSKDSDVYITDKCVLDMRSMDFKSNSAVAWSNKSDFACANAFNNSIIPEDTFFPSPESSCDVKLVEKSFETDTNLNFQILYEILLGKATLYAVLVSALVLMAMVKRKDSRG

SEQ ID NO: 19470 - protein, 943 aa, synthetic construct
MALPVTALLLPLALLLHAARPLEEDLKNVFPPEVAVFEPSEAEISHTQKATLVCLATGFYPDHVELSWWVNGKEVHSGVCTDPQPLKEQPALNDSRYCLSSRLRVSATFWQNPRNHFRCQVQFYGLSENDEWTQDRAKPVTQIVSAEAWGRADCGFTSESYQQGVLSATNLSVIGFRILLLKVAGFNLLMTLRLWSSRAKRSGSGATNFSLLKQAGDVEENPGPTSMALPVTALLLPLALLLHAARPLFNQEVQIPLTESYCGPCPKNWICYKNNCYQFFDESKNWYESQASCMSQNASLLKVYSKEDQDLLKLVKSAHWMGLVHIPTNGSWQWEDGSILSPNLLTIIEMQKGDCALYASSFKGFIENCSTPNTYICMQRTVGGGGSGGGGSGGGGSDLFNQEVQIPLTESYCGPCPKNWICYKNNCYQFFDESKNWYESQASCMSQNASLLKVYSKEDQDLLKLVKSAHWMGLVHIPTNGSWQWEDGSILSPNLLTIIEMQKGDCALYASSFKGFIENCSTPNTYICMQRTVGTGGGGSGGGGSGGGGSEFDIQMTQSPSSLSASVGDRVTITCKASDHINNWLAWYQQKPGQAPKLLIYGATTLETGVPSRFSGSGSGTDYTLTISSLQPEDFATYYCQQSWNTPWTFGQGTKLEIKRGGGGSGGGGSGGGGSQVQLQQPGAELVKPGASVKMSCKASGYAFSSYWINWMKQKPGQGLEWIGQIYPGDGDTNYNGKFKGRATLTADTSSSTAYMQLSSLTSEDSAVYFCARSITTVVGCAMDYWGQGTSVTVSSTRIQNPDPAVYQLRDSKSSDKSVCLFTDFDSQTNVSQSKDSDVYITDKCVLDMRSMDFKSNSAVAWSNKSDFACANAFNNSIIPEDTFFPSPESSCDVKLVEKSFETDTNLNFQILYEILLGKATLYAVLVSALVLMAMVKRKDSRG

SEQ ID NO: 19471 - protein, 648 aa, synthetic construct
MALPVTALLLPLALLLHAARPLEEDLKNVFPPEVAVFEPSEAEISHTQKATLVCLATGFYPDHVELSWWVNGKEVHSGVCTDPQPLKEQPALNDSRYCLSSRLRVSATFWQNPRNHFRCQVQFYGLSENDEWTQDRAKPVTQIVSAEAWGRADCGFTSESYQQGVLSATNLSVIGFRILLLKVAGFNLLMTLRLWSSRAKRSGSGATNFSLLKQAGDVEENPGPTSMALPVTALLLPLALLLHAARPQSVLTQPPSVSGAPGQRVTISCTGSSSNIGAGYDVHWYQQLPGTAPKLLIFGNSNRPSGVPDRFSGFKSGTSASLAITGLQAEDEADYFCQSYDSSLSGSGVFGTGTKVTVLGGGGGSGGGGSGGGGSQMQLVQSGGGLVQPGRSLRLSCAASGFTFDDYAMHWVRQAPGKGLEWVSGISWNSGSIGYADSVKGRFTISRDNAKNSLYLQMNSLRAEDTALYYCAKDIHSGSYYGLLYYAMDVWGQGTTVTVSSTRIQNPDPAVYQLRDSKSSDKSVCLFTDFDSQTNVSQSKDSDVYITDKCVLDMRSMDFKSNSAVAWSNKSDFACANAFNNSIIPEDTFFPSPESSCDVKLVEKSFETDTNLNFQILYEILLGKATLYAVLVSALVLMAMVKRKDSRG

SEQ ID NO: 19472 - protein, 485 aa, synthetic construct
MALPVTALLLPLALLLHAARPLEEDLKNVFPPEVAVFEPSEAEISHTQKATLVCLATGFYPDHVELSWWVNGKEVHSGVCTDPQPLKEQPALNDSRYCLSSRLRVSATFWQNPRNHFRCQVQFYGLSENDEWTQDRAKPVTQIVSAEAWGRADCGFTSESYQQGVLSATNLSVIGFRILLLKVAGFNLLMTLRLWSSRAKRSGSGATNFSLLKQAGDVEENPGPTSMALPVTALLLPLALLLHAARPMCMPCFTTDHQMARKCDDCCGGKGRGKCYGPQCLCRLEGGGGSGGGGSGGGGSFEVCMPCFTTDQQMARKCSDCCGGKGRGKCYGPQCLCRTRIQNPDPAVYQLRDSKSSDKSVCLFTDFDSQTNVSQSKDSDVYITDKCVLDMRSMDFKSNSAVAWSNKSDFACANAFNNSIIPEDTFFPSPESSCDVKLVEKSFETDTNLNFQILYEILLGKATLYAVLVSALVLMAMVKRKDSRG

SEQ ID NO: 19473 - protein, 748 aa, synthetic construct
MALPVTALLLPLALLLHAARPLEEDLKNVFPPEVAVFEPSEAEISHTQKATLVCLATGFYPDHVELSWWVNGKEVHSGVCTDPQPLKEQPALNDSRYCLSSRLRVSATFWQNPRNHFRCQVQFYGLSENDEWTQDRAKPVTQIVSAEAWGRADCGFTSESYQQGVLSATNLSVIGFRILLLKVAGFNLLMTLRLWSSRAKRSGSGATNFSLLKQAGDVEENPGPTSMALPVTALLLPLALLLHAARPMCMPCFTTDHQMARKCDDCCGGKGRGKCYGPQCLCRLEGGGGSGGGGSGGGGSFEVCMPCFTTDQQMARKCSDCCGGKGRGKCYGPQCLCRGTGGGGSGGGGSGGGGSEFDIQMTQSPSSLSASVGDRVTITCKASDHINNWLAWYQQKPGQAPKLLIYGATTLETGVPSRFSGSGSGTDYTLTISSLQPEDFATYYCQQSWNTPWTFGQGTKLEIKRGGGGSGGGGSGGGGSQVQLQQPGAELVKPGASVKMSCKASGYAFSSYWINWMKQKPGQGLEWIGQIYPGDGDTNYNGKFKGRATLTADTSSSTAYMQLSSLTSEDSAVYFCARSITTVVGCAMDYWGQGTSVTVSSTRIQNPDPAVYQLRDSKSSDKSVCLFTDFDSQTNVSQSKDSDVYITDKCVLDMRSMDFKSNSAVAWSNKSDFACANAFNNSIIPEDTFFPSPESSCDVKLVEKSFETDTNLNFQILYEILLGKATLYAVLVSALVLMAMVKRKDSRG

SEQ ID NO: 19474 - protein, 823 aa, synthetic construct
MALPVTALLLPLALLLHAARPLEEDLKNVFPPEVAVFEPSEAEISHTQKATLVCLATGFYPDHVELSWWVNGKEVHSGVCTDPQPLKEQPALNDSRYCLSSRLRVSATFWQNPRNHFRCQVQFYGLSENDEWTQDRAKPVTQIVSAEAWGRADCGFTSESYQQGVLSATNLSVIGFRILLLKVAGFNLLMTLRLWSSRAKRSGSGATNFSLLKQAGDVEENPGPTSMALPVTALLLPLALLLHAARPSPVAPACDPRLLNKLLRDSHLLHSRLSQCPDVDPLSIPVLLPAVDFSLGEWKTQTEQSKAQDILGAVSLLLEGVMAARGQLEPSCLSSLLGQLSGQVRLLLGALQGLLGTQLPLQGRTTAHKDPNALFLSLQQLLRGKVRFLLLVEGPTLCVRRTLPTTAVPSSTSGTGGGGSGGGGSGGGGSEFDIQMTQSPSSLSASVGDRVTITCKASDHINNWLAWYQQKPGQAPKLLIYGATTLETGVPSRFSGSGSGTDYTLTISSLQPEDFATYYCQQSWNTPWTFGQGTKLEIKRGGGGSGGGGSGGGGSQVQLQQPGAELVKPGASVKMSCKASGYAFSSYWINWMKQKPGQGLEWIGQIYPGDGDTNYNGKFKGRATLTADTSSSTAYMQLSSLTSEDSAVYFCARSITTVVGCAMDYWGQGTSVTVSSTRIQNPDPAVYQLRDSKSSDKSVCLFTDFDSQTNVSQSKDSDVYITDKCVLDMRSMDFKSNSAVAWSNKSDFACANAFNNSIIPEDTFFPSPESSCDVKLVEKSFETDTNLNFQILYEILLGKATLYAVLVSALVLMAMVKRKDSRG

SEQ ID NO: 19475 - protein, 730 aa, synthetic construct
MALPVTALLLPLALLLHAARPLEEDLKNVFPPEVAVFEPSEAEISHTQKATLVCLATGFYPDHVELSWWVNGKEVHSGVCTDPQPLKEQPALNDSRYCLSSRLRVSATFWQNPRNHFRCQVQFYGLSENDEWTQDRAKPVTQIVSAEAWGRADCGFTSESYQQGVLSATNLSVIGFRILLLKVAGFNLLMTLRLWSSRAKRSGSGATNFSLLKQAGDVEENPGPTSMALPVTALLLPLALLLHAARPMGSWEEFELRLNAIEERLYALGGSEAELAYFEYVIADFEGNLQRYKGKGNPEVEALYFEADAIFEELVAYRHNGTGGGGSGGGGSGGGGSEFDIQMTQSPSSLSASVGDRVTITCKASDHINNWLAWYQQKPGQAPKLLIYGATTLETGVPSRFSGSGSGTDYTLTISSLQPEDFATYYCQQSWNTPWTFGQGTKLEIKRGGGGSGGGGSGGGGSQVQLQQPGAELVKPGASVKMSCKASGYAFSSYWINWMKQKPGQGLEWIGQIYPGDGDTNYNGKFKGRATLTADTSSSTAYMQLSSLTSEDSAVYFCARSITTVVGCAMDYWGQGTSVTVSSTRIQNPDPAVYQLRDSKSSDKSVCLFTDFDSQTNVSQSKDSDVYITDKCVLDMRSMDFKSNSAVAWSNKSDFACANAFNNSIIPEDTFFPSPESSCDVKLVEKSFETDTNLNFQILYEILLGKATLYAVLVSALVLMAMVKRKDSRG

SEQ ID NO: 19476 - protein, 869 aa, synthetic construct
MALPVTALLLPLALLLHAARPLEIQNPDPAVYQLRDSKSSDKSVCLFTDFDSQTNVSQSKDSDVYITDKCVLDMRSMDFKSNSAVAWSNKSDFACANAFNNSIIPEDTFFPSPESSCDVKLVEKSFETDTNLNFQILYEILLGKATLYAVLVSALVLMAMVKRKDSRGRAKRSGSGATNFSLLKQAGDVEENPGPTSMALPVTALLLPLALLLHAARPDIQMTQTTSSLSASLGDRVTISCRASQDISKYLNWYQQKPDGTVKLLIYHTSRLHSGVPSRFSGSGSGTDYSLTISNLEQEDIATYFCQQGNTLPYTFGGGTKLEITGGGGSGGGGSGGGGSEVKLQESGPGLVAPSQSLSVTCTVSGVSLPDYGVSWIRQPPRKGLEWLGVIWGSETTYYNSALKSRLTIIKDNSKSQVFLKMNSLQTDDTAIYYCAKHYYYGGSYAMDYWGQGTSVTVSSTREDLKNVFPPEVAVFEPSEAEISHTQKATLVCLATGFYPDHVELSWWVNGKEVHSGVCTDPQPLKEQPALNDSRYCLSSRLRVSATFWQNPRNHFRCQVQFYGLSENDEWTQDRAKPVTQIVSAEAWGRADCGFTSESYQQGVLSATNLSVIGFRILLLKVAGFNLLMTLRLWSSRAKRSGSGVKQTLNFDLLKLAGDVESNPGPSRGHMTEYKPTVRLATRDDVPRAVRTLAAAFADYPATRHTVDPDRHIERVTELQELFLTRVGLDIGKVWVADDGAAVAVWTTPESVEAGAVFAEIGPRMAELSGSRLAAQQQMEGLLAPHRPKEPAWFLATVGVSPDHQGKGLGSAVVLPGVEAAERAGVPAFLETSAPRNLPFYERLGFTVTADVEVPEGPRTWCMTRKPGA

SEQ ID NO: 19477 - protein, 870 aa, synthetic construct
MALPVTALLLPLALLLHAARPLEIQNPDPAVYQLRDSKSSDKSVCLFTDFDSQTNVSQSKDSDVYITDKCVLDMRSMDFKSNSAVAWSNKSDFACANAFNNSIIPEDTFFPSPESSCDVKLVEKSFETDTNLNFQILYEILLGKATLYAVLVSALVLMAMVKRKDSRGRAKRSGSGATNFSLLKQAGDVEENPGPTSTMALPVTALLLPLALLLHAARPEIVMTQSPATLSLSPGERATLSCRASQDISKYLNWYQQKPGQAPRLLIYHTSRLHSGIPARFSGSGSGTDYTLTISSLQPEDFAVYFCQQGNTLPYTFGQGTKLEIKGGGGSGGGGSGGGGSQVQLQESGPGLVKPSETLSLTCTVSGVSLPDYGVSWIRQPPGKGLEWIGVIWGSETTYYNSSLKSRVTISKDNSKNQVSLKLSSVTAADTAVYYCAKHYYYGGSYAMDYWGQGTLVTVSSTREDLKNVFPPEVAVFEPSEAEISHTQKATLVCLATGFYPDHVELSWWVNGKEVHSGVCTDPQPLKEQPALNDSRYCLSSRLRVSATFWQNPRNHFRCQVQFYGLSENDEWTQDRAKPVTQIVSAEAWGRADCGFTSESYQQGVLSATNLSVIGFRILLLKVAGFNLLMTLRLWSSRAKRSGSGVKQTLNFDLLKLAGDVESNPGPSRGHMTEYKPTVRLATRDDVPRAVRTLAAAFADYPATRHTVDPDRHIERVTELQELFLTRVGLDIGKVWVADDGAAVAVWTTPESVEAGAVFAEIGPRMAELSGSRLAAQQQMEGLLAPHRPKEPAWFLATVGVSPDHQGKGLGSAVVLPGVEAAERAGVPAFLETSAPRNLPFYERLGFTVTADVEVPEGPRTWCMTRKPGA

SEQ ID NO: 19478 - protein, 871 aa, synthetic construct
MALPVTALLLPLALLLHAARPLEIQNPDPAVYQLRDSKSSDKSVCLFTDFDSQTNVSQSKDSDVYITDKCVLDMRSMDFKSNSAVAWSNKSDFACANAFNNSIIPEDTFFPSPESSCDVKLVEKSFETDTNLNFQILYEILLGKATLYAVLVSALVLMAMVKRKDSRGRAKRSGSGATNFSLLKQAGDVEENPGPTSTMALPVTALLLPLALLLHAARPDEIVLTQSPATLSLSPGERATLSCSASSSVSYMHWYQQKPGQAPRLLIYDTSKLASGIPARFSGSGSGTDFTLTISSLEPEDVAVYYCFQGSVYPFTFGQGTKLEIKRGGGGSGGGGSGGGGSQVQLQESGPGLVKPSQTLSLTCTVSGGSISTSGMGVGWIRQHPGKGLEWIGHIWWDDDKRYNPALKSRVTISVDTSKNQFSLKLSSVTAADTAVYYCARMELWSYYFDYWGQGTLVTVSSTREDLKNVFPPEVAVFEPSEAEISHTQKATLVCLATGFYPDHVELSWWVNGKEVHSGVCTDPQPLKEQPALNDSRYCLSSRLRVSATFWQNPRNHFRCQVQFYGLSENDEWTQDRAKPVTQIVSAEAWGRADCGFTSESYQQGVLSATNLSVIGFRILLLKVAGFNLLMTLRLWSSRAKRSGSGVKQTLNFDLLKLAGDVESNPGPSRGHMTEYKPTVRLATRDDVPRAVRTLAAAFADYPATRHTVDPDRHIERVTELQELFLTRVGLDIGKVWVADDGAAVAVWTTPESVEAGAVFAEIGPRMAELSGSRLAAQQQMEGLLAPHRPKEPAWFLATVGVSPDHQGKGLGSAVVLPGVEAAERAGVPAFLETSAPRNLPFYERLGFTVTADVEVPEGPRTWCMTRKPGA

SEQ ID NO: 19479 - protein, 867 aa, synthetic construct
MALPVTALLLPLALLLHAARPLEIQNPDPAVYQLRDSKSSDKSVCLFTDFDSQTNVSQSKDSDVYITDKCVLDMRSMDFKSNSAVAWSNKSDFACANAFNNSIIPEDTFFPSPESSCDVKLVEKSFETDTNLNFQILYEILLGKATLYAVLVSALVLMAMVKRKDSRGRAKRSGSGATNFSLLKQAGDVEENPGPTSMALPVTALLLPLALLLHAARPDIQMTQSPSSLSASVGDRVTITCRASQDISNYLNWYQQKPGKAPKLLIYYTSRLHSGVPSRFSGSGSGTDFTLTISSLQPEDFATYYCQQGNTLPYTFGQGTKVEIKRGGGGSGGGGSGGGGSEVQLVESGGGLVQPGGSLRLSCAASGFTFSDYFMSWVRQAPGKGLEWVATISNGGTYTYYPDSVKGRFTISRDNSKNTLYLQMNSLRAEDTAVYYCARFDGYIFDYWGQGTLVTVSSTREDLKNVFPPEVAVFEPSEAEISHTQKATLVCLATGFYPDHVELSWWVNGKEVHSGVCTDPQPLKEQPALNDSRYCLSSRLRVSATFWQNPRNHFRCQVQFYGLSENDEWTQDRAKPVTQIVSAEAWGRADCGFTSESYQQGVLSATNLSVIGFRILLLKVAGFNLLMTLRLWSSRAKRSGSGVKQTLNFDLLKLAGDVESNPGPSRGHMTEYKPTVRLATRDDVPRAVRTLAAAFADYPATRHTVDPDRHIERVTELQELFLTRVGLDIGKVWVADDGAAVAVWTTPESVEAGAVFAEIGPRMAELSGSRLAAQQQMEGLLAPHRPKEPAWFLATVGVSPDHQGKGLGSAVVLPGVEAAERAGVPAFLETSAPRNLPFYERLGFTVTADVEVPEGPRTWCMTRKPGA

SEQ ID NO: 19480 - protein, 871 aa, synthetic construct
MALPVTALLLPLALLLHAARPLEIQNPDPAVYQLRDSKSSDKSVCLFTDFDSQTNVSQSKDSDVYITDKCVLDMRSMDFKSNSAVAWSNKSDFACANAFNNSIIPEDTFFPSPESSCDVKLVEKSFETDTNLNFQILYEILLGKATLYAVLVSALVLMAMVKRKDSRGRAKRSGSGATNFSLLKQAGDVEENPGPTSMALPVTALLLPLALLLHAARPDIQMTQSPSSLSASVGDRVTITCKASDHINNWLAWYQQKPGQAPKLLIYGATTLETGVPSRFSGSGSGTDYTLTISSLQPEDFATYYCQQSWNTPWTFGQGTKLEIKRGGGGSGGGGSGGGGSQVQLQQPGAELVKPGASVKMSCKASGYAFSSYWINWMKQKPGQGLEWIGQIYPGDGDTNYNGKFKGRATLTADTSSSTAYMQLSSLTSEDSAVYFCARSITTVVGCAMDYWGQGTSVTVSSTREDLKNVFPPEVAVFEPSEAEISHTQKATLVCLATGFYPDHVELSWWVNGKEVHSGVCTDPQPLKEQPALNDSRYCLSSRLRVSATFWQNPRNHFRCQVQFYGLSENDEWTQDRAKPVTQIVSAEAWGRADCGFTSESYQQGVLSATNLSVIGFRILLLKVAGFNLLMTLRLWSSRAKRSGSGVKQTLNFDLLKLAGDVESNPGPSRGHMTEYKPTVRLATRDDVPRAVRTLAAAFADYPATRHTVDPDRHIERVTELQELFLTRVGLDIGKVWVADDGAAVAVWTTPESVEAGAVFAEIGPRMAELSGSRLAAQQQMEGLLAPHRPKEPAWFLATVGVSPDHQGKGLGSAVVLPGVEAAERAGVPAFLETSAPRNLPFYERLGFTVTADVEVPEGPRTWCMTRKPGA

SEQ ID NO: 19481 - protein, 873 aa, synthetic construct
MALPVTALLLPLALLLHAARPLEIQNPDPAVYQLRDSKSSDKSVCLFTDFDSQTNVSQSKDSDVYITDKCVLDMRSMDFKSNSAVAWSNKSDFACANAFNNSIIPEDTFFPSPESSCDVKLVEKSFETDTNLNFQILYEILLGKATLYAVLVSALVLMAMVKRKDSRGRAKRSGSGATNFSLLKQAGDVEENPGPTSMALPVTALLLPLALLLHAARPQIVLSQSPAILSASPGEKVTMTCRASSSVSYMHWYQQKPGSSPKPWIYATSNLASGVPARFSGSGSGTSYSFTISRVEAEDAATYYCQQWTFNPPTFGGGTRLEIKRTVAAGGGGSGGGGSGGGGSQAYLQQSGAELVRPGASVKMSCKASGYTFTSYNMHWVKQTPRQGLEWIGGIYPGNGDTSYNQKFKGKATLTVGKSSSTAYMQLSSLTSEDSAVYFCARYDYNYAMDYWGQGTSVTVSSASTREDLKNVFPPEVAVFEPSEAEISHTQKATLVCLATGFYPDHVELSWWVNGKEVHSGVCTDPQPLKEQPALNDSRYCLSSRLRVSATFWQNPRNHFRCQVQFYGLSENDEWTQDRAKPVTQIVSAEAWGRADCGFTSESYQQGVLSATNLSVIGFRILLLKVAGFNLLMTLRLWSSRAKRSGSGVKQTLNFDLLKLAGDVESNPGPSRGHMTEYKPTVRLATRDDVPRAVRTLAAAFADYPATRHTVDPDRHIERVTELQELFLTRVGLDIGKVWVADDGAAVAVWTTPESVEAGAVFAEIGPRMAELSGSRLAAQQQMEGLLAPHRPKEPAWFLATVGVSPDHQGKGLGSAVVLPGVEAAERAGVPAFLETSAPRNLPFYERLGFTVTADVEVPEGPRTWCMTRKPGA

SEQ ID NO: 19482 - protein, 871 aa, synthetic construct
MALPVTALLLPLALLLHAARPLEIQNPDPAVYQLRDSKSSDKSVCLFTDFDSQTNVSQSKDSDVYITDKCVLDMRSMDFKSNSAVAWSNKSDFACANAFNNSIIPEDTFFPSPESSCDVKLVEKSFETDTNLNFQILYEILLGKATLYAVLVSALVLMAMVKRKDSRGRAKRSGSGATNFSLLKQAGDVEENPGPTSMALPVTALLLPLALLLHAARPEIVLTQSPATLSLSPGERATLSCRASQSVSSYLAWYQQKPGQAPRLLIYDASNRATGIPARFSGSGSGTDFTLTISSLEPEDFAVYYCQQRSNWPITFGQGTRLEIKGGGGSGGGGSGGGGSEVQLVESGGGLVQPDRSLRLSCAASGFTFHDYAMHWVRQAPGKGLEWVSTISWNSGTIGYADSVKGRFTISRDNAKNSLYLQMNSLRAEDTALYYCAKDIQYGNYYYGMDVWGQGTTVTVSSTREDLKNVFPPEVAVFEPSEAEISHTQKATLVCLATGFYPDHVELSWWVNGKEVHSGVCTDPQPLKEQPALNDSRYCLSSRLRVSATFWQNPRNHFRCQVQFYGLSENDEWTQDRAKPVTQIVSAEAWGRADCGFTSESYQQGVLSATNLSVIGFRILLLKVAGFNLLMTLRLWSSRAKRSGSGVKQTLNFDLLKLAGDVESNPGPSRGHMTEYKPTVRLATRDDVPRAVRTLAAAFADYPATRHTVDPDRHIERVTELQELFLTRVGLDIGKVWVADDGAAVAVWTTPESVEAGAVFAEIGPRMAELSGSRLAAQQQMEGLLAPHRPKEPAWFLATVGVSPDHQGKGLGSAVVLPGVEAAERAGVPAFLETSAPRNLPFYERLGFTVTADVEVPEGPRTWCMTRKPGA

SEQ ID NO: 19483 - protein, 869 aa, synthetic construct
MALPVTALLLPLALLLHAARPLEIQNPDPAVYQLRDSKSSDKSVCLFTDFDSQTNVSQSKDSDVYITDKCVLDMRSMDFKSNSAVAWSNKSDFACANAFNNSIIPEDTFFPSPESSCDVKLVEKSFETDTNLNFQILYEILLGKATLYAVLVSALVLMAMVKRKDSRGRAKRSGSGATNFSLLKQAGDVEENPGPTSMALPVTALLLPLALLLHAARPDIQMTQSPSSLSASVGDRVTITCRASQDVNTAVAWYQQKPGKAPKLLIYSASFLESGVPSRFSGSRSGTDFTLTISSLQPEDFATYYCQQHYTTPPTFGQTKVEIKRGGGGSGGGGSGGGGSEVQLVESGGGLVQPGGSLRLSCAASGFNIKDTYIHWVRQAPGKGLEWVARIYPTNGYTRYADSVKGRFTISADTSKNTAYLQMNSLRAEDTAVYYCSRWGGDGFYAMDVWGQGTLVTVSSTREDLKNVFPPEVAVFEPSEAEISHTQKATLVCLATGFYPDHVELSWWVNGKEVHSGVCTDPQPLKEQPALNDSRYCLSSRLRVSATFWQNPRNHFRCQVQFYGLSENDEWTQDRAKPVTQIVSAEAWGRADCGFTSESYQQGVLSATNLSVIGFRILLLKVAGFNLLMTLRLWSSRAKRSGSGVKQTLNFDLLKLAGDVESNPGPSRGHMTEYKPTVRLATRDDVPRAVRTLAAAFADYPATRHTVDPDRHIERVTELQELFLTRVGLDIGKVWVADDGAAVAVWTTPESVEAGAVFAEIGPRMAELSGSRLAAQQQMEGLLAPHRPKEPAWFLATVGVSPDHQGKGLGSAVVLPGVEAAERAGVPAFLETSAPRNLPFYERLGFTVTADVEVPEGPRTWCMTRKPGA

SEQ ID NO: 19484 - protein, 748 aa, synthetic construct
MALPVTALLLPLALLLHAARPLEIQNPDPAVYQLRDSKSSDKSVCLFTDFDSQTNVSQSKDSDVYITDKCVLDMRSMDFKSNSAVAWSNKSDFACANAFNNSIIPEDTFFPSPESSCDVKLVEKSFETDTNLNFQILYEILLGKATLYAVLVSALVLMAMVKRKDSRGRAKRSGSGATNFSLLKQAGDVEENPGPTSMALPVTALLLPLALLLHAARPDEFEVQLVESGGGLVQAGGSLRLSCAASGITFSINTMGWYRQAPGKQRELVALISSIGDTYYADSVKGRFTISRDNAKNTVYLQMNSLKPEDTAVYYCKRFRTAAQGTDYWGQGTQVTVSSTREDLKNVFPPEVAVFEPSEAEISHTQKATLVCLATGFYPDHVELSWWVNGKEVHSGVCTDPQPLKEQPALNDSRYCLSSRLRVSATFWQNPRNHFRCQVQFYGLSENDEWTQDRAKPVTQIVSAEAWGRADCGFTSESYQQGVLSATNLSVIGFRILLLKVAGFNLLMTLRLWSSRAKRSGSGVKQTLNFDLLKLAGDVESNPGPSRGHMTEYKPTVRLATRDDVPRAVRTLAAAFADYPATRHTVDPDRHIERVTELQELFLTRVGLDIGKVWVADDGAAVAVWTTPESVEAGAVFAEIGPRMAELSGSRLAAQQQMEGLLAPHRPKEPAWFLATVGVSPDHQGKGLGSAVVLPGVEAAERAGVPAFLETSAPRNLPFYERLGFTVTADVEVPEGPRTWCMTRKPGA

SEQ ID NO: 19485 - protein, 748 aa, synthetic construct; identical to SEQ ID NO: 19484

SEQ ID NO: 19486 - protein, 1013 aa, synthetic construct
MALPVTALLLPLALLLHAARPLEIQNPDPAVYQLRDSKSSDKSVCLFTDFDSQTNVSQSKDSDVYITDKCVLDMRSMDFKSNSAVAWSNKSDFACANAFNNSIIPEDTFFPSPESSCDVKLVEKSFETDTNLNFQILYEILLGKATLYAVLVSALVLMAMVKRKDSRGRAKRSGSGATNFSLLKQAGDVEENPGPTSMALPVTALLLPLALLLHAARPQVQLVESGGGLVQAGDSVTLSCTASGRTFSSYALAWFRQRPGKEREFVAGLRWGGPTNYADSVKDRFTISGDSAKHTMYLQMNSLKPEDTAVYYCGYNPGGWAVPSQYEYDSWGQGTQVTVSSGTGGGGSGGGGSGGGGSEFDIQMTQSPSSLSASVGDRVTITCKASDHINNWLAWYQQKPGQAPKLLIYGATTLETGVPSRFSGSGSGTDYTLTISSLQPEDFATYYCQQSWNTPWTFGQGTKLEIKRGGGGSGGGGSGGGGSQVQLQQPGAELVKPGASVKMSCKASGYAFSSYWINWMKQKPGQGLEWIGQIYPGDGDTNYNGKFKGRATLTADTSSSTAYMQLSSLTSEDSAVYFCARSITTVVGCAMDYWGQGTSVTVSSTREDLKNVFPPEVAVFEPSEAEISHTQKATLVCLATGFYPDHVELSWWVNGKEVHSGVCTDPQPLKEQPALNDSRYCLSSRLRVSATFWQNPRNHFRCQVQFYGLSENDEWTQDRAKPVTQIVSAEAWGRADCGFTSESYQQGVLSATNLSVIGFRILLLKVAGFNLLMTLRLWSSRAKRSGSGVKQTLNFDLLKLAGDVESNPGPSRGHMTEYKPTVRLATRDDVPRAVRTLAAAFADYPATRHTVDPDRHIERVTELQELFLTRVGLDIGKVWVADDGAAVAVWTTPESVEAGAVFAEIGPRMAELSGSRLAAQQQMEGLLAPHRPKEPAWFLATVGVSPDHQGKGLGSAVVLPGVEAAERAGVPAFLETSAPRNLPFYERLGFTVTADVEVPEGPRTWCMTRKPGA

SEQ ID NO: 19487 - protein, 1142 aa, synthetic construct
MALPVTALLLPLALLLHAARPLEIQNPDPAVYQLRDSKSSDKSVCLFTDFDSQTNVSQSKDSDVYITDKCVLDMRSMDFKSNSAVAWSNKSDFACANAFNNSIIPEDTFFPSPESSCDVKLVEKSFETDTNLNFQILYEILLGKATLYAVLVSALVLMAMVKRKDSRGRAKRSGSGATNFSLLKQAGDVEENPGPTSMALPVTALLLPLALLLHAARPEVQLLESGGGLVQPGGSLRLSCAASGFTFSSYAMSWVRQAPGKGLEWVSSISGSGDYIYYADSVKGRFTISRDISKNTLYLQMNSLRAEDTAVYYCAKEGTGANSSLADYRGQGTLVTVSSGGGSGGGSQVQLVESGGGLVQAGDSVTLSCTASGRTFSSYALAWFRQRPGKEREFVAGLRWGGPTNYADSVKDRFTISGDSAKHTMYLQMNSLKPEDTAVYYCGYNPGGWAVPSQYEYDSWGQGTQVTVSSGTGGGGSGGGGSGGGGSEFDIQMTQSPSSLSASVGDRVTITCKASDHINNWLAWYQQKPGQAPKLLIYGATTLETGVPSRFSGSGSGTDYTLTISSLQPEDFATYYCQQSWNTPWTFGQGTKLEIKRGGGGSGGGGSGGGGSQVQLQQPGAELVKPGASVKMSCKASGYAFSSYWINWMKQKPGQGLEWIGQIYPGDGDTNYNGKFKGRATLTADTSSSTAYMQLSSLTSEDSAVYFCARSITTVVGCAMDYWGQGTSVTVSSTREDLKNVFPPEVAVFEPSEAEISHTQKATLVCLATGFYPDHVELSWWVNGKEVHSGVCTDPQPLKEQPALNDSRYCLSSRLRVSATFWQNPRNHFRCQVQFYGLSENDEWTQDRAKPVTQIVSAEAWGRADCGFTSESYQQGVLSATNLSVIGFRILLLKVAGFNLLMTLRLWSSRAKRSGSGVKQTLNFDLLKLAGDVESNPGPSRGHMTEYKPTVRLATRDDVPRAVRTLAAAFADYPATRHTVDPDRHIERVTELQELFLTRVGLDIGKVWVADDGAAVAVWTTPESVEAGAVFAEIGPRMAELSGSRLAAQQQMEGLLAPHRPKEPAWFLATVGVSPDHQGKGLGSAVVLPGVEAAERAGVPAFLETSAPRNLPFYERLGFTVTADVEVPEGPRTWCMTRKPGA

SEQ ID NO: 19488 - protein, 1140 aa, synthetic construct
MALPVTALLLPLALLLHAARPLEIQNPDPAVYQLRDSKSSDKSVCLFTDFDSQTNVSQSKDSDVYITDKCVLDMRSMDFKSNSAVAWSNKSDFACANAFNNSIIPEDTFFPSPESSCDVKLVEKSFETDTNLNFQILYEILLGKATLYAVLVSALVLMAMVKRKDSRGRAKRSGSGATNFSLLKQAGDVEENPGPTSMALPVTALLLPLALLLHAARPGVTQSPTHLIKTRGQQATLRCSPISGHTSVYWYQQALGLGLQFLLWYDEGEERNRGNFPPRFSGRQFPNYSSELNVNALELEDSALYLCASSLGGPRGLAGLRGDEQFFGPGTRLTVLEGGGSGGGSQVQLVESGGGLVQAGDSVTLSCTASGRTFSSYALAWFRQRPGKEREFVAGLRWGGPTNYADSVKDRFTISGDSAKHTMYLQMNSLKPEDTAVYYCGYNPGGWAVPSQYEYDSWGQGTQVTVSSGTGGGGSGGGGSGGGGSEFDIQMTQSPSSLSASVGDRVTITCKASDHINNWLAWYQQKPGQAPKLLIYGATTLETGVPSRFSGSGSGTDYTLTISSLQPEDFATYYCQQSWNTPWTFGQGTKLEIKRGGGGSGGGGSGGGGSQVQLQQPGAELVKPGASVKMSCKASGYAFSSYWINWMKQKPGQGLEWIGQIYPGDGDTNYNGKFKGRATLTADTSSSTAYMQLSSLTSEDSAVYFCARSITTVVGCAMDYWGQGTSVTVSSTREDLKNVFPPEVAVFEPSEAEISHTQKATLVCLATGFYPDHVELSWWVNGKEVHSGVCTDPQPLKEQPALNDSRYCLSSRLRVSATFWQNPRNHFRCQVQFYGLSENDEWTQDRAKPVTQIVSAEAWGRADCGFTSESYQQGVLSATNLSVIGFRILLLKVAGFNLLMTLRLWSSRAKRSGSGVKQTLNFDLLKLAGDVESNPGPSRGHMTEYKPTVRLATRDDVPRAVRTLAAAFADYPATRHTVDPDRHIERVTELQELFLTRVGLDIGKVWVADDGAAVAVWTTPESVEAGAVFAEIGPRMAELSGSRLAAQQQMEGLLAPHRPKEPAWFLATVGVSPDHQGKGLGSAVVLPGVEAAERAGVPAFLETSAPRNLPFYERLGFTVTADVEVPEGPRTWCMTRKPGA

SEQ ID NO: 19489 - protein, 901 aa, synthetic construct
MALPVTALLLPLALLLHAARPLEIQNPDPAVYQLRDSKSSDKSVCLFTDFDSQTNVSQSKDSDVYITDKCVLDMRSMDFKSNSAVAWSNKSDFACANAFNNSIIPEDTFFPSPESSCDVKLVEKSFETDTNLNFQILYEILLGKATLYAVLVSALVLMAMVKRKDSRGRAKRSGSGATNFSLLKQAGDVEENPGPTSMALPVTALLLPLALLLHAARPGVTQSPTHLIKTRGQQATLRCSPISGHTSVYWYQQALGLGLQFLLWYDEGEERNRGNFPPRFSGRQFPNYSSELNVNALELEDSALYLCASSLGGPRGLAGLRGDEQFFGPGTRLTVLEGGGSGGGSGVTQSPTHLIKTRGQQATLRCSPISGHTSVYWYQQALGLGLQFLLWYDEGEERNRGNFPPRFSGRQFPNYSSELNVNALELEDSALYLCASSLGGDELGADGNEQFFGPGTRLTVLEGTGGGGSGGGGSGGGGSEFDIQMTQSPSSLSASVGDRVTITCKASDHINNWLAWYQQKPGQAPKLLIYGATTLETGVPSRFSGSGSGTDYTLTISSLQPEDFATYYCQQSWNTPWTFGQGTKLEIKRGGGGSGGGGSGGGGSQVQLQQPGAELVKPGASVKMSCKASGYAFSSYWINWMKQKPGQGLEWIGQIYPGDGDTNYNGKFKGRATLTADTSSSTAYMQLSSLTSEDSAVYFCARSITTVVGCAMDYWGQGTSVTVSSTREDLKNVFPPEVAVFEPSEAEISHTQKATLVCLATGFYPDHVELSWWVNGKEVHSGVCTDPQPLKEQPALNDSRYCLSSRLRVSATFWQNPRNHFRCQVQFYGLSENDEWTQDRAKPVTQIVSAEAWGRADCGFTSESYQQGVLSATNLSVIGFRILLLKVAGFNLLMTLRLWSS

SEQ ID NO: 19490 - protein, 754 aa, synthetic construct
MALPVTALLLPLALLLHAARPLEIQNPDPAVYQLRDSKSSDKSVCLFTDFDSQTNVSQSKDSDVYITDKCVLDMRSMDFKSNSAVAWSNKSDFACANAFNNSIIPEDTFFPSPESSCDVKLVEKSFETDTNLNFQILYEILLGKATLYAVLVSALVLMAMVKRKDSRGRAKRSGSGATNFSLLKQAGDVEENPGPTSMALPVTALLLPLALLLHAARPDEFGSDLGIKLLFAAAKGQDDEVRILLAAGADVNAKDFEGYTPLHVAAYDGHLEIVEVLLKAGADVNAKDSQGRTPLHEAAYSGHLEIVEVLLKAGADVNAQDDAGETPADLAAAWGHEDIAEVLQKTREDLKNVFPPEVAVFEPSEAEISHTQKATLVCLATGFYPDHVELSWWVNGKEVHSGVCTDPQPLKEQPALNDSRYCLSSRLRVSATFWQNPRNHFRCQVQFYGLSENDEWTQDRAKPVTQIVSAEAWGRADCGFTSESYQQGVLSATNLSVIGFRILLLKVAGFNLLMTLRLWSSRAKRSGSGVKQTLNFDLLKLAGDVESNPGPSRGHMTEYKPTVRLATRDDVPRAVRTLAAAFADYPATRHTVDPDRHIERVTELQELFLTRVGLDIGKVWVADDGAAVAVWTTPESVEAGAVFAEIGPRMAELSGSRLAAQQQMEGLLAPHRPKEPAWFLATVGVSPDHQGKGLGSAVVLPGVEAAERAGVPAFLETSAPRNLPFYERLGFTVTADVEVPEGPRTWCMTRKPGA

SEQ ID NO: 19491 - protein, 683 aa, synthetic construct
MALPVTALLLPLALLLHAARPLEIQNPDPAVYQLRDSKSSDKSVCLFTDFDSQTNVSQSKDSDVYITDKCVLDMRSMDFKSNSAVAWSNKSDFACANAFNNSIIPEDTFFPSPESSCDVKLVEKSFETDTNLNFQILYEILLGKATLYAVLVSALVLMAMVKRKDSRGRAKRSGSGATNFSLLKQAGDVEENPGPTSMDWIWRILFLVGAATGAHSFEGSGFEYAKEMRNAYWEIALLPNLTNQQKRAPIRKLYDDPSQSSELLSEAKKLNDSQTREDLKNVFPPEVAVFEPSEAEISHTQKATLVCLATGFYPDHVELSWWVNGKEVHSGVCTDPQPLKEQPALNDSRYCLSSRLRVSATFWQNPRNHFRCQVQFYGLSENDEWTQDRAKPVTQIVSAEAWGRADCGFTSESYQQGVLSATNLSVIGFRILLLKVAGFNLLMTLRLWSSRAKRSGSGVKQTLNFDLLKLAGDVESNPGPSRGHMTEYKPTVRLATRDDVPRAVRTLAAAFADYPATRHTVDPDRHIERVTELQELFLTRVGLDIGKVWVADDGAAVAVWTTPESVEAGAVFAEIGPRMAELSGSRLAAQQQMEGLLAPHRPKEPAWFLATVGVSPDHQGKGLGSAVVLPGVEAAERAGVPAFLETSAPRNLPFYERLGFTVTADVEVPEGPRTWCMTRKPGA

SEQ ID NO: 19492 - protein, 905 aa, synthetic construct
MALPVTALLLPLALLLHAARPLEIQNPDPAVYQLRDSKSSDKSVCLFTDFDSQTNVSQSKDSDVYITDKCVLDMRSMDFKSNSAVAWSNKSDFACANAFNNSIIPEDTFFPSPESSCDVKLVEKSFETDTNLNFQILYEILLGKATLYAVLVSALVLMAMVKRKDSRGRAKRSGSGATNFSLLKQAGDVEENPGPTSMALPVTALLLPLALLLHAARPDEFEVQLVESGGGLVQAGGSLRLSCAASGITFSINTMGWYRQAPGKQRELVALISSIGDTYYADSVKGRFTISRDNAKNTVYLQMNSLKPEDTAVYYCKRFRTAAQGTDYWGQGTQVTVSSLEGGGGSGGGGSGGGGSGSGGSGSGGSGSGGSGSGGSFEVQLVESGGGLVQPGGSLRLSCAASGSIFGFNDMAWYRQAPGKQRELVALISRVGVTSSADSVKGRFTISRVNAKDTVYLQMNSLKPEDTAVYYCYMDQRLDGSTLAYWGQGTQVTVSSTREDLKNVFPPEVAVFEPSEAEISHTQKATLVCLATGFYPDHVELSWWVNGKEVHSGVCTDPQPLKEQPALNDSRYCLSSRLRVSATFWQNPRNHFRCQVQFYGLSENDEWTQDRAKPVTQIVSAEAWGRADCGFTSESYQQGVLSATNLSVIGFRILLLKVAGFNLLMTLRLWSSRAKRSGSGVKQTLNFDLLKLAGDVESNPGPSRGHMTEYKPTVRLATRDDVPRAVRTLAAAFADYPATRHTVDPDRHIERVTELQELFLTRVGLDIGKVWVADDGAAVAVWTTPESVEAGAVFAEIGPRMAELSGSRLAAQQQMEGLLAPHRPKEPAWFLATVGVSPDHQGKGLGSAVVLPGVEAAERAGVPAFLETSAPRNLPFYERLGFTVTADVEVPEGPRTWCMTRKPGA

SEQ ID NO: 19493 - protein, 819 aa, synthetic construct
MALPVTALLLPLALLLHAARPLEIQNPDPAVYQLRDSKSSDKSVCLFTDFDSQTNVSQSKDSDVYITDKCVLDMRSMDFKSNSAVAWSNKSDFACANAFNNSIIPEDTFFPSPESSCDVKLVEKSFETDTNLNFQILYEILLGKATLYAVLVSALVLMAMVKRKDSRGRAKRSGSGATNFSLLKQAGDVEENPGPTSMALPVTALLLPLALLLHAARPGMRTEDLPKAVVFLEPQWYRVLEKDSVTLKCQGAYSPEDNSTQWFHNESLISSQASSYFIDAATVDDSGEYRCQTNLSTLSDPVQLEVHIGWLLLQAPRWVFKEEDPIHLRCHSWKNTALHKVTYLQNGKGRKYFHHNSDFYIPKATLKDSGSYFCRGLVGSKNVSSETVNITITQGLAVSTISSFFPPGYQTREDLKNVFPPEVAVFEPSEAEISHTQKATLVCLATGFYPDHVELSWWVNGKEVHSGVCTDPQPLKEQPALNDSRYCLSSRLRVSATFWQNPRNHFRCQVQFYGLSENDEWTQDRAKPVTQIVSAEAWGRADCGFTSESYQQGVLSATNLSVIGFRILLLKVAGFNLLMTLRLWSSRAKRSGSGVKQTLNFDLLKLAGDVESNPGPSRGHMTEYKPTVRLATRDDVPRAVRTLAAAFADYPATRHTVDPDRHIERVTELQELFLTRVGLDIGKVWVADDGAAVAVWTTPESVEAGAVFAEIGPRMAELSGSRLAAQQQMEGLLAPHRPKEPAWFLATVGVSPDHQGKGLGSAVVLPGVEAAERAGVPAFLETSAPRNLPFYERLGFTVTADVEVPEGPRTWCMTRKPGA

SEQ ID NO: 19494 - protein, 447 aa, synthetic construct
MALPVTALLLPLALLLHAARPLEIQNPDPAVYQLRDSKSSDKSVCLFTDFDSQTNVSQSKDSDVYITDKCVLDMRSMDFKSNSAVAWSNKSDFACANAFNNSIIPEDTFFPSPESSCDVKLVEKSFETDTNLNFQILYEILLGKATLYAVLVSALVLMAMVKRKDSRGRAKRSGSGATNFSLLKQAGDVEENPGPTSATMALPVTALLLPLALLLHAARPMDPDLEIRAAFLRQRNTALRTEVAELEQEVQRLENEVSQYETRYGPLGGGKTREDLKNVFPPEVAVFEPSEAEISHTQKATLVCLATGFYPDHVELSWWVNGKEVHSGVCTDPQPLKEQPALNDSRYCLSSRLRVSATFWQNPRNHFRCQVQFYGLSENDEWTQDRAKPVTQIVSAEAWGRADCGFTSESYQQGVLSATNLSVIGFRILLLKVAGFNLLMTLRLWSS

SEQ ID NO: 19495 - protein, 447 aa, synthetic construct
MALPVTALLLPLALLLHAARPLEIQNPDPAVYQLRDSKSSDKSVCLFTDFDSQTNVSQSKDSDVYITDKCVLDMRSMDFKSNSAVAWSNKSDFACANAFNNSIIPEDTFFPSPESSCDVKLVEKSFETDTNLNFQILYEILLGKATLYAVLVSALVLMAMVKRKDSRGRAKRSGSGATNFSLLKQAGDVEENPGPTSATMALPVTALLLPLALLLHAARPMDPDLEIEAAFLERENTALETRVAELRQRVQRLRNRVSQYRTRYGPLGGGKTREDLKNVFPPEVAVFEPSEAEISHTQKATLVCLATGFYPDHVELSWWVNGKEVHSGVCTDPQPLKEQPALNDSRYCLSSRLRVSATFWQNPRNHFRCQVQFYGLSENDEWTQDRAKPVTQIVSAEAWGRADCGFTSESYQQGVLSATNLSVIGFRILLLKVAGFNLLMTLRLWSS

SEQ ID NO: 19496 - protein, 682 aa, synthetic construct
MALPVTALLLPLALLLHAARPLEIQNPDPAVYQLRDSKSSDKSVCLFTDFDSQTNVSQSKDSDVYITDKCVLDMRSMDFKSNSAVAWSNKSDFACANAFNNSIIPEDTFFPSPESSCDVKLVEKSFETDTNLNFQILYEILLGKATLYAVLVSALVLMAMVKRKDSRGRAKRSGSGATNFSLLKQAGDVEENPGPTSATMALPVTALLLPLALLLHAARPLFNQEVQIPLTESYCGPCPKNWICYKNNCYQFFDESKNWYESQASCMSQNASLLKVYSKEDQDLLKLVKSAHWMGLVHIPTNGSWQWEDGSILSPNLLTIIEMQKGDCALYASSFKGYIENCSTPNTYICMQRTVSGGGGSGGGGSGGGGDLFNQEVQIPLTESYCGPCPKNWICYKNNCYQFFDESKNWYESQASCMSQNASLLKVYSKEDQDLLKLVKSAHWMGLVHIPTNGSWQWEDGSILSPNLLTIIEMQKGDCALYASSFKGYIENCSTPNTYICMQRTVTREDLKNVFPPEVAVFEPSEAEISHTQKATLVCLATGFYPDHVELSWWVNGKEVHSGVCTDPQPLKEQPALNDSRYCLSSRLRVSATFWQNPRNHFRCQVQFYGLSENDEWTQDRAKPVTQIVSAEAWGRADCGFTSESYQQGVLSATNLSVIGFRILLLKVAGFNLLMTLRLWSS

SEQ ID NO: 19497 - protein, 682 aa, synthetic construct
MALPVTALLLPLALLLHAARPLEIQNPDPAVYQLRDSKSSDKSVCLFTDFDSQTNVSQSKDSDVYITDKCVLDMRSMDFKSNSAVAWSNKSDFACANAFNNSIIPEDTFFPSPESSCDVKLVEKSFETDTNLNFQILYEILLGKATLYAVLVSALVLMAMVKRKDSRGRAKRSGSGATNFSLLKQAGDVEENPGPTSATMALPVTALLLPLALLLHAARPLFNQEVQIPLTESYCGPCPKNWICYKNNCYQFFDESKNWYESQASCMSQNASLLKVYSKEDQDLLKLVKSAHWMGLVHIPTNGSWQWEDGSILSPNLLTIIEMQKGDCALYASSFKGFIENCSTPNTYICMQRTVGGGGSGGGGSGGGGSDLFNQEVQIPLTESYCGPCPKNWICYKNNCYQFFDESKNWYESQASCMSQNASLLKVYSKEDQDLLKLVKSAHWMGLVHIPTNGSWQWEDGSILSPNLLTIIEMQKGDCALYASSFKGFIENCSTPNTYICMQRTVTREDLKNVFPPEVAVFEPSEAEISHTQKATLVCLATGFYPDHVELSWWVNGKEVHSGVCTDPQPLKEQPALNDSRYCLSSRLRVSATFWQNPRNHFRCQVQFYGLSENDEWTQDRAKPVTQIVSAEAWGRADCGFTSESYQQGVLSATNLSVIGFRILLLKVAGFNLLMTLRLWSS

SEQ ID NO: 19498 - protein, 708 aa, synthetic construct
MALPVTALLLPLALLLHAARPLEIQNPDPAVYQLRDSKSSDKSVCLFTDFDSQTNVSQSKDSDVYITDKCVLDMRSMDFKSNSAVAWSNKSDFACANAFNNSIIPEDTFFPSPESSCDVKLVEKSFETDTNLNFQILYEILLGKATLYAVLVSALVLMAMVKRKDSRGRAKRSGSGATNFSLLKQAGDVEENPGPTSMALPVTALLLPLALLLHAARPMDPDLEIRAAFLRQRNTALRTEVAELEQEVQRLENEVSQYETRYGPLGGGKGTGGGGSGGGGSGGGGSEFDIQMTQSPSSLSASVGDRVTITCKASDHINNWLAWYQQKPGQAPKLLIYGATTLETGVPSRFSGSGSGTDYTLTISSLQPEDFATYYCQQSWNTPWTFGQGTKLEIKRGGGGSGGGGSGGGGSQVQLQQPGAELVKPGASVKMSCKASGYAFSSYWINWMKQKPGQGLEWIGQIYPGDGDTNYNGKFKGRATLTADTSSSTAYMQLSSLTSEDSAVYFCARSITTVVGCAMDYWGQGTSVTVSSTREDLKNVFPPEVAVFEPSEAEISHTQKATLVCLATGFYPDHVELSWWVNGKEVHSGVCTDPQPLKEQPALNDSRYCLSSRLRVSATFWQNPRNHFRCQVQFYGLSENDEWTQDRAKPVTQIVSAEAWGRADCGFTSESYQQGVLSATNLSVIGFRILLLKVAGFNLLMTLRLWSS

SEQ ID NO: 19499 - protein, 943 aa, synthetic construct
MALPVTALLLPLALLLHAARPLEIQNPDPAVYQLRDSKSSDKSVCLFTDFDSQTNVSQSKDSDVYITDKCVLDMRSMDFKSNSAVAWSNKSDFACANAFNNSIIPEDTFFPSPESSCDVKLVEKSFETDTNLNFQILYEILLGKATLYAVLVSALVLMAMVKRKDSRGRAKRSGSGATNFSLLKQAGDVEENPGPTSMALPVTALLLPLALLLHAARPLFNQEVQIPLTESYCGPCPKNWICYKNNCYQFFDESKNWYESQASCMSQNASLLKVYSKEDQDLLKLVKSAHWMGLVHIPTNGSWQWEDGSILSPNLLTIIEMQKGDCALYASSFKGFIENCSTPNTYICMQRTVGGGGSGGGGSGGGGSDLFNQEVQIPLTESYCGPCPKNWICYKNNCYQFFDESKNWYESQASCMSQNASLLKVYSKEDQDLLKLVKSAHWMGLVHIPTNGSWQWEDGSILSPNLLTIIEMQKGDCALYASSFKGFIENCSTPNTYICMQRTVGTGGGGSGGGGSGGGGSEFDIQMTQSPSSLSASVGDRVTITCKASDHINNWLAWYQQKPGQAPKLLIYGATTLETGVPSRFSGSGSGTDYTLTISSLQPEDFATYYCQQSWNTPWTFGQGTKLEIKRGGGGSGGGGSGGGGSQVQLQQPGAELVKPGASVKMSCKASGYAFSSYWINWMKQKPGQGLEWIGQIYPGDGDTNYNGKFKGRATLTADTSSSTAYMQLSSLTSEDSAVYFCARSITTVVGCAMDYWGQGTSVTVSSTREDLKNVFPPEVAVFEPSEAEISHTQKATLVCLATGFYPDHVELSWWVNGKEVHSGVCTDPQPLKEQPALNDSRYCLSSRLRVSATFWQNPRNHFRCQVQFYGLSENDEWTQDRAKPVTQIVSAEAWGRADCGFTSESYQQGVLSATNLSVIGFRILLLKVAGFNLLMTLRLWSS

SEQ ID NO: 19500 - protein, 648 aa, synthetic construct
MALPVTALLLPLALLLHAARPLEIQNPDPAVYQLRDSKSSDKSVCLFTDFDSQTNVSQSKDSDVYITDKCVLDMRSMDFKSNSAVAWSNKSDFACANAFNNSIIPEDTFFPSPESSCDVKLVEKSFETDTNLNFQILYEILLGKATLYAVLVSALVLMAMVKRKDSRGRAKRSGSGATNFSLLKQAGDVEENPGPTSMALPVTALLLPLALLLHAARPQSVLTQPPSVSGAPGQRVTISCTGSSSNIGAGYDVHWYQQLPGTAPKLLIFGNSNRPSGVPDRFSGFKSGTSASLAITGLQAEDEADYFCQSYDSSLSGSGVFGTGTKVTVLGGGGGSGGGGSGGGGSQMQLVQSGGGLVQPGRSLRLSCAASGFTFDDYAMHWVRQAPGKGLEWVSGISWNSGSIGYADSVKGRFTISRDNAKNSLYLQMNSLRAEDTALYYCAKDIHSGSYYGLLYYAMDVWGQGTTVTVSSTREDLKNVFPPEVAVFEPSEAEISHTQKATLVCLATGFYPDHVELSWWVNGKEVHSGVCTDPQPLKEQPALNDSRYCLSSRLRVSATFWQNPRNHFRCQVQFYGLSENDEWTQDRAKPVTQIVSAEAWGRADCGFTSESYQQGVLSATNLSVIGFRILLLKVAGFNLLMTLRLWSS

SEQ ID NO: 19501 - protein, 485 aa, synthetic construct
MALPVTALLLPLALLLHAARPLEIQNPDPAVYQLRDSKSSDKSVCLFTDFDSQTNVSQSKDSDVYITDKCVLDMRSMDFKSNSAVAWSNKSDFACANAFNNSIIPEDTFFPSPESSCDVKLVEKSFETDTNLNFQILYEILLGKATLYAVLVSALVLMAMVKRKDSRGRAKRSGSGATNFSLLKQAGDVEENPGPTSMALPVTALLLPLALLLHAARPMCMPCFTTDHQMARKCDDCCGGKGRGKCYGPQCLCRLEGGGGSGGGGSGGGGSFEVCMPCFTTDQQMARKCSDCCGGKGRGKCYGPQCLCRTREDLKNVFPPEVAVFEPSEAEISHTQKATLVCLATGFYPDHVELSWWVNGKEVHSGVCTDPQPLKEQPALNDSRYCLSSRLRVSATFWQNPRNHFRCQVQFYGLSENDEWTQDRAKPVTQIVSAEAWGRADCGFTSESYQQGVLSATNLSVIGFRILLLKVAGFNLLMTLRLWSS

SEQ ID NO: 19502 - protein, 695 aa, synthetic construct
MALPVTALLLPLALLLHAARPLEIQNPDPAVYQLRDSKSSDKSVCLFTDFDSQTNVSQSKDSDVYITDKCVLDMRSMDFKSNSAVAWSNKSDFACANAFNNSIIPEDTFFPSPESSCDVKLVEKSFETDTNLNFQILYEILLGKATLYAVLVSALVLMAMVKRKDSRGRAKRSGSGATNFSLLKQAGDVEENPGPTSMALPVTALLLPLALLLHAARPFEVCMPCFTTDQQMARKCSDCCGGKGRGKCYGPQCLCRGTGGGGSGGGGSGGGGSEFDIQMTQSPSSLSASVGDRVTITCKASDHINNWLAWYQQKPGQAPKLLIYGATTLETGVPSRFSGSGSGTDYTLTISSLQPEDFATYYCQQSWNTPWTFGQGTKLEIKRGGGGSGGGGSGGGGSQVQLQQPGAELVKPGASVKMSCKASGYAFSSYWINWMKQKPGQGLEWIGQIYPGDGDTNYNGKFKGRATLTADTSSSTAYMQLSSLTSEDSAVYFCARSITTVVGCAMDYWGQGTSVTVSSTREDLKNVFPPEVAVFEPSEAEISHTQKATLVCLATGFYPDHVELSWWVNGKEVHSGVCTDPQPLKEQPALNDSRYCLSSRLRVSATFWQNPRNHFRCQVQFYGLSENDEWTQDRAKPVTQIVSAEAWGRADCGFTSESYQQGVLSATNLSVIGFRILLLKVAGFNLLMTLRLWSS

SEQ ID NO: 19503 - protein, 825 aa, synthetic construct
MALPVTALLLPLALLLHAARPLEIQNPDPAVYQLRDSKSSDKSVCLFTDFDSQTNVSQSKDSDVYITDKCVLDMRSMDFKSNSAVAWSNKSDFACANAFNNSIIPEDTFFPSPESSCDVKLVEKSFETDTNLNFQILYEILLGKATLYAVLVSALVLMAMVKRKDSRGRAKRSGSGATNFSLLKQAGDVEENPGPTSMALPVTALLLPLALLLHAARPFESPVAPACDPRLLNKLLRDSHLLHSRLSQCPDVDPLSIPVLLPAVDFSLGEWKTQTEQSKAQDILGAVSLLLEGVMAARGQLEPSCLSSLLGQLSGQVRLLLGALQGLLGTQLPLQGRTTAHKDPNALFLSLQQLLRGKVRFLLLVEGPTLCVRRTLPTTAVPSSTSGTGGGGSGGGGSGGGGSEFDIQMTQSPSSLSASVGDRVTITCKASDHINNWLAWYQQKPGQAPKLLIYGATTLETGVPSRFSGSGSGTDYTLTISSLQPEDFATYYCQQSWNTPWTFGQGTKLEIKRGGGGSGGGGSGGGGSQVQLQQPGAELVKPGASVKMSCKASGYAFSSYWINWMKQKPGQGLEWIGQIYPGDGDTNYNGKFKGRATLTADTSSSTAYMQLSSLTSEDSAVYFCARSITTVVGCAMDYWGQGTSVTVSSTREDLKNVFPPEVAVFEPSEAEISHTQKATLVCLATGFYPDHVELSWWVNGKEVHSGVCTDPQPLKEQPALNDSRYCLSSRLRVSATFWQNPRNHFRCQVQFYGLSENDEWTQDRAKPVTQIVSAEAWGRADCGFTSESYQQGVLSATNLSVIGFRILLLKVAGFNLLMTLRLWSS

SEQ ID NO: 19504 - protein, 732 aa, synthetic construct
MALPVTALLLPLALLLHAARPLEIQNPDPAVYQLRDSKSSDKSVCLFTDFDSQTNVSQSKDSDVYITDKCVLDMRSMDFKSNSAVAWSNKSDFACANAFNNSIIPEDTFFPSPESSCDVKLVEKSFETDTNLNFQILYEILLGKATLYAVLVSALVLMAMVKRKDSRGRAKRSGSGATNFSLLKQAGDVEENPGPTSMALPVTALLLPLALLLHAARPFEMGSWEEFELRLNAIEERLYALGGSEAELAYFEYVIADFEGNLQRYKGKGNPEVEALYFEADAIFEELVAYRHNGTGGGGSGGGGSGGGGSEFDIQMTQSPSSLSASVGDRVTITCKASDHINNWLAWYQQKPGQAPKLLIYGATTLETGVPSRFSGSGSGTDYTLTISSLQPEDFATYYCQQSWNTPWTFGQGTKLEIKRGGGGSGGGGSGGGGSQVQLQQPGAELVKPGASVKMSCKASGYAFSSYWINWMKQKPGQGLEWIGQIYPGDGDTNYNGKFKGRATLTADTSSSTAYMQLSSLTSEDSAVYFCARSITTVVGCAMDYWGQGTSVTVSSTREDLKNVFPPEVAVFEPSEAEISHTQKATLVCLATGFYPDHVELSWWVNGKEVHSGVCTDPQPLKEQPALNDSRYCLSSRLRVSATFWQNPRNHFRCQVQFYGLSENDEWTQDRAKPVTQIVSAEAWGRADCGFTSESYQQGVLSATNLSVIGFRILLLKVAGFNLLMTLRLWSS

SEQ ID NO: 19505 - protein, 898 aa, synthetic construct
MALPVTALLLPLALLLHAARPLEEEDLKNVFPPEVAVFEPSEAEISHTQKATLVCLATGFYPDHVELSWWVNGKEVHSGVCTDPQPLKEQPALNDSRYCLSSRLRVSATFWQNPRNHFRCQVQFYGLSENDEWTQDRAKPVTQIVSAEAWGRADCGFTSESYQQGVLSATNLSVIGFRILLLKVAGFNLLMTLRLWSSRAKRSGSGATNFSLLKQAGDVEENPGPTSMALPVTALLLPLALLLHAARPDIQMTQTTSSLSASLGDRVTISCRASQDISKYLNWYQQKPDGTVKLLIYHTSRLHSGVPSRFSGSGSGTDYSLTISNLEQEDIATYFCQQGNTLPYTFGGGTKLEITGGGGSGGGGSGGGGSEVKLQESGPGLVAPSQSLSVTCTVSGVSLPDYGVSWIRQPPRKGLEWLGVIWGSETTYYNSALKSRLTIIKDNSKSQVFLKMNSLQTDDTAIYYCAKHYYYGGSYAMDYWGQGTSVTVSSTRGQPKANPTVTLFPPSSEELQANKATLVCLISDFYPGAVTVAWKADGSPVKAGVETTKPSKQSNNKYAASSYLSLTPEQWKSHRSYSCQVTHEGSTVEKTVAPTECSPIKTDVITMDPKDNCSKDANDTLLLQLTNTSAYYMYLLLLLKSVVYFAIITCCLLRRTAFCCNGEKSRAKRSGSGVKQTLNFDLLKLAGDVESNPGPSRGHMTEYKPTVRLATRDDVPRAVRTLAAAFADYPATRHTVDPDRHIERVTELQELFLTRVGLDIGKVWVADDGAAVAVWTTPESVEAGAVFAEIGPRMAELSGSRLAAQQQMEGLLAPHRPKEPAWFLATVGVSPDHQGKGLGSAVVLPGVEAAERAGVPAFLETSAPRNLPFYERLGFTVTADVEVPEGPRTWCMTRKPGA

SEQ ID NO: 19506 - protein, 899 aa, synthetic construct
MALPVTALLLPLALLLHAARPLEEEDLKNVFPPEVAVFEPSEAEISHTQKATLVCLATGFYPDHVELSWWVNGKEVHSGVCTDPQPLKEQPALNDSRYCLSSRLRVSATFWQNPRNHFRCQVQFYGLSENDEWTQDRAKPVTQIVSAEAWGRADCGFTSESYQQGVLSATNLSVIGFRILLLKVAGFNLLMTLRLWSSRAKRSGSGATNFSLLKQAGDVEENPGPTSTMALPVTALLLPLALLLHAARPEIVMTQSPATLSLSPGERATLSCRASQDISKYLNWYQQKPGQAPRLLIYHTSRLHSGIPARFSGSGSGTDYTLTISSLQPEDFAVYFCQQGNTLPYTFGQGTKLEIKGGGGSGGGGSGGGGSQVQLQESGPGLVKPSETLSLTCTVSGVSLPDYGVSWIRQPPGKGLEWIGVIWGSETTYYNSSLKSRVTISKDNSKNQVSLKLSSVTAADTAVYYCAKHYYYGGSYAMDYWGQGTLVTVSSTRGQPKANPTVTLFPPSSEELQANKATLVCLISDFYPGAVTVAWKADGSPVKAGVETTKPSKQSNNKYAASSYLSLTPEQWKSHRSYSCQVTHEGSTVEKTVAPTECSPIKTDVITMDPKDNCSKDANDTLLLQLTNTSAYYMYLLLLLKSVVYFAIITCCLLRRTAFCCNGEKSRAKRSGSGVKQTLNFDLLKLAGDVESNPGPSRGHMTEYKPTVRLATRDDVPRAVRTLAAAFADYPATRHTVDPDRHIERVTELQELFLTRVGLDIGKVWVADDGAAVAVWTTPESVEAGAVFAEIGPRMAELSGSRLAAQQQMEGLLAPHRPKEPAWFLATVGVSPDHQGKGLGSAVVLPGVEAAERAGVPAFLETSAPRNLPFYERLGFTVTADVEVPEGPRTWCMTRKPGA

SEQ ID NO: 19507 - protein, 900 aa, synthetic construct
MALPVTALLLPLALLLHAARPLEEEDLKNVFPPEVAVFEPSEAEISHTQKATLVCLATGFYPDHVELSWWVNGKEVHSGVCTDPQPLKEQPALNDSRYCLSSRLRVSATFWQNPRNHFRCQVQFYGLSENDEWTQDRAKPVTQIVSAEAWGRADCGFTSESYQQGVLSATNLSVIGFRILLLKVAGFNLLMTLRLWSSRAKRSGSGATNFSLLKQAGDVEENPGPTSTMALPVTALLLPLALLLHAARPDEIVLTQSPATLSLSPGERATLSCSASSSVSYMHWYQQKPGQAPRLLIYDTSKLASGIPARFSGSGSGTDFTLTISSLEPEDVAVYYCFQGSVYPFTFGQGTKLEIKRGGGGSGGGGSGGGGSQVQLQESGPGLVKPSQTLSLTCTVSGGSISTSGMGVGWIRQHPGKGLEWIGHIWWDDDKRYNPALKSRVTISVDTSKNQFSLKLSSVTAADTAVYYCARMELWSYYFDYWGQGTLVTVSSTRGQPKANPTVTLFPPSSEELQANKATLVCLISDFYPGAVTVAWKADGSPVKAGVETTKPSKQSNNKYAASSYLSLTPEQWKSHRSYSCQVTHEGSTVEKTVAPTECSPIKTDVITMDPKDNCSKDANDTLLLQLTNTSAYYMYLLLLLKSVVYFAIITCCLLRRTAFCCNGEKSRAKRSGSGVKQTLNFDLLKLAGDVESNPGPSRGHMTEYKPTVRLATRDDVPRAVRTLAAAFADYPATRHTVDPDRHIERVTELQELFLTRVGLDIGKVWVADDGAAVAVWTTPESVEAGAVFAEIGPRMAELSGSRLAAQQQMEGLLAPHRPKEPAWFLATVGVSPDHQGKGLGSAVVLPGVEAAERAGVPAFLETSAPRNLPFYERLGFTVTADVEVPEGPRTWCMTRKPGA

SEQ ID NO: 19508 - protein, 896 aa, synthetic construct
MALPVTALLLPLALLLHAARPLEEEDLKNVFPPEVAVFEPSEAEISHTQKATLVCLATGFYPDHVELSWWVNGKEVHSGVCTDPQPLKEQPALNDSRYCLSSRLRVSATFWQNPRNHFRCQVQFYGLSENDEWTQDRAKPVTQIVSAEAWGRADCGFTSESYQQGVLSATNLSVIGFRILLLKVAGFNLLMTLRLWSSRAKRSGSGATNFSLLKQAGDVEENPGPTSMALPVTALLLPLALLLHAARPDIQMTQSPSSLSASVGDRVTITCRASQDISNYLNWYQQKPGKAPKLLIYYTSRLHSGVPSRFSGSGSGTDFTLTISSLQPEDFATYYCQQGNTLPYTFGQGTKVEIKRGGGGSGGGGSGGGGSEVQLVESGGGLVQPGGSLRLSCAASGFTFSDYFMSWVRQAPGKGLEWVATISNGGTYTYYPDSVKGRFTISRDNSKNTLYLQMNSLRAEDTAVYYCARFDGYIFDYWGQGTLVTVSSTRGQPKANPTVTLFPPSSEELQANKATLVCLISDFYPGAVTVAWKADGSPVKAGVETTKPSKQSNNKYAASSYLSLTPEQWKSHRSYSCQVTHEGSTVEKTVAPTECSPIKTDVITMDPKDNCSKDANDTLLLQLTNTSAYYMYLLLLLKSVVYFAIITCCLLRRTAFCCNGEKSRAKRSGSGVKQTLNFDLLKLAGDVESNPGPSRGHMTEYKPTVRLATRDDVPRAVRTLAAAFADYPATRHTVDPDRHIERVTELQELFLTRVGLDIGKVWVADDGAAVAVWTTPESVEAGAVFAEIGPRMAELSGSRLAAQQQMEGLLAPHRPKEPAWFLATVGVSPDHQGKGLGSAVVLPGVEAAERAGVPAFLETSAPRNLPFYERLGFTVTADVEVPEGPRTWCMTRKPGA

SEQ ID NO: 19509 - protein, 900 aa, synthetic construct
MALPVTALLLPLALLLHAARPLEEEDLKNVFPPEVAVFEPSEAEISHTQKATLVCLATGFYPDHVELSWWVNGKEVHSGVCTDPQPLKEQPALNDSRYCLSSRLRVSATFWQNPRNHFRCQVQFYGLSENDEWTQDRAKPVTQIVSAEAWGRADCGFTSESYQQGVLSATNLSVIGFRILLLKVAGFNLLMTLRLWSSRAKRSGSGATNFSLLKQAGDVEENPGPTSMALPVTALLLPLALLLHAARPDIQMTQSPSSLSASVGDRVTITCKASDHINNWLAWYQQKPGQAPKLLIYGATTLETGVPSRFSGSGSGTDYTLTISSLQPEDFATYYCQQSWNTPWTFGQGTKLEIKRGGGGSGGGGSGGGGSQVQLQQPGAELVKPGASVKMSCKASGYAFSSYWINWMKQKPGQGLEWIGQIYPGDGDTNYNGKFKGRATLTADTSSSTAYMQLSSLTSEDSAVYFCARSITTVVGCAMDYWGQGTSVTVSSTRGQPKANPTVTLFPPSSEELQANKATLVCLISDFYPGAVTVAWKADGSPVKAGVETTKPSKQSNNKYAASSYLSLTPEQWKSHRSYSCQVTHEGSTVEKTVAPTECSPIKTDVITMDPKDNCSKDANDTLLLQLTNTSAYYMYLLLLLKSVVYFAIITCCLLRRTAFCCNGEKSRAKRSGSGVKQTLNFDLLKLAGDVESNPGPSRGHMTEYKPTVRLATRDDVPRAVRTLAAAFADYPATRHTVDPDRHIERVTELQELFLTRVGLDIGKVWVADDGAAVAVWTTPESVEAGAVFAEIGPRMAELSGSRLAAQQQMEGLLAPHRPKEPAWFLATVGVSPDHQGKGLGSAVVLPGVEAAERAGVPAFLETSAPRNLPFYERLGFTVTADVEVPEGPRTWCMTRKPGA

SEQ ID NO: 19510 - protein, 902 aa, synthetic construct
MALPVTALLLPLALLLHAARPLEEEDLKNVFPPEVAVFEPSEAEISHTQKATLVCLATGFYPDHVELSWWVNGKEVHSGVCTDPQPLKEQPALNDSRYCLSSRLRVSATFWQNPRNHFRCQVQFYGLSENDEWTQDRAKPVTQIVSAEAWGRADCGFTSESYQQGVLSATNLSVIGFRILLLKVAGFNLLMTLRLWSSRAKRSGSGATNFSLLKQAGDVEENPGPTSMALPVTALLLPLALLLHAARPQIVLSQSPAILSASPGEKVTMTCRASSSVSYMHWYQQKPGSSPKPWIYATSNLASGVPARFSGSGSGTSYSFTISRVEAEDAATYYCQQWTFNPPTFGGGTRLEIKRTVAAGGGGSGGGGSGGGGSQAYLQQSGAELVRPGASVKMSCKASGYTFTSYNMHWVKQTPRQGLEWIGGIYPGNGDTSYNQKFKGKATLTVGKSSSTAYMQLSSLTSEDSAVYFCARYDYNYAMDYWGQGTSVTVSSASTRGQPKANPTVTLFPPSSEELQANKATLVCLISDFYPGAVTVAWKADGSPVKAGVETTKPSKQSNNKYAASSYLSLTPEQWKSHRSYSCQVTHEGSTVEKTVAPTECSPIKTDVITMDPKDNCSKDANDTLLLQLTNTSAYYMYLLLLLKSVVYFAIITCCLLRRTAFCCNGEKSRAKRSGSGVKQTLNFDLLKLAGDVESNPGPSRGHMTEYKPTVRLATRDDVPRAVRTLAAAFADYPATRHTVDPDRHIERVTELQELFLTRVGLDIGKVWVADDGAAVAVWTTPESVEAGAVFAEIGPRMAELSGSRLAAQQQMEGLLAPHRPKEPAWFLATVGVSPDHQGKGLGSAVVLPGVEAAERAGVPAFLETSAPRNLPFYERLGFTVTADVEVPEGPRTWCMTRKPGA

SEQ ID NO: 19511 - protein, 900 aa, synthetic construct
MALPVTALLLPLALLLHAARPLEEEDLKNVFPPEVAVFEPSEAEISHTQKATLVCLATGFYPDHVELSWWVNGKEVHSGVCTDPQPLKEQPALNDSRYCLSSRLRVSATFWQNPRNHFRCQVQFYGLSENDEWTQDRAKPVTQIVSAEAWGRADCGFTSESYQQGVLSATNLSVIGFRILLLKVAGFNLLMTLRLWSSRAKRSGSGATNFSLLKQAGDVEENPGPTSMALPVTALLLPLALLLHAARPEIVLTQSPATLSLSPGERATLSCRASQSVSSYLAWYQQKPGQAPRLLIYDASNRATGIPARFSGSGSGTDFTLTISSLEPEDFAVYYCQQRSNWPITFGQGTRLEIKGGGGSGGGGSGGGGSEVQLVESGGGLVQPDRSLRLSCAASGFTFHDYAMHWVRQAPGKGLEWVSTISWNSGTIGYADSVKGRFTISRDNAKNSLYLQMNSLRAEDTALYYCAKDIQYGNYYYGMDVWGQGTTVTVSSTRGQPKANPTVTLFPPSSEELQANKATLVCLISDFYPGAVTVAWKADGSPVKAGVETTKPSKQSNNKYAASSYLSLTPEQWKSHRSYSCQVTHEGSTVEKTVAPTECSPIKTDVITMDPKDNCSKDANDTLLLQLTNTSAYYMYLLLLLKSVVYFAIITCCLLRRTAFCCNGEKSRAKRSGSGVKQTLNFDLLKLAGDVESNPGPSRGHMTEYKPTVRLATRDDVPRAVRTLAAAFADYPATRHTVDPDRHIERVTELQELFLTRVGLDIGKVWVADDGAAVAVWTTPESVEAGAVFAEIGPRMAELSGSRLAAQQQMEGLLAPHRPKEPAWFLATVGVSPDHQGKGLGSAVVLPGVEAAERAGVPAFLETSAPRNLPFYERLGFTVTADVEVPEGPRTWCMTRKPGA

SEQ ID NO: 19512 - protein, 898 aa, synthetic construct
MALPVTALLLPLALLLHAARPLEEEDLKNVFPPEVAVFEPSEAEISHTQKATLVCLATGFYPDHVELSWWVNGKEVHSGVCTDPQPLKEQPALNDSRYCLSSRLRVSATFWQNPRNHFRCQVQFYGLSENDEWTQDRAKPVTQIVSAEAWGRADCGFTSESYQQGVLSATNLSVIGFRILLLKVAGFNLLMTLRLWSSRAKRSGSGATNFSLLKQAGDVEENPGPTSMALPVTALLLPLALLLHAARPDIQMTQSPSSLSASVGDRVTITCRASQDVNTAVAWYQQKPGKAPKLLIYSASFLESGVPSRFSGSRSGTDFTLTISSLQPEDFATYYCQQHYTTPPTFGQTKVEIKRGGGGSGGGGSGGGGSEVQLVESGGGLVQPGGSLRLSCAASGFNIKDTYIHWVRQAPGKGLEWVARIYPTNGYTRYADSVKGRFTISADTSKNTAYLQMNSLRAEDTAVYYCSRWGGDGFYAMDVWGQGTLVTVSSTRGQPKANPTVTLFPPSSEELQANKATLVCLISDFYPGAVTVAWKADGSPVKAGVETTKPSKQSNNKYAASSYLSLTPEQWKSHRSYSCQVTHEGSTVEKTVAPTECSPIKTDVITMDPKDNCSKDANDTLLLQLTNTSAYYMYLLLLLKSVVYFAIITCCLLRRTAFCCNGEKSRAKRSGSGVKQTLNFDLLKLAGDVESNPGPSRGHMTEYKPTVRLATRDDVPRAVRTLAAAFADYPATRHTVDPDRHIERVTELQELFLTRVGLDIGKVWVADDGAAVAVWTTPESVEAGAVFAEIGPRMAELSGSRLAAQQQMEGLLAPHRPKEPAWFLATVGVSPDHQGKGLGSAVVLPGVEAAERAGVPAFLETSAPRNLPFYERLGFTVTADVEVPEGPRTWCMTRKPGA

SEQ ID NO: 19513 - protein, 777 aa, synthetic construct
MALPVTALLLPLALLLHAARPLEEEDLKNVFPPEVAVFEPSEAEISHTQKATLVCLATGFYPDHVELSWWVNGKEVHSGVCTDPQPLKEQPALNDSRYCLSSRLRVSATFWQNPRNHFRCQVQFYGLSENDEWTQDRAKPVTQIVSAEAWGRADCGFTSESYQQGVLSATNLSVIGFRILLLKVAGFNLLMTLRLWSSRAKRSGSGATNFSLLKQAGDVEENPGPTSMALPVTALLLPLALLLHAARPDEFEVQLVESGGGLVQAGGSLRLSCAASGITFSINTMGWYRQAPGKQRELVALISSIGDTYYADSVKGRFTISRDNAKNTVYLQMNSLKPEDTAVYYCKRFRTAAQGTDYWGQGTQVTVSSTRGQPKANPTVTLFPPSSEELQANKATLVCLISDFYPGAVTVAWKADGSPVKAGVETTKPSKQSNNKYAASSYLSLTPEQWKSHRSYSCQVTHEGSTVEKTVAPTECSPIKTDVITMDPKDNCSKDANDTLLLQLTNTSAYYMYLLLLLKSVVYFAIITCCLLRRTAFCCNGEKSRAKRSGSGVKQTLNFDLLKLAGDVESNPGPSRGHMTEYKPTVRLATRDDVPRAVRTLAAAFADYPATRHTVDPDRHIERVTELQELFLTRVGLDIGKVWVADDGAAVAVWTTPESVEAGAVFAEIGPRMAELSGSRLAAQQQMEGLLAPHRPKEPAWFLATVGVSPDHQGKGLGSAVVLPGVEAAERAGVPAFLETSAPRNLPFYERLGFTVTADVEVPEGPRTWCMTRKPGA

SEQ ID NO: 19514 - protein, 777 aa, synthetic construct; identical to SEQ ID NO: 19513

SEQ ID NO: 19515 - protein, 1042 aa, synthetic construct
MALPVTALLLPLALLLHAARPLEEEDLKNVFPPEVAVFEPSEAEISHTQKATLVCLATGFYPDHVELSWWVNGKEVHSGVCTDPQPLKEQPALNDSRYCLSSRLRVSATFWQNPRNHFRCQVQFYGLSENDEWTQDRAKPVTQIVSAEAWGRADCGFTSESYQQGVLSATNLSVIGFRILLLKVAGFNLLMTLRLWSSRAKRSGSGATNFSLLKQAGDVEENPGPTSMALPVTALLLPLALLLHAARPQVQLVESGGGLVQAGDSVTLSCTASGRTFSSYALAWFRQRPGKEREFVAGLRWGGPTNYADSVKDRFTISGDSAKHTMYLQMNSLKPEDTAVYYCGYNPGGWAVPSQYEYDSWGQGTQVTVSSGTGGGGSGGGGSGGGGSEFDIQMTQSPSSLSASVGDRVTITCKASDHINNWLAWYQQKPGQAPKLLIYGATTLETGVPSRFSGSGSGTDYTLTISSLQPEDFATYYCQQSWNTPWTFGQGTKLEIKRGGGGSGGGGSGGGGSQVQLQQPGAELVKPGASVKMSCKASGYAFSSYWINWMKQKPGQGLEWIGQIYPGDGDTNYNGKFKGRATLTADTSSSTAYMQLSSLTSEDSAVYFCARSITTVVGCAMDYWGQGTSVTVSSTRGQPKANPTVTLFPPSSEELQANKATLVCLISDFYPGAVTVAWKADGSPVKAGVETTKPSKQSNNKYAASSYLSLTPEQWKSHRSYSCQVTHEGSTVEKTVAPTECSPIKTDVITMDPKDNCSKDANDTLLLQLTNTSAYYMYLLLLLKSVVYFAIITCCLLRRTAFCCNGEKSRAKRSGSGVKQTLNFDLLKLAGDVESNPGPSRGHMTEYKPTVRLATRDDVPRAVRTLAAAFADYPATRHTVDPDRHIERVTELQELFLTRVGLDIGKVWVADDGAAVAVWTTPESVEAGAVFAEIGPRMAELSGSRLAAQQQMEGLLAPHRPKEPAWFLATVGVSPDHQGKGLGSAVVLPGVEAAERAGVPAFLETSAPRNLPFYERLGFTVTADVEVPEGPRTWCMTRKPGA

SEQ ID NO: 19516 - protein, 1171 aa, synthetic construct
MALPVTALLLPLALLLHAARPLEEEDLKNVFPPEVAVFEPSEAEISHTQKATLVCLATGFYPDHVELSWWVNGKEVHSGVCTDPQPLKEQPALNDSRYCLSSRLRVSATFWQNPRNHFRCQVQFYGLSENDEWTQDRAKPVTQIVSAEAWGRADCGFTSESYQQGVLSATNLSVIGFRILLLKVAGFNLLMTLRLWSSRAKRSGSGATNFSLLKQAGDVEENPGPTSMALPVTALLLPLALLLHAARPEVQLLESGGGLVQPGGSLRLSCAASGFTFSSYAMSWVRQAPGKGLEWVSSISGSGDYIYYADSVKGRFTISRDISKNTLYLQMNSLRAEDTAVYYCAKEGTGANSSLADYRGQGTLVTVSSGGGSGGGSQVQLVESGGGLVQAGDSVTLSCTASGRTFSSYALAWFRQRPGKEREFVAGLRWGGPTNYADSVKDRFTISGDSAKHTMYLQMNSLKPEDTAVYYCGYNPGGWAVPSQYEYDSWGQGTQVTVSSGTGGGGSGGGGSGGGGSEFDIQMTQSPSSLSASVGDRVTITCKASDHINNWLAWYQQKPGQAPKLLIYGATTLETGVPSRFSGSGSGTDYTLTISSLQPEDFATYYCQQSWNTPWTFGQGTKLEIKRGGGGSGGGGSGGGGSQVQLQQPGAELVKPGASVKMSCKASGYAFSSYWINWMKQKPGQGLEWIGQIYPGDGDTNYNGKFKGRATLTADTSSSTAYMQLSSLTSEDSAVYFCARSITTVVGCAMDYWGQGTSVTVSSTRGQPKANPTVTLFPPSSEELQANKATLVCLISDFYPGAVTVAWKADGSPVKAGVETTKPSKQSNNKYAASSYLSLTPEQWKSHRSYSCQVTHEGSTVEKTVAPTECSPIKTDVITMDPKDNCSKDANDTLLLQLTNTSAYYMYLLLLLKSVVYFAIITCCLLRRTAFCCNGEKSRAKRSGSGVKQTLNFDLLKLAGDVESNPGPSRGHMTEYKPTVRLATRDDVPRAVRTLAAAFADYPATRHTVDPDRHIERVTELQELFLTRVGLDIGKVWVADDGAAVAVWTTPESVEAGAVFAEIGPRMAELSGSRLAAQQQMEGLLAPHRPKEPAWFLATVGVSPDHQGKGLGSAVVLPGVEAAERAGVPAFLETSAPRNLPFYERLGFTVTADVEVPEGPRTWCMTRKPGA

SEQ ID NO: 19517 - protein, 1169 aa, synthetic construct
MALPVTALLLPLALLLHAARPLEEEDLKNVFPPEVAVFEPSEAEISHTQKATLVCLATGFYPDHVELSWWVNGKEVHSGVCTDPQPLKEQPALNDSRYCLSSRLRVSATFWQNPRNHFRCQVQFYGLSENDEWTQDRAKPVTQIVSAEAWGRADCGFTSESYQQGVLSATNLSVIGFRILLLKVAGFNLLMTLRLWSSRAKRSGSGATNFSLLKQAGDVEENPGPTSMALPVTALLLPLALLLHAARPGVTQSPTHLIKTRGQQATLRCSPISGHTSVYWYQQALGLGLQFLLWYDEGEERNRGNFPPRFSGRQFPNYSSELNVNALELEDSALYLCASSLGGPRGLAGLRGDEQFFGPGTRLTVLEGGGSGGGSQVQLVESGGGLVQAGDSVTLSCTASGRTFSSYALAWFRQRPGKEREFVAGLRWGGPTNYADSVKDRFTISGDSAKHTMYLQMNSLKPEDTAVYYCGYNPGGWAVPSQYEYDSWGQGTQVTVSSGTGGGGSGGGGSGGGGSEFDIQMTQSPSSLSASVGDRVTITCKASDHINNWLAWYQQKPGQAPKLLIYGATTLETGVPSRFSGSGSGTDYTLTISSLQPEDFATYYCQQSWNTPWTFGQGTKLEIKRGGGGSGGGGSGGGGSQVQLQQPGAELVKPGASVKMSCKASGYAFSSYWINWMKQKPGQGLEWIGQIYPGDGDTNYNGKFKGRATLTADTSSSTAYMQLSSLTSEDSAVYFCARSITTVVGCAMDYWGQGTSVTVSSTRGQPKANPTVTLFPPSSEELQANKATLVCLISDFYPGAVTVAWKADGSPVKAGVETTKPSKQSNNKYAASSYLSLTPEQWKSHRSYSCQVTHEGSTVEKTVAPTECSPIKTDVITMDPKDNCSKDANDTLLLQLTNTSAYYMYLLLLLKSVVYFAIITCCLLRRTAFCCNGEKSRAKRSGSGVKQTLNFDLLKLAGDVESNPGPSRGHMTEYKPTVRLATRDDVPRAVRTLAAAFADYPATRHTVDPDRHIERVTELQELFLTRVGLDIGKVWVADDGAAVAVWTTPESVEAGAVFAEIGPRMAELSGSRLAAQQQMEGLLAPHRPKEPAWFLATVGVSPDHQGKGLGSAVVLPGVEAAERAGVPAFLETSAPRNLPFYERLGFTVTADVEVPEGPRTWCMTRKPGA

SEQ ID NO: 19518 - protein, 1163 aa, synthetic construct
MALPVTALLLPLALLLHAARPLEEEDLKNVFPPEVAVFEPSEAEISHTQKATLVCLATGFYPDHVELSWWVNGKEVHSGVCTDPQPLKEQPALNDSRYCLSSRLRVSATFWQNPRNHFRCQVQFYGLSENDEWTQDRAKPVTQIVSAEAWGRADCGFTSESYQQGVLSATNLSVIGFRILLLKVAGFNLLMTLRLWSSRAKRSGSGATNFSLLKQAGDVEENPGPTSMALPVTALLLPLALLLHAARPGVTQSPTHLIKTRGQQATLRCSPISGHTSVYWYQQALGLGLQFLLWYDEGEERNRGNFPPRFSGRQFPNYSSELNVNALELEDSALYLCASSLGGPRGLAGLRGDEQFFGPGTRLTVLEGGGSGGGSGVTQSPTHLIKTRGQQATLRCSPISGHTSVYWYQQALGLGLQFLLWYDEGEERNRGNFPPRFSGRQFPNYSSELNVNALELEDSALYLCASSLGGDELGADGNEQFFGPGTRLTVLEGTGGGGSGGGGSGGGGSEFDIQMTQSPSSLSASVGDRVTITCKASDHINNWLAWYQQKPGQAPKLLIYGATTLETGVPSRFSGSGSGTDYTLTISSLQPEDFATYYCQQSWNTPWTFGQGTKLEIKRGGGGSGGGGSGGGGSQVQLQQPGAELVKPGASVKMSCKASGYAFSSYWINWMKQKPGQGLEWIGQIYPGDGDTNYNGKFKGRATLTADTSSSTAYMQLSSLTSEDSAVYFCARSITTVVGCAMDYWGQGTSVTVSSTRGQPKANPTVTLFPPSSEELQANKATLVCLISDFYPGAVTVAWKADGSPVKAGVETTKPSKQSNNKYAASSYLSLTPEQWKSHRSYSCQVTHEGSTVEKTVAPTECSPIKTDVITMDPKDNCSKDANDTLLLQLTNTSAYYMYLLLLLKSVVYFAIITCCLLRRTAFCCNGEKSRAKRSGSGVKQTLNFDLLKLAGDVESNPGPSRGHMTEYKPTVRLATRDDVPRAVRTLAAAFADYPATRHTVDPDRHIERVTELQELFLTRVGLDIGKVWVADDGAAVAVWTTPESVEAGAVFAEIGPRMAELSGSRLAAQQQMEGLLAPHRPKEPAWFLATVGVSPDHQGKGLGSAVVLPGVEAAERAGVPAFLETSAPRNLPFYERLGFTVTADVEVPEGPRTWCMTRKPGA

SEQ ID NO: 19519 - protein, 783 aa, synthetic construct
MALPVTALLLPLALLLHAARPLEEEDLKNVFPPEVAVFEPSEAEISHTQKATLVCLATGFYPDHVELSWWVNGKEVHSGVCTDPQPLKEQPALNDSRYCLSSRLRVSATFWQNPRNHFRCQVQFYGLSENDEWTQDRAKPVTQIVSAEAWGRADCGFTSESYQQGVLSATNLSVIGFRILLLKVAGFNLLMTLRLWSSRAKRSGSGATNFSLLKQAGDVEENPGPTSMALPVTALLLPLALLLHAARPDEFGSDLGIKLLFAAAKGQDDEVRILLAAGADVNAKDFEGYTPLHVAAYDGHLEIVEVLLKAGADVNAKDSQGRTPLHEAAYSGHLEIVEVLLKAGADVNAQDDAGETPADLAAAWGHEDIAEVLQKTRGQPKANPTVTLFPPSSEELQANKATLVCLISDFYPGAVTVAWKADGSPVKAGVETTKPSKQSNNKYAASSYLSLTPEQWKSHRSYSCQVTHEGSTVEKTVAPTECSPIKTDVITMDPKDNCSKDANDTLLLQLTNTSAYYMYLLLLLKSVVYFAIITCCLLRRTAFCCNGEKSRAKRSGSGVKQTLNFDLLKLAGDVESNPGPSRGHMTEYKPTVRLATRDDVPRAVRTLAAAFADYPATRHTVDPDRHIERVTELQELFLTRVGLDIGKVWVADDGAAVAVWTTPESVEAGAVFAEIGPRMAELSGSRLAAQQQMEGLLAPHRPKEPAWFLATVGVSPDHQGKGLGSAVVLPGVEAAERAGVPAFLETSAPRNLPFYERLGFTVTADVEVPEGPRTWCMTRKPGA

SEQ ID NO: 19520 - protein, 712 aa, synthetic construct
MALPVTALLLPLALLLHAARPLEEEDLKNVFPPEVAVFEPSEAEISHTQKATLVCLATGFYPDHVELSWWVNGKEVHSGVCTDPQPLKEQPALNDSRYCLSSRLRVSATFWQNPRNHFRCQVQFYGLSENDEWTQDRAKPVTQIVSAEAWGRADCGFTSESYQQGVLSATNLSVIGFRILLLKVAGFNLLMTLRLWSSRAKRSGSGATNFSLLKQAGDVEENPGPTSMDWIWRILFLVGAATGAHSFEGSGFEYAKEMRNAYWEIALLPNLTNQQKRAPIRKLYDDPSQSSELLSEAKKLNDSQTRGQPKANPTVTLFPPSSEELQANKATLVCLISDFYPGAVTVAWKADGSPVKAGVETTKPSKQSNNKYAASSYLSLTPEQWKSHRSYSCQVTHEGSTVEKTVAPTECSPIKTDVITMDPKDNCSKDANDTLLLQLTNTSAYYMYLLLLLKSVVYFAIITCCLLRRTAFCCNGEKSRAKRSGSGVKQTLNFDLLKLAGDVESNPGPSRGHMTEYKPTVRLATRDDVPRAVRTLAAAFADYPATRHTVDPDRHIERVTELQELFLTRVGLDIGKVWVADDGAAVAVWTTPESVEAGAVFAEIGPRMAELSGSRLAAQQQMEGLLAPHRPKEPAWFLATVGVSPDHQGKGLGSAVVLPGVEAAERAGVPAFLETSAPRNLPFYERLGFTVTADVEVPEGPRTWCMTRKPGA

SEQ ID NO: 19521 - protein, 934 aa, synthetic construct
MALPVTALLLPLALLLHAARPLEEEDLKNVFPPEVAVFEPSEAEISHTQKATLVCLATGFYPDHVELSWWVNGKEVHSGVCTDPQPLKEQPALNDSRYCLSSRLRVSATFWQNPRNHFRCQVQFYGLSENDEWTQDRAKPVTQIVSAEAWGRADCGFTSESYQQGVLSATNLSVIGFRILLLKVAGFNLLMTLRLWSSRAKRSGSGATNFSLLKQAGDVEENPGPTSMALPVTALLLPLALLLHAARPDEFEVQLVESGGGLVQAGGSLRLSCAASGITFSINTMGWYRQAPGKQRELVALISSIGDTYYADSVKGRFTISRDNAKNTVYLQMNSLKPEDTAVYYCKRFRTAAQGTDYWGQGTQVTVSSLEGGGGSGGGGSGGGGSGSGGSGSGGSGSGGSGSGGSFEVQLVESGGGLVQPGGSLRLSCAASGSIFGFNDMAWYRQAPGKQRELVALISRVGVTSSADSVKGRFTISRVNAKDTVYLQMNSLKPEDTAVYYCYMDQRLDGSTLAYWGQGTQVTVSSTRGQPKANPTVTLFPPSSEELQANKATLVCLISDFYPGAVTVAWKADGSPVKAGVETTKPSKQSNNKYAASSYLSLTPEQWKSHRSYSCQVTHEGSTVEKTVAPTECSPIKTDVITMDPKDNCSKDANDTLLLQLTNTSAYYMYLLLLLKSVVYFAIITCCLLRRTAFCCNGEKSRAKRSGSGVKQTLNFDLLKLAGDVESNPGPSRGHMTEYKPTVRLATRDDVPRAVRTLAAAFADYPATRHTVDPDRHIERVTELQELFLTRVGLDIGKVWVADDGAAVAVWTTPESVEAGAVFAEIGPRMAELSGSRLAAQQQMEGLLAPHRPKEPAWFLATVGVSPDHQGKGLGSAVVLPGVEAAERAGVPAFLETSAPRNLPFYERLGFTVTADVEVPEGPRTWCMTRKPGA

SEQ ID NO: 19522 - protein, 848 aa, synthetic construct
MALPVTALLLPLALLLHAARPLEEEDLKNVFPPEVAVFEPSEAEISHTQKATLVCLATGFYPDHVELSWWVNGKEVHSGVCTDPQPLKEQPALNDSRYCLSSRLRVSATFWQNPRNHFRCQVQFYGLSENDEWTQDRAKPVTQIVSAEAWGRADCGFTSESYQQGVLSATNLSVIGFRILLLKVAGFNLLMTLRLWSSRAKRSGSGATNFSLLKQAGDVEENPGPTSMALPVTALLLPLALLLHAARPGMRTEDLPKAVVFLEPQWYRVLEKDSVTLKCQGAYSPEDNSTQWFHNESLISSQASSYFIDAATVDDSGEYRCQTNLSTLSDPVQLEVHIGWLLLQAPRWVFKEEDPIHLRCHSWKNTALHKVTYLQNGKGRKYFHHNSDFYIPKATLKDSGSYFCRGLVGSKNVSSETVNITITQGLAVSTISSFFPPGYQTRGQPKANPTVTLFPPSSEELQANKATLVCLISDFYPGAVTVAWKADGSPVKAGVETTKPSKQSNNKYAASSYLSLTPEQWKSHRSYSCQVTHEGSTVEKTVAPTECSPIKTDVITMDPKDNCSKDANDTLLLQLTNTSAYYMYLLLLLKSVVYFAIITCCLLRRTAFCCNGEKSRAKRSGSGVKQTLNFDLLKLAGDVESNPGPSRGHMTEYKPTVRLATRDDVPRAVRTLAAAFADYPATRHTVDPDRHIERVTELQELFLTRVGLDIGKVWVADDGAAVAVWTTPESVEAGAVFAEIGPRMAELSGSRLAAQQQMEGLLAPHRPKEPAWFLATVGVSPDHQGKGLGSAVVLPGVEAAERAGVPAFLETSAPRNLPFYERLGFTVTADVEVPEGPRTWCMTRKPGA

SEQ ID NO: 19523 - protein, 476 aa, synthetic construct
MALPVTALLLPLALLLHAARPLEEEDLKNVFPPEVAVFEPSEAEISHTQKATLVCLATGFYPDHVELSWWVNGKEVHSGVCTDPQPLKEQPALNDSRYCLSSRLRVSATFWQNPRNHFRCQVQFYGLSENDEWTQDRAKPVTQIVSAEAWGRADCGFTSESYQQGVLSATNLSVIGFRILLLKVAGFNLLMTLRLWSSRAKRSGSGATNFSLLKQAGDVEENPGPTSATMALPVTALLLPLALLLHAARPMDPDLEIRAAFLRQRNTALRTEVAELEQEVQRLENEVSQYETRYGPLGGGKTRGQPKANPTVTLFPPSSEELQANKATLVCLISDFYPGAVTVAWKADGSPVKAGVETTKPSKQSNNKYAASSYLSLTPEQWKSHRSYSCQVTHEGSTVEKTVAPTECSPIKTDVITMDPKDNCSKDANDTLLLQLTNTSAYYMYLLLLLKSVVYFAIITCCLLRRTAFCCNGEKS

SEQ ID NO: 19524 - protein, 476 aa, synthetic construct
MALPVTALLLPLALLLHAARPLEEEDLKNVFPPEVAVFEPSEAEISHTQKATLVCLATGFYPDHVELSWWVNGKEVHSGVCTDPQPLKEQPALNDSRYCLSSRLRVSATFWQNPRNHFRCQVQFYGLSENDEWTQDRAKPVTQIVSAEAWGRADCGFTSESYQQGVLSATNLSVIGFRILLLKVAGFNLLMTLRLWSSRAKRSGSGATNFSLLKQAGDVEENPGPTSATMALPVTALLLPLALLLHAARPMDPDLEIEAAFLERENTALETRVAELRQRVQRLRNRVSQYRTRYGPLGGGKTRGQPKANPTVTLFPPSSEELQANKATLVCLISDFYPGAVTVAWKADGSPVKAGVETTKPSKQSNNKYAASSYLSLTPEQWKSHRSYSCQVTHEGSTVEKTVAPTECSPIKTDVITMDPKDNCSKDANDTLLLQLTNTSAYYMYLLLLLKSVVYFAIITCCLLRRTAFCCNGEKS

SEQ ID NO: 19525 - protein, 453 aa, synthetic construct
MALPVTALLLPLALLLHAARPLEEEDLKNVFPPEVAVFEPSEAEISHTQKATLVCLATGFYPDHVELSWWVNGKEVHSGVCTDPQPLKEQPALNDSRYCLSSRLRVSATFWQNPRNHFRCQVQFYGLSENDEWTQDRAKPVTQIVSAEAWGRADCGFTSESYQQGVLSATNLSVIGFRILLLKVAGFNLLMTLRLWSSRAKRSGSGATNFSLLKQAGDVEENPGPTSATMALPVTALLLPLALLLHAARPEVAALEKEVAALEKEVAALEKEVAALEKTRGQPKANPTVTLFPPSSEELQANKATLVCLISDFYPGAVTVAWKADGSPVKAGVETTKPSKQSNNKYAASSYLSLTPEQWKSHRSYSCQVTHEGSTVEKTVAPTECSPIKTDVITMDPKDNCSKDANDTLLLQLTNTSAYYMYLLLLLKSVVYFAIITCCLLRRTAFCCNGEKS

SEQ ID NO: 19526 - protein, 711 aa, synthetic construct
MALPVTALLLPLALLLHAARPLEEEDLKNVFPPEVAVFEPSEAEISHTQKATLVCLATGFYPDHVELSWWVNGKEVHSGVCTDPQPLKEQPALNDSRYCLSSRLRVSATFWQNPRNHFRCQVQFYGLSENDEWTQDRAKPVTQIVSAEAWGRADCGFTSESYQQGVLSATNLSVIGFRILLLKVAGFNLLMTLRLWSSRAKRSGSGATNFSLLKQAGDVEENPGPTSATMALPVTALLLPLALLLHAARPLFNQEVQIPLTESYCGPCPKNWICYKNNCYQFFDESKNWYESQASCMSQNASLLKVYSKEDQDLLKLVKSAHWMGLVHIPTNGSWQWEDGSILSPNLLTIIEMQKGDCALYASSFKGYIENCSTPNTYICMQRTVSGGGGSGGGGSGGGGDLFNQEVQIPLTESYCGPCPKNWICYKNNCYQFFDESKNWYESQASCMSQNASLLKVYSKEDQDLLKLVKSAHWMGLVHIPTNGSWQWEDGSILSPNLLTIIEMQKGDCALYASSFKGYIENCSTPNTYICMQRTVTRGQPKANPTVTLFPPSSEELQANKATLVCLISDFYPGAVTVAWKADGSPVKAGVETTKPSKQSNNKYAASSYLSLTPEQWKSHRSYSCQVTHEGSTVEKTVAPTECSPIKTDVITMDPKDNCSKDANDTLLLQLTNTSAYYMYLLLLLKSVVYFAIITCCLLRRTAFCCNGEKS

SEQ ID NO: 19527 - protein, 711 aa, synthetic construct
MALPVTALLLPLALLLHAARPLEEEDLKNVFPPEVAVFEPSEAEISHTQKATLVCLATGFYPDHVELSWWVNGKEVHSGVCTDPQPLKEQPALNDSRYCLSSRLRVSATFWQNPRNHFRCQVQFYGLSENDEWTQDRAKPVTQIVSAEAWGRADCGFTSESYQQGVLSATNLSVIGFRILLLKVAGFNLLMTLRLWSSRAKRSGSGATNFSLLKQAGDVEENPGPTSATMALPVTALLLPLALLLHAARPLFNQEVQIPLTESYCGPCPKNWICYKNNCYQFFDESKNWYESQASCMSQNASLLKVYSKEDQDLLKLVKSAHWMGLVHIPTNGSWQWEDGSILSPNLLTIIEMQKGDCALYASSFKGFIENCSTPNTYICMQRTVGGGGSGGGGSGGGGSDLFNQEVQIPLTESYCGPCPKNWICYKNNCYQFFDESKNWYESQASCMSQNASLLKVYSKEDQDLLKLVKSAHWMGLVHIPTNGSWQWEDGSILSPNLLTIIEMQKGDCALYASSFKGFIENCSTPNTYICMQRTVTRGQPKANPTVTLFPPSSEELQANKATLVCLISDFYPGAVTVAWKADGSPVKAGVETTKPSKQSNNKYAASSYLSLTPEQWKSHRSYSCQVTHEGSTVEKTVAPTECSPIKTDVITMDPKDNCSKDANDTLLLQLTNTSAYYMYLLLLLKSVVYFAIITCCLLRRTAFCCNGEKS

SEQ ID NO: 19528 - protein, 737 aa, synthetic construct
MALPVTALLLPLALLLHAARPLEEEDLKNVFPPEVAVFEPSEAEISHTQKATLVCLATGFYPDHVELSWWVNGKEVHSGVCTDPQPLKEQPALNDSRYCLSSRLRVSATFWQNPRNHFRCQVQFYGLSENDEWTQDRAKPVTQIVSAEAWGRADCGFTSESYQQGVLSATNLSVIGFRILLLKVAGFNLLMTLRLWSSRAKRSGSGATNFSLLKQAGDVEENPGPTSMALPVTALLLPLALLLHAARPMDPDLEIRAAFLRQRNTALRTEVAELEQEVQRLENEVSQYETRYGPLGGGKGTGGGGSGGGGSGGGGSEFDIQMTQSPSSLSASVGDRVTITCKASDHINNWLAWYQQKPGQAPKLLIYGATTLETGVPSRFSGSGSGTDYTLTISSLQPEDFATYYCQQSWNTPWTFGQGTKLEIKRGGGGSGGGGSGGGGSQVQLQQPGAELVKPGASVKMSCKASGYAFSSYWINWMKQKPGQGLEWIGQIYPGDGDTNYNGKFKGRATLTADTSSSTAYMQLSSLTSEDSAVYFCARSITTVVGCAMDYWGQGTSVTVSSTRGQPKANPTVTLFPPSSEELQANKATLVCLISDFYPGAVTVAWKADGSPVKAGVETTKPSKQSNNKYAASSYLSLTPEQWKSHRSYSCQVTHEGSTVEKTVAPTECSPIKTDVITMDPKDNCSKDANDTLLLQLTNTSAYYMYLLLLLKSVVYFAIITCCLLRRTAFCCNGEKS

SEQ ID NO: 19529 - protein, 972 aa, synthetic construct
MALPVTALLLPLALLLHAARPLEEEDLKNVFPPEVAVFEPSEAEISHTQKATLVCLATGFYPDHVELSWWVNGKEVHSGVCTDPQPLKEQPALNDSRYCLSSRLRVSATFWQNPRNHFRCQVQFYGLSENDEWTQDRAKPVTQIVSAEAWGRADCGFTSESYQQGVLSATNLSVIGFRILLLKVAGFNLLMTLRLWSSRAKRSGSGATNFSLLKQAGDVEENPGPTSMALPVTALLLPLALLLHAARPLFNQEVQIPLTESYCGPCPKNWICYKNNCYQFFDESKNWYESQASCMSQNASLLKVYSKEDQDLLKLVKSAHWMGLVHIPTNGSWQWEDGSILSPNLLTIIEMQKGDCALYASSFKGFIENCSTPNTYICMQRTVGGGGSGGGGSGGGGSDLFNQEVQIPLTESYCGPCPKNWICYKNNCYQFFDESKNWYESQASCMSQNASLLKVYSKEDQDLLKLVKSAHWMGLVHIPTNGSWQWEDGSILSPNLLTIIEMQKGDCALYASSFKGFIENCSTPNTYICMQRTVGTGGGGSGGGGSGGGGSEFDIQMTQSPSSLSASVGDRVTITCKASDHINNWLAWYQQKPGQAPKLLIYGATTLETGVPSRFSGSGSGTDYTLTISSLQPEDFATYYCQQSWNTPWTFGQGTKLEIKRGGGGSGGGGSGGGGSQVQLQQPGAELVKPGASVKMSCKASGYAFSSYWINWMKQKPGQGLEWIGQIYPGDGDTNYNGKFKGRATLTADTSSSTAYMQLSSLTSEDSAVYFCARSITTVVGCAMDYWGQGTSVTVSSTRGQPKANPTVTLFPPSSEELQANKATLVCLISDFYPGAVTVAWKADGSPVKAGVETTKPSKQSNNKYAASSYLSLTPEQWKSHRSYSCQVTHEGSTVEKTVAPTECSPIKTDVITMDPKDNCSKDANDTLLLQLTNTSAYYMYLLLLLKSVVYFAIITCCLLRRTAFCCNGEKS

SEQ ID NO: 19530 - protein, 677 aa, synthetic construct
MALPVTALLLPLALLLHAARPLEEEDLKNVFPPEVAVFEPSEAEISHTQKATLVCLATGFYPDHVELSWWVNGKEVHSGVCTDPQPLKEQPALNDSRYCLSSRLRVSATFWQNPRNHFRCQVQFYGLSENDEWTQDRAKPVTQIVSAEAWGRADCGFTSESYQQGVLSATNLSVIGFRILLLKVAGFNLLMTLRLWSSRAKRSGSGATNFSLLKQAGDVEENPGPTSMALPVTALLLPLALLLHAARPQSVLTQPPSVSGAPGQRVTISCTGSSSNIGAGYDVHWYQQLPGTAPKLLIFGNSNRPSGVPDRFSGFKSGTSASLAITGLQAEDEADYFCQSYDSSLSGSGVFGTGTKVTVLGGGGGSGGGGSGGGGSQMQLVQSGGGLVQPGRSLRLSCAASGFTFDDYAMHWVRQAPGKGLEWVSGISWNSGSIGYADSVKGRFTISRDNAKNSLYLQMNSLRAEDTALYYCAKDIHSGSYYGLLYYAMDVWGQGTTVTVSSTRGQPKANPTVTLFPPSSEELQANKATLVCLISDFYPGAVTVAWKADGSPVKAGVETTKPSKQSNNKYAASSYLSLTPEQWKSHRSYSCQVTHEGSTVEKTVAPTECSPIKTDVITMDPKDNCSKDANDTLLLQLTNTSAYYMYLLLLLKSVVYFAIITCCLLRRTAFCCNGEKS

SEQ ID NO: 19531 - protein, 514 aa, synthetic construct
MALPVTALLLPLALLLHAARPLEEEDLKNVFPPEVAVFEPSEAEISHTQKATLVCLATGFYPDHVELSWWVNGKEVHSGVCTDPQPLKEQPALNDSRYCLSSRLRVSATFWQNPRNHFRCQVQFYGLSENDEWTQDRAKPVTQIVSAEAWGRADCGFTSESYQQGVLSATNLSVIGFRILLLKVAGFNLLMTLRLWSSRAKRSGSGATNFSLLKQAGDVEENPGPTSMALPVTALLLPLALLLHAARPMCMPCFTTDHQMARKCDDCCGGKGRGKCYGPQCLCRLEGGGGSGGGGSGGGGSFEVCMPCFTTDQQMARKCSDCCGGKGRGKCYGPQCLCRTRGQPKANPTVTLFPPSSEELQANKATLVCLISDFYPGAVTVAWKADGSPVKAGVETTKPSKQSNNKYAASSYLSLTPEQWKSHRSYSCQVTHEGSTVEKTVAPTECSPIKTDVITMDPKDNCSKDANDTLLLQLTNTSAYYMYLLLLLKSVVYFAIITCCLLRRTAFCCNGEKS

SEQ ID NO: 19532 - protein, 777 aa, synthetic construct
MALPVTALLLPLALLLHAARPLEEEDLKNVFPPEVAVFEPSEAEISHTQKATLVCLATGFYPDHVELSWWVNGKEVHSGVCTDPQPLKEQPALNDSRYCLSSRLRVSATFWQNPRNHFRCQVQFYGLSENDEWTQDRAKPVTQIVSAEAWGRADCGFTSESYQQGVLSATNLSVIGFRILLLKVAGFNLLMTLRLWSSRAKRSGSGATNFSLLKQAGDVEENPGPTSMALPVTALLLPLALLLHAARPMCMPCFTTDHQMARKCDDCCGGKGRGKCYGPQCLCRLEGGGGSGGGGSGGGGSFEVCMPCFTTDQQMARKCSDCCGGKGRGKCYGPQCLCRGTGGGGSGGGGSGGGGSEFDIQMTQSPSSLSASVGDRVTITCKASDHINNWLAWYQQKPGQAPKLLIYGATTLETGVPSRFSGSGSGTDYTLTISSLQPEDFATYYCQQSWNTPWTFGQGTKLEIKRGGGGSGGGGSGGGGSQVQLQQPGAELVKPGASVKMSCKASGYAFSSYWINWMKQKPGQGLEWIGQIYPGDGDTNYNGKFKGRATLTADTSSSTAYMQLSSLTSEDSAVYFCARSITTVVGCAMDYWGQGTSVTVSSTRGQPKANPTVTLFPPSSEELQANKATLVCLISDFYPGAVTVAWKADGSPVKAGVETTKPSKQSNNKYAASSYLSLTPEQWKSHRSYSCQVTHEGSTVEKTVAPTECSPIKTDVITMDPKDNCSKDANDTLLLQLTNTSAYYMYLLLLLKSVVYFAIITCCLLRRTAFCCNGEKS

SEQ ID NO: 19533 - protein, 852 aa, synthetic construct
MALPVTALLLPLALLLHAARPLEEEDLKNVFPPEVAVFEPSEAEISHTQKATLVCLATGFYPDHVELSWWVNGKEVHSGVCTDPQPLKEQPALNDSRYCLSSRLRVSATFWQNPRNHFRCQVQFYGLSENDEWTQDRAKPVTQIVSAEAWGRADCGFTSESYQQGVLSATNLSVIGFRILLLKVAGFNLLMTLRLWSSRAKRSGSGATNFSLLKQAGDVEENPGPTSMALPVTALLLPLALLLHAARPSPVAPACDPRLLNKLLRDSHLLHSRLSQCPDVDPLSIPVLLPAVDFSLGEWKTQTEQSKAQDILGAVSLLLEGVMAARGQLEPSCLSSLLGQLSGQVRLLLGALQGLLGTQLPLQGRTTAHKDPNALFLSLQQLLRGKVRFLLLVEGPTLCVRRTLPTTAVPSSTSGTGGGGSGGGGSGGGGSEFDIQMTQSPSSLSASVGDRVTITCKASDHINNWLAWYQQKPGQAPKLLIYGATTLETGVPSRFSGSGSGTDYTLTISSLQPEDFATYYCQQSWNTPWTFGQGTKLEIKRGGGGSGGGGSGGGGSQVQLQQPGAELVKPGASVKMSCKASGYAFSSYWINWMKQKPGQGLEWIGQIYPGDGDTNYNGKFKGRATLTADTSSSTAYMQLSSLTSEDSAVYFCARSITTVVGCAMDYWGQGTSVTVSSTRGQPKANPTVTLFPPSSEELQANKATLVCLISDFYPGAVTVAWKADGSPVKAGVETTKPSKQSNNKYAASSYLSLTPEQWKSHRSYSCQVTHEGSTVEKTVAPTECSPIKTDVITMDPKDNCSKDANDTLLLQLTNTSAYYMYLLLLLKSVVYFAIITCCLLRRTAFCCNGEKS

SEQ ID NO: 19534 - protein, 759 aa, synthetic construct
MALPVTALLLPLALLLHAARPLEEEDLKNVFPPEVAVFEPSEAEISHTQKATLVCLATGFYPDHVELSWWVNGKEVHSGVCTDPQPLKEQPALNDSRYCLSSRLRVSATFWQNPRNHFRCQVQFYGLSENDEWTQDRAKPVTQIVSAEAWGRADCGFTSESYQQGVLSATNLSVIGFRILLLKVAGFNLLMTLRLWSSRAKRSGSGATNFSLLKQAGDVEENPGPTSMALPVTALLLPLALLLHAARPMGSWEEFELRLNAIEERLYALGGSEAELAYFEYVIADFEGNLQRYKGKGNPEVEALYFEADAIFEELVAYRHNGTGGGGSGGGGSGGGGSEFDIQMTQSPSSLSASVGDRVTITCKASDHINNWLAWYQQKPGQAPKLLIYGATTLETGVPSRFSGSGSGTDYTLTISSLQPEDFATYYCQQSWNTPWTFGQGTKLEIKRGGGGSGGGGSGGGGSQVQLQQPGAELVKPGASVKMSCKASGYAFSSYWINWMKQKPGQGLEWIGQIYPGDGDTNYNGKFKGRATLTADTSSSTAYMQLSSLTSEDSAVYFCARSITTVVGCAMDYWGQGTSVTVSSTRGQPKANPTVTLFPPSSEELQANKATLVCLISDFYPGAVTVAWKADGSPVKAGVETTKPSKQSNNKYAASSYLSLTPEQWKSHRSYSCQVTHEGSTVEKTVAPTECSPIKTDVITMDPKDNCSKDANDTLLLQLTNTSAYYMYLLLLLKSVVYFAIITCCLLRRTAFCCNGEKS

SEQ ID NO: 19535 - protein, 898 aa, synthetic construct
MALPVTALLLPLALLLHAARPLEGQPKANPTVTLFPPSSEELQANKATLVCLISDFYPGAVTVAWKADGSPVKAGVETTKPSKQSNNKYAASSYLSLTPEQWKSHRSYSCQVTHEGSTVEKTVAPTECSPIKTDVITMDPKDNCSKDANDTLLLQLTNTSAYYMYLLLLLKSVVYFAIITCCLLRRTAFCCNGEKSRAKRSGSGATNFSLLKQAGDVEENPGPTSMALPVTALLLPLALLLHAARPDIQMTQTTSSLSASLGDRVTISCRASQDISKYLNWYQQKPDGTVKLLIYHTSRLHSGVPSRFSGSGSGTDYSLTISNLEQEDIATYFCQQGNTLPYTFGGGTKLEITGGGGSGGGGSGGGGSEVKLQESGPGLVAPSQSLSVTCTVSGVSLPDYGVSWIRQPPRKGLEWLGVIWGSETTYYNSALKSRLTIIKDNSKSQVFLKMNSLQTDDTAIYYCAKHYYYGGSYAMDYWGQGTSVTVSSTREEDLKNVFPPEVAVFEPSEAEISHTQKATLVCLATGFYPDHVELSWWVNGKEVHSGVCTDPQPLKEQPALNDSRYCLSSRLRVSATFWQNPRNHFRCQVQFYGLSENDEWTQDRAKPVTQIVSAEAWGRADCGFTSESYQQGVLSATNLSVIGFRILLLKVAGFNLLMTLRLWSSRAKRSGSGVKQTLNFDLLKLAGDVESNPGPSRGHMTEYKPTVRLATRDDVPRAVRTLAAAFADYPATRHTVDPDRHIERVTELQELFLTRVGLDIGKVWVADDGAAVAVWTTPESVEAGAVFAEIGPRMAELSGSRLAAQQQMEGLLAPHRPKEPAWFLATVGVSPDHQGKGLGSAVVLPGVEAAERAGVPAFLETSAPRNLPFYERLGFTVTADVEVPEGPRTWCMTRKPGA

SEQ ID NO: 19536 - protein, 899 aa, synthetic construct
MALPVTALLLPLALLLHAARPLEGQPKANPTVTLFPPSSEELQANKATLVCLISDFYPGAVTVAWKADGSPVKAGVETTKPSKQSNNKYAASSYLSLTPEQWKSHRSYSCQVTHEGSTVEKTVAPTECSPIKTDVITMDPKDNCSKDANDTLLLQLTNTSAYYMYLLLLLKSVVYFAIITCCLLRRTAFCCNGEKSRAKRSGSGATNFSLLKQAGDVEENPGPTSTMALPVTALLLPLALLLHAARPEIVMTQSPATLSLSPGERATLSCRASQDISKYLNWYQQKPGQAPRLLIYHTSRLHSGIPARFSGSGSGTDYTLTISSLQPEDFAVYFCQQGNTLPYTFGQGTKLEIKGGGGSGGGGSGGGGSQVQLQESGPGLVKPSETLSLTCTVSGVSLPDYGVSWIRQPPGKGLEWIGVIWGSETTYYNSSLKSRVTISKDNSKNQVSLKLSSVTAADTAVYYCAKHYYYGGSYAMDYWGQGTLVTVSSTREEDLKNVFPPEVAVFEPSEAEISHTQKATLVCLATGFYPDHVELSWWVNGKEVHSGVCTDPQPLKEQPALNDSRYCLSSRLRVSATFWQNPRNHFRCQVQFYGLSENDEWTQDRAKPVTQIVSAEAWGRADCGFTSESYQQGVLSATNLSVIGFRILLLKVAGFNLLMTLRLWSSRAKRSGSGVKQTLNFDLLKLAGDVESNPGPSRGHMTEYKPTVRLATRDDVPRAVRTLAAAFADYPATRHTVDPDRHIERVTELQELFLTRVGLDIGKVWVADDGAAVAVWTTPESVEAGAVFAEIGPRMAELSGSRLAAQQQMEGLLAPHRPKEPAWFLATVGVSPDHQGKGLGSAVVLPGVEAAERAGVPAFLETSAPRNLPFYERLGFTVTADVEVPEGPRTWCMTRKPGA

SEQ ID NO: 19537 - protein, 900 aa, synthetic construct
MALPVTALLLPLALLLHAARPLEGQPKANPTVTLFPPSSEELQANKATLVCLISDFYPGAVTVAWKADGSPVKAGVETTKPSKQSNNKYAASSYLSLTPEQWKSHRSYSCQVTHEGSTVEKTVAPTECSPIKTDVITMDPKDNCSKDANDTLLLQLTNTSAYYMYLLLLLKSVVYFAIITCCLLRRTAFCCNGEKSRAKRSGSGATNFSLLKQAGDVEENPGPTSTMALPVTALLLPLALLLHAARPDEIVLTQSPATLSLSPGERATLSCSASSSVSYMHWYQQKPGQAPRLLIYDTSKLASGIPARFSGSGSGTDFTLTISSLEPEDVAVYYCFQGSVYPFTFGQGTKLEIKRGGGGSGGGGSGGGGSQVQLQESGPGLVKPSQTLSLTCTVSGGSISTSGMGVGWIRQHPGKGLEWIGHIWWDDDKRYNPALKSRVTISVDTSKNQFSLKLSSVTAADTAVYYCARMELWSYYFDYWGQGTLVTVSSTREEDLKNVFPPEVAVFEPSEAEISHTQKATLVCLATGFYPDHVELSWWVNGKEVHSGVCTDPQPLKEQPALNDSRYCLSSRLRVSATFWQNPRNHFRCQVQFYGLSENDEWTQDRAKPVTQIVSAEAWGRADCGFTSESYQQGVLSATNLSVIGFRILLLKVAGFNLLMTLRLWSSRAKRSGSGVKQTLNFDLLKLAGDVESNPGPSRGHMTEYKPTVRLATRDDVPRAVRTLAAAFADYPATRHTVDPDRHIERVTELQELFLTRVGLDIGKVWVADDGAAVAVWTTPESVEAGAVFAEIGPRMAELSGSRLAAQQQMEGLLAPHRPKEPAWFLATVGVSPDHQGKGLGSAVVLPGVEAAERAGVPAFLETSAPRNLPFYERLGFTVTADVEVPEGPRTWCMTRKPGA

SEQ ID NO: 19538 - protein, 896 aa, synthetic construct
MALPVTALLLPLALLLHAARPLEGQPKANPTVTLFPPSSEELQANKATLVCLISDFYPGAVTVAWKADGSPVKAGVETTKPSKQSNNKYAASSYLSLTPEQWKSHRSYSCQVTHEGSTVEKTVAPTECSPIKTDVITMDPKDNCSKDANDTLLLQLTNTSAYYMYLLLLLKSVVYFAIITCCLLRRTAFCCNGEKSRAKRSGSGATNFSLLKQAGDVEENPGPTSMALPVTALLLPLALLLHAARPDIQMTQSPSSLSASVGDRVTITCRASQDISNYLNWYQQKPGKAPKLLIYYTSRLHSGVPSRFSGSGSGTDFTLTISSLQPEDFATYYCQQGNTLPYTFGQGTKVEIKRGGGGSGGGGSGGGGSEVQLVESGGGLVQPGGSLRLSCAASGFTFSDYFMSWVRQAPGKGLEWVATISNGGTYTYYPDSVKGRFTISRDNSKNTLYLQMNSLRAEDTAVYYCARFDGYIFDYWGQGTLVTVSSTREEDLKNVFPPEVAVFEPSEAEISHTQKATLVCLATGFYPDHVELSWWVNGKEVHSGVCTDPQPLKEQPALNDSRYCLSSRLRVSATFWQNPRNHFRCQVQFYGLSENDEWTQDRAKPVTQIVSAEAWGRADCGFTSESYQQGVLSATNLSVIGFRILLLKVAGFNLLMTLRLWSSRAKRSGSGVKQTLNFDLLKLAGDVESNPGPSRGHMTEYKPTVRLATRDDVPRAVRTLAAAFADYPATRHTVDPDRHIERVTELQELFLTRVGLDIGKVWVADDGAAVAVWTTPESVEAGAVFAEIGPRMAELSGSRLAAQQQMEGLLAPHRPKEPAWFLATVGVSPDHQGKGLGSAVVLPGVEAAERAGVPAFLETSAPRNLPFYERLGFTVTADVEVPEGPRTWCMTRKPGA

SEQ ID NO: 19539 - protein, 900 aa, synthetic construct
MALPVTALLLPLALLLHAARPLEGQPKANPTVTLFPPSSEELQANKATLVCLISDFYPGAVTVAWKADGSPVKAGVETTKPSKQSNNKYAASSYLSLTPEQWKSHRSYSCQVTHEGSTVEKTVAPTECSPIKTDVITMDPKDNCSKDANDTLLLQLTNTSAYYMYLLLLLKSVVYFAIITCCLLRRTAFCCNGEKSRAKRSGSGATNFSLLKQAGDVEENPGPTSMALPVTALLLPLALLLHAARPDIQMTQSPSSLSASVGDRVTITCKASDHINNWLAWYQQKPGQAPKLLIYGATTLETGVPSRFSGSGSGTDYTLTISSLQPEDFATYYCQQSWNTPWTFGQGTKLEIKRGGGGSGGGGSGGGGSQVQLQQPGAELVKPGASVKMSCKASGYAFSSYWINWMKQKPGQGLEWIGQIYPGDGDTNYNGKFKGRATLTADTSSSTAYMQLSSLTSEDSAVYFCARSITTVVGCAMDYWGQGTSVTVSSTREEDLKNVFPPEVAVFEPSEAEISHTQKATLVCLATGFYPDHVELSWWVNGKEVHSGVCTDPQPLKEQPALNDSRYCLSSRLRVSATFWQNPRNHFRCQVQFYGLSENDEWTQDRAKPVTQIVSAEAWGRADCGFTSESYQQGVLSATNLSVIGFRILLLKVAGFNLLMTLRLWSSRAKRSGSGVKQTLNFDLLKLAGDVESNPGPSRGHMTEYKPTVRLATRDDVPRAVRTLAAAFADYPATRHTVDPDRHIERVTELQELFLTRVGLDIGKVWVADDGAAVAVWTTPESVEAGAVFAEIGPRMAELSGSRLAAQQQMEGLLAPHRPKEPAWFLATVGVSPDHQGKGLGSAVVLPGVEAAERAGVPAFLETSAPRNLPFYERLGFTVTADVEVPEGPRTWCMTRKPGA

SEQ ID NO: 19540 - protein, 902 aa, synthetic construct
MALPVTALLLPLALLLHAARPLEGQPKANPTVTLFPPSSEELQANKATLVCLISDFYPGAVTVAWKADGSPVKAGVETTKPSKQSNNKYAASSYLSLTPEQWKSHRSYSCQVTHEGSTVEKTVAPTECSPIKTDVITMDPKDNCSKDANDTLLLQLTNTSAYYMYLLLLLKSVVYFAIITCCLLRRTAFCCNGEKSRAKRSGSGATNFSLLKQAGDVEENPGPTSMALPVTALLLPLALLLHAARPQIVLSQSPAILSASPGEKVTMTCRASSSVSYMHWYQQKPGSSPKPWIYATSNLASGVPARFSGSGSGTSYSFTISRVEAEDAATYYCQQWTFNPPTFGGGTRLEIKRTVAAGGGGSGGGGSGGGGSQAYLQQSGAELVRPGASVKMSCKASGYTFTSYNMHWVKQTPRQGLEWIGGIYPGNGDTSYNQKFKGKATLTVGKSSSTAYMQLSSLTSEDSAVYFCARYDYNYAMDYWGQGTSVTVSSASTREEDLKNVFPPEVAVFEPSEAEISHTQKATLVCLATGFYPDHVELSWWVNGKEVHSGVCTDPQPLKEQPALNDSRYCLSSRLRVSATFWQNPRNHFRCQVQFYGLSENDEWTQDRAKPVTQIVSAEAWGRADCGFTSESYQQGVLSATNLSVIGFRILLLKVAGFNLLMTLRLWSSRAKRSGSGVKQTLNFDLLKLAGDVESNPGPSRGHMTEYKPTVRLATRDDVPRAVRTLAAAFADYPATRHTVDPDRHIERVTELQELFLTRVGLDIGKVWVADDGAAVAVWTTPESVEAGAVFAEIGPRMAELSGSRLAAQQQMEGLLAPHRPKEPAWFLATVGVSPDHQGKGLGSAVVLPGVEAAERAGVPAFLETSAPRNLPFYERLGFTVTADVEVPEGPRTWCMTRKPGA

SEQ ID NO: 19541 - protein, 900 aa, synthetic construct
MALPVTALLLPLALLLHAARPLEGQPKANPTVTLFPPSSEELQANKATLVCLISDFYPGAVTVAWKADGSPVKAGVETTKPSKQSNNKYAASSYLSLTPEQWKSHRSYSCQVTHEGSTVEKTVAPTECSPIKTDVITMDPKDNCSKDANDTLLLQLTNTSAYYMYLLLLLKSVVYFAIITCCLLRRTAFCCNGEKSRAKRSGSGATNFSLLKQAGDVEENPGPTSMALPVTALLLPLALLLHAARPEIVLTQSPATLSLSPGERATLSCRASQSVSSYLAWYQQKPGQAPRLLIYDASNRATGIPARFSGSGSGTDFTLTISSLEPEDFAVYYCQQRSNWPITFGQGTRLEIKGGGGSGGGGSGGGGSEVQLVESGGGLVQPDRSLRLSCAASGFTFHDYAMHWVRQAPGKGLEWVSTISWNSGTIGYADSVKGRFTISRDNAKNSLYLQMNSLRAEDTALYYCAKDIQYGNYYYGMDVWGQGTTVTVSSTREEDLKNVFPPEVAVFEPSEAEISHTQKATLVCLATGFYPDHVELSWWVNGKEVHSGVCTDPQPLKEQPALNDSRYCLSSRLRVSATFWQNPRNHFRCQVQFYGLSENDEWTQDRAKPVTQIVSAEAWGRADCGFTSESYQQGVLSATNLSVIGFRILLLKVAGFNLLMTLRLWSSRAKRSGSGVKQTLNFDLLKLAGDVESNPGPSRGHMTEYKPTVRLATRDDVPRAVRTLAAAFADYPATRHTVDPDRHIERVTELQELFLTRVGLDIGKVWVADDGAAVAVWTTPESVEAGAVFAEIGPRMAELSGSRLAAQQQMEGLLAPHRPKEPAWFLATVGVSPDHQGKGLGSAVVLPGVEAAERAGVPAFLETSAPRNLPFYERLGFTVTADVEVPEGPRTWCMTRKPGA

SEQ ID NO: 19542 - protein, 898 aa, synthetic construct
MALPVTALLLPLALLLHAARPLEGQPKANPTVTLFPPSSEELQANKATLVCLISDFYPGAVTVAWKADGSPVKAGVETTKPSKQSNNKYAASSYLSLTPEQWKSHRSYSCQVTHEGSTVEKTVAPTECSPIKTDVITMDPKDNCSKDANDTLLLQLTNTSAYYMYLLLLLKSVVYFAIITCCLLRRTAFCCNGEKSRAKRSGSGATNFSLLKQAGDVEENPGPTSMALPVTALLLPLALLLHAARPDIQMTQSPSSLSASVGDRVTITCRASQDVNTAVAWYQQKPGKAPKLLIYSASFLESGVPSRFSGSRSGTDFTLTISSLQPEDFATYYCQQHYTTPPTFGQTKVEIKRGGGGSGGGGSGGGGSEVQLVESGGGLVQPGGSLRLSCAASGFNIKDTYIHWVRQAPGKGLEWVARIYPTNGYTRYADSVKGRFTISADTSKNTAYLQMNSLRAEDTAVYYCSRWGGDGFYAMDVWGQGTLVTVSSTREEDLKNVFPPEVAVFEPSEAEISHTQKATLVCLATGFYPDHVELSWWVNGKEVHSGVCTDPQPLKEQPALNDSRYCLSSRLRVSATFWQNPRNHFRCQVQFYGLSENDEWTQDRAKPVTQIVSAEAWGRADCGFTSESYQQGVLSATNLSVIGFRILLLKVAGFNLLMTLRLWSSRAKRSGSGVKQTLNFDLLKLAGDVESNPGPSRGHMTEYKPTVRLATRDDVPRAVRTLAAAFADYPATRHTVDPDRHIERVTELQELFLTRVGLDIGKVWVADDGAAVAVWTTPESVEAGAVFAEIGPRMAELSGSRLAAQQQMEGLLAPHRPKEPAWFLATVGVSPDHQGKGLGSAVVLPGVEAAERAGVPAFLETSAPRNLPFYERLGFTVTADVEVPEGPRTWCMTRKPGA

SEQ ID NO: 19543 - protein, 777 aa, synthetic construct
MALPVTALLLPLALLLHAARPLEGQPKANPTVTLFPPSSEELQANKATLVCLISDFYPGAVTVAWKADGSPVKAGVETTKPSKQSNNKYAASSYLSLTPEQWKSHRSYSCQVTHEGSTVEKTVAPTECSPIKTDVITMDPKDNCSKDANDTLLLQLTNTSAYYMYLLLLLKSVVYFAIITCCLLRRTAFCCNGEKSRAKRSGSGATNFSLLKQAGDVEENPGPTSMALPVTALLLPLALLLHAARPDEFEVQLVESGGGLVQAGGSLRLSCAASGITFSINTMGWYRQAPGKQRELVALISSIGDTYYADSVKGRFTISRDNAKNTVYLQMNSLKPEDTAVYYCKRFRTAAQGTDYWGQGTQVTVSSTREEDLKNVFPPEVAVFEPSEAEISHTQKATLVCLATGFYPDHVELSWWVNGKEVHSGVCTDPQPLKEQPALNDSRYCLSSRLRVSATFWQNPRNHFRCQVQFYGLSENDEWTQDRAKPVTQIVSAEAWGRADCGFTSESYQQGVLSATNLSVIGFRILLLKVAGFNLLMTLRLWSSRAKRSGSGVKQTLNFDLLKLAGDVESNPGPSRGHMTEYKPTVRLATRDDVPRAVRTLAAAFADYPATRHTVDPDRHIERVTELQELFLTRVGLDIGKVWVADDGAAVAVWTTPESVEAGAVFAEIGPRMAELSGSRLAAQQQMEGLLAPHRPKEPAWFLATVGVSPDHQGKGLGSAVVLPGVEAAERAGVPAFLETSAPRNLPFYERLGFTVTADVEVPEGPRTWCMTRKPGA

SEQ ID NO: 19544 - protein, 777 aa, synthetic construct; identical to SEQ ID NO: 19543

SEQ ID NO: 19545 - protein, 1042 aa, synthetic construct
MALPVTALLLPLALLLHAARPLEGQPKANPTVTLFPPSSEELQANKATLVCLISDFYPGAVTVAWKADGSPVKAGVETTKPSKQSNNKYAASSYLSLTPEQWKSHRSYSCQVTHEGSTVEKTVAPTECSPIKTDVITMDPKDNCSKDANDTLLLQLTNTSAYYMYLLLLLKSVVYFAIITCCLLRRTAFCCNGEKSRAKRSGSGATNFSLLKQAGDVEENPGPTSMALPVTALLLPLALLLHAARPQVQLVESGGGLVQAGDSVTLSCTASGRTFSSYALAWFRQRPGKEREFVAGLRWGGPTNYADSVKDRFTISGDSAKHTMYLQMNSLKPEDTAVYYCGYNPGGWAVPSQYEYDSWGQGTQVTVSSGTGGGGSGGGGSGGGGSEFDIQMTQSPSSLSASVGDRVTITCKASDHINNWLAWYQQKPGQAPKLLIYGATTLETGVPSRFSGSGSGTDYTLTISSLQPEDFATYYCQQSWNTPWTFGQGTKLEIKRGGGGSGGGGSGGGGSQVQLQQPGAELVKPGASVKMSCKASGYAFSSYWINWMKQKPGQGLEWIGQIYPGDGDTNYNGKFKGRATLTADTSSSTAYMQLSSLTSEDSAVYFCARSITTVVGCAMDYWGQGTSVTVSSTREEDLKNVFPPEVAVFEPSEAEISHTQKATLVCLATGFYPDHVELSWWVNGKEVHSGVCTDPQPLKEQPALNDSRYCLSSRLRVSATFWQNPRNHFRCQVQFYGLSENDEWTQDRAKPVTQIVSAEAWGRADCGFTSESYQQGVLSATNLSVIGFRILLLKVAGFNLLMTLRLWSSRAKRSGSGVKQTLNFDLLKLAGDVESNPGPSRGHMTEYKPTVRLATRDDVPRAVRTLAAAFADYPATRHTVDPDRHIERVTELQELFLTRVGLDIGKVWVADDGAAVAVWTTPESVEAGAVFAEIGPRMAELSGSRLAAQQQMEGLLAPHRPKEPAWFLATVGVSPDHQGKGLGSAVVLPGVEAAERAGVPAFLETSAPRNLPFYERLGFTVTADVEVPEGPRTWCMTRKPGA

SEQ ID NO: 19546 - protein, 1171 aa, synthetic construct
MALPVTALLLPLALLLHAARPLEGQPKANPTVTLFPPSSEELQANKATLVCLISDFYPGAVTVAWKADGSPVKAGVETTKPSKQSNNKYAASSYLSLTPEQWKSHRSYSCQVTHEGSTVEKTVAPTECSPIKTDVITMDPKDNCSKDANDTLLLQLTNTSAYYMYLLLLLKSVVYFAIITCCLLRRTAFCCNGEKSRAKRSGSGATNFSLLKQAGDVEENPGPTSMALPVTALLLPLALLLHAARPEVQLLESGGGLVQPGGSLRLSCAASGFTFSSYAMSWVRQAPGKGLEWVSSISGSGDYIYYADSVKGRFTISRDISKNTLYLQMNSLRAEDTAVYYCAKEGTGANSSLADYRGQGTLVTVSSGGGSGGGSQVQLVESGGGLVQAGDSVTLSCTASGRTFSSYALAWFRQRPGKEREFVAGLRWGGPTNYADSVKDRFTISGDSAKHTMYLQMNSLKPEDTAVYYCGYNPGGWAVPSQYEYDSWGQGTQVTVSSGTGGGGSGGGGSGGGGSEFDIQMTQSPSSLSASVGDRVTITCKASDHINNWLAWYQQKPGQAPKLLIYGATTLETGVPSRFSGSGSGTDYTLTISSLQPEDFATYYCQQSWNTPWTFGQGTKLEIKRGGGGSGGGGSGGGGSQVQLQQPGAELVKPGASVKMSCKASGYAFSSYWINWMKQKPGQGLEWIGQIYPGDGDTNYNGKFKGRATLTADTSSSTAYMQLSSLTSEDSAVYFCARSITTVVGCAMDYWGQGTSVTVSSTREEDLKNVFPPEVAVFEPSEAEISHTQKATLVCLATGFYPDHVELSWWVNGKEVHSGVCTDPQPLKEQPALNDSRYCLSSRLRVSATFWQNPRNHFRCQVQFYGLSENDEWTQDRAKPVTQIVSAEAWGRADCGFTSESYQQGVLSATNLSVIGFRILLLKVAGFNLLMTLRLWSSRAKRSGSGVKQTLNFDLLKLAGDVESNPGPSRGHMTEYKPTVRLATRDDVPRAVRTLAAAFADYPATRHTVDPDRHIERVTELQELFLTRVGLDIGKVWVADDGAAVAVWTTPESVEAGAVFAEIGPRMAELSGSRLAAQQQMEGLLAPHRPKEPAWFLATVGVSPDHQGKGLGSAVVLPGVEAAERAGVPAFLETSAPRNLPFYERLGFTVTADVEVPEGPRTWCMTRKPGA

SEQ ID NO: 19547 - protein, 1169 aa, synthetic construct
MALPVTALLLPLALLLHAARPLEGQPKANPTVTLFPPSSEELQANKATLVCLISDFYPGAVTVAWKADGSPVKAGVETTKPSKQSNNKYAASSYLSLTPEQWKSHRSYSCQVTHEGSTVEKTVAPTECSPIKTDVITMDPKDNCSKDANDTLLLQLTNTSAYYMYLLLLLKSVVYFAIITCCLLRRTAFCCNGEKSRAKRSGSGATNFSLLKQAGDVEENPGPTSMALPVTALLLPLALLLHAARPGVTQSPTHLIKTRGQQATLRCSPISGHTSVYWYQQALGLGLQFLLWYDEGEERNRGNFPPRFSGRQFPNYSSELNVNALELEDSALYLCASSLGGPRGLAGLRGDEQFFGPGTRLTVLEGGGSGGGSQVQLVESGGGLVQAGDSVTLSCTASGRTFSSYALAWFRQRPGKEREFVAGLRWGGPTNYADSVKDRFTISGDSAKHTMYLQMNSLKPEDTAVYYCGYNPGGWAVPSQYEYDSWGQGTQVTVSSGTGGGGSGGGGSGGGGSEFDIQMTQSPSSLSASVGDRVTITCKASDHINNWLAWYQQKPGQAPKLLIYGATTLETGVPSRFSGSGSGTDYTLTISSLQPEDFATYYCQQSWNTPWTFGQGTKLEIKRGGGGSGGGGSGGGGSQVQLQQPGAELVKPGASVKMSCKASGYAFSSYWINWMKQKPGQGLEWIGQIYPGDGDTNYNGKFKGRATLTADTSSSTAYMQLSSLTSEDSAVYFCARSITTVVGCAMDYWGQGTSVTVSSTREEDLKNVFPPEVAVFEPSEAEISHTQKATLVCLATGFYPDHVELSWWVNGKEVHSGVCTDPQPLKEQPALNDSRYCLSSRLRVSATFWQNPRNHFRCQVQFYGLSENDEWTQDRAKPVTQIVSAEAWGRADCGFTSESYQQGVLSATNLSVIGFRILLLKVAGFNLLMTLRLWSSRAKRSGSGVKQTLNFDLLKLAGDVESNPGPSRGHMTEYKPTVRLATRDDVPRAVRTLAAAFADYPATRHTVDPDRHIERVTELQELFLTRVGLDIGKVWVADDGAAVAVWTTPESVEAGAVFAEIGPRMAELSGSRLAAQQQMEGLLAPHRPKEPAWFLATVGVSPDHQGKGLGSAVVLPGVEAAERAGVPAFLETSAPRNLPFYERLGFTVTADVEVPEGPRTWCMTRKPGA

SEQ ID NO: 19548 - protein, 930 aa, synthetic construct
MALPVTALLLPLALLLHAARPLEGQPKANPTVTLFPPSSEELQANKATLVCLISDFYPGAVTVAWKADGSPVKAGVETTKPSKQSNNKYAASSYLSLTPEQWKSHRSYSCQVTHEGSTVEKTVAPTECSPIKTDVITMDPKDNCSKDANDTLLLQLTNTSAYYMYLLLLLKSVVYFAIITCCLLRRTAFCCNGEKSRAKRSGSGATNFSLLKQAGDVEENPGPTSMALPVTALLLPLALLLHAARPGVTQSPTHLIKTRGQQATLRCSPISGHTSVYWYQQALGLGLQFLLWYDEGEERNRGNFPPRFSGRQFPNYSSELNVNALELEDSALYLCASSLGGPRGLAGLRGDEQFFGPGTRLTVLEGGGSGGGSGVTQSPTHLIKTRGQQATLRCSPISGHTSVYWYQQALGLGLQFLLWYDEGEERNRGNFPPRFSGRQFPNYSSELNVNALELEDSALYLCASSLGGDELGADGNEQFFGPGTRLTVLEGTGGGGSGGGGSGGGGSEFDIQMTQSPSSLSASVGDRVTITCKASDHINNWLAWYQQKPGQAPKLLIYGATTLETGVPSRFSGSGSGTDYTLTISSLQPEDFATYYCQQSWNTPWTFGQGTKLEIKRGGGGSGGGGSGGGGSQVQLQQPGAELVKPGASVKMSCKASGYAFSSYWINWMKQKPGQGLEWIGQIYPGDGDTNYNGKFKGRATLTADTSSSTAYMQLSSLTSEDSAVYFCARSITTVVGCAMDYWGQGTSVTVSSTREEDLKNVFPPEVAVFEPSEAEISHTQKATLVCLATGFYPDHVELSWWVNGKEVHSGVCTDPQPLKEQPALNDSRYCLSSRLRVSATFWQNPRNHFRCQVQFYGLSENDEWTQDRAKPVTQIVSAEAWGRADCGFTSESYQQGVLSATNLSVIGFRILLLKVAGFNLLMTLRLWSS

SEQ ID NO: 19549 - protein, 783 aa, synthetic construct
MALPVTALLLPLALLLHAARPLEGQPKANPTVTLFPPSSEELQANKATLVCLISDFYPGAVTVAWKADGSPVKAGVETTKPSKQSNNKYAASSYLSLTPEQWKSHRSYSCQVTHEGSTVEKTVAPTECSPIKTDVITMDPKDNCSKDANDTLLLQLTNTSAYYMYLLLLLKSVVYFAIITCCLLRRTAFCCNGEKSRAKRSGSGATNFSLLKQAGDVEENPGPTSMALPVTALLLPLALLLHAARPDEFGSDLGIKLLFAAAKGQDDEVRILLAAGADVNAKDFEGYTPLHVAAYDGHLEIVEVLLKAGADVNAKDSQGRTPLHEAAYSGHLEIVEVLLKAGADVNAQDDAGETPADLAAAWGHEDIAEVLQKTREEDLKNVFPPEVAVFEPSEAEISHTQKATLVCLATGFYPDHVELSWWVNGKEVHSGVCTDPQPLKEQPALNDSRYCLSSRLRVSATFWQNPRNHFRCQVQFYGLSENDEWTQDRAKPVTQIVSAEAWGRADCGFTSESYQQGVLSATNLSVIGFRILLLKVAGFNLLMTLRLWSSRAKRSGSGVKQTLNFDLLKLAGDVESNPGPSRGHMTEYKPTVRLATRDDVPRAVRTLAAAFADYPATRHTVDPDRHIERVTELQELFLTRVGLDIGKVWVADDGAAVAVWTTPESVEAGAVFAEIGPRMAELSGSRLAAQQQMEGLLAPHRPKEPAWFLATVGVSPDHQGKGLGSAVVLPGVEAAERAGVPAFLETSAPRNLPFYERLGFTVTADVEVPEGPRTWCMTRKPGA

SEQ ID NO: 19550 - protein, 712 aa, synthetic construct
MALPVTALLLPLALLLHAARPLEGQPKANPTVTLFPPSSEELQANKATLVCLISDFYPGAVTVAWKADGSPVKAGVETTKPSKQSNNKYAASSYLSLTPEQWKSHRSYSCQVTHEGSTVEKTVAPTECSPIKTDVITMDPKDNCSKDANDTLLLQLTNTSAYYMYLLLLLKSVVYFAIITCCLLRRTAFCCNGEKSRAKRSGSGATNFSLLKQAGDVEENPGPTSMDWIWRILFLVGAATGAHSFEGSGFEYAKEMRNAYWEIALLPNLTNQQKRAPIRKLYDDPSQSSELLSEAKKLNDSQTREEDLKNVFPPEVAVFEPSEAEISHTQKATLVCLATGFYPDHVELSWWVNGKEVHSGVCTDPQPLKEQPALNDSRYCLSSRLRVSATFWQNPRNHFRCQVQFYGLSENDEWTQDRAKPVTQIVSAEAWGRADCGFTSESYQQGVLSATNLSVIGFRILLLKVAGFNLLMTLRLWSSRAKRSGSGVKQTLNFDLLKLAGDVESNPGPSRGHMTEYKPTVRLATRDDVPRAVRTLAAAFADYPATRHTVDPDRHIERVTELQELFLTRVGLDIGKVWVADDGAAVAVWTTPESVEAGAVFAEIGPRMAELSGSRLAAQQQMEGLLAPHRPKEPAWFLATVGVSPDHQGKGLGSAVVLPGVEAAERAGVPAFLETSAPRNLPFYERLGFTVTADVEVPEGPRTWCMTRKPGA

SEQ ID NO: 19551 - protein, 934 aa, synthetic construct
MALPVTALLLPLALLLHAARPLEGQPKANPTVTLFPPSSEELQANKATLVCLISDFYPGAVTVAWKADGSPVKAGVETTKPSKQSNNKYAASSYLSLTPEQWKSHRSYSCQVTHEGSTVEKTVAPTECSPIKTDVITMDPKDNCSKDANDTLLLQLTNTSAYYMYLLLLLKSVVYFAIITCCLLRRTAFCCNGEKSRAKRSGSGATNFSLLKQAGDVEENPGPTSMALPVTALLLPLALLLHAARPDEFEVQLVESGGGLVQAGGSLRLSCAASGITFSINTMGWYRQAPGKQRELVALISSIGDTYYADSVKGRFTISRDNAKNTVYLQMNSLKPEDTAVYYCKRFRTAAQGTDYWGQGTQVTVSSLEGGGGSGGGGSGGGGSGSGGSGSGGSGSGGSGSGGSFEVQLVESGGGLVQPGGSLRLSCAASGSIFGFNDMAWYRQAPGKQRELVALISRVGVTSSADSVKGRFTISRVNAKDTVYLQMNSLKPEDTAVYYCYMDQRLDGSTLAYWGQGTQVTVSSTREEDLKNVFPPEVAVFEPSEAEISHTQKATLVCLATGFYPDHVELSWWVNGKEVHSGVCTDPQPLKEQPALNDSRYCLSSRLRVSATFWQNPRNHFRCQVQFYGLSENDEWTQDRAKPVTQIVSAEAWGRADCGFTSESYQQGVLSATNLSVIGFRILLLKVAGFNLLMTLRLWSSRAKRSGSGVKQTLNFDLLKLAGDVESNPGPSRGHMTEYKPTVRLATRDDVPRAVRTLAAAFADYPATRHTVDPDRHIERVTELQELFLTRVGLDIGKVWVADDGAAVAVWTTPESVEAGAVFAEIGPRMAELSGSRLAAQQQMEGLLAPHRPKEPAWFLATVGVSPDHQGKGLGSAVVLPGVEAAERAGVPAFLETSAPRNLPFYERLGFTVTADVEVPEGPRTWCMTRKPGA

SEQ ID NO: 19552 - protein, 848 aa, synthetic construct
MALPVTALLLPLALLLHAARPLEGQPKANPTVTLFPPSSEELQANKATLVCLISDFYPGAVTVAWKADGSPVKAGVETTKPSKQSNNKYAASSYLSLTPEQWKSHRSYSCQVTHEGSTVEKTVAPTECSPIKTDVITMDPKDNCSKDANDTLLLQLTNTSAYYMYLLLLLKSVVYFAIITCCLLRRTAFCCNGEKSRAKRSGSGATNFSLLKQAGDVEENPGPTSMALPVTALLLPLALLLHAARPGMRTEDLPKAVVFLEPQWYRVLEKDSVTLKCQGAYSPEDNSTQWFHNESLISSQASSYFIDAATVDDSGEYRCQTNLSTLSDPVQLEVHIGWLLLQAPRWVFKEEDPIHLRCHSWKNTALHKVTYLQNGKGRKYFHHNSDFYIPKATLKDSGSYFCRGLVGSKNVSSETVNITITQGLAVSTISSFFPPGYQTREEDLKNVFPPEVAVFEPSEAEISHTQKATLVCLATGFYPDHVELSWWVNGKEVHSGVCTDPQPLKEQPALNDSRYCLSSRLRVSATFWQNPRNHFRCQVQFYGLSENDEWTQDRAKPVTQIVSAEAWGRADCGFTSESYQQGVLSATNLSVIGFRILLLKVAGFNLLMTLRLWSSRAKRSGSGVKQTLNFDLLKLAGDVESNPGPSRGHMTEYKPTVRLATRDDVPRAVRTLAAAFADYPATRHTVDPDRHIERVTELQELFLTRVGLDIGKVWVADDGAAVAVWTTPESVEAGAVFAEIGPRMAELSGSRLAAQQQMEGLLAPHRPKEPAWFLATVGVSPDHQGKGLGSAVVLPGVEAAERAGVPAFLETSAPRNLPFYERLGFTVTADVEVPEGPRTWCMTRKPGA

SEQ ID NO: 19553 - protein, 476 aa, synthetic construct
MALPVTALLLPLALLLHAARPLEGQPKANPTVTLFPPSSEELQANKATLVCLISDFYPGAVTVAWKADGSPVKAGVETTKPSKQSNNKYAASSYLSLTPEQWKSHRSYSCQVTHEGSTVEKTVAPTECSPIKTDVITMDPKDNCSKDANDTLLLQLTNTSAYYMYLLLLLKSVVYFAIITCCLLRRTAFCCNGEKSRAKRSGSGATNFSLLKQAGDVEENPGPTSATMALPVTALLLPLALLLHAARPMDPDLEIRAAFLRQRNTALRTEVAELEQEVQRLENEVSQYETRYGPLGGGKTREEDLKNVFPPEVAVFEPSEAEISHTQKATLVCLATGFYPDHVELSWWVNGKEVHSGVCTDPQPLKEQPALNDSRYCLSSRLRVSATFWQNPRNHFRCQVQFYGLSENDEWTQDRAKPVTQIVSAEAWGRADCGFTSESYQQGVLSATNLSVIGFRILLLKVAGFNLLMTLRLWSS

SEQ ID NO: 19554 - protein, 476 aa, synthetic construct
MALPVTALLLPLALLLHAARPLEGQPKANPTVTLFPPSSEELQANKATLVCLISDFYPGAVTVAWKADGSPVKAGVETTKPSKQSNNKYAASSYLSLTPEQWKSHRSYSCQVTHEGSTVEKTVAPTECSPIKTDVITMDPKDNCSKDANDTLLLQLTNTSAYYMYLLLLLKSVVYFAIITCCLLRRTAFCCNGEKSRAKRSGSGATNFSLLKQAGDVEENPGPTSATMALPVTALLLPLALLLHAARPMDPDLEIEAAFLERENTALETRVAELRQRVQRLRNRVSQYRTRYGPLGGGKTREEDLKNVFPPEVAVFEPSEAEISHTQKATLVCLATGFYPDHVELSWWVNGKEVHSGVCTDPQPLKEQPALNDSRYCLSSRLRVSATFWQNPRNHFRCQVQFYGLSENDEWTQDRAKPVTQIVSAEAWGRADCGFTSESYQQGVLSATNLSVIGFRILLLKVAGFNLLMTLRLWSS

SEQ ID NO: 19555 - protein, 711 aa, synthetic construct
MALPVTALLLPLALLLHAARPLEGQPKANPTVTLFPPSSEELQANKATLVCLISDFYPGAVTVAWKADGSPVKAGVETTKPSKQSNNKYAASSYLSLTPEQWKSHRSYSCQVTHEGSTVEKTVAPTECSPIKTDVITMDPKDNCSKDANDTLLLQLTNTSAYYMYLLLLLKSVVYFAIITCCLLRRTAFCCNGEKSRAKRSGSGATNFSLLKQAGDVEENPGPTSATMALPVTALLLPLALLLHAARPLFNQEVQIPLTESYCGPCPKNWICYKNNCYQFFDESKNWYESQASCMSQNASLLKVYSKEDQDLLKLVKSAHWMGLVHIPTNGSWQWEDGSILSPNLLTIIEMQKGDCALYASSFKGYIENCSTPNTYICMQRTVSGGGGSGGGGSGGGGDLFNQEVQIPLTESYCGPCPKNWICYKNNCYQFFDESKNWYESQASCMSQNASLLKVYSKEDQDLLKLVKSAHWMGLVHIPTNGSWQWEDGSILSPNLLTIIEMQKGDCALYASSFKGYIENCSTPNTYICMQRTVTREEDLKNVFPPEVAVFEPSEAEISHTQKATLVCLATGFYPDHVELSWWVNGKEVHSGVCTDPQPLKEQPALNDSRYCLSSRLRVSATFWQNPRNHFRCQVQFYGLSENDEWTQDRAKPVTQIVSAEAWGRADCGFTSESYQQGVLSATNLSVIGFRILLLKVAGFNLLMTLRLWSS

SEQ ID NO: 19556 - protein, 711 aa, synthetic construct
MALPVTALLLPLALLLHAARPLEGQPKANPTVTLFPPSSEELQANKATLVCLISDFYPGAVTVAWKADGSPVKAGVETTKPSKQSNNKYAASSYLSLTPEQWKSHRSYSCQVTHEGSTVEKTVAPTECSPIKTDVITMDPKDNCSKDANDTLLLQLTNTSAYYMYLLLLLKSVVYFAIITCCLLRRTAFCCNGEKSRAKRSGSGATNFSLLKQAGDVEENPGPTSATMALPVTALLLPLALLLHAARPLFNQEVQIPLTESYCGPCPKNWICYKNNCYQFFDESKNWYESQASCMSQNASLLKVYSKEDQDLLKLVKSAHWMGLVHIPTNGSWQWEDGSILSPNLLTIIEMQKGDCALYASSFKGFIENCSTPNTYICMQRTVGGGGSGGGGSGGGGSDLFNQEVQIPLTESYCGPCPKNWICYKNNCYQFFDESKNWYESQASCMSQNASLLKVYSKEDQDLLKLVKSAHWMGLVHIPTNGSWQWEDGSILSPNLLTIIEMQKGDCALYASSFKGFIENCSTPNTYICMQRTVTREEDLKNVFPPEVAVFEPSEAEISHTQKATLVCLATGFYPDHVELSWWVNGKEVHSGVCTDPQPLKEQPALNDSRYCLSSRLRVSATFWQNPRNHFRCQVQFYGLSENDEWTQDRAKPVTQIVSAEAWGRADCGFTSESYQQGVLSATNLSVIGFRILLLKVAGFNLLMTLRLWSS

SEQ ID NO: 19557 - protein, 737 aa, synthetic construct
MALPVTALLLPLALLLHAARPLEGQPKANPTVTLFPPSSEELQANKATLVCLISDFYPGAVTVAWKADGSPVKAGVETTKPSKQSNNKYAASSYLSLTPEQWKSHRSYSCQVTHEGSTVEKTVAPTECSPIKTDVITMDPKDNCSKDANDTLLLQLTNTSAYYMYLLLLLKSVVYFAIITCCLLRRTAFCCNGEKSRAKRSGSGATNFSLLKQAGDVEENPGPTSMALPVTALLLPLALLLHAARPMDPDLEIRAAFLRQRNTALRTEVAELEQEVQRLENEVSQYETRYGPLGGGKGTGGGGSGGGGSGGGGSEFDIQMTQSPSSLSASVGDRVTITCKASDHINNWLAWYQQKPGQAPKLLIYGATTLETGVPSRFSGSGSGTDYTLTISSLQPEDFATYYCQQSWNTPWTFGQGTKLEIKRGGGGSGGGGSGGGGSQVQLQQPGAELVKPGASVKMSCKASGYAFSSYWINWMKQKPGQGLEWIGQIYPGDGDTNYNGKFKGRATLTADTSSSTAYMQLSSLTSEDSAVYFCARSITTVVGCAMDYWGQGTSVTVSSTREEDLKNVFPPEVAVFEPSEAEISHTQKATLVCLATGFYPDHVELSWWVNGKEVHSGVCTDPQPLKEQPALNDSRYCLSSRLRVSATFWQNPRNHFRCQVQFYGLSENDEWTQDRAKPVTQIVSAEAWGRADCGFTSESYQQGVLSATNLSVIGFRILLLKVAGFNLLMTLRLWSS

SEQ ID NO: 19558 - protein, 972 aa, synthetic construct
MALPVTALLLPLALLLHAARPLEGQPKANPTVTLFPPSSEELQANKATLVCLISDFYPGAVTVAWKADGSPVKAGVETTKPSKQSNNKYAASSYLSLTPEQWKSHRSYSCQVTHEGSTVEKTVAPTECSPIKTDVITMDPKDNCSKDANDTLLLQLTNTSAYYMYLLLLLKSVVYFAIITCCLLRRTAFCCNGEKSRAKRSGSGATNFSLLKQAGDVEENPGPTSMALPVTALLLPLALLLHAARPLFNQEVQIPLTESYCGPCPKNWICYKNNCYQFFDESKNWYESQASCMSQNASLLKVYSKEDQDLLKLVKSAHWMGLVHIPTNGSWQWEDGSILSPNLLTIIEMQKGDCALYASSFKGFIENCSTPNTYICMQRTVGGGGSGGGGSGGGGSDLFNQEVQIPLTESYCGPCPKNWICYKNNCYQFFDESKNWYESQASCMSQNASLLKVYSKEDQDLLKLVKSAHWMGLVHIPTNGSWQWEDGSILSPNLLTIIEMQKGDCALYASSFKGFIENCSTPNTYICMQRTVGTGGGGSGGGGSGGGGSEFDIQMTQSPSSLSASVGDRVTITCKASDHINNWLAWYQQKPGQAPKLLIYGATTLETGVPSRFSGSGSGTDYTLTISSLQPEDFATYYCQQSWNTPWTFGQGTKLEIKRGGGGSGGGGSGGGGSQVQLQQPGAELVKPGASVKMSCKASGYAFSSYWINWMKQKPGQGLEWIGQIYPGDGDTNYNGKFKGRATLTADTSSSTAYMQLSSLTSEDSAVYFCARSITTVVGCAMDYWGQGTSVTVSSTREEDLKNVFPPEVAVFEPSEAEISHTQKATLVCLATGFYPDHVELSWWVNGKEVHSGVCTDPQPLKEQPALNDSRYCLSSRLRVSATFWQNPRNHFRCQVQFYGLSENDEWTQDRAKPVTQIVSAEAWGRADCGFTSESYQQGVLSATNLSVIGFRILLLKVAGFNLLMTLRLWSS

SEQ ID NO: 19559 - protein, 677 aa, synthetic construct
MALPVTALLLPLALLLHAARPLEGQPKANPTVTLFPPSSEELQANKATLVCLISDFYPGAVTVAWKADGSPVKAGVETTKPSKQSNNKYAASSYLSLTPEQWKSHRSYSCQVTHEGSTVEKTVAPTECSPIKTDVITMDPKDNCSKDANDTLLLQLTNTSAYYMYLLLLLKSVVYFAIITCCLLRRTAFCCNGEKSRAKRSGSGATNFSLLKQAGDVEENPGPTSMALPVTALLLPLALLLHAARPQSVLTQPPSVSGAPGQRVTISCTGSSSNIGAGYDVHWYQQLPGTAPKLLIFGNSNRPSGVPDRFSGFKSGTSASLAITGLQAEDEADYFCQSYDSSLSGSGVFGTGTKVTVLGGGGGSGGGGSGGGGSQMQLVQSGGGLVQPGRSLRLSCAASGFTFDDYAMHWVRQAPGKGLEWVSGISWNSGSIGYADSVKGRFTISRDNAKNSLYLQMNSLRAEDTALYYCAKDIHSGSYYGLLYYAMDVWGQGTTVTVSSTREEDLKNVFPPEVAVFEPSEAEISHTQKATLVCLATGFYPDHVELSWWVNGKEVHSGVCTDPQPLKEQPALNDSRYCLSSRLRVSATFWQNPRNHFRCQVQFYGLSENDEWTQDRAKPVTQIVSAEAWGRADCGFTSESYQQGVLSATNLSVIGFRILLLKVAGFNLLMTLRLWSS

SEQ ID NO: 19560 - protein, 514 aa, synthetic construct
MALPVTALLLPLALLLHAARPLEGQPKANPTVTLFPPSSEELQANKATLVCLISDFYPGAVTVAWKADGSPVKAGVETTKPSKQSNNKYAASSYLSLTPEQWKSHRSYSCQVTHEGSTVEKTVAPTECSPIKTDVITMDPKDNCSKDANDTLLLQLTNTSAYYMYLLLLLKSVVYFAIITCCLLRRTAFCCNGEKSRAKRSGSGATNFSLLKQAGDVEENPGPTSMALPVTALLLPLALLLHAARPMCMPCFTTDHQMARKCDDCCGGKGRGKCYGPQCLCRLEGGGGSGGGGSGGGGSFEVCMPCFTTDQQMARKCSDCCGGKGRGKCYGPQCLCRTREEDLKNVFPPEVAVFEPSEAEISHTQKATLVCLATGFYPDHVELSWWVNGKEVHSGVCTDPQPLKEQPALNDSRYCLSSRLRVSATFWQNPRNHFRCQVQFYGLSENDEWTQDRAKPVTQIVSAEAWGRADCGFTSESYQQGVLSATNLSVIGFRILLLKVAGFNLLMTLRLWSS

SEQ ID NO: 19561 - protein, 724 aa, synthetic construct
MALPVTALLLPLALLLHAARPLEGQPKANPTVTLFPPSSEELQANKATLVCLISDFYPGAVTVAWKADGSPVKAGVETTKPSKQSNNKYAASSYLSLTPEQWKSHRSYSCQVTHEGSTVEKTVAPTECSPIKTDVITMDPKDNCSKDANDTLLLQLTNTSAYYMYLLLLLKSVVYFAIITCCLLRRTAFCCNGEKSRAKRSGSGATNFSLLKQAGDVEENPGPTSMALPVTALLLPLALLLHAARPFEVCMPCFTTDQQMARKCSDCCGGKGRGKCYGPQCLCRGTGGGGSGGGGSGGGGSEFDIQMTQSPSSLSASVGDRVTITCKASDHINNWLAWYQQKPGQAPKLLIYGATTLETGVPSRFSGSGSGTDYTLTISSLQPEDFATYYCQQSWNTPWTFGQGTKLEIKRGGGGSGGGGSGGGGSQVQLQQPGAELVKPGASVKMSCKASGYAFSSYWINWMKQKPGQGLEWIGQIYPGDGDTNYNGKFKGRATLTADTSSSTAYMQLSSLTSEDSAVYFCARSITTVVGCAMDYWGQGTSVTVSSTREEDLKNVFPPEVAVFEPSEAEISHTQKATLVCLATGFYPDHVELSWWVNGKEVHSGVCTDPQPLKEQPALNDSRYCLSSRLRVSATFWQNPRNHFRCQVQFYGLSENDEWTQDRAKPVTQIVSAEAWGRADCGFTSESYQQGVLSATNLSVIGFRILLLKVAGFNLLMTLRLWSS

SEQ ID NO: 19562 - protein, 854 aa, synthetic construct
MALPVTALLLPLALLLHAARPLEGQPKANPTVTLFPPSSEELQANKATLVCLISDFYPGAVTVAWKADGSPVKAGVETTKPSKQSNNKYAASSYLSLTPEQWKSHRSYSCQVTHEGSTVEKTVAPTECSPIKTDVITMDPKDNCSKDANDTLLLQLTNTSAYYMYLLLLLKSVVYFAIITCCLLRRTAFCCNGEKSRAKRSGSGATNFSLLKQAGDVEENPGPTSMALPVTALLLPLALLLHAARPFESPVAPACDPRLLNKLLRDSHLLHSRLSQCPDVDPLSIPVLLPAVDFSLGEWKTQTEQSKAQDILGAVSLLLEGVMAARGQLEPSCLSSLLGQLSGQVRLLLGALQGLLGTQLPLQGRTTAHKDPNALFLSLQQLLRGKVRFLLLVEGPTLCVRRTLPTTAVPSSTSGTGGGGSGGGGSGGGGSEFDIQMTQSPSSLSASVGDRVTITCKASDHINNWLAWYQQKPGQAPKLLIYGATTLETGVPSRFSGSGSGTDYTLTISSLQPEDFATYYCQQSWNTPWTFGQGTKLEIKRGGGGSGGGGSGGGGSQVQLQQPGAELVKPGASVKMSCKASGYAFSSYWINWMKQKPGQGLEWIGQIYPGDGDTNYNGKFKGRATLTADTSSSTAYMQLSSLTSEDSAVYFCARSITTVVGCAMDYWGQGTSVTVSSTREEDLKNVFPPEVAVFEPSEAEISHTQKATLVCLATGFYPDHVELSWWVNGKEVHSGVCTDPQPLKEQPALNDSRYCLSSRLRVSATFWQNPRNHFRCQVQFYGLSENDEWTQDRAKPVTQIVSAEAWGRADCGFTSESYQQGVLSATNLSVIGFRILLLKVAGFNLLMTLRLWSS

SEQ ID NO: 19563 - protein, 761 aa, synthetic construct
MALPVTALLLPLALLLHAARPLEGQPKANPTVTLFPPSSEELQANKATLVCLISDFYPGAVTVAWKADGSPVKAGVETTKPSKQSNNKYAASSYLSLTPEQWKSHRSYSCQVTHEGSTVEKTVAPTECSPIKTDVITMDPKDNCSKDANDTLLLQLTNTSAYYMYLLLLLKSVVYFAIITCCLLRRTAFCCNGEKSRAKRSGSGATNFSLLKQAGDVEENPGPTSMALPVTALLLPLALLLHAARPFEMGSWEEFELRLNAIEERLYALGGSEAELAYFEYVIADFEGNLQRYKGKGNPEVEALYFEADAIFEELVAYRHNGTGGGGSGGGGSGGGGSEFDIQMTQSPSSLSASVGDRVTITCKASDHINNWLAWYQQKPGQAPKLLIYGATTLETGVPSRFSGSGSGTDYTLTISSLQPEDFATYYCQQSWNTPWTFGQGTKLEIKRGGGGSGGGGSGGGGSQVQLQQPGAELVKPGASVKMSCKASGYAFSSYWINWMKQKPGQGLEWIGQIYPGDGDTNYNGKFKGRATLTADTSSSTAYMQLSSLTSEDSAVYFCARSITTVVGCAMDYWGQGTSVTVSSTREEDLKNVFPPEVAVFEPSEAEISHTQKATLVCLATGFYPDHVELSWWVNGKEVHSGVCTDPQPLKEQPALNDSRYCLSSRLRVSATFWQNPRNHFRCQVQFYGLSENDEWTQDRAKPVTQIVSAEAWGRADCGFTSESYQQGVLSATNLSVIGFRILLLKVAGFNLLMTLRLWSS

SEQ ID NO: 19564 - protein, 895 aa, synthetic construct
MALPVTALLLPLALLLHAARPLEEASTKGPSVFPLAPSSKSTSGGTAALGCLVKDYFPEPVTVSWNSGALTSGVHTFPAVLQSSGLYSLSSVVTVPSSSLGTQTYICNVNHKPSNTKVDKRVEPKSCPIKTDVITMDPKDNCSKDANDTLLLQLTNTSAYYMYLLLLLKSVVYFAIITCCLLRRTAFCCNGEKSRAKRSGSGATNFSLLKQAGDVEENPGPTSMALPVTALLLPLALLLHAARPDIQMTQTTSSLSASLGDRVTISCRASQDISKYLNWYQQKPDGTVKLLIYHTSRLHSGVPSRFSGSGSGTDYSLTISNLEQEDIATYFCQQGNTLPYTFGGGTKLEITGGGGSGGGGSGGGGSEVKLQESGPGLVAPSQSLSVTCTVSGVSLPDYGVSWIRQPPRKGLEWLGVIWGSETTYYNSALKSRLTIIKDNSKSQVFLKMNSLQTDDTAIYYCAKHYYYGGSYAMDYWGQGTSVTVSSTRGQPKANPTVTLFPPSSEELQANKATLVCLISDFYPGAVTVAWKADGSPVKAGVETTKPSKQSNNKYAASSYLSLTPEQWKSHRSYSCQVTHEGSTVEKTVAPTECSEVKTDSTDHVKPKETENTKQPSKSCHKPKAIVHTEKVNMMSLTVLGLRMLFAKTVAVNFLLTAKLFFLRAKRSGSGVKQTLNFDLLKLAGDVESNPGPSRGHMTEYKPTVRLATRDDVPRAVRTLAAAFADYPATRHTVDPDRHIERVTELQELFLTRVGLDIGKVWVADDGAAVAVWTTPESVEAGAVFAEIGPRMAELSGSRLAAQQQMEGLLAPHRPKEPAWFLATVGVSPDHQGKGLGSAVVLPGVEAAERAGVPAFLETSAPRNLPFYERLGFTVTADVEVPEGPRTWCMTRKPGA

SEQ ID NO: 19565 - protein, 896 aa, synthetic construct
MALPVTALLLPLALLLHAARPLEEASTKGPSVFPLAPSSKSTSGGTAALGCLVKDYFPEPVTVSWNSGALTSGVHTFPAVLQSSGLYSLSSVVTVPSSSLGTQTYICNVNHKPSNTKVDKRVEPKSCPIKTDVITMDPKDNCSKDANDTLLLQLTNTSAYYMYLLLLLKSVVYFAIITCCLLRRTAFCCNGEKSRAKRSGSGATNFSLLKQAGDVEENPGPTSTMALPVTALLLPLALLLHAARPEIVMTQSPATLSLSPGERATLSCRASQDISKYLNWYQQKPGQAPRLLIYHTSRLHSGIPARFSGSGSGTDYTLTISSLQPEDFAVYFCQQGNTLPYTFGQGTKLEIKGGGGSGGGGSGGGGSQVQLQESGPGLVKPSETLSLTCTVSGVSLPDYGVSWIRQPPGKGLEWIGVIWGSETTYYNSSLKSRVTISKDNSKNQVSLKLSSVTAADTAVYYCAKHYYYGGSYAMDYWGQGTLVTVSSTRGQPKANPTVTLFPPSSEELQANKATLVCLISDFYPGAVTVAWKADGSPVKAGVETTKPSKQSNNKYAASSYLSLTPEQWKSHRSYSCQVTHEGSTVEKTVAPTECSEVKTDSTDHVKPKETENTKQPSKSCHKPKAIVHTEKVNMMSLTVLGLRMLFAKTVAVNFLLTAKLFFLRAKRSGSGVKQTLNFDLLKLAGDVESNPGPSRGHMTEYKPTVRLATRDDVPRAVRTLAAAFADYPATRHTVDPDRHIERVTELQELFLTRVGLDIGKVWVADDGAAVAVWTTPESVEAGAVFAEIGPRMAELSGSRLAAQQQMEGLLAPHRPKEPAWFLATVGVSPDHQGKGLGSAVVLPGVEAAERAGVPAFLETSAPRNLPFYERLGFTVTADVEVPEGPRTWCMTRKPGA

SEQ ID NO: 19566 - protein, 897 aa, synthetic construct
MALPVTALLLPLALLLHAARPLEEASTKGPSVFPLAPSSKSTSGGTAALGCLVKDYFPEPVTVSWNSGALTSGVHTFPAVLQSSGLYSLSSVVTVPSSSLGTQTYICNVNHKPSNTKVDKRVEPKSCPIKTDVITMDPKDNCSKDANDTLLLQLTNTSAYYMYLLLLLKSVVYFAIITCCLLRRTAFCCNGEKSRAKRSGSGATNFSLLKQAGDVEENPGPTSTMALPVTALLLPLALLLHAARPDEIVLTQSPATLSLSPGERATLSCSASSSVSYMHWYQQKPGQAPRLLIYDTSKLASGIPARFSGSGSGTDFTLTISSLEPEDVAVYYCFQGSVYPFTFGQGTKLEIKRGGGGSGGGGSGGGGSQVQLQESGPGLVKPSQTLSLTCTVSGGSISTSGMGVGWIRQHPGKGLEWIGHIWWDDDKRYNPALKSRVTISVDTSKNQFSLKLSSVTAADTAVYYCARMELWSYYFDYWGQGTLVTVSSTRGQPKANPTVTLFPPSSEELQANKATLVCLISDFYPGAVTVAWKADGSPVKAGVETTKPSKQSNNKYAASSYLSLTPEQWKSHRSYSCQVTHEGSTVEKTVAPTECSEVKTDSTDHVKPKETENTKQPSKSCHKPKAIVHTEKVNMMSLTVLGLRMLFAKTVAVNFLLTAKLFFLRAKRSGSGVKQTLNFDLLKLAGDVESNPGPSRGHMTEYKPTVRLATRDDVPRAVRTLAAAFADYPATRHTVDPDRHIERVTELQELFLTRVGLDIGKVWVADDGAAVAVWTTPESVEAGAVFAEIGPRMAELSGSRLAAQQQMEGLLAPHRPKEPAWFLATVGVSPDHQGKGLGSAVVLPGVEAAERAGVPAFLETSAPRNLPFYERLGFTVTADVEVPEGPRTWCMTRKPGA

SEQ ID NO: 19567 - protein, 893 aa, synthetic construct
MALPVTALLLPLALLLHAARPLEEASTKGPSVFPLAPSSKSTSGGTAALGCLVKDYFPEPVTVSWNSGALTSGVHTFPAVLQSSGLYSLSSVVTVPSSSLGTQTYICNVNHKPSNTKVDKRVEPKSCPIKTDVITMDPKDNCSKDANDTLLLQLTNTSAYYMYLLLLLKSVVYFAIITCCLLRRTAFCCNGEKSRAKRSGSGATNFSLLKQAGDVEENPGPTSMALPVTALLLPLALLLHAARPDIQMTQSPSSLSASVGDRVTITCRASQDISNYLNWYQQKPGKAPKLLIYYTSRLHSGVPSRFSGSGSGTDFTLTISSLQPEDFATYYCQQGNTLPYTFGQGTKVEIKRGGGGSGGGGSGGGGSEVQLVESGGGLVQPGGSLRLSCAASGFTFSDYFMSWVRQAPGKGLEWVATISNGGTYTYYPDSVKGRFTISRDNSKNTLYLQMNSLRAEDTAVYYCARFDGYIFDYWGQGTLVTVSSTRGQPKANPTVTLFPPSSEELQANKATLVCLISDFYPGAVTVAWKADGSPVKAGVETTKPSKQSNNKYAASSYLSLTPEQWKSHRSYSCQVTHEGSTVEKTVAPTECSEVKTDSTDHVKPKETENTKQPSKSCHKPKAIVHTEKVNMMSLTVLGLRMLFAKTVAVNFLLTAKLFFLRAKRSGSGVKQTLNFDLLKLAGDVESNPGPSRGHMTEYKPTVRLATRDDVPRAVRTLAAAFADYPATRHTVDPDRHIERVTELQELFLTRVGLDIGKVWVADDGAAVAVWTTPESVEAGAVFAEIGPRMAELSGSRLAAQQQMEGLLAPHRPKEPAWFLATVGVSPDHQGKGLGSAVVLPGVEAAERAGVPAFLETSAPRNLPFYERLGFTVTADVEVPEGPRTWCMTRKPGA

SEQ ID NO: 19568 - protein, 897 aa, synthetic construct
MALPVTALLLPLALLLHAARPLEEASTKGPSVFPLAPSSKSTSGGTAALGCLVKDYFPEPVTVSWNSGALTSGVHTFPAVLQSSGLYSLSSVVTVPSSSLGTQTYICNVNHKPSNTKVDKRVEPKSCPIKTDVITMDPKDNCSKDANDTLLLQLTNTSAYYMYLLLLLKSVVYFAIITCCLLRRTAFCCNGEKSRAKRSGSGATNFSLLKQAGDVEENPGPTSMALPVTALLLPLALLLHAARPDIQMTQSPSSLSASVGDRVTITCKASDHINNWLAWYQQKPGQAPKLLIYGATTLETGVPSRFSGSGSGTDYTLTISSLQPEDFATYYCQQSWNTPWTFGQGTKLEIKRGGGGSGGGGSGGGGSQVQLQQPGAELVKPGASVKMSCKASGYAFSSYWINWMKQKPGQGLEWIGQIYPGDGDTNYNGKFKGRATLTADTSSSTAYMQLSSLTSEDSAVYFCARSITTVVGCAMDYWGQGTSVTVSSTRGQPKANPTVTLFPPSSEELQANKATLVCLISDFYPGAVTVAWKADGSPVKAGVETTKPSKQSNNKYAASSYLSLTPEQWKSHRSYSCQVTHEGSTVEKTVAPTECSEVKTDSTDHVKPKETENTKQPSKSCHKPKAIVHTEKVNMMSLTVLGLRMLFAKTVAVNFLLTAKLFFLRAKRSGSGVKQTLNFDLLKLAGDVESNPGPSRGHMTEYKPTVRLATRDDVPRAVRTLAAAFADYPATRHTVDPDRHIERVTELQELFLTRVGLDIGKVWVADDGAAVAVWTTPESVEAGAVFAEIGPRMAELSGSRLAAQQQMEGLLAPHRPKEPAWFLATVGVSPDHQGKGLGSAVVLPGVEAAERAGVPAFLETSAPRNLPFYERLGFTVTADVEVPEGPRTWCMTRKPGA

SEQ ID NO: 19569 - protein, 899 aa, synthetic construct
MALPVTALLLPLALLLHAARPLEEASTKGPSVFPLAPSSKSTSGGTAALGCLVKDYFPEPVTVSWNSGALTSGVHTFPAVLQSSGLYSLSSVVTVPSSSLGTQTYICNVNHKPSNTKVDKRVEPKSCPIKTDVITMDPKDNCSKDANDTLLLQLTNTSAYYMYLLLLLKSVVYFAIITCCLLRRTAFCCNGEKSRAKRSGSGATNFSLLKQAGDVEENPGPTSMALPVTALLLPLALLLHAARPQIVLSQSPAILSASPGEKVTMTCRASSSVSYMHWYQQKPGSSPKPWIYATSNLASGVPARFSGSGSGTSYSFTISRVEAEDAATYYCQQWTFNPPTFGGGTRLEIKRTVAAGGGGSGGGGSGGGGSQAYLQQSGAELVRPGASVKMSCKASGYTFTSYNMHWVKQTPRQGLEWIGGIYPGNGDTSYNQKFKGKATLTVGKSSSTAYMQLSSLTSEDSAVYFCARYDYNYAMDYWGQGTSVTVSSASTRGQPKANPTVTLFPPSSEELQANKATLVCLISDFYPGAVTVAWKADGSPVKAGVETTKPSKQSNNKYAASSYLSLTPEQWKSHRSYSCQVTHEGSTVEKTVAPTECSEVKTDSTDHVKPKETENTKQPSKSCHKPKAIVHTEKVNMMSLTVLGLRMLFAKTVAVNFLLTAKLFFLRAKRSGSGVKQTLNFDLLKLAGDVESNPGPSRGHMTEYKPTVRLATRDDVPRAVRTLAAAFADYPATRHTVDPDRHIERVTELQELFLTRVGLDIGKVWVADDGAAVAVWTTPESVEAGAVFAEIGPRMAELSGSRLAAQQQMEGLLAPHRPKEPAWFLATVGVSPDHQGKGLGSAVVLPGVEAAERAGVPAFLETSAPRNLPFYERLGFTVTADVEVPEGPRTWCMTRKPGA

SEQ ID NO: 19570 - protein, 897 aa, synthetic construct
MALPVTALLLPLALLLHAARPLEEASTKGPSVFPLAPSSKSTSGGTAALGCLVKDYFPEPVTVSWNSGALTSGVHTFPAVLQSSGLYSLSSVVTVPSSSLGTQTYICNVNHKPSNTKVDKRVEPKSCPIKTDVITMDPKDNCSKDANDTLLLQLTNTSAYYMYLLLLLKSVVYFAIITCCLLRRTAFCCNGEKSRAKRSGSGATNFSLLKQAGDVEENPGPTSMALPVTALLLPLALLLHAARPEIVLTQSPATLSLSPGERATLSCRASQSVSSYLAWYQQKPGQAPRLLIYDASNRATGIPARFSGSGSGTDFTLTISSLEPEDFAVYYCQQRSNWPITFGQGTRLEIKGGGGSGGGGSGGGGSEVQLVESGGGLVQPDRSLRLSCAASGFTFHDYAMHWVRQAPGKGLEWVSTISWNSGTIGYADSVKGRFTISRDNAKNSLYLQMNSLRAEDTALYYCAKDIQYGNYYYGMDVWGQGTTVTVSSTRGQPKANPTVTLFPPSSEELQANKATLVCLISDFYPGAVTVAWKADGSPVKAGVETTKPSKQSNNKYAASSYLSLTPEQWKSHRSYSCQVTHEGSTVEKTVAPTECSEVKTDSTDHVKPKETENTKQPSKSCHKPKAIVHTEKVNMMSLTVLGLRMLFAKTVAVNFLLTAKLFFLRAKRSGSGVKQTLNFDLLKLAGDVESNPGPSRGHMTEYKPTVRLATRDDVPRAVRTLAAAFADYPATRHTVDPDRHIERVTELQELFLTRVGLDIGKVWVADDGAAVAVWTTPESVEAGAVFAEIGPRMAELSGSRLAAQQQMEGLLAPHRPKEPAWFLATVGVSPDHQGKGLGSAVVLPGVEAAERAGVPAFLETSAPRNLPFYERLGFTVTADVEVPEGPRTWCMTRKPGA

SEQ ID NO: 19571 - protein, 895 aa, synthetic construct
MALPVTALLLPLALLLHAARPLEEASTKGPSVFPLAPSSKSTSGGTAALGCLVKDYFPEPVTVSWNSGALTSGVHTFPAVLQSSGLYSLSSVVTVPSSSLGTQTYICNVNHKPSNTKVDKRVEPKSCPIKTDVITMDPKDNCSKDANDTLLLQLTNTSAYYMYLLLLLKSVVYFAIITCCLLRRTAFCCNGEKSRAKRSGSGATNFSLLKQAGDVEENPGPTSMALPVTALLLPLALLLHAARPDIQMTQSPSSLSASVGDRVTITCRASQDVNTAVAWYQQKPGKAPKLLIYSASFLESGVPSRFSGSRSGTDFTLTISSLQPEDFATYYCQQHYTTPPTFGQTKVEIKRGGGGSGGGGSGGGGSEVQLVESGGGLVQPGGSLRLSCAASGFNIKDTYIHWVRQAPGKGLEWVARIYPTNGYTRYADSVKGRFTISADTSKNTAYLQMNSLRAEDTAVYYCSRWGGDGFYAMDVWGQGTLVTVSSTRGQPKANPTVTLFPPSSEELQANKATLVCLISDFYPGAVTVAWKADGSPVKAGVETTKPSKQSNNKYAASSYLSLTPEQWKSHRSYSCQVTHEGSTVEKTVAPTECSEVKTDSTDHVKPKETENTKQPSKSCHKPKAIVHTEKVNMMSLTVLGLRMLFAKTVAVNFLLTAKLFFLRAKRSGSGVKQTLNFDLLKLAGDVESNPGPSRGHMTEYKPTVRLATRDDVPRAVRTLAAAFADYPATRHTVDPDRHIERVTELQELFLTRVGLDIGKVWVADDGAAVAVWTTPESVEAGAVFAEIGPRMAELSGSRLAAQQQMEGLLAPHRPKEPAWFLATVGVSPDHQGKGLGSAVVLPGVEAAERAGVPAFLETSAPRNLPFYERLGFTVTADVEVPEGPRTWCMTRKPGA

SEQ ID NO: 19572 - protein, 774 aa, synthetic construct
MALPVTALLLPLALLLHAARPLEEASTKGPSVFPLAPSSKSTSGGTAALGCLVKDYFPEPVTVSWNSGALTSGVHTFPAVLQSSGLYSLSSVVTVPSSSLGTQTYICNVNHKPSNTKVDKRVEPKSCPIKTDVITMDPKDNCSKDANDTLLLQLTNTSAYYMYLLLLLKSVVYFAIITCCLLRRTAFCCNGEKSRAKRSGSGATNFSLLKQAGDVEENPGPTSMALPVTALLLPLALLLHAARPDEFEVQLVESGGGLVQAGGSLRLSCAASGITFSINTMGWYRQAPGKQRELVALISSIGDTYYADSVKGRFTISRDNAKNTVYLQMNSLKPEDTAVYYCKRFRTAAQGTDYWGQGTQVTVSSTRGQPKANPTVTLFPPSSEELQANKATLVCLISDFYPGAVTVAWKADGSPVKAGVETTKPSKQSNNKYAASSYLSLTPEQWKSHRSYSCQVTHEGSTVEKTVAPTECSEVKTDSTDHVKPKETENTKQPSKSCHKPKAIVHTEKVNMMSLTVLGLRMLFAKTVAVNFLLTAKLFFLRAKRSGSGVKQTLNFDLLKLAGDVESNPGPSRGHMTEYKPTVRLATRDDVPRAVRTLAAAFADYPATRHTVDPDRHIERVTELQELFLTRVGLDIGKVWVADDGAAVAVWTTPESVEAGAVFAEIGPRMAELSGSRLAAQQQMEGLLAPHRPKEPAWFLATVGVSPDHQGKGLGSAVVLPGVEAAERAGVPAFLETSAPRNLPFYERLGFTVTADVEVPEGPRTWCMTRKPGA

SEQ ID NO: 19573 - protein, 774 aa, synthetic construct; identical to SEQ ID NO: 19572

SEQ ID NO: 19574 - protein, 1039 aa, synthetic construct
MALPVTALLLPLALLLHAARPLEEASTKGPSVFPLAPSSKSTSGGTAALGCLVKDYFPEPVTVSWNSGALTSGVHTFPAVLQSSGLYSLSSVVTVPSSSLGTQTYICNVNHKPSNTKVDKRVEPKSCPIKTDVITMDPKDNCSKDANDTLLLQLTNTSAYYMYLLLLLKSVVYFAIITCCLLRRTAFCCNGEKSRAKRSGSGATNFSLLKQAGDVEENPGPTSMALPVTALLLPLALLLHAARPQVQLVESGGGLVQAGDSVTLSCTASGRTFSSYALAWFRQRPGKEREFVAGLRWGGPTNYADSVKDRFTISGDSAKHTMYLQMNSLKPEDTAVYYCGYNPGGWAVPSQYEYDSWGQGTQVTVSSGTGGGGSGGGGSGGGGSEFDIQMTQSPSSLSASVGDRVTITCKASDHINNWLAWYQQKPGQAPKLLIYGATTLETGVPSRFSGSGSGTDYTLTISSLQPEDFATYYCQQSWNTPWTFGQGTKLEIKRGGGGSGGGGSGGGGSQVQLQQPGAELVKPGASVKMSCKASGYAFSSYWINWMKQKPGQGLEWIGQIYPGDGDTNYNGKFKGRATLTADTSSSTAYMQLSSLTSEDSAVYFCARSITTVVGCAMDYWGQGTSVTVSSTRGQPKANPTVTLFPPSSEELQANKATLVCLISDFYPGAVTVAWKADGSPVKAGVETTKPSKQSNNKYAASSYLSLTPEQWKSHRSYSCQVTHEGSTVEKTVAPTECSEVKTDSTDHVKPKETENTKQPSKSCHKPKAIVHTEKVNMMSLTVLGLRMLFAKTVAVNFLLTAKLFFLRAKRSGSGVKQTLNFDLLKLAGDVESNPGPSRGHMTEYKPTVRLATRDDVPRAVRTLAAAFADYPATRHTVDPDRHIERVTELQELFLTRVGLDIGKVWVADDGAAVAVWTTPESVEAGAVFAEIGPRMAELSGSRLAAQQQMEGLLAPHRPKEPAWFLATVGVSPDHQGKGLGSAVVLPGVEAAERAGVPAFLETSAPRNLPFYERLGFTVTADVEVPEGPRTWCMTRKPGA

SEQ ID NO: 19575 - protein, 1168 aa, synthetic construct
MALPVTALLLPLALLLHAARPLEEASTKGPSVFPLAPSSKSTSGGTAALGCLVKDYFPEPVTVSWNSGALTSGVHTFPAVLQSSGLYSLSSVVTVPSSSLGTQTYICNVNHKPSNTKVDKRVEPKSCPIKTDVITMDPKDNCSKDANDTLLLQLTNTSAYYMYLLLLLKSVVYFAIITCCLLRRTAFCCNGEKSRAKRSGSGATNFSLLKQAGDVEENPGPTSMALPVTALLLPLALLLHAARPEVQLLESGGGLVQPGGSLRLSCAASGFTFSSYAMSWVRQAPGKGLEWVSSISGSGDYIYYADSVKGRFTISRDISKNTLYLQMNSLRAEDTAVYYCAKEGTGANSSLADYRGQGTLVTVSSGGGSGGGSQVQLVESGGGLVQAGDSVTLSCTASGRTFSSYALAWFRQRPGKEREFVAGLRWGGPTNYADSVKDRFTISGDSAKHTMYLQMNSLKPEDTAVYYCGYNPGGWAVPSQYEYDSWGQGTQVTVSSGTGGGGSGGGGSGGGGSEFDIQMTQSPSSLSASVGDRVTITCKASDHINNWLAWYQQKPGQAPKLLIYGATTLETGVPSRFSGSGSGTDYTLTISSLQPEDFATYYCQQSWNTPWTFGQGTKLEIKRGGGGSGGGGSGGGGSQVQLQQPGAELVKPGASVKMSCKASGYAFSSYWINWMKQKPGQGLEWIGQIYPGDGDTNYNGKFKGRATLTADTSSSTAYMQLSSLTSEDSAVYFCARSITTVVGCAMDYWGQGTSVTVSSTRGQPKANPTVTLFPPSSEELQANKATLVCLISDFYPGAVTVAWKADGSPVKAGVETTKPSKQSNNKYAASSYLSLTPEQWKSHRSYSCQVTHEGSTVEKTVAPTECSEVKTDSTDHVKPKETENTKQPSKSCHKPKAIVHTEKVNMMSLTVLGLRMLFAKTVAVNFLLTAKLFFLRAKRSGSGVKQTLNFDLLKLAGDVESNPGPSRGHMTEYKPTVRLATRDDVPRAVRTLAAAFADYPATRHTVDPDRHIERVTELQELFLTRVGLDIGKVWVADDGAAVAVWTTPESVEAGAVFAEIGPRMAELSGSRLAAQQQMEGLLAPHRPKEPAWFLATVGVSPDHQGKGLGSAVVLPGVEAAERAGVPAFLETSAPRNLPFYERLGFTVTADVEVPEGPRTWCMTRKPGA

SEQ ID NO: 19576 - protein, 1166 aa, synthetic construct
MALPVTALLLPLALLLHAARPLEEASTKGPSVFPLAPSSKSTSGGTAALGCLVKDYFPEPVTVSWNSGALTSGVHTFPAVLQSSGLYSLSSVVTVPSSSLGTQTYICNVNHKPSNTKVDKRVEPKSCPIKTDVITMDPKDNCSKDANDTLLLQLTNTSAYYMYLLLLLKSVVYFAIITCCLLRRTAFCCNGEKSRAKRSGSGATNFSLLKQAGDVEENPGPTSMALPVTALLLPLALLLHAARPGVTQSPTHLIKTRGQQATLRCSPISGHTSVYWYQQALGLGLQFLLWYDEGEERNRGNFPPRFSGRQFPNYSSELNVNALELEDSALYLCASSLGGPRGLAGLRGDEQFFGPGTRLTVLEGGGSGGGSQVQLVESGGGLVQAGDSVTLSCTASGRTFSSYALAWFRQRPGKEREFVAGLRWGGPTNYADSVKDRFTISGDSAKHTMYLQMNSLKPEDTAVYYCGYNPGGWAVPSQYEYDSWGQGTQVTVSSGTGGGGSGGGGSGGGGSEFDIQMTQSPSSLSASVGDRVTITCKASDHINNWLAWYQQKPGQAPKLLIYGATTLETGVPSRFSGSGSGTDYTLTISSLQPEDFATYYCQQSWNTPWTFGQGTKLEIKRGGGGSGGGGSGGGGSQVQLQQPGAELVKPGASVKMSCKASGYAFSSYWINWMKQKPGQGLEWIGQIYPGDGDTNYNGKFKGRATLTADTSSSTAYMQLSSLTSEDSAVYFCARSITTVVGCAMDYWGQGTSVTVSSTRGQPKANPTVTLFPPSSEELQANKATLVCLISDFYPGAVTVAWKADGSPVKAGVETTKPSKQSNNKYAASSYLSLTPEQWKSHRSYSCQVTHEGSTVEKTVAPTECSEVKTDSTDHVKPKETENTKQPSKSCHKPKAIVHTEKVNMMSLTVLGLRMLFAKTVAVNFLLTAKLFFLRAKRSGSGVKQTLNFDLLKLAGDVESNPGPSRGHMTEYKPTVRLATRDDVPRAVRTLAAAFADYPATRHTVDPDRHIERVTELQELFLTRVGLDIGKVWVADDGAAVAVWTTPESVEAGAVFAEIGPRMAELSGSRLAAQQQMEGLLAPHRPKEPAWFLATVGVSPDHQGKGLGSAVVLPGVEAAERAGVPAFLETSAPRNLPFYERLGFTVTADVEVPEGPRTWCMTRKPGA

SEQ ID NO: 19577 - protein, 1160 aa, synthetic construct
MALPVTALLLPLALLLHAARPLEEASTKGPSVFPLAPSSKSTSGGTAALGCLVKDYFPEPVTVSWNSGALTSGVHTFPAVLQSSGLYSLSSVVTVPSSSLGTQTYICNVNHKPSNTKVDKRVEPKSCPIKTDVITMDPKDNCSKDANDTLLLQLTNTSAYYMYLLLLLKSVVYFAIITCCLLRRTAFCCNGEKSRAKRSGSGATNFSLLKQAGDVEENPGPTSMALPVTALLLPLALLLHAARPGVTQSPTHLIKTRGQQATLRCSPISGHTSVYWYQQALGLGLQFLLWYDEGEERNRGNFPPRFSGRQFPNYSSELNVNALELEDSALYLCASSLGGPRGLAGLRGDEQFFGPGTRLTVLEGGGSGGGSGVTQSPTHLIKTRGQQATLRCSPISGHTSVYWYQQALGLGLQFLLWYDEGEERNRGNFPPRFSGRQFPNYSSELNVNALELEDSALYLCASSLGGDELGADGNEQFFGPGTRLTVLEGTGGGGSGGGGSGGGGSEFDIQMTQSPSSLSASVGDRVTITCKASDHINNWLAWYQQKPGQAPKLLIYGATTLETGVPSRFSGSGSGTDYTLTISSLQPEDFATYYCQQSWNTPWTFGQGTKLEIKRGGGGSGGGGSGGGGSQVQLQQPGAELVKPGASVKMSCKASGYAFSSYWINWMKQKPGQGLEWIGQIYPGDGDTNYNGKFKGRATLTADTSSSTAYMQLSSLTSEDSAVYFCARSITTVVGCAMDYWGQGTSVTVSSTRGQPKANPTVTLFPPSSEELQANKATLVCLISDFYPGAVTVAWKADGSPVKAGVETTKPSKQSNNKYAASSYLSLTPEQWKSHRSYSCQVTHEGSTVEKTVAPTECSEVKTDSTDHVKPKETENTKQPSKSCHKPKAIVHTEKVNMMSLTVLGLRMLFAKTVAVNFLLTAKLFFLRAKRSGSGVKQTLNFDLLKLAGDVESNPGPSRGHMTEYKPTVRLATRDDVPRAVRTLAAAFADYPATRHTVDPDRHIERVTELQELFLTRVGLDIGKVWVADDGAAVAVWTTPESVEAGAVFAEIGPRMAELSGSRLAAQQQMEGLLAPHRPKEPAWFLATVGVSPDHQGKGLGSAVVLPGVEAAERAGVPAFLETSAPRNLPFYERLGFTVTADVEVPEGPRTWCMTRKPGA

SEQ ID NO: 19578 - protein, 780 aa, synthetic construct
MALPVTALLLPLALLLHAARPLEEASTKGPSVFPLAPSSKSTSGGTAALGCLVKDYFPEPVTVSWNSGALTSGVHTFPAVLQSSGLYSLSSVVTVPSSSLGTQTYICNVNHKPSNTKVDKRVEPKSCPIKTDVITMDPKDNCSKDANDTLLLQLTNTSAYYMYLLLLLKSVVYFAIITCCLLRRTAFCCNGEKSRAKRSGSGATNFSLLKQAGDVEENPGPTSMALPVTALLLPLALLLHAARPDEFGSDLGIKLLFAAAKGQDDEVRILLAAGADVNAKDFEGYTPLHVAAYDGHLEIVEVLLKAGADVNAKDSQGRTPLHEAAYSGHLEIVEVLLKAGADVNAQDDAGETPADLAAAWGHEDIAEVLQKTRGQPKANPTVTLFPPSSEELQANKATLVCLISDFYPGAVTVAWKADGSPVKAGVETTKPSKQSNNKYAASSYLSLTPEQWKSHRSYSCQVTHEGSTVEKTVAPTECSEVKTDSTDHVKPKETENTKQPSKSCHKPKAIVHTEKVNMMSLTVLGLRMLFAKTVAVNFLLTAKLFFLRAKRSGSGVKQTLNFDLLKLAGDVESNPGPSRGHMTEYKPTVRLATRDDVPRAVRTLAAAFADYPATRHTVDPDRHIERVTELQELFLTRVGLDIGKVWVADDGAAVAVWTTPESVEAGAVFAEIGPRMAELSGSRLAAQQQMEGLLAPHRPKEPAWFLATVGVSPDHQGKGLGSAVVLPGVEAAERAGVPAFLETSAPRNLPFYERLGFTVTADVEVPEGPRTWCMTRKPGA

SEQ ID NO: 19579 - protein, 709 aa, synthetic construct
MALPVTALLLPLALLLHAARPLEEASTKGPSVFPLAPSSKSTSGGTAALGCLVKDYFPEPVTVSWNSGALTSGVHTFPAVLQSSGLYSLSSVVTVPSSSLGTQTYICNVNHKPSNTKVDKRVEPKSCPIKTDVITMDPKDNCSKDANDTLLLQLTNTSAYYMYLLLLLKSVVYFAIITCCLLRRTAFCCNGEKSRAKRSGSGATNFSLLKQAGDVEENPGPTSMDWIWRILFLVGAATGAHSFEGSGFEYAKEMRNAYWEIALLPNLTNQQKRAPIRKLYDDPSQSSELLSEAKKLNDSQTRGQPKANPTVTLFPPSSEELQANKATLVCLISDFYPGAVTVAWKADGSPVKAGVETTKPSKQSNNKYAASSYLSLTPEQWKSHRSYSCQVTHEGSTVEKTVAPTECSEVKTDSTDHVKPKETENTKQPSKSCHKPKAIVHTEKVNMMSLTVLGLRMLFAKTVAVNFLLTAKLFFLRAKRSGSGVKQTLNFDLLKLAGDVESNPGPSRGHMTEYKPTVRLATRDDVPRAVRTLAAAFADYPATRHTVDPDRHIERVTELQELFLTRVGLDIGKVWVADDGAAVAVWTTPESVEAGAVFAEIGPRMAELSGSRLAAQQQMEGLLAPHRPKEPAWFLATVGVSPDHQGKGLGSAVVLPGVEAAERAGVPAFLETSAPRNLPFYERLGFTVTADVEVPEGPRTWCMTRKPGA

SEQ ID NO: 19580 - protein, 931 aa, synthetic construct
MALPVTALLLPLALLLHAARPLEEASTKGPSVFPLAPSSKSTSGGTAALGCLVKDYFPEPVTVSWNSGALTSGVHTFPAVLQSSGLYSLSSVVTVPSSSLGTQTYICNVNHKPSNTKVDKRVEPKSCPIKTDVITMDPKDNCSKDANDTLLLQLTNTSAYYMYLLLLLKSVVYFAIITCCLLRRTAFCCNGEKSRAKRSGSGATNFSLLKQAGDVEENPGPTSMALPVTALLLPLALLLHAARPDEFEVQLVESGGGLVQAGGSLRLSCAASGITFSINTMGWYRQAPGKQRELVALISSIGDTYYADSVKGRFTISRDNAKNTVYLQMNSLKPEDTAVYYCKRFRTAAQGTDYWGQGTQVTVSSLEGGGGSGGGGSGGGGSGSGGSGSGGSGSGGSGSGGSFEVQLVESGGGLVQPGGSLRLSCAASGSIFGFNDMAWYRQAPGKQRELVALISRVGVTSSADSVKGRFTISRVNAKDTVYLQMNSLKPEDTAVYYCYMDQRLDGSTLAYWGQGTQVTVSSTRGQPKANPTVTLFPPSSEELQANKATLVCLISDFYPGAVTVAWKADGSPVKAGVETTKPSKQSNNKYAASSYLSLTPEQWKSHRSYSCQVTHEGSTVEKTVAPTECSEVKTDSTDHVKPKETENTKQPSKSCHKPKAIVHTEKVNMMSLTVLGLRMLFAKTVAVNFLLTAKLFFLRAKRSGSGVKQTLNFDLLKLAGDVESNPGPSRGHMTEYKPTVRLATRDDVPRAVRTLAAAFADYPATRHTVDPDRHIERVTELQELFLTRVGLDIGKVWVADDGAAVAVWTTPESVEAGAVFAEIGPRMAELSGSRLAAQQQMEGLLAPHRPKEPAWFLATVGVSPDHQGKGLGSAVVLPGVEAAERAGVPAFLETSAPRNLPFYERLGFTVTADVEVPEGPRTWCMTRKPGA

SEQ ID NO: 19581 - protein, 845 aa, synthetic construct
MALPVTALLLPLALLLHAARPLEEASTKGPSVFPLAPSSKSTSGGTAALGCLVKDYFPEPVTVSWNSGALTSGVHTFPAVLQSSGLYSLSSVVTVPSSSLGTQTYICNVNHKPSNTKVDKRVEPKSCPIKTDVITMDPKDNCSKDANDTLLLQLTNTSAYYMYLLLLLKSVVYFAIITCCLLRRTAFCCNGEKSRAKRSGSGATNFSLLKQAGDVEENPGPTSMALPVTALLLPLALLLHAARPGMRTEDLPKAVVFLEPQWYRVLEKDSVTLKCQGAYSPEDNSTQWFHNESLISSQASSYFIDAATVDDSGEYRCQTNLSTLSDPVQLEVHIGWLLLQAPRWVFKEEDPIHLRCHSWKNTALHKVTYLQNGKGRKYFHHNSDFYIPKATLKDSGSYFCRGLVGSKNVSSETVNITITQGLAVSTISSFFPPGYQTRGQPKANPTVTLFPPSSEELQANKATLVCLISDFYPGAVTVAWKADGSPVKAGVETTKPSKQSNNKYAASSYLSLTPEQWKSHRSYSCQVTHEGSTVEKTVAPTECSEVKTDSTDHVKPKETENTKQPSKSCHKPKAIVHTEKVNMMSLTVLGLRMLFAKTVAVNFLLTAKLFFLRAKRSGSGVKQTLNFDLLKLAGDVESNPGPSRGHMTEYKPTVRLATRDDVPRAVRTLAAAFADYPATRHTVDPDRHIERVTELQELFLTRVGLDIGKVWVADDGAAVAVWTTPESVEAGAVFAEIGPRMAELSGSRLAAQQQMEGLLAPHRPKEPAWFLATVGVSPDHQGKGLGSAVVLPGVEAAERAGVPAFLETSAPRNLPFYERLGFTVTADVEVPEGPRTWCMTRKPGA

SEQ ID NO: 19582 - protein, 473 aa, synthetic construct
MALPVTALLLPLALLLHAARPLEEASTKGPSVFPLAPSSKSTSGGTAALGCLVKDYFPEPVTVSWNSGALTSGVHTFPAVLQSSGLYSLSSVVTVPSSSLGTQTYICNVNHKPSNTKVDKRVEPKSCPIKTDVITMDPKDNCSKDANDTLLLQLTNTSAYYMYLLLLLKSVVYFAIITCCLLRRTAFCCNGEKSRAKRSGSGATNFSLLKQAGDVEENPGPTSATMALPVTALLLPLALLLHAARPMDPDLEIRAAFLRQRNTALRTEVAELEQEVQRLENEVSQYETRYGPLGGGKTRGQPKANPTVTLFPPSSEELQANKATLVCLISDFYPGAVTVAWKADGSPVKAGVETTKPSKQSNNKYAASSYLSLTPEQWKSHRSYSCQVTHEGSTVEKTVAPTECSEVKTDSTDHVKPKETENTKQPSKSCHKPKAIVHTEKVNMMSLTVLGLRMLFAKTVAVNFLLTAKLFFL

SEQ ID NO: 19583 - protein, 473 aa, synthetic construct
MALPVTALLLPLALLLHAARPLEEASTKGPSVFPLAPSSKSTSGGTAALGCLVKDYFPEPVTVSWNSGALTSGVHTFPAVLQSSGLYSLSSVVTVPSSSLGTQTYICNVNHKPSNTKVDKRVEPKSCPIKTDVITMDPKDNCSKDANDTLLLQLTNTSAYYMYLLLLLKSVVYFAIITCCLLRRTAFCCNGEKSRAKRSGSGATNFSLLKQAGDVEENPGPTSATMALPVTALLLPLALLLHAARPMDPDLEIEAAFLERENTALETRVAELRQRVQRLRNRVSQYRTRYGPLGGGKTRGQPKANPTVTLFPPSSEELQANKATLVCLISDFYPGAVTVAWKADGSPVKAGVETTKPSKQSNNKYAASSYLSLTPEQWKSHRSYSCQVTHEGSTVEKTVAPTECSEVKTDSTDHVKPKETENTKQPSKSCHKPKAIVHTEKVNMMSLTVLGLRMLFAKTVAVNFLLTAKLFFL

SEQ ID NO: 19584 - protein, 450 aa, synthetic construct
MALPVTALLLPLALLLHAARPLEEASTKGPSVFPLAPSSKSTSGGTAALGCLVKDYFPEPVTVSWNSGALTSGVHTFPAVLQSSGLYSLSSVVTVPSSSLGTQTYICNVNHKPSNTKVDKRVEPKSCPIKTDVITMDPKDNCSKDANDTLLLQLTNTSAYYMYLLLLLKSVVYFAIITCCLLRRTAFCCNGEKSRAKRSGSGATNFSLLKQAGDVEENPGPTSATMALPVTALLLPLALLLHAARPEVAALEKEVAALEKEVAALEKEVAALEKTRGQPKANPTVTLFPPSSEELQANKATLVCLISDFYPGAVTVAWKADGSPVKAGVETTKPSKQSNNKYAASSYLSLTPEQWKSHRSYSCQVTHEGSTVEKTVAPTECSEVKTDSTDHVKPKETENTKQPSKSCHKPKAIVHTEKVNMMSLTVLGLRMLFAKTVAVNFLLTAKLFFL

SEQ ID NO: 19585 - protein, 708 aa, synthetic construct
MALPVTALLLPLALLLHAARPLEEASTKGPSVFPLAPSSKSTSGGTAALGCLVKDYFPEPVTVSWNSGALTSGVHTFPAVLQSSGLYSLSSVVTVPSSSLGTQTYICNVNHKPSNTKVDKRVEPKSCPIKTDVITMDPKDNCSKDANDTLLLQLTNTSAYYMYLLLLLKSVVYFAIITCCLLRRTAFCCNGEKSRAKRSGSGATNFSLLKQAGDVEENPGPTSATMALPVTALLLPLALLLHAARPLFNQEVQIPLTESYCGPCPKNWICYKNNCYQFFDESKNWYESQASCMSQNASLLKVYSKEDQDLLKLVKSAHWMGLVHIPTNGSWQWEDGSILSPNLLTIIEMQKGDCALYASSFKGYIENCSTPNTYICMQRTVSGGGGSGGGGSGGGGDLFNQEVQIPLTESYCGPCPKNWICYKNNCYQFFDESKNWYESQASCMSQNASLLKVYSKEDQDLLKLVKSAHWMGLVHIPTNGSWQWEDGSILSPNLLTIIEMQKGDCALYASSFKGYIENCSTPNTYICMQRTVTRGQPKANPTVTLFPPSSEELQANKATLVCLISDFYPGAVTVAWKADGSPVKAGVETTKPSKQSNNKYAASSYLSLTPEQWKSHRSYSCQVTHEGSTVEKTVAPTECSEVKTDSTDHVKPKETENTKQPSKSCHKPKAIVHTEKVNMMSLTVLGLRMLFAKTVAVNFLLTAKLFFL

SEQ ID NO: 19586 - protein, 708 aa, synthetic construct
MALPVTALLLPLALLLHAARPLEEASTKGPSVFPLAPSSKSTSGGTAALGCLVKDYFPEPVTVSWNSGALTSGVHTFPAVLQSSGLYSLSSVVTVPSSSLGTQTYICNVNHKPSNTKVDKRVEPKSCPIKTDVITMDPKDNCSKDANDTLLLQLTNTSAYYMYLLLLLKSVVYFAIITCCLLRRTAFCCNGEKSRAKRSGSGATNFSLLKQAGDVEENPGPTSATMALPVTALLLPLALLLHAARPLFNQEVQIPLTESYCGPCPKNWICYKNNCYQFFDESKNWYESQASCMSQNASLLKVYSKEDQDLLKLVKSAHWMGLVHIPTNGSWQWEDGSILSPNLLTIIEMQKGDCALYASSFKGFIENCSTPNTYICMQRTVGGGGSGGGGSGGGGSDLFNQEVQIPLTESYCGPCPKNWICYKNNCYQFFDESKNWYESQASCMSQNASLLKVYSKEDQDLLKLVKSAHWMGLVHIPTNGSWQWEDGSILSPNLLTIIEMQKGDCALYASSFKGFIENCSTPNTYICMQRTVTRGQPKANPTVTLFPPSSEELQANKATLVCLISDFYPGAVTVAWKADGSPVKAGVETTKPSKQSNNKYAASSYLSLTPEQWKSHRSYSCQVTHEGSTVEKTVAPTECSEVKTDSTDHVKPKETENTKQPSKSCHKPKAIVHTEKVNMMSLTVLGLRMLFAKTVAVNFLLTAKLFFL

SEQ ID NO: 19587 - protein, 734 aa, synthetic construct
MALPVTALLLPLALLLHAARPLEEASTKGPSVFPLAPSSKSTSGGTAALGCLVKDYFPEPVTVSWNSGALTSGVHTFPAVLQSSGLYSLSSVVTVPSSSLGTQTYICNVNHKPSNTKVDKRVEPKSCPIKTDVITMDPKDNCSKDANDTLLLQLTNTSAYYMYLLLLLKSVVYFAIITCCLLRRTAFCCNGEKSRAKRSGSGATNFSLLKQAGDVEENPGPTSMALPVTALLLPLALLLHAARPMDPDLEIRAAFLRQRNTALRTEVAELEQEVQRLENEVSQYETRYGPLGGGKGTGGGGSGGGGSGGGGSEFDIQMTQSPSSLSASVGDRVTITCKASDHINNWLAWYQQKPGQAPKLLIYGATTLETGVPSRFSGSGSGTDYTLTISSLQPEDFATYYCQQSWNTPWTFGQGTKLEIKRGGGGSGGGGSGGGGSQVQLQQPGAELVKPGASVKMSCKASGYAFSSYWINWMKQKPGQGLEWIGQIYPGDGDTNYNGKFKGRATLTADTSSSTAYMQLSSLTSEDSAVYFCARSITTVVGCAMDYWGQGTSVTVSSTRGQPKANPTVTLFPPSSEELQANKATLVCLISDFYPGAVTVAWKADGSPVKAGVETTKPSKQSNNKYAASSYLSLTPEQWKSHRSYSCQVTHEGSTVEKTVAPTECSEVKTDSTDHVKPKETENTKQPSKSCHKPKAIVHTEKVNMMSLTVLGLRMLFAKTVAVNFLLTAKLFFL

SEQ ID NO: 19588 - protein, 969 aa, synthetic construct
MALPVTALLLPLALLLHAARPLEEASTKGPSVFPLAPSSKSTSGGTAALGCLVKDYFPEPVTVSWNSGALTSGVHTFPAVLQSSGLYSLSSVVTVPSSSLGTQTYICNVNHKPSNTKVDKRVEPKSCPIKTDVITMDPKDNCSKDANDTLLLQLTNTSAYYMYLLLLLKSVVYFAIITCCLLRRTAFCCNGEKSRAKRSGSGATNFSLLKQAGDVEENPGPTSMALPVTALLLPLALLLHAARPLFNQEVQIPLTESYCGPCPKNWICYKNNCYQFFDESKNWYESQASCMSQNASLLKVYSKEDQDLLKLVKSAHWMGLVHIPTNGSWQWEDGSILSPNLLTIIEMQKGDCALYASSFKGFIENCSTPNTYICMQRTVGGGGSGGGGSGGGGSDLFNQEVQIPLTESYCGPCPKNWICYKNNCYQFFDESKNWYESQASCMSQNASLLKVYSKEDQDLLKLVKSAHWMGLVHIPTNGSWQWEDGSILSPNLLTIIEMQKGDCALYASSFKGFIENCSTPNTYICMQRTVGTGGGGSGGGGSGGGGSEFDIQMTQSPSSLSASVGDRVTITCKASDHINNWLAWYQQKPGQAPKLLIYGATTLETGVPSRFSGSGSGTDYTLTISSLQPEDFATYYCQQSWNTPWTFGQGTKLEIKRGGGGSGGGGSGGGGSQVQLQQPGAELVKPGASVKMSCKASGYAFSSYWINWMKQKPGQGLEWIGQIYPGDGDTNYNGKFKGRATLTADTSSSTAYMQLSSLTSEDSAVYFCARSITTVVGCAMDYWGQGTSVTVSSTRGQPKANPTVTLFPPSSEELQANKATLVCLISDFYPGAVTVAWKADGSPVKAGVETTKPSKQSNNKYAASSYLSLTPEQWKSHRSYSCQVTHEGSTVEKTVAPTECSEVKTDSTDHVKPKETENTKQPSKSCHKPKAIVHTEKVNMMSLTVLGLRMLFAKTVAVNFLLTAKLFFL

SEQ ID NO: 19589 - protein, 674 aa, synthetic construct
MALPVTALLLPLALLLHAARPLEEASTKGPSVFPLAPSSKSTSGGTAALGCLVKDYFPEPVTVSWNSGALTSGVHTFPAVLQSSGLYSLSSVVTVPSSSLGTQTYICNVNHKPSNTKVDKRVEPKSCPIKTDVITMDPKDNCSKDANDTLLLQLTNTSAYYMYLLLLLKSVVYFAIITCCLLRRTAFCCNGEKSRAKRSGSGATNFSLLKQAGDVEENPGPTSMALPVTALLLPLALLLHAARPQSVLTQPPSVSGAPGQRVTISCTGSSSNIGAGYDVHWYQQLPGTAPKLLIFGNSNRPSGVPDRFSGFKSGTSASLAITGLQAEDEADYFCQSYDSSLSGSGVFGTGTKVTVLGGGGGSGGGGSGGGGSQMQLVQSGGGLVQPGRSLRLSCAASGFTFDDYAMHWVRQAPGKGLEWVSGISWNSGSIGYADSVKGRFTISRDNAKNSLYLQMNSLRAEDTALYYCAKDIHSGSYYGLLYYAMDVWGQGTTVTVSSTRGQPKANPTVTLFPPSSEELQANKATLVCLISDFYPGAVTVAWKADGSPVKAGVETTKPSKQSNNKYAASSYLSLTPEQWKSHRSYSCQVTHEGSTVEKTVAPTECSEVKTDSTDHVKPKETENTKQPSKSCHKPKAIVHTEKVNMMSLTVLGLRMLFAKTVAVNFLLTAKLFFL

SEQ ID NO: 19590 - protein, 511 aa, synthetic construct
MALPVTALLLPLALLLHAARPLEEASTKGPSVFPLAPSSKSTSGGTAALGCLVKDYFPEPVTVSWNSGALTSGVHTFPAVLQSSGLYSLSSVVTVPSSSLGTQTYICNVNHKPSNTKVDKRVEPKSCPIKTDVITMDPKDNCSKDANDTLLLQLTNTSAYYMYLLLLLKSVVYFAIITCCLLRRTAFCCNGEKSRAKRSGSGATNFSLLKQAGDVEENPGPTSMALPVTALLLPLALLLHAARPMCMPCFTTDHQMARKCDDCCGGKGRGKCYGPQCLCRLEGGGGSGGGGSGGGGSFEVCMPCFTTDQQMARKCSDCCGGKGRGKCYGPQCLCRTRGQPKANPTVTLFPPSSEELQANKATLVCLISDFYPGAVTVAWKADGSPVKAGVETTKPSKQSNNKYAASSYLSLTPEQWKSHRSYSCQVTHEGSTVEKTVAPTECSEVKTDSTDHVKPKETENTKQPSKSCHKPKAIVHTEKVNMMSLTVLGLRMLFAKTVAVNFLLTAKLFFL

SEQ ID NO: 19591 - protein, 774 aa, synthetic construct
MALPVTALLLPLALLLHAARPLEEASTKGPSVFPLAPSSKSTSGGTAALGCLVKDYFPEPVTVSWNSGALTSGVHTFPAVLQSSGLYSLSSVVTVPSSSLGTQTYICNVNHKPSNTKVDKRVEPKSCPIKTDVITMDPKDNCSKDANDTLLLQLTNTSAYYMYLLLLLKSVVYFAIITCCLLRRTAFCCNGEKSRAKRSGSGATNFSLLKQAGDVEENPGPTSMALPVTALLLPLALLLHAARPMCMPCFTTDHQMARKCDDCCGGKGRGKCYGPQCLCRLEGGGGSGGGGSGGGGSFEVCMPCFTTDQQMARKCSDCCGGKGRGKCYGPQCLCRGTGGGGSGGGGSGGGGSEFDIQMTQSPSSLSASVGDRVTITCKASDHINNWLAWYQQKPGQAPKLLIYGATTLETGVPSRFSGSGSGTDYTLTISSLQPEDFATYYCQQSWNTPWTFGQGTKLEIKRGGGGSGGGGSGGGGSQVQLQQPGAELVKPGASVKMSCKASGYAFSSYWINWMKQKPGQGLEWIGQIYPGDGDTNYNGKFKGRATLTADTSSSTAYMQLSSLTSEDSAVYFCARSITTVVGCAMDYWGQGTSVTVSSTRGQPKANPTVTLFPPSSEELQANKATLVCLISDFYPGAVTVAWKADGSPVKAGVETTKPSKQSNNKYAASSYLSLTPEQWKSHRSYSCQVTHEGSTVEKTVAPTECSEVKTDSTDHVKPKETENTKQPSKSCHKPKAIVHTEKVNMMSLTVLGLRMLFAKTVAVNFLLTAKLFFL

SEQ ID NO: 19592 - protein, 849 aa, synthetic construct
MALPVTALLLPLALLLHAARPLEEASTKGPSVFPLAPSSKSTSGGTAALGCLVKDYFPEPVTVSWNSGALTSGVHTFPAVLQSSGLYSLSSVVTVPSSSLGTQTYICNVNHKPSNTKVDKRVEPKSCPIKTDVITMDPKDNCSKDANDTLLLQLTNTSAYYMYLLLLLKSVVYFAIITCCLLRRTAFCCNGEKSRAKRSGSGATNFSLLKQAGDVEENPGPTSMALPVTALLLPLALLLHAARPSPVAPACDPRLLNKLLRDSHLLHSRLSQCPDVDPLSIPVLLPAVDFSLGEWKTQTEQSKAQDILGAVSLLLEGVMAARGQLEPSCLSSLLGQLSGQVRLLLGALQGLLGTQLPLQGRTTAHKDPNALFLSLQQLLRGKVRFLLLVEGPTLCVRRTLPTTAVPSSTSGTGGGGSGGGGSGGGGSEFDIQMTQSPSSLSASVGDRVTITCKASDHINNWLAWYQQKPGQAPKLLIYGATTLETGVPSRFSGSGSGTDYTLTISSLQPEDFATYYCQQSWNTPWTFGQGTKLEIKRGGGGSGGGGSGGGGSQVQLQQPGAELVKPGASVKMSCKASGYAFSSYWINWMKQKPGQGLEWIGQIYPGDGDTNYNGKFKGRATLTADTSSSTAYMQLSSLTSEDSAVYFCARSITTVVGCAMDYWGQGTSVTVSSTRGQPKANPTVTLFPPSSEELQANKATLVCLISDFYPGAVTVAWKADGSPVKAGVETTKPSKQSNNKYAASSYLSLTPEQWKSHRSYSCQVTHEGSTVEKTVAPTECSEVKTDSTDHVKPKETENTKQPSKSCHKPKAIVHTEKVNMMSLTVLGLRMLFAKTVAVNFLLTAKLFFL

SEQ ID NO: 19593 - protein, 756 aa, synthetic construct
MALPVTALLLPLALLLHAARPLEEASTKGPSVFPLAPSSKSTSGGTAALGCLVKDYFPEPVTVSWNSGALTSGVHTFPAVLQSSGLYSLSSVVTVPSSSLGTQTYICNVNHKPSNTKVDKRVEPKSCPIKTDVITMDPKDNCSKDANDTLLLQLTNTSAYYMYLLLLLKSVVYFAIITCCLLRRTAFCCNGEKSRAKRSGSGATNFSLLKQAGDVEENPGPTSMALPVTALLLPLALLLHAARPMGSWEEFELRLNAIEERLYALGGSEAELAYFEYVIADFEGNLQRYKGKGNPEVEALYFEADAIFEELVAYRHNGTGGGGSGGGGSGGGGSEFDIQMTQSPSSLSASVGDRVTITCKASDHINNWLAWYQQKPGQAPKLLIYGATTLETGVPSRFSGSGSGTDYTLTISSLQPEDFATYYCQQSWNTPWTFGQGTKLEIKRGGGGSGGGGSGGGGSQVQLQQPGAELVKPGASVKMSCKASGYAFSSYWINWMKQKPGQGLEWIGQIYPGDGDTNYNGKFKGRATLTADTSSSTAYMQLSSLTSEDSAVYFCARSITTVVGCAMDYWGQGTSVTVSSTRGQPKANPTVTLFPPSSEELQANKATLVCLISDFYPGAVTVAWKADGSPVKAGVETTKPSKQSNNKYAASSYLSLTPEQWKSHRSYSCQVTHEGSTVEKTVAPTECSEVKTDSTDHVKPKETENTKQPSKSCHKPKAIVHTEKVNMMSLTVLGLRMLFAKTVAVNFLLTAKLFFL

SEQ ID NO: 19594 - protein, 895 aa, synthetic construct
MALPVTALLLPLALLLHAARPLEGQPKANPTVTLFPPSSEELQANKATLVCLISDFYPGAVTVAWKADGSPVKAGVETTKPSKQSNNKYAASSYLSLTPEQWKSHRSYSCQVTHEGSTVEKTVAPTECSEVKTDSTDHVKPKETENTKQPSKSCHKPKAIVHTEKVNMMSLTVLGLRMLFAKTVAVNFLLTAKLFFLRAKRSGSGATNFSLLKQAGDVEENPGPTSMALPVTALLLPLALLLHAARPDIQMTQTTSSLSASLGDRVTISCRASQDISKYLNWYQQKPDGTVKLLIYHTSRLHSGVPSRFSGSGSGTDYSLTISNLEQEDIATYFCQQGNTLPYTFGGGTKLEITGGGGSGGGGSGGGGSEVKLQESGPGLVAPSQSLSVTCTVSGVSLPDYGVSWIRQPPRKGLEWLGVIWGSETTYYNSALKSRLTIIKDNSKSQVFLKMNSLQTDDTAIYYCAKHYYYGGSYAMDYWGQGTSVTVSSTREASTKGPSVFPLAPSSKSTSGGTAALGCLVKDYFPEPVTVSWNSGALTSGVHTFPAVLQSSGLYSLSSVVTVPSSSLGTQTYICNVNHKPSNTKVDKRVEPKSCPIKTDVITMDPKDNCSKDANDTLLLQLTNTSAYYMYLLLLLKSVVYFAIITCCLLRRTAFCCNGEKSRAKRSGSGVKQTLNFDLLKLAGDVESNPGPSRGHMTEYKPTVRLATRDDVPRAVRTLAAAFADYPATRHTVDPDRHIERVTELQELFLTRVGLDIGKVWVADDGAAVAVWTTPESVEAGAVFAEIGPRMAELSGSRLAAQQQMEGLLAPHRPKEPAWFLATVGVSPDHQGKGLGSAVVLPGVEAAERAGVPAFLETSAPRNLPFYERLGFTVTADVEVPEGPRTWCMTRKPGA

SEQ ID NO: 19595 - protein, 896 aa, synthetic construct
MALPVTALLLPLALLLHAARPLEGQPKANPTVTLFPPSSEELQANKATLVCLISDFYPGAVTVAWKADGSPVKAGVETTKPSKQSNNKYAASSYLSLTPEQWKSHRSYSCQVTHEGSTVEKTVAPTECSEVKTDSTDHVKPKETENTKQPSKSCHKPKAIVHTEKVNMMSLTVLGLRMLFAKTVAVNFLLTAKLFFLRAKRSGSGATNFSLLKQAGDVEENPGPTSTMALPVTALLLPLALLLHAARPEIVMTQSPATLSLSPGERATLSCRASQDISKYLNWYQQKPGQAPRLLIYHTSRLHSGIPARFSGSGSGTDYTLTISSLQPEDFAVYFCQQGNTLPYTFGQGTKLEIKGGGGSGGGGSGGGGSQVQLQESGPGLVKPSETLSLTCTVSGVSLPDYGVSWIRQPPGKGLEWIGVIWGSETTYYNSSLKSRVTISKDNSKNQVSLKLSSVTAADTAVYYCAKHYYYGGSYAMDYWGQGTLVTVSSTREASTKGPSVFPLAPSSKSTSGGTAALGCLVKDYFPEPVTVSWNSGALTSGVHTFPAVLQSSGLYSLSSVVTVPSSSLGTQTYICNVNHKPSNTKVDKRVEPKSCPIKTDVITMDPKDNCSKDANDTLLLQLTNTSAYYMYLLLLLKSVVYFAIITCCLLRRTAFCCNGEKSRAKRSGSGVKQTLNFDLLKLAGDVESNPGPSRGHMTEYKPTVRLATRDDVPRAVRTLAAAFADYPATRHTVDPDRHIERVTELQELFLTRVGLDIGKVWVADDGAAVAVWTTPESVEAGAVFAEIGPRMAELSGSRLAAQQQMEGLLAPHRPKEPAWFLATVGVSPDHQGKGLGSAVVLPGVEAAERAGVPAFLETSAPRNLPFYERLGFTVTADVEVPEGPRTWCMTRKPGA

SEQ ID NO: 19596 - protein, 897 aa, synthetic construct
MALPVTALLLPLALLLHAARPLEGQPKANPTVTLFPPSSEELQANKATLVCLISDFYPGAVTVAWKADGSPVKAGVETTKPSKQSNNKYAASSYLSLTPEQWKSHRSYSCQVTHEGSTVEKTVAPTECSEVKTDSTDHVKPKETENTKQPSKSCHKPKAIVHTEKVNMMSLTVLGLRMLFAKTVAVNFLLTAKLFFLRAKRSGSGATNFSLLKQAGDVEENPGPTSTMALPVTALLLPLALLLHAARPDEIVLTQSPATLSLSPGERATLSCSASSSVSYMHWYQQKPGQAPRLLIYDTSKLASGIPARFSGSGSGTDFTLTISSLEPEDVAVYYCFQGSVYPFTFGQGTKLEIKRGGGGSGGGGSGGGGSQVQLQESGPGLVKPSQTLSLTCTVSGGSISTSGMGVGWIRQHPGKGLEWIGHIWWDDDKRYNPALKSRVTISVDTSKNQFSLKLSSVTAADTAVYYCARMELWSYYFDYWGQGTLVTVSSTREASTKGPSVFPLAPSSKSTSGGTAALGCLVKDYFPEPVTVSWNSGALTSGVHTFPAVLQSSGLYSLSSVVTVPSSSLGTQTYICNVNHKPSNTKVDKRVEPKSCPIKTDVITMDPKDNCSKDANDTLLLQLTNTSAYYMYLLLLLKSVVYFAIITCCLLRRTAFCCNGEKSRAKRSGSGVKQTLNFDLLKLAGDVESNPGPSRGHMTEYKPTVRLATRDDVPRAVRTLAAAFADYPATRHTVDPDRHIERVTELQELFLTRVGLDIGKVWVADDGAAVAVWTTPESVEAGAVFAEIGPRMAELSGSRLAAQQQMEGLLAPHRPKEPAWFLATVGVSPDHQGKGLGSAVVLPGVEAAERAGVPAFLETSAPRNLPFYERLGFTVTADVEVPEGPRTWCMTRKPGA

SEQ ID NO: 19597 - protein, 893 aa, synthetic construct
MALPVTALLLPLALLLHAARPLEGQPKANPTVTLFPPSSEELQANKATLVCLISDFYPGAVTVAWKADGSPVKAGVETTKPSKQSNNKYAASSYLSLTPEQWKSHRSYSCQVTHEGSTVEKTVAPTECSEVKTDSTDHVKPKETENTKQPSKSCHKPKAIVHTEKVNMMSLTVLGLRMLFAKTVAVNFLLTAKLFFLRAKRSGSGATNFSLLKQAGDVEENPGPTSMALPVTALLLPLALLLHAARPDIQMTQSPSSLSASVGDRVTITCRASQDISNYLNWYQQKPGKAPKLLIYYTSRLHSGVPSRFSGSGSGTDFTLTISSLQPEDFATYYCQQGNTLPYTFGQGTKVEIKRGGGGSGGGGSGGGGSEVQLVESGGGLVQPGGSLRLSCAASGFTFSDYFMSWVRQAPGKGLEWVATISNGGTYTYYPDSVKGRFTISRDNSKNTLYLQMNSLRAEDTAVYYCARFDGYIFDYWGQGTLVTVSSTREASTKGPSVFPLAPSSKSTSGGTAALGCLVKDYFPEPVTVSWNSGALTSGVHTFPAVLQSSGLYSLSSVVTVPSSSLGTQTYICNVNHKPSNTKVDKRVEPKSCPIKTDVITMDPKDNCSKDANDTLLLQLTNTSAYYMYLLLLLKSVVYFAIITCCLLRRTAFCCNGEKSRAKRSGSGVKQTLNFDLLKLAGDVESNPGPSRGHMTEYKPTVRLATRDDVPRAVRTLAAAFADYPATRHTVDPDRHIERVTELQELFLTRVGLDIGKVWVADDGAAVAVWTTPESVEAGAVFAEIGPRMAELSGSRLAAQQQMEGLLAPHRPKEPAWFLATVGVSPDHQGKGLGSAVVLPGVEAAERAGVPAFLETSAPRNLPFYERLGFTVTADVEVPEGPRTWCMTRKPGA

SEQ ID NO: 19598 - protein, 897 aa, synthetic construct
MALPVTALLLPLALLLHAARPLEGQPKANPTVTLFPPSSEELQANKATLVCLISDFYPGAVTVAWKADGSPVKAGVETTKPSKQSNNKYAASSYLSLTPEQWKSHRSYSCQVTHEGSTVEKTVAPTECSEVKTDSTDHVKPKETENTKQPSKSCHKPKAIVHTEKVNMMSLTVLGLRMLFAKTVAVNFLLTAKLFFLRAKRSGSGATNFSLLKQAGDVEENPGPTSMALPVTALLLPLALLLHAARPDIQMTQSPSSLSASVGDRVTITCKASDHINNWLAWYQQKPGQAPKLLIYGATTLETGVPSRFSGSGSGTDYTLTISSLQPEDFATYYCQQSWNTPWTFGQGTKLEIKRGGGGSGGGGSGGGGSQVQLQQPGAELVKPGASVKMSCKASGYAFSSYWINWMKQKPGQGLEWIGQIYPGDGDTNYNGKFKGRATLTADTSSSTAYMQLSSLTSEDSAVYFCARSITTVVGCAMDYWGQGTSVTVSSTREASTKGPSVFPLAPSSKSTSGGTAALGCLVKDYFPEPVTVSWNSGALTSGVHTFPAVLQSSGLYSLSSVVTVPSSSLGTQTYICNVNHKPSNTKVDKRVEPKSCPIKTDVITMDPKDNCSKDANDTLLLQLTNTSAYYMYLLLLLKSVVYFAIITCCLLRRTAFCCNGEKSRAKRSGSGVKQTLNFDLLKLAGDVESNPGPSRGHMTEYKPTVRLATRDDVPRAVRTLAAAFADYPATRHTVDPDRHIERVTELQELFLTRVGLDIGKVWVADDGAAVAVWTTPESVEAGAVFAEIGPRMAELSGSRLAAQQQMEGLLAPHRPKEPAWFLATVGVSPDHQGKGLGSAVVLPGVEAAERAGVPAFLETSAPRNLPFYERLGFTVTADVEVPEGPRTWCMTRKPGA

SEQ ID NO: 19599 - protein, 899 aa, synthetic construct
MALPVTALLLPLALLLHAARPLEGQPKANPTVTLFPPSSEELQANKATLVCLISDFYPGAVTVAWKADGSPVKAGVETTKPSKQSNNKYAASSYLSLTPEQWKSHRSYSCQVTHEGSTVEKTVAPTECSEVKTDSTDHVKPKETENTKQPSKSCHKPKAIVHTEKVNMMSLTVLGLRMLFAKTVAVNFLLTAKLFFLRAKRSGSGATNFSLLKQAGDVEENPGPTSMALPVTALLLPLALLLHAARPQIVLSQSPAILSASPGEKVTMTCRASSSVSYMHWYQQKPGSSPKPWIYATSNLASGVPARFSGSGSGTSYSFTISRVEAEDAATYYCQQWTFNPPTFGGGTRLEIKRTVAAGGGGSGGGGSGGGGSQAYLQQSGAELVRPGASVKMSCKASGYTFTSYNMHWVKQTPRQGLEWIGGIYPGNGDTSYNQKFKGKATLTVGKSSSTAYMQLSSLTSEDSAVYFCARYDYNYAMDYWGQGTSVTVSSASTREASTKGPSVFPLAPSSKSTSGGTAALGCLVKDYFPEPVTVSWNSGALTSGVHTFPAVLQSSGLYSLSSVVTVPSSSLGTQTYICNVNHKPSNTKVDKRVEPKSCPIKTDVITMDPKDNCSKDANDTLLLQLTNTSAYYMYLLLLLKSVVYFAIITCCLLRRTAFCCNGEKSRAKRSGSGVKQTLNFDLLKLAGDVESNPGPSRGHMTEYKPTVRLATRDDVPRAVRTLAAAFADYPATRHTVDPDRHIERVTELQELFLTRVGLDIGKVWVADDGAAVAVWTTPESVEAGAVFAEIGPRMAELSGSRLAAQQQMEGLLAPHRPKEPAWFLATVGVSPDHQGKGLGSAVVLPGVEAAERAGVPAFLETSAPRNLPFYERLGFTVTADVEVPEGPRTWCMTRKPGA

SEQ ID NO: 19600 - protein, 897 aa, synthetic construct
MALPVTALLLPLALLLHAARPLEGQPKANPTVTLFPPSSEELQANKATLVCLISDFYPGAVTVAWKADGSPVKAGVETTKPSKQSNNKYAASSYLSLTPEQWKSHRSYSCQVTHEGSTVEKTVAPTECSEVKTDSTDHVKPKETENTKQPSKSCHKPKAIVHTEKVNMMSLTVLGLRMLFAKTVAVNFLLTAKLFFLRAKRSGSGATNFSLLKQAGDVEENPGPTSMALPVTALLLPLALLLHAARPEIVLTQSPATLSLSPGERATLSCRASQSVSSYLAWYQQKPGQAPRLLIYDASNRATGIPARFSGSGSGTDFTLTISSLEPEDFAVYYCQQRSNWPITFGQGTRLEIKGGGGSGGGGSGGGGSEVQLVESGGGLVQPDRSLRLSCAASGFTFHDYAMHWVRQAPGKGLEWVSTISWNSGTIGYADSVKGRFTISRDNAKNSLYLQMNSLRAEDTALYYCAKDIQYGNYYYGMDVWGQGTTVTVSSTREASTKGPSVFPLAPSSKSTSGGTAALGCLVKDYFPEPVTVSWNSGALTSGVHTFPAVLQSSGLYSLSSVVTVPSSSLGTQTYICNVNHKPSNTKVDKRVEPKSCPIKTDVITMDPKDNCSKDANDTLLLQLTNTSAYYMYLLLLLKSVVYFAIITCCLLRRTAFCCNGEKSRAKRSGSGVKQTLNFDLLKLAGDVESNPGPSRGHMTEYKPTVRLATRDDVPRAVRTLAAAFADYPATRHTVDPDRHIERVTELQELFLTRVGLDIGKVWVADDGAAVAVWTTPESVEAGAVFAEIGPRMAELSGSRLAAQQQMEGLLAPHRPKEPAWFLATVGVSPDHQGKGLGSAVVLPGVEAAERAGVPAFLETSAPRNLPFYERLGFTVTADVEVPEGPRTWCMTRKPGA

SEQ ID NO: 19601 - protein, 895 aa, synthetic construct
MALPVTALLLPLALLLHAARPLEGQPKANPTVTLFPPSSEELQANKATLVCLISDFYPGAVTVAWKADGSPVKAGVETTKPSKQSNNKYAASSYLSLTPEQWKSHRSYSCQVTHEGSTVEKTVAPTECSEVKTDSTDHVKPKETENTKQPSKSCHKPKAIVHTEKVNMMSLTVLGLRMLFAKTVAVNFLLTAKLFFLRAKRSGSGATNFSLLKQAGDVEENPGPTSMALPVTALLLPLALLLHAARPDIQMTQSPSSLSASVGDRVTITCRASQDVNTAVAWYQQKPGKAPKLLIYSASFLESGVPSRFSGSRSGTDFTLTISSLQPEDFATYYCQQHYTTPPTFGQTKVEIKRGGGGSGGGGSGGGGSEVQLVESGGGLVQPGGSLRLSCAASGFNIKDTYIHWVRQAPGKGLEWVARIYPTNGYTRYADSVKGRFTISADTSKNTAYLQMNSLRAEDTAVYYCSRWGGDGFYAMDVWGQGTLVTVSSTREASTKGPSVFPLAPSSKSTSGGTAALGCLVKDYFPEPVTVSWNSGALTSGVHTFPAVLQSSGLYSLSSVVTVPSSSLGTQTYICNVNHKPSNTKVDKRVEPKSCPIKTDVITMDPKDNCSKDANDTLLLQLTNTSAYYMYLLLLLKSVVYFAIITCCLLRRTAFCCNGEKSRAKRSGSGVKQTLNFDLLKLAGDVESNPGPSRGHMTEYKPTVRLATRDDVPRAVRTLAAAFADYPATRHTVDPDRHIERVTELQELFLTRVGLDIGKVWVADDGAAVAVWTTPESVEAGAVFAEIGPRMAELSGSRLAAQQQMEGLLAPHRPKEPAWFLATVGVSPDHQGKGLGSAVVLPGVEAAERAGVPAFLETSAPRNLPFYERLGFTVTADVEVPEGPRTWCMTRKPGA

SEQ ID NO: 19602 - protein, 774 aa, synthetic construct
MALPVTALLLPLALLLHAARPLEGQPKANPTVTLFPPSSEELQANKATLVCLISDFYPGAVTVAWKADGSPVKAGVETTKPSKQSNNKYAASSYLSLTPEQWKSHRSYSCQVTHEGSTVEKTVAPTECSEVKTDSTDHVKPKETENTKQPSKSCHKPKAIVHTEKVNMMSLTVLGLRMLFAKTVAVNFLLTAKLFFLRAKRSGSGATNFSLLKQAGDVEENPGPTSMALPVTALLLPLALLLHAARPDEFEVQLVESGGGLVQAGGSLRLSCAASGITFSINTMGWYRQAPGKQRELVALISSIGDTYYADSVKGRFTISRDNAKNTVYLQMNSLKPEDTAVYYCKRFRTAAQGTDYWGQGTQVTVSSTREASTKGPSVFPLAPSSKSTSGGTAALGCLVKDYFPEPVTVSWNSGALTSGVHTFPAVLQSSGLYSLSSVVTVPSSSLGTQTYICNVNHKPSNTKVDKRVEPKSCPIKTDVITMDPKDNCSKDANDTLLLQLTNTSAYYMYLLLLLKSVVYFAIITCCLLRRTAFCCNGEKSRAKRSGSGVKQTLNFDLLKLAGDVESNPGPSRGHMTEYKPTVRLATRDDVPRAVRTLAAAFADYPATRHTVDPDRHIERVTELQELFLTRVGLDIGKVWVADDGAAVAVWTTPESVEAGAVFAEIGPRMAELSGSRLAAQQQMEGLLAPHRPKEPAWFLATVGVSPDHQGKGLGSAVVLPGVEAAERAGVPAFLETSAPRNLPFYERLGFTVTADVEVPEGPRTWCMTRKPGA

SEQ ID NO: 19603 - protein, 774 aa, synthetic construct; identical to SEQ ID NO: 19602

SEQ ID NO: 19604 - protein, 1039 aa, synthetic construct
MALPVTALLLPLALLLHAARPLEGQPKANPTVTLFPPSSEELQANKATLVCLISDFYPGAVTVAWKADGSPVKAGVETTKPSKQSNNKYAASSYLSLTPEQWKSHRSYSCQVTHEGSTVEKTVAPTECSEVKTDSTDHVKPKETENTKQPSKSCHKPKAIVHTEKVNMMSLTVLGLRMLFAKTVAVNFLLTAKLFFLRAKRSGSGATNFSLLKQAGDVEENPGPTSMALPVTALLLPLALLLHAARPQVQLVESGGGLVQAGDSVTLSCTASGRTFSSYALAWFRQRPGKEREFVAGLRWGGPTNYADSVKDRFTISGDSAKHTMYLQMNSLKPEDTAVYYCGYNPGGWAVPSQYEYDSWGQGTQVTVSSGTGGGGSGGGGSGGGGSEFDIQMTQSPSSLSASVGDRVTITCKASDHINNWLAWYQQKPGQAPKLLIYGATTLETGVPSRFSGSGSGTDYTLTISSLQPEDFATYYCQQSWNTPWTFGQGTKLEIKRGGGGSGGGGSGGGGSQVQLQQPGAELVKPGASVKMSCKASGYAFSSYWINWMKQKPGQGLEWIGQIYPGDGDTNYNGKFKGRATLTADTSSSTAYMQLSSLTSEDSAVYFCARSITTVVGCAMDYWGQGTSVTVSSTREASTKGPSVFPLAPSSKSTSGGTAALGCLVKDYFPEPVTVSWNSGALTSGVHTFPAVLQSSGLYSLSSVVTVPSSSLGTQTYICNVNHKPSNTKVDKRVEPKSCPIKTDVITMDPKDNCSKDANDTLLLQLTNTSAYYMYLLLLLKSVVYFAIITCCLLRRTAFCCNGEKSRAKRSGSGVKQTLNFDLLKLAGDVESNPGPSRGHMTEYKPTVRLATRDDVPRAVRTLAAAFADYPATRHTVDPDRHIERVTELQELFLTRVGLDIGKVWVADDGAAVAVWTTPESVEAGAVFAEIGPRMAELSGSRLAAQQQMEGLLAPHRPKEPAWFLATVGVSPDHQGKGLGSAVVLPGVEAAERAGVPAFLETSAPRNLPFYERLGFTVTADVEVPEGPRTWCMTRKPGA

SEQ ID NO: 19605 - protein, 1168 aa, synthetic construct
MALPVTALLLPLALLLHAARPLEGQPKANPTVTLFPPSSEELQANKATLVCLISDFYPGAVTVAWKADGSPVKAGVETTKPSKQSNNKYAASSYLSLTPEQWKSHRSYSCQVTHEGSTVEKTVAPTECSEVKTDSTDHVKPKETENTKQPSKSCHKPKAIVHTEKVNMMSLTVLGLRMLFAKTVAVNFLLTAKLFFLRAKRSGSGATNFSLLKQAGDVEENPGPTSMALPVTALLLPLALLLHAARPEVQLLESGGGLVQPGGSLRLSCAASGFTFSSYAMSWVRQAPGKGLEWVSSISGSGDYIYYADSVKGRFTISRDISKNTLYLQMNSLRAEDTAVYYCAKEGTGANSSLADYRGQGTLVTVSSGGGSGGGSQVQLVESGGGLVQAGDSVTLSCTASGRTFSSYALAWFRQRPGKEREFVAGLRWGGPTNYADSVKDRFTISGDSAKHTMYLQMNSLKPEDTAVYYCGYNPGGWAVPSQYEYDSWGQGTQVTVSSGTGGGGSGGGGSGGGGSEFDIQMTQSPSSLSASVGDRVTITCKASDHINNWLAWYQQKPGQAPKLLIYGATTLETGVPSRFSGSGSGTDYTLTISSLQPEDFATYYCQQSWNTPWTFGQGTKLEIKRGGGGSGGGGSGGGGSQVQLQQPGAELVKPGASVKMSCKASGYAFSSYWINWMKQKPGQGLEWIGQIYPGDGDTNYNGKFKGRATLTADTSSSTAYMQLSSLTSEDSAVYFCARSITTVVGCAMDYWGQGTSVTVSSTREASTKGPSVFPLAPSSKSTSGGTAALGCLVKDYFPEPVTVSWNSGALTSGVHTFPAVLQSSGLYSLSSVVTVPSSSLGTQTYICNVNHKPSNTKVDKRVEPKSCPIKTDVITMDPKDNCSKDANDTLLLQLTNTSAYYMYLLLLLKSVVYFAIITCCLLRRTAFCCNGEKSRAKRSGSGVKQTLNFDLLKLAGDVESNPGPSRGHMTEYKPTVRLATRDDVPRAVRTLAAAFADYPATRHTVDPDRHIERVTELQELFLTRVGLDIGKVWVADDGAAVAVWTTPESVEAGAVFAEIGPRMAELSGSRLAAQQQMEGLLAPHRPKEPAWFLATVGVSPDHQGKGLGSAVVLPGVEAAERAGVPAFLETSAPRNLPFYERLGFTVTADVEVPEGPRTWCMTRKPGA

SEQ ID NO: 19606 - protein, 1166 aa, synthetic construct
MALPVTALLLPLALLLHAARPLEGQPKANPTVTLFPPSSEELQANKATLVCLISDFYPGAVTVAWKADGSPVKAGVETTKPSKQSNNKYAASSYLSLTPEQWKSHRSYSCQVTHEGSTVEKTVAPTECSEVKTDSTDHVKPKETENTKQPSKSCHKPKAIVHTEKVNMMSLTVLGLRMLFAKTVAVNFLLTAKLFFLRAKRSGSGATNFSLLKQAGDVEENPGPTSMALPVTALLLPLALLLHAARPGVTQSPTHLIKTRGQQATLRCSPISGHTSVYWYQQALGLGLQFLLWYDEGEERNRGNFPPRFSGRQFPNYSSELNVNALELEDSALYLCASSLGGPRGLAGLRGDEQFFGPGTRLTVLEGGGSGGGSQVQLVESGGGLVQAGDSVTLSCTASGRTFSSYALAWFRQRPGKEREFVAGLRWGGPTNYADSVKDRFTISGDSAKHTMYLQMNSLKPEDTAVYYCGYNPGGWAVPSQYEYDSWGQGTQVTVSSGTGGGGSGGGGSGGGGSEFDIQMTQSPSSLSASVGDRVTITCKASDHINNWLAWYQQKPGQAPKLLIYGATTLETGVPSRFSGSGSGTDYTLTISSLQPEDFATYYCQQSWNTPWTFGQGTKLEIKRGGGGSGGGGSGGGGSQVQLQQPGAELVKPGASVKMSCKASGYAFSSYWINWMKQKPGQGLEWIGQIYPGDGDTNYNGKFKGRATLTADTSSSTAYMQLSSLTSEDSAVYFCARSITTVVGCAMDYWGQGTSVTVSSTREASTKGPSVFPLAPSSKSTSGGTAALGCLVKDYFPEPVTVSWNSGALTSGVHTFPAVLQSSGLYSLSSVVTVPSSSLGTQTYICNVNHKPSNTKVDKRVEPKSCPIKTDVITMDPKDNCSKDANDTLLLQLTNTSAYYMYLLLLLKSVVYFAIITCCLLRRTAFCCNGEKSRAKRSGSGVKQTLNFDLLKLAGDVESNPGPSRGHMTEYKPTVRLATRDDVPRAVRTLAAAFADYPATRHTVDPDRHIERVTELQELFLTRVGLDIGKVWVADDGAAVAVWTTPESVEAGAVFAEIGPRMAELSGSRLAAQQQMEGLLAPHRPKEPAWFLATVGVSPDHQGKGLGSAVVLPGVEAAERAGVPAFLETSAPRNLPFYERLGFTVTADVEVPEGPRTWCMTRKPGA

SEQ ID NO: 19607 - protein, 927 aa, synthetic construct
MALPVTALLLPLALLLHAARPLEGQPKANPTVTLFPPSSEELQANKATLVCLISDFYPGAVTVAWKADGSPVKAGVETTKPSKQSNNKYAASSYLSLTPEQWKSHRSYSCQVTHEGSTVEKTVAPTECSEVKTDSTDHVKPKETENTKQPSKSCHKPKAIVHTEKVNMMSLTVLGLRMLFAKTVAVNFLLTAKLFFLRAKRSGSGATNFSLLKQAGDVEENPGPTSMALPVTALLLPLALLLHAARPGVTQSPTHLIKTRGQQATLRCSPISGHTSVYWYQQALGLGLQFLLWYDEGEERNRGNFPPRFSGRQFPNYSSELNVNALELEDSALYLCASSLGGPRGLAGLRGDEQFFGPGTRLTVLEGGGSGGGSGVTQSPTHLIKTRGQQATLRCSPISGHTSVYWYQQALGLGLQFLLWYDEGEERNRGNFPPRFSGRQFPNYSSELNVNALELEDSALYLCASSLGGDELGADGNEQFFGPGTRLTVLEGTGGGGSGGGGSGGGGSEFDIQMTQSPSSLSASVGDRVTITCKASDHINNWLAWYQQKPGQAPKLLIYGATTLETGVPSRFSGSGSGTDYTLTISSLQPEDFATYYCQQSWNTPWTFGQGTKLEIKRGGGGSGGGGSGGGGSQVQLQQPGAELVKPGASVKMSCKASGYAFSSYWINWMKQKPGQGLEWIGQIYPGDGDTNYNGKFKGRATLTADTSSSTAYMQLSSLTSEDSAVYFCARSITTVVGCAMDYWGQGTSVTVSSTREASTKGPSVFPLAPSSKSTSGGTAALGCLVKDYFPEPVTVSWNSGALTSGVHTFPAVLQSSGLYSLSSVVTVPSSSLGTQTYICNVNHKPSNTKVDKRVEPKSCPIKTDVITMDPKDNCSKDANDTLLLQLTNTSAYYMYLLLLLKSVVYFAIITCCLLRRTAFCCNGEKS

SEQ ID NO: 19608 - protein, 780 aa, synthetic construct
MALPVTALLLPLALLLHAARPLEGQPKANPTVTLFPPSSEELQANKATLVCLISDFYPGAVTVAWKADGSPVKAGVETTKPSKQSNNKYAASSYLSLTPEQWKSHRSYSCQVTHEGSTVEKTVAPTECSEVKTDSTDHVKPKETENTKQPSKSCHKPKAIVHTEKVNMMSLTVLGLRMLFAKTVAVNFLLTAKLFFLRAKRSGSGATNFSLLKQAGDVEENPGPTSMALPVTALLLPLALLLHAARPDEFGSDLGIKLLFAAAKGQDDEVRILLAAGADVNAKDFEGYTPLHVAAYDGHLEIVEVLLKAGADVNAKDSQGRTPLHEAAYSGHLEIVEVLLKAGADVNAQDDAGETPADLAAAWGHEDIAEVLQKTREASTKGPSVFPLAPSSKSTSGGTAALGCLVKDYFPEPVTVSWNSGALTSGVHTFPAVLQSSGLYSLSSVVTVPSSSLGTQTYICNVNHKPSNTKVDKRVEPKSCPIKTDVITMDPKDNCSKDANDTLLLQLTNTSAYYMYLLLLLKSVVYFAIITCCLLRRTAFCCNGEKSRAKRSGSGVKQTLNFDLLKLAGDVESNPGPSRGHMTEYKPTVRLATRDDVPRAVRTLAAAFADYPATRHTVDPDRHIERVTELQELFLTRVGLDIGKVWVADDGAAVAVWTTPESVEAGAVFAEIGPRMAELSGSRLAAQQQMEGLLAPHRPKEPAWFLATVGVSPDHQGKGLGSAVVLPGVEAAERAGVPAFLETSAPRNLPFYERLGFTVTADVEVPEGPRTWCMTRKPGA

SEQ ID NO: 19609 - protein, 709 aa, synthetic construct
MALPVTALLLPLALLLHAARPLEGQPKANPTVTLFPPSSEELQANKATLVCLISDFYPGAVTVAWKADGSPVKAGVETTKPSKQSNNKYAASSYLSLTPEQWKSHRSYSCQVTHEGSTVEKTVAPTECSEVKTDSTDHVKPKETENTKQPSKSCHKPKAIVHTEKVNMMSLTVLGLRMLFAKTVAVNFLLTAKLFFLRAKRSGSGATNFSLLKQAGDVEENPGPTSMDWIWRILFLVGAATGAHSFEGSGFEYAKEMRNAYWEIALLPNLTNQQKRAPIRKLYDDPSQSSELLSEAKKLNDSQTREASTKGPSVFPLAPSSKSTSGGTAALGCLVKDYFPEPVTVSWNSGALTSGVHTFPAVLQSSGLYSLSSVVTVPSSSLGTQTYICNVNHKPSNTKVDKRVEPKSCPIKTDVITMDPKDNCSKDANDTLLLQLTNTSAYYMYLLLLLKSVVYFAIITCCLLRRTAFCCNGEKSRAKRSGSGVKQTLNFDLLKLAGDVESNPGPSRGHMTEYKPTVRLATRDDVPRAVRTLAAAFADYPATRHTVDPDRHIERVTELQELFLTRVGLDIGKVWVADDGAAVAVWTTPESVEAGAVFAEIGPRMAELSGSRLAAQQQMEGLLAPHRPKEPAWFLATVGVSPDHQGKGLGSAVVLPGVEAAERAGVPAFLETSAPRNLPFYERLGFTVTADVEVPEGPRTWCMTRKPGA

SEQ ID NO: 19610 - protein, 931 aa, synthetic construct
MALPVTALLLPLALLLHAARPLEGQPKANPTVTLFPPSSEELQANKATLVCLISDFYPGAVTVAWKADGSPVKAGVETTKPSKQSNNKYAASSYLSLTPEQWKSHRSYSCQVTHEGSTVEKTVAPTECSEVKTDSTDHVKPKETENTKQPSKSCHKPKAIVHTEKVNMMSLTVLGLRMLFAKTVAVNFLLTAKLFFLRAKRSGSGATNFSLLKQAGDVEENPGPTSMALPVTALLLPLALLLHAARPDEFEVQLVESGGGLVQAGGSLRLSCAASGITFSINTMGWYRQAPGKQRELVALISSIGDTYYADSVKGRFTISRDNAKNTVYLQMNSLKPEDTAVYYCKRFRTAAQGTDYWGQGTQVTVSSLEGGGGSGGGGSGGGGSGSGGSGSGGSGSGGSGSGGSFEVQLVESGGGLVQPGGSLRLSCAASGSIFGFNDMAWYRQAPGKQRELVALISRVGVTSSADSVKGRFTISRVNAKDTVYLQMNSLKPEDTAVYYCYMDQRLDGSTLAYWGQGTQVTVSSTREASTKGPSVFPLAPSSKSTSGGTAALGCLVKDYFPEPVTVSWNSGALTSGVHTFPAVLQSSGLYSLSSVVTVPSSSLGTQTYICNVNHKPSNTKVDKRVEPKSCPIKTDVITMDPKDNCSKDANDTLLLQLTNTSAYYMYLLLLLKSVVYFAIITCCLLRRTAFCCNGEKSRAKRSGSGVKQTLNFDLLKLAGDVESNPGPSRGHMTEYKPTVRLATRDDVPRAVRTLAAAFADYPATRHTVDPDRHIERVTELQELFLTRVGLDIGKVWVADDGAAVAVWTTPESVEAGAVFAEIGPRMAELSGSRLAAQQQMEGLLAPHRPKEPAWFLATVGVSPDHQGKGLGSAVVLPGVEAAERAGVPAFLETSAPRNLPFYERLGFTVTADVEVPEGPRTWCMTRKPGA

SEQ ID NO: 19611 - protein, 845 aa, synthetic construct
MALPVTALLLPLALLLHAARPLEGQPKANPTVTLFPPSSEELQANKATLVCLISDFYPGAVTVAWKADGSPVKAGVETTKPSKQSNNKYAASSYLSLTPEQWKSHRSYSCQVTHEGSTVEKTVAPTECSEVKTDSTDHVKPKETENTKQPSKSCHKPKAIVHTEKVNMMSLTVLGLRMLFAKTVAVNFLLTAKLFFLRAKRSGSGATNFSLLKQAGDVEENPGPTSMALPVTALLLPLALLLHAARPGMRTEDLPKAVVFLEPQWYRVLEKDSVTLKCQGAYSPEDNSTQWFHNESLISSQASSYFIDAATVDDSGEYRCQTNLSTLSDPVQLEVHIGWLLLQAPRWVFKEEDPIHLRCHSWKNTALHKVTYLQNGKGRKYFHHNSDFYIPKATLKDSGSYFCRGLVGSKNVSSETVNITITQGLAVSTISSFFPPGYQTREASTKGPSVFPLAPSSKSTSGGTAALGCLVKDYFPEPVTVSWNSGALTSGVHTFPAVLQSSGLYSLSSVVTVPSSSLGTQTYICNVNHKPSNTKVDKRVEPKSCPIKTDVITMDPKDNCSKDANDTLLLQLTNTSAYYMYLLLLLKSVVYFAIITCCLLRRTAFCCNGEKSRAKRSGSGVKQTLNFDLLKLAGDVESNPGPSRGHMTEYKPTVRLATRDDVPRAVRTLAAAFADYPATRHTVDPDRHIERVTELQELFLTRVGLDIGKVWVADDGAAVAVWTTPESVEAGAVFAEIGPRMAELSGSRLAAQQQMEGLLAPHRPKEPAWFLATVGVSPDHQGKGLGSAVVLPGVEAAERAGVPAFLETSAPRNLPFYERLGFTVTADVEVPEGPRTWCMTRKPGA

SEQ ID NO: 19612 - protein, 473 aa, synthetic construct
MALPVTALLLPLALLLHAARPLEGQPKANPTVTLFPPSSEELQANKATLVCLISDFYPGAVTVAWKADGSPVKAGVETTKPSKQSNNKYAASSYLSLTPEQWKSHRSYSCQVTHEGSTVEKTVAPTECSEVKTDSTDHVKPKETENTKQPSKSCHKPKAIVHTEKVNMMSLTVLGLRMLFAKTVAVNFLLTAKLFFLRAKRSGSGATNFSLLKQAGDVEENPGPTSATMALPVTALLLPLALLLHAARPMDPDLEIRAAFLRQRNTALRTEVAELEQEVQRLENEVSQYETRYGPLGGGKTREASTKGPSVFPLAPSSKSTSGGTAALGCLVKDYFPEPVTVSWNSGALTSGVHTFPAVLQSSGLYSLSSVVTVPSSSLGTQTYICNVNHKPSNTKVDKRVEPKSCPIKTDVITMDPKDNCSKDANDTLLLQLTNTSAYYMYLLLLLKSVVYFAIITCCLLRRTAFCCNGEKS

SEQ ID NO: 19613 - protein, 473 aa, synthetic construct
MALPVTALLLPLALLLHAARPLEGQPKANPTVTLFPPSSEELQANKATLVCLISDFYPGAVTVAWKADGSPVKAGVETTKPSKQSNNKYAASSYLSLTPEQWKSHRSYSCQVTHEGSTVEKTVAPTECSEVKTDSTDHVKPKETENTKQPSKSCHKPKAIVHTEKVNMMSLTVLGLRMLFAKTVAVNFLLTAKLFFLRAKRSGSGATNFSLLKQAGDVEENPGPTSATMALPVTALLLPLALLLHAARPMDPDLEIEAAFLERENTALETRVAELRQRVQRLRNRVSQYRTRYGPLGGGKTREASTKGPSVFPLAPSSKSTSGGTAALGCLVKDYFPEPVTVSWNSGALTSGVHTFPAVLQSSGLYSLSSVVTVPSSSLGTQTYICNVNHKPSNTKVDKRVEPKSCPIKTDVITMDPKDNCSKDANDTLLLQLTNTSAYYMYLLLLLKSVVYFAIITCCLLRRTAFCCNGEKS

SEQ ID NO: 19614 - protein, 708 aa, synthetic construct
MALPVTALLLPLALLLHAARPLEGQPKANPTVTLFPPSSEELQANKATLVCLISDFYPGAVTVAWKADGSPVKAGVETTKPSKQSNNKYAASSYLSLTPEQWKSHRSYSCQVTHEGSTVEKTVAPTECSEVKTDSTDHVKPKETENTKQPSKSCHKPKAIVHTEKVNMMSLTVLGLRMLFAKTVAVNFLLTAKLFFLRAKRSGSGATNFSLLKQAGDVEENPGPTSATMALPVTALLLPLALLLHAARPLFNQEVQIPLTESYCGPCPKNWICYKNNCYQFFDESKNWYESQASCMSQNASLLKVYSKEDQDLLKLVKSAHWMGLVHIPTNGSWQWEDGSILSPNLLTIIEMQKGDCALYASSFKGYIENCSTPNTYICMQRTVSGGGGSGGGGSGGGGDLFNQEVQIPLTESYCGPCPKNWICYKNNCYQFFDESKNWYESQASCMSQNASLLKVYSKEDQDLLKLVKSAHWMGLVHIPTNGSWQWEDGSILSPNLLTIIEMQKGDCALYASSFKGYIENCSTPNTYICMQRTVTREASTKGPSVFPLAPSSKSTSGGTAALGCLVKDYFPEPVTVSWNSGALTSGVHTFPAVLQSSGLYSLSSVVTVPSSSLGTQTYICNVNHKPSNTKVDKRVEPKSCPIKTDVITMDPKDNCSKDANDTLLLQLTNTSAYYMYLLLLLKSVVYFAIITCCLLRRTAFCCNGEKS

SEQ ID NO: 19615 - protein, 708 aa, synthetic construct
MALPVTALLLPLALLLHAARPLEGQPKANPTVTLFPPSSEELQANKATLVCLISDFYPGAVTVAWKADGSPVKAGVETTKPSKQSNNKYAASSYLSLTPEQWKSHRSYSCQVTHEGSTVEKTVAPTECSEVKTDSTDHVKPKETENTKQPSKSCHKPKAIVHTEKVNMMSLTVLGLRMLFAKTVAVNFLLTAKLFFLRAKRSGSGATNFSLLKQAGDVEENPGPTSATMALPVTALLLPLALLLHAARPLFNQEVQIPLTESYCGPCPKNWICYKNNCYQFFDESKNWYESQASCMSQNASLLKVYSKEDQDLLKLVKSAHWMGLVHIPTNGSWQWEDGSILSPNLLTIIEMQKGDCALYASSFKGFIENCSTPNTYICMQRTVGGGGSGGGGSGGGGSDLFNQEVQIPLTESYCGPCPKNWICYKNNCYQFFDESKNWYESQASCMSQNASLLKVYSKEDQDLLKLVKSAHWMGLVHIPTNGSWQWEDGSILSPNLLTIIEMQKGDCALYASSFKGFIENCSTPNTYICMQRTVTREASTKGPSVFPLAPSSKSTSGGTAALGCLVKDYFPEPVTVSWNSGALTSGVHTFPAVLQSSGLYSLSSVVTVPSSSLGTQTYICNVNHKPSNTKVDKRVEPKSCPIKTDVITMDPKDNCSKDANDTLLLQLTNTSAYYMYLLLLLKSVVYFAIITCCLLRRTAFCCNGEKS

SEQ ID NO: 19616 - protein, 734 aa, synthetic construct
MALPVTALLLPLALLLHAARPLEGQPKANPTVTLFPPSSEELQANKATLVCLISDFYPGAVTVAWKADGSPVKAGVETTKPSKQSNNKYAASSYLSLTPEQWKSHRSYSCQVTHEGSTVEKTVAPTECSEVKTDSTDHVKPKETENTKQPSKSCHKPKAIVHTEKVNMMSLTVLGLRMLFAKTVAVNFLLTAKLFFLRAKRSGSGATNFSLLKQAGDVEENPGPTSMALPVTALLLPLALLLHAARPMDPDLEIRAAFLRQRNTALRTEVAELEQEVQRLENEVSQYETRYGPLGGGKGTGGGGSGGGGSGGGGSEFDIQMTQSPSSLSASVGDRVTITCKASDHINNWLAWYQQKPGQAPKLLIYGATTLETGVPSRFSGSGSGTDYTLTISSLQPEDFATYYCQQSWNTPWTFGQGTKLEIKRGGGGSGGGGSGGGGSQVQLQQPGAELVKPGASVKMSCKASGYAFSSYWINWMKQKPGQGLEWIGQIYPGDGDTNYNGKFKGRATLTADTSSSTAYMQLSSLTSEDSAVYFCARSITTVVGCAMDYWGQGTSVTVSSTREASTKGPSVFPLAPSSKSTSGGTAALGCLVKDYFPEPVTVSWNSGALTSGVHTFPAVLQSSGLYSLSSVVTVPSSSLGTQTYICNVNHKPSNTKVDKRVEPKSCPIKTDVITMDPKDNCSKDANDTLLLQLTNTSAYYMYLLLLLKSVVYFAIITCCLLRRTAFCCNGEKS

SEQ ID NO: 19617 - protein, 969 aa, synthetic construct
MALPVTALLLPLALLLHAARPLEGQPKANPTVTLFPPSSEELQANKATLVCLISDFYPGAVTVAWKADGSPVKAGVETTKPSKQSNNKYAASSYLSLTPEQWKSHRSYSCQVTHEGSTVEKTVAPTECSEVKTDSTDHVKPKETENTKQPSKSCHKPKAIVHTEKVNMMSLTVLGLRMLFAKTVAVNFLLTAKLFFLRAKRSGSGATNFSLLKQAGDVEENPGPTSMALPVTALLLPLALLLHAARPLFNQEVQIPLTESYCGPCPKNWICYKNNCYQFFDESKNWYESQASCMSQNASLLKVYSKEDQDLLKLVKSAHWMGLVHIPTNGSWQWEDGSILSPNLLTIIEMQKGDCALYASSFKGFIENCSTPNTYICMQRTVGGGGSGGGGSGGGGSDLFNQEVQIPLTESYCGPCPKNWICYKNNCYQFFDESKNWYESQASCMSQNASLLKVYSKEDQDLLKLVKSAHWMGLVHIPTNGSWQWEDGSILSPNLLTIIEMQKGDCALYASSFKGFIENCSTPNTYICMQRTVGTGGGGSGGGGSGGGGSEFDIQMTQSPSSLSASVGDRVTITCKASDHINNWLAWYQQKPGQAPKLLIYGATTLETGVPSRFSGSGSGTDYTLTISSLQPEDFATYYCQQSWNTPWTFGQGTKLEIKRGGGGSGGGGSGGGGSQVQLQQPGAELVKPGASVKMSCKASGYAFSSYWINWMKQKPGQGLEWIGQIYPGDGDTNYNGKFKGRATLTADTSSSTAYMQLSSLTSEDSAVYFCARSITTVVGCAMDYWGQGTSVTVSSTREASTKGPSVFPLAPSSKSTSGGTAALGCLVKDYFPEPVTVSWNSGALTSGVHTFPAVLQSSGLYSLSSVVTVPSSSLGTQTYICNVNHKPSNTKVDKRVEPKSCPIKTDVITMDPKDNCSKDANDTLLLQLTNTSAYYMYLLLLLKSVVYFAIITCCLLRRTAFCCNGEKS

SEQ ID NO: 19618 - protein, 674 aa, synthetic construct
MALPVTALLLPLALLLHAARPLEGQPKANPTVTLFPPSSEELQANKATLVCLISDFYPGAVTVAWKADGSPVKAGVETTKPSKQSNNKYAASSYLSLTPEQWKSHRSYSCQVTHEGSTVEKTVAPTECSEVKTDSTDHVKPKETENTKQPSKSCHKPKAIVHTEKVNMMSLTVLGLRMLFAKTVAVNFLLTAKLFFLRAKRSGSGATNFSLLKQAGDVEENPGPTSMALPVTALLLPLALLLHAARPQSVLTQPPSVSGAPGQRVTISCTGSSSNIGAGYDVHWYQQLPGTAPKLLIFGNSNRPSGVPDRFSGFKSGTSASLAITGLQAEDEADYFCQSYDSSLSGSGVFGTGTKVTVLGGGGGSGGGGSGGGGSQMQLVQSGGGLVQPGRSLRLSCAASGFTFDDYAMHWVRQAPGKGLEWVSGISWNSGSIGYADSVKGRFTISRDNAKNSLYLQMNSLRAEDTALYYCAKDIHSGSYYGLLYYAMDVWGQGTTVTVSSTREASTKGPSVFPLAPSSKSTSGGTAALGCLVKDYFPEPVTVSWNSGALTSGVHTFPAVLQSSGLYSLSSVVTVPSSSLGTQTYICNVNHKPSNTKVDKRVEPKSCPIKTDVITMDPKDNCSKDANDTLLLQLTNTSAYYMYLLLLLKSVVYFAIITCCLLRRTAFCCNGEKS

SEQ ID NO: 19619 - protein, 511 aa, synthetic construct
MALPVTALLLPLALLLHAARPLEGQPKANPTVTLFPPSSEELQANKATLVCLISDFYPGAVTVAWKADGSPVKAGVETTKPSKQSNNKYAASSYLSLTPEQWKSHRSYSCQVTHEGSTVEKTVAPTECSEVKTDSTDHVKPKETENTKQPSKSCHKPKAIVHTEKVNMMSLTVLGLRMLFAKTVAVNFLLTAKLFFLRAKRSGSGATNFSLLKQAGDVEENPGPTSMALPVTALLLPLALLLHAARPMCMPCFTTDHQMARKCDDCCGGKGRGKCYGPQCLCRLEGGGGSGGGGSGGGGSFEVCMPCFTTDQQMARKCSDCCGGKGRGKCYGPQCLCRTREASTKGPSVFPLAPSSKSTSGGTAALGCLVKDYFPEPVTVSWNSGALTSGVHTFPAVLQSSGLYSLSSVVTVPSSSLGTQTYICNVNHKPSNTKVDKRVEPKSCPIKTDVITMDPKDNCSKDANDTLLLQLTNTSAYYMYLLLLLKSVVYFAIITCCLLRRTAFCCNGEKS

SEQ ID NO: 19620 - protein, 721 aa, synthetic construct
MALPVTALLLPLALLLHAARPLEGQPKANPTVTLFPPSSEELQANKATLVCLISDFYPGAVTVAWKADGSPVKAGVETTKPSKQSNNKYAASSYLSLTPEQWKSHRSYSCQVTHEGSTVEKTVAPTECSEVKTDSTDHVKPKETENTKQPSKSCHKPKAIVHTEKVNMMSLTVLGLRMLFAKTVAVNFLLTAKLFFLRAKRSGSGATNFSLLKQAGDVEENPGPTSMALPVTALLLPLALLLHAARPFEVCMPCFTTDQQMARKCSDCCGGKGRGKCYGPQCLCRGTGGGGSGGGGSGGGGSEFDIQMTQSPSSLSASVGDRVTITCKASDHINNWLAWYQQKPGQAPKLLIYGATTLETGVPSRFSGSGSGTDYTLTISSLQPEDFATYYCQQSWNTPWTFGQGTKLEIKRGGGGSGGGGSGGGGSQVQLQQPGAELVKPGASVKMSCKASGYAFSSYWINWMKQKPGQGLEWIGQIYPGDGDTNYNGKFKGRATLTADTSSSTAYMQLSSLTSEDSAVYFCARSITTVVGCAMDYWGQGTSVTVSSTREASTKGPSVFPLAPSSKSTSGGTAALGCLVKDYFPEPVTVSWNSGALTSGVHTFPAVLQSSGLYSLSSVVTVPSSSLGTQTYICNVNHKPSNTKVDKRVEPKSCPIKTDVITMDPKDNCSKDANDTLLLQLTNTSAYYMYLLLLLKSVVYFAIITCCLLRRTAFCCNGEKS

SEQ ID NO: 19621 - protein, 851 aa, synthetic construct
MALPVTALLLPLALLLHAARPLEGQPKANPTVTLFPPSSEELQANKATLVCLISDFYPGAVTVAWKADGSPVKAGVETTKPSKQSNNKYAASSYLSLTPEQWKSHRSYSCQVTHEGSTVEKTVAPTECSEVKTDSTDHVKPKETENTKQPSKSCHKPKAIVHTEKVNMMSLTVLGLRMLFAKTVAVNFLLTAKLFFLRAKRSGSGATNFSLLKQAGDVEENPGPTSMALPVTALLLPLALLLHAARPFESPVAPACDPRLLNKLLRDSHLLHSRLSQCPDVDPLSIPVLLPAVDFSLGEWKTQTEQSKAQDILGAVSLLLEGVMAARGQLEPSCLSSLLGQLSGQVRLLLGALQGLLGTQLPLQGRTTAHKDPNALFLSLQQLLRGKVRFLLLVEGPTLCVRRTLPTTAVPSSTSGTGGGGSGGGGSGGGGSEFDIQMTQSPSSLSASVGDRVTITCKASDHINNWLAWYQQKPGQAPKLLIYGATTLETGVPSRFSGSGSGTDYTLTISSLQPEDFATYYCQQSWNTPWTFGQGTKLEIKRGGGGSGGGGSGGGGSQVQLQQPGAELVKPGASVKMSCKASGYAFSSYWINWMKQKPGQGLEWIGQIYPGDGDTNYNGKFKGRATLTADTSSSTAYMQLSSLTSEDSAVYFCARSITTVVGCAMDYWGQGTSVTVSSTREASTKGPSVFPLAPSSKSTSGGTAALGCLVKDYFPEPVTVSWNSGALTSGVHTFPAVLQSSGLYSLSSVVTVPSSSLGTQTYICNVNHKPSNTKVDKRVEPKSCPIKTDVITMDPKDNCSKDANDTLLLQLTNTSAYYMYLLLLLKSVVYFAIITCCLLRRTAFCCNGEKS

SEQ ID NO: 19622 - protein, 758 aa, synthetic construct
MALPVTALLLPLALLLHAARPLEGQPKANPTVTLFPPSSEELQANKATLVCLISDFYPGAVTVAWKADGSPVKAGVETTKPSKQSNNKYAASSYLSLTPEQWKSHRSYSCQVTHEGSTVEKTVAPTECSEVKTDSTDHVKPKETENTKQPSKSCHKPKAIVHTEKVNMMSLTVLGLRMLFAKTVAVNFLLTAKLFFLRAKRSGSGATNFSLLKQAGDVEENPGPTSMALPVTALLLPLALLLHAARPFEMGSWEEFELRLNAIEERLYALGGSEAELAYFEYVIADFEGNLQRYKGKGNPEVEALYFEADAIFEELVAYRHNGTGGGGSGGGGSGGGGSEFDIQMTQSPSSLSASVGDRVTITCKASDHINNWLAWYQQKPGQAPKLLIYGATTLETGVPSRFSGSGSGTDYTLTISSLQPEDFATYYCQQSWNTPWTFGQGTKLEIKRGGGGSGGGGSGGGGSQVQLQQPGAELVKPGASVKMSCKASGYAFSSYWINWMKQKPGQGLEWIGQIYPGDGDTNYNGKFKGRATLTADTSSSTAYMQLSSLTSEDSAVYFCARSITTVVGCAMDYWGQGTSVTVSSTREASTKGPSVFPLAPSSKSTSGGTAALGCLVKDYFPEPVTVSWNSGALTSGVHTFPAVLQSSGLYSLSSVVTVPSSSLGTQTYICNVNHKPSNTKVDKRVEPKSCPIKTDVITMDPKDNCSKDANDTLLLQLTNTSAYYMYLLLLLKSVVYFAIITCCLLRRTAFCCNGEKS

SEQ ID NO: 19623 - protein, 873 aa, synthetic construct
MALPVTALLLPLALLLHAARPLEEASTKGPSVFPLAPSSKSTSGGTAALGCLVKDYFPEPVTVSWNSGALTSGVHTFPAVLQSSGLYSLSSVVTVPSSSLGTQTYICNVNHKPSNTKVDKRVEPKSCGRADCGFTSESYQQGVLSATILYEILLGKATLYAVLVSALVLMAMVKRKDSRGRAKRSGSGATNFSLLKQAGDVEENPGPTSMALPVTALLLPLALLLHAARPDIQMTQTTSSLSASLGDRVTISCRASQDISKYLNWYQQKPDGTVKLLIYHTSRLHSGVPSRFSGSGSGTDYSLTISNLEQEDIATYFCQQGNTLPYTFGGGTKLEITGGGGSGGGGSGGGGSEVKLQESGPGLVAPSQSLSVTCTVSGVSLPDYGVSWIRQPPRKGLEWLGVIWGSETTYYNSALKSRLTIIKDNSKSQVFLKMNSLQTDDTAIYYCAKHYYYGGSYAMDYWGQGTSVTVSSTRGQPKANPTVTLFPPSSEELQANKATLVCLISDFYPGAVTVAWKADGSPVKAGVETTKPSKQSNNKYAASSYLSLTPEQWKSHRSYSCQVTHEGSTVEKTVAPTECSIPEDTFFPSPESSCDVKLVEKSFETDTNLNFQNLSVIGFRILLLKVAGFNLLMTLRLWSSRAKRSGSGVKQTLNFDLLKLAGDVESNPGPSRGHMTEYKPTVRLATRDDVPRAVRTLAAAFADYPATRHTVDPDRHIERVTELQELFLTRVGLDIGKVWVADDGAAVAVWTTPESVEAGAVFAEIGPRMAELSGSRLAAQQQMEGLLAPHRPKEPAWFLATVGVSPDHQGKGLGSAVVLPGVEAAERAGVPAFLETSAPRNLPFYERLGFTVTADVEVPEGPRTWCMTRKPGA

SEQ ID NO: 19624 - protein, 874 aa, synthetic construct
MALPVTALLLPLALLLHAARPLEEASTKGPSVFPLAPSSKSTSGGTAALGCLVKDYFPEPVTVSWNSGALTSGVHTFPAVLQSSGLYSLSSVVTVPSSSLGTQTYICNVNHKPSNTKVDKRVEPKSCGRADCGFTSESYQQGVLSATILYEILLGKATLYAVLVSALVLMAMVKRKDSRGRAKRSGSGATNFSLLKQAGDVEENPGPTSTMALPVTALLLPLALLLHAARPEIVMTQSPATLSLSPGERATLSCRASQDISKYLNWYQQKPGQAPRLLIYHTSRLHSGIPARFSGSGSGTDYTLTISSLQPEDFAVYFCQQGNTLPYTFGQGTKLEIKGGGGSGGGGSGGGGSQVQLQESGPGLVKPSETLSLTCTVSGVSLPDYGVSWIRQPPGKGLEWIGVIWGSETTYYNSSLKSRVTISKDNSKNQVSLKLSSVTAADTAVYYCAKHYYYGGSYAMDYWGQGTLVTVSSTRGQPKANPTVTLFPPSSEELQANKATLVCLISDFYPGAVTVAWKADGSPVKAGVETTKPSKQSNNKYAASSYLSLTPEQWKSHRSYSCQVTHEGSTVEKTVAPTECSIPEDTFFPSPESSCDVKLVEKSFETDTNLNFQNLSVIGFRILLLKVAGFNLLMTLRLWSSRAKRSGSGVKQTLNFDLLKLAGDVESNPGPSRGHMTEYKPTVRLATRDDVPRAVRTLAAAFADYPATRHTVDPDRHIERVTELQELFLTRVGLDIGKVWVADDGAAVAVWTTPESVEAGAVFAEIGPRMAELSGSRLAAQQQMEGLLAPHRPKEPAWFLATVGVSPDHQGKGLGSAVVLPGVEAAERAGVPAFLETSAPRNLPFYERLGFTVTADVEVPEGPRTWCMTRKPGA

SEQ ID NO: 19625 - protein, 875 aa, synthetic construct
MALPVTALLLPLALLLHAARPLEEASTKGPSVFPLAPSSKSTSGGTAALGCLVKDYFPEPVTVSWNSGALTSGVHTFPAVLQSSGLYSLSSVVTVPSSSLGTQTYICNVNHKPSNTKVDKRVEPKSCGRADCGFTSESYQQGVLSATILYEILLGKATLYAVLVSALVLMAMVKRKDSRGRAKRSGSGATNFSLLKQAGDVEENPGPTSTMALPVTALLLPLALLLHAARPDEIVLTQSPATLSLSPGERATLSCSASSSVSYMHWYQQKPGQAPRLLIYDTSKLASGIPARFSGSGSGTDFTLTISSLEPEDVAVYYCFQGSVYPFTFGQGTKLEIKRGGGGSGGGGSGGGGSQVQLQESGPGLVKPSQTLSLTCTVSGGSISTSGMGVGWIRQHPGKGLEWIGHIWWDDDKRYNPALKSRVTISVDTSKNQFSLKLSSVTAADTAVYYCARMELWSYYFDYWGQGTLVTVSSTRGQPKANPTVTLFPPSSEELQANKATLVCLISDFYPGAVTVAWKADGSPVKAGVETTKPSKQSNNKYAASSYLSLTPEQWKSHRSYSCQVTHEGSTVEKTVAPTECSIPEDTFFPSPESSCDVKLVEKSFETDTNLNFQNLSVIGFRILLLKVAGFNLLMTLRLWSSRAKRSGSGVKQTLNFDLLKLAGDVESNPGPSRGHMTEYKPTVRLATRDDVPRAVRTLAAAFADYPATRHTVDPDRHIERVTELQELFLTRVGLDIGKVWVADDGAAVAVWTTPESVEAGAVFAEIGPRMAELSGSRLAAQQQMEGLLAPHRPKEPAWFLATVGVSPDHQGKGLGSAVVLPGVEAAERAGVPAFLETSAPRNLPFYERLGFTVTADVEVPEGPRTWCMTRKPGA

SEQ ID NO: 19626 - protein, 871 aa, synthetic construct
MALPVTALLLPLALLLHAARPLEEASTKGPSVFPLAPSSKSTSGGTAALGCLVKDYFPEPVTVSWNSGALTSGVHTFPAVLQSSGLYSLSSVVTVPSSSLGTQTYICNVNHKPSNTKVDKRVEPKSCGRADCGFTSESYQQGVLSATILYEILLGKATLYAVLVSALVLMAMVKRKDSRGRAKRSGSGATNFSLLKQAGDVEENPGPTSMALPVTALLLPLALLLHAARPDIQMTQSPSSLSASVGDRVTITCRASQDISNYLNWYQQKPGKAPKLLIYYTSRLHSGVPSRFSGSGSGTDFTLTISSLQPEDFATYYCQQGNTLPYTFGQGTKVEIKRGGGGSGGGGSGGGGSEVQLVESGGGLVQPGGSLRLSCAASGFTFSDYFMSWVRQAPGKGLEWVATISNGGTYTYYPDSVKGRFTISRDNSKNTLYLQMNSLRAEDTAVYYCARFDGYIFDYWGQGTLVTVSSTRGQPKANPTVTLFPPSSEELQANKATLVCLISDFYPGAVTVAWKADGSPVKAGVETTKPSKQSNNKYAASSYLSLTPEQWKSHRSYSCQVTHEGSTVEKTVAPTECSIPEDTFFPSPESSCDVKLVEKSFETDTNLNFQNLSVIGFRILLLKVAGFNLLMTLRLWSSRAKRSGSGVKQTLNFDLLKLAGDVESNPGPSRGHMTEYKPTVRLATRDDVPRAVRTLAAAFADYPATRHTVDPDRHIERVTELQELFLTRVGLDIGKVWVADDGAAVAVWTTPESVEAGAVFAEIGPRMAELSGSRLAAQQQMEGLLAPHRPKEPAWFLATVGVSPDHQGKGLGSAVVLPGVEAAERAGVPAFLETSAPRNLPFYERLGFTVTADVEVPEGPRTWCMTRKPGA

SEQ ID NO: 19627 - protein, 875 aa, synthetic construct
MALPVTALLLPLALLLHAARPLEEASTKGPSVFPLAPSSKSTSGGTAALGCLVKDYFPEPVTVSWNSGALTSGVHTFPAVLQSSGLYSLSSVVTVPSSSLGTQTYICNVNHKPSNTKVDKRVEPKSCGRADCGFTSESYQQGVLSATILYEILLGKATLYAVLVSALVLMAMVKRKDSRGRAKRSGSGATNFSLLKQAGDVEENPGPTSMALPVTALLLPLALLLHAARPDIQMTQSPSSLSASVGDRVTITCKASDHINNWLAWYQQKPGQAPKLLIYGATTLETGVPSRFSGSGSGTDYTLTISSLQPEDFATYYCQQSWNTPWTFGQGTKLEIKRGGGGSGGGGSGGGGSQVQLQQPGAELVKPGASVKMSCKASGYAFSSYWINWMKQKPGQGLEWIGQIYPGDGDTNYNGKFKGRATLTADTSSSTAYMQLSSLTSEDSAVYFCARSITTVVGCAMDYWGQGTSVTVSSTRGQPKANPTVTLFPPSSEELQANKATLVCLISDFYPGAVTVAWKADGSPVKAGVETTKPSKQSNNKYAASSYLSLTPEQWKSHRSYSCQVTHEGSTVEKTVAPTECSIPEDTFFPSPESSCDVKLVEKSFETDTNLNFQNLSVIGFRILLLKVAGFNLLMTLRLWSSRAKRSGSGVKQTLNFDLLKLAGDVESNPGPSRGHMTEYKPTVRLATRDDVPRAVRTLAAAFADYPATRHTVDPDRHIERVTELQELFLTRVGLDIGKVWVADDGAAVAVWTTPESVEAGAVFAEIGPRMAELSGSRLAAQQQMEGLLAPHRPKEPAWFLATVGVSPDHQGKGLGSAVVLPGVEAAERAGVPAFLETSAPRNLPFYERLGFTVTADVEVPEGPRTWCMTRKPGA

SEQ ID NO: 19628 - protein, 877 aa, synthetic construct
MALPVTALLLPLALLLHAARPLEEASTKGPSVFPLAPSSKSTSGGTAALGCLVKDYFPEPVTVSWNSGALTSGVHTFPAVLQSSGLYSLSSVVTVPSSSLGTQTYICNVNHKPSNTKVDKRVEPKSCGRADCGFTSESYQQGVLSATILYEILLGKATLYAVLVSALVLMAMVKRKDSRGRAKRSGSGATNFSLLKQAGDVEENPGPTSMALPVTALLLPLALLLHAARPQIVLSQSPAILSASPGEKVTMTCRASSSVSYMHWYQQKPGSSPKPWIYATSNLASGVPARFSGSGSGTSYSFTISRVEAEDAATYYCQQWTFNPPTFGGGTRLEIKRTVAAGGGGSGGGGSGGGGSQAYLQQSGAELVRPGASVKMSCKASGYTFTSYNMHWVKQTPRQGLEWIGGIYPGNGDTSYNQKFKGKATLTVGKSSSTAYMQLSSLTSEDSAVYFCARYDYNYAMDYWGQGTSVTVSSASTRGQPKANPTVTLFPPSSEELQANKATLVCLISDFYPGAVTVAWKADGSPVKAGVETTKPSKQSNNKYAASSYLSLTPEQWKSHRSYSCQVTHEGSTVEKTVAPTECSIPEDTFFPSPESSCDVKLVEKSFETDTNLNFQNLSVIGFRILLLKVAGFNLLMTLRLWSSRAKRSGSGVKQTLNFDLLKLAGDVESNPGPSRGHMTEYKPTVRLATRDDVPRAVRTLAAAFADYPATRHTVDPDRHIERVTELQELFLTRVGLDIGKVWVADDGAAVAVWTTPESVEAGAVFAEIGPRMAELSGSRLAAQQQMEGLLAPHRPKEPAWFLATVGVSPDHQGKGLGSAVVLPGVEAAERAGVPAFLETSAPRNLPFYERLGFTVTADVEVPEGPRTWCMTRKPGA

SEQ ID NO: 19629 - protein, 875 aa, synthetic construct
MALPVTALLLPLALLLHAARPLEEASTKGPSVFPLAPSSKSTSGGTAALGCLVKDYFPEPVTVSWNSGALTSGVHTFPAVLQSSGLYSLSSVVTVPSSSLGTQTYICNVNHKPSNTKVDKRVEPKSCGRADCGFTSESYQQGVLSATILYEILLGKATLYAVLVSALVLMAMVKRKDSRGRAKRSGSGATNFSLLKQAGDVEENPGPTSMALPVTALLLPLALLLHAARPEIVLTQSPATLSLSPGERATLSCRASQSVSSYLAWYQQKPGQAPRLLIYDASNRATGIPARFSGSGSGTDFTLTISSLEPEDFAVYYCQQRSNWPITFGQGTRLEIKGGGGSGGGGSGGGGSEVQLVESGGGLVQPDRSLRLSCAASGFTFHDYAMHWVRQAPGKGLEWVSTISWNSGTIGYADSVKGRFTISRDNAKNSLYLQMNSLRAEDTALYYCAKDIQYGNYYYGMDVWGQGTTVTVSSTRGQPKANPTVTLFPPSSEELQANKATLVCLISDFYPGAVTVAWKADGSPVKAGVETTKPSKQSNNKYAASSYLSLTPEQWKSHRSYSCQVTHEGSTVEKTVAPTECSIPEDTFFPSPESSCDVKLVEKSFETDTNLNFQNLSVIGFRILLLKVAGFNLLMTLRLWSSRAKRSGSGVKQTLNFDLLKLAGDVESNPGPSRGHMTEYKPTVRLATRDDVPRAVRTLAAAFADYPATRHTVDPDRHIERVTELQELFLTRVGLDIGKVWVADDGAAVAVWTTPESVEAGAVFAEIGPRMAELSGSRLAAQQQMEGLLAPHRPKEPAWFLATVGVSPDHQGKGLGSAVVLPGVEAAERAGVPAFLETSAPRNLPFYERLGFTVTADVEVPEGPRTWCMTRKPGA

SEQ ID NO: 19630 - protein, 873 aa, synthetic construct
MALPVTALLLPLALLLHAARPLEEASTKGPSVFPLAPSSKSTSGGTAALGCLVKDYFPEPVTVSWNSGALTSGVHTFPAVLQSSGLYSLSSVVTVPSSSLGTQTYICNVNHKPSNTKVDKRVEPKSCGRADCGFTSESYQQGVLSATILYEILLGKATLYAVLVSALVLMAMVKRKDSRGRAKRSGSGATNFSLLKQAGDVEENPGPTSMALPVTALLLPLALLLHAARPDIQMTQSPSSLSASVGDRVTITCRASQDVNTAVAWYQQKPGKAPKLLIYSASFLESGVPSRFSGSRSGTDFTLTISSLQPEDFATYYCQQHYTTPPTFGQTKVEIKRGGGGSGGGGSGGGGSEVQLVESGGGLVQPGGSLRLSCAASGFNIKDTYIHWVRQAPGKGLEWVARIYPTNGYTRYADSVKGRFTISADTSKNTAYLQMNSLRAEDTAVYYCSRWGGDGFYAMDVWGQGTLVTVSSTRGQPKANPTVTLFPPSSEELQANKATLVCLISDFYPGAVTVAWKADGSPVKAGVETTKPSKQSNNKYAASSYLSLTPEQWKSHRSYSCQVTHEGSTVEKTVAPTECSIPEDTFFPSPESSCDVKLVEKSFETDTNLNFQNLSVIGFRILLLKVAGFNLLMTLRLWSSRAKRSGSGVKQTLNFDLLKLAGDVESNPGPSRGHMTEYKPTVRLATRDDVPRAVRTLAAAFADYPATRHTVDPDRHIERVTELQELFLTRVGLDIGKVWVADDGAAVAVWTTPESVEAGAVFAEIGPRMAELSGSRLAAQQQMEGLLAPHRPKEPAWFLATVGVSPDHQGKGLGSAVVLPGVEAAERAGVPAFLETSAPRNLPFYERLGFTVTADVEVPEGPRTWCMTRKPGA

SEQ ID NO: 19631 - protein, 752 aa, synthetic construct
MALPVTALLLPLALLLHAARPLEEASTKGPSVFPLAPSSKSTSGGTAALGCLVKDYFPEPVTVSWNSGALTSGVHTFPAVLQSSGLYSLSSVVTVPSSSLGTQTYICNVNHKPSNTKVDKRVEPKSCGRADCGFTSESYQQGVLSATILYEILLGKATLYAVLVSALVLMAMVKRKDSRGRAKRSGSGATNFSLLKQAGDVEENPGPTSMALPVTALLLPLALLLHAARPDEFEVQLVESGGGLVQAGGSLRLSCAASGITFSINTMGWYRQAPGKQRELVALISSIGDTYYADSVKGRFTISRDNAKNTVYLQMNSLKPEDTAVYYCKRFRTAAQGTDYWGQGTQVTVSSTRGQPKANPTVTLFPPSSEELQANKATLVCLISDFYPGAVTVAWKADGSPVKAGVETTKPSKQSNNKYAASSYLSLTPEQWKSHRSYSCQVTHEGSTVEKTVAPTECSIPEDTFFPSPESSCDVKLVEKSFETDTNLNFQNLSVIGFRILLLKVAGFNLLMTLRLWSSRAKRSGSGVKQTLNFDLLKLAGDVESNPGPSRGHMTEYKPTVRLATRDDVPRAVRTLAAAFADYPATRHTVDPDRHIERVTELQELFLTRVGLDIGKVWVADDGAAVAVWTTPESVEAGAVFAEIGPRMAELSGSRLAAQQQMEGLLAPHRPKEPAWFLATVGVSPDHQGKGLGSAVVLPGVEAAERAGVPAFLETSAPRNLPFYERLGFTVTADVEVPEGPRTWCMTRKPGA

SEQ ID NO: 19632 - protein, 752 aa, synthetic construct; identical to SEQ ID NO: 19631

SEQ ID NO: 19633 - protein, 1017 aa, synthetic construct
MALPVTALLLPLALLLHAARPLEEASTKGPSVFPLAPSSKSTSGGTAALGCLVKDYFPEPVTVSWNSGALTSGVHTFPAVLQSSGLYSLSSVVTVPSSSLGTQTYICNVNHKPSNTKVDKRVEPKSCGRADCGFTSESYQQGVLSATILYEILLGKATLYAVLVSALVLMAMVKRKDSRGRAKRSGSGATNFSLLKQAGDVEENPGPTSMALPVTALLLPLALLLHAARPQVQLVESGGGLVQAGDSVTLSCTASGRTFSSYALAWFRQRPGKEREFVAGLRWGGPTNYADSVKDRFTISGDSAKHTMYLQMNSLKPEDTAVYYCGYNPGGWAVPSQYEYDSWGQGTQVTVSSGTGGGGSGGGGSGGGGSEFDIQMTQSPSSLSASVGDRVTITCKASDHINNWLAWYQQKPGQAPKLLIYGATTLETGVPSRFSGSGSGTDYTLTISSLQPEDFATYYCQQSWNTPWTFGQGTKLEIKRGGGGSGGGGSGGGGSQVQLQQPGAELVKPGASVKMSCKASGYAFSSYWINWMKQKPGQGLEWIGQIYPGDGDTNYNGKFKGRATLTADTSSSTAYMQLSSLTSEDSAVYFCARSITTVVGCAMDYWGQGTSVTVSSTRGQPKANPTVTLFPPSSEELQANKATLVCLISDFYPGAVTVAWKADGSPVKAGVETTKPSKQSNNKYAASSYLSLTPEQWKSHRSYSCQVTHEGSTVEKTVAPTECSIPEDTFFPSPESSCDVKLVEKSFETDTNLNFQNLSVIGFRILLLKVAGFNLLMTLRLWSSRAKRSGSGVKQTLNFDLLKLAGDVESNPGPSRGHMTEYKPTVRLATRDDVPRAVRTLAAAFADYPATRHTVDPDRHIERVTELQELFLTRVGLDIGKVWVADDGAAVAVWTTPESVEAGAVFAEIGPRMAELSGSRLAAQQQMEGLLAPHRPKEPAWFLATVGVSPDHQGKGLGSAVVLPGVEAAERAGVPAFLETSAPRNLPFYERLGFTVTADVEVPEGPRTWCMTRKPGA

SEQ ID NO: 19634 - protein, 1146 aa, synthetic construct
MALPVTALLLPLALLLHAARPLEEASTKGPSVFPLAPSSKSTSGGTAALGCLVKDYFPEPVTVSWNSGALTSGVHTFPAVLQSSGLYSLSSVVTVPSSSLGTQTYICNVNHKPSNTKVDKRVEPKSCGRADCGFTSESYQQGVLSATILYEILLGKATLYAVLVSALVLMAMVKRKDSRGRAKRSGSGATNFSLLKQAGDVEENPGPTSMALPVTALLLPLALLLHAARPEVQLLESGGGLVQPGGSLRLSCAASGFTFSSYAMSWVRQAPGKGLEWVSSISGSGDYIYYADSVKGRFTISRDISKNTLYLQMNSLRAEDTAVYYCAKEGTGANSSLADYRGQGTLVTVSSGGGSGGGSQVQLVESGGGLVQAGDSVTLSCTASGRTFSSYALAWFRQRPGKEREFVAGLRWGGPTNYADSVKDRFTISGDSAKHTMYLQMNSLKPEDTAVYYCGYNPGGWAVPSQYEYDSWGQGTQVTVSSGTGGGGSGGGGSGGGGSEFDIQMTQSPSSLSASVGDRVTITCKASDHINNWLAWYQQKPGQAPKLLIYGATTLETGVPSRFSGSGSGTDYTLTISSLQPEDFATYYCQQSWNTPWTFGQGTKLEIKRGGGGSGGGGSGGGGSQVQLQQPGAELVKPGASVKMSCKASGYAFSSYWINWMKQKPGQGLEWIGQIYPGDGDTNYNGKFKGRATLTADTSSSTAYMQLSSLTSEDSAVYFCARSITTVVGCAMDYWGQGTSVTVSSTRGQPKANPTVTLFPPSSEELQANKATLVCLISDFYPGAVTVAWKADGSPVKAGVETTKPSKQSNNKYAASSYLSLTPEQWKSHRSYSCQVTHEGSTVEKTVAPTECSIPEDTFFPSPESSCDVKLVEKSFETDTNLNFQNLSVIGFRILLLKVAGFNLLMTLRLWSSRAKRSGSGVKQTLNFDLLKLAGDVESNPGPSRGHMTEYKPTVRLATRDDVPRAVRTLAAAFADYPATRHTVDPDRHIERVTELQELFLTRVGLDIGKVWVADDGAAVAVWTTPESVEAGAVFAEIGPRMAELSGSRLAAQQQMEGLLAPHRPKEPAWFLATVGVSPDHQGKGLGSAVVLPGVEAAERAGVPAFLETSAPRNLPFYERLGFTVTADVEVPEGPRTWCMTRKPGA

SEQ ID NO: 19635 - protein, 1144 aa, synthetic construct
MALPVTALLLPLALLLHAARPLEEASTKGPSVFPLAPSSKSTSGGTAALGCLVKDYFPEPVTVSWNSGALTSGVHTFPAVLQSSGLYSLSSVVTVPSSSLGTQTYICNVNHKPSNTKVDKRVEPKSCGRADCGFTSESYQQGVLSATILYEILLGKATLYAVLVSALVLMAMVKRKDSRGRAKRSGSGATNFSLLKQAGDVEENPGPTSMALPVTALLLPLALLLHAARPGVTQSPTHLIKTRGQQATLRCSPISGHTSVYWYQQALGLGLQFLLWYDEGEERNRGNFPPRFSGRQFPNYSSELNVNALELEDSALYLCASSLGGPRGLAGLRGDEQFFGPGTRLTVLEGGGSGGGSQVQLVESGGGLVQAGDSVTLSCTASGRTFSSYALAWFRQRPGKEREFVAGLRWGGPTNYADSVKDRFTISGDSAKHTMYLQMNSLKPEDTAVYYCGYNPGGWAVPSQYEYDSWGQGTQVTVSSGTGGGGSGGGGSGGGGSEFDIQMTQSPSSLSASVGDRVTITCKASDHINNWLAWYQQKPGQAPKLLIYGATTLETGVPSRFSGSGSGTDYTLTISSLQPEDFATYYCQQSWNTPWTFGQGTKLEIKRGGGGSGGGGSGGGGSQVQLQQPGAELVKPGASVKMSCKASGYAFSSYWINWMKQKPGQGLEWIGQIYPGDGDTNYNGKFKGRATLTADTSSSTAYMQLSSLTSEDSAVYFCARSITTVVGCAMDYWGQGTSVTVSSTRGQPKANPTVTLFPPSSEELQANKATLVCLISDFYPGAVTVAWKADGSPVKAGVETTKPSKQSNNKYAASSYLSLTPEQWKSHRSYSCQVTHEGSTVEKTVAPTECSIPEDTFFPSPESSCDVKLVEKSFETDTNLNFQNLSVIGFRILLLKVAGFNLLMTLRLWSSRAKRSGSGVKQTLNFDLLKLAGDVESNPGPSRGHMTEYKPTVRLATRDDVPRAVRTLAAAFADYPATRHTVDPDRHIERVTELQELFLTRVGLDIGKVWVADDGAAVAVWTTPESVEAGAVFAEIGPRMAELSGSRLAAQQQMEGLLAPHRPKEPAWFLATVGVSPDHQGKGLGSAVVLPGVEAAERAGVPAFLETSAPRNLPFYERLGFTVTADVEVPEGPRTWCMTRKPGA

SEQ ID NO: 19636 - protein, 1138 aa, synthetic construct
MALPVTALLLPLALLLHAARPLEEASTKGPSVFPLAPSSKSTSGGTAALGCLVKDYFPEPVTVSWNSGALTSGVHTFPAVLQSSGLYSLSSVVTVPSSSLGTQTYICNVNHKPSNTKVDKRVEPKSCGRADCGFTSESYQQGVLSATILYEILLGKATLYAVLVSALVLMAMVKRKDSRGRAKRSGSGATNFSLLKQAGDVEENPGPTSMALPVTALLLPLALLLHAARPGVTQSPTHLIKTRGQQATLRCSPISGHTSVYWYQQALGLGLQFLLWYDEGEERNRGNFPPRFSGRQFPNYSSELNVNALELEDSALYLCASSLGGPRGLAGLRGDEQFFGPGTRLTVLEGGGSGGGSGVTQSPTHLIKTRGQQATLRCSPISGHTSVYWYQQALGLGLQFLLWYDEGEERNRGNFPPRFSGRQFPNYSSELNVNALELEDSALYLCASSLGGDELGADGNEQFFGPGTRLTVLEGTGGGGSGGGGSGGGGSEFDIQMTQSPSSLSASVGDRVTITCKASDHINNWLAWYQQKPGQAPKLLIYGATTLETGVPSRFSGSGSGTDYTLTISSLQPEDFATYYCQQSWNTPWTFGQGTKLEIKRGGGGSGGGGSGGGGSQVQLQQPGAELVKPGASVKMSCKASGYAFSSYWINWMKQKPGQGLEWIGQIYPGDGDTNYNGKFKGRATLTADTSSSTAYMQLSSLTSEDSAVYFCARSITTVVGCAMDYWGQGTSVTVSSTRGQPKANPTVTLFPPSSEELQANKATLVCLISDFYPGAVTVAWKADGSPVKAGVETTKPSKQSNNKYAASSYLSLTPEQWKSHRSYSCQVTHEGSTVEKTVAPTECSIPEDTFFPSPESSCDVKLVEKSFETDTNLNFQNLSVIGFRILLLKVAGFNLLMTLRLWSSRAKRSGSGVKQTLNFDLLKLAGDVESNPGPSRGHMTEYKPTVRLATRDDVPRAVRTLAAAFADYPATRHTVDPDRHIERVTELQELFLTRVGLDIGKVWVADDGAAVAVWTTPESVEAGAVFAEIGPRMAELSGSRLAAQQQMEGLLAPHRPKEPAWFLATVGVSPDHQGKGLGSAVVLPGVEAAERAGVPAFLETSAPRNLPFYERLGFTVTADVEVPEGPRTWCMTRKPGA

SEQ ID NO: 19637 - protein, 758 aa, synthetic construct
MALPVTALLLPLALLLHAARPLEEASTKGPSVFPLAPSSKSTSGGTAALGCLVKDYFPEPVTVSWNSGALTSGVHTFPAVLQSSGLYSLSSVVTVPSSSLGTQTYICNVNHKPSNTKVDKRVEPKSCGRADCGFTSESYQQGVLSATILYEILLGKATLYAVLVSALVLMAMVKRKDSRGRAKRSGSGATNFSLLKQAGDVEENPGPTSMALPVTALLLPLALLLHAARPDEFGSDLGIKLLFAAAKGQDDEVRILLAAGADVNAKDFEGYTPLHVAAYDGHLEIVEVLLKAGADVNAKDSQGRTPLHEAAYSGHLEIVEVLLKAGADVNAQDDAGETPADLAAAWGHEDIAEVLQKTRGQPKANPTVTLFPPSSEELQANKATLVCLISDFYPGAVTVAWKADGSPVKAGVETTKPSKQSNNKYAASSYLSLTPEQWKSHRSYSCQVTHEGSTVEKTVAPTECSIPEDTFFPSPESSCDVKLVEKSFETDTNLNFQNLSVIGFRILLLKVAGFNLLMTLRLWSSRAKRSGSGVKQTLNFDLLKLAGDVESNPGPSRGHMTEYKPTVRLATRDDVPRAVRTLAAAFADYPATRHTVDPDRHIERVTELQELFLTRVGLDIGKVWVADDGAAVAVWTTPESVEAGAVFAEIGPRMAELSGSRLAAQQQMEGLLAPHRPKEPAWFLATVGVSPDHQGKGLGSAVVLPGVEAAERAGVPAFLETSAPRNLPFYERLGFTVTADVEVPEGPRTWCMTRKPGA

SEQ ID NO: 19638 - protein, 687 aa, synthetic construct
MALPVTALLLPLALLLHAARPLEEASTKGPSVFPLAPSSKSTSGGTAALGCLVKDYFPEPVTVSWNSGALTSGVHTFPAVLQSSGLYSLSSVVTVPSSSLGTQTYICNVNHKPSNTKVDKRVEPKSCGRADCGFTSESYQQGVLSATILYEILLGKATLYAVLVSALVLMAMVKRKDSRGRAKRSGSGATNFSLLKQAGDVEENPGPTSMDWIWRILFLVGAATGAHSFEGSGFEYAKEMRNAYWEIALLPNLTNQQKRAPIRKLYDDPSQSSELLSEAKKLNDSQTRGQPKANPTVTLFPPSSEELQANKATLVCLISDFYPGAVTVAWKADGSPVKAGVETTKPSKQSNNKYAASSYLSLTPEQWKSHRSYSCQVTHEGSTVEKTVAPTECSIPEDTFFPSPESSCDVKLVEKSFETDTNLNFQNLSVIGFRILLLKVAGFNLLMTLRLWSSRAKRSGSGVKQTLNFDLLKLAGDVESNPGPSRGHMTEYKPTVRLATRDDVPRAVRTLAAAFADYPATRHTVDPDRHIERVTELQELFLTRVGLDIGKVWVADDGAAVAVWTTPESVEAGAVFAEIGPRMAELSGSRLAAQQQMEGLLAPHRPKEPAWFLATVGVSPDHQGKGLGSAVVLPGVEAAERAGVPAFLETSAPRNLPFYERLGFTVTADVEVPEGPRTWCMTRKPGA

SEQ ID NO: 19639 - protein, 909 aa, synthetic construct
MALPVTALLLPLALLLHAARPLEEASTKGPSVFPLAPSSKSTSGGTAALGCLVKDYFPEPVTVSWNSGALTSGVHTFPAVLQSSGLYSLSSVVTVPSSSLGTQTYICNVNHKPSNTKVDKRVEPKSCGRADCGFTSESYQQGVLSATILYEILLGKATLYAVLVSALVLMAMVKRKDSRGRAKRSGSGATNFSLLKQAGDVEENPGPTSMALPVTALLLPLALLLHAARPDEFEVQLVESGGGLVQAGGSLRLSCAASGITFSINTMGWYRQAPGKQRELVALISSIGDTYYADSVKGRFTISRDNAKNTVYLQMNSLKPEDTAVYYCKRFRTAAQGTDYWGQGTQVTVSSLEGGGGSGGGGSGGGGSGSGGSGSGGSGSGGSGSGGSFEVQLVESGGGLVQPGGSLRLSCAASGSIFGFNDMAWYRQAPGKQRELVALISRVGVTSSADSVKGRFTISRVNAKDTVYLQMNSLKPEDTAVYYCYMDQRLDGSTLAYWGQGTQVTVSSTRGQPKANPTVTLFPPSSEELQANKATLVCLISDFYPGAVTVAWKADGSPVKAGVETTKPSKQSNNKYAASSYLSLTPEQWKSHRSYSCQVTHEGSTVEKTVAPTECSIPEDTFFPSPESSCDVKLVEKSFETDTNLNFQNLSVIGFRILLLKVAGFNLLMTLRLWSSRAKRSGSGVKQTLNFDLLKLAGDVESNPGPSRGHMTEYKPTVRLATRDDVPRAVRTLAAAFADYPATRHTVDPDRHIERVTELQELFLTRVGLDIGKVWVADDGAAVAVWTTPESVEAGAVFAEIGPRMAELSGSRLAAQQQMEGLLAPHRPKEPAWFLATVGVSPDHQGKGLGSAVVLPGVEAAERAGVPAFLETSAPRNLPFYERLGFTVTADVEVPEGPRTWCMTRKPGA

SEQ ID NO: 19640 - protein, 823 aa, synthetic construct
MALPVTALLLPLALLLHAARPLEEASTKGPSVFPLAPSSKSTSGGTAALGCLVKDYFPEPVTVSWNSGALTSGVHTFPAVLQSSGLYSLSSVVTVPSSSLGTQTYICNVNHKPSNTKVDKRVEPKSCGRADCGFTSESYQQGVLSATILYEILLGKATLYAVLVSALVLMAMVKRKDSRGRAKRSGSGATNFSLLKQAGDVEENPGPTSMALPVTALLLPLALLLHAARPGMRTEDLPKAVVFLEPQWYRVLEKDSVTLKCQGAYSPEDNSTQWFHNESLISSQASSYFIDAATVDDSGEYRCQTNLSTLSDPVQLEVHIGWLLLQAPRWVFKEEDPIHLRCHSWKNTALHKVTYLQNGKGRKYFHHNSDFYIPKATLKDSGSYFCRGLVGSKNVSSETVNITITQGLAVSTISSFFPPGYQTRGQPKANPTVTLFPPSSEELQANKATLVCLISDFYPGAVTVAWKADGSPVKAGVETTKPSKQSNNKYAASSYLSLTPEQWKSHRSYSCQVTHEGSTVEKTVAPTECSIPEDTFFPSPESSCDVKLVEKSFETDTNLNFQNLSVIGFRILLLKVAGFNLLMTLRLWSSRAKRSGSGVKQTLNFDLLKLAGDVESNPGPSRGHMTEYKPTVRLATRDDVPRAVRTLAAAFADYPATRHTVDPDRHIERVTELQELFLTRVGLDIGKVWVADDGAAVAVWTTPESVEAGAVFAEIGPRMAELSGSRLAAQQQMEGLLAPHRPKEPAWFLATVGVSPDHQGKGLGSAVVLPGVEAAERAGVPAFLETSAPRNLPFYERLGFTVTADVEVPEGPRTWCMTRKPGA

SEQ ID NO: 19641 - protein, 451 aa, synthetic construct
MALPVTALLLPLALLLHAARPLEEASTKGPSVFPLAPSSKSTSGGTAALGCLVKDYFPEPVTVSWNSGALTSGVHTFPAVLQSSGLYSLSSVVTVPSSSLGTQTYICNVNHKPSNTKVDKRVEPKSCGRADCGFTSESYQQGVLSATILYEILLGKATLYAVLVSALVLMAMVKRKDSRGRAKRSGSGATNFSLLKQAGDVEENPGPTSATMALPVTALLLPLALLLHAARPMDPDLEIRAAFLRQRNTALRTEVAELEQEVQRLENEVSQYETRYGPLGGGKTRGQPKANPTVTLFPPSSEELQANKATLVCLISDFYPGAVTVAWKADGSPVKAGVETTKPSKQSNNKYAASSYLSLTPEQWKSHRSYSCQVTHEGSTVEKTVAPTECSIPEDTFFPSPESSCDVKLVEKSFETDTNLNFQNLSVIGFRILLLKVAGFNLLMTLRLWSS

SEQ ID NO: 19642 - protein, 451 aa, synthetic construct
MALPVTALLLPLALLLHAARPLEEASTKGPSVFPLAPSSKSTSGGTAALGCLVKDYFPEPVTVSWNSGALTSGVHTFPAVLQSSGLYSLSSVVTVPSSSLGTQTYICNVNHKPSNTKVDKRVEPKSCGRADCGFTSESYQQGVLSATILYEILLGKATLYAVLVSALVLMAMVKRKDSRGRAKRSGSGATNFSLLKQAGDVEENPGPTSATMALPVTALLLPLALLLHAARPMDPDLEIEAAFLERENTALETRVAELRQRVQRLRNRVSQYRTRYGPLGGGKTRGQPKANPTVTLFPPSSEELQANKATLVCLISDFYPGAVTVAWKADGSPVKAGVETTKPSKQSNNKYAASSYLSLTPEQWKSHRSYSCQVTHEGSTVEKTVAPTECSIPEDTFFPSPESSCDVKLVEKSFETDTNLNFQNLSVIGFRILLLKVAGFNLLMTLRLWSS

SEQ ID NO: 19643 - protein, 428 aa, synthetic construct
MALPVTALLLPLALLLHAARPLEEASTKGPSVFPLAPSSKSTSGGTAALGCLVKDYFPEPVTVSWNSGALTSGVHTFPAVLQSSGLYSLSSVVTVPSSSLGTQTYICNVNHKPSNTKVDKRVEPKSCGRADCGFTSESYQQGVLSATILYEILLGKATLYAVLVSALVLMAMVKRKDSRGRAKRSGSGATNFSLLKQAGDVEENPGPTSATMALPVTALLLPLALLLHAARPEVAALEKEVAALEKEVAALEKEVAALEKTRGQPKANPTVTLFPPSSEELQANKATLVCLISDFYPGAVTVAWKADGSPVKAGVETTKPSKQSNNKYAASSYLSLTPEQWKSHRSYSCQVTHEGSTVEKTVAPTECSIPEDTFFPSPESSCDVKLVEKSFETDTNLNFQNLSVIGFRILLLKVAGFNLLMTLRLWSS

SEQ ID NO: 19644 - protein, 686 aa, synthetic construct
MALPVTALLLPLALLLHAARPLEEASTKGPSVFPLAPSSKSTSGGTAALGCLVKDYFPEPVTVSWNSGALTSGVHTFPAVLQSSGLYSLSSVVTVPSSSLGTQTYICNVNHKPSNTKVDKRVEPKSCGRADCGFTSESYQQGVLSATILYEILLGKATLYAVLVSALVLMAMVKRKDSRGRAKRSGSGATNFSLLKQAGDVEENPGPTSATMALPVTALLLPLALLLHAARPLFNQEVQIPLTESYCGPCPKNWICYKNNCYQFFDESKNWYESQASCMSQNASLLKVYSKEDQDLLKLVKSAHWMGLVHIPTNGSWQWEDGSILSPNLLTIIEMQKGDCALYASSFKGYIENCSTPNTYICMQRTVSGGGGSGGGGSGGGGDLFNQEVQIPLTESYCGPCPKNWICYKNNCYQFFDESKNWYESQASCMSQNASLLKVYSKEDQDLLKLVKSAHWMGLVHIPTNGSWQWEDGSILSPNLLTIIEMQKGDCALYASSFKGYIENCSTPNTYICMQRTVTRGQPKANPTVTLFPPSSEELQANKATLVCLISDFYPGAVTVAWKADGSPVKAGVETTKPSKQSNNKYAASSYLSLTPEQWKSHRSYSCQVTHEGSTVEKTVAPTECSIPEDTFFPSPESSCDVKLVEKSFETDTNLNFQNLSVIGFRILLLKVAGFNLLMTLRLWSS

SEQ ID NO: 19645 - protein, 686 aa, synthetic construct
MALPVTALLLPLALLLHAARPLEEASTKGPSVFPLAPSSKSTSGGTAALGCLVKDYFPEPVTVSWNSGALTSGVHTFPAVLQSSGLYSLSSVVTVPSSSLGTQTYICNVNHKPSNTKVDKRVEPKSCGRADCGFTSESYQQGVLSATILYEILLGKATLYAVLVSALVLMAMVKRKDSRGRAKRSGSGATNFSLLKQAGDVEENPGPTSATMALPVTALLLPLALLLHAARPLFNQEVQIPLTESYCGPCPKNWICYKNNCYQFFDESKNWYESQASCMSQNASLLKVYSKEDQDLLKLVKSAHWMGLVHIPTNGSWQWEDGSILSPNLLTIIEMQKGDCALYASSFKGFIENCSTPNTYICMQRTVGGGGSGGGGSGGGGSDLFNQEVQIPLTESYCGPCPKNWICYKNNCYQFFDESKNWYESQASCMSQNASLLKVYSKEDQDLLKLVKSAHWMGLVHIPTNGSWQWEDGSILSPNLLTIIEMQKGDCALYASSFKGFIENCSTPNTYICMQRTVTRGQPKANPTVTLFPPSSEELQANKATLVCLISDFYPGAVTVAWKADGSPVKAGVETTKPSKQSNNKYAASSYLSLTPEQWKSHRSYSCQVTHEGSTVEKTVAPTECSIPEDTFFPSPESSCDVKLVEKSFETDTNLNFQNLSVIGFRILLLKVAGFNLLMTLRLWSS

SEQ ID NO: 19646 - protein, 712 aa, synthetic construct
MALPVTALLLPLALLLHAARPLEEASTKGPSVFPLAPSSKSTSGGTAALGCLVKDYFPEPVTVSWNSGALTSGVHTFPAVLQSSGLYSLSSVVTVPSSSLGTQTYICNVNHKPSNTKVDKRVEPKSCGRADCGFTSESYQQGVLSATILYEILLGKATLYAVLVSALVLMAMVKRKDSRGRAKRSGSGATNFSLLKQAGDVEENPGPTSMALPVTALLLPLALLLHAARPMDPDLEIRAAFLRQRNTALRTEVAELEQEVQRLENEVSQYETRYGPLGGGKGTGGGGSGGGGSGGGGSEFDIQMTQSPSSLSASVGDRVTITCKASDHINNWLAWYQQKPGQAPKLLIYGATTLETGVPSRFSGSGSGTDYTLTISSLQPEDFATYYCQQSWNTPWTFGQGTKLEIKRGGGGSGGGGSGGGGSQVQLQQPGAELVKPGASVKMSCKASGYAFSSYWINWMKQKPGQGLEWIGQIYPGDGDTNYNGKFKGRATLTADTSSSTAYMQLSSLTSEDSAVYFCARSITTVVGCAMDYWGQGTSVTVSSTRGQPKANPTVTLFPPSSEELQANKATLVCLISDFYPGAVTVAWKADGSPVKAGVETTKPSKQSNNKYAASSYLSLTPEQWKSHRSYSCQVTHEGSTVEKTVAPTECSIPEDTFFPSPESSCDVKLVEKSFETDTNLNFQNLSVIGFRILLLKVAGFNLLMTLRLWSS

SEQ ID NO: 19647 - protein, 947 aa, synthetic construct
MALPVTALLLPLALLLHAARPLEEASTKGPSVFPLAPSSKSTSGGTAALGCLVKDYFPEPVTVSWNSGALTSGVHTFPAVLQSSGLYSLSSVVTVPSSSLGTQTYICNVNHKPSNTKVDKRVEPKSCGRADCGFTSESYQQGVLSATILYEILLGKATLYAVLVSALVLMAMVKRKDSRGRAKRSGSGATNFSLLKQAGDVEENPGPTSMALPVTALLLPLALLLHAARPLFNQEVQIPLTESYCGPCPKNWICYKNNCYQFFDESKNWYESQASCMSQNASLLKVYSKEDQDLLKLVKSAHWMGLVHIPTNGSWQWEDGSILSPNLLTIIEMQKGDCALYASSFKGFIENCSTPNTYICMQRTVGGGGSGGGGSGGGGSDLFNQEVQIPLTESYCGPCPKNWICYKNNCYQFFDESKNWYESQASCMSQNASLLKVYSKEDQDLLKLVKSAHWMGLVHIPTNGSWQWEDGSILSPNLLTIIEMQKGDCALYASSFKGFIENCSTPNTYICMQRTVGTGGGGSGGGGSGGGGSEFDIQMTQSPSSLSASVGDRVTITCKASDHINNWLAWYQQKPGQAPKLLIYGATTLETGVPSRFSGSGSGTDYTLTISSLQPEDFATYYCQQSWNTPWTFGQGTKLEIKRGGGGSGGGGSGGGGSQVQLQQPGAELVKPGASVKMSCKASGYAFSSYWINWMKQKPGQGLEWIGQIYPGDGDTNYNGKFKGRATLTADTSSSTAYMQLSSLTSEDSAVYFCARSITTVVGCAMDYWGQGTSVTVSSTRGQPKANPTVTLFPPSSEELQANKATLVCLISDFYPGAVTVAWKADGSPVKAGVETTKPSKQSNNKYAASSYLSLTPEQWKSHRSYSCQVTHEGSTVEKTVAPTECSIPEDTFFPSPESSCDVKLVEKSFETDTNLNFQNLSVIGFRILLLKVAGFNLLMTLRLWSS

SEQ ID NO: 19648 - protein, 652 aa, synthetic construct
MALPVTALLLPLALLLHAARPLEEASTKGPSVFPLAPSSKSTSGGTAALGCLVKDYFPEPVTVSWNSGALTSGVHTFPAVLQSSGLYSLSSVVTVPSSSLGTQTYICNVNHKPSNTKVDKRVEPKSCGRADCGFTSESYQQGVLSATILYEILLGKATLYAVLVSALVLMAMVKRKDSRGRAKRSGSGATNFSLLKQAGDVEENPGPTSMALPVTALLLPLALLLHAARPQSVLTQPPSVSGAPGQRVTISCTGSSSNIGAGYDVHWYQQLPGTAPKLLIFGNSNRPSGVPDRFSGFKSGTSASLAITGLQAEDEADYFCQSYDSSLSGSGVFGTGTKVTVLGGGGGSGGGGSGGGGSQMQLVQSGGGLVQPGRSLRLSCAASGFTFDDYAMHWVRQAPGKGLEWVSGISWNSGSIGYADSVKGRFTISRDNAKNSLYLQMNSLRAEDTALYYCAKDIHSGSYYGLLYYAMDVWGQGTTVTVSSTRGQPKANPTVTLFPPSSEELQANKATLVCLISDFYPGAVTVAWKADGSPVKAGVETTKPSKQSNNKYAASSYLSLTPEQWKSHRSYSCQVTHEGSTVEKTVAPTECSIPEDTFFPSPESSCDVKLVEKSFETDTNLNFQNLSVIGFRILLLKVAGFNLLMTLRLWSS

SEQ ID NO: 19649 - protein, 489 aa, synthetic construct
MALPVTALLLPLALLLHAARPLEEASTKGPSVFPLAPSSKSTSGGTAALGCLVKDYFPEPVTVSWNSGALTSGVHTFPAVLQSSGLYSLSSVVTVPSSSLGTQTYICNVNHKPSNTKVDKRVEPKSCGRADCGFTSESYQQGVLSATILYEILLGKATLYAVLVSALVLMAMVKRKDSRGRAKRSGSGATNFSLLKQAGDVEENPGPTSMALPVTALLLPLALLLHAARPMCMPCFTTDHQMARKCDDCCGGKGRGKCYGPQCLCRLEGGGGSGGGGSGGGGSFEVCMPCFTTDQQMARKCSDCCGGKGRGKCYGPQCLCRTRGQPKANPTVTLFPPSSEELQANKATLVCLISDFYPGAVTVAWKADGSPVKAGVETTKPSKQSNNKYAASSYLSLTPEQWKSHRSYSCQVTHEGSTVEKTVAPTECSIPEDTFFPSPESSCDVKLVEKSFETDTNLNFQNLSVIGFRILLLKVAGFNLLMTLRLWSS

SEQ ID NO: 19650 - protein, 752 aa, synthetic construct
MALPVTALLLPLALLLHAARPLEEASTKGPSVFPLAPSSKSTSGGTAALGCLVKDYFPEPVTVSWNSGALTSGVHTFPAVLQSSGLYSLSSVVTVPSSSLGTQTYICNVNHKPSNTKVDKRVEPKSCGRADCGFTSESYQQGVLSATILYEILLGKATLYAVLVSALVLMAMVKRKDSRGRAKRSGSGATNFSLLKQAGDVEENPGPTSMALPVTALLLPLALLLHAARPMCMPCFTTDHQMARKCDDCCGGKGRGKCYGPQCLCRLEGGGGSGGGGSGGGGSFEVCMPCFTTDQQMARKCSDCCGGKGRGKCYGPQCLCRGTGGGGSGGGGSGGGGSEFDIQMTQSPSSLSASVGDRVTITCKASDHINNWLAWYQQKPGQAPKLLIYGATTLETGVPSRFSGSGSGTDYTLTISSLQPEDFATYYCQQSWNTPWTFGQGTKLEIKRGGGGSGGGGSGGGGSQVQLQQPGAELVKPGASVKMSCKASGYAFSSYWINWMKQKPGQGLEWIGQIYPGDGDTNYNGKFKGRATLTADTSSSTAYMQLSSLTSEDSAVYFCARSITTVVGCAMDYWGQGTSVTVSSTRGQPKANPTVTLFPPSSEELQANKATLVCLISDFYPGAVTVAWKADGSPVKAGVETTKPSKQSNNKYAASSYLSLTPEQWKSHRSYSCQVTHEGSTVEKTVAPTECSIPEDTFFPSPESSCDVKLVEKSFETDTNLNFQNLSVIGFRILLLKVAGFNLLMTLRLWSS

SEQ ID NO: 19651 - protein, 827 aa, synthetic construct
MALPVTALLLPLALLLHAARPLEEASTKGPSVFPLAPSSKSTSGGTAALGCLVKDYFPEPVTVSWNSGALTSGVHTFPAVLQSSGLYSLSSVVTVPSSSLGTQTYICNVNHKPSNTKVDKRVEPKSCGRADCGFTSESYQQGVLSATILYEILLGKATLYAVLVSALVLMAMVKRKDSRGRAKRSGSGATNFSLLKQAGDVEENPGPTSMALPVTALLLPLALLLHAARPSPVAPACDPRLLNKLLRDSHLLHSRLSQCPDVDPLSIPVLLPAVDFSLGEWKTQTEQSKAQDILGAVSLLLEGVMAARGQLEPSCLSSLLGQLSGQVRLLLGALQGLLGTQLPLQGRTTAHKDPNALFLSLQQLLRGKVRFLLLVEGPTLCVRRTLPTTAVPSSTSGTGGGGSGGGGSGGGGSEFDIQMTQSPSSLSASVGDRVTITCKASDHINNWLAWYQQKPGQAPKLLIYGATTLETGVPSRFSGSGSGTDYTLTISSLQPEDFATYYCQQSWNTPWTFGQGTKLEIKRGGGGSGGGGSGGGGSQVQLQQPGAELVKPGASVKMSCKASGYAFSSYWINWMKQKPGQGLEWIGQIYPGDGDTNYNGKFKGRATLTADTSSSTAYMQLSSLTSEDSAVYFCARSITTVVGCAMDYWGQGTSVTVSSTRGQPKANPTVTLFPPSSEELQANKATLVCLISDFYPGAVTVAWKADGSPVKAGVETTKPSKQSNNKYAASSYLSLTPEQWKSHRSYSCQVTHEGSTVEKTVAPTECSIPEDTFFPSPESSCDVKLVEKSFETDTNLNFQNLSVIGFRILLLKVAGFNLLMTLRLWSS

SEQ ID NO: 19652 - protein, 734 aa, synthetic construct
MALPVTALLLPLALLLHAARPLEEASTKGPSVFPLAPSSKSTSGGTAALGCLVKDYFPEPVTVSWNSGALTSGVHTFPAVLQSSGLYSLSSVVTVPSSSLGTQTYICNVNHKPSNTKVDKRVEPKSCGRADCGFTSESYQQGVLSATILYEILLGKATLYAVLVSALVLMAMVKRKDSRGRAKRSGSGATNFSLLKQAGDVEENPGPTSMALPVTALLLPLALLLHAARPMGSWEEFELRLNAIEERLYALGGSEAELAYFEYVIADFEGNLQRYKGKGNPEVEALYFEADAIFEELVAYRHNGTGGGGSGGGGSGGGGSEFDIQMTQSPSSLSASVGDRVTITCKASDHINNWLAWYQQKPGQAPKLLIYGATTLETGVPSRFSGSGSGTDYTLTISSLQPEDFATYYCQQSWNTPWTFGQGTKLEIKRGGGGSGGGGSGGGGSQVQLQQPGAELVKPGASVKMSCKASGYAFSSYWINWMKQKPGQGLEWIGQIYPGDGDTNYNGKFKGRATLTADTSSSTAYMQLSSLTSEDSAVYFCARSITTVVGCAMDYWGQGTSVTVSSTRGQPKANPTVTLFPPSSEELQANKATLVCLISDFYPGAVTVAWKADGSPVKAGVETTKPSKQSNNKYAASSYLSLTPEQWKSHRSYSCQVTHEGSTVEKTVAPTECSIPEDTFFPSPESSCDVKLVEKSFETDTNLNFQNLSVIGFRILLLKVAGFNLLMTLRLWSS

SEQ ID NO: 19653 - protein, 873 aa, synthetic construct
MALPVTALLLPLALLLHAARPLEGQPKANPTVTLFPPSSEELQANKATLVCLISDFYPGAVTVAWKADGSPVKAGVETTKPSKQSNNKYAASSYLSLTPEQWKSHRSYSCQVTHEGSTVEKTVAPTECSIPEDTFFPSPESSCDVKLVEKSFETDTNLNFQNLSVIGFRILLLKVAGFNLLMTLRLWSSRAKRSGSGATNFSLLKQAGDVEENPGPTSMALPVTALLLPLALLLHAARPDIQMTQTTSSLSASLGDRVTISCRASQDISKYLNWYQQKPDGTVKLLIYHTSRLHSGVPSRFSGSGSGTDYSLTISNLEQEDIATYFCQQGNTLPYTFGGGTKLEITGGGGSGGGGSGGGGSEVKLQESGPGLVAPSQSLSVTCTVSGVSLPDYGVSWIRQPPRKGLEWLGVIWGSETTYYNSALKSRLTIIKDNSKSQVFLKMNSLQTDDTAIYYCAKHYYYGGSYAMDYWGQGTSVTVSSTREASTKGPSVFPLAPSSKSTSGGTAALGCLVKDYFPEPVTVSWNSGALTSGVHTFPAVLQSSGLYSLSSVVTVPSSSLGTQTYICNVNHKPSNTKVDKRVEPKSCGRADCGFTSESYQQGVLSATILYEILLGKATLYAVLVSALVLMAMVKRKDSRGRAKRSGSGVKQTLNFDLLKLAGDVESNPGPSRGHMTEYKPTVRLATRDDVPRAVRTLAAAFADYPATRHTVDPDRHIERVTELQELFLTRVGLDIGKVWVADDGAAVAVWTTPESVEAGAVFAEIGPRMAELSGSRLAAQQQMEGLLAPHRPKEPAWFLATVGVSPDHQGKGLGSAVVLPGVEAAERAGVPAFLETSAPRNLPFYERLGFTVTADVEVPEGPRTWCMTRKPGA

SEQ ID NO: 19654 - protein, 874 aa, synthetic construct
MALPVTALLLPLALLLHAARPLEGQPKANPTVTLFPPSSEELQANKATLVCLISDFYPGAVTVAWKADGSPVKAGVETTKPSKQSNNKYAASSYLSLTPEQWKSHRSYSCQVTHEGSTVEKTVAPTECSIPEDTFFPSPESSCDVKLVEKSFETDTNLNFQNLSVIGFRILLLKVAGFNLLMTLRLWSSRAKRSGSGATNFSLLKQAGDVEENPGPTSTMALPVTALLLPLALLLHAARPEIVMTQSPATLSLSPGERATLSCRASQDISKYLNWYQQKPGQAPRLLIYHTSRLHSGIPARFSGSGSGTDYTLTISSLQPEDFAVYFCQQGNTLPYTFGQGTKLEIKGGGGSGGGGSGGGGSQVQLQESGPGLVKPSETLSLTCTVSGVSLPDYGVSWIRQPPGKGLEWIGVIWGSETTYYNSSLKSRVTISKDNSKNQVSLKLSSVTAADTAVYYCAKHYYYGGSYAMDYWGQGTLVTVSSTREASTKGPSVFPLAPSSKSTSGGTAALGCLVKDYFPEPVTVSWNSGALTSGVHTFPAVLQSSGLYSLSSVVTVPSSSLGTQTYICNVNHKPSNTKVDKRVEPKSCGRADCGFTSESYQQGVLSATILYEILLGKATLYAVLVSALVLMAMVKRKDSRGRAKRSGSGVKQTLNFDLLKLAGDVESNPGPSRGHMTEYKPTVRLATRDDVPRAVRTLAAAFADYPATRHTVDPDRHIERVTELQELFLTRVGLDIGKVWVADDGAAVAVWTTPESVEAGAVFAEIGPRMAELSGSRLAAQQQMEGLLAPHRPKEPAWFLATVGVSPDHQGKGLGSAVVLPGVEAAERAGVPAFLETSAPRNLPFYERLGFTVTADVEVPEGPRTWCMTRKPGA

SEQ ID NO: 19655 - protein, 875 aa, synthetic construct
MALPVTALLLPLALLLHAARPLEGQPKANPTVTLFPPSSEELQANKATLVCLISDFYPGAVTVAWKADGSPVKAGVETTKPSKQSNNKYAASSYLSLTPEQWKSHRSYSCQVTHEGSTVEKTVAPTECSIPEDTFFPSPESSCDVKLVEKSFETDTNLNFQNLSVIGFRILLLKVAGFNLLMTLRLWSSRAKRSGSGATNFSLLKQAGDVEENPGPTSTMALPVTALLLPLALLLHAARPDEIVLTQSPATLSLSPGERATLSCSASSSVSYMHWYQQKPGQAPRLLIYDTSKLASGIPARFSGSGSGTDFTLTISSLEPEDVAVYYCFQGSVYPFTFGQGTKLEIKRGGGGSGGGGSGGGGSQVQLQESGPGLVKPSQTLSLTCTVSGGSISTSGMGVGWIRQHPGKGLEWIGHIWWDDDKRYNPALKSRVTISVDTSKNQFSLKLSSVTAADTAVYYCARMELWSYYFDYWGQGTLVTVSSTREASTKGPSVFPLAPSSKSTSGGTAALGCLVKDYFPEPVTVSWNSGALTSGVHTFPAVLQSSGLYSLSSVVTVPSSSLGTQTYICNVNHKPSNTKVDKRVEPKSCGRADCGFTSESYQQGVLSATILYEILLGKATLYAVLVSALVLMAMVKRKDSRGRAKRSGSGVKQTLNFDLLKLAGDVESNPGPSRGHMTEYKPTVRLATRDDVPRAVRTLAAAFADYPATRHTVDPDRHIERVTELQELFLTRVGLDIGKVWVADDGAAVAVWTTPESVEAGAVFAEIGPRMAELSGSRLAAQQQMEGLLAPHRPKEPAWFLATVGVSPDHQGKGLGSAVVLPGVEAAERAGVPAFLETSAPRNLPFYERLGFTVTADVEVPEGPRTWCMTRKPGA

SEQ ID NO: 19656 - protein, 871 aa, synthetic construct
MALPVTALLLPLALLLHAARPLEGQPKANPTVTLFPPSSEELQANKATLVCLISDFYPGAVTVAWKADGSPVKAGVETTKPSKQSNNKYAASSYLSLTPEQWKSHRSYSCQVTHEGSTVEKTVAPTECSIPEDTFFPSPESSCDVKLVEKSFETDTNLNFQNLSVIGFRILLLKVAGFNLLMTLRLWSSRAKRSGSGATNFSLLKQAGDVEENPGPTSMALPVTALLLPLALLLHAARPDIQMTQSPSSLSASVGDRVTITCRASQDISNYLNWYQQKPGKAPKLLIYYTSRLHSGVPSRFSGSGSGTDFTLTISSLQPEDFATYYCQQGNTLPYTFGQGTKVEIKRGGGGSGGGGSGGGGSEVQLVESGGGLVQPGGSLRLSCAASGFTFSDYFMSWVRQAPGKGLEWVATISNGGTYTYYPDSVKGRFTISRDNSKNTLYLQMNSLRAEDTAVYYCARFDGYIFDYWGQGTLVTVSSTREASTKGPSVFPLAPSSKSTSGGTAALGCLVKDYFPEPVTVSWNSGALTSGVHTFPAVLQSSGLYSLSSVVTVPSSSLGTQTYICNVNHKPSNTKVDKRVEPKSCGRADCGFTSESYQQGVLSATILYEILLGKATLYAVLVSALVLMAMVKRKDSRGRAKRSGSGVKQTLNFDLLKLAGDVESNPGPSRGHMTEYKPTVRLATRDDVPRAVRTLAAAFADYPATRHTVDPDRHIERVTELQELFLTRVGLDIGKVWVADDGAAVAVWTTPESVEAGAVFAEIGPRMAELSGSRLAAQQQMEGLLAPHRPKEPAWFLATVGVSPDHQGKGLGSAVVLPGVEAAERAGVPAFLETSAPRNLPFYERLGFTVTADVEVPEGPRTWCMTRKPGA

SEQ ID NO: 19657 - protein, 875 aa, synthetic construct
MALPVTALLLPLALLLHAARPLEGQPKANPTVTLFPPSSEELQANKATLVCLISDFYPGAVTVAWKADGSPVKAGVETTKPSKQSNNKYAASSYLSLTPEQWKSHRSYSCQVTHEGSTVEKTVAPTECSIPEDTFFPSPESSCDVKLVEKSFETDTNLNFQNLSVIGFRILLLKVAGFNLLMTLRLWSSRAKRSGSGATNFSLLKQAGDVEENPGPTSMALPVTALLLPLALLLHAARPDIQMTQSPSSLSASVGDRVTITCKASDHINNWLAWYQQKPGQAPKLLIYGATTLETGVPSRFSGSGSGTDYTLTISSLQPEDFATYYCQQSWNTPWTFGQGTKLEIKRGGGGSGGGGSGGGGSQVQLQQPGAELVKPGASVKMSCKASGYAFSSYWINWMKQKPGQGLEWIGQIYPGDGDTNYNGKFKGRATLTADTSSSTAYMQLSSLTSEDSAVYFCARSITTVVGCAMDYWGQGTSVTVSSTREASTKGPSVFPLAPSSKSTSGGTAALGCLVKDYFPEPVTVSWNSGALTSGVHTFPAVLQSSGLYSLSSVVTVPSSSLGTQTYICNVNHKPSNTKVDKRVEPKSCGRADCGFTSESYQQGVLSATILYEILLGKATLYAVLVSALVLMAMVKRKDSRGRAKRSGSGVKQTLNFDLLKLAGDVESNPGPSRGHMTEYKPTVRLATRDDVPRAVRTLAAAFADYPATRHTVDPDRHIERVTELQELFLTRVGLDIGKVWVADDGAAVAVWTTPESVEAGAVFAEIGPRMAELSGSRLAAQQQMEGLLAPHRPKEPAWFLATVGVSPDHQGKGLGSAVVLPGVEAAERAGVPAFLETSAPRNLPFYERLGFTVTADVEVPEGPRTWCMTRKPGA

SEQ ID NO: 19658 - protein, 877 aa, synthetic construct
MALPVTALLLPLALLLHAARPLEGQPKANPTVTLFPPSSEELQANKATLVCLISDFYPGAVTVAWKADGSPVKAGVETTKPSKQSNNKYAASSYLSLTPEQWKSHRSYSCQVTHEGSTVEKTVAPTECSIPEDTFFPSPESSCDVKLVEKSFETDTNLNFQNLSVIGFRILLLKVAGFNLLMTLRLWSSRAKRSGSGATNFSLLKQAGDVEENPGPTSMALPVTALLLPLALLLHAARPQIVLSQSPAILSASPGEKVTMTCRASSSVSYMHWYQQKPGSSPKPWIYATSNLASGVPARFSGSGSGTSYSFTISRVEAEDAATYYCQQWTFNPPTFGGGTRLEIKRTVAAGGGGSGGGGSGGGGSQAYLQQSGAELVRPGASVKMSCKASGYTFTSYNMHWVKQTPRQGLEWIGGIYPGNGDTSYNQKFKGKATLTVGKSSSTAYMQLSSLTSEDSAVYFCARYDYNYAMDYWGQGTSVTVSSASTREASTKGPSVFPLAPSSKSTSGGTAALGCLVKDYFPEPVTVSWNSGALTSGVHTFPAVLQSSGLYSLSSVVTVPSSSLGTQTYICNVNHKPSNTKVDKRVEPKSCGRADCGFTSESYQQGVLSATILYEILLGKATLYAVLVSALVLMAMVKRKDSRGRAKRSGSGVKQTLNFDLLKLAGDVESNPGPSRGHMTEYKPTVRLATRDDVPRAVRTLAAAFADYPATRHTVDPDRHIERVTELQELFLTRVGLDIGKVWVADDGAAVAVWTTPESVEAGAVFAEIGPRMAELSGSRLAAQQQMEGLLAPHRPKEPAWFLATVGVSPDHQGKGLGSAVVLPGVEAAERAGVPAFLETSAPRNLPFYERLGFTVTADVEVPEGPRTWCMTRKPGA

SEQ ID NO: 19659 - protein, 875 aa, synthetic construct
MALPVTALLLPLALLLHAARPLEGQPKANPTVTLFPPSSEELQANKATLVCLISDFYPGAVTVAWKADGSPVKAGVETTKPSKQSNNKYAASSYLSLTPEQWKSHRSYSCQVTHEGSTVEKTVAPTECSIPEDTFFPSPESSCDVKLVEKSFETDTNLNFQNLSVIGFRILLLKVAGFNLLMTLRLWSSRAKRSGSGATNFSLLKQAGDVEENPGPTSMALPVTALLLPLALLLHAARPEIVLTQSPATLSLSPGERATLSCRASQSVSSYLAWYQQKPGQAPRLLIYDASNRATGIPARFSGSGSGTDFTLTISSLEPEDFAVYYCQQRSNWPITFGQGTRLEIKGGGGSGGGGSGGGGSEVQLVESGGGLVQPDRSLRLSCAASGFTFHDYAMHWVRQAPGKGLEWVSTISWNSGTIGYADSVKGRFTISRDNAKNSLYLQMNSLRAEDTALYYCAKDIQYGNYYYGMDVWGQGTTVTVSSTREASTKGPSVFPLAPSSKSTSGGTAALGCLVKDYFPEPVTVSWNSGALTSGVHTFPAVLQSSGLYSLSSVVTVPSSSLGTQTYICNVNHKPSNTKVDKRVEPKSCGRADCGFTSESYQQGVLSATILYEILLGKATLYAVLVSALVLMAMVKRKDSRGRAKRSGSGVKQTLNFDLLKLAGDVESNPGPSRGHMTEYKPTVRLATRDDVPRAVRTLAAAFADYPATRHTVDPDRHIERVTELQELFLTRVGLDIGKVWVADDGAAVAVWTTPESVEAGAVFAEIGPRMAELSGSRLAAQQQMEGLLAPHRPKEPAWFLATVGVSPDHQGKGLGSAVVLPGVEAAERAGVPAFLETSAPRNLPFYERLGFTVTADVEVPEGPRTWCMTRKPGA

SEQ ID NO: 19660 - protein, 873 aa, synthetic construct
MALPVTALLLPLALLLHAARPLEGQPKANPTVTLFPPSSEELQANKATLVCLISDFYPGAVTVAWKADGSPVKAGVETTKPSKQSNNKYAASSYLSLTPEQWKSHRSYSCQVTHEGSTVEKTVAPTECSIPEDTFFPSPESSCDVKLVEKSFETDTNLNFQNLSVIGFRILLLKVAGFNLLMTLRLWSSRAKRSGSGATNFSLLKQAGDVEENPGPTSMALPVTALLLPLALLLHAARPDIQMTQSPSSLSASVGDRVTITCRASQDVNTAVAWYQQKPGKAPKLLIYSASFLESGVPSRFSGSRSGTDFTLTISSLQPEDFATYYCQQHYTTPPTFGQTKVEIKRGGGGSGGGGSGGGGSEVQLVESGGGLVQPGGSLRLSCAASGFNIKDTYIHWVRQAPGKGLEWVARIYPTNGYTRYADSVKGRFTISADTSKNTAYLQMNSLRAEDTAVYYCSRWGGDGFYAMDVWGQGTLVTVSSTREASTKGPSVFPLAPSSKSTSGGTAALGCLVKDYFPEPVTVSWNSGALTSGVHTFPAVLQSSGLYSLSSVVTVPSSSLGTQTYICNVNHKPSNTKVDKRVEPKSCGRADCGFTSESYQQGVLSATILYEILLGKATLYAVLVSALVLMAMVKRKDSRGRAKRSGSGVKQTLNFDLLKLAGDVESNPGPSRGHMTEYKPTVRLATRDDVPRAVRTLAAAFADYPATRHTVDPDRHIERVTELQELFLTRVGLDIGKVWVADDGAAVAVWTTPESVEAGAVFAEIGPRMAELSGSRLAAQQQMEGLLAPHRPKEPAWFLATVGVSPDHQGKGLGSAVVLPGVEAAERAGVPAFLETSAPRNLPFYERLGFTVTADVEVPEGPRTWCMTRKPGA

SEQ ID NO: 19661 - protein, 752 aa, synthetic construct
MALPVTALLLPLALLLHAARPLEGQPKANPTVTLFPPSSEELQANKATLVCLISDFYPGAVTVAWKADGSPVKAGVETTKPSKQSNNKYAASSYLSLTPEQWKSHRSYSCQVTHEGSTVEKTVAPTECSIPEDTFFPSPESSCDVKLVEKSFETDTNLNFQNLSVIGFRILLLKVAGFNLLMTLRLWSSRAKRSGSGATNFSLLKQAGDVEENPGPTSMALPVTALLLPLALLLHAARPDEFEVQLVESGGGLVQAGGSLRLSCAASGITFSINTMGWYRQAPGKQRELVALISSIGDTYYADSVKGRFTISRDNAKNTVYLQMNSLKPEDTAVYYCKRFRTAAQGTDYWGQGTQVTVSSTREASTKGPSVFPLAPSSKSTSGGTAALGCLVKDYFPEPVTVSWNSGALTSGVHTFPAVLQSSGLYSLSSVVTVPSSSLGTQTYICNVNHKPSNTKVDKRVEPKSCGRADCGFTSESYQQGVLSATILYEILLGKATLYAVLVSALVLMAMVKRKDSRGRAKRSGSGVKQTLNFDLLKLAGDVESNPGPSRGHMTEYKPTVRLATRDDVPRAVRTLAAAFADYPATRHTVDPDRHIERVTELQELFLTRVGLDIGKVWVADDGAAVAVWTTPESVEAGAVFAEIGPRMAELSGSRLAAQQQMEGLLAPHRPKEPAWFLATVGVSPDHQGKGLGSAVVLPGVEAAERAGVPAFLETSAPRNLPFYERLGFTVTADVEVPEGPRTWCMTRKPGA

SEQ ID NO: 19662 - protein, 752 aa, synthetic construct; identical to SEQ ID NO: 19661

SEQ ID NO: 19663 - protein, 1017 aa, synthetic construct
MALPVTALLLPLALLLHAARPLEGQPKANPTVTLFPPSSEELQANKATLVCLISDFYPGAVTVAWKADGSPVKAGVETTKPSKQSNNKYAASSYLSLTPEQWKSHRSYSCQVTHEGSTVEKTVAPTECSIPEDTFFPSPESSCDVKLVEKSFETDTNLNFQNLSVIGFRILLLKVAGFNLLMTLRLWSSRAKRSGSGATNFSLLKQAGDVEENPGPTSMALPVTALLLPLALLLHAARPQVQLVESGGGLVQAGDSVTLSCTASGRTFSSYALAWFRQRPGKEREFVAGLRWGGPTNYADSVKDRFTISGDSAKHTMYLQMNSLKPEDTAVYYCGYNPGGWAVPSQYEYDSWGQGTQVTVSSGTGGGGSGGGGSGGGGSEFDIQMTQSPSSLSASVGDRVTITCKASDHINNWLAWYQQKPGQAPKLLIYGATTLETGVPSRFSGSGSGTDYTLTISSLQPEDFATYYCQQSWNTPWTFGQGTKLEIKRGGGGSGGGGSGGGGSQVQLQQPGAELVKPGASVKMSCKASGYAFSSYWINWMKQKPGQGLEWIGQIYPGDGDTNYNGKFKGRATLTADTSSSTAYMQLSSLTSEDSAVYFCARSITTVVGCAMDYWGQGTSVTVSSTREASTKGPSVFPLAPSSKSTSGGTAALGCLVKDYFPEPVTVSWNSGALTSGVHTFPAVLQSSGLYSLSSVVTVPSSSLGTQTYICNVNHKPSNTKVDKRVEPKSCGRADCGFTSESYQQGVLSATILYEILLGKATLYAVLVSALVLMAMVKRKDSRGRAKRSGSGVKQTLNFDLLKLAGDVESNPGPSRGHMTEYKPTVRLATRDDVPRAVRTLAAAFADYPATRHTVDPDRHIERVTELQELFLTRVGLDIGKVWVADDGAAVAVWTTPESVEAGAVFAEIGPRMAELSGSRLAAQQQMEGLLAPHRPKEPAWFLATVGVSPDHQGKGLGSAVVLPGVEAAERAGVPAFLETSAPRNLPFYERLGFTVTADVEVPEGPRTWCMTRKPGA

SEQ ID NO: 19664 - protein, 1146 aa, synthetic construct
MALPVTALLLPLALLLHAARPLEGQPKANPTVTLFPPSSEELQANKATLVCLISDFYPGAVTVAWKADGSPVKAGVETTKPSKQSNNKYAASSYLSLTPEQWKSHRSYSCQVTHEGSTVEKTVAPTECSIPEDTFFPSPESSCDVKLVEKSFETDTNLNFQNLSVIGFRILLLKVAGFNLLMTLRLWSSRAKRSGSGATNFSLLKQAGDVEENPGPTSMALPVTALLLPLALLLHAARPEVQLLESGGGLVQPGGSLRLSCAASGFTFSSYAMSWVRQAPGKGLEWVSSISGSGDYIYYADSVKGRFTISRDISKNTLYLQMNSLRAEDTAVYYCAKEGTGANSSLADYRGQGTLVTVSSGGGSGGGSQVQLVESGGGLVQAGDSVTLSCTASGRTFSSYALAWFRQRPGKEREFVAGLRWGGPTNYADSVKDRFTISGDSAKHTMYLQMNSLKPEDTAVYYCGYNPGGWAVPSQYEYDSWGQGTQVTVSSGTGGGGSGGGGSGGGGSEFDIQMTQSPSSLSASVGDRVTITCKASDHINNWLAWYQQKPGQAPKLLIYGATTLETGVPSRFSGSGSGTDYTLTISSLQPEDFATYYCQQSWNTPWTFGQGTKLEIKRGGGGSGGGGSGGGGSQVQLQQPGAELVKPGASVKMSCKASGYAFSSYWINWMKQKPGQGLEWIGQIYPGDGDTNYNGKFKGRATLTADTSSSTAYMQLSSLTSEDSAVYFCARSITTVVGCAMDYWGQGTSVTVSSTREASTKGPSVFPLAPSSKSTSGGTAALGCLVKDYFPEPVTVSWNSGALTSGVHTFPAVLQSSGLYSLSSVVTVPSSSLGTQTYICNVNHKPSNTKVDKRVEPKSCGRADCGFTSESYQQGVLSATILYEILLGKATLYAVLVSALVLMAMVKRKDSRGRAKRSGSGVKQTLNFDLLKLAGDVESNPGPSRGHMTEYKPTVRLATRDDVPRAVRTLAAAFADYPATRHTVDPDRHIERVTELQELFLTRVGLDIGKVWVADDGAAVAVWTTPESVEAGAVFAEIGPRMAELSGSRLAAQQQMEGLLAPHRPKEPAWFLATVGVSPDHQGKGLGSAVVLPGVEAAERAGVPAFLETSAPRNLPFYERLGFTVTADVEVPEGPRTWCMTRKPGA

SEQ ID NO: 19665 - protein, 1144 aa, synthetic construct
MALPVTALLLPLALLLHAARPLEGQPKANPTVTLFPPSSEELQANKATLVCLISDFYPGAVTVAWKADGSPVKAGVETTKPSKQSNNKYAASSYLSLTPEQWKSHRSYSCQVTHEGSTVEKTVAPTECSIPEDTFFPSPESSCDVKLVEKSFETDTNLNFQNLSVIGFRILLLKVAGFNLLMTLRLWSSRAKRSGSGATNFSLLKQAGDVEENPGPTSMALPVTALLLPLALLLHAARPGVTQSPTHLIKTRGQQATLRCSPISGHTSVYWYQQALGLGLQFLLWYDEGEERNRGNFPPRFSGRQFPNYSSELNVNALELEDSALYLCASSLGGPRGLAGLRGDEQFFGPGTRLTVLEGGGSGGGSQVQLVESGGGLVQAGDSVTLSCTASGRTFSSYALAWFRQRPGKEREFVAGLRWGGPTNYADSVKDRFTISGDSAKHTMYLQMNSLKPEDTAVYYCGYNPGGWAVPSQYEYDSWGQGTQVTVSSGTGGGGSGGGGSGGGGSEFDIQMTQSPSSLSASVGDRVTITCKASDHINNWLAWYQQKPGQAPKLLIYGATTLETGVPSRFSGSGSGTDYTLTISSLQPEDFATYYCQQSWNTPWTFGQGTKLEIKRGGGGSGGGGSGGGGSQVQLQQPGAELVKPGASVKMSCKASGYAFSSYWINWMKQKPGQGLEWIGQIYPGDGDTNYNGKFKGRATLTADTSSSTAYMQLSSLTSEDSAVYFCARSITTVVGCAMDYWGQGTSVTVSSTREASTKGPSVFPLAPSSKSTSGGTAALGCLVKDYFPEPVTVSWNSGALTSGVHTFPAVLQSSGLYSLSSVVTVPSSSLGTQTYICNVNHKPSNTKVDKRVEPKSCGRADCGFTSESYQQGVLSATILYEILLGKATLYAVLVSALVLMAMVKRKDSRGRAKRSGSGVKQTLNFDLLKLAGDVESNPGPSRGHMTEYKPTVRLATRDDVPRAVRTLAAAFADYPATRHTVDPDRHIERVTELQELFLTRVGLDIGKVWVADDGAAVAVWTTPESVEAGAVFAEIGPRMAELSGSRLAAQQQMEGLLAPHRPKEPAWFLATVGVSPDHQGKGLGSAVVLPGVEAAERAGVPAFLETSAPRNLPFYERLGFTVTADVEVPEGPRTWCMTRKPGA

SEQ ID NO: 19666 - protein, 905 aa, synthetic construct
MALPVTALLLPLALLLHAARPLEGQPKANPTVTLFPPSSEELQANKATLVCLISDFYPGAVTVAWKADGSPVKAGVETTKPSKQSNNKYAASSYLSLTPEQWKSHRSYSCQVTHEGSTVEKTVAPTECSIPEDTFFPSPESSCDVKLVEKSFETDTNLNFQNLSVIGFRILLLKVAGFNLLMTLRLWSSRAKRSGSGATNFSLLKQAGDVEENPGPTSMALPVTALLLPLALLLHAARPGVTQSPTHLIKTRGQQATLRCSPISGHTSVYWYQQALGLGLQFLLWYDEGEERNRGNFPPRFSGRQFPNYSSELNVNALELEDSALYLCASSLGGPRGLAGLRGDEQFFGPGTRLTVLEGGGSGGGSGVTQSPTHLIKTRGQQATLRCSPISGHTSVYWYQQALGLGLQFLLWYDEGEERNRGNFPPRFSGRQFPNYSSELNVNALELEDSALYLCASSLGGDELGADGNEQFFGPGTRLTVLEGTGGGGSGGGGSGGGGSEFDIQMTQSPSSLSASVGDRVTITCKASDHINNWLAWYQQKPGQAPKLLIYGATTLETGVPSRFSGSGSGTDYTLTISSLQPEDFATYYCQQSWNTPWTFGQGTKLEIKRGGGGSGGGGSGGGGSQVQLQQPGAELVKPGASVKMSCKASGYAFSSYWINWMKQKPGQGLEWIGQIYPGDGDTNYNGKFKGRATLTADTSSSTAYMQLSSLTSEDSAVYFCARSITTVVGCAMDYWGQGTSVTVSSTREASTKGPSVFPLAPSSKSTSGGTAALGCLVKDYFPEPVTVSWNSGALTSGVHTFPAVLQSSGLYSLSSVVTVPSSSLGTQTYICNVNHKPSNTKVDKRVEPKSCGRADCGFTSESYQQGVLSATILYEILLGKATLYAVLVSALVLMAMVKRKDSRG

SEQ ID NO: 19667 - protein, 758 aa, synthetic construct
MALPVTALLLPLALLLHAARPLEGQPKANPTVTLFPPSSEELQANKATLVCLISDFYPGAVTVAWKADGSPVKAGVETTKPSKQSNNKYAASSYLSLTPEQWKSHRSYSCQVTHEGSTVEKTVAPTECSIPEDTFFPSPESSCDVKLVEKSFETDTNLNFQNLSVIGFRILLLKVAGFNLLMTLRLWSSRAKRSGSGATNFSLLKQAGDVEENPGPTSMALPVTALLLPLALLLHAARPDEFGSDLGIKLLFAAAKGQDDEVRILLAAGADVNAKDFEGYTPLHVAAYDGHLEIVEVLLKAGADVNAKDSQGRTPLHEAAYSGHLEIVEVLLKAGADVNAQDDAGETPADLAAAWGHEDIAEVLQKTREASTKGPSVFPLAPSSKSTSGGTAALGCLVKDYFPEPVTVSWNSGALTSGVHTFPAVLQSSGLYSLSSVVTVPSSSLGTQTYICNVNHKPSNTKVDKRVEPKSCGRADCGFTSESYQQGVLSATILYEILLGKATLYAVLVSALVLMAMVKRKDSRGRAKRSGSGVKQTLNFDLLKLAGDVESNPGPSRGHMTEYKPTVRLATRDDVPRAVRTLAAAFADYPATRHTVDPDRHIERVTELQELFLTRVGLDIGKVWVADDGAAVAVWTTPESVEAGAVFAEIGPRMAELSGSRLAAQQQMEGLLAPHRPKEPAWFLATVGVSPDHQGKGLGSAVVLPGVEAAERAGVPAFLETSAPRNLPFYERLGFTVTADVEVPEGPRTWCMTRKPGA

SEQ ID NO: 19668 - protein, 687 aa, synthetic construct
MALPVTALLLPLALLLHAARPLEGQPKANPTVTLFPPSSEELQANKATLVCLISDFYPGAVTVAWKADGSPVKAGVETTKPSKQSNNKYAASSYLSLTPEQWKSHRSYSCQVTHEGSTVEKTVAPTECSIPEDTFFPSPESSCDVKLVEKSFETDTNLNFQNLSVIGFRILLLKVAGFNLLMTLRLWSSRAKRSGSGATNFSLLKQAGDVEENPGPTSMDWIWRILFLVGAATGAHSFEGSGFEYAKEMRNAYWEIALLPNLTNQQKRAPIRKLYDDPSQSSELLSEAKKLNDSQTREASTKGPSVFPLAPSSKSTSGGTAALGCLVKDYFPEPVTVSWNSGALTSGVHTFPAVLQSSGLYSLSSVVTVPSSSLGTQTYICNVNHKPSNTKVDKRVEPKSCGRADCGFTSESYQQGVLSATILYEILLGKATLYAVLVSALVLMAMVKRKDSRGRAKRSGSGVKQTLNFDLLKLAGDVESNPGPSRGHMTEYKPTVRLATRDDVPRAVRTLAAAFADYPATRHTVDPDRHIERVTELQELFLTRVGLDIGKVWVADDGAAVAVWTTPESVEAGAVFAEIGPRMAELSGSRLAAQQQMEGLLAPHRPKEPAWFLATVGVSPDHQGKGLGSAVVLPGVEAAERAGVPAFLETSAPRNLPFYERLGFTVTADVEVPEGPRTWCMTRKPGA

SEQ ID NO: 19669 - protein, 909 aa, synthetic construct
MALPVTALLLPLALLLHAARPLEGQPKANPTVTLFPPSSEELQANKATLVCLISDFYPGAVTVAWKADGSPVKAGVETTKPSKQSNNKYAASSYLSLTPEQWKSHRSYSCQVTHEGSTVEKTVAPTECSIPEDTFFPSPESSCDVKLVEKSFETDTNLNFQNLSVIGFRILLLKVAGFNLLMTLRLWSSRAKRSGSGATNFSLLKQAGDVEENPGPTSMALPVTALLLPLALLLHAARPDEFEVQLVESGGGLVQAGGSLRLSCAASGITFSINTMGWYRQAPGKQRELVALISSIGDTYYADSVKGRFTISRDNAKNTVYLQMNSLKPEDTAVYYCKRFRTAAQGTDYWGQGTQVTVSSLEGGGGSGGGGSGGGGSGSGGSGSGGSGSGGSGSGGSFEVQLVESGGGLVQPGGSLRLSCAASGSIFGFNDMAWYRQAPGKQRELVALISRVGVTSSADSVKGRFTISRVNAKDTVYLQMNSLKPEDTAVYYCYMDQRLDGSTLAYWGQGTQVTVSSTREASTKGPSVFPLAPSSKSTSGGTAALGCLVKDYFPEPVTVSWNSGALTSGVHTFPAVLQSSGLYSLSSVVTVPSSSLGTQTYICNVNHKPSNTKVDKRVEPKSCGRADCGFTSESYQQGVLSATILYEILLGKATLYAVLVSALVLMAMVKRKDSRGRAKRSGSGVKQTLNFDLLKLAGDVESNPGPSRGHMTEYKPTVRLATRDDVPRAVRTLAAAFADYPATRHTVDPDRHIERVTELQELFLTRVGLDIGKVWVADDGAAVAVWTTPESVEAGAVFAEIGPRMAELSGSRLAAQQQMEGLLAPHRPKEPAWFLATVGVSPDHQGKGLGSAVVLPGVEAAERAGVPAFLETSAPRNLPFYERLGFTVTADVEVPEGPRTWCMTRKPGA

SEQ ID NO: 19670 - protein, 823 aa, synthetic construct
MALPVTALLLPLALLLHAARPLEGQPKANPTVTLFPPSSEELQANKATLVCLISDFYPGAVTVAWKADGSPVKAGVETTKPSKQSNNKYAASSYLSLTPEQWKSHRSYSCQVTHEGSTVEKTVAPTECSIPEDTFFPSPESSCDVKLVEKSFETDTNLNFQNLSVIGFRILLLKVAGFNLLMTLRLWSSRAKRSGSGATNFSLLKQAGDVEENPGPTSMALPVTALLLPLALLLHAARPGMRTEDLPKAVVFLEPQWYRVLEKDSVTLKCQGAYSPEDNSTQWFHNESLISSQASSYFIDAATVDDSGEYRCQTNLSTLSDPVQLEVHIGWLLLQAPRWVFKEEDPIHLRCHSWKNTALHKVTYLQNGKGRKYFHHNSDFYIPKATLKDSGSYFCRGLVGSKNVSSETVNITITQGLAVSTISSFFPPGYQTREASTKGPSVFPLAPSSKSTSGGTAALGCLVKDYFPEPVTVSWNSGALTSGVHTFPAVLQSSGLYSLSSVVTVPSSSLGTQTYICNVNHKPSNTKVDKRVEPKSCGRADCGFTSESYQQGVLSATILYEILLGKATLYAVLVSALVLMAMVKRKDSRGRAKRSGSGVKQTLNFDLLKLAGDVESNPGPSRGHMTEYKPTVRLATRDDVPRAVRTLAAAFADYPATRHTVDPDRHIERVTELQELFLTRVGLDIGKVWVADDGAAVAVWTTPESVEAGAVFAEIGPRMAELSGSRLAAQQQMEGLLAPHRPKEPAWFLATVGVSPDHQGKGLGSAVVLPGVEAAERAGVPAFLETSAPRNLPFYERLGFTVTADVEVPEGPRTWCMTRKPGA

SEQ ID NO: 19671 - protein, 451 aa, synthetic construct
MALPVTALLLPLALLLHAARPLEGQPKANPTVTLFPPSSEELQANKATLVCLISDFYPGAVTVAWKADGSPVKAGVETTKPSKQSNNKYAASSYLSLTPEQWKSHRSYSCQVTHEGSTVEKTVAPTECSIPEDTFFPSPESSCDVKLVEKSFETDTNLNFQNLSVIGFRILLLKVAGFNLLMTLRLWSSRAKRSGSGATNFSLLKQAGDVEENPGPTSATMALPVTALLLPLALLLHAARPMDPDLEIRAAFLRQRNTALRTEVAELEQEVQRLENEVSQYETRYGPLGGGKTREASTKGPSVFPLAPSSKSTSGGTAALGCLVKDYFPEPVTVSWNSGALTSGVHTFPAVLQSSGLYSLSSVVTVPSSSLGTQTYICNVNHKPSNTKVDKRVEPKSCGRADCGFTSESYQQGVLSATILYEILLGKATLYAVLVSALVLMAMVKRKDSRG

SEQ ID NO: 19672 - protein, 451 aa, synthetic construct
MALPVTALLLPLALLLHAARPLEGQPKANPTVTLFPPSSEELQANKATLVCLISDFYPGAVTVAWKADGSPVKAGVETTKPSKQSNNKYAASSYLSLTPEQWKSHRSYSCQVTHEGSTVEKTVAPTECSIPEDTFFPSPESSCDVKLVEKSFETDTNLNFQNLSVIGFRILLLKVAGFNLLMTLRLWSSRAKRSGSGATNFSLLKQAGDVEENPGPTSATMALPVTALLLPLALLLHAARPMDPDLEIEAAFLERENTALETRVAELRQRVQRLRNRVSQYRTRYGPLGGGKTREASTKGPSVFPLAPSSKSTSGGTAALGCLVKDYFPEPVTVSWNSGALTSGVHTFPAVLQSSGLYSLSSVVTVPSSSLGTQTYICNVNHKPSNTKVDKRVEPKSCGRADCGFTSESYQQGVLSATILYEILLGKATLYAVLVSALVLMAMVKRKDSRG

SEQ ID NO: 19673 - protein, 686 aa, synthetic construct
MALPVTALLLPLALLLHAARPLEGQPKANPTVTLFPPSSEELQANKATLVCLISDFYPGAVTVAWKADGSPVKAGVETTKPSKQSNNKYAASSYLSLTPEQWKSHRSYSCQVTHEGSTVEKTVAPTECSIPEDTFFPSPESSCDVKLVEKSFETDTNLNFQNLSVIGFRILLLKVAGFNLLMTLRLWSSRAKRSGSGATNFSLLKQAGDVEENPGPTSATMALPVTALLLPLALLLHAARPLFNQEVQIPLTESYCGPCPKNWICYKNNCYQFFDESKNWYESQASCMSQNASLLKVYSKEDQDLLKLVKSAHWMGLVHIPTNGSWQWEDGSILSPNLLTIIEMQKGDCALYASSFKGYIENCSTPNTYICMQRTVSGGGGSGGGGSGGGGDLFNQEVQIPLTESYCGPCPKNWICYKNNCYQFFDESKNWYESQASCMSQNASLLKVYSKEDQDLLKLVKSAHWMGLVHIPTNGSWQWEDGSILSPNLLTIIEMQKGDCALYASSFKGYIENCSTPNTYICMQRTVTREASTKGPSVFPLAPSSKSTSGGTAALGCLVKDYFPEPVTVSWNSGALTSGVHTFPAVLQSSGLYSLSSVVTVPSSSLGTQTYICNVNHKPSNTKVDKRVEPKSCGRADCGFTSESYQQGVLSATILYEILLGKATLYAVLVSALVLMAMVKRKDSRG

SEQ ID NO: 19674 - protein, 686 aa, synthetic construct
MALPVTALLLPLALLLHAARPLEGQPKANPTVTLFPPSSEELQANKATLVCLISDFYPGAVTVAWKADGSPVKAGVETTKPSKQSNNKYAASSYLSLTPEQWKSHRSYSCQVTHEGSTVEKTVAPTECSIPEDTFFPSPESSCDVKLVEKSFETDTNLNFQNLSVIGFRILLLKVAGFNLLMTLRLWSSRAKRSGSGATNFSLLKQAGDVEENPGPTSATMALPVTALLLPLALLLHAARPLFNQEVQIPLTESYCGPCPKNWICYKNNCYQFFDESKNWYESQASCMSQNASLLKVYSKEDQDLLKLVKSAHWMGLVHIPTNGSWQWEDGSILSPNLLTIIEMQKGDCALYASSFKGFIENCSTPNTYICMQRTVGGGGSGGGGSGGGGSDLFNQEVQIPLTESYCGPCPKNWICYKNNCYQFFDESKNWYESQASCMSQNASLLKVYSKEDQDLLKLVKSAHWMGLVHIPTNGSWQWEDGSILSPNLLTIIEMQKGDCALYASSFKGFIENCSTPNTYICMQRTVTREASTKGPSVFPLAPSSKSTSGGTAALGCLVKDYFPEPVTVSWNSGALTSGVHTFPAVLQSSGLYSLSSVVTVPSSSLGTQTYICNVNHKPSNTKVDKRVEPKSCGRADCGFTSESYQQGVLSATILYEILLGKATLYAVLVSALVLMAMVKRKDSRG

SEQ ID NO: 19675 - protein, 712 aa, synthetic construct
MALPVTALLLPLALLLHAARPLEGQPKANPTVTLFPPSSEELQANKATLVCLISDFYPGAVTVAWKADGSPVKAGVETTKPSKQSNNKYAASSYLSLTPEQWKSHRSYSCQVTHEGSTVEKTVAPTECSIPEDTFFPSPESSCDVKLVEKSFETDTNLNFQNLSVIGFRILLLKVAGFNLLMTLRLWSSRAKRSGSGATNFSLLKQAGDVEENPGPTSMALPVTALLLPLALLLHAARPMDPDLEIRAAFLRQRNTALRTEVAELEQEVQRLENEVSQYETRYGPLGGGKGTGGGGSGGGGSGGGGSEFDIQMTQSPSSLSASVGDRVTITCKASDHINNWLAWYQQKPGQAPKLLIYGATTLETGVPSRFSGSGSGTDYTLTISSLQPEDFATYYCQQSWNTPWTFGQGTKLEIKRGGGGSGGGGSGGGGSQVQLQQPGAELVKPGASVKMSCKASGYAFSSYWINWMKQKPGQGLEWIGQIYPGDGDTNYNGKFKGRATLTADTSSSTAYMQLSSLTSEDSAVYFCARSITTVVGCAMDYWGQGTSVTVSSTREASTKGPSVFPLAPSSKSTSGGTAALGCLVKDYFPEPVTVSWNSGALTSGVHTFPAVLQSSGLYSLSSVVTVPSSSLGTQTYICNVNHKPSNTKVDKRVEPKSCGRADCGFTSESYQQGVLSATILYEILLGKATLYAVLVSALVLMAMVKRKDSRG

SEQ ID NO: 19676 - protein, 947 aa, synthetic construct
MALPVTALLLPLALLLHAARPLEGQPKANPTVTLFPPSSEELQANKATLVCLISDFYPGAVTVAWKADGSPVKAGVETTKPSKQSNNKYAASSYLSLTPEQWKSHRSYSCQVTHEGSTVEKTVAPTECSIPEDTFFPSPESSCDVKLVEKSFETDTNLNFQNLSVIGFRILLLKVAGFNLLMTLRLWSSRAKRSGSGATNFSLLKQAGDVEENPGPTSMALPVTALLLPLALLLHAARPLFNQEVQIPLTESYCGPCPKNWICYKNNCYQFFDESKNWYESQASCMSQNASLLKVYSKEDQDLLKLVKSAHWMGLVHIPTNGSWQWEDGSILSPNLLTIIEMQKGDCALYASSFKGFIENCSTPNTYICMQRTVGGGGSGGGGSGGGGSDLFNQEVQIPLTESYCGPCPKNWICYKNNCYQFFDESKNWYESQASCMSQNASLLKVYSKEDQDLLKLVKSAHWMGLVHIPTNGSWQWEDGSILSPNLLTIIEMQKGDCALYASSFKGFIENCSTPNTYICMQRTVGTGGGGSGGGGSGGGGSEFDIQMTQSPSSLSASVGDRVTITCKASDHINNWLAWYQQKPGQAPKLLIYGATTLETGVPSRFSGSGSGTDYTLTISSLQPEDFATYYCQQSWNTPWTFGQGTKLEIKRGGGGSGGGGSGGGGSQVQLQQPGAELVKPGASVKMSCKASGYAFSSYWINWMKQKPGQGLEWIGQIYPGDGDTNYNGKFKGRATLTADTSSSTAYMQLSSLTSEDSAVYFCARSITTVVGCAMDYWGQGTSVTVSSTREASTKGPSVFPLAPSSKSTSGGTAALGCLVKDYFPEPVTVSWNSGALTSGVHTFPAVLQSSGLYSLSSVVTVPSSSLGTQTYICNVNHKPSNTKVDKRVEPKSCGRADCGFTSESYQQGVLSATILYEILLGKATLYAVLVSALVLMAMVKRKDSRG

SEQ ID NO: 19677 - protein, 652 aa, synthetic construct
MALPVTALLLPLALLLHAARPLEGQPKANPTVTLFPPSSEELQANKATLVCLISDFYPGAVTVAWKADGSPVKAGVETTKPSKQSNNKYAASSYLSLTPEQWKSHRSYSCQVTHEGSTVEKTVAPTECSIPEDTFFPSPESSCDVKLVEKSFETDTNLNFQNLSVIGFRILLLKVAGFNLLMTLRLWSSRAKRSGSGATNFSLLKQAGDVEENPGPTSMALPVTALLLPLALLLHAARPQSVLTQPPSVSGAPGQRVTISCTGSSSNIGAGYDVHWYQQLPGTAPKLLIFGNSNRPSGVPDRFSGFKSGTSASLAITGLQAEDEADYFCQSYDSSLSGSGVFGTGTKVTVLGGGGGSGGGGSGGGGSQMQLVQSGGGLVQPGRSLRLSCAASGFTFDDYAMHWVRQAPGKGLEWVSGISWNSGSIGYADSVKGRFTISRDNAKNSLYLQMNSLRAEDTALYYCAKDIHSGSYYGLLYYAMDVWGQGTTVTVSSTREASTKGPSVFPLAPSSKSTSGGTAALGCLVKDYFPEPVTVSWNSGALTSGVHTFPAVLQSSGLYSLSSVVTVPSSSLGTQTYICNVNHKPSNTKVDKRVEPKSCGRADCGFTSESYQQGVLSATILYEILLGKATLYAVLVSALVLMAMVKRKDSRG

SEQ ID NO: 19678 - protein, 489 aa, synthetic construct
MALPVTALLLPLALLLHAARPLEGQPKANPTVTLFPPSSEELQANKATLVCLISDFYPGAVTVAWKADGSPVKAGVETTKPSKQSNNKYAASSYLSLTPEQWKSHRSYSCQVTHEGSTVEKTVAPTECSIPEDTFFPSPESSCDVKLVEKSFETDTNLNFQNLSVIGFRILLLKVAGFNLLMTLRLWSSRAKRSGSGATNFSLLKQAGDVEENPGPTSMALPVTALLLPLALLLHAARPMCMPCFTTDHQMARKCDDCCGGKGRGKCYGPQCLCRLEGGGGSGGGGSGGGGSFEVCMPCFTTDQQMARKCSDCCGGKGRGKCYGPQCLCRTREASTKGPSVFPLAPSSKSTSGGTAALGCLVKDYFPEPVTVSWNSGALTSGVHTFPAVLQSSGLYSLSSVVTVPSSSLGTQTYICNVNHKPSNTKVDKRVEPKSCGRADCGFTSESYQQGVLSATILYEILLGKATLYAVLVSALVLMAMVKRKDSRG

SEQ ID NO: 19679 - protein, 699 aa, synthetic construct
MALPVTALLLPLALLLHAARPLEGQPKANPTVTLFPPSSEELQANKATLVCLISDFYPGAVTVAWKADGSPVKAGVETTKPSKQSNNKYAASSYLSLTPEQWKSHRSYSCQVTHEGSTVEKTVAPTECSIPEDTFFPSPESSCDVKLVEKSFETDTNLNFQNLSVIGFRILLLKVAGFNLLMTLRLWSSRAKRSGSGATNFSLLKQAGDVEENPGPTSMALPVTALLLPLALLLHAARPFEVCMPCFTTDQQMARKCSDCCGGKGRGKCYGPQCLCRGTGGGGSGGGGSGGGGSEFDIQMTQSPSSLSASVGDRVTITCKASDHINNWLAWYQQKPGQAPKLLIYGATTLETGVPSRFSGSGSGTDYTLTISSLQPEDFATYYCQQSWNTPWTFGQGTKLEIKRGGGGSGGGGSGGGGSQVQLQQPGAELVKPGASVKMSCKASGYAFSSYWINWMKQKPGQGLEWIGQIYPGDGDTNYNGKFKGRATLTADTSSSTAYMQLSSLTSEDSAVYFCARSITTVVGCAMDYWGQGTSVTVSSTREASTKGPSVFPLAPSSKSTSGGTAALGCLVKDYFPEPVTVSWNSGALTSGVHTFPAVLQSSGLYSLSSVVTVPSSSLGTQTYICNVNHKPSNTKVDKRVEPKSCGRADCGFTSESYQQGVLSATILYEILLGKATLYAVLVSALVLMAMVKRKDSRG

SEQ ID NO: 19680 - protein, 829 aa, synthetic construct
MALPVTALLLPLALLLHAARPLEGQPKANPTVTLFPPSSEELQANKATLVCLISDFYPGAVTVAWKADGSPVKAGVETTKPSKQSNNKYAASSYLSLTPEQWKSHRSYSCQVTHEGSTVEKTVAPTECSIPEDTFFPSPESSCDVKLVEKSFETDTNLNFQNLSVIGFRILLLKVAGFNLLMTLRLWSSRAKRSGSGATNFSLLKQAGDVEENPGPTSMALPVTALLLPLALLLHAARPFESPVAPACDPRLLNKLLRDSHLLHSRLSQCPDVDPLSIPVLLPAVDFSLGEWKTQTEQSKAQDILGAVSLLLEGVMAARGQLEPSCLSSLLGQLSGQVRLLLGALQGLLGTQLPLQGRTTAHKDPNALFLSLQQLLRGKVRFLLLVEGPTLCVRRTLPTTAVPSSTSGTGGGGSGGGGSGGGGSEFDIQMTQSPSSLSASVGDRVTITCKASDHINNWLAWYQQKPGQAPKLLIYGATTLETGVPSRFSGSGSGTDYTLTISSLQPEDFATYYCQQSWNTPWTFGQGTKLEIKRGGGGSGGGGSGGGGSQVQLQQPGAELVKPGASVKMSCKASGYAFSSYWINWMKQKPGQGLEWIGQIYPGDGDTNYNGKFKGRATLTADTSSSTAYMQLSSLTSEDSAVYFCARSITTVVGCAMDYWGQGTSVTVSSTREASTKGPSVFPLAPSSKSTSGGTAALGCLVKDYFPEPVTVSWNSGALTSGVHTFPAVLQSSGLYSLSSVVTVPSSSLGTQTYICNVNHKPSNTKVDKRVEPKSCGRADCGFTSESYQQGVLSATILYEILLGKATLYAVLVSALVLMAMVKRKDSRG

SEQ ID NO: 19681 - protein, 736 aa, synthetic construct
MALPVTALLLPLALLLHAARPLEGQPKANPTVTLFPPSSEELQANKATLVCLISDFYPGAVTVAWKADGSPVKAGVETTKPSKQSNNKYAASSYLSLTPEQWKSHRSYSCQVTHEGSTVEKTVAPTECSIPEDTFFPSPESSCDVKLVEKSFETDTNLNFQNLSVIGFRILLLKVAGFNLLMTLRLWSSRAKRSGSGATNFSLLKQAGDVEENPGPTSMALPVTALLLPLALLLHAARPFEMGSWEEFELRLNAIEERLYALGGSEAELAYFEYVIADFEGNLQRYKGKGNPEVEALYFEADAIFEELVAYRHNGTGGGGSGGGGSGGGGSEFDIQMTQSPSSLSASVGDRVTITCKASDHINNWLAWYQQKPGQAPKLLIYGATTLETGVPSRFSGSGSGTDYTLTISSLQPEDFATYYCQQSWNTPWTFGQGTKLEIKRGGGGSGGGGSGGGGSQVQLQQPGAELVKPGASVKMSCKASGYAFSSYWINWMKQKPGQGLEWIGQIYPGDGDTNYNGKFKGRATLTADTSSSTAYMQLSSLTSEDSAVYFCARSITTVVGCAMDYWGQGTSVTVSSTREASTKGPSVFPLAPSSKSTSGGTAALGCLVKDYFPEPVTVSWNSGALTSGVHTFPAVLQSSGLYSLSSVVTVPSSSLGTQTYICNVNHKPSNTKVDKRVEPKSCGRADCGFTSESYQQGVLSATILYEILLGKATLYAVLVSALVLMAMVKRKDSRG

SEQ ID NO: 19682 - protein, 873 aa, synthetic construct
MALPVTALLLPLALLLHAARPLEEASTKGPSVFPLAPSSKSTSGGTAALGCLVKDYFPEPVTVSWNSGALTSGVHTFPAVLQSSGLYSLSSVVTVPSSSLGTQTYICNVNHKPSNTKVDKRVEPKSCIPEDTFFPSPESSCDVKLVEKSFETDTNLNFQNLSVIGFRILLLKVAGFNLLMTLRLWSSRAKRSGSGATNFSLLKQAGDVEENPGPTSMALPVTALLLPLALLLHAARPDIQMTQTTSSLSASLGDRVTISCRASQDISKYLNWYQQKPDGTVKLLIYHTSRLHSGVPSRFSGSGSGTDYSLTISNLEQEDIATYFCQQGNTLPYTFGGGTKLEITGGGGSGGGGSGGGGSEVKLQESGPGLVAPSQSLSVTCTVSGVSLPDYGVSWIRQPPRKGLEWLGVIWGSETTYYNSALKSRLTIIKDNSKSQVFLKMNSLQTDDTAIYYCAKHYYYGGSYAMDYWGQGTSVTVSSTRGQPKANPTVTLFPPSSEELQANKATLVCLISDFYPGAVTVAWKADGSPVKAGVETTKPSKQSNNKYAASSYLSLTPEQWKSHRSYSCQVTHEGSTVEKTVAPTECSGRADCGFTSESYQQGVLSATILYEILLGKATLYAVLVSALVLMAMVKRKDSRGRAKRSGSGVKQTLNFDLLKLAGDVESNPGPSRGHMTEYKPTVRLATRDDVPRAVRTLAAAFADYPATRHTVDPDRHIERVTELQELFLTRVGLDIGKVWVADDGAAVAVWTTPESVEAGAVFAEIGPRMAELSGSRLAAQQQMEGLLAPHRPKEPAWFLATVGVSPDHQGKGLGSAVVLPGVEAAERAGVPAFLETSAPRNLPFYERLGFTVTADVEVPEGPRTWCMTRKPGA

SEQ ID NO: 19683 - protein, 874 aa, synthetic construct
MALPVTALLLPLALLLHAARPLEEASTKGPSVFPLAPSSKSTSGGTAALGCLVKDYFPEPVTVSWNSGALTSGVHTFPAVLQSSGLYSLSSVVTVPSSSLGTQTYICNVNHKPSNTKVDKRVEPKSCIPEDTFFPSPESSCDVKLVEKSFETDTNLNFQNLSVIGFRILLLKVAGFNLLMTLRLWSSRAKRSGSGATNFSLLKQAGDVEENPGPTSTMALPVTALLLPLALLLHAARPEIVMTQSPATLSLSPGERATLSCRASQDISKYLNWYQQKPGQAPRLLIYHTSRLHSGIPARFSGSGSGTDYTLTISSLQPEDFAVYFCQQGNTLPYTFGQGTKLEIKGGGGSGGGGSGGGGSQVQLQESGPGLVKPSETLSLTCTVSGVSLPDYGVSWIRQPPGKGLEWIGVIWGSETTYYNSSLKSRVTISKDNSKNQVSLKLSSVTAADTAVYYCAKHYYYGGSYAMDYWGQGTLVTVSSTRGQPKANPTVTLFPPSSEELQANKATLVCLISDFYPGAVTVAWKADGSPVKAGVETTKPSKQSNNKYAASSYLSLTPEQWKSHRSYSCQVTHEGSTVEKTVAPTECSGRADCGFTSESYQQGVLSATILYEILLGKATLYAVLVSALVLMAMVKRKDSRGRAKRSGSGVKQTLNFDLLKLAGDVESNPGPSRGHMTEYKPTVRLATRDDVPRAVRTLAAAFADYPATRHTVDPDRHIERVTELQELFLTRVGLDIGKVWVADDGAAVAVWTTPESVEAGAVFAEIGPRMAELSGSRLAAQQQMEGLLAPHRPKEPAWFLATVGVSPDHQGKGLGSAVVLPGVEAAERAGVPAFLETSAPRNLPFYERLGFTVTADVEVPEGPRTWCMTRKPGA

SEQ ID NO: 19684 - protein, 875 aa, synthetic construct
MALPVTALLLPLALLLHAARPLEEASTKGPSVFPLAPSSKSTSGGTAALGCLVKDYFPEPVTVSWNSGALTSGVHTFPAVLQSSGLYSLSSVVTVPSSSLGTQTYICNVNHKPSNTKVDKRVEPKSCIPEDTFFPSPESSCDVKLVEKSFETDTNLNFQNLSVIGFRILLLKVAGFNLLMTLRLWSSRAKRSGSGATNFSLLKQAGDVEENPGPTSTMALPVTALLLPLALLLHAARPDEIVLTQSPATLSLSPGERATLSCSASSSVSYMHWYQQKPGQAPRLLIYDTSKLASGIPARFSGSGSGTDFTLTISSLEPEDVAVYYCFQGSVYPFTFGQGTKLEIKRGGGGSGGGGSGGGGSQVQLQESGPGLVKPSQTLSLTCTVSGGSISTSGMGVGWIRQHPGKGLEWIGHIWWDDDKRYNPALKSRVTISVDTSKNQFSLKLSSVTAADTAVYYCARMELWSYYFDYWGQGTLVTVSSTRGQPKANPTVTLFPPSSEELQANKATLVCLISDFYPGAVTVAWKADGSPVKAGVETTKPSKQSNNKYAASSYLSLTPEQWKSHRSYSCQVTHEGSTVEKTVAPTECSGRADCGFTSESYQQGVLSATILYEILLGKATLYAVLVSALVLMAMVKRKDSRGRAKRSGSGVKQTLNFDLLKLAGDVESNPGPSRGHMTEYKPTVRLATRDDVPRAVRTLAAAFADYPATRHTVDPDRHIERVTELQELFLTRVGLDIGKVWVADDGAAVAVWTTPESVEAGAVFAEIGPRMAELSGSRLAAQQQMEGLLAPHRPKEPAWFLATVGVSPDHQGKGLGSAVVLPGVEAAERAGVPAFLETSAPRNLPFYERLGFTVTADVEVPEGPRTWCMTRKPGA

SEQ ID NO: 19685 - protein, 871 aa, synthetic construct
MALPVTALLLPLALLLHAARPLEEASTKGPSVFPLAPSSKSTSGGTAALGCLVKDYFPEPVTVSWNSGALTSGVHTFPAVLQSSGLYSLSSVVTVPSSSLGTQTYICNVNHKPSNTKVDKRVEPKSCIPEDTFFPSPESSCDVKLVEKSFETDTNLNFQNLSVIGFRILLLKVAGFNLLMTLRLWSSRAKRSGSGATNFSLLKQAGDVEENPGPTSMALPVTALLLPLALLLHAARPDIQMTQSPSSLSASVGDRVTITCRASQDISNYLNWYQQKPGKAPKLLIYYTSRLHSGVPSRFSGSGSGTDFTLTISSLQPEDFATYYCQQGNTLPYTFGQGTKVEIKRGGGGSGGGGSGGGGSEVQLVESGGGLVQPGGSLRLSCAASGFTFSDYFMSWVRQAPGKGLEWVATISNGGTYTYYPDSVKGRFTISRDNSKNTLYLQMNSLRAEDTAVYYCARFDGYIFDYWGQGTLVTVSSTRGQPKANPTVTLFPPSSEELQANKATLVCLISDFYPGAVTVAWKADGSPVKAGVETTKPSKQSNNKYAASSYLSLTPEQWKSHRSYSCQVTHEGSTVEKTVAPTECSGRADCGFTSESYQQGVLSATILYEILLGKATLYAVLVSALVLMAMVKRKDSRGRAKRSGSGVKQTLNFDLLKLAGDVESNPGPSRGHMTEYKPTVRLATRDDVPRAVRTLAAAFADYPATRHTVDPDRHIERVTELQELFLTRVGLDIGKVWVADDGAAVAVWTTPESVEAGAVFAEIGPRMAELSGSRLAAQQQMEGLLAPHRPKEPAWFLATVGVSPDHQGKGLGSAVVLPGVEAAERAGVPAFLETSAPRNLPFYERLGFTVTADVEVPEGPRTWCMTRKPGA

SEQ ID NO: 19686 - protein, 875 aa, synthetic construct
MALPVTALLLPLALLLHAARPLEEASTKGPSVFPLAPSSKSTSGGTAALGCLVKDYFPEPVTVSWNSGALTSGVHTFPAVLQSSGLYSLSSVVTVPSSSLGTQTYICNVNHKPSNTKVDKRVEPKSCIPEDTFFPSPESSCDVKLVEKSFETDTNLNFQNLSVIGFRILLLKVAGFNLLMTLRLWSSRAKRSGSGATNFSLLKQAGDVEENPGPTSMALPVTALLLPLALLLHAARPDIQMTQSPSSLSASVGDRVTITCKASDHINNWLAWYQQKPGQAPKLLIYGATTLETGVPSRFSGSGSGTDYTLTISSLQPEDFATYYCQQSWNTPWTFGQGTKLEIKRGGGGSGGGGSGGGGSQVQLQQPGAELVKPGASVKMSCKASGYAFSSYWINWMKQKPGQGLEWIGQIYPGDGDTNYNGKFKGRATLTADTSSSTAYMQLSSLTSEDSAVYFCARSITTVVGCAMDYWGQGTSVTVSSTRGQPKANPTVTLFPPSSEELQANKATLVCLISDFYPGAVTVAWKADGSPVKAGVETTKPSKQSNNKYAASSYLSLTPEQWKSHRSYSCQVTHEGSTVEKTVAPTECSGRADCGFTSESYQQGVLSATILYEILLGKATLYAVLVSALVLMAMVKRKDSRGRAKRSGSGVKQTLNFDLLKLAGDVESNPGPSRGHMTEYKPTVRLATRDDVPRAVRTLAAAFADYPATRHTVDPDRHIERVTELQELFLTRVGLDIGKVWVADDGAAVAVWTTPESVEAGAVFAEIGPRMAELSGSRLAAQQQMEGLLAPHRPKEPAWFLATVGVSPDHQGKGLGSAVVLPGVEAAERAGVPAFLETSAPRNLPFYERLGFTVTADVEVPEGPRTWCMTRKPGA

SEQ ID NO: 19687 - protein, 877 aa, synthetic construct
MALPVTALLLPLALLLHAARPLEEASTKGPSVFPLAPSSKSTSGGTAALGCLVKDYFPEPVTVSWNSGALTSGVHTFPAVLQSSGLYSLSSVVTVPSSSLGTQTYICNVNHKPSNTKVDKRVEPKSCIPEDTFFPSPESSCDVKLVEKSFETDTNLNFQNLSVIGFRILLLKVAGFNLLMTLRLWSSRAKRSGSGATNFSLLKQAGDVEENPGPTSMALPVTALLLPLALLLHAARPQIVLSQSPAILSASPGEKVTMTCRASSSVSYMHWYQQKPGSSPKPWIYATSNLASGVPARFSGSGSGTSYSFTISRVEAEDAATYYCQQWTFNPPTFGGGTRLEIKRTVAAGGGGSGGGGSGGGGSQAYLQQSGAELVRPGASVKMSCKASGYTFTSYNMHWVKQTPRQGLEWIGGIYPGNGDTSYNQKFKGKATLTVGKSSSTAYMQLSSLTSEDSAVYFCARYDYNYAMDYWGQGTSVTVSSASTRGQPKANPTVTLFPPSSEELQANKATLVCLISDFYPGAVTVAWKADGSPVKAGVETTKPSKQSNNKYAASSYLSLTPEQWKSHRSYSCQVTHEGSTVEKTVAPTECSGRADCGFTSESYQQGVLSATILYEILLGKATLYAVLVSALVLMAMVKRKDSRGRAKRSGSGVKQTLNFDLLKLAGDVESNPGPSRGHMTEYKPTVRLATRDDVPRAVRTLAAAFADYPATRHTVDPDRHIERVTELQELFLTRVGLDIGKVWVADDGAAVAVWTTPESVEAGAVFAEIGPRMAELSGSRLAAQQQMEGLLAPHRPKEPAWFLATVGVSPDHQGKGLGSAVVLPGVEAAERAGVPAFLETSAPRNLPFYERLGFTVTADVEVPEGPRTWCMTRKPGA

SEQ ID NO: 19688 - protein, 875 aa, synthetic construct
MALPVTALLLPLALLLHAARPLEEASTKGPSVFPLAPSSKSTSGGTAALGCLVKDYFPEPVTVSWNSGALTSGVHTFPAVLQSSGLYSLSSVVTVPSSSLGTQTYICNVNHKPSNTKVDKRVEPKSCIPEDTFFPSPESSCDVKLVEKSFETDTNLNFQNLSVIGFRILLLKVAGFNLLMTLRLWSSRAKRSGSGATNFSLLKQAGDVEENPGPTSMALPVTALLLPLALLLHAARPEIVLTQSPATLSLSPGERATLSCRASQSVSSYLAWYQQKPGQAPRLLIYDASNRATGIPARFSGSGSGTDFTLTISSLEPEDFAVYYCQQRSNWPITFGQGTRLEIKGGGGSGGGGSGGGGSEVQLVESGGGLVQPDRSLRLSCAASGFTFHDYAMHWVRQAPGKGLEWVSTISWNSGTIGYADSVKGRFTISRDNAKNSLYLQMNSLRAEDTALYYCAKDIQYGNYYYGMDVWGQGTTVTVSSTRGQPKANPTVTLFPPSSEELQANKATLVCLISDFYPGAVTVAWKADGSPVKAGVETTKPSKQSNNKYAASSYLSLTPEQWKSHRSYSCQVTHEGSTVEKTVAPTECSGRADCGFTSESYQQGVLSATILYEILLGKATLYAVLVSALVLMAMVKRKDSRGRAKRSGSGVKQTLNFDLLKLAGDVESNPGPSRGHMTEYKPTVRLATRDDVPRAVRTLAAAFADYPATRHTVDPDRHIERVTELQELFLTRVGLDIGKVWVADDGAAVAVWTTPESVEAGAVFAEIGPRMAELSGSRLAAQQQMEGLLAPHRPKEPAWFLATVGVSPDHQGKGLGSAVVLPGVEAAERAGVPAFLETSAPRNLPFYERLGFTVTADVEVPEGPRTWCMTRKPGA

SEQ ID NO: 19689 - protein, 873 aa, synthetic construct
MALPVTALLLPLALLLHAARPLEEASTKGPSVFPLAPSSKSTSGGTAALGCLVKDYFPEPVTVSWNSGALTSGVHTFPAVLQSSGLYSLSSVVTVPSSSLGTQTYICNVNHKPSNTKVDKRVEPKSCIPEDTFFPSPESSCDVKLVEKSFETDTNLNFQNLSVIGFRILLLKVAGFNLLMTLRLWSSRAKRSGSGATNFSLLKQAGDVEENPGPTSMALPVTALLLPLALLLHAARPDIQMTQSPSSLSASVGDRVTITCRASQDVNTAVAWYQQKPGKAPKLLIYSASFLESGVPSRFSGSRSGTDFTLTISSLQPEDFATYYCQQHYTTPPTFGQTKVEIKRGGGGSGGGGSGGGGSEVQLVESGGGLVQPGGSLRLSCAASGFNIKDTYIHWVRQAPGKGLEWVARIYPTNGYTRYADSVKGRFTISADTSKNTAYLQMNSLRAEDTAVYYCSRWGGDGFYAMDVWGQGTLVTVSSTRGQPKANPTVTLFPPSSEELQANKATLVCLISDFYPGAVTVAWKADGSPVKAGVETTKPSKQSNNKYAASSYLSLTPEQWKSHRSYSCQVTHEGSTVEKTVAPTECSGRADCGFTSESYQQGVLSATILYEILLGKATLYAVLVSALVLMAMVKRKDSRGRAKRSGSGVKQTLNFDLLKLAGDVESNPGPSRGHMTEYKPTVRLATRDDVPRAVRTLAAAFADYPATRHTVDPDRHIERVTELQELFLTRVGLDIGKVWVADDGAAVAVWTTPESVEAGAVFAEIGPRMAELSGSRLAAQQQMEGLLAPHRPKEPAWFLATVGVSPDHQGKGLGSAVVLPGVEAAERAGVPAFLETSAPRNLPFYERLGFTVTADVEVPEGPRTWCMTRKPGA

SEQ ID NO: 19690 - protein, 752 aa, synthetic construct
MALPVTALLLPLALLLHAARPLEEASTKGPSVFPLAPSSKSTSGGTAALGCLVKDYFPEPVTVSWNSGALTSGVHTFPAVLQSSGLYSLSSVVTVPSSSLGTQTYICNVNHKPSNTKVDKRVEPKSCIPEDTFFPSPESSCDVKLVEKSFETDTNLNFQNLSVIGFRILLLKVAGFNLLMTLRLWSSRAKRSGSGATNFSLLKQAGDVEENPGPTSMALPVTALLLPLALLLHAARPDEFEVQLVESGGGLVQAGGSLRLSCAASGITFSINTMGWYRQAPGKQRELVALISSIGDTYYADSVKGRFTISRDNAKNTVYLQMNSLKPEDTAVYYCKRFRTAAQGTDYWGQGTQVTVSSTRGQPKANPTVTLFPPSSEELQANKATLVCLISDFYPGAVTVAWKADGSPVKAGVETTKPSKQSNNKYAASSYLSLTPEQWKSHRSYSCQVTHEGSTVEKTVAPTECSGRADCGFTSESYQQGVLSATILYEILLGKATLYAVLVSALVLMAMVKRKDSRGRAKRSGSGVKQTLNFDLLKLAGDVESNPGPSRGHMTEYKPTVRLATRDDVPRAVRTLAAAFADYPATRHTVDPDRHIERVTELQELFLTRVGLDIGKVWVADDGAAVAVWTTPESVEAGAVFAEIGPRMAELSGSRLAAQQQMEGLLAPHRPKEPAWFLATVGVSPDHQGKGLGSAVVLPGVEAAERAGVPAFLETSAPRNLPFYERLGFTVTADVEVPEGPRTWCMTRKPGA

SEQ ID NO: 19691 - protein, 752 aa, synthetic construct; identical to SEQ ID NO: 19690

SEQ ID NO: 19692 - protein, 1017 aa, synthetic construct
MALPVTALLLPLALLLHAARPLEEASTKGPSVFPLAPSSKSTSGGTAALGCLVKDYFPEPVTVSWNSGALTSGVHTFPAVLQSSGLYSLSSVVTVPSSSLGTQTYICNVNHKPSNTKVDKRVEPKSCIPEDTFFPSPESSCDVKLVEKSFETDTNLNFQNLSVIGFRILLLKVAGFNLLMTLRLWSSRAKRSGSGATNFSLLKQAGDVEENPGPTSMALPVTALLLPLALLLHAARPQVQLVESGGGLVQAGDSVTLSCTASGRTFSSYALAWFRQRPGKEREFVAGLRWGGPTNYADSVKDRFTISGDSAKHTMYLQMNSLKPEDTAVYYCGYNPGGWAVPSQYEYDSWGQGTQVTVSSGTGGGGSGGGGSGGGGSEFDIQMTQSPSSLSASVGDRVTITCKASDHINNWLAWYQQKPGQAPKLLIYGATTLETGVPSRFSGSGSGTDYTLTISSLQPEDFATYYCQQSWNTPWTFGQGTKLEIKRGGGGSGGGGSGGGGSQVQLQQPGAELVKPGASVKMSCKASGYAFSSYWINWMKQKPGQGLEWIGQIYPGDGDTNYNGKFKGRATLTADTSSSTAYMQLSSLTSEDSAVYFCARSITTVVGCAMDYWGQGTSVTVSSTRGQPKANPTVTLFPPSSEELQANKATLVCLISDFYPGAVTVAWKADGSPVKAGVETTKPSKQSNNKYAASSYLSLTPEQWKSHRSYSCQVTHEGSTVEKTVAPTECSGRADCGFTSESYQQGVLSATILYEILLGKATLYAVLVSALVLMAMVKRKDSRGRAKRSGSGVKQTLNFDLLKLAGDVESNPGPSRGHMTEYKPTVRLATRDDVPRAVRTLAAAFADYPATRHTVDPDRHIERVTELQELFLTRVGLDIGKVWVADDGAAVAVWTTPESVEAGAVFAEIGPRMAELSGSRLAAQQQMEGLLAPHRPKEPAWFLATVGVSPDHQGKGLGSAVVLPGVEAAERAGVPAFLETSAPRNLPFYERLGFTVTADVEVPEGPRTWCMTRKPGA

SEQ ID NO: 19693 - protein, 1146 aa, synthetic construct
MALPVTALLLPLALLLHAARPLEEASTKGPSVFPLAPSSKSTSGGTAALGCLVKDYFPEPVTVSWNSGALTSGVHTFPAVLQSSGLYSLSSVVTVPSSSLGTQTYICNVNHKPSNTKVDKRVEPKSCIPEDTFFPSPESSCDVKLVEKSFETDTNLNFQNLSVIGFRILLLKVAGFNLLMTLRLWSSRAKRSGSGATNFSLLKQAGDVEENPGPTSMALPVTALLLPLALLLHAARPEVQLLESGGGLVQPGGSLRLSCAASGFTFSSYAMSWVRQAPGKGLEWVSSISGSGDYIYYADSVKGRFTISRDISKNTLYLQMNSLRAEDTAVYYCAKEGTGANSSLADYRGQGTLVTVSSGGGSGGGSQVQLVESGGGLVQAGDSVTLSCTASGRTFSSYALAWFRQRPGKEREFVAGLRWGGPTNYADSVKDRFTISGDSAKHTMYLQMNSLKPEDTAVYYCGYNPGGWAVPSQYEYDSWGQGTQVTVSSGTGGGGSGGGGSGGGGSEFDIQMTQSPSSLSASVGDRVTITCKASDHINNWLAWYQQKPGQAPKLLIYGATTLETGVPSRFSGSGSGTDYTLTISSLQPEDFATYYCQQSWNTPWTFGQGTKLEIKRGGGGSGGGGSGGGGSQVQLQQPGAELVKPGASVKMSCKASGYAFSSYWINWMKQKPGQGLEWIGQIYPGDGDTNYNGKFKGRATLTADTSSSTAYMQLSSLTSEDSAVYFCARSITTVVGCAMDYWGQGTSVTVSSTRGQPKANPTVTLFPPSSEELQANKATLVCLISDFYPGAVTVAWKADGSPVKAGVETTKPSKQSNNKYAASSYLSLTPEQWKSHRSYSCQVTHEGSTVEKTVAPTECSGRADCGFTSESYQQGVLSATILYEILLGKATLYAVLVSALVLMAMVKRKDSRGRAKRSGSGVKQTLNFDLLKLAGDVESNPGPSRGHMTEYKPTVRLATRDDVPRAVRTLAAAFADYPATRHTVDPDRHIERVTELQELFLTRVGLDIGKVWVADDGAAVAVWTTPESVEAGAVFAEIGPRMAELSGSRLAAQQQMEGLLAPHRPKEPAWFLATVGVSPDHQGKGLGSAVVLPGVEAAERAGVPAFLETSAPRNLPFYERLGFTVTADVEVPEGPRTWCMTRKPGA

SEQ ID NO: 19694 - protein, 1144 aa, synthetic construct
MALPVTALLLPLALLLHAARPLEEASTKGPSVFPLAPSSKSTSGGTAALGCLVKDYFPEPVTVSWNSGALTSGVHTFPAVLQSSGLYSLSSVVTVPSSSLGTQTYICNVNHKPSNTKVDKRVEPKSCIPEDTFFPSPESSCDVKLVEKSFETDTNLNFQNLSVIGFRILLLKVAGFNLLMTLRLWSSRAKRSGSGATNFSLLKQAGDVEENPGPTSMALPVTALLLPLALLLHAARPGVTQSPTHLIKTRGQQATLRCSPISGHTSVYWYQQALGLGLQFLLWYDEGEERNRGNFPPRFSGRQFPNYSSELNVNALELEDSALYLCASSLGGPRGLAGLRGDEQFFGPGTRLTVLEGGGSGGGSQVQLVESGGGLVQAGDSVTLSCTASGRTFSSYALAWFRQRPGKEREFVAGLRWGGPTNYADSVKDRFTISGDSAKHTMYLQMNSLKPEDTAVYYCGYNPGGWAVPSQYEYDSWGQGTQVTVSSGTGGGGSGGGGSGGGGSEFDIQMTQSPSSLSASVGDRVTITCKASDHINNWLAWYQQKPGQAPKLLIYGATTLETGVPSRFSGSGSGTDYTLTISSLQPEDFATYYCQQSWNTPWTFGQGTKLEIKRGGGGSGGGGSGGGGSQVQLQQPGAELVKPGASVKMSCKASGYAFSSYWINWMKQKPGQGLEWIGQIYPGDGDTNYNGKFKGRATLTADTSSSTAYMQLSSLTSEDSAVYFCARSITTVVGCAMDYWGQGTSVTVSSTRGQPKANPTVTLFPPSSEELQANKATLVCLISDFYPGAVTVAWKADGSPVKAGVETTKPSKQSNNKYAASSYLSLTPEQWKSHRSYSCQVTHEGSTVEKTVAPTECSGRADCGFTSESYQQGVLSATILYEILLGKATLYAVLVSALVLMAMVKRKDSRGRAKRSGSGVKQTLNFDLLKLAGDVESNPGPSRGHMTEYKPTVRLATRDDVPRAVRTLAAAFADYPATRHTVDPDRHIERVTELQELFLTRVGLDIGKVWVADDGAAVAVWTTPESVEAGAVFAEIGPRMAELSGSRLAAQQQMEGLLAPHRPKEPAWFLATVGVSPDHQGKGLGSAVVLPGVEAAERAGVPAFLETSAPRNLPFYERLGFTVTADVEVPEGPRTWCMTRKPGA

SEQ ID NO: 19695 - protein, 1138 aa, synthetic construct
MALPVTALLLPLALLLHAARPLEEASTKGPSVFPLAPSSKSTSGGTAALGCLVKDYFPEPVTVSWNSGALTSGVHTFPAVLQSSGLYSLSSVVTVPSSSLGTQTYICNVNHKPSNTKVDKRVEPKSCIPEDTFFPSPESSCDVKLVEKSFETDTNLNFQNLSVIGFRILLLKVAGFNLLMTLRLWSSRAKRSGSGATNFSLLKQAGDVEENPGPTSMALPVTALLLPLALLLHAARPGVTQSPTHLIKTRGQQATLRCSPISGHTSVYWYQQALGLGLQFLLWYDEGEERNRGNFPPRFSGRQFPNYSSELNVNALELEDSALYLCASSLGGPRGLAGLRGDEQFFGPGTRLTVLEGGGSGGGSGVTQSPTHLIKTRGQQATLRCSPISGHTSVYWYQQALGLGLQFLLWYDEGEERNRGNFPPRFSGRQFPNYSSELNVNALELEDSALYLCASSLGGDELGADGNEQFFGPGTRLTVLEGTGGGGSGGGGSGGGGSEFDIQMTQSPSSLSASVGDRVTITCKASDHINNWLAWYQQKPGQAPKLLIYGATTLETGVPSRFSGSGSGTDYTLTISSLQPEDFATYYCQQSWNTPWTFGQGTKLEIKRGGGGSGGGGSGGGGSQVQLQQPGAELVKPGASVKMSCKASGYAFSSYWINWMKQKPGQGLEWIGQIYPGDGDTNYNGKFKGRATLTADTSSSTAYMQLSSLTSEDSAVYFCARSITTVVGCAMDYWGQGTSVTVSSTRGQPKANPTVTLFPPSSEELQANKATLVCLISDFYPGAVTVAWKADGSPVKAGVETTKPSKQSNNKYAASSYLSLTPEQWKSHRSYSCQVTHEGSTVEKTVAPTECSGRADCGFTSESYQQGVLSATILYEILLGKATLYAVLVSALVLMAMVKRKDSRGRAKRSGSGVKQTLNFDLLKLAGDVESNPGPSRGHMTEYKPTVRLATRDDVPRAVRTLAAAFADYPATRHTVDPDRHIERVTELQELFLTRVGLDIGKVWVADDGAAVAVWTTPESVEAGAVFAEIGPRMAELSGSRLAAQQQMEGLLAPHRPKEPAWFLATVGVSPDHQGKGLGSAVVLPGVEAAERAGVPAFLETSAPRNLPFYERLGFTVTADVEVPEGPRTWCMTRKPGA

SEQ ID NO: 19696 - protein, 758 aa, synthetic construct
MALPVTALLLPLALLLHAARPLEEASTKGPSVFPLAPSSKSTSGGTAALGCLVKDYFPEPVTVSWNSGALTSGVHTFPAVLQSSGLYSLSSVVTVPSSSLGTQTYICNVNHKPSNTKVDKRVEPKSCIPEDTFFPSPESSCDVKLVEKSFETDTNLNFQNLSVIGFRILLLKVAGFNLLMTLRLWSSRAKRSGSGATNFSLLKQAGDVEENPGPTSMALPVTALLLPLALLLHAARPDEFGSDLGIKLLFAAAKGQDDEVRILLAAGADVNAKDFEGYTPLHVAAYDGHLEIVEVLLKAGADVNAKDSQGRTPLHEAAYSGHLEIVEVLLKAGADVNAQDDAGETPADLAAAWGHEDIAEVLQKTRGQPKANPTVTLFPPSSEELQANKATLVCLISDFYPGAVTVAWKADGSPVKAGVETTKPSKQSNNKYAASSYLSLTPEQWKSHRSYSCQVTHEGSTVEKTVAPTECSGRADCGFTSESYQQGVLSATILYEILLGKATLYAVLVSALVLMAMVKRKDSRGRAKRSGSGVKQTLNFDLLKLAGDVESNPGPSRGHMTEYKPTVRLATRDDVPRAVRTLAAAFADYPATRHTVDPDRHIERVTELQELFLTRVGLDIGKVWVADDGAAVAVWTTPESVEAGAVFAEIGPRMAELSGSRLAAQQQMEGLLAPHRPKEPAWFLATVGVSPDHQGKGLGSAVVLPGVEAAERAGVPAFLETSAPRNLPFYERLGFTVTADVEVPEGPRTWCMTRKPGA

SEQ ID NO: 19697 - protein, 687 aa, synthetic construct
MALPVTALLLPLALLLHAARPLEEASTKGPSVFPLAPSSKSTSGGTAALGCLVKDYFPEPVTVSWNSGALTSGVHTFPAVLQSSGLYSLSSVVTVPSSSLGTQTYICNVNHKPSNTKVDKRVEPKSCIPEDTFFPSPESSCDVKLVEKSFETDTNLNFQNLSVIGFRILLLKVAGFNLLMTLRLWSSRAKRSGSGATNFSLLKQAGDVEENPGPTSMDWIWRILFLVGAATGAHSFEGSGFEYAKEMRNAYWEIALLPNLTNQQKRAPIRKLYDDPSQSSELLSEAKKLNDSQTRGQPKANPTVTLFPPSSEELQANKATLVCLISDFYPGAVTVAWKADGSPVKAGVETTKPSKQSNNKYAASSYLSLTPEQWKSHRSYSCQVTHEGSTVEKTVAPTECSGRADCGFTSESYQQGVLSATILYEILLGKATLYAVLVSALVLMAMVKRKDSRGRAKRSGSGVKQTLNFDLLKLAGDVESNPGPSRGHMTEYKPTVRLATRDDVPRAVRTLAAAFADYPATRHTVDPDRHIERVTELQELFLTRVGLDIGKVWVADDGAAVAVWTTPESVEAGAVFAEIGPRMAELSGSRLAAQQQMEGLLAPHRPKEPAWFLATVGVSPDHQGKGLGSAVVLPGVEAAERAGVPAFLETSAPRNLPFYERLGFTVTADVEVPEGPRTWCMTRKPGA

SEQ ID NO: 19698 - protein, 909 aa, synthetic construct
MALPVTALLLPLALLLHAARPLEEASTKGPSVFPLAPSSKSTSGGTAALGCLVKDYFPEPVTVSWNSGALTSGVHTFPAVLQSSGLYSLSSVVTVPSSSLGTQTYICNVNHKPSNTKVDKRVEPKSCIPEDTFFPSPESSCDVKLVEKSFETDTNLNFQNLSVIGFRILLLKVAGFNLLMTLRLWSSRAKRSGSGATNFSLLKQAGDVEENPGPTSMALPVTALLLPLALLLHAARPDEFEVQLVESGGGLVQAGGSLRLSCAASGITFSINTMGWYRQAPGKQRELVALISSIGDTYYADSVKGRFTISRDNAKNTVYLQMNSLKPEDTAVYYCKRFRTAAQGTDYWGQGTQVTVSSLEGGGGSGGGGSGGGGSGSGGSGSGGSGSGGSGSGGSFEVQLVESGGGLVQPGGSLRLSCAASGSIFGFNDMAWYRQAPGKQRELVALISRVGVTSSADSVKGRFTISRVNAKDTVYLQMNSLKPEDTAVYYCYMDQRLDGSTLAYWGQGTQVTVSSTRGQPKANPTVTLFPPSSEELQANKATLVCLISDFYPGAVTVAWKADGSPVKAGVETTKPSKQSNNKYAASSYLSLTPEQWKSHRSYSCQVTHEGSTVEKTVAPTECSGRADCGFTSESYQQGVLSATILYEILLGKATLYAVLVSALVLMAMVKRKDSRGRAKRSGSGVKQTLNFDLLKLAGDVESNPGPSRGHMTEYKPTVRLATRDDVPRAVRTLAAAFADYPATRHTVDPDRHIERVTELQELFLTRVGLDIGKVWVADDGAAVAVWTTPESVEAGAVFAEIGPRMAELSGSRLAAQQQMEGLLAPHRPKEPAWFLATVGVSPDHQGKGLGSAVVLPGVEAAERAGVPAFLETSAPRNLPFYERLGFTVTADVEVPEGPRTWCMTRKPGA

SEQ ID NO: 19699 - protein, 823 aa, synthetic construct
MALPVTALLLPLALLLHAARPLEEASTKGPSVFPLAPSSKSTSGGTAALGCLVKDYFPEPVTVSWNSGALTSGVHTFPAVLQSSGLYSLSSVVTVPSSSLGTQTYICNVNHKPSNTKVDKRVEPKSCIPEDTFFPSPESSCDVKLVEKSFETDTNLNFQNLSVIGFRILLLKVAGFNLLMTLRLWSSRAKRSGSGATNFSLLKQAGDVEENPGPTSMALPVTALLLPLALLLHAARPGMRTEDLPKAVVFLEPQWYRVLEKDSVTLKCQGAYSPEDNSTQWFHNESLISSQASSYFIDAATVDDSGEYRCQTNLSTLSDPVQLEVHIGWLLLQAPRWVFKEEDPIHLRCHSWKNTALHKVTYLQNGKGRKYFHHNSDFYIPKATLKDSGSYFCRGLVGSKNVSSETVNITITQGLAVSTISSFFPPGYQTRGQPKANPTVTLFPPSSEELQANKATLVCLISDFYPGAVTVAWKADGSPVKAGVETTKPSKQSNNKYAASSYLSLTPEQWKSHRSYSCQVTHEGSTVEKTVAPTECSGRADCGFTSESYQQGVLSATILYEILLGKATLYAVLVSALVLMAMVKRKDSRGRAKRSGSGVKQTLNFDLLKLAGDVESNPGPSRGHMTEYKPTVRLATRDDVPRAVRTLAAAFADYPATRHTVDPDRHIERVTELQELFLTRVGLDIGKVWVADDGAAVAVWTTPESVEAGAVFAEIGPRMAELSGSRLAAQQQMEGLLAPHRPKEPAWFLATVGVSPDHQGKGLGSAVVLPGVEAAERAGVPAFLETSAPRNLPFYERLGFTVTADVEVPEGPRTWCMTRKPGA

SEQ ID NO: 19700 - protein, 451 aa, synthetic construct
MALPVTALLLPLALLLHAARPLEEASTKGPSVFPLAPSSKSTSGGTAALGCLVKDYFPEPVTVSWNSGALTSGVHTFPAVLQSSGLYSLSSVVTVPSSSLGTQTYICNVNHKPSNTKVDKRVEPKSCIPEDTFFPSPESSCDVKLVEKSFETDTNLNFQNLSVIGFRILLLKVAGFNLLMTLRLWSSRAKRSGSGATNFSLLKQAGDVEENPGPTSATMALPVTALLLPLALLLHAARPMDPDLEIRAAFLRQRNTALRTEVAELEQEVQRLENEVSQYETRYGPLGGGKTRGQPKANPTVTLFPPSSEELQANKATLVCLISDFYPGAVTVAWKADGSPVKAGVETTKPSKQSNNKYAASSYLSLTPEQWKSHRSYSCQVTHEGSTVEKTVAPTECSGRADCGFTSESYQQGVLSATILYEILLGKATLYAVLVSALVLMAMVKRKDSRG

SEQ ID NO: 19701 - protein, 451 aa, synthetic construct
MALPVTALLLPLALLLHAARPLEEASTKGPSVFPLAPSSKSTSGGTAALGCLVKDYFPEPVTVSWNSGALTSGVHTFPAVLQSSGLYSLSSVVTVPSSSLGTQTYICNVNHKPSNTKVDKRVEPKSCIPEDTFFPSPESSCDVKLVEKSFETDTNLNFQNLSVIGFRILLLKVAGFNLLMTLRLWSSRAKRSGSGATNFSLLKQAGDVEENPGPTSATMALPVTALLLPLALLLHAARPMDPDLEIEAAFLERENTALETRVAELRQRVQRLRNRVSQYRTRYGPLGGGKTRGQPKANPTVTLFPPSSEELQANKATLVCLISDFYPGAVTVAWKADGSPVKAGVETTKPSKQSNNKYAASSYLSLTPEQWKSHRSYSCQVTHEGSTVEKTVAPTECSGRADCGFTSESYQQGVLSATILYEILLGKATLYAVLVSALVLMAMVKRKDSRG

SEQ ID NO: 19702 - protein, 428 aa, synthetic construct
MALPVTALLLPLALLLHAARPLEEASTKGPSVFPLAPSSKSTSGGTAALGCLVKDYFPEPVTVSWNSGALTSGVHTFPAVLQSSGLYSLSSVVTVPSSSLGTQTYICNVNHKPSNTKVDKRVEPKSCIPEDTFFPSPESSCDVKLVEKSFETDTNLNFQNLSVIGFRILLLKVAGFNLLMTLRLWSSRAKRSGSGATNFSLLKQAGDVEENPGPTSATMALPVTALLLPLALLLHAARPEVAALEKEVAALEKEVAALEKEVAALEKTRGQPKANPTVTLFPPSSEELQANKATLVCLISDFYPGAVTVAWKADGSPVKAGVETTKPSKQSNNKYAASSYLSLTPEQWKSHRSYSCQVTHEGSTVEKTVAPTECSGRADCGFTSESYQQGVLSATILYEILLGKATLYAVLVSALVLMAMVKRKDSRG

SEQ ID NO: 19703 - protein, 686 aa, synthetic construct
MALPVTALLLPLALLLHAARPLEEASTKGPSVFPLAPSSKSTSGGTAALGCLVKDYFPEPVTVSWNSGALTSGVHTFPAVLQSSGLYSLSSVVTVPSSSLGTQTYICNVNHKPSNTKVDKRVEPKSCIPEDTFFPSPESSCDVKLVEKSFETDTNLNFQNLSVIGFRILLLKVAGFNLLMTLRLWSSRAKRSGSGATNFSLLKQAGDVEENPGPTSATMALPVTALLLPLALLLHAARPLFNQEVQIPLTESYCGPCPKNWICYKNNCYQFFDESKNWYESQASCMSQNASLLKVYSKEDQDLLKLVKSAHWMGLVHIPTNGSWQWEDGSILSPNLLTIIEMQKGDCALYASSFKGYIENCSTPNTYICMQRTVSGGGGSGGGGSGGGGDLFNQEVQIPLTESYCGPCPKNWICYKNNCYQFFDESKNWYESQASCMSQNASLLKVYSKEDQDLLKLVKSAHWMGLVHIPTNGSWQWEDGSILSPNLLTIIEMQKGDCALYASSFKGYIENCSTPNTYICMQRTVTRGQPKANPTVTLFPPSSEELQANKATLVCLISDFYPGAVTVAWKADGSPVKAGVETTKPSKQSNNKYAASSYLSLTPEQWKSHRSYSCQVTHEGSTVEKTVAPTECSGRADCGFTSESYQQGVLSATILYEILLGKATLYAVLVSALVLMAMVKRKDSRG

SEQ ID NO: 19704 - protein, 686 aa, synthetic construct
MALPVTALLLPLALLLHAARPLEEASTKGPSVFPLAPSSKSTSGGTAALGCLVKDYFPEPVTVSWNSGALTSGVHTFPAVLQSSGLYSLSSVVTVPSSSLGTQTYICNVNHKPSNTKVDKRVEPKSCIPEDTFFPSPESSCDVKLVEKSFETDTNLNFQNLSVIGFRILLLKVAGFNLLMTLRLWSSRAKRSGSGATNFSLLKQAGDVEENPGPTSATMALPVTALLLPLALLLHAARPLFNQEVQIPLTESYCGPCPKNWICYKNNCYQFFDESKNWYESQASCMSQNASLLKVYSKEDQDLLKLVKSAHWMGLVHIPTNGSWQWEDGSILSPNLLTIIEMQKGDCALYASSFKGFIENCSTPNTYICMQRTVGGGGSGGGGSGGGGSDLFNQEVQIPLTESYCGPCPKNWICYKNNCYQFFDESKNWYESQASCMSQNASLLKVYSKEDQDLLKLVKSAHWMGLVHIPTNGSWQWEDGSILSPNLLTIIEMQKGDCALYASSFKGFIENCSTPNTYICMQRTVTRGQPKANPTVTLFPPSSEELQANKATLVCLISDFYPGAVTVAWKADGSPVKAGVETTKPSKQSNNKYAASSYLSLTPEQWKSHRSYSCQVTHEGSTVEKTVAPTECSGRADCGFTSESYQQGVLSATILYEILLGKATLYAVLVSALVLMAMVKRKDSRG

SEQ ID NO: 19705 - protein, 712 aa, synthetic construct
MALPVTALLLPLALLLHAARPLEEASTKGPSVFPLAPSSKSTSGGTAALGCLVKDYFPEPVTVSWNSGALTSGVHTFPAVLQSSGLYSLSSVVTVPSSSLGTQTYICNVNHKPSNTKVDKRVEPKSCIPEDTFFPSPESSCDVKLVEKSFETDTNLNFQNLSVIGFRILLLKVAGFNLLMTLRLWSSRAKRSGSGATNFSLLKQAGDVEENPGPTSMALPVTALLLPLALLLHAARPMDPDLEIRAAFLRQRNTALRTEVAELEQEVQRLENEVSQYETRYGPLGGGKGTGGGGSGGGGSGGGGSEFDIQMTQSPSSLSASVGDRVTITCKASDHINNWLAWYQQKPGQAPKLLIYGATTLETGVPSRFSGSGSGTDYTLTISSLQPEDFATYYCQQSWNTPWTFGQGTKLEIKRGGGGSGGGGSGGGGSQVQLQQPGAELVKPGASVKMSCKASGYAFSSYWINWMKQKPGQGLEWIGQIYPGDGDTNYNGKFKGRATLTADTSSSTAYMQLSSLTSEDSAVYFCARSITTVVGCAMDYWGQGTSVTVSSTRGQPKANPTVTLFPPSSEELQANKATLVCLISDFYPGAVTVAWKADGSPVKAGVETTKPSKQSNNKYAASSYLSLTPEQWKSHRSYSCQVTHEGSTVEKTVAPTECSGRADCGFTSESYQQGVLSATILYEILLGKATLYAVLVSALVLMAMVKRKDSRG

SEQ ID NO: 19706 - protein, 947 aa, synthetic construct
MALPVTALLLPLALLLHAARPLEEASTKGPSVFPLAPSSKSTSGGTAALGCLVKDYFPEPVTVSWNSGALTSGVHTFPAVLQSSGLYSLSSVVTVPSSSLGTQTYICNVNHKPSNTKVDKRVEPKSCIPEDTFFPSPESSCDVKLVEKSFETDTNLNFQNLSVIGFRILLLKVAGFNLLMTLRLWSSRAKRSGSGATNFSLLKQAGDVEENPGPTSMALPVTALLLPLALLLHAARPLFNQEVQIPLTESYCGPCPKNWICYKNNCYQFFDESKNWYESQASCMSQNASLLKVYSKEDQDLLKLVKSAHWMGLVHIPTNGSWQWEDGSILSPNLLTIIEMQKGDCALYASSFKGFIENCSTPNTYICMQRTVGGGGSGGGGSGGGGSDLFNQEVQIPLTESYCGPCPKNWICYKNNCYQFFDESKNWYESQASCMSQNASLLKVYSKEDQDLLKLVKSAHWMGLVHIPTNGSWQWEDGSILSPNLLTIIEMQKGDCALYASSFKGFIENCSTPNTYICMQRTVGTGGGGSGGGGSGGGGSEFDIQMTQSPSSLSASVGDRVTITCKASDHINNWLAWYQQKPGQAPKLLIYGATTLETGVPSRFSGSGSGTDYTLTISSLQPEDFATYYCQQSWNTPWTFGQGTKLEIKRGGGGSGGGGSGGGGSQVQLQQPGAELVKPGASVKMSCKASGYAFSSYWINWMKQKPGQGLEWIGQIYPGDGDTNYNGKFKGRATLTADTSSSTAYMQLSSLTSEDSAVYFCARSITTVVGCAMDYWGQGTSVTVSSTRGQPKANPTVTLFPPSSEELQANKATLVCLISDFYPGAVTVAWKADGSPVKAGVETTKPSKQSNNKYAASSYLSLTPEQWKSHRSYSCQVTHEGSTVEKTVAPTECSGRADCGFTSESYQQGVLSATILYEILLGKATLYAVLVSALVLMAMVKRKDSRG

SEQ ID NO: 19707 - protein, 652 aa, synthetic construct
MALPVTALLLPLALLLHAARPLEEASTKGPSVFPLAPSSKSTSGGTAALGCLVKDYFPEPVTVSWNSGALTSGVHTFPAVLQSSGLYSLSSVVTVPSSSLGTQTYICNVNHKPSNTKVDKRVEPKSCIPEDTFFPSPESSCDVKLVEKSFETDTNLNFQNLSVIGFRILLLKVAGFNLLMTLRLWSSRAKRSGSGATNFSLLKQAGDVEENPGPTSMALPVTALLLPLALLLHAARPQSVLTQPPSVSGAPGQRVTISCTGSSSNIGAGYDVHWYQQLPGTAPKLLIFGNSNRPSGVPDRFSGFKSGTSASLAITGLQAEDEADYFCQSYDSSLSGSGVFGTGTKVTVLGGGGGSGGGGSGGGGSQMQLVQSGGGLVQPGRSLRLSCAASGFTFDDYAMHWVRQAPGKGLEWVSGISWNSGSIGYADSVKGRFTISRDNAKNSLYLQMNSLRAEDTALYYCAKDIHSGSYYGLLYYAMDVWGQGTTVTVSSTRGQPKANPTVTLFPPSSEELQANKATLVCLISDFYPGAVTVAWKADGSPVKAGVETTKPSKQSNNKYAASSYLSLTPEQWKSHRSYSCQVTHEGSTVEKTVAPTECSGRADCGFTSESYQQGVLSATILYEILLGKATLYAVLVSALVLMAMVKRKDSRG

SEQ ID NO: 19708 - protein, 489 aa, synthetic construct
MALPVTALLLPLALLLHAARPLEEASTKGPSVFPLAPSSKSTSGGTAALGCLVKDYFPEPVTVSWNSGALTSGVHTFPAVLQSSGLYSLSSVVTVPSSSLGTQTYICNVNHKPSNTKVDKRVEPKSCIPEDTFFPSPESSCDVKLVEKSFETDTNLNFQNLSVIGFRILLLKVAGFNLLMTLRLWSSRAKRSGSGATNFSLLKQAGDVEENPGPTSMALPVTALLLPLALLLHAARPMCMPCFTTDHQMARKCDDCCGGKGRGKCYGPQCLCRLEGGGGSGGGGSGGGGSFEVCMPCFTTDQQMARKCSDCCGGKGRGKCYGPQCLCRTRGQPKANPTVTLFPPSSEELQANKATLVCLISDFYPGAVTVAWKADGSPVKAGVETTKPSKQSNNKYAASSYLSLTPEQWKSHRSYSCQVTHEGSTVEKTVAPTECSGRADCGFTSESYQQGVLSATILYEILLGKATLYAVLVSALVLMAMVKRKDSRG

SEQ ID NO: 19709 - protein, 752 aa, synthetic construct
MALPVTALLLPLALLLHAARPLEEASTKGPSVFPLAPSSKSTSGGTAALGCLVKDYFPEPVTVSWNSGALTSGVHTFPAVLQSSGLYSLSSVVTVPSSSLGTQTYICNVNHKPSNTKVDKRVEPKSCIPEDTFFPSPESSCDVKLVEKSFETDTNLNFQNLSVIGFRILLLKVAGFNLLMTLRLWSSRAKRSGSGATNFSLLKQAGDVEENPGPTSMALPVTALLLPLALLLHAARPMCMPCFTTDHQMARKCDDCCGGKGRGKCYGPQCLCRLEGGGGSGGGGSGGGGSFEVCMPCFTTDQQMARKCSDCCGGKGRGKCYGPQCLCRGTGGGGSGGGGSGGGGSEFDIQMTQSPSSLSASVGDRVTITCKASDHINNWLAWYQQKPGQAPKLLIYGATTLETGVPSRFSGSGSGTDYTLTISSLQPEDFATYYCQQSWNTPWTFGQGTKLEIKRGGGGSGGGGSGGGGSQVQLQQPGAELVKPGASVKMSCKASGYAFSSYWINWMKQKPGQGLEWIGQIYPGDGDTNYNGKFKGRATLTADTSSSTAYMQLSSLTSEDSAVYFCARSITTVVGCAMDYWGQGTSVTVSSTRGQPKANPTVTLFPPSSEELQANKATLVCLISDFYPGAVTVAWKADGSPVKAGVETTKPSKQSNNKYAASSYLSLTPEQWKSHRSYSCQVTHEGSTVEKTVAPTECSGRADCGFTSESYQQGVLSATILYEILLGKATLYAVLVSALVLMAMVKRKDSRG

SEQ ID NO: 19710 - protein, 827 aa, synthetic construct
MALPVTALLLPLALLLHAARPLEEASTKGPSVFPLAPSSKSTSGGTAALGCLVKDYFPEPVTVSWNSGALTSGVHTFPAVLQSSGLYSLSSVVTVPSSSLGTQTYICNVNHKPSNTKVDKRVEPKSCIPEDTFFPSPESSCDVKLVEKSFETDTNLNFQNLSVIGFRILLLKVAGFNLLMTLRLWSSRAKRSGSGATNFSLLKQAGDVEENPGPTSMALPVTALLLPLALLLHAARPSPVAPACDPRLLNKLLRDSHLLHSRLSQCPDVDPLSIPVLLPAVDFSLGEWKTQTEQSKAQDILGAVSLLLEGVMAARGQLEPSCLSSLLGQLSGQVRLLLGALQGLLGTQLPLQGRTTAHKDPNALFLSLQQLLRGKVRFLLLVEGPTLCVRRTLPTTAVPSSTSGTGGGGSGGGGSGGGGSEFDIQMTQSPSSLSASVGDRVTITCKASDHINNWLAWYQQKPGQAPKLLIYGATTLETGVPSRFSGSGSGTDYTLTISSLQPEDFATYYCQQSWNTPWTFGQGTKLEIKRGGGGSGGGGSGGGGSQVQLQQPGAELVKPGASVKMSCKASGYAFSSYWINWMKQKPGQGLEWIGQIYPGDGDTNYNGKFKGRATLTADTSSSTAYMQLSSLTSEDSAVYFCARSITTVVGCAMDYWGQGTSVTVSSTRGQPKANPTVTLFPPSSEELQANKATLVCLISDFYPGAVTVAWKADGSPVKAGVETTKPSKQSNNKYAASSYLSLTPEQWKSHRSYSCQVTHEGSTVEKTVAPTECSGRADCGFTSESYQQGVLSATILYEILLGKATLYAVLVSALVLMAMVKRKDSRG

SEQ ID NO: 19711 - protein, 734 aa, synthetic construct
MALPVTALLLPLALLLHAARPLEEASTKGPSVFPLAPSSKSTSGGTAALGCLVKDYFPEPVTVSWNSGALTSGVHTFPAVLQSSGLYSLSSVVTVPSSSLGTQTYICNVNHKPSNTKVDKRVEPKSCIPEDTFFPSPESSCDVKLVEKSFETDTNLNFQNLSVIGFRILLLKVAGFNLLMTLRLWSSRAKRSGSGATNFSLLKQAGDVEENPGPTSMALPVTALLLPLALLLHAARPMGSWEEFELRLNAIEERLYALGGSEAELAYFEYVIADFEGNLQRYKGKGNPEVEALYFEADAIFEELVAYRHNGTGGGGSGGGGSGGGGSEFDIQMTQSPSSLSASVGDRVTITCKASDHINNWLAWYQQKPGQAPKLLIYGATTLETGVPSRFSGSGSGTDYTLTISSLQPEDFATYYCQQSWNTPWTFGQGTKLEIKRGGGGSGGGGSGGGGSQVQLQQPGAELVKPGASVKMSCKASGYAFSSYWINWMKQKPGQGLEWIGQIYPGDGDTNYNGKFKGRATLTADTSSSTAYMQLSSLTSEDSAVYFCARSITTVVGCAMDYWGQGTSVTVSSTRGQPKANPTVTLFPPSSEELQANKATLVCLISDFYPGAVTVAWKADGSPVKAGVETTKPSKQSNNKYAASSYLSLTPEQWKSHRSYSCQVTHEGSTVEKTVAPTECSGRADCGFTSESYQQGVLSATILYEILLGKATLYAVLVSALVLMAMVKRKDSRG

SEQ ID NO: 19712 - protein, 873 aa, synthetic construct
MALPVTALLLPLALLLHAARPLEGQPKANPTVTLFPPSSEELQANKATLVCLISDFYPGAVTVAWKADGSPVKAGVETTKPSKQSNNKYAASSYLSLTPEQWKSHRSYSCQVTHEGSTVEKTVAPTECSGRADCGFTSESYQQGVLSATILYEILLGKATLYAVLVSALVLMAMVKRKDSRGRAKRSGSGATNFSLLKQAGDVEENPGPTSMALPVTALLLPLALLLHAARPDIQMTQTTSSLSASLGDRVTISCRASQDISKYLNWYQQKPDGTVKLLIYHTSRLHSGVPSRFSGSGSGTDYSLTISNLEQEDIATYFCQQGNTLPYTFGGGTKLEITGGGGSGGGGSGGGGSEVKLQESGPGLVAPSQSLSVTCTVSGVSLPDYGVSWIRQPPRKGLEWLGVIWGSETTYYNSALKSRLTIIKDNSKSQVFLKMNSLQTDDTAIYYCAKHYYYGGSYAMDYWGQGTSVTVSSTREASTKGPSVFPLAPSSKSTSGGTAALGCLVKDYFPEPVTVSWNSGALTSGVHTFPAVLQSSGLYSLSSVVTVPSSSLGTQTYICNVNHKPSNTKVDKRVEPKSCIPEDTFFPSPESSCDVKLVEKSFETDTNLNFQNLSVIGFRILLLKVAGFNLLMTLRLWSSRAKRSGSGVKQTLNFDLLKLAGDVESNPGPSRGHMTEYKPTVRLATRDDVPRAVRTLAAAFADYPATRHTVDPDRHIERVTELQELFLTRVGLDIGKVWVADDGAAVAVWTTPESVEAGAVFAEIGPRMAELSGSRLAAQQQMEGLLAPHRPKEPAWFLATVGVSPDHQGKGLGSAVVLPGVEAAERAGVPAFLETSAPRNLPFYERLGFTVTADVEVPEGPRTWCMTRKPGA

SEQ ID NO: 19713 - protein, 874 aa, synthetic construct
MALPVTALLLPLALLLHAARPLEGQPKANPTVTLFPPSSEELQANKATLVCLISDFYPGAVTVAWKADGSPVKAGVETTKPSKQSNNKYAASSYLSLTPEQWKSHRSYSCQVTHEGSTVEKTVAPTECSGRADCGFTSESYQQGVLSATILYEILLGKATLYAVLVSALVLMAMVKRKDSRGRAKRSGSGATNFSLLKQAGDVEENPGPTSTMALPVTALLLPLALLLHAARPEIVMTQSPATLSLSPGERATLSCRASQDISKYLNWYQQKPGQAPRLLIYHTSRLHSGIPARFSGSGSGTDYTLTISSLQPEDFAVYFCQQGNTLPYTFGQGTKLEIKGGGGSGGGGSGGGGSQVQLQESGPGLVKPSETLSLTCTVSGVSLPDYGVSWIRQPPGKGLEWIGVIWGSETTYYNSSLKSRVTISKDNSKNQVSLKLSSVTAADTAVYYCAKHYYYGGSYAMDYWGQGTLVTVSSTREASTKGPSVFPLAPSSKSTSGGTAALGCLVKDYFPEPVTVSWNSGALTSGVHTFPAVLQSSGLYSLSSVVTVPSSSLGTQTYICNVNHKPSNTKVDKRVEPKSCIPEDTFFPSPESSCDVKLVEKSFETDTNLNFQNLSVIGFRILLLKVAGFNLLMTLRLWSSRAKRSGSGVKQTLNFDLLKLAGDVESNPGPSRGHMTEYKPTVRLATRDDVPRAVRTLAAAFADYPATRHTVDPDRHIERVTELQELFLTRVGLDIGKVWVADDGAAVAVWTTPESVEAGAVFAEIGPRMAELSGSRLAAQQQMEGLLAPHRPKEPAWFLATVGVSPDHQGKGLGSAVVLPGVEAAERAGVPAFLETSAPRNLPFYERLGFTVTADVEVPEGPRTWCMTRKPGA

SEQ ID NO: 19714 - protein, 875 aa, synthetic construct
MALPVTALLLPLALLLHAARPLEGQPKANPTVTLFPPSSEELQANKATLVCLISDFYPGAVTVAWKADGSPVKAGVETTKPSKQSNNKYAASSYLSLTPEQWKSHRSYSCQVTHEGSTVEKTVAPTECSGRADCGFTSESYQQGVLSATILYEILLGKATLYAVLVSALVLMAMVKRKDSRGRAKRSGSGATNFSLLKQAGDVEENPGPTSTMALPVTALLLPLALLLHAARPDEIVLTQSPATLSLSPGERATLSCSASSSVSYMHWYQQKPGQAPRLLIYDTSKLASGIPARFSGSGSGTDFTLTISSLEPEDVAVYYCFQGSVYPFTFGQGTKLEIKRGGGGSGGGGSGGGGSQVQLQESGPGLVKPSQTLSLTCTVSGGSISTSGMGVGWIRQHPGKGLEWIGHIWWDDDKRYNPALKSRVTISVDTSKNQFSLKLSSVTAADTAVYYCARMELWSYYFDYWGQGTLVTVSSTREASTKGPSVFPLAPSSKSTSGGTAALGCLVKDYFPEPVTVSWNSGALTSGVHTFPAVLQSSGLYSLSSVVTVPSSSLGTQTYICNVNHKPSNTKVDKRVEPKSCIPEDTFFPSPESSCDVKLVEKSFETDTNLNFQNLSVIGFRILLLKVAGFNLLMTLRLWSSRAKRSGSGVKQTLNFDLLKLAGDVESNPGPSRGHMTEYKPTVRLATRDDVPRAVRTLAAAFADYPATRHTVDPDRHIERVTELQELFLTRVGLDIGKVWVADDGAAVAVWTTPESVEAGAVFAEIGPRMAELSGSRLAAQQQMEGLLAPHRPKEPAWFLATVGVSPDHQGKGLGSAVVLPGVEAAERAGVPAFLETSAPRNLPFYERLGFTVTADVEVPEGPRTWCMTRKPGA

SEQ ID NO: 19715 - protein, 871 aa, synthetic construct
MALPVTALLLPLALLLHAARPLEGQPKANPTVTLFPPSSEELQANKATLVCLISDFYPGAVTVAWKADGSPVKAGVETTKPSKQSNNKYAASSYLSLTPEQWKSHRSYSCQVTHEGSTVEKTVAPTECSGRADCGFTSESYQQGVLSATILYEILLGKATLYAVLVSALVLMAMVKRKDSRGRAKRSGSGATNFSLLKQAGDVEENPGPTSMALPVTALLLPLALLLHAARPDIQMTQSPSSLSASVGDRVTITCRASQDISNYLNWYQQKPGKAPKLLIYYTSRLHSGVPSRFSGSGSGTDFTLTISSLQPEDFATYYCQQGNTLPYTFGQGTKVEIKRGGGGSGGGGSGGGGSEVQLVESGGGLVQPGGSLRLSCAASGFTFSDYFMSWVRQAPGKGLEWVATISNGGTYTYYPDSVKGRFTISRDNSKNTLYLQMNSLRAEDTAVYYCARFDGYIFDYWGQGTLVTVSSTREASTKGPSVFPLAPSSKSTSGGTAALGCLVKDYFPEPVTVSWNSGALTSGVHTFPAVLQSSGLYSLSSVVTVPSSSLGTQTYICNVNHKPSNTKVDKRVEPKSCIPEDTFFPSPESSCDVKLVEKSFETDTNLNFQNLSVIGFRILLLKVAGFNLLMTLRLWSSRAKRSGSGVKQTLNFDLLKLAGDVESNPGPSRGHMTEYKPTVRLATRDDVPRAVRTLAAAFADYPATRHTVDPDRHIERVTELQELFLTRVGLDIGKVWVADDGAAVAVWTTPESVEAGAVFAEIGPRMAELSGSRLAAQQQMEGLLAPHRPKEPAWFLATVGVSPDHQGKGLGSAVVLPGVEAAERAGVPAFLETSAPRNLPFYERLGFTVTADVEVPEGPRTWCMTRKPGA

SEQ ID NO: 19716 - protein, 875 aa, synthetic construct
MALPVTALLLPLALLLHAARPLEGQPKANPTVTLFPPSSEELQANKATLVCLISDFYPGAVTVAWKADGSPVKAGVETTKPSKQSNNKYAASSYLSLTPEQWKSHRSYSCQVTHEGSTVEKTVAPTECSGRADCGFTSESYQQGVLSATILYEILLGKATLYAVLVSALVLMAMVKRKDSRGRAKRSGSGATNFSLLKQAGDVEENPGPTSMALPVTALLLPLALLLHAARPDIQMTQSPSSLSASVGDRVTITCKASDHINNWLAWYQQKPGQAPKLLIYGATTLETGVPSRFSGSGSGTDYTLTISSLQPEDFATYYCQQSWNTPWTFGQGTKLEIKRGGGGSGGGGSGGGGSQVQLQQPGAELVKPGASVKMSCKASGYAFSSYWINWMKQKPGQGLEWIGQIYPGDGDTNYNGKFKGRATLTADTSSSTAYMQLSSLTSEDSAVYFCARSITTVVGCAMDYWGQGTSVTVSSTREASTKGPSVFPLAPSSKSTSGGTAALGCLVKDYFPEPVTVSWNSGALTSGVHTFPAVLQSSGLYSLSSVVTVPSSSLGTQTYICNVNHKPSNTKVDKRVEPKSCIPEDTFFPSPESSCDVKLVEKSFETDTNLNFQNLSVIGFRILLLKVAGFNLLMTLRLWSSRAKRSGSGVKQTLNFDLLKLAGDVESNPGPSRGHMTEYKPTVRLATRDDVPRAVRTLAAAFADYPATRHTVDPDRHIERVTELQELFLTRVGLDIGKVWVADDGAAVAVWTTPESVEAGAVFAEIGPRMAELSGSRLAAQQQMEGLLAPHRPKEPAWFLATVGVSPDHQGKGLGSAVVLPGVEAAERAGVPAFLETSAPRNLPFYERLGFTVTADVEVPEGPRTWCMTRKPGA

SEQ ID NO: 19717 - protein, 877 aa, synthetic construct
MALPVTALLLPLALLLHAARPLEGQPKANPTVTLFPPSSEELQANKATLVCLISDFYPGAVTVAWKADGSPVKAGVETTKPSKQSNNKYAASSYLSLTPEQWKSHRSYSCQVTHEGSTVEKTVAPTECSGRADCGFTSESYQQGVLSATILYEILLGKATLYAVLVSALVLMAMVKRKDSRGRAKRSGSGATNFSLLKQAGDVEENPGPTSMALPVTALLLPLALLLHAARPQIVLSQSPAILSASPGEKVTMTCRASSSVSYMHWYQQKPGSSPKPWIYATSNLASGVPARFSGSGSGTSYSFTISRVEAEDAATYYCQQWTFNPPTFGGGTRLEIKRTVAAGGGGSGGGGSGGGGSQAYLQQSGAELVRPGASVKMSCKASGYTFTSYNMHWVKQTPRQGLEWIGGIYPGNGDTSYNQKFKGKATLTVGKSSSTAYMQLSSLTSEDSAVYFCARYDYNYAMDYWGQGTSVTVSSASTREASTKGPSVFPLAPSSKSTSGGTAALGCLVKDYFPEPVTVSWNSGALTSGVHTFPAVLQSSGLYSLSSVVTVPSSSLGTQTYICNVNHKPSNTKVDKRVEPKSCIPEDTFFPSPESSCDVKLVEKSFETDTNLNFQNLSVIGFRILLLKVAGFNLLMTLRLWSSRAKRSGSGVKQTLNFDLLKLAGDVESNPGPSRGHMTEYKPTVRLATRDDVPRAVRTLAAAFADYPATRHTVDPDRHIERVTELQELFLTRVGLDIGKVWVADDGAAVAVWTTPESVEAGAVFAEIGPRMAELSGSRLAAQQQMEGLLAPHRPKEPAWFLATVGVSPDHQGKGLGSAVVLPGVEAAERAGVPAFLETSAPRNLPFYERLGFTVTADVEVPEGPRTWCMTRKPGA

SEQ ID NO: 19718 - protein, 875 aa, synthetic construct
MALPVTALLLPLALLLHAARPLEGQPKANPTVTLFPPSSEELQANKATLVCLISDFYPGAVTVAWKADGSPVKAGVETTKPSKQSNNKYAASSYLSLTPEQWKSHRSYSCQVTHEGSTVEKTVAPTECSGRADCGFTSESYQQGVLSATILYEILLGKATLYAVLVSALVLMAMVKRKDSRGRAKRSGSGATNFSLLKQAGDVEENPGPTSMALPVTALLLPLALLLHAARPEIVLTQSPATLSLSPGERATLSCRASQSVSSYLAWYQQKPGQAPRLLIYDASNRATGIPARFSGSGSGTDFTLTISSLEPEDFAVYYCQQRSNWPITFGQGTRLEIKGGGGSGGGGSGGGGSEVQLVESGGGLVQPDRSLRLSCAASGFTFHDYAMHWVRQAPGKGLEWVSTISWNSGTIGYADSVKGRFTISRDNAKNSLYLQMNSLRAEDTALYYCAKDIQYGNYYYGMDVWGQGTTVTVSSTREASTKGPSVFPLAPSSKSTSGGTAALGCLVKDYFPEPVTVSWNSGALTSGVHTFPAVLQSSGLYSLSSVVTVPSSSLGTQTYICNVNHKPSNTKVDKRVEPKSCIPEDTFFPSPESSCDVKLVEKSFETDTNLNFQNLSVIGFRILLLKVAGFNLLMTLRLWSSRAKRSGSGVKQTLNFDLLKLAGDVESNPGPSRGHMTEYKPTVRLATRDDVPRAVRTLAAAFADYPATRHTVDPDRHIERVTELQELFLTRVGLDIGKVWVADDGAAVAVWTTPESVEAGAVFAEIGPRMAELSGSRLAAQQQMEGLLAPHRPKEPAWFLATVGVSPDHQGKGLGSAVVLPGVEAAERAGVPAFLETSAPRNLPFYERLGFTVTADVEVPEGPRTWCMTRKPGA

SEQ ID NO: 19719 - protein, 873 aa, synthetic construct
MALPVTALLLPLALLLHAARPLEGQPKANPTVTLFPPSSEELQANKATLVCLISDFYPGAVTVAWKADGSPVKAGVETTKPSKQSNNKYAASSYLSLTPEQWKSHRSYSCQVTHEGSTVEKTVAPTECSGRADCGFTSESYQQGVLSATILYEILLGKATLYAVLVSALVLMAMVKRKDSRGRAKRSGSGATNFSLLKQAGDVEENPGPTSMALPVTALLLPLALLLHAARPDIQMTQSPSSLSASVGDRVTITCRASQDVNTAVAWYQQKPGKAPKLLIYSASFLESGVPSRFSGSRSGTDFTLTISSLQPEDFATYYCQQHYTTPPTFGQTKVEIKRGGGGSGGGGSGGGGSEVQLVESGGGLVQPGGSLRLSCAASGFNIKDTYIHWVRQAPGKGLEWVARIYPTNGYTRYADSVKGRFTISADTSKNTAYLQMNSLRAEDTAVYYCSRWGGDGFYAMDVWGQGTLVTVSSTREASTKGPSVFPLAPSSKSTSGGTAALGCLVKDYFPEPVTVSWNSGALTSGVHTFPAVLQSSGLYSLSSVVTVPSSSLGTQTYICNVNHKPSNTKVDKRVEPKSCIPEDTFFPSPESSCDVKLVEKSFETDTNLNFQNLSVIGFRILLLKVAGFNLLMTLRLWSSRAKRSGSGVKQTLNFDLLKLAGDVESNPGPSRGHMTEYKPTVRLATRDDVPRAVRTLAAAFADYPATRHTVDPDRHIERVTELQELFLTRVGLDIGKVWVADDGAAVAVWTTPESVEAGAVFAEIGPRMAELSGSRLAAQQQMEGLLAPHRPKEPAWFLATVGVSPDHQGKGLGSAVVLPGVEAAERAGVPAFLETSAPRNLPFYERLGFTVTADVEVPEGPRTWCMTRKPGA

SEQ ID NO: 19720 - protein, 752 aa, synthetic construct
MALPVTALLLPLALLLHAARPLEGQPKANPTVTLFPPSSEELQANKATLVCLISDFYPGAVTVAWKADGSPVKAGVETTKPSKQSNNKYAASSYLSLTPEQWKSHRSYSCQVTHEGSTVEKTVAPTECSGRADCGFTSESYQQGVLSATILYEILLGKATLYAVLVSALVLMAMVKRKDSRGRAKRSGSGATNFSLLKQAGDVEENPGPTSMALPVTALLLPLALLLHAARPDEFEVQLVESGGGLVQAGGSLRLSCAASGITFSINTMGWYRQAPGKQRELVALISSIGDTYYADSVKGRFTISRDNAKNTVYLQMNSLKPEDTAVYYCKRFRTAAQGTDYWGQGTQVTVSSTREASTKGPSVFPLAPSSKSTSGGTAALGCLVKDYFPEPVTVSWNSGALTSGVHTFPAVLQSSGLYSLSSVVTVPSSSLGTQTYICNVNHKPSNTKVDKRVEPKSCIPEDTFFPSPESSCDVKLVEKSFETDTNLNFQNLSVIGFRILLLKVAGFNLLMTLRLWSSRAKRSGSGVKQTLNFDLLKLAGDVESNPGPSRGHMTEYKPTVRLATRDDVPRAVRTLAAAFADYPATRHTVDPDRHIERVTELQELFLTRVGLDIGKVWVADDGAAVAVWTTPESVEAGAVFAEIGPRMAELSGSRLAAQQQMEGLLAPHRPKEPAWFLATVGVSPDHQGKGLGSAVVLPGVEAAERAGVPAFLETSAPRNLPFYERLGFTVTADVEVPEGPRTWCMTRKPGA

SEQ ID NO: 19721 - protein, 752 aa, synthetic construct; identical to SEQ ID NO: 19720

SEQ ID NO: 19722 - protein, 1017 aa, synthetic construct
MALPVTALLLPLALLLHAARPLEGQPKANPTVTLFPPSSEELQANKATLVCLISDFYPGAVTVAWKADGSPVKAGVETTKPSKQSNNKYAASSYLSLTPEQWKSHRSYSCQVTHEGSTVEKTVAPTECSGRADCGFTSESYQQGVLSATILYEILLGKATLYAVLVSALVLMAMVKRKDSRGRAKRSGSGATNFSLLKQAGDVEENPGPTSMALPVTALLLPLALLLHAARPQVQLVESGGGLVQAGDSVTLSCTASGRTFSSYALAWFRQRPGKEREFVAGLRWGGPTNYADSVKDRFTISGDSAKHTMYLQMNSLKPEDTAVYYCGYNPGGWAVPSQYEYDSWGQGTQVTVSSGTGGGGSGGGGSGGGGSEFDIQMTQSPSSLSASVGDRVTITCKASDHINNWLAWYQQKPGQAPKLLIYGATTLETGVPSRFSGSGSGTDYTLTISSLQPEDFATYYCQQSWNTPWTFGQGTKLEIKRGGGGSGGGGSGGGGSQVQLQQPGAELVKPGASVKMSCKASGYAFSSYWINWMKQKPGQGLEWIGQIYPGDGDTNYNGKFKGRATLTADTSSSTAYMQLSSLTSEDSAVYFCARSITTVVGCAMDYWGQGTSVTVSSTREASTKGPSVFPLAPSSKSTSGGTAALGCLVKDYFPEPVTVSWNSGALTSGVHTFPAVLQSSGLYSLSSVVTVPSSSLGTQTYICNVNHKPSNTKVDKRVEPKSCIPEDTFFPSPESSCDVKLVEKSFETDTNLNFQNLSVIGFRILLLKVAGFNLLMTLRLWSSRAKRSGSGVKQTLNFDLLKLAGDVESNPGPSRGHMTEYKPTVRLATRDDVPRAVRTLAAAFADYPATRHTVDPDRHIERVTELQELFLTRVGLDIGKVWVADDGAAVAVWTTPESVEAGAVFAEIGPRMAELSGSRLAAQQQMEGLLAPHRPKEPAWFLATVGVSPDHQGKGLGSAVVLPGVEAAERAGVPAFLETSAPRNLPFYERLGFTVTADVEVPEGPRTWCMTRKPGA

SEQ ID NO: 19723 - protein, 1146 aa, synthetic construct
MALPVTALLLPLALLLHAARPLEGQPKANPTVTLFPPSSEELQANKATLVCLISDFYPGAVTVAWKADGSPVKAGVETTKPSKQSNNKYAASSYLSLTPEQWKSHRSYSCQVTHEGSTVEKTVAPTECSGRADCGFTSESYQQGVLSATILYEILLGKATLYAVLVSALVLMAMVKRKDSRGRAKRSGSGATNFSLLKQAGDVEENPGPTSMALPVTALLLPLALLLHAARPEVQLLESGGGLVQPGGSLRLSCAASGFTFSSYAMSWVRQAPGKGLEWVSSISGSGDYIYYADSVKGRFTISRDISKNTLYLQMNSLRAEDTAVYYCAKEGTGANSSLADYRGQGTLVTVSSGGGSGGGSQVQLVESGGGLVQAGDSVTLSCTASGRTFSSYALAWFRQRPGKEREFVAGLRWGGPTNYADSVKDRFTISGDSAKHTMYLQMNSLKPEDTAVYYCGYNPGGWAVPSQYEYDSWGQGTQVTVSSGTGGGGSGGGGSGGGGSEFDIQMTQSPSSLSASVGDRVTITCKASDHINNWLAWYQQKPGQAPKLLIYGATTLETGVPSRFSGSGSGTDYTLTISSLQPEDFATYYCQQSWNTPWTFGQGTKLEIKRGGGGSGGGGSGGGGSQVQLQQPGAELVKPGASVKMSCKASGYAFSSYWINWMKQKPGQGLEWIGQIYPGDGDTNYNGKFKGRATLTADTSSSTAYMQLSSLTSEDSAVYFCARSITTVVGCAMDYWGQGTSVTVSSTREASTKGPSVFPLAPSSKSTSGGTAALGCLVKDYFPEPVTVSWNSGALTSGVHTFPAVLQSSGLYSLSSVVTVPSSSLGTQTYICNVNHKPSNTKVDKRVEPKSCIPEDTFFPSPESSCDVKLVEKSFETDTNLNFQNLSVIGFRILLLKVAGFNLLMTLRLWSSRAKRSGSGVKQTLNFDLLKLAGDVESNPGPSRGHMTEYKPTVRLATRDDVPRAVRTLAAAFADYPATRHTVDPDRHIERVTELQELFLTRVGLDIGKVWVADDGAAVAVWTTPESVEAGAVFAEIGPRMAELSGSRLAAQQQMEGLLAPHRPKEPAWFLATVGVSPDHQGKGLGSAVVLPGVEAAERAGVPAFLETSAPRNLPFYERLGFTVTADVEVPEGPRTWCMTRKPGA

SEQ ID NO: 19724 - protein, 1144 aa, synthetic construct
MALPVTALLLPLALLLHAARPLEGQPKANPTVTLFPPSSEELQANKATLVCLISDFYPGAVTVAWKADGSPVKAGVETTKPSKQSNNKYAASSYLSLTPEQWKSHRSYSCQVTHEGSTVEKTVAPTECSGRADCGFTSESYQQGVLSATILYEILLGKATLYAVLVSALVLMAMVKRKDSRGRAKRSGSGATNFSLLKQAGDVEENPGPTSMALPVTALLLPLALLLHAARPGVTQSPTHLIKTRGQQATLRCSPISGHTSVYWYQQALGLGLQFLLWYDEGEERNRGNFPPRFSGRQFPNYSSELNVNALELEDSALYLCASSLGGPRGLAGLRGDEQFFGPGTRLTVLEGGGSGGGSQVQLVESGGGLVQAGDSVTLSCTASGRTFSSYALAWFRQRPGKEREFVAGLRWGGPTNYADSVKDRFTISGDSAKHTMYLQMNSLKPEDTAVYYCGYNPGGWAVPSQYEYDSWGQGTQVTVSSGTGGGGSGGGGSGGGGSEFDIQMTQSPSSLSASVGDRVTITCKASDHINNWLAWYQQKPGQAPKLLIYGATTLETGVPSRFSGSGSGTDYTLTISSLQPEDFATYYCQQSWNTPWTFGQGTKLEIKRGGGGSGGGGSGGGGSQVQLQQPGAELVKPGASVKMSCKASGYAFSSYWINWMKQKPGQGLEWIGQIYPGDGDTNYNGKFKGRATLTADTSSSTAYMQLSSLTSEDSAVYFCARSITTVVGCAMDYWGQGTSVTVSSTREASTKGPSVFPLAPSSKSTSGGTAALGCLVKDYFPEPVTVSWNSGALTSGVHTFPAVLQSSGLYSLSSVVTVPSSSLGTQTYICNVNHKPSNTKVDKRVEPKSCIPEDTFFPSPESSCDVKLVEKSFETDTNLNFQNLSVIGFRILLLKVAGFNLLMTLRLWSSRAKRSGSGVKQTLNFDLLKLAGDVESNPGPSRGHMTEYKPTVRLATRDDVPRAVRTLAAAFADYPATRHTVDPDRHIERVTELQELFLTRVGLDIGKVWVADDGAAVAVWTTPESVEAGAVFAEIGPRMAELSGSRLAAQQQMEGLLAPHRPKEPAWFLATVGVSPDHQGKGLGSAVVLPGVEAAERAGVPAFLETSAPRNLPFYERLGFTVTADVEVPEGPRTWCMTRKPGA

SEQ ID NO: 19725 - protein, 905 aa, synthetic construct
MALPVTALLLPLALLLHAARPLEGQPKANPTVTLFPPSSEELQANKATLVCLISDFYPGAVTVAWKADGSPVKAGVETTKPSKQSNNKYAASSYLSLTPEQWKSHRSYSCQVTHEGSTVEKTVAPTECSGRADCGFTSESYQQGVLSATILYEILLGKATLYAVLVSALVLMAMVKRKDSRGRAKRSGSGATNFSLLKQAGDVEENPGPTSMALPVTALLLPLALLLHAARPGVTQSPTHLIKTRGQQATLRCSPISGHTSVYWYQQALGLGLQFLLWYDEGEERNRGNFPPRFSGRQFPNYSSELNVNALELEDSALYLCASSLGGPRGLAGLRGDEQFFGPGTRLTVLEGGGSGGGSGVTQSPTHLIKTRGQQATLRCSPISGHTSVYWYQQALGLGLQFLLWYDEGEERNRGNFPPRFSGRQFPNYSSELNVNALELEDSALYLCASSLGGDELGADGNEQFFGPGTRLTVLEGTGGGGSGGGGSGGGGSEFDIQMTQSPSSLSASVGDRVTITCKASDHINNWLAWYQQKPGQAPKLLIYGATTLETGVPSRFSGSGSGTDYTLTISSLQPEDFATYYCQQSWNTPWTFGQGTKLEIKRGGGGSGGGGSGGGGSQVQLQQPGAELVKPGASVKMSCKASGYAFSSYWINWMKQKPGQGLEWIGQIYPGDGDTNYNGKFKGRATLTADTSSSTAYMQLSSLTSEDSAVYFCARSITTVVGCAMDYWGQGTSVTVSSTREASTKGPSVFPLAPSSKSTSGGTAALGCLVKDYFPEPVTVSWNSGALTSGVHTFPAVLQSSGLYSLSSVVTVPSSSLGTQTYICNVNHKPSNTKVDKRVEPKSCIPEDTFFPSPESSCDVKLVEKSFETDTNLNFQNLSVIGFRILLLKVAGFNLLMTLRLWSS

SEQ ID NO: 19726 - protein, 758 aa, synthetic construct
MALPVTALLLPLALLLHAARPLEGQPKANPTVTLFPPSSEELQANKATLVCLISDFYPGAVTVAWKADGSPVKAGVETTKPSKQSNNKYAASSYLSLTPEQWKSHRSYSCQVTHEGSTVEKTVAPTECSGRADCGFTSESYQQGVLSATILYEILLGKATLYAVLVSALVLMAMVKRKDSRGRAKRSGSGATNFSLLKQAGDVEENPGPTSMALPVTALLLPLALLLHAARPDEFGSDLGIKLLFAAAKGQDDEVRILLAAGADVNAKDFEGYTPLHVAAYDGHLEIVEVLLKAGADVNAKDSQGRTPLHEAAYSGHLEIVEVLLKAGADVNAQDDAGETPADLAAAWGHEDIAEVLQKTREASTKGPSVFPLAPSSKSTSGGTAALGCLVKDYFPEPVTVSWNSGALTSGVHTFPAVLQSSGLYSLSSVVTVPSSSLGTQTYICNVNHKPSNTKVDKRVEPKSCIPEDTFFPSPESSCDVKLVEKSFETDTNLNFQNLSVIGFRILLLKVAGFNLLMTLRLWSSRAKRSGSGVKQTLNFDLLKLAGDVESNPGPSRGHMTEYKPTVRLATRDDVPRAVRTLAAAFADYPATRHTVDPDRHIERVTELQELFLTRVGLDIGKVWVADDGAAVAVWTTPESVEAGAVFAEIGPRMAELSGSRLAAQQQMEGLLAPHRPKEPAWFLATVGVSPDHQGKGLGSAVVLPGVEAAERAGVPAFLETSAPRNLPFYERLGFTVTADVEVPEGPRTWCMTRKPGA

SEQ ID NO: 19727 - protein, 687 aa, synthetic construct
MALPVTALLLPLALLLHAARPLEGQPKANPTVTLFPPSSEELQANKATLVCLISDFYPGAVTVAWKADGSPVKAGVETTKPSKQSNNKYAASSYLSLTPEQWKSHRSYSCQVTHEGSTVEKTVAPTECSGRADCGFTSESYQQGVLSATILYEILLGKATLYAVLVSALVLMAMVKRKDSRGRAKRSGSGATNFSLLKQAGDVEENPGPTSMDWIWRILFLVGAATGAHSFEGSGFEYAKEMRNAYWEIALLPNLTNQQKRAPIRKLYDDPSQSSELLSEAKKLNDSQTREASTKGPSVFPLAPSSKSTSGGTAALGCLVKDYFPEPVTVSWNSGALTSGVHTFPAVLQSSGLYSLSSVVTVPSSSLGTQTYICNVNHKPSNTKVDKRVEPKSCIPEDTFFPSPESSCDVKLVEKSFETDTNLNFQNLSVIGFRILLLKVAGFNLLMTLRLWSSRAKRSGSGVKQTLNFDLLKLAGDVESNPGPSRGHMTEYKPTVRLATRDDVPRAVRTLAAAFADYPATRHTVDPDRHIERVTELQELFLTRVGLDIGKVWVADDGAAVAVWTTPESVEAGAVFAEIGPRMAELSGSRLAAQQQMEGLLAPHRPKEPAWFLATVGVSPDHQGKGLGSAVVLPGVEAAERAGVPAFLETSAPRNLPFYERLGFTVTADVEVPEGPRTWCMTRKPGA

SEQ ID NO: 19728 - protein, 909 aa, synthetic construct
MALPVTALLLPLALLLHAARPLEGQPKANPTVTLFPPSSEELQANKATLVCLISDFYPGAVTVAWKADGSPVKAGVETTKPSKQSNNKYAASSYLSLTPEQWKSHRSYSCQVTHEGSTVEKTVAPTECSGRADCGFTSESYQQGVLSATILYEILLGKATLYAVLVSALVLMAMVKRKDSRGRAKRSGSGATNFSLLKQAGDVEENPGPTSMALPVTALLLPLALLLHAARPDEFEVQLVESGGGLVQAGGSLRLSCAASGITFSINTMGWYRQAPGKQRELVALISSIGDTYYADSVKGRFTISRDNAKNTVYLQMNSLKPEDTAVYYCKRFRTAAQGTDYWGQGTQVTVSSLEGGGGSGGGGSGGGGSGSGGSGSGGSGSGGSGSGGSFEVQLVESGGGLVQPGGSLRLSCAASGSIFGFNDMAWYRQAPGKQRELVALISRVGVTSSADSVKGRFTISRVNAKDTVYLQMNSLKPEDTAVYYCYMDQRLDGSTLAYWGQGTQVTVSSTREASTKGPSVFPLAPSSKSTSGGTAALGCLVKDYFPEPVTVSWNSGALTSGVHTFPAVLQSSGLYSLSSVVTVPSSSLGTQTYICNVNHKPSNTKVDKRVEPKSCIPEDTFFPSPESSCDVKLVEKSFETDTNLNFQNLSVIGFRILLLKVAGFNLLMTLRLWSSRAKRSGSGVKQTLNFDLLKLAGDVESNPGPSRGHMTEYKPTVRLATRDDVPRAVRTLAAAFADYPATRHTVDPDRHIERVTELQELFLTRVGLDIGKVWVADDGAAVAVWTTPESVEAGAVFAEIGPRMAELSGSRLAAQQQMEGLLAPHRPKEPAWFLATVGVSPDHQGKGLGSAVVLPGVEAAERAGVPAFLETSAPRNLPFYERLGFTVTADVEVPEGPRTWCMTRKPGA

SEQ ID NO: 19729 - protein, 823 aa, synthetic construct
MALPVTALLLPLALLLHAARPLEGQPKANPTVTLFPPSSEELQANKATLVCLISDFYPGAVTVAWKADGSPVKAGVETTKPSKQSNNKYAASSYLSLTPEQWKSHRSYSCQVTHEGSTVEKTVAPTECSGRADCGFTSESYQQGVLSATILYEILLGKATLYAVLVSALVLMAMVKRKDSRGRAKRSGSGATNFSLLKQAGDVEENPGPTSMALPVTALLLPLALLLHAARPGMRTEDLPKAVVFLEPQWYRVLEKDSVTLKCQGAYSPEDNSTQWFHNESLISSQASSYFIDAATVDDSGEYRCQTNLSTLSDPVQLEVHIGWLLLQAPRWVFKEEDPIHLRCHSWKNTALHKVTYLQNGKGRKYFHHNSDFYIPKATLKDSGSYFCRGLVGSKNVSSETVNITITQGLAVSTISSFFPPGYQTREASTKGPSVFPLAPSSKSTSGGTAALGCLVKDYFPEPVTVSWNSGALTSGVHTFPAVLQSSGLYSLSSVVTVPSSSLGTQTYICNVNHKPSNTKVDKRVEPKSCIPEDTFFPSPESSCDVKLVEKSFETDTNLNFQNLSVIGFRILLLKVAGFNLLMTLRLWSSRAKRSGSGVKQTLNFDLLKLAGDVESNPGPSRGHMTEYKPTVRLATRDDVPRAVRTLAAAFADYPATRHTVDPDRHIERVTELQELFLTRVGLDIGKVWVADDGAAVAVWTTPESVEAGAVFAEIGPRMAELSGSRLAAQQQMEGLLAPHRPKEPAWFLATVGVSPDHQGKGLGSAVVLPGVEAAERAGVPAFLETSAPRNLPFYERLGFTVTADVEVPEGPRTWCMTRKPGA

SEQ ID NO: 19730 - protein, 451 aa, synthetic construct
MALPVTALLLPLALLLHAARPLEGQPKANPTVTLFPPSSEELQANKATLVCLISDFYPGAVTVAWKADGSPVKAGVETTKPSKQSNNKYAASSYLSLTPEQWKSHRSYSCQVTHEGSTVEKTVAPTECSGRADCGFTSESYQQGVLSATILYEILLGKATLYAVLVSALVLMAMVKRKDSRGRAKRSGSGATNFSLLKQAGDVEENPGPTSATMALPVTALLLPLALLLHAARPMDPDLEIRAAFLRQRNTALRTEVAELEQEVQRLENEVSQYETRYGPLGGGKTREASTKGPSVFPLAPSSKSTSGGTAALGCLVKDYFPEPVTVSWNSGALTSGVHTFPAVLQSSGLYSLSSVVTVPSSSLGTQTYICNVNHKPSNTKVDKRVEPKSCIPEDTFFPSPESSCDVKLVEKSFETDTNLNFQNLSVIGFRILLLKVAGFNLLMTLRLWSS

SEQ ID NO: 19731 - protein, 451 aa, synthetic construct
MALPVTALLLPLALLLHAARPLEGQPKANPTVTLFPPSSEELQANKATLVCLISDFYPGAVTVAWKADGSPVKAGVETTKPSKQSNNKYAASSYLSLTPEQWKSHRSYSCQVTHEGSTVEKTVAPTECSGRADCGFTSESYQQGVLSATILYEILLGKATLYAVLVSALVLMAMVKRKDSRGRAKRSGSGATNFSLLKQAGDVEENPGPTSATMALPVTALLLPLALLLHAARPMDPDLEIEAAFLERENTALETRVAELRQRVQRLRNRVSQYRTRYGPLGGGKTREASTKGPSVFPLAPSSKSTSGGTAALGCLVKDYFPEPVTVSWNSGALTSGVHTFPAVLQSSGLYSLSSVVTVPSSSLGTQTYICNVNHKPSNTKVDKRVEPKSCIPEDTFFPSPESSCDVKLVEKSFETDTNLNFQNLSVIGFRILLLKVAGFNLLMTLRLWSS

SEQ ID NO: 19732 - protein, 686 aa, synthetic construct
MALPVTALLLPLALLLHAARPLEGQPKANPTVTLFPPSSEELQANKATLVCLISDFYPGAVTVAWKADGSPVKAGVETTKPSKQSNNKYAASSYLSLTPEQWKSHRSYSCQVTHEGSTVEKTVAPTECSGRADCGFTSESYQQGVLSATILYEILLGKATLYAVLVSALVLMAMVKRKDSRGRAKRSGSGATNFSLLKQAGDVEENPGPTSATMALPVTALLLPLALLLHAARPLFNQEVQIPLTESYCGPCPKNWICYKNNCYQFFDESKNWYESQASCMSQNASLLKVYSKEDQDLLKLVKSAHWMGLVHIPTNGSWQWEDGSILSPNLLTIIEMQKGDCALYASSFKGYIENCSTPNTYICMQRTVSGGGGSGGGGSGGGGDLFNQEVQIPLTESYCGPCPKNWICYKNNCYQFFDESKNWYESQASCMSQNASLLKVYSKEDQDLLKLVKSAHWMGLVHIPTNGSWQWEDGSILSPNLLTIIEMQKGDCALYASSFKGYIENCSTPNTYICMQRTVTREASTKGPSVFPLAPSSKSTSGGTAALGCLVKDYFPEPVTVSWNSGALTSGVHTFPAVLQSSGLYSLSSVVTVPSSSLGTQTYICNVNHKPSNTKVDKRVEPKSCIPEDTFFPSPESSCDVKLVEKSFETDTNLNFQNLSVIGFRILLLKVAGFNLLMTLRLWSS

SEQ ID NO: 19733 - protein, 686 aa, synthetic construct
MALPVTALLLPLALLLHAARPLEGQPKANPTVTLFPPSSEELQANKATLVCLISDFYPGAVTVAWKADGSPVKAGVETTKPSKQSNNKYAASSYLSLTPEQWKSHRSYSCQVTHEGSTVEKTVAPTECSGRADCGFTSESYQQGVLSATILYEILLGKATLYAVLVSALVLMAMVKRKDSRGRAKRSGSGATNFSLLKQAGDVEENPGPTSATMALPVTALLLPLALLLHAARPLFNQEVQIPLTESYCGPCPKNWICYKNNCYQFFDESKNWYESQASCMSQNASLLKVYSKEDQDLLKLVKSAHWMGLVHIPTNGSWQWEDGSILSPNLLTIIEMQKGDCALYASSFKGFIENCSTPNTYICMQRTVGGGGSGGGGSGGGGSDLFNQEVQIPLTESYCGPCPKNWICYKNNCYQFFDESKNWYESQASCMSQNASLLKVYSKEDQDLLKLVKSAHWMGLVHIPTNGSWQWEDGSILSPNLLTIIEMQKGDCALYASSFKGFIENCSTPNTYICMQRTVTREASTKGPSVFPLAPSSKSTSGGTAALGCLVKDYFPEPVTVSWNSGALTSGVHTFPAVLQSSGLYSLSSVVTVPSSSLGTQTYICNVNHKPSNTKVDKRVEPKSCIPEDTFFPSPESSCDVKLVEKSFETDTNLNFQNLSVIGFRILLLKVAGFNLLMTLRLWSS

SEQ ID NO: 19734 - protein, 712 aa, synthetic construct
MALPVTALLLPLALLLHAARPLEGQPKANPTVTLFPPSSEELQANKATLVCLISDFYPGAVTVAWKADGSPVKAGVETTKPSKQSNNKYAASSYLSLTPEQWKSHRSYSCQVTHEGSTVEKTVAPTECSGRADCGFTSESYQQGVLSATILYEILLGKATLYAVLVSALVLMAMVKRKDSRGRAKRSGSGATNFSLLKQAGDVEENPGPTSMALPVTALLLPLALLLHAARPMDPDLEIRAAFLRQRNTALRTEVAELEQEVQRLENEVSQYETRYGPLGGGKGTGGGGSGGGGSGGGGSEFDIQMTQSPSSLSASVGDRVTITCKASDHINNWLAWYQQKPGQAPKLLIYGATTLETGVPSRFSGSGSGTDYTLTISSLQPEDFATYYCQQSWNTPWTFGQGTKLEIKRGGGGSGGGGSGGGGSQVQLQQPGAELVKPGASVKMSCKASGYAFSSYWINWMKQKPGQGLEWIGQIYPGDGDTNYNGKFKGRATLTADTSSSTAYMQLSSLTSEDSAVYFCARSITTVVGCAMDYWGQGTSVTVSSTREASTKGPSVFPLAPSSKSTSGGTAALGCLVKDYFPEPVTVSWNSGALTSGVHTFPAVLQSSGLYSLSSVVTVPSSSLGTQTYICNVNHKPSNTKVDKRVEPKSCIPEDTFFPSPESSCDVKLVEKSFETDTNLNFQNLSVIGFRILLLKVAGFNLLMTLRLWSS

SEQ ID NO: 19735 - protein, 947 aa, synthetic construct
MALPVTALLLPLALLLHAARPLEGQPKANPTVTLFPPSSEELQANKATLVCLISDFYPGAVTVAWKADGSPVKAGVETTKPSKQSNNKYAASSYLSLTPEQWKSHRSYSCQVTHEGSTVEKTVAPTECSGRADCGFTSESYQQGVLSATILYEILLGKATLYAVLVSALVLMAMVKRKDSRGRAKRSGSGATNFSLLKQAGDVEENPGPTSMALPVTALLLPLALLLHAARPLFNQEVQIPLTESYCGPCPKNWICYKNNCYQFFDESKNWYESQASCMSQNASLLKVYSKEDQDLLKLVKSAHWMGLVHIPTNGSWQWEDGSILSPNLLTIIEMQKGDCALYASSFKGFIENCSTPNTYICMQRTVGGGGSGGGGSGGGGSDLFNQEVQIPLTESYCGPCPKNWICYKNNCYQFFDESKNWYESQASCMSQNASLLKVYSKEDQDLLKLVKSAHWMGLVHIPTNGSWQWEDGSILSPNLLTIIEMQKGDCALYASSFKGFIENCSTPNTYICMQRTVGTGGGGSGGGGSGGGGSEFDIQMTQSPSSLSASVGDRVTITCKASDHINNWLAWYQQKPGQAPKLLIYGATTLETGVPSRFSGSGSGTDYTLTISSLQPEDFATYYCQQSWNTPWTFGQGTKLEIKRGGGGSGGGGSGGGGSQVQLQQPGAELVKPGASVKMSCKASGYAFSSYWINWMKQKPGQGLEWIGQIYPGDGDTNYNGKFKGRATLTADTSSSTAYMQLSSLTSEDSAVYFCARSITTVVGCAMDYWGQGTSVTVSSTREASTKGPSVFPLAPSSKSTSGGTAALGCLVKDYFPEPVTVSWNSGALTSGVHTFPAVLQSSGLYSLSSVVTVPSSSLGTQTYICNVNHKPSNTKVDKRVEPKSCIPEDTFFPSPESSCDVKLVEKSFETDTNLNFQNLSVIGFRILLLKVAGFNLLMTLRLWSS

SEQ ID NO: 19736 - protein, 652 aa, synthetic construct
MALPVTALLLPLALLLHAARPLEGQPKANPTVTLFPPSSEELQANKATLVCLISDFYPGAVTVAWKADGSPVKAGVETTKPSKQSNNKYAASSYLSLTPEQWKSHRSYSCQVTHEGSTVEKTVAPTECSGRADCGFTSESYQQGVLSATILYEILLGKATLYAVLVSALVLMAMVKRKDSRGRAKRSGSGATNFSLLKQAGDVEENPGPTSMALPVTALLLPLALLLHAARPQSVLTQPPSVSGAPGQRVTISCTGSSSNIGAGYDVHWYQQLPGTAPKLLIFGNSNRPSGVPDRFSGFKSGTSASLAITGLQAEDEADYFCQSYDSSLSGSGVFGTGTKVTVLGGGGGSGGGGSGGGGSQMQLVQSGGGLVQPGRSLRLSCAASGFTFDDYAMHWVRQAPGKGLEWVSGISWNSGSIGYADSVKGRFTISRDNAKNSLYLQMNSLRAEDTALYYCAKDIHSGSYYGLLYYAMDVWGQGTTVTVSSTREASTKGPSVFPLAPSSKSTSGGTAALGCLVKDYFPEPVTVSWNSGALTSGVHTFPAVLQSSGLYSLSSVVTVPSSSLGTQTYICNVNHKPSNTKVDKRVEPKSCIPEDTFFPSPESSCDVKLVEKSFETDTNLNFQNLSVIGFRILLLKVAGFNLLMTLRLWSS

SEQ ID NO: 19737 - protein, 489 aa, synthetic construct
MALPVTALLLPLALLLHAARPLEGQPKANPTVTLFPPSSEELQANKATLVCLISDFYPGAVTVAWKADGSPVKAGVETTKPSKQSNNKYAASSYLSLTPEQWKSHRSYSCQVTHEGSTVEKTVAPTECSGRADCGFTSESYQQGVLSATILYEILLGKATLYAVLVSALVLMAMVKRKDSRGRAKRSGSGATNFSLLKQAGDVEENPGPTSMALPVTALLLPLALLLHAARPMCMPCFTTDHQMARKCDDCCGGKGRGKCYGPQCLCRLEGGGGSGGGGSGGGGSFEVCMPCFTTDQQMARKCSDCCGGKGRGKCYGPQCLCRTREASTKGPSVFPLAPSSKSTSGGTAALGCLVKDYFPEPVTVSWNSGALTSGVHTFPAVLQSSGLYSLSSVVTVPSSSLGTQTYICNVNHKPSNTKVDKRVEPKSCIPEDTFFPSPESSCDVKLVEKSFETDTNLNFQNLSVIGFRILLLKVAGFNLLMTLRLWSS

SEQ ID NO: 19738 - protein, 699 aa, synthetic construct
MALPVTALLLPLALLLHAARPLEGQPKANPTVTLFPPSSEELQANKATLVCLISDFYPGAVTVAWKADGSPVKAGVETTKPSKQSNNKYAASSYLSLTPEQWKSHRSYSCQVTHEGSTVEKTVAPTECSGRADCGFTSESYQQGVLSATILYEILLGKATLYAVLVSALVLMAMVKRKDSRGRAKRSGSGATNFSLLKQAGDVEENPGPTSMALPVTALLLPLALLLHAARPFEVCMPCFTTDQQMARKCSDCCGGKGRGKCYGPQCLCRGTGGGGSGGGGSGGGGSEFDIQMTQSPSSLSASVGDRVTITCKASDHINNWLAWYQQKPGQAPKLLIYGATTLETGVPSRFSGSGSGTDYTLTISSLQPEDFATYYCQQSWNTPWTFGQGTKLEIKRGGGGSGGGGSGGGGSQVQLQQPGAELVKPGASVKMSCKASGYAFSSYWINWMKQKPGQGLEWIGQIYPGDGDTNYNGKFKGRATLTADTSSSTAYMQLSSLTSEDSAVYFCARSITTVVGCAMDYWGQGTSVTVSSTREASTKGPSVFPLAPSSKSTSGGTAALGCLVKDYFPEPVTVSWNSGALTSGVHTFPAVLQSSGLYSLSSVVTVPSSSLGTQTYICNVNHKPSNTKVDKRVEPKSCIPEDTFFPSPESSCDVKLVEKSFETDTNLNFQNLSVIGFRILLLKVAGFNLLMTLRLWSS

SEQ ID NO: 19739 - protein, 829 aa, synthetic construct
MALPVTALLLPLALLLHAARPLEGQPKANPTVTLFPPSSEELQANKATLVCLISDFYPGAVTVAWKADGSPVKAGVETTKPSKQSNNKYAASSYLSLTPEQWKSHRSYSCQVTHEGSTVEKTVAPTECSGRADCGFTSESYQQGVLSATILYEILLGKATLYAVLVSALVLMAMVKRKDSRGRAKRSGSGATNFSLLKQAGDVEENPGPTSMALPVTALLLPLALLLHAARPFESPVAPACDPRLLNKLLRDSHLLHSRLSQCPDVDPLSIPVLLPAVDFSLGEWKTQTEQSKAQDILGAVSLLLEGVMAARGQLEPSCLSSLLGQLSGQVRLLLGALQGLLGTQLPLQGRTTAHKDPNALFLSLQQLLRGKVRFLLLVEGPTLCVRRTLPTTAVPSSTSGTGGGGSGGGGSGGGGSEFDIQMTQSPSSLSASVGDRVTITCKASDHINNWLAWYQQKPGQAPKLLIYGATTLETGVPSRFSGSGSGTDYTLTISSLQPEDFATYYCQQSWNTPWTFGQGTKLEIKRGGGGSGGGGSGGGGSQVQLQQPGAELVKPGASVKMSCKASGYAFSSYWINWMKQKPGQGLEWIGQIYPGDGDTNYNGKFKGRATLTADTSSSTAYMQLSSLTSEDSAVYFCARSITTVVGCAMDYWGQGTSVTVSSTREASTKGPSVFPLAPSSKSTSGGTAALGCLVKDYFPEPVTVSWNSGALTSGVHTFPAVLQSSGLYSLSSVVTVPSSSLGTQTYICNVNHKPSNTKVDKRVEPKSCIPEDTFFPSPESSCDVKLVEKSFETDTNLNFQNLSVIGFRILLLKVAGFNLLMTLRLWSS

SEQ ID NO: 19740 - protein, 736 aa, synthetic construct
MALPVTALLLPLALLLHAARPLEGQPKANPTVTLFPPSSEELQANKATLVCLISDFYPGAVTVAWKADGSPVKAGVETTKPSKQSNNKYAASSYLSLTPEQWKSHRSYSCQVTHEGSTVEKTVAPTECSGRADCGFTSESYQQGVLSATILYEILLGKATLYAVLVSALVLMAMVKRKDSRGRAKRSGSGATNFSLLKQAGDVEENPGPTSMALPVTALLLPLALLLHAARPFEMGSWEEFELRLNAIEERLYALGGSEAELAYFEYVIADFEGNLQRYKGKGNPEVEALYFEADAIFEELVAYRHNGTGGGGSGGGGSGGGGSEFDIQMTQSPSSLSASVGDRVTITCKASDHINNWLAWYQQKPGQAPKLLIYGATTLETGVPSRFSGSGSGTDYTLTISSLQPEDFATYYCQQSWNTPWTFGQGTKLEIKRGGGGSGGGGSGGGGSQVQLQQPGAELVKPGASVKMSCKASGYAFSSYWINWMKQKPGQGLEWIGQIYPGDGDTNYNGKFKGRATLTADTSSSTAYMQLSSLTSEDSAVYFCARSITTVVGCAMDYWGQGTSVTVSSTREASTKGPSVFPLAPSSKSTSGGTAALGCLVKDYFPEPVTVSWNSGALTSGVHTFPAVLQSSGLYSLSSVVTVPSSSLGTQTYICNVNHKPSNTKVDKRVEPKSCIPEDTFFPSPESSCDVKLVEKSFETDTNLNFQNLSVIGFRILLLKVAGFNLLMTLRLWSS

SEQ ID NO: 19741 - protein, 15 aa, synthetic construct
GGGGGGGGGGGGGGG

SEQ ID NO: 19742 - protein, 15 aa, synthetic construct
GGGGGGGGGGGGGGG

SEQ ID NO: 19743 - protein, 5 aa, synthetic construct
SDGGG

SEQ ID NO: 19744 - protein, 7 aa, synthetic construct
LDLLTAE

SEQ ID NO: 19745 - protein, 11 aa, synthetic construct
SLAEVVLQNRR

SEQ ID NO: 19746 - protein, 11 aa, synthetic construct
SLAAVVLQNRR

SEQ ID NO: 19747 - protein, 19 aa, synthetic construct
SLAEVVLQNRRGLDLLTAE

SEQ ID NO: 19748 - protein, 19 aa, synthetic construct
SLAAVVLQNRRALDLLTAE

SEQ ID NO: 19749 - protein, 23 aa, synthetic construct
QEQIDSLAAVVLQNRRGLDMLTA

SEQ ID NO: 19750 - protein, 18 aa, synthetic construct
SLAAVVLQNRRGLDMLTA

SEQ ID NO: 19751 - DNA, 282 bp, synthetic construct; identical to SEQ ID NO: 606
  source 1..282: mol_type = other DNA

SEQ ID NO: 19752 - DNA, 282 bp, synthetic construct
  source 1..282: mol_type = other DNA
atccagaaccctgatcctgccgtgtaccagctgcgggatagcaagagcagcgacaagagcgtgtgtctgttcaccgacttcgacagccagaccaacgtgtcccagagcaaggactccgacgtgtacatcaccgataagtgcgtgctggacatgcggagcatggacttcaagagcaactccgccgtggcctggtccaacaagtccgatttcgcctgcgccaacgccttcaacaacagcattatccccgaggacacattcttcccaagcagcgacgtgccctgc

SEQ ID NO: 19753 - DNA, 282 bp, synthetic construct
  source 1..282: mol_type = other DNA
atccagaaccctgatcctgccgtgtaccagctgcgggatagcaagagcagcgacaagagcgtgtgtctgttcaccgacttcgacagccagaccaacgtgtcccagagcaaggactccgacgtgtacatcaccgataagtgcgtgctggacatgcggagcatggacttcaagagcaactccgccgtggcctggtccaacaagtccgatttcgcctgcgccaacgccttcaacaacagcattatccccgaggacacattcttcccaagccccgagagcagctgc

SEQ ID NO: 19754 - DNA, 396 bp, synthetic construct
  source 1..396: mol_type = other DNA
gaggacctgaagaacgtgttcccacctgaggtggccgtgttcgagcctagcgaggccgagatcagccacacccagaaagccaccctcgtgtgcctggctaccggcttctaccccgaccatgtggaactgtcttggtgggtcaacggcaaagaggtgcacagcggcgtgtctaccgacccccagccactgaaagaacagcccgccctgaacgacagccggtactgcctgagcagcagactgagagtgtccgccaccttctggcagaacccccggaaccacttcagatgccaggtgcagttctacggcctgagcgagaacgacgagtggacccaggacagagccaagcccgtgacccagatcgtgtctgccgaagcctggggcagagccgattgcgga

SEQ ID NO: 19755 - DNA, 393 bp, synthetic construct
  source 1..393: mol_type = other DNA
gaggacctgaagaacgtgttcccacctgaggtggccgtgttcgagcctagcaaggccgagatcgcccacacccagaaagccaccctcgtgtgcctggctaccggcttctaccccgaccatgtggaactgtcttggtgggtcaacggcaaagaggtgcacagcggcgtgtgtaccgacccccagccactgaaagaacagcccgccctgaacgacagccggtactgcctgagcagcagactgagagtgtccgccaccttctggcagaacccccggaaccacttcagatgccaggtgcagttctacggcctgagcgagaacgacgagtggacccaggacagagccaagcccgtgacccagatcgtgtctgccgaagcctggggcagagccgattgc

SEQ ID NO: 19756 - DNA, 393 bp, synthetic construct
  source 1..393: mol_type = other DNA
gaggacctgaagaacgtgttcccacctgaggtggccgtgttcgagcctagcgaggccgagatcagccacacccagaaagccaccctcgtgtgcctggctaccggcttctaccccgaccatgtggaactgtcttggtgggtcaacggcaaagaggtgcacagcggcgtgtgtaccgacccccagccactgaaagaacagcccgccctgaacgacagccggtactgcctgagcagcagactgagagtgtccgccaccttctggcagaacccccggaaccacttcagatgccaggtgcagttctacggcctgagcgagaacgacgagtggacccaggacagagccaagcccgtgacccagatcgtgtctgccgaagcctggggcagagccgattgc

SEQ ID NO: 19757 - DNA, 31 bp, synthetic construct; identical to SEQ ID NO: 304
  source 1..31: mol_type = other DNA

SEQ ID NO: 19758 - DNA, 420 bp, synthetic construct
  source 1..420: mol_type = other DNA
atccagaaccctgatcctgccgtgtaccagctgcgggatagcaagagcagcgacaagttcgtgtgtctgttcaccgacttcgacagccagatcaacgtgtcccagagcaaggactccgacgtgtacatcaccgataagtgcgtgctggacatgcggagcatggacttcaagagcaactccgccgtggcctggtccaacaagtccgatttcacctgcgccaacgccttcaacaacagcattatccccgaggacacattcttcccaagccccgagagcagctgcgacgtgaagctggtggaaaagagcttcgagacagacaccaacctgaacttccagaacctgagcgtgatcggcttcagaatcctgctgctgaaagtggccggctttaacctgctgatgaccctgcggctgtggtccagc

SEQ ID NO: 19759 - DNA, 537 bp, synthetic construct
  source 1..537: mol_type = other DNA
gaggacctgaagaacgtgttcccacctgaggtggccgtgttcgagcctagcaaggccgagatcagcagaacccagaaagccaccctcgtgtgcctggctaccggcttctaccctcctcatgtggaactgtcttggtgggtcaacggcaaagaggtgcacgacggcgtgtgtaccgacccccagccactgaaagaacagcccgccctgaacgacagccggtactgcctgagcagcagactgagagtgtccgccaccttctggcagaacccccggaaccacttcagatgccaggtgcagttctacggcctgagcgagaacgacgagtggacccaggacagagccaagcccgtgacccagatcgtgtctgccgaagcctggggcagagccgattgcggctttaccagcgagagctaccagcagggcgtgctgagcgccaccatcctgtacgagatcctgctgggcaaggccaccctgtacgccgtgctggtgtctgccctggtgctgatggctatggtcaagcggaaggacagccgggga

SEQ ID NO: 19760 - DNA, 1863 bp, synthetic construct
  source 1..1863: mol_type = other DNA
atggccttaccagtgaccgccttgctcctgccgctggccttgctgctccacgccgccaggccgaatgctggcgtgacccagacacctaagttccaggtgctgaaaaccggccagagcatgaccctgcaatgcgcccaggacatgaaccatgagtacatgagctggtacagacaggaccccggcatgggcctgagactgatccactactctgtggctatccagaccaccgaccagggcgaagtgcccaatggctacaacgtgtccagaagcaccatcgaggacttcccactgagactgctgtctgccgctcctagccagaccagcgtgtacttttgtgccagcagctacctgggcaacaccggcgagctgttttttggcgagggcagcagactgaccgtgctcgagggacagcctaaggccaatcctaccgtgacactgttccctccaagcagcgaagaactccaggccaacaaggccacacttgtgtgcctgatctccgacttctaccctggggctgtgacagtggcttggaaggccgatggatctcctgtgaaagccggcgtggaaaccaccaagccatccaagcagagcaacaacaaatacgccgccagctcctacctgagcctgacacctgagcagtggaagtcccacagatcctacagctgccaagtgacccacgaaggcagcaccgtggaaaagacagtggcccctacagagtgcagcggcagagccgattgcggctttaccagcgagagctaccagcagggcgtgctgagcgccaccatcctgtacgagatcctgctgggcaaggccaccctgtacgccgtgctggtgtctgccctggtgctgatggctatggtcaagcggaaggacagccggggaagggccaagcgatctggatctggagcaacaaacttctcactactcaaacaagcaggtgacgtggaggagaatcccgggcctactagtatggactggatttggcgcatccttttccttgtcggcgctgctaccggcgcgcattccttcgaacaagaagtgacacagatccctgccgctctgtctgtgcctgagggcgaaaacctggtgctgaactgctccttcaccgacagcgccatctacaacctccagtggttcaggcaggaccctggaaagggactgacaagcctgctgctgatccagagcagccagagagagcagacctccggcagactgaatgccagcctggataagagcagcggcaggtctaccctgtatatcgccgcttctcagcctggcgatagcgccacatatctgtgtgctgtgcggcctacaagcggcggcagctacatccctacatttggcagaggcaccagcctgatcgtgcacccttatgcctctacaaagggaccctccgtgtttcctctggctcccagcagcaagtctacaagcggaggaacagccgctctgggctgcctggtcaaggattactttcccgagcctgtgaccgtgtcctggaatagcggagcactgacaagcggcgtgcacacctttccagccgtgctgcaaagcagcggcctgtactctctgagcagcgtggtcacagtgcctagctctagcctgggcacccagacctacatctgcaatgtgaaccacaagcctagcaacaccaaggtggacaagagagtggaacccaagagctgtatccccgaggacacattcttcccaagccccgagagcagctgcgacgtgaagctggtggaaaagagcttcgagacagacaccaacctgaacttccagaacctgagcgtgatcggcttcagaatcctgctgctgaaagtggccggctttaacctgctgatgaccctgcggctgtggtccagc

SEQ ID NO: 19761 - DNA, 1929 bp, synthetic construct
  source 1..1929: mol_type = other DNA
atggccttaccagtgaccgccttgctcctgccgctggccttgctgctccacgccgccaggccgaatgctggcgtgacccagacacctaagttccaggtgctgaaaaccggccagagcatgaccctgcaatgcgcccaggacatgaaccatgagtacatgagctggtacagacaggaccccggcatgggcctgagactgatccactactctgtggctatccagaccaccgaccagggcgaagtgcccaatggctacaacgtgtccagaagcaccatcgaggacttcccactgagactgctgtctgccgctcctagccagaccagcgtgtacttttgtgccagcagctacctgggcaacaccggcgagctgttttttggcgagggcagcagactgaccgtgctcgagggacagcctaaggccaatcctaccgtgacactgttccctccaagcagcgaagaactccaggccaacaaggccacacttgtgtgcctgatctccgacttctaccctggggctgtgacagtggcttggaaggccgatggatctcctgtgaaagccggcgtggaaaccaccaagccatccaagcagagcaacaacaaatacgccgccagctcctacctgagcctgacacctgagcagtggaagtcccacagatcctacagctgccaagtgacccacgaaggcagcaccgtggaaaagacagtggcccctacagagtgcagccccatcaagaccgatgtgattacaatggaccccaaggacaactgctccaaggacgccaacgataccctgctgctccagctgaccaacaccagcgcctactacatgtacttgttgctgctgctgaagtccgtggtgtacttcgccatcatcacatgctgcctgctgcggagaaccgccttctgctgcaacggcgagaagtctagggccaagcgatctggatctggagcaacaaacttctcactactcaaacaagcaggtgacgtggaggagaatcccgggcctactagtatggactggatttggcgcatccttttccttgtcggcgctgctaccggcgcgcattccttcgaacaagaagtgacacagatccctgccgctctgtctgtgcctgagggcgaaaacctggtgctgaactgctccttcaccgacagcgccatctacaacctccagtggttcaggcaggaccctggaaagggactgacaagcctgctgctgatccagagcagccagagagagcagacctccggcagactgaatgccagcctggataagagcagcggcaggtctaccctgtatatcgccgcttctcagcctggcgatagcgccacatatctgtgtgctgtgcggcctacaagcggcggcagctacatccctacatttggcagaggcaccagcctgatcgtgcacccttatgcctctacaaagggaccctccgtgtttcctctggctcccagcagcaagtctacaagcggaggaacagccgctctgggctgcctggtcaaggattactttcccgagcctgtgaccgtgtcctggaatagcggagcactgacaagcggcgtgcacacctttccagccgtgctgcaaagcagcggcctgtactctctgagcagcgtggtcacagtgcctagctctagcctgggcacccagacctacatctgcaatgtgaaccacaagcctagcaacaccaaggtggacaagagagtggaacccaagagctgtgaagtgaaaaccgactccaccgaccacgtgaagcccaaagagacagagaacaccaagcagcccagcaagagctgccacaagcccaaggccatcgtgcacaccgagaaagtgaacatgatgagcctgaccgtgctgggcctgcggatgctgttcgccaaaaccgtggccgtgaacttcctgctgaccgccaagctgttcttcctc

SEQ ID NO: 19762 - DNA, 1125 bp, synthetic construct
  source 1..1125: mol_type = other DNA
atgtggttcctgaccacactgctgctgtgggtgccagtggatggacaagtggtggacacaacaaaagccgtcatcaccctgcaaccaccttgggtttcagtctttcaagaagagacagttaccctgcactgtgaagtcctgcacttgcccggaagcagctccacacagtggttcctcaacggcacagctacccagacaagcaccccttcctaccggatcacatctgcctccgtgaacgattccggcgagtataggtgtcagaggggcctgtctggccgcagcgatcctatccagcttgagattcatcgtggatggttgctcctccaagtgtcctccagggtgttcaccgaaggcgaacctctggcactgaggtgccatgcttggaaagataagctcgtctacaatgtcctctactaccgcaatggcaaggcttttaagttttttcattggaactctaatctcacgatcctgaaaacgaacatctcccacaatgggacataccactgctctggcatgggaaaacatcggtacacctctgccggcatctctgtcacagtcaaagaactgttccctgcaccagtcctgaacgcttccgtgacctctccactgcttgagggaaatctggtcaccctgtcctgcgaaactaagttgctgcttcagaggcccggactccagctctacttttcattctatatgggctctaagaccctgagaggccggaacaccagcagcgaatatcagattctgacagctcggcgcgaggactccgggctctattggtgtgaagctgctacagaggacggaaacgtgctgaaacggtcccctgaactggaactgcaagtcctgggccttcagctgccaactccagtgtggtttcatgtcctgttctatctggctgtggggattatgttccttgtgaataccgtgctctgggttaccattcggaaagaactcaagcgcaagaaaaaatgggatcttgagataagcctggacagcgggcatgagaagaaagtcatcagttcccttcaagaggacagacatctcgaagaggaactcaaatgtcaagaacaaaaagaagaacaactccaagagggtgtccatcggaaagagccacagggcgctaca

SEQ ID NO: 19763 - DNA, 948 bp, synthetic construct
  source 1..948: mol_type = other DNA
atgtggttcctgaccacactgctgctgtgggtgccagtggatggacaagtggtggacacaacaaaagccgtcatcaccctgcaaccaccttgggtttcagtctttcaagaagagacagttaccctgcactgtgaagtcctgcacttgcccggaagcagctccacacagtggttcctcaacggcacagctacccagacaagcaccccttcctaccggatcacatctgcctccgtgaacgattccggcgagtataggtgtcagaggggcctgtctggccgcagcgatcctatccagcttgagattcatcgtggatggttgctcctccaagtgtcctccagggtgttcaccgaaggcgaacctctggcactgaggtgccatgcttggaaagataagctcgtctacaatgtcctctactaccgcaatggcaaggcttttaagttttttcattggaactctaatctcacgatcctgaaaacgaacatctcccacaatgggacataccactgctctggcatgggaaaacatcggtacacctctgccggcatctctgtcacagtcaaagaactgttccctgcaccagtcctgaacgcttccgtgacctctccactgcttgagggaaatctggtcaccctgtcctgcgaaactaagttgctgcttcagaggcccggactccagctctacttttcattctatatgggctctaagaccctgagaggccggaacaccagcagcgaatatcagattctgacagctcggcgcgaggactccgggctctattggtgtgaagctgctacagaggacggaaacgtgctgaaacggtcccctgaactggaactgcaagtcctgggccttcagctgccaactccagtgtggtttcatgtcctgttctatctggctgtggggattatgttccttgtgaataccgtgctctgggttaccattcggaaa

SEQ ID NO: 19764 - DNA, 31 bp, synthetic construct; identical to SEQ ID NO: 304
  source 1..31: mol_type = other DNA

SEQ ID NO: 19765 - DNA, 31 bp, synthetic construct; identical to SEQ ID NO: 304
  source 1..31: mol_type = other DNA

SEQ ID NO: 19766 - DNA, 336 bp, synthetic construct
  source 1..336: mol_type = other DNA
gacatcgtgctgacacagagccctgccaccctgtctctgagccctggcgatagagccaccatcagctgtagagccagcgagagcgtgaccatcctgggcagccacctgatccactggtatcagcagaagcccggccagccccccagactgctgattcagctggcctccaatgtgcagaccggcgtgccagccagattttccggcagcggcagcagaaccgacttcaccctgaccatcagcagcgtggaacccgaggacttcgccgtgtactactgcctccagagccggaccatccccagaacattcggccagggcaccaagctggaaatcaagaga

SEQ ID NO: 19767 - DNA, 333 bp, synthetic construct
  source 1..333: mol_type = other DNA
gacatcgtgctgacacagagcccttctagcctgtctgccagcgtgggagatagagccaccatcagctgtagagccagcgagagcgtgacaatcctgggcagccacctgatctactggtatcagcagaagcccggacaggcccctagactgctgattcagctggcctccaatgtgcagactggcgtgccagccagattttctggcagcggctctggcaccgatttcaccctgacaatcagcagcgtggaacccgaggatgtggccgtgtactactgcctccagagccggacaatccccagaacctttggacagggcaccaaggtggaaatcaaa

SEQ ID NO: 19768 - DNA, 324 bp, synthetic construct
  source 1..324: mol_type = other DNA
gaaatcgtgctgacacagagccccggcacactgtcactttctccaggcgaaggcgctaccctgtcttgtagagctggacagtctgtgcggagcagctacctcggatggtatcagcagaagcctggacaggcccctcggctgttgatctacggtgcttctagcagagccacaggcatccccgatagattttctggcagcggctccggcaccgacttcaccctgacaatcagcagactggaacccgaggacttcgccgtgtattactgccagcagtacggctacagccctcctacatttggcggaggcaccaagctggaaatcaag

SEQ ID NO: 19769 - DNA, 324 bp, synthetic construct
  source 1..324: mol_type = other DNA
gaaatcgtgctgacacagagccccggcacactgtctcttagccctggcgaaagagccacactgagctgtagagccagccagagcatcagaagcagctacctggcctggtatcagcagaagcctggacaggcaccccggctgttgatctacggtgcttctagcagagccacaggcatccccgatagattttctggcagcggctccggcaccgacttcaccctgacaatcagcagactggaacccgaggactttgccgtgtattactgccagcagtacggcgacctgcctttcacatttggccctggcaccaagctggaaatcaag

SEQ ID NO: 19770 - DNA, 324 bp, synthetic construct
  source 1..324: mol_type = other DNA
gacatccagatgacacagagccctagcagcctgtctgccagcgtgggagacagagtgaccatcacctgtagagccagccagagcgtgtccagctacctggcttggtatcagcagaagcctggcaaggcccctaagctgctgatctacgacgccagcaatagagccacaggcgtgcccagcagattttctggctctggcagcggcaccgacttcaccctgacaatatctagcctccagcctgaggacttcgccacctactactgtcagcagaggaccaactggcccctgacatttggccagggcaccaaggtggaaatcaagaga

SEQ ID NO: 19771 - DNA, 324 bp, synthetic construct
  source 1..324: mol_type = other DNA
gacatccagatgacacagagccctagcagcctgtctgccagcgtgggagacagagtgaccatcacctgtagagccagccagggcatctcttcttggctggcctggtatcagcagaagcctggcaaggcccctaagctgctgatctatgccgccagctctctccagagcggagtgcctagcagattttctggcagcggctccggcaccgatttcaccctgacaatatccagcctccagcctgaggacttcgccacctactactgccagcagtacaacagctaccctctgaccttcggccagggcaccaaggtggaaatcaaaaga

SEQ ID NO: 19772 - DNA, 342 bp, synthetic construct
  source 1..342: mol_type = other DNA
gaactgcaaagcgtgctgacacagcctcctagcgcctctggaacacctggacagagagtgacaatcagctgctccggcagctccagcaacatcggcagcaactacgtgaactggtatcagcagctgcctggcacagcccctaaactgctgatctacggcgactaccagaggccaagcggcgtgccagatagattcagcggcagcaagtctggcacaagcgccagcctggctatctctggactgagaagcgaggacgaggccgactactactgtgccaccagagatgatagcctgagcggcagcgtggtgtttggcacaggcacaaagctgacagtgctgggc

SEQ ID NO: 19773 - DNA, 294 bp, synthetic construct
  source 1..294: mol_type = other DNA
gacatccagatgacacagagccctagcagcctgtctgccagcgtgggagacagagtgaccatcacctgtctggcctccgaggacatctacgacaacctggcctggtatcagcagaagcctggcaaggcccctaagctgctgatctactacgccagctctctccaggatggcgtgcccagcagattttctggcagcggctctggcaccgactacaccctgacaatatccagcctccagcctgaggacttcgccacctactactgcctgcaagacagcgagtacccctggacattt

SEQ ID NO: 19774 - DNA, 294 bp, synthetic construct
  source 1..294: mol_type = other DNA
gacatccagatgacacagagccctagcagcctgtctgccagcgtgggagacagagtgaccatcacctgtctggcctccgaggacatctacaacaacctggcctggtatcagcagaagcctggcaaggcccctaagctgctgatctactacgccagctctctccaggatggcgtgcccagcagattttctggcagcggctctggcaccgactacaccctgacaatatccagcctccagcctgaggacttcgccacctactactgcctgcaagacagcgagtacccctggacattt

SEQ ID NO: 19775 - DNA, 321 bp, synthetic construct
  source 1..321: mol_type = other DNA
gacatccagatgacccagtctccaagcacactgagcgccagcgtgggcgacagagtgaccattacatgtagagccagccagagcatcagcaactggctggcctggtatcagcagaagccaggcagagcccctaacctgctgatctctaaggccagcagcctgaagtctggcgtgcccagcagattttctggctctggcagcggcaccgagttcaccctgacagtctctagcctccagcctgacgacttcgccacctactactgccagcagtattacagctactcctacaccttcggccagggcaccaagctggaaatcaag

SEQ ID NO: 19776 - DNA, 324 bp, synthetic construct
  source 1..324: mol_type = other DNA
gacatccagatgacacagagcccctctagcctgtctgccagcgtgggagacagagtgaccatcacctgtagagccagccagagcatcagaaactacctgaactggtatcagcaaaagcccggcaaggcccctgagctgctgattcatgctgcaagcagcctccagagcggcgtgccaagcagattttctggcagcggcagcggaaccgacttcaccctgacaatatctagcctccagcctgaggacttcgccagctactactgccagcagagctacagcgcccctcctatcacctttggacagggcaccagactggaaatcaag

SEQ ID NO: 19777 - DNA, 31 bp, synthetic construct; identical to SEQ ID NO: 304
  source 1..31: mol_type = other DNA

SEQ ID NO: 19778 - DNA, 31 bp, synthetic construct; identical to SEQ ID NO: 304
  source 1..31: mol_type = other DNA

SEQ ID NO: 19779 - DNA, 31 bp, synthetic construct; identical to SEQ ID NO: 304
  source 1..31: mol_type = other DNA

SEQ ID NO: 19780 - DNA, 31 bp, synthetic construct; identical to SEQ ID NO: 304
  source 1..31: mol_type = other DNA

SEQ ID NO: 19781 - DNA, 31 bp, synthetic construct; identical to SEQ ID NO: 304
  source 1..31: mol_type = other DNA

SEQ ID NO: 19782 - DNA, 31 bp, synthetic construct; identical to SEQ ID NO: 304
  source 1..31: mol_type = other DNA

SEQ ID NO: 19783 - DNA, 31 bp, synthetic construct; identical to SEQ ID NO: 304
  source 1..31: mol_type = other DNA

SEQ ID NO: 19784 - DNA, 31 bp, synthetic construct; identical to SEQ ID NO: 304
  source 1..31: mol_type = other DNA

SEQ ID NO: 19785 - DNA, 351 bp, synthetic construct
  source 1..351: mol_type = other DNA
caggtgcagctggtgcagtctggccccgaagtgaagaaacccggcgagtccgtgaagatcagctgcaaggccagcggctacaccttccggcactacagcatgaactgggtcaagcaggccccaggccagggcctgaagtggatgggcagaatcaacaccgagagcggcgtgcccatctacgccgacgacttcaagggccggttcagcttcaccgtggacaccagcgccagcaccgcctacctggaaatctccagcctgaccagcgaggataccgccgtgtatttctgctccaacgactacctgtacagcctggatttctggggccagggaaccaccctgacagtgtcctct

SEQ ID NO: 19786 - DNA, 351 bp, synthetic construct
  source 1..351: mol_type = other DNA
cagattcagctcgtgcagtctggccccgagctgaagaaacctggcggctctgtgaagatcagctgtgccgccagcggctacaccttcaccgactactctatcaactgggtccgacaggctcccggcaaaggactggaatgggtcggatggatcaacaccgagacaagagagcccgcctacgcctacgacttcagaggcagattcaccttcagcgccgacaccagcaagagcacagcctacctccagatgaacagcctgagagccgaggacaccgccgtgtattattgcgccctggactacagctacgctatggactattggggccagggcaccctggtcacagtctcttct

SEQ ID NO: 19787 - DNA, 360 bp, synthetic construct
  source 1..360: mol_type = other DNA
gaggttcagctgcttgagtctggcggaggactggttcaacctggcggaagcctgagactgtcttgtgccgccagcggcttcacctttagcagctacgccatgagctgggtccgacaggctcctggcaaaggactggaatgggtgtccgtgatctctggctctggcggcagacccaattacgccgattctgtgaagggcagattcaccatcagccgggacaacagcaagaacaccctgtacctccagatgaacagcctgcgcgacgaggataccgccgtgtactattgtgccaaggtggactacagcaactacctgttcttcgactactggggccagggcaccctggtcacagtttctagc

SEQ ID NO: 19788 - DNA, 360 bp, synthetic construct
  source 1..360: mol_type = other DNA
gaggttcagctgctggaatctggcggaggaatggttcagcctggcggctctctgagactgtcttgtgccgccagcggcttcacctttagcagctacgccatgagctgggtccgacaggctcctggcaaaggactggaatgggtgtccgccatctctggctctggcggcagaaccttttacgccgatagcgtggaaggccggttcaccatcagccgggacaacagcaagaacaccctgtacctccagatgaacagcctgagagccgaggacaccgccgtgtactattgcgccaagcacgactacagcaactacccctacttcgactactggggccagggcacactggtcacagtttctagc

SEQ ID NO: 19789 - DNA, 354 bp, synthetic construct
  source 1..354: mol_type = other DNA
gaagttcagctggttgaatctggcggcggactggttcaacctggcggatctctgagactgagctgtgccgccagcggcttcaccttcagcagctacatcatgcactgggtccgacaggcccctggcaaaggacttgaatgggtcgccgtgatctcctacgacggcagaaacaaatactacgccgacagcgtgaagggcagattcaccatctccagagacaacagcaagaacaccctgtacctccagatgaactccctgagagccgaggacaccgccgtgtactactgtgccagagacaccgacggctacgacttcgattattggggccagggaaccctggtcaccgtgtcatct

SEQ ID NO: 19790 - DNA, 354 bp, synthetic construct
  source 1..354: mol_type = other DNA
gaagtgcagctggttgaatcaggtggcggcctggttcaacctggcggatctctgagactgagctgtgccgcctccggcttcacctttagcgatcacggaatgcactgggtccgacaggcccctggaaaaggactggaatgggtcgccgtgatttggtacgacggcagcaacaagtattacgccgacagcgtgaagggcagattcaccatcagccgggacaacagcaagaacaccctgtacctccagatgaactccctgagagccgaggacaccgccgtgtactactgtgccagagacagcatcatggtccgaggcgattattggggccagggaaccctggtcacagtgtctagt

SEQ ID NO: 19791 - DNA, 366 bp, synthetic construct
  source 1..366: mol_type = other DNA
gaagttcagctggttcagagcggagccgaagtgaagaagcctggcgagagcctgaagattagctgcaaaggcagcggctacggcttcaccagctattggatcggctgggtccgacagatgcctggcaaaggactggaatggatgggcatcattcaccccgacgacagcgacaccaagtacagccctagcttccagggccaagtgaccatcagcgccgacaagagcatcagcacagcctacctccagtggtcctctctgaaggccagcgataccgccatgtactactgcgccagcagctacctgagaggactgtggggcggctacttcgatttttggggccagggcacactggtcaccgttagttct

SEQ ID NO: 19792 - DNA, 378 bp, synthetic construct
  source 1..378: mol_type = other DNA
gaagtgacactgaaagagtctggccccgctctggtcaagcccacacaaaccctgacactgacctgcaccttcagcggctttagcctgaccacatacggcatgggcgtcggctggattagacagcctcctggaaaagccctggaatggctggctaacatttggtgggacgacgacaagtattacaaccccagcctgaagaaccggctgaccatcagcaaggacaccagcaagaaccaggtggtgctgaccatgaccaacatggaccctgtggacaccgccacatattactgcgccagaatcggccccatcaagtaccccaccgctccttacagatacttcgacttctggggccagggcacaatggtcaccgttagctct

SEQ ID NO: 19793 - DNA, 378 bp, synthetic construct
  source 1..378: mol_type = other DNA
gaagtgacactgaaagagtctggccccgctctggtcaagcccacacaaaccctgacactgacctgcaccttcagcggctttagcctgagcacatacggcatgggcgtcggctggattagacagcctcctggaaaagccctggaatggctggctaacatttggtgggacgacgacaagtattacaaccccagcctgaagaaccggctgaccatcagcaaggacaccagcaagaaccaggtggtgctgaccatgaccaacatggaccctgtggacaccgccacatattactgcgccagaatcggccccatcaagtaccccaccgctccttacagatacttcgacttctggggccagggcacaatggtcaccgttagctct

SEQ ID NO: 19794 - DNA, 345 bp, synthetic construct
  source 1..345: mol_type = other DNA
caggtgcagctggttgaatctggtggcggagttgtgcagcctggcagaagcctgagactgagctgtgtggcctccggctttaccatcagcagctacggcatgaactgggtccgacaggcccctggcaaaggactggaatgggttgccgtgatctcctacgacggcggcaacaagtacagcgtggacagcgtgaagggcagattcaccatcagccgggacaacagcaagaacaccctgtacctccagatgaacagcctgagagccgaggacagcgccgtgtactattgtgccagaggccggtacttcgacctgtggggaagaggcacactggtcacagtttctagc

SEQ ID NO: 19795 - DNA, 399 bp, synthetic construct
  source 1..399: mol_type = other DNA
caggttcagctccagcagtctggacctggcctggtcaagcctagccagacactgtctctgacctgtgccatcagcggcgatagcgtgtcctctaatagagccgcctggaactggatcagacagagccctagcagaggactccagtggctgggcagaacctactaccgcagcaagtggtacaacgactacgccgtgtctctgcggagccggatcaccatcaatcccgtgaccagcaagaaccaggtggccctgcacatgaacagcgtgacccctgaagataccgccgtgtactactgtgccagagccggaattgtggtggtgcccggacctgagacattctactactacgaccacggcctggacgtgtggggccagggaacaacagtgactgtctcttct

SEQ ID NO: 19796 - DNA, 31 bp, synthetic construct; identical to SEQ ID NO: 304
  source 1..31: mol_type = other DNA

SEQ ID NO: 19797 - DNA, 31 bp, synthetic construct; identical to SEQ ID NO: 304
  source 1..31: mol_type = other DNA

SEQ ID NO: 19798 - DNA, 31 bp, synthetic construct; identical to SEQ ID NO: 304
  source 1..31: mol_type = other DNA

SEQ ID NO: 19799 - DNA, 31 bp, synthetic construct; identical to SEQ ID NO: 304
  source 1..31: mol_type = other DNA

SEQ ID NO: 19800 - DNA, 31 bp, synthetic construct; identical to SEQ ID NO: 304
  source 1..31: mol_type = other DNA

SEQ ID NO: 19801 - DNA, 31 bp, synthetic construct; identical to SEQ ID NO: 304
  source 1..31: mol_type = other DNA

SEQ ID NO: 19802 - DNA, 31 bp, synthetic construct; identical to SEQ ID NO: 304
  source 1..31: mol_type = other DNA

SEQ ID NO: 19803 - DNA, 31 bp, synthetic construct; identical to SEQ ID NO: 304
  source 1..31: mol_type = other DNA

SEQ ID NO: 19804 - DNA, 732 bp, synthetic construct
  source 1..732: mol_type = other DNA
gacatcgtgctgacacagagccctgccaccctgtctctgagccctggcgatagagccaccatcagctgtagagccagcgagagcgtgaccatcctgggcagccacctgatccactggtatcagcagaagcccggccagccccccagactgctgattcagctggcctccaatgtgcagaccggcgtgccagccagattttccggcagcggcagcagaaccgacttcaccctgaccatcagcagcgtggaacccgaggacttcgccgtgtactactgcctccagagccggaccatccccagaacattcggccagggcaccaagctggaaatcaagagaggcggaggcggaagtggaggcggaggatctggcggcggaggctctcaggtgcagctggtgcagtctggccccgaagtgaagaaacccggcgagtccgtgaagatcagctgcaaggccagcggctacaccttccggcactacagcatgaactgggtcaagcaggccccaggccagggcctgaagtggatgggcagaatcaacaccgagagcggcgtgcccatctacgccgacgacttcaagggccggttcagcttcaccgtggacaccagcgccagcaccgcctacctggaaatctccagcctgaccagcgaggataccgccgtgtatttctgctccaacgactacctgtacagcctggatttctggggccagggaaccaccctgacagtgtcctct

SEQ ID NO: 19805 - DNA, 729 bp, synthetic construct
  source 1..729: mol_type = other DNA
gacatcgtgctgacacagagcccttctagcctgtctgccagcgtgggagatagagccaccatcagctgtagagccagcgagagcgtgacaatcctgggcagccacctgatctactggtatcagcagaagcccggacaggcccctagactgctgattcagctggcctccaatgtgcagactggcgtgccagccagattttctggcagcggctctggcaccgatttcaccctgacaatcagcagcgtggaacccgaggatgtggccgtgtactactgcctccagagccggacaatccccagaacctttggacagggcaccaaggtggaaatcaaaggcggcggaggatctggcggaggtggaagcggaggcggtggatctcagattcagctcgtgcagtctggccccgagctgaagaaacctggcggctctgtgaagatcagctgtgccgccagcggctacaccttcaccgactactctatcaactgggtccgacaggctcccggcaaaggactggaatgggtcggatggatcaacaccgagacaagagagcccgcctacgcctacgacttcagaggcagattcaccttcagcgccgacaccagcaagagcacagcctacctccagatgaacagcctgagagccgaggacaccgccgtgtattattgcgccctggactacagctacgctatggactattggggccagggcaccctggtcacagtctcttct

SEQ ID NO: 19806 - DNA, 729 bp, synthetic construct
  source 1..729: mol_type = other DNA
gaggttcagctgcttgagtctggcggaggactggttcaacctggcggaagcctgagactgtcttgtgccgccagcggcttcacctttagcagctacgccatgagctgggtccgacaggctcctggcaaaggactggaatgggtgtccgtgatctctggctctggcggcagacccaattacgccgattctgtgaagggcagattcaccatcagccgggacaacagcaagaacaccctgtacctccagatgaacagcctgcgcgacgaggataccgccgtgtactattgtgccaaggtggactacagcaactacctgttcttcgactactggggccagggcaccctggtcacagtttctagcggcggaggcggaagtggaggcggaggatctggcggcggaggctctgaaatcgtgctgacacagagccccggcacactgtcactttctccaggcgaaggcgctaccctgtcttgtagagctggacagtctgtgcggagcagctacctcggatggtatcagcagaagcctggacaggcccctcggctgttgatctacggtgcttctagcagagccacaggcatccccgatagattttctggcagcggctccggcaccgacttcaccctgacaatcagcagactggaacccgaggacttcgccgtgtattactgccagcagtacggctacagccctcctacatttggcggaggcaccaagctggaaatcaag

SEQ ID NO: 19807 - DNA, 729 bp, synthetic construct
  source 1..729: mol_type = other DNA
gaggttcagctgctggaatctggcggaggaatggttcagcctggcggctctctgagactgtcttgtgccgccagcggcttcacctttagcagctacgccatgagctgggtccgacaggctcctggcaaaggactggaatgggtgtccgccatctctggctctggcggcagaaccttttacgccgatagcgtggaaggccggttcaccatcagccgggacaacagcaagaacaccctgtacctccagatgaacagcctgagagccgaggacaccgccgtgtactattgcgccaagcacgactacagcaactacccctacttcgactactggggccagggcacactggtcacagtttctagcggcggaggcggaagtggaggcggaggatctggcggcggaggctctgaaatcgtgctgacacagagccccggcacactgtctcttagccctggcgaaagagccacactgagctgtagagccagccagagcatcagaagcagctacctggcctggtatcagcagaagcctggacaggcaccccggctgttgatctacggtgcttctagcagagccacaggcatccccgatagattttctggcagcggctccggcaccgacttcaccctgacaatcagcagactggaacccgaggactttgccgtgtattactgccagcagtacggcgacctgcctttcacatttggccctggcaccaagctggaaatcaag

SEQ ID NO: 19808 - DNA, 723 bp, synthetic construct
  source 1..723: mol_type = other DNA
gacatccagatgacacagagccctagcagcctgtctgccagcgtgggagacagagtgaccatcacctgtagagccagccagagcgtgtccagctacctggcttggtatcagcagaagcctggcaaggcccctaagctgctgatctacgacgccagcaatagagccacaggcgtgcccagcagattttctggctctggcagcggcaccgacttcaccctgacaatatctagcctccagcctgaggacttcgccacctactactgtcagcagaggaccaactggcccctgacatttggccagggcaccaaggtggaaatcaagagaggcggaggcggaagtggaggcggaggatctggcggcggaggctctgaagttcagctggttgaatctggcggcggactggttcaacctggcggatctctgagactgagctgtgccgccagcggcttcaccttcagcagctacatcatgcactgggtccgacaggcccctggcaaaggacttgaatgggtcgccgtgatctcctacgacggcagaaacaaatactacgccgacagcgtgaagggcagattcaccatctccagagacaacagcaagaacaccctgtacctccagatgaactccctgagagccgaggacaccgccgtgtactactgtgccagagacaccgacggctacgacttcgattattggggccagggaaccctggtcaccgtgtcatct

SEQ ID NO: 19809 - DNA, 723 bp, synthetic construct
  source 1..723: mol_type = other DNA
gacatccagatgacacagagccctagcagcctgtctgccagcgtgggagacagagtgaccatcacctgtagagccagccagggcatctcttcttggctggcctggtatcagcagaagcctggcaaggcccctaagctgctgatctatgccgccagctctctccagagcggagtgcctagcagattttctggcagcggctccggcaccgatttcaccctgacaatatccagcctccagcctgaggacttcgccacctactactgccagcagtacaacagctaccctctgaccttcggccagggcaccaaggtggaaatcaaaagaggcggaggcggaagtggaggcggaggatctggcggcggaggctctgaagtgcagctggttgaatcaggtggcggcctggttcaacctggcggatctctgagactgagctgtgccgcctccggcttcacctttagcgatcacggaatgcactgggtccgacaggcccctggaaaaggactggaatgggtcgccgtgatttggtacgacggcagcaacaagtattacgccgacagcgtgaagggcagattcaccatcagccgggacaacagcaagaacaccctgtacctccagatgaactccctgagagccgaggacaccgccgtgtactactgtgccagagacagcatcatggtccgaggcgattattggggccagggaaccctggtcacagtgtctagt

SEQ ID NO: 19810 - DNA, 753 bp, synthetic construct
  source 1..753: mol_type = other DNA
gaagttcagctggttcagagcggagccgaagtgaagaagcctggcgagagcctgaagattagctgcaaaggcagcggctacggcttcaccagctattggatcggctgggtccgacagatgcctggcaaaggactggaatggatgggcatcattcaccccgacgacagcgacaccaagtacagccctagcttccagggccaagtgaccatcagcgccgacaagagcatcagcacagcctacctccagtggtcctctctgaaggccagcgataccgccatgtactactgcgccagcagctacctgagaggactgtggggcggctacttcgatttttggggccagggcacactggtcaccgttagttctggcggaggcggaagtggaggcggaggatctggcggcggaggctctgaactgcaaagcgtgctgacacagcctcctagcgcctctggaacacctggacagagagtgacaatcagctgctccggcagctccagcaacatcggcagcaactacgtgaactggtatcagcagctgcctggcacagcccctaaactgctgatctacggcgactaccagaggccaagcggcgtgccagatagattcagcggcagcaagtctggcacaagcgccagcctggctatctctggactgagaagcgaggacgaggccgactactactgtgccaccagagatgatagcctgagcggcagcgtggtgtttggcacaggcacaaagctgacagtgctgggc

SEQ ID NO: 19811 - DNA, 717 bp, synthetic construct
  source 1..717: mol_type = other DNA
gacatccagatgacacagagccctagcagcctgtctgccagcgtgggagacagagtgaccatcacctgtctggcctccgaggacatctacgacaacctggcctggtatcagcagaagcctggcaaggcccctaagctgctgatctactacgccagctctctccaggatggcgtgcccagcagattttctggcagcggctctggcaccgactacaccctgacaatatccagcctccagcctgaggacttcgccacctactactgcctgcaagacagcgagtacccctggacatttggaggcggtggatctggcggcggaggtagtggtggtggcggatctgaagtgacactgaaagagtctggccccgctctggtcaagcccacacaaaccctgacactgacctgcaccttcagcggctttagcctgaccacatacggcatgggcgtcggctggattagacagcctcctggaaaagccctggaatggctggctaacatttggtgggacgacgacaagtattacaaccccagcctgaagaaccggctgaccatcagcaaggacaccagcaagaaccaggtggtgctgaccatgaccaacatggaccctgtggacaccgccacatattactgcgccagaatcggccccatcaagtaccccaccgctccttacagatacttcgacttctggggccagggcacaatggtcaccgttagctct

SEQ ID NO: 19812 - DNA, 717 bp, synthetic construct
  source 1..717: mol_type = other DNA
gacatccagatgacacagagccctagcagcctgtctgccagcgtgggagacagagtgaccatcacctgtctggcctccgaggacatctacaacaacctggcctggtatcagcagaagcctggcaaggcccctaagctgctgatctactacgccagctctctccaggatggcgtgcccagcagattttctggcagcggctctggcaccgactacaccctgacaatatccagcctccagcctgaggacttcgccacctactactgcctgcaagacagcgagtacccctggacatttggaggcggtggatctggcggcggaggtagtggtggtggcggatctgaagtgacactgaaagagtctggccccgctctggtcaagcccacacaaaccctgacactgacctgcaccttcagcggctttagcctgagcacatacggcatgggcgtcggctggattagacagcctcctggaaaagccctggaatggctggctaacatttggtgggacgacgacaagtattacaaccccagcctgaagaaccggctgaccatcagcaaggacaccagcaagaaccaggtggtgctgaccatgaccaacatggaccctgtggacaccgccacatattactgcgccagaatcggccccatcaagtaccccaccgctccttacagatacttcgacttctggggccagggcacaatggtcaccgttagctct

SEQ ID NO: 19813 - DNA, 711 bp, synthetic construct
  source 1..711: mol_type = other DNA
caggtgcagctggttgaatctggtggcggagttgtgcagcctggcagaagcctgagactgagctgtgtggcctccggctttaccatcagcagctacggcatgaactgggtccgacaggcccctggcaaaggactggaatgggttgccgtgatctcctacgacggcggcaacaagtacagcgtggacagcgtgaagggcagattcaccatcagccgggacaacagcaagaacaccctgtacctccagatgaacagcctgagagccgaggacagcgccgtgtactattgtgccagaggccggtacttcgacctgtggggaagaggcacactggtcacagtttctagcggaggcggtggatctggcggcggaggtagtggtggtggcggatctgacatccagatgacccagtctccaagcacactgagcgccagcgtgggcgacagagtgaccattacatgtagagccagccagagcatcagcaactggctggcctggtatcagcagaagccaggcagagcccctaacctgctgatctctaaggccagcagcctgaagtctggcgtgcccagcagattttctggctctggcagcggcaccgagttcaccctgacagtctctagcctccagcctgacgacttcgccacctactactgccagcagtattacagctactcctacaccttcggccagggcaccaagctggaaatcaag

SEQ ID NO: 19814 - DNA, 768 bp, synthetic construct
  source 1..768: mol_type = other DNA
caggttcagctccagcagtctggacctggcctggtcaagcctagccagacactgtctctgacctgtgccatcagcggcgatagcgtgtcctctaatagagccgcctggaactggatcagacagagccctagcagaggactccagtggctgggcagaacctactaccgcagcaagtggtacaacgactacgccgtgtctctgcggagccggatcaccatcaatcccgtgaccagcaagaaccaggtggccctgcacatgaacagcgtgacccctgaagataccgccgtgtactactgtgccagagccggaattgtggtggtgcccggacctgagacattctactactacgaccacggcctggacgtgtggggccagggaacaacagtgactgtctcttctggaggcggtggatctggcggcggaggtagtggtggtggcggatctgacatccagatgacacagagcccctctagcctgtctgccagcgtgggagacagagtgaccatcacctgtagagccagccagagcatcagaaactacctgaactggtatcagcaaaagcccggcaaggcccctgagctgctgattcatgctgcaagcagcctccagagcggcgtgccaagcagattttctggcagcggcagcggaaccgacttcaccctgacaatatctagcctccagcctgaggacttcgccagctactactgccagcagagctacagcgcccctcctatcacctttggacagggcaccagactggaaatcaag

SEQ ID NO: 19815 - DNA, 31 bp, synthetic construct; identical to SEQ ID NO: 304
  source 1..31: mol_type = other DNA

SEQ ID NO: 19816 - DNA, 31 bp, synthetic construct; identical to SEQ ID NO: 304
  source 1..31: mol_type = other DNA

SEQ ID NO: 19817 - DNA, 31 bp, synthetic construct; identical to SEQ ID NO: 304
  source 1..31: mol_type = other DNA

SEQ ID NO: 19818 - DNA, 31 bp, synthetic construct; identical to SEQ ID NO: 304
  source 1..31: mol_type = other DNA

SEQ ID NO: 19819 - DNA, 31 bp, synthetic construct; identical to SEQ ID NO: 304
  source 1..31: mol_type = other DNA

SEQ ID NO: 19820 - DNA, 31 bp, synthetic construct; identical to SEQ ID NO: 304
  source 1..31: mol_type = other DNA

SEQ ID NO: 19821 - DNA, 31 bp, synthetic construct; identical to SEQ ID NO: 304
  source 1..31: mol_type = other DNA

SEQ ID NO: 19822 - DNA, 31 bp, synthetic construct; identical to SEQ ID NO: 304
  source 1..31: mol_type = other DNA

SEQ ID NO: 19823 - DNA, 1491 bp, synthetic construct
  source 1..1491: mol_type = other DNA
atggccttaccagtgaccgccttgctcctgccgctggccttgctgctccacgccgccaggccggacatcgtgctgacacagagccctgccaccctgtctctgagccctggcgatagagccaccatcagctgtagagccagcgagagcgtgaccatcctgggcagccacctgatccactggtatcagcagaagcccggccagccccccagactgctgattcagctggcctccaatgtgcagaccggcgtgccagccagattttccggcagcggcagcagaaccgacttcaccctgaccatcagcagcgtggaacccgaggacttcgccgtgtactactgcctccagagccggaccatccccagaacattcggccagggcaccaagctggaaatcaagagaggcggaggcggaagtggaggcggaggatctggcggcggaggctctcaggtgcagctggtgcagtctggccccgaagtgaagaaacccggcgagtccgtgaagatcagctgcaaggccagcggctacaccttccggcactacagcatgaactgggtcaagcaggccccaggccagggcctgaagtggatgggcagaatcaacaccgagagcggcgtgcccatctacgccgacgacttcaagggccggttcagcttcaccgtggacaccagcgccagcaccgcctacctggaaatctccagcctgaccagcgaggataccgccgtgtatttctgctccaacgactacctgtacagcctggatttctggggccagggaaccaccctgacagtgtcctctacgcgtgagcagaaactgatctcggaagaggatctgaaaattgaagttatgtatcctcctccttacctagacaatgagaagagcaatggaaccattatccatgtgaaagggaaacacctttgtccaagtcccctatttcccggaccttctaagcccttttgggtgctggtggtggttgggggagtcctggcttgctatagcttgctagtaacagtggcctttattattttctgggtgaggagtaagaggagcaggctcctgcacagtgactacatgaacatgactccacgccgccccggacccacccgcaagcattaccagccctatgccccaccacgcgacttcgcagcctatcgctccagagtgaagttcagcaggagcgcagacgcccccgcgtaccagcagggccagaaccagctctataacgagctcaatctaggacgaagagaggagtacgatgttttggacaagagacgtggccgggaccctgagatggggggaaagccgagaaggaagaaccctcaggaaggcctgtacaatgaactgcagaaagataagatggcggaggcctacagtgagattgggatgaaaggcgagcgccggaggggcaaggggcacgatggcctttaccagggtctcagtacagccaccaaggacacctacgacgcccttcacatgcaggccctgccccctcgc

SEQ ID NO: 19824 - DNA, 1512 bp, synthetic construct
  source 1..1512: mol_type = other DNA
atggccttaccagtgaccgccttgctcctgccgctggccttgctgctccacgccgccaggccggacatcgtgctgacacagagccctgccaccctgtctctgagccctggcgatagagccaccatcagctgtagagccagcgagagcgtgaccatcctgggcagccacctgatccactggtatcagcagaagcccggccagccccccagactgctgattcagctggcctccaatgtgcagaccggcgtgccagccagattttccggcagcggcagcagaaccgacttcaccctgaccatcagcagcgtggaacccgaggacttcgccgtgtactactgcctccagagccggaccatccccagaacattcggccagggcaccaagctggaaatcaagagaggcggaggcggaagtggaggcggaggatctggcggcggaggctctcaggtgcagctggtgcagtctggccccgaagtgaagaaacccggcgagtccgtgaagatcagctgcaaggccagcggctacaccttccggcactacagcatgaactgggtcaagcaggccccaggccagggcctgaagtggatgggcagaatcaacaccgagagcggcgtgcccatctacgccgacgacttcaagggccggttcagcttcaccgtggacaccagcgccagcaccgcctacctggaaatctccagcctgaccagcgaggataccgccgtgtatttctgctccaacgactacctgtacagcctggatttctggggccagggaaccaccctgacagtgtcctctacgcgtgagcagaaactgatctcggaagaggatctggcgaagcccaccacgacgccagcgccgcgaccaccaacaccggcgcccaccatcgcgtcgcagcccctgtccctgcgcccagaggcgtgccggccagcggcggggggcgcagtgcacacgagggggctggacttcgcctgtgacatctacatctgggcgcccttggccgggacttgtggggtccttctcctgtcactggttatcaccctttactgcaaacggggcagaaagaaactcctgtatatattcaaacaaccatttatgagaccagtacaaactactcaagaggaagatggctgtagctgccgatttccagaagaagaagaaggaggatgtgaactgagagtgaagttcagcaggagcgcagacgcccccgcgtaccagcagggccagaaccagctctataacgagctgaatctaggacgaagagaggagtacgatgttttggacaagagacgtggccgggaccctgagatggggggaaagccgagaaggaagaaccctcaggaaggcctgtacaatgaactgcagaaagataagatggcggaggcctacagtgagattgggatgaaaggcgagcgccggaggggcaaggggcacgatggcctttaccagggtctcagtacagccaccaaggacacctacgacgcccttcacatgcaggccctgccccctcgctga

SEQ ID NO: 19825 - DNA, 1512 bp, synthetic construct
  source 1..1512: mol_type = other DNA
atggccttaccagtgaccgccttgctcctgccgctggccttgctgctccacgccgccaggccgcaggtgcagctggtgcagtctggccccgaagtgaagaaacccggcgagtccgtgaagatcagctgcaaggccagcggctacaccttccggcactacagcatgaactgggtcaagcaggccccaggccagggcctgaagtggatgggcagaatcaacaccgagagcggcgtgcccatctacgccgacgacttcaagggccggttcagcttcaccgtggacaccagcgccagcaccgcctacctggaaatctccagcctgaccagcgaggataccgccgtgtatttctgctccaacgactacctgtacagcctggatttctggggccagggaaccaccctgacagtgtcctctggcggaggcggaagtggaggcggaggatctggcggcggaggctctgacatcgtgctgacacagagccctgccaccctgtctctgagccctggcgatagagccaccatcagctgtagagccagcgagagcgtgaccatcctgggcagccacctgatccactggtatcagcagaagcccggccagccccccagactgctgattcagctggcctccaatgtgcagaccggcgtgccagccagattttccggcagcggcagcagaaccgacttcaccctgaccatcagcagcgtggaacccgaggacttcgccgtgtactactgcctccagagccggaccatccccagaacattcggccagggcaccaagctggaaatcaagagaacgcgtgagcagaaactgatctcggaagaggatctggcgaagcccaccacgacgccagcgccgcgaccaccaacaccggcgcccaccatcgcgtcgcagcccctgtccctgcgcccagaggcgtgccggccagcggcggggggcgcagtgcacacgagggggctggacttcgcctgtgacatctacatctgggcgcccttggccgggacttgtggggtccttctcctgtcactggttatcaccctttactgcaaacggggcagaaagaaactcctgtatatattcaaacaaccatttatgagaccagtacaaactactcaagaggaagatggctgtagctgccgatttccagaagaagaagaaggaggatgtgaactgagagtgaagttcagcaggagcgcagacgcccccgcgtaccagcagggccagaaccagctctataacgagctgaatctaggacgaagagaggagtacgatgttttggacaagagacgtggccgggaccctgagatggggggaaagccgagaaggaagaaccctcaggaaggcctgtacaatgaactgcagaaagataagatggcggaggcctacagtgagattgggatgaaaggcgagcgccggaggggcaaggggcacgatggcctttaccagggtctcagtacagccaccaaggacacctacgacgcccttcacatgcaggccctgccccctcgctga

SEQ ID NO: 19826 - DNA, 2751 bp, synthetic construct
  source 1..2751: mol_type = other DNA
atggccttaccagtgaccgccttgctcctgccgctggccttgctgctccacgccgccaggccggacatcgtgctgacacagagccctgccaccctgtctctgagccctggcgatagagccaccatcagctgtagagccagcgagagcgtgaccatcctgggcagccacctgatccactggtatcagcagaagcccggccagccccccagactgctgattcagctggcctccaatgtgcagaccggcgtgccagccagattttccggcagcggcagcagaaccgacttcaccctgaccatcagcagcgtggaacccgaggacttcgccgtgtactactgcctccagagccggaccatccccagaacattcggccagggcaccaagctggaaatcaagagaggcggaggcggaagtggaggcggaggatctggcggcggaggctctcaggtgcagctggtgcagtctggccccgaagtgaagaaacccggcgagtccgtgaagatcagctgcaaggccagcggctacaccttccggcactacagcatgaactgggtcaagcaggccccaggccagggcctgaagtggatgggcagaatcaacaccgagagcggcgtgcccatctacgccgacgacttcaagggccggttcagcttcaccgtggacaccagcgccagcaccgcctacctggaaatctccagcctgaccagcgaggataccgccgtgtatttctgctccaacgactacctgtacagcctggatttctggggccagggaaccaccctgacagtgtcctctacgcgtgagcagaaactgatctcggaagaggatctggcgaagcccaccacgacgccagcgccgcgaccaccaacaccggcgcccaccatcgcgtcgcagcccctgtccctgcgcccagaggcgtgccggccagcggcggggggcgcagtgcacacgagggggctggacttcgcctgtgacatctacatctgggcgcccttggccgggacttgtggggtccttctcctgtcactggttatcaccctttactgcgggcgcgccagagtgaagttcagcaggagcgcagacgcccccgcgtaccagcagggccagaaccagctctataacgagctgaatctaggacgaagagaggagtacgatgttttggacaagagacgtggccgggaccctgagatggggggaaagccgagaaggaagaaccctcaggaaggcctgtacaatgaactgcagaaagataagatggcggaggcctacagtgagattgggatgaaaggcgagcgccggaggggcaaggggcacgatggcctttaccagggtctcagtacagccaccaaggacacctacgacgcccttcacatgcaggccctgccccctcgctctagaggatctggagcaacaaacttctcactactcaaacaagcaggtgacgtggaggagaatcccgggcctgggatccacatggccacttacgaggttctctgtgaggtggcgcggaaactgggcacggatgacagggaagtggtattgttcctcctaaacgtgttcatacctcaacccacactggcccaattaattggagctcttagagctttaaaggaggagggcaggttaacgtttcccctgttagcggaatgtctgtttcgtgcaggtcgcagagacctcttgcgcgacctgcttcacttagacccgcgttttttagagcgccacctagcgggcacaatgagttatttcagcccttatcagctcactgttctccacgtagacggggagctgtgtgcgagggatattaggtctttgatatttttaagcaaggacactatagggtctcgcagcacaccacagacattcttacactgggtgtactgtatggaaaacttagacctactgggtcccactgacgtggatgccctaatgtcaatgcttagatctttgtcaagagtagacctacagcgccaagtgcaaaccctaatgggccttcacctttccggcccatcacactcccaacactatcgccatacaccactcgagaccgatttctacgactacaaggacgacgatgacaagactagtggctccggcgagggcagaggaagtctactaacctgcggagatgtggaagaaaatcctggcccacatatgaccgagtacaagcccacggtgcgcctcgccacccgcgacgacgtccccagggccgtacgcaccctcgccgccgcgttcgccgactaccccgccacgcgccacaccgtcgatccggaccgccacatcgagcgggtcaccgagctgcaagaactcttcctcacgcgcgtcgggctcgacatcggcaaggtgtgggtcgcggacgacggcgccgcggtggcggtctggaccacgccggagagcgtcgaagcgggggcggtgttcgccgagatcggcccgcgcatggccgagttgagcggttcccggctggccgcgcagcaacagatggaaggcctcctggcgccgcaccggcccaaggagcccgcgtggttcctggccaccgtcggcgtctcgcccgaccaccagggcaagggtctgggcagcgccgtcgtgctccccggagtggaggcggccgagcgcgccggggtgcccgccttcctggagacctccgcgccccgcaacctccccttctacgagcggctcggcttcaccgtcaccgccgacgtcgaggtgcccgaaggaccgcgcacctggtgcatgacccgcaagcccggtgcctga

SEQ ID NO: 19827 - DNA, 2571 bp, synthetic construct
  source 1..2571: mol_type = other DNA
atggccttaccagtgaccgccttgctcctgccgctggccttgctgctccacgccgccaggccggacatcgtgctgacacagagccctgccaccctgtctctgagccctggcgatagagccaccatcagctgtagagccagcgagagcgtgaccatcctgggcagccacctgatccactggtatcagcagaagcccggccagccccccagactgctgattcagctggcctccaatgtgcagaccggcgtgccagccagattttccggcagcggcagcagaaccgacttcaccctgaccatcagcagcgtggaacccgaggacttcgccgtgtactactgcctccagagccggaccatccccagaacattcggccagggcaccaagctggaaatcaagagactcgagatccagaaccctgatcctgccgtgtaccagctgcgggatagcaagagcagcgacaagagcgtgtgtctgttcaccgacttcgacagccagaccaacgtgtcccagagcaaggactccgacgtgtacatcaccgataagtgcgtgctggacatgcggagcatggacttcaagagcaactccgccgtggcctggtccaacaagtccgatttcgcctgcgccaacgccttcaacaacagcattatccccgaggacacattcttcccaagcagcgacgtgccctgcgacgtgaagctggtggaaaagagcttcgagacagacaccaacctgaacttccagaacctgagcgtgatcggcttcagaatcctgctgctgaaagtggccggctttaacctgctgatgaccctgcggctgtggtccagccgcgccaagagaagcggatctggcgtgaagcagaccctgaatttcgacctgctgaagctggctggcgacgtggaatccaacccaggccctactagtatggactggatttggcgcatccttttccttgtcggcgctgctaccggcgcgcattccttcgaacaggtgcagctggtgcagtctggccccgaagtgaagaaacccggcgagtccgtgaagatcagctgcaaggccagcggctacaccttccggcactacagcatgaactgggtcaagcaggccccaggccagggcctgaagtggatgggcagaatcaacaccgagagcggcgtgcccatctacgccgacgacttcaagggccggttcagcttcaccgtggacaccagcgccagcaccgcctacctggaaatctccagcctgaccagcgaggataccgccgtgtatttctgctccaacgactacctgtacagcctggatttctggggccagggaaccaccctgacagtgtcctctacgcgtgaggacctgaagaacgtgttcccacctgaggtggccgtgttcgagcctagcaaggccgagatcgcccacacccagaaagccaccctcgtgtgcctggctaccggcttctaccccgaccatgtggaactgtcttggtgggtcaacggcaaagaggtgcacagcggcgtgtgtaccgacccccagccactgaaagaacagcccgccctgaacgacagccggtactgcctgagcagcagactgagagtgtccgccaccttctggcagaacccccggaaccacttcagatgccaggtgcagttctacggcctgagcgagaacgacgagtggacccaggacagagccaagcccgtgacccagatcgtgtctgccgaagcctggggcagagccgattgcggcatcaccagcgccagctaccaccagggcgtgctgagcgccaccatcctgtacgagatcctgctgggcaaggccaccctgtacgccgtgctggtgtctgccctggtgctgatggctatggtcaagcggaaggacagccggggaagggccaagcgatctggatctggagcaacaaacttctcactactcaaacaagcaggtgacgtggaggagaatcccgggccttctagaggccatatgaccgagtacaagcccacggtgcgcctcgccacccgcgacgacgtccccagggccgtacgcaccctcgccgccgcgttcgccgactaccccgccacgcgccacaccgtcgatccggaccgccacatcgagcgggtcaccgagctgcaagaactcttcctcacgcgcgtcgggctcgacatcggcaaggtgtgggtcgcggacgacggcgccgcggtggcggtctggaccacgccggagagcgtcgaagcgggggcggtgttcgccgagatcggcccgcgcatggccgagttgagcggttcccggctggccgcgcagcaacagatggaaggcctcctggcgccgcaccggcccaaggagcccgcgtggttcctggccaccgtcggcgtctcgcccgaccaccagggcaagggtctgggcagcgccgtcgtgctccccggagtggaggcggccgagcgcgccggggtgcccgccttcctggagacctccgcgccccgcaacctccccttctacgagcggctcggcttcaccgtcaccgccgacgtcgaggtgcccgaaggaccgcgcacctggtgcatgacccgcaagcccggtgcctga

SEQ ID NO: 19828 - DNA, 2568 bp, synthetic construct
  source 1..2568: mol_type = other DNA
atggccttaccagtgaccgccttgctcctgccgctggccttgctgctccacgccgccaggccggacatcgtgctgacacagagccctgccaccctgtctctgagccctggcgatagagccaccatcagctgtagagccagcgagagcgtgaccatcctgggcagccacctgatccactggtatcagcagaagcccggccagccccccagactgctgattcagctggcctccaatgtgcagaccggcgtgccagccagattttccggcagcggcagcagaaccgacttcaccctgaccatcagcagcgtggaacccgaggacttcgccgtgtactactgcctccagagccggaccatccccagaacattcggccagggcaccaagctggaaatcaagagactcgaggacctgaagaacgtgttcccacctgaggtggccgtgttcgagcctagcaaggccgagatcgcccacacccagaaagccaccctcgtgtgcctggctaccggcttctaccccgaccatgtggaactgtcttggtgggtcaacggcaaagaggtgcacagcggcgtgtgtaccgacccccagccactgaaagaacagcccgccctgaacgacagccggtactgcctgagcagcagactgagagtgtccgccaccttctggcagaacccccggaaccacttcagatgccaggtgcagttctacggcctgagcgagaacgacgagtggacccaggacagagccaagcccgtgacccagatcgtgtctgccgaagcctggggcagagccgattgcggcatcaccagcgccagctaccaccagggcgtgctgagcgccaccatcctgtacgagatcctgctgggcaaggccaccctgtacgccgtgctggtgtctgccctggtgctgatggctatggtcaagcggaaggacagccggggaagggccaagcgatctggatctggagcaacaaacttctcactactcaaacaagcaggtgacgtggaggagaatcccgggcctactagtatggactggatttggcgcatccttttccttgtcggcgctgctaccggcgcgcattccttcgaacaggtgcagctggtgcagtctggccccgaagtgaagaaacccggcgagtccgtgaagatcagctgcaaggccagcggctacaccttccggcactacagcatgaactgggtcaagcaggccccaggccagggcctgaagtggatgggcagaatcaacaccgagagcggcgtgcccatctacgccgacgacttcaagggccggttcagcttcaccgtggacaccagcgccagcaccgcctacctggaaatctccagcctgaccagcgaggataccgccgtgtatttctgctccaacgactacctgtacagcctggatttctggggccagggaaccaccctgacagtgtcctctacgcgtatccagaaccctgatcctgccgtgtaccagctgcgggatagcaagagcagcgacaagagcgtgtgtctgttcaccgacttcgacagccagaccaacgtgtcccagagcaaggactccgacgtgtacatcaccgataagtgcgtgctggacatgcggagcatggacttcaagagcaactccgccgtggcctggtccaacaagtccgatttcgcctgcgccaacgccttcaacaacagcattatccccgaggacacattcttcccaagcagcgacgtgccctgcgacgtgaagctggtggaaaagagcttcgagacagacaccaacctgaacttccagaacctgagcgtgatcggcttcagaatcctgctgctgaaagtggccggctttaacctgctgatgaccctgcggctgtggtccagccgcgccaagagaagcggatctggcgtgaagcagaccctgaatttcgacctgctgaagctggctggcgacgtggaatccaacccaggcccttctagaggccatatgaccgagtacaagcccacggtgcgcctcgccacccgcgacgacgtccccagggccgtacgcaccctcgccgccgcgttcgccgactaccccgccacgcgccacaccgtcgatccggaccgccacatcgagcgggtcaccgagctgcaagaactcttcctcacgcgcgtcgggctcgacatcggcaaggtgtgggtcgcggacgacggcgccgcggtggcggtctggaccacgccggagagcgtcgaagcgggggcggtgttcgccgagatcggcccgcgcatggccgagttgagcggttcccggctggccgcgcagcaacagatggaaggcctcctggcgccgcaccggcccaaggagcccgcgtggttcctggccaccgtcggcgtctcgcccgaccaccagggcaagggtctgggcagcgccgtcgtgctccccggagtggaggcggccgagcgcgccggggtgcccgccttcctggagacctccgcgccccgcaacctccccttctacgagcggctcggcttcaccgtcaccgccgacgtcgaggtgcccgaaggaccgcgcacctggtgcatgacccgcaagcccggtgcctga

SEQ ID NO: 19829 - DNA, 1866 bp, synthetic construct
  source 1..1866: mol_type = other DNA
atggccttaccagtgaccgccttgctcctgccgctggccttgctgctccacgccgccaggccggacatcgtgctgacacagagccctgccaccctgtctctgagccctggcgatagagccaccatcagctgtagagccagcgagagcgtgaccatcctgggcagccacctgatccactggtatcagcagaagcccggccagccccccagactgctgattcagctggcctccaatgtgcagaccggcgtgccagccagattttccggcagcggcagcagaaccgacttcaccctgaccatcagcagcgtggaacccgaggacttcgccgtgtactactgcctccagagccggaccatccccagaacattcggccagggcaccaagctggaaatcaagagactcgaggacctgaagaacgtgttcccacctgaggtggccgtgttcgagcctagcgaggccgagatcagccacacccagaaagccaccctcgtgtgcctggctaccggcttctaccccgaccatgtggaactgtcttggtgggtcaacggcaaagaggtgcacagcggcgtgtgtaccgacccccagccactgaaagaacagcccgccctgaacgacagccggtactgcctgagcagcagactgagagtgtccgccaccttctggcagaacccccggaaccacttcagatgccaggtgcagttctacggcctgagcgagaacgacgagtggacccaggacagagccaagcccgtgacccagatcgtgtctgccgaagcctggggcagagccgattgcggctttaccagcgagagctaccagcagggcgtgctgagcgccaccatcctgtacgagatcctgctgggcaaggccaccctgtacgccgtgctggtgtctgccctggtgctgatggctatggtcaagcggaaggacagccggggaagggccaagcgatctggatctggagcaacaaacttctcactactcaaacaagcaggtgacgtggaggagaatcccgggcctactagtatggactggatttggcgcatccttttccttgtcggcgctgctaccggcgcgcattccttcgaacaggtgcagctggtgcagtctggccccgaagtgaagaaacccggcgagtccgtgaagatcagctgcaaggccagcggctacaccttccggcactacagcatgaactgggtcaagcaggccccaggccagggcctgaagtggatgggcagaatcaacaccgagagcggcgtgcccatctacgccgacgacttcaagggccggttcagcttcaccgtggacaccagcgccagcaccgcctacctggaaatctccagcctgaccagcgaggataccgccgtgtatttctgctccaacgactacctgtacagcctggatttctggggccagggaaccaccctgacagtgtcctctacgcgtatccagaaccctgatcctgccgtgtaccagctgcgggatagcaagagcagcgacaagagcgtgtgtctgttcaccgacttcgacagccagaccaacgtgtcccagagcaaggactccgacgtgtacatcaccgataagtgcgtgctggacatgcggagcatggacttcaagagcaactccgccgtggcctggtccaacaagtccgatttcgcctgcgccaacgccttcaacaacagcattatccccgaggacacattcttcccaagccccgagagcagctgcgacgtgaagctggtggaaaagagcttcgagacagacaccaacctgaacttccagaacctgagcgtgatcggcttcagaatcctgctgctgaaagtggccggctttaacctgctgatgaccctgcggctgtggtccagc

SEQ ID NO: 19830 - DNA, 2541 bp, synthetic construct
  source 1..2541: mol_type = other DNA
atggccttaccagtgaccgccttgctcctgccgctggccttgctgctccacgccgccaggccggacatcgtgctgacacagagccctgccaccctgtctctgagccctggcgatagagccaccatcagctgtagagccagcgagagcgtgaccatcctgggcagccacctgatccactggtatcagcagaagcccggccagccccccagactgctgattcagctggcctccaatgtgcagaccggcgtgccagccagattttccggcagcggcagcagaaccgacttcaccctgaccatcagcagcgtggaacccgaggacttcgccgtgtactactgcctccagagccggaccatccccagaacattcggccagggcaccaagctggaaatcaagagactcgaggacctgaagaacgtgttcccacctgaggtggccgtgttcgagcctagcgaggccgagatcagccacacccagaaagccaccctcgtgtgcctggctaccggcttctaccccgaccatgtggaactgtcttggtgggtcaacggcaaagaggtgcacagcggcgtgtgtaccgacccccagccactgaaagaacagcccgccctgaacgacagccggtactgcctgagcagcagactgagagtgtccgccaccttctggcagaacccccggaaccacttcagatgccaggtgcagttctacggcctgagcgagaacgacgagtggacccaggacagagccaagcccgtgacccagatcgtgtctgccgaagcctggggcagagccgattgcggctttaccagcgagagctaccagcagggcgtgctgagcgccaccatcctgtacgagatcctgctgggcaaggccaccctgtacgccgtgctggtgtctgccctggtgctgatggctatggtcaagcggaaggacagccggggaagggccaagcgatctggatctggagcaacaaacttctcactactcaaacaagcaggtgacgtggaggagaatcccgggcctactagtatggactggatttggcgcatccttttccttgtcggcgctgctaccggcgcgcattccttcgaacaggtgcagctggtgcagtctggccccgaagtgaagaaacccggcgagtccgtgaagatcagctgcaaggccagcggctacaccttccggcactacagcatgaactgggtcaagcaggccccaggccagggcctgaagtggatgggcagaatcaacaccgagagcggcgtgcccatctacgccgacgacttcaagggccggttcagcttcaccgtggacaccagcgccagcaccgcctacctggaaatctccagcctgaccagcgaggataccgccgtgtatttctgctccaacgactacctgtacagcctggatttctggggccagggaaccaccctgacagtgtcctctacgcgtatccagaaccctgatcctgccgtgtaccagctgcgggatagcaagagcagcgacaagagcgtgtgtctgttcaccgacttcgacagccagaccaacgtgtcccagagcaaggactccgacgtgtacatcaccgataagtgcgtgctggacatgcggagcatggacttcaagagcaactccgccgtggcctggtccaacaagtccgatttcgcctgcgccaacgccttcaacaacagcattatccccgaggacacattcttcccaagccccgagagcagctgcgacgtgaagctggtggaaaagagcttcgagacagacaccaacctgaacttccagaacctgagcgtgatcggcttcagaatcctgctgctgaaagtggccggctttaacctgctgatgaccctgcggctgtggtccagccgcgccaagagaagcggatctggcgtgaagcagaccctgaatttcgacctgctgaagctggctggcgacgtggaatccaacccaggcccttctagaggcgggatccacaccatggctacctacgaggtgctgtgcgaggtggcaagaaagctgggcaccgacgacagagaagtggtgctgttcctgctgaacgtgttcatccctcagcctacactggcccagctgatcggtgcactgagagccctgaaagaggaaggccggctgacctttcctctgctggccgaatgcctgttcagagccggaagaagggatctgctgcgggacctgctgcatctggaccccagatttctggaaagacacctggccggcaccatgagctacttcagcccttaccagctgaccgtgctgcacgttgacggcgaactgtgcgccagagatattcggagcctgatcttcctgagcaaggacaccatcggcagccggtctacccctcagacatttctgcactgggtgtactgcatggaaaacctggacctgctcggccccacagatgtggatgccctgatgtccatgctgagaagcctgagcagagtggacctccagagacaggtgcagacactgatgggactgcacctgagcggacctagccacagccagcactacagacacacccct

SEQ ID NO: 19831 - DNA, 1878 bp, synthetic construct
  source 1..1878: mol_type = other DNA
atggccttaccagtgaccgccttgctcctgccgctggccttgctgctccacgccgccaggccggacatcgtgctgacacagagccctgccaccctgtctctgagccctggcgatagagccaccatcagctgtagagccagcgagagcgtgaccatcctgggcagccacctgatccactggtatcagcagaagcccggccagccccccagactgctgattcagctggcctccaatgtgcagaccggcgtgccagccagattttccggcagcggcagcagaaccgacttcaccctgaccatcagcagcgtggaacccgaggacttcgccgtgtactactgcctccagagccggaccatccccagaacattcggccagggcaccaagctggaaatcaagagactcgagatccagaaccctgatcctgccgtgtaccagctgcgggatagcaagagcagcgacaagagcgtgtgtctgttcaccgacttcgacagccagaccaacgtgtcccagagcaaggactccgacgtgtacatcaccgataagtgcgtgctggacatgcggagcatggacttcaagagcaactccgccgtggcctggtccaacaagtccgatttcgcctgcgccaacgccttcaacaacagcattatccccgaggacacattcttcccaagccccgagagcagctgcgacgtgaagctggtggaaaagagcttcgagacagacaccaacctgaacttccagaacctgagcgtgatcggcttcagaatcctgctgctgaaagtggccggctttaacctgctgatgaccctgcggctgtggtccagccgcgccaagagaagcggatctggcgtgaagcagaccctgaatttcgacctgctgaagctggctggcgacgtggaatccaacccaggccctactagtatggactggatttggcgcatccttttccttgtcggcgctgctaccggcgcgcattccttcgaacaggtgcagctggtgcagtctggccccgaagtgaagaaacccggcgagtccgtgaagatcagctgcaaggccagcggctacaccttccggcactacagcatgaactgggtcaagcaggccccaggccagggcctgaagtggatgggcagaatcaacaccgagagcggcgtgcccatctacgccgacgacttcaagggccggttcagcttcaccgtggacaccagcgccagcaccgcctacctggaaatctccagcctgaccagcgaggataccgccgtgtatttctgctccaacgactacctgtacagcctggatttctggggccagggaaccaccctgacagtgtcctctacgcgtgaggacctgaagaacgtgttcccacctgaggtggccgtgttcgagcctagcgaggccgagatcagccacacccagaaagccaccctcgtgtgcctggctaccggcttctaccccgaccatgtggaactgtcttggtgggtcaacggcaaagaggtgcacagcggcgtgtgtaccgacccccagccactgaaagaacagcccgccctgaacgacagccggtactgcctgagcagcagactgagagtgtccgccaccttctggcagaacccccggaaccacttcagatgccaggtgcagttctacggcctgagcgagaacgacgagtggacccaggacagagccaagcccgtgacccagatcgtgtctgccgaagcctggggcagagccgattgcggctttaccagcgagagctaccagcagggcgtgctgagcgccaccatcctgtacgagatcctgctgggcaaggccaccctgtacgccgtgctggtgtctgccctggtgctgatggctatggtcaagcggaaggacagccgggga

SEQ ID NO: 19832 - DNA, 2544 bp, synthetic construct
  source 1..2544: mol_type = other DNA
atggccttaccagtgaccgccttgctcctgccgctggccttgctgctccacgccgccaggccggacatcgtgctgacacagagccctgccaccctgtctctgagccctggcgatagagccaccatcagctgtagagccagcgagagcgtgaccatcctgggcagccacctgatccactggtatcagcagaagcccggccagccccccagactgctgattcagctggcctccaatgtgcagaccggcgtgccagccagattttccggcagcggcagcagaaccgacttcaccctgaccatcagcagcgtggaacccgaggacttcgccgtgtactactgcctccagagccggaccatccccagaacattcggccagggcaccaagctggaaatcaagagactcgagatccagaaccctgatcctgccgtgtaccagctgcgggatagcaagagcagcgacaagagcgtgtgtctgttcaccgacttcgacagccagaccaacgtgtcccagagcaaggactccgacgtgtacatcaccgataagtgcgtgctggacatgcggagcatggacttcaagagcaactccgccgtggcctggtccaacaagtccgatttcgcctgcgccaacgccttcaacaacagcattatccccgaggacacattcttcccaagccccgagagcagctgcgacgtgaagctggtggaaaagagcttcgagacagacaccaacctgaacttccagaacctgagcgtgatcggcttcagaatcctgctgctgaaagtggccggctttaacctgctgatgaccctgcggctgtggtccagccgcgccaagagaagcggatctggcgtgaagcagaccctgaatttcgacctgctgaagctggctggcgacgtggaatccaacccaggccctactagtatggactggatttggcgcatccttttccttgtcggcgctgctaccggcgcgcattccttcgaacaggtgcagctggtgcagtctggccccgaagtgaagaaacccggcgagtccgtgaagatcagctgcaaggccagcggctacaccttccggcactacagcatgaactgggtcaagcaggccccaggccagggcctgaagtggatgggcagaatcaacaccgagagcggcgtgcccatctacgccgacgacttcaagggccggttcagcttcaccgtggacaccagcgccagcaccgcctacctggaaatctccagcctgaccagcgaggataccgccgtgtatttctgctccaacgactacctgtacagcctggatttctggggccagggaaccaccctgacagtgtcctctacgcgtgaggacctgaagaacgtgttcccacctgaggtggccgtgttcgagcctagcgaggccgagatcagccacacccagaaagccaccctcgtgtgcctggctaccggcttctaccccgaccatgtggaactgtcttggtgggtcaacggcaaagaggtgcacagcggcgtgtgtaccgacccccagccactgaaagaacagcccgccctgaacgacagccggtactgcctgagcagcagactgagagtgtccgccaccttctggcagaacccccggaaccacttcagatgccaggtgcagttctacggcctgagcgagaacgacgagtggacccaggacagagccaagcccgtgacccagatcgtgtctgccgaagcctggggcagagccgattgcggctttaccagcgagagctaccagcagggcgtgctgagcgccaccatcctgtacgagatcctgctgggcaaggccaccctgtacgccgtgctggtgtctgccctggtgctgatggctatggtcaagcggaaggacagccggggaagggccaagcgatctggatctggagcaacaaacttctcactactcaaacaagcaggtgacgtggaggagaatcccgggccttctagaggcgggatccacaccatggctacctacgaggtgctgtgcgaggtggcaagaaagctgggcaccgacgacagagaagtggtgctgttcctgctgaacgtgttcatccctcagcctacactggcccagctgatcggtgcactgagagccctgaaagaggaaggccggctgacctttcctctgctggccgaatgcctgttcagagccggaagaagggatctgctgcgggacctgctgcatctggaccccagatttctggaaagacacctggccggcaccatgagctacttcagcccttaccagctgaccgtgctgcacgttgacggcgaactgtgcgccagagatattcggagcctgatcttcctgagcaaggacaccatcggcagccggtctacccctcagacatttctgcactgggtgtactgcatggaaaacctggacctgctcggccccacagatgtggatgccctgatgtccatgctgagaagcctgagcagagtggacctccagagacaggtgcagacactgatgggactgcacctgagcggacctagccacagccagcactacagacacacccct

SEQ ID NO: 19833 - DNA, 2703 bp, synthetic construct
  source 1..2703: mol_type = other DNA
atggccttaccagtgaccgccttgctcctgccgctggccttgctgctccacgccgccaggccgctcgaggggaaaccaattcccaaccctcttctgggactggattcaaccggcagcggcgaggacctgaagaacgtgttcccacctgaggtggccgtgttcgagcctagcaaggccgagatcgcccacacccagaaagccaccctcgtgtgcctggctaccggcttctaccccgaccatgtggaactgtcttggtgggtcaacggcaaagaggtgcacagcggcgtgtgtaccgacccccagccactgaaagaacagcccgccctgaacgacagccggtactgcctgagcagcagactgagagtgtccgccaccttctggcagaacccccggaaccacttcagatgccaggtgcagttctacggcctgagcgagaacgacgagtggacccaggacagagccaagcccgtgacccagatcgtgtctgccgaagcctggggcagagccgattgcggcatcaccagcgccagctaccaccagggcgtgctgagcgccaccatcctgtacgagatcctgctgggcaaggccaccctgtacgccgtgctggtgtctgccctggtgctgatggctatggtcaagcggaaggacagccggggaagggccaagcgatctggatctggagcaacaaacttctcactactcaaacaagcaggtgacgtggaggagaatcccgggcctactagcatggccttaccagtgaccgccttgctcctgccgctggccttgctgctccacgccgccaggccggacatcgtgctgacacagagccctgccaccctgtctctgagccctggcgatagagccaccatcagctgtagagccagcgagagcgtgaccatcctgggcagccacctgatccactggtatcagcagaagcccggccagccccccagactgctgattcagctggcctccaatgtgcagaccggcgtgccagccagattttccggcagcggcagcagaaccgacttcaccctgaccatcagcagcgtggaacccgaggacttcgccgtgtactactgcctccagagccggaccatccccagaacattcggccagggcaccaagctggaaatcaagagaggcggaggcggaagtggaggcggaggatctggcggcggaggctctcaggtgcagctggtgcagtctggccccgaagtgaagaaacccggcgagtccgtgaagatcagctgcaaggccagcggctacaccttccggcactacagcatgaactgggtcaagcaggccccaggccagggcctgaagtggatgggcagaatcaacaccgagagcggcgtgcccatctacgccgacgacttcaagggccggttcagcttcaccgtggacaccagcgccagcaccgcctacctggaaatctccagcctgaccagcgaggataccgccgtgtatttctgctccaacgactacctgtacagcctggatttctggggccagggaaccaccctgacagtgtcctctacgcgtgagcagaaactgatctcggaagaggatgggagcggcatccagaaccctgatcctgccgtgtaccagctgcgggatagcaagagcagcgacaagagcgtgtgtctgttcaccgacttcgacagccagaccaacgtgtcccagagcaaggactccgacgtgtacatcaccgataagtgcgtgctggacatgcggagcatggacttcaagagcaactccgccgtggcctggtccaacaagtccgatttcgcctgcgccaacgccttcaacaacagcattatccccgaggacacattcttcccaagcagcgacgtgccctgcgacgtgaagctggtggaaaagagcttcgagacagacaccaacctgaacttccagaacctgagcgtgatcggcttcagaatcctgctgctgaaagtggccggctttaacctgctgatgaccctgcggctgtggtccagccgcgccaagagaagcggatctggcgtgaagcagaccctgaatttcgacctgctgaagctggctggcgacgtggaatccaacccaggcccttctagaggccatatgaccgagtacaagcccacggtgcgcctcgccacccgcgacgacgtccccagggccgtacgcaccctcgccgccgcgttcgccgactaccccgccacgcgccacaccgtcgatccggaccgccacatcgagcgggtcaccgagctgcaagaactcttcctcacgcgcgtcgggctcgacatcggcaaggtgtgggtcgcggacgacggcgccgcggtggcggtctggaccacgccggagagcgtcgaagcgggggcggtgttcgccgagatcggcccgcgcatggccgagttgagcggttcccggctggccgcgcagcaacagatggaaggcctcctggcgccgcaccggcccaaggagcccgcgtggttcctggccaccgtcggcgtctcgcccgaccaccagggcaagggtctgggcagcgccgtcgtgctccccggagtggaggcggccgagcgcgccggggtgcccgccttcctggagacctccgcgccccgcaacctccccttctacgagcggctcggcttcaccgtcaccgccgacgtcgaggtgcccgaaggaccgcgcacctggtgcatgacccgcaagcccggtgcctga

SEQ ID NO: 19834 - DNA, 2706 bp, synthetic construct
  source 1..2706: mol_type = other DNA
atggccttaccagtgaccgccttgctcctgccgctggccttgctgctccacgccgccaggccgctcgagcagaaactgatctcggaagaggatctgggctccggcgatcgccctgatcctgccgtgtaccagctgcgggatagcaagagcagcgacaagagcgtgtgtctgttcaccgacttcgacagccagaccaacgtgtcccagagcaaggactccgacgtgtacatcaccgataagtgcgtgctggacatgcggagcatggacttcaagagcaactccgccgtggcctggtccaacaagtccgatttcgcctgcgccaacgccttcaacaacagcattatccccgaggacacattcttcccaagccccgagagcagctgcgacgtgaagctggtggaaaagagcttcgagacagacaccaacctgaacttccagaacctgagcgtgatcggcttcagaatcctgctgctgaaagtggccggctttaacctgctgatgaccctgcggctgtggtccagctctagtcgcgccaagagaagcggatctggcgtgaagcagaccctgaatttcgacctgctgaagctggctggcgacgtggaatccaacccaggccccactagcatggccttaccagtgaccgccttgctcctgccgctggccttgctgctccacgccgccaggccggacatcgtgctgacacagagccctgccaccctgtctctgagccctggcgatagagccaccatcagctgtagagccagcgagagcgtgaccatcctgggcagccacctgatccactggtatcagcagaagcccggccagccccccagactgctgattcagctggcctccaatgtgcagaccggcgtgccagccagattttccggcagcggcagcagaaccgacttcaccctgaccatcagcagcgtggaacccgaggacttcgccgtgtactactgcctccagagccggaccatccccagaacattcggccagggcaccaagctggaaatcaagagaggcggaggcggaagtggaggcggaggatctggcggcggaggctctcaggtgcagctggtgcagtctggccccgaagtgaagaaacccggcgagtccgtgaagatcagctgcaaggccagcggctacaccttccggcactacagcatgaactgggtcaagcaggccccaggccagggcctgaagtggatgggcagaatcaacaccgagagcggcgtgcccatctacgccgacgacttcaagggccggttcagcttcaccgtggacaccagcgccagcaccgcctacctggaaatctccagcctgaccagcgaggataccgccgtgtatttctgctccaacgactacctgtacagcctggatttctggggccagggaaccaccctgacagtgtcctctacgcgtgggaaaccaattcccaaccctcttctgggactggattcaaccggcagcggcgaggacctgaagaacgtgttcccacctgaggtggccgtgttcgagcctagcgaggccgagatcagccacacccagaaagccaccctcgtgtgcctggctaccggcttctaccccgaccatgtggaactgtcttggtgggtcaacggcaaagaggtgcacagcggcgtgtgtaccgacccccagccactgaaagaacagcccgccctgaacgacagccggtactgcctgagcagcagactgagagtgtccgccaccttctggcagaacccccggaaccacttcagatgccaggtgcagttctacggcctgagcgagaacgacgagtggacccaggacagagccaagcccgtgacccagatcgtgtctgccgaagcctggggcagagccgattgcggctttaccagcgagagctaccagcagggcgtgctgagcgccaccatcctgtacgagatcctgctgggcaaggccaccctgtacgccgtgctggtgtctgccctggtgctgatggctatggtcaagcggaaggacagccggggaagggccaagcgatctggatctggagcaacaaacttctcactactcaaacaagcaggtgacgtggaggagaatcccgggccttctagaggccatatgaccgagtacaagcccacggtgcgcctcgccacccgcgacgacgtccccagggccgtacgcaccctcgccgccgcgttcgccgactaccccgccacgcgccacaccgtcgatccggaccgccacatcgagcgggtcaccgagctgcaagaactcttcctcacgcgcgtcgggctcgacatcggcaaggtgtgggtcgcggacgacggcgccgcggtggcggtctggaccacgccggagagcgtcgaagcgggggcggtgttcgccgagatcggcccgcgcatggccgagttgagcggttcccggctggccgcgcagcaacagatggaaggcctcctggcgccgcaccggcccaaggagcccgcgtggttcctggccaccgtcggcgtctcgcccgaccaccagggcaagggtctgggcagcgccgtcgtgctccccggagtggaggcggccgagcgcgccggggtgcccgccttcctggagacctccgcgccccgcaacctccccttctacgagcggctcggcttcaccgtcaccgccgacgtcgaggtgcccgaaggaccgcgcacctggtgcatgacccgcaagcccggtgcctga

SEQ ID NO: 19835 - DNA, 2568 bp, synthetic construct
  source 1..2568: mol_type = other DNA
atggccttaccagtgaccgccttgctcctgccgctggccttgctgctccacgccgccaggccggacatcgtgctgacacagagccctgccaccctgtctctgagccctggcgatagagccaccatcagctgtagagccagcgagagcgtgaccatcctgggcagccacctgatccactggtatcagcagaagcccggccagccccccagactgctgattcagctggcctccaatgtgcagaccggcgtgccagccagattttccggcagcggcagcagaaccgacttcaccctgaccatcagcagcgtggaacccgaggacttcgccgtgtactactgcctccagagccggaccatccccagaacattcggccagggcaccaagctggaaatcaagagactcgaggacctgaagaacgtgttcccacctgaggtggccgtgttcgagcctagcgaggccgagatcagccacacccagaaagccaccctcgtgtgcctggctaccggcttctaccccgaccatgtggaactgtcttggtgggtcaacggcaaagaggtgcacagcggcgtgtctaccgacccccagccactgaaagaacagcccgccctgaacgacagccggtactgcctgagcagcagactgagagtgtccgccaccttctggcagaacccccggaaccacttcagatgccaggtgcagttctacggcctgagcgagaacgacgagtggacccaggacagagccaagcccgtgacccagatcgtgtctgccgaagcctggggcagagccgattgcggctttaccagcgagagctaccagcagggcgtgctgagcgccaccatcctgtacgagatcctgctgggcaaggccaccctgtacgccgtgctggtgtctgccctggtgctgatggctatggtcaagcggaaggacagccggggaagggccaagcgatctggatctggagcaacaaacttctcactactcaaacaagcaggtgacgtggaggagaatcccgggcctactagtatggactggatttggcgcatccttttccttgtcggcgctgctaccggcgcgcattccttcgaacaggtgcagctggtgcagtctggccccgaagtgaagaaacccggcgagtccgtgaagatcagctgcaaggccagcggctacaccttccggcactacagcatgaactgggtcaagcaggccccaggccagggcctgaagtggatgggcagaatcaacaccgagagcggcgtgcccatctacgccgacgacttcaagggccggttcagcttcaccgtggacaccagcgccagcaccgcctacctggaaatctccagcctgaccagcgaggataccgccgtgtatttctgctccaacgactacctgtacagcctggatttctggggccagggaaccaccctgacagtgtcctctacgcgtatccagaaccctgatcctgccgtgtaccagctgcgggatagcaagagcagcgacaagagcgtgtgtctgttcaccgacttcgacagccagaccaacgtgtcccagagcaaggactccgacgtgtacatcaccgataagaccgtgctggacatgcggagcatggacttcaagagcaactccgccgtggcctggtccaacaagtccgatttcgcctgcgccaacgccttcaacaacagcattatccccgaggacacattcttcccaagccccgagagcagctgcgacgtgaagctggtggaaaagagcttcgagacagacaccaacctgaacttccagaacctgagcgtgatcggcttcagaatcctgctgctgaaagtggccggctttaacctgctgatgaccctgcggctgtggtccagccgcgccaagagaagcggatctggcgtgaagcagaccctgaatttcgacctgctgaagctggctggcgacgtggaatccaacccaggcccttctagaggccatatgaccgagtacaagcccacggtgcgcctcgccacccgcgacgacgtccccagggccgtacgcaccctcgccgccgcgttcgccgactaccccgccacgcgccacaccgtcgatccggaccgccacatcgagcgggtcaccgagctgcaagaactcttcctcacgcgcgtcgggctcgacatcggcaaggtgtgggtcgcggacgacggcgccgcggtggcggtctggaccacgccggagagcgtcgaagcgggggcggtgttcgccgagatcggcccgcgcatggccgagttgagcggttcccggctggccgcgcagcaacagatggaaggcctcctggcgccgcaccggcccaaggagcccgcgtggttcctggccaccgtcggcgtctcgcccgaccaccagggcaagggtctgggcagcgccgtcgtgctccccggagtggaggcggccgagcgcgccggggtgcccgccttcctggagacctccgcgccccgcaacctccccttctacgagcggctcggcttcaccgtcaccgccgacgtcgaggtgcccgaaggaccgcgcacctggtgcatgacccgcaagcccggtgcctga

SEQ ID NO: 19836 - DNA, 2814 bp, synthetic construct
  source 1..2814: mol_type = other DNA
atggccttaccagtgaccgccttgctcctgccgctggccttgctgctccacgccgccaggccggacatcgtgctgacacagagccctgccaccctgtctctgagccctggcgatagagccaccatcagctgtagagccagcgagagcgtgaccatcctgggcagccacctgatccactggtatcagcagaagcccggccagccccccagactgctgattcagctggcctccaatgtgcagaccggcgtgccagccagattttccggcagcggcagcagaaccgacttcaccctgaccatcagcagcgtggaacccgaggacttcgccgtgtactactgcctccagagccggaccatccccagaacattcggccagggcaccaagctggaaatcaagagactcgaggacctgaagaacgtgttcccacctgaggtggccgtgttcgagcctagcgaggccgagatcagccacacccagaaagccaccctcgtgtgcctggctaccggcttctaccccgaccatgtggaactgtcttggtgggtcaacggcaaagaggtgcacagcggcgtgtctaccgacccccagccactgaaagaacagcccgccctgaacgacagccggtactgcctgagcagcagactgagagtgtccgccaccttctggcagaacccccggaaccacttcagatgccaggtgcagttctacggcctgagcgagaacgacgagtggacccaggacagagccaagcccgtgacccagatcgtgtctgccgaagcctggggcagagccgattgcggctttaccagcgagagctaccagcagggcgtgctgagcgccaccatcctgtacgagatcctgctgggcaaggccaccctgtacgccgtgctggtgtctgccctggtgctgatggctatggtcaagcggaaggacagccggggaagggccaagcgatctggatctggagcaacaaacttctcactactcaaacaagcaggtgacgtggaggagaatcccgggcctactagtatggactggatttggcgcatccttttccttgtcggcgctgctaccggcgcgcattccttcgaacaggtgcagctggtgcagtctggccccgaagtgaagaaacccggcgagtccgtgaagatcagctgcaaggccagcggctacaccttccggcactacagcatgaactgggtcaagcaggccccaggccagggcctgaagtggatgggcagaatcaacaccgagagcggcgtgcccatctacgccgacgacttcaagggccggttcagcttcaccgtggacaccagcgccagcaccgcctacctggaaatctccagcctgaccagcgaggataccgccgtgtatttctgctccaacgactacctgtacagcctggatttctggggccagggaaccaccctgacagtgtcctctacgcgtgagcagaaactgatctcggaagaggatgggagcggcaccccattcccttctctggcccctcccatcatgctgctggtggacggcaagcagcagatggtggtcgtgtgcctggtgctggatgtggccccacctggactggacagccccatctggtttagcgccggcaatggctctgccctggacgcctttacctacggcccaagccctgccaccgatggcacctggacaaatctggcccacctgagcctgcccagcgaggaactggcttcttgggagcctctcgtgtgccacacaggacctggcgctgagggacacagcagatccacccagcctatgcacctgtctggcgaggccagcaccgccagaacctgtcctcaggaacctctgagaggcacccctggcggagcactgtggctgggagtgctgagactgctgctgttcaagctgctgctgtttgacctgctgctgacctgctcctgtctgtgcgatcctgccggccctctgccttctcctgccaccaccacaagactgagagccctgggcagccacagactgcaccctgccacagagacaggcggcagagaggccacaagcagccctagaccccagcccagagacagaagatggggcgataccccccctggcagaaagcctggatctccagtccgcgccaagagaagcggatctggcgtgaagcagaccctgaatttcgacctgctgaagctggctggcgacgtggaatccaacccaggcccttctagaggccatatgaccgagtacaagcccacggtgcgcctcgccacccgcgacgacgtccccagggccgtacgcaccctcgccgccgcgttcgccgactaccccgccacgcgccacaccgtcgatccggaccgccacatcgagcgggtcaccgagctgcaagaactcttcctcacgcgcgtcgggctcgacatcggcaaggtgtgggtcgcggacgacggcgccgcggtggcggtctggaccacgccggagagcgtcgaagcgggggcggtgttcgccgagatcggcccgcgcatggccgagttgagcggttcccggctggccgcgcagcaacagatggaaggcctcctggcgccgcaccggcccaaggagcccgcgtggttcctggccaccgtcggcgtctcgcccgaccaccagggcaagggtctgggcagcgccgtcgtgctccccggagtggaggcggccgagcgcgccggggtgcccgccttcctggagacctccgcgccccgcaacctccccttctacgagcggctcggcttcaccgtcaccgccgacgtcgaggtgcccgaaggaccgcgcacctggtgcatgacccgcaagcccggtgcctga

SEQ ID NO: 19837 - DNA, 2868 bp, synthetic construct
  source 1..2868: mol_type = other DNA
atggccttaccagtgaccgccttgctcctgccgctggccttgctgctccacgccgccaggccgctcgaggacctgaagaacgtgttcccacctgaggtggccgtgttcgagcctagcgaggccgagatcagccacacccagaaagccaccctcgtgtgcctggctaccggcttctaccccgaccatgtggaactgtcttggtgggtcaacggcaaagaggtgcacagcggcgtgtctaccgacccccagccactgaaagaacagcccgccctgaacgacagccggtactgcctgagcagcagactgagagtgtccgccaccttctggcagaacccccggaaccacttcagatgccaggtgcagttctacggcctgagcgagaacgacgagtggacccaggacagagccaagcccgtgacccagatcgtgtctgccgaagcctggggcagagccgattgcggctttaccagcgagagctaccagcagggcgtgctgagcgccaccatcctgtacgagatcctgctgggcaaggccaccctgtacgccgtgctggtgtctgccctggtgctgatggctatggtcaagcggaaggacagccggggaagggccaagcgatctggatctggagcaacaaacttctcactactcaaacaagcaggtgacgtggaggagaatcccgggcctactagcatggccttaccagtgaccgccttgctcctgccgctggccttgctgctccacgccgccaggccggacatcgtgctgacacagagccctgccaccctgtctctgagccctggcgatagagccaccatcagctgtagagccagcgagagcgtgaccatcctgggcagccacctgatccactggtatcagcagaagcccggccagccccccagactgctgattcagctggcctccaatgtgcagaccggcgtgccagccagattttccggcagcggcagcagaaccgacttcaccctgaccatcagcagcgtggaacccgaggacttcgccgtgtactactgcctccagagccggaccatccccagaacattcggccagggcaccaagctggaaatcaagagaggcggaggcggaagtggaggcggaggatctggcggcggaggctctcaggtgcagctggtgcagtctggccccgaagtgaagaaacccggcgagtccgtgaagatcagctgcaaggccagcggctacaccttccggcactacagcatgaactgggtcaagcaggccccaggccagggcctgaagtggatgggcagaatcaacaccgagagcggcgtgcccatctacgccgacgacttcaagggccggttcagcttcaccgtggacaccagcgccagcaccgcctacctggaaatctccagcctgaccagcgaggataccgccgtgtatttctgctccaacgactacctgtacagcctggatttctggggccagggaaccaccctgacagtgtcctctacgcgtgagcagaaactgatctcggaagaggatctggggagcggcaccccattcccttctctggcccctcccatcatgctgctggtggacggcaagcagcagatggtggtcgtgtgcctggtgctggatgtggccccacctggactggacagccccatctggtttagcgccggcaatggctctgccctggacgcctttacctacggcccaagccctgccaccgatggcacctggacaaatctggcccacctgagcctgcccagcgaggaactggcttcttgggagcctctcgtgtgccacacaggacctggcgctgagggacacagcagatccacccagcctatgcacctgtctggcgaggccagcaccgccagaacctgtcctcaggaacctctgagaggcacccctggcggagcactgtggctgggagtgctgagactgctgctgttcaagctgctgctgtttgacctgctgctgacctgctcctgtctgtgcgatcctgccggccctctgccttctcctgccaccaccacaagactgagagccctgggcagccacagactgcaccctgccacagagacaggcggcagagaggccacaagcagccctagaccccagcccagagacagaagatggggcgataccccccctggcagaaagcctggatctccagtccgcgccaagagaagcggatctggcgtgaagcagaccctgaatttcgacctgctgaagctggctggcgacgtggaatccaacccaggcccttctagatctagaggccatatgaccgagtacaagcccacggtgcgcctcgccacccgcgacgacgtccccagggccgtacgcaccctcgccgccgcgttcgccgactaccccgccacgcgccacaccgtcgatccggaccgccacatcgagcgggtcaccgagctgcaagaactcttcctcacgcgcgtcgggctcgacatcggcaaggtgtgggtcgcggacgacggcgccgcggtggcggtctggaccacgccggagagcgtcgaagcgggggcggtgttcgccgagatcggcccgcgcatggccgagttgagcggttcccggctggccgcgcagcaacagatggaaggcctcctggcgccgcaccggcccaaggagcccgcgtggttcctggccaccgtcggcgtctcgcccgaccaccagggcaagggtctgggcagcgccgtcgtgctccccggagtggaggcggccgagcgcgccggggtgcccgccttcctggagacctccgcgccccgcaacctccccttctacgagcggctcggcttcaccgtcaccgccgacgtcgaggtgcccgaaggaccgcgcacctggtgcatgacccgcaagcccggtgcctga

SEQ ID NO: 19838 - DNA, 2679 bp, synthetic construct
  source 1..2679: mol_type = other DNA
atggccttaccagtgaccgccttgctcctgccgctggccttgctgctccacgccgccaggccggacatcgtgctgacacagagccctgccaccctgtctctgagccctggcgatagagccaccatcagctgtagagccagcgagagcgtgaccatcctgggcagccacctgatccactggtatcagcagaagcccggccagccccccagactgctgattcagctggcctccaatgtgcagaccggcgtgccagccagattttccggcagcggcagcagaaccgacttcaccctgaccatcagcagcgtggaacccgaggacttcgccgtgtactactgcctccagagccggaccatccccagaacattcggccagggcaccaagctggaaatcaagagactcgaggggaaaccaattcccaaccctcttctgggactggattcaaccggcagcggcgacaagcagctggacgccgacgtgtcccccaagcctaccatcttcctgccctctatcgccgagacaaagctccagaaggccggcacctacctgtgcctgctggaaaagttcttcccagatgtgattaagatccactggcaggaaaagaagtccaacaccatcctgggcagccaggaaggcaacaccatgaagaccaacgacacctacatgaagttcagctggctgaccgtgcccgagaagtccctggacaaagaacacagatgcatcgtgcggcacgaaaacaacaagaacggcgtggaccaggaaatcatcttcccacccatcaagaccgatgtgattacaatggaccccaaggacaactgctccaaggacgccaacgataccctgctgctccagctgaccaacaccagcgcctactacatgtacttgttgctgctgctgaagtccgtggtgtacttcgccatcatcacatgctgcctgctgcggagaaccgccttctgctgcaacggcgagaagtctagggccaagcgatctggatctggagcaacaaacttctcactactcaaacaagcaggtgacgtggaggagaatcccgggcctactagtatggactggatttggcgcatccttttccttgtcggcgctgctaccggcgcgcattccttcgaacaggtgcagctggtgcagtctggccccgaagtgaagaaacccggcgagtccgtgaagatcagctgcaaggccagcggctacaccttccggcactacagcatgaactgggtcaagcaggccccaggccagggcctgaagtggatgggcagaatcaacaccgagagcggcgtgcccatctacgccgacgacttcaagggccggttcagcttcaccgtggacaccagcgccagcaccgcctacctggaaatctccagcctgaccagcgaggataccgccgtgtatttctgctccaacgactacctgtacagcctggatttctggggccagggaaccaccctgacagtgtcctctacgcgtgagcagaaactgatctcggaagaggatgggagcggcagccagcctcacaccaagcccagcgtgttcgtgatgaagaacggcaccaacgtggcctgcctcgtgaaagagttctaccccaaggacatcaggatcaacctggtgtccagcaagaagatcaccgagttcgaccccgccatcgtgatctcccccagcggcaagtacaacgccgtgaagctggggaagtacgaggacagcaacagcgtgacctgctccgtgcagcacgacaacaagaccgtgcacagcaccgactttgaagtgaaaaccgactccaccgaccacgtgaagcccaaagagacagagaacaccaagcagcccagcaagagctgccacaagcccaaggccatcgtgcacaccgagaaagtgaacatgatgagcctgaccgtgctgggcctgcggatgctgttcgccaaaaccgtggccgtgaacttcctgctgaccgccaagctgttcttcctccgcgccaagagaagcggatctggcgtgaagcagaccctgaatttcgacctgctgaagctggctggcgacgtggaatccaacccaggcccttctagaggccatatgaccgagtacaagcccacggtgcgcctcgccacccgcgacgacgtccccagggccgtacgcaccctcgccgccgcgttcgccgactaccccgccacgcgccacaccgtcgatccggaccgccacatcgagcgggtcaccgagctgcaagaactcttcctcacgcgcgtcgggctcgacatcggcaaggtgtgggtcgcggacgacggcgccgcggtggcggtctggaccacgccggagagcgtcgaagcgggggcggtgttcgccgagatcggcccgcgcatggccgagttgagcggttcccggctggccgcgcagcaacagatggaaggcctcctggcgccgcaccggcccaaggagcccgcgtggttcctggccaccgtcggcgtctcgcccgaccaccagggcaagggtctgggcagcgccgtcgtgctccccggagtggaggcggccgagcgcgccggggtgcccgccttcctggagacctccgcgccccgcaacctccccttctacgagcggctcggcttcaccgtcaccgccgacgtcgaggtgcccgaaggaccgcgcacctggtgcatgacccgcaagcccggtgcctga

SEQ ID NO: 19839 - DNA, 1890 bp, synthetic construct
  source 1..1890: mol_type = other DNA
atggccttaccagtgaccgccttgctcctgccgctggccttgctgctccacgccgccaggccggacatcgtgctgacacagagccctgccaccctgtctctgagccctggcgatagagccaccatcagctgtagagccagcgagagcgtgaccatcctgggcagccacctgatccactggtatcagcagaagcccggccagccccccagactgctgattcagctggcctccaatgtgcagaccggcgtgccagccagattttccggcagcggcagcagaaccgacttcaccctgaccatcagcagcgtggaacccgaggacttcgccgtgtactactgcctccagagccggaccatccccagaacattcggccagggcaccaagctggaaatcaagagactcgagagccagcctcacaccaagcccagcgtgttcgtgatgaagaacggcaccaacgtggcctgcctcgtgaaagagttctaccccaaggacatcaggatcaacctggtgtccagcaagaagatcaccgagttcgaccccgccatcgtgatctcccccagcggcaagtacaacgccgtgaagctggggaagtacgaggacagcaacagcgtgacctgctccgtgcagcacgacaacaagaccgtgcacagcaccgactttgaagtgaaaaccgactccaccgaccacgtgaagcccaaagagacagagaacaccaagcagcccagcaagagctgccacaagcccaaggccatcgtgcacaccgagaaagtgaacatgatgagcctgaccgtgctgggcctgcggatgctgttcgccaaaaccgtggccgtgaacttcctgctgaccgccaagctgttcttcctcagggccaagcgatctggatctggagcaacaaacttctcactactcaaacaagcaggtgacgtggaggagaatcccgggcctactagtatggactggatttggcgcatccttttccttgtcggcgctgctaccggcgcgcattccttcgaacaggtgcagctggtgcagtctggccccgaagtgaagaaacccggcgagtccgtgaagatcagctgcaaggccagcggctacaccttccggcactacagcatgaactgggtcaagcaggccccaggccagggcctgaagtggatgggcagaatcaacaccgagagcggcgtgcccatctacgccgacgacttcaagggccggttcagcttcaccgtggacaccagcgccagcaccgcctacctggaaatctccagcctgaccagcgaggataccgccgtgtatttctgctccaacgactacctgtacagcctggatttctggggccagggaaccaccctgacagtgtcctctacgcgtgacaagcagctggacgccgacgtgtcccccaagcctaccatcttcctgccctctatcgccgagacaaagctccagaaggccggcacctacctgtgcctgctggaaaagttcttcccagatgtgattaagatccactggcaggaaaagaagtccaacaccatcctgggcagccaggaaggcaacaccatgaagaccaacgacacctacatgaagttcagctggctgaccgtgcccgagaagtccctggacaaagaacacagatgcatcgtgcggcacgaaaacaacaagaacggcgtggaccaggaaatcatcttcccacccatcaagaccgatgtgattacaatggaccccaaggacaactgctccaaggacgccaacgataccctgctgctccagctgaccaacaccagcgcctactacatgtacttgttgctgctgctgaagtccgtggtgtacttcgccatcatcacatgctgcctgctgcggagaaccgccttctgctgcaacggcgagaagtct

SEQ ID NO: 19840 - DNA, 2724 bp, synthetic construct
  source 1..2724: mol_type = other DNA
atggccttaccagtgaccgccttgctcctgccgctggccttgctgctccacgccgccaggccgctcgaggggaaaccaattcccaaccctcttctgggactggattcaaccggcagcggcgacaagcagctggacgccgacgtgtcccccaagcctaccatcttcctgccctctatcgccgagacaaagctccagaaggccggcacctacctgtgcctgctggaaaagttcttcccagatgtgattaagatccactggcaggaaaagaagtccaacaccatcctgggcagccaggaaggcaacaccatgaagaccaacgacacctacatgaagttcagctggctgaccgtgcccgagaagtccctggacaaagaacacagatgcatcgtgcggcacgaaaacaacaagaacggcgtggaccaggaaatcatcttcccacccatcaagaccgatgtgattacaatggaccccaaggacaactgctccaaggacgccaacgataccctgctgctccagctgaccaacaccagcgcctactacatgtacttgttgctgctgctgaagtccgtggtgtacttcgccatcatcacatgctgcctgctgcggagaaccgccttctgctgcaacggcgagaagtctagggccaagcgatctggatctggagcaacaaacttctcactactcaaacaagcaggtgacgtggaggagaatcccgggcctactagcatggccttaccagtgaccgccttgctcctgccgctggccttgctgctccacgccgccaggccggacatcgtgctgacacagagccctgccaccctgtctctgagccctggcgatagagccaccatcagctgtagagccagcgagagcgtgaccatcctgggcagccacctgatccactggtatcagcagaagcccggccagccccccagactgctgattcagctggcctccaatgtgcagaccggcgtgccagccagattttccggcagcggcagcagaaccgacttcaccctgaccatcagcagcgtggaacccgaggacttcgccgtgtactactgcctccagagccggaccatccccagaacattcggccagggcaccaagctggaaatcaagagaggcggaggcggaagtggaggcggaggatctggcggcggaggctctcaggtgcagctggtgcagtctggccccgaagtgaagaaacccggcgagtccgtgaagatcagctgcaaggccagcggctacaccttccggcactacagcatgaactgggtcaagcaggccccaggccagggcctgaagtggatgggcagaatcaacaccgagagcggcgtgcccatctacgccgacgacttcaagggccggttcagcttcaccgtggacaccagcgccagcaccgcctacctggaaatctccagcctgaccagcgaggataccgccgtgtatttctgctccaacgactacctgtacagcctggatttctggggccagggaaccaccctgacagtgtcctctacgcgtgagcagaaactgatctcggaagaggatgggagcggcagccagcctcacaccaagcccagcgtgttcgtgatgaagaacggcaccaacgtggcctgcctcgtgaaagagttctaccccaaggacatcaggatcaacctggtgtccagcaagaagatcaccgagttcgaccccgccatcgtgatctcccccagcggcaagtacaacgccgtgaagctggggaagtacgaggacagcaacagcgtgacctgctccgtgcagcacgacaacaagaccgtgcacagcaccgactttgaagtgaaaaccgactccaccgaccacgtgaagcccaaagagacagagaacaccaagcagcccagcaagagctgccacaagcccaaggccatcgtgcacaccgagaaagtgaacatgatgagcctgaccgtgctgggcctgcggatgctgttcgccaaaaccgtggccgtgaacttcctgctgaccgccaagctgttcttcctccgcgccaagagaagcggatctggcgtgaagcagaccctgaatttcgacctgctgaagctggctggcgacgtggaatccaacccaggcccttctagaggccatatgaccgagtacaagcccacggtgcgcctcgccacccgcgacgacgtccccagggccgtacgcaccctcgccgccgcgttcgccgactaccccgccacgcgccacaccgtcgatccggaccgccacatcgagcgggtcaccgagctgcaagaactcttcctcacgcgcgtcgggctcgacatcggcaaggtgtgggtcgcggacgacggcgccgcggtggcggtctggaccacgccggagagcgtcgaagcgggggcggtgttcgccgagatcggcccgcgcatggccgagttgagcggttcccggctggccgcgcagcaacagatggaaggcctcctggcgccgcaccggcccaaggagcccgcgtggttcctggccaccgtcggcgtctcgcccgaccaccagggcaagggtctgggcagcgccgtcgtgctccccggagtggaggcggccgagcgcgccggggtgcccgccttcctggagacctccgcgccccgcaacctccccttctacgagcggctcggcttcaccgtcaccgccgacgtcgaggtgcccgaaggaccgcgcacctggtgcatgacccgcaagcccggtgcctga

SEQ ID NO: 19841 - DNA, 3099 bp, synthetic construct
  source 1..3099: mol_type = other DNA
atggccttaccagtgaccgccttgctcctgccgctggccttgctgctccacgccgccaggccggacatcgtgctgacacagagccctgccaccctgtctctgagccctggcgatagagccaccatcagctgtagagccagcgagagcgtgaccatcctgggcagccacctgatccactggtatcagcagaagcccggccagccccccagactgctgattcagctggcctccaatgtgcagaccggcgtgccagccagattttccggcagcggcagcagaaccgacttcaccctgaccatcagcagcgtggaacccgaggacttcgccgtgtactactgcctccagagccggaccatccccagaacattcggccagggcaccaagctggaaatcaagagaggacagcctaaggccaatcctaccgtgacactgttccctccaagcagcgaagaactccaggccaacaaggccacacttgtgtgcctgatctccgacttctaccctggggctgtgacagtggcttggaaggccgatggatctcctgtgaaagccggcgtggaaaccaccaagccatccaagcagagcaacaacaaatacgccgccagctcctacctgagcctgacacctgagcagtggaagtcccacagatcctacagctgccaagtgacccacgaaggcagcaccgtggaaaagacagtggcccctacagagtgcagcggatcccagagcttcggcctgctggaccccaagctgtgctacctgctggatggcatcctgttcatctacggcgtgatcctgaccgccctgttcctgagagtgaagttcagcagaagcgccgacgcccctgcctaccagcagggacagaaccaactgtacaacgagctgaacctgggcagacgggaagagtacgacgtgctggacaagcggagaggcagggaccctgagatgggcggaaagccccagcggagaaagaacccccaggaaggactgtataacgaactccagaaagacaagatggccgaagcctacagcgagatcggcatgaagggcgagcggagaagaggcaagggccacgatggcctgtaccagggcctgagcaccgccaccaaggacacctatgacgccctgcacatgcaggccctgcctccaagaagggccaagcgatctggatctggagcaacaaacttctcactactcaaacaagcaggtgacgtggaggagaatcccgggcctactagtatggactggatttggcgcatccttttccttgtcggcgctgctaccggcgcgcattccttcgaacaggtgcagctggtgcagtctggccccgaagtgaagaaacccggcgagtccgtgaagatcagctgcaaggccagcggctacaccttccggcactacagcatgaactgggtcaagcaggccccaggccagggcctgaagtggatgggcagaatcaacaccgagagcggcgtgcccatctacgccgacgacttcaagggccggttcagcttcaccgtggacaccagcgccagcaccgcctacctggaaatctccagcctgaccagcgaggataccgccgtgtatttctgctccaacgactacctgtacagcctggatttctggggccagggaaccaccctgacagtgtcctctgcctctacaaagggaccctccgtgtttcctctggctcccagcagcaagtctacaagcggaggaacagccgctctgggctgcctggtcaaggattactttcccgagcctgtgaccgtgtcctggaatagcggagcactgacaagcggcgtgcacacctttccagccgtgctgcaaagcagcggcctgtactctctgagcagcgtggtcacagtgcctagctctagcctgggcacccagacctacatctgcaatgtgaaccacaagcctagcaacaccaaggtggacaagagagtggaacccaagagctgtggtacccagagttttgggttgttggaccctaaattgtgctatctgttggacggaatcctgttcatttacggagtgatcctgaccgcattgttcctgcgggttaagttttccagatccgcagacgcacccgcttaccaacaagggcagaaccaactctacaatgaacttaatttggggcggagggaagagtacgacgttctggacaaaaggaggggacgagatcccgagatgggcggaaagcctcagcgaaggaagaatccgcaagaggggctttataacgaactccagaaagataaaatggcagaagcctatagtgagattgggatgaagggagaaaggaggaggggtaaaggtcacgatgggttgtaccaaggattgagcacagccactaaagatacctatgatgcgctccacatgcaggccctgccgccaagacgcgccaagagaagcggatctggcgtgaagcagaccctgaatttcgacctgctgaagctggctggcgacgtggaatccaacccaggcccttctagaggccatatgaccgagtacaagcccacggtgcgcctcgccacccgcgacgacgtccccagggccgtacgcaccctcgccgccgcgttcgccgactaccccgccacgcgccacaccgtcgatccggaccgccacatcgagcgggtcaccgagctgcaagaactcttcctcacgcgcgtcgggctcgacatcggcaaggtgtgggtcgcggacgacggcgccgcggtggcggtctggaccacgccggagagcgtcgaagcgggggcggtgttcgccgagatcggcccgcgcatggccgagttgagcggttcccggctggccgcgcagcaacagatggaaggcctcctggcgccgcaccggcccaaggagcccgcgtggttcctggccaccgtcggcgtctcgcccgaccaccagggcaagggtctgggcagcgccgtcgtgctccccggagtggaggcggccgagcgcgccggggtgcccgccttcctggagacctccgcgccccgcaacctccccttctacgagcggctcggcttcaccgtcaccgccgacgtcgaggtgcccgaaggaccgcgcacctggtgcatgacccgcaagcccggtgcctga

SEQ ID NO: 19842 - DNA, 2454 bp, synthetic construct
  source 1..2454: mol_type = other DNA
atggccttaccagtgaccgccttgctcctgccgctggccttgctgctccacgccgccaggccggacatcgtgctgacacagagccctgccaccctgtctctgagccctggcgatagagccaccatcagctgtagagccagcgagagcgtgaccatcctgggcagccacctgatccactggtatcagcagaagcccggccagccccccagactgctgattcagctggcctccaatgtgcagaccggcgtgccagccagattttccggcagcggcagcagaaccgacttcaccctgaccatcagcagcgtggaacccgaggacttcgccgtgtactactgcctccagagccggaccatccccagaacattcggccagggcaccaagctggaaatcaagagactcgaggacctgaagaacgtgttcccacctgaggtggccgtgttcgagcctagcgaggccgagatcagccacacccagaaagccaccctcgtgtgcctggctaccggcttctaccccgaccatgtggaactgtcttggtgggtcaacggcaaagaggtgcacagcggcgtgtctaccgacccccagccactgaaagaacagcccgccctgaacgacagccggtactgcctgagcagcagactgagagtgtccgccaccttctggcagaacccccggaaccacttcagatgccaggtgcagttctacggcctgagcgagaacgacgagtggacccaggacagagccaagcccgtgacccagatcgtgtctgccgaagcctggggcagagccgattgcggatcccagagcttcggcctgctggaccccaagctgtgctacctgctggatggcatcctgttcatctacggcgtgatcctgaccgccctgttcctgagagtgaagttcagcagaagcgccgacgcccctgcctaccagcagggacagaaccaactgtacaacgagctgaacctgggcagacgggaagagtacgacgtgctggacaagcggagaggcagggaccctgagatgggcggaaagccccagcggagaaagaacccccaggaaggactgtataacgaactccagaaagacaagatggccgaagcctacagcgagatcggcatgaagggcgagcggagaagaggcaagggccacgatggcctgtaccagggcctgagcaccgccaccaaggacacctatgacgccctgcacatgcaggccctgcctccaagaagggccaagcgatctggatctggagcaacaaacttctcactactcaaacaagcaggtgacgtggaggagaatcccgggcctactagtatggactggatttggcgcatccttttccttgtcggcgctgctaccggcgcgcattccttcgaacaggtgcagctggtgcagtctggccccgaagtgaagaaacccggcgagtccgtgaagatcagctgcaaggccagcggctacaccttccggcactacagcatgaactgggtcaagcaggccccaggccagggcctgaagtggatgggcagaatcaacaccgagagcggcgtgcccatctacgccgacgacttcaagggccggttcagcttcaccgtggacaccagcgccagcaccgcctacctggaaatctccagcctgaccagcgaggataccgccgtgtatttctgctccaacgactacctgtacagcctggatttctggggccagggaaccaccctgacagtgtcctctacgcgtatccagaaccctgatcctgccgtgtaccagctgcgggatagcaagagcagcgacaagagcgtgtgtctgttcaccgacttcgacagccagaccaacgtgtcccagagcaaggactccgacgtgtacatcaccgataagaccgtgctggacatgcggagcatggacttcaagagcaactccgccgtggcctggtccaacaagtccgatttcgcctgcgccaacgccttcaacaacagcattatccccgaggacacattcttcccaagccccgagagcagctgcggtacccagagttttgggttgttggaccctaaattgtgctatctgttggacggaatcctgttcatttacggagtgatcctgaccgcattgttcctgcgggttaagttttccagatccgcagacgcacccgcttaccaacaagggcagaaccaactctacaatgaacttaatttggggcggagggaagagtacgacgttctggacaaaaggaggggacgagatcccgagatgggcggaaagcctcagcgaaggaagaatccgcaagaggggctttataacgaactccagaaagataaaatggcagaagcctatagtgagattgggatgaagggagaaaggaggaggggtaaaggtcacgatgggttgtaccaaggattgagcacagccactaaagatacctatgatgcgctccacatgcaggccctgccgccaaga

SEQ ID NO: 19843 - DNA, 2454 bp, synthetic construct
  source 1..2454: mol_type = other DNA
atggccttaccagtgaccgccttgctcctgccgctggccttgctgctccacgccgccaggccggacatcgtgctgacacagagccctgccaccctgtctctgagccctggcgatagagccaccatcagctgtagagccagcgagagcgtgaccatcctgggcagccacctgatccactggtatcagcagaagcccggccagccccccagactgctgattcagctggcctccaatgtgcagaccggcgtgccagccagattttccggcagcggcagcagaaccgacttcaccctgaccatcagcagcgtggaacccgaggacttcgccgtgtactactgcctccagagccggaccatccccagaacattcggccagggcaccaagctggaaatcaagagactcgaggacctgaagaacgtgttcccacctgaggtggccgtgttcgagcctagcaaggccgagatcgcccacacccagaaagccaccctcgtgtgcctggctaccggcttctaccccgaccatgtggaactgtcttggtgggtcaacggcaaagaggtgcacagcggcgtgtgtaccgacccccagccactgaaagaacagcccgccctgaacgacagccggtactgcctgagcagcagactgagagtgtccgccaccttctggcagaacccccggaaccacttcagatgccaggtgcagttctacggcctgagcgagaacgacgagtggacccaggacagagccaagcccgtgacccagatcgtgtctgccgaagcctggggcagagccgattgcggatcccagagcttcggcctgctggaccccaagctgtgctacctgctggatggcatcctgttcatctacggcgtgatcctgaccgccctgttcctgagagtgaagttcagcagaagcgccgacgcccctgcctaccagcagggacagaaccaactgtacaacgagctgaacctgggcagacgggaagagtacgacgtgctggacaagcggagaggcagggaccctgagatgggcggaaagccccagcggagaaagaacccccaggaaggactgtataacgaactccagaaagacaagatggccgaagcctacagcgagatcggcatgaagggcgagcggagaagaggcaagggccacgatggcctgtaccagggcctgagcaccgccaccaaggacacctatgacgccctgcacatgcaggccctgcctccaagaagggccaagcgatctggatctggagcaacaaacttctcactactcaaacaagcaggtgacgtggaggagaatcccgggcctactagtatggactggatttggcgcatccttttccttgtcggcgctgctaccggcgcgcattccttcgaacaggtgcagctggtgcagtctggccccgaagtgaagaaacccggcgagtccgtgaagatcagctgcaaggccagcggctacaccttccggcactacagcatgaactgggtcaagcaggccccaggccagggcctgaagtggatgggcagaatcaacaccgagagcggcgtgcccatctacgccgacgacttcaagggccggttcagcttcaccgtggacaccagcgccagcaccgcctacctggaaatctccagcctgaccagcgaggataccgccgtgtatttctgctccaacgactacctgtacagcctggatttctggggccagggaaccaccctgacagtgtcctctacgcgtatccagaaccctgatcctgccgtgtaccagctgcgggatagcaagagcagcgacaagagcgtgtgtctgttcaccgacttcgacagccagaccaacgtgtcccagagcaaggactccgacgtgtacatcaccgataagtgcgtgctggacatgcggagcatggacttcaagagcaactccgccgtggcctggtccaacaagtccgatttcgcctgcgccaacgccttcaacaacagcattatccccgaggacacattcttcccaagcagcgacgtgccctgcggtacccagagttttgggttgttggaccctaaattgtgctatctgttggacggaatcctgttcatttacggagtgatcctgaccgcattgttcctgcgggttaagttttccagatccgcagacgcacccgcttaccaacaagggcagaaccaactctacaatgaacttaatttggggcggagggaagagtacgacgttctggacaaaaggaggggacgagatcccgagatgggcggaaagcctcagcgaaggaagaatccgcaagaggggctttataacgaactccagaaagataaaatggcagaagcctatagtgagattgggatgaagggagaaaggaggaggggtaaaggtcacgatgggttgtaccaaggattgagcacagccactaaagatacctatgatgcgctccacatgcaggccctgccgccaaga

SEQ ID NO: 19844 - DNA, 2667 bp, synthetic construct
  source 1..2667: mol_type = other DNA
atggccttaccagtgaccgccttgctcctgccgctggccttgctgctccacgccgccaggccggacatcgtgctgacacagagccctgccaccctgtctctgagccctggcgatagagccaccatcagctgtagagccagcgagagcgtgaccatcctgggcagccacctgatccactggtatcagcagaagcccggccagccccccagactgctgattcagctggcctccaatgtgcagaccggcgtgccagccagattttccggcagcggcagcagaaccgacttcaccctgaccatcagcagcgtggaacccgaggacttcgccgtgtactactgcctccagagccggaccatccccagaacattcggccagggcaccaagctggaaatcaagagactcgaggggaaaccaattcccaaccctcttctgggactggattcaaccggcagcggcgaggacctgaagaacgtgttcccacctgaggtggccgtgttcgagcctagcgaggccgagatcagccacacccagaaagccaccctcgtgtgcctggctaccggcttctaccccgaccatgtggaactgtcttggtgggtcaacggcaaagaggtgcacagcggcgtgtctaccgacccccagccactgaaagaacagcccgccctgaacgacagccggtactgcctgagcagcagactgagagtgtccgccaccttctggcagaacccccggaaccacttcagatgccaggtgcagttctacggcctgagcgagaacgacgagtggacccaggacagagccaagcccgtgacccagatcgtgtctgccgaagcctggggcagagccgattgcggatcccagagcttcggcctgctggaccccaagctgtgctacctgctggatggcatcctgttcatctacggcgtgatcctgaccgccctgttcctgagagtgaagttcagcagaagcgccgacgcccctgcctaccagcagggacagaaccaactgtacaacgagctgaacctgggcagacgggaagagtacgacgtgctggacaagcggagaggcagggaccctgagatgggcggaaagccccagcggagaaagaacccccaggaaggactgtataacgaactccagaaagacaagatggccgaagcctacagcgagatcggcatgaagggcgagcggagaagaggcaagggccacgatggcctgtaccagggcctgagcaccgccaccaaggacacctatgacgccctgcacatgcaggccctgcctccaagaagggccaagcgatctggatctggagcaacaaacttctcactactcaaacaagcaggtgacgtggaggagaatcccgggcctactagtatggactggatttggcgcatccttttccttgtcggcgctgctaccggcgcgcattccttcgaacaggtgcagctggtgcagtctggccccgaagtgaagaaacccggcgagtccgtgaagatcagctgcaaggccagcggctacaccttccggcactacagcatgaactgggtcaagcaggccccaggccagggcctgaagtggatgggcagaatcaacaccgagagcggcgtgcccatctacgccgacgacttcaagggccggttcagcttcaccgtggacaccagcgccagcaccgcctacctggaaatctccagcctgaccagcgaggataccgccgtgtatttctgctccaacgactacctgtacagcctggatttctggggccagggaaccaccctgacagtgtcctctacgcgtgagcagaaactgatctcggaagaggatgggagcggcatccagaaccctgatcctgccgtgtaccagctgcgggatagcaagagcagcgacaagagcgtgtgtctgttcaccgacttcgacagccagaccaacgtgtcccagagcaaggactccgacgtgtacatcaccgataagaccgtgctggacatgcggagcatggacttcaagagcaactccgccgtggcctggtccaacaagtccgatttcgcctgcgccaacgccttcaacaacagcattatccccgaggacacattcttcccaagccccgagagcagctgcggtacccagagttttgggttgttggaccctaaattgtgctatctgttggacggaatcctgttcatttacggagtgatcctgaccgcattgttcctgaggagcaagcggtcacggctgctccacagcgattacatgaatatgacaccacgaagaccgggtcctactcgcaaacactaccaaccctacgcacctccccgcgactttgcagcgtaccgatctcgggttaagttttccagatccgcagacgcacccgcttaccaacaagggcagaaccaactctacaatgaacttaatttggggcggagggaagagtacgacgttctggacaaaaggaggggacgagatcccgagatgggcggaaagcctcagcgaaggaagaatccgcaagaggggctttataacgaactccagaaagataaaatggcagaagcctatagtgagattgggatgaagggagaaaggaggaggggtaaaggtcacgatgggttgtaccaaggattgagcacagccactaaagatacctatgatgcgctccacatgcaggccctgccgccaaga

SEQ ID NO: 19845 - DNA, 2790 bp, synthetic construct
  source 1..2790: mol_type = other DNA
atggccttaccagtgaccgccttgctcctgccgctggccttgctgctccacgccgccaggccggacatcgtgctgacacagagccctgccaccctgtctctgagccctggcgatagagccaccatcagctgtagagccagcgagagcgtgaccatcctgggcagccacctgatccactggtatcagcagaagcccggccagccccccagactgctgattcagctggcctccaatgtgcagaccggcgtgccagccagattttccggcagcggcagcagaaccgacttcaccctgaccatcagcagcgtggaacccgaggacttcgccgtgtactactgcctccagagccggaccatccccagaacattcggccagggcaccaagctggaaatcaagagactcgaggggaaaccaattcccaaccctcttctgggactggattcaaccggcagcggcgaggacctgaagaacgtgttcccacctgaggtggccgtgttcgagcctagcgaggccgagatcagccacacccagaaagccaccctcgtgtgcctggctaccggcttctaccccgaccatgtggaactgtcttggtgggtcaacggcaaagaggtgcacagcggcgtgtctaccgacccccagccactgaaagaacagcccgccctgaacgacagccggtactgcctgagcagcagactgagagtgtccgccaccttctggcagaacccccggaaccacttcagatgccaggtgcagttctacggcctgagcgagaacgacgagtggacccaggacagagccaagcccgtgacccagatcgtgtctgccgaagcctggggcagagccgattgcggatcccagagcttcggcctgctggaccccaagctgtgctacctgctggatggcatcctgttcatctacggcgtgatcctgaccgccctgttcctgaggagtaagaggagcaggctcctgcacagtgactacatgaacatgactccacgccgccccggacccacccgcaagcattaccagccctatgccccaccacgcgacttcgcagcctatcgctccagagtgaagttcagcagaagcgccgacgcccctgcctaccagcagggacagaaccaactgtacaacgagctgaacctgggcagacgggaagagtacgacgtgctggacaagcggagaggcagggaccctgagatgggcggaaagccccagcggagaaagaacccccaggaaggactgtataacgaactccagaaagacaagatggccgaagcctacagcgagatcggcatgaagggcgagcggagaagaggcaagggccacgatggcctgtaccagggcctgagcaccgccaccaaggacacctatgacgccctgcacatgcaggccctgcctccaagaagggccaagcgatctggatctggagcaacaaacttctcactactcaaacaagcaggtgacgtggaggagaatcccgggcctactagtatggactggatttggcgcatccttttccttgtcggcgctgctaccggcgcgcattccttcgaacaggtgcagctggtgcagtctggccccgaagtgaagaaacccggcgagtccgtgaagatcagctgcaaggccagcggctacaccttccggcactacagcatgaactgggtcaagcaggccccaggccagggcctgaagtggatgggcagaatcaacaccgagagcggcgtgcccatctacgccgacgacttcaagggccggttcagcttcaccgtggacaccagcgccagcaccgcctacctggaaatctccagcctgaccagcgaggataccgccgtgtatttctgctccaacgactacctgtacagcctggatttctggggccagggaaccaccctgacagtgtcctctacgcgtgagcagaaactgatctcggaagaggatgggagcggcatccagaaccctgatcctgccgtgtaccagctgcgggatagcaagagcagcgacaagagcgtgtgtctgttcaccgacttcgacagccagaccaacgtgtcccagagcaaggactccgacgtgtacatcaccgataagaccgtgctggacatgcggagcatggacttcaagagcaactccgccgtggcctggtccaacaagtccgatttcgcctgcgccaacgccttcaacaacagcattatccccgaggacacattcttcccaagccccgagagcagctgcggtacccagagttttgggttgttggaccctaaattgtgctatctgttggacggaatcctgttcatttacggagtgatcctgaccgcattgttcctgaggagcaagcggtcacggctgctccacagcgattacatgaatatgacaccacgaagaccgggtcctactcgcaaacactaccaaccctacgcacctccccgcgactttgcagcgtaccgatctcgggttaagttttccagatccgcagacgcacccgcttaccaacaagggcagaaccaactctacaatgaacttaatttggggcggagggaagagtacgacgttctggacaaaaggaggggacgagatcccgagatgggcggaaagcctcagcgaaggaagaatccgcaagaggggctttataacgaactccagaaagataaaatggcagaagcctatagtgagattgggatgaagggagaaaggaggaggggtaaaggtcacgatgggttgtaccaaggattgagcacagccactaaagatacctatgatgcgctccacatgcaggccctgccgccaaga

SEQ ID NO: 19846 - DNA, 2673 bp, synthetic construct
  source 1..2673: mol_type = other DNA
atggccttaccagtgaccgccttgctcctgccgctggccttgctgctccacgccgccaggccggacatcgtgctgacacagagccctgccaccctgtctctgagccctggcgatagagccaccatcagctgtagagccagcgagagcgtgaccatcctgggcagccacctgatccactggtatcagcagaagcccggccagccccccagactgctgattcagctggcctccaatgtgcagaccggcgtgccagccagattttccggcagcggcagcagaaccgacttcaccctgaccatcagcagcgtggaacccgaggacttcgccgtgtactactgcctccagagccggaccatccccagaacattcggccagggcaccaagctggaaatcaagagactcgaggggaaaccaattcccaaccctcttctgggactggattcaaccggcagcggcgaggacctgaagaacgtgttcccacctgaggtggccgtgttcgagcctagcgaggccgagatcagccacacccagaaagccaccctcgtgtgcctggctaccggcttctaccccgaccatgtggaactgtcttggtgggtcaacggcaaagaggtgcacagcggcgtgtctaccgacccccagccactgaaagaacagcccgccctgaacgacagccggtactgcctgagcagcagactgagagtgtccgccaccttctggcagaacccccggaaccacttcagatgccaggtgcagttctacggcctgagcgagaacgacgagtggacccaggacagagccaagcccgtgacccagatcgtgtctgccgaagcctggggcagagccgattgcggatcccagagcttcggcctgctggaccccaagctgtgctacctgctggatggcatcctgttcatctacggcgtgatcctgaccgccctgttcctgagagtgaagttcagcagaagcgccgacgcccctgcctaccagcagggacagaaccaactgtacaacgagctgaacctgggcagacgggaagagtacgacgtgctggacaagcggagaggcagggaccctgagatgggcggaaagccccagcggagaaagaacccccaggaaggactgtataacgaactccagaaagacaagatggccgaagcctacagcgagatcggcatgaagggcgagcggagaagaggcaagggccacgatggcctgtaccagggcctgagcaccgccaccaaggacacctatgacgccctgcacatgcaggccctgcctccaagaagggccaagcgatctggatctggagcaacaaacttctcactactcaaacaagcaggtgacgtggaggagaatcccgggcctactagtatggactggatttggcgcatccttttccttgtcggcgctgctaccggcgcgcattccttcgaacaggtgcagctggtgcagtctggccccgaagtgaagaaacccggcgagtccgtgaagatcagctgcaaggccagcggctacaccttccggcactacagcatgaactgggtcaagcaggccccaggccagggcctgaagtggatgggcagaatcaacaccgagagcggcgtgcccatctacgccgacgacttcaagggccggttcagcttcaccgtggacaccagcgccagcaccgcctacctggaaatctccagcctgaccagcgaggataccgccgtgtatttctgctccaacgactacctgtacagcctggatttctggggccagggaaccaccctgacagtgtcctctacgcgtgagcagaaactgatctcggaagaggatctggggagcggcatccagaaccctgatcctgccgtgtaccagctgcgggatagcaagagcagcgacaagagcgtgtgtctgttcaccgacttcgacagccagaccaacgtgtcccagagcaaggactccgacgtgtacatcaccgataagaccgtgctggacatgcggagcatggacttcaagagcaactccgccgtggcctggtccaacaagtccgatttcgcctgcgccaacgccttcaacaacagcattatccccgaggacacattcttcccaagccccgagagcagctgcggtacccagagttttgggttgttggaccctaaattgtgctatctgttggacggaatcctgttcatttacggagtgatcctgaccgcattgttcctgaagagaggccggaagaagctgctgtacatcttcaagcagcctttcatgcggcccgtgcagaccacccaggaagaggacggctgctcctgccggttccccgaggaagaagaaggcggctgcgagctgcgggttaagttttccagatccgcagacgcacccgcttaccaacaagggcagaaccaactctacaatgaacttaatttggggcggagggaagagtacgacgttctggacaaaaggaggggacgagatcccgagatgggcggaaagcctcagcgaaggaagaatccgcaagaggggctttataacgaactccagaaagataaaatggcagaagcctatagtgagattgggatgaagggagaaaggaggaggggtaaaggtcacgatgggttgtaccaaggattgagcacagccactaaagatacctatgatgcgctccacatgcaggccctgccgccaaga

SEQ ID NO: 19847 - DNA, 2799 bp, synthetic construct
  source 1..2799: mol_type = other DNA
atggccttaccagtgaccgccttgctcctgccgctggccttgctgctccacgccgccaggccggacatcgtgctgacacagagccctgccaccctgtctctgagccctggcgatagagccaccatcagctgtagagccagcgagagcgtgaccatcctgggcagccacctgatccactggtatcagcagaagcccggccagccccccagactgctgattcagctggcctccaatgtgcagaccggcgtgccagccagattttccggcagcggcagcagaaccgacttcaccctgaccatcagcagcgtggaacccgaggacttcgccgtgtactactgcctccagagccggaccatccccagaacattcggccagggcaccaagctggaaatcaagagactcgaggggaaaccaattcccaaccctcttctgggactggattcaaccggcagcggcgaggacctgaagaacgtgttcccacctgaggtggccgtgttcgagcctagcgaggccgagatcagccacacccagaaagccaccctcgtgtgcctggctaccggcttctaccccgaccatgtggaactgtcttggtgggtcaacggcaaagaggtgcacagcggcgtgtctaccgacccccagccactgaaagaacagcccgccctgaacgacagccggtactgcctgagcagcagactgagagtgtccgccaccttctggcagaacccccggaaccacttcagatgccaggtgcagttctacggcctgagcgagaacgacgagtggacccaggacagagccaagcccgtgacccagatcgtgtctgccgaagcctggggcagagccgattgcggatcccagagcttcggcctgctggaccccaagctgtgctacctgctggatggcatcctgttcatctacggcgtgatcctgaccgccctgttcctgaaacggggcagaaagaaactcctgtatatattcaaacaaccatttatgagaccagtacaaactactcaagaggaagatggctgtagctgccgatttccagaagaagaagaaggaggatgtgaactgagagtgaagttcagcagaagcgccgacgcccctgcctaccagcagggacagaaccaactgtacaacgagctgaacctgggcagacgggaagagtacgacgtgctggacaagcggagaggcagggaccctgagatgggcggaaagccccagcggagaaagaacccccaggaaggactgtataacgaactccagaaagacaagatggccgaagcctacagcgagatcggcatgaagggcgagcggagaagaggcaagggccacgatggcctgtaccagggcctgagcaccgccaccaaggacacctatgacgccctgcacatgcaggccctgcctccaagaagggccaagcgatctggatctggagcaacaaacttctcactactcaaacaagcaggtgacgtggaggagaatcccgggcctactagtatggactggatttggcgcatccttttccttgtcggcgctgctaccggcgcgcattccttcgaacaggtgcagctggtgcagtctggccccgaagtgaagaaacccggcgagtccgtgaagatcagctgcaaggccagcggctacaccttccggcactacagcatgaactgggtcaagcaggccccaggccagggcctgaagtggatgggcagaatcaacaccgagagcggcgtgcccatctacgccgacgacttcaagggccggttcagcttcaccgtggacaccagcgccagcaccgcctacctggaaatctccagcctgaccagcgaggataccgccgtgtatttctgctccaacgactacctgtacagcctggatttctggggccagggaaccaccctgacagtgtcctctacgcgtgagcagaaactgatctcggaagaggatctggggagcggcatccagaaccctgatcctgccgtgtaccagctgcgggatagcaagagcagcgacaagagcgtgtgtctgttcaccgacttcgacagccagaccaacgtgtcccagagcaaggactccgacgtgtacatcaccgataagaccgtgctggacatgcggagcatggacttcaagagcaactccgccgtggcctggtccaacaagtccgatttcgcctgcgccaacgccttcaacaacagcattatccccgaggacacattcttcccaagccccgagagcagctgcggtacccagagttttgggttgttggaccctaaattgtgctatctgttggacggaatcctgttcatttacggagtgatcctgaccgcattgttcctgaagagaggccggaagaagctgctgtacatcttcaagcagcctttcatgcggcccgtgcagaccacccaggaagaggacggctgctcctgccggttccccgaggaagaagaaggcggctgcgagctgcgggttaagttttccagatccgcagacgcacccgcttaccaacaagggcagaaccaactctacaatgaacttaatttggggcggagggaagagtacgacgttctggacaaaaggaggggacgagatcccgagatgggcggaaagcctcagcgaaggaagaatccgcaagaggggctttataacgaactccagaaagataaaatggcagaagcctatagtgagattgggatgaagggagaaaggaggaggggtaaaggtcacgatgggttgtaccaaggattgagcacagccactaaagatacctatgatgcgctccacatgcaggccctgccgccaaga

SEQ ID NO: 19848 - DNA, 2472 bp, synthetic construct
  source 1..2472: mol_type = other DNA
atggccttaccagtgaccgccttgctcctgccgctggccttgctgctccacgccgccaggccggacatcgtgctgacacagagccctgccaccctgtctctgagccctggcgatagagccaccatcagctgtagagccagcgagagcgtgaccatcctgggcagccacctgatccactggtatcagcagaagcccggccagccccccagactgctgattcagctggcctccaatgtgcagaccggcgtgccagccagattttccggcagcggcagcagaaccgacttcaccctgaccatcagcagcgtggaacccgaggacttcgccgtgtactactgcctccagagccggaccatccccagaacattcggccagggcaccaagctggaaatcaagagactcgagcagagcttcggcctgctggaccccaagctgtgctacctgctggatggcatcctgttcatctacggcgtgatcctgaccgccctgttcctgagagtgaagttcagcagaagcgccgacgcccctgcctaccagcagggacagaaccaactgtacaacgagctgaacctgggcagacgggaagagtacgacgtgctggacaagcggagaggcagggaccctgagatgggcggaaagccccagcggagaaagaacccccaggaaggactgtataacgaactccagaaagacaagatggccgaagcctacagcgagatcggcatgaagggcgagcggagaagaggcaagggccacgatggcctgtaccagggcctgagcaccgccaccaaggacacctatgacgccctgcacatgcaggccctgcctccaagaagggccaagcgatctggatctggagcaacaaacttctcactactcaaacaagcaggtgacgtggaggagaatcccgggcctactagtatggactggatttggcgcatccttttccttgtcggcgctgctaccggcgcgcattccttcgaacaggtgcagctggtgcagtctggccccgaagtgaagaaacccggcgagtccgtgaagatcagctgcaaggccagcggctacaccttccggcactacagcatgaactgggtcaagcaggccccaggccagggcctgaagtggatgggcagaatcaacaccgagagcggcgtgcccatctacgccgacgacttcaagggccggttcagcttcaccgtggacaccagcgccagcaccgcctacctggaaatctccagcctgaccagcgaggataccgccgtgtatttctgctccaacgactacctgtacagcctggatttctggggccagggaaccaccctgacagtgtcctctacgcgtcagagttttgggttgttggaccctaaattgtgctatctgttggacggaatcctgttcatttacggagtgatcctgaccgcattgttcctgcgggttaagttttccagatccgcagacgcacccgcttaccaacaagggcagaaccaactctacaatgaacttaatttggggcggagggaagagtacgacgttctggacaaaaggaggggacgagatcccgagatgggcggaaagcctcagcgaaggaagaatccgcaagaggggctttataacgaactccagaaagataaaatggcagaagcctatagtgagattgggatgaagggagaaaggaggaggggtaaaggtcacgatgggttgtaccaaggattgagcacagccactaaagatacctatgatgcgctccacatgcaggccctgccgccaagacgcgccaagagaagcggatctggcgtgaagcagaccctgaatttcgacctgctgaagctggctggcgacgtggaatccaacccaggcccttctagaggccatatgaccgagtacaagcccacggtgcgcctcgccacccgcgacgacgtccccagggccgtacgcaccctcgccgccgcgttcgccgactaccccgccacgcgccacaccgtcgatccggaccgccacatcgagcgggtcaccgagctgcaagaactcttcctcacgcgcgtcgggctcgacatcggcaaggtgtgggtcgcggacgacggcgccgcggtggcggtctggaccacgccggagagcgtcgaagcgggggcggtgttcgccgagatcggcccgcgcatggccgagttgagcggttcccggctggccgcgcagcaacagatggaaggcctcctggcgccgcaccggcccaaggagcccgcgtggttcctggccaccgtcggcgtctcgcccgaccaccagggcaagggtctgggcagcgccgtcgtgctccccggagtggaggcggccgagcgcgccggggtgcccgccttcctggagacctccgcgccccgcaacctccccttctacgagcggctcggcttcaccgtcaccgccgacgtcgaggtgcccgaaggaccgcgcacctggtgcatgacccgcaagcccggtgcctga

SEQ ID NO: 19849 - DNA, 1944 bp, synthetic construct
  source 1..1944: mol_type = other DNA
atggccttaccagtgaccgccttgctcctgccgctggccttgctgctccacgccgccaggccggacatcgtgctgacacagagccctgccaccctgtctctgagccctggcgatagagccaccatcagctgtagagccagcgagagcgtgaccatcctgggcagccacctgatccactggtatcagcagaagcccggccagccccccagactgctgattcagctggcctccaatgtgcagaccggcgtgccagccagattttccggcagcggcagcagaaccgacttcaccctgaccatcagcagcgtggaacccgaggacttcgccgtgtactactgcctccagagccggaccatccccagaacattcggccagggcaccaagctggaaatcaagagactcgagggacagcctaaggccaatcctaccgtgacactgttccctccaagcagcgaagaactccaggccaacaaggccacacttgtgtgcctgatctccgacttctaccctggggctgtgacagtggcttggaaggccgatggatctcctgtgaaagccggcgtggaaaccaccaagccatccaagcagagcaacaacaaatacgccgccagctcctacctgagcctgacacctgagcagtggaagtcccacagatcctacagctgccaagtgacccacgaaggcagcaccgtggaaaagacagtggcccctacagagtgcagccccatcaagaccgatgtgattacaatggaccccaaggacaactgctccaaggacgccaacgataccctgctgctccagctgaccaacaccagcgcctactacatgtacttgttgctgctgctgaagtccgtggtgtacttcgccatcatcacatgctgcctgctgcggagaaccgccttctgctgcaacggcgagaagtctagggccaagcgatctggatctggagcaacaaacttctcactactcaaacaagcaggtgacgtggaggagaatcccgggcctactagtatggactggatttggcgcatccttttccttgtcggcgctgctaccggcgcgcattccttcgaacaggtgcagctggtgcagtctggccccgaagtgaagaaacccggcgagtccgtgaagatcagctgcaaggccagcggctacaccttccggcactacagcatgaactgggtcaagcaggccccaggccagggcctgaagtggatgggcagaatcaacaccgagagcggcgtgcccatctacgccgacgacttcaagggccggttcagcttcaccgtggacaccagcgccagcaccgcctacctggaaatctccagcctgaccagcgaggataccgccgtgtatttctgctccaacgactacctgtacagcctggatttctggggccagggaaccaccctgacagtgtcctctacgcgtgcctctacaaagggaccctccgtgtttcctctggctcccagcagcaagtctacaagcggaggaacagccgctctgggctgcctggtcaaggattactttcccgagcctgtgaccgtgtcctggaatagcggagcactgacaagcggcgtgcacacctttccagccgtgctgcaaagcagcggcctgtactctctgagcagcgtggtcacagtgcctagctctagcctgggcacccagacctacatctgcaatgtgaaccacaagcctagcaacaccaaggtggacaagagagtggaacccaagagctgtgaagtgaaaaccgactccaccgaccacgtgaagcccaaagagacagagaacaccaagcagcccagcaagagctgccacaagcccaaggccatcgtgcacaccgagaaagtgaacatgatgagcctgaccgtgctgggcctgcggatgctgttcgccaaaaccgtggccgtgaacttcctgctgaccgccaagctgttcttcctc

SEQ ID NO: 19850 - DNA, 1878 bp, synthetic construct
  source 1..1878: mol_type = other DNA
atggccttaccagtgaccgccttgctcctgccgctggccttgctgctccacgccgccaggccggacatcgtgctgacacagagccctgccaccctgtctctgagccctggcgatagagccaccatcagctgtagagccagcgagagcgtgaccatcctgggcagccacctgatccactggtatcagcagaagcccggccagccccccagactgctgattcagctggcctccaatgtgcagaccggcgtgccagccagattttccggcagcggcagcagaaccgacttcaccctgaccatcagcagcgtggaacccgaggacttcgccgtgtactactgcctccagagccggaccatccccagaacattcggccagggcaccaagctggaaatcaagagactcgagggacagcctaaggccaatcctaccgtgacactgttccctccaagcagcgaagaactccaggccaacaaggccacacttgtgtgcctgatctccgacttctaccctggggctgtgacagtggcttggaaggccgatggatctcctgtgaaagccggcgtggaaaccaccaagccatccaagcagagcaacaacaaatacgccgccagctcctacctgagcctgacacctgagcagtggaagtcccacagatcctacagctgccaagtgacccacgaaggcagcaccgtggaaaagacagtggcccctacagagtgcagcggcagagccgattgcggcatcaccagcgccagctaccaccagggcgtgctgagcgccaccatcctgtacgagatcctgctgggcaaggccaccctgtacgccgtgctggtgtctgccctggtgctgatggctatggtcaagcggaaggacagccggggaagggccaagcgatctggatctggagcaacaaacttctcactactcaaacaagcaggtgacgtggaggagaatcccgggcctactagtatggactggatttggcgcatccttttccttgtcggcgctgctaccggcgcgcattccttcgaacaggtgcagctggtgcagtctggccccgaagtgaagaaacccggcgagtccgtgaagatcagctgcaaggccagcggctacaccttccggcactacagcatgaactgggtcaagcaggccccaggccagggcctgaagtggatgggcagaatcaacaccgagagcggcgtgcccatctacgccgacgacttcaagggccggttcagcttcaccgtggacaccagcgccagcaccgcctacctggaaatctccagcctgaccagcgaggataccgccgtgtatttctgctccaacgactacctgtacagcctggatttctggggccagggaaccaccctgacagtgtcctctacgcgtgcctctacaaagggaccctccgtgtttcctctggctcccagcagcaagtctacaagcggaggaacagccgctctgggctgcctggtcaaggattactttcccgagcctgtgaccgtgtcctggaatagcggagcactgacaagcggcgtgcacacctttccagccgtgctgcaaagcagcggcctgtactctctgagcagcgtggtcacagtgcctagctctagcctgggcacccagacctacatctgcaatgtgaaccacaagcctagcaacaccaaggtggacaagagagtggaacccaagagctgtatccccgaggacacattcttcccaagcagcgacgtgccctgcgacgtgaagctggtggaaaagagcttcgagacagacaccaacctgaacttccagaacctgagcgtgatcggcttcagaatcctgctgctgaaagtggccggctttaacctgctgatgaccctgcggctgtggtccagc

SEQ ID NO: 19851 - DNA, 1878 bp, synthetic construct
  source 1..1878: mol_type = other DNA
atggccttaccagtgaccgccttgctcctgccgctggccttgctgctccacgccgccaggccggacatcgtgctgacacagagccctgccaccctgtctctgagccctggcgatagagccaccatcagctgtagagccagcgagagcgtgaccatcctgggcagccacctgatccactggtatcagcagaagcccggccagccccccagactgctgattcagctggcctccaatgtgcagaccggcgtgccagccagattttccggcagcggcagcagaaccgacttcaccctgaccatcagcagcgtggaacccgaggacttcgccgtgtactactgcctccagagccggaccatccccagaacattcggccagggcaccaagctggaaatcaagagactcgagggacagcctaaggccaatcctaccgtgacactgttccctccaagcagcgaagaactccaggccaacaaggccacacttgtgtgcctgatctccgacttctaccctggggctgtgacagtggcttggaaggccgatggatctcctgtgaaagccggcgtggaaaccaccaagccatccaagcagagcaacaacaaatacgccgccagctcctacctgagcctgacacctgagcagtggaagtcccacagatcctacagctgccaagtgacccacgaaggcagcaccgtggaaaagacagtggcccctacagagtgcagcggcagagccgattgcggctttaccagcgagagctaccagcagggcgtgctgagcgccaccatcctgtacgagatcctgctgggcaaggccaccctgtacgccgtgctggtgtctgccctggtgctgatggctatggtcaagcggaaggacagccggggaagggccaagcgatctggatctggagcaacaaacttctcactactcaaacaagcaggtgacgtggaggagaatcccgggcctactagtatggactggatttggcgcatccttttccttgtcggcgctgctaccggcgcgcattccttcgaacaggtgcagctggtgcagtctggccccgaagtgaagaaacccggcgagtccgtgaagatcagctgcaaggccagcggctacaccttccggcactacagcatgaactgggtcaagcaggccccaggccagggcctgaagtggatgggcagaatcaacaccgagagcggcgtgcccatctacgccgacgacttcaagggccggttcagcttcaccgtggacaccagcgccagcaccgcctacctggaaatctccagcctgaccagcgaggataccgccgtgtatttctgctccaacgactacctgtacagcctggatttctggggccagggaaccaccctgacagtgtcctctacgcgtgcctctacaaagggaccctccgtgtttcctctggctcccagcagcaagtctacaagcggaggaacagccgctctgggctgcctggtcaaggattactttcccgagcctgtgaccgtgtcctggaatagcggagcactgacaagcggcgtgcacacctttccagccgtgctgcaaagcagcggcctgtactctctgagcagcgtggtcacagtgcctagctctagcctgggcacccagacctacatctgcaatgtgaaccacaagcctagcaacaccaaggtggacaagagagtggaacccaagagctgtatccccgaggacacattcttcccaagccccgagagcagctgcgacgtgaagctggtggaaaagagcttcgagacagacaccaacctgaacttccagaacctgagcgtgatcggcttcagaatcctgctgctgaaagtggccggctttaacctgctgatgaccctgcggctgtggtccagc

SEQ ID NO: 19852 - DNA, 1356 bp, synthetic construct
  source 1..1356: mol_type = other DNA
atggccttaccagtgaccgccttgctcctgccgctggccttgctgctccacgccgccaggccggacatcgtgctgacacagagccctgccaccctgtctctgagccctggcgatagagccaccatcagctgtagagccagcgagagcgtgaccatcctgggcagccacctgatccactggtatcagcagaagcccggccagccccccagactgctgattcagctggcctccaatgtgcagaccggcgtgccagccagattttccggcagcggcagcagaaccgacttcaccctgaccatcagcagcgtggaacccgaggacttcgccgtgtactactgcctccagagccggaccatccccagaacattcggccagggcaccaagctggaaatcaagagaggcggaggcggaagtggaggcggaggatctggcggcggaggctctcaggtgcagctggtgcagtctggccccgaagtgaagaaacccggcgagtccgtgaagatcagctgcaaggccagcggctacaccttccggcactacagcatgaactgggtcaagcaggccccaggccagggcctgaagtggatgggcagaatcaacaccgagagcggcgtgcccatctacgccgacgacttcaagggccggttcagcttcaccgtggacaccagcgccagcaccgcctacctggaaatctccagcctgaccagcgaggataccgccgtgtatttctgctccaacgactacctgtacagcctggatttctggggccagggaaccaccctgacagtgtcctctacgcgtgacggtaacgaggagatgggaggaatcactcaaaccccttacaaagtctcaatttcaggaacaactgttatccttacatgtccccagtatcctggcagcgagatcctttggcagcataacgacaagaatatagggggagatgaagacgataagaatatcggatctgacgaggatcacttgagcctgaaagagttctccgagcttgaacaaagcggatattatgtgtgctatccgcgcgggtcaaagccggaagacgctaacttttacctttatctccgagccagagtgtgcgaaaattgcatggaaatggacgttatgtccgttgctacaatagttatcgtagatatatgcatcacgggtggactgcttctgctggtttattattggtccaagaatagaaaggccaaagctaaacccgtgaccagaggcgctggcgcaggcggaaggcaaaggggacaaaacaaagaacggccaccaccagtgccaaatccagattatgagcctattcggaaaggacagagggacctgtactctggcctgaatcagagaagaatc

SEQ ID NO: 19853 - DNA, 1251 bp, synthetic construct
  source 1..1251: mol_type = other DNA
atggccttaccagtgaccgccttgctcctgccgctggccttgctgctccacgccgccaggccggacatcgtgctgacacagagccctgccaccctgtctctgagccctggcgatagagccaccatcagctgtagagccagcgagagcgtgaccatcctgggcagccacctgatccactggtatcagcagaagcccggccagccccccagactgctgattcagctggcctccaatgtgcagaccggcgtgccagccagattttccggcagcggcagcagaaccgacttcaccctgaccatcagcagcgtggaacccgaggacttcgccgtgtactactgcctccagagccggaccatccccagaacattcggccagggcaccaagctggaaatcaagagaggcggaggcggaagtggaggcggaggatctggcggcggaggctctcaggtgcagctggtgcagtctggccccgaagtgaagaaacccggcgagtccgtgaagatcagctgcaaggccagcggctacaccttccggcactacagcatgaactgggtcaagcaggccccaggccagggcctgaagtggatgggcagaatcaacaccgagagcggcgtgcccatctacgccgacgacttcaagggccggttcagcttcaccgtggacaccagcgccagcaccgcctacctggaaatctccagcctgaccagcgaggataccgccgtgtatttctgctccaacgactacctgtacagcctggatttctggggccagggaaccaccctgacagtgtcctctacgcgtttcaagatccccatcgaggaactggaagatcgggtgttcgtgaactgcaacacctctatcacctgggtggaaggcaccgtgggaacactgctgagcgacatcaccagactggacctcggcaagcggattctggaccctcggggcatctacagatgcaacggcaccgacatctacaaggacaaagaaagcaccgtgcaggtccactacagaatgtgccagtcctgcgtggaactggaccctgctacagtggccggcatcatcgtgaccgatgtgatcgctactctgctgctggctctgggagtgttctgcttcgccggacacgaaacaggcagactgtctggcgctgccgatacacaggccctgctgagaaacgaccaagtgtatcagcccctgcgcgacagagatgatgcccagtattctcacctcggcggcaactgggctagaaacaag

SEQ ID NO: 19854 - DNA, 1281 bp, synthetic construct
  source 1..1281: mol_type = other DNA
atggccttaccagtgaccgccttgctcctgccgctggccttgctgctccacgccgccaggccggacatcgtgctgacacagagccctgccaccctgtctctgagccctggcgatagagccaccatcagctgtagagccagcgagagcgtgaccatcctgggcagccacctgatccactggtatcagcagaagcccggccagccccccagactgctgattcagctggcctccaatgtgcagaccggcgtgccagccagattttccggcagcggcagcagaaccgacttcaccctgaccatcagcagcgtggaacccgaggacttcgccgtgtactactgcctccagagccggaccatccccagaacattcggccagggcaccaagctggaaatcaagagaggcggaggcggaagtggaggcggaggatctggcggcggaggctctcaggtgcagctggtgcagtctggccccgaagtgaagaaacccggcgagtccgtgaagatcagctgcaaggccagcggctacaccttccggcactacagcatgaactgggtcaagcaggccccaggccagggcctgaagtggatgggcagaatcaacaccgagagcggcgtgcccatctacgccgacgacttcaagggccggttcagcttcaccgtggacaccagcgccagcaccgcctacctggaaatctccagcctgaccagcgaggataccgccgtgtatttctgctccaacgactacctgtacagcctggatttctggggccagggaaccaccctgacagtgtcctctacgcgtcagagcatcaagggcaaccacctggtcaaggtgtacgactaccaagaggacggcagcgtgctgctgacatgtgatgccgaggccaagaacatcacctggtttaaggacggcaagatgatcggcttcctgaccgaggacaagaagaagtggaacctgggcagcaacgctaaggaccccagaggcatgtatcagtgcaagggcagccagaacaagagcaagcccctccaggtgtactaccggatgtgccagaactgcatcgagctgaacgccgctaccatcagcggctttctgttcgccgagatcgtgtccatcttcgtgctggccgtgggcgtgtactttatcgctggacaggatggcgtgcggcagagcagagcttccgataagcaaaccctgctgcctaacgaccagctgtaccagcctctgaaggacagagaggacgaccagtacagccacctccagggcaatcagctgagaagaaac

SEQ ID NO: 19855 - DNA, 1230 bp, synthetic construct
  source 1..1230: mol_type = other DNA
atggccttaccagtgaccgccttgctcctgccgctggccttgctgctccacgccgccaggccggacatcgtgctgacacagagccctgccaccctgtctctgagccctggcgatagagccaccatcagctgtagagccagcgagagcgtgaccatcctgggcagccacctgatccactggtatcagcagaagcccggccagccccccagactgctgattcagctggcctccaatgtgcagaccggcgtgccagccagattttccggcagcggcagcagaaccgacttcaccctgaccatcagcagcgtggaacccgaggacttcgccgtgtactactgcctccagagccggaccatccccagaacattcggccagggcaccaagctggaaatcaagagaggcggaggcggaagtggaggcggaggatctggcggcggaggctctcaggtgcagctggtgcagtctggccccgaagtgaagaaacccggcgagtccgtgaagatcagctgcaaggccagcggctacaccttccggcactacagcatgaactgggtcaagcaggccccaggccagggcctgaagtggatgggcagaatcaacaccgagagcggcgtgcccatctacgccgacgacttcaagggccggttcagcttcaccgtggacaccagcgccagcaccgcctacctggaaatctccagcctgaccagcgaggataccgccgtgtatttctgctccaacgactacctgtacagcctggatttctggggccagggaaccaccctgacagtgtcctctacgcgtcagagttttgggttgttggaccctaaattgtgctatctgttggacggaatcctgttcatttacggagtgatcctgaccgcattgttcctgcgggttaagttttccagatccgcagacgcacccgcttaccaacaagggcagaaccaactctacaatgaacttaatttggggcggagggaagagtacgacgttctggacaaaaggaggggacgagatcccgagatgggcggaaagcctcagcgaaggaagaatccgcaagaggggctttataacgaactccagaaagataaaatggcagaagcctatagtgagattgggatgaagggagaaaggaggaggggtaaaggtcacgatgggttgtaccaaggattgagcacagccactaaagatacctatgatgcgctccacatgcaggccctgccgccaaga

SEQ ID NO: 19856 - DNA, 1356 bp, synthetic construct
  source 1..1356: mol_type = other DNA
atggccttaccagtgaccgccttgctcctgccgctggccttgctgctccacgccgccaggccgcaggtgcagctggtgcagtctggccccgaagtgaagaaacccggcgagtccgtgaagatcagctgcaaggccagcggctacaccttccggcactacagcatgaactgggtcaagcaggccccaggccagggcctgaagtggatgggcagaatcaacaccgagagcggcgtgcccatctacgccgacgacttcaagggccggttcagcttcaccgtggacaccagcgccagcaccgcctacctggaaatctccagcctgaccagcgaggataccgccgtgtatttctgctccaacgactacctgtacagcctggatttctggggccagggaaccaccctgacagtgtcctctggcggaggcggaagtggaggcggaggatctggcggcggaggctctgacatcgtgctgacacagagccctgccaccctgtctctgagccctggcgatagagccaccatcagctgtagagccagcgagagcgtgaccatcctgggcagccacctgatccactggtatcagcagaagcccggccagccccccagactgctgattcagctggcctccaatgtgcagaccggcgtgccagccagattttccggcagcggcagcagaaccgacttcaccctgaccatcagcagcgtggaacccgaggacttcgccgtgtactactgcctccagagccggaccatccccagaacattcggccagggcaccaagctggaaatcaagagaacgcgtgacggtaacgaggagatgggaggaatcactcaaaccccttacaaagtctcaatttcaggaacaactgttatccttacatgtccccagtatcctggcagcgagatcctttggcagcataacgacaagaatatagggggagatgaagacgataagaatatcggatctgacgaggatcacttgagcctgaaagagttctccgagcttgaacaaagcggatattatgtgtgctatccgcgcgggtcaaagccggaagacgctaacttttacctttatctccgagccagagtgtgcgaaaattgcatggaaatggacgttatgtccgttgctacaatagttatcgtagatatatgcatcacgggtggactgcttctgctggtttattattggtccaagaatagaaaggccaaagctaaacccgtgaccagaggcgctggcgcaggcggaaggcaaaggggacaaaacaaagaacggccaccaccagtgccaaatccagattatgagcctattcggaaaggacagagggacctgtactctggcctgaatcagagaagaatc

SEQ ID NO: 19857 - DNA, 1251 bp, synthetic construct
  source 1..1251: mol_type = other DNA
atggccttaccagtgaccgccttgctcctgccgctggccttgctgctccacgccgccaggccgcaggtgcagctggtgcagtctggccccgaagtgaagaaacccggcgagtccgtgaagatcagctgcaaggccagcggctacaccttccggcactacagcatgaactgggtcaagcaggccccaggccagggcctgaagtggatgggcagaatcaacaccgagagcggcgtgcccatctacgccgacgacttcaagggccggttcagcttcaccgtggacaccagcgccagcaccgcctacctggaaatctccagcctgaccagcgaggataccgccgtgtatttctgctccaacgactacctgtacagcctggatttctggggccagggaaccaccctgacagtgtcctctggcggaggcggaagtggaggcggaggatctggcggcggaggctctgacatcgtgctgacacagagccctgccaccctgtctctgagccctggcgatagagccaccatcagctgtagagccagcgagagcgtgaccatcctgggcagccacctgatccactggtatcagcagaagcccggccagccccccagactgctgattcagctggcctccaatgtgcagaccggcgtgccagccagattttccggcagcggcagcagaaccgacttcaccctgaccatcagcagcgtggaacccgaggacttcgccgtgtactactgcctccagagccggaccatccccagaacattcggccagggcaccaagctggaaatcaagagaacgcgtttcaagatccccatcgaggaactggaagatcgggtgttcgtgaactgcaacacctctatcacctgggtggaaggcaccgtgggaacactgctgagcgacatcaccagactggacctcggcaagcggattctggaccctcggggcatctacagatgcaacggcaccgacatctacaaggacaaagaaagcaccgtgcaggtccactacagaatgtgccagtcctgcgtggaactggaccctgctacagtggccggcatcatcgtgaccgatgtgatcgctactctgctgctggctctgggagtgttctgcttcgccggacacgaaacaggcagactgtctggcgctgccgatacacaggccctgctgagaaacgaccaagtgtatcagcccctgcgcgacagagatgatgcccagtattctcacctcggcggcaactgggctagaaacaag

SEQ ID NO: 19858 - DNA, 1281 bp, synthetic construct
  source 1..1281: mol_type = other DNA
atggccttaccagtgaccgccttgctcctgccgctggccttgctgctccacgccgccaggccgcaggtgcagctggtgcagtctggccccgaagtgaagaaacccggcgagtccgtgaagatcagctgcaaggccagcggctacaccttccggcactacagcatgaactgggtcaagcaggccccaggccagggcctgaagtggatgggcagaatcaacaccgagagcggcgtgcccatctacgccgacgacttcaagggccggttcagcttcaccgtggacaccagcgccagcaccgcctacctggaaatctccagcctgaccagcgaggataccgccgtgtatttctgctccaacgactacctgtacagcctggatttctggggccagggaaccaccctgacagtgtcctctggcggaggcggaagtggaggcggaggatctggcggcggaggctctgacatcgtgctgacacagagccctgccaccctgtctctgagccctggcgatagagccaccatcagctgtagagccagcgagagcgtgaccatcctgggcagccacctgatccactggtatcagcagaagcccggccagccccccagactgctgattcagctggcctccaatgtgcagaccggcgtgccagccagattttccggcagcggcagcagaaccgacttcaccctgaccatcagcagcgtggaacccgaggacttcgccgtgtactactgcctccagagccggaccatccccagaacattcggccagggcaccaagctggaaatcaagagaacgcgtcagagcatcaagggcaaccacctggtcaaggtgtacgactaccaagaggacggcagcgtgctgctgacatgtgatgccgaggccaagaacatcacctggtttaaggacggcaagatgatcggcttcctgaccgaggacaagaagaagtggaacctgggcagcaacgctaaggaccccagaggcatgtatcagtgcaagggcagccagaacaagagcaagcccctccaggtgtactaccggatgtgccagaactgcatcgagctgaacgccgctaccatcagcggctttctgttcgccgagatcgtgtccatcttcgtgctggccgtgggcgtgtactttatcgctggacaggatggcgtgcggcagagcagagcttccgataagcaaaccctgctgcctaacgaccagctgtaccagcctctgaaggacagagaggacgaccagtacagccacctccagggcaatcagctgagaagaaac

SEQ ID NO: 19859 - DNA, 1230 bp, synthetic construct
  source 1..1230: mol_type = other DNA
atggccttaccagtgaccgccttgctcctgccgctggccttgctgctccacgccgccaggccgcaggtgcagctggtgcagtctggccccgaagtgaagaaacccggcgagtccgtgaagatcagctgcaaggccagcggctacaccttccggcactacagcatgaactgggtcaagcaggccccaggccagggcctgaagtggatgggcagaatcaacaccgagagcggcgtgcccatctacgccgacgacttcaagggccggttcagcttcaccgtggacaccagcgccagcaccgcctacctggaaatctccagcctgaccagcgaggataccgccgtgtatttctgctccaacgactacctgtacagcctggatttctggggccagggaaccaccctgacagtgtcctctggcggaggcggaagtggaggcggaggatctggcggcggaggctctgacatcgtgctgacacagagccctgccaccctgtctctgagccctggcgatagagccaccatcagctgtagagccagcgagagcgtgaccatcctgggcagccacctgatccactggtatcagcagaagcccggccagccccccagactgctgattcagctggcctccaatgtgcagaccggcgtgccagccagattttccggcagcggcagcagaaccgacttcaccctgaccatcagcagcgtggaacccgaggacttcgccgtgtactactgcctccagagccggaccatccccagaacattcggccagggcaccaagctggaaatcaagagaacgcgtcagagttttgggttgttggaccctaaattgtgctatctgttggacggaatcctgttcatttacggagtgatcctgaccgcattgttcctgcgggttaagttttccagatccgcagacgcacccgcttaccaacaagggcagaaccaactctacaatgaacttaatttggggcggagggaagagtacgacgttctggacaaaaggaggggacgagatcccgagatgggcggaaagcctcagcgaaggaagaatccgcaagaggggctttataacgaactccagaaagataaaatggcagaagcctatagtgagattgggatgaagggagaaaggaggaggggtaaaggtcacgatgggttgtaccaaggattgagcacagccactaaagatacctatgatgcgctccacatgcaggccctgccgccaaga

SEQ ID NO: 19860 - DNA, 1515 bp, synthetic construct
  source 1..1515: mol_type = other DNA
atggccttaccagtgaccgccttgctcctgccgctggccttgctgctccacgccgccaggccggacatcgtgctgacacagagccctgccaccctgtctctgagccctggcgatagagccaccatcagctgtagagccagcgagagcgtgaccatcctgggcagccacctgatccactggtatcagcagaagcccggccagccccccagactgctgattcagctggcctccaatgtgcagaccggcgtgccagccagattttccggcagcggcagcagaaccgacttcaccctgaccatcagcagcgtggaacccgaggacttcgccgtgtactactgcctccagagccggaccatccccagaacattcggccagggcaccaagctggaaatcaagagaggcggaggcggaagtggaggcggaggatctggcggcggaggctctcaggtgcagctggtgcagtctggccccgaagtgaagaaacccggcgagtccgtgaagatcagctgcaaggccagcggctacaccttccggcactacagcatgaactgggtcaagcaggccccaggccagggcctgaagtggatgggcagaatcaacaccgagagcggcgtgcccatctacgccgacgacttcaagggccggttcagcttcaccgtggacaccagcgccagcaccgcctacctggaaatctccagcctgaccagcgaggataccgccgtgtatttctgctccaacgactacctgtacagcctggatttctggggccagggaaccaccctgacagtgtcctctacgcgtggaatgaggactgaggatcttcccaaagctgtcgtctttctcgaaccccaatggtatcgggtgctcgaaaaagactctgtgacactgaaatgccaaggggcctactctcccgaggacaactccacacagtggtttcataatgagtccctcatcagctctcaggccagctcttatttcattgatgccgctacagtggacgactccggcgagtatcggtgtcagaccaatctgtctacactgtctgaccccgtgcagcttgaggtccacattggatggttgctcttgcaagccccacgctgggttttcaaagaggaagatccaatccatctgcggtgccacagctggaaaaacaccgctctccacaaagtcacatacctgcaaaatggcaaaggacgcaaatacttccatcacaattccgatttttacattccgaaggctaccctgaaagacagcggcagctatttctgccggggactcgtcggctccaagaatgtgtcctccgaaaccgtgaatatcacgattacccaaggactggctgtgcctacaatctctagcttctttccgcctggataccaagtctccttctgtcttgtgatggtcctcctgtttgctgtggacacaggactgtacttttccgtgaaaacgaacatccgcagctccacacgcgattggaaagatcacaagtttaaatggcgcaaagatccccaggacaag

SEQ ID NO: 19861 - DNA, 2364 bp, synthetic construct
  source 1..2364: mol_type = other DNA
atggccttaccagtgaccgccttgctcctgccgctggccttgctgctccacgccgccaggccggacatcgtgctgacacagagccctgccaccctgtctctgagccctggcgatagagccaccatcagctgtagagccagcgagagcgtgaccatcctgggcagccacctgatccactggtatcagcagaagcccggccagccccccagactgctgattcagctggcctccaatgtgcagaccggcgtgccagccagattttccggcagcggcagcagaaccgacttcaccctgaccatcagcagcgtggaacccgaggacttcgccgtgtactactgcctccagagccggaccatccccagaacattcggccagggcaccaagctggaaatcaagagaggcggaggcggaagtggaggcggaggatctggcggcggaggctctcaggtgcagctggtgcagtctggccccgaagtgaagaaacccggcgagtccgtgaagatcagctgcaaggccagcggctacaccttccggcactacagcatgaactgggtcaagcaggccccaggccagggcctgaagtggatgggcagaatcaacaccgagagcggcgtgcccatctacgccgacgacttcaagggccggttcagcttcaccgtggacaccagcgccagcaccgcctacctggaaatctccagcctgaccagcgaggataccgccgtgtatttctgctccaacgactacctgtacagcctggatttctggggccagggaaccaccctgacagtgtcctctacgcgtggaggctctggacaacaacagaccctgcctaaaccattcatctgggctgaaccccactttatggttccgaaagagaaacaagtcacgatttgttgccaagggaattacggggccgtcgagtatcagctccactttgagggctccctgtttgctgtggatcggcccaagccacctgaaagaatcaacaaagtccaattctatattcctgatatgaactcccgcatggcaggccagtattcatgtatctaccgcgtgggagaactttggagtgaaccctctaacctgctggacctcgtcgtgacagagatgtatgatacacccacactgtctgtgcaccctgggccagaagttatcagcggagaaaaagttaccttttattgccgcctcgataccgctacctctatgttcctcttgctgaaagagggccgcagctctcacgtgcagcgaggctacggaaaggtccaagctgagtttcctctcggccccgtgaccaccgctcacaggggcacatatagatgttttggctcttataacaatcatgcctggtcattcccatccgagcctgtgaaactgctggtcacaggcgatattgagaatacctctctggccccagaagatcctacattccccgccgacacatggggaacatatctgctgacaaccgaaaccgggctgcaaaaggaccatgctctgtgggatcataccgctcagaatctgcttcggatggggcttgcattcctggtcctggtggctcttgtctggtttctggtcgaggactggctgtcccggaagagaaccagagaaagagcttccagggccagcacctgggaaggcagacgcagactgaatactcagaccctgcgcgccaagagaagcggatctggcgtgaagcagaccctgaatttcgacctgctgaagctggctggcgacgtggaatccaacccaggcccttctagaggccatatgaccgagtacaagcccacggtgcgcctcgccacccgcgacgacgtccccagggccgtacgcaccctcgccgccgcgttcgccgactaccccgccacgcgccacaccgtcgatccggaccgccacatcgagcgggtcaccgagctgcaagaactcttcctcacgcgcgtcgggctcgacatcggcaaggtgtgggtcgcggacgacggcgccgcggtggcggtctggaccacgccggagagcgtcgaagcgggggcggtgttcgccgagatcggcccgcgcatggccgagttgagcggttcccggctggccgcgcagcaacagatggaaggcctcctggcgccgcaccggcccaaggagcccgcgtggttcctggccaccgtcggcgtctcgcccgaccaccagggcaagggtctgggcagcgccgtcgtgctccccggagtggaggcggccgagcgcgccggggtgcccgccttcctggagacctccgcgccccgcaacctccccttctacgagcggctcggcttcaccgtcaccgccgacgtcgaggtgcccgaaggaccgcgcacctggtgcatgacccgcaagcccggtgcctga

SEQ ID NO: 19862 - DNA, 1863 bp, synthetic construct
  source 1..1863: mol_type = other DNA
atggccttaccagtgaccgccttgctcctgccgctggccttgctgctccacgccgccaggccggacatcgtgctgacacagagccctgccaccctgtctctgagccctggcgatagagccaccatcagctgtagagccagcgagagcgtgaccatcctgggcagccacctgatccactggtatcagcagaagcccggccagccccccagactgctgattcagctggcctccaatgtgcagaccggcgtgccagccagattttccggcagcggcagcagaaccgacttcaccctgaccatcagcagcgtggaacccgaggacttcgccgtgtactactgcctccagagccggaccatccccagaacattcggccagggcaccaagctggaaatcaagagaggcggaggcggaagtggaggcggaggatctggcggcggaggctctcaggtgcagctggtgcagtctggccccgaagtgaagaaacccggcgagtccgtgaagatcagctgcaaggccagcggctacaccttccggcactacagcatgaactgggtcaagcaggccccaggccagggcctgaagtggatgggcagaatcaacaccgagagcggcgtgcccatctacgccgacgacttcaagggccggttcagcttcaccgtggacaccagcgccagcaccgcctacctggaaatctccagcctgaccagcgaggataccgccgtgtatttctgctccaacgactacctgtacagcctggatttctggggccagggaaccaccctgacagtgtcctctacgcgtaaaattgaagttatgtatcctcctccttacctagacaatgagaagagcaatggaaccattatccatgtgaaaggggcgcgtggcgatattgagaatacctctctggccccagaagatcctacattccccgccgacacatggggaacatatctgctgacaaccgaaaccgggctgcaaaaggaccatgctctgtgggatcataccgctcagaatctgcttcggatggggcttgcattcctggtcctggtggctcttgtctggtttctggtcgaggactggctgtcccggaagagaaccagagaaagagcttccagggccagcacctgggaaggcagacgcagactgaatactcagaccctgcgcgccaagagaagcggatctggcgtgaagcagaccctgaatttcgacctgctgaagctggctggcgacgtggaatccaacccaggcccttctagaggccatatgaccgagtacaagcccacggtgcgcctcgccacccgcgacgacgtccccagggccgtacgcaccctcgccgccgcgttcgccgactaccccgccacgcgccacaccgtcgatccggaccgccacatcgagcgggtcaccgagctgcaagaactcttcctcacgcgcgtcgggctcgacatcggcaaggtgtgggtcgcggacgacggcgccgcggtggcggtctggaccacgccggagagcgtcgaagcgggggcggtgttcgccgagatcggcccgcgcatggccgagttgagcggttcccggctggccgcgcagcaacagatggaaggcctcctggcgccgcaccggcccaaggagcccgcgtggttcctggccaccgtcggcgtctcgcccgaccaccagggcaagggtctgggcagcgccgtcgtgctccccggagtggaggcggccgagcgcgccggggtgcccgccttcctggagacctccgcgccccgcaacctccccttctacgagcggctcggcttcaccgtcaccgccgacgtcgaggtgcccgaaggaccgcgcacctggtgcatgacccgcaagcccggtgcctga

SEQ ID NO: 19863 - DNA, 2124 bp, synthetic construct
  source 1..2124: mol_type = other DNA
atggccttaccagtgaccgccttgctcctgccgctggccttgctgctccacgccgccaggccggacatcgtgctgacacagagccctgccaccctgtctctgagccctggcgatagagccaccatcagctgtagagccagcgagagcgtgaccatcctgggcagccacctgatccactggtatcagcagaagcccggccagccccccagactgctgattcagctggcctccaatgtgcagaccggcgtgccagccagattttccggcagcggcagcagaaccgacttcaccctgaccatcagcagcgtggaacccgaggacttcgccgtgtactactgcctccagagccggaccatccccagaacattcggccagggcaccaagctggaaatcaagagaggcggaggcggaagtggaggcggaggatctggcggcggaggctctcaggtgcagctggtgcagtctggccccgaagtgaagaaacccggcgagtccgtgaagatcagctgcaaggccagcggctacaccttccggcactacagcatgaactgggtcaagcaggccccaggccagggcctgaagtggatgggcagaatcaacaccgagagcggcgtgcccatctacgccgacgacttcaagggccggttcagcttcaccgtggacaccagcgccagcaccgcctacctggaaatctccagcctgaccagcgaggataccgccgtgtatttctgctccaacgactacctgtacagcctggatttctggggccagggaaccaccctgacagtgtcctctacgcgtctgtgggtgtcccagccacctgaaattcggacactggaaggctcctccgcctttctgccctgtagctttaacgccagccaggggagactcgccatcggctctgtgacatggttccgggatgaagtcgtccctggaaaagaagttcgcaacggaacaccagagttcagaggcagactcgccccactggcaagctccagattcctgcatgaccatcaggctgaactgcacattagggacgtgcggggccacgatgcctccatctatgtgtgtcgggtcgaagtgcttggactcggcgtcggaactggaaacggcactaggctggtggtcgagaaagaacatccacagcttggcgctggcaccgtcctgttgcttagagccggattctatgccgtcagcttcctgtccgtggctgtggggtctacagtgtattaccagggaaaatgtctcacctggaaaggccccagacgccagcttccagctgttgttcctgctccactgccaccaccttgtggctcctctgctcacttgcttccaccagtgcctggcggacgcgccaagagaagcggatctggcgtgaagcagaccctgaatttcgacctgctgaagctggctggcgacgtggaatccaacccaggcccttctagaatgtaccggatgcagctgctgagctgtatcgccctgtctctggccctggtcacaaatagcgcccctaccagcagcagcaccaagaaaacccagctgcaactggaacacctcctgctggacctccagatgatcctgaacggcatcaacaactacaagaaccccaagctgaccgagatgctgaccgccaagttctacatgcccaagaaggccaccgagctgaagcacctccagtgcctggaagaggaactgaagcccctggaagaagtgctgaatctggcccagagcaagaacttccacctgaggccaagggacctgatctccaacatcaacgtgatcgtgctggaactgaaaggcagcgagacaaccttcatgtgcgagtacgccgacgagacagctaccatcgtggaatttctgaatcggtggatcaccttctgccagagcatcatcagcaccctgacaaagatcgaagtgatgtaccctcctccttacctggacaacgagaagtccaacggcaccatcatccacgtgaagggcaagcacctgtgtccttctccactgttccccggacctagcaagcctttctgggtgctcgttgttgttggcggcgtgctggcctgttacagcctgctggttaccgtggccttcatcatcttttgggtccgaagcaagcggagctaa

SEQ ID NO: 19864 - DNA, 2052 bp, synthetic construct
  source 1..2052: mol_type = other DNA
atggccttaccagtgaccgccttgctcctgccgctggccttgctgctccacgccgccaggccggacatcgtgctgacacagagccctgccaccctgtctctgagccctggcgatagagccaccatcagctgtagagccagcgagagcgtgaccatcctgggcagccacctgatccactggtatcagcagaagcccggccagccccccagactgctgattcagctggcctccaatgtgcagaccggcgtgccagccagattttccggcagcggcagcagaaccgacttcaccctgaccatcagcagcgtggaacccgaggacttcgccgtgtactactgcctccagagccggaccatccccagaacattcggccagggcaccaagctggaaatcaagagaggcggaggcggaagtggaggcggaggatctggcggcggaggctctcaggtgcagctggtgcagtctggccccgaagtgaagaaacccggcgagtccgtgaagatcagctgcaaggccagcggctacaccttccggcactacagcatgaactgggtcaagcaggccccaggccagggcctgaagtggatgggcagaatcaacaccgagagcggcgtgcccatctacgccgacgacttcaagggccggttcagcttcaccgtggacaccagcgccagcaccgcctacctggaaatctccagcctgaccagcgaggataccgccgtgtatttctgctccaacgactacctgtacagcctggatttctggggccagggaaccaccctgacagtgtcctctacgcgtctgtgggtgtcccagccacctgaaattcggacactggaaggctcctccgcctttctgccctgtagctttaacgccagccaggggagactcgccatcggctctgtgacatggttccgggatgaagtcgtccctggaaaagaagttcgcaacggaacaccagagttcagaggcagactcgccccactggcaagctccagattcctgcatgaccatcaggctgaactgcacattagggacgtgcggggccacgatgcctccatctatgtgtgtcgggtcgaagtgcttggactcggcgtcggaactggaaacggcactaggctggtggtcgagaaagaacatccacagcttggcgctggcaccgtcctgttgcttagagccggattctatgccgtcagcttcctgtccgtggctgtggggtctacagtgtattaccagggaaaatgtctcacctggaaaggccccagacgccagcttccagctgttgttcctgctccactgccaccaccttgtggctcctctgctcacttgcttccaccagtgcctggcggacgcgccaagagaagcggatctggcgtgaagcagaccctgaatttcgacctgctgaagctggctggcgacgtggaatccaacccaggcccttctagaggccatatgaccgagtacaagcccacggtgcgcctcgccacccgcgacgacgtccccagggccgtacgcaccctcgccgccgcgttcgccgactaccccgccacgcgccacaccgtcgatccggaccgccacatcgagcgggtcaccgagctgcaagaactcttcctcacgcgcgtcgggctcgacatcggcaaggtgtgggtcgcggacgacggcgccgcggtggcggtctggaccacgccggagagcgtcgaagcgggggcggtgttcgccgagatcggcccgcgcatggccgagttgagcggttcccggctggccgcgcagcaacagatggaaggcctcctggcgccgcaccggcccaaggagcccgcgtggttcctggccaccgtcggcgtctcgcccgaccaccagggcaagggtctgggcagcgccgtcgtgctccccggagtggaggcggccgagcgcgccggggtgcccgccttcctggagacctccgcgccccgcaacctccccttctacgagcggctcggcttcaccgtcaccgccgacgtcgaggtgcccgaaggaccgcgcacctggtgcatgacccgcaagcccggtgcctga

SEQ ID NO: 19865 - DNA, 1077 bp, synthetic construct
  source 1..1077: mol_type = other DNA
atggccttaccagtgaccgccttgctcctgccgctggccttgctgctccacgccgccaggccggacatcgtgctgacacagagccctgccaccctgtctctgagccctggcgatagagccaccatcagctgtagagccagcgagagcgtgaccatcctgggcagccacctgatccactggtatcagcagaagcccggccagccccccagactgctgattcagctggcctccaatgtgcagaccggcgtgccagccagattttccggcagcggcagcagaaccgacttcaccctgaccatcagcagcgtggaacccgaggacttcgccgtgtactactgcctccagagccggaccatccccagaacattcggccagggcaccaagctggaaatcaagagaggcggaggcggaagtggaggcggaggatctggcggcggaggctctcaggtgcagctggtgcagtctggccccgaagtgaagaaacccggcgagtccgtgaagatcagctgcaaggccagcggctacaccttccggcactacagcatgaactgggtcaagcaggccccaggccagggcctgaagtggatgggcagaatcaacaccgagagcggcgtgcccatctacgccgacgacttcaagggccggttcagcttcaccgtggacaccagcgccagcaccgcctacctggaaatctccagcctgaccagcgaggataccgccgtgtatttctgctccaacgactacctgtacagcctggatttctggggccagggaaccaccctgacagtgtcctctacgcgtaaaattgaagttatgtatcctcctccttacctagacaatgagaagagcaatggaaccattatccatgtgaaaggggcgcgtatcacccagggcctggccgtgtctaccatcagcagctttttcccacccggctaccaggtgtccttctgcctcgtgatggtgctgctgttcgccgtggacaccggcctgtacttcagcgtgaaaacaaacatccggtccagcaccagagactggaaggaccacaagttcaagtggcggaaggacccccaggacaag

SEQ ID NO: 19866 - DNA, 1077 bp, synthetic construct
  source 1..1077: mol_type = other DNA
atggccttaccagtgaccgccttgctcctgccgctggccttgctgctccacgccgccaggccggacatcgtgctgacacagagccctgccaccctgtctctgagccctggcgatagagccaccatcagctgtagagccagcgagagcgtgaccatcctgggcagccacctgatccactggtatcagcagaagcccggccagccccccagactgctgattcagctggcctccaatgtgcagaccggcgtgccagccagattttccggcagcggcagcagaaccgacttcaccctgaccatcagcagcgtggaacccgaggacttcgccgtgtactactgcctccagagccggaccatccccagaacattcggccagggcaccaagctggaaatcaagagaggcggaggcggaagtggaggcggaggatctggcggcggaggctctcaggtgcagctggtgcagtctggccccgaagtgaagaaacccggcgagtccgtgaagatcagctgcaaggccagcggctacaccttccggcactacagcatgaactgggtcaagcaggccccaggccagggcctgaagtggatgggcagaatcaacaccgagagcggcgtgcccatctacgccgacgacttcaagggccggttcagcttcaccgtggacaccagcgccagcaccgcctacctggaaatctccagcctgaccagcgaggataccgccgtgtatttctgctccaacgactacctgtacagcctggatttctggggccagggaaccaccctgacagtgtcctctacgcgtaaaattgaagttatgtatcctcctccttacctagacaatgagaagagcaatggaaccattatccatgtgaaaggggcgcgtattacccaaggactggctgtgcctacaatctctagcttctttccgcctggataccaagtctccttctgtcttgtgatggtcctcctgtttgctgtggacacaggactgtacttttccgtgaaaacgaacatccgcagctccacacgcgattggaaagatcacaagtttaaatggcgcaaagatccccaggacaag

SEQ ID NO: 19867 - DNA, 1014 bp, synthetic construct
  source 1..1014: mol_type = other DNA
atggccttaccagtgaccgccttgctcctgccgctggccttgctgctccacgccgccaggccggacatcgtgctgacacagagccctgccaccctgtctctgagccctggcgatagagccaccatcagctgtagagccagcgagagcgtgaccatcctgggcagccacctgatccactggtatcagcagaagcccggccagccccccagactgctgattcagctggcctccaatgtgcagaccggcgtgccagccagattttccggcagcggcagcagaaccgacttcaccctgaccatcagcagcgtggaacccgaggacttcgccgtgtactactgcctccagagccggaccatccccagaacattcggccagggcaccaagctggaaatcaagagaggcggaggcggaagtggaggcggaggatctggcggcggaggctctcaggtgcagctggtgcagtctggccccgaagtgaagaaacccggcgagtccgtgaagatcagctgcaaggccagcggctacaccttccggcactacagcatgaactgggtcaagcaggccccaggccagggcctgaagtggatgggcagaatcaacaccgagagcggcgtgcccatctacgccgacgacttcaagggccggttcagcttcaccgtggacaccagcgccagcaccgcctacctggaaatctccagcctgaccagcgaggataccgccgtgtatttctgctccaacgactacctgtacagcctggatttctggggccagggaaccaccctgacagtgtcctctacgcgtaaaattgaagttatgtatcctcctccttacctagacaatgagaagagcaatggaaccattatccatgtgaaaggggcgcgtattacccaaggactggctgtgtctacaatctctagcttctctccgcctggataccaagtctccttctgtcttgtgatggtcctcctgtttgctgtggacacaggactgtacttttccgtgaaaacgaacatc

SEQ ID NO: 19868 - DNA, 1107 bp, synthetic construct
  source 1..1107: mol_type = other DNA
atggccttaccagtgaccgccttgctcctgccgctggccttgctgctccacgccgccaggccggacatcgtgctgacacagagccctgccaccctgtctctgagccctggcgatagagccaccatcagctgtagagccagcgagagcgtgaccatcctgggcagccacctgatccactggtatcagcagaagcccggccagccccccagactgctgattcagctggcctccaatgtgcagaccggcgtgccagccagattttccggcagcggcagcagaaccgacttcaccctgaccatcagcagcgtggaacccgaggacttcgccgtgtactactgcctccagagccggaccatccccagaacattcggccagggcaccaagctggaaatcaagagaggcggaggcggaagtggaggcggaggatctggcggcggaggctctcaggtgcagctggtgcagtctggccccgaagtgaagaaacccggcgagtccgtgaagatcagctgcaaggccagcggctacaccttccggcactacagcatgaactgggtcaagcaggccccaggccagggcctgaagtggatgggcagaatcaacaccgagagcggcgtgcccatctacgccgacgacttcaagggccggttcagcttcaccgtggacaccagcgccagcaccgcctacctggaaatctccagcctgaccagcgaggataccgccgtgtatttctgctccaacgactacctgtacagcctggatttctggggccagggaaccaccctgacagtgtcctctacgcgtaaaattgaagttatgtatcctcctccttacctagacaatgagaagagcaatggaaccattatccatgtgaaaggggcgcgtgtcgagaaagaacatccacagcttggcgctggcaccgtcctgttgcttagagccggattctatgccgtcagcttcctgtccgtggctgtggggtctacagtgtattaccagggaaaatgtctcacctggaaaggccccagacgccagcttccagctgttgttcctgctccactgccaccaccttgtggctcctctgctcacttgcttccaccagtgcctggcgga

SEQ ID NO: 19869 - DNA, 1350 bp, synthetic construct
  source 1..1350: mol_type = other DNA
atggccttaccagtgaccgccttgctcctgccgctggccttgctgctccacgccgccaggccggacatcgtgctgacacagagccctgccaccctgtctctgagccctggcgatagagccaccatcagctgtagagccagcgagagcgtgaccatcctgggcagccacctgatccactggtatcagcagaagcccggccagccccccagactgctgattcagctggcctccaatgtgcagaccggcgtgccagccagattttccggcagcggcagcagaaccgacttcaccctgaccatcagcagcgtggaacccgaggacttcgccgtgtactactgcctccagagccggaccatccccagaacattcggccagggcaccaagctggaaatcaagagaggcggaggcggaagtggaggcggaggatctggcggcggaggctctcaggtgcagctggtgcagtctggccccgaagtgaagaaacccggcgagtccgtgaagatcagctgcaaggccagcggctacaccttccggcactacagcatgaactgggtcaagcaggccccaggccagggcctgaagtggatgggcagaatcaacaccgagagcggcgtgcccatctacgccgacgacttcaagggccggttcagcttcaccgtggacaccagcgccagcaccgcctacctggaaatctccagcctgaccagcgaggataccgccgtgtatttctgctccaacgactacctgtacagcctggatttctggggccagggaaccaccctgacagtgtcctctacgcgtaaaattgaagttatgtatcctcctccttacctagacaatgagaagagcaatggaaccattatccatgtgaaaggggcgcgtaagtctgtgcgcttttacctggtcgtcagccctgccagtgcctccactcagacatcttggaccccaagggaccttgtgtcctctcagacacagacacagtcctgcgtgccaccaactgctggcgcaagacaggctccagagtctcccagcacaatccccgtcccttctcagccccagaactccacacttaggccaggaccagctgctccaatcgcactggtcccagtgttctgcggactgctggttgccaagtctctggtgctgagcgcactcctcgtttggtggggcgatatttggtggaaaacgatgatggaattgagatccctcgatacgcagaaagccacatgccaccttcagcaagtcacagacttgccttggaccagcgtcagctctcccgtggaacgggaaattctgtatcatacagtggcccgcaccaagatttccgacgatgacgacgagcacacactg

SEQ ID NO: 19870 - DNA, 1161 bp, synthetic construct
  source 1..1161: mol_type = other DNA
atggccttaccagtgaccgccttgctcctgccgctggccttgctgctccacgccgccaggccggacatcgtgctgacacagagccctgccaccctgtctctgagccctggcgatagagccaccatcagctgtagagccagcgagagcgtgaccatcctgggcagccacctgatccactggtatcagcagaagcccggccagccccccagactgctgattcagctggcctccaatgtgcagaccggcgtgccagccagattttccggcagcggcagcagaaccgacttcaccctgaccatcagcagcgtggaacccgaggacttcgccgtgtactactgcctccagagccggaccatccccagaacattcggccagggcaccaagctggaaatcaagagaggcggaggcggaagtggaggcggaggatctggcggcggaggctctcaggtgcagctggtgcagtctggccccgaagtgaagaaacccggcgagtccgtgaagatcagctgcaaggccagcggctacaccttccggcactacagcatgaactgggtcaagcaggccccaggccagggcctgaagtggatgggcagaatcaacaccgagagcggcgtgcccatctacgccgacgacttcaagggccggttcagcttcaccgtggacaccagcgccagcaccgcctacctggaaatctccagcctgaccagcgaggataccgccgtgtatttctgctccaacgactacctgtacagcctggatttctggggccagggaaccaccctgacagtgtcctctacgcgtaaaattgaagttatgtatcctcctccttacctagacaatgagaagagcaatggaaccattatccatgtgaaaggggcgcgtggcgatattgagaatacctctctggccccagaagatcctacattccccgccgacacatggggaacatatctgctgacaaccgaaaccgggctgcaaaaggaccatgctctgtgggatcataccgctcagaatctgcttcggatggggcttgcattcctggtcctggtggctcttgtctggtttctggtcgaggactggctgtcccggaagagaaccagagaaagagcttccagggccagcacctgggaaggcagacgcagactgaatactcagaccctg

SEQ ID NO: 19871 - DNA, 2952 bp, synthetic construct
  source 1..2952: mol_type = other DNA
atggccttaccagtgaccgccttgctcctgccgctggccttgctgctccacgccgccaggccggacatcgtgctgacacagagccctgccaccctgtctctgagccctggcgatagagccaccatcagctgtagagccagcgagagcgtgaccatcctgggcagccacctgatccactggtatcagcagaagcccggccagccccccagactgctgattcagctggcctccaatgtgcagaccggcgtgccagccagattttccggcagcggcagcagaaccgacttcaccctgaccatcagcagcgtggaacccgaggacttcgccgtgtactactgcctccagagccggaccatccccagaacattcggccagggcaccaagctggaaatcaagagactcgagggacagcctaaggccaatcctaccgtgacactgttccctccaagcagcgaagaactccaggccaacaaggccacacttgtgtgcctgatctccgacttctaccctggggctgtgacagtggcttggaaggccgatggatctcctgtgaaagccggcgtggaaaccaccaagccatccaagcagagcaacaacaaatacgccgccagctcctacctgagcctgacacctgagcagtggaagtcccacagatcctacagctgccaagtgacccacgaaggcagcaccgtggaaaagacagtggcccctacagagtgcagcggatcccagagcttcggcctgctggaccccaagctgtgctacctgctggatggcatcctgttcatctacggcgtgatcctgaccgccctgttcctgagagtgaagttcagcagaagcgccgacgcccctgcctaccagcagggacagaaccaactgtacaacgagctgaacctgggcagacgggaagagtacgacgtgctggacaagcggagaggcagggaccctgagatgggcggaaagccccagcggagaaagaacccccaggaaggactgtataacgaactccagaaagacaagatggccgaagcctacagcgagatcggcatgaagggcgagcggagaagaggcaagggccacgatggcctgtaccagggcctgagcaccgccaccaaggacacctatgacgccctgcacatgcaggccctgcctccaagaagggccaagcgatctggatctggagcaacaaacttctcactactcaaacaagcaggtgacgtggaggagaatcccgggcctactagtatggactggatttggcgcatccttttccttgtcggcgctgctaccggcgcgcattccttcgaacaggtgcagctggtgcagtctggccccgaagtgaagaaacccggcgagtccgtgaagatcagctgcaaggccagcggctacaccttccggcactacagcatgaactgggtcaagcaggccccaggccagggcctgaagtggatgggcagaatcaacaccgagagcggcgtgcccatctacgccgacgacttcaagggccggttcagcttcaccgtggacaccagcgccagcaccgcctacctggaaatctccagcctgaccagcgaggataccgccgtgtatttctgctccaacgactacctgtacagcctggatttctggggccagggaaccaccctgacagtgtcctctacgcgtgcctctacaaagggaccctccgtgtttcctctggctcccagcagcaagtctacaagcggaggaacagccgctctgggctgcctggtcaaggattactttcccgagcctgtgaccgtgtcctggaatagcggagcactgacaagcggcgtgcacacctttccagccgtgctgcaaagcagcggcctgtactctctgagcagcgtggtcacagtgcctagctctagcctgggcacccagacctacatctgcaatgtgaaccacaagcctagcaacaccaaggtggacaagagagtggaacccaagagctgtggtaccggcgacatcgagaacaccagtctggcccctgaggaccctacctttcctgccgatacctggggcacctacctgctgaccacagagacaggactccagaaagatcacgccctgtgggaccacacagcccagaacctgctgagaatgggcctcgcctttctggtgctggttgccctcgtgtggttcctggtggaagattggctgagccggaagcggacaagagagagagccagcagagcctctacctgggagggaagaagaaggctgaacacccagacacttagggccaagcgatctggatctggagcaacaaacttctcactactcaaacaagcaggtgacgtggaggagaatcccgggccttctagaggccatatgaccgagtacaagcccacggtgcgcctcgccacccgcgacgacgtccccagggccgtacgcaccctcgccgccgcgttcgccgactaccccgccacgcgccacaccgtcgatccggaccgccacatcgagcgggtcaccgagctgcaagaactcttcctcacgcgcgtcgggctcgacatcggcaaggtgtgggtcgcggacgacggcgccgcggtggcggtctggaccacgccggagagcgtcgaagcgggggcggtgttcgccgagatcggcccgcgcatggccgagttgagcggttcccggctggccgcgcagcaacagatggaaggcctcctggcgccgcaccggcccaaggagcccgcgtggttcctggccaccgtcggcgtctcgcccgaccaccagggcaagggtctgggcagcgccgtcgtgctccccggagtggaggcggccgagcgcgccggggtgcccgccttcctggagacctccgcgccccgcaacctccccttctacgagcggctcggcttcaccgtcaccgccgacgtcgaggtgcccgaaggaccgcgcacctggtgcatgacccgcaagcccggtgcctga

SEQ ID NO: 19872 - DNA, 3150 bp, synthetic construct
  source 1..3150: mol_type = other DNA
atggccttaccagtgaccgccttgctcctgccgctggccttgctgctccacgccgccaggccggacatcgtgctgacacagagccctgccaccctgtctctgagccctggcgatagagccaccatcagctgtagagccagcgagagcgtgaccatcctgggcagccacctgatccactggtatcagcagaagcccggccagccccccagactgctgattcagctggcctccaatgtgcagaccggcgtgccagccagattttccggcagcggcagcagaaccgacttcaccctgaccatcagcagcgtggaacccgaggacttcgccgtgtactactgcctccagagccggaccatccccagaacattcggccagggcaccaagctggaaatcaagagactcgagggacagcctaaggccaatcctaccgtgacactgttccctccaagcagcgaagaactccaggccaacaaggccacacttgtgtgcctgatctccgacttctaccctggggctgtgacagtggcttggaaggccgatggatctcctgtgaaagccggcgtggaaaccaccaagccatccaagcagagcaacaacaaatacgccgccagctcctacctgagcctgacacctgagcagtggaagtcccacagatcctacagctgccaagtgacccacgaaggcagcaccgtggaaaagacagtggcccctacagagtgcagcggatcccagagcttcggcctgctggaccccaagctgtgctacctgctggatggcatcctgttcatctacggcgtgatcctgaccgccctgttcctgagagtgaagttcagcagaagcgccgacgcccctgcctaccagcagggacagaaccaactgtacaacgagctgaacctgggcagacgggaagagtacgacgtgctggacaagcggagaggcagggaccctgagatgggcggaaagccccagcggagaaagaacccccaggaaggactgtataacgaactccagaaagacaagatggccgaagcctacagcgagatcggcatgaagggcgagcggagaagaggcaagggccacgatggcctgtaccagggcctgagcaccgccaccaaggacacctatgacgccctgcacatgcaggccctgcctccaagaagggccaagcgatctggatctggagcaacaaacttctcactactcaaacaagcaggtgacgtggaggagaatcccgggcctactagtatggactggatttggcgcatccttttccttgtcggcgctgctaccggcgcgcattccttcgaacaggtgcagctggtgcagtctggccccgaagtgaagaaacccggcgagtccgtgaagatcagctgcaaggccagcggctacaccttccggcactacagcatgaactgggtcaagcaggccccaggccagggcctgaagtggatgggcagaatcaacaccgagagcggcgtgcccatctacgccgacgacttcaagggccggttcagcttcaccgtggacaccagcgccagcaccgcctacctggaaatctccagcctgaccagcgaggataccgccgtgtatttctgctccaacgactacctgtacagcctggatttctggggccagggaaccaccctgacagtgtcctctacgcgtgcctctacaaagggaccctccgtgtttcctctggctcccagcagcaagtctacaagcggaggaacagccgctctgggctgcctggtcaaggattactttcccgagcctgtgaccgtgtcctggaatagcggagcactgacaagcggcgtgcacacctttccagccgtgctgcaaagcagcggcctgtactctctgagcagcgtggtcacagtgcctagctctagcctgggcacccagacctacatctgcaatgtgaaccacaagcctagcaacaccaaggtggacaagagagtggaacccaagagctgtggtaccaagtctgtgcgcttttacctggtcgtcagccctgccagtgcctccactcagacatcttggaccccaagggaccttgtgtcctctcagacacagacacagtcctgcgtgccaccaactgctggcgcaagacaggctccagagtctcccagcacaatccccgtcccttctcagccccagaactccacacttaggccaggaccagctgctccaatcgcactggtcccagtgttctgcggactgctggttgccaagtctctggtgctgagcgcactcctcgtttggtggggcgatatttggtggaaaacgatgatggaattgagatccctcgatacgcagaaagccacatgccaccttcagcaagtcacagacttgccttggaccagcgtcagctctcccgtggaacgggaaattctgtatcatacagtggcccgcaccaagatttccgacgatgacgacgagcacacactgcgcgccaagagaagcggatctggcgtgaagcagaccctgaatttcgacctgctgaagctggctggcgacgtggaatccaacccaggcccttctagaggccatatgaccgagtacaagcccacggtgcgcctcgccacccgcgacgacgtccccagggccgtacgcaccctcgccgccgcgttcgccgactaccccgccacgcgccacaccgtcgatccggaccgccacatcgagcgggtcaccgagctgcaagaactcttcctcacgcgcgtcgggctcgacatcggcaaggtgtgggtcgcggacgacggcgccgcggtggcggtctggaccacgccggagagcgtcgaagcgggggcggtgttcgccgagatcggcccgcgcatggccgagttgagcggttcccggctggccgcgcagcaacagatggaaggcctcctggcgccgcaccggcccaaggagcccgcgtggttcctggccaccgtcggcgtctcgcccgaccaccagggcaagggtctgggcagcgccgtcgtgctccccggagtggaggcggccgagcgcgccggggtgcccgccttcctggagacctccgcgccccgcaacctccccttctacgagcggctcggcttcaccgtcaccgccgacgtcgaggtgcccgaaggaccgcgcacctggtgcatgacccgcaagcccggtgcctga

SEQ ID NO: 19873 - DNA, 2910 bp, synthetic construct
  source 1..2910: mol_type = other DNA
atggccttaccagtgaccgccttgctcctgccgctggccttgctgctccacgccgccaggccggacatcgtgctgacacagagccctgccaccctgtctctgagccctggcgatagagccaccatcagctgtagagccagcgagagcgtgaccatcctgggcagccacctgatccactggtatcagcagaagcccggccagccccccagactgctgattcagctggcctccaatgtgcagaccggcgtgccagccagattttccggcagcggcagcagaaccgacttcaccctgaccatcagcagcgtggaacccgaggacttcgccgtgtactactgcctccagagccggaccatccccagaacattcggccagggcaccaagctggaaatcaagagactcgagggacagcctaaggccaatcctaccgtgacactgttccctccaagcagcgaagaactccaggccaacaaggccacacttgtgtgcctgatctccgacttctaccctggggctgtgacagtggcttggaaggccgatggatctcctgtgaaagccggcgtggaaaccaccaagccatccaagcagagcaacaacaaatacgccgccagctcctacctgagcctgacacctgagcagtggaagtcccacagatcctacagctgccaagtgacccacgaaggcagcaccgtggaaaagacagtggcccctacagagtgcagcggatcccagagcttcggcctgctggaccccaagctgtgctacctgctggatggcatcctgttcatctacggcgtgatcctgaccgccctgttcctgagagtgaagttcagcagaagcgccgacgcccctgcctaccagcagggacagaaccaactgtacaacgagctgaacctgggcagacgggaagagtacgacgtgctggacaagcggagaggcagggaccctgagatgggcggaaagccccagcggagaaagaacccccaggaaggactgtataacgaactccagaaagacaagatggccgaagcctacagcgagatcggcatgaagggcgagcggagaagaggcaagggccacgatggcctgtaccagggcctgagcaccgccaccaaggacacctatgacgccctgcacatgcaggccctgcctccaagaagggccaagcgatctggatctggagcaacaaacttctcactactcaaacaagcaggtgacgtggaggagaatcccgggcctactagtatggactggatttggcgcatccttttccttgtcggcgctgctaccggcgcgcattccttcgaacaggtgcagctggtgcagtctggccccgaagtgaagaaacccggcgagtccgtgaagatcagctgcaaggccagcggctacaccttccggcactacagcatgaactgggtcaagcaggccccaggccagggcctgaagtggatgggcagaatcaacaccgagagcggcgtgcccatctacgccgacgacttcaagggccggttcagcttcaccgtggacaccagcgccagcaccgcctacctggaaatctccagcctgaccagcgaggataccgccgtgtatttctgctccaacgactacctgtacagcctggatttctggggccagggaaccaccctgacagtgtcctctacgcgtgcctctacaaagggaccctccgtgtttcctctggctcccagcagcaagtctacaagcggaggaacagccgctctgggctgcctggtcaaggattactttcccgagcctgtgaccgtgtcctggaatagcggagcactgacaagcggcgtgcacacctttccagccgtgctgcaaagcagcggcctgtactctctgagcagcgtggtcacagtgcctagctctagcctgggcacccagacctacatctgcaatgtgaaccacaagcctagcaacaccaaggtggacaagagagtggaacccaagagctgtggtaccgtggtcgagaaagaacatccacagcttggcgctggcaccgtcctgttgcttagagccggattctatgccgtcagcttcctgtccgtggctgtggggtctacagtgtattaccagggaaaatgtctcacctggaaaggccccagacgccagcttccagctgttgttcctgctccactgccaccaccttgtggctcctctgctcacttgcttccaccagtgcctggcggacgcgccaagagaagcggatctggcgtgaagcagaccctgaatttcgacctgctgaagctggctggcgacgtggaatccaacccaggcccttctagaggccatatgaccgagtacaagcccacggtgcgcctcgccacccgcgacgacgtccccagggccgtacgcaccctcgccgccgcgttcgccgactaccccgccacgcgccacaccgtcgatccggaccgccacatcgagcgggtcaccgagctgcaagaactcttcctcacgcgcgtcgggctcgacatcggcaaggtgtgggtcgcggacgacggcgccgcggtggcggtctggaccacgccggagagcgtcgaagcgggggcggtgttcgccgagatcggcccgcgcatggccgagttgagcggttcccggctggccgcgcagcaacagatggaaggcctcctggcgccgcaccggcccaaggagcccgcgtggttcctggccaccgtcggcgtctcgcccgaccaccagggcaagggtctgggcagcgccgtcgtgctccccggagtggaggcggccgagcgcgccggggtgcccgccttcctggagacctccgcgccccgcaacctccccttctacgagcggctcggcttcaccgtcaccgccgacgtcgaggtgcccgaaggaccgcgcacctggtgcatgacccgcaagcccggtgcctga

SEQ ID NO: 19874 - DNA, 2997 bp, synthetic construct
  source 1..2997: mol_type = other DNA
atggccttaccagtgaccgccttgctcctgccgctggccttgctgctccacgccgccaggccggacatcgtgctgacacagagccctgccaccctgtctctgagccctggcgatagagccaccatcagctgtagagccagcgagagcgtgaccatcctgggcagccacctgatccactggtatcagcagaagcccggccagccccccagactgctgattcagctggcctccaatgtgcagaccggcgtgccagccagattttccggcagcggcagcagaaccgacttcaccctgaccatcagcagcgtggaacccgaggacttcgccgtgtactactgcctccagagccggaccatccccagaacattcggccagggcaccaagctggaaatcaagagactcgaggacctgaagaacgtgttcccacctgaggtggccgtgttcgagcctagcgaggccgagatcagccacacccagaaagccaccctcgtgtgcctggctaccggcttctaccccgaccatgtggaactgtcttggtgggtcaacggcaaagaggtgcacagcggcgtgtctaccgacccccagccactgaaagaacagcccgccctgaacgacagccggtactgcctgagcagcagactgagagtgtccgccaccttctggcagaacccccggaaccacttcagatgccaggtgcagttctacggcctgagcgagaacgacgagtggacccaggacagagccaagcccgtgacccagatcgtgtctgccgaagcctggggcagagccgattgcggatcccagagcttcggcctgctggaccccaagctgtgctacctgctggatggcatcctgttcatctacggcgtgatcctgaccgccctgttcctgagagtgaagttcagcagaagcgccgacgcccctgcctaccagcagggacagaaccaactgtacaacgagctgaacctgggcagacgggaagagtacgacgtgctggacaagcggagaggcagggaccctgagatgggcggaaagccccagcggagaaagaacccccaggaaggactgtataacgaactccagaaagacaagatggccgaagcctacagcgagatcggcatgaagggcgagcggagaagaggcaagggccacgatggcctgtaccagggcctgagcaccgccaccaaggacacctatgacgccctgcacatgcaggccctgcctccaagaagggccaagcgatctggatctggagcaacaaacttctcactactcaaacaagcaggtgacgtggaggagaatcccgggcctactagtatggactggatttggcgcatccttttccttgtcggcgctgctaccggcgcgcattccttcgaacaggtgcagctggtgcagtctggccccgaagtgaagaaacccggcgagtccgtgaagatcagctgcaaggccagcggctacaccttccggcactacagcatgaactgggtcaagcaggccccaggccagggcctgaagtggatgggcagaatcaacaccgagagcggcgtgcccatctacgccgacgacttcaagggccggttcagcttcaccgtggacaccagcgccagcaccgcctacctggaaatctccagcctgaccagcgaggataccgccgtgtatttctgctccaacgactacctgtacagcctggatttctggggccagggaaccaccctgacagtgtcctctacgcgtatccagaaccctgatcctgccgtgtaccagctgcgggatagcaagagcagcgacaagagcgtgtgtctgttcaccgacttcgacagccagaccaacgtgtcccagagcaaggactccgacgtgtacatcaccgataagaccgtgctggacatgcggagcatggacttcaagagcaactccgccgtggcctggtccaacaagtccgatttcgcctgcgccaacgccttcaacaacagcattatccccgaggacacattcttcccaagccccgagagcagctgcggtaccggcgacatcgagaacaccagtctggcccctgaggaccctacctttcctgccgatacctggggcacctacctgctgaccacagagacaggactccagaaagatcacgccctgtgggaccacacagcccagaacctgctgagaatgggcctcgcctttctggtgctggttgccctcgtgtggttcctggtggaagattggctgagccggaagcggacaagagagagagccagcagagcctctacctgggagggaagaagaaggctgaacacccagacacttagggccaagcgatctggatctggagcaacaaacttctcactactcaaacaagcaggtgacgtggaggagaatcccgggccttctagaggccatatgaccgagtacaagcccacggtgcgcctcgccacccgcgacgacgtccccagggccgtacgcaccctcgccgccgcgttcgccgactaccccgccacgcgccacaccgtcgatccggaccgccacatcgagcgggtcaccgagctgcaagaactcttcctcacgcgcgtcgggctcgacatcggcaaggtgtgggtcgcggacgacggcgccgcggtggcggtctggaccacgccggagagcgtcgaagcgggggcggtgttcgccgagatcggcccgcgcatggccgagttgagcggttcccggctggccgcgcagcaacagatggaaggcctcctggcgccgcaccggcccaaggagcccgcgtggttcctggccaccgtcggcgtctcgcccgaccaccagggcaagggtctgggcagcgccgtcgtgctccccggagtggaggcggccgagcgcgccggggtgcccgccttcctggagacctccgcgccccgcaacctccccttctacgagcggctcggcttcaccgtcaccgccgacgtcgaggtgcccgaaggaccgcgcacctggtgcatgacccgcaagcccggtgcctga

SEQ ID NO: 19875 - DNA, 3195 bp, synthetic construct
  source 1..3195: mol_type = other DNA
atggccttaccagtgaccgccttgctcctgccgctggccttgctgctccacgccgccaggccggacatcgtgctgacacagagccctgccaccctgtctctgagccctggcgatagagccaccatcagctgtagagccagcgagagcgtgaccatcctgggcagccacctgatccactggtatcagcagaagcccggccagccccccagactgctgattcagctggcctccaatgtgcagaccggcgtgccagccagattttccggcagcggcagcagaaccgacttcaccctgaccatcagcagcgtggaacccgaggacttcgccgtgtactactgcctccagagccggaccatccccagaacattcggccagggcaccaagctggaaatcaagagactcgaggacctgaagaacgtgttcccacctgaggtggccgtgttcgagcctagcgaggccgagatcagccacacccagaaagccaccctcgtgtgcctggctaccggcttctaccccgaccatgtggaactgtcttggtgggtcaacggcaaagaggtgcacagcggcgtgtctaccgacccccagccactgaaagaacagcccgccctgaacgacagccggtactgcctgagcagcagactgagagtgtccgccaccttctggcagaacccccggaaccacttcagatgccaggtgcagttctacggcctgagcgagaacgacgagtggacccaggacagagccaagcccgtgacccagatcgtgtctgccgaagcctggggcagagccgattgcggatcccagagcttcggcctgctggaccccaagctgtgctacctgctggatggcatcctgttcatctacggcgtgatcctgaccgccctgttcctgagagtgaagttcagcagaagcgccgacgcccctgcctaccagcagggacagaaccaactgtacaacgagctgaacctgggcagacgggaagagtacgacgtgctggacaagcggagaggcagggaccctgagatgggcggaaagccccagcggagaaagaacccccaggaaggactgtataacgaactccagaaagacaagatggccgaagcctacagcgagatcggcatgaagggcgagcggagaagaggcaagggccacgatggcctgtaccagggcctgagcaccgccaccaaggacacctatgacgccctgcacatgcaggccctgcctccaagaagggccaagcgatctggatctggagcaacaaacttctcactactcaaacaagcaggtgacgtggaggagaatcccgggcctactagtatggactggatttggcgcatccttttccttgtcggcgctgctaccggcgcgcattccttcgaacaggtgcagctggtgcagtctggccccgaagtgaagaaacccggcgagtccgtgaagatcagctgcaaggccagcggctacaccttccggcactacagcatgaactgggtcaagcaggccccaggccagggcctgaagtggatgggcagaatcaacaccgagagcggcgtgcccatctacgccgacgacttcaagggccggttcagcttcaccgtggacaccagcgccagcaccgcctacctggaaatctccagcctgaccagcgaggataccgccgtgtatttctgctccaacgactacctgtacagcctggatttctggggccagggaaccaccctgacagtgtcctctacgcgtatccagaaccctgatcctgccgtgtaccagctgcgggatagcaagagcagcgacaagagcgtgtgtctgttcaccgacttcgacagccagaccaacgtgtcccagagcaaggactccgacgtgtacatcaccgataagaccgtgctggacatgcggagcatggacttcaagagcaactccgccgtggcctggtccaacaagtccgatttcgcctgcgccaacgccttcaacaacagcattatccccgaggacacattcttcccaagccccgagagcagctgcggtaccaagtctgtgcgcttttacctggtcgtcagccctgccagtgcctccactcagacatcttggaccccaagggaccttgtgtcctctcagacacagacacagtcctgcgtgccaccaactgctggcgcaagacaggctccagagtctcccagcacaatccccgtcccttctcagccccagaactccacacttaggccaggaccagctgctccaatcgcactggtcccagtgttctgcggactgctggttgccaagtctctggtgctgagcgcactcctcgtttggtggggcgatatttggtggaaaacgatgatggaattgagatccctcgatacgcagaaagccacatgccaccttcagcaagtcacagacttgccttggaccagcgtcagctctcccgtggaacgggaaattctgtatcatacagtggcccgcaccaagatttccgacgatgacgacgagcacacactgcgcgccaagagaagcggatctggcgtgaagcagaccctgaatttcgacctgctgaagctggctggcgacgtggaatccaacccaggcccttctagaggccatatgaccgagtacaagcccacggtgcgcctcgccacccgcgacgacgtccccagggccgtacgcaccctcgccgccgcgttcgccgactaccccgccacgcgccacaccgtcgatccggaccgccacatcgagcgggtcaccgagctgcaagaactcttcctcacgcgcgtcgggctcgacatcggcaaggtgtgggtcgcggacgacggcgccgcggtggcggtctggaccacgccggagagcgtcgaagcgggggcggtgttcgccgagatcggcccgcgcatggccgagttgagcggttcccggctggccgcgcagcaacagatggaaggcctcctggcgccgcaccggcccaaggagcccgcgtggttcctggccaccgtcggcgtctcgcccgaccaccagggcaagggtctgggcagcgccgtcgtgctccccggagtggaggcggccgagcgcgccggggtgcccgccttcctggagacctccgcgccccgcaacctccccttctacgagcggctcggcttcaccgtcaccgccgacgtcgaggtgcccgaaggaccgcgcacctggtgcatgacccgcaagcccggtgcctga

SEQ ID NO: 19876 - DNA, 2955 bp, synthetic construct
  source 1..2955: mol_type = other DNA
atggccttaccagtgaccgccttgctcctgccgctggccttgctgctccacgccgccaggccggacatcgtgctgacacagagccctgccaccctgtctctgagccctggcgatagagccaccatcagctgtagagccagcgagagcgtgaccatcctgggcagccacctgatccactggtatcagcagaagcccggccagccccccagactgctgattcagctggcctccaatgtgcagaccggcgtgccagccagattttccggcagcggcagcagaaccgacttcaccctgaccatcagcagcgtggaacccgaggacttcgccgtgtactactgcctccagagccggaccatccccagaacattcggccagggcaccaagctggaaatcaagagactcgaggacctgaagaacgtgttcccacctgaggtggccgtgttcgagcctagcgaggccgagatcagccacacccagaaagccaccctcgtgtgcctggctaccggcttctaccccgaccatgtggaactgtcttggtgggtcaacggcaaagaggtgcacagcggcgtgtctaccgacccccagccactgaaagaacagcccgccctgaacgacagccggtactgcctgagcagcagactgagagtgtccgccaccttctggcagaacccccggaaccacttcagatgccaggtgcagttctacggcctgagcgagaacgacgagtggacccaggacagagccaagcccgtgacccagatcgtgtctgccgaagcctggggcagagccgattgcggatcccagagcttcggcctgctggaccccaagctgtgctacctgctggatggcatcctgttcatctacggcgtgatcctgaccgccctgttcctgagagtgaagttcagcagaagcgccgacgcccctgcctaccagcagggacagaaccaactgtacaacgagctgaacctgggcagacgggaagagtacgacgtgctggacaagcggagaggcagggaccctgagatgggcggaaagccccagcggagaaagaacccccaggaaggactgtataacgaactccagaaagacaagatggccgaagcctacagcgagatcggcatgaagggcgagcggagaagaggcaagggccacgatggcctgtaccagggcctgagcaccgccaccaaggacacctatgacgccctgcacatgcaggccctgcctccaagaagggccaagcgatctggatctggagcaacaaacttctcactactcaaacaagcaggtgacgtggaggagaatcccgggcctactagtatggactggatttggcgcatccttttccttgtcggcgctgctaccggcgcgcattccttcgaacaggtgcagctggtgcagtctggccccgaagtgaagaaacccggcgagtccgtgaagatcagctgcaaggccagcggctacaccttccggcactacagcatgaactgggtcaagcaggccccaggccagggcctgaagtggatgggcagaatcaacaccgagagcggcgtgcccatctacgccgacgacttcaagggccggttcagcttcaccgtggacaccagcgccagcaccgcctacctggaaatctccagcctgaccagcgaggataccgccgtgtatttctgctccaacgactacctgtacagcctggatttctggggccagggaaccaccctgacagtgtcctctacgcgtatccagaaccctgatcctgccgtgtaccagctgcgggatagcaagagcagcgacaagagcgtgtgtctgttcaccgacttcgacagccagaccaacgtgtcccagagcaaggactccgacgtgtacatcaccgataagaccgtgctggacatgcggagcatggacttcaagagcaactccgccgtggcctggtccaacaagtccgatttcgcctgcgccaacgccttcaacaacagcattatccccgaggacacattcttcccaagccccgagagcagctgcggtaccgtggtcgagaaagaacatccacagcttggcgctggcaccgtcctgttgcttagagccggattctatgccgtcagcttcctgtccgtggctgtggggtctacagtgtattaccagggaaaatgtctcacctggaaaggccccagacgccagcttccagctgttgttcctgctccactgccaccaccttgtggctcctctgctcacttgcttccaccagtgcctggcggacgcgccaagagaagcggatctggcgtgaagcagaccctgaatttcgacctgctgaagctggctggcgacgtggaatccaacccaggcccttctagaggccatatgaccgagtacaagcccacggtgcgcctcgccacccgcgacgacgtccccagggccgtacgcaccctcgccgccgcgttcgccgactaccccgccacgcgccacaccgtcgatccggaccgccacatcgagcgggtcaccgagctgcaagaactcttcctcacgcgcgtcgggctcgacatcggcaaggtgtgggtcgcggacgacggcgccgcggtggcggtctggaccacgccggagagcgtcgaagcgggggcggtgttcgccgagatcggcccgcgcatggccgagttgagcggttcccggctggccgcgcagcaacagatggaaggcctcctggcgccgcaccggcccaaggagcccgcgtggttcctggccaccgtcggcgtctcgcccgaccaccagggcaagggtctgggcagcgccgtcgtgctccccggagtggaggcggccgagcgcgccggggtgcccgccttcctggagacctccgcgccccgcaacctccccttctacgagcggctcggcttcaccgtcaccgccgacgtcgaggtgcccgaaggaccgcgcacctggtgcatgacccgcaagcccggtgcctga

SEQ ID NO: 19877 - DNA, 2868 bp, synthetic construct
  source 1..2868: mol_type = other DNA
atggccttaccagtgaccgccttgctcctgccgctggccttgctgctccacgccgccaggccggacatcgtgctgacacagagccctgccaccctgtctctgagccctggcgatagagccaccatcagctgtagagccagcgagagcgtgaccatcctgggcagccacctgatccactggtatcagcagaagcccggccagccccccagactgctgattcagctggcctccaatgtgcagaccggcgtgccagccagattttccggcagcggcagcagaaccgacttcaccctgaccatcagcagcgtggaacccgaggacttcgccgtgtactactgcctccagagccggaccatccccagaacattcggccagggcaccaagctggaaatcaagagactcgagggacagcctaaggccaatcctaccgtgacactgttccctccaagcagcgaagaactccaggccaacaaggccacacttgtgtgcctgatctccgacttctaccctggggctgtgacagtggcttggaaggccgatggatctcctgtgaaagccggcgtggaaaccaccaagccatccaagcagagcaacaacaaatacgccgccagctcctacctgagcctgacacctgagcagtggaagtcccacagatcctacagctgccaagtgacccacgaaggcagcaccgtggaaaagacagtggcccctacagagtgcagcggatcccagagcttcggcctgctggaccccaagctgtgctacctgctggatggcatcctgttcatctacggcgtgatcctgaccgccctgttcctgagagtgaagttcagcagaagcgccgacgcccctgcctaccagcagggacagaaccaactgtacaacgagctgaacctgggcagacgggaagagtacgacgtgctggacaagcggagaggcagggaccctgagatgggcggaaagccccagcggagaaagaacccccaggaaggactgtataacgaactccagaaagacaagatggccgaagcctacagcgagatcggcatgaagggcgagcggagaagaggcaagggccacgatggcctgtaccagggcctgagcaccgccaccaaggacacctatgacgccctgcacatgcaggccctgcctccaagaagggccaagcgatctggatctggagcaacaaacttctcactactcaaacaagcaggtgacgtggaggagaatcccgggcctactagtatggactggatttggcgcatccttttccttgtcggcgctgctaccggcgcgcattccttcgaacaggtgcagctggtgcagtctggccccgaagtgaagaaacccggcgagtccgtgaagatcagctgcaaggccagcggctacaccttccggcactacagcatgaactgggtcaagcaggccccaggccagggcctgaagtggatgggcagaatcaacaccgagagcggcgtgcccatctacgccgacgacttcaagggccggttcagcttcaccgtggacaccagcgccagcaccgcctacctggaaatctccagcctgaccagcgaggataccgccgtgtatttctgctccaacgactacctgtacagcctggatttctggggccagggaaccaccctgacagtgtcctctacgcgtgcctctacaaagggaccctccgtgtttcctctggctcccagcagcaagtctacaagcggaggaacagccgctctgggctgcctggtcaaggattactttcccgagcctgtgaccgtgtcctggaatagcggagcactgacaagcggcgtgcacacctttccagccgtgctgcaaagcagcggcctgtactctctgagcagcgtggtcacagtgcctagctctagcctgggcacccagacctacatctgcaatgtgaaccacaagcctagcaacaccaaggtggacaagagagtggaacccaagagctgtggtaccatcactcaaggtttggcagtgtcaaccatctcatcattctttccacctggctaccaagtgtccttctgcctggtcatggtgctgctgttcgccgtggataccggcctgtacttcagcgtcaagaccaacatccggtccagcaccagagactggaaggaccacaagttcaagtggcggaaggaccctcaggacaagagggccaagcgatctggatctggagcaacaaacttctcactactcaaacaagcaggtgacgtggaggagaatcccgggccttctagaggccatatgaccgagtacaagcccacggtgcgcctcgccacccgcgacgacgtccccagggccgtacgcaccctcgccgccgcgttcgccgactaccccgccacgcgccacaccgtcgatccggaccgccacatcgagcgggtcaccgagctgcaagaactcttcctcacgcgcgtcgggctcgacatcggcaaggtgtgggtcgcggacgacggcgccgcggtggcggtctggaccacgccggagagcgtcgaagcgggggcggtgttcgccgagatcggcccgcgcatggccgagttgagcggttcccggctggccgcgcagcaacagatggaaggcctcctggcgccgcaccggcccaaggagcccgcgtggttcctggccaccgtcggcgtctcgcccgaccaccagggcaagggtctgggcagcgccgtcgtgctccccggagtggaggcggccgagcgcgccggggtgcccgccttcctggagacctccgcgccccgcaacctccccttctacgagcggctcggcttcaccgtcaccgccgacgtcgaggtgcccgaaggaccgcgcacctggtgcatgacccgcaagcccggtgcctga

SEQ ID NO: 19878 - DNA, 2913 bp, synthetic construct
  source 1..2913: mol_type = other DNA
atggccttaccagtgaccgccttgctcctgccgctggccttgctgctccacgccgccaggccggacatcgtgctgacacagagccctgccaccctgtctctgagccctggcgatagagccaccatcagctgtagagccagcgagagcgtgaccatcctgggcagccacctgatccactggtatcagcagaagcccggccagccccccagactgctgattcagctggcctccaatgtgcagaccggcgtgccagccagattttccggcagcggcagcagaaccgacttcaccctgaccatcagcagcgtggaacccgaggacttcgccgtgtactactgcctccagagccggaccatccccagaacattcggccagggcaccaagctggaaatcaagagactcgaggacctgaagaacgtgttcccacctgaggtggccgtgttcgagcctagcgaggccgagatcagccacacccagaaagccaccctcgtgtgcctggctaccggcttctaccccgaccatgtggaactgtcttggtgggtcaacggcaaagaggtgcacagcggcgtgtctaccgacccccagccactgaaagaacagcccgccctgaacgacagccggtactgcctgagcagcagactgagagtgtccgccaccttctggcagaacccccggaaccacttcagatgccaggtgcagttctacggcctgagcgagaacgacgagtggacccaggacagagccaagcccgtgacccagatcgtgtctgccgaagcctggggcagagccgattgcggatcccagagcttcggcctgctggaccccaagctgtgctacctgctggatggcatcctgttcatctacggcgtgatcctgaccgccctgttcctgagagtgaagttcagcagaagcgccgacgcccctgcctaccagcagggacagaaccaactgtacaacgagctgaacctgggcagacgggaagagtacgacgtgctggacaagcggagaggcagggaccctgagatgggcggaaagccccagcggagaaagaacccccaggaaggactgtataacgaactccagaaagacaagatggccgaagcctacagcgagatcggcatgaagggcgagcggagaagaggcaagggccacgatggcctgtaccagggcctgagcaccgccaccaaggacacctatgacgccctgcacatgcaggccctgcctccaagaagggccaagcgatctggatctggagcaacaaacttctcactactcaaacaagcaggtgacgtggaggagaatcccgggcctactagtatggactggatttggcgcatccttttccttgtcggcgctgctaccggcgcgcattccttcgaacaggtgcagctggtgcagtctggccccgaagtgaagaaacccggcgagtccgtgaagatcagctgcaaggccagcggctacaccttccggcactacagcatgaactgggtcaagcaggccccaggccagggcctgaagtggatgggcagaatcaacaccgagagcggcgtgcccatctacgccgacgacttcaagggccggttcagcttcaccgtggacaccagcgccagcaccgcctacctggaaatctccagcctgaccagcgaggataccgccgtgtatttctgctccaacgactacctgtacagcctggatttctggggccagggaaccaccctgacagtgtcctctacgcgtatccagaaccctgatcctgccgtgtaccagctgcgggatagcaagagcagcgacaagagcgtgtgtctgttcaccgacttcgacagccagaccaacgtgtcccagagcaaggactccgacgtgtacatcaccgataagaccgtgctggacatgcggagcatggacttcaagagcaactccgccgtggcctggtccaacaagtccgatttcgcctgcgccaacgccttcaacaacagcattatccccgaggacacattcttcccaagccccgagagcagctgcggtaccatcactcaaggtttggcagtgtcaaccatctcatcattctttccacctggctaccaagtgtccttctgcctggtcatggtgctgctgttcgccgtggataccggcctgtacttcagcgtcaagaccaacatccggtccagcaccagagactggaaggaccacaagttcaagtggcggaaggaccctcaggacaagagggccaagcgatctggatctggagcaacaaacttctcactactcaaacaagcaggtgacgtggaggagaatcccgggccttctagaggccatatgaccgagtacaagcccacggtgcgcctcgccacccgcgacgacgtccccagggccgtacgcaccctcgccgccgcgttcgccgactaccccgccacgcgccacaccgtcgatccggaccgccacatcgagcgggtcaccgagctgcaagaactcttcctcacgcgcgtcgggctcgacatcggcaaggtgtgggtcgcggacgacggcgccgcggtggcggtctggaccacgccggagagcgtcgaagcgggggcggtgttcgccgagatcggcccgcgcatggccgagttgagcggttcccggctggccgcgcagcaacagatggaaggcctcctggcgccgcaccggcccaaggagcccgcgtggttcctggccaccgtcggcgtctcgcccgaccaccagggcaagggtctgggcagcgccgtcgtgctccccggagtggaggcggccgagcgcgccggggtgcccgccttcctggagacctccgcgccccgcaacctccccttctacgagcggctcggcttcaccgtcaccgccgacgtcgaggtgcccgaaggaccgcgcacctggtgcatgacccgcaagcccggtgcctga

SEQ ID NO: 19879 - DNA, 1962 bp, synthetic construct
  source 1..1962: mol_type = other DNA
atggccttaccagtgaccgccttgctcctgccgctggccttgctgctccacgccgccaggccggacatcgtgctgacacagagccctgccaccctgtctctgagccctggcgatagagccaccatcagctgtagagccagcgagagcgtgaccatcctgggcagccacctgatccactggtatcagcagaagcccggccagccccccagactgctgattcagctggcctccaatgtgcagaccggcgtgccagccagattttccggcagcggcagcagaaccgacttcaccctgaccatcagcagcgtggaacccgaggacttcgccgtgtactactgcctccagagccggaccatccccagaacattcggccagggcaccaagctggaaatcaagagactcgagggacagcctaaggccaatcctaccgtgacactgttccctccaagcagcgaagaactccaggccaacaaggccacacttgtgtgcctgatctccgacttctaccctggggctgtgacagtggcttggaaggccgatggatctcctgtgaaagccggcgtggaaaccaccaagccatccaagcagagcaacaacaaatacgccgccagctcctacctgagcctgacacctgagcagtggaagtcccacagatcctacagctgccaagtgacccacgaaggcagcaccgtggaaaagacagtggcccctacagagtgcagcggatccctgggagagcctcagctgtgctatatcctggacgccatcctgtttctgtacggcatcgtgctgaccctgctgtactgccggctgaagatccaagtgcggaaggccgccatcaccagctacgagaaatccgacggcgtgtacaccggcctgagcaccagaaatcaagagacatacgagacactgaagcacgaaaagcctccacaaagggccaagcgatctggatctggagcaacaaacttctcactactcaaacaagcaggtgacgtggaggagaatcccgggcctactagtatggactggatttggcgcatccttttccttgtcggcgctgctaccggcgcgcattccttcgaacaggtgcagctggtgcagtctggccccgaagtgaagaaacccggcgagtccgtgaagatcagctgcaaggccagcggctacaccttccggcactacagcatgaactgggtcaagcaggccccaggccagggcctgaagtggatgggcagaatcaacaccgagagcggcgtgcccatctacgccgacgacttcaagggccggttcagcttcaccgtggacaccagcgccagcaccgcctacctggaaatctccagcctgaccagcgaggataccgccgtgtatttctgctccaacgactacctgtacagcctggatttctggggccagggaaccaccctgacagtgtcctctacgcgtgcctctacaaagggaccctccgtgtttcctctggctcccagcagcaagtctacaagcggaggaacagccgctctgggctgcctggtcaaggattactttcccgagcctgtgaccgtgtcctggaatagcggagcactgacaagcggcgtgcacacctttccagccgtgctgcaaagcagcggcctgtactctctgagcagcgtggtcacagtgcctagctctagcctgggcacccagacctacatctgcaatgtgaaccacaagcctagcaacaccaaggtggacaagagagtggaacccaagagctgtggtaccctcggagaaccacagctctgttacattctggatgctatcctgttcctctatgggatcgtcctgacactcctgtattgcagactcaaaattcaagttcgcaaagccgccattacctcttacgagaagagtgatggggtgtacacaggactgtctacccggaatcaagaaacctacgaaaccctcaaacatgagaagccacctcagtaa

SEQ ID NO: 19880 - DNA, 3093 bp, synthetic construct
  source 1..3093: mol_type = other DNA
atggccttaccagtgaccgccttgctcctgccgctggccttgctgctccacgccgccaggccggacatcgtgctgacacagagccctgccaccctgtctctgagccctggcgatagagccaccatcagctgtagagccagcgagagcgtgaccatcctgggcagccacctgatccactggtatcagcagaagcccggccagccccccagactgctgattcagctggcctccaatgtgcagaccggcgtgccagccagattttccggcagcggcagcagaaccgacttcaccctgaccatcagcagcgtggaacccgaggacttcgccgtgtactactgcctccagagccggaccatccccagaacattcggccagggcaccaagctggaaatcaagagaggacagcctaaggccaatcctaccgtgacactgttccctccaagcagcgaagaactccaggccaacaaggccacacttgtgtgcctgatctccgacttctaccctggggctgtgacagtggcttggaaggccgatggatctcctgtgaaagccggcgtggaaaccaccaagccatccaagcagagcaacaacaaatacgccgccagctcctacctgagcctgacacctgagcagtggaagtcccacagatcctacagctgccaagtgacccacgaaggcagcaccgtggaaaagacagtggcccctacagagtgcagcggatcccagagcttcggcctgctggaccccaagctgtgctacctgctggatggcatcctgttcatctacggcgtgatcctgaccgccctgttcctgagagtgaagttcagcagaagcgccgacgcccctgcctaccagcagggacagaaccaactgtacaacgagctgaacctgggcagacgggaagagtacgacgtgctggacaagcggagaggcagggaccctgagatgggcggaaagccccggagaaagaacccccaggaaggactgtataacgaactccagaaagacaagatggccgaagcctacagcgagatcggcatgaagggcgagcggagaagaggcaagggccacgatggcctgtaccagggcctgagcaccgccaccaaggacacctatgacgccctgcacatgcaggccctgcctccaagaagggccaagcgatctggatctggagcaacaaacttctcactactcaaacaagcaggtgacgtggaggagaatcccgggcctactagtatggactggatttggcgcatccttttccttgtcggcgctgctaccggcgcgcattccttcgaacaggtgcagctggtgcagtctggccccgaagtgaagaaacccggcgagtccgtgaagatcagctgcaaggccagcggctacaccttccggcactacagcatgaactgggtcaagcaggccccaggccagggcctgaagtggatgggcagaatcaacaccgagagcggcgtgcccatctacgccgacgacttcaagggccggttcagcttcaccgtggacaccagcgccagcaccgcctacctggaaatctccagcctgaccagcgaggataccgccgtgtatttctgctccaacgactacctgtacagcctggatttctggggccagggaaccaccctgacagtgtcctctgcctctacaaagggaccctccgtgtttcctctggctcccagcagcaagtctacaagcggaggaacagccgctctgggctgcctggtcaaggattactttcccgagcctgtgaccgtgtcctggaatagcggagcactgacaagcggcgtgcacacctttccagccgtgctgcaaagcagcggcctgtactctctgagcagcgtggtcacagtgcctagctctagcctgggcacccagacctacatctgcaatgtgaaccacaagcctagcaacaccaaggtggacaagagagtggaacccaagagctgtggtacccagagttttgggttgttggaccctaaattgtgctatctgttggacggaatcctgttcatttacggagtgatcctgaccgcattgttcctgcgggttaagttttccagatccgcagacgcacccgcttaccaacaagggcagaaccaactctacaatgaacttaatttggggcggagggaagagtacgacgttctggacaaaaggaggggacgagatcccgagatgggcggaaagcctcgaaggaagaatccgcaagaggggctttataacgaactccagaaagataaaatggcagaagcctatagtgagattgggatgaagggagaaaggaggaggggtaaaggtcacgatgggttgtaccaaggattgagcacagccactaaagatacctatgatgcgctccacatgcaggccctgccgccaagacgcgccaagagaagcggatctggcgtgaagcagaccctgaatttcgacctgctgaagctggctggcgacgtggaatccaacccaggcccttctagaggccatatgaccgagtacaagcccacggtgcgcctcgccacccgcgacgacgtccccagggccgtacgcaccctcgccgccgcgttcgccgactaccccgccacgcgccacaccgtcgatccggaccgccacatcgagcgggtcaccgagctgcaagaactcttcctcacgcgcgtcgggctcgacatcggcaaggtgtgggtcgcggacgacggcgccgcggtggcggtctggaccacgccggagagcgtcgaagcgggggcggtgttcgccgagatcggcccgcgcatggccgagttgagcggttcccggctggccgcgcagcaacagatggaaggcctcctggcgccgcaccggcccaaggagcccgcgtggttcctggccaccgtcggcgtctcgcccgaccaccagggcaagggtctgggcagcgccgtcgtgctccccggagtggaggcggccgagcgcgccggggtgcccgccttcctggagacctccgcgccccgcaacctccccttctacgagcggctcggcttcaccgtcaccgccgacgtcgaggtgcccgaaggaccgcgcacctggtgcatgacccgcaagcccggtgcctga

SEQ ID NO: 19881 - DNA, 2448 bp, synthetic construct
  source 1..2448: mol_type = other DNA
atggccttaccagtgaccgccttgctcctgccgctggccttgctgctccacgccgccaggccggacatcgtgctgacacagagccctgccaccctgtctctgagccctggcgatagagccaccatcagctgtagagccagcgagagcgtgaccatcctgggcagccacctgatccactggtatcagcagaagcccggccagccccccagactgctgattcagctggcctccaatgtgcagaccggcgtgccagccagattttccggcagcggcagcagaaccgacttcaccctgaccatcagcagcgtggaacccgaggacttcgccgtgtactactgcctccagagccggaccatccccagaacattcggccagggcaccaagctggaaatcaagagactcgaggacctgaagaacgtgttcccacctgaggtggccgtgttcgagcctagcgaggccgagatcagccacacccagaaagccaccctcgtgtgcctggctaccggcttctaccccgaccatgtggaactgtcttggtgggtcaacggcaaagaggtgcacagcggcgtgtctaccgacccccagccactgaaagaacagcccgccctgaacgacagccggtactgcctgagcagcagactgagagtgtccgccaccttctggcagaacccccggaaccacttcagatgccaggtgcagttctacggcctgagcgagaacgacgagtggacccaggacagagccaagcccgtgacccagatcgtgtctgccgaagcctggggcagagccgattgcggatcccagagcttcggcctgctggaccccaagctgtgctacctgctggatggcatcctgttcatctacggcgtgatcctgaccgccctgttcctgagagtgaagttcagcagaagcgccgacgcccctgcctaccagcagggacagaaccaactgtacaacgagctgaacctgggcagacgggaagagtacgacgtgctggacaagcggagaggcagggaccctgagatgggcggaaagccccggagaaagaacccccaggaaggactgtataacgaactccagaaagacaagatggccgaagcctacagcgagatcggcatgaagggcgagcggagaagaggcaagggccacgatggcctgtaccagggcctgagcaccgccaccaaggacacctatgacgccctgcacatgcaggccctgcctccaagaagggccaagcgatctggatctggagcaacaaacttctcactactcaaacaagcaggtgacgtggaggagaatcccgggcctactagtatggactggatttggcgcatccttttccttgtcggcgctgctaccggcgcgcattccttcgaacaggtgcagctggtgcagtctggccccgaagtgaagaaacccggcgagtccgtgaagatcagctgcaaggccagcggctacaccttccggcactacagcatgaactgggtcaagcaggccccaggccagggcctgaagtggatgggcagaatcaacaccgagagcggcgtgcccatctacgccgacgacttcaagggccggttcagcttcaccgtggacaccagcgccagcaccgcctacctggaaatctccagcctgaccagcgaggataccgccgtgtatttctgctccaacgactacctgtacagcctggatttctggggccagggaaccaccctgacagtgtcctctacgcgtatccagaaccctgatcctgccgtgtaccagctgcgggatagcaagagcagcgacaagagcgtgtgtctgttcaccgacttcgacagccagaccaacgtgtcccagagcaaggactccgacgtgtacatcaccgataagaccgtgctggacatgcggagcatggacttcaagagcaactccgccgtggcctggtccaacaagtccgatttcgcctgcgccaacgccttcaacaacagcattatccccgaggacacattcttcccaagccccgagagcagctgcggtacccagagttttgggttgttggaccctaaattgtgctatctgttggacggaatcctgttcatttacggagtgatcctgaccgcattgttcctgcgggttaagttttccagatccgcagacgcacccgcttaccaacaagggcagaaccaactctacaatgaacttaatttggggcggagggaagagtacgacgttctggacaaaaggaggggacgagatcccgagatgggcggaaagcctcgaaggaagaatccgcaagaggggctttataacgaactccagaaagataaaatggcagaagcctatagtgagattgggatgaagggagaaaggaggaggggtaaaggtcacgatgggttgtaccaaggattgagcacagccactaaagatacctatgatgcgctccacatgcaggccctgccgccaaga

SEQ ID NO: 19882 - DNA, 1488 bp, synthetic construct
  source 1..1488: mol_type = other DNA
atggccttaccagtgaccgccttgctcctgccgctggccttgctgctccacgccgccaggccggacatcgtgctgacacagagcccttctagcctgtctgccagcgtgggagatagagccaccatcagctgtagagccagcgagagcgtgacaatcctgggcagccacctgatctactggtatcagcagaagcccggacaggcccctagactgctgattcagctggcctccaatgtgcagactggcgtgccagccagattttctggcagcggctctggcaccgatttcaccctgacaatcagcagcgtggaacccgaggatgtggccgtgtactactgcctccagagccggacaatccccagaacctttggacagggcaccaaggtggaaatcaaaggcggaggcggaagtggaggcggaggatctggcggcggaggctctcagattcagctcgtgcagtctggccccgagctgaagaaacctggcggctctgtgaagatcagctgtgccgccagcggctacaccttcaccgactactctatcaactgggtccgacaggctcccggcaaaggactggaatgggtcggatggatcaacaccgagacaagagagcccgcctacgcctacgacttcagaggcagattcaccttcagcgccgacaccagcaagagcacagcctacctccagatgaacagcctgagagccgaggacaccgccgtgtattattgcgccctggactacagctacgctatggactattggggccagggcaccctggtcacagtctcttctacgcgtgagcagaaactgatctcggaagaggatctgaaaattgaagttatgtatcctcctccttacctagacaatgagaagagcaatggaaccattatccatgtgaaagggaaacacctttgtccaagtcccctatttcccggaccttctaagcccttttgggtgctggtggtggttgggggagtcctggcttgctatagcttgctagtaacagtggcctttattattttctgggtgaggagtaagaggagcaggctcctgcacagtgactacatgaacatgactccacgccgccccggacccacccgcaagcattaccagccctatgccccaccacgcgacttcgcagcctatcgctccagagtgaagttcagcaggagcgcagacgcccccgcgtaccagcagggccagaaccagctctataacgagctcaatctaggacgaagagaggagtacgatgttttggacaagagacgtggccgggaccctgagatggggggaaagccgagaaggaagaaccctcaggaaggcctgtacaatgaactgcagaaagataagatggcggaggcctacagtgagattgggatgaaaggcgagcgccggaggggcaaggggcacgatggcctttaccagggtctcagtacagccaccaaggacacctacgacgcccttcacatgcaggccctgccccctcgc

SEQ ID NO: 19883 - DNA, 1509 bp, synthetic construct
  source 1..1509: mol_type = other DNA
atggccttaccagtgaccgccttgctcctgccgctggccttgctgctccacgccgccaggccggacatcgtgctgacacagagcccttctagcctgtctgccagcgtgggagatagagccaccatcagctgtagagccagcgagagcgtgacaatcctgggcagccacctgatctactggtatcagcagaagcccggacaggcccctagactgctgattcagctggcctccaatgtgcagactggcgtgccagccagattttctggcagcggctctggcaccgatttcaccctgacaatcagcagcgtggaacccgaggatgtggccgtgtactactgcctccagagccggacaatccccagaacctttggacagggcaccaaggtggaaatcaaaggcggaggcggaagtggaggcggaggatctggcggcggaggctctcagattcagctcgtgcagtctggccccgagctgaagaaacctggcggctctgtgaagatcagctgtgccgccagcggctacaccttcaccgactactctatcaactgggtccgacaggctcccggcaaaggactggaatgggtcggatggatcaacaccgagacaagagagcccgcctacgcctacgacttcagaggcagattcaccttcagcgccgacaccagcaagagcacagcctacctccagatgaacagcctgagagccgaggacaccgccgtgtattattgcgccctggactacagctacgctatggactattggggccagggcaccctggtcacagtctcttctacgcgtgagcagaaactgatctcggaagaggatctggcgaagcccaccacgacgccagcgccgcgaccaccaacaccggcgcccaccatcgcgtcgcagcccctgtccctgcgcccagaggcgtgccggccagcggcggggggcgcagtgcacacgagggggctggacttcgcctgtgacatctacatctgggcgcccttggccgggacttgtggggtccttctcctgtcactggttatcaccctttactgcaaacggggcagaaagaaactcctgtatatattcaaacaaccatttatgagaccagtacaaactactcaagaggaagatggctgtagctgccgatttccagaagaagaagaaggaggatgtgaactgagagtgaagttcagcaggagcgcagacgcccccgcgtaccagcagggccagaaccagctctataacgagctgaatctaggacgaagagaggagtacgatgttttggacaagagacgtggccgggaccctgagatggggggaaagccgagaaggaagaaccctcaggaaggcctgtacaatgaactgcagaaagataagatggcggaggcctacagtgagattgggatgaaaggcgagcgccggaggggcaaggggcacgatggcctttaccagggtctcagtacagccaccaaggacacctacgacgcccttcacatgcaggccctgccccctcgctga

SEQ ID NO: 19884 - DNA, 1509 bp, synthetic construct
  source 1..1509: mol_type = other DNA
atggccttaccagtgaccgccttgctcctgccgctggccttgctgctccacgccgccaggccgcagattcagctcgtgcagtctggccccgagctgaagaaacctggcggctctgtgaagatcagctgtgccgccagcggctacaccttcaccgactactctatcaactgggtccgacaggctcccggcaaaggactggaatgggtcggatggatcaacaccgagacaagagagcccgcctacgcctacgacttcagaggcagattcaccttcagcgccgacaccagcaagagcacagcctacctccagatgaacagcctgagagccgaggacaccgccgtgtattattgcgccctggactacagctacgctatggactattggggccagggcaccctggtcacagtctcttctggcggaggcggaagtggaggcggaggatctggcggcggaggctctgacatcgtgctgacacagagcccttctagcctgtctgccagcgtgggagatagagccaccatcagctgtagagccagcgagagcgtgacaatcctgggcagccacctgatctactggtatcagcagaagcccggacaggcccctagactgctgattcagctggcctccaatgtgcagactggcgtgccagccagattttctggcagcggctctggcaccgatttcaccctgacaatcagcagcgtggaacccgaggatgtggccgtgtactactgcctccagagccggacaatccccagaacctttggacagggcaccaaggtggaaatcaaaacgcgtgagcagaaactgatctcggaagaggatctggcgaagcccaccacgacgccagcgccgcgaccaccaacaccggcgcccaccatcgcgtcgcagcccctgtccctgcgcccagaggcgtgccggccagcggcggggggcgcagtgcacacgagggggctggacttcgcctgtgacatctacatctgggcgcccttggccgggacttgtggggtccttctcctgtcactggttatcaccctttactgcaaacggggcagaaagaaactcctgtatatattcaaacaaccatttatgagaccagtacaaactactcaagaggaagatggctgtagctgccgatttccagaagaagaagaaggaggatgtgaactgagagtgaagttcagcaggagcgcagacgcccccgcgtaccagcagggccagaaccagctctataacgagctgaatctaggacgaagagaggagtacgatgttttggacaagagacgtggccgggaccctgagatggggggaaagccgagaaggaagaaccctcaggaaggcctgtacaatgaactgcagaaagataagatggcggaggcctacagtgagattgggatgaaaggcgagcgccggaggggcaaggggcacgatggcctttaccagggtctcagtacagccaccaaggacacctacgacgcccttcacatgcaggccctgccccctcgctga

SEQ ID NO: 19885 - DNA, 2748 bp, synthetic construct
  source 1..2748: mol_type = other DNA
atggccttaccagtgaccgccttgctcctgccgctggccttgctgctccacgccgccaggccggacatcgtgctgacacagagcccttctagcctgtctgccagcgtgggagatagagccaccatcagctgtagagccagcgagagcgtgacaatcctgggcagccacctgatctactggtatcagcagaagcccggacaggcccctagactgctgattcagctggcctccaatgtgcagactggcgtgccagccagattttctggcagcggctctggcaccgatttcaccctgacaatcagcagcgtggaacccgaggatgtggccgtgtactactgcctccagagccggacaatccccagaacctttggacagggcaccaaggtggaaatcaaaggcggaggcggaagtggaggcggaggatctggcggcggaggctctcagattcagctcgtgcagtctggccccgagctgaagaaacctggcggctctgtgaagatcagctgtgccgccagcggctacaccttcaccgactactctatcaactgggtccgacaggctcccggcaaaggactggaatgggtcggatggatcaacaccgagacaagagagcccgcctacgcctacgacttcagaggcagattcaccttcagcgccgacaccagcaagagcacagcctacctccagatgaacagcctgagagccgaggacaccgccgtgtattattgcgccctggactacagctacgctatggactattggggccagggcaccctggtcacagtctcttctacgcgtgagcagaaactgatctcggaagaggatctggcgaagcccaccacgacgccagcgccgcgaccaccaacaccggcgcccaccatcgcgtcgcagcccctgtccctgcgcccagaggcgtgccggccagcggcggggggcgcagtgcacacgagggggctggacttcgcctgtgacatctacatctgggcgcccttggccgggacttgtggggtccttctcctgtcactggttatcaccctttactgcgggcgcgccagagtgaagttcagcaggagcgcagacgcccccgcgtaccagcagggccagaaccagctctataacgagctgaatctaggacgaagagaggagtacgatgttttggacaagagacgtggccgggaccctgagatggggggaaagccgagaaggaagaaccctcaggaaggcctgtacaatgaactgcagaaagataagatggcggaggcctacagtgagattgggatgaaaggcgagcgccggaggggcaaggggcacgatggcctttaccagggtctcagtacagccaccaaggacacctacgacgcccttcacatgcaggccctgccccctcgctctagaggatctggagcaacaaacttctcactactcaaacaagcaggtgacgtggaggagaatcccgggcctgggatccacatggccacttacgaggttctctgtgaggtggcgcggaaactgggcacggatgacagggaagtggtattgttcctcctaaacgtgttcatacctcaacccacactggcccaattaattggagctcttagagctttaaaggaggagggcaggttaacgtttcccctgttagcggaatgtctgtttcgtgcaggtcgcagagacctcttgcgcgacctgcttcacttagacccgcgttttttagagcgccacctagcgggcacaatgagttatttcagcccttatcagctcactgttctccacgtagacggggagctgtgtgcgagggatattaggtctttgatatttttaagcaaggacactatagggtctcgcagcacaccacagacattcttacactgggtgtactgtatggaaaacttagacctactgggtcccactgacgtggatgccctaatgtcaatgcttagatctttgtcaagagtagacctacagcgccaagtgcaaaccctaatgggccttcacctttccggcccatcacactcccaacactatcgccatacaccactcgagaccgatttctacgactacaaggacgacgatgacaagactagtggctccggcgagggcagaggaagtctactaacctgcggagatgtggaagaaaatcctggcccacatatgaccgagtacaagcccacggtgcgcctcgccacccgcgacgacgtccccagggccgtacgcaccctcgccgccgcgttcgccgactaccccgccacgcgccacaccgtcgatccggaccgccacatcgagcgggtcaccgagctgcaagaactcttcctcacgcgcgtcgggctcgacatcggcaaggtgtgggtcgcggacgacggcgccgcggtggcggtctggaccacgccggagagcgtcgaagcgggggcggtgttcgccgagatcggcccgcgcatggccgagttgagcggttcccggctggccgcgcagcaacagatggaaggcctcctggcgccgcaccggcccaaggagcccgcgtggttcctggccaccgtcggcgtctcgcccgaccaccagggcaagggtctgggcagcgccgtcgtgctccccggagtggaggcggccgagcgcgccggggtgcccgccttcctggagacctccgcgccccgcaacctccccttctacgagcggctcggcttcaccgtcaccgccgacgtcgaggtgcccgaaggaccgcgcacctggtgcatgacccgcaagcccggtgcctga

SEQ ID NO: 19886 - DNA, 2568 bp, synthetic construct
  source 1..2568: mol_type = other DNA
atggccttaccagtgaccgccttgctcctgccgctggccttgctgctccacgccgccaggccggacatcgtgctgacacagagcccttctagcctgtctgccagcgtgggagatagagccaccatcagctgtagagccagcgagagcgtgacaatcctgggcagccacctgatctactggtatcagcagaagcccggacaggcccctagactgctgattcagctggcctccaatgtgcagactggcgtgccagccagattttctggcagcggctctggcaccgatttcaccctgacaatcagcagcgtggaacccgaggatgtggccgtgtactactgcctccagagccggacaatccccagaacctttggacagggcaccaaggtggaaatcaaactcgagatccagaaccctgatcctgccgtgtaccagctgcgggatagcaagagcagcgacaagagcgtgtgtctgttcaccgacttcgacagccagaccaacgtgtcccagagcaaggactccgacgtgtacatcaccgataagtgcgtgctggacatgcggagcatggacttcaagagcaactccgccgtggcctggtccaacaagtccgatttcgcctgcgccaacgccttcaacaacagcattatccccgaggacacattcttcccaagcagcgacgtgccctgcgacgtgaagctggtggaaaagagcttcgagacagacaccaacctgaacttccagaacctgagcgtgatcggcttcagaatcctgctgctgaaagtggccggctttaacctgctgatgaccctgcggctgtggtccagccgcgccaagagaagcggatctggcgtgaagcagaccctgaatttcgacctgctgaagctggctggcgacgtggaatccaacccaggccctactagtatggactggatttggcgcatccttttccttgtcggcgctgctaccggcgcgcattccttcgaacagattcagctcgtgcagtctggccccgagctgaagaaacctggcggctctgtgaagatcagctgtgccgccagcggctacaccttcaccgactactctatcaactgggtccgacaggctcccggcaaaggactggaatgggtcggatggatcaacaccgagacaagagagcccgcctacgcctacgacttcagaggcagattcaccttcagcgccgacaccagcaagagcacagcctacctccagatgaacagcctgagagccgaggacaccgccgtgtattattgcgccctggactacagctacgctatggactattggggccagggcaccctggtcacagtctcttctacgcgtgaggacctgaagaacgtgttcccacctgaggtggccgtgttcgagcctagcaaggccgagatcgcccacacccagaaagccaccctcgtgtgcctggctaccggcttctaccccgaccatgtggaactgtcttggtgggtcaacggcaaagaggtgcacagcggcgtgtgtaccgacccccagccactgaaagaacagcccgccctgaacgacagccggtactgcctgagcagcagactgagagtgtccgccaccttctggcagaacccccggaaccacttcagatgccaggtgcagttctacggcctgagcgagaacgacgagtggacccaggacagagccaagcccgtgacccagatcgtgtctgccgaagcctggggcagagccgattgcggcatcaccagcgccagctaccaccagggcgtgctgagcgccaccatcctgtacgagatcctgctgggcaaggccaccctgtacgccgtgctggtgtctgccctggtgctgatggctatggtcaagcggaaggacagccggggaagggccaagcgatctggatctggagcaacaaacttctcactactcaaacaagcaggtgacgtggaggagaatcccgggccttctagaggccatatgaccgagtacaagcccacggtgcgcctcgccacccgcgacgacgtccccagggccgtacgcaccctcgccgccgcgttcgccgactaccccgccacgcgccacaccgtcgatccggaccgccacatcgagcgggtcaccgagctgcaagaactcttcctcacgcgcgtcgggctcgacatcggcaaggtgtgggtcgcggacgacggcgccgcggtggcggtctggaccacgccggagagcgtcgaagcgggggcggtgttcgccgagatcggcccgcgcatggccgagttgagcggttcccggctggccgcgcagcaacagatggaaggcctcctggcgccgcaccggcccaaggagcccgcgtggttcctggccaccgtcggcgtctcgcccgaccaccagggcaagggtctgggcagcgccgtcgtgctccccggagtggaggcggccgagcgcgccggggtgcccgccttcctggagacctccgcgccccgcaacctccccttctacgagcggctcggcttcaccgtcaccgccgacgtcgaggtgcccgaaggaccgcgcacctggtgcatgacccgcaagcccggtgcctga

SEQ ID NO: 19887 - DNA, 2565 bp, synthetic construct
  source 1..2565: mol_type = other DNA
atggccttaccagtgaccgccttgctcctgccgctggccttgctgctccacgccgccaggccggacatcgtgctgacacagagcccttctagcctgtctgccagcgtgggagatagagccaccatcagctgtagagccagcgagagcgtgacaatcctgggcagccacctgatctactggtatcagcagaagcccggacaggcccctagactgctgattcagctggcctccaatgtgcagactggcgtgccagccagattttctggcagcggctctggcaccgatttcaccctgacaatcagcagcgtggaacccgaggatgtggccgtgtactactgcctccagagccggacaatccccagaacctttggacagggcaccaaggtggaaatcaaactcgaggacctgaagaacgtgttcccacctgaggtggccgtgttcgagcctagcaaggccgagatcgcccacacccagaaagccaccctcgtgtgcctggctaccggcttctaccccgaccatgtggaactgtcttggtgggtcaacggcaaagaggtgcacagcggcgtgtgtaccgacccccagccactgaaagaacagcccgccctgaacgacagccggtactgcctgagcagcagactgagagtgtccgccaccttctggcagaacccccggaaccacttcagatgccaggtgcagttctacggcctgagcgagaacgacgagtggacccaggacagagccaagcccgtgacccagatcgtgtctgccgaagcctggggcagagccgattgcggcatcaccagcgccagctaccaccagggcgtgctgagcgccaccatcctgtacgagatcctgctgggcaaggccaccctgtacgccgtgctggtgtctgccctggtgctgatggctatggtcaagcggaaggacagccggggaagggccaagcgatctggatctggagcaacaaacttctcactactcaaacaagcaggtgacgtggaggagaatcccgggcctactagtatggactggatttggcgcatccttttccttgtcggcgctgctaccggcgcgcattccttcgaacagattcagctcgtgcagtctggccccgagctgaagaaacctggcggctctgtgaagatcagctgtgccgccagcggctacaccttcaccgactactctatcaactgggtccgacaggctcccggcaaaggactggaatgggtcggatggatcaacaccgagacaagagagcccgcctacgcctacgacttcagaggcagattcaccttcagcgccgacaccagcaagagcacagcctacctccagatgaacagcctgagagccgaggacaccgccgtgtattattgcgccctggactacagctacgctatggactattggggccagggcaccctggtcacagtctcttctacgcgtatccagaaccctgatcctgccgtgtaccagctgcgggatagcaagagcagcgacaagagcgtgtgtctgttcaccgacttcgacagccagaccaacgtgtcccagagcaaggactccgacgtgtacatcaccgataagtgcgtgctggacatgcggagcatggacttcaagagcaactccgccgtggcctggtccaacaagtccgatttcgcctgcgccaacgccttcaacaacagcattatccccgaggacacattcttcccaagcagcgacgtgccctgcgacgtgaagctggtggaaaagagcttcgagacagacaccaacctgaacttccagaacctgagcgtgatcggcttcagaatcctgctgctgaaagtggccggctttaacctgctgatgaccctgcggctgtggtccagccgcgccaagagaagcggatctggcgtgaagcagaccctgaatttcgacctgctgaagctggctggcgacgtggaatccaacccaggcccttctagaggccatatgaccgagtacaagcccacggtgcgcctcgccacccgcgacgacgtccccagggccgtacgcaccctcgccgccgcgttcgccgactaccccgccacgcgccacaccgtcgatccggaccgccacatcgagcgggtcaccgagctgcaagaactcttcctcacgcgcgtcgggctcgacatcggcaaggtgtgggtcgcggacgacggcgccgcggtggcggtctggaccacgccggagagcgtcgaagcgggggcggtgttcgccgagatcggcccgcgcatggccgagttgagcggttcccggctggccgcgcagcaacagatggaaggcctcctggcgccgcaccggcccaaggagcccgcgtggttcctggccaccgtcggcgtctcgcccgaccaccagggcaagggtctgggcagcgccgtcgtgctccccggagtggaggcggccgagcgcgccggggtgcccgccttcctggagacctccgcgccccgcaacctccccttctacgagcggctcggcttcaccgtcaccgccgacgtcgaggtgcccgaaggaccgcgcacctggtgcatgacccgcaagcccggtgcctga

SEQ ID NO: 19888 - DNA, 1863 bp, synthetic construct
  source 1..1863: mol_type = other DNA
atggccttaccagtgaccgccttgctcctgccgctggccttgctgctccacgccgccaggccggacatcgtgctgacacagagcccttctagcctgtctgccagcgtgggagatagagccaccatcagctgtagagccagcgagagcgtgacaatcctgggcagccacctgatctactggtatcagcagaagcccggacaggcccctagactgctgattcagctggcctccaatgtgcagactggcgtgccagccagattttctggcagcggctctggcaccgatttcaccctgacaatcagcagcgtggaacccgaggatgtggccgtgtactactgcctccagagccggacaatccccagaacctttggacagggcaccaaggtggaaatcaaactcgaggacctgaagaacgtgttcccacctgaggtggccgtgttcgagcctagcgaggccgagatcagccacacccagaaagccaccctcgtgtgcctggctaccggcttctaccccgaccatgtggaactgtcttggtgggtcaacggcaaagaggtgcacagcggcgtgtgtaccgacccccagccactgaaagaacagcccgccctgaacgacagccggtactgcctgagcagcagactgagagtgtccgccaccttctggcagaacccccggaaccacttcagatgccaggtgcagttctacggcctgagcgagaacgacgagtggacccaggacagagccaagcccgtgacccagatcgtgtctgccgaagcctggggcagagccgattgcggctttaccagcgagagctaccagcagggcgtgctgagcgccaccatcctgtacgagatcctgctgggcaaggccaccctgtacgccgtgctggtgtctgccctggtgctgatggctatggtcaagcggaaggacagccggggaagggccaagcgatctggatctggagcaacaaacttctcactactcaaacaagcaggtgacgtggaggagaatcccgggcctactagtatggactggatttggcgcatccttttccttgtcggcgctgctaccggcgcgcattccttcgaacagattcagctcgtgcagtctggccccgagctgaagaaacctggcggctctgtgaagatcagctgtgccgccagcggctacaccttcaccgactactctatcaactgggtccgacaggctcccggcaaaggactggaatgggtcggatggatcaacaccgagacaagagagcccgcctacgcctacgacttcagaggcagattcaccttcagcgccgacaccagcaagagcacagcctacctccagatgaacagcctgagagccgaggacaccgccgtgtattattgcgccctggactacagctacgctatggactattggggccagggcaccctggtcacagtctcttctacgcgtatccagaaccctgatcctgccgtgtaccagctgcgggatagcaagagcagcgacaagagcgtgtgtctgttcaccgacttcgacagccagaccaacgtgtcccagagcaaggactccgacgtgtacatcaccgataagtgcgtgctggacatgcggagcatggacttcaagagcaactccgccgtggcctggtccaacaagtccgatttcgcctgcgccaacgccttcaacaacagcattatccccgaggacacattcttcccaagccccgagagcagctgcgacgtgaagctggtggaaaagagcttcgagacagacaccaacctgaacttccagaacctgagcgtgatcggcttcagaatcctgctgctgaaagtggccggctttaacctgctgatgaccctgcggctgtggtccagc

SEQ ID NO: 19889 - DNA, 2538 bp, synthetic construct
  source 1..2538: mol_type = other DNA
atggccttaccagtgaccgccttgctcctgccgctggccttgctgctccacgccgccaggccggacatcgtgctgacacagagcccttctagcctgtctgccagcgtgggagatagagccaccatcagctgtagagccagcgagagcgtgacaatcctgggcagccacctgatctactggtatcagcagaagcccggacaggcccctagactgctgattcagctggcctccaatgtgcagactggcgtgccagccagattttctggcagcggctctggcaccgatttcaccctgacaatcagcagcgtggaacccgaggatgtggccgtgtactactgcctccagagccggacaatccccagaacctttggacagggcaccaaggtggaaatcaaactcgaggacctgaagaacgtgttcccacctgaggtggccgtgttcgagcctagcgaggccgagatcagccacacccagaaagccaccctcgtgtgcctggctaccggcttctaccccgaccatgtggaactgtcttggtgggtcaacggcaaagaggtgcacagcggcgtgtgtaccgacccccagccactgaaagaacagcccgccctgaacgacagccggtactgcctgagcagcagactgagagtgtccgccaccttctggcagaacccccggaaccacttcagatgccaggtgcagttctacggcctgagcgagaacgacgagtggacccaggacagagccaagcccgtgacccagatcgtgtctgccgaagcctggggcagagccgattgcggctttaccagcgagagctaccagcagggcgtgctgagcgccaccatcctgtacgagatcctgctgggcaaggccaccctgtacgccgtgctggtgtctgccctggtgctgatggctatggtcaagcggaaggacagccggggaagggccaagcgatctggatctggagcaacaaacttctcactactcaaacaagcaggtgacgtggaggagaatcccgggcctactagtatggactggatttggcgcatccttttccttgtcggcgctgctaccggcgcgcattccttcgaacagattcagctcgtgcagtctggccccgagctgaagaaacctggcggctctgtgaagatcagctgtgccgccagcggctacaccttcaccgactactctatcaactgggtccgacaggctcccggcaaaggactggaatgggtcggatggatcaacaccgagacaagagagcccgcctacgcctacgacttcagaggcagattcaccttcagcgccgacaccagcaagagcacagcctacctccagatgaacagcctgagagccgaggacaccgccgtgtattattgcgccctggactacagctacgctatggactattggggccagggcaccctggtcacagtctcttctacgcgtatccagaaccctgatcctgccgtgtaccagctgcgggatagcaagagcagcgacaagagcgtgtgtctgttcaccgacttcgacagccagaccaacgtgtcccagagcaaggactccgacgtgtacatcaccgataagtgcgtgctggacatgcggagcatggacttcaagagcaactccgccgtggcctggtccaacaagtccgatttcgcctgcgccaacgccttcaacaacagcattatccccgaggacacattcttcccaagccccgagagcagctgcgacgtgaagctggtggaaaagagcttcgagacagacaccaacctgaacttccagaacctgagcgtgatcggcttcagaatcctgctgctgaaagtggccggctttaacctgctgatgaccctgcggctgtggtccagccgcgccaagagaagcggatctggcgtgaagcagaccctgaatttcgacctgctgaagctggctggcgacgtggaatccaacccaggcccttctagaggcgggatccacaccatggctacctacgaggtgctgtgcgaggtggcaagaaagctgggcaccgacgacagagaagtggtgctgttcctgctgaacgtgttcatccctcagcctacactggcccagctgatcggtgcactgagagccctgaaagaggaaggccggctgacctttcctctgctggccgaatgcctgttcagagccggaagaagggatctgctgcgggacctgctgcatctggaccccagatttctggaaagacacctggccggcaccatgagctacttcagcccttaccagctgaccgtgctgcacgttgacggcgaactgtgcgccagagatattcggagcctgatcttcctgagcaaggacaccatcggcagccggtctacccctcagacatttctgcactgggtgtactgcatggaaaacctggacctgctcggccccacagatgtggatgccctgatgtccatgctgagaagcctgagcagagtggacctccagagacaggtgcagacactgatgggactgcacctgagcggacctagccacagccagcactacagacacacccct

SEQ ID NO: 19890 - DNA, 1875 bp, synthetic construct
  source 1..1875: mol_type = other DNA
atggccttaccagtgaccgccttgctcctgccgctggccttgctgctccacgccgccaggccggacatcgtgctgacacagagcccttctagcctgtctgccagcgtgggagatagagccaccatcagctgtagagccagcgagagcgtgacaatcctgggcagccacctgatctactggtatcagcagaagcccggacaggcccctagactgctgattcagctggcctccaatgtgcagactggcgtgccagccagattttctggcagcggctctggcaccgatttcaccctgacaatcagcagcgtggaacccgaggatgtggccgtgtactactgcctccagagccggacaatccccagaacctttggacagggcaccaaggtggaaatcaaactcgagatccagaaccctgatcctgccgtgtaccagctgcgggatagcaagagcagcgacaagagcgtgtgtctgttcaccgacttcgacagccagaccaacgtgtcccagagcaaggactccgacgtgtacatcaccgataagtgcgtgctggacatgcggagcatggacttcaagagcaactccgccgtggcctggtccaacaagtccgatttcgcctgcgccaacgccttcaacaacagcattatccccgaggacacattcttcccaagccccgagagcagctgcgacgtgaagctggtggaaaagagcttcgagacagacaccaacctgaacttccagaacctgagcgtgatcggcttcagaatcctgctgctgaaagtggccggctttaacctgctgatgaccctgcggctgtggtccagccgcgccaagagaagcggatctggcgtgaagcagaccctgaatttcgacctgctgaagctggctggcgacgtggaatccaacccaggccctactagtatggactggatttggcgcatccttttccttgtcggcgctgctaccggcgcgcattccttcgaacagattcagctcgtgcagtctggccccgagctgaagaaacctggcggctctgtgaagatcagctgtgccgccagcggctacaccttcaccgactactctatcaactgggtccgacaggctcccggcaaaggactggaatgggtcggatggatcaacaccgagacaagagagcccgcctacgcctacgacttcagaggcagattcaccttcagcgccgacaccagcaagagcacagcctacctccagatgaacagcctgagagccgaggacaccgccgtgtattattgcgccctggactacagctacgctatggactattggggccagggcaccctggtcacagtctcttctacgcgtgaggacctgaagaacgtgttcccacctgaggtggccgtgttcgagcctagcgaggccgagatcagccacacccagaaagccaccctcgtgtgcctggctaccggcttctaccccgaccatgtggaactgtcttggtgggtcaacggcaaagaggtgcacagcggcgtgtgtaccgacccccagccactgaaagaacagcccgccctgaacgacagccggtactgcctgagcagcagactgagagtgtccgccaccttctggcagaacccccggaaccacttcagatgccaggtgcagttctacggcctgagcgagaacgacgagtggacccaggacagagccaagcccgtgacccagatcgtgtctgccgaagcctggggcagagccgattgcggctttaccagcgagagctaccagcagggcgtgctgagcgccaccatcctgtacgagatcctgctgggcaaggccaccctgtacgccgtgctggtgtctgccctggtgctgatggctatggtcaagcggaaggacagccgggga

SEQ ID NO: 19891 - DNA, 2541 bp, synthetic construct
  source 1..2541: mol_type = other DNA
atggccttaccagtgaccgccttgctcctgccgctggccttgctgctccacgccgccaggccggacatcgtgctgacacagagcccttctagcctgtctgccagcgtgggagatagagccaccatcagctgtagagccagcgagagcgtgacaatcctgggcagccacctgatctactggtatcagcagaagcccggacaggcccctagactgctgattcagctggcctccaatgtgcagactggcgtgccagccagattttctggcagcggctctggcaccgatttcaccctgacaatcagcagcgtggaacccgaggatgtggccgtgtactactgcctccagagccggacaatccccagaacctttggacagggcaccaaggtggaaatcaaactcgagatccagaaccctgatcctgccgtgtaccagctgcgggatagcaagagcagcgacaagagcgtgtgtctgttcaccgacttcgacagccagaccaacgtgtcccagagcaaggactccgacgtgtacatcaccgataagtgcgtgctggacatgcggagcatggacttcaagagcaactccgccgtggcctggtccaacaagtccgatttcgcctgcgccaacgccttcaacaacagcattatccccgaggacacattcttcccaagccccgagagcagctgcgacgtgaagctggtggaaaagagcttcgagacagacaccaacctgaacttccagaacctgagcgtgatcggcttcagaatcctgctgctgaaagtggccggctttaacctgctgatgaccctgcggctgtggtccagccgcgccaagagaagcggatctggcgtgaagcagaccctgaatttcgacctgctgaagctggctggcgacgtggaatccaacccaggccctactagtatggactggatttggcgcatccttttccttgtcggcgctgctaccggcgcgcattccttcgaacagattcagctcgtgcagtctggccccgagctgaagaaacctggcggctctgtgaagatcagctgtgccgccagcggctacaccttcaccgactactctatcaactgggtccgacaggctcccggcaaaggactggaatgggtcggatggatcaacaccgagacaagagagcccgcctacgcctacgacttcagaggcagattcaccttcagcgccgacaccagcaagagcacagcctacctccagatgaacagcctgagagccgaggacaccgccgtgtattattgcgccctggactacagctacgctatggactattggggccagggcaccctggtcacagtctcttctacgcgtgaggacctgaagaacgtgttcccacctgaggtggccgtgttcgagcctagcgaggccgagatcagccacacccagaaagccaccctcgtgtgcctggctaccggcttctaccccgaccatgtggaactgtcttggtgggtcaacggcaaagaggtgcacagcggcgtgtgtaccgacccccagccactgaaagaacagcccgccctgaacgacagccggtactgcctgagcagcagactgagagtgtccgccaccttctggcagaacccccggaaccacttcagatgccaggtgcagttctacggcctgagcgagaacgacgagtggacccaggacagagccaagcccgtgacccagatcgtgtctgccgaagcctggggcagagccgattgcggctttaccagcgagagctaccagcagggcgtgctgagcgccaccatcctgtacgagatcctgctgggcaaggccaccctgtacgccgtgctggtgtctgccctggtgctgatggctatggtcaagcggaaggacagccggggaagggccaagcgatctggatctggagcaacaaacttctcactactcaaacaagcaggtgacgtggaggagaatcccgggccttctagaggcgggatccacaccatggctacctacgaggtgctgtgcgaggtggcaagaaagctgggcaccgacgacagagaagtggtgctgttcctgctgaacgtgttcatccctcagcctacactggcccagctgatcggtgcactgagagccctgaaagaggaaggccggctgacctttcctctgctggccgaatgcctgttcagagccggaagaagggatctgctgcgggacctgctgcatctggaccccagatttctggaaagacacctggccggcaccatgagctacttcagcccttaccagctgaccgtgctgcacgttgacggcgaactgtgcgccagagatattcggagcctgatcttcctgagcaaggacaccatcggcagccggtctacccctcagacatttctgcactgggtgtactgcatggaaaacctggacctgctcggccccacagatgtggatgccctgatgtccatgctgagaagcctgagcagagtggacctccagagacaggtgcagacactgatgggactgcacctgagcggacctagccacagccagcactacagacacacccct

SEQ ID NO: 19892 - DNA, 2700 bp, synthetic construct
  source 1..2700: mol_type = other DNA
atggccttaccagtgaccgccttgctcctgccgctggccttgctgctccacgccgccaggccgctcgaggggaaaccaattcccaaccctcttctgggactggattcaaccggcagcggcgaggacctgaagaacgtgttcccacctgaggtggccgtgttcgagcctagcaaggccgagatcgcccacacccagaaagccaccctcgtgtgcctggctaccggcttctaccccgaccatgtggaactgtcttggtgggtcaacggcaaagaggtgcacagcggcgtgtgtaccgacccccagccactgaaagaacagcccgccctgaacgacagccggtactgcctgagcagcagactgagagtgtccgccaccttctggcagaacccccggaaccacttcagatgccaggtgcagttctacggcctgagcgagaacgacgagtggacccaggacagagccaagcccgtgacccagatcgtgtctgccgaagcctggggcagagccgattgcggcatcaccagcgccagctaccaccagggcgtgctgagcgccaccatcctgtacgagatcctgctgggcaaggccaccctgtacgccgtgctggtgtctgccctggtgctgatggctatggtcaagcggaaggacagccggggaagggccaagcgatctggatctggagcaacaaacttctcactactcaaacaagcaggtgacgtggaggagaatcccgggcctactagcatggccttaccagtgaccgccttgctcctgccgctggccttgctgctccacgccgccaggccggacatcgtgctgacacagagcccttctagcctgtctgccagcgtgggagatagagccaccatcagctgtagagccagcgagagcgtgacaatcctgggcagccacctgatctactggtatcagcagaagcccggacaggcccctagactgctgattcagctggcctccaatgtgcagactggcgtgccagccagattttctggcagcggctctggcaccgatttcaccctgacaatcagcagcgtggaacccgaggatgtggccgtgtactactgcctccagagccggacaatccccagaacctttggacagggcaccaaggtggaaatcaaaggcggaggcggaagtggaggcggaggatctggcggcggaggctctcagattcagctcgtgcagtctggccccgagctgaagaaacctggcggctctgtgaagatcagctgtgccgccagcggctacaccttcaccgactactctatcaactgggtccgacaggctcccggcaaaggactggaatgggtcggatggatcaacaccgagacaagagagcccgcctacgcctacgacttcagaggcagattcaccttcagcgccgacaccagcaagagcacagcctacctccagatgaacagcctgagagccgaggacaccgccgtgtattattgcgccctggactacagctacgctatggactattggggccagggcaccctggtcacagtctcttctacgcgtgagcagaaactgatctcggaagaggatgggagcggcatccagaaccctgatcctgccgtgtaccagctgcgggatagcaagagcagcgacaagagcgtgtgtctgttcaccgacttcgacagccagaccaacgtgtcccagagcaaggactccgacgtgtacatcaccgataagtgcgtgctggacatgcggagcatggacttcaagagcaactccgccgtggcctggtccaacaagtccgatttcgcctgcgccaacgccttcaacaacagcattatccccgaggacacattcttcccaagcagcgacgtgccctgcgacgtgaagctggtggaaaagagcttcgagacagacaccaacctgaacttccagaacctgagcgtgatcggcttcagaatcctgctgctgaaagtggccggctttaacctgctgatgaccctgcggctgtggtccagccgcgccaagagaagcggatctggcgtgaagcagaccctgaatttcgacctgctgaagctggctggcgacgtggaatccaacccaggcccttctagaggccatatgaccgagtacaagcccacggtgcgcctcgccacccgcgacgacgtccccagggccgtacgcaccctcgccgccgcgttcgccgactaccccgccacgcgccacaccgtcgatccggaccgccacatcgagcgggtcaccgagctgcaagaactcttcctcacgcgcgtcgggctcgacatcggcaaggtgtgggtcgcggacgacggcgccgcggtggcggtctggaccacgccggagagcgtcgaagcgggggcggtgttcgccgagatcggcccgcgcatggccgagttgagcggttcccggctggccgcgcagcaacagatggaaggcctcctggcgccgcaccggcccaaggagcccgcgtggttcctggccaccgtcggcgtctcgcccgaccaccagggcaagggtctgggcagcgccgtcgtgctccccggagtggaggcggccgagcgcgccggggtgcccgccttcctggagacctccgcgccccgcaacctccccttctacgagcggctcggcttcaccgtcaccgccgacgtcgaggtgcccgaaggaccgcgcacctggtgcatgacccgcaagcccggtgcctga

SEQ ID NO: 19893 - DNA, 2703 bp, synthetic construct
  source 1..2703: mol_type = other DNA
atggccttaccagtgaccgccttgctcctgccgctggccttgctgctccacgccgccaggccgctcgagcagaaactgatctcggaagaggatctgggctccggcgatcgccctgatcctgccgtgtaccagctgcgggatagcaagagcagcgacaagagcgtgtgtctgttcaccgacttcgacagccagaccaacgtgtcccagagcaaggactccgacgtgtacatcaccgataagtgcgtgctggacatgcggagcatggacttcaagagcaactccgccgtggcctggtccaacaagtccgatttcgcctgcgccaacgccttcaacaacagcattatccccgaggacacattcttcccaagccccgagagcagctgcgacgtgaagctggtggaaaagagcttcgagacagacaccaacctgaacttccagaacctgagcgtgatcggcttcagaatcctgctgctgaaagtggccggctttaacctgctgatgaccctgcggctgtggtccagctctagtcgcgccaagagaagcggatctggcgtgaagcagaccctgaatttcgacctgctgaagctggctggcgacgtggaatccaacccaggccccactagcatggccttaccagtgaccgccttgctcctgccgctggccttgctgctccacgccgccaggccggacatcgtgctgacacagagcccttctagcctgtctgccagcgtgggagatagagccaccatcagctgtagagccagcgagagcgtgacaatcctgggcagccacctgatctactggtatcagcagaagcccggacaggcccctagactgctgattcagctggcctccaatgtgcagactggcgtgccagccagattttctggcagcggctctggcaccgatttcaccctgacaatcagcagcgtggaacccgaggatgtggccgtgtactactgcctccagagccggacaatccccagaacctttggacagggcaccaaggtggaaatcaaaggcggaggcggaagtggaggcggaggatctggcggcggaggctctcagattcagctcgtgcagtctggccccgagctgaagaaacctggcggctctgtgaagatcagctgtgccgccagcggctacaccttcaccgactactctatcaactgggtccgacaggctcccggcaaaggactggaatgggtcggatggatcaacaccgagacaagagagcccgcctacgcctacgacttcagaggcagattcaccttcagcgccgacaccagcaagagcacagcctacctccagatgaacagcctgagagccgaggacaccgccgtgtattattgcgccctggactacagctacgctatggactattggggccagggcaccctggtcacagtctcttctacgcgtgggaaaccaattcccaaccctcttctgggactggattcaaccggcagcggcgaggacctgaagaacgtgttcccacctgaggtggccgtgttcgagcctagcgaggccgagatcagccacacccagaaagccaccctcgtgtgcctggctaccggcttctaccccgaccatgtggaactgtcttggtgggtcaacggcaaagaggtgcacagcggcgtgtgtaccgacccccagccactgaaagaacagcccgccctgaacgacagccggtactgcctgagcagcagactgagagtgtccgccaccttctggcagaacccccggaaccacttcagatgccaggtgcagttctacggcctgagcgagaacgacgagtggacccaggacagagccaagcccgtgacccagatcgtgtctgccgaagcctggggcagagccgattgcggctttaccagcgagagctaccagcagggcgtgctgagcgccaccatcctgtacgagatcctgctgggcaaggccaccctgtacgccgtgctggtgtctgccctggtgctgatggctatggtcaagcggaaggacagccggggaagggccaagcgatctggatctggagcaacaaacttctcactactcaaacaagcaggtgacgtggaggagaatcccgggccttctagaggccatatgaccgagtacaagcccacggtgcgcctcgccacccgcgacgacgtccccagggccgtacgcaccctcgccgccgcgttcgccgactaccccgccacgcgccacaccgtcgatccggaccgccacatcgagcgggtcaccgagctgcaagaactcttcctcacgcgcgtcgggctcgacatcggcaaggtgtgggtcgcggacgacggcgccgcggtggcggtctggaccacgccggagagcgtcgaagcgggggcggtgttcgccgagatcggcccgcgcatggccgagttgagcggttcccggctggccgcgcagcaacagatggaaggcctcctggcgccgcaccggcccaaggagcccgcgtggttcctggccaccgtcggcgtctcgcccgaccaccagggcaagggtctgggcagcgccgtcgtgctccccggagtggaggcggccgagcgcgccggggtgcccgccttcctggagacctccgcgccccgcaacctccccttctacgagcggctcggcttcaccgtcaccgccgacgtcgaggtgcccgaaggaccgcgcacctggtgcatgacccgcaagcccggtgcctga

SEQ ID NO: 19894 - DNA, 2565 bp, synthetic construct
  source 1..2565: mol_type = other DNA
atggccttaccagtgaccgccttgctcctgccgctggccttgctgctccacgccgccaggccggacatcgtgctgacacagagcccttctagcctgtctgccagcgtgggagatagagccaccatcagctgtagagccagcgagagcgtgacaatcctgggcagccacctgatctactggtatcagcagaagcccggacaggcccctagactgctgattcagctggcctccaatgtgcagactggcgtgccagccagattttctggcagcggctctggcaccgatttcaccctgacaatcagcagcgtggaacccgaggatgtggccgtgtactactgcctccagagccggacaatccccagaacctttggacagggcaccaaggtggaaatcaaactcgaggacctgaagaacgtgttcccacctgaggtggccgtgttcgagcctagcgaggccgagatcagccacacccagaaagccaccctcgtgtgcctggctaccggcttctaccccgaccatgtggaactgtcttggtgggtcaacggcaaagaggtgcacagcggcgtgtctaccgacccccagccactgaaagaacagcccgccctgaacgacagccggtactgcctgagcagcagactgagagtgtccgccaccttctggcagaacccccggaaccacttcagatgccaggtgcagttctacggcctgagcgagaacgacgagtggacccaggacagagccaagcccgtgacccagatcgtgtctgccgaagcctggggcagagccgattgcggctttaccagcgagagctaccagcagggcgtgctgagcgccaccatcctgtacgagatcctgctgggcaaggccaccctgtacgccgtgctggtgtctgccctggtgctgatggctatggtcaagcggaaggacagccggggaagggccaagcgatctggatctggagcaacaaacttctcactactcaaacaagcaggtgacgtggaggagaatcccgggcctactagtatggactggatttggcgcatccttttccttgtcggcgctgctaccggcgcgcattccttcgaacagattcagctcgtgcagtctggccccgagctgaagaaacctggcggctctgtgaagatcagctgtgccgccagcggctacaccttcaccgactactctatcaactgggtccgacaggctcccggcaaaggactggaatgggtcggatggatcaacaccgagacaagagagcccgcctacgcctacgacttcagaggcagattcaccttcagcgccgacaccagcaagagcacagcctacctccagatgaacagcctgagagccgaggacaccgccgtgtattattgcgccctggactacagctacgctatggactattggggccagggcaccctggtcacagtctcttctacgcgtatccagaaccctgatcctgccgtgtaccagctgcgggatagcaagagcagcgacaagagcgtgtgtctgttcaccgacttcgacagccagaccaacgtgtcccagagcaaggactccgacgtgtacatcaccgataagaccgtgctggacatgcggagcatggacttcaagagcaactccgccgtggcctggtccaacaagtccgatttcgcctgcgccaacgccttcaacaacagcattatccccgaggacacattcttcccaagccccgagagcagctgcgacgtgaagctggtggaaaagagcttcgagacagacaccaacctgaacttccagaacctgagcgtgatcggcttcagaatcctgctgctgaaagtggccggctttaacctgctgatgaccctgcggctgtggtccagccgcgccaagagaagcggatctggcgtgaagcagaccctgaatttcgacctgctgaagctggctggcgacgtggaatccaacccaggcccttctagaggccatatgaccgagtacaagcccacggtgcgcctcgccacccgcgacgacgtccccagggccgtacgcaccctcgccgccgcgttcgccgactaccccgccacgcgccacaccgtcgatccggaccgccacatcgagcgggtcaccgagctgcaagaactcttcctcacgcgcgtcgggctcgacatcggcaaggtgtgggtcgcggacgacggcgccgcggtggcggtctggaccacgccggagagcgtcgaagcgggggcggtgttcgccgagatcggcccgcgcatggccgagttgagcggttcccggctggccgcgcagcaacagatggaaggcctcctggcgccgcaccggcccaaggagcccgcgtggttcctggccaccgtcggcgtctcgcccgaccaccagggcaagggtctgggcagcgccgtcgtgctccccggagtggaggcggccgagcgcgccggggtgcccgccttcctggagacctccgcgccccgcaacctccccttctacgagcggctcggcttcaccgtcaccgccgacgtcgaggtgcccgaaggaccgcgcacctggtgcatgacccgcaagcccggtgcctga

SEQ ID NO: 19895 - DNA, 2811 bp, synthetic construct
  source 1..2811: mol_type = other DNA
atggccttaccagtgaccgccttgctcctgccgctggccttgctgctccacgccgccaggccggacatcgtgctgacacagagcccttctagcctgtctgccagcgtgggagatagagccaccatcagctgtagagccagcgagagcgtgacaatcctgggcagccacctgatctactggtatcagcagaagcccggacaggcccctagactgctgattcagctggcctccaatgtgcagactggcgtgccagccagattttctggcagcggctctggcaccgatttcaccctgacaatcagcagcgtggaacccgaggatgtggccgtgtactactgcctccagagccggacaatccccagaacctttggacagggcaccaaggtggaaatcaaactcgaggacctgaagaacgtgttcccacctgaggtggccgtgttcgagcctagcgaggccgagatcagccacacccagaaagccaccctcgtgtgcctggctaccggcttctaccccgaccatgtggaactgtcttggtgggtcaacggcaaagaggtgcacagcggcgtgtctaccgacccccagccactgaaagaacagcccgccctgaacgacagccggtactgcctgagcagcagactgagagtgtccgccaccttctggcagaacccccggaaccacttcagatgccaggtgcagttctacggcctgagcgagaacgacgagtggacccaggacagagccaagcccgtgacccagatcgtgtctgccgaagcctggggcagagccgattgcggctttaccagcgagagctaccagcagggcgtgctgagcgccaccatcctgtacgagatcctgctgggcaaggccaccctgtacgccgtgctggtgtctgccctggtgctgatggctatggtcaagcggaaggacagccggggaagggccaagcgatctggatctggagcaacaaacttctcactactcaaacaagcaggtgacgtggaggagaatcccgggcctactagtatggactggatttggcgcatccttttccttgtcggcgctgctaccggcgcgcattccttcgaacagattcagctcgtgcagtctggccccgagctgaagaaacctggcggctctgtgaagatcagctgtgccgccagcggctacaccttcaccgactactctatcaactgggtccgacaggctcccggcaaaggactggaatgggtcggatggatcaacaccgagacaagagagcccgcctacgcctacgacttcagaggcagattcaccttcagcgccgacaccagcaagagcacagcctacctccagatgaacagcctgagagccgaggacaccgccgtgtattattgcgccctggactacagctacgctatggactattggggccagggcaccctggtcacagtctcttctacgcgtgagcagaaactgatctcggaagaggatgggagcggcaccccattcccttctctggcccctcccatcatgctgctggtggacggcaagcagcagatggtggtcgtgtgcctggtgctggatgtggccccacctggactggacagccccatctggtttagcgccggcaatggctctgccctggacgcctttacctacggcccaagccctgccaccgatggcacctggacaaatctggcccacctgagcctgcccagcgaggaactggcttcttgggagcctctcgtgtgccacacaggacctggcgctgagggacacagcagatccacccagcctatgcacctgtctggcgaggccagcaccgccagaacctgtcctcaggaacctctgagaggcacccctggcggagcactgtggctgggagtgctgagactgctgctgttcaagctgctgctgtttgacctgctgctgacctgctcctgtctgtgcgatcctgccggccctctgccttctcctgccaccaccacaagactgagagccctgggcagccacagactgcaccctgccacagagacaggcggcagagaggccacaagcagccctagaccccagcccagagacagaagatggggcgataccccccctggcagaaagcctggatctccagtccgcgccaagagaagcggatctggcgtgaagcagaccctgaatttcgacctgctgaagctggctggcgacgtggaatccaacccaggcccttctagaggccatatgaccgagtacaagcccacggtgcgcctcgccacccgcgacgacgtccccagggccgtacgcaccctcgccgccgcgttcgccgactaccccgccacgcgccacaccgtcgatccggaccgccacatcgagcgggtcaccgagctgcaagaactcttcctcacgcgcgtcgggctcgacatcggcaaggtgtgggtcgcggacgacggcgccgcggtggcggtctggaccacgccggagagcgtcgaagcgggggcggtgttcgccgagatcggcccgcgcatggccgagttgagcggttcccggctggccgcgcagcaacagatggaaggcctcctggcgccgcaccggcccaaggagcccgcgtggttcctggccaccgtcggcgtctcgcccgaccaccagggcaagggtctgggcagcgccgtcgtgctccccggagtggaggcggccgagcgcgccggggtgcccgccttcctggagacctccgcgccccgcaacctccccttctacgagcggctcggcttcaccgtcaccgccgacgtcgaggtgcccgaaggaccgcgcacctggtgcatgacccgcaagcccggtgcctga

SEQ ID NO: 19896 - DNA, 2865 bp, synthetic construct
  source 1..2865: mol_type = other DNA
atggccttaccagtgaccgccttgctcctgccgctggccttgctgctccacgccgccaggccgctcgaggacctgaagaacgtgttcccacctgaggtggccgtgttcgagcctagcgaggccgagatcagccacacccagaaagccaccctcgtgtgcctggctaccggcttctaccccgaccatgtggaactgtcttggtgggtcaacggcaaagaggtgcacagcggcgtgtctaccgacccccagccactgaaagaacagcccgccctgaacgacagccggtactgcctgagcagcagactgagagtgtccgccaccttctggcagaacccccggaaccacttcagatgccaggtgcagttctacggcctgagcgagaacgacgagtggacccaggacagagccaagcccgtgacccagatcgtgtctgccgaagcctggggcagagccgattgcggctttaccagcgagagctaccagcagggcgtgctgagcgccaccatcctgtacgagatcctgctgggcaaggccaccctgtacgccgtgctggtgtctgccctggtgctgatggctatggtcaagcggaaggacagccggggaagggccaagcgatctggatctggagcaacaaacttctcactactcaaacaagcaggtgacgtggaggagaatcccgggcctactagcatggccttaccagtgaccgccttgctcctgccgctggccttgctgctccacgccgccaggccggacatcgtgctgacacagagcccttctagcctgtctgccagcgtgggagatagagccaccatcagctgtagagccagcgagagcgtgacaatcctgggcagccacctgatctactggtatcagcagaagcccggacaggcccctagactgctgattcagctggcctccaatgtgcagactggcgtgccagccagattttctggcagcggctctggcaccgatttcaccctgacaatcagcagcgtggaacccgaggatgtggccgtgtactactgcctccagagccggacaatccccagaacctttggacagggcaccaaggtggaaatcaaaggcggaggcggaagtggaggcggaggatctggcggcggaggctctcagattcagctcgtgcagtctggccccgagctgaagaaacctggcggctctgtgaagatcagctgtgccgccagcggctacaccttcaccgactactctatcaactgggtccgacaggctcccggcaaaggactggaatgggtcggatggatcaacaccgagacaagagagcccgcctacgcctacgacttcagaggcagattcaccttcagcgccgacaccagcaagagcacagcctacctccagatgaacagcctgagagccgaggacaccgccgtgtattattgcgccctggactacagctacgctatggactattggggccagggcaccctggtcacagtctcttctacgcgtgagcagaaactgatctcggaagaggatctggggagcggcaccccattcccttctctggcccctcccatcatgctgctggtggacggcaagcagcagatggtggtcgtgtgcctggtgctggatgtggccccacctggactggacagccccatctggtttagcgccggcaatggctctgccctggacgcctttacctacggcccaagccctgccaccgatggcacctggacaaatctggcccacctgagcctgcccagcgaggaactggcttcttgggagcctctcgtgtgccacacaggacctggcgctgagggacacagcagatccacccagcctatgcacctgtctggcgaggccagcaccgccagaacctgtcctcaggaacctctgagaggcacccctggcggagcactgtggctgggagtgctgagactgctgctgttcaagctgctgctgtttgacctgctgctgacctgctcctgtctgtgcgatcctgccggccctctgccttctcctgccaccaccacaagactgagagccctgggcagccacagactgcaccctgccacagagacaggcggcagagaggccacaagcagccctagaccccagcccagagacagaagatggggcgataccccccctggcagaaagcctggatctccagtccgcgccaagagaagcggatctggcgtgaagcagaccctgaatttcgacctgctgaagctggctggcgacgtggaatccaacccaggcccttctagatctagaggccatatgaccgagtacaagcccacggtgcgcctcgccacccgcgacgacgtccccagggccgtacgcaccctcgccgccgcgttcgccgactaccccgccacgcgccacaccgtcgatccggaccgccacatcgagcgggtcaccgagctgcaagaactcttcctcacgcgcgtcgggctcgacatcggcaaggtgtgggtcgcggacgacggcgccgcggtggcggtctggaccacgccggagagcgtcgaagcgggggcggtgttcgccgagatcggcccgcgcatggccgagttgagcggttcccggctggccgcgcagcaacagatggaaggcctcctggcgccgcaccggcccaaggagcccgcgtggttcctggccaccgtcggcgtctcgcccgaccaccagggcaagggtctgggcagcgccgtcgtgctccccggagtggaggcggccgagcgcgccggggtgcccgccttcctggagacctccgcgccccgcaacctccccttctacgagcggctcggcttcaccgtcaccgccgacgtcgaggtgcccgaaggaccgcgcacctggtgcatgacccgcaagcccggtgcctga

SEQ ID NO: 19897 - DNA, 2676 bp, synthetic construct
  source 1..2676: mol_type = other DNA
atggccttaccagtgaccgccttgctcctgccgctggccttgctgctccacgccgccaggccggacatcgtgctgacacagagcccttctagcctgtctgccagcgtgggagatagagccaccatcagctgtagagccagcgagagcgtgacaatcctgggcagccacctgatctactggtatcagcagaagcccggacaggcccctagactgctgattcagctggcctccaatgtgcagactggcgtgccagccagattttctggcagcggctctggcaccgatttcaccctgacaatcagcagcgtggaacccgaggatgtggccgtgtactactgcctccagagccggacaatccccagaacctttggacagggcaccaaggtggaaatcaaactcgaggggaaaccaattcccaaccctcttctgggactggattcaaccggcagcggcgacaagcagctggacgccgacgtgtcccccaagcctaccatcttcctgccctctatcgccgagacaaagctccagaaggccggcacctacctgtgcctgctggaaaagttcttcccagatgtgattaagatccactggcaggaaaagaagtccaacaccatcctgggcagccaggaaggcaacaccatgaagaccaacgacacctacatgaagttcagctggctgaccgtgcccgagaagtccctggacaaagaacacagatgcatcgtgcggcacgaaaacaacaagaacggcgtggaccaggaaatcatcttcccacccatcaagaccgatgtgattacaatggaccccaaggacaactgctccaaggacgccaacgataccctgctgctccagctgaccaacaccagcgcctactacatgtacttgttgctgctgctgaagtccgtggtgtacttcgccatcatcacatgctgcctgctgcggagaaccgccttctgctgcaacggcgagaagtctagggccaagcgatctggatctggagcaacaaacttctcactactcaaacaagcaggtgacgtggaggagaatcccgggcctactagtatggactggatttggcgcatccttttccttgtcggcgctgctaccggcgcgcattccttcgaacagattcagctcgtgcagtctggccccgagctgaagaaacctggcggctctgtgaagatcagctgtgccgccagcggctacaccttcaccgactactctatcaactgggtccgacaggctcccggcaaaggactggaatgggtcggatggatcaacaccgagacaagagagcccgcctacgcctacgacttcagaggcagattcaccttcagcgccgacaccagcaagagcacagcctacctccagatgaacagcctgagagccgaggacaccgccgtgtattattgcgccctggactacagctacgctatggactattggggccagggcaccctggtcacagtctcttctacgcgtgagcagaaactgatctcggaagaggatgggagcggcagccagcctcacaccaagcccagcgtgttcgtgatgaagaacggcaccaacgtggcctgcctcgtgaaagagttctaccccaaggacatcaggatcaacctggtgtccagcaagaagatcaccgagttcgaccccgccatcgtgatctcccccagcggcaagtacaacgccgtgaagctggggaagtacgaggacagcaacagcgtgacctgctccgtgcagcacgacaacaagaccgtgcacagcaccgactttgaagtgaaaaccgactccaccgaccacgtgaagcccaaagagacagagaacaccaagcagcccagcaagagctgccacaagcccaaggccatcgtgcacaccgagaaagtgaacatgatgagcctgaccgtgctgggcctgcggatgctgttcgccaaaaccgtggccgtgaacttcctgctgaccgccaagctgttcttcctccgcgccaagagaagcggatctggcgtgaagcagaccctgaatttcgacctgctgaagctggctggcgacgtggaatccaacccaggcccttctagaggccatatgaccgagtacaagcccacggtgcgcctcgccacccgcgacgacgtccccagggccgtacgcaccctcgccgccgcgttcgccgactaccccgccacgcgccacaccgtcgatccggaccgccacatcgagcgggtcaccgagctgcaagaactcttcctcacgcgcgtcgggctcgacatcggcaaggtgtgggtcgcggacgacggcgccgcggtggcggtctggaccacgccggagagcgtcgaagcgggggcggtgttcgccgagatcggcccgcgcatggccgagttgagcggttcccggctggccgcgcagcaacagatggaaggcctcctggcgccgcaccggcccaaggagcccgcgtggttcctggccaccgtcggcgtctcgcccgaccaccagggcaagggtctgggcagcgccgtcgtgctccccggagtggaggcggccgagcgcgccggggtgcccgccttcctggagacctccgcgccccgcaacctccccttctacgagcggctcggcttcaccgtcaccgccgacgtcgaggtgcccgaaggaccgcgcacctggtgcatgacccgcaagcccggtgcctga

SEQ ID NO: 19898 - DNA, 1887 bp, synthetic construct
  source 1..1887: mol_type = other DNA
atggccttaccagtgaccgccttgctcctgccgctggccttgctgctccacgccgccaggccggacatcgtgctgacacagagcccttctagcctgtctgccagcgtgggagatagagccaccatcagctgtagagccagcgagagcgtgacaatcctgggcagccacctgatctactggtatcagcagaagcccggacaggcccctagactgctgattcagctggcctccaatgtgcagactggcgtgccagccagattttctggcagcggctctggcaccgatttcaccctgacaatcagcagcgtggaacccgaggatgtggccgtgtactactgcctccagagccggacaatccccagaacctttggacagggcaccaaggtggaaatcaaactcgagagccagcctcacaccaagcccagcgtgttcgtgatgaagaacggcaccaacgtggcctgcctcgtgaaagagttctaccccaaggacatcaggatcaacctggtgtccagcaagaagatcaccgagttcgaccccgccatcgtgatctcccccagcggcaagtacaacgccgtgaagctggggaagtacgaggacagcaacagcgtgacctgctccgtgcagcacgacaacaagaccgtgcacagcaccgactttgaagtgaaaaccgactccaccgaccacgtgaagcccaaagagacagagaacaccaagcagcccagcaagagctgccacaagcccaaggccatcgtgcacaccgagaaagtgaacatgatgagcctgaccgtgctgggcctgcggatgctgttcgccaaaaccgtggccgtgaacttcctgctgaccgccaagctgttcttcctcagggccaagcgatctggatctggagcaacaaacttctcactactcaaacaagcaggtgacgtggaggagaatcccgggcctactagtatggactggatttggcgcatccttttccttgtcggcgctgctaccggcgcgcattccttcgaacagattcagctcgtgcagtctggccccgagctgaagaaacctggcggctctgtgaagatcagctgtgccgccagcggctacaccttcaccgactactctatcaactgggtccgacaggctcccggcaaaggactggaatgggtcggatggatcaacaccgagacaagagagcccgcctacgcctacgacttcagaggcagattcaccttcagcgccgacaccagcaagagcacagcctacctccagatgaacagcctgagagccgaggacaccgccgtgtattattgcgccctggactacagctacgctatggactattggggccagggcaccctggtcacagtctcttctacgcgtgacaagcagctggacgccgacgtgtcccccaagcctaccatcttcctgccctctatcgccgagacaaagctccagaaggccggcacctacctgtgcctgctggaaaagttcttcccagatgtgattaagatccactggcaggaaaagaagtccaacaccatcctgggcagccaggaaggcaacaccatgaagaccaacgacacctacatgaagttcagctggctgaccgtgcccgagaagtccctggacaaagaacacagatgcatcgtgcggcacgaaaacaacaagaacggcgtggaccaggaaatcatcttcccacccatcaagaccgatgtgattacaatggaccccaaggacaactgctccaaggacgccaacgataccctgctgctccagctgaccaacaccagcgcctactacatgtacttgttgctgctgctgaagtccgtggtgtacttcgccatcatcacatgctgcctgctgcggagaaccgccttctgctgcaacggcgagaagtct

SEQ ID NO: 19899 - DNA, 2721 bp, synthetic construct
  source 1..2721: mol_type = other DNA
atggccttaccagtgaccgccttgctcctgccgctggccttgctgctccacgccgccaggccgctcgaggggaaaccaattcccaaccctcttctgggactggattcaaccggcagcggcgacaagcagctggacgccgacgtgtcccccaagcctaccatcttcctgccctctatcgccgagacaaagctccagaaggccggcacctacctgtgcctgctggaaaagttcttcccagatgtgattaagatccactggcaggaaaagaagtccaacaccatcctgggcagccaggaaggcaacaccatgaagaccaacgacacctacatgaagttcagctggctgaccgtgcccgagaagtccctggacaaagaacacagatgcatcgtgcggcacgaaaacaacaagaacggcgtggaccaggaaatcatcttcccacccatcaagaccgatgtgattacaatggaccccaaggacaactgctccaaggacgccaacgataccctgctgctccagctgaccaacaccagcgcctactacatgtacttgttgctgctgctgaagtccgtggtgtacttcgccatcatcacatgctgcctgctgcggagaaccgccttctgctgcaacggcgagaagtctagggccaagcgatctggatctggagcaacaaacttctcactactcaaacaagcaggtgacgtggaggagaatcccgggcctactagcatggccttaccagtgaccgccttgctcctgccgctggccttgctgctccacgccgccaggccggacatcgtgctgacacagagcccttctagcctgtctgccagcgtgggagatagagccaccatcagctgtagagccagcgagagcgtgacaatcctgggcagccacctgatctactggtatcagcagaagcccggacaggcccctagactgctgattcagctggcctccaatgtgcagactggcgtgccagccagattttctggcagcggctctggcaccgatttcaccctgacaatcagcagcgtggaacccgaggatgtggccgtgtactactgcctccagagccggacaatccccagaacctttggacagggcaccaaggtggaaatcaaaggcggaggcggaagtggaggcggaggatctggcggcggaggctctcagattcagctcgtgcagtctggccccgagctgaagaaacctggcggctctgtgaagatcagctgtgccgccagcggctacaccttcaccgactactctatcaactgggtccgacaggctcccggcaaaggactggaatgggtcggatggatcaacaccgagacaagagagcccgcctacgcctacgacttcagaggcagattcaccttcagcgccgacaccagcaagagcacagcctacctccagatgaacagcctgagagccgaggacaccgccgtgtattattgcgccctggactacagctacgctatggactattggggccagggcaccctggtcacagtctcttctacgcgtgagcagaaactgatctcggaagaggatgggagcggcagccagcctcacaccaagcccagcgtgttcgtgatgaagaacggcaccaacgtggcctgcctcgtgaaagagttctaccccaaggacatcaggatcaacctggtgtccagcaagaagatcaccgagttcgaccccgccatcgtgatctcccccagcggcaagtacaacgccgtgaagctggggaagtacgaggacagcaacagcgtgacctgctccgtgcagcacgacaacaagaccgtgcacagcaccgactttgaagtgaaaaccgactccaccgaccacgtgaagcccaaagagacagagaacaccaagcagcccagcaagagctgccacaagcccaaggccatcgtgcacaccgagaaagtgaacatgatgagcctgaccgtgctgggcctgcggatgctgttcgccaaaaccgtggccgtgaacttcctgctgaccgccaagctgttcttcctccgcgccaagagaagcggatctggcgtgaagcagaccctgaatttcgacctgctgaagctggctggcgacgtggaatccaacccaggcccttctagaggccatatgaccgagtacaagcccacggtgcgcctcgccacccgcgacgacgtccccagggccgtacgcaccctcgccgccgcgttcgccgactaccccgccacgcgccacaccgtcgatccggaccgccacatcgagcgggtcaccgagctgcaagaactcttcctcacgcgcgtcgggctcgacatcggcaaggtgtgggtcgcggacgacggcgccgcggtggcggtctggaccacgccggagagcgtcgaagcgggggcggtgttcgccgagatcggcccgcgcatggccgagttgagcggttcccggctggccgcgcagcaacagatggaaggcctcctggcgccgcaccggcccaaggagcccgcgtggttcctggccaccgtcggcgtctcgcccgaccaccagggcaagggtctgggcagcgccgtcgtgctccccggagtggaggcggccgagcgcgccggggtgcccgccttcctggagacctccgcgccccgcaacctccccttctacgagcggctcggcttcaccgtcaccgccgacgtcgaggtgcccgaaggaccgcgcacctggtgcatgacccgcaagcccggtgcctga

SEQ ID NO: 19900 - DNA, 3096 bp, synthetic construct
  source 1..3096: mol_type = other DNA
atggccttaccagtgaccgccttgctcctgccgctggccttgctgctccacgccgccaggccggacatcgtgctgacacagagcccttctagcctgtctgccagcgtgggagatagagccaccatcagctgtagagccagcgagagcgtgacaatcctgggcagccacctgatctactggtatcagcagaagcccggacaggcccctagactgctgattcagctggcctccaatgtgcagactggcgtgccagccagattttctggcagcggctctggcaccgatttcaccctgacaatcagcagcgtggaacccgaggatgtggccgtgtactactgcctccagagccggacaatccccagaacctttggacagggcaccaaggtggaaatcaaaggacagcctaaggccaatcctaccgtgacactgttccctccaagcagcgaagaactccaggccaacaaggccacacttgtgtgcctgatctccgacttctaccctggggctgtgacagtggcttggaaggccgatggatctcctgtgaaagccggcgtggaaaccaccaagccatccaagcagagcaacaacaaatacgccgccagctcctacctgagcctgacacctgagcagtggaagtcccacagatcctacagctgccaagtgacccacgaaggcagcaccgtggaaaagacagtggcccctacagagtgcagcggatcccagagcttcggcctgctggaccccaagctgtgctacctgctggatggcatcctgttcatctacggcgtgatcctgaccgccctgttcctgagagtgaagttcagcagaagcgccgacgcccctgcctaccagcagggacagaaccaactgtacaacgagctgaacctgggcagacgggaagagtacgacgtgctggacaagcggagaggcagggaccctgagatgggcggaaagccccagcggagaaagaacccccaggaaggactgtataacgaactccagaaagacaagatggccgaagcctacagcgagatcggcatgaagggcgagcggagaagaggcaagggccacgatggcctgtaccagggcctgagcaccgccaccaaggacacctatgacgccctgcacatgcaggccctgcctccaagaagggccaagcgatctggatctggagcaacaaacttctcactactcaaacaagcaggtgacgtggaggagaatcccgggcctactagtatggactggatttggcgcatccttttccttgtcggcgctgctaccggcgcgcattccttcgaacagattcagctcgtgcagtctggccccgagctgaagaaacctggcggctctgtgaagatcagctgtgccgccagcggctacaccttcaccgactactctatcaactgggtccgacaggctcccggcaaaggactggaatgggtcggatggatcaacaccgagacaagagagcccgcctacgcctacgacttcagaggcagattcaccttcagcgccgacaccagcaagagcacagcctacctccagatgaacagcctgagagccgaggacaccgccgtgtattattgcgccctggactacagctacgctatggactattggggccagggcaccctggtcacagtctcttctgcctctacaaagggaccctccgtgtttcctctggctcccagcagcaagtctacaagcggaggaacagccgctctgggctgcctggtcaaggattactttcccgagcctgtgaccgtgtcctggaatagcggagcactgacaagcggcgtgcacacctttccagccgtgctgcaaagcagcggcctgtactctctgagcagcgtggtcacagtgcctagctctagcctgggcacccagacctacatctgcaatgtgaaccacaagcctagcaacaccaaggtggacaagagagtggaacccaagagctgtggtacccagagttttgggttgttggaccctaaattgtgctatctgttggacggaatcctgttcatttacggagtgatcctgaccgcattgttcctgcgggttaagttttccagatccgcagacgcacccgcttaccaacaagggcagaaccaactctacaatgaacttaatttggggcggagggaagagtacgacgttctggacaaaaggaggggacgagatcccgagatgggcggaaagcctcagcgaaggaagaatccgcaagaggggctttataacgaactccagaaagataaaatggcagaagcctatagtgagattgggatgaagggagaaaggaggaggggtaaaggtcacgatgggttgtaccaaggattgagcacagccactaaagatacctatgatgcgctccacatgcaggccctgccgccaagacgcgccaagagaagcggatctggcgtgaagcagaccctgaatttcgacctgctgaagctggctggcgacgtggaatccaacccaggcccttctagaggccatatgaccgagtacaagcccacggtgcgcctcgccacccgcgacgacgtccccagggccgtacgcaccctcgccgccgcgttcgccgactaccccgccacgcgccacaccgtcgatccggaccgccacatcgagcgggtcaccgagctgcaagaactcttcctcacgcgcgtcgggctcgacatcggcaaggtgtgggtcgcggacgacggcgccgcggtggcggtctggaccacgccggagagcgtcgaagcgggggcggtgttcgccgagatcggcccgcgcatggccgagttgagcggttcccggctggccgcgcagcaacagatggaaggcctcctggcgccgcaccggcccaaggagcccgcgtggttcctggccaccgtcggcgtctcgcccgaccaccagggcaagggtctgggcagcgccgtcgtgctccccggagtggaggcggccgagcgcgccggggtgcccgccttcctggagacctccgcgccccgcaacctccccttctacgagcggctcggcttcaccgtcaccgccgacgtcgaggtgcccgaaggaccgcgcacctggtgcatgacccgcaagcccggtgcctga

SEQ ID NO: 19901 - DNA, 2451 bp, synthetic construct
  source 1..2451: mol_type = other DNA
atggccttaccagtgaccgccttgctcctgccgctggccttgctgctccacgccgccaggccggacatcgtgctgacacagagcccttctagcctgtctgccagcgtgggagatagagccaccatcagctgtagagccagcgagagcgtgacaatcctgggcagccacctgatctactggtatcagcagaagcccggacaggcccctagactgctgattcagctggcctccaatgtgcagactggcgtgccagccagattttctggcagcggctctggcaccgatttcaccctgacaatcagcagcgtggaacccgaggatgtggccgtgtactactgcctccagagccggacaatccccagaacctttggacagggcaccaaggtggaaatcaaactcgaggacctgaagaacgtgttcccacctgaggtggccgtgttcgagcctagcgaggccgagatcagccacacccagaaagccaccctcgtgtgcctggctaccggcttctaccccgaccatgtggaactgtcttggtgggtcaacggcaaagaggtgcacagcggcgtgtctaccgacccccagccactgaaagaacagcccgccctgaacgacagccggtactgcctgagcagcagactgagagtgtccgccaccttctggcagaacccccggaaccacttcagatgccaggtgcagttctacggcctgagcgagaacgacgagtggacccaggacagagccaagcccgtgacccagatcgtgtctgccgaagcctggggcagagccgattgcggatcccagagcttcggcctgctggaccccaagctgtgctacctgctggatggcatcctgttcatctacggcgtgatcctgaccgccctgttcctgagagtgaagttcagcagaagcgccgacgcccctgcctaccagcagggacagaaccaactgtacaacgagctgaacctgggcagacgggaagagtacgacgtgctggacaagcggagaggcagggaccctgagatgggcggaaagccccagcggagaaagaacccccaggaaggactgtataacgaactccagaaagacaagatggccgaagcctacagcgagatcggcatgaagggcgagcggagaagaggcaagggccacgatggcctgtaccagggcctgagcaccgccaccaaggacacctatgacgccctgcacatgcaggccctgcctccaagaagggccaagcgatctggatctggagcaacaaacttctcactactcaaacaagcaggtgacgtggaggagaatcccgggcctactagtatggactggatttggcgcatccttttccttgtcggcgctgctaccggcgcgcattccttcgaacagattcagctcgtgcagtctggccccgagctgaagaaacctggcggctctgtgaagatcagctgtgccgccagcggctacaccttcaccgactactctatcaactgggtccgacaggctcccggcaaaggactggaatgggtcggatggatcaacaccgagacaagagagcccgcctacgcctacgacttcagaggcagattcaccttcagcgccgacaccagcaagagcacagcctacctccagatgaacagcctgagagccgaggacaccgccgtgtattattgcgccctggactacagctacgctatggactattggggccagggcaccctggtcacagtctcttctacgcgtatccagaaccctgatcctgccgtgtaccagctgcgggatagcaagagcagcgacaagagcgtgtgtctgttcaccgacttcgacagccagaccaacgtgtcccagagcaaggactccgacgtgtacatcaccgataagaccgtgctggacatgcggagcatggacttcaagagcaactccgccgtggcctggtccaacaagtccgatttcgcctgcgccaacgccttcaacaacagcattatccccgaggacacattcttcccaagccccgagagcagctgcggtacccagagttttgggttgttggaccctaaattgtgctatctgttggacggaatcctgttcatttacggagtgatcctgaccgcattgttcctgcgggttaagttttccagatccgcagacgcacccgcttaccaacaagggcagaaccaactctacaatgaacttaatttggggcggagggaagagtacgacgttctggacaaaaggaggggacgagatcccgagatgggcggaaagcctcagcgaaggaagaatccgcaagaggggctttataacgaactccagaaagataaaatggcagaagcctatagtgagattgggatgaagggagaaaggaggaggggtaaaggtcacgatgggttgtaccaaggattgagcacagccactaaagatacctatgatgcgctccacatgcaggccctgccgccaaga

SEQ ID NO: 19902 - DNA, 2451 bp, synthetic construct
  source 1..2451: mol_type = other DNA
atggccttaccagtgaccgccttgctcctgccgctggccttgctgctccacgccgccaggccggacatcgtgctgacacagagcccttctagcctgtctgccagcgtgggagatagagccaccatcagctgtagagccagcgagagcgtgacaatcctgggcagccacctgatctactggtatcagcagaagcccggacaggcccctagactgctgattcagctggcctccaatgtgcagactggcgtgccagccagattttctggcagcggctctggcaccgatttcaccctgacaatcagcagcgtggaacccgaggatgtggccgtgtactactgcctccagagccggacaatccccagaacctttggacagggcaccaaggtggaaatcaaactcgaggacctgaagaacgtgttcccacctgaggtggccgtgttcgagcctagcaaggccgagatcgcccacacccagaaagccaccctcgtgtgcctggctaccggcttctaccccgaccatgtggaactgtcttggtgggtcaacggcaaagaggtgcacagcggcgtgtgtaccgacccccagccactgaaagaacagcccgccctgaacgacagccggtactgcctgagcagcagactgagagtgtccgccaccttctggcagaacccccggaaccacttcagatgccaggtgcagttctacggcctgagcgagaacgacgagtggacccaggacagagccaagcccgtgacccagatcgtgtctgccgaagcctggggcagagccgattgcggatcccagagcttcggcctgctggaccccaagctgtgctacctgctggatggcatcctgttcatctacggcgtgatcctgaccgccctgttcctgagagtgaagttcagcagaagcgccgacgcccctgcctaccagcagggacagaaccaactgtacaacgagctgaacctgggcagacgggaagagtacgacgtgctggacaagcggagaggcagggaccctgagatgggcggaaagccccagcggagaaagaacccccaggaaggactgtataacgaactccagaaagacaagatggccgaagcctacagcgagatcggcatgaagggcgagcggagaagaggcaagggccacgatggcctgtaccagggcctgagcaccgccaccaaggacacctatgacgccctgcacatgcaggccctgcctccaagaagggccaagcgatctggatctggagcaacaaacttctcactactcaaacaagcaggtgacgtggaggagaatcccgggcctactagtatggactggatttggcgcatccttttccttgtcggcgctgctaccggcgcgcattccttcgaacagattcagctcgtgcagtctggccccgagctgaagaaacctggcggctctgtgaagatcagctgtgccgccagcggctacaccttcaccgactactctatcaactgggtccgacaggctcccggcaaaggactggaatgggtcggatggatcaacaccgagacaagagagcccgcctacgcctacgacttcagaggcagattcaccttcagcgccgacaccagcaagagcacagcctacctccagatgaacagcctgagagccgaggacaccgccgtgtattattgcgccctggactacagctacgctatggactattggggccagggcaccctggtcacagtctcttctacgcgtatccagaaccctgatcctgccgtgtaccagctgcgggatagcaagagcagcgacaagagcgtgtgtctgttcaccgacttcgacagccagaccaacgtgtcccagagcaaggactccgacgtgtacatcaccgataagtgcgtgctggacatgcggagcatggacttcaagagcaactccgccgtggcctggtccaacaagtccgatttcgcctgcgccaacgccttcaacaacagcattatccccgaggacacattcttcccaagcagcgacgtgccctgcggtacccagagttttgggttgttggaccctaaattgtgctatctgttggacggaatcctgttcatttacggagtgatcctgaccgcattgttcctgcgggttaagttttccagatccgcagacgcacccgcttaccaacaagggcagaaccaactctacaatgaacttaatttggggcggagggaagagtacgacgttctggacaaaaggaggggacgagatcccgagatgggcggaaagcctcagcgaaggaagaatccgcaagaggggctttataacgaactccagaaagataaaatggcagaagcctatagtgagattgggatgaagggagaaaggaggaggggtaaaggtcacgatgggttgtaccaaggattgagcacagccactaaagatacctatgatgcgctccacatgcaggccctgccgccaaga

SEQ ID NO: 19903 - DNA, 2664 bp, synthetic construct
  source 1..2664: mol_type = other DNA
atggccttaccagtgaccgccttgctcctgccgctggccttgctgctccacgccgccaggccggacatcgtgctgacacagagcccttctagcctgtctgccagcgtgggagatagagccaccatcagctgtagagccagcgagagcgtgacaatcctgggcagccacctgatctactggtatcagcagaagcccggacaggcccctagactgctgattcagctggcctccaatgtgcagactggcgtgccagccagattttctggcagcggctctggcaccgatttcaccctgacaatcagcagcgtggaacccgaggatgtggccgtgtactactgcctccagagccggacaatccccagaacctttggacagggcaccaaggtggaaatcaaactcgaggggaaaccaattcccaaccctcttctgggactggattcaaccggcagcggcgaggacctgaagaacgtgttcccacctgaggtggccgtgttcgagcctagcgaggccgagatcagccacacccagaaagccaccctcgtgtgcctggctaccggcttctaccccgaccatgtggaactgtcttggtgggtcaacggcaaagaggtgcacagcggcgtgtctaccgacccccagccactgaaagaacagcccgccctgaacgacagccggtactgcctgagcagcagactgagagtgtccgccaccttctggcagaacccccggaaccacttcagatgccaggtgcagttctacggcctgagcgagaacgacgagtggacccaggacagagccaagcccgtgacccagatcgtgtctgccgaagcctggggcagagccgattgcggatcccagagcttcggcctgctggaccccaagctgtgctacctgctggatggcatcctgttcatctacggcgtgatcctgaccgccctgttcctgagagtgaagttcagcagaagcgccgacgcccctgcctaccagcagggacagaaccaactgtacaacgagctgaacctgggcagacgggaagagtacgacgtgctggacaagcggagaggcagggaccctgagatgggcggaaagccccagcggagaaagaacccccaggaaggactgtataacgaactccagaaagacaagatggccgaagcctacagcgagatcggcatgaagggcgagcggagaagaggcaagggccacgatggcctgtaccagggcctgagcaccgccaccaaggacacctatgacgccctgcacatgcaggccctgcctccaagaagggccaagcgatctggatctggagcaacaaacttctcactactcaaacaagcaggtgacgtggaggagaatcccgggcctactagtatggactggatttggcgcatccttttccttgtcggcgctgctaccggcgcgcattccttcgaacagattcagctcgtgcagtctggccccgagctgaagaaacctggcggctctgtgaagatcagctgtgccgccagcggctacaccttcaccgactactctatcaactgggtccgacaggctcccggcaaaggactggaatgggtcggatggatcaacaccgagacaagagagcccgcctacgcctacgacttcagaggcagattcaccttcagcgccgacaccagcaagagcacagcctacctccagatgaacagcctgagagccgaggacaccgccgtgtattattgcgccctggactacagctacgctatggactattggggccagggcaccctggtcacagtctcttctacgcgtgagcagaaactgatctcggaagaggatgggagcggcatccagaaccctgatcctgccgtgtaccagctgcgggatagcaagagcagcgacaagagcgtgtgtctgttcaccgacttcgacagccagaccaacgtgtcccagagcaaggactccgacgtgtacatcaccgataagaccgtgctggacatgcggagcatggacttcaagagcaactccgccgtggcctggtccaacaagtccgatttcgcctgcgccaacgccttcaacaacagcattatccccgaggacacattcttcccaagccccgagagcagctgcggtacccagagttttgggttgttggaccctaaattgtgctatctgttggacggaatcctgttcatttacggagtgatcctgaccgcattgttcctgaggagcaagcggtcacggctgctccacagcgattacatgaatatgacaccacgaagaccgggtcctactcgcaaacactaccaaccctacgcacctccccgcgactttgcagcgtaccgatctcgggttaagttttccagatccgcagacgcacccgcttaccaacaagggcagaaccaactctacaatgaacttaatttggggcggagggaagagtacgacgttctggacaaaaggaggggacgagatcccgagatgggcggaaagcctcagcgaaggaagaatccgcaagaggggctttataacgaactccagaaagataaaatggcagaagcctatagtgagattgggatgaagggagaaaggaggaggggtaaaggtcacgatgggttgtaccaaggattgagcacagccactaaagatacctatgatgcgctccacatgcaggccctgccgccaaga

SEQ ID NO: 19904 - DNA, 2787 bp, synthetic construct
  source 1..2787: mol_type = other DNA
atggccttaccagtgaccgccttgctcctgccgctggccttgctgctccacgccgccaggccggacatcgtgctgacacagagcccttctagcctgtctgccagcgtgggagatagagccaccatcagctgtagagccagcgagagcgtgacaatcctgggcagccacctgatctactggtatcagcagaagcccggacaggcccctagactgctgattcagctggcctccaatgtgcagactggcgtgccagccagattttctggcagcggctctggcaccgatttcaccctgacaatcagcagcgtggaacccgaggatgtggccgtgtactactgcctccagagccggacaatccccagaacctttggacagggcaccaaggtggaaatcaaactcgaggggaaaccaattcccaaccctcttctgggactggattcaaccggcagcggcgaggacctgaagaacgtgttcccacctgaggtggccgtgttcgagcctagcgaggccgagatcagccacacccagaaagccaccctcgtgtgcctggctaccggcttctaccccgaccatgtggaactgtcttggtgggtcaacggcaaagaggtgcacagcggcgtgtctaccgacccccagccactgaaagaacagcccgccctgaacgacagccggtactgcctgagcagcagactgagagtgtccgccaccttctggcagaacccccggaaccacttcagatgccaggtgcagttctacggcctgagcgagaacgacgagtggacccaggacagagccaagcccgtgacccagatcgtgtctgccgaagcctggggcagagccgattgcggatcccagagcttcggcctgctggaccccaagctgtgctacctgctggatggcatcctgttcatctacggcgtgatcctgaccgccctgttcctgaggagtaagaggagcaggctcctgcacagtgactacatgaacatgactccacgccgccccggacccacccgcaagcattaccagccctatgccccaccacgcgacttcgcagcctatcgctccagagtgaagttcagcagaagcgccgacgcccctgcctaccagcagggacagaaccaactgtacaacgagctgaacctgggcagacgggaagagtacgacgtgctggacaagcggagaggcagggaccctgagatgggcggaaagccccagcggagaaagaacccccaggaaggactgtataacgaactccagaaagacaagatggccgaagcctacagcgagatcggcatgaagggcgagcggagaagaggcaagggccacgatggcctgtaccagggcctgagcaccgccaccaaggacacctatgacgccctgcacatgcaggccctgcctccaagaagggccaagcgatctggatctggagcaacaaacttctcactactcaaacaagcaggtgacgtggaggagaatcccgggcctactagtatggactggatttggcgcatccttttccttgtcggcgctgctaccggcgcgcattccttcgaacagattcagctcgtgcagtctggccccgagctgaagaaacctggcggctctgtgaagatcagctgtgccgccagcggctacaccttcaccgactactctatcaactgggtccgacaggctcccggcaaaggactggaatgggtcggatggatcaacaccgagacaagagagcccgcctacgcctacgacttcagaggcagattcaccttcagcgccgacaccagcaagagcacagcctacctccagatgaacagcctgagagccgaggacaccgccgtgtattattgcgccctggactacagctacgctatggactattggggccagggcaccctggtcacagtctcttctacgcgtgagcagaaactgatctcggaagaggatgggagcggcatccagaaccctgatcctgccgtgtaccagctgcgggatagcaagagcagcgacaagagcgtgtgtctgttcaccgacttcgacagccagaccaacgtgtcccagagcaaggactccgacgtgtacatcaccgataagaccgtgctggacatgcggagcatggacttcaagagcaactccgccgtggcctggtccaacaagtccgatttcgcctgcgccaacgccttcaacaacagcattatccccgaggacacattcttcccaagccccgagagcagctgcggtacccagagttttgggttgttggaccctaaattgtgctatctgttggacggaatcctgttcatttacggagtgatcctgaccgcattgttcctgaggagcaagcggtcacggctgctccacagcgattacatgaatatgacaccacgaagaccgggtcctactcgcaaacactaccaaccctacgcacctccccgcgactttgcagcgtaccgatctcgggttaagttttccagatccgcagacgcacccgcttaccaacaagggcagaaccaactctacaatgaacttaatttggggcggagggaagagtacgacgttctggacaaaaggaggggacgagatcccgagatgggcggaaagcctcagcgaaggaagaatccgcaagaggggctttataacgaactccagaaagataaaatggcagaagcctatagtgagattgggatgaagggagaaaggaggaggggtaaaggtcacgatgggttgtaccaaggattgagcacagccactaaagatacctatgatgcgctccacatgcaggccctgccgccaaga

SEQ ID NO: 19905 - DNA, 2670 bp, synthetic construct
  source 1..2670: mol_type = other DNA
atggccttaccagtgaccgccttgctcctgccgctggccttgctgctccacgccgccaggccggacatcgtgctgacacagagcccttctagcctgtctgccagcgtgggagatagagccaccatcagctgtagagccagcgagagcgtgacaatcctgggcagccacctgatctactggtatcagcagaagcccggacaggcccctagactgctgattcagctggcctccaatgtgcagactggcgtgccagccagattttctggcagcggctctggcaccgatttcaccctgacaatcagcagcgtggaacccgaggatgtggccgtgtactactgcctccagagccggacaatccccagaacctttggacagggcaccaaggtggaaatcaaactcgaggggaaaccaattcccaaccctcttctgggactggattcaaccggcagcggcgaggacctgaagaacgtgttcccacctgaggtggccgtgttcgagcctagcgaggccgagatcagccacacccagaaagccaccctcgtgtgcctggctaccggcttctaccccgaccatgtggaactgtcttggtgggtcaacggcaaagaggtgcacagcggcgtgtctaccgacccccagccactgaaagaacagcccgccctgaacgacagccggtactgcctgagcagcagactgagagtgtccgccaccttctggcagaacccccggaaccacttcagatgccaggtgcagttctacggcctgagcgagaacgacgagtggacccaggacagagccaagcccgtgacccagatcgtgtctgccgaagcctggggcagagccgattgcggatcccagagcttcggcctgctggaccccaagctgtgctacctgctggatggcatcctgttcatctacggcgtgatcctgaccgccctgttcctgagagtgaagttcagcagaagcgccgacgcccctgcctaccagcagggacagaaccaactgtacaacgagctgaacctgggcagacgggaagagtacgacgtgctggacaagcggagaggcagggaccctgagatgggcggaaagccccagcggagaaagaacccccaggaaggactgtataacgaactccagaaagacaagatggccgaagcctacagcgagatcggcatgaagggcgagcggagaagaggcaagggccacgatggcctgtaccagggcctgagcaccgccaccaaggacacctatgacgccctgcacatgcaggccctgcctccaagaagggccaagcgatctggatctggagcaacaaacttctcactactcaaacaagcaggtgacgtggaggagaatcccgggcctactagtatggactggatttggcgcatccttttccttgtcggcgctgctaccggcgcgcattccttcgaacagattcagctcgtgcagtctggccccgagctgaagaaacctggcggctctgtgaagatcagctgtgccgccagcggctacaccttcaccgactactctatcaactgggtccgacaggctcccggcaaaggactggaatgggtcggatggatcaacaccgagacaagagagcccgcctacgcctacgacttcagaggcagattcaccttcagcgccgacaccagcaagagcacagcctacctccagatgaacagcctgagagccgaggacaccgccgtgtattattgcgccctggactacagctacgctatggactattggggccagggcaccctggtcacagtctcttctacgcgtgagcagaaactgatctcggaagaggatctggggagcggcatccagaaccctgatcctgccgtgtaccagctgcgggatagcaagagcagcgacaagagcgtgtgtctgttcaccgacttcgacagccagaccaacgtgtcccagagcaaggactccgacgtgtacatcaccgataagaccgtgctggacatgcggagcatggacttcaagagcaactccgccgtggcctggtccaacaagtccgatttcgcctgcgccaacgccttcaacaacagcattatccccgaggacacattcttcccaagccccgagagcagctgcggtacccagagttttgggttgttggaccctaaattgtgctatctgttggacggaatcctgttcatttacggagtgatcctgaccgcattgttcctgaagagaggccggaagaagctgctgtacatcttcaagcagcctttcatgcggcccgtgcagaccacccaggaagaggacggctgctcctgccggttccccgaggaagaagaaggcggctgcgagctgcgggttaagttttccagatccgcagacgcacccgcttaccaacaagggcagaaccaactctacaatgaacttaatttggggcggagggaagagtacgacgttctggacaaaaggaggggacgagatcccgagatgggcggaaagcctcagcgaaggaagaatccgcaagaggggctttataacgaactccagaaagataaaatggcagaagcctatagtgagattgggatgaagggagaaaggaggaggggtaaaggtcacgatgggttgtaccaaggattgagcacagccactaaagatacctatgatgcgctccacatgcaggccctgccgccaaga

SEQ ID NO: 19906 - DNA, 2796 bp, synthetic construct
  source 1..2796: mol_type = other DNA
atggccttaccagtgaccgccttgctcctgccgctggccttgctgctccacgccgccaggccggacatcgtgctgacacagagcccttctagcctgtctgccagcgtgggagatagagccaccatcagctgtagagccagcgagagcgtgacaatcctgggcagccacctgatctactggtatcagcagaagcccggacaggcccctagactgctgattcagctggcctccaatgtgcagactggcgtgccagccagattttctggcagcggctctggcaccgatttcaccctgacaatcagcagcgtggaacccgaggatgtggccgtgtactactgcctccagagccggacaatccccagaacctttggacagggcaccaaggtggaaatcaaactcgaggggaaaccaattcccaaccctcttctgggactggattcaaccggcagcggcgaggacctgaagaacgtgttcccacctgaggtggccgtgttcgagcctagcgaggccgagatcagccacacccagaaagccaccctcgtgtgcctggctaccggcttctaccccgaccatgtggaactgtcttggtgggtcaacggcaaagaggtgcacagcggcgtgtctaccgacccccagccactgaaagaacagcccgccctgaacgacagccggtactgcctgagcagcagactgagagtgtccgccaccttctggcagaacccccggaaccacttcagatgccaggtgcagttctacggcctgagcgagaacgacgagtggacccaggacagagccaagcccgtgacccagatcgtgtctgccgaagcctggggcagagccgattgcggatcccagagcttcggcctgctggaccccaagctgtgctacctgctggatggcatcctgttcatctacggcgtgatcctgaccgccctgttcctgaaacggggcagaaagaaactcctgtatatattcaaacaaccatttatgagaccagtacaaactactcaagaggaagatggctgtagctgccgatttccagaagaagaagaaggaggatgtgaactgagagtgaagttcagcagaagcgccgacgcccctgcctaccagcagggacagaaccaactgtacaacgagctgaacctgggcagacgggaagagtacgacgtgctggacaagcggagaggcagggaccctgagatgggcggaaagccccagcggagaaagaacccccaggaaggactgtataacgaactccagaaagacaagatggccgaagcctacagcgagatcggcatgaagggcgagcggagaagaggcaagggccacgatggcctgtaccagggcctgagcaccgccaccaaggacacctatgacgccctgcacatgcaggccctgcctccaagaagggccaagcgatctggatctggagcaacaaacttctcactactcaaacaagcaggtgacgtggaggagaatcccgggcctactagtatggactggatttggcgcatccttttccttgtcggcgctgctaccggcgcgcattccttcgaacagattcagctcgtgcagtctggccccgagctgaagaaacctggcggctctgtgaagatcagctgtgccgccagcggctacaccttcaccgactactctatcaactgggtccgacaggctcccggcaaaggactggaatgggtcggatggatcaacaccgagacaagagagcccgcctacgcctacgacttcagaggcagattcaccttcagcgccgacaccagcaagagcacagcctacctccagatgaacagcctgagagccgaggacaccgccgtgtattattgcgccctggactacagctacgctatggactattggggccagggcaccctggtcacagtctcttctacgcgtgagcagaaactgatctcggaagaggatctggggagcggcatccagaaccctgatcctgccgtgtaccagctgcgggatagcaagagcagcgacaagagcgtgtgtctgttcaccgacttcgacagccagaccaacgtgtcccagagcaaggactccgacgtgtacatcaccgataagaccgtgctggacatgcggagcatggacttcaagagcaactccgccgtggcctggtccaacaagtccgatttcgcctgcgccaacgccttcaacaacagcattatccccgaggacacattcttcccaagccccgagagcagctgcggtacccagagttttgggttgttggaccctaaattgtgctatctgttggacggaatcctgttcatttacggagtgatcctgaccgcattgttcctgaagagaggccggaagaagctgctgtacatcttcaagcagcctttcatgcggcccgtgcagaccacccaggaagaggacggctgctcctgccggttccccgaggaagaagaaggcggctgcgagctgcgggttaagttttccagatccgcagacgcacccgcttaccaacaagggcagaaccaactctacaatgaacttaatttggggcggagggaagagtacgacgttctggacaaaaggaggggacgagatcccgagatgggcggaaagcctcagcgaaggaagaatccgcaagaggggctttataacgaactccagaaagataaaatggcagaagcctatagtgagattgggatgaagggagaaaggaggaggggtaaaggtcacgatgggttgtaccaaggattgagcacagccactaaagatacctatgatgcgctccacatgcaggccctgccgccaaga

SEQ ID NO: 19907 - DNA, 2469 bp, synthetic construct
  source 1..2469: mol_type = other DNA
atggccttaccagtgaccgccttgctcctgccgctggccttgctgctccacgccgccaggccggacatcgtgctgacacagagcccttctagcctgtctgccagcgtgggagatagagccaccatcagctgtagagccagcgagagcgtgacaatcctgggcagccacctgatctactggtatcagcagaagcccggacaggcccctagactgctgattcagctggcctccaatgtgcagactggcgtgccagccagattttctggcagcggctctggcaccgatttcaccctgacaatcagcagcgtggaacccgaggatgtggccgtgtactactgcctccagagccggacaatccccagaacctttggacagggcaccaaggtggaaatcaaactcgagcagagcttcggcctgctggaccccaagctgtgctacctgctggatggcatcctgttcatctacggcgtgatcctgaccgccctgttcctgagagtgaagttcagcagaagcgccgacgcccctgcctaccagcagggacagaaccaactgtacaacgagctgaacctgggcagacgggaagagtacgacgtgctggacaagcggagaggcagggaccctgagatgggcggaaagccccagcggagaaagaacccccaggaaggactgtataacgaactccagaaagacaagatggccgaagcctacagcgagatcggcatgaagggcgagcggagaagaggcaagggccacgatggcctgtaccagggcctgagcaccgccaccaaggacacctatgacgccctgcacatgcaggccctgcctccaagaagggccaagcgatctggatctggagcaacaaacttctcactactcaaacaagcaggtgacgtggaggagaatcccgggcctactagtatggactggatttggcgcatccttttccttgtcggcgctgctaccggcgcgcattccttcgaacagattcagctcgtgcagtctggccccgagctgaagaaacctggcggctctgtgaagatcagctgtgccgccagcggctacaccttcaccgactactctatcaactgggtccgacaggctcccggcaaaggactggaatgggtcggatggatcaacaccgagacaagagagcccgcctacgcctacgacttcagaggcagattcaccttcagcgccgacaccagcaagagcacagcctacctccagatgaacagcctgagagccgaggacaccgccgtgtattattgcgccctggactacagctacgctatggactattggggccagggcaccctggtcacagtctcttctacgcgtcagagttttgggttgttggaccctaaattgtgctatctgttggacggaatcctgttcatttacggagtgatcctgaccgcattgttcctgcgggttaagttttccagatccgcagacgcacccgcttaccaacaagggcagaaccaactctacaatgaacttaatttggggcggagggaagagtacgacgttctggacaaaaggaggggacgagatcccgagatgggcggaaagcctcagcgaaggaagaatccgcaagaggggctttataacgaactccagaaagataaaatggcagaagcctatagtgagattgggatgaagggagaaaggaggaggggtaaaggtcacgatgggttgtaccaaggattgagcacagccactaaagatacctatgatgcgctccacatgcaggccctgccgccaagacgcgccaagagaagcggatctggcgtgaagcagaccctgaatttcgacctgctgaagctggctggcgacgtggaatccaacccaggcccttctagaggccatatgaccgagtacaagcccacggtgcgcctcgccacccgcgacgacgtccccagggccgtacgcaccctcgccgccgcgttcgccgactaccccgccacgcgccacaccgtcgatccggaccgccacatcgagcgggtcaccgagctgcaagaactcttcctcacgcgcgtcgggctcgacatcggcaaggtgtgggtcgcggacgacggcgccgcggtggcggtctggaccacgccggagagcgtcgaagcgggggcggtgttcgccgagatcggcccgcgcatggccgagttgagcggttcccggctggccgcgcagcaacagatggaaggcctcctggcgccgcaccggcccaaggagcccgcgtggttcctggccaccgtcggcgtctcgcccgaccaccagggcaagggtctgggcagcgccgtcgtgctccccggagtggaggcggccgagcgcgccggggtgcccgccttcctggagacctccgcgccccgcaacctccccttctacgagcggctcggcttcaccgtcaccgccgacgtcgaggtgcccgaaggaccgcgcacctggtgcatgacccgcaagcccggtgcctga

SEQ ID NO: 19908 - DNA, 1941 bp, synthetic construct
  source 1..1941: mol_type = other DNA
atggccttaccagtgaccgccttgctcctgccgctggccttgctgctccacgccgccaggccggacatcgtgctgacacagagcccttctagcctgtctgccagcgtgggagatagagccaccatcagctgtagagccagcgagagcgtgacaatcctgggcagccacctgatctactggtatcagcagaagcccggacaggcccctagactgctgattcagctggcctccaatgtgcagactggcgtgccagccagattttctggcagcggctctggcaccgatttcaccctgacaatcagcagcgtggaacccgaggatgtggccgtgtactactgcctccagagccggacaatccccagaacctttggacagggcaccaaggtggaaatcaaactcgagggacagcctaaggccaatcctaccgtgacactgttccctccaagcagcgaagaactccaggccaacaaggccacacttgtgtgcctgatctccgacttctaccctggggctgtgacagtggcttggaaggccgatggatctcctgtgaaagccggcgtggaaaccaccaagccatccaagcagagcaacaacaaatacgccgccagctcctacctgagcctgacacctgagcagtggaagtcccacagatcctacagctgccaagtgacccacgaaggcagcaccgtggaaaagacagtggcccctacagagtgcagccccatcaagaccgatgtgattacaatggaccccaaggacaactgctccaaggacgccaacgataccctgctgctccagctgaccaacaccagcgcctactacatgtacttgttgctgctgctgaagtccgtggtgtacttcgccatcatcacatgctgcctgctgcggagaaccgccttctgctgcaacggcgagaagtctagggccaagcgatctggatctggagcaacaaacttctcactactcaaacaagcaggtgacgtggaggagaatcccgggcctactagtatggactggatttggcgcatccttttccttgtcggcgctgctaccggcgcgcattccttcgaacagattcagctcgtgcagtctggccccgagctgaagaaacctggcggctctgtgaagatcagctgtgccgccagcggctacaccttcaccgactactctatcaactgggtccgacaggctcccggcaaaggactggaatgggtcggatggatcaacaccgagacaagagagcccgcctacgcctacgacttcagaggcagattcaccttcagcgccgacaccagcaagagcacagcctacctccagatgaacagcctgagagccgaggacaccgccgtgtattattgcgccctggactacagctacgctatggactattggggccagggcaccctggtcacagtctcttctacgcgtgcctctacaaagggaccctccgtgtttcctctggctcccagcagcaagtctacaagcggaggaacagccgctctgggctgcctggtcaaggattactttcccgagcctgtgaccgtgtcctggaatagcggagcactgacaagcggcgtgcacacctttccagccgtgctgcaaagcagcggcctgtactctctgagcagcgtggtcacagtgcctagctctagcctgggcacccagacctacatctgcaatgtgaaccacaagcctagcaacaccaaggtggacaagagagtggaacccaagagctgtgaagtgaaaaccgactccaccgaccacgtgaagcccaaagagacagagaacaccaagcagcccagcaagagctgccacaagcccaaggccatcgtgcacaccgagaaagtgaacatgatgagcctgaccgtgctgggcctgcggatgctgttcgccaaaaccgtggccgtgaacttcctgctgaccgccaagctgttcttcctc

SEQ ID NO: 19909 - DNA, 1875 bp, synthetic construct
  source 1..1875: mol_type = other DNA
atggccttaccagtgaccgccttgctcctgccgctggccttgctgctccacgccgccaggccggacatcgtgctgacacagagcccttctagcctgtctgccagcgtgggagatagagccaccatcagctgtagagccagcgagagcgtgacaatcctgggcagccacctgatctactggtatcagcagaagcccggacaggcccctagactgctgattcagctggcctccaatgtgcagactggcgtgccagccagattttctggcagcggctctggcaccgatttcaccctgacaatcagcagcgtggaacccgaggatgtggccgtgtactactgcctccagagccggacaatccccagaacctttggacagggcaccaaggtggaaatcaaactcgagggacagcctaaggccaatcctaccgtgacactgttccctccaagcagcgaagaactccaggccaacaaggccacacttgtgtgcctgatctccgacttctaccctggggctgtgacagtggcttggaaggccgatggatctcctgtgaaagccggcgtggaaaccaccaagccatccaagcagagcaacaacaaatacgccgccagctcctacctgagcctgacacctgagcagtggaagtcccacagatcctacagctgccaagtgacccacgaaggcagcaccgtggaaaagacagtggcccctacagagtgcagcggcagagccgattgcggcatcaccagcgccagctaccaccagggcgtgctgagcgccaccatcctgtacgagatcctgctgggcaaggccaccctgtacgccgtgctggtgtctgccctggtgctgatggctatggtcaagcggaaggacagccggggaagggccaagcgatctggatctggagcaacaaacttctcactactcaaacaagcaggtgacgtggaggagaatcccgggcctactagtatggactggatttggcgcatccttttccttgtcggcgctgctaccggcgcgcattccttcgaacagattcagctcgtgcagtctggccccgagctgaagaaacctggcggctctgtgaagatcagctgtgccgccagcggctacaccttcaccgactactctatcaactgggtccgacaggctcccggcaaaggactggaatgggtcggatggatcaacaccgagacaagagagcccgcctacgcctacgacttcagaggcagattcaccttcagcgccgacaccagcaagagcacagcctacctccagatgaacagcctgagagccgaggacaccgccgtgtattattgcgccctggactacagctacgctatggactattggggccagggcaccctggtcacagtctcttctacgcgtgcctctacaaagggaccctccgtgtttcctctggctcccagcagcaagtctacaagcggaggaacagccgctctgggctgcctggtcaaggattactttcccgagcctgtgaccgtgtcctggaatagcggagcactgacaagcggcgtgcacacctttccagccgtgctgcaaagcagcggcctgtactctctgagcagcgtggtcacagtgcctagctctagcctgggcacccagacctacatctgcaatgtgaaccacaagcctagcaacaccaaggtggacaagagagtggaacccaagagctgtatccccgaggacacattcttcccaagcagcgacgtgccctgcgacgtgaagctggtggaaaagagcttcgagacagacaccaacctgaacttccagaacctgagcgtgatcggcttcagaatcctgctgctgaaagtggccggctttaacctgctgatgaccctgcggctgtggtccagc

SEQ ID NO: 19910 - DNA, 1875 bp, synthetic construct
  source 1..1875: mol_type = other DNA
atggccttaccagtgaccgccttgctcctgccgctggccttgctgctccacgccgccaggccggacatcgtgctgacacagagcccttctagcctgtctgccagcgtgggagatagagccaccatcagctgtagagccagcgagagcgtgacaatcctgggcagccacctgatctactggtatcagcagaagcccggacaggcccctagactgctgattcagctggcctccaatgtgcagactggcgtgccagccagattttctggcagcggctctggcaccgatttcaccctgacaatcagcagcgtggaacccgaggatgtggccgtgtactactgcctccagagccggacaatccccagaacctttggacagggcaccaaggtggaaatcaaactcgagggacagcctaaggccaatcctaccgtgacactgttccctccaagcagcgaagaactccaggccaacaaggccacacttgtgtgcctgatctccgacttctaccctggggctgtgacagtggcttggaaggccgatggatctcctgtgaaagccggcgtggaaaccaccaagccatccaagcagagcaacaacaaatacgccgccagctcctacctgagcctgacacctgagcagtggaagtcccacagatcctacagctgccaagtgacccacgaaggcagcaccgtggaaaagacagtggcccctacagagtgcagcggcagagccgattgcggctttaccagcgagagctaccagcagggcgtgctgagcgccaccatcctgtacgagatcctgctgggcaaggccaccctgtacgccgtgctggtgtctgccctggtgctgatggctatggtcaagcggaaggacagccggggaagggccaagcgatctggatctggagcaacaaacttctcactactcaaacaagcaggtgacgtggaggagaatcccgggcctactagtatggactggatttggcgcatccttttccttgtcggcgctgctaccggcgcgcattccttcgaacagattcagctcgtgcagtctggccccgagctgaagaaacctggcggctctgtgaagatcagctgtgccgccagcggctacaccttcaccgactactctatcaactgggtccgacaggctcccggcaaaggactggaatgggtcggatggatcaacaccgagacaagagagcccgcctacgcctacgacttcagaggcagattcaccttcagcgccgacaccagcaagagcacagcctacctccagatgaacagcctgagagccgaggacaccgccgtgtattattgcgccctggactacagctacgctatggactattggggccagggcaccctggtcacagtctcttctacgcgtgcctctacaaagggaccctccgtgtttcctctggctcccagcagcaagtctacaagcggaggaacagccgctctgggctgcctggtcaaggattactttcccgagcctgtgaccgtgtcctggaatagcggagcactgacaagcggcgtgcacacctttccagccgtgctgcaaagcagcggcctgtactctctgagcagcgtggtcacagtgcctagctctagcctgggcacccagacctacatctgcaatgtgaaccacaagcctagcaacaccaaggtggacaagagagtggaacccaagagctgtatccccgaggacacattcttcccaagccccgagagcagctgcgacgtgaagctggtggaaaagagcttcgagacagacaccaacctgaacttccagaacctgagcgtgatcggcttcagaatcctgctgctgaaagtggccggctttaacctgctgatgaccctgcggctgtggtccagc

SEQ ID NO: 19911 - DNA, 1353 bp, synthetic construct
  source 1..1353: mol_type = other DNA
atggccttaccagtgaccgccttgctcctgccgctggccttgctgctccacgccgccaggccggacatcgtgctgacacagagcccttctagcctgtctgccagcgtgggagatagagccaccatcagctgtagagccagcgagagcgtgacaatcctgggcagccacctgatctactggtatcagcagaagcccggacaggcccctagactgctgattcagctggcctccaatgtgcagactggcgtgccagccagattttctggcagcggctctggcaccgatttcaccctgacaatcagcagcgtggaacccgaggatgtggccgtgtactactgcctccagagccggacaatccccagaacctttggacagggcaccaaggtggaaatcaaaggcggaggcggaagtggaggcggaggatctggcggcggaggctctcagattcagctcgtgcagtctggccccgagctgaagaaacctggcggctctgtgaagatcagctgtgccgccagcggctacaccttcaccgactactctatcaactgggtccgacaggctcccggcaaaggactggaatgggtcggatggatcaacaccgagacaagagagcccgcctacgcctacgacttcagaggcagattcaccttcagcgccgacaccagcaagagcacagcctacctccagatgaacagcctgagagccgaggacaccgccgtgtattattgcgccctggactacagctacgctatggactattggggccagggcaccctggtcacagtctcttctacgcgtgacggtaacgaggagatgggaggaatcactcaaaccccttacaaagtctcaatttcaggaacaactgttatccttacatgtccccagtatcctggcagcgagatcctttggcagcataacgacaagaatatagggggagatgaagacgataagaatatcggatctgacgaggatcacttgagcctgaaagagttctccgagcttgaacaaagcggatattatgtgtgctatccgcgcgggtcaaagccggaagacgctaacttttacctttatctccgagccagagtgtgcgaaaattgcatggaaatggacgttatgtccgttgctacaatagttatcgtagatatatgcatcacgggtggactgcttctgctggtttattattggtccaagaatagaaaggccaaagctaaacccgtgaccagaggcgctggcgcaggcggaaggcaaaggggacaaaacaaagaacggccaccaccagtgccaaatccagattatgagcctattcggaaaggacagagggacctgtactctggcctgaatcagagaagaatc

SEQ ID NO: 19912 - DNA, 1248 bp, synthetic construct
  source 1..1248: mol_type = other DNA
atggccttaccagtgaccgccttgctcctgccgctggccttgctgctccacgccgccaggccggacatcgtgctgacacagagcccttctagcctgtctgccagcgtgggagatagagccaccatcagctgtagagccagcgagagcgtgacaatcctgggcagccacctgatctactggtatcagcagaagcccggacaggcccctagactgctgattcagctggcctccaatgtgcagactggcgtgccagccagattttctggcagcggctctggcaccgatttcaccctgacaatcagcagcgtggaacccgaggatgtggccgtgtactactgcctccagagccggacaatccccagaacctttggacagggcaccaaggtggaaatcaaaggcggaggcggaagtggaggcggaggatctggcggcggaggctctcagattcagctcgtgcagtctggccccgagctgaagaaacctggcggctctgtgaagatcagctgtgccgccagcggctacaccttcaccgactactctatcaactgggtccgacaggctcccggcaaaggactggaatgggtcggatggatcaacaccgagacaagagagcccgcctacgcctacgacttcagaggcagattcaccttcagcgccgacaccagcaagagcacagcctacctccagatgaacagcctgagagccgaggacaccgccgtgtattattgcgccctggactacagctacgctatggactattggggccagggcaccctggtcacagtctcttctacgcgtttcaagatccccatcgaggaactggaagatcgggtgttcgtgaactgcaacacctctatcacctgggtggaaggcaccgtgggaacactgctgagcgacatcaccagactggacctcggcaagcggattctggaccctcggggcatctacagatgcaacggcaccgacatctacaaggacaaagaaagcaccgtgcaggtccactacagaatgtgccagtcctgcgtggaactggaccctgctacagtggccggcatcatcgtgaccgatgtgatcgctactctgctgctggctctgggagtgttctgcttcgccggacacgaaacaggcagactgtctggcgctgccgatacacaggccctgctgagaaacgaccaagtgtatcagcccctgcgcgacagagatgatgcccagtattctcacctcggcggcaactgggctagaaacaag

SEQ ID NO: 19913 - DNA, 1278 bp, synthetic construct
  source 1..1278: mol_type = other DNA
atggccttaccagtgaccgccttgctcctgccgctggccttgctgctccacgccgccaggccggacatcgtgctgacacagagcccttctagcctgtctgccagcgtgggagatagagccaccatcagctgtagagccagcgagagcgtgacaatcctgggcagccacctgatctactggtatcagcagaagcccggacaggcccctagactgctgattcagctggcctccaatgtgcagactggcgtgccagccagattttctggcagcggctctggcaccgatttcaccctgacaatcagcagcgtggaacccgaggatgtggccgtgtactactgcctccagagccggacaatccccagaacctttggacagggcaccaaggtggaaatcaaaggcggaggcggaagtggaggcggaggatctggcggcggaggctctcagattcagctcgtgcagtctggccccgagctgaagaaacctggcggctctgtgaagatcagctgtgccgccagcggctacaccttcaccgactactctatcaactgggtccgacaggctcccggcaaaggactggaatgggtcggatggatcaacaccgagacaagagagcccgcctacgcctacgacttcagaggcagattcaccttcagcgccgacaccagcaagagcacagcctacctccagatgaacagcctgagagccgaggacaccgccgtgtattattgcgccctggactacagctacgctatggactattggggccagggcaccctggtcacagtctcttctacgcgtcagagcatcaagggcaaccacctggtcaaggtgtacgactaccaagaggacggcagcgtgctgctgacatgtgatgccgaggccaagaacatcacctggtttaaggacggcaagatgatcggcttcctgaccgaggacaagaagaagtggaacctgggcagcaacgctaaggaccccagaggcatgtatcagtgcaagggcagccagaacaagagcaagcccctccaggtgtactaccggatgtgccagaactgcatcgagctgaacgccgctaccatcagcggctttctgttcgccgagatcgtgtccatcttcgtgctggccgtgggcgtgtactttatcgctggacaggatggcgtgcggcagagcagagcttccgataagcaaaccctgctgcctaacgaccagctgtaccagcctctgaaggacagagaggacgaccagtacagccacctccagggcaatcagctgagaagaaac

SEQ ID NO: 19914 - DNA, 1227 bp, synthetic construct
  source 1..1227: mol_type = other DNA
atggccttaccagtgaccgccttgctcctgccgctggccttgctgctccacgccgccaggccggacatcgtgctgacacagagcccttctagcctgtctgccagcgtgggagatagagccaccatcagctgtagagccagcgagagcgtgacaatcctgggcagccacctgatctactggtatcagcagaagcccggacaggcccctagactgctgattcagctggcctccaatgtgcagactggcgtgccagccagattttctggcagcggctctggcaccgatttcaccctgacaatcagcagcgtggaacccgaggatgtggccgtgtactactgcctccagagccggacaatccccagaacctttggacagggcaccaaggtggaaatcaaaggcggaggcggaagtggaggcggaggatctggcggcggaggctctcagattcagctcgtgcagtctggccccgagctgaagaaacctggcggctctgtgaagatcagctgtgccgccagcggctacaccttcaccgactactctatcaactgggtccgacaggctcccggcaaaggactggaatgggtcggatggatcaacaccgagacaagagagcccgcctacgcctacgacttcagaggcagattcaccttcagcgccgacaccagcaagagcacagcctacctccagatgaacagcctgagagccgaggacaccgccgtgtattattgcgccctggactacagctacgctatggactattggggccagggcaccctggtcacagtctcttctacgcgtcagagttttgggttgttggaccctaaattgtgctatctgttggacggaatcctgttcatttacggagtgatcctgaccgcattgttcctgcgggttaagttttccagatccgcagacgcacccgcttaccaacaagggcagaaccaactctacaatgaacttaatttggggcggagggaagagtacgacgttctggacaaaaggaggggacgagatcccgagatgggcggaaagcctcagcgaaggaagaatccgcaagaggggctttataacgaactccagaaagataaaatggcagaagcctatagtgagattgggatgaagggagaaaggaggaggggtaaaggtcacgatgggttgtaccaaggattgagcacagccactaaagatacctatgatgcgctccacatgcaggccctgccgccaaga

SEQ ID NO: 19915 - DNA, 1353 bp, synthetic construct
  source 1..1353: mol_type = other DNA
atggccttaccagtgaccgccttgctcctgccgctggccttgctgctccacgccgccaggccgcagattcagctcgtgcagtctggccccgagctgaagaaacctggcggctctgtgaagatcagctgtgccgccagcggctacaccttcaccgactactctatcaactgggtccgacaggctcccggcaaaggactggaatgggtcggatggatcaacaccgagacaagagagcccgcctacgcctacgacttcagaggcagattcaccttcagcgccgacaccagcaagagcacagcctacctccagatgaacagcctgagagccgaggacaccgccgtgtattattgcgccctggactacagctacgctatggactattggggccagggcaccctggtcacagtctcttctggcggaggcggaagtggaggcggaggatctggcggcggaggctctgacatcgtgctgacacagagcccttctagcctgtctgccagcgtgggagatagagccaccatcagctgtagagccagcgagagcgtgacaatcctgggcagccacctgatctactggtatcagcagaagcccggacaggcccctagactgctgattcagctggcctccaatgtgcagactggcgtgccagccagattttctggcagcggctctggcaccgatttcaccctgacaatcagcagcgtggaacccgaggatgtggccgtgtactactgcctccagagccggacaatccccagaacctttggacagggcaccaaggtggaaatcaaaacgcgtgacggtaacgaggagatgggaggaatcactcaaaccccttacaaagtctcaatttcaggaacaactgttatccttacatgtccccagtatcctggcagcgagatcctttggcagcataacgacaagaatatagggggagatgaagacgataagaatatcggatctgacgaggatcacttgagcctgaaagagttctccgagcttgaacaaagcggatattatgtgtgctatccgcgcgggtcaaagccggaagacgctaacttttacctttatctccgagccagagtgtgcgaaaattgcatggaaatggacgttatgtccgttgctacaatagttatcgtagatatatgcatcacgggtggactgcttctgctggtttattattggtccaagaatagaaaggccaaagctaaacccgtgaccagaggcgctggcgcaggcggaaggcaaaggggacaaaacaaagaacggccaccaccagtgccaaatccagattatgagcctattcggaaaggacagagggacctgtactctggcctgaatcagagaagaatc

SEQ ID NO: 19916 - DNA, 1248 bp, synthetic construct
  source 1..1248: mol_type = other DNA
atggccttaccagtgaccgccttgctcctgccgctggccttgctgctccacgccgccaggccgcagattcagctcgtgcagtctggccccgagctgaagaaacctggcggctctgtgaagatcagctgtgccgccagcggctacaccttcaccgactactctatcaactgggtccgacaggctcccggcaaaggactggaatgggtcggatggatcaacaccgagacaagagagcccgcctacgcctacgacttcagaggcagattcaccttcagcgccgacaccagcaagagcacagcctacctccagatgaacagcctgagagccgaggacaccgccgtgtattattgcgccctggactacagctacgctatggactattggggccagggcaccctggtcacagtctcttctggcggaggcggaagtggaggcggaggatctggcggcggaggctctgacatcgtgctgacacagagcccttctagcctgtctgccagcgtgggagatagagccaccatcagctgtagagccagcgagagcgtgacaatcctgggcagccacctgatctactggtatcagcagaagcccggacaggcccctagactgctgattcagctggcctccaatgtgcagactggcgtgccagccagattttctggcagcggctctggcaccgatttcaccctgacaatcagcagcgtggaacccgaggatgtggccgtgtactactgcctccagagccggacaatccccagaacctttggacagggcaccaaggtggaaatcaaaacgcgtttcaagatccccatcgaggaactggaagatcgggtgttcgtgaactgcaacacctctatcacctgggtggaaggcaccgtgggaacactgctgagcgacatcaccagactggacctcggcaagcggattctggaccctcggggcatctacagatgcaacggcaccgacatctacaaggacaaagaaagcaccgtgcaggtccactacagaatgtgccagtcctgcgtggaactggaccctgctacagtggccggcatcatcgtgaccgatgtgatcgctactctgctgctggctctgggagtgttctgcttcgccggacacgaaacaggcagactgtctggcgctgccgatacacaggccctgctgagaaacgaccaagtgtatcagcccctgcgcgacagagatgatgcccagtattctcacctcggcggcaactgggctagaaacaag

SEQ ID NO: 19917 - DNA, 1278 bp, synthetic construct
  source 1..1278: mol_type = other DNA
atggccttaccagtgaccgccttgctcctgccgctggccttgctgctccacgccgccaggccgcagattcagctcgtgcagtctggccccgagctgaagaaacctggcggctctgtgaagatcagctgtgccgccagcggctacaccttcaccgactactctatcaactgggtccgacaggctcccggcaaaggactggaatgggtcggatggatcaacaccgagacaagagagcccgcctacgcctacgacttcagaggcagattcaccttcagcgccgacaccagcaagagcacagcctacctccagatgaacagcctgagagccgaggacaccgccgtgtattattgcgccctggactacagctacgctatggactattggggccagggcaccctggtcacagtctcttctggcggaggcggaagtggaggcggaggatctggcggcggaggctctgacatcgtgctgacacagagcccttctagcctgtctgccagcgtgggagatagagccaccatcagctgtagagccagcgagagcgtgacaatcctgggcagccacctgatctactggtatcagcagaagcccggacaggcccctagactgctgattcagctggcctccaatgtgcagactggcgtgccagccagattttctggcagcggctctggcaccgatttcaccctgacaatcagcagcgtggaacccgaggatgtggccgtgtactactgcctccagagccggacaatccccagaacctttggacagggcaccaaggtggaaatcaaaacgcgtcagagcatcaagggcaaccacctggtcaaggtgtacgactaccaagaggacggcagcgtgctgctgacatgtgatgccgaggccaagaacatcacctggtttaaggacggcaagatgatcggcttcctgaccgaggacaagaagaagtggaacctgggcagcaacgctaaggaccccagaggcatgtatcagtgcaagggcagccagaacaagagcaagcccctccaggtgtactaccggatgtgccagaactgcatcgagctgaacgccgctaccatcagcggctttctgttcgccgagatcgtgtccatcttcgtgctggccgtgggcgtgtactttatcgctggacaggatggcgtgcggcagagcagagcttccgataagcaaaccctgctgcctaacgaccagctgtaccagcctctgaaggacagagaggacgaccagtacagccacctccagggcaatcagctgagaagaaac

SEQ ID NO: 19918 - DNA, 1227 bp, synthetic construct
  source 1..1227: mol_type = other DNA
atggccttaccagtgaccgccttgctcctgccgctggccttgctgctccacgccgccaggccgcagattcagctcgtgcagtctggccccgagctgaagaaacctggcggctctgtgaagatcagctgtgccgccagcggctacaccttcaccgactactctatcaactgggtccgacaggctcccggcaaaggactggaatgggtcggatggatcaacaccgagacaagagagcccgcctacgcctacgacttcagaggcagattcaccttcagcgccgacaccagcaagagcacagcctacctccagatgaacagcctgagagccgaggacaccgccgtgtattattgcgccctggactacagctacgctatggactattggggccagggcaccctggtcacagtctcttctggcggaggcggaagtggaggcggaggatctggcggcggaggctctgacatcgtgctgacacagagcccttctagcctgtctgccagcgtgggagatagagccaccatcagctgtagagccagcgagagcgtgacaatcctgggcagccacctgatctactggtatcagcagaagcccggacaggcccctagactgctgattcagctggcctccaatgtgcagactggcgtgccagccagattttctggcagcggctctggcaccgatttcaccctgacaatcagcagcgtggaacccgaggatgtggccgtgtactactgcctccagagccggacaatccccagaacctttggacagggcaccaaggtggaaatcaaaacgcgtcagagttttgggttgttggaccctaaattgtgctatctgttggacggaatcctgttcatttacggagtgatcctgaccgcattgttcctgcgggttaagttttccagatccgcagacgcacccgcttaccaacaagggcagaaccaactctacaatgaacttaatttggggcggagggaagagtacgacgttctggacaaaaggaggggacgagatcccgagatgggcggaaagcctcagcgaaggaagaatccgcaagaggggctttataacgaactccagaaagataaaatggcagaagcctatagtgagattgggatgaagggagaaaggaggaggggtaaaggtcacgatgggttgtaccaaggattgagcacagccactaaagatacctatgatgcgctccacatgcaggccctgccgccaaga

SEQ ID NO: 19919 - DNA, 1512 bp, synthetic construct
  source 1..1512: mol_type = other DNA
atggccttaccagtgaccgccttgctcctgccgctggccttgctgctccacgccgccaggccggacatcgtgctgacacagagcccttctagcctgtctgccagcgtgggagatagagccaccatcagctgtagagccagcgagagcgtgacaatcctgggcagccacctgatctactggtatcagcagaagcccggacaggcccctagactgctgattcagctggcctccaatgtgcagactggcgtgccagccagattttctggcagcggctctggcaccgatttcaccctgacaatcagcagcgtggaacccgaggatgtggccgtgtactactgcctccagagccggacaatccccagaacctttggacagggcaccaaggtggaaatcaaaggcggaggcggaagtggaggcggaggatctggcggcggaggctctcagattcagctcgtgcagtctggccccgagctgaagaaacctggcggctctgtgaagatcagctgtgccgccagcggctacaccttcaccgactactctatcaactgggtccgacaggctcccggcaaaggactggaatgggtcggatggatcaacaccgagacaagagagcccgcctacgcctacgacttcagaggcagattcaccttcagcgccgacaccagcaagagcacagcctacctccagatgaacagcctgagagccgaggacaccgccgtgtattattgcgccctggactacagctacgctatggactattggggccagggcaccctggtcacagtctcttctacgcgtggaatgaggactgaggatcttcccaaagctgtcgtctttctcgaaccccaatggtatcgggtgctcgaaaaagactctgtgacactgaaatgccaaggggcctactctcccgaggacaactccacacagtggtttcataatgagtccctcatcagctctcaggccagctcttatttcattgatgccgctacagtggacgactccggcgagtatcggtgtcagaccaatctgtctacactgtctgaccccgtgcagcttgaggtccacattggatggttgctcttgcaagccccacgctgggttttcaaagaggaagatccaatccatctgcggtgccacagctggaaaaacaccgctctccacaaagtcacatacctgcaaaatggcaaaggacgcaaatacttccatcacaattccgatttttacattccgaaggctaccctgaaagacagcggcagctatttctgccggggactcgtcggctccaagaatgtgtcctccgaaaccgtgaatatcacgattacccaaggactggctgtgcctacaatctctagcttctttccgcctggataccaagtctccttctgtcttgtgatggtcctcctgtttgctgtggacacaggactgtacttttccgtgaaaacgaacatccgcagctccacacgcgattggaaagatcacaagtttaaatggcgcaaagatccccaggacaag

SEQ ID NO: 19920 - DNA, 2361 bp, synthetic construct
  source 1..2361: mol_type = other DNA
atggccttaccagtgaccgccttgctcctgccgctggccttgctgctccacgccgccaggccggacatcgtgctgacacagagcccttctagcctgtctgccagcgtgggagatagagccaccatcagctgtagagccagcgagagcgtgacaatcctgggcagccacctgatctactggtatcagcagaagcccggacaggcccctagactgctgattcagctggcctccaatgtgcagactggcgtgccagccagattttctggcagcggctctggcaccgatttcaccctgacaatcagcagcgtggaacccgaggatgtggccgtgtactactgcctccagagccggacaatccccagaacctttggacagggcaccaaggtggaaatcaaaggcggaggcggaagtggaggcggaggatctggcggcggaggctctcagattcagctcgtgcagtctggccccgagctgaagaaacctggcggctctgtgaagatcagctgtgccgccagcggctacaccttcaccgactactctatcaactgggtccgacaggctcccggcaaaggactggaatgggtcggatggatcaacaccgagacaagagagcccgcctacgcctacgacttcagaggcagattcaccttcagcgccgacaccagcaagagcacagcctacctccagatgaacagcctgagagccgaggacaccgccgtgtattattgcgccctggactacagctacgctatggactattggggccagggcaccctggtcacagtctcttctacgcgtggaggctctggacaacaacagaccctgcctaaaccattcatctgggctgaaccccactttatggttccgaaagagaaacaagtcacgatttgttgccaagggaattacggggccgtcgagtatcagctccactttgagggctccctgtttgctgtggatcggcccaagccacctgaaagaatcaacaaagtccaattctatattcctgatatgaactcccgcatggcaggccagtattcatgtatctaccgcgtgggagaactttggagtgaaccctctaacctgctggacctcgtcgtgacagagatgtatgatacacccacactgtctgtgcaccctgggccagaagttatcagcggagaaaaagttaccttttattgccgcctcgataccgctacctctatgttcctcttgctgaaagagggccgcagctctcacgtgcagcgaggctacggaaaggtccaagctgagtttcctctcggccccgtgaccaccgctcacaggggcacatatagatgttttggctcttataacaatcatgcctggtcattcccatccgagcctgtgaaactgctggtcacaggcgatattgagaatacctctctggccccagaagatcctacattccccgccgacacatggggaacatatctgctgacaaccgaaaccgggctgcaaaaggaccatgctctgtgggatcataccgctcagaatctgcttcggatggggcttgcattcctggtcctggtggctcttgtctggtttctggtcgaggactggctgtcccggaagagaaccagagaaagagcttccagggccagcacctgggaaggcagacgcagactgaatactcagaccctgcgcgccaagagaagcggatctggcgtgaagcagaccctgaatttcgacctgctgaagctggctggcgacgtggaatccaacccaggcccttctagaggccatatgaccgagtacaagcccacggtgcgcctcgccacccgcgacgacgtccccagggccgtacgcaccctcgccgccgcgttcgccgactaccccgccacgcgccacaccgtcgatccggaccgccacatcgagcgggtcaccgagctgcaagaactcttcctcacgcgcgtcgggctcgacatcggcaaggtgtgggtcgcggacgacggcgccgcggtggcggtctggaccacgccggagagcgtcgaagcgggggcggtgttcgccgagatcggcccgcgcatggccgagttgagcggttcccggctggccgcgcagcaacagatggaaggcctcctggcgccgcaccggcccaaggagcccgcgtggttcctggccaccgtcggcgtctcgcccgaccaccagggcaagggtctgggcagcgccgtcgtgctccccggagtggaggcggccgagcgcgccggggtgcccgccttcctggagacctccgcgccccgcaacctccccttctacgagcggctcggcttcaccgtcaccgccgacgtcgaggtgcccgaaggaccgcgcacctggtgcatgacccgcaagcccggtgcctga

SEQ ID NO: 19921 - DNA, 1860 bp, synthetic construct
  source 1..1860: mol_type = other DNA
atggccttaccagtgaccgccttgctcctgccgctggccttgctgctccacgccgccaggccggacatcgtgctgacacagagcccttctagcctgtctgccagcgtgggagatagagccaccatcagctgtagagccagcgagagcgtgacaatcctgggcagccacctgatctactggtatcagcagaagcccggacaggcccctagactgctgattcagctggcctccaatgtgcagactggcgtgccagccagattttctggcagcggctctggcaccgatttcaccctgacaatcagcagcgtggaacccgaggatgtggccgtgtactactgcctccagagccggacaatccccagaacctttggacagggcaccaaggtggaaatcaaaggcggaggcggaagtggaggcggaggatctggcggcggaggctctcagattcagctcgtgcagtctggccccgagctgaagaaacctggcggctctgtgaagatcagctgtgccgccagcggctacaccttcaccgactactctatcaactgggtccgacaggctcccggcaaaggactggaatgggtcggatggatcaacaccgagacaagagagcccgcctacgcctacgacttcagaggcagattcaccttcagcgccgacaccagcaagagcacagcctacctccagatgaacagcctgagagccgaggacaccgccgtgtattattgcgccctggactacagctacgctatggactattggggccagggcaccctggtcacagtctcttctacgcgtaaaattgaagttatgtatcctcctccttacctagacaatgagaagagcaatggaaccattatccatgtgaaaggggcgcgtggcgatattgagaatacctctctggccccagaagatcctacattccccgccgacacatggggaacatatctgctgacaaccgaaaccgggctgcaaaaggaccatgctctgtgggatcataccgctcagaatctgcttcggatggggcttgcattcctggtcctggtggctcttgtctggtttctggtcgaggactggctgtcccggaagagaaccagagaaagagcttccagggccagcacctgggaaggcagacgcagactgaatactcagaccctgcgcgccaagagaagcggatctggcgtgaagcagaccctgaatttcgacctgctgaagctggctggcgacgtggaatccaacccaggcccttctagaggccatatgaccgagtacaagcccacggtgcgcctcgccacccgcgacgacgtccccagggccgtacgcaccctcgccgccgcgttcgccgactaccccgccacgcgccacaccgtcgatccggaccgccacatcgagcgggtcaccgagctgcaagaactcttcctcacgcgcgtcgggctcgacatcggcaaggtgtgggtcgcggacgacggcgccgcggtggcggtctggaccacgccggagagcgtcgaagcgggggcggtgttcgccgagatcggcccgcgcatggccgagttgagcggttcccggctggccgcgcagcaacagatggaaggcctcctggcgccgcaccggcccaaggagcccgcgtggttcctggccaccgtcggcgtctcgcccgaccaccagggcaagggtctgggcagcgccgtcgtgctccccggagtggaggcggccgagcgcgccggggtgcccgccttcctggagacctccgcgccccgcaacctccccttctacgagcggctcggcttcaccgtcaccgccgacgtcgaggtgcccgaaggaccgcgcacctggtgcatgacccgcaagcccggtgcctga

SEQ ID NO: 19922 - DNA, 2121 bp, synthetic construct
  source 1..2121: mol_type = other DNA
atggccttaccagtgaccgccttgctcctgccgctggccttgctgctccacgccgccaggccggacatcgtgctgacacagagcccttctagcctgtctgccagcgtgggagatagagccaccatcagctgtagagccagcgagagcgtgacaatcctgggcagccacctgatctactggtatcagcagaagcccggacaggcccctagactgctgattcagctggcctccaatgtgcagactggcgtgccagccagattttctggcagcggctctggcaccgatttcaccctgacaatcagcagcgtggaacccgaggatgtggccgtgtactactgcctccagagccggacaatccccagaacctttggacagggcaccaaggtggaaatcaaaggcggaggcggaagtggaggcggaggatctggcggcggaggctctcagattcagctcgtgcagtctggccccgagctgaagaaacctggcggctctgtgaagatcagctgtgccgccagcggctacaccttcaccgactactctatcaactgggtccgacaggctcccggcaaaggactggaatgggtcggatggatcaacaccgagacaagagagcccgcctacgcctacgacttcagaggcagattcaccttcagcgccgacaccagcaagagcacagcctacctccagatgaacagcctgagagccgaggacaccgccgtgtattattgcgccctggactacagctacgctatggactattggggccagggcaccctggtcacagtctcttctacgcgtctgtgggtgtcccagccacctgaaattcggacactggaaggctcctccgcctttctgccctgtagctttaacgccagccaggggagactcgccatcggctctgtgacatggttccgggatgaagtcgtccctggaaaagaagttcgcaacggaacaccagagttcagaggcagactcgccccactggcaagctccagattcctgcatgaccatcaggctgaactgcacattagggacgtgcggggccacgatgcctccatctatgtgtgtcgggtcgaagtgcttggactcggcgtcggaactggaaacggcactaggctggtggtcgagaaagaacatccacagcttggcgctggcaccgtcctgttgcttagagccggattctatgccgtcagcttcctgtccgtggctgtggggtctacagtgtattaccagggaaaatgtctcacctggaaaggccccagacgccagcttccagctgttgttcctgctccactgccaccaccttgtggctcctctgctcacttgcttccaccagtgcctggcggacgcgccaagagaagcggatctggcgtgaagcagaccctgaatttcgacctgctgaagctggctggcgacgtggaatccaacccaggcccttctagaatgtaccggatgcagctgctgagctgtatcgccctgtctctggccctggtcacaaatagcgcccctaccagcagcagcaccaagaaaacccagctgcaactggaacacctcctgctggacctccagatgatcctgaacggcatcaacaactacaagaaccccaagctgaccgagatgctgaccgccaagttctacatgcccaagaaggccaccgagctgaagcacctccagtgcctggaagaggaactgaagcccctggaagaagtgctgaatctggcccagagcaagaacttccacctgaggccaagggacctgatctccaacatcaacgtgatcgtgctggaactgaaaggcagcgagacaaccttcatgtgcgagtacgccgacgagacagctaccatcgtggaatttctgaatcggtggatcaccttctgccagagcatcatcagcaccctgacaaagatcgaagtgatgtaccctcctccttacctggacaacgagaagtccaacggcaccatcatccacgtgaagggcaagcacctgtgtccttctccactgttccccggacctagcaagcctttctgggtgctcgttgttgttggcggcgtgctggcctgttacagcctgctggttaccgtggccttcatcatcttttgggtccgaagcaagcggagctaa

SEQ ID NO: 19923 - DNA, 2049 bp, synthetic construct
  source 1..2049: mol_type = other DNA
atggccttaccagtgaccgccttgctcctgccgctggccttgctgctccacgccgccaggccggacatcgtgctgacacagagcccttctagcctgtctgccagcgtgggagatagagccaccatcagctgtagagccagcgagagcgtgacaatcctgggcagccacctgatctactggtatcagcagaagcccggacaggcccctagactgctgattcagctggcctccaatgtgcagactggcgtgccagccagattttctggcagcggctctggcaccgatttcaccctgacaatcagcagcgtggaacccgaggatgtggccgtgtactactgcctccagagccggacaatccccagaacctttggacagggcaccaaggtggaaatcaaaggcggaggcggaagtggaggcggaggatctggcggcggaggctctcagattcagctcgtgcagtctggccccgagctgaagaaacctggcggctctgtgaagatcagctgtgccgccagcggctacaccttcaccgactactctatcaactgggtccgacaggctcccggcaaaggactggaatgggtcggatggatcaacaccgagacaagagagcccgcctacgcctacgacttcagaggcagattcaccttcagcgccgacaccagcaagagcacagcctacctccagatgaacagcctgagagccgaggacaccgccgtgtattattgcgccctggactacagctacgctatggactattggggccagggcaccctggtcacagtctcttctacgcgtctgtgggtgtcccagccacctgaaattcggacactggaaggctcctccgcctttctgccctgtagctttaacgccagccaggggagactcgccatcggctctgtgacatggttccgggatgaagtcgtccctggaaaagaagttcgcaacggaacaccagagttcagaggcagactcgccccactggcaagctccagattcctgcatgaccatcaggctgaactgcacattagggacgtgcggggccacgatgcctccatctatgtgtgtcgggtcgaagtgcttggactcggcgtcggaactggaaacggcactaggctggtggtcgagaaagaacatccacagcttggcgctggcaccgtcctgttgcttagagccggattctatgccgtcagcttcctgtccgtggctgtggggtctacagtgtattaccagggaaaatgtctcacctggaaaggccccagacgccagcttccagctgttgttcctgctccactgccaccaccttgtggctcctctgctcacttgcttccaccagtgcctggcggacgcgccaagagaagcggatctggcgtgaagcagaccctgaatttcgacctgctgaagctggctggcgacgtggaatccaacccaggcccttctagaggccatatgaccgagtacaagcccacggtgcgcctcgccacccgcgacgacgtccccagggccgtacgcaccctcgccgccgcgttcgccgactaccccgccacgcgccacaccgtcgatccggaccgccacatcgagcgggtcaccgagctgcaagaactcttcctcacgcgcgtcgggctcgacatcggcaaggtgtgggtcgcggacgacggcgccgcggtggcggtctggaccacgccggagagcgtcgaagcgggggcggtgttcgccgagatcggcccgcgcatggccgagttgagcggttcccggctggccgcgcagcaacagatggaaggcctcctggcgccgcaccggcccaaggagcccgcgtggttcctggccaccgtcggcgtctcgcccgaccaccagggcaagggtctgggcagcgccgtcgtgctccccggagtggaggcggccgagcgcgccggggtgcccgccttcctggagacctccgcgccccgcaacctccccttctacgagcggctcggcttcaccgtcaccgccgacgtcgaggtgcccgaaggaccgcgcacctggtgcatgacccgcaagcccggtgcctga

SEQ ID NO: 19924 - DNA, 1074 bp, synthetic construct
  source 1..1074: mol_type = other DNA
atggccttaccagtgaccgccttgctcctgccgctggccttgctgctccacgccgccaggccggacatcgtgctgacacagagcccttctagcctgtctgccagcgtgggagatagagccaccatcagctgtagagccagcgagagcgtgacaatcctgggcagccacctgatctactggtatcagcagaagcccggacaggcccctagactgctgattcagctggcctccaatgtgcagactggcgtgccagccagattttctggcagcggctctggcaccgatttcaccctgacaatcagcagcgtggaacccgaggatgtggccgtgtactactgcctccagagccggacaatccccagaacctttggacagggcaccaaggtggaaatcaaaggcggaggcggaagtggaggcggaggatctggcggcggaggctctcagattcagctcgtgcagtctggccccgagctgaagaaacctggcggctctgtgaagatcagctgtgccgccagcggctacaccttcaccgactactctatcaactgggtccgacaggctcccggcaaaggactggaatgggtcggatggatcaacaccgagacaagagagcccgcctacgcctacgacttcagaggcagattcaccttcagcgccgacaccagcaagagcacagcctacctccagatgaacagcctgagagccgaggacaccgccgtgtattattgcgccctggactacagctacgctatggactattggggccagggcaccctggtcacagtctcttctacgcgtaaaattgaagttatgtatcctcctccttacctagacaatgagaagagcaatggaaccattatccatgtgaaaggggcgcgtatcacccagggcctggccgtgtctaccatcagcagctttttcccacccggctaccaggtgtccttctgcctcgtgatggtgctgctgttcgccgtggacaccggcctgtacttcagcgtgaaaacaaacatccggtccagcaccagagactggaaggaccacaagttcaagtggcggaaggacccccaggacaag

SEQ ID NO: 19925 - DNA, 1074 bp, synthetic construct
  source 1..1074: mol_type = other DNA
atggccttaccagtgaccgccttgctcctgccgctggccttgctgctccacgccgccaggccggacatcgtgctgacacagagcccttctagcctgtctgccagcgtgggagatagagccaccatcagctgtagagccagcgagagcgtgacaatcctgggcagccacctgatctactggtatcagcagaagcccggacaggcccctagactgctgattcagctggcctccaatgtgcagactggcgtgccagccagattttctggcagcggctctggcaccgatttcaccctgacaatcagcagcgtggaacccgaggatgtggccgtgtactactgcctccagagccggacaatccccagaacctttggacagggcaccaaggtggaaatcaaaggcggaggcggaagtggaggcggaggatctggcggcggaggctctcagattcagctcgtgcagtctggccccgagctgaagaaacctggcggctctgtgaagatcagctgtgccgccagcggctacaccttcaccgactactctatcaactgggtccgacaggctcccggcaaaggactggaatgggtcggatggatcaacaccgagacaagagagcccgcctacgcctacgacttcagaggcagattcaccttcagcgccgacaccagcaagagcacagcctacctccagatgaacagcctgagagccgaggacaccgccgtgtattattgcgccctggactacagctacgctatggactattggggccagggcaccctggtcacagtctcttctacgcgtaaaattgaagttatgtatcctcctccttacctagacaatgagaagagcaatggaaccattatccatgtgaaaggggcgcgtattacccaaggactggctgtgcctacaatctctagcttctttccgcctggataccaagtctccttctgtcttgtgatggtcctcctgtttgctgtggacacaggactgtacttttccgtgaaaacgaacatccgcagctccacacgcgattggaaagatcacaagtttaaatggcgcaaagatccccaggacaag

SEQ ID NO: 19926 - DNA, 1011 bp, synthetic construct
  source 1..1011: mol_type = other DNA
atggccttaccagtgaccgccttgctcctgccgctggccttgctgctccacgccgccaggccggacatcgtgctgacacagagcccttctagcctgtctgccagcgtgggagatagagccaccatcagctgtagagccagcgagagcgtgacaatcctgggcagccacctgatctactggtatcagcagaagcccggacaggcccctagactgctgattcagctggcctccaatgtgcagactggcgtgccagccagattttctggcagcggctctggcaccgatttcaccctgacaatcagcagcgtggaacccgaggatgtggccgtgtactactgcctccagagccggacaatccccagaacctttggacagggcaccaaggtggaaatcaaaggcggaggcggaagtggaggcggaggatctggcggcggaggctctcagattcagctcgtgcagtctggccccgagctgaagaaacctggcggctctgtgaagatcagctgtgccgccagcggctacaccttcaccgactactctatcaactgggtccgacaggctcccggcaaaggactggaatgggtcggatggatcaacaccgagacaagagagcccgcctacgcctacgacttcagaggcagattcaccttcagcgccgacaccagcaagagcacagcctacctccagatgaacagcctgagagccgaggacaccgccgtgtattattgcgccctggactacagctacgctatggactattggggccagggcaccctggtcacagtctcttctacgcgtaaaattgaagttatgtatcctcctccttacctagacaatgagaagagcaatggaaccattatccatgtgaaaggggcgcgtattacccaaggactggctgtgtctacaatctctagcttctctccgcctggataccaagtctccttctgtcttgtgatggtcctcctgtttgctgtggacacaggactgtacttttccgtgaaaacgaacatc

SEQ ID NO: 19927 - DNA, 1104 bp, synthetic construct
  source 1..1104: mol_type = other DNA
atggccttaccagtgaccgccttgctcctgccgctggccttgctgctccacgccgccaggccggacatcgtgctgacacagagcccttctagcctgtctgccagcgtgggagatagagccaccatcagctgtagagccagcgagagcgtgacaatcctgggcagccacctgatctactggtatcagcagaagcccggacaggcccctagactgctgattcagctggcctccaatgtgcagactggcgtgccagccagattttctggcagcggctctggcaccgatttcaccctgacaatcagcagcgtggaacccgaggatgtggccgtgtactactgcctccagagccggacaatccccagaacctttggacagggcaccaaggtggaaatcaaaggcggaggcggaagtggaggcggaggatctggcggcggaggctctcagattcagctcgtgcagtctggccccgagctgaagaaacctggcggctctgtgaagatcagctgtgccgccagcggctacaccttcaccgactactctatcaactgggtccgacaggctcccggcaaaggactggaatgggtcggatggatcaacaccgagacaagagagcccgcctacgcctacgacttcagaggcagattcaccttcagcgccgacaccagcaagagcacagcctacctccagatgaacagcctgagagccgaggacaccgccgtgtattattgcgccctggactacagctacgctatggactattggggccagggcaccctggtcacagtctcttctacgcgtaaaattgaagttatgtatcctcctccttacctagacaatgagaagagcaatggaaccattatccatgtgaaaggggcgcgtgtcgagaaagaacatccacagcttggcgctggcaccgtcctgttgcttagagccggattctatgccgtcagcttcctgtccgtggctgtggggtctacagtgtattaccagggaaaatgtctcacctggaaaggccccagacgccagcttccagctgttgttcctgctccactgccaccaccttgtggctcctctgctcacttgcttccaccagtgcctggcgga

SEQ ID NO: 19928 - DNA, 1347 bp, synthetic construct
  source 1..1347: mol_type = other DNA
atggccttaccagtgaccgccttgctcctgccgctggccttgctgctccacgccgccaggccggacatcgtgctgacacagagcccttctagcctgtctgccagcgtgggagatagagccaccatcagctgtagagccagcgagagcgtgacaatcctgggcagccacctgatctactggtatcagcagaagcccggacaggcccctagactgctgattcagctggcctccaatgtgcagactggcgtgccagccagattttctggcagcggctctggcaccgatttcaccctgacaatcagcagcgtggaacccgaggatgtggccgtgtactactgcctccagagccggacaatccccagaacctttggacagggcaccaaggtggaaatcaaaggcggaggcggaagtggaggcggaggatctggcggcggaggctctcagattcagctcgtgcagtctggccccgagctgaagaaacctggcggctctgtgaagatcagctgtgccgccagcggctacaccttcaccgactactctatcaactgggtccgacaggctcccggcaaaggactggaatgggtcggatggatcaacaccgagacaagagagcccgcctacgcctacgacttcagaggcagattcaccttcagcgccgacaccagcaagagcacagcctacctccagatgaacagcctgagagccgaggacaccgccgtgtattattgcgccctggactacagctacgctatggactattggggccagggcaccctggtcacagtctcttctacgcgtaaaattgaagttatgtatcctcctccttacctagacaatgagaagagcaatggaaccattatccatgtgaaaggggcgcgtaagtctgtgcgcttttacctggtcgtcagccctgccagtgcctccactcagacatcttggaccccaagggaccttgtgtcctctcagacacagacacagtcctgcgtgccaccaactgctggcgcaagacaggctccagagtctcccagcacaatccccgtcccttctcagccccagaactccacacttaggccaggaccagctgctccaatcgcactggtcccagtgttctgcggactgctggttgccaagtctctggtgctgagcgcactcctcgtttggtggggcgatatttggtggaaaacgatgatggaattgagatccctcgatacgcagaaagccacatgccaccttcagcaagtcacagacttgccttggaccagcgtcagctctcccgtggaacgggaaattctgtatcatacagtggcccgcaccaagatttccgacgatgacgacgagcacacactg

SEQ ID NO: 19929 - DNA, 1158 bp, synthetic construct
  source 1..1158: mol_type = other DNA
atggccttaccagtgaccgccttgctcctgccgctggccttgctgctccacgccgccaggccggacatcgtgctgacacagagcccttctagcctgtctgccagcgtgggagatagagccaccatcagctgtagagccagcgagagcgtgacaatcctgggcagccacctgatctactggtatcagcagaagcccggacaggcccctagactgctgattcagctggcctccaatgtgcagactggcgtgccagccagattttctggcagcggctctggcaccgatttcaccctgacaatcagcagcgtggaacccgaggatgtggccgtgtactactgcctccagagccggacaatccccagaacctttggacagggcaccaaggtggaaatcaaaggcggaggcggaagtggaggcggaggatctggcggcggaggctctcagattcagctcgtgcagtctggccccgagctgaagaaacctggcggctctgtgaagatcagctgtgccgccagcggctacaccttcaccgactactctatcaactgggtccgacaggctcccggcaaaggactggaatgggtcggatggatcaacaccgagacaagagagcccgcctacgcctacgacttcagaggcagattcaccttcagcgccgacaccagcaagagcacagcctacctccagatgaacagcctgagagccgaggacaccgccgtgtattattgcgccctggactacagctacgctatggactattggggccagggcaccctggtcacagtctcttctacgcgtaaaattgaagttatgtatcctcctccttacctagacaatgagaagagcaatggaaccattatccatgtgaaaggggcgcgtggcgatattgagaatacctctctggccccagaagatcctacattccccgccgacacatggggaacatatctgctgacaaccgaaaccgggctgcaaaaggaccatgctctgtgggatcataccgctcagaatctgcttcggatggggcttgcattcctggtcctggtggctcttgtctggtttctggtcgaggactggctgtcccggaagagaaccagagaaagagcttccagggccagcacctgggaaggcagacgcagactgaatactcagaccctg

SEQ ID NO: 19930 - DNA, 2949 bp, synthetic construct
  source 1..2949: mol_type = other DNA
atggccttaccagtgaccgccttgctcctgccgctggccttgctgctccacgccgccaggccggacatcgtgctgacacagagcccttctagcctgtctgccagcgtgggagatagagccaccatcagctgtagagccagcgagagcgtgacaatcctgggcagccacctgatctactggtatcagcagaagcccggacaggcccctagactgctgattcagctggcctccaatgtgcagactggcgtgccagccagattttctggcagcggctctggcaccgatttcaccctgacaatcagcagcgtggaacccgaggatgtggccgtgtactactgcctccagagccggacaatccccagaacctttggacagggcaccaaggtggaaatcaaactcgagggacagcctaaggccaatcctaccgtgacactgttccctccaagcagcgaagaactccaggccaacaaggccacacttgtgtgcctgatctccgacttctaccctggggctgtgacagtggcttggaaggccgatggatctcctgtgaaagccggcgtggaaaccaccaagccatccaagcagagcaacaacaaatacgccgccagctcctacctgagcctgacacctgagcagtggaagtcccacagatcctacagctgccaagtgacccacgaaggcagcaccgtggaaaagacagtggcccctacagagtgcagcggatcccagagcttcggcctgctggaccccaagctgtgctacctgctggatggcatcctgttcatctacggcgtgatcctgaccgccctgttcctgagagtgaagttcagcagaagcgccgacgcccctgcctaccagcagggacagaaccaactgtacaacgagctgaacctgggcagacgggaagagtacgacgtgctggacaagcggagaggcagggaccctgagatgggcggaaagccccagcggagaaagaacccccaggaaggactgtataacgaactccagaaagacaagatggccgaagcctacagcgagatcggcatgaagggcgagcggagaagaggcaagggccacgatggcctgtaccagggcctgagcaccgccaccaaggacacctatgacgccctgcacatgcaggccctgcctccaagaagggccaagcgatctggatctggagcaacaaacttctcactactcaaacaagcaggtgacgtggaggagaatcccgggcctactagtatggactggatttggcgcatccttttccttgtcggcgctgctaccggcgcgcattccttcgaacagattcagctcgtgcagtctggccccgagctgaagaaacctggcggctctgtgaagatcagctgtgccgccagcggctacaccttcaccgactactctatcaactgggtccgacaggctcccggcaaaggactggaatgggtcggatggatcaacaccgagacaagagagcccgcctacgcctacgacttcagaggcagattcaccttcagcgccgacaccagcaagagcacagcctacctccagatgaacagcctgagagccgaggacaccgccgtgtattattgcgccctggactacagctacgctatggactattggggccagggcaccctggtcacagtctcttctacgcgtgcctctacaaagggaccctccgtgtttcctctggctcccagcagcaagtctacaagcggaggaacagccgctctgggctgcctggtcaaggattactttcccgagcctgtgaccgtgtcctggaatagcggagcactgacaagcggcgtgcacacctttccagccgtgctgcaaagcagcggcctgtactctctgagcagcgtggtcacagtgcctagctctagcctgggcacccagacctacatctgcaatgtgaaccacaagcctagcaacaccaaggtggacaagagagtggaacccaagagctgtggtaccggcgacatcgagaacaccagtctggcccctgaggaccctacctttcctgccgatacctggggcacctacctgctgaccacagagacaggactccagaaagatcacgccctgtgggaccacacagcccagaacctgctgagaatgggcctcgcctttctggtgctggttgccctcgtgtggttcctggtggaagattggctgagccggaagcggacaagagagagagccagcagagcctctacctgggagggaagaagaaggctgaacacccagacacttagggccaagcgatctggatctggagcaacaaacttctcactactcaaacaagcaggtgacgtggaggagaatcccgggccttctagaggccatatgaccgagtacaagcccacggtgcgcctcgccacccgcgacgacgtccccagggccgtacgcaccctcgccgccgcgttcgccgactaccccgccacgcgccacaccgtcgatccggaccgccacatcgagcgggtcaccgagctgcaagaactcttcctcacgcgcgtcgggctcgacatcggcaaggtgtgggtcgcggacgacggcgccgcggtggcggtctggaccacgccggagagcgtcgaagcgggggcggtgttcgccgagatcggcccgcgcatggccgagttgagcggttcccggctggccgcgcagcaacagatggaaggcctcctggcgccgcaccggcccaaggagcccgcgtggttcctggccaccgtcggcgtctcgcccgaccaccagggcaagggtctgggcagcgccgtcgtgctccccggagtggaggcggccgagcgcgccggggtgcccgccttcctggagacctccgcgccccgcaacctccccttctacgagcggctcggcttcaccgtcaccgccgacgtcgaggtgcccgaaggaccgcgcacctggtgcatgacccgcaagcccggtgcctga

SEQ ID NO: 19931 - DNA, 3147 bp, synthetic construct
  source 1..3147: mol_type = other DNA
atggccttaccagtgaccgccttgctcctgccgctggccttgctgctccacgccgccaggccggacatcgtgctgacacagagcccttctagcctgtctgccagcgtgggagatagagccaccatcagctgtagagccagcgagagcgtgacaatcctgggcagccacctgatctactggtatcagcagaagcccggacaggcccctagactgctgattcagctggcctccaatgtgcagactggcgtgccagccagattttctggcagcggctctggcaccgatttcaccctgacaatcagcagcgtggaacccgaggatgtggccgtgtactactgcctccagagccggacaatccccagaacctttggacagggcaccaaggtggaaatcaaactcgagggacagcctaaggccaatcctaccgtgacactgttccctccaagcagcgaagaactccaggccaacaaggccacacttgtgtgcctgatctccgacttctaccctggggctgtgacagtggcttggaaggccgatggatctcctgtgaaagccggcgtggaaaccaccaagccatccaagcagagcaacaacaaatacgccgccagctcctacctgagcctgacacctgagcagtggaagtcccacagatcctacagctgccaagtgacccacgaaggcagcaccgtggaaaagacagtggcccctacagagtgcagcggatcccagagcttcggcctgctggaccccaagctgtgctacctgctggatggcatcctgttcatctacggcgtgatcctgaccgccctgttcctgagagtgaagttcagcagaagcgccgacgcccctgcctaccagcagggacagaaccaactgtacaacgagctgaacctgggcagacgggaagagtacgacgtgctggacaagcggagaggcagggaccctgagatgggcggaaagccccagcggagaaagaacccccaggaaggactgtataacgaactccagaaagacaagatggccgaagcctacagcgagatcggcatgaagggcgagcggagaagaggcaagggccacgatggcctgtaccagggcctgagcaccgccaccaaggacacctatgacgccctgcacatgcaggccctgcctccaagaagggccaagcgatctggatctggagcaacaaacttctcactactcaaacaagcaggtgacgtggaggagaatcccgggcctactagtatggactggatttggcgcatccttttccttgtcggcgctgctaccggcgcgcattccttcgaacagattcagctcgtgcagtctggccccgagctgaagaaacctggcggctctgtgaagatcagctgtgccgccagcggctacaccttcaccgactactctatcaactgggtccgacaggctcccggcaaaggactggaatgggtcggatggatcaacaccgagacaagagagcccgcctacgcctacgacttcagaggcagattcaccttcagcgccgacaccagcaagagcacagcctacctccagatgaacagcctgagagccgaggacaccgccgtgtattattgcgccctggactacagctacgctatggactattggggccagggcaccctggtcacagtctcttctacgcgtgcctctacaaagggaccctccgtgtttcctctggctcccagcagcaagtctacaagcggaggaacagccgctctgggctgcctggtcaaggattactttcccgagcctgtgaccgtgtcctggaatagcggagcactgacaagcggcgtgcacacctttccagccgtgctgcaaagcagcggcctgtactctctgagcagcgtggtcacagtgcctagctctagcctgggcacccagacctacatctgcaatgtgaaccacaagcctagcaacaccaaggtggacaagagagtggaacccaagagctgtggtaccaagtctgtgcgcttttacctggtcgtcagccctgccagtgcctccactcagacatcttggaccccaagggaccttgtgtcctctcagacacagacacagtcctgcgtgccaccaactgctggcgcaagacaggctccagagtctcccagcacaatccccgtcccttctcagccccagaactccacacttaggccaggaccagctgctccaatcgcactggtcccagtgttctgcggactgctggttgccaagtctctggtgctgagcgcactcctcgtttggtggggcgatatttggtggaaaacgatgatggaattgagatccctcgatacgcagaaagccacatgccaccttcagcaagtcacagacttgccttggaccagcgtcagctctcccgtggaacgggaaattctgtatcatacagtggcccgcaccaagatttccgacgatgacgacgagcacacactgcgcgccaagagaagcggatctggcgtgaagcagaccctgaatttcgacctgctgaagctggctggcgacgtggaatccaacccaggcccttctagaggccatatgaccgagtacaagcccacggtgcgcctcgccacccgcgacgacgtccccagggccgtacgcaccctcgccgccgcgttcgccgactaccccgccacgcgccacaccgtcgatccggaccgccacatcgagcgggtcaccgagctgcaagaactcttcctcacgcgcgtcgggctcgacatcggcaaggtgtgggtcgcggacgacggcgccgcggtggcggtctggaccacgccggagagcgtcgaagcgggggcggtgttcgccgagatcggcccgcgcatggccgagttgagcggttcccggctggccgcgcagcaacagatggaaggcctcctggcgccgcaccggcccaaggagcccgcgtggttcctggccaccgtcggcgtctcgcccgaccaccagggcaagggtctgggcagcgccgtcgtgctccccggagtggaggcggccgagcgcgccggggtgcccgccttcctggagacctccgcgccccgcaacctccccttctacgagcggctcggcttcaccgtcaccgccgacgtcgaggtgcccgaaggaccgcgcacctggtgcatgacccgcaagcccggtgcctga

SEQ ID NO: 19932 - DNA, 2907 bp, synthetic construct
  source 1..2907: mol_type = other DNA
atggccttaccagtgaccgccttgctcctgccgctggccttgctgctccacgccgccaggccggacatcgtgctgacacagagcccttctagcctgtctgccagcgtgggagatagagccaccatcagctgtagagccagcgagagcgtgacaatcctgggcagccacctgatctactggtatcagcagaagcccggacaggcccctagactgctgattcagctggcctccaatgtgcagactggcgtgccagccagattttctggcagcggctctggcaccgatttcaccctgacaatcagcagcgtggaacccgaggatgtggccgtgtactactgcctccagagccggacaatccccagaacctttggacagggcaccaaggtggaaatcaaactcgagggacagcctaaggccaatcctaccgtgacactgttccctccaagcagcgaagaactccaggccaacaaggccacacttgtgtgcctgatctccgacttctaccctggggctgtgacagtggcttggaaggccgatggatctcctgtgaaagccggcgtggaaaccaccaagccatccaagcagagcaacaacaaatacgccgccagctcctacctgagcctgacacctgagcagtggaagtcccacagatcctacagctgccaagtgacccacgaaggcagcaccgtggaaaagacagtggcccctacagagtgcagcggatcccagagcttcggcctgctggaccccaagctgtgctacctgctggatggcatcctgttcatctacggcgtgatcctgaccgccctgttcctgagagtgaagttcagcagaagcgccgacgcccctgcctaccagcagggacagaaccaactgtacaacgagctgaacctgggcagacgggaagagtacgacgtgctggacaagcggagaggcagggaccctgagatgggcggaaagccccagcggagaaagaacccccaggaaggactgtataacgaactccagaaagacaagatggccgaagcctacagcgagatcggcatgaagggcgagcggagaagaggcaagggccacgatggcctgtaccagggcctgagcaccgccaccaaggacacctatgacgccctgcacatgcaggccctgcctccaagaagggccaagcgatctggatctggagcaacaaacttctcactactcaaacaagcaggtgacgtggaggagaatcccgggcctactagtatggactggatttggcgcatccttttccttgtcggcgctgctaccggcgcgcattccttcgaacagattcagctcgtgcagtctggccccgagctgaagaaacctggcggctctgtgaagatcagctgtgccgccagcggctacaccttcaccgactactctatcaactgggtccgacaggctcccggcaaaggactggaatgggtcggatggatcaacaccgagacaagagagcccgcctacgcctacgacttcagaggcagattcaccttcagcgccgacaccagcaagagcacagcctacctccagatgaacagcctgagagccgaggacaccgccgtgtattattgcgccctggactacagctacgctatggactattggggccagggcaccctggtcacagtctcttctacgcgtgcctctacaaagggaccctccgtgtttcctctggctcccagcagcaagtctacaagcggaggaacagccgctctgggctgcctggtcaaggattactttcccgagcctgtgaccgtgtcctggaatagcggagcactgacaagcggcgtgcacacctttccagccgtgctgcaaagcagcggcctgtactctctgagcagcgtggtcacagtgcctagctctagcctgggcacccagacctacatctgcaatgtgaaccacaagcctagcaacaccaaggtggacaagagagtggaacccaagagctgtggtaccgtggtcgagaaagaacatccacagcttggcgctggcaccgtcctgttgcttagagccggattctatgccgtcagcttcctgtccgtggctgtggggtctacagtgtattaccagggaaaatgtctcacctggaaaggccccagacgccagcttccagctgttgttcctgctccactgccaccaccttgtggctcctctgctcacttgcttccaccagtgcctggcggacgcgccaagagaagcggatctggcgtgaagcagaccctgaatttcgacctgctgaagctggctggcgacgtggaatccaacccaggcccttctagaggccatatgaccgagtacaagcccacggtgcgcctcgccacccgcgacgacgtccccagggccgtacgcaccctcgccgccgcgttcgccgactaccccgccacgcgccacaccgtcgatccggaccgccacatcgagcgggtcaccgagctgcaagaactcttcctcacgcgcgtcgggctcgacatcggcaaggtgtgggtcgcggacgacggcgccgcggtggcggtctggaccacgccggagagcgtcgaagcgggggcggtgttcgccgagatcggcccgcgcatggccgagttgagcggttcccggctggccgcgcagcaacagatggaaggcctcctggcgccgcaccggcccaaggagcccgcgtggttcctggccaccgtcggcgtctcgcccgaccaccagggcaagggtctgggcagcgccgtcgtgctccccggagtggaggcggccgagcgcgccggggtgcccgccttcctggagacctccgcgccccgcaacctccccttctacgagcggctcggcttcaccgtcaccgccgacgtcgaggtgcccgaaggaccgcgcacctggtgcatgacccgcaagcccggtgcctga

SEQ ID NO: 19933 - DNA, 2994 bp, synthetic construct
  source 1..2994: mol_type = other DNA
atggccttaccagtgaccgccttgctcctgccgctggccttgctgctccacgccgccaggccggacatcgtgctgacacagagcccttctagcctgtctgccagcgtgggagatagagccaccatcagctgtagagccagcgagagcgtgacaatcctgggcagccacctgatctactggtatcagcagaagcccggacaggcccctagactgctgattcagctggcctccaatgtgcagactggcgtgccagccagattttctggcagcggctctggcaccgatttcaccctgacaatcagcagcgtggaacccgaggatgtggccgtgtactactgcctccagagccggacaatccccagaacctttggacagggcaccaaggtggaaatcaaactcgaggacctgaagaacgtgttcccacctgaggtggccgtgttcgagcctagcgaggccgagatcagccacacccagaaagccaccctcgtgtgcctggctaccggcttctaccccgaccatgtggaactgtcttggtgggtcaacggcaaagaggtgcacagcggcgtgtctaccgacccccagccactgaaagaacagcccgccctgaacgacagccggtactgcctgagcagcagactgagagtgtccgccaccttctggcagaacccccggaaccacttcagatgccaggtgcagttctacggcctgagcgagaacgacgagtggacccaggacagagccaagcccgtgacccagatcgtgtctgccgaagcctggggcagagccgattgcggatcccagagcttcggcctgctggaccccaagctgtgctacctgctggatggcatcctgttcatctacggcgtgatcctgaccgccctgttcctgagagtgaagttcagcagaagcgccgacgcccctgcctaccagcagggacagaaccaactgtacaacgagctgaacctgggcagacgggaagagtacgacgtgctggacaagcggagaggcagggaccctgagatgggcggaaagccccagcggagaaagaacccccaggaaggactgtataacgaactccagaaagacaagatggccgaagcctacagcgagatcggcatgaagggcgagcggagaagaggcaagggccacgatggcctgtaccagggcctgagcaccgccaccaaggacacctatgacgccctgcacatgcaggccctgcctccaagaagggccaagcgatctggatctggagcaacaaacttctcactactcaaacaagcaggtgacgtggaggagaatcccgggcctactagtatggactggatttggcgcatccttttccttgtcggcgctgctaccggcgcgcattccttcgaacagattcagctcgtgcagtctggccccgagctgaagaaacctggcggctctgtgaagatcagctgtgccgccagcggctacaccttcaccgactactctatcaactgggtccgacaggctcccggcaaaggactggaatgggtcggatggatcaacaccgagacaagagagcccgcctacgcctacgacttcagaggcagattcaccttcagcgccgacaccagcaagagcacagcctacctccagatgaacagcctgagagccgaggacaccgccgtgtattattgcgccctggactacagctacgctatggactattggggccagggcaccctggtcacagtctcttctacgcgtatccagaaccctgatcctgccgtgtaccagctgcgggatagcaagagcagcgacaagagcgtgtgtctgttcaccgacttcgacagccagaccaacgtgtcccagagcaaggactccgacgtgtacatcaccgataagaccgtgctggacatgcggagcatggacttcaagagcaactccgccgtggcctggtccaacaagtccgatttcgcctgcgccaacgccttcaacaacagcattatccccgaggacacattcttcccaagccccgagagcagctgcggtaccggcgacatcgagaacaccagtctggcccctgaggaccctacctttcctgccgatacctggggcacctacctgctgaccacagagacaggactccagaaagatcacgccctgtgggaccacacagcccagaacctgctgagaatgggcctcgcctttctggtgctggttgccctcgtgtggttcctggtggaagattggctgagccggaagcggacaagagagagagccagcagagcctctacctgggagggaagaagaaggctgaacacccagacacttagggccaagcgatctggatctggagcaacaaacttctcactactcaaacaagcaggtgacgtggaggagaatcccgggccttctagaggccatatgaccgagtacaagcccacggtgcgcctcgccacccgcgacgacgtccccagggccgtacgcaccctcgccgccgcgttcgccgactaccccgccacgcgccacaccgtcgatccggaccgccacatcgagcgggtcaccgagctgcaagaactcttcctcacgcgcgtcgggctcgacatcggcaaggtgtgggtcgcggacgacggcgccgcggtggcggtctggaccacgccggagagcgtcgaagcgggggcggtgttcgccgagatcggcccgcgcatggccgagttgagcggttcccggctggccgcgcagcaacagatggaaggcctcctggcgccgcaccggcccaaggagcccgcgtggttcctggccaccgtcggcgtctcgcccgaccaccagggcaagggtctgggcagcgccgtcgtgctccccggagtggaggcggccgagcgcgccggggtgcccgccttcctggagacctccgcgccccgcaacctccccttctacgagcggctcggcttcaccgtcaccgccgacgtcgaggtgcccgaaggaccgcgcacctggtgcatgacccgcaagcccggtgcctga

SEQ ID NO: 19934 - DNA, 3192 bp, synthetic construct
  source 1..3192: mol_type = other DNA
atggccttaccagtgaccgccttgctcctgccgctggccttgctgctccacgccgccaggccggacatcgtgctgacacagagcccttctagcctgtctgccagcgtgggagatagagccaccatcagctgtagagccagcgagagcgtgacaatcctgggcagccacctgatctactggtatcagcagaagcccggacaggcccctagactgctgattcagctggcctccaatgtgcagactggcgtgccagccagattttctggcagcggctctggcaccgatttcaccctgacaatcagcagcgtggaacccgaggatgtggccgtgtactactgcctccagagccggacaatccccagaacctttggacagggcaccaaggtggaaatcaaactcgaggacctgaagaacgtgttcccacctgaggtggccgtgttcgagcctagcgaggccgagatcagccacacccagaaagccaccctcgtgtgcctggctaccggcttctaccccgaccatgtggaactgtcttggtgggtcaacggcaaagaggtgcacagcggcgtgtctaccgacccccagccactgaaagaacagcccgccctgaacgacagccggtactgcctgagcagcagactgagagtgtccgccaccttctggcagaacccccggaaccacttcagatgccaggtgcagttctacggcctgagcgagaacgacgagtggacccaggacagagccaagcccgtgacccagatcgtgtctgccgaagcctggggcagagccgattgcggatcccagagcttcggcctgctggaccccaagctgtgctacctgctggatggcatcctgttcatctacggcgtgatcctgaccgccctgttcctgagagtgaagttcagcagaagcgccgacgcccctgcctaccagcagggacagaaccaactgtacaacgagctgaacctgggcagacgggaagagtacgacgtgctggacaagcggagaggcagggaccctgagatgggcggaaagccccagcggagaaagaacccccaggaaggactgtataacgaactccagaaagacaagatggccgaagcctacagcgagatcggcatgaagggcgagcggagaagaggcaagggccacgatggcctgtaccagggcctgagcaccgccaccaaggacacctatgacgccctgcacatgcaggccctgcctccaagaagggccaagcgatctggatctggagcaacaaacttctcactactcaaacaagcaggtgacgtggaggagaatcccgggcctactagtatggactggatttggcgcatccttttccttgtcggcgctgctaccggcgcgcattccttcgaacagattcagctcgtgcagtctggccccgagctgaagaaacctggcggctctgtgaagatcagctgtgccgccagcggctacaccttcaccgactactctatcaactgggtccgacaggctcccggcaaaggactggaatgggtcggatggatcaacaccgagacaagagagcccgcctacgcctacgacttcagaggcagattcaccttcagcgccgacaccagcaagagcacagcctacctccagatgaacagcctgagagccgaggacaccgccgtgtattattgcgccctggactacagctacgctatggactattggggccagggcaccctggtcacagtctcttctacgcgtatccagaaccctgatcctgccgtgtaccagctgcgggatagcaagagcagcgacaagagcgtgtgtctgttcaccgacttcgacagccagaccaacgtgtcccagagcaaggactccgacgtgtacatcaccgataagaccgtgctggacatgcggagcatggacttcaagagcaactccgccgtggcctggtccaacaagtccgatttcgcctgcgccaacgccttcaacaacagcattatccccgaggacacattcttcccaagccccgagagcagctgcggtaccaagtctgtgcgcttttacctggtcgtcagccctgccagtgcctccactcagacatcttggaccccaagggaccttgtgtcctctcagacacagacacagtcctgcgtgccaccaactgctggcgcaagacaggctccagagtctcccagcacaatccccgtcccttctcagccccagaactccacacttaggccaggaccagctgctccaatcgcactggtcccagtgttctgcggactgctggttgccaagtctctggtgctgagcgcactcctcgtttggtggggcgatatttggtggaaaacgatgatggaattgagatccctcgatacgcagaaagccacatgccaccttcagcaagtcacagacttgccttggaccagcgtcagctctcccgtggaacgggaaattctgtatcatacagtggcccgcaccaagatttccgacgatgacgacgagcacacactgcgcgccaagagaagcggatctggcgtgaagcagaccctgaatttcgacctgctgaagctggctggcgacgtggaatccaacccaggcccttctagaggccatatgaccgagtacaagcccacggtgcgcctcgccacccgcgacgacgtccccagggccgtacgcaccctcgccgccgcgttcgccgactaccccgccacgcgccacaccgtcgatccggaccgccacatcgagcgggtcaccgagctgcaagaactcttcctcacgcgcgtcgggctcgacatcggcaaggtgtgggtcgcggacgacggcgccgcggtggcggtctggaccacgccggagagcgtcgaagcgggggcggtgttcgccgagatcggcccgcgcatggccgagttgagcggttcccggctggccgcgcagcaacagatggaaggcctcctggcgccgcaccggcccaaggagcccgcgtggttcctggccaccgtcggcgtctcgcccgaccaccagggcaagggtctgggcagcgccgtcgtgctccccggagtggaggcggccgagcgcgccggggtgcccgccttcctggagacctccgcgccccgcaacctccccttctacgagcggctcggcttcaccgtcaccgccgacgtcgaggtgcccgaaggaccgcgcacctggtgcatgacccgcaagcccggtgcctga

SEQ ID NO: 19935 - DNA, 2952 bp, synthetic construct
  source 1..2952: mol_type = other DNA
atggccttaccagtgaccgccttgctcctgccgctggccttgctgctccacgccgccaggccggacatcgtgctgacacagagcccttctagcctgtctgccagcgtgggagatagagccaccatcagctgtagagccagcgagagcgtgacaatcctgggcagccacctgatctactggtatcagcagaagcccggacaggcccctagactgctgattcagctggcctccaatgtgcagactggcgtgccagccagattttctggcagcggctctggcaccgatttcaccctgacaatcagcagcgtggaacccgaggatgtggccgtgtactactgcctccagagccggacaatccccagaacctttggacagggcaccaaggtggaaatcaaactcgaggacctgaagaacgtgttcccacctgaggtggccgtgttcgagcctagcgaggccgagatcagccacacccagaaagccaccctcgtgtgcctggctaccggcttctaccccgaccatgtggaactgtcttggtgggtcaacggcaaagaggtgcacagcggcgtgtctaccgacccccagccactgaaagaacagcccgccctgaacgacagccggtactgcctgagcagcagactgagagtgtccgccaccttctggcagaacccccggaaccacttcagatgccaggtgcagttctacggcctgagcgagaacgacgagtggacccaggacagagccaagcccgtgacccagatcgtgtctgccgaagcctggggcagagccgattgcggatcccagagcttcggcctgctggaccccaagctgtgctacctgctggatggcatcctgttcatctacggcgtgatcctgaccgccctgttcctgagagtgaagttcagcagaagcgccgacgcccctgcctaccagcagggacagaaccaactgtacaacgagctgaacctgggcagacgggaagagtacgacgtgctggacaagcggagaggcagggaccctgagatgggcggaaagccccagcggagaaagaacccccaggaaggactgtataacgaactccagaaagacaagatggccgaagcctacagcgagatcggcatgaagggcgagcggagaagaggcaagggccacgatggcctgtaccagggcctgagcaccgccaccaaggacacctatgacgccctgcacatgcaggccctgcctccaagaagggccaagcgatctggatctggagcaacaaacttctcactactcaaacaagcaggtgacgtggaggagaatcccgggcctactagtatggactggatttggcgcatccttttccttgtcggcgctgctaccggcgcgcattccttcgaacagattcagctcgtgcagtctggccccgagctgaagaaacctggcggctctgtgaagatcagctgtgccgccagcggctacaccttcaccgactactctatcaactgggtccgacaggctcccggcaaaggactggaatgggtcggatggatcaacaccgagacaagagagcccgcctacgcctacgacttcagaggcagattcaccttcagcgccgacaccagcaagagcacagcctacctccagatgaacagcctgagagccgaggacaccgccgtgtattattgcgccctggactacagctacgctatggactattggggccagggcaccctggtcacagtctcttctacgcgtatccagaaccctgatcctgccgtgtaccagctgcgggatagcaagagcagcgacaagagcgtgtgtctgttcaccgacttcgacagccagaccaacgtgtcccagagcaaggactccgacgtgtacatcaccgataagaccgtgctggacatgcggagcatggacttcaagagcaactccgccgtggcctggtccaacaagtccgatttcgcctgcgccaacgccttcaacaacagcattatccccgaggacacattcttcccaagccccgagagcagctgcggtaccgtggtcgagaaagaacatccacagcttggcgctggcaccgtcctgttgcttagagccggattctatgccgtcagcttcctgtccgtggctgtggggtctacagtgtattaccagggaaaatgtctcacctggaaaggccccagacgccagcttccagctgttgttcctgctccactgccaccaccttgtggctcctctgctcacttgcttccaccagtgcctggcggacgcgccaagagaagcggatctggcgtgaagcagaccctgaatttcgacctgctgaagctggctggcgacgtggaatccaacccaggcccttctagaggccatatgaccgagtacaagcccacggtgcgcctcgccacccgcgacgacgtccccagggccgtacgcaccctcgccgccgcgttcgccgactaccccgccacgcgccacaccgtcgatccggaccgccacatcgagcgggtcaccgagctgcaagaactcttcctcacgcgcgtcgggctcgacatcggcaaggtgtgggtcgcggacgacggcgccgcggtggcggtctggaccacgccggagagcgtcgaagcgggggcggtgttcgccgagatcggcccgcgcatggccgagttgagcggttcccggctggccgcgcagcaacagatggaaggcctcctggcgccgcaccggcccaaggagcccgcgtggttcctggccaccgtcggcgtctcgcccgaccaccagggcaagggtctgggcagcgccgtcgtgctccccggagtggaggcggccgagcgcgccggggtgcccgccttcctggagacctccgcgccccgcaacctccccttctacgagcggctcggcttcaccgtcaccgccgacgtcgaggtgcccgaaggaccgcgcacctggtgcatgacccgcaagcccggtgcctga

SEQ ID NO: 19936 - DNA, 2865 bp, synthetic construct
  source 1..2865: mol_type = other DNA
atggccttaccagtgaccgccttgctcctgccgctggccttgctgctccacgccgccaggccggacatcgtgctgacacagagcccttctagcctgtctgccagcgtgggagatagagccaccatcagctgtagagccagcgagagcgtgacaatcctgggcagccacctgatctactggtatcagcagaagcccggacaggcccctagactgctgattcagctggcctccaatgtgcagactggcgtgccagccagattttctggcagcggctctggcaccgatttcaccctgacaatcagcagcgtggaacccgaggatgtggccgtgtactactgcctccagagccggacaatccccagaacctttggacagggcaccaaggtggaaatcaaactcgagggacagcctaaggccaatcctaccgtgacactgttccctccaagcagcgaagaactccaggccaacaaggccacacttgtgtgcctgatctccgacttctaccctggggctgtgacagtggcttggaaggccgatggatctcctgtgaaagccggcgtggaaaccaccaagccatccaagcagagcaacaacaaatacgccgccagctcctacctgagcctgacacctgagcagtggaagtcccacagatcctacagctgccaagtgacccacgaaggcagcaccgtggaaaagacagtggcccctacagagtgcagcggatcccagagcttcggcctgctggaccccaagctgtgctacctgctggatggcatcctgttcatctacggcgtgatcctgaccgccctgttcctgagagtgaagttcagcagaagcgccgacgcccctgcctaccagcagggacagaaccaactgtacaacgagctgaacctgggcagacgggaagagtacgacgtgctggacaagcggagaggcagggaccctgagatgggcggaaagccccagcggagaaagaacccccaggaaggactgtataacgaactccagaaagacaagatggccgaagcctacagcgagatcggcatgaagggcgagcggagaagaggcaagggccacgatggcctgtaccagggcctgagcaccgccaccaaggacacctatgacgccctgcacatgcaggccctgcctccaagaagggccaagcgatctggatctggagcaacaaacttctcactactcaaacaagcaggtgacgtggaggagaatcccgggcctactagtatggactggatttggcgcatccttttccttgtcggcgctgctaccggcgcgcattccttcgaacagattcagctcgtgcagtctggccccgagctgaagaaacctggcggctctgtgaagatcagctgtgccgccagcggctacaccttcaccgactactctatcaactgggtccgacaggctcccggcaaaggactggaatgggtcggatggatcaacaccgagacaagagagcccgcctacgcctacgacttcagaggcagattcaccttcagcgccgacaccagcaagagcacagcctacctccagatgaacagcctgagagccgaggacaccgccgtgtattattgcgccctggactacagctacgctatggactattggggccagggcaccctggtcacagtctcttctacgcgtgcctctacaaagggaccctccgtgtttcctctggctcccagcagcaagtctacaagcggaggaacagccgctctgggctgcctggtcaaggattactttcccgagcctgtgaccgtgtcctggaatagcggagcactgacaagcggcgtgcacacctttccagccgtgctgcaaagcagcggcctgtactctctgagcagcgtggtcacagtgcctagctctagcctgggcacccagacctacatctgcaatgtgaaccacaagcctagcaacaccaaggtggacaagagagtggaacccaagagctgtggtaccatcactcaaggtttggcagtgtcaaccatctcatcattctttccacctggctaccaagtgtccttctgcctggtcatggtgctgctgttcgccgtggataccggcctgtacttcagcgtcaagaccaacatccggtccagcaccagagactggaaggaccacaagttcaagtggcggaaggaccctcaggacaagagggccaagcgatctggatctggagcaacaaacttctcactactcaaacaagcaggtgacgtggaggagaatcccgggccttctagaggccatatgaccgagtacaagcccacggtgcgcctcgccacccgcgacgacgtccccagggccgtacgcaccctcgccgccgcgttcgccgactaccccgccacgcgccacaccgtcgatccggaccgccacatcgagcgggtcaccgagctgcaagaactcttcctcacgcgcgtcgggctcgacatcggcaaggtgtgggtcgcggacgacggcgccgcggtggcggtctggaccacgccggagagcgtcgaagcgggggcggtgttcgccgagatcggcccgcgcatggccgagttgagcggttcccggctggccgcgcagcaacagatggaaggcctcctggcgccgcaccggcccaaggagcccgcgtggttcctggccaccgtcggcgtctcgcccgaccaccagggcaagggtctgggcagcgccgtcgtgctccccggagtggaggcggccgagcgcgccggggtgcccgccttcctggagacctccgcgccccgcaacctccccttctacgagcggctcggcttcaccgtcaccgccgacgtcgaggtgcccgaaggaccgcgcacctggtgcatgacccgcaagcccggtgcctga

SEQ ID NO: 19937 - DNA, 2910 bp, synthetic construct
  source 1..2910: mol_type = other DNA
atggccttaccagtgaccgccttgctcctgccgctggccttgctgctccacgccgccaggccggacatcgtgctgacacagagcccttctagcctgtctgccagcgtgggagatagagccaccatcagctgtagagccagcgagagcgtgacaatcctgggcagccacctgatctactggtatcagcagaagcccggacaggcccctagactgctgattcagctggcctccaatgtgcagactggcgtgccagccagattttctggcagcggctctggcaccgatttcaccctgacaatcagcagcgtggaacccgaggatgtggccgtgtactactgcctccagagccggacaatccccagaacctttggacagggcaccaaggtggaaatcaaactcgaggacctgaagaacgtgttcccacctgaggtggccgtgttcgagcctagcgaggccgagatcagccacacccagaaagccaccctcgtgtgcctggctaccggcttctaccccgaccatgtggaactgtcttggtgggtcaacggcaaagaggtgcacagcggcgtgtctaccgacccccagccactgaaagaacagcccgccctgaacgacagccggtactgcctgagcagcagactgagagtgtccgccaccttctggcagaacccccggaaccacttcagatgccaggtgcagttctacggcctgagcgagaacgacgagtggacccaggacagagccaagcccgtgacccagatcgtgtctgccgaagcctggggcagagccgattgcggatcccagagcttcggcctgctggaccccaagctgtgctacctgctggatggcatcctgttcatctacggcgtgatcctgaccgccctgttcctgagagtgaagttcagcagaagcgccgacgcccctgcctaccagcagggacagaaccaactgtacaacgagctgaacctgggcagacgggaagagtacgacgtgctggacaagcggagaggcagggaccctgagatgggcggaaagccccagcggagaaagaacccccaggaaggactgtataacgaactccagaaagacaagatggccgaagcctacagcgagatcggcatgaagggcgagcggagaagaggcaagggccacgatggcctgtaccagggcctgagcaccgccaccaaggacacctatgacgccctgcacatgcaggccctgcctccaagaagggccaagcgatctggatctggagcaacaaacttctcactactcaaacaagcaggtgacgtggaggagaatcccgggcctactagtatggactggatttggcgcatccttttccttgtcggcgctgctaccggcgcgcattccttcgaacagattcagctcgtgcagtctggccccgagctgaagaaacctggcggctctgtgaagatcagctgtgccgccagcggctacaccttcaccgactactctatcaactgggtccgacaggctcccggcaaaggactggaatgggtcggatggatcaacaccgagacaagagagcccgcctacgcctacgacttcagaggcagattcaccttcagcgccgacaccagcaagagcacagcctacctccagatgaacagcctgagagccgaggacaccgccgtgtattattgcgccctggactacagctacgctatggactattggggccagggcaccctggtcacagtctcttctacgcgtatccagaaccctgatcctgccgtgtaccagctgcgggatagcaagagcagcgacaagagcgtgtgtctgttcaccgacttcgacagccagaccaacgtgtcccagagcaaggactccgacgtgtacatcaccgataagaccgtgctggacatgcggagcatggacttcaagagcaactccgccgtggcctggtccaacaagtccgatttcgcctgcgccaacgccttcaacaacagcattatccccgaggacacattcttcccaagccccgagagcagctgcggtaccatcactcaaggtttggcagtgtcaaccatctcatcattctttccacctggctaccaagtgtccttctgcctggtcatggtgctgctgttcgccgtggataccggcctgtacttcagcgtcaagaccaacatccggtccagcaccagagactggaaggaccacaagttcaagtggcggaaggaccctcaggacaagagggccaagcgatctggatctggagcaacaaacttctcactactcaaacaagcaggtgacgtggaggagaatcccgggccttctagaggccatatgaccgagtacaagcccacggtgcgcctcgccacccgcgacgacgtccccagggccgtacgcaccctcgccgccgcgttcgccgactaccccgccacgcgccacaccgtcgatccggaccgccacatcgagcgggtcaccgagctgcaagaactcttcctcacgcgcgtcgggctcgacatcggcaaggtgtgggtcgcggacgacggcgccgcggtggcggtctggaccacgccggagagcgtcgaagcgggggcggtgttcgccgagatcggcccgcgcatggccgagttgagcggttcccggctggccgcgcagcaacagatggaaggcctcctggcgccgcaccggcccaaggagcccgcgtggttcctggccaccgtcggcgtctcgcccgaccaccagggcaagggtctgggcagcgccgtcgtgctccccggagtggaggcggccgagcgcgccggggtgcccgccttcctggagacctccgcgccccgcaacctccccttctacgagcggctcggcttcaccgtcaccgccgacgtcgaggtgcccgaaggaccgcgcacctggtgcatgacccgcaagcccggtgcctga

SEQ ID NO: 19938 - DNA, 1959 bp, synthetic construct
  source 1..1959: mol_type = other DNA
atggccttaccagtgaccgccttgctcctgccgctggccttgctgctccacgccgccaggccggacatcgtgctgacacagagcccttctagcctgtctgccagcgtgggagatagagccaccatcagctgtagagccagcgagagcgtgacaatcctgggcagccacctgatctactggtatcagcagaagcccggacaggcccctagactgctgattcagctggcctccaatgtgcagactggcgtgccagccagattttctggcagcggctctggcaccgatttcaccctgacaatcagcagcgtggaacccgaggatgtggccgtgtactactgcctccagagccggacaatccccagaacctttggacagggcaccaaggtggaaatcaaactcgagggacagcctaaggccaatcctaccgtgacactgttccctccaagcagcgaagaactccaggccaacaaggccacacttgtgtgcctgatctccgacttctaccctggggctgtgacagtggcttggaaggccgatggatctcctgtgaaagccggcgtggaaaccaccaagccatccaagcagagcaacaacaaatacgccgccagctcctacctgagcctgacacctgagcagtggaagtcccacagatcctacagctgccaagtgacccacgaaggcagcaccgtggaaaagacagtggcccctacagagtgcagcggatccctgggagagcctcagctgtgctatatcctggacgccatcctgtttctgtacggcatcgtgctgaccctgctgtactgccggctgaagatccaagtgcggaaggccgccatcaccagctacgagaaatccgacggcgtgtacaccggcctgagcaccagaaatcaagagacatacgagacactgaagcacgaaaagcctccacaaagggccaagcgatctggatctggagcaacaaacttctcactactcaaacaagcaggtgacgtggaggagaatcccgggcctactagtatggactggatttggcgcatccttttccttgtcggcgctgctaccggcgcgcattccttcgaacagattcagctcgtgcagtctggccccgagctgaagaaacctggcggctctgtgaagatcagctgtgccgccagcggctacaccttcaccgactactctatcaactgggtccgacaggctcccggcaaaggactggaatgggtcggatggatcaacaccgagacaagagagcccgcctacgcctacgacttcagaggcagattcaccttcagcgccgacaccagcaagagcacagcctacctccagatgaacagcctgagagccgaggacaccgccgtgtattattgcgccctggactacagctacgctatggactattggggccagggcaccctggtcacagtctcttctacgcgtgcctctacaaagggaccctccgtgtttcctctggctcccagcagcaagtctacaagcggaggaacagccgctctgggctgcctggtcaaggattactttcccgagcctgtgaccgtgtcctggaatagcggagcactgacaagcggcgtgcacacctttccagccgtgctgcaaagcagcggcctgtactctctgagcagcgtggtcacagtgcctagctctagcctgggcacccagacctacatctgcaatgtgaaccacaagcctagcaacaccaaggtggacaagagagtggaacccaagagctgtggtaccctcggagaaccacagctctgttacattctggatgctatcctgttcctctatgggatcgtcctgacactcctgtattgcagactcaaaattcaagttcgcaaagccgccattacctcttacgagaagagtgatggggtgtacacaggactgtctacccggaatcaagaaacctacgaaaccctcaaacatgagaagccacctcagtaa

SEQ ID NO: 19939 - DNA, 3090 bp, synthetic construct
  source 1..3090: mol_type = other DNA
atggccttaccagtgaccgccttgctcctgccgctggccttgctgctccacgccgccaggccggacatcgtgctgacacagagcccttctagcctgtctgccagcgtgggagatagagccaccatcagctgtagagccagcgagagcgtgacaatcctgggcagccacctgatctactggtatcagcagaagcccggacaggcccctagactgctgattcagctggcctccaatgtgcagactggcgtgccagccagattttctggcagcggctctggcaccgatttcaccctgacaatcagcagcgtggaacccgaggatgtggccgtgtactactgcctccagagccggacaatccccagaacctttggacagggcaccaaggtggaaatcaaaggacagcctaaggccaatcctaccgtgacactgttccctccaagcagcgaagaactccaggccaacaaggccacacttgtgtgcctgatctccgacttctaccctggggctgtgacagtggcttggaaggccgatggatctcctgtgaaagccggcgtggaaaccaccaagccatccaagcagagcaacaacaaatacgccgccagctcctacctgagcctgacacctgagcagtggaagtcccacagatcctacagctgccaagtgacccacgaaggcagcaccgtggaaaagacagtggcccctacagagtgcagcggatcccagagcttcggcctgctggaccccaagctgtgctacctgctggatggcatcctgttcatctacggcgtgatcctgaccgccctgttcctgagagtgaagttcagcagaagcgccgacgcccctgcctaccagcagggacagaaccaactgtacaacgagctgaacctgggcagacgggaagagtacgacgtgctggacaagcggagaggcagggaccctgagatgggcggaaagccccggagaaagaacccccaggaaggactgtataacgaactccagaaagacaagatggccgaagcctacagcgagatcggcatgaagggcgagcggagaagaggcaagggccacgatggcctgtaccagggcctgagcaccgccaccaaggacacctatgacgccctgcacatgcaggccctgcctccaagaagggccaagcgatctggatctggagcaacaaacttctcactactcaaacaagcaggtgacgtggaggagaatcccgggcctactagtatggactggatttggcgcatccttttccttgtcggcgctgctaccggcgcgcattccttcgaacagattcagctcgtgcagtctggccccgagctgaagaaacctggcggctctgtgaagatcagctgtgccgccagcggctacaccttcaccgactactctatcaactgggtccgacaggctcccggcaaaggactggaatgggtcggatggatcaacaccgagacaagagagcccgcctacgcctacgacttcagaggcagattcaccttcagcgccgacaccagcaagagcacagcctacctccagatgaacagcctgagagccgaggacaccgccgtgtattattgcgccctggactacagctacgctatggactattggggccagggcaccctggtcacagtctcttctgcctctacaaagggaccctccgtgtttcctctggctcccagcagcaagtctacaagcggaggaacagccgctctgggctgcctggtcaaggattactttcccgagcctgtgaccgtgtcctggaatagcggagcactgacaagcggcgtgcacacctttccagccgtgctgcaaagcagcggcctgtactctctgagcagcgtggtcacagtgcctagctctagcctgggcacccagacctacatctgcaatgtgaaccacaagcctagcaacaccaaggtggacaagagagtggaacccaagagctgtggtacccagagttttgggttgttggaccctaaattgtgctatctgttggacggaatcctgttcatttacggagtgatcctgaccgcattgttcctgcgggttaagttttccagatccgcagacgcacccgcttaccaacaagggcagaaccaactctacaatgaacttaatttggggcggagggaagagtacgacgttctggacaaaaggaggggacgagatcccgagatgggcggaaagcctcgaaggaagaatccgcaagaggggctttataacgaactccagaaagataaaatggcagaagcctatagtgagattgggatgaagggagaaaggaggaggggtaaaggtcacgatgggttgtaccaaggattgagcacagccactaaagatacctatgatgcgctccacatgcaggccctgccgccaagacgcgccaagagaagcggatctggcgtgaagcagaccctgaatttcgacctgctgaagctggctggcgacgtggaatccaacccaggcccttctagaggccatatgaccgagtacaagcccacggtgcgcctcgccacccgcgacgacgtccccagggccgtacgcaccctcgccgccgcgttcgccgactaccccgccacgcgccacaccgtcgatccggaccgccacatcgagcgggtcaccgagctgcaagaactcttcctcacgcgcgtcgggctcgacatcggcaaggtgtgggtcgcggacgacggcgccgcggtggcggtctggaccacgccggagagcgtcgaagcgggggcggtgttcgccgagatcggcccgcgcatggccgagttgagcggttcccggctggccgcgcagcaacagatggaaggcctcctggcgccgcaccggcccaaggagcccgcgtggttcctggccaccgtcggcgtctcgcccgaccaccagggcaagggtctgggcagcgccgtcgtgctccccggagtggaggcggccgagcgcgccggggtgcccgccttcctggagacctccgcgccccgcaacctccccttctacgagcggctcggcttcaccgtcaccgccgacgtcgaggtgcccgaaggaccgcgcacctggtgcatgacccgcaagcccggtgcctga

SEQ ID NO: 19940 - DNA, 2445 bp, synthetic construct
  source 1..2445: mol_type = other DNA
atggccttaccagtgaccgccttgctcctgccgctggccttgctgctccacgccgccaggccggacatcgtgctgacacagagcccttctagcctgtctgccagcgtgggagatagagccaccatcagctgtagagccagcgagagcgtgacaatcctgggcagccacctgatctactggtatcagcagaagcccggacaggcccctagactgctgattcagctggcctccaatgtgcagactggcgtgccagccagattttctggcagcggctctggcaccgatttcaccctgacaatcagcagcgtggaacccgaggatgtggccgtgtactactgcctccagagccggacaatccccagaacctttggacagggcaccaaggtggaaatcaaactcgaggacctgaagaacgtgttcccacctgaggtggccgtgttcgagcctagcgaggccgagatcagccacacccagaaagccaccctcgtgtgcctggctaccggcttctaccccgaccatgtggaactgtcttggtgggtcaacggcaaagaggtgcacagcggcgtgtctaccgacccccagccactgaaagaacagcccgccctgaacgacagccggtactgcctgagcagcagactgagagtgtccgccaccttctggcagaacccccggaaccacttcagatgccaggtgcagttctacggcctgagcgagaacgacgagtggacccaggacagagccaagcccgtgacccagatcgtgtctgccgaagcctggggcagagccgattgcggatcccagagcttcggcctgctggaccccaagctgtgctacctgctggatggcatcctgttcatctacggcgtgatcctgaccgccctgttcctgagagtgaagttcagcagaagcgccgacgcccctgcctaccagcagggacagaaccaactgtacaacgagctgaacctgggcagacgggaagagtacgacgtgctggacaagcggagaggcagggaccctgagatgggcggaaagccccggagaaagaacccccaggaaggactgtataacgaactccagaaagacaagatggccgaagcctacagcgagatcggcatgaagggcgagcggagaagaggcaagggccacgatggcctgtaccagggcctgagcaccgccaccaaggacacctatgacgccctgcacatgcaggccctgcctccaagaagggccaagcgatctggatctggagcaacaaacttctcactactcaaacaagcaggtgacgtggaggagaatcccgggcctactagtatggactggatttggcgcatccttttccttgtcggcgctgctaccggcgcgcattccttcgaacagattcagctcgtgcagtctggccccgagctgaagaaacctggcggctctgtgaagatcagctgtgccgccagcggctacaccttcaccgactactctatcaactgggtccgacaggctcccggcaaaggactggaatgggtcggatggatcaacaccgagacaagagagcccgcctacgcctacgacttcagaggcagattcaccttcagcgccgacaccagcaagagcacagcctacctccagatgaacagcctgagagccgaggacaccgccgtgtattattgcgccctggactacagctacgctatggactattggggccagggcaccctggtcacagtctcttctacgcgtatccagaaccctgatcctgccgtgtaccagctgcgggatagcaagagcagcgacaagagcgtgtgtctgttcaccgacttcgacagccagaccaacgtgtcccagagcaaggactccgacgtgtacatcaccgataagaccgtgctggacatgcggagcatggacttcaagagcaactccgccgtggcctggtccaacaagtccgatttcgcctgcgccaacgccttcaacaacagcattatccccgaggacacattcttcccaagccccgagagcagctgcggtacccagagttttgggttgttggaccctaaattgtgctatctgttggacggaatcctgttcatttacggagtgatcctgaccgcattgttcctgcgggttaagttttccagatccgcagacgcacccgcttaccaacaagggcagaaccaactctacaatgaacttaatttggggcggagggaagagtacgacgttctggacaaaaggaggggacgagatcccgagatgggcggaaagcctcgaaggaagaatccgcaagaggggctttataacgaactccagaaagataaaatggcagaagcctatagtgagattgggatgaagggagaaaggaggaggggtaaaggtcacgatgggttgtaccaaggattgagcacagccactaaagatacctatgatgcgctccacatgcaggccctgccgccaaga

SEQ ID NO: 19941 - DNA, 1488 bp, synthetic construct
  source 1..1488: mol_type = other DNA
atggccttaccagtgaccgccttgctcctgccgctggccttgctgctccacgccgccaggccggaaatcgtgctgacacagagccccggcacactgtcactttctccaggcgaaggcgctaccctgtcttgtagagctggacagtctgtgcggagcagctacctcggatggtatcagcagaagcctggacaggcccctcggctgttgatctacggtgcttctagcagagccacaggcatccccgatagattttctggcagcggctccggcaccgacttcaccctgacaatcagcagactggaacccgaggacttcgccgtgtattactgccagcagtacggctacagccctcctacatttggcggaggcaccaagctggaaatcaagggcggaggcggaagtggaggcggaggatctggcggcggaggctctgaggttcagctgcttgagtctggcggaggactggttcaacctggcggaagcctgagactgtcttgtgccgccagcggcttcacctttagcagctacgccatgagctgggtccgacaggctcctggcaaaggactggaatgggtgtccgtgatctctggctctggcggcagacccaattacgccgattctgtgaagggcagattcaccatcagccgggacaacagcaagaacaccctgtacctccagatgaacagcctgcgcgacgaggataccgccgtgtactattgtgccaaggtggactacagcaactacctgttcttcgactactggggccagggcaccctggtcacagtttctagcacgcgtgagcagaaactgatctcggaagaggatctgaaaattgaagttatgtatcctcctccttacctagacaatgagaagagcaatggaaccattatccatgtgaaagggaaacacctttgtccaagtcccctatttcccggaccttctaagcccttttgggtgctggtggtggttgggggagtcctggcttgctatagcttgctagtaacagtggcctttattattttctgggtgaggagtaagaggagcaggctcctgcacagtgactacatgaacatgactccacgccgccccggacccacccgcaagcattaccagccctatgccccaccacgcgacttcgcagcctatcgctccagagtgaagttcagcaggagcgcagacgcccccgcgtaccagcagggccagaaccagctctataacgagctcaatctaggacgaagagaggagtacgatgttttggacaagagacgtggccgggaccctgagatggggggaaagccgagaaggaagaaccctcaggaaggcctgtacaatgaactgcagaaagataagatggcggaggcctacagtgagattgggatgaaaggcgagcgccggaggggcaaggggcacgatggcctttaccagggtctcagtacagccaccaaggacacctacgacgcccttcacatgcaggccctgccccctcgc

SEQ ID NO: 19942 - DNA, 1509 bp, synthetic construct
  source 1..1509: mol_type = other DNA
atggccttaccagtgaccgccttgctcctgccgctggccttgctgctccacgccgccaggccggaaatcgtgctgacacagagccccggcacactgtcactttctccaggcgaaggcgctaccctgtcttgtagagctggacagtctgtgcggagcagctacctcggatggtatcagcagaagcctggacaggcccctcggctgttgatctacggtgcttctagcagagccacaggcatccccgatagattttctggcagcggctccggcaccgacttcaccctgacaatcagcagactggaacccgaggacttcgccgtgtattactgccagcagtacggctacagccctcctacatttggcggaggcaccaagctggaaatcaagggcggaggcggaagtggaggcggaggatctggcggcggaggctctgaggttcagctgcttgagtctggcggaggactggttcaacctggcggaagcctgagactgtcttgtgccgccagcggcttcacctttagcagctacgccatgagctgggtccgacaggctcctggcaaaggactggaatgggtgtccgtgatctctggctctggcggcagacccaattacgccgattctgtgaagggcagattcaccatcagccgggacaacagcaagaacaccctgtacctccagatgaacagcctgcgcgacgaggataccgccgtgtactattgtgccaaggtggactacagcaactacctgttcttcgactactggggccagggcaccctggtcacagtttctagcacgcgtgagcagaaactgatctcggaagaggatctggcgaagcccaccacgacgccagcgccgcgaccaccaacaccggcgcccaccatcgcgtcgcagcccctgtccctgcgcccagaggcgtgccggccagcggcggggggcgcagtgcacacgagggggctggacttcgcctgtgacatctacatctgggcgcccttggccgggacttgtggggtccttctcctgtcactggttatcaccctttactgcaaacggggcagaaagaaactcctgtatatattcaaacaaccatttatgagaccagtacaaactactcaagaggaagatggctgtagctgccgatttccagaagaagaagaaggaggatgtgaactgagagtgaagttcagcaggagcgcagacgcccccgcgtaccagcagggccagaaccagctctataacgagctgaatctaggacgaagagaggagtacgatgttttggacaagagacgtggccgggaccctgagatggggggaaagccgagaaggaagaaccctcaggaaggcctgtacaatgaactgcagaaagataagatggcggaggcctacagtgagattgggatgaaaggcgagcgccggaggggcaaggggcacgatggcctttaccagggtctcagtacagccaccaaggacacctacgacgcccttcacatgcaggccctgccccctcgctga

SEQ ID NO: 19943 - DNA, 1509 bp, synthetic construct
  source 1..1509: mol_type = other DNA
atggccttaccagtgaccgccttgctcctgccgctggccttgctgctccacgccgccaggccggaggttcagctgcttgagtctggcggaggactggttcaacctggcggaagcctgagactgtcttgtgccgccagcggcttcacctttagcagctacgccatgagctgggtccgacaggctcctggcaaaggactggaatgggtgtccgtgatctctggctctggcggcagacccaattacgccgattctgtgaagggcagattcaccatcagccgggacaacagcaagaacaccctgtacctccagatgaacagcctgcgcgacgaggataccgccgtgtactattgtgccaaggtggactacagcaactacctgttcttcgactactggggccagggcaccctggtcacagtttctagcggcggaggcggaagtggaggcggaggatctggcggcggaggctctgaaatcgtgctgacacagagccccggcacactgtcactttctccaggcgaaggcgctaccctgtcttgtagagctggacagtctgtgcggagcagctacctcggatggtatcagcagaagcctggacaggcccctcggctgttgatctacggtgcttctagcagagccacaggcatccccgatagattttctggcagcggctccggcaccgacttcaccctgacaatcagcagactggaacccgaggacttcgccgtgtattactgccagcagtacggctacagccctcctacatttggcggaggcaccaagctggaaatcaagacgcgtgagcagaaactgatctcggaagaggatctggcgaagcccaccacgacgccagcgccgcgaccaccaacaccggcgcccaccatcgcgtcgcagcccctgtccctgcgcccagaggcgtgccggccagcggcggggggcgcagtgcacacgagggggctggacttcgcctgtgacatctacatctgggcgcccttggccgggacttgtggggtccttctcctgtcactggttatcaccctttactgcaaacggggcagaaagaaactcctgtatatattcaaacaaccatttatgagaccagtacaaactactcaagaggaagatggctgtagctgccgatttccagaagaagaagaaggaggatgtgaactgagagtgaagttcagcaggagcgcagacgcccccgcgtaccagcagggccagaaccagctctataacgagctgaatctaggacgaagagaggagtacgatgttttggacaagagacgtggccgggaccctgagatggggggaaagccgagaaggaagaaccctcaggaaggcctgtacaatgaactgcagaaagataagatggcggaggcctacagtgagattgggatgaaaggcgagcgccggaggggcaaggggcacgatggcctttaccagggtctcagtacagccaccaaggacacctacgacgcccttcacatgcaggccctgccccctcgctga

SEQ ID NO: 19944 - DNA, 2748 bp, synthetic construct
  source 1..2748: mol_type = other DNA
atggccttaccagtgaccgccttgctcctgccgctggccttgctgctccacgccgccaggccggaaatcgtgctgacacagagccccggcacactgtcactttctccaggcgaaggcgctaccctgtcttgtagagctggacagtctgtgcggagcagctacctcggatggtatcagcagaagcctggacaggcccctcggctgttgatctacggtgcttctagcagagccacaggcatccccgatagattttctggcagcggctccggcaccgacttcaccctgacaatcagcagactggaacccgaggacttcgccgtgtattactgccagcagtacggctacagccctcctacatttggcggaggcaccaagctggaaatcaagggcggaggcggaagtggaggcggaggatctggcggcggaggctctgaggttcagctgcttgagtctggcggaggactggttcaacctggcggaagcctgagactgtcttgtgccgccagcggcttcacctttagcagctacgccatgagctgggtccgacaggctcctggcaaaggactggaatgggtgtccgtgatctctggctctggcggcagacccaattacgccgattctgtgaagggcagattcaccatcagccgggacaacagcaagaacaccctgtacctccagatgaacagcctgcgcgacgaggataccgccgtgtactattgtgccaaggtggactacagcaactacctgttcttcgactactggggccagggcaccctggtcacagtttctagcacgcgtgagcagaaactgatctcggaagaggatctggcgaagcccaccacgacgccagcgccgcgaccaccaacaccggcgcccaccatcgcgtcgcagcccctgtccctgcgcccagaggcgtgccggccagcggcggggggcgcagtgcacacgagggggctggacttcgcctgtgacatctacatctgggcgcccttggccgggacttgtggggtccttctcctgtcactggttatcaccctttactgcgggcgcgccagagtgaagttcagcaggagcgcagacgcccccgcgtaccagcagggccagaaccagctctataacgagctgaatctaggacgaagagaggagtacgatgttttggacaagagacgtggccgggaccctgagatggggggaaagccgagaaggaagaaccctcaggaaggcctgtacaatgaactgcagaaagataagatggcggaggcctacagtgagattgggatgaaaggcgagcgccggaggggcaaggggcacgatggcctttaccagggtctcagtacagccaccaaggacacctacgacgcccttcacatgcaggccctgccccctcgctctagaggatctggagcaacaaacttctcactactcaaacaagcaggtgacgtggaggagaatcccgggcctgggatccacatggccacttacgaggttctctgtgaggtggcgcggaaactgggcacggatgacagggaagtggtattgttcctcctaaacgtgttcatacctcaacccacactggcccaattaattggagctcttagagctttaaaggaggagggcaggttaacgtttcccctgttagcggaatgtctgtttcgtgcaggtcgcagagacctcttgcgcgacctgcttcacttagacccgcgttttttagagcgccacctagcgggcacaatgagttatttcagcccttatcagctcactgttctccacgtagacggggagctgtgtgcgagggatattaggtctttgatatttttaagcaaggacactatagggtctcgcagcacaccacagacattcttacactgggtgtactgtatggaaaacttagacctactgggtcccactgacgtggatgccctaatgtcaatgcttagatctttgtcaagagtagacctacagcgccaagtgcaaaccctaatgggccttcacctttccggcccatcacactcccaacactatcgccatacaccactcgagaccgatttctacgactacaaggacgacgatgacaagactagtggctccggcgagggcagaggaagtctactaacctgcggagatgtggaagaaaatcctggcccacatatgaccgagtacaagcccacggtgcgcctcgccacccgcgacgacgtccccagggccgtacgcaccctcgccgccgcgttcgccgactaccccgccacgcgccacaccgtcgatccggaccgccacatcgagcgggtcaccgagctgcaagaactcttcctcacgcgcgtcgggctcgacatcggcaaggtgtgggtcgcggacgacggcgccgcggtggcggtctggaccacgccggagagcgtcgaagcgggggcggtgttcgccgagatcggcccgcgcatggccgagttgagcggttcccggctggccgcgcagcaacagatggaaggcctcctggcgccgcaccggcccaaggagcccgcgtggttcctggccaccgtcggcgtctcgcccgaccaccagggcaagggtctgggcagcgccgtcgtgctccccggagtggaggcggccgagcgcgccggggtgcccgccttcctggagacctccgcgccccgcaacctccccttctacgagcggctcggcttcaccgtcaccgccgacgtcgaggtgcccgaaggaccgcgcacctggtgcatgacccgcaagcccggtgcctga

SEQ ID NO: 19945 - DNA, 2568 bp, synthetic construct
  source 1..2568: mol_type = other DNA
atggccttaccagtgaccgccttgctcctgccgctggccttgctgctccacgccgccaggccggaaatcgtgctgacacagagccccggcacactgtcactttctccaggcgaaggcgctaccctgtcttgtagagctggacagtctgtgcggagcagctacctcggatggtatcagcagaagcctggacaggcccctcggctgttgatctacggtgcttctagcagagccacaggcatccccgatagattttctggcagcggctccggcaccgacttcaccctgacaatcagcagactggaacccgaggacttcgccgtgtattactgccagcagtacggctacagccctcctacatttggcggaggcaccaagctggaaatcaagctcgagatccagaaccctgatcctgccgtgtaccagctgcgggatagcaagagcagcgacaagagcgtgtgtctgttcaccgacttcgacagccagaccaacgtgtcccagagcaaggactccgacgtgtacatcaccgataagtgcgtgctggacatgcggagcatggacttcaagagcaactccgccgtggcctggtccaacaagtccgatttcgcctgcgccaacgccttcaacaacagcattatccccgaggacacattcttcccaagcagcgacgtgccctgcgacgtgaagctggtggaaaagagcttcgagacagacaccaacctgaacttccagaacctgagcgtgatcggcttcagaatcctgctgctgaaagtggccggctttaacctgctgatgaccctgcggctgtggtccagccgcgccaagagaagcggatctggcgtgaagcagaccctgaatttcgacctgctgaagctggctggcgacgtggaatccaacccaggccctactagtatggactggatttggcgcatccttttccttgtcggcgctgctaccggcgcgcattccttcgaagaggttcagctgcttgagtctggcggaggactggttcaacctggcggaagcctgagactgtcttgtgccgccagcggcttcacctttagcagctacgccatgagctgggtccgacaggctcctggcaaaggactggaatgggtgtccgtgatctctggctctggcggcagacccaattacgccgattctgtgaagggcagattcaccatcagccgggacaacagcaagaacaccctgtacctccagatgaacagcctgcgcgacgaggataccgccgtgtactattgtgccaaggtggactacagcaactacctgttcttcgactactggggccagggcaccctggtcacagtttctagcacgcgtgaggacctgaagaacgtgttcccacctgaggtggccgtgttcgagcctagcaaggccgagatcgcccacacccagaaagccaccctcgtgtgcctggctaccggcttctaccccgaccatgtggaactgtcttggtgggtcaacggcaaagaggtgcacagcggcgtgtgtaccgacccccagccactgaaagaacagcccgccctgaacgacagccggtactgcctgagcagcagactgagagtgtccgccaccttctggcagaacccccggaaccacttcagatgccaggtgcagttctacggcctgagcgagaacgacgagtggacccaggacagagccaagcccgtgacccagatcgtgtctgccgaagcctggggcagagccgattgcggcatcaccagcgccagctaccaccagggcgtgctgagcgccaccatcctgtacgagatcctgctgggcaaggccaccctgtacgccgtgctggtgtctgccctggtgctgatggctatggtcaagcggaaggacagccggggaagggccaagcgatctggatctggagcaacaaacttctcactactcaaacaagcaggtgacgtggaggagaatcccgggccttctagaggccatatgaccgagtacaagcccacggtgcgcctcgccacccgcgacgacgtccccagggccgtacgcaccctcgccgccgcgttcgccgactaccccgccacgcgccacaccgtcgatccggaccgccacatcgagcgggtcaccgagctgcaagaactcttcctcacgcgcgtcgggctcgacatcggcaaggtgtgggtcgcggacgacggcgccgcggtggcggtctggaccacgccggagagcgtcgaagcgggggcggtgttcgccgagatcggcccgcgcatggccgagttgagcggttcccggctggccgcgcagcaacagatggaaggcctcctggcgccgcaccggcccaaggagcccgcgtggttcctggccaccgtcggcgtctcgcccgaccaccagggcaagggtctgggcagcgccgtcgtgctccccggagtggaggcggccgagcgcgccggggtgcccgccttcctggagacctccgcgccccgcaacctccccttctacgagcggctcggcttcaccgtcaccgccgacgtcgaggtgcccgaaggaccgcgcacctggtgcatgacccgcaagcccggtgcctga

SEQ ID NO: 19946 - DNA, 2565 bp, synthetic construct
  source 1..2565: mol_type = other DNA
atggccttaccagtgaccgccttgctcctgccgctggccttgctgctccacgccgccaggccggaaatcgtgctgacacagagccccggcacactgtcactttctccaggcgaaggcgctaccctgtcttgtagagctggacagtctgtgcggagcagctacctcggatggtatcagcagaagcctggacaggcccctcggctgttgatctacggtgcttctagcagagccacaggcatccccgatagattttctggcagcggctccggcaccgacttcaccctgacaatcagcagactggaacccgaggacttcgccgtgtattactgccagcagtacggctacagccctcctacatttggcggaggcaccaagctggaaatcaagctcgaggacctgaagaacgtgttcccacctgaggtggccgtgttcgagcctagcaaggccgagatcgcccacacccagaaagccaccctcgtgtgcctggctaccggcttctaccccgaccatgtggaactgtcttggtgggtcaacggcaaagaggtgcacagcggcgtgtgtaccgacccccagccactgaaagaacagcccgccctgaacgacagccggtactgcctgagcagcagactgagagtgtccgccaccttctggcagaacccccggaaccacttcagatgccaggtgcagttctacggcctgagcgagaacgacgagtggacccaggacagagccaagcccgtgacccagatcgtgtctgccgaagcctggggcagagccgattgcggcatcaccagcgccagctaccaccagggcgtgctgagcgccaccatcctgtacgagatcctgctgggcaaggccaccctgtacgccgtgctggtgtctgccctggtgctgatggctatggtcaagcggaaggacagccggggaagggccaagcgatctggatctggagcaacaaacttctcactactcaaacaagcaggtgacgtggaggagaatcccgggcctactagtatggactggatttggcgcatccttttccttgtcggcgctgctaccggcgcgcattccttcgaagaggttcagctgcttgagtctggcggaggactggttcaacctggcggaagcctgagactgtcttgtgccgccagcggcttcacctttagcagctacgccatgagctgggtccgacaggctcctggcaaaggactggaatgggtgtccgtgatctctggctctggcggcagacccaattacgccgattctgtgaagggcagattcaccatcagccgggacaacagcaagaacaccctgtacctccagatgaacagcctgcgcgacgaggataccgccgtgtactattgtgccaaggtggactacagcaactacctgttcttcgactactggggccagggcaccctggtcacagtttctagcacgcgtatccagaaccctgatcctgccgtgtaccagctgcgggatagcaagagcagcgacaagagcgtgtgtctgttcaccgacttcgacagccagaccaacgtgtcccagagcaaggactccgacgtgtacatcaccgataagtgcgtgctggacatgcggagcatggacttcaagagcaactccgccgtggcctggtccaacaagtccgatttcgcctgcgccaacgccttcaacaacagcattatccccgaggacacattcttcccaagcagcgacgtgccctgcgacgtgaagctggtggaaaagagcttcgagacagacaccaacctgaacttccagaacctgagcgtgatcggcttcagaatcctgctgctgaaagtggccggctttaacctgctgatgaccctgcggctgtggtccagccgcgccaagagaagcggatctggcgtgaagcagaccctgaatttcgacctgctgaagctggctggcgacgtggaatccaacccaggcccttctagaggccatatgaccgagtacaagcccacggtgcgcctcgccacccgcgacgacgtccccagggccgtacgcaccctcgccgccgcgttcgccgactaccccgccacgcgccacaccgtcgatccggaccgccacatcgagcgggtcaccgagctgcaagaactcttcctcacgcgcgtcgggctcgacatcggcaaggtgtgggtcgcggacgacggcgccgcggtggcggtctggaccacgccggagagcgtcgaagcgggggcggtgttcgccgagatcggcccgcgcatggccgagttgagcggttcccggctggccgcgcagcaacagatggaaggcctcctggcgccgcaccggcccaaggagcccgcgtggttcctggccaccgtcggcgtctcgcccgaccaccagggcaagggtctgggcagcgccgtcgtgctccccggagtggaggcggccgagcgcgccggggtgcccgccttcctggagacctccgcgccccgcaacctccccttctacgagcggctcggcttcaccgtcaccgccgacgtcgaggtgcccgaaggaccgcgcacctggtgcatgacccgcaagcccggtgcctga

SEQ ID NO: 19947 - DNA, 1863 bp, synthetic construct
  source 1..1863: mol_type = other DNA
atggccttaccagtgaccgccttgctcctgccgctggccttgctgctccacgccgccaggccggaaatcgtgctgacacagagccccggcacactgtcactttctccaggcgaaggcgctaccctgtcttgtagagctggacagtctgtgcggagcagctacctcggatggtatcagcagaagcctggacaggcccctcggctgttgatctacggtgcttctagcagagccacaggcatccccgatagattttctggcagcggctccggcaccgacttcaccctgacaatcagcagactggaacccgaggacttcgccgtgtattactgccagcagtacggctacagccctcctacatttggcggaggcaccaagctggaaatcaagctcgaggacctgaagaacgtgttcccacctgaggtggccgtgttcgagcctagcgaggccgagatcagccacacccagaaagccaccctcgtgtgcctggctaccggcttctaccccgaccatgtggaactgtcttggtgggtcaacggcaaagaggtgcacagcggcgtgtgtaccgacccccagccactgaaagaacagcccgccctgaacgacagccggtactgcctgagcagcagactgagagtgtccgccaccttctggcagaacccccggaaccacttcagatgccaggtgcagttctacggcctgagcgagaacgacgagtggacccaggacagagccaagcccgtgacccagatcgtgtctgccgaagcctggggcagagccgattgcggctttaccagcgagagctaccagcagggcgtgctgagcgccaccatcctgtacgagatcctgctgggcaaggccaccctgtacgccgtgctggtgtctgccctggtgctgatggctatggtcaagcggaaggacagccggggaagggccaagcgatctggatctggagcaacaaacttctcactactcaaacaagcaggtgacgtggaggagaatcccgggcctactagtatggactggatttggcgcatccttttccttgtcggcgctgctaccggcgcgcattccttcgaagaggttcagctgcttgagtctggcggaggactggttcaacctggcggaagcctgagactgtcttgtgccgccagcggcttcacctttagcagctacgccatgagctgggtccgacaggctcctggcaaaggactggaatgggtgtccgtgatctctggctctggcggcagacccaattacgccgattctgtgaagggcagattcaccatcagccgggacaacagcaagaacaccctgtacctccagatgaacagcctgcgcgacgaggataccgccgtgtactattgtgccaaggtggactacagcaactacctgttcttcgactactggggccagggcaccctggtcacagtttctagcacgcgtatccagaaccctgatcctgccgtgtaccagctgcgggatagcaagagcagcgacaagagcgtgtgtctgttcaccgacttcgacagccagaccaacgtgtcccagagcaaggactccgacgtgtacatcaccgataagtgcgtgctggacatgcggagcatggacttcaagagcaactccgccgtggcctggtccaacaagtccgatttcgcctgcgccaacgccttcaacaacagcattatccccgaggacacattcttcccaagccccgagagcagctgcgacgtgaagctggtggaaaagagcttcgagacagacaccaacctgaacttccagaacctgagcgtgatcggcttcagaatcctgctgctgaaagtggccggctttaacctgctgatgaccctgcggctgtggtccagc

SEQ ID NO: 19948 - DNA, 2538 bp, synthetic construct
  source 1..2538: mol_type = other DNA
atggccttaccagtgaccgccttgctcctgccgctggccttgctgctccacgccgccaggccggaaatcgtgctgacacagagccccggcacactgtcactttctccaggcgaaggcgctaccctgtcttgtagagctggacagtctgtgcggagcagctacctcggatggtatcagcagaagcctggacaggcccctcggctgttgatctacggtgcttctagcagagccacaggcatccccgatagattttctggcagcggctccggcaccgacttcaccctgacaatcagcagactggaacccgaggacttcgccgtgtattactgccagcagtacggctacagccctcctacatttggcggaggcaccaagctggaaatcaagctcgaggacctgaagaacgtgttcccacctgaggtggccgtgttcgagcctagcgaggccgagatcagccacacccagaaagccaccctcgtgtgcctggctaccggcttctaccccgaccatgtggaactgtcttggtgggtcaacggcaaagaggtgcacagcggcgtgtgtaccgacccccagccactgaaagaacagcccgccctgaacgacagccggtactgcctgagcagcagactgagagtgtccgccaccttctggcagaacccccggaaccacttcagatgccaggtgcagttctacggcctgagcgagaacgacgagtggacccaggacagagccaagcccgtgacccagatcgtgtctgccgaagcctggggcagagccgattgcggctttaccagcgagagctaccagcagggcgtgctgagcgccaccatcctgtacgagatcctgctgggcaaggccaccctgtacgccgtgctggtgtctgccctggtgctgatggctatggtcaagcggaaggacagccggggaagggccaagcgatctggatctggagcaacaaacttctcactactcaaacaagcaggtgacgtggaggagaatcccgggcctactagtatggactggatttggcgcatccttttccttgtcggcgctgctaccggcgcgcattccttcgaagaggttcagctgcttgagtctggcggaggactggttcaacctggcggaagcctgagactgtcttgtgccgccagcggcttcacctttagcagctacgccatgagctgggtccgacaggctcctggcaaaggactggaatgggtgtccgtgatctctggctctggcggcagacccaattacgccgattctgtgaagggcagattcaccatcagccgggacaacagcaagaacaccctgtacctccagatgaacagcctgcgcgacgaggataccgccgtgtactattgtgccaaggtggactacagcaactacctgttcttcgactactggggccagggcaccctggtcacagtttctagcacgcgtatccagaaccctgatcctgccgtgtaccagctgcgggatagcaagagcagcgacaagagcgtgtgtctgttcaccgacttcgacagccagaccaacgtgtcccagagcaaggactccgacgtgtacatcaccgataagtgcgtgctggacatgcggagcatggacttcaagagcaactccgccgtggcctggtccaacaagtccgatttcgcctgcgccaacgccttcaacaacagcattatccccgaggacacattcttcccaagccccgagagcagctgcgacgtgaagctggtggaaaagagcttcgagacagacaccaacctgaacttccagaacctgagcgtgatcggcttcagaatcctgctgctgaaagtggccggctttaacctgctgatgaccctgcggctgtggtccagccgcgccaagagaagcggatctggcgtgaagcagaccctgaatttcgacctgctgaagctggctggcgacgtggaatccaacccaggcccttctagaggcgggatccacaccatggctacctacgaggtgctgtgcgaggtggcaagaaagctgggcaccgacgacagagaagtggtgctgttcctgctgaacgtgttcatccctcagcctacactggcccagctgatcggtgcactgagagccctgaaagaggaaggccggctgacctttcctctgctggccgaatgcctgttcagagccggaagaagggatctgctgcgggacctgctgcatctggaccccagatttctggaaagacacctggccggcaccatgagctacttcagcccttaccagctgaccgtgctgcacgttgacggcgaactgtgcgccagagatattcggagcctgatcttcctgagcaaggacaccatcggcagccggtctacccctcagacatttctgcactgggtgtactgcatggaaaacctggacctgctcggccccacagatgtggatgccctgatgtccatgctgagaagcctgagcagagtggacctccagagacaggtgcagacactgatgggactgcacctgagcggacctagccacagccagcactacagacacacccct

SEQ ID NO: 19949 - DNA, 1875 bp, synthetic construct
  source 1..1875: mol_type = other DNA
atggccttaccagtgaccgccttgctcctgccgctggccttgctgctccacgccgccaggccggaaatcgtgctgacacagagccccggcacactgtcactttctccaggcgaaggcgctaccctgtcttgtagagctggacagtctgtgcggagcagctacctcggatggtatcagcagaagcctggacaggcccctcggctgttgatctacggtgcttctagcagagccacaggcatccccgatagattttctggcagcggctccggcaccgacttcaccctgacaatcagcagactggaacccgaggacttcgccgtgtattactgccagcagtacggctacagccctcctacatttggcggaggcaccaagctggaaatcaagctcgagatccagaaccctgatcctgccgtgtaccagctgcgggatagcaagagcagcgacaagagcgtgtgtctgttcaccgacttcgacagccagaccaacgtgtcccagagcaaggactccgacgtgtacatcaccgataagtgcgtgctggacatgcggagcatggacttcaagagcaactccgccgtggcctggtccaacaagtccgatttcgcctgcgccaacgccttcaacaacagcattatccccgaggacacattcttcccaagccccgagagcagctgcgacgtgaagctggtggaaaagagcttcgagacagacaccaacctgaacttccagaacctgagcgtgatcggcttcagaatcctgctgctgaaagtggccggctttaacctgctgatgaccctgcggctgtggtccagccgcgccaagagaagcggatctggcgtgaagcagaccctgaatttcgacctgctgaagctggctggcgacgtggaatccaacccaggccctactagtatggactggatttggcgcatccttttccttgtcggcgctgctaccggcgcgcattccttcgaagaggttcagctgcttgagtctggcggaggactggttcaacctggcggaagcctgagactgtcttgtgccgccagcggcttcacctttagcagctacgccatgagctgggtccgacaggctcctggcaaaggactggaatgggtgtccgtgatctctggctctggcggcagacccaattacgccgattctgtgaagggcagattcaccatcagccgggacaacagcaagaacaccctgtacctccagatgaacagcctgcgcgacgaggataccgccgtgtactattgtgccaaggtggactacagcaactacctgttcttcgactactggggccagggcaccctggtcacagtttctagcacgcgtgaggacctgaagaacgtgttcccacctgaggtggccgtgttcgagcctagcgaggccgagatcagccacacccagaaagccaccctcgtgtgcctggctaccggcttctaccccgaccatgtggaactgtcttggtgggtcaacggcaaagaggtgcacagcggcgtgtgtaccgacccccagccactgaaagaacagcccgccctgaacgacagccggtactgcctgagcagcagactgagagtgtccgccaccttctggcagaacccccggaaccacttcagatgccaggtgcagttctacggcctgagcgagaacgacgagtggacccaggacagagccaagcccgtgacccagatcgtgtctgccgaagcctggggcagagccgattgcggctttaccagcgagagctaccagcagggcgtgctgagcgccaccatcctgtacgagatcctgctgggcaaggccaccctgtacgccgtgctggtgtctgccctggtgctgatggctatggtcaagcggaaggacagccgggga

SEQ ID NO: 19950 - DNA, 2541 bp, synthetic construct
  source 1..2541: mol_type = other DNA
atggccttaccagtgaccgccttgctcctgccgctggccttgctgctccacgccgccaggccggaaatcgtgctgacacagagccccggcacactgtcactttctccaggcgaaggcgctaccctgtcttgtagagctggacagtctgtgcggagcagctacctcggatggtatcagcagaagcctggacaggcccctcggctgttgatctacggtgcttctagcagagccacaggcatccccgatagattttctggcagcggctccggcaccgacttcaccctgacaatcagcagactggaacccgaggacttcgccgtgtattactgccagcagtacggctacagccctcctacatttggcggaggcaccaagctggaaatcaagctcgagatccagaaccctgatcctgccgtgtaccagctgcgggatagcaagagcagcgacaagagcgtgtgtctgttcaccgacttcgacagccagaccaacgtgtcccagagcaaggactccgacgtgtacatcaccgataagtgcgtgctggacatgcggagcatggacttcaagagcaactccgccgtggcctggtccaacaagtccgatttcgcctgcgccaacgccttcaacaacagcattatccccgaggacacattcttcccaagccccgagagcagctgcgacgtgaagctggtggaaaagagcttcgagacagacaccaacctgaacttccagaacctgagcgtgatcggcttcagaatcctgctgctgaaagtggccggctttaacctgctgatgaccctgcggctgtggtccagccgcgccaagagaagcggatctggcgtgaagcagaccctgaatttcgacctgctgaagctggctggcgacgtggaatccaacccaggccctactagtatggactggatttggcgcatccttttccttgtcggcgctgctaccggcgcgcattccttcgaagaggttcagctgcttgagtctggcggaggactggttcaacctggcggaagcctgagactgtcttgtgccgccagcggcttcacctttagcagctacgccatgagctgggtccgacaggctcctggcaaaggactggaatgggtgtccgtgatctctggctctggcggcagacccaattacgccgattctgtgaagggcagattcaccatcagccgggacaacagcaagaacaccctgtacctccagatgaacagcctgcgcgacgaggataccgccgtgtactattgtgccaaggtggactacagcaactacctgttcttcgactactggggccagggcaccctggtcacagtttctagcacgcgtgaggacctgaagaacgtgttcccacctgaggtggccgtgttcgagcctagcgaggccgagatcagccacacccagaaagccaccctcgtgtgcctggctaccggcttctaccccgaccatgtggaactgtcttggtgggtcaacggcaaagaggtgcacagcggcgtgtgtaccgacccccagccactgaaagaacagcccgccctgaacgacagccggtactgcctgagcagcagactgagagtgtccgccaccttctggcagaacccccggaaccacttcagatgccaggtgcagttctacggcctgagcgagaacgacgagtggacccaggacagagccaagcccgtgacccagatcgtgtctgccgaagcctggggcagagccgattgcggctttaccagcgagagctaccagcagggcgtgctgagcgccaccatcctgtacgagatcctgctgggcaaggccaccctgtacgccgtgctggtgtctgccctggtgctgatggctatggtcaagcggaaggacagccggggaagggccaagcgatctggatctggagcaacaaacttctcactactcaaacaagcaggtgacgtggaggagaatcccgggccttctagaggcgggatccacaccatggctacctacgaggtgctgtgcgaggtggcaagaaagctgggcaccgacgacagagaagtggtgctgttcctgctgaacgtgttcatccctcagcctacactggcccagctgatcggtgcactgagagccctgaaagaggaaggccggctgacctttcctctgctggccgaatgcctgttcagagccggaagaagggatctgctgcgggacctgctgcatctggaccccagatttctggaaagacacctggccggcaccatgagctacttcagcccttaccagctgaccgtgctgcacgttgacggcgaactgtgcgccagagatattcggagcctgatcttcctgagcaaggacaccatcggcagccggtctacccctcagacatttctgcactgggtgtactgcatggaaaacctggacctgctcggccccacagatgtggatgccctgatgtccatgctgagaagcctgagcagagtggacctccagagacaggtgcagacactgatgggactgcacctgagcggacctagccacagccagcactacagacacacccct

SEQ ID NO: 19951 - DNA, 2700 bp, synthetic construct
  source 1..2700: mol_type = other DNA
atggccttaccagtgaccgccttgctcctgccgctggccttgctgctccacgccgccaggccgctcgaggggaaaccaattcccaaccctcttctgggactggattcaaccggcagcggcgaggacctgaagaacgtgttcccacctgaggtggccgtgttcgagcctagcaaggccgagatcgcccacacccagaaagccaccctcgtgtgcctggctaccggcttctaccccgaccatgtggaactgtcttggtgggtcaacggcaaagaggtgcacagcggcgtgtgtaccgacccccagccactgaaagaacagcccgccctgaacgacagccggtactgcctgagcagcagactgagagtgtccgccaccttctggcagaacccccggaaccacttcagatgccaggtgcagttctacggcctgagcgagaacgacgagtggacccaggacagagccaagcccgtgacccagatcgtgtctgccgaagcctggggcagagccgattgcggcatcaccagcgccagctaccaccagggcgtgctgagcgccaccatcctgtacgagatcctgctgggcaaggccaccctgtacgccgtgctggtgtctgccctggtgctgatggctatggtcaagcggaaggacagccggggaagggccaagcgatctggatctggagcaacaaacttctcactactcaaacaagcaggtgacgtggaggagaatcccgggcctactagcatggccttaccagtgaccgccttgctcctgccgctggccttgctgctccacgccgccaggccggaaatcgtgctgacacagagccccggcacactgtcactttctccaggcgaaggcgctaccctgtcttgtagagctggacagtctgtgcggagcagctacctcggatggtatcagcagaagcctggacaggcccctcggctgttgatctacggtgcttctagcagagccacaggcatccccgatagattttctggcagcggctccggcaccgacttcaccctgacaatcagcagactggaacccgaggacttcgccgtgtattactgccagcagtacggctacagccctcctacatttggcggaggcaccaagctggaaatcaagggcggaggcggaagtggaggcggaggatctggcggcggaggctctgaggttcagctgcttgagtctggcggaggactggttcaacctggcggaagcctgagactgtcttgtgccgccagcggcttcacctttagcagctacgccatgagctgggtccgacaggctcctggcaaaggactggaatgggtgtccgtgatctctggctctggcggcagacccaattacgccgattctgtgaagggcagattcaccatcagccgggacaacagcaagaacaccctgtacctccagatgaacagcctgcgcgacgaggataccgccgtgtactattgtgccaaggtggactacagcaactacctgttcttcgactactggggccagggcaccctggtcacagtttctagcacgcgtgagcagaaactgatctcggaagaggatgggagcggcatccagaaccctgatcctgccgtgtaccagctgcgggatagcaagagcagcgacaagagcgtgtgtctgttcaccgacttcgacagccagaccaacgtgtcccagagcaaggactccgacgtgtacatcaccgataagtgcgtgctggacatgcggagcatggacttcaagagcaactccgccgtggcctggtccaacaagtccgatttcgcctgcgccaacgccttcaacaacagcattatccccgaggacacattcttcccaagcagcgacgtgccctgcgacgtgaagctggtggaaaagagcttcgagacagacaccaacctgaacttccagaacctgagcgtgatcggcttcagaatcctgctgctgaaagtggccggctttaacctgctgatgaccctgcggctgtggtccagccgcgccaagagaagcggatctggcgtgaagcagaccctgaatttcgacctgctgaagctggctggcgacgtggaatccaacccaggcccttctagaggccatatgaccgagtacaagcccacggtgcgcctcgccacccgcgacgacgtccccagggccgtacgcaccctcgccgccgcgttcgccgactaccccgccacgcgccacaccgtcgatccggaccgccacatcgagcgggtcaccgagctgcaagaactcttcctcacgcgcgtcgggctcgacatcggcaaggtgtgggtcgcggacgacggcgccgcggtggcggtctggaccacgccggagagcgtcgaagcgggggcggtgttcgccgagatcggcccgcgcatggccgagttgagcggttcccggctggccgcgcagcaacagatggaaggcctcctggcgccgcaccggcccaaggagcccgcgtggttcctggccaccgtcggcgtctcgcccgaccaccagggcaagggtctgggcagcgccgtcgtgctccccggagtggaggcggccgagcgcgccggggtgcccgccttcctggagacctccgcgccccgcaacctccccttctacgagcggctcggcttcaccgtcaccgccgacgtcgaggtgcccgaaggaccgcgcacctggtgcatgacccgcaagcccggtgcctga

SEQ ID NO: 19952 - DNA, 2703 bp, synthetic construct
  source 1..2703: mol_type = other DNA
atggccttaccagtgaccgccttgctcctgccgctggccttgctgctccacgccgccaggccgctcgagcagaaactgatctcggaagaggatctgggctccggcgatcgccctgatcctgccgtgtaccagctgcgggatagcaagagcagcgacaagagcgtgtgtctgttcaccgacttcgacagccagaccaacgtgtcccagagcaaggactccgacgtgtacatcaccgataagtgcgtgctggacatgcggagcatggacttcaagagcaactccgccgtggcctggtccaacaagtccgatttcgcctgcgccaacgccttcaacaacagcattatccccgaggacacattcttcccaagccccgagagcagctgcgacgtgaagctggtggaaaagagcttcgagacagacaccaacctgaacttccagaacctgagcgtgatcggcttcagaatcctgctgctgaaagtggccggctttaacctgctgatgaccctgcggctgtggtccagctctagtcgcgccaagagaagcggatctggcgtgaagcagaccctgaatttcgacctgctgaagctggctggcgacgtggaatccaacccaggccccactagcatggccttaccagtgaccgccttgctcctgccgctggccttgctgctccacgccgccaggccggaaatcgtgctgacacagagccccggcacactgtcactttctccaggcgaaggcgctaccctgtcttgtagagctggacagtctgtgcggagcagctacctcggatggtatcagcagaagcctggacaggcccctcggctgttgatctacggtgcttctagcagagccacaggcatccccgatagattttctggcagcggctccggcaccgacttcaccctgacaatcagcagactggaacccgaggacttcgccgtgtattactgccagcagtacggctacagccctcctacatttggcggaggcaccaagctggaaatcaagggcggaggcggaagtggaggcggaggatctggcggcggaggctctgaggttcagctgcttgagtctggcggaggactggttcaacctggcggaagcctgagactgtcttgtgccgccagcggcttcacctttagcagctacgccatgagctgggtccgacaggctcctggcaaaggactggaatgggtgtccgtgatctctggctctggcggcagacccaattacgccgattctgtgaagggcagattcaccatcagccgggacaacagcaagaacaccctgtacctccagatgaacagcctgcgcgacgaggataccgccgtgtactattgtgccaaggtggactacagcaactacctgttcttcgactactggggccagggcaccctggtcacagtttctagcacgcgtgggaaaccaattcccaaccctcttctgggactggattcaaccggcagcggcgaggacctgaagaacgtgttcccacctgaggtggccgtgttcgagcctagcgaggccgagatcagccacacccagaaagccaccctcgtgtgcctggctaccggcttctaccccgaccatgtggaactgtcttggtgggtcaacggcaaagaggtgcacagcggcgtgtgtaccgacccccagccactgaaagaacagcccgccctgaacgacagccggtactgcctgagcagcagactgagagtgtccgccaccttctggcagaacccccggaaccacttcagatgccaggtgcagttctacggcctgagcgagaacgacgagtggacccaggacagagccaagcccgtgacccagatcgtgtctgccgaagcctggggcagagccgattgcggctttaccagcgagagctaccagcagggcgtgctgagcgccaccatcctgtacgagatcctgctgggcaaggccaccctgtacgccgtgctggtgtctgccctggtgctgatggctatggtcaagcggaaggacagccggggaagggccaagcgatctggatctggagcaacaaacttctcactactcaaacaagcaggtgacgtggaggagaatcccgggccttctagaggccatatgaccgagtacaagcccacggtgcgcctcgccacccgcgacgacgtccccagggccgtacgcaccctcgccgccgcgttcgccgactaccccgccacgcgccacaccgtcgatccggaccgccacatcgagcgggtcaccgagctgcaagaactcttcctcacgcgcgtcgggctcgacatcggcaaggtgtgggtcgcggacgacggcgccgcggtggcggtctggaccacgccggagagcgtcgaagcgggggcggtgttcgccgagatcggcccgcgcatggccgagttgagcggttcccggctggccgcgcagcaacagatggaaggcctcctggcgccgcaccggcccaaggagcccgcgtggttcctggccaccgtcggcgtctcgcccgaccaccagggcaagggtctgggcagcgccgtcgtgctccccggagtggaggcggccgagcgcgccggggtgcccgccttcctggagacctccgcgccccgcaacctccccttctacgagcggctcggcttcaccgtcaccgccgacgtcgaggtgcccgaaggaccgcgcacctggtgcatgacccgcaagcccggtgcctga

SEQ ID NO: 19953 - DNA, 2565 bp, synthetic construct
  source 1..2565: mol_type = other DNA
atggccttaccagtgaccgccttgctcctgccgctggccttgctgctccacgccgccaggccggaaatcgtgctgacacagagccccggcacactgtcactttctccaggcgaaggcgctaccctgtcttgtagagctggacagtctgtgcggagcagctacctcggatggtatcagcagaagcctggacaggcccctcggctgttgatctacggtgcttctagcagagccacaggcatccccgatagattttctggcagcggctccggcaccgacttcaccctgacaatcagcagactggaacccgaggacttcgccgtgtattactgccagcagtacggctacagccctcctacatttggcggaggcaccaagctggaaatcaagctcgaggacctgaagaacgtgttcccacctgaggtggccgtgttcgagcctagcgaggccgagatcagccacacccagaaagccaccctcgtgtgcctggctaccggcttctaccccgaccatgtggaactgtcttggtgggtcaacggcaaagaggtgcacagcggcgtgtctaccgacccccagccactgaaagaacagcccgccctgaacgacagccggtactgcctgagcagcagactgagagtgtccgccaccttctggcagaacccccggaaccacttcagatgccaggtgcagttctacggcctgagcgagaacgacgagtggacccaggacagagccaagcccgtgacccagatcgtgtctgccgaagcctggggcagagccgattgcggctttaccagcgagagctaccagcagggcgtgctgagcgccaccatcctgtacgagatcctgctgggcaaggccaccctgtacgccgtgctggtgtctgccctggtgctgatggctatggtcaagcggaaggacagccggggaagggccaagcgatctggatctggagcaacaaacttctcactactcaaacaagcaggtgacgtggaggagaatcccgggcctactagtatggactggatttggcgcatccttttccttgtcggcgctgctaccggcgcgcattccttcgaagaggttcagctgcttgagtctggcggaggactggttcaacctggcggaagcctgagactgtcttgtgccgccagcggcttcacctttagcagctacgccatgagctgggtccgacaggctcctggcaaaggactggaatgggtgtccgtgatctctggctctggcggcagacccaattacgccgattctgtgaagggcagattcaccatcagccgggacaacagcaagaacaccctgtacctccagatgaacagcctgcgcgacgaggataccgccgtgtactattgtgccaaggtggactacagcaactacctgttcttcgactactggggccagggcaccctggtcacagtttctagcacgcgtatccagaaccctgatcctgccgtgtaccagctgcgggatagcaagagcagcgacaagagcgtgtgtctgttcaccgacttcgacagccagaccaacgtgtcccagagcaaggactccgacgtgtacatcaccgataagaccgtgctggacatgcggagcatggacttcaagagcaactccgccgtggcctggtccaacaagtccgatttcgcctgcgccaacgccttcaacaacagcattatccccgaggacacattcttcccaagccccgagagcagctgcgacgtgaagctggtggaaaagagcttcgagacagacaccaacctgaacttccagaacctgagcgtgatcggcttcagaatcctgctgctgaaagtggccggctttaacctgctgatgaccctgcggctgtggtccagccgcgccaagagaagcggatctggcgtgaagcagaccctgaatttcgacctgctgaagctggctggcgacgtggaatccaacccaggcccttctagaggccatatgaccgagtacaagcccacggtgcgcctcgccacccgcgacgacgtccccagggccgtacgcaccctcgccgccgcgttcgccgactaccccgccacgcgccacaccgtcgatccggaccgccacatcgagcgggtcaccgagctgcaagaactcttcctcacgcgcgtcgggctcgacatcggcaaggtgtgggtcgcggacgacggcgccgcggtggcggtctggaccacgccggagagcgtcgaagcgggggcggtgttcgccgagatcggcccgcgcatggccgagttgagcggttcccggctggccgcgcagcaacagatggaaggcctcctggcgccgcaccggcccaaggagcccgcgtggttcctggccaccgtcggcgtctcgcccgaccaccagggcaagggtctgggcagcgccgtcgtgctccccggagtggaggcggccgagcgcgccggggtgcccgccttcctggagacctccgcgccccgcaacctccccttctacgagcggctcggcttcaccgtcaccgccgacgtcgaggtgcccgaaggaccgcgcacctggtgcatgacccgcaagcccggtgcctga

SEQ ID NO: 19954 - DNA, 2811 bp, synthetic construct
  source 1..2811: mol_type = other DNA
atggccttaccagtgaccgccttgctcctgccgctggccttgctgctccacgccgccaggccggaaatcgtgctgacacagagccccggcacactgtcactttctccaggcgaaggcgctaccctgtcttgtagagctggacagtctgtgcggagcagctacctcggatggtatcagcagaagcctggacaggcccctcggctgttgatctacggtgcttctagcagagccacaggcatccccgatagattttctggcagcggctccggcaccgacttcaccctgacaatcagcagactggaacccgaggacttcgccgtgtattactgccagcagtacggctacagccctcctacatttggcggaggcaccaagctggaaatcaagctcgaggacctgaagaacgtgttcccacctgaggtggccgtgttcgagcctagcgaggccgagatcagccacacccagaaagccaccctcgtgtgcctggctaccggcttctaccccgaccatgtggaactgtcttggtgggtcaacggcaaagaggtgcacagcggcgtgtctaccgacccccagccactgaaagaacagcccgccctgaacgacagccggtactgcctgagcagcagactgagagtgtccgccaccttctggcagaacccccggaaccacttcagatgccaggtgcagttctacggcctgagcgagaacgacgagtggacccaggacagagccaagcccgtgacccagatcgtgtctgccgaagcctggggcagagccgattgcggctttaccagcgagagctaccagcagggcgtgctgagcgccaccatcctgtacgagatcctgctgggcaaggccaccctgtacgccgtgctggtgtctgccctggtgctgatggctatggtcaagcggaaggacagccggggaagggccaagcgatctggatctggagcaacaaacttctcactactcaaacaagcaggtgacgtggaggagaatcccgggcctactagtatggactggatttggcgcatccttttccttgtcggcgctgctaccggcgcgcattccttcgaagaggttcagctgcttgagtctggcggaggactggttcaacctggcggaagcctgagactgtcttgtgccgccagcggcttcacctttagcagctacgccatgagctgggtccgacaggctcctggcaaaggactggaatgggtgtccgtgatctctggctctggcggcagacccaattacgccgattctgtgaagggcagattcaccatcagccgggacaacagcaagaacaccctgtacctccagatgaacagcctgcgcgacgaggataccgccgtgtactattgtgccaaggtggactacagcaactacctgttcttcgactactggggccagggcaccctggtcacagtttctagcacgcgtgagcagaaactgatctcggaagaggatgggagcggcaccccattcccttctctggcccctcccatcatgctgctggtggacggcaagcagcagatggtggtcgtgtgcctggtgctggatgtggccccacctggactggacagccccatctggtttagcgccggcaatggctctgccctggacgcctttacctacggcccaagccctgccaccgatggcacctggacaaatctggcccacctgagcctgcccagcgaggaactggcttcttgggagcctctcgtgtgccacacaggacctggcgctgagggacacagcagatccacccagcctatgcacctgtctggcgaggccagcaccgccagaacctgtcctcaggaacctctgagaggcacccctggcggagcactgtggctgggagtgctgagactgctgctgttcaagctgctgctgtttgacctgctgctgacctgctcctgtctgtgcgatcctgccggccctctgccttctcctgccaccaccacaagactgagagccctgggcagccacagactgcaccctgccacagagacaggcggcagagaggccacaagcagccctagaccccagcccagagacagaagatggggcgataccccccctggcagaaagcctggatctccagtccgcgccaagagaagcggatctggcgtgaagcagaccctgaatttcgacctgctgaagctggctggcgacgtggaatccaacccaggcccttctagaggccatatgaccgagtacaagcccacggtgcgcctcgccacccgcgacgacgtccccagggccgtacgcaccctcgccgccgcgttcgccgactaccccgccacgcgccacaccgtcgatccggaccgccacatcgagcgggtcaccgagctgcaagaactcttcctcacgcgcgtcgggctcgacatcggcaaggtgtgggtcgcggacgacggcgccgcggtggcggtctggaccacgccggagagcgtcgaagcgggggcggtgttcgccgagatcggcccgcgcatggccgagttgagcggttcccggctggccgcgcagcaacagatggaaggcctcctggcgccgcaccggcccaaggagcccgcgtggttcctggccaccgtcggcgtctcgcccgaccaccagggcaagggtctgggcagcgccgtcgtgctccccggagtggaggcggccgagcgcgccggggtgcccgccttcctggagacctccgcgccccgcaacctccccttctacgagcggctcggcttcaccgtcaccgccgacgtcgaggtgcccgaaggaccgcgcacctggtgcatgacccgcaagcccggtgcctga

SEQ ID NO: 19955 - DNA, 2865 bp, synthetic construct
  source 1..2865: mol_type = other DNA
atggccttaccagtgaccgccttgctcctgccgctggccttgctgctccacgccgccaggccgctcgaggacctgaagaacgtgttcccacctgaggtggccgtgttcgagcctagcgaggccgagatcagccacacccagaaagccaccctcgtgtgcctggctaccggcttctaccccgaccatgtggaactgtcttggtgggtcaacggcaaagaggtgcacagcggcgtgtctaccgacccccagccactgaaagaacagcccgccctgaacgacagccggtactgcctgagcagcagactgagagtgtccgccaccttctggcagaacccccggaaccacttcagatgccaggtgcagttctacggcctgagcgagaacgacgagtggacccaggacagagccaagcccgtgacccagatcgtgtctgccgaagcctggggcagagccgattgcggctttaccagcgagagctaccagcagggcgtgctgagcgccaccatcctgtacgagatcctgctgggcaaggccaccctgtacgccgtgctggtgtctgccctggtgctgatggctatggtcaagcggaaggacagccggggaagggccaagcgatctggatctggagcaacaaacttctcactactcaaacaagcaggtgacgtggaggagaatcccgggcctactagcatggccttaccagtgaccgccttgctcctgccgctggccttgctgctccacgccgccaggccggaaatcgtgctgacacagagccccggcacactgtcactttctccaggcgaaggcgctaccctgtcttgtagagctggacagtctgtgcggagcagctacctcggatggtatcagcagaagcctggacaggcccctcggctgttgatctacggtgcttctagcagagccacaggcatccccgatagattttctggcagcggctccggcaccgacttcaccctgacaatcagcagactggaacccgaggacttcgccgtgtattactgccagcagtacggctacagccctcctacatttggcggaggcaccaagctggaaatcaagggcggaggcggaagtggaggcggaggatctggcggcggaggctctgaggttcagctgcttgagtctggcggaggactggttcaacctggcggaagcctgagactgtcttgtgccgccagcggcttcacctttagcagctacgccatgagctgggtccgacaggctcctggcaaaggactggaatgggtgtccgtgatctctggctctggcggcagacccaattacgccgattctgtgaagggcagattcaccatcagccgggacaacagcaagaacaccctgtacctccagatgaacagcctgcgcgacgaggataccgccgtgtactattgtgccaaggtggactacagcaactacctgttcttcgactactggggccagggcaccctggtcacagtttctagcacgcgtgagcagaaactgatctcggaagaggatctggggagcggcaccccattcccttctctggcccctcccatcatgctgctggtggacggcaagcagcagatggtggtcgtgtgcctggtgctggatgtggccccacctggactggacagccccatctggtttagcgccggcaatggctctgccctggacgcctttacctacggcccaagccctgccaccgatggcacctggacaaatctggcccacctgagcctgcccagcgaggaactggcttcttgggagcctctcgtgtgccacacaggacctggcgctgagggacacagcagatccacccagcctatgcacctgtctggcgaggccagcaccgccagaacctgtcctcaggaacctctgagaggcacccctggcggagcactgtggctgggagtgctgagactgctgctgttcaagctgctgctgtttgacctgctgctgacctgctcctgtctgtgcgatcctgccggccctctgccttctcctgccaccaccacaagactgagagccctgggcagccacagactgcaccctgccacagagacaggcggcagagaggccacaagcagccctagaccccagcccagagacagaagatggggcgataccccccctggcagaaagcctggatctccagtccgcgccaagagaagcggatctggcgtgaagcagaccctgaatttcgacctgctgaagctggctggcgacgtggaatccaacccaggcccttctagatctagaggccatatgaccgagtacaagcccacggtgcgcctcgccacccgcgacgacgtccccagggccgtacgcaccctcgccgccgcgttcgccgactaccccgccacgcgccacaccgtcgatccggaccgccacatcgagcgggtcaccgagctgcaagaactcttcctcacgcgcgtcgggctcgacatcggcaaggtgtgggtcgcggacgacggcgccgcggtggcggtctggaccacgccggagagcgtcgaagcgggggcggtgttcgccgagatcggcccgcgcatggccgagttgagcggttcccggctggccgcgcagcaacagatggaaggcctcctggcgccgcaccggcccaaggagcccgcgtggttcctggccaccgtcggcgtctcgcccgaccaccagggcaagggtctgggcagcgccgtcgtgctccccggagtggaggcggccgagcgcgccggggtgcccgccttcctggagacctccgcgccccgcaacctccccttctacgagcggctcggcttcaccgtcaccgccgacgtcgaggtgcccgaaggaccgcgcacctggtgcatgacccgcaagcccggtgcctga

SEQ ID NO: 19956 - DNA, 2676 bp, synthetic construct
  source 1..2676: mol_type = other DNA
atggccttaccagtgaccgccttgctcctgccgctggccttgctgctccacgccgccaggccggaaatcgtgctgacacagagccccggcacactgtcactttctccaggcgaaggcgctaccctgtcttgtagagctggacagtctgtgcggagcagctacctcggatggtatcagcagaagcctggacaggcccctcggctgttgatctacggtgcttctagcagagccacaggcatccccgatagattttctggcagcggctccggcaccgacttcaccctgacaatcagcagactggaacccgaggacttcgccgtgtattactgccagcagtacggctacagccctcctacatttggcggaggcaccaagctggaaatcaagctcgaggggaaaccaattcccaaccctcttctgggactggattcaaccggcagcggcgacaagcagctggacgccgacgtgtcccccaagcctaccatcttcctgccctctatcgccgagacaaagctccagaaggccggcacctacctgtgcctgctggaaaagttcttcccagatgtgattaagatccactggcaggaaaagaagtccaacaccatcctgggcagccaggaaggcaacaccatgaagaccaacgacacctacatgaagttcagctggctgaccgtgcccgagaagtccctggacaaagaacacagatgcatcgtgcggcacgaaaacaacaagaacggcgtggaccaggaaatcatcttcccacccatcaagaccgatgtgattacaatggaccccaaggacaactgctccaaggacgccaacgataccctgctgctccagctgaccaacaccagcgcctactacatgtacttgttgctgctgctgaagtccgtggtgtacttcgccatcatcacatgctgcctgctgcggagaaccgccttctgctgcaacggcgagaagtctagggccaagcgatctggatctggagcaacaaacttctcactactcaaacaagcaggtgacgtggaggagaatcccgggcctactagtatggactggatttggcgcatccttttccttgtcggcgctgctaccggcgcgcattccttcgaagaggttcagctgcttgagtctggcggaggactggttcaacctggcggaagcctgagactgtcttgtgccgccagcggcttcacctttagcagctacgccatgagctgggtccgacaggctcctggcaaaggactggaatgggtgtccgtgatctctggctctggcggcagacccaattacgccgattctgtgaagggcagattcaccatcagccgggacaacagcaagaacaccctgtacctccagatgaacagcctgcgcgacgaggataccgccgtgtactattgtgccaaggtggactacagcaactacctgttcttcgactactggggccagggcaccctggtcacagtttctagcacgcgtgagcagaaactgatctcggaagaggatgggagcggcagccagcctcacaccaagcccagcgtgttcgtgatgaagaacggcaccaacgtggcctgcctcgtgaaagagttctaccccaaggacatcaggatcaacctggtgtccagcaagaagatcaccgagttcgaccccgccatcgtgatctcccccagcggcaagtacaacgccgtgaagctggggaagtacgaggacagcaacagcgtgacctgctccgtgcagcacgacaacaagaccgtgcacagcaccgactttgaagtgaaaaccgactccaccgaccacgtgaagcccaaagagacagagaacaccaagcagcccagcaagagctgccacaagcccaaggccatcgtgcacaccgagaaagtgaacatgatgagcctgaccgtgctgggcctgcggatgctgttcgccaaaaccgtggccgtgaacttcctgctgaccgccaagctgttcttcctccgcgccaagagaagcggatctggcgtgaagcagaccctgaatttcgacctgctgaagctggctggcgacgtggaatccaacccaggcccttctagaggccatatgaccgagtacaagcccacggtgcgcctcgccacccgcgacgacgtccccagggccgtacgcaccctcgccgccgcgttcgccgactaccccgccacgcgccacaccgtcgatccggaccgccacatcgagcgggtcaccgagctgcaagaactcttcctcacgcgcgtcgggctcgacatcggcaaggtgtgggtcgcggacgacggcgccgcggtggcggtctggaccacgccggagagcgtcgaagcgggggcggtgttcgccgagatcggcccgcgcatggccgagttgagcggttcccggctggccgcgcagcaacagatggaaggcctcctggcgccgcaccggcccaaggagcccgcgtggttcctggccaccgtcggcgtctcgcccgaccaccagggcaagggtctgggcagcgccgtcgtgctccccggagtggaggcggccgagcgcgccggggtgcccgccttcctggagacctccgcgccccgcaacctccccttctacgagcggctcggcttcaccgtcaccgccgacgtcgaggtgcccgaaggaccgcgcacctggtgcatgacccgcaagcccggtgcctga

SEQ ID NO: 19957 - DNA, 1887 bp, synthetic construct
  source 1..1887: mol_type = other DNA
atggccttaccagtgaccgccttgctcctgccgctggccttgctgctccacgccgccaggccggaaatcgtgctgacacagagccccggcacactgtcactttctccaggcgaaggcgctaccctgtcttgtagagctggacagtctgtgcggagcagctacctcggatggtatcagcagaagcctggacaggcccctcggctgttgatctacggtgcttctagcagagccacaggcatccccgatagattttctggcagcggctccggcaccgacttcaccctgacaatcagcagactggaacccgaggacttcgccgtgtattactgccagcagtacggctacagccctcctacatttggcggaggcaccaagctggaaatcaagctcgagagccagcctcacaccaagcccagcgtgttcgtgatgaagaacggcaccaacgtggcctgcctcgtgaaagagttctaccccaaggacatcaggatcaacctggtgtccagcaagaagatcaccgagttcgaccccgccatcgtgatctcccccagcggcaagtacaacgccgtgaagctggggaagtacgaggacagcaacagcgtgacctgctccgtgcagcacgacaacaagaccgtgcacagcaccgactttgaagtgaaaaccgactccaccgaccacgtgaagcccaaagagacagagaacaccaagcagcccagcaagagctgccacaagcccaaggccatcgtgcacaccgagaaagtgaacatgatgagcctgaccgtgctgggcctgcggatgctgttcgccaaaaccgtggccgtgaacttcctgctgaccgccaagctgttcttcctcagggccaagcgatctggatctggagcaacaaacttctcactactcaaacaagcaggtgacgtggaggagaatcccgggcctactagtatggactggatttggcgcatccttttccttgtcggcgctgctaccggcgcgcattccttcgaagaggttcagctgcttgagtctggcggaggactggttcaacctggcggaagcctgagactgtcttgtgccgccagcggcttcacctttagcagctacgccatgagctgggtccgacaggctcctggcaaaggactggaatgggtgtccgtgatctctggctctggcggcagacccaattacgccgattctgtgaagggcagattcaccatcagccgggacaacagcaagaacaccctgtacctccagatgaacagcctgcgcgacgaggataccgccgtgtactattgtgccaaggtggactacagcaactacctgttcttcgactactggggccagggcaccctggtcacagtttctagcacgcgtgacaagcagctggacgccgacgtgtcccccaagcctaccatcttcctgccctctatcgccgagacaaagctccagaaggccggcacctacctgtgcctgctggaaaagttcttcccagatgtgattaagatccactggcaggaaaagaagtccaacaccatcctgggcagccaggaaggcaacaccatgaagaccaacgacacctacatgaagttcagctggctgaccgtgcccgagaagtccctggacaaagaacacagatgcatcgtgcggcacgaaaacaacaagaacggcgtggaccaggaaatcatcttcccacccatcaagaccgatgtgattacaatggaccccaaggacaactgctccaaggacgccaacgataccctgctgctccagctgaccaacaccagcgcctactacatgtacttgttgctgctgctgaagtccgtggtgtacttcgccatcatcacatgctgcctgctgcggagaaccgccttctgctgcaacggcgagaagtct

SEQ ID NO: 19958 - DNA, 2721 bp, synthetic construct
  source 1..2721: mol_type = other DNA
atggccttaccagtgaccgccttgctcctgccgctggccttgctgctccacgccgccaggccgctcgaggggaaaccaattcccaaccctcttctgggactggattcaaccggcagcggcgacaagcagctggacgccgacgtgtcccccaagcctaccatcttcctgccctctatcgccgagacaaagctccagaaggccggcacctacctgtgcctgctggaaaagttcttcccagatgtgattaagatccactggcaggaaaagaagtccaacaccatcctgggcagccaggaaggcaacaccatgaagaccaacgacacctacatgaagttcagctggctgaccgtgcccgagaagtccctggacaaagaacacagatgcatcgtgcggcacgaaaacaacaagaacggcgtggaccaggaaatcatcttcccacccatcaagaccgatgtgattacaatggaccccaaggacaactgctccaaggacgccaacgataccctgctgctccagctgaccaacaccagcgcctactacatgtacttgttgctgctgctgaagtccgtggtgtacttcgccatcatcacatgctgcctgctgcggagaaccgccttctgctgcaacggcgagaagtctagggccaagcgatctggatctggagcaacaaacttctcactactcaaacaagcaggtgacgtggaggagaatcccgggcctactagcatggccttaccagtgaccgccttgctcctgccgctggccttgctgctccacgccgccaggccggaaatcgtgctgacacagagccccggcacactgtcactttctccaggcgaaggcgctaccctgtcttgtagagctggacagtctgtgcggagcagctacctcggatggtatcagcagaagcctggacaggcccctcggctgttgatctacggtgcttctagcagagccacaggcatccccgatagattttctggcagcggctccggcaccgacttcaccctgacaatcagcagactggaacccgaggacttcgccgtgtattactgccagcagtacggctacagccctcctacatttggcggaggcaccaagctggaaatcaagggcggaggcggaagtggaggcggaggatctggcggcggaggctctgaggttcagctgcttgagtctggcggaggactggttcaacctggcggaagcctgagactgtcttgtgccgccagcggcttcacctttagcagctacgccatgagctgggtccgacaggctcctggcaaaggactggaatgggtgtccgtgatctctggctctggcggcagacccaattacgccgattctgtgaagggcagattcaccatcagccgggacaacagcaagaacaccctgtacctccagatgaacagcctgcgcgacgaggataccgccgtgtactattgtgccaaggtggactacagcaactacctgttcttcgactactggggccagggcaccctggtcacagtttctagcacgcgtgagcagaaactgatctcggaagaggatgggagcggcagccagcctcacaccaagcccagcgtgttcgtgatgaagaacggcaccaacgtggcctgcctcgtgaaagagttctaccccaaggacatcaggatcaacctggtgtccagcaagaagatcaccgagttcgaccccgccatcgtgatctcccccagcggcaagtacaacgccgtgaagctggggaagtacgaggacagcaacagcgtgacctgctccgtgcagcacgacaacaagaccgtgcacagcaccgactttgaagtgaaaaccgactccaccgaccacgtgaagcccaaagagacagagaacaccaagcagcccagcaagagctgccacaagcccaaggccatcgtgcacaccgagaaagtgaacatgatgagcctgaccgtgctgggcctgcggatgctgttcgccaaaaccgtggccgtgaacttcctgctgaccgccaagctgttcttcctccgcgccaagagaagcggatctggcgtgaagcagaccctgaatttcgacctgctgaagctggctggcgacgtggaatccaacccaggcccttctagaggccatatgaccgagtacaagcccacggtgcgcctcgccacccgcgacgacgtccccagggccgtacgcaccctcgccgccgcgttcgccgactaccccgccacgcgccacaccgtcgatccggaccgccacatcgagcgggtcaccgagctgcaagaactcttcctcacgcgcgtcgggctcgacatcggcaaggtgtgggtcgcggacgacggcgccgcggtggcggtctggaccacgccggagagcgtcgaagcgggggcggtgttcgccgagatcggcccgcgcatggccgagttgagcggttcccggctggccgcgcagcaacagatggaaggcctcctggcgccgcaccggcccaaggagcccgcgtggttcctggccaccgtcggcgtctcgcccgaccaccagggcaagggtctgggcagcgccgtcgtgctccccggagtggaggcggccgagcgcgccggggtgcccgccttcctggagacctccgcgccccgcaacctccccttctacgagcggctcggcttcaccgtcaccgccgacgtcgaggtgcccgaaggaccgcgcacctggtgcatgacccgcaagcccggtgcctga

SEQ ID NO: 19959 - DNA, 3096 bp, synthetic construct
  source 1..3096: mol_type = other DNA
atggccttaccagtgaccgccttgctcctgccgctggccttgctgctccacgccgccaggccggaaatcgtgctgacacagagccccggcacactgtcactttctccaggcgaaggcgctaccctgtcttgtagagctggacagtctgtgcggagcagctacctcggatggtatcagcagaagcctggacaggcccctcggctgttgatctacggtgcttctagcagagccacaggcatccccgatagattttctggcagcggctccggcaccgacttcaccctgacaatcagcagactggaacccgaggacttcgccgtgtattactgccagcagtacggctacagccctcctacatttggcggaggcaccaagctggaaatcaagggacagcctaaggccaatcctaccgtgacactgttccctccaagcagcgaagaactccaggccaacaaggccacacttgtgtgcctgatctccgacttctaccctggggctgtgacagtggcttggaaggccgatggatctcctgtgaaagccggcgtggaaaccaccaagccatccaagcagagcaacaacaaatacgccgccagctcctacctgagcctgacacctgagcagtggaagtcccacagatcctacagctgccaagtgacccacgaaggcagcaccgtggaaaagacagtggcccctacagagtgcagcggatcccagagcttcggcctgctggaccccaagctgtgctacctgctggatggcatcctgttcatctacggcgtgatcctgaccgccctgttcctgagagtgaagttcagcagaagcgccgacgcccctgcctaccagcagggacagaaccaactgtacaacgagctgaacctgggcagacgggaagagtacgacgtgctggacaagcggagaggcagggaccctgagatgggcggaaagccccagcggagaaagaacccccaggaaggactgtataacgaactccagaaagacaagatggccgaagcctacagcgagatcggcatgaagggcgagcggagaagaggcaagggccacgatggcctgtaccagggcctgagcaccgccaccaaggacacctatgacgccctgcacatgcaggccctgcctccaagaagggccaagcgatctggatctggagcaacaaacttctcactactcaaacaagcaggtgacgtggaggagaatcccgggcctactagtatggactggatttggcgcatccttttccttgtcggcgctgctaccggcgcgcattccttcgaagaggttcagctgcttgagtctggcggaggactggttcaacctggcggaagcctgagactgtcttgtgccgccagcggcttcacctttagcagctacgccatgagctgggtccgacaggctcctggcaaaggactggaatgggtgtccgtgatctctggctctggcggcagacccaattacgccgattctgtgaagggcagattcaccatcagccgggacaacagcaagaacaccctgtacctccagatgaacagcctgcgcgacgaggataccgccgtgtactattgtgccaaggtggactacagcaactacctgttcttcgactactggggccagggcaccctggtcacagtttctagcgcctctacaaagggaccctccgtgtttcctctggctcccagcagcaagtctacaagcggaggaacagccgctctgggctgcctggtcaaggattactttcccgagcctgtgaccgtgtcctggaatagcggagcactgacaagcggcgtgcacacctttccagccgtgctgcaaagcagcggcctgtactctctgagcagcgtggtcacagtgcctagctctagcctgggcacccagacctacatctgcaatgtgaaccacaagcctagcaacaccaaggtggacaagagagtggaacccaagagctgtggtacccagagttttgggttgttggaccctaaattgtgctatctgttggacggaatcctgttcatttacggagtgatcctgaccgcattgttcctgcgggttaagttttccagatccgcagacgcacccgcttaccaacaagggcagaaccaactctacaatgaacttaatttggggcggagggaagagtacgacgttctggacaaaaggaggggacgagatcccgagatgggcggaaagcctcagcgaaggaagaatccgcaagaggggctttataacgaactccagaaagataaaatggcagaagcctatagtgagattgggatgaagggagaaaggaggaggggtaaaggtcacgatgggttgtaccaaggattgagcacagccactaaagatacctatgatgcgctccacatgcaggccctgccgccaagacgcgccaagagaagcggatctggcgtgaagcagaccctgaatttcgacctgctgaagctggctggcgacgtggaatccaacccaggcccttctagaggccatatgaccgagtacaagcccacggtgcgcctcgccacccgcgacgacgtccccagggccgtacgcaccctcgccgccgcgttcgccgactaccccgccacgcgccacaccgtcgatccggaccgccacatcgagcgggtcaccgagctgcaagaactcttcctcacgcgcgtcgggctcgacatcggcaaggtgtgggtcgcggacgacggcgccgcggtggcggtctggaccacgccggagagcgtcgaagcgggggcggtgttcgccgagatcggcccgcgcatggccgagttgagcggttcccggctggccgcgcagcaacagatggaaggcctcctggcgccgcaccggcccaaggagcccgcgtggttcctggccaccgtcggcgtctcgcccgaccaccagggcaagggtctgggcagcgccgtcgtgctccccggagtggaggcggccgagcgcgccggggtgcccgccttcctggagacctccgcgccccgcaacctccccttctacgagcggctcggcttcaccgtcaccgccgacgtcgaggtgcccgaaggaccgcgcacctggtgcatgacccgcaagcccggtgcctga

SEQ ID NO: 19960 - DNA, 2451 bp, synthetic construct
  source 1..2451: mol_type = other DNA
atggccttaccagtgaccgccttgctcctgccgctggccttgctgctccacgccgccaggccggaaatcgtgctgacacagagccccggcacactgtcactttctccaggcgaaggcgctaccctgtcttgtagagctggacagtctgtgcggagcagctacctcggatggtatcagcagaagcctggacaggcccctcggctgttgatctacggtgcttctagcagagccacaggcatccccgatagattttctggcagcggctccggcaccgacttcaccctgacaatcagcagactggaacccgaggacttcgccgtgtattactgccagcagtacggctacagccctcctacatttggcggaggcaccaagctggaaatcaagctcgaggacctgaagaacgtgttcccacctgaggtggccgtgttcgagcctagcgaggccgagatcagccacacccagaaagccaccctcgtgtgcctggctaccggcttctaccccgaccatgtggaactgtcttggtgggtcaacggcaaagaggtgcacagcggcgtgtctaccgacccccagccactgaaagaacagcccgccctgaacgacagccggtactgcctgagcagcagactgagagtgtccgccaccttctggcagaacccccggaaccacttcagatgccaggtgcagttctacggcctgagcgagaacgacgagtggacccaggacagagccaagcccgtgacccagatcgtgtctgccgaagcctggggcagagccgattgcggatcccagagcttcggcctgctggaccccaagctgtgctacctgctggatggcatcctgttcatctacggcgtgatcctgaccgccctgttcctgagagtgaagttcagcagaagcgccgacgcccctgcctaccagcagggacagaaccaactgtacaacgagctgaacctgggcagacgggaagagtacgacgtgctggacaagcggagaggcagggaccctgagatgggcggaaagccccagcggagaaagaacccccaggaaggactgtataacgaactccagaaagacaagatggccgaagcctacagcgagatcggcatgaagggcgagcggagaagaggcaagggccacgatggcctgtaccagggcctgagcaccgccaccaaggacacctatgacgccctgcacatgcaggccctgcctccaagaagggccaagcgatctggatctggagcaacaaacttctcactactcaaacaagcaggtgacgtggaggagaatcccgggcctactagtatggactggatttggcgcatccttttccttgtcggcgctgctaccggcgcgcattccttcgaagaggttcagctgcttgagtctggcggaggactggttcaacctggcggaagcctgagactgtcttgtgccgccagcggcttcacctttagcagctacgccatgagctgggtccgacaggctcctggcaaaggactggaatgggtgtccgtgatctctggctctggcggcagacccaattacgccgattctgtgaagggcagattcaccatcagccgggacaacagcaagaacaccctgtacctccagatgaacagcctgcgcgacgaggataccgccgtgtactattgtgccaaggtggactacagcaactacctgttcttcgactactggggccagggcaccctggtcacagtttctagcacgcgtatccagaaccctgatcctgccgtgtaccagctgcgggatagcaagagcagcgacaagagcgtgtgtctgttcaccgacttcgacagccagaccaacgtgtcccagagcaaggactccgacgtgtacatcaccgataagaccgtgctggacatgcggagcatggacttcaagagcaactccgccgtggcctggtccaacaagtccgatttcgcctgcgccaacgccttcaacaacagcattatccccgaggacacattcttcccaagccccgagagcagctgcggtacccagagttttgggttgttggaccctaaattgtgctatctgttggacggaatcctgttcatttacggagtgatcctgaccgcattgttcctgcgggttaagttttccagatccgcagacgcacccgcttaccaacaagggcagaaccaactctacaatgaacttaatttggggcggagggaagagtacgacgttctggacaaaaggaggggacgagatcccgagatgggcggaaagcctcagcgaaggaagaatccgcaagaggggctttataacgaactccagaaagataaaatggcagaagcctatagtgagattgggatgaagggagaaaggaggaggggtaaaggtcacgatgggttgtaccaaggattgagcacagccactaaagatacctatgatgcgctccacatgcaggccctgccgccaaga

SEQ ID NO: 19961 - DNA, 2451 bp, synthetic construct
  source 1..2451: mol_type = other DNA
atggccttaccagtgaccgccttgctcctgccgctggccttgctgctccacgccgccaggccggaaatcgtgctgacacagagccccggcacactgtcactttctccaggcgaaggcgctaccctgtcttgtagagctggacagtctgtgcggagcagctacctcggatggtatcagcagaagcctggacaggcccctcggctgttgatctacggtgcttctagcagagccacaggcatccccgatagattttctggcagcggctccggcaccgacttcaccctgacaatcagcagactggaacccgaggacttcgccgtgtattactgccagcagtacggctacagccctcctacatttggcggaggcaccaagctggaaatcaagctcgaggacctgaagaacgtgttcccacctgaggtggccgtgttcgagcctagcaaggccgagatcgcccacacccagaaagccaccctcgtgtgcctggctaccggcttctaccccgaccatgtggaactgtcttggtgggtcaacggcaaagaggtgcacagcggcgtgtgtaccgacccccagccactgaaagaacagcccgccctgaacgacagccggtactgcctgagcagcagactgagagtgtccgccaccttctggcagaacccccggaaccacttcagatgccaggtgcagttctacggcctgagcgagaacgacgagtggacccaggacagagccaagcccgtgacccagatcgtgtctgccgaagcctggggcagagccgattgcggatcccagagcttcggcctgctggaccccaagctgtgctacctgctggatggcatcctgttcatctacggcgtgatcctgaccgccctgttcctgagagtgaagttcagcagaagcgccgacgcccctgcctaccagcagggacagaaccaactgtacaacgagctgaacctgggcagacgggaagagtacgacgtgctggacaagcggagaggcagggaccctgagatgggcggaaagccccagcggagaaagaacccccaggaaggactgtataacgaactccagaaagacaagatggccgaagcctacagcgagatcggcatgaagggcgagcggagaagaggcaagggccacgatggcctgtaccagggcctgagcaccgccaccaaggacacctatgacgccctgcacatgcaggccctgcctccaagaagggccaagcgatctggatctggagcaacaaacttctcactactcaaacaagcaggtgacgtggaggagaatcccgggcctactagtatggactggatttggcgcatccttttccttgtcggcgctgctaccggcgcgcattccttcgaagaggttcagctgcttgagtctggcggaggactggttcaacctggcggaagcctgagactgtcttgtgccgccagcggcttcacctttagcagctacgccatgagctgggtccgacaggctcctggcaaaggactggaatgggtgtccgtgatctctggctctggcggcagacccaattacgccgattctgtgaagggcagattcaccatcagccgggacaacagcaagaacaccctgtacctccagatgaacagcctgcgcgacgaggataccgccgtgtactattgtgccaaggtggactacagcaactacctgttcttcgactactggggccagggcaccctggtcacagtttctagcacgcgtatccagaaccctgatcctgccgtgtaccagctgcgggatagcaagagcagcgacaagagcgtgtgtctgttcaccgacttcgacagccagaccaacgtgtcccagagcaaggactccgacgtgtacatcaccgataagtgcgtgctggacatgcggagcatggacttcaagagcaactccgccgtggcctggtccaacaagtccgatttcgcctgcgccaacgccttcaacaacagcattatccccgaggacacattcttcccaagcagcgacgtgccctgcggtacccagagttttgggttgttggaccctaaattgtgctatctgttggacggaatcctgttcatttacggagtgatcctgaccgcattgttcctgcgggttaagttttccagatccgcagacgcacccgcttaccaacaagggcagaaccaactctacaatgaacttaatttggggcggagggaagagtacgacgttctggacaaaaggaggggacgagatcccgagatgggcggaaagcctcagcgaaggaagaatccgcaagaggggctttataacgaactccagaaagataaaatggcagaagcctatagtgagattgggatgaagggagaaaggaggaggggtaaaggtcacgatgggttgtaccaaggattgagcacagccactaaagatacctatgatgcgctccacatgcaggccctgccgccaaga

SEQ ID NO: 19962 - DNA, 2664 bp, synthetic construct
  source 1..2664: mol_type = other DNA
atggccttaccagtgaccgccttgctcctgccgctggccttgctgctccacgccgccaggccggaaatcgtgctgacacagagccccggcacactgtcactttctccaggcgaaggcgctaccctgtcttgtagagctggacagtctgtgcggagcagctacctcggatggtatcagcagaagcctggacaggcccctcggctgttgatctacggtgcttctagcagagccacaggcatccccgatagattttctggcagcggctccggcaccgacttcaccctgacaatcagcagactggaacccgaggacttcgccgtgtattactgccagcagtacggctacagccctcctacatttggcggaggcaccaagctggaaatcaagctcgaggggaaaccaattcccaaccctcttctgggactggattcaaccggcagcggcgaggacctgaagaacgtgttcccacctgaggtggccgtgttcgagcctagcgaggccgagatcagccacacccagaaagccaccctcgtgtgcctggctaccggcttctaccccgaccatgtggaactgtcttggtgggtcaacggcaaagaggtgcacagcggcgtgtctaccgacccccagccactgaaagaacagcccgccctgaacgacagccggtactgcctgagcagcagactgagagtgtccgccaccttctggcagaacccccggaaccacttcagatgccaggtgcagttctacggcctgagcgagaacgacgagtggacccaggacagagccaagcccgtgacccagatcgtgtctgccgaagcctggggcagagccgattgcggatcccagagcttcggcctgctggaccccaagctgtgctacctgctggatggcatcctgttcatctacggcgtgatcctgaccgccctgttcctgagagtgaagttcagcagaagcgccgacgcccctgcctaccagcagggacagaaccaactgtacaacgagctgaacctgggcagacgggaagagtacgacgtgctggacaagcggagaggcagggaccctgagatgggcggaaagccccagcggagaaagaacccccaggaaggactgtataacgaactccagaaagacaagatggccgaagcctacagcgagatcggcatgaagggcgagcggagaagaggcaagggccacgatggcctgtaccagggcctgagcaccgccaccaaggacacctatgacgccctgcacatgcaggccctgcctccaagaagggccaagcgatctggatctggagcaacaaacttctcactactcaaacaagcaggtgacgtggaggagaatcccgggcctactagtatggactggatttggcgcatccttttccttgtcggcgctgctaccggcgcgcattccttcgaagaggttcagctgcttgagtctggcggaggactggttcaacctggcggaagcctgagactgtcttgtgccgccagcggcttcacctttagcagctacgccatgagctgggtccgacaggctcctggcaaaggactggaatgggtgtccgtgatctctggctctggcggcagacccaattacgccgattctgtgaagggcagattcaccatcagccgggacaacagcaagaacaccctgtacctccagatgaacagcctgcgcgacgaggataccgccgtgtactattgtgccaaggtggactacagcaactacctgttcttcgactactggggccagggcaccctggtcacagtttctagcacgcgtgagcagaaactgatctcggaagaggatgggagcggcatccagaaccctgatcctgccgtgtaccagctgcgggatagcaagagcagcgacaagagcgtgtgtctgttcaccgacttcgacagccagaccaacgtgtcccagagcaaggactccgacgtgtacatcaccgataagaccgtgctggacatgcggagcatggacttcaagagcaactccgccgtggcctggtccaacaagtccgatttcgcctgcgccaacgccttcaacaacagcattatccccgaggacacattcttcccaagccccgagagcagctgcggtacccagagttttgggttgttggaccctaaattgtgctatctgttggacggaatcctgttcatttacggagtgatcctgaccgcattgttcctgaggagcaagcggtcacggctgctccacagcgattacatgaatatgacaccacgaagaccgggtcctactcgcaaacactaccaaccctacgcacctccccgcgactttgcagcgtaccgatctcgggttaagttttccagatccgcagacgcacccgcttaccaacaagggcagaaccaactctacaatgaacttaatttggggcggagggaagagtacgacgttctggacaaaaggaggggacgagatcccgagatgggcggaaagcctcagcgaaggaagaatccgcaagaggggctttataacgaactccagaaagataaaatggcagaagcctatagtgagattgggatgaagggagaaaggaggaggggtaaaggtcacgatgggttgtaccaaggattgagcacagccactaaagatacctatgatgcgctccacatgcaggccctgccgccaaga

SEQ ID NO: 19963 - DNA, 2787 bp, synthetic construct
  source 1..2787: mol_type = other DNA
atggccttaccagtgaccgccttgctcctgccgctggccttgctgctccacgccgccaggccggaaatcgtgctgacacagagccccggcacactgtcactttctccaggcgaaggcgctaccctgtcttgtagagctggacagtctgtgcggagcagctacctcggatggtatcagcagaagcctggacaggcccctcggctgttgatctacggtgcttctagcagagccacaggcatccccgatagattttctggcagcggctccggcaccgacttcaccctgacaatcagcagactggaacccgaggacttcgccgtgtattactgccagcagtacggctacagccctcctacatttggcggaggcaccaagctggaaatcaagctcgaggggaaaccaattcccaaccctcttctgggactggattcaaccggcagcggcgaggacctgaagaacgtgttcccacctgaggtggccgtgttcgagcctagcgaggccgagatcagccacacccagaaagccaccctcgtgtgcctggctaccggcttctaccccgaccatgtggaactgtcttggtgggtcaacggcaaagaggtgcacagcggcgtgtctaccgacccccagccactgaaagaacagcccgccctgaacgacagccggtactgcctgagcagcagactgagagtgtccgccaccttctggcagaacccccggaaccacttcagatgccaggtgcagttctacggcctgagcgagaacgacgagtggacccaggacagagccaagcccgtgacccagatcgtgtctgccgaagcctggggcagagccgattgcggatcccagagcttcggcctgctggaccccaagctgtgctacctgctggatggcatcctgttcatctacggcgtgatcctgaccgccctgttcctgaggagtaagaggagcaggctcctgcacagtgactacatgaacatgactccacgccgccccggacccacccgcaagcattaccagccctatgccccaccacgcgacttcgcagcctatcgctccagagtgaagttcagcagaagcgccgacgcccctgcctaccagcagggacagaaccaactgtacaacgagctgaacctgggcagacgggaagagtacgacgtgctggacaagcggagaggcagggaccctgagatgggcggaaagccccagcggagaaagaacccccaggaaggactgtataacgaactccagaaagacaagatggccgaagcctacagcgagatcggcatgaagggcgagcggagaagaggcaagggccacgatggcctgtaccagggcctgagcaccgccaccaaggacacctatgacgccctgcacatgcaggccctgcctccaagaagggccaagcgatctggatctggagcaacaaacttctcactactcaaacaagcaggtgacgtggaggagaatcccgggcctactagtatggactggatttggcgcatccttttccttgtcggcgctgctaccggcgcgcattccttcgaagaggttcagctgcttgagtctggcggaggactggttcaacctggcggaagcctgagactgtcttgtgccgccagcggcttcacctttagcagctacgccatgagctgggtccgacaggctcctggcaaaggactggaatgggtgtccgtgatctctggctctggcggcagacccaattacgccgattctgtgaagggcagattcaccatcagccgggacaacagcaagaacaccctgtacctccagatgaacagcctgcgcgacgaggataccgccgtgtactattgtgccaaggtggactacagcaactacctgttcttcgactactggggccagggcaccctggtcacagtttctagcacgcgtgagcagaaactgatctcggaagaggatgggagcggcatccagaaccctgatcctgccgtgtaccagctgcgggatagcaagagcagcgacaagagcgtgtgtctgttcaccgacttcgacagccagaccaacgtgtcccagagcaaggactccgacgtgtacatcaccgataagaccgtgctggacatgcggagcatggacttcaagagcaactccgccgtggcctggtccaacaagtccgatttcgcctgcgccaacgccttcaacaacagcattatccccgaggacacattcttcccaagccccgagagcagctgcggtacccagagttttgggttgttggaccctaaattgtgctatctgttggacggaatcctgttcatttacggagtgatcctgaccgcattgttcctgaggagcaagcggtcacggctgctccacagcgattacatgaatatgacaccacgaagaccgggtcctactcgcaaacactaccaaccctacgcacctccccgcgactttgcagcgtaccgatctcgggttaagttttccagatccgcagacgcacccgcttaccaacaagggcagaaccaactctacaatgaacttaatttggggcggagggaagagtacgacgttctggacaaaaggaggggacgagatcccgagatgggcggaaagcctcagcgaaggaagaatccgcaagaggggctttataacgaactccagaaagataaaatggcagaagcctatagtgagattgggatgaagggagaaaggaggaggggtaaaggtcacgatgggttgtaccaaggattgagcacagccactaaagatacctatgatgcgctccacatgcaggccctgccgccaaga

SEQ ID NO: 19964 - DNA, 2670 bp, synthetic construct
  source 1..2670: mol_type = other DNA
atggccttaccagtgaccgccttgctcctgccgctggccttgctgctccacgccgccaggccggaaatcgtgctgacacagagccccggcacactgtcactttctccaggcgaaggcgctaccctgtcttgtagagctggacagtctgtgcggagcagctacctcggatggtatcagcagaagcctggacaggcccctcggctgttgatctacggtgcttctagcagagccacaggcatccccgatagattttctggcagcggctccggcaccgacttcaccctgacaatcagcagactggaacccgaggacttcgccgtgtattactgccagcagtacggctacagccctcctacatttggcggaggcaccaagctggaaatcaagctcgaggggaaaccaattcccaaccctcttctgggactggattcaaccggcagcggcgaggacctgaagaacgtgttcccacctgaggtggccgtgttcgagcctagcgaggccgagatcagccacacccagaaagccaccctcgtgtgcctggctaccggcttctaccccgaccatgtggaactgtcttggtgggtcaacggcaaagaggtgcacagcggcgtgtctaccgacccccagccactgaaagaacagcccgccctgaacgacagccggtactgcctgagcagcagactgagagtgtccgccaccttctggcagaacccccggaaccacttcagatgccaggtgcagttctacggcctgagcgagaacgacgagtggacccaggacagagccaagcccgtgacccagatcgtgtctgccgaagcctggggcagagccgattgcggatcccagagcttcggcctgctggaccccaagctgtgctacctgctggatggcatcctgttcatctacggcgtgatcctgaccgccctgttcctgagagtgaagttcagcagaagcgccgacgcccctgcctaccagcagggacagaaccaactgtacaacgagctgaacctgggcagacgggaagagtacgacgtgctggacaagcggagaggcagggaccctgagatgggcggaaagccccagcggagaaagaacccccaggaaggactgtataacgaactccagaaagacaagatggccgaagcctacagcgagatcggcatgaagggcgagcggagaagaggcaagggccacgatggcctgtaccagggcctgagcaccgccaccaaggacacctatgacgccctgcacatgcaggccctgcctccaagaagggccaagcgatctggatctggagcaacaaacttctcactactcaaacaagcaggtgacgtggaggagaatcccgggcctactagtatggactggatttggcgcatccttttccttgtcggcgctgctaccggcgcgcattccttcgaagaggttcagctgcttgagtctggcggaggactggttcaacctggcggaagcctgagactgtcttgtgccgccagcggcttcacctttagcagctacgccatgagctgggtccgacaggctcctggcaaaggactggaatgggtgtccgtgatctctggctctggcggcagacccaattacgccgattctgtgaagggcagattcaccatcagccgggacaacagcaagaacaccctgtacctccagatgaacagcctgcgcgacgaggataccgccgtgtactattgtgccaaggtggactacagcaactacctgttcttcgactactggggccagggcaccctggtcacagtttctagcacgcgtgagcagaaactgatctcggaagaggatctggggagcggcatccagaaccctgatcctgccgtgtaccagctgcgggatagcaagagcagcgacaagagcgtgtgtctgttcaccgacttcgacagccagaccaacgtgtcccagagcaaggactccgacgtgtacatcaccgataagaccgtgctggacatgcggagcatggacttcaagagcaactccgccgtggcctggtccaacaagtccgatttcgcctgcgccaacgccttcaacaacagcattatccccgaggacacattcttcccaagccccgagagcagctgcggtacccagagttttgggttgttggaccctaaattgtgctatctgttggacggaatcctgttcatttacggagtgatcctgaccgcattgttcctgaagagaggccggaagaagctgctgtacatcttcaagcagcctttcatgcggcccgtgcagaccacccaggaagaggacggctgctcctgccggttccccgaggaagaagaaggcggctgcgagctgcgggttaagttttccagatccgcagacgcacccgcttaccaacaagggcagaaccaactctacaatgaacttaatttggggcggagggaagagtacgacgttctggacaaaaggaggggacgagatcccgagatgggcggaaagcctcagcgaaggaagaatccgcaagaggggctttataacgaactccagaaagataaaatggcagaagcctatagtgagattgggatgaagggagaaaggaggaggggtaaaggtcacgatgggttgtaccaaggattgagcacagccactaaagatacctatgatgcgctccacatgcaggccctgccgccaaga

SEQ ID NO: 19965 - DNA, 2796 bp, synthetic construct
  source 1..2796: mol_type = other DNA
atggccttaccagtgaccgccttgctcctgccgctggccttgctgctccacgccgccaggccggaaatcgtgctgacacagagccccggcacactgtcactttctccaggcgaaggcgctaccctgtcttgtagagctggacagtctgtgcggagcagctacctcggatggtatcagcagaagcctggacaggcccctcggctgttgatctacggtgcttctagcagagccacaggcatccccgatagattttctggcagcggctccggcaccgacttcaccctgacaatcagcagactggaacccgaggacttcgccgtgtattactgccagcagtacggctacagccctcctacatttggcggaggcaccaagctggaaatcaagctcgaggggaaaccaattcccaaccctcttctgggactggattcaaccggcagcggcgaggacctgaagaacgtgttcccacctgaggtggccgtgttcgagcctagcgaggccgagatcagccacacccagaaagccaccctcgtgtgcctggctaccggcttctaccccgaccatgtggaactgtcttggtgggtcaacggcaaagaggtgcacagcggcgtgtctaccgacccccagccactgaaagaacagcccgccctgaacgacagccggtactgcctgagcagcagactgagagtgtccgccaccttctggcagaacccccggaaccacttcagatgccaggtgcagttctacggcctgagcgagaacgacgagtggacccaggacagagccaagcccgtgacccagatcgtgtctgccgaagcctggggcagagccgattgcggatcccagagcttcggcctgctggaccccaagctgtgctacctgctggatggcatcctgttcatctacggcgtgatcctgaccgccctgttcctgaaacggggcagaaagaaactcctgtatatattcaaacaaccatttatgagaccagtacaaactactcaagaggaagatggctgtagctgccgatttccagaagaagaagaaggaggatgtgaactgagagtgaagttcagcagaagcgccgacgcccctgcctaccagcagggacagaaccaactgtacaacgagctgaacctgggcagacgggaagagtacgacgtgctggacaagcggagaggcagggaccctgagatgggcggaaagccccagcggagaaagaacccccaggaaggactgtataacgaactccagaaagacaagatggccgaagcctacagcgagatcggcatgaagggcgagcggagaagaggcaagggccacgatggcctgtaccagggcctgagcaccgccaccaaggacacctatgacgccctgcacatgcaggccctgcctccaagaagggccaagcgatctggatctggagcaacaaacttctcactactcaaacaagcaggtgacgtggaggagaatcccgggcctactagtatggactggatttggcgcatccttttccttgtcggcgctgctaccggcgcgcattccttcgaagaggttcagctgcttgagtctggcggaggactggttcaacctggcggaagcctgagactgtcttgtgccgccagcggcttcacctttagcagctacgccatgagctgggtccgacaggctcctggcaaaggactggaatgggtgtccgtgatctctggctctggcggcagacccaattacgccgattctgtgaagggcagattcaccatcagccgggacaacagcaagaacaccctgtacctccagatgaacagcctgcgcgacgaggataccgccgtgtactattgtgccaaggtggactacagcaactacctgttcttcgactactggggccagggcaccctggtcacagtttctagcacgcgtgagcagaaactgatctcggaagaggatctggggagcggcatccagaaccctgatcctgccgtgtaccagctgcgggatagcaagagcagcgacaagagcgtgtgtctgttcaccgacttcgacagccagaccaacgtgtcccagagcaaggactccgacgtgtacatcaccgataagaccgtgctggacatgcggagcatggacttcaagagcaactccgccgtggcctggtccaacaagtccgatttcgcctgcgccaacgccttcaacaacagcattatccccgaggacacattcttcccaagccccgagagcagctgcggtacccagagttttgggttgttggaccctaaattgtgctatctgttggacggaatcctgttcatttacggagtgatcctgaccgcattgttcctgaagagaggccggaagaagctgctgtacatcttcaagcagcctttcatgcggcccgtgcagaccacccaggaagaggacggctgctcctgccggttccccgaggaagaagaaggcggctgcgagctgcgggttaagttttccagatccgcagacgcacccgcttaccaacaagggcagaaccaactctacaatgaacttaatttggggcggagggaagagtacgacgttctggacaaaaggaggggacgagatcccgagatgggcggaaagcctcagcgaaggaagaatccgcaagaggggctttataacgaactccagaaagataaaatggcagaagcctatagtgagattgggatgaagggagaaaggaggaggggtaaaggtcacgatgggttgtaccaaggattgagcacagccactaaagatacctatgatgcgctccacatgcaggccctgccgccaaga

SEQ ID NO: 19966 - DNA, 2469 bp, synthetic construct
  source 1..2469: mol_type = other DNA
atggccttaccagtgaccgccttgctcctgccgctggccttgctgctccacgccgccaggccggaaatcgtgctgacacagagccccggcacactgtcactttctccaggcgaaggcgctaccctgtcttgtagagctggacagtctgtgcggagcagctacctcggatggtatcagcagaagcctggacaggcccctcggctgttgatctacggtgcttctagcagagccacaggcatccccgatagattttctggcagcggctccggcaccgacttcaccctgacaatcagcagactggaacccgaggacttcgccgtgtattactgccagcagtacggctacagccctcctacatttggcggaggcaccaagctggaaatcaagctcgagcagagcttcggcctgctggaccccaagctgtgctacctgctggatggcatcctgttcatctacggcgtgatcctgaccgccctgttcctgagagtgaagttcagcagaagcgccgacgcccctgcctaccagcagggacagaaccaactgtacaacgagctgaacctgggcagacgggaagagtacgacgtgctggacaagcggagaggcagggaccctgagatgggcggaaagccccagcggagaaagaacccccaggaaggactgtataacgaactccagaaagacaagatggccgaagcctacagcgagatcggcatgaagggcgagcggagaagaggcaagggccacgatggcctgtaccagggcctgagcaccgccaccaaggacacctatgacgccctgcacatgcaggccctgcctccaagaagggccaagcgatctggatctggagcaacaaacttctcactactcaaacaagcaggtgacgtggaggagaatcccgggcctactagtatggactggatttggcgcatccttttccttgtcggcgctgctaccggcgcgcattccttcgaagaggttcagctgcttgagtctggcggaggactggttcaacctggcggaagcctgagactgtcttgtgccgccagcggcttcacctttagcagctacgccatgagctgggtccgacaggctcctggcaaaggactggaatgggtgtccgtgatctctggctctggcggcagacccaattacgccgattctgtgaagggcagattcaccatcagccgggacaacagcaagaacaccctgtacctccagatgaacagcctgcgcgacgaggataccgccgtgtactattgtgccaaggtggactacagcaactacctgttcttcgactactggggccagggcaccctggtcacagtttctagcacgcgtcagagttttgggttgttggaccctaaattgtgctatctgttggacggaatcctgttcatttacggagtgatcctgaccgcattgttcctgcgggttaagttttccagatccgcagacgcacccgcttaccaacaagggcagaaccaactctacaatgaacttaatttggggcggagggaagagtacgacgttctggacaaaaggaggggacgagatcccgagatgggcggaaagcctcagcgaaggaagaatccgcaagaggggctttataacgaactccagaaagataaaatggcagaagcctatagtgagattgggatgaagggagaaaggaggaggggtaaaggtcacgatgggttgtaccaaggattgagcacagccactaaagatacctatgatgcgctccacatgcaggccctgccgccaagacgcgccaagagaagcggatctggcgtgaagcagaccctgaatttcgacctgctgaagctggctggcgacgtggaatccaacccaggcccttctagaggccatatgaccgagtacaagcccacggtgcgcctcgccacccgcgacgacgtccccagggccgtacgcaccctcgccgccgcgttcgccgactaccccgccacgcgccacaccgtcgatccggaccgccacatcgagcgggtcaccgagctgcaagaactcttcctcacgcgcgtcgggctcgacatcggcaaggtgtgggtcgcggacgacggcgccgcggtggcggtctggaccacgccggagagcgtcgaagcgggggcggtgttcgccgagatcggcccgcgcatggccgagttgagcggttcccggctggccgcgcagcaacagatggaaggcctcctggcgccgcaccggcccaaggagcccgcgtggttcctggccaccgtcggcgtctcgcccgaccaccagggcaagggtctgggcagcgccgtcgtgctccccggagtggaggcggccgagcgcgccggggtgcccgccttcctggagacctccgcgccccgcaacctccccttctacgagcggctcggcttcaccgtcaccgccgacgtcgaggtgcccgaaggaccgcgcacctggtgcatgacccgcaagcccggtgcctga

SEQ ID NO: 19967 - DNA, 1941 bp, synthetic construct
  source 1..1941: mol_type = other DNA
atggccttaccagtgaccgccttgctcctgccgctggccttgctgctccacgccgccaggccggaaatcgtgctgacacagagccccggcacactgtcactttctccaggcgaaggcgctaccctgtcttgtagagctggacagtctgtgcggagcagctacctcggatggtatcagcagaagcctggacaggcccctcggctgttgatctacggtgcttctagcagagccacaggcatccccgatagattttctggcagcggctccggcaccgacttcaccctgacaatcagcagactggaacccgaggacttcgccgtgtattactgccagcagtacggctacagccctcctacatttggcggaggcaccaagctggaaatcaagctcgagggacagcctaaggccaatcctaccgtgacactgttccctccaagcagcgaagaactccaggccaacaaggccacacttgtgtgcctgatctccgacttctaccctggggctgtgacagtggcttggaaggccgatggatctcctgtgaaagccggcgtggaaaccaccaagccatccaagcagagcaacaacaaatacgccgccagctcctacctgagcctgacacctgagcagtggaagtcccacagatcctacagctgccaagtgacccacgaaggcagcaccgtggaaaagacagtggcccctacagagtgcagccccatcaagaccgatgtgattacaatggaccccaaggacaactgctccaaggacgccaacgataccctgctgctccagctgaccaacaccagcgcctactacatgtacttgttgctgctgctgaagtccgtggtgtacttcgccatcatcacatgctgcctgctgcggagaaccgccttctgctgcaacggcgagaagtctagggccaagcgatctggatctggagcaacaaacttctcactactcaaacaagcaggtgacgtggaggagaatcccgggcctactagtatggactggatttggcgcatccttttccttgtcggcgctgctaccggcgcgcattccttcgaagaggttcagctgcttgagtctggcggaggactggttcaacctggcggaagcctgagactgtcttgtgccgccagcggcttcacctttagcagctacgccatgagctgggtccgacaggctcctggcaaaggactggaatgggtgtccgtgatctctggctctggcggcagacccaattacgccgattctgtgaagggcagattcaccatcagccgggacaacagcaagaacaccctgtacctccagatgaacagcctgcgcgacgaggataccgccgtgtactattgtgccaaggtggactacagcaactacctgttcttcgactactggggccagggcaccctggtcacagtttctagcacgcgtgcctctacaaagggaccctccgtgtttcctctggctcccagcagcaagtctacaagcggaggaacagccgctctgggctgcctggtcaaggattactttcccgagcctgtgaccgtgtcctggaatagcggagcactgacaagcggcgtgcacacctttccagccgtgctgcaaagcagcggcctgtactctctgagcagcgtggtcacagtgcctagctctagcctgggcacccagacctacatctgcaatgtgaaccacaagcctagcaacaccaaggtggacaagagagtggaacccaagagctgtgaagtgaaaaccgactccaccgaccacgtgaagcccaaagagacagagaacaccaagcagcccagcaagagctgccacaagcccaaggccatcgtgcacaccgagaaagtgaacatgatgagcctgaccgtgctgggcctgcggatgctgttcgccaaaaccgtggccgtgaacttcctgctgaccgccaagctgttcttcctc

SEQ ID NO: 19968 - DNA, 1875 bp, synthetic construct
  source 1..1875: mol_type = other DNA
atggccttaccagtgaccgccttgctcctgccgctggccttgctgctccacgccgccaggccggaaatcgtgctgacacagagccccggcacactgtcactttctccaggcgaaggcgctaccctgtcttgtagagctggacagtctgtgcggagcagctacctcggatggtatcagcagaagcctggacaggcccctcggctgttgatctacggtgcttctagcagagccacaggcatccccgatagattttctggcagcggctccggcaccgacttcaccctgacaatcagcagactggaacccgaggacttcgccgtgtattactgccagcagtacggctacagccctcctacatttggcggaggcaccaagctggaaatcaagctcgagggacagcctaaggccaatcctaccgtgacactgttccctccaagcagcgaagaactccaggccaacaaggccacacttgtgtgcctgatctccgacttctaccctggggctgtgacagtggcttggaaggccgatggatctcctgtgaaagccggcgtggaaaccaccaagccatccaagcagagcaacaacaaatacgccgccagctcctacctgagcctgacacctgagcagtggaagtcccacagatcctacagctgccaagtgacccacgaaggcagcaccgtggaaaagacagtggcccctacagagtgcagcggcagagccgattgcggcatcaccagcgccagctaccaccagggcgtgctgagcgccaccatcctgtacgagatcctgctgggcaaggccaccctgtacgccgtgctggtgtctgccctggtgctgatggctatggtcaagcggaaggacagccggggaagggccaagcgatctggatctggagcaacaaacttctcactactcaaacaagcaggtgacgtggaggagaatcccgggcctactagtatggactggatttggcgcatccttttccttgtcggcgctgctaccggcgcgcattccttcgaagaggttcagctgcttgagtctggcggaggactggttcaacctggcggaagcctgagactgtcttgtgccgccagcggcttcacctttagcagctacgccatgagctgggtccgacaggctcctggcaaaggactggaatgggtgtccgtgatctctggctctggcggcagacccaattacgccgattctgtgaagggcagattcaccatcagccgggacaacagcaagaacaccctgtacctccagatgaacagcctgcgcgacgaggataccgccgtgtactattgtgccaaggtggactacagcaactacctgttcttcgactactggggccagggcaccctggtcacagtttctagcacgcgtgcctctacaaagggaccctccgtgtttcctctggctcccagcagcaagtctacaagcggaggaacagccgctctgggctgcctggtcaaggattactttcccgagcctgtgaccgtgtcctggaatagcggagcactgacaagcggcgtgcacacctttccagccgtgctgcaaagcagcggcctgtactctctgagcagcgtggtcacagtgcctagctctagcctgggcacccagacctacatctgcaatgtgaaccacaagcctagcaacaccaaggtggacaagagagtggaacccaagagctgtatccccgaggacacattcttcccaagcagcgacgtgccctgcgacgtgaagctggtggaaaagagcttcgagacagacaccaacctgaacttccagaacctgagcgtgatcggcttcagaatcctgctgctgaaagtggccggctttaacctgctgatgaccctgcggctgtggtccagc

SEQ ID NO: 19969 - DNA, 1875 bp, synthetic construct
  source 1..1875: mol_type = other DNA
atggccttaccagtgaccgccttgctcctgccgctggccttgctgctccacgccgccaggccggaaatcgtgctgacacagagccccggcacactgtcactttctccaggcgaaggcgctaccctgtcttgtagagctggacagtctgtgcggagcagctacctcggatggtatcagcagaagcctggacaggcccctcggctgttgatctacggtgcttctagcagagccacaggcatccccgatagattttctggcagcggctccggcaccgacttcaccctgacaatcagcagactggaacccgaggacttcgccgtgtattactgccagcagtacggctacagccctcctacatttggcggaggcaccaagctggaaatcaagctcgagggacagcctaaggccaatcctaccgtgacactgttccctccaagcagcgaagaactccaggccaacaaggccacacttgtgtgcctgatctccgacttctaccctggggctgtgacagtggcttggaaggccgatggatctcctgtgaaagccggcgtggaaaccaccaagccatccaagcagagcaacaacaaatacgccgccagctcctacctgagcctgacacctgagcagtggaagtcccacagatcctacagctgccaagtgacccacgaaggcagcaccgtggaaaagacagtggcccctacagagtgcagcggcagagccgattgcggctttaccagcgagagctaccagcagggcgtgctgagcgccaccatcctgtacgagatcctgctgggcaaggccaccctgtacgccgtgctggtgtctgccctggtgctgatggctatggtcaagcggaaggacagccggggaagggccaagcgatctggatctggagcaacaaacttctcactactcaaacaagcaggtgacgtggaggagaatcccgggcctactagtatggactggatttggcgcatccttttccttgtcggcgctgctaccggcgcgcattccttcgaagaggttcagctgcttgagtctggcggaggactggttcaacctggcggaagcctgagactgtcttgtgccgccagcggcttcacctttagcagctacgccatgagctgggtccgacaggctcctggcaaaggactggaatgggtgtccgtgatctctggctctggcggcagacccaattacgccgattctgtgaagggcagattcaccatcagccgggacaacagcaagaacaccctgtacctccagatgaacagcctgcgcgacgaggataccgccgtgtactattgtgccaaggtggactacagcaactacctgttcttcgactactggggccagggcaccctggtcacagtttctagcacgcgtgcctctacaaagggaccctccgtgtttcctctggctcccagcagcaagtctacaagcggaggaacagccgctctgggctgcctggtcaaggattactttcccgagcctgtgaccgtgtcctggaatagcggagcactgacaagcggcgtgcacacctttccagccgtgctgcaaagcagcggcctgtactctctgagcagcgtggtcacagtgcctagctctagcctgggcacccagacctacatctgcaatgtgaaccacaagcctagcaacaccaaggtggacaagagagtggaacccaagagctgtatccccgaggacacattcttcccaagccccgagagcagctgcgacgtgaagctggtggaaaagagcttcgagacagacaccaacctgaacttccagaacctgagcgtgatcggcttcagaatcctgctgctgaaagtggccggctttaacctgctgatgaccctgcggctgtggtccagc

SEQ ID NO: 19970 - DNA, 1353 bp, synthetic construct
  source 1..1353: mol_type = other DNA
atggccttaccagtgaccgccttgctcctgccgctggccttgctgctccacgccgccaggccggaaatcgtgctgacacagagccccggcacactgtcactttctccaggcgaaggcgctaccctgtcttgtagagctggacagtctgtgcggagcagctacctcggatggtatcagcagaagcctggacaggcccctcggctgttgatctacggtgcttctagcagagccacaggcatccccgatagattttctggcagcggctccggcaccgacttcaccctgacaatcagcagactggaacccgaggacttcgccgtgtattactgccagcagtacggctacagccctcctacatttggcggaggcaccaagctggaaatcaagggcggaggcggaagtggaggcggaggatctggcggcggaggctctgaggttcagctgcttgagtctggcggaggactggttcaacctggcggaagcctgagactgtcttgtgccgccagcggcttcacctttagcagctacgccatgagctgggtccgacaggctcctggcaaaggactggaatgggtgtccgtgatctctggctctggcggcagacccaattacgccgattctgtgaagggcagattcaccatcagccgggacaacagcaagaacaccctgtacctccagatgaacagcctgcgcgacgaggataccgccgtgtactattgtgccaaggtggactacagcaactacctgttcttcgactactggggccagggcaccctggtcacagtttctagcacgcgtgacggtaacgaggagatgggaggaatcactcaaaccccttacaaagtctcaatttcaggaacaactgttatccttacatgtccccagtatcctggcagcgagatcctttggcagcataacgacaagaatatagggggagatgaagacgataagaatatcggatctgacgaggatcacttgagcctgaaagagttctccgagcttgaacaaagcggatattatgtgtgctatccgcgcgggtcaaagccggaagacgctaacttttacctttatctccgagccagagtgtgcgaaaattgcatggaaatggacgttatgtccgttgctacaatagttatcgtagatatatgcatcacgggtggactgcttctgctggtttattattggtccaagaatagaaaggccaaagctaaacccgtgaccagaggcgctggcgcaggcggaaggcaaaggggacaaaacaaagaacggccaccaccagtgccaaatccagattatgagcctattcggaaaggacagagggacctgtactctggcctgaatcagagaagaatc

SEQ ID NO: 19971 - DNA, 1248 bp, synthetic construct
  source 1..1248: mol_type = other DNA
atggccttaccagtgaccgccttgctcctgccgctggccttgctgctccacgccgccaggccggaaatcgtgctgacacagagccccggcacactgtcactttctccaggcgaaggcgctaccctgtcttgtagagctggacagtctgtgcggagcagctacctcggatggtatcagcagaagcctggacaggcccctcggctgttgatctacggtgcttctagcagagccacaggcatccccgatagattttctggcagcggctccggcaccgacttcaccctgacaatcagcagactggaacccgaggacttcgccgtgtattactgccagcagtacggctacagccctcctacatttggcggaggcaccaagctggaaatcaagggcggaggcggaagtggaggcggaggatctggcggcggaggctctgaggttcagctgcttgagtctggcggaggactggttcaacctggcggaagcctgagactgtcttgtgccgccagcggcttcacctttagcagctacgccatgagctgggtccgacaggctcctggcaaaggactggaatgggtgtccgtgatctctggctctggcggcagacccaattacgccgattctgtgaagggcagattcaccatcagccgggacaacagcaagaacaccctgtacctccagatgaacagcctgcgcgacgaggataccgccgtgtactattgtgccaaggtggactacagcaactacctgttcttcgactactggggccagggcaccctggtcacagtttctagcacgcgtttcaagatccccatcgaggaactggaagatcgggtgttcgtgaactgcaacacctctatcacctgggtggaaggcaccgtgggaacactgctgagcgacatcaccagactggacctcggcaagcggattctggaccctcggggcatctacagatgcaacggcaccgacatctacaaggacaaagaaagcaccgtgcaggtccactacagaatgtgccagtcctgcgtggaactggaccctgctacagtggccggcatcatcgtgaccgatgtgatcgctactctgctgctggctctgggagtgttctgcttcgccggacacgaaacaggcagactgtctggcgctgccgatacacaggccctgctgagaaacgaccaagtgtatcagcccctgcgcgacagagatgatgcccagtattctcacctcggcggcaactgggctagaaacaag

SEQ ID NO: 19972 - DNA, 1278 bp, synthetic construct
  source 1..1278: mol_type = other DNA
atggccttaccagtgaccgccttgctcctgccgctggccttgctgctccacgccgccaggccggaaatcgtgctgacacagagccccggcacactgtcactttctccaggcgaaggcgctaccctgtcttgtagagctggacagtctgtgcggagcagctacctcggatggtatcagcagaagcctggacaggcccctcggctgttgatctacggtgcttctagcagagccacaggcatccccgatagattttctggcagcggctccggcaccgacttcaccctgacaatcagcagactggaacccgaggacttcgccgtgtattactgccagcagtacggctacagccctcctacatttggcggaggcaccaagctggaaatcaagggcggaggcggaagtggaggcggaggatctggcggcggaggctctgaggttcagctgcttgagtctggcggaggactggttcaacctggcggaagcctgagactgtcttgtgccgccagcggcttcacctttagcagctacgccatgagctgggtccgacaggctcctggcaaaggactggaatgggtgtccgtgatctctggctctggcggcagacccaattacgccgattctgtgaagggcagattcaccatcagccgggacaacagcaagaacaccctgtacctccagatgaacagcctgcgcgacgaggataccgccgtgtactattgtgccaaggtggactacagcaactacctgttcttcgactactggggccagggcaccctggtcacagtttctagcacgcgtcagagcatcaagggcaaccacctggtcaaggtgtacgactaccaagaggacggcagcgtgctgctgacatgtgatgccgaggccaagaacatcacctggtttaaggacggcaagatgatcggcttcctgaccgaggacaagaagaagtggaacctgggcagcaacgctaaggaccccagaggcatgtatcagtgcaagggcagccagaacaagagcaagcccctccaggtgtactaccggatgtgccagaactgcatcgagctgaacgccgctaccatcagcggctttctgttcgccgagatcgtgtccatcttcgtgctggccgtgggcgtgtactttatcgctggacaggatggcgtgcggcagagcagagcttccgataagcaaaccctgctgcctaacgaccagctgtaccagcctctgaaggacagagaggacgaccagtacagccacctccagggcaatcagctgagaagaaac

SEQ ID NO: 19973 - DNA, 1227 bp, synthetic construct
  source 1..1227: mol_type = other DNA
atggccttaccagtgaccgccttgctcctgccgctggccttgctgctccacgccgccaggccggaaatcgtgctgacacagagccccggcacactgtcactttctccaggcgaaggcgctaccctgtcttgtagagctggacagtctgtgcggagcagctacctcggatggtatcagcagaagcctggacaggcccctcggctgttgatctacggtgcttctagcagagccacaggcatccccgatagattttctggcagcggctccggcaccgacttcaccctgacaatcagcagactggaacccgaggacttcgccgtgtattactgccagcagtacggctacagccctcctacatttggcggaggcaccaagctggaaatcaagggcggaggcggaagtggaggcggaggatctggcggcggaggctctgaggttcagctgcttgagtctggcggaggactggttcaacctggcggaagcctgagactgtcttgtgccgccagcggcttcacctttagcagctacgccatgagctgggtccgacaggctcctggcaaaggactggaatgggtgtccgtgatctctggctctggcggcagacccaattacgccgattctgtgaagggcagattcaccatcagccgggacaacagcaagaacaccctgtacctccagatgaacagcctgcgcgacgaggataccgccgtgtactattgtgccaaggtggactacagcaactacctgttcttcgactactggggccagggcaccctggtcacagtttctagcacgcgtcagagttttgggttgttggaccctaaattgtgctatctgttggacggaatcctgttcatttacggagtgatcctgaccgcattgttcctgcgggttaagttttccagatccgcagacgcacccgcttaccaacaagggcagaaccaactctacaatgaacttaatttggggcggagggaagagtacgacgttctggacaaaaggaggggacgagatcccgagatgggcggaaagcctcagcgaaggaagaatccgcaagaggggctttataacgaactccagaaagataaaatggcagaagcctatagtgagattgggatgaagggagaaaggaggaggggtaaaggtcacgatgggttgtaccaaggattgagcacagccactaaagatacctatgatgcgctccacatgcaggccctgccgccaaga

SEQ ID NO: 19974 - DNA, 1353 bp, synthetic construct
  source 1..1353: mol_type = other DNA
atggccttaccagtgaccgccttgctcctgccgctggccttgctgctccacgccgccaggccggaggttcagctgcttgagtctggcggaggactggttcaacctggcggaagcctgagactgtcttgtgccgccagcggcttcacctttagcagctacgccatgagctgggtccgacaggctcctggcaaaggactggaatgggtgtccgtgatctctggctctggcggcagacccaattacgccgattctgtgaagggcagattcaccatcagccgggacaacagcaagaacaccctgtacctccagatgaacagcctgcgcgacgaggataccgccgtgtactattgtgccaaggtggactacagcaactacctgttcttcgactactggggccagggcaccctggtcacagtttctagcggcggaggcggaagtggaggcggaggatctggcggcggaggctctgaaatcgtgctgacacagagccccggcacactgtcactttctccaggcgaaggcgctaccctgtcttgtagagctggacagtctgtgcggagcagctacctcggatggtatcagcagaagcctggacaggcccctcggctgttgatctacggtgcttctagcagagccacaggcatccccgatagattttctggcagcggctccggcaccgacttcaccctgacaatcagcagactggaacccgaggacttcgccgtgtattactgccagcagtacggctacagccctcctacatttggcggaggcaccaagctggaaatcaagacgcgtgacggtaacgaggagatgggaggaatcactcaaaccccttacaaagtctcaatttcaggaacaactgttatccttacatgtccccagtatcctggcagcgagatcctttggcagcataacgacaagaatatagggggagatgaagacgataagaatatcggatctgacgaggatcacttgagcctgaaagagttctccgagcttgaacaaagcggatattatgtgtgctatccgcgcgggtcaaagccggaagacgctaacttttacctttatctccgagccagagtgtgcgaaaattgcatggaaatggacgttatgtccgttgctacaatagttatcgtagatatatgcatcacgggtggactgcttctgctggtttattattggtccaagaatagaaaggccaaagctaaacccgtgaccagaggcgctggcgcaggcggaaggcaaaggggacaaaacaaagaacggccaccaccagtgccaaatccagattatgagcctattcggaaaggacagagggacctgtactctggcctgaatcagagaagaatc

SEQ ID NO: 19975 - DNA, 1248 bp, synthetic construct
  source 1..1248: mol_type = other DNA
atggccttaccagtgaccgccttgctcctgccgctggccttgctgctccacgccgccaggccggaggttcagctgcttgagtctggcggaggactggttcaacctggcggaagcctgagactgtcttgtgccgccagcggcttcacctttagcagctacgccatgagctgggtccgacaggctcctggcaaaggactggaatgggtgtccgtgatctctggctctggcggcagacccaattacgccgattctgtgaagggcagattcaccatcagccgggacaacagcaagaacaccctgtacctccagatgaacagcctgcgcgacgaggataccgccgtgtactattgtgccaaggtggactacagcaactacctgttcttcgactactggggccagggcaccctggtcacagtttctagcggcggaggcggaagtggaggcggaggatctggcggcggaggctctgaaatcgtgctgacacagagccccggcacactgtcactttctccaggcgaaggcgctaccctgtcttgtagagctggacagtctgtgcggagcagctacctcggatggtatcagcagaagcctggacaggcccctcggctgttgatctacggtgcttctagcagagccacaggcatccccgatagattttctggcagcggctccggcaccgacttcaccctgacaatcagcagactggaacccgaggacttcgccgtgtattactgccagcagtacggctacagccctcctacatttggcggaggcaccaagctggaaatcaagacgcgtttcaagatccccatcgaggaactggaagatcgggtgttcgtgaactgcaacacctctatcacctgggtggaaggcaccgtgggaacactgctgagcgacatcaccagactggacctcggcaagcggattctggaccctcggggcatctacagatgcaacggcaccgacatctacaaggacaaagaaagcaccgtgcaggtccactacagaatgtgccagtcctgcgtggaactggaccctgctacagtggccggcatcatcgtgaccgatgtgatcgctactctgctgctggctctgggagtgttctgcttcgccggacacgaaacaggcagactgtctggcgctgccgatacacaggccctgctgagaaacgaccaagtgtatcagcccctgcgcgacagagatgatgcccagtattctcacctcggcggcaactgggctagaaacaag

SEQ ID NO: 19976 - DNA, 1278 bp, synthetic construct
  source 1..1278: mol_type = other DNA
atggccttaccagtgaccgccttgctcctgccgctggccttgctgctccacgccgccaggccggaggttcagctgcttgagtctggcggaggactggttcaacctggcggaagcctgagactgtcttgtgccgccagcggcttcacctttagcagctacgccatgagctgggtccgacaggctcctggcaaaggactggaatgggtgtccgtgatctctggctctggcggcagacccaattacgccgattctgtgaagggcagattcaccatcagccgggacaacagcaagaacaccctgtacctccagatgaacagcctgcgcgacgaggataccgccgtgtactattgtgccaaggtggactacagcaactacctgttcttcgactactggggccagggcaccctggtcacagtttctagcggcggaggcggaagtggaggcggaggatctggcggcggaggctctgaaatcgtgctgacacagagccccggcacactgtcactttctccaggcgaaggcgctaccctgtcttgtagagctggacagtctgtgcggagcagctacctcggatggtatcagcagaagcctggacaggcccctcggctgttgatctacggtgcttctagcagagccacaggcatccccgatagattttctggcagcggctccggcaccgacttcaccctgacaatcagcagactggaacccgaggacttcgccgtgtattactgccagcagtacggctacagccctcctacatttggcggaggcaccaagctggaaatcaagacgcgtcagagcatcaagggcaaccacctggtcaaggtgtacgactaccaagaggacggcagcgtgctgctgacatgtgatgccgaggccaagaacatcacctggtttaaggacggcaagatgatcggcttcctgaccgaggacaagaagaagtggaacctgggcagcaacgctaaggaccccagaggcatgtatcagtgcaagggcagccagaacaagagcaagcccctccaggtgtactaccggatgtgccagaactgcatcgagctgaacgccgctaccatcagcggctttctgttcgccgagatcgtgtccatcttcgtgctggccgtgggcgtgtactttatcgctggacaggatggcgtgcggcagagcagagcttccgataagcaaaccctgctgcctaacgaccagctgtaccagcctctgaaggacagagaggacgaccagtacagccacctccagggcaatcagctgagaagaaac

SEQ ID NO: 19977 - DNA, 1227 bp, synthetic construct
  source 1..1227: mol_type = other DNA
atggccttaccagtgaccgccttgctcctgccgctggccttgctgctccacgccgccaggccggaggttcagctgcttgagtctggcggaggactggttcaacctggcggaagcctgagactgtcttgtgccgccagcggcttcacctttagcagctacgccatgagctgggtccgacaggctcctggcaaaggactggaatgggtgtccgtgatctctggctctggcggcagacccaattacgccgattctgtgaagggcagattcaccatcagccgggacaacagcaagaacaccctgtacctccagatgaacagcctgcgcgacgaggataccgccgtgtactattgtgccaaggtggactacagcaactacctgttcttcgactactggggccagggcaccctggtcacagtttctagcggcggaggcggaagtggaggcggaggatctggcggcggaggctctgaaatcgtgctgacacagagccccggcacactgtcactttctccaggcgaaggcgctaccctgtcttgtagagctggacagtctgtgcggagcagctacctcggatggtatcagcagaagcctggacaggcccctcggctgttgatctacggtgcttctagcagagccacaggcatccccgatagattttctggcagcggctccggcaccgacttcaccctgacaatcagcagactggaacccgaggacttcgccgtgtattactgccagcagtacggctacagccctcctacatttggcggaggcaccaagctggaaatcaagacgcgtcagagttttgggttgttggaccctaaattgtgctatctgttggacggaatcctgttcatttacggagtgatcctgaccgcattgttcctgcgggttaagttttccagatccgcagacgcacccgcttaccaacaagggcagaaccaactctacaatgaacttaatttggggcggagggaagagtacgacgttctggacaaaaggaggggacgagatcccgagatgggcggaaagcctcagcgaaggaagaatccgcaagaggggctttataacgaactccagaaagataaaatggcagaagcctatagtgagattgggatgaagggagaaaggaggaggggtaaaggtcacgatgggttgtaccaaggattgagcacagccactaaagatacctatgatgcgctccacatgcaggccctgccgccaaga

SEQ ID NO: 19978 - DNA, 1512 bp, synthetic construct
  source 1..1512: mol_type = other DNA
atggccttaccagtgaccgccttgctcctgccgctggccttgctgctccacgccgccaggccggaaatcgtgctgacacagagccccggcacactgtcactttctccaggcgaaggcgctaccctgtcttgtagagctggacagtctgtgcggagcagctacctcggatggtatcagcagaagcctggacaggcccctcggctgttgatctacggtgcttctagcagagccacaggcatccccgatagattttctggcagcggctccggcaccgacttcaccctgacaatcagcagactggaacccgaggacttcgccgtgtattactgccagcagtacggctacagccctcctacatttggcggaggcaccaagctggaaatcaagggcggaggcggaagtggaggcggaggatctggcggcggaggctctgaggttcagctgcttgagtctggcggaggactggttcaacctggcggaagcctgagactgtcttgtgccgccagcggcttcacctttagcagctacgccatgagctgggtccgacaggctcctggcaaaggactggaatgggtgtccgtgatctctggctctggcggcagacccaattacgccgattctgtgaagggcagattcaccatcagccgggacaacagcaagaacaccctgtacctccagatgaacagcctgcgcgacgaggataccgccgtgtactattgtgccaaggtggactacagcaactacctgttcttcgactactggggccagggcaccctggtcacagtttctagcacgcgtggaatgaggactgaggatcttcccaaagctgtcgtctttctcgaaccccaatggtatcgggtgctcgaaaaagactctgtgacactgaaatgccaaggggcctactctcccgaggacaactccacacagtggtttcataatgagtccctcatcagctctcaggccagctcttatttcattgatgccgctacagtggacgactccggcgagtatcggtgtcagaccaatctgtctacactgtctgaccccgtgcagcttgaggtccacattggatggttgctcttgcaagccccacgctgggttttcaaagaggaagatccaatccatctgcggtgccacagctggaaaaacaccgctctccacaaagtcacatacctgcaaaatggcaaaggacgcaaatacttccatcacaattccgatttttacattccgaaggctaccctgaaagacagcggcagctatttctgccggggactcgtcggctccaagaatgtgtcctccgaaaccgtgaatatcacgattacccaaggactggctgtgcctacaatctctagcttctttccgcctggataccaagtctccttctgtcttgtgatggtcctcctgtttgctgtggacacaggactgtacttttccgtgaaaacgaacatccgcagctccacacgcgattggaaagatcacaagtttaaatggcgcaaagatccccaggacaag

SEQ ID NO: 19979 - DNA, 2361 bp, synthetic construct
  source 1..2361: mol_type = other DNA
atggccttaccagtgaccgccttgctcctgccgctggccttgctgctccacgccgccaggccggaaatcgtgctgacacagagccccggcacactgtcactttctccaggcgaaggcgctaccctgtcttgtagagctggacagtctgtgcggagcagctacctcggatggtatcagcagaagcctggacaggcccctcggctgttgatctacggtgcttctagcagagccacaggcatccccgatagattttctggcagcggctccggcaccgacttcaccctgacaatcagcagactggaacccgaggacttcgccgtgtattactgccagcagtacggctacagccctcctacatttggcggaggcaccaagctggaaatcaagggcggaggcggaagtggaggcggaggatctggcggcggaggctctgaggttcagctgcttgagtctggcggaggactggttcaacctggcggaagcctgagactgtcttgtgccgccagcggcttcacctttagcagctacgccatgagctgggtccgacaggctcctggcaaaggactggaatgggtgtccgtgatctctggctctggcggcagacccaattacgccgattctgtgaagggcagattcaccatcagccgggacaacagcaagaacaccctgtacctccagatgaacagcctgcgcgacgaggataccgccgtgtactattgtgccaaggtggactacagcaactacctgttcttcgactactggggccagggcaccctggtcacagtttctagcacgcgtggaggctctggacaacaacagaccctgcctaaaccattcatctgggctgaaccccactttatggttccgaaagagaaacaagtcacgatttgttgccaagggaattacggggccgtcgagtatcagctccactttgagggctccctgtttgctgtggatcggcccaagccacctgaaagaatcaacaaagtccaattctatattcctgatatgaactcccgcatggcaggccagtattcatgtatctaccgcgtgggagaactttggagtgaaccctctaacctgctggacctcgtcgtgacagagatgtatgatacacccacactgtctgtgcaccctgggccagaagttatcagcggagaaaaagttaccttttattgccgcctcgataccgctacctctatgttcctcttgctgaaagagggccgcagctctcacgtgcagcgaggctacggaaaggtccaagctgagtttcctctcggccccgtgaccaccgctcacaggggcacatatagatgttttggctcttataacaatcatgcctggtcattcccatccgagcctgtgaaactgctggtcacaggcgatattgagaatacctctctggccccagaagatcctacattccccgccgacacatggggaacatatctgctgacaaccgaaaccgggctgcaaaaggaccatgctctgtgggatcataccgctcagaatctgcttcggatggggcttgcattcctggtcctggtggctcttgtctggtttctggtcgaggactggctgtcccggaagagaaccagagaaagagcttccagggccagcacctgggaaggcagacgcagactgaatactcagaccctgcgcgccaagagaagcggatctggcgtgaagcagaccctgaatttcgacctgctgaagctggctggcgacgtggaatccaacccaggcccttctagaggccatatgaccgagtacaagcccacggtgcgcctcgccacccgcgacgacgtccccagggccgtacgcaccctcgccgccgcgttcgccgactaccccgccacgcgccacaccgtcgatccggaccgccacatcgagcgggtcaccgagctgcaagaactcttcctcacgcgcgtcgggctcgacatcggcaaggtgtgggtcgcggacgacggcgccgcggtggcggtctggaccacgccggagagcgtcgaagcgggggcggtgttcgccgagatcggcccgcgcatggccgagttgagcggttcccggctggccgcgcagcaacagatggaaggcctcctggcgccgcaccggcccaaggagcccgcgtggttcctggccaccgtcggcgtctcgcccgaccaccagggcaagggtctgggcagcgccgtcgtgctccccggagtggaggcggccgagcgcgccggggtgcccgccttcctggagacctccgcgccccgcaacctccccttctacgagcggctcggcttcaccgtcaccgccgacgtcgaggtgcccgaaggaccgcgcacctggtgcatgacccgcaagcccggtgcctga

SEQ ID NO: 19980 - DNA, 1860 bp, synthetic construct
  source 1..1860: mol_type = other DNA
atggccttaccagtgaccgccttgctcctgccgctggccttgctgctccacgccgccaggccggaaatcgtgctgacacagagccccggcacactgtcactttctccaggcgaaggcgctaccctgtcttgtagagctggacagtctgtgcggagcagctacctcggatggtatcagcagaagcctggacaggcccctcggctgttgatctacggtgcttctagcagagccacaggcatccccgatagattttctggcagcggctccggcaccgacttcaccctgacaatcagcagactggaacccgaggacttcgccgtgtattactgccagcagtacggctacagccctcctacatttggcggaggcaccaagctggaaatcaagggcggaggcggaagtggaggcggaggatctggcggcggaggctctgaggttcagctgcttgagtctggcggaggactggttcaacctggcggaagcctgagactgtcttgtgccgccagcggcttcacctttagcagctacgccatgagctgggtccgacaggctcctggcaaaggactggaatgggtgtccgtgatctctggctctggcggcagacccaattacgccgattctgtgaagggcagattcaccatcagccgggacaacagcaagaacaccctgtacctccagatgaacagcctgcgcgacgaggataccgccgtgtactattgtgccaaggtggactacagcaactacctgttcttcgactactggggccagggcaccctggtcacagtttctagcacgcgtaaaattgaagttatgtatcctcctccttacctagacaatgagaagagcaatggaaccattatccatgtgaaaggggcgcgtggcgatattgagaatacctctctggccccagaagatcctacattccccgccgacacatggggaacatatctgctgacaaccgaaaccgggctgcaaaaggaccatgctctgtgggatcataccgctcagaatctgcttcggatggggcttgcattcctggtcctggtggctcttgtctggtttctggtcgaggactggctgtcccggaagagaaccagagaaagagcttccagggccagcacctgggaaggcagacgcagactgaatactcagaccctgcgcgccaagagaagcggatctggcgtgaagcagaccctgaatttcgacctgctgaagctggctggcgacgtggaatccaacccaggcccttctagaggccatatgaccgagtacaagcccacggtgcgcctcgccacccgcgacgacgtccccagggccgtacgcaccctcgccgccgcgttcgccgactaccccgccacgcgccacaccgtcgatccggaccgccacatcgagcgggtcaccgagctgcaagaactcttcctcacgcgcgtcgggctcgacatcggcaaggtgtgggtcgcggacgacggcgccgcggtggcggtctggaccacgccggagagcgtcgaagcgggggcggtgttcgccgagatcggcccgcgcatggccgagttgagcggttcccggctggccgcgcagcaacagatggaaggcctcctggcgccgcaccggcccaaggagcccgcgtggttcctggccaccgtcggcgtctcgcccgaccaccagggcaagggtctgggcagcgccgtcgtgctccccggagtggaggcggccgagcgcgccggggtgcccgccttcctggagacctccgcgccccgcaacctccccttctacgagcggctcggcttcaccgtcaccgccgacgtcgaggtgcccgaaggaccgcgcacctggtgcatgacccgcaagcccggtgcctga

SEQ ID NO: 19981 - DNA, 2121 bp, synthetic construct
  source 1..2121: mol_type = other DNA
atggccttaccagtgaccgccttgctcctgccgctggccttgctgctccacgccgccaggccggaaatcgtgctgacacagagccccggcacactgtcactttctccaggcgaaggcgctaccctgtcttgtagagctggacagtctgtgcggagcagctacctcggatggtatcagcagaagcctggacaggcccctcggctgttgatctacggtgcttctagcagagccacaggcatccccgatagattttctggcagcggctccggcaccgacttcaccctgacaatcagcagactggaacccgaggacttcgccgtgtattactgccagcagtacggctacagccctcctacatttggcggaggcaccaagctggaaatcaagggcggaggcggaagtggaggcggaggatctggcggcggaggctctgaggttcagctgcttgagtctggcggaggactggttcaacctggcggaagcctgagactgtcttgtgccgccagcggcttcacctttagcagctacgccatgagctgggtccgacaggctcctggcaaaggactggaatgggtgtccgtgatctctggctctggcggcagacccaattacgccgattctgtgaagggcagattcaccatcagccgggacaacagcaagaacaccctgtacctccagatgaacagcctgcgcgacgaggataccgccgtgtactattgtgccaaggtggactacagcaactacctgttcttcgactactggggccagggcaccctggtcacagtttctagcacgcgtctgtgggtgtcccagccacctgaaattcggacactggaaggctcctccgcctttctgccctgtagctttaacgccagccaggggagactcgccatcggctctgtgacatggttccgggatgaagtcgtccctggaaaagaagttcgcaacggaacaccagagttcagaggcagactcgccccactggcaagctccagattcctgcatgaccatcaggctgaactgcacattagggacgtgcggggccacgatgcctccatctatgtgtgtcgggtcgaagtgcttggactcggcgtcggaactggaaacggcactaggctggtggtcgagaaagaacatccacagcttggcgctggcaccgtcctgttgcttagagccggattctatgccgtcagcttcctgtccgtggctgtggggtctacagtgtattaccagggaaaatgtctcacctggaaaggccccagacgccagcttccagctgttgttcctgctccactgccaccaccttgtggctcctctgctcacttgcttccaccagtgcctggcggacgcgccaagagaagcggatctggcgtgaagcagaccctgaatttcgacctgctgaagctggctggcgacgtggaatccaacccaggcccttctagaatgtaccggatgcagctgctgagctgtatcgccctgtctctggccctggtcacaaatagcgcccctaccagcagcagcaccaagaaaacccagctgcaactggaacacctcctgctggacctccagatgatcctgaacggcatcaacaactacaagaaccccaagctgaccgagatgctgaccgccaagttctacatgcccaagaaggccaccgagctgaagcacctccagtgcctggaagaggaactgaagcccctggaagaagtgctgaatctggcccagagcaagaacttccacctgaggccaagggacctgatctccaacatcaacgtgatcgtgctggaactgaaaggcagcgagacaaccttcatgtgcgagtacgccgacgagacagctaccatcgtggaatttctgaatcggtggatcaccttctgccagagcatcatcagcaccctgacaaagatcgaagtgatgtaccctcctccttacctggacaacgagaagtccaacggcaccatcatccacgtgaagggcaagcacctgtgtccttctccactgttccccggacctagcaagcctttctgggtgctcgttgttgttggcggcgtgctggcctgttacagcctgctggttaccgtggccttcatcatcttttgggtccgaagcaagcggagctaa

SEQ ID NO: 19982 - DNA, 2049 bp, synthetic construct
  source 1..2049: mol_type = other DNA
atggccttaccagtgaccgccttgctcctgccgctggccttgctgctccacgccgccaggccggaaatcgtgctgacacagagccccggcacactgtcactttctccaggcgaaggcgctaccctgtcttgtagagctggacagtctgtgcggagcagctacctcggatggtatcagcagaagcctggacaggcccctcggctgttgatctacggtgcttctagcagagccacaggcatccccgatagattttctggcagcggctccggcaccgacttcaccctgacaatcagcagactggaacccgaggacttcgccgtgtattactgccagcagtacggctacagccctcctacatttggcggaggcaccaagctggaaatcaagggcggaggcggaagtggaggcggaggatctggcggcggaggctctgaggttcagctgcttgagtctggcggaggactggttcaacctggcggaagcctgagactgtcttgtgccgccagcggcttcacctttagcagctacgccatgagctgggtccgacaggctcctggcaaaggactggaatgggtgtccgtgatctctggctctggcggcagacccaattacgccgattctgtgaagggcagattcaccatcagccgggacaacagcaagaacaccctgtacctccagatgaacagcctgcgcgacgaggataccgccgtgtactattgtgccaaggtggactacagcaactacctgttcttcgactactggggccagggcaccctggtcacagtttctagcacgcgtctgtgggtgtcccagccacctgaaattcggacactggaaggctcctccgcctttctgccctgtagctttaacgccagccaggggagactcgccatcggctctgtgacatggttccgggatgaagtcgtccctggaaaagaagttcgcaacggaacaccagagttcagaggcagactcgccccactggcaagctccagattcctgcatgaccatcaggctgaactgcacattagggacgtgcggggccacgatgcctccatctatgtgtgtcgggtcgaagtgcttggactcggcgtcggaactggaaacggcactaggctggtggtcgagaaagaacatccacagcttggcgctggcaccgtcctgttgcttagagccggattctatgccgtcagcttcctgtccgtggctgtggggtctacagtgtattaccagggaaaatgtctcacctggaaaggccccagacgccagcttccagctgttgttcctgctccactgccaccaccttgtggctcctctgctcacttgcttccaccagtgcctggcggacgcgccaagagaagcggatctggcgtgaagcagaccctgaatttcgacctgctgaagctggctggcgacgtggaatccaacccaggcccttctagaggccatatgaccgagtacaagcccacggtgcgcctcgccacccgcgacgacgtccccagggccgtacgcaccctcgccgccgcgttcgccgactaccccgccacgcgccacaccgtcgatccggaccgccacatcgagcgggtcaccgagctgcaagaactcttcctcacgcgcgtcgggctcgacatcggcaaggtgtgggtcgcggacgacggcgccgcggtggcggtctggaccacgccggagagcgtcgaagcgggggcggtgttcgccgagatcggcccgcgcatggccgagttgagcggttcccggctggccgcgcagcaacagatggaaggcctcctggcgccgcaccggcccaaggagcccgcgtggttcctggccaccgtcggcgtctcgcccgaccaccagggcaagggtctgggcagcgccgtcgtgctccccggagtggaggcggccgagcgcgccggggtgcccgccttcctggagacctccgcgccccgcaacctccccttctacgagcggctcggcttcaccgtcaccgccgacgtcgaggtgcccgaaggaccgcgcacctggtgcatgacccgcaagcccggtgcctga

SEQ ID NO: 19983 - DNA, 1074 bp, synthetic construct
  source 1..1074: mol_type = other DNA
atggccttaccagtgaccgccttgctcctgccgctggccttgctgctccacgccgccaggccggaaatcgtgctgacacagagccccggcacactgtcactttctccaggcgaaggcgctaccctgtcttgtagagctggacagtctgtgcggagcagctacctcggatggtatcagcagaagcctggacaggcccctcggctgttgatctacggtgcttctagcagagccacaggcatccccgatagattttctggcagcggctccggcaccgacttcaccctgacaatcagcagactggaacccgaggacttcgccgtgtattactgccagcagtacggctacagccctcctacatttggcggaggcaccaagctggaaatcaagggcggaggcggaagtggaggcggaggatctggcggcggaggctctgaggttcagctgcttgagtctggcggaggactggttcaacctggcggaagcctgagactgtcttgtgccgccagcggcttcacctttagcagctacgccatgagctgggtccgacaggctcctggcaaaggactggaatgggtgtccgtgatctctggctctggcggcagacccaattacgccgattctgtgaagggcagattcaccatcagccgggacaacagcaagaacaccctgtacctccagatgaacagcctgcgcgacgaggataccgccgtgtactattgtgccaaggtggactacagcaactacctgttcttcgactactggggccagggcaccctggtcacagtttctagcacgcgtaaaattgaagttatgtatcctcctccttacctagacaatgagaagagcaatggaaccattatccatgtgaaaggggcgcgtatcacccagggcctggccgtgtctaccatcagcagctttttcccacccggctaccaggtgtccttctgcctcgtgatggtgctgctgttcgccgtggacaccggcctgtacttcagcgtgaaaacaaacatccggtccagcaccagagactggaaggaccacaagttcaagtggcggaaggacccccaggacaag

SEQ ID NO: 19984 - DNA, 1074 bp, synthetic construct
  source 1..1074: mol_type = other DNA
atggccttaccagtgaccgccttgctcctgccgctggccttgctgctccacgccgccaggccggaaatcgtgctgacacagagccccggcacactgtcactttctccaggcgaaggcgctaccctgtcttgtagagctggacagtctgtgcggagcagctacctcggatggtatcagcagaagcctggacaggcccctcggctgttgatctacggtgcttctagcagagccacaggcatccccgatagattttctggcagcggctccggcaccgacttcaccctgacaatcagcagactggaacccgaggacttcgccgtgtattactgccagcagtacggctacagccctcctacatttggcggaggcaccaagctggaaatcaagggcggaggcggaagtggaggcggaggatctggcggcggaggctctgaggttcagctgcttgagtctggcggaggactggttcaacctggcggaagcctgagactgtcttgtgccgccagcggcttcacctttagcagctacgccatgagctgggtccgacaggctcctggcaaaggactggaatgggtgtccgtgatctctggctctggcggcagacccaattacgccgattctgtgaagggcagattcaccatcagccgggacaacagcaagaacaccctgtacctccagatgaacagcctgcgcgacgaggataccgccgtgtactattgtgccaaggtggactacagcaactacctgttcttcgactactggggccagggcaccctggtcacagtttctagcacgcgtaaaattgaagttatgtatcctcctccttacctagacaatgagaagagcaatggaaccattatccatgtgaaaggggcgcgtattacccaaggactggctgtgcctacaatctctagcttctttccgcctggataccaagtctccttctgtcttgtgatggtcctcctgtttgctgtggacacaggactgtacttttccgtgaaaacgaacatccgcagctccacacgcgattggaaagatcacaagtttaaatggcgcaaagatccccaggacaag

SEQ ID NO: 19985 - DNA, 1011 bp, synthetic construct
  source 1..1011: mol_type = other DNA
atggccttaccagtgaccgccttgctcctgccgctggccttgctgctccacgccgccaggccggaaatcgtgctgacacagagccccggcacactgtcactttctccaggcgaaggcgctaccctgtcttgtagagctggacagtctgtgcggagcagctacctcggatggtatcagcagaagcctggacaggcccctcggctgttgatctacggtgcttctagcagagccacaggcatccccgatagattttctggcagcggctccggcaccgacttcaccctgacaatcagcagactggaacccgaggacttcgccgtgtattactgccagcagtacggctacagccctcctacatttggcggaggcaccaagctggaaatcaagggcggaggcggaagtggaggcggaggatctggcggcggaggctctgaggttcagctgcttgagtctggcggaggactggttcaacctggcggaagcctgagactgtcttgtgccgccagcggcttcacctttagcagctacgccatgagctgggtccgacaggctcctggcaaaggactggaatgggtgtccgtgatctctggctctggcggcagacccaattacgccgattctgtgaagggcagattcaccatcagccgggacaacagcaagaacaccctgtacctccagatgaacagcctgcgcgacgaggataccgccgtgtactattgtgccaaggtggactacagcaactacctgttcttcgactactggggccagggcaccctggtcacagtttctagcacgcgtaaaattgaagttatgtatcctcctccttacctagacaatgagaagagcaatggaaccattatccatgtgaaaggggcgcgtattacccaaggactggctgtgtctacaatctctagcttctctccgcctggataccaagtctccttctgtcttgtgatggtcctcctgtttgctgtggacacaggactgtacttttccgtgaaaacgaacatc

SEQ ID NO: 19986 - DNA, 1104 bp, synthetic construct
  source 1..1104: mol_type = other DNA
atggccttaccagtgaccgccttgctcctgccgctggccttgctgctccacgccgccaggccggaaatcgtgctgacacagagccccggcacactgtcactttctccaggcgaaggcgctaccctgtcttgtagagctggacagtctgtgcggagcagctacctcggatggtatcagcagaagcctggacaggcccctcggctgttgatctacggtgcttctagcagagccacaggcatccccgatagattttctggcagcggctccggcaccgacttcaccctgacaatcagcagactggaacccgaggacttcgccgtgtattactgccagcagtacggctacagccctcctacatttggcggaggcaccaagctggaaatcaagggcggaggcggaagtggaggcggaggatctggcggcggaggctctgaggttcagctgcttgagtctggcggaggactggttcaacctggcggaagcctgagactgtcttgtgccgccagcggcttcacctttagcagctacgccatgagctgggtccgacaggctcctggcaaaggactggaatgggtgtccgtgatctctggctctggcggcagacccaattacgccgattctgtgaagggcagattcaccatcagccgggacaacagcaagaacaccctgtacctccagatgaacagcctgcgcgacgaggataccgccgtgtactattgtgccaaggtggactacagcaactacctgttcttcgactactggggccagggcaccctggtcacagtttctagcacgcgtaaaattgaagttatgtatcctcctccttacctagacaatgagaagagcaatggaaccattatccatgtgaaaggggcgcgtgtcgagaaagaacatccacagcttggcgctggcaccgtcctgttgcttagagccggattctatgccgtcagcttcctgtccgtggctgtggggtctacagtgtattaccagggaaaatgtctcacctggaaaggccccagacgccagcttccagctgttgttcctgctccactgccaccaccttgtggctcctctgctcacttgcttccaccagtgcctggcgga

SEQ ID NO: 19987 - DNA, 1347 bp, synthetic construct
  source 1..1347: mol_type = other DNA
atggccttaccagtgaccgccttgctcctgccgctggccttgctgctccacgccgccaggccggaaatcgtgctgacacagagccccggcacactgtcactttctccaggcgaaggcgctaccctgtcttgtagagctggacagtctgtgcggagcagctacctcggatggtatcagcagaagcctggacaggcccctcggctgttgatctacggtgcttctagcagagccacaggcatccccgatagattttctggcagcggctccggcaccgacttcaccctgacaatcagcagactggaacccgaggacttcgccgtgtattactgccagcagtacggctacagccctcctacatttggcggaggcaccaagctggaaatcaagggcggaggcggaagtggaggcggaggatctggcggcggaggctctgaggttcagctgcttgagtctggcggaggactggttcaacctggcggaagcctgagactgtcttgtgccgccagcggcttcacctttagcagctacgccatgagctgggtccgacaggctcctggcaaaggactggaatgggtgtccgtgatctctggctctggcggcagacccaattacgccgattctgtgaagggcagattcaccatcagccgggacaacagcaagaacaccctgtacctccagatgaacagcctgcgcgacgaggataccgccgtgtactattgtgccaaggtggactacagcaactacctgttcttcgactactggggccagggcaccctggtcacagtttctagcacgcgtaaaattgaagttatgtatcctcctccttacctagacaatgagaagagcaatggaaccattatccatgtgaaaggggcgcgtaagtctgtgcgcttttacctggtcgtcagccctgccagtgcctccactcagacatcttggaccccaagggaccttgtgtcctctcagacacagacacagtcctgcgtgccaccaactgctggcgcaagacaggctccagagtctcccagcacaatccccgtcccttctcagccccagaactccacacttaggccaggaccagctgctccaatcgcactggtcccagtgttctgcggactgctggttgccaagtctctggtgctgagcgcactcctcgtttggtggggcgatatttggtggaaaacgatgatggaattgagatccctcgatacgcagaaagccacatgccaccttcagcaagtcacagacttgccttggaccagcgtcagctctcccgtggaacgggaaattctgtatcatacagtggcccgcaccaagatttccgacgatgacgacgagcacacactg

SEQ ID NO: 19988 - DNA, 1158 bp, synthetic construct
  source 1..1158: mol_type = other DNA
atggccttaccagtgaccgccttgctcctgccgctggccttgctgctccacgccgccaggccggaaatcgtgctgacacagagccccggcacactgtcactttctccaggcgaaggcgctaccctgtcttgtagagctggacagtctgtgcggagcagctacctcggatggtatcagcagaagcctggacaggcccctcggctgttgatctacggtgcttctagcagagccacaggcatccccgatagattttctggcagcggctccggcaccgacttcaccctgacaatcagcagactggaacccgaggacttcgccgtgtattactgccagcagtacggctacagccctcctacatttggcggaggcaccaagctggaaatcaagggcggaggcggaagtggaggcggaggatctggcggcggaggctctgaggttcagctgcttgagtctggcggaggactggttcaacctggcggaagcctgagactgtcttgtgccgccagcggcttcacctttagcagctacgccatgagctgggtccgacaggctcctggcaaaggactggaatgggtgtccgtgatctctggctctggcggcagacccaattacgccgattctgtgaagggcagattcaccatcagccgggacaacagcaagaacaccctgtacctccagatgaacagcctgcgcgacgaggataccgccgtgtactattgtgccaaggtggactacagcaactacctgttcttcgactactggggccagggcaccctggtcacagtttctagcacgcgtaaaattgaagttatgtatcctcctccttacctagacaatgagaagagcaatggaaccattatccatgtgaaaggggcgcgtggcgatattgagaatacctctctggccccagaagatcctacattccccgccgacacatggggaacatatctgctgacaaccgaaaccgggctgcaaaaggaccatgctctgtgggatcataccgctcagaatctgcttcggatggggcttgcattcctggtcctggtggctcttgtctggtttctggtcgaggactggctgtcccggaagagaaccagagaaagagcttccagggccagcacctgggaaggcagacgcagactgaatactcagaccctg

SEQ ID NO: 19989 - DNA, 2949 bp, synthetic construct
  source 1..2949: mol_type = other DNA
atggccttaccagtgaccgccttgctcctgccgctggccttgctgctccacgccgccaggccggaaatcgtgctgacacagagccccggcacactgtcactttctccaggcgaaggcgctaccctgtcttgtagagctggacagtctgtgcggagcagctacctcggatggtatcagcagaagcctggacaggcccctcggctgttgatctacggtgcttctagcagagccacaggcatccccgatagattttctggcagcggctccggcaccgacttcaccctgacaatcagcagactggaacccgaggacttcgccgtgtattactgccagcagtacggctacagccctcctacatttggcggaggcaccaagctggaaatcaagctcgagggacagcctaaggccaatcctaccgtgacactgttccctccaagcagcgaagaactccaggccaacaaggccacacttgtgtgcctgatctccgacttctaccctggggctgtgacagtggcttggaaggccgatggatctcctgtgaaagccggcgtggaaaccaccaagccatccaagcagagcaacaacaaatacgccgccagctcctacctgagcctgacacctgagcagtggaagtcccacagatcctacagctgccaagtgacccacgaaggcagcaccgtggaaaagacagtggcccctacagagtgcagcggatcccagagcttcggcctgctggaccccaagctgtgctacctgctggatggcatcctgttcatctacggcgtgatcctgaccgccctgttcctgagagtgaagttcagcagaagcgccgacgcccctgcctaccagcagggacagaaccaactgtacaacgagctgaacctgggcagacgggaagagtacgacgtgctggacaagcggagaggcagggaccctgagatgggcggaaagccccagcggagaaagaacccccaggaaggactgtataacgaactccagaaagacaagatggccgaagcctacagcgagatcggcatgaagggcgagcggagaagaggcaagggccacgatggcctgtaccagggcctgagcaccgccaccaaggacacctatgacgccctgcacatgcaggccctgcctccaagaagggccaagcgatctggatctggagcaacaaacttctcactactcaaacaagcaggtgacgtggaggagaatcccgggcctactagtatggactggatttggcgcatccttttccttgtcggcgctgctaccggcgcgcattccttcgaagaggttcagctgcttgagtctggcggaggactggttcaacctggcggaagcctgagactgtcttgtgccgccagcggcttcacctttagcagctacgccatgagctgggtccgacaggctcctggcaaaggactggaatgggtgtccgtgatctctggctctggcggcagacccaattacgccgattctgtgaagggcagattcaccatcagccgggacaacagcaagaacaccctgtacctccagatgaacagcctgcgcgacgaggataccgccgtgtactattgtgccaaggtggactacagcaactacctgttcttcgactactggggccagggcaccctggtcacagtttctagcacgcgtgcctctacaaagggaccctccgtgtttcctctggctcccagcagcaagtctacaagcggaggaacagccgctctgggctgcctggtcaaggattactttcccgagcctgtgaccgtgtcctggaatagcggagcactgacaagcggcgtgcacacctttccagccgtgctgcaaagcagcggcctgtactctctgagcagcgtggtcacagtgcctagctctagcctgggcacccagacctacatctgcaatgtgaaccacaagcctagcaacaccaaggtggacaagagagtggaacccaagagctgtggtaccggcgacatcgagaacaccagtctggcccctgaggaccctacctttcctgccgatacctggggcacctacctgctgaccacagagacaggactccagaaagatcacgccctgtgggaccacacagcccagaacctgctgagaatgggcctcgcctttctggtgctggttgccctcgtgtggttcctggtggaagattggctgagccggaagcggacaagagagagagccagcagagcctctacctgggagggaagaagaaggctgaacacccagacacttagggccaagcgatctggatctggagcaacaaacttctcactactcaaacaagcaggtgacgtggaggagaatcccgggccttctagaggccatatgaccgagtacaagcccacggtgcgcctcgccacccgcgacgacgtccccagggccgtacgcaccctcgccgccgcgttcgccgactaccccgccacgcgccacaccgtcgatccggaccgccacatcgagcgggtcaccgagctgcaagaactcttcctcacgcgcgtcgggctcgacatcggcaaggtgtgggtcgcggacgacggcgccgcggtggcggtctggaccacgccggagagcgtcgaagcgggggcggtgttcgccgagatcggcccgcgcatggccgagttgagcggttcccggctggccgcgcagcaacagatggaaggcctcctggcgccgcaccggcccaaggagcccgcgtggttcctggccaccgtcggcgtctcgcccgaccaccagggcaagggtctgggcagcgccgtcgtgctccccggagtggaggcggccgagcgcgccggggtgcccgccttcctggagacctccgcgccccgcaacctccccttctacgagcggctcggcttcaccgtcaccgccgacgtcgaggtgcccgaaggaccgcgcacctggtgcatgacccgcaagcccggtgcctga

SEQ ID NO: 19990 - DNA, 3147 bp, synthetic construct
  source 1..3147: mol_type = other DNA
atggccttaccagtgaccgccttgctcctgccgctggccttgctgctccacgccgccaggccggaaatcgtgctgacacagagccccggcacactgtcactttctccaggcgaaggcgctaccctgtcttgtagagctggacagtctgtgcggagcagctacctcggatggtatcagcagaagcctggacaggcccctcggctgttgatctacggtgcttctagcagagccacaggcatccccgatagattttctggcagcggctccggcaccgacttcaccctgacaatcagcagactggaacccgaggacttcgccgtgtattactgccagcagtacggctacagccctcctacatttggcggaggcaccaagctggaaatcaagctcgagggacagcctaaggccaatcctaccgtgacactgttccctccaagcagcgaagaactccaggccaacaaggccacacttgtgtgcctgatctccgacttctaccctggggctgtgacagtggcttggaaggccgatggatctcctgtgaaagccggcgtggaaaccaccaagccatccaagcagagcaacaacaaatacgccgccagctcctacctgagcctgacacctgagcagtggaagtcccacagatcctacagctgccaagtgacccacgaaggcagcaccgtggaaaagacagtggcccctacagagtgcagcggatcccagagcttcggcctgctggaccccaagctgtgctacctgctggatggcatcctgttcatctacggcgtgatcctgaccgccctgttcctgagagtgaagttcagcagaagcgccgacgcccctgcctaccagcagggacagaaccaactgtacaacgagctgaacctgggcagacgggaagagtacgacgtgctggacaagcggagaggcagggaccctgagatgggcggaaagccccagcggagaaagaacccccaggaaggactgtataacgaactccagaaagacaagatggccgaagcctacagcgagatcggcatgaagggcgagcggagaagaggcaagggccacgatggcctgtaccagggcctgagcaccgccaccaaggacacctatgacgccctgcacatgcaggccctgcctccaagaagggccaagcgatctggatctggagcaacaaacttctcactactcaaacaagcaggtgacgtggaggagaatcccgggcctactagtatggactggatttggcgcatccttttccttgtcggcgctgctaccggcgcgcattccttcgaagaggttcagctgcttgagtctggcggaggactggttcaacctggcggaagcctgagactgtcttgtgccgccagcggcttcacctttagcagctacgccatgagctgggtccgacaggctcctggcaaaggactggaatgggtgtccgtgatctctggctctggcggcagacccaattacgccgattctgtgaagggcagattcaccatcagccgggacaacagcaagaacaccctgtacctccagatgaacagcctgcgcgacgaggataccgccgtgtactattgtgccaaggtggactacagcaactacctgttcttcgactactggggccagggcaccctggtcacagtttctagcacgcgtgcctctacaaagggaccctccgtgtttcctctggctcccagcagcaagtctacaagcggaggaacagccgctctgggctgcctggtcaaggattactttcccgagcctgtgaccgtgtcctggaatagcggagcactgacaagcggcgtgcacacctttccagccgtgctgcaaagcagcggcctgtactctctgagcagcgtggtcacagtgcctagctctagcctgggcacccagacctacatctgcaatgtgaaccacaagcctagcaacaccaaggtggacaagagagtggaacccaagagctgtggtaccaagtctgtgcgcttttacctggtcgtcagccctgccagtgcctccactcagacatcttggaccccaagggaccttgtgtcctctcagacacagacacagtcctgcgtgccaccaactgctggcgcaagacaggctccagagtctcccagcacaatccccgtcccttctcagccccagaactccacacttaggccaggaccagctgctccaatcgcactggtcccagtgttctgcggactgctggttgccaagtctctggtgctgagcgcactcctcgtttggtggggcgatatttggtggaaaacgatgatggaattgagatccctcgatacgcagaaagccacatgccaccttcagcaagtcacagacttgccttggaccagcgtcagctctcccgtggaacgggaaattctgtatcatacagtggcccgcaccaagatttccgacgatgacgacgagcacacactgcgcgccaagagaagcggatctggcgtgaagcagaccctgaatttcgacctgctgaagctggctggcgacgtggaatccaacccaggcccttctagaggccatatgaccgagtacaagcccacggtgcgcctcgccacccgcgacgacgtccccagggccgtacgcaccctcgccgccgcgttcgccgactaccccgccacgcgccacaccgtcgatccggaccgccacatcgagcgggtcaccgagctgcaagaactcttcctcacgcgcgtcgggctcgacatcggcaaggtgtgggtcgcggacgacggcgccgcggtggcggtctggaccacgccggagagcgtcgaagcgggggcggtgttcgccgagatcggcccgcgcatggccgagttgagcggttcccggctggccgcgcagcaacagatggaaggcctcctggcgccgcaccggcccaaggagcccgcgtggttcctggccaccgtcggcgtctcgcccgaccaccagggcaagggtctgggcagcgccgtcgtgctccccggagtggaggcggccgagcgcgccggggtgcccgccttcctggagacctccgcgccccgcaacctccccttctacgagcggctcggcttcaccgtcaccgccgacgtcgaggtgcccgaaggaccgcgcacctggtgcatgacccgcaagcccggtgcctga

SEQ ID NO: 19991 - DNA, 2907 bp, synthetic construct
  source 1..2907: mol_type = other DNA
atggccttaccagtgaccgccttgctcctgccgctggccttgctgctccacgccgccaggccggaaatcgtgctgacacagagccccggcacactgtcactttctccaggcgaaggcgctaccctgtcttgtagagctggacagtctgtgcggagcagctacctcggatggtatcagcagaagcctggacaggcccctcggctgttgatctacggtgcttctagcagagccacaggcatccccgatagattttctggcagcggctccggcaccgacttcaccctgacaatcagcagactggaacccgaggacttcgccgtgtattactgccagcagtacggctacagccctcctacatttggcggaggcaccaagctggaaatcaagctcgagggacagcctaaggccaatcctaccgtgacactgttccctccaagcagcgaagaactccaggccaacaaggccacacttgtgtgcctgatctccgacttctaccctggggctgtgacagtggcttggaaggccgatggatctcctgtgaaagccggcgtggaaaccaccaagccatccaagcagagcaacaacaaatacgccgccagctcctacctgagcctgacacctgagcagtggaagtcccacagatcctacagctgccaagtgacccacgaaggcagcaccgtggaaaagacagtggcccctacagagtgcagcggatcccagagcttcggcctgctggaccccaagctgtgctacctgctggatggcatcctgttcatctacggcgtgatcctgaccgccctgttcctgagagtgaagttcagcagaagcgccgacgcccctgcctaccagcagggacagaaccaactgtacaacgagctgaacctgggcagacgggaagagtacgacgtgctggacaagcggagaggcagggaccctgagatgggcggaaagccccagcggagaaagaacccccaggaaggactgtataacgaactccagaaagacaagatggccgaagcctacagcgagatcggcatgaagggcgagcggagaagaggcaagggccacgatggcctgtaccagggcctgagcaccgccaccaaggacacctatgacgccctgcacatgcaggccctgcctccaagaagggccaagcgatctggatctggagcaacaaacttctcactactcaaacaagcaggtgacgtggaggagaatcccgggcctactagtatggactggatttggcgcatccttttccttgtcggcgctgctaccggcgcgcattccttcgaagaggttcagctgcttgagtctggcggaggactggttcaacctggcggaagcctgagactgtcttgtgccgccagcggcttcacctttagcagctacgccatgagctgggtccgacaggctcctggcaaaggactggaatgggtgtccgtgatctctggctctggcggcagacccaattacgccgattctgtgaagggcagattcaccatcagccgggacaacagcaagaacaccctgtacctccagatgaacagcctgcgcgacgaggataccgccgtgtactattgtgccaaggtggactacagcaactacctgttcttcgactactggggccagggcaccctggtcacagtttctagcacgcgtgcctctacaaagggaccctccgtgtttcctctggctcccagcagcaagtctacaagcggaggaacagccgctctgggctgcctggtcaaggattactttcccgagcctgtgaccgtgtcctggaatagcggagcactgacaagcggcgtgcacacctttccagccgtgctgcaaagcagcggcctgtactctctgagcagcgtggtcacagtgcctagctctagcctgggcacccagacctacatctgcaatgtgaaccacaagcctagcaacaccaaggtggacaagagagtggaacccaagagctgtggtaccgtggtcgagaaagaacatccacagcttggcgctggcaccgtcctgttgcttagagccggattctatgccgtcagcttcctgtccgtggctgtggggtctacagtgtattaccagggaaaatgtctcacctggaaaggccccagacgccagcttccagctgttgttcctgctccactgccaccaccttgtggctcctctgctcacttgcttccaccagtgcctggcggacgcgccaagagaagcggatctggcgtgaagcagaccctgaatttcgacctgctgaagctggctggcgacgtggaatccaacccaggcccttctagaggccatatgaccgagtacaagcccacggtgcgcctcgccacccgcgacgacgtccccagggccgtacgcaccctcgccgccgcgttcgccgactaccccgccacgcgccacaccgtcgatccggaccgccacatcgagcgggtcaccgagctgcaagaactcttcctcacgcgcgtcgggctcgacatcggcaaggtgtgggtcgcggacgacggcgccgcggtggcggtctggaccacgccggagagcgtcgaagcgggggcggtgttcgccgagatcggcccgcgcatggccgagttgagcggttcccggctggccgcgcagcaacagatggaaggcctcctggcgccgcaccggcccaaggagcccgcgtggttcctggccaccgtcggcgtctcgcccgaccaccagggcaagggtctgggcagcgccgtcgtgctccccggagtggaggcggccgagcgcgccggggtgcccgccttcctggagacctccgcgccccgcaacctccccttctacgagcggctcggcttcaccgtcaccgccgacgtcgaggtgcccgaaggaccgcgcacctggtgcatgacccgcaagcccggtgcctga

SEQ ID NO: 19992 - DNA, 2994 bp, synthetic construct
  source 1..2994: mol_type = other DNA
atggccttaccagtgaccgccttgctcctgccgctggccttgctgctccacgccgccaggccggaaatcgtgctgacacagagccccggcacactgtcactttctccaggcgaaggcgctaccctgtcttgtagagctggacagtctgtgcggagcagctacctcggatggtatcagcagaagcctggacaggcccctcggctgttgatctacggtgcttctagcagagccacaggcatccccgatagattttctggcagcggctccggcaccgacttcaccctgacaatcagcagactggaacccgaggacttcgccgtgtattactgccagcagtacggctacagccctcctacatttggcggaggcaccaagctggaaatcaagctcgaggacctgaagaacgtgttcccacctgaggtggccgtgttcgagcctagcgaggccgagatcagccacacccagaaagccaccctcgtgtgcctggctaccggcttctaccccgaccatgtggaactgtcttggtgggtcaacggcaaagaggtgcacagcggcgtgtctaccgacccccagccactgaaagaacagcccgccctgaacgacagccggtactgcctgagcagcagactgagagtgtccgccaccttctggcagaacccccggaaccacttcagatgccaggtgcagttctacggcctgagcgagaacgacgagtggacccaggacagagccaagcccgtgacccagatcgtgtctgccgaagcctggggcagagccgattgcggatcccagagcttcggcctgctggaccccaagctgtgctacctgctggatggcatcctgttcatctacggcgtgatcctgaccgccctgttcctgagagtgaagttcagcagaagcgccgacgcccctgcctaccagcagggacagaaccaactgtacaacgagctgaacctgggcagacgggaagagtacgacgtgctggacaagcggagaggcagggaccctgagatgggcggaaagccccagcggagaaagaacccccaggaaggactgtataacgaactccagaaagacaagatggccgaagcctacagcgagatcggcatgaagggcgagcggagaagaggcaagggccacgatggcctgtaccagggcctgagcaccgccaccaaggacacctatgacgccctgcacatgcaggccctgcctccaagaagggccaagcgatctggatctggagcaacaaacttctcactactcaaacaagcaggtgacgtggaggagaatcccgggcctactagtatggactggatttggcgcatccttttccttgtcggcgctgctaccggcgcgcattccttcgaagaggttcagctgcttgagtctggcggaggactggttcaacctggcggaagcctgagactgtcttgtgccgccagcggcttcacctttagcagctacgccatgagctgggtccgacaggctcctggcaaaggactggaatgggtgtccgtgatctctggctctggcggcagacccaattacgccgattctgtgaagggcagattcaccatcagccgggacaacagcaagaacaccctgtacctccagatgaacagcctgcgcgacgaggataccgccgtgtactattgtgccaaggtggactacagcaactacctgttcttcgactactggggccagggcaccctggtcacagtttctagcacgcgtatccagaaccctgatcctgccgtgtaccagctgcgggatagcaagagcagcgacaagagcgtgtgtctgttcaccgacttcgacagccagaccaacgtgtcccagagcaaggactccgacgtgtacatcaccgataagaccgtgctggacatgcggagcatggacttcaagagcaactccgccgtggcctggtccaacaagtccgatttcgcctgcgccaacgccttcaacaacagcattatccccgaggacacattcttcccaagccccgagagcagctgcggtaccggcgacatcgagaacaccagtctggcccctgaggaccctacctttcctgccgatacctggggcacctacctgctgaccacagagacaggactccagaaagatcacgccctgtgggaccacacagcccagaacctgctgagaatgggcctcgcctttctggtgctggttgccctcgtgtggttcctggtggaagattggctgagccggaagcggacaagagagagagccagcagagcctctacctgggagggaagaagaaggctgaacacccagacacttagggccaagcgatctggatctggagcaacaaacttctcactactcaaacaagcaggtgacgtggaggagaatcccgggccttctagaggccatatgaccgagtacaagcccacggtgcgcctcgccacccgcgacgacgtccccagggccgtacgcaccctcgccgccgcgttcgccgactaccccgccacgcgccacaccgtcgatccggaccgccacatcgagcgggtcaccgagctgcaagaactcttcctcacgcgcgtcgggctcgacatcggcaaggtgtgggtcgcggacgacggcgccgcggtggcggtctggaccacgccggagagcgtcgaagcgggggcggtgttcgccgagatcggcccgcgcatggccgagttgagcggttcccggctggccgcgcagcaacagatggaaggcctcctggcgccgcaccggcccaaggagcccgcgtggttcctggccaccgtcggcgtctcgcccgaccaccagggcaagggtctgggcagcgccgtcgtgctccccggagtggaggcggccgagcgcgccggggtgcccgccttcctggagacctccgcgccccgcaacctccccttctacgagcggctcggcttcaccgtcaccgccgacgtcgaggtgcccgaaggaccgcgcacctggtgcatgacccgcaagcccggtgcctga

SEQ ID NO: 19993 - DNA, 3192 bp, synthetic construct
  source 1..3192: mol_type = other DNA
atggccttaccagtgaccgccttgctcctgccgctggccttgctgctccacgccgccaggccggaaatcgtgctgacacagagccccggcacactgtcactttctccaggcgaaggcgctaccctgtcttgtagagctggacagtctgtgcggagcagctacctcggatggtatcagcagaagcctggacaggcccctcggctgttgatctacggtgcttctagcagagccacaggcatccccgatagattttctggcagcggctccggcaccgacttcaccctgacaatcagcagactggaacccgaggacttcgccgtgtattactgccagcagtacggctacagccctcctacatttggcggaggcaccaagctggaaatcaagctcgaggacctgaagaacgtgttcccacctgaggtggccgtgttcgagcctagcgaggccgagatcagccacacccagaaagccaccctcgtgtgcctggctaccggcttctaccccgaccatgtggaactgtcttggtgggtcaacggcaaagaggtgcacagcggcgtgtctaccgacccccagccactgaaagaacagcccgccctgaacgacagccggtactgcctgagcagcagactgagagtgtccgccaccttctggcagaacccccggaaccacttcagatgccaggtgcagttctacggcctgagcgagaacgacgagtggacccaggacagagccaagcccgtgacccagatcgtgtctgccgaagcctggggcagagccgattgcggatcccagagcttcggcctgctggaccccaagctgtgctacctgctggatggcatcctgttcatctacggcgtgatcctgaccgccctgttcctgagagtgaagttcagcagaagcgccgacgcccctgcctaccagcagggacagaaccaactgtacaacgagctgaacctgggcagacgggaagagtacgacgtgctggacaagcggagaggcagggaccctgagatgggcggaaagccccagcggagaaagaacccccaggaaggactgtataacgaactccagaaagacaagatggccgaagcctacagcgagatcggcatgaagggcgagcggagaagaggcaagggccacgatggcctgtaccagggcctgagcaccgccaccaaggacacctatgacgccctgcacatgcaggccctgcctccaagaagggccaagcgatctggatctggagcaacaaacttctcactactcaaacaagcaggtgacgtggaggagaatcccgggcctactagtatggactggatttggcgcatccttttccttgtcggcgctgctaccggcgcgcattccttcgaagaggttcagctgcttgagtctggcggaggactggttcaacctggcggaagcctgagactgtcttgtgccgccagcggcttcacctttagcagctacgccatgagctgggtccgacaggctcctggcaaaggactggaatgggtgtccgtgatctctggctctggcggcagacccaattacgccgattctgtgaagggcagattcaccatcagccgggacaacagcaagaacaccctgtacctccagatgaacagcctgcgcgacgaggataccgccgtgtactattgtgccaaggtggactacagcaactacctgttcttcgactactggggccagggcaccctggtcacagtttctagcacgcgtatccagaaccctgatcctgccgtgtaccagctgcgggatagcaagagcagcgacaagagcgtgtgtctgttcaccgacttcgacagccagaccaacgtgtcccagagcaaggactccgacgtgtacatcaccgataagaccgtgctggacatgcggagcatggacttcaagagcaactccgccgtggcctggtccaacaagtccgatttcgcctgcgccaacgccttcaacaacagcattatccccgaggacacattcttcccaagccccgagagcagctgcggtaccaagtctgtgcgcttttacctggtcgtcagccctgccagtgcctccactcagacatcttggaccccaagggaccttgtgtcctctcagacacagacacagtcctgcgtgccaccaactgctggcgcaagacaggctccagagtctcccagcacaatccccgtcccttctcagccccagaactccacacttaggccaggaccagctgctccaatcgcactggtcccagtgttctgcggactgctggttgccaagtctctggtgctgagcgcactcctcgtttggtggggcgatatttggtggaaaacgatgatggaattgagatccctcgatacgcagaaagccacatgccaccttcagcaagtcacagacttgccttggaccagcgtcagctctcccgtggaacgggaaattctgtatcatacagtggcccgcaccaagatttccgacgatgacgacgagcacacactgcgcgccaagagaagcggatctggcgtgaagcagaccctgaatttcgacctgctgaagctggctggcgacgtggaatccaacccaggcccttctagaggccatatgaccgagtacaagcccacggtgcgcctcgccacccgcgacgacgtccccagggccgtacgcaccctcgccgccgcgttcgccgactaccccgccacgcgccacaccgtcgatccggaccgccacatcgagcgggtcaccgagctgcaagaactcttcctcacgcgcgtcgggctcgacatcggcaaggtgtgggtcgcggacgacggcgccgcggtggcggtctggaccacgccggagagcgtcgaagcgggggcggtgttcgccgagatcggcccgcgcatggccgagttgagcggttcccggctggccgcgcagcaacagatggaaggcctcctggcgccgcaccggcccaaggagcccgcgtggttcctggccaccgtcggcgtctcgcccgaccaccagggcaagggtctgggcagcgccgtcgtgctccccggagtggaggcggccgagcgcgccggggtgcccgccttcctggagacctccgcgccccgcaacctccccttctacgagcggctcggcttcaccgtcaccgccgacgtcgaggtgcccgaaggaccgcgcacctggtgcatgacccgcaagcccggtgcctga

SEQ ID NO: 19994 - DNA, 2952 bp, synthetic construct
  source 1..2952: mol_type = other DNA
atggccttaccagtgaccgccttgctcctgccgctggccttgctgctccacgccgccaggccggaaatcgtgctgacacagagccccggcacactgtcactttctccaggcgaaggcgctaccctgtcttgtagagctggacagtctgtgcggagcagctacctcggatggtatcagcagaagcctggacaggcccctcggctgttgatctacggtgcttctagcagagccacaggcatccccgatagattttctggcagcggctccggcaccgacttcaccctgacaatcagcagactggaacccgaggacttcgccgtgtattactgccagcagtacggctacagccctcctacatttggcggaggcaccaagctggaaatcaagctcgaggacctgaagaacgtgttcccacctgaggtggccgtgttcgagcctagcgaggccgagatcagccacacccagaaagccaccctcgtgtgcctggctaccggcttctaccccgaccatgtggaactgtcttggtgggtcaacggcaaagaggtgcacagcggcgtgtctaccgacccccagccactgaaagaacagcccgccctgaacgacagccggtactgcctgagcagcagactgagagtgtccgccaccttctggcagaacccccggaaccacttcagatgccaggtgcagttctacggcctgagcgagaacgacgagtggacccaggacagagccaagcccgtgacccagatcgtgtctgccgaagcctggggcagagccgattgcggatcccagagcttcggcctgctggaccccaagctgtgctacctgctggatggcatcctgttcatctacggcgtgatcctgaccgccctgttcctgagagtgaagttcagcagaagcgccgacgcccctgcctaccagcagggacagaaccaactgtacaacgagctgaacctgggcagacgggaagagtacgacgtgctggacaagcggagaggcagggaccctgagatgggcggaaagccccagcggagaaagaacccccaggaaggactgtataacgaactccagaaagacaagatggccgaagcctacagcgagatcggcatgaagggcgagcggagaagaggcaagggccacgatggcctgtaccagggcctgagcaccgccaccaaggacacctatgacgccctgcacatgcaggccctgcctccaagaagggccaagcgatctggatctggagcaacaaacttctcactactcaaacaagcaggtgacgtggaggagaatcccgggcctactagtatggactggatttggcgcatccttttccttgtcggcgctgctaccggcgcgcattccttcgaagaggttcagctgcttgagtctggcggaggactggttcaacctggcggaagcctgagactgtcttgtgccgccagcggcttcacctttagcagctacgccatgagctgggtccgacaggctcctggcaaaggactggaatgggtgtccgtgatctctggctctggcggcagacccaattacgccgattctgtgaagggcagattcaccatcagccgggacaacagcaagaacaccctgtacctccagatgaacagcctgcgcgacgaggataccgccgtgtactattgtgccaaggtggactacagcaactacctgttcttcgactactggggccagggcaccctggtcacagtttctagcacgcgtatccagaaccctgatcctgccgtgtaccagctgcgggatagcaagagcagcgacaagagcgtgtgtctgttcaccgacttcgacagccagaccaacgtgtcccagagcaaggactccgacgtgtacatcaccgataagaccgtgctggacatgcggagcatggacttcaagagcaactccgccgtggcctggtccaacaagtccgatttcgcctgcgccaacgccttcaacaacagcattatccccgaggacacattcttcccaagccccgagagcagctgcggtaccgtggtcgagaaagaacatccacagcttggcgctggcaccgtcctgttgcttagagccggattctatgccgtcagcttcctgtccgtggctgtggggtctacagtgtattaccagggaaaatgtctcacctggaaaggccccagacgccagcttccagctgttgttcctgctccactgccaccaccttgtggctcctctgctcacttgcttccaccagtgcctggcggacgcgccaagagaagcggatctggcgtgaagcagaccctgaatttcgacctgctgaagctggctggcgacgtggaatccaacccaggcccttctagaggccatatgaccgagtacaagcccacggtgcgcctcgccacccgcgacgacgtccccagggccgtacgcaccctcgccgccgcgttcgccgactaccccgccacgcgccacaccgtcgatccggaccgccacatcgagcgggtcaccgagctgcaagaactcttcctcacgcgcgtcgggctcgacatcggcaaggtgtgggtcgcggacgacggcgccgcggtggcggtctggaccacgccggagagcgtcgaagcgggggcggtgttcgccgagatcggcccgcgcatggccgagttgagcggttcccggctggccgcgcagcaacagatggaaggcctcctggcgccgcaccggcccaaggagcccgcgtggttcctggccaccgtcggcgtctcgcccgaccaccagggcaagggtctgggcagcgccgtcgtgctccccggagtggaggcggccgagcgcgccggggtgcccgccttcctggagacctccgcgccccgcaacctccccttctacgagcggctcggcttcaccgtcaccgccgacgtcgaggtgcccgaaggaccgcgcacctggtgcatgacccgcaagcccggtgcctga

SEQ ID NO: 19995 - DNA, 2865 bp, synthetic construct
  source 1..2865: mol_type = other DNA
atggccttaccagtgaccgccttgctcctgccgctggccttgctgctccacgccgccaggccggaaatcgtgctgacacagagccccggcacactgtcactttctccaggcgaaggcgctaccctgtcttgtagagctggacagtctgtgcggagcagctacctcggatggtatcagcagaagcctggacaggcccctcggctgttgatctacggtgcttctagcagagccacaggcatccccgatagattttctggcagcggctccggcaccgacttcaccctgacaatcagcagactggaacccgaggacttcgccgtgtattactgccagcagtacggctacagccctcctacatttggcggaggcaccaagctggaaatcaagctcgagggacagcctaaggccaatcctaccgtgacactgttccctccaagcagcgaagaactccaggccaacaaggccacacttgtgtgcctgatctccgacttctaccctggggctgtgacagtggcttggaaggccgatggatctcctgtgaaagccggcgtggaaaccaccaagccatccaagcagagcaacaacaaatacgccgccagctcctacctgagcctgacacctgagcagtggaagtcccacagatcctacagctgccaagtgacccacgaaggcagcaccgtggaaaagacagtggcccctacagagtgcagcggatcccagagcttcggcctgctggaccccaagctgtgctacctgctggatggcatcctgttcatctacggcgtgatcctgaccgccctgttcctgagagtgaagttcagcagaagcgccgacgcccctgcctaccagcagggacagaaccaactgtacaacgagctgaacctgggcagacgggaagagtacgacgtgctggacaagcggagaggcagggaccctgagatgggcggaaagccccagcggagaaagaacccccaggaaggactgtataacgaactccagaaagacaagatggccgaagcctacagcgagatcggcatgaagggcgagcggagaagaggcaagggccacgatggcctgtaccagggcctgagcaccgccaccaaggacacctatgacgccctgcacatgcaggccctgcctccaagaagggccaagcgatctggatctggagcaacaaacttctcactactcaaacaagcaggtgacgtggaggagaatcccgggcctactagtatggactggatttggcgcatccttttccttgtcggcgctgctaccggcgcgcattccttcgaagaggttcagctgcttgagtctggcggaggactggttcaacctggcggaagcctgagactgtcttgtgccgccagcggcttcacctttagcagctacgccatgagctgggtccgacaggctcctggcaaaggactggaatgggtgtccgtgatctctggctctggcggcagacccaattacgccgattctgtgaagggcagattcaccatcagccgggacaacagcaagaacaccctgtacctccagatgaacagcctgcgcgacgaggataccgccgtgtactattgtgccaaggtggactacagcaactacctgttcttcgactactggggccagggcaccctggtcacagtttctagcacgcgtgcctctacaaagggaccctccgtgtttcctctggctcccagcagcaagtctacaagcggaggaacagccgctctgggctgcctggtcaaggattactttcccgagcctgtgaccgtgtcctggaatagcggagcactgacaagcggcgtgcacacctttccagccgtgctgcaaagcagcggcctgtactctctgagcagcgtggtcacagtgcctagctctagcctgggcacccagacctacatctgcaatgtgaaccacaagcctagcaacaccaaggtggacaagagagtggaacccaagagctgtggtaccatcactcaaggtttggcagtgtcaaccatctcatcattctttccacctggctaccaagtgtccttctgcctggtcatggtgctgctgttcgccgtggataccggcctgtacttcagcgtcaagaccaacatccggtccagcaccagagactggaaggaccacaagttcaagtggcggaaggaccctcaggacaagagggccaagcgatctggatctggagcaacaaacttctcactactcaaacaagcaggtgacgtggaggagaatcccgggccttctagaggccatatgaccgagtacaagcccacggtgcgcctcgccacccgcgacgacgtccccagggccgtacgcaccctcgccgccgcgttcgccgactaccccgccacgcgccacaccgtcgatccggaccgccacatcgagcgggtcaccgagctgcaagaactcttcctcacgcgcgtcgggctcgacatcggcaaggtgtgggtcgcggacgacggcgccgcggtggcggtctggaccacgccggagagcgtcgaagcgggggcggtgttcgccgagatcggcccgcgcatggccgagttgagcggttcccggctggccgcgcagcaacagatggaaggcctcctggcgccgcaccggcccaaggagcccgcgtggttcctggccaccgtcggcgtctcgcccgaccaccagggcaagggtctgggcagcgccgtcgtgctccccggagtggaggcggccgagcgcgccggggtgcccgccttcctggagacctccgcgccccgcaacctccccttctacgagcggctcggcttcaccgtcaccgccgacgtcgaggtgcccgaaggaccgcgcacctggtgcatgacccgcaagcccggtgcctga

SEQ ID NO: 19996 - DNA, 2910 bp, synthetic construct
  source 1..2910: mol_type = other DNA
atggccttaccagtgaccgccttgctcctgccgctggccttgctgctccacgccgccaggccggaaatcgtgctgacacagagccccggcacactgtcactttctccaggcgaaggcgctaccctgtcttgtagagctggacagtctgtgcggagcagctacctcggatggtatcagcagaagcctggacaggcccctcggctgttgatctacggtgcttctagcagagccacaggcatccccgatagattttctggcagcggctccggcaccgacttcaccctgacaatcagcagactggaacccgaggacttcgccgtgtattactgccagcagtacggctacagccctcctacatttggcggaggcaccaagctggaaatcaagctcgaggacctgaagaacgtgttcccacctgaggtggccgtgttcgagcctagcgaggccgagatcagccacacccagaaagccaccctcgtgtgcctggctaccggcttctaccccgaccatgtggaactgtcttggtgggtcaacggcaaagaggtgcacagcggcgtgtctaccgacccccagccactgaaagaacagcccgccctgaacgacagccggtactgcctgagcagcagactgagagtgtccgccaccttctggcagaacccccggaaccacttcagatgccaggtgcagttctacggcctgagcgagaacgacgagtggacccaggacagagccaagcccgtgacccagatcgtgtctgccgaagcctggggcagagccgattgcggatcccagagcttcggcctgctggaccccaagctgtgctacctgctggatggcatcctgttcatctacggcgtgatcctgaccgccctgttcctgagagtgaagttcagcagaagcgccgacgcccctgcctaccagcagggacagaaccaactgtacaacgagctgaacctgggcagacgggaagagtacgacgtgctggacaagcggagaggcagggaccctgagatgggcggaaagccccagcggagaaagaacccccaggaaggactgtataacgaactccagaaagacaagatggccgaagcctacagcgagatcggcatgaagggcgagcggagaagaggcaagggccacgatggcctgtaccagggcctgagcaccgccaccaaggacacctatgacgccctgcacatgcaggccctgcctccaagaagggccaagcgatctggatctggagcaacaaacttctcactactcaaacaagcaggtgacgtggaggagaatcccgggcctactagtatggactggatttggcgcatccttttccttgtcggcgctgctaccggcgcgcattccttcgaagaggttcagctgcttgagtctggcggaggactggttcaacctggcggaagcctgagactgtcttgtgccgccagcggcttcacctttagcagctacgccatgagctgggtccgacaggctcctggcaaaggactggaatgggtgtccgtgatctctggctctggcggcagacccaattacgccgattctgtgaagggcagattcaccatcagccgggacaacagcaagaacaccctgtacctccagatgaacagcctgcgcgacgaggataccgccgtgtactattgtgccaaggtggactacagcaactacctgttcttcgactactggggccagggcaccctggtcacagtttctagcacgcgtatccagaaccctgatcctgccgtgtaccagctgcgggatagcaagagcagcgacaagagcgtgtgtctgttcaccgacttcgacagccagaccaacgtgtcccagagcaaggactccgacgtgtacatcaccgataagaccgtgctggacatgcggagcatggacttcaagagcaactccgccgtggcctggtccaacaagtccgatttcgcctgcgccaacgccttcaacaacagcattatccccgaggacacattcttcccaagccccgagagcagctgcggtaccatcactcaaggtttggcagtgtcaaccatctcatcattctttccacctggctaccaagtgtccttctgcctggtcatggtgctgctgttcgccgtggataccggcctgtacttcagcgtcaagaccaacatccggtccagcaccagagactggaaggaccacaagttcaagtggcggaaggaccctcaggacaagagggccaagcgatctggatctggagcaacaaacttctcactactcaaacaagcaggtgacgtggaggagaatcccgggccttctagaggccatatgaccgagtacaagcccacggtgcgcctcgccacccgcgacgacgtccccagggccgtacgcaccctcgccgccgcgttcgccgactaccccgccacgcgccacaccgtcgatccggaccgccacatcgagcgggtcaccgagctgcaagaactcttcctcacgcgcgtcgggctcgacatcggcaaggtgtgggtcgcggacgacggcgccgcggtggcggtctggaccacgccggagagcgtcgaagcgggggcggtgttcgccgagatcggcccgcgcatggccgagttgagcggttcccggctggccgcgcagcaacagatggaaggcctcctggcgccgcaccggcccaaggagcccgcgtggttcctggccaccgtcggcgtctcgcccgaccaccagggcaagggtctgggcagcgccgtcgtgctccccggagtggaggcggccgagcgcgccggggtgcccgccttcctggagacctccgcgccccgcaacctccccttctacgagcggctcggcttcaccgtcaccgccgacgtcgaggtgcccgaaggaccgcgcacctggtgcatgacccgcaagcccggtgcctga

SEQ ID NO: 19997 - DNA, 1959 bp, synthetic construct
  source 1..1959: mol_type = other DNA
atggccttaccagtgaccgccttgctcctgccgctggccttgctgctccacgccgccaggccggaaatcgtgctgacacagagccccggcacactgtcactttctccaggcgaaggcgctaccctgtcttgtagagctggacagtctgtgcggagcagctacctcggatggtatcagcagaagcctggacaggcccctcggctgttgatctacggtgcttctagcagagccacaggcatccccgatagattttctggcagcggctccggcaccgacttcaccctgacaatcagcagactggaacccgaggacttcgccgtgtattactgccagcagtacggctacagccctcctacatttggcggaggcaccaagctggaaatcaagctcgagggacagcctaaggccaatcctaccgtgacactgttccctccaagcagcgaagaactccaggccaacaaggccacacttgtgtgcctgatctccgacttctaccctggggctgtgacagtggcttggaaggccgatggatctcctgtgaaagccggcgtggaaaccaccaagccatccaagcagagcaacaacaaatacgccgccagctcctacctgagcctgacacctgagcagtggaagtcccacagatcctacagctgccaagtgacccacgaaggcagcaccgtggaaaagacagtggcccctacagagtgcagcggatccctgggagagcctcagctgtgctatatcctggacgccatcctgtttctgtacggcatcgtgctgaccctgctgtactgccggctgaagatccaagtgcggaaggccgccatcaccagctacgagaaatccgacggcgtgtacaccggcctgagcaccagaaatcaagagacatacgagacactgaagcacgaaaagcctccacaaagggccaagcgatctggatctggagcaacaaacttctcactactcaaacaagcaggtgacgtggaggagaatcccgggcctactagtatggactggatttggcgcatccttttccttgtcggcgctgctaccggcgcgcattccttcgaagaggttcagctgcttgagtctggcggaggactggttcaacctggcggaagcctgagactgtcttgtgccgccagcggcttcacctttagcagctacgccatgagctgggtccgacaggctcctggcaaaggactggaatgggtgtccgtgatctctggctctggcggcagacccaattacgccgattctgtgaagggcagattcaccatcagccgggacaacagcaagaacaccctgtacctccagatgaacagcctgcgcgacgaggataccgccgtgtactattgtgccaaggtggactacagcaactacctgttcttcgactactggggccagggcaccctggtcacagtttctagcacgcgtgcctctacaaagggaccctccgtgtttcctctggctcccagcagcaagtctacaagcggaggaacagccgctctgggctgcctggtcaaggattactttcccgagcctgtgaccgtgtcctggaatagcggagcactgacaagcggcgtgcacacctttccagccgtgctgcaaagcagcggcctgtactctctgagcagcgtggtcacagtgcctagctctagcctgggcacccagacctacatctgcaatgtgaaccacaagcctagcaacaccaaggtggacaagagagtggaacccaagagctgtggtaccctcggagaaccacagctctgttacattctggatgctatcctgttcctctatgggatcgtcctgacactcctgtattgcagactcaaaattcaagttcgcaaagccgccattacctcttacgagaagagtgatggggtgtacacaggactgtctacccggaatcaagaaacctacgaaaccctcaaacatgagaagccacctcagtaa

SEQ ID NO: 19998 - DNA, 3090 bp, synthetic construct
  source 1..3090: mol_type = other DNA
atggccttaccagtgaccgccttgctcctgccgctggccttgctgctccacgccgccaggccggaaatcgtgctgacacagagccccggcacactgtcactttctccaggcgaaggcgctaccctgtcttgtagagctggacagtctgtgcggagcagctacctcggatggtatcagcagaagcctggacaggcccctcggctgttgatctacggtgcttctagcagagccacaggcatccccgatagattttctggcagcggctccggcaccgacttcaccctgacaatcagcagactggaacccgaggacttcgccgtgtattactgccagcagtacggctacagccctcctacatttggcggaggcaccaagctggaaatcaagggacagcctaaggccaatcctaccgtgacactgttccctccaagcagcgaagaactccaggccaacaaggccacacttgtgtgcctgatctccgacttctaccctggggctgtgacagtggcttggaaggccgatggatctcctgtgaaagccggcgtggaaaccaccaagccatccaagcagagcaacaacaaatacgccgccagctcctacctgagcctgacacctgagcagtggaagtcccacagatcctacagctgccaagtgacccacgaaggcagcaccgtggaaaagacagtggcccctacagagtgcagcggatcccagagcttcggcctgctggaccccaagctgtgctacctgctggatggcatcctgttcatctacggcgtgatcctgaccgccctgttcctgagagtgaagttcagcagaagcgccgacgcccctgcctaccagcagggacagaaccaactgtacaacgagctgaacctgggcagacgggaagagtacgacgtgctggacaagcggagaggcagggaccctgagatgggcggaaagccccggagaaagaacccccaggaaggactgtataacgaactccagaaagacaagatggccgaagcctacagcgagatcggcatgaagggcgagcggagaagaggcaagggccacgatggcctgtaccagggcctgagcaccgccaccaaggacacctatgacgccctgcacatgcaggccctgcctccaagaagggccaagcgatctggatctggagcaacaaacttctcactactcaaacaagcaggtgacgtggaggagaatcccgggcctactagtatggactggatttggcgcatccttttccttgtcggcgctgctaccggcgcgcattccttcgaagaggttcagctgcttgagtctggcggaggactggttcaacctggcggaagcctgagactgtcttgtgccgccagcggcttcacctttagcagctacgccatgagctgggtccgacaggctcctggcaaaggactggaatgggtgtccgtgatctctggctctggcggcagacccaattacgccgattctgtgaagggcagattcaccatcagccgggacaacagcaagaacaccctgtacctccagatgaacagcctgcgcgacgaggataccgccgtgtactattgtgccaaggtggactacagcaactacctgttcttcgactactggggccagggcaccctggtcacagtttctagcgcctctacaaagggaccctccgtgtttcctctggctcccagcagcaagtctacaagcggaggaacagccgctctgggctgcctggtcaaggattactttcccgagcctgtgaccgtgtcctggaatagcggagcactgacaagcggcgtgcacacctttccagccgtgctgcaaagcagcggcctgtactctctgagcagcgtggtcacagtgcctagctctagcctgggcacccagacctacatctgcaatgtgaaccacaagcctagcaacaccaaggtggacaagagagtggaacccaagagctgtggtacccagagttttgggttgttggaccctaaattgtgctatctgttggacggaatcctgttcatttacggagtgatcctgaccgcattgttcctgcgggttaagttttccagatccgcagacgcacccgcttaccaacaagggcagaaccaactctacaatgaacttaatttggggcggagggaagagtacgacgttctggacaaaaggaggggacgagatcccgagatgggcggaaagcctcgaaggaagaatccgcaagaggggctttataacgaactccagaaagataaaatggcagaagcctatagtgagattgggatgaagggagaaaggaggaggggtaaaggtcacgatgggttgtaccaaggattgagcacagccactaaagatacctatgatgcgctccacatgcaggccctgccgccaagacgcgccaagagaagcggatctggcgtgaagcagaccctgaatttcgacctgctgaagctggctggcgacgtggaatccaacccaggcccttctagaggccatatgaccgagtacaagcccacggtgcgcctcgccacccgcgacgacgtccccagggccgtacgcaccctcgccgccgcgttcgccgactaccccgccacgcgccacaccgtcgatccggaccgccacatcgagcgggtcaccgagctgcaagaactcttcctcacgcgcgtcgggctcgacatcggcaaggtgtgggtcgcggacgacggcgccgcggtggcggtctggaccacgccggagagcgtcgaagcgggggcggtgttcgccgagatcggcccgcgcatggccgagttgagcggttcccggctggccgcgcagcaacagatggaaggcctcctggcgccgcaccggcccaaggagcccgcgtggttcctggccaccgtcggcgtctcgcccgaccaccagggcaagggtctgggcagcgccgtcgtgctccccggagtggaggcggccgagcgcgccggggtgcccgccttcctggagacctccgcgccccgcaacctccccttctacgagcggctcggcttcaccgtcaccgccgacgtcgaggtgcccgaaggaccgcgcacctggtgcatgacccgcaagcccggtgcctga

SEQ ID NO: 19999 - DNA, 2445 bp, synthetic construct
  source 1..2445: mol_type = other DNA
atggccttaccagtgaccgccttgctcctgccgctggccttgctgctccacgccgccaggccggaaatcgtgctgacacagagccccggcacactgtcactttctccaggcgaaggcgctaccctgtcttgtagagctggacagtctgtgcggagcagctacctcggatggtatcagcagaagcctggacaggcccctcggctgttgatctacggtgcttctagcagagccacaggcatccccgatagattttctggcagcggctccggcaccgacttcaccctgacaatcagcagactggaacccgaggacttcgccgtgtattactgccagcagtacggctacagccctcctacatttggcggaggcaccaagctggaaatcaagctcgaggacctgaagaacgtgttcccacctgaggtggccgtgttcgagcctagcgaggccgagatcagccacacccagaaagccaccctcgtgtgcctggctaccggcttctaccccgaccatgtggaactgtcttggtgggtcaacggcaaagaggtgcacagcggcgtgtctaccgacccccagccactgaaagaacagcccgccctgaacgacagccggtactgcctgagcagcagactgagagtgtccgccaccttctggcagaacccccggaaccacttcagatgccaggtgcagttctacggcctgagcgagaacgacgagtggacccaggacagagccaagcccgtgacccagatcgtgtctgccgaagcctggggcagagccgattgcggatcccagagcttcggcctgctggaccccaagctgtgctacctgctggatggcatcctgttcatctacggcgtgatcctgaccgccctgttcctgagagtgaagttcagcagaagcgccgacgcccctgcctaccagcagggacagaaccaactgtacaacgagctgaacctgggcagacgggaagagtacgacgtgctggacaagcggagaggcagggaccctgagatgggcggaaagccccggagaaagaacccccaggaaggactgtataacgaactccagaaagacaagatggccgaagcctacagcgagatcggcatgaagggcgagcggagaagaggcaagggccacgatggcctgtaccagggcctgagcaccgccaccaaggacacctatgacgccctgcacatgcaggccctgcctccaagaagggccaagcgatctggatctggagcaacaaacttctcactactcaaacaagcaggtgacgtggaggagaatcccgggcctactagtatggactggatttggcgcatccttttccttgtcggcgctgctaccggcgcgcattccttcgaagaggttcagctgcttgagtctggcggaggactggttcaacctggcggaagcctgagactgtcttgtgccgccagcggcttcacctttagcagctacgccatgagctgggtccgacaggctcctggcaaaggactggaatgggtgtccgtgatctctggctctggcggcagacccaattacgccgattctgtgaagggcagattcaccatcagccgggacaacagcaagaacaccctgtacctccagatgaacagcctgcgcgacgaggataccgccgtgtactattgtgccaaggtggactacagcaactacctgttcttcgactactggggccagggcaccctggtcacagtttctagcacgcgtatccagaaccctgatcctgccgtgtaccagctgcgggatagcaagagcagcgacaagagcgtgtgtctgttcaccgacttcgacagccagaccaacgtgtcccagagcaaggactccgacgtgtacatcaccgataagaccgtgctggacatgcggagcatggacttcaagagcaactccgccgtggcctggtccaacaagtccgatttcgcctgcgccaacgccttcaacaacagcattatccccgaggacacattcttcccaagccccgagagcagctgcggtacccagagttttgggttgttggaccctaaattgtgctatctgttggacggaatcctgttcatttacggagtgatcctgaccgcattgttcctgcgggttaagttttccagatccgcagacgcacccgcttaccaacaagggcagaaccaactctacaatgaacttaatttggggcggagggaagagtacgacgttctggacaaaaggaggggacgagatcccgagatgggcggaaagcctcgaaggaagaatccgcaagaggggctttataacgaactccagaaagataaaatggcagaagcctatagtgagattgggatgaagggagaaaggaggaggggtaaaggtcacgatgggttgtaccaaggattgagcacagccactaaagatacctatgatgcgctccacatgcaggccctgccgccaaga

SEQ ID NO: 20000 - DNA, 1488 bp, synthetic construct
  source 1..1488: mol_type = other DNA
atggccttaccagtgaccgccttgctcctgccgctggccttgctgctccacgccgccaggccggaaatcgtgctgacacagagccccggcacactgtctcttagccctggcgaaagagccacactgagctgtagagccagccagagcatcagaagcagctacctggcctggtatcagcagaagcctggacaggcaccccggctgttgatctacggtgcttctagcagagccacaggcatccccgatagattttctggcagcggctccggcaccgacttcaccctgacaatcagcagactggaacccgaggactttgccgtgtattactgccagcagtacggcgacctgcctttcacatttggccctggcaccaagctggaaatcaagggcggaggcggaagtggaggcggaggatctggcggcggaggctctgaggttcagctgctggaatctggcggaggaatggttcagcctggcggctctctgagactgtcttgtgccgccagcggcttcacctttagcagctacgccatgagctgggtccgacaggctcctggcaaaggactggaatgggtgtccgccatctctggctctggcggcagaaccttttacgccgatagcgtggaaggccggttcaccatcagccgggacaacagcaagaacaccctgtacctccagatgaacagcctgagagccgaggacaccgccgtgtactattgcgccaagcacgactacagcaactacccctacttcgactactggggccagggcacactggtcacagtttctagcacgcgtgagcagaaactgatctcggaagaggatctgaaaattgaagttatgtatcctcctccttacctagacaatgagaagagcaatggaaccattatccatgtgaaagggaaacacctttgtccaagtcccctatttcccggaccttctaagcccttttgggtgctggtggtggttgggggagtcctggcttgctatagcttgctagtaacagtggcctttattattttctgggtgaggagtaagaggagcaggctcctgcacagtgactacatgaacatgactccacgccgccccggacccacccgcaagcattaccagccctatgccccaccacgcgacttcgcagcctatcgctccagagtgaagttcagcaggagcgcagacgcccccgcgtaccagcagggccagaaccagctctataacgagctcaatctaggacgaagagaggagtacgatgttttggacaagagacgtggccgggaccctgagatggggggaaagccgagaaggaagaaccctcaggaaggcctgtacaatgaactgcagaaagataagatggcggaggcctacagtgagattgggatgaaaggcgagcgccggaggggcaaggggcacgatggcctttaccagggtctcagtacagccaccaaggacacctacgacgcccttcacatgcaggccctgccccctcgc

SEQ ID NO: 20001 - DNA, 1509 bp, synthetic construct
  source 1..1509: mol_type = other DNA
atggccttaccagtgaccgccttgctcctgccgctggccttgctgctccacgccgccaggccggaaatcgtgctgacacagagccccggcacactgtctcttagccctggcgaaagagccacactgagctgtagagccagccagagcatcagaagcagctacctggcctggtatcagcagaagcctggacaggcaccccggctgttgatctacggtgcttctagcagagccacaggcatccccgatagattttctggcagcggctccggcaccgacttcaccctgacaatcagcagactggaacccgaggactttgccgtgtattactgccagcagtacggcgacctgcctttcacatttggccctggcaccaagctggaaatcaagggcggaggcggaagtggaggcggaggatctggcggcggaggctctgaggttcagctgctggaatctggcggaggaatggttcagcctggcggctctctgagactgtcttgtgccgccagcggcttcacctttagcagctacgccatgagctgggtccgacaggctcctggcaaaggactggaatgggtgtccgccatctctggctctggcggcagaaccttttacgccgatagcgtggaaggccggttcaccatcagccgggacaacagcaagaacaccctgtacctccagatgaacagcctgagagccgaggacaccgccgtgtactattgcgccaagcacgactacagcaactacccctacttcgactactggggccagggcacactggtcacagtttctagcacgcgtgagcagaaactgatctcggaagaggatctggcgaagcccaccacgacgccagcgccgcgaccaccaacaccggcgcccaccatcgcgtcgcagcccctgtccctgcgcccagaggcgtgccggccagcggcggggggcgcagtgcacacgagggggctggacttcgcctgtgacatctacatctgggcgcccttggccgggacttgtggggtccttctcctgtcactggttatcaccctttactgcaaacggggcagaaagaaactcctgtatatattcaaacaaccatttatgagaccagtacaaactactcaagaggaagatggctgtagctgccgatttccagaagaagaagaaggaggatgtgaactgagagtgaagttcagcaggagcgcagacgcccccgcgtaccagcagggccagaaccagctctataacgagctgaatctaggacgaagagaggagtacgatgttttggacaagagacgtggccgggaccctgagatggggggaaagccgagaaggaagaaccctcaggaaggcctgtacaatgaactgcagaaagataagatggcggaggcctacagtgagattgggatgaaaggcgagcgccggaggggcaaggggcacgatggcctttaccagggtctcagtacagccaccaaggacacctacgacgcccttcacatgcaggccctgccccctcgctga

SEQ ID NO: 20002 - DNA, 1509 bp, synthetic construct
  source 1..1509: mol_type = other DNA
atggccttaccagtgaccgccttgctcctgccgctggccttgctgctccacgccgccaggccggaggttcagctgctggaatctggcggaggaatggttcagcctggcggctctctgagactgtcttgtgccgccagcggcttcacctttagcagctacgccatgagctgggtccgacaggctcctggcaaaggactggaatgggtgtccgccatctctggctctggcggcagaaccttttacgccgatagcgtggaaggccggttcaccatcagccgggacaacagcaagaacaccctgtacctccagatgaacagcctgagagccgaggacaccgccgtgtactattgcgccaagcacgactacagcaactacccctacttcgactactggggccagggcacactggtcacagtttctagcggcggaggcggaagtggaggcggaggatctggcggcggaggctctgaaatcgtgctgacacagagccccggcacactgtctcttagccctggcgaaagagccacactgagctgtagagccagccagagcatcagaagcagctacctggcctggtatcagcagaagcctggacaggcaccccggctgttgatctacggtgcttctagcagagccacaggcatccccgatagattttctggcagcggctccggcaccgacttcaccctgacaatcagcagactggaacccgaggactttgccgtgtattactgccagcagtacggcgacctgcctttcacatttggccctggcaccaagctggaaatcaagacgcgtgagcagaaactgatctcggaagaggatctggcgaagcccaccacgacgccagcgccgcgaccaccaacaccggcgcccaccatcgcgtcgcagcccctgtccctgcgcccagaggcgtgccggccagcggcggggggcgcagtgcacacgagggggctggacttcgcctgtgacatctacatctgggcgcccttggccgggacttgtggggtccttctcctgtcactggttatcaccctttactgcaaacggggcagaaagaaactcctgtatatattcaaacaaccatttatgagaccagtacaaactactcaagaggaagatggctgtagctgccgatttccagaagaagaagaaggaggatgtgaactgagagtgaagttcagcaggagcgcagacgcccccgcgtaccagcagggccagaaccagctctataacgagctgaatctaggacgaagagaggagtacgatgttttggacaagagacgtggccgggaccctgagatggggggaaagccgagaaggaagaaccctcaggaaggcctgtacaatgaactgcagaaagataagatggcggaggcctacagtgagattgggatgaaaggcgagcgccggaggggcaaggggcacgatggcctttaccagggtctcagtacagccaccaaggacacctacgacgcccttcacatgcaggccctgccccctcgctga

SEQ ID NO: 20003 - DNA, 2748 bp, synthetic construct
  source 1..2748: mol_type = other DNA
atggccttaccagtgaccgccttgctcctgccgctggccttgctgctccacgccgccaggccggaaatcgtgctgacacagagccccggcacactgtctcttagccctggcgaaagagccacactgagctgtagagccagccagagcatcagaagcagctacctggcctggtatcagcagaagcctggacaggcaccccggctgttgatctacggtgcttctagcagagccacaggcatccccgatagattttctggcagcggctccggcaccgacttcaccctgacaatcagcagactggaacccgaggactttgccgtgtattactgccagcagtacggcgacctgcctttcacatttggccctggcaccaagctggaaatcaagggcggaggcggaagtggaggcggaggatctggcggcggaggctctgaggttcagctgctggaatctggcggaggaatggttcagcctggcggctctctgagactgtcttgtgccgccagcggcttcacctttagcagctacgccatgagctgggtccgacaggctcctggcaaaggactggaatgggtgtccgccatctctggctctggcggcagaaccttttacgccgatagcgtggaaggccggttcaccatcagccgggacaacagcaagaacaccctgtacctccagatgaacagcctgagagccgaggacaccgccgtgtactattgcgccaagcacgactacagcaactacccctacttcgactactggggccagggcacactggtcacagtttctagcacgcgtgagcagaaactgatctcggaagaggatctggcgaagcccaccacgacgccagcgccgcgaccaccaacaccggcgcccaccatcgcgtcgcagcccctgtccctgcgcccagaggcgtgccggccagcggcggggggcgcagtgcacacgagggggctggacttcgcctgtgacatctacatctgggcgcccttggccgggacttgtggggtccttctcctgtcactggttatcaccctttactgcgggcgcgccagagtgaagttcagcaggagcgcagacgcccccgcgtaccagcagggccagaaccagctctataacgagctgaatctaggacgaagagaggagtacgatgttttggacaagagacgtggccgggaccctgagatggggggaaagccgagaaggaagaaccctcaggaaggcctgtacaatgaactgcagaaagataagatggcggaggcctacagtgagattgggatgaaaggcgagcgccggaggggcaaggggcacgatggcctttaccagggtctcagtacagccaccaaggacacctacgacgcccttcacatgcaggccctgccccctcgctctagaggatctggagcaacaaacttctcactactcaaacaagcaggtgacgtggaggagaatcccgggcctgggatccacatggccacttacgaggttctctgtgaggtggcgcggaaactgggcacggatgacagggaagtggtattgttcctcctaaacgtgttcatacctcaacccacactggcccaattaattggagctcttagagctttaaaggaggagggcaggttaacgtttcccctgttagcggaatgtctgtttcgtgcaggtcgcagagacctcttgcgcgacctgcttcacttagacccgcgttttttagagcgccacctagcgggcacaatgagttatttcagcccttatcagctcactgttctccacgtagacggggagctgtgtgcgagggatattaggtctttgatatttttaagcaaggacactatagggtctcgcagcacaccacagacattcttacactgggtgtactgtatggaaaacttagacctactgggtcccactgacgtggatgccctaatgtcaatgcttagatctttgtcaagagtagacctacagcgccaagtgcaaaccctaatgggccttcacctttccggcccatcacactcccaacactatcgccatacaccactcgagaccgatttctacgactacaaggacgacgatgacaagactagtggctccggcgagggcagaggaagtctactaacctgcggagatgtggaagaaaatcctggcccacatatgaccgagtacaagcccacggtgcgcctcgccacccgcgacgacgtccccagggccgtacgcaccctcgccgccgcgttcgccgactaccccgccacgcgccacaccgtcgatccggaccgccacatcgagcgggtcaccgagctgcaagaactcttcctcacgcgcgtcgggctcgacatcggcaaggtgtgggtcgcggacgacggcgccgcggtggcggtctggaccacgccggagagcgtcgaagcgggggcggtgttcgccgagatcggcccgcgcatggccgagttgagcggttcccggctggccgcgcagcaacagatggaaggcctcctggcgccgcaccggcccaaggagcccgcgtggttcctggccaccgtcggcgtctcgcccgaccaccagggcaagggtctgggcagcgccgtcgtgctccccggagtggaggcggccgagcgcgccggggtgcccgccttcctggagacctccgcgccccgcaacctccccttctacgagcggctcggcttcaccgtcaccgccgacgtcgaggtgcccgaaggaccgcgcacctggtgcatgacccgcaagcccggtgcctga

SEQ ID NO: 20004 - DNA, 2568 bp, synthetic construct
  source 1..2568: mol_type = other DNA
atggccttaccagtgaccgccttgctcctgccgctggccttgctgctccacgccgccaggccggaaatcgtgctgacacagagccccggcacactgtctcttagccctggcgaaagagccacactgagctgtagagccagccagagcatcagaagcagctacctggcctggtatcagcagaagcctggacaggcaccccggctgttgatctacggtgcttctagcagagccacaggcatccccgatagattttctggcagcggctccggcaccgacttcaccctgacaatcagcagactggaacccgaggactttgccgtgtattactgccagcagtacggcgacctgcctttcacatttggccctggcaccaagctggaaatcaagctcgagatccagaaccctgatcctgccgtgtaccagctgcgggatagcaagagcagcgacaagagcgtgtgtctgttcaccgacttcgacagccagaccaacgtgtcccagagcaaggactccgacgtgtacatcaccgataagtgcgtgctggacatgcggagcatggacttcaagagcaactccgccgtggcctggtccaacaagtccgatttcgcctgcgccaacgccttcaacaacagcattatccccgaggacacattcttcccaagcagcgacgtgccctgcgacgtgaagctggtggaaaagagcttcgagacagacaccaacctgaacttccagaacctgagcgtgatcggcttcagaatcctgctgctgaaagtggccggctttaacctgctgatgaccctgcggctgtggtccagccgcgccaagagaagcggatctggcgtgaagcagaccctgaatttcgacctgctgaagctggctggcgacgtggaatccaacccaggccctactagtatggactggatttggcgcatccttttccttgtcggcgctgctaccggcgcgcattccttcgaagaggttcagctgctggaatctggcggaggaatggttcagcctggcggctctctgagactgtcttgtgccgccagcggcttcacctttagcagctacgccatgagctgggtccgacaggctcctggcaaaggactggaatgggtgtccgccatctctggctctggcggcagaaccttttacgccgatagcgtggaaggccggttcaccatcagccgggacaacagcaagaacaccctgtacctccagatgaacagcctgagagccgaggacaccgccgtgtactattgcgccaagcacgactacagcaactacccctacttcgactactggggccagggcacactggtcacagtttctagcacgcgtgaggacctgaagaacgtgttcccacctgaggtggccgtgttcgagcctagcaaggccgagatcgcccacacccagaaagccaccctcgtgtgcctggctaccggcttctaccccgaccatgtggaactgtcttggtgggtcaacggcaaagaggtgcacagcggcgtgtgtaccgacccccagccactgaaagaacagcccgccctgaacgacagccggtactgcctgagcagcagactgagagtgtccgccaccttctggcagaacccccggaaccacttcagatgccaggtgcagttctacggcctgagcgagaacgacgagtggacccaggacagagccaagcccgtgacccagatcgtgtctgccgaagcctggggcagagccgattgcggcatcaccagcgccagctaccaccagggcgtgctgagcgccaccatcctgtacgagatcctgctgggcaaggccaccctgtacgccgtgctggtgtctgccctggtgctgatggctatggtcaagcggaaggacagccggggaagggccaagcgatctggatctggagcaacaaacttctcactactcaaacaagcaggtgacgtggaggagaatcccgggccttctagaggccatatgaccgagtacaagcccacggtgcgcctcgccacccgcgacgacgtccccagggccgtacgcaccctcgccgccgcgttcgccgactaccccgccacgcgccacaccgtcgatccggaccgccacatcgagcgggtcaccgagctgcaagaactcttcctcacgcgcgtcgggctcgacatcggcaaggtgtgggtcgcggacgacggcgccgcggtggcggtctggaccacgccggagagcgtcgaagcgggggcggtgttcgccgagatcggcccgcgcatggccgagttgagcggttcccggctggccgcgcagcaacagatggaaggcctcctggcgccgcaccggcccaaggagcccgcgtggttcctggccaccgtcggcgtctcgcccgaccaccagggcaagggtctgggcagcgccgtcgtgctccccggagtggaggcggccgagcgcgccggggtgcccgccttcctggagacctccgcgccccgcaacctccccttctacgagcggctcggcttcaccgtcaccgccgacgtcgaggtgcccgaaggaccgcgcacctggtgcatgacccgcaagcccggtgcctga

SEQ ID NO: 20005 - DNA, 2565 bp, synthetic construct
  source 1..2565: mol_type = other DNA
atggccttaccagtgaccgccttgctcctgccgctggccttgctgctccacgccgccaggccggaaatcgtgctgacacagagccccggcacactgtctcttagccctggcgaaagagccacactgagctgtagagccagccagagcatcagaagcagctacctggcctggtatcagcagaagcctggacaggcaccccggctgttgatctacggtgcttctagcagagccacaggcatccccgatagattttctggcagcggctccggcaccgacttcaccctgacaatcagcagactggaacccgaggactttgccgtgtattactgccagcagtacggcgacctgcctttcacatttggccctggcaccaagctggaaatcaagctcgaggacctgaagaacgtgttcccacctgaggtggccgtgttcgagcctagcaaggccgagatcgcccacacccagaaagccaccctcgtgtgcctggctaccggcttctaccccgaccatgtggaactgtcttggtgggtcaacggcaaagaggtgcacagcggcgtgtgtaccgacccccagccactgaaagaacagcccgccctgaacgacagccggtactgcctgagcagcagactgagagtgtccgccaccttctggcagaacccccggaaccacttcagatgccaggtgcagttctacggcctgagcgagaacgacgagtggacccaggacagagccaagcccgtgacccagatcgtgtctgccgaagcctggggcagagccgattgcggcatcaccagcgccagctaccaccagggcgtgctgagcgccaccatcctgtacgagatcctgctgggcaaggccaccctgtacgccgtgctggtgtctgccctggtgctgatggctatggtcaagcggaaggacagccggggaagggccaagcgatctggatctggagcaacaaacttctcactactcaaacaagcaggtgacgtggaggagaatcccgggcctactagtatggactggatttggcgcatccttttccttgtcggcgctgctaccggcgcgcattccttcgaagaggttcagctgctggaatctggcggaggaatggttcagcctggcggctctctgagactgtcttgtgccgccagcggcttcacctttagcagctacgccatgagctgggtccgacaggctcctggcaaaggactggaatgggtgtccgccatctctggctctggcggcagaaccttttacgccgatagcgtggaaggccggttcaccatcagccgggacaacagcaagaacaccctgtacctccagatgaacagcctgagagccgaggacaccgccgtgtactattgcgccaagcacgactacagcaactacccctacttcgactactggggccagggcacactggtcacagtttctagcacgcgtatccagaaccctgatcctgccgtgtaccagctgcgggatagcaagagcagcgacaagagcgtgtgtctgttcaccgacttcgacagccagaccaacgtgtcccagagcaaggactccgacgtgtacatcaccgataagtgcgtgctggacatgcggagcatggacttcaagagcaactccgccgtggcctggtccaacaagtccgatttcgcctgcgccaacgccttcaacaacagcattatccccgaggacacattcttcccaagcagcgacgtgccctgcgacgtgaagctggtggaaaagagcttcgagacagacaccaacctgaacttccagaacctgagcgtgatcggcttcagaatcctgctgctgaaagtggccggctttaacctgctgatgaccctgcggctgtggtccagccgcgccaagagaagcggatctggcgtgaagcagaccctgaatttcgacctgctgaagctggctggcgacgtggaatccaacccaggcccttctagaggccatatgaccgagtacaagcccacggtgcgcctcgccacccgcgacgacgtccccagggccgtacgcaccctcgccgccgcgttcgccgactaccccgccacgcgccacaccgtcgatccggaccgccacatcgagcgggtcaccgagctgcaagaactcttcctcacgcgcgtcgggctcgacatcggcaaggtgtgggtcgcggacgacggcgccgcggtggcggtctggaccacgccggagagcgtcgaagcgggggcggtgttcgccgagatcggcccgcgcatggccgagttgagcggttcccggctggccgcgcagcaacagatggaaggcctcctggcgccgcaccggcccaaggagcccgcgtggttcctggccaccgtcggcgtctcgcccgaccaccagggcaagggtctgggcagcgccgtcgtgctccccggagtggaggcggccgagcgcgccggggtgcccgccttcctggagacctccgcgccccgcaacctccccttctacgagcggctcggcttcaccgtcaccgccgacgtcgaggtgcccgaaggaccgcgcacctggtgcatgacccgcaagcccggtgcctga

SEQ ID NO: 20006 - DNA, 1863 bp, synthetic construct
  source 1..1863: mol_type = other DNA
atggccttaccagtgaccgccttgctcctgccgctggccttgctgctccacgccgccaggccggaaatcgtgctgacacagagccccggcacactgtctcttagccctggcgaaagagccacactgagctgtagagccagccagagcatcagaagcagctacctggcctggtatcagcagaagcctggacaggcaccccggctgttgatctacggtgcttctagcagagccacaggcatccccgatagattttctggcagcggctccggcaccgacttcaccctgacaatcagcagactggaacccgaggactttgccgtgtattactgccagcagtacggcgacctgcctttcacatttggccctggcaccaagctggaaatcaagctcgaggacctgaagaacgtgttcccacctgaggtggccgtgttcgagcctagcgaggccgagatcagccacacccagaaagccaccctcgtgtgcctggctaccggcttctaccccgaccatgtggaactgtcttggtgggtcaacggcaaagaggtgcacagcggcgtgtgtaccgacccccagccactgaaagaacagcccgccctgaacgacagccggtactgcctgagcagcagactgagagtgtccgccaccttctggcagaacccccggaaccacttcagatgccaggtgcagttctacggcctgagcgagaacgacgagtggacccaggacagagccaagcccgtgacccagatcgtgtctgccgaagcctggggcagagccgattgcggctttaccagcgagagctaccagcagggcgtgctgagcgccaccatcctgtacgagatcctgctgggcaaggccaccctgtacgccgtgctggtgtctgccctggtgctgatggctatggtcaagcggaaggacagccggggaagggccaagcgatctggatctggagcaacaaacttctcactactcaaacaagcaggtgacgtggaggagaatcccgggcctactagtatggactggatttggcgcatccttttccttgtcggcgctgctaccggcgcgcattccttcgaagaggttcagctgctggaatctggcggaggaatggttcagcctggcggctctctgagactgtcttgtgccgccagcggcttcacctttagcagctacgccatgagctgggtccgacaggctcctggcaaaggactggaatgggtgtccgccatctctggctctggcggcagaaccttttacgccgatagcgtggaaggccggttcaccatcagccgggacaacagcaagaacaccctgtacctccagatgaacagcctgagagccgaggacaccgccgtgtactattgcgccaagcacgactacagcaactacccctacttcgactactggggccagggcacactggtcacagtttctagcacgcgtatccagaaccctgatcctgccgtgtaccagctgcgggatagcaagagcagcgacaagagcgtgtgtctgttcaccgacttcgacagccagaccaacgtgtcccagagcaaggactccgacgtgtacatcaccgataagtgcgtgctggacatgcggagcatggacttcaagagcaactccgccgtggcctggtccaacaagtccgatttcgcctgcgccaacgccttcaacaacagcattatccccgaggacacattcttcccaagccccgagagcagctgcgacgtgaagctggtggaaaagagcttcgagacagacaccaacctgaacttccagaacctgagcgtgatcggcttcagaatcctgctgctgaaagtggccggctttaacctgctgatgaccctgcggctgtggtccagc

SEQ ID NO: 20007 - DNA, 2538 bp, synthetic construct
  source 1..2538: mol_type = other DNA
atggccttaccagtgaccgccttgctcctgccgctggccttgctgctccacgccgccaggccggaaatcgtgctgacacagagccccggcacactgtctcttagccctggcgaaagagccacactgagctgtagagccagccagagcatcagaagcagctacctggcctggtatcagcagaagcctggacaggcaccccggctgttgatctacggtgcttctagcagagccacaggcatccccgatagattttctggcagcggctccggcaccgacttcaccctgacaatcagcagactggaacccgaggactttgccgtgtattactgccagcagtacggcgacctgcctttcacatttggccctggcaccaagctggaaatcaagctcgaggacctgaagaacgtgttcccacctgaggtggccgtgttcgagcctagcgaggccgagatcagccacacccagaaagccaccctcgtgtgcctggctaccggcttctaccccgaccatgtggaactgtcttggtgggtcaacggcaaagaggtgcacagcggcgtgtgtaccgacccccagccactgaaagaacagcccgccctgaacgacagccggtactgcctgagcagcagactgagagtgtccgccaccttctggcagaacccccggaaccacttcagatgccaggtgcagttctacggcctgagcgagaacgacgagtggacccaggacagagccaagcccgtgacccagatcgtgtctgccgaagcctggggcagagccgattgcggctttaccagcgagagctaccagcagggcgtgctgagcgccaccatcctgtacgagatcctgctgggcaaggccaccctgtacgccgtgctggtgtctgccctggtgctgatggctatggtcaagcggaaggacagccggggaagggccaagcgatctggatctggagcaacaaacttctcactactcaaacaagcaggtgacgtggaggagaatcccgggcctactagtatggactggatttggcgcatccttttccttgtcggcgctgctaccggcgcgcattccttcgaagaggttcagctgctggaatctggcggaggaatggttcagcctggcggctctctgagactgtcttgtgccgccagcggcttcacctttagcagctacgccatgagctgggtccgacaggctcctggcaaaggactggaatgggtgtccgccatctctggctctggcggcagaaccttttacgccgatagcgtggaaggccggttcaccatcagccgggacaacagcaagaacaccctgtacctccagatgaacagcctgagagccgaggacaccgccgtgtactattgcgccaagcacgactacagcaactacccctacttcgactactggggccagggcacactggtcacagtttctagcacgcgtatccagaaccctgatcctgccgtgtaccagctgcgggatagcaagagcagcgacaagagcgtgtgtctgttcaccgacttcgacagccagaccaacgtgtcccagagcaaggactccgacgtgtacatcaccgataagtgcgtgctggacatgcggagcatggacttcaagagcaactccgccgtggcctggtccaacaagtccgatttcgcctgcgccaacgccttcaacaacagcattatccccgaggacacattcttcccaagccccgagagcagctgcgacgtgaagctggtggaaaagagcttcgagacagacaccaacctgaacttccagaacctgagcgtgatcggcttcagaatcctgctgctgaaagtggccggctttaacctgctgatgaccctgcggctgtggtccagccgcgccaagagaagcggatctggcgtgaagcagaccctgaatttcgacctgctgaagctggctggcgacgtggaatccaacccaggcccttctagaggcgggatccacaccatggctacctacgaggtgctgtgcgaggtggcaagaaagctgggcaccgacgacagagaagtggtgctgttcctgctgaacgtgttcatccctcagcctacactggcccagctgatcggtgcactgagagccctgaaagaggaaggccggctgacctttcctctgctggccgaatgcctgttcagagccggaagaagggatctgctgcgggacctgctgcatctggaccccagatttctggaaagacacctggccggcaccatgagctacttcagcccttaccagctgaccgtgctgcacgttgacggcgaactgtgcgccagagatattcggagcctgatcttcctgagcaaggacaccatcggcagccggtctacccctcagacatttctgcactgggtgtactgcatggaaaacctggacctgctcggccccacagatgtggatgccctgatgtccatgctgagaagcctgagcagagtggacctccagagacaggtgcagacactgatgggactgcacctgagcggacctagccacagccagcactacagacacacccct

SEQ ID NO: 20008 - DNA, 1875 bp, synthetic construct
  source 1..1875: mol_type = other DNA
atggccttaccagtgaccgccttgctcctgccgctggccttgctgctccacgccgccaggccggaaatcgtgctgacacagagccccggcacactgtctcttagccctggcgaaagagccacactgagctgtagagccagccagagcatcagaagcagctacctggcctggtatcagcagaagcctggacaggcaccccggctgttgatctacggtgcttctagcagagccacaggcatccccgatagattttctggcagcggctccggcaccgacttcaccctgacaatcagcagactggaacccgaggactttgccgtgtattactgccagcagtacggcgacctgcctttcacatttggccctggcaccaagctggaaatcaagctcgagatccagaaccctgatcctgccgtgtaccagctgcgggatagcaagagcagcgacaagagcgtgtgtctgttcaccgacttcgacagccagaccaacgtgtcccagagcaaggactccgacgtgtacatcaccgataagtgcgtgctggacatgcggagcatggacttcaagagcaactccgccgtggcctggtccaacaagtccgatttcgcctgcgccaacgccttcaacaacagcattatccccgaggacacattcttcccaagccccgagagcagctgcgacgtgaagctggtggaaaagagcttcgagacagacaccaacctgaacttccagaacctgagcgtgatcggcttcagaatcctgctgctgaaagtggccggctttaacctgctgatgaccctgcggctgtggtccagccgcgccaagagaagcggatctggcgtgaagcagaccctgaatttcgacctgctgaagctggctggcgacgtggaatccaacccaggccctactagtatggactggatttggcgcatccttttccttgtcggcgctgctaccggcgcgcattccttcgaagaggttcagctgctggaatctggcggaggaatggttcagcctggcggctctctgagactgtcttgtgccgccagcggcttcacctttagcagctacgccatgagctgggtccgacaggctcctggcaaaggactggaatgggtgtccgccatctctggctctggcggcagaaccttttacgccgatagcgtggaaggccggttcaccatcagccgggacaacagcaagaacaccctgtacctccagatgaacagcctgagagccgaggacaccgccgtgtactattgcgccaagcacgactacagcaactacccctacttcgactactggggccagggcacactggtcacagtttctagcacgcgtgaggacctgaagaacgtgttcccacctgaggtggccgtgttcgagcctagcgaggccgagatcagccacacccagaaagccaccctcgtgtgcctggctaccggcttctaccccgaccatgtggaactgtcttggtgggtcaacggcaaagaggtgcacagcggcgtgtgtaccgacccccagccactgaaagaacagcccgccctgaacgacagccggtactgcctgagcagcagactgagagtgtccgccaccttctggcagaacccccggaaccacttcagatgccaggtgcagttctacggcctgagcgagaacgacgagtggacccaggacagagccaagcccgtgacccagatcgtgtctgccgaagcctggggcagagccgattgcggctttaccagcgagagctaccagcagggcgtgctgagcgccaccatcctgtacgagatcctgctgggcaaggccaccctgtacgccgtgctggtgtctgccctggtgctgatggctatggtcaagcggaaggacagccgggga

SEQ ID NO: 20009 - DNA, 2541 bp, synthetic construct
  source 1..2541: mol_type = other DNA
atggccttaccagtgaccgccttgctcctgccgctggccttgctgctccacgccgccaggccggaaatcgtgctgacacagagccccggcacactgtctcttagccctggcgaaagagccacactgagctgtagagccagccagagcatcagaagcagctacctggcctggtatcagcagaagcctggacaggcaccccggctgttgatctacggtgcttctagcagagccacaggcatccccgatagattttctggcagcggctccggcaccgacttcaccctgacaatcagcagactggaacccgaggactttgccgtgtattactgccagcagtacggcgacctgcctttcacatttggccctggcaccaagctggaaatcaagctcgagatccagaaccctgatcctgccgtgtaccagctgcgggatagcaagagcagcgacaagagcgtgtgtctgttcaccgacttcgacagccagaccaacgtgtcccagagcaaggactccgacgtgtacatcaccgataagtgcgtgctggacatgcggagcatggacttcaagagcaactccgccgtggcctggtccaacaagtccgatttcgcctgcgccaacgccttcaacaacagcattatccccgaggacacattcttcccaagccccgagagcagctgcgacgtgaagctggtggaaaagagcttcgagacagacaccaacctgaacttccagaacctgagcgtgatcggcttcagaatcctgctgctgaaagtggccggctttaacctgctgatgaccctgcggctgtggtccagccgcgccaagagaagcggatctggcgtgaagcagaccctgaatttcgacctgctgaagctggctggcgacgtggaatccaacccaggccctactagtatggactggatttggcgcatccttttccttgtcggcgctgctaccggcgcgcattccttcgaagaggttcagctgctggaatctggcggaggaatggttcagcctggcggctctctgagactgtcttgtgccgccagcggcttcacctttagcagctacgccatgagctgggtccgacaggctcctggcaaaggactggaatgggtgtccgccatctctggctctggcggcagaaccttttacgccgatagcgtggaaggccggttcaccatcagccgggacaacagcaagaacaccctgtacctccagatgaacagcctgagagccgaggacaccgccgtgtactattgcgccaagcacgactacagcaactacccctacttcgactactggggccagggcacactggtcacagtttctagcacgcgtgaggacctgaagaacgtgttcccacctgaggtggccgtgttcgagcctagcgaggccgagatcagccacacccagaaagccaccctcgtgtgcctggctaccggcttctaccccgaccatgtggaactgtcttggtgggtcaacggcaaagaggtgcacagcggcgtgtgtaccgacccccagccactgaaagaacagcccgccctgaacgacagccggtactgcctgagcagcagactgagagtgtccgccaccttctggcagaacccccggaaccacttcagatgccaggtgcagttctacggcctgagcgagaacgacgagtggacccaggacagagccaagcccgtgacccagatcgtgtctgccgaagcctggggcagagccgattgcggctttaccagcgagagctaccagcagggcgtgctgagcgccaccatcctgtacgagatcctgctgggcaaggccaccctgtacgccgtgctggtgtctgccctggtgctgatggctatggtcaagcggaaggacagccggggaagggccaagcgatctggatctggagcaacaaacttctcactactcaaacaagcaggtgacgtggaggagaatcccgggccttctagaggcgggatccacaccatggctacctacgaggtgctgtgcgaggtggcaagaaagctgggcaccgacgacagagaagtggtgctgttcctgctgaacgtgttcatccctcagcctacactggcccagctgatcggtgcactgagagccctgaaagaggaaggccggctgacctttcctctgctggccgaatgcctgttcagagccggaagaagggatctgctgcgggacctgctgcatctggaccccagatttctggaaagacacctggccggcaccatgagctacttcagcccttaccagctgaccgtgctgcacgttgacggcgaactgtgcgccagagatattcggagcctgatcttcctgagcaaggacaccatcggcagccggtctacccctcagacatttctgcactgggtgtactgcatggaaaacctggacctgctcggccccacagatgtggatgccctgatgtccatgctgagaagcctgagcagagtggacctccagagacaggtgcagacactgatgggactgcacctgagcggacctagccacagccagcactacagacacacccct

SEQ ID NO: 20010 - DNA, 2700 bp, synthetic construct
  source 1..2700: mol_type = other DNA
atggccttaccagtgaccgccttgctcctgccgctggccttgctgctccacgccgccaggccgctcgaggggaaaccaattcccaaccctcttctgggactggattcaaccggcagcggcgaggacctgaagaacgtgttcccacctgaggtggccgtgttcgagcctagcaaggccgagatcgcccacacccagaaagccaccctcgtgtgcctggctaccggcttctaccccgaccatgtggaactgtcttggtgggtcaacggcaaagaggtgcacagcggcgtgtgtaccgacccccagccactgaaagaacagcccgccctgaacgacagccggtactgcctgagcagcagactgagagtgtccgccaccttctggcagaacccccggaaccacttcagatgccaggtgcagttctacggcctgagcgagaacgacgagtggacccaggacagagccaagcccgtgacccagatcgtgtctgccgaagcctggggcagagccgattgcggcatcaccagcgccagctaccaccagggcgtgctgagcgccaccatcctgtacgagatcctgctgggcaaggccaccctgtacgccgtgctggtgtctgccctggtgctgatggctatggtcaagcggaaggacagccggggaagggccaagcgatctggatctggagcaacaaacttctcactactcaaacaagcaggtgacgtggaggagaatcccgggcctactagcatggccttaccagtgaccgccttgctcctgccgctggccttgctgctccacgccgccaggccggaaatcgtgctgacacagagccccggcacactgtctcttagccctggcgaaagagccacactgagctgtagagccagccagagcatcagaagcagctacctggcctggtatcagcagaagcctggacaggcaccccggctgttgatctacggtgcttctagcagagccacaggcatccccgatagattttctggcagcggctccggcaccgacttcaccctgacaatcagcagactggaacccgaggactttgccgtgtattactgccagcagtacggcgacctgcctttcacatttggccctggcaccaagctggaaatcaagggcggaggcggaagtggaggcggaggatctggcggcggaggctctgaggttcagctgctggaatctggcggaggaatggttcagcctggcggctctctgagactgtcttgtgccgccagcggcttcacctttagcagctacgccatgagctgggtccgacaggctcctggcaaaggactggaatgggtgtccgccatctctggctctggcggcagaaccttttacgccgatagcgtggaaggccggttcaccatcagccgggacaacagcaagaacaccctgtacctccagatgaacagcctgagagccgaggacaccgccgtgtactattgcgccaagcacgactacagcaactacccctacttcgactactggggccagggcacactggtcacagtttctagcacgcgtgagcagaaactgatctcggaagaggatgggagcggcatccagaaccctgatcctgccgtgtaccagctgcgggatagcaagagcagcgacaagagcgtgtgtctgttcaccgacttcgacagccagaccaacgtgtcccagagcaaggactccgacgtgtacatcaccgataagtgcgtgctggacatgcggagcatggacttcaagagcaactccgccgtggcctggtccaacaagtccgatttcgcctgcgccaacgccttcaacaacagcattatccccgaggacacattcttcccaagcagcgacgtgccctgcgacgtgaagctggtggaaaagagcttcgagacagacaccaacctgaacttccagaacctgagcgtgatcggcttcagaatcctgctgctgaaagtggccggctttaacctgctgatgaccctgcggctgtggtccagccgcgccaagagaagcggatctggcgtgaagcagaccctgaatttcgacctgctgaagctggctggcgacgtggaatccaacccaggcccttctagaggccatatgaccgagtacaagcccacggtgcgcctcgccacccgcgacgacgtccccagggccgtacgcaccctcgccgccgcgttcgccgactaccccgccacgcgccacaccgtcgatccggaccgccacatcgagcgggtcaccgagctgcaagaactcttcctcacgcgcgtcgggctcgacatcggcaaggtgtgggtcgcggacgacggcgccgcggtggcggtctggaccacgccggagagcgtcgaagcgggggcggtgttcgccgagatcggcccgcgcatggccgagttgagcggttcccggctggccgcgcagcaacagatggaaggcctcctggcgccgcaccggcccaaggagcccgcgtggttcctggccaccgtcggcgtctcgcccgaccaccagggcaagggtctgggcagcgccgtcgtgctccccggagtggaggcggccgagcgcgccggggtgcccgccttcctggagacctccgcgccccgcaacctccccttctacgagcggctcggcttcaccgtcaccgccgacgtcgaggtgcccgaaggaccgcgcacctggtgcatgacccgcaagcccggtgcctga

SEQ ID NO: 20011 - DNA, 2703 bp, synthetic construct
  source 1..2703: mol_type = other DNA
atggccttaccagtgaccgccttgctcctgccgctggccttgctgctccacgccgccaggccgctcgagcagaaactgatctcggaagaggatctgggctccggcgatcgccctgatcctgccgtgtaccagctgcgggatagcaagagcagcgacaagagcgtgtgtctgttcaccgacttcgacagccagaccaacgtgtcccagagcaaggactccgacgtgtacatcaccgataagtgcgtgctggacatgcggagcatggacttcaagagcaactccgccgtggcctggtccaacaagtccgatttcgcctgcgccaacgccttcaacaacagcattatccccgaggacacattcttcccaagccccgagagcagctgcgacgtgaagctggtggaaaagagcttcgagacagacaccaacctgaacttccagaacctgagcgtgatcggcttcagaatcctgctgctgaaagtggccggctttaacctgctgatgaccctgcggctgtggtccagctctagtcgcgccaagagaagcggatctggcgtgaagcagaccctgaatttcgacctgctgaagctggctggcgacgtggaatccaacccaggccccactagcatggccttaccagtgaccgccttgctcctgccgctggccttgctgctccacgccgccaggccggaaatcgtgctgacacagagccccggcacactgtctcttagccctggcgaaagagccacactgagctgtagagccagccagagcatcagaagcagctacctggcctggtatcagcagaagcctggacaggcaccccggctgttgatctacggtgcttctagcagagccacaggcatccccgatagattttctggcagcggctccggcaccgacttcaccctgacaatcagcagactggaacccgaggactttgccgtgtattactgccagcagtacggcgacctgcctttcacatttggccctggcaccaagctggaaatcaagggcggaggcggaagtggaggcggaggatctggcggcggaggctctgaggttcagctgctggaatctggcggaggaatggttcagcctggcggctctctgagactgtcttgtgccgccagcggcttcacctttagcagctacgccatgagctgggtccgacaggctcctggcaaaggactggaatgggtgtccgccatctctggctctggcggcagaaccttttacgccgatagcgtggaaggccggttcaccatcagccgggacaacagcaagaacaccctgtacctccagatgaacagcctgagagccgaggacaccgccgtgtactattgcgccaagcacgactacagcaactacccctacttcgactactggggccagggcacactggtcacagtttctagcacgcgtgggaaaccaattcccaaccctcttctgggactggattcaaccggcagcggcgaggacctgaagaacgtgttcccacctgaggtggccgtgttcgagcctagcgaggccgagatcagccacacccagaaagccaccctcgtgtgcctggctaccggcttctaccccgaccatgtggaactgtcttggtgggtcaacggcaaagaggtgcacagcggcgtgtgtaccgacccccagccactgaaagaacagcccgccctgaacgacagccggtactgcctgagcagcagactgagagtgtccgccaccttctggcagaacccccggaaccacttcagatgccaggtgcagttctacggcctgagcgagaacgacgagtggacccaggacagagccaagcccgtgacccagatcgtgtctgccgaagcctggggcagagccgattgcggctttaccagcgagagctaccagcagggcgtgctgagcgccaccatcctgtacgagatcctgctgggcaaggccaccctgtacgccgtgctggtgtctgccctggtgctgatggctatggtcaagcggaaggacagccggggaagggccaagcgatctggatctggagcaacaaacttctcactactcaaacaagcaggtgacgtggaggagaatcccgggccttctagaggccatatgaccgagtacaagcccacggtgcgcctcgccacccgcgacgacgtccccagggccgtacgcaccctcgccgccgcgttcgccgactaccccgccacgcgccacaccgtcgatccggaccgccacatcgagcgggtcaccgagctgcaagaactcttcctcacgcgcgtcgggctcgacatcggcaaggtgtgggtcgcggacgacggcgccgcggtggcggtctggaccacgccggagagcgtcgaagcgggggcggtgttcgccgagatcggcccgcgcatggccgagttgagcggttcccggctggccgcgcagcaacagatggaaggcctcctggcgccgcaccggcccaaggagcccgcgtggttcctggccaccgtcggcgtctcgcccgaccaccagggcaagggtctgggcagcgccgtcgtgctccccggagtggaggcggccgagcgcgccggggtgcccgccttcctggagacctccgcgccccgcaacctccccttctacgagcggctcggcttcaccgtcaccgccgacgtcgaggtgcccgaaggaccgcgcacctggtgcatgacccgcaagcccggtgcctga

SEQ ID NO: 20012 - DNA, 2565 bp, synthetic construct
  source 1..2565: mol_type = other DNA
atggccttaccagtgaccgccttgctcctgccgctggccttgctgctccacgccgccaggccggaaatcgtgctgacacagagccccggcacactgtctcttagccctggcgaaagagccacactgagctgtagagccagccagagcatcagaagcagctacctggcctggtatcagcagaagcctggacaggcaccccggctgttgatctacggtgcttctagcagagccacaggcatccccgatagattttctggcagcggctccggcaccgacttcaccctgacaatcagcagactggaacccgaggactttgccgtgtattactgccagcagtacggcgacctgcctttcacatttggccctggcaccaagctggaaatcaagctcgaggacctgaagaacgtgttcccacctgaggtggccgtgttcgagcctagcgaggccgagatcagccacacccagaaagccaccctcgtgtgcctggctaccggcttctaccccgaccatgtggaactgtcttggtgggtcaacggcaaagaggtgcacagcggcgtgtctaccgacccccagccactgaaagaacagcccgccctgaacgacagccggtactgcctgagcagcagactgagagtgtccgccaccttctggcagaacccccggaaccacttcagatgccaggtgcagttctacggcctgagcgagaacgacgagtggacccaggacagagccaagcccgtgacccagatcgtgtctgccgaagcctggggcagagccgattgcggctttaccagcgagagctaccagcagggcgtgctgagcgccaccatcctgtacgagatcctgctgggcaaggccaccctgtacgccgtgctggtgtctgccctggtgctgatggctatggtcaagcggaaggacagccggggaagggccaagcgatctggatctggagcaacaaacttctcactactcaaacaagcaggtgacgtggaggagaatcccgggcctactagtatggactggatttggcgcatccttttccttgtcggcgctgctaccggcgcgcattccttcgaagaggttcagctgctggaatctggcggaggaatggttcagcctggcggctctctgagactgtcttgtgccgccagcggcttcacctttagcagctacgccatgagctgggtccgacaggctcctggcaaaggactggaatgggtgtccgccatctctggctctggcggcagaaccttttacgccgatagcgtggaaggccggttcaccatcagccgggacaacagcaagaacaccctgtacctccagatgaacagcctgagagccgaggacaccgccgtgtactattgcgccaagcacgactacagcaactacccctacttcgactactggggccagggcacactggtcacagtttctagcacgcgtatccagaaccctgatcctgccgtgtaccagctgcgggatagcaagagcagcgacaagagcgtgtgtctgttcaccgacttcgacagccagaccaacgtgtcccagagcaaggactccgacgtgtacatcaccgataagaccgtgctggacatgcggagcatggacttcaagagcaactccgccgtggcctggtccaacaagtccgatttcgcctgcgccaacgccttcaacaacagcattatccccgaggacacattcttcccaagccccgagagcagctgcgacgtgaagctggtggaaaagagcttcgagacagacaccaacctgaacttccagaacctgagcgtgatcggcttcagaatcctgctgctgaaagtggccggctttaacctgctgatgaccctgcggctgtggtccagccgcgccaagagaagcggatctggcgtgaagcagaccctgaatttcgacctgctgaagctggctggcgacgtggaatccaacccaggcccttctagaggccatatgaccgagtacaagcccacggtgcgcctcgccacccgcgacgacgtccccagggccgtacgcaccctcgccgccgcgttcgccgactaccccgccacgcgccacaccgtcgatccggaccgccacatcgagcgggtcaccgagctgcaagaactcttcctcacgcgcgtcgggctcgacatcggcaaggtgtgggtcgcggacgacggcgccgcggtggcggtctggaccacgccggagagcgtcgaagcgggggcggtgttcgccgagatcggcccgcgcatggccgagttgagcggttcccggctggccgcgcagcaacagatggaaggcctcctggcgccgcaccggcccaaggagcccgcgtggttcctggccaccgtcggcgtctcgcccgaccaccagggcaagggtctgggcagcgccgtcgtgctccccggagtggaggcggccgagcgcgccggggtgcccgccttcctggagacctccgcgccccgcaacctccccttctacgagcggctcggcttcaccgtcaccgccgacgtcgaggtgcccgaaggaccgcgcacctggtgcatgacccgcaagcccggtgcctga

SEQ ID NO: 20013 - DNA, 2811 bp, synthetic construct
  source 1..2811: mol_type = other DNA
atggccttaccagtgaccgccttgctcctgccgctggccttgctgctccacgccgccaggccggaaatcgtgctgacacagagccccggcacactgtctcttagccctggcgaaagagccacactgagctgtagagccagccagagcatcagaagcagctacctggcctggtatcagcagaagcctggacaggcaccccggctgttgatctacggtgcttctagcagagccacaggcatccccgatagattttctggcagcggctccggcaccgacttcaccctgacaatcagcagactggaacccgaggactttgccgtgtattactgccagcagtacggcgacctgcctttcacatttggccctggcaccaagctggaaatcaagctcgaggacctgaagaacgtgttcccacctgaggtggccgtgttcgagcctagcgaggccgagatcagccacacccagaaagccaccctcgtgtgcctggctaccggcttctaccccgaccatgtggaactgtcttggtgggtcaacggcaaagaggtgcacagcggcgtgtctaccgacccccagccactgaaagaacagcccgccctgaacgacagccggtactgcctgagcagcagactgagagtgtccgccaccttctggcagaacccccggaaccacttcagatgccaggtgcagttctacggcctgagcgagaacgacgagtggacccaggacagagccaagcccgtgacccagatcgtgtctgccgaagcctggggcagagccgattgcggctttaccagcgagagctaccagcagggcgtgctgagcgccaccatcctgtacgagatcctgctgggcaaggccaccctgtacgccgtgctggtgtctgccctggtgctgatggctatggtcaagcggaaggacagccggggaagggccaagcgatctggatctggagcaacaaacttctcactactcaaacaagcaggtgacgtggaggagaatcccgggcctactagtatggactggatttggcgcatccttttccttgtcggcgctgctaccggcgcgcattccttcgaagaggttcagctgctggaatctggcggaggaatggttcagcctggcggctctctgagactgtcttgtgccgccagcggcttcacctttagcagctacgccatgagctgggtccgacaggctcctggcaaaggactggaatgggtgtccgccatctctggctctggcggcagaaccttttacgccgatagcgtggaaggccggttcaccatcagccgggacaacagcaagaacaccctgtacctccagatgaacagcctgagagccgaggacaccgccgtgtactattgcgccaagcacgactacagcaactacccctacttcgactactggggccagggcacactggtcacagtttctagcacgcgtgagcagaaactgatctcggaagaggatgggagcggcaccccattcccttctctggcccctcccatcatgctgctggtggacggcaagcagcagatggtggtcgtgtgcctggtgctggatgtggccccacctggactggacagccccatctggtttagcgccggcaatggctctgccctggacgcctttacctacggcccaagccctgccaccgatggcacctggacaaatctggcccacctgagcctgcccagcgaggaactggcttcttgggagcctctcgtgtgccacacaggacctggcgctgagggacacagcagatccacccagcctatgcacctgtctggcgaggccagcaccgccagaacctgtcctcaggaacctctgagaggcacccctggcggagcactgtggctgggagtgctgagactgctgctgttcaagctgctgctgtttgacctgctgctgacctgctcctgtctgtgcgatcctgccggccctctgccttctcctgccaccaccacaagactgagagccctgggcagccacagactgcaccctgccacagagacaggcggcagagaggccacaagcagccctagaccccagcccagagacagaagatggggcgataccccccctggcagaaagcctggatctccagtccgcgccaagagaagcggatctggcgtgaagcagaccctgaatttcgacctgctgaagctggctggcgacgtggaatccaacccaggcccttctagaggccatatgaccgagtacaagcccacggtgcgcctcgccacccgcgacgacgtccccagggccgtacgcaccctcgccgccgcgttcgccgactaccccgccacgcgccacaccgtcgatccggaccgccacatcgagcgggtcaccgagctgcaagaactcttcctcacgcgcgtcgggctcgacatcggcaaggtgtgggtcgcggacgacggcgccgcggtggcggtctggaccacgccggagagcgtcgaagcgggggcggtgttcgccgagatcggcccgcgcatggccgagttgagcggttcccggctggccgcgcagcaacagatggaaggcctcctggcgccgcaccggcccaaggagcccgcgtggttcctggccaccgtcggcgtctcgcccgaccaccagggcaagggtctgggcagcgccgtcgtgctccccggagtggaggcggccgagcgcgccggggtgcccgccttcctggagacctccgcgccccgcaacctccccttctacgagcggctcggcttcaccgtcaccgccgacgtcgaggtgcccgaaggaccgcgcacctggtgcatgacccgcaagcccggtgcctga

SEQ ID NO: 20014 - DNA, 2865 bp, synthetic construct
  source 1..2865: mol_type = other DNA
atggccttaccagtgaccgccttgctcctgccgctggccttgctgctccacgccgccaggccgctcgaggacctgaagaacgtgttcccacctgaggtggccgtgttcgagcctagcgaggccgagatcagccacacccagaaagccaccctcgtgtgcctggctaccggcttctaccccgaccatgtggaactgtcttggtgggtcaacggcaaagaggtgcacagcggcgtgtctaccgacccccagccactgaaagaacagcccgccctgaacgacagccggtactgcctgagcagcagactgagagtgtccgccaccttctggcagaacccccggaaccacttcagatgccaggtgcagttctacggcctgagcgagaacgacgagtggacccaggacagagccaagcccgtgacccagatcgtgtctgccgaagcctggggcagagccgattgcggctttaccagcgagagctaccagcagggcgtgctgagcgccaccatcctgtacgagatcctgctgggcaaggccaccctgtacgccgtgctggtgtctgccctggtgctgatggctatggtcaagcggaaggacagccggggaagggccaagcgatctggatctggagcaacaaacttctcactactcaaacaagcaggtgacgtggaggagaatcccgggcctactagcatggccttaccagtgaccgccttgctcctgccgctggccttgctgctccacgccgccaggccggaaatcgtgctgacacagagccccggcacactgtctcttagccctggcgaaagagccacactgagctgtagagccagccagagcatcagaagcagctacctggcctggtatcagcagaagcctggacaggcaccccggctgttgatctacggtgcttctagcagagccacaggcatccccgatagattttctggcagcggctccggcaccgacttcaccctgacaatcagcagactggaacccgaggactttgccgtgtattactgccagcagtacggcgacctgcctttcacatttggccctggcaccaagctggaaatcaagggcggaggcggaagtggaggcggaggatctggcggcggaggctctgaggttcagctgctggaatctggcggaggaatggttcagcctggcggctctctgagactgtcttgtgccgccagcggcttcacctttagcagctacgccatgagctgggtccgacaggctcctggcaaaggactggaatgggtgtccgccatctctggctctggcggcagaaccttttacgccgatagcgtggaaggccggttcaccatcagccgggacaacagcaagaacaccctgtacctccagatgaacagcctgagagccgaggacaccgccgtgtactattgcgccaagcacgactacagcaactacccctacttcgactactggggccagggcacactggtcacagtttctagcacgcgtgagcagaaactgatctcggaagaggatctggggagcggcaccccattcccttctctggcccctcccatcatgctgctggtggacggcaagcagcagatggtggtcgtgtgcctggtgctggatgtggccccacctggactggacagccccatctggtttagcgccggcaatggctctgccctggacgcctttacctacggcccaagccctgccaccgatggcacctggacaaatctggcccacctgagcctgcccagcgaggaactggcttcttgggagcctctcgtgtgccacacaggacctggcgctgagggacacagcagatccacccagcctatgcacctgtctggcgaggccagcaccgccagaacctgtcctcaggaacctctgagaggcacccctggcggagcactgtggctgggagtgctgagactgctgctgttcaagctgctgctgtttgacctgctgctgacctgctcctgtctgtgcgatcctgccggccctctgccttctcctgccaccaccacaagactgagagccctgggcagccacagactgcaccctgccacagagacaggcggcagagaggccacaagcagccctagaccccagcccagagacagaagatggggcgataccccccctggcagaaagcctggatctccagtccgcgccaagagaagcggatctggcgtgaagcagaccctgaatttcgacctgctgaagctggctggcgacgtggaatccaacccaggcccttctagatctagaggccatatgaccgagtacaagcccacggtgcgcctcgccacccgcgacgacgtccccagggccgtacgcaccctcgccgccgcgttcgccgactaccccgccacgcgccacaccgtcgatccggaccgccacatcgagcgggtcaccgagctgcaagaactcttcctcacgcgcgtcgggctcgacatcggcaaggtgtgggtcgcggacgacggcgccgcggtggcggtctggaccacgccggagagcgtcgaagcgggggcggtgttcgccgagatcggcccgcgcatggccgagttgagcggttcccggctggccgcgcagcaacagatggaaggcctcctggcgccgcaccggcccaaggagcccgcgtggttcctggccaccgtcggcgtctcgcccgaccaccagggcaagggtctgggcagcgccgtcgtgctccccggagtggaggcggccgagcgcgccggggtgcccgccttcctggagacctccgcgccccgcaacctccccttctacgagcggctcggcttcaccgtcaccgccgacgtcgaggtgcccgaaggaccgcgcacctggtgcatgacccgcaagcccggtgcctga

SEQ ID NO: 20015 - DNA, 2676 bp, synthetic construct
  source 1..2676: mol_type = other DNA
atggccttaccagtgaccgccttgctcctgccgctggccttgctgctccacgccgccaggccggaaatcgtgctgacacagagccccggcacactgtctcttagccctggcgaaagagccacactgagctgtagagccagccagagcatcagaagcagctacctggcctggtatcagcagaagcctggacaggcaccccggctgttgatctacggtgcttctagcagagccacaggcatccccgatagattttctggcagcggctccggcaccgacttcaccctgacaatcagcagactggaacccgaggactttgccgtgtattactgccagcagtacggcgacctgcctttcacatttggccctggcaccaagctggaaatcaagctcgaggggaaaccaattcccaaccctcttctgggactggattcaaccggcagcggcgacaagcagctggacgccgacgtgtcccccaagcctaccatcttcctgccctctatcgccgagacaaagctccagaaggccggcacctacctgtgcctgctggaaaagttcttcccagatgtgattaagatccactggcaggaaaagaagtccaacaccatcctgggcagccaggaaggcaacaccatgaagaccaacgacacctacatgaagttcagctggctgaccgtgcccgagaagtccctggacaaagaacacagatgcatcgtgcggcacgaaaacaacaagaacggcgtggaccaggaaatcatcttcccacccatcaagaccgatgtgattacaatggaccccaaggacaactgctccaaggacgccaacgataccctgctgctccagctgaccaacaccagcgcctactacatgtacttgttgctgctgctgaagtccgtggtgtacttcgccatcatcacatgctgcctgctgcggagaaccgccttctgctgcaacggcgagaagtctagggccaagcgatctggatctggagcaacaaacttctcactactcaaacaagcaggtgacgtggaggagaatcccgggcctactagtatggactggatttggcgcatccttttccttgtcggcgctgctaccggcgcgcattccttcgaagaggttcagctgctggaatctggcggaggaatggttcagcctggcggctctctgagactgtcttgtgccgccagcggcttcacctttagcagctacgccatgagctgggtccgacaggctcctggcaaaggactggaatgggtgtccgccatctctggctctggcggcagaaccttttacgccgatagcgtggaaggccggttcaccatcagccgggacaacagcaagaacaccctgtacctccagatgaacagcctgagagccgaggacaccgccgtgtactattgcgccaagcacgactacagcaactacccctacttcgactactggggccagggcacactggtcacagtttctagcacgcgtgagcagaaactgatctcggaagaggatgggagcggcagccagcctcacaccaagcccagcgtgttcgtgatgaagaacggcaccaacgtggcctgcctcgtgaaagagttctaccccaaggacatcaggatcaacctggtgtccagcaagaagatcaccgagttcgaccccgccatcgtgatctcccccagcggcaagtacaacgccgtgaagctggggaagtacgaggacagcaacagcgtgacctgctccgtgcagcacgacaacaagaccgtgcacagcaccgactttgaagtgaaaaccgactccaccgaccacgtgaagcccaaagagacagagaacaccaagcagcccagcaagagctgccacaagcccaaggccatcgtgcacaccgagaaagtgaacatgatgagcctgaccgtgctgggcctgcggatgctgttcgccaaaaccgtggccgtgaacttcctgctgaccgccaagctgttcttcctccgcgccaagagaagcggatctggcgtgaagcagaccctgaatttcgacctgctgaagctggctggcgacgtggaatccaacccaggcccttctagaggccatatgaccgagtacaagcccacggtgcgcctcgccacccgcgacgacgtccccagggccgtacgcaccctcgccgccgcgttcgccgactaccccgccacgcgccacaccgtcgatccggaccgccacatcgagcgggtcaccgagctgcaagaactcttcctcacgcgcgtcgggctcgacatcggcaaggtgtgggtcgcggacgacggcgccgcggtggcggtctggaccacgccggagagcgtcgaagcgggggcggtgttcgccgagatcggcccgcgcatggccgagttgagcggttcccggctggccgcgcagcaacagatggaaggcctcctggcgccgcaccggcccaaggagcccgcgtggttcctggccaccgtcggcgtctcgcccgaccaccagggcaagggtctgggcagcgccgtcgtgctccccggagtggaggcggccgagcgcgccggggtgcccgccttcctggagacctccgcgccccgcaacctccccttctacgagcggctcggcttcaccgtcaccgccgacgtcgaggtgcccgaaggaccgcgcacctggtgcatgacccgcaagcccggtgcctga

SEQ ID NO: 20016 - DNA, 1887 bp, synthetic construct
  source 1..1887: mol_type = other DNA
atggccttaccagtgaccgccttgctcctgccgctggccttgctgctccacgccgccaggccggaaatcgtgctgacacagagccccggcacactgtctcttagccctggcgaaagagccacactgagctgtagagccagccagagcatcagaagcagctacctggcctggtatcagcagaagcctggacaggcaccccggctgttgatctacggtgcttctagcagagccacaggcatccccgatagattttctggcagcggctccggcaccgacttcaccctgacaatcagcagactggaacccgaggactttgccgtgtattactgccagcagtacggcgacctgcctttcacatttggccctggcaccaagctggaaatcaagctcgagagccagcctcacaccaagcccagcgtgttcgtgatgaagaacggcaccaacgtggcctgcctcgtgaaagagttctaccccaaggacatcaggatcaacctggtgtccagcaagaagatcaccgagttcgaccccgccatcgtgatctcccccagcggcaagtacaacgccgtgaagctggggaagtacgaggacagcaacagcgtgacctgctccgtgcagcacgacaacaagaccgtgcacagcaccgactttgaagtgaaaaccgactccaccgaccacgtgaagcccaaagagacagagaacaccaagcagcccagcaagagctgccacaagcccaaggccatcgtgcacaccgagaaagtgaacatgatgagcctgaccgtgctgggcctgcggatgctgttcgccaaaaccgtggccgtgaacttcctgctgaccgccaagctgttcttcctcagggccaagcgatctggatctggagcaacaaacttctcactactcaaacaagcaggtgacgtggaggagaatcccgggcctactagtatggactggatttggcgcatccttttccttgtcggcgctgctaccggcgcgcattccttcgaagaggttcagctgctggaatctggcggaggaatggttcagcctggcggctctctgagactgtcttgtgccgccagcggcttcacctttagcagctacgccatgagctgggtccgacaggctcctggcaaaggactggaatgggtgtccgccatctctggctctggcggcagaaccttttacgccgatagcgtggaaggccggttcaccatcagccgggacaacagcaagaacaccctgtacctccagatgaacagcctgagagccgaggacaccgccgtgtactattgcgccaagcacgactacagcaactacccctacttcgactactggggccagggcacactggtcacagtttctagcacgcgtgacaagcagctggacgccgacgtgtcccccaagcctaccatcttcctgccctctatcgccgagacaaagctccagaaggccggcacctacctgtgcctgctggaaaagttcttcccagatgtgattaagatccactggcaggaaaagaagtccaacaccatcctgggcagccaggaaggcaacaccatgaagaccaacgacacctacatgaagttcagctggctgaccgtgcccgagaagtccctggacaaagaacacagatgcatcgtgcggcacgaaaacaacaagaacggcgtggaccaggaaatcatcttcccacccatcaagaccgatgtgattacaatggaccccaaggacaactgctccaaggacgccaacgataccctgctgctccagctgaccaacaccagcgcctactacatgtacttgttgctgctgctgaagtccgtggtgtacttcgccatcatcacatgctgcctgctgcggagaaccgccttctgctgcaacggcgagaagtct

SEQ ID NO: 20017 - DNA, 2721 bp, synthetic construct
  source 1..2721: mol_type = other DNA
atggccttaccagtgaccgccttgctcctgccgctggccttgctgctccacgccgccaggccgctcgaggggaaaccaattcccaaccctcttctgggactggattcaaccggcagcggcgacaagcagctggacgccgacgtgtcccccaagcctaccatcttcctgccctctatcgccgagacaaagctccagaaggccggcacctacctgtgcctgctggaaaagttcttcccagatgtgattaagatccactggcaggaaaagaagtccaacaccatcctgggcagccaggaaggcaacaccatgaagaccaacgacacctacatgaagttcagctggctgaccgtgcccgagaagtccctggacaaagaacacagatgcatcgtgcggcacgaaaacaacaagaacggcgtggaccaggaaatcatcttcccacccatcaagaccgatgtgattacaatggaccccaaggacaactgctccaaggacgccaacgataccctgctgctccagctgaccaacaccagcgcctactacatgtacttgttgctgctgctgaagtccgtggtgtacttcgccatcatcacatgctgcctgctgcggagaaccgccttctgctgcaacggcgagaagtctagggccaagcgatctggatctggagcaacaaacttctcactactcaaacaagcaggtgacgtggaggagaatcccgggcctactagcatggccttaccagtgaccgccttgctcctgccgctggccttgctgctccacgccgccaggccggaaatcgtgctgacacagagccccggcacactgtctcttagccctggcgaaagagccacactgagctgtagagccagccagagcatcagaagcagctacctggcctggtatcagcagaagcctggacaggcaccccggctgttgatctacggtgcttctagcagagccacaggcatccccgatagattttctggcagcggctccggcaccgacttcaccctgacaatcagcagactggaacccgaggactttgccgtgtattactgccagcagtacggcgacctgcctttcacatttggccctggcaccaagctggaaatcaagggcggaggcggaagtggaggcggaggatctggcggcggaggctctgaggttcagctgctggaatctggcggaggaatggttcagcctggcggctctctgagactgtcttgtgccgccagcggcttcacctttagcagctacgccatgagctgggtccgacaggctcctggcaaaggactggaatgggtgtccgccatctctggctctggcggcagaaccttttacgccgatagcgtggaaggccggttcaccatcagccgggacaacagcaagaacaccctgtacctccagatgaacagcctgagagccgaggacaccgccgtgtactattgcgccaagcacgactacagcaactacccctacttcgactactggggccagggcacactggtcacagtttctagcacgcgtgagcagaaactgatctcggaagaggatgggagcggcagccagcctcacaccaagcccagcgtgttcgtgatgaagaacggcaccaacgtggcctgcctcgtgaaagagttctaccccaaggacatcaggatcaacctggtgtccagcaagaagatcaccgagttcgaccccgccatcgtgatctcccccagcggcaagtacaacgccgtgaagctggggaagtacgaggacagcaacagcgtgacctgctccgtgcagcacgacaacaagaccgtgcacagcaccgactttgaagtgaaaaccgactccaccgaccacgtgaagcccaaagagacagagaacaccaagcagcccagcaagagctgccacaagcccaaggccatcgtgcacaccgagaaagtgaacatgatgagcctgaccgtgctgggcctgcggatgctgttcgccaaaaccgtggccgtgaacttcctgctgaccgccaagctgttcttcctccgcgccaagagaagcggatctggcgtgaagcagaccctgaatttcgacctgctgaagctggctggcgacgtggaatccaacccaggcccttctagaggccatatgaccgagtacaagcccacggtgcgcctcgccacccgcgacgacgtccccagggccgtacgcaccctcgccgccgcgttcgccgactaccccgccacgcgccacaccgtcgatccggaccgccacatcgagcgggtcaccgagctgcaagaactcttcctcacgcgcgtcgggctcgacatcggcaaggtgtgggtcgcggacgacggcgccgcggtggcggtctggaccacgccggagagcgtcgaagcgggggcggtgttcgccgagatcggcccgcgcatggccgagttgagcggttcccggctggccgcgcagcaacagatggaaggcctcctggcgccgcaccggcccaaggagcccgcgtggttcctggccaccgtcggcgtctcgcccgaccaccagggcaagggtctgggcagcgccgtcgtgctccccggagtggaggcggccgagcgcgccggggtgcccgccttcctggagacctccgcgccccgcaacctccccttctacgagcggctcggcttcaccgtcaccgccgacgtcgaggtgcccgaaggaccgcgcacctggtgcatgacccgcaagcccggtgcctga

SEQ ID NO: 20018 - DNA, 3096 bp, synthetic construct
  source 1..3096: mol_type = other DNA
atggccttaccagtgaccgccttgctcctgccgctggccttgctgctccacgccgccaggccggaaatcgtgctgacacagagccccggcacactgtctcttagccctggcgaaagagccacactgagctgtagagccagccagagcatcagaagcagctacctggcctggtatcagcagaagcctggacaggcaccccggctgttgatctacggtgcttctagcagagccacaggcatccccgatagattttctggcagcggctccggcaccgacttcaccctgacaatcagcagactggaacccgaggactttgccgtgtattactgccagcagtacggcgacctgcctttcacatttggccctggcaccaagctggaaatcaagggacagcctaaggccaatcctaccgtgacactgttccctccaagcagcgaagaactccaggccaacaaggccacacttgtgtgcctgatctccgacttctaccctggggctgtgacagtggcttggaaggccgatggatctcctgtgaaagccggcgtggaaaccaccaagccatccaagcagagcaacaacaaatacgccgccagctcctacctgagcctgacacctgagcagtggaagtcccacagatcctacagctgccaagtgacccacgaaggcagcaccgtggaaaagacagtggcccctacagagtgcagcggatcccagagcttcggcctgctggaccccaagctgtgctacctgctggatggcatcctgttcatctacggcgtgatcctgaccgccctgttcctgagagtgaagttcagcagaagcgccgacgcccctgcctaccagcagggacagaaccaactgtacaacgagctgaacctgggcagacgggaagagtacgacgtgctggacaagcggagaggcagggaccctgagatgggcggaaagccccagcggagaaagaacccccaggaaggactgtataacgaactccagaaagacaagatggccgaagcctacagcgagatcggcatgaagggcgagcggagaagaggcaagggccacgatggcctgtaccagggcctgagcaccgccaccaaggacacctatgacgccctgcacatgcaggccctgcctccaagaagggccaagcgatctggatctggagcaacaaacttctcactactcaaacaagcaggtgacgtggaggagaatcccgggcctactagtatggactggatttggcgcatccttttccttgtcggcgctgctaccggcgcgcattccttcgaagaggttcagctgctggaatctggcggaggaatggttcagcctggcggctctctgagactgtcttgtgccgccagcggcttcacctttagcagctacgccatgagctgggtccgacaggctcctggcaaaggactggaatgggtgtccgccatctctggctctggcggcagaaccttttacgccgatagcgtggaaggccggttcaccatcagccgggacaacagcaagaacaccctgtacctccagatgaacagcctgagagccgaggacaccgccgtgtactattgcgccaagcacgactacagcaactacccctacttcgactactggggccagggcacactggtcacagtttctagcgcctctacaaagggaccctccgtgtttcctctggctcccagcagcaagtctacaagcggaggaacagccgctctgggctgcctggtcaaggattactttcccgagcctgtgaccgtgtcctggaatagcggagcactgacaagcggcgtgcacacctttccagccgtgctgcaaagcagcggcctgtactctctgagcagcgtggtcacagtgcctagctctagcctgggcacccagacctacatctgcaatgtgaaccacaagcctagcaacaccaaggtggacaagagagtggaacccaagagctgtggtacccagagttttgggttgttggaccctaaattgtgctatctgttggacggaatcctgttcatttacggagtgatcctgaccgcattgttcctgcgggttaagttttccagatccgcagacgcacccgcttaccaacaagggcagaaccaactctacaatgaacttaatttggggcggagggaagagtacgacgttctggacaaaaggaggggacgagatcccgagatgggcggaaagcctcagcgaaggaagaatccgcaagaggggctttataacgaactccagaaagataaaatggcagaagcctatagtgagattgggatgaagggagaaaggaggaggggtaaaggtcacgatgggttgtaccaaggattgagcacagccactaaagatacctatgatgcgctccacatgcaggccctgccgccaagacgcgccaagagaagcggatctggcgtgaagcagaccctgaatttcgacctgctgaagctggctggcgacgtggaatccaacccaggcccttctagaggccatatgaccgagtacaagcccacggtgcgcctcgccacccgcgacgacgtccccagggccgtacgcaccctcgccgccgcgttcgccgactaccccgccacgcgccacaccgtcgatccggaccgccacatcgagcgggtcaccgagctgcaagaactcttcctcacgcgcgtcgggctcgacatcggcaaggtgtgggtcgcggacgacggcgccgcggtggcggtctggaccacgccggagagcgtcgaagcgggggcggtgttcgccgagatcggcccgcgcatggccgagttgagcggttcccggctggccgcgcagcaacagatggaaggcctcctggcgccgcaccggcccaaggagcccgcgtggttcctggccaccgtcggcgtctcgcccgaccaccagggcaagggtctgggcagcgccgtcgtgctccccggagtggaggcggccgagcgcgccggggtgcccgccttcctggagacctccgcgccccgcaacctccccttctacgagcggctcggcttcaccgtcaccgccgacgtcgaggtgcccgaaggaccgcgcacctggtgcatgacccgcaagcccggtgcctga

SEQ ID NO: 20019 - DNA, 2451 bp, synthetic construct
  source 1..2451: mol_type = other DNA
atggccttaccagtgaccgccttgctcctgccgctggccttgctgctccacgccgccaggccggaaatcgtgctgacacagagccccggcacactgtctcttagccctggcgaaagagccacactgagctgtagagccagccagagcatcagaagcagctacctggcctggtatcagcagaagcctggacaggcaccccggctgttgatctacggtgcttctagcagagccacaggcatccccgatagattttctggcagcggctccggcaccgacttcaccctgacaatcagcagactggaacccgaggactttgccgtgtattactgccagcagtacggcgacctgcctttcacatttggccctggcaccaagctggaaatcaagctcgaggacctgaagaacgtgttcccacctgaggtggccgtgttcgagcctagcgaggccgagatcagccacacccagaaagccaccctcgtgtgcctggctaccggcttctaccccgaccatgtggaactgtcttggtgggtcaacggcaaagaggtgcacagcggcgtgtctaccgacccccagccactgaaagaacagcccgccctgaacgacagccggtactgcctgagcagcagactgagagtgtccgccaccttctggcagaacccccggaaccacttcagatgccaggtgcagttctacggcctgagcgagaacgacgagtggacccaggacagagccaagcccgtgacccagatcgtgtctgccgaagcctggggcagagccgattgcggatcccagagcttcggcctgctggaccccaagctgtgctacctgctggatggcatcctgttcatctacggcgtgatcctgaccgccctgttcctgagagtgaagttcagcagaagcgccgacgcccctgcctaccagcagggacagaaccaactgtacaacgagctgaacctgggcagacgggaagagtacgacgtgctggacaagcggagaggcagggaccctgagatgggcggaaagccccagcggagaaagaacccccaggaaggactgtataacgaactccagaaagacaagatggccgaagcctacagcgagatcggcatgaagggcgagcggagaagaggcaagggccacgatggcctgtaccagggcctgagcaccgccaccaaggacacctatgacgccctgcacatgcaggccctgcctccaagaagggccaagcgatctggatctggagcaacaaacttctcactactcaaacaagcaggtgacgtggaggagaatcccgggcctactagtatggactggatttggcgcatccttttccttgtcggcgctgctaccggcgcgcattccttcgaagaggttcagctgctggaatctggcggaggaatggttcagcctggcggctctctgagactgtcttgtgccgccagcggcttcacctttagcagctacgccatgagctgggtccgacaggctcctggcaaaggactggaatgggtgtccgccatctctggctctggcggcagaaccttttacgccgatagcgtggaaggccggttcaccatcagccgggacaacagcaagaacaccctgtacctccagatgaacagcctgagagccgaggacaccgccgtgtactattgcgccaagcacgactacagcaactacccctacttcgactactggggccagggcacactggtcacagtttctagcacgcgtatccagaaccctgatcctgccgtgtaccagctgcgggatagcaagagcagcgacaagagcgtgtgtctgttcaccgacttcgacagccagaccaacgtgtcccagagcaaggactccgacgtgtacatcaccgataagaccgtgctggacatgcggagcatggacttcaagagcaactccgccgtggcctggtccaacaagtccgatttcgcctgcgccaacgccttcaacaacagcattatccccgaggacacattcttcccaagccccgagagcagctgcggtacccagagttttgggttgttggaccctaaattgtgctatctgttggacggaatcctgttcatttacggagtgatcctgaccgcattgttcctgcgggttaagttttccagatccgcagacgcacccgcttaccaacaagggcagaaccaactctacaatgaacttaatttggggcggagggaagagtacgacgttctggacaaaaggaggggacgagatcccgagatgggcggaaagcctcagcgaaggaagaatccgcaagaggggctttataacgaactccagaaagataaaatggcagaagcctatagtgagattgggatgaagggagaaaggaggaggggtaaaggtcacgatgggttgtaccaaggattgagcacagccactaaagatacctatgatgcgctccacatgcaggccctgccgccaaga

SEQ ID NO: 20020 - DNA, 2451 bp, synthetic construct
  source 1..2451: mol_type = other DNA
atggccttaccagtgaccgccttgctcctgccgctggccttgctgctccacgccgccaggccggaaatcgtgctgacacagagccccggcacactgtctcttagccctggcgaaagagccacactgagctgtagagccagccagagcatcagaagcagctacctggcctggtatcagcagaagcctggacaggcaccccggctgttgatctacggtgcttctagcagagccacaggcatccccgatagattttctggcagcggctccggcaccgacttcaccctgacaatcagcagactggaacccgaggactttgccgtgtattactgccagcagtacggcgacctgcctttcacatttggccctggcaccaagctggaaatcaagctcgaggacctgaagaacgtgttcccacctgaggtggccgtgttcgagcctagcaaggccgagatcgcccacacccagaaagccaccctcgtgtgcctggctaccggcttctaccccgaccatgtggaactgtcttggtgggtcaacggcaaagaggtgcacagcggcgtgtgtaccgacccccagccactgaaagaacagcccgccctgaacgacagccggtactgcctgagcagcagactgagagtgtccgccaccttctggcagaacccccggaaccacttcagatgccaggtgcagttctacggcctgagcgagaacgacgagtggacccaggacagagccaagcccgtgacccagatcgtgtctgccgaagcctggggcagagccgattgcggatcccagagcttcggcctgctggaccccaagctgtgctacctgctggatggcatcctgttcatctacggcgtgatcctgaccgccctgttcctgagagtgaagttcagcagaagcgccgacgcccctgcctaccagcagggacagaaccaactgtacaacgagctgaacctgggcagacgggaagagtacgacgtgctggacaagcggagaggcagggaccctgagatgggcggaaagccccagcggagaaagaacccccaggaaggactgtataacgaactccagaaagacaagatggccgaagcctacagcgagatcggcatgaagggcgagcggagaagaggcaagggccacgatggcctgtaccagggcctgagcaccgccaccaaggacacctatgacgccctgcacatgcaggccctgcctccaagaagggccaagcgatctggatctggagcaacaaacttctcactactcaaacaagcaggtgacgtggaggagaatcccgggcctactagtatggactggatttggcgcatccttttccttgtcggcgctgctaccggcgcgcattccttcgaagaggttcagctgctggaatctggcggaggaatggttcagcctggcggctctctgagactgtcttgtgccgccagcggcttcacctttagcagctacgccatgagctgggtccgacaggctcctggcaaaggactggaatgggtgtccgccatctctggctctggcggcagaaccttttacgccgatagcgtggaaggccggttcaccatcagccgggacaacagcaagaacaccctgtacctccagatgaacagcctgagagccgaggacaccgccgtgtactattgcgccaagcacgactacagcaactacccctacttcgactactggggccagggcacactggtcacagtttctagcacgcgtatccagaaccctgatcctgccgtgtaccagctgcgggatagcaagagcagcgacaagagcgtgtgtctgttcaccgacttcgacagccagaccaacgtgtcccagagcaaggactccgacgtgtacatcaccgataagtgcgtgctggacatgcggagcatggacttcaagagcaactccgccgtggcctggtccaacaagtccgatttcgcctgcgccaacgccttcaacaacagcattatccccgaggacacattcttcccaagcagcgacgtgccctgcggtacccagagttttgggttgttggaccctaaattgtgctatctgttggacggaatcctgttcatttacggagtgatcctgaccgcattgttcctgcgggttaagttttccagatccgcagacgcacccgcttaccaacaagggcagaaccaactctacaatgaacttaatttggggcggagggaagagtacgacgttctggacaaaaggaggggacgagatcccgagatgggcggaaagcctcagcgaaggaagaatccgcaagaggggctttataacgaactccagaaagataaaatggcagaagcctatagtgagattgggatgaagggagaaaggaggaggggtaaaggtcacgatgggttgtaccaaggattgagcacagccactaaagatacctatgatgcgctccacatgcaggccctgccgccaaga

SEQ ID NO: 20021 - DNA, 2664 bp, synthetic construct
  source 1..2664: mol_type = other DNA
atggccttaccagtgaccgccttgctcctgccgctggccttgctgctccacgccgccaggccggaaatcgtgctgacacagagccccggcacactgtctcttagccctggcgaaagagccacactgagctgtagagccagccagagcatcagaagcagctacctggcctggtatcagcagaagcctggacaggcaccccggctgttgatctacggtgcttctagcagagccacaggcatccccgatagattttctggcagcggctccggcaccgacttcaccctgacaatcagcagactggaacccgaggactttgccgtgtattactgccagcagtacggcgacctgcctttcacatttggccctggcaccaagctggaaatcaagctcgaggggaaaccaattcccaaccctcttctgggactggattcaaccggcagcggcgaggacctgaagaacgtgttcccacctgaggtggccgtgttcgagcctagcgaggccgagatcagccacacccagaaagccaccctcgtgtgcctggctaccggcttctaccccgaccatgtggaactgtcttggtgggtcaacggcaaagaggtgcacagcggcgtgtctaccgacccccagccactgaaagaacagcccgccctgaacgacagccggtactgcctgagcagcagactgagagtgtccgccaccttctggcagaacccccggaaccacttcagatgccaggtgcagttctacggcctgagcgagaacgacgagtggacccaggacagagccaagcccgtgacccagatcgtgtctgccgaagcctggggcagagccgattgcggatcccagagcttcggcctgctggaccccaagctgtgctacctgctggatggcatcctgttcatctacggcgtgatcctgaccgccctgttcctgagagtgaagttcagcagaagcgccgacgcccctgcctaccagcagggacagaaccaactgtacaacgagctgaacctgggcagacgggaagagtacgacgtgctggacaagcggagaggcagggaccctgagatgggcggaaagccccagcggagaaagaacccccaggaaggactgtataacgaactccagaaagacaagatggccgaagcctacagcgagatcggcatgaagggcgagcggagaagaggcaagggccacgatggcctgtaccagggcctgagcaccgccaccaaggacacctatgacgccctgcacatgcaggccctgcctccaagaagggccaagcgatctggatctggagcaacaaacttctcactactcaaacaagcaggtgacgtggaggagaatcccgggcctactagtatggactggatttggcgcatccttttccttgtcggcgctgctaccggcgcgcattccttcgaagaggttcagctgctggaatctggcggaggaatggttcagcctggcggctctctgagactgtcttgtgccgccagcggcttcacctttagcagctacgccatgagctgggtccgacaggctcctggcaaaggactggaatgggtgtccgccatctctggctctggcggcagaaccttttacgccgatagcgtggaaggccggttcaccatcagccgggacaacagcaagaacaccctgtacctccagatgaacagcctgagagccgaggacaccgccgtgtactattgcgccaagcacgactacagcaactacccctacttcgactactggggccagggcacactggtcacagtttctagcacgcgtgagcagaaactgatctcggaagaggatgggagcggcatccagaaccctgatcctgccgtgtaccagctgcgggatagcaagagcagcgacaagagcgtgtgtctgttcaccgacttcgacagccagaccaacgtgtcccagagcaaggactccgacgtgtacatcaccgataagaccgtgctggacatgcggagcatggacttcaagagcaactccgccgtggcctggtccaacaagtccgatttcgcctgcgccaacgccttcaacaacagcattatccccgaggacacattcttcccaagccccgagagcagctgcggtacccagagttttgggttgttggaccctaaattgtgctatctgttggacggaatcctgttcatttacggagtgatcctgaccgcattgttcctgaggagcaagcggtcacggctgctccacagcgattacatgaatatgacaccacgaagaccgggtcctactcgcaaacactaccaaccctacgcacctccccgcgactttgcagcgtaccgatctcgggttaagttttccagatccgcagacgcacccgcttaccaacaagggcagaaccaactctacaatgaacttaatttggggcggagggaagagtacgacgttctggacaaaaggaggggacgagatcccgagatgggcggaaagcctcagcgaaggaagaatccgcaagaggggctttataacgaactccagaaagataaaatggcagaagcctatagtgagattgggatgaagggagaaaggaggaggggtaaaggtcacgatgggttgtaccaaggattgagcacagccactaaagatacctatgatgcgctccacatgcaggccctgccgccaaga

SEQ ID NO: 20022 - DNA, 2787 bp, synthetic construct
  source 1..2787: mol_type = other DNA
atggccttaccagtgaccgccttgctcctgccgctggccttgctgctccacgccgccaggccggaaatcgtgctgacacagagccccggcacactgtctcttagccctggcgaaagagccacactgagctgtagagccagccagagcatcagaagcagctacctggcctggtatcagcagaagcctggacaggcaccccggctgttgatctacggtgcttctagcagagccacaggcatccccgatagattttctggcagcggctccggcaccgacttcaccctgacaatcagcagactggaacccgaggactttgccgtgtattactgccagcagtacggcgacctgcctttcacatttggccctggcaccaagctggaaatcaagctcgaggggaaaccaattcccaaccctcttctgggactggattcaaccggcagcggcgaggacctgaagaacgtgttcccacctgaggtggccgtgttcgagcctagcgaggccgagatcagccacacccagaaagccaccctcgtgtgcctggctaccggcttctaccccgaccatgtggaactgtcttggtgggtcaacggcaaagaggtgcacagcggcgtgtctaccgacccccagccactgaaagaacagcccgccctgaacgacagccggtactgcctgagcagcagactgagagtgtccgccaccttctggcagaacccccggaaccacttcagatgccaggtgcagttctacggcctgagcgagaacgacgagtggacccaggacagagccaagcccgtgacccagatcgtgtctgccgaagcctggggcagagccgattgcggatcccagagcttcggcctgctggaccccaagctgtgctacctgctggatggcatcctgttcatctacggcgtgatcctgaccgccctgttcctgaggagtaagaggagcaggctcctgcacagtgactacatgaacatgactccacgccgccccggacccacccgcaagcattaccagccctatgccccaccacgcgacttcgcagcctatcgctccagagtgaagttcagcagaagcgccgacgcccctgcctaccagcagggacagaaccaactgtacaacgagctgaacctgggcagacgggaagagtacgacgtgctggacaagcggagaggcagggaccctgagatgggcggaaagccccagcggagaaagaacccccaggaaggactgtataacgaactccagaaagacaagatggccgaagcctacagcgagatcggcatgaagggcgagcggagaagaggcaagggccacgatggcctgtaccagggcctgagcaccgccaccaaggacacctatgacgccctgcacatgcaggccctgcctccaagaagggccaagcgatctggatctggagcaacaaacttctcactactcaaacaagcaggtgacgtggaggagaatcccgggcctactagtatggactggatttggcgcatccttttccttgtcggcgctgctaccggcgcgcattccttcgaagaggttcagctgctggaatctggcggaggaatggttcagcctggcggctctctgagactgtcttgtgccgccagcggcttcacctttagcagctacgccatgagctgggtccgacaggctcctggcaaaggactggaatgggtgtccgccatctctggctctggcggcagaaccttttacgccgatagcgtggaaggccggttcaccatcagccgggacaacagcaagaacaccctgtacctccagatgaacagcctgagagccgaggacaccgccgtgtactattgcgccaagcacgactacagcaactacccctacttcgactactggggccagggcacactggtcacagtttctagcacgcgtgagcagaaactgatctcggaagaggatgggagcggcatccagaaccctgatcctgccgtgtaccagctgcgggatagcaagagcagcgacaagagcgtgtgtctgttcaccgacttcgacagccagaccaacgtgtcccagagcaaggactccgacgtgtacatcaccgataagaccgtgctggacatgcggagcatggacttcaagagcaactccgccgtggcctggtccaacaagtccgatttcgcctgcgccaacgccttcaacaacagcattatccccgaggacacattcttcccaagccccgagagcagctgcggtacccagagttttgggttgttggaccctaaattgtgctatctgttggacggaatcctgttcatttacggagtgatcctgaccgcattgttcctgaggagcaagcggtcacggctgctccacagcgattacatgaatatgacaccacgaagaccgggtcctactcgcaaacactaccaaccctacgcacctccccgcgactttgcagcgtaccgatctcgggttaagttttccagatccgcagacgcacccgcttaccaacaagggcagaaccaactctacaatgaacttaatttggggcggagggaagagtacgacgttctggacaaaaggaggggacgagatcccgagatgggcggaaagcctcagcgaaggaagaatccgcaagaggggctttataacgaactccagaaagataaaatggcagaagcctatagtgagattgggatgaagggagaaaggaggaggggtaaaggtcacgatgggttgtaccaaggattgagcacagccactaaagatacctatgatgcgctccacatgcaggccctgccgccaaga

SEQ ID NO: 20023 - DNA, 2670 bp, synthetic construct
  source 1..2670: mol_type = other DNA
atggccttaccagtgaccgccttgctcctgccgctggccttgctgctccacgccgccaggccggaaatcgtgctgacacagagccccggcacactgtctcttagccctggcgaaagagccacactgagctgtagagccagccagagcatcagaagcagctacctggcctggtatcagcagaagcctggacaggcaccccggctgttgatctacggtgcttctagcagagccacaggcatccccgatagattttctggcagcggctccggcaccgacttcaccctgacaatcagcagactggaacccgaggactttgccgtgtattactgccagcagtacggcgacctgcctttcacatttggccctggcaccaagctggaaatcaagctcgaggggaaaccaattcccaaccctcttctgggactggattcaaccggcagcggcgaggacctgaagaacgtgttcccacctgaggtggccgtgttcgagcctagcgaggccgagatcagccacacccagaaagccaccctcgtgtgcctggctaccggcttctaccccgaccatgtggaactgtcttggtgggtcaacggcaaagaggtgcacagcggcgtgtctaccgacccccagccactgaaagaacagcccgccctgaacgacagccggtactgcctgagcagcagactgagagtgtccgccaccttctggcagaacccccggaaccacttcagatgccaggtgcagttctacggcctgagcgagaacgacgagtggacccaggacagagccaagcccgtgacccagatcgtgtctgccgaagcctggggcagagccgattgcggatcccagagcttcggcctgctggaccccaagctgtgctacctgctggatggcatcctgttcatctacggcgtgatcctgaccgccctgttcctgagagtgaagttcagcagaagcgccgacgcccctgcctaccagcagggacagaaccaactgtacaacgagctgaacctgggcagacgggaagagtacgacgtgctggacaagcggagaggcagggaccctgagatgggcggaaagccccagcggagaaagaacccccaggaaggactgtataacgaactccagaaagacaagatggccgaagcctacagcgagatcggcatgaagggcgagcggagaagaggcaagggccacgatggcctgtaccagggcctgagcaccgccaccaaggacacctatgacgccctgcacatgcaggccctgcctccaagaagggccaagcgatctggatctggagcaacaaacttctcactactcaaacaagcaggtgacgtggaggagaatcccgggcctactagtatggactggatttggcgcatccttttccttgtcggcgctgctaccggcgcgcattccttcgaagaggttcagctgctggaatctggcggaggaatggttcagcctggcggctctctgagactgtcttgtgccgccagcggcttcacctttagcagctacgccatgagctgggtccgacaggctcctggcaaaggactggaatgggtgtccgccatctctggctctggcggcagaaccttttacgccgatagcgtggaaggccggttcaccatcagccgggacaacagcaagaacaccctgtacctccagatgaacagcctgagagccgaggacaccgccgtgtactattgcgccaagcacgactacagcaactacccctacttcgactactggggccagggcacactggtcacagtttctagcacgcgtgagcagaaactgatctcggaagaggatctggggagcggcatccagaaccctgatcctgccgtgtaccagctgcgggatagcaagagcagcgacaagagcgtgtgtctgttcaccgacttcgacagccagaccaacgtgtcccagagcaaggactccgacgtgtacatcaccgataagaccgtgctggacatgcggagcatggacttcaagagcaactccgccgtggcctggtccaacaagtccgatttcgcctgcgccaacgccttcaacaacagcattatccccgaggacacattcttcccaagccccgagagcagctgcggtacccagagttttgggttgttggaccctaaattgtgctatctgttggacggaatcctgttcatttacggagtgatcctgaccgcattgttcctgaagagaggccggaagaagctgctgtacatcttcaagcagcctttcatgcggcccgtgcagaccacccaggaagaggacggctgctcctgccggttccccgaggaagaagaaggcggctgcgagctgcgggttaagttttccagatccgcagacgcacccgcttaccaacaagggcagaaccaactctacaatgaacttaatttggggcggagggaagagtacgacgttctggacaaaaggaggggacgagatcccgagatgggcggaaagcctcagcgaaggaagaatccgcaagaggggctttataacgaactccagaaagataaaatggcagaagcctatagtgagattgggatgaagggagaaaggaggaggggtaaaggtcacgatgggttgtaccaaggattgagcacagccactaaagatacctatgatgcgctccacatgcaggccctgccgccaaga

SEQ ID NO: 20024 - DNA, 2796 bp, synthetic construct
  source 1..2796: mol_type = other DNA
atggccttaccagtgaccgccttgctcctgccgctggccttgctgctccacgccgccaggccggaaatcgtgctgacacagagccccggcacactgtctcttagccctggcgaaagagccacactgagctgtagagccagccagagcatcagaagcagctacctggcctggtatcagcagaagcctggacaggcaccccggctgttgatctacggtgcttctagcagagccacaggcatccccgatagattttctggcagcggctccggcaccgacttcaccctgacaatcagcagactggaacccgaggactttgccgtgtattactgccagcagtacggcgacctgcctttcacatttggccctggcaccaagctggaaatcaagctcgaggggaaaccaattcccaaccctcttctgggactggattcaaccggcagcggcgaggacctgaagaacgtgttcccacctgaggtggccgtgttcgagcctagcgaggccgagatcagccacacccagaaagccaccctcgtgtgcctggctaccggcttctaccccgaccatgtggaactgtcttggtgggtcaacggcaaagaggtgcacagcggcgtgtctaccgacccccagccactgaaagaacagcccgccctgaacgacagccggtactgcctgagcagcagactgagagtgtccgccaccttctggcagaacccccggaaccacttcagatgccaggtgcagttctacggcctgagcgagaacgacgagtggacccaggacagagccaagcccgtgacccagatcgtgtctgccgaagcctggggcagagccgattgcggatcccagagcttcggcctgctggaccccaagctgtgctacctgctggatggcatcctgttcatctacggcgtgatcctgaccgccctgttcctgaaacggggcagaaagaaactcctgtatatattcaaacaaccatttatgagaccagtacaaactactcaagaggaagatggctgtagctgccgatttccagaagaagaagaaggaggatgtgaactgagagtgaagttcagcagaagcgccgacgcccctgcctaccagcagggacagaaccaactgtacaacgagctgaacctgggcagacgggaagagtacgacgtgctggacaagcggagaggcagggaccctgagatgggcggaaagccccagcggagaaagaacccccaggaaggactgtataacgaactccagaaagacaagatggccgaagcctacagcgagatcggcatgaagggcgagcggagaagaggcaagggccacgatggcctgtaccagggcctgagcaccgccaccaaggacacctatgacgccctgcacatgcaggccctgcctccaagaagggccaagcgatctggatctggagcaacaaacttctcactactcaaacaagcaggtgacgtggaggagaatcccgggcctactagtatggactggatttggcgcatccttttccttgtcggcgctgctaccggcgcgcattccttcgaagaggttcagctgctggaatctggcggaggaatggttcagcctggcggctctctgagactgtcttgtgccgccagcggcttcacctttagcagctacgccatgagctgggtccgacaggctcctggcaaaggactggaatgggtgtccgccatctctggctctggcggcagaaccttttacgccgatagcgtggaaggccggttcaccatcagccgggacaacagcaagaacaccctgtacctccagatgaacagcctgagagccgaggacaccgccgtgtactattgcgccaagcacgactacagcaactacccctacttcgactactggggccagggcacactggtcacagtttctagcacgcgtgagcagaaactgatctcggaagaggatctggggagcggcatccagaaccctgatcctgccgtgtaccagctgcgggatagcaagagcagcgacaagagcgtgtgtctgttcaccgacttcgacagccagaccaacgtgtcccagagcaaggactccgacgtgtacatcaccgataagaccgtgctggacatgcggagcatggacttcaagagcaactccgccgtggcctggtccaacaagtccgatttcgcctgcgccaacgccttcaacaacagcattatccccgaggacacattcttcccaagccccgagagcagctgcggtacccagagttttgggttgttggaccctaaattgtgctatctgttggacggaatcctgttcatttacggagtgatcctgaccgcattgttcctgaagagaggccggaagaagctgctgtacatcttcaagcagcctttcatgcggcccgtgcagaccacccaggaagaggacggctgctcctgccggttccccgaggaagaagaaggcggctgcgagctgcgggttaagttttccagatccgcagacgcacccgcttaccaacaagggcagaaccaactctacaatgaacttaatttggggcggagggaagagtacgacgttctggacaaaaggaggggacgagatcccgagatgggcggaaagcctcagcgaaggaagaatccgcaagaggggctttataacgaactccagaaagataaaatggcagaagcctatagtgagattgggatgaagggagaaaggaggaggggtaaaggtcacgatgggttgtaccaaggattgagcacagccactaaagatacctatgatgcgctccacatgcaggccctgccgccaaga

SEQ ID NO: 20025 - DNA, 2469 bp, synthetic construct
  source 1..2469: mol_type = other DNA
atggccttaccagtgaccgccttgctcctgccgctggccttgctgctccacgccgccaggccggaaatcgtgctgacacagagccccggcacactgtctcttagccctggcgaaagagccacactgagctgtagagccagccagagcatcagaagcagctacctggcctggtatcagcagaagcctggacaggcaccccggctgttgatctacggtgcttctagcagagccacaggcatccccgatagattttctggcagcggctccggcaccgacttcaccctgacaatcagcagactggaacccgaggactttgccgtgtattactgccagcagtacggcgacctgcctttcacatttggccctggcaccaagctggaaatcaagctcgagcagagcttcggcctgctggaccccaagctgtgctacctgctggatggcatcctgttcatctacggcgtgatcctgaccgccctgttcctgagagtgaagttcagcagaagcgccgacgcccctgcctaccagcagggacagaaccaactgtacaacgagctgaacctgggcagacgggaagagtacgacgtgctggacaagcggagaggcagggaccctgagatgggcggaaagccccagcggagaaagaacccccaggaaggactgtataacgaactccagaaagacaagatggccgaagcctacagcgagatcggcatgaagggcgagcggagaagaggcaagggccacgatggcctgtaccagggcctgagcaccgccaccaaggacacctatgacgccctgcacatgcaggccctgcctccaagaagggccaagcgatctggatctggagcaacaaacttctcactactcaaacaagcaggtgacgtggaggagaatcccgggcctactagtatggactggatttggcgcatccttttccttgtcggcgctgctaccggcgcgcattccttcgaagaggttcagctgctggaatctggcggaggaatggttcagcctggcggctctctgagactgtcttgtgccgccagcggcttcacctttagcagctacgccatgagctgggtccgacaggctcctggcaaaggactggaatgggtgtccgccatctctggctctggcggcagaaccttttacgccgatagcgtggaaggccggttcaccatcagccgggacaacagcaagaacaccctgtacctccagatgaacagcctgagagccgaggacaccgccgtgtactattgcgccaagcacgactacagcaactacccctacttcgactactggggccagggcacactggtcacagtttctagcacgcgtcagagttttgggttgttggaccctaaattgtgctatctgttggacggaatcctgttcatttacggagtgatcctgaccgcattgttcctgcgggttaagttttccagatccgcagacgcacccgcttaccaacaagggcagaaccaactctacaatgaacttaatttggggcggagggaagagtacgacgttctggacaaaaggaggggacgagatcccgagatgggcggaaagcctcagcgaaggaagaatccgcaagaggggctttataacgaactccagaaagataaaatggcagaagcctatagtgagattgggatgaagggagaaaggaggaggggtaaaggtcacgatgggttgtaccaaggattgagcacagccactaaagatacctatgatgcgctccacatgcaggccctgccgccaagacgcgccaagagaagcggatctggcgtgaagcagaccctgaatttcgacctgctgaagctggctggcgacgtggaatccaacccaggcccttctagaggccatatgaccgagtacaagcccacggtgcgcctcgccacccgcgacgacgtccccagggccgtacgcaccctcgccgccgcgttcgccgactaccccgccacgcgccacaccgtcgatccggaccgccacatcgagcgggtcaccgagctgcaagaactcttcctcacgcgcgtcgggctcgacatcggcaaggtgtgggtcgcggacgacggcgccgcggtggcggtctggaccacgccggagagcgtcgaagcgggggcggtgttcgccgagatcggcccgcgcatggccgagttgagcggttcccggctggccgcgcagcaacagatggaaggcctcctggcgccgcaccggcccaaggagcccgcgtggttcctggccaccgtcggcgtctcgcccgaccaccagggcaagggtctgggcagcgccgtcgtgctccccggagtggaggcggccgagcgcgccggggtgcccgccttcctggagacctccgcgccccgcaacctccccttctacgagcggctcggcttcaccgtcaccgccgacgtcgaggtgcccgaaggaccgcgcacctggtgcatgacccgcaagcccggtgcctga

SEQ ID NO: 20026 - DNA, 1941 bp, synthetic construct
  source 1..1941: mol_type = other DNA
atggccttaccagtgaccgccttgctcctgccgctggccttgctgctccacgccgccaggccggaaatcgtgctgacacagagccccggcacactgtctcttagccctggcgaaagagccacactgagctgtagagccagccagagcatcagaagcagctacctggcctggtatcagcagaagcctggacaggcaccccggctgttgatctacggtgcttctagcagagccacaggcatccccgatagattttctggcagcggctccggcaccgacttcaccctgacaatcagcagactggaacccgaggactttgccgtgtattactgccagcagtacggcgacctgcctttcacatttggccctggcaccaagctggaaatcaagctcgagggacagcctaaggccaatcctaccgtgacactgttccctccaagcagcgaagaactccaggccaacaaggccacacttgtgtgcctgatctccgacttctaccctggggctgtgacagtggcttggaaggccgatggatctcctgtgaaagccggcgtggaaaccaccaagccatccaagcagagcaacaacaaatacgccgccagctcctacctgagcctgacacctgagcagtggaagtcccacagatcctacagctgccaagtgacccacgaaggcagcaccgtggaaaagacagtggcccctacagagtgcagccccatcaagaccgatgtgattacaatggaccccaaggacaactgctccaaggacgccaacgataccctgctgctccagctgaccaacaccagcgcctactacatgtacttgttgctgctgctgaagtccgtggtgtacttcgccatcatcacatgctgcctgctgcggagaaccgccttctgctgcaacggcgagaagtctagggccaagcgatctggatctggagcaacaaacttctcactactcaaacaagcaggtgacgtggaggagaatcccgggcctactagtatggactggatttggcgcatccttttccttgtcggcgctgctaccggcgcgcattccttcgaagaggttcagctgctggaatctggcggaggaatggttcagcctggcggctctctgagactgtcttgtgccgccagcggcttcacctttagcagctacgccatgagctgggtccgacaggctcctggcaaaggactggaatgggtgtccgccatctctggctctggcggcagaaccttttacgccgatagcgtggaaggccggttcaccatcagccgggacaacagcaagaacaccctgtacctccagatgaacagcctgagagccgaggacaccgccgtgtactattgcgccaagcacgactacagcaactacccctacttcgactactggggccagggcacactggtcacagtttctagcacgcgtgcctctacaaagggaccctccgtgtttcctctggctcccagcagcaagtctacaagcggaggaacagccgctctgggctgcctggtcaaggattactttcccgagcctgtgaccgtgtcctggaatagcggagcactgacaagcggcgtgcacacctttccagccgtgctgcaaagcagcggcctgtactctctgagcagcgtggtcacagtgcctagctctagcctgggcacccagacctacatctgcaatgtgaaccacaagcctagcaacaccaaggtggacaagagagtggaacccaagagctgtgaagtgaaaaccgactccaccgaccacgtgaagcccaaagagacagagaacaccaagcagcccagcaagagctgccacaagcccaaggccatcgtgcacaccgagaaagtgaacatgatgagcctgaccgtgctgggcctgcggatgctgttcgccaaaaccgtggccgtgaacttcctgctgaccgccaagctgttcttcctc

SEQ ID NO: 20027 - DNA, 1875 bp, synthetic construct
  source 1..1875: mol_type = other DNA
atggccttaccagtgaccgccttgctcctgccgctggccttgctgctccacgccgccaggccggaaatcgtgctgacacagagccccggcacactgtctcttagccctggcgaaagagccacactgagctgtagagccagccagagcatcagaagcagctacctggcctggtatcagcagaagcctggacaggcaccccggctgttgatctacggtgcttctagcagagccacaggcatccccgatagattttctggcagcggctccggcaccgacttcaccctgacaatcagcagactggaacccgaggactttgccgtgtattactgccagcagtacggcgacctgcctttcacatttggccctggcaccaagctggaaatcaagctcgagggacagcctaaggccaatcctaccgtgacactgttccctccaagcagcgaagaactccaggccaacaaggccacacttgtgtgcctgatctccgacttctaccctggggctgtgacagtggcttggaaggccgatggatctcctgtgaaagccggcgtggaaaccaccaagccatccaagcagagcaacaacaaatacgccgccagctcctacctgagcctgacacctgagcagtggaagtcccacagatcctacagctgccaagtgacccacgaaggcagcaccgtggaaaagacagtggcccctacagagtgcagcggcagagccgattgcggcatcaccagcgccagctaccaccagggcgtgctgagcgccaccatcctgtacgagatcctgctgggcaaggccaccctgtacgccgtgctggtgtctgccctggtgctgatggctatggtcaagcggaaggacagccggggaagggccaagcgatctggatctggagcaacaaacttctcactactcaaacaagcaggtgacgtggaggagaatcccgggcctactagtatggactggatttggcgcatccttttccttgtcggcgctgctaccggcgcgcattccttcgaagaggttcagctgctggaatctggcggaggaatggttcagcctggcggctctctgagactgtcttgtgccgccagcggcttcacctttagcagctacgccatgagctgggtccgacaggctcctggcaaaggactggaatgggtgtccgccatctctggctctggcggcagaaccttttacgccgatagcgtggaaggccggttcaccatcagccgggacaacagcaagaacaccctgtacctccagatgaacagcctgagagccgaggacaccgccgtgtactattgcgccaagcacgactacagcaactacccctacttcgactactggggccagggcacactggtcacagtttctagcacgcgtgcctctacaaagggaccctccgtgtttcctctggctcccagcagcaagtctacaagcggaggaacagccgctctgggctgcctggtcaaggattactttcccgagcctgtgaccgtgtcctggaatagcggagcactgacaagcggcgtgcacacctttccagccgtgctgcaaagcagcggcctgtactctctgagcagcgtggtcacagtgcctagctctagcctgggcacccagacctacatctgcaatgtgaaccacaagcctagcaacaccaaggtggacaagagagtggaacccaagagctgtatccccgaggacacattcttcccaagcagcgacgtgccctgcgacgtgaagctggtggaaaagagcttcgagacagacaccaacctgaacttccagaacctgagcgtgatcggcttcagaatcctgctgctgaaagtggccggctttaacctgctgatgaccctgcggctgtggtccagc

SEQ ID NO: 20028 - DNA, 1875 bp, synthetic construct
  source 1..1875: mol_type = other DNA
atggccttaccagtgaccgccttgctcctgccgctggccttgctgctccacgccgccaggccggaaatcgtgctgacacagagccccggcacactgtctcttagccctggcgaaagagccacactgagctgtagagccagccagagcatcagaagcagctacctggcctggtatcagcagaagcctggacaggcaccccggctgttgatctacggtgcttctagcagagccacaggcatccccgatagattttctggcagcggctccggcaccgacttcaccctgacaatcagcagactggaacccgaggactttgccgtgtattactgccagcagtacggcgacctgcctttcacatttggccctggcaccaagctggaaatcaagctcgagggacagcctaaggccaatcctaccgtgacactgttccctccaagcagcgaagaactccaggccaacaaggccacacttgtgtgcctgatctccgacttctaccctggggctgtgacagtggcttggaaggccgatggatctcctgtgaaagccggcgtggaaaccaccaagccatccaagcagagcaacaacaaatacgccgccagctcctacctgagcctgacacctgagcagtggaagtcccacagatcctacagctgccaagtgacccacgaaggcagcaccgtggaaaagacagtggcccctacagagtgcagcggcagagccgattgcggctttaccagcgagagctaccagcagggcgtgctgagcgccaccatcctgtacgagatcctgctgggcaaggccaccctgtacgccgtgctggtgtctgccctggtgctgatggctatggtcaagcggaaggacagccggggaagggccaagcgatctggatctggagcaacaaacttctcactactcaaacaagcaggtgacgtggaggagaatcccgggcctactagtatggactggatttggcgcatccttttccttgtcggcgctgctaccggcgcgcattccttcgaagaggttcagctgctggaatctggcggaggaatggttcagcctggcggctctctgagactgtcttgtgccgccagcggcttcacctttagcagctacgccatgagctgggtccgacaggctcctggcaaaggactggaatgggtgtccgccatctctggctctggcggcagaaccttttacgccgatagcgtggaaggccggttcaccatcagccgggacaacagcaagaacaccctgtacctccagatgaacagcctgagagccgaggacaccgccgtgtactattgcgccaagcacgactacagcaactacccctacttcgactactggggccagggcacactggtcacagtttctagcacgcgtgcctctacaaagggaccctccgtgtttcctctggctcccagcagcaagtctacaagcggaggaacagccgctctgggctgcctggtcaaggattactttcccgagcctgtgaccgtgtcctggaatagcggagcactgacaagcggcgtgcacacctttccagccgtgctgcaaagcagcggcctgtactctctgagcagcgtggtcacagtgcctagctctagcctgggcacccagacctacatctgcaatgtgaaccacaagcctagcaacaccaaggtggacaagagagtggaacccaagagctgtatccccgaggacacattcttcccaagccccgagagcagctgcgacgtgaagctggtggaaaagagcttcgagacagacaccaacctgaacttccagaacctgagcgtgatcggcttcagaatcctgctgctgaaagtggccggctttaacctgctgatgaccctgcggctgtggtccagc

SEQ ID NO: 20029 - DNA, 1353 bp, synthetic construct
  source 1..1353: mol_type = other DNA
atggccttaccagtgaccgccttgctcctgccgctggccttgctgctccacgccgccaggccggaaatcgtgctgacacagagccccggcacactgtctcttagccctggcgaaagagccacactgagctgtagagccagccagagcatcagaagcagctacctggcctggtatcagcagaagcctggacaggcaccccggctgttgatctacggtgcttctagcagagccacaggcatccccgatagattttctggcagcggctccggcaccgacttcaccctgacaatcagcagactggaacccgaggactttgccgtgtattactgccagcagtacggcgacctgcctttcacatttggccctggcaccaagctggaaatcaagggcggaggcggaagtggaggcggaggatctggcggcggaggctctgaggttcagctgctggaatctggcggaggaatggttcagcctggcggctctctgagactgtcttgtgccgccagcggcttcacctttagcagctacgccatgagctgggtccgacaggctcctggcaaaggactggaatgggtgtccgccatctctggctctggcggcagaaccttttacgccgatagcgtggaaggccggttcaccatcagccgggacaacagcaagaacaccctgtacctccagatgaacagcctgagagccgaggacaccgccgtgtactattgcgccaagcacgactacagcaactacccctacttcgactactggggccagggcacactggtcacagtttctagcacgcgtgacggtaacgaggagatgggaggaatcactcaaaccccttacaaagtctcaatttcaggaacaactgttatccttacatgtccccagtatcctggcagcgagatcctttggcagcataacgacaagaatatagggggagatgaagacgataagaatatcggatctgacgaggatcacttgagcctgaaagagttctccgagcttgaacaaagcggatattatgtgtgctatccgcgcgggtcaaagccggaagacgctaacttttacctttatctccgagccagagtgtgcgaaaattgcatggaaatggacgttatgtccgttgctacaatagttatcgtagatatatgcatcacgggtggactgcttctgctggtttattattggtccaagaatagaaaggccaaagctaaacccgtgaccagaggcgctggcgcaggcggaaggcaaaggggacaaaacaaagaacggccaccaccagtgccaaatccagattatgagcctattcggaaaggacagagggacctgtactctggcctgaatcagagaagaatc

SEQ ID NO: 20030 - DNA, 1248 bp, synthetic construct
  source 1..1248: mol_type = other DNA
atggccttaccagtgaccgccttgctcctgccgctggccttgctgctccacgccgccaggccggaaatcgtgctgacacagagccccggcacactgtctcttagccctggcgaaagagccacactgagctgtagagccagccagagcatcagaagcagctacctggcctggtatcagcagaagcctggacaggcaccccggctgttgatctacggtgcttctagcagagccacaggcatccccgatagattttctggcagcggctccggcaccgacttcaccctgacaatcagcagactggaacccgaggactttgccgtgtattactgccagcagtacggcgacctgcctttcacatttggccctggcaccaagctggaaatcaagggcggaggcggaagtggaggcggaggatctggcggcggaggctctgaggttcagctgctggaatctggcggaggaatggttcagcctggcggctctctgagactgtcttgtgccgccagcggcttcacctttagcagctacgccatgagctgggtccgacaggctcctggcaaaggactggaatgggtgtccgccatctctggctctggcggcagaaccttttacgccgatagcgtggaaggccggttcaccatcagccgggacaacagcaagaacaccctgtacctccagatgaacagcctgagagccgaggacaccgccgtgtactattgcgccaagcacgactacagcaactacccctacttcgactactggggccagggcacactggtcacagtttctagcacgcgtttcaagatccccatcgaggaactggaagatcgggtgttcgtgaactgcaacacctctatcacctgggtggaaggcaccgtgggaacactgctgagcgacatcaccagactggacctcggcaagcggattctggaccctcggggcatctacagatgcaacggcaccgacatctacaaggacaaagaaagcaccgtgcaggtccactacagaatgtgccagtcctgcgtggaactggaccctgctacagtggccggcatcatcgtgaccgatgtgatcgctactctgctgctggctctgggagtgttctgcttcgccggacacgaaacaggcagactgtctggcgctgccgatacacaggccctgctgagaaacgaccaagtgtatcagcccctgcgcgacagagatgatgcccagtattctcacctcggcggcaactgggctagaaacaag

SEQ ID NO: 20031 - DNA, 1278 bp, synthetic construct
  source 1..1278: mol_type = other DNA
atggccttaccagtgaccgccttgctcctgccgctggccttgctgctccacgccgccaggccggaaatcgtgctgacacagagccccggcacactgtctcttagccctggcgaaagagccacactgagctgtagagccagccagagcatcagaagcagctacctggcctggtatcagcagaagcctggacaggcaccccggctgttgatctacggtgcttctagcagagccacaggcatccccgatagattttctggcagcggctccggcaccgacttcaccctgacaatcagcagactggaacccgaggactttgccgtgtattactgccagcagtacggcgacctgcctttcacatttggccctggcaccaagctggaaatcaagggcggaggcggaagtggaggcggaggatctggcggcggaggctctgaggttcagctgctggaatctggcggaggaatggttcagcctggcggctctctgagactgtcttgtgccgccagcggcttcacctttagcagctacgccatgagctgggtccgacaggctcctggcaaaggactggaatgggtgtccgccatctctggctctggcggcagaaccttttacgccgatagcgtggaaggccggttcaccatcagccgggacaacagcaagaacaccctgtacctccagatgaacagcctgagagccgaggacaccgccgtgtactattgcgccaagcacgactacagcaactacccctacttcgactactggggccagggcacactggtcacagtttctagcacgcgtcagagcatcaagggcaaccacctggtcaaggtgtacgactaccaagaggacggcagcgtgctgctgacatgtgatgccgaggccaagaacatcacctggtttaaggacggcaagatgatcggcttcctgaccgaggacaagaagaagtggaacctgggcagcaacgctaaggaccccagaggcatgtatcagtgcaagggcagccagaacaagagcaagcccctccaggtgtactaccggatgtgccagaactgcatcgagctgaacgccgctaccatcagcggctttctgttcgccgagatcgtgtccatcttcgtgctggccgtgggcgtgtactttatcgctggacaggatggcgtgcggcagagcagagcttccgataagcaaaccctgctgcctaacgaccagctgtaccagcctctgaaggacagagaggacgaccagtacagccacctccagggcaatcagctgagaagaaac

SEQ ID NO: 20032 - DNA, 1227 bp, synthetic construct
  source 1..1227: mol_type = other DNA
atggccttaccagtgaccgccttgctcctgccgctggccttgctgctccacgccgccaggccggaaatcgtgctgacacagagccccggcacactgtctcttagccctggcgaaagagccacactgagctgtagagccagccagagcatcagaagcagctacctggcctggtatcagcagaagcctggacaggcaccccggctgttgatctacggtgcttctagcagagccacaggcatccccgatagattttctggcagcggctccggcaccgacttcaccctgacaatcagcagactggaacccgaggactttgccgtgtattactgccagcagtacggcgacctgcctttcacatttggccctggcaccaagctggaaatcaagggcggaggcggaagtggaggcggaggatctggcggcggaggctctgaggttcagctgctggaatctggcggaggaatggttcagcctggcggctctctgagactgtcttgtgccgccagcggcttcacctttagcagctacgccatgagctgggtccgacaggctcctggcaaaggactggaatgggtgtccgccatctctggctctggcggcagaaccttttacgccgatagcgtggaaggccggttcaccatcagccgggacaacagcaagaacaccctgtacctccagatgaacagcctgagagccgaggacaccgccgtgtactattgcgccaagcacgactacagcaactacccctacttcgactactggggccagggcacactggtcacagtttctagcacgcgtcagagttttgggttgttggaccctaaattgtgctatctgttggacggaatcctgttcatttacggagtgatcctgaccgcattgttcctgcgggttaagttttccagatccgcagacgcacccgcttaccaacaagggcagaaccaactctacaatgaacttaatttggggcggagggaagagtacgacgttctggacaaaaggaggggacgagatcccgagatgggcggaaagcctcagcgaaggaagaatccgcaagaggggctttataacgaactccagaaagataaaatggcagaagcctatagtgagattgggatgaagggagaaaggaggaggggtaaaggtcacgatgggttgtaccaaggattgagcacagccactaaagatacctatgatgcgctccacatgcaggccctgccgccaaga

SEQ ID NO: 20033 - DNA, 1353 bp, synthetic construct
  source 1..1353: mol_type = other DNA
atggccttaccagtgaccgccttgctcctgccgctggccttgctgctccacgccgccaggccggaggttcagctgctggaatctggcggaggaatggttcagcctggcggctctctgagactgtcttgtgccgccagcggcttcacctttagcagctacgccatgagctgggtccgacaggctcctggcaaaggactggaatgggtgtccgccatctctggctctggcggcagaaccttttacgccgatagcgtggaaggccggttcaccatcagccgggacaacagcaagaacaccctgtacctccagatgaacagcctgagagccgaggacaccgccgtgtactattgcgccaagcacgactacagcaactacccctacttcgactactggggccagggcacactggtcacagtttctagcggcggaggcggaagtggaggcggaggatctggcggcggaggctctgaaatcgtgctgacacagagccccggcacactgtctcttagccctggcgaaagagccacactgagctgtagagccagccagagcatcagaagcagctacctggcctggtatcagcagaagcctggacaggcaccccggctgttgatctacggtgcttctagcagagccacaggcatccccgatagattttctggcagcggctccggcaccgacttcaccctgacaatcagcagactggaacccgaggactttgccgtgtattactgccagcagtacggcgacctgcctttcacatttggccctggcaccaagctggaaatcaagacgcgtgacggtaacgaggagatgggaggaatcactcaaaccccttacaaagtctcaatttcaggaacaactgttatccttacatgtccccagtatcctggcagcgagatcctttggcagcataacgacaagaatatagggggagatgaagacgataagaatatcggatctgacgaggatcacttgagcctgaaagagttctccgagcttgaacaaagcggatattatgtgtgctatccgcgcgggtcaaagccggaagacgctaacttttacctttatctccgagccagagtgtgcgaaaattgcatggaaatggacgttatgtccgttgctacaatagttatcgtagatatatgcatcacgggtggactgcttctgctggtttattattggtccaagaatagaaaggccaaagctaaacccgtgaccagaggcgctggcgcaggcggaaggcaaaggggacaaaacaaagaacggccaccaccagtgccaaatccagattatgagcctattcggaaaggacagagggacctgtactctggcctgaatcagagaagaatc

SEQ ID NO: 20034 - DNA, 1248 bp, synthetic construct
  source 1..1248: mol_type = other DNA
atggccttaccagtgaccgccttgctcctgccgctggccttgctgctccacgccgccaggccggaggttcagctgctggaatctggcggaggaatggttcagcctggcggctctctgagactgtcttgtgccgccagcggcttcacctttagcagctacgccatgagctgggtccgacaggctcctggcaaaggactggaatgggtgtccgccatctctggctctggcggcagaaccttttacgccgatagcgtggaaggccggttcaccatcagccgggacaacagcaagaacaccctgtacctccagatgaacagcctgagagccgaggacaccgccgtgtactattgcgccaagcacgactacagcaactacccctacttcgactactggggccagggcacactggtcacagtttctagcggcggaggcggaagtggaggcggaggatctggcggcggaggctctgaaatcgtgctgacacagagccccggcacactgtctcttagccctggcgaaagagccacactgagctgtagagccagccagagcatcagaagcagctacctggcctggtatcagcagaagcctggacaggcaccccggctgttgatctacggtgcttctagcagagccacaggcatccccgatagattttctggcagcggctccggcaccgacttcaccctgacaatcagcagactggaacccgaggactttgccgtgtattactgccagcagtacggcgacctgcctttcacatttggccctggcaccaagctggaaatcaagacgcgtttcaagatccccatcgaggaactggaagatcgggtgttcgtgaactgcaacacctctatcacctgggtggaaggcaccgtgggaacactgctgagcgacatcaccagactggacctcggcaagcggattctggaccctcggggcatctacagatgcaacggcaccgacatctacaaggacaaagaaagcaccgtgcaggtccactacagaatgtgccagtcctgcgtggaactggaccctgctacagtggccggcatcatcgtgaccgatgtgatcgctactctgctgctggctctgggagtgttctgcttcgccggacacgaaacaggcagactgtctggcgctgccgatacacaggccctgctgagaaacgaccaagtgtatcagcccctgcgcgacagagatgatgcccagtattctcacctcggcggcaactgggctagaaacaag

SEQ ID NO: 20035 - DNA, 1278 bp, synthetic construct
  source 1..1278: mol_type = other DNA
atggccttaccagtgaccgccttgctcctgccgctggccttgctgctccacgccgccaggccggaggttcagctgctggaatctggcggaggaatggttcagcctggcggctctctgagactgtcttgtgccgccagcggcttcacctttagcagctacgccatgagctgggtccgacaggctcctggcaaaggactggaatgggtgtccgccatctctggctctggcggcagaaccttttacgccgatagcgtggaaggccggttcaccatcagccgggacaacagcaagaacaccctgtacctccagatgaacagcctgagagccgaggacaccgccgtgtactattgcgccaagcacgactacagcaactacccctacttcgactactggggccagggcacactggtcacagtttctagcggcggaggcggaagtggaggcggaggatctggcggcggaggctctgaaatcgtgctgacacagagccccggcacactgtctcttagccctggcgaaagagccacactgagctgtagagccagccagagcatcagaagcagctacctggcctggtatcagcagaagcctggacaggcaccccggctgttgatctacggtgcttctagcagagccacaggcatccccgatagattttctggcagcggctccggcaccgacttcaccctgacaatcagcagactggaacccgaggactttgccgtgtattactgccagcagtacggcgacctgcctttcacatttggccctggcaccaagctggaaatcaagacgcgtcagagcatcaagggcaaccacctggtcaaggtgtacgactaccaagaggacggcagcgtgctgctgacatgtgatgccgaggccaagaacatcacctggtttaaggacggcaagatgatcggcttcctgaccgaggacaagaagaagtggaacctgggcagcaacgctaaggaccccagaggcatgtatcagtgcaagggcagccagaacaagagcaagcccctccaggtgtactaccggatgtgccagaactgcatcgagctgaacgccgctaccatcagcggctttctgttcgccgagatcgtgtccatcttcgtgctggccgtgggcgtgtactttatcgctggacaggatggcgtgcggcagagcagagcttccgataagcaaaccctgctgcctaacgaccagctgtaccagcctctgaaggacagagaggacgaccagtacagccacctccagggcaatcagctgagaagaaac

SEQ ID NO: 20036 - DNA, 1227 bp, synthetic construct
  source 1..1227: mol_type = other DNA
atggccttaccagtgaccgccttgctcctgccgctggccttgctgctccacgccgccaggccggaggttcagctgctggaatctggcggaggaatggttcagcctggcggctctctgagactgtcttgtgccgccagcggcttcacctttagcagctacgccatgagctgggtccgacaggctcctggcaaaggactggaatgggtgtccgccatctctggctctggcggcagaaccttttacgccgatagcgtggaaggccggttcaccatcagccgggacaacagcaagaacaccctgtacctccagatgaacagcctgagagccgaggacaccgccgtgtactattgcgccaagcacgactacagcaactacccctacttcgactactggggccagggcacactggtcacagtttctagcggcggaggcggaagtggaggcggaggatctggcggcggaggctctgaaatcgtgctgacacagagccccggcacactgtctcttagccctggcgaaagagccacactgagctgtagagccagccagagcatcagaagcagctacctggcctggtatcagcagaagcctggacaggcaccccggctgttgatctacggtgcttctagcagagccacaggcatccccgatagattttctggcagcggctccggcaccgacttcaccctgacaatcagcagactggaacccgaggactttgccgtgtattactgccagcagtacggcgacctgcctttcacatttggccctggcaccaagctggaaatcaagacgcgtcagagttttgggttgttggaccctaaattgtgctatctgttggacggaatcctgttcatttacggagtgatcctgaccgcattgttcctgcgggttaagttttccagatccgcagacgcacccgcttaccaacaagggcagaaccaactctacaatgaacttaatttggggcggagggaagagtacgacgttctggacaaaaggaggggacgagatcccgagatgggcggaaagcctcagcgaaggaagaatccgcaagaggggctttataacgaactccagaaagataaaatggcagaagcctatagtgagattgggatgaagggagaaaggaggaggggtaaaggtcacgatgggttgtaccaaggattgagcacagccactaaagatacctatgatgcgctccacatgcaggccctgccgccaaga

SEQ ID NO: 20037 - DNA, 1512 bp, synthetic construct
  source 1..1512: mol_type = other DNA
atggccttaccagtgaccgccttgctcctgccgctggccttgctgctccacgccgccaggccggaaatcgtgctgacacagagccccggcacactgtctcttagccctggcgaaagagccacactgagctgtagagccagccagagcatcagaagcagctacctggcctggtatcagcagaagcctggacaggcaccccggctgttgatctacggtgcttctagcagagccacaggcatccccgatagattttctggcagcggctccggcaccgacttcaccctgacaatcagcagactggaacccgaggactttgccgtgtattactgccagcagtacggcgacctgcctttcacatttggccctggcaccaagctggaaatcaagggcggaggcggaagtggaggcggaggatctggcggcggaggctctgaggttcagctgctggaatctggcggaggaatggttcagcctggcggctctctgagactgtcttgtgccgccagcggcttcacctttagcagctacgccatgagctgggtccgacaggctcctggcaaaggactggaatgggtgtccgccatctctggctctggcggcagaaccttttacgccgatagcgtggaaggccggttcaccatcagccgggacaacagcaagaacaccctgtacctccagatgaacagcctgagagccgaggacaccgccgtgtactattgcgccaagcacgactacagcaactacccctacttcgactactggggccagggcacactggtcacagtttctagcacgcgtggaatgaggactgaggatcttcccaaagctgtcgtctttctcgaaccccaatggtatcgggtgctcgaaaaagactctgtgacactgaaatgccaaggggcctactctcccgaggacaactccacacagtggtttcataatgagtccctcatcagctctcaggccagctcttatttcattgatgccgctacagtggacgactccggcgagtatcggtgtcagaccaatctgtctacactgtctgaccccgtgcagcttgaggtccacattggatggttgctcttgcaagccccacgctgggttttcaaagaggaagatccaatccatctgcggtgccacagctggaaaaacaccgctctccacaaagtcacatacctgcaaaatggcaaaggacgcaaatacttccatcacaattccgatttttacattccgaaggctaccctgaaagacagcggcagctatttctgccggggactcgtcggctccaagaatgtgtcctccgaaaccgtgaatatcacgattacccaaggactggctgtgcctacaatctctagcttctttccgcctggataccaagtctccttctgtcttgtgatggtcctcctgtttgctgtggacacaggactgtacttttccgtgaaaacgaacatccgcagctccacacgcgattggaaagatcacaagtttaaatggcgcaaagatccccaggacaag

SEQ ID NO: 20038 - DNA, 2361 bp, synthetic construct
  source 1..2361: mol_type = other DNA
atggccttaccagtgaccgccttgctcctgccgctggccttgctgctccacgccgccaggccggaaatcgtgctgacacagagccccggcacactgtctcttagccctggcgaaagagccacactgagctgtagagccagccagagcatcagaagcagctacctggcctggtatcagcagaagcctggacaggcaccccggctgttgatctacggtgcttctagcagagccacaggcatccccgatagattttctggcagcggctccggcaccgacttcaccctgacaatcagcagactggaacccgaggactttgccgtgtattactgccagcagtacggcgacctgcctttcacatttggccctggcaccaagctggaaatcaagggcggaggcggaagtggaggcggaggatctggcggcggaggctctgaggttcagctgctggaatctggcggaggaatggttcagcctggcggctctctgagactgtcttgtgccgccagcggcttcacctttagcagctacgccatgagctgggtccgacaggctcctggcaaaggactggaatgggtgtccgccatctctggctctggcggcagaaccttttacgccgatagcgtggaaggccggttcaccatcagccgggacaacagcaagaacaccctgtacctccagatgaacagcctgagagccgaggacaccgccgtgtactattgcgccaagcacgactacagcaactacccctacttcgactactggggccagggcacactggtcacagtttctagcacgcgtggaggctctggacaacaacagaccctgcctaaaccattcatctgggctgaaccccactttatggttccgaaagagaaacaagtcacgatttgttgccaagggaattacggggccgtcgagtatcagctccactttgagggctccctgtttgctgtggatcggcccaagccacctgaaagaatcaacaaagtccaattctatattcctgatatgaactcccgcatggcaggccagtattcatgtatctaccgcgtgggagaactttggagtgaaccctctaacctgctggacctcgtcgtgacagagatgtatgatacacccacactgtctgtgcaccctgggccagaagttatcagcggagaaaaagttaccttttattgccgcctcgataccgctacctctatgttcctcttgctgaaagagggccgcagctctcacgtgcagcgaggctacggaaaggtccaagctgagtttcctctcggccccgtgaccaccgctcacaggggcacatatagatgttttggctcttataacaatcatgcctggtcattcccatccgagcctgtgaaactgctggtcacaggcgatattgagaatacctctctggccccagaagatcctacattccccgccgacacatggggaacatatctgctgacaaccgaaaccgggctgcaaaaggaccatgctctgtgggatcataccgctcagaatctgcttcggatggggcttgcattcctggtcctggtggctcttgtctggtttctggtcgaggactggctgtcccggaagagaaccagagaaagagcttccagggccagcacctgggaaggcagacgcagactgaatactcagaccctgcgcgccaagagaagcggatctggcgtgaagcagaccctgaatttcgacctgctgaagctggctggcgacgtggaatccaacccaggcccttctagaggccatatgaccgagtacaagcccacggtgcgcctcgccacccgcgacgacgtccccagggccgtacgcaccctcgccgccgcgttcgccgactaccccgccacgcgccacaccgtcgatccggaccgccacatcgagcgggtcaccgagctgcaagaactcttcctcacgcgcgtcgggctcgacatcggcaaggtgtgggtcgcggacgacggcgccgcggtggcggtctggaccacgccggagagcgtcgaagcgggggcggtgttcgccgagatcggcccgcgcatggccgagttgagcggttcccggctggccgcgcagcaacagatggaaggcctcctggcgccgcaccggcccaaggagcccgcgtggttcctggccaccgtcggcgtctcgcccgaccaccagggcaagggtctgggcagcgccgtcgtgctccccggagtggaggcggccgagcgcgccggggtgcccgccttcctggagacctccgcgccccgcaacctccccttctacgagcggctcggcttcaccgtcaccgccgacgtcgaggtgcccgaaggaccgcgcacctggtgcatgacccgcaagcccggtgcctga

SEQ ID NO: 20039 - DNA, 1860 bp, synthetic construct
  source 1..1860: mol_type = other DNA
atggccttaccagtgaccgccttgctcctgccgctggccttgctgctccacgccgccaggccggaaatcgtgctgacacagagccccggcacactgtctcttagccctggcgaaagagccacactgagctgtagagccagccagagcatcagaagcagctacctggcctggtatcagcagaagcctggacaggcaccccggctgttgatctacggtgcttctagcagagccacaggcatccccgatagattttctggcagcggctccggcaccgacttcaccctgacaatcagcagactggaacccgaggactttgccgtgtattactgccagcagtacggcgacctgcctttcacatttggccctggcaccaagctggaaatcaagggcggaggcggaagtggaggcggaggatctggcggcggaggctctgaggttcagctgctggaatctggcggaggaatggttcagcctggcggctctctgagactgtcttgtgccgccagcggcttcacctttagcagctacgccatgagctgggtccgacaggctcctggcaaaggactggaatgggtgtccgccatctctggctctggcggcagaaccttttacgccgatagcgtggaaggccggttcaccatcagccgggacaacagcaagaacaccctgtacctccagatgaacagcctgagagccgaggacaccgccgtgtactattgcgccaagcacgactacagcaactacccctacttcgactactggggccagggcacactggtcacagtttctagcacgcgtaaaattgaagttatgtatcctcctccttacctagacaatgagaagagcaatggaaccattatccatgtgaaaggggcgcgtggcgatattgagaatacctctctggccccagaagatcctacattccccgccgacacatggggaacatatctgctgacaaccgaaaccgggctgcaaaaggaccatgctctgtgggatcataccgctcagaatctgcttcggatggggcttgcattcctggtcctggtggctcttgtctggtttctggtcgaggactggctgtcccggaagagaaccagagaaagagcttccagggccagcacctgggaaggcagacgcagactgaatactcagaccctgcgcgccaagagaagcggatctggcgtgaagcagaccctgaatttcgacctgctgaagctggctggcgacgtggaatccaacccaggcccttctagaggccatatgaccgagtacaagcccacggtgcgcctcgccacccgcgacgacgtccccagggccgtacgcaccctcgccgccgcgttcgccgactaccccgccacgcgccacaccgtcgatccggaccgccacatcgagcgggtcaccgagctgcaagaactcttcctcacgcgcgtcgggctcgacatcggcaaggtgtgggtcgcggacgacggcgccgcggtggcggtctggaccacgccggagagcgtcgaagcgggggcggtgttcgccgagatcggcccgcgcatggccgagttgagcggttcccggctggccgcgcagcaacagatggaaggcctcctggcgccgcaccggcccaaggagcccgcgtggttcctggccaccgtcggcgtctcgcccgaccaccagggcaagggtctgggcagcgccgtcgtgctccccggagtggaggcggccgagcgcgccggggtgcccgccttcctggagacctccgcgccccgcaacctccccttctacgagcggctcggcttcaccgtcaccgccgacgtcgaggtgcccgaaggaccgcgcacctggtgcatgacccgcaagcccggtgcctga

SEQ ID NO: 20040 - DNA, 2121 bp, synthetic construct
  source 1..2121: mol_type = other DNA
atggccttaccagtgaccgccttgctcctgccgctggccttgctgctccacgccgccaggccggaaatcgtgctgacacagagccccggcacactgtctcttagccctggcgaaagagccacactgagctgtagagccagccagagcatcagaagcagctacctggcctggtatcagcagaagcctggacaggcaccccggctgttgatctacggtgcttctagcagagccacaggcatccccgatagattttctggcagcggctccggcaccgacttcaccctgacaatcagcagactggaacccgaggactttgccgtgtattactgccagcagtacggcgacctgcctttcacatttggccctggcaccaagctggaaatcaagggcggaggcggaagtggaggcggaggatctggcggcggaggctctgaggttcagctgctggaatctggcggaggaatggttcagcctggcggctctctgagactgtcttgtgccgccagcggcttcacctttagcagctacgccatgagctgggtccgacaggctcctggcaaaggactggaatgggtgtccgccatctctggctctggcggcagaaccttttacgccgatagcgtggaaggccggttcaccatcagccgggacaacagcaagaacaccctgtacctccagatgaacagcctgagagccgaggacaccgccgtgtactattgcgccaagcacgactacagcaactacccctacttcgactactggggccagggcacactggtcacagtttctagcacgcgtctgtgggtgtcccagccacctgaaattcggacactggaaggctcctccgcctttctgccctgtagctttaacgccagccaggggagactcgccatcggctctgtgacatggttccgggatgaagtcgtccctggaaaagaagttcgcaacggaacaccagagttcagaggcagactcgccccactggcaagctccagattcctgcatgaccatcaggctgaactgcacattagggacgtgcggggccacgatgcctccatctatgtgtgtcgggtcgaagtgcttggactcggcgtcggaactggaaacggcactaggctggtggtcgagaaagaacatccacagcttggcgctggcaccgtcctgttgcttagagccggattctatgccgtcagcttcctgtccgtggctgtggggtctacagtgtattaccagggaaaatgtctcacctggaaaggccccagacgccagcttccagctgttgttcctgctccactgccaccaccttgtggctcctctgctcacttgcttccaccagtgcctggcggacgcgccaagagaagcggatctggcgtgaagcagaccctgaatttcgacctgctgaagctggctggcgacgtggaatccaacccaggcccttctagaatgtaccggatgcagctgctgagctgtatcgccctgtctctggccctggtcacaaatagcgcccctaccagcagcagcaccaagaaaacccagctgcaactggaacacctcctgctggacctccagatgatcctgaacggcatcaacaactacaagaaccccaagctgaccgagatgctgaccgccaagttctacatgcccaagaaggccaccgagctgaagcacctccagtgcctggaagaggaactgaagcccctggaagaagtgctgaatctggcccagagcaagaacttccacctgaggccaagggacctgatctccaacatcaacgtgatcgtgctggaactgaaaggcagcgagacaaccttcatgtgcgagtacgccgacgagacagctaccatcgtggaatttctgaatcggtggatcaccttctgccagagcatcatcagcaccctgacaaagatcgaagtgatgtaccctcctccttacctggacaacgagaagtccaacggcaccatcatccacgtgaagggcaagcacctgtgtccttctccactgttccccggacctagcaagcctttctgggtgctcgttgttgttggcggcgtgctggcctgttacagcctgctggttaccgtggccttcatcatcttttgggtccgaagcaagcggagctaa

SEQ ID NO: 20041 - DNA, 2049 bp, synthetic construct
  source 1..2049: mol_type = other DNA
atggccttaccagtgaccgccttgctcctgccgctggccttgctgctccacgccgccaggccggaaatcgtgctgacacagagccccggcacactgtctcttagccctggcgaaagagccacactgagctgtagagccagccagagcatcagaagcagctacctggcctggtatcagcagaagcctggacaggcaccccggctgttgatctacggtgcttctagcagagccacaggcatccccgatagattttctggcagcggctccggcaccgacttcaccctgacaatcagcagactggaacccgaggactttgccgtgtattactgccagcagtacggcgacctgcctttcacatttggccctggcaccaagctggaaatcaagggcggaggcggaagtggaggcggaggatctggcggcggaggctctgaggttcagctgctggaatctggcggaggaatggttcagcctggcggctctctgagactgtcttgtgccgccagcggcttcacctttagcagctacgccatgagctgggtccgacaggctcctggcaaaggactggaatgggtgtccgccatctctggctctggcggcagaaccttttacgccgatagcgtggaaggccggttcaccatcagccgggacaacagcaagaacaccctgtacctccagatgaacagcctgagagccgaggacaccgccgtgtactattgcgccaagcacgactacagcaactacccctacttcgactactggggccagggcacactggtcacagtttctagcacgcgtctgtgggtgtcccagccacctgaaattcggacactggaaggctcctccgcctttctgccctgtagctttaacgccagccaggggagactcgccatcggctctgtgacatggttccgggatgaagtcgtccctggaaaagaagttcgcaacggaacaccagagttcagaggcagactcgccccactggcaagctccagattcctgcatgaccatcaggctgaactgcacattagggacgtgcggggccacgatgcctccatctatgtgtgtcgggtcgaagtgcttggactcggcgtcggaactggaaacggcactaggctggtggtcgagaaagaacatccacagcttggcgctggcaccgtcctgttgcttagagccggattctatgccgtcagcttcctgtccgtggctgtggggtctacagtgtattaccagggaaaatgtctcacctggaaaggccccagacgccagcttccagctgttgttcctgctccactgccaccaccttgtggctcctctgctcacttgcttccaccagtgcctggcggacgcgccaagagaagcggatctggcgtgaagcagaccctgaatttcgacctgctgaagctggctggcgacgtggaatccaacccaggcccttctagaggccatatgaccgagtacaagcccacggtgcgcctcgccacccgcgacgacgtccccagggccgtacgcaccctcgccgccgcgttcgccgactaccccgccacgcgccacaccgtcgatccggaccgccacatcgagcgggtcaccgagctgcaagaactcttcctcacgcgcgtcgggctcgacatcggcaaggtgtgggtcgcggacgacggcgccgcggtggcggtctggaccacgccggagagcgtcgaagcgggggcggtgttcgccgagatcggcccgcgcatggccgagttgagcggttcccggctggccgcgcagcaacagatggaaggcctcctggcgccgcaccggcccaaggagcccgcgtggttcctggccaccgtcggcgtctcgcccgaccaccagggcaagggtctgggcagcgccgtcgtgctccccggagtggaggcggccgagcgcgccggggtgcccgccttcctggagacctccgcgccccgcaacctccccttctacgagcggctcggcttcaccgtcaccgccgacgtcgaggtgcccgaaggaccgcgcacctggtgcatgacccgcaagcccggtgcctga

SEQ ID NO: 20042 - DNA, 1074 bp, synthetic construct
  source 1..1074: mol_type = other DNA
atggccttaccagtgaccgccttgctcctgccgctggccttgctgctccacgccgccaggccggaaatcgtgctgacacagagccccggcacactgtctcttagccctggcgaaagagccacactgagctgtagagccagccagagcatcagaagcagctacctggcctggtatcagcagaagcctggacaggcaccccggctgttgatctacggtgcttctagcagagccacaggcatccccgatagattttctggcagcggctccggcaccgacttcaccctgacaatcagcagactggaacccgaggactttgccgtgtattactgccagcagtacggcgacctgcctttcacatttggccctggcaccaagctggaaatcaagggcggaggcggaagtggaggcggaggatctggcggcggaggctctgaggttcagctgctggaatctggcggaggaatggttcagcctggcggctctctgagactgtcttgtgccgccagcggcttcacctttagcagctacgccatgagctgggtccgacaggctcctggcaaaggactggaatgggtgtccgccatctctggctctggcggcagaaccttttacgccgatagcgtggaaggccggttcaccatcagccgggacaacagcaagaacaccctgtacctccagatgaacagcctgagagccgaggacaccgccgtgtactattgcgccaagcacgactacagcaactacccctacttcgactactggggccagggcacactggtcacagtttctagcacgcgtaaaattgaagttatgtatcctcctccttacctagacaatgagaagagcaatggaaccattatccatgtgaaaggggcgcgtatcacccagggcctggccgtgtctaccatcagcagctttttcccacccggctaccaggtgtccttctgcctcgtgatggtgctgctgttcgccgtggacaccggcctgtacttcagcgtgaaaacaaacatccggtccagcaccagagactggaaggaccacaagttcaagtggcggaaggacccccaggacaag

SEQ ID NO: 20043 - DNA, 1074 bp, synthetic construct
  source 1..1074: mol_type = other DNA
atggccttaccagtgaccgccttgctcctgccgctggccttgctgctccacgccgccaggccggaaatcgtgctgacacagagccccggcacactgtctcttagccctggcgaaagagccacactgagctgtagagccagccagagcatcagaagcagctacctggcctggtatcagcagaagcctggacaggcaccccggctgttgatctacggtgcttctagcagagccacaggcatccccgatagattttctggcagcggctccggcaccgacttcaccctgacaatcagcagactggaacccgaggactttgccgtgtattactgccagcagtacggcgacctgcctttcacatttggccctggcaccaagctggaaatcaagggcggaggcggaagtggaggcggaggatctggcggcggaggctctgaggttcagctgctggaatctggcggaggaatggttcagcctggcggctctctgagactgtcttgtgccgccagcggcttcacctttagcagctacgccatgagctgggtccgacaggctcctggcaaaggactggaatgggtgtccgccatctctggctctggcggcagaaccttttacgccgatagcgtggaaggccggttcaccatcagccgggacaacagcaagaacaccctgtacctccagatgaacagcctgagagccgaggacaccgccgtgtactattgcgccaagcacgactacagcaactacccctacttcgactactggggccagggcacactggtcacagtttctagcacgcgtaaaattgaagttatgtatcctcctccttacctagacaatgagaagagcaatggaaccattatccatgtgaaaggggcgcgtattacccaaggactggctgtgcctacaatctctagcttctttccgcctggataccaagtctccttctgtcttgtgatggtcctcctgtttgctgtggacacaggactgtacttttccgtgaaaacgaacatccgcagctccacacgcgattggaaagatcacaagtttaaatggcgcaaagatccccaggacaag

SEQ ID NO: 20044 - DNA, 1011 bp, synthetic construct
  source 1..1011: mol_type = other DNA
atggccttaccagtgaccgccttgctcctgccgctggccttgctgctccacgccgccaggccggaaatcgtgctgacacagagccccggcacactgtctcttagccctggcgaaagagccacactgagctgtagagccagccagagcatcagaagcagctacctggcctggtatcagcagaagcctggacaggcaccccggctgttgatctacggtgcttctagcagagccacaggcatccccgatagattttctggcagcggctccggcaccgacttcaccctgacaatcagcagactggaacccgaggactttgccgtgtattactgccagcagtacggcgacctgcctttcacatttggccctggcaccaagctggaaatcaagggcggaggcggaagtggaggcggaggatctggcggcggaggctctgaggttcagctgctggaatctggcggaggaatggttcagcctggcggctctctgagactgtcttgtgccgccagcggcttcacctttagcagctacgccatgagctgggtccgacaggctcctggcaaaggactggaatgggtgtccgccatctctggctctggcggcagaaccttttacgccgatagcgtggaaggccggttcaccatcagccgggacaacagcaagaacaccctgtacctccagatgaacagcctgagagccgaggacaccgccgtgtactattgcgccaagcacgactacagcaactacccctacttcgactactggggccagggcacactggtcacagtttctagcacgcgtaaaattgaagttatgtatcctcctccttacctagacaatgagaagagcaatggaaccattatccatgtgaaaggggcgcgtattacccaaggactggctgtgtctacaatctctagcttctctccgcctggataccaagtctccttctgtcttgtgatggtcctcctgtttgctgtggacacaggactgtacttttccgtgaaaacgaacatc

SEQ ID NO: 20045 - DNA, 1104 bp, synthetic construct
  source 1..1104: mol_type = other DNA
atggccttaccagtgaccgccttgctcctgccgctggccttgctgctccacgccgccaggccggaaatcgtgctgacacagagccccggcacactgtctcttagccctggcgaaagagccacactgagctgtagagccagccagagcatcagaagcagctacctggcctggtatcagcagaagcctggacaggcaccccggctgttgatctacggtgcttctagcagagccacaggcatccccgatagattttctggcagcggctccggcaccgacttcaccctgacaatcagcagactggaacccgaggactttgccgtgtattactgccagcagtacggcgacctgcctttcacatttggccctggcaccaagctggaaatcaagggcggaggcggaagtggaggcggaggatctggcggcggaggctctgaggttcagctgctggaatctggcggaggaatggttcagcctggcggctctctgagactgtcttgtgccgccagcggcttcacctttagcagctacgccatgagctgggtccgacaggctcctggcaaaggactggaatgggtgtccgccatctctggctctggcggcagaaccttttacgccgatagcgtggaaggccggttcaccatcagccgggacaacagcaagaacaccctgtacctccagatgaacagcctgagagccgaggacaccgccgtgtactattgcgccaagcacgactacagcaactacccctacttcgactactggggccagggcacactggtcacagtttctagcacgcgtaaaattgaagttatgtatcctcctccttacctagacaatgagaagagcaatggaaccattatccatgtgaaaggggcgcgtgtcgagaaagaacatccacagcttggcgctggcaccgtcctgttgcttagagccggattctatgccgtcagcttcctgtccgtggctgtggggtctacagtgtattaccagggaaaatgtctcacctggaaaggccccagacgccagcttccagctgttgttcctgctccactgccaccaccttgtggctcctctgctcacttgcttccaccagtgcctggcgga

SEQ ID NO: 20046 - DNA, 1347 bp, synthetic construct
  source 1..1347: mol_type = other DNA
atggccttaccagtgaccgccttgctcctgccgctggccttgctgctccacgccgccaggccggaaatcgtgctgacacagagccccggcacactgtctcttagccctggcgaaagagccacactgagctgtagagccagccagagcatcagaagcagctacctggcctggtatcagcagaagcctggacaggcaccccggctgttgatctacggtgcttctagcagagccacaggcatccccgatagattttctggcagcggctccggcaccgacttcaccctgacaatcagcagactggaacccgaggactttgccgtgtattactgccagcagtacggcgacctgcctttcacatttggccctggcaccaagctggaaatcaagggcggaggcggaagtggaggcggaggatctggcggcggaggctctgaggttcagctgctggaatctggcggaggaatggttcagcctggcggctctctgagactgtcttgtgccgccagcggcttcacctttagcagctacgccatgagctgggtccgacaggctcctggcaaaggactggaatgggtgtccgccatctctggctctggcggcagaaccttttacgccgatagcgtggaaggccggttcaccatcagccgggacaacagcaagaacaccctgtacctccagatgaacagcctgagagccgaggacaccgccgtgtactattgcgccaagcacgactacagcaactacccctacttcgactactggggccagggcacactggtcacagtttctagcacgcgtaaaattgaagttatgtatcctcctccttacctagacaatgagaagagcaatggaaccattatccatgtgaaaggggcgcgtaagtctgtgcgcttttacctggtcgtcagccctgccagtgcctccactcagacatcttggaccccaagggaccttgtgtcctctcagacacagacacagtcctgcgtgccaccaactgctggcgcaagacaggctccagagtctcccagcacaatccccgtcccttctcagccccagaactccacacttaggccaggaccagctgctccaatcgcactggtcccagtgttctgcggactgctggttgccaagtctctggtgctgagcgcactcctcgtttggtggggcgatatttggtggaaaacgatgatggaattgagatccctcgatacgcagaaagccacatgccaccttcagcaagtcacagacttgccttggaccagcgtcagctctcccgtggaacgggaaattctgtatcatacagtggcccgcaccaagatttccgacgatgacgacgagcacacactg

SEQ ID NO: 20047 - DNA, 1158 bp, synthetic construct
  source 1..1158: mol_type = other DNA
atggccttaccagtgaccgccttgctcctgccgctggccttgctgctccacgccgccaggccggaaatcgtgctgacacagagccccggcacactgtctcttagccctggcgaaagagccacactgagctgtagagccagccagagcatcagaagcagctacctggcctggtatcagcagaagcctggacaggcaccccggctgttgatctacggtgcttctagcagagccacaggcatccccgatagattttctggcagcggctccggcaccgacttcaccctgacaatcagcagactggaacccgaggactttgccgtgtattactgccagcagtacggcgacctgcctttcacatttggccctggcaccaagctggaaatcaagggcggaggcggaagtggaggcggaggatctggcggcggaggctctgaggttcagctgctggaatctggcggaggaatggttcagcctggcggctctctgagactgtcttgtgccgccagcggcttcacctttagcagctacgccatgagctgggtccgacaggctcctggcaaaggactggaatgggtgtccgccatctctggctctggcggcagaaccttttacgccgatagcgtggaaggccggttcaccatcagccgggacaacagcaagaacaccctgtacctccagatgaacagcctgagagccgaggacaccgccgtgtactattgcgccaagcacgactacagcaactacccctacttcgactactggggccagggcacactggtcacagtttctagcacgcgtaaaattgaagttatgtatcctcctccttacctagacaatgagaagagcaatggaaccattatccatgtgaaaggggcgcgtggcgatattgagaatacctctctggccccagaagatcctacattccccgccgacacatggggaacatatctgctgacaaccgaaaccgggctgcaaaaggaccatgctctgtgggatcataccgctcagaatctgcttcggatggggcttgcattcctggtcctggtggctcttgtctggtttctggtcgaggactggctgtcccggaagagaaccagagaaagagcttccagggccagcacctgggaaggcagacgcagactgaatactcagaccctg

SEQ ID NO: 20048 - DNA, 2949 bp, synthetic construct
  source 1..2949: mol_type = other DNA
atggccttaccagtgaccgccttgctcctgccgctggccttgctgctccacgccgccaggccggaaatcgtgctgacacagagccccggcacactgtctcttagccctggcgaaagagccacactgagctgtagagccagccagagcatcagaagcagctacctggcctggtatcagcagaagcctggacaggcaccccggctgttgatctacggtgcttctagcagagccacaggcatccccgatagattttctggcagcggctccggcaccgacttcaccctgacaatcagcagactggaacccgaggactttgccgtgtattactgccagcagtacggcgacctgcctttcacatttggccctggcaccaagctggaaatcaagctcgagggacagcctaaggccaatcctaccgtgacactgttccctccaagcagcgaagaactccaggccaacaaggccacacttgtgtgcctgatctccgacttctaccctggggctgtgacagtggcttggaaggccgatggatctcctgtgaaagccggcgtggaaaccaccaagccatccaagcagagcaacaacaaatacgccgccagctcctacctgagcctgacacctgagcagtggaagtcccacagatcctacagctgccaagtgacccacgaaggcagcaccgtggaaaagacagtggcccctacagagtgcagcggatcccagagcttcggcctgctggaccccaagctgtgctacctgctggatggcatcctgttcatctacggcgtgatcctgaccgccctgttcctgagagtgaagttcagcagaagcgccgacgcccctgcctaccagcagggacagaaccaactgtacaacgagctgaacctgggcagacgggaagagtacgacgtgctggacaagcggagaggcagggaccctgagatgggcggaaagccccagcggagaaagaacccccaggaaggactgtataacgaactccagaaagacaagatggccgaagcctacagcgagatcggcatgaagggcgagcggagaagaggcaagggccacgatggcctgtaccagggcctgagcaccgccaccaaggacacctatgacgccctgcacatgcaggccctgcctccaagaagggccaagcgatctggatctggagcaacaaacttctcactactcaaacaagcaggtgacgtggaggagaatcccgggcctactagtatggactggatttggcgcatccttttccttgtcggcgctgctaccggcgcgcattccttcgaagaggttcagctgctggaatctggcggaggaatggttcagcctggcggctctctgagactgtcttgtgccgccagcggcttcacctttagcagctacgccatgagctgggtccgacaggctcctggcaaaggactggaatgggtgtccgccatctctggctctggcggcagaaccttttacgccgatagcgtggaaggccggttcaccatcagccgggacaacagcaagaacaccctgtacctccagatgaacagcctgagagccgaggacaccgccgtgtactattgcgccaagcacgactacagcaactacccctacttcgactactggggccagggcacactggtcacagtttctagcacgcgtgcctctacaaagggaccctccgtgtttcctctggctcccagcagcaagtctacaagcggaggaacagccgctctgggctgcctggtcaaggattactttcccgagcctgtgaccgtgtcctggaatagcggagcactgacaagcggcgtgcacacctttccagccgtgctgcaaagcagcggcctgtactctctgagcagcgtggtcacagtgcctagctctagcctgggcacccagacctacatctgcaatgtgaaccacaagcctagcaacaccaaggtggacaagagagtggaacccaagagctgtggtaccggcgacatcgagaacaccagtctggcccctgaggaccctacctttcctgccgatacctggggcacctacctgctgaccacagagacaggactccagaaagatcacgccctgtgggaccacacagcccagaacctgctgagaatgggcctcgcctttctggtgctggttgccctcgtgtggttcctggtggaagattggctgagccggaagcggacaagagagagagccagcagagcctctacctgggagggaagaagaaggctgaacacccagacacttagggccaagcgatctggatctggagcaacaaacttctcactactcaaacaagcaggtgacgtggaggagaatcccgggccttctagaggccatatgaccgagtacaagcccacggtgcgcctcgccacccgcgacgacgtccccagggccgtacgcaccctcgccgccgcgttcgccgactaccccgccacgcgccacaccgtcgatccggaccgccacatcgagcgggtcaccgagctgcaagaactcttcctcacgcgcgtcgggctcgacatcggcaaggtgtgggtcgcggacgacggcgccgcggtggcggtctggaccacgccggagagcgtcgaagcgggggcggtgttcgccgagatcggcccgcgcatggccgagttgagcggttcccggctggccgcgcagcaacagatggaaggcctcctggcgccgcaccggcccaaggagcccgcgtggttcctggccaccgtcggcgtctcgcccgaccaccagggcaagggtctgggcagcgccgtcgtgctccccggagtggaggcggccgagcgcgccggggtgcccgccttcctggagacctccgcgccccgcaacctccccttctacgagcggctcggcttcaccgtcaccgccgacgtcgaggtgcccgaaggaccgcgcacctggtgcatgacccgcaagcccggtgcctga

SEQ ID NO: 20049 - DNA, 3147 bp, synthetic construct
  source 1..3147: mol_type = other DNA
atggccttaccagtgaccgccttgctcctgccgctggccttgctgctccacgccgccaggccggaaatcgtgctgacacagagccccggcacactgtctcttagccctggcgaaagagccacactgagctgtagagccagccagagcatcagaagcagctacctggcctggtatcagcagaagcctggacaggcaccccggctgttgatctacggtgcttctagcagagccacaggcatccccgatagattttctggcagcggctccggcaccgacttcaccctgacaatcagcagactggaacccgaggactttgccgtgtattactgccagcagtacggcgacctgcctttcacatttggccctggcaccaagctggaaatcaagctcgagggacagcctaaggccaatcctaccgtgacactgttccctccaagcagcgaagaactccaggccaacaaggccacacttgtgtgcctgatctccgacttctaccctggggctgtgacagtggcttggaaggccgatggatctcctgtgaaagccggcgtggaaaccaccaagccatccaagcagagcaacaacaaatacgccgccagctcctacctgagcctgacacctgagcagtggaagtcccacagatcctacagctgccaagtgacccacgaaggcagcaccgtggaaaagacagtggcccctacagagtgcagcggatcccagagcttcggcctgctggaccccaagctgtgctacctgctggatggcatcctgttcatctacggcgtgatcctgaccgccctgttcctgagagtgaagttcagcagaagcgccgacgcccctgcctaccagcagggacagaaccaactgtacaacgagctgaacctgggcagacgggaagagtacgacgtgctggacaagcggagaggcagggaccctgagatgggcggaaagccccagcggagaaagaacccccaggaaggactgtataacgaactccagaaagacaagatggccgaagcctacagcgagatcggcatgaagggcgagcggagaagaggcaagggccacgatggcctgtaccagggcctgagcaccgccaccaaggacacctatgacgccctgcacatgcaggccctgcctccaagaagggccaagcgatctggatctggagcaacaaacttctcactactcaaacaagcaggtgacgtggaggagaatcccgggcctactagtatggactggatttggcgcatccttttccttgtcggcgctgctaccggcgcgcattccttcgaagaggttcagctgctggaatctggcggaggaatggttcagcctggcggctctctgagactgtcttgtgccgccagcggcttcacctttagcagctacgccatgagctgggtccgacaggctcctggcaaaggactggaatgggtgtccgccatctctggctctggcggcagaaccttttacgccgatagcgtggaaggccggttcaccatcagccgggacaacagcaagaacaccctgtacctccagatgaacagcctgagagccgaggacaccgccgtgtactattgcgccaagcacgactacagcaactacccctacttcgactactggggccagggcacactggtcacagtttctagcacgcgtgcctctacaaagggaccctccgtgtttcctctggctcccagcagcaagtctacaagcggaggaacagccgctctgggctgcctggtcaaggattactttcccgagcctgtgaccgtgtcctggaatagcggagcactgacaagcggcgtgcacacctttccagccgtgctgcaaagcagcggcctgtactctctgagcagcgtggtcacagtgcctagctctagcctgggcacccagacctacatctgcaatgtgaaccacaagcctagcaacaccaaggtggacaagagagtggaacccaagagctgtggtaccaagtctgtgcgcttttacctggtcgtcagccctgccagtgcctccactcagacatcttggaccccaagggaccttgtgtcctctcagacacagacacagtcctgcgtgccaccaactgctggcgcaagacaggctccagagtctcccagcacaatccccgtcccttctcagccccagaactccacacttaggccaggaccagctgctccaatcgcactggtcccagtgttctgcggactgctggttgccaagtctctggtgctgagcgcactcctcgtttggtggggcgatatttggtggaaaacgatgatggaattgagatccctcgatacgcagaaagccacatgccaccttcagcaagtcacagacttgccttggaccagcgtcagctctcccgtggaacgggaaattctgtatcatacagtggcccgcaccaagatttccgacgatgacgacgagcacacactgcgcgccaagagaagcggatctggcgtgaagcagaccctgaatttcgacctgctgaagctggctggcgacgtggaatccaacccaggcccttctagaggccatatgaccgagtacaagcccacggtgcgcctcgccacccgcgacgacgtccccagggccgtacgcaccctcgccgccgcgttcgccgactaccccgccacgcgccacaccgtcgatccggaccgccacatcgagcgggtcaccgagctgcaagaactcttcctcacgcgcgtcgggctcgacatcggcaaggtgtgggtcgcggacgacggcgccgcggtggcggtctggaccacgccggagagcgtcgaagcgggggcggtgttcgccgagatcggcccgcgcatggccgagttgagcggttcccggctggccgcgcagcaacagatggaaggcctcctggcgccgcaccggcccaaggagcccgcgtggttcctggccaccgtcggcgtctcgcccgaccaccagggcaagggtctgggcagcgccgtcgtgctccccggagtggaggcggccgagcgcgccggggtgcccgccttcctggagacctccgcgccccgcaacctccccttctacgagcggctcggcttcaccgtcaccgccgacgtcgaggtgcccgaaggaccgcgcacctggtgcatgacccgcaagcccggtgcctga

SEQ ID NO: 20050 - DNA, 2907 bp, synthetic construct
  source 1..2907: mol_type = other DNA
atggccttaccagtgaccgccttgctcctgccgctggccttgctgctccacgccgccaggccggaaatcgtgctgacacagagccccggcacactgtctcttagccctggcgaaagagccacactgagctgtagagccagccagagcatcagaagcagctacctggcctggtatcagcagaagcctggacaggcaccccggctgttgatctacggtgcttctagcagagccacaggcatccccgatagattttctggcagcggctccggcaccgacttcaccctgacaatcagcagactggaacccgaggactttgccgtgtattactgccagcagtacggcgacctgcctttcacatttggccctggcaccaagctggaaatcaagctcgagggacagcctaaggccaatcctaccgtgacactgttccctccaagcagcgaagaactccaggccaacaaggccacacttgtgtgcctgatctccgacttctaccctggggctgtgacagtggcttggaaggccgatggatctcctgtgaaagccggcgtggaaaccaccaagccatccaagcagagcaacaacaaatacgccgccagctcctacctgagcctgacacctgagcagtggaagtcccacagatcctacagctgccaagtgacccacgaaggcagcaccgtggaaaagacagtggcccctacagagtgcagcggatcccagagcttcggcctgctggaccccaagctgtgctacctgctggatggcatcctgttcatctacggcgtgatcctgaccgccctgttcctgagagtgaagttcagcagaagcgccgacgcccctgcctaccagcagggacagaaccaactgtacaacgagctgaacctgggcagacgggaagagtacgacgtgctggacaagcggagaggcagggaccctgagatgggcggaaagccccagcggagaaagaacccccaggaaggactgtataacgaactccagaaagacaagatggccgaagcctacagcgagatcggcatgaagggcgagcggagaagaggcaagggccacgatggcctgtaccagggcctgagcaccgccaccaaggacacctatgacgccctgcacatgcaggccctgcctccaagaagggccaagcgatctggatctggagcaacaaacttctcactactcaaacaagcaggtgacgtggaggagaatcccgggcctactagtatggactggatttggcgcatccttttccttgtcggcgctgctaccggcgcgcattccttcgaagaggttcagctgctggaatctggcggaggaatggttcagcctggcggctctctgagactgtcttgtgccgccagcggcttcacctttagcagctacgccatgagctgggtccgacaggctcctggcaaaggactggaatgggtgtccgccatctctggctctggcggcagaaccttttacgccgatagcgtggaaggccggttcaccatcagccgggacaacagcaagaacaccctgtacctccagatgaacagcctgagagccgaggacaccgccgtgtactattgcgccaagcacgactacagcaactacccctacttcgactactggggccagggcacactggtcacagtttctagcacgcgtgcctctacaaagggaccctccgtgtttcctctggctcccagcagcaagtctacaagcggaggaacagccgctctgggctgcctggtcaaggattactttcccgagcctgtgaccgtgtcctggaatagcggagcactgacaagcggcgtgcacacctttccagccgtgctgcaaagcagcggcctgtactctctgagcagcgtggtcacagtgcctagctctagcctgggcacccagacctacatctgcaatgtgaaccacaagcctagcaacaccaaggtggacaagagagtggaacccaagagctgtggtaccgtggtcgagaaagaacatccacagcttggcgctggcaccgtcctgttgcttagagccggattctatgccgtcagcttcctgtccgtggctgtggggtctacagtgtattaccagggaaaatgtctcacctggaaaggccccagacgccagcttccagctgttgttcctgctccactgccaccaccttgtggctcctctgctcacttgcttccaccagtgcctggcggacgcgccaagagaagcggatctggcgtgaagcagaccctgaatttcgacctgctgaagctggctggcgacgtggaatccaacccaggcccttctagaggccatatgaccgagtacaagcccacggtgcgcctcgccacccgcgacgacgtccccagggccgtacgcaccctcgccgccgcgttcgccgactaccccgccacgcgccacaccgtcgatccggaccgccacatcgagcgggtcaccgagctgcaagaactcttcctcacgcgcgtcgggctcgacatcggcaaggtgtgggtcgcggacgacggcgccgcggtggcggtctggaccacgccggagagcgtcgaagcgggggcggtgttcgccgagatcggcccgcgcatggccgagttgagcggttcccggctggccgcgcagcaacagatggaaggcctcctggcgccgcaccggcccaaggagcccgcgtggttcctggccaccgtcggcgtctcgcccgaccaccagggcaagggtctgggcagcgccgtcgtgctccccggagtggaggcggccgagcgcgccggggtgcccgccttcctggagacctccgcgccccgcaacctccccttctacgagcggctcggcttcaccgtcaccgccgacgtcgaggtgcccgaaggaccgcgcacctggtgcatgacccgcaagcccggtgcctga

SEQ ID NO: 20051 - DNA, 2994 bp, synthetic construct
  source 1..2994: mol_type = other DNA
atggccttaccagtgaccgccttgctcctgccgctggccttgctgctccacgccgccaggccggaaatcgtgctgacacagagccccggcacactgtctcttagccctggcgaaagagccacactgagctgtagagccagccagagcatcagaagcagctacctggcctggtatcagcagaagcctggacaggcaccccggctgttgatctacggtgcttctagcagagccacaggcatccccgatagattttctggcagcggctccggcaccgacttcaccctgacaatcagcagactggaacccgaggactttgccgtgtattactgccagcagtacggcgacctgcctttcacatttggccctggcaccaagctggaaatcaagctcgaggacctgaagaacgtgttcccacctgaggtggccgtgttcgagcctagcgaggccgagatcagccacacccagaaagccaccctcgtgtgcctggctaccggcttctaccccgaccatgtggaactgtcttggtgggtcaacggcaaagaggtgcacagcggcgtgtctaccgacccccagccactgaaagaacagcccgccctgaacgacagccggtactgcctgagcagcagactgagagtgtccgccaccttctggcagaacccccggaaccacttcagatgccaggtgcagttctacggcctgagcgagaacgacgagtggacccaggacagagccaagcccgtgacccagatcgtgtctgccgaagcctggggcagagccgattgcggatcccagagcttcggcctgctggaccccaagctgtgctacctgctggatggcatcctgttcatctacggcgtgatcctgaccgccctgttcctgagagtgaagttcagcagaagcgccgacgcccctgcctaccagcagggacagaaccaactgtacaacgagctgaacctgggcagacgggaagagtacgacgtgctggacaagcggagaggcagggaccctgagatgggcggaaagccccagcggagaaagaacccccaggaaggactgtataacgaactccagaaagacaagatggccgaagcctacagcgagatcggcatgaagggcgagcggagaagaggcaagggccacgatggcctgtaccagggcctgagcaccgccaccaaggacacctatgacgccctgcacatgcaggccctgcctccaagaagggccaagcgatctggatctggagcaacaaacttctcactactcaaacaagcaggtgacgtggaggagaatcccgggcctactagtatggactggatttggcgcatccttttccttgtcggcgctgctaccggcgcgcattccttcgaagaggttcagctgctggaatctggcggaggaatggttcagcctggcggctctctgagactgtcttgtgccgccagcggcttcacctttagcagctacgccatgagctgggtccgacaggctcctggcaaaggactggaatgggtgtccgccatctctggctctggcggcagaaccttttacgccgatagcgtggaaggccggttcaccatcagccgggacaacagcaagaacaccctgtacctccagatgaacagcctgagagccgaggacaccgccgtgtactattgcgccaagcacgactacagcaactacccctacttcgactactggggccagggcacactggtcacagtttctagcacgcgtatccagaaccctgatcctgccgtgtaccagctgcgggatagcaagagcagcgacaagagcgtgtgtctgttcaccgacttcgacagccagaccaacgtgtcccagagcaaggactccgacgtgtacatcaccgataagaccgtgctggacatgcggagcatggacttcaagagcaactccgccgtggcctggtccaacaagtccgatttcgcctgcgccaacgccttcaacaacagcattatccccgaggacacattcttcccaagccccgagagcagctgcggtaccggcgacatcgagaacaccagtctggcccctgaggaccctacctttcctgccgatacctggggcacctacctgctgaccacagagacaggactccagaaagatcacgccctgtgggaccacacagcccagaacctgctgagaatgggcctcgcctttctggtgctggttgccctcgtgtggttcctggtggaagattggctgagccggaagcggacaagagagagagccagcagagcctctacctgggagggaagaagaaggctgaacacccagacacttagggccaagcgatctggatctggagcaacaaacttctcactactcaaacaagcaggtgacgtggaggagaatcccgggccttctagaggccatatgaccgagtacaagcccacggtgcgcctcgccacccgcgacgacgtccccagggccgtacgcaccctcgccgccgcgttcgccgactaccccgccacgcgccacaccgtcgatccggaccgccacatcgagcgggtcaccgagctgcaagaactcttcctcacgcgcgtcgggctcgacatcggcaaggtgtgggtcgcggacgacggcgccgcggtggcggtctggaccacgccggagagcgtcgaagcgggggcggtgttcgccgagatcggcccgcgcatggccgagttgagcggttcccggctggccgcgcagcaacagatggaaggcctcctggcgccgcaccggcccaaggagcccgcgtggttcctggccaccgtcggcgtctcgcccgaccaccagggcaagggtctgggcagcgccgtcgtgctccccggagtggaggcggccgagcgcgccggggtgcccgccttcctggagacctccgcgccccgcaacctccccttctacgagcggctcggcttcaccgtcaccgccgacgtcgaggtgcccgaaggaccgcgcacctggtgcatgacccgcaagcccggtgcctga

SEQ ID NO: 20052 - DNA, 3192 bp, synthetic construct
  source 1..3192: mol_type = other DNA
atggccttaccagtgaccgccttgctcctgccgctggccttgctgctccacgccgccaggccggaaatcgtgctgacacagagccccggcacactgtctcttagccctggcgaaagagccacactgagctgtagagccagccagagcatcagaagcagctacctggcctggtatcagcagaagcctggacaggcaccccggctgttgatctacggtgcttctagcagagccacaggcatccccgatagattttctggcagcggctccggcaccgacttcaccctgacaatcagcagactggaacccgaggactttgccgtgtattactgccagcagtacggcgacctgcctttcacatttggccctggcaccaagctggaaatcaagctcgaggacctgaagaacgtgttcccacctgaggtggccgtgttcgagcctagcgaggccgagatcagccacacccagaaagccaccctcgtgtgcctggctaccggcttctaccccgaccatgtggaactgtcttggtgggtcaacggcaaagaggtgcacagcggcgtgtctaccgacccccagccactgaaagaacagcccgccctgaacgacagccggtactgcctgagcagcagactgagagtgtccgccaccttctggcagaacccccggaaccacttcagatgccaggtgcagttctacggcctgagcgagaacgacgagtggacccaggacagagccaagcccgtgacccagatcgtgtctgccgaagcctggggcagagccgattgcggatcccagagcttcggcctgctggaccccaagctgtgctacctgctggatggcatcctgttcatctacggcgtgatcctgaccgccctgttcctgagagtgaagttcagcagaagcgccgacgcccctgcctaccagcagggacagaaccaactgtacaacgagctgaacctgggcagacgggaagagtacgacgtgctggacaagcggagaggcagggaccctgagatgggcggaaagccccagcggagaaagaacccccaggaaggactgtataacgaactccagaaagacaagatggccgaagcctacagcgagatcggcatgaagggcgagcggagaagaggcaagggccacgatggcctgtaccagggcctgagcaccgccaccaaggacacctatgacgccctgcacatgcaggccctgcctccaagaagggccaagcgatctggatctggagcaacaaacttctcactactcaaacaagcaggtgacgtggaggagaatcccgggcctactagtatggactggatttggcgcatccttttccttgtcggcgctgctaccggcgcgcattccttcgaagaggttcagctgctggaatctggcggaggaatggttcagcctggcggctctctgagactgtcttgtgccgccagcggcttcacctttagcagctacgccatgagctgggtccgacaggctcctggcaaaggactggaatgggtgtccgccatctctggctctggcggcagaaccttttacgccgatagcgtggaaggccggttcaccatcagccgggacaacagcaagaacaccctgtacctccagatgaacagcctgagagccgaggacaccgccgtgtactattgcgccaagcacgactacagcaactacccctacttcgactactggggccagggcacactggtcacagtttctagcacgcgtatccagaaccctgatcctgccgtgtaccagctgcgggatagcaagagcagcgacaagagcgtgtgtctgttcaccgacttcgacagccagaccaacgtgtcccagagcaaggactccgacgtgtacatcaccgataagaccgtgctggacatgcggagcatggacttcaagagcaactccgccgtggcctggtccaacaagtccgatttcgcctgcgccaacgccttcaacaacagcattatccccgaggacacattcttcccaagccccgagagcagctgcggtaccaagtctgtgcgcttttacctggtcgtcagccctgccagtgcctccactcagacatcttggaccccaagggaccttgtgtcctctcagacacagacacagtcctgcgtgccaccaactgctggcgcaagacaggctccagagtctcccagcacaatccccgtcccttctcagccccagaactccacacttaggccaggaccagctgctccaatcgcactggtcccagtgttctgcggactgctggttgccaagtctctggtgctgagcgcactcctcgtttggtggggcgatatttggtggaaaacgatgatggaattgagatccctcgatacgcagaaagccacatgccaccttcagcaagtcacagacttgccttggaccagcgtcagctctcccgtggaacgggaaattctgtatcatacagtggcccgcaccaagatttccgacgatgacgacgagcacacactgcgcgccaagagaagcggatctggcgtgaagcagaccctgaatttcgacctgctgaagctggctggcgacgtggaatccaacccaggcccttctagaggccatatgaccgagtacaagcccacggtgcgcctcgccacccgcgacgacgtccccagggccgtacgcaccctcgccgccgcgttcgccgactaccccgccacgcgccacaccgtcgatccggaccgccacatcgagcgggtcaccgagctgcaagaactcttcctcacgcgcgtcgggctcgacatcggcaaggtgtgggtcgcggacgacggcgccgcggtggcggtctggaccacgccggagagcgtcgaagcgggggcggtgttcgccgagatcggcccgcgcatggccgagttgagcggttcccggctggccgcgcagcaacagatggaaggcctcctggcgccgcaccggcccaaggagcccgcgtggttcctggccaccgtcggcgtctcgcccgaccaccagggcaagggtctgggcagcgccgtcgtgctccccggagtggaggcggccgagcgcgccggggtgcccgccttcctggagacctccgcgccccgcaacctccccttctacgagcggctcggcttcaccgtcaccgccgacgtcgaggtgcccgaaggaccgcgcacctggtgcatgacccgcaagcccggtgcctga

SEQ ID NO: 20053 - DNA, 2952 bp, synthetic construct
  source 1..2952: mol_type = other DNA
atggccttaccagtgaccgccttgctcctgccgctggccttgctgctccacgccgccaggccggaaatcgtgctgacacagagccccggcacactgtctcttagccctggcgaaagagccacactgagctgtagagccagccagagcatcagaagcagctacctggcctggtatcagcagaagcctggacaggcaccccggctgttgatctacggtgcttctagcagagccacaggcatccccgatagattttctggcagcggctccggcaccgacttcaccctgacaatcagcagactggaacccgaggactttgccgtgtattactgccagcagtacggcgacctgcctttcacatttggccctggcaccaagctggaaatcaagctcgaggacctgaagaacgtgttcccacctgaggtggccgtgttcgagcctagcgaggccgagatcagccacacccagaaagccaccctcgtgtgcctggctaccggcttctaccccgaccatgtggaactgtcttggtgggtcaacggcaaagaggtgcacagcggcgtgtctaccgacccccagccactgaaagaacagcccgccctgaacgacagccggtactgcctgagcagcagactgagagtgtccgccaccttctggcagaacccccggaaccacttcagatgccaggtgcagttctacggcctgagcgagaacgacgagtggacccaggacagagccaagcccgtgacccagatcgtgtctgccgaagcctggggcagagccgattgcggatcccagagcttcggcctgctggaccccaagctgtgctacctgctggatggcatcctgttcatctacggcgtgatcctgaccgccctgttcctgagagtgaagttcagcagaagcgccgacgcccctgcctaccagcagggacagaaccaactgtacaacgagctgaacctgggcagacgggaagagtacgacgtgctggacaagcggagaggcagggaccctgagatgggcggaaagccccagcggagaaagaacccccaggaaggactgtataacgaactccagaaagacaagatggccgaagcctacagcgagatcggcatgaagggcgagcggagaagaggcaagggccacgatggcctgtaccagggcctgagcaccgccaccaaggacacctatgacgccctgcacatgcaggccctgcctccaagaagggccaagcgatctggatctggagcaacaaacttctcactactcaaacaagcaggtgacgtggaggagaatcccgggcctactagtatggactggatttggcgcatccttttccttgtcggcgctgctaccggcgcgcattccttcgaagaggttcagctgctggaatctggcggaggaatggttcagcctggcggctctctgagactgtcttgtgccgccagcggcttcacctttagcagctacgccatgagctgggtccgacaggctcctggcaaaggactggaatgggtgtccgccatctctggctctggcggcagaaccttttacgccgatagcgtggaaggccggttcaccatcagccgggacaacagcaagaacaccctgtacctccagatgaacagcctgagagccgaggacaccgccgtgtactattgcgccaagcacgactacagcaactacccctacttcgactactggggccagggcacactggtcacagtttctagcacgcgtatccagaaccctgatcctgccgtgtaccagctgcgggatagcaagagcagcgacaagagcgtgtgtctgttcaccgacttcgacagccagaccaacgtgtcccagagcaaggactccgacgtgtacatcaccgataagaccgtgctggacatgcggagcatggacttcaagagcaactccgccgtggcctggtccaacaagtccgatttcgcctgcgccaacgccttcaacaacagcattatccccgaggacacattcttcccaagccccgagagcagctgcggtaccgtggtcgagaaagaacatccacagcttggcgctggcaccgtcctgttgcttagagccggattctatgccgtcagcttcctgtccgtggctgtggggtctacagtgtattaccagggaaaatgtctcacctggaaaggccccagacgccagcttccagctgttgttcctgctccactgccaccaccttgtggctcctctgctcacttgcttccaccagtgcctggcggacgcgccaagagaagcggatctggcgtgaagcagaccctgaatttcgacctgctgaagctggctggcgacgtggaatccaacccaggcccttctagaggccatatgaccgagtacaagcccacggtgcgcctcgccacccgcgacgacgtccccagggccgtacgcaccctcgccgccgcgttcgccgactaccccgccacgcgccacaccgtcgatccggaccgccacatcgagcgggtcaccgagctgcaagaactcttcctcacgcgcgtcgggctcgacatcggcaaggtgtgggtcgcggacgacggcgccgcggtggcggtctggaccacgccggagagcgtcgaagcgggggcggtgttcgccgagatcggcccgcgcatggccgagttgagcggttcccggctggccgcgcagcaacagatggaaggcctcctggcgccgcaccggcccaaggagcccgcgtggttcctggccaccgtcggcgtctcgcccgaccaccagggcaagggtctgggcagcgccgtcgtgctccccggagtggaggcggccgagcgcgccggggtgcccgccttcctggagacctccgcgccccgcaacctccccttctacgagcggctcggcttcaccgtcaccgccgacgtcgaggtgcccgaaggaccgcgcacctggtgcatgacccgcaagcccggtgcctga

SEQ ID NO: 20054 - DNA, 2865 bp, synthetic construct
  source 1..2865: mol_type = other DNA
atggccttaccagtgaccgccttgctcctgccgctggccttgctgctccacgccgccaggccggaaatcgtgctgacacagagccccggcacactgtctcttagccctggcgaaagagccacactgagctgtagagccagccagagcatcagaagcagctacctggcctggtatcagcagaagcctggacaggcaccccggctgttgatctacggtgcttctagcagagccacaggcatccccgatagattttctggcagcggctccggcaccgacttcaccctgacaatcagcagactggaacccgaggactttgccgtgtattactgccagcagtacggcgacctgcctttcacatttggccctggcaccaagctggaaatcaagctcgagggacagcctaaggccaatcctaccgtgacactgttccctccaagcagcgaagaactccaggccaacaaggccacacttgtgtgcctgatctccgacttctaccctggggctgtgacagtggcttggaaggccgatggatctcctgtgaaagccggcgtggaaaccaccaagccatccaagcagagcaacaacaaatacgccgccagctcctacctgagcctgacacctgagcagtggaagtcccacagatcctacagctgccaagtgacccacgaaggcagcaccgtggaaaagacagtggcccctacagagtgcagcggatcccagagcttcggcctgctggaccccaagctgtgctacctgctggatggcatcctgttcatctacggcgtgatcctgaccgccctgttcctgagagtgaagttcagcagaagcgccgacgcccctgcctaccagcagggacagaaccaactgtacaacgagctgaacctgggcagacgggaagagtacgacgtgctggacaagcggagaggcagggaccctgagatgggcggaaagccccagcggagaaagaacccccaggaaggactgtataacgaactccagaaagacaagatggccgaagcctacagcgagatcggcatgaagggcgagcggagaagaggcaagggccacgatggcctgtaccagggcctgagcaccgccaccaaggacacctatgacgccctgcacatgcaggccctgcctccaagaagggccaagcgatctggatctggagcaacaaacttctcactactcaaacaagcaggtgacgtggaggagaatcccgggcctactagtatggactggatttggcgcatccttttccttgtcggcgctgctaccggcgcgcattccttcgaagaggttcagctgctggaatctggcggaggaatggttcagcctggcggctctctgagactgtcttgtgccgccagcggcttcacctttagcagctacgccatgagctgggtccgacaggctcctggcaaaggactggaatgggtgtccgccatctctggctctggcggcagaaccttttacgccgatagcgtggaaggccggttcaccatcagccgggacaacagcaagaacaccctgtacctccagatgaacagcctgagagccgaggacaccgccgtgtactattgcgccaagcacgactacagcaactacccctacttcgactactggggccagggcacactggtcacagtttctagcacgcgtgcctctacaaagggaccctccgtgtttcctctggctcccagcagcaagtctacaagcggaggaacagccgctctgggctgcctggtcaaggattactttcccgagcctgtgaccgtgtcctggaatagcggagcactgacaagcggcgtgcacacctttccagccgtgctgcaaagcagcggcctgtactctctgagcagcgtggtcacagtgcctagctctagcctgggcacccagacctacatctgcaatgtgaaccacaagcctagcaacaccaaggtggacaagagagtggaacccaagagctgtggtaccatcactcaaggtttggcagtgtcaaccatctcatcattctttccacctggctaccaagtgtccttctgcctggtcatggtgctgctgttcgccgtggataccggcctgtacttcagcgtcaagaccaacatccggtccagcaccagagactggaaggaccacaagttcaagtggcggaaggaccctcaggacaagagggccaagcgatctggatctggagcaacaaacttctcactactcaaacaagcaggtgacgtggaggagaatcccgggccttctagaggccatatgaccgagtacaagcccacggtgcgcctcgccacccgcgacgacgtccccagggccgtacgcaccctcgccgccgcgttcgccgactaccccgccacgcgccacaccgtcgatccggaccgccacatcgagcgggtcaccgagctgcaagaactcttcctcacgcgcgtcgggctcgacatcggcaaggtgtgggtcgcggacgacggcgccgcggtggcggtctggaccacgccggagagcgtcgaagcgggggcggtgttcgccgagatcggcccgcgcatggccgagttgagcggttcccggctggccgcgcagcaacagatggaaggcctcctggcgccgcaccggcccaaggagcccgcgtggttcctggccaccgtcggcgtctcgcccgaccaccagggcaagggtctgggcagcgccgtcgtgctccccggagtggaggcggccgagcgcgccggggtgcccgccttcctggagacctccgcgccccgcaacctccccttctacgagcggctcggcttcaccgtcaccgccgacgtcgaggtgcccgaaggaccgcgcacctggtgcatgacccgcaagcccggtgcctga

SEQ ID NO: 20055 - DNA, 2910 bp, synthetic construct
  source 1..2910: mol_type = other DNA
atggccttaccagtgaccgccttgctcctgccgctggccttgctgctccacgccgccaggccggaaatcgtgctgacacagagccccggcacactgtctcttagccctggcgaaagagccacactgagctgtagagccagccagagcatcagaagcagctacctggcctggtatcagcagaagcctggacaggcaccccggctgttgatctacggtgcttctagcagagccacaggcatccccgatagattttctggcagcggctccggcaccgacttcaccctgacaatcagcagactggaacccgaggactttgccgtgtattactgccagcagtacggcgacctgcctttcacatttggccctggcaccaagctggaaatcaagctcgaggacctgaagaacgtgttcccacctgaggtggccgtgttcgagcctagcgaggccgagatcagccacacccagaaagccaccctcgtgtgcctggctaccggcttctaccccgaccatgtggaactgtcttggtgggtcaacggcaaagaggtgcacagcggcgtgtctaccgacccccagccactgaaagaacagcccgccctgaacgacagccggtactgcctgagcagcagactgagagtgtccgccaccttctggcagaacccccggaaccacttcagatgccaggtgcagttctacggcctgagcgagaacgacgagtggacccaggacagagccaagcccgtgacccagatcgtgtctgccgaagcctggggcagagccgattgcggatcccagagcttcggcctgctggaccccaagctgtgctacctgctggatggcatcctgttcatctacggcgtgatcctgaccgccctgttcctgagagtgaagttcagcagaagcgccgacgcccctgcctaccagcagggacagaaccaactgtacaacgagctgaacctgggcagacgggaagagtacgacgtgctggacaagcggagaggcagggaccctgagatgggcggaaagccccagcggagaaagaacccccaggaaggactgtataacgaactccagaaagacaagatggccgaagcctacagcgagatcggcatgaagggcgagcggagaagaggcaagggccacgatggcctgtaccagggcctgagcaccgccaccaaggacacctatgacgccctgcacatgcaggccctgcctccaagaagggccaagcgatctggatctggagcaacaaacttctcactactcaaacaagcaggtgacgtggaggagaatcccgggcctactagtatggactggatttggcgcatccttttccttgtcggcgctgctaccggcgcgcattccttcgaagaggttcagctgctggaatctggcggaggaatggttcagcctggcggctctctgagactgtcttgtgccgccagcggcttcacctttagcagctacgccatgagctgggtccgacaggctcctggcaaaggactggaatgggtgtccgccatctctggctctggcggcagaaccttttacgccgatagcgtggaaggccggttcaccatcagccgggacaacagcaagaacaccctgtacctccagatgaacagcctgagagccgaggacaccgccgtgtactattgcgccaagcacgactacagcaactacccctacttcgactactggggccagggcacactggtcacagtttctagcacgcgtatccagaaccctgatcctgccgtgtaccagctgcgggatagcaagagcagcgacaagagcgtgtgtctgttcaccgacttcgacagccagaccaacgtgtcccagagcaaggactccgacgtgtacatcaccgataagaccgtgctggacatgcggagcatggacttcaagagcaactccgccgtggcctggtccaacaagtccgatttcgcctgcgccaacgccttcaacaacagcattatccccgaggacacattcttcccaagccccgagagcagctgcggtaccatcactcaaggtttggcagtgtcaaccatctcatcattctttccacctggctaccaagtgtccttctgcctggtcatggtgctgctgttcgccgtggataccggcctgtacttcagcgtcaagaccaacatccggtccagcaccagagactggaaggaccacaagttcaagtggcggaaggaccctcaggacaagagggccaagcgatctggatctggagcaacaaacttctcactactcaaacaagcaggtgacgtggaggagaatcccgggccttctagaggccatatgaccgagtacaagcccacggtgcgcctcgccacccgcgacgacgtccccagggccgtacgcaccctcgccgccgcgttcgccgactaccccgccacgcgccacaccgtcgatccggaccgccacatcgagcgggtcaccgagctgcaagaactcttcctcacgcgcgtcgggctcgacatcggcaaggtgtgggtcgcggacgacggcgccgcggtggcggtctggaccacgccggagagcgtcgaagcgggggcggtgttcgccgagatcggcccgcgcatggccgagttgagcggttcccggctggccgcgcagcaacagatggaaggcctcctggcgccgcaccggcccaaggagcccgcgtggttcctggccaccgtcggcgtctcgcccgaccaccagggcaagggtctgggcagcgccgtcgtgctccccggagtggaggcggccgagcgcgccggggtgcccgccttcctggagacctccgcgccccgcaacctccccttctacgagcggctcggcttcaccgtcaccgccgacgtcgaggtgcccgaaggaccgcgcacctggtgcatgacccgcaagcccggtgcctga

SEQ ID NO: 20056 - DNA, 1959 bp, synthetic construct
  source 1..1959: mol_type = other DNA
atggccttaccagtgaccgccttgctcctgccgctggccttgctgctccacgccgccaggccggaaatcgtgctgacacagagccccggcacactgtctcttagccctggcgaaagagccacactgagctgtagagccagccagagcatcagaagcagctacctggcctggtatcagcagaagcctggacaggcaccccggctgttgatctacggtgcttctagcagagccacaggcatccccgatagattttctggcagcggctccggcaccgacttcaccctgacaatcagcagactggaacccgaggactttgccgtgtattactgccagcagtacggcgacctgcctttcacatttggccctggcaccaagctggaaatcaagctcgagggacagcctaaggccaatcctaccgtgacactgttccctccaagcagcgaagaactccaggccaacaaggccacacttgtgtgcctgatctccgacttctaccctggggctgtgacagtggcttggaaggccgatggatctcctgtgaaagccggcgtggaaaccaccaagccatccaagcagagcaacaacaaatacgccgccagctcctacctgagcctgacacctgagcagtggaagtcccacagatcctacagctgccaagtgacccacgaaggcagcaccgtggaaaagacagtggcccctacagagtgcagcggatccctgggagagcctcagctgtgctatatcctggacgccatcctgtttctgtacggcatcgtgctgaccctgctgtactgccggctgaagatccaagtgcggaaggccgccatcaccagctacgagaaatccgacggcgtgtacaccggcctgagcaccagaaatcaagagacatacgagacactgaagcacgaaaagcctccacaaagggccaagcgatctggatctggagcaacaaacttctcactactcaaacaagcaggtgacgtggaggagaatcccgggcctactagtatggactggatttggcgcatccttttccttgtcggcgctgctaccggcgcgcattccttcgaagaggttcagctgctggaatctggcggaggaatggttcagcctggcggctctctgagactgtcttgtgccgccagcggcttcacctttagcagctacgccatgagctgggtccgacaggctcctggcaaaggactggaatgggtgtccgccatctctggctctggcggcagaaccttttacgccgatagcgtggaaggccggttcaccatcagccgggacaacagcaagaacaccctgtacctccagatgaacagcctgagagccgaggacaccgccgtgtactattgcgccaagcacgactacagcaactacccctacttcgactactggggccagggcacactggtcacagtttctagcacgcgtgcctctacaaagggaccctccgtgtttcctctggctcccagcagcaagtctacaagcggaggaacagccgctctgggctgcctggtcaaggattactttcccgagcctgtgaccgtgtcctggaatagcggagcactgacaagcggcgtgcacacctttccagccgtgctgcaaagcagcggcctgtactctctgagcagcgtggtcacagtgcctagctctagcctgggcacccagacctacatctgcaatgtgaaccacaagcctagcaacaccaaggtggacaagagagtggaacccaagagctgtggtaccctcggagaaccacagctctgttacattctggatgctatcctgttcctctatgggatcgtcctgacactcctgtattgcagactcaaaattcaagttcgcaaagccgccattacctcttacgagaagagtgatggggtgtacacaggactgtctacccggaatcaagaaacctacgaaaccctcaaacatgagaagccacctcagtaa

SEQ ID NO: 20057 - DNA, 3090 bp, synthetic construct
  source 1..3090: mol_type = other DNA
atggccttaccagtgaccgccttgctcctgccgctggccttgctgctccacgccgccaggccggaaatcgtgctgacacagagccccggcacactgtctcttagccctggcgaaagagccacactgagctgtagagccagccagagcatcagaagcagctacctggcctggtatcagcagaagcctggacaggcaccccggctgttgatctacggtgcttctagcagagccacaggcatccccgatagattttctggcagcggctccggcaccgacttcaccctgacaatcagcagactggaacccgaggactttgccgtgtattactgccagcagtacggcgacctgcctttcacatttggccctggcaccaagctggaaatcaagggacagcctaaggccaatcctaccgtgacactgttccctccaagcagcgaagaactccaggccaacaaggccacacttgtgtgcctgatctccgacttctaccctggggctgtgacagtggcttggaaggccgatggatctcctgtgaaagccggcgtggaaaccaccaagccatccaagcagagcaacaacaaatacgccgccagctcctacctgagcctgacacctgagcagtggaagtcccacagatcctacagctgccaagtgacccacgaaggcagcaccgtggaaaagacagtggcccctacagagtgcagcggatcccagagcttcggcctgctggaccccaagctgtgctacctgctggatggcatcctgttcatctacggcgtgatcctgaccgccctgttcctgagagtgaagttcagcagaagcgccgacgcccctgcctaccagcagggacagaaccaactgtacaacgagctgaacctgggcagacgggaagagtacgacgtgctggacaagcggagaggcagggaccctgagatgggcggaaagccccggagaaagaacccccaggaaggactgtataacgaactccagaaagacaagatggccgaagcctacagcgagatcggcatgaagggcgagcggagaagaggcaagggccacgatggcctgtaccagggcctgagcaccgccaccaaggacacctatgacgccctgcacatgcaggccctgcctccaagaagggccaagcgatctggatctggagcaacaaacttctcactactcaaacaagcaggtgacgtggaggagaatcccgggcctactagtatggactggatttggcgcatccttttccttgtcggcgctgctaccggcgcgcattccttcgaagaggttcagctgctggaatctggcggaggaatggttcagcctggcggctctctgagactgtcttgtgccgccagcggcttcacctttagcagctacgccatgagctgggtccgacaggctcctggcaaaggactggaatgggtgtccgccatctctggctctggcggcagaaccttttacgccgatagcgtggaaggccggttcaccatcagccgggacaacagcaagaacaccctgtacctccagatgaacagcctgagagccgaggacaccgccgtgtactattgcgccaagcacgactacagcaactacccctacttcgactactggggccagggcacactggtcacagtttctagcgcctctacaaagggaccctccgtgtttcctctggctcccagcagcaagtctacaagcggaggaacagccgctctgggctgcctggtcaaggattactttcccgagcctgtgaccgtgtcctggaatagcggagcactgacaagcggcgtgcacacctttccagccgtgctgcaaagcagcggcctgtactctctgagcagcgtggtcacagtgcctagctctagcctgggcacccagacctacatctgcaatgtgaaccacaagcctagcaacaccaaggtggacaagagagtggaacccaagagctgtggtacccagagttttgggttgttggaccctaaattgtgctatctgttggacggaatcctgttcatttacggagtgatcctgaccgcattgttcctgcgggttaagttttccagatccgcagacgcacccgcttaccaacaagggcagaaccaactctacaatgaacttaatttggggcggagggaagagtacgacgttctggacaaaaggaggggacgagatcccgagatgggcggaaagcctcgaaggaagaatccgcaagaggggctttataacgaactccagaaagataaaatggcagaagcctatagtgagattgggatgaagggagaaaggaggaggggtaaaggtcacgatgggttgtaccaaggattgagcacagccactaaagatacctatgatgcgctccacatgcaggccctgccgccaagacgcgccaagagaagcggatctggcgtgaagcagaccctgaatttcgacctgctgaagctggctggcgacgtggaatccaacccaggcccttctagaggccatatgaccgagtacaagcccacggtgcgcctcgccacccgcgacgacgtccccagggccgtacgcaccctcgccgccgcgttcgccgactaccccgccacgcgccacaccgtcgatccggaccgccacatcgagcgggtcaccgagctgcaagaactcttcctcacgcgcgtcgggctcgacatcggcaaggtgtgggtcgcggacgacggcgccgcggtggcggtctggaccacgccggagagcgtcgaagcgggggcggtgttcgccgagatcggcccgcgcatggccgagttgagcggttcccggctggccgcgcagcaacagatggaaggcctcctggcgccgcaccggcccaaggagcccgcgtggttcctggccaccgtcggcgtctcgcccgaccaccagggcaagggtctgggcagcgccgtcgtgctccccggagtggaggcggccgagcgcgccggggtgcccgccttcctggagacctccgcgccccgcaacctccccttctacgagcggctcggcttcaccgtcaccgccgacgtcgaggtgcccgaaggaccgcgcacctggtgcatgacccgcaagcccggtgcctga

SEQ ID NO: 20058 - DNA, 2445 bp, synthetic construct
  source 1..2445: mol_type = other DNA
atggccttaccagtgaccgccttgctcctgccgctggccttgctgctccacgccgccaggccggaaatcgtgctgacacagagccccggcacactgtctcttagccctggcgaaagagccacactgagctgtagagccagccagagcatcagaagcagctacctggcctggtatcagcagaagcctggacaggcaccccggctgttgatctacggtgcttctagcagagccacaggcatccccgatagattttctggcagcggctccggcaccgacttcaccctgacaatcagcagactggaacccgaggactttgccgtgtattactgccagcagtacggcgacctgcctttcacatttggccctggcaccaagctggaaatcaagctcgaggacctgaagaacgtgttcccacctgaggtggccgtgttcgagcctagcgaggccgagatcagccacacccagaaagccaccctcgtgtgcctggctaccggcttctaccccgaccatgtggaactgtcttggtgggtcaacggcaaagaggtgcacagcggcgtgtctaccgacccccagccactgaaagaacagcccgccctgaacgacagccggtactgcctgagcagcagactgagagtgtccgccaccttctggcagaacccccggaaccacttcagatgccaggtgcagttctacggcctgagcgagaacgacgagtggacccaggacagagccaagcccgtgacccagatcgtgtctgccgaagcctggggcagagccgattgcggatcccagagcttcggcctgctggaccccaagctgtgctacctgctggatggcatcctgttcatctacggcgtgatcctgaccgccctgttcctgagagtgaagttcagcagaagcgccgacgcccctgcctaccagcagggacagaaccaactgtacaacgagctgaacctgggcagacgggaagagtacgacgtgctggacaagcggagaggcagggaccctgagatgggcggaaagccccggagaaagaacccccaggaaggactgtataacgaactccagaaagacaagatggccgaagcctacagcgagatcggcatgaagggcgagcggagaagaggcaagggccacgatggcctgtaccagggcctgagcaccgccaccaaggacacctatgacgccctgcacatgcaggccctgcctccaagaagggccaagcgatctggatctggagcaacaaacttctcactactcaaacaagcaggtgacgtggaggagaatcccgggcctactagtatggactggatttggcgcatccttttccttgtcggcgctgctaccggcgcgcattccttcgaagaggttcagctgctggaatctggcggaggaatggttcagcctggcggctctctgagactgtcttgtgccgccagcggcttcacctttagcagctacgccatgagctgggtccgacaggctcctggcaaaggactggaatgggtgtccgccatctctggctctggcggcagaaccttttacgccgatagcgtggaaggccggttcaccatcagccgggacaacagcaagaacaccctgtacctccagatgaacagcctgagagccgaggacaccgccgtgtactattgcgccaagcacgactacagcaactacccctacttcgactactggggccagggcacactggtcacagtttctagcacgcgtatccagaaccctgatcctgccgtgtaccagctgcgggatagcaagagcagcgacaagagcgtgtgtctgttcaccgacttcgacagccagaccaacgtgtcccagagcaaggactccgacgtgtacatcaccgataagaccgtgctggacatgcggagcatggacttcaagagcaactccgccgtggcctggtccaacaagtccgatttcgcctgcgccaacgccttcaacaacagcattatccccgaggacacattcttcccaagccccgagagcagctgcggtacccagagttttgggttgttggaccctaaattgtgctatctgttggacggaatcctgttcatttacggagtgatcctgaccgcattgttcctgcgggttaagttttccagatccgcagacgcacccgcttaccaacaagggcagaaccaactctacaatgaacttaatttggggcggagggaagagtacgacgttctggacaaaaggaggggacgagatcccgagatgggcggaaagcctcgaaggaagaatccgcaagaggggctttataacgaactccagaaagataaaatggcagaagcctatagtgagattgggatgaagggagaaaggaggaggggtaaaggtcacgatgggttgtaccaaggattgagcacagccactaaagatacctatgatgcgctccacatgcaggccctgccgccaaga

SEQ ID NO: 20059 - DNA, 1482 bp, synthetic construct
  source 1..1482: mol_type = other DNA
atggccttaccagtgaccgccttgctcctgccgctggccttgctgctccacgccgccaggccggacatccagatgacacagagccctagcagcctgtctgccagcgtgggagacagagtgaccatcacctgtagagccagccagagcgtgtccagctacctggcttggtatcagcagaagcctggcaaggcccctaagctgctgatctacgacgccagcaatagagccacaggcgtgcccagcagattttctggctctggcagcggcaccgacttcaccctgacaatatctagcctccagcctgaggacttcgccacctactactgtcagcagaggaccaactggcccctgacatttggccagggcaccaaggtggaaatcaagagaggcggaggcggaagtggaggcggaggatctggcggcggaggctctgaagttcagctggttgaatctggcggcggactggttcaacctggcggatctctgagactgagctgtgccgccagcggcttcaccttcagcagctacatcatgcactgggtccgacaggcccctggcaaaggacttgaatgggtcgccgtgatctcctacgacggcagaaacaaatactacgccgacagcgtgaagggcagattcaccatctccagagacaacagcaagaacaccctgtacctccagatgaactccctgagagccgaggacaccgccgtgtactactgtgccagagacaccgacggctacgacttcgattattggggccagggaaccctggtcaccgtgtcatctacgcgtgagcagaaactgatctcggaagaggatctgaaaattgaagttatgtatcctcctccttacctagacaatgagaagagcaatggaaccattatccatgtgaaagggaaacacctttgtccaagtcccctatttcccggaccttctaagcccttttgggtgctggtggtggttgggggagtcctggcttgctatagcttgctagtaacagtggcctttattattttctgggtgaggagtaagaggagcaggctcctgcacagtgactacatgaacatgactccacgccgccccggacccacccgcaagcattaccagccctatgccccaccacgcgacttcgcagcctatcgctccagagtgaagttcagcaggagcgcagacgcccccgcgtaccagcagggccagaaccagctctataacgagctcaatctaggacgaagagaggagtacgatgttttggacaagagacgtggccgggaccctgagatggggggaaagccgagaaggaagaaccctcaggaaggcctgtacaatgaactgcagaaagataagatggcggaggcctacagtgagattgggatgaaaggcgagcgccggaggggcaaggggcacgatggcctttaccagggtctcagtacagccaccaaggacacctacgacgcccttcacatgcaggccctgccccctcgc

SEQ ID NO: 20060 - DNA, 1503 bp, synthetic construct
  source 1..1503: mol_type = other DNA
atggccttaccagtgaccgccttgctcctgccgctggccttgctgctccacgccgccaggccggacatccagatgacacagagccctagcagcctgtctgccagcgtgggagacagagtgaccatcacctgtagagccagccagagcgtgtccagctacctggcttggtatcagcagaagcctggcaaggcccctaagctgctgatctacgacgccagcaatagagccacaggcgtgcccagcagattttctggctctggcagcggcaccgacttcaccctgacaatatctagcctccagcctgaggacttcgccacctactactgtcagcagaggaccaactggcccctgacatttggccagggcaccaaggtggaaatcaagagaggcggaggcggaagtggaggcggaggatctggcggcggaggctctgaagttcagctggttgaatctggcggcggactggttcaacctggcggatctctgagactgagctgtgccgccagcggcttcaccttcagcagctacatcatgcactgggtccgacaggcccctggcaaaggacttgaatgggtcgccgtgatctcctacgacggcagaaacaaatactacgccgacagcgtgaagggcagattcaccatctccagagacaacagcaagaacaccctgtacctccagatgaactccctgagagccgaggacaccgccgtgtactactgtgccagagacaccgacggctacgacttcgattattggggccagggaaccctggtcaccgtgtcatctacgcgtgagcagaaactgatctcggaagaggatctggcgaagcccaccacgacgccagcgccgcgaccaccaacaccggcgcccaccatcgcgtcgcagcccctgtccctgcgcccagaggcgtgccggccagcggcggggggcgcagtgcacacgagggggctggacttcgcctgtgacatctacatctgggcgcccttggccgggacttgtggggtccttctcctgtcactggttatcaccctttactgcaaacggggcagaaagaaactcctgtatatattcaaacaaccatttatgagaccagtacaaactactcaagaggaagatggctgtagctgccgatttccagaagaagaagaaggaggatgtgaactgagagtgaagttcagcaggagcgcagacgcccccgcgtaccagcagggccagaaccagctctataacgagctgaatctaggacgaagagaggagtacgatgttttggacaagagacgtggccgggaccctgagatggggggaaagccgagaaggaagaaccctcaggaaggcctgtacaatgaactgcagaaagataagatggcggaggcctacagtgagattgggatgaaaggcgagcgccggaggggcaaggggcacgatggcctttaccagggtctcagtacagccaccaaggacacctacgacgcccttcacatgcaggccctgccccctcgctga

SEQ ID NO: 20061 - DNA, 1503 bp, synthetic construct
  source 1..1503: mol_type = other DNA
atggccttaccagtgaccgccttgctcctgccgctggccttgctgctccacgccgccaggccggaagttcagctggttgaatctggcggcggactggttcaacctggcggatctctgagactgagctgtgccgccagcggcttcaccttcagcagctacatcatgcactgggtccgacaggcccctggcaaaggacttgaatgggtcgccgtgatctcctacgacggcagaaacaaatactacgccgacagcgtgaagggcagattcaccatctccagagacaacagcaagaacaccctgtacctccagatgaactccctgagagccgaggacaccgccgtgtactactgtgccagagacaccgacggctacgacttcgattattggggccagggaaccctggtcaccgtgtcatctggcggaggcggaagtggaggcggaggatctggcggcggaggctctgacatccagatgacacagagccctagcagcctgtctgccagcgtgggagacagagtgaccatcacctgtagagccagccagagcgtgtccagctacctggcttggtatcagcagaagcctggcaaggcccctaagctgctgatctacgacgccagcaatagagccacaggcgtgcccagcagattttctggctctggcagcggcaccgacttcaccctgacaatatctagcctccagcctgaggacttcgccacctactactgtcagcagaggaccaactggcccctgacatttggccagggcaccaaggtggaaatcaagagaacgcgtgagcagaaactgatctcggaagaggatctggcgaagcccaccacgacgccagcgccgcgaccaccaacaccggcgcccaccatcgcgtcgcagcccctgtccctgcgcccagaggcgtgccggccagcggcggggggcgcagtgcacacgagggggctggacttcgcctgtgacatctacatctgggcgcccttggccgggacttgtggggtccttctcctgtcactggttatcaccctttactgcaaacggggcagaaagaaactcctgtatatattcaaacaaccatttatgagaccagtacaaactactcaagaggaagatggctgtagctgccgatttccagaagaagaagaaggaggatgtgaactgagagtgaagttcagcaggagcgcagacgcccccgcgtaccagcagggccagaaccagctctataacgagctgaatctaggacgaagagaggagtacgatgttttggacaagagacgtggccgggaccctgagatggggggaaagccgagaaggaagaaccctcaggaaggcctgtacaatgaactgcagaaagataagatggcggaggcctacagtgagattgggatgaaaggcgagcgccggaggggcaaggggcacgatggcctttaccagggtctcagtacagccaccaaggacacctacgacgcccttcacatgcaggccctgccccctcgctga

SEQ ID NO: 20062 - DNA, 2742 bp, synthetic construct
  source 1..2742: mol_type = other DNA
atggccttaccagtgaccgccttgctcctgccgctggccttgctgctccacgccgccaggccggacatccagatgacacagagccctagcagcctgtctgccagcgtgggagacagagtgaccatcacctgtagagccagccagagcgtgtccagctacctggcttggtatcagcagaagcctggcaaggcccctaagctgctgatctacgacgccagcaatagagccacaggcgtgcccagcagattttctggctctggcagcggcaccgacttcaccctgacaatatctagcctccagcctgaggacttcgccacctactactgtcagcagaggaccaactggcccctgacatttggccagggcaccaaggtggaaatcaagagaggcggaggcggaagtggaggcggaggatctggcggcggaggctctgaagttcagctggttgaatctggcggcggactggttcaacctggcggatctctgagactgagctgtgccgccagcggcttcaccttcagcagctacatcatgcactgggtccgacaggcccctggcaaaggacttgaatgggtcgccgtgatctcctacgacggcagaaacaaatactacgccgacagcgtgaagggcagattcaccatctccagagacaacagcaagaacaccctgtacctccagatgaactccctgagagccgaggacaccgccgtgtactactgtgccagagacaccgacggctacgacttcgattattggggccagggaaccctggtcaccgtgtcatctacgcgtgagcagaaactgatctcggaagaggatctggcgaagcccaccacgacgccagcgccgcgaccaccaacaccggcgcccaccatcgcgtcgcagcccctgtccctgcgcccagaggcgtgccggccagcggcggggggcgcagtgcacacgagggggctggacttcgcctgtgacatctacatctgggcgcccttggccgggacttgtggggtccttctcctgtcactggttatcaccctttactgcgggcgcgccagagtgaagttcagcaggagcgcagacgcccccgcgtaccagcagggccagaaccagctctataacgagctgaatctaggacgaagagaggagtacgatgttttggacaagagacgtggccgggaccctgagatggggggaaagccgagaaggaagaaccctcaggaaggcctgtacaatgaactgcagaaagataagatggcggaggcctacagtgagattgggatgaaaggcgagcgccggaggggcaaggggcacgatggcctttaccagggtctcagtacagccaccaaggacacctacgacgcccttcacatgcaggccctgccccctcgctctagaggatctggagcaacaaacttctcactactcaaacaagcaggtgacgtggaggagaatcccgggcctgggatccacatggccacttacgaggttctctgtgaggtggcgcggaaactgggcacggatgacagggaagtggtattgttcctcctaaacgtgttcatacctcaacccacactggcccaattaattggagctcttagagctttaaaggaggagggcaggttaacgtttcccctgttagcggaatgtctgtttcgtgcaggtcgcagagacctcttgcgcgacctgcttcacttagacccgcgttttttagagcgccacctagcgggcacaatgagttatttcagcccttatcagctcactgttctccacgtagacggggagctgtgtgcgagggatattaggtctttgatatttttaagcaaggacactatagggtctcgcagcacaccacagacattcttacactgggtgtactgtatggaaaacttagacctactgggtcccactgacgtggatgccctaatgtcaatgcttagatctttgtcaagagtagacctacagcgccaagtgcaaaccctaatgggccttcacctttccggcccatcacactcccaacactatcgccatacaccactcgagaccgatttctacgactacaaggacgacgatgacaagactagtggctccggcgagggcagaggaagtctactaacctgcggagatgtggaagaaaatcctggcccacatatgaccgagtacaagcccacggtgcgcctcgccacccgcgacgacgtccccagggccgtacgcaccctcgccgccgcgttcgccgactaccccgccacgcgccacaccgtcgatccggaccgccacatcgagcgggtcaccgagctgcaagaactcttcctcacgcgcgtcgggctcgacatcggcaaggtgtgggtcgcggacgacggcgccgcggtggcggtctggaccacgccggagagcgtcgaagcgggggcggtgttcgccgagatcggcccgcgcatggccgagttgagcggttcccggctggccgcgcagcaacagatggaaggcctcctggcgccgcaccggcccaaggagcccgcgtggttcctggccaccgtcggcgtctcgcccgaccaccagggcaagggtctgggcagcgccgtcgtgctccccggagtggaggcggccgagcgcgccggggtgcccgccttcctggagacctccgcgccccgcaacctccccttctacgagcggctcggcttcaccgtcaccgccgacgtcgaggtgcccgaaggaccgcgcacctggtgcatgacccgcaagcccggtgcctga

SEQ ID NO: 20063 - DNA, 2562 bp, synthetic construct
  source 1..2562: mol_type = other DNA
atggccttaccagtgaccgccttgctcctgccgctggccttgctgctccacgccgccaggccggacatccagatgacacagagccctagcagcctgtctgccagcgtgggagacagagtgaccatcacctgtagagccagccagagcgtgtccagctacctggcttggtatcagcagaagcctggcaaggcccctaagctgctgatctacgacgccagcaatagagccacaggcgtgcccagcagattttctggctctggcagcggcaccgacttcaccctgacaatatctagcctccagcctgaggacttcgccacctactactgtcagcagaggaccaactggcccctgacatttggccagggcaccaaggtggaaatcaagagactcgagatccagaaccctgatcctgccgtgtaccagctgcgggatagcaagagcagcgacaagagcgtgtgtctgttcaccgacttcgacagccagaccaacgtgtcccagagcaaggactccgacgtgtacatcaccgataagtgcgtgctggacatgcggagcatggacttcaagagcaactccgccgtggcctggtccaacaagtccgatttcgcctgcgccaacgccttcaacaacagcattatccccgaggacacattcttcccaagcagcgacgtgccctgcgacgtgaagctggtggaaaagagcttcgagacagacaccaacctgaacttccagaacctgagcgtgatcggcttcagaatcctgctgctgaaagtggccggctttaacctgctgatgaccctgcggctgtggtccagccgcgccaagagaagcggatctggcgtgaagcagaccctgaatttcgacctgctgaagctggctggcgacgtggaatccaacccaggccctactagtatggactggatttggcgcatccttttccttgtcggcgctgctaccggcgcgcattccttcgaagaagttcagctggttgaatctggcggcggactggttcaacctggcggatctctgagactgagctgtgccgccagcggcttcaccttcagcagctacatcatgcactgggtccgacaggcccctggcaaaggacttgaatgggtcgccgtgatctcctacgacggcagaaacaaatactacgccgacagcgtgaagggcagattcaccatctccagagacaacagcaagaacaccctgtacctccagatgaactccctgagagccgaggacaccgccgtgtactactgtgccagagacaccgacggctacgacttcgattattggggccagggaaccctggtcaccgtgtcatctacgcgtgaggacctgaagaacgtgttcccacctgaggtggccgtgttcgagcctagcaaggccgagatcgcccacacccagaaagccaccctcgtgtgcctggctaccggcttctaccccgaccatgtggaactgtcttggtgggtcaacggcaaagaggtgcacagcggcgtgtgtaccgacccccagccactgaaagaacagcccgccctgaacgacagccggtactgcctgagcagcagactgagagtgtccgccaccttctggcagaacccccggaaccacttcagatgccaggtgcagttctacggcctgagcgagaacgacgagtggacccaggacagagccaagcccgtgacccagatcgtgtctgccgaagcctggggcagagccgattgcggcatcaccagcgccagctaccaccagggcgtgctgagcgccaccatcctgtacgagatcctgctgggcaaggccaccctgtacgccgtgctggtgtctgccctggtgctgatggctatggtcaagcggaaggacagccggggaagggccaagcgatctggatctggagcaacaaacttctcactactcaaacaagcaggtgacgtggaggagaatcccgggccttctagaggccatatgaccgagtacaagcccacggtgcgcctcgccacccgcgacgacgtccccagggccgtacgcaccctcgccgccgcgttcgccgactaccccgccacgcgccacaccgtcgatccggaccgccacatcgagcgggtcaccgagctgcaagaactcttcctcacgcgcgtcgggctcgacatcggcaaggtgtgggtcgcggacgacggcgccgcggtggcggtctggaccacgccggagagcgtcgaagcgggggcggtgttcgccgagatcggcccgcgcatggccgagttgagcggttcccggctggccgcgcagcaacagatggaaggcctcctggcgccgcaccggcccaaggagcccgcgtggttcctggccaccgtcggcgtctcgcccgaccaccagggcaagggtctgggcagcgccgtcgtgctccccggagtggaggcggccgagcgcgccggggtgcccgccttcctggagacctccgcgccccgcaacctccccttctacgagcggctcggcttcaccgtcaccgccgacgtcgaggtgcccgaaggaccgcgcacctggtgcatgacccgcaagcccggtgcctga

SEQ ID NO: 20064 - DNA, 2559 bp, synthetic construct
  source 1..2559: mol_type = other DNA
atggccttaccagtgaccgccttgctcctgccgctggccttgctgctccacgccgccaggccggacatccagatgacacagagccctagcagcctgtctgccagcgtgggagacagagtgaccatcacctgtagagccagccagagcgtgtccagctacctggcttggtatcagcagaagcctggcaaggcccctaagctgctgatctacgacgccagcaatagagccacaggcgtgcccagcagattttctggctctggcagcggcaccgacttcaccctgacaatatctagcctccagcctgaggacttcgccacctactactgtcagcagaggaccaactggcccctgacatttggccagggcaccaaggtggaaatcaagagactcgaggacctgaagaacgtgttcccacctgaggtggccgtgttcgagcctagcaaggccgagatcgcccacacccagaaagccaccctcgtgtgcctggctaccggcttctaccccgaccatgtggaactgtcttggtgggtcaacggcaaagaggtgcacagcggcgtgtgtaccgacccccagccactgaaagaacagcccgccctgaacgacagccggtactgcctgagcagcagactgagagtgtccgccaccttctggcagaacccccggaaccacttcagatgccaggtgcagttctacggcctgagcgagaacgacgagtggacccaggacagagccaagcccgtgacccagatcgtgtctgccgaagcctggggcagagccgattgcggcatcaccagcgccagctaccaccagggcgtgctgagcgccaccatcctgtacgagatcctgctgggcaaggccaccctgtacgccgtgctggtgtctgccctggtgctgatggctatggtcaagcggaaggacagccggggaagggccaagcgatctggatctggagcaacaaacttctcactactcaaacaagcaggtgacgtggaggagaatcccgggcctactagtatggactggatttggcgcatccttttccttgtcggcgctgctaccggcgcgcattccttcgaagaagttcagctggttgaatctggcggcggactggttcaacctggcggatctctgagactgagctgtgccgccagcggcttcaccttcagcagctacatcatgcactgggtccgacaggcccctggcaaaggacttgaatgggtcgccgtgatctcctacgacggcagaaacaaatactacgccgacagcgtgaagggcagattcaccatctccagagacaacagcaagaacaccctgtacctccagatgaactccctgagagccgaggacaccgccgtgtactactgtgccagagacaccgacggctacgacttcgattattggggccagggaaccctggtcaccgtgtcatctacgcgtatccagaaccctgatcctgccgtgtaccagctgcgggatagcaagagcagcgacaagagcgtgtgtctgttcaccgacttcgacagccagaccaacgtgtcccagagcaaggactccgacgtgtacatcaccgataagtgcgtgctggacatgcggagcatggacttcaagagcaactccgccgtggcctggtccaacaagtccgatttcgcctgcgccaacgccttcaacaacagcattatccccgaggacacattcttcccaagcagcgacgtgccctgcgacgtgaagctggtggaaaagagcttcgagacagacaccaacctgaacttccagaacctgagcgtgatcggcttcagaatcctgctgctgaaagtggccggctttaacctgctgatgaccctgcggctgtggtccagccgcgccaagagaagcggatctggcgtgaagcagaccctgaatttcgacctgctgaagctggctggcgacgtggaatccaacccaggcccttctagaggccatatgaccgagtacaagcccacggtgcgcctcgccacccgcgacgacgtccccagggccgtacgcaccctcgccgccgcgttcgccgactaccccgccacgcgccacaccgtcgatccggaccgccacatcgagcgggtcaccgagctgcaagaactcttcctcacgcgcgtcgggctcgacatcggcaaggtgtgggtcgcggacgacggcgccgcggtggcggtctggaccacgccggagagcgtcgaagcgggggcggtgttcgccgagatcggcccgcgcatggccgagttgagcggttcccggctggccgcgcagcaacagatggaaggcctcctggcgccgcaccggcccaaggagcccgcgtggttcctggccaccgtcggcgtctcgcccgaccaccagggcaagggtctgggcagcgccgtcgtgctccccggagtggaggcggccgagcgcgccggggtgcccgccttcctggagacctccgcgccccgcaacctccccttctacgagcggctcggcttcaccgtcaccgccgacgtcgaggtgcccgaaggaccgcgcacctggtgcatgacccgcaagcccggtgcctga

SEQ ID NO: 20065 - DNA, 1857 bp, synthetic construct
  source 1..1857: mol_type = other DNA
atggccttaccagtgaccgccttgctcctgccgctggccttgctgctccacgccgccaggccggacatccagatgacacagagccctagcagcctgtctgccagcgtgggagacagagtgaccatcacctgtagagccagccagagcgtgtccagctacctggcttggtatcagcagaagcctggcaaggcccctaagctgctgatctacgacgccagcaatagagccacaggcgtgcccagcagattttctggctctggcagcggcaccgacttcaccctgacaatatctagcctccagcctgaggacttcgccacctactactgtcagcagaggaccaactggcccctgacatttggccagggcaccaaggtggaaatcaagagactcgaggacctgaagaacgtgttcccacctgaggtggccgtgttcgagcctagcgaggccgagatcagccacacccagaaagccaccctcgtgtgcctggctaccggcttctaccccgaccatgtggaactgtcttggtgggtcaacggcaaagaggtgcacagcggcgtgtgtaccgacccccagccactgaaagaacagcccgccctgaacgacagccggtactgcctgagcagcagactgagagtgtccgccaccttctggcagaacccccggaaccacttcagatgccaggtgcagttctacggcctgagcgagaacgacgagtggacccaggacagagccaagcccgtgacccagatcgtgtctgccgaagcctggggcagagccgattgcggctttaccagcgagagctaccagcagggcgtgctgagcgccaccatcctgtacgagatcctgctgggcaaggccaccctgtacgccgtgctggtgtctgccctggtgctgatggctatggtcaagcggaaggacagccggggaagggccaagcgatctggatctggagcaacaaacttctcactactcaaacaagcaggtgacgtggaggagaatcccgggcctactagtatggactggatttggcgcatccttttccttgtcggcgctgctaccggcgcgcattccttcgaagaagttcagctggttgaatctggcggcggactggttcaacctggcggatctctgagactgagctgtgccgccagcggcttcaccttcagcagctacatcatgcactgggtccgacaggcccctggcaaaggacttgaatgggtcgccgtgatctcctacgacggcagaaacaaatactacgccgacagcgtgaagggcagattcaccatctccagagacaacagcaagaacaccctgtacctccagatgaactccctgagagccgaggacaccgccgtgtactactgtgccagagacaccgacggctacgacttcgattattggggccagggaaccctggtcaccgtgtcatctacgcgtatccagaaccctgatcctgccgtgtaccagctgcgggatagcaagagcagcgacaagagcgtgtgtctgttcaccgacttcgacagccagaccaacgtgtcccagagcaaggactccgacgtgtacatcaccgataagtgcgtgctggacatgcggagcatggacttcaagagcaactccgccgtggcctggtccaacaagtccgatttcgcctgcgccaacgccttcaacaacagcattatccccgaggacacattcttcccaagccccgagagcagctgcgacgtgaagctggtggaaaagagcttcgagacagacaccaacctgaacttccagaacctgagcgtgatcggcttcagaatcctgctgctgaaagtggccggctttaacctgctgatgaccctgcggctgtggtccagc

SEQ ID NO: 20066 - DNA, 2532 bp, synthetic construct
  source 1..2532: mol_type = other DNA
atggccttaccagtgaccgccttgctcctgccgctggccttgctgctccacgccgccaggccggacatccagatgacacagagccctagcagcctgtctgccagcgtgggagacagagtgaccatcacctgtagagccagccagagcgtgtccagctacctggcttggtatcagcagaagcctggcaaggcccctaagctgctgatctacgacgccagcaatagagccacaggcgtgcccagcagattttctggctctggcagcggcaccgacttcaccctgacaatatctagcctccagcctgaggacttcgccacctactactgtcagcagaggaccaactggcccctgacatttggccagggcaccaaggtggaaatcaagagactcgaggacctgaagaacgtgttcccacctgaggtggccgtgttcgagcctagcgaggccgagatcagccacacccagaaagccaccctcgtgtgcctggctaccggcttctaccccgaccatgtggaactgtcttggtgggtcaacggcaaagaggtgcacagcggcgtgtgtaccgacccccagccactgaaagaacagcccgccctgaacgacagccggtactgcctgagcagcagactgagagtgtccgccaccttctggcagaacccccggaaccacttcagatgccaggtgcagttctacggcctgagcgagaacgacgagtggacccaggacagagccaagcccgtgacccagatcgtgtctgccgaagcctggggcagagccgattgcggctttaccagcgagagctaccagcagggcgtgctgagcgccaccatcctgtacgagatcctgctgggcaaggccaccctgtacgccgtgctggtgtctgccctggtgctgatggctatggtcaagcggaaggacagccggggaagggccaagcgatctggatctggagcaacaaacttctcactactcaaacaagcaggtgacgtggaggagaatcccgggcctactagtatggactggatttggcgcatccttttccttgtcggcgctgctaccggcgcgcattccttcgaagaagttcagctggttgaatctggcggcggactggttcaacctggcggatctctgagactgagctgtgccgccagcggcttcaccttcagcagctacatcatgcactgggtccgacaggcccctggcaaaggacttgaatgggtcgccgtgatctcctacgacggcagaaacaaatactacgccgacagcgtgaagggcagattcaccatctccagagacaacagcaagaacaccctgtacctccagatgaactccctgagagccgaggacaccgccgtgtactactgtgccagagacaccgacggctacgacttcgattattggggccagggaaccctggtcaccgtgtcatctacgcgtatccagaaccctgatcctgccgtgtaccagctgcgggatagcaagagcagcgacaagagcgtgtgtctgttcaccgacttcgacagccagaccaacgtgtcccagagcaaggactccgacgtgtacatcaccgataagtgcgtgctggacatgcggagcatggacttcaagagcaactccgccgtggcctggtccaacaagtccgatttcgcctgcgccaacgccttcaacaacagcattatccccgaggacacattcttcccaagccccgagagcagctgcgacgtgaagctggtggaaaagagcttcgagacagacaccaacctgaacttccagaacctgagcgtgatcggcttcagaatcctgctgctgaaagtggccggctttaacctgctgatgaccctgcggctgtggtccagccgcgccaagagaagcggatctggcgtgaagcagaccctgaatttcgacctgctgaagctggctggcgacgtggaatccaacccaggcccttctagaggcgggatccacaccatggctacctacgaggtgctgtgcgaggtggcaagaaagctgggcaccgacgacagagaagtggtgctgttcctgctgaacgtgttcatccctcagcctacactggcccagctgatcggtgcactgagagccctgaaagaggaaggccggctgacctttcctctgctggccgaatgcctgttcagagccggaagaagggatctgctgcgggacctgctgcatctggaccccagatttctggaaagacacctggccggcaccatgagctacttcagcccttaccagctgaccgtgctgcacgttgacggcgaactgtgcgccagagatattcggagcctgatcttcctgagcaaggacaccatcggcagccggtctacccctcagacatttctgcactgggtgtactgcatggaaaacctggacctgctcggccccacagatgtggatgccctgatgtccatgctgagaagcctgagcagagtggacctccagagacaggtgcagacactgatgggactgcacctgagcggacctagccacagccagcactacagacacacccct

SEQ ID NO: 20067 - DNA, 1869 bp, synthetic construct
  source 1..1869: mol_type = other DNA
atggccttaccagtgaccgccttgctcctgccgctggccttgctgctccacgccgccaggccggacatccagatgacacagagccctagcagcctgtctgccagcgtgggagacagagtgaccatcacctgtagagccagccagagcgtgtccagctacctggcttggtatcagcagaagcctggcaaggcccctaagctgctgatctacgacgccagcaatagagccacaggcgtgcccagcagattttctggctctggcagcggcaccgacttcaccctgacaatatctagcctccagcctgaggacttcgccacctactactgtcagcagaggaccaactggcccctgacatttggccagggcaccaaggtggaaatcaagagactcgagatccagaaccctgatcctgccgtgtaccagctgcgggatagcaagagcagcgacaagagcgtgtgtctgttcaccgacttcgacagccagaccaacgtgtcccagagcaaggactccgacgtgtacatcaccgataagtgcgtgctggacatgcggagcatggacttcaagagcaactccgccgtggcctggtccaacaagtccgatttcgcctgcgccaacgccttcaacaacagcattatccccgaggacacattcttcccaagccccgagagcagctgcgacgtgaagctggtggaaaagagcttcgagacagacaccaacctgaacttccagaacctgagcgtgatcggcttcagaatcctgctgctgaaagtggccggctttaacctgctgatgaccctgcggctgtggtccagccgcgccaagagaagcggatctggcgtgaagcagaccctgaatttcgacctgctgaagctggctggcgacgtggaatccaacccaggccctactagtatggactggatttggcgcatccttttccttgtcggcgctgctaccggcgcgcattccttcgaagaagttcagctggttgaatctggcggcggactggttcaacctggcggatctctgagactgagctgtgccgccagcggcttcaccttcagcagctacatcatgcactgggtccgacaggcccctggcaaaggacttgaatgggtcgccgtgatctcctacgacggcagaaacaaatactacgccgacagcgtgaagggcagattcaccatctccagagacaacagcaagaacaccctgtacctccagatgaactccctgagagccgaggacaccgccgtgtactactgtgccagagacaccgacggctacgacttcgattattggggccagggaaccctggtcaccgtgtcatctacgcgtgaggacctgaagaacgtgttcccacctgaggtggccgtgttcgagcctagcgaggccgagatcagccacacccagaaagccaccctcgtgtgcctggctaccggcttctaccccgaccatgtggaactgtcttggtgggtcaacggcaaagaggtgcacagcggcgtgtgtaccgacccccagccactgaaagaacagcccgccctgaacgacagccggtactgcctgagcagcagactgagagtgtccgccaccttctggcagaacccccggaaccacttcagatgccaggtgcagttctacggcctgagcgagaacgacgagtggacccaggacagagccaagcccgtgacccagatcgtgtctgccgaagcctggggcagagccgattgcggctttaccagcgagagctaccagcagggcgtgctgagcgccaccatcctgtacgagatcctgctgggcaaggccaccctgtacgccgtgctggtgtctgccctggtgctgatggctatggtcaagcggaaggacagccgggga

SEQ ID NO: 20068 - DNA, 2535 bp, synthetic construct
  source 1..2535: mol_type = other DNA
atggccttaccagtgaccgccttgctcctgccgctggccttgctgctccacgccgccaggccggacatccagatgacacagagccctagcagcctgtctgccagcgtgggagacagagtgaccatcacctgtagagccagccagagcgtgtccagctacctggcttggtatcagcagaagcctggcaaggcccctaagctgctgatctacgacgccagcaatagagccacaggcgtgcccagcagattttctggctctggcagcggcaccgacttcaccctgacaatatctagcctccagcctgaggacttcgccacctactactgtcagcagaggaccaactggcccctgacatttggccagggcaccaaggtggaaatcaagagactcgagatccagaaccctgatcctgccgtgtaccagctgcgggatagcaagagcagcgacaagagcgtgtgtctgttcaccgacttcgacagccagaccaacgtgtcccagagcaaggactccgacgtgtacatcaccgataagtgcgtgctggacatgcggagcatggacttcaagagcaactccgccgtggcctggtccaacaagtccgatttcgcctgcgccaacgccttcaacaacagcattatccccgaggacacattcttcccaagccccgagagcagctgcgacgtgaagctggtggaaaagagcttcgagacagacaccaacctgaacttccagaacctgagcgtgatcggcttcagaatcctgctgctgaaagtggccggctttaacctgctgatgaccctgcggctgtggtccagccgcgccaagagaagcggatctggcgtgaagcagaccctgaatttcgacctgctgaagctggctggcgacgtggaatccaacccaggccctactagtatggactggatttggcgcatccttttccttgtcggcgctgctaccggcgcgcattccttcgaagaagttcagctggttgaatctggcggcggactggttcaacctggcggatctctgagactgagctgtgccgccagcggcttcaccttcagcagctacatcatgcactgggtccgacaggcccctggcaaaggacttgaatgggtcgccgtgatctcctacgacggcagaaacaaatactacgccgacagcgtgaagggcagattcaccatctccagagacaacagcaagaacaccctgtacctccagatgaactccctgagagccgaggacaccgccgtgtactactgtgccagagacaccgacggctacgacttcgattattggggccagggaaccctggtcaccgtgtcatctacgcgtgaggacctgaagaacgtgttcccacctgaggtggccgtgttcgagcctagcgaggccgagatcagccacacccagaaagccaccctcgtgtgcctggctaccggcttctaccccgaccatgtggaactgtcttggtgggtcaacggcaaagaggtgcacagcggcgtgtgtaccgacccccagccactgaaagaacagcccgccctgaacgacagccggtactgcctgagcagcagactgagagtgtccgccaccttctggcagaacccccggaaccacttcagatgccaggtgcagttctacggcctgagcgagaacgacgagtggacccaggacagagccaagcccgtgacccagatcgtgtctgccgaagcctggggcagagccgattgcggctttaccagcgagagctaccagcagggcgtgctgagcgccaccatcctgtacgagatcctgctgggcaaggccaccctgtacgccgtgctggtgtctgccctggtgctgatggctatggtcaagcggaaggacagccggggaagggccaagcgatctggatctggagcaacaaacttctcactactcaaacaagcaggtgacgtggaggagaatcccgggccttctagaggcgggatccacaccatggctacctacgaggtgctgtgcgaggtggcaagaaagctgggcaccgacgacagagaagtggtgctgttcctgctgaacgtgttcatccctcagcctacactggcccagctgatcggtgcactgagagccctgaaagaggaaggccggctgacctttcctctgctggccgaatgcctgttcagagccggaagaagggatctgctgcgggacctgctgcatctggaccccagatttctggaaagacacctggccggcaccatgagctacttcagcccttaccagctgaccgtgctgcacgttgacggcgaactgtgcgccagagatattcggagcctgatcttcctgagcaaggacaccatcggcagccggtctacccctcagacatttctgcactgggtgtactgcatggaaaacctggacctgctcggccccacagatgtggatgccctgatgtccatgctgagaagcctgagcagagtggacctccagagacaggtgcagacactgatgggactgcacctgagcggacctagccacagccagcactacagacacacccct

SEQ ID NO: 20069 - DNA, 2694 bp, synthetic construct
  source 1..2694: mol_type = other DNA
atggccttaccagtgaccgccttgctcctgccgctggccttgctgctccacgccgccaggccgctcgaggggaaaccaattcccaaccctcttctgggactggattcaaccggcagcggcgaggacctgaagaacgtgttcccacctgaggtggccgtgttcgagcctagcaaggccgagatcgcccacacccagaaagccaccctcgtgtgcctggctaccggcttctaccccgaccatgtggaactgtcttggtgggtcaacggcaaagaggtgcacagcggcgtgtgtaccgacccccagccactgaaagaacagcccgccctgaacgacagccggtactgcctgagcagcagactgagagtgtccgccaccttctggcagaacccccggaaccacttcagatgccaggtgcagttctacggcctgagcgagaacgacgagtggacccaggacagagccaagcccgtgacccagatcgtgtctgccgaagcctggggcagagccgattgcggcatcaccagcgccagctaccaccagggcgtgctgagcgccaccatcctgtacgagatcctgctgggcaaggccaccctgtacgccgtgctggtgtctgccctggtgctgatggctatggtcaagcggaaggacagccggggaagggccaagcgatctggatctggagcaacaaacttctcactactcaaacaagcaggtgacgtggaggagaatcccgggcctactagcatggccttaccagtgaccgccttgctcctgccgctggccttgctgctccacgccgccaggccggacatccagatgacacagagccctagcagcctgtctgccagcgtgggagacagagtgaccatcacctgtagagccagccagagcgtgtccagctacctggcttggtatcagcagaagcctggcaaggcccctaagctgctgatctacgacgccagcaatagagccacaggcgtgcccagcagattttctggctctggcagcggcaccgacttcaccctgacaatatctagcctccagcctgaggacttcgccacctactactgtcagcagaggaccaactggcccctgacatttggccagggcaccaaggtggaaatcaagagaggcggaggcggaagtggaggcggaggatctggcggcggaggctctgaagttcagctggttgaatctggcggcggactggttcaacctggcggatctctgagactgagctgtgccgccagcggcttcaccttcagcagctacatcatgcactgggtccgacaggcccctggcaaaggacttgaatgggtcgccgtgatctcctacgacggcagaaacaaatactacgccgacagcgtgaagggcagattcaccatctccagagacaacagcaagaacaccctgtacctccagatgaactccctgagagccgaggacaccgccgtgtactactgtgccagagacaccgacggctacgacttcgattattggggccagggaaccctggtcaccgtgtcatctacgcgtgagcagaaactgatctcggaagaggatgggagcggcatccagaaccctgatcctgccgtgtaccagctgcgggatagcaagagcagcgacaagagcgtgtgtctgttcaccgacttcgacagccagaccaacgtgtcccagagcaaggactccgacgtgtacatcaccgataagtgcgtgctggacatgcggagcatggacttcaagagcaactccgccgtggcctggtccaacaagtccgatttcgcctgcgccaacgccttcaacaacagcattatccccgaggacacattcttcccaagcagcgacgtgccctgcgacgtgaagctggtggaaaagagcttcgagacagacaccaacctgaacttccagaacctgagcgtgatcggcttcagaatcctgctgctgaaagtggccggctttaacctgctgatgaccctgcggctgtggtccagccgcgccaagagaagcggatctggcgtgaagcagaccctgaatttcgacctgctgaagctggctggcgacgtggaatccaacccaggcccttctagaggccatatgaccgagtacaagcccacggtgcgcctcgccacccgcgacgacgtccccagggccgtacgcaccctcgccgccgcgttcgccgactaccccgccacgcgccacaccgtcgatccggaccgccacatcgagcgggtcaccgagctgcaagaactcttcctcacgcgcgtcgggctcgacatcggcaaggtgtgggtcgcggacgacggcgccgcggtggcggtctggaccacgccggagagcgtcgaagcgggggcggtgttcgccgagatcggcccgcgcatggccgagttgagcggttcccggctggccgcgcagcaacagatggaaggcctcctggcgccgcaccggcccaaggagcccgcgtggttcctggccaccgtcggcgtctcgcccgaccaccagggcaagggtctgggcagcgccgtcgtgctccccggagtggaggcggccgagcgcgccggggtgcccgccttcctggagacctccgcgccccgcaacctccccttctacgagcggctcggcttcaccgtcaccgccgacgtcgaggtgcccgaaggaccgcgcacctggtgcatgacccgcaagcccggtgcctga

SEQ ID NO: 20070 - DNA, 2697 bp, synthetic construct
  source 1..2697: mol_type = other DNA
atggccttaccagtgaccgccttgctcctgccgctggccttgctgctccacgccgccaggccgctcgagcagaaactgatctcggaagaggatctgggctccggcgatcgccctgatcctgccgtgtaccagctgcgggatagcaagagcagcgacaagagcgtgtgtctgttcaccgacttcgacagccagaccaacgtgtcccagagcaaggactccgacgtgtacatcaccgataagtgcgtgctggacatgcggagcatggacttcaagagcaactccgccgtggcctggtccaacaagtccgatttcgcctgcgccaacgccttcaacaacagcattatccccgaggacacattcttcccaagccccgagagcagctgcgacgtgaagctggtggaaaagagcttcgagacagacaccaacctgaacttccagaacctgagcgtgatcggcttcagaatcctgctgctgaaagtggccggctttaacctgctgatgaccctgcggctgtggtccagctctagtcgcgccaagagaagcggatctggcgtgaagcagaccctgaatttcgacctgctgaagctggctggcgacgtggaatccaacccaggccccactagcatggccttaccagtgaccgccttgctcctgccgctggccttgctgctccacgccgccaggccggacatccagatgacacagagccctagcagcctgtctgccagcgtgggagacagagtgaccatcacctgtagagccagccagagcgtgtccagctacctggcttggtatcagcagaagcctggcaaggcccctaagctgctgatctacgacgccagcaatagagccacaggcgtgcccagcagattttctggctctggcagcggcaccgacttcaccctgacaatatctagcctccagcctgaggacttcgccacctactactgtcagcagaggaccaactggcccctgacatttggccagggcaccaaggtggaaatcaagagaggcggaggcggaagtggaggcggaggatctggcggcggaggctctgaagttcagctggttgaatctggcggcggactggttcaacctggcggatctctgagactgagctgtgccgccagcggcttcaccttcagcagctacatcatgcactgggtccgacaggcccctggcaaaggacttgaatgggtcgccgtgatctcctacgacggcagaaacaaatactacgccgacagcgtgaagggcagattcaccatctccagagacaacagcaagaacaccctgtacctccagatgaactccctgagagccgaggacaccgccgtgtactactgtgccagagacaccgacggctacgacttcgattattggggccagggaaccctggtcaccgtgtcatctacgcgtgggaaaccaattcccaaccctcttctgggactggattcaaccggcagcggcgaggacctgaagaacgtgttcccacctgaggtggccgtgttcgagcctagcgaggccgagatcagccacacccagaaagccaccctcgtgtgcctggctaccggcttctaccccgaccatgtggaactgtcttggtgggtcaacggcaaagaggtgcacagcggcgtgtgtaccgacccccagccactgaaagaacagcccgccctgaacgacagccggtactgcctgagcagcagactgagagtgtccgccaccttctggcagaacccccggaaccacttcagatgccaggtgcagttctacggcctgagcgagaacgacgagtggacccaggacagagccaagcccgtgacccagatcgtgtctgccgaagcctggggcagagccgattgcggctttaccagcgagagctaccagcagggcgtgctgagcgccaccatcctgtacgagatcctgctgggcaaggccaccctgtacgccgtgctggtgtctgccctggtgctgatggctatggtcaagcggaaggacagccggggaagggccaagcgatctggatctggagcaacaaacttctcactactcaaacaagcaggtgacgtggaggagaatcccgggccttctagaggccatatgaccgagtacaagcccacggtgcgcctcgccacccgcgacgacgtccccagggccgtacgcaccctcgccgccgcgttcgccgactaccccgccacgcgccacaccgtcgatccggaccgccacatcgagcgggtcaccgagctgcaagaactcttcctcacgcgcgtcgggctcgacatcggcaaggtgtgggtcgcggacgacggcgccgcggtggcggtctggaccacgccggagagcgtcgaagcgggggcggtgttcgccgagatcggcccgcgcatggccgagttgagcggttcccggctggccgcgcagcaacagatggaaggcctcctggcgccgcaccggcccaaggagcccgcgtggttcctggccaccgtcggcgtctcgcccgaccaccagggcaagggtctgggcagcgccgtcgtgctccccggagtggaggcggccgagcgcgccggggtgcccgccttcctggagacctccgcgccccgcaacctccccttctacgagcggctcggcttcaccgtcaccgccgacgtcgaggtgcccgaaggaccgcgcacctggtgcatgacccgcaagcccggtgcctga

SEQ ID NO: 20071 - DNA, 2559 bp, synthetic construct
  source 1..2559: mol_type = other DNA
atggccttaccagtgaccgccttgctcctgccgctggccttgctgctccacgccgccaggccggacatccagatgacacagagccctagcagcctgtctgccagcgtgggagacagagtgaccatcacctgtagagccagccagagcgtgtccagctacctggcttggtatcagcagaagcctggcaaggcccctaagctgctgatctacgacgccagcaatagagccacaggcgtgcccagcagattttctggctctggcagcggcaccgacttcaccctgacaatatctagcctccagcctgaggacttcgccacctactactgtcagcagaggaccaactggcccctgacatttggccagggcaccaaggtggaaatcaagagactcgaggacctgaagaacgtgttcccacctgaggtggccgtgttcgagcctagcgaggccgagatcagccacacccagaaagccaccctcgtgtgcctggctaccggcttctaccccgaccatgtggaactgtcttggtgggtcaacggcaaagaggtgcacagcggcgtgtctaccgacccccagccactgaaagaacagcccgccctgaacgacagccggtactgcctgagcagcagactgagagtgtccgccaccttctggcagaacccccggaaccacttcagatgccaggtgcagttctacggcctgagcgagaacgacgagtggacccaggacagagccaagcccgtgacccagatcgtgtctgccgaagcctggggcagagccgattgcggctttaccagcgagagctaccagcagggcgtgctgagcgccaccatcctgtacgagatcctgctgggcaaggccaccctgtacgccgtgctggtgtctgccctggtgctgatggctatggtcaagcggaaggacagccggggaagggccaagcgatctggatctggagcaacaaacttctcactactcaaacaagcaggtgacgtggaggagaatcccgggcctactagtatggactggatttggcgcatccttttccttgtcggcgctgctaccggcgcgcattccttcgaagaagttcagctggttgaatctggcggcggactggttcaacctggcggatctctgagactgagctgtgccgccagcggcttcaccttcagcagctacatcatgcactgggtccgacaggcccctggcaaaggacttgaatgggtcgccgtgatctcctacgacggcagaaacaaatactacgccgacagcgtgaagggcagattcaccatctccagagacaacagcaagaacaccctgtacctccagatgaactccctgagagccgaggacaccgccgtgtactactgtgccagagacaccgacggctacgacttcgattattggggccagggaaccctggtcaccgtgtcatctacgcgtatccagaaccctgatcctgccgtgtaccagctgcgggatagcaagagcagcgacaagagcgtgtgtctgttcaccgacttcgacagccagaccaacgtgtcccagagcaaggactccgacgtgtacatcaccgataagaccgtgctggacatgcggagcatggacttcaagagcaactccgccgtggcctggtccaacaagtccgatttcgcctgcgccaacgccttcaacaacagcattatccccgaggacacattcttcccaagccccgagagcagctgcgacgtgaagctggtggaaaagagcttcgagacagacaccaacctgaacttccagaacctgagcgtgatcggcttcagaatcctgctgctgaaagtggccggctttaacctgctgatgaccctgcggctgtggtccagccgcgccaagagaagcggatctggcgtgaagcagaccctgaatttcgacctgctgaagctggctggcgacgtggaatccaacccaggcccttctagaggccatatgaccgagtacaagcccacggtgcgcctcgccacccgcgacgacgtccccagggccgtacgcaccctcgccgccgcgttcgccgactaccccgccacgcgccacaccgtcgatccggaccgccacatcgagcgggtcaccgagctgcaagaactcttcctcacgcgcgtcgggctcgacatcggcaaggtgtgggtcgcggacgacggcgccgcggtggcggtctggaccacgccggagagcgtcgaagcgggggcggtgttcgccgagatcggcccgcgcatggccgagttgagcggttcccggctggccgcgcagcaacagatggaaggcctcctggcgccgcaccggcccaaggagcccgcgtggttcctggccaccgtcggcgtctcgcccgaccaccagggcaagggtctgggcagcgccgtcgtgctccccggagtggaggcggccgagcgcgccggggtgcccgccttcctggagacctccgcgccccgcaacctccccttctacgagcggctcggcttcaccgtcaccgccgacgtcgaggtgcccgaaggaccgcgcacctggtgcatgacccgcaagcccggtgcctga

SEQ ID NO: 20072 - DNA, 2805 bp, synthetic construct
  source 1..2805: mol_type = other DNA
atggccttaccagtgaccgccttgctcctgccgctggccttgctgctccacgccgccaggccggacatccagatgacacagagccctagcagcctgtctgccagcgtgggagacagagtgaccatcacctgtagagccagccagagcgtgtccagctacctggcttggtatcagcagaagcctggcaaggcccctaagctgctgatctacgacgccagcaatagagccacaggcgtgcccagcagattttctggctctggcagcggcaccgacttcaccctgacaatatctagcctccagcctgaggacttcgccacctactactgtcagcagaggaccaactggcccctgacatttggccagggcaccaaggtggaaatcaagagactcgaggacctgaagaacgtgttcccacctgaggtggccgtgttcgagcctagcgaggccgagatcagccacacccagaaagccaccctcgtgtgcctggctaccggcttctaccccgaccatgtggaactgtcttggtgggtcaacggcaaagaggtgcacagcggcgtgtctaccgacccccagccactgaaagaacagcccgccctgaacgacagccggtactgcctgagcagcagactgagagtgtccgccaccttctggcagaacccccggaaccacttcagatgccaggtgcagttctacggcctgagcgagaacgacgagtggacccaggacagagccaagcccgtgacccagatcgtgtctgccgaagcctggggcagagccgattgcggctttaccagcgagagctaccagcagggcgtgctgagcgccaccatcctgtacgagatcctgctgggcaaggccaccctgtacgccgtgctggtgtctgccctggtgctgatggctatggtcaagcggaaggacagccggggaagggccaagcgatctggatctggagcaacaaacttctcactactcaaacaagcaggtgacgtggaggagaatcccgggcctactagtatggactggatttggcgcatccttttccttgtcggcgctgctaccggcgcgcattccttcgaagaagttcagctggttgaatctggcggcggactggttcaacctggcggatctctgagactgagctgtgccgccagcggcttcaccttcagcagctacatcatgcactgggtccgacaggcccctggcaaaggacttgaatgggtcgccgtgatctcctacgacggcagaaacaaatactacgccgacagcgtgaagggcagattcaccatctccagagacaacagcaagaacaccctgtacctccagatgaactccctgagagccgaggacaccgccgtgtactactgtgccagagacaccgacggctacgacttcgattattggggccagggaaccctggtcaccgtgtcatctacgcgtgagcagaaactgatctcggaagaggatgggagcggcaccccattcccttctctggcccctcccatcatgctgctggtggacggcaagcagcagatggtggtcgtgtgcctggtgctggatgtggccccacctggactggacagccccatctggtttagcgccggcaatggctctgccctggacgcctttacctacggcccaagccctgccaccgatggcacctggacaaatctggcccacctgagcctgcccagcgaggaactggcttcttgggagcctctcgtgtgccacacaggacctggcgctgagggacacagcagatccacccagcctatgcacctgtctggcgaggccagcaccgccagaacctgtcctcaggaacctctgagaggcacccctggcggagcactgtggctgggagtgctgagactgctgctgttcaagctgctgctgtttgacctgctgctgacctgctcctgtctgtgcgatcctgccggccctctgccttctcctgccaccaccacaagactgagagccctgggcagccacagactgcaccctgccacagagacaggcggcagagaggccacaagcagccctagaccccagcccagagacagaagatggggcgataccccccctggcagaaagcctggatctccagtccgcgccaagagaagcggatctggcgtgaagcagaccctgaatttcgacctgctgaagctggctggcgacgtggaatccaacccaggcccttctagaggccatatgaccgagtacaagcccacggtgcgcctcgccacccgcgacgacgtccccagggccgtacgcaccctcgccgccgcgttcgccgactaccccgccacgcgccacaccgtcgatccggaccgccacatcgagcgggtcaccgagctgcaagaactcttcctcacgcgcgtcgggctcgacatcggcaaggtgtgggtcgcggacgacggcgccgcggtggcggtctggaccacgccggagagcgtcgaagcgggggcggtgttcgccgagatcggcccgcgcatggccgagttgagcggttcccggctggccgcgcagcaacagatggaaggcctcctggcgccgcaccggcccaaggagcccgcgtggttcctggccaccgtcggcgtctcgcccgaccaccagggcaagggtctgggcagcgccgtcgtgctccccggagtggaggcggccgagcgcgccggggtgcccgccttcctggagacctccgcgccccgcaacctccccttctacgagcggctcggcttcaccgtcaccgccgacgtcgaggtgcccgaaggaccgcgcacctggtgcatgacccgcaagcccggtgcctga

SEQ ID NO: 20073 - DNA, 2859 bp, synthetic construct
  source 1..2859: mol_type = other DNA
atggccttaccagtgaccgccttgctcctgccgctggccttgctgctccacgccgccaggccgctcgaggacctgaagaacgtgttcccacctgaggtggccgtgttcgagcctagcgaggccgagatcagccacacccagaaagccaccctcgtgtgcctggctaccggcttctaccccgaccatgtggaactgtcttggtgggtcaacggcaaagaggtgcacagcggcgtgtctaccgacccccagccactgaaagaacagcccgccctgaacgacagccggtactgcctgagcagcagactgagagtgtccgccaccttctggcagaacccccggaaccacttcagatgccaggtgcagttctacggcctgagcgagaacgacgagtggacccaggacagagccaagcccgtgacccagatcgtgtctgccgaagcctggggcagagccgattgcggctttaccagcgagagctaccagcagggcgtgctgagcgccaccatcctgtacgagatcctgctgggcaaggccaccctgtacgccgtgctggtgtctgccctggtgctgatggctatggtcaagcggaaggacagccggggaagggccaagcgatctggatctggagcaacaaacttctcactactcaaacaagcaggtgacgtggaggagaatcccgggcctactagcatggccttaccagtgaccgccttgctcctgccgctggccttgctgctccacgccgccaggccggacatccagatgacacagagccctagcagcctgtctgccagcgtgggagacagagtgaccatcacctgtagagccagccagagcgtgtccagctacctggcttggtatcagcagaagcctggcaaggcccctaagctgctgatctacgacgccagcaatagagccacaggcgtgcccagcagattttctggctctggcagcggcaccgacttcaccctgacaatatctagcctccagcctgaggacttcgccacctactactgtcagcagaggaccaactggcccctgacatttggccagggcaccaaggtggaaatcaagagaggcggaggcggaagtggaggcggaggatctggcggcggaggctctgaagttcagctggttgaatctggcggcggactggttcaacctggcggatctctgagactgagctgtgccgccagcggcttcaccttcagcagctacatcatgcactgggtccgacaggcccctggcaaaggacttgaatgggtcgccgtgatctcctacgacggcagaaacaaatactacgccgacagcgtgaagggcagattcaccatctccagagacaacagcaagaacaccctgtacctccagatgaactccctgagagccgaggacaccgccgtgtactactgtgccagagacaccgacggctacgacttcgattattggggccagggaaccctggtcaccgtgtcatctacgcgtgagcagaaactgatctcggaagaggatctggggagcggcaccccattcccttctctggcccctcccatcatgctgctggtggacggcaagcagcagatggtggtcgtgtgcctggtgctggatgtggccccacctggactggacagccccatctggtttagcgccggcaatggctctgccctggacgcctttacctacggcccaagccctgccaccgatggcacctggacaaatctggcccacctgagcctgcccagcgaggaactggcttcttgggagcctctcgtgtgccacacaggacctggcgctgagggacacagcagatccacccagcctatgcacctgtctggcgaggccagcaccgccagaacctgtcctcaggaacctctgagaggcacccctggcggagcactgtggctgggagtgctgagactgctgctgttcaagctgctgctgtttgacctgctgctgacctgctcctgtctgtgcgatcctgccggccctctgccttctcctgccaccaccacaagactgagagccctgggcagccacagactgcaccctgccacagagacaggcggcagagaggccacaagcagccctagaccccagcccagagacagaagatggggcgataccccccctggcagaaagcctggatctccagtccgcgccaagagaagcggatctggcgtgaagcagaccctgaatttcgacctgctgaagctggctggcgacgtggaatccaacccaggcccttctagatctagaggccatatgaccgagtacaagcccacggtgcgcctcgccacccgcgacgacgtccccagggccgtacgcaccctcgccgccgcgttcgccgactaccccgccacgcgccacaccgtcgatccggaccgccacatcgagcgggtcaccgagctgcaagaactcttcctcacgcgcgtcgggctcgacatcggcaaggtgtgggtcgcggacgacggcgccgcggtggcggtctggaccacgccggagagcgtcgaagcgggggcggtgttcgccgagatcggcccgcgcatggccgagttgagcggttcccggctggccgcgcagcaacagatggaaggcctcctggcgccgcaccggcccaaggagcccgcgtggttcctggccaccgtcggcgtctcgcccgaccaccagggcaagggtctgggcagcgccgtcgtgctccccggagtggaggcggccgagcgcgccggggtgcccgccttcctggagacctccgcgccccgcaacctccccttctacgagcggctcggcttcaccgtcaccgccgacgtcgaggtgcccgaaggaccgcgcacctggtgcatgacccgcaagcccggtgcctga

SEQ ID NO: 20074 - DNA, 2670 bp, synthetic construct
  source 1..2670: mol_type = other DNA
atggccttaccagtgaccgccttgctcctgccgctggccttgctgctccacgccgccaggccggacatccagatgacacagagccctagcagcctgtctgccagcgtgggagacagagtgaccatcacctgtagagccagccagagcgtgtccagctacctggcttggtatcagcagaagcctggcaaggcccctaagctgctgatctacgacgccagcaatagagccacaggcgtgcccagcagattttctggctctggcagcggcaccgacttcaccctgacaatatctagcctccagcctgaggacttcgccacctactactgtcagcagaggaccaactggcccctgacatttggccagggcaccaaggtggaaatcaagagactcgaggggaaaccaattcccaaccctcttctgggactggattcaaccggcagcggcgacaagcagctggacgccgacgtgtcccccaagcctaccatcttcctgccctctatcgccgagacaaagctccagaaggccggcacctacctgtgcctgctggaaaagttcttcccagatgtgattaagatccactggcaggaaaagaagtccaacaccatcctgggcagccaggaaggcaacaccatgaagaccaacgacacctacatgaagttcagctggctgaccgtgcccgagaagtccctggacaaagaacacagatgcatcgtgcggcacgaaaacaacaagaacggcgtggaccaggaaatcatcttcccacccatcaagaccgatgtgattacaatggaccccaaggacaactgctccaaggacgccaacgataccctgctgctccagctgaccaacaccagcgcctactacatgtacttgttgctgctgctgaagtccgtggtgtacttcgccatcatcacatgctgcctgctgcggagaaccgccttctgctgcaacggcgagaagtctagggccaagcgatctggatctggagcaacaaacttctcactactcaaacaagcaggtgacgtggaggagaatcccgggcctactagtatggactggatttggcgcatccttttccttgtcggcgctgctaccggcgcgcattccttcgaagaagttcagctggttgaatctggcggcggactggttcaacctggcggatctctgagactgagctgtgccgccagcggcttcaccttcagcagctacatcatgcactgggtccgacaggcccctggcaaaggacttgaatgggtcgccgtgatctcctacgacggcagaaacaaatactacgccgacagcgtgaagggcagattcaccatctccagagacaacagcaagaacaccctgtacctccagatgaactccctgagagccgaggacaccgccgtgtactactgtgccagagacaccgacggctacgacttcgattattggggccagggaaccctggtcaccgtgtcatctacgcgtgagcagaaactgatctcggaagaggatgggagcggcagccagcctcacaccaagcccagcgtgttcgtgatgaagaacggcaccaacgtggcctgcctcgtgaaagagttctaccccaaggacatcaggatcaacctggtgtccagcaagaagatcaccgagttcgaccccgccatcgtgatctcccccagcggcaagtacaacgccgtgaagctggggaagtacgaggacagcaacagcgtgacctgctccgtgcagcacgacaacaagaccgtgcacagcaccgactttgaagtgaaaaccgactccaccgaccacgtgaagcccaaagagacagagaacaccaagcagcccagcaagagctgccacaagcccaaggccatcgtgcacaccgagaaagtgaacatgatgagcctgaccgtgctgggcctgcggatgctgttcgccaaaaccgtggccgtgaacttcctgctgaccgccaagctgttcttcctccgcgccaagagaagcggatctggcgtgaagcagaccctgaatttcgacctgctgaagctggctggcgacgtggaatccaacccaggcccttctagaggccatatgaccgagtacaagcccacggtgcgcctcgccacccgcgacgacgtccccagggccgtacgcaccctcgccgccgcgttcgccgactaccccgccacgcgccacaccgtcgatccggaccgccacatcgagcgggtcaccgagctgcaagaactcttcctcacgcgcgtcgggctcgacatcggcaaggtgtgggtcgcggacgacggcgccgcggtggcggtctggaccacgccggagagcgtcgaagcgggggcggtgttcgccgagatcggcccgcgcatggccgagttgagcggttcccggctggccgcgcagcaacagatggaaggcctcctggcgccgcaccggcccaaggagcccgcgtggttcctggccaccgtcggcgtctcgcccgaccaccagggcaagggtctgggcagcgccgtcgtgctccccggagtggaggcggccgagcgcgccggggtgcccgccttcctggagacctccgcgccccgcaacctccccttctacgagcggctcggcttcaccgtcaccgccgacgtcgaggtgcccgaaggaccgcgcacctggtgcatgacccgcaagcccggtgcctga

SEQ ID NO: 20075 - DNA, 1881 bp, synthetic construct
  source 1..1881: mol_type = other DNA
atggccttaccagtgaccgccttgctcctgccgctggccttgctgctccacgccgccaggccggacatccagatgacacagagccctagcagcctgtctgccagcgtgggagacagagtgaccatcacctgtagagccagccagagcgtgtccagctacctggcttggtatcagcagaagcctggcaaggcccctaagctgctgatctacgacgccagcaatagagccacaggcgtgcccagcagattttctggctctggcagcggcaccgacttcaccctgacaatatctagcctccagcctgaggacttcgccacctactactgtcagcagaggaccaactggcccctgacatttggccagggcaccaaggtggaaatcaagagactcgagagccagcctcacaccaagcccagcgtgttcgtgatgaagaacggcaccaacgtggcctgcctcgtgaaagagttctaccccaaggacatcaggatcaacctggtgtccagcaagaagatcaccgagttcgaccccgccatcgtgatctcccccagcggcaagtacaacgccgtgaagctggggaagtacgaggacagcaacagcgtgacctgctccgtgcagcacgacaacaagaccgtgcacagcaccgactttgaagtgaaaaccgactccaccgaccacgtgaagcccaaagagacagagaacaccaagcagcccagcaagagctgccacaagcccaaggccatcgtgcacaccgagaaagtgaacatgatgagcctgaccgtgctgggcctgcggatgctgttcgccaaaaccgtggccgtgaacttcctgctgaccgccaagctgttcttcctcagggccaagcgatctggatctggagcaacaaacttctcactactcaaacaagcaggtgacgtggaggagaatcccgggcctactagtatggactggatttggcgcatccttttccttgtcggcgctgctaccggcgcgcattccttcgaagaagttcagctggttgaatctggcggcggactggttcaacctggcggatctctgagactgagctgtgccgccagcggcttcaccttcagcagctacatcatgcactgggtccgacaggcccctggcaaaggacttgaatgggtcgccgtgatctcctacgacggcagaaacaaatactacgccgacagcgtgaagggcagattcaccatctccagagacaacagcaagaacaccctgtacctccagatgaactccctgagagccgaggacaccgccgtgtactactgtgccagagacaccgacggctacgacttcgattattggggccagggaaccctggtcaccgtgtcatctacgcgtgacaagcagctggacgccgacgtgtcccccaagcctaccatcttcctgccctctatcgccgagacaaagctccagaaggccggcacctacctgtgcctgctggaaaagttcttcccagatgtgattaagatccactggcaggaaaagaagtccaacaccatcctgggcagccaggaaggcaacaccatgaagaccaacgacacctacatgaagttcagctggctgaccgtgcccgagaagtccctggacaaagaacacagatgcatcgtgcggcacgaaaacaacaagaacggcgtggaccaggaaatcatcttcccacccatcaagaccgatgtgattacaatggaccccaaggacaactgctccaaggacgccaacgataccctgctgctccagctgaccaacaccagcgcctactacatgtacttgttgctgctgctgaagtccgtggtgtacttcgccatcatcacatgctgcctgctgcggagaaccgccttctgctgcaacggcgagaagtct

SEQ ID NO: 20076 - DNA, 2715 bp, synthetic construct
  source 1..2715: mol_type = other DNA
atggccttaccagtgaccgccttgctcctgccgctggccttgctgctccacgccgccaggccgctcgaggggaaaccaattcccaaccctcttctgggactggattcaaccggcagcggcgacaagcagctggacgccgacgtgtcccccaagcctaccatcttcctgccctctatcgccgagacaaagctccagaaggccggcacctacctgtgcctgctggaaaagttcttcccagatgtgattaagatccactggcaggaaaagaagtccaacaccatcctgggcagccaggaaggcaacaccatgaagaccaacgacacctacatgaagttcagctggctgaccgtgcccgagaagtccctggacaaagaacacagatgcatcgtgcggcacgaaaacaacaagaacggcgtggaccaggaaatcatcttcccacccatcaagaccgatgtgattacaatggaccccaaggacaactgctccaaggacgccaacgataccctgctgctccagctgaccaacaccagcgcctactacatgtacttgttgctgctgctgaagtccgtggtgtacttcgccatcatcacatgctgcctgctgcggagaaccgccttctgctgcaacggcgagaagtctagggccaagcgatctggatctggagcaacaaacttctcactactcaaacaagcaggtgacgtggaggagaatcccgggcctactagcatggccttaccagtgaccgccttgctcctgccgctggccttgctgctccacgccgccaggccggacatccagatgacacagagccctagcagcctgtctgccagcgtgggagacagagtgaccatcacctgtagagccagccagagcgtgtccagctacctggcttggtatcagcagaagcctggcaaggcccctaagctgctgatctacgacgccagcaatagagccacaggcgtgcccagcagattttctggctctggcagcggcaccgacttcaccctgacaatatctagcctccagcctgaggacttcgccacctactactgtcagcagaggaccaactggcccctgacatttggccagggcaccaaggtggaaatcaagagaggcggaggcggaagtggaggcggaggatctggcggcggaggctctgaagttcagctggttgaatctggcggcggactggttcaacctggcggatctctgagactgagctgtgccgccagcggcttcaccttcagcagctacatcatgcactgggtccgacaggcccctggcaaaggacttgaatgggtcgccgtgatctcctacgacggcagaaacaaatactacgccgacagcgtgaagggcagattcaccatctccagagacaacagcaagaacaccctgtacctccagatgaactccctgagagccgaggacaccgccgtgtactactgtgccagagacaccgacggctacgacttcgattattggggccagggaaccctggtcaccgtgtcatctacgcgtgagcagaaactgatctcggaagaggatgggagcggcagccagcctcacaccaagcccagcgtgttcgtgatgaagaacggcaccaacgtggcctgcctcgtgaaagagttctaccccaaggacatcaggatcaacctggtgtccagcaagaagatcaccgagttcgaccccgccatcgtgatctcccccagcggcaagtacaacgccgtgaagctggggaagtacgaggacagcaacagcgtgacctgctccgtgcagcacgacaacaagaccgtgcacagcaccgactttgaagtgaaaaccgactccaccgaccacgtgaagcccaaagagacagagaacaccaagcagcccagcaagagctgccacaagcccaaggccatcgtgcacaccgagaaagtgaacatgatgagcctgaccgtgctgggcctgcggatgctgttcgccaaaaccgtggccgtgaacttcctgctgaccgccaagctgttcttcctccgcgccaagagaagcggatctggcgtgaagcagaccctgaatttcgacctgctgaagctggctggcgacgtggaatccaacccaggcccttctagaggccatatgaccgagtacaagcccacggtgcgcctcgccacccgcgacgacgtccccagggccgtacgcaccctcgccgccgcgttcgccgactaccccgccacgcgccacaccgtcgatccggaccgccacatcgagcgggtcaccgagctgcaagaactcttcctcacgcgcgtcgggctcgacatcggcaaggtgtgggtcgcggacgacggcgccgcggtggcggtctggaccacgccggagagcgtcgaagcgggggcggtgttcgccgagatcggcccgcgcatggccgagttgagcggttcccggctggccgcgcagcaacagatggaaggcctcctggcgccgcaccggcccaaggagcccgcgtggttcctggccaccgtcggcgtctcgcccgaccaccagggcaagggtctgggcagcgccgtcgtgctccccggagtggaggcggccgagcgcgccggggtgcccgccttcctggagacctccgcgccccgcaacctccccttctacgagcggctcggcttcaccgtcaccgccgacgtcgaggtgcccgaaggaccgcgcacctggtgcatgacccgcaagcccggtgcctga

SEQ ID NO: 20077 - DNA, 3090 bp, synthetic construct
  source 1..3090: mol_type = other DNA
atggccttaccagtgaccgccttgctcctgccgctggccttgctgctccacgccgccaggccggacatccagatgacacagagccctagcagcctgtctgccagcgtgggagacagagtgaccatcacctgtagagccagccagagcgtgtccagctacctggcttggtatcagcagaagcctggcaaggcccctaagctgctgatctacgacgccagcaatagagccacaggcgtgcccagcagattttctggctctggcagcggcaccgacttcaccctgacaatatctagcctccagcctgaggacttcgccacctactactgtcagcagaggaccaactggcccctgacatttggccagggcaccaaggtggaaatcaagagaggacagcctaaggccaatcctaccgtgacactgttccctccaagcagcgaagaactccaggccaacaaggccacacttgtgtgcctgatctccgacttctaccctggggctgtgacagtggcttggaaggccgatggatctcctgtgaaagccggcgtggaaaccaccaagccatccaagcagagcaacaacaaatacgccgccagctcctacctgagcctgacacctgagcagtggaagtcccacagatcctacagctgccaagtgacccacgaaggcagcaccgtggaaaagacagtggcccctacagagtgcagcggatcccagagcttcggcctgctggaccccaagctgtgctacctgctggatggcatcctgttcatctacggcgtgatcctgaccgccctgttcctgagagtgaagttcagcagaagcgccgacgcccctgcctaccagcagggacagaaccaactgtacaacgagctgaacctgggcagacgggaagagtacgacgtgctggacaagcggagaggcagggaccctgagatgggcggaaagccccagcggagaaagaacccccaggaaggactgtataacgaactccagaaagacaagatggccgaagcctacagcgagatcggcatgaagggcgagcggagaagaggcaagggccacgatggcctgtaccagggcctgagcaccgccaccaaggacacctatgacgccctgcacatgcaggccctgcctccaagaagggccaagcgatctggatctggagcaacaaacttctcactactcaaacaagcaggtgacgtggaggagaatcccgggcctactagtatggactggatttggcgcatccttttccttgtcggcgctgctaccggcgcgcattccttcgaagaagttcagctggttgaatctggcggcggactggttcaacctggcggatctctgagactgagctgtgccgccagcggcttcaccttcagcagctacatcatgcactgggtccgacaggcccctggcaaaggacttgaatgggtcgccgtgatctcctacgacggcagaaacaaatactacgccgacagcgtgaagggcagattcaccatctccagagacaacagcaagaacaccctgtacctccagatgaactccctgagagccgaggacaccgccgtgtactactgtgccagagacaccgacggctacgacttcgattattggggccagggaaccctggtcaccgtgtcatctgcctctacaaagggaccctccgtgtttcctctggctcccagcagcaagtctacaagcggaggaacagccgctctgggctgcctggtcaaggattactttcccgagcctgtgaccgtgtcctggaatagcggagcactgacaagcggcgtgcacacctttccagccgtgctgcaaagcagcggcctgtactctctgagcagcgtggtcacagtgcctagctctagcctgggcacccagacctacatctgcaatgtgaaccacaagcctagcaacaccaaggtggacaagagagtggaacccaagagctgtggtacccagagttttgggttgttggaccctaaattgtgctatctgttggacggaatcctgttcatttacggagtgatcctgaccgcattgttcctgcgggttaagttttccagatccgcagacgcacccgcttaccaacaagggcagaaccaactctacaatgaacttaatttggggcggagggaagagtacgacgttctggacaaaaggaggggacgagatcccgagatgggcggaaagcctcagcgaaggaagaatccgcaagaggggctttataacgaactccagaaagataaaatggcagaagcctatagtgagattgggatgaagggagaaaggaggaggggtaaaggtcacgatgggttgtaccaaggattgagcacagccactaaagatacctatgatgcgctccacatgcaggccctgccgccaagacgcgccaagagaagcggatctggcgtgaagcagaccctgaatttcgacctgctgaagctggctggcgacgtggaatccaacccaggcccttctagaggccatatgaccgagtacaagcccacggtgcgcctcgccacccgcgacgacgtccccagggccgtacgcaccctcgccgccgcgttcgccgactaccccgccacgcgccacaccgtcgatccggaccgccacatcgagcgggtcaccgagctgcaagaactcttcctcacgcgcgtcgggctcgacatcggcaaggtgtgggtcgcggacgacggcgccgcggtggcggtctggaccacgccggagagcgtcgaagcgggggcggtgttcgccgagatcggcccgcgcatggccgagttgagcggttcccggctggccgcgcagcaacagatggaaggcctcctggcgccgcaccggcccaaggagcccgcgtggttcctggccaccgtcggcgtctcgcccgaccaccagggcaagggtctgggcagcgccgtcgtgctccccggagtggaggcggccgagcgcgccggggtgcccgccttcctggagacctccgcgccccgcaacctccccttctacgagcggctcggcttcaccgtcaccgccgacgtcgaggtgcccgaaggaccgcgcacctggtgcatgacccgcaagcccggtgcctga

SEQ ID NO: 20078 - DNA, 2445 bp, synthetic construct
  source 1..2445: mol_type = other DNA
atggccttaccagtgaccgccttgctcctgccgctggccttgctgctccacgccgccaggccggacatccagatgacacagagccctagcagcctgtctgccagcgtgggagacagagtgaccatcacctgtagagccagccagagcgtgtccagctacctggcttggtatcagcagaagcctggcaaggcccctaagctgctgatctacgacgccagcaatagagccacaggcgtgcccagcagattttctggctctggcagcggcaccgacttcaccctgacaatatctagcctccagcctgaggacttcgccacctactactgtcagcagaggaccaactggcccctgacatttggccagggcaccaaggtggaaatcaagagactcgaggacctgaagaacgtgttcccacctgaggtggccgtgttcgagcctagcgaggccgagatcagccacacccagaaagccaccctcgtgtgcctggctaccggcttctaccccgaccatgtggaactgtcttggtgggtcaacggcaaagaggtgcacagcggcgtgtctaccgacccccagccactgaaagaacagcccgccctgaacgacagccggtactgcctgagcagcagactgagagtgtccgccaccttctggcagaacccccggaaccacttcagatgccaggtgcagttctacggcctgagcgagaacgacgagtggacccaggacagagccaagcccgtgacccagatcgtgtctgccgaagcctggggcagagccgattgcggatcccagagcttcggcctgctggaccccaagctgtgctacctgctggatggcatcctgttcatctacggcgtgatcctgaccgccctgttcctgagagtgaagttcagcagaagcgccgacgcccctgcctaccagcagggacagaaccaactgtacaacgagctgaacctgggcagacgggaagagtacgacgtgctggacaagcggagaggcagggaccctgagatgggcggaaagccccagcggagaaagaacccccaggaaggactgtataacgaactccagaaagacaagatggccgaagcctacagcgagatcggcatgaagggcgagcggagaagaggcaagggccacgatggcctgtaccagggcctgagcaccgccaccaaggacacctatgacgccctgcacatgcaggccctgcctccaagaagggccaagcgatctggatctggagcaacaaacttctcactactcaaacaagcaggtgacgtggaggagaatcccgggcctactagtatggactggatttggcgcatccttttccttgtcggcgctgctaccggcgcgcattccttcgaagaagttcagctggttgaatctggcggcggactggttcaacctggcggatctctgagactgagctgtgccgccagcggcttcaccttcagcagctacatcatgcactgggtccgacaggcccctggcaaaggacttgaatgggtcgccgtgatctcctacgacggcagaaacaaatactacgccgacagcgtgaagggcagattcaccatctccagagacaacagcaagaacaccctgtacctccagatgaactccctgagagccgaggacaccgccgtgtactactgtgccagagacaccgacggctacgacttcgattattggggccagggaaccctggtcaccgtgtcatctacgcgtatccagaaccctgatcctgccgtgtaccagctgcgggatagcaagagcagcgacaagagcgtgtgtctgttcaccgacttcgacagccagaccaacgtgtcccagagcaaggactccgacgtgtacatcaccgataagaccgtgctggacatgcggagcatggacttcaagagcaactccgccgtggcctggtccaacaagtccgatttcgcctgcgccaacgccttcaacaacagcattatccccgaggacacattcttcccaagccccgagagcagctgcggtacccagagttttgggttgttggaccctaaattgtgctatctgttggacggaatcctgttcatttacggagtgatcctgaccgcattgttcctgcgggttaagttttccagatccgcagacgcacccgcttaccaacaagggcagaaccaactctacaatgaacttaatttggggcggagggaagagtacgacgttctggacaaaaggaggggacgagatcccgagatgggcggaaagcctcagcgaaggaagaatccgcaagaggggctttataacgaactccagaaagataaaatggcagaagcctatagtgagattgggatgaagggagaaaggaggaggggtaaaggtcacgatgggttgtaccaaggattgagcacagccactaaagatacctatgatgcgctccacatgcaggccctgccgccaaga

SEQ ID NO: 20079 - DNA, 2445 bp, synthetic construct
  source 1..2445: mol_type = other DNA
atggccttaccagtgaccgccttgctcctgccgctggccttgctgctccacgccgccaggccggacatccagatgacacagagccctagcagcctgtctgccagcgtgggagacagagtgaccatcacctgtagagccagccagagcgtgtccagctacctggcttggtatcagcagaagcctggcaaggcccctaagctgctgatctacgacgccagcaatagagccacaggcgtgcccagcagattttctggctctggcagcggcaccgacttcaccctgacaatatctagcctccagcctgaggacttcgccacctactactgtcagcagaggaccaactggcccctgacatttggccagggcaccaaggtggaaatcaagagactcgaggacctgaagaacgtgttcccacctgaggtggccgtgttcgagcctagcaaggccgagatcgcccacacccagaaagccaccctcgtgtgcctggctaccggcttctaccccgaccatgtggaactgtcttggtgggtcaacggcaaagaggtgcacagcggcgtgtgtaccgacccccagccactgaaagaacagcccgccctgaacgacagccggtactgcctgagcagcagactgagagtgtccgccaccttctggcagaacccccggaaccacttcagatgccaggtgcagttctacggcctgagcgagaacgacgagtggacccaggacagagccaagcccgtgacccagatcgtgtctgccgaagcctggggcagagccgattgcggatcccagagcttcggcctgctggaccccaagctgtgctacctgctggatggcatcctgttcatctacggcgtgatcctgaccgccctgttcctgagagtgaagttcagcagaagcgccgacgcccctgcctaccagcagggacagaaccaactgtacaacgagctgaacctgggcagacgggaagagtacgacgtgctggacaagcggagaggcagggaccctgagatgggcggaaagccccagcggagaaagaacccccaggaaggactgtataacgaactccagaaagacaagatggccgaagcctacagcgagatcggcatgaagggcgagcggagaagaggcaagggccacgatggcctgtaccagggcctgagcaccgccaccaaggacacctatgacgccctgcacatgcaggccctgcctccaagaagggccaagcgatctggatctggagcaacaaacttctcactactcaaacaagcaggtgacgtggaggagaatcccgggcctactagtatggactggatttggcgcatccttttccttgtcggcgctgctaccggcgcgcattccttcgaagaagttcagctggttgaatctggcggcggactggttcaacctggcggatctctgagactgagctgtgccgccagcggcttcaccttcagcagctacatcatgcactgggtccgacaggcccctggcaaaggacttgaatgggtcgccgtgatctcctacgacggcagaaacaaatactacgccgacagcgtgaagggcagattcaccatctccagagacaacagcaagaacaccctgtacctccagatgaactccctgagagccgaggacaccgccgtgtactactgtgccagagacaccgacggctacgacttcgattattggggccagggaaccctggtcaccgtgtcatctacgcgtatccagaaccctgatcctgccgtgtaccagctgcgggatagcaagagcagcgacaagagcgtgtgtctgttcaccgacttcgacagccagaccaacgtgtcccagagcaaggactccgacgtgtacatcaccgataagtgcgtgctggacatgcggagcatggacttcaagagcaactccgccgtggcctggtccaacaagtccgatttcgcctgcgccaacgccttcaacaacagcattatccccgaggacacattcttcccaagcagcgacgtgccctgcggtacccagagttttgggttgttggaccctaaattgtgctatctgttggacggaatcctgttcatttacggagtgatcctgaccgcattgttcctgcgggttaagttttccagatccgcagacgcacccgcttaccaacaagggcagaaccaactctacaatgaacttaatttggggcggagggaagagtacgacgttctggacaaaaggaggggacgagatcccgagatgggcggaaagcctcagcgaaggaagaatccgcaagaggggctttataacgaactccagaaagataaaatggcagaagcctatagtgagattgggatgaagggagaaaggaggaggggtaaaggtcacgatgggttgtaccaaggattgagcacagccactaaagatacctatgatgcgctccacatgcaggccctgccgccaaga

SEQ ID NO: 20080 - DNA, 2658 bp, synthetic construct
  source 1..2658: mol_type = other DNA
atggccttaccagtgaccgccttgctcctgccgctggccttgctgctccacgccgccaggccggacatccagatgacacagagccctagcagcctgtctgccagcgtgggagacagagtgaccatcacctgtagagccagccagagcgtgtccagctacctggcttggtatcagcagaagcctggcaaggcccctaagctgctgatctacgacgccagcaatagagccacaggcgtgcccagcagattttctggctctggcagcggcaccgacttcaccctgacaatatctagcctccagcctgaggacttcgccacctactactgtcagcagaggaccaactggcccctgacatttggccagggcaccaaggtggaaatcaagagactcgaggggaaaccaattcccaaccctcttctgggactggattcaaccggcagcggcgaggacctgaagaacgtgttcccacctgaggtggccgtgttcgagcctagcgaggccgagatcagccacacccagaaagccaccctcgtgtgcctggctaccggcttctaccccgaccatgtggaactgtcttggtgggtcaacggcaaagaggtgcacagcggcgtgtctaccgacccccagccactgaaagaacagcccgccctgaacgacagccggtactgcctgagcagcagactgagagtgtccgccaccttctggcagaacccccggaaccacttcagatgccaggtgcagttctacggcctgagcgagaacgacgagtggacccaggacagagccaagcccgtgacccagatcgtgtctgccgaagcctggggcagagccgattgcggatcccagagcttcggcctgctggaccccaagctgtgctacctgctggatggcatcctgttcatctacggcgtgatcctgaccgccctgttcctgagagtgaagttcagcagaagcgccgacgcccctgcctaccagcagggacagaaccaactgtacaacgagctgaacctgggcagacgggaagagtacgacgtgctggacaagcggagaggcagggaccctgagatgggcggaaagccccagcggagaaagaacccccaggaaggactgtataacgaactccagaaagacaagatggccgaagcctacagcgagatcggcatgaagggcgagcggagaagaggcaagggccacgatggcctgtaccagggcctgagcaccgccaccaaggacacctatgacgccctgcacatgcaggccctgcctccaagaagggccaagcgatctggatctggagcaacaaacttctcactactcaaacaagcaggtgacgtggaggagaatcccgggcctactagtatggactggatttggcgcatccttttccttgtcggcgctgctaccggcgcgcattccttcgaagaagttcagctggttgaatctggcggcggactggttcaacctggcggatctctgagactgagctgtgccgccagcggcttcaccttcagcagctacatcatgcactgggtccgacaggcccctggcaaaggacttgaatgggtcgccgtgatctcctacgacggcagaaacaaatactacgccgacagcgtgaagggcagattcaccatctccagagacaacagcaagaacaccctgtacctccagatgaactccctgagagccgaggacaccgccgtgtactactgtgccagagacaccgacggctacgacttcgattattggggccagggaaccctggtcaccgtgtcatctacgcgtgagcagaaactgatctcggaagaggatgggagcggcatccagaaccctgatcctgccgtgtaccagctgcgggatagcaagagcagcgacaagagcgtgtgtctgttcaccgacttcgacagccagaccaacgtgtcccagagcaaggactccgacgtgtacatcaccgataagaccgtgctggacatgcggagcatggacttcaagagcaactccgccgtggcctggtccaacaagtccgatttcgcctgcgccaacgccttcaacaacagcattatccccgaggacacattcttcccaagccccgagagcagctgcggtacccagagttttgggttgttggaccctaaattgtgctatctgttggacggaatcctgttcatttacggagtgatcctgaccgcattgttcctgaggagcaagcggtcacggctgctccacagcgattacatgaatatgacaccacgaagaccgggtcctactcgcaaacactaccaaccctacgcacctccccgcgactttgcagcgtaccgatctcgggttaagttttccagatccgcagacgcacccgcttaccaacaagggcagaaccaactctacaatgaacttaatttggggcggagggaagagtacgacgttctggacaaaaggaggggacgagatcccgagatgggcggaaagcctcagcgaaggaagaatccgcaagaggggctttataacgaactccagaaagataaaatggcagaagcctatagtgagattgggatgaagggagaaaggaggaggggtaaaggtcacgatgggttgtaccaaggattgagcacagccactaaagatacctatgatgcgctccacatgcaggccctgccgccaaga

SEQ ID NO: 20081 - DNA, 2781 bp, synthetic construct
  source 1..2781: mol_type = other DNA
atggccttaccagtgaccgccttgctcctgccgctggccttgctgctccacgccgccaggccggacatccagatgacacagagccctagcagcctgtctgccagcgtgggagacagagtgaccatcacctgtagagccagccagagcgtgtccagctacctggcttggtatcagcagaagcctggcaaggcccctaagctgctgatctacgacgccagcaatagagccacaggcgtgcccagcagattttctggctctggcagcggcaccgacttcaccctgacaatatctagcctccagcctgaggacttcgccacctactactgtcagcagaggaccaactggcccctgacatttggccagggcaccaaggtggaaatcaagagactcgaggggaaaccaattcccaaccctcttctgggactggattcaaccggcagcggcgaggacctgaagaacgtgttcccacctgaggtggccgtgttcgagcctagcgaggccgagatcagccacacccagaaagccaccctcgtgtgcctggctaccggcttctaccccgaccatgtggaactgtcttggtgggtcaacggcaaagaggtgcacagcggcgtgtctaccgacccccagccactgaaagaacagcccgccctgaacgacagccggtactgcctgagcagcagactgagagtgtccgccaccttctggcagaacccccggaaccacttcagatgccaggtgcagttctacggcctgagcgagaacgacgagtggacccaggacagagccaagcccgtgacccagatcgtgtctgccgaagcctggggcagagccgattgcggatcccagagcttcggcctgctggaccccaagctgtgctacctgctggatggcatcctgttcatctacggcgtgatcctgaccgccctgttcctgaggagtaagaggagcaggctcctgcacagtgactacatgaacatgactccacgccgccccggacccacccgcaagcattaccagccctatgccccaccacgcgacttcgcagcctatcgctccagagtgaagttcagcagaagcgccgacgcccctgcctaccagcagggacagaaccaactgtacaacgagctgaacctgggcagacgggaagagtacgacgtgctggacaagcggagaggcagggaccctgagatgggcggaaagccccagcggagaaagaacccccaggaaggactgtataacgaactccagaaagacaagatggccgaagcctacagcgagatcggcatgaagggcgagcggagaagaggcaagggccacgatggcctgtaccagggcctgagcaccgccaccaaggacacctatgacgccctgcacatgcaggccctgcctccaagaagggccaagcgatctggatctggagcaacaaacttctcactactcaaacaagcaggtgacgtggaggagaatcccgggcctactagtatggactggatttggcgcatccttttccttgtcggcgctgctaccggcgcgcattccttcgaagaagttcagctggttgaatctggcggcggactggttcaacctggcggatctctgagactgagctgtgccgccagcggcttcaccttcagcagctacatcatgcactgggtccgacaggcccctggcaaaggacttgaatgggtcgccgtgatctcctacgacggcagaaacaaatactacgccgacagcgtgaagggcagattcaccatctccagagacaacagcaagaacaccctgtacctccagatgaactccctgagagccgaggacaccgccgtgtactactgtgccagagacaccgacggctacgacttcgattattggggccagggaaccctggtcaccgtgtcatctacgcgtgagcagaaactgatctcggaagaggatgggagcggcatccagaaccctgatcctgccgtgtaccagctgcgggatagcaagagcagcgacaagagcgtgtgtctgttcaccgacttcgacagccagaccaacgtgtcccagagcaaggactccgacgtgtacatcaccgataagaccgtgctggacatgcggagcatggacttcaagagcaactccgccgtggcctggtccaacaagtccgatttcgcctgcgccaacgccttcaacaacagcattatccccgaggacacattcttcccaagccccgagagcagctgcggtacccagagttttgggttgttggaccctaaattgtgctatctgttggacggaatcctgttcatttacggagtgatcctgaccgcattgttcctgaggagcaagcggtcacggctgctccacagcgattacatgaatatgacaccacgaagaccgggtcctactcgcaaacactaccaaccctacgcacctccccgcgactttgcagcgtaccgatctcgggttaagttttccagatccgcagacgcacccgcttaccaacaagggcagaaccaactctacaatgaacttaatttggggcggagggaagagtacgacgttctggacaaaaggaggggacgagatcccgagatgggcggaaagcctcagcgaaggaagaatccgcaagaggggctttataacgaactccagaaagataaaatggcagaagcctatagtgagattgggatgaagggagaaaggaggaggggtaaaggtcacgatgggttgtaccaaggattgagcacagccactaaagatacctatgatgcgctccacatgcaggccctgccgccaaga

SEQ ID NO: 20082 - DNA, 2664 bp, synthetic construct
  source 1..2664: mol_type = other DNA
atggccttaccagtgaccgccttgctcctgccgctggccttgctgctccacgccgccaggccggacatccagatgacacagagccctagcagcctgtctgccagcgtgggagacagagtgaccatcacctgtagagccagccagagcgtgtccagctacctggcttggtatcagcagaagcctggcaaggcccctaagctgctgatctacgacgccagcaatagagccacaggcgtgcccagcagattttctggctctggcagcggcaccgacttcaccctgacaatatctagcctccagcctgaggacttcgccacctactactgtcagcagaggaccaactggcccctgacatttggccagggcaccaaggtggaaatcaagagactcgaggggaaaccaattcccaaccctcttctgggactggattcaaccggcagcggcgaggacctgaagaacgtgttcccacctgaggtggccgtgttcgagcctagcgaggccgagatcagccacacccagaaagccaccctcgtgtgcctggctaccggcttctaccccgaccatgtggaactgtcttggtgggtcaacggcaaagaggtgcacagcggcgtgtctaccgacccccagccactgaaagaacagcccgccctgaacgacagccggtactgcctgagcagcagactgagagtgtccgccaccttctggcagaacccccggaaccacttcagatgccaggtgcagttctacggcctgagcgagaacgacgagtggacccaggacagagccaagcccgtgacccagatcgtgtctgccgaagcctggggcagagccgattgcggatcccagagcttcggcctgctggaccccaagctgtgctacctgctggatggcatcctgttcatctacggcgtgatcctgaccgccctgttcctgagagtgaagttcagcagaagcgccgacgcccctgcctaccagcagggacagaaccaactgtacaacgagctgaacctgggcagacgggaagagtacgacgtgctggacaagcggagaggcagggaccctgagatgggcggaaagccccagcggagaaagaacccccaggaaggactgtataacgaactccagaaagacaagatggccgaagcctacagcgagatcggcatgaagggcgagcggagaagaggcaagggccacgatggcctgtaccagggcctgagcaccgccaccaaggacacctatgacgccctgcacatgcaggccctgcctccaagaagggccaagcgatctggatctggagcaacaaacttctcactactcaaacaagcaggtgacgtggaggagaatcccgggcctactagtatggactggatttggcgcatccttttccttgtcggcgctgctaccggcgcgcattccttcgaagaagttcagctggttgaatctggcggcggactggttcaacctggcggatctctgagactgagctgtgccgccagcggcttcaccttcagcagctacatcatgcactgggtccgacaggcccctggcaaaggacttgaatgggtcgccgtgatctcctacgacggcagaaacaaatactacgccgacagcgtgaagggcagattcaccatctccagagacaacagcaagaacaccctgtacctccagatgaactccctgagagccgaggacaccgccgtgtactactgtgccagagacaccgacggctacgacttcgattattggggccagggaaccctggtcaccgtgtcatctacgcgtgagcagaaactgatctcggaagaggatctggggagcggcatccagaaccctgatcctgccgtgtaccagctgcgggatagcaagagcagcgacaagagcgtgtgtctgttcaccgacttcgacagccagaccaacgtgtcccagagcaaggactccgacgtgtacatcaccgataagaccgtgctggacatgcggagcatggacttcaagagcaactccgccgtggcctggtccaacaagtccgatttcgcctgcgccaacgccttcaacaacagcattatccccgaggacacattcttcccaagccccgagagcagctgcggtacccagagttttgggttgttggaccctaaattgtgctatctgttggacggaatcctgttcatttacggagtgatcctgaccgcattgttcctgaagagaggccggaagaagctgctgtacatcttcaagcagcctttcatgcggcccgtgcagaccacccaggaagaggacggctgctcctgccggttccccgaggaagaagaaggcggctgcgagctgcgggttaagttttccagatccgcagacgcacccgcttaccaacaagggcagaaccaactctacaatgaacttaatttggggcggagggaagagtacgacgttctggacaaaaggaggggacgagatcccgagatgggcggaaagcctcagcgaaggaagaatccgcaagaggggctttataacgaactccagaaagataaaatggcagaagcctatagtgagattgggatgaagggagaaaggaggaggggtaaaggtcacgatgggttgtaccaaggattgagcacagccactaaagatacctatgatgcgctccacatgcaggccctgccgccaaga

SEQ ID NO: 20083 - DNA, 2790 bp, synthetic construct
  source 1..2790: mol_type = other DNA
atggccttaccagtgaccgccttgctcctgccgctggccttgctgctccacgccgccaggccggacatccagatgacacagagccctagcagcctgtctgccagcgtgggagacagagtgaccatcacctgtagagccagccagagcgtgtccagctacctggcttggtatcagcagaagcctggcaaggcccctaagctgctgatctacgacgccagcaatagagccacaggcgtgcccagcagattttctggctctggcagcggcaccgacttcaccctgacaatatctagcctccagcctgaggacttcgccacctactactgtcagcagaggaccaactggcccctgacatttggccagggcaccaaggtggaaatcaagagactcgaggggaaaccaattcccaaccctcttctgggactggattcaaccggcagcggcgaggacctgaagaacgtgttcccacctgaggtggccgtgttcgagcctagcgaggccgagatcagccacacccagaaagccaccctcgtgtgcctggctaccggcttctaccccgaccatgtggaactgtcttggtgggtcaacggcaaagaggtgcacagcggcgtgtctaccgacccccagccactgaaagaacagcccgccctgaacgacagccggtactgcctgagcagcagactgagagtgtccgccaccttctggcagaacccccggaaccacttcagatgccaggtgcagttctacggcctgagcgagaacgacgagtggacccaggacagagccaagcccgtgacccagatcgtgtctgccgaagcctggggcagagccgattgcggatcccagagcttcggcctgctggaccccaagctgtgctacctgctggatggcatcctgttcatctacggcgtgatcctgaccgccctgttcctgaaacggggcagaaagaaactcctgtatatattcaaacaaccatttatgagaccagtacaaactactcaagaggaagatggctgtagctgccgatttccagaagaagaagaaggaggatgtgaactgagagtgaagttcagcagaagcgccgacgcccctgcctaccagcagggacagaaccaactgtacaacgagctgaacctgggcagacgggaagagtacgacgtgctggacaagcggagaggcagggaccctgagatgggcggaaagccccagcggagaaagaacccccaggaaggactgtataacgaactccagaaagacaagatggccgaagcctacagcgagatcggcatgaagggcgagcggagaagaggcaagggccacgatggcctgtaccagggcctgagcaccgccaccaaggacacctatgacgccctgcacatgcaggccctgcctccaagaagggccaagcgatctggatctggagcaacaaacttctcactactcaaacaagcaggtgacgtggaggagaatcccgggcctactagtatggactggatttggcgcatccttttccttgtcggcgctgctaccggcgcgcattccttcgaagaagttcagctggttgaatctggcggcggactggttcaacctggcggatctctgagactgagctgtgccgccagcggcttcaccttcagcagctacatcatgcactgggtccgacaggcccctggcaaaggacttgaatgggtcgccgtgatctcctacgacggcagaaacaaatactacgccgacagcgtgaagggcagattcaccatctccagagacaacagcaagaacaccctgtacctccagatgaactccctgagagccgaggacaccgccgtgtactactgtgccagagacaccgacggctacgacttcgattattggggccagggaaccctggtcaccgtgtcatctacgcgtgagcagaaactgatctcggaagaggatctggggagcggcatccagaaccctgatcctgccgtgtaccagctgcgggatagcaagagcagcgacaagagcgtgtgtctgttcaccgacttcgacagccagaccaacgtgtcccagagcaaggactccgacgtgtacatcaccgataagaccgtgctggacatgcggagcatggacttcaagagcaactccgccgtggcctggtccaacaagtccgatttcgcctgcgccaacgccttcaacaacagcattatccccgaggacacattcttcccaagccccgagagcagctgcggtacccagagttttgggttgttggaccctaaattgtgctatctgttggacggaatcctgttcatttacggagtgatcctgaccgcattgttcctgaagagaggccggaagaagctgctgtacatcttcaagcagcctttcatgcggcccgtgcagaccacccaggaagaggacggctgctcctgccggttccccgaggaagaagaaggcggctgcgagctgcgggttaagttttccagatccgcagacgcacccgcttaccaacaagggcagaaccaactctacaatgaacttaatttggggcggagggaagagtacgacgttctggacaaaaggaggggacgagatcccgagatgggcggaaagcctcagcgaaggaagaatccgcaagaggggctttataacgaactccagaaagataaaatggcagaagcctatagtgagattgggatgaagggagaaaggaggaggggtaaaggtcacgatgggttgtaccaaggattgagcacagccactaaagatacctatgatgcgctccacatgcaggccctgccgccaaga

SEQ ID NO: 20084 - DNA, 2463 bp, synthetic construct
  source 1..2463: mol_type = other DNA
atggccttaccagtgaccgccttgctcctgccgctggccttgctgctccacgccgccaggccggacatccagatgacacagagccctagcagcctgtctgccagcgtgggagacagagtgaccatcacctgtagagccagccagagcgtgtccagctacctggcttggtatcagcagaagcctggcaaggcccctaagctgctgatctacgacgccagcaatagagccacaggcgtgcccagcagattttctggctctggcagcggcaccgacttcaccctgacaatatctagcctccagcctgaggacttcgccacctactactgtcagcagaggaccaactggcccctgacatttggccagggcaccaaggtggaaatcaagagactcgagcagagcttcggcctgctggaccccaagctgtgctacctgctggatggcatcctgttcatctacggcgtgatcctgaccgccctgttcctgagagtgaagttcagcagaagcgccgacgcccctgcctaccagcagggacagaaccaactgtacaacgagctgaacctgggcagacgggaagagtacgacgtgctggacaagcggagaggcagggaccctgagatgggcggaaagccccagcggagaaagaacccccaggaaggactgtataacgaactccagaaagacaagatggccgaagcctacagcgagatcggcatgaagggcgagcggagaagaggcaagggccacgatggcctgtaccagggcctgagcaccgccaccaaggacacctatgacgccctgcacatgcaggccctgcctccaagaagggccaagcgatctggatctggagcaacaaacttctcactactcaaacaagcaggtgacgtggaggagaatcccgggcctactagtatggactggatttggcgcatccttttccttgtcggcgctgctaccggcgcgcattccttcgaagaagttcagctggttgaatctggcggcggactggttcaacctggcggatctctgagactgagctgtgccgccagcggcttcaccttcagcagctacatcatgcactgggtccgacaggcccctggcaaaggacttgaatgggtcgccgtgatctcctacgacggcagaaacaaatactacgccgacagcgtgaagggcagattcaccatctccagagacaacagcaagaacaccctgtacctccagatgaactccctgagagccgaggacaccgccgtgtactactgtgccagagacaccgacggctacgacttcgattattggggccagggaaccctggtcaccgtgtcatctacgcgtcagagttttgggttgttggaccctaaattgtgctatctgttggacggaatcctgttcatttacggagtgatcctgaccgcattgttcctgcgggttaagttttccagatccgcagacgcacccgcttaccaacaagggcagaaccaactctacaatgaacttaatttggggcggagggaagagtacgacgttctggacaaaaggaggggacgagatcccgagatgggcggaaagcctcagcgaaggaagaatccgcaagaggggctttataacgaactccagaaagataaaatggcagaagcctatagtgagattgggatgaagggagaaaggaggaggggtaaaggtcacgatgggttgtaccaaggattgagcacagccactaaagatacctatgatgcgctccacatgcaggccctgccgccaagacgcgccaagagaagcggatctggcgtgaagcagaccctgaatttcgacctgctgaagctggctggcgacgtggaatccaacccaggcccttctagaggccatatgaccgagtacaagcccacggtgcgcctcgccacccgcgacgacgtccccagggccgtacgcaccctcgccgccgcgttcgccgactaccccgccacgcgccacaccgtcgatccggaccgccacatcgagcgggtcaccgagctgcaagaactcttcctcacgcgcgtcgggctcgacatcggcaaggtgtgggtcgcggacgacggcgccgcggtggcggtctggaccacgccggagagcgtcgaagcgggggcggtgttcgccgagatcggcccgcgcatggccgagttgagcggttcccggctggccgcgcagcaacagatggaaggcctcctggcgccgcaccggcccaaggagcccgcgtggttcctggccaccgtcggcgtctcgcccgaccaccagggcaagggtctgggcagcgccgtcgtgctccccggagtggaggcggccgagcgcgccggggtgcccgccttcctggagacctccgcgccccgcaacctccccttctacgagcggctcggcttcaccgtcaccgccgacgtcgaggtgcccgaaggaccgcgcacctggtgcatgacccgcaagcccggtgcctga

SEQ ID NO: 20085 - DNA, 1935 bp, synthetic construct
  source 1..1935: mol_type = other DNA
atggccttaccagtgaccgccttgctcctgccgctggccttgctgctccacgccgccaggccggacatccagatgacacagagccctagcagcctgtctgccagcgtgggagacagagtgaccatcacctgtagagccagccagagcgtgtccagctacctggcttggtatcagcagaagcctggcaaggcccctaagctgctgatctacgacgccagcaatagagccacaggcgtgcccagcagattttctggctctggcagcggcaccgacttcaccctgacaatatctagcctccagcctgaggacttcgccacctactactgtcagcagaggaccaactggcccctgacatttggccagggcaccaaggtggaaatcaagagactcgagggacagcctaaggccaatcctaccgtgacactgttccctccaagcagcgaagaactccaggccaacaaggccacacttgtgtgcctgatctccgacttctaccctggggctgtgacagtggcttggaaggccgatggatctcctgtgaaagccggcgtggaaaccaccaagccatccaagcagagcaacaacaaatacgccgccagctcctacctgagcctgacacctgagcagtggaagtcccacagatcctacagctgccaagtgacccacgaaggcagcaccgtggaaaagacagtggcccctacagagtgcagccccatcaagaccgatgtgattacaatggaccccaaggacaactgctccaaggacgccaacgataccctgctgctccagctgaccaacaccagcgcctactacatgtacttgttgctgctgctgaagtccgtggtgtacttcgccatcatcacatgctgcctgctgcggagaaccgccttctgctgcaacggcgagaagtctagggccaagcgatctggatctggagcaacaaacttctcactactcaaacaagcaggtgacgtggaggagaatcccgggcctactagtatggactggatttggcgcatccttttccttgtcggcgctgctaccggcgcgcattccttcgaagaagttcagctggttgaatctggcggcggactggttcaacctggcggatctctgagactgagctgtgccgccagcggcttcaccttcagcagctacatcatgcactgggtccgacaggcccctggcaaaggacttgaatgggtcgccgtgatctcctacgacggcagaaacaaatactacgccgacagcgtgaagggcagattcaccatctccagagacaacagcaagaacaccctgtacctccagatgaactccctgagagccgaggacaccgccgtgtactactgtgccagagacaccgacggctacgacttcgattattggggccagggaaccctggtcaccgtgtcatctacgcgtgcctctacaaagggaccctccgtgtttcctctggctcccagcagcaagtctacaagcggaggaacagccgctctgggctgcctggtcaaggattactttcccgagcctgtgaccgtgtcctggaatagcggagcactgacaagcggcgtgcacacctttccagccgtgctgcaaagcagcggcctgtactctctgagcagcgtggtcacagtgcctagctctagcctgggcacccagacctacatctgcaatgtgaaccacaagcctagcaacaccaaggtggacaagagagtggaacccaagagctgtgaagtgaaaaccgactccaccgaccacgtgaagcccaaagagacagagaacaccaagcagcccagcaagagctgccacaagcccaaggccatcgtgcacaccgagaaagtgaacatgatgagcctgaccgtgctgggcctgcggatgctgttcgccaaaaccgtggccgtgaacttcctgctgaccgccaagctgttcttcctc

SEQ ID NO: 20086 - DNA, 1869 bp, synthetic construct
  source 1..1869: mol_type = other DNA
atggccttaccagtgaccgccttgctcctgccgctggccttgctgctccacgccgccaggccggacatccagatgacacagagccctagcagcctgtctgccagcgtgggagacagagtgaccatcacctgtagagccagccagagcgtgtccagctacctggcttggtatcagcagaagcctggcaaggcccctaagctgctgatctacgacgccagcaatagagccacaggcgtgcccagcagattttctggctctggcagcggcaccgacttcaccctgacaatatctagcctccagcctgaggacttcgccacctactactgtcagcagaggaccaactggcccctgacatttggccagggcaccaaggtggaaatcaagagactcgagggacagcctaaggccaatcctaccgtgacactgttccctccaagcagcgaagaactccaggccaacaaggccacacttgtgtgcctgatctccgacttctaccctggggctgtgacagtggcttggaaggccgatggatctcctgtgaaagccggcgtggaaaccaccaagccatccaagcagagcaacaacaaatacgccgccagctcctacctgagcctgacacctgagcagtggaagtcccacagatcctacagctgccaagtgacccacgaaggcagcaccgtggaaaagacagtggcccctacagagtgcagcggcagagccgattgcggcatcaccagcgccagctaccaccagggcgtgctgagcgccaccatcctgtacgagatcctgctgggcaaggccaccctgtacgccgtgctggtgtctgccctggtgctgatggctatggtcaagcggaaggacagccggggaagggccaagcgatctggatctggagcaacaaacttctcactactcaaacaagcaggtgacgtggaggagaatcccgggcctactagtatggactggatttggcgcatccttttccttgtcggcgctgctaccggcgcgcattccttcgaagaagttcagctggttgaatctggcggcggactggttcaacctggcggatctctgagactgagctgtgccgccagcggcttcaccttcagcagctacatcatgcactgggtccgacaggcccctggcaaaggacttgaatgggtcgccgtgatctcctacgacggcagaaacaaatactacgccgacagcgtgaagggcagattcaccatctccagagacaacagcaagaacaccctgtacctccagatgaactccctgagagccgaggacaccgccgtgtactactgtgccagagacaccgacggctacgacttcgattattggggccagggaaccctggtcaccgtgtcatctacgcgtgcctctacaaagggaccctccgtgtttcctctggctcccagcagcaagtctacaagcggaggaacagccgctctgggctgcctggtcaaggattactttcccgagcctgtgaccgtgtcctggaatagcggagcactgacaagcggcgtgcacacctttccagccgtgctgcaaagcagcggcctgtactctctgagcagcgtggtcacagtgcctagctctagcctgggcacccagacctacatctgcaatgtgaaccacaagcctagcaacaccaaggtggacaagagagtggaacccaagagctgtatccccgaggacacattcttcccaagcagcgacgtgccctgcgacgtgaagctggtggaaaagagcttcgagacagacaccaacctgaacttccagaacctgagcgtgatcggcttcagaatcctgctgctgaaagtggccggctttaacctgctgatgaccctgcggctgtggtccagc

SEQ ID NO: 20087 - DNA, 1869 bp, synthetic construct
  source 1..1869: mol_type = other DNA
atggccttaccagtgaccgccttgctcctgccgctggccttgctgctccacgccgccaggccggacatccagatgacacagagccctagcagcctgtctgccagcgtgggagacagagtgaccatcacctgtagagccagccagagcgtgtccagctacctggcttggtatcagcagaagcctggcaaggcccctaagctgctgatctacgacgccagcaatagagccacaggcgtgcccagcagattttctggctctggcagcggcaccgacttcaccctgacaatatctagcctccagcctgaggacttcgccacctactactgtcagcagaggaccaactggcccctgacatttggccagggcaccaaggtggaaatcaagagactcgagggacagcctaaggccaatcctaccgtgacactgttccctccaagcagcgaagaactccaggccaacaaggccacacttgtgtgcctgatctccgacttctaccctggggctgtgacagtggcttggaaggccgatggatctcctgtgaaagccggcgtggaaaccaccaagccatccaagcagagcaacaacaaatacgccgccagctcctacctgagcctgacacctgagcagtggaagtcccacagatcctacagctgccaagtgacccacgaaggcagcaccgtggaaaagacagtggcccctacagagtgcagcggcagagccgattgcggctttaccagcgagagctaccagcagggcgtgctgagcgccaccatcctgtacgagatcctgctgggcaaggccaccctgtacgccgtgctggtgtctgccctggtgctgatggctatggtcaagcggaaggacagccggggaagggccaagcgatctggatctggagcaacaaacttctcactactcaaacaagcaggtgacgtggaggagaatcccgggcctactagtatggactggatttggcgcatccttttccttgtcggcgctgctaccggcgcgcattccttcgaagaagttcagctggttgaatctggcggcggactggttcaacctggcggatctctgagactgagctgtgccgccagcggcttcaccttcagcagctacatcatgcactgggtccgacaggcccctggcaaaggacttgaatgggtcgccgtgatctcctacgacggcagaaacaaatactacgccgacagcgtgaagggcagattcaccatctccagagacaacagcaagaacaccctgtacctccagatgaactccctgagagccgaggacaccgccgtgtactactgtgccagagacaccgacggctacgacttcgattattggggccagggaaccctggtcaccgtgtcatctacgcgtgcctctacaaagggaccctccgtgtttcctctggctcccagcagcaagtctacaagcggaggaacagccgctctgggctgcctggtcaaggattactttcccgagcctgtgaccgtgtcctggaatagcggagcactgacaagcggcgtgcacacctttccagccgtgctgcaaagcagcggcctgtactctctgagcagcgtggtcacagtgcctagctctagcctgggcacccagacctacatctgcaatgtgaaccacaagcctagcaacaccaaggtggacaagagagtggaacccaagagctgtatccccgaggacacattcttcccaagccccgagagcagctgcgacgtgaagctggtggaaaagagcttcgagacagacaccaacctgaacttccagaacctgagcgtgatcggcttcagaatcctgctgctgaaagtggccggctttaacctgctgatgaccctgcggctgtggtccagc

SEQ ID NO: 20088 - DNA, 1347 bp, synthetic construct
  source 1..1347: mol_type = other DNA
atggccttaccagtgaccgccttgctcctgccgctggccttgctgctccacgccgccaggccggacatccagatgacacagagccctagcagcctgtctgccagcgtgggagacagagtgaccatcacctgtagagccagccagagcgtgtccagctacctggcttggtatcagcagaagcctggcaaggcccctaagctgctgatctacgacgccagcaatagagccacaggcgtgcccagcagattttctggctctggcagcggcaccgacttcaccctgacaatatctagcctccagcctgaggacttcgccacctactactgtcagcagaggaccaactggcccctgacatttggccagggcaccaaggtggaaatcaagagaggcggaggcggaagtggaggcggaggatctggcggcggaggctctgaagttcagctggttgaatctggcggcggactggttcaacctggcggatctctgagactgagctgtgccgccagcggcttcaccttcagcagctacatcatgcactgggtccgacaggcccctggcaaaggacttgaatgggtcgccgtgatctcctacgacggcagaaacaaatactacgccgacagcgtgaagggcagattcaccatctccagagacaacagcaagaacaccctgtacctccagatgaactccctgagagccgaggacaccgccgtgtactactgtgccagagacaccgacggctacgacttcgattattggggccagggaaccctggtcaccgtgtcatctacgcgtgacggtaacgaggagatgggaggaatcactcaaaccccttacaaagtctcaatttcaggaacaactgttatccttacatgtccccagtatcctggcagcgagatcctttggcagcataacgacaagaatatagggggagatgaagacgataagaatatcggatctgacgaggatcacttgagcctgaaagagttctccgagcttgaacaaagcggatattatgtgtgctatccgcgcgggtcaaagccggaagacgctaacttttacctttatctccgagccagagtgtgcgaaaattgcatggaaatggacgttatgtccgttgctacaatagttatcgtagatatatgcatcacgggtggactgcttctgctggtttattattggtccaagaatagaaaggccaaagctaaacccgtgaccagaggcgctggcgcaggcggaaggcaaaggggacaaaacaaagaacggccaccaccagtgccaaatccagattatgagcctattcggaaaggacagagggacctgtactctggcctgaatcagagaagaatc

SEQ ID NO: 20089 - DNA, 1242 bp, synthetic construct
  source 1..1242: mol_type = other DNA
atggccttaccagtgaccgccttgctcctgccgctggccttgctgctccacgccgccaggccggacatccagatgacacagagccctagcagcctgtctgccagcgtgggagacagagtgaccatcacctgtagagccagccagagcgtgtccagctacctggcttggtatcagcagaagcctggcaaggcccctaagctgctgatctacgacgccagcaatagagccacaggcgtgcccagcagattttctggctctggcagcggcaccgacttcaccctgacaatatctagcctccagcctgaggacttcgccacctactactgtcagcagaggaccaactggcccctgacatttggccagggcaccaaggtggaaatcaagagaggcggaggcggaagtggaggcggaggatctggcggcggaggctctgaagttcagctggttgaatctggcggcggactggttcaacctggcggatctctgagactgagctgtgccgccagcggcttcaccttcagcagctacatcatgcactgggtccgacaggcccctggcaaaggacttgaatgggtcgccgtgatctcctacgacggcagaaacaaatactacgccgacagcgtgaagggcagattcaccatctccagagacaacagcaagaacaccctgtacctccagatgaactccctgagagccgaggacaccgccgtgtactactgtgccagagacaccgacggctacgacttcgattattggggccagggaaccctggtcaccgtgtcatctacgcgtttcaagatccccatcgaggaactggaagatcgggtgttcgtgaactgcaacacctctatcacctgggtggaaggcaccgtgggaacactgctgagcgacatcaccagactggacctcggcaagcggattctggaccctcggggcatctacagatgcaacggcaccgacatctacaaggacaaagaaagcaccgtgcaggtccactacagaatgtgccagtcctgcgtggaactggaccctgctacagtggccggcatcatcgtgaccgatgtgatcgctactctgctgctggctctgggagtgttctgcttcgccggacacgaaacaggcagactgtctggcgctgccgatacacaggccctgctgagaaacgaccaagtgtatcagcccctgcgcgacagagatgatgcccagtattctcacctcggcggcaactgggctagaaacaag

SEQ ID NO: 20090 - DNA, 1272 bp, synthetic construct
  source 1..1272: mol_type = other DNA
atggccttaccagtgaccgccttgctcctgccgctggccttgctgctccacgccgccaggccggacatccagatgacacagagccctagcagcctgtctgccagcgtgggagacagagtgaccatcacctgtagagccagccagagcgtgtccagctacctggcttggtatcagcagaagcctggcaaggcccctaagctgctgatctacgacgccagcaatagagccacaggcgtgcccagcagattttctggctctggcagcggcaccgacttcaccctgacaatatctagcctccagcctgaggacttcgccacctactactgtcagcagaggaccaactggcccctgacatttggccagggcaccaaggtggaaatcaagagaggcggaggcggaagtggaggcggaggatctggcggcggaggctctgaagttcagctggttgaatctggcggcggactggttcaacctggcggatctctgagactgagctgtgccgccagcggcttcaccttcagcagctacatcatgcactgggtccgacaggcccctggcaaaggacttgaatgggtcgccgtgatctcctacgacggcagaaacaaatactacgccgacagcgtgaagggcagattcaccatctccagagacaacagcaagaacaccctgtacctccagatgaactccctgagagccgaggacaccgccgtgtactactgtgccagagacaccgacggctacgacttcgattattggggccagggaaccctggtcaccgtgtcatctacgcgtcagagcatcaagggcaaccacctggtcaaggtgtacgactaccaagaggacggcagcgtgctgctgacatgtgatgccgaggccaagaacatcacctggtttaaggacggcaagatgatcggcttcctgaccgaggacaagaagaagtggaacctgggcagcaacgctaaggaccccagaggcatgtatcagtgcaagggcagccagaacaagagcaagcccctccaggtgtactaccggatgtgccagaactgcatcgagctgaacgccgctaccatcagcggctttctgttcgccgagatcgtgtccatcttcgtgctggccgtgggcgtgtactttatcgctggacaggatggcgtgcggcagagcagagcttccgataagcaaaccctgctgcctaacgaccagctgtaccagcctctgaaggacagagaggacgaccagtacagccacctccagggcaatcagctgagaagaaac

SEQ ID NO: 20091 - DNA, 1221 bp, synthetic construct
  source 1..1221: mol_type = other DNA
atggccttaccagtgaccgccttgctcctgccgctggccttgctgctccacgccgccaggccggacatccagatgacacagagccctagcagcctgtctgccagcgtgggagacagagtgaccatcacctgtagagccagccagagcgtgtccagctacctggcttggtatcagcagaagcctggcaaggcccctaagctgctgatctacgacgccagcaatagagccacaggcgtgcccagcagattttctggctctggcagcggcaccgacttcaccctgacaatatctagcctccagcctgaggacttcgccacctactactgtcagcagaggaccaactggcccctgacatttggccagggcaccaaggtggaaatcaagagaggcggaggcggaagtggaggcggaggatctggcggcggaggctctgaagttcagctggttgaatctggcggcggactggttcaacctggcggatctctgagactgagctgtgccgccagcggcttcaccttcagcagctacatcatgcactgggtccgacaggcccctggcaaaggacttgaatgggtcgccgtgatctcctacgacggcagaaacaaatactacgccgacagcgtgaagggcagattcaccatctccagagacaacagcaagaacaccctgtacctccagatgaactccctgagagccgaggacaccgccgtgtactactgtgccagagacaccgacggctacgacttcgattattggggccagggaaccctggtcaccgtgtcatctacgcgtcagagttttgggttgttggaccctaaattgtgctatctgttggacggaatcctgttcatttacggagtgatcctgaccgcattgttcctgcgggttaagttttccagatccgcagacgcacccgcttaccaacaagggcagaaccaactctacaatgaacttaatttggggcggagggaagagtacgacgttctggacaaaaggaggggacgagatcccgagatgggcggaaagcctcagcgaaggaagaatccgcaagaggggctttataacgaactccagaaagataaaatggcagaagcctatagtgagattgggatgaagggagaaaggaggaggggtaaaggtcacgatgggttgtaccaaggattgagcacagccactaaagatacctatgatgcgctccacatgcaggccctgccgccaaga

SEQ ID NO: 20092 - DNA, 1347 bp, synthetic construct
  source 1..1347: mol_type = other DNA
atggccttaccagtgaccgccttgctcctgccgctggccttgctgctccacgccgccaggccggaagttcagctggttgaatctggcggcggactggttcaacctggcggatctctgagactgagctgtgccgccagcggcttcaccttcagcagctacatcatgcactgggtccgacaggcccctggcaaaggacttgaatgggtcgccgtgatctcctacgacggcagaaacaaatactacgccgacagcgtgaagggcagattcaccatctccagagacaacagcaagaacaccctgtacctccagatgaactccctgagagccgaggacaccgccgtgtactactgtgccagagacaccgacggctacgacttcgattattggggccagggaaccctggtcaccgtgtcatctggcggaggcggaagtggaggcggaggatctggcggcggaggctctgacatccagatgacacagagccctagcagcctgtctgccagcgtgggagacagagtgaccatcacctgtagagccagccagagcgtgtccagctacctggcttggtatcagcagaagcctggcaaggcccctaagctgctgatctacgacgccagcaatagagccacaggcgtgcccagcagattttctggctctggcagcggcaccgacttcaccctgacaatatctagcctccagcctgaggacttcgccacctactactgtcagcagaggaccaactggcccctgacatttggccagggcaccaaggtggaaatcaagagaacgcgtgacggtaacgaggagatgggaggaatcactcaaaccccttacaaagtctcaatttcaggaacaactgttatccttacatgtccccagtatcctggcagcgagatcctttggcagcataacgacaagaatatagggggagatgaagacgataagaatatcggatctgacgaggatcacttgagcctgaaagagttctccgagcttgaacaaagcggatattatgtgtgctatccgcgcgggtcaaagccggaagacgctaacttttacctttatctccgagccagagtgtgcgaaaattgcatggaaatggacgttatgtccgttgctacaatagttatcgtagatatatgcatcacgggtggactgcttctgctggtttattattggtccaagaatagaaaggccaaagctaaacccgtgaccagaggcgctggcgcaggcggaaggcaaaggggacaaaacaaagaacggccaccaccagtgccaaatccagattatgagcctattcggaaaggacagagggacctgtactctggcctgaatcagagaagaatc

SEQ ID NO: 20093 - DNA, 1242 bp, synthetic construct
  source 1..1242: mol_type = other DNA
atggccttaccagtgaccgccttgctcctgccgctggccttgctgctccacgccgccaggccggaagttcagctggttgaatctggcggcggactggttcaacctggcggatctctgagactgagctgtgccgccagcggcttcaccttcagcagctacatcatgcactgggtccgacaggcccctggcaaaggacttgaatgggtcgccgtgatctcctacgacggcagaaacaaatactacgccgacagcgtgaagggcagattcaccatctccagagacaacagcaagaacaccctgtacctccagatgaactccctgagagccgaggacaccgccgtgtactactgtgccagagacaccgacggctacgacttcgattattggggccagggaaccctggtcaccgtgtcatctggcggaggcggaagtggaggcggaggatctggcggcggaggctctgacatccagatgacacagagccctagcagcctgtctgccagcgtgggagacagagtgaccatcacctgtagagccagccagagcgtgtccagctacctggcttggtatcagcagaagcctggcaaggcccctaagctgctgatctacgacgccagcaatagagccacaggcgtgcccagcagattttctggctctggcagcggcaccgacttcaccctgacaatatctagcctccagcctgaggacttcgccacctactactgtcagcagaggaccaactggcccctgacatttggccagggcaccaaggtggaaatcaagagaacgcgtttcaagatccccatcgaggaactggaagatcgggtgttcgtgaactgcaacacctctatcacctgggtggaaggcaccgtgggaacactgctgagcgacatcaccagactggacctcggcaagcggattctggaccctcggggcatctacagatgcaacggcaccgacatctacaaggacaaagaaagcaccgtgcaggtccactacagaatgtgccagtcctgcgtggaactggaccctgctacagtggccggcatcatcgtgaccgatgtgatcgctactctgctgctggctctgggagtgttctgcttcgccggacacgaaacaggcagactgtctggcgctgccgatacacaggccctgctgagaaacgaccaagtgtatcagcccctgcgcgacagagatgatgcccagtattctcacctcggcggcaactgggctagaaacaag

SEQ ID NO: 20094 - DNA, 1272 bp, synthetic construct
  source 1..1272: mol_type = other DNA
atggccttaccagtgaccgccttgctcctgccgctggccttgctgctccacgccgccaggccggaagttcagctggttgaatctggcggcggactggttcaacctggcggatctctgagactgagctgtgccgccagcggcttcaccttcagcagctacatcatgcactgggtccgacaggcccctggcaaaggacttgaatgggtcgccgtgatctcctacgacggcagaaacaaatactacgccgacagcgtgaagggcagattcaccatctccagagacaacagcaagaacaccctgtacctccagatgaactccctgagagccgaggacaccgccgtgtactactgtgccagagacaccgacggctacgacttcgattattggggccagggaaccctggtcaccgtgtcatctggcggaggcggaagtggaggcggaggatctggcggcggaggctctgacatccagatgacacagagccctagcagcctgtctgccagcgtgggagacagagtgaccatcacctgtagagccagccagagcgtgtccagctacctggcttggtatcagcagaagcctggcaaggcccctaagctgctgatctacgacgccagcaatagagccacaggcgtgcccagcagattttctggctctggcagcggcaccgacttcaccctgacaatatctagcctccagcctgaggacttcgccacctactactgtcagcagaggaccaactggcccctgacatttggccagggcaccaaggtggaaatcaagagaacgcgtcagagcatcaagggcaaccacctggtcaaggtgtacgactaccaagaggacggcagcgtgctgctgacatgtgatgccgaggccaagaacatcacctggtttaaggacggcaagatgatcggcttcctgaccgaggacaagaagaagtggaacctgggcagcaacgctaaggaccccagaggcatgtatcagtgcaagggcagccagaacaagagcaagcccctccaggtgtactaccggatgtgccagaactgcatcgagctgaacgccgctaccatcagcggctttctgttcgccgagatcgtgtccatcttcgtgctggccgtgggcgtgtactttatcgctggacaggatggcgtgcggcagagcagagcttccgataagcaaaccctgctgcctaacgaccagctgtaccagcctctgaaggacagagaggacgaccagtacagccacctccagggcaatcagctgagaagaaac

SEQ ID NO: 20095 - DNA, 1221 bp, synthetic construct
  source 1..1221: mol_type = other DNA
atggccttaccagtgaccgccttgctcctgccgctggccttgctgctccacgccgccaggccggaagttcagctggttgaatctggcggcggactggttcaacctggcggatctctgagactgagctgtgccgccagcggcttcaccttcagcagctacatcatgcactgggtccgacaggcccctggcaaaggacttgaatgggtcgccgtgatctcctacgacggcagaaacaaatactacgccgacagcgtgaagggcagattcaccatctccagagacaacagcaagaacaccctgtacctccagatgaactccctgagagccgaggacaccgccgtgtactactgtgccagagacaccgacggctacgacttcgattattggggccagggaaccctggtcaccgtgtcatctggcggaggcggaagtggaggcggaggatctggcggcggaggctctgacatccagatgacacagagccctagcagcctgtctgccagcgtgggagacagagtgaccatcacctgtagagccagccagagcgtgtccagctacctggcttggtatcagcagaagcctggcaaggcccctaagctgctgatctacgacgccagcaatagagccacaggcgtgcccagcagattttctggctctggcagcggcaccgacttcaccctgacaatatctagcctccagcctgaggacttcgccacctactactgtcagcagaggaccaactggcccctgacatttggccagggcaccaaggtggaaatcaagagaacgcgtcagagttttgggttgttggaccctaaattgtgctatctgttggacggaatcctgttcatttacggagtgatcctgaccgcattgttcctgcgggttaagttttccagatccgcagacgcacccgcttaccaacaagggcagaaccaactctacaatgaacttaatttggggcggagggaagagtacgacgttctggacaaaaggaggggacgagatcccgagatgggcggaaagcctcagcgaaggaagaatccgcaagaggggctttataacgaactccagaaagataaaatggcagaagcctatagtgagattgggatgaagggagaaaggaggaggggtaaaggtcacgatgggttgtaccaaggattgagcacagccactaaagatacctatgatgcgctccacatgcaggccctgccgccaaga

SEQ ID NO: 20096 - DNA, 1506 bp, synthetic construct
  source 1..1506: mol_type = other DNA
atggccttaccagtgaccgccttgctcctgccgctggccttgctgctccacgccgccaggccggacatccagatgacacagagccctagcagcctgtctgccagcgtgggagacagagtgaccatcacctgtagagccagccagagcgtgtccagctacctggcttggtatcagcagaagcctggcaaggcccctaagctgctgatctacgacgccagcaatagagccacaggcgtgcccagcagattttctggctctggcagcggcaccgacttcaccctgacaatatctagcctccagcctgaggacttcgccacctactactgtcagcagaggaccaactggcccctgacatttggccagggcaccaaggtggaaatcaagagaggcggaggcggaagtggaggcggaggatctggcggcggaggctctgaagttcagctggttgaatctggcggcggactggttcaacctggcggatctctgagactgagctgtgccgccagcggcttcaccttcagcagctacatcatgcactgggtccgacaggcccctggcaaaggacttgaatgggtcgccgtgatctcctacgacggcagaaacaaatactacgccgacagcgtgaagggcagattcaccatctccagagacaacagcaagaacaccctgtacctccagatgaactccctgagagccgaggacaccgccgtgtactactgtgccagagacaccgacggctacgacttcgattattggggccagggaaccctggtcaccgtgtcatctacgcgtggaatgaggactgaggatcttcccaaagctgtcgtctttctcgaaccccaatggtatcgggtgctcgaaaaagactctgtgacactgaaatgccaaggggcctactctcccgaggacaactccacacagtggtttcataatgagtccctcatcagctctcaggccagctcttatttcattgatgccgctacagtggacgactccggcgagtatcggtgtcagaccaatctgtctacactgtctgaccccgtgcagcttgaggtccacattggatggttgctcttgcaagccccacgctgggttttcaaagaggaagatccaatccatctgcggtgccacagctggaaaaacaccgctctccacaaagtcacatacctgcaaaatggcaaaggacgcaaatacttccatcacaattccgatttttacattccgaaggctaccctgaaagacagcggcagctatttctgccggggactcgtcggctccaagaatgtgtcctccgaaaccgtgaatatcacgattacccaaggactggctgtgcctacaatctctagcttctttccgcctggataccaagtctccttctgtcttgtgatggtcctcctgtttgctgtggacacaggactgtacttttccgtgaaaacgaacatccgcagctccacacgcgattggaaagatcacaagtttaaatggcgcaaagatccccaggacaag

SEQ ID NO: 20097 - DNA, 2355 bp, synthetic construct
  source 1..2355: mol_type = other DNA
atggccttaccagtgaccgccttgctcctgccgctggccttgctgctccacgccgccaggccggacatccagatgacacagagccctagcagcctgtctgccagcgtgggagacagagtgaccatcacctgtagagccagccagagcgtgtccagctacctggcttggtatcagcagaagcctggcaaggcccctaagctgctgatctacgacgccagcaatagagccacaggcgtgcccagcagattttctggctctggcagcggcaccgacttcaccctgacaatatctagcctccagcctgaggacttcgccacctactactgtcagcagaggaccaactggcccctgacatttggccagggcaccaaggtggaaatcaagagaggcggaggcggaagtggaggcggaggatctggcggcggaggctctgaagttcagctggttgaatctggcggcggactggttcaacctggcggatctctgagactgagctgtgccgccagcggcttcaccttcagcagctacatcatgcactgggtccgacaggcccctggcaaaggacttgaatgggtcgccgtgatctcctacgacggcagaaacaaatactacgccgacagcgtgaagggcagattcaccatctccagagacaacagcaagaacaccctgtacctccagatgaactccctgagagccgaggacaccgccgtgtactactgtgccagagacaccgacggctacgacttcgattattggggccagggaaccctggtcaccgtgtcatctacgcgtggaggctctggacaacaacagaccctgcctaaaccattcatctgggctgaaccccactttatggttccgaaagagaaacaagtcacgatttgttgccaagggaattacggggccgtcgagtatcagctccactttgagggctccctgtttgctgtggatcggcccaagccacctgaaagaatcaacaaagtccaattctatattcctgatatgaactcccgcatggcaggccagtattcatgtatctaccgcgtgggagaactttggagtgaaccctctaacctgctggacctcgtcgtgacagagatgtatgatacacccacactgtctgtgcaccctgggccagaagttatcagcggagaaaaagttaccttttattgccgcctcgataccgctacctctatgttcctcttgctgaaagagggccgcagctctcacgtgcagcgaggctacggaaaggtccaagctgagtttcctctcggccccgtgaccaccgctcacaggggcacatatagatgttttggctcttataacaatcatgcctggtcattcccatccgagcctgtgaaactgctggtcacaggcgatattgagaatacctctctggccccagaagatcctacattccccgccgacacatggggaacatatctgctgacaaccgaaaccgggctgcaaaaggaccatgctctgtgggatcataccgctcagaatctgcttcggatggggcttgcattcctggtcctggtggctcttgtctggtttctggtcgaggactggctgtcccggaagagaaccagagaaagagcttccagggccagcacctgggaaggcagacgcagactgaatactcagaccctgcgcgccaagagaagcggatctggcgtgaagcagaccctgaatttcgacctgctgaagctggctggcgacgtggaatccaacccaggcccttctagaggccatatgaccgagtacaagcccacggtgcgcctcgccacccgcgacgacgtccccagggccgtacgcaccctcgccgccgcgttcgccgactaccccgccacgcgccacaccgtcgatccggaccgccacatcgagcgggtcaccgagctgcaagaactcttcctcacgcgcgtcgggctcgacatcggcaaggtgtgggtcgcggacgacggcgccgcggtggcggtctggaccacgccggagagcgtcgaagcgggggcggtgttcgccgagatcggcccgcgcatggccgagttgagcggttcccggctggccgcgcagcaacagatggaaggcctcctggcgccgcaccggcccaaggagcccgcgtggttcctggccaccgtcggcgtctcgcccgaccaccagggcaagggtctgggcagcgccgtcgtgctccccggagtggaggcggccgagcgcgccggggtgcccgccttcctggagacctccgcgccccgcaacctccccttctacgagcggctcggcttcaccgtcaccgccgacgtcgaggtgcccgaaggaccgcgcacctggtgcatgacccgcaagcccggtgcctga

SEQ ID NO: 20098 - DNA, 1854 bp, synthetic construct
  source 1..1854: mol_type = other DNA
atggccttaccagtgaccgccttgctcctgccgctggccttgctgctccacgccgccaggccggacatccagatgacacagagccctagcagcctgtctgccagcgtgggagacagagtgaccatcacctgtagagccagccagagcgtgtccagctacctggcttggtatcagcagaagcctggcaaggcccctaagctgctgatctacgacgccagcaatagagccacaggcgtgcccagcagattttctggctctggcagcggcaccgacttcaccctgacaatatctagcctccagcctgaggacttcgccacctactactgtcagcagaggaccaactggcccctgacatttggccagggcaccaaggtggaaatcaagagaggcggaggcggaagtggaggcggaggatctggcggcggaggctctgaagttcagctggttgaatctggcggcggactggttcaacctggcggatctctgagactgagctgtgccgccagcggcttcaccttcagcagctacatcatgcactgggtccgacaggcccctggcaaaggacttgaatgggtcgccgtgatctcctacgacggcagaaacaaatactacgccgacagcgtgaagggcagattcaccatctccagagacaacagcaagaacaccctgtacctccagatgaactccctgagagccgaggacaccgccgtgtactactgtgccagagacaccgacggctacgacttcgattattggggccagggaaccctggtcaccgtgtcatctacgcgtaaaattgaagttatgtatcctcctccttacctagacaatgagaagagcaatggaaccattatccatgtgaaaggggcgcgtggcgatattgagaatacctctctggccccagaagatcctacattccccgccgacacatggggaacatatctgctgacaaccgaaaccgggctgcaaaaggaccatgctctgtgggatcataccgctcagaatctgcttcggatggggcttgcattcctggtcctggtggctcttgtctggtttctggtcgaggactggctgtcccggaagagaaccagagaaagagcttccagggccagcacctgggaaggcagacgcagactgaatactcagaccctgcgcgccaagagaagcggatctggcgtgaagcagaccctgaatttcgacctgctgaagctggctggcgacgtggaatccaacccaggcccttctagaggccatatgaccgagtacaagcccacggtgcgcctcgccacccgcgacgacgtccccagggccgtacgcaccctcgccgccgcgttcgccgactaccccgccacgcgccacaccgtcgatccggaccgccacatcgagcgggtcaccgagctgcaagaactcttcctcacgcgcgtcgggctcgacatcggcaaggtgtgggtcgcggacgacggcgccgcggtggcggtctggaccacgccggagagcgtcgaagcgggggcggtgttcgccgagatcggcccgcgcatggccgagttgagcggttcccggctggccgcgcagcaacagatggaaggcctcctggcgccgcaccggcccaaggagcccgcgtggttcctggccaccgtcggcgtctcgcccgaccaccagggcaagggtctgggcagcgccgtcgtgctccccggagtggaggcggccgagcgcgccggggtgcccgccttcctggagacctccgcgccccgcaacctccccttctacgagcggctcggcttcaccgtcaccgccgacgtcgaggtgcccgaaggaccgcgcacctggtgcatgacccgcaagcccggtgcctga

SEQ ID NO: 20099 - DNA, 2115 bp, synthetic construct
  source 1..2115: mol_type = other DNA
atggccttaccagtgaccgccttgctcctgccgctggccttgctgctccacgccgccaggccggacatccagatgacacagagccctagcagcctgtctgccagcgtgggagacagagtgaccatcacctgtagagccagccagagcgtgtccagctacctggcttggtatcagcagaagcctggcaaggcccctaagctgctgatctacgacgccagcaatagagccacaggcgtgcccagcagattttctggctctggcagcggcaccgacttcaccctgacaatatctagcctccagcctgaggacttcgccacctactactgtcagcagaggaccaactggcccctgacatttggccagggcaccaaggtggaaatcaagagaggcggaggcggaagtggaggcggaggatctggcggcggaggctctgaagttcagctggttgaatctggcggcggactggttcaacctggcggatctctgagactgagctgtgccgccagcggcttcaccttcagcagctacatcatgcactgggtccgacaggcccctggcaaaggacttgaatgggtcgccgtgatctcctacgacggcagaaacaaatactacgccgacagcgtgaagggcagattcaccatctccagagacaacagcaagaacaccctgtacctccagatgaactccctgagagccgaggacaccgccgtgtactactgtgccagagacaccgacggctacgacttcgattattggggccagggaaccctggtcaccgtgtcatctacgcgtctgtgggtgtcccagccacctgaaattcggacactggaaggctcctccgcctttctgccctgtagctttaacgccagccaggggagactcgccatcggctctgtgacatggttccgggatgaagtcgtccctggaaaagaagttcgcaacggaacaccagagttcagaggcagactcgccccactggcaagctccagattcctgcatgaccatcaggctgaactgcacattagggacgtgcggggccacgatgcctccatctatgtgtgtcgggtcgaagtgcttggactcggcgtcggaactggaaacggcactaggctggtggtcgagaaagaacatccacagcttggcgctggcaccgtcctgttgcttagagccggattctatgccgtcagcttcctgtccgtggctgtggggtctacagtgtattaccagggaaaatgtctcacctggaaaggccccagacgccagcttccagctgttgttcctgctccactgccaccaccttgtggctcctctgctcacttgcttccaccagtgcctggcggacgcgccaagagaagcggatctggcgtgaagcagaccctgaatttcgacctgctgaagctggctggcgacgtggaatccaacccaggcccttctagaatgtaccggatgcagctgctgagctgtatcgccctgtctctggccctggtcacaaatagcgcccctaccagcagcagcaccaagaaaacccagctgcaactggaacacctcctgctggacctccagatgatcctgaacggcatcaacaactacaagaaccccaagctgaccgagatgctgaccgccaagttctacatgcccaagaaggccaccgagctgaagcacctccagtgcctggaagaggaactgaagcccctggaagaagtgctgaatctggcccagagcaagaacttccacctgaggccaagggacctgatctccaacatcaacgtgatcgtgctggaactgaaaggcagcgagacaaccttcatgtgcgagtacgccgacgagacagctaccatcgtggaatttctgaatcggtggatcaccttctgccagagcatcatcagcaccctgacaaagatcgaagtgatgtaccctcctccttacctggacaacgagaagtccaacggcaccatcatccacgtgaagggcaagcacctgtgtccttctccactgttccccggacctagcaagcctttctgggtgctcgttgttgttggcggcgtgctggcctgttacagcctgctggttaccgtggccttcatcatcttttgggtccgaagcaagcggagctaa

SEQ ID NO: 20100 - DNA, 2043 bp, synthetic construct
  source 1..2043: mol_type = other DNA
atggccttaccagtgaccgccttgctcctgccgctggccttgctgctccacgccgccaggccggacatccagatgacacagagccctagcagcctgtctgccagcgtgggagacagagtgaccatcacctgtagagccagccagagcgtgtccagctacctggcttggtatcagcagaagcctggcaaggcccctaagctgctgatctacgacgccagcaatagagccacaggcgtgcccagcagattttctggctctggcagcggcaccgacttcaccctgacaatatctagcctccagcctgaggacttcgccacctactactgtcagcagaggaccaactggcccctgacatttggccagggcaccaaggtggaaatcaagagaggcggaggcggaagtggaggcggaggatctggcggcggaggctctgaagttcagctggttgaatctggcggcggactggttcaacctggcggatctctgagactgagctgtgccgccagcggcttcaccttcagcagctacatcatgcactgggtccgacaggcccctggcaaaggacttgaatgggtcgccgtgatctcctacgacggcagaaacaaatactacgccgacagcgtgaagggcagattcaccatctccagagacaacagcaagaacaccctgtacctccagatgaactccctgagagccgaggacaccgccgtgtactactgtgccagagacaccgacggctacgacttcgattattggggccagggaaccctggtcaccgtgtcatctacgcgtctgtgggtgtcccagccacctgaaattcggacactggaaggctcctccgcctttctgccctgtagctttaacgccagccaggggagactcgccatcggctctgtgacatggttccgggatgaagtcgtccctggaaaagaagttcgcaacggaacaccagagttcagaggcagactcgccccactggcaagctccagattcctgcatgaccatcaggctgaactgcacattagggacgtgcggggccacgatgcctccatctatgtgtgtcgggtcgaagtgcttggactcggcgtcggaactggaaacggcactaggctggtggtcgagaaagaacatccacagcttggcgctggcaccgtcctgttgcttagagccggattctatgccgtcagcttcctgtccgtggctgtggggtctacagtgtattaccagggaaaatgtctcacctggaaaggccccagacgccagcttccagctgttgttcctgctccactgccaccaccttgtggctcctctgctcacttgcttccaccagtgcctggcggacgcgccaagagaagcggatctggcgtgaagcagaccctgaatttcgacctgctgaagctggctggcgacgtggaatccaacccaggcccttctagaggccatatgaccgagtacaagcccacggtgcgcctcgccacccgcgacgacgtccccagggccgtacgcaccctcgccgccgcgttcgccgactaccccgccacgcgccacaccgtcgatccggaccgccacatcgagcgggtcaccgagctgcaagaactcttcctcacgcgcgtcgggctcgacatcggcaaggtgtgggtcgcggacgacggcgccgcggtggcggtctggaccacgccggagagcgtcgaagcgggggcggtgttcgccgagatcggcccgcgcatggccgagttgagcggttcccggctggccgcgcagcaacagatggaaggcctcctggcgccgcaccggcccaaggagcccgcgtggttcctggccaccgtcggcgtctcgcccgaccaccagggcaagggtctgggcagcgccgtcgtgctccccggagtggaggcggccgagcgcgccggggtgcccgccttcctggagacctccgcgccccgcaacctccccttctacgagcggctcggcttcaccgtcaccgccgacgtcgaggtgcccgaaggaccgcgcacctggtgcatgacccgcaagcccggtgcctga

SEQ ID NO: 20101 - DNA, 1068 bp, synthetic construct
  source 1..1068: mol_type = other DNA
atggccttaccagtgaccgccttgctcctgccgctggccttgctgctccacgccgccaggccggacatccagatgacacagagccctagcagcctgtctgccagcgtgggagacagagtgaccatcacctgtagagccagccagagcgtgtccagctacctggcttggtatcagcagaagcctggcaaggcccctaagctgctgatctacgacgccagcaatagagccacaggcgtgcccagcagattttctggctctggcagcggcaccgacttcaccctgacaatatctagcctccagcctgaggacttcgccacctactactgtcagcagaggaccaactggcccctgacatttggccagggcaccaaggtggaaatcaagagaggcggaggcggaagtggaggcggaggatctggcggcggaggctctgaagttcagctggttgaatctggcggcggactggttcaacctggcggatctctgagactgagctgtgccgccagcggcttcaccttcagcagctacatcatgcactgggtccgacaggcccctggcaaaggacttgaatgggtcgccgtgatctcctacgacggcagaaacaaatactacgccgacagcgtgaagggcagattcaccatctccagagacaacagcaagaacaccctgtacctccagatgaactccctgagagccgaggacaccgccgtgtactactgtgccagagacaccgacggctacgacttcgattattggggccagggaaccctggtcaccgtgtcatctacgcgtaaaattgaagttatgtatcctcctccttacctagacaatgagaagagcaatggaaccattatccatgtgaaaggggcgcgtatcacccagggcctggccgtgtctaccatcagcagctttttcccacccggctaccaggtgtccttctgcctcgtgatggtgctgctgttcgccgtggacaccggcctgtacttcagcgtgaaaacaaacatccggtccagcaccagagactggaaggaccacaagttcaagtggcggaaggacccccaggacaag

SEQ ID NO: 20102 - DNA, 1068 bp, synthetic construct
  source 1..1068: mol_type = other DNA
atggccttaccagtgaccgccttgctcctgccgctggccttgctgctccacgccgccaggccggacatccagatgacacagagccctagcagcctgtctgccagcgtgggagacagagtgaccatcacctgtagagccagccagagcgtgtccagctacctggcttggtatcagcagaagcctggcaaggcccctaagctgctgatctacgacgccagcaatagagccacaggcgtgcccagcagattttctggctctggcagcggcaccgacttcaccctgacaatatctagcctccagcctgaggacttcgccacctactactgtcagcagaggaccaactggcccctgacatttggccagggcaccaaggtggaaatcaagagaggcggaggcggaagtggaggcggaggatctggcggcggaggctctgaagttcagctggttgaatctggcggcggactggttcaacctggcggatctctgagactgagctgtgccgccagcggcttcaccttcagcagctacatcatgcactgggtccgacaggcccctggcaaaggacttgaatgggtcgccgtgatctcctacgacggcagaaacaaatactacgccgacagcgtgaagggcagattcaccatctccagagacaacagcaagaacaccctgtacctccagatgaactccctgagagccgaggacaccgccgtgtactactgtgccagagacaccgacggctacgacttcgattattggggccagggaaccctggtcaccgtgtcatctacgcgtaaaattgaagttatgtatcctcctccttacctagacaatgagaagagcaatggaaccattatccatgtgaaaggggcgcgtattacccaaggactggctgtgcctacaatctctagcttctttccgcctggataccaagtctccttctgtcttgtgatggtcctcctgtttgctgtggacacaggactgtacttttccgtgaaaacgaacatccgcagctccacacgcgattggaaagatcacaagtttaaatggcgcaaagatccccaggacaag

SEQ ID NO: 20103 - DNA, 1005 bp, synthetic construct
  source 1..1005: mol_type = other DNA
atggccttaccagtgaccgccttgctcctgccgctggccttgctgctccacgccgccaggccggacatccagatgacacagagccctagcagcctgtctgccagcgtgggagacagagtgaccatcacctgtagagccagccagagcgtgtccagctacctggcttggtatcagcagaagcctggcaaggcccctaagctgctgatctacgacgccagcaatagagccacaggcgtgcccagcagattttctggctctggcagcggcaccgacttcaccctgacaatatctagcctccagcctgaggacttcgccacctactactgtcagcagaggaccaactggcccctgacatttggccagggcaccaaggtggaaatcaagagaggcggaggcggaagtggaggcggaggatctggcggcggaggctctgaagttcagctggttgaatctggcggcggactggttcaacctggcggatctctgagactgagctgtgccgccagcggcttcaccttcagcagctacatcatgcactgggtccgacaggcccctggcaaaggacttgaatgggtcgccgtgatctcctacgacggcagaaacaaatactacgccgacagcgtgaagggcagattcaccatctccagagacaacagcaagaacaccctgtacctccagatgaactccctgagagccgaggacaccgccgtgtactactgtgccagagacaccgacggctacgacttcgattattggggccagggaaccctggtcaccgtgtcatctacgcgtaaaattgaagttatgtatcctcctccttacctagacaatgagaagagcaatggaaccattatccatgtgaaaggggcgcgtattacccaaggactggctgtgtctacaatctctagcttctctccgcctggataccaagtctccttctgtcttgtgatggtcctcctgtttgctgtggacacaggactgtacttttccgtgaaaacgaacatc

SEQ ID NO: 20104 - DNA, 1098 bp, synthetic construct
  source 1..1098: mol_type = other DNA
atggccttaccagtgaccgccttgctcctgccgctggccttgctgctccacgccgccaggccggacatccagatgacacagagccctagcagcctgtctgccagcgtgggagacagagtgaccatcacctgtagagccagccagagcgtgtccagctacctggcttggtatcagcagaagcctggcaaggcccctaagctgctgatctacgacgccagcaatagagccacaggcgtgcccagcagattttctggctctggcagcggcaccgacttcaccctgacaatatctagcctccagcctgaggacttcgccacctactactgtcagcagaggaccaactggcccctgacatttggccagggcaccaaggtggaaatcaagagaggcggaggcggaagtggaggcggaggatctggcggcggaggctctgaagttcagctggttgaatctggcggcggactggttcaacctggcggatctctgagactgagctgtgccgccagcggcttcaccttcagcagctacatcatgcactgggtccgacaggcccctggcaaaggacttgaatgggtcgccgtgatctcctacgacggcagaaacaaatactacgccgacagcgtgaagggcagattcaccatctccagagacaacagcaagaacaccctgtacctccagatgaactccctgagagccgaggacaccgccgtgtactactgtgccagagacaccgacggctacgacttcgattattggggccagggaaccctggtcaccgtgtcatctacgcgtaaaattgaagttatgtatcctcctccttacctagacaatgagaagagcaatggaaccattatccatgtgaaaggggcgcgtgtcgagaaagaacatccacagcttggcgctggcaccgtcctgttgcttagagccggattctatgccgtcagcttcctgtccgtggctgtggggtctacagtgtattaccagggaaaatgtctcacctggaaaggccccagacgccagcttccagctgttgttcctgctccactgccaccaccttgtggctcctctgctcacttgcttccaccagtgcctggcgga

SEQ ID NO: 20105 - DNA, 1341 bp, synthetic construct
  source 1..1341: mol_type = other DNA
atggccttaccagtgaccgccttgctcctgccgctggccttgctgctccacgccgccaggccggacatccagatgacacagagccctagcagcctgtctgccagcgtgggagacagagtgaccatcacctgtagagccagccagagcgtgtccagctacctggcttggtatcagcagaagcctggcaaggcccctaagctgctgatctacgacgccagcaatagagccacaggcgtgcccagcagattttctggctctggcagcggcaccgacttcaccctgacaatatctagcctccagcctgaggacttcgccacctactactgtcagcagaggaccaactggcccctgacatttggccagggcaccaaggtggaaatcaagagaggcggaggcggaagtggaggcggaggatctggcggcggaggctctgaagttcagctggttgaatctggcggcggactggttcaacctggcggatctctgagactgagctgtgccgccagcggcttcaccttcagcagctacatcatgcactgggtccgacaggcccctggcaaaggacttgaatgggtcgccgtgatctcctacgacggcagaaacaaatactacgccgacagcgtgaagggcagattcaccatctccagagacaacagcaagaacaccctgtacctccagatgaactccctgagagccgaggacaccgccgtgtactactgtgccagagacaccgacggctacgacttcgattattggggccagggaaccctggtcaccgtgtcatctacgcgtaaaattgaagttatgtatcctcctccttacctagacaatgagaagagcaatggaaccattatccatgtgaaaggggcgcgtaagtctgtgcgcttttacctggtcgtcagccctgccagtgcctccactcagacatcttggaccccaagggaccttgtgtcctctcagacacagacacagtcctgcgtgccaccaactgctggcgcaagacaggctccagagtctcccagcacaatccccgtcccttctcagccccagaactccacacttaggccaggaccagctgctccaatcgcactggtcccagtgttctgcggactgctggttgccaagtctctggtgctgagcgcactcctcgtttggtggggcgatatttggtggaaaacgatgatggaattgagatccctcgatacgcagaaagccacatgccaccttcagcaagtcacagacttgccttggaccagcgtcagctctcccgtggaacgggaaattctgtatcatacagtggcccgcaccaagatttccgacgatgacgacgagcacacactg

SEQ ID NO: 20106 - DNA, 1152 bp, synthetic construct
  source 1..1152: mol_type = other DNA
atggccttaccagtgaccgccttgctcctgccgctggccttgctgctccacgccgccaggccggacatccagatgacacagagccctagcagcctgtctgccagcgtgggagacagagtgaccatcacctgtagagccagccagagcgtgtccagctacctggcttggtatcagcagaagcctggcaaggcccctaagctgctgatctacgacgccagcaatagagccacaggcgtgcccagcagattttctggctctggcagcggcaccgacttcaccctgacaatatctagcctccagcctgaggacttcgccacctactactgtcagcagaggaccaactggcccctgacatttggccagggcaccaaggtggaaatcaagagaggcggaggcggaagtggaggcggaggatctggcggcggaggctctgaagttcagctggttgaatctggcggcggactggttcaacctggcggatctctgagactgagctgtgccgccagcggcttcaccttcagcagctacatcatgcactgggtccgacaggcccctggcaaaggacttgaatgggtcgccgtgatctcctacgacggcagaaacaaatactacgccgacagcgtgaagggcagattcaccatctccagagacaacagcaagaacaccctgtacctccagatgaactccctgagagccgaggacaccgccgtgtactactgtgccagagacaccgacggctacgacttcgattattggggccagggaaccctggtcaccgtgtcatctacgcgtaaaattgaagttatgtatcctcctccttacctagacaatgagaagagcaatggaaccattatccatgtgaaaggggcgcgtggcgatattgagaatacctctctggccccagaagatcctacattccccgccgacacatggggaacatatctgctgacaaccgaaaccgggctgcaaaaggaccatgctctgtgggatcataccgctcagaatctgcttcggatggggcttgcattcctggtcctggtggctcttgtctggtttctggtcgaggactggctgtcccggaagagaaccagagaaagagcttccagggccagcacctgggaaggcagacgcagactgaatactcagaccctg

SEQ ID NO: 20107 - DNA, 2943 bp, synthetic construct
  source 1..2943: mol_type = other DNA
atggccttaccagtgaccgccttgctcctgccgctggccttgctgctccacgccgccaggccggacatccagatgacacagagccctagcagcctgtctgccagcgtgggagacagagtgaccatcacctgtagagccagccagagcgtgtccagctacctggcttggtatcagcagaagcctggcaaggcccctaagctgctgatctacgacgccagcaatagagccacaggcgtgcccagcagattttctggctctggcagcggcaccgacttcaccctgacaatatctagcctccagcctgaggacttcgccacctactactgtcagcagaggaccaactggcccctgacatttggccagggcaccaaggtggaaatcaagagactcgagggacagcctaaggccaatcctaccgtgacactgttccctccaagcagcgaagaactccaggccaacaaggccacacttgtgtgcctgatctccgacttctaccctggggctgtgacagtggcttggaaggccgatggatctcctgtgaaagccggcgtggaaaccaccaagccatccaagcagagcaacaacaaatacgccgccagctcctacctgagcctgacacctgagcagtggaagtcccacagatcctacagctgccaagtgacccacgaaggcagcaccgtggaaaagacagtggcccctacagagtgcagcggatcccagagcttcggcctgctggaccccaagctgtgctacctgctggatggcatcctgttcatctacggcgtgatcctgaccgccctgttcctgagagtgaagttcagcagaagcgccgacgcccctgcctaccagcagggacagaaccaactgtacaacgagctgaacctgggcagacgggaagagtacgacgtgctggacaagcggagaggcagggaccctgagatgggcggaaagccccagcggagaaagaacccccaggaaggactgtataacgaactccagaaagacaagatggccgaagcctacagcgagatcggcatgaagggcgagcggagaagaggcaagggccacgatggcctgtaccagggcctgagcaccgccaccaaggacacctatgacgccctgcacatgcaggccctgcctccaagaagggccaagcgatctggatctggagcaacaaacttctcactactcaaacaagcaggtgacgtggaggagaatcccgggcctactagtatggactggatttggcgcatccttttccttgtcggcgctgctaccggcgcgcattccttcgaagaagttcagctggttgaatctggcggcggactggttcaacctggcggatctctgagactgagctgtgccgccagcggcttcaccttcagcagctacatcatgcactgggtccgacaggcccctggcaaaggacttgaatgggtcgccgtgatctcctacgacggcagaaacaaatactacgccgacagcgtgaagggcagattcaccatctccagagacaacagcaagaacaccctgtacctccagatgaactccctgagagccgaggacaccgccgtgtactactgtgccagagacaccgacggctacgacttcgattattggggccagggaaccctggtcaccgtgtcatctacgcgtgcctctacaaagggaccctccgtgtttcctctggctcccagcagcaagtctacaagcggaggaacagccgctctgggctgcctggtcaaggattactttcccgagcctgtgaccgtgtcctggaatagcggagcactgacaagcggcgtgcacacctttccagccgtgctgcaaagcagcggcctgtactctctgagcagcgtggtcacagtgcctagctctagcctgggcacccagacctacatctgcaatgtgaaccacaagcctagcaacaccaaggtggacaagagagtggaacccaagagctgtggtaccggcgacatcgagaacaccagtctggcccctgaggaccctacctttcctgccgatacctggggcacctacctgctgaccacagagacaggactccagaaagatcacgccctgtgggaccacacagcccagaacctgctgagaatgggcctcgcctttctggtgctggttgccctcgtgtggttcctggtggaagattggctgagccggaagcggacaagagagagagccagcagagcctctacctgggagggaagaagaaggctgaacacccagacacttagggccaagcgatctggatctggagcaacaaacttctcactactcaaacaagcaggtgacgtggaggagaatcccgggccttctagaggccatatgaccgagtacaagcccacggtgcgcctcgccacccgcgacgacgtccccagggccgtacgcaccctcgccgccgcgttcgccgactaccccgccacgcgccacaccgtcgatccggaccgccacatcgagcgggtcaccgagctgcaagaactcttcctcacgcgcgtcgggctcgacatcggcaaggtgtgggtcgcggacgacggcgccgcggtggcggtctggaccacgccggagagcgtcgaagcgggggcggtgttcgccgagatcggcccgcgcatggccgagttgagcggttcccggctggccgcgcagcaacagatggaaggcctcctggcgccgcaccggcccaaggagcccgcgtggttcctggccaccgtcggcgtctcgcccgaccaccagggcaagggtctgggcagcgccgtcgtgctccccggagtggaggcggccgagcgcgccggggtgcccgccttcctggagacctccgcgccccgcaacctccccttctacgagcggctcggcttcaccgtcaccgccgacgtcgaggtgcccgaaggaccgcgcacctggtgcatgacccgcaagcccggtgcctga

SEQ ID NO: 20108 - DNA, 3141 bp, synthetic construct
  source 1..3141: mol_type = other DNA
atggccttaccagtgaccgccttgctcctgccgctggccttgctgctccacgccgccaggccggacatccagatgacacagagccctagcagcctgtctgccagcgtgggagacagagtgaccatcacctgtagagccagccagagcgtgtccagctacctggcttggtatcagcagaagcctggcaaggcccctaagctgctgatctacgacgccagcaatagagccacaggcgtgcccagcagattttctggctctggcagcggcaccgacttcaccctgacaatatctagcctccagcctgaggacttcgccacctactactgtcagcagaggaccaactggcccctgacatttggccagggcaccaaggtggaaatcaagagactcgagggacagcctaaggccaatcctaccgtgacactgttccctccaagcagcgaagaactccaggccaacaaggccacacttgtgtgcctgatctccgacttctaccctggggctgtgacagtggcttggaaggccgatggatctcctgtgaaagccggcgtggaaaccaccaagccatccaagcagagcaacaacaaatacgccgccagctcctacctgagcctgacacctgagcagtggaagtcccacagatcctacagctgccaagtgacccacgaaggcagcaccgtggaaaagacagtggcccctacagagtgcagcggatcccagagcttcggcctgctggaccccaagctgtgctacctgctggatggcatcctgttcatctacggcgtgatcctgaccgccctgttcctgagagtgaagttcagcagaagcgccgacgcccctgcctaccagcagggacagaaccaactgtacaacgagctgaacctgggcagacgggaagagtacgacgtgctggacaagcggagaggcagggaccctgagatgggcggaaagccccagcggagaaagaacccccaggaaggactgtataacgaactccagaaagacaagatggccgaagcctacagcgagatcggcatgaagggcgagcggagaagaggcaagggccacgatggcctgtaccagggcctgagcaccgccaccaaggacacctatgacgccctgcacatgcaggccctgcctccaagaagggccaagcgatctggatctggagcaacaaacttctcactactcaaacaagcaggtgacgtggaggagaatcccgggcctactagtatggactggatttggcgcatccttttccttgtcggcgctgctaccggcgcgcattccttcgaagaagttcagctggttgaatctggcggcggactggttcaacctggcggatctctgagactgagctgtgccgccagcggcttcaccttcagcagctacatcatgcactgggtccgacaggcccctggcaaaggacttgaatgggtcgccgtgatctcctacgacggcagaaacaaatactacgccgacagcgtgaagggcagattcaccatctccagagacaacagcaagaacaccctgtacctccagatgaactccctgagagccgaggacaccgccgtgtactactgtgccagagacaccgacggctacgacttcgattattggggccagggaaccctggtcaccgtgtcatctacgcgtgcctctacaaagggaccctccgtgtttcctctggctcccagcagcaagtctacaagcggaggaacagccgctctgggctgcctggtcaaggattactttcccgagcctgtgaccgtgtcctggaatagcggagcactgacaagcggcgtgcacacctttccagccgtgctgcaaagcagcggcctgtactctctgagcagcgtggtcacagtgcctagctctagcctgggcacccagacctacatctgcaatgtgaaccacaagcctagcaacaccaaggtggacaagagagtggaacccaagagctgtggtaccaagtctgtgcgcttttacctggtcgtcagccctgccagtgcctccactcagacatcttggaccccaagggaccttgtgtcctctcagacacagacacagtcctgcgtgccaccaactgctggcgcaagacaggctccagagtctcccagcacaatccccgtcccttctcagccccagaactccacacttaggccaggaccagctgctccaatcgcactggtcccagtgttctgcggactgctggttgccaagtctctggtgctgagcgcactcctcgtttggtggggcgatatttggtggaaaacgatgatggaattgagatccctcgatacgcagaaagccacatgccaccttcagcaagtcacagacttgccttggaccagcgtcagctctcccgtggaacgggaaattctgtatcatacagtggcccgcaccaagatttccgacgatgacgacgagcacacactgcgcgccaagagaagcggatctggcgtgaagcagaccctgaatttcgacctgctgaagctggctggcgacgtggaatccaacccaggcccttctagaggccatatgaccgagtacaagcccacggtgcgcctcgccacccgcgacgacgtccccagggccgtacgcaccctcgccgccgcgttcgccgactaccccgccacgcgccacaccgtcgatccggaccgccacatcgagcgggtcaccgagctgcaagaactcttcctcacgcgcgtcgggctcgacatcggcaaggtgtgggtcgcggacgacggcgccgcggtggcggtctggaccacgccggagagcgtcgaagcgggggcggtgttcgccgagatcggcccgcgcatggccgagttgagcggttcccggctggccgcgcagcaacagatggaaggcctcctggcgccgcaccggcccaaggagcccgcgtggttcctggccaccgtcggcgtctcgcccgaccaccagggcaagggtctgggcagcgccgtcgtgctccccggagtggaggcggccgagcgcgccggggtgcccgccttcctggagacctccgcgccccgcaacctccccttctacgagcggctcggcttcaccgtcaccgccgacgtcgaggtgcccgaaggaccgcgcacctggtgcatgacccgcaagcccggtgcctga

SEQ ID NO: 20109 - DNA, 2901 bp, synthetic construct
  source 1..2901: mol_type = other DNA
atggccttaccagtgaccgccttgctcctgccgctggccttgctgctccacgccgccaggccggacatccagatgacacagagccctagcagcctgtctgccagcgtgggagacagagtgaccatcacctgtagagccagccagagcgtgtccagctacctggcttggtatcagcagaagcctggcaaggcccctaagctgctgatctacgacgccagcaatagagccacaggcgtgcccagcagattttctggctctggcagcggcaccgacttcaccctgacaatatctagcctccagcctgaggacttcgccacctactactgtcagcagaggaccaactggcccctgacatttggccagggcaccaaggtggaaatcaagagactcgagggacagcctaaggccaatcctaccgtgacactgttccctccaagcagcgaagaactccaggccaacaaggccacacttgtgtgcctgatctccgacttctaccctggggctgtgacagtggcttggaaggccgatggatctcctgtgaaagccggcgtggaaaccaccaagccatccaagcagagcaacaacaaatacgccgccagctcctacctgagcctgacacctgagcagtggaagtcccacagatcctacagctgccaagtgacccacgaaggcagcaccgtggaaaagacagtggcccctacagagtgcagcggatcccagagcttcggcctgctggaccccaagctgtgctacctgctggatggcatcctgttcatctacggcgtgatcctgaccgccctgttcctgagagtgaagttcagcagaagcgccgacgcccctgcctaccagcagggacagaaccaactgtacaacgagctgaacctgggcagacgggaagagtacgacgtgctggacaagcggagaggcagggaccctgagatgggcggaaagccccagcggagaaagaacccccaggaaggactgtataacgaactccagaaagacaagatggccgaagcctacagcgagatcggcatgaagggcgagcggagaagaggcaagggccacgatggcctgtaccagggcctgagcaccgccaccaaggacacctatgacgccctgcacatgcaggccctgcctccaagaagggccaagcgatctggatctggagcaacaaacttctcactactcaaacaagcaggtgacgtggaggagaatcccgggcctactagtatggactggatttggcgcatccttttccttgtcggcgctgctaccggcgcgcattccttcgaagaagttcagctggttgaatctggcggcggactggttcaacctggcggatctctgagactgagctgtgccgccagcggcttcaccttcagcagctacatcatgcactgggtccgacaggcccctggcaaaggacttgaatgggtcgccgtgatctcctacgacggcagaaacaaatactacgccgacagcgtgaagggcagattcaccatctccagagacaacagcaagaacaccctgtacctccagatgaactccctgagagccgaggacaccgccgtgtactactgtgccagagacaccgacggctacgacttcgattattggggccagggaaccctggtcaccgtgtcatctacgcgtgcctctacaaagggaccctccgtgtttcctctggctcccagcagcaagtctacaagcggaggaacagccgctctgggctgcctggtcaaggattactttcccgagcctgtgaccgtgtcctggaatagcggagcactgacaagcggcgtgcacacctttccagccgtgctgcaaagcagcggcctgtactctctgagcagcgtggtcacagtgcctagctctagcctgggcacccagacctacatctgcaatgtgaaccacaagcctagcaacaccaaggtggacaagagagtggaacccaagagctgtggtaccgtggtcgagaaagaacatccacagcttggcgctggcaccgtcctgttgcttagagccggattctatgccgtcagcttcctgtccgtggctgtggggtctacagtgtattaccagggaaaatgtctcacctggaaaggccccagacgccagcttccagctgttgttcctgctccactgccaccaccttgtggctcctctgctcacttgcttccaccagtgcctggcggacgcgccaagagaagcggatctggcgtgaagcagaccctgaatttcgacctgctgaagctggctggcgacgtggaatccaacccaggcccttctagaggccatatgaccgagtacaagcccacggtgcgcctcgccacccgcgacgacgtccccagggccgtacgcaccctcgccgccgcgttcgccgactaccccgccacgcgccacaccgtcgatccggaccgccacatcgagcgggtcaccgagctgcaagaactcttcctcacgcgcgtcgggctcgacatcggcaaggtgtgggtcgcggacgacggcgccgcggtggcggtctggaccacgccggagagcgtcgaagcgggggcggtgttcgccgagatcggcccgcgcatggccgagttgagcggttcccggctggccgcgcagcaacagatggaaggcctcctggcgccgcaccggcccaaggagcccgcgtggttcctggccaccgtcggcgtctcgcccgaccaccagggcaagggtctgggcagcgccgtcgtgctccccggagtggaggcggccgagcgcgccggggtgcccgccttcctggagacctccgcgccccgcaacctccccttctacgagcggctcggcttcaccgtcaccgccgacgtcgaggtgcccgaaggaccgcgcacctggtgcatgacccgcaagcccggtgcctga

SEQ ID NO: 20110 - DNA, 2988 bp, synthetic construct
  source 1..2988: mol_type = other DNA
atggccttaccagtgaccgccttgctcctgccgctggccttgctgctccacgccgccaggccggacatccagatgacacagagccctagcagcctgtctgccagcgtgggagacagagtgaccatcacctgtagagccagccagagcgtgtccagctacctggcttggtatcagcagaagcctggcaaggcccctaagctgctgatctacgacgccagcaatagagccacaggcgtgcccagcagattttctggctctggcagcggcaccgacttcaccctgacaatatctagcctccagcctgaggacttcgccacctactactgtcagcagaggaccaactggcccctgacatttggccagggcaccaaggtggaaatcaagagactcgaggacctgaagaacgtgttcccacctgaggtggccgtgttcgagcctagcgaggccgagatcagccacacccagaaagccaccctcgtgtgcctggctaccggcttctaccccgaccatgtggaactgtcttggtgggtcaacggcaaagaggtgcacagcggcgtgtctaccgacccccagccactgaaagaacagcccgccctgaacgacagccggtactgcctgagcagcagactgagagtgtccgccaccttctggcagaacccccggaaccacttcagatgccaggtgcagttctacggcctgagcgagaacgacgagtggacccaggacagagccaagcccgtgacccagatcgtgtctgccgaagcctggggcagagccgattgcggatcccagagcttcggcctgctggaccccaagctgtgctacctgctggatggcatcctgttcatctacggcgtgatcctgaccgccctgttcctgagagtgaagttcagcagaagcgccgacgcccctgcctaccagcagggacagaaccaactgtacaacgagctgaacctgggcagacgggaagagtacgacgtgctggacaagcggagaggcagggaccctgagatgggcggaaagccccagcggagaaagaacccccaggaaggactgtataacgaactccagaaagacaagatggccgaagcctacagcgagatcggcatgaagggcgagcggagaagaggcaagggccacgatggcctgtaccagggcctgagcaccgccaccaaggacacctatgacgccctgcacatgcaggccctgcctccaagaagggccaagcgatctggatctggagcaacaaacttctcactactcaaacaagcaggtgacgtggaggagaatcccgggcctactagtatggactggatttggcgcatccttttccttgtcggcgctgctaccggcgcgcattccttcgaagaagttcagctggttgaatctggcggcggactggttcaacctggcggatctctgagactgagctgtgccgccagcggcttcaccttcagcagctacatcatgcactgggtccgacaggcccctggcaaaggacttgaatgggtcgccgtgatctcctacgacggcagaaacaaatactacgccgacagcgtgaagggcagattcaccatctccagagacaacagcaagaacaccctgtacctccagatgaactccctgagagccgaggacaccgccgtgtactactgtgccagagacaccgacggctacgacttcgattattggggccagggaaccctggtcaccgtgtcatctacgcgtatccagaaccctgatcctgccgtgtaccagctgcgggatagcaagagcagcgacaagagcgtgtgtctgttcaccgacttcgacagccagaccaacgtgtcccagagcaaggactccgacgtgtacatcaccgataagaccgtgctggacatgcggagcatggacttcaagagcaactccgccgtggcctggtccaacaagtccgatttcgcctgcgccaacgccttcaacaacagcattatccccgaggacacattcttcccaagccccgagagcagctgcggtaccggcgacatcgagaacaccagtctggcccctgaggaccctacctttcctgccgatacctggggcacctacctgctgaccacagagacaggactccagaaagatcacgccctgtgggaccacacagcccagaacctgctgagaatgggcctcgcctttctggtgctggttgccctcgtgtggttcctggtggaagattggctgagccggaagcggacaagagagagagccagcagagcctctacctgggagggaagaagaaggctgaacacccagacacttagggccaagcgatctggatctggagcaacaaacttctcactactcaaacaagcaggtgacgtggaggagaatcccgggccttctagaggccatatgaccgagtacaagcccacggtgcgcctcgccacccgcgacgacgtccccagggccgtacgcaccctcgccgccgcgttcgccgactaccccgccacgcgccacaccgtcgatccggaccgccacatcgagcgggtcaccgagctgcaagaactcttcctcacgcgcgtcgggctcgacatcggcaaggtgtgggtcgcggacgacggcgccgcggtggcggtctggaccacgccggagagcgtcgaagcgggggcggtgttcgccgagatcggcccgcgcatggccgagttgagcggttcccggctggccgcgcagcaacagatggaaggcctcctggcgccgcaccggcccaaggagcccgcgtggttcctggccaccgtcggcgtctcgcccgaccaccagggcaagggtctgggcagcgccgtcgtgctccccggagtggaggcggccgagcgcgccggggtgcccgccttcctggagacctccgcgccccgcaacctccccttctacgagcggctcggcttcaccgtcaccgccgacgtcgaggtgcccgaaggaccgcgcacctggtgcatgacccgcaagcccggtgcctga

SEQ ID NO: 20111 - DNA, 3186 bp, synthetic construct
  source 1..3186: mol_type = other DNA
atggccttaccagtgaccgccttgctcctgccgctggccttgctgctccacgccgccaggccggacatccagatgacacagagccctagcagcctgtctgccagcgtgggagacagagtgaccatcacctgtagagccagccagagcgtgtccagctacctggcttggtatcagcagaagcctggcaaggcccctaagctgctgatctacgacgccagcaatagagccacaggcgtgcccagcagattttctggctctggcagcggcaccgacttcaccctgacaatatctagcctccagcctgaggacttcgccacctactactgtcagcagaggaccaactggcccctgacatttggccagggcaccaaggtggaaatcaagagactcgaggacctgaagaacgtgttcccacctgaggtggccgtgttcgagcctagcgaggccgagatcagccacacccagaaagccaccctcgtgtgcctggctaccggcttctaccccgaccatgtggaactgtcttggtgggtcaacggcaaagaggtgcacagcggcgtgtctaccgacccccagccactgaaagaacagcccgccctgaacgacagccggtactgcctgagcagcagactgagagtgtccgccaccttctggcagaacccccggaaccacttcagatgccaggtgcagttctacggcctgagcgagaacgacgagtggacccaggacagagccaagcccgtgacccagatcgtgtctgccgaagcctggggcagagccgattgcggatcccagagcttcggcctgctggaccccaagctgtgctacctgctggatggcatcctgttcatctacggcgtgatcctgaccgccctgttcctgagagtgaagttcagcagaagcgccgacgcccctgcctaccagcagggacagaaccaactgtacaacgagctgaacctgggcagacgggaagagtacgacgtgctggacaagcggagaggcagggaccctgagatgggcggaaagccccagcggagaaagaacccccaggaaggactgtataacgaactccagaaagacaagatggccgaagcctacagcgagatcggcatgaagggcgagcggagaagaggcaagggccacgatggcctgtaccagggcctgagcaccgccaccaaggacacctatgacgccctgcacatgcaggccctgcctccaagaagggccaagcgatctggatctggagcaacaaacttctcactactcaaacaagcaggtgacgtggaggagaatcccgggcctactagtatggactggatttggcgcatccttttccttgtcggcgctgctaccggcgcgcattccttcgaagaagttcagctggttgaatctggcggcggactggttcaacctggcggatctctgagactgagctgtgccgccagcggcttcaccttcagcagctacatcatgcactgggtccgacaggcccctggcaaaggacttgaatgggtcgccgtgatctcctacgacggcagaaacaaatactacgccgacagcgtgaagggcagattcaccatctccagagacaacagcaagaacaccctgtacctccagatgaactccctgagagccgaggacaccgccgtgtactactgtgccagagacaccgacggctacgacttcgattattggggccagggaaccctggtcaccgtgtcatctacgcgtatccagaaccctgatcctgccgtgtaccagctgcgggatagcaagagcagcgacaagagcgtgtgtctgttcaccgacttcgacagccagaccaacgtgtcccagagcaaggactccgacgtgtacatcaccgataagaccgtgctggacatgcggagcatggacttcaagagcaactccgccgtggcctggtccaacaagtccgatttcgcctgcgccaacgccttcaacaacagcattatccccgaggacacattcttcccaagccccgagagcagctgcggtaccaagtctgtgcgcttttacctggtcgtcagccctgccagtgcctccactcagacatcttggaccccaagggaccttgtgtcctctcagacacagacacagtcctgcgtgccaccaactgctggcgcaagacaggctccagagtctcccagcacaatccccgtcccttctcagccccagaactccacacttaggccaggaccagctgctccaatcgcactggtcccagtgttctgcggactgctggttgccaagtctctggtgctgagcgcactcctcgtttggtggggcgatatttggtggaaaacgatgatggaattgagatccctcgatacgcagaaagccacatgccaccttcagcaagtcacagacttgccttggaccagcgtcagctctcccgtggaacgggaaattctgtatcatacagtggcccgcaccaagatttccgacgatgacgacgagcacacactgcgcgccaagagaagcggatctggcgtgaagcagaccctgaatttcgacctgctgaagctggctggcgacgtggaatccaacccaggcccttctagaggccatatgaccgagtacaagcccacggtgcgcctcgccacccgcgacgacgtccccagggccgtacgcaccctcgccgccgcgttcgccgactaccccgccacgcgccacaccgtcgatccggaccgccacatcgagcgggtcaccgagctgcaagaactcttcctcacgcgcgtcgggctcgacatcggcaaggtgtgggtcgcggacgacggcgccgcggtggcggtctggaccacgccggagagcgtcgaagcgggggcggtgttcgccgagatcggcccgcgcatggccgagttgagcggttcccggctggccgcgcagcaacagatggaaggcctcctggcgccgcaccggcccaaggagcccgcgtggttcctggccaccgtcggcgtctcgcccgaccaccagggcaagggtctgggcagcgccgtcgtgctccccggagtggaggcggccgagcgcgccggggtgcccgccttcctggagacctccgcgccccgcaacctccccttctacgagcggctcggcttcaccgtcaccgccgacgtcgaggtgcccgaaggaccgcgcacctggtgcatgacccgcaagcccggtgcctga

SEQ ID NO: 20112 - DNA, 2946 bp, synthetic construct
  source 1..2946: mol_type = other DNA
atggccttaccagtgaccgccttgctcctgccgctggccttgctgctccacgccgccaggccggacatccagatgacacagagccctagcagcctgtctgccagcgtgggagacagagtgaccatcacctgtagagccagccagagcgtgtccagctacctggcttggtatcagcagaagcctggcaaggcccctaagctgctgatctacgacgccagcaatagagccacaggcgtgcccagcagattttctggctctggcagcggcaccgacttcaccctgacaatatctagcctccagcctgaggacttcgccacctactactgtcagcagaggaccaactggcccctgacatttggccagggcaccaaggtggaaatcaagagactcgaggacctgaagaacgtgttcccacctgaggtggccgtgttcgagcctagcgaggccgagatcagccacacccagaaagccaccctcgtgtgcctggctaccggcttctaccccgaccatgtggaactgtcttggtgggtcaacggcaaagaggtgcacagcggcgtgtctaccgacccccagccactgaaagaacagcccgccctgaacgacagccggtactgcctgagcagcagactgagagtgtccgccaccttctggcagaacccccggaaccacttcagatgccaggtgcagttctacggcctgagcgagaacgacgagtggacccaggacagagccaagcccgtgacccagatcgtgtctgccgaagcctggggcagagccgattgcggatcccagagcttcggcctgctggaccccaagctgtgctacctgctggatggcatcctgttcatctacggcgtgatcctgaccgccctgttcctgagagtgaagttcagcagaagcgccgacgcccctgcctaccagcagggacagaaccaactgtacaacgagctgaacctgggcagacgggaagagtacgacgtgctggacaagcggagaggcagggaccctgagatgggcggaaagccccagcggagaaagaacccccaggaaggactgtataacgaactccagaaagacaagatggccgaagcctacagcgagatcggcatgaagggcgagcggagaagaggcaagggccacgatggcctgtaccagggcctgagcaccgccaccaaggacacctatgacgccctgcacatgcaggccctgcctccaagaagggccaagcgatctggatctggagcaacaaacttctcactactcaaacaagcaggtgacgtggaggagaatcccgggcctactagtatggactggatttggcgcatccttttccttgtcggcgctgctaccggcgcgcattccttcgaagaagttcagctggttgaatctggcggcggactggttcaacctggcggatctctgagactgagctgtgccgccagcggcttcaccttcagcagctacatcatgcactgggtccgacaggcccctggcaaaggacttgaatgggtcgccgtgatctcctacgacggcagaaacaaatactacgccgacagcgtgaagggcagattcaccatctccagagacaacagcaagaacaccctgtacctccagatgaactccctgagagccgaggacaccgccgtgtactactgtgccagagacaccgacggctacgacttcgattattggggccagggaaccctggtcaccgtgtcatctacgcgtatccagaaccctgatcctgccgtgtaccagctgcgggatagcaagagcagcgacaagagcgtgtgtctgttcaccgacttcgacagccagaccaacgtgtcccagagcaaggactccgacgtgtacatcaccgataagaccgtgctggacatgcggagcatggacttcaagagcaactccgccgtggcctggtccaacaagtccgatttcgcctgcgccaacgccttcaacaacagcattatccccgaggacacattcttcccaagccccgagagcagctgcggtaccgtggtcgagaaagaacatccacagcttggcgctggcaccgtcctgttgcttagagccggattctatgccgtcagcttcctgtccgtggctgtggggtctacagtgtattaccagggaaaatgtctcacctggaaaggccccagacgccagcttccagctgttgttcctgctccactgccaccaccttgtggctcctctgctcacttgcttccaccagtgcctggcggacgcgccaagagaagcggatctggcgtgaagcagaccctgaatttcgacctgctgaagctggctggcgacgtggaatccaacccaggcccttctagaggccatatgaccgagtacaagcccacggtgcgcctcgccacccgcgacgacgtccccagggccgtacgcaccctcgccgccgcgttcgccgactaccccgccacgcgccacaccgtcgatccggaccgccacatcgagcgggtcaccgagctgcaagaactcttcctcacgcgcgtcgggctcgacatcggcaaggtgtgggtcgcggacgacggcgccgcggtggcggtctggaccacgccggagagcgtcgaagcgggggcggtgttcgccgagatcggcccgcgcatggccgagttgagcggttcccggctggccgcgcagcaacagatggaaggcctcctggcgccgcaccggcccaaggagcccgcgtggttcctggccaccgtcggcgtctcgcccgaccaccagggcaagggtctgggcagcgccgtcgtgctccccggagtggaggcggccgagcgcgccggggtgcccgccttcctggagacctccgcgccccgcaacctccccttctacgagcggctcggcttcaccgtcaccgccgacgtcgaggtgcccgaaggaccgcgcacctggtgcatgacccgcaagcccggtgcctga

SEQ ID NO: 20113 - DNA, 2859 bp, synthetic construct
  source 1..2859: mol_type = other DNA
atggccttaccagtgaccgccttgctcctgccgctggccttgctgctccacgccgccaggccggacatccagatgacacagagccctagcagcctgtctgccagcgtgggagacagagtgaccatcacctgtagagccagccagagcgtgtccagctacctggcttggtatcagcagaagcctggcaaggcccctaagctgctgatctacgacgccagcaatagagccacaggcgtgcccagcagattttctggctctggcagcggcaccgacttcaccctgacaatatctagcctccagcctgaggacttcgccacctactactgtcagcagaggaccaactggcccctgacatttggccagggcaccaaggtggaaatcaagagactcgagggacagcctaaggccaatcctaccgtgacactgttccctccaagcagcgaagaactccaggccaacaaggccacacttgtgtgcctgatctccgacttctaccctggggctgtgacagtggcttggaaggccgatggatctcctgtgaaagccggcgtggaaaccaccaagccatccaagcagagcaacaacaaatacgccgccagctcctacctgagcctgacacctgagcagtggaagtcccacagatcctacagctgccaagtgacccacgaaggcagcaccgtggaaaagacagtggcccctacagagtgcagcggatcccagagcttcggcctgctggaccccaagctgtgctacctgctggatggcatcctgttcatctacggcgtgatcctgaccgccctgttcctgagagtgaagttcagcagaagcgccgacgcccctgcctaccagcagggacagaaccaactgtacaacgagctgaacctgggcagacgggaagagtacgacgtgctggacaagcggagaggcagggaccctgagatgggcggaaagccccagcggagaaagaacccccaggaaggactgtataacgaactccagaaagacaagatggccgaagcctacagcgagatcggcatgaagggcgagcggagaagaggcaagggccacgatggcctgtaccagggcctgagcaccgccaccaaggacacctatgacgccctgcacatgcaggccctgcctccaagaagggccaagcgatctggatctggagcaacaaacttctcactactcaaacaagcaggtgacgtggaggagaatcccgggcctactagtatggactggatttggcgcatccttttccttgtcggcgctgctaccggcgcgcattccttcgaagaagttcagctggttgaatctggcggcggactggttcaacctggcggatctctgagactgagctgtgccgccagcggcttcaccttcagcagctacatcatgcactgggtccgacaggcccctggcaaaggacttgaatgggtcgccgtgatctcctacgacggcagaaacaaatactacgccgacagcgtgaagggcagattcaccatctccagagacaacagcaagaacaccctgtacctccagatgaactccctgagagccgaggacaccgccgtgtactactgtgccagagacaccgacggctacgacttcgattattggggccagggaaccctggtcaccgtgtcatctacgcgtgcctctacaaagggaccctccgtgtttcctctggctcccagcagcaagtctacaagcggaggaacagccgctctgggctgcctggtcaaggattactttcccgagcctgtgaccgtgtcctggaatagcggagcactgacaagcggcgtgcacacctttccagccgtgctgcaaagcagcggcctgtactctctgagcagcgtggtcacagtgcctagctctagcctgggcacccagacctacatctgcaatgtgaaccacaagcctagcaacaccaaggtggacaagagagtggaacccaagagctgtggtaccatcactcaaggtttggcagtgtcaaccatctcatcattctttccacctggctaccaagtgtccttctgcctggtcatggtgctgctgttcgccgtggataccggcctgtacttcagcgtcaagaccaacatccggtccagcaccagagactggaaggaccacaagttcaagtggcggaaggaccctcaggacaagagggccaagcgatctggatctggagcaacaaacttctcactactcaaacaagcaggtgacgtggaggagaatcccgggccttctagaggccatatgaccgagtacaagcccacggtgcgcctcgccacccgcgacgacgtccccagggccgtacgcaccctcgccgccgcgttcgccgactaccccgccacgcgccacaccgtcgatccggaccgccacatcgagcgggtcaccgagctgcaagaactcttcctcacgcgcgtcgggctcgacatcggcaaggtgtgggtcgcggacgacggcgccgcggtggcggtctggaccacgccggagagcgtcgaagcgggggcggtgttcgccgagatcggcccgcgcatggccgagttgagcggttcccggctggccgcgcagcaacagatggaaggcctcctggcgccgcaccggcccaaggagcccgcgtggttcctggccaccgtcggcgtctcgcccgaccaccagggcaagggtctgggcagcgccgtcgtgctccccggagtggaggcggccgagcgcgccggggtgcccgccttcctggagacctccgcgccccgcaacctccccttctacgagcggctcggcttcaccgtcaccgccgacgtcgaggtgcccgaaggaccgcgcacctggtgcatgacccgcaagcccggtgcctga

SEQ ID NO: 20114 - DNA, 2904 bp, synthetic construct
  source 1..2904: mol_type = other DNA
atggccttaccagtgaccgccttgctcctgccgctggccttgctgctccacgccgccaggccggacatccagatgacacagagccctagcagcctgtctgccagcgtgggagacagagtgaccatcacctgtagagccagccagagcgtgtccagctacctggcttggtatcagcagaagcctggcaaggcccctaagctgctgatctacgacgccagcaatagagccacaggcgtgcccagcagattttctggctctggcagcggcaccgacttcaccctgacaatatctagcctccagcctgaggacttcgccacctactactgtcagcagaggaccaactggcccctgacatttggccagggcaccaaggtggaaatcaagagactcgaggacctgaagaacgtgttcccacctgaggtggccgtgttcgagcctagcgaggccgagatcagccacacccagaaagccaccctcgtgtgcctggctaccggcttctaccccgaccatgtggaactgtcttggtgggtcaacggcaaagaggtgcacagcggcgtgtctaccgacccccagccactgaaagaacagcccgccctgaacgacagccggtactgcctgagcagcagactgagagtgtccgccaccttctggcagaacccccggaaccacttcagatgccaggtgcagttctacggcctgagcgagaacgacgagtggacccaggacagagccaagcccgtgacccagatcgtgtctgccgaagcctggggcagagccgattgcggatcccagagcttcggcctgctggaccccaagctgtgctacctgctggatggcatcctgttcatctacggcgtgatcctgaccgccctgttcctgagagtgaagttcagcagaagcgccgacgcccctgcctaccagcagggacagaaccaactgtacaacgagctgaacctgggcagacgggaagagtacgacgtgctggacaagcggagaggcagggaccctgagatgggcggaaagccccagcggagaaagaacccccaggaaggactgtataacgaactccagaaagacaagatggccgaagcctacagcgagatcggcatgaagggcgagcggagaagaggcaagggccacgatggcctgtaccagggcctgagcaccgccaccaaggacacctatgacgccctgcacatgcaggccctgcctccaagaagggccaagcgatctggatctggagcaacaaacttctcactactcaaacaagcaggtgacgtggaggagaatcccgggcctactagtatggactggatttggcgcatccttttccttgtcggcgctgctaccggcgcgcattccttcgaagaagttcagctggttgaatctggcggcggactggttcaacctggcggatctctgagactgagctgtgccgccagcggcttcaccttcagcagctacatcatgcactgggtccgacaggcccctggcaaaggacttgaatgggtcgccgtgatctcctacgacggcagaaacaaatactacgccgacagcgtgaagggcagattcaccatctccagagacaacagcaagaacaccctgtacctccagatgaactccctgagagccgaggacaccgccgtgtactactgtgccagagacaccgacggctacgacttcgattattggggccagggaaccctggtcaccgtgtcatctacgcgtatccagaaccctgatcctgccgtgtaccagctgcgggatagcaagagcagcgacaagagcgtgtgtctgttcaccgacttcgacagccagaccaacgtgtcccagagcaaggactccgacgtgtacatcaccgataagaccgtgctggacatgcggagcatggacttcaagagcaactccgccgtggcctggtccaacaagtccgatttcgcctgcgccaacgccttcaacaacagcattatccccgaggacacattcttcccaagccccgagagcagctgcggtaccatcactcaaggtttggcagtgtcaaccatctcatcattctttccacctggctaccaagtgtccttctgcctggtcatggtgctgctgttcgccgtggataccggcctgtacttcagcgtcaagaccaacatccggtccagcaccagagactggaaggaccacaagttcaagtggcggaaggaccctcaggacaagagggccaagcgatctggatctggagcaacaaacttctcactactcaaacaagcaggtgacgtggaggagaatcccgggccttctagaggccatatgaccgagtacaagcccacggtgcgcctcgccacccgcgacgacgtccccagggccgtacgcaccctcgccgccgcgttcgccgactaccccgccacgcgccacaccgtcgatccggaccgccacatcgagcgggtcaccgagctgcaagaactcttcctcacgcgcgtcgggctcgacatcggcaaggtgtgggtcgcggacgacggcgccgcggtggcggtctggaccacgccggagagcgtcgaagcgggggcggtgttcgccgagatcggcccgcgcatggccgagttgagcggttcccggctggccgcgcagcaacagatggaaggcctcctggcgccgcaccggcccaaggagcccgcgtggttcctggccaccgtcggcgtctcgcccgaccaccagggcaagggtctgggcagcgccgtcgtgctccccggagtggaggcggccgagcgcgccggggtgcccgccttcctggagacctccgcgccccgcaacctccccttctacgagcggctcggcttcaccgtcaccgccgacgtcgaggtgcccgaaggaccgcgcacctggtgcatgacccgcaagcccggtgcctga

SEQ ID NO: 20115 - DNA, 1953 bp, synthetic construct
  source 1..1953: mol_type = other DNA
atggccttaccagtgaccgccttgctcctgccgctggccttgctgctccacgccgccaggccggacatccagatgacacagagccctagcagcctgtctgccagcgtgggagacagagtgaccatcacctgtagagccagccagagcgtgtccagctacctggcttggtatcagcagaagcctggcaaggcccctaagctgctgatctacgacgccagcaatagagccacaggcgtgcccagcagattttctggctctggcagcggcaccgacttcaccctgacaatatctagcctccagcctgaggacttcgccacctactactgtcagcagaggaccaactggcccctgacatttggccagggcaccaaggtggaaatcaagagactcgagggacagcctaaggccaatcctaccgtgacactgttccctccaagcagcgaagaactccaggccaacaaggccacacttgtgtgcctgatctccgacttctaccctggggctgtgacagtggcttggaaggccgatggatctcctgtgaaagccggcgtggaaaccaccaagccatccaagcagagcaacaacaaatacgccgccagctcctacctgagcctgacacctgagcagtggaagtcccacagatcctacagctgccaagtgacccacgaaggcagcaccgtggaaaagacagtggcccctacagagtgcagcggatccctgggagagcctcagctgtgctatatcctggacgccatcctgtttctgtacggcatcgtgctgaccctgctgtactgccggctgaagatccaagtgcggaaggccgccatcaccagctacgagaaatccgacggcgtgtacaccggcctgagcaccagaaatcaagagacatacgagacactgaagcacgaaaagcctccacaaagggccaagcgatctggatctggagcaacaaacttctcactactcaaacaagcaggtgacgtggaggagaatcccgggcctactagtatggactggatttggcgcatccttttccttgtcggcgctgctaccggcgcgcattccttcgaagaagttcagctggttgaatctggcggcggactggttcaacctggcggatctctgagactgagctgtgccgccagcggcttcaccttcagcagctacatcatgcactgggtccgacaggcccctggcaaaggacttgaatgggtcgccgtgatctcctacgacggcagaaacaaatactacgccgacagcgtgaagggcagattcaccatctccagagacaacagcaagaacaccctgtacctccagatgaactccctgagagccgaggacaccgccgtgtactactgtgccagagacaccgacggctacgacttcgattattggggccagggaaccctggtcaccgtgtcatctacgcgtgcctctacaaagggaccctccgtgtttcctctggctcccagcagcaagtctacaagcggaggaacagccgctctgggctgcctggtcaaggattactttcccgagcctgtgaccgtgtcctggaatagcggagcactgacaagcggcgtgcacacctttccagccgtgctgcaaagcagcggcctgtactctctgagcagcgtggtcacagtgcctagctctagcctgggcacccagacctacatctgcaatgtgaaccacaagcctagcaacaccaaggtggacaagagagtggaacccaagagctgtggtaccctcggagaaccacagctctgttacattctggatgctatcctgttcctctatgggatcgtcctgacactcctgtattgcagactcaaaattcaagttcgcaaagccgccattacctcttacgagaagagtgatggggtgtacacaggactgtctacccggaatcaagaaacctacgaaaccctcaaacatgagaagccacctcagtaa

SEQ ID NO: 20116 - DNA, 3084 bp, synthetic construct
  source 1..3084: mol_type = other DNA
atggccttaccagtgaccgccttgctcctgccgctggccttgctgctccacgccgccaggccggacatccagatgacacagagccctagcagcctgtctgccagcgtgggagacagagtgaccatcacctgtagagccagccagagcgtgtccagctacctggcttggtatcagcagaagcctggcaaggcccctaagctgctgatctacgacgccagcaatagagccacaggcgtgcccagcagattttctggctctggcagcggcaccgacttcaccctgacaatatctagcctccagcctgaggacttcgccacctactactgtcagcagaggaccaactggcccctgacatttggccagggcaccaaggtggaaatcaagagaggacagcctaaggccaatcctaccgtgacactgttccctccaagcagcgaagaactccaggccaacaaggccacacttgtgtgcctgatctccgacttctaccctggggctgtgacagtggcttggaaggccgatggatctcctgtgaaagccggcgtggaaaccaccaagccatccaagcagagcaacaacaaatacgccgccagctcctacctgagcctgacacctgagcagtggaagtcccacagatcctacagctgccaagtgacccacgaaggcagcaccgtggaaaagacagtggcccctacagagtgcagcggatcccagagcttcggcctgctggaccccaagctgtgctacctgctggatggcatcctgttcatctacggcgtgatcctgaccgccctgttcctgagagtgaagttcagcagaagcgccgacgcccctgcctaccagcagggacagaaccaactgtacaacgagctgaacctgggcagacgggaagagtacgacgtgctggacaagcggagaggcagggaccctgagatgggcggaaagccccggagaaagaacccccaggaaggactgtataacgaactccagaaagacaagatggccgaagcctacagcgagatcggcatgaagggcgagcggagaagaggcaagggccacgatggcctgtaccagggcctgagcaccgccaccaaggacacctatgacgccctgcacatgcaggccctgcctccaagaagggccaagcgatctggatctggagcaacaaacttctcactactcaaacaagcaggtgacgtggaggagaatcccgggcctactagtatggactggatttggcgcatccttttccttgtcggcgctgctaccggcgcgcattccttcgaagaagttcagctggttgaatctggcggcggactggttcaacctggcggatctctgagactgagctgtgccgccagcggcttcaccttcagcagctacatcatgcactgggtccgacaggcccctggcaaaggacttgaatgggtcgccgtgatctcctacgacggcagaaacaaatactacgccgacagcgtgaagggcagattcaccatctccagagacaacagcaagaacaccctgtacctccagatgaactccctgagagccgaggacaccgccgtgtactactgtgccagagacaccgacggctacgacttcgattattggggccagggaaccctggtcaccgtgtcatctgcctctacaaagggaccctccgtgtttcctctggctcccagcagcaagtctacaagcggaggaacagccgctctgggctgcctggtcaaggattactttcccgagcctgtgaccgtgtcctggaatagcggagcactgacaagcggcgtgcacacctttccagccgtgctgcaaagcagcggcctgtactctctgagcagcgtggtcacagtgcctagctctagcctgggcacccagacctacatctgcaatgtgaaccacaagcctagcaacaccaaggtggacaagagagtggaacccaagagctgtggtacccagagttttgggttgttggaccctaaattgtgctatctgttggacggaatcctgttcatttacggagtgatcctgaccgcattgttcctgcgggttaagttttccagatccgcagacgcacccgcttaccaacaagggcagaaccaactctacaatgaacttaatttggggcggagggaagagtacgacgttctggacaaaaggaggggacgagatcccgagatgggcggaaagcctcgaaggaagaatccgcaagaggggctttataacgaactccagaaagataaaatggcagaagcctatagtgagattgggatgaagggagaaaggaggaggggtaaaggtcacgatgggttgtaccaaggattgagcacagccactaaagatacctatgatgcgctccacatgcaggccctgccgccaagacgcgccaagagaagcggatctggcgtgaagcagaccctgaatttcgacctgctgaagctggctggcgacgtggaatccaacccaggcccttctagaggccatatgaccgagtacaagcccacggtgcgcctcgccacccgcgacgacgtccccagggccgtacgcaccctcgccgccgcgttcgccgactaccccgccacgcgccacaccgtcgatccggaccgccacatcgagcgggtcaccgagctgcaagaactcttcctcacgcgcgtcgggctcgacatcggcaaggtgtgggtcgcggacgacggcgccgcggtggcggtctggaccacgccggagagcgtcgaagcgggggcggtgttcgccgagatcggcccgcgcatggccgagttgagcggttcccggctggccgcgcagcaacagatggaaggcctcctggcgccgcaccggcccaaggagcccgcgtggttcctggccaccgtcggcgtctcgcccgaccaccagggcaagggtctgggcagcgccgtcgtgctccccggagtggaggcggccgagcgcgccggggtgcccgccttcctggagacctccgcgccccgcaacctccccttctacgagcggctcggcttcaccgtcaccgccgacgtcgaggtgcccgaaggaccgcgcacctggtgcatgacccgcaagcccggtgcctga

SEQ ID NO: 20117 - DNA, 2439 bp, synthetic construct
  source 1..2439: mol_type = other DNA
atggccttaccagtgaccgccttgctcctgccgctggccttgctgctccacgccgccaggccggacatccagatgacacagagccctagcagcctgtctgccagcgtgggagacagagtgaccatcacctgtagagccagccagagcgtgtccagctacctggcttggtatcagcagaagcctggcaaggcccctaagctgctgatctacgacgccagcaatagagccacaggcgtgcccagcagattttctggctctggcagcggcaccgacttcaccctgacaatatctagcctccagcctgaggacttcgccacctactactgtcagcagaggaccaactggcccctgacatttggccagggcaccaaggtggaaatcaagagactcgaggacctgaagaacgtgttcccacctgaggtggccgtgttcgagcctagcgaggccgagatcagccacacccagaaagccaccctcgtgtgcctggctaccggcttctaccccgaccatgtggaactgtcttggtgggtcaacggcaaagaggtgcacagcggcgtgtctaccgacccccagccactgaaagaacagcccgccctgaacgacagccggtactgcctgagcagcagactgagagtgtccgccaccttctggcagaacccccggaaccacttcagatgccaggtgcagttctacggcctgagcgagaacgacgagtggacccaggacagagccaagcccgtgacccagatcgtgtctgccgaagcctggggcagagccgattgcggatcccagagcttcggcctgctggaccccaagctgtgctacctgctggatggcatcctgttcatctacggcgtgatcctgaccgccctgttcctgagagtgaagttcagcagaagcgccgacgcccctgcctaccagcagggacagaaccaactgtacaacgagctgaacctgggcagacgggaagagtacgacgtgctggacaagcggagaggcagggaccctgagatgggcggaaagccccggagaaagaacccccaggaaggactgtataacgaactccagaaagacaagatggccgaagcctacagcgagatcggcatgaagggcgagcggagaagaggcaagggccacgatggcctgtaccagggcctgagcaccgccaccaaggacacctatgacgccctgcacatgcaggccctgcctccaagaagggccaagcgatctggatctggagcaacaaacttctcactactcaaacaagcaggtgacgtggaggagaatcccgggcctactagtatggactggatttggcgcatccttttccttgtcggcgctgctaccggcgcgcattccttcgaagaagttcagctggttgaatctggcggcggactggttcaacctggcggatctctgagactgagctgtgccgccagcggcttcaccttcagcagctacatcatgcactgggtccgacaggcccctggcaaaggacttgaatgggtcgccgtgatctcctacgacggcagaaacaaatactacgccgacagcgtgaagggcagattcaccatctccagagacaacagcaagaacaccctgtacctccagatgaactccctgagagccgaggacaccgccgtgtactactgtgccagagacaccgacggctacgacttcgattattggggccagggaaccctggtcaccgtgtcatctacgcgtatccagaaccctgatcctgccgtgtaccagctgcgggatagcaagagcagcgacaagagcgtgtgtctgttcaccgacttcgacagccagaccaacgtgtcccagagcaaggactccgacgtgtacatcaccgataagaccgtgctggacatgcggagcatggacttcaagagcaactccgccgtggcctggtccaacaagtccgatttcgcctgcgccaacgccttcaacaacagcattatccccgaggacacattcttcccaagccccgagagcagctgcggtacccagagttttgggttgttggaccctaaattgtgctatctgttggacggaatcctgttcatttacggagtgatcctgaccgcattgttcctgcgggttaagttttccagatccgcagacgcacccgcttaccaacaagggcagaaccaactctacaatgaacttaatttggggcggagggaagagtacgacgttctggacaaaaggaggggacgagatcccgagatgggcggaaagcctcgaaggaagaatccgcaagaggggctttataacgaactccagaaagataaaatggcagaagcctatagtgagattgggatgaagggagaaaggaggaggggtaaaggtcacgatgggttgtaccaaggattgagcacagccactaaagatacctatgatgcgctccacatgcaggccctgccgccaaga

SEQ ID NO: 20118 - DNA, 1482 bp, synthetic construct
  source 1..1482: mol_type = other DNA
atggccttaccagtgaccgccttgctcctgccgctggccttgctgctccacgccgccaggccggacatccagatgacacagagccctagcagcctgtctgccagcgtgggagacagagtgaccatcacctgtagagccagccagggcatctcttcttggctggcctggtatcagcagaagcctggcaaggcccctaagctgctgatctatgccgccagctctctccagagcggagtgcctagcagattttctggcagcggctccggcaccgatttcaccctgacaatatccagcctccagcctgaggacttcgccacctactactgccagcagtacaacagctaccctctgaccttcggccagggcaccaaggtggaaatcaaaagaggcggaggcggaagtggaggcggaggatctggcggcggaggctctgaagtgcagctggttgaatcaggtggcggcctggttcaacctggcggatctctgagactgagctgtgccgcctccggcttcacctttagcgatcacggaatgcactgggtccgacaggcccctggaaaaggactggaatgggtcgccgtgatttggtacgacggcagcaacaagtattacgccgacagcgtgaagggcagattcaccatcagccgggacaacagcaagaacaccctgtacctccagatgaactccctgagagccgaggacaccgccgtgtactactgtgccagagacagcatcatggtccgaggcgattattggggccagggaaccctggtcacagtgtctagtacgcgtgagcagaaactgatctcggaagaggatctgaaaattgaagttatgtatcctcctccttacctagacaatgagaagagcaatggaaccattatccatgtgaaagggaaacacctttgtccaagtcccctatttcccggaccttctaagcccttttgggtgctggtggtggttgggggagtcctggcttgctatagcttgctagtaacagtggcctttattattttctgggtgaggagtaagaggagcaggctcctgcacagtgactacatgaacatgactccacgccgccccggacccacccgcaagcattaccagccctatgccccaccacgcgacttcgcagcctatcgctccagagtgaagttcagcaggagcgcagacgcccccgcgtaccagcagggccagaaccagctctataacgagctcaatctaggacgaagagaggagtacgatgttttggacaagagacgtggccgggaccctgagatggggggaaagccgagaaggaagaaccctcaggaaggcctgtacaatgaactgcagaaagataagatggcggaggcctacagtgagattgggatgaaaggcgagcgccggaggggcaaggggcacgatggcctttaccagggtctcagtacagccaccaaggacacctacgacgcccttcacatgcaggccctgccccctcgc

SEQ ID NO: 20119 - DNA, 1503 bp, synthetic construct
  source 1..1503: mol_type = other DNA
atggccttaccagtgaccgccttgctcctgccgctggccttgctgctccacgccgccaggccggacatccagatgacacagagccctagcagcctgtctgccagcgtgggagacagagtgaccatcacctgtagagccagccagggcatctcttcttggctggcctggtatcagcagaagcctggcaaggcccctaagctgctgatctatgccgccagctctctccagagcggagtgcctagcagattttctggcagcggctccggcaccgatttcaccctgacaatatccagcctccagcctgaggacttcgccacctactactgccagcagtacaacagctaccctctgaccttcggccagggcaccaaggtggaaatcaaaagaggcggaggcggaagtggaggcggaggatctggcggcggaggctctgaagtgcagctggttgaatcaggtggcggcctggttcaacctggcggatctctgagactgagctgtgccgcctccggcttcacctttagcgatcacggaatgcactgggtccgacaggcccctggaaaaggactggaatgggtcgccgtgatttggtacgacggcagcaacaagtattacgccgacagcgtgaagggcagattcaccatcagccgggacaacagcaagaacaccctgtacctccagatgaactccctgagagccgaggacaccgccgtgtactactgtgccagagacagcatcatggtccgaggcgattattggggccagggaaccctggtcacagtgtctagtacgcgtgagcagaaactgatctcggaagaggatctggcgaagcccaccacgacgccagcgccgcgaccaccaacaccggcgcccaccatcgcgtcgcagcccctgtccctgcgcccagaggcgtgccggccagcggcggggggcgcagtgcacacgagggggctggacttcgcctgtgacatctacatctgggcgcccttggccgggacttgtggggtccttctcctgtcactggttatcaccctttactgcaaacggggcagaaagaaactcctgtatatattcaaacaaccatttatgagaccagtacaaactactcaagaggaagatggctgtagctgccgatttccagaagaagaagaaggaggatgtgaactgagagtgaagttcagcaggagcgcagacgcccccgcgtaccagcagggccagaaccagctctataacgagctgaatctaggacgaagagaggagtacgatgttttggacaagagacgtggccgggaccctgagatggggggaaagccgagaaggaagaaccctcaggaaggcctgtacaatgaactgcagaaagataagatggcggaggcctacagtgagattgggatgaaaggcgagcgccggaggggcaaggggcacgatggcctttaccagggtctcagtacagccaccaaggacacctacgacgcccttcacatgcaggccctgccccctcgctga

SEQ ID NO: 20120 - DNA, 1503 bp, synthetic construct
  source 1..1503: mol_type = other DNA
atggccttaccagtgaccgccttgctcctgccgctggccttgctgctccacgccgccaggccggaagtgcagctggttgaatcaggtggcggcctggttcaacctggcggatctctgagactgagctgtgccgcctccggcttcacctttagcgatcacggaatgcactgggtccgacaggcccctggaaaaggactggaatgggtcgccgtgatttggtacgacggcagcaacaagtattacgccgacagcgtgaagggcagattcaccatcagccgggacaacagcaagaacaccctgtacctccagatgaactccctgagagccgaggacaccgccgtgtactactgtgccagagacagcatcatggtccgaggcgattattggggccagggaaccctggtcacagtgtctagtggcggaggcggaagtggaggcggaggatctggcggcggaggctctgacatccagatgacacagagccctagcagcctgtctgccagcgtgggagacagagtgaccatcacctgtagagccagccagggcatctcttcttggctggcctggtatcagcagaagcctggcaaggcccctaagctgctgatctatgccgccagctctctccagagcggagtgcctagcagattttctggcagcggctccggcaccgatttcaccctgacaatatccagcctccagcctgaggacttcgccacctactactgccagcagtacaacagctaccctctgaccttcggccagggcaccaaggtggaaatcaaaagaacgcgtgagcagaaactgatctcggaagaggatctggcgaagcccaccacgacgccagcgccgcgaccaccaacaccggcgcccaccatcgcgtcgcagcccctgtccctgcgcccagaggcgtgccggccagcggcggggggcgcagtgcacacgagggggctggacttcgcctgtgacatctacatctgggcgcccttggccgggacttgtggggtccttctcctgtcactggttatcaccctttactgcaaacggggcagaaagaaactcctgtatatattcaaacaaccatttatgagaccagtacaaactactcaagaggaagatggctgtagctgccgatttccagaagaagaagaaggaggatgtgaactgagagtgaagttcagcaggagcgcagacgcccccgcgtaccagcagggccagaaccagctctataacgagctgaatctaggacgaagagaggagtacgatgttttggacaagagacgtggccgggaccctgagatggggggaaagccgagaaggaagaaccctcaggaaggcctgtacaatgaactgcagaaagataagatggcggaggcctacagtgagattgggatgaaaggcgagcgccggaggggcaaggggcacgatggcctttaccagggtctcagtacagccaccaaggacacctacgacgcccttcacatgcaggccctgccccctcgctga

SEQ ID NO: 20121 - DNA, 2742 bp, synthetic construct
  source 1..2742: mol_type = other DNA
atggccttaccagtgaccgccttgctcctgccgctggccttgctgctccacgccgccaggccggacatccagatgacacagagccctagcagcctgtctgccagcgtgggagacagagtgaccatcacctgtagagccagccagggcatctcttcttggctggcctggtatcagcagaagcctggcaaggcccctaagctgctgatctatgccgccagctctctccagagcggagtgcctagcagattttctggcagcggctccggcaccgatttcaccctgacaatatccagcctccagcctgaggacttcgccacctactactgccagcagtacaacagctaccctctgaccttcggccagggcaccaaggtggaaatcaaaagaggcggaggcggaagtggaggcggaggatctggcggcggaggctctgaagtgcagctggttgaatcaggtggcggcctggttcaacctggcggatctctgagactgagctgtgccgcctccggcttcacctttagcgatcacggaatgcactgggtccgacaggcccctggaaaaggactggaatgggtcgccgtgatttggtacgacggcagcaacaagtattacgccgacagcgtgaagggcagattcaccatcagccgggacaacagcaagaacaccctgtacctccagatgaactccctgagagccgaggacaccgccgtgtactactgtgccagagacagcatcatggtccgaggcgattattggggccagggaaccctggtcacagtgtctagtacgcgtgagcagaaactgatctcggaagaggatctggcgaagcccaccacgacgccagcgccgcgaccaccaacaccggcgcccaccatcgcgtcgcagcccctgtccctgcgcccagaggcgtgccggccagcggcggggggcgcagtgcacacgagggggctggacttcgcctgtgacatctacatctgggcgcccttggccgggacttgtggggtccttctcctgtcactggttatcaccctttactgcgggcgcgccagagtgaagttcagcaggagcgcagacgcccccgcgtaccagcagggccagaaccagctctataacgagctgaatctaggacgaagagaggagtacgatgttttggacaagagacgtggccgggaccctgagatggggggaaagccgagaaggaagaaccctcaggaaggcctgtacaatgaactgcagaaagataagatggcggaggcctacagtgagattgggatgaaaggcgagcgccggaggggcaaggggcacgatggcctttaccagggtctcagtacagccaccaaggacacctacgacgcccttcacatgcaggccctgccccctcgctctagaggatctggagcaacaaacttctcactactcaaacaagcaggtgacgtggaggagaatcccgggcctgggatccacatggccacttacgaggttctctgtgaggtggcgcggaaactgggcacggatgacagggaagtggtattgttcctcctaaacgtgttcatacctcaacccacactggcccaattaattggagctcttagagctttaaaggaggagggcaggttaacgtttcccctgttagcggaatgtctgtttcgtgcaggtcgcagagacctcttgcgcgacctgcttcacttagacccgcgttttttagagcgccacctagcgggcacaatgagttatttcagcccttatcagctcactgttctccacgtagacggggagctgtgtgcgagggatattaggtctttgatatttttaagcaaggacactatagggtctcgcagcacaccacagacattcttacactgggtgtactgtatggaaaacttagacctactgggtcccactgacgtggatgccctaatgtcaatgcttagatctttgtcaagagtagacctacagcgccaagtgcaaaccctaatgggccttcacctttccggcccatcacactcccaacactatcgccatacaccactcgagaccgatttctacgactacaaggacgacgatgacaagactagtggctccggcgagggcagaggaagtctactaacctgcggagatgtggaagaaaatcctggcccacatatgaccgagtacaagcccacggtgcgcctcgccacccgcgacgacgtccccagggccgtacgcaccctcgccgccgcgttcgccgactaccccgccacgcgccacaccgtcgatccggaccgccacatcgagcgggtcaccgagctgcaagaactcttcctcacgcgcgtcgggctcgacatcggcaaggtgtgggtcgcggacgacggcgccgcggtggcggtctggaccacgccggagagcgtcgaagcgggggcggtgttcgccgagatcggcccgcgcatggccgagttgagcggttcccggctggccgcgcagcaacagatggaaggcctcctggcgccgcaccggcccaaggagcccgcgtggttcctggccaccgtcggcgtctcgcccgaccaccagggcaagggtctgggcagcgccgtcgtgctccccggagtggaggcggccgagcgcgccggggtgcccgccttcctggagacctccgcgccccgcaacctccccttctacgagcggctcggcttcaccgtcaccgccgacgtcgaggtgcccgaaggaccgcgcacctggtgcatgacccgcaagcccggtgcctga

SEQ ID NO: 20122 - DNA, 2562 bp, synthetic construct
  source 1..2562: mol_type = other DNA
atggccttaccagtgaccgccttgctcctgccgctggccttgctgctccacgccgccaggccggacatccagatgacacagagccctagcagcctgtctgccagcgtgggagacagagtgaccatcacctgtagagccagccagggcatctcttcttggctggcctggtatcagcagaagcctggcaaggcccctaagctgctgatctatgccgccagctctctccagagcggagtgcctagcagattttctggcagcggctccggcaccgatttcaccctgacaatatccagcctccagcctgaggacttcgccacctactactgccagcagtacaacagctaccctctgaccttcggccagggcaccaaggtggaaatcaaaagactcgagatccagaaccctgatcctgccgtgtaccagctgcgggatagcaagagcagcgacaagagcgtgtgtctgttcaccgacttcgacagccagaccaacgtgtcccagagcaaggactccgacgtgtacatcaccgataagtgcgtgctggacatgcggagcatggacttcaagagcaactccgccgtggcctggtccaacaagtccgatttcgcctgcgccaacgccttcaacaacagcattatccccgaggacacattcttcccaagcagcgacgtgccctgcgacgtgaagctggtggaaaagagcttcgagacagacaccaacctgaacttccagaacctgagcgtgatcggcttcagaatcctgctgctgaaagtggccggctttaacctgctgatgaccctgcggctgtggtccagccgcgccaagagaagcggatctggcgtgaagcagaccctgaatttcgacctgctgaagctggctggcgacgtggaatccaacccaggccctactagtatggactggatttggcgcatccttttccttgtcggcgctgctaccggcgcgcattccttcgaagaagtgcagctggttgaatcaggtggcggcctggttcaacctggcggatctctgagactgagctgtgccgcctccggcttcacctttagcgatcacggaatgcactgggtccgacaggcccctggaaaaggactggaatgggtcgccgtgatttggtacgacggcagcaacaagtattacgccgacagcgtgaagggcagattcaccatcagccgggacaacagcaagaacaccctgtacctccagatgaactccctgagagccgaggacaccgccgtgtactactgtgccagagacagcatcatggtccgaggcgattattggggccagggaaccctggtcacagtgtctagtacgcgtgaggacctgaagaacgtgttcccacctgaggtggccgtgttcgagcctagcaaggccgagatcgcccacacccagaaagccaccctcgtgtgcctggctaccggcttctaccccgaccatgtggaactgtcttggtgggtcaacggcaaagaggtgcacagcggcgtgtgtaccgacccccagccactgaaagaacagcccgccctgaacgacagccggtactgcctgagcagcagactgagagtgtccgccaccttctggcagaacccccggaaccacttcagatgccaggtgcagttctacggcctgagcgagaacgacgagtggacccaggacagagccaagcccgtgacccagatcgtgtctgccgaagcctggggcagagccgattgcggcatcaccagcgccagctaccaccagggcgtgctgagcgccaccatcctgtacgagatcctgctgggcaaggccaccctgtacgccgtgctggtgtctgccctggtgctgatggctatggtcaagcggaaggacagccggggaagggccaagcgatctggatctggagcaacaaacttctcactactcaaacaagcaggtgacgtggaggagaatcccgggccttctagaggccatatgaccgagtacaagcccacggtgcgcctcgccacccgcgacgacgtccccagggccgtacgcaccctcgccgccgcgttcgccgactaccccgccacgcgccacaccgtcgatccggaccgccacatcgagcgggtcaccgagctgcaagaactcttcctcacgcgcgtcgggctcgacatcggcaaggtgtgggtcgcggacgacggcgccgcggtggcggtctggaccacgccggagagcgtcgaagcgggggcggtgttcgccgagatcggcccgcgcatggccgagttgagcggttcccggctggccgcgcagcaacagatggaaggcctcctggcgccgcaccggcccaaggagcccgcgtggttcctggccaccgtcggcgtctcgcccgaccaccagggcaagggtctgggcagcgccgtcgtgctccccggagtggaggcggccgagcgcgccggggtgcccgccttcctggagacctccgcgccccgcaacctccccttctacgagcggctcggcttcaccgtcaccgccgacgtcgaggtgcccgaaggaccgcgcacctggtgcatgacccgcaagcccggtgcctga

SEQ ID NO: 20123 - DNA, 2559 bp, synthetic construct
  source 1..2559: mol_type = other DNA
atggccttaccagtgaccgccttgctcctgccgctggccttgctgctccacgccgccaggccggacatccagatgacacagagccctagcagcctgtctgccagcgtgggagacagagtgaccatcacctgtagagccagccagggcatctcttcttggctggcctggtatcagcagaagcctggcaaggcccctaagctgctgatctatgccgccagctctctccagagcggagtgcctagcagattttctggcagcggctccggcaccgatttcaccctgacaatatccagcctccagcctgaggacttcgccacctactactgccagcagtacaacagctaccctctgaccttcggccagggcaccaaggtggaaatcaaaagactcgaggacctgaagaacgtgttcccacctgaggtggccgtgttcgagcctagcaaggccgagatcgcccacacccagaaagccaccctcgtgtgcctggctaccggcttctaccccgaccatgtggaactgtcttggtgggtcaacggcaaagaggtgcacagcggcgtgtgtaccgacccccagccactgaaagaacagcccgccctgaacgacagccggtactgcctgagcagcagactgagagtgtccgccaccttctggcagaacccccggaaccacttcagatgccaggtgcagttctacggcctgagcgagaacgacgagtggacccaggacagagccaagcccgtgacccagatcgtgtctgccgaagcctggggcagagccgattgcggcatcaccagcgccagctaccaccagggcgtgctgagcgccaccatcctgtacgagatcctgctgggcaaggccaccctgtacgccgtgctggtgtctgccctggtgctgatggctatggtcaagcggaaggacagccggggaagggccaagcgatctggatctggagcaacaaacttctcactactcaaacaagcaggtgacgtggaggagaatcccgggcctactagtatggactggatttggcgcatccttttccttgtcggcgctgctaccggcgcgcattccttcgaagaagtgcagctggttgaatcaggtggcggcctggttcaacctggcggatctctgagactgagctgtgccgcctccggcttcacctttagcgatcacggaatgcactgggtccgacaggcccctggaaaaggactggaatgggtcgccgtgatttggtacgacggcagcaacaagtattacgccgacagcgtgaagggcagattcaccatcagccgggacaacagcaagaacaccctgtacctccagatgaactccctgagagccgaggacaccgccgtgtactactgtgccagagacagcatcatggtccgaggcgattattggggccagggaaccctggtcacagtgtctagtacgcgtatccagaaccctgatcctgccgtgtaccagctgcgggatagcaagagcagcgacaagagcgtgtgtctgttcaccgacttcgacagccagaccaacgtgtcccagagcaaggactccgacgtgtacatcaccgataagtgcgtgctggacatgcggagcatggacttcaagagcaactccgccgtggcctggtccaacaagtccgatttcgcctgcgccaacgccttcaacaacagcattatccccgaggacacattcttcccaagcagcgacgtgccctgcgacgtgaagctggtggaaaagagcttcgagacagacaccaacctgaacttccagaacctgagcgtgatcggcttcagaatcctgctgctgaaagtggccggctttaacctgctgatgaccctgcggctgtggtccagccgcgccaagagaagcggatctggcgtgaagcagaccctgaatttcgacctgctgaagctggctggcgacgtggaatccaacccaggcccttctagaggccatatgaccgagtacaagcccacggtgcgcctcgccacccgcgacgacgtccccagggccgtacgcaccctcgccgccgcgttcgccgactaccccgccacgcgccacaccgtcgatccggaccgccacatcgagcgggtcaccgagctgcaagaactcttcctcacgcgcgtcgggctcgacatcggcaaggtgtgggtcgcggacgacggcgccgcggtggcggtctggaccacgccggagagcgtcgaagcgggggcggtgttcgccgagatcggcccgcgcatggccgagttgagcggttcccggctggccgcgcagcaacagatggaaggcctcctggcgccgcaccggcccaaggagcccgcgtggttcctggccaccgtcggcgtctcgcccgaccaccagggcaagggtctgggcagcgccgtcgtgctccccggagtggaggcggccgagcgcgccggggtgcccgccttcctggagacctccgcgccccgcaacctccccttctacgagcggctcggcttcaccgtcaccgccgacgtcgaggtgcccgaaggaccgcgcacctggtgcatgacccgcaagcccggtgcctga

SEQ ID NO: 20124 - DNA, 1857 bp, synthetic construct
  source 1..1857: mol_type = other DNA
atggccttaccagtgaccgccttgctcctgccgctggccttgctgctccacgccgccaggccggacatccagatgacacagagccctagcagcctgtctgccagcgtgggagacagagtgaccatcacctgtagagccagccagggcatctcttcttggctggcctggtatcagcagaagcctggcaaggcccctaagctgctgatctatgccgccagctctctccagagcggagtgcctagcagattttctggcagcggctccggcaccgatttcaccctgacaatatccagcctccagcctgaggacttcgccacctactactgccagcagtacaacagctaccctctgaccttcggccagggcaccaaggtggaaatcaaaagactcgaggacctgaagaacgtgttcccacctgaggtggccgtgttcgagcctagcgaggccgagatcagccacacccagaaagccaccctcgtgtgcctggctaccggcttctaccccgaccatgtggaactgtcttggtgggtcaacggcaaagaggtgcacagcggcgtgtgtaccgacccccagccactgaaagaacagcccgccctgaacgacagccggtactgcctgagcagcagactgagagtgtccgccaccttctggcagaacccccggaaccacttcagatgccaggtgcagttctacggcctgagcgagaacgacgagtggacccaggacagagccaagcccgtgacccagatcgtgtctgccgaagcctggggcagagccgattgcggctttaccagcgagagctaccagcagggcgtgctgagcgccaccatcctgtacgagatcctgctgggcaaggccaccctgtacgccgtgctggtgtctgccctggtgctgatggctatggtcaagcggaaggacagccggggaagggccaagcgatctggatctggagcaacaaacttctcactactcaaacaagcaggtgacgtggaggagaatcccgggcctactagtatggactggatttggcgcatccttttccttgtcggcgctgctaccggcgcgcattccttcgaagaagtgcagctggttgaatcaggtggcggcctggttcaacctggcggatctctgagactgagctgtgccgcctccggcttcacctttagcgatcacggaatgcactgggtccgacaggcccctggaaaaggactggaatgggtcgccgtgatttggtacgacggcagcaacaagtattacgccgacagcgtgaagggcagattcaccatcagccgggacaacagcaagaacaccctgtacctccagatgaactccctgagagccgaggacaccgccgtgtactactgtgccagagacagcatcatggtccgaggcgattattggggccagggaaccctggtcacagtgtctagtacgcgtatccagaaccctgatcctgccgtgtaccagctgcgggatagcaagagcagcgacaagagcgtgtgtctgttcaccgacttcgacagccagaccaacgtgtcccagagcaaggactccgacgtgtacatcaccgataagtgcgtgctggacatgcggagcatggacttcaagagcaactccgccgtggcctggtccaacaagtccgatttcgcctgcgccaacgccttcaacaacagcattatccccgaggacacattcttcccaagccccgagagcagctgcgacgtgaagctggtggaaaagagcttcgagacagacaccaacctgaacttccagaacctgagcgtgatcggcttcagaatcctgctgctgaaagtggccggctttaacctgctgatgaccctgcggctgtggtccagc

SEQ ID NO: 20125 - DNA, 2532 bp, synthetic construct
  source 1..2532: mol_type = other DNA
atggccttaccagtgaccgccttgctcctgccgctggccttgctgctccacgccgccaggccggacatccagatgacacagagccctagcagcctgtctgccagcgtgggagacagagtgaccatcacctgtagagccagccagggcatctcttcttggctggcctggtatcagcagaagcctggcaaggcccctaagctgctgatctatgccgccagctctctccagagcggagtgcctagcagattttctggcagcggctccggcaccgatttcaccctgacaatatccagcctccagcctgaggacttcgccacctactactgccagcagtacaacagctaccctctgaccttcggccagggcaccaaggtggaaatcaaaagactcgaggacctgaagaacgtgttcccacctgaggtggccgtgttcgagcctagcgaggccgagatcagccacacccagaaagccaccctcgtgtgcctggctaccggcttctaccccgaccatgtggaactgtcttggtgggtcaacggcaaagaggtgcacagcggcgtgtgtaccgacccccagccactgaaagaacagcccgccctgaacgacagccggtactgcctgagcagcagactgagagtgtccgccaccttctggcagaacccccggaaccacttcagatgccaggtgcagttctacggcctgagcgagaacgacgagtggacccaggacagagccaagcccgtgacccagatcgtgtctgccgaagcctggggcagagccgattgcggctttaccagcgagagctaccagcagggcgtgctgagcgccaccatcctgtacgagatcctgctgggcaaggccaccctgtacgccgtgctggtgtctgccctggtgctgatggctatggtcaagcggaaggacagccggggaagggccaagcgatctggatctggagcaacaaacttctcactactcaaacaagcaggtgacgtggaggagaatcccgggcctactagtatggactggatttggcgcatccttttccttgtcggcgctgctaccggcgcgcattccttcgaagaagtgcagctggttgaatcaggtggcggcctggttcaacctggcggatctctgagactgagctgtgccgcctccggcttcacctttagcgatcacggaatgcactgggtccgacaggcccctggaaaaggactggaatgggtcgccgtgatttggtacgacggcagcaacaagtattacgccgacagcgtgaagggcagattcaccatcagccgggacaacagcaagaacaccctgtacctccagatgaactccctgagagccgaggacaccgccgtgtactactgtgccagagacagcatcatggtccgaggcgattattggggccagggaaccctggtcacagtgtctagtacgcgtatccagaaccctgatcctgccgtgtaccagctgcgggatagcaagagcagcgacaagagcgtgtgtctgttcaccgacttcgacagccagaccaacgtgtcccagagcaaggactccgacgtgtacatcaccgataagtgcgtgctggacatgcggagcatggacttcaagagcaactccgccgtggcctggtccaacaagtccgatttcgcctgcgccaacgccttcaacaacagcattatccccgaggacacattcttcccaagccccgagagcagctgcgacgtgaagctggtggaaaagagcttcgagacagacaccaacctgaacttccagaacctgagcgtgatcggcttcagaatcctgctgctgaaagtggccggctttaacctgctgatgaccctgcggctgtggtccagccgcgccaagagaagcggatctggcgtgaagcagaccctgaatttcgacctgctgaagctggctggcgacgtggaatccaacccaggcccttctagaggcgggatccacaccatggctacctacgaggtgctgtgcgaggtggcaagaaagctgggcaccgacgacagagaagtggtgctgttcctgctgaacgtgttcatccctcagcctacactggcccagctgatcggtgcactgagagccctgaaagaggaaggccggctgacctttcctctgctggccgaatgcctgttcagagccggaagaagggatctgctgcgggacctgctgcatctggaccccagatttctggaaagacacctggccggcaccatgagctacttcagcccttaccagctgaccgtgctgcacgttgacggcgaactgtgcgccagagatattcggagcctgatcttcctgagcaaggacaccatcggcagccggtctacccctcagacatttctgcactgggtgtactgcatggaaaacctggacctgctcggccccacagatgtggatgccctgatgtccatgctgagaagcctgagcagagtggacctccagagacaggtgcagacactgatgggactgcacctgagcggacctagccacagccagcactacagacacacccct

SEQ ID NO: 20126 - DNA, 1869 bp, synthetic construct
  source 1..1869: mol_type = other DNA
atggccttaccagtgaccgccttgctcctgccgctggccttgctgctccacgccgccaggccggacatccagatgacacagagccctagcagcctgtctgccagcgtgggagacagagtgaccatcacctgtagagccagccagggcatctcttcttggctggcctggtatcagcagaagcctggcaaggcccctaagctgctgatctatgccgccagctctctccagagcggagtgcctagcagattttctggcagcggctccggcaccgatttcaccctgacaatatccagcctccagcctgaggacttcgccacctactactgccagcagtacaacagctaccctctgaccttcggccagggcaccaaggtggaaatcaaaagactcgagatccagaaccctgatcctgccgtgtaccagctgcgggatagcaagagcagcgacaagagcgtgtgtctgttcaccgacttcgacagccagaccaacgtgtcccagagcaaggactccgacgtgtacatcaccgataagtgcgtgctggacatgcggagcatggacttcaagagcaactccgccgtggcctggtccaacaagtccgatttcgcctgcgccaacgccttcaacaacagcattatccccgaggacacattcttcccaagccccgagagcagctgcgacgtgaagctggtggaaaagagcttcgagacagacaccaacctgaacttccagaacctgagcgtgatcggcttcagaatcctgctgctgaaagtggccggctttaacctgctgatgaccctgcggctgtggtccagccgcgccaagagaagcggatctggcgtgaagcagaccctgaatttcgacctgctgaagctggctggcgacgtggaatccaacccaggccctactagtatggactggatttggcgcatccttttccttgtcggcgctgctaccggcgcgcattccttcgaagaagtgcagctggttgaatcaggtggcggcctggttcaacctggcggatctctgagactgagctgtgccgcctccggcttcacctttagcgatcacggaatgcactgggtccgacaggcccctggaaaaggactggaatgggtcgccgtgatttggtacgacggcagcaacaagtattacgccgacagcgtgaagggcagattcaccatcagccgggacaacagcaagaacaccctgtacctccagatgaactccctgagagccgaggacaccgccgtgtactactgtgccagagacagcatcatggtccgaggcgattattggggccagggaaccctggtcacagtgtctagtacgcgtgaggacctgaagaacgtgttcccacctgaggtggccgtgttcgagcctagcgaggccgagatcagccacacccagaaagccaccctcgtgtgcctggctaccggcttctaccccgaccatgtggaactgtcttggtgggtcaacggcaaagaggtgcacagcggcgtgtgtaccgacccccagccactgaaagaacagcccgccctgaacgacagccggtactgcctgagcagcagactgagagtgtccgccaccttctggcagaacccccggaaccacttcagatgccaggtgcagttctacggcctgagcgagaacgacgagtggacccaggacagagccaagcccgtgacccagatcgtgtctgccgaagcctggggcagagccgattgcggctttaccagcgagagctaccagcagggcgtgctgagcgccaccatcctgtacgagatcctgctgggcaaggccaccctgtacgccgtgctggtgtctgccctggtgctgatggctatggtcaagcggaaggacagccgggga

SEQ ID NO: 20127 - DNA, 2535 bp, synthetic construct
  source 1..2535: mol_type = other DNA
atggccttaccagtgaccgccttgctcctgccgctggccttgctgctccacgccgccaggccggacatccagatgacacagagccctagcagcctgtctgccagcgtgggagacagagtgaccatcacctgtagagccagccagggcatctcttcttggctggcctggtatcagcagaagcctggcaaggcccctaagctgctgatctatgccgccagctctctccagagcggagtgcctagcagattttctggcagcggctccggcaccgatttcaccctgacaatatccagcctccagcctgaggacttcgccacctactactgccagcagtacaacagctaccctctgaccttcggccagggcaccaaggtggaaatcaaaagactcgagatccagaaccctgatcctgccgtgtaccagctgcgggatagcaagagcagcgacaagagcgtgtgtctgttcaccgacttcgacagccagaccaacgtgtcccagagcaaggactccgacgtgtacatcaccgataagtgcgtgctggacatgcggagcatggacttcaagagcaactccgccgtggcctggtccaacaagtccgatttcgcctgcgccaacgccttcaacaacagcattatccccgaggacacattcttcccaagccccgagagcagctgcgacgtgaagctggtggaaaagagcttcgagacagacaccaacctgaacttccagaacctgagcgtgatcggcttcagaatcctgctgctgaaagtggccggctttaacctgctgatgaccctgcggctgtggtccagccgcgccaagagaagcggatctggcgtgaagcagaccctgaatttcgacctgctgaagctggctggcgacgtggaatccaacccaggccctactagtatggactggatttggcgcatccttttccttgtcggcgctgctaccggcgcgcattccttcgaagaagtgcagctggttgaatcaggtggcggcctggttcaacctggcggatctctgagactgagctgtgccgcctccggcttcacctttagcgatcacggaatgcactgggtccgacaggcccctggaaaaggactggaatgggtcgccgtgatttggtacgacggcagcaacaagtattacgccgacagcgtgaagggcagattcaccatcagccgggacaacagcaagaacaccctgtacctccagatgaactccctgagagccgaggacaccgccgtgtactactgtgccagagacagcatcatggtccgaggcgattattggggccagggaaccctggtcacagtgtctagtacgcgtgaggacctgaagaacgtgttcccacctgaggtggccgtgttcgagcctagcgaggccgagatcagccacacccagaaagccaccctcgtgtgcctggctaccggcttctaccccgaccatgtggaactgtcttggtgggtcaacggcaaagaggtgcacagcggcgtgtgtaccgacccccagccactgaaagaacagcccgccctgaacgacagccggtactgcctgagcagcagactgagagtgtccgccaccttctggcagaacccccggaaccacttcagatgccaggtgcagttctacggcctgagcgagaacgacgagtggacccaggacagagccaagcccgtgacccagatcgtgtctgccgaagcctggggcagagccgattgcggctttaccagcgagagctaccagcagggcgtgctgagcgccaccatcctgtacgagatcctgctgggcaaggccaccctgtacgccgtgctggtgtctgccctggtgctgatggctatggtcaagcggaaggacagccggggaagggccaagcgatctggatctggagcaacaaacttctcactactcaaacaagcaggtgacgtggaggagaatcccgggccttctagaggcgggatccacaccatggctacctacgaggtgctgtgcgaggtggcaagaaagctgggcaccgacgacagagaagtggtgctgttcctgctgaacgtgttcatccctcagcctacactggcccagctgatcggtgcactgagagccctgaaagaggaaggccggctgacctttcctctgctggccgaatgcctgttcagagccggaagaagggatctgctgcgggacctgctgcatctggaccccagatttctggaaagacacctggccggcaccatgagctacttcagcccttaccagctgaccgtgctgcacgttgacggcgaactgtgcgccagagatattcggagcctgatcttcctgagcaaggacaccatcggcagccggtctacccctcagacatttctgcactgggtgtactgcatggaaaacctggacctgctcggccccacagatgtggatgccctgatgtccatgctgagaagcctgagcagagtggacctccagagacaggtgcagacactgatgggactgcacctgagcggacctagccacagccagcactacagacacacccct

SEQ ID NO: 20128 - DNA, 2694 bp, synthetic construct
  source 1..2694: mol_type = other DNA
atggccttaccagtgaccgccttgctcctgccgctggccttgctgctccacgccgccaggccgctcgaggggaaaccaattcccaaccctcttctgggactggattcaaccggcagcggcgaggacctgaagaacgtgttcccacctgaggtggccgtgttcgagcctagcaaggccgagatcgcccacacccagaaagccaccctcgtgtgcctggctaccggcttctaccccgaccatgtggaactgtcttggtgggtcaacggcaaagaggtgcacagcggcgtgtgtaccgacccccagccactgaaagaacagcccgccctgaacgacagccggtactgcctgagcagcagactgagagtgtccgccaccttctggcagaacccccggaaccacttcagatgccaggtgcagttctacggcctgagcgagaacgacgagtggacccaggacagagccaagcccgtgacccagatcgtgtctgccgaagcctggggcagagccgattgcggcatcaccagcgccagctaccaccagggcgtgctgagcgccaccatcctgtacgagatcctgctgggcaaggccaccctgtacgccgtgctggtgtctgccctggtgctgatggctatggtcaagcggaaggacagccggggaagggccaagcgatctggatctggagcaacaaacttctcactactcaaacaagcaggtgacgtggaggagaatcccgggcctactagcatggccttaccagtgaccgccttgctcctgccgctggccttgctgctccacgccgccaggccggacatccagatgacacagagccctagcagcctgtctgccagcgtgggagacagagtgaccatcacctgtagagccagccagggcatctcttcttggctggcctggtatcagcagaagcctggcaaggcccctaagctgctgatctatgccgccagctctctccagagcggagtgcctagcagattttctggcagcggctccggcaccgatttcaccctgacaatatccagcctccagcctgaggacttcgccacctactactgccagcagtacaacagctaccctctgaccttcggccagggcaccaaggtggaaatcaaaagaggcggaggcggaagtggaggcggaggatctggcggcggaggctctgaagtgcagctggttgaatcaggtggcggcctggttcaacctggcggatctctgagactgagctgtgccgcctccggcttcacctttagcgatcacggaatgcactgggtccgacaggcccctggaaaaggactggaatgggtcgccgtgatttggtacgacggcagcaacaagtattacgccgacagcgtgaagggcagattcaccatcagccgggacaacagcaagaacaccctgtacctccagatgaactccctgagagccgaggacaccgccgtgtactactgtgccagagacagcatcatggtccgaggcgattattggggccagggaaccctggtcacagtgtctagtacgcgtgagcagaaactgatctcggaagaggatgggagcggcatccagaaccctgatcctgccgtgtaccagctgcgggatagcaagagcagcgacaagagcgtgtgtctgttcaccgacttcgacagccagaccaacgtgtcccagagcaaggactccgacgtgtacatcaccgataagtgcgtgctggacatgcggagcatggacttcaagagcaactccgccgtggcctggtccaacaagtccgatttcgcctgcgccaacgccttcaacaacagcattatccccgaggacacattcttcccaagcagcgacgtgccctgcgacgtgaagctggtggaaaagagcttcgagacagacaccaacctgaacttccagaacctgagcgtgatcggcttcagaatcctgctgctgaaagtggccggctttaacctgctgatgaccctgcggctgtggtccagccgcgccaagagaagcggatctggcgtgaagcagaccctgaatttcgacctgctgaagctggctggcgacgtggaatccaacccaggcccttctagaggccatatgaccgagtacaagcccacggtgcgcctcgccacccgcgacgacgtccccagggccgtacgcaccctcgccgccgcgttcgccgactaccccgccacgcgccacaccgtcgatccggaccgccacatcgagcgggtcaccgagctgcaagaactcttcctcacgcgcgtcgggctcgacatcggcaaggtgtgggtcgcggacgacggcgccgcggtggcggtctggaccacgccggagagcgtcgaagcgggggcggtgttcgccgagatcggcccgcgcatggccgagttgagcggttcccggctggccgcgcagcaacagatggaaggcctcctggcgccgcaccggcccaaggagcccgcgtggttcctggccaccgtcggcgtctcgcccgaccaccagggcaagggtctgggcagcgccgtcgtgctccccggagtggaggcggccgagcgcgccggggtgcccgccttcctggagacctccgcgccccgcaacctccccttctacgagcggctcggcttcaccgtcaccgccgacgtcgaggtgcccgaaggaccgcgcacctggtgcatgacccgcaagcccggtgcctga

SEQ ID NO: 20129 - DNA, 2697 bp, synthetic construct
  source 1..2697: mol_type = other DNA
atggccttaccagtgaccgccttgctcctgccgctggccttgctgctccacgccgccaggccgctcgagcagaaactgatctcggaagaggatctgggctccggcgatcgccctgatcctgccgtgtaccagctgcgggatagcaagagcagcgacaagagcgtgtgtctgttcaccgacttcgacagccagaccaacgtgtcccagagcaaggactccgacgtgtacatcaccgataagtgcgtgctggacatgcggagcatggacttcaagagcaactccgccgtggcctggtccaacaagtccgatttcgcctgcgccaacgccttcaacaacagcattatccccgaggacacattcttcccaagccccgagagcagctgcgacgtgaagctggtggaaaagagcttcgagacagacaccaacctgaacttccagaacctgagcgtgatcggcttcagaatcctgctgctgaaagtggccggctttaacctgctgatgaccctgcggctgtggtccagctctagtcgcgccaagagaagcggatctggcgtgaagcagaccctgaatttcgacctgctgaagctggctggcgacgtggaatccaacccaggccccactagcatggccttaccagtgaccgccttgctcctgccgctggccttgctgctccacgccgccaggccggacatccagatgacacagagccctagcagcctgtctgccagcgtgggagacagagtgaccatcacctgtagagccagccagggcatctcttcttggctggcctggtatcagcagaagcctggcaaggcccctaagctgctgatctatgccgccagctctctccagagcggagtgcctagcagattttctggcagcggctccggcaccgatttcaccctgacaatatccagcctccagcctgaggacttcgccacctactactgccagcagtacaacagctaccctctgaccttcggccagggcaccaaggtggaaatcaaaagaggcggaggcggaagtggaggcggaggatctggcggcggaggctctgaagtgcagctggttgaatcaggtggcggcctggttcaacctggcggatctctgagactgagctgtgccgcctccggcttcacctttagcgatcacggaatgcactgggtccgacaggcccctggaaaaggactggaatgggtcgccgtgatttggtacgacggcagcaacaagtattacgccgacagcgtgaagggcagattcaccatcagccgggacaacagcaagaacaccctgtacctccagatgaactccctgagagccgaggacaccgccgtgtactactgtgccagagacagcatcatggtccgaggcgattattggggccagggaaccctggtcacagtgtctagtacgcgtgggaaaccaattcccaaccctcttctgggactggattcaaccggcagcggcgaggacctgaagaacgtgttcccacctgaggtggccgtgttcgagcctagcgaggccgagatcagccacacccagaaagccaccctcgtgtgcctggctaccggcttctaccccgaccatgtggaactgtcttggtgggtcaacggcaaagaggtgcacagcggcgtgtgtaccgacccccagccactgaaagaacagcccgccctgaacgacagccggtactgcctgagcagcagactgagagtgtccgccaccttctggcagaacccccggaaccacttcagatgccaggtgcagttctacggcctgagcgagaacgacgagtggacccaggacagagccaagcccgtgacccagatcgtgtctgccgaagcctggggcagagccgattgcggctttaccagcgagagctaccagcagggcgtgctgagcgccaccatcctgtacgagatcctgctgggcaaggccaccctgtacgccgtgctggtgtctgccctggtgctgatggctatggtcaagcggaaggacagccggggaagggccaagcgatctggatctggagcaacaaacttctcactactcaaacaagcaggtgacgtggaggagaatcccgggccttctagaggccatatgaccgagtacaagcccacggtgcgcctcgccacccgcgacgacgtccccagggccgtacgcaccctcgccgccgcgttcgccgactaccccgccacgcgccacaccgtcgatccggaccgccacatcgagcgggtcaccgagctgcaagaactcttcctcacgcgcgtcgggctcgacatcggcaaggtgtgggtcgcggacgacggcgccgcggtggcggtctggaccacgccggagagcgtcgaagcgggggcggtgttcgccgagatcggcccgcgcatggccgagttgagcggttcccggctggccgcgcagcaacagatggaaggcctcctggcgccgcaccggcccaaggagcccgcgtggttcctggccaccgtcggcgtctcgcccgaccaccagggcaagggtctgggcagcgccgtcgtgctccccggagtggaggcggccgagcgcgccggggtgcccgccttcctggagacctccgcgccccgcaacctccccttctacgagcggctcggcttcaccgtcaccgccgacgtcgaggtgcccgaaggaccgcgcacctggtgcatgacccgcaagcccggtgcctga

SEQ ID NO: 20130 - DNA, 2559 bp, synthetic construct
  source 1..2559: mol_type = other DNA
atggccttaccagtgaccgccttgctcctgccgctggccttgctgctccacgccgccaggccggacatccagatgacacagagccctagcagcctgtctgccagcgtgggagacagagtgaccatcacctgtagagccagccagggcatctcttcttggctggcctggtatcagcagaagcctggcaaggcccctaagctgctgatctatgccgccagctctctccagagcggagtgcctagcagattttctggcagcggctccggcaccgatttcaccctgacaatatccagcctccagcctgaggacttcgccacctactactgccagcagtacaacagctaccctctgaccttcggccagggcaccaaggtggaaatcaaaagactcgaggacctgaagaacgtgttcccacctgaggtggccgtgttcgagcctagcgaggccgagatcagccacacccagaaagccaccctcgtgtgcctggctaccggcttctaccccgaccatgtggaactgtcttggtgggtcaacggcaaagaggtgcacagcggcgtgtctaccgacccccagccactgaaagaacagcccgccctgaacgacagccggtactgcctgagcagcagactgagagtgtccgccaccttctggcagaacccccggaaccacttcagatgccaggtgcagttctacggcctgagcgagaacgacgagtggacccaggacagagccaagcccgtgacccagatcgtgtctgccgaagcctggggcagagccgattgcggctttaccagcgagagctaccagcagggcgtgctgagcgccaccatcctgtacgagatcctgctgggcaaggccaccctgtacgccgtgctggtgtctgccctggtgctgatggctatggtcaagcggaaggacagccggggaagggccaagcgatctggatctggagcaacaaacttctcactactcaaacaagcaggtgacgtggaggagaatcccgggcctactagtatggactggatttggcgcatccttttccttgtcggcgctgctaccggcgcgcattccttcgaagaagtgcagctggttgaatcaggtggcggcctggttcaacctggcggatctctgagactgagctgtgccgcctccggcttcacctttagcgatcacggaatgcactgggtccgacaggcccctggaaaaggactggaatgggtcgccgtgatttggtacgacggcagcaacaagtattacgccgacagcgtgaagggcagattcaccatcagccgggacaacagcaagaacaccctgtacctccagatgaactccctgagagccgaggacaccgccgtgtactactgtgccagagacagcatcatggtccgaggcgattattggggccagggaaccctggtcacagtgtctagtacgcgtatccagaaccctgatcctgccgtgtaccagctgcgggatagcaagagcagcgacaagagcgtgtgtctgttcaccgacttcgacagccagaccaacgtgtcccagagcaaggactccgacgtgtacatcaccgataagaccgtgctggacatgcggagcatggacttcaagagcaactccgccgtggcctggtccaacaagtccgatttcgcctgcgccaacgccttcaacaacagcattatccccgaggacacattcttcccaagccccgagagcagctgcgacgtgaagctggtggaaaagagcttcgagacagacaccaacctgaacttccagaacctgagcgtgatcggcttcagaatcctgctgctgaaagtggccggctttaacctgctgatgaccctgcggctgtggtccagccgcgccaagagaagcggatctggcgtgaagcagaccctgaatttcgacctgctgaagctggctggcgacgtggaatccaacccaggcccttctagaggccatatgaccgagtacaagcccacggtgcgcctcgccacccgcgacgacgtccccagggccgtacgcaccctcgccgccgcgttcgccgactaccccgccacgcgccacaccgtcgatccggaccgccacatcgagcgggtcaccgagctgcaagaactcttcctcacgcgcgtcgggctcgacatcggcaaggtgtgggtcgcggacgacggcgccgcggtggcggtctggaccacgccggagagcgtcgaagcgggggcggtgttcgccgagatcggcccgcgcatggccgagttgagcggttcccggctggccgcgcagcaacagatggaaggcctcctggcgccgcaccggcccaaggagcccgcgtggttcctggccaccgtcggcgtctcgcccgaccaccagggcaagggtctgggcagcgccgtcgtgctccccggagtggaggcggccgagcgcgccggggtgcccgccttcctggagacctccgcgccccgcaacctccccttctacgagcggctcggcttcaccgtcaccgccgacgtcgaggtgcccgaaggaccgcgcacctggtgcatgacccgcaagcccggtgcctga

SEQ ID NO: 20131 - DNA, 2805 bp, synthetic construct
  source 1..2805: mol_type = other DNA
atggccttaccagtgaccgccttgctcctgccgctggccttgctgctccacgccgccaggccggacatccagatgacacagagccctagcagcctgtctgccagcgtgggagacagagtgaccatcacctgtagagccagccagggcatctcttcttggctggcctggtatcagcagaagcctggcaaggcccctaagctgctgatctatgccgccagctctctccagagcggagtgcctagcagattttctggcagcggctccggcaccgatttcaccctgacaatatccagcctccagcctgaggacttcgccacctactactgccagcagtacaacagctaccctctgaccttcggccagggcaccaaggtggaaatcaaaagactcgaggacctgaagaacgtgttcccacctgaggtggccgtgttcgagcctagcgaggccgagatcagccacacccagaaagccaccctcgtgtgcctggctaccggcttctaccccgaccatgtggaactgtcttggtgggtcaacggcaaagaggtgcacagcggcgtgtctaccgacccccagccactgaaagaacagcccgccctgaacgacagccggtactgcctgagcagcagactgagagtgtccgccaccttctggcagaacccccggaaccacttcagatgccaggtgcagttctacggcctgagcgagaacgacgagtggacccaggacagagccaagcccgtgacccagatcgtgtctgccgaagcctggggcagagccgattgcggctttaccagcgagagctaccagcagggcgtgctgagcgccaccatcctgtacgagatcctgctgggcaaggccaccctgtacgccgtgctggtgtctgccctggtgctgatggctatggtcaagcggaaggacagccggggaagggccaagcgatctggatctggagcaacaaacttctcactactcaaacaagcaggtgacgtggaggagaatcccgggcctactagtatggactggatttggcgcatccttttccttgtcggcgctgctaccggcgcgcattccttcgaagaagtgcagctggttgaatcaggtggcggcctggttcaacctggcggatctctgagactgagctgtgccgcctccggcttcacctttagcgatcacggaatgcactgggtccgacaggcccctggaaaaggactggaatgggtcgccgtgatttggtacgacggcagcaacaagtattacgccgacagcgtgaagggcagattcaccatcagccgggacaacagcaagaacaccctgtacctccagatgaactccctgagagccgaggacaccgccgtgtactactgtgccagagacagcatcatggtccgaggcgattattggggccagggaaccctggtcacagtgtctagtacgcgtgagcagaaactgatctcggaagaggatgggagcggcaccccattcccttctctggcccctcccatcatgctgctggtggacggcaagcagcagatggtggtcgtgtgcctggtgctggatgtggccccacctggactggacagccccatctggtttagcgccggcaatggctctgccctggacgcctttacctacggcccaagccctgccaccgatggcacctggacaaatctggcccacctgagcctgcccagcgaggaactggcttcttgggagcctctcgtgtgccacacaggacctggcgctgagggacacagcagatccacccagcctatgcacctgtctggcgaggccagcaccgccagaacctgtcctcaggaacctctgagaggcacccctggcggagcactgtggctgggagtgctgagactgctgctgttcaagctgctgctgtttgacctgctgctgacctgctcctgtctgtgcgatcctgccggccctctgccttctcctgccaccaccacaagactgagagccctgggcagccacagactgcaccctgccacagagacaggcggcagagaggccacaagcagccctagaccccagcccagagacagaagatggggcgataccccccctggcagaaagcctggatctccagtccgcgccaagagaagcggatctggcgtgaagcagaccctgaatttcgacctgctgaagctggctggcgacgtggaatccaacccaggcccttctagaggccatatgaccgagtacaagcccacggtgcgcctcgccacccgcgacgacgtccccagggccgtacgcaccctcgccgccgcgttcgccgactaccccgccacgcgccacaccgtcgatccggaccgccacatcgagcgggtcaccgagctgcaagaactcttcctcacgcgcgtcgggctcgacatcggcaaggtgtgggtcgcggacgacggcgccgcggtggcggtctggaccacgccggagagcgtcgaagcgggggcggtgttcgccgagatcggcccgcgcatggccgagttgagcggttcccggctggccgcgcagcaacagatggaaggcctcctggcgccgcaccggcccaaggagcccgcgtggttcctggccaccgtcggcgtctcgcccgaccaccagggcaagggtctgggcagcgccgtcgtgctccccggagtggaggcggccgagcgcgccggggtgcccgccttcctggagacctccgcgccccgcaacctccccttctacgagcggctcggcttcaccgtcaccgccgacgtcgaggtgcccgaaggaccgcgcacctggtgcatgacccgcaagcccggtgcctga

SEQ ID NO: 20132 - DNA, 2859 bp, synthetic construct
  source 1..2859: mol_type = other DNA
atggccttaccagtgaccgccttgctcctgccgctggccttgctgctccacgccgccaggccgctcgaggacctgaagaacgtgttcccacctgaggtggccgtgttcgagcctagcgaggccgagatcagccacacccagaaagccaccctcgtgtgcctggctaccggcttctaccccgaccatgtggaactgtcttggtgggtcaacggcaaagaggtgcacagcggcgtgtctaccgacccccagccactgaaagaacagcccgccctgaacgacagccggtactgcctgagcagcagactgagagtgtccgccaccttctggcagaacccccggaaccacttcagatgccaggtgcagttctacggcctgagcgagaacgacgagtggacccaggacagagccaagcccgtgacccagatcgtgtctgccgaagcctggggcagagccgattgcggctttaccagcgagagctaccagcagggcgtgctgagcgccaccatcctgtacgagatcctgctgggcaaggccaccctgtacgccgtgctggtgtctgccctggtgctgatggctatggtcaagcggaaggacagccggggaagggccaagcgatctggatctggagcaacaaacttctcactactcaaacaagcaggtgacgtggaggagaatcccgggcctactagcatggccttaccagtgaccgccttgctcctgccgctggccttgctgctccacgccgccaggccggacatccagatgacacagagccctagcagcctgtctgccagcgtgggagacagagtgaccatcacctgtagagccagccagggcatctcttcttggctggcctggtatcagcagaagcctggcaaggcccctaagctgctgatctatgccgccagctctctccagagcggagtgcctagcagattttctggcagcggctccggcaccgatttcaccctgacaatatccagcctccagcctgaggacttcgccacctactactgccagcagtacaacagctaccctctgaccttcggccagggcaccaaggtggaaatcaaaagaggcggaggcggaagtggaggcggaggatctggcggcggaggctctgaagtgcagctggttgaatcaggtggcggcctggttcaacctggcggatctctgagactgagctgtgccgcctccggcttcacctttagcgatcacggaatgcactgggtccgacaggcccctggaaaaggactggaatgggtcgccgtgatttggtacgacggcagcaacaagtattacgccgacagcgtgaagggcagattcaccatcagccgggacaacagcaagaacaccctgtacctccagatgaactccctgagagccgaggacaccgccgtgtactactgtgccagagacagcatcatggtccgaggcgattattggggccagggaaccctggtcacagtgtctagtacgcgtgagcagaaactgatctcggaagaggatctggggagcggcaccccattcccttctctggcccctcccatcatgctgctggtggacggcaagcagcagatggtggtcgtgtgcctggtgctggatgtggccccacctggactggacagccccatctggtttagcgccggcaatggctctgccctggacgcctttacctacggcccaagccctgccaccgatggcacctggacaaatctggcccacctgagcctgcccagcgaggaactggcttcttgggagcctctcgtgtgccacacaggacctggcgctgagggacacagcagatccacccagcctatgcacctgtctggcgaggccagcaccgccagaacctgtcctcaggaacctctgagaggcacccctggcggagcactgtggctgggagtgctgagactgctgctgttcaagctgctgctgtttgacctgctgctgacctgctcctgtctgtgcgatcctgccggccctctgccttctcctgccaccaccacaagactgagagccctgggcagccacagactgcaccctgccacagagacaggcggcagagaggccacaagcagccctagaccccagcccagagacagaagatggggcgataccccccctggcagaaagcctggatctccagtccgcgccaagagaagcggatctggcgtgaagcagaccctgaatttcgacctgctgaagctggctggcgacgtggaatccaacccaggcccttctagatctagaggccatatgaccgagtacaagcccacggtgcgcctcgccacccgcgacgacgtccccagggccgtacgcaccctcgccgccgcgttcgccgactaccccgccacgcgccacaccgtcgatccggaccgccacatcgagcgggtcaccgagctgcaagaactcttcctcacgcgcgtcgggctcgacatcggcaaggtgtgggtcgcggacgacggcgccgcggtggcggtctggaccacgccggagagcgtcgaagcgggggcggtgttcgccgagatcggcccgcgcatggccgagttgagcggttcccggctggccgcgcagcaacagatggaaggcctcctggcgccgcaccggcccaaggagcccgcgtggttcctggccaccgtcggcgtctcgcccgaccaccagggcaagggtctgggcagcgccgtcgtgctccccggagtggaggcggccgagcgcgccggggtgcccgccttcctggagacctccgcgccccgcaacctccccttctacgagcggctcggcttcaccgtcaccgccgacgtcgaggtgcccgaaggaccgcgcacctggtgcatgacccgcaagcccggtgcctga

SEQ ID NO: 20133 - DNA, 2670 bp, synthetic construct
  source 1..2670: mol_type = other DNA
atggccttaccagtgaccgccttgctcctgccgctggccttgctgctccacgccgccaggccggacatccagatgacacagagccctagcagcctgtctgccagcgtgggagacagagtgaccatcacctgtagagccagccagggcatctcttcttggctggcctggtatcagcagaagcctggcaaggcccctaagctgctgatctatgccgccagctctctccagagcggagtgcctagcagattttctggcagcggctccggcaccgatttcaccctgacaatatccagcctccagcctgaggacttcgccacctactactgccagcagtacaacagctaccctctgaccttcggccagggcaccaaggtggaaatcaaaagactcgaggggaaaccaattcccaaccctcttctgggactggattcaaccggcagcggcgacaagcagctggacgccgacgtgtcccccaagcctaccatcttcctgccctctatcgccgagacaaagctccagaaggccggcacctacctgtgcctgctggaaaagttcttcccagatgtgattaagatccactggcaggaaaagaagtccaacaccatcctgggcagccaggaaggcaacaccatgaagaccaacgacacctacatgaagttcagctggctgaccgtgcccgagaagtccctggacaaagaacacagatgcatcgtgcggcacgaaaacaacaagaacggcgtggaccaggaaatcatcttcccacccatcaagaccgatgtgattacaatggaccccaaggacaactgctccaaggacgccaacgataccctgctgctccagctgaccaacaccagcgcctactacatgtacttgttgctgctgctgaagtccgtggtgtacttcgccatcatcacatgctgcctgctgcggagaaccgccttctgctgcaacggcgagaagtctagggccaagcgatctggatctggagcaacaaacttctcactactcaaacaagcaggtgacgtggaggagaatcccgggcctactagtatggactggatttggcgcatccttttccttgtcggcgctgctaccggcgcgcattccttcgaagaagtgcagctggttgaatcaggtggcggcctggttcaacctggcggatctctgagactgagctgtgccgcctccggcttcacctttagcgatcacggaatgcactgggtccgacaggcccctggaaaaggactggaatgggtcgccgtgatttggtacgacggcagcaacaagtattacgccgacagcgtgaagggcagattcaccatcagccgggacaacagcaagaacaccctgtacctccagatgaactccctgagagccgaggacaccgccgtgtactactgtgccagagacagcatcatggtccgaggcgattattggggccagggaaccctggtcacagtgtctagtacgcgtgagcagaaactgatctcggaagaggatgggagcggcagccagcctcacaccaagcccagcgtgttcgtgatgaagaacggcaccaacgtggcctgcctcgtgaaagagttctaccccaaggacatcaggatcaacctggtgtccagcaagaagatcaccgagttcgaccccgccatcgtgatctcccccagcggcaagtacaacgccgtgaagctggggaagtacgaggacagcaacagcgtgacctgctccgtgcagcacgacaacaagaccgtgcacagcaccgactttgaagtgaaaaccgactccaccgaccacgtgaagcccaaagagacagagaacaccaagcagcccagcaagagctgccacaagcccaaggccatcgtgcacaccgagaaagtgaacatgatgagcctgaccgtgctgggcctgcggatgctgttcgccaaaaccgtggccgtgaacttcctgctgaccgccaagctgttcttcctccgcgccaagagaagcggatctggcgtgaagcagaccctgaatttcgacctgctgaagctggctggcgacgtggaatccaacccaggcccttctagaggccatatgaccgagtacaagcccacggtgcgcctcgccacccgcgacgacgtccccagggccgtacgcaccctcgccgccgcgttcgccgactaccccgccacgcgccacaccgtcgatccggaccgccacatcgagcgggtcaccgagctgcaagaactcttcctcacgcgcgtcgggctcgacatcggcaaggtgtgggtcgcggacgacggcgccgcggtggcggtctggaccacgccggagagcgtcgaagcgggggcggtgttcgccgagatcggcccgcgcatggccgagttgagcggttcccggctggccgcgcagcaacagatggaaggcctcctggcgccgcaccggcccaaggagcccgcgtggttcctggccaccgtcggcgtctcgcccgaccaccagggcaagggtctgggcagcgccgtcgtgctccccggagtggaggcggccgagcgcgccggggtgcccgccttcctggagacctccgcgccccgcaacctccccttctacgagcggctcggcttcaccgtcaccgccgacgtcgaggtgcccgaaggaccgcgcacctggtgcatgacccgcaagcccggtgcctga

SEQ ID NO: 20134 - DNA, 1881 bp, synthetic construct
  source 1..1881: mol_type = other DNA
atggccttaccagtgaccgccttgctcctgccgctggccttgctgctccacgccgccaggccggacatccagatgacacagagccctagcagcctgtctgccagcgtgggagacagagtgaccatcacctgtagagccagccagggcatctcttcttggctggcctggtatcagcagaagcctggcaaggcccctaagctgctgatctatgccgccagctctctccagagcggagtgcctagcagattttctggcagcggctccggcaccgatttcaccctgacaatatccagcctccagcctgaggacttcgccacctactactgccagcagtacaacagctaccctctgaccttcggccagggcaccaaggtggaaatcaaaagactcgagagccagcctcacaccaagcccagcgtgttcgtgatgaagaacggcaccaacgtggcctgcctcgtgaaagagttctaccccaaggacatcaggatcaacctggtgtccagcaagaagatcaccgagttcgaccccgccatcgtgatctcccccagcggcaagtacaacgccgtgaagctggggaagtacgaggacagcaacagcgtgacctgctccgtgcagcacgacaacaagaccgtgcacagcaccgactttgaagtgaaaaccgactccaccgaccacgtgaagcccaaagagacagagaacaccaagcagcccagcaagagctgccacaagcccaaggccatcgtgcacaccgagaaagtgaacatgatgagcctgaccgtgctgggcctgcggatgctgttcgccaaaaccgtggccgtgaacttcctgctgaccgccaagctgttcttcctcagggccaagcgatctggatctggagcaacaaacttctcactactcaaacaagcaggtgacgtggaggagaatcccgggcctactagtatggactggatttggcgcatccttttccttgtcggcgctgctaccggcgcgcattccttcgaagaagtgcagctggttgaatcaggtggcggcctggttcaacctggcggatctctgagactgagctgtgccgcctccggcttcacctttagcgatcacggaatgcactgggtccgacaggcccctggaaaaggactggaatgggtcgccgtgatttggtacgacggcagcaacaagtattacgccgacagcgtgaagggcagattcaccatcagccgggacaacagcaagaacaccctgtacctccagatgaactccctgagagccgaggacaccgccgtgtactactgtgccagagacagcatcatggtccgaggcgattattggggccagggaaccctggtcacagtgtctagtacgcgtgacaagcagctggacgccgacgtgtcccccaagcctaccatcttcctgccctctatcgccgagacaaagctccagaaggccggcacctacctgtgcctgctggaaaagttcttcccagatgtgattaagatccactggcaggaaaagaagtccaacaccatcctgggcagccaggaaggcaacaccatgaagaccaacgacacctacatgaagttcagctggctgaccgtgcccgagaagtccctggacaaagaacacagatgcatcgtgcggcacgaaaacaacaagaacggcgtggaccaggaaatcatcttcccacccatcaagaccgatgtgattacaatggaccccaaggacaactgctccaaggacgccaacgataccctgctgctccagctgaccaacaccagcgcctactacatgtacttgttgctgctgctgaagtccgtggtgtacttcgccatcatcacatgctgcctgctgcggagaaccgccttctgctgcaacggcgagaagtct

SEQ ID NO: 20135 - DNA, 2715 bp, synthetic construct
  source 1..2715: mol_type = other DNA
atggccttaccagtgaccgccttgctcctgccgctggccttgctgctccacgccgccaggccgctcgaggggaaaccaattcccaaccctcttctgggactggattcaaccggcagcggcgacaagcagctggacgccgacgtgtcccccaagcctaccatcttcctgccctctatcgccgagacaaagctccagaaggccggcacctacctgtgcctgctggaaaagttcttcccagatgtgattaagatccactggcaggaaaagaagtccaacaccatcctgggcagccaggaaggcaacaccatgaagaccaacgacacctacatgaagttcagctggctgaccgtgcccgagaagtccctggacaaagaacacagatgcatcgtgcggcacgaaaacaacaagaacggcgtggaccaggaaatcatcttcccacccatcaagaccgatgtgattacaatggaccccaaggacaactgctccaaggacgccaacgataccctgctgctccagctgaccaacaccagcgcctactacatgtacttgttgctgctgctgaagtccgtggtgtacttcgccatcatcacatgctgcctgctgcggagaaccgccttctgctgcaacggcgagaagtctagggccaagcgatctggatctggagcaacaaacttctcactactcaaacaagcaggtgacgtggaggagaatcccgggcctactagcatggccttaccagtgaccgccttgctcctgccgctggccttgctgctccacgccgccaggccggacatccagatgacacagagccctagcagcctgtctgccagcgtgggagacagagtgaccatcacctgtagagccagccagggcatctcttcttggctggcctggtatcagcagaagcctggcaaggcccctaagctgctgatctatgccgccagctctctccagagcggagtgcctagcagattttctggcagcggctccggcaccgatttcaccctgacaatatccagcctccagcctgaggacttcgccacctactactgccagcagtacaacagctaccctctgaccttcggccagggcaccaaggtggaaatcaaaagaggcggaggcggaagtggaggcggaggatctggcggcggaggctctgaagtgcagctggttgaatcaggtggcggcctggttcaacctggcggatctctgagactgagctgtgccgcctccggcttcacctttagcgatcacggaatgcactgggtccgacaggcccctggaaaaggactggaatgggtcgccgtgatttggtacgacggcagcaacaagtattacgccgacagcgtgaagggcagattcaccatcagccgggacaacagcaagaacaccctgtacctccagatgaactccctgagagccgaggacaccgccgtgtactactgtgccagagacagcatcatggtccgaggcgattattggggccagggaaccctggtcacagtgtctagtacgcgtgagcagaaactgatctcggaagaggatgggagcggcagccagcctcacaccaagcccagcgtgttcgtgatgaagaacggcaccaacgtggcctgcctcgtgaaagagttctaccccaaggacatcaggatcaacctggtgtccagcaagaagatcaccgagttcgaccccgccatcgtgatctcccccagcggcaagtacaacgccgtgaagctggggaagtacgaggacagcaacagcgtgacctgctccgtgcagcacgacaacaagaccgtgcacagcaccgactttgaagtgaaaaccgactccaccgaccacgtgaagcccaaagagacagagaacaccaagcagcccagcaagagctgccacaagcccaaggccatcgtgcacaccgagaaagtgaacatgatgagcctgaccgtgctgggcctgcggatgctgttcgccaaaaccgtggccgtgaacttcctgctgaccgccaagctgttcttcctccgcgccaagagaagcggatctggcgtgaagcagaccctgaatttcgacctgctgaagctggctggcgacgtggaatccaacccaggcccttctagaggccatatgaccgagtacaagcccacggtgcgcctcgccacccgcgacgacgtccccagggccgtacgcaccctcgccgccgcgttcgccgactaccccgccacgcgccacaccgtcgatccggaccgccacatcgagcgggtcaccgagctgcaagaactcttcctcacgcgcgtcgggctcgacatcggcaaggtgtgggtcgcggacgacggcgccgcggtggcggtctggaccacgccggagagcgtcgaagcgggggcggtgttcgccgagatcggcccgcgcatggccgagttgagcggttcccggctggccgcgcagcaacagatggaaggcctcctggcgccgcaccggcccaaggagcccgcgtggttcctggccaccgtcggcgtctcgcccgaccaccagggcaagggtctgggcagcgccgtcgtgctccccggagtggaggcggccgagcgcgccggggtgcccgccttcctggagacctccgcgccccgcaacctccccttctacgagcggctcggcttcaccgtcaccgccgacgtcgaggtgcccgaaggaccgcgcacctggtgcatgacccgcaagcccggtgcctga

SEQ ID NO: 20136 - DNA, 3090 bp, synthetic construct
  source 1..3090: mol_type = other DNA
atggccttaccagtgaccgccttgctcctgccgctggccttgctgctccacgccgccaggccggacatccagatgacacagagccctagcagcctgtctgccagcgtgggagacagagtgaccatcacctgtagagccagccagggcatctcttcttggctggcctggtatcagcagaagcctggcaaggcccctaagctgctgatctatgccgccagctctctccagagcggagtgcctagcagattttctggcagcggctccggcaccgatttcaccctgacaatatccagcctccagcctgaggacttcgccacctactactgccagcagtacaacagctaccctctgaccttcggccagggcaccaaggtggaaatcaaaagaggacagcctaaggccaatcctaccgtgacactgttccctccaagcagcgaagaactccaggccaacaaggccacacttgtgtgcctgatctccgacttctaccctggggctgtgacagtggcttggaaggccgatggatctcctgtgaaagccggcgtggaaaccaccaagccatccaagcagagcaacaacaaatacgccgccagctcctacctgagcctgacacctgagcagtggaagtcccacagatcctacagctgccaagtgacccacgaaggcagcaccgtggaaaagacagtggcccctacagagtgcagcggatcccagagcttcggcctgctggaccccaagctgtgctacctgctggatggcatcctgttcatctacggcgtgatcctgaccgccctgttcctgagagtgaagttcagcagaagcgccgacgcccctgcctaccagcagggacagaaccaactgtacaacgagctgaacctgggcagacgggaagagtacgacgtgctggacaagcggagaggcagggaccctgagatgggcggaaagccccagcggagaaagaacccccaggaaggactgtataacgaactccagaaagacaagatggccgaagcctacagcgagatcggcatgaagggcgagcggagaagaggcaagggccacgatggcctgtaccagggcctgagcaccgccaccaaggacacctatgacgccctgcacatgcaggccctgcctccaagaagggccaagcgatctggatctggagcaacaaacttctcactactcaaacaagcaggtgacgtggaggagaatcccgggcctactagtatggactggatttggcgcatccttttccttgtcggcgctgctaccggcgcgcattccttcgaagaagtgcagctggttgaatcaggtggcggcctggttcaacctggcggatctctgagactgagctgtgccgcctccggcttcacctttagcgatcacggaatgcactgggtccgacaggcccctggaaaaggactggaatgggtcgccgtgatttggtacgacggcagcaacaagtattacgccgacagcgtgaagggcagattcaccatcagccgggacaacagcaagaacaccctgtacctccagatgaactccctgagagccgaggacaccgccgtgtactactgtgccagagacagcatcatggtccgaggcgattattggggccagggaaccctggtcacagtgtctagtgcctctacaaagggaccctccgtgtttcctctggctcccagcagcaagtctacaagcggaggaacagccgctctgggctgcctggtcaaggattactttcccgagcctgtgaccgtgtcctggaatagcggagcactgacaagcggcgtgcacacctttccagccgtgctgcaaagcagcggcctgtactctctgagcagcgtggtcacagtgcctagctctagcctgggcacccagacctacatctgcaatgtgaaccacaagcctagcaacaccaaggtggacaagagagtggaacccaagagctgtggtacccagagttttgggttgttggaccctaaattgtgctatctgttggacggaatcctgttcatttacggagtgatcctgaccgcattgttcctgcgggttaagttttccagatccgcagacgcacccgcttaccaacaagggcagaaccaactctacaatgaacttaatttggggcggagggaagagtacgacgttctggacaaaaggaggggacgagatcccgagatgggcggaaagcctcagcgaaggaagaatccgcaagaggggctttataacgaactccagaaagataaaatggcagaagcctatagtgagattgggatgaagggagaaaggaggaggggtaaaggtcacgatgggttgtaccaaggattgagcacagccactaaagatacctatgatgcgctccacatgcaggccctgccgccaagacgcgccaagagaagcggatctggcgtgaagcagaccctgaatttcgacctgctgaagctggctggcgacgtggaatccaacccaggcccttctagaggccatatgaccgagtacaagcccacggtgcgcctcgccacccgcgacgacgtccccagggccgtacgcaccctcgccgccgcgttcgccgactaccccgccacgcgccacaccgtcgatccggaccgccacatcgagcgggtcaccgagctgcaagaactcttcctcacgcgcgtcgggctcgacatcggcaaggtgtgggtcgcggacgacggcgccgcggtggcggtctggaccacgccggagagcgtcgaagcgggggcggtgttcgccgagatcggcccgcgcatggccgagttgagcggttcccggctggccgcgcagcaacagatggaaggcctcctggcgccgcaccggcccaaggagcccgcgtggttcctggccaccgtcggcgtctcgcccgaccaccagggcaagggtctgggcagcgccgtcgtgctccccggagtggaggcggccgagcgcgccggggtgcccgccttcctggagacctccgcgccccgcaacctccccttctacgagcggctcggcttcaccgtcaccgccgacgtcgaggtgcccgaaggaccgcgcacctggtgcatgacccgcaagcccggtgcctga

SEQ ID NO: 20137 - DNA, 2445 bp, synthetic construct
  source 1..2445: mol_type = other DNA
atggccttaccagtgaccgccttgctcctgccgctggccttgctgctccacgccgccaggccggacatccagatgacacagagccctagcagcctgtctgccagcgtgggagacagagtgaccatcacctgtagagccagccagggcatctcttcttggctggcctggtatcagcagaagcctggcaaggcccctaagctgctgatctatgccgccagctctctccagagcggagtgcctagcagattttctggcagcggctccggcaccgatttcaccctgacaatatccagcctccagcctgaggacttcgccacctactactgccagcagtacaacagctaccctctgaccttcggccagggcaccaaggtggaaatcaaaagactcgaggacctgaagaacgtgttcccacctgaggtggccgtgttcgagcctagcgaggccgagatcagccacacccagaaagccaccctcgtgtgcctggctaccggcttctaccccgaccatgtggaactgtcttggtgggtcaacggcaaagaggtgcacagcggcgtgtctaccgacccccagccactgaaagaacagcccgccctgaacgacagccggtactgcctgagcagcagactgagagtgtccgccaccttctggcagaacccccggaaccacttcagatgccaggtgcagttctacggcctgagcgagaacgacgagtggacccaggacagagccaagcccgtgacccagatcgtgtctgccgaagcctggggcagagccgattgcggatcccagagcttcggcctgctggaccccaagctgtgctacctgctggatggcatcctgttcatctacggcgtgatcctgaccgccctgttcctgagagtgaagttcagcagaagcgccgacgcccctgcctaccagcagggacagaaccaactgtacaacgagctgaacctgggcagacgggaagagtacgacgtgctggacaagcggagaggcagggaccctgagatgggcggaaagccccagcggagaaagaacccccaggaaggactgtataacgaactccagaaagacaagatggccgaagcctacagcgagatcggcatgaagggcgagcggagaagaggcaagggccacgatggcctgtaccagggcctgagcaccgccaccaaggacacctatgacgccctgcacatgcaggccctgcctccaagaagggccaagcgatctggatctggagcaacaaacttctcactactcaaacaagcaggtgacgtggaggagaatcccgggcctactagtatggactggatttggcgcatccttttccttgtcggcgctgctaccggcgcgcattccttcgaagaagtgcagctggttgaatcaggtggcggcctggttcaacctggcggatctctgagactgagctgtgccgcctccggcttcacctttagcgatcacggaatgcactgggtccgacaggcccctggaaaaggactggaatgggtcgccgtgatttggtacgacggcagcaacaagtattacgccgacagcgtgaagggcagattcaccatcagccgggacaacagcaagaacaccctgtacctccagatgaactccctgagagccgaggacaccgccgtgtactactgtgccagagacagcatcatggtccgaggcgattattggggccagggaaccctggtcacagtgtctagtacgcgtatccagaaccctgatcctgccgtgtaccagctgcgggatagcaagagcagcgacaagagcgtgtgtctgttcaccgacttcgacagccagaccaacgtgtcccagagcaaggactccgacgtgtacatcaccgataagaccgtgctggacatgcggagcatggacttcaagagcaactccgccgtggcctggtccaacaagtccgatttcgcctgcgccaacgccttcaacaacagcattatccccgaggacacattcttcccaagccccgagagcagctgcggtacccagagttttgggttgttggaccctaaattgtgctatctgttggacggaatcctgttcatttacggagtgatcctgaccgcattgttcctgcgggttaagttttccagatccgcagacgcacccgcttaccaacaagggcagaaccaactctacaatgaacttaatttggggcggagggaagagtacgacgttctggacaaaaggaggggacgagatcccgagatgggcggaaagcctcagcgaaggaagaatccgcaagaggggctttataacgaactccagaaagataaaatggcagaagcctatagtgagattgggatgaagggagaaaggaggaggggtaaaggtcacgatgggttgtaccaaggattgagcacagccactaaagatacctatgatgcgctccacatgcaggccctgccgccaaga

SEQ ID NO: 20138 - DNA, 2445 bp, synthetic construct
  source 1..2445: mol_type = other DNA
atggccttaccagtgaccgccttgctcctgccgctggccttgctgctccacgccgccaggccggacatccagatgacacagagccctagcagcctgtctgccagcgtgggagacagagtgaccatcacctgtagagccagccagggcatctcttcttggctggcctggtatcagcagaagcctggcaaggcccctaagctgctgatctatgccgccagctctctccagagcggagtgcctagcagattttctggcagcggctccggcaccgatttcaccctgacaatatccagcctccagcctgaggacttcgccacctactactgccagcagtacaacagctaccctctgaccttcggccagggcaccaaggtggaaatcaaaagactcgaggacctgaagaacgtgttcccacctgaggtggccgtgttcgagcctagcaaggccgagatcgcccacacccagaaagccaccctcgtgtgcctggctaccggcttctaccccgaccatgtggaactgtcttggtgggtcaacggcaaagaggtgcacagcggcgtgtgtaccgacccccagccactgaaagaacagcccgccctgaacgacagccggtactgcctgagcagcagactgagagtgtccgccaccttctggcagaacccccggaaccacttcagatgccaggtgcagttctacggcctgagcgagaacgacgagtggacccaggacagagccaagcccgtgacccagatcgtgtctgccgaagcctggggcagagccgattgcggatcccagagcttcggcctgctggaccccaagctgtgctacctgctggatggcatcctgttcatctacggcgtgatcctgaccgccctgttcctgagagtgaagttcagcagaagcgccgacgcccctgcctaccagcagggacagaaccaactgtacaacgagctgaacctgggcagacgggaagagtacgacgtgctggacaagcggagaggcagggaccctgagatgggcggaaagccccagcggagaaagaacccccaggaaggactgtataacgaactccagaaagacaagatggccgaagcctacagcgagatcggcatgaagggcgagcggagaagaggcaagggccacgatggcctgtaccagggcctgagcaccgccaccaaggacacctatgacgccctgcacatgcaggccctgcctccaagaagggccaagcgatctggatctggagcaacaaacttctcactactcaaacaagcaggtgacgtggaggagaatcccgggcctactagtatggactggatttggcgcatccttttccttgtcggcgctgctaccggcgcgcattccttcgaagaagtgcagctggttgaatcaggtggcggcctggttcaacctggcggatctctgagactgagctgtgccgcctccggcttcacctttagcgatcacggaatgcactgggtccgacaggcccctggaaaaggactggaatgggtcgccgtgatttggtacgacggcagcaacaagtattacgccgacagcgtgaagggcagattcaccatcagccgggacaacagcaagaacaccctgtacctccagatgaactccctgagagccgaggacaccgccgtgtactactgtgccagagacagcatcatggtccgaggcgattattggggccagggaaccctggtcacagtgtctagtacgcgtatccagaaccctgatcctgccgtgtaccagctgcgggatagcaagagcagcgacaagagcgtgtgtctgttcaccgacttcgacagccagaccaacgtgtcccagagcaaggactccgacgtgtacatcaccgataagtgcgtgctggacatgcggagcatggacttcaagagcaactccgccgtggcctggtccaacaagtccgatttcgcctgcgccaacgccttcaacaacagcattatccccgaggacacattcttcccaagcagcgacgtgccctgcggtacccagagttttgggttgttggaccctaaattgtgctatctgttggacggaatcctgttcatttacggagtgatcctgaccgcattgttcctgcgggttaagttttccagatccgcagacgcacccgcttaccaacaagggcagaaccaactctacaatgaacttaatttggggcggagggaagagtacgacgttctggacaaaaggaggggacgagatcccgagatgggcggaaagcctcagcgaaggaagaatccgcaagaggggctttataacgaactccagaaagataaaatggcagaagcctatagtgagattgggatgaagggagaaaggaggaggggtaaaggtcacgatgggttgtaccaaggattgagcacagccactaaagatacctatgatgcgctccacatgcaggccctgccgccaaga

SEQ ID NO: 20139 - DNA, 2658 bp, synthetic construct
  source 1..2658: mol_type = other DNA
atggccttaccagtgaccgccttgctcctgccgctggccttgctgctccacgccgccaggccggacatccagatgacacagagccctagcagcctgtctgccagcgtgggagacagagtgaccatcacctgtagagccagccagggcatctcttcttggctggcctggtatcagcagaagcctggcaaggcccctaagctgctgatctatgccgccagctctctccagagcggagtgcctagcagattttctggcagcggctccggcaccgatttcaccctgacaatatccagcctccagcctgaggacttcgccacctactactgccagcagtacaacagctaccctctgaccttcggccagggcaccaaggtggaaatcaaaagactcgaggggaaaccaattcccaaccctcttctgggactggattcaaccggcagcggcgaggacctgaagaacgtgttcccacctgaggtggccgtgttcgagcctagcgaggccgagatcagccacacccagaaagccaccctcgtgtgcctggctaccggcttctaccccgaccatgtggaactgtcttggtgggtcaacggcaaagaggtgcacagcggcgtgtctaccgacccccagccactgaaagaacagcccgccctgaacgacagccggtactgcctgagcagcagactgagagtgtccgccaccttctggcagaacccccggaaccacttcagatgccaggtgcagttctacggcctgagcgagaacgacgagtggacccaggacagagccaagcccgtgacccagatcgtgtctgccgaagcctggggcagagccgattgcggatcccagagcttcggcctgctggaccccaagctgtgctacctgctggatggcatcctgttcatctacggcgtgatcctgaccgccctgttcctgagagtgaagttcagcagaagcgccgacgcccctgcctaccagcagggacagaaccaactgtacaacgagctgaacctgggcagacgggaagagtacgacgtgctggacaagcggagaggcagggaccctgagatgggcggaaagccccagcggagaaagaacccccaggaaggactgtataacgaactccagaaagacaagatggccgaagcctacagcgagatcggcatgaagggcgagcggagaagaggcaagggccacgatggcctgtaccagggcctgagcaccgccaccaaggacacctatgacgccctgcacatgcaggccctgcctccaagaagggccaagcgatctggatctggagcaacaaacttctcactactcaaacaagcaggtgacgtggaggagaatcccgggcctactagtatggactggatttggcgcatccttttccttgtcggcgctgctaccggcgcgcattccttcgaagaagtgcagctggttgaatcaggtggcggcctggttcaacctggcggatctctgagactgagctgtgccgcctccggcttcacctttagcgatcacggaatgcactgggtccgacaggcccctggaaaaggactggaatgggtcgccgtgatttggtacgacggcagcaacaagtattacgccgacagcgtgaagggcagattcaccatcagccgggacaacagcaagaacaccctgtacctccagatgaactccctgagagccgaggacaccgccgtgtactactgtgccagagacagcatcatggtccgaggcgattattggggccagggaaccctggtcacagtgtctagtacgcgtgagcagaaactgatctcggaagaggatgggagcggcatccagaaccctgatcctgccgtgtaccagctgcgggatagcaagagcagcgacaagagcgtgtgtctgttcaccgacttcgacagccagaccaacgtgtcccagagcaaggactccgacgtgtacatcaccgataagaccgtgctggacatgcggagcatggacttcaagagcaactccgccgtggcctggtccaacaagtccgatttcgcctgcgccaacgccttcaacaacagcattatccccgaggacacattcttcccaagccccgagagcagctgcggtacccagagttttgggttgttggaccctaaattgtgctatctgttggacggaatcctgttcatttacggagtgatcctgaccgcattgttcctgaggagcaagcggtcacggctgctccacagcgattacatgaatatgacaccacgaagaccgggtcctactcgcaaacactaccaaccctacgcacctccccgcgactttgcagcgtaccgatctcgggttaagttttccagatccgcagacgcacccgcttaccaacaagggcagaaccaactctacaatgaacttaatttggggcggagggaagagtacgacgttctggacaaaaggaggggacgagatcccgagatgggcggaaagcctcagcgaaggaagaatccgcaagaggggctttataacgaactccagaaagataaaatggcagaagcctatagtgagattgggatgaagggagaaaggaggaggggtaaaggtcacgatgggttgtaccaaggattgagcacagccactaaagatacctatgatgcgctccacatgcaggccctgccgccaaga

SEQ ID NO: 20140 - DNA, 2781 bp, synthetic construct
  source 1..2781: mol_type = other DNA
atggccttaccagtgaccgccttgctcctgccgctggccttgctgctccacgccgccaggccggacatccagatgacacagagccctagcagcctgtctgccagcgtgggagacagagtgaccatcacctgtagagccagccagggcatctcttcttggctggcctggtatcagcagaagcctggcaaggcccctaagctgctgatctatgccgccagctctctccagagcggagtgcctagcagattttctggcagcggctccggcaccgatttcaccctgacaatatccagcctccagcctgaggacttcgccacctactactgccagcagtacaacagctaccctctgaccttcggccagggcaccaaggtggaaatcaaaagactcgaggggaaaccaattcccaaccctcttctgggactggattcaaccggcagcggcgaggacctgaagaacgtgttcccacctgaggtggccgtgttcgagcctagcgaggccgagatcagccacacccagaaagccaccctcgtgtgcctggctaccggcttctaccccgaccatgtggaactgtcttggtgggtcaacggcaaagaggtgcacagcggcgtgtctaccgacccccagccactgaaagaacagcccgccctgaacgacagccggtactgcctgagcagcagactgagagtgtccgccaccttctggcagaacccccggaaccacttcagatgccaggtgcagttctacggcctgagcgagaacgacgagtggacccaggacagagccaagcccgtgacccagatcgtgtctgccgaagcctggggcagagccgattgcggatcccagagcttcggcctgctggaccccaagctgtgctacctgctggatggcatcctgttcatctacggcgtgatcctgaccgccctgttcctgaggagtaagaggagcaggctcctgcacagtgactacatgaacatgactccacgccgccccggacccacccgcaagcattaccagccctatgccccaccacgcgacttcgcagcctatcgctccagagtgaagttcagcagaagcgccgacgcccctgcctaccagcagggacagaaccaactgtacaacgagctgaacctgggcagacgggaagagtacgacgtgctggacaagcggagaggcagggaccctgagatgggcggaaagccccagcggagaaagaacccccaggaaggactgtataacgaactccagaaagacaagatggccgaagcctacagcgagatcggcatgaagggcgagcggagaagaggcaagggccacgatggcctgtaccagggcctgagcaccgccaccaaggacacctatgacgccctgcacatgcaggccctgcctccaagaagggccaagcgatctggatctggagcaacaaacttctcactactcaaacaagcaggtgacgtggaggagaatcccgggcctactagtatggactggatttggcgcatccttttccttgtcggcgctgctaccggcgcgcattccttcgaagaagtgcagctggttgaatcaggtggcggcctggttcaacctggcggatctctgagactgagctgtgccgcctccggcttcacctttagcgatcacggaatgcactgggtccgacaggcccctggaaaaggactggaatgggtcgccgtgatttggtacgacggcagcaacaagtattacgccgacagcgtgaagggcagattcaccatcagccgggacaacagcaagaacaccctgtacctccagatgaactccctgagagccgaggacaccgccgtgtactactgtgccagagacagcatcatggtccgaggcgattattggggccagggaaccctggtcacagtgtctagtacgcgtgagcagaaactgatctcggaagaggatgggagcggcatccagaaccctgatcctgccgtgtaccagctgcgggatagcaagagcagcgacaagagcgtgtgtctgttcaccgacttcgacagccagaccaacgtgtcccagagcaaggactccgacgtgtacatcaccgataagaccgtgctggacatgcggagcatggacttcaagagcaactccgccgtggcctggtccaacaagtccgatttcgcctgcgccaacgccttcaacaacagcattatccccgaggacacattcttcccaagccccgagagcagctgcggtacccagagttttgggttgttggaccctaaattgtgctatctgttggacggaatcctgttcatttacggagtgatcctgaccgcattgttcctgaggagcaagcggtcacggctgctccacagcgattacatgaatatgacaccacgaagaccgggtcctactcgcaaacactaccaaccctacgcacctccccgcgactttgcagcgtaccgatctcgggttaagttttccagatccgcagacgcacccgcttaccaacaagggcagaaccaactctacaatgaacttaatttggggcggagggaagagtacgacgttctggacaaaaggaggggacgagatcccgagatgggcggaaagcctcagcgaaggaagaatccgcaagaggggctttataacgaactccagaaagataaaatggcagaagcctatagtgagattgggatgaagggagaaaggaggaggggtaaaggtcacgatgggttgtaccaaggattgagcacagccactaaagatacctatgatgcgctccacatgcaggccctgccgccaaga

SEQ ID NO: 20141 - DNA, 2664 bp, synthetic construct
  source 1..2664: mol_type = other DNA
atggccttaccagtgaccgccttgctcctgccgctggccttgctgctccacgccgccaggccggacatccagatgacacagagccctagcagcctgtctgccagcgtgggagacagagtgaccatcacctgtagagccagccagggcatctcttcttggctggcctggtatcagcagaagcctggcaaggcccctaagctgctgatctatgccgccagctctctccagagcggagtgcctagcagattttctggcagcggctccggcaccgatttcaccctgacaatatccagcctccagcctgaggacttcgccacctactactgccagcagtacaacagctaccctctgaccttcggccagggcaccaaggtggaaatcaaaagactcgaggggaaaccaattcccaaccctcttctgggactggattcaaccggcagcggcgaggacctgaagaacgtgttcccacctgaggtggccgtgttcgagcctagcgaggccgagatcagccacacccagaaagccaccctcgtgtgcctggctaccggcttctaccccgaccatgtggaactgtcttggtgggtcaacggcaaagaggtgcacagcggcgtgtctaccgacccccagccactgaaagaacagcccgccctgaacgacagccggtactgcctgagcagcagactgagagtgtccgccaccttctggcagaacccccggaaccacttcagatgccaggtgcagttctacggcctgagcgagaacgacgagtggacccaggacagagccaagcccgtgacccagatcgtgtctgccgaagcctggggcagagccgattgcggatcccagagcttcggcctgctggaccccaagctgtgctacctgctggatggcatcctgttcatctacggcgtgatcctgaccgccctgttcctgagagtgaagttcagcagaagcgccgacgcccctgcctaccagcagggacagaaccaactgtacaacgagctgaacctgggcagacgggaagagtacgacgtgctggacaagcggagaggcagggaccctgagatgggcggaaagccccagcggagaaagaacccccaggaaggactgtataacgaactccagaaagacaagatggccgaagcctacagcgagatcggcatgaagggcgagcggagaagaggcaagggccacgatggcctgtaccagggcctgagcaccgccaccaaggacacctatgacgccctgcacatgcaggccctgcctccaagaagggccaagcgatctggatctggagcaacaaacttctcactactcaaacaagcaggtgacgtggaggagaatcccgggcctactagtatggactggatttggcgcatccttttccttgtcggcgctgctaccggcgcgcattccttcgaagaagtgcagctggttgaatcaggtggcggcctggttcaacctggcggatctctgagactgagctgtgccgcctccggcttcacctttagcgatcacggaatgcactgggtccgacaggcccctggaaaaggactggaatgggtcgccgtgatttggtacgacggcagcaacaagtattacgccgacagcgtgaagggcagattcaccatcagccgggacaacagcaagaacaccctgtacctccagatgaactccctgagagccgaggacaccgccgtgtactactgtgccagagacagcatcatggtccgaggcgattattggggccagggaaccctggtcacagtgtctagtacgcgtgagcagaaactgatctcggaagaggatctggggagcggcatccagaaccctgatcctgccgtgtaccagctgcgggatagcaagagcagcgacaagagcgtgtgtctgttcaccgacttcgacagccagaccaacgtgtcccagagcaaggactccgacgtgtacatcaccgataagaccgtgctggacatgcggagcatggacttcaagagcaactccgccgtggcctggtccaacaagtccgatttcgcctgcgccaacgccttcaacaacagcattatccccgaggacacattcttcccaagccccgagagcagctgcggtacccagagttttgggttgttggaccctaaattgtgctatctgttggacggaatcctgttcatttacggagtgatcctgaccgcattgttcctgaagagaggccggaagaagctgctgtacatcttcaagcagcctttcatgcggcccgtgcagaccacccaggaagaggacggctgctcctgccggttccccgaggaagaagaaggcggctgcgagctgcgggttaagttttccagatccgcagacgcacccgcttaccaacaagggcagaaccaactctacaatgaacttaatttggggcggagggaagagtacgacgttctggacaaaaggaggggacgagatcccgagatgggcggaaagcctcagcgaaggaagaatccgcaagaggggctttataacgaactccagaaagataaaatggcagaagcctatagtgagattgggatgaagggagaaaggaggaggggtaaaggtcacgatgggttgtaccaaggattgagcacagccactaaagatacctatgatgcgctccacatgcaggccctgccgccaaga

SEQ ID NO: 20142 - DNA, 2790 bp, synthetic construct
  source 1..2790: mol_type = other DNA
atggccttaccagtgaccgccttgctcctgccgctggccttgctgctccacgccgccaggccggacatccagatgacacagagccctagcagcctgtctgccagcgtgggagacagagtgaccatcacctgtagagccagccagggcatctcttcttggctggcctggtatcagcagaagcctggcaaggcccctaagctgctgatctatgccgccagctctctccagagcggagtgcctagcagattttctggcagcggctccggcaccgatttcaccctgacaatatccagcctccagcctgaggacttcgccacctactactgccagcagtacaacagctaccctctgaccttcggccagggcaccaaggtggaaatcaaaagactcgaggggaaaccaattcccaaccctcttctgggactggattcaaccggcagcggcgaggacctgaagaacgtgttcccacctgaggtggccgtgttcgagcctagcgaggccgagatcagccacacccagaaagccaccctcgtgtgcctggctaccggcttctaccccgaccatgtggaactgtcttggtgggtcaacggcaaagaggtgcacagcggcgtgtctaccgacccccagccactgaaagaacagcccgccctgaacgacagccggtactgcctgagcagcagactgagagtgtccgccaccttctggcagaacccccggaaccacttcagatgccaggtgcagttctacggcctgagcgagaacgacgagtggacccaggacagagccaagcccgtgacccagatcgtgtctgccgaagcctggggcagagccgattgcggatcccagagcttcggcctgctggaccccaagctgtgctacctgctggatggcatcctgttcatctacggcgtgatcctgaccgccctgttcctgaaacggggcagaaagaaactcctgtatatattcaaacaaccatttatgagaccagtacaaactactcaagaggaagatggctgtagctgccgatttccagaagaagaagaaggaggatgtgaactgagagtgaagttcagcagaagcgccgacgcccctgcctaccagcagggacagaaccaactgtacaacgagctgaacctgggcagacgggaagagtacgacgtgctggacaagcggagaggcagggaccctgagatgggcggaaagccccagcggagaaagaacccccaggaaggactgtataacgaactccagaaagacaagatggccgaagcctacagcgagatcggcatgaagggcgagcggagaagaggcaagggccacgatggcctgtaccagggcctgagcaccgccaccaaggacacctatgacgccctgcacatgcaggccctgcctccaagaagggccaagcgatctggatctggagcaacaaacttctcactactcaaacaagcaggtgacgtggaggagaatcccgggcctactagtatggactggatttggcgcatccttttccttgtcggcgctgctaccggcgcgcattccttcgaagaagtgcagctggttgaatcaggtggcggcctggttcaacctggcggatctctgagactgagctgtgccgcctccggcttcacctttagcgatcacggaatgcactgggtccgacaggcccctggaaaaggactggaatgggtcgccgtgatttggtacgacggcagcaacaagtattacgccgacagcgtgaagggcagattcaccatcagccgggacaacagcaagaacaccctgtacctccagatgaactccctgagagccgaggacaccgccgtgtactactgtgccagagacagcatcatggtccgaggcgattattggggccagggaaccctggtcacagtgtctagtacgcgtgagcagaaactgatctcggaagaggatctggggagcggcatccagaaccctgatcctgccgtgtaccagctgcgggatagcaagagcagcgacaagagcgtgtgtctgttcaccgacttcgacagccagaccaacgtgtcccagagcaaggactccgacgtgtacatcaccgataagaccgtgctggacatgcggagcatggacttcaagagcaactccgccgtggcctggtccaacaagtccgatttcgcctgcgccaacgccttcaacaacagcattatccccgaggacacattcttcccaagccccgagagcagctgcggtacccagagttttgggttgttggaccctaaattgtgctatctgttggacggaatcctgttcatttacggagtgatcctgaccgcattgttcctgaagagaggccggaagaagctgctgtacatcttcaagcagcctttcatgcggcccgtgcagaccacccaggaagaggacggctgctcctgccggttccccgaggaagaagaaggcggctgcgagctgcgggttaagttttccagatccgcagacgcacccgcttaccaacaagggcagaaccaactctacaatgaacttaatttggggcggagggaagagtacgacgttctggacaaaaggaggggacgagatcccgagatgggcggaaagcctcagcgaaggaagaatccgcaagaggggctttataacgaactccagaaagataaaatggcagaagcctatagtgagattgggatgaagggagaaaggaggaggggtaaaggtcacgatgggttgtaccaaggattgagcacagccactaaagatacctatgatgcgctccacatgcaggccctgccgccaaga

SEQ ID NO: 20143 - DNA, 2463 bp, synthetic construct
  source 1..2463: mol_type = other DNA
atggccttaccagtgaccgccttgctcctgccgctggccttgctgctccacgccgccaggccggacatccagatgacacagagccctagcagcctgtctgccagcgtgggagacagagtgaccatcacctgtagagccagccagggcatctcttcttggctggcctggtatcagcagaagcctggcaaggcccctaagctgctgatctatgccgccagctctctccagagcggagtgcctagcagattttctggcagcggctccggcaccgatttcaccctgacaatatccagcctccagcctgaggacttcgccacctactactgccagcagtacaacagctaccctctgaccttcggccagggcaccaaggtggaaatcaaaagactcgagcagagcttcggcctgctggaccccaagctgtgctacctgctggatggcatcctgttcatctacggcgtgatcctgaccgccctgttcctgagagtgaagttcagcagaagcgccgacgcccctgcctaccagcagggacagaaccaactgtacaacgagctgaacctgggcagacgggaagagtacgacgtgctggacaagcggagaggcagggaccctgagatgggcggaaagccccagcggagaaagaacccccaggaaggactgtataacgaactccagaaagacaagatggccgaagcctacagcgagatcggcatgaagggcgagcggagaagaggcaagggccacgatggcctgtaccagggcctgagcaccgccaccaaggacacctatgacgccctgcacatgcaggccctgcctccaagaagggccaagcgatctggatctggagcaacaaacttctcactactcaaacaagcaggtgacgtggaggagaatcccgggcctactagtatggactggatttggcgcatccttttccttgtcggcgctgctaccggcgcgcattccttcgaagaagtgcagctggttgaatcaggtggcggcctggttcaacctggcggatctctgagactgagctgtgccgcctccggcttcacctttagcgatcacggaatgcactgggtccgacaggcccctggaaaaggactggaatgggtcgccgtgatttggtacgacggcagcaacaagtattacgccgacagcgtgaagggcagattcaccatcagccgggacaacagcaagaacaccctgtacctccagatgaactccctgagagccgaggacaccgccgtgtactactgtgccagagacagcatcatggtccgaggcgattattggggccagggaaccctggtcacagtgtctagtacgcgtcagagttttgggttgttggaccctaaattgtgctatctgttggacggaatcctgttcatttacggagtgatcctgaccgcattgttcctgcgggttaagttttccagatccgcagacgcacccgcttaccaacaagggcagaaccaactctacaatgaacttaatttggggcggagggaagagtacgacgttctggacaaaaggaggggacgagatcccgagatgggcggaaagcctcagcgaaggaagaatccgcaagaggggctttataacgaactccagaaagataaaatggcagaagcctatagtgagattgggatgaagggagaaaggaggaggggtaaaggtcacgatgggttgtaccaaggattgagcacagccactaaagatacctatgatgcgctccacatgcaggccctgccgccaagacgcgccaagagaagcggatctggcgtgaagcagaccctgaatttcgacctgctgaagctggctggcgacgtggaatccaacccaggcccttctagaggccatatgaccgagtacaagcccacggtgcgcctcgccacccgcgacgacgtccccagggccgtacgcaccctcgccgccgcgttcgccgactaccccgccacgcgccacaccgtcgatccggaccgccacatcgagcgggtcaccgagctgcaagaactcttcctcacgcgcgtcgggctcgacatcggcaaggtgtgggtcgcggacgacggcgccgcggtggcggtctggaccacgccggagagcgtcgaagcgggggcggtgttcgccgagatcggcccgcgcatggccgagttgagcggttcccggctggccgcgcagcaacagatggaaggcctcctggcgccgcaccggcccaaggagcccgcgtggttcctggccaccgtcggcgtctcgcccgaccaccagggcaagggtctgggcagcgccgtcgtgctccccggagtggaggcggccgagcgcgccggggtgcccgccttcctggagacctccgcgccccgcaacctccccttctacgagcggctcggcttcaccgtcaccgccgacgtcgaggtgcccgaaggaccgcgcacctggtgcatgacccgcaagcccggtgcctga

SEQ ID NO: 20144 - DNA, 1935 bp, synthetic construct
  source 1..1935: mol_type = other DNA
atggccttaccagtgaccgccttgctcctgccgctggccttgctgctccacgccgccaggccggacatccagatgacacagagccctagcagcctgtctgccagcgtgggagacagagtgaccatcacctgtagagccagccagggcatctcttcttggctggcctggtatcagcagaagcctggcaaggcccctaagctgctgatctatgccgccagctctctccagagcggagtgcctagcagattttctggcagcggctccggcaccgatttcaccctgacaatatccagcctccagcctgaggacttcgccacctactactgccagcagtacaacagctaccctctgaccttcggccagggcaccaaggtggaaatcaaaagactcgagggacagcctaaggccaatcctaccgtgacactgttccctccaagcagcgaagaactccaggccaacaaggccacacttgtgtgcctgatctccgacttctaccctggggctgtgacagtggcttggaaggccgatggatctcctgtgaaagccggcgtggaaaccaccaagccatccaagcagagcaacaacaaatacgccgccagctcctacctgagcctgacacctgagcagtggaagtcccacagatcctacagctgccaagtgacccacgaaggcagcaccgtggaaaagacagtggcccctacagagtgcagccccatcaagaccgatgtgattacaatggaccccaaggacaactgctccaaggacgccaacgataccctgctgctccagctgaccaacaccagcgcctactacatgtacttgttgctgctgctgaagtccgtggtgtacttcgccatcatcacatgctgcctgctgcggagaaccgccttctgctgcaacggcgagaagtctagggccaagcgatctggatctggagcaacaaacttctcactactcaaacaagcaggtgacgtggaggagaatcccgggcctactagtatggactggatttggcgcatccttttccttgtcggcgctgctaccggcgcgcattccttcgaagaagtgcagctggttgaatcaggtggcggcctggttcaacctggcggatctctgagactgagctgtgccgcctccggcttcacctttagcgatcacggaatgcactgggtccgacaggcccctggaaaaggactggaatgggtcgccgtgatttggtacgacggcagcaacaagtattacgccgacagcgtgaagggcagattcaccatcagccgggacaacagcaagaacaccctgtacctccagatgaactccctgagagccgaggacaccgccgtgtactactgtgccagagacagcatcatggtccgaggcgattattggggccagggaaccctggtcacagtgtctagtacgcgtgcctctacaaagggaccctccgtgtttcctctggctcccagcagcaagtctacaagcggaggaacagccgctctgggctgcctggtcaaggattactttcccgagcctgtgaccgtgtcctggaatagcggagcactgacaagcggcgtgcacacctttccagccgtgctgcaaagcagcggcctgtactctctgagcagcgtggtcacagtgcctagctctagcctgggcacccagacctacatctgcaatgtgaaccacaagcctagcaacaccaaggtggacaagagagtggaacccaagagctgtgaagtgaaaaccgactccaccgaccacgtgaagcccaaagagacagagaacaccaagcagcccagcaagagctgccacaagcccaaggccatcgtgcacaccgagaaagtgaacatgatgagcctgaccgtgctgggcctgcggatgctgttcgccaaaaccgtggccgtgaacttcctgctgaccgccaagctgttcttcctc

SEQ ID NO: 20145 - DNA, 1869 bp, synthetic construct
  source 1..1869: mol_type = other DNA
atggccttaccagtgaccgccttgctcctgccgctggccttgctgctccacgccgccaggccggacatccagatgacacagagccctagcagcctgtctgccagcgtgggagacagagtgaccatcacctgtagagccagccagggcatctcttcttggctggcctggtatcagcagaagcctggcaaggcccctaagctgctgatctatgccgccagctctctccagagcggagtgcctagcagattttctggcagcggctccggcaccgatttcaccctgacaatatccagcctccagcctgaggacttcgccacctactactgccagcagtacaacagctaccctctgaccttcggccagggcaccaaggtggaaatcaaaagactcgagggacagcctaaggccaatcctaccgtgacactgttccctccaagcagcgaagaactccaggccaacaaggccacacttgtgtgcctgatctccgacttctaccctggggctgtgacagtggcttggaaggccgatggatctcctgtgaaagccggcgtggaaaccaccaagccatccaagcagagcaacaacaaatacgccgccagctcctacctgagcctgacacctgagcagtggaagtcccacagatcctacagctgccaagtgacccacgaaggcagcaccgtggaaaagacagtggcccctacagagtgcagcggcagagccgattgcggcatcaccagcgccagctaccaccagggcgtgctgagcgccaccatcctgtacgagatcctgctgggcaaggccaccctgtacgccgtgctggtgtctgccctggtgctgatggctatggtcaagcggaaggacagccggggaagggccaagcgatctggatctggagcaacaaacttctcactactcaaacaagcaggtgacgtggaggagaatcccgggcctactagtatggactggatttggcgcatccttttccttgtcggcgctgctaccggcgcgcattccttcgaagaagtgcagctggttgaatcaggtggcggcctggttcaacctggcggatctctgagactgagctgtgccgcctccggcttcacctttagcgatcacggaatgcactgggtccgacaggcccctggaaaaggactggaatgggtcgccgtgatttggtacgacggcagcaacaagtattacgccgacagcgtgaagggcagattcaccatcagccgggacaacagcaagaacaccctgtacctccagatgaactccctgagagccgaggacaccgccgtgtactactgtgccagagacagcatcatggtccgaggcgattattggggccagggaaccctggtcacagtgtctagtacgcgtgcctctacaaagggaccctccgtgtttcctctggctcccagcagcaagtctacaagcggaggaacagccgctctgggctgcctggtcaaggattactttcccgagcctgtgaccgtgtcctggaatagcggagcactgacaagcggcgtgcacacctttccagccgtgctgcaaagcagcggcctgtactctctgagcagcgtggtcacagtgcctagctctagcctgggcacccagacctacatctgcaatgtgaaccacaagcctagcaacaccaaggtggacaagagagtggaacccaagagctgtatccccgaggacacattcttcccaagcagcgacgtgccctgcgacgtgaagctggtggaaaagagcttcgagacagacaccaacctgaacttccagaacctgagcgtgatcggcttcagaatcctgctgctgaaagtggccggctttaacctgctgatgaccctgcggctgtggtccagc

SEQ ID NO: 20146 - DNA, 1869 bp, synthetic construct
  source 1..1869: mol_type = other DNA
atggccttaccagtgaccgccttgctcctgccgctggccttgctgctccacgccgccaggccggacatccagatgacacagagccctagcagcctgtctgccagcgtgggagacagagtgaccatcacctgtagagccagccagggcatctcttcttggctggcctggtatcagcagaagcctggcaaggcccctaagctgctgatctatgccgccagctctctccagagcggagtgcctagcagattttctggcagcggctccggcaccgatttcaccctgacaatatccagcctccagcctgaggacttcgccacctactactgccagcagtacaacagctaccctctgaccttcggccagggcaccaaggtggaaatcaaaagactcgagggacagcctaaggccaatcctaccgtgacactgttccctccaagcagcgaagaactccaggccaacaaggccacacttgtgtgcctgatctccgacttctaccctggggctgtgacagtggcttggaaggccgatggatctcctgtgaaagccggcgtggaaaccaccaagccatccaagcagagcaacaacaaatacgccgccagctcctacctgagcctgacacctgagcagtggaagtcccacagatcctacagctgccaagtgacccacgaaggcagcaccgtggaaaagacagtggcccctacagagtgcagcggcagagccgattgcggctttaccagcgagagctaccagcagggcgtgctgagcgccaccatcctgtacgagatcctgctgggcaaggccaccctgtacgccgtgctggtgtctgccctggtgctgatggctatggtcaagcggaaggacagccggggaagggccaagcgatctggatctggagcaacaaacttctcactactcaaacaagcaggtgacgtggaggagaatcccgggcctactagtatggactggatttggcgcatccttttccttgtcggcgctgctaccggcgcgcattccttcgaagaagtgcagctggttgaatcaggtggcggcctggttcaacctggcggatctctgagactgagctgtgccgcctccggcttcacctttagcgatcacggaatgcactgggtccgacaggcccctggaaaaggactggaatgggtcgccgtgatttggtacgacggcagcaacaagtattacgccgacagcgtgaagggcagattcaccatcagccgggacaacagcaagaacaccctgtacctccagatgaactccctgagagccgaggacaccgccgtgtactactgtgccagagacagcatcatggtccgaggcgattattggggccagggaaccctggtcacagtgtctagtacgcgtgcctctacaaagggaccctccgtgtttcctctggctcccagcagcaagtctacaagcggaggaacagccgctctgggctgcctggtcaaggattactttcccgagcctgtgaccgtgtcctggaatagcggagcactgacaagcggcgtgcacacctttccagccgtgctgcaaagcagcggcctgtactctctgagcagcgtggtcacagtgcctagctctagcctgggcacccagacctacatctgcaatgtgaaccacaagcctagcaacaccaaggtggacaagagagtggaacccaagagctgtatccccgaggacacattcttcccaagccccgagagcagctgcgacgtgaagctggtggaaaagagcttcgagacagacaccaacctgaacttccagaacctgagcgtgatcggcttcagaatcctgctgctgaaagtggccggctttaacctgctgatgaccctgcggctgtggtccagc

SEQ ID NO: 20147 - DNA, 1347 bp, synthetic construct
  source 1..1347: mol_type = other DNA
atggccttaccagtgaccgccttgctcctgccgctggccttgctgctccacgccgccaggccggacatccagatgacacagagccctagcagcctgtctgccagcgtgggagacagagtgaccatcacctgtagagccagccagggcatctcttcttggctggcctggtatcagcagaagcctggcaaggcccctaagctgctgatctatgccgccagctctctccagagcggagtgcctagcagattttctggcagcggctccggcaccgatttcaccctgacaatatccagcctccagcctgaggacttcgccacctactactgccagcagtacaacagctaccctctgaccttcggccagggcaccaaggtggaaatcaaaagaggcggaggcggaagtggaggcggaggatctggcggcggaggctctgaagtgcagctggttgaatcaggtggcggcctggttcaacctggcggatctctgagactgagctgtgccgcctccggcttcacctttagcgatcacggaatgcactgggtccgacaggcccctggaaaaggactggaatgggtcgccgtgatttggtacgacggcagcaacaagtattacgccgacagcgtgaagggcagattcaccatcagccgggacaacagcaagaacaccctgtacctccagatgaactccctgagagccgaggacaccgccgtgtactactgtgccagagacagcatcatggtccgaggcgattattggggccagggaaccctggtcacagtgtctagtacgcgtgacggtaacgaggagatgggaggaatcactcaaaccccttacaaagtctcaatttcaggaacaactgttatccttacatgtccccagtatcctggcagcgagatcctttggcagcataacgacaagaatatagggggagatgaagacgataagaatatcggatctgacgaggatcacttgagcctgaaagagttctccgagcttgaacaaagcggatattatgtgtgctatccgcgcgggtcaaagccggaagacgctaacttttacctttatctccgagccagagtgtgcgaaaattgcatggaaatggacgttatgtccgttgctacaatagttatcgtagatatatgcatcacgggtggactgcttctgctggtttattattggtccaagaatagaaaggccaaagctaaacccgtgaccagaggcgctggcgcaggcggaaggcaaaggggacaaaacaaagaacggccaccaccagtgccaaatccagattatgagcctattcggaaaggacagagggacctgtactctggcctgaatcagagaagaatc

SEQ ID NO: 20148 - DNA, 1242 bp, synthetic construct
  source 1..1242: mol_type = other DNA
atggccttaccagtgaccgccttgctcctgccgctggccttgctgctccacgccgccaggccggacatccagatgacacagagccctagcagcctgtctgccagcgtgggagacagagtgaccatcacctgtagagccagccagggcatctcttcttggctggcctggtatcagcagaagcctggcaaggcccctaagctgctgatctatgccgccagctctctccagagcggagtgcctagcagattttctggcagcggctccggcaccgatttcaccctgacaatatccagcctccagcctgaggacttcgccacctactactgccagcagtacaacagctaccctctgaccttcggccagggcaccaaggtggaaatcaaaagaggcggaggcggaagtggaggcggaggatctggcggcggaggctctgaagtgcagctggttgaatcaggtggcggcctggttcaacctggcggatctctgagactgagctgtgccgcctccggcttcacctttagcgatcacggaatgcactgggtccgacaggcccctggaaaaggactggaatgggtcgccgtgatttggtacgacggcagcaacaagtattacgccgacagcgtgaagggcagattcaccatcagccgggacaacagcaagaacaccctgtacctccagatgaactccctgagagccgaggacaccgccgtgtactactgtgccagagacagcatcatggtccgaggcgattattggggccagggaaccctggtcacagtgtctagtacgcgtttcaagatccccatcgaggaactggaagatcgggtgttcgtgaactgcaacacctctatcacctgggtggaaggcaccgtgggaacactgctgagcgacatcaccagactggacctcggcaagcggattctggaccctcggggcatctacagatgcaacggcaccgacatctacaaggacaaagaaagcaccgtgcaggtccactacagaatgtgccagtcctgcgtggaactggaccctgctacagtggccggcatcatcgtgaccgatgtgatcgctactctgctgctggctctgggagtgttctgcttcgccggacacgaaacaggcagactgtctggcgctgccgatacacaggccctgctgagaaacgaccaagtgtatcagcccctgcgcgacagagatgatgcccagtattctcacctcggcggcaactgggctagaaacaag

SEQ ID NO: 20149 - DNA, 1272 bp, synthetic construct
  source 1..1272: mol_type = other DNA
atggccttaccagtgaccgccttgctcctgccgctggccttgctgctccacgccgccaggccggacatccagatgacacagagccctagcagcctgtctgccagcgtgggagacagagtgaccatcacctgtagagccagccagggcatctcttcttggctggcctggtatcagcagaagcctggcaaggcccctaagctgctgatctatgccgccagctctctccagagcggagtgcctagcagattttctggcagcggctccggcaccgatttcaccctgacaatatccagcctccagcctgaggacttcgccacctactactgccagcagtacaacagctaccctctgaccttcggccagggcaccaaggtggaaatcaaaagaggcggaggcggaagtggaggcggaggatctggcggcggaggctctgaagtgcagctggttgaatcaggtggcggcctggttcaacctggcggatctctgagactgagctgtgccgcctccggcttcacctttagcgatcacggaatgcactgggtccgacaggcccctggaaaaggactggaatgggtcgccgtgatttggtacgacggcagcaacaagtattacgccgacagcgtgaagggcagattcaccatcagccgggacaacagcaagaacaccctgtacctccagatgaactccctgagagccgaggacaccgccgtgtactactgtgccagagacagcatcatggtccgaggcgattattggggccagggaaccctggtcacagtgtctagtacgcgtcagagcatcaagggcaaccacctggtcaaggtgtacgactaccaagaggacggcagcgtgctgctgacatgtgatgccgaggccaagaacatcacctggtttaaggacggcaagatgatcggcttcctgaccgaggacaagaagaagtggaacctgggcagcaacgctaaggaccccagaggcatgtatcagtgcaagggcagccagaacaagagcaagcccctccaggtgtactaccggatgtgccagaactgcatcgagctgaacgccgctaccatcagcggctttctgttcgccgagatcgtgtccatcttcgtgctggccgtgggcgtgtactttatcgctggacaggatggcgtgcggcagagcagagcttccgataagcaaaccctgctgcctaacgaccagctgtaccagcctctgaaggacagagaggacgaccagtacagccacctccagggcaatcagctgagaagaaac

SEQ ID NO: 20150 - DNA, 1221 bp, synthetic construct
  source 1..1221: mol_type = other DNA
atggccttaccagtgaccgccttgctcctgccgctggccttgctgctccacgccgccaggccggacatccagatgacacagagccctagcagcctgtctgccagcgtgggagacagagtgaccatcacctgtagagccagccagggcatctcttcttggctggcctggtatcagcagaagcctggcaaggcccctaagctgctgatctatgccgccagctctctccagagcggagtgcctagcagattttctggcagcggctccggcaccgatttcaccctgacaatatccagcctccagcctgaggacttcgccacctactactgccagcagtacaacagctaccctctgaccttcggccagggcaccaaggtggaaatcaaaagaggcggaggcggaagtggaggcggaggatctggcggcggaggctctgaagtgcagctggttgaatcaggtggcggcctggttcaacctggcggatctctgagactgagctgtgccgcctccggcttcacctttagcgatcacggaatgcactgggtccgacaggcccctggaaaaggactggaatgggtcgccgtgatttggtacgacggcagcaacaagtattacgccgacagcgtgaagggcagattcaccatcagccgggacaacagcaagaacaccctgtacctccagatgaactccctgagagccgaggacaccgccgtgtactactgtgccagagacagcatcatggtccgaggcgattattggggccagggaaccctggtcacagtgtctagtacgcgtcagagttttgggttgttggaccctaaattgtgctatctgttggacggaatcctgttcatttacggagtgatcctgaccgcattgttcctgcgggttaagttttccagatccgcagacgcacccgcttaccaacaagggcagaaccaactctacaatgaacttaatttggggcggagggaagagtacgacgttctggacaaaaggaggggacgagatcccgagatgggcggaaagcctcagcgaaggaagaatccgcaagaggggctttataacgaactccagaaagataaaatggcagaagcctatagtgagattgggatgaagggagaaaggaggaggggtaaaggtcacgatgggttgtaccaaggattgagcacagccactaaagatacctatgatgcgctccacatgcaggccctgccgccaaga

SEQ ID NO: 20151 - DNA, 1347 bp, synthetic construct
  source 1..1347: mol_type = other DNA
atggccttaccagtgaccgccttgctcctgccgctggccttgctgctccacgccgccaggccggaagtgcagctggttgaatcaggtggcggcctggttcaacctggcggatctctgagactgagctgtgccgcctccggcttcacctttagcgatcacggaatgcactgggtccgacaggcccctggaaaaggactggaatgggtcgccgtgatttggtacgacggcagcaacaagtattacgccgacagcgtgaagggcagattcaccatcagccgggacaacagcaagaacaccctgtacctccagatgaactccctgagagccgaggacaccgccgtgtactactgtgccagagacagcatcatggtccgaggcgattattggggccagggaaccctggtcacagtgtctagtggcggaggcggaagtggaggcggaggatctggcggcggaggctctgacatccagatgacacagagccctagcagcctgtctgccagcgtgggagacagagtgaccatcacctgtagagccagccagggcatctcttcttggctggcctggtatcagcagaagcctggcaaggcccctaagctgctgatctatgccgccagctctctccagagcggagtgcctagcagattttctggcagcggctccggcaccgatttcaccctgacaatatccagcctccagcctgaggacttcgccacctactactgccagcagtacaacagctaccctctgaccttcggccagggcaccaaggtggaaatcaaaagaacgcgtgacggtaacgaggagatgggaggaatcactcaaaccccttacaaagtctcaatttcaggaacaactgttatccttacatgtccccagtatcctggcagcgagatcctttggcagcataacgacaagaatatagggggagatgaagacgataagaatatcggatctgacgaggatcacttgagcctgaaagagttctccgagcttgaacaaagcggatattatgtgtgctatccgcgcgggtcaaagccggaagacgctaacttttacctttatctccgagccagagtgtgcgaaaattgcatggaaatggacgttatgtccgttgctacaatagttatcgtagatatatgcatcacgggtggactgcttctgctggtttattattggtccaagaatagaaaggccaaagctaaacccgtgaccagaggcgctggcgcaggcggaaggcaaaggggacaaaacaaagaacggccaccaccagtgccaaatccagattatgagcctattcggaaaggacagagggacctgtactctggcctgaatcagagaagaatc

SEQ ID NO: 20152 - DNA, 1242 bp, synthetic construct
  source 1..1242: mol_type = other DNA
atggccttaccagtgaccgccttgctcctgccgctggccttgctgctccacgccgccaggccggaagtgcagctggttgaatcaggtggcggcctggttcaacctggcggatctctgagactgagctgtgccgcctccggcttcacctttagcgatcacggaatgcactgggtccgacaggcccctggaaaaggactggaatgggtcgccgtgatttggtacgacggcagcaacaagtattacgccgacagcgtgaagggcagattcaccatcagccgggacaacagcaagaacaccctgtacctccagatgaactccctgagagccgaggacaccgccgtgtactactgtgccagagacagcatcatggtccgaggcgattattggggccagggaaccctggtcacagtgtctagtggcggaggcggaagtggaggcggaggatctggcggcggaggctctgacatccagatgacacagagccctagcagcctgtctgccagcgtgggagacagagtgaccatcacctgtagagccagccagggcatctcttcttggctggcctggtatcagcagaagcctggcaaggcccctaagctgctgatctatgccgccagctctctccagagcggagtgcctagcagattttctggcagcggctccggcaccgatttcaccctgacaatatccagcctccagcctgaggacttcgccacctactactgccagcagtacaacagctaccctctgaccttcggccagggcaccaaggtggaaatcaaaagaacgcgtttcaagatccccatcgaggaactggaagatcgggtgttcgtgaactgcaacacctctatcacctgggtggaaggcaccgtgggaacactgctgagcgacatcaccagactggacctcggcaagcggattctggaccctcggggcatctacagatgcaacggcaccgacatctacaaggacaaagaaagcaccgtgcaggtccactacagaatgtgccagtcctgcgtggaactggaccctgctacagtggccggcatcatcgtgaccgatgtgatcgctactctgctgctggctctgggagtgttctgcttcgccggacacgaaacaggcagactgtctggcgctgccgatacacaggccctgctgagaaacgaccaagtgtatcagcccctgcgcgacagagatgatgcccagtattctcacctcggcggcaactgggctagaaacaag

SEQ ID NO: 20153 - DNA, 1272 bp, synthetic construct
  source 1..1272: mol_type = other DNA
atggccttaccagtgaccgccttgctcctgccgctggccttgctgctccacgccgccaggccggaagtgcagctggttgaatcaggtggcggcctggttcaacctggcggatctctgagactgagctgtgccgcctccggcttcacctttagcgatcacggaatgcactgggtccgacaggcccctggaaaaggactggaatgggtcgccgtgatttggtacgacggcagcaacaagtattacgccgacagcgtgaagggcagattcaccatcagccgggacaacagcaagaacaccctgtacctccagatgaactccctgagagccgaggacaccgccgtgtactactgtgccagagacagcatcatggtccgaggcgattattggggccagggaaccctggtcacagtgtctagtggcggaggcggaagtggaggcggaggatctggcggcggaggctctgacatccagatgacacagagccctagcagcctgtctgccagcgtgggagacagagtgaccatcacctgtagagccagccagggcatctcttcttggctggcctggtatcagcagaagcctggcaaggcccctaagctgctgatctatgccgccagctctctccagagcggagtgcctagcagattttctggcagcggctccggcaccgatttcaccctgacaatatccagcctccagcctgaggacttcgccacctactactgccagcagtacaacagctaccctctgaccttcggccagggcaccaaggtggaaatcaaaagaacgcgtcagagcatcaagggcaaccacctggtcaaggtgtacgactaccaagaggacggcagcgtgctgctgacatgtgatgccgaggccaagaacatcacctggtttaaggacggcaagatgatcggcttcctgaccgaggacaagaagaagtggaacctgggcagcaacgctaaggaccccagaggcatgtatcagtgcaagggcagccagaacaagagcaagcccctccaggtgtactaccggatgtgccagaactgcatcgagctgaacgccgctaccatcagcggctttctgttcgccgagatcgtgtccatcttcgtgctggccgtgggcgtgtactttatcgctggacaggatggcgtgcggcagagcagagcttccgataagcaaaccctgctgcctaacgaccagctgtaccagcctctgaaggacagagaggacgaccagtacagccacctccagggcaatcagctgagaagaaac

SEQ ID NO: 20154 - DNA, 1221 bp, synthetic construct
  source 1..1221: mol_type = other DNA
atggccttaccagtgaccgccttgctcctgccgctggccttgctgctccacgccgccaggccggaagtgcagctggttgaatcaggtggcggcctggttcaacctggcggatctctgagactgagctgtgccgcctccggcttcacctttagcgatcacggaatgcactgggtccgacaggcccctggaaaaggactggaatgggtcgccgtgatttggtacgacggcagcaacaagtattacgccgacagcgtgaagggcagattcaccatcagccgggacaacagcaagaacaccctgtacctccagatgaactccctgagagccgaggacaccgccgtgtactactgtgccagagacagcatcatggtccgaggcgattattggggccagggaaccctggtcacagtgtctagtggcggaggcggaagtggaggcggaggatctggcggcggaggctctgacatccagatgacacagagccctagcagcctgtctgccagcgtgggagacagagtgaccatcacctgtagagccagccagggcatctcttcttggctggcctggtatcagcagaagcctggcaaggcccctaagctgctgatctatgccgccagctctctccagagcggagtgcctagcagattttctggcagcggctccggcaccgatttcaccctgacaatatccagcctccagcctgaggacttcgccacctactactgccagcagtacaacagctaccctctgaccttcggccagggcaccaaggtggaaatcaaaagaacgcgtcagagttttgggttgttggaccctaaattgtgctatctgttggacggaatcctgttcatttacggagtgatcctgaccgcattgttcctgcgggttaagttttccagatccgcagacgcacccgcttaccaacaagggcagaaccaactctacaatgaacttaatttggggcggagggaagagtacgacgttctggacaaaaggaggggacgagatcccgagatgggcggaaagcctcagcgaaggaagaatccgcaagaggggctttataacgaactccagaaagataaaatggcagaagcctatagtgagattgggatgaagggagaaaggaggaggggtaaaggtcacgatgggttgtaccaaggattgagcacagccactaaagatacctatgatgcgctccacatgcaggccctgccgccaaga

SEQ ID NO: 20155 - DNA, 1506 bp, synthetic construct
  source 1..1506: mol_type = other DNA
atggccttaccagtgaccgccttgctcctgccgctggccttgctgctccacgccgccaggccggacatccagatgacacagagccctagcagcctgtctgccagcgtgggagacagagtgaccatcacctgtagagccagccagggcatctcttcttggctggcctggtatcagcagaagcctggcaaggcccctaagctgctgatctatgccgccagctctctccagagcggagtgcctagcagattttctggcagcggctccggcaccgatttcaccctgacaatatccagcctccagcctgaggacttcgccacctactactgccagcagtacaacagctaccctctgaccttcggccagggcaccaaggtggaaatcaaaagaggcggaggcggaagtggaggcggaggatctggcggcggaggctctgaagtgcagctggttgaatcaggtggcggcctggttcaacctggcggatctctgagactgagctgtgccgcctccggcttcacctttagcgatcacggaatgcactgggtccgacaggcccctggaaaaggactggaatgggtcgccgtgatttggtacgacggcagcaacaagtattacgccgacagcgtgaagggcagattcaccatcagccgggacaacagcaagaacaccctgtacctccagatgaactccctgagagccgaggacaccgccgtgtactactgtgccagagacagcatcatggtccgaggcgattattggggccagggaaccctggtcacagtgtctagtacgcgtggaatgaggactgaggatcttcccaaagctgtcgtctttctcgaaccccaatggtatcgggtgctcgaaaaagactctgtgacactgaaatgccaaggggcctactctcccgaggacaactccacacagtggtttcataatgagtccctcatcagctctcaggccagctcttatttcattgatgccgctacagtggacgactccggcgagtatcggtgtcagaccaatctgtctacactgtctgaccccgtgcagcttgaggtccacattggatggttgctcttgcaagccccacgctgggttttcaaagaggaagatccaatccatctgcggtgccacagctggaaaaacaccgctctccacaaagtcacatacctgcaaaatggcaaaggacgcaaatacttccatcacaattccgatttttacattccgaaggctaccctgaaagacagcggcagctatttctgccggggactcgtcggctccaagaatgtgtcctccgaaaccgtgaatatcacgattacccaaggactggctgtgcctacaatctctagcttctttccgcctggataccaagtctccttctgtcttgtgatggtcctcctgtttgctgtggacacaggactgtacttttccgtgaaaacgaacatccgcagctccacacgcgattggaaagatcacaagtttaaatggcgcaaagatccccaggacaag

SEQ ID NO: 20156 - DNA, 2355 bp, synthetic construct
  source 1..2355: mol_type = other DNA
atggccttaccagtgaccgccttgctcctgccgctggccttgctgctccacgccgccaggccggacatccagatgacacagagccctagcagcctgtctgccagcgtgggagacagagtgaccatcacctgtagagccagccagggcatctcttcttggctggcctggtatcagcagaagcctggcaaggcccctaagctgctgatctatgccgccagctctctccagagcggagtgcctagcagattttctggcagcggctccggcaccgatttcaccctgacaatatccagcctccagcctgaggacttcgccacctactactgccagcagtacaacagctaccctctgaccttcggccagggcaccaaggtggaaatcaaaagaggcggaggcggaagtggaggcggaggatctggcggcggaggctctgaagtgcagctggttgaatcaggtggcggcctggttcaacctggcggatctctgagactgagctgtgccgcctccggcttcacctttagcgatcacggaatgcactgggtccgacaggcccctggaaaaggactggaatgggtcgccgtgatttggtacgacggcagcaacaagtattacgccgacagcgtgaagggcagattcaccatcagccgggacaacagcaagaacaccctgtacctccagatgaactccctgagagccgaggacaccgccgtgtactactgtgccagagacagcatcatggtccgaggcgattattggggccagggaaccctggtcacagtgtctagtacgcgtggaggctctggacaacaacagaccctgcctaaaccattcatctgggctgaaccccactttatggttccgaaagagaaacaagtcacgatttgttgccaagggaattacggggccgtcgagtatcagctccactttgagggctccctgtttgctgtggatcggcccaagccacctgaaagaatcaacaaagtccaattctatattcctgatatgaactcccgcatggcaggccagtattcatgtatctaccgcgtgggagaactttggagtgaaccctctaacctgctggacctcgtcgtgacagagatgtatgatacacccacactgtctgtgcaccctgggccagaagttatcagcggagaaaaagttaccttttattgccgcctcgataccgctacctctatgttcctcttgctgaaagagggccgcagctctcacgtgcagcgaggctacggaaaggtccaagctgagtttcctctcggccccgtgaccaccgctcacaggggcacatatagatgttttggctcttataacaatcatgcctggtcattcccatccgagcctgtgaaactgctggtcacaggcgatattgagaatacctctctggccccagaagatcctacattccccgccgacacatggggaacatatctgctgacaaccgaaaccgggctgcaaaaggaccatgctctgtgggatcataccgctcagaatctgcttcggatggggcttgcattcctggtcctggtggctcttgtctggtttctggtcgaggactggctgtcccggaagagaaccagagaaagagcttccagggccagcacctgggaaggcagacgcagactgaatactcagaccctgcgcgccaagagaagcggatctggcgtgaagcagaccctgaatttcgacctgctgaagctggctggcgacgtggaatccaacccaggcccttctagaggccatatgaccgagtacaagcccacggtgcgcctcgccacccgcgacgacgtccccagggccgtacgcaccctcgccgccgcgttcgccgactaccccgccacgcgccacaccgtcgatccggaccgccacatcgagcgggtcaccgagctgcaagaactcttcctcacgcgcgtcgggctcgacatcggcaaggtgtgggtcgcggacgacggcgccgcggtggcggtctggaccacgccggagagcgtcgaagcgggggcggtgttcgccgagatcggcccgcgcatggccgagttgagcggttcccggctggccgcgcagcaacagatggaaggcctcctggcgccgcaccggcccaaggagcccgcgtggttcctggccaccgtcggcgtctcgcccgaccaccagggcaagggtctgggcagcgccgtcgtgctccccggagtggaggcggccgagcgcgccggggtgcccgccttcctggagacctccgcgccccgcaacctccccttctacgagcggctcggcttcaccgtcaccgccgacgtcgaggtgcccgaaggaccgcgcacctggtgcatgacccgcaagcccggtgcctga

SEQ ID NO: 20157 - DNA, 1854 bp, synthetic construct
  source 1..1854: mol_type = other DNA
atggccttaccagtgaccgccttgctcctgccgctggccttgctgctccacgccgccaggccggacatccagatgacacagagccctagcagcctgtctgccagcgtgggagacagagtgaccatcacctgtagagccagccagggcatctcttcttggctggcctggtatcagcagaagcctggcaaggcccctaagctgctgatctatgccgccagctctctccagagcggagtgcctagcagattttctggcagcggctccggcaccgatttcaccctgacaatatccagcctccagcctgaggacttcgccacctactactgccagcagtacaacagctaccctctgaccttcggccagggcaccaaggtggaaatcaaaagaggcggaggcggaagtggaggcggaggatctggcggcggaggctctgaagtgcagctggttgaatcaggtggcggcctggttcaacctggcggatctctgagactgagctgtgccgcctccggcttcacctttagcgatcacggaatgcactgggtccgacaggcccctggaaaaggactggaatgggtcgccgtgatttggtacgacggcagcaacaagtattacgccgacagcgtgaagggcagattcaccatcagccgggacaacagcaagaacaccctgtacctccagatgaactccctgagagccgaggacaccgccgtgtactactgtgccagagacagcatcatggtccgaggcgattattggggccagggaaccctggtcacagtgtctagtacgcgtaaaattgaagttatgtatcctcctccttacctagacaatgagaagagcaatggaaccattatccatgtgaaaggggcgcgtggcgatattgagaatacctctctggccccagaagatcctacattccccgccgacacatggggaacatatctgctgacaaccgaaaccgggctgcaaaaggaccatgctctgtgggatcataccgctcagaatctgcttcggatggggcttgcattcctggtcctggtggctcttgtctggtttctggtcgaggactggctgtcccggaagagaaccagagaaagagcttccagggccagcacctgggaaggcagacgcagactgaatactcagaccctgcgcgccaagagaagcggatctggcgtgaagcagaccctgaatttcgacctgctgaagctggctggcgacgtggaatccaacccaggcccttctagaggccatatgaccgagtacaagcccacggtgcgcctcgccacccgcgacgacgtccccagggccgtacgcaccctcgccgccgcgttcgccgactaccccgccacgcgccacaccgtcgatccggaccgccacatcgagcgggtcaccgagctgcaagaactcttcctcacgcgcgtcgggctcgacatcggcaaggtgtgggtcgcggacgacggcgccgcggtggcggtctggaccacgccggagagcgtcgaagcgggggcggtgttcgccgagatcggcccgcgcatggccgagttgagcggttcccggctggccgcgcagcaacagatggaaggcctcctggcgccgcaccggcccaaggagcccgcgtggttcctggccaccgtcggcgtctcgcccgaccaccagggcaagggtctgggcagcgccgtcgtgctccccggagtggaggcggccgagcgcgccggggtgcccgccttcctggagacctccgcgccccgcaacctccccttctacgagcggctcggcttcaccgtcaccgccgacgtcgaggtgcccgaaggaccgcgcacctggtgcatgacccgcaagcccggtgcctga

SEQ ID NO: 20158 - DNA, 2115 bp, synthetic construct
  source 1..2115: mol_type = other DNA
atggccttaccagtgaccgccttgctcctgccgctggccttgctgctccacgccgccaggccggacatccagatgacacagagccctagcagcctgtctgccagcgtgggagacagagtgaccatcacctgtagagccagccagggcatctcttcttggctggcctggtatcagcagaagcctggcaaggcccctaagctgctgatctatgccgccagctctctccagagcggagtgcctagcagattttctggcagcggctccggcaccgatttcaccctgacaatatccagcctccagcctgaggacttcgccacctactactgccagcagtacaacagctaccctctgaccttcggccagggcaccaaggtggaaatcaaaagaggcggaggcggaagtggaggcggaggatctggcggcggaggctctgaagtgcagctggttgaatcaggtggcggcctggttcaacctggcggatctctgagactgagctgtgccgcctccggcttcacctttagcgatcacggaatgcactgggtccgacaggcccctggaaaaggactggaatgggtcgccgtgatttggtacgacggcagcaacaagtattacgccgacagcgtgaagggcagattcaccatcagccgggacaacagcaagaacaccctgtacctccagatgaactccctgagagccgaggacaccgccgtgtactactgtgccagagacagcatcatggtccgaggcgattattggggccagggaaccctggtcacagtgtctagtacgcgtctgtgggtgtcccagccacctgaaattcggacactggaaggctcctccgcctttctgccctgtagctttaacgccagccaggggagactcgccatcggctctgtgacatggttccgggatgaagtcgtccctggaaaagaagttcgcaacggaacaccagagttcagaggcagactcgccccactggcaagctccagattcctgcatgaccatcaggctgaactgcacattagggacgtgcggggccacgatgcctccatctatgtgtgtcgggtcgaagtgcttggactcggcgtcggaactggaaacggcactaggctggtggtcgagaaagaacatccacagcttggcgctggcaccgtcctgttgcttagagccggattctatgccgtcagcttcctgtccgtggctgtggggtctacagtgtattaccagggaaaatgtctcacctggaaaggccccagacgccagcttccagctgttgttcctgctccactgccaccaccttgtggctcctctgctcacttgcttccaccagtgcctggcggacgcgccaagagaagcggatctggcgtgaagcagaccctgaatttcgacctgctgaagctggctggcgacgtggaatccaacccaggcccttctagaatgtaccggatgcagctgctgagctgtatcgccctgtctctggccctggtcacaaatagcgcccctaccagcagcagcaccaagaaaacccagctgcaactggaacacctcctgctggacctccagatgatcctgaacggcatcaacaactacaagaaccccaagctgaccgagatgctgaccgccaagttctacatgcccaagaaggccaccgagctgaagcacctccagtgcctggaagaggaactgaagcccctggaagaagtgctgaatctggcccagagcaagaacttccacctgaggccaagggacctgatctccaacatcaacgtgatcgtgctggaactgaaaggcagcgagacaaccttcatgtgcgagtacgccgacgagacagctaccatcgtggaatttctgaatcggtggatcaccttctgccagagcatcatcagcaccctgacaaagatcgaagtgatgtaccctcctccttacctggacaacgagaagtccaacggcaccatcatccacgtgaagggcaagcacctgtgtccttctccactgttccccggacctagcaagcctttctgggtgctcgttgttgttggcggcgtgctggcctgttacagcctgctggttaccgtggccttcatcatcttttgggtccgaagcaagcggagctaa

SEQ ID NO: 20159 - DNA, 2043 bp, synthetic construct
  source 1..2043: mol_type = other DNA
atggccttaccagtgaccgccttgctcctgccgctggccttgctgctccacgccgccaggccggacatccagatgacacagagccctagcagcctgtctgccagcgtgggagacagagtgaccatcacctgtagagccagccagggcatctcttcttggctggcctggtatcagcagaagcctggcaaggcccctaagctgctgatctatgccgccagctctctccagagcggagtgcctagcagattttctggcagcggctccggcaccgatttcaccctgacaatatccagcctccagcctgaggacttcgccacctactactgccagcagtacaacagctaccctctgaccttcggccagggcaccaaggtggaaatcaaaagaggcggaggcggaagtggaggcggaggatctggcggcggaggctctgaagtgcagctggttgaatcaggtggcggcctggttcaacctggcggatctctgagactgagctgtgccgcctccggcttcacctttagcgatcacggaatgcactgggtccgacaggcccctggaaaaggactggaatgggtcgccgtgatttggtacgacggcagcaacaagtattacgccgacagcgtgaagggcagattcaccatcagccgggacaacagcaagaacaccctgtacctccagatgaactccctgagagccgaggacaccgccgtgtactactgtgccagagacagcatcatggtccgaggcgattattggggccagggaaccctggtcacagtgtctagtacgcgtctgtgggtgtcccagccacctgaaattcggacactggaaggctcctccgcctttctgccctgtagctttaacgccagccaggggagactcgccatcggctctgtgacatggttccgggatgaagtcgtccctggaaaagaagttcgcaacggaacaccagagttcagaggcagactcgccccactggcaagctccagattcctgcatgaccatcaggctgaactgcacattagggacgtgcggggccacgatgcctccatctatgtgtgtcgggtcgaagtgcttggactcggcgtcggaactggaaacggcactaggctggtggtcgagaaagaacatccacagcttggcgctggcaccgtcctgttgcttagagccggattctatgccgtcagcttcctgtccgtggctgtggggtctacagtgtattaccagggaaaatgtctcacctggaaaggccccagacgccagcttccagctgttgttcctgctccactgccaccaccttgtggctcctctgctcacttgcttccaccagtgcctggcggacgcgccaagagaagcggatctggcgtgaagcagaccctgaatttcgacctgctgaagctggctggcgacgtggaatccaacccaggcccttctagaggccatatgaccgagtacaagcccacggtgcgcctcgccacccgcgacgacgtccccagggccgtacgcaccctcgccgccgcgttcgccgactaccccgccacgcgccacaccgtcgatccggaccgccacatcgagcgggtcaccgagctgcaagaactcttcctcacgcgcgtcgggctcgacatcggcaaggtgtgggtcgcggacgacggcgccgcggtggcggtctggaccacgccggagagcgtcgaagcgggggcggtgttcgccgagatcggcccgcgcatggccgagttgagcggttcccggctggccgcgcagcaacagatggaaggcctcctggcgccgcaccggcccaaggagcccgcgtggttcctggccaccgtcggcgtctcgcccgaccaccagggcaagggtctgggcagcgccgtcgtgctccccggagtggaggcggccgagcgcgccggggtgcccgccttcctggagacctccgcgccccgcaacctccccttctacgagcggctcggcttcaccgtcaccgccgacgtcgaggtgcccgaaggaccgcgcacctggtgcatgacccgcaagcccggtgcctga

SEQ ID NO: 20160 - DNA, 1068 bp, synthetic construct
  source 1..1068: mol_type = other DNA
atggccttaccagtgaccgccttgctcctgccgctggccttgctgctccacgccgccaggccggacatccagatgacacagagccctagcagcctgtctgccagcgtgggagacagagtgaccatcacctgtagagccagccagggcatctcttcttggctggcctggtatcagcagaagcctggcaaggcccctaagctgctgatctatgccgccagctctctccagagcggagtgcctagcagattttctggcagcggctccggcaccgatttcaccctgacaatatccagcctccagcctgaggacttcgccacctactactgccagcagtacaacagctaccctctgaccttcggccagggcaccaaggtggaaatcaaaagaggcggaggcggaagtggaggcggaggatctggcggcggaggctctgaagtgcagctggttgaatcaggtggcggcctggttcaacctggcggatctctgagactgagctgtgccgcctccggcttcacctttagcgatcacggaatgcactgggtccgacaggcccctggaaaaggactggaatgggtcgccgtgatttggtacgacggcagcaacaagtattacgccgacagcgtgaagggcagattcaccatcagccgggacaacagcaagaacaccctgtacctccagatgaactccctgagagccgaggacaccgccgtgtactactgtgccagagacagcatcatggtccgaggcgattattggggccagggaaccctggtcacagtgtctagtacgcgtaaaattgaagttatgtatcctcctccttacctagacaatgagaagagcaatggaaccattatccatgtgaaaggggcgcgtatcacccagggcctggccgtgtctaccatcagcagctttttcccacccggctaccaggtgtccttctgcctcgtgatggtgctgctgttcgccgtggacaccggcctgtacttcagcgtgaaaacaaacatccggtccagcaccagagactggaaggaccacaagttcaagtggcggaaggacccccaggacaag

SEQ ID NO: 20161 - DNA, 1068 bp, synthetic construct
  source 1..1068: mol_type = other DNA
atggccttaccagtgaccgccttgctcctgccgctggccttgctgctccacgccgccaggccggacatccagatgacacagagccctagcagcctgtctgccagcgtgggagacagagtgaccatcacctgtagagccagccagggcatctcttcttggctggcctggtatcagcagaagcctggcaaggcccctaagctgctgatctatgccgccagctctctccagagcggagtgcctagcagattttctggcagcggctccggcaccgatttcaccctgacaatatccagcctccagcctgaggacttcgccacctactactgccagcagtacaacagctaccctctgaccttcggccagggcaccaaggtggaaatcaaaagaggcggaggcggaagtggaggcggaggatctggcggcggaggctctgaagtgcagctggttgaatcaggtggcggcctggttcaacctggcggatctctgagactgagctgtgccgcctccggcttcacctttagcgatcacggaatgcactgggtccgacaggcccctggaaaaggactggaatgggtcgccgtgatttggtacgacggcagcaacaagtattacgccgacagcgtgaagggcagattcaccatcagccgggacaacagcaagaacaccctgtacctccagatgaactccctgagagccgaggacaccgccgtgtactactgtgccagagacagcatcatggtccgaggcgattattggggccagggaaccctggtcacagtgtctagtacgcgtaaaattgaagttatgtatcctcctccttacctagacaatgagaagagcaatggaaccattatccatgtgaaaggggcgcgtattacccaaggactggctgtgcctacaatctctagcttctttccgcctggataccaagtctccttctgtcttgtgatggtcctcctgtttgctgtggacacaggactgtacttttccgtgaaaacgaacatccgcagctccacacgcgattggaaagatcacaagtttaaatggcgcaaagatccccaggacaag

SEQ ID NO: 20162 - DNA, 1005 bp, synthetic construct
  source 1..1005: mol_type = other DNA
atggccttaccagtgaccgccttgctcctgccgctggccttgctgctccacgccgccaggccggacatccagatgacacagagccctagcagcctgtctgccagcgtgggagacagagtgaccatcacctgtagagccagccagggcatctcttcttggctggcctggtatcagcagaagcctggcaaggcccctaagctgctgatctatgccgccagctctctccagagcggagtgcctagcagattttctggcagcggctccggcaccgatttcaccctgacaatatccagcctccagcctgaggacttcgccacctactactgccagcagtacaacagctaccctctgaccttcggccagggcaccaaggtggaaatcaaaagaggcggaggcggaagtggaggcggaggatctggcggcggaggctctgaagtgcagctggttgaatcaggtggcggcctggttcaacctggcggatctctgagactgagctgtgccgcctccggcttcacctttagcgatcacggaatgcactgggtccgacaggcccctggaaaaggactggaatgggtcgccgtgatttggtacgacggcagcaacaagtattacgccgacagcgtgaagggcagattcaccatcagccgggacaacagcaagaacaccctgtacctccagatgaactccctgagagccgaggacaccgccgtgtactactgtgccagagacagcatcatggtccgaggcgattattggggccagggaaccctggtcacagtgtctagtacgcgtaaaattgaagttatgtatcctcctccttacctagacaatgagaagagcaatggaaccattatccatgtgaaaggggcgcgtattacccaaggactggctgtgtctacaatctctagcttctctccgcctggataccaagtctccttctgtcttgtgatggtcctcctgtttgctgtggacacaggactgtacttttccgtgaaaacgaacatc

SEQ ID NO: 20163 - DNA, 1098 bp, synthetic construct
  source 1..1098: mol_type = other DNA
atggccttaccagtgaccgccttgctcctgccgctggccttgctgctccacgccgccaggccggacatccagatgacacagagccctagcagcctgtctgccagcgtgggagacagagtgaccatcacctgtagagccagccagggcatctcttcttggctggcctggtatcagcagaagcctggcaaggcccctaagctgctgatctatgccgccagctctctccagagcggagtgcctagcagattttctggcagcggctccggcaccgatttcaccctgacaatatccagcctccagcctgaggacttcgccacctactactgccagcagtacaacagctaccctctgaccttcggccagggcaccaaggtggaaatcaaaagaggcggaggcggaagtggaggcggaggatctggcggcggaggctctgaagtgcagctggttgaatcaggtggcggcctggttcaacctggcggatctctgagactgagctgtgccgcctccggcttcacctttagcgatcacggaatgcactgggtccgacaggcccctggaaaaggactggaatgggtcgccgtgatttggtacgacggcagcaacaagtattacgccgacagcgtgaagggcagattcaccatcagccgggacaacagcaagaacaccctgtacctccagatgaactccctgagagccgaggacaccgccgtgtactactgtgccagagacagcatcatggtccgaggcgattattggggccagggaaccctggtcacagtgtctagtacgcgtaaaattgaagttatgtatcctcctccttacctagacaatgagaagagcaatggaaccattatccatgtgaaaggggcgcgtgtcgagaaagaacatccacagcttggcgctggcaccgtcctgttgcttagagccggattctatgccgtcagcttcctgtccgtggctgtggggtctacagtgtattaccagggaaaatgtctcacctggaaaggccccagacgccagcttccagctgttgttcctgctccactgccaccaccttgtggctcctctgctcacttgcttccaccagtgcctggcgga

SEQ ID NO: 20164 - DNA, 1341 bp, synthetic construct
  source 1..1341: mol_type = other DNA
atggccttaccagtgaccgccttgctcctgccgctggccttgctgctccacgccgccaggccggacatccagatgacacagagccctagcagcctgtctgccagcgtgggagacagagtgaccatcacctgtagagccagccagggcatctcttcttggctggcctggtatcagcagaagcctggcaaggcccctaagctgctgatctatgccgccagctctctccagagcggagtgcctagcagattttctggcagcggctccggcaccgatttcaccctgacaatatccagcctccagcctgaggacttcgccacctactactgccagcagtacaacagctaccctctgaccttcggccagggcaccaaggtggaaatcaaaagaggcggaggcggaagtggaggcggaggatctggcggcggaggctctgaagtgcagctggttgaatcaggtggcggcctggttcaacctggcggatctctgagactgagctgtgccgcctccggcttcacctttagcgatcacggaatgcactgggtccgacaggcccctggaaaaggactggaatgggtcgccgtgatttggtacgacggcagcaacaagtattacgccgacagcgtgaagggcagattcaccatcagccgggacaacagcaagaacaccctgtacctccagatgaactccctgagagccgaggacaccgccgtgtactactgtgccagagacagcatcatggtccgaggcgattattggggccagggaaccctggtcacagtgtctagtacgcgtaaaattgaagttatgtatcctcctccttacctagacaatgagaagagcaatggaaccattatccatgtgaaaggggcgcgtaagtctgtgcgcttttacctggtcgtcagccctgccagtgcctccactcagacatcttggaccccaagggaccttgtgtcctctcagacacagacacagtcctgcgtgccaccaactgctggcgcaagacaggctccagagtctcccagcacaatccccgtcccttctcagccccagaactccacacttaggccaggaccagctgctccaatcgcactggtcccagtgttctgcggactgctggttgccaagtctctggtgctgagcgcactcctcgtttggtggggcgatatttggtggaaaacgatgatggaattgagatccctcgatacgcagaaagccacatgccaccttcagcaagtcacagacttgccttggaccagcgtcagctctcccgtggaacgggaaattctgtatcatacagtggcccgcaccaagatttccgacgatgacgacgagcacacactg

SEQ ID NO: 20165 - DNA, 1152 bp, synthetic construct
  source 1..1152: mol_type = other DNA
atggccttaccagtgaccgccttgctcctgccgctggccttgctgctccacgccgccaggccggacatccagatgacacagagccctagcagcctgtctgccagcgtgggagacagagtgaccatcacctgtagagccagccagggcatctcttcttggctggcctggtatcagcagaagcctggcaaggcccctaagctgctgatctatgccgccagctctctccagagcggagtgcctagcagattttctggcagcggctccggcaccgatttcaccctgacaatatccagcctccagcctgaggacttcgccacctactactgccagcagtacaacagctaccctctgaccttcggccagggcaccaaggtggaaatcaaaagaggcggaggcggaagtggaggcggaggatctggcggcggaggctctgaagtgcagctggttgaatcaggtggcggcctggttcaacctggcggatctctgagactgagctgtgccgcctccggcttcacctttagcgatcacggaatgcactgggtccgacaggcccctggaaaaggactggaatgggtcgccgtgatttggtacgacggcagcaacaagtattacgccgacagcgtgaagggcagattcaccatcagccgggacaacagcaagaacaccctgtacctccagatgaactccctgagagccgaggacaccgccgtgtactactgtgccagagacagcatcatggtccgaggcgattattggggccagggaaccctggtcacagtgtctagtacgcgtaaaattgaagttatgtatcctcctccttacctagacaatgagaagagcaatggaaccattatccatgtgaaaggggcgcgtggcgatattgagaatacctctctggccccagaagatcctacattccccgccgacacatggggaacatatctgctgacaaccgaaaccgggctgcaaaaggaccatgctctgtgggatcataccgctcagaatctgcttcggatggggcttgcattcctggtcctggtggctcttgtctggtttctggtcgaggactggctgtcccggaagagaaccagagaaagagcttccagggccagcacctgggaaggcagacgcagactgaatactcagaccctg

SEQ ID NO: 20166 - DNA, 2943 bp, synthetic construct
  source 1..2943: mol_type = other DNA
atggccttaccagtgaccgccttgctcctgccgctggccttgctgctccacgccgccaggccggacatccagatgacacagagccctagcagcctgtctgccagcgtgggagacagagtgaccatcacctgtagagccagccagggcatctcttcttggctggcctggtatcagcagaagcctggcaaggcccctaagctgctgatctatgccgccagctctctccagagcggagtgcctagcagattttctggcagcggctccggcaccgatttcaccctgacaatatccagcctccagcctgaggacttcgccacctactactgccagcagtacaacagctaccctctgaccttcggccagggcaccaaggtggaaatcaaaagactcgagggacagcctaaggccaatcctaccgtgacactgttccctccaagcagcgaagaactccaggccaacaaggccacacttgtgtgcctgatctccgacttctaccctggggctgtgacagtggcttggaaggccgatggatctcctgtgaaagccggcgtggaaaccaccaagccatccaagcagagcaacaacaaatacgccgccagctcctacctgagcctgacacctgagcagtggaagtcccacagatcctacagctgccaagtgacccacgaaggcagcaccgtggaaaagacagtggcccctacagagtgcagcggatcccagagcttcggcctgctggaccccaagctgtgctacctgctggatggcatcctgttcatctacggcgtgatcctgaccgccctgttcctgagagtgaagttcagcagaagcgccgacgcccctgcctaccagcagggacagaaccaactgtacaacgagctgaacctgggcagacgggaagagtacgacgtgctggacaagcggagaggcagggaccctgagatgggcggaaagccccagcggagaaagaacccccaggaaggactgtataacgaactccagaaagacaagatggccgaagcctacagcgagatcggcatgaagggcgagcggagaagaggcaagggccacgatggcctgtaccagggcctgagcaccgccaccaaggacacctatgacgccctgcacatgcaggccctgcctccaagaagggccaagcgatctggatctggagcaacaaacttctcactactcaaacaagcaggtgacgtggaggagaatcccgggcctactagtatggactggatttggcgcatccttttccttgtcggcgctgctaccggcgcgcattccttcgaagaagtgcagctggttgaatcaggtggcggcctggttcaacctggcggatctctgagactgagctgtgccgcctccggcttcacctttagcgatcacggaatgcactgggtccgacaggcccctggaaaaggactggaatgggtcgccgtgatttggtacgacggcagcaacaagtattacgccgacagcgtgaagggcagattcaccatcagccgggacaacagcaagaacaccctgtacctccagatgaactccctgagagccgaggacaccgccgtgtactactgtgccagagacagcatcatggtccgaggcgattattggggccagggaaccctggtcacagtgtctagtacgcgtgcctctacaaagggaccctccgtgtttcctctggctcccagcagcaagtctacaagcggaggaacagccgctctgggctgcctggtcaaggattactttcccgagcctgtgaccgtgtcctggaatagcggagcactgacaagcggcgtgcacacctttccagccgtgctgcaaagcagcggcctgtactctctgagcagcgtggtcacagtgcctagctctagcctgggcacccagacctacatctgcaatgtgaaccacaagcctagcaacaccaaggtggacaagagagtggaacccaagagctgtggtaccggcgacatcgagaacaccagtctggcccctgaggaccctacctttcctgccgatacctggggcacctacctgctgaccacagagacaggactccagaaagatcacgccctgtgggaccacacagcccagaacctgctgagaatgggcctcgcctttctggtgctggttgccctcgtgtggttcctggtggaagattggctgagccggaagcggacaagagagagagccagcagagcctctacctgggagggaagaagaaggctgaacacccagacacttagggccaagcgatctggatctggagcaacaaacttctcactactcaaacaagcaggtgacgtggaggagaatcccgggccttctagaggccatatgaccgagtacaagcccacggtgcgcctcgccacccgcgacgacgtccccagggccgtacgcaccctcgccgccgcgttcgccgactaccccgccacgcgccacaccgtcgatccggaccgccacatcgagcgggtcaccgagctgcaagaactcttcctcacgcgcgtcgggctcgacatcggcaaggtgtgggtcgcggacgacggcgccgcggtggcggtctggaccacgccggagagcgtcgaagcgggggcggtgttcgccgagatcggcccgcgcatggccgagttgagcggttcccggctggccgcgcagcaacagatggaaggcctcctggcgccgcaccggcccaaggagcccgcgtggttcctggccaccgtcggcgtctcgcccgaccaccagggcaagggtctgggcagcgccgtcgtgctccccggagtggaggcggccgagcgcgccggggtgcccgccttcctggagacctccgcgccccgcaacctccccttctacgagcggctcggcttcaccgtcaccgccgacgtcgaggtgcccgaaggaccgcgcacctggtgcatgacccgcaagcccggtgcctga

SEQ ID NO: 20167 - DNA, 3141 bp, synthetic construct
  source 1..3141: mol_type = other DNA
atggccttaccagtgaccgccttgctcctgccgctggccttgctgctccacgccgccaggccggacatccagatgacacagagccctagcagcctgtctgccagcgtgggagacagagtgaccatcacctgtagagccagccagggcatctcttcttggctggcctggtatcagcagaagcctggcaaggcccctaagctgctgatctatgccgccagctctctccagagcggagtgcctagcagattttctggcagcggctccggcaccgatttcaccctgacaatatccagcctccagcctgaggacttcgccacctactactgccagcagtacaacagctaccctctgaccttcggccagggcaccaaggtggaaatcaaaagactcgagggacagcctaaggccaatcctaccgtgacactgttccctccaagcagcgaagaactccaggccaacaaggccacacttgtgtgcctgatctccgacttctaccctggggctgtgacagtggcttggaaggccgatggatctcctgtgaaagccggcgtggaaaccaccaagccatccaagcagagcaacaacaaatacgccgccagctcctacctgagcctgacacctgagcagtggaagtcccacagatcctacagctgccaagtgacccacgaaggcagcaccgtggaaaagacagtggcccctacagagtgcagcggatcccagagcttcggcctgctggaccccaagctgtgctacctgctggatggcatcctgttcatctacggcgtgatcctgaccgccctgttcctgagagtgaagttcagcagaagcgccgacgcccctgcctaccagcagggacagaaccaactgtacaacgagctgaacctgggcagacgggaagagtacgacgtgctggacaagcggagaggcagggaccctgagatgggcggaaagccccagcggagaaagaacccccaggaaggactgtataacgaactccagaaagacaagatggccgaagcctacagcgagatcggcatgaagggcgagcggagaagaggcaagggccacgatggcctgtaccagggcctgagcaccgccaccaaggacacctatgacgccctgcacatgcaggccctgcctccaagaagggccaagcgatctggatctggagcaacaaacttctcactactcaaacaagcaggtgacgtggaggagaatcccgggcctactagtatggactggatttggcgcatccttttccttgtcggcgctgctaccggcgcgcattccttcgaagaagtgcagctggttgaatcaggtggcggcctggttcaacctggcggatctctgagactgagctgtgccgcctccggcttcacctttagcgatcacggaatgcactgggtccgacaggcccctggaaaaggactggaatgggtcgccgtgatttggtacgacggcagcaacaagtattacgccgacagcgtgaagggcagattcaccatcagccgggacaacagcaagaacaccctgtacctccagatgaactccctgagagccgaggacaccgccgtgtactactgtgccagagacagcatcatggtccgaggcgattattggggccagggaaccctggtcacagtgtctagtacgcgtgcctctacaaagggaccctccgtgtttcctctggctcccagcagcaagtctacaagcggaggaacagccgctctgggctgcctggtcaaggattactttcccgagcctgtgaccgtgtcctggaatagcggagcactgacaagcggcgtgcacacctttccagccgtgctgcaaagcagcggcctgtactctctgagcagcgtggtcacagtgcctagctctagcctgggcacccagacctacatctgcaatgtgaaccacaagcctagcaacaccaaggtggacaagagagtggaacccaagagctgtggtaccaagtctgtgcgcttttacctggtcgtcagccctgccagtgcctccactcagacatcttggaccccaagggaccttgtgtcctctcagacacagacacagtcctgcgtgccaccaactgctggcgcaagacaggctccagagtctcccagcacaatccccgtcccttctcagccccagaactccacacttaggccaggaccagctgctccaatcgcactggtcccagtgttctgcggactgctggttgccaagtctctggtgctgagcgcactcctcgtttggtggggcgatatttggtggaaaacgatgatggaattgagatccctcgatacgcagaaagccacatgccaccttcagcaagtcacagacttgccttggaccagcgtcagctctcccgtggaacgggaaattctgtatcatacagtggcccgcaccaagatttccgacgatgacgacgagcacacactgcgcgccaagagaagcggatctggcgtgaagcagaccctgaatttcgacctgctgaagctggctggcgacgtggaatccaacccaggcccttctagaggccatatgaccgagtacaagcccacggtgcgcctcgccacccgcgacgacgtccccagggccgtacgcaccctcgccgccgcgttcgccgactaccccgccacgcgccacaccgtcgatccggaccgccacatcgagcgggtcaccgagctgcaagaactcttcctcacgcgcgtcgggctcgacatcggcaaggtgtgggtcgcggacgacggcgccgcggtggcggtctggaccacgccggagagcgtcgaagcgggggcggtgttcgccgagatcggcccgcgcatggccgagttgagcggttcccggctggccgcgcagcaacagatggaaggcctcctggcgccgcaccggcccaaggagcccgcgtggttcctggccaccgtcggcgtctcgcccgaccaccagggcaagggtctgggcagcgccgtcgtgctccccggagtggaggcggccgagcgcgccggggtgcccgccttcctggagacctccgcgccccgcaacctccccttctacgagcggctcggcttcaccgtcaccgccgacgtcgaggtgcccgaaggaccgcgcacctggtgcatgacccgcaagcccggtgcctga

SEQ ID NO: 20168 - DNA, 2901 bp, synthetic construct
  source 1..2901: mol_type = other DNA
atggccttaccagtgaccgccttgctcctgccgctggccttgctgctccacgccgccaggccggacatccagatgacacagagccctagcagcctgtctgccagcgtgggagacagagtgaccatcacctgtagagccagccagggcatctcttcttggctggcctggtatcagcagaagcctggcaaggcccctaagctgctgatctatgccgccagctctctccagagcggagtgcctagcagattttctggcagcggctccggcaccgatttcaccctgacaatatccagcctccagcctgaggacttcgccacctactactgccagcagtacaacagctaccctctgaccttcggccagggcaccaaggtggaaatcaaaagactcgagggacagcctaaggccaatcctaccgtgacactgttccctccaagcagcgaagaactccaggccaacaaggccacacttgtgtgcctgatctccgacttctaccctggggctgtgacagtggcttggaaggccgatggatctcctgtgaaagccggcgtggaaaccaccaagccatccaagcagagcaacaacaaatacgccgccagctcctacctgagcctgacacctgagcagtggaagtcccacagatcctacagctgccaagtgacccacgaaggcagcaccgtggaaaagacagtggcccctacagagtgcagcggatcccagagcttcggcctgctggaccccaagctgtgctacctgctggatggcatcctgttcatctacggcgtgatcctgaccgccctgttcctgagagtgaagttcagcagaagcgccgacgcccctgcctaccagcagggacagaaccaactgtacaacgagctgaacctgggcagacgggaagagtacgacgtgctggacaagcggagaggcagggaccctgagatgggcggaaagccccagcggagaaagaacccccaggaaggactgtataacgaactccagaaagacaagatggccgaagcctacagcgagatcggcatgaagggcgagcggagaagaggcaagggccacgatggcctgtaccagggcctgagcaccgccaccaaggacacctatgacgccctgcacatgcaggccctgcctccaagaagggccaagcgatctggatctggagcaacaaacttctcactactcaaacaagcaggtgacgtggaggagaatcccgggcctactagtatggactggatttggcgcatccttttccttgtcggcgctgctaccggcgcgcattccttcgaagaagtgcagctggttgaatcaggtggcggcctggttcaacctggcggatctctgagactgagctgtgccgcctccggcttcacctttagcgatcacggaatgcactgggtccgacaggcccctggaaaaggactggaatgggtcgccgtgatttggtacgacggcagcaacaagtattacgccgacagcgtgaagggcagattcaccatcagccgggacaacagcaagaacaccctgtacctccagatgaactccctgagagccgaggacaccgccgtgtactactgtgccagagacagcatcatggtccgaggcgattattggggccagggaaccctggtcacagtgtctagtacgcgtgcctctacaaagggaccctccgtgtttcctctggctcccagcagcaagtctacaagcggaggaacagccgctctgggctgcctggtcaaggattactttcccgagcctgtgaccgtgtcctggaatagcggagcactgacaagcggcgtgcacacctttccagccgtgctgcaaagcagcggcctgtactctctgagcagcgtggtcacagtgcctagctctagcctgggcacccagacctacatctgcaatgtgaaccacaagcctagcaacaccaaggtggacaagagagtggaacccaagagctgtggtaccgtggtcgagaaagaacatccacagcttggcgctggcaccgtcctgttgcttagagccggattctatgccgtcagcttcctgtccgtggctgtggggtctacagtgtattaccagggaaaatgtctcacctggaaaggccccagacgccagcttccagctgttgttcctgctccactgccaccaccttgtggctcctctgctcacttgcttccaccagtgcctggcggacgcgccaagagaagcggatctggcgtgaagcagaccctgaatttcgacctgctgaagctggctggcgacgtggaatccaacccaggcccttctagaggccatatgaccgagtacaagcccacggtgcgcctcgccacccgcgacgacgtccccagggccgtacgcaccctcgccgccgcgttcgccgactaccccgccacgcgccacaccgtcgatccggaccgccacatcgagcgggtcaccgagctgcaagaactcttcctcacgcgcgtcgggctcgacatcggcaaggtgtgggtcgcggacgacggcgccgcggtggcggtctggaccacgccggagagcgtcgaagcgggggcggtgttcgccgagatcggcccgcgcatggccgagttgagcggttcccggctggccgcgcagcaacagatggaaggcctcctggcgccgcaccggcccaaggagcccgcgtggttcctggccaccgtcggcgtctcgcccgaccaccagggcaagggtctgggcagcgccgtcgtgctccccggagtggaggcggccgagcgcgccggggtgcccgccttcctggagacctccgcgccccgcaacctccccttctacgagcggctcggcttcaccgtcaccgccgacgtcgaggtgcccgaaggaccgcgcacctggtgcatgacccgcaagcccggtgcctga

SEQ ID NO: 20169 - DNA, 2988 bp, synthetic construct
  source 1..2988: mol_type = other DNA
atggccttaccagtgaccgccttgctcctgccgctggccttgctgctccacgccgccaggccggacatccagatgacacagagccctagcagcctgtctgccagcgtgggagacagagtgaccatcacctgtagagccagccagggcatctcttcttggctggcctggtatcagcagaagcctggcaaggcccctaagctgctgatctatgccgccagctctctccagagcggagtgcctagcagattttctggcagcggctccggcaccgatttcaccctgacaatatccagcctccagcctgaggacttcgccacctactactgccagcagtacaacagctaccctctgaccttcggccagggcaccaaggtggaaatcaaaagactcgaggacctgaagaacgtgttcccacctgaggtggccgtgttcgagcctagcgaggccgagatcagccacacccagaaagccaccctcgtgtgcctggctaccggcttctaccccgaccatgtggaactgtcttggtgggtcaacggcaaagaggtgcacagcggcgtgtctaccgacccccagccactgaaagaacagcccgccctgaacgacagccggtactgcctgagcagcagactgagagtgtccgccaccttctggcagaacccccggaaccacttcagatgccaggtgcagttctacggcctgagcgagaacgacgagtggacccaggacagagccaagcccgtgacccagatcgtgtctgccgaagcctggggcagagccgattgcggatcccagagcttcggcctgctggaccccaagctgtgctacctgctggatggcatcctgttcatctacggcgtgatcctgaccgccctgttcctgagagtgaagttcagcagaagcgccgacgcccctgcctaccagcagggacagaaccaactgtacaacgagctgaacctgggcagacgggaagagtacgacgtgctggacaagcggagaggcagggaccctgagatgggcggaaagccccagcggagaaagaacccccaggaaggactgtataacgaactccagaaagacaagatggccgaagcctacagcgagatcggcatgaagggcgagcggagaagaggcaagggccacgatggcctgtaccagggcctgagcaccgccaccaaggacacctatgacgccctgcacatgcaggccctgcctccaagaagggccaagcgatctggatctggagcaacaaacttctcactactcaaacaagcaggtgacgtggaggagaatcccgggcctactagtatggactggatttggcgcatccttttccttgtcggcgctgctaccggcgcgcattccttcgaagaagtgcagctggttgaatcaggtggcggcctggttcaacctggcggatctctgagactgagctgtgccgcctccggcttcacctttagcgatcacggaatgcactgggtccgacaggcccctggaaaaggactggaatgggtcgccgtgatttggtacgacggcagcaacaagtattacgccgacagcgtgaagggcagattcaccatcagccgggacaacagcaagaacaccctgtacctccagatgaactccctgagagccgaggacaccgccgtgtactactgtgccagagacagcatcatggtccgaggcgattattggggccagggaaccctggtcacagtgtctagtacgcgtatccagaaccctgatcctgccgtgtaccagctgcgggatagcaagagcagcgacaagagcgtgtgtctgttcaccgacttcgacagccagaccaacgtgtcccagagcaaggactccgacgtgtacatcaccgataagaccgtgctggacatgcggagcatggacttcaagagcaactccgccgtggcctggtccaacaagtccgatttcgcctgcgccaacgccttcaacaacagcattatccccgaggacacattcttcccaagccccgagagcagctgcggtaccggcgacatcgagaacaccagtctggcccctgaggaccctacctttcctgccgatacctggggcacctacctgctgaccacagagacaggactccagaaagatcacgccctgtgggaccacacagcccagaacctgctgagaatgggcctcgcctttctggtgctggttgccctcgtgtggttcctggtggaagattggctgagccggaagcggacaagagagagagccagcagagcctctacctgggagggaagaagaaggctgaacacccagacacttagggccaagcgatctggatctggagcaacaaacttctcactactcaaacaagcaggtgacgtggaggagaatcccgggccttctagaggccatatgaccgagtacaagcccacggtgcgcctcgccacccgcgacgacgtccccagggccgtacgcaccctcgccgccgcgttcgccgactaccccgccacgcgccacaccgtcgatccggaccgccacatcgagcgggtcaccgagctgcaagaactcttcctcacgcgcgtcgggctcgacatcggcaaggtgtgggtcgcggacgacggcgccgcggtggcggtctggaccacgccggagagcgtcgaagcgggggcggtgttcgccgagatcggcccgcgcatggccgagttgagcggttcccggctggccgcgcagcaacagatggaaggcctcctggcgccgcaccggcccaaggagcccgcgtggttcctggccaccgtcggcgtctcgcccgaccaccagggcaagggtctgggcagcgccgtcgtgctccccggagtggaggcggccgagcgcgccggggtgcccgccttcctggagacctccgcgccccgcaacctccccttctacgagcggctcggcttcaccgtcaccgccgacgtcgaggtgcccgaaggaccgcgcacctggtgcatgacccgcaagcccggtgcctga

SEQ ID NO: 20170 - DNA, 3186 bp, synthetic construct
  source 1..3186: mol_type = other DNA
atggccttaccagtgaccgccttgctcctgccgctggccttgctgctccacgccgccaggccggacatccagatgacacagagccctagcagcctgtctgccagcgtgggagacagagtgaccatcacctgtagagccagccagggcatctcttcttggctggcctggtatcagcagaagcctggcaaggcccctaagctgctgatctatgccgccagctctctccagagcggagtgcctagcagattttctggcagcggctccggcaccgatttcaccctgacaatatccagcctccagcctgaggacttcgccacctactactgccagcagtacaacagctaccctctgaccttcggccagggcaccaaggtggaaatcaaaagactcgaggacctgaagaacgtgttcccacctgaggtggccgtgttcgagcctagcgaggccgagatcagccacacccagaaagccaccctcgtgtgcctggctaccggcttctaccccgaccatgtggaactgtcttggtgggtcaacggcaaagaggtgcacagcggcgtgtctaccgacccccagccactgaaagaacagcccgccctgaacgacagccggtactgcctgagcagcagactgagagtgtccgccaccttctggcagaacccccggaaccacttcagatgccaggtgcagttctacggcctgagcgagaacgacgagtggacccaggacagagccaagcccgtgacccagatcgtgtctgccgaagcctggggcagagccgattgcggatcccagagcttcggcctgctggaccccaagctgtgctacctgctggatggcatcctgttcatctacggcgtgatcctgaccgccctgttcctgagagtgaagttcagcagaagcgccgacgcccctgcctaccagcagggacagaaccaactgtacaacgagctgaacctgggcagacgggaagagtacgacgtgctggacaagcggagaggcagggaccctgagatgggcggaaagccccagcggagaaagaacccccaggaaggactgtataacgaactccagaaagacaagatggccgaagcctacagcgagatcggcatgaagggcgagcggagaagaggcaagggccacgatggcctgtaccagggcctgagcaccgccaccaaggacacctatgacgccctgcacatgcaggccctgcctccaagaagggccaagcgatctggatctggagcaacaaacttctcactactcaaacaagcaggtgacgtggaggagaatcccgggcctactagtatggactggatttggcgcatccttttccttgtcggcgctgctaccggcgcgcattccttcgaagaagtgcagctggttgaatcaggtggcggcctggttcaacctggcggatctctgagactgagctgtgccgcctccggcttcacctttagcgatcacggaatgcactgggtccgacaggcccctggaaaaggactggaatgggtcgccgtgatttggtacgacggcagcaacaagtattacgccgacagcgtgaagggcagattcaccatcagccgggacaacagcaagaacaccctgtacctccagatgaactccctgagagccgaggacaccgccgtgtactactgtgccagagacagcatcatggtccgaggcgattattggggccagggaaccctggtcacagtgtctagtacgcgtatccagaaccctgatcctgccgtgtaccagctgcgggatagcaagagcagcgacaagagcgtgtgtctgttcaccgacttcgacagccagaccaacgtgtcccagagcaaggactccgacgtgtacatcaccgataagaccgtgctggacatgcggagcatggacttcaagagcaactccgccgtggcctggtccaacaagtccgatttcgcctgcgccaacgccttcaacaacagcattatccccgaggacacattcttcccaagccccgagagcagctgcggtaccaagtctgtgcgcttttacctggtcgtcagccctgccagtgcctccactcagacatcttggaccccaagggaccttgtgtcctctcagacacagacacagtcctgcgtgccaccaactgctggcgcaagacaggctccagagtctcccagcacaatccccgtcccttctcagccccagaactccacacttaggccaggaccagctgctccaatcgcactggtcccagtgttctgcggactgctggttgccaagtctctggtgctgagcgcactcctcgtttggtggggcgatatttggtggaaaacgatgatggaattgagatccctcgatacgcagaaagccacatgccaccttcagcaagtcacagacttgccttggaccagcgtcagctctcccgtggaacgggaaattctgtatcatacagtggcccgcaccaagatttccgacgatgacgacgagcacacactgcgcgccaagagaagcggatctggcgtgaagcagaccctgaatttcgacctgctgaagctggctggcgacgtggaatccaacccaggcccttctagaggccatatgaccgagtacaagcccacggtgcgcctcgccacccgcgacgacgtccccagggccgtacgcaccctcgccgccgcgttcgccgactaccccgccacgcgccacaccgtcgatccggaccgccacatcgagcgggtcaccgagctgcaagaactcttcctcacgcgcgtcgggctcgacatcggcaaggtgtgggtcgcggacgacggcgccgcggtggcggtctggaccacgccggagagcgtcgaagcgggggcggtgttcgccgagatcggcccgcgcatggccgagttgagcggttcccggctggccgcgcagcaacagatggaaggcctcctggcgccgcaccggcccaaggagcccgcgtggttcctggccaccgtcggcgtctcgcccgaccaccagggcaagggtctgggcagcgccgtcgtgctccccggagtggaggcggccgagcgcgccggggtgcccgccttcctggagacctccgcgccccgcaacctccccttctacgagcggctcggcttcaccgtcaccgccgacgtcgaggtgcccgaaggaccgcgcacctggtgcatgacccgcaagcccggtgcctga

SEQ ID NO: 20171 - DNA, 2946 bp, synthetic construct
  source 1..2946: mol_type = other DNA
atggccttaccagtgaccgccttgctcctgccgctggccttgctgctccacgccgccaggccggacatccagatgacacagagccctagcagcctgtctgccagcgtgggagacagagtgaccatcacctgtagagccagccagggcatctcttcttggctggcctggtatcagcagaagcctggcaaggcccctaagctgctgatctatgccgccagctctctccagagcggagtgcctagcagattttctggcagcggctccggcaccgatttcaccctgacaatatccagcctccagcctgaggacttcgccacctactactgccagcagtacaacagctaccctctgaccttcggccagggcaccaaggtggaaatcaaaagactcgaggacctgaagaacgtgttcccacctgaggtggccgtgttcgagcctagcgaggccgagatcagccacacccagaaagccaccctcgtgtgcctggctaccggcttctaccccgaccatgtggaactgtcttggtgggtcaacggcaaagaggtgcacagcggcgtgtctaccgacccccagccactgaaagaacagcccgccctgaacgacagccggtactgcctgagcagcagactgagagtgtccgccaccttctggcagaacccccggaaccacttcagatgccaggtgcagttctacggcctgagcgagaacgacgagtggacccaggacagagccaagcccgtgacccagatcgtgtctgccgaagcctggggcagagccgattgcggatcccagagcttcggcctgctggaccccaagctgtgctacctgctggatggcatcctgttcatctacggcgtgatcctgaccgccctgttcctgagagtgaagttcagcagaagcgccgacgcccctgcctaccagcagggacagaaccaactgtacaacgagctgaacctgggcagacgggaagagtacgacgtgctggacaagcggagaggcagggaccctgagatgggcggaaagccccagcggagaaagaacccccaggaaggactgtataacgaactccagaaagacaagatggccgaagcctacagcgagatcggcatgaagggcgagcggagaagaggcaagggccacgatggcctgtaccagggcctgagcaccgccaccaaggacacctatgacgccctgcacatgcaggccctgcctccaagaagggccaagcgatctggatctggagcaacaaacttctcactactcaaacaagcaggtgacgtggaggagaatcccgggcctactagtatggactggatttggcgcatccttttccttgtcggcgctgctaccggcgcgcattccttcgaagaagtgcagctggttgaatcaggtggcggcctggttcaacctggcggatctctgagactgagctgtgccgcctccggcttcacctttagcgatcacggaatgcactgggtccgacaggcccctggaaaaggactggaatgggtcgccgtgatttggtacgacggcagcaacaagtattacgccgacagcgtgaagggcagattcaccatcagccgggacaacagcaagaacaccctgtacctccagatgaactccctgagagccgaggacaccgccgtgtactactgtgccagagacagcatcatggtccgaggcgattattggggccagggaaccctggtcacagtgtctagtacgcgtatccagaaccctgatcctgccgtgtaccagctgcgggatagcaagagcagcgacaagagcgtgtgtctgttcaccgacttcgacagccagaccaacgtgtcccagagcaaggactccgacgtgtacatcaccgataagaccgtgctggacatgcggagcatggacttcaagagcaactccgccgtggcctggtccaacaagtccgatttcgcctgcgccaacgccttcaacaacagcattatccccgaggacacattcttcccaagccccgagagcagctgcggtaccgtggtcgagaaagaacatccacagcttggcgctggcaccgtcctgttgcttagagccggattctatgccgtcagcttcctgtccgtggctgtggggtctacagtgtattaccagggaaaatgtctcacctggaaaggccccagacgccagcttccagctgttgttcctgctccactgccaccaccttgtggctcctctgctcacttgcttccaccagtgcctggcggacgcgccaagagaagcggatctggcgtgaagcagaccctgaatttcgacctgctgaagctggctggcgacgtggaatccaacccaggcccttctagaggccatatgaccgagtacaagcccacggtgcgcctcgccacccgcgacgacgtccccagggccgtacgcaccctcgccgccgcgttcgccgactaccccgccacgcgccacaccgtcgatccggaccgccacatcgagcgggtcaccgagctgcaagaactcttcctcacgcgcgtcgggctcgacatcggcaaggtgtgggtcgcggacgacggcgccgcggtggcggtctggaccacgccggagagcgtcgaagcgggggcggtgttcgccgagatcggcccgcgcatggccgagttgagcggttcccggctggccgcgcagcaacagatggaaggcctcctggcgccgcaccggcccaaggagcccgcgtggttcctggccaccgtcggcgtctcgcccgaccaccagggcaagggtctgggcagcgccgtcgtgctccccggagtggaggcggccgagcgcgccggggtgcccgccttcctggagacctccgcgccccgcaacctccccttctacgagcggctcggcttcaccgtcaccgccgacgtcgaggtgcccgaaggaccgcgcacctggtgcatgacccgcaagcccggtgcctga

SEQ ID NO: 20172 - DNA, 2859 bp, synthetic construct
  source 1..2859: mol_type = other DNA
atggccttaccagtgaccgccttgctcctgccgctggccttgctgctccacgccgccaggccggacatccagatgacacagagccctagcagcctgtctgccagcgtgggagacagagtgaccatcacctgtagagccagccagggcatctcttcttggctggcctggtatcagcagaagcctggcaaggcccctaagctgctgatctatgccgccagctctctccagagcggagtgcctagcagattttctggcagcggctccggcaccgatttcaccctgacaatatccagcctccagcctgaggacttcgccacctactactgccagcagtacaacagctaccctctgaccttcggccagggcaccaaggtggaaatcaaaagactcgagggacagcctaaggccaatcctaccgtgacactgttccctccaagcagcgaagaactccaggccaacaaggccacacttgtgtgcctgatctccgacttctaccctggggctgtgacagtggcttggaaggccgatggatctcctgtgaaagccggcgtggaaaccaccaagccatccaagcagagcaacaacaaatacgccgccagctcctacctgagcctgacacctgagcagtggaagtcccacagatcctacagctgccaagtgacccacgaaggcagcaccgtggaaaagacagtggcccctacagagtgcagcggatcccagagcttcggcctgctggaccccaagctgtgctacctgctggatggcatcctgttcatctacggcgtgatcctgaccgccctgttcctgagagtgaagttcagcagaagcgccgacgcccctgcctaccagcagggacagaaccaactgtacaacgagctgaacctgggcagacgggaagagtacgacgtgctggacaagcggagaggcagggaccctgagatgggcggaaagccccagcggagaaagaacccccaggaaggactgtataacgaactccagaaagacaagatggccgaagcctacagcgagatcggcatgaagggcgagcggagaagaggcaagggccacgatggcctgtaccagggcctgagcaccgccaccaaggacacctatgacgccctgcacatgcaggccctgcctccaagaagggccaagcgatctggatctggagcaacaaacttctcactactcaaacaagcaggtgacgtggaggagaatcccgggcctactagtatggactggatttggcgcatccttttccttgtcggcgctgctaccggcgcgcattccttcgaagaagtgcagctggttgaatcaggtggcggcctggttcaacctggcggatctctgagactgagctgtgccgcctccggcttcacctttagcgatcacggaatgcactgggtccgacaggcccctggaaaaggactggaatgggtcgccgtgatttggtacgacggcagcaacaagtattacgccgacagcgtgaagggcagattcaccatcagccgggacaacagcaagaacaccctgtacctccagatgaactccctgagagccgaggacaccgccgtgtactactgtgccagagacagcatcatggtccgaggcgattattggggccagggaaccctggtcacagtgtctagtacgcgtgcctctacaaagggaccctccgtgtttcctctggctcccagcagcaagtctacaagcggaggaacagccgctctgggctgcctggtcaaggattactttcccgagcctgtgaccgtgtcctggaatagcggagcactgacaagcggcgtgcacacctttccagccgtgctgcaaagcagcggcctgtactctctgagcagcgtggtcacagtgcctagctctagcctgggcacccagacctacatctgcaatgtgaaccacaagcctagcaacaccaaggtggacaagagagtggaacccaagagctgtggtaccatcactcaaggtttggcagtgtcaaccatctcatcattctttccacctggctaccaagtgtccttctgcctggtcatggtgctgctgttcgccgtggataccggcctgtacttcagcgtcaagaccaacatccggtccagcaccagagactggaaggaccacaagttcaagtggcggaaggaccctcaggacaagagggccaagcgatctggatctggagcaacaaacttctcactactcaaacaagcaggtgacgtggaggagaatcccgggccttctagaggccatatgaccgagtacaagcccacggtgcgcctcgccacccgcgacgacgtccccagggccgtacgcaccctcgccgccgcgttcgccgactaccccgccacgcgccacaccgtcgatccggaccgccacatcgagcgggtcaccgagctgcaagaactcttcctcacgcgcgtcgggctcgacatcggcaaggtgtgggtcgcggacgacggcgccgcggtggcggtctggaccacgccggagagcgtcgaagcgggggcggtgttcgccgagatcggcccgcgcatggccgagttgagcggttcccggctggccgcgcagcaacagatggaaggcctcctggcgccgcaccggcccaaggagcccgcgtggttcctggccaccgtcggcgtctcgcccgaccaccagggcaagggtctgggcagcgccgtcgtgctccccggagtggaggcggccgagcgcgccggggtgcccgccttcctggagacctccgcgccccgcaacctccccttctacgagcggctcggcttcaccgtcaccgccgacgtcgaggtgcccgaaggaccgcgcacctggtgcatgacccgcaagcccggtgcctga

SEQ ID NO: 20173 - DNA, 2904 bp, synthetic construct
  source 1..2904: mol_type = other DNA
atggccttaccagtgaccgccttgctcctgccgctggccttgctgctccacgccgccaggccggacatccagatgacacagagccctagcagcctgtctgccagcgtgggagacagagtgaccatcacctgtagagccagccagggcatctcttcttggctggcctggtatcagcagaagcctggcaaggcccctaagctgctgatctatgccgccagctctctccagagcggagtgcctagcagattttctggcagcggctccggcaccgatttcaccctgacaatatccagcctccagcctgaggacttcgccacctactactgccagcagtacaacagctaccctctgaccttcggccagggcaccaaggtggaaatcaaaagactcgaggacctgaagaacgtgttcccacctgaggtggccgtgttcgagcctagcgaggccgagatcagccacacccagaaagccaccctcgtgtgcctggctaccggcttctaccccgaccatgtggaactgtcttggtgggtcaacggcaaagaggtgcacagcggcgtgtctaccgacccccagccactgaaagaacagcccgccctgaacgacagccggtactgcctgagcagcagactgagagtgtccgccaccttctggcagaacccccggaaccacttcagatgccaggtgcagttctacggcctgagcgagaacgacgagtggacccaggacagagccaagcccgtgacccagatcgtgtctgccgaagcctggggcagagccgattgcggatcccagagcttcggcctgctggaccccaagctgtgctacctgctggatggcatcctgttcatctacggcgtgatcctgaccgccctgttcctgagagtgaagttcagcagaagcgccgacgcccctgcctaccagcagggacagaaccaactgtacaacgagctgaacctgggcagacgggaagagtacgacgtgctggacaagcggagaggcagggaccctgagatgggcggaaagccccagcggagaaagaacccccaggaaggactgtataacgaactccagaaagacaagatggccgaagcctacagcgagatcggcatgaagggcgagcggagaagaggcaagggccacgatggcctgtaccagggcctgagcaccgccaccaaggacacctatgacgccctgcacatgcaggccctgcctccaagaagggccaagcgatctggatctggagcaacaaacttctcactactcaaacaagcaggtgacgtggaggagaatcccgggcctactagtatggactggatttggcgcatccttttccttgtcggcgctgctaccggcgcgcattccttcgaagaagtgcagctggttgaatcaggtggcggcctggttcaacctggcggatctctgagactgagctgtgccgcctccggcttcacctttagcgatcacggaatgcactgggtccgacaggcccctggaaaaggactggaatgggtcgccgtgatttggtacgacggcagcaacaagtattacgccgacagcgtgaagggcagattcaccatcagccgggacaacagcaagaacaccctgtacctccagatgaactccctgagagccgaggacaccgccgtgtactactgtgccagagacagcatcatggtccgaggcgattattggggccagggaaccctggtcacagtgtctagtacgcgtatccagaaccctgatcctgccgtgtaccagctgcgggatagcaagagcagcgacaagagcgtgtgtctgttcaccgacttcgacagccagaccaacgtgtcccagagcaaggactccgacgtgtacatcaccgataagaccgtgctggacatgcggagcatggacttcaagagcaactccgccgtggcctggtccaacaagtccgatttcgcctgcgccaacgccttcaacaacagcattatccccgaggacacattcttcccaagccccgagagcagctgcggtaccatcactcaaggtttggcagtgtcaaccatctcatcattctttccacctggctaccaagtgtccttctgcctggtcatggtgctgctgttcgccgtggataccggcctgtacttcagcgtcaagaccaacatccggtccagcaccagagactggaaggaccacaagttcaagtggcggaaggaccctcaggacaagagggccaagcgatctggatctggagcaacaaacttctcactactcaaacaagcaggtgacgtggaggagaatcccgggccttctagaggccatatgaccgagtacaagcccacggtgcgcctcgccacccgcgacgacgtccccagggccgtacgcaccctcgccgccgcgttcgccgactaccccgccacgcgccacaccgtcgatccggaccgccacatcgagcgggtcaccgagctgcaagaactcttcctcacgcgcgtcgggctcgacatcggcaaggtgtgggtcgcggacgacggcgccgcggtggcggtctggaccacgccggagagcgtcgaagcgggggcggtgttcgccgagatcggcccgcgcatggccgagttgagcggttcccggctggccgcgcagcaacagatggaaggcctcctggcgccgcaccggcccaaggagcccgcgtggttcctggccaccgtcggcgtctcgcccgaccaccagggcaagggtctgggcagcgccgtcgtgctccccggagtggaggcggccgagcgcgccggggtgcccgccttcctggagacctccgcgccccgcaacctccccttctacgagcggctcggcttcaccgtcaccgccgacgtcgaggtgcccgaaggaccgcgcacctggtgcatgacccgcaagcccggtgcctga

SEQ ID NO: 20174 - DNA, 1953 bp, synthetic construct
  source 1..1953: mol_type = other DNA
atggccttaccagtgaccgccttgctcctgccgctggccttgctgctccacgccgccaggccggacatccagatgacacagagccctagcagcctgtctgccagcgtgggagacagagtgaccatcacctgtagagccagccagggcatctcttcttggctggcctggtatcagcagaagcctggcaaggcccctaagctgctgatctatgccgccagctctctccagagcggagtgcctagcagattttctggcagcggctccggcaccgatttcaccctgacaatatccagcctccagcctgaggacttcgccacctactactgccagcagtacaacagctaccctctgaccttcggccagggcaccaaggtggaaatcaaaagactcgagggacagcctaaggccaatcctaccgtgacactgttccctccaagcagcgaagaactccaggccaacaaggccacacttgtgtgcctgatctccgacttctaccctggggctgtgacagtggcttggaaggccgatggatctcctgtgaaagccggcgtggaaaccaccaagccatccaagcagagcaacaacaaatacgccgccagctcctacctgagcctgacacctgagcagtggaagtcccacagatcctacagctgccaagtgacccacgaaggcagcaccgtggaaaagacagtggcccctacagagtgcagcggatccctgggagagcctcagctgtgctatatcctggacgccatcctgtttctgtacggcatcgtgctgaccctgctgtactgccggctgaagatccaagtgcggaaggccgccatcaccagctacgagaaatccgacggcgtgtacaccggcctgagcaccagaaatcaagagacatacgagacactgaagcacgaaaagcctccacaaagggccaagcgatctggatctggagcaacaaacttctcactactcaaacaagcaggtgacgtggaggagaatcccgggcctactagtatggactggatttggcgcatccttttccttgtcggcgctgctaccggcgcgcattccttcgaagaagtgcagctggttgaatcaggtggcggcctggttcaacctggcggatctctgagactgagctgtgccgcctccggcttcacctttagcgatcacggaatgcactgggtccgacaggcccctggaaaaggactggaatgggtcgccgtgatttggtacgacggcagcaacaagtattacgccgacagcgtgaagggcagattcaccatcagccgggacaacagcaagaacaccctgtacctccagatgaactccctgagagccgaggacaccgccgtgtactactgtgccagagacagcatcatggtccgaggcgattattggggccagggaaccctggtcacagtgtctagtacgcgtgcctctacaaagggaccctccgtgtttcctctggctcccagcagcaagtctacaagcggaggaacagccgctctgggctgcctggtcaaggattactttcccgagcctgtgaccgtgtcctggaatagcggagcactgacaagcggcgtgcacacctttccagccgtgctgcaaagcagcggcctgtactctctgagcagcgtggtcacagtgcctagctctagcctgggcacccagacctacatctgcaatgtgaaccacaagcctagcaacaccaaggtggacaagagagtggaacccaagagctgtggtaccctcggagaaccacagctctgttacattctggatgctatcctgttcctctatgggatcgtcctgacactcctgtattgcagactcaaaattcaagttcgcaaagccgccattacctcttacgagaagagtgatggggtgtacacaggactgtctacccggaatcaagaaacctacgaaaccctcaaacatgagaagccacctcagtaa

SEQ ID NO: 20175 - DNA, 3084 bp, synthetic construct
  source 1..3084: mol_type = other DNA
atggccttaccagtgaccgccttgctcctgccgctggccttgctgctccacgccgccaggccggacatccagatgacacagagccctagcagcctgtctgccagcgtgggagacagagtgaccatcacctgtagagccagccagggcatctcttcttggctggcctggtatcagcagaagcctggcaaggcccctaagctgctgatctatgccgccagctctctccagagcggagtgcctagcagattttctggcagcggctccggcaccgatttcaccctgacaatatccagcctccagcctgaggacttcgccacctactactgccagcagtacaacagctaccctctgaccttcggccagggcaccaaggtggaaatcaaaagaggacagcctaaggccaatcctaccgtgacactgttccctccaagcagcgaagaactccaggccaacaaggccacacttgtgtgcctgatctccgacttctaccctggggctgtgacagtggcttggaaggccgatggatctcctgtgaaagccggcgtggaaaccaccaagccatccaagcagagcaacaacaaatacgccgccagctcctacctgagcctgacacctgagcagtggaagtcccacagatcctacagctgccaagtgacccacgaaggcagcaccgtggaaaagacagtggcccctacagagtgcagcggatcccagagcttcggcctgctggaccccaagctgtgctacctgctggatggcatcctgttcatctacggcgtgatcctgaccgccctgttcctgagagtgaagttcagcagaagcgccgacgcccctgcctaccagcagggacagaaccaactgtacaacgagctgaacctgggcagacgggaagagtacgacgtgctggacaagcggagaggcagggaccctgagatgggcggaaagccccggagaaagaacccccaggaaggactgtataacgaactccagaaagacaagatggccgaagcctacagcgagatcggcatgaagggcgagcggagaagaggcaagggccacgatggcctgtaccagggcctgagcaccgccaccaaggacacctatgacgccctgcacatgcaggccctgcctccaagaagggccaagcgatctggatctggagcaacaaacttctcactactcaaacaagcaggtgacgtggaggagaatcccgggcctactagtatggactggatttggcgcatccttttccttgtcggcgctgctaccggcgcgcattccttcgaagaagtgcagctggttgaatcaggtggcggcctggttcaacctggcggatctctgagactgagctgtgccgcctccggcttcacctttagcgatcacggaatgcactgggtccgacaggcccctggaaaaggactggaatgggtcgccgtgatttggtacgacggcagcaacaagtattacgccgacagcgtgaagggcagattcaccatcagccgggacaacagcaagaacaccctgtacctccagatgaactccctgagagccgaggacaccgccgtgtactactgtgccagagacagcatcatggtccgaggcgattattggggccagggaaccctggtcacagtgtctagtgcctctacaaagggaccctccgtgtttcctctggctcccagcagcaagtctacaagcggaggaacagccgctctgggctgcctggtcaaggattactttcccgagcctgtgaccgtgtcctggaatagcggagcactgacaagcggcgtgcacacctttccagccgtgctgcaaagcagcggcctgtactctctgagcagcgtggtcacagtgcctagctctagcctgggcacccagacctacatctgcaatgtgaaccacaagcctagcaacaccaaggtggacaagagagtggaacccaagagctgtggtacccagagttttgggttgttggaccctaaattgtgctatctgttggacggaatcctgttcatttacggagtgatcctgaccgcattgttcctgcgggttaagttttccagatccgcagacgcacccgcttaccaacaagggcagaaccaactctacaatgaacttaatttggggcggagggaagagtacgacgttctggacaaaaggaggggacgagatcccgagatgggcggaaagcctcgaaggaagaatccgcaagaggggctttataacgaactccagaaagataaaatggcagaagcctatagtgagattgggatgaagggagaaaggaggaggggtaaaggtcacgatgggttgtaccaaggattgagcacagccactaaagatacctatgatgcgctccacatgcaggccctgccgccaagacgcgccaagagaagcggatctggcgtgaagcagaccctgaatttcgacctgctgaagctggctggcgacgtggaatccaacccaggcccttctagaggccatatgaccgagtacaagcccacggtgcgcctcgccacccgcgacgacgtccccagggccgtacgcaccctcgccgccgcgttcgccgactaccccgccacgcgccacaccgtcgatccggaccgccacatcgagcgggtcaccgagctgcaagaactcttcctcacgcgcgtcgggctcgacatcggcaaggtgtgggtcgcggacgacggcgccgcggtggcggtctggaccacgccggagagcgtcgaagcgggggcggtgttcgccgagatcggcccgcgcatggccgagttgagcggttcccggctggccgcgcagcaacagatggaaggcctcctggcgccgcaccggcccaaggagcccgcgtggttcctggccaccgtcggcgtctcgcccgaccaccagggcaagggtctgggcagcgccgtcgtgctccccggagtggaggcggccgagcgcgccggggtgcccgccttcctggagacctccgcgccccgcaacctccccttctacgagcggctcggcttcaccgtcaccgccgacgtcgaggtgcccgaaggaccgcgcacctggtgcatgacccgcaagcccggtgcctga

SEQ ID NO: 20176 - DNA, 2439 bp, synthetic construct
  source 1..2439: mol_type = other DNA
atggccttaccagtgaccgccttgctcctgccgctggccttgctgctccacgccgccaggccggacatccagatgacacagagccctagcagcctgtctgccagcgtgggagacagagtgaccatcacctgtagagccagccagggcatctcttcttggctggcctggtatcagcagaagcctggcaaggcccctaagctgctgatctatgccgccagctctctccagagcggagtgcctagcagattttctggcagcggctccggcaccgatttcaccctgacaatatccagcctccagcctgaggacttcgccacctactactgccagcagtacaacagctaccctctgaccttcggccagggcaccaaggtggaaatcaaaagactcgaggacctgaagaacgtgttcccacctgaggtggccgtgttcgagcctagcgaggccgagatcagccacacccagaaagccaccctcgtgtgcctggctaccggcttctaccccgaccatgtggaactgtcttggtgggtcaacggcaaagaggtgcacagcggcgtgtctaccgacccccagccactgaaagaacagcccgccctgaacgacagccggtactgcctgagcagcagactgagagtgtccgccaccttctggcagaacccccggaaccacttcagatgccaggtgcagttctacggcctgagcgagaacgacgagtggacccaggacagagccaagcccgtgacccagatcgtgtctgccgaagcctggggcagagccgattgcggatcccagagcttcggcctgctggaccccaagctgtgctacctgctggatggcatcctgttcatctacggcgtgatcctgaccgccctgttcctgagagtgaagttcagcagaagcgccgacgcccctgcctaccagcagggacagaaccaactgtacaacgagctgaacctgggcagacgggaagagtacgacgtgctggacaagcggagaggcagggaccctgagatgggcggaaagccccggagaaagaacccccaggaaggactgtataacgaactccagaaagacaagatggccgaagcctacagcgagatcggcatgaagggcgagcggagaagaggcaagggccacgatggcctgtaccagggcctgagcaccgccaccaaggacacctatgacgccctgcacatgcaggccctgcctccaagaagggccaagcgatctggatctggagcaacaaacttctcactactcaaacaagcaggtgacgtggaggagaatcccgggcctactagtatggactggatttggcgcatccttttccttgtcggcgctgctaccggcgcgcattccttcgaagaagtgcagctggttgaatcaggtggcggcctggttcaacctggcggatctctgagactgagctgtgccgcctccggcttcacctttagcgatcacggaatgcactgggtccgacaggcccctggaaaaggactggaatgggtcgccgtgatttggtacgacggcagcaacaagtattacgccgacagcgtgaagggcagattcaccatcagccgggacaacagcaagaacaccctgtacctccagatgaactccctgagagccgaggacaccgccgtgtactactgtgccagagacagcatcatggtccgaggcgattattggggccagggaaccctggtcacagtgtctagtacgcgtatccagaaccctgatcctgccgtgtaccagctgcgggatagcaagagcagcgacaagagcgtgtgtctgttcaccgacttcgacagccagaccaacgtgtcccagagcaaggactccgacgtgtacatcaccgataagaccgtgctggacatgcggagcatggacttcaagagcaactccgccgtggcctggtccaacaagtccgatttcgcctgcgccaacgccttcaacaacagcattatccccgaggacacattcttcccaagccccgagagcagctgcggtacccagagttttgggttgttggaccctaaattgtgctatctgttggacggaatcctgttcatttacggagtgatcctgaccgcattgttcctgcgggttaagttttccagatccgcagacgcacccgcttaccaacaagggcagaaccaactctacaatgaacttaatttggggcggagggaagagtacgacgttctggacaaaaggaggggacgagatcccgagatgggcggaaagcctcgaaggaagaatccgcaagaggggctttataacgaactccagaaagataaaatggcagaagcctatagtgagattgggatgaagggagaaaggaggaggggtaaaggtcacgatgggttgtaccaaggattgagcacagccactaaagatacctatgatgcgctccacatgcaggccctgccgccaaga

SEQ ID NO: 20177 - DNA, 1512 bp, synthetic construct
  source 1..1512: mol_type = other DNA
atggccttaccagtgaccgccttgctcctgccgctggccttgctgctccacgccgccaggccggaactgcaaagcgtgctgacacagcctcctagcgcctctggaacacctggacagagagtgacaatcagctgctccggcagctccagcaacatcggcagcaactacgtgaactggtatcagcagctgcctggcacagcccctaaactgctgatctacggcgactaccagaggccaagcggcgtgccagatagattcagcggcagcaagtctggcacaagcgccagcctggctatctctggactgagaagcgaggacgaggccgactactactgtgccaccagagatgatagcctgagcggcagcgtggtgtttggcacaggcacaaagctgacagtgctgggcggcggaggcggaagtggaggcggaggatctggcggcggaggctctgaagttcagctggttcagagcggagccgaagtgaagaagcctggcgagagcctgaagattagctgcaaaggcagcggctacggcttcaccagctattggatcggctgggtccgacagatgcctggcaaaggactggaatggatgggcatcattcaccccgacgacagcgacaccaagtacagccctagcttccagggccaagtgaccatcagcgccgacaagagcatcagcacagcctacctccagtggtcctctctgaaggccagcgataccgccatgtactactgcgccagcagctacctgagaggactgtggggcggctacttcgatttttggggccagggcacactggtcaccgttagttctacgcgtgagcagaaactgatctcggaagaggatctgaaaattgaagttatgtatcctcctccttacctagacaatgagaagagcaatggaaccattatccatgtgaaagggaaacacctttgtccaagtcccctatttcccggaccttctaagcccttttgggtgctggtggtggttgggggagtcctggcttgctatagcttgctagtaacagtggcctttattattttctgggtgaggagtaagaggagcaggctcctgcacagtgactacatgaacatgactccacgccgccccggacccacccgcaagcattaccagccctatgccccaccacgcgacttcgcagcctatcgctccagagtgaagttcagcaggagcgcagacgcccccgcgtaccagcagggccagaaccagctctataacgagctcaatctaggacgaagagaggagtacgatgttttggacaagagacgtggccgggaccctgagatggggggaaagccgagaaggaagaaccctcaggaaggcctgtacaatgaactgcagaaagataagatggcggaggcctacagtgagattgggatgaaaggcgagcgccggaggggcaaggggcacgatggcctttaccagggtctcagtacagccaccaaggacacctacgacgcccttcacatgcaggccctgccccctcgc

SEQ ID NO: 20178 - DNA, 1533 bp, synthetic construct
  source 1..1533: mol_type = other DNA
atggccttaccagtgaccgccttgctcctgccgctggccttgctgctccacgccgccaggccggaactgcaaagcgtgctgacacagcctcctagcgcctctggaacacctggacagagagtgacaatcagctgctccggcagctccagcaacatcggcagcaactacgtgaactggtatcagcagctgcctggcacagcccctaaactgctgatctacggcgactaccagaggccaagcggcgtgccagatagattcagcggcagcaagtctggcacaagcgccagcctggctatctctggactgagaagcgaggacgaggccgactactactgtgccaccagagatgatagcctgagcggcagcgtggtgtttggcacaggcacaaagctgacagtgctgggcggcggaggcggaagtggaggcggaggatctggcggcggaggctctgaagttcagctggttcagagcggagccgaagtgaagaagcctggcgagagcctgaagattagctgcaaaggcagcggctacggcttcaccagctattggatcggctgggtccgacagatgcctggcaaaggactggaatggatgggcatcattcaccccgacgacagcgacaccaagtacagccctagcttccagggccaagtgaccatcagcgccgacaagagcatcagcacagcctacctccagtggtcctctctgaaggccagcgataccgccatgtactactgcgccagcagctacctgagaggactgtggggcggctacttcgatttttggggccagggcacactggtcaccgttagttctacgcgtgagcagaaactgatctcggaagaggatctggcgaagcccaccacgacgccagcgccgcgaccaccaacaccggcgcccaccatcgcgtcgcagcccctgtccctgcgcccagaggcgtgccggccagcggcggggggcgcagtgcacacgagggggctggacttcgcctgtgacatctacatctgggcgcccttggccgggacttgtggggtccttctcctgtcactggttatcaccctttactgcaaacggggcagaaagaaactcctgtatatattcaaacaaccatttatgagaccagtacaaactactcaagaggaagatggctgtagctgccgatttccagaagaagaagaaggaggatgtgaactgagagtgaagttcagcaggagcgcagacgcccccgcgtaccagcagggccagaaccagctctataacgagctgaatctaggacgaagagaggagtacgatgttttggacaagagacgtggccgggaccctgagatggggggaaagccgagaaggaagaaccctcaggaaggcctgtacaatgaactgcagaaagataagatggcggaggcctacagtgagattgggatgaaaggcgagcgccggaggggcaaggggcacgatggcctttaccagggtctcagtacagccaccaaggacacctacgacgcccttcacatgcaggccctgccccctcgctga

SEQ ID NO: 20179 - DNA, 1533 bp, synthetic construct
  source 1..1533: mol_type = other DNA
atggccttaccagtgaccgccttgctcctgccgctggccttgctgctccacgccgccaggccggaagttcagctggttcagagcggagccgaagtgaagaagcctggcgagagcctgaagattagctgcaaaggcagcggctacggcttcaccagctattggatcggctgggtccgacagatgcctggcaaaggactggaatggatgggcatcattcaccccgacgacagcgacaccaagtacagccctagcttccagggccaagtgaccatcagcgccgacaagagcatcagcacagcctacctccagtggtcctctctgaaggccagcgataccgccatgtactactgcgccagcagctacctgagaggactgtggggcggctacttcgatttttggggccagggcacactggtcaccgttagttctggcggaggcggaagtggaggcggaggatctggcggcggaggctctgaactgcaaagcgtgctgacacagcctcctagcgcctctggaacacctggacagagagtgacaatcagctgctccggcagctccagcaacatcggcagcaactacgtgaactggtatcagcagctgcctggcacagcccctaaactgctgatctacggcgactaccagaggccaagcggcgtgccagatagattcagcggcagcaagtctggcacaagcgccagcctggctatctctggactgagaagcgaggacgaggccgactactactgtgccaccagagatgatagcctgagcggcagcgtggtgtttggcacaggcacaaagctgacagtgctgggcacgcgtgagcagaaactgatctcggaagaggatctggcgaagcccaccacgacgccagcgccgcgaccaccaacaccggcgcccaccatcgcgtcgcagcccctgtccctgcgcccagaggcgtgccggccagcggcggggggcgcagtgcacacgagggggctggacttcgcctgtgacatctacatctgggcgcccttggccgggacttgtggggtccttctcctgtcactggttatcaccctttactgcaaacggggcagaaagaaactcctgtatatattcaaacaaccatttatgagaccagtacaaactactcaagaggaagatggctgtagctgccgatttccagaagaagaagaaggaggatgtgaactgagagtgaagttcagcaggagcgcagacgcccccgcgtaccagcagggccagaaccagctctataacgagctgaatctaggacgaagagaggagtacgatgttttggacaagagacgtggccgggaccctgagatggggggaaagccgagaaggaagaaccctcaggaaggcctgtacaatgaactgcagaaagataagatggcggaggcctacagtgagattgggatgaaaggcgagcgccggaggggcaaggggcacgatggcctttaccagggtctcagtacagccaccaaggacacctacgacgcccttcacatgcaggccctgccccctcgctga

SEQ ID NO: 20180 - DNA, 2772 bp, synthetic construct
  source 1..2772: mol_type = other DNA
atggccttaccagtgaccgccttgctcctgccgctggccttgctgctccacgccgccaggccggaactgcaaagcgtgctgacacagcctcctagcgcctctggaacacctggacagagagtgacaatcagctgctccggcagctccagcaacatcggcagcaactacgtgaactggtatcagcagctgcctggcacagcccctaaactgctgatctacggcgactaccagaggccaagcggcgtgccagatagattcagcggcagcaagtctggcacaagcgccagcctggctatctctggactgagaagcgaggacgaggccgactactactgtgccaccagagatgatagcctgagcggcagcgtggtgtttggcacaggcacaaagctgacagtgctgggcggcggaggcggaagtggaggcggaggatctggcggcggaggctctgaagttcagctggttcagagcggagccgaagtgaagaagcctggcgagagcctgaagattagctgcaaaggcagcggctacggcttcaccagctattggatcggctgggtccgacagatgcctggcaaaggactggaatggatgggcatcattcaccccgacgacagcgacaccaagtacagccctagcttccagggccaagtgaccatcagcgccgacaagagcatcagcacagcctacctccagtggtcctctctgaaggccagcgataccgccatgtactactgcgccagcagctacctgagaggactgtggggcggctacttcgatttttggggccagggcacactggtcaccgttagttctacgcgtgagcagaaactgatctcggaagaggatctggcgaagcccaccacgacgccagcgccgcgaccaccaacaccggcgcccaccatcgcgtcgcagcccctgtccctgcgcccagaggcgtgccggccagcggcggggggcgcagtgcacacgagggggctggacttcgcctgtgacatctacatctgggcgcccttggccgggacttgtggggtccttctcctgtcactggttatcaccctttactgcgggcgcgccagagtgaagttcagcaggagcgcagacgcccccgcgtaccagcagggccagaaccagctctataacgagctgaatctaggacgaagagaggagtacgatgttttggacaagagacgtggccgggaccctgagatggggggaaagccgagaaggaagaaccctcaggaaggcctgtacaatgaactgcagaaagataagatggcggaggcctacagtgagattgggatgaaaggcgagcgccggaggggcaaggggcacgatggcctttaccagggtctcagtacagccaccaaggacacctacgacgcccttcacatgcaggccctgccccctcgctctagaggatctggagcaacaaacttctcactactcaaacaagcaggtgacgtggaggagaatcccgggcctgggatccacatggccacttacgaggttctctgtgaggtggcgcggaaactgggcacggatgacagggaagtggtattgttcctcctaaacgtgttcatacctcaacccacactggcccaattaattggagctcttagagctttaaaggaggagggcaggttaacgtttcccctgttagcggaatgtctgtttcgtgcaggtcgcagagacctcttgcgcgacctgcttcacttagacccgcgttttttagagcgccacctagcgggcacaatgagttatttcagcccttatcagctcactgttctccacgtagacggggagctgtgtgcgagggatattaggtctttgatatttttaagcaaggacactatagggtctcgcagcacaccacagacattcttacactgggtgtactgtatggaaaacttagacctactgggtcccactgacgtggatgccctaatgtcaatgcttagatctttgtcaagagtagacctacagcgccaagtgcaaaccctaatgggccttcacctttccggcccatcacactcccaacactatcgccatacaccactcgagaccgatttctacgactacaaggacgacgatgacaagactagtggctccggcgagggcagaggaagtctactaacctgcggagatgtggaagaaaatcctggcccacatatgaccgagtacaagcccacggtgcgcctcgccacccgcgacgacgtccccagggccgtacgcaccctcgccgccgcgttcgccgactaccccgccacgcgccacaccgtcgatccggaccgccacatcgagcgggtcaccgagctgcaagaactcttcctcacgcgcgtcgggctcgacatcggcaaggtgtgggtcgcggacgacggcgccgcggtggcggtctggaccacgccggagagcgtcgaagcgggggcggtgttcgccgagatcggcccgcgcatggccgagttgagcggttcccggctggccgcgcagcaacagatggaaggcctcctggcgccgcaccggcccaaggagcccgcgtggttcctggccaccgtcggcgtctcgcccgaccaccagggcaagggtctgggcagcgccgtcgtgctccccggagtggaggcggccgagcgcgccggggtgcccgccttcctggagacctccgcgccccgcaacctccccttctacgagcggctcggcttcaccgtcaccgccgacgtcgaggtgcccgaaggaccgcgcacctggtgcatgacccgcaagcccggtgcctga

SEQ ID NO: 20181 - DNA, 2592 bp, synthetic construct
  source 1..2592: mol_type = other DNA
atggccttaccagtgaccgccttgctcctgccgctggccttgctgctccacgccgccaggccggaactgcaaagcgtgctgacacagcctcctagcgcctctggaacacctggacagagagtgacaatcagctgctccggcagctccagcaacatcggcagcaactacgtgaactggtatcagcagctgcctggcacagcccctaaactgctgatctacggcgactaccagaggccaagcggcgtgccagatagattcagcggcagcaagtctggcacaagcgccagcctggctatctctggactgagaagcgaggacgaggccgactactactgtgccaccagagatgatagcctgagcggcagcgtggtgtttggcacaggcacaaagctgacagtgctgggcctcgagatccagaaccctgatcctgccgtgtaccagctgcgggatagcaagagcagcgacaagagcgtgtgtctgttcaccgacttcgacagccagaccaacgtgtcccagagcaaggactccgacgtgtacatcaccgataagtgcgtgctggacatgcggagcatggacttcaagagcaactccgccgtggcctggtccaacaagtccgatttcgcctgcgccaacgccttcaacaacagcattatccccgaggacacattcttcccaagcagcgacgtgccctgcgacgtgaagctggtggaaaagagcttcgagacagacaccaacctgaacttccagaacctgagcgtgatcggcttcagaatcctgctgctgaaagtggccggctttaacctgctgatgaccctgcggctgtggtccagccgcgccaagagaagcggatctggcgtgaagcagaccctgaatttcgacctgctgaagctggctggcgacgtggaatccaacccaggccctactagtatggactggatttggcgcatccttttccttgtcggcgctgctaccggcgcgcattccttcgaagaagttcagctggttcagagcggagccgaagtgaagaagcctggcgagagcctgaagattagctgcaaaggcagcggctacggcttcaccagctattggatcggctgggtccgacagatgcctggcaaaggactggaatggatgggcatcattcaccccgacgacagcgacaccaagtacagccctagcttccagggccaagtgaccatcagcgccgacaagagcatcagcacagcctacctccagtggtcctctctgaaggccagcgataccgccatgtactactgcgccagcagctacctgagaggactgtggggcggctacttcgatttttggggccagggcacactggtcaccgttagttctacgcgtgaggacctgaagaacgtgttcccacctgaggtggccgtgttcgagcctagcaaggccgagatcgcccacacccagaaagccaccctcgtgtgcctggctaccggcttctaccccgaccatgtggaactgtcttggtgggtcaacggcaaagaggtgcacagcggcgtgtgtaccgacccccagccactgaaagaacagcccgccctgaacgacagccggtactgcctgagcagcagactgagagtgtccgccaccttctggcagaacccccggaaccacttcagatgccaggtgcagttctacggcctgagcgagaacgacgagtggacccaggacagagccaagcccgtgacccagatcgtgtctgccgaagcctggggcagagccgattgcggcatcaccagcgccagctaccaccagggcgtgctgagcgccaccatcctgtacgagatcctgctgggcaaggccaccctgtacgccgtgctggtgtctgccctggtgctgatggctatggtcaagcggaaggacagccggggaagggccaagcgatctggatctggagcaacaaacttctcactactcaaacaagcaggtgacgtggaggagaatcccgggccttctagaggccatatgaccgagtacaagcccacggtgcgcctcgccacccgcgacgacgtccccagggccgtacgcaccctcgccgccgcgttcgccgactaccccgccacgcgccacaccgtcgatccggaccgccacatcgagcgggtcaccgagctgcaagaactcttcctcacgcgcgtcgggctcgacatcggcaaggtgtgggtcgcggacgacggcgccgcggtggcggtctggaccacgccggagagcgtcgaagcgggggcggtgttcgccgagatcggcccgcgcatggccgagttgagcggttcccggctggccgcgcagcaacagatggaaggcctcctggcgccgcaccggcccaaggagcccgcgtggttcctggccaccgtcggcgtctcgcccgaccaccagggcaagggtctgggcagcgccgtcgtgctccccggagtggaggcggccgagcgcgccggggtgcccgccttcctggagacctccgcgccccgcaacctccccttctacgagcggctcggcttcaccgtcaccgccgacgtcgaggtgcccgaaggaccgcgcacctggtgcatgacccgcaagcccggtgcctga

SEQ ID NO: 20182 - DNA, 2589 bp, synthetic construct
  source 1..2589: mol_type = other DNA
atggccttaccagtgaccgccttgctcctgccgctggccttgctgctccacgccgccaggccggaactgcaaagcgtgctgacacagcctcctagcgcctctggaacacctggacagagagtgacaatcagctgctccggcagctccagcaacatcggcagcaactacgtgaactggtatcagcagctgcctggcacagcccctaaactgctgatctacggcgactaccagaggccaagcggcgtgccagatagattcagcggcagcaagtctggcacaagcgccagcctggctatctctggactgagaagcgaggacgaggccgactactactgtgccaccagagatgatagcctgagcggcagcgtggtgtttggcacaggcacaaagctgacagtgctgggcctcgaggacctgaagaacgtgttcccacctgaggtggccgtgttcgagcctagcaaggccgagatcgcccacacccagaaagccaccctcgtgtgcctggctaccggcttctaccccgaccatgtggaactgtcttggtgggtcaacggcaaagaggtgcacagcggcgtgtgtaccgacccccagccactgaaagaacagcccgccctgaacgacagccggtactgcctgagcagcagactgagagtgtccgccaccttctggcagaacccccggaaccacttcagatgccaggtgcagttctacggcctgagcgagaacgacgagtggacccaggacagagccaagcccgtgacccagatcgtgtctgccgaagcctggggcagagccgattgcggcatcaccagcgccagctaccaccagggcgtgctgagcgccaccatcctgtacgagatcctgctgggcaaggccaccctgtacgccgtgctggtgtctgccctggtgctgatggctatggtcaagcggaaggacagccggggaagggccaagcgatctggatctggagcaacaaacttctcactactcaaacaagcaggtgacgtggaggagaatcccgggcctactagtatggactggatttggcgcatccttttccttgtcggcgctgctaccggcgcgcattccttcgaagaagttcagctggttcagagcggagccgaagtgaagaagcctggcgagagcctgaagattagctgcaaaggcagcggctacggcttcaccagctattggatcggctgggtccgacagatgcctggcaaaggactggaatggatgggcatcattcaccccgacgacagcgacaccaagtacagccctagcttccagggccaagtgaccatcagcgccgacaagagcatcagcacagcctacctccagtggtcctctctgaaggccagcgataccgccatgtactactgcgccagcagctacctgagaggactgtggggcggctacttcgatttttggggccagggcacactggtcaccgttagttctacgcgtatccagaaccctgatcctgccgtgtaccagctgcgggatagcaagagcagcgacaagagcgtgtgtctgttcaccgacttcgacagccagaccaacgtgtcccagagcaaggactccgacgtgtacatcaccgataagtgcgtgctggacatgcggagcatggacttcaagagcaactccgccgtggcctggtccaacaagtccgatttcgcctgcgccaacgccttcaacaacagcattatccccgaggacacattcttcccaagcagcgacgtgccctgcgacgtgaagctggtggaaaagagcttcgagacagacaccaacctgaacttccagaacctgagcgtgatcggcttcagaatcctgctgctgaaagtggccggctttaacctgctgatgaccctgcggctgtggtccagccgcgccaagagaagcggatctggcgtgaagcagaccctgaatttcgacctgctgaagctggctggcgacgtggaatccaacccaggcccttctagaggccatatgaccgagtacaagcccacggtgcgcctcgccacccgcgacgacgtccccagggccgtacgcaccctcgccgccgcgttcgccgactaccccgccacgcgccacaccgtcgatccggaccgccacatcgagcgggtcaccgagctgcaagaactcttcctcacgcgcgtcgggctcgacatcggcaaggtgtgggtcgcggacgacggcgccgcggtggcggtctggaccacgccggagagcgtcgaagcgggggcggtgttcgccgagatcggcccgcgcatggccgagttgagcggttcccggctggccgcgcagcaacagatggaaggcctcctggcgccgcaccggcccaaggagcccgcgtggttcctggccaccgtcggcgtctcgcccgaccaccagggcaagggtctgggcagcgccgtcgtgctccccggagtggaggcggccgagcgcgccggggtgcccgccttcctggagacctccgcgccccgcaacctccccttctacgagcggctcggcttcaccgtcaccgccgacgtcgaggtgcccgaaggaccgcgcacctggtgcatgacccgcaagcccggtgcctga

SEQ ID NO: 20183 - DNA, 1887 bp, synthetic construct
  source 1..1887: mol_type = other DNA
atggccttaccagtgaccgccttgctcctgccgctggccttgctgctccacgccgccaggccggaactgcaaagcgtgctgacacagcctcctagcgcctctggaacacctggacagagagtgacaatcagctgctccggcagctccagcaacatcggcagcaactacgtgaactggtatcagcagctgcctggcacagcccctaaactgctgatctacggcgactaccagaggccaagcggcgtgccagatagattcagcggcagcaagtctggcacaagcgccagcctggctatctctggactgagaagcgaggacgaggccgactactactgtgccaccagagatgatagcctgagcggcagcgtggtgtttggcacaggcacaaagctgacagtgctgggcctcgaggacctgaagaacgtgttcccacctgaggtggccgtgttcgagcctagcgaggccgagatcagccacacccagaaagccaccctcgtgtgcctggctaccggcttctaccccgaccatgtggaactgtcttggtgggtcaacggcaaagaggtgcacagcggcgtgtgtaccgacccccagccactgaaagaacagcccgccctgaacgacagccggtactgcctgagcagcagactgagagtgtccgccaccttctggcagaacccccggaaccacttcagatgccaggtgcagttctacggcctgagcgagaacgacgagtggacccaggacagagccaagcccgtgacccagatcgtgtctgccgaagcctggggcagagccgattgcggctttaccagcgagagctaccagcagggcgtgctgagcgccaccatcctgtacgagatcctgctgggcaaggccaccctgtacgccgtgctggtgtctgccctggtgctgatggctatggtcaagcggaaggacagccggggaagggccaagcgatctggatctggagcaacaaacttctcactactcaaacaagcaggtgacgtggaggagaatcccgggcctactagtatggactggatttggcgcatccttttccttgtcggcgctgctaccggcgcgcattccttcgaagaagttcagctggttcagagcggagccgaagtgaagaagcctggcgagagcctgaagattagctgcaaaggcagcggctacggcttcaccagctattggatcggctgggtccgacagatgcctggcaaaggactggaatggatgggcatcattcaccccgacgacagcgacaccaagtacagccctagcttccagggccaagtgaccatcagcgccgacaagagcatcagcacagcctacctccagtggtcctctctgaaggccagcgataccgccatgtactactgcgccagcagctacctgagaggactgtggggcggctacttcgatttttggggccagggcacactggtcaccgttagttctacgcgtatccagaaccctgatcctgccgtgtaccagctgcgggatagcaagagcagcgacaagagcgtgtgtctgttcaccgacttcgacagccagaccaacgtgtcccagagcaaggactccgacgtgtacatcaccgataagtgcgtgctggacatgcggagcatggacttcaagagcaactccgccgtggcctggtccaacaagtccgatttcgcctgcgccaacgccttcaacaacagcattatccccgaggacacattcttcccaagccccgagagcagctgcgacgtgaagctggtggaaaagagcttcgagacagacaccaacctgaacttccagaacctgagcgtgatcggcttcagaatcctgctgctgaaagtggccggctttaacctgctgatgaccctgcggctgtggtccagc

SEQ ID NO: 20184 - DNA, 2562 bp, synthetic construct
  source 1..2562: mol_type = other DNA
atggccttaccagtgaccgccttgctcctgccgctggccttgctgctccacgccgccaggccggaactgcaaagcgtgctgacacagcctcctagcgcctctggaacacctggacagagagtgacaatcagctgctccggcagctccagcaacatcggcagcaactacgtgaactggtatcagcagctgcctggcacagcccctaaactgctgatctacggcgactaccagaggccaagcggcgtgccagatagattcagcggcagcaagtctggcacaagcgccagcctggctatctctggactgagaagcgaggacgaggccgactactactgtgccaccagagatgatagcctgagcggcagcgtggtgtttggcacaggcacaaagctgacagtgctgggcctcgaggacctgaagaacgtgttcccacctgaggtggccgtgttcgagcctagcgaggccgagatcagccacacccagaaagccaccctcgtgtgcctggctaccggcttctaccccgaccatgtggaactgtcttggtgggtcaacggcaaagaggtgcacagcggcgtgtgtaccgacccccagccactgaaagaacagcccgccctgaacgacagccggtactgcctgagcagcagactgagagtgtccgccaccttctggcagaacccccggaaccacttcagatgccaggtgcagttctacggcctgagcgagaacgacgagtggacccaggacagagccaagcccgtgacccagatcgtgtctgccgaagcctggggcagagccgattgcggctttaccagcgagagctaccagcagggcgtgctgagcgccaccatcctgtacgagatcctgctgggcaaggccaccctgtacgccgtgctggtgtctgccctggtgctgatggctatggtcaagcggaaggacagccggggaagggccaagcgatctggatctggagcaacaaacttctcactactcaaacaagcaggtgacgtggaggagaatcccgggcctactagtatggactggatttggcgcatccttttccttgtcggcgctgctaccggcgcgcattccttcgaagaagttcagctggttcagagcggagccgaagtgaagaagcctggcgagagcctgaagattagctgcaaaggcagcggctacggcttcaccagctattggatcggctgggtccgacagatgcctggcaaaggactggaatggatgggcatcattcaccccgacgacagcgacaccaagtacagccctagcttccagggccaagtgaccatcagcgccgacaagagcatcagcacagcctacctccagtggtcctctctgaaggccagcgataccgccatgtactactgcgccagcagctacctgagaggactgtggggcggctacttcgatttttggggccagggcacactggtcaccgttagttctacgcgtatccagaaccctgatcctgccgtgtaccagctgcgggatagcaagagcagcgacaagagcgtgtgtctgttcaccgacttcgacagccagaccaacgtgtcccagagcaaggactccgacgtgtacatcaccgataagtgcgtgctggacatgcggagcatggacttcaagagcaactccgccgtggcctggtccaacaagtccgatttcgcctgcgccaacgccttcaacaacagcattatccccgaggacacattcttcccaagccccgagagcagctgcgacgtgaagctggtggaaaagagcttcgagacagacaccaacctgaacttccagaacctgagcgtgatcggcttcagaatcctgctgctgaaagtggccggctttaacctgctgatgaccctgcggctgtggtccagccgcgccaagagaagcggatctggcgtgaagcagaccctgaatttcgacctgctgaagctggctggcgacgtggaatccaacccaggcccttctagaggcgggatccacaccatggctacctacgaggtgctgtgcgaggtggcaagaaagctgggcaccgacgacagagaagtggtgctgttcctgctgaacgtgttcatccctcagcctacactggcccagctgatcggtgcactgagagccctgaaagaggaaggccggctgacctttcctctgctggccgaatgcctgttcagagccggaagaagggatctgctgcgggacctgctgcatctggaccccagatttctggaaagacacctggccggcaccatgagctacttcagcccttaccagctgaccgtgctgcacgttgacggcgaactgtgcgccagagatattcggagcctgatcttcctgagcaaggacaccatcggcagccggtctacccctcagacatttctgcactgggtgtactgcatggaaaacctggacctgctcggccccacagatgtggatgccctgatgtccatgctgagaagcctgagcagagtggacctccagagacaggtgcagacactgatgggactgcacctgagcggacctagccacagccagcactacagacacacccct

SEQ ID NO: 20185 - DNA, 1899 bp, synthetic construct
  source 1..1899: mol_type = other DNA
atggccttaccagtgaccgccttgctcctgccgctggccttgctgctccacgccgccaggccggaactgcaaagcgtgctgacacagcctcctagcgcctctggaacacctggacagagagtgacaatcagctgctccggcagctccagcaacatcggcagcaactacgtgaactggtatcagcagctgcctggcacagcccctaaactgctgatctacggcgactaccagaggccaagcggcgtgccagatagattcagcggcagcaagtctggcacaagcgccagcctggctatctctggactgagaagcgaggacgaggccgactactactgtgccaccagagatgatagcctgagcggcagcgtggtgtttggcacaggcacaaagctgacagtgctgggcctcgagatccagaaccctgatcctgccgtgtaccagctgcgggatagcaagagcagcgacaagagcgtgtgtctgttcaccgacttcgacagccagaccaacgtgtcccagagcaaggactccgacgtgtacatcaccgataagtgcgtgctggacatgcggagcatggacttcaagagcaactccgccgtggcctggtccaacaagtccgatttcgcctgcgccaacgccttcaacaacagcattatccccgaggacacattcttcccaagccccgagagcagctgcgacgtgaagctggtggaaaagagcttcgagacagacaccaacctgaacttccagaacctgagcgtgatcggcttcagaatcctgctgctgaaagtggccggctttaacctgctgatgaccctgcggctgtggtccagccgcgccaagagaagcggatctggcgtgaagcagaccctgaatttcgacctgctgaagctggctggcgacgtggaatccaacccaggccctactagtatggactggatttggcgcatccttttccttgtcggcgctgctaccggcgcgcattccttcgaagaagttcagctggttcagagcggagccgaagtgaagaagcctggcgagagcctgaagattagctgcaaaggcagcggctacggcttcaccagctattggatcggctgggtccgacagatgcctggcaaaggactggaatggatgggcatcattcaccccgacgacagcgacaccaagtacagccctagcttccagggccaagtgaccatcagcgccgacaagagcatcagcacagcctacctccagtggtcctctctgaaggccagcgataccgccatgtactactgcgccagcagctacctgagaggactgtggggcggctacttcgatttttggggccagggcacactggtcaccgttagttctacgcgtgaggacctgaagaacgtgttcccacctgaggtggccgtgttcgagcctagcgaggccgagatcagccacacccagaaagccaccctcgtgtgcctggctaccggcttctaccccgaccatgtggaactgtcttggtgggtcaacggcaaagaggtgcacagcggcgtgtgtaccgacccccagccactgaaagaacagcccgccctgaacgacagccggtactgcctgagcagcagactgagagtgtccgccaccttctggcagaacccccggaaccacttcagatgccaggtgcagttctacggcctgagcgagaacgacgagtggacccaggacagagccaagcccgtgacccagatcgtgtctgccgaagcctggggcagagccgattgcggctttaccagcgagagctaccagcagggcgtgctgagcgccaccatcctgtacgagatcctgctgggcaaggccaccctgtacgccgtgctggtgtctgccctggtgctgatggctatggtcaagcggaaggacagccgggga

SEQ ID NO: 20186 - DNA, 2565 bp, synthetic construct
  source 1..2565: mol_type = other DNA
atggccttaccagtgaccgccttgctcctgccgctggccttgctgctccacgccgccaggccggaactgcaaagcgtgctgacacagcctcctagcgcctctggaacacctggacagagagtgacaatcagctgctccggcagctccagcaacatcggcagcaactacgtgaactggtatcagcagctgcctggcacagcccctaaactgctgatctacggcgactaccagaggccaagcggcgtgccagatagattcagcggcagcaagtctggcacaagcgccagcctggctatctctggactgagaagcgaggacgaggccgactactactgtgccaccagagatgatagcctgagcggcagcgtggtgtttggcacaggcacaaagctgacagtgctgggcctcgagatccagaaccctgatcctgccgtgtaccagctgcgggatagcaagagcagcgacaagagcgtgtgtctgttcaccgacttcgacagccagaccaacgtgtcccagagcaaggactccgacgtgtacatcaccgataagtgcgtgctggacatgcggagcatggacttcaagagcaactccgccgtggcctggtccaacaagtccgatttcgcctgcgccaacgccttcaacaacagcattatccccgaggacacattcttcccaagccccgagagcagctgcgacgtgaagctggtggaaaagagcttcgagacagacaccaacctgaacttccagaacctgagcgtgatcggcttcagaatcctgctgctgaaagtggccggctttaacctgctgatgaccctgcggctgtggtccagccgcgccaagagaagcggatctggcgtgaagcagaccctgaatttcgacctgctgaagctggctggcgacgtggaatccaacccaggccctactagtatggactggatttggcgcatccttttccttgtcggcgctgctaccggcgcgcattccttcgaagaagttcagctggttcagagcggagccgaagtgaagaagcctggcgagagcctgaagattagctgcaaaggcagcggctacggcttcaccagctattggatcggctgggtccgacagatgcctggcaaaggactggaatggatgggcatcattcaccccgacgacagcgacaccaagtacagccctagcttccagggccaagtgaccatcagcgccgacaagagcatcagcacagcctacctccagtggtcctctctgaaggccagcgataccgccatgtactactgcgccagcagctacctgagaggactgtggggcggctacttcgatttttggggccagggcacactggtcaccgttagttctacgcgtgaggacctgaagaacgtgttcccacctgaggtggccgtgttcgagcctagcgaggccgagatcagccacacccagaaagccaccctcgtgtgcctggctaccggcttctaccccgaccatgtggaactgtcttggtgggtcaacggcaaagaggtgcacagcggcgtgtgtaccgacccccagccactgaaagaacagcccgccctgaacgacagccggtactgcctgagcagcagactgagagtgtccgccaccttctggcagaacccccggaaccacttcagatgccaggtgcagttctacggcctgagcgagaacgacgagtggacccaggacagagccaagcccgtgacccagatcgtgtctgccgaagcctggggcagagccgattgcggctttaccagcgagagctaccagcagggcgtgctgagcgccaccatcctgtacgagatcctgctgggcaaggccaccctgtacgccgtgctggtgtctgccctggtgctgatggctatggtcaagcggaaggacagccggggaagggccaagcgatctggatctggagcaacaaacttctcactactcaaacaagcaggtgacgtggaggagaatcccgggccttctagaggcgggatccacaccatggctacctacgaggtgctgtgcgaggtggcaagaaagctgggcaccgacgacagagaagtggtgctgttcctgctgaacgtgttcatccctcagcctacactggcccagctgatcggtgcactgagagccctgaaagaggaaggccggctgacctttcctctgctggccgaatgcctgttcagagccggaagaagggatctgctgcgggacctgctgcatctggaccccagatttctggaaagacacctggccggcaccatgagctacttcagcccttaccagctgaccgtgctgcacgttgacggcgaactgtgcgccagagatattcggagcctgatcttcctgagcaaggacaccatcggcagccggtctacccctcagacatttctgcactgggtgtactgcatggaaaacctggacctgctcggccccacagatgtggatgccctgatgtccatgctgagaagcctgagcagagtggacctccagagacaggtgcagacactgatgggactgcacctgagcggacctagccacagccagcactacagacacacccct

SEQ ID NO: 20187 - DNA, 2724 bp, synthetic construct
  source 1..2724: mol_type = other DNA
atggccttaccagtgaccgccttgctcctgccgctggccttgctgctccacgccgccaggccgctcgaggggaaaccaattcccaaccctcttctgggactggattcaaccggcagcggcgaggacctgaagaacgtgttcccacctgaggtggccgtgttcgagcctagcaaggccgagatcgcccacacccagaaagccaccctcgtgtgcctggctaccggcttctaccccgaccatgtggaactgtcttggtgggtcaacggcaaagaggtgcacagcggcgtgtgtaccgacccccagccactgaaagaacagcccgccctgaacgacagccggtactgcctgagcagcagactgagagtgtccgccaccttctggcagaacccccggaaccacttcagatgccaggtgcagttctacggcctgagcgagaacgacgagtggacccaggacagagccaagcccgtgacccagatcgtgtctgccgaagcctggggcagagccgattgcggcatcaccagcgccagctaccaccagggcgtgctgagcgccaccatcctgtacgagatcctgctgggcaaggccaccctgtacgccgtgctggtgtctgccctggtgctgatggctatggtcaagcggaaggacagccggggaagggccaagcgatctggatctggagcaacaaacttctcactactcaaacaagcaggtgacgtggaggagaatcccgggcctactagcatggccttaccagtgaccgccttgctcctgccgctggccttgctgctccacgccgccaggccggaactgcaaagcgtgctgacacagcctcctagcgcctctggaacacctggacagagagtgacaatcagctgctccggcagctccagcaacatcggcagcaactacgtgaactggtatcagcagctgcctggcacagcccctaaactgctgatctacggcgactaccagaggccaagcggcgtgccagatagattcagcggcagcaagtctggcacaagcgccagcctggctatctctggactgagaagcgaggacgaggccgactactactgtgccaccagagatgatagcctgagcggcagcgtggtgtttggcacaggcacaaagctgacagtgctgggcggcggaggcggaagtggaggcggaggatctggcggcggaggctctgaagttcagctggttcagagcggagccgaagtgaagaagcctggcgagagcctgaagattagctgcaaaggcagcggctacggcttcaccagctattggatcggctgggtccgacagatgcctggcaaaggactggaatggatgggcatcattcaccccgacgacagcgacaccaagtacagccctagcttccagggccaagtgaccatcagcgccgacaagagcatcagcacagcctacctccagtggtcctctctgaaggccagcgataccgccatgtactactgcgccagcagctacctgagaggactgtggggcggctacttcgatttttggggccagggcacactggtcaccgttagttctacgcgtgagcagaaactgatctcggaagaggatgggagcggcatccagaaccctgatcctgccgtgtaccagctgcgggatagcaagagcagcgacaagagcgtgtgtctgttcaccgacttcgacagccagaccaacgtgtcccagagcaaggactccgacgtgtacatcaccgataagtgcgtgctggacatgcggagcatggacttcaagagcaactccgccgtggcctggtccaacaagtccgatttcgcctgcgccaacgccttcaacaacagcattatccccgaggacacattcttcccaagcagcgacgtgccctgcgacgtgaagctggtggaaaagagcttcgagacagacaccaacctgaacttccagaacctgagcgtgatcggcttcagaatcctgctgctgaaagtggccggctttaacctgctgatgaccctgcggctgtggtccagccgcgccaagagaagcggatctggcgtgaagcagaccctgaatttcgacctgctgaagctggctggcgacgtggaatccaacccaggcccttctagaggccatatgaccgagtacaagcccacggtgcgcctcgccacccgcgacgacgtccccagggccgtacgcaccctcgccgccgcgttcgccgactaccccgccacgcgccacaccgtcgatccggaccgccacatcgagcgggtcaccgagctgcaagaactcttcctcacgcgcgtcgggctcgacatcggcaaggtgtgggtcgcggacgacggcgccgcggtggcggtctggaccacgccggagagcgtcgaagcgggggcggtgttcgccgagatcggcccgcgcatggccgagttgagcggttcccggctggccgcgcagcaacagatggaaggcctcctggcgccgcaccggcccaaggagcccgcgtggttcctggccaccgtcggcgtctcgcccgaccaccagggcaagggtctgggcagcgccgtcgtgctccccggagtggaggcggccgagcgcgccggggtgcccgccttcctggagacctccgcgccccgcaacctccccttctacgagcggctcggcttcaccgtcaccgccgacgtcgaggtgcccgaaggaccgcgcacctggtgcatgacccgcaagcccggtgcctga

SEQ ID NO: 20188 - DNA, 2727 bp, synthetic construct
  source 1..2727: mol_type = other DNA
atggccttaccagtgaccgccttgctcctgccgctggccttgctgctccacgccgccaggccgctcgagcagaaactgatctcggaagaggatctgggctccggcgatcgccctgatcctgccgtgtaccagctgcgggatagcaagagcagcgacaagagcgtgtgtctgttcaccgacttcgacagccagaccaacgtgtcccagagcaaggactccgacgtgtacatcaccgataagtgcgtgctggacatgcggagcatggacttcaagagcaactccgccgtggcctggtccaacaagtccgatttcgcctgcgccaacgccttcaacaacagcattatccccgaggacacattcttcccaagccccgagagcagctgcgacgtgaagctggtggaaaagagcttcgagacagacaccaacctgaacttccagaacctgagcgtgatcggcttcagaatcctgctgctgaaagtggccggctttaacctgctgatgaccctgcggctgtggtccagctctagtcgcgccaagagaagcggatctggcgtgaagcagaccctgaatttcgacctgctgaagctggctggcgacgtggaatccaacccaggccccactagcatggccttaccagtgaccgccttgctcctgccgctggccttgctgctccacgccgccaggccggaactgcaaagcgtgctgacacagcctcctagcgcctctggaacacctggacagagagtgacaatcagctgctccggcagctccagcaacatcggcagcaactacgtgaactggtatcagcagctgcctggcacagcccctaaactgctgatctacggcgactaccagaggccaagcggcgtgccagatagattcagcggcagcaagtctggcacaagcgccagcctggctatctctggactgagaagcgaggacgaggccgactactactgtgccaccagagatgatagcctgagcggcagcgtggtgtttggcacaggcacaaagctgacagtgctgggcggcggaggcggaagtggaggcggaggatctggcggcggaggctctgaagttcagctggttcagagcggagccgaagtgaagaagcctggcgagagcctgaagattagctgcaaaggcagcggctacggcttcaccagctattggatcggctgggtccgacagatgcctggcaaaggactggaatggatgggcatcattcaccccgacgacagcgacaccaagtacagccctagcttccagggccaagtgaccatcagcgccgacaagagcatcagcacagcctacctccagtggtcctctctgaaggccagcgataccgccatgtactactgcgccagcagctacctgagaggactgtggggcggctacttcgatttttggggccagggcacactggtcaccgttagttctacgcgtgggaaaccaattcccaaccctcttctgggactggattcaaccggcagcggcgaggacctgaagaacgtgttcccacctgaggtggccgtgttcgagcctagcgaggccgagatcagccacacccagaaagccaccctcgtgtgcctggctaccggcttctaccccgaccatgtggaactgtcttggtgggtcaacggcaaagaggtgcacagcggcgtgtgtaccgacccccagccactgaaagaacagcccgccctgaacgacagccggtactgcctgagcagcagactgagagtgtccgccaccttctggcagaacccccggaaccacttcagatgccaggtgcagttctacggcctgagcgagaacgacgagtggacccaggacagagccaagcccgtgacccagatcgtgtctgccgaagcctggggcagagccgattgcggctttaccagcgagagctaccagcagggcgtgctgagcgccaccatcctgtacgagatcctgctgggcaaggccaccctgtacgccgtgctggtgtctgccctggtgctgatggctatggtcaagcggaaggacagccggggaagggccaagcgatctggatctggagcaacaaacttctcactactcaaacaagcaggtgacgtggaggagaatcccgggccttctagaggccatatgaccgagtacaagcccacggtgcgcctcgccacccgcgacgacgtccccagggccgtacgcaccctcgccgccgcgttcgccgactaccccgccacgcgccacaccgtcgatccggaccgccacatcgagcgggtcaccgagctgcaagaactcttcctcacgcgcgtcgggctcgacatcggcaaggtgtgggtcgcggacgacggcgccgcggtggcggtctggaccacgccggagagcgtcgaagcgggggcggtgttcgccgagatcggcccgcgcatggccgagttgagcggttcccggctggccgcgcagcaacagatggaaggcctcctggcgccgcaccggcccaaggagcccgcgtggttcctggccaccgtcggcgtctcgcccgaccaccagggcaagggtctgggcagcgccgtcgtgctccccggagtggaggcggccgagcgcgccggggtgcccgccttcctggagacctccgcgccccgcaacctccccttctacgagcggctcggcttcaccgtcaccgccgacgtcgaggtgcccgaaggaccgcgcacctggtgcatgacccgcaagcccggtgcctga

SEQ ID NO: 20189 - DNA, 2589 bp, synthetic construct
  source 1..2589: mol_type = other DNA
atggccttaccagtgaccgccttgctcctgccgctggccttgctgctccacgccgccaggccggaactgcaaagcgtgctgacacagcctcctagcgcctctggaacacctggacagagagtgacaatcagctgctccggcagctccagcaacatcggcagcaactacgtgaactggtatcagcagctgcctggcacagcccctaaactgctgatctacggcgactaccagaggccaagcggcgtgccagatagattcagcggcagcaagtctggcacaagcgccagcctggctatctctggactgagaagcgaggacgaggccgactactactgtgccaccagagatgatagcctgagcggcagcgtggtgtttggcacaggcacaaagctgacagtgctgggcctcgaggacctgaagaacgtgttcccacctgaggtggccgtgttcgagcctagcgaggccgagatcagccacacccagaaagccaccctcgtgtgcctggctaccggcttctaccccgaccatgtggaactgtcttggtgggtcaacggcaaagaggtgcacagcggcgtgtctaccgacccccagccactgaaagaacagcccgccctgaacgacagccggtactgcctgagcagcagactgagagtgtccgccaccttctggcagaacccccggaaccacttcagatgccaggtgcagttctacggcctgagcgagaacgacgagtggacccaggacagagccaagcccgtgacccagatcgtgtctgccgaagcctggggcagagccgattgcggctttaccagcgagagctaccagcagggcgtgctgagcgccaccatcctgtacgagatcctgctgggcaaggccaccctgtacgccgtgctggtgtctgccctggtgctgatggctatggtcaagcggaaggacagccggggaagggccaagcgatctggatctggagcaacaaacttctcactactcaaacaagcaggtgacgtggaggagaatcccgggcctactagtatggactggatttggcgcatccttttccttgtcggcgctgctaccggcgcgcattccttcgaagaagttcagctggttcagagcggagccgaagtgaagaagcctggcgagagcctgaagattagctgcaaaggcagcggctacggcttcaccagctattggatcggctgggtccgacagatgcctggcaaaggactggaatggatgggcatcattcaccccgacgacagcgacaccaagtacagccctagcttccagggccaagtgaccatcagcgccgacaagagcatcagcacagcctacctccagtggtcctctctgaaggccagcgataccgccatgtactactgcgccagcagctacctgagaggactgtggggcggctacttcgatttttggggccagggcacactggtcaccgttagttctacgcgtatccagaaccctgatcctgccgtgtaccagctgcgggatagcaagagcagcgacaagagcgtgtgtctgttcaccgacttcgacagccagaccaacgtgtcccagagcaaggactccgacgtgtacatcaccgataagaccgtgctggacatgcggagcatggacttcaagagcaactccgccgtggcctggtccaacaagtccgatttcgcctgcgccaacgccttcaacaacagcattatccccgaggacacattcttcccaagccccgagagcagctgcgacgtgaagctggtggaaaagagcttcgagacagacaccaacctgaacttccagaacctgagcgtgatcggcttcagaatcctgctgctgaaagtggccggctttaacctgctgatgaccctgcggctgtggtccagccgcgccaagagaagcggatctggcgtgaagcagaccctgaatttcgacctgctgaagctggctggcgacgtggaatccaacccaggcccttctagaggccatatgaccgagtacaagcccacggtgcgcctcgccacccgcgacgacgtccccagggccgtacgcaccctcgccgccgcgttcgccgactaccccgccacgcgccacaccgtcgatccggaccgccacatcgagcgggtcaccgagctgcaagaactcttcctcacgcgcgtcgggctcgacatcggcaaggtgtgggtcgcggacgacggcgccgcggtggcggtctggaccacgccggagagcgtcgaagcgggggcggtgttcgccgagatcggcccgcgcatggccgagttgagcggttcccggctggccgcgcagcaacagatggaaggcctcctggcgccgcaccggcccaaggagcccgcgtggttcctggccaccgtcggcgtctcgcccgaccaccagggcaagggtctgggcagcgccgtcgtgctccccggagtggaggcggccgagcgcgccggggtgcccgccttcctggagacctccgcgccccgcaacctccccttctacgagcggctcggcttcaccgtcaccgccgacgtcgaggtgcccgaaggaccgcgcacctggtgcatgacccgcaagcccggtgcctga

SEQ ID NO: 20190 - DNA, 2835 bp, synthetic construct
  source 1..2835: mol_type = other DNA
atggccttaccagtgaccgccttgctcctgccgctggccttgctgctccacgccgccaggccggaactgcaaagcgtgctgacacagcctcctagcgcctctggaacacctggacagagagtgacaatcagctgctccggcagctccagcaacatcggcagcaactacgtgaactggtatcagcagctgcctggcacagcccctaaactgctgatctacggcgactaccagaggccaagcggcgtgccagatagattcagcggcagcaagtctggcacaagcgccagcctggctatctctggactgagaagcgaggacgaggccgactactactgtgccaccagagatgatagcctgagcggcagcgtggtgtttggcacaggcacaaagctgacagtgctgggcctcgaggacctgaagaacgtgttcccacctgaggtggccgtgttcgagcctagcgaggccgagatcagccacacccagaaagccaccctcgtgtgcctggctaccggcttctaccccgaccatgtggaactgtcttggtgggtcaacggcaaagaggtgcacagcggcgtgtctaccgacccccagccactgaaagaacagcccgccctgaacgacagccggtactgcctgagcagcagactgagagtgtccgccaccttctggcagaacccccggaaccacttcagatgccaggtgcagttctacggcctgagcgagaacgacgagtggacccaggacagagccaagcccgtgacccagatcgtgtctgccgaagcctggggcagagccgattgcggctttaccagcgagagctaccagcagggcgtgctgagcgccaccatcctgtacgagatcctgctgggcaaggccaccctgtacgccgtgctggtgtctgccctggtgctgatggctatggtcaagcggaaggacagccggggaagggccaagcgatctggatctggagcaacaaacttctcactactcaaacaagcaggtgacgtggaggagaatcccgggcctactagtatggactggatttggcgcatccttttccttgtcggcgctgctaccggcgcgcattccttcgaagaagttcagctggttcagagcggagccgaagtgaagaagcctggcgagagcctgaagattagctgcaaaggcagcggctacggcttcaccagctattggatcggctgggtccgacagatgcctggcaaaggactggaatggatgggcatcattcaccccgacgacagcgacaccaagtacagccctagcttccagggccaagtgaccatcagcgccgacaagagcatcagcacagcctacctccagtggtcctctctgaaggccagcgataccgccatgtactactgcgccagcagctacctgagaggactgtggggcggctacttcgatttttggggccagggcacactggtcaccgttagttctacgcgtgagcagaaactgatctcggaagaggatgggagcggcaccccattcccttctctggcccctcccatcatgctgctggtggacggcaagcagcagatggtggtcgtgtgcctggtgctggatgtggccccacctggactggacagccccatctggtttagcgccggcaatggctctgccctggacgcctttacctacggcccaagccctgccaccgatggcacctggacaaatctggcccacctgagcctgcccagcgaggaactggcttcttgggagcctctcgtgtgccacacaggacctggcgctgagggacacagcagatccacccagcctatgcacctgtctggcgaggccagcaccgccagaacctgtcctcaggaacctctgagaggcacccctggcggagcactgtggctgggagtgctgagactgctgctgttcaagctgctgctgtttgacctgctgctgacctgctcctgtctgtgcgatcctgccggccctctgccttctcctgccaccaccacaagactgagagccctgggcagccacagactgcaccctgccacagagacaggcggcagagaggccacaagcagccctagaccccagcccagagacagaagatggggcgataccccccctggcagaaagcctggatctccagtccgcgccaagagaagcggatctggcgtgaagcagaccctgaatttcgacctgctgaagctggctggcgacgtggaatccaacccaggcccttctagaggccatatgaccgagtacaagcccacggtgcgcctcgccacccgcgacgacgtccccagggccgtacgcaccctcgccgccgcgttcgccgactaccccgccacgcgccacaccgtcgatccggaccgccacatcgagcgggtcaccgagctgcaagaactcttcctcacgcgcgtcgggctcgacatcggcaaggtgtgggtcgcggacgacggcgccgcggtggcggtctggaccacgccggagagcgtcgaagcgggggcggtgttcgccgagatcggcccgcgcatggccgagttgagcggttcccggctggccgcgcagcaacagatggaaggcctcctggcgccgcaccggcccaaggagcccgcgtggttcctggccaccgtcggcgtctcgcccgaccaccagggcaagggtctgggcagcgccgtcgtgctccccggagtggaggcggccgagcgcgccggggtgcccgccttcctggagacctccgcgccccgcaacctccccttctacgagcggctcggcttcaccgtcaccgccgacgtcgaggtgcccgaaggaccgcgcacctggtgcatgacccgcaagcccggtgcctga

SEQ ID NO: 20191 - DNA, 2889 bp, synthetic construct
  source 1..2889: mol_type = other DNA
atggccttaccagtgaccgccttgctcctgccgctggccttgctgctccacgccgccaggccgctcgaggacctgaagaacgtgttcccacctgaggtggccgtgttcgagcctagcgaggccgagatcagccacacccagaaagccaccctcgtgtgcctggctaccggcttctaccccgaccatgtggaactgtcttggtgggtcaacggcaaagaggtgcacagcggcgtgtctaccgacccccagccactgaaagaacagcccgccctgaacgacagccggtactgcctgagcagcagactgagagtgtccgccaccttctggcagaacccccggaaccacttcagatgccaggtgcagttctacggcctgagcgagaacgacgagtggacccaggacagagccaagcccgtgacccagatcgtgtctgccgaagcctggggcagagccgattgcggctttaccagcgagagctaccagcagggcgtgctgagcgccaccatcctgtacgagatcctgctgggcaaggccaccctgtacgccgtgctggtgtctgccctggtgctgatggctatggtcaagcggaaggacagccggggaagggccaagcgatctggatctggagcaacaaacttctcactactcaaacaagcaggtgacgtggaggagaatcccgggcctactagcatggccttaccagtgaccgccttgctcctgccgctggccttgctgctccacgccgccaggccggaactgcaaagcgtgctgacacagcctcctagcgcctctggaacacctggacagagagtgacaatcagctgctccggcagctccagcaacatcggcagcaactacgtgaactggtatcagcagctgcctggcacagcccctaaactgctgatctacggcgactaccagaggccaagcggcgtgccagatagattcagcggcagcaagtctggcacaagcgccagcctggctatctctggactgagaagcgaggacgaggccgactactactgtgccaccagagatgatagcctgagcggcagcgtggtgtttggcacaggcacaaagctgacagtgctgggcggcggaggcggaagtggaggcggaggatctggcggcggaggctctgaagttcagctggttcagagcggagccgaagtgaagaagcctggcgagagcctgaagattagctgcaaaggcagcggctacggcttcaccagctattggatcggctgggtccgacagatgcctggcaaaggactggaatggatgggcatcattcaccccgacgacagcgacaccaagtacagccctagcttccagggccaagtgaccatcagcgccgacaagagcatcagcacagcctacctccagtggtcctctctgaaggccagcgataccgccatgtactactgcgccagcagctacctgagaggactgtggggcggctacttcgatttttggggccagggcacactggtcaccgttagttctacgcgtgagcagaaactgatctcggaagaggatctggggagcggcaccccattcccttctctggcccctcccatcatgctgctggtggacggcaagcagcagatggtggtcgtgtgcctggtgctggatgtggccccacctggactggacagccccatctggtttagcgccggcaatggctctgccctggacgcctttacctacggcccaagccctgccaccgatggcacctggacaaatctggcccacctgagcctgcccagcgaggaactggcttcttgggagcctctcgtgtgccacacaggacctggcgctgagggacacagcagatccacccagcctatgcacctgtctggcgaggccagcaccgccagaacctgtcctcaggaacctctgagaggcacccctggcggagcactgtggctgggagtgctgagactgctgctgttcaagctgctgctgtttgacctgctgctgacctgctcctgtctgtgcgatcctgccggccctctgccttctcctgccaccaccacaagactgagagccctgggcagccacagactgcaccctgccacagagacaggcggcagagaggccacaagcagccctagaccccagcccagagacagaagatggggcgataccccccctggcagaaagcctggatctccagtccgcgccaagagaagcggatctggcgtgaagcagaccctgaatttcgacctgctgaagctggctggcgacgtggaatccaacccaggcccttctagatctagaggccatatgaccgagtacaagcccacggtgcgcctcgccacccgcgacgacgtccccagggccgtacgcaccctcgccgccgcgttcgccgactaccccgccacgcgccacaccgtcgatccggaccgccacatcgagcgggtcaccgagctgcaagaactcttcctcacgcgcgtcgggctcgacatcggcaaggtgtgggtcgcggacgacggcgccgcggtggcggtctggaccacgccggagagcgtcgaagcgggggcggtgttcgccgagatcggcccgcgcatggccgagttgagcggttcccggctggccgcgcagcaacagatggaaggcctcctggcgccgcaccggcccaaggagcccgcgtggttcctggccaccgtcggcgtctcgcccgaccaccagggcaagggtctgggcagcgccgtcgtgctccccggagtggaggcggccgagcgcgccggggtgcccgccttcctggagacctccgcgccccgcaacctccccttctacgagcggctcggcttcaccgtcaccgccgacgtcgaggtgcccgaaggaccgcgcacctggtgcatgacccgcaagcccggtgcctga

SEQ ID NO: 20192 - DNA, 2700 bp, synthetic construct
  source 1..2700: mol_type = other DNA
atggccttaccagtgaccgccttgctcctgccgctggccttgctgctccacgccgccaggccggaactgcaaagcgtgctgacacagcctcctagcgcctctggaacacctggacagagagtgacaatcagctgctccggcagctccagcaacatcggcagcaactacgtgaactggtatcagcagctgcctggcacagcccctaaactgctgatctacggcgactaccagaggccaagcggcgtgccagatagattcagcggcagcaagtctggcacaagcgccagcctggctatctctggactgagaagcgaggacgaggccgactactactgtgccaccagagatgatagcctgagcggcagcgtggtgtttggcacaggcacaaagctgacagtgctgggcctcgaggggaaaccaattcccaaccctcttctgggactggattcaaccggcagcggcgacaagcagctggacgccgacgtgtcccccaagcctaccatcttcctgccctctatcgccgagacaaagctccagaaggccggcacctacctgtgcctgctggaaaagttcttcccagatgtgattaagatccactggcaggaaaagaagtccaacaccatcctgggcagccaggaaggcaacaccatgaagaccaacgacacctacatgaagttcagctggctgaccgtgcccgagaagtccctggacaaagaacacagatgcatcgtgcggcacgaaaacaacaagaacggcgtggaccaggaaatcatcttcccacccatcaagaccgatgtgattacaatggaccccaaggacaactgctccaaggacgccaacgataccctgctgctccagctgaccaacaccagcgcctactacatgtacttgttgctgctgctgaagtccgtggtgtacttcgccatcatcacatgctgcctgctgcggagaaccgccttctgctgcaacggcgagaagtctagggccaagcgatctggatctggagcaacaaacttctcactactcaaacaagcaggtgacgtggaggagaatcccgggcctactagtatggactggatttggcgcatccttttccttgtcggcgctgctaccggcgcgcattccttcgaagaagttcagctggttcagagcggagccgaagtgaagaagcctggcgagagcctgaagattagctgcaaaggcagcggctacggcttcaccagctattggatcggctgggtccgacagatgcctggcaaaggactggaatggatgggcatcattcaccccgacgacagcgacaccaagtacagccctagcttccagggccaagtgaccatcagcgccgacaagagcatcagcacagcctacctccagtggtcctctctgaaggccagcgataccgccatgtactactgcgccagcagctacctgagaggactgtggggcggctacttcgatttttggggccagggcacactggtcaccgttagttctacgcgtgagcagaaactgatctcggaagaggatgggagcggcagccagcctcacaccaagcccagcgtgttcgtgatgaagaacggcaccaacgtggcctgcctcgtgaaagagttctaccccaaggacatcaggatcaacctggtgtccagcaagaagatcaccgagttcgaccccgccatcgtgatctcccccagcggcaagtacaacgccgtgaagctggggaagtacgaggacagcaacagcgtgacctgctccgtgcagcacgacaacaagaccgtgcacagcaccgactttgaagtgaaaaccgactccaccgaccacgtgaagcccaaagagacagagaacaccaagcagcccagcaagagctgccacaagcccaaggccatcgtgcacaccgagaaagtgaacatgatgagcctgaccgtgctgggcctgcggatgctgttcgccaaaaccgtggccgtgaacttcctgctgaccgccaagctgttcttcctccgcgccaagagaagcggatctggcgtgaagcagaccctgaatttcgacctgctgaagctggctggcgacgtggaatccaacccaggcccttctagaggccatatgaccgagtacaagcccacggtgcgcctcgccacccgcgacgacgtccccagggccgtacgcaccctcgccgccgcgttcgccgactaccccgccacgcgccacaccgtcgatccggaccgccacatcgagcgggtcaccgagctgcaagaactcttcctcacgcgcgtcgggctcgacatcggcaaggtgtgggtcgcggacgacggcgccgcggtggcggtctggaccacgccggagagcgtcgaagcgggggcggtgttcgccgagatcggcccgcgcatggccgagttgagcggttcccggctggccgcgcagcaacagatggaaggcctcctggcgccgcaccggcccaaggagcccgcgtggttcctggccaccgtcggcgtctcgcccgaccaccagggcaagggtctgggcagcgccgtcgtgctccccggagtggaggcggccgagcgcgccggggtgcccgccttcctggagacctccgcgccccgcaacctccccttctacgagcggctcggcttcaccgtcaccgccgacgtcgaggtgcccgaaggaccgcgcacctggtgcatgacccgcaagcccggtgcctga

SEQ ID NO: 20193 - DNA, 1911 bp, synthetic construct
  source 1..1911: mol_type = other DNA
atggccttaccagtgaccgccttgctcctgccgctggccttgctgctccacgccgccaggccggaactgcaaagcgtgctgacacagcctcctagcgcctctggaacacctggacagagagtgacaatcagctgctccggcagctccagcaacatcggcagcaactacgtgaactggtatcagcagctgcctggcacagcccctaaactgctgatctacggcgactaccagaggccaagcggcgtgccagatagattcagcggcagcaagtctggcacaagcgccagcctggctatctctggactgagaagcgaggacgaggccgactactactgtgccaccagagatgatagcctgagcggcagcgtggtgtttggcacaggcacaaagctgacagtgctgggcctcgagagccagcctcacaccaagcccagcgtgttcgtgatgaagaacggcaccaacgtggcctgcctcgtgaaagagttctaccccaaggacatcaggatcaacctggtgtccagcaagaagatcaccgagttcgaccccgccatcgtgatctcccccagcggcaagtacaacgccgtgaagctggggaagtacgaggacagcaacagcgtgacctgctccgtgcagcacgacaacaagaccgtgcacagcaccgactttgaagtgaaaaccgactccaccgaccacgtgaagcccaaagagacagagaacaccaagcagcccagcaagagctgccacaagcccaaggccatcgtgcacaccgagaaagtgaacatgatgagcctgaccgtgctgggcctgcggatgctgttcgccaaaaccgtggccgtgaacttcctgctgaccgccaagctgttcttcctcagggccaagcgatctggatctggagcaacaaacttctcactactcaaacaagcaggtgacgtggaggagaatcccgggcctactagtatggactggatttggcgcatccttttccttgtcggcgctgctaccggcgcgcattccttcgaagaagttcagctggttcagagcggagccgaagtgaagaagcctggcgagagcctgaagattagctgcaaaggcagcggctacggcttcaccagctattggatcggctgggtccgacagatgcctggcaaaggactggaatggatgggcatcattcaccccgacgacagcgacaccaagtacagccctagcttccagggccaagtgaccatcagcgccgacaagagcatcagcacagcctacctccagtggtcctctctgaaggccagcgataccgccatgtactactgcgccagcagctacctgagaggactgtggggcggctacttcgatttttggggccagggcacactggtcaccgttagttctacgcgtgacaagcagctggacgccgacgtgtcccccaagcctaccatcttcctgccctctatcgccgagacaaagctccagaaggccggcacctacctgtgcctgctggaaaagttcttcccagatgtgattaagatccactggcaggaaaagaagtccaacaccatcctgggcagccaggaaggcaacaccatgaagaccaacgacacctacatgaagttcagctggctgaccgtgcccgagaagtccctggacaaagaacacagatgcatcgtgcggcacgaaaacaacaagaacggcgtggaccaggaaatcatcttcccacccatcaagaccgatgtgattacaatggaccccaaggacaactgctccaaggacgccaacgataccctgctgctccagctgaccaacaccagcgcctactacatgtacttgttgctgctgctgaagtccgtggtgtacttcgccatcatcacatgctgcctgctgcggagaaccgccttctgctgcaacggcgagaagtct

SEQ ID NO: 20194 - DNA, 2745 bp, synthetic construct
  source 1..2745: mol_type = other DNA
atggccttaccagtgaccgccttgctcctgccgctggccttgctgctccacgccgccaggccgctcgaggggaaaccaattcccaaccctcttctgggactggattcaaccggcagcggcgacaagcagctggacgccgacgtgtcccccaagcctaccatcttcctgccctctatcgccgagacaaagctccagaaggccggcacctacctgtgcctgctggaaaagttcttcccagatgtgattaagatccactggcaggaaaagaagtccaacaccatcctgggcagccaggaaggcaacaccatgaagaccaacgacacctacatgaagttcagctggctgaccgtgcccgagaagtccctggacaaagaacacagatgcatcgtgcggcacgaaaacaacaagaacggcgtggaccaggaaatcatcttcccacccatcaagaccgatgtgattacaatggaccccaaggacaactgctccaaggacgccaacgataccctgctgctccagctgaccaacaccagcgcctactacatgtacttgttgctgctgctgaagtccgtggtgtacttcgccatcatcacatgctgcctgctgcggagaaccgccttctgctgcaacggcgagaagtctagggccaagcgatctggatctggagcaacaaacttctcactactcaaacaagcaggtgacgtggaggagaatcccgggcctactagcatggccttaccagtgaccgccttgctcctgccgctggccttgctgctccacgccgccaggccggaactgcaaagcgtgctgacacagcctcctagcgcctctggaacacctggacagagagtgacaatcagctgctccggcagctccagcaacatcggcagcaactacgtgaactggtatcagcagctgcctggcacagcccctaaactgctgatctacggcgactaccagaggccaagcggcgtgccagatagattcagcggcagcaagtctggcacaagcgccagcctggctatctctggactgagaagcgaggacgaggccgactactactgtgccaccagagatgatagcctgagcggcagcgtggtgtttggcacaggcacaaagctgacagtgctgggcggcggaggcggaagtggaggcggaggatctggcggcggaggctctgaagttcagctggttcagagcggagccgaagtgaagaagcctggcgagagcctgaagattagctgcaaaggcagcggctacggcttcaccagctattggatcggctgggtccgacagatgcctggcaaaggactggaatggatgggcatcattcaccccgacgacagcgacaccaagtacagccctagcttccagggccaagtgaccatcagcgccgacaagagcatcagcacagcctacctccagtggtcctctctgaaggccagcgataccgccatgtactactgcgccagcagctacctgagaggactgtggggcggctacttcgatttttggggccagggcacactggtcaccgttagttctacgcgtgagcagaaactgatctcggaagaggatgggagcggcagccagcctcacaccaagcccagcgtgttcgtgatgaagaacggcaccaacgtggcctgcctcgtgaaagagttctaccccaaggacatcaggatcaacctggtgtccagcaagaagatcaccgagttcgaccccgccatcgtgatctcccccagcggcaagtacaacgccgtgaagctggggaagtacgaggacagcaacagcgtgacctgctccgtgcagcacgacaacaagaccgtgcacagcaccgactttgaagtgaaaaccgactccaccgaccacgtgaagcccaaagagacagagaacaccaagcagcccagcaagagctgccacaagcccaaggccatcgtgcacaccgagaaagtgaacatgatgagcctgaccgtgctgggcctgcggatgctgttcgccaaaaccgtggccgtgaacttcctgctgaccgccaagctgttcttcctccgcgccaagagaagcggatctggcgtgaagcagaccctgaatttcgacctgctgaagctggctggcgacgtggaatccaacccaggcccttctagaggccatatgaccgagtacaagcccacggtgcgcctcgccacccgcgacgacgtccccagggccgtacgcaccctcgccgccgcgttcgccgactaccccgccacgcgccacaccgtcgatccggaccgccacatcgagcgggtcaccgagctgcaagaactcttcctcacgcgcgtcgggctcgacatcggcaaggtgtgggtcgcggacgacggcgccgcggtggcggtctggaccacgccggagagcgtcgaagcgggggcggtgttcgccgagatcggcccgcgcatggccgagttgagcggttcccggctggccgcgcagcaacagatggaaggcctcctggcgccgcaccggcccaaggagcccgcgtggttcctggccaccgtcggcgtctcgcccgaccaccagggcaagggtctgggcagcgccgtcgtgctccccggagtggaggcggccgagcgcgccggggtgcccgccttcctggagacctccgcgccccgcaacctccccttctacgagcggctcggcttcaccgtcaccgccgacgtcgaggtgcccgaaggaccgcgcacctggtgcatgacccgcaagcccggtgcctga

SEQ ID NO: 20195 - DNA, 3120 bp, synthetic construct
  source 1..3120: mol_type = other DNA
atggccttaccagtgaccgccttgctcctgccgctggccttgctgctccacgccgccaggccggaactgcaaagcgtgctgacacagcctcctagcgcctctggaacacctggacagagagtgacaatcagctgctccggcagctccagcaacatcggcagcaactacgtgaactggtatcagcagctgcctggcacagcccctaaactgctgatctacggcgactaccagaggccaagcggcgtgccagatagattcagcggcagcaagtctggcacaagcgccagcctggctatctctggactgagaagcgaggacgaggccgactactactgtgccaccagagatgatagcctgagcggcagcgtggtgtttggcacaggcacaaagctgacagtgctgggcggacagcctaaggccaatcctaccgtgacactgttccctccaagcagcgaagaactccaggccaacaaggccacacttgtgtgcctgatctccgacttctaccctggggctgtgacagtggcttggaaggccgatggatctcctgtgaaagccggcgtggaaaccaccaagccatccaagcagagcaacaacaaatacgccgccagctcctacctgagcctgacacctgagcagtggaagtcccacagatcctacagctgccaagtgacccacgaaggcagcaccgtggaaaagacagtggcccctacagagtgcagcggatcccagagcttcggcctgctggaccccaagctgtgctacctgctggatggcatcctgttcatctacggcgtgatcctgaccgccctgttcctgagagtgaagttcagcagaagcgccgacgcccctgcctaccagcagggacagaaccaactgtacaacgagctgaacctgggcagacgggaagagtacgacgtgctggacaagcggagaggcagggaccctgagatgggcggaaagccccagcggagaaagaacccccaggaaggactgtataacgaactccagaaagacaagatggccgaagcctacagcgagatcggcatgaagggcgagcggagaagaggcaagggccacgatggcctgtaccagggcctgagcaccgccaccaaggacacctatgacgccctgcacatgcaggccctgcctccaagaagggccaagcgatctggatctggagcaacaaacttctcactactcaaacaagcaggtgacgtggaggagaatcccgggcctactagtatggactggatttggcgcatccttttccttgtcggcgctgctaccggcgcgcattccttcgaagaagttcagctggttcagagcggagccgaagtgaagaagcctggcgagagcctgaagattagctgcaaaggcagcggctacggcttcaccagctattggatcggctgggtccgacagatgcctggcaaaggactggaatggatgggcatcattcaccccgacgacagcgacaccaagtacagccctagcttccagggccaagtgaccatcagcgccgacaagagcatcagcacagcctacctccagtggtcctctctgaaggccagcgataccgccatgtactactgcgccagcagctacctgagaggactgtggggcggctacttcgatttttggggccagggcacactggtcaccgttagttctgcctctacaaagggaccctccgtgtttcctctggctcccagcagcaagtctacaagcggaggaacagccgctctgggctgcctggtcaaggattactttcccgagcctgtgaccgtgtcctggaatagcggagcactgacaagcggcgtgcacacctttccagccgtgctgcaaagcagcggcctgtactctctgagcagcgtggtcacagtgcctagctctagcctgggcacccagacctacatctgcaatgtgaaccacaagcctagcaacaccaaggtggacaagagagtggaacccaagagctgtggtacccagagttttgggttgttggaccctaaattgtgctatctgttggacggaatcctgttcatttacggagtgatcctgaccgcattgttcctgcgggttaagttttccagatccgcagacgcacccgcttaccaacaagggcagaaccaactctacaatgaacttaatttggggcggagggaagagtacgacgttctggacaaaaggaggggacgagatcccgagatgggcggaaagcctcagcgaaggaagaatccgcaagaggggctttataacgaactccagaaagataaaatggcagaagcctatagtgagattgggatgaagggagaaaggaggaggggtaaaggtcacgatgggttgtaccaaggattgagcacagccactaaagatacctatgatgcgctccacatgcaggccctgccgccaagacgcgccaagagaagcggatctggcgtgaagcagaccctgaatttcgacctgctgaagctggctggcgacgtggaatccaacccaggcccttctagaggccatatgaccgagtacaagcccacggtgcgcctcgccacccgcgacgacgtccccagggccgtacgcaccctcgccgccgcgttcgccgactaccccgccacgcgccacaccgtcgatccggaccgccacatcgagcgggtcaccgagctgcaagaactcttcctcacgcgcgtcgggctcgacatcggcaaggtgtgggtcgcggacgacggcgccgcggtggcggtctggaccacgccggagagcgtcgaagcgggggcggtgttcgccgagatcggcccgcgcatggccgagttgagcggttcccggctggccgcgcagcaacagatggaaggcctcctggcgccgcaccggcccaaggagcccgcgtggttcctggccaccgtcggcgtctcgcccgaccaccagggcaagggtctgggcagcgccgtcgtgctccccggagtggaggcggccgagcgcgccggggtgcccgccttcctggagacctccgcgccccgcaacctccccttctacgagcggctcggcttcaccgtcaccgccgacgtcgaggtgcccgaaggaccgcgcacctggtgcatgacccgcaagcccggtgcctga

SEQ ID NO: 20196 - DNA, 2475 bp, synthetic construct
  source 1..2475: mol_type = other DNA
atggccttaccagtgaccgccttgctcctgccgctggccttgctgctccacgccgccaggccggaactgcaaagcgtgctgacacagcctcctagcgcctctggaacacctggacagagagtgacaatcagctgctccggcagctccagcaacatcggcagcaactacgtgaactggtatcagcagctgcctggcacagcccctaaactgctgatctacggcgactaccagaggccaagcggcgtgccagatagattcagcggcagcaagtctggcacaagcgccagcctggctatctctggactgagaagcgaggacgaggccgactactactgtgccaccagagatgatagcctgagcggcagcgtggtgtttggcacaggcacaaagctgacagtgctgggcctcgaggacctgaagaacgtgttcccacctgaggtggccgtgttcgagcctagcgaggccgagatcagccacacccagaaagccaccctcgtgtgcctggctaccggcttctaccccgaccatgtggaactgtcttggtgggtcaacggcaaagaggtgcacagcggcgtgtctaccgacccccagccactgaaagaacagcccgccctgaacgacagccggtactgcctgagcagcagactgagagtgtccgccaccttctggcagaacccccggaaccacttcagatgccaggtgcagttctacggcctgagcgagaacgacgagtggacccaggacagagccaagcccgtgacccagatcgtgtctgccgaagcctggggcagagccgattgcggatcccagagcttcggcctgctggaccccaagctgtgctacctgctggatggcatcctgttcatctacggcgtgatcctgaccgccctgttcctgagagtgaagttcagcagaagcgccgacgcccctgcctaccagcagggacagaaccaactgtacaacgagctgaacctgggcagacgggaagagtacgacgtgctggacaagcggagaggcagggaccctgagatgggcggaaagccccagcggagaaagaacccccaggaaggactgtataacgaactccagaaagacaagatggccgaagcctacagcgagatcggcatgaagggcgagcggagaagaggcaagggccacgatggcctgtaccagggcctgagcaccgccaccaaggacacctatgacgccctgcacatgcaggccctgcctccaagaagggccaagcgatctggatctggagcaacaaacttctcactactcaaacaagcaggtgacgtggaggagaatcccgggcctactagtatggactggatttggcgcatccttttccttgtcggcgctgctaccggcgcgcattccttcgaagaagttcagctggttcagagcggagccgaagtgaagaagcctggcgagagcctgaagattagctgcaaaggcagcggctacggcttcaccagctattggatcggctgggtccgacagatgcctggcaaaggactggaatggatgggcatcattcaccccgacgacagcgacaccaagtacagccctagcttccagggccaagtgaccatcagcgccgacaagagcatcagcacagcctacctccagtggtcctctctgaaggccagcgataccgccatgtactactgcgccagcagctacctgagaggactgtggggcggctacttcgatttttggggccagggcacactggtcaccgttagttctacgcgtatccagaaccctgatcctgccgtgtaccagctgcgggatagcaagagcagcgacaagagcgtgtgtctgttcaccgacttcgacagccagaccaacgtgtcccagagcaaggactccgacgtgtacatcaccgataagaccgtgctggacatgcggagcatggacttcaagagcaactccgccgtggcctggtccaacaagtccgatttcgcctgcgccaacgccttcaacaacagcattatccccgaggacacattcttcccaagccccgagagcagctgcggtacccagagttttgggttgttggaccctaaattgtgctatctgttggacggaatcctgttcatttacggagtgatcctgaccgcattgttcctgcgggttaagttttccagatccgcagacgcacccgcttaccaacaagggcagaaccaactctacaatgaacttaatttggggcggagggaagagtacgacgttctggacaaaaggaggggacgagatcccgagatgggcggaaagcctcagcgaaggaagaatccgcaagaggggctttataacgaactccagaaagataaaatggcagaagcctatagtgagattgggatgaagggagaaaggaggaggggtaaaggtcacgatgggttgtaccaaggattgagcacagccactaaagatacctatgatgcgctccacatgcaggccctgccgccaaga

SEQ ID NO: 20197 - DNA, 2475 bp, synthetic construct
  source 1..2475: mol_type = other DNA
atggccttaccagtgaccgccttgctcctgccgctggccttgctgctccacgccgccaggccggaactgcaaagcgtgctgacacagcctcctagcgcctctggaacacctggacagagagtgacaatcagctgctccggcagctccagcaacatcggcagcaactacgtgaactggtatcagcagctgcctggcacagcccctaaactgctgatctacggcgactaccagaggccaagcggcgtgccagatagattcagcggcagcaagtctggcacaagcgccagcctggctatctctggactgagaagcgaggacgaggccgactactactgtgccaccagagatgatagcctgagcggcagcgtggtgtttggcacaggcacaaagctgacagtgctgggcctcgaggacctgaagaacgtgttcccacctgaggtggccgtgttcgagcctagcaaggccgagatcgcccacacccagaaagccaccctcgtgtgcctggctaccggcttctaccccgaccatgtggaactgtcttggtgggtcaacggcaaagaggtgcacagcggcgtgtgtaccgacccccagccactgaaagaacagcccgccctgaacgacagccggtactgcctgagcagcagactgagagtgtccgccaccttctggcagaacccccggaaccacttcagatgccaggtgcagttctacggcctgagcgagaacgacgagtggacccaggacagagccaagcccgtgacccagatcgtgtctgccgaagcctggggcagagccgattgcggatcccagagcttcggcctgctggaccccaagctgtgctacctgctggatggcatcctgttcatctacggcgtgatcctgaccgccctgttcctgagagtgaagttcagcagaagcgccgacgcccctgcctaccagcagggacagaaccaactgtacaacgagctgaacctgggcagacgggaagagtacgacgtgctggacaagcggagaggcagggaccctgagatgggcggaaagccccagcggagaaagaacccccaggaaggactgtataacgaactccagaaagacaagatggccgaagcctacagcgagatcggcatgaagggcgagcggagaagaggcaagggccacgatggcctgtaccagggcctgagcaccgccaccaaggacacctatgacgccctgcacatgcaggccctgcctccaagaagggccaagcgatctggatctggagcaacaaacttctcactactcaaacaagcaggtgacgtggaggagaatcccgggcctactagtatggactggatttggcgcatccttttccttgtcggcgctgctaccggcgcgcattccttcgaagaagttcagctggttcagagcggagccgaagtgaagaagcctggcgagagcctgaagattagctgcaaaggcagcggctacggcttcaccagctattggatcggctgggtccgacagatgcctggcaaaggactggaatggatgggcatcattcaccccgacgacagcgacaccaagtacagccctagcttccagggccaagtgaccatcagcgccgacaagagcatcagcacagcctacctccagtggtcctctctgaaggccagcgataccgccatgtactactgcgccagcagctacctgagaggactgtggggcggctacttcgatttttggggccagggcacactggtcaccgttagttctacgcgtatccagaaccctgatcctgccgtgtaccagctgcgggatagcaagagcagcgacaagagcgtgtgtctgttcaccgacttcgacagccagaccaacgtgtcccagagcaaggactccgacgtgtacatcaccgataagtgcgtgctggacatgcggagcatggacttcaagagcaactccgccgtggcctggtccaacaagtccgatttcgcctgcgccaacgccttcaacaacagcattatccccgaggacacattcttcccaagcagcgacgtgccctgcggtacccagagttttgggttgttggaccctaaattgtgctatctgttggacggaatcctgttcatttacggagtgatcctgaccgcattgttcctgcgggttaagttttccagatccgcagacgcacccgcttaccaacaagggcagaaccaactctacaatgaacttaatttggggcggagggaagagtacgacgttctggacaaaaggaggggacgagatcccgagatgggcggaaagcctcagcgaaggaagaatccgcaagaggggctttataacgaactccagaaagataaaatggcagaagcctatagtgagattgggatgaagggagaaaggaggaggggtaaaggtcacgatgggttgtaccaaggattgagcacagccactaaagatacctatgatgcgctccacatgcaggccctgccgccaaga

SEQ ID NO: 20198 - DNA, 2688 bp, synthetic construct
  source 1..2688: mol_type = other DNA
atggccttaccagtgaccgccttgctcctgccgctggccttgctgctccacgccgccaggccggaactgcaaagcgtgctgacacagcctcctagcgcctctggaacacctggacagagagtgacaatcagctgctccggcagctccagcaacatcggcagcaactacgtgaactggtatcagcagctgcctggcacagcccctaaactgctgatctacggcgactaccagaggccaagcggcgtgccagatagattcagcggcagcaagtctggcacaagcgccagcctggctatctctggactgagaagcgaggacgaggccgactactactgtgccaccagagatgatagcctgagcggcagcgtggtgtttggcacaggcacaaagctgacagtgctgggcctcgaggggaaaccaattcccaaccctcttctgggactggattcaaccggcagcggcgaggacctgaagaacgtgttcccacctgaggtggccgtgttcgagcctagcgaggccgagatcagccacacccagaaagccaccctcgtgtgcctggctaccggcttctaccccgaccatgtggaactgtcttggtgggtcaacggcaaagaggtgcacagcggcgtgtctaccgacccccagccactgaaagaacagcccgccctgaacgacagccggtactgcctgagcagcagactgagagtgtccgccaccttctggcagaacccccggaaccacttcagatgccaggtgcagttctacggcctgagcgagaacgacgagtggacccaggacagagccaagcccgtgacccagatcgtgtctgccgaagcctggggcagagccgattgcggatcccagagcttcggcctgctggaccccaagctgtgctacctgctggatggcatcctgttcatctacggcgtgatcctgaccgccctgttcctgagagtgaagttcagcagaagcgccgacgcccctgcctaccagcagggacagaaccaactgtacaacgagctgaacctgggcagacgggaagagtacgacgtgctggacaagcggagaggcagggaccctgagatgggcggaaagccccagcggagaaagaacccccaggaaggactgtataacgaactccagaaagacaagatggccgaagcctacagcgagatcggcatgaagggcgagcggagaagaggcaagggccacgatggcctgtaccagggcctgagcaccgccaccaaggacacctatgacgccctgcacatgcaggccctgcctccaagaagggccaagcgatctggatctggagcaacaaacttctcactactcaaacaagcaggtgacgtggaggagaatcccgggcctactagtatggactggatttggcgcatccttttccttgtcggcgctgctaccggcgcgcattccttcgaagaagttcagctggttcagagcggagccgaagtgaagaagcctggcgagagcctgaagattagctgcaaaggcagcggctacggcttcaccagctattggatcggctgggtccgacagatgcctggcaaaggactggaatggatgggcatcattcaccccgacgacagcgacaccaagtacagccctagcttccagggccaagtgaccatcagcgccgacaagagcatcagcacagcctacctccagtggtcctctctgaaggccagcgataccgccatgtactactgcgccagcagctacctgagaggactgtggggcggctacttcgatttttggggccagggcacactggtcaccgttagttctacgcgtgagcagaaactgatctcggaagaggatgggagcggcatccagaaccctgatcctgccgtgtaccagctgcgggatagcaagagcagcgacaagagcgtgtgtctgttcaccgacttcgacagccagaccaacgtgtcccagagcaaggactccgacgtgtacatcaccgataagaccgtgctggacatgcggagcatggacttcaagagcaactccgccgtggcctggtccaacaagtccgatttcgcctgcgccaacgccttcaacaacagcattatccccgaggacacattcttcccaagccccgagagcagctgcggtacccagagttttgggttgttggaccctaaattgtgctatctgttggacggaatcctgttcatttacggagtgatcctgaccgcattgttcctgaggagcaagcggtcacggctgctccacagcgattacatgaatatgacaccacgaagaccgggtcctactcgcaaacactaccaaccctacgcacctccccgcgactttgcagcgtaccgatctcgggttaagttttccagatccgcagacgcacccgcttaccaacaagggcagaaccaactctacaatgaacttaatttggggcggagggaagagtacgacgttctggacaaaaggaggggacgagatcccgagatgggcggaaagcctcagcgaaggaagaatccgcaagaggggctttataacgaactccagaaagataaaatggcagaagcctatagtgagattgggatgaagggagaaaggaggaggggtaaaggtcacgatgggttgtaccaaggattgagcacagccactaaagatacctatgatgcgctccacatgcaggccctgccgccaaga

SEQ ID NO: 20199 - DNA, 2811 bp, synthetic construct
  source 1..2811: mol_type = other DNA
atggccttaccagtgaccgccttgctcctgccgctggccttgctgctccacgccgccaggccggaactgcaaagcgtgctgacacagcctcctagcgcctctggaacacctggacagagagtgacaatcagctgctccggcagctccagcaacatcggcagcaactacgtgaactggtatcagcagctgcctggcacagcccctaaactgctgatctacggcgactaccagaggccaagcggcgtgccagatagattcagcggcagcaagtctggcacaagcgccagcctggctatctctggactgagaagcgaggacgaggccgactactactgtgccaccagagatgatagcctgagcggcagcgtggtgtttggcacaggcacaaagctgacagtgctgggcctcgaggggaaaccaattcccaaccctcttctgggactggattcaaccggcagcggcgaggacctgaagaacgtgttcccacctgaggtggccgtgttcgagcctagcgaggccgagatcagccacacccagaaagccaccctcgtgtgcctggctaccggcttctaccccgaccatgtggaactgtcttggtgggtcaacggcaaagaggtgcacagcggcgtgtctaccgacccccagccactgaaagaacagcccgccctgaacgacagccggtactgcctgagcagcagactgagagtgtccgccaccttctggcagaacccccggaaccacttcagatgccaggtgcagttctacggcctgagcgagaacgacgagtggacccaggacagagccaagcccgtgacccagatcgtgtctgccgaagcctggggcagagccgattgcggatcccagagcttcggcctgctggaccccaagctgtgctacctgctggatggcatcctgttcatctacggcgtgatcctgaccgccctgttcctgaggagtaagaggagcaggctcctgcacagtgactacatgaacatgactccacgccgccccggacccacccgcaagcattaccagccctatgccccaccacgcgacttcgcagcctatcgctccagagtgaagttcagcagaagcgccgacgcccctgcctaccagcagggacagaaccaactgtacaacgagctgaacctgggcagacgggaagagtacgacgtgctggacaagcggagaggcagggaccctgagatgggcggaaagccccagcggagaaagaacccccaggaaggactgtataacgaactccagaaagacaagatggccgaagcctacagcgagatcggcatgaagggcgagcggagaagaggcaagggccacgatggcctgtaccagggcctgagcaccgccaccaaggacacctatgacgccctgcacatgcaggccctgcctccaagaagggccaagcgatctggatctggagcaacaaacttctcactactcaaacaagcaggtgacgtggaggagaatcccgggcctactagtatggactggatttggcgcatccttttccttgtcggcgctgctaccggcgcgcattccttcgaagaagttcagctggttcagagcggagccgaagtgaagaagcctggcgagagcctgaagattagctgcaaaggcagcggctacggcttcaccagctattggatcggctgggtccgacagatgcctggcaaaggactggaatggatgggcatcattcaccccgacgacagcgacaccaagtacagccctagcttccagggccaagtgaccatcagcgccgacaagagcatcagcacagcctacctccagtggtcctctctgaaggccagcgataccgccatgtactactgcgccagcagctacctgagaggactgtggggcggctacttcgatttttggggccagggcacactggtcaccgttagttctacgcgtgagcagaaactgatctcggaagaggatgggagcggcatccagaaccctgatcctgccgtgtaccagctgcgggatagcaagagcagcgacaagagcgtgtgtctgttcaccgacttcgacagccagaccaacgtgtcccagagcaaggactccgacgtgtacatcaccgataagaccgtgctggacatgcggagcatggacttcaagagcaactccgccgtggcctggtccaacaagtccgatttcgcctgcgccaacgccttcaacaacagcattatccccgaggacacattcttcccaagccccgagagcagctgcggtacccagagttttgggttgttggaccctaaattgtgctatctgttggacggaatcctgttcatttacggagtgatcctgaccgcattgttcctgaggagcaagcggtcacggctgctccacagcgattacatgaatatgacaccacgaagaccgggtcctactcgcaaacactaccaaccctacgcacctccccgcgactttgcagcgtaccgatctcgggttaagttttccagatccgcagacgcacccgcttaccaacaagggcagaaccaactctacaatgaacttaatttggggcggagggaagagtacgacgttctggacaaaaggaggggacgagatcccgagatgggcggaaagcctcagcgaaggaagaatccgcaagaggggctttataacgaactccagaaagataaaatggcagaagcctatagtgagattgggatgaagggagaaaggaggaggggtaaaggtcacgatgggttgtaccaaggattgagcacagccactaaagatacctatgatgcgctccacatgcaggccctgccgccaaga

SEQ ID NO: 20200 - DNA, 2694 bp, synthetic construct
  source 1..2694: mol_type = other DNA
atggccttaccagtgaccgccttgctcctgccgctggccttgctgctccacgccgccaggccggaactgcaaagcgtgctgacacagcctcctagcgcctctggaacacctggacagagagtgacaatcagctgctccggcagctccagcaacatcggcagcaactacgtgaactggtatcagcagctgcctggcacagcccctaaactgctgatctacggcgactaccagaggccaagcggcgtgccagatagattcagcggcagcaagtctggcacaagcgccagcctggctatctctggactgagaagcgaggacgaggccgactactactgtgccaccagagatgatagcctgagcggcagcgtggtgtttggcacaggcacaaagctgacagtgctgggcctcgaggggaaaccaattcccaaccctcttctgggactggattcaaccggcagcggcgaggacctgaagaacgtgttcccacctgaggtggccgtgttcgagcctagcgaggccgagatcagccacacccagaaagccaccctcgtgtgcctggctaccggcttctaccccgaccatgtggaactgtcttggtgggtcaacggcaaagaggtgcacagcggcgtgtctaccgacccccagccactgaaagaacagcccgccctgaacgacagccggtactgcctgagcagcagactgagagtgtccgccaccttctggcagaacccccggaaccacttcagatgccaggtgcagttctacggcctgagcgagaacgacgagtggacccaggacagagccaagcccgtgacccagatcgtgtctgccgaagcctggggcagagccgattgcggatcccagagcttcggcctgctggaccccaagctgtgctacctgctggatggcatcctgttcatctacggcgtgatcctgaccgccctgttcctgagagtgaagttcagcagaagcgccgacgcccctgcctaccagcagggacagaaccaactgtacaacgagctgaacctgggcagacgggaagagtacgacgtgctggacaagcggagaggcagggaccctgagatgggcggaaagccccagcggagaaagaacccccaggaaggactgtataacgaactccagaaagacaagatggccgaagcctacagcgagatcggcatgaagggcgagcggagaagaggcaagggccacgatggcctgtaccagggcctgagcaccgccaccaaggacacctatgacgccctgcacatgcaggccctgcctccaagaagggccaagcgatctggatctggagcaacaaacttctcactactcaaacaagcaggtgacgtggaggagaatcccgggcctactagtatggactggatttggcgcatccttttccttgtcggcgctgctaccggcgcgcattccttcgaagaagttcagctggttcagagcggagccgaagtgaagaagcctggcgagagcctgaagattagctgcaaaggcagcggctacggcttcaccagctattggatcggctgggtccgacagatgcctggcaaaggactggaatggatgggcatcattcaccccgacgacagcgacaccaagtacagccctagcttccagggccaagtgaccatcagcgccgacaagagcatcagcacagcctacctccagtggtcctctctgaaggccagcgataccgccatgtactactgcgccagcagctacctgagaggactgtggggcggctacttcgatttttggggccagggcacactggtcaccgttagttctacgcgtgagcagaaactgatctcggaagaggatctggggagcggcatccagaaccctgatcctgccgtgtaccagctgcgggatagcaagagcagcgacaagagcgtgtgtctgttcaccgacttcgacagccagaccaacgtgtcccagagcaaggactccgacgtgtacatcaccgataagaccgtgctggacatgcggagcatggacttcaagagcaactccgccgtggcctggtccaacaagtccgatttcgcctgcgccaacgccttcaacaacagcattatccccgaggacacattcttcccaagccccgagagcagctgcggtacccagagttttgggttgttggaccctaaattgtgctatctgttggacggaatcctgttcatttacggagtgatcctgaccgcattgttcctgaagagaggccggaagaagctgctgtacatcttcaagcagcctttcatgcggcccgtgcagaccacccaggaagaggacggctgctcctgccggttccccgaggaagaagaaggcggctgcgagctgcgggttaagttttccagatccgcagacgcacccgcttaccaacaagggcagaaccaactctacaatgaacttaatttggggcggagggaagagtacgacgttctggacaaaaggaggggacgagatcccgagatgggcggaaagcctcagcgaaggaagaatccgcaagaggggctttataacgaactccagaaagataaaatggcagaagcctatagtgagattgggatgaagggagaaaggaggaggggtaaaggtcacgatgggttgtaccaaggattgagcacagccactaaagatacctatgatgcgctccacatgcaggccctgccgccaaga

SEQ ID NO: 20201 - DNA, 2820 bp, synthetic construct
  source 1..2820: mol_type = other DNA
atggccttaccagtgaccgccttgctcctgccgctggccttgctgctccacgccgccaggccggaactgcaaagcgtgctgacacagcctcctagcgcctctggaacacctggacagagagtgacaatcagctgctccggcagctccagcaacatcggcagcaactacgtgaactggtatcagcagctgcctggcacagcccctaaactgctgatctacggcgactaccagaggccaagcggcgtgccagatagattcagcggcagcaagtctggcacaagcgccagcctggctatctctggactgagaagcgaggacgaggccgactactactgtgccaccagagatgatagcctgagcggcagcgtggtgtttggcacaggcacaaagctgacagtgctgggcctcgaggggaaaccaattcccaaccctcttctgggactggattcaaccggcagcggcgaggacctgaagaacgtgttcccacctgaggtggccgtgttcgagcctagcgaggccgagatcagccacacccagaaagccaccctcgtgtgcctggctaccggcttctaccccgaccatgtggaactgtcttggtgggtcaacggcaaagaggtgcacagcggcgtgtctaccgacccccagccactgaaagaacagcccgccctgaacgacagccggtactgcctgagcagcagactgagagtgtccgccaccttctggcagaacccccggaaccacttcagatgccaggtgcagttctacggcctgagcgagaacgacgagtggacccaggacagagccaagcccgtgacccagatcgtgtctgccgaagcctggggcagagccgattgcggatcccagagcttcggcctgctggaccccaagctgtgctacctgctggatggcatcctgttcatctacggcgtgatcctgaccgccctgttcctgaaacggggcagaaagaaactcctgtatatattcaaacaaccatttatgagaccagtacaaactactcaagaggaagatggctgtagctgccgatttccagaagaagaagaaggaggatgtgaactgagagtgaagttcagcagaagcgccgacgcccctgcctaccagcagggacagaaccaactgtacaacgagctgaacctgggcagacgggaagagtacgacgtgctggacaagcggagaggcagggaccctgagatgggcggaaagccccagcggagaaagaacccccaggaaggactgtataacgaactccagaaagacaagatggccgaagcctacagcgagatcggcatgaagggcgagcggagaagaggcaagggccacgatggcctgtaccagggcctgagcaccgccaccaaggacacctatgacgccctgcacatgcaggccctgcctccaagaagggccaagcgatctggatctggagcaacaaacttctcactactcaaacaagcaggtgacgtggaggagaatcccgggcctactagtatggactggatttggcgcatccttttccttgtcggcgctgctaccggcgcgcattccttcgaagaagttcagctggttcagagcggagccgaagtgaagaagcctggcgagagcctgaagattagctgcaaaggcagcggctacggcttcaccagctattggatcggctgggtccgacagatgcctggcaaaggactggaatggatgggcatcattcaccccgacgacagcgacaccaagtacagccctagcttccagggccaagtgaccatcagcgccgacaagagcatcagcacagcctacctccagtggtcctctctgaaggccagcgataccgccatgtactactgcgccagcagctacctgagaggactgtggggcggctacttcgatttttggggccagggcacactggtcaccgttagttctacgcgtgagcagaaactgatctcggaagaggatctggggagcggcatccagaaccctgatcctgccgtgtaccagctgcgggatagcaagagcagcgacaagagcgtgtgtctgttcaccgacttcgacagccagaccaacgtgtcccagagcaaggactccgacgtgtacatcaccgataagaccgtgctggacatgcggagcatggacttcaagagcaactccgccgtggcctggtccaacaagtccgatttcgcctgcgccaacgccttcaacaacagcattatccccgaggacacattcttcccaagccccgagagcagctgcggtacccagagttttgggttgttggaccctaaattgtgctatctgttggacggaatcctgttcatttacggagtgatcctgaccgcattgttcctgaagagaggccggaagaagctgctgtacatcttcaagcagcctttcatgcggcccgtgcagaccacccaggaagaggacggctgctcctgccggttccccgaggaagaagaaggcggctgcgagctgcgggttaagttttccagatccgcagacgcacccgcttaccaacaagggcagaaccaactctacaatgaacttaatttggggcggagggaagagtacgacgttctggacaaaaggaggggacgagatcccgagatgggcggaaagcctcagcgaaggaagaatccgcaagaggggctttataacgaactccagaaagataaaatggcagaagcctatagtgagattgggatgaagggagaaaggaggaggggtaaaggtcacgatgggttgtaccaaggattgagcacagccactaaagatacctatgatgcgctccacatgcaggccctgccgccaaga

SEQ ID NO: 20202 - DNA, 2493 bp, synthetic construct
  source 1..2493: mol_type = other DNA
atggccttaccagtgaccgccttgctcctgccgctggccttgctgctccacgccgccaggccggaactgcaaagcgtgctgacacagcctcctagcgcctctggaacacctggacagagagtgacaatcagctgctccggcagctccagcaacatcggcagcaactacgtgaactggtatcagcagctgcctggcacagcccctaaactgctgatctacggcgactaccagaggccaagcggcgtgccagatagattcagcggcagcaagtctggcacaagcgccagcctggctatctctggactgagaagcgaggacgaggccgactactactgtgccaccagagatgatagcctgagcggcagcgtggtgtttggcacaggcacaaagctgacagtgctgggcctcgagcagagcttcggcctgctggaccccaagctgtgctacctgctggatggcatcctgttcatctacggcgtgatcctgaccgccctgttcctgagagtgaagttcagcagaagcgccgacgcccctgcctaccagcagggacagaaccaactgtacaacgagctgaacctgggcagacgggaagagtacgacgtgctggacaagcggagaggcagggaccctgagatgggcggaaagccccagcggagaaagaacccccaggaaggactgtataacgaactccagaaagacaagatggccgaagcctacagcgagatcggcatgaagggcgagcggagaagaggcaagggccacgatggcctgtaccagggcctgagcaccgccaccaaggacacctatgacgccctgcacatgcaggccctgcctccaagaagggccaagcgatctggatctggagcaacaaacttctcactactcaaacaagcaggtgacgtggaggagaatcccgggcctactagtatggactggatttggcgcatccttttccttgtcggcgctgctaccggcgcgcattccttcgaagaagttcagctggttcagagcggagccgaagtgaagaagcctggcgagagcctgaagattagctgcaaaggcagcggctacggcttcaccagctattggatcggctgggtccgacagatgcctggcaaaggactggaatggatgggcatcattcaccccgacgacagcgacaccaagtacagccctagcttccagggccaagtgaccatcagcgccgacaagagcatcagcacagcctacctccagtggtcctctctgaaggccagcgataccgccatgtactactgcgccagcagctacctgagaggactgtggggcggctacttcgatttttggggccagggcacactggtcaccgttagttctacgcgtcagagttttgggttgttggaccctaaattgtgctatctgttggacggaatcctgttcatttacggagtgatcctgaccgcattgttcctgcgggttaagttttccagatccgcagacgcacccgcttaccaacaagggcagaaccaactctacaatgaacttaatttggggcggagggaagagtacgacgttctggacaaaaggaggggacgagatcccgagatgggcggaaagcctcagcgaaggaagaatccgcaagaggggctttataacgaactccagaaagataaaatggcagaagcctatagtgagattgggatgaagggagaaaggaggaggggtaaaggtcacgatgggttgtaccaaggattgagcacagccactaaagatacctatgatgcgctccacatgcaggccctgccgccaagacgcgccaagagaagcggatctggcgtgaagcagaccctgaatttcgacctgctgaagctggctggcgacgtggaatccaacccaggcccttctagaggccatatgaccgagtacaagcccacggtgcgcctcgccacccgcgacgacgtccccagggccgtacgcaccctcgccgccgcgttcgccgactaccccgccacgcgccacaccgtcgatccggaccgccacatcgagcgggtcaccgagctgcaagaactcttcctcacgcgcgtcgggctcgacatcggcaaggtgtgggtcgcggacgacggcgccgcggtggcggtctggaccacgccggagagcgtcgaagcgggggcggtgttcgccgagatcggcccgcgcatggccgagttgagcggttcccggctggccgcgcagcaacagatggaaggcctcctggcgccgcaccggcccaaggagcccgcgtggttcctggccaccgtcggcgtctcgcccgaccaccagggcaagggtctgggcagcgccgtcgtgctccccggagtggaggcggccgagcgcgccggggtgcccgccttcctggagacctccgcgccccgcaacctccccttctacgagcggctcggcttcaccgtcaccgccgacgtcgaggtgcccgaaggaccgcgcacctggtgcatgacccgcaagcccggtgcctga

SEQ ID NO: 20203 - DNA, 1965 bp, synthetic construct
  source 1..1965: mol_type = other DNA
atggccttaccagtgaccgccttgctcctgccgctggccttgctgctccacgccgccaggccggaactgcaaagcgtgctgacacagcctcctagcgcctctggaacacctggacagagagtgacaatcagctgctccggcagctccagcaacatcggcagcaactacgtgaactggtatcagcagctgcctggcacagcccctaaactgctgatctacggcgactaccagaggccaagcggcgtgccagatagattcagcggcagcaagtctggcacaagcgccagcctggctatctctggactgagaagcgaggacgaggccgactactactgtgccaccagagatgatagcctgagcggcagcgtggtgtttggcacaggcacaaagctgacagtgctgggcctcgagggacagcctaaggccaatcctaccgtgacactgttccctccaagcagcgaagaactccaggccaacaaggccacacttgtgtgcctgatctccgacttctaccctggggctgtgacagtggcttggaaggccgatggatctcctgtgaaagccggcgtggaaaccaccaagccatccaagcagagcaacaacaaatacgccgccagctcctacctgagcctgacacctgagcagtggaagtcccacagatcctacagctgccaagtgacccacgaaggcagcaccgtggaaaagacagtggcccctacagagtgcagccccatcaagaccgatgtgattacaatggaccccaaggacaactgctccaaggacgccaacgataccctgctgctccagctgaccaacaccagcgcctactacatgtacttgttgctgctgctgaagtccgtggtgtacttcgccatcatcacatgctgcctgctgcggagaaccgccttctgctgcaacggcgagaagtctagggccaagcgatctggatctggagcaacaaacttctcactactcaaacaagcaggtgacgtggaggagaatcccgggcctactagtatggactggatttggcgcatccttttccttgtcggcgctgctaccggcgcgcattccttcgaagaagttcagctggttcagagcggagccgaagtgaagaagcctggcgagagcctgaagattagctgcaaaggcagcggctacggcttcaccagctattggatcggctgggtccgacagatgcctggcaaaggactggaatggatgggcatcattcaccccgacgacagcgacaccaagtacagccctagcttccagggccaagtgaccatcagcgccgacaagagcatcagcacagcctacctccagtggtcctctctgaaggccagcgataccgccatgtactactgcgccagcagctacctgagaggactgtggggcggctacttcgatttttggggccagggcacactggtcaccgttagttctacgcgtgcctctacaaagggaccctccgtgtttcctctggctcccagcagcaagtctacaagcggaggaacagccgctctgggctgcctggtcaaggattactttcccgagcctgtgaccgtgtcctggaatagcggagcactgacaagcggcgtgcacacctttccagccgtgctgcaaagcagcggcctgtactctctgagcagcgtggtcacagtgcctagctctagcctgggcacccagacctacatctgcaatgtgaaccacaagcctagcaacaccaaggtggacaagagagtggaacccaagagctgtgaagtgaaaaccgactccaccgaccacgtgaagcccaaagagacagagaacaccaagcagcccagcaagagctgccacaagcccaaggccatcgtgcacaccgagaaagtgaacatgatgagcctgaccgtgctgggcctgcggatgctgttcgccaaaaccgtggccgtgaacttcctgctgaccgccaagctgttcttcctc

SEQ ID NO: 20204 - DNA, 1899 bp, synthetic construct
  source 1..1899: mol_type = other DNA
atggccttaccagtgaccgccttgctcctgccgctggccttgctgctccacgccgccaggccggaactgcaaagcgtgctgacacagcctcctagcgcctctggaacacctggacagagagtgacaatcagctgctccggcagctccagcaacatcggcagcaactacgtgaactggtatcagcagctgcctggcacagcccctaaactgctgatctacggcgactaccagaggccaagcggcgtgccagatagattcagcggcagcaagtctggcacaagcgccagcctggctatctctggactgagaagcgaggacgaggccgactactactgtgccaccagagatgatagcctgagcggcagcgtggtgtttggcacaggcacaaagctgacagtgctgggcctcgagggacagcctaaggccaatcctaccgtgacactgttccctccaagcagcgaagaactccaggccaacaaggccacacttgtgtgcctgatctccgacttctaccctggggctgtgacagtggcttggaaggccgatggatctcctgtgaaagccggcgtggaaaccaccaagccatccaagcagagcaacaacaaatacgccgccagctcctacctgagcctgacacctgagcagtggaagtcccacagatcctacagctgccaagtgacccacgaaggcagcaccgtggaaaagacagtggcccctacagagtgcagcggcagagccgattgcggcatcaccagcgccagctaccaccagggcgtgctgagcgccaccatcctgtacgagatcctgctgggcaaggccaccctgtacgccgtgctggtgtctgccctggtgctgatggctatggtcaagcggaaggacagccggggaagggccaagcgatctggatctggagcaacaaacttctcactactcaaacaagcaggtgacgtggaggagaatcccgggcctactagtatggactggatttggcgcatccttttccttgtcggcgctgctaccggcgcgcattccttcgaagaagttcagctggttcagagcggagccgaagtgaagaagcctggcgagagcctgaagattagctgcaaaggcagcggctacggcttcaccagctattggatcggctgggtccgacagatgcctggcaaaggactggaatggatgggcatcattcaccccgacgacagcgacaccaagtacagccctagcttccagggccaagtgaccatcagcgccgacaagagcatcagcacagcctacctccagtggtcctctctgaaggccagcgataccgccatgtactactgcgccagcagctacctgagaggactgtggggcggctacttcgatttttggggccagggcacactggtcaccgttagttctacgcgtgcctctacaaagggaccctccgtgtttcctctggctcccagcagcaagtctacaagcggaggaacagccgctctgggctgcctggtcaaggattactttcccgagcctgtgaccgtgtcctggaatagcggagcactgacaagcggcgtgcacacctttccagccgtgctgcaaagcagcggcctgtactctctgagcagcgtggtcacagtgcctagctctagcctgggcacccagacctacatctgcaatgtgaaccacaagcctagcaacaccaaggtggacaagagagtggaacccaagagctgtatccccgaggacacattcttcccaagcagcgacgtgccctgcgacgtgaagctggtggaaaagagcttcgagacagacaccaacctgaacttccagaacctgagcgtgatcggcttcagaatcctgctgctgaaagtggccggctttaacctgctgatgaccctgcggctgtggtccagc

SEQ ID NO: 20205 - DNA, 1899 bp, synthetic construct
  source 1..1899: mol_type = other DNA
atggccttaccagtgaccgccttgctcctgccgctggccttgctgctccacgccgccaggccggaactgcaaagcgtgctgacacagcctcctagcgcctctggaacacctggacagagagtgacaatcagctgctccggcagctccagcaacatcggcagcaactacgtgaactggtatcagcagctgcctggcacagcccctaaactgctgatctacggcgactaccagaggccaagcggcgtgccagatagattcagcggcagcaagtctggcacaagcgccagcctggctatctctggactgagaagcgaggacgaggccgactactactgtgccaccagagatgatagcctgagcggcagcgtggtgtttggcacaggcacaaagctgacagtgctgggcctcgagggacagcctaaggccaatcctaccgtgacactgttccctccaagcagcgaagaactccaggccaacaaggccacacttgtgtgcctgatctccgacttctaccctggggctgtgacagtggcttggaaggccgatggatctcctgtgaaagccggcgtggaaaccaccaagccatccaagcagagcaacaacaaatacgccgccagctcctacctgagcctgacacctgagcagtggaagtcccacagatcctacagctgccaagtgacccacgaaggcagcaccgtggaaaagacagtggcccctacagagtgcagcggcagagccgattgcggctttaccagcgagagctaccagcagggcgtgctgagcgccaccatcctgtacgagatcctgctgggcaaggccaccctgtacgccgtgctggtgtctgccctggtgctgatggctatggtcaagcggaaggacagccggggaagggccaagcgatctggatctggagcaacaaacttctcactactcaaacaagcaggtgacgtggaggagaatcccgggcctactagtatggactggatttggcgcatccttttccttgtcggcgctgctaccggcgcgcattccttcgaagaagttcagctggttcagagcggagccgaagtgaagaagcctggcgagagcctgaagattagctgcaaaggcagcggctacggcttcaccagctattggatcggctgggtccgacagatgcctggcaaaggactggaatggatgggcatcattcaccccgacgacagcgacaccaagtacagccctagcttccagggccaagtgaccatcagcgccgacaagagcatcagcacagcctacctccagtggtcctctctgaaggccagcgataccgccatgtactactgcgccagcagctacctgagaggactgtggggcggctacttcgatttttggggccagggcacactggtcaccgttagttctacgcgtgcctctacaaagggaccctccgtgtttcctctggctcccagcagcaagtctacaagcggaggaacagccgctctgggctgcctggtcaaggattactttcccgagcctgtgaccgtgtcctggaatagcggagcactgacaagcggcgtgcacacctttccagccgtgctgcaaagcagcggcctgtactctctgagcagcgtggtcacagtgcctagctctagcctgggcacccagacctacatctgcaatgtgaaccacaagcctagcaacaccaaggtggacaagagagtggaacccaagagctgtatccccgaggacacattcttcccaagccccgagagcagctgcgacgtgaagctggtggaaaagagcttcgagacagacaccaacctgaacttccagaacctgagcgtgatcggcttcagaatcctgctgctgaaagtggccggctttaacctgctgatgaccctgcggctgtggtccagc

SEQ ID NO: 20206 - DNA, 1377 bp, synthetic construct
  source 1..1377: mol_type = other DNA
atggccttaccagtgaccgccttgctcctgccgctggccttgctgctccacgccgccaggccggaactgcaaagcgtgctgacacagcctcctagcgcctctggaacacctggacagagagtgacaatcagctgctccggcagctccagcaacatcggcagcaactacgtgaactggtatcagcagctgcctggcacagcccctaaactgctgatctacggcgactaccagaggccaagcggcgtgccagatagattcagcggcagcaagtctggcacaagcgccagcctggctatctctggactgagaagcgaggacgaggccgactactactgtgccaccagagatgatagcctgagcggcagcgtggtgtttggcacaggcacaaagctgacagtgctgggcggcggaggcggaagtggaggcggaggatctggcggcggaggctctgaagttcagctggttcagagcggagccgaagtgaagaagcctggcgagagcctgaagattagctgcaaaggcagcggctacggcttcaccagctattggatcggctgggtccgacagatgcctggcaaaggactggaatggatgggcatcattcaccccgacgacagcgacaccaagtacagccctagcttccagggccaagtgaccatcagcgccgacaagagcatcagcacagcctacctccagtggtcctctctgaaggccagcgataccgccatgtactactgcgccagcagctacctgagaggactgtggggcggctacttcgatttttggggccagggcacactggtcaccgttagttctacgcgtgacggtaacgaggagatgggaggaatcactcaaaccccttacaaagtctcaatttcaggaacaactgttatccttacatgtccccagtatcctggcagcgagatcctttggcagcataacgacaagaatatagggggagatgaagacgataagaatatcggatctgacgaggatcacttgagcctgaaagagttctccgagcttgaacaaagcggatattatgtgtgctatccgcgcgggtcaaagccggaagacgctaacttttacctttatctccgagccagagtgtgcgaaaattgcatggaaatggacgttatgtccgttgctacaatagttatcgtagatatatgcatcacgggtggactgcttctgctggtttattattggtccaagaatagaaaggccaaagctaaacccgtgaccagaggcgctggcgcaggcggaaggcaaaggggacaaaacaaagaacggccaccaccagtgccaaatccagattatgagcctattcggaaaggacagagggacctgtactctggcctgaatcagagaagaatc

SEQ ID NO: 20207 - DNA, 1272 bp, synthetic construct
  source 1..1272: mol_type = other DNA
atggccttaccagtgaccgccttgctcctgccgctggccttgctgctccacgccgccaggccggaactgcaaagcgtgctgacacagcctcctagcgcctctggaacacctggacagagagtgacaatcagctgctccggcagctccagcaacatcggcagcaactacgtgaactggtatcagcagctgcctggcacagcccctaaactgctgatctacggcgactaccagaggccaagcggcgtgccagatagattcagcggcagcaagtctggcacaagcgccagcctggctatctctggactgagaagcgaggacgaggccgactactactgtgccaccagagatgatagcctgagcggcagcgtggtgtttggcacaggcacaaagctgacagtgctgggcggcggaggcggaagtggaggcggaggatctggcggcggaggctctgaagttcagctggttcagagcggagccgaagtgaagaagcctggcgagagcctgaagattagctgcaaaggcagcggctacggcttcaccagctattggatcggctgggtccgacagatgcctggcaaaggactggaatggatgggcatcattcaccccgacgacagcgacaccaagtacagccctagcttccagggccaagtgaccatcagcgccgacaagagcatcagcacagcctacctccagtggtcctctctgaaggccagcgataccgccatgtactactgcgccagcagctacctgagaggactgtggggcggctacttcgatttttggggccagggcacactggtcaccgttagttctacgcgtttcaagatccccatcgaggaactggaagatcgggtgttcgtgaactgcaacacctctatcacctgggtggaaggcaccgtgggaacactgctgagcgacatcaccagactggacctcggcaagcggattctggaccctcggggcatctacagatgcaacggcaccgacatctacaaggacaaagaaagcaccgtgcaggtccactacagaatgtgccagtcctgcgtggaactggaccctgctacagtggccggcatcatcgtgaccgatgtgatcgctactctgctgctggctctgggagtgttctgcttcgccggacacgaaacaggcagactgtctggcgctgccgatacacaggccctgctgagaaacgaccaagtgtatcagcccctgcgcgacagagatgatgcccagtattctcacctcggcggcaactgggctagaaacaag

SEQ ID NO: 20208 - DNA, 1302 bp, synthetic construct
  source 1..1302: mol_type = other DNA
atggccttaccagtgaccgccttgctcctgccgctggccttgctgctccacgccgccaggccggaactgcaaagcgtgctgacacagcctcctagcgcctctggaacacctggacagagagtgacaatcagctgctccggcagctccagcaacatcggcagcaactacgtgaactggtatcagcagctgcctggcacagcccctaaactgctgatctacggcgactaccagaggccaagcggcgtgccagatagattcagcggcagcaagtctggcacaagcgccagcctggctatctctggactgagaagcgaggacgaggccgactactactgtgccaccagagatgatagcctgagcggcagcgtggtgtttggcacaggcacaaagctgacagtgctgggcggcggaggcggaagtggaggcggaggatctggcggcggaggctctgaagttcagctggttcagagcggagccgaagtgaagaagcctggcgagagcctgaagattagctgcaaaggcagcggctacggcttcaccagctattggatcggctgggtccgacagatgcctggcaaaggactggaatggatgggcatcattcaccccgacgacagcgacaccaagtacagccctagcttccagggccaagtgaccatcagcgccgacaagagcatcagcacagcctacctccagtggtcctctctgaaggccagcgataccgccatgtactactgcgccagcagctacctgagaggactgtggggcggctacttcgatttttggggccagggcacactggtcaccgttagttctacgcgtcagagcatcaagggcaaccacctggtcaaggtgtacgactaccaagaggacggcagcgtgctgctgacatgtgatgccgaggccaagaacatcacctggtttaaggacggcaagatgatcggcttcctgaccgaggacaagaagaagtggaacctgggcagcaacgctaaggaccccagaggcatgtatcagtgcaagggcagccagaacaagagcaagcccctccaggtgtactaccggatgtgccagaactgcatcgagctgaacgccgctaccatcagcggctttctgttcgccgagatcgtgtccatcttcgtgctggccgtgggcgtgtactttatcgctggacaggatggcgtgcggcagagcagagcttccgataagcaaaccctgctgcctaacgaccagctgtaccagcctctgaaggacagagaggacgaccagtacagccacctccagggcaatcagctgagaagaaac

SEQ ID NO: 20209 - DNA, 1251 bp, synthetic construct
  source 1..1251: mol_type = other DNA
atggccttaccagtgaccgccttgctcctgccgctggccttgctgctccacgccgccaggccggaactgcaaagcgtgctgacacagcctcctagcgcctctggaacacctggacagagagtgacaatcagctgctccggcagctccagcaacatcggcagcaactacgtgaactggtatcagcagctgcctggcacagcccctaaactgctgatctacggcgactaccagaggccaagcggcgtgccagatagattcagcggcagcaagtctggcacaagcgccagcctggctatctctggactgagaagcgaggacgaggccgactactactgtgccaccagagatgatagcctgagcggcagcgtggtgtttggcacaggcacaaagctgacagtgctgggcggcggaggcggaagtggaggcggaggatctggcggcggaggctctgaagttcagctggttcagagcggagccgaagtgaagaagcctggcgagagcctgaagattagctgcaaaggcagcggctacggcttcaccagctattggatcggctgggtccgacagatgcctggcaaaggactggaatggatgggcatcattcaccccgacgacagcgacaccaagtacagccctagcttccagggccaagtgaccatcagcgccgacaagagcatcagcacagcctacctccagtggtcctctctgaaggccagcgataccgccatgtactactgcgccagcagctacctgagaggactgtggggcggctacttcgatttttggggccagggcacactggtcaccgttagttctacgcgtcagagttttgggttgttggaccctaaattgtgctatctgttggacggaatcctgttcatttacggagtgatcctgaccgcattgttcctgcgggttaagttttccagatccgcagacgcacccgcttaccaacaagggcagaaccaactctacaatgaacttaatttggggcggagggaagagtacgacgttctggacaaaaggaggggacgagatcccgagatgggcggaaagcctcagcgaaggaagaatccgcaagaggggctttataacgaactccagaaagataaaatggcagaagcctatagtgagattgggatgaagggagaaaggaggaggggtaaaggtcacgatgggttgtaccaaggattgagcacagccactaaagatacctatgatgcgctccacatgcaggccctgccgccaaga

SEQ ID NO: 20210 - DNA, 1377 bp, synthetic construct
  source 1..1377: mol_type = other DNA
atggccttaccagtgaccgccttgctcctgccgctggccttgctgctccacgccgccaggccggaagttcagctggttcagagcggagccgaagtgaagaagcctggcgagagcctgaagattagctgcaaaggcagcggctacggcttcaccagctattggatcggctgggtccgacagatgcctggcaaaggactggaatggatgggcatcattcaccccgacgacagcgacaccaagtacagccctagcttccagggccaagtgaccatcagcgccgacaagagcatcagcacagcctacctccagtggtcctctctgaaggccagcgataccgccatgtactactgcgccagcagctacctgagaggactgtggggcggctacttcgatttttggggccagggcacactggtcaccgttagttctggcggaggcggaagtggaggcggaggatctggcggcggaggctctgaactgcaaagcgtgctgacacagcctcctagcgcctctggaacacctggacagagagtgacaatcagctgctccggcagctccagcaacatcggcagcaactacgtgaactggtatcagcagctgcctggcacagcccctaaactgctgatctacggcgactaccagaggccaagcggcgtgccagatagattcagcggcagcaagtctggcacaagcgccagcctggctatctctggactgagaagcgaggacgaggccgactactactgtgccaccagagatgatagcctgagcggcagcgtggtgtttggcacaggcacaaagctgacagtgctgggcacgcgtgacggtaacgaggagatgggaggaatcactcaaaccccttacaaagtctcaatttcaggaacaactgttatccttacatgtccccagtatcctggcagcgagatcctttggcagcataacgacaagaatatagggggagatgaagacgataagaatatcggatctgacgaggatcacttgagcctgaaagagttctccgagcttgaacaaagcggatattatgtgtgctatccgcgcgggtcaaagccggaagacgctaacttttacctttatctccgagccagagtgtgcgaaaattgcatggaaatggacgttatgtccgttgctacaatagttatcgtagatatatgcatcacgggtggactgcttctgctggtttattattggtccaagaatagaaaggccaaagctaaacccgtgaccagaggcgctggcgcaggcggaaggcaaaggggacaaaacaaagaacggccaccaccagtgccaaatccagattatgagcctattcggaaaggacagagggacctgtactctggcctgaatcagagaagaatc

SEQ ID NO: 20211 - DNA, 1272 bp, synthetic construct
  source 1..1272: mol_type = other DNA
atggccttaccagtgaccgccttgctcctgccgctggccttgctgctccacgccgccaggccggaagttcagctggttcagagcggagccgaagtgaagaagcctggcgagagcctgaagattagctgcaaaggcagcggctacggcttcaccagctattggatcggctgggtccgacagatgcctggcaaaggactggaatggatgggcatcattcaccccgacgacagcgacaccaagtacagccctagcttccagggccaagtgaccatcagcgccgacaagagcatcagcacagcctacctccagtggtcctctctgaaggccagcgataccgccatgtactactgcgccagcagctacctgagaggactgtggggcggctacttcgatttttggggccagggcacactggtcaccgttagttctggcggaggcggaagtggaggcggaggatctggcggcggaggctctgaactgcaaagcgtgctgacacagcctcctagcgcctctggaacacctggacagagagtgacaatcagctgctccggcagctccagcaacatcggcagcaactacgtgaactggtatcagcagctgcctggcacagcccctaaactgctgatctacggcgactaccagaggccaagcggcgtgccagatagattcagcggcagcaagtctggcacaagcgccagcctggctatctctggactgagaagcgaggacgaggccgactactactgtgccaccagagatgatagcctgagcggcagcgtggtgtttggcacaggcacaaagctgacagtgctgggcacgcgtttcaagatccccatcgaggaactggaagatcgggtgttcgtgaactgcaacacctctatcacctgggtggaaggcaccgtgggaacactgctgagcgacatcaccagactggacctcggcaagcggattctggaccctcggggcatctacagatgcaacggcaccgacatctacaaggacaaagaaagcaccgtgcaggtccactacagaatgtgccagtcctgcgtggaactggaccctgctacagtggccggcatcatcgtgaccgatgtgatcgctactctgctgctggctctgggagtgttctgcttcgccggacacgaaacaggcagactgtctggcgctgccgatacacaggccctgctgagaaacgaccaagtgtatcagcccctgcgcgacagagatgatgcccagtattctcacctcggcggcaactgggctagaaacaag

SEQ ID NO: 20212 - DNA, 1302 bp, synthetic construct
  source 1..1302: mol_type = other DNA
atggccttaccagtgaccgccttgctcctgccgctggccttgctgctccacgccgccaggccggaagttcagctggttcagagcggagccgaagtgaagaagcctggcgagagcctgaagattagctgcaaaggcagcggctacggcttcaccagctattggatcggctgggtccgacagatgcctggcaaaggactggaatggatgggcatcattcaccccgacgacagcgacaccaagtacagccctagcttccagggccaagtgaccatcagcgccgacaagagcatcagcacagcctacctccagtggtcctctctgaaggccagcgataccgccatgtactactgcgccagcagctacctgagaggactgtggggcggctacttcgatttttggggccagggcacactggtcaccgttagttctggcggaggcggaagtggaggcggaggatctggcggcggaggctctgaactgcaaagcgtgctgacacagcctcctagcgcctctggaacacctggacagagagtgacaatcagctgctccggcagctccagcaacatcggcagcaactacgtgaactggtatcagcagctgcctggcacagcccctaaactgctgatctacggcgactaccagaggccaagcggcgtgccagatagattcagcggcagcaagtctggcacaagcgccagcctggctatctctggactgagaagcgaggacgaggccgactactactgtgccaccagagatgatagcctgagcggcagcgtggtgtttggcacaggcacaaagctgacagtgctgggcacgcgtcagagcatcaagggcaaccacctggtcaaggtgtacgactaccaagaggacggcagcgtgctgctgacatgtgatgccgaggccaagaacatcacctggtttaaggacggcaagatgatcggcttcctgaccgaggacaagaagaagtggaacctgggcagcaacgctaaggaccccagaggcatgtatcagtgcaagggcagccagaacaagagcaagcccctccaggtgtactaccggatgtgccagaactgcatcgagctgaacgccgctaccatcagcggctttctgttcgccgagatcgtgtccatcttcgtgctggccgtgggcgtgtactttatcgctggacaggatggcgtgcggcagagcagagcttccgataagcaaaccctgctgcctaacgaccagctgtaccagcctctgaaggacagagaggacgaccagtacagccacctccagggcaatcagctgagaagaaac

SEQ ID NO: 20213 - DNA, 1251 bp, synthetic construct
  source 1..1251: mol_type = other DNA
atggccttaccagtgaccgccttgctcctgccgctggccttgctgctccacgccgccaggccggaagttcagctggttcagagcggagccgaagtgaagaagcctggcgagagcctgaagattagctgcaaaggcagcggctacggcttcaccagctattggatcggctgggtccgacagatgcctggcaaaggactggaatggatgggcatcattcaccccgacgacagcgacaccaagtacagccctagcttccagggccaagtgaccatcagcgccgacaagagcatcagcacagcctacctccagtggtcctctctgaaggccagcgataccgccatgtactactgcgccagcagctacctgagaggactgtggggcggctacttcgatttttggggccagggcacactggtcaccgttagttctggcggaggcggaagtggaggcggaggatctggcggcggaggctctgaactgcaaagcgtgctgacacagcctcctagcgcctctggaacacctggacagagagtgacaatcagctgctccggcagctccagcaacatcggcagcaactacgtgaactggtatcagcagctgcctggcacagcccctaaactgctgatctacggcgactaccagaggccaagcggcgtgccagatagattcagcggcagcaagtctggcacaagcgccagcctggctatctctggactgagaagcgaggacgaggccgactactactgtgccaccagagatgatagcctgagcggcagcgtggtgtttggcacaggcacaaagctgacagtgctgggcacgcgtcagagttttgggttgttggaccctaaattgtgctatctgttggacggaatcctgttcatttacggagtgatcctgaccgcattgttcctgcgggttaagttttccagatccgcagacgcacccgcttaccaacaagggcagaaccaactctacaatgaacttaatttggggcggagggaagagtacgacgttctggacaaaaggaggggacgagatcccgagatgggcggaaagcctcagcgaaggaagaatccgcaagaggggctttataacgaactccagaaagataaaatggcagaagcctatagtgagattgggatgaagggagaaaggaggaggggtaaaggtcacgatgggttgtaccaaggattgagcacagccactaaagatacctatgatgcgctccacatgcaggccctgccgccaaga

SEQ ID NO: 20214 - DNA, 1536 bp, synthetic construct
  source 1..1536: mol_type = other DNA
atggccttaccagtgaccgccttgctcctgccgctggccttgctgctccacgccgccaggccggaactgcaaagcgtgctgacacagcctcctagcgcctctggaacacctggacagagagtgacaatcagctgctccggcagctccagcaacatcggcagcaactacgtgaactggtatcagcagctgcctggcacagcccctaaactgctgatctacggcgactaccagaggccaagcggcgtgccagatagattcagcggcagcaagtctggcacaagcgccagcctggctatctctggactgagaagcgaggacgaggccgactactactgtgccaccagagatgatagcctgagcggcagcgtggtgtttggcacaggcacaaagctgacagtgctgggcggcggaggcggaagtggaggcggaggatctggcggcggaggctctgaagttcagctggttcagagcggagccgaagtgaagaagcctggcgagagcctgaagattagctgcaaaggcagcggctacggcttcaccagctattggatcggctgggtccgacagatgcctggcaaaggactggaatggatgggcatcattcaccccgacgacagcgacaccaagtacagccctagcttccagggccaagtgaccatcagcgccgacaagagcatcagcacagcctacctccagtggtcctctctgaaggccagcgataccgccatgtactactgcgccagcagctacctgagaggactgtggggcggctacttcgatttttggggccagggcacactggtcaccgttagttctacgcgtggaatgaggactgaggatcttcccaaagctgtcgtctttctcgaaccccaatggtatcgggtgctcgaaaaagactctgtgacactgaaatgccaaggggcctactctcccgaggacaactccacacagtggtttcataatgagtccctcatcagctctcaggccagctcttatttcattgatgccgctacagtggacgactccggcgagtatcggtgtcagaccaatctgtctacactgtctgaccccgtgcagcttgaggtccacattggatggttgctcttgcaagccccacgctgggttttcaaagaggaagatccaatccatctgcggtgccacagctggaaaaacaccgctctccacaaagtcacatacctgcaaaatggcaaaggacgcaaatacttccatcacaattccgatttttacattccgaaggctaccctgaaagacagcggcagctatttctgccggggactcgtcggctccaagaatgtgtcctccgaaaccgtgaatatcacgattacccaaggactggctgtgcctacaatctctagcttctttccgcctggataccaagtctccttctgtcttgtgatggtcctcctgtttgctgtggacacaggactgtacttttccgtgaaaacgaacatccgcagctccacacgcgattggaaagatcacaagtttaaatggcgcaaagatccccaggacaag

SEQ ID NO: 20215 - DNA, 2385 bp, synthetic construct
  source 1..2385: mol_type = other DNA
atggccttaccagtgaccgccttgctcctgccgctggccttgctgctccacgccgccaggccggaactgcaaagcgtgctgacacagcctcctagcgcctctggaacacctggacagagagtgacaatcagctgctccggcagctccagcaacatcggcagcaactacgtgaactggtatcagcagctgcctggcacagcccctaaactgctgatctacggcgactaccagaggccaagcggcgtgccagatagattcagcggcagcaagtctggcacaagcgccagcctggctatctctggactgagaagcgaggacgaggccgactactactgtgccaccagagatgatagcctgagcggcagcgtggtgtttggcacaggcacaaagctgacagtgctgggcggcggaggcggaagtggaggcggaggatctggcggcggaggctctgaagttcagctggttcagagcggagccgaagtgaagaagcctggcgagagcctgaagattagctgcaaaggcagcggctacggcttcaccagctattggatcggctgggtccgacagatgcctggcaaaggactggaatggatgggcatcattcaccccgacgacagcgacaccaagtacagccctagcttccagggccaagtgaccatcagcgccgacaagagcatcagcacagcctacctccagtggtcctctctgaaggccagcgataccgccatgtactactgcgccagcagctacctgagaggactgtggggcggctacttcgatttttggggccagggcacactggtcaccgttagttctacgcgtggaggctctggacaacaacagaccctgcctaaaccattcatctgggctgaaccccactttatggttccgaaagagaaacaagtcacgatttgttgccaagggaattacggggccgtcgagtatcagctccactttgagggctccctgtttgctgtggatcggcccaagccacctgaaagaatcaacaaagtccaattctatattcctgatatgaactcccgcatggcaggccagtattcatgtatctaccgcgtgggagaactttggagtgaaccctctaacctgctggacctcgtcgtgacagagatgtatgatacacccacactgtctgtgcaccctgggccagaagttatcagcggagaaaaagttaccttttattgccgcctcgataccgctacctctatgttcctcttgctgaaagagggccgcagctctcacgtgcagcgaggctacggaaaggtccaagctgagtttcctctcggccccgtgaccaccgctcacaggggcacatatagatgttttggctcttataacaatcatgcctggtcattcccatccgagcctgtgaaactgctggtcacaggcgatattgagaatacctctctggccccagaagatcctacattccccgccgacacatggggaacatatctgctgacaaccgaaaccgggctgcaaaaggaccatgctctgtgggatcataccgctcagaatctgcttcggatggggcttgcattcctggtcctggtggctcttgtctggtttctggtcgaggactggctgtcccggaagagaaccagagaaagagcttccagggccagcacctgggaaggcagacgcagactgaatactcagaccctgcgcgccaagagaagcggatctggcgtgaagcagaccctgaatttcgacctgctgaagctggctggcgacgtggaatccaacccaggcccttctagaggccatatgaccgagtacaagcccacggtgcgcctcgccacccgcgacgacgtccccagggccgtacgcaccctcgccgccgcgttcgccgactaccccgccacgcgccacaccgtcgatccggaccgccacatcgagcgggtcaccgagctgcaagaactcttcctcacgcgcgtcgggctcgacatcggcaaggtgtgggtcgcggacgacggcgccgcggtggcggtctggaccacgccggagagcgtcgaagcgggggcggtgttcgccgagatcggcccgcgcatggccgagttgagcggttcccggctggccgcgcagcaacagatggaaggcctcctggcgccgcaccggcccaaggagcccgcgtggttcctggccaccgtcggcgtctcgcccgaccaccagggcaagggtctgggcagcgccgtcgtgctccccggagtggaggcggccgagcgcgccggggtgcccgccttcctggagacctccgcgccccgcaacctccccttctacgagcggctcggcttcaccgtcaccgccgacgtcgaggtgcccgaaggaccgcgcacctggtgcatgacccgcaagcccggtgcctga

SEQ ID NO: 20216 - DNA, 1884 bp, synthetic construct
  source 1..1884: mol_type = other DNA
atggccttaccagtgaccgccttgctcctgccgctggccttgctgctccacgccgccaggccggaactgcaaagcgtgctgacacagcctcctagcgcctctggaacacctggacagagagtgacaatcagctgctccggcagctccagcaacatcggcagcaactacgtgaactggtatcagcagctgcctggcacagcccctaaactgctgatctacggcgactaccagaggccaagcggcgtgccagatagattcagcggcagcaagtctggcacaagcgccagcctggctatctctggactgagaagcgaggacgaggccgactactactgtgccaccagagatgatagcctgagcggcagcgtggtgtttggcacaggcacaaagctgacagtgctgggcggcggaggcggaagtggaggcggaggatctggcggcggaggctctgaagttcagctggttcagagcggagccgaagtgaagaagcctggcgagagcctgaagattagctgcaaaggcagcggctacggcttcaccagctattggatcggctgggtccgacagatgcctggcaaaggactggaatggatgggcatcattcaccccgacgacagcgacaccaagtacagccctagcttccagggccaagtgaccatcagcgccgacaagagcatcagcacagcctacctccagtggtcctctctgaaggccagcgataccgccatgtactactgcgccagcagctacctgagaggactgtggggcggctacttcgatttttggggccagggcacactggtcaccgttagttctacgcgtaaaattgaagttatgtatcctcctccttacctagacaatgagaagagcaatggaaccattatccatgtgaaaggggcgcgtggcgatattgagaatacctctctggccccagaagatcctacattccccgccgacacatggggaacatatctgctgacaaccgaaaccgggctgcaaaaggaccatgctctgtgggatcataccgctcagaatctgcttcggatggggcttgcattcctggtcctggtggctcttgtctggtttctggtcgaggactggctgtcccggaagagaaccagagaaagagcttccagggccagcacctgggaaggcagacgcagactgaatactcagaccctgcgcgccaagagaagcggatctggcgtgaagcagaccctgaatttcgacctgctgaagctggctggcgacgtggaatccaacccaggcccttctagaggccatatgaccgagtacaagcccacggtgcgcctcgccacccgcgacgacgtccccagggccgtacgcaccctcgccgccgcgttcgccgactaccccgccacgcgccacaccgtcgatccggaccgccacatcgagcgggtcaccgagctgcaagaactcttcctcacgcgcgtcgggctcgacatcggcaaggtgtgggtcgcggacgacggcgccgcggtggcggtctggaccacgccggagagcgtcgaagcgggggcggtgttcgccgagatcggcccgcgcatggccgagttgagcggttcccggctggccgcgcagcaacagatggaaggcctcctggcgccgcaccggcccaaggagcccgcgtggttcctggccaccgtcggcgtctcgcccgaccaccagggcaagggtctgggcagcgccgtcgtgctccccggagtggaggcggccgagcgcgccggggtgcccgccttcctggagacctccgcgccccgcaacctccccttctacgagcggctcggcttcaccgtcaccgccgacgtcgaggtgcccgaaggaccgcgcacctggtgcatgacccgcaagcccggtgcctga

SEQ ID NO: 20217 - DNA, 2145 bp, synthetic construct
  source 1..2145: mol_type = other DNA
atggccttaccagtgaccgccttgctcctgccgctggccttgctgctccacgccgccaggccggaactgcaaagcgtgctgacacagcctcctagcgcctctggaacacctggacagagagtgacaatcagctgctccggcagctccagcaacatcggcagcaactacgtgaactggtatcagcagctgcctggcacagcccctaaactgctgatctacggcgactaccagaggccaagcggcgtgccagatagattcagcggcagcaagtctggcacaagcgccagcctggctatctctggactgagaagcgaggacgaggccgactactactgtgccaccagagatgatagcctgagcggcagcgtggtgtttggcacaggcacaaagctgacagtgctgggcggcggaggcggaagtggaggcggaggatctggcggcggaggctctgaagttcagctggttcagagcggagccgaagtgaagaagcctggcgagagcctgaagattagctgcaaaggcagcggctacggcttcaccagctattggatcggctgggtccgacagatgcctggcaaaggactggaatggatgggcatcattcaccccgacgacagcgacaccaagtacagccctagcttccagggccaagtgaccatcagcgccgacaagagcatcagcacagcctacctccagtggtcctctctgaaggccagcgataccgccatgtactactgcgccagcagctacctgagaggactgtggggcggctacttcgatttttggggccagggcacactggtcaccgttagttctacgcgtctgtgggtgtcccagccacctgaaattcggacactggaaggctcctccgcctttctgccctgtagctttaacgccagccaggggagactcgccatcggctctgtgacatggttccgggatgaagtcgtccctggaaaagaagttcgcaacggaacaccagagttcagaggcagactcgccccactggcaagctccagattcctgcatgaccatcaggctgaactgcacattagggacgtgcggggccacgatgcctccatctatgtgtgtcgggtcgaagtgcttggactcggcgtcggaactggaaacggcactaggctggtggtcgagaaagaacatccacagcttggcgctggcaccgtcctgttgcttagagccggattctatgccgtcagcttcctgtccgtggctgtggggtctacagtgtattaccagggaaaatgtctcacctggaaaggccccagacgccagcttccagctgttgttcctgctccactgccaccaccttgtggctcctctgctcacttgcttccaccagtgcctggcggacgcgccaagagaagcggatctggcgtgaagcagaccctgaatttcgacctgctgaagctggctggcgacgtggaatccaacccaggcccttctagaatgtaccggatgcagctgctgagctgtatcgccctgtctctggccctggtcacaaatagcgcccctaccagcagcagcaccaagaaaacccagctgcaactggaacacctcctgctggacctccagatgatcctgaacggcatcaacaactacaagaaccccaagctgaccgagatgctgaccgccaagttctacatgcccaagaaggccaccgagctgaagcacctccagtgcctggaagaggaactgaagcccctggaagaagtgctgaatctggcccagagcaagaacttccacctgaggccaagggacctgatctccaacatcaacgtgatcgtgctggaactgaaaggcagcgagacaaccttcatgtgcgagtacgccgacgagacagctaccatcgtggaatttctgaatcggtggatcaccttctgccagagcatcatcagcaccctgacaaagatcgaagtgatgtaccctcctccttacctggacaacgagaagtccaacggcaccatcatccacgtgaagggcaagcacctgtgtccttctccactgttccccggacctagcaagcctttctgggtgctcgttgttgttggcggcgtgctggcctgttacagcctgctggttaccgtggccttcatcatcttttgggtccgaagcaagcggagctaa

SEQ ID NO: 20218 - DNA, 2073 bp, synthetic construct
  source 1..2073: mol_type = other DNA
atggccttaccagtgaccgccttgctcctgccgctggccttgctgctccacgccgccaggccggaactgcaaagcgtgctgacacagcctcctagcgcctctggaacacctggacagagagtgacaatcagctgctccggcagctccagcaacatcggcagcaactacgtgaactggtatcagcagctgcctggcacagcccctaaactgctgatctacggcgactaccagaggccaagcggcgtgccagatagattcagcggcagcaagtctggcacaagcgccagcctggctatctctggactgagaagcgaggacgaggccgactactactgtgccaccagagatgatagcctgagcggcagcgtggtgtttggcacaggcacaaagctgacagtgctgggcggcggaggcggaagtggaggcggaggatctggcggcggaggctctgaagttcagctggttcagagcggagccgaagtgaagaagcctggcgagagcctgaagattagctgcaaaggcagcggctacggcttcaccagctattggatcggctgggtccgacagatgcctggcaaaggactggaatggatgggcatcattcaccccgacgacagcgacaccaagtacagccctagcttccagggccaagtgaccatcagcgccgacaagagcatcagcacagcctacctccagtggtcctctctgaaggccagcgataccgccatgtactactgcgccagcagctacctgagaggactgtggggcggctacttcgatttttggggccagggcacactggtcaccgttagttctacgcgtctgtgggtgtcccagccacctgaaattcggacactggaaggctcctccgcctttctgccctgtagctttaacgccagccaggggagactcgccatcggctctgtgacatggttccgggatgaagtcgtccctggaaaagaagttcgcaacggaacaccagagttcagaggcagactcgccccactggcaagctccagattcctgcatgaccatcaggctgaactgcacattagggacgtgcggggccacgatgcctccatctatgtgtgtcgggtcgaagtgcttggactcggcgtcggaactggaaacggcactaggctggtggtcgagaaagaacatccacagcttggcgctggcaccgtcctgttgcttagagccggattctatgccgtcagcttcctgtccgtggctgtggggtctacagtgtattaccagggaaaatgtctcacctggaaaggccccagacgccagcttccagctgttgttcctgctccactgccaccaccttgtggctcctctgctcacttgcttccaccagtgcctggcggacgcgccaagagaagcggatctggcgtgaagcagaccctgaatttcgacctgctgaagctggctggcgacgtggaatccaacccaggcccttctagaggccatatgaccgagtacaagcccacggtgcgcctcgccacccgcgacgacgtccccagggccgtacgcaccctcgccgccgcgttcgccgactaccccgccacgcgccacaccgtcgatccggaccgccacatcgagcgggtcaccgagctgcaagaactcttcctcacgcgcgtcgggctcgacatcggcaaggtgtgggtcgcggacgacggcgccgcggtggcggtctggaccacgccggagagcgtcgaagcgggggcggtgttcgccgagatcggcccgcgcatggccgagttgagcggttcccggctggccgcgcagcaacagatggaaggcctcctggcgccgcaccggcccaaggagcccgcgtggttcctggccaccgtcggcgtctcgcccgaccaccagggcaagggtctgggcagcgccgtcgtgctccccggagtggaggcggccgagcgcgccggggtgcccgccttcctggagacctccgcgccccgcaacctccccttctacgagcggctcggcttcaccgtcaccgccgacgtcgaggtgcccgaaggaccgcgcacctggtgcatgacccgcaagcccggtgcctga

SEQ ID NO: 20219 - DNA, 1098 bp, synthetic construct
  source 1..1098: mol_type = other DNA
atggccttaccagtgaccgccttgctcctgccgctggccttgctgctccacgccgccaggccggaactgcaaagcgtgctgacacagcctcctagcgcctctggaacacctggacagagagtgacaatcagctgctccggcagctccagcaacatcggcagcaactacgtgaactggtatcagcagctgcctggcacagcccctaaactgctgatctacggcgactaccagaggccaagcggcgtgccagatagattcagcggcagcaagtctggcacaagcgccagcctggctatctctggactgagaagcgaggacgaggccgactactactgtgccaccagagatgatagcctgagcggcagcgtggtgtttggcacaggcacaaagctgacagtgctgggcggcggaggcggaagtggaggcggaggatctggcggcggaggctctgaagttcagctggttcagagcggagccgaagtgaagaagcctggcgagagcctgaagattagctgcaaaggcagcggctacggcttcaccagctattggatcggctgggtccgacagatgcctggcaaaggactggaatggatgggcatcattcaccccgacgacagcgacaccaagtacagccctagcttccagggccaagtgaccatcagcgccgacaagagcatcagcacagcctacctccagtggtcctctctgaaggccagcgataccgccatgtactactgcgccagcagctacctgagaggactgtggggcggctacttcgatttttggggccagggcacactggtcaccgttagttctacgcgtaaaattgaagttatgtatcctcctccttacctagacaatgagaagagcaatggaaccattatccatgtgaaaggggcgcgtatcacccagggcctggccgtgtctaccatcagcagctttttcccacccggctaccaggtgtccttctgcctcgtgatggtgctgctgttcgccgtggacaccggcctgtacttcagcgtgaaaacaaacatccggtccagcaccagagactggaaggaccacaagttcaagtggcggaaggacccccaggacaag

SEQ ID NO: 20220 - DNA, 1098 bp, synthetic construct
  source 1..1098: mol_type = other DNA
atggccttaccagtgaccgccttgctcctgccgctggccttgctgctccacgccgccaggccggaactgcaaagcgtgctgacacagcctcctagcgcctctggaacacctggacagagagtgacaatcagctgctccggcagctccagcaacatcggcagcaactacgtgaactggtatcagcagctgcctggcacagcccctaaactgctgatctacggcgactaccagaggccaagcggcgtgccagatagattcagcggcagcaagtctggcacaagcgccagcctggctatctctggactgagaagcgaggacgaggccgactactactgtgccaccagagatgatagcctgagcggcagcgtggtgtttggcacaggcacaaagctgacagtgctgggcggcggaggcggaagtggaggcggaggatctggcggcggaggctctgaagttcagctggttcagagcggagccgaagtgaagaagcctggcgagagcctgaagattagctgcaaaggcagcggctacggcttcaccagctattggatcggctgggtccgacagatgcctggcaaaggactggaatggatgggcatcattcaccccgacgacagcgacaccaagtacagccctagcttccagggccaagtgaccatcagcgccgacaagagcatcagcacagcctacctccagtggtcctctctgaaggccagcgataccgccatgtactactgcgccagcagctacctgagaggactgtggggcggctacttcgatttttggggccagggcacactggtcaccgttagttctacgcgtaaaattgaagttatgtatcctcctccttacctagacaatgagaagagcaatggaaccattatccatgtgaaaggggcgcgtattacccaaggactggctgtgcctacaatctctagcttctttccgcctggataccaagtctccttctgtcttgtgatggtcctcctgtttgctgtggacacaggactgtacttttccgtgaaaacgaacatccgcagctccacacgcgattggaaagatcacaagtttaaatggcgcaaagatccccaggacaag

SEQ ID NO: 20221 - DNA, 1035 bp, synthetic construct
  source 1..1035: mol_type = other DNA
atggccttaccagtgaccgccttgctcctgccgctggccttgctgctccacgccgccaggccggaactgcaaagcgtgctgacacagcctcctagcgcctctggaacacctggacagagagtgacaatcagctgctccggcagctccagcaacatcggcagcaactacgtgaactggtatcagcagctgcctggcacagcccctaaactgctgatctacggcgactaccagaggccaagcggcgtgccagatagattcagcggcagcaagtctggcacaagcgccagcctggctatctctggactgagaagcgaggacgaggccgactactactgtgccaccagagatgatagcctgagcggcagcgtggtgtttggcacaggcacaaagctgacagtgctgggcggcggaggcggaagtggaggcggaggatctggcggcggaggctctgaagttcagctggttcagagcggagccgaagtgaagaagcctggcgagagcctgaagattagctgcaaaggcagcggctacggcttcaccagctattggatcggctgggtccgacagatgcctggcaaaggactggaatggatgggcatcattcaccccgacgacagcgacaccaagtacagccctagcttccagggccaagtgaccatcagcgccgacaagagcatcagcacagcctacctccagtggtcctctctgaaggccagcgataccgccatgtactactgcgccagcagctacctgagaggactgtggggcggctacttcgatttttggggccagggcacactggtcaccgttagttctacgcgtaaaattgaagttatgtatcctcctccttacctagacaatgagaagagcaatggaaccattatccatgtgaaaggggcgcgtattacccaaggactggctgtgtctacaatctctagcttctctccgcctggataccaagtctccttctgtcttgtgatggtcctcctgtttgctgtggacacaggactgtacttttccgtgaaaacgaacatc

SEQ ID NO: 20222 - DNA, 1128 bp, synthetic construct
  source 1..1128: mol_type = other DNA
atggccttaccagtgaccgccttgctcctgccgctggccttgctgctccacgccgccaggccggaactgcaaagcgtgctgacacagcctcctagcgcctctggaacacctggacagagagtgacaatcagctgctccggcagctccagcaacatcggcagcaactacgtgaactggtatcagcagctgcctggcacagcccctaaactgctgatctacggcgactaccagaggccaagcggcgtgccagatagattcagcggcagcaagtctggcacaagcgccagcctggctatctctggactgagaagcgaggacgaggccgactactactgtgccaccagagatgatagcctgagcggcagcgtggtgtttggcacaggcacaaagctgacagtgctgggcggcggaggcggaagtggaggcggaggatctggcggcggaggctctgaagttcagctggttcagagcggagccgaagtgaagaagcctggcgagagcctgaagattagctgcaaaggcagcggctacggcttcaccagctattggatcggctgggtccgacagatgcctggcaaaggactggaatggatgggcatcattcaccccgacgacagcgacaccaagtacagccctagcttccagggccaagtgaccatcagcgccgacaagagcatcagcacagcctacctccagtggtcctctctgaaggccagcgataccgccatgtactactgcgccagcagctacctgagaggactgtggggcggctacttcgatttttggggccagggcacactggtcaccgttagttctacgcgtaaaattgaagttatgtatcctcctccttacctagacaatgagaagagcaatggaaccattatccatgtgaaaggggcgcgtgtcgagaaagaacatccacagcttggcgctggcaccgtcctgttgcttagagccggattctatgccgtcagcttcctgtccgtggctgtggggtctacagtgtattaccagggaaaatgtctcacctggaaaggccccagacgccagcttccagctgttgttcctgctccactgccaccaccttgtggctcctctgctcacttgcttccaccagtgcctggcgga

SEQ ID NO: 20223 - DNA, 1371 bp, synthetic construct
  source 1..1371: mol_type = other DNA
atggccttaccagtgaccgccttgctcctgccgctggccttgctgctccacgccgccaggccggaactgcaaagcgtgctgacacagcctcctagcgcctctggaacacctggacagagagtgacaatcagctgctccggcagctccagcaacatcggcagcaactacgtgaactggtatcagcagctgcctggcacagcccctaaactgctgatctacggcgactaccagaggccaagcggcgtgccagatagattcagcggcagcaagtctggcacaagcgccagcctggctatctctggactgagaagcgaggacgaggccgactactactgtgccaccagagatgatagcctgagcggcagcgtggtgtttggcacaggcacaaagctgacagtgctgggcggcggaggcggaagtggaggcggaggatctggcggcggaggctctgaagttcagctggttcagagcggagccgaagtgaagaagcctggcgagagcctgaagattagctgcaaaggcagcggctacggcttcaccagctattggatcggctgggtccgacagatgcctggcaaaggactggaatggatgggcatcattcaccccgacgacagcgacaccaagtacagccctagcttccagggccaagtgaccatcagcgccgacaagagcatcagcacagcctacctccagtggtcctctctgaaggccagcgataccgccatgtactactgcgccagcagctacctgagaggactgtggggcggctacttcgatttttggggccagggcacactggtcaccgttagttctacgcgtaaaattgaagttatgtatcctcctccttacctagacaatgagaagagcaatggaaccattatccatgtgaaaggggcgcgtaagtctgtgcgcttttacctggtcgtcagccctgccagtgcctccactcagacatcttggaccccaagggaccttgtgtcctctcagacacagacacagtcctgcgtgccaccaactgctggcgcaagacaggctccagagtctcccagcacaatccccgtcccttctcagccccagaactccacacttaggccaggaccagctgctccaatcgcactggtcccagtgttctgcggactgctggttgccaagtctctggtgctgagcgcactcctcgtttggtggggcgatatttggtggaaaacgatgatggaattgagatccctcgatacgcagaaagccacatgccaccttcagcaagtcacagacttgccttggaccagcgtcagctctcccgtggaacgggaaattctgtatcatacagtggcccgcaccaagatttccgacgatgacgacgagcacacactg

SEQ ID NO: 20224 - DNA, 1182 bp, synthetic construct
  source 1..1182: mol_type = other DNA
atggccttaccagtgaccgccttgctcctgccgctggccttgctgctccacgccgccaggccggaactgcaaagcgtgctgacacagcctcctagcgcctctggaacacctggacagagagtgacaatcagctgctccggcagctccagcaacatcggcagcaactacgtgaactggtatcagcagctgcctggcacagcccctaaactgctgatctacggcgactaccagaggccaagcggcgtgccagatagattcagcggcagcaagtctggcacaagcgccagcctggctatctctggactgagaagcgaggacgaggccgactactactgtgccaccagagatgatagcctgagcggcagcgtggtgtttggcacaggcacaaagctgacagtgctgggcggcggaggcggaagtggaggcggaggatctggcggcggaggctctgaagttcagctggttcagagcggagccgaagtgaagaagcctggcgagagcctgaagattagctgcaaaggcagcggctacggcttcaccagctattggatcggctgggtccgacagatgcctggcaaaggactggaatggatgggcatcattcaccccgacgacagcgacaccaagtacagccctagcttccagggccaagtgaccatcagcgccgacaagagcatcagcacagcctacctccagtggtcctctctgaaggccagcgataccgccatgtactactgcgccagcagctacctgagaggactgtggggcggctacttcgatttttggggccagggcacactggtcaccgttagttctacgcgtaaaattgaagttatgtatcctcctccttacctagacaatgagaagagcaatggaaccattatccatgtgaaaggggcgcgtggcgatattgagaatacctctctggccccagaagatcctacattccccgccgacacatggggaacatatctgctgacaaccgaaaccgggctgcaaaaggaccatgctctgtgggatcataccgctcagaatctgcttcggatggggcttgcattcctggtcctggtggctcttgtctggtttctggtcgaggactggctgtcccggaagagaaccagagaaagagcttccagggccagcacctgggaaggcagacgcagactgaatactcagaccctg

SEQ ID NO: 20225 - DNA, 2973 bp, synthetic construct
  source 1..2973: mol_type = other DNA
atggccttaccagtgaccgccttgctcctgccgctggccttgctgctccacgccgccaggccggaactgcaaagcgtgctgacacagcctcctagcgcctctggaacacctggacagagagtgacaatcagctgctccggcagctccagcaacatcggcagcaactacgtgaactggtatcagcagctgcctggcacagcccctaaactgctgatctacggcgactaccagaggccaagcggcgtgccagatagattcagcggcagcaagtctggcacaagcgccagcctggctatctctggactgagaagcgaggacgaggccgactactactgtgccaccagagatgatagcctgagcggcagcgtggtgtttggcacaggcacaaagctgacagtgctgggcctcgagggacagcctaaggccaatcctaccgtgacactgttccctccaagcagcgaagaactccaggccaacaaggccacacttgtgtgcctgatctccgacttctaccctggggctgtgacagtggcttggaaggccgatggatctcctgtgaaagccggcgtggaaaccaccaagccatccaagcagagcaacaacaaatacgccgccagctcctacctgagcctgacacctgagcagtggaagtcccacagatcctacagctgccaagtgacccacgaaggcagcaccgtggaaaagacagtggcccctacagagtgcagcggatcccagagcttcggcctgctggaccccaagctgtgctacctgctggatggcatcctgttcatctacggcgtgatcctgaccgccctgttcctgagagtgaagttcagcagaagcgccgacgcccctgcctaccagcagggacagaaccaactgtacaacgagctgaacctgggcagacgggaagagtacgacgtgctggacaagcggagaggcagggaccctgagatgggcggaaagccccagcggagaaagaacccccaggaaggactgtataacgaactccagaaagacaagatggccgaagcctacagcgagatcggcatgaagggcgagcggagaagaggcaagggccacgatggcctgtaccagggcctgagcaccgccaccaaggacacctatgacgccctgcacatgcaggccctgcctccaagaagggccaagcgatctggatctggagcaacaaacttctcactactcaaacaagcaggtgacgtggaggagaatcccgggcctactagtatggactggatttggcgcatccttttccttgtcggcgctgctaccggcgcgcattccttcgaagaagttcagctggttcagagcggagccgaagtgaagaagcctggcgagagcctgaagattagctgcaaaggcagcggctacggcttcaccagctattggatcggctgggtccgacagatgcctggcaaaggactggaatggatgggcatcattcaccccgacgacagcgacaccaagtacagccctagcttccagggccaagtgaccatcagcgccgacaagagcatcagcacagcctacctccagtggtcctctctgaaggccagcgataccgccatgtactactgcgccagcagctacctgagaggactgtggggcggctacttcgatttttggggccagggcacactggtcaccgttagttctacgcgtgcctctacaaagggaccctccgtgtttcctctggctcccagcagcaagtctacaagcggaggaacagccgctctgggctgcctggtcaaggattactttcccgagcctgtgaccgtgtcctggaatagcggagcactgacaagcggcgtgcacacctttccagccgtgctgcaaagcagcggcctgtactctctgagcagcgtggtcacagtgcctagctctagcctgggcacccagacctacatctgcaatgtgaaccacaagcctagcaacaccaaggtggacaagagagtggaacccaagagctgtggtaccggcgacatcgagaacaccagtctggcccctgaggaccctacctttcctgccgatacctggggcacctacctgctgaccacagagacaggactccagaaagatcacgccctgtgggaccacacagcccagaacctgctgagaatgggcctcgcctttctggtgctggttgccctcgtgtggttcctggtggaagattggctgagccggaagcggacaagagagagagccagcagagcctctacctgggagggaagaagaaggctgaacacccagacacttagggccaagcgatctggatctggagcaacaaacttctcactactcaaacaagcaggtgacgtggaggagaatcccgggccttctagaggccatatgaccgagtacaagcccacggtgcgcctcgccacccgcgacgacgtccccagggccgtacgcaccctcgccgccgcgttcgccgactaccccgccacgcgccacaccgtcgatccggaccgccacatcgagcgggtcaccgagctgcaagaactcttcctcacgcgcgtcgggctcgacatcggcaaggtgtgggtcgcggacgacggcgccgcggtggcggtctggaccacgccggagagcgtcgaagcgggggcggtgttcgccgagatcggcccgcgcatggccgagttgagcggttcccggctggccgcgcagcaacagatggaaggcctcctggcgccgcaccggcccaaggagcccgcgtggttcctggccaccgtcggcgtctcgcccgaccaccagggcaagggtctgggcagcgccgtcgtgctccccggagtggaggcggccgagcgcgccggggtgcccgccttcctggagacctccgcgccccgcaacctccccttctacgagcggctcggcttcaccgtcaccgccgacgtcgaggtgcccgaaggaccgcgcacctggtgcatgacccgcaagcccggtgcctga

SEQ ID NO: 20226 - DNA, 3171 bp, synthetic construct
  source 1..3171: mol_type = other DNA
atggccttaccagtgaccgccttgctcctgccgctggccttgctgctccacgccgccaggccggaactgcaaagcgtgctgacacagcctcctagcgcctctggaacacctggacagagagtgacaatcagctgctccggcagctccagcaacatcggcagcaactacgtgaactggtatcagcagctgcctggcacagcccctaaactgctgatctacggcgactaccagaggccaagcggcgtgccagatagattcagcggcagcaagtctggcacaagcgccagcctggctatctctggactgagaagcgaggacgaggccgactactactgtgccaccagagatgatagcctgagcggcagcgtggtgtttggcacaggcacaaagctgacagtgctgggcctcgagggacagcctaaggccaatcctaccgtgacactgttccctccaagcagcgaagaactccaggccaacaaggccacacttgtgtgcctgatctccgacttctaccctggggctgtgacagtggcttggaaggccgatggatctcctgtgaaagccggcgtggaaaccaccaagccatccaagcagagcaacaacaaatacgccgccagctcctacctgagcctgacacctgagcagtggaagtcccacagatcctacagctgccaagtgacccacgaaggcagcaccgtggaaaagacagtggcccctacagagtgcagcggatcccagagcttcggcctgctggaccccaagctgtgctacctgctggatggcatcctgttcatctacggcgtgatcctgaccgccctgttcctgagagtgaagttcagcagaagcgccgacgcccctgcctaccagcagggacagaaccaactgtacaacgagctgaacctgggcagacgggaagagtacgacgtgctggacaagcggagaggcagggaccctgagatgggcggaaagccccagcggagaaagaacccccaggaaggactgtataacgaactccagaaagacaagatggccgaagcctacagcgagatcggcatgaagggcgagcggagaagaggcaagggccacgatggcctgtaccagggcctgagcaccgccaccaaggacacctatgacgccctgcacatgcaggccctgcctccaagaagggccaagcgatctggatctggagcaacaaacttctcactactcaaacaagcaggtgacgtggaggagaatcccgggcctactagtatggactggatttggcgcatccttttccttgtcggcgctgctaccggcgcgcattccttcgaagaagttcagctggttcagagcggagccgaagtgaagaagcctggcgagagcctgaagattagctgcaaaggcagcggctacggcttcaccagctattggatcggctgggtccgacagatgcctggcaaaggactggaatggatgggcatcattcaccccgacgacagcgacaccaagtacagccctagcttccagggccaagtgaccatcagcgccgacaagagcatcagcacagcctacctccagtggtcctctctgaaggccagcgataccgccatgtactactgcgccagcagctacctgagaggactgtggggcggctacttcgatttttggggccagggcacactggtcaccgttagttctacgcgtgcctctacaaagggaccctccgtgtttcctctggctcccagcagcaagtctacaagcggaggaacagccgctctgggctgcctggtcaaggattactttcccgagcctgtgaccgtgtcctggaatagcggagcactgacaagcggcgtgcacacctttccagccgtgctgcaaagcagcggcctgtactctctgagcagcgtggtcacagtgcctagctctagcctgggcacccagacctacatctgcaatgtgaaccacaagcctagcaacaccaaggtggacaagagagtggaacccaagagctgtggtaccaagtctgtgcgcttttacctggtcgtcagccctgccagtgcctccactcagacatcttggaccccaagggaccttgtgtcctctcagacacagacacagtcctgcgtgccaccaactgctggcgcaagacaggctccagagtctcccagcacaatccccgtcccttctcagccccagaactccacacttaggccaggaccagctgctccaatcgcactggtcccagtgttctgcggactgctggttgccaagtctctggtgctgagcgcactcctcgtttggtggggcgatatttggtggaaaacgatgatggaattgagatccctcgatacgcagaaagccacatgccaccttcagcaagtcacagacttgccttggaccagcgtcagctctcccgtggaacgggaaattctgtatcatacagtggcccgcaccaagatttccgacgatgacgacgagcacacactgcgcgccaagagaagcggatctggcgtgaagcagaccctgaatttcgacctgctgaagctggctggcgacgtggaatccaacccaggcccttctagaggccatatgaccgagtacaagcccacggtgcgcctcgccacccgcgacgacgtccccagggccgtacgcaccctcgccgccgcgttcgccgactaccccgccacgcgccacaccgtcgatccggaccgccacatcgagcgggtcaccgagctgcaagaactcttcctcacgcgcgtcgggctcgacatcggcaaggtgtgggtcgcggacgacggcgccgcggtggcggtctggaccacgccggagagcgtcgaagcgggggcggtgttcgccgagatcggcccgcgcatggccgagttgagcggttcccggctggccgcgcagcaacagatggaaggcctcctggcgccgcaccggcccaaggagcccgcgtggttcctggccaccgtcggcgtctcgcccgaccaccagggcaagggtctgggcagcgccgtcgtgctccccggagtggaggcggccgagcgcgccggggtgcccgccttcctggagacctccgcgccccgcaacctccccttctacgagcggctcggcttcaccgtcaccgccgacgtcgaggtgcccgaaggaccgcgcacctggtgcatgacccgcaagcccggtgcctga

SEQ ID NO: 20227 - DNA, 2931 bp, synthetic construct
  source 1..2931: mol_type = other DNA
atggccttaccagtgaccgccttgctcctgccgctggccttgctgctccacgccgccaggccggaactgcaaagcgtgctgacacagcctcctagcgcctctggaacacctggacagagagtgacaatcagctgctccggcagctccagcaacatcggcagcaactacgtgaactggtatcagcagctgcctggcacagcccctaaactgctgatctacggcgactaccagaggccaagcggcgtgccagatagattcagcggcagcaagtctggcacaagcgccagcctggctatctctggactgagaagcgaggacgaggccgactactactgtgccaccagagatgatagcctgagcggcagcgtggtgtttggcacaggcacaaagctgacagtgctgggcctcgagggacagcctaaggccaatcctaccgtgacactgttccctccaagcagcgaagaactccaggccaacaaggccacacttgtgtgcctgatctccgacttctaccctggggctgtgacagtggcttggaaggccgatggatctcctgtgaaagccggcgtggaaaccaccaagccatccaagcagagcaacaacaaatacgccgccagctcctacctgagcctgacacctgagcagtggaagtcccacagatcctacagctgccaagtgacccacgaaggcagcaccgtggaaaagacagtggcccctacagagtgcagcggatcccagagcttcggcctgctggaccccaagctgtgctacctgctggatggcatcctgttcatctacggcgtgatcctgaccgccctgttcctgagagtgaagttcagcagaagcgccgacgcccctgcctaccagcagggacagaaccaactgtacaacgagctgaacctgggcagacgggaagagtacgacgtgctggacaagcggagaggcagggaccctgagatgggcggaaagccccagcggagaaagaacccccaggaaggactgtataacgaactccagaaagacaagatggccgaagcctacagcgagatcggcatgaagggcgagcggagaagaggcaagggccacgatggcctgtaccagggcctgagcaccgccaccaaggacacctatgacgccctgcacatgcaggccctgcctccaagaagggccaagcgatctggatctggagcaacaaacttctcactactcaaacaagcaggtgacgtggaggagaatcccgggcctactagtatggactggatttggcgcatccttttccttgtcggcgctgctaccggcgcgcattccttcgaagaagttcagctggttcagagcggagccgaagtgaagaagcctggcgagagcctgaagattagctgcaaaggcagcggctacggcttcaccagctattggatcggctgggtccgacagatgcctggcaaaggactggaatggatgggcatcattcaccccgacgacagcgacaccaagtacagccctagcttccagggccaagtgaccatcagcgccgacaagagcatcagcacagcctacctccagtggtcctctctgaaggccagcgataccgccatgtactactgcgccagcagctacctgagaggactgtggggcggctacttcgatttttggggccagggcacactggtcaccgttagttctacgcgtgcctctacaaagggaccctccgtgtttcctctggctcccagcagcaagtctacaagcggaggaacagccgctctgggctgcctggtcaaggattactttcccgagcctgtgaccgtgtcctggaatagcggagcactgacaagcggcgtgcacacctttccagccgtgctgcaaagcagcggcctgtactctctgagcagcgtggtcacagtgcctagctctagcctgggcacccagacctacatctgcaatgtgaaccacaagcctagcaacaccaaggtggacaagagagtggaacccaagagctgtggtaccgtggtcgagaaagaacatccacagcttggcgctggcaccgtcctgttgcttagagccggattctatgccgtcagcttcctgtccgtggctgtggggtctacagtgtattaccagggaaaatgtctcacctggaaaggccccagacgccagcttccagctgttgttcctgctccactgccaccaccttgtggctcctctgctcacttgcttccaccagtgcctggcggacgcgccaagagaagcggatctggcgtgaagcagaccctgaatttcgacctgctgaagctggctggcgacgtggaatccaacccaggcccttctagaggccatatgaccgagtacaagcccacggtgcgcctcgccacccgcgacgacgtccccagggccgtacgcaccctcgccgccgcgttcgccgactaccccgccacgcgccacaccgtcgatccggaccgccacatcgagcgggtcaccgagctgcaagaactcttcctcacgcgcgtcgggctcgacatcggcaaggtgtgggtcgcggacgacggcgccgcggtggcggtctggaccacgccggagagcgtcgaagcgggggcggtgttcgccgagatcggcccgcgcatggccgagttgagcggttcccggctggccgcgcagcaacagatggaaggcctcctggcgccgcaccggcccaaggagcccgcgtggttcctggccaccgtcggcgtctcgcccgaccaccagggcaagggtctgggcagcgccgtcgtgctccccggagtggaggcggccgagcgcgccggggtgcccgccttcctggagacctccgcgccccgcaacctccccttctacgagcggctcggcttcaccgtcaccgccgacgtcgaggtgcccgaaggaccgcgcacctggtgcatgacccgcaagcccggtgcctga

SEQ ID NO: 20228 - DNA, 3018 bp, synthetic construct
  source 1..3018: mol_type = other DNA
atggccttaccagtgaccgccttgctcctgccgctggccttgctgctccacgccgccaggccggaactgcaaagcgtgctgacacagcctcctagcgcctctggaacacctggacagagagtgacaatcagctgctccggcagctccagcaacatcggcagcaactacgtgaactggtatcagcagctgcctggcacagcccctaaactgctgatctacggcgactaccagaggccaagcggcgtgccagatagattcagcggcagcaagtctggcacaagcgccagcctggctatctctggactgagaagcgaggacgaggccgactactactgtgccaccagagatgatagcctgagcggcagcgtggtgtttggcacaggcacaaagctgacagtgctgggcctcgaggacctgaagaacgtgttcccacctgaggtggccgtgttcgagcctagcgaggccgagatcagccacacccagaaagccaccctcgtgtgcctggctaccggcttctaccccgaccatgtggaactgtcttggtgggtcaacggcaaagaggtgcacagcggcgtgtctaccgacccccagccactgaaagaacagcccgccctgaacgacagccggtactgcctgagcagcagactgagagtgtccgccaccttctggcagaacccccggaaccacttcagatgccaggtgcagttctacggcctgagcgagaacgacgagtggacccaggacagagccaagcccgtgacccagatcgtgtctgccgaagcctggggcagagccgattgcggatcccagagcttcggcctgctggaccccaagctgtgctacctgctggatggcatcctgttcatctacggcgtgatcctgaccgccctgttcctgagagtgaagttcagcagaagcgccgacgcccctgcctaccagcagggacagaaccaactgtacaacgagctgaacctgggcagacgggaagagtacgacgtgctggacaagcggagaggcagggaccctgagatgggcggaaagccccagcggagaaagaacccccaggaaggactgtataacgaactccagaaagacaagatggccgaagcctacagcgagatcggcatgaagggcgagcggagaagaggcaagggccacgatggcctgtaccagggcctgagcaccgccaccaaggacacctatgacgccctgcacatgcaggccctgcctccaagaagggccaagcgatctggatctggagcaacaaacttctcactactcaaacaagcaggtgacgtggaggagaatcccgggcctactagtatggactggatttggcgcatccttttccttgtcggcgctgctaccggcgcgcattccttcgaagaagttcagctggttcagagcggagccgaagtgaagaagcctggcgagagcctgaagattagctgcaaaggcagcggctacggcttcaccagctattggatcggctgggtccgacagatgcctggcaaaggactggaatggatgggcatcattcaccccgacgacagcgacaccaagtacagccctagcttccagggccaagtgaccatcagcgccgacaagagcatcagcacagcctacctccagtggtcctctctgaaggccagcgataccgccatgtactactgcgccagcagctacctgagaggactgtggggcggctacttcgatttttggggccagggcacactggtcaccgttagttctacgcgtatccagaaccctgatcctgccgtgtaccagctgcgggatagcaagagcagcgacaagagcgtgtgtctgttcaccgacttcgacagccagaccaacgtgtcccagagcaaggactccgacgtgtacatcaccgataagaccgtgctggacatgcggagcatggacttcaagagcaactccgccgtggcctggtccaacaagtccgatttcgcctgcgccaacgccttcaacaacagcattatccccgaggacacattcttcccaagccccgagagcagctgcggtaccggcgacatcgagaacaccagtctggcccctgaggaccctacctttcctgccgatacctggggcacctacctgctgaccacagagacaggactccagaaagatcacgccctgtgggaccacacagcccagaacctgctgagaatgggcctcgcctttctggtgctggttgccctcgtgtggttcctggtggaagattggctgagccggaagcggacaagagagagagccagcagagcctctacctgggagggaagaagaaggctgaacacccagacacttagggccaagcgatctggatctggagcaacaaacttctcactactcaaacaagcaggtgacgtggaggagaatcccgggccttctagaggccatatgaccgagtacaagcccacggtgcgcctcgccacccgcgacgacgtccccagggccgtacgcaccctcgccgccgcgttcgccgactaccccgccacgcgccacaccgtcgatccggaccgccacatcgagcgggtcaccgagctgcaagaactcttcctcacgcgcgtcgggctcgacatcggcaaggtgtgggtcgcggacgacggcgccgcggtggcggtctggaccacgccggagagcgtcgaagcgggggcggtgttcgccgagatcggcccgcgcatggccgagttgagcggttcccggctggccgcgcagcaacagatggaaggcctcctggcgccgcaccggcccaaggagcccgcgtggttcctggccaccgtcggcgtctcgcccgaccaccagggcaagggtctgggcagcgccgtcgtgctccccggagtggaggcggccgagcgcgccggggtgcccgccttcctggagacctccgcgccccgcaacctccccttctacgagcggctcggcttcaccgtcaccgccgacgtcgaggtgcccgaaggaccgcgcacctggtgcatgacccgcaagcccggtgcctga

SEQ ID NO: 20229 - DNA, 3216 bp, synthetic construct
  source 1..3216: mol_type = other DNA
atggccttaccagtgaccgccttgctcctgccgctggccttgctgctccacgccgccaggccggaactgcaaagcgtgctgacacagcctcctagcgcctctggaacacctggacagagagtgacaatcagctgctccggcagctccagcaacatcggcagcaactacgtgaactggtatcagcagctgcctggcacagcccctaaactgctgatctacggcgactaccagaggccaagcggcgtgccagatagattcagcggcagcaagtctggcacaagcgccagcctggctatctctggactgagaagcgaggacgaggccgactactactgtgccaccagagatgatagcctgagcggcagcgtggtgtttggcacaggcacaaagctgacagtgctgggcctcgaggacctgaagaacgtgttcccacctgaggtggccgtgttcgagcctagcgaggccgagatcagccacacccagaaagccaccctcgtgtgcctggctaccggcttctaccccgaccatgtggaactgtcttggtgggtcaacggcaaagaggtgcacagcggcgtgtctaccgacccccagccactgaaagaacagcccgccctgaacgacagccggtactgcctgagcagcagactgagagtgtccgccaccttctggcagaacccccggaaccacttcagatgccaggtgcagttctacggcctgagcgagaacgacgagtggacccaggacagagccaagcccgtgacccagatcgtgtctgccgaagcctggggcagagccgattgcggatcccagagcttcggcctgctggaccccaagctgtgctacctgctggatggcatcctgttcatctacggcgtgatcctgaccgccctgttcctgagagtgaagttcagcagaagcgccgacgcccctgcctaccagcagggacagaaccaactgtacaacgagctgaacctgggcagacgggaagagtacgacgtgctggacaagcggagaggcagggaccctgagatgggcggaaagccccagcggagaaagaacccccaggaaggactgtataacgaactccagaaagacaagatggccgaagcctacagcgagatcggcatgaagggcgagcggagaagaggcaagggccacgatggcctgtaccagggcctgagcaccgccaccaaggacacctatgacgccctgcacatgcaggccctgcctccaagaagggccaagcgatctggatctggagcaacaaacttctcactactcaaacaagcaggtgacgtggaggagaatcccgggcctactagtatggactggatttggcgcatccttttccttgtcggcgctgctaccggcgcgcattccttcgaagaagttcagctggttcagagcggagccgaagtgaagaagcctggcgagagcctgaagattagctgcaaaggcagcggctacggcttcaccagctattggatcggctgggtccgacagatgcctggcaaaggactggaatggatgggcatcattcaccccgacgacagcgacaccaagtacagccctagcttccagggccaagtgaccatcagcgccgacaagagcatcagcacagcctacctccagtggtcctctctgaaggccagcgataccgccatgtactactgcgccagcagctacctgagaggactgtggggcggctacttcgatttttggggccagggcacactggtcaccgttagttctacgcgtatccagaaccctgatcctgccgtgtaccagctgcgggatagcaagagcagcgacaagagcgtgtgtctgttcaccgacttcgacagccagaccaacgtgtcccagagcaaggactccgacgtgtacatcaccgataagaccgtgctggacatgcggagcatggacttcaagagcaactccgccgtggcctggtccaacaagtccgatttcgcctgcgccaacgccttcaacaacagcattatccccgaggacacattcttcccaagccccgagagcagctgcggtaccaagtctgtgcgcttttacctggtcgtcagccctgccagtgcctccactcagacatcttggaccccaagggaccttgtgtcctctcagacacagacacagtcctgcgtgccaccaactgctggcgcaagacaggctccagagtctcccagcacaatccccgtcccttctcagccccagaactccacacttaggccaggaccagctgctccaatcgcactggtcccagtgttctgcggactgctggttgccaagtctctggtgctgagcgcactcctcgtttggtggggcgatatttggtggaaaacgatgatggaattgagatccctcgatacgcagaaagccacatgccaccttcagcaagtcacagacttgccttggaccagcgtcagctctcccgtggaacgggaaattctgtatcatacagtggcccgcaccaagatttccgacgatgacgacgagcacacactgcgcgccaagagaagcggatctggcgtgaagcagaccctgaatttcgacctgctgaagctggctggcgacgtggaatccaacccaggcccttctagaggccatatgaccgagtacaagcccacggtgcgcctcgccacccgcgacgacgtccccagggccgtacgcaccctcgccgccgcgttcgccgactaccccgccacgcgccacaccgtcgatccggaccgccacatcgagcgggtcaccgagctgcaagaactcttcctcacgcgcgtcgggctcgacatcggcaaggtgtgggtcgcggacgacggcgccgcggtggcggtctggaccacgccggagagcgtcgaagcgggggcggtgttcgccgagatcggcccgcgcatggccgagttgagcggttcccggctggccgcgcagcaacagatggaaggcctcctggcgccgcaccggcccaaggagcccgcgtggttcctggccaccgtcggcgtctcgcccgaccaccagggcaagggtctgggcagcgccgtcgtgctccccggagtggaggcggccgagcgcgccggggtgcccgccttcctggagacctccgcgccccgcaacctccccttctacgagcggctcggcttcaccgtcaccgccgacgtcgaggtgcccgaaggaccgcgcacctggtgcatgacccgcaagcccggtgcctga

SEQ ID NO: 20230 - DNA, 2976 bp, synthetic construct
  source 1..2976: mol_type = other DNA
atggccttaccagtgaccgccttgctcctgccgctggccttgctgctccacgccgccaggccggaactgcaaagcgtgctgacacagcctcctagcgcctctggaacacctggacagagagtgacaatcagctgctccggcagctccagcaacatcggcagcaactacgtgaactggtatcagcagctgcctggcacagcccctaaactgctgatctacggcgactaccagaggccaagcggcgtgccagatagattcagcggcagcaagtctggcacaagcgccagcctggctatctctggactgagaagcgaggacgaggccgactactactgtgccaccagagatgatagcctgagcggcagcgtggtgtttggcacaggcacaaagctgacagtgctgggcctcgaggacctgaagaacgtgttcccacctgaggtggccgtgttcgagcctagcgaggccgagatcagccacacccagaaagccaccctcgtgtgcctggctaccggcttctaccccgaccatgtggaactgtcttggtgggtcaacggcaaagaggtgcacagcggcgtgtctaccgacccccagccactgaaagaacagcccgccctgaacgacagccggtactgcctgagcagcagactgagagtgtccgccaccttctggcagaacccccggaaccacttcagatgccaggtgcagttctacggcctgagcgagaacgacgagtggacccaggacagagccaagcccgtgacccagatcgtgtctgccgaagcctggggcagagccgattgcggatcccagagcttcggcctgctggaccccaagctgtgctacctgctggatggcatcctgttcatctacggcgtgatcctgaccgccctgttcctgagagtgaagttcagcagaagcgccgacgcccctgcctaccagcagggacagaaccaactgtacaacgagctgaacctgggcagacgggaagagtacgacgtgctggacaagcggagaggcagggaccctgagatgggcggaaagccccagcggagaaagaacccccaggaaggactgtataacgaactccagaaagacaagatggccgaagcctacagcgagatcggcatgaagggcgagcggagaagaggcaagggccacgatggcctgtaccagggcctgagcaccgccaccaaggacacctatgacgccctgcacatgcaggccctgcctccaagaagggccaagcgatctggatctggagcaacaaacttctcactactcaaacaagcaggtgacgtggaggagaatcccgggcctactagtatggactggatttggcgcatccttttccttgtcggcgctgctaccggcgcgcattccttcgaagaagttcagctggttcagagcggagccgaagtgaagaagcctggcgagagcctgaagattagctgcaaaggcagcggctacggcttcaccagctattggatcggctgggtccgacagatgcctggcaaaggactggaatggatgggcatcattcaccccgacgacagcgacaccaagtacagccctagcttccagggccaagtgaccatcagcgccgacaagagcatcagcacagcctacctccagtggtcctctctgaaggccagcgataccgccatgtactactgcgccagcagctacctgagaggactgtggggcggctacttcgatttttggggccagggcacactggtcaccgttagttctacgcgtatccagaaccctgatcctgccgtgtaccagctgcgggatagcaagagcagcgacaagagcgtgtgtctgttcaccgacttcgacagccagaccaacgtgtcccagagcaaggactccgacgtgtacatcaccgataagaccgtgctggacatgcggagcatggacttcaagagcaactccgccgtggcctggtccaacaagtccgatttcgcctgcgccaacgccttcaacaacagcattatccccgaggacacattcttcccaagccccgagagcagctgcggtaccgtggtcgagaaagaacatccacagcttggcgctggcaccgtcctgttgcttagagccggattctatgccgtcagcttcctgtccgtggctgtggggtctacagtgtattaccagggaaaatgtctcacctggaaaggccccagacgccagcttccagctgttgttcctgctccactgccaccaccttgtggctcctctgctcacttgcttccaccagtgcctggcggacgcgccaagagaagcggatctggcgtgaagcagaccctgaatttcgacctgctgaagctggctggcgacgtggaatccaacccaggcccttctagaggccatatgaccgagtacaagcccacggtgcgcctcgccacccgcgacgacgtccccagggccgtacgcaccctcgccgccgcgttcgccgactaccccgccacgcgccacaccgtcgatccggaccgccacatcgagcgggtcaccgagctgcaagaactcttcctcacgcgcgtcgggctcgacatcggcaaggtgtgggtcgcggacgacggcgccgcggtggcggtctggaccacgccggagagcgtcgaagcgggggcggtgttcgccgagatcggcccgcgcatggccgagttgagcggttcccggctggccgcgcagcaacagatggaaggcctcctggcgccgcaccggcccaaggagcccgcgtggttcctggccaccgtcggcgtctcgcccgaccaccagggcaagggtctgggcagcgccgtcgtgctccccggagtggaggcggccgagcgcgccggggtgcccgccttcctggagacctccgcgccccgcaacctccccttctacgagcggctcggcttcaccgtcaccgccgacgtcgaggtgcccgaaggaccgcgcacctggtgcatgacccgcaagcccggtgcctga

SEQ ID NO: 20231 - DNA, 2889 bp, synthetic construct
  source 1..2889: mol_type = other DNA
atggccttaccagtgaccgccttgctcctgccgctggccttgctgctccacgccgccaggccggaactgcaaagcgtgctgacacagcctcctagcgcctctggaacacctggacagagagtgacaatcagctgctccggcagctccagcaacatcggcagcaactacgtgaactggtatcagcagctgcctggcacagcccctaaactgctgatctacggcgactaccagaggccaagcggcgtgccagatagattcagcggcagcaagtctggcacaagcgccagcctggctatctctggactgagaagcgaggacgaggccgactactactgtgccaccagagatgatagcctgagcggcagcgtggtgtttggcacaggcacaaagctgacagtgctgggcctcgagggacagcctaaggccaatcctaccgtgacactgttccctccaagcagcgaagaactccaggccaacaaggccacacttgtgtgcctgatctccgacttctaccctggggctgtgacagtggcttggaaggccgatggatctcctgtgaaagccggcgtggaaaccaccaagccatccaagcagagcaacaacaaatacgccgccagctcctacctgagcctgacacctgagcagtggaagtcccacagatcctacagctgccaagtgacccacgaaggcagcaccgtggaaaagacagtggcccctacagagtgcagcggatcccagagcttcggcctgctggaccccaagctgtgctacctgctggatggcatcctgttcatctacggcgtgatcctgaccgccctgttcctgagagtgaagttcagcagaagcgccgacgcccctgcctaccagcagggacagaaccaactgtacaacgagctgaacctgggcagacgggaagagtacgacgtgctggacaagcggagaggcagggaccctgagatgggcggaaagccccagcggagaaagaacccccaggaaggactgtataacgaactccagaaagacaagatggccgaagcctacagcgagatcggcatgaagggcgagcggagaagaggcaagggccacgatggcctgtaccagggcctgagcaccgccaccaaggacacctatgacgccctgcacatgcaggccctgcctccaagaagggccaagcgatctggatctggagcaacaaacttctcactactcaaacaagcaggtgacgtggaggagaatcccgggcctactagtatggactggatttggcgcatccttttccttgtcggcgctgctaccggcgcgcattccttcgaagaagttcagctggttcagagcggagccgaagtgaagaagcctggcgagagcctgaagattagctgcaaaggcagcggctacggcttcaccagctattggatcggctgggtccgacagatgcctggcaaaggactggaatggatgggcatcattcaccccgacgacagcgacaccaagtacagccctagcttccagggccaagtgaccatcagcgccgacaagagcatcagcacagcctacctccagtggtcctctctgaaggccagcgataccgccatgtactactgcgccagcagctacctgagaggactgtggggcggctacttcgatttttggggccagggcacactggtcaccgttagttctacgcgtgcctctacaaagggaccctccgtgtttcctctggctcccagcagcaagtctacaagcggaggaacagccgctctgggctgcctggtcaaggattactttcccgagcctgtgaccgtgtcctggaatagcggagcactgacaagcggcgtgcacacctttccagccgtgctgcaaagcagcggcctgtactctctgagcagcgtggtcacagtgcctagctctagcctgggcacccagacctacatctgcaatgtgaaccacaagcctagcaacaccaaggtggacaagagagtggaacccaagagctgtggtaccatcactcaaggtttggcagtgtcaaccatctcatcattctttccacctggctaccaagtgtccttctgcctggtcatggtgctgctgttcgccgtggataccggcctgtacttcagcgtcaagaccaacatccggtccagcaccagagactggaaggaccacaagttcaagtggcggaaggaccctcaggacaagagggccaagcgatctggatctggagcaacaaacttctcactactcaaacaagcaggtgacgtggaggagaatcccgggccttctagaggccatatgaccgagtacaagcccacggtgcgcctcgccacccgcgacgacgtccccagggccgtacgcaccctcgccgccgcgttcgccgactaccccgccacgcgccacaccgtcgatccggaccgccacatcgagcgggtcaccgagctgcaagaactcttcctcacgcgcgtcgggctcgacatcggcaaggtgtgggtcgcggacgacggcgccgcggtggcggtctggaccacgccggagagcgtcgaagcgggggcggtgttcgccgagatcggcccgcgcatggccgagttgagcggttcccggctggccgcgcagcaacagatggaaggcctcctggcgccgcaccggcccaaggagcccgcgtggttcctggccaccgtcggcgtctcgcccgaccaccagggcaagggtctgggcagcgccgtcgtgctccccggagtggaggcggccgagcgcgccggggtgcccgccttcctggagacctccgcgccccgcaacctccccttctacgagcggctcggcttcaccgtcaccgccgacgtcgaggtgcccgaaggaccgcgcacctggtgcatgacccgcaagcccggtgcctga

SEQ ID NO: 20232 - DNA, 2934 bp, synthetic construct
  source 1..2934: mol_type = other DNA
atggccttaccagtgaccgccttgctcctgccgctggccttgctgctccacgccgccaggccggaactgcaaagcgtgctgacacagcctcctagcgcctctggaacacctggacagagagtgacaatcagctgctccggcagctccagcaacatcggcagcaactacgtgaactggtatcagcagctgcctggcacagcccctaaactgctgatctacggcgactaccagaggccaagcggcgtgccagatagattcagcggcagcaagtctggcacaagcgccagcctggctatctctggactgagaagcgaggacgaggccgactactactgtgccaccagagatgatagcctgagcggcagcgtggtgtttggcacaggcacaaagctgacagtgctgggcctcgaggacctgaagaacgtgttcccacctgaggtggccgtgttcgagcctagcgaggccgagatcagccacacccagaaagccaccctcgtgtgcctggctaccggcttctaccccgaccatgtggaactgtcttggtgggtcaacggcaaagaggtgcacagcggcgtgtctaccgacccccagccactgaaagaacagcccgccctgaacgacagccggtactgcctgagcagcagactgagagtgtccgccaccttctggcagaacccccggaaccacttcagatgccaggtgcagttctacggcctgagcgagaacgacgagtggacccaggacagagccaagcccgtgacccagatcgtgtctgccgaagcctggggcagagccgattgcggatcccagagcttcggcctgctggaccccaagctgtgctacctgctggatggcatcctgttcatctacggcgtgatcctgaccgccctgttcctgagagtgaagttcagcagaagcgccgacgcccctgcctaccagcagggacagaaccaactgtacaacgagctgaacctgggcagacgggaagagtacgacgtgctggacaagcggagaggcagggaccctgagatgggcggaaagccccagcggagaaagaacccccaggaaggactgtataacgaactccagaaagacaagatggccgaagcctacagcgagatcggcatgaagggcgagcggagaagaggcaagggccacgatggcctgtaccagggcctgagcaccgccaccaaggacacctatgacgccctgcacatgcaggccctgcctccaagaagggccaagcgatctggatctggagcaacaaacttctcactactcaaacaagcaggtgacgtggaggagaatcccgggcctactagtatggactggatttggcgcatccttttccttgtcggcgctgctaccggcgcgcattccttcgaagaagttcagctggttcagagcggagccgaagtgaagaagcctggcgagagcctgaagattagctgcaaaggcagcggctacggcttcaccagctattggatcggctgggtccgacagatgcctggcaaaggactggaatggatgggcatcattcaccccgacgacagcgacaccaagtacagccctagcttccagggccaagtgaccatcagcgccgacaagagcatcagcacagcctacctccagtggtcctctctgaaggccagcgataccgccatgtactactgcgccagcagctacctgagaggactgtggggcggctacttcgatttttggggccagggcacactggtcaccgttagttctacgcgtatccagaaccctgatcctgccgtgtaccagctgcgggatagcaagagcagcgacaagagcgtgtgtctgttcaccgacttcgacagccagaccaacgtgtcccagagcaaggactccgacgtgtacatcaccgataagaccgtgctggacatgcggagcatggacttcaagagcaactccgccgtggcctggtccaacaagtccgatttcgcctgcgccaacgccttcaacaacagcattatccccgaggacacattcttcccaagccccgagagcagctgcggtaccatcactcaaggtttggcagtgtcaaccatctcatcattctttccacctggctaccaagtgtccttctgcctggtcatggtgctgctgttcgccgtggataccggcctgtacttcagcgtcaagaccaacatccggtccagcaccagagactggaaggaccacaagttcaagtggcggaaggaccctcaggacaagagggccaagcgatctggatctggagcaacaaacttctcactactcaaacaagcaggtgacgtggaggagaatcccgggccttctagaggccatatgaccgagtacaagcccacggtgcgcctcgccacccgcgacgacgtccccagggccgtacgcaccctcgccgccgcgttcgccgactaccccgccacgcgccacaccgtcgatccggaccgccacatcgagcgggtcaccgagctgcaagaactcttcctcacgcgcgtcgggctcgacatcggcaaggtgtgggtcgcggacgacggcgccgcggtggcggtctggaccacgccggagagcgtcgaagcgggggcggtgttcgccgagatcggcccgcgcatggccgagttgagcggttcccggctggccgcgcagcaacagatggaaggcctcctggcgccgcaccggcccaaggagcccgcgtggttcctggccaccgtcggcgtctcgcccgaccaccagggcaagggtctgggcagcgccgtcgtgctccccggagtggaggcggccgagcgcgccggggtgcccgccttcctggagacctccgcgccccgcaacctccccttctacgagcggctcggcttcaccgtcaccgccgacgtcgaggtgcccgaaggaccgcgcacctggtgcatgacccgcaagcccggtgcctga

SEQ ID NO: 20233 - DNA, 1983 bp, synthetic construct
  source 1..1983: mol_type = other DNA
atggccttaccagtgaccgccttgctcctgccgctggccttgctgctccacgccgccaggccggaactgcaaagcgtgctgacacagcctcctagcgcctctggaacacctggacagagagtgacaatcagctgctccggcagctccagcaacatcggcagcaactacgtgaactggtatcagcagctgcctggcacagcccctaaactgctgatctacggcgactaccagaggccaagcggcgtgccagatagattcagcggcagcaagtctggcacaagcgccagcctggctatctctggactgagaagcgaggacgaggccgactactactgtgccaccagagatgatagcctgagcggcagcgtggtgtttggcacaggcacaaagctgacagtgctgggcctcgagggacagcctaaggccaatcctaccgtgacactgttccctccaagcagcgaagaactccaggccaacaaggccacacttgtgtgcctgatctccgacttctaccctggggctgtgacagtggcttggaaggccgatggatctcctgtgaaagccggcgtggaaaccaccaagccatccaagcagagcaacaacaaatacgccgccagctcctacctgagcctgacacctgagcagtggaagtcccacagatcctacagctgccaagtgacccacgaaggcagcaccgtggaaaagacagtggcccctacagagtgcagcggatccctgggagagcctcagctgtgctatatcctggacgccatcctgtttctgtacggcatcgtgctgaccctgctgtactgccggctgaagatccaagtgcggaaggccgccatcaccagctacgagaaatccgacggcgtgtacaccggcctgagcaccagaaatcaagagacatacgagacactgaagcacgaaaagcctccacaaagggccaagcgatctggatctggagcaacaaacttctcactactcaaacaagcaggtgacgtggaggagaatcccgggcctactagtatggactggatttggcgcatccttttccttgtcggcgctgctaccggcgcgcattccttcgaagaagttcagctggttcagagcggagccgaagtgaagaagcctggcgagagcctgaagattagctgcaaaggcagcggctacggcttcaccagctattggatcggctgggtccgacagatgcctggcaaaggactggaatggatgggcatcattcaccccgacgacagcgacaccaagtacagccctagcttccagggccaagtgaccatcagcgccgacaagagcatcagcacagcctacctccagtggtcctctctgaaggccagcgataccgccatgtactactgcgccagcagctacctgagaggactgtggggcggctacttcgatttttggggccagggcacactggtcaccgttagttctacgcgtgcctctacaaagggaccctccgtgtttcctctggctcccagcagcaagtctacaagcggaggaacagccgctctgggctgcctggtcaaggattactttcccgagcctgtgaccgtgtcctggaatagcggagcactgacaagcggcgtgcacacctttccagccgtgctgcaaagcagcggcctgtactctctgagcagcgtggtcacagtgcctagctctagcctgggcacccagacctacatctgcaatgtgaaccacaagcctagcaacaccaaggtggacaagagagtggaacccaagagctgtggtaccctcggagaaccacagctctgttacattctggatgctatcctgttcctctatgggatcgtcctgacactcctgtattgcagactcaaaattcaagttcgcaaagccgccattacctcttacgagaagagtgatggggtgtacacaggactgtctacccggaatcaagaaacctacgaaaccctcaaacatgagaagccacctcagtaa

SEQ ID NO: 20234 - DNA, 3114 bp, synthetic construct
  source 1..3114: mol_type = other DNA
atggccttaccagtgaccgccttgctcctgccgctggccttgctgctccacgccgccaggccggaactgcaaagcgtgctgacacagcctcctagcgcctctggaacacctggacagagagtgacaatcagctgctccggcagctccagcaacatcggcagcaactacgtgaactggtatcagcagctgcctggcacagcccctaaactgctgatctacggcgactaccagaggccaagcggcgtgccagatagattcagcggcagcaagtctggcacaagcgccagcctggctatctctggactgagaagcgaggacgaggccgactactactgtgccaccagagatgatagcctgagcggcagcgtggtgtttggcacaggcacaaagctgacagtgctgggcggacagcctaaggccaatcctaccgtgacactgttccctccaagcagcgaagaactccaggccaacaaggccacacttgtgtgcctgatctccgacttctaccctggggctgtgacagtggcttggaaggccgatggatctcctgtgaaagccggcgtggaaaccaccaagccatccaagcagagcaacaacaaatacgccgccagctcctacctgagcctgacacctgagcagtggaagtcccacagatcctacagctgccaagtgacccacgaaggcagcaccgtggaaaagacagtggcccctacagagtgcagcggatcccagagcttcggcctgctggaccccaagctgtgctacctgctggatggcatcctgttcatctacggcgtgatcctgaccgccctgttcctgagagtgaagttcagcagaagcgccgacgcccctgcctaccagcagggacagaaccaactgtacaacgagctgaacctgggcagacgggaagagtacgacgtgctggacaagcggagaggcagggaccctgagatgggcggaaagccccggagaaagaacccccaggaaggactgtataacgaactccagaaagacaagatggccgaagcctacagcgagatcggcatgaagggcgagcggagaagaggcaagggccacgatggcctgtaccagggcctgagcaccgccaccaaggacacctatgacgccctgcacatgcaggccctgcctccaagaagggccaagcgatctggatctggagcaacaaacttctcactactcaaacaagcaggtgacgtggaggagaatcccgggcctactagtatggactggatttggcgcatccttttccttgtcggcgctgctaccggcgcgcattccttcgaagaagttcagctggttcagagcggagccgaagtgaagaagcctggcgagagcctgaagattagctgcaaaggcagcggctacggcttcaccagctattggatcggctgggtccgacagatgcctggcaaaggactggaatggatgggcatcattcaccccgacgacagcgacaccaagtacagccctagcttccagggccaagtgaccatcagcgccgacaagagcatcagcacagcctacctccagtggtcctctctgaaggccagcgataccgccatgtactactgcgccagcagctacctgagaggactgtggggcggctacttcgatttttggggccagggcacactggtcaccgttagttctgcctctacaaagggaccctccgtgtttcctctggctcccagcagcaagtctacaagcggaggaacagccgctctgggctgcctggtcaaggattactttcccgagcctgtgaccgtgtcctggaatagcggagcactgacaagcggcgtgcacacctttccagccgtgctgcaaagcagcggcctgtactctctgagcagcgtggtcacagtgcctagctctagcctgggcacccagacctacatctgcaatgtgaaccacaagcctagcaacaccaaggtggacaagagagtggaacccaagagctgtggtacccagagttttgggttgttggaccctaaattgtgctatctgttggacggaatcctgttcatttacggagtgatcctgaccgcattgttcctgcgggttaagttttccagatccgcagacgcacccgcttaccaacaagggcagaaccaactctacaatgaacttaatttggggcggagggaagagtacgacgttctggacaaaaggaggggacgagatcccgagatgggcggaaagcctcgaaggaagaatccgcaagaggggctttataacgaactccagaaagataaaatggcagaagcctatagtgagattgggatgaagggagaaaggaggaggggtaaaggtcacgatgggttgtaccaaggattgagcacagccactaaagatacctatgatgcgctccacatgcaggccctgccgccaagacgcgccaagagaagcggatctggcgtgaagcagaccctgaatttcgacctgctgaagctggctggcgacgtggaatccaacccaggcccttctagaggccatatgaccgagtacaagcccacggtgcgcctcgccacccgcgacgacgtccccagggccgtacgcaccctcgccgccgcgttcgccgactaccccgccacgcgccacaccgtcgatccggaccgccacatcgagcgggtcaccgagctgcaagaactcttcctcacgcgcgtcgggctcgacatcggcaaggtgtgggtcgcggacgacggcgccgcggtggcggtctggaccacgccggagagcgtcgaagcgggggcggtgttcgccgagatcggcccgcgcatggccgagttgagcggttcccggctggccgcgcagcaacagatggaaggcctcctggcgccgcaccggcccaaggagcccgcgtggttcctggccaccgtcggcgtctcgcccgaccaccagggcaagggtctgggcagcgccgtcgtgctccccggagtggaggcggccgagcgcgccggggtgcccgccttcctggagacctccgcgccccgcaacctccccttctacgagcggctcggcttcaccgtcaccgccgacgtcgaggtgcccgaaggaccgcgcacctggtgcatgacccgcaagcccggtgcctga

SEQ ID NO: 20235 - DNA, 2469 bp, synthetic construct
  source 1..2469: mol_type = other DNA
atggccttaccagtgaccgccttgctcctgccgctggccttgctgctccacgccgccaggccggaactgcaaagcgtgctgacacagcctcctagcgcctctggaacacctggacagagagtgacaatcagctgctccggcagctccagcaacatcggcagcaactacgtgaactggtatcagcagctgcctggcacagcccctaaactgctgatctacggcgactaccagaggccaagcggcgtgccagatagattcagcggcagcaagtctggcacaagcgccagcctggctatctctggactgagaagcgaggacgaggccgactactactgtgccaccagagatgatagcctgagcggcagcgtggtgtttggcacaggcacaaagctgacagtgctgggcctcgaggacctgaagaacgtgttcccacctgaggtggccgtgttcgagcctagcgaggccgagatcagccacacccagaaagccaccctcgtgtgcctggctaccggcttctaccccgaccatgtggaactgtcttggtgggtcaacggcaaagaggtgcacagcggcgtgtctaccgacccccagccactgaaagaacagcccgccctgaacgacagccggtactgcctgagcagcagactgagagtgtccgccaccttctggcagaacccccggaaccacttcagatgccaggtgcagttctacggcctgagcgagaacgacgagtggacccaggacagagccaagcccgtgacccagatcgtgtctgccgaagcctggggcagagccgattgcggatcccagagcttcggcctgctggaccccaagctgtgctacctgctggatggcatcctgttcatctacggcgtgatcctgaccgccctgttcctgagagtgaagttcagcagaagcgccgacgcccctgcctaccagcagggacagaaccaactgtacaacgagctgaacctgggcagacgggaagagtacgacgtgctggacaagcggagaggcagggaccctgagatgggcggaaagccccggagaaagaacccccaggaaggactgtataacgaactccagaaagacaagatggccgaagcctacagcgagatcggcatgaagggcgagcggagaagaggcaagggccacgatggcctgtaccagggcctgagcaccgccaccaaggacacctatgacgccctgcacatgcaggccctgcctccaagaagggccaagcgatctggatctggagcaacaaacttctcactactcaaacaagcaggtgacgtggaggagaatcccgggcctactagtatggactggatttggcgcatccttttccttgtcggcgctgctaccggcgcgcattccttcgaagaagttcagctggttcagagcggagccgaagtgaagaagcctggcgagagcctgaagattagctgcaaaggcagcggctacggcttcaccagctattggatcggctgggtccgacagatgcctggcaaaggactggaatggatgggcatcattcaccccgacgacagcgacaccaagtacagccctagcttccagggccaagtgaccatcagcgccgacaagagcatcagcacagcctacctccagtggtcctctctgaaggccagcgataccgccatgtactactgcgccagcagctacctgagaggactgtggggcggctacttcgatttttggggccagggcacactggtcaccgttagttctacgcgtatccagaaccctgatcctgccgtgtaccagctgcgggatagcaagagcagcgacaagagcgtgtgtctgttcaccgacttcgacagccagaccaacgtgtcccagagcaaggactccgacgtgtacatcaccgataagaccgtgctggacatgcggagcatggacttcaagagcaactccgccgtggcctggtccaacaagtccgatttcgcctgcgccaacgccttcaacaacagcattatccccgaggacacattcttcccaagccccgagagcagctgcggtacccagagttttgggttgttggaccctaaattgtgctatctgttggacggaatcctgttcatttacggagtgatcctgaccgcattgttcctgcgggttaagttttccagatccgcagacgcacccgcttaccaacaagggcagaaccaactctacaatgaacttaatttggggcggagggaagagtacgacgttctggacaaaaggaggggacgagatcccgagatgggcggaaagcctcgaaggaagaatccgcaagaggggctttataacgaactccagaaagataaaatggcagaagcctatagtgagattgggatgaagggagaaaggaggaggggtaaaggtcacgatgggttgtaccaaggattgagcacagccactaaagatacctatgatgcgctccacatgcaggccctgccgccaaga

SEQ ID NO: 20236 - DNA, 1476 bp, synthetic construct
  source 1..1476: mol_type = other DNA
atggccttaccagtgaccgccttgctcctgccgctggccttgctgctccacgccgccaggccggacatccagatgacacagagccctagcagcctgtctgccagcgtgggagacagagtgaccatcacctgtctggcctccgaggacatctacgacaacctggcctggtatcagcagaagcctggcaaggcccctaagctgctgatctactacgccagctctctccaggatggcgtgcccagcagattttctggcagcggctctggcaccgactacaccctgacaatatccagcctccagcctgaggacttcgccacctactactgcctgcaagacagcgagtacccctggacatttggcggaggcggaagtggaggcggaggatctggcggcggaggctctgaagtgacactgaaagagtctggccccgctctggtcaagcccacacaaaccctgacactgacctgcaccttcagcggctttagcctgaccacatacggcatgggcgtcggctggattagacagcctcctggaaaagccctggaatggctggctaacatttggtgggacgacgacaagtattacaaccccagcctgaagaaccggctgaccatcagcaaggacaccagcaagaaccaggtggtgctgaccatgaccaacatggaccctgtggacaccgccacatattactgcgccagaatcggccccatcaagtaccccaccgctccttacagatacttcgacttctggggccagggcacaatggtcaccgttagctctacgcgtgagcagaaactgatctcggaagaggatctgaaaattgaagttatgtatcctcctccttacctagacaatgagaagagcaatggaaccattatccatgtgaaagggaaacacctttgtccaagtcccctatttcccggaccttctaagcccttttgggtgctggtggtggttgggggagtcctggcttgctatagcttgctagtaacagtggcctttattattttctgggtgaggagtaagaggagcaggctcctgcacagtgactacatgaacatgactccacgccgccccggacccacccgcaagcattaccagccctatgccccaccacgcgacttcgcagcctatcgctccagagtgaagttcagcaggagcgcagacgcccccgcgtaccagcagggccagaaccagctctataacgagctcaatctaggacgaagagaggagtacgatgttttggacaagagacgtggccgggaccctgagatggggggaaagccgagaaggaagaaccctcaggaaggcctgtacaatgaactgcagaaagataagatggcggaggcctacagtgagattgggatgaaaggcgagcgccggaggggcaaggggcacgatggcctttaccagggtctcagtacagccaccaaggacacctacgacgcccttcacatgcaggccctgccccctcgc

SEQ ID NO: 20237 - DNA, 1497 bp, synthetic construct
  source 1..1497: mol_type = other DNA
atggccttaccagtgaccgccttgctcctgccgctggccttgctgctccacgccgccaggccggacatccagatgacacagagccctagcagcctgtctgccagcgtgggagacagagtgaccatcacctgtctggcctccgaggacatctacgacaacctggcctggtatcagcagaagcctggcaaggcccctaagctgctgatctactacgccagctctctccaggatggcgtgcccagcagattttctggcagcggctctggcaccgactacaccctgacaatatccagcctccagcctgaggacttcgccacctactactgcctgcaagacagcgagtacccctggacatttggcggaggcggaagtggaggcggaggatctggcggcggaggctctgaagtgacactgaaagagtctggccccgctctggtcaagcccacacaaaccctgacactgacctgcaccttcagcggctttagcctgaccacatacggcatgggcgtcggctggattagacagcctcctggaaaagccctggaatggctggctaacatttggtgggacgacgacaagtattacaaccccagcctgaagaaccggctgaccatcagcaaggacaccagcaagaaccaggtggtgctgaccatgaccaacatggaccctgtggacaccgccacatattactgcgccagaatcggccccatcaagtaccccaccgctccttacagatacttcgacttctggggccagggcacaatggtcaccgttagctctacgcgtgagcagaaactgatctcggaagaggatctggcgaagcccaccacgacgccagcgccgcgaccaccaacaccggcgcccaccatcgcgtcgcagcccctgtccctgcgcccagaggcgtgccggccagcggcggggggcgcagtgcacacgagggggctggacttcgcctgtgacatctacatctgggcgcccttggccgggacttgtggggtccttctcctgtcactggttatcaccctttactgcaaacggggcagaaagaaactcctgtatatattcaaacaaccatttatgagaccagtacaaactactcaagaggaagatggctgtagctgccgatttccagaagaagaagaaggaggatgtgaactgagagtgaagttcagcaggagcgcagacgcccccgcgtaccagcagggccagaaccagctctataacgagctgaatctaggacgaagagaggagtacgatgttttggacaagagacgtggccgggaccctgagatggggggaaagccgagaaggaagaaccctcaggaaggcctgtacaatgaactgcagaaagataagatggcggaggcctacagtgagattgggatgaaaggcgagcgccggaggggcaaggggcacgatggcctttaccagggtctcagtacagccaccaaggacacctacgacgcccttcacatgcaggccctgccccctcgctga

SEQ ID NO: 20238 - DNA, 1497 bp, synthetic construct
  source 1..1497: mol_type = other DNA
atggccttaccagtgaccgccttgctcctgccgctggccttgctgctccacgccgccaggccggaagtgacactgaaagagtctggccccgctctggtcaagcccacacaaaccctgacactgacctgcaccttcagcggctttagcctgaccacatacggcatgggcgtcggctggattagacagcctcctggaaaagccctggaatggctggctaacatttggtgggacgacgacaagtattacaaccccagcctgaagaaccggctgaccatcagcaaggacaccagcaagaaccaggtggtgctgaccatgaccaacatggaccctgtggacaccgccacatattactgcgccagaatcggccccatcaagtaccccaccgctccttacagatacttcgacttctggggccagggcacaatggtcaccgttagctctggcggaggcggaagtggaggcggaggatctggcggcggaggctctgacatccagatgacacagagccctagcagcctgtctgccagcgtgggagacagagtgaccatcacctgtctggcctccgaggacatctacgacaacctggcctggtatcagcagaagcctggcaaggcccctaagctgctgatctactacgccagctctctccaggatggcgtgcccagcagattttctggcagcggctctggcaccgactacaccctgacaatatccagcctccagcctgaggacttcgccacctactactgcctgcaagacagcgagtacccctggacatttacgcgtgagcagaaactgatctcggaagaggatctggcgaagcccaccacgacgccagcgccgcgaccaccaacaccggcgcccaccatcgcgtcgcagcccctgtccctgcgcccagaggcgtgccggccagcggcggggggcgcagtgcacacgagggggctggacttcgcctgtgacatctacatctgggcgcccttggccgggacttgtggggtccttctcctgtcactggttatcaccctttactgcaaacggggcagaaagaaactcctgtatatattcaaacaaccatttatgagaccagtacaaactactcaagaggaagatggctgtagctgccgatttccagaagaagaagaaggaggatgtgaactgagagtgaagttcagcaggagcgcagacgcccccgcgtaccagcagggccagaaccagctctataacgagctgaatctaggacgaagagaggagtacgatgttttggacaagagacgtggccgggaccctgagatggggggaaagccgagaaggaagaaccctcaggaaggcctgtacaatgaactgcagaaagataagatggcggaggcctacagtgagattgggatgaaaggcgagcgccggaggggcaaggggcacgatggcctttaccagggtctcagtacagccaccaaggacacctacgacgcccttcacatgcaggccctgccccctcgctga

SEQ ID NO: 20239 - DNA, 2736 bp, synthetic construct
  source 1..2736: mol_type = other DNA
atggccttaccagtgaccgccttgctcctgccgctggccttgctgctccacgccgccaggccggacatccagatgacacagagccctagcagcctgtctgccagcgtgggagacagagtgaccatcacctgtctggcctccgaggacatctacgacaacctggcctggtatcagcagaagcctggcaaggcccctaagctgctgatctactacgccagctctctccaggatggcgtgcccagcagattttctggcagcggctctggcaccgactacaccctgacaatatccagcctccagcctgaggacttcgccacctactactgcctgcaagacagcgagtacccctggacatttggcggaggcggaagtggaggcggaggatctggcggcggaggctctgaagtgacactgaaagagtctggccccgctctggtcaagcccacacaaaccctgacactgacctgcaccttcagcggctttagcctgaccacatacggcatgggcgtcggctggattagacagcctcctggaaaagccctggaatggctggctaacatttggtgggacgacgacaagtattacaaccccagcctgaagaaccggctgaccatcagcaaggacaccagcaagaaccaggtggtgctgaccatgaccaacatggaccctgtggacaccgccacatattactgcgccagaatcggccccatcaagtaccccaccgctccttacagatacttcgacttctggggccagggcacaatggtcaccgttagctctacgcgtgagcagaaactgatctcggaagaggatctggcgaagcccaccacgacgccagcgccgcgaccaccaacaccggcgcccaccatcgcgtcgcagcccctgtccctgcgcccagaggcgtgccggccagcggcggggggcgcagtgcacacgagggggctggacttcgcctgtgacatctacatctgggcgcccttggccgggacttgtggggtccttctcctgtcactggttatcaccctttactgcgggcgcgccagagtgaagttcagcaggagcgcagacgcccccgcgtaccagcagggccagaaccagctctataacgagctgaatctaggacgaagagaggagtacgatgttttggacaagagacgtggccgggaccctgagatggggggaaagccgagaaggaagaaccctcaggaaggcctgtacaatgaactgcagaaagataagatggcggaggcctacagtgagattgggatgaaaggcgagcgccggaggggcaaggggcacgatggcctttaccagggtctcagtacagccaccaaggacacctacgacgcccttcacatgcaggccctgccccctcgctctagaggatctggagcaacaaacttctcactactcaaacaagcaggtgacgtggaggagaatcccgggcctgggatccacatggccacttacgaggttctctgtgaggtggcgcggaaactgggcacggatgacagggaagtggtattgttcctcctaaacgtgttcatacctcaacccacactggcccaattaattggagctcttagagctttaaaggaggagggcaggttaacgtttcccctgttagcggaatgtctgtttcgtgcaggtcgcagagacctcttgcgcgacctgcttcacttagacccgcgttttttagagcgccacctagcgggcacaatgagttatttcagcccttatcagctcactgttctccacgtagacggggagctgtgtgcgagggatattaggtctttgatatttttaagcaaggacactatagggtctcgcagcacaccacagacattcttacactgggtgtactgtatggaaaacttagacctactgggtcccactgacgtggatgccctaatgtcaatgcttagatctttgtcaagagtagacctacagcgccaagtgcaaaccctaatgggccttcacctttccggcccatcacactcccaacactatcgccatacaccactcgagaccgatttctacgactacaaggacgacgatgacaagactagtggctccggcgagggcagaggaagtctactaacctgcggagatgtggaagaaaatcctggcccacatatgaccgagtacaagcccacggtgcgcctcgccacccgcgacgacgtccccagggccgtacgcaccctcgccgccgcgttcgccgactaccccgccacgcgccacaccgtcgatccggaccgccacatcgagcgggtcaccgagctgcaagaactcttcctcacgcgcgtcgggctcgacatcggcaaggtgtgggtcgcggacgacggcgccgcggtggcggtctggaccacgccggagagcgtcgaagcgggggcggtgttcgccgagatcggcccgcgcatggccgagttgagcggttcccggctggccgcgcagcaacagatggaaggcctcctggcgccgcaccggcccaaggagcccgcgtggttcctggccaccgtcggcgtctcgcccgaccaccagggcaagggtctgggcagcgccgtcgtgctccccggagtggaggcggccgagcgcgccggggtgcccgccttcctggagacctccgcgccccgcaacctccccttctacgagcggctcggcttcaccgtcaccgccgacgtcgaggtgcccgaaggaccgcgcacctggtgcatgacccgcaagcccggtgcctga

SEQ ID NO: 20240 - DNA, 2556 bp, synthetic construct
  source 1..2556: mol_type = other DNA
atggccttaccagtgaccgccttgctcctgccgctggccttgctgctccacgccgccaggccggacatccagatgacacagagccctagcagcctgtctgccagcgtgggagacagagtgaccatcacctgtctggcctccgaggacatctacgacaacctggcctggtatcagcagaagcctggcaaggcccctaagctgctgatctactacgccagctctctccaggatggcgtgcccagcagattttctggcagcggctctggcaccgactacaccctgacaatatccagcctccagcctgaggacttcgccacctactactgcctgcaagacagcgagtacccctggacatttctcgagatccagaaccctgatcctgccgtgtaccagctgcgggatagcaagagcagcgacaagagcgtgtgtctgttcaccgacttcgacagccagaccaacgtgtcccagagcaaggactccgacgtgtacatcaccgataagtgcgtgctggacatgcggagcatggacttcaagagcaactccgccgtggcctggtccaacaagtccgatttcgcctgcgccaacgccttcaacaacagcattatccccgaggacacattcttcccaagcagcgacgtgccctgcgacgtgaagctggtggaaaagagcttcgagacagacaccaacctgaacttccagaacctgagcgtgatcggcttcagaatcctgctgctgaaagtggccggctttaacctgctgatgaccctgcggctgtggtccagccgcgccaagagaagcggatctggcgtgaagcagaccctgaatttcgacctgctgaagctggctggcgacgtggaatccaacccaggccctactagtatggactggatttggcgcatccttttccttgtcggcgctgctaccggcgcgcattccttcgaagaagtgacactgaaagagtctggccccgctctggtcaagcccacacaaaccctgacactgacctgcaccttcagcggctttagcctgaccacatacggcatgggcgtcggctggattagacagcctcctggaaaagccctggaatggctggctaacatttggtgggacgacgacaagtattacaaccccagcctgaagaaccggctgaccatcagcaaggacaccagcaagaaccaggtggtgctgaccatgaccaacatggaccctgtggacaccgccacatattactgcgccagaatcggccccatcaagtaccccaccgctccttacagatacttcgacttctggggccagggcacaatggtcaccgttagctctacgcgtgaggacctgaagaacgtgttcccacctgaggtggccgtgttcgagcctagcaaggccgagatcgcccacacccagaaagccaccctcgtgtgcctggctaccggcttctaccccgaccatgtggaactgtcttggtgggtcaacggcaaagaggtgcacagcggcgtgtgtaccgacccccagccactgaaagaacagcccgccctgaacgacagccggtactgcctgagcagcagactgagagtgtccgccaccttctggcagaacccccggaaccacttcagatgccaggtgcagttctacggcctgagcgagaacgacgagtggacccaggacagagccaagcccgtgacccagatcgtgtctgccgaagcctggggcagagccgattgcggcatcaccagcgccagctaccaccagggcgtgctgagcgccaccatcctgtacgagatcctgctgggcaaggccaccctgtacgccgtgctggtgtctgccctggtgctgatggctatggtcaagcggaaggacagccggggaagggccaagcgatctggatctggagcaacaaacttctcactactcaaacaagcaggtgacgtggaggagaatcccgggccttctagaggccatatgaccgagtacaagcccacggtgcgcctcgccacccgcgacgacgtccccagggccgtacgcaccctcgccgccgcgttcgccgactaccccgccacgcgccacaccgtcgatccggaccgccacatcgagcgggtcaccgagctgcaagaactcttcctcacgcgcgtcgggctcgacatcggcaaggtgtgggtcgcggacgacggcgccgcggtggcggtctggaccacgccggagagcgtcgaagcgggggcggtgttcgccgagatcggcccgcgcatggccgagttgagcggttcccggctggccgcgcagcaacagatggaaggcctcctggcgccgcaccggcccaaggagcccgcgtggttcctggccaccgtcggcgtctcgcccgaccaccagggcaagggtctgggcagcgccgtcgtgctccccggagtggaggcggccgagcgcgccggggtgcccgccttcctggagacctccgcgccccgcaacctccccttctacgagcggctcggcttcaccgtcaccgccgacgtcgaggtgcccgaaggaccgcgcacctggtgcatgacccgcaagcccggtgcctga

SEQ ID NO: 20241 - DNA, 2553 bp, synthetic construct
  source 1..2553: mol_type = other DNA
atggccttaccagtgaccgccttgctcctgccgctggccttgctgctccacgccgccaggccggacatccagatgacacagagccctagcagcctgtctgccagcgtgggagacagagtgaccatcacctgtctggcctccgaggacatctacgacaacctggcctggtatcagcagaagcctggcaaggcccctaagctgctgatctactacgccagctctctccaggatggcgtgcccagcagattttctggcagcggctctggcaccgactacaccctgacaatatccagcctccagcctgaggacttcgccacctactactgcctgcaagacagcgagtacccctggacatttctcgaggacctgaagaacgtgttcccacctgaggtggccgtgttcgagcctagcaaggccgagatcgcccacacccagaaagccaccctcgtgtgcctggctaccggcttctaccccgaccatgtggaactgtcttggtgggtcaacggcaaagaggtgcacagcggcgtgtgtaccgacccccagccactgaaagaacagcccgccctgaacgacagccggtactgcctgagcagcagactgagagtgtccgccaccttctggcagaacccccggaaccacttcagatgccaggtgcagttctacggcctgagcgagaacgacgagtggacccaggacagagccaagcccgtgacccagatcgtgtctgccgaagcctggggcagagccgattgcggcatcaccagcgccagctaccaccagggcgtgctgagcgccaccatcctgtacgagatcctgctgggcaaggccaccctgtacgccgtgctggtgtctgccctggtgctgatggctatggtcaagcggaaggacagccggggaagggccaagcgatctggatctggagcaacaaacttctcactactcaaacaagcaggtgacgtggaggagaatcccgggcctactagtatggactggatttggcgcatccttttccttgtcggcgctgctaccggcgcgcattccttcgaagaagtgacactgaaagagtctggccccgctctggtcaagcccacacaaaccctgacactgacctgcaccttcagcggctttagcctgaccacatacggcatgggcgtcggctggattagacagcctcctggaaaagccctggaatggctggctaacatttggtgggacgacgacaagtattacaaccccagcctgaagaaccggctgaccatcagcaaggacaccagcaagaaccaggtggtgctgaccatgaccaacatggaccctgtggacaccgccacatattactgcgccagaatcggccccatcaagtaccccaccgctccttacagatacttcgacttctggggccagggcacaatggtcaccgttagctctacgcgtatccagaaccctgatcctgccgtgtaccagctgcgggatagcaagagcagcgacaagagcgtgtgtctgttcaccgacttcgacagccagaccaacgtgtcccagagcaaggactccgacgtgtacatcaccgataagtgcgtgctggacatgcggagcatggacttcaagagcaactccgccgtggcctggtccaacaagtccgatttcgcctgcgccaacgccttcaacaacagcattatccccgaggacacattcttcccaagcagcgacgtgccctgcgacgtgaagctggtggaaaagagcttcgagacagacaccaacctgaacttccagaacctgagcgtgatcggcttcagaatcctgctgctgaaagtggccggctttaacctgctgatgaccctgcggctgtggtccagccgcgccaagagaagcggatctggcgtgaagcagaccctgaatttcgacctgctgaagctggctggcgacgtggaatccaacccaggcccttctagaggccatatgaccgagtacaagcccacggtgcgcctcgccacccgcgacgacgtccccagggccgtacgcaccctcgccgccgcgttcgccgactaccccgccacgcgccacaccgtcgatccggaccgccacatcgagcgggtcaccgagctgcaagaactcttcctcacgcgcgtcgggctcgacatcggcaaggtgtgggtcgcggacgacggcgccgcggtggcggtctggaccacgccggagagcgtcgaagcgggggcggtgttcgccgagatcggcccgcgcatggccgagttgagcggttcccggctggccgcgcagcaacagatggaaggcctcctggcgccgcaccggcccaaggagcccgcgtggttcctggccaccgtcggcgtctcgcccgaccaccagggcaagggtctgggcagcgccgtcgtgctccccggagtggaggcggccgagcgcgccggggtgcccgccttcctggagacctccgcgccccgcaacctccccttctacgagcggctcggcttcaccgtcaccgccgacgtcgaggtgcccgaaggaccgcgcacctggtgcatgacccgcaagcccggtgcctga

SEQ ID NO: 20242 - DNA, 1851 bp, synthetic construct
  source 1..1851: mol_type = other DNA
atggccttaccagtgaccgccttgctcctgccgctggccttgctgctccacgccgccaggccggacatccagatgacacagagccctagcagcctgtctgccagcgtgggagacagagtgaccatcacctgtctggcctccgaggacatctacgacaacctggcctggtatcagcagaagcctggcaaggcccctaagctgctgatctactacgccagctctctccaggatggcgtgcccagcagattttctggcagcggctctggcaccgactacaccctgacaatatccagcctccagcctgaggacttcgccacctactactgcctgcaagacagcgagtacccctggacatttctcgaggacctgaagaacgtgttcccacctgaggtggccgtgttcgagcctagcgaggccgagatcagccacacccagaaagccaccctcgtgtgcctggctaccggcttctaccccgaccatgtggaactgtcttggtgggtcaacggcaaagaggtgcacagcggcgtgtgtaccgacccccagccactgaaagaacagcccgccctgaacgacagccggtactgcctgagcagcagactgagagtgtccgccaccttctggcagaacccccggaaccacttcagatgccaggtgcagttctacggcctgagcgagaacgacgagtggacccaggacagagccaagcccgtgacccagatcgtgtctgccgaagcctggggcagagccgattgcggctttaccagcgagagctaccagcagggcgtgctgagcgccaccatcctgtacgagatcctgctgggcaaggccaccctgtacgccgtgctggtgtctgccctggtgctgatggctatggtcaagcggaaggacagccggggaagggccaagcgatctggatctggagcaacaaacttctcactactcaaacaagcaggtgacgtggaggagaatcccgggcctactagtatggactggatttggcgcatccttttccttgtcggcgctgctaccggcgcgcattccttcgaagaagtgacactgaaagagtctggccccgctctggtcaagcccacacaaaccctgacactgacctgcaccttcagcggctttagcctgaccacatacggcatgggcgtcggctggattagacagcctcctggaaaagccctggaatggctggctaacatttggtgggacgacgacaagtattacaaccccagcctgaagaaccggctgaccatcagcaaggacaccagcaagaaccaggtggtgctgaccatgaccaacatggaccctgtggacaccgccacatattactgcgccagaatcggccccatcaagtaccccaccgctccttacagatacttcgacttctggggccagggcacaatggtcaccgttagctctacgcgtatccagaaccctgatcctgccgtgtaccagctgcgggatagcaagagcagcgacaagagcgtgtgtctgttcaccgacttcgacagccagaccaacgtgtcccagagcaaggactccgacgtgtacatcaccgataagtgcgtgctggacatgcggagcatggacttcaagagcaactccgccgtggcctggtccaacaagtccgatttcgcctgcgccaacgccttcaacaacagcattatccccgaggacacattcttcccaagccccgagagcagctgcgacgtgaagctggtggaaaagagcttcgagacagacaccaacctgaacttccagaacctgagcgtgatcggcttcagaatcctgctgctgaaagtggccggctttaacctgctgatgaccctgcggctgtggtccagc

SEQ ID NO: 20243 - DNA, 2526 bp, synthetic construct
  source 1..2526: mol_type = other DNA
atggccttaccagtgaccgccttgctcctgccgctggccttgctgctccacgccgccaggccggacatccagatgacacagagccctagcagcctgtctgccagcgtgggagacagagtgaccatcacctgtctggcctccgaggacatctacgacaacctggcctggtatcagcagaagcctggcaaggcccctaagctgctgatctactacgccagctctctccaggatggcgtgcccagcagattttctggcagcggctctggcaccgactacaccctgacaatatccagcctccagcctgaggacttcgccacctactactgcctgcaagacagcgagtacccctggacatttctcgaggacctgaagaacgtgttcccacctgaggtggccgtgttcgagcctagcgaggccgagatcagccacacccagaaagccaccctcgtgtgcctggctaccggcttctaccccgaccatgtggaactgtcttggtgggtcaacggcaaagaggtgcacagcggcgtgtgtaccgacccccagccactgaaagaacagcccgccctgaacgacagccggtactgcctgagcagcagactgagagtgtccgccaccttctggcagaacccccggaaccacttcagatgccaggtgcagttctacggcctgagcgagaacgacgagtggacccaggacagagccaagcccgtgacccagatcgtgtctgccgaagcctggggcagagccgattgcggctttaccagcgagagctaccagcagggcgtgctgagcgccaccatcctgtacgagatcctgctgggcaaggccaccctgtacgccgtgctggtgtctgccctggtgctgatggctatggtcaagcggaaggacagccggggaagggccaagcgatctggatctggagcaacaaacttctcactactcaaacaagcaggtgacgtggaggagaatcccgggcctactagtatggactggatttggcgcatccttttccttgtcggcgctgctaccggcgcgcattccttcgaagaagtgacactgaaagagtctggccccgctctggtcaagcccacacaaaccctgacactgacctgcaccttcagcggctttagcctgaccacatacggcatgggcgtcggctggattagacagcctcctggaaaagccctggaatggctggctaacatttggtgggacgacgacaagtattacaaccccagcctgaagaaccggctgaccatcagcaaggacaccagcaagaaccaggtggtgctgaccatgaccaacatggaccctgtggacaccgccacatattactgcgccagaatcggccccatcaagtaccccaccgctccttacagatacttcgacttctggggccagggcacaatggtcaccgttagctctacgcgtatccagaaccctgatcctgccgtgtaccagctgcgggatagcaagagcagcgacaagagcgtgtgtctgttcaccgacttcgacagccagaccaacgtgtcccagagcaaggactccgacgtgtacatcaccgataagtgcgtgctggacatgcggagcatggacttcaagagcaactccgccgtggcctggtccaacaagtccgatttcgcctgcgccaacgccttcaacaacagcattatccccgaggacacattcttcccaagccccgagagcagctgcgacgtgaagctggtggaaaagagcttcgagacagacaccaacctgaacttccagaacctgagcgtgatcggcttcagaatcctgctgctgaaagtggccggctttaacctgctgatgaccctgcggctgtggtccagccgcgccaagagaagcggatctggcgtgaagcagaccctgaatttcgacctgctgaagctggctggcgacgtggaatccaacccaggcccttctagaggcgggatccacaccatggctacctacgaggtgctgtgcgaggtggcaagaaagctgggcaccgacgacagagaagtggtgctgttcctgctgaacgtgttcatccctcagcctacactggcccagctgatcggtgcactgagagccctgaaagaggaaggccggctgacctttcctctgctggccgaatgcctgttcagagccggaagaagggatctgctgcgggacctgctgcatctggaccccagatttctggaaagacacctggccggcaccatgagctacttcagcccttaccagctgaccgtgctgcacgttgacggcgaactgtgcgccagagatattcggagcctgatcttcctgagcaaggacaccatcggcagccggtctacccctcagacatttctgcactgggtgtactgcatggaaaacctggacctgctcggccccacagatgtggatgccctgatgtccatgctgagaagcctgagcagagtggacctccagagacaggtgcagacactgatgggactgcacctgagcggacctagccacagccagcactacagacacacccct

SEQ ID NO: 20244 - DNA, 1863 bp, synthetic construct
  source 1..1863: mol_type = other DNA
atggccttaccagtgaccgccttgctcctgccgctggccttgctgctccacgccgccaggccggacatccagatgacacagagccctagcagcctgtctgccagcgtgggagacagagtgaccatcacctgtctggcctccgaggacatctacgacaacctggcctggtatcagcagaagcctggcaaggcccctaagctgctgatctactacgccagctctctccaggatggcgtgcccagcagattttctggcagcggctctggcaccgactacaccctgacaatatccagcctccagcctgaggacttcgccacctactactgcctgcaagacagcgagtacccctggacatttctcgagatccagaaccctgatcctgccgtgtaccagctgcgggatagcaagagcagcgacaagagcgtgtgtctgttcaccgacttcgacagccagaccaacgtgtcccagagcaaggactccgacgtgtacatcaccgataagtgcgtgctggacatgcggagcatggacttcaagagcaactccgccgtggcctggtccaacaagtccgatttcgcctgcgccaacgccttcaacaacagcattatccccgaggacacattcttcccaagccccgagagcagctgcgacgtgaagctggtggaaaagagcttcgagacagacaccaacctgaacttccagaacctgagcgtgatcggcttcagaatcctgctgctgaaagtggccggctttaacctgctgatgaccctgcggctgtggtccagccgcgccaagagaagcggatctggcgtgaagcagaccctgaatttcgacctgctgaagctggctggcgacgtggaatccaacccaggccctactagtatggactggatttggcgcatccttttccttgtcggcgctgctaccggcgcgcattccttcgaagaagtgacactgaaagagtctggccccgctctggtcaagcccacacaaaccctgacactgacctgcaccttcagcggctttagcctgaccacatacggcatgggcgtcggctggattagacagcctcctggaaaagccctggaatggctggctaacatttggtgggacgacgacaagtattacaaccccagcctgaagaaccggctgaccatcagcaaggacaccagcaagaaccaggtggtgctgaccatgaccaacatggaccctgtggacaccgccacatattactgcgccagaatcggccccatcaagtaccccaccgctccttacagatacttcgacttctggggccagggcacaatggtcaccgttagctctacgcgtgaggacctgaagaacgtgttcccacctgaggtggccgtgttcgagcctagcgaggccgagatcagccacacccagaaagccaccctcgtgtgcctggctaccggcttctaccccgaccatgtggaactgtcttggtgggtcaacggcaaagaggtgcacagcggcgtgtgtaccgacccccagccactgaaagaacagcccgccctgaacgacagccggtactgcctgagcagcagactgagagtgtccgccaccttctggcagaacccccggaaccacttcagatgccaggtgcagttctacggcctgagcgagaacgacgagtggacccaggacagagccaagcccgtgacccagatcgtgtctgccgaagcctggggcagagccgattgcggctttaccagcgagagctaccagcagggcgtgctgagcgccaccatcctgtacgagatcctgctgggcaaggccaccctgtacgccgtgctggtgtctgccctggtgctgatggctatggtcaagcggaaggacagccgggga

SEQ ID NO: 20245 - DNA, 2529 bp, synthetic construct
  source 1..2529: mol_type = other DNA
atggccttaccagtgaccgccttgctcctgccgctggccttgctgctccacgccgccaggccggacatccagatgacacagagccctagcagcctgtctgccagcgtgggagacagagtgaccatcacctgtctggcctccgaggacatctacgacaacctggcctggtatcagcagaagcctggcaaggcccctaagctgctgatctactacgccagctctctccaggatggcgtgcccagcagattttctggcagcggctctggcaccgactacaccctgacaatatccagcctccagcctgaggacttcgccacctactactgcctgcaagacagcgagtacccctggacatttctcgagatccagaaccctgatcctgccgtgtaccagctgcgggatagcaagagcagcgacaagagcgtgtgtctgttcaccgacttcgacagccagaccaacgtgtcccagagcaaggactccgacgtgtacatcaccgataagtgcgtgctggacatgcggagcatggacttcaagagcaactccgccgtggcctggtccaacaagtccgatttcgcctgcgccaacgccttcaacaacagcattatccccgaggacacattcttcccaagccccgagagcagctgcgacgtgaagctggtggaaaagagcttcgagacagacaccaacctgaacttccagaacctgagcgtgatcggcttcagaatcctgctgctgaaagtggccggctttaacctgctgatgaccctgcggctgtggtccagccgcgccaagagaagcggatctggcgtgaagcagaccctgaatttcgacctgctgaagctggctggcgacgtggaatccaacccaggccctactagtatggactggatttggcgcatccttttccttgtcggcgctgctaccggcgcgcattccttcgaagaagtgacactgaaagagtctggccccgctctggtcaagcccacacaaaccctgacactgacctgcaccttcagcggctttagcctgaccacatacggcatgggcgtcggctggattagacagcctcctggaaaagccctggaatggctggctaacatttggtgggacgacgacaagtattacaaccccagcctgaagaaccggctgaccatcagcaaggacaccagcaagaaccaggtggtgctgaccatgaccaacatggaccctgtggacaccgccacatattactgcgccagaatcggccccatcaagtaccccaccgctccttacagatacttcgacttctggggccagggcacaatggtcaccgttagctctacgcgtgaggacctgaagaacgtgttcccacctgaggtggccgtgttcgagcctagcgaggccgagatcagccacacccagaaagccaccctcgtgtgcctggctaccggcttctaccccgaccatgtggaactgtcttggtgggtcaacggcaaagaggtgcacagcggcgtgtgtaccgacccccagccactgaaagaacagcccgccctgaacgacagccggtactgcctgagcagcagactgagagtgtccgccaccttctggcagaacccccggaaccacttcagatgccaggtgcagttctacggcctgagcgagaacgacgagtggacccaggacagagccaagcccgtgacccagatcgtgtctgccgaagcctggggcagagccgattgcggctttaccagcgagagctaccagcagggcgtgctgagcgccaccatcctgtacgagatcctgctgggcaaggccaccctgtacgccgtgctggtgtctgccctggtgctgatggctatggtcaagcggaaggacagccggggaagggccaagcgatctggatctggagcaacaaacttctcactactcaaacaagcaggtgacgtggaggagaatcccgggccttctagaggcgggatccacaccatggctacctacgaggtgctgtgcgaggtggcaagaaagctgggcaccgacgacagagaagtggtgctgttcctgctgaacgtgttcatccctcagcctacactggcccagctgatcggtgcactgagagccctgaaagaggaaggccggctgacctttcctctgctggccgaatgcctgttcagagccggaagaagggatctgctgcgggacctgctgcatctggaccccagatttctggaaagacacctggccggcaccatgagctacttcagcccttaccagctgaccgtgctgcacgttgacggcgaactgtgcgccagagatattcggagcctgatcttcctgagcaaggacaccatcggcagccggtctacccctcagacatttctgcactgggtgtactgcatggaaaacctggacctgctcggccccacagatgtggatgccctgatgtccatgctgagaagcctgagcagagtggacctccagagacaggtgcagacactgatgggactgcacctgagcggacctagccacagccagcactacagacacacccct

SEQ ID NO: 20246 - DNA, 2688 bp, synthetic construct
  source 1..2688: mol_type = other DNA
atggccttaccagtgaccgccttgctcctgccgctggccttgctgctccacgccgccaggccgctcgaggggaaaccaattcccaaccctcttctgggactggattcaaccggcagcggcgaggacctgaagaacgtgttcccacctgaggtggccgtgttcgagcctagcaaggccgagatcgcccacacccagaaagccaccctcgtgtgcctggctaccggcttctaccccgaccatgtggaactgtcttggtgggtcaacggcaaagaggtgcacagcggcgtgtgtaccgacccccagccactgaaagaacagcccgccctgaacgacagccggtactgcctgagcagcagactgagagtgtccgccaccttctggcagaacccccggaaccacttcagatgccaggtgcagttctacggcctgagcgagaacgacgagtggacccaggacagagccaagcccgtgacccagatcgtgtctgccgaagcctggggcagagccgattgcggcatcaccagcgccagctaccaccagggcgtgctgagcgccaccatcctgtacgagatcctgctgggcaaggccaccctgtacgccgtgctggtgtctgccctggtgctgatggctatggtcaagcggaaggacagccggggaagggccaagcgatctggatctggagcaacaaacttctcactactcaaacaagcaggtgacgtggaggagaatcccgggcctactagcatggccttaccagtgaccgccttgctcctgccgctggccttgctgctccacgccgccaggccggacatccagatgacacagagccctagcagcctgtctgccagcgtgggagacagagtgaccatcacctgtctggcctccgaggacatctacgacaacctggcctggtatcagcagaagcctggcaaggcccctaagctgctgatctactacgccagctctctccaggatggcgtgcccagcagattttctggcagcggctctggcaccgactacaccctgacaatatccagcctccagcctgaggacttcgccacctactactgcctgcaagacagcgagtacccctggacatttggcggaggcggaagtggaggcggaggatctggcggcggaggctctgaagtgacactgaaagagtctggccccgctctggtcaagcccacacaaaccctgacactgacctgcaccttcagcggctttagcctgaccacatacggcatgggcgtcggctggattagacagcctcctggaaaagccctggaatggctggctaacatttggtgggacgacgacaagtattacaaccccagcctgaagaaccggctgaccatcagcaaggacaccagcaagaaccaggtggtgctgaccatgaccaacatggaccctgtggacaccgccacatattactgcgccagaatcggccccatcaagtaccccaccgctccttacagatacttcgacttctggggccagggcacaatggtcaccgttagctctacgcgtgagcagaaactgatctcggaagaggatgggagcggcatccagaaccctgatcctgccgtgtaccagctgcgggatagcaagagcagcgacaagagcgtgtgtctgttcaccgacttcgacagccagaccaacgtgtcccagagcaaggactccgacgtgtacatcaccgataagtgcgtgctggacatgcggagcatggacttcaagagcaactccgccgtggcctggtccaacaagtccgatttcgcctgcgccaacgccttcaacaacagcattatccccgaggacacattcttcccaagcagcgacgtgccctgcgacgtgaagctggtggaaaagagcttcgagacagacaccaacctgaacttccagaacctgagcgtgatcggcttcagaatcctgctgctgaaagtggccggctttaacctgctgatgaccctgcggctgtggtccagccgcgccaagagaagcggatctggcgtgaagcagaccctgaatttcgacctgctgaagctggctggcgacgtggaatccaacccaggcccttctagaggccatatgaccgagtacaagcccacggtgcgcctcgccacccgcgacgacgtccccagggccgtacgcaccctcgccgccgcgttcgccgactaccccgccacgcgccacaccgtcgatccggaccgccacatcgagcgggtcaccgagctgcaagaactcttcctcacgcgcgtcgggctcgacatcggcaaggtgtgggtcgcggacgacggcgccgcggtggcggtctggaccacgccggagagcgtcgaagcgggggcggtgttcgccgagatcggcccgcgcatggccgagttgagcggttcccggctggccgcgcagcaacagatggaaggcctcctggcgccgcaccggcccaaggagcccgcgtggttcctggccaccgtcggcgtctcgcccgaccaccagggcaagggtctgggcagcgccgtcgtgctccccggagtggaggcggccgagcgcgccggggtgcccgccttcctggagacctccgcgccccgcaacctccccttctacgagcggctcggcttcaccgtcaccgccgacgtcgaggtgcccgaaggaccgcgcacctggtgcatgacccgcaagcccggtgcctga

SEQ ID NO: 20247 - DNA, 2691 bp, synthetic construct
  source 1..2691: mol_type = other DNA
atggccttaccagtgaccgccttgctcctgccgctggccttgctgctccacgccgccaggccgctcgagcagaaactgatctcggaagaggatctgggctccggcgatcgccctgatcctgccgtgtaccagctgcgggatagcaagagcagcgacaagagcgtgtgtctgttcaccgacttcgacagccagaccaacgtgtcccagagcaaggactccgacgtgtacatcaccgataagtgcgtgctggacatgcggagcatggacttcaagagcaactccgccgtggcctggtccaacaagtccgatttcgcctgcgccaacgccttcaacaacagcattatccccgaggacacattcttcccaagccccgagagcagctgcgacgtgaagctggtggaaaagagcttcgagacagacaccaacctgaacttccagaacctgagcgtgatcggcttcagaatcctgctgctgaaagtggccggctttaacctgctgatgaccctgcggctgtggtccagctctagtcgcgccaagagaagcggatctggcgtgaagcagaccctgaatttcgacctgctgaagctggctggcgacgtggaatccaacccaggccccactagcatggccttaccagtgaccgccttgctcctgccgctggccttgctgctccacgccgccaggccggacatccagatgacacagagccctagcagcctgtctgccagcgtgggagacagagtgaccatcacctgtctggcctccgaggacatctacgacaacctggcctggtatcagcagaagcctggcaaggcccctaagctgctgatctactacgccagctctctccaggatggcgtgcccagcagattttctggcagcggctctggcaccgactacaccctgacaatatccagcctccagcctgaggacttcgccacctactactgcctgcaagacagcgagtacccctggacatttggcggaggcggaagtggaggcggaggatctggcggcggaggctctgaagtgacactgaaagagtctggccccgctctggtcaagcccacacaaaccctgacactgacctgcaccttcagcggctttagcctgaccacatacggcatgggcgtcggctggattagacagcctcctggaaaagccctggaatggctggctaacatttggtgggacgacgacaagtattacaaccccagcctgaagaaccggctgaccatcagcaaggacaccagcaagaaccaggtggtgctgaccatgaccaacatggaccctgtggacaccgccacatattactgcgccagaatcggccccatcaagtaccccaccgctccttacagatacttcgacttctggggccagggcacaatggtcaccgttagctctacgcgtgggaaaccaattcccaaccctcttctgggactggattcaaccggcagcggcgaggacctgaagaacgtgttcccacctgaggtggccgtgttcgagcctagcgaggccgagatcagccacacccagaaagccaccctcgtgtgcctggctaccggcttctaccccgaccatgtggaactgtcttggtgggtcaacggcaaagaggtgcacagcggcgtgtgtaccgacccccagccactgaaagaacagcccgccctgaacgacagccggtactgcctgagcagcagactgagagtgtccgccaccttctggcagaacccccggaaccacttcagatgccaggtgcagttctacggcctgagcgagaacgacgagtggacccaggacagagccaagcccgtgacccagatcgtgtctgccgaagcctggggcagagccgattgcggctttaccagcgagagctaccagcagggcgtgctgagcgccaccatcctgtacgagatcctgctgggcaaggccaccctgtacgccgtgctggtgtctgccctggtgctgatggctatggtcaagcggaaggacagccggggaagggccaagcgatctggatctggagcaacaaacttctcactactcaaacaagcaggtgacgtggaggagaatcccgggccttctagaggccatatgaccgagtacaagcccacggtgcgcctcgccacccgcgacgacgtccccagggccgtacgcaccctcgccgccgcgttcgccgactaccccgccacgcgccacaccgtcgatccggaccgccacatcgagcgggtcaccgagctgcaagaactcttcctcacgcgcgtcgggctcgacatcggcaaggtgtgggtcgcggacgacggcgccgcggtggcggtctggaccacgccggagagcgtcgaagcgggggcggtgttcgccgagatcggcccgcgcatggccgagttgagcggttcccggctggccgcgcagcaacagatggaaggcctcctggcgccgcaccggcccaaggagcccgcgtggttcctggccaccgtcggcgtctcgcccgaccaccagggcaagggtctgggcagcgccgtcgtgctccccggagtggaggcggccgagcgcgccggggtgcccgccttcctggagacctccgcgccccgcaacctccccttctacgagcggctcggcttcaccgtcaccgccgacgtcgaggtgcccgaaggaccgcgcacctggtgcatgacccgcaagcccggtgcctga

SEQ ID NO: 20248 - DNA, 2553 bp, synthetic construct
  source 1..2553: mol_type = other DNA
atggccttaccagtgaccgccttgctcctgccgctggccttgctgctccacgccgccaggccggacatccagatgacacagagccctagcagcctgtctgccagcgtgggagacagagtgaccatcacctgtctggcctccgaggacatctacgacaacctggcctggtatcagcagaagcctggcaaggcccctaagctgctgatctactacgccagctctctccaggatggcgtgcccagcagattttctggcagcggctctggcaccgactacaccctgacaatatccagcctccagcctgaggacttcgccacctactactgcctgcaagacagcgagtacccctggacatttctcgaggacctgaagaacgtgttcccacctgaggtggccgtgttcgagcctagcgaggccgagatcagccacacccagaaagccaccctcgtgtgcctggctaccggcttctaccccgaccatgtggaactgtcttggtgggtcaacggcaaagaggtgcacagcggcgtgtctaccgacccccagccactgaaagaacagcccgccctgaacgacagccggtactgcctgagcagcagactgagagtgtccgccaccttctggcagaacccccggaaccacttcagatgccaggtgcagttctacggcctgagcgagaacgacgagtggacccaggacagagccaagcccgtgacccagatcgtgtctgccgaagcctggggcagagccgattgcggctttaccagcgagagctaccagcagggcgtgctgagcgccaccatcctgtacgagatcctgctgggcaaggccaccctgtacgccgtgctggtgtctgccctggtgctgatggctatggtcaagcggaaggacagccggggaagggccaagcgatctggatctggagcaacaaacttctcactactcaaacaagcaggtgacgtggaggagaatcccgggcctactagtatggactggatttggcgcatccttttccttgtcggcgctgctaccggcgcgcattccttcgaagaagtgacactgaaagagtctggccccgctctggtcaagcccacacaaaccctgacactgacctgcaccttcagcggctttagcctgaccacatacggcatgggcgtcggctggattagacagcctcctggaaaagccctggaatggctggctaacatttggtgggacgacgacaagtattacaaccccagcctgaagaaccggctgaccatcagcaaggacaccagcaagaaccaggtggtgctgaccatgaccaacatggaccctgtggacaccgccacatattactgcgccagaatcggccccatcaagtaccccaccgctccttacagatacttcgacttctggggccagggcacaatggtcaccgttagctctacgcgtatccagaaccctgatcctgccgtgtaccagctgcgggatagcaagagcagcgacaagagcgtgtgtctgttcaccgacttcgacagccagaccaacgtgtcccagagcaaggactccgacgtgtacatcaccgataagaccgtgctggacatgcggagcatggacttcaagagcaactccgccgtggcctggtccaacaagtccgatttcgcctgcgccaacgccttcaacaacagcattatccccgaggacacattcttcccaagccccgagagcagctgcgacgtgaagctggtggaaaagagcttcgagacagacaccaacctgaacttccagaacctgagcgtgatcggcttcagaatcctgctgctgaaagtggccggctttaacctgctgatgaccctgcggctgtggtccagccgcgccaagagaagcggatctggcgtgaagcagaccctgaatttcgacctgctgaagctggctggcgacgtggaatccaacccaggcccttctagaggccatatgaccgagtacaagcccacggtgcgcctcgccacccgcgacgacgtccccagggccgtacgcaccctcgccgccgcgttcgccgactaccccgccacgcgccacaccgtcgatccggaccgccacatcgagcgggtcaccgagctgcaagaactcttcctcacgcgcgtcgggctcgacatcggcaaggtgtgggtcgcggacgacggcgccgcggtggcggtctggaccacgccggagagcgtcgaagcgggggcggtgttcgccgagatcggcccgcgcatggccgagttgagcggttcccggctggccgcgcagcaacagatggaaggcctcctggcgccgcaccggcccaaggagcccgcgtggttcctggccaccgtcggcgtctcgcccgaccaccagggcaagggtctgggcagcgccgtcgtgctccccggagtggaggcggccgagcgcgccggggtgcccgccttcctggagacctccgcgccccgcaacctccccttctacgagcggctcggcttcaccgtcaccgccgacgtcgaggtgcccgaaggaccgcgcacctggtgcatgacccgcaagcccggtgcctga

SEQ ID NO: 20249 - DNA, 2799 bp, synthetic construct
  source 1..2799: mol_type = other DNA
atggccttaccagtgaccgccttgctcctgccgctggccttgctgctccacgccgccaggccggacatccagatgacacagagccctagcagcctgtctgccagcgtgggagacagagtgaccatcacctgtctggcctccgaggacatctacgacaacctggcctggtatcagcagaagcctggcaaggcccctaagctgctgatctactacgccagctctctccaggatggcgtgcccagcagattttctggcagcggctctggcaccgactacaccctgacaatatccagcctccagcctgaggacttcgccacctactactgcctgcaagacagcgagtacccctggacatttctcgaggacctgaagaacgtgttcccacctgaggtggccgtgttcgagcctagcgaggccgagatcagccacacccagaaagccaccctcgtgtgcctggctaccggcttctaccccgaccatgtggaactgtcttggtgggtcaacggcaaagaggtgcacagcggcgtgtctaccgacccccagccactgaaagaacagcccgccctgaacgacagccggtactgcctgagcagcagactgagagtgtccgccaccttctggcagaacccccggaaccacttcagatgccaggtgcagttctacggcctgagcgagaacgacgagtggacccaggacagagccaagcccgtgacccagatcgtgtctgccgaagcctggggcagagccgattgcggctttaccagcgagagctaccagcagggcgtgctgagcgccaccatcctgtacgagatcctgctgggcaaggccaccctgtacgccgtgctggtgtctgccctggtgctgatggctatggtcaagcggaaggacagccggggaagggccaagcgatctggatctggagcaacaaacttctcactactcaaacaagcaggtgacgtggaggagaatcccgggcctactagtatggactggatttggcgcatccttttccttgtcggcgctgctaccggcgcgcattccttcgaagaagtgacactgaaagagtctggccccgctctggtcaagcccacacaaaccctgacactgacctgcaccttcagcggctttagcctgaccacatacggcatgggcgtcggctggattagacagcctcctggaaaagccctggaatggctggctaacatttggtgggacgacgacaagtattacaaccccagcctgaagaaccggctgaccatcagcaaggacaccagcaagaaccaggtggtgctgaccatgaccaacatggaccctgtggacaccgccacatattactgcgccagaatcggccccatcaagtaccccaccgctccttacagatacttcgacttctggggccagggcacaatggtcaccgttagctctacgcgtgagcagaaactgatctcggaagaggatgggagcggcaccccattcccttctctggcccctcccatcatgctgctggtggacggcaagcagcagatggtggtcgtgtgcctggtgctggatgtggccccacctggactggacagccccatctggtttagcgccggcaatggctctgccctggacgcctttacctacggcccaagccctgccaccgatggcacctggacaaatctggcccacctgagcctgcccagcgaggaactggcttcttgggagcctctcgtgtgccacacaggacctggcgctgagggacacagcagatccacccagcctatgcacctgtctggcgaggccagcaccgccagaacctgtcctcaggaacctctgagaggcacccctggcggagcactgtggctgggagtgctgagactgctgctgttcaagctgctgctgtttgacctgctgctgacctgctcctgtctgtgcgatcctgccggccctctgccttctcctgccaccaccacaagactgagagccctgggcagccacagactgcaccctgccacagagacaggcggcagagaggccacaagcagccctagaccccagcccagagacagaagatggggcgataccccccctggcagaaagcctggatctccagtccgcgccaagagaagcggatctggcgtgaagcagaccctgaatttcgacctgctgaagctggctggcgacgtggaatccaacccaggcccttctagaggccatatgaccgagtacaagcccacggtgcgcctcgccacccgcgacgacgtccccagggccgtacgcaccctcgccgccgcgttcgccgactaccccgccacgcgccacaccgtcgatccggaccgccacatcgagcgggtcaccgagctgcaagaactcttcctcacgcgcgtcgggctcgacatcggcaaggtgtgggtcgcggacgacggcgccgcggtggcggtctggaccacgccggagagcgtcgaagcgggggcggtgttcgccgagatcggcccgcgcatggccgagttgagcggttcccggctggccgcgcagcaacagatggaaggcctcctggcgccgcaccggcccaaggagcccgcgtggttcctggccaccgtcggcgtctcgcccgaccaccagggcaagggtctgggcagcgccgtcgtgctccccggagtggaggcggccgagcgcgccggggtgcccgccttcctggagacctccgcgccccgcaacctccccttctacgagcggctcggcttcaccgtcaccgccgacgtcgaggtgcccgaaggaccgcgcacctggtgcatgacccgcaagcccggtgcctga

SEQ ID NO: 20250 - DNA, 2853 bp, synthetic construct
  source 1..2853: mol_type = other DNA
atggccttaccagtgaccgccttgctcctgccgctggccttgctgctccacgccgccaggccgctcgaggacctgaagaacgtgttcccacctgaggtggccgtgttcgagcctagcgaggccgagatcagccacacccagaaagccaccctcgtgtgcctggctaccggcttctaccccgaccatgtggaactgtcttggtgggtcaacggcaaagaggtgcacagcggcgtgtctaccgacccccagccactgaaagaacagcccgccctgaacgacagccggtactgcctgagcagcagactgagagtgtccgccaccttctggcagaacccccggaaccacttcagatgccaggtgcagttctacggcctgagcgagaacgacgagtggacccaggacagagccaagcccgtgacccagatcgtgtctgccgaagcctggggcagagccgattgcggctttaccagcgagagctaccagcagggcgtgctgagcgccaccatcctgtacgagatcctgctgggcaaggccaccctgtacgccgtgctggtgtctgccctggtgctgatggctatggtcaagcggaaggacagccggggaagggccaagcgatctggatctggagcaacaaacttctcactactcaaacaagcaggtgacgtggaggagaatcccgggcctactagcatggccttaccagtgaccgccttgctcctgccgctggccttgctgctccacgccgccaggccggacatccagatgacacagagccctagcagcctgtctgccagcgtgggagacagagtgaccatcacctgtctggcctccgaggacatctacgacaacctggcctggtatcagcagaagcctggcaaggcccctaagctgctgatctactacgccagctctctccaggatggcgtgcccagcagattttctggcagcggctctggcaccgactacaccctgacaatatccagcctccagcctgaggacttcgccacctactactgcctgcaagacagcgagtacccctggacatttggcggaggcggaagtggaggcggaggatctggcggcggaggctctgaagtgacactgaaagagtctggccccgctctggtcaagcccacacaaaccctgacactgacctgcaccttcagcggctttagcctgaccacatacggcatgggcgtcggctggattagacagcctcctggaaaagccctggaatggctggctaacatttggtgggacgacgacaagtattacaaccccagcctgaagaaccggctgaccatcagcaaggacaccagcaagaaccaggtggtgctgaccatgaccaacatggaccctgtggacaccgccacatattactgcgccagaatcggccccatcaagtaccccaccgctccttacagatacttcgacttctggggccagggcacaatggtcaccgttagctctacgcgtgagcagaaactgatctcggaagaggatctggggagcggcaccccattcccttctctggcccctcccatcatgctgctggtggacggcaagcagcagatggtggtcgtgtgcctggtgctggatgtggccccacctggactggacagccccatctggtttagcgccggcaatggctctgccctggacgcctttacctacggcccaagccctgccaccgatggcacctggacaaatctggcccacctgagcctgcccagcgaggaactggcttcttgggagcctctcgtgtgccacacaggacctggcgctgagggacacagcagatccacccagcctatgcacctgtctggcgaggccagcaccgccagaacctgtcctcaggaacctctgagaggcacccctggcggagcactgtggctgggagtgctgagactgctgctgttcaagctgctgctgtttgacctgctgctgacctgctcctgtctgtgcgatcctgccggccctctgccttctcctgccaccaccacaagactgagagccctgggcagccacagactgcaccctgccacagagacaggcggcagagaggccacaagcagccctagaccccagcccagagacagaagatggggcgataccccccctggcagaaagcctggatctccagtccgcgccaagagaagcggatctggcgtgaagcagaccctgaatttcgacctgctgaagctggctggcgacgtggaatccaacccaggcccttctagatctagaggccatatgaccgagtacaagcccacggtgcgcctcgccacccgcgacgacgtccccagggccgtacgcaccctcgccgccgcgttcgccgactaccccgccacgcgccacaccgtcgatccggaccgccacatcgagcgggtcaccgagctgcaagaactcttcctcacgcgcgtcgggctcgacatcggcaaggtgtgggtcgcggacgacggcgccgcggtggcggtctggaccacgccggagagcgtcgaagcgggggcggtgttcgccgagatcggcccgcgcatggccgagttgagcggttcccggctggccgcgcagcaacagatggaaggcctcctggcgccgcaccggcccaaggagcccgcgtggttcctggccaccgtcggcgtctcgcccgaccaccagggcaagggtctgggcagcgccgtcgtgctccccggagtggaggcggccgagcgcgccggggtgcccgccttcctggagacctccgcgccccgcaacctccccttctacgagcggctcggcttcaccgtcaccgccgacgtcgaggtgcccgaaggaccgcgcacctggtgcatgacccgcaagcccggtgcctga

SEQ ID NO: 20251 - DNA, 2664 bp, synthetic construct
  source 1..2664: mol_type = other DNA
atggccttaccagtgaccgccttgctcctgccgctggccttgctgctccacgccgccaggccggacatccagatgacacagagccctagcagcctgtctgccagcgtgggagacagagtgaccatcacctgtctggcctccgaggacatctacgacaacctggcctggtatcagcagaagcctggcaaggcccctaagctgctgatctactacgccagctctctccaggatggcgtgcccagcagattttctggcagcggctctggcaccgactacaccctgacaatatccagcctccagcctgaggacttcgccacctactactgcctgcaagacagcgagtacccctggacatttctcgaggggaaaccaattcccaaccctcttctgggactggattcaaccggcagcggcgacaagcagctggacgccgacgtgtcccccaagcctaccatcttcctgccctctatcgccgagacaaagctccagaaggccggcacctacctgtgcctgctggaaaagttcttcccagatgtgattaagatccactggcaggaaaagaagtccaacaccatcctgggcagccaggaaggcaacaccatgaagaccaacgacacctacatgaagttcagctggctgaccgtgcccgagaagtccctggacaaagaacacagatgcatcgtgcggcacgaaaacaacaagaacggcgtggaccaggaaatcatcttcccacccatcaagaccgatgtgattacaatggaccccaaggacaactgctccaaggacgccaacgataccctgctgctccagctgaccaacaccagcgcctactacatgtacttgttgctgctgctgaagtccgtggtgtacttcgccatcatcacatgctgcctgctgcggagaaccgccttctgctgcaacggcgagaagtctagggccaagcgatctggatctggagcaacaaacttctcactactcaaacaagcaggtgacgtggaggagaatcccgggcctactagtatggactggatttggcgcatccttttccttgtcggcgctgctaccggcgcgcattccttcgaagaagtgacactgaaagagtctggccccgctctggtcaagcccacacaaaccctgacactgacctgcaccttcagcggctttagcctgaccacatacggcatgggcgtcggctggattagacagcctcctggaaaagccctggaatggctggctaacatttggtgggacgacgacaagtattacaaccccagcctgaagaaccggctgaccatcagcaaggacaccagcaagaaccaggtggtgctgaccatgaccaacatggaccctgtggacaccgccacatattactgcgccagaatcggccccatcaagtaccccaccgctccttacagatacttcgacttctggggccagggcacaatggtcaccgttagctctacgcgtgagcagaaactgatctcggaagaggatgggagcggcagccagcctcacaccaagcccagcgtgttcgtgatgaagaacggcaccaacgtggcctgcctcgtgaaagagttctaccccaaggacatcaggatcaacctggtgtccagcaagaagatcaccgagttcgaccccgccatcgtgatctcccccagcggcaagtacaacgccgtgaagctggggaagtacgaggacagcaacagcgtgacctgctccgtgcagcacgacaacaagaccgtgcacagcaccgactttgaagtgaaaaccgactccaccgaccacgtgaagcccaaagagacagagaacaccaagcagcccagcaagagctgccacaagcccaaggccatcgtgcacaccgagaaagtgaacatgatgagcctgaccgtgctgggcctgcggatgctgttcgccaaaaccgtggccgtgaacttcctgctgaccgccaagctgttcttcctccgcgccaagagaagcggatctggcgtgaagcagaccctgaatttcgacctgctgaagctggctggcgacgtggaatccaacccaggcccttctagaggccatatgaccgagtacaagcccacggtgcgcctcgccacccgcgacgacgtccccagggccgtacgcaccctcgccgccgcgttcgccgactaccccgccacgcgccacaccgtcgatccggaccgccacatcgagcgggtcaccgagctgcaagaactcttcctcacgcgcgtcgggctcgacatcggcaaggtgtgggtcgcggacgacggcgccgcggtggcggtctggaccacgccggagagcgtcgaagcgggggcggtgttcgccgagatcggcccgcgcatggccgagttgagcggttcccggctggccgcgcagcaacagatggaaggcctcctggcgccgcaccggcccaaggagcccgcgtggttcctggccaccgtcggcgtctcgcccgaccaccagggcaagggtctgggcagcgccgtcgtgctccccggagtggaggcggccgagcgcgccggggtgcccgccttcctggagacctccgcgccccgcaacctccccttctacgagcggctcggcttcaccgtcaccgccgacgtcgaggtgcccgaaggaccgcgcacctggtgcatgacccgcaagcccggtgcctga

SEQ ID NO: 20252 - DNA, 1875 bp, synthetic construct
  source 1..1875: mol_type = other DNA
atggccttaccagtgaccgccttgctcctgccgctggccttgctgctccacgccgccaggccggacatccagatgacacagagccctagcagcctgtctgccagcgtgggagacagagtgaccatcacctgtctggcctccgaggacatctacgacaacctggcctggtatcagcagaagcctggcaaggcccctaagctgctgatctactacgccagctctctccaggatggcgtgcccagcagattttctggcagcggctctggcaccgactacaccctgacaatatccagcctccagcctgaggacttcgccacctactactgcctgcaagacagcgagtacccctggacatttctcgagagccagcctcacaccaagcccagcgtgttcgtgatgaagaacggcaccaacgtggcctgcctcgtgaaagagttctaccccaaggacatcaggatcaacctggtgtccagcaagaagatcaccgagttcgaccccgccatcgtgatctcccccagcggcaagtacaacgccgtgaagctggggaagtacgaggacagcaacagcgtgacctgctccgtgcagcacgacaacaagaccgtgcacagcaccgactttgaagtgaaaaccgactccaccgaccacgtgaagcccaaagagacagagaacaccaagcagcccagcaagagctgccacaagcccaaggccatcgtgcacaccgagaaagtgaacatgatgagcctgaccgtgctgggcctgcggatgctgttcgccaaaaccgtggccgtgaacttcctgctgaccgccaagctgttcttcctcagggccaagcgatctggatctggagcaacaaacttctcactactcaaacaagcaggtgacgtggaggagaatcccgggcctactagtatggactggatttggcgcatccttttccttgtcggcgctgctaccggcgcgcattccttcgaagaagtgacactgaaagagtctggccccgctctggtcaagcccacacaaaccctgacactgacctgcaccttcagcggctttagcctgaccacatacggcatgggcgtcggctggattagacagcctcctggaaaagccctggaatggctggctaacatttggtgggacgacgacaagtattacaaccccagcctgaagaaccggctgaccatcagcaaggacaccagcaagaaccaggtggtgctgaccatgaccaacatggaccctgtggacaccgccacatattactgcgccagaatcggccccatcaagtaccccaccgctccttacagatacttcgacttctggggccagggcacaatggtcaccgttagctctacgcgtgacaagcagctggacgccgacgtgtcccccaagcctaccatcttcctgccctctatcgccgagacaaagctccagaaggccggcacctacctgtgcctgctggaaaagttcttcccagatgtgattaagatccactggcaggaaaagaagtccaacaccatcctgggcagccaggaaggcaacaccatgaagaccaacgacacctacatgaagttcagctggctgaccgtgcccgagaagtccctggacaaagaacacagatgcatcgtgcggcacgaaaacaacaagaacggcgtggaccaggaaatcatcttcccacccatcaagaccgatgtgattacaatggaccccaaggacaactgctccaaggacgccaacgataccctgctgctccagctgaccaacaccagcgcctactacatgtacttgttgctgctgctgaagtccgtggtgtacttcgccatcatcacatgctgcctgctgcggagaaccgccttctgctgcaacggcgagaagtct

SEQ ID NO: 20253 - DNA, 2709 bp, synthetic construct
  source 1..2709: mol_type = other DNA
atggccttaccagtgaccgccttgctcctgccgctggccttgctgctccacgccgccaggccgctcgaggggaaaccaattcccaaccctcttctgggactggattcaaccggcagcggcgacaagcagctggacgccgacgtgtcccccaagcctaccatcttcctgccctctatcgccgagacaaagctccagaaggccggcacctacctgtgcctgctggaaaagttcttcccagatgtgattaagatccactggcaggaaaagaagtccaacaccatcctgggcagccaggaaggcaacaccatgaagaccaacgacacctacatgaagttcagctggctgaccgtgcccgagaagtccctggacaaagaacacagatgcatcgtgcggcacgaaaacaacaagaacggcgtggaccaggaaatcatcttcccacccatcaagaccgatgtgattacaatggaccccaaggacaactgctccaaggacgccaacgataccctgctgctccagctgaccaacaccagcgcctactacatgtacttgttgctgctgctgaagtccgtggtgtacttcgccatcatcacatgctgcctgctgcggagaaccgccttctgctgcaacggcgagaagtctagggccaagcgatctggatctggagcaacaaacttctcactactcaaacaagcaggtgacgtggaggagaatcccgggcctactagcatggccttaccagtgaccgccttgctcctgccgctggccttgctgctccacgccgccaggccggacatccagatgacacagagccctagcagcctgtctgccagcgtgggagacagagtgaccatcacctgtctggcctccgaggacatctacgacaacctggcctggtatcagcagaagcctggcaaggcccctaagctgctgatctactacgccagctctctccaggatggcgtgcccagcagattttctggcagcggctctggcaccgactacaccctgacaatatccagcctccagcctgaggacttcgccacctactactgcctgcaagacagcgagtacccctggacatttggcggaggcggaagtggaggcggaggatctggcggcggaggctctgaagtgacactgaaagagtctggccccgctctggtcaagcccacacaaaccctgacactgacctgcaccttcagcggctttagcctgaccacatacggcatgggcgtcggctggattagacagcctcctggaaaagccctggaatggctggctaacatttggtgggacgacgacaagtattacaaccccagcctgaagaaccggctgaccatcagcaaggacaccagcaagaaccaggtggtgctgaccatgaccaacatggaccctgtggacaccgccacatattactgcgccagaatcggccccatcaagtaccccaccgctccttacagatacttcgacttctggggccagggcacaatggtcaccgttagctctacgcgtgagcagaaactgatctcggaagaggatgggagcggcagccagcctcacaccaagcccagcgtgttcgtgatgaagaacggcaccaacgtggcctgcctcgtgaaagagttctaccccaaggacatcaggatcaacctggtgtccagcaagaagatcaccgagttcgaccccgccatcgtgatctcccccagcggcaagtacaacgccgtgaagctggggaagtacgaggacagcaacagcgtgacctgctccgtgcagcacgacaacaagaccgtgcacagcaccgactttgaagtgaaaaccgactccaccgaccacgtgaagcccaaagagacagagaacaccaagcagcccagcaagagctgccacaagcccaaggccatcgtgcacaccgagaaagtgaacatgatgagcctgaccgtgctgggcctgcggatgctgttcgccaaaaccgtggccgtgaacttcctgctgaccgccaagctgttcttcctccgcgccaagagaagcggatctggcgtgaagcagaccctgaatttcgacctgctgaagctggctggcgacgtggaatccaacccaggcccttctagaggccatatgaccgagtacaagcccacggtgcgcctcgccacccgcgacgacgtccccagggccgtacgcaccctcgccgccgcgttcgccgactaccccgccacgcgccacaccgtcgatccggaccgccacatcgagcgggtcaccgagctgcaagaactcttcctcacgcgcgtcgggctcgacatcggcaaggtgtgggtcgcggacgacggcgccgcggtggcggtctggaccacgccggagagcgtcgaagcgggggcggtgttcgccgagatcggcccgcgcatggccgagttgagcggttcccggctggccgcgcagcaacagatggaaggcctcctggcgccgcaccggcccaaggagcccgcgtggttcctggccaccgtcggcgtctcgcccgaccaccagggcaagggtctgggcagcgccgtcgtgctccccggagtggaggcggccgagcgcgccggggtgcccgccttcctggagacctccgcgccccgcaacctccccttctacgagcggctcggcttcaccgtcaccgccgacgtcgaggtgcccgaaggaccgcgcacctggtgcatgacccgcaagcccggtgcctga

SEQ ID NO: 20254 - DNA, 3084 bp, synthetic construct
  source 1..3084: mol_type = other DNA
atggccttaccagtgaccgccttgctcctgccgctggccttgctgctccacgccgccaggccggacatccagatgacacagagccctagcagcctgtctgccagcgtgggagacagagtgaccatcacctgtctggcctccgaggacatctacgacaacctggcctggtatcagcagaagcctggcaaggcccctaagctgctgatctactacgccagctctctccaggatggcgtgcccagcagattttctggcagcggctctggcaccgactacaccctgacaatatccagcctccagcctgaggacttcgccacctactactgcctgcaagacagcgagtacccctggacatttggacagcctaaggccaatcctaccgtgacactgttccctccaagcagcgaagaactccaggccaacaaggccacacttgtgtgcctgatctccgacttctaccctggggctgtgacagtggcttggaaggccgatggatctcctgtgaaagccggcgtggaaaccaccaagccatccaagcagagcaacaacaaatacgccgccagctcctacctgagcctgacacctgagcagtggaagtcccacagatcctacagctgccaagtgacccacgaaggcagcaccgtggaaaagacagtggcccctacagagtgcagcggatcccagagcttcggcctgctggaccccaagctgtgctacctgctggatggcatcctgttcatctacggcgtgatcctgaccgccctgttcctgagagtgaagttcagcagaagcgccgacgcccctgcctaccagcagggacagaaccaactgtacaacgagctgaacctgggcagacgggaagagtacgacgtgctggacaagcggagaggcagggaccctgagatgggcggaaagccccagcggagaaagaacccccaggaaggactgtataacgaactccagaaagacaagatggccgaagcctacagcgagatcggcatgaagggcgagcggagaagaggcaagggccacgatggcctgtaccagggcctgagcaccgccaccaaggacacctatgacgccctgcacatgcaggccctgcctccaagaagggccaagcgatctggatctggagcaacaaacttctcactactcaaacaagcaggtgacgtggaggagaatcccgggcctactagtatggactggatttggcgcatccttttccttgtcggcgctgctaccggcgcgcattccttcgaagaagtgacactgaaagagtctggccccgctctggtcaagcccacacaaaccctgacactgacctgcaccttcagcggctttagcctgaccacatacggcatgggcgtcggctggattagacagcctcctggaaaagccctggaatggctggctaacatttggtgggacgacgacaagtattacaaccccagcctgaagaaccggctgaccatcagcaaggacaccagcaagaaccaggtggtgctgaccatgaccaacatggaccctgtggacaccgccacatattactgcgccagaatcggccccatcaagtaccccaccgctccttacagatacttcgacttctggggccagggcacaatggtcaccgttagctctgcctctacaaagggaccctccgtgtttcctctggctcccagcagcaagtctacaagcggaggaacagccgctctgggctgcctggtcaaggattactttcccgagcctgtgaccgtgtcctggaatagcggagcactgacaagcggcgtgcacacctttccagccgtgctgcaaagcagcggcctgtactctctgagcagcgtggtcacagtgcctagctctagcctgggcacccagacctacatctgcaatgtgaaccacaagcctagcaacaccaaggtggacaagagagtggaacccaagagctgtggtacccagagttttgggttgttggaccctaaattgtgctatctgttggacggaatcctgttcatttacggagtgatcctgaccgcattgttcctgcgggttaagttttccagatccgcagacgcacccgcttaccaacaagggcagaaccaactctacaatgaacttaatttggggcggagggaagagtacgacgttctggacaaaaggaggggacgagatcccgagatgggcggaaagcctcagcgaaggaagaatccgcaagaggggctttataacgaactccagaaagataaaatggcagaagcctatagtgagattgggatgaagggagaaaggaggaggggtaaaggtcacgatgggttgtaccaaggattgagcacagccactaaagatacctatgatgcgctccacatgcaggccctgccgccaagacgcgccaagagaagcggatctggcgtgaagcagaccctgaatttcgacctgctgaagctggctggcgacgtggaatccaacccaggcccttctagaggccatatgaccgagtacaagcccacggtgcgcctcgccacccgcgacgacgtccccagggccgtacgcaccctcgccgccgcgttcgccgactaccccgccacgcgccacaccgtcgatccggaccgccacatcgagcgggtcaccgagctgcaagaactcttcctcacgcgcgtcgggctcgacatcggcaaggtgtgggtcgcggacgacggcgccgcggtggcggtctggaccacgccggagagcgtcgaagcgggggcggtgttcgccgagatcggcccgcgcatggccgagttgagcggttcccggctggccgcgcagcaacagatggaaggcctcctggcgccgcaccggcccaaggagcccgcgtggttcctggccaccgtcggcgtctcgcccgaccaccagggcaagggtctgggcagcgccgtcgtgctccccggagtggaggcggccgagcgcgccggggtgcccgccttcctggagacctccgcgccccgcaacctccccttctacgagcggctcggcttcaccgtcaccgccgacgtcgaggtgcccgaaggaccgcgcacctggtgcatgacccgcaagcccggtgcctga

SEQ ID NO: 20255 - DNA, 2439 bp, synthetic construct
  source 1..2439: mol_type = other DNA
atggccttaccagtgaccgccttgctcctgccgctggccttgctgctccacgccgccaggccggacatccagatgacacagagccctagcagcctgtctgccagcgtgggagacagagtgaccatcacctgtctggcctccgaggacatctacgacaacctggcctggtatcagcagaagcctggcaaggcccctaagctgctgatctactacgccagctctctccaggatggcgtgcccagcagattttctggcagcggctctggcaccgactacaccctgacaatatccagcctccagcctgaggacttcgccacctactactgcctgcaagacagcgagtacccctggacatttctcgaggacctgaagaacgtgttcccacctgaggtggccgtgttcgagcctagcgaggccgagatcagccacacccagaaagccaccctcgtgtgcctggctaccggcttctaccccgaccatgtggaactgtcttggtgggtcaacggcaaagaggtgcacagcggcgtgtctaccgacccccagccactgaaagaacagcccgccctgaacgacagccggtactgcctgagcagcagactgagagtgtccgccaccttctggcagaacccccggaaccacttcagatgccaggtgcagttctacggcctgagcgagaacgacgagtggacccaggacagagccaagcccgtgacccagatcgtgtctgccgaagcctggggcagagccgattgcggatcccagagcttcggcctgctggaccccaagctgtgctacctgctggatggcatcctgttcatctacggcgtgatcctgaccgccctgttcctgagagtgaagttcagcagaagcgccgacgcccctgcctaccagcagggacagaaccaactgtacaacgagctgaacctgggcagacgggaagagtacgacgtgctggacaagcggagaggcagggaccctgagatgggcggaaagccccagcggagaaagaacccccaggaaggactgtataacgaactccagaaagacaagatggccgaagcctacagcgagatcggcatgaagggcgagcggagaagaggcaagggccacgatggcctgtaccagggcctgagcaccgccaccaaggacacctatgacgccctgcacatgcaggccctgcctccaagaagggccaagcgatctggatctggagcaacaaacttctcactactcaaacaagcaggtgacgtggaggagaatcccgggcctactagtatggactggatttggcgcatccttttccttgtcggcgctgctaccggcgcgcattccttcgaagaagtgacactgaaagagtctggccccgctctggtcaagcccacacaaaccctgacactgacctgcaccttcagcggctttagcctgaccacatacggcatgggcgtcggctggattagacagcctcctggaaaagccctggaatggctggctaacatttggtgggacgacgacaagtattacaaccccagcctgaagaaccggctgaccatcagcaaggacaccagcaagaaccaggtggtgctgaccatgaccaacatggaccctgtggacaccgccacatattactgcgccagaatcggccccatcaagtaccccaccgctccttacagatacttcgacttctggggccagggcacaatggtcaccgttagctctacgcgtatccagaaccctgatcctgccgtgtaccagctgcgggatagcaagagcagcgacaagagcgtgtgtctgttcaccgacttcgacagccagaccaacgtgtcccagagcaaggactccgacgtgtacatcaccgataagaccgtgctggacatgcggagcatggacttcaagagcaactccgccgtggcctggtccaacaagtccgatttcgcctgcgccaacgccttcaacaacagcattatccccgaggacacattcttcccaagccccgagagcagctgcggtacccagagttttgggttgttggaccctaaattgtgctatctgttggacggaatcctgttcatttacggagtgatcctgaccgcattgttcctgcgggttaagttttccagatccgcagacgcacccgcttaccaacaagggcagaaccaactctacaatgaacttaatttggggcggagggaagagtacgacgttctggacaaaaggaggggacgagatcccgagatgggcggaaagcctcagcgaaggaagaatccgcaagaggggctttataacgaactccagaaagataaaatggcagaagcctatagtgagattgggatgaagggagaaaggaggaggggtaaaggtcacgatgggttgtaccaaggattgagcacagccactaaagatacctatgatgcgctccacatgcaggccctgccgccaaga

SEQ ID NO: 20256 - DNA, 2439 bp, synthetic construct
  source 1..2439: mol_type = other DNA
atggccttaccagtgaccgccttgctcctgccgctggccttgctgctccacgccgccaggccggacatccagatgacacagagccctagcagcctgtctgccagcgtgggagacagagtgaccatcacctgtctggcctccgaggacatctacgacaacctggcctggtatcagcagaagcctggcaaggcccctaagctgctgatctactacgccagctctctccaggatggcgtgcccagcagattttctggcagcggctctggcaccgactacaccctgacaatatccagcctccagcctgaggacttcgccacctactactgcctgcaagacagcgagtacccctggacatttctcgaggacctgaagaacgtgttcccacctgaggtggccgtgttcgagcctagcaaggccgagatcgcccacacccagaaagccaccctcgtgtgcctggctaccggcttctaccccgaccatgtggaactgtcttggtgggtcaacggcaaagaggtgcacagcggcgtgtgtaccgacccccagccactgaaagaacagcccgccctgaacgacagccggtactgcctgagcagcagactgagagtgtccgccaccttctggcagaacccccggaaccacttcagatgccaggtgcagttctacggcctgagcgagaacgacgagtggacccaggacagagccaagcccgtgacccagatcgtgtctgccgaagcctggggcagagccgattgcggatcccagagcttcggcctgctggaccccaagctgtgctacctgctggatggcatcctgttcatctacggcgtgatcctgaccgccctgttcctgagagtgaagttcagcagaagcgccgacgcccctgcctaccagcagggacagaaccaactgtacaacgagctgaacctgggcagacgggaagagtacgacgtgctggacaagcggagaggcagggaccctgagatgggcggaaagccccagcggagaaagaacccccaggaaggactgtataacgaactccagaaagacaagatggccgaagcctacagcgagatcggcatgaagggcgagcggagaagaggcaagggccacgatggcctgtaccagggcctgagcaccgccaccaaggacacctatgacgccctgcacatgcaggccctgcctccaagaagggccaagcgatctggatctggagcaacaaacttctcactactcaaacaagcaggtgacgtggaggagaatcccgggcctactagtatggactggatttggcgcatccttttccttgtcggcgctgctaccggcgcgcattccttcgaagaagtgacactgaaagagtctggccccgctctggtcaagcccacacaaaccctgacactgacctgcaccttcagcggctttagcctgaccacatacggcatgggcgtcggctggattagacagcctcctggaaaagccctggaatggctggctaacatttggtgggacgacgacaagtattacaaccccagcctgaagaaccggctgaccatcagcaaggacaccagcaagaaccaggtggtgctgaccatgaccaacatggaccctgtggacaccgccacatattactgcgccagaatcggccccatcaagtaccccaccgctccttacagatacttcgacttctggggccagggcacaatggtcaccgttagctctacgcgtatccagaaccctgatcctgccgtgtaccagctgcgggatagcaagagcagcgacaagagcgtgtgtctgttcaccgacttcgacagccagaccaacgtgtcccagagcaaggactccgacgtgtacatcaccgataagtgcgtgctggacatgcggagcatggacttcaagagcaactccgccgtggcctggtccaacaagtccgatttcgcctgcgccaacgccttcaacaacagcattatccccgaggacacattcttcccaagcagcgacgtgccctgcggtacccagagttttgggttgttggaccctaaattgtgctatctgttggacggaatcctgttcatttacggagtgatcctgaccgcattgttcctgcgggttaagttttccagatccgcagacgcacccgcttaccaacaagggcagaaccaactctacaatgaacttaatttggggcggagggaagagtacgacgttctggacaaaaggaggggacgagatcccgagatgggcggaaagcctcagcgaaggaagaatccgcaagaggggctttataacgaactccagaaagataaaatggcagaagcctatagtgagattgggatgaagggagaaaggaggaggggtaaaggtcacgatgggttgtaccaaggattgagcacagccactaaagatacctatgatgcgctccacatgcaggccctgccgccaaga

SEQ ID NO: 20257 - DNA, 2652 bp, synthetic construct
  source 1..2652: mol_type = other DNA
atggccttaccagtgaccgccttgctcctgccgctggccttgctgctccacgccgccaggccggacatccagatgacacagagccctagcagcctgtctgccagcgtgggagacagagtgaccatcacctgtctggcctccgaggacatctacgacaacctggcctggtatcagcagaagcctggcaaggcccctaagctgctgatctactacgccagctctctccaggatggcgtgcccagcagattttctggcagcggctctggcaccgactacaccctgacaatatccagcctccagcctgaggacttcgccacctactactgcctgcaagacagcgagtacccctggacatttctcgaggggaaaccaattcccaaccctcttctgggactggattcaaccggcagcggcgaggacctgaagaacgtgttcccacctgaggtggccgtgttcgagcctagcgaggccgagatcagccacacccagaaagccaccctcgtgtgcctggctaccggcttctaccccgaccatgtggaactgtcttggtgggtcaacggcaaagaggtgcacagcggcgtgtctaccgacccccagccactgaaagaacagcccgccctgaacgacagccggtactgcctgagcagcagactgagagtgtccgccaccttctggcagaacccccggaaccacttcagatgccaggtgcagttctacggcctgagcgagaacgacgagtggacccaggacagagccaagcccgtgacccagatcgtgtctgccgaagcctggggcagagccgattgcggatcccagagcttcggcctgctggaccccaagctgtgctacctgctggatggcatcctgttcatctacggcgtgatcctgaccgccctgttcctgagagtgaagttcagcagaagcgccgacgcccctgcctaccagcagggacagaaccaactgtacaacgagctgaacctgggcagacgggaagagtacgacgtgctggacaagcggagaggcagggaccctgagatgggcggaaagccccagcggagaaagaacccccaggaaggactgtataacgaactccagaaagacaagatggccgaagcctacagcgagatcggcatgaagggcgagcggagaagaggcaagggccacgatggcctgtaccagggcctgagcaccgccaccaaggacacctatgacgccctgcacatgcaggccctgcctccaagaagggccaagcgatctggatctggagcaacaaacttctcactactcaaacaagcaggtgacgtggaggagaatcccgggcctactagtatggactggatttggcgcatccttttccttgtcggcgctgctaccggcgcgcattccttcgaagaagtgacactgaaagagtctggccccgctctggtcaagcccacacaaaccctgacactgacctgcaccttcagcggctttagcctgaccacatacggcatgggcgtcggctggattagacagcctcctggaaaagccctggaatggctggctaacatttggtgggacgacgacaagtattacaaccccagcctgaagaaccggctgaccatcagcaaggacaccagcaagaaccaggtggtgctgaccatgaccaacatggaccctgtggacaccgccacatattactgcgccagaatcggccccatcaagtaccccaccgctccttacagatacttcgacttctggggccagggcacaatggtcaccgttagctctacgcgtgagcagaaactgatctcggaagaggatgggagcggcatccagaaccctgatcctgccgtgtaccagctgcgggatagcaagagcagcgacaagagcgtgtgtctgttcaccgacttcgacagccagaccaacgtgtcccagagcaaggactccgacgtgtacatcaccgataagaccgtgctggacatgcggagcatggacttcaagagcaactccgccgtggcctggtccaacaagtccgatttcgcctgcgccaacgccttcaacaacagcattatccccgaggacacattcttcccaagccccgagagcagctgcggtacccagagttttgggttgttggaccctaaattgtgctatctgttggacggaatcctgttcatttacggagtgatcctgaccgcattgttcctgaggagcaagcggtcacggctgctccacagcgattacatgaatatgacaccacgaagaccgggtcctactcgcaaacactaccaaccctacgcacctccccgcgactttgcagcgtaccgatctcgggttaagttttccagatccgcagacgcacccgcttaccaacaagggcagaaccaactctacaatgaacttaatttggggcggagggaagagtacgacgttctggacaaaaggaggggacgagatcccgagatgggcggaaagcctcagcgaaggaagaatccgcaagaggggctttataacgaactccagaaagataaaatggcagaagcctatagtgagattgggatgaagggagaaaggaggaggggtaaaggtcacgatgggttgtaccaaggattgagcacagccactaaagatacctatgatgcgctccacatgcaggccctgccgccaaga

SEQ ID NO: 20258 - DNA, 2775 bp, synthetic construct
  source 1..2775: mol_type = other DNA
atggccttaccagtgaccgccttgctcctgccgctggccttgctgctccacgccgccaggccggacatccagatgacacagagccctagcagcctgtctgccagcgtgggagacagagtgaccatcacctgtctggcctccgaggacatctacgacaacctggcctggtatcagcagaagcctggcaaggcccctaagctgctgatctactacgccagctctctccaggatggcgtgcccagcagattttctggcagcggctctggcaccgactacaccctgacaatatccagcctccagcctgaggacttcgccacctactactgcctgcaagacagcgagtacccctggacatttctcgaggggaaaccaattcccaaccctcttctgggactggattcaaccggcagcggcgaggacctgaagaacgtgttcccacctgaggtggccgtgttcgagcctagcgaggccgagatcagccacacccagaaagccaccctcgtgtgcctggctaccggcttctaccccgaccatgtggaactgtcttggtgggtcaacggcaaagaggtgcacagcggcgtgtctaccgacccccagccactgaaagaacagcccgccctgaacgacagccggtactgcctgagcagcagactgagagtgtccgccaccttctggcagaacccccggaaccacttcagatgccaggtgcagttctacggcctgagcgagaacgacgagtggacccaggacagagccaagcccgtgacccagatcgtgtctgccgaagcctggggcagagccgattgcggatcccagagcttcggcctgctggaccccaagctgtgctacctgctggatggcatcctgttcatctacggcgtgatcctgaccgccctgttcctgaggagtaagaggagcaggctcctgcacagtgactacatgaacatgactccacgccgccccggacccacccgcaagcattaccagccctatgccccaccacgcgacttcgcagcctatcgctccagagtgaagttcagcagaagcgccgacgcccctgcctaccagcagggacagaaccaactgtacaacgagctgaacctgggcagacgggaagagtacgacgtgctggacaagcggagaggcagggaccctgagatgggcggaaagccccagcggagaaagaacccccaggaaggactgtataacgaactccagaaagacaagatggccgaagcctacagcgagatcggcatgaagggcgagcggagaagaggcaagggccacgatggcctgtaccagggcctgagcaccgccaccaaggacacctatgacgccctgcacatgcaggccctgcctccaagaagggccaagcgatctggatctggagcaacaaacttctcactactcaaacaagcaggtgacgtggaggagaatcccgggcctactagtatggactggatttggcgcatccttttccttgtcggcgctgctaccggcgcgcattccttcgaagaagtgacactgaaagagtctggccccgctctggtcaagcccacacaaaccctgacactgacctgcaccttcagcggctttagcctgaccacatacggcatgggcgtcggctggattagacagcctcctggaaaagccctggaatggctggctaacatttggtgggacgacgacaagtattacaaccccagcctgaagaaccggctgaccatcagcaaggacaccagcaagaaccaggtggtgctgaccatgaccaacatggaccctgtggacaccgccacatattactgcgccagaatcggccccatcaagtaccccaccgctccttacagatacttcgacttctggggccagggcacaatggtcaccgttagctctacgcgtgagcagaaactgatctcggaagaggatgggagcggcatccagaaccctgatcctgccgtgtaccagctgcgggatagcaagagcagcgacaagagcgtgtgtctgttcaccgacttcgacagccagaccaacgtgtcccagagcaaggactccgacgtgtacatcaccgataagaccgtgctggacatgcggagcatggacttcaagagcaactccgccgtggcctggtccaacaagtccgatttcgcctgcgccaacgccttcaacaacagcattatccccgaggacacattcttcccaagccccgagagcagctgcggtacccagagttttgggttgttggaccctaaattgtgctatctgttggacggaatcctgttcatttacggagtgatcctgaccgcattgttcctgaggagcaagcggtcacggctgctccacagcgattacatgaatatgacaccacgaagaccgggtcctactcgcaaacactaccaaccctacgcacctccccgcgactttgcagcgtaccgatctcgggttaagttttccagatccgcagacgcacccgcttaccaacaagggcagaaccaactctacaatgaacttaatttggggcggagggaagagtacgacgttctggacaaaaggaggggacgagatcccgagatgggcggaaagcctcagcgaaggaagaatccgcaagaggggctttataacgaactccagaaagataaaatggcagaagcctatagtgagattgggatgaagggagaaaggaggaggggtaaaggtcacgatgggttgtaccaaggattgagcacagccactaaagatacctatgatgcgctccacatgcaggccctgccgccaaga

SEQ ID NO: 20259 - DNA, 2658 bp, synthetic construct
  source 1..2658: mol_type = other DNA
atggccttaccagtgaccgccttgctcctgccgctggccttgctgctccacgccgccaggccggacatccagatgacacagagccctagcagcctgtctgccagcgtgggagacagagtgaccatcacctgtctggcctccgaggacatctacgacaacctggcctggtatcagcagaagcctggcaaggcccctaagctgctgatctactacgccagctctctccaggatggcgtgcccagcagattttctggcagcggctctggcaccgactacaccctgacaatatccagcctccagcctgaggacttcgccacctactactgcctgcaagacagcgagtacccctggacatttctcgaggggaaaccaattcccaaccctcttctgggactggattcaaccggcagcggcgaggacctgaagaacgtgttcccacctgaggtggccgtgttcgagcctagcgaggccgagatcagccacacccagaaagccaccctcgtgtgcctggctaccggcttctaccccgaccatgtggaactgtcttggtgggtcaacggcaaagaggtgcacagcggcgtgtctaccgacccccagccactgaaagaacagcccgccctgaacgacagccggtactgcctgagcagcagactgagagtgtccgccaccttctggcagaacccccggaaccacttcagatgccaggtgcagttctacggcctgagcgagaacgacgagtggacccaggacagagccaagcccgtgacccagatcgtgtctgccgaagcctggggcagagccgattgcggatcccagagcttcggcctgctggaccccaagctgtgctacctgctggatggcatcctgttcatctacggcgtgatcctgaccgccctgttcctgagagtgaagttcagcagaagcgccgacgcccctgcctaccagcagggacagaaccaactgtacaacgagctgaacctgggcagacgggaagagtacgacgtgctggacaagcggagaggcagggaccctgagatgggcggaaagccccagcggagaaagaacccccaggaaggactgtataacgaactccagaaagacaagatggccgaagcctacagcgagatcggcatgaagggcgagcggagaagaggcaagggccacgatggcctgtaccagggcctgagcaccgccaccaaggacacctatgacgccctgcacatgcaggccctgcctccaagaagggccaagcgatctggatctggagcaacaaacttctcactactcaaacaagcaggtgacgtggaggagaatcccgggcctactagtatggactggatttggcgcatccttttccttgtcggcgctgctaccggcgcgcattccttcgaagaagtgacactgaaagagtctggccccgctctggtcaagcccacacaaaccctgacactgacctgcaccttcagcggctttagcctgaccacatacggcatgggcgtcggctggattagacagcctcctggaaaagccctggaatggctggctaacatttggtgggacgacgacaagtattacaaccccagcctgaagaaccggctgaccatcagcaaggacaccagcaagaaccaggtggtgctgaccatgaccaacatggaccctgtggacaccgccacatattactgcgccagaatcggccccatcaagtaccccaccgctccttacagatacttcgacttctggggccagggcacaatggtcaccgttagctctacgcgtgagcagaaactgatctcggaagaggatctggggagcggcatccagaaccctgatcctgccgtgtaccagctgcgggatagcaagagcagcgacaagagcgtgtgtctgttcaccgacttcgacagccagaccaacgtgtcccagagcaaggactccgacgtgtacatcaccgataagaccgtgctggacatgcggagcatggacttcaagagcaactccgccgtggcctggtccaacaagtccgatttcgcctgcgccaacgccttcaacaacagcattatccccgaggacacattcttcccaagccccgagagcagctgcggtacccagagttttgggttgttggaccctaaattgtgctatctgttggacggaatcctgttcatttacggagtgatcctgaccgcattgttcctgaagagaggccggaagaagctgctgtacatcttcaagcagcctttcatgcggcccgtgcagaccacccaggaagaggacggctgctcctgccggttccccgaggaagaagaaggcggctgcgagctgcgggttaagttttccagatccgcagacgcacccgcttaccaacaagggcagaaccaactctacaatgaacttaatttggggcggagggaagagtacgacgttctggacaaaaggaggggacgagatcccgagatgggcggaaagcctcagcgaaggaagaatccgcaagaggggctttataacgaactccagaaagataaaatggcagaagcctatagtgagattgggatgaagggagaaaggaggaggggtaaaggtcacgatgggttgtaccaaggattgagcacagccactaaagatacctatgatgcgctccacatgcaggccctgccgccaaga

SEQ ID NO: 20260 - DNA, 2784 bp, synthetic construct
  source 1..2784: mol_type = other DNA
atggccttaccagtgaccgccttgctcctgccgctggccttgctgctccacgccgccaggccggacatccagatgacacagagccctagcagcctgtctgccagcgtgggagacagagtgaccatcacctgtctggcctccgaggacatctacgacaacctggcctggtatcagcagaagcctggcaaggcccctaagctgctgatctactacgccagctctctccaggatggcgtgcccagcagattttctggcagcggctctggcaccgactacaccctgacaatatccagcctccagcctgaggacttcgccacctactactgcctgcaagacagcgagtacccctggacatttctcgaggggaaaccaattcccaaccctcttctgggactggattcaaccggcagcggcgaggacctgaagaacgtgttcccacctgaggtggccgtgttcgagcctagcgaggccgagatcagccacacccagaaagccaccctcgtgtgcctggctaccggcttctaccccgaccatgtggaactgtcttggtgggtcaacggcaaagaggtgcacagcggcgtgtctaccgacccccagccactgaaagaacagcccgccctgaacgacagccggtactgcctgagcagcagactgagagtgtccgccaccttctggcagaacccccggaaccacttcagatgccaggtgcagttctacggcctgagcgagaacgacgagtggacccaggacagagccaagcccgtgacccagatcgtgtctgccgaagcctggggcagagccgattgcggatcccagagcttcggcctgctggaccccaagctgtgctacctgctggatggcatcctgttcatctacggcgtgatcctgaccgccctgttcctgaaacggggcagaaagaaactcctgtatatattcaaacaaccatttatgagaccagtacaaactactcaagaggaagatggctgtagctgccgatttccagaagaagaagaaggaggatgtgaactgagagtgaagttcagcagaagcgccgacgcccctgcctaccagcagggacagaaccaactgtacaacgagctgaacctgggcagacgggaagagtacgacgtgctggacaagcggagaggcagggaccctgagatgggcggaaagccccagcggagaaagaacccccaggaaggactgtataacgaactccagaaagacaagatggccgaagcctacagcgagatcggcatgaagggcgagcggagaagaggcaagggccacgatggcctgtaccagggcctgagcaccgccaccaaggacacctatgacgccctgcacatgcaggccctgcctccaagaagggccaagcgatctggatctggagcaacaaacttctcactactcaaacaagcaggtgacgtggaggagaatcccgggcctactagtatggactggatttggcgcatccttttccttgtcggcgctgctaccggcgcgcattccttcgaagaagtgacactgaaagagtctggccccgctctggtcaagcccacacaaaccctgacactgacctgcaccttcagcggctttagcctgaccacatacggcatgggcgtcggctggattagacagcctcctggaaaagccctggaatggctggctaacatttggtgggacgacgacaagtattacaaccccagcctgaagaaccggctgaccatcagcaaggacaccagcaagaaccaggtggtgctgaccatgaccaacatggaccctgtggacaccgccacatattactgcgccagaatcggccccatcaagtaccccaccgctccttacagatacttcgacttctggggccagggcacaatggtcaccgttagctctacgcgtgagcagaaactgatctcggaagaggatctggggagcggcatccagaaccctgatcctgccgtgtaccagctgcgggatagcaagagcagcgacaagagcgtgtgtctgttcaccgacttcgacagccagaccaacgtgtcccagagcaaggactccgacgtgtacatcaccgataagaccgtgctggacatgcggagcatggacttcaagagcaactccgccgtggcctggtccaacaagtccgatttcgcctgcgccaacgccttcaacaacagcattatccccgaggacacattcttcccaagccccgagagcagctgcggtacccagagttttgggttgttggaccctaaattgtgctatctgttggacggaatcctgttcatttacggagtgatcctgaccgcattgttcctgaagagaggccggaagaagctgctgtacatcttcaagcagcctttcatgcggcccgtgcagaccacccaggaagaggacggctgctcctgccggttccccgaggaagaagaaggcggctgcgagctgcgggttaagttttccagatccgcagacgcacccgcttaccaacaagggcagaaccaactctacaatgaacttaatttggggcggagggaagagtacgacgttctggacaaaaggaggggacgagatcccgagatgggcggaaagcctcagcgaaggaagaatccgcaagaggggctttataacgaactccagaaagataaaatggcagaagcctatagtgagattgggatgaagggagaaaggaggaggggtaaaggtcacgatgggttgtaccaaggattgagcacagccactaaagatacctatgatgcgctccacatgcaggccctgccgccaaga

SEQ ID NO: 20261 - DNA, 2457 bp, synthetic construct
  source 1..2457: mol_type = other DNA
atggccttaccagtgaccgccttgctcctgccgctggccttgctgctccacgccgccaggccggacatccagatgacacagagccctagcagcctgtctgccagcgtgggagacagagtgaccatcacctgtctggcctccgaggacatctacgacaacctggcctggtatcagcagaagcctggcaaggcccctaagctgctgatctactacgccagctctctccaggatggcgtgcccagcagattttctggcagcggctctggcaccgactacaccctgacaatatccagcctccagcctgaggacttcgccacctactactgcctgcaagacagcgagtacccctggacatttctcgagcagagcttcggcctgctggaccccaagctgtgctacctgctggatggcatcctgttcatctacggcgtgatcctgaccgccctgttcctgagagtgaagttcagcagaagcgccgacgcccctgcctaccagcagggacagaaccaactgtacaacgagctgaacctgggcagacgggaagagtacgacgtgctggacaagcggagaggcagggaccctgagatgggcggaaagccccagcggagaaagaacccccaggaaggactgtataacgaactccagaaagacaagatggccgaagcctacagcgagatcggcatgaagggcgagcggagaagaggcaagggccacgatggcctgtaccagggcctgagcaccgccaccaaggacacctatgacgccctgcacatgcaggccctgcctccaagaagggccaagcgatctggatctggagcaacaaacttctcactactcaaacaagcaggtgacgtggaggagaatcccgggcctactagtatggactggatttggcgcatccttttccttgtcggcgctgctaccggcgcgcattccttcgaagaagtgacactgaaagagtctggccccgctctggtcaagcccacacaaaccctgacactgacctgcaccttcagcggctttagcctgaccacatacggcatgggcgtcggctggattagacagcctcctggaaaagccctggaatggctggctaacatttggtgggacgacgacaagtattacaaccccagcctgaagaaccggctgaccatcagcaaggacaccagcaagaaccaggtggtgctgaccatgaccaacatggaccctgtggacaccgccacatattactgcgccagaatcggccccatcaagtaccccaccgctccttacagatacttcgacttctggggccagggcacaatggtcaccgttagctctacgcgtcagagttttgggttgttggaccctaaattgtgctatctgttggacggaatcctgttcatttacggagtgatcctgaccgcattgttcctgcgggttaagttttccagatccgcagacgcacccgcttaccaacaagggcagaaccaactctacaatgaacttaatttggggcggagggaagagtacgacgttctggacaaaaggaggggacgagatcccgagatgggcggaaagcctcagcgaaggaagaatccgcaagaggggctttataacgaactccagaaagataaaatggcagaagcctatagtgagattgggatgaagggagaaaggaggaggggtaaaggtcacgatgggttgtaccaaggattgagcacagccactaaagatacctatgatgcgctccacatgcaggccctgccgccaagacgcgccaagagaagcggatctggcgtgaagcagaccctgaatttcgacctgctgaagctggctggcgacgtggaatccaacccaggcccttctagaggccatatgaccgagtacaagcccacggtgcgcctcgccacccgcgacgacgtccccagggccgtacgcaccctcgccgccgcgttcgccgactaccccgccacgcgccacaccgtcgatccggaccgccacatcgagcgggtcaccgagctgcaagaactcttcctcacgcgcgtcgggctcgacatcggcaaggtgtgggtcgcggacgacggcgccgcggtggcggtctggaccacgccggagagcgtcgaagcgggggcggtgttcgccgagatcggcccgcgcatggccgagttgagcggttcccggctggccgcgcagcaacagatggaaggcctcctggcgccgcaccggcccaaggagcccgcgtggttcctggccaccgtcggcgtctcgcccgaccaccagggcaagggtctgggcagcgccgtcgtgctccccggagtggaggcggccgagcgcgccggggtgcccgccttcctggagacctccgcgccccgcaacctccccttctacgagcggctcggcttcaccgtcaccgccgacgtcgaggtgcccgaaggaccgcgcacctggtgcatgacccgcaagcccggtgcctga

SEQ ID NO: 20262 - DNA, 1929 bp, synthetic construct
  source 1..1929: mol_type = other DNA
atggccttaccagtgaccgccttgctcctgccgctggccttgctgctccacgccgccaggccggacatccagatgacacagagccctagcagcctgtctgccagcgtgggagacagagtgaccatcacctgtctggcctccgaggacatctacgacaacctggcctggtatcagcagaagcctggcaaggcccctaagctgctgatctactacgccagctctctccaggatggcgtgcccagcagattttctggcagcggctctggcaccgactacaccctgacaatatccagcctccagcctgaggacttcgccacctactactgcctgcaagacagcgagtacccctggacatttctcgagggacagcctaaggccaatcctaccgtgacactgttccctccaagcagcgaagaactccaggccaacaaggccacacttgtgtgcctgatctccgacttctaccctggggctgtgacagtggcttggaaggccgatggatctcctgtgaaagccggcgtggaaaccaccaagccatccaagcagagcaacaacaaatacgccgccagctcctacctgagcctgacacctgagcagtggaagtcccacagatcctacagctgccaagtgacccacgaaggcagcaccgtggaaaagacagtggcccctacagagtgcagccccatcaagaccgatgtgattacaatggaccccaaggacaactgctccaaggacgccaacgataccctgctgctccagctgaccaacaccagcgcctactacatgtacttgttgctgctgctgaagtccgtggtgtacttcgccatcatcacatgctgcctgctgcggagaaccgccttctgctgcaacggcgagaagtctagggccaagcgatctggatctggagcaacaaacttctcactactcaaacaagcaggtgacgtggaggagaatcccgggcctactagtatggactggatttggcgcatccttttccttgtcggcgctgctaccggcgcgcattccttcgaagaagtgacactgaaagagtctggccccgctctggtcaagcccacacaaaccctgacactgacctgcaccttcagcggctttagcctgaccacatacggcatgggcgtcggctggattagacagcctcctggaaaagccctggaatggctggctaacatttggtgggacgacgacaagtattacaaccccagcctgaagaaccggctgaccatcagcaaggacaccagcaagaaccaggtggtgctgaccatgaccaacatggaccctgtggacaccgccacatattactgcgccagaatcggccccatcaagtaccccaccgctccttacagatacttcgacttctggggccagggcacaatggtcaccgttagctctacgcgtgcctctacaaagggaccctccgtgtttcctctggctcccagcagcaagtctacaagcggaggaacagccgctctgggctgcctggtcaaggattactttcccgagcctgtgaccgtgtcctggaatagcggagcactgacaagcggcgtgcacacctttccagccgtgctgcaaagcagcggcctgtactctctgagcagcgtggtcacagtgcctagctctagcctgggcacccagacctacatctgcaatgtgaaccacaagcctagcaacaccaaggtggacaagagagtggaacccaagagctgtgaagtgaaaaccgactccaccgaccacgtgaagcccaaagagacagagaacaccaagcagcccagcaagagctgccacaagcccaaggccatcgtgcacaccgagaaagtgaacatgatgagcctgaccgtgctgggcctgcggatgctgttcgccaaaaccgtggccgtgaacttcctgctgaccgccaagctgttcttcctc

SEQ ID NO: 20263 - DNA, 1863 bp, synthetic construct
  source 1..1863: mol_type = other DNA
atggccttaccagtgaccgccttgctcctgccgctggccttgctgctccacgccgccaggccggacatccagatgacacagagccctagcagcctgtctgccagcgtgggagacagagtgaccatcacctgtctggcctccgaggacatctacgacaacctggcctggtatcagcagaagcctggcaaggcccctaagctgctgatctactacgccagctctctccaggatggcgtgcccagcagattttctggcagcggctctggcaccgactacaccctgacaatatccagcctccagcctgaggacttcgccacctactactgcctgcaagacagcgagtacccctggacatttctcgagggacagcctaaggccaatcctaccgtgacactgttccctccaagcagcgaagaactccaggccaacaaggccacacttgtgtgcctgatctccgacttctaccctggggctgtgacagtggcttggaaggccgatggatctcctgtgaaagccggcgtggaaaccaccaagccatccaagcagagcaacaacaaatacgccgccagctcctacctgagcctgacacctgagcagtggaagtcccacagatcctacagctgccaagtgacccacgaaggcagcaccgtggaaaagacagtggcccctacagagtgcagcggcagagccgattgcggcatcaccagcgccagctaccaccagggcgtgctgagcgccaccatcctgtacgagatcctgctgggcaaggccaccctgtacgccgtgctggtgtctgccctggtgctgatggctatggtcaagcggaaggacagccggggaagggccaagcgatctggatctggagcaacaaacttctcactactcaaacaagcaggtgacgtggaggagaatcccgggcctactagtatggactggatttggcgcatccttttccttgtcggcgctgctaccggcgcgcattccttcgaagaagtgacactgaaagagtctggccccgctctggtcaagcccacacaaaccctgacactgacctgcaccttcagcggctttagcctgaccacatacggcatgggcgtcggctggattagacagcctcctggaaaagccctggaatggctggctaacatttggtgggacgacgacaagtattacaaccccagcctgaagaaccggctgaccatcagcaaggacaccagcaagaaccaggtggtgctgaccatgaccaacatggaccctgtggacaccgccacatattactgcgccagaatcggccccatcaagtaccccaccgctccttacagatacttcgacttctggggccagggcacaatggtcaccgttagctctacgcgtgcctctacaaagggaccctccgtgtttcctctggctcccagcagcaagtctacaagcggaggaacagccgctctgggctgcctggtcaaggattactttcccgagcctgtgaccgtgtcctggaatagcggagcactgacaagcggcgtgcacacctttccagccgtgctgcaaagcagcggcctgtactctctgagcagcgtggtcacagtgcctagctctagcctgggcacccagacctacatctgcaatgtgaaccacaagcctagcaacaccaaggtggacaagagagtggaacccaagagctgtatccccgaggacacattcttcccaagcagcgacgtgccctgcgacgtgaagctggtggaaaagagcttcgagacagacaccaacctgaacttccagaacctgagcgtgatcggcttcagaatcctgctgctgaaagtggccggctttaacctgctgatgaccctgcggctgtggtccagc

SEQ ID NO: 20264 - DNA, 1863 bp, synthetic construct
  source 1..1863: mol_type = other DNA
atggccttaccagtgaccgccttgctcctgccgctggccttgctgctccacgccgccaggccggacatccagatgacacagagccctagcagcctgtctgccagcgtgggagacagagtgaccatcacctgtctggcctccgaggacatctacgacaacctggcctggtatcagcagaagcctggcaaggcccctaagctgctgatctactacgccagctctctccaggatggcgtgcccagcagattttctggcagcggctctggcaccgactacaccctgacaatatccagcctccagcctgaggacttcgccacctactactgcctgcaagacagcgagtacccctggacatttctcgagggacagcctaaggccaatcctaccgtgacactgttccctccaagcagcgaagaactccaggccaacaaggccacacttgtgtgcctgatctccgacttctaccctggggctgtgacagtggcttggaaggccgatggatctcctgtgaaagccggcgtggaaaccaccaagccatccaagcagagcaacaacaaatacgccgccagctcctacctgagcctgacacctgagcagtggaagtcccacagatcctacagctgccaagtgacccacgaaggcagcaccgtggaaaagacagtggcccctacagagtgcagcggcagagccgattgcggctttaccagcgagagctaccagcagggcgtgctgagcgccaccatcctgtacgagatcctgctgggcaaggccaccctgtacgccgtgctggtgtctgccctggtgctgatggctatggtcaagcggaaggacagccggggaagggccaagcgatctggatctggagcaacaaacttctcactactcaaacaagcaggtgacgtggaggagaatcccgggcctactagtatggactggatttggcgcatccttttccttgtcggcgctgctaccggcgcgcattccttcgaagaagtgacactgaaagagtctggccccgctctggtcaagcccacacaaaccctgacactgacctgcaccttcagcggctttagcctgaccacatacggcatgggcgtcggctggattagacagcctcctggaaaagccctggaatggctggctaacatttggtgggacgacgacaagtattacaaccccagcctgaagaaccggctgaccatcagcaaggacaccagcaagaaccaggtggtgctgaccatgaccaacatggaccctgtggacaccgccacatattactgcgccagaatcggccccatcaagtaccccaccgctccttacagatacttcgacttctggggccagggcacaatggtcaccgttagctctacgcgtgcctctacaaagggaccctccgtgtttcctctggctcccagcagcaagtctacaagcggaggaacagccgctctgggctgcctggtcaaggattactttcccgagcctgtgaccgtgtcctggaatagcggagcactgacaagcggcgtgcacacctttccagccgtgctgcaaagcagcggcctgtactctctgagcagcgtggtcacagtgcctagctctagcctgggcacccagacctacatctgcaatgtgaaccacaagcctagcaacaccaaggtggacaagagagtggaacccaagagctgtatccccgaggacacattcttcccaagccccgagagcagctgcgacgtgaagctggtggaaaagagcttcgagacagacaccaacctgaacttccagaacctgagcgtgatcggcttcagaatcctgctgctgaaagtggccggctttaacctgctgatgaccctgcggctgtggtccagc

SEQ ID NO: 20265 - DNA, 1341 bp, synthetic construct
  source 1..1341: mol_type = other DNA
atggccttaccagtgaccgccttgctcctgccgctggccttgctgctccacgccgccaggccggacatccagatgacacagagccctagcagcctgtctgccagcgtgggagacagagtgaccatcacctgtctggcctccgaggacatctacgacaacctggcctggtatcagcagaagcctggcaaggcccctaagctgctgatctactacgccagctctctccaggatggcgtgcccagcagattttctggcagcggctctggcaccgactacaccctgacaatatccagcctccagcctgaggacttcgccacctactactgcctgcaagacagcgagtacccctggacatttggcggaggcggaagtggaggcggaggatctggcggcggaggctctgaagtgacactgaaagagtctggccccgctctggtcaagcccacacaaaccctgacactgacctgcaccttcagcggctttagcctgaccacatacggcatgggcgtcggctggattagacagcctcctggaaaagccctggaatggctggctaacatttggtgggacgacgacaagtattacaaccccagcctgaagaaccggctgaccatcagcaaggacaccagcaagaaccaggtggtgctgaccatgaccaacatggaccctgtggacaccgccacatattactgcgccagaatcggccccatcaagtaccccaccgctccttacagatacttcgacttctggggccagggcacaatggtcaccgttagctctacgcgtgacggtaacgaggagatgggaggaatcactcaaaccccttacaaagtctcaatttcaggaacaactgttatccttacatgtccccagtatcctggcagcgagatcctttggcagcataacgacaagaatatagggggagatgaagacgataagaatatcggatctgacgaggatcacttgagcctgaaagagttctccgagcttgaacaaagcggatattatgtgtgctatccgcgcgggtcaaagccggaagacgctaacttttacctttatctccgagccagagtgtgcgaaaattgcatggaaatggacgttatgtccgttgctacaatagttatcgtagatatatgcatcacgggtggactgcttctgctggtttattattggtccaagaatagaaaggccaaagctaaacccgtgaccagaggcgctggcgcaggcggaaggcaaaggggacaaaacaaagaacggccaccaccagtgccaaatccagattatgagcctattcggaaaggacagagggacctgtactctggcctgaatcagagaagaatc

SEQ ID NO: 20266 - DNA, 1236 bp, synthetic construct
  source 1..1236: mol_type = other DNA
atggccttaccagtgaccgccttgctcctgccgctggccttgctgctccacgccgccaggccggacatccagatgacacagagccctagcagcctgtctgccagcgtgggagacagagtgaccatcacctgtctggcctccgaggacatctacgacaacctggcctggtatcagcagaagcctggcaaggcccctaagctgctgatctactacgccagctctctccaggatggcgtgcccagcagattttctggcagcggctctggcaccgactacaccctgacaatatccagcctccagcctgaggacttcgccacctactactgcctgcaagacagcgagtacccctggacatttggcggaggcggaagtggaggcggaggatctggcggcggaggctctgaagtgacactgaaagagtctggccccgctctggtcaagcccacacaaaccctgacactgacctgcaccttcagcggctttagcctgaccacatacggcatgggcgtcggctggattagacagcctcctggaaaagccctggaatggctggctaacatttggtgggacgacgacaagtattacaaccccagcctgaagaaccggctgaccatcagcaaggacaccagcaagaaccaggtggtgctgaccatgaccaacatggaccctgtggacaccgccacatattactgcgccagaatcggccccatcaagtaccccaccgctccttacagatacttcgacttctggggccagggcacaatggtcaccgttagctctacgcgtttcaagatccccatcgaggaactggaagatcgggtgttcgtgaactgcaacacctctatcacctgggtggaaggcaccgtgggaacactgctgagcgacatcaccagactggacctcggcaagcggattctggaccctcggggcatctacagatgcaacggcaccgacatctacaaggacaaagaaagcaccgtgcaggtccactacagaatgtgccagtcctgcgtggaactggaccctgctacagtggccggcatcatcgtgaccgatgtgatcgctactctgctgctggctctgggagtgttctgcttcgccggacacgaaacaggcagactgtctggcgctgccgatacacaggccctgctgagaaacgaccaagtgtatcagcccctgcgcgacagagatgatgcccagtattctcacctcggcggcaactgggctagaaacaag

SEQ ID NO: 20267 - DNA, 1266 bp, synthetic construct
  source 1..1266: mol_type = other DNA
atggccttaccagtgaccgccttgctcctgccgctggccttgctgctccacgccgccaggccggacatccagatgacacagagccctagcagcctgtctgccagcgtgggagacagagtgaccatcacctgtctggcctccgaggacatctacgacaacctggcctggtatcagcagaagcctggcaaggcccctaagctgctgatctactacgccagctctctccaggatggcgtgcccagcagattttctggcagcggctctggcaccgactacaccctgacaatatccagcctccagcctgaggacttcgccacctactactgcctgcaagacagcgagtacccctggacatttggcggaggcggaagtggaggcggaggatctggcggcggaggctctgaagtgacactgaaagagtctggccccgctctggtcaagcccacacaaaccctgacactgacctgcaccttcagcggctttagcctgaccacatacggcatgggcgtcggctggattagacagcctcctggaaaagccctggaatggctggctaacatttggtgggacgacgacaagtattacaaccccagcctgaagaaccggctgaccatcagcaaggacaccagcaagaaccaggtggtgctgaccatgaccaacatggaccctgtggacaccgccacatattactgcgccagaatcggccccatcaagtaccccaccgctccttacagatacttcgacttctggggccagggcacaatggtcaccgttagctctacgcgtcagagcatcaagggcaaccacctggtcaaggtgtacgactaccaagaggacggcagcgtgctgctgacatgtgatgccgaggccaagaacatcacctggtttaaggacggcaagatgatcggcttcctgaccgaggacaagaagaagtggaacctgggcagcaacgctaaggaccccagaggcatgtatcagtgcaagggcagccagaacaagagcaagcccctccaggtgtactaccggatgtgccagaactgcatcgagctgaacgccgctaccatcagcggctttctgttcgccgagatcgtgtccatcttcgtgctggccgtgggcgtgtactttatcgctggacaggatggcgtgcggcagagcagagcttccgataagcaaaccctgctgcctaacgaccagctgtaccagcctctgaaggacagagaggacgaccagtacagccacctccagggcaatcagctgagaagaaac

SEQ ID NO: 20268 - DNA, 1215 bp, synthetic construct
  source 1..1215: mol_type = other DNA
atggccttaccagtgaccgccttgctcctgccgctggccttgctgctccacgccgccaggccggacatccagatgacacagagccctagcagcctgtctgccagcgtgggagacagagtgaccatcacctgtctggcctccgaggacatctacgacaacctggcctggtatcagcagaagcctggcaaggcccctaagctgctgatctactacgccagctctctccaggatggcgtgcccagcagattttctggcagcggctctggcaccgactacaccctgacaatatccagcctccagcctgaggacttcgccacctactactgcctgcaagacagcgagtacccctggacatttggcggaggcggaagtggaggcggaggatctggcggcggaggctctgaagtgacactgaaagagtctggccccgctctggtcaagcccacacaaaccctgacactgacctgcaccttcagcggctttagcctgaccacatacggcatgggcgtcggctggattagacagcctcctggaaaagccctggaatggctggctaacatttggtgggacgacgacaagtattacaaccccagcctgaagaaccggctgaccatcagcaaggacaccagcaagaaccaggtggtgctgaccatgaccaacatggaccctgtggacaccgccacatattactgcgccagaatcggccccatcaagtaccccaccgctccttacagatacttcgacttctggggccagggcacaatggtcaccgttagctctacgcgtcagagttttgggttgttggaccctaaattgtgctatctgttggacggaatcctgttcatttacggagtgatcctgaccgcattgttcctgcgggttaagttttccagatccgcagacgcacccgcttaccaacaagggcagaaccaactctacaatgaacttaatttggggcggagggaagagtacgacgttctggacaaaaggaggggacgagatcccgagatgggcggaaagcctcagcgaaggaagaatccgcaagaggggctttataacgaactccagaaagataaaatggcagaagcctatagtgagattgggatgaagggagaaaggaggaggggtaaaggtcacgatgggttgtaccaaggattgagcacagccactaaagatacctatgatgcgctccacatgcaggccctgccgccaaga

SEQ ID NO: 20269 - DNA, 1341 bp, synthetic construct
  source 1..1341: mol_type = other DNA
atggccttaccagtgaccgccttgctcctgccgctggccttgctgctccacgccgccaggccggaagtgacactgaaagagtctggccccgctctggtcaagcccacacaaaccctgacactgacctgcaccttcagcggctttagcctgaccacatacggcatgggcgtcggctggattagacagcctcctggaaaagccctggaatggctggctaacatttggtgggacgacgacaagtattacaaccccagcctgaagaaccggctgaccatcagcaaggacaccagcaagaaccaggtggtgctgaccatgaccaacatggaccctgtggacaccgccacatattactgcgccagaatcggccccatcaagtaccccaccgctccttacagatacttcgacttctggggccagggcacaatggtcaccgttagctctggcggaggcggaagtggaggcggaggatctggcggcggaggctctgacatccagatgacacagagccctagcagcctgtctgccagcgtgggagacagagtgaccatcacctgtctggcctccgaggacatctacgacaacctggcctggtatcagcagaagcctggcaaggcccctaagctgctgatctactacgccagctctctccaggatggcgtgcccagcagattttctggcagcggctctggcaccgactacaccctgacaatatccagcctccagcctgaggacttcgccacctactactgcctgcaagacagcgagtacccctggacatttacgcgtgacggtaacgaggagatgggaggaatcactcaaaccccttacaaagtctcaatttcaggaacaactgttatccttacatgtccccagtatcctggcagcgagatcctttggcagcataacgacaagaatatagggggagatgaagacgataagaatatcggatctgacgaggatcacttgagcctgaaagagttctccgagcttgaacaaagcggatattatgtgtgctatccgcgcgggtcaaagccggaagacgctaacttttacctttatctccgagccagagtgtgcgaaaattgcatggaaatggacgttatgtccgttgctacaatagttatcgtagatatatgcatcacgggtggactgcttctgctggtttattattggtccaagaatagaaaggccaaagctaaacccgtgaccagaggcgctggcgcaggcggaaggcaaaggggacaaaacaaagaacggccaccaccagtgccaaatccagattatgagcctattcggaaaggacagagggacctgtactctggcctgaatcagagaagaatc

SEQ ID NO: 20270 - DNA, 1236 bp, synthetic construct
  source 1..1236: mol_type = other DNA
atggccttaccagtgaccgccttgctcctgccgctggccttgctgctccacgccgccaggccggaagtgacactgaaagagtctggccccgctctggtcaagcccacacaaaccctgacactgacctgcaccttcagcggctttagcctgaccacatacggcatgggcgtcggctggattagacagcctcctggaaaagccctggaatggctggctaacatttggtgggacgacgacaagtattacaaccccagcctgaagaaccggctgaccatcagcaaggacaccagcaagaaccaggtggtgctgaccatgaccaacatggaccctgtggacaccgccacatattactgcgccagaatcggccccatcaagtaccccaccgctccttacagatacttcgacttctggggccagggcacaatggtcaccgttagctctggcggaggcggaagtggaggcggaggatctggcggcggaggctctgacatccagatgacacagagccctagcagcctgtctgccagcgtgggagacagagtgaccatcacctgtctggcctccgaggacatctacgacaacctggcctggtatcagcagaagcctggcaaggcccctaagctgctgatctactacgccagctctctccaggatggcgtgcccagcagattttctggcagcggctctggcaccgactacaccctgacaatatccagcctccagcctgaggacttcgccacctactactgcctgcaagacagcgagtacccctggacatttacgcgtttcaagatccccatcgaggaactggaagatcgggtgttcgtgaactgcaacacctctatcacctgggtggaaggcaccgtgggaacactgctgagcgacatcaccagactggacctcggcaagcggattctggaccctcggggcatctacagatgcaacggcaccgacatctacaaggacaaagaaagcaccgtgcaggtccactacagaatgtgccagtcctgcgtggaactggaccctgctacagtggccggcatcatcgtgaccgatgtgatcgctactctgctgctggctctgggagtgttctgcttcgccggacacgaaacaggcagactgtctggcgctgccgatacacaggccctgctgagaaacgaccaagtgtatcagcccctgcgcgacagagatgatgcccagtattctcacctcggcggcaactgggctagaaacaag

SEQ ID NO: 20271 - DNA, 1266 bp, synthetic construct
  source 1..1266: mol_type = other DNA
atggccttaccagtgaccgccttgctcctgccgctggccttgctgctccacgccgccaggccggaagtgacactgaaagagtctggccccgctctggtcaagcccacacaaaccctgacactgacctgcaccttcagcggctttagcctgaccacatacggcatgggcgtcggctggattagacagcctcctggaaaagccctggaatggctggctaacatttggtgggacgacgacaagtattacaaccccagcctgaagaaccggctgaccatcagcaaggacaccagcaagaaccaggtggtgctgaccatgaccaacatggaccctgtggacaccgccacatattactgcgccagaatcggccccatcaagtaccccaccgctccttacagatacttcgacttctggggccagggcacaatggtcaccgttagctctggcggaggcggaagtggaggcggaggatctggcggcggaggctctgacatccagatgacacagagccctagcagcctgtctgccagcgtgggagacagagtgaccatcacctgtctggcctccgaggacatctacgacaacctggcctggtatcagcagaagcctggcaaggcccctaagctgctgatctactacgccagctctctccaggatggcgtgcccagcagattttctggcagcggctctggcaccgactacaccctgacaatatccagcctccagcctgaggacttcgccacctactactgcctgcaagacagcgagtacccctggacatttacgcgtcagagcatcaagggcaaccacctggtcaaggtgtacgactaccaagaggacggcagcgtgctgctgacatgtgatgccgaggccaagaacatcacctggtttaaggacggcaagatgatcggcttcctgaccgaggacaagaagaagtggaacctgggcagcaacgctaaggaccccagaggcatgtatcagtgcaagggcagccagaacaagagcaagcccctccaggtgtactaccggatgtgccagaactgcatcgagctgaacgccgctaccatcagcggctttctgttcgccgagatcgtgtccatcttcgtgctggccgtgggcgtgtactttatcgctggacaggatggcgtgcggcagagcagagcttccgataagcaaaccctgctgcctaacgaccagctgtaccagcctctgaaggacagagaggacgaccagtacagccacctccagggcaatcagctgagaagaaac

SEQ ID NO: 20272 - DNA, 1215 bp, synthetic construct
  source 1..1215: mol_type = other DNA
atggccttaccagtgaccgccttgctcctgccgctggccttgctgctccacgccgccaggccggaagtgacactgaaagagtctggccccgctctggtcaagcccacacaaaccctgacactgacctgcaccttcagcggctttagcctgaccacatacggcatgggcgtcggctggattagacagcctcctggaaaagccctggaatggctggctaacatttggtgggacgacgacaagtattacaaccccagcctgaagaaccggctgaccatcagcaaggacaccagcaagaaccaggtggtgctgaccatgaccaacatggaccctgtggacaccgccacatattactgcgccagaatcggccccatcaagtaccccaccgctccttacagatacttcgacttctggggccagggcacaatggtcaccgttagctctggcggaggcggaagtggaggcggaggatctggcggcggaggctctgacatccagatgacacagagccctagcagcctgtctgccagcgtgggagacagagtgaccatcacctgtctggcctccgaggacatctacgacaacctggcctggtatcagcagaagcctggcaaggcccctaagctgctgatctactacgccagctctctccaggatggcgtgcccagcagattttctggcagcggctctggcaccgactacaccctgacaatatccagcctccagcctgaggacttcgccacctactactgcctgcaagacagcgagtacccctggacatttacgcgtcagagttttgggttgttggaccctaaattgtgctatctgttggacggaatcctgttcatttacggagtgatcctgaccgcattgttcctgcgggttaagttttccagatccgcagacgcacccgcttaccaacaagggcagaaccaactctacaatgaacttaatttggggcggagggaagagtacgacgttctggacaaaaggaggggacgagatcccgagatgggcggaaagcctcagcgaaggaagaatccgcaagaggggctttataacgaactccagaaagataaaatggcagaagcctatagtgagattgggatgaagggagaaaggaggaggggtaaaggtcacgatgggttgtaccaaggattgagcacagccactaaagatacctatgatgcgctccacatgcaggccctgccgccaaga

SEQ ID NO: 20273 - DNA, 1500 bp, synthetic construct
  source 1..1500: mol_type = other DNA
atggccttaccagtgaccgccttgctcctgccgctggccttgctgctccacgccgccaggccggacatccagatgacacagagccctagcagcctgtctgccagcgtgggagacagagtgaccatcacctgtctggcctccgaggacatctacgacaacctggcctggtatcagcagaagcctggcaaggcccctaagctgctgatctactacgccagctctctccaggatggcgtgcccagcagattttctggcagcggctctggcaccgactacaccctgacaatatccagcctccagcctgaggacttcgccacctactactgcctgcaagacagcgagtacccctggacatttggcggaggcggaagtggaggcggaggatctggcggcggaggctctgaagtgacactgaaagagtctggccccgctctggtcaagcccacacaaaccctgacactgacctgcaccttcagcggctttagcctgaccacatacggcatgggcgtcggctggattagacagcctcctggaaaagccctggaatggctggctaacatttggtgggacgacgacaagtattacaaccccagcctgaagaaccggctgaccatcagcaaggacaccagcaagaaccaggtggtgctgaccatgaccaacatggaccctgtggacaccgccacatattactgcgccagaatcggccccatcaagtaccccaccgctccttacagatacttcgacttctggggccagggcacaatggtcaccgttagctctacgcgtggaatgaggactgaggatcttcccaaagctgtcgtctttctcgaaccccaatggtatcgggtgctcgaaaaagactctgtgacactgaaatgccaaggggcctactctcccgaggacaactccacacagtggtttcataatgagtccctcatcagctctcaggccagctcttatttcattgatgccgctacagtggacgactccggcgagtatcggtgtcagaccaatctgtctacactgtctgaccccgtgcagcttgaggtccacattggatggttgctcttgcaagccccacgctgggttttcaaagaggaagatccaatccatctgcggtgccacagctggaaaaacaccgctctccacaaagtcacatacctgcaaaatggcaaaggacgcaaatacttccatcacaattccgatttttacattccgaaggctaccctgaaagacagcggcagctatttctgccggggactcgtcggctccaagaatgtgtcctccgaaaccgtgaatatcacgattacccaaggactggctgtgcctacaatctctagcttctttccgcctggataccaagtctccttctgtcttgtgatggtcctcctgtttgctgtggacacaggactgtacttttccgtgaaaacgaacatccgcagctccacacgcgattggaaagatcacaagtttaaatggcgcaaagatccccaggacaag

SEQ ID NO: 20274 - DNA, 2349 bp, synthetic construct
  source 1..2349: mol_type = other DNA
atggccttaccagtgaccgccttgctcctgccgctggccttgctgctccacgccgccaggccggacatccagatgacacagagccctagcagcctgtctgccagcgtgggagacagagtgaccatcacctgtctggcctccgaggacatctacgacaacctggcctggtatcagcagaagcctggcaaggcccctaagctgctgatctactacgccagctctctccaggatggcgtgcccagcagattttctggcagcggctctggcaccgactacaccctgacaatatccagcctccagcctgaggacttcgccacctactactgcctgcaagacagcgagtacccctggacatttggcggaggcggaagtggaggcggaggatctggcggcggaggctctgaagtgacactgaaagagtctggccccgctctggtcaagcccacacaaaccctgacactgacctgcaccttcagcggctttagcctgaccacatacggcatgggcgtcggctggattagacagcctcctggaaaagccctggaatggctggctaacatttggtgggacgacgacaagtattacaaccccagcctgaagaaccggctgaccatcagcaaggacaccagcaagaaccaggtggtgctgaccatgaccaacatggaccctgtggacaccgccacatattactgcgccagaatcggccccatcaagtaccccaccgctccttacagatacttcgacttctggggccagggcacaatggtcaccgttagctctacgcgtggaggctctggacaacaacagaccctgcctaaaccattcatctgggctgaaccccactttatggttccgaaagagaaacaagtcacgatttgttgccaagggaattacggggccgtcgagtatcagctccactttgagggctccctgtttgctgtggatcggcccaagccacctgaaagaatcaacaaagtccaattctatattcctgatatgaactcccgcatggcaggccagtattcatgtatctaccgcgtgggagaactttggagtgaaccctctaacctgctggacctcgtcgtgacagagatgtatgatacacccacactgtctgtgcaccctgggccagaagttatcagcggagaaaaagttaccttttattgccgcctcgataccgctacctctatgttcctcttgctgaaagagggccgcagctctcacgtgcagcgaggctacggaaaggtccaagctgagtttcctctcggccccgtgaccaccgctcacaggggcacatatagatgttttggctcttataacaatcatgcctggtcattcccatccgagcctgtgaaactgctggtcacaggcgatattgagaatacctctctggccccagaagatcctacattccccgccgacacatggggaacatatctgctgacaaccgaaaccgggctgcaaaaggaccatgctctgtgggatcataccgctcagaatctgcttcggatggggcttgcattcctggtcctggtggctcttgtctggtttctggtcgaggactggctgtcccggaagagaaccagagaaagagcttccagggccagcacctgggaaggcagacgcagactgaatactcagaccctgcgcgccaagagaagcggatctggcgtgaagcagaccctgaatttcgacctgctgaagctggctggcgacgtggaatccaacccaggcccttctagaggccatatgaccgagtacaagcccacggtgcgcctcgccacccgcgacgacgtccccagggccgtacgcaccctcgccgccgcgttcgccgactaccccgccacgcgccacaccgtcgatccggaccgccacatcgagcgggtcaccgagctgcaagaactcttcctcacgcgcgtcgggctcgacatcggcaaggtgtgggtcgcggacgacggcgccgcggtggcggtctggaccacgccggagagcgtcgaagcgggggcggtgttcgccgagatcggcccgcgcatggccgagttgagcggttcccggctggccgcgcagcaacagatggaaggcctcctggcgccgcaccggcccaaggagcccgcgtggttcctggccaccgtcggcgtctcgcccgaccaccagggcaagggtctgggcagcgccgtcgtgctccccggagtggaggcggccgagcgcgccggggtgcccgccttcctggagacctccgcgccccgcaacctccccttctacgagcggctcggcttcaccgtcaccgccgacgtcgaggtgcccgaaggaccgcgcacctggtgcatgacccgcaagcccggtgcctga

SEQ ID NO: 20275 - DNA, 1848 bp, synthetic construct
  source 1..1848: mol_type = other DNA
atggccttaccagtgaccgccttgctcctgccgctggccttgctgctccacgccgccaggccggacatccagatgacacagagccctagcagcctgtctgccagcgtgggagacagagtgaccatcacctgtctggcctccgaggacatctacgacaacctggcctggtatcagcagaagcctggcaaggcccctaagctgctgatctactacgccagctctctccaggatggcgtgcccagcagattttctggcagcggctctggcaccgactacaccctgacaatatccagcctccagcctgaggacttcgccacctactactgcctgcaagacagcgagtacccctggacatttggcggaggcggaagtggaggcggaggatctggcggcggaggctctgaagtgacactgaaagagtctggccccgctctggtcaagcccacacaaaccctgacactgacctgcaccttcagcggctttagcctgaccacatacggcatgggcgtcggctggattagacagcctcctggaaaagccctggaatggctggctaacatttggtgggacgacgacaagtattacaaccccagcctgaagaaccggctgaccatcagcaaggacaccagcaagaaccaggtggtgctgaccatgaccaacatggaccctgtggacaccgccacatattactgcgccagaatcggccccatcaagtaccccaccgctccttacagatacttcgacttctggggccagggcacaatggtcaccgttagctctacgcgtaaaattgaagttatgtatcctcctccttacctagacaatgagaagagcaatggaaccattatccatgtgaaaggggcgcgtggcgatattgagaatacctctctggccccagaagatcctacattccccgccgacacatggggaacatatctgctgacaaccgaaaccgggctgcaaaaggaccatgctctgtgggatcataccgctcagaatctgcttcggatggggcttgcattcctggtcctggtggctcttgtctggtttctggtcgaggactggctgtcccggaagagaaccagagaaagagcttccagggccagcacctgggaaggcagacgcagactgaatactcagaccctgcgcgccaagagaagcggatctggcgtgaagcagaccctgaatttcgacctgctgaagctggctggcgacgtggaatccaacccaggcccttctagaggccatatgaccgagtacaagcccacggtgcgcctcgccacccgcgacgacgtccccagggccgtacgcaccctcgccgccgcgttcgccgactaccccgccacgcgccacaccgtcgatccggaccgccacatcgagcgggtcaccgagctgcaagaactcttcctcacgcgcgtcgggctcgacatcggcaaggtgtgggtcgcggacgacggcgccgcggtggcggtctggaccacgccggagagcgtcgaagcgggggcggtgttcgccgagatcggcccgcgcatggccgagttgagcggttcccggctggccgcgcagcaacagatggaaggcctcctggcgccgcaccggcccaaggagcccgcgtggttcctggccaccgtcggcgtctcgcccgaccaccagggcaagggtctgggcagcgccgtcgtgctccccggagtggaggcggccgagcgcgccggggtgcccgccttcctggagacctccgcgccccgcaacctccccttctacgagcggctcggcttcaccgtcaccgccgacgtcgaggtgcccgaaggaccgcgcacctggtgcatgacccgcaagcccggtgcctga

SEQ ID NO: 20276 - DNA, 2109 bp, synthetic construct
  source 1..2109: mol_type = other DNA
atggccttaccagtgaccgccttgctcctgccgctggccttgctgctccacgccgccaggccggacatccagatgacacagagccctagcagcctgtctgccagcgtgggagacagagtgaccatcacctgtctggcctccgaggacatctacgacaacctggcctggtatcagcagaagcctggcaaggcccctaagctgctgatctactacgccagctctctccaggatggcgtgcccagcagattttctggcagcggctctggcaccgactacaccctgacaatatccagcctccagcctgaggacttcgccacctactactgcctgcaagacagcgagtacccctggacatttggcggaggcggaagtggaggcggaggatctggcggcggaggctctgaagtgacactgaaagagtctggccccgctctggtcaagcccacacaaaccctgacactgacctgcaccttcagcggctttagcctgaccacatacggcatgggcgtcggctggattagacagcctcctggaaaagccctggaatggctggctaacatttggtgggacgacgacaagtattacaaccccagcctgaagaaccggctgaccatcagcaaggacaccagcaagaaccaggtggtgctgaccatgaccaacatggaccctgtggacaccgccacatattactgcgccagaatcggccccatcaagtaccccaccgctccttacagatacttcgacttctggggccagggcacaatggtcaccgttagctctacgcgtctgtgggtgtcccagccacctgaaattcggacactggaaggctcctccgcctttctgccctgtagctttaacgccagccaggggagactcgccatcggctctgtgacatggttccgggatgaagtcgtccctggaaaagaagttcgcaacggaacaccagagttcagaggcagactcgccccactggcaagctccagattcctgcatgaccatcaggctgaactgcacattagggacgtgcggggccacgatgcctccatctatgtgtgtcgggtcgaagtgcttggactcggcgtcggaactggaaacggcactaggctggtggtcgagaaagaacatccacagcttggcgctggcaccgtcctgttgcttagagccggattctatgccgtcagcttcctgtccgtggctgtggggtctacagtgtattaccagggaaaatgtctcacctggaaaggccccagacgccagcttccagctgttgttcctgctccactgccaccaccttgtggctcctctgctcacttgcttccaccagtgcctggcggacgcgccaagagaagcggatctggcgtgaagcagaccctgaatttcgacctgctgaagctggctggcgacgtggaatccaacccaggcccttctagaatgtaccggatgcagctgctgagctgtatcgccctgtctctggccctggtcacaaatagcgcccctaccagcagcagcaccaagaaaacccagctgcaactggaacacctcctgctggacctccagatgatcctgaacggcatcaacaactacaagaaccccaagctgaccgagatgctgaccgccaagttctacatgcccaagaaggccaccgagctgaagcacctccagtgcctggaagaggaactgaagcccctggaagaagtgctgaatctggcccagagcaagaacttccacctgaggccaagggacctgatctccaacatcaacgtgatcgtgctggaactgaaaggcagcgagacaaccttcatgtgcgagtacgccgacgagacagctaccatcgtggaatttctgaatcggtggatcaccttctgccagagcatcatcagcaccctgacaaagatcgaagtgatgtaccctcctccttacctggacaacgagaagtccaacggcaccatcatccacgtgaagggcaagcacctgtgtccttctccactgttccccggacctagcaagcctttctgggtgctcgttgttgttggcggcgtgctggcctgttacagcctgctggttaccgtggccttcatcatcttttgggtccgaagcaagcggagctaa

SEQ ID NO: 20277 - DNA, 2037 bp, synthetic construct
  source 1..2037: mol_type = other DNA
atggccttaccagtgaccgccttgctcctgccgctggccttgctgctccacgccgccaggccggacatccagatgacacagagccctagcagcctgtctgccagcgtgggagacagagtgaccatcacctgtctggcctccgaggacatctacgacaacctggcctggtatcagcagaagcctggcaaggcccctaagctgctgatctactacgccagctctctccaggatggcgtgcccagcagattttctggcagcggctctggcaccgactacaccctgacaatatccagcctccagcctgaggacttcgccacctactactgcctgcaagacagcgagtacccctggacatttggcggaggcggaagtggaggcggaggatctggcggcggaggctctgaagtgacactgaaagagtctggccccgctctggtcaagcccacacaaaccctgacactgacctgcaccttcagcggctttagcctgaccacatacggcatgggcgtcggctggattagacagcctcctggaaaagccctggaatggctggctaacatttggtgggacgacgacaagtattacaaccccagcctgaagaaccggctgaccatcagcaaggacaccagcaagaaccaggtggtgctgaccatgaccaacatggaccctgtggacaccgccacatattactgcgccagaatcggccccatcaagtaccccaccgctccttacagatacttcgacttctggggccagggcacaatggtcaccgttagctctacgcgtctgtgggtgtcccagccacctgaaattcggacactggaaggctcctccgcctttctgccctgtagctttaacgccagccaggggagactcgccatcggctctgtgacatggttccgggatgaagtcgtccctggaaaagaagttcgcaacggaacaccagagttcagaggcagactcgccccactggcaagctccagattcctgcatgaccatcaggctgaactgcacattagggacgtgcggggccacgatgcctccatctatgtgtgtcgggtcgaagtgcttggactcggcgtcggaactggaaacggcactaggctggtggtcgagaaagaacatccacagcttggcgctggcaccgtcctgttgcttagagccggattctatgccgtcagcttcctgtccgtggctgtggggtctacagtgtattaccagggaaaatgtctcacctggaaaggccccagacgccagcttccagctgttgttcctgctccactgccaccaccttgtggctcctctgctcacttgcttccaccagtgcctggcggacgcgccaagagaagcggatctggcgtgaagcagaccctgaatttcgacctgctgaagctggctggcgacgtggaatccaacccaggcccttctagaggccatatgaccgagtacaagcccacggtgcgcctcgccacccgcgacgacgtccccagggccgtacgcaccctcgccgccgcgttcgccgactaccccgccacgcgccacaccgtcgatccggaccgccacatcgagcgggtcaccgagctgcaagaactcttcctcacgcgcgtcgggctcgacatcggcaaggtgtgggtcgcggacgacggcgccgcggtggcggtctggaccacgccggagagcgtcgaagcgggggcggtgttcgccgagatcggcccgcgcatggccgagttgagcggttcccggctggccgcgcagcaacagatggaaggcctcctggcgccgcaccggcccaaggagcccgcgtggttcctggccaccgtcggcgtctcgcccgaccaccagggcaagggtctgggcagcgccgtcgtgctccccggagtggaggcggccgagcgcgccggggtgcccgccttcctggagacctccgcgccccgcaacctccccttctacgagcggctcggcttcaccgtcaccgccgacgtcgaggtgcccgaaggaccgcgcacctggtgcatgacccgcaagcccggtgcctga

SEQ ID NO: 20278 - DNA, 1062 bp, synthetic construct
  source 1..1062: mol_type = other DNA
atggccttaccagtgaccgccttgctcctgccgctggccttgctgctccacgccgccaggccggacatccagatgacacagagccctagcagcctgtctgccagcgtgggagacagagtgaccatcacctgtctggcctccgaggacatctacgacaacctggcctggtatcagcagaagcctggcaaggcccctaagctgctgatctactacgccagctctctccaggatggcgtgcccagcagattttctggcagcggctctggcaccgactacaccctgacaatatccagcctccagcctgaggacttcgccacctactactgcctgcaagacagcgagtacccctggacatttggcggaggcggaagtggaggcggaggatctggcggcggaggctctgaagtgacactgaaagagtctggccccgctctggtcaagcccacacaaaccctgacactgacctgcaccttcagcggctttagcctgaccacatacggcatgggcgtcggctggattagacagcctcctggaaaagccctggaatggctggctaacatttggtgggacgacgacaagtattacaaccccagcctgaagaaccggctgaccatcagcaaggacaccagcaagaaccaggtggtgctgaccatgaccaacatggaccctgtggacaccgccacatattactgcgccagaatcggccccatcaagtaccccaccgctccttacagatacttcgacttctggggccagggcacaatggtcaccgttagctctacgcgtaaaattgaagttatgtatcctcctccttacctagacaatgagaagagcaatggaaccattatccatgtgaaaggggcgcgtatcacccagggcctggccgtgtctaccatcagcagctttttcccacccggctaccaggtgtccttctgcctcgtgatggtgctgctgttcgccgtggacaccggcctgtacttcagcgtgaaaacaaacatccggtccagcaccagagactggaaggaccacaagttcaagtggcggaaggacccccaggacaag

SEQ ID NO: 20279 - DNA, 1062 bp, synthetic construct
  source 1..1062: mol_type = other DNA
atggccttaccagtgaccgccttgctcctgccgctggccttgctgctccacgccgccaggccggacatccagatgacacagagccctagcagcctgtctgccagcgtgggagacagagtgaccatcacctgtctggcctccgaggacatctacgacaacctggcctggtatcagcagaagcctggcaaggcccctaagctgctgatctactacgccagctctctccaggatggcgtgcccagcagattttctggcagcggctctggcaccgactacaccctgacaatatccagcctccagcctgaggacttcgccacctactactgcctgcaagacagcgagtacccctggacatttggcggaggcggaagtggaggcggaggatctggcggcggaggctctgaagtgacactgaaagagtctggccccgctctggtcaagcccacacaaaccctgacactgacctgcaccttcagcggctttagcctgaccacatacggcatgggcgtcggctggattagacagcctcctggaaaagccctggaatggctggctaacatttggtgggacgacgacaagtattacaaccccagcctgaagaaccggctgaccatcagcaaggacaccagcaagaaccaggtggtgctgaccatgaccaacatggaccctgtggacaccgccacatattactgcgccagaatcggccccatcaagtaccccaccgctccttacagatacttcgacttctggggccagggcacaatggtcaccgttagctctacgcgtaaaattgaagttatgtatcctcctccttacctagacaatgagaagagcaatggaaccattatccatgtgaaaggggcgcgtattacccaaggactggctgtgcctacaatctctagcttctttccgcctggataccaagtctccttctgtcttgtgatggtcctcctgtttgctgtggacacaggactgtacttttccgtgaaaacgaacatccgcagctccacacgcgattggaaagatcacaagtttaaatggcgcaaagatccccaggacaag

SEQ ID NO: 20280 - DNA, 999 bp, synthetic construct
  source 1..999: mol_type = other DNA
atggccttaccagtgaccgccttgctcctgccgctggccttgctgctccacgccgccaggccggacatccagatgacacagagccctagcagcctgtctgccagcgtgggagacagagtgaccatcacctgtctggcctccgaggacatctacgacaacctggcctggtatcagcagaagcctggcaaggcccctaagctgctgatctactacgccagctctctccaggatggcgtgcccagcagattttctggcagcggctctggcaccgactacaccctgacaatatccagcctccagcctgaggacttcgccacctactactgcctgcaagacagcgagtacccctggacatttggcggaggcggaagtggaggcggaggatctggcggcggaggctctgaagtgacactgaaagagtctggccccgctctggtcaagcccacacaaaccctgacactgacctgcaccttcagcggctttagcctgaccacatacggcatgggcgtcggctggattagacagcctcctggaaaagccctggaatggctggctaacatttggtgggacgacgacaagtattacaaccccagcctgaagaaccggctgaccatcagcaaggacaccagcaagaaccaggtggtgctgaccatgaccaacatggaccctgtggacaccgccacatattactgcgccagaatcggccccatcaagtaccccaccgctccttacagatacttcgacttctggggccagggcacaatggtcaccgttagctctacgcgtaaaattgaagttatgtatcctcctccttacctagacaatgagaagagcaatggaaccattatccatgtgaaaggggcgcgtattacccaaggactggctgtgtctacaatctctagcttctctccgcctggataccaagtctccttctgtcttgtgatggtcctcctgtttgctgtggacacaggactgtacttttccgtgaaaacgaacatc

SEQ ID NO: 20281 - DNA, 1092 bp, synthetic construct
  source 1..1092: mol_type = other DNA
atggccttaccagtgaccgccttgctcctgccgctggccttgctgctccacgccgccaggccggacatccagatgacacagagccctagcagcctgtctgccagcgtgggagacagagtgaccatcacctgtctggcctccgaggacatctacgacaacctggcctggtatcagcagaagcctggcaaggcccctaagctgctgatctactacgccagctctctccaggatggcgtgcccagcagattttctggcagcggctctggcaccgactacaccctgacaatatccagcctccagcctgaggacttcgccacctactactgcctgcaagacagcgagtacccctggacatttggcggaggcggaagtggaggcggaggatctggcggcggaggctctgaagtgacactgaaagagtctggccccgctctggtcaagcccacacaaaccctgacactgacctgcaccttcagcggctttagcctgaccacatacggcatgggcgtcggctggattagacagcctcctggaaaagccctggaatggctggctaacatttggtgggacgacgacaagtattacaaccccagcctgaagaaccggctgaccatcagcaaggacaccagcaagaaccaggtggtgctgaccatgaccaacatggaccctgtggacaccgccacatattactgcgccagaatcggccccatcaagtaccccaccgctccttacagatacttcgacttctggggccagggcacaatggtcaccgttagctctacgcgtaaaattgaagttatgtatcctcctccttacctagacaatgagaagagcaatggaaccattatccatgtgaaaggggcgcgtgtcgagaaagaacatccacagcttggcgctggcaccgtcctgttgcttagagccggattctatgccgtcagcttcctgtccgtggctgtggggtctacagtgtattaccagggaaaatgtctcacctggaaaggccccagacgccagcttccagctgttgttcctgctccactgccaccaccttgtggctcctctgctcacttgcttccaccagtgcctggcgga

SEQ ID NO: 20282 - DNA, 1335 bp, synthetic construct
  source 1..1335: mol_type = other DNA
atggccttaccagtgaccgccttgctcctgccgctggccttgctgctccacgccgccaggccggacatccagatgacacagagccctagcagcctgtctgccagcgtgggagacagagtgaccatcacctgtctggcctccgaggacatctacgacaacctggcctggtatcagcagaagcctggcaaggcccctaagctgctgatctactacgccagctctctccaggatggcgtgcccagcagattttctggcagcggctctggcaccgactacaccctgacaatatccagcctccagcctgaggacttcgccacctactactgcctgcaagacagcgagtacccctggacatttggcggaggcggaagtggaggcggaggatctggcggcggaggctctgaagtgacactgaaagagtctggccccgctctggtcaagcccacacaaaccctgacactgacctgcaccttcagcggctttagcctgaccacatacggcatgggcgtcggctggattagacagcctcctggaaaagccctggaatggctggctaacatttggtgggacgacgacaagtattacaaccccagcctgaagaaccggctgaccatcagcaaggacaccagcaagaaccaggtggtgctgaccatgaccaacatggaccctgtggacaccgccacatattactgcgccagaatcggccccatcaagtaccccaccgctccttacagatacttcgacttctggggccagggcacaatggtcaccgttagctctacgcgtaaaattgaagttatgtatcctcctccttacctagacaatgagaagagcaatggaaccattatccatgtgaaaggggcgcgtaagtctgtgcgcttttacctggtcgtcagccctgccagtgcctccactcagacatcttggaccccaagggaccttgtgtcctctcagacacagacacagtcctgcgtgccaccaactgctggcgcaagacaggctccagagtctcccagcacaatccccgtcccttctcagccccagaactccacacttaggccaggaccagctgctccaatcgcactggtcccagtgttctgcggactgctggttgccaagtctctggtgctgagcgcactcctcgtttggtggggcgatatttggtggaaaacgatgatggaattgagatccctcgatacgcagaaagccacatgccaccttcagcaagtcacagacttgccttggaccagcgtcagctctcccgtggaacgggaaattctgtatcatacagtggcccgcaccaagatttccgacgatgacgacgagcacacactg

SEQ ID NO: 20283 - DNA, 1146 bp, synthetic construct
  source 1..1146: mol_type = other DNA
atggccttaccagtgaccgccttgctcctgccgctggccttgctgctccacgccgccaggccggacatccagatgacacagagccctagcagcctgtctgccagcgtgggagacagagtgaccatcacctgtctggcctccgaggacatctacgacaacctggcctggtatcagcagaagcctggcaaggcccctaagctgctgatctactacgccagctctctccaggatggcgtgcccagcagattttctggcagcggctctggcaccgactacaccctgacaatatccagcctccagcctgaggacttcgccacctactactgcctgcaagacagcgagtacccctggacatttggcggaggcggaagtggaggcggaggatctggcggcggaggctctgaagtgacactgaaagagtctggccccgctctggtcaagcccacacaaaccctgacactgacctgcaccttcagcggctttagcctgaccacatacggcatgggcgtcggctggattagacagcctcctggaaaagccctggaatggctggctaacatttggtgggacgacgacaagtattacaaccccagcctgaagaaccggctgaccatcagcaaggacaccagcaagaaccaggtggtgctgaccatgaccaacatggaccctgtggacaccgccacatattactgcgccagaatcggccccatcaagtaccccaccgctccttacagatacttcgacttctggggccagggcacaatggtcaccgttagctctacgcgtaaaattgaagttatgtatcctcctccttacctagacaatgagaagagcaatggaaccattatccatgtgaaaggggcgcgtggcgatattgagaatacctctctggccccagaagatcctacattccccgccgacacatggggaacatatctgctgacaaccgaaaccgggctgcaaaaggaccatgctctgtgggatcataccgctcagaatctgcttcggatggggcttgcattcctggtcctggtggctcttgtctggtttctggtcgaggactggctgtcccggaagagaaccagagaaagagcttccagggccagcacctgggaaggcagacgcagactgaatactcagaccctg

SEQ ID NO: 20284 - DNA, 2937 bp, synthetic construct
  source 1..2937: mol_type = other DNA
atggccttaccagtgaccgccttgctcctgccgctggccttgctgctccacgccgccaggccggacatccagatgacacagagccctagcagcctgtctgccagcgtgggagacagagtgaccatcacctgtctggcctccgaggacatctacgacaacctggcctggtatcagcagaagcctggcaaggcccctaagctgctgatctactacgccagctctctccaggatggcgtgcccagcagattttctggcagcggctctggcaccgactacaccctgacaatatccagcctccagcctgaggacttcgccacctactactgcctgcaagacagcgagtacccctggacatttctcgagggacagcctaaggccaatcctaccgtgacactgttccctccaagcagcgaagaactccaggccaacaaggccacacttgtgtgcctgatctccgacttctaccctggggctgtgacagtggcttggaaggccgatggatctcctgtgaaagccggcgtggaaaccaccaagccatccaagcagagcaacaacaaatacgccgccagctcctacctgagcctgacacctgagcagtggaagtcccacagatcctacagctgccaagtgacccacgaaggcagcaccgtggaaaagacagtggcccctacagagtgcagcggatcccagagcttcggcctgctggaccccaagctgtgctacctgctggatggcatcctgttcatctacggcgtgatcctgaccgccctgttcctgagagtgaagttcagcagaagcgccgacgcccctgcctaccagcagggacagaaccaactgtacaacgagctgaacctgggcagacgggaagagtacgacgtgctggacaagcggagaggcagggaccctgagatgggcggaaagccccagcggagaaagaacccccaggaaggactgtataacgaactccagaaagacaagatggccgaagcctacagcgagatcggcatgaagggcgagcggagaagaggcaagggccacgatggcctgtaccagggcctgagcaccgccaccaaggacacctatgacgccctgcacatgcaggccctgcctccaagaagggccaagcgatctggatctggagcaacaaacttctcactactcaaacaagcaggtgacgtggaggagaatcccgggcctactagtatggactggatttggcgcatccttttccttgtcggcgctgctaccggcgcgcattccttcgaagaagtgacactgaaagagtctggccccgctctggtcaagcccacacaaaccctgacactgacctgcaccttcagcggctttagcctgaccacatacggcatgggcgtcggctggattagacagcctcctggaaaagccctggaatggctggctaacatttggtgggacgacgacaagtattacaaccccagcctgaagaaccggctgaccatcagcaaggacaccagcaagaaccaggtggtgctgaccatgaccaacatggaccctgtggacaccgccacatattactgcgccagaatcggccccatcaagtaccccaccgctccttacagatacttcgacttctggggccagggcacaatggtcaccgttagctctacgcgtgcctctacaaagggaccctccgtgtttcctctggctcccagcagcaagtctacaagcggaggaacagccgctctgggctgcctggtcaaggattactttcccgagcctgtgaccgtgtcctggaatagcggagcactgacaagcggcgtgcacacctttccagccgtgctgcaaagcagcggcctgtactctctgagcagcgtggtcacagtgcctagctctagcctgggcacccagacctacatctgcaatgtgaaccacaagcctagcaacaccaaggtggacaagagagtggaacccaagagctgtggtaccggcgacatcgagaacaccagtctggcccctgaggaccctacctttcctgccgatacctggggcacctacctgctgaccacagagacaggactccagaaagatcacgccctgtgggaccacacagcccagaacctgctgagaatgggcctcgcctttctggtgctggttgccctcgtgtggttcctggtggaagattggctgagccggaagcggacaagagagagagccagcagagcctctacctgggagggaagaagaaggctgaacacccagacacttagggccaagcgatctggatctggagcaacaaacttctcactactcaaacaagcaggtgacgtggaggagaatcccgggccttctagaggccatatgaccgagtacaagcccacggtgcgcctcgccacccgcgacgacgtccccagggccgtacgcaccctcgccgccgcgttcgccgactaccccgccacgcgccacaccgtcgatccggaccgccacatcgagcgggtcaccgagctgcaagaactcttcctcacgcgcgtcgggctcgacatcggcaaggtgtgggtcgcggacgacggcgccgcggtggcggtctggaccacgccggagagcgtcgaagcgggggcggtgttcgccgagatcggcccgcgcatggccgagttgagcggttcccggctggccgcgcagcaacagatggaaggcctcctggcgccgcaccggcccaaggagcccgcgtggttcctggccaccgtcggcgtctcgcccgaccaccagggcaagggtctgggcagcgccgtcgtgctccccggagtggaggcggccgagcgcgccggggtgcccgccttcctggagacctccgcgccccgcaacctccccttctacgagcggctcggcttcaccgtcaccgccgacgtcgaggtgcccgaaggaccgcgcacctggtgcatgacccgcaagcccggtgcctga

SEQ ID NO: 20285 - DNA, 3135 bp, synthetic construct
  source 1..3135: mol_type = other DNA
atggccttaccagtgaccgccttgctcctgccgctggccttgctgctccacgccgccaggccggacatccagatgacacagagccctagcagcctgtctgccagcgtgggagacagagtgaccatcacctgtctggcctccgaggacatctacgacaacctggcctggtatcagcagaagcctggcaaggcccctaagctgctgatctactacgccagctctctccaggatggcgtgcccagcagattttctggcagcggctctggcaccgactacaccctgacaatatccagcctccagcctgaggacttcgccacctactactgcctgcaagacagcgagtacccctggacatttctcgagggacagcctaaggccaatcctaccgtgacactgttccctccaagcagcgaagaactccaggccaacaaggccacacttgtgtgcctgatctccgacttctaccctggggctgtgacagtggcttggaaggccgatggatctcctgtgaaagccggcgtggaaaccaccaagccatccaagcagagcaacaacaaatacgccgccagctcctacctgagcctgacacctgagcagtggaagtcccacagatcctacagctgccaagtgacccacgaaggcagcaccgtggaaaagacagtggcccctacagagtgcagcggatcccagagcttcggcctgctggaccccaagctgtgctacctgctggatggcatcctgttcatctacggcgtgatcctgaccgccctgttcctgagagtgaagttcagcagaagcgccgacgcccctgcctaccagcagggacagaaccaactgtacaacgagctgaacctgggcagacgggaagagtacgacgtgctggacaagcggagaggcagggaccctgagatgggcggaaagccccagcggagaaagaacccccaggaaggactgtataacgaactccagaaagacaagatggccgaagcctacagcgagatcggcatgaagggcgagcggagaagaggcaagggccacgatggcctgtaccagggcctgagcaccgccaccaaggacacctatgacgccctgcacatgcaggccctgcctccaagaagggccaagcgatctggatctggagcaacaaacttctcactactcaaacaagcaggtgacgtggaggagaatcccgggcctactagtatggactggatttggcgcatccttttccttgtcggcgctgctaccggcgcgcattccttcgaagaagtgacactgaaagagtctggccccgctctggtcaagcccacacaaaccctgacactgacctgcaccttcagcggctttagcctgaccacatacggcatgggcgtcggctggattagacagcctcctggaaaagccctggaatggctggctaacatttggtgggacgacgacaagtattacaaccccagcctgaagaaccggctgaccatcagcaaggacaccagcaagaaccaggtggtgctgaccatgaccaacatggaccctgtggacaccgccacatattactgcgccagaatcggccccatcaagtaccccaccgctccttacagatacttcgacttctggggccagggcacaatggtcaccgttagctctacgcgtgcctctacaaagggaccctccgtgtttcctctggctcccagcagcaagtctacaagcggaggaacagccgctctgggctgcctggtcaaggattactttcccgagcctgtgaccgtgtcctggaatagcggagcactgacaagcggcgtgcacacctttccagccgtgctgcaaagcagcggcctgtactctctgagcagcgtggtcacagtgcctagctctagcctgggcacccagacctacatctgcaatgtgaaccacaagcctagcaacaccaaggtggacaagagagtggaacccaagagctgtggtaccaagtctgtgcgcttttacctggtcgtcagccctgccagtgcctccactcagacatcttggaccccaagggaccttgtgtcctctcagacacagacacagtcctgcgtgccaccaactgctggcgcaagacaggctccagagtctcccagcacaatccccgtcccttctcagccccagaactccacacttaggccaggaccagctgctccaatcgcactggtcccagtgttctgcggactgctggttgccaagtctctggtgctgagcgcactcctcgtttggtggggcgatatttggtggaaaacgatgatggaattgagatccctcgatacgcagaaagccacatgccaccttcagcaagtcacagacttgccttggaccagcgtcagctctcccgtggaacgggaaattctgtatcatacagtggcccgcaccaagatttccgacgatgacgacgagcacacactgcgcgccaagagaagcggatctggcgtgaagcagaccctgaatttcgacctgctgaagctggctggcgacgtggaatccaacccaggcccttctagaggccatatgaccgagtacaagcccacggtgcgcctcgccacccgcgacgacgtccccagggccgtacgcaccctcgccgccgcgttcgccgactaccccgccacgcgccacaccgtcgatccggaccgccacatcgagcgggtcaccgagctgcaagaactcttcctcacgcgcgtcgggctcgacatcggcaaggtgtgggtcgcggacgacggcgccgcggtggcggtctggaccacgccggagagcgtcgaagcgggggcggtgttcgccgagatcggcccgcgcatggccgagttgagcggttcccggctggccgcgcagcaacagatggaaggcctcctggcgccgcaccggcccaaggagcccgcgtggttcctggccaccgtcggcgtctcgcccgaccaccagggcaagggtctgggcagcgccgtcgtgctccccggagtggaggcggccgagcgcgccggggtgcccgccttcctggagacctccgcgccccgcaacctccccttctacgagcggctcggcttcaccgtcaccgccgacgtcgaggtgcccgaaggaccgcgcacctggtgcatgacccgcaagcccggtgcctga

SEQ ID NO: 20286 - DNA, 2895 bp, synthetic construct
  source 1..2895: mol_type = other DNA
atggccttaccagtgaccgccttgctcctgccgctggccttgctgctccacgccgccaggccggacatccagatgacacagagccctagcagcctgtctgccagcgtgggagacagagtgaccatcacctgtctggcctccgaggacatctacgacaacctggcctggtatcagcagaagcctggcaaggcccctaagctgctgatctactacgccagctctctccaggatggcgtgcccagcagattttctggcagcggctctggcaccgactacaccctgacaatatccagcctccagcctgaggacttcgccacctactactgcctgcaagacagcgagtacccctggacatttctcgagggacagcctaaggccaatcctaccgtgacactgttccctccaagcagcgaagaactccaggccaacaaggccacacttgtgtgcctgatctccgacttctaccctggggctgtgacagtggcttggaaggccgatggatctcctgtgaaagccggcgtggaaaccaccaagccatccaagcagagcaacaacaaatacgccgccagctcctacctgagcctgacacctgagcagtggaagtcccacagatcctacagctgccaagtgacccacgaaggcagcaccgtggaaaagacagtggcccctacagagtgcagcggatcccagagcttcggcctgctggaccccaagctgtgctacctgctggatggcatcctgttcatctacggcgtgatcctgaccgccctgttcctgagagtgaagttcagcagaagcgccgacgcccctgcctaccagcagggacagaaccaactgtacaacgagctgaacctgggcagacgggaagagtacgacgtgctggacaagcggagaggcagggaccctgagatgggcggaaagccccagcggagaaagaacccccaggaaggactgtataacgaactccagaaagacaagatggccgaagcctacagcgagatcggcatgaagggcgagcggagaagaggcaagggccacgatggcctgtaccagggcctgagcaccgccaccaaggacacctatgacgccctgcacatgcaggccctgcctccaagaagggccaagcgatctggatctggagcaacaaacttctcactactcaaacaagcaggtgacgtggaggagaatcccgggcctactagtatggactggatttggcgcatccttttccttgtcggcgctgctaccggcgcgcattccttcgaagaagtgacactgaaagagtctggccccgctctggtcaagcccacacaaaccctgacactgacctgcaccttcagcggctttagcctgaccacatacggcatgggcgtcggctggattagacagcctcctggaaaagccctggaatggctggctaacatttggtgggacgacgacaagtattacaaccccagcctgaagaaccggctgaccatcagcaaggacaccagcaagaaccaggtggtgctgaccatgaccaacatggaccctgtggacaccgccacatattactgcgccagaatcggccccatcaagtaccccaccgctccttacagatacttcgacttctggggccagggcacaatggtcaccgttagctctacgcgtgcctctacaaagggaccctccgtgtttcctctggctcccagcagcaagtctacaagcggaggaacagccgctctgggctgcctggtcaaggattactttcccgagcctgtgaccgtgtcctggaatagcggagcactgacaagcggcgtgcacacctttccagccgtgctgcaaagcagcggcctgtactctctgagcagcgtggtcacagtgcctagctctagcctgggcacccagacctacatctgcaatgtgaaccacaagcctagcaacaccaaggtggacaagagagtggaacccaagagctgtggtaccgtggtcgagaaagaacatccacagcttggcgctggcaccgtcctgttgcttagagccggattctatgccgtcagcttcctgtccgtggctgtggggtctacagtgtattaccagggaaaatgtctcacctggaaaggccccagacgccagcttccagctgttgttcctgctccactgccaccaccttgtggctcctctgctcacttgcttccaccagtgcctggcggacgcgccaagagaagcggatctggcgtgaagcagaccctgaatttcgacctgctgaagctggctggcgacgtggaatccaacccaggcccttctagaggccatatgaccgagtacaagcccacggtgcgcctcgccacccgcgacgacgtccccagggccgtacgcaccctcgccgccgcgttcgccgactaccccgccacgcgccacaccgtcgatccggaccgccacatcgagcgggtcaccgagctgcaagaactcttcctcacgcgcgtcgggctcgacatcggcaaggtgtgggtcgcggacgacggcgccgcggtggcggtctggaccacgccggagagcgtcgaagcgggggcggtgttcgccgagatcggcccgcgcatggccgagttgagcggttcccggctggccgcgcagcaacagatggaaggcctcctggcgccgcaccggcccaaggagcccgcgtggttcctggccaccgtcggcgtctcgcccgaccaccagggcaagggtctgggcagcgccgtcgtgctccccggagtggaggcggccgagcgcgccggggtgcccgccttcctggagacctccgcgccccgcaacctccccttctacgagcggctcggcttcaccgtcaccgccgacgtcgaggtgcccgaaggaccgcgcacctggtgcatgacccgcaagcccggtgcctga

SEQ ID NO: 20287 - DNA, 2982 bp, synthetic construct
  source 1..2982: mol_type = other DNA
atggccttaccagtgaccgccttgctcctgccgctggccttgctgctccacgccgccaggccggacatccagatgacacagagccctagcagcctgtctgccagcgtgggagacagagtgaccatcacctgtctggcctccgaggacatctacgacaacctggcctggtatcagcagaagcctggcaaggcccctaagctgctgatctactacgccagctctctccaggatggcgtgcccagcagattttctggcagcggctctggcaccgactacaccctgacaatatccagcctccagcctgaggacttcgccacctactactgcctgcaagacagcgagtacccctggacatttctcgaggacctgaagaacgtgttcccacctgaggtggccgtgttcgagcctagcgaggccgagatcagccacacccagaaagccaccctcgtgtgcctggctaccggcttctaccccgaccatgtggaactgtcttggtgggtcaacggcaaagaggtgcacagcggcgtgtctaccgacccccagccactgaaagaacagcccgccctgaacgacagccggtactgcctgagcagcagactgagagtgtccgccaccttctggcagaacccccggaaccacttcagatgccaggtgcagttctacggcctgagcgagaacgacgagtggacccaggacagagccaagcccgtgacccagatcgtgtctgccgaagcctggggcagagccgattgcggatcccagagcttcggcctgctggaccccaagctgtgctacctgctggatggcatcctgttcatctacggcgtgatcctgaccgccctgttcctgagagtgaagttcagcagaagcgccgacgcccctgcctaccagcagggacagaaccaactgtacaacgagctgaacctgggcagacgggaagagtacgacgtgctggacaagcggagaggcagggaccctgagatgggcggaaagccccagcggagaaagaacccccaggaaggactgtataacgaactccagaaagacaagatggccgaagcctacagcgagatcggcatgaagggcgagcggagaagaggcaagggccacgatggcctgtaccagggcctgagcaccgccaccaaggacacctatgacgccctgcacatgcaggccctgcctccaagaagggccaagcgatctggatctggagcaacaaacttctcactactcaaacaagcaggtgacgtggaggagaatcccgggcctactagtatggactggatttggcgcatccttttccttgtcggcgctgctaccggcgcgcattccttcgaagaagtgacactgaaagagtctggccccgctctggtcaagcccacacaaaccctgacactgacctgcaccttcagcggctttagcctgaccacatacggcatgggcgtcggctggattagacagcctcctggaaaagccctggaatggctggctaacatttggtgggacgacgacaagtattacaaccccagcctgaagaaccggctgaccatcagcaaggacaccagcaagaaccaggtggtgctgaccatgaccaacatggaccctgtggacaccgccacatattactgcgccagaatcggccccatcaagtaccccaccgctccttacagatacttcgacttctggggccagggcacaatggtcaccgttagctctacgcgtatccagaaccctgatcctgccgtgtaccagctgcgggatagcaagagcagcgacaagagcgtgtgtctgttcaccgacttcgacagccagaccaacgtgtcccagagcaaggactccgacgtgtacatcaccgataagaccgtgctggacatgcggagcatggacttcaagagcaactccgccgtggcctggtccaacaagtccgatttcgcctgcgccaacgccttcaacaacagcattatccccgaggacacattcttcccaagccccgagagcagctgcggtaccggcgacatcgagaacaccagtctggcccctgaggaccctacctttcctgccgatacctggggcacctacctgctgaccacagagacaggactccagaaagatcacgccctgtgggaccacacagcccagaacctgctgagaatgggcctcgcctttctggtgctggttgccctcgtgtggttcctggtggaagattggctgagccggaagcggacaagagagagagccagcagagcctctacctgggagggaagaagaaggctgaacacccagacacttagggccaagcgatctggatctggagcaacaaacttctcactactcaaacaagcaggtgacgtggaggagaatcccgggccttctagaggccatatgaccgagtacaagcccacggtgcgcctcgccacccgcgacgacgtccccagggccgtacgcaccctcgccgccgcgttcgccgactaccccgccacgcgccacaccgtcgatccggaccgccacatcgagcgggtcaccgagctgcaagaactcttcctcacgcgcgtcgggctcgacatcggcaaggtgtgggtcgcggacgacggcgccgcggtggcggtctggaccacgccggagagcgtcgaagcgggggcggtgttcgccgagatcggcccgcgcatggccgagttgagcggttcccggctggccgcgcagcaacagatggaaggcctcctggcgccgcaccggcccaaggagcccgcgtggttcctggccaccgtcggcgtctcgcccgaccaccagggcaagggtctgggcagcgccgtcgtgctccccggagtggaggcggccgagcgcgccggggtgcccgccttcctggagacctccgcgccccgcaacctccccttctacgagcggctcggcttcaccgtcaccgccgacgtcgaggtgcccgaaggaccgcgcacctggtgcatgacccgcaagcccggtgcctga

SEQ ID NO: 20288 - DNA, 3180 bp, synthetic construct
  source 1..3180: mol_type = other DNA
atggccttaccagtgaccgccttgctcctgccgctggccttgctgctccacgccgccaggccggacatccagatgacacagagccctagcagcctgtctgccagcgtgggagacagagtgaccatcacctgtctggcctccgaggacatctacgacaacctggcctggtatcagcagaagcctggcaaggcccctaagctgctgatctactacgccagctctctccaggatggcgtgcccagcagattttctggcagcggctctggcaccgactacaccctgacaatatccagcctccagcctgaggacttcgccacctactactgcctgcaagacagcgagtacccctggacatttctcgaggacctgaagaacgtgttcccacctgaggtggccgtgttcgagcctagcgaggccgagatcagccacacccagaaagccaccctcgtgtgcctggctaccggcttctaccccgaccatgtggaactgtcttggtgggtcaacggcaaagaggtgcacagcggcgtgtctaccgacccccagccactgaaagaacagcccgccctgaacgacagccggtactgcctgagcagcagactgagagtgtccgccaccttctggcagaacccccggaaccacttcagatgccaggtgcagttctacggcctgagcgagaacgacgagtggacccaggacagagccaagcccgtgacccagatcgtgtctgccgaagcctggggcagagccgattgcggatcccagagcttcggcctgctggaccccaagctgtgctacctgctggatggcatcctgttcatctacggcgtgatcctgaccgccctgttcctgagagtgaagttcagcagaagcgccgacgcccctgcctaccagcagggacagaaccaactgtacaacgagctgaacctgggcagacgggaagagtacgacgtgctggacaagcggagaggcagggaccctgagatgggcggaaagccccagcggagaaagaacccccaggaaggactgtataacgaactccagaaagacaagatggccgaagcctacagcgagatcggcatgaagggcgagcggagaagaggcaagggccacgatggcctgtaccagggcctgagcaccgccaccaaggacacctatgacgccctgcacatgcaggccctgcctccaagaagggccaagcgatctggatctggagcaacaaacttctcactactcaaacaagcaggtgacgtggaggagaatcccgggcctactagtatggactggatttggcgcatccttttccttgtcggcgctgctaccggcgcgcattccttcgaagaagtgacactgaaagagtctggccccgctctggtcaagcccacacaaaccctgacactgacctgcaccttcagcggctttagcctgaccacatacggcatgggcgtcggctggattagacagcctcctggaaaagccctggaatggctggctaacatttggtgggacgacgacaagtattacaaccccagcctgaagaaccggctgaccatcagcaaggacaccagcaagaaccaggtggtgctgaccatgaccaacatggaccctgtggacaccgccacatattactgcgccagaatcggccccatcaagtaccccaccgctccttacagatacttcgacttctggggccagggcacaatggtcaccgttagctctacgcgtatccagaaccctgatcctgccgtgtaccagctgcgggatagcaagagcagcgacaagagcgtgtgtctgttcaccgacttcgacagccagaccaacgtgtcccagagcaaggactccgacgtgtacatcaccgataagaccgtgctggacatgcggagcatggacttcaagagcaactccgccgtggcctggtccaacaagtccgatttcgcctgcgccaacgccttcaacaacagcattatccccgaggacacattcttcccaagccccgagagcagctgcggtaccaagtctgtgcgcttttacctggtcgtcagccctgccagtgcctccactcagacatcttggaccccaagggaccttgtgtcctctcagacacagacacagtcctgcgtgccaccaactgctggcgcaagacaggctccagagtctcccagcacaatccccgtcccttctcagccccagaactccacacttaggccaggaccagctgctccaatcgcactggtcccagtgttctgcggactgctggttgccaagtctctggtgctgagcgcactcctcgtttggtggggcgatatttggtggaaaacgatgatggaattgagatccctcgatacgcagaaagccacatgccaccttcagcaagtcacagacttgccttggaccagcgtcagctctcccgtggaacgggaaattctgtatcatacagtggcccgcaccaagatttccgacgatgacgacgagcacacactgcgcgccaagagaagcggatctggcgtgaagcagaccctgaatttcgacctgctgaagctggctggcgacgtggaatccaacccaggcccttctagaggccatatgaccgagtacaagcccacggtgcgcctcgccacccgcgacgacgtccccagggccgtacgcaccctcgccgccgcgttcgccgactaccccgccacgcgccacaccgtcgatccggaccgccacatcgagcgggtcaccgagctgcaagaactcttcctcacgcgcgtcgggctcgacatcggcaaggtgtgggtcgcggacgacggcgccgcggtggcggtctggaccacgccggagagcgtcgaagcgggggcggtgttcgccgagatcggcccgcgcatggccgagttgagcggttcccggctggccgcgcagcaacagatggaaggcctcctggcgccgcaccggcccaaggagcccgcgtggttcctggccaccgtcggcgtctcgcccgaccaccagggcaagggtctgggcagcgccgtcgtgctccccggagtggaggcggccgagcgcgccggggtgcccgccttcctggagacctccgcgccccgcaacctccccttctacgagcggctcggcttcaccgtcaccgccgacgtcgaggtgcccgaaggaccgcgcacctggtgcatgacccgcaagcccggtgcctga

SEQ ID NO: 20289 - DNA, 2940 bp, synthetic construct
  source 1..2940: mol_type = other DNA
atggccttaccagtgaccgccttgctcctgccgctggccttgctgctccacgccgccaggccggacatccagatgacacagagccctagcagcctgtctgccagcgtgggagacagagtgaccatcacctgtctggcctccgaggacatctacgacaacctggcctggtatcagcagaagcctggcaaggcccctaagctgctgatctactacgccagctctctccaggatggcgtgcccagcagattttctggcagcggctctggcaccgactacaccctgacaatatccagcctccagcctgaggacttcgccacctactactgcctgcaagacagcgagtacccctggacatttctcgaggacctgaagaacgtgttcccacctgaggtggccgtgttcgagcctagcgaggccgagatcagccacacccagaaagccaccctcgtgtgcctggctaccggcttctaccccgaccatgtggaactgtcttggtgggtcaacggcaaagaggtgcacagcggcgtgtctaccgacccccagccactgaaagaacagcccgccctgaacgacagccggtactgcctgagcagcagactgagagtgtccgccaccttctggcagaacccccggaaccacttcagatgccaggtgcagttctacggcctgagcgagaacgacgagtggacccaggacagagccaagcccgtgacccagatcgtgtctgccgaagcctggggcagagccgattgcggatcccagagcttcggcctgctggaccccaagctgtgctacctgctggatggcatcctgttcatctacggcgtgatcctgaccgccctgttcctgagagtgaagttcagcagaagcgccgacgcccctgcctaccagcagggacagaaccaactgtacaacgagctgaacctgggcagacgggaagagtacgacgtgctggacaagcggagaggcagggaccctgagatgggcggaaagccccagcggagaaagaacccccaggaaggactgtataacgaactccagaaagacaagatggccgaagcctacagcgagatcggcatgaagggcgagcggagaagaggcaagggccacgatggcctgtaccagggcctgagcaccgccaccaaggacacctatgacgccctgcacatgcaggccctgcctccaagaagggccaagcgatctggatctggagcaacaaacttctcactactcaaacaagcaggtgacgtggaggagaatcccgggcctactagtatggactggatttggcgcatccttttccttgtcggcgctgctaccggcgcgcattccttcgaagaagtgacactgaaagagtctggccccgctctggtcaagcccacacaaaccctgacactgacctgcaccttcagcggctttagcctgaccacatacggcatgggcgtcggctggattagacagcctcctggaaaagccctggaatggctggctaacatttggtgggacgacgacaagtattacaaccccagcctgaagaaccggctgaccatcagcaaggacaccagcaagaaccaggtggtgctgaccatgaccaacatggaccctgtggacaccgccacatattactgcgccagaatcggccccatcaagtaccccaccgctccttacagatacttcgacttctggggccagggcacaatggtcaccgttagctctacgcgtatccagaaccctgatcctgccgtgtaccagctgcgggatagcaagagcagcgacaagagcgtgtgtctgttcaccgacttcgacagccagaccaacgtgtcccagagcaaggactccgacgtgtacatcaccgataagaccgtgctggacatgcggagcatggacttcaagagcaactccgccgtggcctggtccaacaagtccgatttcgcctgcgccaacgccttcaacaacagcattatccccgaggacacattcttcccaagccccgagagcagctgcggtaccgtggtcgagaaagaacatccacagcttggcgctggcaccgtcctgttgcttagagccggattctatgccgtcagcttcctgtccgtggctgtggggtctacagtgtattaccagggaaaatgtctcacctggaaaggccccagacgccagcttccagctgttgttcctgctccactgccaccaccttgtggctcctctgctcacttgcttccaccagtgcctggcggacgcgccaagagaagcggatctggcgtgaagcagaccctgaatttcgacctgctgaagctggctggcgacgtggaatccaacccaggcccttctagaggccatatgaccgagtacaagcccacggtgcgcctcgccacccgcgacgacgtccccagggccgtacgcaccctcgccgccgcgttcgccgactaccccgccacgcgccacaccgtcgatccggaccgccacatcgagcgggtcaccgagctgcaagaactcttcctcacgcgcgtcgggctcgacatcggcaaggtgtgggtcgcggacgacggcgccgcggtggcggtctggaccacgccggagagcgtcgaagcgggggcggtgttcgccgagatcggcccgcgcatggccgagttgagcggttcccggctggccgcgcagcaacagatggaaggcctcctggcgccgcaccggcccaaggagcccgcgtggttcctggccaccgtcggcgtctcgcccgaccaccagggcaagggtctgggcagcgccgtcgtgctccccggagtggaggcggccgagcgcgccggggtgcccgccttcctggagacctccgcgccccgcaacctccccttctacgagcggctcggcttcaccgtcaccgccgacgtcgaggtgcccgaaggaccgcgcacctggtgcatgacccgcaagcccggtgcctga

SEQ ID NO: 20290 - DNA, 2853 bp, synthetic construct
  source 1..2853: mol_type = other DNA
atggccttaccagtgaccgccttgctcctgccgctggccttgctgctccacgccgccaggccggacatccagatgacacagagccctagcagcctgtctgccagcgtgggagacagagtgaccatcacctgtctggcctccgaggacatctacgacaacctggcctggtatcagcagaagcctggcaaggcccctaagctgctgatctactacgccagctctctccaggatggcgtgcccagcagattttctggcagcggctctggcaccgactacaccctgacaatatccagcctccagcctgaggacttcgccacctactactgcctgcaagacagcgagtacccctggacatttctcgagggacagcctaaggccaatcctaccgtgacactgttccctccaagcagcgaagaactccaggccaacaaggccacacttgtgtgcctgatctccgacttctaccctggggctgtgacagtggcttggaaggccgatggatctcctgtgaaagccggcgtggaaaccaccaagccatccaagcagagcaacaacaaatacgccgccagctcctacctgagcctgacacctgagcagtggaagtcccacagatcctacagctgccaagtgacccacgaaggcagcaccgtggaaaagacagtggcccctacagagtgcagcggatcccagagcttcggcctgctggaccccaagctgtgctacctgctggatggcatcctgttcatctacggcgtgatcctgaccgccctgttcctgagagtgaagttcagcagaagcgccgacgcccctgcctaccagcagggacagaaccaactgtacaacgagctgaacctgggcagacgggaagagtacgacgtgctggacaagcggagaggcagggaccctgagatgggcggaaagccccagcggagaaagaacccccaggaaggactgtataacgaactccagaaagacaagatggccgaagcctacagcgagatcggcatgaagggcgagcggagaagaggcaagggccacgatggcctgtaccagggcctgagcaccgccaccaaggacacctatgacgccctgcacatgcaggccctgcctccaagaagggccaagcgatctggatctggagcaacaaacttctcactactcaaacaagcaggtgacgtggaggagaatcccgggcctactagtatggactggatttggcgcatccttttccttgtcggcgctgctaccggcgcgcattccttcgaagaagtgacactgaaagagtctggccccgctctggtcaagcccacacaaaccctgacactgacctgcaccttcagcggctttagcctgaccacatacggcatgggcgtcggctggattagacagcctcctggaaaagccctggaatggctggctaacatttggtgggacgacgacaagtattacaaccccagcctgaagaaccggctgaccatcagcaaggacaccagcaagaaccaggtggtgctgaccatgaccaacatggaccctgtggacaccgccacatattactgcgccagaatcggccccatcaagtaccccaccgctccttacagatacttcgacttctggggccagggcacaatggtcaccgttagctctacgcgtgcctctacaaagggaccctccgtgtttcctctggctcccagcagcaagtctacaagcggaggaacagccgctctgggctgcctggtcaaggattactttcccgagcctgtgaccgtgtcctggaatagcggagcactgacaagcggcgtgcacacctttccagccgtgctgcaaagcagcggcctgtactctctgagcagcgtggtcacagtgcctagctctagcctgggcacccagacctacatctgcaatgtgaaccacaagcctagcaacaccaaggtggacaagagagtggaacccaagagctgtggtaccatcactcaaggtttggcagtgtcaaccatctcatcattctttccacctggctaccaagtgtccttctgcctggtcatggtgctgctgttcgccgtggataccggcctgtacttcagcgtcaagaccaacatccggtccagcaccagagactggaaggaccacaagttcaagtggcggaaggaccctcaggacaagagggccaagcgatctggatctggagcaacaaacttctcactactcaaacaagcaggtgacgtggaggagaatcccgggccttctagaggccatatgaccgagtacaagcccacggtgcgcctcgccacccgcgacgacgtccccagggccgtacgcaccctcgccgccgcgttcgccgactaccccgccacgcgccacaccgtcgatccggaccgccacatcgagcgggtcaccgagctgcaagaactcttcctcacgcgcgtcgggctcgacatcggcaaggtgtgggtcgcggacgacggcgccgcggtggcggtctggaccacgccggagagcgtcgaagcgggggcggtgttcgccgagatcggcccgcgcatggccgagttgagcggttcccggctggccgcgcagcaacagatggaaggcctcctggcgccgcaccggcccaaggagcccgcgtggttcctggccaccgtcggcgtctcgcccgaccaccagggcaagggtctgggcagcgccgtcgtgctccccggagtggaggcggccgagcgcgccggggtgcccgccttcctggagacctccgcgccccgcaacctccccttctacgagcggctcggcttcaccgtcaccgccgacgtcgaggtgcccgaaggaccgcgcacctggtgcatgacccgcaagcccggtgcctga

SEQ ID NO: 20291 - DNA, 2898 bp, synthetic construct
  source 1..2898: mol_type = other DNA
atggccttaccagtgaccgccttgctcctgccgctggccttgctgctccacgccgccaggccggacatccagatgacacagagccctagcagcctgtctgccagcgtgggagacagagtgaccatcacctgtctggcctccgaggacatctacgacaacctggcctggtatcagcagaagcctggcaaggcccctaagctgctgatctactacgccagctctctccaggatggcgtgcccagcagattttctggcagcggctctggcaccgactacaccctgacaatatccagcctccagcctgaggacttcgccacctactactgcctgcaagacagcgagtacccctggacatttctcgaggacctgaagaacgtgttcccacctgaggtggccgtgttcgagcctagcgaggccgagatcagccacacccagaaagccaccctcgtgtgcctggctaccggcttctaccccgaccatgtggaactgtcttggtgggtcaacggcaaagaggtgcacagcggcgtgtctaccgacccccagccactgaaagaacagcccgccctgaacgacagccggtactgcctgagcagcagactgagagtgtccgccaccttctggcagaacccccggaaccacttcagatgccaggtgcagttctacggcctgagcgagaacgacgagtggacccaggacagagccaagcccgtgacccagatcgtgtctgccgaagcctggggcagagccgattgcggatcccagagcttcggcctgctggaccccaagctgtgctacctgctggatggcatcctgttcatctacggcgtgatcctgaccgccctgttcctgagagtgaagttcagcagaagcgccgacgcccctgcctaccagcagggacagaaccaactgtacaacgagctgaacctgggcagacgggaagagtacgacgtgctggacaagcggagaggcagggaccctgagatgggcggaaagccccagcggagaaagaacccccaggaaggactgtataacgaactccagaaagacaagatggccgaagcctacagcgagatcggcatgaagggcgagcggagaagaggcaagggccacgatggcctgtaccagggcctgagcaccgccaccaaggacacctatgacgccctgcacatgcaggccctgcctccaagaagggccaagcgatctggatctggagcaacaaacttctcactactcaaacaagcaggtgacgtggaggagaatcccgggcctactagtatggactggatttggcgcatccttttccttgtcggcgctgctaccggcgcgcattccttcgaagaagtgacactgaaagagtctggccccgctctggtcaagcccacacaaaccctgacactgacctgcaccttcagcggctttagcctgaccacatacggcatgggcgtcggctggattagacagcctcctggaaaagccctggaatggctggctaacatttggtgggacgacgacaagtattacaaccccagcctgaagaaccggctgaccatcagcaaggacaccagcaagaaccaggtggtgctgaccatgaccaacatggaccctgtggacaccgccacatattactgcgccagaatcggccccatcaagtaccccaccgctccttacagatacttcgacttctggggccagggcacaatggtcaccgttagctctacgcgtatccagaaccctgatcctgccgtgtaccagctgcgggatagcaagagcagcgacaagagcgtgtgtctgttcaccgacttcgacagccagaccaacgtgtcccagagcaaggactccgacgtgtacatcaccgataagaccgtgctggacatgcggagcatggacttcaagagcaactccgccgtggcctggtccaacaagtccgatttcgcctgcgccaacgccttcaacaacagcattatccccgaggacacattcttcccaagccccgagagcagctgcggtaccatcactcaaggtttggcagtgtcaaccatctcatcattctttccacctggctaccaagtgtccttctgcctggtcatggtgctgctgttcgccgtggataccggcctgtacttcagcgtcaagaccaacatccggtccagcaccagagactggaaggaccacaagttcaagtggcggaaggaccctcaggacaagagggccaagcgatctggatctggagcaacaaacttctcactactcaaacaagcaggtgacgtggaggagaatcccgggccttctagaggccatatgaccgagtacaagcccacggtgcgcctcgccacccgcgacgacgtccccagggccgtacgcaccctcgccgccgcgttcgccgactaccccgccacgcgccacaccgtcgatccggaccgccacatcgagcgggtcaccgagctgcaagaactcttcctcacgcgcgtcgggctcgacatcggcaaggtgtgggtcgcggacgacggcgccgcggtggcggtctggaccacgccggagagcgtcgaagcgggggcggtgttcgccgagatcggcccgcgcatggccgagttgagcggttcccggctggccgcgcagcaacagatggaaggcctcctggcgccgcaccggcccaaggagcccgcgtggttcctggccaccgtcggcgtctcgcccgaccaccagggcaagggtctgggcagcgccgtcgtgctccccggagtggaggcggccgagcgcgccggggtgcccgccttcctggagacctccgcgccccgcaacctccccttctacgagcggctcggcttcaccgtcaccgccgacgtcgaggtgcccgaaggaccgcgcacctggtgcatgacccgcaagcccggtgcctga

SEQ ID NO: 20292 - DNA, 1947 bp, synthetic construct
  source 1..1947: mol_type = other DNA
atggccttaccagtgaccgccttgctcctgccgctggccttgctgctccacgccgccaggccggacatccagatgacacagagccctagcagcctgtctgccagcgtgggagacagagtgaccatcacctgtctggcctccgaggacatctacgacaacctggcctggtatcagcagaagcctggcaaggcccctaagctgctgatctactacgccagctctctccaggatggcgtgcccagcagattttctggcagcggctctggcaccgactacaccctgacaatatccagcctccagcctgaggacttcgccacctactactgcctgcaagacagcgagtacccctggacatttctcgagggacagcctaaggccaatcctaccgtgacactgttccctccaagcagcgaagaactccaggccaacaaggccacacttgtgtgcctgatctccgacttctaccctggggctgtgacagtggcttggaaggccgatggatctcctgtgaaagccggcgtggaaaccaccaagccatccaagcagagcaacaacaaatacgccgccagctcctacctgagcctgacacctgagcagtggaagtcccacagatcctacagctgccaagtgacccacgaaggcagcaccgtggaaaagacagtggcccctacagagtgcagcggatccctgggagagcctcagctgtgctatatcctggacgccatcctgtttctgtacggcatcgtgctgaccctgctgtactgccggctgaagatccaagtgcggaaggccgccatcaccagctacgagaaatccgacggcgtgtacaccggcctgagcaccagaaatcaagagacatacgagacactgaagcacgaaaagcctccacaaagggccaagcgatctggatctggagcaacaaacttctcactactcaaacaagcaggtgacgtggaggagaatcccgggcctactagtatggactggatttggcgcatccttttccttgtcggcgctgctaccggcgcgcattccttcgaagaagtgacactgaaagagtctggccccgctctggtcaagcccacacaaaccctgacactgacctgcaccttcagcggctttagcctgaccacatacggcatgggcgtcggctggattagacagcctcctggaaaagccctggaatggctggctaacatttggtgggacgacgacaagtattacaaccccagcctgaagaaccggctgaccatcagcaaggacaccagcaagaaccaggtggtgctgaccatgaccaacatggaccctgtggacaccgccacatattactgcgccagaatcggccccatcaagtaccccaccgctccttacagatacttcgacttctggggccagggcacaatggtcaccgttagctctacgcgtgcctctacaaagggaccctccgtgtttcctctggctcccagcagcaagtctacaagcggaggaacagccgctctgggctgcctggtcaaggattactttcccgagcctgtgaccgtgtcctggaatagcggagcactgacaagcggcgtgcacacctttccagccgtgctgcaaagcagcggcctgtactctctgagcagcgtggtcacagtgcctagctctagcctgggcacccagacctacatctgcaatgtgaaccacaagcctagcaacaccaaggtggacaagagagtggaacccaagagctgtggtaccctcggagaaccacagctctgttacattctggatgctatcctgttcctctatgggatcgtcctgacactcctgtattgcagactcaaaattcaagttcgcaaagccgccattacctcttacgagaagagtgatggggtgtacacaggactgtctacccggaatcaagaaacctacgaaaccctcaaacatgagaagccacctcagtaa

SEQ ID NO: 20293 - DNA, 3078 bp, synthetic construct
  source 1..3078: mol_type = other DNA
atggccttaccagtgaccgccttgctcctgccgctggccttgctgctccacgccgccaggccggacatccagatgacacagagccctagcagcctgtctgccagcgtgggagacagagtgaccatcacctgtctggcctccgaggacatctacgacaacctggcctggtatcagcagaagcctggcaaggcccctaagctgctgatctactacgccagctctctccaggatggcgtgcccagcagattttctggcagcggctctggcaccgactacaccctgacaatatccagcctccagcctgaggacttcgccacctactactgcctgcaagacagcgagtacccctggacatttggacagcctaaggccaatcctaccgtgacactgttccctccaagcagcgaagaactccaggccaacaaggccacacttgtgtgcctgatctccgacttctaccctggggctgtgacagtggcttggaaggccgatggatctcctgtgaaagccggcgtggaaaccaccaagccatccaagcagagcaacaacaaatacgccgccagctcctacctgagcctgacacctgagcagtggaagtcccacagatcctacagctgccaagtgacccacgaaggcagcaccgtggaaaagacagtggcccctacagagtgcagcggatcccagagcttcggcctgctggaccccaagctgtgctacctgctggatggcatcctgttcatctacggcgtgatcctgaccgccctgttcctgagagtgaagttcagcagaagcgccgacgcccctgcctaccagcagggacagaaccaactgtacaacgagctgaacctgggcagacgggaagagtacgacgtgctggacaagcggagaggcagggaccctgagatgggcggaaagccccggagaaagaacccccaggaaggactgtataacgaactccagaaagacaagatggccgaagcctacagcgagatcggcatgaagggcgagcggagaagaggcaagggccacgatggcctgtaccagggcctgagcaccgccaccaaggacacctatgacgccctgcacatgcaggccctgcctccaagaagggccaagcgatctggatctggagcaacaaacttctcactactcaaacaagcaggtgacgtggaggagaatcccgggcctactagtatggactggatttggcgcatccttttccttgtcggcgctgctaccggcgcgcattccttcgaagaagtgacactgaaagagtctggccccgctctggtcaagcccacacaaaccctgacactgacctgcaccttcagcggctttagcctgaccacatacggcatgggcgtcggctggattagacagcctcctggaaaagccctggaatggctggctaacatttggtgggacgacgacaagtattacaaccccagcctgaagaaccggctgaccatcagcaaggacaccagcaagaaccaggtggtgctgaccatgaccaacatggaccctgtggacaccgccacatattactgcgccagaatcggccccatcaagtaccccaccgctccttacagatacttcgacttctggggccagggcacaatggtcaccgttagctctgcctctacaaagggaccctccgtgtttcctctggctcccagcagcaagtctacaagcggaggaacagccgctctgggctgcctggtcaaggattactttcccgagcctgtgaccgtgtcctggaatagcggagcactgacaagcggcgtgcacacctttccagccgtgctgcaaagcagcggcctgtactctctgagcagcgtggtcacagtgcctagctctagcctgggcacccagacctacatctgcaatgtgaaccacaagcctagcaacaccaaggtggacaagagagtggaacccaagagctgtggtacccagagttttgggttgttggaccctaaattgtgctatctgttggacggaatcctgttcatttacggagtgatcctgaccgcattgttcctgcgggttaagttttccagatccgcagacgcacccgcttaccaacaagggcagaaccaactctacaatgaacttaatttggggcggagggaagagtacgacgttctggacaaaaggaggggacgagatcccgagatgggcggaaagcctcgaaggaagaatccgcaagaggggctttataacgaactccagaaagataaaatggcagaagcctatagtgagattgggatgaagggagaaaggaggaggggtaaaggtcacgatgggttgtaccaaggattgagcacagccactaaagatacctatgatgcgctccacatgcaggccctgccgccaagacgcgccaagagaagcggatctggcgtgaagcagaccctgaatttcgacctgctgaagctggctggcgacgtggaatccaacccaggcccttctagaggccatatgaccgagtacaagcccacggtgcgcctcgccacccgcgacgacgtccccagggccgtacgcaccctcgccgccgcgttcgccgactaccccgccacgcgccacaccgtcgatccggaccgccacatcgagcgggtcaccgagctgcaagaactcttcctcacgcgcgtcgggctcgacatcggcaaggtgtgggtcgcggacgacggcgccgcggtggcggtctggaccacgccggagagcgtcgaagcgggggcggtgttcgccgagatcggcccgcgcatggccgagttgagcggttcccggctggccgcgcagcaacagatggaaggcctcctggcgccgcaccggcccaaggagcccgcgtggttcctggccaccgtcggcgtctcgcccgaccaccagggcaagggtctgggcagcgccgtcgtgctccccggagtggaggcggccgagcgcgccggggtgcccgccttcctggagacctccgcgccccgcaacctccccttctacgagcggctcggcttcaccgtcaccgccgacgtcgaggtgcccgaaggaccgcgcacctggtgcatgacccgcaagcccggtgcctga

SEQ ID NO: 20294 - DNA, 2433 bp, synthetic construct
  source 1..2433: mol_type = other DNA
atggccttaccagtgaccgccttgctcctgccgctggccttgctgctccacgccgccaggccggacatccagatgacacagagccctagcagcctgtctgccagcgtgggagacagagtgaccatcacctgtctggcctccgaggacatctacgacaacctggcctggtatcagcagaagcctggcaaggcccctaagctgctgatctactacgccagctctctccaggatggcgtgcccagcagattttctggcagcggctctggcaccgactacaccctgacaatatccagcctccagcctgaggacttcgccacctactactgcctgcaagacagcgagtacccctggacatttctcgaggacctgaagaacgtgttcccacctgaggtggccgtgttcgagcctagcgaggccgagatcagccacacccagaaagccaccctcgtgtgcctggctaccggcttctaccccgaccatgtggaactgtcttggtgggtcaacggcaaagaggtgcacagcggcgtgtctaccgacccccagccactgaaagaacagcccgccctgaacgacagccggtactgcctgagcagcagactgagagtgtccgccaccttctggcagaacccccggaaccacttcagatgccaggtgcagttctacggcctgagcgagaacgacgagtggacccaggacagagccaagcccgtgacccagatcgtgtctgccgaagcctggggcagagccgattgcggatcccagagcttcggcctgctggaccccaagctgtgctacctgctggatggcatcctgttcatctacggcgtgatcctgaccgccctgttcctgagagtgaagttcagcagaagcgccgacgcccctgcctaccagcagggacagaaccaactgtacaacgagctgaacctgggcagacgggaagagtacgacgtgctggacaagcggagaggcagggaccctgagatgggcggaaagccccggagaaagaacccccaggaaggactgtataacgaactccagaaagacaagatggccgaagcctacagcgagatcggcatgaagggcgagcggagaagaggcaagggccacgatggcctgtaccagggcctgagcaccgccaccaaggacacctatgacgccctgcacatgcaggccctgcctccaagaagggccaagcgatctggatctggagcaacaaacttctcactactcaaacaagcaggtgacgtggaggagaatcccgggcctactagtatggactggatttggcgcatccttttccttgtcggcgctgctaccggcgcgcattccttcgaagaagtgacactgaaagagtctggccccgctctggtcaagcccacacaaaccctgacactgacctgcaccttcagcggctttagcctgaccacatacggcatgggcgtcggctggattagacagcctcctggaaaagccctggaatggctggctaacatttggtgggacgacgacaagtattacaaccccagcctgaagaaccggctgaccatcagcaaggacaccagcaagaaccaggtggtgctgaccatgaccaacatggaccctgtggacaccgccacatattactgcgccagaatcggccccatcaagtaccccaccgctccttacagatacttcgacttctggggccagggcacaatggtcaccgttagctctacgcgtatccagaaccctgatcctgccgtgtaccagctgcgggatagcaagagcagcgacaagagcgtgtgtctgttcaccgacttcgacagccagaccaacgtgtcccagagcaaggactccgacgtgtacatcaccgataagaccgtgctggacatgcggagcatggacttcaagagcaactccgccgtggcctggtccaacaagtccgatttcgcctgcgccaacgccttcaacaacagcattatccccgaggacacattcttcccaagccccgagagcagctgcggtacccagagttttgggttgttggaccctaaattgtgctatctgttggacggaatcctgttcatttacggagtgatcctgaccgcattgttcctgcgggttaagttttccagatccgcagacgcacccgcttaccaacaagggcagaaccaactctacaatgaacttaatttggggcggagggaagagtacgacgttctggacaaaaggaggggacgagatcccgagatgggcggaaagcctcgaaggaagaatccgcaagaggggctttataacgaactccagaaagataaaatggcagaagcctatagtgagattgggatgaagggagaaaggaggaggggtaaaggtcacgatgggttgtaccaaggattgagcacagccactaaagatacctatgatgcgctccacatgcaggccctgccgccaaga

SEQ ID NO: 20295 - DNA, 1476 bp, synthetic construct
  source 1..1476: mol_type = other DNA
atggccttaccagtgaccgccttgctcctgccgctggccttgctgctccacgccgccaggccggacatccagatgacacagagccctagcagcctgtctgccagcgtgggagacagagtgaccatcacctgtctggcctccgaggacatctacaacaacctggcctggtatcagcagaagcctggcaaggcccctaagctgctgatctactacgccagctctctccaggatggcgtgcccagcagattttctggcagcggctctggcaccgactacaccctgacaatatccagcctccagcctgaggacttcgccacctactactgcctgcaagacagcgagtacccctggacatttggcggaggcggaagtggaggcggaggatctggcggcggaggctctgaagtgacactgaaagagtctggccccgctctggtcaagcccacacaaaccctgacactgacctgcaccttcagcggctttagcctgagcacatacggcatgggcgtcggctggattagacagcctcctggaaaagccctggaatggctggctaacatttggtgggacgacgacaagtattacaaccccagcctgaagaaccggctgaccatcagcaaggacaccagcaagaaccaggtggtgctgaccatgaccaacatggaccctgtggacaccgccacatattactgcgccagaatcggccccatcaagtaccccaccgctccttacagatacttcgacttctggggccagggcacaatggtcaccgttagctctacgcgtgagcagaaactgatctcggaagaggatctgaaaattgaagttatgtatcctcctccttacctagacaatgagaagagcaatggaaccattatccatgtgaaagggaaacacctttgtccaagtcccctatttcccggaccttctaagcccttttgggtgctggtggtggttgggggagtcctggcttgctatagcttgctagtaacagtggcctttattattttctgggtgaggagtaagaggagcaggctcctgcacagtgactacatgaacatgactccacgccgccccggacccacccgcaagcattaccagccctatgccccaccacgcgacttcgcagcctatcgctccagagtgaagttcagcaggagcgcagacgcccccgcgtaccagcagggccagaaccagctctataacgagctcaatctaggacgaagagaggagtacgatgttttggacaagagacgtggccgggaccctgagatggggggaaagccgagaaggaagaaccctcaggaaggcctgtacaatgaactgcagaaagataagatggcggaggcctacagtgagattgggatgaaaggcgagcgccggaggggcaaggggcacgatggcctttaccagggtctcagtacagccaccaaggacacctacgacgcccttcacatgcaggccctgccccctcgc

SEQ ID NO: 20296 - DNA, 1497 bp, synthetic construct
  source 1..1497: mol_type = other DNA
atggccttaccagtgaccgccttgctcctgccgctggccttgctgctccacgccgccaggccggacatccagatgacacagagccctagcagcctgtctgccagcgtgggagacagagtgaccatcacctgtctggcctccgaggacatctacaacaacctggcctggtatcagcagaagcctggcaaggcccctaagctgctgatctactacgccagctctctccaggatggcgtgcccagcagattttctggcagcggctctggcaccgactacaccctgacaatatccagcctccagcctgaggacttcgccacctactactgcctgcaagacagcgagtacccctggacatttggcggaggcggaagtggaggcggaggatctggcggcggaggctctgaagtgacactgaaagagtctggccccgctctggtcaagcccacacaaaccctgacactgacctgcaccttcagcggctttagcctgagcacatacggcatgggcgtcggctggattagacagcctcctggaaaagccctggaatggctggctaacatttggtgggacgacgacaagtattacaaccccagcctgaagaaccggctgaccatcagcaaggacaccagcaagaaccaggtggtgctgaccatgaccaacatggaccctgtggacaccgccacatattactgcgccagaatcggccccatcaagtaccccaccgctccttacagatacttcgacttctggggccagggcacaatggtcaccgttagctctacgcgtgagcagaaactgatctcggaagaggatctggcgaagcccaccacgacgccagcgccgcgaccaccaacaccggcgcccaccatcgcgtcgcagcccctgtccctgcgcccagaggcgtgccggccagcggcggggggcgcagtgcacacgagggggctggacttcgcctgtgacatctacatctgggcgcccttggccgggacttgtggggtccttctcctgtcactggttatcaccctttactgcaaacggggcagaaagaaactcctgtatatattcaaacaaccatttatgagaccagtacaaactactcaagaggaagatggctgtagctgccgatttccagaagaagaagaaggaggatgtgaactgagagtgaagttcagcaggagcgcagacgcccccgcgtaccagcagggccagaaccagctctataacgagctgaatctaggacgaagagaggagtacgatgttttggacaagagacgtggccgggaccctgagatggggggaaagccgagaaggaagaaccctcaggaaggcctgtacaatgaactgcagaaagataagatggcggaggcctacagtgagattgggatgaaaggcgagcgccggaggggcaaggggcacgatggcctttaccagggtctcagtacagccaccaaggacacctacgacgcccttcacatgcaggccctgccccctcgctga

SEQ ID NO: 20297 - DNA, 1497 bp, synthetic construct
  source 1..1497: mol_type = other DNA
atggccttaccagtgaccgccttgctcctgccgctggccttgctgctccacgccgccaggccggaagtgacactgaaagagtctggccccgctctggtcaagcccacacaaaccctgacactgacctgcaccttcagcggctttagcctgagcacatacggcatgggcgtcggctggattagacagcctcctggaaaagccctggaatggctggctaacatttggtgggacgacgacaagtattacaaccccagcctgaagaaccggctgaccatcagcaaggacaccagcaagaaccaggtggtgctgaccatgaccaacatggaccctgtggacaccgccacatattactgcgccagaatcggccccatcaagtaccccaccgctccttacagatacttcgacttctggggccagggcacaatggtcaccgttagctctggcggaggcggaagtggaggcggaggatctggcggcggaggctctgacatccagatgacacagagccctagcagcctgtctgccagcgtgggagacagagtgaccatcacctgtctggcctccgaggacatctacaacaacctggcctggtatcagcagaagcctggcaaggcccctaagctgctgatctactacgccagctctctccaggatggcgtgcccagcagattttctggcagcggctctggcaccgactacaccctgacaatatccagcctccagcctgaggacttcgccacctactactgcctgcaagacagcgagtacccctggacatttacgcgtgagcagaaactgatctcggaagaggatctggcgaagcccaccacgacgccagcgccgcgaccaccaacaccggcgcccaccatcgcgtcgcagcccctgtccctgcgcccagaggcgtgccggccagcggcggggggcgcagtgcacacgagggggctggacttcgcctgtgacatctacatctgggcgcccttggccgggacttgtggggtccttctcctgtcactggttatcaccctttactgcaaacggggcagaaagaaactcctgtatatattcaaacaaccatttatgagaccagtacaaactactcaagaggaagatggctgtagctgccgatttccagaagaagaagaaggaggatgtgaactgagagtgaagttcagcaggagcgcagacgcccccgcgtaccagcagggccagaaccagctctataacgagctgaatctaggacgaagagaggagtacgatgttttggacaagagacgtggccgggaccctgagatggggggaaagccgagaaggaagaaccctcaggaaggcctgtacaatgaactgcagaaagataagatggcggaggcctacagtgagattgggatgaaaggcgagcgccggaggggcaaggggcacgatggcctttaccagggtctcagtacagccaccaaggacacctacgacgcccttcacatgcaggccctgccccctcgctga

SEQ ID NO: 20298 - DNA, 2736 bp, synthetic construct
  source 1..2736: mol_type = other DNA
atggccttaccagtgaccgccttgctcctgccgctggccttgctgctccacgccgccaggccggacatccagatgacacagagccctagcagcctgtctgccagcgtgggagacagagtgaccatcacctgtctggcctccgaggacatctacaacaacctggcctggtatcagcagaagcctggcaaggcccctaagctgctgatctactacgccagctctctccaggatggcgtgcccagcagattttctggcagcggctctggcaccgactacaccctgacaatatccagcctccagcctgaggacttcgccacctactactgcctgcaagacagcgagtacccctggacatttggcggaggcggaagtggaggcggaggatctggcggcggaggctctgaagtgacactgaaagagtctggccccgctctggtcaagcccacacaaaccctgacactgacctgcaccttcagcggctttagcctgagcacatacggcatgggcgtcggctggattagacagcctcctggaaaagccctggaatggctggctaacatttggtgggacgacgacaagtattacaaccccagcctgaagaaccggctgaccatcagcaaggacaccagcaagaaccaggtggtgctgaccatgaccaacatggaccctgtggacaccgccacatattactgcgccagaatcggccccatcaagtaccccaccgctccttacagatacttcgacttctggggccagggcacaatggtcaccgttagctctacgcgtgagcagaaactgatctcggaagaggatctggcgaagcccaccacgacgccagcgccgcgaccaccaacaccggcgcccaccatcgcgtcgcagcccctgtccctgcgcccagaggcgtgccggccagcggcggggggcgcagtgcacacgagggggctggacttcgcctgtgacatctacatctgggcgcccttggccgggacttgtggggtccttctcctgtcactggttatcaccctttactgcgggcgcgccagagtgaagttcagcaggagcgcagacgcccccgcgtaccagcagggccagaaccagctctataacgagctgaatctaggacgaagagaggagtacgatgttttggacaagagacgtggccgggaccctgagatggggggaaagccgagaaggaagaaccctcaggaaggcctgtacaatgaactgcagaaagataagatggcggaggcctacagtgagattgggatgaaaggcgagcgccggaggggcaaggggcacgatggcctttaccagggtctcagtacagccaccaaggacacctacgacgcccttcacatgcaggccctgccccctcgctctagaggatctggagcaacaaacttctcactactcaaacaagcaggtgacgtggaggagaatcccgggcctgggatccacatggccacttacgaggttctctgtgaggtggcgcggaaactgggcacggatgacagggaagtggtattgttcctcctaaacgtgttcatacctcaacccacactggcccaattaattggagctcttagagctttaaaggaggagggcaggttaacgtttcccctgttagcggaatgtctgtttcgtgcaggtcgcagagacctcttgcgcgacctgcttcacttagacccgcgttttttagagcgccacctagcgggcacaatgagttatttcagcccttatcagctcactgttctccacgtagacggggagctgtgtgcgagggatattaggtctttgatatttttaagcaaggacactatagggtctcgcagcacaccacagacattcttacactgggtgtactgtatggaaaacttagacctactgggtcccactgacgtggatgccctaatgtcaatgcttagatctttgtcaagagtagacctacagcgccaagtgcaaaccctaatgggccttcacctttccggcccatcacactcccaacactatcgccatacaccactcgagaccgatttctacgactacaaggacgacgatgacaagactagtggctccggcgagggcagaggaagtctactaacctgcggagatgtggaagaaaatcctggcccacatatgaccgagtacaagcccacggtgcgcctcgccacccgcgacgacgtccccagggccgtacgcaccctcgccgccgcgttcgccgactaccccgccacgcgccacaccgtcgatccggaccgccacatcgagcgggtcaccgagctgcaagaactcttcctcacgcgcgtcgggctcgacatcggcaaggtgtgggtcgcggacgacggcgccgcggtggcggtctggaccacgccggagagcgtcgaagcgggggcggtgttcgccgagatcggcccgcgcatggccgagttgagcggttcccggctggccgcgcagcaacagatggaaggcctcctggcgccgcaccggcccaaggagcccgcgtggttcctggccaccgtcggcgtctcgcccgaccaccagggcaagggtctgggcagcgccgtcgtgctccccggagtggaggcggccgagcgcgccggggtgcccgccttcctggagacctccgcgccccgcaacctccccttctacgagcggctcggcttcaccgtcaccgccgacgtcgaggtgcccgaaggaccgcgcacctggtgcatgacccgcaagcccggtgcctga

SEQ ID NO: 20299 - DNA, 2556 bp, synthetic construct
  source 1..2556: mol_type = other DNA
atggccttaccagtgaccgccttgctcctgccgctggccttgctgctccacgccgccaggccggacatccagatgacacagagccctagcagcctgtctgccagcgtgggagacagagtgaccatcacctgtctggcctccgaggacatctacaacaacctggcctggtatcagcagaagcctggcaaggcccctaagctgctgatctactacgccagctctctccaggatggcgtgcccagcagattttctggcagcggctctggcaccgactacaccctgacaatatccagcctccagcctgaggacttcgccacctactactgcctgcaagacagcgagtacccctggacatttctcgagatccagaaccctgatcctgccgtgtaccagctgcgggatagcaagagcagcgacaagagcgtgtgtctgttcaccgacttcgacagccagaccaacgtgtcccagagcaaggactccgacgtgtacatcaccgataagtgcgtgctggacatgcggagcatggacttcaagagcaactccgccgtggcctggtccaacaagtccgatttcgcctgcgccaacgccttcaacaacagcattatccccgaggacacattcttcccaagcagcgacgtgccctgcgacgtgaagctggtggaaaagagcttcgagacagacaccaacctgaacttccagaacctgagcgtgatcggcttcagaatcctgctgctgaaagtggccggctttaacctgctgatgaccctgcggctgtggtccagccgcgccaagagaagcggatctggcgtgaagcagaccctgaatttcgacctgctgaagctggctggcgacgtggaatccaacccaggccctactagtatggactggatttggcgcatccttttccttgtcggcgctgctaccggcgcgcattccttcgaagaagtgacactgaaagagtctggccccgctctggtcaagcccacacaaaccctgacactgacctgcaccttcagcggctttagcctgagcacatacggcatgggcgtcggctggattagacagcctcctggaaaagccctggaatggctggctaacatttggtgggacgacgacaagtattacaaccccagcctgaagaaccggctgaccatcagcaaggacaccagcaagaaccaggtggtgctgaccatgaccaacatggaccctgtggacaccgccacatattactgcgccagaatcggccccatcaagtaccccaccgctccttacagatacttcgacttctggggccagggcacaatggtcaccgttagctctacgcgtgaggacctgaagaacgtgttcccacctgaggtggccgtgttcgagcctagcaaggccgagatcgcccacacccagaaagccaccctcgtgtgcctggctaccggcttctaccccgaccatgtggaactgtcttggtgggtcaacggcaaagaggtgcacagcggcgtgtgtaccgacccccagccactgaaagaacagcccgccctgaacgacagccggtactgcctgagcagcagactgagagtgtccgccaccttctggcagaacccccggaaccacttcagatgccaggtgcagttctacggcctgagcgagaacgacgagtggacccaggacagagccaagcccgtgacccagatcgtgtctgccgaagcctggggcagagccgattgcggcatcaccagcgccagctaccaccagggcgtgctgagcgccaccatcctgtacgagatcctgctgggcaaggccaccctgtacgccgtgctggtgtctgccctggtgctgatggctatggtcaagcggaaggacagccggggaagggccaagcgatctggatctggagcaacaaacttctcactactcaaacaagcaggtgacgtggaggagaatcccgggccttctagaggccatatgaccgagtacaagcccacggtgcgcctcgccacccgcgacgacgtccccagggccgtacgcaccctcgccgccgcgttcgccgactaccccgccacgcgccacaccgtcgatccggaccgccacatcgagcgggtcaccgagctgcaagaactcttcctcacgcgcgtcgggctcgacatcggcaaggtgtgggtcgcggacgacggcgccgcggtggcggtctggaccacgccggagagcgtcgaagcgggggcggtgttcgccgagatcggcccgcgcatggccgagttgagcggttcccggctggccgcgcagcaacagatggaaggcctcctggcgccgcaccggcccaaggagcccgcgtggttcctggccaccgtcggcgtctcgcccgaccaccagggcaagggtctgggcagcgccgtcgtgctccccggagtggaggcggccgagcgcgccggggtgcccgccttcctggagacctccgcgccccgcaacctccccttctacgagcggctcggcttcaccgtcaccgccgacgtcgaggtgcccgaaggaccgcgcacctggtgcatgacccgcaagcccggtgcctga

SEQ ID NO: 20300 - DNA, 2553 bp, synthetic construct
  source 1..2553: mol_type = other DNA
atggccttaccagtgaccgccttgctcctgccgctggccttgctgctccacgccgccaggccggacatccagatgacacagagccctagcagcctgtctgccagcgtgggagacagagtgaccatcacctgtctggcctccgaggacatctacaacaacctggcctggtatcagcagaagcctggcaaggcccctaagctgctgatctactacgccagctctctccaggatggcgtgcccagcagattttctggcagcggctctggcaccgactacaccctgacaatatccagcctccagcctgaggacttcgccacctactactgcctgcaagacagcgagtacccctggacatttctcgaggacctgaagaacgtgttcccacctgaggtggccgtgttcgagcctagcaaggccgagatcgcccacacccagaaagccaccctcgtgtgcctggctaccggcttctaccccgaccatgtggaactgtcttggtgggtcaacggcaaagaggtgcacagcggcgtgtgtaccgacccccagccactgaaagaacagcccgccctgaacgacagccggtactgcctgagcagcagactgagagtgtccgccaccttctggcagaacccccggaaccacttcagatgccaggtgcagttctacggcctgagcgagaacgacgagtggacccaggacagagccaagcccgtgacccagatcgtgtctgccgaagcctggggcagagccgattgcggcatcaccagcgccagctaccaccagggcgtgctgagcgccaccatcctgtacgagatcctgctgggcaaggccaccctgtacgccgtgctggtgtctgccctggtgctgatggctatggtcaagcggaaggacagccggggaagggccaagcgatctggatctggagcaacaaacttctcactactcaaacaagcaggtgacgtggaggagaatcccgggcctactagtatggactggatttggcgcatccttttccttgtcggcgctgctaccggcgcgcattccttcgaagaagtgacactgaaagagtctggccccgctctggtcaagcccacacaaaccctgacactgacctgcaccttcagcggctttagcctgagcacatacggcatgggcgtcggctggattagacagcctcctggaaaagccctggaatggctggctaacatttggtgggacgacgacaagtattacaaccccagcctgaagaaccggctgaccatcagcaaggacaccagcaagaaccaggtggtgctgaccatgaccaacatggaccctgtggacaccgccacatattactgcgccagaatcggccccatcaagtaccccaccgctccttacagatacttcgacttctggggccagggcacaatggtcaccgttagctctacgcgtatccagaaccctgatcctgccgtgtaccagctgcgggatagcaagagcagcgacaagagcgtgtgtctgttcaccgacttcgacagccagaccaacgtgtcccagagcaaggactccgacgtgtacatcaccgataagtgcgtgctggacatgcggagcatggacttcaagagcaactccgccgtggcctggtccaacaagtccgatttcgcctgcgccaacgccttcaacaacagcattatccccgaggacacattcttcccaagcagcgacgtgccctgcgacgtgaagctggtggaaaagagcttcgagacagacaccaacctgaacttccagaacctgagcgtgatcggcttcagaatcctgctgctgaaagtggccggctttaacctgctgatgaccctgcggctgtggtccagccgcgccaagagaagcggatctggcgtgaagcagaccctgaatttcgacctgctgaagctggctggcgacgtggaatccaacccaggcccttctagaggccatatgaccgagtacaagcccacggtgcgcctcgccacccgcgacgacgtccccagggccgtacgcaccctcgccgccgcgttcgccgactaccccgccacgcgccacaccgtcgatccggaccgccacatcgagcgggtcaccgagctgcaagaactcttcctcacgcgcgtcgggctcgacatcggcaaggtgtgggtcgcggacgacggcgccgcggtggcggtctggaccacgccggagagcgtcgaagcgggggcggtgttcgccgagatcggcccgcgcatggccgagttgagcggttcccggctggccgcgcagcaacagatggaaggcctcctggcgccgcaccggcccaaggagcccgcgtggttcctggccaccgtcggcgtctcgcccgaccaccagggcaagggtctgggcagcgccgtcgtgctccccggagtggaggcggccgagcgcgccggggtgcccgccttcctggagacctccgcgccccgcaacctccccttctacgagcggctcggcttcaccgtcaccgccgacgtcgaggtgcccgaaggaccgcgcacctggtgcatgacccgcaagcccggtgcctga

SEQ ID NO: 20301 - DNA, 1851 bp, synthetic construct
  source 1..1851: mol_type = other DNA
atggccttaccagtgaccgccttgctcctgccgctggccttgctgctccacgccgccaggccggacatccagatgacacagagccctagcagcctgtctgccagcgtgggagacagagtgaccatcacctgtctggcctccgaggacatctacaacaacctggcctggtatcagcagaagcctggcaaggcccctaagctgctgatctactacgccagctctctccaggatggcgtgcccagcagattttctggcagcggctctggcaccgactacaccctgacaatatccagcctccagcctgaggacttcgccacctactactgcctgcaagacagcgagtacccctggacatttctcgaggacctgaagaacgtgttcccacctgaggtggccgtgttcgagcctagcgaggccgagatcagccacacccagaaagccaccctcgtgtgcctggctaccggcttctaccccgaccatgtggaactgtcttggtgggtcaacggcaaagaggtgcacagcggcgtgtgtaccgacccccagccactgaaagaacagcccgccctgaacgacagccggtactgcctgagcagcagactgagagtgtccgccaccttctggcagaacccccggaaccacttcagatgccaggtgcagttctacggcctgagcgagaacgacgagtggacccaggacagagccaagcccgtgacccagatcgtgtctgccgaagcctggggcagagccgattgcggctttaccagcgagagctaccagcagggcgtgctgagcgccaccatcctgtacgagatcctgctgggcaaggccaccctgtacgccgtgctggtgtctgccctggtgctgatggctatggtcaagcggaaggacagccggggaagggccaagcgatctggatctggagcaacaaacttctcactactcaaacaagcaggtgacgtggaggagaatcccgggcctactagtatggactggatttggcgcatccttttccttgtcggcgctgctaccggcgcgcattccttcgaagaagtgacactgaaagagtctggccccgctctggtcaagcccacacaaaccctgacactgacctgcaccttcagcggctttagcctgagcacatacggcatgggcgtcggctggattagacagcctcctggaaaagccctggaatggctggctaacatttggtgggacgacgacaagtattacaaccccagcctgaagaaccggctgaccatcagcaaggacaccagcaagaaccaggtggtgctgaccatgaccaacatggaccctgtggacaccgccacatattactgcgccagaatcggccccatcaagtaccccaccgctccttacagatacttcgacttctggggccagggcacaatggtcaccgttagctctacgcgtatccagaaccctgatcctgccgtgtaccagctgcgggatagcaagagcagcgacaagagcgtgtgtctgttcaccgacttcgacagccagaccaacgtgtcccagagcaaggactccgacgtgtacatcaccgataagtgcgtgctggacatgcggagcatggacttcaagagcaactccgccgtggcctggtccaacaagtccgatttcgcctgcgccaacgccttcaacaacagcattatccccgaggacacattcttcccaagccccgagagcagctgcgacgtgaagctggtggaaaagagcttcgagacagacaccaacctgaacttccagaacctgagcgtgatcggcttcagaatcctgctgctgaaagtggccggctttaacctgctgatgaccctgcggctgtggtccagc

SEQ ID NO: 20302 - DNA, 2526 bp, synthetic construct
  source 1..2526: mol_type = other DNA
atggccttaccagtgaccgccttgctcctgccgctggccttgctgctccacgccgccaggccggacatccagatgacacagagccctagcagcctgtctgccagcgtgggagacagagtgaccatcacctgtctggcctccgaggacatctacaacaacctggcctggtatcagcagaagcctggcaaggcccctaagctgctgatctactacgccagctctctccaggatggcgtgcccagcagattttctggcagcggctctggcaccgactacaccctgacaatatccagcctccagcctgaggacttcgccacctactactgcctgcaagacagcgagtacccctggacatttctcgaggacctgaagaacgtgttcccacctgaggtggccgtgttcgagcctagcgaggccgagatcagccacacccagaaagccaccctcgtgtgcctggctaccggcttctaccccgaccatgtggaactgtcttggtgggtcaacggcaaagaggtgcacagcggcgtgtgtaccgacccccagccactgaaagaacagcccgccctgaacgacagccggtactgcctgagcagcagactgagagtgtccgccaccttctggcagaacccccggaaccacttcagatgccaggtgcagttctacggcctgagcgagaacgacgagtggacccaggacagagccaagcccgtgacccagatcgtgtctgccgaagcctggggcagagccgattgcggctttaccagcgagagctaccagcagggcgtgctgagcgccaccatcctgtacgagatcctgctgggcaaggccaccctgtacgccgtgctggtgtctgccctggtgctgatggctatggtcaagcggaaggacagccggggaagggccaagcgatctggatctggagcaacaaacttctcactactcaaacaagcaggtgacgtggaggagaatcccgggcctactagtatggactggatttggcgcatccttttccttgtcggcgctgctaccggcgcgcattccttcgaagaagtgacactgaaagagtctggccccgctctggtcaagcccacacaaaccctgacactgacctgcaccttcagcggctttagcctgagcacatacggcatgggcgtcggctggattagacagcctcctggaaaagccctggaatggctggctaacatttggtgggacgacgacaagtattacaaccccagcctgaagaaccggctgaccatcagcaaggacaccagcaagaaccaggtggtgctgaccatgaccaacatggaccctgtggacaccgccacatattactgcgccagaatcggccccatcaagtaccccaccgctccttacagatacttcgacttctggggccagggcacaatggtcaccgttagctctacgcgtatccagaaccctgatcctgccgtgtaccagctgcgggatagcaagagcagcgacaagagcgtgtgtctgttcaccgacttcgacagccagaccaacgtgtcccagagcaaggactccgacgtgtacatcaccgataagtgcgtgctggacatgcggagcatggacttcaagagcaactccgccgtggcctggtccaacaagtccgatttcgcctgcgccaacgccttcaacaacagcattatccccgaggacacattcttcccaagccccgagagcagctgcgacgtgaagctggtggaaaagagcttcgagacagacaccaacctgaacttccagaacctgagcgtgatcggcttcagaatcctgctgctgaaagtggccggctttaacctgctgatgaccctgcggctgtggtccagccgcgccaagagaagcggatctggcgtgaagcagaccctgaatttcgacctgctgaagctggctggcgacgtggaatccaacccaggcccttctagaggcgggatccacaccatggctacctacgaggtgctgtgcgaggtggcaagaaagctgggcaccgacgacagagaagtggtgctgttcctgctgaacgtgttcatccctcagcctacactggcccagctgatcggtgcactgagagccctgaaagaggaaggccggctgacctttcctctgctggccgaatgcctgttcagagccggaagaagggatctgctgcgggacctgctgcatctggaccccagatttctggaaagacacctggccggcaccatgagctacttcagcccttaccagctgaccgtgctgcacgttgacggcgaactgtgcgccagagatattcggagcctgatcttcctgagcaaggacaccatcggcagccggtctacccctcagacatttctgcactgggtgtactgcatggaaaacctggacctgctcggccccacagatgtggatgccctgatgtccatgctgagaagcctgagcagagtggacctccagagacaggtgcagacactgatgggactgcacctgagcggacctagccacagccagcactacagacacacccct

SEQ ID NO: 20303 - DNA, 1863 bp, synthetic construct
  source 1..1863: mol_type = other DNA
atggccttaccagtgaccgccttgctcctgccgctggccttgctgctccacgccgccaggccggacatccagatgacacagagccctagcagcctgtctgccagcgtgggagacagagtgaccatcacctgtctggcctccgaggacatctacaacaacctggcctggtatcagcagaagcctggcaaggcccctaagctgctgatctactacgccagctctctccaggatggcgtgcccagcagattttctggcagcggctctggcaccgactacaccctgacaatatccagcctccagcctgaggacttcgccacctactactgcctgcaagacagcgagtacccctggacatttctcgagatccagaaccctgatcctgccgtgtaccagctgcgggatagcaagagcagcgacaagagcgtgtgtctgttcaccgacttcgacagccagaccaacgtgtcccagagcaaggactccgacgtgtacatcaccgataagtgcgtgctggacatgcggagcatggacttcaagagcaactccgccgtggcctggtccaacaagtccgatttcgcctgcgccaacgccttcaacaacagcattatccccgaggacacattcttcccaagccccgagagcagctgcgacgtgaagctggtggaaaagagcttcgagacagacaccaacctgaacttccagaacctgagcgtgatcggcttcagaatcctgctgctgaaagtggccggctttaacctgctgatgaccctgcggctgtggtccagccgcgccaagagaagcggatctggcgtgaagcagaccctgaatttcgacctgctgaagctggctggcgacgtggaatccaacccaggccctactagtatggactggatttggcgcatccttttccttgtcggcgctgctaccggcgcgcattccttcgaagaagtgacactgaaagagtctggccccgctctggtcaagcccacacaaaccctgacactgacctgcaccttcagcggctttagcctgagcacatacggcatgggcgtcggctggattagacagcctcctggaaaagccctggaatggctggctaacatttggtgggacgacgacaagtattacaaccccagcctgaagaaccggctgaccatcagcaaggacaccagcaagaaccaggtggtgctgaccatgaccaacatggaccctgtggacaccgccacatattactgcgccagaatcggccccatcaagtaccccaccgctccttacagatacttcgacttctggggccagggcacaatggtcaccgttagctctacgcgtgaggacctgaagaacgtgttcccacctgaggtggccgtgttcgagcctagcgaggccgagatcagccacacccagaaagccaccctcgtgtgcctggctaccggcttctaccccgaccatgtggaactgtcttggtgggtcaacggcaaagaggtgcacagcggcgtgtgtaccgacccccagccactgaaagaacagcccgccctgaacgacagccggtactgcctgagcagcagactgagagtgtccgccaccttctggcagaacccccggaaccacttcagatgccaggtgcagttctacggcctgagcgagaacgacgagtggacccaggacagagccaagcccgtgacccagatcgtgtctgccgaagcctggggcagagccgattgcggctttaccagcgagagctaccagcagggcgtgctgagcgccaccatcctgtacgagatcctgctgggcaaggccaccctgtacgccgtgctggtgtctgccctggtgctgatggctatggtcaagcggaaggacagccgggga

SEQ ID NO: 20304 - DNA, 2529 bp, synthetic construct
  source 1..2529: mol_type = other DNA
atggccttaccagtgaccgccttgctcctgccgctggccttgctgctccacgccgccaggccggacatccagatgacacagagccctagcagcctgtctgccagcgtgggagacagagtgaccatcacctgtctggcctccgaggacatctacaacaacctggcctggtatcagcagaagcctggcaaggcccctaagctgctgatctactacgccagctctctccaggatggcgtgcccagcagattttctggcagcggctctggcaccgactacaccctgacaatatccagcctccagcctgaggacttcgccacctactactgcctgcaagacagcgagtacccctggacatttctcgagatccagaaccctgatcctgccgtgtaccagctgcgggatagcaagagcagcgacaagagcgtgtgtctgttcaccgacttcgacagccagaccaacgtgtcccagagcaaggactccgacgtgtacatcaccgataagtgcgtgctggacatgcggagcatggacttcaagagcaactccgccgtggcctggtccaacaagtccgatttcgcctgcgccaacgccttcaacaacagcattatccccgaggacacattcttcccaagccccgagagcagctgcgacgtgaagctggtggaaaagagcttcgagacagacaccaacctgaacttccagaacctgagcgtgatcggcttcagaatcctgctgctgaaagtggccggctttaacctgctgatgaccctgcggctgtggtccagccgcgccaagagaagcggatctggcgtgaagcagaccctgaatttcgacctgctgaagctggctggcgacgtggaatccaacccaggccctactagtatggactggatttggcgcatccttttccttgtcggcgctgctaccggcgcgcattccttcgaagaagtgacactgaaagagtctggccccgctctggtcaagcccacacaaaccctgacactgacctgcaccttcagcggctttagcctgagcacatacggcatgggcgtcggctggattagacagcctcctggaaaagccctggaatggctggctaacatttggtgggacgacgacaagtattacaaccccagcctgaagaaccggctgaccatcagcaaggacaccagcaagaaccaggtggtgctgaccatgaccaacatggaccctgtggacaccgccacatattactgcgccagaatcggccccatcaagtaccccaccgctccttacagatacttcgacttctggggccagggcacaatggtcaccgttagctctacgcgtgaggacctgaagaacgtgttcccacctgaggtggccgtgttcgagcctagcgaggccgagatcagccacacccagaaagccaccctcgtgtgcctggctaccggcttctaccccgaccatgtggaactgtcttggtgggtcaacggcaaagaggtgcacagcggcgtgtgtaccgacccccagccactgaaagaacagcccgccctgaacgacagccggtactgcctgagcagcagactgagagtgtccgccaccttctggcagaacccccggaaccacttcagatgccaggtgcagttctacggcctgagcgagaacgacgagtggacccaggacagagccaagcccgtgacccagatcgtgtctgccgaagcctggggcagagccgattgcggctttaccagcgagagctaccagcagggcgtgctgagcgccaccatcctgtacgagatcctgctgggcaaggccaccctgtacgccgtgctggtgtctgccctggtgctgatggctatggtcaagcggaaggacagccggggaagggccaagcgatctggatctggagcaacaaacttctcactactcaaacaagcaggtgacgtggaggagaatcccgggccttctagaggcgggatccacaccatggctacctacgaggtgctgtgcgaggtggcaagaaagctgggcaccgacgacagagaagtggtgctgttcctgctgaacgtgttcatccctcagcctacactggcccagctgatcggtgcactgagagccctgaaagaggaaggccggctgacctttcctctgctggccgaatgcctgttcagagccggaagaagggatctgctgcgggacctgctgcatctggaccccagatttctggaaagacacctggccggcaccatgagctacttcagcccttaccagctgaccgtgctgcacgttgacggcgaactgtgcgccagagatattcggagcctgatcttcctgagcaaggacaccatcggcagccggtctacccctcagacatttctgcactgggtgtactgcatggaaaacctggacctgctcggccccacagatgtggatgccctgatgtccatgctgagaagcctgagcagagtggacctccagagacaggtgcagacactgatgggactgcacctgagcggacctagccacagccagcactacagacacacccct

SEQ ID NO: 20305 - DNA, 2688 bp, synthetic construct
  source 1..2688: mol_type = other DNA
atggccttaccagtgaccgccttgctcctgccgctggccttgctgctccacgccgccaggccgctcgaggggaaaccaattcccaaccctcttctgggactggattcaaccggcagcggcgaggacctgaagaacgtgttcccacctgaggtggccgtgttcgagcctagcaaggccgagatcgcccacacccagaaagccaccctcgtgtgcctggctaccggcttctaccccgaccatgtggaactgtcttggtgggtcaacggcaaagaggtgcacagcggcgtgtgtaccgacccccagccactgaaagaacagcccgccctgaacgacagccggtactgcctgagcagcagactgagagtgtccgccaccttctggcagaacccccggaaccacttcagatgccaggtgcagttctacggcctgagcgagaacgacgagtggacccaggacagagccaagcccgtgacccagatcgtgtctgccgaagcctggggcagagccgattgcggcatcaccagcgccagctaccaccagggcgtgctgagcgccaccatcctgtacgagatcctgctgggcaaggccaccctgtacgccgtgctggtgtctgccctggtgctgatggctatggtcaagcggaaggacagccggggaagggccaagcgatctggatctggagcaacaaacttctcactactcaaacaagcaggtgacgtggaggagaatcccgggcctactagcatggccttaccagtgaccgccttgctcctgccgctggccttgctgctccacgccgccaggccggacatccagatgacacagagccctagcagcctgtctgccagcgtgggagacagagtgaccatcacctgtctggcctccgaggacatctacaacaacctggcctggtatcagcagaagcctggcaaggcccctaagctgctgatctactacgccagctctctccaggatggcgtgcccagcagattttctggcagcggctctggcaccgactacaccctgacaatatccagcctccagcctgaggacttcgccacctactactgcctgcaagacagcgagtacccctggacatttggcggaggcggaagtggaggcggaggatctggcggcggaggctctgaagtgacactgaaagagtctggccccgctctggtcaagcccacacaaaccctgacactgacctgcaccttcagcggctttagcctgagcacatacggcatgggcgtcggctggattagacagcctcctggaaaagccctggaatggctggctaacatttggtgggacgacgacaagtattacaaccccagcctgaagaaccggctgaccatcagcaaggacaccagcaagaaccaggtggtgctgaccatgaccaacatggaccctgtggacaccgccacatattactgcgccagaatcggccccatcaagtaccccaccgctccttacagatacttcgacttctggggccagggcacaatggtcaccgttagctctacgcgtgagcagaaactgatctcggaagaggatgggagcggcatccagaaccctgatcctgccgtgtaccagctgcgggatagcaagagcagcgacaagagcgtgtgtctgttcaccgacttcgacagccagaccaacgtgtcccagagcaaggactccgacgtgtacatcaccgataagtgcgtgctggacatgcggagcatggacttcaagagcaactccgccgtggcctggtccaacaagtccgatttcgcctgcgccaacgccttcaacaacagcattatccccgaggacacattcttcccaagcagcgacgtgccctgcgacgtgaagctggtggaaaagagcttcgagacagacaccaacctgaacttccagaacctgagcgtgatcggcttcagaatcctgctgctgaaagtggccggctttaacctgctgatgaccctgcggctgtggtccagccgcgccaagagaagcggatctggcgtgaagcagaccctgaatttcgacctgctgaagctggctggcgacgtggaatccaacccaggcccttctagaggccatatgaccgagtacaagcccacggtgcgcctcgccacccgcgacgacgtccccagggccgtacgcaccctcgccgccgcgttcgccgactaccccgccacgcgccacaccgtcgatccggaccgccacatcgagcgggtcaccgagctgcaagaactcttcctcacgcgcgtcgggctcgacatcggcaaggtgtgggtcgcggacgacggcgccgcggtggcggtctggaccacgccggagagcgtcgaagcgggggcggtgttcgccgagatcggcccgcgcatggccgagttgagcggttcccggctggccgcgcagcaacagatggaaggcctcctggcgccgcaccggcccaaggagcccgcgtggttcctggccaccgtcggcgtctcgcccgaccaccagggcaagggtctgggcagcgccgtcgtgctccccggagtggaggcggccgagcgcgccggggtgcccgccttcctggagacctccgcgccccgcaacctccccttctacgagcggctcggcttcaccgtcaccgccgacgtcgaggtgcccgaaggaccgcgcacctggtgcatgacccgcaagcccggtgcctga

SEQ ID NO: 20306 - DNA, 2691 bp, synthetic construct
  source 1..2691: mol_type = other DNA
atggccttaccagtgaccgccttgctcctgccgctggccttgctgctccacgccgccaggccgctcgagcagaaactgatctcggaagaggatctgggctccggcgatcgccctgatcctgccgtgtaccagctgcgggatagcaagagcagcgacaagagcgtgtgtctgttcaccgacttcgacagccagaccaacgtgtcccagagcaaggactccgacgtgtacatcaccgataagtgcgtgctggacatgcggagcatggacttcaagagcaactccgccgtggcctggtccaacaagtccgatttcgcctgcgccaacgccttcaacaacagcattatccccgaggacacattcttcccaagccccgagagcagctgcgacgtgaagctggtggaaaagagcttcgagacagacaccaacctgaacttccagaacctgagcgtgatcggcttcagaatcctgctgctgaaagtggccggctttaacctgctgatgaccctgcggctgtggtccagctctagtcgcgccaagagaagcggatctggcgtgaagcagaccctgaatttcgacctgctgaagctggctggcgacgtggaatccaacccaggccccactagcatggccttaccagtgaccgccttgctcctgccgctggccttgctgctccacgccgccaggccggacatccagatgacacagagccctagcagcctgtctgccagcgtgggagacagagtgaccatcacctgtctggcctccgaggacatctacaacaacctggcctggtatcagcagaagcctggcaaggcccctaagctgctgatctactacgccagctctctccaggatggcgtgcccagcagattttctggcagcggctctggcaccgactacaccctgacaatatccagcctccagcctgaggacttcgccacctactactgcctgcaagacagcgagtacccctggacatttggcggaggcggaagtggaggcggaggatctggcggcggaggctctgaagtgacactgaaagagtctggccccgctctggtcaagcccacacaaaccctgacactgacctgcaccttcagcggctttagcctgagcacatacggcatgggcgtcggctggattagacagcctcctggaaaagccctggaatggctggctaacatttggtgggacgacgacaagtattacaaccccagcctgaagaaccggctgaccatcagcaaggacaccagcaagaaccaggtggtgctgaccatgaccaacatggaccctgtggacaccgccacatattactgcgccagaatcggccccatcaagtaccccaccgctccttacagatacttcgacttctggggccagggcacaatggtcaccgttagctctacgcgtgggaaaccaattcccaaccctcttctgggactggattcaaccggcagcggcgaggacctgaagaacgtgttcccacctgaggtggccgtgttcgagcctagcgaggccgagatcagccacacccagaaagccaccctcgtgtgcctggctaccggcttctaccccgaccatgtggaactgtcttggtgggtcaacggcaaagaggtgcacagcggcgtgtgtaccgacccccagccactgaaagaacagcccgccctgaacgacagccggtactgcctgagcagcagactgagagtgtccgccaccttctggcagaacccccggaaccacttcagatgccaggtgcagttctacggcctgagcgagaacgacgagtggacccaggacagagccaagcccgtgacccagatcgtgtctgccgaagcctggggcagagccgattgcggctttaccagcgagagctaccagcagggcgtgctgagcgccaccatcctgtacgagatcctgctgggcaaggccaccctgtacgccgtgctggtgtctgccctggtgctgatggctatggtcaagcggaaggacagccggggaagggccaagcgatctggatctggagcaacaaacttctcactactcaaacaagcaggtgacgtggaggagaatcccgggccttctagaggccatatgaccgagtacaagcccacggtgcgcctcgccacccgcgacgacgtccccagggccgtacgcaccctcgccgccgcgttcgccgactaccccgccacgcgccacaccgtcgatccggaccgccacatcgagcgggtcaccgagctgcaagaactcttcctcacgcgcgtcgggctcgacatcggcaaggtgtgggtcgcggacgacggcgccgcggtggcggtctggaccacgccggagagcgtcgaagcgggggcggtgttcgccgagatcggcccgcgcatggccgagttgagcggttcccggctggccgcgcagcaacagatggaaggcctcctggcgccgcaccggcccaaggagcccgcgtggttcctggccaccgtcggcgtctcgcccgaccaccagggcaagggtctgggcagcgccgtcgtgctccccggagtggaggcggccgagcgcgccggggtgcccgccttcctggagacctccgcgccccgcaacctccccttctacgagcggctcggcttcaccgtcaccgccgacgtcgaggtgcccgaaggaccgcgcacctggtgcatgacccgcaagcccggtgcctga

SEQ ID NO: 20307 - DNA, 2553 bp, synthetic construct
  source 1..2553: mol_type = other DNA
atggccttaccagtgaccgccttgctcctgccgctggccttgctgctccacgccgccaggccggacatccagatgacacagagccctagcagcctgtctgccagcgtgggagacagagtgaccatcacctgtctggcctccgaggacatctacaacaacctggcctggtatcagcagaagcctggcaaggcccctaagctgctgatctactacgccagctctctccaggatggcgtgcccagcagattttctggcagcggctctggcaccgactacaccctgacaatatccagcctccagcctgaggacttcgccacctactactgcctgcaagacagcgagtacccctggacatttctcgaggacctgaagaacgtgttcccacctgaggtggccgtgttcgagcctagcgaggccgagatcagccacacccagaaagccaccctcgtgtgcctggctaccggcttctaccccgaccatgtggaactgtcttggtgggtcaacggcaaagaggtgcacagcggcgtgtctaccgacccccagccactgaaagaacagcccgccctgaacgacagccggtactgcctgagcagcagactgagagtgtccgccaccttctggcagaacccccggaaccacttcagatgccaggtgcagttctacggcctgagcgagaacgacgagtggacccaggacagagccaagcccgtgacccagatcgtgtctgccgaagcctggggcagagccgattgcggctttaccagcgagagctaccagcagggcgtgctgagcgccaccatcctgtacgagatcctgctgggcaaggccaccctgtacgccgtgctggtgtctgccctggtgctgatggctatggtcaagcggaaggacagccggggaagggccaagcgatctggatctggagcaacaaacttctcactactcaaacaagcaggtgacgtggaggagaatcccgggcctactagtatggactggatttggcgcatccttttccttgtcggcgctgctaccggcgcgcattccttcgaagaagtgacactgaaagagtctggccccgctctggtcaagcccacacaaaccctgacactgacctgcaccttcagcggctttagcctgagcacatacggcatgggcgtcggctggattagacagcctcctggaaaagccctggaatggctggctaacatttggtgggacgacgacaagtattacaaccccagcctgaagaaccggctgaccatcagcaaggacaccagcaagaaccaggtggtgctgaccatgaccaacatggaccctgtggacaccgccacatattactgcgccagaatcggccccatcaagtaccccaccgctccttacagatacttcgacttctggggccagggcacaatggtcaccgttagctctacgcgtatccagaaccctgatcctgccgtgtaccagctgcgggatagcaagagcagcgacaagagcgtgtgtctgttcaccgacttcgacagccagaccaacgtgtcccagagcaaggactccgacgtgtacatcaccgataagaccgtgctggacatgcggagcatggacttcaagagcaactccgccgtggcctggtccaacaagtccgatttcgcctgcgccaacgccttcaacaacagcattatccccgaggacacattcttcccaagccccgagagcagctgcgacgtgaagctggtggaaaagagcttcgagacagacaccaacctgaacttccagaacctgagcgtgatcggcttcagaatcctgctgctgaaagtggccggctttaacctgctgatgaccctgcggctgtggtccagccgcgccaagagaagcggatctggcgtgaagcagaccctgaatttcgacctgctgaagctggctggcgacgtggaatccaacccaggcccttctagaggccatatgaccgagtacaagcccacggtgcgcctcgccacccgcgacgacgtccccagggccgtacgcaccctcgccgccgcgttcgccgactaccccgccacgcgccacaccgtcgatccggaccgccacatcgagcgggtcaccgagctgcaagaactcttcctcacgcgcgtcgggctcgacatcggcaaggtgtgggtcgcggacgacggcgccgcggtggcggtctggaccacgccggagagcgtcgaagcgggggcggtgttcgccgagatcggcccgcgcatggccgagttgagcggttcccggctggccgcgcagcaacagatggaaggcctcctggcgccgcaccggcccaaggagcccgcgtggttcctggccaccgtcggcgtctcgcccgaccaccagggcaagggtctgggcagcgccgtcgtgctccccggagtggaggcggccgagcgcgccggggtgcccgccttcctggagacctccgcgccccgcaacctccccttctacgagcggctcggcttcaccgtcaccgccgacgtcgaggtgcccgaaggaccgcgcacctggtgcatgacccgcaagcccggtgcctga

SEQ ID NO: 20308 - DNA, 2799 bp, synthetic construct
  source 1..2799: mol_type = other DNA
atggccttaccagtgaccgccttgctcctgccgctggccttgctgctccacgccgccaggccggacatccagatgacacagagccctagcagcctgtctgccagcgtgggagacagagtgaccatcacctgtctggcctccgaggacatctacaacaacctggcctggtatcagcagaagcctggcaaggcccctaagctgctgatctactacgccagctctctccaggatggcgtgcccagcagattttctggcagcggctctggcaccgactacaccctgacaatatccagcctccagcctgaggacttcgccacctactactgcctgcaagacagcgagtacccctggacatttctcgaggacctgaagaacgtgttcccacctgaggtggccgtgttcgagcctagcgaggccgagatcagccacacccagaaagccaccctcgtgtgcctggctaccggcttctaccccgaccatgtggaactgtcttggtgggtcaacggcaaagaggtgcacagcggcgtgtctaccgacccccagccactgaaagaacagcccgccctgaacgacagccggtactgcctgagcagcagactgagagtgtccgccaccttctggcagaacccccggaaccacttcagatgccaggtgcagttctacggcctgagcgagaacgacgagtggacccaggacagagccaagcccgtgacccagatcgtgtctgccgaagcctggggcagagccgattgcggctttaccagcgagagctaccagcagggcgtgctgagcgccaccatcctgtacgagatcctgctgggcaaggccaccctgtacgccgtgctggtgtctgccctggtgctgatggctatggtcaagcggaaggacagccggggaagggccaagcgatctggatctggagcaacaaacttctcactactcaaacaagcaggtgacgtggaggagaatcccgggcctactagtatggactggatttggcgcatccttttccttgtcggcgctgctaccggcgcgcattccttcgaagaagtgacactgaaagagtctggccccgctctggtcaagcccacacaaaccctgacactgacctgcaccttcagcggctttagcctgagcacatacggcatgggcgtcggctggattagacagcctcctggaaaagccctggaatggctggctaacatttggtgggacgacgacaagtattacaaccccagcctgaagaaccggctgaccatcagcaaggacaccagcaagaaccaggtggtgctgaccatgaccaacatggaccctgtggacaccgccacatattactgcgccagaatcggccccatcaagtaccccaccgctccttacagatacttcgacttctggggccagggcacaatggtcaccgttagctctacgcgtgagcagaaactgatctcggaagaggatgggagcggcaccccattcccttctctggcccctcccatcatgctgctggtggacggcaagcagcagatggtggtcgtgtgcctggtgctggatgtggccccacctggactggacagccccatctggtttagcgccggcaatggctctgccctggacgcctttacctacggcccaagccctgccaccgatggcacctggacaaatctggcccacctgagcctgcccagcgaggaactggcttcttgggagcctctcgtgtgccacacaggacctggcgctgagggacacagcagatccacccagcctatgcacctgtctggcgaggccagcaccgccagaacctgtcctcaggaacctctgagaggcacccctggcggagcactgtggctgggagtgctgagactgctgctgttcaagctgctgctgtttgacctgctgctgacctgctcctgtctgtgcgatcctgccggccctctgccttctcctgccaccaccacaagactgagagccctgggcagccacagactgcaccctgccacagagacaggcggcagagaggccacaagcagccctagaccccagcccagagacagaagatggggcgataccccccctggcagaaagcctggatctccagtccgcgccaagagaagcggatctggcgtgaagcagaccctgaatttcgacctgctgaagctggctggcgacgtggaatccaacccaggcccttctagaggccatatgaccgagtacaagcccacggtgcgcctcgccacccgcgacgacgtccccagggccgtacgcaccctcgccgccgcgttcgccgactaccccgccacgcgccacaccgtcgatccggaccgccacatcgagcgggtcaccgagctgcaagaactcttcctcacgcgcgtcgggctcgacatcggcaaggtgtgggtcgcggacgacggcgccgcggtggcggtctggaccacgccggagagcgtcgaagcgggggcggtgttcgccgagatcggcccgcgcatggccgagttgagcggttcccggctggccgcgcagcaacagatggaaggcctcctggcgccgcaccggcccaaggagcccgcgtggttcctggccaccgtcggcgtctcgcccgaccaccagggcaagggtctgggcagcgccgtcgtgctccccggagtggaggcggccgagcgcgccggggtgcccgccttcctggagacctccgcgccccgcaacctccccttctacgagcggctcggcttcaccgtcaccgccgacgtcgaggtgcccgaaggaccgcgcacctggtgcatgacccgcaagcccggtgcctga

SEQ ID NO: 20309 - DNA, 2853 bp, synthetic construct
  source 1..2853: mol_type = other DNA
atggccttaccagtgaccgccttgctcctgccgctggccttgctgctccacgccgccaggccgctcgaggacctgaagaacgtgttcccacctgaggtggccgtgttcgagcctagcgaggccgagatcagccacacccagaaagccaccctcgtgtgcctggctaccggcttctaccccgaccatgtggaactgtcttggtgggtcaacggcaaagaggtgcacagcggcgtgtctaccgacccccagccactgaaagaacagcccgccctgaacgacagccggtactgcctgagcagcagactgagagtgtccgccaccttctggcagaacccccggaaccacttcagatgccaggtgcagttctacggcctgagcgagaacgacgagtggacccaggacagagccaagcccgtgacccagatcgtgtctgccgaagcctggggcagagccgattgcggctttaccagcgagagctaccagcagggcgtgctgagcgccaccatcctgtacgagatcctgctgggcaaggccaccctgtacgccgtgctggtgtctgccctggtgctgatggctatggtcaagcggaaggacagccggggaagggccaagcgatctggatctggagcaacaaacttctcactactcaaacaagcaggtgacgtggaggagaatcccgggcctactagcatggccttaccagtgaccgccttgctcctgccgctggccttgctgctccacgccgccaggccggacatccagatgacacagagccctagcagcctgtctgccagcgtgggagacagagtgaccatcacctgtctggcctccgaggacatctacaacaacctggcctggtatcagcagaagcctggcaaggcccctaagctgctgatctactacgccagctctctccaggatggcgtgcccagcagattttctggcagcggctctggcaccgactacaccctgacaatatccagcctccagcctgaggacttcgccacctactactgcctgcaagacagcgagtacccctggacatttggcggaggcggaagtggaggcggaggatctggcggcggaggctctgaagtgacactgaaagagtctggccccgctctggtcaagcccacacaaaccctgacactgacctgcaccttcagcggctttagcctgagcacatacggcatgggcgtcggctggattagacagcctcctggaaaagccctggaatggctggctaacatttggtgggacgacgacaagtattacaaccccagcctgaagaaccggctgaccatcagcaaggacaccagcaagaaccaggtggtgctgaccatgaccaacatggaccctgtggacaccgccacatattactgcgccagaatcggccccatcaagtaccccaccgctccttacagatacttcgacttctggggccagggcacaatggtcaccgttagctctacgcgtgagcagaaactgatctcggaagaggatctggggagcggcaccccattcccttctctggcccctcccatcatgctgctggtggacggcaagcagcagatggtggtcgtgtgcctggtgctggatgtggccccacctggactggacagccccatctggtttagcgccggcaatggctctgccctggacgcctttacctacggcccaagccctgccaccgatggcacctggacaaatctggcccacctgagcctgcccagcgaggaactggcttcttgggagcctctcgtgtgccacacaggacctggcgctgagggacacagcagatccacccagcctatgcacctgtctggcgaggccagcaccgccagaacctgtcctcaggaacctctgagaggcacccctggcggagcactgtggctgggagtgctgagactgctgctgttcaagctgctgctgtttgacctgctgctgacctgctcctgtctgtgcgatcctgccggccctctgccttctcctgccaccaccacaagactgagagccctgggcagccacagactgcaccctgccacagagacaggcggcagagaggccacaagcagccctagaccccagcccagagacagaagatggggcgataccccccctggcagaaagcctggatctccagtccgcgccaagagaagcggatctggcgtgaagcagaccctgaatttcgacctgctgaagctggctggcgacgtggaatccaacccaggcccttctagatctagaggccatatgaccgagtacaagcccacggtgcgcctcgccacccgcgacgacgtccccagggccgtacgcaccctcgccgccgcgttcgccgactaccccgccacgcgccacaccgtcgatccggaccgccacatcgagcgggtcaccgagctgcaagaactcttcctcacgcgcgtcgggctcgacatcggcaaggtgtgggtcgcggacgacggcgccgcggtggcggtctggaccacgccggagagcgtcgaagcgggggcggtgttcgccgagatcggcccgcgcatggccgagttgagcggttcccggctggccgcgcagcaacagatggaaggcctcctggcgccgcaccggcccaaggagcccgcgtggttcctggccaccgtcggcgtctcgcccgaccaccagggcaagggtctgggcagcgccgtcgtgctccccggagtggaggcggccgagcgcgccggggtgcccgccttcctggagacctccgcgccccgcaacctccccttctacgagcggctcggcttcaccgtcaccgccgacgtcgaggtgcccgaaggaccgcgcacctggtgcatgacccgcaagcccggtgcctga

SEQ ID NO: 20310 - DNA, 2664 bp, synthetic construct
  source 1..2664: mol_type = other DNA
atggccttaccagtgaccgccttgctcctgccgctggccttgctgctccacgccgccaggccggacatccagatgacacagagccctagcagcctgtctgccagcgtgggagacagagtgaccatcacctgtctggcctccgaggacatctacaacaacctggcctggtatcagcagaagcctggcaaggcccctaagctgctgatctactacgccagctctctccaggatggcgtgcccagcagattttctggcagcggctctggcaccgactacaccctgacaatatccagcctccagcctgaggacttcgccacctactactgcctgcaagacagcgagtacccctggacatttctcgaggggaaaccaattcccaaccctcttctgggactggattcaaccggcagcggcgacaagcagctggacgccgacgtgtcccccaagcctaccatcttcctgccctctatcgccgagacaaagctccagaaggccggcacctacctgtgcctgctggaaaagttcttcccagatgtgattaagatccactggcaggaaaagaagtccaacaccatcctgggcagccaggaaggcaacaccatgaagaccaacgacacctacatgaagttcagctggctgaccgtgcccgagaagtccctggacaaagaacacagatgcatcgtgcggcacgaaaacaacaagaacggcgtggaccaggaaatcatcttcccacccatcaagaccgatgtgattacaatggaccccaaggacaactgctccaaggacgccaacgataccctgctgctccagctgaccaacaccagcgcctactacatgtacttgttgctgctgctgaagtccgtggtgtacttcgccatcatcacatgctgcctgctgcggagaaccgccttctgctgcaacggcgagaagtctagggccaagcgatctggatctggagcaacaaacttctcactactcaaacaagcaggtgacgtggaggagaatcccgggcctactagtatggactggatttggcgcatccttttccttgtcggcgctgctaccggcgcgcattccttcgaagaagtgacactgaaagagtctggccccgctctggtcaagcccacacaaaccctgacactgacctgcaccttcagcggctttagcctgagcacatacggcatgggcgtcggctggattagacagcctcctggaaaagccctggaatggctggctaacatttggtgggacgacgacaagtattacaaccccagcctgaagaaccggctgaccatcagcaaggacaccagcaagaaccaggtggtgctgaccatgaccaacatggaccctgtggacaccgccacatattactgcgccagaatcggccccatcaagtaccccaccgctccttacagatacttcgacttctggggccagggcacaatggtcaccgttagctctacgcgtgagcagaaactgatctcggaagaggatgggagcggcagccagcctcacaccaagcccagcgtgttcgtgatgaagaacggcaccaacgtggcctgcctcgtgaaagagttctaccccaaggacatcaggatcaacctggtgtccagcaagaagatcaccgagttcgaccccgccatcgtgatctcccccagcggcaagtacaacgccgtgaagctggggaagtacgaggacagcaacagcgtgacctgctccgtgcagcacgacaacaagaccgtgcacagcaccgactttgaagtgaaaaccgactccaccgaccacgtgaagcccaaagagacagagaacaccaagcagcccagcaagagctgccacaagcccaaggccatcgtgcacaccgagaaagtgaacatgatgagcctgaccgtgctgggcctgcggatgctgttcgccaaaaccgtggccgtgaacttcctgctgaccgccaagctgttcttcctccgcgccaagagaagcggatctggcgtgaagcagaccctgaatttcgacctgctgaagctggctggcgacgtggaatccaacccaggcccttctagaggccatatgaccgagtacaagcccacggtgcgcctcgccacccgcgacgacgtccccagggccgtacgcaccctcgccgccgcgttcgccgactaccccgccacgcgccacaccgtcgatccggaccgccacatcgagcgggtcaccgagctgcaagaactcttcctcacgcgcgtcgggctcgacatcggcaaggtgtgggtcgcggacgacggcgccgcggtggcggtctggaccacgccggagagcgtcgaagcgggggcggtgttcgccgagatcggcccgcgcatggccgagttgagcggttcccggctggccgcgcagcaacagatggaaggcctcctggcgccgcaccggcccaaggagcccgcgtggttcctggccaccgtcggcgtctcgcccgaccaccagggcaagggtctgggcagcgccgtcgtgctccccggagtggaggcggccgagcgcgccggggtgcccgccttcctggagacctccgcgccccgcaacctccccttctacgagcggctcggcttcaccgtcaccgccgacgtcgaggtgcccgaaggaccgcgcacctggtgcatgacccgcaagcccggtgcctga

SEQ ID NO: 20311 - DNA, 1875 bp, synthetic construct
  source 1..1875: mol_type = other DNA
atggccttaccagtgaccgccttgctcctgccgctggccttgctgctccacgccgccaggccggacatccagatgacacagagccctagcagcctgtctgccagcgtgggagacagagtgaccatcacctgtctggcctccgaggacatctacaacaacctggcctggtatcagcagaagcctggcaaggcccctaagctgctgatctactacgccagctctctccaggatggcgtgcccagcagattttctggcagcggctctggcaccgactacaccctgacaatatccagcctccagcctgaggacttcgccacctactactgcctgcaagacagcgagtacccctggacatttctcgagagccagcctcacaccaagcccagcgtgttcgtgatgaagaacggcaccaacgtggcctgcctcgtgaaagagttctaccccaaggacatcaggatcaacctggtgtccagcaagaagatcaccgagttcgaccccgccatcgtgatctcccccagcggcaagtacaacgccgtgaagctggggaagtacgaggacagcaacagcgtgacctgctccgtgcagcacgacaacaagaccgtgcacagcaccgactttgaagtgaaaaccgactccaccgaccacgtgaagcccaaagagacagagaacaccaagcagcccagcaagagctgccacaagcccaaggccatcgtgcacaccgagaaagtgaacatgatgagcctgaccgtgctgggcctgcggatgctgttcgccaaaaccgtggccgtgaacttcctgctgaccgccaagctgttcttcctcagggccaagcgatctggatctggagcaacaaacttctcactactcaaacaagcaggtgacgtggaggagaatcccgggcctactagtatggactggatttggcgcatccttttccttgtcggcgctgctaccggcgcgcattccttcgaagaagtgacactgaaagagtctggccccgctctggtcaagcccacacaaaccctgacactgacctgcaccttcagcggctttagcctgagcacatacggcatgggcgtcggctggattagacagcctcctggaaaagccctggaatggctggctaacatttggtgggacgacgacaagtattacaaccccagcctgaagaaccggctgaccatcagcaaggacaccagcaagaaccaggtggtgctgaccatgaccaacatggaccctgtggacaccgccacatattactgcgccagaatcggccccatcaagtaccccaccgctccttacagatacttcgacttctggggccagggcacaatggtcaccgttagctctacgcgtgacaagcagctggacgccgacgtgtcccccaagcctaccatcttcctgccctctatcgccgagacaaagctccagaaggccggcacctacctgtgcctgctggaaaagttcttcccagatgtgattaagatccactggcaggaaaagaagtccaacaccatcctgggcagccaggaaggcaacaccatgaagaccaacgacacctacatgaagttcagctggctgaccgtgcccgagaagtccctggacaaagaacacagatgcatcgtgcggcacgaaaacaacaagaacggcgtggaccaggaaatcatcttcccacccatcaagaccgatgtgattacaatggaccccaaggacaactgctccaaggacgccaacgataccctgctgctccagctgaccaacaccagcgcctactacatgtacttgttgctgctgctgaagtccgtggtgtacttcgccatcatcacatgctgcctgctgcggagaaccgccttctgctgcaacggcgagaagtct

SEQ ID NO: 20312 - DNA, 2709 bp, synthetic construct
  source 1..2709: mol_type = other DNA
atggccttaccagtgaccgccttgctcctgccgctggccttgctgctccacgccgccaggccgctcgaggggaaaccaattcccaaccctcttctgggactggattcaaccggcagcggcgacaagcagctggacgccgacgtgtcccccaagcctaccatcttcctgccctctatcgccgagacaaagctccagaaggccggcacctacctgtgcctgctggaaaagttcttcccagatgtgattaagatccactggcaggaaaagaagtccaacaccatcctgggcagccaggaaggcaacaccatgaagaccaacgacacctacatgaagttcagctggctgaccgtgcccgagaagtccctggacaaagaacacagatgcatcgtgcggcacgaaaacaacaagaacggcgtggaccaggaaatcatcttcccacccatcaagaccgatgtgattacaatggaccccaaggacaactgctccaaggacgccaacgataccctgctgctccagctgaccaacaccagcgcctactacatgtacttgttgctgctgctgaagtccgtggtgtacttcgccatcatcacatgctgcctgctgcggagaaccgccttctgctgcaacggcgagaagtctagggccaagcgatctggatctggagcaacaaacttctcactactcaaacaagcaggtgacgtggaggagaatcccgggcctactagcatggccttaccagtgaccgccttgctcctgccgctggccttgctgctccacgccgccaggccggacatccagatgacacagagccctagcagcctgtctgccagcgtgggagacagagtgaccatcacctgtctggcctccgaggacatctacaacaacctggcctggtatcagcagaagcctggcaaggcccctaagctgctgatctactacgccagctctctccaggatggcgtgcccagcagattttctggcagcggctctggcaccgactacaccctgacaatatccagcctccagcctgaggacttcgccacctactactgcctgcaagacagcgagtacccctggacatttggcggaggcggaagtggaggcggaggatctggcggcggaggctctgaagtgacactgaaagagtctggccccgctctggtcaagcccacacaaaccctgacactgacctgcaccttcagcggctttagcctgagcacatacggcatgggcgtcggctggattagacagcctcctggaaaagccctggaatggctggctaacatttggtgggacgacgacaagtattacaaccccagcctgaagaaccggctgaccatcagcaaggacaccagcaagaaccaggtggtgctgaccatgaccaacatggaccctgtggacaccgccacatattactgcgccagaatcggccccatcaagtaccccaccgctccttacagatacttcgacttctggggccagggcacaatggtcaccgttagctctacgcgtgagcagaaactgatctcggaagaggatgggagcggcagccagcctcacaccaagcccagcgtgttcgtgatgaagaacggcaccaacgtggcctgcctcgtgaaagagttctaccccaaggacatcaggatcaacctggtgtccagcaagaagatcaccgagttcgaccccgccatcgtgatctcccccagcggcaagtacaacgccgtgaagctggggaagtacgaggacagcaacagcgtgacctgctccgtgcagcacgacaacaagaccgtgcacagcaccgactttgaagtgaaaaccgactccaccgaccacgtgaagcccaaagagacagagaacaccaagcagcccagcaagagctgccacaagcccaaggccatcgtgcacaccgagaaagtgaacatgatgagcctgaccgtgctgggcctgcggatgctgttcgccaaaaccgtggccgtgaacttcctgctgaccgccaagctgttcttcctccgcgccaagagaagcggatctggcgtgaagcagaccctgaatttcgacctgctgaagctggctggcgacgtggaatccaacccaggcccttctagaggccatatgaccgagtacaagcccacggtgcgcctcgccacccgcgacgacgtccccagggccgtacgcaccctcgccgccgcgttcgccgactaccccgccacgcgccacaccgtcgatccggaccgccacatcgagcgggtcaccgagctgcaagaactcttcctcacgcgcgtcgggctcgacatcggcaaggtgtgggtcgcggacgacggcgccgcggtggcggtctggaccacgccggagagcgtcgaagcgggggcggtgttcgccgagatcggcccgcgcatggccgagttgagcggttcccggctggccgcgcagcaacagatggaaggcctcctggcgccgcaccggcccaaggagcccgcgtggttcctggccaccgtcggcgtctcgcccgaccaccagggcaagggtctgggcagcgccgtcgtgctccccggagtggaggcggccgagcgcgccggggtgcccgccttcctggagacctccgcgccccgcaacctccccttctacgagcggctcggcttcaccgtcaccgccgacgtcgaggtgcccgaaggaccgcgcacctggtgcatgacccgcaagcccggtgcctga

SEQ ID NO: 20313 - DNA, 3084 bp, synthetic construct
  source 1..3084: mol_type = other DNA
atggccttaccagtgaccgccttgctcctgccgctggccttgctgctccacgccgccaggccggacatccagatgacacagagccctagcagcctgtctgccagcgtgggagacagagtgaccatcacctgtctggcctccgaggacatctacaacaacctggcctggtatcagcagaagcctggcaaggcccctaagctgctgatctactacgccagctctctccaggatggcgtgcccagcagattttctggcagcggctctggcaccgactacaccctgacaatatccagcctccagcctgaggacttcgccacctactactgcctgcaagacagcgagtacccctggacatttggacagcctaaggccaatcctaccgtgacactgttccctccaagcagcgaagaactccaggccaacaaggccacacttgtgtgcctgatctccgacttctaccctggggctgtgacagtggcttggaaggccgatggatctcctgtgaaagccggcgtggaaaccaccaagccatccaagcagagcaacaacaaatacgccgccagctcctacctgagcctgacacctgagcagtggaagtcccacagatcctacagctgccaagtgacccacgaaggcagcaccgtggaaaagacagtggcccctacagagtgcagcggatcccagagcttcggcctgctggaccccaagctgtgctacctgctggatggcatcctgttcatctacggcgtgatcctgaccgccctgttcctgagagtgaagttcagcagaagcgccgacgcccctgcctaccagcagggacagaaccaactgtacaacgagctgaacctgggcagacgggaagagtacgacgtgctggacaagcggagaggcagggaccctgagatgggcggaaagccccagcggagaaagaacccccaggaaggactgtataacgaactccagaaagacaagatggccgaagcctacagcgagatcggcatgaagggcgagcggagaagaggcaagggccacgatggcctgtaccagggcctgagcaccgccaccaaggacacctatgacgccctgcacatgcaggccctgcctccaagaagggccaagcgatctggatctggagcaacaaacttctcactactcaaacaagcaggtgacgtggaggagaatcccgggcctactagtatggactggatttggcgcatccttttccttgtcggcgctgctaccggcgcgcattccttcgaagaagtgacactgaaagagtctggccccgctctggtcaagcccacacaaaccctgacactgacctgcaccttcagcggctttagcctgagcacatacggcatgggcgtcggctggattagacagcctcctggaaaagccctggaatggctggctaacatttggtgggacgacgacaagtattacaaccccagcctgaagaaccggctgaccatcagcaaggacaccagcaagaaccaggtggtgctgaccatgaccaacatggaccctgtggacaccgccacatattactgcgccagaatcggccccatcaagtaccccaccgctccttacagatacttcgacttctggggccagggcacaatggtcaccgttagctctgcctctacaaagggaccctccgtgtttcctctggctcccagcagcaagtctacaagcggaggaacagccgctctgggctgcctggtcaaggattactttcccgagcctgtgaccgtgtcctggaatagcggagcactgacaagcggcgtgcacacctttccagccgtgctgcaaagcagcggcctgtactctctgagcagcgtggtcacagtgcctagctctagcctgggcacccagacctacatctgcaatgtgaaccacaagcctagcaacaccaaggtggacaagagagtggaacccaagagctgtggtacccagagttttgggttgttggaccctaaattgtgctatctgttggacggaatcctgttcatttacggagtgatcctgaccgcattgttcctgcgggttaagttttccagatccgcagacgcacccgcttaccaacaagggcagaaccaactctacaatgaacttaatttggggcggagggaagagtacgacgttctggacaaaaggaggggacgagatcccgagatgggcggaaagcctcagcgaaggaagaatccgcaagaggggctttataacgaactccagaaagataaaatggcagaagcctatagtgagattgggatgaagggagaaaggaggaggggtaaaggtcacgatgggttgtaccaaggattgagcacagccactaaagatacctatgatgcgctccacatgcaggccctgccgccaagacgcgccaagagaagcggatctggcgtgaagcagaccctgaatttcgacctgctgaagctggctggcgacgtggaatccaacccaggcccttctagaggccatatgaccgagtacaagcccacggtgcgcctcgccacccgcgacgacgtccccagggccgtacgcaccctcgccgccgcgttcgccgactaccccgccacgcgccacaccgtcgatccggaccgccacatcgagcgggtcaccgagctgcaagaactcttcctcacgcgcgtcgggctcgacatcggcaaggtgtgggtcgcggacgacggcgccgcggtggcggtctggaccacgccggagagcgtcgaagcgggggcggtgttcgccgagatcggcccgcgcatggccgagttgagcggttcccggctggccgcgcagcaacagatggaaggcctcctggcgccgcaccggcccaaggagcccgcgtggttcctggccaccgtcggcgtctcgcccgaccaccagggcaagggtctgggcagcgccgtcgtgctccccggagtggaggcggccgagcgcgccggggtgcccgccttcctggagacctccgcgccccgcaacctccccttctacgagcggctcggcttcaccgtcaccgccgacgtcgaggtgcccgaaggaccgcgcacctggtgcatgacccgcaagcccggtgcctga

SEQ ID NO: 20314 - DNA, 2439 bp, synthetic construct
  source 1..2439: mol_type = other DNA
atggccttaccagtgaccgccttgctcctgccgctggccttgctgctccacgccgccaggccggacatccagatgacacagagccctagcagcctgtctgccagcgtgggagacagagtgaccatcacctgtctggcctccgaggacatctacaacaacctggcctggtatcagcagaagcctggcaaggcccctaagctgctgatctactacgccagctctctccaggatggcgtgcccagcagattttctggcagcggctctggcaccgactacaccctgacaatatccagcctccagcctgaggacttcgccacctactactgcctgcaagacagcgagtacccctggacatttctcgaggacctgaagaacgtgttcccacctgaggtggccgtgttcgagcctagcgaggccgagatcagccacacccagaaagccaccctcgtgtgcctggctaccggcttctaccccgaccatgtggaactgtcttggtgggtcaacggcaaagaggtgcacagcggcgtgtctaccgacccccagccactgaaagaacagcccgccctgaacgacagccggtactgcctgagcagcagactgagagtgtccgccaccttctggcagaacccccggaaccacttcagatgccaggtgcagttctacggcctgagcgagaacgacgagtggacccaggacagagccaagcccgtgacccagatcgtgtctgccgaagcctggggcagagccgattgcggatcccagagcttcggcctgctggaccccaagctgtgctacctgctggatggcatcctgttcatctacggcgtgatcctgaccgccctgttcctgagagtgaagttcagcagaagcgccgacgcccctgcctaccagcagggacagaaccaactgtacaacgagctgaacctgggcagacgggaagagtacgacgtgctggacaagcggagaggcagggaccctgagatgggcggaaagccccagcggagaaagaacccccaggaaggactgtataacgaactccagaaagacaagatggccgaagcctacagcgagatcggcatgaagggcgagcggagaagaggcaagggccacgatggcctgtaccagggcctgagcaccgccaccaaggacacctatgacgccctgcacatgcaggccctgcctccaagaagggccaagcgatctggatctggagcaacaaacttctcactactcaaacaagcaggtgacgtggaggagaatcccgggcctactagtatggactggatttggcgcatccttttccttgtcggcgctgctaccggcgcgcattccttcgaagaagtgacactgaaagagtctggccccgctctggtcaagcccacacaaaccctgacactgacctgcaccttcagcggctttagcctgagcacatacggcatgggcgtcggctggattagacagcctcctggaaaagccctggaatggctggctaacatttggtgggacgacgacaagtattacaaccccagcctgaagaaccggctgaccatcagcaaggacaccagcaagaaccaggtggtgctgaccatgaccaacatggaccctgtggacaccgccacatattactgcgccagaatcggccccatcaagtaccccaccgctccttacagatacttcgacttctggggccagggcacaatggtcaccgttagctctacgcgtatccagaaccctgatcctgccgtgtaccagctgcgggatagcaagagcagcgacaagagcgtgtgtctgttcaccgacttcgacagccagaccaacgtgtcccagagcaaggactccgacgtgtacatcaccgataagaccgtgctggacatgcggagcatggacttcaagagcaactccgccgtggcctggtccaacaagtccgatttcgcctgcgccaacgccttcaacaacagcattatccccgaggacacattcttcccaagccccgagagcagctgcggtacccagagttttgggttgttggaccctaaattgtgctatctgttggacggaatcctgttcatttacggagtgatcctgaccgcattgttcctgcgggttaagttttccagatccgcagacgcacccgcttaccaacaagggcagaaccaactctacaatgaacttaatttggggcggagggaagagtacgacgttctggacaaaaggaggggacgagatcccgagatgggcggaaagcctcagcgaaggaagaatccgcaagaggggctttataacgaactccagaaagataaaatggcagaagcctatagtgagattgggatgaagggagaaaggaggaggggtaaaggtcacgatgggttgtaccaaggattgagcacagccactaaagatacctatgatgcgctccacatgcaggccctgccgccaaga

SEQ ID NO: 20315 - DNA, 2439 bp, synthetic construct
  source 1..2439: mol_type = other DNA
atggccttaccagtgaccgccttgctcctgccgctggccttgctgctccacgccgccaggccggacatccagatgacacagagccctagcagcctgtctgccagcgtgggagacagagtgaccatcacctgtctggcctccgaggacatctacaacaacctggcctggtatcagcagaagcctggcaaggcccctaagctgctgatctactacgccagctctctccaggatggcgtgcccagcagattttctggcagcggctctggcaccgactacaccctgacaatatccagcctccagcctgaggacttcgccacctactactgcctgcaagacagcgagtacccctggacatttctcgaggacctgaagaacgtgttcccacctgaggtggccgtgttcgagcctagcaaggccgagatcgcccacacccagaaagccaccctcgtgtgcctggctaccggcttctaccccgaccatgtggaactgtcttggtgggtcaacggcaaagaggtgcacagcggcgtgtgtaccgacccccagccactgaaagaacagcccgccctgaacgacagccggtactgcctgagcagcagactgagagtgtccgccaccttctggcagaacccccggaaccacttcagatgccaggtgcagttctacggcctgagcgagaacgacgagtggacccaggacagagccaagcccgtgacccagatcgtgtctgccgaagcctggggcagagccgattgcggatcccagagcttcggcctgctggaccccaagctgtgctacctgctggatggcatcctgttcatctacggcgtgatcctgaccgccctgttcctgagagtgaagttcagcagaagcgccgacgcccctgcctaccagcagggacagaaccaactgtacaacgagctgaacctgggcagacgggaagagtacgacgtgctggacaagcggagaggcagggaccctgagatgggcggaaagccccagcggagaaagaacccccaggaaggactgtataacgaactccagaaagacaagatggccgaagcctacagcgagatcggcatgaagggcgagcggagaagaggcaagggccacgatggcctgtaccagggcctgagcaccgccaccaaggacacctatgacgccctgcacatgcaggccctgcctccaagaagggccaagcgatctggatctggagcaacaaacttctcactactcaaacaagcaggtgacgtggaggagaatcccgggcctactagtatggactggatttggcgcatccttttccttgtcggcgctgctaccggcgcgcattccttcgaagaagtgacactgaaagagtctggccccgctctggtcaagcccacacaaaccctgacactgacctgcaccttcagcggctttagcctgagcacatacggcatgggcgtcggctggattagacagcctcctggaaaagccctggaatggctggctaacatttggtgggacgacgacaagtattacaaccccagcctgaagaaccggctgaccatcagcaaggacaccagcaagaaccaggtggtgctgaccatgaccaacatggaccctgtggacaccgccacatattactgcgccagaatcggccccatcaagtaccccaccgctccttacagatacttcgacttctggggccagggcacaatggtcaccgttagctctacgcgtatccagaaccctgatcctgccgtgtaccagctgcgggatagcaagagcagcgacaagagcgtgtgtctgttcaccgacttcgacagccagaccaacgtgtcccagagcaaggactccgacgtgtacatcaccgataagtgcgtgctggacatgcggagcatggacttcaagagcaactccgccgtggcctggtccaacaagtccgatttcgcctgcgccaacgccttcaacaacagcattatccccgaggacacattcttcccaagcagcgacgtgccctgcggtacccagagttttgggttgttggaccctaaattgtgctatctgttggacggaatcctgttcatttacggagtgatcctgaccgcattgttcctgcgggttaagttttccagatccgcagacgcacccgcttaccaacaagggcagaaccaactctacaatgaacttaatttggggcggagggaagagtacgacgttctggacaaaaggaggggacgagatcccgagatgggcggaaagcctcagcgaaggaagaatccgcaagaggggctttataacgaactccagaaagataaaatggcagaagcctatagtgagattgggatgaagggagaaaggaggaggggtaaaggtcacgatgggttgtaccaaggattgagcacagccactaaagatacctatgatgcgctccacatgcaggccctgccgccaaga

SEQ ID NO: 20316 - DNA, 2652 bp, synthetic construct
  source 1..2652: mol_type = other DNA
atggccttaccagtgaccgccttgctcctgccgctggccttgctgctccacgccgccaggccggacatccagatgacacagagccctagcagcctgtctgccagcgtgggagacagagtgaccatcacctgtctggcctccgaggacatctacaacaacctggcctggtatcagcagaagcctggcaaggcccctaagctgctgatctactacgccagctctctccaggatggcgtgcccagcagattttctggcagcggctctggcaccgactacaccctgacaatatccagcctccagcctgaggacttcgccacctactactgcctgcaagacagcgagtacccctggacatttctcgaggggaaaccaattcccaaccctcttctgggactggattcaaccggcagcggcgaggacctgaagaacgtgttcccacctgaggtggccgtgttcgagcctagcgaggccgagatcagccacacccagaaagccaccctcgtgtgcctggctaccggcttctaccccgaccatgtggaactgtcttggtgggtcaacggcaaagaggtgcacagcggcgtgtctaccgacccccagccactgaaagaacagcccgccctgaacgacagccggtactgcctgagcagcagactgagagtgtccgccaccttctggcagaacccccggaaccacttcagatgccaggtgcagttctacggcctgagcgagaacgacgagtggacccaggacagagccaagcccgtgacccagatcgtgtctgccgaagcctggggcagagccgattgcggatcccagagcttcggcctgctggaccccaagctgtgctacctgctggatggcatcctgttcatctacggcgtgatcctgaccgccctgttcctgagagtgaagttcagcagaagcgccgacgcccctgcctaccagcagggacagaaccaactgtacaacgagctgaacctgggcagacgggaagagtacgacgtgctggacaagcggagaggcagggaccctgagatgggcggaaagccccagcggagaaagaacccccaggaaggactgtataacgaactccagaaagacaagatggccgaagcctacagcgagatcggcatgaagggcgagcggagaagaggcaagggccacgatggcctgtaccagggcctgagcaccgccaccaaggacacctatgacgccctgcacatgcaggccctgcctccaagaagggccaagcgatctggatctggagcaacaaacttctcactactcaaacaagcaggtgacgtggaggagaatcccgggcctactagtatggactggatttggcgcatccttttccttgtcggcgctgctaccggcgcgcattccttcgaagaagtgacactgaaagagtctggccccgctctggtcaagcccacacaaaccctgacactgacctgcaccttcagcggctttagcctgagcacatacggcatgggcgtcggctggattagacagcctcctggaaaagccctggaatggctggctaacatttggtgggacgacgacaagtattacaaccccagcctgaagaaccggctgaccatcagcaaggacaccagcaagaaccaggtggtgctgaccatgaccaacatggaccctgtggacaccgccacatattactgcgccagaatcggccccatcaagtaccccaccgctccttacagatacttcgacttctggggccagggcacaatggtcaccgttagctctacgcgtgagcagaaactgatctcggaagaggatgggagcggcatccagaaccctgatcctgccgtgtaccagctgcgggatagcaagagcagcgacaagagcgtgtgtctgttcaccgacttcgacagccagaccaacgtgtcccagagcaaggactccgacgtgtacatcaccgataagaccgtgctggacatgcggagcatggacttcaagagcaactccgccgtggcctggtccaacaagtccgatttcgcctgcgccaacgccttcaacaacagcattatccccgaggacacattcttcccaagccccgagagcagctgcggtacccagagttttgggttgttggaccctaaattgtgctatctgttggacggaatcctgttcatttacggagtgatcctgaccgcattgttcctgaggagcaagcggtcacggctgctccacagcgattacatgaatatgacaccacgaagaccgggtcctactcgcaaacactaccaaccctacgcacctccccgcgactttgcagcgtaccgatctcgggttaagttttccagatccgcagacgcacccgcttaccaacaagggcagaaccaactctacaatgaacttaatttggggcggagggaagagtacgacgttctggacaaaaggaggggacgagatcccgagatgggcggaaagcctcagcgaaggaagaatccgcaagaggggctttataacgaactccagaaagataaaatggcagaagcctatagtgagattgggatgaagggagaaaggaggaggggtaaaggtcacgatgggttgtaccaaggattgagcacagccactaaagatacctatgatgcgctccacatgcaggccctgccgccaaga

SEQ ID NO: 20317 - DNA, 2775 bp, synthetic construct
  source 1..2775: mol_type = other DNA
atggccttaccagtgaccgccttgctcctgccgctggccttgctgctccacgccgccaggccggacatccagatgacacagagccctagcagcctgtctgccagcgtgggagacagagtgaccatcacctgtctggcctccgaggacatctacaacaacctggcctggtatcagcagaagcctggcaaggcccctaagctgctgatctactacgccagctctctccaggatggcgtgcccagcagattttctggcagcggctctggcaccgactacaccctgacaatatccagcctccagcctgaggacttcgccacctactactgcctgcaagacagcgagtacccctggacatttctcgaggggaaaccaattcccaaccctcttctgggactggattcaaccggcagcggcgaggacctgaagaacgtgttcccacctgaggtggccgtgttcgagcctagcgaggccgagatcagccacacccagaaagccaccctcgtgtgcctggctaccggcttctaccccgaccatgtggaactgtcttggtgggtcaacggcaaagaggtgcacagcggcgtgtctaccgacccccagccactgaaagaacagcccgccctgaacgacagccggtactgcctgagcagcagactgagagtgtccgccaccttctggcagaacccccggaaccacttcagatgccaggtgcagttctacggcctgagcgagaacgacgagtggacccaggacagagccaagcccgtgacccagatcgtgtctgccgaagcctggggcagagccgattgcggatcccagagcttcggcctgctggaccccaagctgtgctacctgctggatggcatcctgttcatctacggcgtgatcctgaccgccctgttcctgaggagtaagaggagcaggctcctgcacagtgactacatgaacatgactccacgccgccccggacccacccgcaagcattaccagccctatgccccaccacgcgacttcgcagcctatcgctccagagtgaagttcagcagaagcgccgacgcccctgcctaccagcagggacagaaccaactgtacaacgagctgaacctgggcagacgggaagagtacgacgtgctggacaagcggagaggcagggaccctgagatgggcggaaagccccagcggagaaagaacccccaggaaggactgtataacgaactccagaaagacaagatggccgaagcctacagcgagatcggcatgaagggcgagcggagaagaggcaagggccacgatggcctgtaccagggcctgagcaccgccaccaaggacacctatgacgccctgcacatgcaggccctgcctccaagaagggccaagcgatctggatctggagcaacaaacttctcactactcaaacaagcaggtgacgtggaggagaatcccgggcctactagtatggactggatttggcgcatccttttccttgtcggcgctgctaccggcgcgcattccttcgaagaagtgacactgaaagagtctggccccgctctggtcaagcccacacaaaccctgacactgacctgcaccttcagcggctttagcctgagcacatacggcatgggcgtcggctggattagacagcctcctggaaaagccctggaatggctggctaacatttggtgggacgacgacaagtattacaaccccagcctgaagaaccggctgaccatcagcaaggacaccagcaagaaccaggtggtgctgaccatgaccaacatggaccctgtggacaccgccacatattactgcgccagaatcggccccatcaagtaccccaccgctccttacagatacttcgacttctggggccagggcacaatggtcaccgttagctctacgcgtgagcagaaactgatctcggaagaggatgggagcggcatccagaaccctgatcctgccgtgtaccagctgcgggatagcaagagcagcgacaagagcgtgtgtctgttcaccgacttcgacagccagaccaacgtgtcccagagcaaggactccgacgtgtacatcaccgataagaccgtgctggacatgcggagcatggacttcaagagcaactccgccgtggcctggtccaacaagtccgatttcgcctgcgccaacgccttcaacaacagcattatccccgaggacacattcttcccaagccccgagagcagctgcggtacccagagttttgggttgttggaccctaaattgtgctatctgttggacggaatcctgttcatttacggagtgatcctgaccgcattgttcctgaggagcaagcggtcacggctgctccacagcgattacatgaatatgacaccacgaagaccgggtcctactcgcaaacactaccaaccctacgcacctccccgcgactttgcagcgtaccgatctcgggttaagttttccagatccgcagacgcacccgcttaccaacaagggcagaaccaactctacaatgaacttaatttggggcggagggaagagtacgacgttctggacaaaaggaggggacgagatcccgagatgggcggaaagcctcagcgaaggaagaatccgcaagaggggctttataacgaactccagaaagataaaatggcagaagcctatagtgagattgggatgaagggagaaaggaggaggggtaaaggtcacgatgggttgtaccaaggattgagcacagccactaaagatacctatgatgcgctccacatgcaggccctgccgccaaga

SEQ ID NO: 20318 - DNA, 2658 bp, synthetic construct
  source 1..2658: mol_type = other DNA
atggccttaccagtgaccgccttgctcctgccgctggccttgctgctccacgccgccaggccggacatccagatgacacagagccctagcagcctgtctgccagcgtgggagacagagtgaccatcacctgtctggcctccgaggacatctacaacaacctggcctggtatcagcagaagcctggcaaggcccctaagctgctgatctactacgccagctctctccaggatggcgtgcccagcagattttctggcagcggctctggcaccgactacaccctgacaatatccagcctccagcctgaggacttcgccacctactactgcctgcaagacagcgagtacccctggacatttctcgaggggaaaccaattcccaaccctcttctgggactggattcaaccggcagcggcgaggacctgaagaacgtgttcccacctgaggtggccgtgttcgagcctagcgaggccgagatcagccacacccagaaagccaccctcgtgtgcctggctaccggcttctaccccgaccatgtggaactgtcttggtgggtcaacggcaaagaggtgcacagcggcgtgtctaccgacccccagccactgaaagaacagcccgccctgaacgacagccggtactgcctgagcagcagactgagagtgtccgccaccttctggcagaacccccggaaccacttcagatgccaggtgcagttctacggcctgagcgagaacgacgagtggacccaggacagagccaagcccgtgacccagatcgtgtctgccgaagcctggggcagagccgattgcggatcccagagcttcggcctgctggaccccaagctgtgctacctgctggatggcatcctgttcatctacggcgtgatcctgaccgccctgttcctgagagtgaagttcagcagaagcgccgacgcccctgcctaccagcagggacagaaccaactgtacaacgagctgaacctgggcagacgggaagagtacgacgtgctggacaagcggagaggcagggaccctgagatgggcggaaagccccagcggagaaagaacccccaggaaggactgtataacgaactccagaaagacaagatggccgaagcctacagcgagatcggcatgaagggcgagcggagaagaggcaagggccacgatggcctgtaccagggcctgagcaccgccaccaaggacacctatgacgccctgcacatgcaggccctgcctccaagaagggccaagcgatctggatctggagcaacaaacttctcactactcaaacaagcaggtgacgtggaggagaatcccgggcctactagtatggactggatttggcgcatccttttccttgtcggcgctgctaccggcgcgcattccttcgaagaagtgacactgaaagagtctggccccgctctggtcaagcccacacaaaccctgacactgacctgcaccttcagcggctttagcctgagcacatacggcatgggcgtcggctggattagacagcctcctggaaaagccctggaatggctggctaacatttggtgggacgacgacaagtattacaaccccagcctgaagaaccggctgaccatcagcaaggacaccagcaagaaccaggtggtgctgaccatgaccaacatggaccctgtggacaccgccacatattactgcgccagaatcggccccatcaagtaccccaccgctccttacagatacttcgacttctggggccagggcacaatggtcaccgttagctctacgcgtgagcagaaactgatctcggaagaggatctggggagcggcatccagaaccctgatcctgccgtgtaccagctgcgggatagcaagagcagcgacaagagcgtgtgtctgttcaccgacttcgacagccagaccaacgtgtcccagagcaaggactccgacgtgtacatcaccgataagaccgtgctggacatgcggagcatggacttcaagagcaactccgccgtggcctggtccaacaagtccgatttcgcctgcgccaacgccttcaacaacagcattatccccgaggacacattcttcccaagccccgagagcagctgcggtacccagagttttgggttgttggaccctaaattgtgctatctgttggacggaatcctgttcatttacggagtgatcctgaccgcattgttcctgaagagaggccggaagaagctgctgtacatcttcaagcagcctttcatgcggcccgtgcagaccacccaggaagaggacggctgctcctgccggttccccgaggaagaagaaggcggctgcgagctgcgggttaagttttccagatccgcagacgcacccgcttaccaacaagggcagaaccaactctacaatgaacttaatttggggcggagggaagagtacgacgttctggacaaaaggaggggacgagatcccgagatgggcggaaagcctcagcgaaggaagaatccgcaagaggggctttataacgaactccagaaagataaaatggcagaagcctatagtgagattgggatgaagggagaaaggaggaggggtaaaggtcacgatgggttgtaccaaggattgagcacagccactaaagatacctatgatgcgctccacatgcaggccctgccgccaaga

SEQ ID NO: 20319 - DNA, 2784 bp, synthetic construct
  source 1..2784: mol_type = other DNA
atggccttaccagtgaccgccttgctcctgccgctggccttgctgctccacgccgccaggccggacatccagatgacacagagccctagcagcctgtctgccagcgtgggagacagagtgaccatcacctgtctggcctccgaggacatctacaacaacctggcctggtatcagcagaagcctggcaaggcccctaagctgctgatctactacgccagctctctccaggatggcgtgcccagcagattttctggcagcggctctggcaccgactacaccctgacaatatccagcctccagcctgaggacttcgccacctactactgcctgcaagacagcgagtacccctggacatttctcgaggggaaaccaattcccaaccctcttctgggactggattcaaccggcagcggcgaggacctgaagaacgtgttcccacctgaggtggccgtgttcgagcctagcgaggccgagatcagccacacccagaaagccaccctcgtgtgcctggctaccggcttctaccccgaccatgtggaactgtcttggtgggtcaacggcaaagaggtgcacagcggcgtgtctaccgacccccagccactgaaagaacagcccgccctgaacgacagccggtactgcctgagcagcagactgagagtgtccgccaccttctggcagaacccccggaaccacttcagatgccaggtgcagttctacggcctgagcgagaacgacgagtggacccaggacagagccaagcccgtgacccagatcgtgtctgccgaagcctggggcagagccgattgcggatcccagagcttcggcctgctggaccccaagctgtgctacctgctggatggcatcctgttcatctacggcgtgatcctgaccgccctgttcctgaaacggggcagaaagaaactcctgtatatattcaaacaaccatttatgagaccagtacaaactactcaagaggaagatggctgtagctgccgatttccagaagaagaagaaggaggatgtgaactgagagtgaagttcagcagaagcgccgacgcccctgcctaccagcagggacagaaccaactgtacaacgagctgaacctgggcagacgggaagagtacgacgtgctggacaagcggagaggcagggaccctgagatgggcggaaagccccagcggagaaagaacccccaggaaggactgtataacgaactccagaaagacaagatggccgaagcctacagcgagatcggcatgaagggcgagcggagaagaggcaagggccacgatggcctgtaccagggcctgagcaccgccaccaaggacacctatgacgccctgcacatgcaggccctgcctccaagaagggccaagcgatctggatctggagcaacaaacttctcactactcaaacaagcaggtgacgtggaggagaatcccgggcctactagtatggactggatttggcgcatccttttccttgtcggcgctgctaccggcgcgcattccttcgaagaagtgacactgaaagagtctggccccgctctggtcaagcccacacaaaccctgacactgacctgcaccttcagcggctttagcctgagcacatacggcatgggcgtcggctggattagacagcctcctggaaaagccctggaatggctggctaacatttggtgggacgacgacaagtattacaaccccagcctgaagaaccggctgaccatcagcaaggacaccagcaagaaccaggtggtgctgaccatgaccaacatggaccctgtggacaccgccacatattactgcgccagaatcggccccatcaagtaccccaccgctccttacagatacttcgacttctggggccagggcacaatggtcaccgttagctctacgcgtgagcagaaactgatctcggaagaggatctggggagcggcatccagaaccctgatcctgccgtgtaccagctgcgggatagcaagagcagcgacaagagcgtgtgtctgttcaccgacttcgacagccagaccaacgtgtcccagagcaaggactccgacgtgtacatcaccgataagaccgtgctggacatgcggagcatggacttcaagagcaactccgccgtggcctggtccaacaagtccgatttcgcctgcgccaacgccttcaacaacagcattatccccgaggacacattcttcccaagccccgagagcagctgcggtacccagagttttgggttgttggaccctaaattgtgctatctgttggacggaatcctgttcatttacggagtgatcctgaccgcattgttcctgaagagaggccggaagaagctgctgtacatcttcaagcagcctttcatgcggcccgtgcagaccacccaggaagaggacggctgctcctgccggttccccgaggaagaagaaggcggctgcgagctgcgggttaagttttccagatccgcagacgcacccgcttaccaacaagggcagaaccaactctacaatgaacttaatttggggcggagggaagagtacgacgttctggacaaaaggaggggacgagatcccgagatgggcggaaagcctcagcgaaggaagaatccgcaagaggggctttataacgaactccagaaagataaaatggcagaagcctatagtgagattgggatgaagggagaaaggaggaggggtaaaggtcacgatgggttgtaccaaggattgagcacagccactaaagatacctatgatgcgctccacatgcaggccctgccgccaaga

SEQ ID NO: 20320 - DNA, 2457 bp, synthetic construct
  source 1..2457: mol_type = other DNA
atggccttaccagtgaccgccttgctcctgccgctggccttgctgctccacgccgccaggccggacatccagatgacacagagccctagcagcctgtctgccagcgtgggagacagagtgaccatcacctgtctggcctccgaggacatctacaacaacctggcctggtatcagcagaagcctggcaaggcccctaagctgctgatctactacgccagctctctccaggatggcgtgcccagcagattttctggcagcggctctggcaccgactacaccctgacaatatccagcctccagcctgaggacttcgccacctactactgcctgcaagacagcgagtacccctggacatttctcgagcagagcttcggcctgctggaccccaagctgtgctacctgctggatggcatcctgttcatctacggcgtgatcctgaccgccctgttcctgagagtgaagttcagcagaagcgccgacgcccctgcctaccagcagggacagaaccaactgtacaacgagctgaacctgggcagacgggaagagtacgacgtgctggacaagcggagaggcagggaccctgagatgggcggaaagccccagcggagaaagaacccccaggaaggactgtataacgaactccagaaagacaagatggccgaagcctacagcgagatcggcatgaagggcgagcggagaagaggcaagggccacgatggcctgtaccagggcctgagcaccgccaccaaggacacctatgacgccctgcacatgcaggccctgcctccaagaagggccaagcgatctggatctggagcaacaaacttctcactactcaaacaagcaggtgacgtggaggagaatcccgggcctactagtatggactggatttggcgcatccttttccttgtcggcgctgctaccggcgcgcattccttcgaagaagtgacactgaaagagtctggccccgctctggtcaagcccacacaaaccctgacactgacctgcaccttcagcggctttagcctgagcacatacggcatgggcgtcggctggattagacagcctcctggaaaagccctggaatggctggctaacatttggtgggacgacgacaagtattacaaccccagcctgaagaaccggctgaccatcagcaaggacaccagcaagaaccaggtggtgctgaccatgaccaacatggaccctgtggacaccgccacatattactgcgccagaatcggccccatcaagtaccccaccgctccttacagatacttcgacttctggggccagggcacaatggtcaccgttagctctacgcgtcagagttttgggttgttggaccctaaattgtgctatctgttggacggaatcctgttcatttacggagtgatcctgaccgcattgttcctgcgggttaagttttccagatccgcagacgcacccgcttaccaacaagggcagaaccaactctacaatgaacttaatttggggcggagggaagagtacgacgttctggacaaaaggaggggacgagatcccgagatgggcggaaagcctcagcgaaggaagaatccgcaagaggggctttataacgaactccagaaagataaaatggcagaagcctatagtgagattgggatgaagggagaaaggaggaggggtaaaggtcacgatgggttgtaccaaggattgagcacagccactaaagatacctatgatgcgctccacatgcaggccctgccgccaagacgcgccaagagaagcggatctggcgtgaagcagaccctgaatttcgacctgctgaagctggctggcgacgtggaatccaacccaggcccttctagaggccatatgaccgagtacaagcccacggtgcgcctcgccacccgcgacgacgtccccagggccgtacgcaccctcgccgccgcgttcgccgactaccccgccacgcgccacaccgtcgatccggaccgccacatcgagcgggtcaccgagctgcaagaactcttcctcacgcgcgtcgggctcgacatcggcaaggtgtgggtcgcggacgacggcgccgcggtggcggtctggaccacgccggagagcgtcgaagcgggggcggtgttcgccgagatcggcccgcgcatggccgagttgagcggttcccggctggccgcgcagcaacagatggaaggcctcctggcgccgcaccggcccaaggagcccgcgtggttcctggccaccgtcggcgtctcgcccgaccaccagggcaagggtctgggcagcgccgtcgtgctccccggagtggaggcggccgagcgcgccggggtgcccgccttcctggagacctccgcgccccgcaacctccccttctacgagcggctcggcttcaccgtcaccgccgacgtcgaggtgcccgaaggaccgcgcacctggtgcatgacccgcaagcccggtgcctga

SEQ ID NO: 20321 - DNA, 1929 bp, synthetic construct
  source 1..1929: mol_type = other DNA
atggccttaccagtgaccgccttgctcctgccgctggccttgctgctccacgccgccaggccggacatccagatgacacagagccctagcagcctgtctgccagcgtgggagacagagtgaccatcacctgtctggcctccgaggacatctacaacaacctggcctggtatcagcagaagcctggcaaggcccctaagctgctgatctactacgccagctctctccaggatggcgtgcccagcagattttctggcagcggctctggcaccgactacaccctgacaatatccagcctccagcctgaggacttcgccacctactactgcctgcaagacagcgagtacccctggacatttctcgagggacagcctaaggccaatcctaccgtgacactgttccctccaagcagcgaagaactccaggccaacaaggccacacttgtgtgcctgatctccgacttctaccctggggctgtgacagtggcttggaaggccgatggatctcctgtgaaagccggcgtggaaaccaccaagccatccaagcagagcaacaacaaatacgccgccagctcctacctgagcctgacacctgagcagtggaagtcccacagatcctacagctgccaagtgacccacgaaggcagcaccgtggaaaagacagtggcccctacagagtgcagccccatcaagaccgatgtgattacaatggaccccaaggacaactgctccaaggacgccaacgataccctgctgctccagctgaccaacaccagcgcctactacatgtacttgttgctgctgctgaagtccgtggtgtacttcgccatcatcacatgctgcctgctgcggagaaccgccttctgctgcaacggcgagaagtctagggccaagcgatctggatctggagcaacaaacttctcactactcaaacaagcaggtgacgtggaggagaatcccgggcctactagtatggactggatttggcgcatccttttccttgtcggcgctgctaccggcgcgcattccttcgaagaagtgacactgaaagagtctggccccgctctggtcaagcccacacaaaccctgacactgacctgcaccttcagcggctttagcctgagcacatacggcatgggcgtcggctggattagacagcctcctggaaaagccctggaatggctggctaacatttggtgggacgacgacaagtattacaaccccagcctgaagaaccggctgaccatcagcaaggacaccagcaagaaccaggtggtgctgaccatgaccaacatggaccctgtggacaccgccacatattactgcgccagaatcggccccatcaagtaccccaccgctccttacagatacttcgacttctggggccagggcacaatggtcaccgttagctctacgcgtgcctctacaaagggaccctccgtgtttcctctggctcccagcagcaagtctacaagcggaggaacagccgctctgggctgcctggtcaaggattactttcccgagcctgtgaccgtgtcctggaatagcggagcactgacaagcggcgtgcacacctttccagccgtgctgcaaagcagcggcctgtactctctgagcagcgtggtcacagtgcctagctctagcctgggcacccagacctacatctgcaatgtgaaccacaagcctagcaacaccaaggtggacaagagagtggaacccaagagctgtgaagtgaaaaccgactccaccgaccacgtgaagcccaaagagacagagaacaccaagcagcccagcaagagctgccacaagcccaaggccatcgtgcacaccgagaaagtgaacatgatgagcctgaccgtgctgggcctgcggatgctgttcgccaaaaccgtggccgtgaacttcctgctgaccgccaagctgttcttcctc

SEQ ID NO: 20322 - DNA, 1863 bp, synthetic construct
  source 1..1863: mol_type = other DNA
atggccttaccagtgaccgccttgctcctgccgctggccttgctgctccacgccgccaggccggacatccagatgacacagagccctagcagcctgtctgccagcgtgggagacagagtgaccatcacctgtctggcctccgaggacatctacaacaacctggcctggtatcagcagaagcctggcaaggcccctaagctgctgatctactacgccagctctctccaggatggcgtgcccagcagattttctggcagcggctctggcaccgactacaccctgacaatatccagcctccagcctgaggacttcgccacctactactgcctgcaagacagcgagtacccctggacatttctcgagggacagcctaaggccaatcctaccgtgacactgttccctccaagcagcgaagaactccaggccaacaaggccacacttgtgtgcctgatctccgacttctaccctggggctgtgacagtggcttggaaggccgatggatctcctgtgaaagccggcgtggaaaccaccaagccatccaagcagagcaacaacaaatacgccgccagctcctacctgagcctgacacctgagcagtggaagtcccacagatcctacagctgccaagtgacccacgaaggcagcaccgtggaaaagacagtggcccctacagagtgcagcggcagagccgattgcggcatcaccagcgccagctaccaccagggcgtgctgagcgccaccatcctgtacgagatcctgctgggcaaggccaccctgtacgccgtgctggtgtctgccctggtgctgatggctatggtcaagcggaaggacagccggggaagggccaagcgatctggatctggagcaacaaacttctcactactcaaacaagcaggtgacgtggaggagaatcccgggcctactagtatggactggatttggcgcatccttttccttgtcggcgctgctaccggcgcgcattccttcgaagaagtgacactgaaagagtctggccccgctctggtcaagcccacacaaaccctgacactgacctgcaccttcagcggctttagcctgagcacatacggcatgggcgtcggctggattagacagcctcctggaaaagccctggaatggctggctaacatttggtgggacgacgacaagtattacaaccccagcctgaagaaccggctgaccatcagcaaggacaccagcaagaaccaggtggtgctgaccatgaccaacatggaccctgtggacaccgccacatattactgcgccagaatcggccccatcaagtaccccaccgctccttacagatacttcgacttctggggccagggcacaatggtcaccgttagctctacgcgtgcctctacaaagggaccctccgtgtttcctctggctcccagcagcaagtctacaagcggaggaacagccgctctgggctgcctggtcaaggattactttcccgagcctgtgaccgtgtcctggaatagcggagcactgacaagcggcgtgcacacctttccagccgtgctgcaaagcagcggcctgtactctctgagcagcgtggtcacagtgcctagctctagcctgggcacccagacctacatctgcaatgtgaaccacaagcctagcaacaccaaggtggacaagagagtggaacccaagagctgtatccccgaggacacattcttcccaagcagcgacgtgccctgcgacgtgaagctggtggaaaagagcttcgagacagacaccaacctgaacttccagaacctgagcgtgatcggcttcagaatcctgctgctgaaagtggccggctttaacctgctgatgaccctgcggctgtggtccagc

SEQ ID NO: 20323 - DNA, 1863 bp, synthetic construct
  source 1..1863: mol_type = other DNA
atggccttaccagtgaccgccttgctcctgccgctggccttgctgctccacgccgccaggccggacatccagatgacacagagccctagcagcctgtctgccagcgtgggagacagagtgaccatcacctgtctggcctccgaggacatctacaacaacctggcctggtatcagcagaagcctggcaaggcccctaagctgctgatctactacgccagctctctccaggatggcgtgcccagcagattttctggcagcggctctggcaccgactacaccctgacaatatccagcctccagcctgaggacttcgccacctactactgcctgcaagacagcgagtacccctggacatttctcgagggacagcctaaggccaatcctaccgtgacactgttccctccaagcagcgaagaactccaggccaacaaggccacacttgtgtgcctgatctccgacttctaccctggggctgtgacagtggcttggaaggccgatggatctcctgtgaaagccggcgtggaaaccaccaagccatccaagcagagcaacaacaaatacgccgccagctcctacctgagcctgacacctgagcagtggaagtcccacagatcctacagctgccaagtgacccacgaaggcagcaccgtggaaaagacagtggcccctacagagtgcagcggcagagccgattgcggctttaccagcgagagctaccagcagggcgtgctgagcgccaccatcctgtacgagatcctgctgggcaaggccaccctgtacgccgtgctggtgtctgccctggtgctgatggctatggtcaagcggaaggacagccggggaagggccaagcgatctggatctggagcaacaaacttctcactactcaaacaagcaggtgacgtggaggagaatcccgggcctactagtatggactggatttggcgcatccttttccttgtcggcgctgctaccggcgcgcattccttcgaagaagtgacactgaaagagtctggccccgctctggtcaagcccacacaaaccctgacactgacctgcaccttcagcggctttagcctgagcacatacggcatgggcgtcggctggattagacagcctcctggaaaagccctggaatggctggctaacatttggtgggacgacgacaagtattacaaccccagcctgaagaaccggctgaccatcagcaaggacaccagcaagaaccaggtggtgctgaccatgaccaacatggaccctgtggacaccgccacatattactgcgccagaatcggccccatcaagtaccccaccgctccttacagatacttcgacttctggggccagggcacaatggtcaccgttagctctacgcgtgcctctacaaagggaccctccgtgtttcctctggctcccagcagcaagtctacaagcggaggaacagccgctctgggctgcctggtcaaggattactttcccgagcctgtgaccgtgtcctggaatagcggagcactgacaagcggcgtgcacacctttccagccgtgctgcaaagcagcggcctgtactctctgagcagcgtggtcacagtgcctagctctagcctgggcacccagacctacatctgcaatgtgaaccacaagcctagcaacaccaaggtggacaagagagtggaacccaagagctgtatccccgaggacacattcttcccaagccccgagagcagctgcgacgtgaagctggtggaaaagagcttcgagacagacaccaacctgaacttccagaacctgagcgtgatcggcttcagaatcctgctgctgaaagtggccggctttaacctgctgatgaccctgcggctgtggtccagc

SEQ ID NO: 20324 - DNA, 1341 bp, synthetic construct
  source 1..1341: mol_type = other DNA
atggccttaccagtgaccgccttgctcctgccgctggccttgctgctccacgccgccaggccggacatccagatgacacagagccctagcagcctgtctgccagcgtgggagacagagtgaccatcacctgtctggcctccgaggacatctacaacaacctggcctggtatcagcagaagcctggcaaggcccctaagctgctgatctactacgccagctctctccaggatggcgtgcccagcagattttctggcagcggctctggcaccgactacaccctgacaatatccagcctccagcctgaggacttcgccacctactactgcctgcaagacagcgagtacccctggacatttggcggaggcggaagtggaggcggaggatctggcggcggaggctctgaagtgacactgaaagagtctggccccgctctggtcaagcccacacaaaccctgacactgacctgcaccttcagcggctttagcctgagcacatacggcatgggcgtcggctggattagacagcctcctggaaaagccctggaatggctggctaacatttggtgggacgacgacaagtattacaaccccagcctgaagaaccggctgaccatcagcaaggacaccagcaagaaccaggtggtgctgaccatgaccaacatggaccctgtggacaccgccacatattactgcgccagaatcggccccatcaagtaccccaccgctccttacagatacttcgacttctggggccagggcacaatggtcaccgttagctctacgcgtgacggtaacgaggagatgggaggaatcactcaaaccccttacaaagtctcaatttcaggaacaactgttatccttacatgtccccagtatcctggcagcgagatcctttggcagcataacgacaagaatatagggggagatgaagacgataagaatatcggatctgacgaggatcacttgagcctgaaagagttctccgagcttgaacaaagcggatattatgtgtgctatccgcgcgggtcaaagccggaagacgctaacttttacctttatctccgagccagagtgtgcgaaaattgcatggaaatggacgttatgtccgttgctacaatagttatcgtagatatatgcatcacgggtggactgcttctgctggtttattattggtccaagaatagaaaggccaaagctaaacccgtgaccagaggcgctggcgcaggcggaaggcaaaggggacaaaacaaagaacggccaccaccagtgccaaatccagattatgagcctattcggaaaggacagagggacctgtactctggcctgaatcagagaagaatc

SEQ ID NO: 20325 - DNA, 1236 bp, synthetic construct
  source 1..1236: mol_type = other DNA
atggccttaccagtgaccgccttgctcctgccgctggccttgctgctccacgccgccaggccggacatccagatgacacagagccctagcagcctgtctgccagcgtgggagacagagtgaccatcacctgtctggcctccgaggacatctacaacaacctggcctggtatcagcagaagcctggcaaggcccctaagctgctgatctactacgccagctctctccaggatggcgtgcccagcagattttctggcagcggctctggcaccgactacaccctgacaatatccagcctccagcctgaggacttcgccacctactactgcctgcaagacagcgagtacccctggacatttggcggaggcggaagtggaggcggaggatctggcggcggaggctctgaagtgacactgaaagagtctggccccgctctggtcaagcccacacaaaccctgacactgacctgcaccttcagcggctttagcctgagcacatacggcatgggcgtcggctggattagacagcctcctggaaaagccctggaatggctggctaacatttggtgggacgacgacaagtattacaaccccagcctgaagaaccggctgaccatcagcaaggacaccagcaagaaccaggtggtgctgaccatgaccaacatggaccctgtggacaccgccacatattactgcgccagaatcggccccatcaagtaccccaccgctccttacagatacttcgacttctggggccagggcacaatggtcaccgttagctctacgcgtttcaagatccccatcgaggaactggaagatcgggtgttcgtgaactgcaacacctctatcacctgggtggaaggcaccgtgggaacactgctgagcgacatcaccagactggacctcggcaagcggattctggaccctcggggcatctacagatgcaacggcaccgacatctacaaggacaaagaaagcaccgtgcaggtccactacagaatgtgccagtcctgcgtggaactggaccctgctacagtggccggcatcatcgtgaccgatgtgatcgctactctgctgctggctctgggagtgttctgcttcgccggacacgaaacaggcagactgtctggcgctgccgatacacaggccctgctgagaaacgaccaagtgtatcagcccctgcgcgacagagatgatgcccagtattctcacctcggcggcaactgggctagaaacaag

SEQ ID NO: 20326 - DNA, 1266 bp, synthetic construct
  source 1..1266: mol_type = other DNA
atggccttaccagtgaccgccttgctcctgccgctggccttgctgctccacgccgccaggccggacatccagatgacacagagccctagcagcctgtctgccagcgtgggagacagagtgaccatcacctgtctggcctccgaggacatctacaacaacctggcctggtatcagcagaagcctggcaaggcccctaagctgctgatctactacgccagctctctccaggatggcgtgcccagcagattttctggcagcggctctggcaccgactacaccctgacaatatccagcctccagcctgaggacttcgccacctactactgcctgcaagacagcgagtacccctggacatttggcggaggcggaagtggaggcggaggatctggcggcggaggctctgaagtgacactgaaagagtctggccccgctctggtcaagcccacacaaaccctgacactgacctgcaccttcagcggctttagcctgagcacatacggcatgggcgtcggctggattagacagcctcctggaaaagccctggaatggctggctaacatttggtgggacgacgacaagtattacaaccccagcctgaagaaccggctgaccatcagcaaggacaccagcaagaaccaggtggtgctgaccatgaccaacatggaccctgtggacaccgccacatattactgcgccagaatcggccccatcaagtaccccaccgctccttacagatacttcgacttctggggccagggcacaatggtcaccgttagctctacgcgtcagagcatcaagggcaaccacctggtcaaggtgtacgactaccaagaggacggcagcgtgctgctgacatgtgatgccgaggccaagaacatcacctggtttaaggacggcaagatgatcggcttcctgaccgaggacaagaagaagtggaacctgggcagcaacgctaaggaccccagaggcatgtatcagtgcaagggcagccagaacaagagcaagcccctccaggtgtactaccggatgtgccagaactgcatcgagctgaacgccgctaccatcagcggctttctgttcgccgagatcgtgtccatcttcgtgctggccgtgggcgtgtactttatcgctggacaggatggcgtgcggcagagcagagcttccgataagcaaaccctgctgcctaacgaccagctgtaccagcctctgaaggacagagaggacgaccagtacagccacctccagggcaatcagctgagaagaaac

SEQ ID NO: 20327 - DNA, 1215 bp, synthetic construct
  source 1..1215: mol_type = other DNA
atggccttaccagtgaccgccttgctcctgccgctggccttgctgctccacgccgccaggccggacatccagatgacacagagccctagcagcctgtctgccagcgtgggagacagagtgaccatcacctgtctggcctccgaggacatctacaacaacctggcctggtatcagcagaagcctggcaaggcccctaagctgctgatctactacgccagctctctccaggatggcgtgcccagcagattttctggcagcggctctggcaccgactacaccctgacaatatccagcctccagcctgaggacttcgccacctactactgcctgcaagacagcgagtacccctggacatttggcggaggcggaagtggaggcggaggatctggcggcggaggctctgaagtgacactgaaagagtctggccccgctctggtcaagcccacacaaaccctgacactgacctgcaccttcagcggctttagcctgagcacatacggcatgggcgtcggctggattagacagcctcctggaaaagccctggaatggctggctaacatttggtgggacgacgacaagtattacaaccccagcctgaagaaccggctgaccatcagcaaggacaccagcaagaaccaggtggtgctgaccatgaccaacatggaccctgtggacaccgccacatattactgcgccagaatcggccccatcaagtaccccaccgctccttacagatacttcgacttctggggccagggcacaatggtcaccgttagctctacgcgtcagagttttgggttgttggaccctaaattgtgctatctgttggacggaatcctgttcatttacggagtgatcctgaccgcattgttcctgcgggttaagttttccagatccgcagacgcacccgcttaccaacaagggcagaaccaactctacaatgaacttaatttggggcggagggaagagtacgacgttctggacaaaaggaggggacgagatcccgagatgggcggaaagcctcagcgaaggaagaatccgcaagaggggctttataacgaactccagaaagataaaatggcagaagcctatagtgagattgggatgaagggagaaaggaggaggggtaaaggtcacgatgggttgtaccaaggattgagcacagccactaaagatacctatgatgcgctccacatgcaggccctgccgccaaga

SEQ ID NO: 20328 - DNA, 1341 bp, synthetic construct
  source 1..1341: mol_type = other DNA
atggccttaccagtgaccgccttgctcctgccgctggccttgctgctccacgccgccaggccggaagtgacactgaaagagtctggccccgctctggtcaagcccacacaaaccctgacactgacctgcaccttcagcggctttagcctgagcacatacggcatgggcgtcggctggattagacagcctcctggaaaagccctggaatggctggctaacatttggtgggacgacgacaagtattacaaccccagcctgaagaaccggctgaccatcagcaaggacaccagcaagaaccaggtggtgctgaccatgaccaacatggaccctgtggacaccgccacatattactgcgccagaatcggccccatcaagtaccccaccgctccttacagatacttcgacttctggggccagggcacaatggtcaccgttagctctggcggaggcggaagtggaggcggaggatctggcggcggaggctctgacatccagatgacacagagccctagcagcctgtctgccagcgtgggagacagagtgaccatcacctgtctggcctccgaggacatctacaacaacctggcctggtatcagcagaagcctggcaaggcccctaagctgctgatctactacgccagctctctccaggatggcgtgcccagcagattttctggcagcggctctggcaccgactacaccctgacaatatccagcctccagcctgaggacttcgccacctactactgcctgcaagacagcgagtacccctggacatttacgcgtgacggtaacgaggagatgggaggaatcactcaaaccccttacaaagtctcaatttcaggaacaactgttatccttacatgtccccagtatcctggcagcgagatcctttggcagcataacgacaagaatatagggggagatgaagacgataagaatatcggatctgacgaggatcacttgagcctgaaagagttctccgagcttgaacaaagcggatattatgtgtgctatccgcgcgggtcaaagccggaagacgctaacttttacctttatctccgagccagagtgtgcgaaaattgcatggaaatggacgttatgtccgttgctacaatagttatcgtagatatatgcatcacgggtggactgcttctgctggtttattattggtccaagaatagaaaggccaaagctaaacccgtgaccagaggcgctggcgcaggcggaaggcaaaggggacaaaacaaagaacggccaccaccagtgccaaatccagattatgagcctattcggaaaggacagagggacctgtactctggcctgaatcagagaagaatc

SEQ ID NO: 20329 - DNA, 1236 bp, synthetic construct
  source 1..1236: mol_type = other DNA
atggccttaccagtgaccgccttgctcctgccgctggccttgctgctccacgccgccaggccggaagtgacactgaaagagtctggccccgctctggtcaagcccacacaaaccctgacactgacctgcaccttcagcggctttagcctgagcacatacggcatgggcgtcggctggattagacagcctcctggaaaagccctggaatggctggctaacatttggtgggacgacgacaagtattacaaccccagcctgaagaaccggctgaccatcagcaaggacaccagcaagaaccaggtggtgctgaccatgaccaacatggaccctgtggacaccgccacatattactgcgccagaatcggccccatcaagtaccccaccgctccttacagatacttcgacttctggggccagggcacaatggtcaccgttagctctggcggaggcggaagtggaggcggaggatctggcggcggaggctctgacatccagatgacacagagccctagcagcctgtctgccagcgtgggagacagagtgaccatcacctgtctggcctccgaggacatctacaacaacctggcctggtatcagcagaagcctggcaaggcccctaagctgctgatctactacgccagctctctccaggatggcgtgcccagcagattttctggcagcggctctggcaccgactacaccctgacaatatccagcctccagcctgaggacttcgccacctactactgcctgcaagacagcgagtacccctggacatttacgcgtttcaagatccccatcgaggaactggaagatcgggtgttcgtgaactgcaacacctctatcacctgggtggaaggcaccgtgggaacactgctgagcgacatcaccagactggacctcggcaagcggattctggaccctcggggcatctacagatgcaacggcaccgacatctacaaggacaaagaaagcaccgtgcaggtccactacagaatgtgccagtcctgcgtggaactggaccctgctacagtggccggcatcatcgtgaccgatgtgatcgctactctgctgctggctctgggagtgttctgcttcgccggacacgaaacaggcagactgtctggcgctgccgatacacaggccctgctgagaaacgaccaagtgtatcagcccctgcgcgacagagatgatgcccagtattctcacctcggcggcaactgggctagaaacaag

SEQ ID NO: 20330 - DNA, 1266 bp, synthetic construct
  source 1..1266: mol_type = other DNA
atggccttaccagtgaccgccttgctcctgccgctggccttgctgctccacgccgccaggccggaagtgacactgaaagagtctggccccgctctggtcaagcccacacaaaccctgacactgacctgcaccttcagcggctttagcctgagcacatacggcatgggcgtcggctggattagacagcctcctggaaaagccctggaatggctggctaacatttggtgggacgacgacaagtattacaaccccagcctgaagaaccggctgaccatcagcaaggacaccagcaagaaccaggtggtgctgaccatgaccaacatggaccctgtggacaccgccacatattactgcgccagaatcggccccatcaagtaccccaccgctccttacagatacttcgacttctggggccagggcacaatggtcaccgttagctctggcggaggcggaagtggaggcggaggatctggcggcggaggctctgacatccagatgacacagagccctagcagcctgtctgccagcgtgggagacagagtgaccatcacctgtctggcctccgaggacatctacaacaacctggcctggtatcagcagaagcctggcaaggcccctaagctgctgatctactacgccagctctctccaggatggcgtgcccagcagattttctggcagcggctctggcaccgactacaccctgacaatatccagcctccagcctgaggacttcgccacctactactgcctgcaagacagcgagtacccctggacatttacgcgtcagagcatcaagggcaaccacctggtcaaggtgtacgactaccaagaggacggcagcgtgctgctgacatgtgatgccgaggccaagaacatcacctggtttaaggacggcaagatgatcggcttcctgaccgaggacaagaagaagtggaacctgggcagcaacgctaaggaccccagaggcatgtatcagtgcaagggcagccagaacaagagcaagcccctccaggtgtactaccggatgtgccagaactgcatcgagctgaacgccgctaccatcagcggctttctgttcgccgagatcgtgtccatcttcgtgctggccgtgggcgtgtactttatcgctggacaggatggcgtgcggcagagcagagcttccgataagcaaaccctgctgcctaacgaccagctgtaccagcctctgaaggacagagaggacgaccagtacagccacctccagggcaatcagctgagaagaaac

SEQ ID NO: 20331 - DNA, 1215 bp, synthetic construct
  source 1..1215: mol_type = other DNA
atggccttaccagtgaccgccttgctcctgccgctggccttgctgctccacgccgccaggccggaagtgacactgaaagagtctggccccgctctggtcaagcccacacaaaccctgacactgacctgcaccttcagcggctttagcctgagcacatacggcatgggcgtcggctggattagacagcctcctggaaaagccctggaatggctggctaacatttggtgggacgacgacaagtattacaaccccagcctgaagaaccggctgaccatcagcaaggacaccagcaagaaccaggtggtgctgaccatgaccaacatggaccctgtggacaccgccacatattactgcgccagaatcggccccatcaagtaccccaccgctccttacagatacttcgacttctggggccagggcacaatggtcaccgttagctctggcggaggcggaagtggaggcggaggatctggcggcggaggctctgacatccagatgacacagagccctagcagcctgtctgccagcgtgggagacagagtgaccatcacctgtctggcctccgaggacatctacaacaacctggcctggtatcagcagaagcctggcaaggcccctaagctgctgatctactacgccagctctctccaggatggcgtgcccagcagattttctggcagcggctctggcaccgactacaccctgacaatatccagcctccagcctgaggacttcgccacctactactgcctgcaagacagcgagtacccctggacatttacgcgtcagagttttgggttgttggaccctaaattgtgctatctgttggacggaatcctgttcatttacggagtgatcctgaccgcattgttcctgcgggttaagttttccagatccgcagacgcacccgcttaccaacaagggcagaaccaactctacaatgaacttaatttggggcggagggaagagtacgacgttctggacaaaaggaggggacgagatcccgagatgggcggaaagcctcagcgaaggaagaatccgcaagaggggctttataacgaactccagaaagataaaatggcagaagcctatagtgagattgggatgaagggagaaaggaggaggggtaaaggtcacgatgggttgtaccaaggattgagcacagccactaaagatacctatgatgcgctccacatgcaggccctgccgccaaga

SEQ ID NO: 20332 - DNA, 1500 bp, synthetic construct
  source 1..1500: mol_type = other DNA
atggccttaccagtgaccgccttgctcctgccgctggccttgctgctccacgccgccaggccggacatccagatgacacagagccctagcagcctgtctgccagcgtgggagacagagtgaccatcacctgtctggcctccgaggacatctacaacaacctggcctggtatcagcagaagcctggcaaggcccctaagctgctgatctactacgccagctctctccaggatggcgtgcccagcagattttctggcagcggctctggcaccgactacaccctgacaatatccagcctccagcctgaggacttcgccacctactactgcctgcaagacagcgagtacccctggacatttggcggaggcggaagtggaggcggaggatctggcggcggaggctctgaagtgacactgaaagagtctggccccgctctggtcaagcccacacaaaccctgacactgacctgcaccttcagcggctttagcctgagcacatacggcatgggcgtcggctggattagacagcctcctggaaaagccctggaatggctggctaacatttggtgggacgacgacaagtattacaaccccagcctgaagaaccggctgaccatcagcaaggacaccagcaagaaccaggtggtgctgaccatgaccaacatggaccctgtggacaccgccacatattactgcgccagaatcggccccatcaagtaccccaccgctccttacagatacttcgacttctggggccagggcacaatggtcaccgttagctctacgcgtggaatgaggactgaggatcttcccaaagctgtcgtctttctcgaaccccaatggtatcgggtgctcgaaaaagactctgtgacactgaaatgccaaggggcctactctcccgaggacaactccacacagtggtttcataatgagtccctcatcagctctcaggccagctcttatttcattgatgccgctacagtggacgactccggcgagtatcggtgtcagaccaatctgtctacactgtctgaccccgtgcagcttgaggtccacattggatggttgctcttgcaagccccacgctgggttttcaaagaggaagatccaatccatctgcggtgccacagctggaaaaacaccgctctccacaaagtcacatacctgcaaaatggcaaaggacgcaaatacttccatcacaattccgatttttacattccgaaggctaccctgaaagacagcggcagctatttctgccggggactcgtcggctccaagaatgtgtcctccgaaaccgtgaatatcacgattacccaaggactggctgtgcctacaatctctagcttctttccgcctggataccaagtctccttctgtcttgtgatggtcctcctgtttgctgtggacacaggactgtacttttccgtgaaaacgaacatccgcagctccacacgcgattggaaagatcacaagtttaaatggcgcaaagatccccaggacaag

SEQ ID NO: 20333 - DNA, 2349 bp, synthetic construct
  source 1..2349: mol_type = other DNA
atggccttaccagtgaccgccttgctcctgccgctggccttgctgctccacgccgccaggccggacatccagatgacacagagccctagcagcctgtctgccagcgtgggagacagagtgaccatcacctgtctggcctccgaggacatctacaacaacctggcctggtatcagcagaagcctggcaaggcccctaagctgctgatctactacgccagctctctccaggatggcgtgcccagcagattttctggcagcggctctggcaccgactacaccctgacaatatccagcctccagcctgaggacttcgccacctactactgcctgcaagacagcgagtacccctggacatttggcggaggcggaagtggaggcggaggatctggcggcggaggctctgaagtgacactgaaagagtctggccccgctctggtcaagcccacacaaaccctgacactgacctgcaccttcagcggctttagcctgagcacatacggcatgggcgtcggctggattagacagcctcctggaaaagccctggaatggctggctaacatttggtgggacgacgacaagtattacaaccccagcctgaagaaccggctgaccatcagcaaggacaccagcaagaaccaggtggtgctgaccatgaccaacatggaccctgtggacaccgccacatattactgcgccagaatcggccccatcaagtaccccaccgctccttacagatacttcgacttctggggccagggcacaatggtcaccgttagctctacgcgtggaggctctggacaacaacagaccctgcctaaaccattcatctgggctgaaccccactttatggttccgaaagagaaacaagtcacgatttgttgccaagggaattacggggccgtcgagtatcagctccactttgagggctccctgtttgctgtggatcggcccaagccacctgaaagaatcaacaaagtccaattctatattcctgatatgaactcccgcatggcaggccagtattcatgtatctaccgcgtgggagaactttggagtgaaccctctaacctgctggacctcgtcgtgacagagatgtatgatacacccacactgtctgtgcaccctgggccagaagttatcagcggagaaaaagttaccttttattgccgcctcgataccgctacctctatgttcctcttgctgaaagagggccgcagctctcacgtgcagcgaggctacggaaaggtccaagctgagtttcctctcggccccgtgaccaccgctcacaggggcacatatagatgttttggctcttataacaatcatgcctggtcattcccatccgagcctgtgaaactgctggtcacaggcgatattgagaatacctctctggccccagaagatcctacattccccgccgacacatggggaacatatctgctgacaaccgaaaccgggctgcaaaaggaccatgctctgtgggatcataccgctcagaatctgcttcggatggggcttgcattcctggtcctggtggctcttgtctggtttctggtcgaggactggctgtcccggaagagaaccagagaaagagcttccagggccagcacctgggaaggcagacgcagactgaatactcagaccctgcgcgccaagagaagcggatctggcgtgaagcagaccctgaatttcgacctgctgaagctggctggcgacgtggaatccaacccaggcccttctagaggccatatgaccgagtacaagcccacggtgcgcctcgccacccgcgacgacgtccccagggccgtacgcaccctcgccgccgcgttcgccgactaccccgccacgcgccacaccgtcgatccggaccgccacatcgagcgggtcaccgagctgcaagaactcttcctcacgcgcgtcgggctcgacatcggcaaggtgtgggtcgcggacgacggcgccgcggtggcggtctggaccacgccggagagcgtcgaagcgggggcggtgttcgccgagatcggcccgcgcatggccgagttgagcggttcccggctggccgcgcagcaacagatggaaggcctcctggcgccgcaccggcccaaggagcccgcgtggttcctggccaccgtcggcgtctcgcccgaccaccagggcaagggtctgggcagcgccgtcgtgctccccggagtggaggcggccgagcgcgccggggtgcccgccttcctggagacctccgcgccccgcaacctccccttctacgagcggctcggcttcaccgtcaccgccgacgtcgaggtgcccgaaggaccgcgcacctggtgcatgacccgcaagcccggtgcctga

SEQ ID NO: 20334 - DNA, 1848 bp, synthetic construct
  source 1..1848: mol_type = other DNA
atggccttaccagtgaccgccttgctcctgccgctggccttgctgctccacgccgccaggccggacatccagatgacacagagccctagcagcctgtctgccagcgtgggagacagagtgaccatcacctgtctggcctccgaggacatctacaacaacctggcctggtatcagcagaagcctggcaaggcccctaagctgctgatctactacgccagctctctccaggatggcgtgcccagcagattttctggcagcggctctggcaccgactacaccctgacaatatccagcctccagcctgaggacttcgccacctactactgcctgcaagacagcgagtacccctggacatttggcggaggcggaagtggaggcggaggatctggcggcggaggctctgaagtgacactgaaagagtctggccccgctctggtcaagcccacacaaaccctgacactgacctgcaccttcagcggctttagcctgagcacatacggcatgggcgtcggctggattagacagcctcctggaaaagccctggaatggctggctaacatttggtgggacgacgacaagtattacaaccccagcctgaagaaccggctgaccatcagcaaggacaccagcaagaaccaggtggtgctgaccatgaccaacatggaccctgtggacaccgccacatattactgcgccagaatcggccccatcaagtaccccaccgctccttacagatacttcgacttctggggccagggcacaatggtcaccgttagctctacgcgtaaaattgaagttatgtatcctcctccttacctagacaatgagaagagcaatggaaccattatccatgtgaaaggggcgcgtggcgatattgagaatacctctctggccccagaagatcctacattccccgccgacacatggggaacatatctgctgacaaccgaaaccgggctgcaaaaggaccatgctctgtgggatcataccgctcagaatctgcttcggatggggcttgcattcctggtcctggtggctcttgtctggtttctggtcgaggactggctgtcccggaagagaaccagagaaagagcttccagggccagcacctgggaaggcagacgcagactgaatactcagaccctgcgcgccaagagaagcggatctggcgtgaagcagaccctgaatttcgacctgctgaagctggctggcgacgtggaatccaacccaggcccttctagaggccatatgaccgagtacaagcccacggtgcgcctcgccacccgcgacgacgtccccagggccgtacgcaccctcgccgccgcgttcgccgactaccccgccacgcgccacaccgtcgatccggaccgccacatcgagcgggtcaccgagctgcaagaactcttcctcacgcgcgtcgggctcgacatcggcaaggtgtgggtcgcggacgacggcgccgcggtggcggtctggaccacgccggagagcgtcgaagcgggggcggtgttcgccgagatcggcccgcgcatggccgagttgagcggttcccggctggccgcgcagcaacagatggaaggcctcctggcgccgcaccggcccaaggagcccgcgtggttcctggccaccgtcggcgtctcgcccgaccaccagggcaagggtctgggcagcgccgtcgtgctccccggagtggaggcggccgagcgcgccggggtgcccgccttcctggagacctccgcgccccgcaacctccccttctacgagcggctcggcttcaccgtcaccgccgacgtcgaggtgcccgaaggaccgcgcacctggtgcatgacccgcaagcccggtgcctga

SEQ ID NO: 20335 - DNA, 2109 bp, synthetic construct
  source 1..2109: mol_type = other DNA
atggccttaccagtgaccgccttgctcctgccgctggccttgctgctccacgccgccaggccggacatccagatgacacagagccctagcagcctgtctgccagcgtgggagacagagtgaccatcacctgtctggcctccgaggacatctacaacaacctggcctggtatcagcagaagcctggcaaggcccctaagctgctgatctactacgccagctctctccaggatggcgtgcccagcagattttctggcagcggctctggcaccgactacaccctgacaatatccagcctccagcctgaggacttcgccacctactactgcctgcaagacagcgagtacccctggacatttggcggaggcggaagtggaggcggaggatctggcggcggaggctctgaagtgacactgaaagagtctggccccgctctggtcaagcccacacaaaccctgacactgacctgcaccttcagcggctttagcctgagcacatacggcatgggcgtcggctggattagacagcctcctggaaaagccctggaatggctggctaacatttggtgggacgacgacaagtattacaaccccagcctgaagaaccggctgaccatcagcaaggacaccagcaagaaccaggtggtgctgaccatgaccaacatggaccctgtggacaccgccacatattactgcgccagaatcggccccatcaagtaccccaccgctccttacagatacttcgacttctggggccagggcacaatggtcaccgttagctctacgcgtctgtgggtgtcccagccacctgaaattcggacactggaaggctcctccgcctttctgccctgtagctttaacgccagccaggggagactcgccatcggctctgtgacatggttccgggatgaagtcgtccctggaaaagaagttcgcaacggaacaccagagttcagaggcagactcgccccactggcaagctccagattcctgcatgaccatcaggctgaactgcacattagggacgtgcggggccacgatgcctccatctatgtgtgtcgggtcgaagtgcttggactcggcgtcggaactggaaacggcactaggctggtggtcgagaaagaacatccacagcttggcgctggcaccgtcctgttgcttagagccggattctatgccgtcagcttcctgtccgtggctgtggggtctacagtgtattaccagggaaaatgtctcacctggaaaggccccagacgccagcttccagctgttgttcctgctccactgccaccaccttgtggctcctctgctcacttgcttccaccagtgcctggcggacgcgccaagagaagcggatctggcgtgaagcagaccctgaatttcgacctgctgaagctggctggcgacgtggaatccaacccaggcccttctagaatgtaccggatgcagctgctgagctgtatcgccctgtctctggccctggtcacaaatagcgcccctaccagcagcagcaccaagaaaacccagctgcaactggaacacctcctgctggacctccagatgatcctgaacggcatcaacaactacaagaaccccaagctgaccgagatgctgaccgccaagttctacatgcccaagaaggccaccgagctgaagcacctccagtgcctggaagaggaactgaagcccctggaagaagtgctgaatctggcccagagcaagaacttccacctgaggccaagggacctgatctccaacatcaacgtgatcgtgctggaactgaaaggcagcgagacaaccttcatgtgcgagtacgccgacgagacagctaccatcgtggaatttctgaatcggtggatcaccttctgccagagcatcatcagcaccctgacaaagatcgaagtgatgtaccctcctccttacctggacaacgagaagtccaacggcaccatcatccacgtgaagggcaagcacctgtgtccttctccactgttccccggacctagcaagcctttctgggtgctcgttgttgttggcggcgtgctggcctgttacagcctgctggttaccgtggccttcatcatcttttgggtccgaagcaagcggagctaa

SEQ ID NO: 20336 - DNA, 2037 bp, synthetic construct
  source 1..2037: mol_type = other DNA
atggccttaccagtgaccgccttgctcctgccgctggccttgctgctccacgccgccaggccggacatccagatgacacagagccctagcagcctgtctgccagcgtgggagacagagtgaccatcacctgtctggcctccgaggacatctacaacaacctggcctggtatcagcagaagcctggcaaggcccctaagctgctgatctactacgccagctctctccaggatggcgtgcccagcagattttctggcagcggctctggcaccgactacaccctgacaatatccagcctccagcctgaggacttcgccacctactactgcctgcaagacagcgagtacccctggacatttggcggaggcggaagtggaggcggaggatctggcggcggaggctctgaagtgacactgaaagagtctggccccgctctggtcaagcccacacaaaccctgacactgacctgcaccttcagcggctttagcctgagcacatacggcatgggcgtcggctggattagacagcctcctggaaaagccctggaatggctggctaacatttggtgggacgacgacaagtattacaaccccagcctgaagaaccggctgaccatcagcaaggacaccagcaagaaccaggtggtgctgaccatgaccaacatggaccctgtggacaccgccacatattactgcgccagaatcggccccatcaagtaccccaccgctccttacagatacttcgacttctggggccagggcacaatggtcaccgttagctctacgcgtctgtgggtgtcccagccacctgaaattcggacactggaaggctcctccgcctttctgccctgtagctttaacgccagccaggggagactcgccatcggctctgtgacatggttccgggatgaagtcgtccctggaaaagaagttcgcaacggaacaccagagttcagaggcagactcgccccactggcaagctccagattcctgcatgaccatcaggctgaactgcacattagggacgtgcggggccacgatgcctccatctatgtgtgtcgggtcgaagtgcttggactcggcgtcggaactggaaacggcactaggctggtggtcgagaaagaacatccacagcttggcgctggcaccgtcctgttgcttagagccggattctatgccgtcagcttcctgtccgtggctgtggggtctacagtgtattaccagggaaaatgtctcacctggaaaggccccagacgccagcttccagctgttgttcctgctccactgccaccaccttgtggctcctctgctcacttgcttccaccagtgcctggcggacgcgccaagagaagcggatctggcgtgaagcagaccctgaatttcgacctgctgaagctggctggcgacgtggaatccaacccaggcccttctagaggccatatgaccgagtacaagcccacggtgcgcctcgccacccgcgacgacgtccccagggccgtacgcaccctcgccgccgcgttcgccgactaccccgccacgcgccacaccgtcgatccggaccgccacatcgagcgggtcaccgagctgcaagaactcttcctcacgcgcgtcgggctcgacatcggcaaggtgtgggtcgcggacgacggcgccgcggtggcggtctggaccacgccggagagcgtcgaagcgggggcggtgttcgccgagatcggcccgcgcatggccgagttgagcggttcccggctggccgcgcagcaacagatggaaggcctcctggcgccgcaccggcccaaggagcccgcgtggttcctggccaccgtcggcgtctcgcccgaccaccagggcaagggtctgggcagcgccgtcgtgctccccggagtggaggcggccgagcgcgccggggtgcccgccttcctggagacctccgcgccccgcaacctccccttctacgagcggctcggcttcaccgtcaccgccgacgtcgaggtgcccgaaggaccgcgcacctggtgcatgacccgcaagcccggtgcctga

SEQ ID NO: 20337 - DNA, 1062 bp, synthetic construct
  source 1..1062: mol_type = other DNA
atggccttaccagtgaccgccttgctcctgccgctggccttgctgctccacgccgccaggccggacatccagatgacacagagccctagcagcctgtctgccagcgtgggagacagagtgaccatcacctgtctggcctccgaggacatctacaacaacctggcctggtatcagcagaagcctggcaaggcccctaagctgctgatctactacgccagctctctccaggatggcgtgcccagcagattttctggcagcggctctggcaccgactacaccctgacaatatccagcctccagcctgaggacttcgccacctactactgcctgcaagacagcgagtacccctggacatttggcggaggcggaagtggaggcggaggatctggcggcggaggctctgaagtgacactgaaagagtctggccccgctctggtcaagcccacacaaaccctgacactgacctgcaccttcagcggctttagcctgagcacatacggcatgggcgtcggctggattagacagcctcctggaaaagccctggaatggctggctaacatttggtgggacgacgacaagtattacaaccccagcctgaagaaccggctgaccatcagcaaggacaccagcaagaaccaggtggtgctgaccatgaccaacatggaccctgtggacaccgccacatattactgcgccagaatcggccccatcaagtaccccaccgctccttacagatacttcgacttctggggccagggcacaatggtcaccgttagctctacgcgtaaaattgaagttatgtatcctcctccttacctagacaatgagaagagcaatggaaccattatccatgtgaaaggggcgcgtatcacccagggcctggccgtgtctaccatcagcagctttttcccacccggctaccaggtgtccttctgcctcgtgatggtgctgctgttcgccgtggacaccggcctgtacttcagcgtgaaaacaaacatccggtccagcaccagagactggaaggaccacaagttcaagtggcggaaggacccccaggacaag

SEQ ID NO: 20338 - DNA, 1062 bp, synthetic construct
  source 1..1062: mol_type = other DNA
atggccttaccagtgaccgccttgctcctgccgctggccttgctgctccacgccgccaggccggacatccagatgacacagagccctagcagcctgtctgccagcgtgggagacagagtgaccatcacctgtctggcctccgaggacatctacaacaacctggcctggtatcagcagaagcctggcaaggcccctaagctgctgatctactacgccagctctctccaggatggcgtgcccagcagattttctggcagcggctctggcaccgactacaccctgacaatatccagcctccagcctgaggacttcgccacctactactgcctgcaagacagcgagtacccctggacatttggcggaggcggaagtggaggcggaggatctggcggcggaggctctgaagtgacactgaaagagtctggccccgctctggtcaagcccacacaaaccctgacactgacctgcaccttcagcggctttagcctgagcacatacggcatgggcgtcggctggattagacagcctcctggaaaagccctggaatggctggctaacatttggtgggacgacgacaagtattacaaccccagcctgaagaaccggctgaccatcagcaaggacaccagcaagaaccaggtggtgctgaccatgaccaacatggaccctgtggacaccgccacatattactgcgccagaatcggccccatcaagtaccccaccgctccttacagatacttcgacttctggggccagggcacaatggtcaccgttagctctacgcgtaaaattgaagttatgtatcctcctccttacctagacaatgagaagagcaatggaaccattatccatgtgaaaggggcgcgtattacccaaggactggctgtgcctacaatctctagcttctttccgcctggataccaagtctccttctgtcttgtgatggtcctcctgtttgctgtggacacaggactgtacttttccgtgaaaacgaacatccgcagctccacacgcgattggaaagatcacaagtttaaatggcgcaaagatccccaggacaag

SEQ ID NO: 20339 - DNA, 999 bp, synthetic construct
  source 1..999: mol_type = other DNA
atggccttaccagtgaccgccttgctcctgccgctggccttgctgctccacgccgccaggccggacatccagatgacacagagccctagcagcctgtctgccagcgtgggagacagagtgaccatcacctgtctggcctccgaggacatctacaacaacctggcctggtatcagcagaagcctggcaaggcccctaagctgctgatctactacgccagctctctccaggatggcgtgcccagcagattttctggcagcggctctggcaccgactacaccctgacaatatccagcctccagcctgaggacttcgccacctactactgcctgcaagacagcgagtacccctggacatttggcggaggcggaagtggaggcggaggatctggcggcggaggctctgaagtgacactgaaagagtctggccccgctctggtcaagcccacacaaaccctgacactgacctgcaccttcagcggctttagcctgagcacatacggcatgggcgtcggctggattagacagcctcctggaaaagccctggaatggctggctaacatttggtgggacgacgacaagtattacaaccccagcctgaagaaccggctgaccatcagcaaggacaccagcaagaaccaggtggtgctgaccatgaccaacatggaccctgtggacaccgccacatattactgcgccagaatcggccccatcaagtaccccaccgctccttacagatacttcgacttctggggccagggcacaatggtcaccgttagctctacgcgtaaaattgaagttatgtatcctcctccttacctagacaatgagaagagcaatggaaccattatccatgtgaaaggggcgcgtattacccaaggactggctgtgtctacaatctctagcttctctccgcctggataccaagtctccttctgtcttgtgatggtcctcctgtttgctgtggacacaggactgtacttttccgtgaaaacgaacatc

SEQ ID NO: 20340 - DNA, 1092 bp, synthetic construct
  source 1..1092: mol_type = other DNA
atggccttaccagtgaccgccttgctcctgccgctggccttgctgctccacgccgccaggccggacatccagatgacacagagccctagcagcctgtctgccagcgtgggagacagagtgaccatcacctgtctggcctccgaggacatctacaacaacctggcctggtatcagcagaagcctggcaaggcccctaagctgctgatctactacgccagctctctccaggatggcgtgcccagcagattttctggcagcggctctggcaccgactacaccctgacaatatccagcctccagcctgaggacttcgccacctactactgcctgcaagacagcgagtacccctggacatttggcggaggcggaagtggaggcggaggatctggcggcggaggctctgaagtgacactgaaagagtctggccccgctctggtcaagcccacacaaaccctgacactgacctgcaccttcagcggctttagcctgagcacatacggcatgggcgtcggctggattagacagcctcctggaaaagccctggaatggctggctaacatttggtgggacgacgacaagtattacaaccccagcctgaagaaccggctgaccatcagcaaggacaccagcaagaaccaggtggtgctgaccatgaccaacatggaccctgtggacaccgccacatattactgcgccagaatcggccccatcaagtaccccaccgctccttacagatacttcgacttctggggccagggcacaatggtcaccgttagctctacgcgtaaaattgaagttatgtatcctcctccttacctagacaatgagaagagcaatggaaccattatccatgtgaaaggggcgcgtgtcgagaaagaacatccacagcttggcgctggcaccgtcctgttgcttagagccggattctatgccgtcagcttcctgtccgtggctgtggggtctacagtgtattaccagggaaaatgtctcacctggaaaggccccagacgccagcttccagctgttgttcctgctccactgccaccaccttgtggctcctctgctcacttgcttccaccagtgcctggcgga

SEQ ID NO: 20341 - DNA, 1335 bp, synthetic construct
  source 1..1335: mol_type = other DNA
atggccttaccagtgaccgccttgctcctgccgctggccttgctgctccacgccgccaggccggacatccagatgacacagagccctagcagcctgtctgccagcgtgggagacagagtgaccatcacctgtctggcctccgaggacatctacaacaacctggcctggtatcagcagaagcctggcaaggcccctaagctgctgatctactacgccagctctctccaggatggcgtgcccagcagattttctggcagcggctctggcaccgactacaccctgacaatatccagcctccagcctgaggacttcgccacctactactgcctgcaagacagcgagtacccctggacatttggcggaggcggaagtggaggcggaggatctggcggcggaggctctgaagtgacactgaaagagtctggccccgctctggtcaagcccacacaaaccctgacactgacctgcaccttcagcggctttagcctgagcacatacggcatgggcgtcggctggattagacagcctcctggaaaagccctggaatggctggctaacatttggtgggacgacgacaagtattacaaccccagcctgaagaaccggctgaccatcagcaaggacaccagcaagaaccaggtggtgctgaccatgaccaacatggaccctgtggacaccgccacatattactgcgccagaatcggccccatcaagtaccccaccgctccttacagatacttcgacttctggggccagggcacaatggtcaccgttagctctacgcgtaaaattgaagttatgtatcctcctccttacctagacaatgagaagagcaatggaaccattatccatgtgaaaggggcgcgtaagtctgtgcgcttttacctggtcgtcagccctgccagtgcctccactcagacatcttggaccccaagggaccttgtgtcctctcagacacagacacagtcctgcgtgccaccaactgctggcgcaagacaggctccagagtctcccagcacaatccccgtcccttctcagccccagaactccacacttaggccaggaccagctgctccaatcgcactggtcccagtgttctgcggactgctggttgccaagtctctggtgctgagcgcactcctcgtttggtggggcgatatttggtggaaaacgatgatggaattgagatccctcgatacgcagaaagccacatgccaccttcagcaagtcacagacttgccttggaccagcgtcagctctcccgtggaacgggaaattctgtatcatacagtggcccgcaccaagatttccgacgatgacgacgagcacacactg

SEQ ID NO: 20342 - DNA, 1146 bp, synthetic construct
  source 1..1146: mol_type = other DNA
atggccttaccagtgaccgccttgctcctgccgctggccttgctgctccacgccgccaggccggacatccagatgacacagagccctagcagcctgtctgccagcgtgggagacagagtgaccatcacctgtctggcctccgaggacatctacaacaacctggcctggtatcagcagaagcctggcaaggcccctaagctgctgatctactacgccagctctctccaggatggcgtgcccagcagattttctggcagcggctctggcaccgactacaccctgacaatatccagcctccagcctgaggacttcgccacctactactgcctgcaagacagcgagtacccctggacatttggcggaggcggaagtggaggcggaggatctggcggcggaggctctgaagtgacactgaaagagtctggccccgctctggtcaagcccacacaaaccctgacactgacctgcaccttcagcggctttagcctgagcacatacggcatgggcgtcggctggattagacagcctcctggaaaagccctggaatggctggctaacatttggtgggacgacgacaagtattacaaccccagcctgaagaaccggctgaccatcagcaaggacaccagcaagaaccaggtggtgctgaccatgaccaacatggaccctgtggacaccgccacatattactgcgccagaatcggccccatcaagtaccccaccgctccttacagatacttcgacttctggggccagggcacaatggtcaccgttagctctacgcgtaaaattgaagttatgtatcctcctccttacctagacaatgagaagagcaatggaaccattatccatgtgaaaggggcgcgtggcgatattgagaatacctctctggccccagaagatcctacattccccgccgacacatggggaacatatctgctgacaaccgaaaccgggctgcaaaaggaccatgctctgtgggatcataccgctcagaatctgcttcggatggggcttgcattcctggtcctggtggctcttgtctggtttctggtcgaggactggctgtcccggaagagaaccagagaaagagcttccagggccagcacctgggaaggcagacgcagactgaatactcagaccctg

SEQ ID NO: 20343 - DNA, 2937 bp, synthetic construct
  source 1..2937: mol_type = other DNA
atggccttaccagtgaccgccttgctcctgccgctggccttgctgctccacgccgccaggccggacatccagatgacacagagccctagcagcctgtctgccagcgtgggagacagagtgaccatcacctgtctggcctccgaggacatctacaacaacctggcctggtatcagcagaagcctggcaaggcccctaagctgctgatctactacgccagctctctccaggatggcgtgcccagcagattttctggcagcggctctggcaccgactacaccctgacaatatccagcctccagcctgaggacttcgccacctactactgcctgcaagacagcgagtacccctggacatttctcgagggacagcctaaggccaatcctaccgtgacactgttccctccaagcagcgaagaactccaggccaacaaggccacacttgtgtgcctgatctccgacttctaccctggggctgtgacagtggcttggaaggccgatggatctcctgtgaaagccggcgtggaaaccaccaagccatccaagcagagcaacaacaaatacgccgccagctcctacctgagcctgacacctgagcagtggaagtcccacagatcctacagctgccaagtgacccacgaaggcagcaccgtggaaaagacagtggcccctacagagtgcagcggatcccagagcttcggcctgctggaccccaagctgtgctacctgctggatggcatcctgttcatctacggcgtgatcctgaccgccctgttcctgagagtgaagttcagcagaagcgccgacgcccctgcctaccagcagggacagaaccaactgtacaacgagctgaacctgggcagacgggaagagtacgacgtgctggacaagcggagaggcagggaccctgagatgggcggaaagccccagcggagaaagaacccccaggaaggactgtataacgaactccagaaagacaagatggccgaagcctacagcgagatcggcatgaagggcgagcggagaagaggcaagggccacgatggcctgtaccagggcctgagcaccgccaccaaggacacctatgacgccctgcacatgcaggccctgcctccaagaagggccaagcgatctggatctggagcaacaaacttctcactactcaaacaagcaggtgacgtggaggagaatcccgggcctactagtatggactggatttggcgcatccttttccttgtcggcgctgctaccggcgcgcattccttcgaagaagtgacactgaaagagtctggccccgctctggtcaagcccacacaaaccctgacactgacctgcaccttcagcggctttagcctgagcacatacggcatgggcgtcggctggattagacagcctcctggaaaagccctggaatggctggctaacatttggtgggacgacgacaagtattacaaccccagcctgaagaaccggctgaccatcagcaaggacaccagcaagaaccaggtggtgctgaccatgaccaacatggaccctgtggacaccgccacatattactgcgccagaatcggccccatcaagtaccccaccgctccttacagatacttcgacttctggggccagggcacaatggtcaccgttagctctacgcgtgcctctacaaagggaccctccgtgtttcctctggctcccagcagcaagtctacaagcggaggaacagccgctctgggctgcctggtcaaggattactttcccgagcctgtgaccgtgtcctggaatagcggagcactgacaagcggcgtgcacacctttccagccgtgctgcaaagcagcggcctgtactctctgagcagcgtggtcacagtgcctagctctagcctgggcacccagacctacatctgcaatgtgaaccacaagcctagcaacaccaaggtggacaagagagtggaacccaagagctgtggtaccggcgacatcgagaacaccagtctggcccctgaggaccctacctttcctgccgatacctggggcacctacctgctgaccacagagacaggactccagaaagatcacgccctgtgggaccacacagcccagaacctgctgagaatgggcctcgcctttctggtgctggttgccctcgtgtggttcctggtggaagattggctgagccggaagcggacaagagagagagccagcagagcctctacctgggagggaagaagaaggctgaacacccagacacttagggccaagcgatctggatctggagcaacaaacttctcactactcaaacaagcaggtgacgtggaggagaatcccgggccttctagaggccatatgaccgagtacaagcccacggtgcgcctcgccacccgcgacgacgtccccagggccgtacgcaccctcgccgccgcgttcgccgactaccccgccacgcgccacaccgtcgatccggaccgccacatcgagcgggtcaccgagctgcaagaactcttcctcacgcgcgtcgggctcgacatcggcaaggtgtgggtcgcggacgacggcgccgcggtggcggtctggaccacgccggagagcgtcgaagcgggggcggtgttcgccgagatcggcccgcgcatggccgagttgagcggttcccggctggccgcgcagcaacagatggaaggcctcctggcgccgcaccggcccaaggagcccgcgtggttcctggccaccgtcggcgtctcgcccgaccaccagggcaagggtctgggcagcgccgtcgtgctccccggagtggaggcggccgagcgcgccggggtgcccgccttcctggagacctccgcgccccgcaacctccccttctacgagcggctcggcttcaccgtcaccgccgacgtcgaggtgcccgaaggaccgcgcacctggtgcatgacccgcaagcccggtgcctga

SEQ ID NO: 20344 - DNA, 3135 bp, synthetic construct
  source 1..3135: mol_type = other DNA
atggccttaccagtgaccgccttgctcctgccgctggccttgctgctccacgccgccaggccggacatccagatgacacagagccctagcagcctgtctgccagcgtgggagacagagtgaccatcacctgtctggcctccgaggacatctacaacaacctggcctggtatcagcagaagcctggcaaggcccctaagctgctgatctactacgccagctctctccaggatggcgtgcccagcagattttctggcagcggctctggcaccgactacaccctgacaatatccagcctccagcctgaggacttcgccacctactactgcctgcaagacagcgagtacccctggacatttctcgagggacagcctaaggccaatcctaccgtgacactgttccctccaagcagcgaagaactccaggccaacaaggccacacttgtgtgcctgatctccgacttctaccctggggctgtgacagtggcttggaaggccgatggatctcctgtgaaagccggcgtggaaaccaccaagccatccaagcagagcaacaacaaatacgccgccagctcctacctgagcctgacacctgagcagtggaagtcccacagatcctacagctgccaagtgacccacgaaggcagcaccgtggaaaagacagtggcccctacagagtgcagcggatcccagagcttcggcctgctggaccccaagctgtgctacctgctggatggcatcctgttcatctacggcgtgatcctgaccgccctgttcctgagagtgaagttcagcagaagcgccgacgcccctgcctaccagcagggacagaaccaactgtacaacgagctgaacctgggcagacgggaagagtacgacgtgctggacaagcggagaggcagggaccctgagatgggcggaaagccccagcggagaaagaacccccaggaaggactgtataacgaactccagaaagacaagatggccgaagcctacagcgagatcggcatgaagggcgagcggagaagaggcaagggccacgatggcctgtaccagggcctgagcaccgccaccaaggacacctatgacgccctgcacatgcaggccctgcctccaagaagggccaagcgatctggatctggagcaacaaacttctcactactcaaacaagcaggtgacgtggaggagaatcccgggcctactagtatggactggatttggcgcatccttttccttgtcggcgctgctaccggcgcgcattccttcgaagaagtgacactgaaagagtctggccccgctctggtcaagcccacacaaaccctgacactgacctgcaccttcagcggctttagcctgagcacatacggcatgggcgtcggctggattagacagcctcctggaaaagccctggaatggctggctaacatttggtgggacgacgacaagtattacaaccccagcctgaagaaccggctgaccatcagcaaggacaccagcaagaaccaggtggtgctgaccatgaccaacatggaccctgtggacaccgccacatattactgcgccagaatcggccccatcaagtaccccaccgctccttacagatacttcgacttctggggccagggcacaatggtcaccgttagctctacgcgtgcctctacaaagggaccctccgtgtttcctctggctcccagcagcaagtctacaagcggaggaacagccgctctgggctgcctggtcaaggattactttcccgagcctgtgaccgtgtcctggaatagcggagcactgacaagcggcgtgcacacctttccagccgtgctgcaaagcagcggcctgtactctctgagcagcgtggtcacagtgcctagctctagcctgggcacccagacctacatctgcaatgtgaaccacaagcctagcaacaccaaggtggacaagagagtggaacccaagagctgtggtaccaagtctgtgcgcttttacctggtcgtcagccctgccagtgcctccactcagacatcttggaccccaagggaccttgtgtcctctcagacacagacacagtcctgcgtgccaccaactgctggcgcaagacaggctccagagtctcccagcacaatccccgtcccttctcagccccagaactccacacttaggccaggaccagctgctccaatcgcactggtcccagtgttctgcggactgctggttgccaagtctctggtgctgagcgcactcctcgtttggtggggcgatatttggtggaaaacgatgatggaattgagatccctcgatacgcagaaagccacatgccaccttcagcaagtcacagacttgccttggaccagcgtcagctctcccgtggaacgggaaattctgtatcatacagtggcccgcaccaagatttccgacgatgacgacgagcacacactgcgcgccaagagaagcggatctggcgtgaagcagaccctgaatttcgacctgctgaagctggctggcgacgtggaatccaacccaggcccttctagaggccatatgaccgagtacaagcccacggtgcgcctcgccacccgcgacgacgtccccagggccgtacgcaccctcgccgccgcgttcgccgactaccccgccacgcgccacaccgtcgatccggaccgccacatcgagcgggtcaccgagctgcaagaactcttcctcacgcgcgtcgggctcgacatcggcaaggtgtgggtcgcggacgacggcgccgcggtggcggtctggaccacgccggagagcgtcgaagcgggggcggtgttcgccgagatcggcccgcgcatggccgagttgagcggttcccggctggccgcgcagcaacagatggaaggcctcctggcgccgcaccggcccaaggagcccgcgtggttcctggccaccgtcggcgtctcgcccgaccaccagggcaagggtctgggcagcgccgtcgtgctccccggagtggaggcggccgagcgcgccggggtgcccgccttcctggagacctccgcgccccgcaacctccccttctacgagcggctcggcttcaccgtcaccgccgacgtcgaggtgcccgaaggaccgcgcacctggtgcatgacccgcaagcccggtgcctga

SEQ ID NO: 20345 - DNA, 2895 bp, synthetic construct
  source 1..2895: mol_type = other DNA
atggccttaccagtgaccgccttgctcctgccgctggccttgctgctccacgccgccaggccggacatccagatgacacagagccctagcagcctgtctgccagcgtgggagacagagtgaccatcacctgtctggcctccgaggacatctacaacaacctggcctggtatcagcagaagcctggcaaggcccctaagctgctgatctactacgccagctctctccaggatggcgtgcccagcagattttctggcagcggctctggcaccgactacaccctgacaatatccagcctccagcctgaggacttcgccacctactactgcctgcaagacagcgagtacccctggacatttctcgagggacagcctaaggccaatcctaccgtgacactgttccctccaagcagcgaagaactccaggccaacaaggccacacttgtgtgcctgatctccgacttctaccctggggctgtgacagtggcttggaaggccgatggatctcctgtgaaagccggcgtggaaaccaccaagccatccaagcagagcaacaacaaatacgccgccagctcctacctgagcctgacacctgagcagtggaagtcccacagatcctacagctgccaagtgacccacgaaggcagcaccgtggaaaagacagtggcccctacagagtgcagcggatcccagagcttcggcctgctggaccccaagctgtgctacctgctggatggcatcctgttcatctacggcgtgatcctgaccgccctgttcctgagagtgaagttcagcagaagcgccgacgcccctgcctaccagcagggacagaaccaactgtacaacgagctgaacctgggcagacgggaagagtacgacgtgctggacaagcggagaggcagggaccctgagatgggcggaaagccccagcggagaaagaacccccaggaaggactgtataacgaactccagaaagacaagatggccgaagcctacagcgagatcggcatgaagggcgagcggagaagaggcaagggccacgatggcctgtaccagggcctgagcaccgccaccaaggacacctatgacgccctgcacatgcaggccctgcctccaagaagggccaagcgatctggatctggagcaacaaacttctcactactcaaacaagcaggtgacgtggaggagaatcccgggcctactagtatggactggatttggcgcatccttttccttgtcggcgctgctaccggcgcgcattccttcgaagaagtgacactgaaagagtctggccccgctctggtcaagcccacacaaaccctgacactgacctgcaccttcagcggctttagcctgagcacatacggcatgggcgtcggctggattagacagcctcctggaaaagccctggaatggctggctaacatttggtgggacgacgacaagtattacaaccccagcctgaagaaccggctgaccatcagcaaggacaccagcaagaaccaggtggtgctgaccatgaccaacatggaccctgtggacaccgccacatattactgcgccagaatcggccccatcaagtaccccaccgctccttacagatacttcgacttctggggccagggcacaatggtcaccgttagctctacgcgtgcctctacaaagggaccctccgtgtttcctctggctcccagcagcaagtctacaagcggaggaacagccgctctgggctgcctggtcaaggattactttcccgagcctgtgaccgtgtcctggaatagcggagcactgacaagcggcgtgcacacctttccagccgtgctgcaaagcagcggcctgtactctctgagcagcgtggtcacagtgcctagctctagcctgggcacccagacctacatctgcaatgtgaaccacaagcctagcaacaccaaggtggacaagagagtggaacccaagagctgtggtaccgtggtcgagaaagaacatccacagcttggcgctggcaccgtcctgttgcttagagccggattctatgccgtcagcttcctgtccgtggctgtggggtctacagtgtattaccagggaaaatgtctcacctggaaaggccccagacgccagcttccagctgttgttcctgctccactgccaccaccttgtggctcctctgctcacttgcttccaccagtgcctggcggacgcgccaagagaagcggatctggcgtgaagcagaccctgaatttcgacctgctgaagctggctggcgacgtggaatccaacccaggcccttctagaggccatatgaccgagtacaagcccacggtgcgcctcgccacccgcgacgacgtccccagggccgtacgcaccctcgccgccgcgttcgccgactaccccgccacgcgccacaccgtcgatccggaccgccacatcgagcgggtcaccgagctgcaagaactcttcctcacgcgcgtcgggctcgacatcggcaaggtgtgggtcgcggacgacggcgccgcggtggcggtctggaccacgccggagagcgtcgaagcgggggcggtgttcgccgagatcggcccgcgcatggccgagttgagcggttcccggctggccgcgcagcaacagatggaaggcctcctggcgccgcaccggcccaaggagcccgcgtggttcctggccaccgtcggcgtctcgcccgaccaccagggcaagggtctgggcagcgccgtcgtgctccccggagtggaggcggccgagcgcgccggggtgcccgccttcctggagacctccgcgccccgcaacctccccttctacgagcggctcggcttcaccgtcaccgccgacgtcgaggtgcccgaaggaccgcgcacctggtgcatgacccgcaagcccggtgcctga

SEQ ID NO: 20346 - DNA, 2982 bp, synthetic construct
  source 1..2982: mol_type = other DNA
atggccttaccagtgaccgccttgctcctgccgctggccttgctgctccacgccgccaggccggacatccagatgacacagagccctagcagcctgtctgccagcgtgggagacagagtgaccatcacctgtctggcctccgaggacatctacaacaacctggcctggtatcagcagaagcctggcaaggcccctaagctgctgatctactacgccagctctctccaggatggcgtgcccagcagattttctggcagcggctctggcaccgactacaccctgacaatatccagcctccagcctgaggacttcgccacctactactgcctgcaagacagcgagtacccctggacatttctcgaggacctgaagaacgtgttcccacctgaggtggccgtgttcgagcctagcgaggccgagatcagccacacccagaaagccaccctcgtgtgcctggctaccggcttctaccccgaccatgtggaactgtcttggtgggtcaacggcaaagaggtgcacagcggcgtgtctaccgacccccagccactgaaagaacagcccgccctgaacgacagccggtactgcctgagcagcagactgagagtgtccgccaccttctggcagaacccccggaaccacttcagatgccaggtgcagttctacggcctgagcgagaacgacgagtggacccaggacagagccaagcccgtgacccagatcgtgtctgccgaagcctggggcagagccgattgcggatcccagagcttcggcctgctggaccccaagctgtgctacctgctggatggcatcctgttcatctacggcgtgatcctgaccgccctgttcctgagagtgaagttcagcagaagcgccgacgcccctgcctaccagcagggacagaaccaactgtacaacgagctgaacctgggcagacgggaagagtacgacgtgctggacaagcggagaggcagggaccctgagatgggcggaaagccccagcggagaaagaacccccaggaaggactgtataacgaactccagaaagacaagatggccgaagcctacagcgagatcggcatgaagggcgagcggagaagaggcaagggccacgatggcctgtaccagggcctgagcaccgccaccaaggacacctatgacgccctgcacatgcaggccctgcctccaagaagggccaagcgatctggatctggagcaacaaacttctcactactcaaacaagcaggtgacgtggaggagaatcccgggcctactagtatggactggatttggcgcatccttttccttgtcggcgctgctaccggcgcgcattccttcgaagaagtgacactgaaagagtctggccccgctctggtcaagcccacacaaaccctgacactgacctgcaccttcagcggctttagcctgagcacatacggcatgggcgtcggctggattagacagcctcctggaaaagccctggaatggctggctaacatttggtgggacgacgacaagtattacaaccccagcctgaagaaccggctgaccatcagcaaggacaccagcaagaaccaggtggtgctgaccatgaccaacatggaccctgtggacaccgccacatattactgcgccagaatcggccccatcaagtaccccaccgctccttacagatacttcgacttctggggccagggcacaatggtcaccgttagctctacgcgtatccagaaccctgatcctgccgtgtaccagctgcgggatagcaagagcagcgacaagagcgtgtgtctgttcaccgacttcgacagccagaccaacgtgtcccagagcaaggactccgacgtgtacatcaccgataagaccgtgctggacatgcggagcatggacttcaagagcaactccgccgtggcctggtccaacaagtccgatttcgcctgcgccaacgccttcaacaacagcattatccccgaggacacattcttcccaagccccgagagcagctgcggtaccggcgacatcgagaacaccagtctggcccctgaggaccctacctttcctgccgatacctggggcacctacctgctgaccacagagacaggactccagaaagatcacgccctgtgggaccacacagcccagaacctgctgagaatgggcctcgcctttctggtgctggttgccctcgtgtggttcctggtggaagattggctgagccggaagcggacaagagagagagccagcagagcctctacctgggagggaagaagaaggctgaacacccagacacttagggccaagcgatctggatctggagcaacaaacttctcactactcaaacaagcaggtgacgtggaggagaatcccgggccttctagaggccatatgaccgagtacaagcccacggtgcgcctcgccacccgcgacgacgtccccagggccgtacgcaccctcgccgccgcgttcgccgactaccccgccacgcgccacaccgtcgatccggaccgccacatcgagcgggtcaccgagctgcaagaactcttcctcacgcgcgtcgggctcgacatcggcaaggtgtgggtcgcggacgacggcgccgcggtggcggtctggaccacgccggagagcgtcgaagcgggggcggtgttcgccgagatcggcccgcgcatggccgagttgagcggttcccggctggccgcgcagcaacagatggaaggcctcctggcgccgcaccggcccaaggagcccgcgtggttcctggccaccgtcggcgtctcgcccgaccaccagggcaagggtctgggcagcgccgtcgtgctccccggagtggaggcggccgagcgcgccggggtgcccgccttcctggagacctccgcgccccgcaacctccccttctacgagcggctcggcttcaccgtcaccgccgacgtcgaggtgcccgaaggaccgcgcacctggtgcatgacccgcaagcccggtgcctga

SEQ ID NO: 20347 - DNA, 3180 bp, synthetic construct
  source 1..3180: mol_type = other DNA
atggccttaccagtgaccgccttgctcctgccgctggccttgctgctccacgccgccaggccggacatccagatgacacagagccctagcagcctgtctgccagcgtgggagacagagtgaccatcacctgtctggcctccgaggacatctacaacaacctggcctggtatcagcagaagcctggcaaggcccctaagctgctgatctactacgccagctctctccaggatggcgtgcccagcagattttctggcagcggctctggcaccgactacaccctgacaatatccagcctccagcctgaggacttcgccacctactactgcctgcaagacagcgagtacccctggacatttctcgaggacctgaagaacgtgttcccacctgaggtggccgtgttcgagcctagcgaggccgagatcagccacacccagaaagccaccctcgtgtgcctggctaccggcttctaccccgaccatgtggaactgtcttggtgggtcaacggcaaagaggtgcacagcggcgtgtctaccgacccccagccactgaaagaacagcccgccctgaacgacagccggtactgcctgagcagcagactgagagtgtccgccaccttctggcagaacccccggaaccacttcagatgccaggtgcagttctacggcctgagcgagaacgacgagtggacccaggacagagccaagcccgtgacccagatcgtgtctgccgaagcctggggcagagccgattgcggatcccagagcttcggcctgctggaccccaagctgtgctacctgctggatggcatcctgttcatctacggcgtgatcctgaccgccctgttcctgagagtgaagttcagcagaagcgccgacgcccctgcctaccagcagggacagaaccaactgtacaacgagctgaacctgggcagacgggaagagtacgacgtgctggacaagcggagaggcagggaccctgagatgggcggaaagccccagcggagaaagaacccccaggaaggactgtataacgaactccagaaagacaagatggccgaagcctacagcgagatcggcatgaagggcgagcggagaagaggcaagggccacgatggcctgtaccagggcctgagcaccgccaccaaggacacctatgacgccctgcacatgcaggccctgcctccaagaagggccaagcgatctggatctggagcaacaaacttctcactactcaaacaagcaggtgacgtggaggagaatcccgggcctactagtatggactggatttggcgcatccttttccttgtcggcgctgctaccggcgcgcattccttcgaagaagtgacactgaaagagtctggccccgctctggtcaagcccacacaaaccctgacactgacctgcaccttcagcggctttagcctgagcacatacggcatgggcgtcggctggattagacagcctcctggaaaagccctggaatggctggctaacatttggtgggacgacgacaagtattacaaccccagcctgaagaaccggctgaccatcagcaaggacaccagcaagaaccaggtggtgctgaccatgaccaacatggaccctgtggacaccgccacatattactgcgccagaatcggccccatcaagtaccccaccgctccttacagatacttcgacttctggggccagggcacaatggtcaccgttagctctacgcgtatccagaaccctgatcctgccgtgtaccagctgcgggatagcaagagcagcgacaagagcgtgtgtctgttcaccgacttcgacagccagaccaacgtgtcccagagcaaggactccgacgtgtacatcaccgataagaccgtgctggacatgcggagcatggacttcaagagcaactccgccgtggcctggtccaacaagtccgatttcgcctgcgccaacgccttcaacaacagcattatccccgaggacacattcttcccaagccccgagagcagctgcggtaccaagtctgtgcgcttttacctggtcgtcagccctgccagtgcctccactcagacatcttggaccccaagggaccttgtgtcctctcagacacagacacagtcctgcgtgccaccaactgctggcgcaagacaggctccagagtctcccagcacaatccccgtcccttctcagccccagaactccacacttaggccaggaccagctgctccaatcgcactggtcccagtgttctgcggactgctggttgccaagtctctggtgctgagcgcactcctcgtttggtggggcgatatttggtggaaaacgatgatggaattgagatccctcgatacgcagaaagccacatgccaccttcagcaagtcacagacttgccttggaccagcgtcagctctcccgtggaacgggaaattctgtatcatacagtggcccgcaccaagatttccgacgatgacgacgagcacacactgcgcgccaagagaagcggatctggcgtgaagcagaccctgaatttcgacctgctgaagctggctggcgacgtggaatccaacccaggcccttctagaggccatatgaccgagtacaagcccacggtgcgcctcgccacccgcgacgacgtccccagggccgtacgcaccctcgccgccgcgttcgccgactaccccgccacgcgccacaccgtcgatccggaccgccacatcgagcgggtcaccgagctgcaagaactcttcctcacgcgcgtcgggctcgacatcggcaaggtgtgggtcgcggacgacggcgccgcggtggcggtctggaccacgccggagagcgtcgaagcgggggcggtgttcgccgagatcggcccgcgcatggccgagttgagcggttcccggctggccgcgcagcaacagatggaaggcctcctggcgccgcaccggcccaaggagcccgcgtggttcctggccaccgtcggcgtctcgcccgaccaccagggcaagggtctgggcagcgccgtcgtgctccccggagtggaggcggccgagcgcgccggggtgcccgccttcctggagacctccgcgccccgcaacctccccttctacgagcggctcggcttcaccgtcaccgccgacgtcgaggtgcccgaaggaccgcgcacctggtgcatgacccgcaagcccggtgcctga

SEQ ID NO: 20348 - DNA, 2940 bp, synthetic construct
  source 1..2940: mol_type = other DNA
atggccttaccagtgaccgccttgctcctgccgctggccttgctgctccacgccgccaggccggacatccagatgacacagagccctagcagcctgtctgccagcgtgggagacagagtgaccatcacctgtctggcctccgaggacatctacaacaacctggcctggtatcagcagaagcctggcaaggcccctaagctgctgatctactacgccagctctctccaggatggcgtgcccagcagattttctggcagcggctctggcaccgactacaccctgacaatatccagcctccagcctgaggacttcgccacctactactgcctgcaagacagcgagtacccctggacatttctcgaggacctgaagaacgtgttcccacctgaggtggccgtgttcgagcctagcgaggccgagatcagccacacccagaaagccaccctcgtgtgcctggctaccggcttctaccccgaccatgtggaactgtcttggtgggtcaacggcaaagaggtgcacagcggcgtgtctaccgacccccagccactgaaagaacagcccgccctgaacgacagccggtactgcctgagcagcagactgagagtgtccgccaccttctggcagaacccccggaaccacttcagatgccaggtgcagttctacggcctgagcgagaacgacgagtggacccaggacagagccaagcccgtgacccagatcgtgtctgccgaagcctggggcagagccgattgcggatcccagagcttcggcctgctggaccccaagctgtgctacctgctggatggcatcctgttcatctacggcgtgatcctgaccgccctgttcctgagagtgaagttcagcagaagcgccgacgcccctgcctaccagcagggacagaaccaactgtacaacgagctgaacctgggcagacgggaagagtacgacgtgctggacaagcggagaggcagggaccctgagatgggcggaaagccccagcggagaaagaacccccaggaaggactgtataacgaactccagaaagacaagatggccgaagcctacagcgagatcggcatgaagggcgagcggagaagaggcaagggccacgatggcctgtaccagggcctgagcaccgccaccaaggacacctatgacgccctgcacatgcaggccctgcctccaagaagggccaagcgatctggatctggagcaacaaacttctcactactcaaacaagcaggtgacgtggaggagaatcccgggcctactagtatggactggatttggcgcatccttttccttgtcggcgctgctaccggcgcgcattccttcgaagaagtgacactgaaagagtctggccccgctctggtcaagcccacacaaaccctgacactgacctgcaccttcagcggctttagcctgagcacatacggcatgggcgtcggctggattagacagcctcctggaaaagccctggaatggctggctaacatttggtgggacgacgacaagtattacaaccccagcctgaagaaccggctgaccatcagcaaggacaccagcaagaaccaggtggtgctgaccatgaccaacatggaccctgtggacaccgccacatattactgcgccagaatcggccccatcaagtaccccaccgctccttacagatacttcgacttctggggccagggcacaatggtcaccgttagctctacgcgtatccagaaccctgatcctgccgtgtaccagctgcgggatagcaagagcagcgacaagagcgtgtgtctgttcaccgacttcgacagccagaccaacgtgtcccagagcaaggactccgacgtgtacatcaccgataagaccgtgctggacatgcggagcatggacttcaagagcaactccgccgtggcctggtccaacaagtccgatttcgcctgcgccaacgccttcaacaacagcattatccccgaggacacattcttcccaagccccgagagcagctgcggtaccgtggtcgagaaagaacatccacagcttggcgctggcaccgtcctgttgcttagagccggattctatgccgtcagcttcctgtccgtggctgtggggtctacagtgtattaccagggaaaatgtctcacctggaaaggccccagacgccagcttccagctgttgttcctgctccactgccaccaccttgtggctcctctgctcacttgcttccaccagtgcctggcggacgcgccaagagaagcggatctggcgtgaagcagaccctgaatttcgacctgctgaagctggctggcgacgtggaatccaacccaggcccttctagaggccatatgaccgagtacaagcccacggtgcgcctcgccacccgcgacgacgtccccagggccgtacgcaccctcgccgccgcgttcgccgactaccccgccacgcgccacaccgtcgatccggaccgccacatcgagcgggtcaccgagctgcaagaactcttcctcacgcgcgtcgggctcgacatcggcaaggtgtgggtcgcggacgacggcgccgcggtggcggtctggaccacgccggagagcgtcgaagcgggggcggtgttcgccgagatcggcccgcgcatggccgagttgagcggttcccggctggccgcgcagcaacagatggaaggcctcctggcgccgcaccggcccaaggagcccgcgtggttcctggccaccgtcggcgtctcgcccgaccaccagggcaagggtctgggcagcgccgtcgtgctccccggagtggaggcggccgagcgcgccggggtgcccgccttcctggagacctccgcgccccgcaacctccccttctacgagcggctcggcttcaccgtcaccgccgacgtcgaggtgcccgaaggaccgcgcacctggtgcatgacccgcaagcccggtgcctga

SEQ ID NO: 20349 - DNA, 2853 bp, synthetic construct
  source 1..2853: mol_type = other DNA
atggccttaccagtgaccgccttgctcctgccgctggccttgctgctccacgccgccaggccggacatccagatgacacagagccctagcagcctgtctgccagcgtgggagacagagtgaccatcacctgtctggcctccgaggacatctacaacaacctggcctggtatcagcagaagcctggcaaggcccctaagctgctgatctactacgccagctctctccaggatggcgtgcccagcagattttctggcagcggctctggcaccgactacaccctgacaatatccagcctccagcctgaggacttcgccacctactactgcctgcaagacagcgagtacccctggacatttctcgagggacagcctaaggccaatcctaccgtgacactgttccctccaagcagcgaagaactccaggccaacaaggccacacttgtgtgcctgatctccgacttctaccctggggctgtgacagtggcttggaaggccgatggatctcctgtgaaagccggcgtggaaaccaccaagccatccaagcagagcaacaacaaatacgccgccagctcctacctgagcctgacacctgagcagtggaagtcccacagatcctacagctgccaagtgacccacgaaggcagcaccgtggaaaagacagtggcccctacagagtgcagcggatcccagagcttcggcctgctggaccccaagctgtgctacctgctggatggcatcctgttcatctacggcgtgatcctgaccgccctgttcctgagagtgaagttcagcagaagcgccgacgcccctgcctaccagcagggacagaaccaactgtacaacgagctgaacctgggcagacgggaagagtacgacgtgctggacaagcggagaggcagggaccctgagatgggcggaaagccccagcggagaaagaacccccaggaaggactgtataacgaactccagaaagacaagatggccgaagcctacagcgagatcggcatgaagggcgagcggagaagaggcaagggccacgatggcctgtaccagggcctgagcaccgccaccaaggacacctatgacgccctgcacatgcaggccctgcctccaagaagggccaagcgatctggatctggagcaacaaacttctcactactcaaacaagcaggtgacgtggaggagaatcccgggcctactagtatggactggatttggcgcatccttttccttgtcggcgctgctaccggcgcgcattccttcgaagaagtgacactgaaagagtctggccccgctctggtcaagcccacacaaaccctgacactgacctgcaccttcagcggctttagcctgagcacatacggcatgggcgtcggctggattagacagcctcctggaaaagccctggaatggctggctaacatttggtgggacgacgacaagtattacaaccccagcctgaagaaccggctgaccatcagcaaggacaccagcaagaaccaggtggtgctgaccatgaccaacatggaccctgtggacaccgccacatattactgcgccagaatcggccccatcaagtaccccaccgctccttacagatacttcgacttctggggccagggcacaatggtcaccgttagctctacgcgtgcctctacaaagggaccctccgtgtttcctctggctcccagcagcaagtctacaagcggaggaacagccgctctgggctgcctggtcaaggattactttcccgagcctgtgaccgtgtcctggaatagcggagcactgacaagcggcgtgcacacctttccagccgtgctgcaaagcagcggcctgtactctctgagcagcgtggtcacagtgcctagctctagcctgggcacccagacctacatctgcaatgtgaaccacaagcctagcaacaccaaggtggacaagagagtggaacccaagagctgtggtaccatcactcaaggtttggcagtgtcaaccatctcatcattctttccacctggctaccaagtgtccttctgcctggtcatggtgctgctgttcgccgtggataccggcctgtacttcagcgtcaagaccaacatccggtccagcaccagagactggaaggaccacaagttcaagtggcggaaggaccctcaggacaagagggccaagcgatctggatctggagcaacaaacttctcactactcaaacaagcaggtgacgtggaggagaatcccgggccttctagaggccatatgaccgagtacaagcccacggtgcgcctcgccacccgcgacgacgtccccagggccgtacgcaccctcgccgccgcgttcgccgactaccccgccacgcgccacaccgtcgatccggaccgccacatcgagcgggtcaccgagctgcaagaactcttcctcacgcgcgtcgggctcgacatcggcaaggtgtgggtcgcggacgacggcgccgcggtggcggtctggaccacgccggagagcgtcgaagcgggggcggtgttcgccgagatcggcccgcgcatggccgagttgagcggttcccggctggccgcgcagcaacagatggaaggcctcctggcgccgcaccggcccaaggagcccgcgtggttcctggccaccgtcggcgtctcgcccgaccaccagggcaagggtctgggcagcgccgtcgtgctccccggagtggaggcggccgagcgcgccggggtgcccgccttcctggagacctccgcgccccgcaacctccccttctacgagcggctcggcttcaccgtcaccgccgacgtcgaggtgcccgaaggaccgcgcacctggtgcatgacccgcaagcccggtgcctga

SEQ ID NO: 20350 - DNA, 2898 bp, synthetic construct
  source 1..2898: mol_type = other DNA
atggccttaccagtgaccgccttgctcctgccgctggccttgctgctccacgccgccaggccggacatccagatgacacagagccctagcagcctgtctgccagcgtgggagacagagtgaccatcacctgtctggcctccgaggacatctacaacaacctggcctggtatcagcagaagcctggcaaggcccctaagctgctgatctactacgccagctctctccaggatggcgtgcccagcagattttctggcagcggctctggcaccgactacaccctgacaatatccagcctccagcctgaggacttcgccacctactactgcctgcaagacagcgagtacccctggacatttctcgaggacctgaagaacgtgttcccacctgaggtggccgtgttcgagcctagcgaggccgagatcagccacacccagaaagccaccctcgtgtgcctggctaccggcttctaccccgaccatgtggaactgtcttggtgggtcaacggcaaagaggtgcacagcggcgtgtctaccgacccccagccactgaaagaacagcccgccctgaacgacagccggtactgcctgagcagcagactgagagtgtccgccaccttctggcagaacccccggaaccacttcagatgccaggtgcagttctacggcctgagcgagaacgacgagtggacccaggacagagccaagcccgtgacccagatcgtgtctgccgaagcctggggcagagccgattgcggatcccagagcttcggcctgctggaccccaagctgtgctacctgctggatggcatcctgttcatctacggcgtgatcctgaccgccctgttcctgagagtgaagttcagcagaagcgccgacgcccctgcctaccagcagggacagaaccaactgtacaacgagctgaacctgggcagacgggaagagtacgacgtgctggacaagcggagaggcagggaccctgagatgggcggaaagccccagcggagaaagaacccccaggaaggactgtataacgaactccagaaagacaagatggccgaagcctacagcgagatcggcatgaagggcgagcggagaagaggcaagggccacgatggcctgtaccagggcctgagcaccgccaccaaggacacctatgacgccctgcacatgcaggccctgcctccaagaagggccaagcgatctggatctggagcaacaaacttctcactactcaaacaagcaggtgacgtggaggagaatcccgggcctactagtatggactggatttggcgcatccttttccttgtcggcgctgctaccggcgcgcattccttcgaagaagtgacactgaaagagtctggccccgctctggtcaagcccacacaaaccctgacactgacctgcaccttcagcggctttagcctgagcacatacggcatgggcgtcggctggattagacagcctcctggaaaagccctggaatggctggctaacatttggtgggacgacgacaagtattacaaccccagcctgaagaaccggctgaccatcagcaaggacaccagcaagaaccaggtggtgctgaccatgaccaacatggaccctgtggacaccgccacatattactgcgccagaatcggccccatcaagtaccccaccgctccttacagatacttcgacttctggggccagggcacaatggtcaccgttagctctacgcgtatccagaaccctgatcctgccgtgtaccagctgcgggatagcaagagcagcgacaagagcgtgtgtctgttcaccgacttcgacagccagaccaacgtgtcccagagcaaggactccgacgtgtacatcaccgataagaccgtgctggacatgcggagcatggacttcaagagcaactccgccgtggcctggtccaacaagtccgatttcgcctgcgccaacgccttcaacaacagcattatccccgaggacacattcttcccaagccccgagagcagctgcggtaccatcactcaaggtttggcagtgtcaaccatctcatcattctttccacctggctaccaagtgtccttctgcctggtcatggtgctgctgttcgccgtggataccggcctgtacttcagcgtcaagaccaacatccggtccagcaccagagactggaaggaccacaagttcaagtggcggaaggaccctcaggacaagagggccaagcgatctggatctggagcaacaaacttctcactactcaaacaagcaggtgacgtggaggagaatcccgggccttctagaggccatatgaccgagtacaagcccacggtgcgcctcgccacccgcgacgacgtccccagggccgtacgcaccctcgccgccgcgttcgccgactaccccgccacgcgccacaccgtcgatccggaccgccacatcgagcgggtcaccgagctgcaagaactcttcctcacgcgcgtcgggctcgacatcggcaaggtgtgggtcgcggacgacggcgccgcggtggcggtctggaccacgccggagagcgtcgaagcgggggcggtgttcgccgagatcggcccgcgcatggccgagttgagcggttcccggctggccgcgcagcaacagatggaaggcctcctggcgccgcaccggcccaaggagcccgcgtggttcctggccaccgtcggcgtctcgcccgaccaccagggcaagggtctgggcagcgccgtcgtgctccccggagtggaggcggccgagcgcgccggggtgcccgccttcctggagacctccgcgccccgcaacctccccttctacgagcggctcggcttcaccgtcaccgccgacgtcgaggtgcccgaaggaccgcgcacctggtgcatgacccgcaagcccggtgcctga

SEQ ID NO: 20351 - DNA, 1947 bp, synthetic construct
  source 1..1947: mol_type = other DNA
atggccttaccagtgaccgccttgctcctgccgctggccttgctgctccacgccgccaggccggacatccagatgacacagagccctagcagcctgtctgccagcgtgggagacagagtgaccatcacctgtctggcctccgaggacatctacaacaacctggcctggtatcagcagaagcctggcaaggcccctaagctgctgatctactacgccagctctctccaggatggcgtgcccagcagattttctggcagcggctctggcaccgactacaccctgacaatatccagcctccagcctgaggacttcgccacctactactgcctgcaagacagcgagtacccctggacatttctcgagggacagcctaaggccaatcctaccgtgacactgttccctccaagcagcgaagaactccaggccaacaaggccacacttgtgtgcctgatctccgacttctaccctggggctgtgacagtggcttggaaggccgatggatctcctgtgaaagccggcgtggaaaccaccaagccatccaagcagagcaacaacaaatacgccgccagctcctacctgagcctgacacctgagcagtggaagtcccacagatcctacagctgccaagtgacccacgaaggcagcaccgtggaaaagacagtggcccctacagagtgcagcggatccctgggagagcctcagctgtgctatatcctggacgccatcctgtttctgtacggcatcgtgctgaccctgctgtactgccggctgaagatccaagtgcggaaggccgccatcaccagctacgagaaatccgacggcgtgtacaccggcctgagcaccagaaatcaagagacatacgagacactgaagcacgaaaagcctccacaaagggccaagcgatctggatctggagcaacaaacttctcactactcaaacaagcaggtgacgtggaggagaatcccgggcctactagtatggactggatttggcgcatccttttccttgtcggcgctgctaccggcgcgcattccttcgaagaagtgacactgaaagagtctggccccgctctggtcaagcccacacaaaccctgacactgacctgcaccttcagcggctttagcctgagcacatacggcatgggcgtcggctggattagacagcctcctggaaaagccctggaatggctggctaacatttggtgggacgacgacaagtattacaaccccagcctgaagaaccggctgaccatcagcaaggacaccagcaagaaccaggtggtgctgaccatgaccaacatggaccctgtggacaccgccacatattactgcgccagaatcggccccatcaagtaccccaccgctccttacagatacttcgacttctggggccagggcacaatggtcaccgttagctctacgcgtgcctctacaaagggaccctccgtgtttcctctggctcccagcagcaagtctacaagcggaggaacagccgctctgggctgcctggtcaaggattactttcccgagcctgtgaccgtgtcctggaatagcggagcactgacaagcggcgtgcacacctttccagccgtgctgcaaagcagcggcctgtactctctgagcagcgtggtcacagtgcctagctctagcctgggcacccagacctacatctgcaatgtgaaccacaagcctagcaacaccaaggtggacaagagagtggaacccaagagctgtggtaccctcggagaaccacagctctgttacattctggatgctatcctgttcctctatgggatcgtcctgacactcctgtattgcagactcaaaattcaagttcgcaaagccgccattacctcttacgagaagagtgatggggtgtacacaggactgtctacccggaatcaagaaacctacgaaaccctcaaacatgagaagccacctcagtaa

SEQ ID NO: 20352 - DNA, 3078 bp, synthetic construct
  source 1..3078: mol_type = other DNA
atggccttaccagtgaccgccttgctcctgccgctggccttgctgctccacgccgccaggccggacatccagatgacacagagccctagcagcctgtctgccagcgtgggagacagagtgaccatcacctgtctggcctccgaggacatctacaacaacctggcctggtatcagcagaagcctggcaaggcccctaagctgctgatctactacgccagctctctccaggatggcgtgcccagcagattttctggcagcggctctggcaccgactacaccctgacaatatccagcctccagcctgaggacttcgccacctactactgcctgcaagacagcgagtacccctggacatttggacagcctaaggccaatcctaccgtgacactgttccctccaagcagcgaagaactccaggccaacaaggccacacttgtgtgcctgatctccgacttctaccctggggctgtgacagtggcttggaaggccgatggatctcctgtgaaagccggcgtggaaaccaccaagccatccaagcagagcaacaacaaatacgccgccagctcctacctgagcctgacacctgagcagtggaagtcccacagatcctacagctgccaagtgacccacgaaggcagcaccgtggaaaagacagtggcccctacagagtgcagcggatcccagagcttcggcctgctggaccccaagctgtgctacctgctggatggcatcctgttcatctacggcgtgatcctgaccgccctgttcctgagagtgaagttcagcagaagcgccgacgcccctgcctaccagcagggacagaaccaactgtacaacgagctgaacctgggcagacgggaagagtacgacgtgctggacaagcggagaggcagggaccctgagatgggcggaaagccccggagaaagaacccccaggaaggactgtataacgaactccagaaagacaagatggccgaagcctacagcgagatcggcatgaagggcgagcggagaagaggcaagggccacgatggcctgtaccagggcctgagcaccgccaccaaggacacctatgacgccctgcacatgcaggccctgcctccaagaagggccaagcgatctggatctggagcaacaaacttctcactactcaaacaagcaggtgacgtggaggagaatcccgggcctactagtatggactggatttggcgcatccttttccttgtcggcgctgctaccggcgcgcattccttcgaagaagtgacactgaaagagtctggccccgctctggtcaagcccacacaaaccctgacactgacctgcaccttcagcggctttagcctgagcacatacggcatgggcgtcggctggattagacagcctcctggaaaagccctggaatggctggctaacatttggtgggacgacgacaagtattacaaccccagcctgaagaaccggctgaccatcagcaaggacaccagcaagaaccaggtggtgctgaccatgaccaacatggaccctgtggacaccgccacatattactgcgccagaatcggccccatcaagtaccccaccgctccttacagatacttcgacttctggggccagggcacaatggtcaccgttagctctgcctctacaaagggaccctccgtgtttcctctggctcccagcagcaagtctacaagcggaggaacagccgctctgggctgcctggtcaaggattactttcccgagcctgtgaccgtgtcctggaatagcggagcactgacaagcggcgtgcacacctttccagccgtgctgcaaagcagcggcctgtactctctgagcagcgtggtcacagtgcctagctctagcctgggcacccagacctacatctgcaatgtgaaccacaagcctagcaacaccaaggtggacaagagagtggaacccaagagctgtggtacccagagttttgggttgttggaccctaaattgtgctatctgttggacggaatcctgttcatttacggagtgatcctgaccgcattgttcctgcgggttaagttttccagatccgcagacgcacccgcttaccaacaagggcagaaccaactctacaatgaacttaatttggggcggagggaagagtacgacgttctggacaaaaggaggggacgagatcccgagatgggcggaaagcctcgaaggaagaatccgcaagaggggctttataacgaactccagaaagataaaatggcagaagcctatagtgagattgggatgaagggagaaaggaggaggggtaaaggtcacgatgggttgtaccaaggattgagcacagccactaaagatacctatgatgcgctccacatgcaggccctgccgccaagacgcgccaagagaagcggatctggcgtgaagcagaccctgaatttcgacctgctgaagctggctggcgacgtggaatccaacccaggcccttctagaggccatatgaccgagtacaagcccacggtgcgcctcgccacccgcgacgacgtccccagggccgtacgcaccctcgccgccgcgttcgccgactaccccgccacgcgccacaccgtcgatccggaccgccacatcgagcgggtcaccgagctgcaagaactcttcctcacgcgcgtcgggctcgacatcggcaaggtgtgggtcgcggacgacggcgccgcggtggcggtctggaccacgccggagagcgtcgaagcgggggcggtgttcgccgagatcggcccgcgcatggccgagttgagcggttcccggctggccgcgcagcaacagatggaaggcctcctggcgccgcaccggcccaaggagcccgcgtggttcctggccaccgtcggcgtctcgcccgaccaccagggcaagggtctgggcagcgccgtcgtgctccccggagtggaggcggccgagcgcgccggggtgcccgccttcctggagacctccgcgccccgcaacctccccttctacgagcggctcggcttcaccgtcaccgccgacgtcgaggtgcccgaaggaccgcgcacctggtgcatgacccgcaagcccggtgcctga

SEQ ID NO: 20353 - DNA, 2433 bp, synthetic construct
  source 1..2433: mol_type = other DNA
atggccttaccagtgaccgccttgctcctgccgctggccttgctgctccacgccgccaggccggacatccagatgacacagagccctagcagcctgtctgccagcgtgggagacagagtgaccatcacctgtctggcctccgaggacatctacaacaacctggcctggtatcagcagaagcctggcaaggcccctaagctgctgatctactacgccagctctctccaggatggcgtgcccagcagattttctggcagcggctctggcaccgactacaccctgacaatatccagcctccagcctgaggacttcgccacctactactgcctgcaagacagcgagtacccctggacatttctcgaggacctgaagaacgtgttcccacctgaggtggccgtgttcgagcctagcgaggccgagatcagccacacccagaaagccaccctcgtgtgcctggctaccggcttctaccccgaccatgtggaactgtcttggtgggtcaacggcaaagaggtgcacagcggcgtgtctaccgacccccagccactgaaagaacagcccgccctgaacgacagccggtactgcctgagcagcagactgagagtgtccgccaccttctggcagaacccccggaaccacttcagatgccaggtgcagttctacggcctgagcgagaacgacgagtggacccaggacagagccaagcccgtgacccagatcgtgtctgccgaagcctggggcagagccgattgcggatcccagagcttcggcctgctggaccccaagctgtgctacctgctggatggcatcctgttcatctacggcgtgatcctgaccgccctgttcctgagagtgaagttcagcagaagcgccgacgcccctgcctaccagcagggacagaaccaactgtacaacgagctgaacctgggcagacgggaagagtacgacgtgctggacaagcggagaggcagggaccctgagatgggcggaaagccccggagaaagaacccccaggaaggactgtataacgaactccagaaagacaagatggccgaagcctacagcgagatcggcatgaagggcgagcggagaagaggcaagggccacgatggcctgtaccagggcctgagcaccgccaccaaggacacctatgacgccctgcacatgcaggccctgcctccaagaagggccaagcgatctggatctggagcaacaaacttctcactactcaaacaagcaggtgacgtggaggagaatcccgggcctactagtatggactggatttggcgcatccttttccttgtcggcgctgctaccggcgcgcattccttcgaagaagtgacactgaaagagtctggccccgctctggtcaagcccacacaaaccctgacactgacctgcaccttcagcggctttagcctgagcacatacggcatgggcgtcggctggattagacagcctcctggaaaagccctggaatggctggctaacatttggtgggacgacgacaagtattacaaccccagcctgaagaaccggctgaccatcagcaaggacaccagcaagaaccaggtggtgctgaccatgaccaacatggaccctgtggacaccgccacatattactgcgccagaatcggccccatcaagtaccccaccgctccttacagatacttcgacttctggggccagggcacaatggtcaccgttagctctacgcgtatccagaaccctgatcctgccgtgtaccagctgcgggatagcaagagcagcgacaagagcgtgtgtctgttcaccgacttcgacagccagaccaacgtgtcccagagcaaggactccgacgtgtacatcaccgataagaccgtgctggacatgcggagcatggacttcaagagcaactccgccgtggcctggtccaacaagtccgatttcgcctgcgccaacgccttcaacaacagcattatccccgaggacacattcttcccaagccccgagagcagctgcggtacccagagttttgggttgttggaccctaaattgtgctatctgttggacggaatcctgttcatttacggagtgatcctgaccgcattgttcctgcgggttaagttttccagatccgcagacgcacccgcttaccaacaagggcagaaccaactctacaatgaacttaatttggggcggagggaagagtacgacgttctggacaaaaggaggggacgagatcccgagatgggcggaaagcctcgaaggaagaatccgcaagaggggctttataacgaactccagaaagataaaatggcagaagcctatagtgagattgggatgaagggagaaaggaggaggggtaaaggtcacgatgggttgtaccaaggattgagcacagccactaaagatacctatgatgcgctccacatgcaggccctgccgccaaga

SEQ ID NO: 20354 - DNA, 31 bp, synthetic construct; identical to SEQ ID NO: 304
  source 1..31: mol_type = other DNA

SEQ ID NO: 20355 - DNA, 31 bp, synthetic construct; identical to SEQ ID NO: 304
  source 1..31: mol_type = other DNA

SEQ ID NO: 20356 - DNA, 31 bp, synthetic construct; identical to SEQ ID NO: 304
  source 1..31: mol_type = other DNA

SEQ ID NO: 20357 - DNA, 31 bp, synthetic construct; identical to SEQ ID NO: 304
  source 1..31: mol_type = other DNA

SEQ ID NO: 20358 - DNA, 31 bp, synthetic construct; identical to SEQ ID NO: 304
  source 1..31: mol_type = other DNA

SEQ ID NO: 20359 - DNA, 31 bp, synthetic construct; identical to SEQ ID NO: 304
  source 1..31: mol_type = other DNA

SEQ ID NO: 20360 - DNA, 31 bp, synthetic construct; identical to SEQ ID NO: 304
  source 1..31: mol_type = other DNA

SEQ ID NO: 20361 - DNA, 31 bp, synthetic construct; identical to SEQ ID NO: 304
  source 1..31: mol_type = other DNA

SEQ ID NO: 20362 - DNA, 31 bp, synthetic construct; identical to SEQ ID NO: 304
  source 1..31: mol_type = other DNA

SEQ ID NO: 20363 - DNA, 31 bp, synthetic construct; identical to SEQ ID NO: 304
  source 1..31: mol_type = other DNA

SEQ ID NO: 20364 - DNA, 31 bp, synthetic construct; identical to SEQ ID NO: 304
  source 1..31: mol_type = other DNA

SEQ ID NO: 20365 - DNA, 31 bp, synthetic construct; identical to SEQ ID NO: 304
  source 1..31: mol_type = other DNA

SEQ ID NO: 20366 - DNA, 31 bp, synthetic construct; identical to SEQ ID NO: 304
  source 1..31: mol_type = other DNA

SEQ ID NO: 20367 - DNA, 31 bp, synthetic construct; identical to SEQ ID NO: 304
  source 1..31: mol_type = other DNA

SEQ ID NO: 20368 - DNA, 31 bp, synthetic construct; identical to SEQ ID NO: 304
  source 1..31: mol_type = other DNA

SEQ ID NO: 20369 - DNA, 31 bp, synthetic construct; identical to SEQ ID NO: 304
  source 1..31: mol_type = other DNA

SEQ ID NO: 20370 - DNA, 31 bp, synthetic construct; identical to SEQ ID NO: 304
  source 1..31: mol_type = other DNA

SEQ ID NO: 20371 - protein, 94 aa, synthetic construct; identical to SEQ ID NO: 8986

SEQ ID NO: 20372 - protein, 94 aa, synthetic construct
IQNPDPAVYQLRDSKSSDKSVCLFTDFDSQTNVSQSKDSDVYITDKCVLDMRSMDFKSNSAVAWSNKSDFACANAFNNSIIPEDTFFPSSDVPC

SEQ ID NO: 20373 - protein, 94 aa, synthetic construct
IQNPDPAVYQLRDSKSSDKSVCLFTDFDSQTNVSQSKDSDVYITDKCVLDMRSMDFKSNSAVAWSNKSDFACANAFNNSIIPEDTFFPSPESSC

SEQ ID NO: 20374 - protein, 132 aa, synthetic construct
EDLKNVFPPEVAVFEPSEAEISHTQKATLVCLATGFYPDHVELSWWVNGKEVHSGVSTDPQPLKEQPALNDSRYCLSSRLRVSATFWQNPRNHFRCQVQFYGLSENDEWTQDRAKPVTQIVSAEAWGRADCG

SEQ ID NO: 20375 - protein, 131 aa, synthetic construct
EDLKNVFPPEVAVFEPSKAEIAHTQKATLVCLATGFYPDHVELSWWVNGKEVHSGVCTDPQPLKEQPALNDSRYCLSSRLRVSATFWQNPRNHFRCQVQFYGLSENDEWTQDRAKPVTQIVSAEAWGRADC

SEQ ID NO: 20376 - protein, 131 aa, synthetic construct
EDLKNVFPPEVAVFEPSEAEISHTQKATLVCLATGFYPDHVELSWWVNGKEVHSGVCTDPQPLKEQPALNDSRYCLSSRLRVSATFWQNPRNHFRCQVQFYGLSENDEWTQDRAKPVTQIVSAEAWGRADC

SEQ ID NO: 20377 - protein, 9 aa, synthetic construct
PQQSFPEQE

SEQ ID NO: 20378 - protein, 140 aa, synthetic construct
IQNPDPAVYQLRDSKSSDKFVCLFTDFDSQINVSQSKDSDVYITDKCVLDMRSMDFKSNSAVAWSNKSDFTCANAFNNSIIPEDTFFPSPESSCDVKLVEKSFETDTNLNFQNLSVIGFRILLLKVAGFNLLMTLRLWSS

SEQ ID NO: 20379 - protein, 179 aa, synthetic construct
EDLKNVFPPEVAVFEPSKAEISRTQKATLVCLATGFYPPHVELSWWVNGKEVHDGVCTDPQPLKEQPALNDSRYCLSSRLRVSATFWQNPRNHFRCQVQFYGLSENDEWTQDRAKPVTQIVSAEAWGRADCGFTSESYQQGVLSATILYEILLGKATLYAVLVSALVLMAMVKRKDSRG

SEQ ID NO: 20380 - protein, 621 aa, synthetic construct
MALPVTALLLPLALLLHAARPNAGVTQTPKFQVLKTGQSMTLQCAQDMNHEYMSWYRQDPGMGLRLIHYSVAIQTTDQGEVPNGYNVSRSTIEDFPLRLLSAAPSQTSVYFCASSYLGNTGELFFGEGSRLTVLEGQPKANPTVTLFPPSSEELQANKATLVCLISDFYPGAVTVAWKADGSPVKAGVETTKPSKQSNNKYAASSYLSLTPEQWKSHRSYSCQVTHEGSTVEKTVAPTECSGRADCGFTSESYQQGVLSATILYEILLGKATLYAVLVSALVLMAMVKRKDSRGRAKRSGSGATNFSLLKQAGDVEENPGPTSMDWIWRILFLVGAATGAHSFEQEVTQIPAALSVPEGENLVLNCSFTDSAIYNLQWFRQDPGKGLTSLLLIQSSQREQTSGRLNASLDKSSGRSTLYIAASQPGDSATYLCAVRPTSGGSYIPTFGRGTSLIVHPYASTKGPSVFPLAPSSKSTSGGTAALGCLVKDYFPEPVTVSWNSGALTSGVHTFPAVLQSSGLYSLSSVVTVPSSSLGTQTYICNVNHKPSNTKVDKRVEPKSCIPEDTFFPSPESSCDVKLVEKSFETDTNLNFQNLSVIGFRILLLKVAGFNLLMTLRLWSS

SEQ ID NO: 20381 - protein, 643 aa, synthetic construct
MALPVTALLLPLALLLHAARPNAGVTQTPKFQVLKTGQSMTLQCAQDMNHEYMSWYRQDPGMGLRLIHYSVAIQTTDQGEVPNGYNVSRSTIEDFPLRLLSAAPSQTSVYFCASSYLGNTGELFFGEGSRLTVLEGQPKANPTVTLFPPSSEELQANKATLVCLISDFYPGAVTVAWKADGSPVKAGVETTKPSKQSNNKYAASSYLSLTPEQWKSHRSYSCQVTHEGSTVEKTVAPTECSPIKTDVITMDPKDNCSKDANDTLLLQLTNTSAYYMYLLLLLKSVVYFAIITCCLLRRTAFCCNGEKSRAKRSGSGATNFSLLKQAGDVEENPGPTSMDWIWRILFLVGAATGAHSFEQEVTQIPAALSVPEGENLVLNCSFTDSAIYNLQWFRQDPGKGLTSLLLIQSSQREQTSGRLNASLDKSSGRSTLYIAASQPGDSATYLCAVRPTSGGSYIPTFGRGTSLIVHPYASTKGPSVFPLAPSSKSTSGGTAALGCLVKDYFPEPVTVSWNSGALTSGVHTFPAVLQSSGLYSLSSVVTVPSSSLGTQTYICNVNHKPSNTKVDKRVEPKSCEVKTDSTDHVKPKETENTKQPSKSCHKPKAIVHTEKVNMMSLTVLGLRMLFAKTVAVNFLLTAKLFFL

SEQ ID NO: 20382 - protein, 375 aa, synthetic construct
MWFLTTLLLWVPVDGQVVDTTKAVITLQPPWVSVFQEETVTLHCEVLHLPGSSSTQWFLNGTATQTSTPSYRITSASVNDSGEYRCQRGLSGRSDPIQLEIHRGWLLLQVSSRVFTEGEPLALRCHAWKDKLVYNVLYYRNGKAFKFFHWNSNLTILKTNISHNGTYHCSGMGKHRYTSAGISVTVKELFPAPVLNASVTSPLLEGNLVTLSCETKLLLQRPGLQLYFSFYMGSKTLRGRNTSSEYQILTARREDSGLYWCEAATEDGNVLKRSPELELQVLGLQLPTPVWFHVLFYLAVGIMFLVNTVLWVTIRKELKRKKKWDLEISLDSGHEKKVISSLQEDRHLEEELKCQEQKEEQLQEGVHRKEPQGAT

SEQ ID NO: 20383 - protein, 316 aa, synthetic construct
MWFLTTLLLWVPVDGQVVDTTKAVITLQPPWVSVFQEETVTLHCEVLHLPGSSSTQWFLNGTATQTSTPSYRITSASVNDSGEYRCQRGLSGRSDPIQLEIHRGWLLLQVSSRVFTEGEPLALRCHAWKDKLVYNVLYYRNGKAFKFFHWNSNLTILKTNISHNGTYHCSGMGKHRYTSAGISVTVKELFPAPVLNASVTSPLLEGNLVTLSCETKLLLQRPGLQLYFSFYMGSKTLRGRNTSSEYQILTARREDSGLYWCEAATEDGNVLKRSPELELQVLGLQLPTPVWFHVLFYLAVGIMFLVNTVLWVTIRK

SEQ ID NO: 20384 - protein, 21 aa, synthetic construct
GPCIFNLLVNFVSSRIEAVKL

SEQ ID NO: 20385 - protein, 31 aa, synthetic construct
GGGGGGGGGGGGGGGGGGGGGGGGGGGGGGG

SEQ ID NO: 20386 - protein, 112 aa, synthetic construct
DIVLTQSPATLSLSPGDRATISCRASESVTILGSHLIHWYQQKPGQPPRLLIQLASNVQTGVPARFSGSGSRTDFTLTISSVEPEDFAVYYCLQSRTIPRTFGQGTKLEIKR

SEQ ID NO: 20387 - protein, 111 aa, synthetic construct
DIVLTQSPSSLSASVGDRATISCRASESVTILGSHLIYWYQQKPGQAPRLLIQLASNVQTGVPARFSGSGSGTDFTLTISSVEPEDVAVYYCLQSRTIPRTFGQGTKVEIK

SEQ ID NO: 20388 - protein, 108 aa, synthetic construct
EIVLTQSPGTLSLSPGEGATLSCRAGQSVRSSYLGWYQQKPGQAPRLLIYGASSRATGIPDRFSGSGSGTDFTLTISRLEPEDFAVYYCQQYGYSPPTFGGGTKLEIK

SEQ ID NO: 20389 - protein, 108 aa, synthetic construct
EIVLTQSPGTLSLSPGERATLSCRASQSIRSSYLAWYQQKPGQAPRLLIYGASSRATGIPDRFSGSGSGTDFTLTISRLEPEDFAVYYCQQYGDLPFTFGPGTKLEIK

SEQ ID NO: 20390 - protein, 108 aa, synthetic construct
DIQMTQSPSSLSASVGDRVTITCRASQSVSSYLAWYQQKPGKAPKLLIYDASNRATGVPSRFSGSGSGTDFTLTISSLQPEDFATYYCQQRTNWPLTFGQGTKVEIKR

SEQ ID NO: 20391 - protein, 108 aa, synthetic construct
DIQMTQSPSSLSASVGDRVTITCRASQGISSWLAWYQQKPGKAPKLLIYAASSLQSGVPSRFSGSGSGTDFTLTISSLQPEDFATYYCQQYNSYPLTFGQGTKVEIKR

SEQ ID NO: 20392 - protein, 114 aa, synthetic construct
ELQSVLTQPPSASGTPGQRVTISCSGSSSNIGSNYVNWYQQLPGTAPKLLIYGDYQRPSGVPDRFSGSKSGTSASLAISGLRSEDEADYYCATRDDSLSGSVVFGTGTKLTVLG

SEQ ID NO: 20393 - protein, 98 aa, synthetic construct
DIQMTQSPSSLSASVGDRVTITCLASEDIYDNLAWYQQKPGKAPKLLIYYASSLQDGVPSRFSGSGSGTDYTLTISSLQPEDFATYYCLQDSEYPWTF

SEQ ID NO: 20394 - protein, 98 aa, synthetic construct
DIQMTQSPSSLSASVGDRVTITCLASEDIYNNLAWYQQKPGKAPKLLIYYASSLQDGVPSRFSGSGSGTDYTLTISSLQPEDFATYYCLQDSEYPWTF

SEQ ID NO: 20395 - protein, 107 aa, synthetic construct
DIQMTQSPSTLSASVGDRVTITCRASQSISNWLAWYQQKPGRAPNLLISKASSLKSGVPSRFSGSGSGTEFTLTVSSLQPDDFATYYCQQYYSYSYTFGQGTKLEIK

SEQ ID NO: 20396 - protein, 108 aa, synthetic construct
DIQMTQSPSSLSASVGDRVTITCRASQSIRNYLNWYQQKPGKAPELLIHAASSLQSGVPSRFSGSGSGTDFTLTISSLQPEDFASYYCQQSYSAPPITFGQGTRLEIK

SEQ ID NO: 20397 - protein, 31 aa, synthetic construct; identical to SEQ ID NO: 20385

SEQ ID NO: 20398 - protein, 31 aa, synthetic construct; identical to SEQ ID NO: 20385

SEQ ID NO: 20399 - protein, 31 aa, synthetic construct; identical to SEQ ID NO: 20385

SEQ ID NO: 20400 - protein, 31 aa, synthetic construct; identical to SEQ ID NO: 20385

SEQ ID NO: 20401 - protein, 31 aa, synthetic construct; identical to SEQ ID NO: 20385

SEQ ID NO: 20402 - protein, 31 aa, synthetic construct; identical to SEQ ID NO: 20385

SEQ ID NO: 20403 - protein, 31 aa, synthetic construct; identical to SEQ ID NO: 20385

SEQ ID NO: 20404 - protein, 31 aa, synthetic construct; identical to SEQ ID NO: 20385

SEQ ID NO: 20405 - protein, 117 aa, synthetic construct
QVQLVQSGPEVKKPGESVKISCKASGYTFRHYSMNWVKQAPGQGLKWMGRINTESGVPIYADDFKGRFSFTVDTSASTAYLEISSLTSEDTAVYFCSNDYLYSLDFWGQGTTLTVSS

SEQ ID NO: 20406 - protein, 117 aa, synthetic construct
QIQLVQSGPELKKPGGSVKISCAASGYTFTDYSINWVRQAPGKGLEWVGWINTETREPAYAYDFRGRFTFSADTSKSTAYLQMNSLRAEDTAVYYCALDYSYAMDYWGQGTLVTVSS

SEQ ID NO: 20407 - protein, 120 aa, synthetic construct
EVQLLESGGGLVQPGGSLRLSCAASGFTFSSYAMSWVRQAPGKGLEWVSVISGSGGRPNYADSVKGRFTISRDNSKNTLYLQMNSLRDEDTAVYYCAKVDYSNYLFFDYWGQGTLVTVSS

SEQ ID NO: 20408 - protein, 120 aa, synthetic construct
EVQLLESGGGMVQPGGSLRLSCAASGFTFSSYAMSWVRQAPGKGLEWVSAISGSGGRTFYADSVEGRFTISRDNSKNTLYLQMNSLRAEDTAVYYCAKHDYSNYPYFDYWGQGTLVTVSS

SEQ ID NO: 20409 - protein, 118 aa, synthetic construct
EVQLVESGGGLVQPGGSLRLSCAASGFTFSSYIMHWVRQAPGKGLEWVAVISYDGRNKYYADSVKGRFTISRDNSKNTLYLQMNSLRAEDTAVYYCARDTDGYDFDYWGQGTLVTVSS

SEQ ID NO: 20410 - protein, 118 aa, synthetic construct
EVQLVESGGGLVQPGGSLRLSCAASGFTFSDHGMHWVRQAPGKGLEWVAVIWYDGSNKYYADSVKGRFTISRDNSKNTLYLQMNSLRAEDTAVYYCARDSIMVRGDYWGQGTLVTVSS

SEQ ID NO: 20411 - protein, 122 aa, synthetic construct
EVQLVQSGAEVKKPGESLKISCKGSGYGFTSYWIGWVRQMPGKGLEWMGIIHPDDSDTKYSPSFQGQVTISADKSISTAYLQWSSLKASDTAMYYCASSYLRGLWGGYFDFWGQGTLVTVSS

SEQ ID NO: 20412 - protein, 126 aa, synthetic construct
EVTLKESGPALVKPTQTLTLTCTFSGFSLTTYGMGVGWIRQPPGKALEWLANIWWDDDKYYNPSLKNRLTISKDTSKNQVVLTMTNMDPVDTATYYCARIGPIKYPTAPYRYFDFWGQGTMVTVSS

SEQ ID NO: 20413 - protein, 126 aa, synthetic construct
EVTLKESGPALVKPTQTLTLTCTFSGFSLSTYGMGVGWIRQPPGKALEWLANIWWDDDKYYNPSLKNRLTISKDTSKNQVVLTMTNMDPVDTATYYCARIGPIKYPTAPYRYFDFWGQGTMVTVSS

SEQ ID NO: 20414 - protein, 115 aa, synthetic construct
QVQLVESGGGVVQPGRSLRLSCVASGFTISSYGMNWVRQAPGKGLEWVAVISYDGGNKYSVDSVKGRFTISRDNSKNTLYLQMNSLRAEDSAVYYCARGRYFDLWGRGTLVTVSS

SEQ ID NO: 20415 - protein, 133 aa, synthetic construct
QVQLQQSGPGLVKPSQTLSLTCAISGDSVSSNRAAWNWIRQSPSRGLQWLGRTYYRSKWYNDYAVSLRSRITINPVTSKNQVALHMNSVTPEDTAVYYCARAGIVVVPGPETFYYYDHGLDVWGQGTTVTVSS

SEQ ID NO: 20416 - protein, 31 aa, synthetic construct; identical to SEQ ID NO: 20385

SEQ ID NO: 20417 - protein, 31 aa, synthetic construct; identical to SEQ ID NO: 20385

SEQ ID NO: 20418 - protein, 31 aa, synthetic construct; identical to SEQ ID NO: 20385

SEQ ID NO: 20419 - protein, 31 aa, synthetic construct; identical to SEQ ID NO: 20385

SEQ ID NO: 20420 - protein, 31 aa, synthetic construct; identical to SEQ ID NO: 20385

SEQ ID NO: 20421 - protein, 31 aa, synthetic construct; identical to SEQ ID NO: 20385

SEQ ID NO: 20422 - protein, 31 aa, synthetic construct; identical to SEQ ID NO: 20385

SEQ ID NO: 20423 - protein, 31 aa, synthetic construct; identical to SEQ ID NO: 20385

SEQ ID NO: 20424 - protein, 244 aa, synthetic construct
DIVLTQSPATLSLSPGDRATISCRASESVTILGSHLIHWYQQKPGQPPRLLIQLASNVQTGVPARFSGSGSRTDFTLTISSVEPEDFAVYYCLQSRTIPRTFGQGTKLEIKRGGGGSGGGGSGGGGSQVQLVQSGPEVKKPGESVKISCKASGYTFRHYSMNWVKQAPGQGLKWMGRINTESGVPIYADDFKGRFSFTVDTSASTAYLEISSLTSEDTAVYFCSNDYLYSLDFWGQGTTLTVSS

SEQ ID NO: 20425 - protein, 243 aa, synthetic construct
DIVLTQSPSSLSASVGDRATISCRASESVTILGSHLIYWYQQKPGQAPRLLIQLASNVQTGVPARFSGSGSGTDFTLTISSVEPEDVAVYYCLQSRTIPRTFGQGTKVEIKGGGGSGGGGSGGGGSQIQLVQSGPELKKPGGSVKISCAASGYTFTDYSINWVRQAPGKGLEWVGWINTETREPAYAYDFRGRFTFSADTSKSTAYLQMNSLRAEDTAVYYCALDYSYAMDYWGQGTLVTVSS

SEQ ID NO: 20426 - protein, 243 aa, synthetic construct
EVQLLESGGGLVQPGGSLRLSCAASGFTFSSYAMSWVRQAPGKGLEWVSVISGSGGRPNYADSVKGRFTISRDNSKNTLYLQMNSLRDEDTAVYYCAKVDYSNYLFFDYWGQGTLVTVSSGGGGSGGGGSGGGGSEIVLTQSPGTLSLSPGEGATLSCRAGQSVRSSYLGWYQQKPGQAPRLLIYGASSRATGIPDRFSGSGSGTDFTLTISRLEPEDFAVYYCQQYGYSPPTFGGGTKLEIK

SEQ ID NO: 20427 - protein, 243 aa, synthetic construct
EVQLLESGGGMVQPGGSLRLSCAASGFTFSSYAMSWVRQAPGKGLEWVSAISGSGGRTFYADSVEGRFTISRDNSKNTLYLQMNSLRAEDTAVYYCAKHDYSNYPYFDYWGQGTLVTVSSGGGGSGGGGSGGGGSEIVLTQSPGTLSLSPGERATLSCRASQSIRSSYLAWYQQKPGQAPRLLIYGASSRATGIPDRFSGSGSGTDFTLTISRLEPEDFAVYYCQQYGDLPFTFGPGTKLEIK

SEQ ID NO: 20428 - protein, 241 aa, synthetic construct
DIQMTQSPSSLSASVGDRVTITCRASQSVSSYLAWYQQKPGKAPKLLIYDASNRATGVPSRFSGSGSGTDFTLTISSLQPEDFATYYCQQRTNWPLTFGQGTKVEIKRGGGGSGGGGSGGGGSEVQLVESGGGLVQPGGSLRLSCAASGFTFSSYIMHWVRQAPGKGLEWVAVISYDGRNKYYADSVKGRFTISRDNSKNTLYLQMNSLRAEDTAVYYCARDTDGYDFDYWGQGTLVTVSS

SEQ ID NO: 20429 - protein, 241 aa, synthetic construct
DIQMTQSPSSLSASVGDRVTITCRASQGISSWLAWYQQKPGKAPKLLIYAASSLQSGVPSRFSGSGSGTDFTLTISSLQPEDFATYYCQQYNSYPLTFGQGTKVEIKRGGGGSGGGGSGGGGSEVQLVESGGGLVQPGGSLRLSCAASGFTFSDHGMHWVRQAPGKGLEWVAVIWYDGSNKYYADSVKGRFTISRDNSKNTLYLQMNSLRAEDTAVYYCARDSIMVRGDYWGQGTLVTVSS

SEQ ID NO: 20430 - protein, 251 aa, synthetic construct
EVQLVQSGAEVKKPGESLKISCKGSGYGFTSYWIGWVRQMPGKGLEWMGIIHPDDSDTKYSPSFQGQVTISADKSISTAYLQWSSLKASDTAMYYCASSYLRGLWGGYFDFWGQGTLVTVSSGGGGSGGGGSGGGGSELQSVLTQPPSASGTPGQRVTISCSGSSSNIGSNYVNWYQQLPGTAPKLLIYGDYQRPSGVPDRFSGSKSGTSASLAISGLRSEDEADYYCATRDDSLSGSVVFGTGTKLTVLG

SEQ ID NO: 20431 - protein, 239 aa, synthetic construct
DIQMTQSPSSLSASVGDRVTITCLASEDIYDNLAWYQQKPGKAPKLLIYYASSLQDGVPSRFSGSGSGTDYTLTISSLQPEDFATYYCLQDSEYPWTFGGGGSGGGGSGGGGSEVTLKESGPALVKPTQTLTLTCTFSGFSLTTYGMGVGWIRQPPGKALEWLANIWWDDDKYYNPSLKNRLTISKDTSKNQVVLTMTNMDPVDTATYYCARIGPIKYPTAPYRYFDFWGQGTMVTVSS

SEQ ID NO: 20432 - protein, 239 aa, synthetic construct
DIQMTQSPSSLSASVGDRVTITCLASEDIYNNLAWYQQKPGKAPKLLIYYASSLQDGVPSRFSGSGSGTDYTLTISSLQPEDFATYYCLQDSEYPWTFGGGGSGGGGSGGGGSEVTLKESGPALVKPTQTLTLTCTFSGFSLSTYGMGVGWIRQPPGKALEWLANIWWDDDKYYNPSLKNRLTISKDTSKNQVVLTMTNMDPVDTATYYCARIGPIKYPTAPYRYFDFWGQGTMVTVSS

SEQ ID NO: 20433 - protein, 237 aa, synthetic construct
QVQLVESGGGVVQPGRSLRLSCVASGFTISSYGMNWVRQAPGKGLEWVAVISYDGGNKYSVDSVKGRFTISRDNSKNTLYLQMNSLRAEDSAVYYCARGRYFDLWGRGTLVTVSSGGGGSGGGGSGGGGSDIQMTQSPSTLSASVGDRVTITCRASQSISNWLAWYQQKPGRAPNLLISKASSLKSGVPSRFSGSGSGTEFTLTVSSLQPDDFATYYCQQYYSYSYTFGQGTKLEIK

SEQ ID NO: 20434 - protein, 256 aa, synthetic construct
QVQLQQSGPGLVKPSQTLSLTCAISGDSVSSNRAAWNWIRQSPSRGLQWLGRTYYRSKWYNDYAVSLRSRITINPVTSKNQVALHMNSVTPEDTAVYYCARAGIVVVPGPETFYYYDHGLDVWGQGTTVTVSSGGGGSGGGGSGGGGSDIQMTQSPSSLSASVGDRVTITCRASQSIRNYLNWYQQKPGKAPELLIHAASSLQSGVPSRFSGSGSGTDFTLTISSLQPEDFASYYCQQSYSAPPITFGQGTRLEIK

SEQ ID NO: 20435 - protein, 31 aa, synthetic construct; identical to SEQ ID NO: 20385

SEQ ID NO: 20436 - protein, 31 aa, synthetic construct; identical to SEQ ID NO: 20385

SEQ ID NO: 20437 - protein, 31 aa, synthetic construct; identical to SEQ ID NO: 20385

SEQ ID NO: 20438 - protein, 31 aa, synthetic construct; identical to SEQ ID NO: 20385

SEQ ID NO: 20439 - protein, 31 aa, synthetic construct; identical to SEQ ID NO: 20385

SEQ ID NO: 20440 - protein, 31 aa, synthetic construct; identical to SEQ ID NO: 20385

SEQ ID NO: 20441 - protein, 497 aa, synthetic construct
MALPVTALLLPLALLLHAARPDIVLTQSPATLSLSPGDRATISCRASESVTILGSHLIHWYQQKPGQPPRLLIQLASNVQTGVPARFSGSGSRTDFTLTISSVEPEDFAVYYCLQSRTIPRTFGQGTKLEIKRGGGGSGGGGSGGGGSQVQLVQSGPEVKKPGESVKISCKASGYTFRHYSMNWVKQAPGQGLKWMGRINTESGVPIYADDFKGRFSFTVDTSASTAYLEISSLTSEDTAVYFCSNDYLYSLDFWGQGTTLTVSSTREQKLISEEDLKIEVMYPPPYLDNEKSNGTIIHVKGKHLCPSPLFPGPSKPFWVLVVVGGVLACYSLLVTVAFIIFWVRSKRSRLLHSDYMNMTPRRPGPTRKHYQPYAPPRDFAAYRSRVKFSRSADAPAYQQGQNQLYNELNLGRREEYDVLDKRRGRDPEMGGKPRRKNPQEGLYNELQKDKMAEAYSEIGMKGERRRGKGHDGLYQGLSTATKDTYDALHMQALPPR

SEQ ID NO: 20442 - protein, 503 aa, synthetic construct
MALPVTALLLPLALLLHAARPDIVLTQSPATLSLSPGDRATISCRASESVTILGSHLIHWYQQKPGQPPRLLIQLASNVQTGVPARFSGSGSRTDFTLTISSVEPEDFAVYYCLQSRTIPRTFGQGTKLEIKRGGGGSGGGGSGGGGSQVQLVQSGPEVKKPGESVKISCKASGYTFRHYSMNWVKQAPGQGLKWMGRINTESGVPIYADDFKGRFSFTVDTSASTAYLEISSLTSEDTAVYFCSNDYLYSLDFWGQGTTLTVSSTREQKLISEEDLAKPTTTPAPRPPTPAPTIASQPLSLRPEACRPAAGGAVHTRGLDFACDIYIWAPLAGTCGVLLLSLVITLYCKRGRKKLLYIFKQPFMRPVQTTQEEDGCSCRFPEEEEGGCELRVKFSRSADAPAYQQGQNQLYNELNLGRREEYDVLDKRRGRDPEMGGKPRRKNPQEGLYNELQKDKMAEAYSEIGMKGERRRGKGHDGLYQGLSTATKDTYDALHMQALPPR

SEQ ID NO: 20443 - protein, 503 aa, synthetic construct
MALPVTALLLPLALLLHAARPQVQLVQSGPEVKKPGESVKISCKASGYTFRHYSMNWVKQAPGQGLKWMGRINTESGVPIYADDFKGRFSFTVDTSASTAYLEISSLTSEDTAVYFCSNDYLYSLDFWGQGTTLTVSSGGGGSGGGGSGGGGSDIVLTQSPATLSLSPGDRATISCRASESVTILGSHLIHWYQQKPGQPPRLLIQLASNVQTGVPARFSGSGSRTDFTLTISSVEPEDFAVYYCLQSRTIPRTFGQGTKLEIKRTREQKLISEEDLAKPTTTPAPRPPTPAPTIASQPLSLRPEACRPAAGGAVHTRGLDFACDIYIWAPLAGTCGVLLLSLVITLYCKRGRKKLLYIFKQPFMRPVQTTQEEDGCSCRFPEEEEGGCELRVKFSRSADAPAYQQGQNQLYNELNLGRREEYDVLDKRRGRDPEMGGKPRRKNPQEGLYNELQKDKMAEAYSEIGMKGERRRGKGHDGLYQGLSTATKDTYDALHMQALPPR

SEQ ID NO: 20444 - protein, 916 aa, synthetic construct
MALPVTALLLPLALLLHAARPDIVLTQSPATLSLSPGDRATISCRASESVTILGSHLIHWYQQKPGQPPRLLIQLASNVQTGVPARFSGSGSRTDFTLTISSVEPEDFAVYYCLQSRTIPRTFGQGTKLEIKRGGGGSGGGGSGGGGSQVQLVQSGPEVKKPGESVKISCKASGYTFRHYSMNWVKQAPGQGLKWMGRINTESGVPIYADDFKGRFSFTVDTSASTAYLEISSLTSEDTAVYFCSNDYLYSLDFWGQGTTLTVSSTREQKLISEEDLAKPTTTPAPRPPTPAPTIASQPLSLRPEACRPAAGGAVHTRGLDFACDIYIWAPLAGTCGVLLLSLVITLYCGRARVKFSRSADAPAYQQGQNQLYNELNLGRREEYDVLDKRRGRDPEMGGKPRRKNPQEGLYNELQKDKMAEAYSEIGMKGERRRGKGHDGLYQGLSTATKDTYDALHMQALPPRSRGSGATNFSLLKQAGDVEENPGPGIHMATYEVLCEVARKLGTDDREVVLFLLNVFIPQPTLAQLIGALRALKEEGRLTFPLLAECLFRAGRRDLLRDLLHLDPRFLERHLAGTMSYFSPYQLTVLHVDGELCARDIRSLIFLSKDTIGSRSTPQTFLHWVYCMENLDLLGPTDVDALMSMLRSLSRVDLQRQVQTLMGLHLSGPSHSQHYRHTPLETDFYDYKDDDDKTSGSGEGRGSLLTCGDVEENPGPHMTEYKPTVRLATRDDVPRAVRTLAAAFADYPATRHTVDPDRHIERVTELQELFLTRVGLDIGKVWVADDGAAVAVWTTPESVEAGAVFAEIGPRMAELSGSRLAAQQQMEGLLAPHRPKEPAWFLATVGVSPDHQGKGLGSAVVLPGVEAAERAGVPAFLETSAPRNLPFYERLGFTVTADVEVPEGPRTWCMTRKPGA

SEQ ID NO: 20445 - protein, 856 aa, synthetic construct
MALPVTALLLPLALLLHAARPDIVLTQSPATLSLSPGDRATISCRASESVTILGSHLIHWYQQKPGQPPRLLIQLASNVQTGVPARFSGSGSRTDFTLTISSVEPEDFAVYYCLQSRTIPRTFGQGTKLEIKRLEIQNPDPAVYQLRDSKSSDKSVCLFTDFDSQTNVSQSKDSDVYITDKCVLDMRSMDFKSNSAVAWSNKSDFACANAFNNSIIPEDTFFPSSDVPCDVKLVEKSFETDTNLNFQNLSVIGFRILLLKVAGFNLLMTLRLWSSRAKRSGSGVKQTLNFDLLKLAGDVESNPGPTSMDWIWRILFLVGAATGAHSFEQVQLVQSGPEVKKPGESVKISCKASGYTFRHYSMNWVKQAPGQGLKWMGRINTESGVPIYADDFKGRFSFTVDTSASTAYLEISSLTSEDTAVYFCSNDYLYSLDFWGQGTTLTVSSTREDLKNVFPPEVAVFEPSKAEIAHTQKATLVCLATGFYPDHVELSWWVNGKEVHSGVCTDPQPLKEQPALNDSRYCLSSRLRVSATFWQNPRNHFRCQVQFYGLSENDEWTQDRAKPVTQIVSAEAWGRADCGITSASYHQGVLSATILYEILLGKATLYAVLVSALVLMAMVKRKDSRGRAKRSGSGATNFSLLKQAGDVEENPGPSRGHMTEYKPTVRLATRDDVPRAVRTLAAAFADYPATRHTVDPDRHIERVTELQELFLTRVGLDIGKVWVADDGAAVAVWTTPESVEAGAVFAEIGPRMAELSGSRLAAQQQMEGLLAPHRPKEPAWFLATVGVSPDHQGKGLGSAVVLPGVEAAERAGVPAFLETSAPRNLPFYERLGFTVTADVEVPEGPRTWCMTRKPGA

SEQ ID NO: 20446 - protein, 855 aa, synthetic construct
MALPVTALLLPLALLLHAARPDIVLTQSPATLSLSPGDRATISCRASESVTILGSHLIHWYQQKPGQPPRLLIQLASNVQTGVPARFSGSGSRTDFTLTISSVEPEDFAVYYCLQSRTIPRTFGQGTKLEIKRLEDLKNVFPPEVAVFEPSKAEIAHTQKATLVCLATGFYPDHVELSWWVNGKEVHSGVCTDPQPLKEQPALNDSRYCLSSRLRVSATFWQNPRNHFRCQVQFYGLSENDEWTQDRAKPVTQIVSAEAWGRADCGITSASYHQGVLSATILYEILLGKATLYAVLVSALVLMAMVKRKDSRGRAKRSGSGATNFSLLKQAGDVEENPGPTSMDWIWRILFLVGAATGAHSFEQVQLVQSGPEVKKPGESVKISCKASGYTFRHYSMNWVKQAPGQGLKWMGRINTESGVPIYADDFKGRFSFTVDTSASTAYLEISSLTSEDTAVYFCSNDYLYSLDFWGQGTTLTVSSTRIQNPDPAVYQLRDSKSSDKSVCLFTDFDSQTNVSQSKDSDVYITDKCVLDMRSMDFKSNSAVAWSNKSDFACANAFNNSIIPEDTFFPSSDVPCDVKLVEKSFETDTNLNFQNLSVIGFRILLLKVAGFNLLMTLRLWSSRAKRSGSGVKQTLNFDLLKLAGDVESNPGPSRGHMTEYKPTVRLATRDDVPRAVRTLAAAFADYPATRHTVDPDRHIERVTELQELFLTRVGLDIGKVWVADDGAAVAVWTTPESVEAGAVFAEIGPRMAELSGSRLAAQQQMEGLLAPHRPKEPAWFLATVGVSPDHQGKGLGSAVVLPGVEAAERAGVPAFLETSAPRNLPFYERLGFTVTADVEVPEGPRTWCMTRKPGA

SEQ ID NO: 20447 - protein, 622 aa, synthetic construct
MALPVTALLLPLALLLHAARPDIVLTQSPATLSLSPGDRATISCRASESVTILGSHLIHWYQQKPGQPPRLLIQLASNVQTGVPARFSGSGSRTDFTLTISSVEPEDFAVYYCLQSRTIPRTFGQGTKLEIKRLEDLKNVFPPEVAVFEPSEAEISHTQKATLVCLATGFYPDHVELSWWVNGKEVHSGVCTDPQPLKEQPALNDSRYCLSSRLRVSATFWQNPRNHFRCQVQFYGLSENDEWTQDRAKPVTQIVSAEAWGRADCGFTSESYQQGVLSATILYEILLGKATLYAVLVSALVLMAMVKRKDSRGRAKRSGSGATNFSLLKQAGDVEENPGPTSMDWIWRILFLVGAATGAHSFEQVQLVQSGPEVKKPGESVKISCKASGYTFRHYSMNWVKQAPGQGLKWMGRINTESGVPIYADDFKGRFSFTVDTSASTAYLEISSLTSEDTAVYFCSNDYLYSLDFWGQGTTLTVSSTRIQNPDPAVYQLRDSKSSDKSVCLFTDFDSQTNVSQSKDSDVYITDKCVLDMRSMDFKSNSAVAWSNKSDFACANAFNNSIIPEDTFFPSPESSCDVKLVEKSFETDTNLNFQNLSVIGFRILLLKVAGFNLLMTLRLWSS

SEQ ID NO: 20448 - protein, 847 aa, synthetic construct
MALPVTALLLPLALLLHAARPDIVLTQSPATLSLSPGDRATISCRASESVTILGSHLIHWYQQKPGQPPRLLIQLASNVQTGVPARFSGSGSRTDFTLTISSVEPEDFAVYYCLQSRTIPRTFGQGTKLEIKRLEDLKNVFPPEVAVFEPSEAEISHTQKATLVCLATGFYPDHVELSWWVNGKEVHSGVCTDPQPLKEQPALNDSRYCLSSRLRVSATFWQNPRNHFRCQVQFYGLSENDEWTQDRAKPVTQIVSAEAWGRADCGFTSESYQQGVLSATILYEILLGKATLYAVLVSALVLMAMVKRKDSRGRAKRSGSGATNFSLLKQAGDVEENPGPTSMDWIWRILFLVGAATGAHSFEQVQLVQSGPEVKKPGESVKISCKASGYTFRHYSMNWVKQAPGQGLKWMGRINTESGVPIYADDFKGRFSFTVDTSASTAYLEISSLTSEDTAVYFCSNDYLYSLDFWGQGTTLTVSSTRIQNPDPAVYQLRDSKSSDKSVCLFTDFDSQTNVSQSKDSDVYITDKCVLDMRSMDFKSNSAVAWSNKSDFACANAFNNSIIPEDTFFPSPESSCDVKLVEKSFETDTNLNFQNLSVIGFRILLLKVAGFNLLMTLRLWSSRAKRSGSGVKQTLNFDLLKLAGDVESNPGPSRGGIHTMATYEVLCEVARKLGTDDREVVLFLLNVFIPQPTLAQLIGALRALKEEGRLTFPLLAECLFRAGRRDLLRDLLHLDPRFLERHLAGTMSYFSPYQLTVLHVDGELCARDIRSLIFLSKDTIGSRSTPQTFLHWVYCMENLDLLGPTDVDALMSMLRSLSRVDLQRQVQTLMGLHLSGPSHSQHYRHTP

SEQ ID NO: 20449 - protein, 626 aa, synthetic construct
MALPVTALLLPLALLLHAARPDIVLTQSPATLSLSPGDRATISCRASESVTILGSHLIHWYQQKPGQPPRLLIQLASNVQTGVPARFSGSGSRTDFTLTISSVEPEDFAVYYCLQSRTIPRTFGQGTKLEIKRLEIQNPDPAVYQLRDSKSSDKSVCLFTDFDSQTNVSQSKDSDVYITDKCVLDMRSMDFKSNSAVAWSNKSDFACANAFNNSIIPEDTFFPSPESSCDVKLVEKSFETDTNLNFQNLSVIGFRILLLKVAGFNLLMTLRLWSSRAKRSGSGVKQTLNFDLLKLAGDVESNPGPTSMDWIWRILFLVGAATGAHSFEQVQLVQSGPEVKKPGESVKISCKASGYTFRHYSMNWVKQAPGQGLKWMGRINTESGVPIYADDFKGRFSFTVDTSASTAYLEISSLTSEDTAVYFCSNDYLYSLDFWGQGTTLTVSSTREDLKNVFPPEVAVFEPSEAEISHTQKATLVCLATGFYPDHVELSWWVNGKEVHSGVCTDPQPLKEQPALNDSRYCLSSRLRVSATFWQNPRNHFRCQVQFYGLSENDEWTQDRAKPVTQIVSAEAWGRADCGFTSESYQQGVLSATILYEILLGKATLYAVLVSALVLMAMVKRKDSRG

SEQ ID NO: 20450 - protein, 848 aa, synthetic construct
MALPVTALLLPLALLLHAARPDIVLTQSPATLSLSPGDRATISCRASESVTILGSHLIHWYQQKPGQPPRLLIQLASNVQTGVPARFSGSGSRTDFTLTISSVEPEDFAVYYCLQSRTIPRTFGQGTKLEIKRLEIQNPDPAVYQLRDSKSSDKSVCLFTDFDSQTNVSQSKDSDVYITDKCVLDMRSMDFKSNSAVAWSNKSDFACANAFNNSIIPEDTFFPSPESSCDVKLVEKSFETDTNLNFQNLSVIGFRILLLKVAGFNLLMTLRLWSSRAKRSGSGVKQTLNFDLLKLAGDVESNPGPTSMDWIWRILFLVGAATGAHSFEQVQLVQSGPEVKKPGESVKISCKASGYTFRHYSMNWVKQAPGQGLKWMGRINTESGVPIYADDFKGRFSFTVDTSASTAYLEISSLTSEDTAVYFCSNDYLYSLDFWGQGTTLTVSSTREDLKNVFPPEVAVFEPSEAEISHTQKATLVCLATGFYPDHVELSWWVNGKEVHSGVCTDPQPLKEQPALNDSRYCLSSRLRVSATFWQNPRNHFRCQVQFYGLSENDEWTQDRAKPVTQIVSAEAWGRADCGFTSESYQQGVLSATILYEILLGKATLYAVLVSALVLMAMVKRKDSRGRAKRSGSGATNFSLLKQAGDVEENPGPSRGGIHTMATYEVLCEVARKLGTDDREVVLFLLNVFIPQPTLAQLIGALRALKEEGRLTFPLLAECLFRAGRRDLLRDLLHLDPRFLERHLAGTMSYFSPYQLTVLHVDGELCARDIRSLIFLSKDTIGSRSTPQTFLHWVYCMENLDLLGPTDVDALMSMLRSLSRVDLQRQVQTLMGLHLSGPSHSQHYRHTP

SEQ ID NO: 20451 - protein, 900 aa, synthetic construct
MALPVTALLLPLALLLHAARPLEGKPIPNPLLGLDSTGSGEDLKNVFPPEVAVFEPSKAEIAHTQKATLVCLATGFYPDHVELSWWVNGKEVHSGVCTDPQPLKEQPALNDSRYCLSSRLRVSATFWQNPRNHFRCQVQFYGLSENDEWTQDRAKPVTQIVSAEAWGRADCGITSASYHQGVLSATILYEILLGKATLYAVLVSALVLMAMVKRKDSRGRAKRSGSGATNFSLLKQAGDVEENPGPTSMALPVTALLLPLALLLHAARPDIVLTQSPATLSLSPGDRATISCRASESVTILGSHLIHWYQQKPGQPPRLLIQLASNVQTGVPARFSGSGSRTDFTLTISSVEPEDFAVYYCLQSRTIPRTFGQGTKLEIKRGGGGSGGGGSGGGGSQVQLVQSGPEVKKPGESVKISCKASGYTFRHYSMNWVKQAPGQGLKWMGRINTESGVPIYADDFKGRFSFTVDTSASTAYLEISSLTSEDTAVYFCSNDYLYSLDFWGQGTTLTVSSTREQKLISEEDGSGIQNPDPAVYQLRDSKSSDKSVCLFTDFDSQTNVSQSKDSDVYITDKCVLDMRSMDFKSNSAVAWSNKSDFACANAFNNSIIPEDTFFPSSDVPCDVKLVEKSFETDTNLNFQNLSVIGFRILLLKVAGFNLLMTLRLWSSRAKRSGSGVKQTLNFDLLKLAGDVESNPGPSRGHMTEYKPTVRLATRDDVPRAVRTLAAAFADYPATRHTVDPDRHIERVTELQELFLTRVGLDIGKVWVADDGAAVAVWTTPESVEAGAVFAEIGPRMAELSGSRLAAQQQMEGLLAPHRPKEPAWFLATVGVSPDHQGKGLGSAVVLPGVEAAERAGVPAFLETSAPRNLPFYERLGFTVTADVEVPEGPRTWCMTRKPGA

SEQ ID NO: 20452 - protein, 901 aa, synthetic construct
MALPVTALLLPLALLLHAARPLEQKLISEEDLGSGDRPDPAVYQLRDSKSSDKSVCLFTDFDSQTNVSQSKDSDVYITDKCVLDMRSMDFKSNSAVAWSNKSDFACANAFNNSIIPEDTFFPSPESSCDVKLVEKSFETDTNLNFQNLSVIGFRILLLKVAGFNLLMTLRLWSSSSRAKRSGSGVKQTLNFDLLKLAGDVESNPGPTSMALPVTALLLPLALLLHAARPDIVLTQSPATLSLSPGDRATISCRASESVTILGSHLIHWYQQKPGQPPRLLIQLASNVQTGVPARFSGSGSRTDFTLTISSVEPEDFAVYYCLQSRTIPRTFGQGTKLEIKRGGGGSGGGGSGGGGSQVQLVQSGPEVKKPGESVKISCKASGYTFRHYSMNWVKQAPGQGLKWMGRINTESGVPIYADDFKGRFSFTVDTSASTAYLEISSLTSEDTAVYFCSNDYLYSLDFWGQGTTLTVSSTRGKPIPNPLLGLDSTGSGEDLKNVFPPEVAVFEPSEAEISHTQKATLVCLATGFYPDHVELSWWVNGKEVHSGVCTDPQPLKEQPALNDSRYCLSSRLRVSATFWQNPRNHFRCQVQFYGLSENDEWTQDRAKPVTQIVSAEAWGRADCGFTSESYQQGVLSATILYEILLGKATLYAVLVSALVLMAMVKRKDSRGRAKRSGSGATNFSLLKQAGDVEENPGPSRGHMTEYKPTVRLATRDDVPRAVRTLAAAFADYPATRHTVDPDRHIERVTELQELFLTRVGLDIGKVWVADDGAAVAVWTTPESVEAGAVFAEIGPRMAELSGSRLAAQQQMEGLLAPHRPKEPAWFLATVGVSPDHQGKGLGSAVVLPGVEAAERAGVPAFLETSAPRNLPFYERLGFTVTADVEVPEGPRTWCMTRKPGA

SEQ ID NO: 20453 - protein, 855 aa, synthetic construct
MALPVTALLLPLALLLHAARPDIVLTQSPATLSLSPGDRATISCRASESVTILGSHLIHWYQQKPGQPPRLLIQLASNVQTGVPARFSGSGSRTDFTLTISSVEPEDFAVYYCLQSRTIPRTFGQGTKLEIKRLEDLKNVFPPEVAVFEPSEAEISHTQKATLVCLATGFYPDHVELSWWVNGKEVHSGVSTDPQPLKEQPALNDSRYCLSSRLRVSATFWQNPRNHFRCQVQFYGLSENDEWTQDRAKPVTQIVSAEAWGRADCGFTSESYQQGVLSATILYEILLGKATLYAVLVSALVLMAMVKRKDSRGRAKRSGSGATNFSLLKQAGDVEENPGPTSMDWIWRILFLVGAATGAHSFEQVQLVQSGPEVKKPGESVKISCKASGYTFRHYSMNWVKQAPGQGLKWMGRINTESGVPIYADDFKGRFSFTVDTSASTAYLEISSLTSEDTAVYFCSNDYLYSLDFWGQGTTLTVSSTRIQNPDPAVYQLRDSKSSDKSVCLFTDFDSQTNVSQSKDSDVYITDKTVLDMRSMDFKSNSAVAWSNKSDFACANAFNNSIIPEDTFFPSPESSCDVKLVEKSFETDTNLNFQNLSVIGFRILLLKVAGFNLLMTLRLWSSRAKRSGSGVKQTLNFDLLKLAGDVESNPGPSRGHMTEYKPTVRLATRDDVPRAVRTLAAAFADYPATRHTVDPDRHIERVTELQELFLTRVGLDIGKVWVADDGAAVAVWTTPESVEAGAVFAEIGPRMAELSGSRLAAQQQMEGLLAPHRPKEPAWFLATVGVSPDHQGKGLGSAVVLPGVEAAERAGVPAFLETSAPRNLPFYERLGFTVTADVEVPEGPRTWCMTRKPGA

SEQ ID NO: 20454 - protein, 937 aa, synthetic construct
MALPVTALLLPLALLLHAARPDIVLTQSPATLSLSPGDRATISCRASESVTILGSHLIHWYQQKPGQPPRLLIQLASNVQTGVPARFSGSGSRTDFTLTISSVEPEDFAVYYCLQSRTIPRTFGQGTKLEIKRLEDLKNVFPPEVAVFEPSEAEISHTQKATLVCLATGFYPDHVELSWWVNGKEVHSGVSTDPQPLKEQPALNDSRYCLSSRLRVSATFWQNPRNHFRCQVQFYGLSENDEWTQDRAKPVTQIVSAEAWGRADCGFTSESYQQGVLSATILYEILLGKATLYAVLVSALVLMAMVKRKDSRGRAKRSGSGATNFSLLKQAGDVEENPGPTSMDWIWRILFLVGAATGAHSFEQVQLVQSGPEVKKPGESVKISCKASGYTFRHYSMNWVKQAPGQGLKWMGRINTESGVPIYADDFKGRFSFTVDTSASTAYLEISSLTSEDTAVYFCSNDYLYSLDFWGQGTTLTVSSTREQKLISEEDGSGTPFPSLAPPIMLLVDGKQQMVVVCLVLDVAPPGLDSPIWFSAGNGSALDAFTYGPSPATDGTWTNLAHLSLPSEELASWEPLVCHTGPGAEGHSRSTQPMHLSGEASTARTCPQEPLRGTPGGALWLGVLRLLLFKLLLFDLLLTCSCLCDPAGPLPSPATTTRLRALGSHRLHPATETGGREATSSPRPQPRDRRWGDTPPGRKPGSPVRAKRSGSGVKQTLNFDLLKLAGDVESNPGPSRGHMTEYKPTVRLATRDDVPRAVRTLAAAFADYPATRHTVDPDRHIERVTELQELFLTRVGLDIGKVWVADDGAAVAVWTTPESVEAGAVFAEIGPRMAELSGSRLAAQQQMEGLLAPHRPKEPAWFLATVGVSPDHQGKGLGSAVVLPGVEAAERAGVPAFLETSAPRNLPFYERLGFTVTADVEVPEGPRTWCMTRKPGA

SEQ ID NO: 20455 - protein, 955 aa, synthetic construct
MALPVTALLLPLALLLHAARPLEDLKNVFPPEVAVFEPSEAEISHTQKATLVCLATGFYPDHVELSWWVNGKEVHSGVSTDPQPLKEQPALNDSRYCLSSRLRVSATFWQNPRNHFRCQVQFYGLSENDEWTQDRAKPVTQIVSAEAWGRADCGFTSESYQQGVLSATILYEILLGKATLYAVLVSALVLMAMVKRKDSRGRAKRSGSGATNFSLLKQAGDVEENPGPTSMALPVTALLLPLALLLHAARPDIVLTQSPATLSLSPGDRATISCRASESVTILGSHLIHWYQQKPGQPPRLLIQLASNVQTGVPARFSGSGSRTDFTLTISSVEPEDFAVYYCLQSRTIPRTFGQGTKLEIKRGGGGSGGGGSGGGGSQVQLVQSGPEVKKPGESVKISCKASGYTFRHYSMNWVKQAPGQGLKWMGRINTESGVPIYADDFKGRFSFTVDTSASTAYLEISSLTSEDTAVYFCSNDYLYSLDFWGQGTTLTVSSTREQKLISEEDLGSGTPFPSLAPPIMLLVDGKQQMVVVCLVLDVAPPGLDSPIWFSAGNGSALDAFTYGPSPATDGTWTNLAHLSLPSEELASWEPLVCHTGPGAEGHSRSTQPMHLSGEASTARTCPQEPLRGTPGGALWLGVLRLLLFKLLLFDLLLTCSCLCDPAGPLPSPATTTRLRALGSHRLHPATETGGREATSSPRPQPRDRRWGDTPPGRKPGSPVRAKRSGSGVKQTLNFDLLKLAGDVESNPGPSRSRGHMTEYKPTVRLATRDDVPRAVRTLAAAFADYPATRHTVDPDRHIERVTELQELFLTRVGLDIGKVWVADDGAAVAVWTTPESVEAGAVFAEIGPRMAELSGSRLAAQQQMEGLLAPHRPKEPAWFLATVGVSPDHQGKGLGSAVVLPGVEAAERAGVPAFLETSAPRNLPFYERLGFTVTADVEVPEGPRTWCMTRKPGA

SEQ ID NO: 20456 - protein, 892 aa, synthetic construct
MALPVTALLLPLALLLHAARPDIVLTQSPATLSLSPGDRATISCRASESVTILGSHLIHWYQQKPGQPPRLLIQLASNVQTGVPARFSGSGSRTDFTLTISSVEPEDFAVYYCLQSRTIPRTFGQGTKLEIKRLEGKPIPNPLLGLDSTGSGDKQLDADVSPKPTIFLPSIAETKLQKAGTYLCLLEKFFPDVIKIHWQEKKSNTILGSQEGNTMKTNDTYMKFSWLTVPEKSLDKEHRCIVRHENNKNGVDQEIIFPPIKTDVITMDPKDNCSKDANDTLLLQLTNTSAYYMYLLLLLKSVVYFAIITCCLLRRTAFCCNGEKSRAKRSGSGATNFSLLKQAGDVEENPGPTSMDWIWRILFLVGAATGAHSFEQVQLVQSGPEVKKPGESVKISCKASGYTFRHYSMNWVKQAPGQGLKWMGRINTESGVPIYADDFKGRFSFTVDTSASTAYLEISSLTSEDTAVYFCSNDYLYSLDFWGQGTTLTVSSTREQKLISEEDGSGSQPHTKPSVFVMKNGTNVACLVKEFYPKDIRINLVSSKKITEFDPAIVISPSGKYNAVKLGKYEDSNSVTCSVQHDNKTVHSTDFEVKTDSTDHVKPKETENTKQPSKSCHKPKAIVHTEKVNMMSLTVLGLRMLFAKTVAVNFLLTAKLFFLRAKRSGSGVKQTLNFDLLKLAGDVESNPGPSRGHMTEYKPTVRLATRDDVPRAVRTLAAAFADYPATRHTVDPDRHIERVTELQELFLTRVGLDIGKVWVADDGAAVAVWTTPESVEAGAVFAEIGPRMAELSGSRLAAQQQMEGLLAPHRPKEPAWFLATVGVSPDHQGKGLGSAVVLPGVEAAERAGVPAFLETSAPRNLPFYERLGFTVTADVEVPEGPRTWCMTRKPGA

SEQ ID NO: 20457 - protein, 630 aa, synthetic construct
MALPVTALLLPLALLLHAARPDIVLTQSPATLSLSPGDRATISCRASESVTILGSHLIHWYQQKPGQPPRLLIQLASNVQTGVPARFSGSGSRTDFTLTISSVEPEDFAVYYCLQSRTIPRTFGQGTKLEIKRLESQPHTKPSVFVMKNGTNVACLVKEFYPKDIRINLVSSKKITEFDPAIVISPSGKYNAVKLGKYEDSNSVTCSVQHDNKTVHSTDFEVKTDSTDHVKPKETENTKQPSKSCHKPKAIVHTEKVNMMSLTVLGLRMLFAKTVAVNFLLTAKLFFLRAKRSGSGATNFSLLKQAGDVEENPGPTSMDWIWRILFLVGAATGAHSFEQVQLVQSGPEVKKPGESVKISCKASGYTFRHYSMNWVKQAPGQGLKWMGRINTESGVPIYADDFKGRFSFTVDTSASTAYLEISSLTSEDTAVYFCSNDYLYSLDFWGQGTTLTVSSTRDKQLDADVSPKPTIFLPSIAETKLQKAGTYLCLLEKFFPDVIKIHWQEKKSNTILGSQEGNTMKTNDTYMKFSWLTVPEKSLDKEHRCIVRHENNKNGVDQEIIFPPIKTDVITMDPKDNCSKDANDTLLLQLTNTSAYYMYLLLLLKSVVYFAIITCCLLRRTAFCCNGEKS

SEQ ID NO: 20458 - protein, 907 aa, synthetic construct
MALPVTALLLPLALLLHAARPLEGKPIPNPLLGLDSTGSGDKQLDADVSPKPTIFLPSIAETKLQKAGTYLCLLEKFFPDVIKIHWQEKKSNTILGSQEGNTMKTNDTYMKFSWLTVPEKSLDKEHRCIVRHENNKNGVDQEIIFPPIKTDVITMDPKDNCSKDANDTLLLQLTNTSAYYMYLLLLLKSVVYFAIITCCLLRRTAFCCNGEKSRAKRSGSGATNFSLLKQAGDVEENPGPTSMALPVTALLLPLALLLHAARPDIVLTQSPATLSLSPGDRATISCRASESVTILGSHLIHWYQQKPGQPPRLLIQLASNVQTGVPARFSGSGSRTDFTLTISSVEPEDFAVYYCLQSRTIPRTFGQGTKLEIKRGGGGSGGGGSGGGGSQVQLVQSGPEVKKPGESVKISCKASGYTFRHYSMNWVKQAPGQGLKWMGRINTESGVPIYADDFKGRFSFTVDTSASTAYLEISSLTSEDTAVYFCSNDYLYSLDFWGQGTTLTVSSTREQKLISEEDGSGSQPHTKPSVFVMKNGTNVACLVKEFYPKDIRINLVSSKKITEFDPAIVISPSGKYNAVKLGKYEDSNSVTCSVQHDNKTVHSTDFEVKTDSTDHVKPKETENTKQPSKSCHKPKAIVHTEKVNMMSLTVLGLRMLFAKTVAVNFLLTAKLFFLRAKRSGSGVKQTLNFDLLKLAGDVESNPGPSRGHMTEYKPTVRLATRDDVPRAVRTLAAAFADYPATRHTVDPDRHIERVTELQELFLTRVGLDIGKVWVADDGAAVAVWTTPESVEAGAVFAEIGPRMAELSGSRLAAQQQMEGLLAPHRPKEPAWFLATVGVSPDHQGKGLGSAVVLPGVEAAERAGVPAFLETSAPRNLPFYERLGFTVTADVEVPEGPRTWCMTRKPGA

SEQ ID NO: 20459 - protein, 1032 aa, synthetic construct
MALPVTALLLPLALLLHAARPDIVLTQSPATLSLSPGDRATISCRASESVTILGSHLIHWYQQKPGQPPRLLIQLASNVQTGVPARFSGSGSRTDFTLTISSVEPEDFAVYYCLQSRTIPRTFGQGTKLEIKRGQPKANPTVTLFPPSSEELQANKATLVCLISDFYPGAVTVAWKADGSPVKAGVETTKPSKQSNNKYAASSYLSLTPEQWKSHRSYSCQVTHEGSTVEKTVAPTECSGSQSFGLLDPKLCYLLDGILFIYGVILTALFLRVKFSRSADAPAYQQGQNQLYNELNLGRREEYDVLDKRRGRDPEMGGKPQRRKNPQEGLYNELQKDKMAEAYSEIGMKGERRRGKGHDGLYQGLSTATKDTYDALHMQALPPRRAKRSGSGATNFSLLKQAGDVEENPGPTSMDWIWRILFLVGAATGAHSFEQVQLVQSGPEVKKPGESVKISCKASGYTFRHYSMNWVKQAPGQGLKWMGRINTESGVPIYADDFKGRFSFTVDTSASTAYLEISSLTSEDTAVYFCSNDYLYSLDFWGQGTTLTVSSASTKGPSVFPLAPSSKSTSGGTAALGCLVKDYFPEPVTVSWNSGALTSGVHTFPAVLQSSGLYSLSSVVTVPSSSLGTQTYICNVNHKPSNTKVDKRVEPKSCGTQSFGLLDPKLCYLLDGILFIYGVILTALFLRVKFSRSADAPAYQQGQNQLYNELNLGRREEYDVLDKRRGRDPEMGGKPQRRKNPQEGLYNELQKDKMAEAYSEIGMKGERRRGKGHDGLYQGLSTATKDTYDALHMQALPPRRAKRSGSGVKQTLNFDLLKLAGDVESNPGPSRGHMTEYKPTVRLATRDDVPRAVRTLAAAFADYPATRHTVDPDRHIERVTELQELFLTRVGLDIGKVWVADDGAAVAVWTTPESVEAGAVFAEIGPRMAELSGSRLAAQQQMEGLLAPHRPKEPAWFLATVGVSPDHQGKGLGSAVVLPGVEAAERAGVPAFLETSAPRNLPFYERLGFTVTADVEVPEGPRTWCMTRKPGA

SEQ ID NO: 20460 - protein, 818 aa, synthetic construct
MALPVTALLLPLALLLHAARPDIVLTQSPATLSLSPGDRATISCRASESVTILGSHLIHWYQQKPGQPPRLLIQLASNVQTGVPARFSGSGSRTDFTLTISSVEPEDFAVYYCLQSRTIPRTFGQGTKLEIKRLEDLKNVFPPEVAVFEPSEAEISHTQKATLVCLATGFYPDHVELSWWVNGKEVHSGVSTDPQPLKEQPALNDSRYCLSSRLRVSATFWQNPRNHFRCQVQFYGLSENDEWTQDRAKPVTQIVSAEAWGRADCGSQSFGLLDPKLCYLLDGILFIYGVILTALFLRVKFSRSADAPAYQQGQNQLYNELNLGRREEYDVLDKRRGRDPEMGGKPQRRKNPQEGLYNELQKDKMAEAYSEIGMKGERRRGKGHDGLYQGLSTATKDTYDALHMQALPPRRAKRSGSGATNFSLLKQAGDVEENPGPTSMDWIWRILFLVGAATGAHSFEQVQLVQSGPEVKKPGESVKISCKASGYTFRHYSMNWVKQAPGQGLKWMGRINTESGVPIYADDFKGRFSFTVDTSASTAYLEISSLTSEDTAVYFCSNDYLYSLDFWGQGTTLTVSSTRIQNPDPAVYQLRDSKSSDKSVCLFTDFDSQTNVSQSKDSDVYITDKTVLDMRSMDFKSNSAVAWSNKSDFACANAFNNSIIPEDTFFPSPESSCGTQSFGLLDPKLCYLLDGILFIYGVILTALFLRVKFSRSADAPAYQQGQNQLYNELNLGRREEYDVLDKRRGRDPEMGGKPQRRKNPQEGLYNELQKDKMAEAYSEIGMKGERRRGKGHDGLYQGLSTATKDTYDALHMQALPPR

SEQ ID NO: 20461 - protein, 818 aa, synthetic construct
MALPVTALLLPLALLLHAARPDIVLTQSPATLSLSPGDRATISCRASESVTILGSHLIHWYQQKPGQPPRLLIQLASNVQTGVPARFSGSGSRTDFTLTISSVEPEDFAVYYCLQSRTIPRTFGQGTKLEIKRLEDLKNVFPPEVAVFEPSKAEIAHTQKATLVCLATGFYPDHVELSWWVNGKEVHSGVCTDPQPLKEQPALNDSRYCLSSRLRVSATFWQNPRNHFRCQVQFYGLSENDEWTQDRAKPVTQIVSAEAWGRADCGSQSFGLLDPKLCYLLDGILFIYGVILTALFLRVKFSRSADAPAYQQGQNQLYNELNLGRREEYDVLDKRRGRDPEMGGKPQRRKNPQEGLYNELQKDKMAEAYSEIGMKGERRRGKGHDGLYQGLSTATKDTYDALHMQALPPRRAKRSGSGATNFSLLKQAGDVEENPGPTSMDWIWRILFLVGAATGAHSFEQVQLVQSGPEVKKPGESVKISCKASGYTFRHYSMNWVKQAPGQGLKWMGRINTESGVPIYADDFKGRFSFTVDTSASTAYLEISSLTSEDTAVYFCSNDYLYSLDFWGQGTTLTVSSTRIQNPDPAVYQLRDSKSSDKSVCLFTDFDSQTNVSQSKDSDVYITDKCVLDMRSMDFKSNSAVAWSNKSDFACANAFNNSIIPEDTFFPSSDVPCGTQSFGLLDPKLCYLLDGILFIYGVILTALFLRVKFSRSADAPAYQQGQNQLYNELNLGRREEYDVLDKRRGRDPEMGGKPQRRKNPQEGLYNELQKDKMAEAYSEIGMKGERRRGKGHDGLYQGLSTATKDTYDALHMQALPPR

SEQ ID NO: 20462 - protein, 889 aa, synthetic construct
MALPVTALLLPLALLLHAARPDIVLTQSPATLSLSPGDRATISCRASESVTILGSHLIHWYQQKPGQPPRLLIQLASNVQTGVPARFSGSGSRTDFTLTISSVEPEDFAVYYCLQSRTIPRTFGQGTKLEIKRLEGKPIPNPLLGLDSTGSGEDLKNVFPPEVAVFEPSEAEISHTQKATLVCLATGFYPDHVELSWWVNGKEVHSGVSTDPQPLKEQPALNDSRYCLSSRLRVSATFWQNPRNHFRCQVQFYGLSENDEWTQDRAKPVTQIVSAEAWGRADCGSQSFGLLDPKLCYLLDGILFIYGVILTALFLRVKFSRSADAPAYQQGQNQLYNELNLGRREEYDVLDKRRGRDPEMGGKPQRRKNPQEGLYNELQKDKMAEAYSEIGMKGERRRGKGHDGLYQGLSTATKDTYDALHMQALPPRRAKRSGSGATNFSLLKQAGDVEENPGPTSMDWIWRILFLVGAATGAHSFEQVQLVQSGPEVKKPGESVKISCKASGYTFRHYSMNWVKQAPGQGLKWMGRINTESGVPIYADDFKGRFSFTVDTSASTAYLEISSLTSEDTAVYFCSNDYLYSLDFWGQGTTLTVSSTREQKLISEEDGSGIQNPDPAVYQLRDSKSSDKSVCLFTDFDSQTNVSQSKDSDVYITDKTVLDMRSMDFKSNSAVAWSNKSDFACANAFNNSIIPEDTFFPSPESSCGTQSFGLLDPKLCYLLDGILFIYGVILTALFLRSKRSRLLHSDYMNMTPRRPGPTRKHYQPYAPPRDFAAYRSRVKFSRSADAPAYQQGQNQLYNELNLGRREEYDVLDKRRGRDPEMGGKPQRRKNPQEGLYNELQKDKMAEAYSEIGMKGERRRGKGHDGLYQGLSTATKDTYDALHMQALPPR

SEQ ID NO: 20463 - protein, 930 aa, synthetic construct
MALPVTALLLPLALLLHAARPDIVLTQSPATLSLSPGDRATISCRASESVTILGSHLIHWYQQKPGQPPRLLIQLASNVQTGVPARFSGSGSRTDFTLTISSVEPEDFAVYYCLQSRTIPRTFGQGTKLEIKRLEGKPIPNPLLGLDSTGSGEDLKNVFPPEVAVFEPSEAEISHTQKATLVCLATGFYPDHVELSWWVNGKEVHSGVSTDPQPLKEQPALNDSRYCLSSRLRVSATFWQNPRNHFRCQVQFYGLSENDEWTQDRAKPVTQIVSAEAWGRADCGSQSFGLLDPKLCYLLDGILFIYGVILTALFLRSKRSRLLHSDYMNMTPRRPGPTRKHYQPYAPPRDFAAYRSRVKFSRSADAPAYQQGQNQLYNELNLGRREEYDVLDKRRGRDPEMGGKPQRRKNPQEGLYNELQKDKMAEAYSEIGMKGERRRGKGHDGLYQGLSTATKDTYDALHMQALPPRRAKRSGSGATNFSLLKQAGDVEENPGPTSMDWIWRILFLVGAATGAHSFEQVQLVQSGPEVKKPGESVKISCKASGYTFRHYSMNWVKQAPGQGLKWMGRINTESGVPIYADDFKGRFSFTVDTSASTAYLEISSLTSEDTAVYFCSNDYLYSLDFWGQGTTLTVSSTREQKLISEEDGSGIQNPDPAVYQLRDSKSSDKSVCLFTDFDSQTNVSQSKDSDVYITDKTVLDMRSMDFKSNSAVAWSNKSDFACANAFNNSIIPEDTFFPSPESSCGTQSFGLLDPKLCYLLDGILFIYGVILTALFLRSKRSRLLHSDYMNMTPRRPGPTRKHYQPYAPPRDFAAYRSRVKFSRSADAPAYQQGQNQLYNELNLGRREEYDVLDKRRGRDPEMGGKPQRRKNPQEGLYNELQKDKMAEAYSEIGMKGERRRGKGHDGLYQGLSTATKDTYDALHMQALPPR

SEQ ID NO: 20464 - protein, 891 aa, synthetic construct
MALPVTALLLPLALLLHAARPDIVLTQSPATLSLSPGDRATISCRASESVTILGSHLIHWYQQKPGQPPRLLIQLASNVQTGVPARFSGSGSRTDFTLTISSVEPEDFAVYYCLQSRTIPRTFGQGTKLEIKRLEGKPIPNPLLGLDSTGSGEDLKNVFPPEVAVFEPSEAEISHTQKATLVCLATGFYPDHVELSWWVNGKEVHSGVSTDPQPLKEQPALNDSRYCLSSRLRVSATFWQNPRNHFRCQVQFYGLSENDEWTQDRAKPVTQIVSAEAWGRADCGSQSFGLLDPKLCYLLDGILFIYGVILTALFLRVKFSRSADAPAYQQGQNQLYNELNLGRREEYDVLDKRRGRDPEMGGKPQRRKNPQEGLYNELQKDKMAEAYSEIGMKGERRRGKGHDGLYQGLSTATKDTYDALHMQALPPRRAKRSGSGATNFSLLKQAGDVEENPGPTSMDWIWRILFLVGAATGAHSFEQVQLVQSGPEVKKPGESVKISCKASGYTFRHYSMNWVKQAPGQGLKWMGRINTESGVPIYADDFKGRFSFTVDTSASTAYLEISSLTSEDTAVYFCSNDYLYSLDFWGQGTTLTVSSTREQKLISEEDLGSGIQNPDPAVYQLRDSKSSDKSVCLFTDFDSQTNVSQSKDSDVYITDKTVLDMRSMDFKSNSAVAWSNKSDFACANAFNNSIIPEDTFFPSPESSCGTQSFGLLDPKLCYLLDGILFIYGVILTALFLKRGRKKLLYIFKQPFMRPVQTTQEEDGCSCRFPEEEEGGCELRVKFSRSADAPAYQQGQNQLYNELNLGRREEYDVLDKRRGRDPEMGGKPQRRKNPQEGLYNELQKDKMAEAYSEIGMKGERRRGKGHDGLYQGLSTATKDTYDALHMQALPPR

SEQ ID NO: 20465 - protein, 933 aa, synthetic construct
MALPVTALLLPLALLLHAARPDIVLTQSPATLSLSPGDRATISCRASESVTILGSHLIHWYQQKPGQPPRLLIQLASNVQTGVPARFSGSGSRTDFTLTISSVEPEDFAVYYCLQSRTIPRTFGQGTKLEIKRLEGKPIPNPLLGLDSTGSGEDLKNVFPPEVAVFEPSEAEISHTQKATLVCLATGFYPDHVELSWWVNGKEVHSGVSTDPQPLKEQPALNDSRYCLSSRLRVSATFWQNPRNHFRCQVQFYGLSENDEWTQDRAKPVTQIVSAEAWGRADCGSQSFGLLDPKLCYLLDGILFIYGVILTALFLKRGRKKLLYIFKQPFMRPVQTTQEEDGCSCRFPEEEEGGCELRVKFSRSADAPAYQQGQNQLYNELNLGRREEYDVLDKRRGRDPEMGGKPQRRKNPQEGLYNELQKDKMAEAYSEIGMKGERRRGKGHDGLYQGLSTATKDTYDALHMQALPPRRAKRSGSGATNFSLLKQAGDVEENPGPTSMDWIWRILFLVGAATGAHSFEQVQLVQSGPEVKKPGESVKISCKASGYTFRHYSMNWVKQAPGQGLKWMGRINTESGVPIYADDFKGRFSFTVDTSASTAYLEISSLTSEDTAVYFCSNDYLYSLDFWGQGTTLTVSSTREQKLISEEDLGSGIQNPDPAVYQLRDSKSSDKSVCLFTDFDSQTNVSQSKDSDVYITDKTVLDMRSMDFKSNSAVAWSNKSDFACANAFNNSIIPEDTFFPSPESSCGTQSFGLLDPKLCYLLDGILFIYGVILTALFLKRGRKKLLYIFKQPFMRPVQTTQEEDGCSCRFPEEEEGGCELRVKFSRSADAPAYQQGQNQLYNELNLGRREEYDVLDKRRGRDPEMGGKPQRRKNPQEGLYNELQKDKMAEAYSEIGMKGERRRGKGHDGLYQGLSTATKDTYDALHMQALPPR

SEQ ID NO: 20466 - protein, 823 aa, synthetic construct
MALPVTALLLPLALLLHAARPDIVLTQSPATLSLSPGDRATISCRASESVTILGSHLIHWYQQKPGQPPRLLIQLASNVQTGVPARFSGSGSRTDFTLTISSVEPEDFAVYYCLQSRTIPRTFGQGTKLEIKRLEQSFGLLDPKLCYLLDGILFIYGVILTALFLRVKFSRSADAPAYQQGQNQLYNELNLGRREEYDVLDKRRGRDPEMGGKPQRRKNPQEGLYNELQKDKMAEAYSEIGMKGERRRGKGHDGLYQGLSTATKDTYDALHMQALPPRRAKRSGSGATNFSLLKQAGDVEENPGPTSMDWIWRILFLVGAATGAHSFEQVQLVQSGPEVKKPGESVKISCKASGYTFRHYSMNWVKQAPGQGLKWMGRINTESGVPIYADDFKGRFSFTVDTSASTAYLEISSLTSEDTAVYFCSNDYLYSLDFWGQGTTLTVSSTRQSFGLLDPKLCYLLDGILFIYGVILTALFLRVKFSRSADAPAYQQGQNQLYNELNLGRREEYDVLDKRRGRDPEMGGKPQRRKNPQEGLYNELQKDKMAEAYSEIGMKGERRRGKGHDGLYQGLSTATKDTYDALHMQALPPRRAKRSGSGVKQTLNFDLLKLAGDVESNPGPSRGHMTEYKPTVRLATRDDVPRAVRTLAAAFADYPATRHTVDPDRHIERVTELQELFLTRVGLDIGKVWVADDGAAVAVWTTPESVEAGAVFAEIGPRMAELSGSRLAAQQQMEGLLAPHRPKEPAWFLATVGVSPDHQGKGLGSAVVLPGVEAAERAGVPAFLETSAPRNLPFYERLGFTVTADVEVPEGPRTWCMTRKPGA

SEQ ID NO: 20467 - protein, 648 aa, synthetic construct
MALPVTALLLPLALLLHAARPDIVLTQSPATLSLSPGDRATISCRASESVTILGSHLIHWYQQKPGQPPRLLIQLASNVQTGVPARFSGSGSRTDFTLTISSVEPEDFAVYYCLQSRTIPRTFGQGTKLEIKRLEGQPKANPTVTLFPPSSEELQANKATLVCLISDFYPGAVTVAWKADGSPVKAGVETTKPSKQSNNKYAASSYLSLTPEQWKSHRSYSCQVTHEGSTVEKTVAPTECSPIKTDVITMDPKDNCSKDANDTLLLQLTNTSAYYMYLLLLLKSVVYFAIITCCLLRRTAFCCNGEKSRAKRSGSGATNFSLLKQAGDVEENPGPTSMDWIWRILFLVGAATGAHSFEQVQLVQSGPEVKKPGESVKISCKASGYTFRHYSMNWVKQAPGQGLKWMGRINTESGVPIYADDFKGRFSFTVDTSASTAYLEISSLTSEDTAVYFCSNDYLYSLDFWGQGTTLTVSSTRASTKGPSVFPLAPSSKSTSGGTAALGCLVKDYFPEPVTVSWNSGALTSGVHTFPAVLQSSGLYSLSSVVTVPSSSLGTQTYICNVNHKPSNTKVDKRVEPKSCEVKTDSTDHVKPKETENTKQPSKSCHKPKAIVHTEKVNMMSLTVLGLRMLFAKTVAVNFLLTAKLFFL

SEQ ID NO: 20468 - protein, 626 aa, synthetic construct
MALPVTALLLPLALLLHAARPDIVLTQSPATLSLSPGDRATISCRASESVTILGSHLIHWYQQKPGQPPRLLIQLASNVQTGVPARFSGSGSRTDFTLTISSVEPEDFAVYYCLQSRTIPRTFGQGTKLEIKRLEGQPKANPTVTLFPPSSEELQANKATLVCLISDFYPGAVTVAWKADGSPVKAGVETTKPSKQSNNKYAASSYLSLTPEQWKSHRSYSCQVTHEGSTVEKTVAPTECSGRADCGITSASYHQGVLSATILYEILLGKATLYAVLVSALVLMAMVKRKDSRGRAKRSGSGATNFSLLKQAGDVEENPGPTSMDWIWRILFLVGAATGAHSFEQVQLVQSGPEVKKPGESVKISCKASGYTFRHYSMNWVKQAPGQGLKWMGRINTESGVPIYADDFKGRFSFTVDTSASTAYLEISSLTSEDTAVYFCSNDYLYSLDFWGQGTTLTVSSTRASTKGPSVFPLAPSSKSTSGGTAALGCLVKDYFPEPVTVSWNSGALTSGVHTFPAVLQSSGLYSLSSVVTVPSSSLGTQTYICNVNHKPSNTKVDKRVEPKSCIPEDTFFPSSDVPCDVKLVEKSFETDTNLNFQNLSVIGFRILLLKVAGFNLLMTLRLWSS

SEQ ID NO: 20469 - protein, 626 aa, synthetic construct
MALPVTALLLPLALLLHAARPDIVLTQSPATLSLSPGDRATISCRASESVTILGSHLIHWYQQKPGQPPRLLIQLASNVQTGVPARFSGSGSRTDFTLTISSVEPEDFAVYYCLQSRTIPRTFGQGTKLEIKRLEGQPKANPTVTLFPPSSEELQANKATLVCLISDFYPGAVTVAWKADGSPVKAGVETTKPSKQSNNKYAASSYLSLTPEQWKSHRSYSCQVTHEGSTVEKTVAPTECSGRADCGFTSESYQQGVLSATILYEILLGKATLYAVLVSALVLMAMVKRKDSRGRAKRSGSGATNFSLLKQAGDVEENPGPTSMDWIWRILFLVGAATGAHSFEQVQLVQSGPEVKKPGESVKISCKASGYTFRHYSMNWVKQAPGQGLKWMGRINTESGVPIYADDFKGRFSFTVDTSASTAYLEISSLTSEDTAVYFCSNDYLYSLDFWGQGTTLTVSSTRASTKGPSVFPLAPSSKSTSGGTAALGCLVKDYFPEPVTVSWNSGALTSGVHTFPAVLQSSGLYSLSSVVTVPSSSLGTQTYICNVNHKPSNTKVDKRVEPKSCIPEDTFFPSPESSCDVKLVEKSFETDTNLNFQNLSVIGFRILLLKVAGFNLLMTLRLWSS

SEQ ID NO: 20470 - protein, 452 aa, synthetic construct
MALPVTALLLPLALLLHAARPDIVLTQSPATLSLSPGDRATISCRASESVTILGSHLIHWYQQKPGQPPRLLIQLASNVQTGVPARFSGSGSRTDFTLTISSVEPEDFAVYYCLQSRTIPRTFGQGTKLEIKRGGGGSGGGGSGGGGSQVQLVQSGPEVKKPGESVKISCKASGYTFRHYSMNWVKQAPGQGLKWMGRINTESGVPIYADDFKGRFSFTVDTSASTAYLEISSLTSEDTAVYFCSNDYLYSLDFWGQGTTLTVSSTRDGNEEMGGITQTPYKVSISGTTVILTCPQYPGSEILWQHNDKNIGGDEDDKNIGSDEDHLSLKEFSELEQSGYYVCYPRGSKPEDANFYLYLRARVCENCMEMDVMSVATIVIVDICITGGLLLLVYYWSKNRKAKAKPVTRGAGAGGRQRGQNKERPPPVPNPDYEPIRKGQRDLYSGLNQRRI

SEQ ID NO: 20471 - protein, 417 aa, synthetic construct
MALPVTALLLPLALLLHAARPDIVLTQSPATLSLSPGDRATISCRASESVTILGSHLIHWYQQKPGQPPRLLIQLASNVQTGVPARFSGSGSRTDFTLTISSVEPEDFAVYYCLQSRTIPRTFGQGTKLEIKRGGGGSGGGGSGGGGSQVQLVQSGPEVKKPGESVKISCKASGYTFRHYSMNWVKQAPGQGLKWMGRINTESGVPIYADDFKGRFSFTVDTSASTAYLEISSLTSEDTAVYFCSNDYLYSLDFWGQGTTLTVSSTRFKIPIEELEDRVFVNCNTSITWVEGTVGTLLSDITRLDLGKRILDPRGIYRCNGTDIYKDKESTVQVHYRMCQSCVELDPATVAGIIVTDVIATLLLALGVFCFAGHETGRLSGAADTQALLRNDQVYQPLRDRDDAQYSHLGGNWARNK

SEQ ID NO: 20472 - protein, 427 aa, synthetic construct
MALPVTALLLPLALLLHAARPDIVLTQSPATLSLSPGDRATISCRASESVTILGSHLIHWYQQKPGQPPRLLIQLASNVQTGVPARFSGSGSRTDFTLTISSVEPEDFAVYYCLQSRTIPRTFGQGTKLEIKRGGGGSGGGGSGGGGSQVQLVQSGPEVKKPGESVKISCKASGYTFRHYSMNWVKQAPGQGLKWMGRINTESGVPIYADDFKGRFSFTVDTSASTAYLEISSLTSEDTAVYFCSNDYLYSLDFWGQGTTLTVSSTRQSIKGNHLVKVYDYQEDGSVLLTCDAEAKNITWFKDGKMIGFLTEDKKKWNLGSNAKDPRGMYQCKGSQNKSKPLQVYYRMCQNCIELNAATISGFLFAEIVSIFVLAVGVYFIAGQDGVRQSRASDKQTLLPNDQLYQPLKDREDDQYSHLQGNQLRRN

SEQ ID NO: 20473 - protein, 410 aa, synthetic construct
MALPVTALLLPLALLLHAARPDIVLTQSPATLSLSPGDRATISCRASESVTILGSHLIHWYQQKPGQPPRLLIQLASNVQTGVPARFSGSGSRTDFTLTISSVEPEDFAVYYCLQSRTIPRTFGQGTKLEIKRGGGGSGGGGSGGGGSQVQLVQSGPEVKKPGESVKISCKASGYTFRHYSMNWVKQAPGQGLKWMGRINTESGVPIYADDFKGRFSFTVDTSASTAYLEISSLTSEDTAVYFCSNDYLYSLDFWGQGTTLTVSSTRQSFGLLDPKLCYLLDGILFIYGVILTALFLRVKFSRSADAPAYQQGQNQLYNELNLGRREEYDVLDKRRGRDPEMGGKPQRRKNPQEGLYNELQKDKMAEAYSEIGMKGERRRGKGHDGLYQGLSTATKDTYDALHMQALPPR

SEQ ID NO: 20474 - protein, 452 aa, synthetic construct
MALPVTALLLPLALLLHAARPQVQLVQSGPEVKKPGESVKISCKASGYTFRHYSMNWVKQAPGQGLKWMGRINTESGVPIYADDFKGRFSFTVDTSASTAYLEISSLTSEDTAVYFCSNDYLYSLDFWGQGTTLTVSSGGGGSGGGGSGGGGSDIVLTQSPATLSLSPGDRATISCRASESVTILGSHLIHWYQQKPGQPPRLLIQLASNVQTGVPARFSGSGSRTDFTLTISSVEPEDFAVYYCLQSRTIPRTFGQGTKLEIKRTRDGNEEMGGITQTPYKVSISGTTVILTCPQYPGSEILWQHNDKNIGGDEDDKNIGSDEDHLSLKEFSELEQSGYYVCYPRGSKPEDANFYLYLRARVCENCMEMDVMSVATIVIVDICITGGLLLLVYYWSKNRKAKAKPVTRGAGAGGRQRGQNKERPPPVPNPDYEPIRKGQRDLYSGLNQRRI

SEQ ID NO: 20475 - protein, 417 aa, synthetic construct
MALPVTALLLPLALLLHAARPQVQLVQSGPEVKKPGESVKISCKASGYTFRHYSMNWVKQAPGQGLKWMGRINTESGVPIYADDFKGRFSFTVDTSASTAYLEISSLTSEDTAVYFCSNDYLYSLDFWGQGTTLTVSSGGGGSGGGGSGGGGSDIVLTQSPATLSLSPGDRATISCRASESVTILGSHLIHWYQQKPGQPPRLLIQLASNVQTGVPARFSGSGSRTDFTLTISSVEPEDFAVYYCLQSRTIPRTFGQGTKLEIKRTRFKIPIEELEDRVFVNCNTSITWVEGTVGTLLSDITRLDLGKRILDPRGIYRCNGTDIYKDKESTVQVHYRMCQSCVELDPATVAGIIVTDVIATLLLALGVFCFAGHETGRLSGAADTQALLRNDQVYQPLRDRDDAQYSHLGGNWARNK

SEQ ID NO: 20476 - protein, 427 aa, synthetic construct
MALPVTALLLPLALLLHAARPQVQLVQSGPEVKKPGESVKISCKASGYTFRHYSMNWVKQAPGQGLKWMGRINTESGVPIYADDFKGRFSFTVDTSASTAYLEISSLTSEDTAVYFCSNDYLYSLDFWGQGTTLTVSSGGGGSGGGGSGGGGSDIVLTQSPATLSLSPGDRATISCRASESVTILGSHLIHWYQQKPGQPPRLLIQLASNVQTGVPARFSGSGSRTDFTLTISSVEPEDFAVYYCLQSRTIPRTFGQGTKLEIKRTRQSIKGNHLVKVYDYQEDGSVLLTCDAEAKNITWFKDGKMIGFLTEDKKKWNLGSNAKDPRGMYQCKGSQNKSKPLQVYYRMCQNCIELNAATISGFLFAEIVSIFVLAVGVYFIAGQDGVRQSRASDKQTLLPNDQLYQPLKDREDDQYSHLQGNQLRRN

SEQ ID NO: 20477 - protein, 410 aa, synthetic construct
MALPVTALLLPLALLLHAARPQVQLVQSGPEVKKPGESVKISCKASGYTFRHYSMNWVKQAPGQGLKWMGRINTESGVPIYADDFKGRFSFTVDTSASTAYLEISSLTSEDTAVYFCSNDYLYSLDFWGQGTTLTVSSGGGGSGGGGSGGGGSDIVLTQSPATLSLSPGDRATISCRASESVTILGSHLIHWYQQKPGQPPRLLIQLASNVQTGVPARFSGSGSRTDFTLTISSVEPEDFAVYYCLQSRTIPRTFGQGTKLEIKRTRQSFGLLDPKLCYLLDGILFIYGVILTALFLRVKFSRSADAPAYQQGQNQLYNELNLGRREEYDVLDKRRGRDPEMGGKPQRRKNPQEGLYNELQKDKMAEAYSEIGMKGERRRGKGHDGLYQGLSTATKDTYDALHMQALPPR

SEQ ID NO: 20478 - protein, 505 aa, synthetic construct
MALPVTALLLPLALLLHAARPDIVLTQSPATLSLSPGDRATISCRASESVTILGSHLIHWYQQKPGQPPRLLIQLASNVQTGVPARFSGSGSRTDFTLTISSVEPEDFAVYYCLQSRTIPRTFGQGTKLEIKRGGGGSGGGGSGGGGSQVQLVQSGPEVKKPGESVKISCKASGYTFRHYSMNWVKQAPGQGLKWMGRINTESGVPIYADDFKGRFSFTVDTSASTAYLEISSLTSEDTAVYFCSNDYLYSLDFWGQGTTLTVSSTRGMRTEDLPKAVVFLEPQWYRVLEKDSVTLKCQGAYSPEDNSTQWFHNESLISSQASSYFIDAATVDDSGEYRCQTNLSTLSDPVQLEVHIGWLLLQAPRWVFKEEDPIHLRCHSWKNTALHKVTYLQNGKGRKYFHHNSDFYIPKATLKDSGSYFCRGLVGSKNVSSETVNITITQGLAVPTISSFFPPGYQVSFCLVMVLLFAVDTGLYFSVKTNIRSSTRDWKDHKFKWRKDPQDK

SEQ ID NO: 20479 - protein, 787 aa, synthetic construct
MALPVTALLLPLALLLHAARPDIVLTQSPATLSLSPGDRATISCRASESVTILGSHLIHWYQQKPGQPPRLLIQLASNVQTGVPARFSGSGSRTDFTLTISSVEPEDFAVYYCLQSRTIPRTFGQGTKLEIKRGGGGSGGGGSGGGGSQVQLVQSGPEVKKPGESVKISCKASGYTFRHYSMNWVKQAPGQGLKWMGRINTESGVPIYADDFKGRFSFTVDTSASTAYLEISSLTSEDTAVYFCSNDYLYSLDFWGQGTTLTVSSTRGGSGQQQTLPKPFIWAEPHFMVPKEKQVTICCQGNYGAVEYQLHFEGSLFAVDRPKPPERINKVQFYIPDMNSRMAGQYSCIYRVGELWSEPSNLLDLVVTEMYDTPTLSVHPGPEVISGEKVTFYCRLDTATSMFLLLKEGRSSHVQRGYGKVQAEFPLGPVTTAHRGTYRCFGSYNNHAWSFPSEPVKLLVTGDIENTSLAPEDPTFPADTWGTYLLTTETGLQKDHALWDHTAQNLLRMGLAFLVLVALVWFLVEDWLSRKRTRERASRASTWEGRRRLNTQTLRAKRSGSGVKQTLNFDLLKLAGDVESNPGPSRGHMTEYKPTVRLATRDDVPRAVRTLAAAFADYPATRHTVDPDRHIERVTELQELFLTRVGLDIGKVWVADDGAAVAVWTTPESVEAGAVFAEIGPRMAELSGSRLAAQQQMEGLLAPHRPKEPAWFLATVGVSPDHQGKGLGSAVVLPGVEAAERAGVPAFLETSAPRNLPFYERLGFTVTADVEVPEGPRTWCMTRKPGA

SEQ ID NO: 20480 - protein, 620 aa, synthetic construct
MALPVTALLLPLALLLHAARPDIVLTQSPATLSLSPGDRATISCRASESVTILGSHLIHWYQQKPGQPPRLLIQLASNVQTGVPARFSGSGSRTDFTLTISSVEPEDFAVYYCLQSRTIPRTFGQGTKLEIKRGGGGSGGGGSGGGGSQVQLVQSGPEVKKPGESVKISCKASGYTFRHYSMNWVKQAPGQGLKWMGRINTESGVPIYADDFKGRFSFTVDTSASTAYLEISSLTSEDTAVYFCSNDYLYSLDFWGQGTTLTVSSTRKIEVMYPPPYLDNEKSNGTIIHVKGARGDIENTSLAPEDPTFPADTWGTYLLTTETGLQKDHALWDHTAQNLLRMGLAFLVLVALVWFLVEDWLSRKRTRERASRASTWEGRRRLNTQTLRAKRSGSGVKQTLNFDLLKLAGDVESNPGPSRGHMTEYKPTVRLATRDDVPRAVRTLAAAFADYPATRHTVDPDRHIERVTELQELFLTRVGLDIGKVWVADDGAAVAVWTTPESVEAGAVFAEIGPRMAELSGSRLAAQQQMEGLLAPHRPKEPAWFLATVGVSPDHQGKGLGSAVVLPGVEAAERAGVPAFLETSAPRNLPFYERLGFTVTADVEVPEGPRTWCMTRKPGA

SEQ ID NO: 20481 - protein, 707 aa, synthetic construct
MALPVTALLLPLALLLHAARPDIVLTQSPATLSLSPGDRATISCRASESVTILGSHLIHWYQQKPGQPPRLLIQLASNVQTGVPARFSGSGSRTDFTLTISSVEPEDFAVYYCLQSRTIPRTFGQGTKLEIKRGGGGSGGGGSGGGGSQVQLVQSGPEVKKPGESVKISCKASGYTFRHYSMNWVKQAPGQGLKWMGRINTESGVPIYADDFKGRFSFTVDTSASTAYLEISSLTSEDTAVYFCSNDYLYSLDFWGQGTTLTVSSTRLWVSQPPEIRTLEGSSAFLPCSFNASQGRLAIGSVTWFRDEVVPGKEVRNGTPEFRGRLAPLASSRFLHDHQAELHIRDVRGHDASIYVCRVEVLGLGVGTGNGTRLVVEKEHPQLGAGTVLLLRAGFYAVSFLSVAVGSTVYYQGKCLTWKGPRRQLPAVVPAPLPPPCGSSAHLLPPVPGGRAKRSGSGVKQTLNFDLLKLAGDVESNPGPSRMYRMQLLSCIALSLALVTNSAPTSSSTKKTQLQLEHLLLDLQMILNGINNYKNPKLTEMLTAKFYMPKKATELKHLQCLEEELKPLEEVLNLAQSKNFHLRPRDLISNINVIVLELKGSETTFMCEYADETATIVEFLNRWITFCQSIISTLTKIEVMYPPPYLDNEKSNGTIIHVKGKHLCPSPLFPGPSKPFWVLVVVGGVLACYSLLVTVAFIIFWVRSKRS

SEQ ID NO: 20482 - protein, 683 aa, synthetic construct
MALPVTALLLPLALLLHAARPDIVLTQSPATLSLSPGDRATISCRASESVTILGSHLIHWYQQKPGQPPRLLIQLASNVQTGVPARFSGSGSRTDFTLTISSVEPEDFAVYYCLQSRTIPRTFGQGTKLEIKRGGGGSGGGGSGGGGSQVQLVQSGPEVKKPGESVKISCKASGYTFRHYSMNWVKQAPGQGLKWMGRINTESGVPIYADDFKGRFSFTVDTSASTAYLEISSLTSEDTAVYFCSNDYLYSLDFWGQGTTLTVSSTRLWVSQPPEIRTLEGSSAFLPCSFNASQGRLAIGSVTWFRDEVVPGKEVRNGTPEFRGRLAPLASSRFLHDHQAELHIRDVRGHDASIYVCRVEVLGLGVGTGNGTRLVVEKEHPQLGAGTVLLLRAGFYAVSFLSVAVGSTVYYQGKCLTWKGPRRQLPAVVPAPLPPPCGSSAHLLPPVPGGRAKRSGSGVKQTLNFDLLKLAGDVESNPGPSRGHMTEYKPTVRLATRDDVPRAVRTLAAAFADYPATRHTVDPDRHIERVTELQELFLTRVGLDIGKVWVADDGAAVAVWTTPESVEAGAVFAEIGPRMAELSGSRLAAQQQMEGLLAPHRPKEPAWFLATVGVSPDHQGKGLGSAVVLPGVEAAERAGVPAFLETSAPRNLPFYERLGFTVTADVEVPEGPRTWCMTRKPGA

SEQ ID NO: 20483 - protein, 359 aa, synthetic construct
MALPVTALLLPLALLLHAARPDIVLTQSPATLSLSPGDRATISCRASESVTILGSHLIHWYQQKPGQPPRLLIQLASNVQTGVPARFSGSGSRTDFTLTISSVEPEDFAVYYCLQSRTIPRTFGQGTKLEIKRGGGGSGGGGSGGGGSQVQLVQSGPEVKKPGESVKISCKASGYTFRHYSMNWVKQAPGQGLKWMGRINTESGVPIYADDFKGRFSFTVDTSASTAYLEISSLTSEDTAVYFCSNDYLYSLDFWGQGTTLTVSSTRKIEVMYPPPYLDNEKSNGTIIHVKGARITQGLAVSTISSFFPPGYQVSFCLVMVLLFAVDTGLYFSVKTNIRSSTRDWKDHKFKWRKDPQDK

SEQ ID NO: 20484 - protein, 359 aa, synthetic construct
MALPVTALLLPLALLLHAARPDIVLTQSPATLSLSPGDRATISCRASESVTILGSHLIHWYQQKPGQPPRLLIQLASNVQTGVPARFSGSGSRTDFTLTISSVEPEDFAVYYCLQSRTIPRTFGQGTKLEIKRGGGGSGGGGSGGGGSQVQLVQSGPEVKKPGESVKISCKASGYTFRHYSMNWVKQAPGQGLKWMGRINTESGVPIYADDFKGRFSFTVDTSASTAYLEISSLTSEDTAVYFCSNDYLYSLDFWGQGTTLTVSSTRKIEVMYPPPYLDNEKSNGTIIHVKGARITQGLAVPTISSFFPPGYQVSFCLVMVLLFAVDTGLYFSVKTNIRSSTRDWKDHKFKWRKDPQDK

SEQ ID NO: 20485 - protein, 338 aa, synthetic construct
MALPVTALLLPLALLLHAARPDIVLTQSPATLSLSPGDRATISCRASESVTILGSHLIHWYQQKPGQPPRLLIQLASNVQTGVPARFSGSGSRTDFTLTISSVEPEDFAVYYCLQSRTIPRTFGQGTKLEIKRGGGGSGGGGSGGGGSQVQLVQSGPEVKKPGESVKISCKASGYTFRHYSMNWVKQAPGQGLKWMGRINTESGVPIYADDFKGRFSFTVDTSASTAYLEISSLTSEDTAVYFCSNDYLYSLDFWGQGTTLTVSSTRKIEVMYPPPYLDNEKSNGTIIHVKGARITQGLAVSTISSFSPPGYQVSFCLVMVLLFAVDTGLYFSVKTNI

SEQ ID NO: 20486 - protein, 369 aa, synthetic construct
MALPVTALLLPLALLLHAARPDIVLTQSPATLSLSPGDRATISCRASESVTILGSHLIHWYQQKPGQPPRLLIQLASNVQTGVPARFSGSGSRTDFTLTISSVEPEDFAVYYCLQSRTIPRTFGQGTKLEIKRGGGGSGGGGSGGGGSQVQLVQSGPEVKKPGESVKISCKASGYTFRHYSMNWVKQAPGQGLKWMGRINTESGVPIYADDFKGRFSFTVDTSASTAYLEISSLTSEDTAVYFCSNDYLYSLDFWGQGTTLTVSSTRKIEVMYPPPYLDNEKSNGTIIHVKGARVEKEHPQLGAGTVLLLRAGFYAVSFLSVAVGSTVYYQGKCLTWKGPRRQLPAVVPAPLPPPCGSSAHLLPPVPGG

SEQ ID NO: 20487 - protein, 450 aa, synthetic construct
MALPVTALLLPLALLLHAARPDIVLTQSPATLSLSPGDRATISCRASESVTILGSHLIHWYQQKPGQPPRLLIQLASNVQTGVPARFSGSGSRTDFTLTISSVEPEDFAVYYCLQSRTIPRTFGQGTKLEIKRGGGGSGGGGSGGGGSQVQLVQSGPEVKKPGESVKISCKASGYTFRHYSMNWVKQAPGQGLKWMGRINTESGVPIYADDFKGRFSFTVDTSASTAYLEISSLTSEDTAVYFCSNDYLYSLDFWGQGTTLTVSSTRKIEVMYPPPYLDNEKSNGTIIHVKGARKSVRFYLVVSPASASTQTSWTPRDLVSSQTQTQSCVPPTAGARQAPESPSTIPVPSQPQNSTLRPGPAAPIALVPVFCGLLVAKSLVLSALLVWWGDIWWKTMMELRSLDTQKATCHLQQVTDLPWTSVSSPVEREILYHTVARTKISDDDDEHTL

SEQ ID NO: 20488 - protein, 387 aa, synthetic construct
MALPVTALLLPLALLLHAARPDIVLTQSPATLSLSPGDRATISCRASESVTILGSHLIHWYQQKPGQPPRLLIQLASNVQTGVPARFSGSGSRTDFTLTISSVEPEDFAVYYCLQSRTIPRTFGQGTKLEIKRGGGGSGGGGSGGGGSQVQLVQSGPEVKKPGESVKISCKASGYTFRHYSMNWVKQAPGQGLKWMGRINTESGVPIYADDFKGRFSFTVDTSASTAYLEISSLTSEDTAVYFCSNDYLYSLDFWGQGTTLTVSSTRKIEVMYPPPYLDNEKSNGTIIHVKGARGDIENTSLAPEDPTFPADTWGTYLLTTETGLQKDHALWDHTAQNLLRMGLAFLVLVALVWFLVEDWLSRKRTRERASRASTWEGRRRLNTQTL

SEQ ID NO: 20489 - protein, 983 aa, synthetic construct
MALPVTALLLPLALLLHAARPDIVLTQSPATLSLSPGDRATISCRASESVTILGSHLIHWYQQKPGQPPRLLIQLASNVQTGVPARFSGSGSRTDFTLTISSVEPEDFAVYYCLQSRTIPRTFGQGTKLEIKRLEGQPKANPTVTLFPPSSEELQANKATLVCLISDFYPGAVTVAWKADGSPVKAGVETTKPSKQSNNKYAASSYLSLTPEQWKSHRSYSCQVTHEGSTVEKTVAPTECSGSQSFGLLDPKLCYLLDGILFIYGVILTALFLRVKFSRSADAPAYQQGQNQLYNELNLGRREEYDVLDKRRGRDPEMGGKPQRRKNPQEGLYNELQKDKMAEAYSEIGMKGERRRGKGHDGLYQGLSTATKDTYDALHMQALPPRRAKRSGSGATNFSLLKQAGDVEENPGPTSMDWIWRILFLVGAATGAHSFEQVQLVQSGPEVKKPGESVKISCKASGYTFRHYSMNWVKQAPGQGLKWMGRINTESGVPIYADDFKGRFSFTVDTSASTAYLEISSLTSEDTAVYFCSNDYLYSLDFWGQGTTLTVSSTRASTKGPSVFPLAPSSKSTSGGTAALGCLVKDYFPEPVTVSWNSGALTSGVHTFPAVLQSSGLYSLSSVVTVPSSSLGTQTYICNVNHKPSNTKVDKRVEPKSCGTGDIENTSLAPEDPTFPADTWGTYLLTTETGLQKDHALWDHTAQNLLRMGLAFLVLVALVWFLVEDWLSRKRTRERASRASTWEGRRRLNTQTLRAKRSGSGATNFSLLKQAGDVEENPGPSRGHMTEYKPTVRLATRDDVPRAVRTLAAAFADYPATRHTVDPDRHIERVTELQELFLTRVGLDIGKVWVADDGAAVAVWTTPESVEAGAVFAEIGPRMAELSGSRLAAQQQMEGLLAPHRPKEPAWFLATVGVSPDHQGKGLGSAVVLPGVEAAERAGVPAFLETSAPRNLPFYERLGFTVTADVEVPEGPRTWCMTRKPGA

SEQ ID NO: 20490 - protein, 1049 aa, synthetic construct
MALPVTALLLPLALLLHAARPDIVLTQSPATLSLSPGDRATISCRASESVTILGSHLIHWYQQKPGQPPRLLIQLASNVQTGVPARFSGSGSRTDFTLTISSVEPEDFAVYYCLQSRTIPRTFGQGTKLEIKRLEGQPKANPTVTLFPPSSEELQANKATLVCLISDFYPGAVTVAWKADGSPVKAGVETTKPSKQSNNKYAASSYLSLTPEQWKSHRSYSCQVTHEGSTVEKTVAPTECSGSQSFGLLDPKLCYLLDGILFIYGVILTALFLRVKFSRSADAPAYQQGQNQLYNELNLGRREEYDVLDKRRGRDPEMGGKPQRRKNPQEGLYNELQKDKMAEAYSEIGMKGERRRGKGHDGLYQGLSTATKDTYDALHMQALPPRRAKRSGSGATNFSLLKQAGDVEENPGPTSMDWIWRILFLVGAATGAHSFEQVQLVQSGPEVKKPGESVKISCKASGYTFRHYSMNWVKQAPGQGLKWMGRINTESGVPIYADDFKGRFSFTVDTSASTAYLEISSLTSEDTAVYFCSNDYLYSLDFWGQGTTLTVSSTRASTKGPSVFPLAPSSKSTSGGTAALGCLVKDYFPEPVTVSWNSGALTSGVHTFPAVLQSSGLYSLSSVVTVPSSSLGTQTYICNVNHKPSNTKVDKRVEPKSCGTKSVRFYLVVSPASASTQTSWTPRDLVSSQTQTQSCVPPTAGARQAPESPSTIPVPSQPQNSTLRPGPAAPIALVPVFCGLLVAKSLVLSALLVWWGDIWWKTMMELRSLDTQKATCHLQQVTDLPWTSVSSPVEREILYHTVARTKISDDDDEHTLRAKRSGSGVKQTLNFDLLKLAGDVESNPGPSRGHMTEYKPTVRLATRDDVPRAVRTLAAAFADYPATRHTVDPDRHIERVTELQELFLTRVGLDIGKVWVADDGAAVAVWTTPESVEAGAVFAEIGPRMAELSGSRLAAQQQMEGLLAPHRPKEPAWFLATVGVSPDHQGKGLGSAVVLPGVEAAERAGVPAFLETSAPRNLPFYERLGFTVTADVEVPEGPRTWCMTRKPGA

SEQ ID NO: 20491 - protein, 969 aa, synthetic construct
MALPVTALLLPLALLLHAARPDIVLTQSPATLSLSPGDRATISCRASESVTILGSHLIHWYQQKPGQPPRLLIQLASNVQTGVPARFSGSGSRTDFTLTISSVEPEDFAVYYCLQSRTIPRTFGQGTKLEIKRLEGQPKANPTVTLFPPSSEELQANKATLVCLISDFYPGAVTVAWKADGSPVKAGVETTKPSKQSNNKYAASSYLSLTPEQWKSHRSYSCQVTHEGSTVEKTVAPTECSGSQSFGLLDPKLCYLLDGILFIYGVILTALFLRVKFSRSADAPAYQQGQNQLYNELNLGRREEYDVLDKRRGRDPEMGGKPQRRKNPQEGLYNELQKDKMAEAYSEIGMKGERRRGKGHDGLYQGLSTATKDTYDALHMQALPPRRAKRSGSGATNFSLLKQAGDVEENPGPTSMDWIWRILFLVGAATGAHSFEQVQLVQSGPEVKKPGESVKISCKASGYTFRHYSMNWVKQAPGQGLKWMGRINTESGVPIYADDFKGRFSFTVDTSASTAYLEISSLTSEDTAVYFCSNDYLYSLDFWGQGTTLTVSSTRASTKGPSVFPLAPSSKSTSGGTAALGCLVKDYFPEPVTVSWNSGALTSGVHTFPAVLQSSGLYSLSSVVTVPSSSLGTQTYICNVNHKPSNTKVDKRVEPKSCGTVVEKEHPQLGAGTVLLLRAGFYAVSFLSVAVGSTVYYQGKCLTWKGPRRQLPAVVPAPLPPPCGSSAHLLPPVPGGRAKRSGSGVKQTLNFDLLKLAGDVESNPGPSRGHMTEYKPTVRLATRDDVPRAVRTLAAAFADYPATRHTVDPDRHIERVTELQELFLTRVGLDIGKVWVADDGAAVAVWTTPESVEAGAVFAEIGPRMAELSGSRLAAQQQMEGLLAPHRPKEPAWFLATVGVSPDHQGKGLGSAVVLPGVEAAERAGVPAFLETSAPRNLPFYERLGFTVTADVEVPEGPRTWCMTRKPGA

SEQ ID NO: 20492 - protein, 998 aa, synthetic construct
MALPVTALLLPLALLLHAARPDIVLTQSPATLSLSPGDRATISCRASESVTILGSHLIHWYQQKPGQPPRLLIQLASNVQTGVPARFSGSGSRTDFTLTISSVEPEDFAVYYCLQSRTIPRTFGQGTKLEIKRLEDLKNVFPPEVAVFEPSEAEISHTQKATLVCLATGFYPDHVELSWWVNGKEVHSGVSTDPQPLKEQPALNDSRYCLSSRLRVSATFWQNPRNHFRCQVQFYGLSENDEWTQDRAKPVTQIVSAEAWGRADCGSQSFGLLDPKLCYLLDGILFIYGVILTALFLRVKFSRSADAPAYQQGQNQLYNELNLGRREEYDVLDKRRGRDPEMGGKPQRRKNPQEGLYNELQKDKMAEAYSEIGMKGERRRGKGHDGLYQGLSTATKDTYDALHMQALPPRRAKRSGSGATNFSLLKQAGDVEENPGPTSMDWIWRILFLVGAATGAHSFEQVQLVQSGPEVKKPGESVKISCKASGYTFRHYSMNWVKQAPGQGLKWMGRINTESGVPIYADDFKGRFSFTVDTSASTAYLEISSLTSEDTAVYFCSNDYLYSLDFWGQGTTLTVSSTRIQNPDPAVYQLRDSKSSDKSVCLFTDFDSQTNVSQSKDSDVYITDKTVLDMRSMDFKSNSAVAWSNKSDFACANAFNNSIIPEDTFFPSPESSCGTGDIENTSLAPEDPTFPADTWGTYLLTTETGLQKDHALWDHTAQNLLRMGLAFLVLVALVWFLVEDWLSRKRTRERASRASTWEGRRRLNTQTLRAKRSGSGATNFSLLKQAGDVEENPGPSRGHMTEYKPTVRLATRDDVPRAVRTLAAAFADYPATRHTVDPDRHIERVTELQELFLTRVGLDIGKVWVADDGAAVAVWTTPESVEAGAVFAEIGPRMAELSGSRLAAQQQMEGLLAPHRPKEPAWFLATVGVSPDHQGKGLGSAVVLPGVEAAERAGVPAFLETSAPRNLPFYERLGFTVTADVEVPEGPRTWCMTRKPGA

SEQ ID NO: 20493 - protein, 1064 aa, synthetic construct
MALPVTALLLPLALLLHAARPDIVLTQSPATLSLSPGDRATISCRASESVTILGSHLIHWYQQKPGQPPRLLIQLASNVQTGVPARFSGSGSRTDFTLTISSVEPEDFAVYYCLQSRTIPRTFGQGTKLEIKRLEDLKNVFPPEVAVFEPSEAEISHTQKATLVCLATGFYPDHVELSWWVNGKEVHSGVSTDPQPLKEQPALNDSRYCLSSRLRVSATFWQNPRNHFRCQVQFYGLSENDEWTQDRAKPVTQIVSAEAWGRADCGSQSFGLLDPKLCYLLDGILFIYGVILTALFLRVKFSRSADAPAYQQGQNQLYNELNLGRREEYDVLDKRRGRDPEMGGKPQRRKNPQEGLYNELQKDKMAEAYSEIGMKGERRRGKGHDGLYQGLSTATKDTYDALHMQALPPRRAKRSGSGATNFSLLKQAGDVEENPGPTSMDWIWRILFLVGAATGAHSFEQVQLVQSGPEVKKPGESVKISCKASGYTFRHYSMNWVKQAPGQGLKWMGRINTESGVPIYADDFKGRFSFTVDTSASTAYLEISSLTSEDTAVYFCSNDYLYSLDFWGQGTTLTVSSTRIQNPDPAVYQLRDSKSSDKSVCLFTDFDSQTNVSQSKDSDVYITDKTVLDMRSMDFKSNSAVAWSNKSDFACANAFNNSIIPEDTFFPSPESSCGTKSVRFYLVVSPASASTQTSWTPRDLVSSQTQTQSCVPPTAGARQAPESPSTIPVPSQPQNSTLRPGPAAPIALVPVFCGLLVAKSLVLSALLVWWGDIWWKTMMELRSLDTQKATCHLQQVTDLPWTSVSSPVEREILYHTVARTKISDDDDEHTLRAKRSGSGVKQTLNFDLLKLAGDVESNPGPSRGHMTEYKPTVRLATRDDVPRAVRTLAAAFADYPATRHTVDPDRHIERVTELQELFLTRVGLDIGKVWVADDGAAVAVWTTPESVEAGAVFAEIGPRMAELSGSRLAAQQQMEGLLAPHRPKEPAWFLATVGVSPDHQGKGLGSAVVLPGVEAAERAGVPAFLETSAPRNLPFYERLGFTVTADVEVPEGPRTWCMTRKPGA

SEQ ID NO: 20494 - protein, 984 aa, synthetic construct
MALPVTALLLPLALLLHAARPDIVLTQSPATLSLSPGDRATISCRASESVTILGSHLIHWYQQKPGQPPRLLIQLASNVQTGVPARFSGSGSRTDFTLTISSVEPEDFAVYYCLQSRTIPRTFGQGTKLEIKRLEDLKNVFPPEVAVFEPSEAEISHTQKATLVCLATGFYPDHVELSWWVNGKEVHSGVSTDPQPLKEQPALNDSRYCLSSRLRVSATFWQNPRNHFRCQVQFYGLSENDEWTQDRAKPVTQIVSAEAWGRADCGSQSFGLLDPKLCYLLDGILFIYGVILTALFLRVKFSRSADAPAYQQGQNQLYNELNLGRREEYDVLDKRRGRDPEMGGKPQRRKNPQEGLYNELQKDKMAEAYSEIGMKGERRRGKGHDGLYQGLSTATKDTYDALHMQALPPRRAKRSGSGATNFSLLKQAGDVEENPGPTSMDWIWRILFLVGAATGAHSFEQVQLVQSGPEVKKPGESVKISCKASGYTFRHYSMNWVKQAPGQGLKWMGRINTESGVPIYADDFKGRFSFTVDTSASTAYLEISSLTSEDTAVYFCSNDYLYSLDFWGQGTTLTVSSTRIQNPDPAVYQLRDSKSSDKSVCLFTDFDSQTNVSQSKDSDVYITDKTVLDMRSMDFKSNSAVAWSNKSDFACANAFNNSIIPEDTFFPSPESSCGTVVEKEHPQLGAGTVLLLRAGFYAVSFLSVAVGSTVYYQGKCLTWKGPRRQLPAVVPAPLPPPCGSSAHLLPPVPGGRAKRSGSGVKQTLNFDLLKLAGDVESNPGPSRGHMTEYKPTVRLATRDDVPRAVRTLAAAFADYPATRHTVDPDRHIERVTELQELFLTRVGLDIGKVWVADDGAAVAVWTTPESVEAGAVFAEIGPRMAELSGSRLAAQQQMEGLLAPHRPKEPAWFLATVGVSPDHQGKGLGSAVVLPGVEAAERAGVPAFLETSAPRNLPFYERLGFTVTADVEVPEGPRTWCMTRKPGA

SEQ ID NO: 20495 - protein, 955 aa, synthetic construct
MALPVTALLLPLALLLHAARPDIVLTQSPATLSLSPGDRATISCRASESVTILGSHLIHWYQQKPGQPPRLLIQLASNVQTGVPARFSGSGSRTDFTLTISSVEPEDFAVYYCLQSRTIPRTFGQGTKLEIKRLEGQPKANPTVTLFPPSSEELQANKATLVCLISDFYPGAVTVAWKADGSPVKAGVETTKPSKQSNNKYAASSYLSLTPEQWKSHRSYSCQVTHEGSTVEKTVAPTECSGSQSFGLLDPKLCYLLDGILFIYGVILTALFLRVKFSRSADAPAYQQGQNQLYNELNLGRREEYDVLDKRRGRDPEMGGKPQRRKNPQEGLYNELQKDKMAEAYSEIGMKGERRRGKGHDGLYQGLSTATKDTYDALHMQALPPRRAKRSGSGATNFSLLKQAGDVEENPGPTSMDWIWRILFLVGAATGAHSFEQVQLVQSGPEVKKPGESVKISCKASGYTFRHYSMNWVKQAPGQGLKWMGRINTESGVPIYADDFKGRFSFTVDTSASTAYLEISSLTSEDTAVYFCSNDYLYSLDFWGQGTTLTVSSTRASTKGPSVFPLAPSSKSTSGGTAALGCLVKDYFPEPVTVSWNSGALTSGVHTFPAVLQSSGLYSLSSVVTVPSSSLGTQTYICNVNHKPSNTKVDKRVEPKSCGTITQGLAVSTISSFFPPGYQVSFCLVMVLLFAVDTGLYFSVKTNIRSSTRDWKDHKFKWRKDPQDKRAKRSGSGATNFSLLKQAGDVEENPGPSRGHMTEYKPTVRLATRDDVPRAVRTLAAAFADYPATRHTVDPDRHIERVTELQELFLTRVGLDIGKVWVADDGAAVAVWTTPESVEAGAVFAEIGPRMAELSGSRLAAQQQMEGLLAPHRPKEPAWFLATVGVSPDHQGKGLGSAVVLPGVEAAERAGVPAFLETSAPRNLPFYERLGFTVTADVEVPEGPRTWCMTRKPGA

SEQ ID NO: 20496 - protein, 970 aa, synthetic construct
MALPVTALLLPLALLLHAARPDIVLTQSPATLSLSPGDRATISCRASESVTILGSHLIHWYQQKPGQPPRLLIQLASNVQTGVPARFSGSGSRTDFTLTISSVEPEDFAVYYCLQSRTIPRTFGQGTKLEIKRLEDLKNVFPPEVAVFEPSEAEISHTQKATLVCLATGFYPDHVELSWWVNGKEVHSGVSTDPQPLKEQPALNDSRYCLSSRLRVSATFWQNPRNHFRCQVQFYGLSENDEWTQDRAKPVTQIVSAEAWGRADCGSQSFGLLDPKLCYLLDGILFIYGVILTALFLRVKFSRSADAPAYQQGQNQLYNELNLGRREEYDVLDKRRGRDPEMGGKPQRRKNPQEGLYNELQKDKMAEAYSEIGMKGERRRGKGHDGLYQGLSTATKDTYDALHMQALPPRRAKRSGSGATNFSLLKQAGDVEENPGPTSMDWIWRILFLVGAATGAHSFEQVQLVQSGPEVKKPGESVKISCKASGYTFRHYSMNWVKQAPGQGLKWMGRINTESGVPIYADDFKGRFSFTVDTSASTAYLEISSLTSEDTAVYFCSNDYLYSLDFWGQGTTLTVSSTRIQNPDPAVYQLRDSKSSDKSVCLFTDFDSQTNVSQSKDSDVYITDKTVLDMRSMDFKSNSAVAWSNKSDFACANAFNNSIIPEDTFFPSPESSCGTITQGLAVSTISSFFPPGYQVSFCLVMVLLFAVDTGLYFSVKTNIRSSTRDWKDHKFKWRKDPQDKRAKRSGSGATNFSLLKQAGDVEENPGPSRGHMTEYKPTVRLATRDDVPRAVRTLAAAFADYPATRHTVDPDRHIERVTELQELFLTRVGLDIGKVWVADDGAAVAVWTTPESVEAGAVFAEIGPRMAELSGSRLAAQQQMEGLLAPHRPKEPAWFLATVGVSPDHQGKGLGSAVVLPGVEAAERAGVPAFLETSAPRNLPFYERLGFTVTADVEVPEGPRTWCMTRKPGA

SEQ ID NO: 20497 - protein, 653 aa, synthetic construct
MALPVTALLLPLALLLHAARPDIVLTQSPATLSLSPGDRATISCRASESVTILGSHLIHWYQQKPGQPPRLLIQLASNVQTGVPARFSGSGSRTDFTLTISSVEPEDFAVYYCLQSRTIPRTFGQGTKLEIKRLEGQPKANPTVTLFPPSSEELQANKATLVCLISDFYPGAVTVAWKADGSPVKAGVETTKPSKQSNNKYAASSYLSLTPEQWKSHRSYSCQVTHEGSTVEKTVAPTECSGSLGEPQLCYILDAILFLYGIVLTLLYCRLKIQVRKAAITSYEKSDGVYTGLSTRNQETYETLKHEKPPQRAKRSGSGATNFSLLKQAGDVEENPGPTSMDWIWRILFLVGAATGAHSFEQVQLVQSGPEVKKPGESVKISCKASGYTFRHYSMNWVKQAPGQGLKWMGRINTESGVPIYADDFKGRFSFTVDTSASTAYLEISSLTSEDTAVYFCSNDYLYSLDFWGQGTTLTVSSTRASTKGPSVFPLAPSSKSTSGGTAALGCLVKDYFPEPVTVSWNSGALTSGVHTFPAVLQSSGLYSLSSVVTVPSSSLGTQTYICNVNHKPSNTKVDKRVEPKSCGTLGEPQLCYILDAILFLYGIVLTLLYCRLKIQVRKAAITSYEKSDGVYTGLSTRNQETYETLKHEKPPQ

SEQ ID NO: 20498 - protein, 1030 aa, synthetic construct
MALPVTALLLPLALLLHAARPDIVLTQSPATLSLSPGDRATISCRASESVTILGSHLIHWYQQKPGQPPRLLIQLASNVQTGVPARFSGSGSRTDFTLTISSVEPEDFAVYYCLQSRTIPRTFGQGTKLEIKRGQPKANPTVTLFPPSSEELQANKATLVCLISDFYPGAVTVAWKADGSPVKAGVETTKPSKQSNNKYAASSYLSLTPEQWKSHRSYSCQVTHEGSTVEKTVAPTECSGSQSFGLLDPKLCYLLDGILFIYGVILTALFLRVKFSRSADAPAYQQGQNQLYNELNLGRREEYDVLDKRRGRDPEMGGKPRRKNPQEGLYNELQKDKMAEAYSEIGMKGERRRGKGHDGLYQGLSTATKDTYDALHMQALPPRRAKRSGSGATNFSLLKQAGDVEENPGPTSMDWIWRILFLVGAATGAHSFEQVQLVQSGPEVKKPGESVKISCKASGYTFRHYSMNWVKQAPGQGLKWMGRINTESGVPIYADDFKGRFSFTVDTSASTAYLEISSLTSEDTAVYFCSNDYLYSLDFWGQGTTLTVSSASTKGPSVFPLAPSSKSTSGGTAALGCLVKDYFPEPVTVSWNSGALTSGVHTFPAVLQSSGLYSLSSVVTVPSSSLGTQTYICNVNHKPSNTKVDKRVEPKSCGTQSFGLLDPKLCYLLDGILFIYGVILTALFLRVKFSRSADAPAYQQGQNQLYNELNLGRREEYDVLDKRRGRDPEMGGKPRRKNPQEGLYNELQKDKMAEAYSEIGMKGERRRGKGHDGLYQGLSTATKDTYDALHMQALPPRRAKRSGSGVKQTLNFDLLKLAGDVESNPGPSRGHMTEYKPTVRLATRDDVPRAVRTLAAAFADYPATRHTVDPDRHIERVTELQELFLTRVGLDIGKVWVADDGAAVAVWTTPESVEAGAVFAEIGPRMAELSGSRLAAQQQMEGLLAPHRPKEPAWFLATVGVSPDHQGKGLGSAVVLPGVEAAERAGVPAFLETSAPRNLPFYERLGFTVTADVEVPEGPRTWCMTRKPGA

SEQ ID NO: 20499 - protein, 816 aa, synthetic construct
MALPVTALLLPLALLLHAARPDIVLTQSPATLSLSPGDRATISCRASESVTILGSHLIHWYQQKPGQPPRLLIQLASNVQTGVPARFSGSGSRTDFTLTISSVEPEDFAVYYCLQSRTIPRTFGQGTKLEIKRLEDLKNVFPPEVAVFEPSEAEISHTQKATLVCLATGFYPDHVELSWWVNGKEVHSGVSTDPQPLKEQPALNDSRYCLSSRLRVSATFWQNPRNHFRCQVQFYGLSENDEWTQDRAKPVTQIVSAEAWGRADCGSQSFGLLDPKLCYLLDGILFIYGVILTALFLRVKFSRSADAPAYQQGQNQLYNELNLGRREEYDVLDKRRGRDPEMGGKPRRKNPQEGLYNELQKDKMAEAYSEIGMKGERRRGKGHDGLYQGLSTATKDTYDALHMQALPPRRAKRSGSGATNFSLLKQAGDVEENPGPTSMDWIWRILFLVGAATGAHSFEQVQLVQSGPEVKKPGESVKISCKASGYTFRHYSMNWVKQAPGQGLKWMGRINTESGVPIYADDFKGRFSFTVDTSASTAYLEISSLTSEDTAVYFCSNDYLYSLDFWGQGTTLTVSSTRIQNPDPAVYQLRDSKSSDKSVCLFTDFDSQTNVSQSKDSDVYITDKTVLDMRSMDFKSNSAVAWSNKSDFACANAFNNSIIPEDTFFPSPESSCGTQSFGLLDPKLCYLLDGILFIYGVILTALFLRVKFSRSADAPAYQQGQNQLYNELNLGRREEYDVLDKRRGRDPEMGGKPRRKNPQEGLYNELQKDKMAEAYSEIGMKGERRRGKGHDGLYQGLSTATKDTYDALHMQALPPR

SEQ ID NO: 20500 - protein, 496 aa, synthetic construct
MALPVTALLLPLALLLHAARPDIVLTQSPSSLSASVGDRATISCRASESVTILGSHLIYWYQQKPGQAPRLLIQLASNVQTGVPARFSGSGSGTDFTLTISSVEPEDVAVYYCLQSRTIPRTFGQGTKVEIKGGGGSGGGGSGGGGSQIQLVQSGPELKKPGGSVKISCAASGYTFTDYSINWVRQAPGKGLEWVGWINTETREPAYAYDFRGRFTFSADTSKSTAYLQMNSLRAEDTAVYYCALDYSYAMDYWGQGTLVTVSSTREQKLISEEDLKIEVMYPPPYLDNEKSNGTIIHVKGKHLCPSPLFPGPSKPFWVLVVVGGVLACYSLLVTVAFIIFWVRSKRSRLLHSDYMNMTPRRPGPTRKHYQPYAPPRDFAAYRSRVKFSRSADAPAYQQGQNQLYNELNLGRREEYDVLDKRRGRDPEMGGKPRRKNPQEGLYNELQKDKMAEAYSEIGMKGERRRGKGHDGLYQGLSTATKDTYDALHMQALPPR

SEQ ID NO: 20501 - protein, 502 aa, synthetic construct
MALPVTALLLPLALLLHAARPDIVLTQSPSSLSASVGDRATISCRASESVTILGSHLIYWYQQKPGQAPRLLIQLASNVQTGVPARFSGSGSGTDFTLTISSVEPEDVAVYYCLQSRTIPRTFGQGTKVEIKGGGGSGGGGSGGGGSQIQLVQSGPELKKPGGSVKISCAASGYTFTDYSINWVRQAPGKGLEWVGWINTETREPAYAYDFRGRFTFSADTSKSTAYLQMNSLRAEDTAVYYCALDYSYAMDYWGQGTLVTVSSTREQKLISEEDLAKPTTTPAPRPPTPAPTIASQPLSLRPEACRPAAGGAVHTRGLDFACDIYIWAPLAGTCGVLLLSLVITLYCKRGRKKLLYIFKQPFMRPVQTTQEEDGCSCRFPEEEEGGCELRVKFSRSADAPAYQQGQNQLYNELNLGRREEYDVLDKRRGRDPEMGGKPRRKNPQEGLYNELQKDKMAEAYSEIGMKGERRRGKGHDGLYQGLSTATKDTYDALHMQALPPR

SEQ ID NO: 20502 - protein, 502 aa, synthetic construct
MALPVTALLLPLALLLHAARPQIQLVQSGPELKKPGGSVKISCAASGYTFTDYSINWVRQAPGKGLEWVGWINTETREPAYAYDFRGRFTFSADTSKSTAYLQMNSLRAEDTAVYYCALDYSYAMDYWGQGTLVTVSSGGGGSGGGGSGGGGSDIVLTQSPSSLSASVGDRATISCRASESVTILGSHLIYWYQQKPGQAPRLLIQLASNVQTGVPARFSGSGSGTDFTLTISSVEPEDVAVYYCLQSRTIPRTFGQGTKVEIKTREQKLISEEDLAKPTTTPAPRPPTPAPTIASQPLSLRPEACRPAAGGAVHTRGLDFACDIYIWAPLAGTCGVLLLSLVITLYCKRGRKKLLYIFKQPFMRPVQTTQEEDGCSCRFPEEEEGGCELRVKFSRSADAPAYQQGQNQLYNELNLGRREEYDVLDKRRGRDPEMGGKPRRKNPQEGLYNELQKDKMAEAYSEIGMKGERRRGKGHDGLYQGLSTATKDTYDALHMQALPPR

SEQ ID NO: 20503 - protein, 915 aa, synthetic construct
MALPVTALLLPLALLLHAARPDIVLTQSPSSLSASVGDRATISCRASESVTILGSHLIYWYQQKPGQAPRLLIQLASNVQTGVPARFSGSGSGTDFTLTISSVEPEDVAVYYCLQSRTIPRTFGQGTKVEIKGGGGSGGGGSGGGGSQIQLVQSGPELKKPGGSVKISCAASGYTFTDYSINWVRQAPGKGLEWVGWINTETREPAYAYDFRGRFTFSADTSKSTAYLQMNSLRAEDTAVYYCALDYSYAMDYWGQGTLVTVSSTREQKLISEEDLAKPTTTPAPRPPTPAPTIASQPLSLRPEACRPAAGGAVHTRGLDFACDIYIWAPLAGTCGVLLLSLVITLYCGRARVKFSRSADAPAYQQGQNQLYNELNLGRREEYDVLDKRRGRDPEMGGKPRRKNPQEGLYNELQKDKMAEAYSEIGMKGERRRGKGHDGLYQGLSTATKDTYDALHMQALPPRSRGSGATNFSLLKQAGDVEENPGPGIHMATYEVLCEVARKLGTDDREVVLFLLNVFIPQPTLAQLIGALRALKEEGRLTFPLLAECLFRAGRRDLLRDLLHLDPRFLERHLAGTMSYFSPYQLTVLHVDGELCARDIRSLIFLSKDTIGSRSTPQTFLHWVYCMENLDLLGPTDVDALMSMLRSLSRVDLQRQVQTLMGLHLSGPSHSQHYRHTPLETDFYDYKDDDDKTSGSGEGRGSLLTCGDVEENPGPHMTEYKPTVRLATRDDVPRAVRTLAAAFADYPATRHTVDPDRHIERVTELQELFLTRVGLDIGKVWVADDGAAVAVWTTPESVEAGAVFAEIGPRMAELSGSRLAAQQQMEGLLAPHRPKEPAWFLATVGVSPDHQGKGLGSAVVLPGVEAAERAGVPAFLETSAPRNLPFYERLGFTVTADVEVPEGPRTWCMTRKPGA

SEQ ID NO: 20504 - protein, 855 aa, synthetic construct
MALPVTALLLPLALLLHAARPDIVLTQSPSSLSASVGDRATISCRASESVTILGSHLIYWYQQKPGQAPRLLIQLASNVQTGVPARFSGSGSGTDFTLTISSVEPEDVAVYYCLQSRTIPRTFGQGTKVEIKLEIQNPDPAVYQLRDSKSSDKSVCLFTDFDSQTNVSQSKDSDVYITDKCVLDMRSMDFKSNSAVAWSNKSDFACANAFNNSIIPEDTFFPSSDVPCDVKLVEKSFETDTNLNFQNLSVIGFRILLLKVAGFNLLMTLRLWSSRAKRSGSGVKQTLNFDLLKLAGDVESNPGPTSMDWIWRILFLVGAATGAHSFEQIQLVQSGPELKKPGGSVKISCAASGYTFTDYSINWVRQAPGKGLEWVGWINTETREPAYAYDFRGRFTFSADTSKSTAYLQMNSLRAEDTAVYYCALDYSYAMDYWGQGTLVTVSSTREDLKNVFPPEVAVFEPSKAEIAHTQKATLVCLATGFYPDHVELSWWVNGKEVHSGVCTDPQPLKEQPALNDSRYCLSSRLRVSATFWQNPRNHFRCQVQFYGLSENDEWTQDRAKPVTQIVSAEAWGRADCGITSASYHQGVLSATILYEILLGKATLYAVLVSALVLMAMVKRKDSRGRAKRSGSGATNFSLLKQAGDVEENPGPSRGHMTEYKPTVRLATRDDVPRAVRTLAAAFADYPATRHTVDPDRHIERVTELQELFLTRVGLDIGKVWVADDGAAVAVWTTPESVEAGAVFAEIGPRMAELSGSRLAAQQQMEGLLAPHRPKEPAWFLATVGVSPDHQGKGLGSAVVLPGVEAAERAGVPAFLETSAPRNLPFYERLGFTVTADVEVPEGPRTWCMTRKPGA

SEQ ID NO: 20505 - protein, 854 aa, synthetic construct
MALPVTALLLPLALLLHAARPDIVLTQSPSSLSASVGDRATISCRASESVTILGSHLIYWYQQKPGQAPRLLIQLASNVQTGVPARFSGSGSGTDFTLTISSVEPEDVAVYYCLQSRTIPRTFGQGTKVEIKLEDLKNVFPPEVAVFEPSKAEIAHTQKATLVCLATGFYPDHVELSWWVNGKEVHSGVCTDPQPLKEQPALNDSRYCLSSRLRVSATFWQNPRNHFRCQVQFYGLSENDEWTQDRAKPVTQIVSAEAWGRADCGITSASYHQGVLSATILYEILLGKATLYAVLVSALVLMAMVKRKDSRGRAKRSGSGATNFSLLKQAGDVEENPGPTSMDWIWRILFLVGAATGAHSFEQIQLVQSGPELKKPGGSVKISCAASGYTFTDYSINWVRQAPGKGLEWVGWINTETREPAYAYDFRGRFTFSADTSKSTAYLQMNSLRAEDTAVYYCALDYSYAMDYWGQGTLVTVSSTRIQNPDPAVYQLRDSKSSDKSVCLFTDFDSQTNVSQSKDSDVYITDKCVLDMRSMDFKSNSAVAWSNKSDFACANAFNNSIIPEDTFFPSSDVPCDVKLVEKSFETDTNLNFQNLSVIGFRILLLKVAGFNLLMTLRLWSSRAKRSGSGVKQTLNFDLLKLAGDVESNPGPSRGHMTEYKPTVRLATRDDVPRAVRTLAAAFADYPATRHTVDPDRHIERVTELQELFLTRVGLDIGKVWVADDGAAVAVWTTPESVEAGAVFAEIGPRMAELSGSRLAAQQQMEGLLAPHRPKEPAWFLATVGVSPDHQGKGLGSAVVLPGVEAAERAGVPAFLETSAPRNLPFYERLGFTVTADVEVPEGPRTWCMTRKPGA

SEQ ID NO: 20506 - protein, 621 aa, synthetic construct
MALPVTALLLPLALLLHAARPDIVLTQSPSSLSASVGDRATISCRASESVTILGSHLIYWYQQKPGQAPRLLIQLASNVQTGVPARFSGSGSGTDFTLTISSVEPEDVAVYYCLQSRTIPRTFGQGTKVEIKLEDLKNVFPPEVAVFEPSEAEISHTQKATLVCLATGFYPDHVELSWWVNGKEVHSGVCTDPQPLKEQPALNDSRYCLSSRLRVSATFWQNPRNHFRCQVQFYGLSENDEWTQDRAKPVTQIVSAEAWGRADCGFTSESYQQGVLSATILYEILLGKATLYAVLVSALVLMAMVKRKDSRGRAKRSGSGATNFSLLKQAGDVEENPGPTSMDWIWRILFLVGAATGAHSFEQIQLVQSGPELKKPGGSVKISCAASGYTFTDYSINWVRQAPGKGLEWVGWINTETREPAYAYDFRGRFTFSADTSKSTAYLQMNSLRAEDTAVYYCALDYSYAMDYWGQGTLVTVSSTRIQNPDPAVYQLRDSKSSDKSVCLFTDFDSQTNVSQSKDSDVYITDKCVLDMRSMDFKSNSAVAWSNKSDFACANAFNNSIIPEDTFFPSPESSCDVKLVEKSFETDTNLNFQNLSVIGFRILLLKVAGFNLLMTLRLWSS

SEQ ID NO: 20507 - protein, 846 aa, synthetic construct
MALPVTALLLPLALLLHAARPDIVLTQSPSSLSASVGDRATISCRASESVTILGSHLIYWYQQKPGQAPRLLIQLASNVQTGVPARFSGSGSGTDFTLTISSVEPEDVAVYYCLQSRTIPRTFGQGTKVEIKLEDLKNVFPPEVAVFEPSEAEISHTQKATLVCLATGFYPDHVELSWWVNGKEVHSGVCTDPQPLKEQPALNDSRYCLSSRLRVSATFWQNPRNHFRCQVQFYGLSENDEWTQDRAKPVTQIVSAEAWGRADCGFTSESYQQGVLSATILYEILLGKATLYAVLVSALVLMAMVKRKDSRGRAKRSGSGATNFSLLKQAGDVEENPGPTSMDWIWRILFLVGAATGAHSFEQIQLVQSGPELKKPGGSVKISCAASGYTFTDYSINWVRQAPGKGLEWVGWINTETREPAYAYDFRGRFTFSADTSKSTAYLQMNSLRAEDTAVYYCALDYSYAMDYWGQGTLVTVSSTRIQNPDPAVYQLRDSKSSDKSVCLFTDFDSQTNVSQSKDSDVYITDKCVLDMRSMDFKSNSAVAWSNKSDFACANAFNNSIIPEDTFFPSPESSCDVKLVEKSFETDTNLNFQNLSVIGFRILLLKVAGFNLLMTLRLWSSRAKRSGSGVKQTLNFDLLKLAGDVESNPGPSRGGIHTMATYEVLCEVARKLGTDDREVVLFLLNVFIPQPTLAQLIGALRALKEEGRLTFPLLAECLFRAGRRDLLRDLLHLDPRFLERHLAGTMSYFSPYQLTVLHVDGELCARDIRSLIFLSKDTIGSRSTPQTFLHWVYCMENLDLLGPTDVDALMSMLRSLSRVDLQRQVQTLMGLHLSGPSHSQHYRHTP

SEQ ID NO: 20508 - protein, 625 aa, synthetic construct
MALPVTALLLPLALLLHAARPDIVLTQSPSSLSASVGDRATISCRASESVTILGSHLIYWYQQKPGQAPRLLIQLASNVQTGVPARFSGSGSGTDFTLTISSVEPEDVAVYYCLQSRTIPRTFGQGTKVEIKLEIQNPDPAVYQLRDSKSSDKSVCLFTDFDSQTNVSQSKDSDVYITDKCVLDMRSMDFKSNSAVAWSNKSDFACANAFNNSIIPEDTFFPSPESSCDVKLVEKSFETDTNLNFQNLSVIGFRILLLKVAGFNLLMTLRLWSSRAKRSGSGVKQTLNFDLLKLAGDVESNPGPTSMDWIWRILFLVGAATGAHSFEQIQLVQSGPELKKPGGSVKISCAASGYTFTDYSINWVRQAPGKGLEWVGWINTETREPAYAYDFRGRFTFSADTSKSTAYLQMNSLRAEDTAVYYCALDYSYAMDYWGQGTLVTVSSTREDLKNVFPPEVAVFEPSEAEISHTQKATLVCLATGFYPDHVELSWWVNGKEVHSGVCTDPQPLKEQPALNDSRYCLSSRLRVSATFWQNPRNHFRCQVQFYGLSENDEWTQDRAKPVTQIVSAEAWGRADCGFTSESYQQGVLSATILYEILLGKATLYAVLVSALVLMAMVKRKDSRG

SEQ ID NO: 20509 - protein, 847 aa, synthetic construct
MALPVTALLLPLALLLHAARPDIVLTQSPSSLSASVGDRATISCRASESVTILGSHLIYWYQQKPGQAPRLLIQLASNVQTGVPARFSGSGSGTDFTLTISSVEPEDVAVYYCLQSRTIPRTFGQGTKVEIKLEIQNPDPAVYQLRDSKSSDKSVCLFTDFDSQTNVSQSKDSDVYITDKCVLDMRSMDFKSNSAVAWSNKSDFACANAFNNSIIPEDTFFPSPESSCDVKLVEKSFETDTNLNFQNLSVIGFRILLLKVAGFNLLMTLRLWSSRAKRSGSGVKQTLNFDLLKLAGDVESNPGPTSMDWIWRILFLVGAATGAHSFEQIQLVQSGPELKKPGGSVKISCAASGYTFTDYSINWVRQAPGKGLEWVGWINTETREPAYAYDFRGRFTFSADTSKSTAYLQMNSLRAEDTAVYYCALDYSYAMDYWGQGTLVTVSSTREDLKNVFPPEVAVFEPSEAEISHTQKATLVCLATGFYPDHVELSWWVNGKEVHSGVCTDPQPLKEQPALNDSRYCLSSRLRVSATFWQNPRNHFRCQVQFYGLSENDEWTQDRAKPVTQIVSAEAWGRADCGFTSESYQQGVLSATILYEILLGKATLYAVLVSALVLMAMVKRKDSRGRAKRSGSGATNFSLLKQAGDVEENPGPSRGGIHTMATYEVLCEVARKLGTDDREVVLFLLNVFIPQPTLAQLIGALRALKEEGRLTFPLLAECLFRAGRRDLLRDLLHLDPRFLERHLAGTMSYFSPYQLTVLHVDGELCARDIRSLIFLSKDTIGSRSTPQTFLHWVYCMENLDLLGPTDVDALMSMLRSLSRVDLQRQVQTLMGLHLSGPSHSQHYRHTP

SEQ ID NO: 20510 - protein, 899 aa, synthetic construct
MALPVTALLLPLALLLHAARPLEGKPIPNPLLGLDSTGSGEDLKNVFPPEVAVFEPSKAEIAHTQKATLVCLATGFYPDHVELSWWVNGKEVHSGVCTDPQPLKEQPALNDSRYCLSSRLRVSATFWQNPRNHFRCQVQFYGLSENDEWTQDRAKPVTQIVSAEAWGRADCGITSASYHQGVLSATILYEILLGKATLYAVLVSALVLMAMVKRKDSRGRAKRSGSGATNFSLLKQAGDVEENPGPTSMALPVTALLLPLALLLHAARPDIVLTQSPSSLSASVGDRATISCRASESVTILGSHLIYWYQQKPGQAPRLLIQLASNVQTGVPARFSGSGSGTDFTLTISSVEPEDVAVYYCLQSRTIPRTFGQGTKVEIKGGGGSGGGGSGGGGSQIQLVQSGPELKKPGGSVKISCAASGYTFTDYSINWVRQAPGKGLEWVGWINTETREPAYAYDFRGRFTFSADTSKSTAYLQMNSLRAEDTAVYYCALDYSYAMDYWGQGTLVTVSSTREQKLISEEDGSGIQNPDPAVYQLRDSKSSDKSVCLFTDFDSQTNVSQSKDSDVYITDKCVLDMRSMDFKSNSAVAWSNKSDFACANAFNNSIIPEDTFFPSSDVPCDVKLVEKSFETDTNLNFQNLSVIGFRILLLKVAGFNLLMTLRLWSSRAKRSGSGVKQTLNFDLLKLAGDVESNPGPSRGHMTEYKPTVRLATRDDVPRAVRTLAAAFADYPATRHTVDPDRHIERVTELQELFLTRVGLDIGKVWVADDGAAVAVWTTPESVEAGAVFAEIGPRMAELSGSRLAAQQQMEGLLAPHRPKEPAWFLATVGVSPDHQGKGLGSAVVLPGVEAAERAGVPAFLETSAPRNLPFYERLGFTVTADVEVPEGPRTWCMTRKPGA

SEQ ID NO: 20511 - protein, 900 aa, synthetic construct
MALPVTALLLPLALLLHAARPLEQKLISEEDLGSGDRPDPAVYQLRDSKSSDKSVCLFTDFDSQTNVSQSKDSDVYITDKCVLDMRSMDFKSNSAVAWSNKSDFACANAFNNSIIPEDTFFPSPESSCDVKLVEKSFETDTNLNFQNLSVIGFRILLLKVAGFNLLMTLRLWSSSSRAKRSGSGVKQTLNFDLLKLAGDVESNPGPTSMALPVTALLLPLALLLHAARPDIVLTQSPSSLSASVGDRATISCRASESVTILGSHLIYWYQQKPGQAPRLLIQLASNVQTGVPARFSGSGSGTDFTLTISSVEPEDVAVYYCLQSRTIPRTFGQGTKVEIKGGGGSGGGGSGGGGSQIQLVQSGPELKKPGGSVKISCAASGYTFTDYSINWVRQAPGKGLEWVGWINTETREPAYAYDFRGRFTFSADTSKSTAYLQMNSLRAEDTAVYYCALDYSYAMDYWGQGTLVTVSSTRGKPIPNPLLGLDSTGSGEDLKNVFPPEVAVFEPSEAEISHTQKATLVCLATGFYPDHVELSWWVNGKEVHSGVCTDPQPLKEQPALNDSRYCLSSRLRVSATFWQNPRNHFRCQVQFYGLSENDEWTQDRAKPVTQIVSAEAWGRADCGFTSESYQQGVLSATILYEILLGKATLYAVLVSALVLMAMVKRKDSRGRAKRSGSGATNFSLLKQAGDVEENPGPSRGHMTEYKPTVRLATRDDVPRAVRTLAAAFADYPATRHTVDPDRHIERVTELQELFLTRVGLDIGKVWVADDGAAVAVWTTPESVEAGAVFAEIGPRMAELSGSRLAAQQQMEGLLAPHRPKEPAWFLATVGVSPDHQGKGLGSAVVLPGVEAAERAGVPAFLETSAPRNLPFYERLGFTVTADVEVPEGPRTWCMTRKPGA

SEQ ID NO: 20512 - protein, 854 aa, synthetic construct
MALPVTALLLPLALLLHAARPDIVLTQSPSSLSASVGDRATISCRASESVTILGSHLIYWYQQKPGQAPRLLIQLASNVQTGVPARFSGSGSGTDFTLTISSVEPEDVAVYYCLQSRTIPRTFGQGTKVEIKLEDLKNVFPPEVAVFEPSEAEISHTQKATLVCLATGFYPDHVELSWWVNGKEVHSGVSTDPQPLKEQPALNDSRYCLSSRLRVSATFWQNPRNHFRCQVQFYGLSENDEWTQDRAKPVTQIVSAEAWGRADCGFTSESYQQGVLSATILYEILLGKATLYAVLVSALVLMAMVKRKDSRGRAKRSGSGATNFSLLKQAGDVEENPGPTSMDWIWRILFLVGAATGAHSFEQIQLVQSGPELKKPGGSVKISCAASGYTFTDYSINWVRQAPGKGLEWVGWINTETREPAYAYDFRGRFTFSADTSKSTAYLQMNSLRAEDTAVYYCALDYSYAMDYWGQGTLVTVSSTRIQNPDPAVYQLRDSKSSDKSVCLFTDFDSQTNVSQSKDSDVYITDKTVLDMRSMDFKSNSAVAWSNKSDFACANAFNNSIIPEDTFFPSPESSCDVKLVEKSFETDTNLNFQNLSVIGFRILLLKVAGFNLLMTLRLWSSRAKRSGSGVKQTLNFDLLKLAGDVESNPGPSRGHMTEYKPTVRLATRDDVPRAVRTLAAAFADYPATRHTVDPDRHIERVTELQELFLTRVGLDIGKVWVADDGAAVAVWTTPESVEAGAVFAEIGPRMAELSGSRLAAQQQMEGLLAPHRPKEPAWFLATVGVSPDHQGKGLGSAVVLPGVEAAERAGVPAFLETSAPRNLPFYERLGFTVTADVEVPEGPRTWCMTRKPGA

SEQ ID NO: 20513 - protein, 936 aa, synthetic construct
MALPVTALLLPLALLLHAARPDIVLTQSPSSLSASVGDRATISCRASESVTILGSHLIYWYQQKPGQAPRLLIQLASNVQTGVPARFSGSGSGTDFTLTISSVEPEDVAVYYCLQSRTIPRTFGQGTKVEIKLEDLKNVFPPEVAVFEPSEAEISHTQKATLVCLATGFYPDHVELSWWVNGKEVHSGVSTDPQPLKEQPALNDSRYCLSSRLRVSATFWQNPRNHFRCQVQFYGLSENDEWTQDRAKPVTQIVSAEAWGRADCGFTSESYQQGVLSATILYEILLGKATLYAVLVSALVLMAMVKRKDSRGRAKRSGSGATNFSLLKQAGDVEENPGPTSMDWIWRILFLVGAATGAHSFEQIQLVQSGPELKKPGGSVKISCAASGYTFTDYSINWVRQAPGKGLEWVGWINTETREPAYAYDFRGRFTFSADTSKSTAYLQMNSLRAEDTAVYYCALDYSYAMDYWGQGTLVTVSSTREQKLISEEDGSGTPFPSLAPPIMLLVDGKQQMVVVCLVLDVAPPGLDSPIWFSAGNGSALDAFTYGPSPATDGTWTNLAHLSLPSEELASWEPLVCHTGPGAEGHSRSTQPMHLSGEASTARTCPQEPLRGTPGGALWLGVLRLLLFKLLLFDLLLTCSCLCDPAGPLPSPATTTRLRALGSHRLHPATETGGREATSSPRPQPRDRRWGDTPPGRKPGSPVRAKRSGSGVKQTLNFDLLKLAGDVESNPGPSRGHMTEYKPTVRLATRDDVPRAVRTLAAAFADYPATRHTVDPDRHIERVTELQELFLTRVGLDIGKVWVADDGAAVAVWTTPESVEAGAVFAEIGPRMAELSGSRLAAQQQMEGLLAPHRPKEPAWFLATVGVSPDHQGKGLGSAVVLPGVEAAERAGVPAFLETSAPRNLPFYERLGFTVTADVEVPEGPRTWCMTRKPGA

SEQ ID NO: 20514 - protein, 954 aa, synthetic construct
MALPVTALLLPLALLLHAARPLEDLKNVFPPEVAVFEPSEAEISHTQKATLVCLATGFYPDHVELSWWVNGKEVHSGVSTDPQPLKEQPALNDSRYCLSSRLRVSATFWQNPRNHFRCQVQFYGLSENDEWTQDRAKPVTQIVSAEAWGRADCGFTSESYQQGVLSATILYEILLGKATLYAVLVSALVLMAMVKRKDSRGRAKRSGSGATNFSLLKQAGDVEENPGPTSMALPVTALLLPLALLLHAARPDIVLTQSPSSLSASVGDRATISCRASESVTILGSHLIYWYQQKPGQAPRLLIQLASNVQTGVPARFSGSGSGTDFTLTISSVEPEDVAVYYCLQSRTIPRTFGQGTKVEIKGGGGSGGGGSGGGGSQIQLVQSGPELKKPGGSVKISCAASGYTFTDYSINWVRQAPGKGLEWVGWINTETREPAYAYDFRGRFTFSADTSKSTAYLQMNSLRAEDTAVYYCALDYSYAMDYWGQGTLVTVSSTREQKLISEEDLGSGTPFPSLAPPIMLLVDGKQQMVVVCLVLDVAPPGLDSPIWFSAGNGSALDAFTYGPSPATDGTWTNLAHLSLPSEELASWEPLVCHTGPGAEGHSRSTQPMHLSGEASTARTCPQEPLRGTPGGALWLGVLRLLLFKLLLFDLLLTCSCLCDPAGPLPSPATTTRLRALGSHRLHPATETGGREATSSPRPQPRDRRWGDTPPGRKPGSPVRAKRSGSGVKQTLNFDLLKLAGDVESNPGPSRSRGHMTEYKPTVRLATRDDVPRAVRTLAAAFADYPATRHTVDPDRHIERVTELQELFLTRVGLDIGKVWVADDGAAVAVWTTPESVEAGAVFAEIGPRMAELSGSRLAAQQQMEGLLAPHRPKEPAWFLATVGVSPDHQGKGLGSAVVLPGVEAAERAGVPAFLETSAPRNLPFYERLGFTVTADVEVPEGPRTWCMTRKPGA

SEQ ID NO: 20515 - protein, 891 aa, synthetic construct
MALPVTALLLPLALLLHAARPDIVLTQSPSSLSASVGDRATISCRASESVTILGSHLIYWYQQKPGQAPRLLIQLASNVQTGVPARFSGSGSGTDFTLTISSVEPEDVAVYYCLQSRTIPRTFGQGTKVEIKLEGKPIPNPLLGLDSTGSGDKQLDADVSPKPTIFLPSIAETKLQKAGTYLCLLEKFFPDVIKIHWQEKKSNTILGSQEGNTMKTNDTYMKFSWLTVPEKSLDKEHRCIVRHENNKNGVDQEIIFPPIKTDVITMDPKDNCSKDANDTLLLQLTNTSAYYMYLLLLLKSVVYFAIITCCLLRRTAFCCNGEKSRAKRSGSGATNFSLLKQAGDVEENPGPTSMDWIWRILFLVGAATGAHSFEQIQLVQSGPELKKPGGSVKISCAASGYTFTDYSINWVRQAPGKGLEWVGWINTETREPAYAYDFRGRFTFSADTSKSTAYLQMNSLRAEDTAVYYCALDYSYAMDYWGQGTLVTVSSTREQKLISEEDGSGSQPHTKPSVFVMKNGTNVACLVKEFYPKDIRINLVSSKKITEFDPAIVISPSGKYNAVKLGKYEDSNSVTCSVQHDNKTVHSTDFEVKTDSTDHVKPKETENTKQPSKSCHKPKAIVHTEKVNMMSLTVLGLRMLFAKTVAVNFLLTAKLFFLRAKRSGSGVKQTLNFDLLKLAGDVESNPGPSRGHMTEYKPTVRLATRDDVPRAVRTLAAAFADYPATRHTVDPDRHIERVTELQELFLTRVGLDIGKVWVADDGAAVAVWTTPESVEAGAVFAEIGPRMAELSGSRLAAQQQMEGLLAPHRPKEPAWFLATVGVSPDHQGKGLGSAVVLPGVEAAERAGVPAFLETSAPRNLPFYERLGFTVTADVEVPEGPRTWCMTRKPGA

SEQ ID NO: 20516 - protein, 629 aa, synthetic construct
MALPVTALLLPLALLLHAARPDIVLTQSPSSLSASVGDRATISCRASESVTILGSHLIYWYQQKPGQAPRLLIQLASNVQTGVPARFSGSGSGTDFTLTISSVEPEDVAVYYCLQSRTIPRTFGQGTKVEIKLESQPHTKPSVFVMKNGTNVACLVKEFYPKDIRINLVSSKKITEFDPAIVISPSGKYNAVKLGKYEDSNSVTCSVQHDNKTVHSTDFEVKTDSTDHVKPKETENTKQPSKSCHKPKAIVHTEKVNMMSLTVLGLRMLFAKTVAVNFLLTAKLFFLRAKRSGSGATNFSLLKQAGDVEENPGPTSMDWIWRILFLVGAATGAHSFEQIQLVQSGPELKKPGGSVKISCAASGYTFTDYSINWVRQAPGKGLEWVGWINTETREPAYAYDFRGRFTFSADTSKSTAYLQMNSLRAEDTAVYYCALDYSYAMDYWGQGTLVTVSSTRDKQLDADVSPKPTIFLPSIAETKLQKAGTYLCLLEKFFPDVIKIHWQEKKSNTILGSQEGNTMKTNDTYMKFSWLTVPEKSLDKEHRCIVRHENNKNGVDQEIIFPPIKTDVITMDPKDNCSKDANDTLLLQLTNTSAYYMYLLLLLKSVVYFAIITCCLLRRTAFCCNGEKS

SEQ ID NO: 20517 - protein, 906 aa, synthetic construct
MALPVTALLLPLALLLHAARPLEGKPIPNPLLGLDSTGSGDKQLDADVSPKPTIFLPSIAETKLQKAGTYLCLLEKFFPDVIKIHWQEKKSNTILGSQEGNTMKTNDTYMKFSWLTVPEKSLDKEHRCIVRHENNKNGVDQEIIFPPIKTDVITMDPKDNCSKDANDTLLLQLTNTSAYYMYLLLLLKSVVYFAIITCCLLRRTAFCCNGEKSRAKRSGSGATNFSLLKQAGDVEENPGPTSMALPVTALLLPLALLLHAARPDIVLTQSPSSLSASVGDRATISCRASESVTILGSHLIYWYQQKPGQAPRLLIQLASNVQTGVPARFSGSGSGTDFTLTISSVEPEDVAVYYCLQSRTIPRTFGQGTKVEIKGGGGSGGGGSGGGGSQIQLVQSGPELKKPGGSVKISCAASGYTFTDYSINWVRQAPGKGLEWVGWINTETREPAYAYDFRGRFTFSADTSKSTAYLQMNSLRAEDTAVYYCALDYSYAMDYWGQGTLVTVSSTREQKLISEEDGSGSQPHTKPSVFVMKNGTNVACLVKEFYPKDIRINLVSSKKITEFDPAIVISPSGKYNAVKLGKYEDSNSVTCSVQHDNKTVHSTDFEVKTDSTDHVKPKETENTKQPSKSCHKPKAIVHTEKVNMMSLTVLGLRMLFAKTVAVNFLLTAKLFFLRAKRSGSGVKQTLNFDLLKLAGDVESNPGPSRGHMTEYKPTVRLATRDDVPRAVRTLAAAFADYPATRHTVDPDRHIERVTELQELFLTRVGLDIGKVWVADDGAAVAVWTTPESVEAGAVFAEIGPRMAELSGSRLAAQQQMEGLLAPHRPKEPAWFLATVGVSPDHQGKGLGSAVVLPGVEAAERAGVPAFLETSAPRNLPFYERLGFTVTADVEVPEGPRTWCMTRKPGA

SEQ ID NO: 20518 - protein, 1031 aa, synthetic construct
MALPVTALLLPLALLLHAARPDIVLTQSPSSLSASVGDRATISCRASESVTILGSHLIYWYQQKPGQAPRLLIQLASNVQTGVPARFSGSGSGTDFTLTISSVEPEDVAVYYCLQSRTIPRTFGQGTKVEIKGQPKANPTVTLFPPSSEELQANKATLVCLISDFYPGAVTVAWKADGSPVKAGVETTKPSKQSNNKYAASSYLSLTPEQWKSHRSYSCQVTHEGSTVEKTVAPTECSGSQSFGLLDPKLCYLLDGILFIYGVILTALFLRVKFSRSADAPAYQQGQNQLYNELNLGRREEYDVLDKRRGRDPEMGGKPQRRKNPQEGLYNELQKDKMAEAYSEIGMKGERRRGKGHDGLYQGLSTATKDTYDALHMQALPPRRAKRSGSGATNFSLLKQAGDVEENPGPTSMDWIWRILFLVGAATGAHSFEQIQLVQSGPELKKPGGSVKISCAASGYTFTDYSINWVRQAPGKGLEWVGWINTETREPAYAYDFRGRFTFSADTSKSTAYLQMNSLRAEDTAVYYCALDYSYAMDYWGQGTLVTVSSASTKGPSVFPLAPSSKSTSGGTAALGCLVKDYFPEPVTVSWNSGALTSGVHTFPAVLQSSGLYSLSSVVTVPSSSLGTQTYICNVNHKPSNTKVDKRVEPKSCGTQSFGLLDPKLCYLLDGILFIYGVILTALFLRVKFSRSADAPAYQQGQNQLYNELNLGRREEYDVLDKRRGRDPEMGGKPQRRKNPQEGLYNELQKDKMAEAYSEIGMKGERRRGKGHDGLYQGLSTATKDTYDALHMQALPPRRAKRSGSGVKQTLNFDLLKLAGDVESNPGPSRGHMTEYKPTVRLATRDDVPRAVRTLAAAFADYPATRHTVDPDRHIERVTELQELFLTRVGLDIGKVWVADDGAAVAVWTTPESVEAGAVFAEIGPRMAELSGSRLAAQQQMEGLLAPHRPKEPAWFLATVGVSPDHQGKGLGSAVVLPGVEAAERAGVPAFLETSAPRNLPFYERLGFTVTADVEVPEGPRTWCMTRKPGA

SEQ ID NO: 20519 - protein, 817 aa, synthetic construct
MALPVTALLLPLALLLHAARPDIVLTQSPSSLSASVGDRATISCRASESVTILGSHLIYWYQQKPGQAPRLLIQLASNVQTGVPARFSGSGSGTDFTLTISSVEPEDVAVYYCLQSRTIPRTFGQGTKVEIKLEDLKNVFPPEVAVFEPSEAEISHTQKATLVCLATGFYPDHVELSWWVNGKEVHSGVSTDPQPLKEQPALNDSRYCLSSRLRVSATFWQNPRNHFRCQVQFYGLSENDEWTQDRAKPVTQIVSAEAWGRADCGSQSFGLLDPKLCYLLDGILFIYGVILTALFLRVKFSRSADAPAYQQGQNQLYNELNLGRREEYDVLDKRRGRDPEMGGKPQRRKNPQEGLYNELQKDKMAEAYSEIGMKGERRRGKGHDGLYQGLSTATKDTYDALHMQALPPRRAKRSGSGATNFSLLKQAGDVEENPGPTSMDWIWRILFLVGAATGAHSFEQIQLVQSGPELKKPGGSVKISCAASGYTFTDYSINWVRQAPGKGLEWVGWINTETREPAYAYDFRGRFTFSADTSKSTAYLQMNSLRAEDTAVYYCALDYSYAMDYWGQGTLVTVSSTRIQNPDPAVYQLRDSKSSDKSVCLFTDFDSQTNVSQSKDSDVYITDKTVLDMRSMDFKSNSAVAWSNKSDFACANAFNNSIIPEDTFFPSPESSCGTQSFGLLDPKLCYLLDGILFIYGVILTALFLRVKFSRSADAPAYQQGQNQLYNELNLGRREEYDVLDKRRGRDPEMGGKPQRRKNPQEGLYNELQKDKMAEAYSEIGMKGERRRGKGHDGLYQGLSTATKDTYDALHMQALPPR

SEQ ID NO: 20520 - protein, 817 aa, synthetic construct
MALPVTALLLPLALLLHAARPDIVLTQSPSSLSASVGDRATISCRASESVTILGSHLIYWYQQKPGQAPRLLIQLASNVQTGVPARFSGSGSGTDFTLTISSVEPEDVAVYYCLQSRTIPRTFGQGTKVEIKLEDLKNVFPPEVAVFEPSKAEIAHTQKATLVCLATGFYPDHVELSWWVNGKEVHSGVCTDPQPLKEQPALNDSRYCLSSRLRVSATFWQNPRNHFRCQVQFYGLSENDEWTQDRAKPVTQIVSAEAWGRADCGSQSFGLLDPKLCYLLDGILFIYGVILTALFLRVKFSRSADAPAYQQGQNQLYNELNLGRREEYDVLDKRRGRDPEMGGKPQRRKNPQEGLYNELQKDKMAEAYSEIGMKGERRRGKGHDGLYQGLSTATKDTYDALHMQALPPRRAKRSGSGATNFSLLKQAGDVEENPGPTSMDWIWRILFLVGAATGAHSFEQIQLVQSGPELKKPGGSVKISCAASGYTFTDYSINWVRQAPGKGLEWVGWINTETREPAYAYDFRGRFTFSADTSKSTAYLQMNSLRAEDTAVYYCALDYSYAMDYWGQGTLVTVSSTRIQNPDPAVYQLRDSKSSDKSVCLFTDFDSQTNVSQSKDSDVYITDKCVLDMRSMDFKSNSAVAWSNKSDFACANAFNNSIIPEDTFFPSSDVPCGTQSFGLLDPKLCYLLDGILFIYGVILTALFLRVKFSRSADAPAYQQGQNQLYNELNLGRREEYDVLDKRRGRDPEMGGKPQRRKNPQEGLYNELQKDKMAEAYSEIGMKGERRRGKGHDGLYQGLSTATKDTYDALHMQALPPR

SEQ ID NO: 20521 - protein, 888 aa, synthetic construct
MALPVTALLLPLALLLHAARPDIVLTQSPSSLSASVGDRATISCRASESVTILGSHLIYWYQQKPGQAPRLLIQLASNVQTGVPARFSGSGSGTDFTLTISSVEPEDVAVYYCLQSRTIPRTFGQGTKVEIKLEGKPIPNPLLGLDSTGSGEDLKNVFPPEVAVFEPSEAEISHTQKATLVCLATGFYPDHVELSWWVNGKEVHSGVSTDPQPLKEQPALNDSRYCLSSRLRVSATFWQNPRNHFRCQVQFYGLSENDEWTQDRAKPVTQIVSAEAWGRADCGSQSFGLLDPKLCYLLDGILFIYGVILTALFLRVKFSRSADAPAYQQGQNQLYNELNLGRREEYDVLDKRRGRDPEMGGKPQRRKNPQEGLYNELQKDKMAEAYSEIGMKGERRRGKGHDGLYQGLSTATKDTYDALHMQALPPRRAKRSGSGATNFSLLKQAGDVEENPGPTSMDWIWRILFLVGAATGAHSFEQIQLVQSGPELKKPGGSVKISCAASGYTFTDYSINWVRQAPGKGLEWVGWINTETREPAYAYDFRGRFTFSADTSKSTAYLQMNSLRAEDTAVYYCALDYSYAMDYWGQGTLVTVSSTREQKLISEEDGSGIQNPDPAVYQLRDSKSSDKSVCLFTDFDSQTNVSQSKDSDVYITDKTVLDMRSMDFKSNSAVAWSNKSDFACANAFNNSIIPEDTFFPSPESSCGTQSFGLLDPKLCYLLDGILFIYGVILTALFLRSKRSRLLHSDYMNMTPRRPGPTRKHYQPYAPPRDFAAYRSRVKFSRSADAPAYQQGQNQLYNELNLGRREEYDVLDKRRGRDPEMGGKPQRRKNPQEGLYNELQKDKMAEAYSEIGMKGERRRGKGHDGLYQGLSTATKDTYDALHMQALPPR

SEQ ID NO: 20522 - protein, 929 aa, synthetic construct
MALPVTALLLPLALLLHAARPDIVLTQSPSSLSASVGDRATISCRASESVTILGSHLIYWYQQKPGQAPRLLIQLASNVQTGVPARFSGSGSGTDFTLTISSVEPEDVAVYYCLQSRTIPRTFGQGTKVEIKLEGKPIPNPLLGLDSTGSGEDLKNVFPPEVAVFEPSEAEISHTQKATLVCLATGFYPDHVELSWWVNGKEVHSGVSTDPQPLKEQPALNDSRYCLSSRLRVSATFWQNPRNHFRCQVQFYGLSENDEWTQDRAKPVTQIVSAEAWGRADCGSQSFGLLDPKLCYLLDGILFIYGVILTALFLRSKRSRLLHSDYMNMTPRRPGPTRKHYQPYAPPRDFAAYRSRVKFSRSADAPAYQQGQNQLYNELNLGRREEYDVLDKRRGRDPEMGGKPQRRKNPQEGLYNELQKDKMAEAYSEIGMKGERRRGKGHDGLYQGLSTATKDTYDALHMQALPPRRAKRSGSGATNFSLLKQAGDVEENPGPTSMDWIWRILFLVGAATGAHSFEQIQLVQSGPELKKPGGSVKISCAASGYTFTDYSINWVRQAPGKGLEWVGWINTETREPAYAYDFRGRFTFSADTSKSTAYLQMNSLRAEDTAVYYCALDYSYAMDYWGQGTLVTVSSTREQKLISEEDGSGIQNPDPAVYQLRDSKSSDKSVCLFTDFDSQTNVSQSKDSDVYITDKTVLDMRSMDFKSNSAVAWSNKSDFACANAFNNSIIPEDTFFPSPESSCGTQSFGLLDPKLCYLLDGILFIYGVILTALFLRSKRSRLLHSDYMNMTPRRPGPTRKHYQPYAPPRDFAAYRSRVKFSRSADAPAYQQGQNQLYNELNLGRREEYDVLDKRRGRDPEMGGKPQRRKNPQEGLYNELQKDKMAEAYSEIGMKGERRRGKGHDGLYQGLSTATKDTYDALHMQALPPR

SEQ ID NO: 20523 - protein, 890 aa, synthetic construct
MALPVTALLLPLALLLHAARPDIVLTQSPSSLSASVGDRATISCRASESVTILGSHLIYWYQQKPGQAPRLLIQLASNVQTGVPARFSGSGSGTDFTLTISSVEPEDVAVYYCLQSRTIPRTFGQGTKVEIKLEGKPIPNPLLGLDSTGSGEDLKNVFPPEVAVFEPSEAEISHTQKATLVCLATGFYPDHVELSWWVNGKEVHSGVSTDPQPLKEQPALNDSRYCLSSRLRVSATFWQNPRNHFRCQVQFYGLSENDEWTQDRAKPVTQIVSAEAWGRADCGSQSFGLLDPKLCYLLDGILFIYGVILTALFLRVKFSRSADAPAYQQGQNQLYNELNLGRREEYDVLDKRRGRDPEMGGKPQRRKNPQEGLYNELQKDKMAEAYSEIGMKGERRRGKGHDGLYQGLSTATKDTYDALHMQALPPRRAKRSGSGATNFSLLKQAGDVEENPGPTSMDWIWRILFLVGAATGAHSFEQIQLVQSGPELKKPGGSVKISCAASGYTFTDYSINWVRQAPGKGLEWVGWINTETREPAYAYDFRGRFTFSADTSKSTAYLQMNSLRAEDTAVYYCALDYSYAMDYWGQGTLVTVSSTREQKLISEEDLGSGIQNPDPAVYQLRDSKSSDKSVCLFTDFDSQTNVSQSKDSDVYITDKTVLDMRSMDFKSNSAVAWSNKSDFACANAFNNSIIPEDTFFPSPESSCGTQSFGLLDPKLCYLLDGILFIYGVILTALFLKRGRKKLLYIFKQPFMRPVQTTQEEDGCSCRFPEEEEGGCELRVKFSRSADAPAYQQGQNQLYNELNLGRREEYDVLDKRRGRDPEMGGKPQRRKNPQEGLYNELQKDKMAEAYSEIGMKGERRRGKGHDGLYQGLSTATKDTYDALHMQALPPR

SEQ ID NO: 20524 - protein, 932 aa, synthetic construct
MALPVTALLLPLALLLHAARPDIVLTQSPSSLSASVGDRATISCRASESVTILGSHLIYWYQQKPGQAPRLLIQLASNVQTGVPARFSGSGSGTDFTLTISSVEPEDVAVYYCLQSRTIPRTFGQGTKVEIKLEGKPIPNPLLGLDSTGSGEDLKNVFPPEVAVFEPSEAEISHTQKATLVCLATGFYPDHVELSWWVNGKEVHSGVSTDPQPLKEQPALNDSRYCLSSRLRVSATFWQNPRNHFRCQVQFYGLSENDEWTQDRAKPVTQIVSAEAWGRADCGSQSFGLLDPKLCYLLDGILFIYGVILTALFLKRGRKKLLYIFKQPFMRPVQTTQEEDGCSCRFPEEEEGGCELRVKFSRSADAPAYQQGQNQLYNELNLGRREEYDVLDKRRGRDPEMGGKPQRRKNPQEGLYNELQKDKMAEAYSEIGMKGERRRGKGHDGLYQGLSTATKDTYDALHMQALPPRRAKRSGSGATNFSLLKQAGDVEENPGPTSMDWIWRILFLVGAATGAHSFEQIQLVQSGPELKKPGGSVKISCAASGYTFTDYSINWVRQAPGKGLEWVGWINTETREPAYAYDFRGRFTFSADTSKSTAYLQMNSLRAEDTAVYYCALDYSYAMDYWGQGTLVTVSSTREQKLISEEDLGSGIQNPDPAVYQLRDSKSSDKSVCLFTDFDSQTNVSQSKDSDVYITDKTVLDMRSMDFKSNSAVAWSNKSDFACANAFNNSIIPEDTFFPSPESSCGTQSFGLLDPKLCYLLDGILFIYGVILTALFLKRGRKKLLYIFKQPFMRPVQTTQEEDGCSCRFPEEEEGGCELRVKFSRSADAPAYQQGQNQLYNELNLGRREEYDVLDKRRGRDPEMGGKPQRRKNPQEGLYNELQKDKMAEAYSEIGMKGERRRGKGHDGLYQGLSTATKDTYDALHMQALPPR

SEQ ID NO: 20525 - protein, 822 aa, synthetic construct
MALPVTALLLPLALLLHAARPDIVLTQSPSSLSASVGDRATISCRASESVTILGSHLIYWYQQKPGQAPRLLIQLASNVQTGVPARFSGSGSGTDFTLTISSVEPEDVAVYYCLQSRTIPRTFGQGTKVEIKLEQSFGLLDPKLCYLLDGILFIYGVILTALFLRVKFSRSADAPAYQQGQNQLYNELNLGRREEYDVLDKRRGRDPEMGGKPQRRKNPQEGLYNELQKDKMAEAYSEIGMKGERRRGKGHDGLYQGLSTATKDTYDALHMQALPPRRAKRSGSGATNFSLLKQAGDVEENPGPTSMDWIWRILFLVGAATGAHSFEQIQLVQSGPELKKPGGSVKISCAASGYTFTDYSINWVRQAPGKGLEWVGWINTETREPAYAYDFRGRFTFSADTSKSTAYLQMNSLRAEDTAVYYCALDYSYAMDYWGQGTLVTVSSTRQSFGLLDPKLCYLLDGILFIYGVILTALFLRVKFSRSADAPAYQQGQNQLYNELNLGRREEYDVLDKRRGRDPEMGGKPQRRKNPQEGLYNELQKDKMAEAYSEIGMKGERRRGKGHDGLYQGLSTATKDTYDALHMQALPPRRAKRSGSGVKQTLNFDLLKLAGDVESNPGPSRGHMTEYKPTVRLATRDDVPRAVRTLAAAFADYPATRHTVDPDRHIERVTELQELFLTRVGLDIGKVWVADDGAAVAVWTTPESVEAGAVFAEIGPRMAELSGSRLAAQQQMEGLLAPHRPKEPAWFLATVGVSPDHQGKGLGSAVVLPGVEAAERAGVPAFLETSAPRNLPFYERLGFTVTADVEVPEGPRTWCMTRKPGA

SEQ ID NO: 20526 - protein, 647 aa, synthetic construct
MALPVTALLLPLALLLHAARPDIVLTQSPSSLSASVGDRATISCRASESVTILGSHLIYWYQQKPGQAPRLLIQLASNVQTGVPARFSGSGSGTDFTLTISSVEPEDVAVYYCLQSRTIPRTFGQGTKVEIKLEGQPKANPTVTLFPPSSEELQANKATLVCLISDFYPGAVTVAWKADGSPVKAGVETTKPSKQSNNKYAASSYLSLTPEQWKSHRSYSCQVTHEGSTVEKTVAPTECSPIKTDVITMDPKDNCSKDANDTLLLQLTNTSAYYMYLLLLLKSVVYFAIITCCLLRRTAFCCNGEKSRAKRSGSGATNFSLLKQAGDVEENPGPTSMDWIWRILFLVGAATGAHSFEQIQLVQSGPELKKPGGSVKISCAASGYTFTDYSINWVRQAPGKGLEWVGWINTETREPAYAYDFRGRFTFSADTSKSTAYLQMNSLRAEDTAVYYCALDYSYAMDYWGQGTLVTVSSTRASTKGPSVFPLAPSSKSTSGGTAALGCLVKDYFPEPVTVSWNSGALTSGVHTFPAVLQSSGLYSLSSVVTVPSSSLGTQTYICNVNHKPSNTKVDKRVEPKSCEVKTDSTDHVKPKETENTKQPSKSCHKPKAIVHTEKVNMMSLTVLGLRMLFAKTVAVNFLLTAKLFFL

SEQ ID NO: 20527 - protein, 625 aa, synthetic construct
MALPVTALLLPLALLLHAARPDIVLTQSPSSLSASVGDRATISCRASESVTILGSHLIYWYQQKPGQAPRLLIQLASNVQTGVPARFSGSGSGTDFTLTISSVEPEDVAVYYCLQSRTIPRTFGQGTKVEIKLEGQPKANPTVTLFPPSSEELQANKATLVCLISDFYPGAVTVAWKADGSPVKAGVETTKPSKQSNNKYAASSYLSLTPEQWKSHRSYSCQVTHEGSTVEKTVAPTECSGRADCGITSASYHQGVLSATILYEILLGKATLYAVLVSALVLMAMVKRKDSRGRAKRSGSGATNFSLLKQAGDVEENPGPTSMDWIWRILFLVGAATGAHSFEQIQLVQSGPELKKPGGSVKISCAASGYTFTDYSINWVRQAPGKGLEWVGWINTETREPAYAYDFRGRFTFSADTSKSTAYLQMNSLRAEDTAVYYCALDYSYAMDYWGQGTLVTVSSTRASTKGPSVFPLAPSSKSTSGGTAALGCLVKDYFPEPVTVSWNSGALTSGVHTFPAVLQSSGLYSLSSVVTVPSSSLGTQTYICNVNHKPSNTKVDKRVEPKSCIPEDTFFPSSDVPCDVKLVEKSFETDTNLNFQNLSVIGFRILLLKVAGFNLLMTLRLWSS

SEQ ID NO: 20528 - protein, 625 aa, synthetic construct
MALPVTALLLPLALLLHAARPDIVLTQSPSSLSASVGDRATISCRASESVTILGSHLIYWYQQKPGQAPRLLIQLASNVQTGVPARFSGSGSGTDFTLTISSVEPEDVAVYYCLQSRTIPRTFGQGTKVEIKLEGQPKANPTVTLFPPSSEELQANKATLVCLISDFYPGAVTVAWKADGSPVKAGVETTKPSKQSNNKYAASSYLSLTPEQWKSHRSYSCQVTHEGSTVEKTVAPTECSGRADCGFTSESYQQGVLSATILYEILLGKATLYAVLVSALVLMAMVKRKDSRGRAKRSGSGATNFSLLKQAGDVEENPGPTSMDWIWRILFLVGAATGAHSFEQIQLVQSGPELKKPGGSVKISCAASGYTFTDYSINWVRQAPGKGLEWVGWINTETREPAYAYDFRGRFTFSADTSKSTAYLQMNSLRAEDTAVYYCALDYSYAMDYWGQGTLVTVSSTRASTKGPSVFPLAPSSKSTSGGTAALGCLVKDYFPEPVTVSWNSGALTSGVHTFPAVLQSSGLYSLSSVVTVPSSSLGTQTYICNVNHKPSNTKVDKRVEPKSCIPEDTFFPSPESSCDVKLVEKSFETDTNLNFQNLSVIGFRILLLKVAGFNLLMTLRLWSS

SEQ ID NO: 20529 - protein, 451 aa, synthetic construct
MALPVTALLLPLALLLHAARPDIVLTQSPSSLSASVGDRATISCRASESVTILGSHLIYWYQQKPGQAPRLLIQLASNVQTGVPARFSGSGSGTDFTLTISSVEPEDVAVYYCLQSRTIPRTFGQGTKVEIKGGGGSGGGGSGGGGSQIQLVQSGPELKKPGGSVKISCAASGYTFTDYSINWVRQAPGKGLEWVGWINTETREPAYAYDFRGRFTFSADTSKSTAYLQMNSLRAEDTAVYYCALDYSYAMDYWGQGTLVTVSSTRDGNEEMGGITQTPYKVSISGTTVILTCPQYPGSEILWQHNDKNIGGDEDDKNIGSDEDHLSLKEFSELEQSGYYVCYPRGSKPEDANFYLYLRARVCENCMEMDVMSVATIVIVDICITGGLLLLVYYWSKNRKAKAKPVTRGAGAGGRQRGQNKERPPPVPNPDYEPIRKGQRDLYSGLNQRRI

SEQ ID NO: 20530 - protein, 416 aa, synthetic construct
MALPVTALLLPLALLLHAARPDIVLTQSPSSLSASVGDRATISCRASESVTILGSHLIYWYQQKPGQAPRLLIQLASNVQTGVPARFSGSGSGTDFTLTISSVEPEDVAVYYCLQSRTIPRTFGQGTKVEIKGGGGSGGGGSGGGGSQIQLVQSGPELKKPGGSVKISCAASGYTFTDYSINWVRQAPGKGLEWVGWINTETREPAYAYDFRGRFTFSADTSKSTAYLQMNSLRAEDTAVYYCALDYSYAMDYWGQGTLVTVSSTRFKIPIEELEDRVFVNCNTSITWVEGTVGTLLSDITRLDLGKRILDPRGIYRCNGTDIYKDKESTVQVHYRMCQSCVELDPATVAGIIVTDVIATLLLALGVFCFAGHETGRLSGAADTQALLRNDQVYQPLRDRDDAQYSHLGGNWARNK

SEQ ID NO: 20531 - protein, 426 aa, synthetic construct
MALPVTALLLPLALLLHAARPDIVLTQSPSSLSASVGDRATISCRASESVTILGSHLIYWYQQKPGQAPRLLIQLASNVQTGVPARFSGSGSGTDFTLTISSVEPEDVAVYYCLQSRTIPRTFGQGTKVEIKGGGGSGGGGSGGGGSQIQLVQSGPELKKPGGSVKISCAASGYTFTDYSINWVRQAPGKGLEWVGWINTETREPAYAYDFRGRFTFSADTSKSTAYLQMNSLRAEDTAVYYCALDYSYAMDYWGQGTLVTVSSTRQSIKGNHLVKVYDYQEDGSVLLTCDAEAKNITWFKDGKMIGFLTEDKKKWNLGSNAKDPRGMYQCKGSQNKSKPLQVYYRMCQNCIELNAATISGFLFAEIVSIFVLAVGVYFIAGQDGVRQSRASDKQTLLPNDQLYQPLKDREDDQYSHLQGNQLRRN

SEQ ID NO: 20532 - protein, 409 aa, synthetic construct
MALPVTALLLPLALLLHAARPDIVLTQSPSSLSASVGDRATISCRASESVTILGSHLIYWYQQKPGQAPRLLIQLASNVQTGVPARFSGSGSGTDFTLTISSVEPEDVAVYYCLQSRTIPRTFGQGTKVEIKGGGGSGGGGSGGGGSQIQLVQSGPELKKPGGSVKISCAASGYTFTDYSINWVRQAPGKGLEWVGWINTETREPAYAYDFRGRFTFSADTSKSTAYLQMNSLRAEDTAVYYCALDYSYAMDYWGQGTLVTVSSTRQSFGLLDPKLCYLLDGILFIYGVILTALFLRVKFSRSADAPAYQQGQNQLYNELNLGRREEYDVLDKRRGRDPEMGGKPQRRKNPQEGLYNELQKDKMAEAYSEIGMKGERRRGKGHDGLYQGLSTATKDTYDALHMQALPPR

SEQ ID NO: 20533 - protein, 451 aa, synthetic construct
MALPVTALLLPLALLLHAARPQIQLVQSGPELKKPGGSVKISCAASGYTFTDYSINWVRQAPGKGLEWVGWINTETREPAYAYDFRGRFTFSADTSKSTAYLQMNSLRAEDTAVYYCALDYSYAMDYWGQGTLVTVSSGGGGSGGGGSGGGGSDIVLTQSPSSLSASVGDRATISCRASESVTILGSHLIYWYQQKPGQAPRLLIQLASNVQTGVPARFSGSGSGTDFTLTISSVEPEDVAVYYCLQSRTIPRTFGQGTKVEIKTRDGNEEMGGITQTPYKVSISGTTVILTCPQYPGSEILWQHNDKNIGGDEDDKNIGSDEDHLSLKEFSELEQSGYYVCYPRGSKPEDANFYLYLRARVCENCMEMDVMSVATIVIVDICITGGLLLLVYYWSKNRKAKAKPVTRGAGAGGRQRGQNKERPPPVPNPDYEPIRKGQRDLYSGLNQRRI

SEQ ID NO: 20534 - protein, 416 aa, synthetic construct
MALPVTALLLPLALLLHAARPQIQLVQSGPELKKPGGSVKISCAASGYTFTDYSINWVRQAPGKGLEWVGWINTETREPAYAYDFRGRFTFSADTSKSTAYLQMNSLRAEDTAVYYCALDYSYAMDYWGQGTLVTVSSGGGGSGGGGSGGGGSDIVLTQSPSSLSASVGDRATISCRASESVTILGSHLIYWYQQKPGQAPRLLIQLASNVQTGVPARFSGSGSGTDFTLTISSVEPEDVAVYYCLQSRTIPRTFGQGTKVEIKTRFKIPIEELEDRVFVNCNTSITWVEGTVGTLLSDITRLDLGKRILDPRGIYRCNGTDIYKDKESTVQVHYRMCQSCVELDPATVAGIIVTDVIATLLLALGVFCFAGHETGRLSGAADTQALLRNDQVYQPLRDRDDAQYSHLGGNWARNK

SEQ ID NO: 20535 - protein, 426 aa, synthetic construct
MALPVTALLLPLALLLHAARPQIQLVQSGPELKKPGGSVKISCAASGYTFTDYSINWVRQAPGKGLEWVGWINTETREPAYAYDFRGRFTFSADTSKSTAYLQMNSLRAEDTAVYYCALDYSYAMDYWGQGTLVTVSSGGGGSGGGGSGGGGSDIVLTQSPSSLSASVGDRATISCRASESVTILGSHLIYWYQQKPGQAPRLLIQLASNVQTGVPARFSGSGSGTDFTLTISSVEPEDVAVYYCLQSRTIPRTFGQGTKVEIKTRQSIKGNHLVKVYDYQEDGSVLLTCDAEAKNITWFKDGKMIGFLTEDKKKWNLGSNAKDPRGMYQCKGSQNKSKPLQVYYRMCQNCIELNAATISGFLFAEIVSIFVLAVGVYFIAGQDGVRQSRASDKQTLLPNDQLYQPLKDREDDQYSHLQGNQLRRN

SEQ ID NO: 20536 - protein, 409 aa, synthetic construct
MALPVTALLLPLALLLHAARPQIQLVQSGPELKKPGGSVKISCAASGYTFTDYSINWVRQAPGKGLEWVGWINTETREPAYAYDFRGRFTFSADTSKSTAYLQMNSLRAEDTAVYYCALDYSYAMDYWGQGTLVTVSSGGGGSGGGGSGGGGSDIVLTQSPSSLSASVGDRATISCRASESVTILGSHLIYWYQQKPGQAPRLLIQLASNVQTGVPARFSGSGSGTDFTLTISSVEPEDVAVYYCLQSRTIPRTFGQGTKVEIKTRQSFGLLDPKLCYLLDGILFIYGVILTALFLRVKFSRSADAPAYQQGQNQLYNELNLGRREEYDVLDKRRGRDPEMGGKPQRRKNPQEGLYNELQKDKMAEAYSEIGMKGERRRGKGHDGLYQGLSTATKDTYDALHMQALPPR

SEQ ID NO: 20537 - protein, 504 aa, synthetic construct
MALPVTALLLPLALLLHAARPDIVLTQSPSSLSASVGDRATISCRASESVTILGSHLIYWYQQKPGQAPRLLIQLASNVQTGVPARFSGSGSGTDFTLTISSVEPEDVAVYYCLQSRTIPRTFGQGTKVEIKGGGGSGGGGSGGGGSQIQLVQSGPELKKPGGSVKISCAASGYTFTDYSINWVRQAPGKGLEWVGWINTETREPAYAYDFRGRFTFSADTSKSTAYLQMNSLRAEDTAVYYCALDYSYAMDYWGQGTLVTVSSTRGMRTEDLPKAVVFLEPQWYRVLEKDSVTLKCQGAYSPEDNSTQWFHNESLISSQASSYFIDAATVDDSGEYRCQTNLSTLSDPVQLEVHIGWLLLQAPRWVFKEEDPIHLRCHSWKNTALHKVTYLQNGKGRKYFHHNSDFYIPKATLKDSGSYFCRGLVGSKNVSSETVNITITQGLAVPTISSFFPPGYQVSFCLVMVLLFAVDTGLYFSVKTNIRSSTRDWKDHKFKWRKDPQDK

SEQ ID NO: 20538 - protein, 786 aa, synthetic construct
MALPVTALLLPLALLLHAARPDIVLTQSPSSLSASVGDRATISCRASESVTILGSHLIYWYQQKPGQAPRLLIQLASNVQTGVPARFSGSGSGTDFTLTISSVEPEDVAVYYCLQSRTIPRTFGQGTKVEIKGGGGSGGGGSGGGGSQIQLVQSGPELKKPGGSVKISCAASGYTFTDYSINWVRQAPGKGLEWVGWINTETREPAYAYDFRGRFTFSADTSKSTAYLQMNSLRAEDTAVYYCALDYSYAMDYWGQGTLVTVSSTRGGSGQQQTLPKPFIWAEPHFMVPKEKQVTICCQGNYGAVEYQLHFEGSLFAVDRPKPPERINKVQFYIPDMNSRMAGQYSCIYRVGELWSEPSNLLDLVVTEMYDTPTLSVHPGPEVISGEKVTFYCRLDTATSMFLLLKEGRSSHVQRGYGKVQAEFPLGPVTTAHRGTYRCFGSYNNHAWSFPSEPVKLLVTGDIENTSLAPEDPTFPADTWGTYLLTTETGLQKDHALWDHTAQNLLRMGLAFLVLVALVWFLVEDWLSRKRTRERASRASTWEGRRRLNTQTLRAKRSGSGVKQTLNFDLLKLAGDVESNPGPSRGHMTEYKPTVRLATRDDVPRAVRTLAAAFADYPATRHTVDPDRHIERVTELQELFLTRVGLDIGKVWVADDGAAVAVWTTPESVEAGAVFAEIGPRMAELSGSRLAAQQQMEGLLAPHRPKEPAWFLATVGVSPDHQGKGLGSAVVLPGVEAAERAGVPAFLETSAPRNLPFYERLGFTVTADVEVPEGPRTWCMTRKPGA

SEQ ID NO: 20539 - protein, 619 aa, synthetic construct
MALPVTALLLPLALLLHAARPDIVLTQSPSSLSASVGDRATISCRASESVTILGSHLIYWYQQKPGQAPRLLIQLASNVQTGVPARFSGSGSGTDFTLTISSVEPEDVAVYYCLQSRTIPRTFGQGTKVEIKGGGGSGGGGSGGGGSQIQLVQSGPELKKPGGSVKISCAASGYTFTDYSINWVRQAPGKGLEWVGWINTETREPAYAYDFRGRFTFSADTSKSTAYLQMNSLRAEDTAVYYCALDYSYAMDYWGQGTLVTVSSTRKIEVMYPPPYLDNEKSNGTIIHVKGARGDIENTSLAPEDPTFPADTWGTYLLTTETGLQKDHALWDHTAQNLLRMGLAFLVLVALVWFLVEDWLSRKRTRERASRASTWEGRRRLNTQTLRAKRSGSGVKQTLNFDLLKLAGDVESNPGPSRGHMTEYKPTVRLATRDDVPRAVRTLAAAFADYPATRHTVDPDRHIERVTELQELFLTRVGLDIGKVWVADDGAAVAVWTTPESVEAGAVFAEIGPRMAELSGSRLAAQQQMEGLLAPHRPKEPAWFLATVGVSPDHQGKGLGSAVVLPGVEAAERAGVPAFLETSAPRNLPFYERLGFTVTADVEVPEGPRTWCMTRKPGA

SEQ ID NO: 20540 - protein, 706 aa, synthetic construct
MALPVTALLLPLALLLHAARPDIVLTQSPSSLSASVGDRATISCRASESVTILGSHLIYWYQQKPGQAPRLLIQLASNVQTGVPARFSGSGSGTDFTLTISSVEPEDVAVYYCLQSRTIPRTFGQGTKVEIKGGGGSGGGGSGGGGSQIQLVQSGPELKKPGGSVKISCAASGYTFTDYSINWVRQAPGKGLEWVGWINTETREPAYAYDFRGRFTFSADTSKSTAYLQMNSLRAEDTAVYYCALDYSYAMDYWGQGTLVTVSSTRLWVSQPPEIRTLEGSSAFLPCSFNASQGRLAIGSVTWFRDEVVPGKEVRNGTPEFRGRLAPLASSRFLHDHQAELHIRDVRGHDASIYVCRVEVLGLGVGTGNGTRLVVEKEHPQLGAGTVLLLRAGFYAVSFLSVAVGSTVYYQGKCLTWKGPRRQLPAVVPAPLPPPCGSSAHLLPPVPGGRAKRSGSGVKQTLNFDLLKLAGDVESNPGPSRMYRMQLLSCIALSLALVTNSAPTSSSTKKTQLQLEHLLLDLQMILNGINNYKNPKLTEMLTAKFYMPKKATELKHLQCLEEELKPLEEVLNLAQSKNFHLRPRDLISNINVIVLELKGSETTFMCEYADETATIVEFLNRWITFCQSIISTLTKIEVMYPPPYLDNEKSNGTIIHVKGKHLCPSPLFPGPSKPFWVLVVVGGVLACYSLLVTVAFIIFWVRSKRS

SEQ ID NO: 20541 - protein, 682 aa, synthetic construct
MALPVTALLLPLALLLHAARPDIVLTQSPSSLSASVGDRATISCRASESVTILGSHLIYWYQQKPGQAPRLLIQLASNVQTGVPARFSGSGSGTDFTLTISSVEPEDVAVYYCLQSRTIPRTFGQGTKVEIKGGGGSGGGGSGGGGSQIQLVQSGPELKKPGGSVKISCAASGYTFTDYSINWVRQAPGKGLEWVGWINTETREPAYAYDFRGRFTFSADTSKSTAYLQMNSLRAEDTAVYYCALDYSYAMDYWGQGTLVTVSSTRLWVSQPPEIRTLEGSSAFLPCSFNASQGRLAIGSVTWFRDEVVPGKEVRNGTPEFRGRLAPLASSRFLHDHQAELHIRDVRGHDASIYVCRVEVLGLGVGTGNGTRLVVEKEHPQLGAGTVLLLRAGFYAVSFLSVAVGSTVYYQGKCLTWKGPRRQLPAVVPAPLPPPCGSSAHLLPPVPGGRAKRSGSGVKQTLNFDLLKLAGDVESNPGPSRGHMTEYKPTVRLATRDDVPRAVRTLAAAFADYPATRHTVDPDRHIERVTELQELFLTRVGLDIGKVWVADDGAAVAVWTTPESVEAGAVFAEIGPRMAELSGSRLAAQQQMEGLLAPHRPKEPAWFLATVGVSPDHQGKGLGSAVVLPGVEAAERAGVPAFLETSAPRNLPFYERLGFTVTADVEVPEGPRTWCMTRKPGA

SEQ ID NO: 20542 - protein, 358 aa, synthetic construct
MALPVTALLLPLALLLHAARPDIVLTQSPSSLSASVGDRATISCRASESVTILGSHLIYWYQQKPGQAPRLLIQLASNVQTGVPARFSGSGSGTDFTLTISSVEPEDVAVYYCLQSRTIPRTFGQGTKVEIKGGGGSGGGGSGGGGSQIQLVQSGPELKKPGGSVKISCAASGYTFTDYSINWVRQAPGKGLEWVGWINTETREPAYAYDFRGRFTFSADTSKSTAYLQMNSLRAEDTAVYYCALDYSYAMDYWGQGTLVTVSSTRKIEVMYPPPYLDNEKSNGTIIHVKGARITQGLAVSTISSFFPPGYQVSFCLVMVLLFAVDTGLYFSVKTNIRSSTRDWKDHKFKWRKDPQDK

SEQ ID NO: 20543 - protein, 358 aa, synthetic construct
MALPVTALLLPLALLLHAARPDIVLTQSPSSLSASVGDRATISCRASESVTILGSHLIYWYQQKPGQAPRLLIQLASNVQTGVPARFSGSGSGTDFTLTISSVEPEDVAVYYCLQSRTIPRTFGQGTKVEIKGGGGSGGGGSGGGGSQIQLVQSGPELKKPGGSVKISCAASGYTFTDYSINWVRQAPGKGLEWVGWINTETREPAYAYDFRGRFTFSADTSKSTAYLQMNSLRAEDTAVYYCALDYSYAMDYWGQGTLVTVSSTRKIEVMYPPPYLDNEKSNGTIIHVKGARITQGLAVPTISSFFPPGYQVSFCLVMVLLFAVDTGLYFSVKTNIRSSTRDWKDHKFKWRKDPQDK

SEQ ID NO: 20544 - protein, 337 aa, synthetic construct
MALPVTALLLPLALLLHAARPDIVLTQSPSSLSASVGDRATISCRASESVTILGSHLIYWYQQKPGQAPRLLIQLASNVQTGVPARFSGSGSGTDFTLTISSVEPEDVAVYYCLQSRTIPRTFGQGTKVEIKGGGGSGGGGSGGGGSQIQLVQSGPELKKPGGSVKISCAASGYTFTDYSINWVRQAPGKGLEWVGWINTETREPAYAYDFRGRFTFSADTSKSTAYLQMNSLRAEDTAVYYCALDYSYAMDYWGQGTLVTVSSTRKIEVMYPPPYLDNEKSNGTIIHVKGARITQGLAVSTISSFSPPGYQVSFCLVMVLLFAVDTGLYFSVKTNI

SEQ ID NO: 20545 - protein, 368 aa, synthetic construct
MALPVTALLLPLALLLHAARPDIVLTQSPSSLSASVGDRATISCRASESVTILGSHLIYWYQQKPGQAPRLLIQLASNVQTGVPARFSGSGSGTDFTLTISSVEPEDVAVYYCLQSRTIPRTFGQGTKVEIKGGGGSGGGGSGGGGSQIQLVQSGPELKKPGGSVKISCAASGYTFTDYSINWVRQAPGKGLEWVGWINTETREPAYAYDFRGRFTFSADTSKSTAYLQMNSLRAEDTAVYYCALDYSYAMDYWGQGTLVTVSSTRKIEVMYPPPYLDNEKSNGTIIHVKGARVEKEHPQLGAGTVLLLRAGFYAVSFLSVAVGSTVYYQGKCLTWKGPRRQLPAVVPAPLPPPCGSSAHLLPPVPGG

SEQ ID NO: 20546 - protein, 449 aa, synthetic construct
MALPVTALLLPLALLLHAARPDIVLTQSPSSLSASVGDRATISCRASESVTILGSHLIYWYQQKPGQAPRLLIQLASNVQTGVPARFSGSGSGTDFTLTISSVEPEDVAVYYCLQSRTIPRTFGQGTKVEIKGGGGSGGGGSGGGGSQIQLVQSGPELKKPGGSVKISCAASGYTFTDYSINWVRQAPGKGLEWVGWINTETREPAYAYDFRGRFTFSADTSKSTAYLQMNSLRAEDTAVYYCALDYSYAMDYWGQGTLVTVSSTRKIEVMYPPPYLDNEKSNGTIIHVKGARKSVRFYLVVSPASASTQTSWTPRDLVSSQTQTQSCVPPTAGARQAPESPSTIPVPSQPQNSTLRPGPAAPIALVPVFCGLLVAKSLVLSALLVWWGDIWWKTMMELRSLDTQKATCHLQQVTDLPWTSVSSPVEREILYHTVARTKISDDDDEHTL

SEQ ID NO: 20547 - protein, 386 aa, synthetic construct
MALPVTALLLPLALLLHAARPDIVLTQSPSSLSASVGDRATISCRASESVTILGSHLIYWYQQKPGQAPRLLIQLASNVQTGVPARFSGSGSGTDFTLTISSVEPEDVAVYYCLQSRTIPRTFGQGTKVEIKGGGGSGGGGSGGGGSQIQLVQSGPELKKPGGSVKISCAASGYTFTDYSINWVRQAPGKGLEWVGWINTETREPAYAYDFRGRFTFSADTSKSTAYLQMNSLRAEDTAVYYCALDYSYAMDYWGQGTLVTVSSTRKIEVMYPPPYLDNEKSNGTIIHVKGARGDIENTSLAPEDPTFPADTWGTYLLTTETGLQKDHALWDHTAQNLLRMGLAFLVLVALVWFLVEDWLSRKRTRERASRASTWEGRRRLNTQTL

SEQ ID NO: 20548 - protein, 982 aa, synthetic construct
MALPVTALLLPLALLLHAARPDIVLTQSPSSLSASVGDRATISCRASESVTILGSHLIYWYQQKPGQAPRLLIQLASNVQTGVPARFSGSGSGTDFTLTISSVEPEDVAVYYCLQSRTIPRTFGQGTKVEIKLEGQPKANPTVTLFPPSSEELQANKATLVCLISDFYPGAVTVAWKADGSPVKAGVETTKPSKQSNNKYAASSYLSLTPEQWKSHRSYSCQVTHEGSTVEKTVAPTECSGSQSFGLLDPKLCYLLDGILFIYGVILTALFLRVKFSRSADAPAYQQGQNQLYNELNLGRREEYDVLDKRRGRDPEMGGKPQRRKNPQEGLYNELQKDKMAEAYSEIGMKGERRRGKGHDGLYQGLSTATKDTYDALHMQALPPRRAKRSGSGATNFSLLKQAGDVEENPGPTSMDWIWRILFLVGAATGAHSFEQIQLVQSGPELKKPGGSVKISCAASGYTFTDYSINWVRQAPGKGLEWVGWINTETREPAYAYDFRGRFTFSADTSKSTAYLQMNSLRAEDTAVYYCALDYSYAMDYWGQGTLVTVSSTRASTKGPSVFPLAPSSKSTSGGTAALGCLVKDYFPEPVTVSWNSGALTSGVHTFPAVLQSSGLYSLSSVVTVPSSSLGTQTYICNVNHKPSNTKVDKRVEPKSCGTGDIENTSLAPEDPTFPADTWGTYLLTTETGLQKDHALWDHTAQNLLRMGLAFLVLVALVWFLVEDWLSRKRTRERASRASTWEGRRRLNTQTLRAKRSGSGATNFSLLKQAGDVEENPGPSRGHMTEYKPTVRLATRDDVPRAVRTLAAAFADYPATRHTVDPDRHIERVTELQELFLTRVGLDIGKVWVADDGAAVAVWTTPESVEAGAVFAEIGPRMAELSGSRLAAQQQMEGLLAPHRPKEPAWFLATVGVSPDHQGKGLGSAVVLPGVEAAERAGVPAFLETSAPRNLPFYERLGFTVTADVEVPEGPRTWCMTRKPGA

SEQ ID NO: 20549 - protein, 1048 aa, synthetic construct
MALPVTALLLPLALLLHAARPDIVLTQSPSSLSASVGDRATISCRASESVTILGSHLIYWYQQKPGQAPRLLIQLASNVQTGVPARFSGSGSGTDFTLTISSVEPEDVAVYYCLQSRTIPRTFGQGTKVEIKLEGQPKANPTVTLFPPSSEELQANKATLVCLISDFYPGAVTVAWKADGSPVKAGVETTKPSKQSNNKYAASSYLSLTPEQWKSHRSYSCQVTHEGSTVEKTVAPTECSGSQSFGLLDPKLCYLLDGILFIYGVILTALFLRVKFSRSADAPAYQQGQNQLYNELNLGRREEYDVLDKRRGRDPEMGGKPQRRKNPQEGLYNELQKDKMAEAYSEIGMKGERRRGKGHDGLYQGLSTATKDTYDALHMQALPPRRAKRSGSGATNFSLLKQAGDVEENPGPTSMDWIWRILFLVGAATGAHSFEQIQLVQSGPELKKPGGSVKISCAASGYTFTDYSINWVRQAPGKGLEWVGWINTETREPAYAYDFRGRFTFSADTSKSTAYLQMNSLRAEDTAVYYCALDYSYAMDYWGQGTLVTVSSTRASTKGPSVFPLAPSSKSTSGGTAALGCLVKDYFPEPVTVSWNSGALTSGVHTFPAVLQSSGLYSLSSVVTVPSSSLGTQTYICNVNHKPSNTKVDKRVEPKSCGTKSVRFYLVVSPASASTQTSWTPRDLVSSQTQTQSCVPPTAGARQAPESPSTIPVPSQPQNSTLRPGPAAPIALVPVFCGLLVAKSLVLSALLVWWGDIWWKTMMELRSLDTQKATCHLQQVTDLPWTSVSSPVEREILYHTVARTKISDDDDEHTLRAKRSGSGVKQTLNFDLLKLAGDVESNPGPSRGHMTEYKPTVRLATRDDVPRAVRTLAAAFADYPATRHTVDPDRHIERVTELQELFLTRVGLDIGKVWVADDGAAVAVWTTPESVEAGAVFAEIGPRMAELSGSRLAAQQQMEGLLAPHRPKEPAWFLATVGVSPDHQGKGLGSAVVLPGVEAAERAGVPAFLETSAPRNLPFYERLGFTVTADVEVPEGPRTWCMTRKPGA

SEQ ID NO: 20550 - protein, 968 aa, synthetic construct
MALPVTALLLPLALLLHAARPDIVLTQSPSSLSASVGDRATISCRASESVTILGSHLIYWYQQKPGQAPRLLIQLASNVQTGVPARFSGSGSGTDFTLTISSVEPEDVAVYYCLQSRTIPRTFGQGTKVEIKLEGQPKANPTVTLFPPSSEELQANKATLVCLISDFYPGAVTVAWKADGSPVKAGVETTKPSKQSNNKYAASSYLSLTPEQWKSHRSYSCQVTHEGSTVEKTVAPTECSGSQSFGLLDPKLCYLLDGILFIYGVILTALFLRVKFSRSADAPAYQQGQNQLYNELNLGRREEYDVLDKRRGRDPEMGGKPQRRKNPQEGLYNELQKDKMAEAYSEIGMKGERRRGKGHDGLYQGLSTATKDTYDALHMQALPPRRAKRSGSGATNFSLLKQAGDVEENPGPTSMDWIWRILFLVGAATGAHSFEQIQLVQSGPELKKPGGSVKISCAASGYTFTDYSINWVRQAPGKGLEWVGWINTETREPAYAYDFRGRFTFSADTSKSTAYLQMNSLRAEDTAVYYCALDYSYAMDYWGQGTLVTVSSTRASTKGPSVFPLAPSSKSTSGGTAALGCLVKDYFPEPVTVSWNSGALTSGVHTFPAVLQSSGLYSLSSVVTVPSSSLGTQTYICNVNHKPSNTKVDKRVEPKSCGTVVEKEHPQLGAGTVLLLRAGFYAVSFLSVAVGSTVYYQGKCLTWKGPRRQLPAVVPAPLPPPCGSSAHLLPPVPGGRAKRSGSGVKQTLNFDLLKLAGDVESNPGPSRGHMTEYKPTVRLATRDDVPRAVRTLAAAFADYPATRHTVDPDRHIERVTELQELFLTRVGLDIGKVWVADDGAAVAVWTTPESVEAGAVFAEIGPRMAELSGSRLAAQQQMEGLLAPHRPKEPAWFLATVGVSPDHQGKGLGSAVVLPGVEAAERAGVPAFLETSAPRNLPFYERLGFTVTADVEVPEGPRTWCMTRKPGA

SEQ ID NO: 20551 - protein, 997 aa, synthetic construct
MALPVTALLLPLALLLHAARPDIVLTQSPSSLSASVGDRATISCRASESVTILGSHLIYWYQQKPGQAPRLLIQLASNVQTGVPARFSGSGSGTDFTLTISSVEPEDVAVYYCLQSRTIPRTFGQGTKVEIKLEDLKNVFPPEVAVFEPSEAEISHTQKATLVCLATGFYPDHVELSWWVNGKEVHSGVSTDPQPLKEQPALNDSRYCLSSRLRVSATFWQNPRNHFRCQVQFYGLSENDEWTQDRAKPVTQIVSAEAWGRADCGSQSFGLLDPKLCYLLDGILFIYGVILTALFLRVKFSRSADAPAYQQGQNQLYNELNLGRREEYDVLDKRRGRDPEMGGKPQRRKNPQEGLYNELQKDKMAEAYSEIGMKGERRRGKGHDGLYQGLSTATKDTYDALHMQALPPRRAKRSGSGATNFSLLKQAGDVEENPGPTSMDWIWRILFLVGAATGAHSFEQIQLVQSGPELKKPGGSVKISCAASGYTFTDYSINWVRQAPGKGLEWVGWINTETREPAYAYDFRGRFTFSADTSKSTAYLQMNSLRAEDTAVYYCALDYSYAMDYWGQGTLVTVSSTRIQNPDPAVYQLRDSKSSDKSVCLFTDFDSQTNVSQSKDSDVYITDKTVLDMRSMDFKSNSAVAWSNKSDFACANAFNNSIIPEDTFFPSPESSCGTGDIENTSLAPEDPTFPADTWGTYLLTTETGLQKDHALWDHTAQNLLRMGLAFLVLVALVWFLVEDWLSRKRTRERASRASTWEGRRRLNTQTLRAKRSGSGATNFSLLKQAGDVEENPGPSRGHMTEYKPTVRLATRDDVPRAVRTLAAAFADYPATRHTVDPDRHIERVTELQELFLTRVGLDIGKVWVADDGAAVAVWTTPESVEAGAVFAEIGPRMAELSGSRLAAQQQMEGLLAPHRPKEPAWFLATVGVSPDHQGKGLGSAVVLPGVEAAERAGVPAFLETSAPRNLPFYERLGFTVTADVEVPEGPRTWCMTRKPGA

SEQ ID NO: 20552 - protein, 1063 aa, synthetic construct
MALPVTALLLPLALLLHAARPDIVLTQSPSSLSASVGDRATISCRASESVTILGSHLIYWYQQKPGQAPRLLIQLASNVQTGVPARFSGSGSGTDFTLTISSVEPEDVAVYYCLQSRTIPRTFGQGTKVEIKLEDLKNVFPPEVAVFEPSEAEISHTQKATLVCLATGFYPDHVELSWWVNGKEVHSGVSTDPQPLKEQPALNDSRYCLSSRLRVSATFWQNPRNHFRCQVQFYGLSENDEWTQDRAKPVTQIVSAEAWGRADCGSQSFGLLDPKLCYLLDGILFIYGVILTALFLRVKFSRSADAPAYQQGQNQLYNELNLGRREEYDVLDKRRGRDPEMGGKPQRRKNPQEGLYNELQKDKMAEAYSEIGMKGERRRGKGHDGLYQGLSTATKDTYDALHMQALPPRRAKRSGSGATNFSLLKQAGDVEENPGPTSMDWIWRILFLVGAATGAHSFEQIQLVQSGPELKKPGGSVKISCAASGYTFTDYSINWVRQAPGKGLEWVGWINTETREPAYAYDFRGRFTFSADTSKSTAYLQMNSLRAEDTAVYYCALDYSYAMDYWGQGTLVTVSSTRIQNPDPAVYQLRDSKSSDKSVCLFTDFDSQTNVSQSKDSDVYITDKTVLDMRSMDFKSNSAVAWSNKSDFACANAFNNSIIPEDTFFPSPESSCGTKSVRFYLVVSPASASTQTSWTPRDLVSSQTQTQSCVPPTAGARQAPESPSTIPVPSQPQNSTLRPGPAAPIALVPVFCGLLVAKSLVLSALLVWWGDIWWKTMMELRSLDTQKATCHLQQVTDLPWTSVSSPVEREILYHTVARTKISDDDDEHTLRAKRSGSGVKQTLNFDLLKLAGDVESNPGPSRGHMTEYKPTVRLATRDDVPRAVRTLAAAFADYPATRHTVDPDRHIERVTELQELFLTRVGLDIGKVWVADDGAAVAVWTTPESVEAGAVFAEIGPRMAELSGSRLAAQQQMEGLLAPHRPKEPAWFLATVGVSPDHQGKGLGSAVVLPGVEAAERAGVPAFLETSAPRNLPFYERLGFTVTADVEVPEGPRTWCMTRKPGA

SEQ ID NO: 20553 - protein, 983 aa, synthetic construct
MALPVTALLLPLALLLHAARPDIVLTQSPSSLSASVGDRATISCRASESVTILGSHLIYWYQQKPGQAPRLLIQLASNVQTGVPARFSGSGSGTDFTLTISSVEPEDVAVYYCLQSRTIPRTFGQGTKVEIKLEDLKNVFPPEVAVFEPSEAEISHTQKATLVCLATGFYPDHVELSWWVNGKEVHSGVSTDPQPLKEQPALNDSRYCLSSRLRVSATFWQNPRNHFRCQVQFYGLSENDEWTQDRAKPVTQIVSAEAWGRADCGSQSFGLLDPKLCYLLDGILFIYGVILTALFLRVKFSRSADAPAYQQGQNQLYNELNLGRREEYDVLDKRRGRDPEMGGKPQRRKNPQEGLYNELQKDKMAEAYSEIGMKGERRRGKGHDGLYQGLSTATKDTYDALHMQALPPRRAKRSGSGATNFSLLKQAGDVEENPGPTSMDWIWRILFLVGAATGAHSFEQIQLVQSGPELKKPGGSVKISCAASGYTFTDYSINWVRQAPGKGLEWVGWINTETREPAYAYDFRGRFTFSADTSKSTAYLQMNSLRAEDTAVYYCALDYSYAMDYWGQGTLVTVSSTRIQNPDPAVYQLRDSKSSDKSVCLFTDFDSQTNVSQSKDSDVYITDKTVLDMRSMDFKSNSAVAWSNKSDFACANAFNNSIIPEDTFFPSPESSCGTVVEKEHPQLGAGTVLLLRAGFYAVSFLSVAVGSTVYYQGKCLTWKGPRRQLPAVVPAPLPPPCGSSAHLLPPVPGGRAKRSGSGVKQTLNFDLLKLAGDVESNPGPSRGHMTEYKPTVRLATRDDVPRAVRTLAAAFADYPATRHTVDPDRHIERVTELQELFLTRVGLDIGKVWVADDGAAVAVWTTPESVEAGAVFAEIGPRMAELSGSRLAAQQQMEGLLAPHRPKEPAWFLATVGVSPDHQGKGLGSAVVLPGVEAAERAGVPAFLETSAPRNLPFYERLGFTVTADVEVPEGPRTWCMTRKPGA

SEQ ID NO: 20554 - protein, 954 aa, synthetic construct
MALPVTALLLPLALLLHAARPDIVLTQSPSSLSASVGDRATISCRASESVTILGSHLIYWYQQKPGQAPRLLIQLASNVQTGVPARFSGSGSGTDFTLTISSVEPEDVAVYYCLQSRTIPRTFGQGTKVEIKLEGQPKANPTVTLFPPSSEELQANKATLVCLISDFYPGAVTVAWKADGSPVKAGVETTKPSKQSNNKYAASSYLSLTPEQWKSHRSYSCQVTHEGSTVEKTVAPTECSGSQSFGLLDPKLCYLLDGILFIYGVILTALFLRVKFSRSADAPAYQQGQNQLYNELNLGRREEYDVLDKRRGRDPEMGGKPQRRKNPQEGLYNELQKDKMAEAYSEIGMKGERRRGKGHDGLYQGLSTATKDTYDALHMQALPPRRAKRSGSGATNFSLLKQAGDVEENPGPTSMDWIWRILFLVGAATGAHSFEQIQLVQSGPELKKPGGSVKISCAASGYTFTDYSINWVRQAPGKGLEWVGWINTETREPAYAYDFRGRFTFSADTSKSTAYLQMNSLRAEDTAVYYCALDYSYAMDYWGQGTLVTVSSTRASTKGPSVFPLAPSSKSTSGGTAALGCLVKDYFPEPVTVSWNSGALTSGVHTFPAVLQSSGLYSLSSVVTVPSSSLGTQTYICNVNHKPSNTKVDKRVEPKSCGTITQGLAVSTISSFFPPGYQVSFCLVMVLLFAVDTGLYFSVKTNIRSSTRDWKDHKFKWRKDPQDKRAKRSGSGATNFSLLKQAGDVEENPGPSRGHMTEYKPTVRLATRDDVPRAVRTLAAAFADYPATRHTVDPDRHIERVTELQELFLTRVGLDIGKVWVADDGAAVAVWTTPESVEAGAVFAEIGPRMAELSGSRLAAQQQMEGLLAPHRPKEPAWFLATVGVSPDHQGKGLGSAVVLPGVEAAERAGVPAFLETSAPRNLPFYERLGFTVTADVEVPEGPRTWCMTRKPGA

SEQ ID NO: 20555 - protein, 969 aa, synthetic construct
MALPVTALLLPLALLLHAARPDIVLTQSPSSLSASVGDRATISCRASESVTILGSHLIYWYQQKPGQAPRLLIQLASNVQTGVPARFSGSGSGTDFTLTISSVEPEDVAVYYCLQSRTIPRTFGQGTKVEIKLEDLKNVFPPEVAVFEPSEAEISHTQKATLVCLATGFYPDHVELSWWVNGKEVHSGVSTDPQPLKEQPALNDSRYCLSSRLRVSATFWQNPRNHFRCQVQFYGLSENDEWTQDRAKPVTQIVSAEAWGRADCGSQSFGLLDPKLCYLLDGILFIYGVILTALFLRVKFSRSADAPAYQQGQNQLYNELNLGRREEYDVLDKRRGRDPEMGGKPQRRKNPQEGLYNELQKDKMAEAYSEIGMKGERRRGKGHDGLYQGLSTATKDTYDALHMQALPPRRAKRSGSGATNFSLLKQAGDVEENPGPTSMDWIWRILFLVGAATGAHSFEQIQLVQSGPELKKPGGSVKISCAASGYTFTDYSINWVRQAPGKGLEWVGWINTETREPAYAYDFRGRFTFSADTSKSTAYLQMNSLRAEDTAVYYCALDYSYAMDYWGQGTLVTVSSTRIQNPDPAVYQLRDSKSSDKSVCLFTDFDSQTNVSQSKDSDVYITDKTVLDMRSMDFKSNSAVAWSNKSDFACANAFNNSIIPEDTFFPSPESSCGTITQGLAVSTISSFFPPGYQVSFCLVMVLLFAVDTGLYFSVKTNIRSSTRDWKDHKFKWRKDPQDKRAKRSGSGATNFSLLKQAGDVEENPGPSRGHMTEYKPTVRLATRDDVPRAVRTLAAAFADYPATRHTVDPDRHIERVTELQELFLTRVGLDIGKVWVADDGAAVAVWTTPESVEAGAVFAEIGPRMAELSGSRLAAQQQMEGLLAPHRPKEPAWFLATVGVSPDHQGKGLGSAVVLPGVEAAERAGVPAFLETSAPRNLPFYERLGFTVTADVEVPEGPRTWCMTRKPGA

SEQ ID NO: 20556 - protein, 652 aa, synthetic construct
MALPVTALLLPLALLLHAARPDIVLTQSPSSLSASVGDRATISCRASESVTILGSHLIYWYQQKPGQAPRLLIQLASNVQTGVPARFSGSGSGTDFTLTISSVEPEDVAVYYCLQSRTIPRTFGQGTKVEIKLEGQPKANPTVTLFPPSSEELQANKATLVCLISDFYPGAVTVAWKADGSPVKAGVETTKPSKQSNNKYAASSYLSLTPEQWKSHRSYSCQVTHEGSTVEKTVAPTECSGSLGEPQLCYILDAILFLYGIVLTLLYCRLKIQVRKAAITSYEKSDGVYTGLSTRNQETYETLKHEKPPQRAKRSGSGATNFSLLKQAGDVEENPGPTSMDWIWRILFLVGAATGAHSFEQIQLVQSGPELKKPGGSVKISCAASGYTFTDYSINWVRQAPGKGLEWVGWINTETREPAYAYDFRGRFTFSADTSKSTAYLQMNSLRAEDTAVYYCALDYSYAMDYWGQGTLVTVSSTRASTKGPSVFPLAPSSKSTSGGTAALGCLVKDYFPEPVTVSWNSGALTSGVHTFPAVLQSSGLYSLSSVVTVPSSSLGTQTYICNVNHKPSNTKVDKRVEPKSCGTLGEPQLCYILDAILFLYGIVLTLLYCRLKIQVRKAAITSYEKSDGVYTGLSTRNQETYETLKHEKPPQ

SEQ ID NO: 20557 - protein, 1029 aa, synthetic construct
MALPVTALLLPLALLLHAARPDIVLTQSPSSLSASVGDRATISCRASESVTILGSHLIYWYQQKPGQAPRLLIQLASNVQTGVPARFSGSGSGTDFTLTISSVEPEDVAVYYCLQSRTIPRTFGQGTKVEIKGQPKANPTVTLFPPSSEELQANKATLVCLISDFYPGAVTVAWKADGSPVKAGVETTKPSKQSNNKYAASSYLSLTPEQWKSHRSYSCQVTHEGSTVEKTVAPTECSGSQSFGLLDPKLCYLLDGILFIYGVILTALFLRVKFSRSADAPAYQQGQNQLYNELNLGRREEYDVLDKRRGRDPEMGGKPRRKNPQEGLYNELQKDKMAEAYSEIGMKGERRRGKGHDGLYQGLSTATKDTYDALHMQALPPRRAKRSGSGATNFSLLKQAGDVEENPGPTSMDWIWRILFLVGAATGAHSFEQIQLVQSGPELKKPGGSVKISCAASGYTFTDYSINWVRQAPGKGLEWVGWINTETREPAYAYDFRGRFTFSADTSKSTAYLQMNSLRAEDTAVYYCALDYSYAMDYWGQGTLVTVSSASTKGPSVFPLAPSSKSTSGGTAALGCLVKDYFPEPVTVSWNSGALTSGVHTFPAVLQSSGLYSLSSVVTVPSSSLGTQTYICNVNHKPSNTKVDKRVEPKSCGTQSFGLLDPKLCYLLDGILFIYGVILTALFLRVKFSRSADAPAYQQGQNQLYNELNLGRREEYDVLDKRRGRDPEMGGKPRRKNPQEGLYNELQKDKMAEAYSEIGMKGERRRGKGHDGLYQGLSTATKDTYDALHMQALPPRRAKRSGSGVKQTLNFDLLKLAGDVESNPGPSRGHMTEYKPTVRLATRDDVPRAVRTLAAAFADYPATRHTVDPDRHIERVTELQELFLTRVGLDIGKVWVADDGAAVAVWTTPESVEAGAVFAEIGPRMAELSGSRLAAQQQMEGLLAPHRPKEPAWFLATVGVSPDHQGKGLGSAVVLPGVEAAERAGVPAFLETSAPRNLPFYERLGFTVTADVEVPEGPRTWCMTRKPGA

SEQ ID NO: 20558 - protein, 815 aa, synthetic construct
MALPVTALLLPLALLLHAARPDIVLTQSPSSLSASVGDRATISCRASESVTILGSHLIYWYQQKPGQAPRLLIQLASNVQTGVPARFSGSGSGTDFTLTISSVEPEDVAVYYCLQSRTIPRTFGQGTKVEIKLEDLKNVFPPEVAVFEPSEAEISHTQKATLVCLATGFYPDHVELSWWVNGKEVHSGVSTDPQPLKEQPALNDSRYCLSSRLRVSATFWQNPRNHFRCQVQFYGLSENDEWTQDRAKPVTQIVSAEAWGRADCGSQSFGLLDPKLCYLLDGILFIYGVILTALFLRVKFSRSADAPAYQQGQNQLYNELNLGRREEYDVLDKRRGRDPEMGGKPRRKNPQEGLYNELQKDKMAEAYSEIGMKGERRRGKGHDGLYQGLSTATKDTYDALHMQALPPRRAKRSGSGATNFSLLKQAGDVEENPGPTSMDWIWRILFLVGAATGAHSFEQIQLVQSGPELKKPGGSVKISCAASGYTFTDYSINWVRQAPGKGLEWVGWINTETREPAYAYDFRGRFTFSADTSKSTAYLQMNSLRAEDTAVYYCALDYSYAMDYWGQGTLVTVSSTRIQNPDPAVYQLRDSKSSDKSVCLFTDFDSQTNVSQSKDSDVYITDKTVLDMRSMDFKSNSAVAWSNKSDFACANAFNNSIIPEDTFFPSPESSCGTQSFGLLDPKLCYLLDGILFIYGVILTALFLRVKFSRSADAPAYQQGQNQLYNELNLGRREEYDVLDKRRGRDPEMGGKPRRKNPQEGLYNELQKDKMAEAYSEIGMKGERRRGKGHDGLYQGLSTATKDTYDALHMQALPPR

SEQ ID NO: 20559 - protein, 496 aa, synthetic construct
MALPVTALLLPLALLLHAARPEIVLTQSPGTLSLSPGEGATLSCRAGQSVRSSYLGWYQQKPGQAPRLLIYGASSRATGIPDRFSGSGSGTDFTLTISRLEPEDFAVYYCQQYGYSPPTFGGGTKLEIKGGGGSGGGGSGGGGSEVQLLESGGGLVQPGGSLRLSCAASGFTFSSYAMSWVRQAPGKGLEWVSVISGSGGRPNYADSVKGRFTISRDNSKNTLYLQMNSLRDEDTAVYYCAKVDYSNYLFFDYWGQGTLVTVSSTREQKLISEEDLKIEVMYPPPYLDNEKSNGTIIHVKGKHLCPSPLFPGPSKPFWVLVVVGGVLACYSLLVTVAFIIFWVRSKRSRLLHSDYMNMTPRRPGPTRKHYQPYAPPRDFAAYRSRVKFSRSADAPAYQQGQNQLYNELNLGRREEYDVLDKRRGRDPEMGGKPRRKNPQEGLYNELQKDKMAEAYSEIGMKGERRRGKGHDGLYQGLSTATKDTYDALHMQALPPR

SEQ ID NO: 20560 - protein, 502 aa, synthetic construct
MALPVTALLLPLALLLHAARPEIVLTQSPGTLSLSPGEGATLSCRAGQSVRSSYLGWYQQKPGQAPRLLIYGASSRATGIPDRFSGSGSGTDFTLTISRLEPEDFAVYYCQQYGYSPPTFGGGTKLEIKGGGGSGGGGSGGGGSEVQLLESGGGLVQPGGSLRLSCAASGFTFSSYAMSWVRQAPGKGLEWVSVISGSGGRPNYADSVKGRFTISRDNSKNTLYLQMNSLRDEDTAVYYCAKVDYSNYLFFDYWGQGTLVTVSSTREQKLISEEDLAKPTTTPAPRPPTPAPTIASQPLSLRPEACRPAAGGAVHTRGLDFACDIYIWAPLAGTCGVLLLSLVITLYCKRGRKKLLYIFKQPFMRPVQTTQEEDGCSCRFPEEEEGGCELRVKFSRSADAPAYQQGQNQLYNELNLGRREEYDVLDKRRGRDPEMGGKPRRKNPQEGLYNELQKDKMAEAYSEIGMKGERRRGKGHDGLYQGLSTATKDTYDALHMQALPPR

SEQ ID NO: 20561 - protein, 502 aa, synthetic construct
MALPVTALLLPLALLLHAARPEVQLLESGGGLVQPGGSLRLSCAASGFTFSSYAMSWVRQAPGKGLEWVSVISGSGGRPNYADSVKGRFTISRDNSKNTLYLQMNSLRDEDTAVYYCAKVDYSNYLFFDYWGQGTLVTVSSGGGGSGGGGSGGGGSEIVLTQSPGTLSLSPGEGATLSCRAGQSVRSSYLGWYQQKPGQAPRLLIYGASSRATGIPDRFSGSGSGTDFTLTISRLEPEDFAVYYCQQYGYSPPTFGGGTKLEIKTREQKLISEEDLAKPTTTPAPRPPTPAPTIASQPLSLRPEACRPAAGGAVHTRGLDFACDIYIWAPLAGTCGVLLLSLVITLYCKRGRKKLLYIFKQPFMRPVQTTQEEDGCSCRFPEEEEGGCELRVKFSRSADAPAYQQGQNQLYNELNLGRREEYDVLDKRRGRDPEMGGKPRRKNPQEGLYNELQKDKMAEAYSEIGMKGERRRGKGHDGLYQGLSTATKDTYDALHMQALPPR

SEQ ID NO: 20562 - protein, 915 aa, synthetic construct
MALPVTALLLPLALLLHAARPEIVLTQSPGTLSLSPGEGATLSCRAGQSVRSSYLGWYQQKPGQAPRLLIYGASSRATGIPDRFSGSGSGTDFTLTISRLEPEDFAVYYCQQYGYSPPTFGGGTKLEIKGGGGSGGGGSGGGGSEVQLLESGGGLVQPGGSLRLSCAASGFTFSSYAMSWVRQAPGKGLEWVSVISGSGGRPNYADSVKGRFTISRDNSKNTLYLQMNSLRDEDTAVYYCAKVDYSNYLFFDYWGQGTLVTVSSTREQKLISEEDLAKPTTTPAPRPPTPAPTIASQPLSLRPEACRPAAGGAVHTRGLDFACDIYIWAPLAGTCGVLLLSLVITLYCGRARVKFSRSADAPAYQQGQNQLYNELNLGRREEYDVLDKRRGRDPEMGGKPRRKNPQEGLYNELQKDKMAEAYSEIGMKGERRRGKGHDGLYQGLSTATKDTYDALHMQALPPRSRGSGATNFSLLKQAGDVEENPGPGIHMATYEVLCEVARKLGTDDREVVLFLLNVFIPQPTLAQLIGALRALKEEGRLTFPLLAECLFRAGRRDLLRDLLHLDPRFLERHLAGTMSYFSPYQLTVLHVDGELCARDIRSLIFLSKDTIGSRSTPQTFLHWVYCMENLDLLGPTDVDALMSMLRSLSRVDLQRQVQTLMGLHLSGPSHSQHYRHTPLETDFYDYKDDDDKTSGSGEGRGSLLTCGDVEENPGPHMTEYKPTVRLATRDDVPRAVRTLAAAFADYPATRHTVDPDRHIERVTELQELFLTRVGLDIGKVWVADDGAAVAVWTTPESVEAGAVFAEIGPRMAELSGSRLAAQQQMEGLLAPHRPKEPAWFLATVGVSPDHQGKGLGSAVVLPGVEAAERAGVPAFLETSAPRNLPFYERLGFTVTADVEVPEGPRTWCMTRKPGA

SEQ ID NO: 20563 - protein, 855 aa, synthetic construct
MALPVTALLLPLALLLHAARPEIVLTQSPGTLSLSPGEGATLSCRAGQSVRSSYLGWYQQKPGQAPRLLIYGASSRATGIPDRFSGSGSGTDFTLTISRLEPEDFAVYYCQQYGYSPPTFGGGTKLEIKLEIQNPDPAVYQLRDSKSSDKSVCLFTDFDSQTNVSQSKDSDVYITDKCVLDMRSMDFKSNSAVAWSNKSDFACANAFNNSIIPEDTFFPSSDVPCDVKLVEKSFETDTNLNFQNLSVIGFRILLLKVAGFNLLMTLRLWSSRAKRSGSGVKQTLNFDLLKLAGDVESNPGPTSMDWIWRILFLVGAATGAHSFEEVQLLESGGGLVQPGGSLRLSCAASGFTFSSYAMSWVRQAPGKGLEWVSVISGSGGRPNYADSVKGRFTISRDNSKNTLYLQMNSLRDEDTAVYYCAKVDYSNYLFFDYWGQGTLVTVSSTREDLKNVFPPEVAVFEPSKAEIAHTQKATLVCLATGFYPDHVELSWWVNGKEVHSGVCTDPQPLKEQPALNDSRYCLSSRLRVSATFWQNPRNHFRCQVQFYGLSENDEWTQDRAKPVTQIVSAEAWGRADCGITSASYHQGVLSATILYEILLGKATLYAVLVSALVLMAMVKRKDSRGRAKRSGSGATNFSLLKQAGDVEENPGPSRGHMTEYKPTVRLATRDDVPRAVRTLAAAFADYPATRHTVDPDRHIERVTELQELFLTRVGLDIGKVWVADDGAAVAVWTTPESVEAGAVFAEIGPRMAELSGSRLAAQQQMEGLLAPHRPKEPAWFLATVGVSPDHQGKGLGSAVVLPGVEAAERAGVPAFLETSAPRNLPFYERLGFTVTADVEVPEGPRTWCMTRKPGA

SEQ ID NO: 20564 - protein, 854 aa, synthetic construct
MALPVTALLLPLALLLHAARPEIVLTQSPGTLSLSPGEGATLSCRAGQSVRSSYLGWYQQKPGQAPRLLIYGASSRATGIPDRFSGSGSGTDFTLTISRLEPEDFAVYYCQQYGYSPPTFGGGTKLEIKLEDLKNVFPPEVAVFEPSKAEIAHTQKATLVCLATGFYPDHVELSWWVNGKEVHSGVCTDPQPLKEQPALNDSRYCLSSRLRVSATFWQNPRNHFRCQVQFYGLSENDEWTQDRAKPVTQIVSAEAWGRADCGITSASYHQGVLSATILYEILLGKATLYAVLVSALVLMAMVKRKDSRGRAKRSGSGATNFSLLKQAGDVEENPGPTSMDWIWRILFLVGAATGAHSFEEVQLLESGGGLVQPGGSLRLSCAASGFTFSSYAMSWVRQAPGKGLEWVSVISGSGGRPNYADSVKGRFTISRDNSKNTLYLQMNSLRDEDTAVYYCAKVDYSNYLFFDYWGQGTLVTVSSTRIQNPDPAVYQLRDSKSSDKSVCLFTDFDSQTNVSQSKDSDVYITDKCVLDMRSMDFKSNSAVAWSNKSDFACANAFNNSIIPEDTFFPSSDVPCDVKLVEKSFETDTNLNFQNLSVIGFRILLLKVAGFNLLMTLRLWSSRAKRSGSGVKQTLNFDLLKLAGDVESNPGPSRGHMTEYKPTVRLATRDDVPRAVRTLAAAFADYPATRHTVDPDRHIERVTELQELFLTRVGLDIGKVWVADDGAAVAVWTTPESVEAGAVFAEIGPRMAELSGSRLAAQQQMEGLLAPHRPKEPAWFLATVGVSPDHQGKGLGSAVVLPGVEAAERAGVPAFLETSAPRNLPFYERLGFTVTADVEVPEGPRTWCMTRKPGA

SEQ ID NO: 20565 - protein, 621 aa, synthetic construct
MALPVTALLLPLALLLHAARPEIVLTQSPGTLSLSPGEGATLSCRAGQSVRSSYLGWYQQKPGQAPRLLIYGASSRATGIPDRFSGSGSGTDFTLTISRLEPEDFAVYYCQQYGYSPPTFGGGTKLEIKLEDLKNVFPPEVAVFEPSEAEISHTQKATLVCLATGFYPDHVELSWWVNGKEVHSGVCTDPQPLKEQPALNDSRYCLSSRLRVSATFWQNPRNHFRCQVQFYGLSENDEWTQDRAKPVTQIVSAEAWGRADCGFTSESYQQGVLSATILYEILLGKATLYAVLVSALVLMAMVKRKDSRGRAKRSGSGATNFSLLKQAGDVEENPGPTSMDWIWRILFLVGAATGAHSFEEVQLLESGGGLVQPGGSLRLSCAASGFTFSSYAMSWVRQAPGKGLEWVSVISGSGGRPNYADSVKGRFTISRDNSKNTLYLQMNSLRDEDTAVYYCAKVDYSNYLFFDYWGQGTLVTVSSTRIQNPDPAVYQLRDSKSSDKSVCLFTDFDSQTNVSQSKDSDVYITDKCVLDMRSMDFKSNSAVAWSNKSDFACANAFNNSIIPEDTFFPSPESSCDVKLVEKSFETDTNLNFQNLSVIGFRILLLKVAGFNLLMTLRLWSS

SEQ ID NO: 20566 - protein, 846 aa, synthetic construct
MALPVTALLLPLALLLHAARPEIVLTQSPGTLSLSPGEGATLSCRAGQSVRSSYLGWYQQKPGQAPRLLIYGASSRATGIPDRFSGSGSGTDFTLTISRLEPEDFAVYYCQQYGYSPPTFGGGTKLEIKLEDLKNVFPPEVAVFEPSEAEISHTQKATLVCLATGFYPDHVELSWWVNGKEVHSGVCTDPQPLKEQPALNDSRYCLSSRLRVSATFWQNPRNHFRCQVQFYGLSENDEWTQDRAKPVTQIVSAEAWGRADCGFTSESYQQGVLSATILYEILLGKATLYAVLVSALVLMAMVKRKDSRGRAKRSGSGATNFSLLKQAGDVEENPGPTSMDWIWRILFLVGAATGAHSFEEVQLLESGGGLVQPGGSLRLSCAASGFTFSSYAMSWVRQAPGKGLEWVSVISGSGGRPNYADSVKGRFTISRDNSKNTLYLQMNSLRDEDTAVYYCAKVDYSNYLFFDYWGQGTLVTVSSTRIQNPDPAVYQLRDSKSSDKSVCLFTDFDSQTNVSQSKDSDVYITDKCVLDMRSMDFKSNSAVAWSNKSDFACANAFNNSIIPEDTFFPSPESSCDVKLVEKSFETDTNLNFQNLSVIGFRILLLKVAGFNLLMTLRLWSSRAKRSGSGVKQTLNFDLLKLAGDVESNPGPSRGGIHTMATYEVLCEVARKLGTDDREVVLFLLNVFIPQPTLAQLIGALRALKEEGRLTFPLLAECLFRAGRRDLLRDLLHLDPRFLERHLAGTMSYFSPYQLTVLHVDGELCARDIRSLIFLSKDTIGSRSTPQTFLHWVYCMENLDLLGPTDVDALMSMLRSLSRVDLQRQVQTLMGLHLSGPSHSQHYRHTP

SEQ ID NO: 20567 - protein, 625 aa, synthetic construct
MALPVTALLLPLALLLHAARPEIVLTQSPGTLSLSPGEGATLSCRAGQSVRSSYLGWYQQKPGQAPRLLIYGASSRATGIPDRFSGSGSGTDFTLTISRLEPEDFAVYYCQQYGYSPPTFGGGTKLEIKLEIQNPDPAVYQLRDSKSSDKSVCLFTDFDSQTNVSQSKDSDVYITDKCVLDMRSMDFKSNSAVAWSNKSDFACANAFNNSIIPEDTFFPSPESSCDVKLVEKSFETDTNLNFQNLSVIGFRILLLKVAGFNLLMTLRLWSSRAKRSGSGVKQTLNFDLLKLAGDVESNPGPTSMDWIWRILFLVGAATGAHSFEEVQLLESGGGLVQPGGSLRLSCAASGFTFSSYAMSWVRQAPGKGLEWVSVISGSGGRPNYADSVKGRFTISRDNSKNTLYLQMNSLRDEDTAVYYCAKVDYSNYLFFDYWGQGTLVTVSSTREDLKNVFPPEVAVFEPSEAEISHTQKATLVCLATGFYPDHVELSWWVNGKEVHSGVCTDPQPLKEQPALNDSRYCLSSRLRVSATFWQNPRNHFRCQVQFYGLSENDEWTQDRAKPVTQIVSAEAWGRADCGFTSESYQQGVLSATILYEILLGKATLYAVLVSALVLMAMVKRKDSRG

SEQ ID NO: 20568 - protein, 847 aa, synthetic construct
MALPVTALLLPLALLLHAARPEIVLTQSPGTLSLSPGEGATLSCRAGQSVRSSYLGWYQQKPGQAPRLLIYGASSRATGIPDRFSGSGSGTDFTLTISRLEPEDFAVYYCQQYGYSPPTFGGGTKLEIKLEIQNPDPAVYQLRDSKSSDKSVCLFTDFDSQTNVSQSKDSDVYITDKCVLDMRSMDFKSNSAVAWSNKSDFACANAFNNSIIPEDTFFPSPESSCDVKLVEKSFETDTNLNFQNLSVIGFRILLLKVAGFNLLMTLRLWSSRAKRSGSGVKQTLNFDLLKLAGDVESNPGPTSMDWIWRILFLVGAATGAHSFEEVQLLESGGGLVQPGGSLRLSCAASGFTFSSYAMSWVRQAPGKGLEWVSVISGSGGRPNYADSVKGRFTISRDNSKNTLYLQMNSLRDEDTAVYYCAKVDYSNYLFFDYWGQGTLVTVSSTREDLKNVFPPEVAVFEPSEAEISHTQKATLVCLATGFYPDHVELSWWVNGKEVHSGVCTDPQPLKEQPALNDSRYCLSSRLRVSATFWQNPRNHFRCQVQFYGLSENDEWTQDRAKPVTQIVSAEAWGRADCGFTSESYQQGVLSATILYEILLGKATLYAVLVSALVLMAMVKRKDSRGRAKRSGSGATNFSLLKQAGDVEENPGPSRGGIHTMATYEVLCEVARKLGTDDREVVLFLLNVFIPQPTLAQLIGALRALKEEGRLTFPLLAECLFRAGRRDLLRDLLHLDPRFLERHLAGTMSYFSPYQLTVLHVDGELCARDIRSLIFLSKDTIGSRSTPQTFLHWVYCMENLDLLGPTDVDALMSMLRSLSRVDLQRQVQTLMGLHLSGPSHSQHYRHTP

SEQ ID NO: 20569 - protein, 899 aa, synthetic construct
MALPVTALLLPLALLLHAARPLEGKPIPNPLLGLDSTGSGEDLKNVFPPEVAVFEPSKAEIAHTQKATLVCLATGFYPDHVELSWWVNGKEVHSGVCTDPQPLKEQPALNDSRYCLSSRLRVSATFWQNPRNHFRCQVQFYGLSENDEWTQDRAKPVTQIVSAEAWGRADCGITSASYHQGVLSATILYEILLGKATLYAVLVSALVLMAMVKRKDSRGRAKRSGSGATNFSLLKQAGDVEENPGPTSMALPVTALLLPLALLLHAARPEIVLTQSPGTLSLSPGEGATLSCRAGQSVRSSYLGWYQQKPGQAPRLLIYGASSRATGIPDRFSGSGSGTDFTLTISRLEPEDFAVYYCQQYGYSPPTFGGGTKLEIKGGGGSGGGGSGGGGSEVQLLESGGGLVQPGGSLRLSCAASGFTFSSYAMSWVRQAPGKGLEWVSVISGSGGRPNYADSVKGRFTISRDNSKNTLYLQMNSLRDEDTAVYYCAKVDYSNYLFFDYWGQGTLVTVSSTREQKLISEEDGSGIQNPDPAVYQLRDSKSSDKSVCLFTDFDSQTNVSQSKDSDVYITDKCVLDMRSMDFKSNSAVAWSNKSDFACANAFNNSIIPEDTFFPSSDVPCDVKLVEKSFETDTNLNFQNLSVIGFRILLLKVAGFNLLMTLRLWSSRAKRSGSGVKQTLNFDLLKLAGDVESNPGPSRGHMTEYKPTVRLATRDDVPRAVRTLAAAFADYPATRHTVDPDRHIERVTELQELFLTRVGLDIGKVWVADDGAAVAVWTTPESVEAGAVFAEIGPRMAELSGSRLAAQQQMEGLLAPHRPKEPAWFLATVGVSPDHQGKGLGSAVVLPGVEAAERAGVPAFLETSAPRNLPFYERLGFTVTADVEVPEGPRTWCMTRKPGA

SEQ ID NO: 20570 - protein, 900 aa, synthetic construct
MALPVTALLLPLALLLHAARPLEQKLISEEDLGSGDRPDPAVYQLRDSKSSDKSVCLFTDFDSQTNVSQSKDSDVYITDKCVLDMRSMDFKSNSAVAWSNKSDFACANAFNNSIIPEDTFFPSPESSCDVKLVEKSFETDTNLNFQNLSVIGFRILLLKVAGFNLLMTLRLWSSSSRAKRSGSGVKQTLNFDLLKLAGDVESNPGPTSMALPVTALLLPLALLLHAARPEIVLTQSPGTLSLSPGEGATLSCRAGQSVRSSYLGWYQQKPGQAPRLLIYGASSRATGIPDRFSGSGSGTDFTLTISRLEPEDFAVYYCQQYGYSPPTFGGGTKLEIKGGGGSGGGGSGGGGSEVQLLESGGGLVQPGGSLRLSCAASGFTFSSYAMSWVRQAPGKGLEWVSVISGSGGRPNYADSVKGRFTISRDNSKNTLYLQMNSLRDEDTAVYYCAKVDYSNYLFFDYWGQGTLVTVSSTRGKPIPNPLLGLDSTGSGEDLKNVFPPEVAVFEPSEAEISHTQKATLVCLATGFYPDHVELSWWVNGKEVHSGVCTDPQPLKEQPALNDSRYCLSSRLRVSATFWQNPRNHFRCQVQFYGLSENDEWTQDRAKPVTQIVSAEAWGRADCGFTSESYQQGVLSATILYEILLGKATLYAVLVSALVLMAMVKRKDSRGRAKRSGSGATNFSLLKQAGDVEENPGPSRGHMTEYKPTVRLATRDDVPRAVRTLAAAFADYPATRHTVDPDRHIERVTELQELFLTRVGLDIGKVWVADDGAAVAVWTTPESVEAGAVFAEIGPRMAELSGSRLAAQQQMEGLLAPHRPKEPAWFLATVGVSPDHQGKGLGSAVVLPGVEAAERAGVPAFLETSAPRNLPFYERLGFTVTADVEVPEGPRTWCMTRKPGA

SEQ ID NO: 20571 - protein, 854 aa, synthetic construct
MALPVTALLLPLALLLHAARPEIVLTQSPGTLSLSPGEGATLSCRAGQSVRSSYLGWYQQKPGQAPRLLIYGASSRATGIPDRFSGSGSGTDFTLTISRLEPEDFAVYYCQQYGYSPPTFGGGTKLEIKLEDLKNVFPPEVAVFEPSEAEISHTQKATLVCLATGFYPDHVELSWWVNGKEVHSGVSTDPQPLKEQPALNDSRYCLSSRLRVSATFWQNPRNHFRCQVQFYGLSENDEWTQDRAKPVTQIVSAEAWGRADCGFTSESYQQGVLSATILYEILLGKATLYAVLVSALVLMAMVKRKDSRGRAKRSGSGATNFSLLKQAGDVEENPGPTSMDWIWRILFLVGAATGAHSFEEVQLLESGGGLVQPGGSLRLSCAASGFTFSSYAMSWVRQAPGKGLEWVSVISGSGGRPNYADSVKGRFTISRDNSKNTLYLQMNSLRDEDTAVYYCAKVDYSNYLFFDYWGQGTLVTVSSTRIQNPDPAVYQLRDSKSSDKSVCLFTDFDSQTNVSQSKDSDVYITDKTVLDMRSMDFKSNSAVAWSNKSDFACANAFNNSIIPEDTFFPSPESSCDVKLVEKSFETDTNLNFQNLSVIGFRILLLKVAGFNLLMTLRLWSSRAKRSGSGVKQTLNFDLLKLAGDVESNPGPSRGHMTEYKPTVRLATRDDVPRAVRTLAAAFADYPATRHTVDPDRHIERVTELQELFLTRVGLDIGKVWVADDGAAVAVWTTPESVEAGAVFAEIGPRMAELSGSRLAAQQQMEGLLAPHRPKEPAWFLATVGVSPDHQGKGLGSAVVLPGVEAAERAGVPAFLETSAPRNLPFYERLGFTVTADVEVPEGPRTWCMTRKPGA

SEQ ID NO: 20572 - protein, 936 aa, synthetic construct
MALPVTALLLPLALLLHAARPEIVLTQSPGTLSLSPGEGATLSCRAGQSVRSSYLGWYQQKPGQAPRLLIYGASSRATGIPDRFSGSGSGTDFTLTISRLEPEDFAVYYCQQYGYSPPTFGGGTKLEIKLEDLKNVFPPEVAVFEPSEAEISHTQKATLVCLATGFYPDHVELSWWVNGKEVHSGVSTDPQPLKEQPALNDSRYCLSSRLRVSATFWQNPRNHFRCQVQFYGLSENDEWTQDRAKPVTQIVSAEAWGRADCGFTSESYQQGVLSATILYEILLGKATLYAVLVSALVLMAMVKRKDSRGRAKRSGSGATNFSLLKQAGDVEENPGPTSMDWIWRILFLVGAATGAHSFEEVQLLESGGGLVQPGGSLRLSCAASGFTFSSYAMSWVRQAPGKGLEWVSVISGSGGRPNYADSVKGRFTISRDNSKNTLYLQMNSLRDEDTAVYYCAKVDYSNYLFFDYWGQGTLVTVSSTREQKLISEEDGSGTPFPSLAPPIMLLVDGKQQMVVVCLVLDVAPPGLDSPIWFSAGNGSALDAFTYGPSPATDGTWTNLAHLSLPSEELASWEPLVCHTGPGAEGHSRSTQPMHLSGEASTARTCPQEPLRGTPGGALWLGVLRLLLFKLLLFDLLLTCSCLCDPAGPLPSPATTTRLRALGSHRLHPATETGGREATSSPRPQPRDRRWGDTPPGRKPGSPVRAKRSGSGVKQTLNFDLLKLAGDVESNPGPSRGHMTEYKPTVRLATRDDVPRAVRTLAAAFADYPATRHTVDPDRHIERVTELQELFLTRVGLDIGKVWVADDGAAVAVWTTPESVEAGAVFAEIGPRMAELSGSRLAAQQQMEGLLAPHRPKEPAWFLATVGVSPDHQGKGLGSAVVLPGVEAAERAGVPAFLETSAPRNLPFYERLGFTVTADVEVPEGPRTWCMTRKPGA

SEQ ID NO: 20573 - protein, 954 aa, synthetic construct
MALPVTALLLPLALLLHAARPLEDLKNVFPPEVAVFEPSEAEISHTQKATLVCLATGFYPDHVELSWWVNGKEVHSGVSTDPQPLKEQPALNDSRYCLSSRLRVSATFWQNPRNHFRCQVQFYGLSENDEWTQDRAKPVTQIVSAEAWGRADCGFTSESYQQGVLSATILYEILLGKATLYAVLVSALVLMAMVKRKDSRGRAKRSGSGATNFSLLKQAGDVEENPGPTSMALPVTALLLPLALLLHAARPEIVLTQSPGTLSLSPGEGATLSCRAGQSVRSSYLGWYQQKPGQAPRLLIYGASSRATGIPDRFSGSGSGTDFTLTISRLEPEDFAVYYCQQYGYSPPTFGGGTKLEIKGGGGSGGGGSGGGGSEVQLLESGGGLVQPGGSLRLSCAASGFTFSSYAMSWVRQAPGKGLEWVSVISGSGGRPNYADSVKGRFTISRDNSKNTLYLQMNSLRDEDTAVYYCAKVDYSNYLFFDYWGQGTLVTVSSTREQKLISEEDLGSGTPFPSLAPPIMLLVDGKQQMVVVCLVLDVAPPGLDSPIWFSAGNGSALDAFTYGPSPATDGTWTNLAHLSLPSEELASWEPLVCHTGPGAEGHSRSTQPMHLSGEASTARTCPQEPLRGTPGGALWLGVLRLLLFKLLLFDLLLTCSCLCDPAGPLPSPATTTRLRALGSHRLHPATETGGREATSSPRPQPRDRRWGDTPPGRKPGSPVRAKRSGSGVKQTLNFDLLKLAGDVESNPGPSRSRGHMTEYKPTVRLATRDDVPRAVRTLAAAFADYPATRHTVDPDRHIERVTELQELFLTRVGLDIGKVWVADDGAAVAVWTTPESVEAGAVFAEIGPRMAELSGSRLAAQQQMEGLLAPHRPKEPAWFLATVGVSPDHQGKGLGSAVVLPGVEAAERAGVPAFLETSAPRNLPFYERLGFTVTADVEVPEGPRTWCMTRKPGA

SEQ ID NO: 20574 - protein, 891 aa, synthetic construct
MALPVTALLLPLALLLHAARPEIVLTQSPGTLSLSPGEGATLSCRAGQSVRSSYLGWYQQKPGQAPRLLIYGASSRATGIPDRFSGSGSGTDFTLTISRLEPEDFAVYYCQQYGYSPPTFGGGTKLEIKLEGKPIPNPLLGLDSTGSGDKQLDADVSPKPTIFLPSIAETKLQKAGTYLCLLEKFFPDVIKIHWQEKKSNTILGSQEGNTMKTNDTYMKFSWLTVPEKSLDKEHRCIVRHENNKNGVDQEIIFPPIKTDVITMDPKDNCSKDANDTLLLQLTNTSAYYMYLLLLLKSVVYFAIITCCLLRRTAFCCNGEKSRAKRSGSGATNFSLLKQAGDVEENPGPTSMDWIWRILFLVGAATGAHSFEEVQLLESGGGLVQPGGSLRLSCAASGFTFSSYAMSWVRQAPGKGLEWVSVISGSGGRPNYADSVKGRFTISRDNSKNTLYLQMNSLRDEDTAVYYCAKVDYSNYLFFDYWGQGTLVTVSSTREQKLISEEDGSGSQPHTKPSVFVMKNGTNVACLVKEFYPKDIRINLVSSKKITEFDPAIVISPSGKYNAVKLGKYEDSNSVTCSVQHDNKTVHSTDFEVKTDSTDHVKPKETENTKQPSKSCHKPKAIVHTEKVNMMSLTVLGLRMLFAKTVAVNFLLTAKLFFLRAKRSGSGVKQTLNFDLLKLAGDVESNPGPSRGHMTEYKPTVRLATRDDVPRAVRTLAAAFADYPATRHTVDPDRHIERVTELQELFLTRVGLDIGKVWVADDGAAVAVWTTPESVEAGAVFAEIGPRMAELSGSRLAAQQQMEGLLAPHRPKEPAWFLATVGVSPDHQGKGLGSAVVLPGVEAAERAGVPAFLETSAPRNLPFYERLGFTVTADVEVPEGPRTWCMTRKPGA

SEQ ID NO: 20575 - protein, 629 aa, synthetic construct
MALPVTALLLPLALLLHAARPEIVLTQSPGTLSLSPGEGATLSCRAGQSVRSSYLGWYQQKPGQAPRLLIYGASSRATGIPDRFSGSGSGTDFTLTISRLEPEDFAVYYCQQYGYSPPTFGGGTKLEIKLESQPHTKPSVFVMKNGTNVACLVKEFYPKDIRINLVSSKKITEFDPAIVISPSGKYNAVKLGKYEDSNSVTCSVQHDNKTVHSTDFEVKTDSTDHVKPKETENTKQPSKSCHKPKAIVHTEKVNMMSLTVLGLRMLFAKTVAVNFLLTAKLFFLRAKRSGSGATNFSLLKQAGDVEENPGPTSMDWIWRILFLVGAATGAHSFEEVQLLESGGGLVQPGGSLRLSCAASGFTFSSYAMSWVRQAPGKGLEWVSVISGSGGRPNYADSVKGRFTISRDNSKNTLYLQMNSLRDEDTAVYYCAKVDYSNYLFFDYWGQGTLVTVSSTRDKQLDADVSPKPTIFLPSIAETKLQKAGTYLCLLEKFFPDVIKIHWQEKKSNTILGSQEGNTMKTNDTYMKFSWLTVPEKSLDKEHRCIVRHENNKNGVDQEIIFPPIKTDVITMDPKDNCSKDANDTLLLQLTNTSAYYMYLLLLLKSVVYFAIITCCLLRRTAFCCNGEKS

SEQ ID NO: 20576 - protein, 906 aa, synthetic construct
MALPVTALLLPLALLLHAARPLEGKPIPNPLLGLDSTGSGDKQLDADVSPKPTIFLPSIAETKLQKAGTYLCLLEKFFPDVIKIHWQEKKSNTILGSQEGNTMKTNDTYMKFSWLTVPEKSLDKEHRCIVRHENNKNGVDQEIIFPPIKTDVITMDPKDNCSKDANDTLLLQLTNTSAYYMYLLLLLKSVVYFAIITCCLLRRTAFCCNGEKSRAKRSGSGATNFSLLKQAGDVEENPGPTSMALPVTALLLPLALLLHAARPEIVLTQSPGTLSLSPGEGATLSCRAGQSVRSSYLGWYQQKPGQAPRLLIYGASSRATGIPDRFSGSGSGTDFTLTISRLEPEDFAVYYCQQYGYSPPTFGGGTKLEIKGGGGSGGGGSGGGGSEVQLLESGGGLVQPGGSLRLSCAASGFTFSSYAMSWVRQAPGKGLEWVSVISGSGGRPNYADSVKGRFTISRDNSKNTLYLQMNSLRDEDTAVYYCAKVDYSNYLFFDYWGQGTLVTVSSTREQKLISEEDGSGSQPHTKPSVFVMKNGTNVACLVKEFYPKDIRINLVSSKKITEFDPAIVISPSGKYNAVKLGKYEDSNSVTCSVQHDNKTVHSTDFEVKTDSTDHVKPKETENTKQPSKSCHKPKAIVHTEKVNMMSLTVLGLRMLFAKTVAVNFLLTAKLFFLRAKRSGSGVKQTLNFDLLKLAGDVESNPGPSRGHMTEYKPTVRLATRDDVPRAVRTLAAAFADYPATRHTVDPDRHIERVTELQELFLTRVGLDIGKVWVADDGAAVAVWTTPESVEAGAVFAEIGPRMAELSGSRLAAQQQMEGLLAPHRPKEPAWFLATVGVSPDHQGKGLGSAVVLPGVEAAERAGVPAFLETSAPRNLPFYERLGFTVTADVEVPEGPRTWCMTRKPGA

SEQ ID NO: 20577 - protein, 1031 aa, synthetic construct
MALPVTALLLPLALLLHAARPEIVLTQSPGTLSLSPGEGATLSCRAGQSVRSSYLGWYQQKPGQAPRLLIYGASSRATGIPDRFSGSGSGTDFTLTISRLEPEDFAVYYCQQYGYSPPTFGGGTKLEIKGQPKANPTVTLFPPSSEELQANKATLVCLISDFYPGAVTVAWKADGSPVKAGVETTKPSKQSNNKYAASSYLSLTPEQWKSHRSYSCQVTHEGSTVEKTVAPTECSGSQSFGLLDPKLCYLLDGILFIYGVILTALFLRVKFSRSADAPAYQQGQNQLYNELNLGRREEYDVLDKRRGRDPEMGGKPQRRKNPQEGLYNELQKDKMAEAYSEIGMKGERRRGKGHDGLYQGLSTATKDTYDALHMQALPPRRAKRSGSGATNFSLLKQAGDVEENPGPTSMDWIWRILFLVGAATGAHSFEEVQLLESGGGLVQPGGSLRLSCAASGFTFSSYAMSWVRQAPGKGLEWVSVISGSGGRPNYADSVKGRFTISRDNSKNTLYLQMNSLRDEDTAVYYCAKVDYSNYLFFDYWGQGTLVTVSSASTKGPSVFPLAPSSKSTSGGTAALGCLVKDYFPEPVTVSWNSGALTSGVHTFPAVLQSSGLYSLSSVVTVPSSSLGTQTYICNVNHKPSNTKVDKRVEPKSCGTQSFGLLDPKLCYLLDGILFIYGVILTALFLRVKFSRSADAPAYQQGQNQLYNELNLGRREEYDVLDKRRGRDPEMGGKPQRRKNPQEGLYNELQKDKMAEAYSEIGMKGERRRGKGHDGLYQGLSTATKDTYDALHMQALPPRRAKRSGSGVKQTLNFDLLKLAGDVESNPGPSRGHMTEYKPTVRLATRDDVPRAVRTLAAAFADYPATRHTVDPDRHIERVTELQELFLTRVGLDIGKVWVADDGAAVAVWTTPESVEAGAVFAEIGPRMAELSGSRLAAQQQMEGLLAPHRPKEPAWFLATVGVSPDHQGKGLGSAVVLPGVEAAERAGVPAFLETSAPRNLPFYERLGFTVTADVEVPEGPRTWCMTRKPGA

SEQ ID NO: 20578 - protein, 817 aa, synthetic construct
MALPVTALLLPLALLLHAARPEIVLTQSPGTLSLSPGEGATLSCRAGQSVRSSYLGWYQQKPGQAPRLLIYGASSRATGIPDRFSGSGSGTDFTLTISRLEPEDFAVYYCQQYGYSPPTFGGGTKLEIKLEDLKNVFPPEVAVFEPSEAEISHTQKATLVCLATGFYPDHVELSWWVNGKEVHSGVSTDPQPLKEQPALNDSRYCLSSRLRVSATFWQNPRNHFRCQVQFYGLSENDEWTQDRAKPVTQIVSAEAWGRADCGSQSFGLLDPKLCYLLDGILFIYGVILTALFLRVKFSRSADAPAYQQGQNQLYNELNLGRREEYDVLDKRRGRDPEMGGKPQRRKNPQEGLYNELQKDKMAEAYSEIGMKGERRRGKGHDGLYQGLSTATKDTYDALHMQALPPRRAKRSGSGATNFSLLKQAGDVEENPGPTSMDWIWRILFLVGAATGAHSFEEVQLLESGGGLVQPGGSLRLSCAASGFTFSSYAMSWVRQAPGKGLEWVSVISGSGGRPNYADSVKGRFTISRDNSKNTLYLQMNSLRDEDTAVYYCAKVDYSNYLFFDYWGQGTLVTVSSTRIQNPDPAVYQLRDSKSSDKSVCLFTDFDSQTNVSQSKDSDVYITDKTVLDMRSMDFKSNSAVAWSNKSDFACANAFNNSIIPEDTFFPSPESSCGTQSFGLLDPKLCYLLDGILFIYGVILTALFLRVKFSRSADAPAYQQGQNQLYNELNLGRREEYDVLDKRRGRDPEMGGKPQRRKNPQEGLYNELQKDKMAEAYSEIGMKGERRRGKGHDGLYQGLSTATKDTYDALHMQALPPR

SEQ ID NO: 20579 - protein, 817 aa, synthetic construct
MALPVTALLLPLALLLHAARPEIVLTQSPGTLSLSPGEGATLSCRAGQSVRSSYLGWYQQKPGQAPRLLIYGASSRATGIPDRFSGSGSGTDFTLTISRLEPEDFAVYYCQQYGYSPPTFGGGTKLEIKLEDLKNVFPPEVAVFEPSKAEIAHTQKATLVCLATGFYPDHVELSWWVNGKEVHSGVCTDPQPLKEQPALNDSRYCLSSRLRVSATFWQNPRNHFRCQVQFYGLSENDEWTQDRAKPVTQIVSAEAWGRADCGSQSFGLLDPKLCYLLDGILFIYGVILTALFLRVKFSRSADAPAYQQGQNQLYNELNLGRREEYDVLDKRRGRDPEMGGKPQRRKNPQEGLYNELQKDKMAEAYSEIGMKGERRRGKGHDGLYQGLSTATKDTYDALHMQALPPRRAKRSGSGATNFSLLKQAGDVEENPGPTSMDWIWRILFLVGAATGAHSFEEVQLLESGGGLVQPGGSLRLSCAASGFTFSSYAMSWVRQAPGKGLEWVSVISGSGGRPNYADSVKGRFTISRDNSKNTLYLQMNSLRDEDTAVYYCAKVDYSNYLFFDYWGQGTLVTVSSTRIQNPDPAVYQLRDSKSSDKSVCLFTDFDSQTNVSQSKDSDVYITDKCVLDMRSMDFKSNSAVAWSNKSDFACANAFNNSIIPEDTFFPSSDVPCGTQSFGLLDPKLCYLLDGILFIYGVILTALFLRVKFSRSADAPAYQQGQNQLYNELNLGRREEYDVLDKRRGRDPEMGGKPQRRKNPQEGLYNELQKDKMAEAYSEIGMKGERRRGKGHDGLYQGLSTATKDTYDALHMQALPPR

SEQ ID NO: 20580 - protein, 888 aa, synthetic construct
MALPVTALLLPLALLLHAARPEIVLTQSPGTLSLSPGEGATLSCRAGQSVRSSYLGWYQQKPGQAPRLLIYGASSRATGIPDRFSGSGSGTDFTLTISRLEPEDFAVYYCQQYGYSPPTFGGGTKLEIKLEGKPIPNPLLGLDSTGSGEDLKNVFPPEVAVFEPSEAEISHTQKATLVCLATGFYPDHVELSWWVNGKEVHSGVSTDPQPLKEQPALNDSRYCLSSRLRVSATFWQNPRNHFRCQVQFYGLSENDEWTQDRAKPVTQIVSAEAWGRADCGSQSFGLLDPKLCYLLDGILFIYGVILTALFLRVKFSRSADAPAYQQGQNQLYNELNLGRREEYDVLDKRRGRDPEMGGKPQRRKNPQEGLYNELQKDKMAEAYSEIGMKGERRRGKGHDGLYQGLSTATKDTYDALHMQALPPRRAKRSGSGATNFSLLKQAGDVEENPGPTSMDWIWRILFLVGAATGAHSFEEVQLLESGGGLVQPGGSLRLSCAASGFTFSSYAMSWVRQAPGKGLEWVSVISGSGGRPNYADSVKGRFTISRDNSKNTLYLQMNSLRDEDTAVYYCAKVDYSNYLFFDYWGQGTLVTVSSTREQKLISEEDGSGIQNPDPAVYQLRDSKSSDKSVCLFTDFDSQTNVSQSKDSDVYITDKTVLDMRSMDFKSNSAVAWSNKSDFACANAFNNSIIPEDTFFPSPESSCGTQSFGLLDPKLCYLLDGILFIYGVILTALFLRSKRSRLLHSDYMNMTPRRPGPTRKHYQPYAPPRDFAAYRSRVKFSRSADAPAYQQGQNQLYNELNLGRREEYDVLDKRRGRDPEMGGKPQRRKNPQEGLYNELQKDKMAEAYSEIGMKGERRRGKGHDGLYQGLSTATKDTYDALHMQALPPR

SEQ ID NO: 20581 - protein, 929 aa, synthetic construct
MALPVTALLLPLALLLHAARPEIVLTQSPGTLSLSPGEGATLSCRAGQSVRSSYLGWYQQKPGQAPRLLIYGASSRATGIPDRFSGSGSGTDFTLTISRLEPEDFAVYYCQQYGYSPPTFGGGTKLEIKLEGKPIPNPLLGLDSTGSGEDLKNVFPPEVAVFEPSEAEISHTQKATLVCLATGFYPDHVELSWWVNGKEVHSGVSTDPQPLKEQPALNDSRYCLSSRLRVSATFWQNPRNHFRCQVQFYGLSENDEWTQDRAKPVTQIVSAEAWGRADCGSQSFGLLDPKLCYLLDGILFIYGVILTALFLRSKRSRLLHSDYMNMTPRRPGPTRKHYQPYAPPRDFAAYRSRVKFSRSADAPAYQQGQNQLYNELNLGRREEYDVLDKRRGRDPEMGGKPQRRKNPQEGLYNELQKDKMAEAYSEIGMKGERRRGKGHDGLYQGLSTATKDTYDALHMQALPPRRAKRSGSGATNFSLLKQAGDVEENPGPTSMDWIWRILFLVGAATGAHSFEEVQLLESGGGLVQPGGSLRLSCAASGFTFSSYAMSWVRQAPGKGLEWVSVISGSGGRPNYADSVKGRFTISRDNSKNTLYLQMNSLRDEDTAVYYCAKVDYSNYLFFDYWGQGTLVTVSSTREQKLISEEDGSGIQNPDPAVYQLRDSKSSDKSVCLFTDFDSQTNVSQSKDSDVYITDKTVLDMRSMDFKSNSAVAWSNKSDFACANAFNNSIIPEDTFFPSPESSCGTQSFGLLDPKLCYLLDGILFIYGVILTALFLRSKRSRLLHSDYMNMTPRRPGPTRKHYQPYAPPRDFAAYRSRVKFSRSADAPAYQQGQNQLYNELNLGRREEYDVLDKRRGRDPEMGGKPQRRKNPQEGLYNELQKDKMAEAYSEIGMKGERRRGKGHDGLYQGLSTATKDTYDALHMQALPPR

SEQ ID NO: 20582 - protein, 890 aa, synthetic construct
MALPVTALLLPLALLLHAARPEIVLTQSPGTLSLSPGEGATLSCRAGQSVRSSYLGWYQQKPGQAPRLLIYGASSRATGIPDRFSGSGSGTDFTLTISRLEPEDFAVYYCQQYGYSPPTFGGGTKLEIKLEGKPIPNPLLGLDSTGSGEDLKNVFPPEVAVFEPSEAEISHTQKATLVCLATGFYPDHVELSWWVNGKEVHSGVSTDPQPLKEQPALNDSRYCLSSRLRVSATFWQNPRNHFRCQVQFYGLSENDEWTQDRAKPVTQIVSAEAWGRADCGSQSFGLLDPKLCYLLDGILFIYGVILTALFLRVKFSRSADAPAYQQGQNQLYNELNLGRREEYDVLDKRRGRDPEMGGKPQRRKNPQEGLYNELQKDKMAEAYSEIGMKGERRRGKGHDGLYQGLSTATKDTYDALHMQALPPRRAKRSGSGATNFSLLKQAGDVEENPGPTSMDWIWRILFLVGAATGAHSFEEVQLLESGGGLVQPGGSLRLSCAASGFTFSSYAMSWVRQAPGKGLEWVSVISGSGGRPNYADSVKGRFTISRDNSKNTLYLQMNSLRDEDTAVYYCAKVDYSNYLFFDYWGQGTLVTVSSTREQKLISEEDLGSGIQNPDPAVYQLRDSKSSDKSVCLFTDFDSQTNVSQSKDSDVYITDKTVLDMRSMDFKSNSAVAWSNKSDFACANAFNNSIIPEDTFFPSPESSCGTQSFGLLDPKLCYLLDGILFIYGVILTALFLKRGRKKLLYIFKQPFMRPVQTTQEEDGCSCRFPEEEEGGCELRVKFSRSADAPAYQQGQNQLYNELNLGRREEYDVLDKRRGRDPEMGGKPQRRKNPQEGLYNELQKDKMAEAYSEIGMKGERRRGKGHDGLYQGLSTATKDTYDALHMQALPPR

SEQ ID NO: 20583 - protein, 932 aa, synthetic construct
MALPVTALLLPLALLLHAARPEIVLTQSPGTLSLSPGEGATLSCRAGQSVRSSYLGWYQQKPGQAPRLLIYGASSRATGIPDRFSGSGSGTDFTLTISRLEPEDFAVYYCQQYGYSPPTFGGGTKLEIKLEGKPIPNPLLGLDSTGSGEDLKNVFPPEVAVFEPSEAEISHTQKATLVCLATGFYPDHVELSWWVNGKEVHSGVSTDPQPLKEQPALNDSRYCLSSRLRVSATFWQNPRNHFRCQVQFYGLSENDEWTQDRAKPVTQIVSAEAWGRADCGSQSFGLLDPKLCYLLDGILFIYGVILTALFLKRGRKKLLYIFKQPFMRPVQTTQEEDGCSCRFPEEEEGGCELRVKFSRSADAPAYQQGQNQLYNELNLGRREEYDVLDKRRGRDPEMGGKPQRRKNPQEGLYNELQKDKMAEAYSEIGMKGERRRGKGHDGLYQGLSTATKDTYDALHMQALPPRRAKRSGSGATNFSLLKQAGDVEENPGPTSMDWIWRILFLVGAATGAHSFEEVQLLESGGGLVQPGGSLRLSCAASGFTFSSYAMSWVRQAPGKGLEWVSVISGSGGRPNYADSVKGRFTISRDNSKNTLYLQMNSLRDEDTAVYYCAKVDYSNYLFFDYWGQGTLVTVSSTREQKLISEEDLGSGIQNPDPAVYQLRDSKSSDKSVCLFTDFDSQTNVSQSKDSDVYITDKTVLDMRSMDFKSNSAVAWSNKSDFACANAFNNSIIPEDTFFPSPESSCGTQSFGLLDPKLCYLLDGILFIYGVILTALFLKRGRKKLLYIFKQPFMRPVQTTQEEDGCSCRFPEEEEGGCELRVKFSRSADAPAYQQGQNQLYNELNLGRREEYDVLDKRRGRDPEMGGKPQRRKNPQEGLYNELQKDKMAEAYSEIGMKGERRRGKGHDGLYQGLSTATKDTYDALHMQALPPR

SEQ ID NO: 20584 - protein, 822 aa, synthetic construct
MALPVTALLLPLALLLHAARPEIVLTQSPGTLSLSPGEGATLSCRAGQSVRSSYLGWYQQKPGQAPRLLIYGASSRATGIPDRFSGSGSGTDFTLTISRLEPEDFAVYYCQQYGYSPPTFGGGTKLEIKLEQSFGLLDPKLCYLLDGILFIYGVILTALFLRVKFSRSADAPAYQQGQNQLYNELNLGRREEYDVLDKRRGRDPEMGGKPQRRKNPQEGLYNELQKDKMAEAYSEIGMKGERRRGKGHDGLYQGLSTATKDTYDALHMQALPPRRAKRSGSGATNFSLLKQAGDVEENPGPTSMDWIWRILFLVGAATGAHSFEEVQLLESGGGLVQPGGSLRLSCAASGFTFSSYAMSWVRQAPGKGLEWVSVISGSGGRPNYADSVKGRFTISRDNSKNTLYLQMNSLRDEDTAVYYCAKVDYSNYLFFDYWGQGTLVTVSSTRQSFGLLDPKLCYLLDGILFIYGVILTALFLRVKFSRSADAPAYQQGQNQLYNELNLGRREEYDVLDKRRGRDPEMGGKPQRRKNPQEGLYNELQKDKMAEAYSEIGMKGERRRGKGHDGLYQGLSTATKDTYDALHMQALPPRRAKRSGSGVKQTLNFDLLKLAGDVESNPGPSRGHMTEYKPTVRLATRDDVPRAVRTLAAAFADYPATRHTVDPDRHIERVTELQELFLTRVGLDIGKVWVADDGAAVAVWTTPESVEAGAVFAEIGPRMAELSGSRLAAQQQMEGLLAPHRPKEPAWFLATVGVSPDHQGKGLGSAVVLPGVEAAERAGVPAFLETSAPRNLPFYERLGFTVTADVEVPEGPRTWCMTRKPGA

SEQ ID NO: 20585 - protein, 647 aa, synthetic construct
MALPVTALLLPLALLLHAARPEIVLTQSPGTLSLSPGEGATLSCRAGQSVRSSYLGWYQQKPGQAPRLLIYGASSRATGIPDRFSGSGSGTDFTLTISRLEPEDFAVYYCQQYGYSPPTFGGGTKLEIKLEGQPKANPTVTLFPPSSEELQANKATLVCLISDFYPGAVTVAWKADGSPVKAGVETTKPSKQSNNKYAASSYLSLTPEQWKSHRSYSCQVTHEGSTVEKTVAPTECSPIKTDVITMDPKDNCSKDANDTLLLQLTNTSAYYMYLLLLLKSVVYFAIITCCLLRRTAFCCNGEKSRAKRSGSGATNFSLLKQAGDVEENPGPTSMDWIWRILFLVGAATGAHSFEEVQLLESGGGLVQPGGSLRLSCAASGFTFSSYAMSWVRQAPGKGLEWVSVISGSGGRPNYADSVKGRFTISRDNSKNTLYLQMNSLRDEDTAVYYCAKVDYSNYLFFDYWGQGTLVTVSSTRASTKGPSVFPLAPSSKSTSGGTAALGCLVKDYFPEPVTVSWNSGALTSGVHTFPAVLQSSGLYSLSSVVTVPSSSLGTQTYICNVNHKPSNTKVDKRVEPKSCEVKTDSTDHVKPKETENTKQPSKSCHKPKAIVHTEKVNMMSLTVLGLRMLFAKTVAVNFLLTAKLFFL

SEQ ID NO: 20586 - protein, 625 aa, synthetic construct
MALPVTALLLPLALLLHAARPEIVLTQSPGTLSLSPGEGATLSCRAGQSVRSSYLGWYQQKPGQAPRLLIYGASSRATGIPDRFSGSGSGTDFTLTISRLEPEDFAVYYCQQYGYSPPTFGGGTKLEIKLEGQPKANPTVTLFPPSSEELQANKATLVCLISDFYPGAVTVAWKADGSPVKAGVETTKPSKQSNNKYAASSYLSLTPEQWKSHRSYSCQVTHEGSTVEKTVAPTECSGRADCGITSASYHQGVLSATILYEILLGKATLYAVLVSALVLMAMVKRKDSRGRAKRSGSGATNFSLLKQAGDVEENPGPTSMDWIWRILFLVGAATGAHSFEEVQLLESGGGLVQPGGSLRLSCAASGFTFSSYAMSWVRQAPGKGLEWVSVISGSGGRPNYADSVKGRFTISRDNSKNTLYLQMNSLRDEDTAVYYCAKVDYSNYLFFDYWGQGTLVTVSSTRASTKGPSVFPLAPSSKSTSGGTAALGCLVKDYFPEPVTVSWNSGALTSGVHTFPAVLQSSGLYSLSSVVTVPSSSLGTQTYICNVNHKPSNTKVDKRVEPKSCIPEDTFFPSSDVPCDVKLVEKSFETDTNLNFQNLSVIGFRILLLKVAGFNLLMTLRLWSS

SEQ ID NO: 20587 - protein, 625 aa, synthetic construct
MALPVTALLLPLALLLHAARPEIVLTQSPGTLSLSPGEGATLSCRAGQSVRSSYLGWYQQKPGQAPRLLIYGASSRATGIPDRFSGSGSGTDFTLTISRLEPEDFAVYYCQQYGYSPPTFGGGTKLEIKLEGQPKANPTVTLFPPSSEELQANKATLVCLISDFYPGAVTVAWKADGSPVKAGVETTKPSKQSNNKYAASSYLSLTPEQWKSHRSYSCQVTHEGSTVEKTVAPTECSGRADCGFTSESYQQGVLSATILYEILLGKATLYAVLVSALVLMAMVKRKDSRGRAKRSGSGATNFSLLKQAGDVEENPGPTSMDWIWRILFLVGAATGAHSFEEVQLLESGGGLVQPGGSLRLSCAASGFTFSSYAMSWVRQAPGKGLEWVSVISGSGGRPNYADSVKGRFTISRDNSKNTLYLQMNSLRDEDTAVYYCAKVDYSNYLFFDYWGQGTLVTVSSTRASTKGPSVFPLAPSSKSTSGGTAALGCLVKDYFPEPVTVSWNSGALTSGVHTFPAVLQSSGLYSLSSVVTVPSSSLGTQTYICNVNHKPSNTKVDKRVEPKSCIPEDTFFPSPESSCDVKLVEKSFETDTNLNFQNLSVIGFRILLLKVAGFNLLMTLRLWSS

SEQ ID NO: 20588 - protein, 451 aa, synthetic construct
MALPVTALLLPLALLLHAARPEIVLTQSPGTLSLSPGEGATLSCRAGQSVRSSYLGWYQQKPGQAPRLLIYGASSRATGIPDRFSGSGSGTDFTLTISRLEPEDFAVYYCQQYGYSPPTFGGGTKLEIKGGGGSGGGGSGGGGSEVQLLESGGGLVQPGGSLRLSCAASGFTFSSYAMSWVRQAPGKGLEWVSVISGSGGRPNYADSVKGRFTISRDNSKNTLYLQMNSLRDEDTAVYYCAKVDYSNYLFFDYWGQGTLVTVSSTRDGNEEMGGITQTPYKVSISGTTVILTCPQYPGSEILWQHNDKNIGGDEDDKNIGSDEDHLSLKEFSELEQSGYYVCYPRGSKPEDANFYLYLRARVCENCMEMDVMSVATIVIVDICITGGLLLLVYYWSKNRKAKAKPVTRGAGAGGRQRGQNKERPPPVPNPDYEPIRKGQRDLYSGLNQRRI

SEQ ID NO: 20589 - protein, 416 aa, synthetic construct
MALPVTALLLPLALLLHAARPEIVLTQSPGTLSLSPGEGATLSCRAGQSVRSSYLGWYQQKPGQAPRLLIYGASSRATGIPDRFSGSGSGTDFTLTISRLEPEDFAVYYCQQYGYSPPTFGGGTKLEIKGGGGSGGGGSGGGGSEVQLLESGGGLVQPGGSLRLSCAASGFTFSSYAMSWVRQAPGKGLEWVSVISGSGGRPNYADSVKGRFTISRDNSKNTLYLQMNSLRDEDTAVYYCAKVDYSNYLFFDYWGQGTLVTVSSTRFKIPIEELEDRVFVNCNTSITWVEGTVGTLLSDITRLDLGKRILDPRGIYRCNGTDIYKDKESTVQVHYRMCQSCVELDPATVAGIIVTDVIATLLLALGVFCFAGHETGRLSGAADTQALLRNDQVYQPLRDRDDAQYSHLGGNWARNK

SEQ ID NO: 20590 - protein, 426 aa, synthetic construct
MALPVTALLLPLALLLHAARPEIVLTQSPGTLSLSPGEGATLSCRAGQSVRSSYLGWYQQKPGQAPRLLIYGASSRATGIPDRFSGSGSGTDFTLTISRLEPEDFAVYYCQQYGYSPPTFGGGTKLEIKGGGGSGGGGSGGGGSEVQLLESGGGLVQPGGSLRLSCAASGFTFSSYAMSWVRQAPGKGLEWVSVISGSGGRPNYADSVKGRFTISRDNSKNTLYLQMNSLRDEDTAVYYCAKVDYSNYLFFDYWGQGTLVTVSSTRQSIKGNHLVKVYDYQEDGSVLLTCDAEAKNITWFKDGKMIGFLTEDKKKWNLGSNAKDPRGMYQCKGSQNKSKPLQVYYRMCQNCIELNAATISGFLFAEIVSIFVLAVGVYFIAGQDGVRQSRASDKQTLLPNDQLYQPLKDREDDQYSHLQGNQLRRN

SEQ ID NO: 20591 - protein, 409 aa, synthetic construct
MALPVTALLLPLALLLHAARPEIVLTQSPGTLSLSPGEGATLSCRAGQSVRSSYLGWYQQKPGQAPRLLIYGASSRATGIPDRFSGSGSGTDFTLTISRLEPEDFAVYYCQQYGYSPPTFGGGTKLEIKGGGGSGGGGSGGGGSEVQLLESGGGLVQPGGSLRLSCAASGFTFSSYAMSWVRQAPGKGLEWVSVISGSGGRPNYADSVKGRFTISRDNSKNTLYLQMNSLRDEDTAVYYCAKVDYSNYLFFDYWGQGTLVTVSSTRQSFGLLDPKLCYLLDGILFIYGVILTALFLRVKFSRSADAPAYQQGQNQLYNELNLGRREEYDVLDKRRGRDPEMGGKPQRRKNPQEGLYNELQKDKMAEAYSEIGMKGERRRGKGHDGLYQGLSTATKDTYDALHMQALPPR

SEQ ID NO: 20592 - protein, 451 aa, synthetic construct
MALPVTALLLPLALLLHAARPEVQLLESGGGLVQPGGSLRLSCAASGFTFSSYAMSWVRQAPGKGLEWVSVISGSGGRPNYADSVKGRFTISRDNSKNTLYLQMNSLRDEDTAVYYCAKVDYSNYLFFDYWGQGTLVTVSSGGGGSGGGGSGGGGSEIVLTQSPGTLSLSPGEGATLSCRAGQSVRSSYLGWYQQKPGQAPRLLIYGASSRATGIPDRFSGSGSGTDFTLTISRLEPEDFAVYYCQQYGYSPPTFGGGTKLEIKTRDGNEEMGGITQTPYKVSISGTTVILTCPQYPGSEILWQHNDKNIGGDEDDKNIGSDEDHLSLKEFSELEQSGYYVCYPRGSKPEDANFYLYLRARVCENCMEMDVMSVATIVIVDICITGGLLLLVYYWSKNRKAKAKPVTRGAGAGGRQRGQNKERPPPVPNPDYEPIRKGQRDLYSGLNQRRI

SEQ ID NO: 20593 - protein, 416 aa, synthetic construct
MALPVTALLLPLALLLHAARPEVQLLESGGGLVQPGGSLRLSCAASGFTFSSYAMSWVRQAPGKGLEWVSVISGSGGRPNYADSVKGRFTISRDNSKNTLYLQMNSLRDEDTAVYYCAKVDYSNYLFFDYWGQGTLVTVSSGGGGSGGGGSGGGGSEIVLTQSPGTLSLSPGEGATLSCRAGQSVRSSYLGWYQQKPGQAPRLLIYGASSRATGIPDRFSGSGSGTDFTLTISRLEPEDFAVYYCQQYGYSPPTFGGGTKLEIKTRFKIPIEELEDRVFVNCNTSITWVEGTVGTLLSDITRLDLGKRILDPRGIYRCNGTDIYKDKESTVQVHYRMCQSCVELDPATVAGIIVTDVIATLLLALGVFCFAGHETGRLSGAADTQALLRNDQVYQPLRDRDDAQYSHLGGNWARNK

SEQ ID NO: 20594 - protein, 426 aa, synthetic construct
MALPVTALLLPLALLLHAARPEVQLLESGGGLVQPGGSLRLSCAASGFTFSSYAMSWVRQAPGKGLEWVSVISGSGGRPNYADSVKGRFTISRDNSKNTLYLQMNSLRDEDTAVYYCAKVDYSNYLFFDYWGQGTLVTVSSGGGGSGGGGSGGGGSEIVLTQSPGTLSLSPGEGATLSCRAGQSVRSSYLGWYQQKPGQAPRLLIYGASSRATGIPDRFSGSGSGTDFTLTISRLEPEDFAVYYCQQYGYSPPTFGGGTKLEIKTRQSIKGNHLVKVYDYQEDGSVLLTCDAEAKNITWFKDGKMIGFLTEDKKKWNLGSNAKDPRGMYQCKGSQNKSKPLQVYYRMCQNCIELNAATISGFLFAEIVSIFVLAVGVYFIAGQDGVRQSRASDKQTLLPNDQLYQPLKDREDDQYSHLQGNQLRRN

SEQ ID NO: 20595 - protein, 409 aa, synthetic construct
MALPVTALLLPLALLLHAARPEVQLLESGGGLVQPGGSLRLSCAASGFTFSSYAMSWVRQAPGKGLEWVSVISGSGGRPNYADSVKGRFTISRDNSKNTLYLQMNSLRDEDTAVYYCAKVDYSNYLFFDYWGQGTLVTVSSGGGGSGGGGSGGGGSEIVLTQSPGTLSLSPGEGATLSCRAGQSVRSSYLGWYQQKPGQAPRLLIYGASSRATGIPDRFSGSGSGTDFTLTISRLEPEDFAVYYCQQYGYSPPTFGGGTKLEIKTRQSFGLLDPKLCYLLDGILFIYGVILTALFLRVKFSRSADAPAYQQGQNQLYNELNLGRREEYDVLDKRRGRDPEMGGKPQRRKNPQEGLYNELQKDKMAEAYSEIGMKGERRRGKGHDGLYQGLSTATKDTYDALHMQALPPR

SEQ ID NO: 20596 - protein, 504 aa, synthetic construct
MALPVTALLLPLALLLHAARPEIVLTQSPGTLSLSPGEGATLSCRAGQSVRSSYLGWYQQKPGQAPRLLIYGASSRATGIPDRFSGSGSGTDFTLTISRLEPEDFAVYYCQQYGYSPPTFGGGTKLEIKGGGGSGGGGSGGGGSEVQLLESGGGLVQPGGSLRLSCAASGFTFSSYAMSWVRQAPGKGLEWVSVISGSGGRPNYADSVKGRFTISRDNSKNTLYLQMNSLRDEDTAVYYCAKVDYSNYLFFDYWGQGTLVTVSSTRGMRTEDLPKAVVFLEPQWYRVLEKDSVTLKCQGAYSPEDNSTQWFHNESLISSQASSYFIDAATVDDSGEYRCQTNLSTLSDPVQLEVHIGWLLLQAPRWVFKEEDPIHLRCHSWKNTALHKVTYLQNGKGRKYFHHNSDFYIPKATLKDSGSYFCRGLVGSKNVSSETVNITITQGLAVPTISSFFPPGYQVSFCLVMVLLFAVDTGLYFSVKTNIRSSTRDWKDHKFKWRKDPQDK

SEQ ID NO: 20597 - protein, 786 aa, synthetic construct
MALPVTALLLPLALLLHAARPEIVLTQSPGTLSLSPGEGATLSCRAGQSVRSSYLGWYQQKPGQAPRLLIYGASSRATGIPDRFSGSGSGTDFTLTISRLEPEDFAVYYCQQYGYSPPTFGGGTKLEIKGGGGSGGGGSGGGGSEVQLLESGGGLVQPGGSLRLSCAASGFTFSSYAMSWVRQAPGKGLEWVSVISGSGGRPNYADSVKGRFTISRDNSKNTLYLQMNSLRDEDTAVYYCAKVDYSNYLFFDYWGQGTLVTVSSTRGGSGQQQTLPKPFIWAEPHFMVPKEKQVTICCQGNYGAVEYQLHFEGSLFAVDRPKPPERINKVQFYIPDMNSRMAGQYSCIYRVGELWSEPSNLLDLVVTEMYDTPTLSVHPGPEVISGEKVTFYCRLDTATSMFLLLKEGRSSHVQRGYGKVQAEFPLGPVTTAHRGTYRCFGSYNNHAWSFPSEPVKLLVTGDIENTSLAPEDPTFPADTWGTYLLTTETGLQKDHALWDHTAQNLLRMGLAFLVLVALVWFLVEDWLSRKRTRERASRASTWEGRRRLNTQTLRAKRSGSGVKQTLNFDLLKLAGDVESNPGPSRGHMTEYKPTVRLATRDDVPRAVRTLAAAFADYPATRHTVDPDRHIERVTELQELFLTRVGLDIGKVWVADDGAAVAVWTTPESVEAGAVFAEIGPRMAELSGSRLAAQQQMEGLLAPHRPKEPAWFLATVGVSPDHQGKGLGSAVVLPGVEAAERAGVPAFLETSAPRNLPFYERLGFTVTADVEVPEGPRTWCMTRKPGA

SEQ ID NO: 20598 - protein, 619 aa, synthetic construct
MALPVTALLLPLALLLHAARPEIVLTQSPGTLSLSPGEGATLSCRAGQSVRSSYLGWYQQKPGQAPRLLIYGASSRATGIPDRFSGSGSGTDFTLTISRLEPEDFAVYYCQQYGYSPPTFGGGTKLEIKGGGGSGGGGSGGGGSEVQLLESGGGLVQPGGSLRLSCAASGFTFSSYAMSWVRQAPGKGLEWVSVISGSGGRPNYADSVKGRFTISRDNSKNTLYLQMNSLRDEDTAVYYCAKVDYSNYLFFDYWGQGTLVTVSSTRKIEVMYPPPYLDNEKSNGTIIHVKGARGDIENTSLAPEDPTFPADTWGTYLLTTETGLQKDHALWDHTAQNLLRMGLAFLVLVALVWFLVEDWLSRKRTRERASRASTWEGRRRLNTQTLRAKRSGSGVKQTLNFDLLKLAGDVESNPGPSRGHMTEYKPTVRLATRDDVPRAVRTLAAAFADYPATRHTVDPDRHIERVTELQELFLTRVGLDIGKVWVADDGAAVAVWTTPESVEAGAVFAEIGPRMAELSGSRLAAQQQMEGLLAPHRPKEPAWFLATVGVSPDHQGKGLGSAVVLPGVEAAERAGVPAFLETSAPRNLPFYERLGFTVTADVEVPEGPRTWCMTRKPGA

SEQ ID NO: 20599 - protein, 706 aa, synthetic construct
MALPVTALLLPLALLLHAARPEIVLTQSPGTLSLSPGEGATLSCRAGQSVRSSYLGWYQQKPGQAPRLLIYGASSRATGIPDRFSGSGSGTDFTLTISRLEPEDFAVYYCQQYGYSPPTFGGGTKLEIKGGGGSGGGGSGGGGSEVQLLESGGGLVQPGGSLRLSCAASGFTFSSYAMSWVRQAPGKGLEWVSVISGSGGRPNYADSVKGRFTISRDNSKNTLYLQMNSLRDEDTAVYYCAKVDYSNYLFFDYWGQGTLVTVSSTRLWVSQPPEIRTLEGSSAFLPCSFNASQGRLAIGSVTWFRDEVVPGKEVRNGTPEFRGRLAPLASSRFLHDHQAELHIRDVRGHDASIYVCRVEVLGLGVGTGNGTRLVVEKEHPQLGAGTVLLLRAGFYAVSFLSVAVGSTVYYQGKCLTWKGPRRQLPAVVPAPLPPPCGSSAHLLPPVPGGRAKRSGSGVKQTLNFDLLKLAGDVESNPGPSRMYRMQLLSCIALSLALVTNSAPTSSSTKKTQLQLEHLLLDLQMILNGINNYKNPKLTEMLTAKFYMPKKATELKHLQCLEEELKPLEEVLNLAQSKNFHLRPRDLISNINVIVLELKGSETTFMCEYADETATIVEFLNRWITFCQSIISTLTKIEVMYPPPYLDNEKSNGTIIHVKGKHLCPSPLFPGPSKPFWVLVVVGGVLACYSLLVTVAFIIFWVRSKRS

SEQ ID NO: 20600 - protein, 682 aa, synthetic construct
MALPVTALLLPLALLLHAARPEIVLTQSPGTLSLSPGEGATLSCRAGQSVRSSYLGWYQQKPGQAPRLLIYGASSRATGIPDRFSGSGSGTDFTLTISRLEPEDFAVYYCQQYGYSPPTFGGGTKLEIKGGGGSGGGGSGGGGSEVQLLESGGGLVQPGGSLRLSCAASGFTFSSYAMSWVRQAPGKGLEWVSVISGSGGRPNYADSVKGRFTISRDNSKNTLYLQMNSLRDEDTAVYYCAKVDYSNYLFFDYWGQGTLVTVSSTRLWVSQPPEIRTLEGSSAFLPCSFNASQGRLAIGSVTWFRDEVVPGKEVRNGTPEFRGRLAPLASSRFLHDHQAELHIRDVRGHDASIYVCRVEVLGLGVGTGNGTRLVVEKEHPQLGAGTVLLLRAGFYAVSFLSVAVGSTVYYQGKCLTWKGPRRQLPAVVPAPLPPPCGSSAHLLPPVPGGRAKRSGSGVKQTLNFDLLKLAGDVESNPGPSRGHMTEYKPTVRLATRDDVPRAVRTLAAAFADYPATRHTVDPDRHIERVTELQELFLTRVGLDIGKVWVADDGAAVAVWTTPESVEAGAVFAEIGPRMAELSGSRLAAQQQMEGLLAPHRPKEPAWFLATVGVSPDHQGKGLGSAVVLPGVEAAERAGVPAFLETSAPRNLPFYERLGFTVTADVEVPEGPRTWCMTRKPGA

SEQ ID NO: 20601 - protein, 358 aa, synthetic construct
MALPVTALLLPLALLLHAARPEIVLTQSPGTLSLSPGEGATLSCRAGQSVRSSYLGWYQQKPGQAPRLLIYGASSRATGIPDRFSGSGSGTDFTLTISRLEPEDFAVYYCQQYGYSPPTFGGGTKLEIKGGGGSGGGGSGGGGSEVQLLESGGGLVQPGGSLRLSCAASGFTFSSYAMSWVRQAPGKGLEWVSVISGSGGRPNYADSVKGRFTISRDNSKNTLYLQMNSLRDEDTAVYYCAKVDYSNYLFFDYWGQGTLVTVSSTRKIEVMYPPPYLDNEKSNGTIIHVKGARITQGLAVSTISSFFPPGYQVSFCLVMVLLFAVDTGLYFSVKTNIRSSTRDWKDHKFKWRKDPQDK

SEQ ID NO: 20602 - protein, 358 aa, synthetic construct
MALPVTALLLPLALLLHAARPEIVLTQSPGTLSLSPGEGATLSCRAGQSVRSSYLGWYQQKPGQAPRLLIYGASSRATGIPDRFSGSGSGTDFTLTISRLEPEDFAVYYCQQYGYSPPTFGGGTKLEIKGGGGSGGGGSGGGGSEVQLLESGGGLVQPGGSLRLSCAASGFTFSSYAMSWVRQAPGKGLEWVSVISGSGGRPNYADSVKGRFTISRDNSKNTLYLQMNSLRDEDTAVYYCAKVDYSNYLFFDYWGQGTLVTVSSTRKIEVMYPPPYLDNEKSNGTIIHVKGARITQGLAVPTISSFFPPGYQVSFCLVMVLLFAVDTGLYFSVKTNIRSSTRDWKDHKFKWRKDPQDK

SEQ ID NO: 20603 - protein, 337 aa, synthetic construct
MALPVTALLLPLALLLHAARPEIVLTQSPGTLSLSPGEGATLSCRAGQSVRSSYLGWYQQKPGQAPRLLIYGASSRATGIPDRFSGSGSGTDFTLTISRLEPEDFAVYYCQQYGYSPPTFGGGTKLEIKGGGGSGGGGSGGGGSEVQLLESGGGLVQPGGSLRLSCAASGFTFSSYAMSWVRQAPGKGLEWVSVISGSGGRPNYADSVKGRFTISRDNSKNTLYLQMNSLRDEDTAVYYCAKVDYSNYLFFDYWGQGTLVTVSSTRKIEVMYPPPYLDNEKSNGTIIHVKGARITQGLAVSTISSFSPPGYQVSFCLVMVLLFAVDTGLYFSVKTNI

SEQ ID NO: 20604 - protein, 368 aa, synthetic construct
MALPVTALLLPLALLLHAARPEIVLTQSPGTLSLSPGEGATLSCRAGQSVRSSYLGWYQQKPGQAPRLLIYGASSRATGIPDRFSGSGSGTDFTLTISRLEPEDFAVYYCQQYGYSPPTFGGGTKLEIKGGGGSGGGGSGGGGSEVQLLESGGGLVQPGGSLRLSCAASGFTFSSYAMSWVRQAPGKGLEWVSVISGSGGRPNYADSVKGRFTISRDNSKNTLYLQMNSLRDEDTAVYYCAKVDYSNYLFFDYWGQGTLVTVSSTRKIEVMYPPPYLDNEKSNGTIIHVKGARVEKEHPQLGAGTVLLLRAGFYAVSFLSVAVGSTVYYQGKCLTWKGPRRQLPAVVPAPLPPPCGSSAHLLPPVPGG

SEQ ID NO: 20605 - protein, 449 aa, synthetic construct
MALPVTALLLPLALLLHAARPEIVLTQSPGTLSLSPGEGATLSCRAGQSVRSSYLGWYQQKPGQAPRLLIYGASSRATGIPDRFSGSGSGTDFTLTISRLEPEDFAVYYCQQYGYSPPTFGGGTKLEIKGGGGSGGGGSGGGGSEVQLLESGGGLVQPGGSLRLSCAASGFTFSSYAMSWVRQAPGKGLEWVSVISGSGGRPNYADSVKGRFTISRDNSKNTLYLQMNSLRDEDTAVYYCAKVDYSNYLFFDYWGQGTLVTVSSTRKIEVMYPPPYLDNEKSNGTIIHVKGARKSVRFYLVVSPASASTQTSWTPRDLVSSQTQTQSCVPPTAGARQAPESPSTIPVPSQPQNSTLRPGPAAPIALVPVFCGLLVAKSLVLSALLVWWGDIWWKTMMELRSLDTQKATCHLQQVTDLPWTSVSSPVEREILYHTVARTKISDDDDEHTL

SEQ ID NO: 20606 - protein, 386 aa, synthetic construct
MALPVTALLLPLALLLHAARPEIVLTQSPGTLSLSPGEGATLSCRAGQSVRSSYLGWYQQKPGQAPRLLIYGASSRATGIPDRFSGSGSGTDFTLTISRLEPEDFAVYYCQQYGYSPPTFGGGTKLEIKGGGGSGGGGSGGGGSEVQLLESGGGLVQPGGSLRLSCAASGFTFSSYAMSWVRQAPGKGLEWVSVISGSGGRPNYADSVKGRFTISRDNSKNTLYLQMNSLRDEDTAVYYCAKVDYSNYLFFDYWGQGTLVTVSSTRKIEVMYPPPYLDNEKSNGTIIHVKGARGDIENTSLAPEDPTFPADTWGTYLLTTETGLQKDHALWDHTAQNLLRMGLAFLVLVALVWFLVEDWLSRKRTRERASRASTWEGRRRLNTQTL

SEQ ID NO: 20607 - protein, 982 aa, synthetic construct
MALPVTALLLPLALLLHAARPEIVLTQSPGTLSLSPGEGATLSCRAGQSVRSSYLGWYQQKPGQAPRLLIYGASSRATGIPDRFSGSGSGTDFTLTISRLEPEDFAVYYCQQYGYSPPTFGGGTKLEIKLEGQPKANPTVTLFPPSSEELQANKATLVCLISDFYPGAVTVAWKADGSPVKAGVETTKPSKQSNNKYAASSYLSLTPEQWKSHRSYSCQVTHEGSTVEKTVAPTECSGSQSFGLLDPKLCYLLDGILFIYGVILTALFLRVKFSRSADAPAYQQGQNQLYNELNLGRREEYDVLDKRRGRDPEMGGKPQRRKNPQEGLYNELQKDKMAEAYSEIGMKGERRRGKGHDGLYQGLSTATKDTYDALHMQALPPRRAKRSGSGATNFSLLKQAGDVEENPGPTSMDWIWRILFLVGAATGAHSFEEVQLLESGGGLVQPGGSLRLSCAASGFTFSSYAMSWVRQAPGKGLEWVSVISGSGGRPNYADSVKGRFTISRDNSKNTLYLQMNSLRDEDTAVYYCAKVDYSNYLFFDYWGQGTLVTVSSTRASTKGPSVFPLAPSSKSTSGGTAALGCLVKDYFPEPVTVSWNSGALTSGVHTFPAVLQSSGLYSLSSVVTVPSSSLGTQTYICNVNHKPSNTKVDKRVEPKSCGTGDIENTSLAPEDPTFPADTWGTYLLTTETGLQKDHALWDHTAQNLLRMGLAFLVLVALVWFLVEDWLSRKRTRERASRASTWEGRRRLNTQTLRAKRSGSGATNFSLLKQAGDVEENPGPSRGHMTEYKPTVRLATRDDVPRAVRTLAAAFADYPATRHTVDPDRHIERVTELQELFLTRVGLDIGKVWVADDGAAVAVWTTPESVEAGAVFAEIGPRMAELSGSRLAAQQQMEGLLAPHRPKEPAWFLATVGVSPDHQGKGLGSAVVLPGVEAAERAGVPAFLETSAPRNLPFYERLGFTVTADVEVPEGPRTWCMTRKPGA

SEQ ID NO: 20608 - protein, 1048 aa, synthetic construct
MALPVTALLLPLALLLHAARPEIVLTQSPGTLSLSPGEGATLSCRAGQSVRSSYLGWYQQKPGQAPRLLIYGASSRATGIPDRFSGSGSGTDFTLTISRLEPEDFAVYYCQQYGYSPPTFGGGTKLEIKLEGQPKANPTVTLFPPSSEELQANKATLVCLISDFYPGAVTVAWKADGSPVKAGVETTKPSKQSNNKYAASSYLSLTPEQWKSHRSYSCQVTHEGSTVEKTVAPTECSGSQSFGLLDPKLCYLLDGILFIYGVILTALFLRVKFSRSADAPAYQQGQNQLYNELNLGRREEYDVLDKRRGRDPEMGGKPQRRKNPQEGLYNELQKDKMAEAYSEIGMKGERRRGKGHDGLYQGLSTATKDTYDALHMQALPPRRAKRSGSGATNFSLLKQAGDVEENPGPTSMDWIWRILFLVGAATGAHSFEEVQLLESGGGLVQPGGSLRLSCAASGFTFSSYAMSWVRQAPGKGLEWVSVISGSGGRPNYADSVKGRFTISRDNSKNTLYLQMNSLRDEDTAVYYCAKVDYSNYLFFDYWGQGTLVTVSSTRASTKGPSVFPLAPSSKSTSGGTAALGCLVKDYFPEPVTVSWNSGALTSGVHTFPAVLQSSGLYSLSSVVTVPSSSLGTQTYICNVNHKPSNTKVDKRVEPKSCGTKSVRFYLVVSPASASTQTSWTPRDLVSSQTQTQSCVPPTAGARQAPESPSTIPVPSQPQNSTLRPGPAAPIALVPVFCGLLVAKSLVLSALLVWWGDIWWKTMMELRSLDTQKATCHLQQVTDLPWTSVSSPVEREILYHTVARTKISDDDDEHTLRAKRSGSGVKQTLNFDLLKLAGDVESNPGPSRGHMTEYKPTVRLATRDDVPRAVRTLAAAFADYPATRHTVDPDRHIERVTELQELFLTRVGLDIGKVWVADDGAAVAVWTTPESVEAGAVFAEIGPRMAELSGSRLAAQQQMEGLLAPHRPKEPAWFLATVGVSPDHQGKGLGSAVVLPGVEAAERAGVPAFLETSAPRNLPFYERLGFTVTADVEVPEGPRTWCMTRKPGA

SEQ ID NO: 20609 - protein, 968 aa, synthetic construct
MALPVTALLLPLALLLHAARPEIVLTQSPGTLSLSPGEGATLSCRAGQSVRSSYLGWYQQKPGQAPRLLIYGASSRATGIPDRFSGSGSGTDFTLTISRLEPEDFAVYYCQQYGYSPPTFGGGTKLEIKLEGQPKANPTVTLFPPSSEELQANKATLVCLISDFYPGAVTVAWKADGSPVKAGVETTKPSKQSNNKYAASSYLSLTPEQWKSHRSYSCQVTHEGSTVEKTVAPTECSGSQSFGLLDPKLCYLLDGILFIYGVILTALFLRVKFSRSADAPAYQQGQNQLYNELNLGRREEYDVLDKRRGRDPEMGGKPQRRKNPQEGLYNELQKDKMAEAYSEIGMKGERRRGKGHDGLYQGLSTATKDTYDALHMQALPPRRAKRSGSGATNFSLLKQAGDVEENPGPTSMDWIWRILFLVGAATGAHSFEEVQLLESGGGLVQPGGSLRLSCAASGFTFSSYAMSWVRQAPGKGLEWVSVISGSGGRPNYADSVKGRFTISRDNSKNTLYLQMNSLRDEDTAVYYCAKVDYSNYLFFDYWGQGTLVTVSSTRASTKGPSVFPLAPSSKSTSGGTAALGCLVKDYFPEPVTVSWNSGALTSGVHTFPAVLQSSGLYSLSSVVTVPSSSLGTQTYICNVNHKPSNTKVDKRVEPKSCGTVVEKEHPQLGAGTVLLLRAGFYAVSFLSVAVGSTVYYQGKCLTWKGPRRQLPAVVPAPLPPPCGSSAHLLPPVPGGRAKRSGSGVKQTLNFDLLKLAGDVESNPGPSRGHMTEYKPTVRLATRDDVPRAVRTLAAAFADYPATRHTVDPDRHIERVTELQELFLTRVGLDIGKVWVADDGAAVAVWTTPESVEAGAVFAEIGPRMAELSGSRLAAQQQMEGLLAPHRPKEPAWFLATVGVSPDHQGKGLGSAVVLPGVEAAERAGVPAFLETSAPRNLPFYERLGFTVTADVEVPEGPRTWCMTRKPGA

SEQ ID NO: 20610 - protein, 997 aa, synthetic construct
MALPVTALLLPLALLLHAARPEIVLTQSPGTLSLSPGEGATLSCRAGQSVRSSYLGWYQQKPGQAPRLLIYGASSRATGIPDRFSGSGSGTDFTLTISRLEPEDFAVYYCQQYGYSPPTFGGGTKLEIKLEDLKNVFPPEVAVFEPSEAEISHTQKATLVCLATGFYPDHVELSWWVNGKEVHSGVSTDPQPLKEQPALNDSRYCLSSRLRVSATFWQNPRNHFRCQVQFYGLSENDEWTQDRAKPVTQIVSAEAWGRADCGSQSFGLLDPKLCYLLDGILFIYGVILTALFLRVKFSRSADAPAYQQGQNQLYNELNLGRREEYDVLDKRRGRDPEMGGKPQRRKNPQEGLYNELQKDKMAEAYSEIGMKGERRRGKGHDGLYQGLSTATKDTYDALHMQALPPRRAKRSGSGATNFSLLKQAGDVEENPGPTSMDWIWRILFLVGAATGAHSFEEVQLLESGGGLVQPGGSLRLSCAASGFTFSSYAMSWVRQAPGKGLEWVSVISGSGGRPNYADSVKGRFTISRDNSKNTLYLQMNSLRDEDTAVYYCAKVDYSNYLFFDYWGQGTLVTVSSTRIQNPDPAVYQLRDSKSSDKSVCLFTDFDSQTNVSQSKDSDVYITDKTVLDMRSMDFKSNSAVAWSNKSDFACANAFNNSIIPEDTFFPSPESSCGTGDIENTSLAPEDPTFPADTWGTYLLTTETGLQKDHALWDHTAQNLLRMGLAFLVLVALVWFLVEDWLSRKRTRERASRASTWEGRRRLNTQTLRAKRSGSGATNFSLLKQAGDVEENPGPSRGHMTEYKPTVRLATRDDVPRAVRTLAAAFADYPATRHTVDPDRHIERVTELQELFLTRVGLDIGKVWVADDGAAVAVWTTPESVEAGAVFAEIGPRMAELSGSRLAAQQQMEGLLAPHRPKEPAWFLATVGVSPDHQGKGLGSAVVLPGVEAAERAGVPAFLETSAPRNLPFYERLGFTVTADVEVPEGPRTWCMTRKPGA

SEQ ID NO: 20611 - protein, 1063 aa, synthetic construct
MALPVTALLLPLALLLHAARPEIVLTQSPGTLSLSPGEGATLSCRAGQSVRSSYLGWYQQKPGQAPRLLIYGASSRATGIPDRFSGSGSGTDFTLTISRLEPEDFAVYYCQQYGYSPPTFGGGTKLEIKLEDLKNVFPPEVAVFEPSEAEISHTQKATLVCLATGFYPDHVELSWWVNGKEVHSGVSTDPQPLKEQPALNDSRYCLSSRLRVSATFWQNPRNHFRCQVQFYGLSENDEWTQDRAKPVTQIVSAEAWGRADCGSQSFGLLDPKLCYLLDGILFIYGVILTALFLRVKFSRSADAPAYQQGQNQLYNELNLGRREEYDVLDKRRGRDPEMGGKPQRRKNPQEGLYNELQKDKMAEAYSEIGMKGERRRGKGHDGLYQGLSTATKDTYDALHMQALPPRRAKRSGSGATNFSLLKQAGDVEENPGPTSMDWIWRILFLVGAATGAHSFEEVQLLESGGGLVQPGGSLRLSCAASGFTFSSYAMSWVRQAPGKGLEWVSVISGSGGRPNYADSVKGRFTISRDNSKNTLYLQMNSLRDEDTAVYYCAKVDYSNYLFFDYWGQGTLVTVSSTRIQNPDPAVYQLRDSKSSDKSVCLFTDFDSQTNVSQSKDSDVYITDKTVLDMRSMDFKSNSAVAWSNKSDFACANAFNNSIIPEDTFFPSPESSCGTKSVRFYLVVSPASASTQTSWTPRDLVSSQTQTQSCVPPTAGARQAPESPSTIPVPSQPQNSTLRPGPAAPIALVPVFCGLLVAKSLVLSALLVWWGDIWWKTMMELRSLDTQKATCHLQQVTDLPWTSVSSPVEREILYHTVARTKISDDDDEHTLRAKRSGSGVKQTLNFDLLKLAGDVESNPGPSRGHMTEYKPTVRLATRDDVPRAVRTLAAAFADYPATRHTVDPDRHIERVTELQELFLTRVGLDIGKVWVADDGAAVAVWTTPESVEAGAVFAEIGPRMAELSGSRLAAQQQMEGLLAPHRPKEPAWFLATVGVSPDHQGKGLGSAVVLPGVEAAERAGVPAFLETSAPRNLPFYERLGFTVTADVEVPEGPRTWCMTRKPGA

SEQ ID NO: 20612 - protein, 983 aa, synthetic construct
MALPVTALLLPLALLLHAARPEIVLTQSPGTLSLSPGEGATLSCRAGQSVRSSYLGWYQQKPGQAPRLLIYGASSRATGIPDRFSGSGSGTDFTLTISRLEPEDFAVYYCQQYGYSPPTFGGGTKLEIKLEDLKNVFPPEVAVFEPSEAEISHTQKATLVCLATGFYPDHVELSWWVNGKEVHSGVSTDPQPLKEQPALNDSRYCLSSRLRVSATFWQNPRNHFRCQVQFYGLSENDEWTQDRAKPVTQIVSAEAWGRADCGSQSFGLLDPKLCYLLDGILFIYGVILTALFLRVKFSRSADAPAYQQGQNQLYNELNLGRREEYDVLDKRRGRDPEMGGKPQRRKNPQEGLYNELQKDKMAEAYSEIGMKGERRRGKGHDGLYQGLSTATKDTYDALHMQALPPRRAKRSGSGATNFSLLKQAGDVEENPGPTSMDWIWRILFLVGAATGAHSFEEVQLLESGGGLVQPGGSLRLSCAASGFTFSSYAMSWVRQAPGKGLEWVSVISGSGGRPNYADSVKGRFTISRDNSKNTLYLQMNSLRDEDTAVYYCAKVDYSNYLFFDYWGQGTLVTVSSTRIQNPDPAVYQLRDSKSSDKSVCLFTDFDSQTNVSQSKDSDVYITDKTVLDMRSMDFKSNSAVAWSNKSDFACANAFNNSIIPEDTFFPSPESSCGTVVEKEHPQLGAGTVLLLRAGFYAVSFLSVAVGSTVYYQGKCLTWKGPRRQLPAVVPAPLPPPCGSSAHLLPPVPGGRAKRSGSGVKQTLNFDLLKLAGDVESNPGPSRGHMTEYKPTVRLATRDDVPRAVRTLAAAFADYPATRHTVDPDRHIERVTELQELFLTRVGLDIGKVWVADDGAAVAVWTTPESVEAGAVFAEIGPRMAELSGSRLAAQQQMEGLLAPHRPKEPAWFLATVGVSPDHQGKGLGSAVVLPGVEAAERAGVPAFLETSAPRNLPFYERLGFTVTADVEVPEGPRTWCMTRKPGA

SEQ ID NO: 20613 - protein, 954 aa, synthetic construct
MALPVTALLLPLALLLHAARPEIVLTQSPGTLSLSPGEGATLSCRAGQSVRSSYLGWYQQKPGQAPRLLIYGASSRATGIPDRFSGSGSGTDFTLTISRLEPEDFAVYYCQQYGYSPPTFGGGTKLEIKLEGQPKANPTVTLFPPSSEELQANKATLVCLISDFYPGAVTVAWKADGSPVKAGVETTKPSKQSNNKYAASSYLSLTPEQWKSHRSYSCQVTHEGSTVEKTVAPTECSGSQSFGLLDPKLCYLLDGILFIYGVILTALFLRVKFSRSADAPAYQQGQNQLYNELNLGRREEYDVLDKRRGRDPEMGGKPQRRKNPQEGLYNELQKDKMAEAYSEIGMKGERRRGKGHDGLYQGLSTATKDTYDALHMQALPPRRAKRSGSGATNFSLLKQAGDVEENPGPTSMDWIWRILFLVGAATGAHSFEEVQLLESGGGLVQPGGSLRLSCAASGFTFSSYAMSWVRQAPGKGLEWVSVISGSGGRPNYADSVKGRFTISRDNSKNTLYLQMNSLRDEDTAVYYCAKVDYSNYLFFDYWGQGTLVTVSSTRASTKGPSVFPLAPSSKSTSGGTAALGCLVKDYFPEPVTVSWNSGALTSGVHTFPAVLQSSGLYSLSSVVTVPSSSLGTQTYICNVNHKPSNTKVDKRVEPKSCGTITQGLAVSTISSFFPPGYQVSFCLVMVLLFAVDTGLYFSVKTNIRSSTRDWKDHKFKWRKDPQDKRAKRSGSGATNFSLLKQAGDVEENPGPSRGHMTEYKPTVRLATRDDVPRAVRTLAAAFADYPATRHTVDPDRHIERVTELQELFLTRVGLDIGKVWVADDGAAVAVWTTPESVEAGAVFAEIGPRMAELSGSRLAAQQQMEGLLAPHRPKEPAWFLATVGVSPDHQGKGLGSAVVLPGVEAAERAGVPAFLETSAPRNLPFYERLGFTVTADVEVPEGPRTWCMTRKPGA

SEQ ID NO: 20614 - protein, 969 aa, synthetic construct
MALPVTALLLPLALLLHAARPEIVLTQSPGTLSLSPGEGATLSCRAGQSVRSSYLGWYQQKPGQAPRLLIYGASSRATGIPDRFSGSGSGTDFTLTISRLEPEDFAVYYCQQYGYSPPTFGGGTKLEIKLEDLKNVFPPEVAVFEPSEAEISHTQKATLVCLATGFYPDHVELSWWVNGKEVHSGVSTDPQPLKEQPALNDSRYCLSSRLRVSATFWQNPRNHFRCQVQFYGLSENDEWTQDRAKPVTQIVSAEAWGRADCGSQSFGLLDPKLCYLLDGILFIYGVILTALFLRVKFSRSADAPAYQQGQNQLYNELNLGRREEYDVLDKRRGRDPEMGGKPQRRKNPQEGLYNELQKDKMAEAYSEIGMKGERRRGKGHDGLYQGLSTATKDTYDALHMQALPPRRAKRSGSGATNFSLLKQAGDVEENPGPTSMDWIWRILFLVGAATGAHSFEEVQLLESGGGLVQPGGSLRLSCAASGFTFSSYAMSWVRQAPGKGLEWVSVISGSGGRPNYADSVKGRFTISRDNSKNTLYLQMNSLRDEDTAVYYCAKVDYSNYLFFDYWGQGTLVTVSSTRIQNPDPAVYQLRDSKSSDKSVCLFTDFDSQTNVSQSKDSDVYITDKTVLDMRSMDFKSNSAVAWSNKSDFACANAFNNSIIPEDTFFPSPESSCGTITQGLAVSTISSFFPPGYQVSFCLVMVLLFAVDTGLYFSVKTNIRSSTRDWKDHKFKWRKDPQDKRAKRSGSGATNFSLLKQAGDVEENPGPSRGHMTEYKPTVRLATRDDVPRAVRTLAAAFADYPATRHTVDPDRHIERVTELQELFLTRVGLDIGKVWVADDGAAVAVWTTPESVEAGAVFAEIGPRMAELSGSRLAAQQQMEGLLAPHRPKEPAWFLATVGVSPDHQGKGLGSAVVLPGVEAAERAGVPAFLETSAPRNLPFYERLGFTVTADVEVPEGPRTWCMTRKPGA

SEQ ID NO: 20615 - protein, 652 aa, synthetic construct
MALPVTALLLPLALLLHAARPEIVLTQSPGTLSLSPGEGATLSCRAGQSVRSSYLGWYQQKPGQAPRLLIYGASSRATGIPDRFSGSGSGTDFTLTISRLEPEDFAVYYCQQYGYSPPTFGGGTKLEIKLEGQPKANPTVTLFPPSSEELQANKATLVCLISDFYPGAVTVAWKADGSPVKAGVETTKPSKQSNNKYAASSYLSLTPEQWKSHRSYSCQVTHEGSTVEKTVAPTECSGSLGEPQLCYILDAILFLYGIVLTLLYCRLKIQVRKAAITSYEKSDGVYTGLSTRNQETYETLKHEKPPQRAKRSGSGATNFSLLKQAGDVEENPGPTSMDWIWRILFLVGAATGAHSFEEVQLLESGGGLVQPGGSLRLSCAASGFTFSSYAMSWVRQAPGKGLEWVSVISGSGGRPNYADSVKGRFTISRDNSKNTLYLQMNSLRDEDTAVYYCAKVDYSNYLFFDYWGQGTLVTVSSTRASTKGPSVFPLAPSSKSTSGGTAALGCLVKDYFPEPVTVSWNSGALTSGVHTFPAVLQSSGLYSLSSVVTVPSSSLGTQTYICNVNHKPSNTKVDKRVEPKSCGTLGEPQLCYILDAILFLYGIVLTLLYCRLKIQVRKAAITSYEKSDGVYTGLSTRNQETYETLKHEKPPQ

SEQ ID NO: 20616 - protein, 1029 aa, synthetic construct
MALPVTALLLPLALLLHAARPEIVLTQSPGTLSLSPGEGATLSCRAGQSVRSSYLGWYQQKPGQAPRLLIYGASSRATGIPDRFSGSGSGTDFTLTISRLEPEDFAVYYCQQYGYSPPTFGGGTKLEIKGQPKANPTVTLFPPSSEELQANKATLVCLISDFYPGAVTVAWKADGSPVKAGVETTKPSKQSNNKYAASSYLSLTPEQWKSHRSYSCQVTHEGSTVEKTVAPTECSGSQSFGLLDPKLCYLLDGILFIYGVILTALFLRVKFSRSADAPAYQQGQNQLYNELNLGRREEYDVLDKRRGRDPEMGGKPRRKNPQEGLYNELQKDKMAEAYSEIGMKGERRRGKGHDGLYQGLSTATKDTYDALHMQALPPRRAKRSGSGATNFSLLKQAGDVEENPGPTSMDWIWRILFLVGAATGAHSFEEVQLLESGGGLVQPGGSLRLSCAASGFTFSSYAMSWVRQAPGKGLEWVSVISGSGGRPNYADSVKGRFTISRDNSKNTLYLQMNSLRDEDTAVYYCAKVDYSNYLFFDYWGQGTLVTVSSASTKGPSVFPLAPSSKSTSGGTAALGCLVKDYFPEPVTVSWNSGALTSGVHTFPAVLQSSGLYSLSSVVTVPSSSLGTQTYICNVNHKPSNTKVDKRVEPKSCGTQSFGLLDPKLCYLLDGILFIYGVILTALFLRVKFSRSADAPAYQQGQNQLYNELNLGRREEYDVLDKRRGRDPEMGGKPRRKNPQEGLYNELQKDKMAEAYSEIGMKGERRRGKGHDGLYQGLSTATKDTYDALHMQALPPRRAKRSGSGVKQTLNFDLLKLAGDVESNPGPSRGHMTEYKPTVRLATRDDVPRAVRTLAAAFADYPATRHTVDPDRHIERVTELQELFLTRVGLDIGKVWVADDGAAVAVWTTPESVEAGAVFAEIGPRMAELSGSRLAAQQQMEGLLAPHRPKEPAWFLATVGVSPDHQGKGLGSAVVLPGVEAAERAGVPAFLETSAPRNLPFYERLGFTVTADVEVPEGPRTWCMTRKPGA

SEQ ID NO: 20617 - protein, 815 aa, synthetic construct
MALPVTALLLPLALLLHAARPEIVLTQSPGTLSLSPGEGATLSCRAGQSVRSSYLGWYQQKPGQAPRLLIYGASSRATGIPDRFSGSGSGTDFTLTISRLEPEDFAVYYCQQYGYSPPTFGGGTKLEIKLEDLKNVFPPEVAVFEPSEAEISHTQKATLVCLATGFYPDHVELSWWVNGKEVHSGVSTDPQPLKEQPALNDSRYCLSSRLRVSATFWQNPRNHFRCQVQFYGLSENDEWTQDRAKPVTQIVSAEAWGRADCGSQSFGLLDPKLCYLLDGILFIYGVILTALFLRVKFSRSADAPAYQQGQNQLYNELNLGRREEYDVLDKRRGRDPEMGGKPRRKNPQEGLYNELQKDKMAEAYSEIGMKGERRRGKGHDGLYQGLSTATKDTYDALHMQALPPRRAKRSGSGATNFSLLKQAGDVEENPGPTSMDWIWRILFLVGAATGAHSFEEVQLLESGGGLVQPGGSLRLSCAASGFTFSSYAMSWVRQAPGKGLEWVSVISGSGGRPNYADSVKGRFTISRDNSKNTLYLQMNSLRDEDTAVYYCAKVDYSNYLFFDYWGQGTLVTVSSTRIQNPDPAVYQLRDSKSSDKSVCLFTDFDSQTNVSQSKDSDVYITDKTVLDMRSMDFKSNSAVAWSNKSDFACANAFNNSIIPEDTFFPSPESSCGTQSFGLLDPKLCYLLDGILFIYGVILTALFLRVKFSRSADAPAYQQGQNQLYNELNLGRREEYDVLDKRRGRDPEMGGKPRRKNPQEGLYNELQKDKMAEAYSEIGMKGERRRGKGHDGLYQGLSTATKDTYDALHMQALPPR

SEQ ID NO: 20618 - protein, 496 aa, synthetic construct
MALPVTALLLPLALLLHAARPEIVLTQSPGTLSLSPGERATLSCRASQSIRSSYLAWYQQKPGQAPRLLIYGASSRATGIPDRFSGSGSGTDFTLTISRLEPEDFAVYYCQQYGDLPFTFGPGTKLEIKGGGGSGGGGSGGGGSEVQLLESGGGMVQPGGSLRLSCAASGFTFSSYAMSWVRQAPGKGLEWVSAISGSGGRTFYADSVEGRFTISRDNSKNTLYLQMNSLRAEDTAVYYCAKHDYSNYPYFDYWGQGTLVTVSSTREQKLISEEDLKIEVMYPPPYLDNEKSNGTIIHVKGKHLCPSPLFPGPSKPFWVLVVVGGVLACYSLLVTVAFIIFWVRSKRSRLLHSDYMNMTPRRPGPTRKHYQPYAPPRDFAAYRSRVKFSRSADAPAYQQGQNQLYNELNLGRREEYDVLDKRRGRDPEMGGKPRRKNPQEGLYNELQKDKMAEAYSEIGMKGERRRGKGHDGLYQGLSTATKDTYDALHMQALPPR

SEQ ID NO: 20619 - protein, 502 aa, synthetic construct
MALPVTALLLPLALLLHAARPEIVLTQSPGTLSLSPGERATLSCRASQSIRSSYLAWYQQKPGQAPRLLIYGASSRATGIPDRFSGSGSGTDFTLTISRLEPEDFAVYYCQQYGDLPFTFGPGTKLEIKGGGGSGGGGSGGGGSEVQLLESGGGMVQPGGSLRLSCAASGFTFSSYAMSWVRQAPGKGLEWVSAISGSGGRTFYADSVEGRFTISRDNSKNTLYLQMNSLRAEDTAVYYCAKHDYSNYPYFDYWGQGTLVTVSSTREQKLISEEDLAKPTTTPAPRPPTPAPTIASQPLSLRPEACRPAAGGAVHTRGLDFACDIYIWAPLAGTCGVLLLSLVITLYCKRGRKKLLYIFKQPFMRPVQTTQEEDGCSCRFPEEEEGGCELRVKFSRSADAPAYQQGQNQLYNELNLGRREEYDVLDKRRGRDPEMGGKPRRKNPQEGLYNELQKDKMAEAYSEIGMKGERRRGKGHDGLYQGLSTATKDTYDALHMQALPPR

SEQ ID NO: 20620 - protein, 502 aa, synthetic construct
MALPVTALLLPLALLLHAARPEVQLLESGGGMVQPGGSLRLSCAASGFTFSSYAMSWVRQAPGKGLEWVSAISGSGGRTFYADSVEGRFTISRDNSKNTLYLQMNSLRAEDTAVYYCAKHDYSNYPYFDYWGQGTLVTVSSGGGGSGGGGSGGGGSEIVLTQSPGTLSLSPGERATLSCRASQSIRSSYLAWYQQKPGQAPRLLIYGASSRATGIPDRFSGSGSGTDFTLTISRLEPEDFAVYYCQQYGDLPFTFGPGTKLEIKTREQKLISEEDLAKPTTTPAPRPPTPAPTIASQPLSLRPEACRPAAGGAVHTRGLDFACDIYIWAPLAGTCGVLLLSLVITLYCKRGRKKLLYIFKQPFMRPVQTTQEEDGCSCRFPEEEEGGCELRVKFSRSADAPAYQQGQNQLYNELNLGRREEYDVLDKRRGRDPEMGGKPRRKNPQEGLYNELQKDKMAEAYSEIGMKGERRRGKGHDGLYQGLSTATKDTYDALHMQALPPR

SEQ ID NO: 20621 - protein, 915 aa, synthetic construct
MALPVTALLLPLALLLHAARPEIVLTQSPGTLSLSPGERATLSCRASQSIRSSYLAWYQQKPGQAPRLLIYGASSRATGIPDRFSGSGSGTDFTLTISRLEPEDFAVYYCQQYGDLPFTFGPGTKLEIKGGGGSGGGGSGGGGSEVQLLESGGGMVQPGGSLRLSCAASGFTFSSYAMSWVRQAPGKGLEWVSAISGSGGRTFYADSVEGRFTISRDNSKNTLYLQMNSLRAEDTAVYYCAKHDYSNYPYFDYWGQGTLVTVSSTREQKLISEEDLAKPTTTPAPRPPTPAPTIASQPLSLRPEACRPAAGGAVHTRGLDFACDIYIWAPLAGTCGVLLLSLVITLYCGRARVKFSRSADAPAYQQGQNQLYNELNLGRREEYDVLDKRRGRDPEMGGKPRRKNPQEGLYNELQKDKMAEAYSEIGMKGERRRGKGHDGLYQGLSTATKDTYDALHMQALPPRSRGSGATNFSLLKQAGDVEENPGPGIHMATYEVLCEVARKLGTDDREVVLFLLNVFIPQPTLAQLIGALRALKEEGRLTFPLLAECLFRAGRRDLLRDLLHLDPRFLERHLAGTMSYFSPYQLTVLHVDGELCARDIRSLIFLSKDTIGSRSTPQTFLHWVYCMENLDLLGPTDVDALMSMLRSLSRVDLQRQVQTLMGLHLSGPSHSQHYRHTPLETDFYDYKDDDDKTSGSGEGRGSLLTCGDVEENPGPHMTEYKPTVRLATRDDVPRAVRTLAAAFADYPATRHTVDPDRHIERVTELQELFLTRVGLDIGKVWVADDGAAVAVWTTPESVEAGAVFAEIGPRMAELSGSRLAAQQQMEGLLAPHRPKEPAWFLATVGVSPDHQGKGLGSAVVLPGVEAAERAGVPAFLETSAPRNLPFYERLGFTVTADVEVPEGPRTWCMTRKPGA

SEQ ID NO: 20622 - protein, 855 aa, synthetic construct
MALPVTALLLPLALLLHAARPEIVLTQSPGTLSLSPGERATLSCRASQSIRSSYLAWYQQKPGQAPRLLIYGASSRATGIPDRFSGSGSGTDFTLTISRLEPEDFAVYYCQQYGDLPFTFGPGTKLEIKLEIQNPDPAVYQLRDSKSSDKSVCLFTDFDSQTNVSQSKDSDVYITDKCVLDMRSMDFKSNSAVAWSNKSDFACANAFNNSIIPEDTFFPSSDVPCDVKLVEKSFETDTNLNFQNLSVIGFRILLLKVAGFNLLMTLRLWSSRAKRSGSGVKQTLNFDLLKLAGDVESNPGPTSMDWIWRILFLVGAATGAHSFEEVQLLESGGGMVQPGGSLRLSCAASGFTFSSYAMSWVRQAPGKGLEWVSAISGSGGRTFYADSVEGRFTISRDNSKNTLYLQMNSLRAEDTAVYYCAKHDYSNYPYFDYWGQGTLVTVSSTREDLKNVFPPEVAVFEPSKAEIAHTQKATLVCLATGFYPDHVELSWWVNGKEVHSGVCTDPQPLKEQPALNDSRYCLSSRLRVSATFWQNPRNHFRCQVQFYGLSENDEWTQDRAKPVTQIVSAEAWGRADCGITSASYHQGVLSATILYEILLGKATLYAVLVSALVLMAMVKRKDSRGRAKRSGSGATNFSLLKQAGDVEENPGPSRGHMTEYKPTVRLATRDDVPRAVRTLAAAFADYPATRHTVDPDRHIERVTELQELFLTRVGLDIGKVWVADDGAAVAVWTTPESVEAGAVFAEIGPRMAELSGSRLAAQQQMEGLLAPHRPKEPAWFLATVGVSPDHQGKGLGSAVVLPGVEAAERAGVPAFLETSAPRNLPFYERLGFTVTADVEVPEGPRTWCMTRKPGA

SEQ ID NO: 20623 - protein, 854 aa, synthetic construct
MALPVTALLLPLALLLHAARPEIVLTQSPGTLSLSPGERATLSCRASQSIRSSYLAWYQQKPGQAPRLLIYGASSRATGIPDRFSGSGSGTDFTLTISRLEPEDFAVYYCQQYGDLPFTFGPGTKLEIKLEDLKNVFPPEVAVFEPSKAEIAHTQKATLVCLATGFYPDHVELSWWVNGKEVHSGVCTDPQPLKEQPALNDSRYCLSSRLRVSATFWQNPRNHFRCQVQFYGLSENDEWTQDRAKPVTQIVSAEAWGRADCGITSASYHQGVLSATILYEILLGKATLYAVLVSALVLMAMVKRKDSRGRAKRSGSGATNFSLLKQAGDVEENPGPTSMDWIWRILFLVGAATGAHSFEEVQLLESGGGMVQPGGSLRLSCAASGFTFSSYAMSWVRQAPGKGLEWVSAISGSGGRTFYADSVEGRFTISRDNSKNTLYLQMNSLRAEDTAVYYCAKHDYSNYPYFDYWGQGTLVTVSSTRIQNPDPAVYQLRDSKSSDKSVCLFTDFDSQTNVSQSKDSDVYITDKCVLDMRSMDFKSNSAVAWSNKSDFACANAFNNSIIPEDTFFPSSDVPCDVKLVEKSFETDTNLNFQNLSVIGFRILLLKVAGFNLLMTLRLWSSRAKRSGSGVKQTLNFDLLKLAGDVESNPGPSRGHMTEYKPTVRLATRDDVPRAVRTLAAAFADYPATRHTVDPDRHIERVTELQELFLTRVGLDIGKVWVADDGAAVAVWTTPESVEAGAVFAEIGPRMAELSGSRLAAQQQMEGLLAPHRPKEPAWFLATVGVSPDHQGKGLGSAVVLPGVEAAERAGVPAFLETSAPRNLPFYERLGFTVTADVEVPEGPRTWCMTRKPGA

SEQ ID NO: 20624 - protein, 621 aa, synthetic construct
MALPVTALLLPLALLLHAARPEIVLTQSPGTLSLSPGERATLSCRASQSIRSSYLAWYQQKPGQAPRLLIYGASSRATGIPDRFSGSGSGTDFTLTISRLEPEDFAVYYCQQYGDLPFTFGPGTKLEIKLEDLKNVFPPEVAVFEPSEAEISHTQKATLVCLATGFYPDHVELSWWVNGKEVHSGVCTDPQPLKEQPALNDSRYCLSSRLRVSATFWQNPRNHFRCQVQFYGLSENDEWTQDRAKPVTQIVSAEAWGRADCGFTSESYQQGVLSATILYEILLGKATLYAVLVSALVLMAMVKRKDSRGRAKRSGSGATNFSLLKQAGDVEENPGPTSMDWIWRILFLVGAATGAHSFEEVQLLESGGGMVQPGGSLRLSCAASGFTFSSYAMSWVRQAPGKGLEWVSAISGSGGRTFYADSVEGRFTISRDNSKNTLYLQMNSLRAEDTAVYYCAKHDYSNYPYFDYWGQGTLVTVSSTRIQNPDPAVYQLRDSKSSDKSVCLFTDFDSQTNVSQSKDSDVYITDKCVLDMRSMDFKSNSAVAWSNKSDFACANAFNNSIIPEDTFFPSPESSCDVKLVEKSFETDTNLNFQNLSVIGFRILLLKVAGFNLLMTLRLWSS

SEQ ID NO: 20625 - protein, 846 aa, synthetic construct
MALPVTALLLPLALLLHAARPEIVLTQSPGTLSLSPGERATLSCRASQSIRSSYLAWYQQKPGQAPRLLIYGASSRATGIPDRFSGSGSGTDFTLTISRLEPEDFAVYYCQQYGDLPFTFGPGTKLEIKLEDLKNVFPPEVAVFEPSEAEISHTQKATLVCLATGFYPDHVELSWWVNGKEVHSGVCTDPQPLKEQPALNDSRYCLSSRLRVSATFWQNPRNHFRCQVQFYGLSENDEWTQDRAKPVTQIVSAEAWGRADCGFTSESYQQGVLSATILYEILLGKATLYAVLVSALVLMAMVKRKDSRGRAKRSGSGATNFSLLKQAGDVEENPGPTSMDWIWRILFLVGAATGAHSFEEVQLLESGGGMVQPGGSLRLSCAASGFTFSSYAMSWVRQAPGKGLEWVSAISGSGGRTFYADSVEGRFTISRDNSKNTLYLQMNSLRAEDTAVYYCAKHDYSNYPYFDYWGQGTLVTVSSTRIQNPDPAVYQLRDSKSSDKSVCLFTDFDSQTNVSQSKDSDVYITDKCVLDMRSMDFKSNSAVAWSNKSDFACANAFNNSIIPEDTFFPSPESSCDVKLVEKSFETDTNLNFQNLSVIGFRILLLKVAGFNLLMTLRLWSSRAKRSGSGVKQTLNFDLLKLAGDVESNPGPSRGGIHTMATYEVLCEVARKLGTDDREVVLFLLNVFIPQPTLAQLIGALRALKEEGRLTFPLLAECLFRAGRRDLLRDLLHLDPRFLERHLAGTMSYFSPYQLTVLHVDGELCARDIRSLIFLSKDTIGSRSTPQTFLHWVYCMENLDLLGPTDVDALMSMLRSLSRVDLQRQVQTLMGLHLSGPSHSQHYRHTP

SEQ ID NO: 20626 - protein, 625 aa, synthetic construct
MALPVTALLLPLALLLHAARPEIVLTQSPGTLSLSPGERATLSCRASQSIRSSYLAWYQQKPGQAPRLLIYGASSRATGIPDRFSGSGSGTDFTLTISRLEPEDFAVYYCQQYGDLPFTFGPGTKLEIKLEIQNPDPAVYQLRDSKSSDKSVCLFTDFDSQTNVSQSKDSDVYITDKCVLDMRSMDFKSNSAVAWSNKSDFACANAFNNSIIPEDTFFPSPESSCDVKLVEKSFETDTNLNFQNLSVIGFRILLLKVAGFNLLMTLRLWSSRAKRSGSGVKQTLNFDLLKLAGDVESNPGPTSMDWIWRILFLVGAATGAHSFEEVQLLESGGGMVQPGGSLRLSCAASGFTFSSYAMSWVRQAPGKGLEWVSAISGSGGRTFYADSVEGRFTISRDNSKNTLYLQMNSLRAEDTAVYYCAKHDYSNYPYFDYWGQGTLVTVSSTREDLKNVFPPEVAVFEPSEAEISHTQKATLVCLATGFYPDHVELSWWVNGKEVHSGVCTDPQPLKEQPALNDSRYCLSSRLRVSATFWQNPRNHFRCQVQFYGLSENDEWTQDRAKPVTQIVSAEAWGRADCGFTSESYQQGVLSATILYEILLGKATLYAVLVSALVLMAMVKRKDSRG

SEQ ID NO: 20627 - protein, 847 aa, synthetic construct
MALPVTALLLPLALLLHAARPEIVLTQSPGTLSLSPGERATLSCRASQSIRSSYLAWYQQKPGQAPRLLIYGASSRATGIPDRFSGSGSGTDFTLTISRLEPEDFAVYYCQQYGDLPFTFGPGTKLEIKLEIQNPDPAVYQLRDSKSSDKSVCLFTDFDSQTNVSQSKDSDVYITDKCVLDMRSMDFKSNSAVAWSNKSDFACANAFNNSIIPEDTFFPSPESSCDVKLVEKSFETDTNLNFQNLSVIGFRILLLKVAGFNLLMTLRLWSSRAKRSGSGVKQTLNFDLLKLAGDVESNPGPTSMDWIWRILFLVGAATGAHSFEEVQLLESGGGMVQPGGSLRLSCAASGFTFSSYAMSWVRQAPGKGLEWVSAISGSGGRTFYADSVEGRFTISRDNSKNTLYLQMNSLRAEDTAVYYCAKHDYSNYPYFDYWGQGTLVTVSSTREDLKNVFPPEVAVFEPSEAEISHTQKATLVCLATGFYPDHVELSWWVNGKEVHSGVCTDPQPLKEQPALNDSRYCLSSRLRVSATFWQNPRNHFRCQVQFYGLSENDEWTQDRAKPVTQIVSAEAWGRADCGFTSESYQQGVLSATILYEILLGKATLYAVLVSALVLMAMVKRKDSRGRAKRSGSGATNFSLLKQAGDVEENPGPSRGGIHTMATYEVLCEVARKLGTDDREVVLFLLNVFIPQPTLAQLIGALRALKEEGRLTFPLLAECLFRAGRRDLLRDLLHLDPRFLERHLAGTMSYFSPYQLTVLHVDGELCARDIRSLIFLSKDTIGSRSTPQTFLHWVYCMENLDLLGPTDVDALMSMLRSLSRVDLQRQVQTLMGLHLSGPSHSQHYRHTP

SEQ ID NO: 20628 - protein, 899 aa, synthetic construct
MALPVTALLLPLALLLHAARPLEGKPIPNPLLGLDSTGSGEDLKNVFPPEVAVFEPSKAEIAHTQKATLVCLATGFYPDHVELSWWVNGKEVHSGVCTDPQPLKEQPALNDSRYCLSSRLRVSATFWQNPRNHFRCQVQFYGLSENDEWTQDRAKPVTQIVSAEAWGRADCGITSASYHQGVLSATILYEILLGKATLYAVLVSALVLMAMVKRKDSRGRAKRSGSGATNFSLLKQAGDVEENPGPTSMALPVTALLLPLALLLHAARPEIVLTQSPGTLSLSPGERATLSCRASQSIRSSYLAWYQQKPGQAPRLLIYGASSRATGIPDRFSGSGSGTDFTLTISRLEPEDFAVYYCQQYGDLPFTFGPGTKLEIKGGGGSGGGGSGGGGSEVQLLESGGGMVQPGGSLRLSCAASGFTFSSYAMSWVRQAPGKGLEWVSAISGSGGRTFYADSVEGRFTISRDNSKNTLYLQMNSLRAEDTAVYYCAKHDYSNYPYFDYWGQGTLVTVSSTREQKLISEEDGSGIQNPDPAVYQLRDSKSSDKSVCLFTDFDSQTNVSQSKDSDVYITDKCVLDMRSMDFKSNSAVAWSNKSDFACANAFNNSIIPEDTFFPSSDVPCDVKLVEKSFETDTNLNFQNLSVIGFRILLLKVAGFNLLMTLRLWSSRAKRSGSGVKQTLNFDLLKLAGDVESNPGPSRGHMTEYKPTVRLATRDDVPRAVRTLAAAFADYPATRHTVDPDRHIERVTELQELFLTRVGLDIGKVWVADDGAAVAVWTTPESVEAGAVFAEIGPRMAELSGSRLAAQQQMEGLLAPHRPKEPAWFLATVGVSPDHQGKGLGSAVVLPGVEAAERAGVPAFLETSAPRNLPFYERLGFTVTADVEVPEGPRTWCMTRKPGA

SEQ ID NO: 20629 - protein, 900 aa, synthetic construct
MALPVTALLLPLALLLHAARPLEQKLISEEDLGSGDRPDPAVYQLRDSKSSDKSVCLFTDFDSQTNVSQSKDSDVYITDKCVLDMRSMDFKSNSAVAWSNKSDFACANAFNNSIIPEDTFFPSPESSCDVKLVEKSFETDTNLNFQNLSVIGFRILLLKVAGFNLLMTLRLWSSSSRAKRSGSGVKQTLNFDLLKLAGDVESNPGPTSMALPVTALLLPLALLLHAARPEIVLTQSPGTLSLSPGERATLSCRASQSIRSSYLAWYQQKPGQAPRLLIYGASSRATGIPDRFSGSGSGTDFTLTISRLEPEDFAVYYCQQYGDLPFTFGPGTKLEIKGGGGSGGGGSGGGGSEVQLLESGGGMVQPGGSLRLSCAASGFTFSSYAMSWVRQAPGKGLEWVSAISGSGGRTFYADSVEGRFTISRDNSKNTLYLQMNSLRAEDTAVYYCAKHDYSNYPYFDYWGQGTLVTVSSTRGKPIPNPLLGLDSTGSGEDLKNVFPPEVAVFEPSEAEISHTQKATLVCLATGFYPDHVELSWWVNGKEVHSGVCTDPQPLKEQPALNDSRYCLSSRLRVSATFWQNPRNHFRCQVQFYGLSENDEWTQDRAKPVTQIVSAEAWGRADCGFTSESYQQGVLSATILYEILLGKATLYAVLVSALVLMAMVKRKDSRGRAKRSGSGATNFSLLKQAGDVEENPGPSRGHMTEYKPTVRLATRDDVPRAVRTLAAAFADYPATRHTVDPDRHIERVTELQELFLTRVGLDIGKVWVADDGAAVAVWTTPESVEAGAVFAEIGPRMAELSGSRLAAQQQMEGLLAPHRPKEPAWFLATVGVSPDHQGKGLGSAVVLPGVEAAERAGVPAFLETSAPRNLPFYERLGFTVTADVEVPEGPRTWCMTRKPGA

SEQ ID NO: 20630 - protein, 854 aa, synthetic construct
MALPVTALLLPLALLLHAARPEIVLTQSPGTLSLSPGERATLSCRASQSIRSSYLAWYQQKPGQAPRLLIYGASSRATGIPDRFSGSGSGTDFTLTISRLEPEDFAVYYCQQYGDLPFTFGPGTKLEIKLEDLKNVFPPEVAVFEPSEAEISHTQKATLVCLATGFYPDHVELSWWVNGKEVHSGVSTDPQPLKEQPALNDSRYCLSSRLRVSATFWQNPRNHFRCQVQFYGLSENDEWTQDRAKPVTQIVSAEAWGRADCGFTSESYQQGVLSATILYEILLGKATLYAVLVSALVLMAMVKRKDSRGRAKRSGSGATNFSLLKQAGDVEENPGPTSMDWIWRILFLVGAATGAHSFEEVQLLESGGGMVQPGGSLRLSCAASGFTFSSYAMSWVRQAPGKGLEWVSAISGSGGRTFYADSVEGRFTISRDNSKNTLYLQMNSLRAEDTAVYYCAKHDYSNYPYFDYWGQGTLVTVSSTRIQNPDPAVYQLRDSKSSDKSVCLFTDFDSQTNVSQSKDSDVYITDKTVLDMRSMDFKSNSAVAWSNKSDFACANAFNNSIIPEDTFFPSPESSCDVKLVEKSFETDTNLNFQNLSVIGFRILLLKVAGFNLLMTLRLWSSRAKRSGSGVKQTLNFDLLKLAGDVESNPGPSRGHMTEYKPTVRLATRDDVPRAVRTLAAAFADYPATRHTVDPDRHIERVTELQELFLTRVGLDIGKVWVADDGAAVAVWTTPESVEAGAVFAEIGPRMAELSGSRLAAQQQMEGLLAPHRPKEPAWFLATVGVSPDHQGKGLGSAVVLPGVEAAERAGVPAFLETSAPRNLPFYERLGFTVTADVEVPEGPRTWCMTRKPGA

SEQ ID NO: 20631 - protein, 936 aa, synthetic construct
MALPVTALLLPLALLLHAARPEIVLTQSPGTLSLSPGERATLSCRASQSIRSSYLAWYQQKPGQAPRLLIYGASSRATGIPDRFSGSGSGTDFTLTISRLEPEDFAVYYCQQYGDLPFTFGPGTKLEIKLEDLKNVFPPEVAVFEPSEAEISHTQKATLVCLATGFYPDHVELSWWVNGKEVHSGVSTDPQPLKEQPALNDSRYCLSSRLRVSATFWQNPRNHFRCQVQFYGLSENDEWTQDRAKPVTQIVSAEAWGRADCGFTSESYQQGVLSATILYEILLGKATLYAVLVSALVLMAMVKRKDSRGRAKRSGSGATNFSLLKQAGDVEENPGPTSMDWIWRILFLVGAATGAHSFEEVQLLESGGGMVQPGGSLRLSCAASGFTFSSYAMSWVRQAPGKGLEWVSAISGSGGRTFYADSVEGRFTISRDNSKNTLYLQMNSLRAEDTAVYYCAKHDYSNYPYFDYWGQGTLVTVSSTREQKLISEEDGSGTPFPSLAPPIMLLVDGKQQMVVVCLVLDVAPPGLDSPIWFSAGNGSALDAFTYGPSPATDGTWTNLAHLSLPSEELASWEPLVCHTGPGAEGHSRSTQPMHLSGEASTARTCPQEPLRGTPGGALWLGVLRLLLFKLLLFDLLLTCSCLCDPAGPLPSPATTTRLRALGSHRLHPATETGGREATSSPRPQPRDRRWGDTPPGRKPGSPVRAKRSGSGVKQTLNFDLLKLAGDVESNPGPSRGHMTEYKPTVRLATRDDVPRAVRTLAAAFADYPATRHTVDPDRHIERVTELQELFLTRVGLDIGKVWVADDGAAVAVWTTPESVEAGAVFAEIGPRMAELSGSRLAAQQQMEGLLAPHRPKEPAWFLATVGVSPDHQGKGLGSAVVLPGVEAAERAGVPAFLETSAPRNLPFYERLGFTVTADVEVPEGPRTWCMTRKPGA

SEQ ID NO: 20632 - protein, 954 aa, synthetic construct
MALPVTALLLPLALLLHAARPLEDLKNVFPPEVAVFEPSEAEISHTQKATLVCLATGFYPDHVELSWWVNGKEVHSGVSTDPQPLKEQPALNDSRYCLSSRLRVSATFWQNPRNHFRCQVQFYGLSENDEWTQDRAKPVTQIVSAEAWGRADCGFTSESYQQGVLSATILYEILLGKATLYAVLVSALVLMAMVKRKDSRGRAKRSGSGATNFSLLKQAGDVEENPGPTSMALPVTALLLPLALLLHAARPEIVLTQSPGTLSLSPGERATLSCRASQSIRSSYLAWYQQKPGQAPRLLIYGASSRATGIPDRFSGSGSGTDFTLTISRLEPEDFAVYYCQQYGDLPFTFGPGTKLEIKGGGGSGGGGSGGGGSEVQLLESGGGMVQPGGSLRLSCAASGFTFSSYAMSWVRQAPGKGLEWVSAISGSGGRTFYADSVEGRFTISRDNSKNTLYLQMNSLRAEDTAVYYCAKHDYSNYPYFDYWGQGTLVTVSSTREQKLISEEDLGSGTPFPSLAPPIMLLVDGKQQMVVVCLVLDVAPPGLDSPIWFSAGNGSALDAFTYGPSPATDGTWTNLAHLSLPSEELASWEPLVCHTGPGAEGHSRSTQPMHLSGEASTARTCPQEPLRGTPGGALWLGVLRLLLFKLLLFDLLLTCSCLCDPAGPLPSPATTTRLRALGSHRLHPATETGGREATSSPRPQPRDRRWGDTPPGRKPGSPVRAKRSGSGVKQTLNFDLLKLAGDVESNPGPSRSRGHMTEYKPTVRLATRDDVPRAVRTLAAAFADYPATRHTVDPDRHIERVTELQELFLTRVGLDIGKVWVADDGAAVAVWTTPESVEAGAVFAEIGPRMAELSGSRLAAQQQMEGLLAPHRPKEPAWFLATVGVSPDHQGKGLGSAVVLPGVEAAERAGVPAFLETSAPRNLPFYERLGFTVTADVEVPEGPRTWCMTRKPGA

SEQ ID NO: 20633 - protein, 891 aa, synthetic construct
MALPVTALLLPLALLLHAARPEIVLTQSPGTLSLSPGERATLSCRASQSIRSSYLAWYQQKPGQAPRLLIYGASSRATGIPDRFSGSGSGTDFTLTISRLEPEDFAVYYCQQYGDLPFTFGPGTKLEIKLEGKPIPNPLLGLDSTGSGDKQLDADVSPKPTIFLPSIAETKLQKAGTYLCLLEKFFPDVIKIHWQEKKSNTILGSQEGNTMKTNDTYMKFSWLTVPEKSLDKEHRCIVRHENNKNGVDQEIIFPPIKTDVITMDPKDNCSKDANDTLLLQLTNTSAYYMYLLLLLKSVVYFAIITCCLLRRTAFCCNGEKSRAKRSGSGATNFSLLKQAGDVEENPGPTSMDWIWRILFLVGAATGAHSFEEVQLLESGGGMVQPGGSLRLSCAASGFTFSSYAMSWVRQAPGKGLEWVSAISGSGGRTFYADSVEGRFTISRDNSKNTLYLQMNSLRAEDTAVYYCAKHDYSNYPYFDYWGQGTLVTVSSTREQKLISEEDGSGSQPHTKPSVFVMKNGTNVACLVKEFYPKDIRINLVSSKKITEFDPAIVISPSGKYNAVKLGKYEDSNSVTCSVQHDNKTVHSTDFEVKTDSTDHVKPKETENTKQPSKSCHKPKAIVHTEKVNMMSLTVLGLRMLFAKTVAVNFLLTAKLFFLRAKRSGSGVKQTLNFDLLKLAGDVESNPGPSRGHMTEYKPTVRLATRDDVPRAVRTLAAAFADYPATRHTVDPDRHIERVTELQELFLTRVGLDIGKVWVADDGAAVAVWTTPESVEAGAVFAEIGPRMAELSGSRLAAQQQMEGLLAPHRPKEPAWFLATVGVSPDHQGKGLGSAVVLPGVEAAERAGVPAFLETSAPRNLPFYERLGFTVTADVEVPEGPRTWCMTRKPGA

SEQ ID NO: 20634 - protein, 629 aa, synthetic construct
MALPVTALLLPLALLLHAARPEIVLTQSPGTLSLSPGERATLSCRASQSIRSSYLAWYQQKPGQAPRLLIYGASSRATGIPDRFSGSGSGTDFTLTISRLEPEDFAVYYCQQYGDLPFTFGPGTKLEIKLESQPHTKPSVFVMKNGTNVACLVKEFYPKDIRINLVSSKKITEFDPAIVISPSGKYNAVKLGKYEDSNSVTCSVQHDNKTVHSTDFEVKTDSTDHVKPKETENTKQPSKSCHKPKAIVHTEKVNMMSLTVLGLRMLFAKTVAVNFLLTAKLFFLRAKRSGSGATNFSLLKQAGDVEENPGPTSMDWIWRILFLVGAATGAHSFEEVQLLESGGGMVQPGGSLRLSCAASGFTFSSYAMSWVRQAPGKGLEWVSAISGSGGRTFYADSVEGRFTISRDNSKNTLYLQMNSLRAEDTAVYYCAKHDYSNYPYFDYWGQGTLVTVSSTRDKQLDADVSPKPTIFLPSIAETKLQKAGTYLCLLEKFFPDVIKIHWQEKKSNTILGSQEGNTMKTNDTYMKFSWLTVPEKSLDKEHRCIVRHENNKNGVDQEIIFPPIKTDVITMDPKDNCSKDANDTLLLQLTNTSAYYMYLLLLLKSVVYFAIITCCLLRRTAFCCNGEKS

SEQ ID NO: 20635 - protein, 906 aa, synthetic construct
MALPVTALLLPLALLLHAARPLEGKPIPNPLLGLDSTGSGDKQLDADVSPKPTIFLPSIAETKLQKAGTYLCLLEKFFPDVIKIHWQEKKSNTILGSQEGNTMKTNDTYMKFSWLTVPEKSLDKEHRCIVRHENNKNGVDQEIIFPPIKTDVITMDPKDNCSKDANDTLLLQLTNTSAYYMYLLLLLKSVVYFAIITCCLLRRTAFCCNGEKSRAKRSGSGATNFSLLKQAGDVEENPGPTSMALPVTALLLPLALLLHAARPEIVLTQSPGTLSLSPGERATLSCRASQSIRSSYLAWYQQKPGQAPRLLIYGASSRATGIPDRFSGSGSGTDFTLTISRLEPEDFAVYYCQQYGDLPFTFGPGTKLEIKGGGGSGGGGSGGGGSEVQLLESGGGMVQPGGSLRLSCAASGFTFSSYAMSWVRQAPGKGLEWVSAISGSGGRTFYADSVEGRFTISRDNSKNTLYLQMNSLRAEDTAVYYCAKHDYSNYPYFDYWGQGTLVTVSSTREQKLISEEDGSGSQPHTKPSVFVMKNGTNVACLVKEFYPKDIRINLVSSKKITEFDPAIVISPSGKYNAVKLGKYEDSNSVTCSVQHDNKTVHSTDFEVKTDSTDHVKPKETENTKQPSKSCHKPKAIVHTEKVNMMSLTVLGLRMLFAKTVAVNFLLTAKLFFLRAKRSGSGVKQTLNFDLLKLAGDVESNPGPSRGHMTEYKPTVRLATRDDVPRAVRTLAAAFADYPATRHTVDPDRHIERVTELQELFLTRVGLDIGKVWVADDGAAVAVWTTPESVEAGAVFAEIGPRMAELSGSRLAAQQQMEGLLAPHRPKEPAWFLATVGVSPDHQGKGLGSAVVLPGVEAAERAGVPAFLETSAPRNLPFYERLGFTVTADVEVPEGPRTWCMTRKPGA

SEQ ID NO: 20636 - protein, 1031 aa, synthetic construct
MALPVTALLLPLALLLHAARPEIVLTQSPGTLSLSPGERATLSCRASQSIRSSYLAWYQQKPGQAPRLLIYGASSRATGIPDRFSGSGSGTDFTLTISRLEPEDFAVYYCQQYGDLPFTFGPGTKLEIKGQPKANPTVTLFPPSSEELQANKATLVCLISDFYPGAVTVAWKADGSPVKAGVETTKPSKQSNNKYAASSYLSLTPEQWKSHRSYSCQVTHEGSTVEKTVAPTECSGSQSFGLLDPKLCYLLDGILFIYGVILTALFLRVKFSRSADAPAYQQGQNQLYNELNLGRREEYDVLDKRRGRDPEMGGKPQRRKNPQEGLYNELQKDKMAEAYSEIGMKGERRRGKGHDGLYQGLSTATKDTYDALHMQALPPRRAKRSGSGATNFSLLKQAGDVEENPGPTSMDWIWRILFLVGAATGAHSFEEVQLLESGGGMVQPGGSLRLSCAASGFTFSSYAMSWVRQAPGKGLEWVSAISGSGGRTFYADSVEGRFTISRDNSKNTLYLQMNSLRAEDTAVYYCAKHDYSNYPYFDYWGQGTLVTVSSASTKGPSVFPLAPSSKSTSGGTAALGCLVKDYFPEPVTVSWNSGALTSGVHTFPAVLQSSGLYSLSSVVTVPSSSLGTQTYICNVNHKPSNTKVDKRVEPKSCGTQSFGLLDPKLCYLLDGILFIYGVILTALFLRVKFSRSADAPAYQQGQNQLYNELNLGRREEYDVLDKRRGRDPEMGGKPQRRKNPQEGLYNELQKDKMAEAYSEIGMKGERRRGKGHDGLYQGLSTATKDTYDALHMQALPPRRAKRSGSGVKQTLNFDLLKLAGDVESNPGPSRGHMTEYKPTVRLATRDDVPRAVRTLAAAFADYPATRHTVDPDRHIERVTELQELFLTRVGLDIGKVWVADDGAAVAVWTTPESVEAGAVFAEIGPRMAELSGSRLAAQQQMEGLLAPHRPKEPAWFLATVGVSPDHQGKGLGSAVVLPGVEAAERAGVPAFLETSAPRNLPFYERLGFTVTADVEVPEGPRTWCMTRKPGA

SEQ ID NO: 20637 - protein, 817 aa, synthetic construct
MALPVTALLLPLALLLHAARPEIVLTQSPGTLSLSPGERATLSCRASQSIRSSYLAWYQQKPGQAPRLLIYGASSRATGIPDRFSGSGSGTDFTLTISRLEPEDFAVYYCQQYGDLPFTFGPGTKLEIKLEDLKNVFPPEVAVFEPSEAEISHTQKATLVCLATGFYPDHVELSWWVNGKEVHSGVSTDPQPLKEQPALNDSRYCLSSRLRVSATFWQNPRNHFRCQVQFYGLSENDEWTQDRAKPVTQIVSAEAWGRADCGSQSFGLLDPKLCYLLDGILFIYGVILTALFLRVKFSRSADAPAYQQGQNQLYNELNLGRREEYDVLDKRRGRDPEMGGKPQRRKNPQEGLYNELQKDKMAEAYSEIGMKGERRRGKGHDGLYQGLSTATKDTYDALHMQALPPRRAKRSGSGATNFSLLKQAGDVEENPGPTSMDWIWRILFLVGAATGAHSFEEVQLLESGGGMVQPGGSLRLSCAASGFTFSSYAMSWVRQAPGKGLEWVSAISGSGGRTFYADSVEGRFTISRDNSKNTLYLQMNSLRAEDTAVYYCAKHDYSNYPYFDYWGQGTLVTVSSTRIQNPDPAVYQLRDSKSSDKSVCLFTDFDSQTNVSQSKDSDVYITDKTVLDMRSMDFKSNSAVAWSNKSDFACANAFNNSIIPEDTFFPSPESSCGTQSFGLLDPKLCYLLDGILFIYGVILTALFLRVKFSRSADAPAYQQGQNQLYNELNLGRREEYDVLDKRRGRDPEMGGKPQRRKNPQEGLYNELQKDKMAEAYSEIGMKGERRRGKGHDGLYQGLSTATKDTYDALHMQALPPR

SEQ ID NO: 20638 - protein, 817 aa, synthetic construct
MALPVTALLLPLALLLHAARPEIVLTQSPGTLSLSPGERATLSCRASQSIRSSYLAWYQQKPGQAPRLLIYGASSRATGIPDRFSGSGSGTDFTLTISRLEPEDFAVYYCQQYGDLPFTFGPGTKLEIKLEDLKNVFPPEVAVFEPSKAEIAHTQKATLVCLATGFYPDHVELSWWVNGKEVHSGVCTDPQPLKEQPALNDSRYCLSSRLRVSATFWQNPRNHFRCQVQFYGLSENDEWTQDRAKPVTQIVSAEAWGRADCGSQSFGLLDPKLCYLLDGILFIYGVILTALFLRVKFSRSADAPAYQQGQNQLYNELNLGRREEYDVLDKRRGRDPEMGGKPQRRKNPQEGLYNELQKDKMAEAYSEIGMKGERRRGKGHDGLYQGLSTATKDTYDALHMQALPPRRAKRSGSGATNFSLLKQAGDVEENPGPTSMDWIWRILFLVGAATGAHSFEEVQLLESGGGMVQPGGSLRLSCAASGFTFSSYAMSWVRQAPGKGLEWVSAISGSGGRTFYADSVEGRFTISRDNSKNTLYLQMNSLRAEDTAVYYCAKHDYSNYPYFDYWGQGTLVTVSSTRIQNPDPAVYQLRDSKSSDKSVCLFTDFDSQTNVSQSKDSDVYITDKCVLDMRSMDFKSNSAVAWSNKSDFACANAFNNSIIPEDTFFPSSDVPCGTQSFGLLDPKLCYLLDGILFIYGVILTALFLRVKFSRSADAPAYQQGQNQLYNELNLGRREEYDVLDKRRGRDPEMGGKPQRRKNPQEGLYNELQKDKMAEAYSEIGMKGERRRGKGHDGLYQGLSTATKDTYDALHMQALPPR

SEQ ID NO: 20639 - protein, 888 aa, synthetic construct
MALPVTALLLPLALLLHAARPEIVLTQSPGTLSLSPGERATLSCRASQSIRSSYLAWYQQKPGQAPRLLIYGASSRATGIPDRFSGSGSGTDFTLTISRLEPEDFAVYYCQQYGDLPFTFGPGTKLEIKLEGKPIPNPLLGLDSTGSGEDLKNVFPPEVAVFEPSEAEISHTQKATLVCLATGFYPDHVELSWWVNGKEVHSGVSTDPQPLKEQPALNDSRYCLSSRLRVSATFWQNPRNHFRCQVQFYGLSENDEWTQDRAKPVTQIVSAEAWGRADCGSQSFGLLDPKLCYLLDGILFIYGVILTALFLRVKFSRSADAPAYQQGQNQLYNELNLGRREEYDVLDKRRGRDPEMGGKPQRRKNPQEGLYNELQKDKMAEAYSEIGMKGERRRGKGHDGLYQGLSTATKDTYDALHMQALPPRRAKRSGSGATNFSLLKQAGDVEENPGPTSMDWIWRILFLVGAATGAHSFEEVQLLESGGGMVQPGGSLRLSCAASGFTFSSYAMSWVRQAPGKGLEWVSAISGSGGRTFYADSVEGRFTISRDNSKNTLYLQMNSLRAEDTAVYYCAKHDYSNYPYFDYWGQGTLVTVSSTREQKLISEEDGSGIQNPDPAVYQLRDSKSSDKSVCLFTDFDSQTNVSQSKDSDVYITDKTVLDMRSMDFKSNSAVAWSNKSDFACANAFNNSIIPEDTFFPSPESSCGTQSFGLLDPKLCYLLDGILFIYGVILTALFLRSKRSRLLHSDYMNMTPRRPGPTRKHYQPYAPPRDFAAYRSRVKFSRSADAPAYQQGQNQLYNELNLGRREEYDVLDKRRGRDPEMGGKPQRRKNPQEGLYNELQKDKMAEAYSEIGMKGERRRGKGHDGLYQGLSTATKDTYDALHMQALPPR

SEQ ID NO: 20640 - protein, 929 aa, synthetic construct
MALPVTALLLPLALLLHAARPEIVLTQSPGTLSLSPGERATLSCRASQSIRSSYLAWYQQKPGQAPRLLIYGASSRATGIPDRFSGSGSGTDFTLTISRLEPEDFAVYYCQQYGDLPFTFGPGTKLEIKLEGKPIPNPLLGLDSTGSGEDLKNVFPPEVAVFEPSEAEISHTQKATLVCLATGFYPDHVELSWWVNGKEVHSGVSTDPQPLKEQPALNDSRYCLSSRLRVSATFWQNPRNHFRCQVQFYGLSENDEWTQDRAKPVTQIVSAEAWGRADCGSQSFGLLDPKLCYLLDGILFIYGVILTALFLRSKRSRLLHSDYMNMTPRRPGPTRKHYQPYAPPRDFAAYRSRVKFSRSADAPAYQQGQNQLYNELNLGRREEYDVLDKRRGRDPEMGGKPQRRKNPQEGLYNELQKDKMAEAYSEIGMKGERRRGKGHDGLYQGLSTATKDTYDALHMQALPPRRAKRSGSGATNFSLLKQAGDVEENPGPTSMDWIWRILFLVGAATGAHSFEEVQLLESGGGMVQPGGSLRLSCAASGFTFSSYAMSWVRQAPGKGLEWVSAISGSGGRTFYADSVEGRFTISRDNSKNTLYLQMNSLRAEDTAVYYCAKHDYSNYPYFDYWGQGTLVTVSSTREQKLISEEDGSGIQNPDPAVYQLRDSKSSDKSVCLFTDFDSQTNVSQSKDSDVYITDKTVLDMRSMDFKSNSAVAWSNKSDFACANAFNNSIIPEDTFFPSPESSCGTQSFGLLDPKLCYLLDGILFIYGVILTALFLRSKRSRLLHSDYMNMTPRRPGPTRKHYQPYAPPRDFAAYRSRVKFSRSADAPAYQQGQNQLYNELNLGRREEYDVLDKRRGRDPEMGGKPQRRKNPQEGLYNELQKDKMAEAYSEIGMKGERRRGKGHDGLYQGLSTATKDTYDALHMQALPPR

SEQ ID NO: 20641 - protein, 890 aa, synthetic construct
MALPVTALLLPLALLLHAARPEIVLTQSPGTLSLSPGERATLSCRASQSIRSSYLAWYQQKPGQAPRLLIYGASSRATGIPDRFSGSGSGTDFTLTISRLEPEDFAVYYCQQYGDLPFTFGPGTKLEIKLEGKPIPNPLLGLDSTGSGEDLKNVFPPEVAVFEPSEAEISHTQKATLVCLATGFYPDHVELSWWVNGKEVHSGVSTDPQPLKEQPALNDSRYCLSSRLRVSATFWQNPRNHFRCQVQFYGLSENDEWTQDRAKPVTQIVSAEAWGRADCGSQSFGLLDPKLCYLLDGILFIYGVILTALFLRVKFSRSADAPAYQQGQNQLYNELNLGRREEYDVLDKRRGRDPEMGGKPQRRKNPQEGLYNELQKDKMAEAYSEIGMKGERRRGKGHDGLYQGLSTATKDTYDALHMQALPPRRAKRSGSGATNFSLLKQAGDVEENPGPTSMDWIWRILFLVGAATGAHSFEEVQLLESGGGMVQPGGSLRLSCAASGFTFSSYAMSWVRQAPGKGLEWVSAISGSGGRTFYADSVEGRFTISRDNSKNTLYLQMNSLRAEDTAVYYCAKHDYSNYPYFDYWGQGTLVTVSSTREQKLISEEDLGSGIQNPDPAVYQLRDSKSSDKSVCLFTDFDSQTNVSQSKDSDVYITDKTVLDMRSMDFKSNSAVAWSNKSDFACANAFNNSIIPEDTFFPSPESSCGTQSFGLLDPKLCYLLDGILFIYGVILTALFLKRGRKKLLYIFKQPFMRPVQTTQEEDGCSCRFPEEEEGGCELRVKFSRSADAPAYQQGQNQLYNELNLGRREEYDVLDKRRGRDPEMGGKPQRRKNPQEGLYNELQKDKMAEAYSEIGMKGERRRGKGHDGLYQGLSTATKDTYDALHMQALPPR

SEQ ID NO: 20642 - protein, 932 aa, synthetic construct
MALPVTALLLPLALLLHAARPEIVLTQSPGTLSLSPGERATLSCRASQSIRSSYLAWYQQKPGQAPRLLIYGASSRATGIPDRFSGSGSGTDFTLTISRLEPEDFAVYYCQQYGDLPFTFGPGTKLEIKLEGKPIPNPLLGLDSTGSGEDLKNVFPPEVAVFEPSEAEISHTQKATLVCLATGFYPDHVELSWWVNGKEVHSGVSTDPQPLKEQPALNDSRYCLSSRLRVSATFWQNPRNHFRCQVQFYGLSENDEWTQDRAKPVTQIVSAEAWGRADCGSQSFGLLDPKLCYLLDGILFIYGVILTALFLKRGRKKLLYIFKQPFMRPVQTTQEEDGCSCRFPEEEEGGCELRVKFSRSADAPAYQQGQNQLYNELNLGRREEYDVLDKRRGRDPEMGGKPQRRKNPQEGLYNELQKDKMAEAYSEIGMKGERRRGKGHDGLYQGLSTATKDTYDALHMQALPPRRAKRSGSGATNFSLLKQAGDVEENPGPTSMDWIWRILFLVGAATGAHSFEEVQLLESGGGMVQPGGSLRLSCAASGFTFSSYAMSWVRQAPGKGLEWVSAISGSGGRTFYADSVEGRFTISRDNSKNTLYLQMNSLRAEDTAVYYCAKHDYSNYPYFDYWGQGTLVTVSSTREQKLISEEDLGSGIQNPDPAVYQLRDSKSSDKSVCLFTDFDSQTNVSQSKDSDVYITDKTVLDMRSMDFKSNSAVAWSNKSDFACANAFNNSIIPEDTFFPSPESSCGTQSFGLLDPKLCYLLDGILFIYGVILTALFLKRGRKKLLYIFKQPFMRPVQTTQEEDGCSCRFPEEEEGGCELRVKFSRSADAPAYQQGQNQLYNELNLGRREEYDVLDKRRGRDPEMGGKPQRRKNPQEGLYNELQKDKMAEAYSEIGMKGERRRGKGHDGLYQGLSTATKDTYDALHMQALPPR

SEQ ID NO: 20643 - protein, 822 aa, synthetic construct
MALPVTALLLPLALLLHAARPEIVLTQSPGTLSLSPGERATLSCRASQSIRSSYLAWYQQKPGQAPRLLIYGASSRATGIPDRFSGSGSGTDFTLTISRLEPEDFAVYYCQQYGDLPFTFGPGTKLEIKLEQSFGLLDPKLCYLLDGILFIYGVILTALFLRVKFSRSADAPAYQQGQNQLYNELNLGRREEYDVLDKRRGRDPEMGGKPQRRKNPQEGLYNELQKDKMAEAYSEIGMKGERRRGKGHDGLYQGLSTATKDTYDALHMQALPPRRAKRSGSGATNFSLLKQAGDVEENPGPTSMDWIWRILFLVGAATGAHSFEEVQLLESGGGMVQPGGSLRLSCAASGFTFSSYAMSWVRQAPGKGLEWVSAISGSGGRTFYADSVEGRFTISRDNSKNTLYLQMNSLRAEDTAVYYCAKHDYSNYPYFDYWGQGTLVTVSSTRQSFGLLDPKLCYLLDGILFIYGVILTALFLRVKFSRSADAPAYQQGQNQLYNELNLGRREEYDVLDKRRGRDPEMGGKPQRRKNPQEGLYNELQKDKMAEAYSEIGMKGERRRGKGHDGLYQGLSTATKDTYDALHMQALPPRRAKRSGSGVKQTLNFDLLKLAGDVESNPGPSRGHMTEYKPTVRLATRDDVPRAVRTLAAAFADYPATRHTVDPDRHIERVTELQELFLTRVGLDIGKVWVADDGAAVAVWTTPESVEAGAVFAEIGPRMAELSGSRLAAQQQMEGLLAPHRPKEPAWFLATVGVSPDHQGKGLGSAVVLPGVEAAERAGVPAFLETSAPRNLPFYERLGFTVTADVEVPEGPRTWCMTRKPGA

SEQ ID NO: 20644 - protein, 647 aa, synthetic construct
MALPVTALLLPLALLLHAARPEIVLTQSPGTLSLSPGERATLSCRASQSIRSSYLAWYQQKPGQAPRLLIYGASSRATGIPDRFSGSGSGTDFTLTISRLEPEDFAVYYCQQYGDLPFTFGPGTKLEIKLEGQPKANPTVTLFPPSSEELQANKATLVCLISDFYPGAVTVAWKADGSPVKAGVETTKPSKQSNNKYAASSYLSLTPEQWKSHRSYSCQVTHEGSTVEKTVAPTECSPIKTDVITMDPKDNCSKDANDTLLLQLTNTSAYYMYLLLLLKSVVYFAIITCCLLRRTAFCCNGEKSRAKRSGSGATNFSLLKQAGDVEENPGPTSMDWIWRILFLVGAATGAHSFEEVQLLESGGGMVQPGGSLRLSCAASGFTFSSYAMSWVRQAPGKGLEWVSAISGSGGRTFYADSVEGRFTISRDNSKNTLYLQMNSLRAEDTAVYYCAKHDYSNYPYFDYWGQGTLVTVSSTRASTKGPSVFPLAPSSKSTSGGTAALGCLVKDYFPEPVTVSWNSGALTSGVHTFPAVLQSSGLYSLSSVVTVPSSSLGTQTYICNVNHKPSNTKVDKRVEPKSCEVKTDSTDHVKPKETENTKQPSKSCHKPKAIVHTEKVNMMSLTVLGLRMLFAKTVAVNFLLTAKLFFL

SEQ ID NO: 20645 - protein, 625 aa, synthetic construct
MALPVTALLLPLALLLHAARPEIVLTQSPGTLSLSPGERATLSCRASQSIRSSYLAWYQQKPGQAPRLLIYGASSRATGIPDRFSGSGSGTDFTLTISRLEPEDFAVYYCQQYGDLPFTFGPGTKLEIKLEGQPKANPTVTLFPPSSEELQANKATLVCLISDFYPGAVTVAWKADGSPVKAGVETTKPSKQSNNKYAASSYLSLTPEQWKSHRSYSCQVTHEGSTVEKTVAPTECSGRADCGITSASYHQGVLSATILYEILLGKATLYAVLVSALVLMAMVKRKDSRGRAKRSGSGATNFSLLKQAGDVEENPGPTSMDWIWRILFLVGAATGAHSFEEVQLLESGGGMVQPGGSLRLSCAASGFTFSSYAMSWVRQAPGKGLEWVSAISGSGGRTFYADSVEGRFTISRDNSKNTLYLQMNSLRAEDTAVYYCAKHDYSNYPYFDYWGQGTLVTVSSTRASTKGPSVFPLAPSSKSTSGGTAALGCLVKDYFPEPVTVSWNSGALTSGVHTFPAVLQSSGLYSLSSVVTVPSSSLGTQTYICNVNHKPSNTKVDKRVEPKSCIPEDTFFPSSDVPCDVKLVEKSFETDTNLNFQNLSVIGFRILLLKVAGFNLLMTLRLWSS

SEQ ID NO: 20646 - protein, 625 aa, synthetic construct
MALPVTALLLPLALLLHAARPEIVLTQSPGTLSLSPGERATLSCRASQSIRSSYLAWYQQKPGQAPRLLIYGASSRATGIPDRFSGSGSGTDFTLTISRLEPEDFAVYYCQQYGDLPFTFGPGTKLEIKLEGQPKANPTVTLFPPSSEELQANKATLVCLISDFYPGAVTVAWKADGSPVKAGVETTKPSKQSNNKYAASSYLSLTPEQWKSHRSYSCQVTHEGSTVEKTVAPTECSGRADCGFTSESYQQGVLSATILYEILLGKATLYAVLVSALVLMAMVKRKDSRGRAKRSGSGATNFSLLKQAGDVEENPGPTSMDWIWRILFLVGAATGAHSFEEVQLLESGGGMVQPGGSLRLSCAASGFTFSSYAMSWVRQAPGKGLEWVSAISGSGGRTFYADSVEGRFTISRDNSKNTLYLQMNSLRAEDTAVYYCAKHDYSNYPYFDYWGQGTLVTVSSTRASTKGPSVFPLAPSSKSTSGGTAALGCLVKDYFPEPVTVSWNSGALTSGVHTFPAVLQSSGLYSLSSVVTVPSSSLGTQTYICNVNHKPSNTKVDKRVEPKSCIPEDTFFPSPESSCDVKLVEKSFETDTNLNFQNLSVIGFRILLLKVAGFNLLMTLRLWSS

SEQ ID NO: 20647 - protein, 451 aa, synthetic construct
MALPVTALLLPLALLLHAARPEIVLTQSPGTLSLSPGERATLSCRASQSIRSSYLAWYQQKPGQAPRLLIYGASSRATGIPDRFSGSGSGTDFTLTISRLEPEDFAVYYCQQYGDLPFTFGPGTKLEIKGGGGSGGGGSGGGGSEVQLLESGGGMVQPGGSLRLSCAASGFTFSSYAMSWVRQAPGKGLEWVSAISGSGGRTFYADSVEGRFTISRDNSKNTLYLQMNSLRAEDTAVYYCAKHDYSNYPYFDYWGQGTLVTVSSTRDGNEEMGGITQTPYKVSISGTTVILTCPQYPGSEILWQHNDKNIGGDEDDKNIGSDEDHLSLKEFSELEQSGYYVCYPRGSKPEDANFYLYLRARVCENCMEMDVMSVATIVIVDICITGGLLLLVYYWSKNRKAKAKPVTRGAGAGGRQRGQNKERPPPVPNPDYEPIRKGQRDLYSGLNQRRI

SEQ ID NO: 20648 - protein, 416 aa, synthetic construct
MALPVTALLLPLALLLHAARPEIVLTQSPGTLSLSPGERATLSCRASQSIRSSYLAWYQQKPGQAPRLLIYGASSRATGIPDRFSGSGSGTDFTLTISRLEPEDFAVYYCQQYGDLPFTFGPGTKLEIKGGGGSGGGGSGGGGSEVQLLESGGGMVQPGGSLRLSCAASGFTFSSYAMSWVRQAPGKGLEWVSAISGSGGRTFYADSVEGRFTISRDNSKNTLYLQMNSLRAEDTAVYYCAKHDYSNYPYFDYWGQGTLVTVSSTRFKIPIEELEDRVFVNCNTSITWVEGTVGTLLSDITRLDLGKRILDPRGIYRCNGTDIYKDKESTVQVHYRMCQSCVELDPATVAGIIVTDVIATLLLALGVFCFAGHETGRLSGAADTQALLRNDQVYQPLRDRDDAQYSHLGGNWARNK

SEQ ID NO: 20649 - protein, 426 aa, synthetic construct
MALPVTALLLPLALLLHAARPEIVLTQSPGTLSLSPGERATLSCRASQSIRSSYLAWYQQKPGQAPRLLIYGASSRATGIPDRFSGSGSGTDFTLTISRLEPEDFAVYYCQQYGDLPFTFGPGTKLEIKGGGGSGGGGSGGGGSEVQLLESGGGMVQPGGSLRLSCAASGFTFSSYAMSWVRQAPGKGLEWVSAISGSGGRTFYADSVEGRFTISRDNSKNTLYLQMNSLRAEDTAVYYCAKHDYSNYPYFDYWGQGTLVTVSSTRQSIKGNHLVKVYDYQEDGSVLLTCDAEAKNITWFKDGKMIGFLTEDKKKWNLGSNAKDPRGMYQCKGSQNKSKPLQVYYRMCQNCIELNAATISGFLFAEIVSIFVLAVGVYFIAGQDGVRQSRASDKQTLLPNDQLYQPLKDREDDQYSHLQGNQLRRN

SEQ ID NO: 20650 - protein, 409 aa, synthetic construct
MALPVTALLLPLALLLHAARPEIVLTQSPGTLSLSPGERATLSCRASQSIRSSYLAWYQQKPGQAPRLLIYGASSRATGIPDRFSGSGSGTDFTLTISRLEPEDFAVYYCQQYGDLPFTFGPGTKLEIKGGGGSGGGGSGGGGSEVQLLESGGGMVQPGGSLRLSCAASGFTFSSYAMSWVRQAPGKGLEWVSAISGSGGRTFYADSVEGRFTISRDNSKNTLYLQMNSLRAEDTAVYYCAKHDYSNYPYFDYWGQGTLVTVSSTRQSFGLLDPKLCYLLDGILFIYGVILTALFLRVKFSRSADAPAYQQGQNQLYNELNLGRREEYDVLDKRRGRDPEMGGKPQRRKNPQEGLYNELQKDKMAEAYSEIGMKGERRRGKGHDGLYQGLSTATKDTYDALHMQALPPR

SEQ ID NO: 20651 - protein, 451 aa, synthetic construct
MALPVTALLLPLALLLHAARPEVQLLESGGGMVQPGGSLRLSCAASGFTFSSYAMSWVRQAPGKGLEWVSAISGSGGRTFYADSVEGRFTISRDNSKNTLYLQMNSLRAEDTAVYYCAKHDYSNYPYFDYWGQGTLVTVSSGGGGSGGGGSGGGGSEIVLTQSPGTLSLSPGERATLSCRASQSIRSSYLAWYQQKPGQAPRLLIYGASSRATGIPDRFSGSGSGTDFTLTISRLEPEDFAVYYCQQYGDLPFTFGPGTKLEIKTRDGNEEMGGITQTPYKVSISGTTVILTCPQYPGSEILWQHNDKNIGGDEDDKNIGSDEDHLSLKEFSELEQSGYYVCYPRGSKPEDANFYLYLRARVCENCMEMDVMSVATIVIVDICITGGLLLLVYYWSKNRKAKAKPVTRGAGAGGRQRGQNKERPPPVPNPDYEPIRKGQRDLYSGLNQRRI

SEQ ID NO: 20652 - protein, 416 aa, synthetic construct
MALPVTALLLPLALLLHAARPEVQLLESGGGMVQPGGSLRLSCAASGFTFSSYAMSWVRQAPGKGLEWVSAISGSGGRTFYADSVEGRFTISRDNSKNTLYLQMNSLRAEDTAVYYCAKHDYSNYPYFDYWGQGTLVTVSSGGGGSGGGGSGGGGSEIVLTQSPGTLSLSPGERATLSCRASQSIRSSYLAWYQQKPGQAPRLLIYGASSRATGIPDRFSGSGSGTDFTLTISRLEPEDFAVYYCQQYGDLPFTFGPGTKLEIKTRFKIPIEELEDRVFVNCNTSITWVEGTVGTLLSDITRLDLGKRILDPRGIYRCNGTDIYKDKESTVQVHYRMCQSCVELDPATVAGIIVTDVIATLLLALGVFCFAGHETGRLSGAADTQALLRNDQVYQPLRDRDDAQYSHLGGNWARNK

SEQ ID NO: 20653 - protein, 426 aa, synthetic construct
MALPVTALLLPLALLLHAARPEVQLLESGGGMVQPGGSLRLSCAASGFTFSSYAMSWVRQAPGKGLEWVSAISGSGGRTFYADSVEGRFTISRDNSKNTLYLQMNSLRAEDTAVYYCAKHDYSNYPYFDYWGQGTLVTVSSGGGGSGGGGSGGGGSEIVLTQSPGTLSLSPGERATLSCRASQSIRSSYLAWYQQKPGQAPRLLIYGASSRATGIPDRFSGSGSGTDFTLTISRLEPEDFAVYYCQQYGDLPFTFGPGTKLEIKTRQSIKGNHLVKVYDYQEDGSVLLTCDAEAKNITWFKDGKMIGFLTEDKKKWNLGSNAKDPRGMYQCKGSQNKSKPLQVYYRMCQNCIELNAATISGFLFAEIVSIFVLAVGVYFIAGQDGVRQSRASDKQTLLPNDQLYQPLKDREDDQYSHLQGNQLRRN

SEQ ID NO: 20654 - protein, 409 aa, synthetic construct
MALPVTALLLPLALLLHAARPEVQLLESGGGMVQPGGSLRLSCAASGFTFSSYAMSWVRQAPGKGLEWVSAISGSGGRTFYADSVEGRFTISRDNSKNTLYLQMNSLRAEDTAVYYCAKHDYSNYPYFDYWGQGTLVTVSSGGGGSGGGGSGGGGSEIVLTQSPGTLSLSPGERATLSCRASQSIRSSYLAWYQQKPGQAPRLLIYGASSRATGIPDRFSGSGSGTDFTLTISRLEPEDFAVYYCQQYGDLPFTFGPGTKLEIKTRQSFGLLDPKLCYLLDGILFIYGVILTALFLRVKFSRSADAPAYQQGQNQLYNELNLGRREEYDVLDKRRGRDPEMGGKPQRRKNPQEGLYNELQKDKMAEAYSEIGMKGERRRGKGHDGLYQGLSTATKDTYDALHMQALPPR

SEQ ID NO: 20655 - protein, 504 aa, synthetic construct
MALPVTALLLPLALLLHAARPEIVLTQSPGTLSLSPGERATLSCRASQSIRSSYLAWYQQKPGQAPRLLIYGASSRATGIPDRFSGSGSGTDFTLTISRLEPEDFAVYYCQQYGDLPFTFGPGTKLEIKGGGGSGGGGSGGGGSEVQLLESGGGMVQPGGSLRLSCAASGFTFSSYAMSWVRQAPGKGLEWVSAISGSGGRTFYADSVEGRFTISRDNSKNTLYLQMNSLRAEDTAVYYCAKHDYSNYPYFDYWGQGTLVTVSSTRGMRTEDLPKAVVFLEPQWYRVLEKDSVTLKCQGAYSPEDNSTQWFHNESLISSQASSYFIDAATVDDSGEYRCQTNLSTLSDPVQLEVHIGWLLLQAPRWVFKEEDPIHLRCHSWKNTALHKVTYLQNGKGRKYFHHNSDFYIPKATLKDSGSYFCRGLVGSKNVSSETVNITITQGLAVPTISSFFPPGYQVSFCLVMVLLFAVDTGLYFSVKTNIRSSTRDWKDHKFKWRKDPQDK

SEQ ID NO: 20656 - protein, 786 aa, synthetic construct
MALPVTALLLPLALLLHAARPEIVLTQSPGTLSLSPGERATLSCRASQSIRSSYLAWYQQKPGQAPRLLIYGASSRATGIPDRFSGSGSGTDFTLTISRLEPEDFAVYYCQQYGDLPFTFGPGTKLEIKGGGGSGGGGSGGGGSEVQLLESGGGMVQPGGSLRLSCAASGFTFSSYAMSWVRQAPGKGLEWVSAISGSGGRTFYADSVEGRFTISRDNSKNTLYLQMNSLRAEDTAVYYCAKHDYSNYPYFDYWGQGTLVTVSSTRGGSGQQQTLPKPFIWAEPHFMVPKEKQVTICCQGNYGAVEYQLHFEGSLFAVDRPKPPERINKVQFYIPDMNSRMAGQYSCIYRVGELWSEPSNLLDLVVTEMYDTPTLSVHPGPEVISGEKVTFYCRLDTATSMFLLLKEGRSSHVQRGYGKVQAEFPLGPVTTAHRGTYRCFGSYNNHAWSFPSEPVKLLVTGDIENTSLAPEDPTFPADTWGTYLLTTETGLQKDHALWDHTAQNLLRMGLAFLVLVALVWFLVEDWLSRKRTRERASRASTWEGRRRLNTQTLRAKRSGSGVKQTLNFDLLKLAGDVESNPGPSRGHMTEYKPTVRLATRDDVPRAVRTLAAAFADYPATRHTVDPDRHIERVTELQELFLTRVGLDIGKVWVADDGAAVAVWTTPESVEAGAVFAEIGPRMAELSGSRLAAQQQMEGLLAPHRPKEPAWFLATVGVSPDHQGKGLGSAVVLPGVEAAERAGVPAFLETSAPRNLPFYERLGFTVTADVEVPEGPRTWCMTRKPGA

SEQ ID NO: 20657 - protein, 619 aa, synthetic construct
MALPVTALLLPLALLLHAARPEIVLTQSPGTLSLSPGERATLSCRASQSIRSSYLAWYQQKPGQAPRLLIYGASSRATGIPDRFSGSGSGTDFTLTISRLEPEDFAVYYCQQYGDLPFTFGPGTKLEIKGGGGSGGGGSGGGGSEVQLLESGGGMVQPGGSLRLSCAASGFTFSSYAMSWVRQAPGKGLEWVSAISGSGGRTFYADSVEGRFTISRDNSKNTLYLQMNSLRAEDTAVYYCAKHDYSNYPYFDYWGQGTLVTVSSTRKIEVMYPPPYLDNEKSNGTIIHVKGARGDIENTSLAPEDPTFPADTWGTYLLTTETGLQKDHALWDHTAQNLLRMGLAFLVLVALVWFLVEDWLSRKRTRERASRASTWEGRRRLNTQTLRAKRSGSGVKQTLNFDLLKLAGDVESNPGPSRGHMTEYKPTVRLATRDDVPRAVRTLAAAFADYPATRHTVDPDRHIERVTELQELFLTRVGLDIGKVWVADDGAAVAVWTTPESVEAGAVFAEIGPRMAELSGSRLAAQQQMEGLLAPHRPKEPAWFLATVGVSPDHQGKGLGSAVVLPGVEAAERAGVPAFLETSAPRNLPFYERLGFTVTADVEVPEGPRTWCMTRKPGA

SEQ ID NO: 20658 - protein, 706 aa, synthetic construct
MALPVTALLLPLALLLHAARPEIVLTQSPGTLSLSPGERATLSCRASQSIRSSYLAWYQQKPGQAPRLLIYGASSRATGIPDRFSGSGSGTDFTLTISRLEPEDFAVYYCQQYGDLPFTFGPGTKLEIKGGGGSGGGGSGGGGSEVQLLESGGGMVQPGGSLRLSCAASGFTFSSYAMSWVRQAPGKGLEWVSAISGSGGRTFYADSVEGRFTISRDNSKNTLYLQMNSLRAEDTAVYYCAKHDYSNYPYFDYWGQGTLVTVSSTRLWVSQPPEIRTLEGSSAFLPCSFNASQGRLAIGSVTWFRDEVVPGKEVRNGTPEFRGRLAPLASSRFLHDHQAELHIRDVRGHDASIYVCRVEVLGLGVGTGNGTRLVVEKEHPQLGAGTVLLLRAGFYAVSFLSVAVGSTVYYQGKCLTWKGPRRQLPAVVPAPLPPPCGSSAHLLPPVPGGRAKRSGSGVKQTLNFDLLKLAGDVESNPGPSRMYRMQLLSCIALSLALVTNSAPTSSSTKKTQLQLEHLLLDLQMILNGINNYKNPKLTEMLTAKFYMPKKATELKHLQCLEEELKPLEEVLNLAQSKNFHLRPRDLISNINVIVLELKGSETTFMCEYADETATIVEFLNRWITFCQSIISTLTKIEVMYPPPYLDNEKSNGTIIHVKGKHLCPSPLFPGPSKPFWVLVVVGGVLACYSLLVTVAFIIFWVRSKRS

SEQ ID NO: 20659 - protein, 682 aa, synthetic construct
MALPVTALLLPLALLLHAARPEIVLTQSPGTLSLSPGERATLSCRASQSIRSSYLAWYQQKPGQAPRLLIYGASSRATGIPDRFSGSGSGTDFTLTISRLEPEDFAVYYCQQYGDLPFTFGPGTKLEIKGGGGSGGGGSGGGGSEVQLLESGGGMVQPGGSLRLSCAASGFTFSSYAMSWVRQAPGKGLEWVSAISGSGGRTFYADSVEGRFTISRDNSKNTLYLQMNSLRAEDTAVYYCAKHDYSNYPYFDYWGQGTLVTVSSTRLWVSQPPEIRTLEGSSAFLPCSFNASQGRLAIGSVTWFRDEVVPGKEVRNGTPEFRGRLAPLASSRFLHDHQAELHIRDVRGHDASIYVCRVEVLGLGVGTGNGTRLVVEKEHPQLGAGTVLLLRAGFYAVSFLSVAVGSTVYYQGKCLTWKGPRRQLPAVVPAPLPPPCGSSAHLLPPVPGGRAKRSGSGVKQTLNFDLLKLAGDVESNPGPSRGHMTEYKPTVRLATRDDVPRAVRTLAAAFADYPATRHTVDPDRHIERVTELQELFLTRVGLDIGKVWVADDGAAVAVWTTPESVEAGAVFAEIGPRMAELSGSRLAAQQQMEGLLAPHRPKEPAWFLATVGVSPDHQGKGLGSAVVLPGVEAAERAGVPAFLETSAPRNLPFYERLGFTVTADVEVPEGPRTWCMTRKPGA

SEQ ID NO: 20660 - protein, 358 aa, synthetic construct
MALPVTALLLPLALLLHAARPEIVLTQSPGTLSLSPGERATLSCRASQSIRSSYLAWYQQKPGQAPRLLIYGASSRATGIPDRFSGSGSGTDFTLTISRLEPEDFAVYYCQQYGDLPFTFGPGTKLEIKGGGGSGGGGSGGGGSEVQLLESGGGMVQPGGSLRLSCAASGFTFSSYAMSWVRQAPGKGLEWVSAISGSGGRTFYADSVEGRFTISRDNSKNTLYLQMNSLRAEDTAVYYCAKHDYSNYPYFDYWGQGTLVTVSSTRKIEVMYPPPYLDNEKSNGTIIHVKGARITQGLAVSTISSFFPPGYQVSFCLVMVLLFAVDTGLYFSVKTNIRSSTRDWKDHKFKWRKDPQDK

SEQ ID NO: 20661 - protein, 358 aa, synthetic construct
MALPVTALLLPLALLLHAARPEIVLTQSPGTLSLSPGERATLSCRASQSIRSSYLAWYQQKPGQAPRLLIYGASSRATGIPDRFSGSGSGTDFTLTISRLEPEDFAVYYCQQYGDLPFTFGPGTKLEIKGGGGSGGGGSGGGGSEVQLLESGGGMVQPGGSLRLSCAASGFTFSSYAMSWVRQAPGKGLEWVSAISGSGGRTFYADSVEGRFTISRDNSKNTLYLQMNSLRAEDTAVYYCAKHDYSNYPYFDYWGQGTLVTVSSTRKIEVMYPPPYLDNEKSNGTIIHVKGARITQGLAVPTISSFFPPGYQVSFCLVMVLLFAVDTGLYFSVKTNIRSSTRDWKDHKFKWRKDPQDK

SEQ ID NO: 20662 - protein, 337 aa, synthetic construct
MALPVTALLLPLALLLHAARPEIVLTQSPGTLSLSPGERATLSCRASQSIRSSYLAWYQQKPGQAPRLLIYGASSRATGIPDRFSGSGSGTDFTLTISRLEPEDFAVYYCQQYGDLPFTFGPGTKLEIKGGGGSGGGGSGGGGSEVQLLESGGGMVQPGGSLRLSCAASGFTFSSYAMSWVRQAPGKGLEWVSAISGSGGRTFYADSVEGRFTISRDNSKNTLYLQMNSLRAEDTAVYYCAKHDYSNYPYFDYWGQGTLVTVSSTRKIEVMYPPPYLDNEKSNGTIIHVKGARITQGLAVSTISSFSPPGYQVSFCLVMVLLFAVDTGLYFSVKTNI

SEQ ID NO: 20663 - protein, 368 aa, synthetic construct
MALPVTALLLPLALLLHAARPEIVLTQSPGTLSLSPGERATLSCRASQSIRSSYLAWYQQKPGQAPRLLIYGASSRATGIPDRFSGSGSGTDFTLTISRLEPEDFAVYYCQQYGDLPFTFGPGTKLEIKGGGGSGGGGSGGGGSEVQLLESGGGMVQPGGSLRLSCAASGFTFSSYAMSWVRQAPGKGLEWVSAISGSGGRTFYADSVEGRFTISRDNSKNTLYLQMNSLRAEDTAVYYCAKHDYSNYPYFDYWGQGTLVTVSSTRKIEVMYPPPYLDNEKSNGTIIHVKGARVEKEHPQLGAGTVLLLRAGFYAVSFLSVAVGSTVYYQGKCLTWKGPRRQLPAVVPAPLPPPCGSSAHLLPPVPGG

SEQ ID NO: 20664 - protein, 449 aa, synthetic construct
MALPVTALLLPLALLLHAARPEIVLTQSPGTLSLSPGERATLSCRASQSIRSSYLAWYQQKPGQAPRLLIYGASSRATGIPDRFSGSGSGTDFTLTISRLEPEDFAVYYCQQYGDLPFTFGPGTKLEIKGGGGSGGGGSGGGGSEVQLLESGGGMVQPGGSLRLSCAASGFTFSSYAMSWVRQAPGKGLEWVSAISGSGGRTFYADSVEGRFTISRDNSKNTLYLQMNSLRAEDTAVYYCAKHDYSNYPYFDYWGQGTLVTVSSTRKIEVMYPPPYLDNEKSNGTIIHVKGARKSVRFYLVVSPASASTQTSWTPRDLVSSQTQTQSCVPPTAGARQAPESPSTIPVPSQPQNSTLRPGPAAPIALVPVFCGLLVAKSLVLSALLVWWGDIWWKTMMELRSLDTQKATCHLQQVTDLPWTSVSSPVEREILYHTVARTKISDDDDEHTL

SEQ ID NO: 20665 - protein, 386 aa, synthetic construct
MALPVTALLLPLALLLHAARPEIVLTQSPGTLSLSPGERATLSCRASQSIRSSYLAWYQQKPGQAPRLLIYGASSRATGIPDRFSGSGSGTDFTLTISRLEPEDFAVYYCQQYGDLPFTFGPGTKLEIKGGGGSGGGGSGGGGSEVQLLESGGGMVQPGGSLRLSCAASGFTFSSYAMSWVRQAPGKGLEWVSAISGSGGRTFYADSVEGRFTISRDNSKNTLYLQMNSLRAEDTAVYYCAKHDYSNYPYFDYWGQGTLVTVSSTRKIEVMYPPPYLDNEKSNGTIIHVKGARGDIENTSLAPEDPTFPADTWGTYLLTTETGLQKDHALWDHTAQNLLRMGLAFLVLVALVWFLVEDWLSRKRTRERASRASTWEGRRRLNTQTL

SEQ ID NO: 20666 - protein, 982 aa, synthetic construct
MALPVTALLLPLALLLHAARPEIVLTQSPGTLSLSPGERATLSCRASQSIRSSYLAWYQQKPGQAPRLLIYGASSRATGIPDRFSGSGSGTDFTLTISRLEPEDFAVYYCQQYGDLPFTFGPGTKLEIKLEGQPKANPTVTLFPPSSEELQANKATLVCLISDFYPGAVTVAWKADGSPVKAGVETTKPSKQSNNKYAASSYLSLTPEQWKSHRSYSCQVTHEGSTVEKTVAPTECSGSQSFGLLDPKLCYLLDGILFIYGVILTALFLRVKFSRSADAPAYQQGQNQLYNELNLGRREEYDVLDKRRGRDPEMGGKPQRRKNPQEGLYNELQKDKMAEAYSEIGMKGERRRGKGHDGLYQGLSTATKDTYDALHMQALPPRRAKRSGSGATNFSLLKQAGDVEENPGPTSMDWIWRILFLVGAATGAHSFEEVQLLESGGGMVQPGGSLRLSCAASGFTFSSYAMSWVRQAPGKGLEWVSAISGSGGRTFYADSVEGRFTISRDNSKNTLYLQMNSLRAEDTAVYYCAKHDYSNYPYFDYWGQGTLVTVSSTRASTKGPSVFPLAPSSKSTSGGTAALGCLVKDYFPEPVTVSWNSGALTSGVHTFPAVLQSSGLYSLSSVVTVPSSSLGTQTYICNVNHKPSNTKVDKRVEPKSCGTGDIENTSLAPEDPTFPADTWGTYLLTTETGLQKDHALWDHTAQNLLRMGLAFLVLVALVWFLVEDWLSRKRTRERASRASTWEGRRRLNTQTLRAKRSGSGATNFSLLKQAGDVEENPGPSRGHMTEYKPTVRLATRDDVPRAVRTLAAAFADYPATRHTVDPDRHIERVTELQELFLTRVGLDIGKVWVADDGAAVAVWTTPESVEAGAVFAEIGPRMAELSGSRLAAQQQMEGLLAPHRPKEPAWFLATVGVSPDHQGKGLGSAVVLPGVEAAERAGVPAFLETSAPRNLPFYERLGFTVTADVEVPEGPRTWCMTRKPGA

SEQ ID NO: 20667 - protein, 1048 aa, synthetic construct
MALPVTALLLPLALLLHAARPEIVLTQSPGTLSLSPGERATLSCRASQSIRSSYLAWYQQKPGQAPRLLIYGASSRATGIPDRFSGSGSGTDFTLTISRLEPEDFAVYYCQQYGDLPFTFGPGTKLEIKLEGQPKANPTVTLFPPSSEELQANKATLVCLISDFYPGAVTVAWKADGSPVKAGVETTKPSKQSNNKYAASSYLSLTPEQWKSHRSYSCQVTHEGSTVEKTVAPTECSGSQSFGLLDPKLCYLLDGILFIYGVILTALFLRVKFSRSADAPAYQQGQNQLYNELNLGRREEYDVLDKRRGRDPEMGGKPQRRKNPQEGLYNELQKDKMAEAYSEIGMKGERRRGKGHDGLYQGLSTATKDTYDALHMQALPPRRAKRSGSGATNFSLLKQAGDVEENPGPTSMDWIWRILFLVGAATGAHSFEEVQLLESGGGMVQPGGSLRLSCAASGFTFSSYAMSWVRQAPGKGLEWVSAISGSGGRTFYADSVEGRFTISRDNSKNTLYLQMNSLRAEDTAVYYCAKHDYSNYPYFDYWGQGTLVTVSSTRASTKGPSVFPLAPSSKSTSGGTAALGCLVKDYFPEPVTVSWNSGALTSGVHTFPAVLQSSGLYSLSSVVTVPSSSLGTQTYICNVNHKPSNTKVDKRVEPKSCGTKSVRFYLVVSPASASTQTSWTPRDLVSSQTQTQSCVPPTAGARQAPESPSTIPVPSQPQNSTLRPGPAAPIALVPVFCGLLVAKSLVLSALLVWWGDIWWKTMMELRSLDTQKATCHLQQVTDLPWTSVSSPVEREILYHTVARTKISDDDDEHTLRAKRSGSGVKQTLNFDLLKLAGDVESNPGPSRGHMTEYKPTVRLATRDDVPRAVRTLAAAFADYPATRHTVDPDRHIERVTELQELFLTRVGLDIGKVWVADDGAAVAVWTTPESVEAGAVFAEIGPRMAELSGSRLAAQQQMEGLLAPHRPKEPAWFLATVGVSPDHQGKGLGSAVVLPGVEAAERAGVPAFLETSAPRNLPFYERLGFTVTADVEVPEGPRTWCMTRKPGA

SEQ ID NO: 20668 - protein, 968 aa, synthetic construct
MALPVTALLLPLALLLHAARPEIVLTQSPGTLSLSPGERATLSCRASQSIRSSYLAWYQQKPGQAPRLLIYGASSRATGIPDRFSGSGSGTDFTLTISRLEPEDFAVYYCQQYGDLPFTFGPGTKLEIKLEGQPKANPTVTLFPPSSEELQANKATLVCLISDFYPGAVTVAWKADGSPVKAGVETTKPSKQSNNKYAASSYLSLTPEQWKSHRSYSCQVTHEGSTVEKTVAPTECSGSQSFGLLDPKLCYLLDGILFIYGVILTALFLRVKFSRSADAPAYQQGQNQLYNELNLGRREEYDVLDKRRGRDPEMGGKPQRRKNPQEGLYNELQKDKMAEAYSEIGMKGERRRGKGHDGLYQGLSTATKDTYDALHMQALPPRRAKRSGSGATNFSLLKQAGDVEENPGPTSMDWIWRILFLVGAATGAHSFEEVQLLESGGGMVQPGGSLRLSCAASGFTFSSYAMSWVRQAPGKGLEWVSAISGSGGRTFYADSVEGRFTISRDNSKNTLYLQMNSLRAEDTAVYYCAKHDYSNYPYFDYWGQGTLVTVSSTRASTKGPSVFPLAPSSKSTSGGTAALGCLVKDYFPEPVTVSWNSGALTSGVHTFPAVLQSSGLYSLSSVVTVPSSSLGTQTYICNVNHKPSNTKVDKRVEPKSCGTVVEKEHPQLGAGTVLLLRAGFYAVSFLSVAVGSTVYYQGKCLTWKGPRRQLPAVVPAPLPPPCGSSAHLLPPVPGGRAKRSGSGVKQTLNFDLLKLAGDVESNPGPSRGHMTEYKPTVRLATRDDVPRAVRTLAAAFADYPATRHTVDPDRHIERVTELQELFLTRVGLDIGKVWVADDGAAVAVWTTPESVEAGAVFAEIGPRMAELSGSRLAAQQQMEGLLAPHRPKEPAWFLATVGVSPDHQGKGLGSAVVLPGVEAAERAGVPAFLETSAPRNLPFYERLGFTVTADVEVPEGPRTWCMTRKPGA

SEQ ID NO: 20669 - protein, 997 aa, synthetic construct
MALPVTALLLPLALLLHAARPEIVLTQSPGTLSLSPGERATLSCRASQSIRSSYLAWYQQKPGQAPRLLIYGASSRATGIPDRFSGSGSGTDFTLTISRLEPEDFAVYYCQQYGDLPFTFGPGTKLEIKLEDLKNVFPPEVAVFEPSEAEISHTQKATLVCLATGFYPDHVELSWWVNGKEVHSGVSTDPQPLKEQPALNDSRYCLSSRLRVSATFWQNPRNHFRCQVQFYGLSENDEWTQDRAKPVTQIVSAEAWGRADCGSQSFGLLDPKLCYLLDGILFIYGVILTALFLRVKFSRSADAPAYQQGQNQLYNELNLGRREEYDVLDKRRGRDPEMGGKPQRRKNPQEGLYNELQKDKMAEAYSEIGMKGERRRGKGHDGLYQGLSTATKDTYDALHMQALPPRRAKRSGSGATNFSLLKQAGDVEENPGPTSMDWIWRILFLVGAATGAHSFEEVQLLESGGGMVQPGGSLRLSCAASGFTFSSYAMSWVRQAPGKGLEWVSAISGSGGRTFYADSVEGRFTISRDNSKNTLYLQMNSLRAEDTAVYYCAKHDYSNYPYFDYWGQGTLVTVSSTRIQNPDPAVYQLRDSKSSDKSVCLFTDFDSQTNVSQSKDSDVYITDKTVLDMRSMDFKSNSAVAWSNKSDFACANAFNNSIIPEDTFFPSPESSCGTGDIENTSLAPEDPTFPADTWGTYLLTTETGLQKDHALWDHTAQNLLRMGLAFLVLVALVWFLVEDWLSRKRTRERASRASTWEGRRRLNTQTLRAKRSGSGATNFSLLKQAGDVEENPGPSRGHMTEYKPTVRLATRDDVPRAVRTLAAAFADYPATRHTVDPDRHIERVTELQELFLTRVGLDIGKVWVADDGAAVAVWTTPESVEAGAVFAEIGPRMAELSGSRLAAQQQMEGLLAPHRPKEPAWFLATVGVSPDHQGKGLGSAVVLPGVEAAERAGVPAFLETSAPRNLPFYERLGFTVTADVEVPEGPRTWCMTRKPGA

SEQ ID NO: 20670 - protein, 1063 aa, synthetic construct
MALPVTALLLPLALLLHAARPEIVLTQSPGTLSLSPGERATLSCRASQSIRSSYLAWYQQKPGQAPRLLIYGASSRATGIPDRFSGSGSGTDFTLTISRLEPEDFAVYYCQQYGDLPFTFGPGTKLEIKLEDLKNVFPPEVAVFEPSEAEISHTQKATLVCLATGFYPDHVELSWWVNGKEVHSGVSTDPQPLKEQPALNDSRYCLSSRLRVSATFWQNPRNHFRCQVQFYGLSENDEWTQDRAKPVTQIVSAEAWGRADCGSQSFGLLDPKLCYLLDGILFIYGVILTALFLRVKFSRSADAPAYQQGQNQLYNELNLGRREEYDVLDKRRGRDPEMGGKPQRRKNPQEGLYNELQKDKMAEAYSEIGMKGERRRGKGHDGLYQGLSTATKDTYDALHMQALPPRRAKRSGSGATNFSLLKQAGDVEENPGPTSMDWIWRILFLVGAATGAHSFEEVQLLESGGGMVQPGGSLRLSCAASGFTFSSYAMSWVRQAPGKGLEWVSAISGSGGRTFYADSVEGRFTISRDNSKNTLYLQMNSLRAEDTAVYYCAKHDYSNYPYFDYWGQGTLVTVSSTRIQNPDPAVYQLRDSKSSDKSVCLFTDFDSQTNVSQSKDSDVYITDKTVLDMRSMDFKSNSAVAWSNKSDFACANAFNNSIIPEDTFFPSPESSCGTKSVRFYLVVSPASASTQTSWTPRDLVSSQTQTQSCVPPTAGARQAPESPSTIPVPSQPQNSTLRPGPAAPIALVPVFCGLLVAKSLVLSALLVWWGDIWWKTMMELRSLDTQKATCHLQQVTDLPWTSVSSPVEREILYHTVARTKISDDDDEHTLRAKRSGSGVKQTLNFDLLKLAGDVESNPGPSRGHMTEYKPTVRLATRDDVPRAVRTLAAAFADYPATRHTVDPDRHIERVTELQELFLTRVGLDIGKVWVADDGAAVAVWTTPESVEAGAVFAEIGPRMAELSGSRLAAQQQMEGLLAPHRPKEPAWFLATVGVSPDHQGKGLGSAVVLPGVEAAERAGVPAFLETSAPRNLPFYERLGFTVTADVEVPEGPRTWCMTRKPGA

SEQ ID NO: 20671 - protein, 983 aa, synthetic construct
MALPVTALLLPLALLLHAARPEIVLTQSPGTLSLSPGERATLSCRASQSIRSSYLAWYQQKPGQAPRLLIYGASSRATGIPDRFSGSGSGTDFTLTISRLEPEDFAVYYCQQYGDLPFTFGPGTKLEIKLEDLKNVFPPEVAVFEPSEAEISHTQKATLVCLATGFYPDHVELSWWVNGKEVHSGVSTDPQPLKEQPALNDSRYCLSSRLRVSATFWQNPRNHFRCQVQFYGLSENDEWTQDRAKPVTQIVSAEAWGRADCGSQSFGLLDPKLCYLLDGILFIYGVILTALFLRVKFSRSADAPAYQQGQNQLYNELNLGRREEYDVLDKRRGRDPEMGGKPQRRKNPQEGLYNELQKDKMAEAYSEIGMKGERRRGKGHDGLYQGLSTATKDTYDALHMQALPPRRAKRSGSGATNFSLLKQAGDVEENPGPTSMDWIWRILFLVGAATGAHSFEEVQLLESGGGMVQPGGSLRLSCAASGFTFSSYAMSWVRQAPGKGLEWVSAISGSGGRTFYADSVEGRFTISRDNSKNTLYLQMNSLRAEDTAVYYCAKHDYSNYPYFDYWGQGTLVTVSSTRIQNPDPAVYQLRDSKSSDKSVCLFTDFDSQTNVSQSKDSDVYITDKTVLDMRSMDFKSNSAVAWSNKSDFACANAFNNSIIPEDTFFPSPESSCGTVVEKEHPQLGAGTVLLLRAGFYAVSFLSVAVGSTVYYQGKCLTWKGPRRQLPAVVPAPLPPPCGSSAHLLPPVPGGRAKRSGSGVKQTLNFDLLKLAGDVESNPGPSRGHMTEYKPTVRLATRDDVPRAVRTLAAAFADYPATRHTVDPDRHIERVTELQELFLTRVGLDIGKVWVADDGAAVAVWTTPESVEAGAVFAEIGPRMAELSGSRLAAQQQMEGLLAPHRPKEPAWFLATVGVSPDHQGKGLGSAVVLPGVEAAERAGVPAFLETSAPRNLPFYERLGFTVTADVEVPEGPRTWCMTRKPGA

SEQ ID NO: 20672 - protein, 954 aa, synthetic construct
MALPVTALLLPLALLLHAARPEIVLTQSPGTLSLSPGERATLSCRASQSIRSSYLAWYQQKPGQAPRLLIYGASSRATGIPDRFSGSGSGTDFTLTISRLEPEDFAVYYCQQYGDLPFTFGPGTKLEIKLEGQPKANPTVTLFPPSSEELQANKATLVCLISDFYPGAVTVAWKADGSPVKAGVETTKPSKQSNNKYAASSYLSLTPEQWKSHRSYSCQVTHEGSTVEKTVAPTECSGSQSFGLLDPKLCYLLDGILFIYGVILTALFLRVKFSRSADAPAYQQGQNQLYNELNLGRREEYDVLDKRRGRDPEMGGKPQRRKNPQEGLYNELQKDKMAEAYSEIGMKGERRRGKGHDGLYQGLSTATKDTYDALHMQALPPRRAKRSGSGATNFSLLKQAGDVEENPGPTSMDWIWRILFLVGAATGAHSFEEVQLLESGGGMVQPGGSLRLSCAASGFTFSSYAMSWVRQAPGKGLEWVSAISGSGGRTFYADSVEGRFTISRDNSKNTLYLQMNSLRAEDTAVYYCAKHDYSNYPYFDYWGQGTLVTVSSTRASTKGPSVFPLAPSSKSTSGGTAALGCLVKDYFPEPVTVSWNSGALTSGVHTFPAVLQSSGLYSLSSVVTVPSSSLGTQTYICNVNHKPSNTKVDKRVEPKSCGTITQGLAVSTISSFFPPGYQVSFCLVMVLLFAVDTGLYFSVKTNIRSSTRDWKDHKFKWRKDPQDKRAKRSGSGATNFSLLKQAGDVEENPGPSRGHMTEYKPTVRLATRDDVPRAVRTLAAAFADYPATRHTVDPDRHIERVTELQELFLTRVGLDIGKVWVADDGAAVAVWTTPESVEAGAVFAEIGPRMAELSGSRLAAQQQMEGLLAPHRPKEPAWFLATVGVSPDHQGKGLGSAVVLPGVEAAERAGVPAFLETSAPRNLPFYERLGFTVTADVEVPEGPRTWCMTRKPGA

SEQ ID NO: 20673 - protein, 969 aa, synthetic construct
MALPVTALLLPLALLLHAARPEIVLTQSPGTLSLSPGERATLSCRASQSIRSSYLAWYQQKPGQAPRLLIYGASSRATGIPDRFSGSGSGTDFTLTISRLEPEDFAVYYCQQYGDLPFTFGPGTKLEIKLEDLKNVFPPEVAVFEPSEAEISHTQKATLVCLATGFYPDHVELSWWVNGKEVHSGVSTDPQPLKEQPALNDSRYCLSSRLRVSATFWQNPRNHFRCQVQFYGLSENDEWTQDRAKPVTQIVSAEAWGRADCGSQSFGLLDPKLCYLLDGILFIYGVILTALFLRVKFSRSADAPAYQQGQNQLYNELNLGRREEYDVLDKRRGRDPEMGGKPQRRKNPQEGLYNELQKDKMAEAYSEIGMKGERRRGKGHDGLYQGLSTATKDTYDALHMQALPPRRAKRSGSGATNFSLLKQAGDVEENPGPTSMDWIWRILFLVGAATGAHSFEEVQLLESGGGMVQPGGSLRLSCAASGFTFSSYAMSWVRQAPGKGLEWVSAISGSGGRTFYADSVEGRFTISRDNSKNTLYLQMNSLRAEDTAVYYCAKHDYSNYPYFDYWGQGTLVTVSSTRIQNPDPAVYQLRDSKSSDKSVCLFTDFDSQTNVSQSKDSDVYITDKTVLDMRSMDFKSNSAVAWSNKSDFACANAFNNSIIPEDTFFPSPESSCGTITQGLAVSTISSFFPPGYQVSFCLVMVLLFAVDTGLYFSVKTNIRSSTRDWKDHKFKWRKDPQDKRAKRSGSGATNFSLLKQAGDVEENPGPSRGHMTEYKPTVRLATRDDVPRAVRTLAAAFADYPATRHTVDPDRHIERVTELQELFLTRVGLDIGKVWVADDGAAVAVWTTPESVEAGAVFAEIGPRMAELSGSRLAAQQQMEGLLAPHRPKEPAWFLATVGVSPDHQGKGLGSAVVLPGVEAAERAGVPAFLETSAPRNLPFYERLGFTVTADVEVPEGPRTWCMTRKPGA

SEQ ID NO: 20674 - protein, 652 aa, synthetic construct
MALPVTALLLPLALLLHAARPEIVLTQSPGTLSLSPGERATLSCRASQSIRSSYLAWYQQKPGQAPRLLIYGASSRATGIPDRFSGSGSGTDFTLTISRLEPEDFAVYYCQQYGDLPFTFGPGTKLEIKLEGQPKANPTVTLFPPSSEELQANKATLVCLISDFYPGAVTVAWKADGSPVKAGVETTKPSKQSNNKYAASSYLSLTPEQWKSHRSYSCQVTHEGSTVEKTVAPTECSGSLGEPQLCYILDAILFLYGIVLTLLYCRLKIQVRKAAITSYEKSDGVYTGLSTRNQETYETLKHEKPPQRAKRSGSGATNFSLLKQAGDVEENPGPTSMDWIWRILFLVGAATGAHSFEEVQLLESGGGMVQPGGSLRLSCAASGFTFSSYAMSWVRQAPGKGLEWVSAISGSGGRTFYADSVEGRFTISRDNSKNTLYLQMNSLRAEDTAVYYCAKHDYSNYPYFDYWGQGTLVTVSSTRASTKGPSVFPLAPSSKSTSGGTAALGCLVKDYFPEPVTVSWNSGALTSGVHTFPAVLQSSGLYSLSSVVTVPSSSLGTQTYICNVNHKPSNTKVDKRVEPKSCGTLGEPQLCYILDAILFLYGIVLTLLYCRLKIQVRKAAITSYEKSDGVYTGLSTRNQETYETLKHEKPPQ

SEQ ID NO: 20675 - protein, 1029 aa, synthetic construct
MALPVTALLLPLALLLHAARPEIVLTQSPGTLSLSPGERATLSCRASQSIRSSYLAWYQQKPGQAPRLLIYGASSRATGIPDRFSGSGSGTDFTLTISRLEPEDFAVYYCQQYGDLPFTFGPGTKLEIKGQPKANPTVTLFPPSSEELQANKATLVCLISDFYPGAVTVAWKADGSPVKAGVETTKPSKQSNNKYAASSYLSLTPEQWKSHRSYSCQVTHEGSTVEKTVAPTECSGSQSFGLLDPKLCYLLDGILFIYGVILTALFLRVKFSRSADAPAYQQGQNQLYNELNLGRREEYDVLDKRRGRDPEMGGKPRRKNPQEGLYNELQKDKMAEAYSEIGMKGERRRGKGHDGLYQGLSTATKDTYDALHMQALPPRRAKRSGSGATNFSLLKQAGDVEENPGPTSMDWIWRILFLVGAATGAHSFEEVQLLESGGGMVQPGGSLRLSCAASGFTFSSYAMSWVRQAPGKGLEWVSAISGSGGRTFYADSVEGRFTISRDNSKNTLYLQMNSLRAEDTAVYYCAKHDYSNYPYFDYWGQGTLVTVSSASTKGPSVFPLAPSSKSTSGGTAALGCLVKDYFPEPVTVSWNSGALTSGVHTFPAVLQSSGLYSLSSVVTVPSSSLGTQTYICNVNHKPSNTKVDKRVEPKSCGTQSFGLLDPKLCYLLDGILFIYGVILTALFLRVKFSRSADAPAYQQGQNQLYNELNLGRREEYDVLDKRRGRDPEMGGKPRRKNPQEGLYNELQKDKMAEAYSEIGMKGERRRGKGHDGLYQGLSTATKDTYDALHMQALPPRRAKRSGSGVKQTLNFDLLKLAGDVESNPGPSRGHMTEYKPTVRLATRDDVPRAVRTLAAAFADYPATRHTVDPDRHIERVTELQELFLTRVGLDIGKVWVADDGAAVAVWTTPESVEAGAVFAEIGPRMAELSGSRLAAQQQMEGLLAPHRPKEPAWFLATVGVSPDHQGKGLGSAVVLPGVEAAERAGVPAFLETSAPRNLPFYERLGFTVTADVEVPEGPRTWCMTRKPGA

SEQ ID NO: 20676 - protein, 815 aa, synthetic construct
MALPVTALLLPLALLLHAARPEIVLTQSPGTLSLSPGERATLSCRASQSIRSSYLAWYQQKPGQAPRLLIYGASSRATGIPDRFSGSGSGTDFTLTISRLEPEDFAVYYCQQYGDLPFTFGPGTKLEIKLEDLKNVFPPEVAVFEPSEAEISHTQKATLVCLATGFYPDHVELSWWVNGKEVHSGVSTDPQPLKEQPALNDSRYCLSSRLRVSATFWQNPRNHFRCQVQFYGLSENDEWTQDRAKPVTQIVSAEAWGRADCGSQSFGLLDPKLCYLLDGILFIYGVILTALFLRVKFSRSADAPAYQQGQNQLYNELNLGRREEYDVLDKRRGRDPEMGGKPRRKNPQEGLYNELQKDKMAEAYSEIGMKGERRRGKGHDGLYQGLSTATKDTYDALHMQALPPRRAKRSGSGATNFSLLKQAGDVEENPGPTSMDWIWRILFLVGAATGAHSFEEVQLLESGGGMVQPGGSLRLSCAASGFTFSSYAMSWVRQAPGKGLEWVSAISGSGGRTFYADSVEGRFTISRDNSKNTLYLQMNSLRAEDTAVYYCAKHDYSNYPYFDYWGQGTLVTVSSTRIQNPDPAVYQLRDSKSSDKSVCLFTDFDSQTNVSQSKDSDVYITDKTVLDMRSMDFKSNSAVAWSNKSDFACANAFNNSIIPEDTFFPSPESSCGTQSFGLLDPKLCYLLDGILFIYGVILTALFLRVKFSRSADAPAYQQGQNQLYNELNLGRREEYDVLDKRRGRDPEMGGKPRRKNPQEGLYNELQKDKMAEAYSEIGMKGERRRGKGHDGLYQGLSTATKDTYDALHMQALPPR

SEQ ID NO: 20677 - protein, 494 aa, synthetic construct
MALPVTALLLPLALLLHAARPDIQMTQSPSSLSASVGDRVTITCRASQSVSSYLAWYQQKPGKAPKLLIYDASNRATGVPSRFSGSGSGTDFTLTISSLQPEDFATYYCQQRTNWPLTFGQGTKVEIKRGGGGSGGGGSGGGGSEVQLVESGGGLVQPGGSLRLSCAASGFTFSSYIMHWVRQAPGKGLEWVAVISYDGRNKYYADSVKGRFTISRDNSKNTLYLQMNSLRAEDTAVYYCARDTDGYDFDYWGQGTLVTVSSTREQKLISEEDLKIEVMYPPPYLDNEKSNGTIIHVKGKHLCPSPLFPGPSKPFWVLVVVGGVLACYSLLVTVAFIIFWVRSKRSRLLHSDYMNMTPRRPGPTRKHYQPYAPPRDFAAYRSRVKFSRSADAPAYQQGQNQLYNELNLGRREEYDVLDKRRGRDPEMGGKPRRKNPQEGLYNELQKDKMAEAYSEIGMKGERRRGKGHDGLYQGLSTATKDTYDALHMQALPPR

SEQ ID NO: 20678 - protein, 500 aa, synthetic construct
MALPVTALLLPLALLLHAARPDIQMTQSPSSLSASVGDRVTITCRASQSVSSYLAWYQQKPGKAPKLLIYDASNRATGVPSRFSGSGSGTDFTLTISSLQPEDFATYYCQQRTNWPLTFGQGTKVEIKRGGGGSGGGGSGGGGSEVQLVESGGGLVQPGGSLRLSCAASGFTFSSYIMHWVRQAPGKGLEWVAVISYDGRNKYYADSVKGRFTISRDNSKNTLYLQMNSLRAEDTAVYYCARDTDGYDFDYWGQGTLVTVSSTREQKLISEEDLAKPTTTPAPRPPTPAPTIASQPLSLRPEACRPAAGGAVHTRGLDFACDIYIWAPLAGTCGVLLLSLVITLYCKRGRKKLLYIFKQPFMRPVQTTQEEDGCSCRFPEEEEGGCELRVKFSRSADAPAYQQGQNQLYNELNLGRREEYDVLDKRRGRDPEMGGKPRRKNPQEGLYNELQKDKMAEAYSEIGMKGERRRGKGHDGLYQGLSTATKDTYDALHMQALPPR

SEQ ID NO: 20679 - protein, 500 aa, synthetic construct
MALPVTALLLPLALLLHAARPEVQLVESGGGLVQPGGSLRLSCAASGFTFSSYIMHWVRQAPGKGLEWVAVISYDGRNKYYADSVKGRFTISRDNSKNTLYLQMNSLRAEDTAVYYCARDTDGYDFDYWGQGTLVTVSSGGGGSGGGGSGGGGSDIQMTQSPSSLSASVGDRVTITCRASQSVSSYLAWYQQKPGKAPKLLIYDASNRATGVPSRFSGSGSGTDFTLTISSLQPEDFATYYCQQRTNWPLTFGQGTKVEIKRTREQKLISEEDLAKPTTTPAPRPPTPAPTIASQPLSLRPEACRPAAGGAVHTRGLDFACDIYIWAPLAGTCGVLLLSLVITLYCKRGRKKLLYIFKQPFMRPVQTTQEEDGCSCRFPEEEEGGCELRVKFSRSADAPAYQQGQNQLYNELNLGRREEYDVLDKRRGRDPEMGGKPRRKNPQEGLYNELQKDKMAEAYSEIGMKGERRRGKGHDGLYQGLSTATKDTYDALHMQALPPR

SEQ ID NO: 20680 - protein, 913 aa, synthetic construct
MALPVTALLLPLALLLHAARPDIQMTQSPSSLSASVGDRVTITCRASQSVSSYLAWYQQKPGKAPKLLIYDASNRATGVPSRFSGSGSGTDFTLTISSLQPEDFATYYCQQRTNWPLTFGQGTKVEIKRGGGGSGGGGSGGGGSEVQLVESGGGLVQPGGSLRLSCAASGFTFSSYIMHWVRQAPGKGLEWVAVISYDGRNKYYADSVKGRFTISRDNSKNTLYLQMNSLRAEDTAVYYCARDTDGYDFDYWGQGTLVTVSSTREQKLISEEDLAKPTTTPAPRPPTPAPTIASQPLSLRPEACRPAAGGAVHTRGLDFACDIYIWAPLAGTCGVLLLSLVITLYCGRARVKFSRSADAPAYQQGQNQLYNELNLGRREEYDVLDKRRGRDPEMGGKPRRKNPQEGLYNELQKDKMAEAYSEIGMKGERRRGKGHDGLYQGLSTATKDTYDALHMQALPPRSRGSGATNFSLLKQAGDVEENPGPGIHMATYEVLCEVARKLGTDDREVVLFLLNVFIPQPTLAQLIGALRALKEEGRLTFPLLAECLFRAGRRDLLRDLLHLDPRFLERHLAGTMSYFSPYQLTVLHVDGELCARDIRSLIFLSKDTIGSRSTPQTFLHWVYCMENLDLLGPTDVDALMSMLRSLSRVDLQRQVQTLMGLHLSGPSHSQHYRHTPLETDFYDYKDDDDKTSGSGEGRGSLLTCGDVEENPGPHMTEYKPTVRLATRDDVPRAVRTLAAAFADYPATRHTVDPDRHIERVTELQELFLTRVGLDIGKVWVADDGAAVAVWTTPESVEAGAVFAEIGPRMAELSGSRLAAQQQMEGLLAPHRPKEPAWFLATVGVSPDHQGKGLGSAVVLPGVEAAERAGVPAFLETSAPRNLPFYERLGFTVTADVEVPEGPRTWCMTRKPGA

SEQ ID NO: 20681 - protein, 853 aa, synthetic construct
MALPVTALLLPLALLLHAARPDIQMTQSPSSLSASVGDRVTITCRASQSVSSYLAWYQQKPGKAPKLLIYDASNRATGVPSRFSGSGSGTDFTLTISSLQPEDFATYYCQQRTNWPLTFGQGTKVEIKRLEIQNPDPAVYQLRDSKSSDKSVCLFTDFDSQTNVSQSKDSDVYITDKCVLDMRSMDFKSNSAVAWSNKSDFACANAFNNSIIPEDTFFPSSDVPCDVKLVEKSFETDTNLNFQNLSVIGFRILLLKVAGFNLLMTLRLWSSRAKRSGSGVKQTLNFDLLKLAGDVESNPGPTSMDWIWRILFLVGAATGAHSFEEVQLVESGGGLVQPGGSLRLSCAASGFTFSSYIMHWVRQAPGKGLEWVAVISYDGRNKYYADSVKGRFTISRDNSKNTLYLQMNSLRAEDTAVYYCARDTDGYDFDYWGQGTLVTVSSTREDLKNVFPPEVAVFEPSKAEIAHTQKATLVCLATGFYPDHVELSWWVNGKEVHSGVCTDPQPLKEQPALNDSRYCLSSRLRVSATFWQNPRNHFRCQVQFYGLSENDEWTQDRAKPVTQIVSAEAWGRADCGITSASYHQGVLSATILYEILLGKATLYAVLVSALVLMAMVKRKDSRGRAKRSGSGATNFSLLKQAGDVEENPGPSRGHMTEYKPTVRLATRDDVPRAVRTLAAAFADYPATRHTVDPDRHIERVTELQELFLTRVGLDIGKVWVADDGAAVAVWTTPESVEAGAVFAEIGPRMAELSGSRLAAQQQMEGLLAPHRPKEPAWFLATVGVSPDHQGKGLGSAVVLPGVEAAERAGVPAFLETSAPRNLPFYERLGFTVTADVEVPEGPRTWCMTRKPGA

SEQ ID NO: 20682 - protein, 852 aa, synthetic construct
MALPVTALLLPLALLLHAARPDIQMTQSPSSLSASVGDRVTITCRASQSVSSYLAWYQQKPGKAPKLLIYDASNRATGVPSRFSGSGSGTDFTLTISSLQPEDFATYYCQQRTNWPLTFGQGTKVEIKRLEDLKNVFPPEVAVFEPSKAEIAHTQKATLVCLATGFYPDHVELSWWVNGKEVHSGVCTDPQPLKEQPALNDSRYCLSSRLRVSATFWQNPRNHFRCQVQFYGLSENDEWTQDRAKPVTQIVSAEAWGRADCGITSASYHQGVLSATILYEILLGKATLYAVLVSALVLMAMVKRKDSRGRAKRSGSGATNFSLLKQAGDVEENPGPTSMDWIWRILFLVGAATGAHSFEEVQLVESGGGLVQPGGSLRLSCAASGFTFSSYIMHWVRQAPGKGLEWVAVISYDGRNKYYADSVKGRFTISRDNSKNTLYLQMNSLRAEDTAVYYCARDTDGYDFDYWGQGTLVTVSSTRIQNPDPAVYQLRDSKSSDKSVCLFTDFDSQTNVSQSKDSDVYITDKCVLDMRSMDFKSNSAVAWSNKSDFACANAFNNSIIPEDTFFPSSDVPCDVKLVEKSFETDTNLNFQNLSVIGFRILLLKVAGFNLLMTLRLWSSRAKRSGSGVKQTLNFDLLKLAGDVESNPGPSRGHMTEYKPTVRLATRDDVPRAVRTLAAAFADYPATRHTVDPDRHIERVTELQELFLTRVGLDIGKVWVADDGAAVAVWTTPESVEAGAVFAEIGPRMAELSGSRLAAQQQMEGLLAPHRPKEPAWFLATVGVSPDHQGKGLGSAVVLPGVEAAERAGVPAFLETSAPRNLPFYERLGFTVTADVEVPEGPRTWCMTRKPGA

SEQ ID NO: 20683 - protein, 619 aa, synthetic construct
MALPVTALLLPLALLLHAARPDIQMTQSPSSLSASVGDRVTITCRASQSVSSYLAWYQQKPGKAPKLLIYDASNRATGVPSRFSGSGSGTDFTLTISSLQPEDFATYYCQQRTNWPLTFGQGTKVEIKRLEDLKNVFPPEVAVFEPSEAEISHTQKATLVCLATGFYPDHVELSWWVNGKEVHSGVCTDPQPLKEQPALNDSRYCLSSRLRVSATFWQNPRNHFRCQVQFYGLSENDEWTQDRAKPVTQIVSAEAWGRADCGFTSESYQQGVLSATILYEILLGKATLYAVLVSALVLMAMVKRKDSRGRAKRSGSGATNFSLLKQAGDVEENPGPTSMDWIWRILFLVGAATGAHSFEEVQLVESGGGLVQPGGSLRLSCAASGFTFSSYIMHWVRQAPGKGLEWVAVISYDGRNKYYADSVKGRFTISRDNSKNTLYLQMNSLRAEDTAVYYCARDTDGYDFDYWGQGTLVTVSSTRIQNPDPAVYQLRDSKSSDKSVCLFTDFDSQTNVSQSKDSDVYITDKCVLDMRSMDFKSNSAVAWSNKSDFACANAFNNSIIPEDTFFPSPESSCDVKLVEKSFETDTNLNFQNLSVIGFRILLLKVAGFNLLMTLRLWSS

SEQ ID NO: 20684 - protein, 844 aa, synthetic construct
MALPVTALLLPLALLLHAARPDIQMTQSPSSLSASVGDRVTITCRASQSVSSYLAWYQQKPGKAPKLLIYDASNRATGVPSRFSGSGSGTDFTLTISSLQPEDFATYYCQQRTNWPLTFGQGTKVEIKRLEDLKNVFPPEVAVFEPSEAEISHTQKATLVCLATGFYPDHVELSWWVNGKEVHSGVCTDPQPLKEQPALNDSRYCLSSRLRVSATFWQNPRNHFRCQVQFYGLSENDEWTQDRAKPVTQIVSAEAWGRADCGFTSESYQQGVLSATILYEILLGKATLYAVLVSALVLMAMVKRKDSRGRAKRSGSGATNFSLLKQAGDVEENPGPTSMDWIWRILFLVGAATGAHSFEEVQLVESGGGLVQPGGSLRLSCAASGFTFSSYIMHWVRQAPGKGLEWVAVISYDGRNKYYADSVKGRFTISRDNSKNTLYLQMNSLRAEDTAVYYCARDTDGYDFDYWGQGTLVTVSSTRIQNPDPAVYQLRDSKSSDKSVCLFTDFDSQTNVSQSKDSDVYITDKCVLDMRSMDFKSNSAVAWSNKSDFACANAFNNSIIPEDTFFPSPESSCDVKLVEKSFETDTNLNFQNLSVIGFRILLLKVAGFNLLMTLRLWSSRAKRSGSGVKQTLNFDLLKLAGDVESNPGPSRGGIHTMATYEVLCEVARKLGTDDREVVLFLLNVFIPQPTLAQLIGALRALKEEGRLTFPLLAECLFRAGRRDLLRDLLHLDPRFLERHLAGTMSYFSPYQLTVLHVDGELCARDIRSLIFLSKDTIGSRSTPQTFLHWVYCMENLDLLGPTDVDALMSMLRSLSRVDLQRQVQTLMGLHLSGPSHSQHYRHTP

SEQ ID NO: 20685 - protein, 623 aa, synthetic construct
MALPVTALLLPLALLLHAARPDIQMTQSPSSLSASVGDRVTITCRASQSVSSYLAWYQQKPGKAPKLLIYDASNRATGVPSRFSGSGSGTDFTLTISSLQPEDFATYYCQQRTNWPLTFGQGTKVEIKRLEIQNPDPAVYQLRDSKSSDKSVCLFTDFDSQTNVSQSKDSDVYITDKCVLDMRSMDFKSNSAVAWSNKSDFACANAFNNSIIPEDTFFPSPESSCDVKLVEKSFETDTNLNFQNLSVIGFRILLLKVAGFNLLMTLRLWSSRAKRSGSGVKQTLNFDLLKLAGDVESNPGPTSMDWIWRILFLVGAATGAHSFEEVQLVESGGGLVQPGGSLRLSCAASGFTFSSYIMHWVRQAPGKGLEWVAVISYDGRNKYYADSVKGRFTISRDNSKNTLYLQMNSLRAEDTAVYYCARDTDGYDFDYWGQGTLVTVSSTREDLKNVFPPEVAVFEPSEAEISHTQKATLVCLATGFYPDHVELSWWVNGKEVHSGVCTDPQPLKEQPALNDSRYCLSSRLRVSATFWQNPRNHFRCQVQFYGLSENDEWTQDRAKPVTQIVSAEAWGRADCGFTSESYQQGVLSATILYEILLGKATLYAVLVSALVLMAMVKRKDSRG

SEQ ID NO: 20686 - protein, 845 aa, synthetic construct
MALPVTALLLPLALLLHAARPDIQMTQSPSSLSASVGDRVTITCRASQSVSSYLAWYQQKPGKAPKLLIYDASNRATGVPSRFSGSGSGTDFTLTISSLQPEDFATYYCQQRTNWPLTFGQGTKVEIKRLEIQNPDPAVYQLRDSKSSDKSVCLFTDFDSQTNVSQSKDSDVYITDKCVLDMRSMDFKSNSAVAWSNKSDFACANAFNNSIIPEDTFFPSPESSCDVKLVEKSFETDTNLNFQNLSVIGFRILLLKVAGFNLLMTLRLWSSRAKRSGSGVKQTLNFDLLKLAGDVESNPGPTSMDWIWRILFLVGAATGAHSFEEVQLVESGGGLVQPGGSLRLSCAASGFTFSSYIMHWVRQAPGKGLEWVAVISYDGRNKYYADSVKGRFTISRDNSKNTLYLQMNSLRAEDTAVYYCARDTDGYDFDYWGQGTLVTVSSTREDLKNVFPPEVAVFEPSEAEISHTQKATLVCLATGFYPDHVELSWWVNGKEVHSGVCTDPQPLKEQPALNDSRYCLSSRLRVSATFWQNPRNHFRCQVQFYGLSENDEWTQDRAKPVTQIVSAEAWGRADCGFTSESYQQGVLSATILYEILLGKATLYAVLVSALVLMAMVKRKDSRGRAKRSGSGATNFSLLKQAGDVEENPGPSRGGIHTMATYEVLCEVARKLGTDDREVVLFLLNVFIPQPTLAQLIGALRALKEEGRLTFPLLAECLFRAGRRDLLRDLLHLDPRFLERHLAGTMSYFSPYQLTVLHVDGELCARDIRSLIFLSKDTIGSRSTPQTFLHWVYCMENLDLLGPTDVDALMSMLRSLSRVDLQRQVQTLMGLHLSGPSHSQHYRHTP

SEQ ID NO: 20687 - protein, 897 aa, synthetic construct
MALPVTALLLPLALLLHAARPLEGKPIPNPLLGLDSTGSGEDLKNVFPPEVAVFEPSKAEIAHTQKATLVCLATGFYPDHVELSWWVNGKEVHSGVCTDPQPLKEQPALNDSRYCLSSRLRVSATFWQNPRNHFRCQVQFYGLSENDEWTQDRAKPVTQIVSAEAWGRADCGITSASYHQGVLSATILYEILLGKATLYAVLVSALVLMAMVKRKDSRGRAKRSGSGATNFSLLKQAGDVEENPGPTSMALPVTALLLPLALLLHAARPDIQMTQSPSSLSASVGDRVTITCRASQSVSSYLAWYQQKPGKAPKLLIYDASNRATGVPSRFSGSGSGTDFTLTISSLQPEDFATYYCQQRTNWPLTFGQGTKVEIKRGGGGSGGGGSGGGGSEVQLVESGGGLVQPGGSLRLSCAASGFTFSSYIMHWVRQAPGKGLEWVAVISYDGRNKYYADSVKGRFTISRDNSKNTLYLQMNSLRAEDTAVYYCARDTDGYDFDYWGQGTLVTVSSTREQKLISEEDGSGIQNPDPAVYQLRDSKSSDKSVCLFTDFDSQTNVSQSKDSDVYITDKCVLDMRSMDFKSNSAVAWSNKSDFACANAFNNSIIPEDTFFPSSDVPCDVKLVEKSFETDTNLNFQNLSVIGFRILLLKVAGFNLLMTLRLWSSRAKRSGSGVKQTLNFDLLKLAGDVESNPGPSRGHMTEYKPTVRLATRDDVPRAVRTLAAAFADYPATRHTVDPDRHIERVTELQELFLTRVGLDIGKVWVADDGAAVAVWTTPESVEAGAVFAEIGPRMAELSGSRLAAQQQMEGLLAPHRPKEPAWFLATVGVSPDHQGKGLGSAVVLPGVEAAERAGVPAFLETSAPRNLPFYERLGFTVTADVEVPEGPRTWCMTRKPGA

SEQ ID NO: 20688 - protein, 898 aa, synthetic construct
MALPVTALLLPLALLLHAARPLEQKLISEEDLGSGDRPDPAVYQLRDSKSSDKSVCLFTDFDSQTNVSQSKDSDVYITDKCVLDMRSMDFKSNSAVAWSNKSDFACANAFNNSIIPEDTFFPSPESSCDVKLVEKSFETDTNLNFQNLSVIGFRILLLKVAGFNLLMTLRLWSSSSRAKRSGSGVKQTLNFDLLKLAGDVESNPGPTSMALPVTALLLPLALLLHAARPDIQMTQSPSSLSASVGDRVTITCRASQSVSSYLAWYQQKPGKAPKLLIYDASNRATGVPSRFSGSGSGTDFTLTISSLQPEDFATYYCQQRTNWPLTFGQGTKVEIKRGGGGSGGGGSGGGGSEVQLVESGGGLVQPGGSLRLSCAASGFTFSSYIMHWVRQAPGKGLEWVAVISYDGRNKYYADSVKGRFTISRDNSKNTLYLQMNSLRAEDTAVYYCARDTDGYDFDYWGQGTLVTVSSTRGKPIPNPLLGLDSTGSGEDLKNVFPPEVAVFEPSEAEISHTQKATLVCLATGFYPDHVELSWWVNGKEVHSGVCTDPQPLKEQPALNDSRYCLSSRLRVSATFWQNPRNHFRCQVQFYGLSENDEWTQDRAKPVTQIVSAEAWGRADCGFTSESYQQGVLSATILYEILLGKATLYAVLVSALVLMAMVKRKDSRGRAKRSGSGATNFSLLKQAGDVEENPGPSRGHMTEYKPTVRLATRDDVPRAVRTLAAAFADYPATRHTVDPDRHIERVTELQELFLTRVGLDIGKVWVADDGAAVAVWTTPESVEAGAVFAEIGPRMAELSGSRLAAQQQMEGLLAPHRPKEPAWFLATVGVSPDHQGKGLGSAVVLPGVEAAERAGVPAFLETSAPRNLPFYERLGFTVTADVEVPEGPRTWCMTRKPGA

SEQ ID NO: 20689 - protein, 852 aa, synthetic construct
MALPVTALLLPLALLLHAARPDIQMTQSPSSLSASVGDRVTITCRASQSVSSYLAWYQQKPGKAPKLLIYDASNRATGVPSRFSGSGSGTDFTLTISSLQPEDFATYYCQQRTNWPLTFGQGTKVEIKRLEDLKNVFPPEVAVFEPSEAEISHTQKATLVCLATGFYPDHVELSWWVNGKEVHSGVSTDPQPLKEQPALNDSRYCLSSRLRVSATFWQNPRNHFRCQVQFYGLSENDEWTQDRAKPVTQIVSAEAWGRADCGFTSESYQQGVLSATILYEILLGKATLYAVLVSALVLMAMVKRKDSRGRAKRSGSGATNFSLLKQAGDVEENPGPTSMDWIWRILFLVGAATGAHSFEEVQLVESGGGLVQPGGSLRLSCAASGFTFSSYIMHWVRQAPGKGLEWVAVISYDGRNKYYADSVKGRFTISRDNSKNTLYLQMNSLRAEDTAVYYCARDTDGYDFDYWGQGTLVTVSSTRIQNPDPAVYQLRDSKSSDKSVCLFTDFDSQTNVSQSKDSDVYITDKTVLDMRSMDFKSNSAVAWSNKSDFACANAFNNSIIPEDTFFPSPESSCDVKLVEKSFETDTNLNFQNLSVIGFRILLLKVAGFNLLMTLRLWSSRAKRSGSGVKQTLNFDLLKLAGDVESNPGPSRGHMTEYKPTVRLATRDDVPRAVRTLAAAFADYPATRHTVDPDRHIERVTELQELFLTRVGLDIGKVWVADDGAAVAVWTTPESVEAGAVFAEIGPRMAELSGSRLAAQQQMEGLLAPHRPKEPAWFLATVGVSPDHQGKGLGSAVVLPGVEAAERAGVPAFLETSAPRNLPFYERLGFTVTADVEVPEGPRTWCMTRKPGA

SEQ ID NO: 20690 - protein, 934 aa, synthetic construct
MALPVTALLLPLALLLHAARPDIQMTQSPSSLSASVGDRVTITCRASQSVSSYLAWYQQKPGKAPKLLIYDASNRATGVPSRFSGSGSGTDFTLTISSLQPEDFATYYCQQRTNWPLTFGQGTKVEIKRLEDLKNVFPPEVAVFEPSEAEISHTQKATLVCLATGFYPDHVELSWWVNGKEVHSGVSTDPQPLKEQPALNDSRYCLSSRLRVSATFWQNPRNHFRCQVQFYGLSENDEWTQDRAKPVTQIVSAEAWGRADCGFTSESYQQGVLSATILYEILLGKATLYAVLVSALVLMAMVKRKDSRGRAKRSGSGATNFSLLKQAGDVEENPGPTSMDWIWRILFLVGAATGAHSFEEVQLVESGGGLVQPGGSLRLSCAASGFTFSSYIMHWVRQAPGKGLEWVAVISYDGRNKYYADSVKGRFTISRDNSKNTLYLQMNSLRAEDTAVYYCARDTDGYDFDYWGQGTLVTVSSTREQKLISEEDGSGTPFPSLAPPIMLLVDGKQQMVVVCLVLDVAPPGLDSPIWFSAGNGSALDAFTYGPSPATDGTWTNLAHLSLPSEELASWEPLVCHTGPGAEGHSRSTQPMHLSGEASTARTCPQEPLRGTPGGALWLGVLRLLLFKLLLFDLLLTCSCLCDPAGPLPSPATTTRLRALGSHRLHPATETGGREATSSPRPQPRDRRWGDTPPGRKPGSPVRAKRSGSGVKQTLNFDLLKLAGDVESNPGPSRGHMTEYKPTVRLATRDDVPRAVRTLAAAFADYPATRHTVDPDRHIERVTELQELFLTRVGLDIGKVWVADDGAAVAVWTTPESVEAGAVFAEIGPRMAELSGSRLAAQQQMEGLLAPHRPKEPAWFLATVGVSPDHQGKGLGSAVVLPGVEAAERAGVPAFLETSAPRNLPFYERLGFTVTADVEVPEGPRTWCMTRKPGA

SEQ ID NO: 20691 - protein, 952 aa, synthetic construct
MALPVTALLLPLALLLHAARPLEDLKNVFPPEVAVFEPSEAEISHTQKATLVCLATGFYPDHVELSWWVNGKEVHSGVSTDPQPLKEQPALNDSRYCLSSRLRVSATFWQNPRNHFRCQVQFYGLSENDEWTQDRAKPVTQIVSAEAWGRADCGFTSESYQQGVLSATILYEILLGKATLYAVLVSALVLMAMVKRKDSRGRAKRSGSGATNFSLLKQAGDVEENPGPTSMALPVTALLLPLALLLHAARPDIQMTQSPSSLSASVGDRVTITCRASQSVSSYLAWYQQKPGKAPKLLIYDASNRATGVPSRFSGSGSGTDFTLTISSLQPEDFATYYCQQRTNWPLTFGQGTKVEIKRGGGGSGGGGSGGGGSEVQLVESGGGLVQPGGSLRLSCAASGFTFSSYIMHWVRQAPGKGLEWVAVISYDGRNKYYADSVKGRFTISRDNSKNTLYLQMNSLRAEDTAVYYCARDTDGYDFDYWGQGTLVTVSSTREQKLISEEDLGSGTPFPSLAPPIMLLVDGKQQMVVVCLVLDVAPPGLDSPIWFSAGNGSALDAFTYGPSPATDGTWTNLAHLSLPSEELASWEPLVCHTGPGAEGHSRSTQPMHLSGEASTARTCPQEPLRGTPGGALWLGVLRLLLFKLLLFDLLLTCSCLCDPAGPLPSPATTTRLRALGSHRLHPATETGGREATSSPRPQPRDRRWGDTPPGRKPGSPVRAKRSGSGVKQTLNFDLLKLAGDVESNPGPSRSRGHMTEYKPTVRLATRDDVPRAVRTLAAAFADYPATRHTVDPDRHIERVTELQELFLTRVGLDIGKVWVADDGAAVAVWTTPESVEAGAVFAEIGPRMAELSGSRLAAQQQMEGLLAPHRPKEPAWFLATVGVSPDHQGKGLGSAVVLPGVEAAERAGVPAFLETSAPRNLPFYERLGFTVTADVEVPEGPRTWCMTRKPGA

SEQ ID NO: 20692 - protein, 889 aa, synthetic construct
MALPVTALLLPLALLLHAARPDIQMTQSPSSLSASVGDRVTITCRASQSVSSYLAWYQQKPGKAPKLLIYDASNRATGVPSRFSGSGSGTDFTLTISSLQPEDFATYYCQQRTNWPLTFGQGTKVEIKRLEGKPIPNPLLGLDSTGSGDKQLDADVSPKPTIFLPSIAETKLQKAGTYLCLLEKFFPDVIKIHWQEKKSNTILGSQEGNTMKTNDTYMKFSWLTVPEKSLDKEHRCIVRHENNKNGVDQEIIFPPIKTDVITMDPKDNCSKDANDTLLLQLTNTSAYYMYLLLLLKSVVYFAIITCCLLRRTAFCCNGEKSRAKRSGSGATNFSLLKQAGDVEENPGPTSMDWIWRILFLVGAATGAHSFEEVQLVESGGGLVQPGGSLRLSCAASGFTFSSYIMHWVRQAPGKGLEWVAVISYDGRNKYYADSVKGRFTISRDNSKNTLYLQMNSLRAEDTAVYYCARDTDGYDFDYWGQGTLVTVSSTREQKLISEEDGSGSQPHTKPSVFVMKNGTNVACLVKEFYPKDIRINLVSSKKITEFDPAIVISPSGKYNAVKLGKYEDSNSVTCSVQHDNKTVHSTDFEVKTDSTDHVKPKETENTKQPSKSCHKPKAIVHTEKVNMMSLTVLGLRMLFAKTVAVNFLLTAKLFFLRAKRSGSGVKQTLNFDLLKLAGDVESNPGPSRGHMTEYKPTVRLATRDDVPRAVRTLAAAFADYPATRHTVDPDRHIERVTELQELFLTRVGLDIGKVWVADDGAAVAVWTTPESVEAGAVFAEIGPRMAELSGSRLAAQQQMEGLLAPHRPKEPAWFLATVGVSPDHQGKGLGSAVVLPGVEAAERAGVPAFLETSAPRNLPFYERLGFTVTADVEVPEGPRTWCMTRKPGA

SEQ ID NO: 20693 - protein, 627 aa, synthetic construct
MALPVTALLLPLALLLHAARPDIQMTQSPSSLSASVGDRVTITCRASQSVSSYLAWYQQKPGKAPKLLIYDASNRATGVPSRFSGSGSGTDFTLTISSLQPEDFATYYCQQRTNWPLTFGQGTKVEIKRLESQPHTKPSVFVMKNGTNVACLVKEFYPKDIRINLVSSKKITEFDPAIVISPSGKYNAVKLGKYEDSNSVTCSVQHDNKTVHSTDFEVKTDSTDHVKPKETENTKQPSKSCHKPKAIVHTEKVNMMSLTVLGLRMLFAKTVAVNFLLTAKLFFLRAKRSGSGATNFSLLKQAGDVEENPGPTSMDWIWRILFLVGAATGAHSFEEVQLVESGGGLVQPGGSLRLSCAASGFTFSSYIMHWVRQAPGKGLEWVAVISYDGRNKYYADSVKGRFTISRDNSKNTLYLQMNSLRAEDTAVYYCARDTDGYDFDYWGQGTLVTVSSTRDKQLDADVSPKPTIFLPSIAETKLQKAGTYLCLLEKFFPDVIKIHWQEKKSNTILGSQEGNTMKTNDTYMKFSWLTVPEKSLDKEHRCIVRHENNKNGVDQEIIFPPIKTDVITMDPKDNCSKDANDTLLLQLTNTSAYYMYLLLLLKSVVYFAIITCCLLRRTAFCCNGEKS

SEQ ID NO: 20694 - protein, 904 aa, synthetic construct
MALPVTALLLPLALLLHAARPLEGKPIPNPLLGLDSTGSGDKQLDADVSPKPTIFLPSIAETKLQKAGTYLCLLEKFFPDVIKIHWQEKKSNTILGSQEGNTMKTNDTYMKFSWLTVPEKSLDKEHRCIVRHENNKNGVDQEIIFPPIKTDVITMDPKDNCSKDANDTLLLQLTNTSAYYMYLLLLLKSVVYFAIITCCLLRRTAFCCNGEKSRAKRSGSGATNFSLLKQAGDVEENPGPTSMALPVTALLLPLALLLHAARPDIQMTQSPSSLSASVGDRVTITCRASQSVSSYLAWYQQKPGKAPKLLIYDASNRATGVPSRFSGSGSGTDFTLTISSLQPEDFATYYCQQRTNWPLTFGQGTKVEIKRGGGGSGGGGSGGGGSEVQLVESGGGLVQPGGSLRLSCAASGFTFSSYIMHWVRQAPGKGLEWVAVISYDGRNKYYADSVKGRFTISRDNSKNTLYLQMNSLRAEDTAVYYCARDTDGYDFDYWGQGTLVTVSSTREQKLISEEDGSGSQPHTKPSVFVMKNGTNVACLVKEFYPKDIRINLVSSKKITEFDPAIVISPSGKYNAVKLGKYEDSNSVTCSVQHDNKTVHSTDFEVKTDSTDHVKPKETENTKQPSKSCHKPKAIVHTEKVNMMSLTVLGLRMLFAKTVAVNFLLTAKLFFLRAKRSGSGVKQTLNFDLLKLAGDVESNPGPSRGHMTEYKPTVRLATRDDVPRAVRTLAAAFADYPATRHTVDPDRHIERVTELQELFLTRVGLDIGKVWVADDGAAVAVWTTPESVEAGAVFAEIGPRMAELSGSRLAAQQQMEGLLAPHRPKEPAWFLATVGVSPDHQGKGLGSAVVLPGVEAAERAGVPAFLETSAPRNLPFYERLGFTVTADVEVPEGPRTWCMTRKPGA

SEQ ID NO: 20695 - protein, 1029 aa, synthetic construct
MALPVTALLLPLALLLHAARPDIQMTQSPSSLSASVGDRVTITCRASQSVSSYLAWYQQKPGKAPKLLIYDASNRATGVPSRFSGSGSGTDFTLTISSLQPEDFATYYCQQRTNWPLTFGQGTKVEIKRGQPKANPTVTLFPPSSEELQANKATLVCLISDFYPGAVTVAWKADGSPVKAGVETTKPSKQSNNKYAASSYLSLTPEQWKSHRSYSCQVTHEGSTVEKTVAPTECSGSQSFGLLDPKLCYLLDGILFIYGVILTALFLRVKFSRSADAPAYQQGQNQLYNELNLGRREEYDVLDKRRGRDPEMGGKPQRRKNPQEGLYNELQKDKMAEAYSEIGMKGERRRGKGHDGLYQGLSTATKDTYDALHMQALPPRRAKRSGSGATNFSLLKQAGDVEENPGPTSMDWIWRILFLVGAATGAHSFEEVQLVESGGGLVQPGGSLRLSCAASGFTFSSYIMHWVRQAPGKGLEWVAVISYDGRNKYYADSVKGRFTISRDNSKNTLYLQMNSLRAEDTAVYYCARDTDGYDFDYWGQGTLVTVSSASTKGPSVFPLAPSSKSTSGGTAALGCLVKDYFPEPVTVSWNSGALTSGVHTFPAVLQSSGLYSLSSVVTVPSSSLGTQTYICNVNHKPSNTKVDKRVEPKSCGTQSFGLLDPKLCYLLDGILFIYGVILTALFLRVKFSRSADAPAYQQGQNQLYNELNLGRREEYDVLDKRRGRDPEMGGKPQRRKNPQEGLYNELQKDKMAEAYSEIGMKGERRRGKGHDGLYQGLSTATKDTYDALHMQALPPRRAKRSGSGVKQTLNFDLLKLAGDVESNPGPSRGHMTEYKPTVRLATRDDVPRAVRTLAAAFADYPATRHTVDPDRHIERVTELQELFLTRVGLDIGKVWVADDGAAVAVWTTPESVEAGAVFAEIGPRMAELSGSRLAAQQQMEGLLAPHRPKEPAWFLATVGVSPDHQGKGLGSAVVLPGVEAAERAGVPAFLETSAPRNLPFYERLGFTVTADVEVPEGPRTWCMTRKPGA

SEQ ID NO: 20696 - protein, 815 aa, synthetic construct
MALPVTALLLPLALLLHAARPDIQMTQSPSSLSASVGDRVTITCRASQSVSSYLAWYQQKPGKAPKLLIYDASNRATGVPSRFSGSGSGTDFTLTISSLQPEDFATYYCQQRTNWPLTFGQGTKVEIKRLEDLKNVFPPEVAVFEPSEAEISHTQKATLVCLATGFYPDHVELSWWVNGKEVHSGVSTDPQPLKEQPALNDSRYCLSSRLRVSATFWQNPRNHFRCQVQFYGLSENDEWTQDRAKPVTQIVSAEAWGRADCGSQSFGLLDPKLCYLLDGILFIYGVILTALFLRVKFSRSADAPAYQQGQNQLYNELNLGRREEYDVLDKRRGRDPEMGGKPQRRKNPQEGLYNELQKDKMAEAYSEIGMKGERRRGKGHDGLYQGLSTATKDTYDALHMQALPPRRAKRSGSGATNFSLLKQAGDVEENPGPTSMDWIWRILFLVGAATGAHSFEEVQLVESGGGLVQPGGSLRLSCAASGFTFSSYIMHWVRQAPGKGLEWVAVISYDGRNKYYADSVKGRFTISRDNSKNTLYLQMNSLRAEDTAVYYCARDTDGYDFDYWGQGTLVTVSSTRIQNPDPAVYQLRDSKSSDKSVCLFTDFDSQTNVSQSKDSDVYITDKTVLDMRSMDFKSNSAVAWSNKSDFACANAFNNSIIPEDTFFPSPESSCGTQSFGLLDPKLCYLLDGILFIYGVILTALFLRVKFSRSADAPAYQQGQNQLYNELNLGRREEYDVLDKRRGRDPEMGGKPQRRKNPQEGLYNELQKDKMAEAYSEIGMKGERRRGKGHDGLYQGLSTATKDTYDALHMQALPPR

SEQ ID NO: 20697 - protein, 815 aa, synthetic construct
MALPVTALLLPLALLLHAARPDIQMTQSPSSLSASVGDRVTITCRASQSVSSYLAWYQQKPGKAPKLLIYDASNRATGVPSRFSGSGSGTDFTLTISSLQPEDFATYYCQQRTNWPLTFGQGTKVEIKRLEDLKNVFPPEVAVFEPSKAEIAHTQKATLVCLATGFYPDHVELSWWVNGKEVHSGVCTDPQPLKEQPALNDSRYCLSSRLRVSATFWQNPRNHFRCQVQFYGLSENDEWTQDRAKPVTQIVSAEAWGRADCGSQSFGLLDPKLCYLLDGILFIYGVILTALFLRVKFSRSADAPAYQQGQNQLYNELNLGRREEYDVLDKRRGRDPEMGGKPQRRKNPQEGLYNELQKDKMAEAYSEIGMKGERRRGKGHDGLYQGLSTATKDTYDALHMQALPPRRAKRSGSGATNFSLLKQAGDVEENPGPTSMDWIWRILFLVGAATGAHSFEEVQLVESGGGLVQPGGSLRLSCAASGFTFSSYIMHWVRQAPGKGLEWVAVISYDGRNKYYADSVKGRFTISRDNSKNTLYLQMNSLRAEDTAVYYCARDTDGYDFDYWGQGTLVTVSSTRIQNPDPAVYQLRDSKSSDKSVCLFTDFDSQTNVSQSKDSDVYITDKCVLDMRSMDFKSNSAVAWSNKSDFACANAFNNSIIPEDTFFPSSDVPCGTQSFGLLDPKLCYLLDGILFIYGVILTALFLRVKFSRSADAPAYQQGQNQLYNELNLGRREEYDVLDKRRGRDPEMGGKPQRRKNPQEGLYNELQKDKMAEAYSEIGMKGERRRGKGHDGLYQGLSTATKDTYDALHMQALPPR

SEQ ID NO: 20698 - protein, 886 aa, synthetic construct
MALPVTALLLPLALLLHAARPDIQMTQSPSSLSASVGDRVTITCRASQSVSSYLAWYQQKPGKAPKLLIYDASNRATGVPSRFSGSGSGTDFTLTISSLQPEDFATYYCQQRTNWPLTFGQGTKVEIKRLEGKPIPNPLLGLDSTGSGEDLKNVFPPEVAVFEPSEAEISHTQKATLVCLATGFYPDHVELSWWVNGKEVHSGVSTDPQPLKEQPALNDSRYCLSSRLRVSATFWQNPRNHFRCQVQFYGLSENDEWTQDRAKPVTQIVSAEAWGRADCGSQSFGLLDPKLCYLLDGILFIYGVILTALFLRVKFSRSADAPAYQQGQNQLYNELNLGRREEYDVLDKRRGRDPEMGGKPQRRKNPQEGLYNELQKDKMAEAYSEIGMKGERRRGKGHDGLYQGLSTATKDTYDALHMQALPPRRAKRSGSGATNFSLLKQAGDVEENPGPTSMDWIWRILFLVGAATGAHSFEEVQLVESGGGLVQPGGSLRLSCAASGFTFSSYIMHWVRQAPGKGLEWVAVISYDGRNKYYADSVKGRFTISRDNSKNTLYLQMNSLRAEDTAVYYCARDTDGYDFDYWGQGTLVTVSSTREQKLISEEDGSGIQNPDPAVYQLRDSKSSDKSVCLFTDFDSQTNVSQSKDSDVYITDKTVLDMRSMDFKSNSAVAWSNKSDFACANAFNNSIIPEDTFFPSPESSCGTQSFGLLDPKLCYLLDGILFIYGVILTALFLRSKRSRLLHSDYMNMTPRRPGPTRKHYQPYAPPRDFAAYRSRVKFSRSADAPAYQQGQNQLYNELNLGRREEYDVLDKRRGRDPEMGGKPQRRKNPQEGLYNELQKDKMAEAYSEIGMKGERRRGKGHDGLYQGLSTATKDTYDALHMQALPPR

SEQ ID NO: 20699 - protein, 927 aa, synthetic construct
MALPVTALLLPLALLLHAARPDIQMTQSPSSLSASVGDRVTITCRASQSVSSYLAWYQQKPGKAPKLLIYDASNRATGVPSRFSGSGSGTDFTLTISSLQPEDFATYYCQQRTNWPLTFGQGTKVEIKRLEGKPIPNPLLGLDSTGSGEDLKNVFPPEVAVFEPSEAEISHTQKATLVCLATGFYPDHVELSWWVNGKEVHSGVSTDPQPLKEQPALNDSRYCLSSRLRVSATFWQNPRNHFRCQVQFYGLSENDEWTQDRAKPVTQIVSAEAWGRADCGSQSFGLLDPKLCYLLDGILFIYGVILTALFLRSKRSRLLHSDYMNMTPRRPGPTRKHYQPYAPPRDFAAYRSRVKFSRSADAPAYQQGQNQLYNELNLGRREEYDVLDKRRGRDPEMGGKPQRRKNPQEGLYNELQKDKMAEAYSEIGMKGERRRGKGHDGLYQGLSTATKDTYDALHMQALPPRRAKRSGSGATNFSLLKQAGDVEENPGPTSMDWIWRILFLVGAATGAHSFEEVQLVESGGGLVQPGGSLRLSCAASGFTFSSYIMHWVRQAPGKGLEWVAVISYDGRNKYYADSVKGRFTISRDNSKNTLYLQMNSLRAEDTAVYYCARDTDGYDFDYWGQGTLVTVSSTREQKLISEEDGSGIQNPDPAVYQLRDSKSSDKSVCLFTDFDSQTNVSQSKDSDVYITDKTVLDMRSMDFKSNSAVAWSNKSDFACANAFNNSIIPEDTFFPSPESSCGTQSFGLLDPKLCYLLDGILFIYGVILTALFLRSKRSRLLHSDYMNMTPRRPGPTRKHYQPYAPPRDFAAYRSRVKFSRSADAPAYQQGQNQLYNELNLGRREEYDVLDKRRGRDPEMGGKPQRRKNPQEGLYNELQKDKMAEAYSEIGMKGERRRGKGHDGLYQGLSTATKDTYDALHMQALPPR

SEQ ID NO: 20700 - protein, 888 aa, synthetic construct
MALPVTALLLPLALLLHAARPDIQMTQSPSSLSASVGDRVTITCRASQSVSSYLAWYQQKPGKAPKLLIYDASNRATGVPSRFSGSGSGTDFTLTISSLQPEDFATYYCQQRTNWPLTFGQGTKVEIKRLEGKPIPNPLLGLDSTGSGEDLKNVFPPEVAVFEPSEAEISHTQKATLVCLATGFYPDHVELSWWVNGKEVHSGVSTDPQPLKEQPALNDSRYCLSSRLRVSATFWQNPRNHFRCQVQFYGLSENDEWTQDRAKPVTQIVSAEAWGRADCGSQSFGLLDPKLCYLLDGILFIYGVILTALFLRVKFSRSADAPAYQQGQNQLYNELNLGRREEYDVLDKRRGRDPEMGGKPQRRKNPQEGLYNELQKDKMAEAYSEIGMKGERRRGKGHDGLYQGLSTATKDTYDALHMQALPPRRAKRSGSGATNFSLLKQAGDVEENPGPTSMDWIWRILFLVGAATGAHSFEEVQLVESGGGLVQPGGSLRLSCAASGFTFSSYIMHWVRQAPGKGLEWVAVISYDGRNKYYADSVKGRFTISRDNSKNTLYLQMNSLRAEDTAVYYCARDTDGYDFDYWGQGTLVTVSSTREQKLISEEDLGSGIQNPDPAVYQLRDSKSSDKSVCLFTDFDSQTNVSQSKDSDVYITDKTVLDMRSMDFKSNSAVAWSNKSDFACANAFNNSIIPEDTFFPSPESSCGTQSFGLLDPKLCYLLDGILFIYGVILTALFLKRGRKKLLYIFKQPFMRPVQTTQEEDGCSCRFPEEEEGGCELRVKFSRSADAPAYQQGQNQLYNELNLGRREEYDVLDKRRGRDPEMGGKPQRRKNPQEGLYNELQKDKMAEAYSEIGMKGERRRGKGHDGLYQGLSTATKDTYDALHMQALPPR

SEQ ID NO: 20701 - protein, 930 aa, synthetic construct
MALPVTALLLPLALLLHAARPDIQMTQSPSSLSASVGDRVTITCRASQSVSSYLAWYQQKPGKAPKLLIYDASNRATGVPSRFSGSGSGTDFTLTISSLQPEDFATYYCQQRTNWPLTFGQGTKVEIKRLEGKPIPNPLLGLDSTGSGEDLKNVFPPEVAVFEPSEAEISHTQKATLVCLATGFYPDHVELSWWVNGKEVHSGVSTDPQPLKEQPALNDSRYCLSSRLRVSATFWQNPRNHFRCQVQFYGLSENDEWTQDRAKPVTQIVSAEAWGRADCGSQSFGLLDPKLCYLLDGILFIYGVILTALFLKRGRKKLLYIFKQPFMRPVQTTQEEDGCSCRFPEEEEGGCELRVKFSRSADAPAYQQGQNQLYNELNLGRREEYDVLDKRRGRDPEMGGKPQRRKNPQEGLYNELQKDKMAEAYSEIGMKGERRRGKGHDGLYQGLSTATKDTYDALHMQALPPRRAKRSGSGATNFSLLKQAGDVEENPGPTSMDWIWRILFLVGAATGAHSFEEVQLVESGGGLVQPGGSLRLSCAASGFTFSSYIMHWVRQAPGKGLEWVAVISYDGRNKYYADSVKGRFTISRDNSKNTLYLQMNSLRAEDTAVYYCARDTDGYDFDYWGQGTLVTVSSTREQKLISEEDLGSGIQNPDPAVYQLRDSKSSDKSVCLFTDFDSQTNVSQSKDSDVYITDKTVLDMRSMDFKSNSAVAWSNKSDFACANAFNNSIIPEDTFFPSPESSCGTQSFGLLDPKLCYLLDGILFIYGVILTALFLKRGRKKLLYIFKQPFMRPVQTTQEEDGCSCRFPEEEEGGCELRVKFSRSADAPAYQQGQNQLYNELNLGRREEYDVLDKRRGRDPEMGGKPQRRKNPQEGLYNELQKDKMAEAYSEIGMKGERRRGKGHDGLYQGLSTATKDTYDALHMQALPPR

SEQ ID NO: 20702 - protein, 820 aa, synthetic construct
MALPVTALLLPLALLLHAARPDIQMTQSPSSLSASVGDRVTITCRASQSVSSYLAWYQQKPGKAPKLLIYDASNRATGVPSRFSGSGSGTDFTLTISSLQPEDFATYYCQQRTNWPLTFGQGTKVEIKRLEQSFGLLDPKLCYLLDGILFIYGVILTALFLRVKFSRSADAPAYQQGQNQLYNELNLGRREEYDVLDKRRGRDPEMGGKPQRRKNPQEGLYNELQKDKMAEAYSEIGMKGERRRGKGHDGLYQGLSTATKDTYDALHMQALPPRRAKRSGSGATNFSLLKQAGDVEENPGPTSMDWIWRILFLVGAATGAHSFEEVQLVESGGGLVQPGGSLRLSCAASGFTFSSYIMHWVRQAPGKGLEWVAVISYDGRNKYYADSVKGRFTISRDNSKNTLYLQMNSLRAEDTAVYYCARDTDGYDFDYWGQGTLVTVSSTRQSFGLLDPKLCYLLDGILFIYGVILTALFLRVKFSRSADAPAYQQGQNQLYNELNLGRREEYDVLDKRRGRDPEMGGKPQRRKNPQEGLYNELQKDKMAEAYSEIGMKGERRRGKGHDGLYQGLSTATKDTYDALHMQALPPRRAKRSGSGVKQTLNFDLLKLAGDVESNPGPSRGHMTEYKPTVRLATRDDVPRAVRTLAAAFADYPATRHTVDPDRHIERVTELQELFLTRVGLDIGKVWVADDGAAVAVWTTPESVEAGAVFAEIGPRMAELSGSRLAAQQQMEGLLAPHRPKEPAWFLATVGVSPDHQGKGLGSAVVLPGVEAAERAGVPAFLETSAPRNLPFYERLGFTVTADVEVPEGPRTWCMTRKPGA

SEQ ID NO: 20703 - protein, 645 aa, synthetic construct
MALPVTALLLPLALLLHAARPDIQMTQSPSSLSASVGDRVTITCRASQSVSSYLAWYQQKPGKAPKLLIYDASNRATGVPSRFSGSGSGTDFTLTISSLQPEDFATYYCQQRTNWPLTFGQGTKVEIKRLEGQPKANPTVTLFPPSSEELQANKATLVCLISDFYPGAVTVAWKADGSPVKAGVETTKPSKQSNNKYAASSYLSLTPEQWKSHRSYSCQVTHEGSTVEKTVAPTECSPIKTDVITMDPKDNCSKDANDTLLLQLTNTSAYYMYLLLLLKSVVYFAIITCCLLRRTAFCCNGEKSRAKRSGSGATNFSLLKQAGDVEENPGPTSMDWIWRILFLVGAATGAHSFEEVQLVESGGGLVQPGGSLRLSCAASGFTFSSYIMHWVRQAPGKGLEWVAVISYDGRNKYYADSVKGRFTISRDNSKNTLYLQMNSLRAEDTAVYYCARDTDGYDFDYWGQGTLVTVSSTRASTKGPSVFPLAPSSKSTSGGTAALGCLVKDYFPEPVTVSWNSGALTSGVHTFPAVLQSSGLYSLSSVVTVPSSSLGTQTYICNVNHKPSNTKVDKRVEPKSCEVKTDSTDHVKPKETENTKQPSKSCHKPKAIVHTEKVNMMSLTVLGLRMLFAKTVAVNFLLTAKLFFL

SEQ ID NO: 20704 - protein, 623 aa, synthetic construct
MALPVTALLLPLALLLHAARPDIQMTQSPSSLSASVGDRVTITCRASQSVSSYLAWYQQKPGKAPKLLIYDASNRATGVPSRFSGSGSGTDFTLTISSLQPEDFATYYCQQRTNWPLTFGQGTKVEIKRLEGQPKANPTVTLFPPSSEELQANKATLVCLISDFYPGAVTVAWKADGSPVKAGVETTKPSKQSNNKYAASSYLSLTPEQWKSHRSYSCQVTHEGSTVEKTVAPTECSGRADCGITSASYHQGVLSATILYEILLGKATLYAVLVSALVLMAMVKRKDSRGRAKRSGSGATNFSLLKQAGDVEENPGPTSMDWIWRILFLVGAATGAHSFEEVQLVESGGGLVQPGGSLRLSCAASGFTFSSYIMHWVRQAPGKGLEWVAVISYDGRNKYYADSVKGRFTISRDNSKNTLYLQMNSLRAEDTAVYYCARDTDGYDFDYWGQGTLVTVSSTRASTKGPSVFPLAPSSKSTSGGTAALGCLVKDYFPEPVTVSWNSGALTSGVHTFPAVLQSSGLYSLSSVVTVPSSSLGTQTYICNVNHKPSNTKVDKRVEPKSCIPEDTFFPSSDVPCDVKLVEKSFETDTNLNFQNLSVIGFRILLLKVAGFNLLMTLRLWSS

SEQ ID NO: 20705 - protein, 623 aa, synthetic construct
MALPVTALLLPLALLLHAARPDIQMTQSPSSLSASVGDRVTITCRASQSVSSYLAWYQQKPGKAPKLLIYDASNRATGVPSRFSGSGSGTDFTLTISSLQPEDFATYYCQQRTNWPLTFGQGTKVEIKRLEGQPKANPTVTLFPPSSEELQANKATLVCLISDFYPGAVTVAWKADGSPVKAGVETTKPSKQSNNKYAASSYLSLTPEQWKSHRSYSCQVTHEGSTVEKTVAPTECSGRADCGFTSESYQQGVLSATILYEILLGKATLYAVLVSALVLMAMVKRKDSRGRAKRSGSGATNFSLLKQAGDVEENPGPTSMDWIWRILFLVGAATGAHSFEEVQLVESGGGLVQPGGSLRLSCAASGFTFSSYIMHWVRQAPGKGLEWVAVISYDGRNKYYADSVKGRFTISRDNSKNTLYLQMNSLRAEDTAVYYCARDTDGYDFDYWGQGTLVTVSSTRASTKGPSVFPLAPSSKSTSGGTAALGCLVKDYFPEPVTVSWNSGALTSGVHTFPAVLQSSGLYSLSSVVTVPSSSLGTQTYICNVNHKPSNTKVDKRVEPKSCIPEDTFFPSPESSCDVKLVEKSFETDTNLNFQNLSVIGFRILLLKVAGFNLLMTLRLWSS

SEQ ID NO: 20706 - protein, 449 aa, synthetic construct
MALPVTALLLPLALLLHAARPDIQMTQSPSSLSASVGDRVTITCRASQSVSSYLAWYQQKPGKAPKLLIYDASNRATGVPSRFSGSGSGTDFTLTISSLQPEDFATYYCQQRTNWPLTFGQGTKVEIKRGGGGSGGGGSGGGGSEVQLVESGGGLVQPGGSLRLSCAASGFTFSSYIMHWVRQAPGKGLEWVAVISYDGRNKYYADSVKGRFTISRDNSKNTLYLQMNSLRAEDTAVYYCARDTDGYDFDYWGQGTLVTVSSTRDGNEEMGGITQTPYKVSISGTTVILTCPQYPGSEILWQHNDKNIGGDEDDKNIGSDEDHLSLKEFSELEQSGYYVCYPRGSKPEDANFYLYLRARVCENCMEMDVMSVATIVIVDICITGGLLLLVYYWSKNRKAKAKPVTRGAGAGGRQRGQNKERPPPVPNPDYEPIRKGQRDLYSGLNQRRI

SEQ ID NO: 20707 - protein, 414 aa, synthetic construct
MALPVTALLLPLALLLHAARPDIQMTQSPSSLSASVGDRVTITCRASQSVSSYLAWYQQKPGKAPKLLIYDASNRATGVPSRFSGSGSGTDFTLTISSLQPEDFATYYCQQRTNWPLTFGQGTKVEIKRGGGGSGGGGSGGGGSEVQLVESGGGLVQPGGSLRLSCAASGFTFSSYIMHWVRQAPGKGLEWVAVISYDGRNKYYADSVKGRFTISRDNSKNTLYLQMNSLRAEDTAVYYCARDTDGYDFDYWGQGTLVTVSSTRFKIPIEELEDRVFVNCNTSITWVEGTVGTLLSDITRLDLGKRILDPRGIYRCNGTDIYKDKESTVQVHYRMCQSCVELDPATVAGIIVTDVIATLLLALGVFCFAGHETGRLSGAADTQALLRNDQVYQPLRDRDDAQYSHLGGNWARNK

SEQ ID NO: 20708 - protein, 424 aa, synthetic construct
MALPVTALLLPLALLLHAARPDIQMTQSPSSLSASVGDRVTITCRASQSVSSYLAWYQQKPGKAPKLLIYDASNRATGVPSRFSGSGSGTDFTLTISSLQPEDFATYYCQQRTNWPLTFGQGTKVEIKRGGGGSGGGGSGGGGSEVQLVESGGGLVQPGGSLRLSCAASGFTFSSYIMHWVRQAPGKGLEWVAVISYDGRNKYYADSVKGRFTISRDNSKNTLYLQMNSLRAEDTAVYYCARDTDGYDFDYWGQGTLVTVSSTRQSIKGNHLVKVYDYQEDGSVLLTCDAEAKNITWFKDGKMIGFLTEDKKKWNLGSNAKDPRGMYQCKGSQNKSKPLQVYYRMCQNCIELNAATISGFLFAEIVSIFVLAVGVYFIAGQDGVRQSRASDKQTLLPNDQLYQPLKDREDDQYSHLQGNQLRRN

SEQ ID NO: 20709 - protein, 407 aa, synthetic construct
MALPVTALLLPLALLLHAARPDIQMTQSPSSLSASVGDRVTITCRASQSVSSYLAWYQQKPGKAPKLLIYDASNRATGVPSRFSGSGSGTDFTLTISSLQPEDFATYYCQQRTNWPLTFGQGTKVEIKRGGGGSGGGGSGGGGSEVQLVESGGGLVQPGGSLRLSCAASGFTFSSYIMHWVRQAPGKGLEWVAVISYDGRNKYYADSVKGRFTISRDNSKNTLYLQMNSLRAEDTAVYYCARDTDGYDFDYWGQGTLVTVSSTRQSFGLLDPKLCYLLDGILFIYGVILTALFLRVKFSRSADAPAYQQGQNQLYNELNLGRREEYDVLDKRRGRDPEMGGKPQRRKNPQEGLYNELQKDKMAEAYSEIGMKGERRRGKGHDGLYQGLSTATKDTYDALHMQALPPR

SEQ ID NO: 20710 - protein, 449 aa, synthetic construct
MALPVTALLLPLALLLHAARPEVQLVESGGGLVQPGGSLRLSCAASGFTFSSYIMHWVRQAPGKGLEWVAVISYDGRNKYYADSVKGRFTISRDNSKNTLYLQMNSLRAEDTAVYYCARDTDGYDFDYWGQGTLVTVSSGGGGSGGGGSGGGGSDIQMTQSPSSLSASVGDRVTITCRASQSVSSYLAWYQQKPGKAPKLLIYDASNRATGVPSRFSGSGSGTDFTLTISSLQPEDFATYYCQQRTNWPLTFGQGTKVEIKRTRDGNEEMGGITQTPYKVSISGTTVILTCPQYPGSEILWQHNDKNIGGDEDDKNIGSDEDHLSLKEFSELEQSGYYVCYPRGSKPEDANFYLYLRARVCENCMEMDVMSVATIVIVDICITGGLLLLVYYWSKNRKAKAKPVTRGAGAGGRQRGQNKERPPPVPNPDYEPIRKGQRDLYSGLNQRRI

SEQ ID NO: 20711 - protein, 414 aa, synthetic construct
MALPVTALLLPLALLLHAARPEVQLVESGGGLVQPGGSLRLSCAASGFTFSSYIMHWVRQAPGKGLEWVAVISYDGRNKYYADSVKGRFTISRDNSKNTLYLQMNSLRAEDTAVYYCARDTDGYDFDYWGQGTLVTVSSGGGGSGGGGSGGGGSDIQMTQSPSSLSASVGDRVTITCRASQSVSSYLAWYQQKPGKAPKLLIYDASNRATGVPSRFSGSGSGTDFTLTISSLQPEDFATYYCQQRTNWPLTFGQGTKVEIKRTRFKIPIEELEDRVFVNCNTSITWVEGTVGTLLSDITRLDLGKRILDPRGIYRCNGTDIYKDKESTVQVHYRMCQSCVELDPATVAGIIVTDVIATLLLALGVFCFAGHETGRLSGAADTQALLRNDQVYQPLRDRDDAQYSHLGGNWARNK

SEQ ID NO: 20712 - protein, 424 aa, synthetic construct
MALPVTALLLPLALLLHAARPEVQLVESGGGLVQPGGSLRLSCAASGFTFSSYIMHWVRQAPGKGLEWVAVISYDGRNKYYADSVKGRFTISRDNSKNTLYLQMNSLRAEDTAVYYCARDTDGYDFDYWGQGTLVTVSSGGGGSGGGGSGGGGSDIQMTQSPSSLSASVGDRVTITCRASQSVSSYLAWYQQKPGKAPKLLIYDASNRATGVPSRFSGSGSGTDFTLTISSLQPEDFATYYCQQRTNWPLTFGQGTKVEIKRTRQSIKGNHLVKVYDYQEDGSVLLTCDAEAKNITWFKDGKMIGFLTEDKKKWNLGSNAKDPRGMYQCKGSQNKSKPLQVYYRMCQNCIELNAATISGFLFAEIVSIFVLAVGVYFIAGQDGVRQSRASDKQTLLPNDQLYQPLKDREDDQYSHLQGNQLRRN

SEQ ID NO: 20713 - protein, 407 aa, synthetic construct
MALPVTALLLPLALLLHAARPEVQLVESGGGLVQPGGSLRLSCAASGFTFSSYIMHWVRQAPGKGLEWVAVISYDGRNKYYADSVKGRFTISRDNSKNTLYLQMNSLRAEDTAVYYCARDTDGYDFDYWGQGTLVTVSSGGGGSGGGGSGGGGSDIQMTQSPSSLSASVGDRVTITCRASQSVSSYLAWYQQKPGKAPKLLIYDASNRATGVPSRFSGSGSGTDFTLTISSLQPEDFATYYCQQRTNWPLTFGQGTKVEIKRTRQSFGLLDPKLCYLLDGILFIYGVILTALFLRVKFSRSADAPAYQQGQNQLYNELNLGRREEYDVLDKRRGRDPEMGGKPQRRKNPQEGLYNELQKDKMAEAYSEIGMKGERRRGKGHDGLYQGLSTATKDTYDALHMQALPPR

SEQ ID NO: 20714 - protein, 502 aa, synthetic construct
MALPVTALLLPLALLLHAARPDIQMTQSPSSLSASVGDRVTITCRASQSVSSYLAWYQQKPGKAPKLLIYDASNRATGVPSRFSGSGSGTDFTLTISSLQPEDFATYYCQQRTNWPLTFGQGTKVEIKRGGGGSGGGGSGGGGSEVQLVESGGGLVQPGGSLRLSCAASGFTFSSYIMHWVRQAPGKGLEWVAVISYDGRNKYYADSVKGRFTISRDNSKNTLYLQMNSLRAEDTAVYYCARDTDGYDFDYWGQGTLVTVSSTRGMRTEDLPKAVVFLEPQWYRVLEKDSVTLKCQGAYSPEDNSTQWFHNESLISSQASSYFIDAATVDDSGEYRCQTNLSTLSDPVQLEVHIGWLLLQAPRWVFKEEDPIHLRCHSWKNTALHKVTYLQNGKGRKYFHHNSDFYIPKATLKDSGSYFCRGLVGSKNVSSETVNITITQGLAVPTISSFFPPGYQVSFCLVMVLLFAVDTGLYFSVKTNIRSSTRDWKDHKFKWRKDPQDK

SEQ ID NO: 20715 - protein, 784 aa, synthetic construct
MALPVTALLLPLALLLHAARPDIQMTQSPSSLSASVGDRVTITCRASQSVSSYLAWYQQKPGKAPKLLIYDASNRATGVPSRFSGSGSGTDFTLTISSLQPEDFATYYCQQRTNWPLTFGQGTKVEIKRGGGGSGGGGSGGGGSEVQLVESGGGLVQPGGSLRLSCAASGFTFSSYIMHWVRQAPGKGLEWVAVISYDGRNKYYADSVKGRFTISRDNSKNTLYLQMNSLRAEDTAVYYCARDTDGYDFDYWGQGTLVTVSSTRGGSGQQQTLPKPFIWAEPHFMVPKEKQVTICCQGNYGAVEYQLHFEGSLFAVDRPKPPERINKVQFYIPDMNSRMAGQYSCIYRVGELWSEPSNLLDLVVTEMYDTPTLSVHPGPEVISGEKVTFYCRLDTATSMFLLLKEGRSSHVQRGYGKVQAEFPLGPVTTAHRGTYRCFGSYNNHAWSFPSEPVKLLVTGDIENTSLAPEDPTFPADTWGTYLLTTETGLQKDHALWDHTAQNLLRMGLAFLVLVALVWFLVEDWLSRKRTRERASRASTWEGRRRLNTQTLRAKRSGSGVKQTLNFDLLKLAGDVESNPGPSRGHMTEYKPTVRLATRDDVPRAVRTLAAAFADYPATRHTVDPDRHIERVTELQELFLTRVGLDIGKVWVADDGAAVAVWTTPESVEAGAVFAEIGPRMAELSGSRLAAQQQMEGLLAPHRPKEPAWFLATVGVSPDHQGKGLGSAVVLPGVEAAERAGVPAFLETSAPRNLPFYERLGFTVTADVEVPEGPRTWCMTRKPGA

SEQ ID NO: 20716 - protein, 617 aa, synthetic construct
MALPVTALLLPLALLLHAARPDIQMTQSPSSLSASVGDRVTITCRASQSVSSYLAWYQQKPGKAPKLLIYDASNRATGVPSRFSGSGSGTDFTLTISSLQPEDFATYYCQQRTNWPLTFGQGTKVEIKRGGGGSGGGGSGGGGSEVQLVESGGGLVQPGGSLRLSCAASGFTFSSYIMHWVRQAPGKGLEWVAVISYDGRNKYYADSVKGRFTISRDNSKNTLYLQMNSLRAEDTAVYYCARDTDGYDFDYWGQGTLVTVSSTRKIEVMYPPPYLDNEKSNGTIIHVKGARGDIENTSLAPEDPTFPADTWGTYLLTTETGLQKDHALWDHTAQNLLRMGLAFLVLVALVWFLVEDWLSRKRTRERASRASTWEGRRRLNTQTLRAKRSGSGVKQTLNFDLLKLAGDVESNPGPSRGHMTEYKPTVRLATRDDVPRAVRTLAAAFADYPATRHTVDPDRHIERVTELQELFLTRVGLDIGKVWVADDGAAVAVWTTPESVEAGAVFAEIGPRMAELSGSRLAAQQQMEGLLAPHRPKEPAWFLATVGVSPDHQGKGLGSAVVLPGVEAAERAGVPAFLETSAPRNLPFYERLGFTVTADVEVPEGPRTWCMTRKPGA

SEQ ID NO: 20717 - protein, 704 aa, synthetic construct
MALPVTALLLPLALLLHAARPDIQMTQSPSSLSASVGDRVTITCRASQSVSSYLAWYQQKPGKAPKLLIYDASNRATGVPSRFSGSGSGTDFTLTISSLQPEDFATYYCQQRTNWPLTFGQGTKVEIKRGGGGSGGGGSGGGGSEVQLVESGGGLVQPGGSLRLSCAASGFTFSSYIMHWVRQAPGKGLEWVAVISYDGRNKYYADSVKGRFTISRDNSKNTLYLQMNSLRAEDTAVYYCARDTDGYDFDYWGQGTLVTVSSTRLWVSQPPEIRTLEGSSAFLPCSFNASQGRLAIGSVTWFRDEVVPGKEVRNGTPEFRGRLAPLASSRFLHDHQAELHIRDVRGHDASIYVCRVEVLGLGVGTGNGTRLVVEKEHPQLGAGTVLLLRAGFYAVSFLSVAVGSTVYYQGKCLTWKGPRRQLPAVVPAPLPPPCGSSAHLLPPVPGGRAKRSGSGVKQTLNFDLLKLAGDVESNPGPSRMYRMQLLSCIALSLALVTNSAPTSSSTKKTQLQLEHLLLDLQMILNGINNYKNPKLTEMLTAKFYMPKKATELKHLQCLEEELKPLEEVLNLAQSKNFHLRPRDLISNINVIVLELKGSETTFMCEYADETATIVEFLNRWITFCQSIISTLTKIEVMYPPPYLDNEKSNGTIIHVKGKHLCPSPLFPGPSKPFWVLVVVGGVLACYSLLVTVAFIIFWVRSKRS

SEQ ID NO: 20718 - protein, 680 aa, synthetic construct
MALPVTALLLPLALLLHAARPDIQMTQSPSSLSASVGDRVTITCRASQSVSSYLAWYQQKPGKAPKLLIYDASNRATGVPSRFSGSGSGTDFTLTISSLQPEDFATYYCQQRTNWPLTFGQGTKVEIKRGGGGSGGGGSGGGGSEVQLVESGGGLVQPGGSLRLSCAASGFTFSSYIMHWVRQAPGKGLEWVAVISYDGRNKYYADSVKGRFTISRDNSKNTLYLQMNSLRAEDTAVYYCARDTDGYDFDYWGQGTLVTVSSTRLWVSQPPEIRTLEGSSAFLPCSFNASQGRLAIGSVTWFRDEVVPGKEVRNGTPEFRGRLAPLASSRFLHDHQAELHIRDVRGHDASIYVCRVEVLGLGVGTGNGTRLVVEKEHPQLGAGTVLLLRAGFYAVSFLSVAVGSTVYYQGKCLTWKGPRRQLPAVVPAPLPPPCGSSAHLLPPVPGGRAKRSGSGVKQTLNFDLLKLAGDVESNPGPSRGHMTEYKPTVRLATRDDVPRAVRTLAAAFADYPATRHTVDPDRHIERVTELQELFLTRVGLDIGKVWVADDGAAVAVWTTPESVEAGAVFAEIGPRMAELSGSRLAAQQQMEGLLAPHRPKEPAWFLATVGVSPDHQGKGLGSAVVLPGVEAAERAGVPAFLETSAPRNLPFYERLGFTVTADVEVPEGPRTWCMTRKPGA

SEQ ID NO: 20719 - protein, 356 aa, synthetic construct
MALPVTALLLPLALLLHAARPDIQMTQSPSSLSASVGDRVTITCRASQSVSSYLAWYQQKPGKAPKLLIYDASNRATGVPSRFSGSGSGTDFTLTISSLQPEDFATYYCQQRTNWPLTFGQGTKVEIKRGGGGSGGGGSGGGGSEVQLVESGGGLVQPGGSLRLSCAASGFTFSSYIMHWVRQAPGKGLEWVAVISYDGRNKYYADSVKGRFTISRDNSKNTLYLQMNSLRAEDTAVYYCARDTDGYDFDYWGQGTLVTVSSTRKIEVMYPPPYLDNEKSNGTIIHVKGARITQGLAVSTISSFFPPGYQVSFCLVMVLLFAVDTGLYFSVKTNIRSSTRDWKDHKFKWRKDPQDK

SEQ ID NO: 20720 - protein, 356 aa, synthetic construct
MALPVTALLLPLALLLHAARPDIQMTQSPSSLSASVGDRVTITCRASQSVSSYLAWYQQKPGKAPKLLIYDASNRATGVPSRFSGSGSGTDFTLTISSLQPEDFATYYCQQRTNWPLTFGQGTKVEIKRGGGGSGGGGSGGGGSEVQLVESGGGLVQPGGSLRLSCAASGFTFSSYIMHWVRQAPGKGLEWVAVISYDGRNKYYADSVKGRFTISRDNSKNTLYLQMNSLRAEDTAVYYCARDTDGYDFDYWGQGTLVTVSSTRKIEVMYPPPYLDNEKSNGTIIHVKGARITQGLAVPTISSFFPPGYQVSFCLVMVLLFAVDTGLYFSVKTNIRSSTRDWKDHKFKWRKDPQDK

SEQ ID NO: 20721 - protein, 335 aa, synthetic construct
MALPVTALLLPLALLLHAARPDIQMTQSPSSLSASVGDRVTITCRASQSVSSYLAWYQQKPGKAPKLLIYDASNRATGVPSRFSGSGSGTDFTLTISSLQPEDFATYYCQQRTNWPLTFGQGTKVEIKRGGGGSGGGGSGGGGSEVQLVESGGGLVQPGGSLRLSCAASGFTFSSYIMHWVRQAPGKGLEWVAVISYDGRNKYYADSVKGRFTISRDNSKNTLYLQMNSLRAEDTAVYYCARDTDGYDFDYWGQGTLVTVSSTRKIEVMYPPPYLDNEKSNGTIIHVKGARITQGLAVSTISSFSPPGYQVSFCLVMVLLFAVDTGLYFSVKTNI

SEQ ID NO: 20722 - protein, 366 aa, synthetic construct
MALPVTALLLPLALLLHAARPDIQMTQSPSSLSASVGDRVTITCRASQSVSSYLAWYQQKPGKAPKLLIYDASNRATGVPSRFSGSGSGTDFTLTISSLQPEDFATYYCQQRTNWPLTFGQGTKVEIKRGGGGSGGGGSGGGGSEVQLVESGGGLVQPGGSLRLSCAASGFTFSSYIMHWVRQAPGKGLEWVAVISYDGRNKYYADSVKGRFTISRDNSKNTLYLQMNSLRAEDTAVYYCARDTDGYDFDYWGQGTLVTVSSTRKIEVMYPPPYLDNEKSNGTIIHVKGARVEKEHPQLGAGTVLLLRAGFYAVSFLSVAVGSTVYYQGKCLTWKGPRRQLPAVVPAPLPPPCGSSAHLLPPVPGG

SEQ ID NO: 20723 - protein, 447 aa, synthetic construct
MALPVTALLLPLALLLHAARPDIQMTQSPSSLSASVGDRVTITCRASQSVSSYLAWYQQKPGKAPKLLIYDASNRATGVPSRFSGSGSGTDFTLTISSLQPEDFATYYCQQRTNWPLTFGQGTKVEIKRGGGGSGGGGSGGGGSEVQLVESGGGLVQPGGSLRLSCAASGFTFSSYIMHWVRQAPGKGLEWVAVISYDGRNKYYADSVKGRFTISRDNSKNTLYLQMNSLRAEDTAVYYCARDTDGYDFDYWGQGTLVTVSSTRKIEVMYPPPYLDNEKSNGTIIHVKGARKSVRFYLVVSPASASTQTSWTPRDLVSSQTQTQSCVPPTAGARQAPESPSTIPVPSQPQNSTLRPGPAAPIALVPVFCGLLVAKSLVLSALLVWWGDIWWKTMMELRSLDTQKATCHLQQVTDLPWTSVSSPVEREILYHTVARTKISDDDDEHTL

SEQ ID NO: 20724 - protein, 384 aa, synthetic construct
MALPVTALLLPLALLLHAARPDIQMTQSPSSLSASVGDRVTITCRASQSVSSYLAWYQQKPGKAPKLLIYDASNRATGVPSRFSGSGSGTDFTLTISSLQPEDFATYYCQQRTNWPLTFGQGTKVEIKRGGGGSGGGGSGGGGSEVQLVESGGGLVQPGGSLRLSCAASGFTFSSYIMHWVRQAPGKGLEWVAVISYDGRNKYYADSVKGRFTISRDNSKNTLYLQMNSLRAEDTAVYYCARDTDGYDFDYWGQGTLVTVSSTRKIEVMYPPPYLDNEKSNGTIIHVKGARGDIENTSLAPEDPTFPADTWGTYLLTTETGLQKDHALWDHTAQNLLRMGLAFLVLVALVWFLVEDWLSRKRTRERASRASTWEGRRRLNTQTL

SEQ ID NO: 20725 - protein, 980 aa, synthetic construct
MALPVTALLLPLALLLHAARPDIQMTQSPSSLSASVGDRVTITCRASQSVSSYLAWYQQKPGKAPKLLIYDASNRATGVPSRFSGSGSGTDFTLTISSLQPEDFATYYCQQRTNWPLTFGQGTKVEIKRLEGQPKANPTVTLFPPSSEELQANKATLVCLISDFYPGAVTVAWKADGSPVKAGVETTKPSKQSNNKYAASSYLSLTPEQWKSHRSYSCQVTHEGSTVEKTVAPTECSGSQSFGLLDPKLCYLLDGILFIYGVILTALFLRVKFSRSADAPAYQQGQNQLYNELNLGRREEYDVLDKRRGRDPEMGGKPQRRKNPQEGLYNELQKDKMAEAYSEIGMKGERRRGKGHDGLYQGLSTATKDTYDALHMQALPPRRAKRSGSGATNFSLLKQAGDVEENPGPTSMDWIWRILFLVGAATGAHSFEEVQLVESGGGLVQPGGSLRLSCAASGFTFSSYIMHWVRQAPGKGLEWVAVISYDGRNKYYADSVKGRFTISRDNSKNTLYLQMNSLRAEDTAVYYCARDTDGYDFDYWGQGTLVTVSSTRASTKGPSVFPLAPSSKSTSGGTAALGCLVKDYFPEPVTVSWNSGALTSGVHTFPAVLQSSGLYSLSSVVTVPSSSLGTQTYICNVNHKPSNTKVDKRVEPKSCGTGDIENTSLAPEDPTFPADTWGTYLLTTETGLQKDHALWDHTAQNLLRMGLAFLVLVALVWFLVEDWLSRKRTRERASRASTWEGRRRLNTQTLRAKRSGSGATNFSLLKQAGDVEENPGPSRGHMTEYKPTVRLATRDDVPRAVRTLAAAFADYPATRHTVDPDRHIERVTELQELFLTRVGLDIGKVWVADDGAAVAVWTTPESVEAGAVFAEIGPRMAELSGSRLAAQQQMEGLLAPHRPKEPAWFLATVGVSPDHQGKGLGSAVVLPGVEAAERAGVPAFLETSAPRNLPFYERLGFTVTADVEVPEGPRTWCMTRKPGA

SEQ ID NO: 20726 - protein, 1046 aa, synthetic construct
MALPVTALLLPLALLLHAARPDIQMTQSPSSLSASVGDRVTITCRASQSVSSYLAWYQQKPGKAPKLLIYDASNRATGVPSRFSGSGSGTDFTLTISSLQPEDFATYYCQQRTNWPLTFGQGTKVEIKRLEGQPKANPTVTLFPPSSEELQANKATLVCLISDFYPGAVTVAWKADGSPVKAGVETTKPSKQSNNKYAASSYLSLTPEQWKSHRSYSCQVTHEGSTVEKTVAPTECSGSQSFGLLDPKLCYLLDGILFIYGVILTALFLRVKFSRSADAPAYQQGQNQLYNELNLGRREEYDVLDKRRGRDPEMGGKPQRRKNPQEGLYNELQKDKMAEAYSEIGMKGERRRGKGHDGLYQGLSTATKDTYDALHMQALPPRRAKRSGSGATNFSLLKQAGDVEENPGPTSMDWIWRILFLVGAATGAHSFEEVQLVESGGGLVQPGGSLRLSCAASGFTFSSYIMHWVRQAPGKGLEWVAVISYDGRNKYYADSVKGRFTISRDNSKNTLYLQMNSLRAEDTAVYYCARDTDGYDFDYWGQGTLVTVSSTRASTKGPSVFPLAPSSKSTSGGTAALGCLVKDYFPEPVTVSWNSGALTSGVHTFPAVLQSSGLYSLSSVVTVPSSSLGTQTYICNVNHKPSNTKVDKRVEPKSCGTKSVRFYLVVSPASASTQTSWTPRDLVSSQTQTQSCVPPTAGARQAPESPSTIPVPSQPQNSTLRPGPAAPIALVPVFCGLLVAKSLVLSALLVWWGDIWWKTMMELRSLDTQKATCHLQQVTDLPWTSVSSPVEREILYHTVARTKISDDDDEHTLRAKRSGSGVKQTLNFDLLKLAGDVESNPGPSRGHMTEYKPTVRLATRDDVPRAVRTLAAAFADYPATRHTVDPDRHIERVTELQELFLTRVGLDIGKVWVADDGAAVAVWTTPESVEAGAVFAEIGPRMAELSGSRLAAQQQMEGLLAPHRPKEPAWFLATVGVSPDHQGKGLGSAVVLPGVEAAERAGVPAFLETSAPRNLPFYERLGFTVTADVEVPEGPRTWCMTRKPGA

SEQ ID NO: 20727 - protein, 966 aa, synthetic construct
MALPVTALLLPLALLLHAARPDIQMTQSPSSLSASVGDRVTITCRASQSVSSYLAWYQQKPGKAPKLLIYDASNRATGVPSRFSGSGSGTDFTLTISSLQPEDFATYYCQQRTNWPLTFGQGTKVEIKRLEGQPKANPTVTLFPPSSEELQANKATLVCLISDFYPGAVTVAWKADGSPVKAGVETTKPSKQSNNKYAASSYLSLTPEQWKSHRSYSCQVTHEGSTVEKTVAPTECSGSQSFGLLDPKLCYLLDGILFIYGVILTALFLRVKFSRSADAPAYQQGQNQLYNELNLGRREEYDVLDKRRGRDPEMGGKPQRRKNPQEGLYNELQKDKMAEAYSEIGMKGERRRGKGHDGLYQGLSTATKDTYDALHMQALPPRRAKRSGSGATNFSLLKQAGDVEENPGPTSMDWIWRILFLVGAATGAHSFEEVQLVESGGGLVQPGGSLRLSCAASGFTFSSYIMHWVRQAPGKGLEWVAVISYDGRNKYYADSVKGRFTISRDNSKNTLYLQMNSLRAEDTAVYYCARDTDGYDFDYWGQGTLVTVSSTRASTKGPSVFPLAPSSKSTSGGTAALGCLVKDYFPEPVTVSWNSGALTSGVHTFPAVLQSSGLYSLSSVVTVPSSSLGTQTYICNVNHKPSNTKVDKRVEPKSCGTVVEKEHPQLGAGTVLLLRAGFYAVSFLSVAVGSTVYYQGKCLTWKGPRRQLPAVVPAPLPPPCGSSAHLLPPVPGGRAKRSGSGVKQTLNFDLLKLAGDVESNPGPSRGHMTEYKPTVRLATRDDVPRAVRTLAAAFADYPATRHTVDPDRHIERVTELQELFLTRVGLDIGKVWVADDGAAVAVWTTPESVEAGAVFAEIGPRMAELSGSRLAAQQQMEGLLAPHRPKEPAWFLATVGVSPDHQGKGLGSAVVLPGVEAAERAGVPAFLETSAPRNLPFYERLGFTVTADVEVPEGPRTWCMTRKPGA

SEQ ID NO: 20728 - protein, 995 aa, synthetic construct
MALPVTALLLPLALLLHAARPDIQMTQSPSSLSASVGDRVTITCRASQSVSSYLAWYQQKPGKAPKLLIYDASNRATGVPSRFSGSGSGTDFTLTISSLQPEDFATYYCQQRTNWPLTFGQGTKVEIKRLEDLKNVFPPEVAVFEPSEAEISHTQKATLVCLATGFYPDHVELSWWVNGKEVHSGVSTDPQPLKEQPALNDSRYCLSSRLRVSATFWQNPRNHFRCQVQFYGLSENDEWTQDRAKPVTQIVSAEAWGRADCGSQSFGLLDPKLCYLLDGILFIYGVILTALFLRVKFSRSADAPAYQQGQNQLYNELNLGRREEYDVLDKRRGRDPEMGGKPQRRKNPQEGLYNELQKDKMAEAYSEIGMKGERRRGKGHDGLYQGLSTATKDTYDALHMQALPPRRAKRSGSGATNFSLLKQAGDVEENPGPTSMDWIWRILFLVGAATGAHSFEEVQLVESGGGLVQPGGSLRLSCAASGFTFSSYIMHWVRQAPGKGLEWVAVISYDGRNKYYADSVKGRFTISRDNSKNTLYLQMNSLRAEDTAVYYCARDTDGYDFDYWGQGTLVTVSSTRIQNPDPAVYQLRDSKSSDKSVCLFTDFDSQTNVSQSKDSDVYITDKTVLDMRSMDFKSNSAVAWSNKSDFACANAFNNSIIPEDTFFPSPESSCGTGDIENTSLAPEDPTFPADTWGTYLLTTETGLQKDHALWDHTAQNLLRMGLAFLVLVALVWFLVEDWLSRKRTRERASRASTWEGRRRLNTQTLRAKRSGSGATNFSLLKQAGDVEENPGPSRGHMTEYKPTVRLATRDDVPRAVRTLAAAFADYPATRHTVDPDRHIERVTELQELFLTRVGLDIGKVWVADDGAAVAVWTTPESVEAGAVFAEIGPRMAELSGSRLAAQQQMEGLLAPHRPKEPAWFLATVGVSPDHQGKGLGSAVVLPGVEAAERAGVPAFLETSAPRNLPFYERLGFTVTADVEVPEGPRTWCMTRKPGA

SEQ ID NO: 20729 - protein, 1061 aa, synthetic construct
MALPVTALLLPLALLLHAARPDIQMTQSPSSLSASVGDRVTITCRASQSVSSYLAWYQQKPGKAPKLLIYDASNRATGVPSRFSGSGSGTDFTLTISSLQPEDFATYYCQQRTNWPLTFGQGTKVEIKRLEDLKNVFPPEVAVFEPSEAEISHTQKATLVCLATGFYPDHVELSWWVNGKEVHSGVSTDPQPLKEQPALNDSRYCLSSRLRVSATFWQNPRNHFRCQVQFYGLSENDEWTQDRAKPVTQIVSAEAWGRADCGSQSFGLLDPKLCYLLDGILFIYGVILTALFLRVKFSRSADAPAYQQGQNQLYNELNLGRREEYDVLDKRRGRDPEMGGKPQRRKNPQEGLYNELQKDKMAEAYSEIGMKGERRRGKGHDGLYQGLSTATKDTYDALHMQALPPRRAKRSGSGATNFSLLKQAGDVEENPGPTSMDWIWRILFLVGAATGAHSFEEVQLVESGGGLVQPGGSLRLSCAASGFTFSSYIMHWVRQAPGKGLEWVAVISYDGRNKYYADSVKGRFTISRDNSKNTLYLQMNSLRAEDTAVYYCARDTDGYDFDYWGQGTLVTVSSTRIQNPDPAVYQLRDSKSSDKSVCLFTDFDSQTNVSQSKDSDVYITDKTVLDMRSMDFKSNSAVAWSNKSDFACANAFNNSIIPEDTFFPSPESSCGTKSVRFYLVVSPASASTQTSWTPRDLVSSQTQTQSCVPPTAGARQAPESPSTIPVPSQPQNSTLRPGPAAPIALVPVFCGLLVAKSLVLSALLVWWGDIWWKTMMELRSLDTQKATCHLQQVTDLPWTSVSSPVEREILYHTVARTKISDDDDEHTLRAKRSGSGVKQTLNFDLLKLAGDVESNPGPSRGHMTEYKPTVRLATRDDVPRAVRTLAAAFADYPATRHTVDPDRHIERVTELQELFLTRVGLDIGKVWVADDGAAVAVWTTPESVEAGAVFAEIGPRMAELSGSRLAAQQQMEGLLAPHRPKEPAWFLATVGVSPDHQGKGLGSAVVLPGVEAAERAGVPAFLETSAPRNLPFYERLGFTVTADVEVPEGPRTWCMTRKPGA

SEQ ID NO: 20730 - protein, 981 aa, synthetic construct
MALPVTALLLPLALLLHAARPDIQMTQSPSSLSASVGDRVTITCRASQSVSSYLAWYQQKPGKAPKLLIYDASNRATGVPSRFSGSGSGTDFTLTISSLQPEDFATYYCQQRTNWPLTFGQGTKVEIKRLEDLKNVFPPEVAVFEPSEAEISHTQKATLVCLATGFYPDHVELSWWVNGKEVHSGVSTDPQPLKEQPALNDSRYCLSSRLRVSATFWQNPRNHFRCQVQFYGLSENDEWTQDRAKPVTQIVSAEAWGRADCGSQSFGLLDPKLCYLLDGILFIYGVILTALFLRVKFSRSADAPAYQQGQNQLYNELNLGRREEYDVLDKRRGRDPEMGGKPQRRKNPQEGLYNELQKDKMAEAYSEIGMKGERRRGKGHDGLYQGLSTATKDTYDALHMQALPPRRAKRSGSGATNFSLLKQAGDVEENPGPTSMDWIWRILFLVGAATGAHSFEEVQLVESGGGLVQPGGSLRLSCAASGFTFSSYIMHWVRQAPGKGLEWVAVISYDGRNKYYADSVKGRFTISRDNSKNTLYLQMNSLRAEDTAVYYCARDTDGYDFDYWGQGTLVTVSSTRIQNPDPAVYQLRDSKSSDKSVCLFTDFDSQTNVSQSKDSDVYITDKTVLDMRSMDFKSNSAVAWSNKSDFACANAFNNSIIPEDTFFPSPESSCGTVVEKEHPQLGAGTVLLLRAGFYAVSFLSVAVGSTVYYQGKCLTWKGPRRQLPAVVPAPLPPPCGSSAHLLPPVPGGRAKRSGSGVKQTLNFDLLKLAGDVESNPGPSRGHMTEYKPTVRLATRDDVPRAVRTLAAAFADYPATRHTVDPDRHIERVTELQELFLTRVGLDIGKVWVADDGAAVAVWTTPESVEAGAVFAEIGPRMAELSGSRLAAQQQMEGLLAPHRPKEPAWFLATVGVSPDHQGKGLGSAVVLPGVEAAERAGVPAFLETSAPRNLPFYERLGFTVTADVEVPEGPRTWCMTRKPGA

SEQ ID NO: 20731 - protein, 952 aa, synthetic construct
MALPVTALLLPLALLLHAARPDIQMTQSPSSLSASVGDRVTITCRASQSVSSYLAWYQQKPGKAPKLLIYDASNRATGVPSRFSGSGSGTDFTLTISSLQPEDFATYYCQQRTNWPLTFGQGTKVEIKRLEGQPKANPTVTLFPPSSEELQANKATLVCLISDFYPGAVTVAWKADGSPVKAGVETTKPSKQSNNKYAASSYLSLTPEQWKSHRSYSCQVTHEGSTVEKTVAPTECSGSQSFGLLDPKLCYLLDGILFIYGVILTALFLRVKFSRSADAPAYQQGQNQLYNELNLGRREEYDVLDKRRGRDPEMGGKPQRRKNPQEGLYNELQKDKMAEAYSEIGMKGERRRGKGHDGLYQGLSTATKDTYDALHMQALPPRRAKRSGSGATNFSLLKQAGDVEENPGPTSMDWIWRILFLVGAATGAHSFEEVQLVESGGGLVQPGGSLRLSCAASGFTFSSYIMHWVRQAPGKGLEWVAVISYDGRNKYYADSVKGRFTISRDNSKNTLYLQMNSLRAEDTAVYYCARDTDGYDFDYWGQGTLVTVSSTRASTKGPSVFPLAPSSKSTSGGTAALGCLVKDYFPEPVTVSWNSGALTSGVHTFPAVLQSSGLYSLSSVVTVPSSSLGTQTYICNVNHKPSNTKVDKRVEPKSCGTITQGLAVSTISSFFPPGYQVSFCLVMVLLFAVDTGLYFSVKTNIRSSTRDWKDHKFKWRKDPQDKRAKRSGSGATNFSLLKQAGDVEENPGPSRGHMTEYKPTVRLATRDDVPRAVRTLAAAFADYPATRHTVDPDRHIERVTELQELFLTRVGLDIGKVWVADDGAAVAVWTTPESVEAGAVFAEIGPRMAELSGSRLAAQQQMEGLLAPHRPKEPAWFLATVGVSPDHQGKGLGSAVVLPGVEAAERAGVPAFLETSAPRNLPFYERLGFTVTADVEVPEGPRTWCMTRKPGA

SEQ ID NO: 20732 - protein, 967 aa, synthetic construct
MALPVTALLLPLALLLHAARPDIQMTQSPSSLSASVGDRVTITCRASQSVSSYLAWYQQKPGKAPKLLIYDASNRATGVPSRFSGSGSGTDFTLTISSLQPEDFATYYCQQRTNWPLTFGQGTKVEIKRLEDLKNVFPPEVAVFEPSEAEISHTQKATLVCLATGFYPDHVELSWWVNGKEVHSGVSTDPQPLKEQPALNDSRYCLSSRLRVSATFWQNPRNHFRCQVQFYGLSENDEWTQDRAKPVTQIVSAEAWGRADCGSQSFGLLDPKLCYLLDGILFIYGVILTALFLRVKFSRSADAPAYQQGQNQLYNELNLGRREEYDVLDKRRGRDPEMGGKPQRRKNPQEGLYNELQKDKMAEAYSEIGMKGERRRGKGHDGLYQGLSTATKDTYDALHMQALPPRRAKRSGSGATNFSLLKQAGDVEENPGPTSMDWIWRILFLVGAATGAHSFEEVQLVESGGGLVQPGGSLRLSCAASGFTFSSYIMHWVRQAPGKGLEWVAVISYDGRNKYYADSVKGRFTISRDNSKNTLYLQMNSLRAEDTAVYYCARDTDGYDFDYWGQGTLVTVSSTRIQNPDPAVYQLRDSKSSDKSVCLFTDFDSQTNVSQSKDSDVYITDKTVLDMRSMDFKSNSAVAWSNKSDFACANAFNNSIIPEDTFFPSPESSCGTITQGLAVSTISSFFPPGYQVSFCLVMVLLFAVDTGLYFSVKTNIRSSTRDWKDHKFKWRKDPQDKRAKRSGSGATNFSLLKQAGDVEENPGPSRGHMTEYKPTVRLATRDDVPRAVRTLAAAFADYPATRHTVDPDRHIERVTELQELFLTRVGLDIGKVWVADDGAAVAVWTTPESVEAGAVFAEIGPRMAELSGSRLAAQQQMEGLLAPHRPKEPAWFLATVGVSPDHQGKGLGSAVVLPGVEAAERAGVPAFLETSAPRNLPFYERLGFTVTADVEVPEGPRTWCMTRKPGA

SEQ ID NO: 20733 - protein, 650 aa, synthetic construct
MALPVTALLLPLALLLHAARPDIQMTQSPSSLSASVGDRVTITCRASQSVSSYLAWYQQKPGKAPKLLIYDASNRATGVPSRFSGSGSGTDFTLTISSLQPEDFATYYCQQRTNWPLTFGQGTKVEIKRLEGQPKANPTVTLFPPSSEELQANKATLVCLISDFYPGAVTVAWKADGSPVKAGVETTKPSKQSNNKYAASSYLSLTPEQWKSHRSYSCQVTHEGSTVEKTVAPTECSGSLGEPQLCYILDAILFLYGIVLTLLYCRLKIQVRKAAITSYEKSDGVYTGLSTRNQETYETLKHEKPPQRAKRSGSGATNFSLLKQAGDVEENPGPTSMDWIWRILFLVGAATGAHSFEEVQLVESGGGLVQPGGSLRLSCAASGFTFSSYIMHWVRQAPGKGLEWVAVISYDGRNKYYADSVKGRFTISRDNSKNTLYLQMNSLRAEDTAVYYCARDTDGYDFDYWGQGTLVTVSSTRASTKGPSVFPLAPSSKSTSGGTAALGCLVKDYFPEPVTVSWNSGALTSGVHTFPAVLQSSGLYSLSSVVTVPSSSLGTQTYICNVNHKPSNTKVDKRVEPKSCGTLGEPQLCYILDAILFLYGIVLTLLYCRLKIQVRKAAITSYEKSDGVYTGLSTRNQETYETLKHEKPPQ

SEQ ID NO: 20734 - protein, 1027 aa, synthetic construct
MALPVTALLLPLALLLHAARPDIQMTQSPSSLSASVGDRVTITCRASQSVSSYLAWYQQKPGKAPKLLIYDASNRATGVPSRFSGSGSGTDFTLTISSLQPEDFATYYCQQRTNWPLTFGQGTKVEIKRGQPKANPTVTLFPPSSEELQANKATLVCLISDFYPGAVTVAWKADGSPVKAGVETTKPSKQSNNKYAASSYLSLTPEQWKSHRSYSCQVTHEGSTVEKTVAPTECSGSQSFGLLDPKLCYLLDGILFIYGVILTALFLRVKFSRSADAPAYQQGQNQLYNELNLGRREEYDVLDKRRGRDPEMGGKPRRKNPQEGLYNELQKDKMAEAYSEIGMKGERRRGKGHDGLYQGLSTATKDTYDALHMQALPPRRAKRSGSGATNFSLLKQAGDVEENPGPTSMDWIWRILFLVGAATGAHSFEEVQLVESGGGLVQPGGSLRLSCAASGFTFSSYIMHWVRQAPGKGLEWVAVISYDGRNKYYADSVKGRFTISRDNSKNTLYLQMNSLRAEDTAVYYCARDTDGYDFDYWGQGTLVTVSSASTKGPSVFPLAPSSKSTSGGTAALGCLVKDYFPEPVTVSWNSGALTSGVHTFPAVLQSSGLYSLSSVVTVPSSSLGTQTYICNVNHKPSNTKVDKRVEPKSCGTQSFGLLDPKLCYLLDGILFIYGVILTALFLRVKFSRSADAPAYQQGQNQLYNELNLGRREEYDVLDKRRGRDPEMGGKPRRKNPQEGLYNELQKDKMAEAYSEIGMKGERRRGKGHDGLYQGLSTATKDTYDALHMQALPPRRAKRSGSGVKQTLNFDLLKLAGDVESNPGPSRGHMTEYKPTVRLATRDDVPRAVRTLAAAFADYPATRHTVDPDRHIERVTELQELFLTRVGLDIGKVWVADDGAAVAVWTTPESVEAGAVFAEIGPRMAELSGSRLAAQQQMEGLLAPHRPKEPAWFLATVGVSPDHQGKGLGSAVVLPGVEAAERAGVPAFLETSAPRNLPFYERLGFTVTADVEVPEGPRTWCMTRKPGA

SEQ ID NO: 20735 - protein, 813 aa, synthetic construct
MALPVTALLLPLALLLHAARPDIQMTQSPSSLSASVGDRVTITCRASQSVSSYLAWYQQKPGKAPKLLIYDASNRATGVPSRFSGSGSGTDFTLTISSLQPEDFATYYCQQRTNWPLTFGQGTKVEIKRLEDLKNVFPPEVAVFEPSEAEISHTQKATLVCLATGFYPDHVELSWWVNGKEVHSGVSTDPQPLKEQPALNDSRYCLSSRLRVSATFWQNPRNHFRCQVQFYGLSENDEWTQDRAKPVTQIVSAEAWGRADCGSQSFGLLDPKLCYLLDGILFIYGVILTALFLRVKFSRSADAPAYQQGQNQLYNELNLGRREEYDVLDKRRGRDPEMGGKPRRKNPQEGLYNELQKDKMAEAYSEIGMKGERRRGKGHDGLYQGLSTATKDTYDALHMQALPPRRAKRSGSGATNFSLLKQAGDVEENPGPTSMDWIWRILFLVGAATGAHSFEEVQLVESGGGLVQPGGSLRLSCAASGFTFSSYIMHWVRQAPGKGLEWVAVISYDGRNKYYADSVKGRFTISRDNSKNTLYLQMNSLRAEDTAVYYCARDTDGYDFDYWGQGTLVTVSSTRIQNPDPAVYQLRDSKSSDKSVCLFTDFDSQTNVSQSKDSDVYITDKTVLDMRSMDFKSNSAVAWSNKSDFACANAFNNSIIPEDTFFPSPESSCGTQSFGLLDPKLCYLLDGILFIYGVILTALFLRVKFSRSADAPAYQQGQNQLYNELNLGRREEYDVLDKRRGRDPEMGGKPRRKNPQEGLYNELQKDKMAEAYSEIGMKGERRRGKGHDGLYQGLSTATKDTYDALHMQALPPR

SEQ ID NO: 20736 - protein, 494 aa, synthetic construct
MALPVTALLLPLALLLHAARPDIQMTQSPSSLSASVGDRVTITCRASQGISSWLAWYQQKPGKAPKLLIYAASSLQSGVPSRFSGSGSGTDFTLTISSLQPEDFATYYCQQYNSYPLTFGQGTKVEIKRGGGGSGGGGSGGGGSEVQLVESGGGLVQPGGSLRLSCAASGFTFSDHGMHWVRQAPGKGLEWVAVIWYDGSNKYYADSVKGRFTISRDNSKNTLYLQMNSLRAEDTAVYYCARDSIMVRGDYWGQGTLVTVSSTREQKLISEEDLKIEVMYPPPYLDNEKSNGTIIHVKGKHLCPSPLFPGPSKPFWVLVVVGGVLACYSLLVTVAFIIFWVRSKRSRLLHSDYMNMTPRRPGPTRKHYQPYAPPRDFAAYRSRVKFSRSADAPAYQQGQNQLYNELNLGRREEYDVLDKRRGRDPEMGGKPRRKNPQEGLYNELQKDKMAEAYSEIGMKGERRRGKGHDGLYQGLSTATKDTYDALHMQALPPR

SEQ ID NO: 20737 - protein, 500 aa, synthetic construct
MALPVTALLLPLALLLHAARPDIQMTQSPSSLSASVGDRVTITCRASQGISSWLAWYQQKPGKAPKLLIYAASSLQSGVPSRFSGSGSGTDFTLTISSLQPEDFATYYCQQYNSYPLTFGQGTKVEIKRGGGGSGGGGSGGGGSEVQLVESGGGLVQPGGSLRLSCAASGFTFSDHGMHWVRQAPGKGLEWVAVIWYDGSNKYYADSVKGRFTISRDNSKNTLYLQMNSLRAEDTAVYYCARDSIMVRGDYWGQGTLVTVSSTREQKLISEEDLAKPTTTPAPRPPTPAPTIASQPLSLRPEACRPAAGGAVHTRGLDFACDIYIWAPLAGTCGVLLLSLVITLYCKRGRKKLLYIFKQPFMRPVQTTQEEDGCSCRFPEEEEGGCELRVKFSRSADAPAYQQGQNQLYNELNLGRREEYDVLDKRRGRDPEMGGKPRRKNPQEGLYNELQKDKMAEAYSEIGMKGERRRGKGHDGLYQGLSTATKDTYDALHMQALPPR

SEQ ID NO: 20738 - protein, 500 aa, synthetic construct
MALPVTALLLPLALLLHAARPEVQLVESGGGLVQPGGSLRLSCAASGFTFSDHGMHWVRQAPGKGLEWVAVIWYDGSNKYYADSVKGRFTISRDNSKNTLYLQMNSLRAEDTAVYYCARDSIMVRGDYWGQGTLVTVSSGGGGSGGGGSGGGGSDIQMTQSPSSLSASVGDRVTITCRASQGISSWLAWYQQKPGKAPKLLIYAASSLQSGVPSRFSGSGSGTDFTLTISSLQPEDFATYYCQQYNSYPLTFGQGTKVEIKRTREQKLISEEDLAKPTTTPAPRPPTPAPTIASQPLSLRPEACRPAAGGAVHTRGLDFACDIYIWAPLAGTCGVLLLSLVITLYCKRGRKKLLYIFKQPFMRPVQTTQEEDGCSCRFPEEEEGGCELRVKFSRSADAPAYQQGQNQLYNELNLGRREEYDVLDKRRGRDPEMGGKPRRKNPQEGLYNELQKDKMAEAYSEIGMKGERRRGKGHDGLYQGLSTATKDTYDALHMQALPPR

SEQ ID NO: 20739 - protein, 913 aa, synthetic construct
MALPVTALLLPLALLLHAARPDIQMTQSPSSLSASVGDRVTITCRASQGISSWLAWYQQKPGKAPKLLIYAASSLQSGVPSRFSGSGSGTDFTLTISSLQPEDFATYYCQQYNSYPLTFGQGTKVEIKRGGGGSGGGGSGGGGSEVQLVESGGGLVQPGGSLRLSCAASGFTFSDHGMHWVRQAPGKGLEWVAVIWYDGSNKYYADSVKGRFTISRDNSKNTLYLQMNSLRAEDTAVYYCARDSIMVRGDYWGQGTLVTVSSTREQKLISEEDLAKPTTTPAPRPPTPAPTIASQPLSLRPEACRPAAGGAVHTRGLDFACDIYIWAPLAGTCGVLLLSLVITLYCGRARVKFSRSADAPAYQQGQNQLYNELNLGRREEYDVLDKRRGRDPEMGGKPRRKNPQEGLYNELQKDKMAEAYSEIGMKGERRRGKGHDGLYQGLSTATKDTYDALHMQALPPRSRGSGATNFSLLKQAGDVEENPGPGIHMATYEVLCEVARKLGTDDREVVLFLLNVFIPQPTLAQLIGALRALKEEGRLTFPLLAECLFRAGRRDLLRDLLHLDPRFLERHLAGTMSYFSPYQLTVLHVDGELCARDIRSLIFLSKDTIGSRSTPQTFLHWVYCMENLDLLGPTDVDALMSMLRSLSRVDLQRQVQTLMGLHLSGPSHSQHYRHTPLETDFYDYKDDDDKTSGSGEGRGSLLTCGDVEENPGPHMTEYKPTVRLATRDDVPRAVRTLAAAFADYPATRHTVDPDRHIERVTELQELFLTRVGLDIGKVWVADDGAAVAVWTTPESVEAGAVFAEIGPRMAELSGSRLAAQQQMEGLLAPHRPKEPAWFLATVGVSPDHQGKGLGSAVVLPGVEAAERAGVPAFLETSAPRNLPFYERLGFTVTADVEVPEGPRTWCMTRKPGA

SEQ ID NO: 20740 - protein, 853 aa, synthetic construct
MALPVTALLLPLALLLHAARPDIQMTQSPSSLSASVGDRVTITCRASQGISSWLAWYQQKPGKAPKLLIYAASSLQSGVPSRFSGSGSGTDFTLTISSLQPEDFATYYCQQYNSYPLTFGQGTKVEIKRLEIQNPDPAVYQLRDSKSSDKSVCLFTDFDSQTNVSQSKDSDVYITDKCVLDMRSMDFKSNSAVAWSNKSDFACANAFNNSIIPEDTFFPSSDVPCDVKLVEKSFETDTNLNFQNLSVIGFRILLLKVAGFNLLMTLRLWSSRAKRSGSGVKQTLNFDLLKLAGDVESNPGPTSMDWIWRILFLVGAATGAHSFEEVQLVESGGGLVQPGGSLRLSCAASGFTFSDHGMHWVRQAPGKGLEWVAVIWYDGSNKYYADSVKGRFTISRDNSKNTLYLQMNSLRAEDTAVYYCARDSIMVRGDYWGQGTLVTVSSTREDLKNVFPPEVAVFEPSKAEIAHTQKATLVCLATGFYPDHVELSWWVNGKEVHSGVCTDPQPLKEQPALNDSRYCLSSRLRVSATFWQNPRNHFRCQVQFYGLSENDEWTQDRAKPVTQIVSAEAWGRADCGITSASYHQGVLSATILYEILLGKATLYAVLVSALVLMAMVKRKDSRGRAKRSGSGATNFSLLKQAGDVEENPGPSRGHMTEYKPTVRLATRDDVPRAVRTLAAAFADYPATRHTVDPDRHIERVTELQELFLTRVGLDIGKVWVADDGAAVAVWTTPESVEAGAVFAEIGPRMAELSGSRLAAQQQMEGLLAPHRPKEPAWFLATVGVSPDHQGKGLGSAVVLPGVEAAERAGVPAFLETSAPRNLPFYERLGFTVTADVEVPEGPRTWCMTRKPGA

SEQ ID NO: 20741 - protein, 852 aa, synthetic construct
MALPVTALLLPLALLLHAARPDIQMTQSPSSLSASVGDRVTITCRASQGISSWLAWYQQKPGKAPKLLIYAASSLQSGVPSRFSGSGSGTDFTLTISSLQPEDFATYYCQQYNSYPLTFGQGTKVEIKRLEDLKNVFPPEVAVFEPSKAEIAHTQKATLVCLATGFYPDHVELSWWVNGKEVHSGVCTDPQPLKEQPALNDSRYCLSSRLRVSATFWQNPRNHFRCQVQFYGLSENDEWTQDRAKPVTQIVSAEAWGRADCGITSASYHQGVLSATILYEILLGKATLYAVLVSALVLMAMVKRKDSRGRAKRSGSGATNFSLLKQAGDVEENPGPTSMDWIWRILFLVGAATGAHSFEEVQLVESGGGLVQPGGSLRLSCAASGFTFSDHGMHWVRQAPGKGLEWVAVIWYDGSNKYYADSVKGRFTISRDNSKNTLYLQMNSLRAEDTAVYYCARDSIMVRGDYWGQGTLVTVSSTRIQNPDPAVYQLRDSKSSDKSVCLFTDFDSQTNVSQSKDSDVYITDKCVLDMRSMDFKSNSAVAWSNKSDFACANAFNNSIIPEDTFFPSSDVPCDVKLVEKSFETDTNLNFQNLSVIGFRILLLKVAGFNLLMTLRLWSSRAKRSGSGVKQTLNFDLLKLAGDVESNPGPSRGHMTEYKPTVRLATRDDVPRAVRTLAAAFADYPATRHTVDPDRHIERVTELQELFLTRVGLDIGKVWVADDGAAVAVWTTPESVEAGAVFAEIGPRMAELSGSRLAAQQQMEGLLAPHRPKEPAWFLATVGVSPDHQGKGLGSAVVLPGVEAAERAGVPAFLETSAPRNLPFYERLGFTVTADVEVPEGPRTWCMTRKPGA

SEQ ID NO: 20742 - protein, 619 aa, synthetic construct
MALPVTALLLPLALLLHAARPDIQMTQSPSSLSASVGDRVTITCRASQGISSWLAWYQQKPGKAPKLLIYAASSLQSGVPSRFSGSGSGTDFTLTISSLQPEDFATYYCQQYNSYPLTFGQGTKVEIKRLEDLKNVFPPEVAVFEPSEAEISHTQKATLVCLATGFYPDHVELSWWVNGKEVHSGVCTDPQPLKEQPALNDSRYCLSSRLRVSATFWQNPRNHFRCQVQFYGLSENDEWTQDRAKPVTQIVSAEAWGRADCGFTSESYQQGVLSATILYEILLGKATLYAVLVSALVLMAMVKRKDSRGRAKRSGSGATNFSLLKQAGDVEENPGPTSMDWIWRILFLVGAATGAHSFEEVQLVESGGGLVQPGGSLRLSCAASGFTFSDHGMHWVRQAPGKGLEWVAVIWYDGSNKYYADSVKGRFTISRDNSKNTLYLQMNSLRAEDTAVYYCARDSIMVRGDYWGQGTLVTVSSTRIQNPDPAVYQLRDSKSSDKSVCLFTDFDSQTNVSQSKDSDVYITDKCVLDMRSMDFKSNSAVAWSNKSDFACANAFNNSIIPEDTFFPSPESSCDVKLVEKSFETDTNLNFQNLSVIGFRILLLKVAGFNLLMTLRLWSS

SEQ ID NO: 20743 - protein, 844 aa, synthetic construct
MALPVTALLLPLALLLHAARPDIQMTQSPSSLSASVGDRVTITCRASQGISSWLAWYQQKPGKAPKLLIYAASSLQSGVPSRFSGSGSGTDFTLTISSLQPEDFATYYCQQYNSYPLTFGQGTKVEIKRLEDLKNVFPPEVAVFEPSEAEISHTQKATLVCLATGFYPDHVELSWWVNGKEVHSGVCTDPQPLKEQPALNDSRYCLSSRLRVSATFWQNPRNHFRCQVQFYGLSENDEWTQDRAKPVTQIVSAEAWGRADCGFTSESYQQGVLSATILYEILLGKATLYAVLVSALVLMAMVKRKDSRGRAKRSGSGATNFSLLKQAGDVEENPGPTSMDWIWRILFLVGAATGAHSFEEVQLVESGGGLVQPGGSLRLSCAASGFTFSDHGMHWVRQAPGKGLEWVAVIWYDGSNKYYADSVKGRFTISRDNSKNTLYLQMNSLRAEDTAVYYCARDSIMVRGDYWGQGTLVTVSSTRIQNPDPAVYQLRDSKSSDKSVCLFTDFDSQTNVSQSKDSDVYITDKCVLDMRSMDFKSNSAVAWSNKSDFACANAFNNSIIPEDTFFPSPESSCDVKLVEKSFETDTNLNFQNLSVIGFRILLLKVAGFNLLMTLRLWSSRAKRSGSGVKQTLNFDLLKLAGDVESNPGPSRGGIHTMATYEVLCEVARKLGTDDREVVLFLLNVFIPQPTLAQLIGALRALKEEGRLTFPLLAECLFRAGRRDLLRDLLHLDPRFLERHLAGTMSYFSPYQLTVLHVDGELCARDIRSLIFLSKDTIGSRSTPQTFLHWVYCMENLDLLGPTDVDALMSMLRSLSRVDLQRQVQTLMGLHLSGPSHSQHYRHTP

SEQ ID NO: 20744 - protein, 623 aa, synthetic construct
MALPVTALLLPLALLLHAARPDIQMTQSPSSLSASVGDRVTITCRASQGISSWLAWYQQKPGKAPKLLIYAASSLQSGVPSRFSGSGSGTDFTLTISSLQPEDFATYYCQQYNSYPLTFGQGTKVEIKRLEIQNPDPAVYQLRDSKSSDKSVCLFTDFDSQTNVSQSKDSDVYITDKCVLDMRSMDFKSNSAVAWSNKSDFACANAFNNSIIPEDTFFPSPESSCDVKLVEKSFETDTNLNFQNLSVIGFRILLLKVAGFNLLMTLRLWSSRAKRSGSGVKQTLNFDLLKLAGDVESNPGPTSMDWIWRILFLVGAATGAHSFEEVQLVESGGGLVQPGGSLRLSCAASGFTFSDHGMHWVRQAPGKGLEWVAVIWYDGSNKYYADSVKGRFTISRDNSKNTLYLQMNSLRAEDTAVYYCARDSIMVRGDYWGQGTLVTVSSTREDLKNVFPPEVAVFEPSEAEISHTQKATLVCLATGFYPDHVELSWWVNGKEVHSGVCTDPQPLKEQPALNDSRYCLSSRLRVSATFWQNPRNHFRCQVQFYGLSENDEWTQDRAKPVTQIVSAEAWGRADCGFTSESYQQGVLSATILYEILLGKATLYAVLVSALVLMAMVKRKDSRG

SEQ ID NO: 20745 - protein, 845 aa, synthetic construct
MALPVTALLLPLALLLHAARPDIQMTQSPSSLSASVGDRVTITCRASQGISSWLAWYQQKPGKAPKLLIYAASSLQSGVPSRFSGSGSGTDFTLTISSLQPEDFATYYCQQYNSYPLTFGQGTKVEIKRLEIQNPDPAVYQLRDSKSSDKSVCLFTDFDSQTNVSQSKDSDVYITDKCVLDMRSMDFKSNSAVAWSNKSDFACANAFNNSIIPEDTFFPSPESSCDVKLVEKSFETDTNLNFQNLSVIGFRILLLKVAGFNLLMTLRLWSSRAKRSGSGVKQTLNFDLLKLAGDVESNPGPTSMDWIWRILFLVGAATGAHSFEEVQLVESGGGLVQPGGSLRLSCAASGFTFSDHGMHWVRQAPGKGLEWVAVIWYDGSNKYYADSVKGRFTISRDNSKNTLYLQMNSLRAEDTAVYYCARDSIMVRGDYWGQGTLVTVSSTREDLKNVFPPEVAVFEPSEAEISHTQKATLVCLATGFYPDHVELSWWVNGKEVHSGVCTDPQPLKEQPALNDSRYCLSSRLRVSATFWQNPRNHFRCQVQFYGLSENDEWTQDRAKPVTQIVSAEAWGRADCGFTSESYQQGVLSATILYEILLGKATLYAVLVSALVLMAMVKRKDSRGRAKRSGSGATNFSLLKQAGDVEENPGPSRGGIHTMATYEVLCEVARKLGTDDREVVLFLLNVFIPQPTLAQLIGALRALKEEGRLTFPLLAECLFRAGRRDLLRDLLHLDPRFLERHLAGTMSYFSPYQLTVLHVDGELCARDIRSLIFLSKDTIGSRSTPQTFLHWVYCMENLDLLGPTDVDALMSMLRSLSRVDLQRQVQTLMGLHLSGPSHSQHYRHTP

SEQ ID NO: 20746 - protein, 897 aa, synthetic construct
MALPVTALLLPLALLLHAARPLEGKPIPNPLLGLDSTGSGEDLKNVFPPEVAVFEPSKAEIAHTQKATLVCLATGFYPDHVELSWWVNGKEVHSGVCTDPQPLKEQPALNDSRYCLSSRLRVSATFWQNPRNHFRCQVQFYGLSENDEWTQDRAKPVTQIVSAEAWGRADCGITSASYHQGVLSATILYEILLGKATLYAVLVSALVLMAMVKRKDSRGRAKRSGSGATNFSLLKQAGDVEENPGPTSMALPVTALLLPLALLLHAARPDIQMTQSPSSLSASVGDRVTITCRASQGISSWLAWYQQKPGKAPKLLIYAASSLQSGVPSRFSGSGSGTDFTLTISSLQPEDFATYYCQQYNSYPLTFGQGTKVEIKRGGGGSGGGGSGGGGSEVQLVESGGGLVQPGGSLRLSCAASGFTFSDHGMHWVRQAPGKGLEWVAVIWYDGSNKYYADSVKGRFTISRDNSKNTLYLQMNSLRAEDTAVYYCARDSIMVRGDYWGQGTLVTVSSTREQKLISEEDGSGIQNPDPAVYQLRDSKSSDKSVCLFTDFDSQTNVSQSKDSDVYITDKCVLDMRSMDFKSNSAVAWSNKSDFACANAFNNSIIPEDTFFPSSDVPCDVKLVEKSFETDTNLNFQNLSVIGFRILLLKVAGFNLLMTLRLWSSRAKRSGSGVKQTLNFDLLKLAGDVESNPGPSRGHMTEYKPTVRLATRDDVPRAVRTLAAAFADYPATRHTVDPDRHIERVTELQELFLTRVGLDIGKVWVADDGAAVAVWTTPESVEAGAVFAEIGPRMAELSGSRLAAQQQMEGLLAPHRPKEPAWFLATVGVSPDHQGKGLGSAVVLPGVEAAERAGVPAFLETSAPRNLPFYERLGFTVTADVEVPEGPRTWCMTRKPGA

SEQ ID NO: 20747 - protein, 898 aa, synthetic construct
MALPVTALLLPLALLLHAARPLEQKLISEEDLGSGDRPDPAVYQLRDSKSSDKSVCLFTDFDSQTNVSQSKDSDVYITDKCVLDMRSMDFKSNSAVAWSNKSDFACANAFNNSIIPEDTFFPSPESSCDVKLVEKSFETDTNLNFQNLSVIGFRILLLKVAGFNLLMTLRLWSSSSRAKRSGSGVKQTLNFDLLKLAGDVESNPGPTSMALPVTALLLPLALLLHAARPDIQMTQSPSSLSASVGDRVTITCRASQGISSWLAWYQQKPGKAPKLLIYAASSLQSGVPSRFSGSGSGTDFTLTISSLQPEDFATYYCQQYNSYPLTFGQGTKVEIKRGGGGSGGGGSGGGGSEVQLVESGGGLVQPGGSLRLSCAASGFTFSDHGMHWVRQAPGKGLEWVAVIWYDGSNKYYADSVKGRFTISRDNSKNTLYLQMNSLRAEDTAVYYCARDSIMVRGDYWGQGTLVTVSSTRGKPIPNPLLGLDSTGSGEDLKNVFPPEVAVFEPSEAEISHTQKATLVCLATGFYPDHVELSWWVNGKEVHSGVCTDPQPLKEQPALNDSRYCLSSRLRVSATFWQNPRNHFRCQVQFYGLSENDEWTQDRAKPVTQIVSAEAWGRADCGFTSESYQQGVLSATILYEILLGKATLYAVLVSALVLMAMVKRKDSRGRAKRSGSGATNFSLLKQAGDVEENPGPSRGHMTEYKPTVRLATRDDVPRAVRTLAAAFADYPATRHTVDPDRHIERVTELQELFLTRVGLDIGKVWVADDGAAVAVWTTPESVEAGAVFAEIGPRMAELSGSRLAAQQQMEGLLAPHRPKEPAWFLATVGVSPDHQGKGLGSAVVLPGVEAAERAGVPAFLETSAPRNLPFYERLGFTVTADVEVPEGPRTWCMTRKPGA

SEQ ID NO: 20748 - protein, 852 aa, synthetic construct
MALPVTALLLPLALLLHAARPDIQMTQSPSSLSASVGDRVTITCRASQGISSWLAWYQQKPGKAPKLLIYAASSLQSGVPSRFSGSGSGTDFTLTISSLQPEDFATYYCQQYNSYPLTFGQGTKVEIKRLEDLKNVFPPEVAVFEPSEAEISHTQKATLVCLATGFYPDHVELSWWVNGKEVHSGVSTDPQPLKEQPALNDSRYCLSSRLRVSATFWQNPRNHFRCQVQFYGLSENDEWTQDRAKPVTQIVSAEAWGRADCGFTSESYQQGVLSATILYEILLGKATLYAVLVSALVLMAMVKRKDSRGRAKRSGSGATNFSLLKQAGDVEENPGPTSMDWIWRILFLVGAATGAHSFEEVQLVESGGGLVQPGGSLRLSCAASGFTFSDHGMHWVRQAPGKGLEWVAVIWYDGSNKYYADSVKGRFTISRDNSKNTLYLQMNSLRAEDTAVYYCARDSIMVRGDYWGQGTLVTVSSTRIQNPDPAVYQLRDSKSSDKSVCLFTDFDSQTNVSQSKDSDVYITDKTVLDMRSMDFKSNSAVAWSNKSDFACANAFNNSIIPEDTFFPSPESSCDVKLVEKSFETDTNLNFQNLSVIGFRILLLKVAGFNLLMTLRLWSSRAKRSGSGVKQTLNFDLLKLAGDVESNPGPSRGHMTEYKPTVRLATRDDVPRAVRTLAAAFADYPATRHTVDPDRHIERVTELQELFLTRVGLDIGKVWVADDGAAVAVWTTPESVEAGAVFAEIGPRMAELSGSRLAAQQQMEGLLAPHRPKEPAWFLATVGVSPDHQGKGLGSAVVLPGVEAAERAGVPAFLETSAPRNLPFYERLGFTVTADVEVPEGPRTWCMTRKPGA

SEQ ID NO: 20749 - protein, 934 aa, synthetic construct
MALPVTALLLPLALLLHAARPDIQMTQSPSSLSASVGDRVTITCRASQGISSWLAWYQQKPGKAPKLLIYAASSLQSGVPSRFSGSGSGTDFTLTISSLQPEDFATYYCQQYNSYPLTFGQGTKVEIKRLEDLKNVFPPEVAVFEPSEAEISHTQKATLVCLATGFYPDHVELSWWVNGKEVHSGVSTDPQPLKEQPALNDSRYCLSSRLRVSATFWQNPRNHFRCQVQFYGLSENDEWTQDRAKPVTQIVSAEAWGRADCGFTSESYQQGVLSATILYEILLGKATLYAVLVSALVLMAMVKRKDSRGRAKRSGSGATNFSLLKQAGDVEENPGPTSMDWIWRILFLVGAATGAHSFEEVQLVESGGGLVQPGGSLRLSCAASGFTFSDHGMHWVRQAPGKGLEWVAVIWYDGSNKYYADSVKGRFTISRDNSKNTLYLQMNSLRAEDTAVYYCARDSIMVRGDYWGQGTLVTVSSTREQKLISEEDGSGTPFPSLAPPIMLLVDGKQQMVVVCLVLDVAPPGLDSPIWFSAGNGSALDAFTYGPSPATDGTWTNLAHLSLPSEELASWEPLVCHTGPGAEGHSRSTQPMHLSGEASTARTCPQEPLRGTPGGALWLGVLRLLLFKLLLFDLLLTCSCLCDPAGPLPSPATTTRLRALGSHRLHPATETGGREATSSPRPQPRDRRWGDTPPGRKPGSPVRAKRSGSGVKQTLNFDLLKLAGDVESNPGPSRGHMTEYKPTVRLATRDDVPRAVRTLAAAFADYPATRHTVDPDRHIERVTELQELFLTRVGLDIGKVWVADDGAAVAVWTTPESVEAGAVFAEIGPRMAELSGSRLAAQQQMEGLLAPHRPKEPAWFLATVGVSPDHQGKGLGSAVVLPGVEAAERAGVPAFLETSAPRNLPFYERLGFTVTADVEVPEGPRTWCMTRKPGA

SEQ ID NO: 20750 - protein, 952 aa, synthetic construct
MALPVTALLLPLALLLHAARPLEDLKNVFPPEVAVFEPSEAEISHTQKATLVCLATGFYPDHVELSWWVNGKEVHSGVSTDPQPLKEQPALNDSRYCLSSRLRVSATFWQNPRNHFRCQVQFYGLSENDEWTQDRAKPVTQIVSAEAWGRADCGFTSESYQQGVLSATILYEILLGKATLYAVLVSALVLMAMVKRKDSRGRAKRSGSGATNFSLLKQAGDVEENPGPTSMALPVTALLLPLALLLHAARPDIQMTQSPSSLSASVGDRVTITCRASQGISSWLAWYQQKPGKAPKLLIYAASSLQSGVPSRFSGSGSGTDFTLTISSLQPEDFATYYCQQYNSYPLTFGQGTKVEIKRGGGGSGGGGSGGGGSEVQLVESGGGLVQPGGSLRLSCAASGFTFSDHGMHWVRQAPGKGLEWVAVIWYDGSNKYYADSVKGRFTISRDNSKNTLYLQMNSLRAEDTAVYYCARDSIMVRGDYWGQGTLVTVSSTREQKLISEEDLGSGTPFPSLAPPIMLLVDGKQQMVVVCLVLDVAPPGLDSPIWFSAGNGSALDAFTYGPSPATDGTWTNLAHLSLPSEELASWEPLVCHTGPGAEGHSRSTQPMHLSGEASTARTCPQEPLRGTPGGALWLGVLRLLLFKLLLFDLLLTCSCLCDPAGPLPSPATTTRLRALGSHRLHPATETGGREATSSPRPQPRDRRWGDTPPGRKPGSPVRAKRSGSGVKQTLNFDLLKLAGDVESNPGPSRSRGHMTEYKPTVRLATRDDVPRAVRTLAAAFADYPATRHTVDPDRHIERVTELQELFLTRVGLDIGKVWVADDGAAVAVWTTPESVEAGAVFAEIGPRMAELSGSRLAAQQQMEGLLAPHRPKEPAWFLATVGVSPDHQGKGLGSAVVLPGVEAAERAGVPAFLETSAPRNLPFYERLGFTVTADVEVPEGPRTWCMTRKPGA

SEQ ID NO: 20751 - protein, 889 aa, synthetic construct
MALPVTALLLPLALLLHAARPDIQMTQSPSSLSASVGDRVTITCRASQGISSWLAWYQQKPGKAPKLLIYAASSLQSGVPSRFSGSGSGTDFTLTISSLQPEDFATYYCQQYNSYPLTFGQGTKVEIKRLEGKPIPNPLLGLDSTGSGDKQLDADVSPKPTIFLPSIAETKLQKAGTYLCLLEKFFPDVIKIHWQEKKSNTILGSQEGNTMKTNDTYMKFSWLTVPEKSLDKEHRCIVRHENNKNGVDQEIIFPPIKTDVITMDPKDNCSKDANDTLLLQLTNTSAYYMYLLLLLKSVVYFAIITCCLLRRTAFCCNGEKSRAKRSGSGATNFSLLKQAGDVEENPGPTSMDWIWRILFLVGAATGAHSFEEVQLVESGGGLVQPGGSLRLSCAASGFTFSDHGMHWVRQAPGKGLEWVAVIWYDGSNKYYADSVKGRFTISRDNSKNTLYLQMNSLRAEDTAVYYCARDSIMVRGDYWGQGTLVTVSSTREQKLISEEDGSGSQPHTKPSVFVMKNGTNVACLVKEFYPKDIRINLVSSKKITEFDPAIVISPSGKYNAVKLGKYEDSNSVTCSVQHDNKTVHSTDFEVKTDSTDHVKPKETENTKQPSKSCHKPKAIVHTEKVNMMSLTVLGLRMLFAKTVAVNFLLTAKLFFLRAKRSGSGVKQTLNFDLLKLAGDVESNPGPSRGHMTEYKPTVRLATRDDVPRAVRTLAAAFADYPATRHTVDPDRHIERVTELQELFLTRVGLDIGKVWVADDGAAVAVWTTPESVEAGAVFAEIGPRMAELSGSRLAAQQQMEGLLAPHRPKEPAWFLATVGVSPDHQGKGLGSAVVLPGVEAAERAGVPAFLETSAPRNLPFYERLGFTVTADVEVPEGPRTWCMTRKPGA

SEQ ID NO: 20752 - protein, 627 aa, synthetic construct
MALPVTALLLPLALLLHAARPDIQMTQSPSSLSASVGDRVTITCRASQGISSWLAWYQQKPGKAPKLLIYAASSLQSGVPSRFSGSGSGTDFTLTISSLQPEDFATYYCQQYNSYPLTFGQGTKVEIKRLESQPHTKPSVFVMKNGTNVACLVKEFYPKDIRINLVSSKKITEFDPAIVISPSGKYNAVKLGKYEDSNSVTCSVQHDNKTVHSTDFEVKTDSTDHVKPKETENTKQPSKSCHKPKAIVHTEKVNMMSLTVLGLRMLFAKTVAVNFLLTAKLFFLRAKRSGSGATNFSLLKQAGDVEENPGPTSMDWIWRILFLVGAATGAHSFEEVQLVESGGGLVQPGGSLRLSCAASGFTFSDHGMHWVRQAPGKGLEWVAVIWYDGSNKYYADSVKGRFTISRDNSKNTLYLQMNSLRAEDTAVYYCARDSIMVRGDYWGQGTLVTVSSTRDKQLDADVSPKPTIFLPSIAETKLQKAGTYLCLLEKFFPDVIKIHWQEKKSNTILGSQEGNTMKTNDTYMKFSWLTVPEKSLDKEHRCIVRHENNKNGVDQEIIFPPIKTDVITMDPKDNCSKDANDTLLLQLTNTSAYYMYLLLLLKSVVYFAIITCCLLRRTAFCCNGEKS

SEQ ID NO: 20753 - protein, 904 aa, synthetic construct
MALPVTALLLPLALLLHAARPLEGKPIPNPLLGLDSTGSGDKQLDADVSPKPTIFLPSIAETKLQKAGTYLCLLEKFFPDVIKIHWQEKKSNTILGSQEGNTMKTNDTYMKFSWLTVPEKSLDKEHRCIVRHENNKNGVDQEIIFPPIKTDVITMDPKDNCSKDANDTLLLQLTNTSAYYMYLLLLLKSVVYFAIITCCLLRRTAFCCNGEKSRAKRSGSGATNFSLLKQAGDVEENPGPTSMALPVTALLLPLALLLHAARPDIQMTQSPSSLSASVGDRVTITCRASQGISSWLAWYQQKPGKAPKLLIYAASSLQSGVPSRFSGSGSGTDFTLTISSLQPEDFATYYCQQYNSYPLTFGQGTKVEIKRGGGGSGGGGSGGGGSEVQLVESGGGLVQPGGSLRLSCAASGFTFSDHGMHWVRQAPGKGLEWVAVIWYDGSNKYYADSVKGRFTISRDNSKNTLYLQMNSLRAEDTAVYYCARDSIMVRGDYWGQGTLVTVSSTREQKLISEEDGSGSQPHTKPSVFVMKNGTNVACLVKEFYPKDIRINLVSSKKITEFDPAIVISPSGKYNAVKLGKYEDSNSVTCSVQHDNKTVHSTDFEVKTDSTDHVKPKETENTKQPSKSCHKPKAIVHTEKVNMMSLTVLGLRMLFAKTVAVNFLLTAKLFFLRAKRSGSGVKQTLNFDLLKLAGDVESNPGPSRGHMTEYKPTVRLATRDDVPRAVRTLAAAFADYPATRHTVDPDRHIERVTELQELFLTRVGLDIGKVWVADDGAAVAVWTTPESVEAGAVFAEIGPRMAELSGSRLAAQQQMEGLLAPHRPKEPAWFLATVGVSPDHQGKGLGSAVVLPGVEAAERAGVPAFLETSAPRNLPFYERLGFTVTADVEVPEGPRTWCMTRKPGA

SEQ ID NO: 20754 - protein, 1029 aa, synthetic construct
MALPVTALLLPLALLLHAARPDIQMTQSPSSLSASVGDRVTITCRASQGISSWLAWYQQKPGKAPKLLIYAASSLQSGVPSRFSGSGSGTDFTLTISSLQPEDFATYYCQQYNSYPLTFGQGTKVEIKRGQPKANPTVTLFPPSSEELQANKATLVCLISDFYPGAVTVAWKADGSPVKAGVETTKPSKQSNNKYAASSYLSLTPEQWKSHRSYSCQVTHEGSTVEKTVAPTECSGSQSFGLLDPKLCYLLDGILFIYGVILTALFLRVKFSRSADAPAYQQGQNQLYNELNLGRREEYDVLDKRRGRDPEMGGKPQRRKNPQEGLYNELQKDKMAEAYSEIGMKGERRRGKGHDGLYQGLSTATKDTYDALHMQALPPRRAKRSGSGATNFSLLKQAGDVEENPGPTSMDWIWRILFLVGAATGAHSFEEVQLVESGGGLVQPGGSLRLSCAASGFTFSDHGMHWVRQAPGKGLEWVAVIWYDGSNKYYADSVKGRFTISRDNSKNTLYLQMNSLRAEDTAVYYCARDSIMVRGDYWGQGTLVTVSSASTKGPSVFPLAPSSKSTSGGTAALGCLVKDYFPEPVTVSWNSGALTSGVHTFPAVLQSSGLYSLSSVVTVPSSSLGTQTYICNVNHKPSNTKVDKRVEPKSCGTQSFGLLDPKLCYLLDGILFIYGVILTALFLRVKFSRSADAPAYQQGQNQLYNELNLGRREEYDVLDKRRGRDPEMGGKPQRRKNPQEGLYNELQKDKMAEAYSEIGMKGERRRGKGHDGLYQGLSTATKDTYDALHMQALPPRRAKRSGSGVKQTLNFDLLKLAGDVESNPGPSRGHMTEYKPTVRLATRDDVPRAVRTLAAAFADYPATRHTVDPDRHIERVTELQELFLTRVGLDIGKVWVADDGAAVAVWTTPESVEAGAVFAEIGPRMAELSGSRLAAQQQMEGLLAPHRPKEPAWFLATVGVSPDHQGKGLGSAVVLPGVEAAERAGVPAFLETSAPRNLPFYERLGFTVTADVEVPEGPRTWCMTRKPGA

SEQ ID NO: 20755 - protein, 815 aa, synthetic construct
MALPVTALLLPLALLLHAARPDIQMTQSPSSLSASVGDRVTITCRASQGISSWLAWYQQKPGKAPKLLIYAASSLQSGVPSRFSGSGSGTDFTLTISSLQPEDFATYYCQQYNSYPLTFGQGTKVEIKRLEDLKNVFPPEVAVFEPSEAEISHTQKATLVCLATGFYPDHVELSWWVNGKEVHSGVSTDPQPLKEQPALNDSRYCLSSRLRVSATFWQNPRNHFRCQVQFYGLSENDEWTQDRAKPVTQIVSAEAWGRADCGSQSFGLLDPKLCYLLDGILFIYGVILTALFLRVKFSRSADAPAYQQGQNQLYNELNLGRREEYDVLDKRRGRDPEMGGKPQRRKNPQEGLYNELQKDKMAEAYSEIGMKGERRRGKGHDGLYQGLSTATKDTYDALHMQALPPRRAKRSGSGATNFSLLKQAGDVEENPGPTSMDWIWRILFLVGAATGAHSFEEVQLVESGGGLVQPGGSLRLSCAASGFTFSDHGMHWVRQAPGKGLEWVAVIWYDGSNKYYADSVKGRFTISRDNSKNTLYLQMNSLRAEDTAVYYCARDSIMVRGDYWGQGTLVTVSSTRIQNPDPAVYQLRDSKSSDKSVCLFTDFDSQTNVSQSKDSDVYITDKTVLDMRSMDFKSNSAVAWSNKSDFACANAFNNSIIPEDTFFPSPESSCGTQSFGLLDPKLCYLLDGILFIYGVILTALFLRVKFSRSADAPAYQQGQNQLYNELNLGRREEYDVLDKRRGRDPEMGGKPQRRKNPQEGLYNELQKDKMAEAYSEIGMKGERRRGKGHDGLYQGLSTATKDTYDALHMQALPPR

SEQ ID NO: 20756 - protein, 815 aa, synthetic construct
MALPVTALLLPLALLLHAARPDIQMTQSPSSLSASVGDRVTITCRASQGISSWLAWYQQKPGKAPKLLIYAASSLQSGVPSRFSGSGSGTDFTLTISSLQPEDFATYYCQQYNSYPLTFGQGTKVEIKRLEDLKNVFPPEVAVFEPSKAEIAHTQKATLVCLATGFYPDHVELSWWVNGKEVHSGVCTDPQPLKEQPALNDSRYCLSSRLRVSATFWQNPRNHFRCQVQFYGLSENDEWTQDRAKPVTQIVSAEAWGRADCGSQSFGLLDPKLCYLLDGILFIYGVILTALFLRVKFSRSADAPAYQQGQNQLYNELNLGRREEYDVLDKRRGRDPEMGGKPQRRKNPQEGLYNELQKDKMAEAYSEIGMKGERRRGKGHDGLYQGLSTATKDTYDALHMQALPPRRAKRSGSGATNFSLLKQAGDVEENPGPTSMDWIWRILFLVGAATGAHSFEEVQLVESGGGLVQPGGSLRLSCAASGFTFSDHGMHWVRQAPGKGLEWVAVIWYDGSNKYYADSVKGRFTISRDNSKNTLYLQMNSLRAEDTAVYYCARDSIMVRGDYWGQGTLVTVSSTRIQNPDPAVYQLRDSKSSDKSVCLFTDFDSQTNVSQSKDSDVYITDKCVLDMRSMDFKSNSAVAWSNKSDFACANAFNNSIIPEDTFFPSSDVPCGTQSFGLLDPKLCYLLDGILFIYGVILTALFLRVKFSRSADAPAYQQGQNQLYNELNLGRREEYDVLDKRRGRDPEMGGKPQRRKNPQEGLYNELQKDKMAEAYSEIGMKGERRRGKGHDGLYQGLSTATKDTYDALHMQALPPR

SEQ ID NO: 20757 - protein, 886 aa, synthetic construct
MALPVTALLLPLALLLHAARPDIQMTQSPSSLSASVGDRVTITCRASQGISSWLAWYQQKPGKAPKLLIYAASSLQSGVPSRFSGSGSGTDFTLTISSLQPEDFATYYCQQYNSYPLTFGQGTKVEIKRLEGKPIPNPLLGLDSTGSGEDLKNVFPPEVAVFEPSEAEISHTQKATLVCLATGFYPDHVELSWWVNGKEVHSGVSTDPQPLKEQPALNDSRYCLSSRLRVSATFWQNPRNHFRCQVQFYGLSENDEWTQDRAKPVTQIVSAEAWGRADCGSQSFGLLDPKLCYLLDGILFIYGVILTALFLRVKFSRSADAPAYQQGQNQLYNELNLGRREEYDVLDKRRGRDPEMGGKPQRRKNPQEGLYNELQKDKMAEAYSEIGMKGERRRGKGHDGLYQGLSTATKDTYDALHMQALPPRRAKRSGSGATNFSLLKQAGDVEENPGPTSMDWIWRILFLVGAATGAHSFEEVQLVESGGGLVQPGGSLRLSCAASGFTFSDHGMHWVRQAPGKGLEWVAVIWYDGSNKYYADSVKGRFTISRDNSKNTLYLQMNSLRAEDTAVYYCARDSIMVRGDYWGQGTLVTVSSTREQKLISEEDGSGIQNPDPAVYQLRDSKSSDKSVCLFTDFDSQTNVSQSKDSDVYITDKTVLDMRSMDFKSNSAVAWSNKSDFACANAFNNSIIPEDTFFPSPESSCGTQSFGLLDPKLCYLLDGILFIYGVILTALFLRSKRSRLLHSDYMNMTPRRPGPTRKHYQPYAPPRDFAAYRSRVKFSRSADAPAYQQGQNQLYNELNLGRREEYDVLDKRRGRDPEMGGKPQRRKNPQEGLYNELQKDKMAEAYSEIGMKGERRRGKGHDGLYQGLSTATKDTYDALHMQALPPR

SEQ ID NO: 20758 - protein, 927 aa, synthetic construct
MALPVTALLLPLALLLHAARPDIQMTQSPSSLSASVGDRVTITCRASQGISSWLAWYQQKPGKAPKLLIYAASSLQSGVPSRFSGSGSGTDFTLTISSLQPEDFATYYCQQYNSYPLTFGQGTKVEIKRLEGKPIPNPLLGLDSTGSGEDLKNVFPPEVAVFEPSEAEISHTQKATLVCLATGFYPDHVELSWWVNGKEVHSGVSTDPQPLKEQPALNDSRYCLSSRLRVSATFWQNPRNHFRCQVQFYGLSENDEWTQDRAKPVTQIVSAEAWGRADCGSQSFGLLDPKLCYLLDGILFIYGVILTALFLRSKRSRLLHSDYMNMTPRRPGPTRKHYQPYAPPRDFAAYRSRVKFSRSADAPAYQQGQNQLYNELNLGRREEYDVLDKRRGRDPEMGGKPQRRKNPQEGLYNELQKDKMAEAYSEIGMKGERRRGKGHDGLYQGLSTATKDTYDALHMQALPPRRAKRSGSGATNFSLLKQAGDVEENPGPTSMDWIWRILFLVGAATGAHSFEEVQLVESGGGLVQPGGSLRLSCAASGFTFSDHGMHWVRQAPGKGLEWVAVIWYDGSNKYYADSVKGRFTISRDNSKNTLYLQMNSLRAEDTAVYYCARDSIMVRGDYWGQGTLVTVSSTREQKLISEEDGSGIQNPDPAVYQLRDSKSSDKSVCLFTDFDSQTNVSQSKDSDVYITDKTVLDMRSMDFKSNSAVAWSNKSDFACANAFNNSIIPEDTFFPSPESSCGTQSFGLLDPKLCYLLDGILFIYGVILTALFLRSKRSRLLHSDYMNMTPRRPGPTRKHYQPYAPPRDFAAYRSRVKFSRSADAPAYQQGQNQLYNELNLGRREEYDVLDKRRGRDPEMGGKPQRRKNPQEGLYNELQKDKMAEAYSEIGMKGERRRGKGHDGLYQGLSTATKDTYDALHMQALPPR

SEQ ID NO: 20759 - protein, 888 aa, synthetic construct
MALPVTALLLPLALLLHAARPDIQMTQSPSSLSASVGDRVTITCRASQGISSWLAWYQQKPGKAPKLLIYAASSLQSGVPSRFSGSGSGTDFTLTISSLQPEDFATYYCQQYNSYPLTFGQGTKVEIKRLEGKPIPNPLLGLDSTGSGEDLKNVFPPEVAVFEPSEAEISHTQKATLVCLATGFYPDHVELSWWVNGKEVHSGVSTDPQPLKEQPALNDSRYCLSSRLRVSATFWQNPRNHFRCQVQFYGLSENDEWTQDRAKPVTQIVSAEAWGRADCGSQSFGLLDPKLCYLLDGILFIYGVILTALFLRVKFSRSADAPAYQQGQNQLYNELNLGRREEYDVLDKRRGRDPEMGGKPQRRKNPQEGLYNELQKDKMAEAYSEIGMKGERRRGKGHDGLYQGLSTATKDTYDALHMQALPPRRAKRSGSGATNFSLLKQAGDVEENPGPTSMDWIWRILFLVGAATGAHSFEEVQLVESGGGLVQPGGSLRLSCAASGFTFSDHGMHWVRQAPGKGLEWVAVIWYDGSNKYYADSVKGRFTISRDNSKNTLYLQMNSLRAEDTAVYYCARDSIMVRGDYWGQGTLVTVSSTREQKLISEEDLGSGIQNPDPAVYQLRDSKSSDKSVCLFTDFDSQTNVSQSKDSDVYITDKTVLDMRSMDFKSNSAVAWSNKSDFACANAFNNSIIPEDTFFPSPESSCGTQSFGLLDPKLCYLLDGILFIYGVILTALFLKRGRKKLLYIFKQPFMRPVQTTQEEDGCSCRFPEEEEGGCELRVKFSRSADAPAYQQGQNQLYNELNLGRREEYDVLDKRRGRDPEMGGKPQRRKNPQEGLYNELQKDKMAEAYSEIGMKGERRRGKGHDGLYQGLSTATKDTYDALHMQALPPR

SEQ ID NO: 20760 - protein, 930 aa, synthetic construct
MALPVTALLLPLALLLHAARPDIQMTQSPSSLSASVGDRVTITCRASQGISSWLAWYQQKPGKAPKLLIYAASSLQSGVPSRFSGSGSGTDFTLTISSLQPEDFATYYCQQYNSYPLTFGQGTKVEIKRLEGKPIPNPLLGLDSTGSGEDLKNVFPPEVAVFEPSEAEISHTQKATLVCLATGFYPDHVELSWWVNGKEVHSGVSTDPQPLKEQPALNDSRYCLSSRLRVSATFWQNPRNHFRCQVQFYGLSENDEWTQDRAKPVTQIVSAEAWGRADCGSQSFGLLDPKLCYLLDGILFIYGVILTALFLKRGRKKLLYIFKQPFMRPVQTTQEEDGCSCRFPEEEEGGCELRVKFSRSADAPAYQQGQNQLYNELNLGRREEYDVLDKRRGRDPEMGGKPQRRKNPQEGLYNELQKDKMAEAYSEIGMKGERRRGKGHDGLYQGLSTATKDTYDALHMQALPPRRAKRSGSGATNFSLLKQAGDVEENPGPTSMDWIWRILFLVGAATGAHSFEEVQLVESGGGLVQPGGSLRLSCAASGFTFSDHGMHWVRQAPGKGLEWVAVIWYDGSNKYYADSVKGRFTISRDNSKNTLYLQMNSLRAEDTAVYYCARDSIMVRGDYWGQGTLVTVSSTREQKLISEEDLGSGIQNPDPAVYQLRDSKSSDKSVCLFTDFDSQTNVSQSKDSDVYITDKTVLDMRSMDFKSNSAVAWSNKSDFACANAFNNSIIPEDTFFPSPESSCGTQSFGLLDPKLCYLLDGILFIYGVILTALFLKRGRKKLLYIFKQPFMRPVQTTQEEDGCSCRFPEEEEGGCELRVKFSRSADAPAYQQGQNQLYNELNLGRREEYDVLDKRRGRDPEMGGKPQRRKNPQEGLYNELQKDKMAEAYSEIGMKGERRRGKGHDGLYQGLSTATKDTYDALHMQALPPR

SEQ ID NO: 20761 - protein, 820 aa, synthetic construct
MALPVTALLLPLALLLHAARPDIQMTQSPSSLSASVGDRVTITCRASQGISSWLAWYQQKPGKAPKLLIYAASSLQSGVPSRFSGSGSGTDFTLTISSLQPEDFATYYCQQYNSYPLTFGQGTKVEIKRLEQSFGLLDPKLCYLLDGILFIYGVILTALFLRVKFSRSADAPAYQQGQNQLYNELNLGRREEYDVLDKRRGRDPEMGGKPQRRKNPQEGLYNELQKDKMAEAYSEIGMKGERRRGKGHDGLYQGLSTATKDTYDALHMQALPPRRAKRSGSGATNFSLLKQAGDVEENPGPTSMDWIWRILFLVGAATGAHSFEEVQLVESGGGLVQPGGSLRLSCAASGFTFSDHGMHWVRQAPGKGLEWVAVIWYDGSNKYYADSVKGRFTISRDNSKNTLYLQMNSLRAEDTAVYYCARDSIMVRGDYWGQGTLVTVSSTRQSFGLLDPKLCYLLDGILFIYGVILTALFLRVKFSRSADAPAYQQGQNQLYNELNLGRREEYDVLDKRRGRDPEMGGKPQRRKNPQEGLYNELQKDKMAEAYSEIGMKGERRRGKGHDGLYQGLSTATKDTYDALHMQALPPRRAKRSGSGVKQTLNFDLLKLAGDVESNPGPSRGHMTEYKPTVRLATRDDVPRAVRTLAAAFADYPATRHTVDPDRHIERVTELQELFLTRVGLDIGKVWVADDGAAVAVWTTPESVEAGAVFAEIGPRMAELSGSRLAAQQQMEGLLAPHRPKEPAWFLATVGVSPDHQGKGLGSAVVLPGVEAAERAGVPAFLETSAPRNLPFYERLGFTVTADVEVPEGPRTWCMTRKPGA

SEQ ID NO: 20762 - protein, 645 aa, synthetic construct
MALPVTALLLPLALLLHAARPDIQMTQSPSSLSASVGDRVTITCRASQGISSWLAWYQQKPGKAPKLLIYAASSLQSGVPSRFSGSGSGTDFTLTISSLQPEDFATYYCQQYNSYPLTFGQGTKVEIKRLEGQPKANPTVTLFPPSSEELQANKATLVCLISDFYPGAVTVAWKADGSPVKAGVETTKPSKQSNNKYAASSYLSLTPEQWKSHRSYSCQVTHEGSTVEKTVAPTECSPIKTDVITMDPKDNCSKDANDTLLLQLTNTSAYYMYLLLLLKSVVYFAIITCCLLRRTAFCCNGEKSRAKRSGSGATNFSLLKQAGDVEENPGPTSMDWIWRILFLVGAATGAHSFEEVQLVESGGGLVQPGGSLRLSCAASGFTFSDHGMHWVRQAPGKGLEWVAVIWYDGSNKYYADSVKGRFTISRDNSKNTLYLQMNSLRAEDTAVYYCARDSIMVRGDYWGQGTLVTVSSTRASTKGPSVFPLAPSSKSTSGGTAALGCLVKDYFPEPVTVSWNSGALTSGVHTFPAVLQSSGLYSLSSVVTVPSSSLGTQTYICNVNHKPSNTKVDKRVEPKSCEVKTDSTDHVKPKETENTKQPSKSCHKPKAIVHTEKVNMMSLTVLGLRMLFAKTVAVNFLLTAKLFFL

SEQ ID NO: 20763 - protein, 623 aa, synthetic construct
MALPVTALLLPLALLLHAARPDIQMTQSPSSLSASVGDRVTITCRASQGISSWLAWYQQKPGKAPKLLIYAASSLQSGVPSRFSGSGSGTDFTLTISSLQPEDFATYYCQQYNSYPLTFGQGTKVEIKRLEGQPKANPTVTLFPPSSEELQANKATLVCLISDFYPGAVTVAWKADGSPVKAGVETTKPSKQSNNKYAASSYLSLTPEQWKSHRSYSCQVTHEGSTVEKTVAPTECSGRADCGITSASYHQGVLSATILYEILLGKATLYAVLVSALVLMAMVKRKDSRGRAKRSGSGATNFSLLKQAGDVEENPGPTSMDWIWRILFLVGAATGAHSFEEVQLVESGGGLVQPGGSLRLSCAASGFTFSDHGMHWVRQAPGKGLEWVAVIWYDGSNKYYADSVKGRFTISRDNSKNTLYLQMNSLRAEDTAVYYCARDSIMVRGDYWGQGTLVTVSSTRASTKGPSVFPLAPSSKSTSGGTAALGCLVKDYFPEPVTVSWNSGALTSGVHTFPAVLQSSGLYSLSSVVTVPSSSLGTQTYICNVNHKPSNTKVDKRVEPKSCIPEDTFFPSSDVPCDVKLVEKSFETDTNLNFQNLSVIGFRILLLKVAGFNLLMTLRLWSS

SEQ ID NO: 20764 - protein, 623 aa, synthetic construct
MALPVTALLLPLALLLHAARPDIQMTQSPSSLSASVGDRVTITCRASQGISSWLAWYQQKPGKAPKLLIYAASSLQSGVPSRFSGSGSGTDFTLTISSLQPEDFATYYCQQYNSYPLTFGQGTKVEIKRLEGQPKANPTVTLFPPSSEELQANKATLVCLISDFYPGAVTVAWKADGSPVKAGVETTKPSKQSNNKYAASSYLSLTPEQWKSHRSYSCQVTHEGSTVEKTVAPTECSGRADCGFTSESYQQGVLSATILYEILLGKATLYAVLVSALVLMAMVKRKDSRGRAKRSGSGATNFSLLKQAGDVEENPGPTSMDWIWRILFLVGAATGAHSFEEVQLVESGGGLVQPGGSLRLSCAASGFTFSDHGMHWVRQAPGKGLEWVAVIWYDGSNKYYADSVKGRFTISRDNSKNTLYLQMNSLRAEDTAVYYCARDSIMVRGDYWGQGTLVTVSSTRASTKGPSVFPLAPSSKSTSGGTAALGCLVKDYFPEPVTVSWNSGALTSGVHTFPAVLQSSGLYSLSSVVTVPSSSLGTQTYICNVNHKPSNTKVDKRVEPKSCIPEDTFFPSPESSCDVKLVEKSFETDTNLNFQNLSVIGFRILLLKVAGFNLLMTLRLWSS

SEQ ID NO: 20765 - protein, 449 aa, synthetic construct
MALPVTALLLPLALLLHAARPDIQMTQSPSSLSASVGDRVTITCRASQGISSWLAWYQQKPGKAPKLLIYAASSLQSGVPSRFSGSGSGTDFTLTISSLQPEDFATYYCQQYNSYPLTFGQGTKVEIKRGGGGSGGGGSGGGGSEVQLVESGGGLVQPGGSLRLSCAASGFTFSDHGMHWVRQAPGKGLEWVAVIWYDGSNKYYADSVKGRFTISRDNSKNTLYLQMNSLRAEDTAVYYCARDSIMVRGDYWGQGTLVTVSSTRDGNEEMGGITQTPYKVSISGTTVILTCPQYPGSEILWQHNDKNIGGDEDDKNIGSDEDHLSLKEFSELEQSGYYVCYPRGSKPEDANFYLYLRARVCENCMEMDVMSVATIVIVDICITGGLLLLVYYWSKNRKAKAKPVTRGAGAGGRQRGQNKERPPPVPNPDYEPIRKGQRDLYSGLNQRRI

SEQ ID NO: 20766 - protein, 414 aa, synthetic construct
MALPVTALLLPLALLLHAARPDIQMTQSPSSLSASVGDRVTITCRASQGISSWLAWYQQKPGKAPKLLIYAASSLQSGVPSRFSGSGSGTDFTLTISSLQPEDFATYYCQQYNSYPLTFGQGTKVEIKRGGGGSGGGGSGGGGSEVQLVESGGGLVQPGGSLRLSCAASGFTFSDHGMHWVRQAPGKGLEWVAVIWYDGSNKYYADSVKGRFTISRDNSKNTLYLQMNSLRAEDTAVYYCARDSIMVRGDYWGQGTLVTVSSTRFKIPIEELEDRVFVNCNTSITWVEGTVGTLLSDITRLDLGKRILDPRGIYRCNGTDIYKDKESTVQVHYRMCQSCVELDPATVAGIIVTDVIATLLLALGVFCFAGHETGRLSGAADTQALLRNDQVYQPLRDRDDAQYSHLGGNWARNK

SEQ ID NO: 20767 - protein, 424 aa, synthetic construct
MALPVTALLLPLALLLHAARPDIQMTQSPSSLSASVGDRVTITCRASQGISSWLAWYQQKPGKAPKLLIYAASSLQSGVPSRFSGSGSGTDFTLTISSLQPEDFATYYCQQYNSYPLTFGQGTKVEIKRGGGGSGGGGSGGGGSEVQLVESGGGLVQPGGSLRLSCAASGFTFSDHGMHWVRQAPGKGLEWVAVIWYDGSNKYYADSVKGRFTISRDNSKNTLYLQMNSLRAEDTAVYYCARDSIMVRGDYWGQGTLVTVSSTRQSIKGNHLVKVYDYQEDGSVLLTCDAEAKNITWFKDGKMIGFLTEDKKKWNLGSNAKDPRGMYQCKGSQNKSKPLQVYYRMCQNCIELNAATISGFLFAEIVSIFVLAVGVYFIAGQDGVRQSRASDKQTLLPNDQLYQPLKDREDDQYSHLQGNQLRRN

SEQ ID NO: 20768 - protein, 407 aa, synthetic construct
MALPVTALLLPLALLLHAARPDIQMTQSPSSLSASVGDRVTITCRASQGISSWLAWYQQKPGKAPKLLIYAASSLQSGVPSRFSGSGSGTDFTLTISSLQPEDFATYYCQQYNSYPLTFGQGTKVEIKRGGGGSGGGGSGGGGSEVQLVESGGGLVQPGGSLRLSCAASGFTFSDHGMHWVRQAPGKGLEWVAVIWYDGSNKYYADSVKGRFTISRDNSKNTLYLQMNSLRAEDTAVYYCARDSIMVRGDYWGQGTLVTVSSTRQSFGLLDPKLCYLLDGILFIYGVILTALFLRVKFSRSADAPAYQQGQNQLYNELNLGRREEYDVLDKRRGRDPEMGGKPQRRKNPQEGLYNELQKDKMAEAYSEIGMKGERRRGKGHDGLYQGLSTATKDTYDALHMQALPPR

SEQ ID NO: 20769 - protein, 449 aa, synthetic construct
MALPVTALLLPLALLLHAARPEVQLVESGGGLVQPGGSLRLSCAASGFTFSDHGMHWVRQAPGKGLEWVAVIWYDGSNKYYADSVKGRFTISRDNSKNTLYLQMNSLRAEDTAVYYCARDSIMVRGDYWGQGTLVTVSSGGGGSGGGGSGGGGSDIQMTQSPSSLSASVGDRVTITCRASQGISSWLAWYQQKPGKAPKLLIYAASSLQSGVPSRFSGSGSGTDFTLTISSLQPEDFATYYCQQYNSYPLTFGQGTKVEIKRTRDGNEEMGGITQTPYKVSISGTTVILTCPQYPGSEILWQHNDKNIGGDEDDKNIGSDEDHLSLKEFSELEQSGYYVCYPRGSKPEDANFYLYLRARVCENCMEMDVMSVATIVIVDICITGGLLLLVYYWSKNRKAKAKPVTRGAGAGGRQRGQNKERPPPVPNPDYEPIRKGQRDLYSGLNQRRI

SEQ ID NO: 20770 - protein, 414 aa, synthetic construct
MALPVTALLLPLALLLHAARPEVQLVESGGGLVQPGGSLRLSCAASGFTFSDHGMHWVRQAPGKGLEWVAVIWYDGSNKYYADSVKGRFTISRDNSKNTLYLQMNSLRAEDTAVYYCARDSIMVRGDYWGQGTLVTVSSGGGGSGGGGSGGGGSDIQMTQSPSSLSASVGDRVTITCRASQGISSWLAWYQQKPGKAPKLLIYAASSLQSGVPSRFSGSGSGTDFTLTISSLQPEDFATYYCQQYNSYPLTFGQGTKVEIKRTRFKIPIEELEDRVFVNCNTSITWVEGTVGTLLSDITRLDLGKRILDPRGIYRCNGTDIYKDKESTVQVHYRMCQSCVELDPATVAGIIVTDVIATLLLALGVFCFAGHETGRLSGAADTQALLRNDQVYQPLRDRDDAQYSHLGGNWARNK

SEQ ID NO: 20771 - protein, 424 aa, synthetic construct
MALPVTALLLPLALLLHAARPEVQLVESGGGLVQPGGSLRLSCAASGFTFSDHGMHWVRQAPGKGLEWVAVIWYDGSNKYYADSVKGRFTISRDNSKNTLYLQMNSLRAEDTAVYYCARDSIMVRGDYWGQGTLVTVSSGGGGSGGGGSGGGGSDIQMTQSPSSLSASVGDRVTITCRASQGISSWLAWYQQKPGKAPKLLIYAASSLQSGVPSRFSGSGSGTDFTLTISSLQPEDFATYYCQQYNSYPLTFGQGTKVEIKRTRQSIKGNHLVKVYDYQEDGSVLLTCDAEAKNITWFKDGKMIGFLTEDKKKWNLGSNAKDPRGMYQCKGSQNKSKPLQVYYRMCQNCIELNAATISGFLFAEIVSIFVLAVGVYFIAGQDGVRQSRASDKQTLLPNDQLYQPLKDREDDQYSHLQGNQLRRN

SEQ ID NO: 20772 - protein, 407 aa, synthetic construct
MALPVTALLLPLALLLHAARPEVQLVESGGGLVQPGGSLRLSCAASGFTFSDHGMHWVRQAPGKGLEWVAVIWYDGSNKYYADSVKGRFTISRDNSKNTLYLQMNSLRAEDTAVYYCARDSIMVRGDYWGQGTLVTVSSGGGGSGGGGSGGGGSDIQMTQSPSSLSASVGDRVTITCRASQGISSWLAWYQQKPGKAPKLLIYAASSLQSGVPSRFSGSGSGTDFTLTISSLQPEDFATYYCQQYNSYPLTFGQGTKVEIKRTRQSFGLLDPKLCYLLDGILFIYGVILTALFLRVKFSRSADAPAYQQGQNQLYNELNLGRREEYDVLDKRRGRDPEMGGKPQRRKNPQEGLYNELQKDKMAEAYSEIGMKGERRRGKGHDGLYQGLSTATKDTYDALHMQALPPR

SEQ ID NO: 20773 - protein, 502 aa, synthetic construct
MALPVTALLLPLALLLHAARPDIQMTQSPSSLSASVGDRVTITCRASQGISSWLAWYQQKPGKAPKLLIYAASSLQSGVPSRFSGSGSGTDFTLTISSLQPEDFATYYCQQYNSYPLTFGQGTKVEIKRGGGGSGGGGSGGGGSEVQLVESGGGLVQPGGSLRLSCAASGFTFSDHGMHWVRQAPGKGLEWVAVIWYDGSNKYYADSVKGRFTISRDNSKNTLYLQMNSLRAEDTAVYYCARDSIMVRGDYWGQGTLVTVSSTRGMRTEDLPKAVVFLEPQWYRVLEKDSVTLKCQGAYSPEDNSTQWFHNESLISSQASSYFIDAATVDDSGEYRCQTNLSTLSDPVQLEVHIGWLLLQAPRWVFKEEDPIHLRCHSWKNTALHKVTYLQNGKGRKYFHHNSDFYIPKATLKDSGSYFCRGLVGSKNVSSETVNITITQGLAVPTISSFFPPGYQVSFCLVMVLLFAVDTGLYFSVKTNIRSSTRDWKDHKFKWRKDPQDK

SEQ ID NO: 20774 - protein, 784 aa, synthetic construct
MALPVTALLLPLALLLHAARPDIQMTQSPSSLSASVGDRVTITCRASQGISSWLAWYQQKPGKAPKLLIYAASSLQSGVPSRFSGSGSGTDFTLTISSLQPEDFATYYCQQYNSYPLTFGQGTKVEIKRGGGGSGGGGSGGGGSEVQLVESGGGLVQPGGSLRLSCAASGFTFSDHGMHWVRQAPGKGLEWVAVIWYDGSNKYYADSVKGRFTISRDNSKNTLYLQMNSLRAEDTAVYYCARDSIMVRGDYWGQGTLVTVSSTRGGSGQQQTLPKPFIWAEPHFMVPKEKQVTICCQGNYGAVEYQLHFEGSLFAVDRPKPPERINKVQFYIPDMNSRMAGQYSCIYRVGELWSEPSNLLDLVVTEMYDTPTLSVHPGPEVISGEKVTFYCRLDTATSMFLLLKEGRSSHVQRGYGKVQAEFPLGPVTTAHRGTYRCFGSYNNHAWSFPSEPVKLLVTGDIENTSLAPEDPTFPADTWGTYLLTTETGLQKDHALWDHTAQNLLRMGLAFLVLVALVWFLVEDWLSRKRTRERASRASTWEGRRRLNTQTLRAKRSGSGVKQTLNFDLLKLAGDVESNPGPSRGHMTEYKPTVRLATRDDVPRAVRTLAAAFADYPATRHTVDPDRHIERVTELQELFLTRVGLDIGKVWVADDGAAVAVWTTPESVEAGAVFAEIGPRMAELSGSRLAAQQQMEGLLAPHRPKEPAWFLATVGVSPDHQGKGLGSAVVLPGVEAAERAGVPAFLETSAPRNLPFYERLGFTVTADVEVPEGPRTWCMTRKPGA

SEQ ID NO: 20775 - protein, 617 aa, synthetic construct
MALPVTALLLPLALLLHAARPDIQMTQSPSSLSASVGDRVTITCRASQGISSWLAWYQQKPGKAPKLLIYAASSLQSGVPSRFSGSGSGTDFTLTISSLQPEDFATYYCQQYNSYPLTFGQGTKVEIKRGGGGSGGGGSGGGGSEVQLVESGGGLVQPGGSLRLSCAASGFTFSDHGMHWVRQAPGKGLEWVAVIWYDGSNKYYADSVKGRFTISRDNSKNTLYLQMNSLRAEDTAVYYCARDSIMVRGDYWGQGTLVTVSSTRKIEVMYPPPYLDNEKSNGTIIHVKGARGDIENTSLAPEDPTFPADTWGTYLLTTETGLQKDHALWDHTAQNLLRMGLAFLVLVALVWFLVEDWLSRKRTRERASRASTWEGRRRLNTQTLRAKRSGSGVKQTLNFDLLKLAGDVESNPGPSRGHMTEYKPTVRLATRDDVPRAVRTLAAAFADYPATRHTVDPDRHIERVTELQELFLTRVGLDIGKVWVADDGAAVAVWTTPESVEAGAVFAEIGPRMAELSGSRLAAQQQMEGLLAPHRPKEPAWFLATVGVSPDHQGKGLGSAVVLPGVEAAERAGVPAFLETSAPRNLPFYERLGFTVTADVEVPEGPRTWCMTRKPGA

SEQ ID NO: 20776 - protein, 704 aa, synthetic construct
MALPVTALLLPLALLLHAARPDIQMTQSPSSLSASVGDRVTITCRASQGISSWLAWYQQKPGKAPKLLIYAASSLQSGVPSRFSGSGSGTDFTLTISSLQPEDFATYYCQQYNSYPLTFGQGTKVEIKRGGGGSGGGGSGGGGSEVQLVESGGGLVQPGGSLRLSCAASGFTFSDHGMHWVRQAPGKGLEWVAVIWYDGSNKYYADSVKGRFTISRDNSKNTLYLQMNSLRAEDTAVYYCARDSIMVRGDYWGQGTLVTVSSTRLWVSQPPEIRTLEGSSAFLPCSFNASQGRLAIGSVTWFRDEVVPGKEVRNGTPEFRGRLAPLASSRFLHDHQAELHIRDVRGHDASIYVCRVEVLGLGVGTGNGTRLVVEKEHPQLGAGTVLLLRAGFYAVSFLSVAVGSTVYYQGKCLTWKGPRRQLPAVVPAPLPPPCGSSAHLLPPVPGGRAKRSGSGVKQTLNFDLLKLAGDVESNPGPSRMYRMQLLSCIALSLALVTNSAPTSSSTKKTQLQLEHLLLDLQMILNGINNYKNPKLTEMLTAKFYMPKKATELKHLQCLEEELKPLEEVLNLAQSKNFHLRPRDLISNINVIVLELKGSETTFMCEYADETATIVEFLNRWITFCQSIISTLTKIEVMYPPPYLDNEKSNGTIIHVKGKHLCPSPLFPGPSKPFWVLVVVGGVLACYSLLVTVAFIIFWVRSKRS

SEQ ID NO: 20777 - protein, 680 aa, synthetic construct
MALPVTALLLPLALLLHAARPDIQMTQSPSSLSASVGDRVTITCRASQGISSWLAWYQQKPGKAPKLLIYAASSLQSGVPSRFSGSGSGTDFTLTISSLQPEDFATYYCQQYNSYPLTFGQGTKVEIKRGGGGSGGGGSGGGGSEVQLVESGGGLVQPGGSLRLSCAASGFTFSDHGMHWVRQAPGKGLEWVAVIWYDGSNKYYADSVKGRFTISRDNSKNTLYLQMNSLRAEDTAVYYCARDSIMVRGDYWGQGTLVTVSSTRLWVSQPPEIRTLEGSSAFLPCSFNASQGRLAIGSVTWFRDEVVPGKEVRNGTPEFRGRLAPLASSRFLHDHQAELHIRDVRGHDASIYVCRVEVLGLGVGTGNGTRLVVEKEHPQLGAGTVLLLRAGFYAVSFLSVAVGSTVYYQGKCLTWKGPRRQLPAVVPAPLPPPCGSSAHLLPPVPGGRAKRSGSGVKQTLNFDLLKLAGDVESNPGPSRGHMTEYKPTVRLATRDDVPRAVRTLAAAFADYPATRHTVDPDRHIERVTELQELFLTRVGLDIGKVWVADDGAAVAVWTTPESVEAGAVFAEIGPRMAELSGSRLAAQQQMEGLLAPHRPKEPAWFLATVGVSPDHQGKGLGSAVVLPGVEAAERAGVPAFLETSAPRNLPFYERLGFTVTADVEVPEGPRTWCMTRKPGA

SEQ ID NO: 20778 - protein, 356 aa, synthetic construct
MALPVTALLLPLALLLHAARPDIQMTQSPSSLSASVGDRVTITCRASQGISSWLAWYQQKPGKAPKLLIYAASSLQSGVPSRFSGSGSGTDFTLTISSLQPEDFATYYCQQYNSYPLTFGQGTKVEIKRGGGGSGGGGSGGGGSEVQLVESGGGLVQPGGSLRLSCAASGFTFSDHGMHWVRQAPGKGLEWVAVIWYDGSNKYYADSVKGRFTISRDNSKNTLYLQMNSLRAEDTAVYYCARDSIMVRGDYWGQGTLVTVSSTRKIEVMYPPPYLDNEKSNGTIIHVKGARITQGLAVSTISSFFPPGYQVSFCLVMVLLFAVDTGLYFSVKTNIRSSTRDWKDHKFKWRKDPQDK

SEQ ID NO: 20779 - protein, 356 aa, synthetic construct
MALPVTALLLPLALLLHAARPDIQMTQSPSSLSASVGDRVTITCRASQGISSWLAWYQQKPGKAPKLLIYAASSLQSGVPSRFSGSGSGTDFTLTISSLQPEDFATYYCQQYNSYPLTFGQGTKVEIKRGGGGSGGGGSGGGGSEVQLVESGGGLVQPGGSLRLSCAASGFTFSDHGMHWVRQAPGKGLEWVAVIWYDGSNKYYADSVKGRFTISRDNSKNTLYLQMNSLRAEDTAVYYCARDSIMVRGDYWGQGTLVTVSSTRKIEVMYPPPYLDNEKSNGTIIHVKGARITQGLAVPTISSFFPPGYQVSFCLVMVLLFAVDTGLYFSVKTNIRSSTRDWKDHKFKWRKDPQDK

SEQ ID NO: 20780 - protein, 335 aa, synthetic construct
MALPVTALLLPLALLLHAARPDIQMTQSPSSLSASVGDRVTITCRASQGISSWLAWYQQKPGKAPKLLIYAASSLQSGVPSRFSGSGSGTDFTLTISSLQPEDFATYYCQQYNSYPLTFGQGTKVEIKRGGGGSGGGGSGGGGSEVQLVESGGGLVQPGGSLRLSCAASGFTFSDHGMHWVRQAPGKGLEWVAVIWYDGSNKYYADSVKGRFTISRDNSKNTLYLQMNSLRAEDTAVYYCARDSIMVRGDYWGQGTLVTVSSTRKIEVMYPPPYLDNEKSNGTIIHVKGARITQGLAVSTISSFSPPGYQVSFCLVMVLLFAVDTGLYFSVKTNI

SEQ ID NO: 20781 - protein, 366 aa, synthetic construct
MALPVTALLLPLALLLHAARPDIQMTQSPSSLSASVGDRVTITCRASQGISSWLAWYQQKPGKAPKLLIYAASSLQSGVPSRFSGSGSGTDFTLTISSLQPEDFATYYCQQYNSYPLTFGQGTKVEIKRGGGGSGGGGSGGGGSEVQLVESGGGLVQPGGSLRLSCAASGFTFSDHGMHWVRQAPGKGLEWVAVIWYDGSNKYYADSVKGRFTISRDNSKNTLYLQMNSLRAEDTAVYYCARDSIMVRGDYWGQGTLVTVSSTRKIEVMYPPPYLDNEKSNGTIIHVKGARVEKEHPQLGAGTVLLLRAGFYAVSFLSVAVGSTVYYQGKCLTWKGPRRQLPAVVPAPLPPPCGSSAHLLPPVPGG

SEQ ID NO: 20782 - protein, 447 aa, synthetic construct
MALPVTALLLPLALLLHAARPDIQMTQSPSSLSASVGDRVTITCRASQGISSWLAWYQQKPGKAPKLLIYAASSLQSGVPSRFSGSGSGTDFTLTISSLQPEDFATYYCQQYNSYPLTFGQGTKVEIKRGGGGSGGGGSGGGGSEVQLVESGGGLVQPGGSLRLSCAASGFTFSDHGMHWVRQAPGKGLEWVAVIWYDGSNKYYADSVKGRFTISRDNSKNTLYLQMNSLRAEDTAVYYCARDSIMVRGDYWGQGTLVTVSSTRKIEVMYPPPYLDNEKSNGTIIHVKGARKSVRFYLVVSPASASTQTSWTPRDLVSSQTQTQSCVPPTAGARQAPESPSTIPVPSQPQNSTLRPGPAAPIALVPVFCGLLVAKSLVLSALLVWWGDIWWKTMMELRSLDTQKATCHLQQVTDLPWTSVSSPVEREILYHTVARTKISDDDDEHTL

SEQ ID NO: 20783 - protein, 384 aa, synthetic construct
MALPVTALLLPLALLLHAARPDIQMTQSPSSLSASVGDRVTITCRASQGISSWLAWYQQKPGKAPKLLIYAASSLQSGVPSRFSGSGSGTDFTLTISSLQPEDFATYYCQQYNSYPLTFGQGTKVEIKRGGGGSGGGGSGGGGSEVQLVESGGGLVQPGGSLRLSCAASGFTFSDHGMHWVRQAPGKGLEWVAVIWYDGSNKYYADSVKGRFTISRDNSKNTLYLQMNSLRAEDTAVYYCARDSIMVRGDYWGQGTLVTVSSTRKIEVMYPPPYLDNEKSNGTIIHVKGARGDIENTSLAPEDPTFPADTWGTYLLTTETGLQKDHALWDHTAQNLLRMGLAFLVLVALVWFLVEDWLSRKRTRERASRASTWEGRRRLNTQTL

SEQ ID NO: 20784 - protein, 980 aa, synthetic construct
MALPVTALLLPLALLLHAARPDIQMTQSPSSLSASVGDRVTITCRASQGISSWLAWYQQKPGKAPKLLIYAASSLQSGVPSRFSGSGSGTDFTLTISSLQPEDFATYYCQQYNSYPLTFGQGTKVEIKRLEGQPKANPTVTLFPPSSEELQANKATLVCLISDFYPGAVTVAWKADGSPVKAGVETTKPSKQSNNKYAASSYLSLTPEQWKSHRSYSCQVTHEGSTVEKTVAPTECSGSQSFGLLDPKLCYLLDGILFIYGVILTALFLRVKFSRSADAPAYQQGQNQLYNELNLGRREEYDVLDKRRGRDPEMGGKPQRRKNPQEGLYNELQKDKMAEAYSEIGMKGERRRGKGHDGLYQGLSTATKDTYDALHMQALPPRRAKRSGSGATNFSLLKQAGDVEENPGPTSMDWIWRILFLVGAATGAHSFEEVQLVESGGGLVQPGGSLRLSCAASGFTFSDHGMHWVRQAPGKGLEWVAVIWYDGSNKYYADSVKGRFTISRDNSKNTLYLQMNSLRAEDTAVYYCARDSIMVRGDYWGQGTLVTVSSTRASTKGPSVFPLAPSSKSTSGGTAALGCLVKDYFPEPVTVSWNSGALTSGVHTFPAVLQSSGLYSLSSVVTVPSSSLGTQTYICNVNHKPSNTKVDKRVEPKSCGTGDIENTSLAPEDPTFPADTWGTYLLTTETGLQKDHALWDHTAQNLLRMGLAFLVLVALVWFLVEDWLSRKRTRERASRASTWEGRRRLNTQTLRAKRSGSGATNFSLLKQAGDVEENPGPSRGHMTEYKPTVRLATRDDVPRAVRTLAAAFADYPATRHTVDPDRHIERVTELQELFLTRVGLDIGKVWVADDGAAVAVWTTPESVEAGAVFAEIGPRMAELSGSRLAAQQQMEGLLAPHRPKEPAWFLATVGVSPDHQGKGLGSAVVLPGVEAAERAGVPAFLETSAPRNLPFYERLGFTVTADVEVPEGPRTWCMTRKPGA

SEQ ID NO: 20785 - protein, 1046 aa, synthetic construct
MALPVTALLLPLALLLHAARPDIQMTQSPSSLSASVGDRVTITCRASQGISSWLAWYQQKPGKAPKLLIYAASSLQSGVPSRFSGSGSGTDFTLTISSLQPEDFATYYCQQYNSYPLTFGQGTKVEIKRLEGQPKANPTVTLFPPSSEELQANKATLVCLISDFYPGAVTVAWKADGSPVKAGVETTKPSKQSNNKYAASSYLSLTPEQWKSHRSYSCQVTHEGSTVEKTVAPTECSGSQSFGLLDPKLCYLLDGILFIYGVILTALFLRVKFSRSADAPAYQQGQNQLYNELNLGRREEYDVLDKRRGRDPEMGGKPQRRKNPQEGLYNELQKDKMAEAYSEIGMKGERRRGKGHDGLYQGLSTATKDTYDALHMQALPPRRAKRSGSGATNFSLLKQAGDVEENPGPTSMDWIWRILFLVGAATGAHSFEEVQLVESGGGLVQPGGSLRLSCAASGFTFSDHGMHWVRQAPGKGLEWVAVIWYDGSNKYYADSVKGRFTISRDNSKNTLYLQMNSLRAEDTAVYYCARDSIMVRGDYWGQGTLVTVSSTRASTKGPSVFPLAPSSKSTSGGTAALGCLVKDYFPEPVTVSWNSGALTSGVHTFPAVLQSSGLYSLSSVVTVPSSSLGTQTYICNVNHKPSNTKVDKRVEPKSCGTKSVRFYLVVSPASASTQTSWTPRDLVSSQTQTQSCVPPTAGARQAPESPSTIPVPSQPQNSTLRPGPAAPIALVPVFCGLLVAKSLVLSALLVWWGDIWWKTMMELRSLDTQKATCHLQQVTDLPWTSVSSPVEREILYHTVARTKISDDDDEHTLRAKRSGSGVKQTLNFDLLKLAGDVESNPGPSRGHMTEYKPTVRLATRDDVPRAVRTLAAAFADYPATRHTVDPDRHIERVTELQELFLTRVGLDIGKVWVADDGAAVAVWTTPESVEAGAVFAEIGPRMAELSGSRLAAQQQMEGLLAPHRPKEPAWFLATVGVSPDHQGKGLGSAVVLPGVEAAERAGVPAFLETSAPRNLPFYERLGFTVTADVEVPEGPRTWCMTRKPGA

SEQ ID NO: 20786 - protein, 966 aa, synthetic construct
MALPVTALLLPLALLLHAARPDIQMTQSPSSLSASVGDRVTITCRASQGISSWLAWYQQKPGKAPKLLIYAASSLQSGVPSRFSGSGSGTDFTLTISSLQPEDFATYYCQQYNSYPLTFGQGTKVEIKRLEGQPKANPTVTLFPPSSEELQANKATLVCLISDFYPGAVTVAWKADGSPVKAGVETTKPSKQSNNKYAASSYLSLTPEQWKSHRSYSCQVTHEGSTVEKTVAPTECSGSQSFGLLDPKLCYLLDGILFIYGVILTALFLRVKFSRSADAPAYQQGQNQLYNELNLGRREEYDVLDKRRGRDPEMGGKPQRRKNPQEGLYNELQKDKMAEAYSEIGMKGERRRGKGHDGLYQGLSTATKDTYDALHMQALPPRRAKRSGSGATNFSLLKQAGDVEENPGPTSMDWIWRILFLVGAATGAHSFEEVQLVESGGGLVQPGGSLRLSCAASGFTFSDHGMHWVRQAPGKGLEWVAVIWYDGSNKYYADSVKGRFTISRDNSKNTLYLQMNSLRAEDTAVYYCARDSIMVRGDYWGQGTLVTVSSTRASTKGPSVFPLAPSSKSTSGGTAALGCLVKDYFPEPVTVSWNSGALTSGVHTFPAVLQSSGLYSLSSVVTVPSSSLGTQTYICNVNHKPSNTKVDKRVEPKSCGTVVEKEHPQLGAGTVLLLRAGFYAVSFLSVAVGSTVYYQGKCLTWKGPRRQLPAVVPAPLPPPCGSSAHLLPPVPGGRAKRSGSGVKQTLNFDLLKLAGDVESNPGPSRGHMTEYKPTVRLATRDDVPRAVRTLAAAFADYPATRHTVDPDRHIERVTELQELFLTRVGLDIGKVWVADDGAAVAVWTTPESVEAGAVFAEIGPRMAELSGSRLAAQQQMEGLLAPHRPKEPAWFLATVGVSPDHQGKGLGSAVVLPGVEAAERAGVPAFLETSAPRNLPFYERLGFTVTADVEVPEGPRTWCMTRKPGA

SEQ ID NO: 20787 - protein, 995 aa, synthetic construct
MALPVTALLLPLALLLHAARPDIQMTQSPSSLSASVGDRVTITCRASQGISSWLAWYQQKPGKAPKLLIYAASSLQSGVPSRFSGSGSGTDFTLTISSLQPEDFATYYCQQYNSYPLTFGQGTKVEIKRLEDLKNVFPPEVAVFEPSEAEISHTQKATLVCLATGFYPDHVELSWWVNGKEVHSGVSTDPQPLKEQPALNDSRYCLSSRLRVSATFWQNPRNHFRCQVQFYGLSENDEWTQDRAKPVTQIVSAEAWGRADCGSQSFGLLDPKLCYLLDGILFIYGVILTALFLRVKFSRSADAPAYQQGQNQLYNELNLGRREEYDVLDKRRGRDPEMGGKPQRRKNPQEGLYNELQKDKMAEAYSEIGMKGERRRGKGHDGLYQGLSTATKDTYDALHMQALPPRRAKRSGSGATNFSLLKQAGDVEENPGPTSMDWIWRILFLVGAATGAHSFEEVQLVESGGGLVQPGGSLRLSCAASGFTFSDHGMHWVRQAPGKGLEWVAVIWYDGSNKYYADSVKGRFTISRDNSKNTLYLQMNSLRAEDTAVYYCARDSIMVRGDYWGQGTLVTVSSTRIQNPDPAVYQLRDSKSSDKSVCLFTDFDSQTNVSQSKDSDVYITDKTVLDMRSMDFKSNSAVAWSNKSDFACANAFNNSIIPEDTFFPSPESSCGTGDIENTSLAPEDPTFPADTWGTYLLTTETGLQKDHALWDHTAQNLLRMGLAFLVLVALVWFLVEDWLSRKRTRERASRASTWEGRRRLNTQTLRAKRSGSGATNFSLLKQAGDVEENPGPSRGHMTEYKPTVRLATRDDVPRAVRTLAAAFADYPATRHTVDPDRHIERVTELQELFLTRVGLDIGKVWVADDGAAVAVWTTPESVEAGAVFAEIGPRMAELSGSRLAAQQQMEGLLAPHRPKEPAWFLATVGVSPDHQGKGLGSAVVLPGVEAAERAGVPAFLETSAPRNLPFYERLGFTVTADVEVPEGPRTWCMTRKPGA

SEQ ID NO: 20788 - protein, 1061 aa, synthetic construct
MALPVTALLLPLALLLHAARPDIQMTQSPSSLSASVGDRVTITCRASQGISSWLAWYQQKPGKAPKLLIYAASSLQSGVPSRFSGSGSGTDFTLTISSLQPEDFATYYCQQYNSYPLTFGQGTKVEIKRLEDLKNVFPPEVAVFEPSEAEISHTQKATLVCLATGFYPDHVELSWWVNGKEVHSGVSTDPQPLKEQPALNDSRYCLSSRLRVSATFWQNPRNHFRCQVQFYGLSENDEWTQDRAKPVTQIVSAEAWGRADCGSQSFGLLDPKLCYLLDGILFIYGVILTALFLRVKFSRSADAPAYQQGQNQLYNELNLGRREEYDVLDKRRGRDPEMGGKPQRRKNPQEGLYNELQKDKMAEAYSEIGMKGERRRGKGHDGLYQGLSTATKDTYDALHMQALPPRRAKRSGSGATNFSLLKQAGDVEENPGPTSMDWIWRILFLVGAATGAHSFEEVQLVESGGGLVQPGGSLRLSCAASGFTFSDHGMHWVRQAPGKGLEWVAVIWYDGSNKYYADSVKGRFTISRDNSKNTLYLQMNSLRAEDTAVYYCARDSIMVRGDYWGQGTLVTVSSTRIQNPDPAVYQLRDSKSSDKSVCLFTDFDSQTNVSQSKDSDVYITDKTVLDMRSMDFKSNSAVAWSNKSDFACANAFNNSIIPEDTFFPSPESSCGTKSVRFYLVVSPASASTQTSWTPRDLVSSQTQTQSCVPPTAGARQAPESPSTIPVPSQPQNSTLRPGPAAPIALVPVFCGLLVAKSLVLSALLVWWGDIWWKTMMELRSLDTQKATCHLQQVTDLPWTSVSSPVEREILYHTVARTKISDDDDEHTLRAKRSGSGVKQTLNFDLLKLAGDVESNPGPSRGHMTEYKPTVRLATRDDVPRAVRTLAAAFADYPATRHTVDPDRHIERVTELQELFLTRVGLDIGKVWVADDGAAVAVWTTPESVEAGAVFAEIGPRMAELSGSRLAAQQQMEGLLAPHRPKEPAWFLATVGVSPDHQGKGLGSAVVLPGVEAAERAGVPAFLETSAPRNLPFYERLGFTVTADVEVPEGPRTWCMTRKPGA

SEQ ID NO: 20789 - protein, 981 aa, synthetic construct
MALPVTALLLPLALLLHAARPDIQMTQSPSSLSASVGDRVTITCRASQGISSWLAWYQQKPGKAPKLLIYAASSLQSGVPSRFSGSGSGTDFTLTISSLQPEDFATYYCQQYNSYPLTFGQGTKVEIKRLEDLKNVFPPEVAVFEPSEAEISHTQKATLVCLATGFYPDHVELSWWVNGKEVHSGVSTDPQPLKEQPALNDSRYCLSSRLRVSATFWQNPRNHFRCQVQFYGLSENDEWTQDRAKPVTQIVSAEAWGRADCGSQSFGLLDPKLCYLLDGILFIYGVILTALFLRVKFSRSADAPAYQQGQNQLYNELNLGRREEYDVLDKRRGRDPEMGGKPQRRKNPQEGLYNELQKDKMAEAYSEIGMKGERRRGKGHDGLYQGLSTATKDTYDALHMQALPPRRAKRSGSGATNFSLLKQAGDVEENPGPTSMDWIWRILFLVGAATGAHSFEEVQLVESGGGLVQPGGSLRLSCAASGFTFSDHGMHWVRQAPGKGLEWVAVIWYDGSNKYYADSVKGRFTISRDNSKNTLYLQMNSLRAEDTAVYYCARDSIMVRGDYWGQGTLVTVSSTRIQNPDPAVYQLRDSKSSDKSVCLFTDFDSQTNVSQSKDSDVYITDKTVLDMRSMDFKSNSAVAWSNKSDFACANAFNNSIIPEDTFFPSPESSCGTVVEKEHPQLGAGTVLLLRAGFYAVSFLSVAVGSTVYYQGKCLTWKGPRRQLPAVVPAPLPPPCGSSAHLLPPVPGGRAKRSGSGVKQTLNFDLLKLAGDVESNPGPSRGHMTEYKPTVRLATRDDVPRAVRTLAAAFADYPATRHTVDPDRHIERVTELQELFLTRVGLDIGKVWVADDGAAVAVWTTPESVEAGAVFAEIGPRMAELSGSRLAAQQQMEGLLAPHRPKEPAWFLATVGVSPDHQGKGLGSAVVLPGVEAAERAGVPAFLETSAPRNLPFYERLGFTVTADVEVPEGPRTWCMTRKPGA

SEQ ID NO: 20790 - protein, 952 aa, synthetic construct
MALPVTALLLPLALLLHAARPDIQMTQSPSSLSASVGDRVTITCRASQGISSWLAWYQQKPGKAPKLLIYAASSLQSGVPSRFSGSGSGTDFTLTISSLQPEDFATYYCQQYNSYPLTFGQGTKVEIKRLEGQPKANPTVTLFPPSSEELQANKATLVCLISDFYPGAVTVAWKADGSPVKAGVETTKPSKQSNNKYAASSYLSLTPEQWKSHRSYSCQVTHEGSTVEKTVAPTECSGSQSFGLLDPKLCYLLDGILFIYGVILTALFLRVKFSRSADAPAYQQGQNQLYNELNLGRREEYDVLDKRRGRDPEMGGKPQRRKNPQEGLYNELQKDKMAEAYSEIGMKGERRRGKGHDGLYQGLSTATKDTYDALHMQALPPRRAKRSGSGATNFSLLKQAGDVEENPGPTSMDWIWRILFLVGAATGAHSFEEVQLVESGGGLVQPGGSLRLSCAASGFTFSDHGMHWVRQAPGKGLEWVAVIWYDGSNKYYADSVKGRFTISRDNSKNTLYLQMNSLRAEDTAVYYCARDSIMVRGDYWGQGTLVTVSSTRASTKGPSVFPLAPSSKSTSGGTAALGCLVKDYFPEPVTVSWNSGALTSGVHTFPAVLQSSGLYSLSSVVTVPSSSLGTQTYICNVNHKPSNTKVDKRVEPKSCGTITQGLAVSTISSFFPPGYQVSFCLVMVLLFAVDTGLYFSVKTNIRSSTRDWKDHKFKWRKDPQDKRAKRSGSGATNFSLLKQAGDVEENPGPSRGHMTEYKPTVRLATRDDVPRAVRTLAAAFADYPATRHTVDPDRHIERVTELQELFLTRVGLDIGKVWVADDGAAVAVWTTPESVEAGAVFAEIGPRMAELSGSRLAAQQQMEGLLAPHRPKEPAWFLATVGVSPDHQGKGLGSAVVLPGVEAAERAGVPAFLETSAPRNLPFYERLGFTVTADVEVPEGPRTWCMTRKPGA

SEQ ID NO: 20791 - protein, 967 aa, synthetic construct
MALPVTALLLPLALLLHAARPDIQMTQSPSSLSASVGDRVTITCRASQGISSWLAWYQQKPGKAPKLLIYAASSLQSGVPSRFSGSGSGTDFTLTISSLQPEDFATYYCQQYNSYPLTFGQGTKVEIKRLEDLKNVFPPEVAVFEPSEAEISHTQKATLVCLATGFYPDHVELSWWVNGKEVHSGVSTDPQPLKEQPALNDSRYCLSSRLRVSATFWQNPRNHFRCQVQFYGLSENDEWTQDRAKPVTQIVSAEAWGRADCGSQSFGLLDPKLCYLLDGILFIYGVILTALFLRVKFSRSADAPAYQQGQNQLYNELNLGRREEYDVLDKRRGRDPEMGGKPQRRKNPQEGLYNELQKDKMAEAYSEIGMKGERRRGKGHDGLYQGLSTATKDTYDALHMQALPPRRAKRSGSGATNFSLLKQAGDVEENPGPTSMDWIWRILFLVGAATGAHSFEEVQLVESGGGLVQPGGSLRLSCAASGFTFSDHGMHWVRQAPGKGLEWVAVIWYDGSNKYYADSVKGRFTISRDNSKNTLYLQMNSLRAEDTAVYYCARDSIMVRGDYWGQGTLVTVSSTRIQNPDPAVYQLRDSKSSDKSVCLFTDFDSQTNVSQSKDSDVYITDKTVLDMRSMDFKSNSAVAWSNKSDFACANAFNNSIIPEDTFFPSPESSCGTITQGLAVSTISSFFPPGYQVSFCLVMVLLFAVDTGLYFSVKTNIRSSTRDWKDHKFKWRKDPQDKRAKRSGSGATNFSLLKQAGDVEENPGPSRGHMTEYKPTVRLATRDDVPRAVRTLAAAFADYPATRHTVDPDRHIERVTELQELFLTRVGLDIGKVWVADDGAAVAVWTTPESVEAGAVFAEIGPRMAELSGSRLAAQQQMEGLLAPHRPKEPAWFLATVGVSPDHQGKGLGSAVVLPGVEAAERAGVPAFLETSAPRNLPFYERLGFTVTADVEVPEGPRTWCMTRKPGA

SEQ ID NO: 20792 - protein, 650 aa, synthetic construct
MALPVTALLLPLALLLHAARPDIQMTQSPSSLSASVGDRVTITCRASQGISSWLAWYQQKPGKAPKLLIYAASSLQSGVPSRFSGSGSGTDFTLTISSLQPEDFATYYCQQYNSYPLTFGQGTKVEIKRLEGQPKANPTVTLFPPSSEELQANKATLVCLISDFYPGAVTVAWKADGSPVKAGVETTKPSKQSNNKYAASSYLSLTPEQWKSHRSYSCQVTHEGSTVEKTVAPTECSGSLGEPQLCYILDAILFLYGIVLTLLYCRLKIQVRKAAITSYEKSDGVYTGLSTRNQETYETLKHEKPPQRAKRSGSGATNFSLLKQAGDVEENPGPTSMDWIWRILFLVGAATGAHSFEEVQLVESGGGLVQPGGSLRLSCAASGFTFSDHGMHWVRQAPGKGLEWVAVIWYDGSNKYYADSVKGRFTISRDNSKNTLYLQMNSLRAEDTAVYYCARDSIMVRGDYWGQGTLVTVSSTRASTKGPSVFPLAPSSKSTSGGTAALGCLVKDYFPEPVTVSWNSGALTSGVHTFPAVLQSSGLYSLSSVVTVPSSSLGTQTYICNVNHKPSNTKVDKRVEPKSCGTLGEPQLCYILDAILFLYGIVLTLLYCRLKIQVRKAAITSYEKSDGVYTGLSTRNQETYETLKHEKPPQ

SEQ ID NO: 20793 - protein, 1027 aa, synthetic construct
MALPVTALLLPLALLLHAARPDIQMTQSPSSLSASVGDRVTITCRASQGISSWLAWYQQKPGKAPKLLIYAASSLQSGVPSRFSGSGSGTDFTLTISSLQPEDFATYYCQQYNSYPLTFGQGTKVEIKRGQPKANPTVTLFPPSSEELQANKATLVCLISDFYPGAVTVAWKADGSPVKAGVETTKPSKQSNNKYAASSYLSLTPEQWKSHRSYSCQVTHEGSTVEKTVAPTECSGSQSFGLLDPKLCYLLDGILFIYGVILTALFLRVKFSRSADAPAYQQGQNQLYNELNLGRREEYDVLDKRRGRDPEMGGKPRRKNPQEGLYNELQKDKMAEAYSEIGMKGERRRGKGHDGLYQGLSTATKDTYDALHMQALPPRRAKRSGSGATNFSLLKQAGDVEENPGPTSMDWIWRILFLVGAATGAHSFEEVQLVESGGGLVQPGGSLRLSCAASGFTFSDHGMHWVRQAPGKGLEWVAVIWYDGSNKYYADSVKGRFTISRDNSKNTLYLQMNSLRAEDTAVYYCARDSIMVRGDYWGQGTLVTVSSASTKGPSVFPLAPSSKSTSGGTAALGCLVKDYFPEPVTVSWNSGALTSGVHTFPAVLQSSGLYSLSSVVTVPSSSLGTQTYICNVNHKPSNTKVDKRVEPKSCGTQSFGLLDPKLCYLLDGILFIYGVILTALFLRVKFSRSADAPAYQQGQNQLYNELNLGRREEYDVLDKRRGRDPEMGGKPRRKNPQEGLYNELQKDKMAEAYSEIGMKGERRRGKGHDGLYQGLSTATKDTYDALHMQALPPRRAKRSGSGVKQTLNFDLLKLAGDVESNPGPSRGHMTEYKPTVRLATRDDVPRAVRTLAAAFADYPATRHTVDPDRHIERVTELQELFLTRVGLDIGKVWVADDGAAVAVWTTPESVEAGAVFAEIGPRMAELSGSRLAAQQQMEGLLAPHRPKEPAWFLATVGVSPDHQGKGLGSAVVLPGVEAAERAGVPAFLETSAPRNLPFYERLGFTVTADVEVPEGPRTWCMTRKPGA

SEQ ID NO: 20794 - protein, 813 aa, synthetic construct
MALPVTALLLPLALLLHAARPDIQMTQSPSSLSASVGDRVTITCRASQGISSWLAWYQQKPGKAPKLLIYAASSLQSGVPSRFSGSGSGTDFTLTISSLQPEDFATYYCQQYNSYPLTFGQGTKVEIKRLEDLKNVFPPEVAVFEPSEAEISHTQKATLVCLATGFYPDHVELSWWVNGKEVHSGVSTDPQPLKEQPALNDSRYCLSSRLRVSATFWQNPRNHFRCQVQFYGLSENDEWTQDRAKPVTQIVSAEAWGRADCGSQSFGLLDPKLCYLLDGILFIYGVILTALFLRVKFSRSADAPAYQQGQNQLYNELNLGRREEYDVLDKRRGRDPEMGGKPRRKNPQEGLYNELQKDKMAEAYSEIGMKGERRRGKGHDGLYQGLSTATKDTYDALHMQALPPRRAKRSGSGATNFSLLKQAGDVEENPGPTSMDWIWRILFLVGAATGAHSFEEVQLVESGGGLVQPGGSLRLSCAASGFTFSDHGMHWVRQAPGKGLEWVAVIWYDGSNKYYADSVKGRFTISRDNSKNTLYLQMNSLRAEDTAVYYCARDSIMVRGDYWGQGTLVTVSSTRIQNPDPAVYQLRDSKSSDKSVCLFTDFDSQTNVSQSKDSDVYITDKTVLDMRSMDFKSNSAVAWSNKSDFACANAFNNSIIPEDTFFPSPESSCGTQSFGLLDPKLCYLLDGILFIYGVILTALFLRVKFSRSADAPAYQQGQNQLYNELNLGRREEYDVLDKRRGRDPEMGGKPRRKNPQEGLYNELQKDKMAEAYSEIGMKGERRRGKGHDGLYQGLSTATKDTYDALHMQALPPR

SEQ ID NO: 20795 - protein, 504 aa, synthetic construct
MALPVTALLLPLALLLHAARPELQSVLTQPPSASGTPGQRVTISCSGSSSNIGSNYVNWYQQLPGTAPKLLIYGDYQRPSGVPDRFSGSKSGTSASLAISGLRSEDEADYYCATRDDSLSGSVVFGTGTKLTVLGGGGGSGGGGSGGGGSEVQLVQSGAEVKKPGESLKISCKGSGYGFTSYWIGWVRQMPGKGLEWMGIIHPDDSDTKYSPSFQGQVTISADKSISTAYLQWSSLKASDTAMYYCASSYLRGLWGGYFDFWGQGTLVTVSSTREQKLISEEDLKIEVMYPPPYLDNEKSNGTIIHVKGKHLCPSPLFPGPSKPFWVLVVVGGVLACYSLLVTVAFIIFWVRSKRSRLLHSDYMNMTPRRPGPTRKHYQPYAPPRDFAAYRSRVKFSRSADAPAYQQGQNQLYNELNLGRREEYDVLDKRRGRDPEMGGKPRRKNPQEGLYNELQKDKMAEAYSEIGMKGERRRGKGHDGLYQGLSTATKDTYDALHMQALPPR

SEQ ID NO: 20796 - protein, 510 aa, synthetic construct
MALPVTALLLPLALLLHAARPELQSVLTQPPSASGTPGQRVTISCSGSSSNIGSNYVNWYQQLPGTAPKLLIYGDYQRPSGVPDRFSGSKSGTSASLAISGLRSEDEADYYCATRDDSLSGSVVFGTGTKLTVLGGGGGSGGGGSGGGGSEVQLVQSGAEVKKPGESLKISCKGSGYGFTSYWIGWVRQMPGKGLEWMGIIHPDDSDTKYSPSFQGQVTISADKSISTAYLQWSSLKASDTAMYYCASSYLRGLWGGYFDFWGQGTLVTVSSTREQKLISEEDLAKPTTTPAPRPPTPAPTIASQPLSLRPEACRPAAGGAVHTRGLDFACDIYIWAPLAGTCGVLLLSLVITLYCKRGRKKLLYIFKQPFMRPVQTTQEEDGCSCRFPEEEEGGCELRVKFSRSADAPAYQQGQNQLYNELNLGRREEYDVLDKRRGRDPEMGGKPRRKNPQEGLYNELQKDKMAEAYSEIGMKGERRRGKGHDGLYQGLSTATKDTYDALHMQALPPR

SEQ ID NO: 20797 - protein, 510 aa, synthetic construct
MALPVTALLLPLALLLHAARPEVQLVQSGAEVKKPGESLKISCKGSGYGFTSYWIGWVRQMPGKGLEWMGIIHPDDSDTKYSPSFQGQVTISADKSISTAYLQWSSLKASDTAMYYCASSYLRGLWGGYFDFWGQGTLVTVSSGGGGSGGGGSGGGGSELQSVLTQPPSASGTPGQRVTISCSGSSSNIGSNYVNWYQQLPGTAPKLLIYGDYQRPSGVPDRFSGSKSGTSASLAISGLRSEDEADYYCATRDDSLSGSVVFGTGTKLTVLGTREQKLISEEDLAKPTTTPAPRPPTPAPTIASQPLSLRPEACRPAAGGAVHTRGLDFACDIYIWAPLAGTCGVLLLSLVITLYCKRGRKKLLYIFKQPFMRPVQTTQEEDGCSCRFPEEEEGGCELRVKFSRSADAPAYQQGQNQLYNELNLGRREEYDVLDKRRGRDPEMGGKPRRKNPQEGLYNELQKDKMAEAYSEIGMKGERRRGKGHDGLYQGLSTATKDTYDALHMQALPPR

SEQ ID NO: 20798 - protein, 923 aa, synthetic construct
MALPVTALLLPLALLLHAARPELQSVLTQPPSASGTPGQRVTISCSGSSSNIGSNYVNWYQQLPGTAPKLLIYGDYQRPSGVPDRFSGSKSGTSASLAISGLRSEDEADYYCATRDDSLSGSVVFGTGTKLTVLGGGGGSGGGGSGGGGSEVQLVQSGAEVKKPGESLKISCKGSGYGFTSYWIGWVRQMPGKGLEWMGIIHPDDSDTKYSPSFQGQVTISADKSISTAYLQWSSLKASDTAMYYCASSYLRGLWGGYFDFWGQGTLVTVSSTREQKLISEEDLAKPTTTPAPRPPTPAPTIASQPLSLRPEACRPAAGGAVHTRGLDFACDIYIWAPLAGTCGVLLLSLVITLYCGRARVKFSRSADAPAYQQGQNQLYNELNLGRREEYDVLDKRRGRDPEMGGKPRRKNPQEGLYNELQKDKMAEAYSEIGMKGERRRGKGHDGLYQGLSTATKDTYDALHMQALPPRSRGSGATNFSLLKQAGDVEENPGPGIHMATYEVLCEVARKLGTDDREVVLFLLNVFIPQPTLAQLIGALRALKEEGRLTFPLLAECLFRAGRRDLLRDLLHLDPRFLERHLAGTMSYFSPYQLTVLHVDGELCARDIRSLIFLSKDTIGSRSTPQTFLHWVYCMENLDLLGPTDVDALMSMLRSLSRVDLQRQVQTLMGLHLSGPSHSQHYRHTPLETDFYDYKDDDDKTSGSGEGRGSLLTCGDVEENPGPHMTEYKPTVRLATRDDVPRAVRTLAAAFADYPATRHTVDPDRHIERVTELQELFLTRVGLDIGKVWVADDGAAVAVWTTPESVEAGAVFAEIGPRMAELSGSRLAAQQQMEGLLAPHRPKEPAWFLATVGVSPDHQGKGLGSAVVLPGVEAAERAGVPAFLETSAPRNLPFYERLGFTVTADVEVPEGPRTWCMTRKPGA

SEQ ID NO: 20799 - protein, 863 aa, synthetic construct
MALPVTALLLPLALLLHAARPELQSVLTQPPSASGTPGQRVTISCSGSSSNIGSNYVNWYQQLPGTAPKLLIYGDYQRPSGVPDRFSGSKSGTSASLAISGLRSEDEADYYCATRDDSLSGSVVFGTGTKLTVLGLEIQNPDPAVYQLRDSKSSDKSVCLFTDFDSQTNVSQSKDSDVYITDKCVLDMRSMDFKSNSAVAWSNKSDFACANAFNNSIIPEDTFFPSSDVPCDVKLVEKSFETDTNLNFQNLSVIGFRILLLKVAGFNLLMTLRLWSSRAKRSGSGVKQTLNFDLLKLAGDVESNPGPTSMDWIWRILFLVGAATGAHSFEEVQLVQSGAEVKKPGESLKISCKGSGYGFTSYWIGWVRQMPGKGLEWMGIIHPDDSDTKYSPSFQGQVTISADKSISTAYLQWSSLKASDTAMYYCASSYLRGLWGGYFDFWGQGTLVTVSSTREDLKNVFPPEVAVFEPSKAEIAHTQKATLVCLATGFYPDHVELSWWVNGKEVHSGVCTDPQPLKEQPALNDSRYCLSSRLRVSATFWQNPRNHFRCQVQFYGLSENDEWTQDRAKPVTQIVSAEAWGRADCGITSASYHQGVLSATILYEILLGKATLYAVLVSALVLMAMVKRKDSRGRAKRSGSGATNFSLLKQAGDVEENPGPSRGHMTEYKPTVRLATRDDVPRAVRTLAAAFADYPATRHTVDPDRHIERVTELQELFLTRVGLDIGKVWVADDGAAVAVWTTPESVEAGAVFAEIGPRMAELSGSRLAAQQQMEGLLAPHRPKEPAWFLATVGVSPDHQGKGLGSAVVLPGVEAAERAGVPAFLETSAPRNLPFYERLGFTVTADVEVPEGPRTWCMTRKPGA

SEQ ID NO: 20800 - protein, 862 aa, synthetic construct
MALPVTALLLPLALLLHAARPELQSVLTQPPSASGTPGQRVTISCSGSSSNIGSNYVNWYQQLPGTAPKLLIYGDYQRPSGVPDRFSGSKSGTSASLAISGLRSEDEADYYCATRDDSLSGSVVFGTGTKLTVLGLEDLKNVFPPEVAVFEPSKAEIAHTQKATLVCLATGFYPDHVELSWWVNGKEVHSGVCTDPQPLKEQPALNDSRYCLSSRLRVSATFWQNPRNHFRCQVQFYGLSENDEWTQDRAKPVTQIVSAEAWGRADCGITSASYHQGVLSATILYEILLGKATLYAVLVSALVLMAMVKRKDSRGRAKRSGSGATNFSLLKQAGDVEENPGPTSMDWIWRILFLVGAATGAHSFEEVQLVQSGAEVKKPGESLKISCKGSGYGFTSYWIGWVRQMPGKGLEWMGIIHPDDSDTKYSPSFQGQVTISADKSISTAYLQWSSLKASDTAMYYCASSYLRGLWGGYFDFWGQGTLVTVSSTRIQNPDPAVYQLRDSKSSDKSVCLFTDFDSQTNVSQSKDSDVYITDKCVLDMRSMDFKSNSAVAWSNKSDFACANAFNNSIIPEDTFFPSSDVPCDVKLVEKSFETDTNLNFQNLSVIGFRILLLKVAGFNLLMTLRLWSSRAKRSGSGVKQTLNFDLLKLAGDVESNPGPSRGHMTEYKPTVRLATRDDVPRAVRTLAAAFADYPATRHTVDPDRHIERVTELQELFLTRVGLDIGKVWVADDGAAVAVWTTPESVEAGAVFAEIGPRMAELSGSRLAAQQQMEGLLAPHRPKEPAWFLATVGVSPDHQGKGLGSAVVLPGVEAAERAGVPAFLETSAPRNLPFYERLGFTVTADVEVPEGPRTWCMTRKPGA

SEQ ID NO: 20801 - protein, 629 aa, synthetic construct
MALPVTALLLPLALLLHAARPELQSVLTQPPSASGTPGQRVTISCSGSSSNIGSNYVNWYQQLPGTAPKLLIYGDYQRPSGVPDRFSGSKSGTSASLAISGLRSEDEADYYCATRDDSLSGSVVFGTGTKLTVLGLEDLKNVFPPEVAVFEPSEAEISHTQKATLVCLATGFYPDHVELSWWVNGKEVHSGVCTDPQPLKEQPALNDSRYCLSSRLRVSATFWQNPRNHFRCQVQFYGLSENDEWTQDRAKPVTQIVSAEAWGRADCGFTSESYQQGVLSATILYEILLGKATLYAVLVSALVLMAMVKRKDSRGRAKRSGSGATNFSLLKQAGDVEENPGPTSMDWIWRILFLVGAATGAHSFEEVQLVQSGAEVKKPGESLKISCKGSGYGFTSYWIGWVRQMPGKGLEWMGIIHPDDSDTKYSPSFQGQVTISADKSISTAYLQWSSLKASDTAMYYCASSYLRGLWGGYFDFWGQGTLVTVSSTRIQNPDPAVYQLRDSKSSDKSVCLFTDFDSQTNVSQSKDSDVYITDKCVLDMRSMDFKSNSAVAWSNKSDFACANAFNNSIIPEDTFFPSPESSCDVKLVEKSFETDTNLNFQNLSVIGFRILLLKVAGFNLLMTLRLWSS

SEQ ID NO: 20802 - protein, 854 aa, synthetic construct
MALPVTALLLPLALLLHAARPELQSVLTQPPSASGTPGQRVTISCSGSSSNIGSNYVNWYQQLPGTAPKLLIYGDYQRPSGVPDRFSGSKSGTSASLAISGLRSEDEADYYCATRDDSLSGSVVFGTGTKLTVLGLEDLKNVFPPEVAVFEPSEAEISHTQKATLVCLATGFYPDHVELSWWVNGKEVHSGVCTDPQPLKEQPALNDSRYCLSSRLRVSATFWQNPRNHFRCQVQFYGLSENDEWTQDRAKPVTQIVSAEAWGRADCGFTSESYQQGVLSATILYEILLGKATLYAVLVSALVLMAMVKRKDSRGRAKRSGSGATNFSLLKQAGDVEENPGPTSMDWIWRILFLVGAATGAHSFEEVQLVQSGAEVKKPGESLKISCKGSGYGFTSYWIGWVRQMPGKGLEWMGIIHPDDSDTKYSPSFQGQVTISADKSISTAYLQWSSLKASDTAMYYCASSYLRGLWGGYFDFWGQGTLVTVSSTRIQNPDPAVYQLRDSKSSDKSVCLFTDFDSQTNVSQSKDSDVYITDKCVLDMRSMDFKSNSAVAWSNKSDFACANAFNNSIIPEDTFFPSPESSCDVKLVEKSFETDTNLNFQNLSVIGFRILLLKVAGFNLLMTLRLWSSRAKRSGSGVKQTLNFDLLKLAGDVESNPGPSRGGIHTMATYEVLCEVARKLGTDDREVVLFLLNVFIPQPTLAQLIGALRALKEEGRLTFPLLAECLFRAGRRDLLRDLLHLDPRFLERHLAGTMSYFSPYQLTVLHVDGELCARDIRSLIFLSKDTIGSRSTPQTFLHWVYCMENLDLLGPTDVDALMSMLRSLSRVDLQRQVQTLMGLHLSGPSHSQHYRHTP

SEQ ID NO: 20803 - protein, 633 aa, synthetic construct
MALPVTALLLPLALLLHAARPELQSVLTQPPSASGTPGQRVTISCSGSSSNIGSNYVNWYQQLPGTAPKLLIYGDYQRPSGVPDRFSGSKSGTSASLAISGLRSEDEADYYCATRDDSLSGSVVFGTGTKLTVLGLEIQNPDPAVYQLRDSKSSDKSVCLFTDFDSQTNVSQSKDSDVYITDKCVLDMRSMDFKSNSAVAWSNKSDFACANAFNNSIIPEDTFFPSPESSCDVKLVEKSFETDTNLNFQNLSVIGFRILLLKVAGFNLLMTLRLWSSRAKRSGSGVKQTLNFDLLKLAGDVESNPGPTSMDWIWRILFLVGAATGAHSFEEVQLVQSGAEVKKPGESLKISCKGSGYGFTSYWIGWVRQMPGKGLEWMGIIHPDDSDTKYSPSFQGQVTISADKSISTAYLQWSSLKASDTAMYYCASSYLRGLWGGYFDFWGQGTLVTVSSTREDLKNVFPPEVAVFEPSEAEISHTQKATLVCLATGFYPDHVELSWWVNGKEVHSGVCTDPQPLKEQPALNDSRYCLSSRLRVSATFWQNPRNHFRCQVQFYGLSENDEWTQDRAKPVTQIVSAEAWGRADCGFTSESYQQGVLSATILYEILLGKATLYAVLVSALVLMAMVKRKDSRG

SEQ ID NO: 20804 - protein, 855 aa, synthetic construct
MALPVTALLLPLALLLHAARPELQSVLTQPPSASGTPGQRVTISCSGSSSNIGSNYVNWYQQLPGTAPKLLIYGDYQRPSGVPDRFSGSKSGTSASLAISGLRSEDEADYYCATRDDSLSGSVVFGTGTKLTVLGLEIQNPDPAVYQLRDSKSSDKSVCLFTDFDSQTNVSQSKDSDVYITDKCVLDMRSMDFKSNSAVAWSNKSDFACANAFNNSIIPEDTFFPSPESSCDVKLVEKSFETDTNLNFQNLSVIGFRILLLKVAGFNLLMTLRLWSSRAKRSGSGVKQTLNFDLLKLAGDVESNPGPTSMDWIWRILFLVGAATGAHSFEEVQLVQSGAEVKKPGESLKISCKGSGYGFTSYWIGWVRQMPGKGLEWMGIIHPDDSDTKYSPSFQGQVTISADKSISTAYLQWSSLKASDTAMYYCASSYLRGLWGGYFDFWGQGTLVTVSSTREDLKNVFPPEVAVFEPSEAEISHTQKATLVCLATGFYPDHVELSWWVNGKEVHSGVCTDPQPLKEQPALNDSRYCLSSRLRVSATFWQNPRNHFRCQVQFYGLSENDEWTQDRAKPVTQIVSAEAWGRADCGFTSESYQQGVLSATILYEILLGKATLYAVLVSALVLMAMVKRKDSRGRAKRSGSGATNFSLLKQAGDVEENPGPSRGGIHTMATYEVLCEVARKLGTDDREVVLFLLNVFIPQPTLAQLIGALRALKEEGRLTFPLLAECLFRAGRRDLLRDLLHLDPRFLERHLAGTMSYFSPYQLTVLHVDGELCARDIRSLIFLSKDTIGSRSTPQTFLHWVYCMENLDLLGPTDVDALMSMLRSLSRVDLQRQVQTLMGLHLSGPSHSQHYRHTP

SEQ ID NO: 20805 - protein, 907 aa, synthetic construct
MALPVTALLLPLALLLHAARPLEGKPIPNPLLGLDSTGSGEDLKNVFPPEVAVFEPSKAEIAHTQKATLVCLATGFYPDHVELSWWVNGKEVHSGVCTDPQPLKEQPALNDSRYCLSSRLRVSATFWQNPRNHFRCQVQFYGLSENDEWTQDRAKPVTQIVSAEAWGRADCGITSASYHQGVLSATILYEILLGKATLYAVLVSALVLMAMVKRKDSRGRAKRSGSGATNFSLLKQAGDVEENPGPTSMALPVTALLLPLALLLHAARPELQSVLTQPPSASGTPGQRVTISCSGSSSNIGSNYVNWYQQLPGTAPKLLIYGDYQRPSGVPDRFSGSKSGTSASLAISGLRSEDEADYYCATRDDSLSGSVVFGTGTKLTVLGGGGGSGGGGSGGGGSEVQLVQSGAEVKKPGESLKISCKGSGYGFTSYWIGWVRQMPGKGLEWMGIIHPDDSDTKYSPSFQGQVTISADKSISTAYLQWSSLKASDTAMYYCASSYLRGLWGGYFDFWGQGTLVTVSSTREQKLISEEDGSGIQNPDPAVYQLRDSKSSDKSVCLFTDFDSQTNVSQSKDSDVYITDKCVLDMRSMDFKSNSAVAWSNKSDFACANAFNNSIIPEDTFFPSSDVPCDVKLVEKSFETDTNLNFQNLSVIGFRILLLKVAGFNLLMTLRLWSSRAKRSGSGVKQTLNFDLLKLAGDVESNPGPSRGHMTEYKPTVRLATRDDVPRAVRTLAAAFADYPATRHTVDPDRHIERVTELQELFLTRVGLDIGKVWVADDGAAVAVWTTPESVEAGAVFAEIGPRMAELSGSRLAAQQQMEGLLAPHRPKEPAWFLATVGVSPDHQGKGLGSAVVLPGVEAAERAGVPAFLETSAPRNLPFYERLGFTVTADVEVPEGPRTWCMTRKPGA

SEQ ID NO: 20806 - protein, 908 aa, synthetic construct
MALPVTALLLPLALLLHAARPLEQKLISEEDLGSGDRPDPAVYQLRDSKSSDKSVCLFTDFDSQTNVSQSKDSDVYITDKCVLDMRSMDFKSNSAVAWSNKSDFACANAFNNSIIPEDTFFPSPESSCDVKLVEKSFETDTNLNFQNLSVIGFRILLLKVAGFNLLMTLRLWSSSSRAKRSGSGVKQTLNFDLLKLAGDVESNPGPTSMALPVTALLLPLALLLHAARPELQSVLTQPPSASGTPGQRVTISCSGSSSNIGSNYVNWYQQLPGTAPKLLIYGDYQRPSGVPDRFSGSKSGTSASLAISGLRSEDEADYYCATRDDSLSGSVVFGTGTKLTVLGGGGGSGGGGSGGGGSEVQLVQSGAEVKKPGESLKISCKGSGYGFTSYWIGWVRQMPGKGLEWMGIIHPDDSDTKYSPSFQGQVTISADKSISTAYLQWSSLKASDTAMYYCASSYLRGLWGGYFDFWGQGTLVTVSSTRGKPIPNPLLGLDSTGSGEDLKNVFPPEVAVFEPSEAEISHTQKATLVCLATGFYPDHVELSWWVNGKEVHSGVCTDPQPLKEQPALNDSRYCLSSRLRVSATFWQNPRNHFRCQVQFYGLSENDEWTQDRAKPVTQIVSAEAWGRADCGFTSESYQQGVLSATILYEILLGKATLYAVLVSALVLMAMVKRKDSRGRAKRSGSGATNFSLLKQAGDVEENPGPSRGHMTEYKPTVRLATRDDVPRAVRTLAAAFADYPATRHTVDPDRHIERVTELQELFLTRVGLDIGKVWVADDGAAVAVWTTPESVEAGAVFAEIGPRMAELSGSRLAAQQQMEGLLAPHRPKEPAWFLATVGVSPDHQGKGLGSAVVLPGVEAAERAGVPAFLETSAPRNLPFYERLGFTVTADVEVPEGPRTWCMTRKPGA

SEQ ID NO: 20807 - protein, 862 aa, synthetic construct
MALPVTALLLPLALLLHAARPELQSVLTQPPSASGTPGQRVTISCSGSSSNIGSNYVNWYQQLPGTAPKLLIYGDYQRPSGVPDRFSGSKSGTSASLAISGLRSEDEADYYCATRDDSLSGSVVFGTGTKLTVLGLEDLKNVFPPEVAVFEPSEAEISHTQKATLVCLATGFYPDHVELSWWVNGKEVHSGVSTDPQPLKEQPALNDSRYCLSSRLRVSATFWQNPRNHFRCQVQFYGLSENDEWTQDRAKPVTQIVSAEAWGRADCGFTSESYQQGVLSATILYEILLGKATLYAVLVSALVLMAMVKRKDSRGRAKRSGSGATNFSLLKQAGDVEENPGPTSMDWIWRILFLVGAATGAHSFEEVQLVQSGAEVKKPGESLKISCKGSGYGFTSYWIGWVRQMPGKGLEWMGIIHPDDSDTKYSPSFQGQVTISADKSISTAYLQWSSLKASDTAMYYCASSYLRGLWGGYFDFWGQGTLVTVSSTRIQNPDPAVYQLRDSKSSDKSVCLFTDFDSQTNVSQSKDSDVYITDKTVLDMRSMDFKSNSAVAWSNKSDFACANAFNNSIIPEDTFFPSPESSCDVKLVEKSFETDTNLNFQNLSVIGFRILLLKVAGFNLLMTLRLWSSRAKRSGSGVKQTLNFDLLKLAGDVESNPGPSRGHMTEYKPTVRLATRDDVPRAVRTLAAAFADYPATRHTVDPDRHIERVTELQELFLTRVGLDIGKVWVADDGAAVAVWTTPESVEAGAVFAEIGPRMAELSGSRLAAQQQMEGLLAPHRPKEPAWFLATVGVSPDHQGKGLGSAVVLPGVEAAERAGVPAFLETSAPRNLPFYERLGFTVTADVEVPEGPRTWCMTRKPGA

SEQ ID NO: 20808 - protein, 944 aa, synthetic construct
MALPVTALLLPLALLLHAARPELQSVLTQPPSASGTPGQRVTISCSGSSSNIGSNYVNWYQQLPGTAPKLLIYGDYQRPSGVPDRFSGSKSGTSASLAISGLRSEDEADYYCATRDDSLSGSVVFGTGTKLTVLGLEDLKNVFPPEVAVFEPSEAEISHTQKATLVCLATGFYPDHVELSWWVNGKEVHSGVSTDPQPLKEQPALNDSRYCLSSRLRVSATFWQNPRNHFRCQVQFYGLSENDEWTQDRAKPVTQIVSAEAWGRADCGFTSESYQQGVLSATILYEILLGKATLYAVLVSALVLMAMVKRKDSRGRAKRSGSGATNFSLLKQAGDVEENPGPTSMDWIWRILFLVGAATGAHSFEEVQLVQSGAEVKKPGESLKISCKGSGYGFTSYWIGWVRQMPGKGLEWMGIIHPDDSDTKYSPSFQGQVTISADKSISTAYLQWSSLKASDTAMYYCASSYLRGLWGGYFDFWGQGTLVTVSSTREQKLISEEDGSGTPFPSLAPPIMLLVDGKQQMVVVCLVLDVAPPGLDSPIWFSAGNGSALDAFTYGPSPATDGTWTNLAHLSLPSEELASWEPLVCHTGPGAEGHSRSTQPMHLSGEASTARTCPQEPLRGTPGGALWLGVLRLLLFKLLLFDLLLTCSCLCDPAGPLPSPATTTRLRALGSHRLHPATETGGREATSSPRPQPRDRRWGDTPPGRKPGSPVRAKRSGSGVKQTLNFDLLKLAGDVESNPGPSRGHMTEYKPTVRLATRDDVPRAVRTLAAAFADYPATRHTVDPDRHIERVTELQELFLTRVGLDIGKVWVADDGAAVAVWTTPESVEAGAVFAEIGPRMAELSGSRLAAQQQMEGLLAPHRPKEPAWFLATVGVSPDHQGKGLGSAVVLPGVEAAERAGVPAFLETSAPRNLPFYERLGFTVTADVEVPEGPRTWCMTRKPGA

SEQ ID NO: 20809 - protein, 962 aa, synthetic construct
MALPVTALLLPLALLLHAARPLEDLKNVFPPEVAVFEPSEAEISHTQKATLVCLATGFYPDHVELSWWVNGKEVHSGVSTDPQPLKEQPALNDSRYCLSSRLRVSATFWQNPRNHFRCQVQFYGLSENDEWTQDRAKPVTQIVSAEAWGRADCGFTSESYQQGVLSATILYEILLGKATLYAVLVSALVLMAMVKRKDSRGRAKRSGSGATNFSLLKQAGDVEENPGPTSMALPVTALLLPLALLLHAARPELQSVLTQPPSASGTPGQRVTISCSGSSSNIGSNYVNWYQQLPGTAPKLLIYGDYQRPSGVPDRFSGSKSGTSASLAISGLRSEDEADYYCATRDDSLSGSVVFGTGTKLTVLGGGGGSGGGGSGGGGSEVQLVQSGAEVKKPGESLKISCKGSGYGFTSYWIGWVRQMPGKGLEWMGIIHPDDSDTKYSPSFQGQVTISADKSISTAYLQWSSLKASDTAMYYCASSYLRGLWGGYFDFWGQGTLVTVSSTREQKLISEEDLGSGTPFPSLAPPIMLLVDGKQQMVVVCLVLDVAPPGLDSPIWFSAGNGSALDAFTYGPSPATDGTWTNLAHLSLPSEELASWEPLVCHTGPGAEGHSRSTQPMHLSGEASTARTCPQEPLRGTPGGALWLGVLRLLLFKLLLFDLLLTCSCLCDPAGPLPSPATTTRLRALGSHRLHPATETGGREATSSPRPQPRDRRWGDTPPGRKPGSPVRAKRSGSGVKQTLNFDLLKLAGDVESNPGPSRSRGHMTEYKPTVRLATRDDVPRAVRTLAAAFADYPATRHTVDPDRHIERVTELQELFLTRVGLDIGKVWVADDGAAVAVWTTPESVEAGAVFAEIGPRMAELSGSRLAAQQQMEGLLAPHRPKEPAWFLATVGVSPDHQGKGLGSAVVLPGVEAAERAGVPAFLETSAPRNLPFYERLGFTVTADVEVPEGPRTWCMTRKPGA

SEQ ID NO: 20810 - protein, 899 aa, synthetic construct
MALPVTALLLPLALLLHAARPELQSVLTQPPSASGTPGQRVTISCSGSSSNIGSNYVNWYQQLPGTAPKLLIYGDYQRPSGVPDRFSGSKSGTSASLAISGLRSEDEADYYCATRDDSLSGSVVFGTGTKLTVLGLEGKPIPNPLLGLDSTGSGDKQLDADVSPKPTIFLPSIAETKLQKAGTYLCLLEKFFPDVIKIHWQEKKSNTILGSQEGNTMKTNDTYMKFSWLTVPEKSLDKEHRCIVRHENNKNGVDQEIIFPPIKTDVITMDPKDNCSKDANDTLLLQLTNTSAYYMYLLLLLKSVVYFAIITCCLLRRTAFCCNGEKSRAKRSGSGATNFSLLKQAGDVEENPGPTSMDWIWRILFLVGAATGAHSFEEVQLVQSGAEVKKPGESLKISCKGSGYGFTSYWIGWVRQMPGKGLEWMGIIHPDDSDTKYSPSFQGQVTISADKSISTAYLQWSSLKASDTAMYYCASSYLRGLWGGYFDFWGQGTLVTVSSTREQKLISEEDGSGSQPHTKPSVFVMKNGTNVACLVKEFYPKDIRINLVSSKKITEFDPAIVISPSGKYNAVKLGKYEDSNSVTCSVQHDNKTVHSTDFEVKTDSTDHVKPKETENTKQPSKSCHKPKAIVHTEKVNMMSLTVLGLRMLFAKTVAVNFLLTAKLFFLRAKRSGSGVKQTLNFDLLKLAGDVESNPGPSRGHMTEYKPTVRLATRDDVPRAVRTLAAAFADYPATRHTVDPDRHIERVTELQELFLTRVGLDIGKVWVADDGAAVAVWTTPESVEAGAVFAEIGPRMAELSGSRLAAQQQMEGLLAPHRPKEPAWFLATVGVSPDHQGKGLGSAVVLPGVEAAERAGVPAFLETSAPRNLPFYERLGFTVTADVEVPEGPRTWCMTRKPGA

SEQ ID NO: 20811 - protein, 637 aa, synthetic construct
MALPVTALLLPLALLLHAARPELQSVLTQPPSASGTPGQRVTISCSGSSSNIGSNYVNWYQQLPGTAPKLLIYGDYQRPSGVPDRFSGSKSGTSASLAISGLRSEDEADYYCATRDDSLSGSVVFGTGTKLTVLGLESQPHTKPSVFVMKNGTNVACLVKEFYPKDIRINLVSSKKITEFDPAIVISPSGKYNAVKLGKYEDSNSVTCSVQHDNKTVHSTDFEVKTDSTDHVKPKETENTKQPSKSCHKPKAIVHTEKVNMMSLTVLGLRMLFAKTVAVNFLLTAKLFFLRAKRSGSGATNFSLLKQAGDVEENPGPTSMDWIWRILFLVGAATGAHSFEEVQLVQSGAEVKKPGESLKISCKGSGYGFTSYWIGWVRQMPGKGLEWMGIIHPDDSDTKYSPSFQGQVTISADKSISTAYLQWSSLKASDTAMYYCASSYLRGLWGGYFDFWGQGTLVTVSSTRDKQLDADVSPKPTIFLPSIAETKLQKAGTYLCLLEKFFPDVIKIHWQEKKSNTILGSQEGNTMKTNDTYMKFSWLTVPEKSLDKEHRCIVRHENNKNGVDQEIIFPPIKTDVITMDPKDNCSKDANDTLLLQLTNTSAYYMYLLLLLKSVVYFAIITCCLLRRTAFCCNGEKS

SEQ ID NO: 20812 - protein, 914 aa, synthetic construct
MALPVTALLLPLALLLHAARPLEGKPIPNPLLGLDSTGSGDKQLDADVSPKPTIFLPSIAETKLQKAGTYLCLLEKFFPDVIKIHWQEKKSNTILGSQEGNTMKTNDTYMKFSWLTVPEKSLDKEHRCIVRHENNKNGVDQEIIFPPIKTDVITMDPKDNCSKDANDTLLLQLTNTSAYYMYLLLLLKSVVYFAIITCCLLRRTAFCCNGEKSRAKRSGSGATNFSLLKQAGDVEENPGPTSMALPVTALLLPLALLLHAARPELQSVLTQPPSASGTPGQRVTISCSGSSSNIGSNYVNWYQQLPGTAPKLLIYGDYQRPSGVPDRFSGSKSGTSASLAISGLRSEDEADYYCATRDDSLSGSVVFGTGTKLTVLGGGGGSGGGGSGGGGSEVQLVQSGAEVKKPGESLKISCKGSGYGFTSYWIGWVRQMPGKGLEWMGIIHPDDSDTKYSPSFQGQVTISADKSISTAYLQWSSLKASDTAMYYCASSYLRGLWGGYFDFWGQGTLVTVSSTREQKLISEEDGSGSQPHTKPSVFVMKNGTNVACLVKEFYPKDIRINLVSSKKITEFDPAIVISPSGKYNAVKLGKYEDSNSVTCSVQHDNKTVHSTDFEVKTDSTDHVKPKETENTKQPSKSCHKPKAIVHTEKVNMMSLTVLGLRMLFAKTVAVNFLLTAKLFFLRAKRSGSGVKQTLNFDLLKLAGDVESNPGPSRGHMTEYKPTVRLATRDDVPRAVRTLAAAFADYPATRHTVDPDRHIERVTELQELFLTRVGLDIGKVWVADDGAAVAVWTTPESVEAGAVFAEIGPRMAELSGSRLAAQQQMEGLLAPHRPKEPAWFLATVGVSPDHQGKGLGSAVVLPGVEAAERAGVPAFLETSAPRNLPFYERLGFTVTADVEVPEGPRTWCMTRKPGA

SEQ ID NO: 20813 - protein, 1039 aa, synthetic construct
MALPVTALLLPLALLLHAARPELQSVLTQPPSASGTPGQRVTISCSGSSSNIGSNYVNWYQQLPGTAPKLLIYGDYQRPSGVPDRFSGSKSGTSASLAISGLRSEDEADYYCATRDDSLSGSVVFGTGTKLTVLGGQPKANPTVTLFPPSSEELQANKATLVCLISDFYPGAVTVAWKADGSPVKAGVETTKPSKQSNNKYAASSYLSLTPEQWKSHRSYSCQVTHEGSTVEKTVAPTECSGSQSFGLLDPKLCYLLDGILFIYGVILTALFLRVKFSRSADAPAYQQGQNQLYNELNLGRREEYDVLDKRRGRDPEMGGKPQRRKNPQEGLYNELQKDKMAEAYSEIGMKGERRRGKGHDGLYQGLSTATKDTYDALHMQALPPRRAKRSGSGATNFSLLKQAGDVEENPGPTSMDWIWRILFLVGAATGAHSFEEVQLVQSGAEVKKPGESLKISCKGSGYGFTSYWIGWVRQMPGKGLEWMGIIHPDDSDTKYSPSFQGQVTISADKSISTAYLQWSSLKASDTAMYYCASSYLRGLWGGYFDFWGQGTLVTVSSASTKGPSVFPLAPSSKSTSGGTAALGCLVKDYFPEPVTVSWNSGALTSGVHTFPAVLQSSGLYSLSSVVTVPSSSLGTQTYICNVNHKPSNTKVDKRVEPKSCGTQSFGLLDPKLCYLLDGILFIYGVILTALFLRVKFSRSADAPAYQQGQNQLYNELNLGRREEYDVLDKRRGRDPEMGGKPQRRKNPQEGLYNELQKDKMAEAYSEIGMKGERRRGKGHDGLYQGLSTATKDTYDALHMQALPPRRAKRSGSGVKQTLNFDLLKLAGDVESNPGPSRGHMTEYKPTVRLATRDDVPRAVRTLAAAFADYPATRHTVDPDRHIERVTELQELFLTRVGLDIGKVWVADDGAAVAVWTTPESVEAGAVFAEIGPRMAELSGSRLAAQQQMEGLLAPHRPKEPAWFLATVGVSPDHQGKGLGSAVVLPGVEAAERAGVPAFLETSAPRNLPFYERLGFTVTADVEVPEGPRTWCMTRKPGA

SEQ ID NO: 20814 - protein, 825 aa, synthetic construct
MALPVTALLLPLALLLHAARPELQSVLTQPPSASGTPGQRVTISCSGSSSNIGSNYVNWYQQLPGTAPKLLIYGDYQRPSGVPDRFSGSKSGTSASLAISGLRSEDEADYYCATRDDSLSGSVVFGTGTKLTVLGLEDLKNVFPPEVAVFEPSEAEISHTQKATLVCLATGFYPDHVELSWWVNGKEVHSGVSTDPQPLKEQPALNDSRYCLSSRLRVSATFWQNPRNHFRCQVQFYGLSENDEWTQDRAKPVTQIVSAEAWGRADCGSQSFGLLDPKLCYLLDGILFIYGVILTALFLRVKFSRSADAPAYQQGQNQLYNELNLGRREEYDVLDKRRGRDPEMGGKPQRRKNPQEGLYNELQKDKMAEAYSEIGMKGERRRGKGHDGLYQGLSTATKDTYDALHMQALPPRRAKRSGSGATNFSLLKQAGDVEENPGPTSMDWIWRILFLVGAATGAHSFEEVQLVQSGAEVKKPGESLKISCKGSGYGFTSYWIGWVRQMPGKGLEWMGIIHPDDSDTKYSPSFQGQVTISADKSISTAYLQWSSLKASDTAMYYCASSYLRGLWGGYFDFWGQGTLVTVSSTRIQNPDPAVYQLRDSKSSDKSVCLFTDFDSQTNVSQSKDSDVYITDKTVLDMRSMDFKSNSAVAWSNKSDFACANAFNNSIIPEDTFFPSPESSCGTQSFGLLDPKLCYLLDGILFIYGVILTALFLRVKFSRSADAPAYQQGQNQLYNELNLGRREEYDVLDKRRGRDPEMGGKPQRRKNPQEGLYNELQKDKMAEAYSEIGMKGERRRGKGHDGLYQGLSTATKDTYDALHMQALPPR

SEQ ID NO: 20815 - protein, 825 aa, synthetic construct
MALPVTALLLPLALLLHAARPELQSVLTQPPSASGTPGQRVTISCSGSSSNIGSNYVNWYQQLPGTAPKLLIYGDYQRPSGVPDRFSGSKSGTSASLAISGLRSEDEADYYCATRDDSLSGSVVFGTGTKLTVLGLEDLKNVFPPEVAVFEPSKAEIAHTQKATLVCLATGFYPDHVELSWWVNGKEVHSGVCTDPQPLKEQPALNDSRYCLSSRLRVSATFWQNPRNHFRCQVQFYGLSENDEWTQDRAKPVTQIVSAEAWGRADCGSQSFGLLDPKLCYLLDGILFIYGVILTALFLRVKFSRSADAPAYQQGQNQLYNELNLGRREEYDVLDKRRGRDPEMGGKPQRRKNPQEGLYNELQKDKMAEAYSEIGMKGERRRGKGHDGLYQGLSTATKDTYDALHMQALPPRRAKRSGSGATNFSLLKQAGDVEENPGPTSMDWIWRILFLVGAATGAHSFEEVQLVQSGAEVKKPGESLKISCKGSGYGFTSYWIGWVRQMPGKGLEWMGIIHPDDSDTKYSPSFQGQVTISADKSISTAYLQWSSLKASDTAMYYCASSYLRGLWGGYFDFWGQGTLVTVSSTRIQNPDPAVYQLRDSKSSDKSVCLFTDFDSQTNVSQSKDSDVYITDKCVLDMRSMDFKSNSAVAWSNKSDFACANAFNNSIIPEDTFFPSSDVPCGTQSFGLLDPKLCYLLDGILFIYGVILTALFLRVKFSRSADAPAYQQGQNQLYNELNLGRREEYDVLDKRRGRDPEMGGKPQRRKNPQEGLYNELQKDKMAEAYSEIGMKGERRRGKGHDGLYQGLSTATKDTYDALHMQALPPR

SEQ ID NO: 20816 - protein, 896 aa, synthetic construct
MALPVTALLLPLALLLHAARPELQSVLTQPPSASGTPGQRVTISCSGSSSNIGSNYVNWYQQLPGTAPKLLIYGDYQRPSGVPDRFSGSKSGTSASLAISGLRSEDEADYYCATRDDSLSGSVVFGTGTKLTVLGLEGKPIPNPLLGLDSTGSGEDLKNVFPPEVAVFEPSEAEISHTQKATLVCLATGFYPDHVELSWWVNGKEVHSGVSTDPQPLKEQPALNDSRYCLSSRLRVSATFWQNPRNHFRCQVQFYGLSENDEWTQDRAKPVTQIVSAEAWGRADCGSQSFGLLDPKLCYLLDGILFIYGVILTALFLRVKFSRSADAPAYQQGQNQLYNELNLGRREEYDVLDKRRGRDPEMGGKPQRRKNPQEGLYNELQKDKMAEAYSEIGMKGERRRGKGHDGLYQGLSTATKDTYDALHMQALPPRRAKRSGSGATNFSLLKQAGDVEENPGPTSMDWIWRILFLVGAATGAHSFEEVQLVQSGAEVKKPGESLKISCKGSGYGFTSYWIGWVRQMPGKGLEWMGIIHPDDSDTKYSPSFQGQVTISADKSISTAYLQWSSLKASDTAMYYCASSYLRGLWGGYFDFWGQGTLVTVSSTREQKLISEEDGSGIQNPDPAVYQLRDSKSSDKSVCLFTDFDSQTNVSQSKDSDVYITDKTVLDMRSMDFKSNSAVAWSNKSDFACANAFNNSIIPEDTFFPSPESSCGTQSFGLLDPKLCYLLDGILFIYGVILTALFLRSKRSRLLHSDYMNMTPRRPGPTRKHYQPYAPPRDFAAYRSRVKFSRSADAPAYQQGQNQLYNELNLGRREEYDVLDKRRGRDPEMGGKPQRRKNPQEGLYNELQKDKMAEAYSEIGMKGERRRGKGHDGLYQGLSTATKDTYDALHMQALPPR

SEQ ID NO: 20817 - protein, 937 aa, synthetic construct
MALPVTALLLPLALLLHAARPELQSVLTQPPSASGTPGQRVTISCSGSSSNIGSNYVNWYQQLPGTAPKLLIYGDYQRPSGVPDRFSGSKSGTSASLAISGLRSEDEADYYCATRDDSLSGSVVFGTGTKLTVLGLEGKPIPNPLLGLDSTGSGEDLKNVFPPEVAVFEPSEAEISHTQKATLVCLATGFYPDHVELSWWVNGKEVHSGVSTDPQPLKEQPALNDSRYCLSSRLRVSATFWQNPRNHFRCQVQFYGLSENDEWTQDRAKPVTQIVSAEAWGRADCGSQSFGLLDPKLCYLLDGILFIYGVILTALFLRSKRSRLLHSDYMNMTPRRPGPTRKHYQPYAPPRDFAAYRSRVKFSRSADAPAYQQGQNQLYNELNLGRREEYDVLDKRRGRDPEMGGKPQRRKNPQEGLYNELQKDKMAEAYSEIGMKGERRRGKGHDGLYQGLSTATKDTYDALHMQALPPRRAKRSGSGATNFSLLKQAGDVEENPGPTSMDWIWRILFLVGAATGAHSFEEVQLVQSGAEVKKPGESLKISCKGSGYGFTSYWIGWVRQMPGKGLEWMGIIHPDDSDTKYSPSFQGQVTISADKSISTAYLQWSSLKASDTAMYYCASSYLRGLWGGYFDFWGQGTLVTVSSTREQKLISEEDGSGIQNPDPAVYQLRDSKSSDKSVCLFTDFDSQTNVSQSKDSDVYITDKTVLDMRSMDFKSNSAVAWSNKSDFACANAFNNSIIPEDTFFPSPESSCGTQSFGLLDPKLCYLLDGILFIYGVILTALFLRSKRSRLLHSDYMNMTPRRPGPTRKHYQPYAPPRDFAAYRSRVKFSRSADAPAYQQGQNQLYNELNLGRREEYDVLDKRRGRDPEMGGKPQRRKNPQEGLYNELQKDKMAEAYSEIGMKGERRRGKGHDGLYQGLSTATKDTYDALHMQALPPR

SEQ ID NO: 20818 - protein, 898 aa, synthetic construct
MALPVTALLLPLALLLHAARPELQSVLTQPPSASGTPGQRVTISCSGSSSNIGSNYVNWYQQLPGTAPKLLIYGDYQRPSGVPDRFSGSKSGTSASLAISGLRSEDEADYYCATRDDSLSGSVVFGTGTKLTVLGLEGKPIPNPLLGLDSTGSGEDLKNVFPPEVAVFEPSEAEISHTQKATLVCLATGFYPDHVELSWWVNGKEVHSGVSTDPQPLKEQPALNDSRYCLSSRLRVSATFWQNPRNHFRCQVQFYGLSENDEWTQDRAKPVTQIVSAEAWGRADCGSQSFGLLDPKLCYLLDGILFIYGVILTALFLRVKFSRSADAPAYQQGQNQLYNELNLGRREEYDVLDKRRGRDPEMGGKPQRRKNPQEGLYNELQKDKMAEAYSEIGMKGERRRGKGHDGLYQGLSTATKDTYDALHMQALPPRRAKRSGSGATNFSLLKQAGDVEENPGPTSMDWIWRILFLVGAATGAHSFEEVQLVQSGAEVKKPGESLKISCKGSGYGFTSYWIGWVRQMPGKGLEWMGIIHPDDSDTKYSPSFQGQVTISADKSISTAYLQWSSLKASDTAMYYCASSYLRGLWGGYFDFWGQGTLVTVSSTREQKLISEEDLGSGIQNPDPAVYQLRDSKSSDKSVCLFTDFDSQTNVSQSKDSDVYITDKTVLDMRSMDFKSNSAVAWSNKSDFACANAFNNSIIPEDTFFPSPESSCGTQSFGLLDPKLCYLLDGILFIYGVILTALFLKRGRKKLLYIFKQPFMRPVQTTQEEDGCSCRFPEEEEGGCELRVKFSRSADAPAYQQGQNQLYNELNLGRREEYDVLDKRRGRDPEMGGKPQRRKNPQEGLYNELQKDKMAEAYSEIGMKGERRRGKGHDGLYQGLSTATKDTYDALHMQALPPR
